United States Patent Application Publication US 2021/0199660 A1 - sequence listing, part 5

SEQ ID NO: 57191 - DNA, 120 bp, Artificial Sequence
  ENSG00000070614_11 (sequence is synthesized)
ctgtttggcaacaacctgaacttctggctgcacaagcttgtcttcgtggatgccgtggccttcctcacggggaagcgcctctccctgccattggaccgctacatcctggtggacattgat

SEQ ID NO: 57192 - DNA, 120 bp, Artificial Sequence
  ENSG00000070614_12 (sequence is synthesized)
gacatcttcgtgggcaaggagggcacacgcatgaaggtggaggacgtgaaggccctgtttgacacacagaacgaactacgcgcacacatcccaaacttcaccttcaacctgggctactca

SEQ ID NO: 57193 - DNA, 120 bp, Artificial Sequence
  ENSG00000070614_13 (sequence is synthesized)
gggaaattcttccacacaggtaccaatgctgaggacgctggggatgatctgctgctgtcgtatgtgaaggagttctggtggttcccccacatgtggagccacatgcagccccaccttttc

SEQ ID NO: 57194 - DNA, 120 bp, Artificial Sequence
  ENSG00000070614_14 (sequence is synthesized)
cacaaccagtccgtgttggccgagcagatggccttgaacaagaagttcgctgtcgagcatggcattcccacagacatggggtatgcagtggcgccccaccactcgggcgtgtaccccgtg

SEQ ID NO: 57195 - DNA, 120 bp, Artificial Sequence
  ENSG00000070614_15 (sequence is synthesized)
cacgtgcagctgtacgaggcttggaagcaggtgtggagcatccgcgtgaccagcacggaggagtacccccacctgaagccagcccgctaccgccgtggcttcatccacaatggcatcatg

SEQ ID NO: 57196 - DNA, 120 bp, Artificial Sequence
  ENSG00000070614_16 (sequence is synthesized)
gttctcccacggcagacctgcggcctcttcacacacaccatcttctacaacgagtaccctggcggctccagtgagctggacaagatcatcaacgggggcgagctcttcctcaccgtgctc

SEQ ID NO: 57197 - DNA, 120 bp, Artificial Sequence
  ENSG00000070614_17 (sequence is synthesized)
ctcaatcctatcagcatcttcatgacgcacctgtccaactatgggaatgaccgcctgggcctgtacaccttcaagcacctggtgcgcttcctgcactcctggacgaacctccggctgcag

SEQ ID NO: 57198 - DNA, 120 bp, Artificial Sequence
  ENSG00000070614_18 (sequence is synthesized)
acactgccccctgtgcagttggcgcagaagtacttccagatcttctccgaggagaaggacccgctctggcaggacccctgcgaggacaaacgtcacaaagacatctggtccaaggagaag

SEQ ID NO: 57199 - DNA, 120 bp, Artificial Sequence
  ENSG00000070614_19 (sequence is synthesized)
acgtgtgaccgcttcccaaagctcctcatcatcggcccccagaaaacaggcaccactgccctctacctgttcctgggcatgcaccctgacctaagcagcaactaccccagctctgagacc

SEQ ID NO: 57200 - DNA, 120 bp, Artificial Sequence
  ENSG00000070614_20 (sequence is synthesized)
tttgaggagatccagttttttaatggccacaactatcacaaaggcatcgactggtacatggagttcttccccatcccttccaacaccacctccgacttctactttgagaaaagcgccaac

SEQ ID NO: 57201 - DNA, 120 bp, Artificial Sequence
  ENSG00000070614_21 (sequence is synthesized)
tactttgattcagaagtggcgccccggcgggcagcagccctcttgcccaaagccaaggtcctgaccatcctcatcaaccccgcggaccgggcctattcctggtaccagcaccagcgagcc

SEQ ID NO: 57202 - DNA, 120 bp, Artificial Sequence
  ENSG00000070614_22 (sequence is synthesized)
catgacgacccagtggccctaaagtacaccttccatgaggtgattaccgccggctctgacgcatcctcgaagctgcgtgccctccagaaccgctgcctggtccctggctggtacgccacc

SEQ ID NO: 57203 - DNA, 120 bp, Artificial Sequence
  ENSG00000070614_23 (sequence is synthesized)
cacatcgagcgctggctcagtgcctatcacgccaaccagattctggtcttggatggcaaactgcttcgcacagaacctgccaaagtgatggacatggtgcagaagttccttggggtgacc

SEQ ID NO: 57204 - DNA, 120 bp, Artificial Sequence
  ENSG00000070614_24 (sequence is synthesized)
aacaccattgactaccacaaaaccttggcgtttgatccaaagaaaggattttggtgccaactgcttgaaggaggaaaaaccaagtgtctgggcaaaagcaagggccggaaatatcccgag

SEQ ID NO: 57205 - DNA, 120 bp, Artificial Sequence
  ENSG00000070614_25 (sequence is synthesized)
atggacttggattcccgagccttcctgaaggactattaccgggaccacaacatcgagctctccaagctgctgtataagatgggccagacacttcccacttggctacgagaggacctccag

SEQ ID NO: 57206 - DNA, 120 bp, Artificial Sequence
  ENSG00000070614_26 (sequence is synthesized)
aacaccaggtagccgtggccaccacagccagactgaacgtttgtgaaagctgggacatcccaccacacgctgagccagacctgcagagtgggaagctggaccagggcagctgcgcactta

SEQ ID NO: 57207 - DNA, 120 bp, Artificial Sequence
  ENSG00000070614_27 (sequence is synthesized)
tgagcaatactctgtggaggtctggtggggctgggggagcacccaggcggatctgcaagcacctcggagcacccaccgctgggtctgcggcctaagggacctccctcgccagcagaggtc

SEQ ID NO: 57208 - DNA, 120 bp, Artificial Sequence
  ENSG00000070614_28 (sequence is synthesized)
cattccgttcccagctgctcctggggaggccgcttcctggtaggagggagtccacgagactcttttctgtccctcactgtgttccgccgactgtcccctctcgtcacccatcactccctg

SEQ ID NO: 57209 - DNA, 120 bp, Artificial Sequence
  ENSG00000070614_29 (sequence is synthesized)
cttccgcagggcgcccctcagtattcgctgccatatgtccctgtcctccaggctgtaggggaggagagcctggccgggggagacagactggacatttccctgtttcgagccaggctcttc

SEQ ID NO: 57210 - DNA, 120 bp, Artificial Sequence
  ENSG00000070614_30 (sequence is synthesized)
caaggggccagctgggtccccggagtcagtcctaggctggatgggagggtggccccctcaagaggactcccagcctccacatctggttcctaccttcacatctcaccctcccgttctggg

SEQ ID NO: 57211 - DNA, 120 bp, Artificial Sequence
  ENSG00000070614_31 (sequence is synthesized)
gaagaatttctggttcctacagtatccactccatcctcaaggcttcccgcagggccttggggcactgccttgccatcgggcccagttctccgggccccacctgcacccctttcttccccc

SEQ ID NO: 57212 - DNA, 120 bp, Artificial Sequence
  ENSG00000070614_32 (sequence is synthesized)
tgggatatgatgtgtggtgtttcctgtggtaaaagactgaggcaggccaggggtctgccagtaacatgttcccatgtacagacacggtccccacaccctcccagcctcaggcccaggcag

SEQ ID NO: 57213 - DNA, 120 bp, Artificial Sequence
  ENSG00000070614_33 (sequence is synthesized)
taagaagctaaaatattttaatattttgtttttttttttcttggtgccagagtttataccctgggtgctggggtcgcactgtgttatatatatatatatatatatataatgtgtatatat

SEQ ID NO: 57214 - DNA, 120 bp, Artificial Sequence
  ENSG00000070614_34 (sequence is synthesized)
atatattctattttttttggttgggttcgtttttaattcagtcctacaaaatggtggtaagccccagtctcaggggtcaccctgtcttagagctagagatgaggtggcagggagggaggc

SEQ ID NO: 57215 - DNA, 120 bp, Artificial Sequence
  ENSG00000070614_35 (sequence is synthesized)
tgtgtcctcagtggcctggggctgagcagaccttaggaaggggccctccccagtgccgtggctgctctggggctaccccaggtgaacagaggtggtgagatgcgcagggaagaccagctc

SEQ ID NO: 57216 - DNA, 120 bp, Artificial Sequence
  ENSG00000070614_36 (sequence is synthesized)
tctccaggacatcgggctgcgtgaagtccagtgaccctgaggggattttggccaaaggaaacagccagggctgggctaggagagctggggtcaaaagctgccccacccactctccctcac

SEQ ID NO: 57217 - DNA, 120 bp, Artificial Sequence
  ENSG00000070614_37 (sequence is synthesized)
atggtgctaggctgggagctgccctgagagctgggatgcccaccaaggcccacagaactgtctccaggcccttgtagacagtgggatctctgggctgatttctggttggggtctgctcct

SEQ ID NO: 57218 - DNA, 120 bp, Artificial Sequence
  ENSG00000070614_38 (sequence is synthesized)
accccaccccatttaacaatgtgaagtgactgaggctggggtgcctctccctggccccctccaactgccaaattctgcttccctctgaaccccaggaaatactttctggagaggcttgtc

SEQ ID NO: 57219 - DNA, 120 bp, Artificial Sequence
  ENSG00000070614_39 (sequence is synthesized)
ttgttcagaagactctagcatcttggggctggaaggtcctttgacgggtatgaaacaggtccagaaaggggaggtggcctgcttggccgacgtcatggagccagctgggagcagggctga

SEQ ID NO: 57220 - DNA, 120 bp, Artificial Sequence
  ENSG00000070614_40 (sequence is synthesized)
gcgttgaacccgaggctcccggttccaagtcccatcgtgctcctcttccaatgccacactgcctctgagcccatccttgggaccctactctgtgccaggttcctgtcccttcctccgtca

SEQ ID NO: 57221 - DNA, 120 bp, Artificial Sequence
  ENSG00000070614_41 (sequence is synthesized)
cagcatggtcattccaggatatggggacaaaccactccttcccagccagggtgcctttgagccttctcattccgaggtctgcgtttgcatccctgtcgtgttctccctcgaggggtcctt

SEQ ID NO: 57222 - DNA, 120 bp, Artificial Sequence
  ENSG00000070614_42 (sequence is synthesized)
ccccagcctgtgggggcctgggtctgttctgagctgattcccttttctccagttctctgctgggatgaagaaagttggacactcagtgggaccagctgcaggtggtttcactgtgtacac

SEQ ID NO: 57223 - DNA, 120 bp, Artificial Sequence
  ENSG00000070614_43 (sequence is synthesized)
agcagtgtccccatcatgcctctcaatggggcctgcaagcctgggaacttgggcatcgttgggccagcaggatgagcagcaaagggtctgaggacagggtggcatgtctgcttgtgtgct

SEQ ID NO: 57224 - DNA, 120 bp, Artificial Sequence
  ENSG00000070614_44 (sequence is synthesized)
catgaagacatgcccacgccatggagccaggggcttatagagaggggcagtgacttccagagtcccatccgtcagtgaggggactgggctgcgggatgggtgaggatcttacagctccca

SEQ ID NO: 57225 - DNA, 120 bp, Artificial Sequence
  ENSG00000070614_45 (sequence is synthesized)
ggttcggaaatctaccctctaggcctggaggcctctctcgcagagcatggaaggcaggagaggtgggctggcctagggcaggagctccacttctctctgcctctggctatgggaaggagc

SEQ ID NO: 57226 - DNA, 120 bp, Artificial Sequence
  ENSG00000070614_46 (sequence is synthesized)
aggcggttggaaatcctgtgacagcagagatcttctggatttttgcctggacccttctgcaagcctggagactggacctgccacatgttccaagtctgtctgcctaggtcactgctgcca

SEQ ID NO: 57227 - DNA, 120 bp, Artificial Sequence
  ENSG00000070614_47 (sequence is synthesized)
cttctcctcccactaacagacctttcttgaagacccactaggtccagacactgccgggacttgcaggtatggggggtagaaggagaggcagataagctgcctggggggctgttagctaat

SEQ ID NO: 57228 - DNA, 120 bp, Artificial Sequence
  ENSG00000070614_48 (sequence is synthesized)
gggtacaaggacaccccctcccgagaagagaagccacagatgagtgggccagcgaggccagtcttcaatgtccactaattcactctaagcatttggccaaaaaaaggagagagaaataac

SEQ ID NO: 57229 - DNA, 120 bp, Artificial Sequence
  ENSG00000070614_49 (sequence is synthesized)
tgaaattgttcaggtggctccatcgtctattctgtggtcccctccatgagcctttgccccagggtgggtgcaggtgcgagtgtcacctgcagctgcctcagtcattcagagttccagagc

SEQ ID NO: 57230 - DNA, 120 bp, Artificial Sequence
  ENSG00000070614_50 (sequence is synthesized)
cttctgtggtggagcatcctgctgcttggaggatgagtctgaagtttaaaaatgggccttttctgagcccccctgatgagcagtcagtgcttctgggcccagctaaggaagccatctgtt

SEQ ID NO: 57231 - DNA, 120 bp, Artificial Sequence
  ENSG00000070614_51 (sequence is synthesized)
cccagcagaggagagctgctgcgctgacctgcagaggttggtggtcccagcacagagctgtgcccatgggcttgttagtgggaaaagcaaatacaacaatgttttaccaaacatttaatt

SEQ ID NO: 57232 - DNA, 120 bp, Artificial Sequence
  ENSG00000070614_52 (sequence is synthesized)
atgaatgcccactccccagcatctagatctaaaattattaacattttgccacattctttttctctctctgtgtatgtatatgttttctctgtcctaatttaaaagtacattgcaaacatc

SEQ ID NO: 57233 - DNA, 120 bp, Artificial Sequence
  ENSG00000070614_53 (sequence is synthesized)
atgaaacttgatccctgaaagcttcagcctgcatctcctaagagttagggcattgtcctacacattggcccagtatcacagccaagacgagaagtcatttcccagcgatgtctgctatct

SEQ ID NO: 57234 - DNA, 120 bp, Artificial Sequence
  ENSG00000070614_54 (sequence is synthesized)
aatctgtattcaaatccccccaattgtctcccaggtaacttatgtgtctggttttggaatcagcatccagtcacggtgcacacattgcattttctaactatgtttttaaaacctctttga

SEQ ID NO: 57235 - DNA, 120 bp, Artificial Sequence
  ENSG00000070614_55 (sequence is synthesized)
atgctgaaaggtcttccctcagctcactttgagtttttaaatgacattgtttttgaggccctaggcctgctgtctttttgaagccccacattctgaatttgtcagattgtttgctcatgg

SEQ ID NO: 57236 - DNA, 120 bp, Artificial Sequence
  ENSG00000070614_56 (sequence is synthesized)
tgtcgcataaccacttcttctatcccctgtactttcaaggataatttaggctacatgagattttgccttttgtgctgacttgacagcttcacttctgcctaagatgcgcctccactgtca

SEQ ID NO: 57237 - DNA, 120 bp, Artificial Sequence
  ENSG00000070614_57 (sequence is synthesized)
cctgtaccaagtgccaaaacagcagaggggccagttagagcaagagctctgggggggccggaaagtctccctggagaaggccgtaatatctgggccttggaaggaaggacacagggctct

SEQ ID NO: 57238 - DNA, 120 bp, Artificial Sequence
  ENSG00000070614_58 (sequence is synthesized)
ggaaggaggaggctgcatgcctgaaggctgggccttcgaccctggggatgggccacagggcaccaaacacatcatatgtctctctctttctattttggggtcccagggttttcatttcct

SEQ ID NO: 57239 - DNA, 120 bp, Artificial Sequence
  ENSG00000070614_59 (sequence is synthesized)
ggagacccgtggtctgtgtgcactggagcagagccaggctctcagttgcagcagggaaaagcctacatggggaactgcctcccgcaagctgtggtgtgagaagagccctggctggcagca

SEQ ID NO: 57240 - DNA, 120 bp, Artificial Sequence
  ENSG00000070614_60 (sequence is synthesized)
ggagctgtgaagtttcatcccagccgggtgcatttagtagctgcctgaccatcttcctcccaggccctcagtttcttcatctgtagaatgagcagataggggccacagcagggattttca

SEQ ID NO: 57241 - DNA, 120 bp, Artificial Sequence
  ENSG00000070614_61 (sequence is synthesized)
cacatcaaaggaggcagcctctgctctagttgatgtgaggatgagggggcggcctagaccccctgctgcccaggccgttgaggcaacactgggttcctggcttgacagctgtgggctggc

SEQ ID NO: 57242 - DNA, 120 bp, Artificial Sequence
  ENSG00000070614_62 (sequence is synthesized)
tgcccttgccagctcagacggctggcgagttttcagcttccctaagggactggcatagggttttgtggggtcaatgccaggaacctgggggaaactggatgcgttttatcctaagaagtt

SEQ ID NO: 57243 - DNA, 120 bp, Artificial Sequence
  ENSG00000070614_63 (sequence is synthesized)
catccctcctgctcttactgtttccggccctggaggagaatgagggaggagagggttttctatgactgtgttagcttttattattagcaagagggctccttttgtaatttgtgcatgaaa

SEQ ID NO: 57244 - DNA, 120 bp, Artificial Sequence
  ENSG00000070614_64 (sequence is synthesized)
ttcatgtcatttcctgggagaggagagggccgactggagagggtggggggcacactggggaagcaggcagaggtttccttcccttgtaggggggtggggagagtggggagagggggtgct

SEQ ID NO: 57245 - DNA, 120 bp, Artificial Sequence
  ENSG00000070614_65 (sequence is synthesized)
atccagttcgcctgatgagggctctcgaaccagccgttttgggttgtgttaaaggtgagaccttcctccattaatgtacaatctcgaactaactgctaataaagtggggttctgtttgta

SEQ ID NO: 57246 - DNA, 120 bp, Artificial Sequence
  ENSG00000070614_66 (sequence is synthesized)
gattcattctgttctcccggccccgaagggatgacgaggccctgagcaccgatccatgcccacgcctgtggatgaaagctgatatgaggaggcccaggggacctgagggagtcggctccc

SEQ ID NO: 57247 - DNA, 120 bp, Artificial Sequence
  ENSG00000070614_67 (sequence is synthesized)
tcatagacacttttccctccagctgggcataccagtccttcctcttcttctcaggacaggtgcagccgtgttaaggagaggacattcgagagggcgtggcgaagtgaagaggaacctcac

SEQ ID NO: 57248 - DNA, 90 bp, Artificial Sequence
  ENSG00000070614_68 (sequence is synthesized)
gacattcgagagggcgtggcgaagtgaagaggaacctcacgccactgcctggagctccgatagagtctcgctctgtcgcccaggctgccc

SEQ ID NO: 57249 - DNA, 120 bp, Artificial Sequence
  ENSG00000070614_69 (sequence is synthesized)
gtgatcgtgacctgtccattcccaccagtgcaggggtccatgagcccccaaaggtgcagtgagttgtaggcatttctgtgttttctttttctgaagaaagagtttgttggtttcatcaga

SEQ ID NO: 57250 - DNA, 120 bp, Artificial Sequence
  ENSG00000070614_70 (sequence is synthesized)
tcatcagaaggctgggtgtccctgtggagtgctgacggggccgtgtgcactgcgggcttgagaaatggtggcagcgtggtgcaaatagaaagtagcctggtggcagtgtagcatcctggg

SEQ ID NO: 57251 - DNA, 120 bp, Artificial Sequence
  ENSG00000070614_71 (sequence is synthesized)
gggagaatccgggtggaagtcgagaaatccagccccgatagcagcgctcggtcccgccccggcccccgccccggggcgctcaccgcacgcccgccggccgccccggcctccggagctctt

SEQ ID NO: 57252 - DNA, 120 bp, Artificial Sequence
  ENSG00000070614_72 (sequence is synthesized)
aggaaaaggaaacacaaatgttgttgacagttaataaccgtactcactcagaacctggtgcaagtgcgttgagaatgccctcccactatgagtaaaggcctgcccgcattgcatgggctc

SEQ ID NO: 57253 - DNA, 120 bp, Artificial Sequence
  ENSG00000070614_73 (sequence is synthesized)
agggctaggaaaggctgctttcctgtgctatgtcacagataagtgacacactcagctggatgaggggaccccaagagaaggaggaatcaagtcaccctccttggctccattcttgggaaa

SEQ ID NO: 57254 - DNA, 120 bp, Artificial Sequence
  ENSG00000070614_74 (sequence is synthesized)
caacaagaatattccgtcttcactgtcgtgggagttgaaggtggagaagggaagtcagtccttcaccttgagggagaaggggccacctgctgaggctgtgggccatggtgtcagagatgc

SEQ ID NO: 57255 - DNA, 120 bp, Artificial Sequence
  ENSG00000070614_75 (sequence is synthesized)
ctgggttagggccccacatccatctcttcagcctttcaagcctcgctttcctcatctgtaagttggggataaagataataatccctgcgtcctgaaggccactgaattgaatgaaagctt

SEQ ID NO: 57256 - DNA, 120 bp, Artificial Sequence
  ENSG00000070669_0 (sequence is synthesized)
agtcctgctccgccccggacaccccgcggccccgcccctgtgcgcgctggttggtcctcgcaggcatgatgaaacttcccgcacgcgttacaggagccaggtcggtataagcgccagcgg

SEQ ID NO: 57257 - DNA, 120 bp, Artificial Sequence
  ENSG00000070669_1 (sequence is synthesized)
cctcgccgcccgtcaagctgtccacatccctggcctcagcccgccacatcaccctgacctgcttacgcccagcctgtggacattttcgcggtccgggtccctgcggcggacgggtcggat

SEQ ID NO: 57258 - DNA, 120 bp, Artificial Sequence
  ENSG00000070669_2 (sequence is synthesized)
cgtgctcgtggccagggcgcagtcaggtgtcgcgtggtcctgatctaggaagagactgcggccttatcaccgtctcggtgtctgctttcaccttcaactgcccccctcctcacctggacc

SEQ ID NO: 57259 - DNA, 120 bp, Artificial Sequence
  ENSG00000070669_3 (sequence is synthesized)
gctcaccctcctcctcccctctcaccccgccatccccaccagtccccacctgtctctgtagactgcaagactcatcaagtgacttgctgagcaaaccctgccgagaagagattttcttca

SEQ ID NO: 57260 - DNA, 120 bp, Artificial Sequence
  ENSG00000070669_4 (sequence is synthesized)
atcacatctgaataaatcacttgaagaaagcttatagcttcattgcaccatgtgtggcatttgggcgctgtttggcagtgatgattgcctttctgttcagtgtctgagtgctatgaagat

SEQ ID NO: 57261 - DNA, 120 bp, Artificial Sequence
  ENSG00000070669_5 (sequence is synthesized)
tgcacacagaggtccagatgcattccgttttgagaatgtcaatggatacaccaactgctgctttggatttcaccggttggcggtagttgacccgctgtttggaatgcagccaattcgagt

SEQ ID NO: 57262 - DNA, 120 bp, Artificial Sequence
  ENSG00000070669_6 (sequence is synthesized)
gaagaaatatccgtatttgtggctctgttacaatggtgaaatctacaaccataagaagatgcaacagcattttgaatttgaataccagaccaaagtggatggtgagataatccttcatct

SEQ ID NO: 57263 - DNA, 120 bp, Artificial Sequence
  ENSG00000070669_7 (sequence is synthesized)
ttatgacaaaggaggaattgagcaaacaatttgtatgttggatggtgtgtttgcatttgttttactggatactgccaataagaaagtgttcctgggtagagatacatatggagtcagacc

SEQ ID NO: 57264 - DNA, 120 bp, Artificial Sequence
  ENSG00000070669_8 (sequence is synthesized)
tttgtttaaagcaatgacagaagatggatttttggctgtatgttcagaagctaaaggtcttgttacattgaagcactccgcgactccctttttaaaagtggagccttttcttcctggaca

SEQ ID NO: 57265 - DNA, 120 bp, Artificial Sequence
  ENSG00000070669_9 (sequence is synthesized)
gtacccctgcacgccctctatgacaatgtggagaaactctttccaggttttgagatagaaactgtgaagaacaacctcaggatcctttttaataatgctgtaaagaaacgtttgatgaca

SEQ ID NO: 57266 - DNA, 120 bp, Artificial Sequence
  ENSG00000070669_10 (sequence is synthesized)
gacagaaggattggctgccttttatcagggggcttggactccagcttggttgctgccactctgttgaagcagctgaaagaagcccaagtacagtatcctctccagacatttgcaattggc

SEQ ID NO: 57267 - DNA, 120 bp, Artificial Sequence
  ENSG00000070669_11 (sequence is synthesized)
atggaagacagccccgatttactggctgctagaaaggtggcagatcatattggaagtgaacattatgaagtcctttttaactctgaggaaggcattcaggctctggatgaagtcatattt

SEQ ID NO: 57268 - DNA, 120 bp, Artificial Sequence
  ENSG00000070669_12 (sequence is synthesized)
tccttggaaacttatgacattacaacagttcgtgcttcagtaggtatgtatttaatttccaagtatattcggaagaacacagatagcgtggtgatcttctctggagaaggatcagatgaa

SEQ ID NO: 57269 - DNA, 120 bp, Artificial Sequence
  ENSG00000070669_13 (sequence is synthesized)
cttacgcagggttacatatattttcacaaggctccttctcctgaaaaagccgaggaggagagtgagaggcttctgagggaactctatttgtttgatgttctccgcgcagatcgaactact

SEQ ID NO: 57270 - DNA, 120 bp, Artificial Sequence
  ENSG00000070669_14 (sequence is synthesized)
gctgcccatggtcttgaactgagagtcccatttctagatcatcgattttcttcctattacttgtctctgccaccagaaatgagaattccaaagaatgggatagaaaaacatctcctgaga

SEQ ID NO: 57271 - DNA, 120 bp, Artificial Sequence
  ENSG00000070669_15 (sequence is synthesized)
gagacgtttgaggattccaatctgatacccaaagagattctctggcgaccaaaagaagccttcagtgatggaataacttcagttaagaattcctggtttaagattttacaggaatacgtt

SEQ ID NO: 57272 - DNA, 120 bp, Artificial Sequence
  ENSG00000070669_16 (sequence is synthesized)
gaacatcaggttgatgatgcaatgatggcaaatgcagcccagaaatttcccttcaatactcctaaaaccaaagaaggatattactaccgtcaagtctttgaacgccattacccaggccgg

SEQ ID NO: 57273 - DNA, 120 bp, Artificial Sequence
  ENSG00000070669_17 (sequence is synthesized)
gctgactggctgagccattactggatgcccaagtggatcaatgccactgacccttctgcccgcacgctgacccactacaagtcagctgtcaaagcttaggtggtctttatgctgtaatgt

SEQ ID NO: 57274 - DNA, 120 bp, Artificial Sequence
  ENSG00000070669_18 (sequence is synthesized)
gaaagcaaatatttcttcgtgttggatggggactgtgggtagataggggaacaatgagagtcaactcaggctaacttgggtgtgaaaaaaataaaagtcctaaatctaaaccattgctgt

SEQ ID NO: 57275 - DNA, 120 bp, Artificial Sequence
  ENSG00000070669_19 (sequence is synthesized)
aggaaaagggaaaatgatcagatgtctgcaagaactcacagccctctcctggcagagctgctttagatgacatttgcatcttgtgcccgtgtggcttccttccagtccttgcctcatctt

SEQ ID NO: 57276 - DNA, 120 bp, Artificial Sequence
  ENSG00000070669_20 (sequence is synthesized)
agggacgtcatcaaaggactacactatttttgttctgcctacattcctaacagctgcctaggcagactcagacttgaatcttctataggagttcatcacagctctattttgcaagatagt

SEQ ID NO: 57277 - DNA, 120 bp, Artificial Sequence
  ENSG00000070669_21 (sequence is synthesized)
agttcatttttttctcttttatgttgagccaaagccacttctggagacttgtcctagagcaggggtcaggctttttttgaatttttaatttgtttttaataaagagccagatagtaaata

SEQ ID NO: 57278 - DNA, 120 bp, Artificial Sequence
  ENSG00000070669_22 (sequence is synthesized)
tttctgtcctggttccctgaagcatcgagagggaaccgcggccggcaggccggaccgctccggagaggaggcagcggcagtttgagcccctgtaaatgttatatgtgtacttttttttac

SEQ ID NO: 57279 - DNA, 120 bp, Artificial Sequence
  ENSG00000070669_23 (sequence is synthesized)
aaccactctgaagtggagggatattcatgctatattaagaaaagtatgaattgtttgactattttctatcatctttcagtatgacagtgatatttttgagtatcttgtgaggttacaaaa

SEQ ID NO: 57280 - DNA, 120 bp, Artificial Sequence
  ENSG00000070669_24 (sequence is synthesized)
gggaatctgatagtgtttgctttctatctcttggggaagaaagaaattttaatgtgtcagataatttttattctttaaaactagttacagctgggtatgagggctcatgctcataccccc

SEQ ID NO: 57281 - DNA, 120 bp, Artificial Sequence
  ENSG00000070669_25 (sequence is synthesized)
gaagcatcgagagggaaccgcggccggcaggccggaccgctccggagaggaggcagcggcagtttgagcccctatgcaacagcattttgaatttgaataccagaccaaagtggatggtga

SEQ ID NO: 57282 - DNA, 120 bp, Artificial Sequence
  ENSG00000070669_26 (sequence is synthesized)
gattgttacgcacctgacagctagcggaaggacctttctgtcctggttccctgaagcatcgagagggaaccgcggccggcaggccggaccgctccggagaggaggcagcggcagtttgag

SEQ ID NO: 57283 - DNA, 120 bp, Artificial Sequence
  ENSG00000070669_27 (sequence is synthesized)
ataagcgccagcggcctcgccgcccgtcaagctgtccacatccctggcctcagcccgccacatcaccctgacctgcttacgcccagattttcttcaatcacatctgaataaatcacttga

SEQ ID NO: 57284 - DNA, 120 bp, Artificial Sequence
  ENSG00000070669_28 (sequence is synthesized)
ttcccgcacgcgttacaggagccaggtcggtataagcgccagcggcctcgccgcccgtcaagctgtccacatccctggcctcagcccgccacatcaccctgacctgcttacgcccagtgt

SEQ ID NO: 57285 - DNA, 120 bp, Artificial Sequence
  ENSG00000070669_29 (sequence is synthesized)
tattctaatattagcagtttggtaggaaggaaggcatgttttgtgaagcattgcttacctctgttcagttatttactcccttccctaaatttgtttaactttttgtcttatccaccttta

SEQ ID NO: 57286 - DNA, 120 bp, Artificial Sequence
  ENSG00000070669_30 (sequence is synthesized)
tactgaacaatgcaactttgagacagaaatatttgagaacatttttgtcagtgaggacattttgatagtgaatattttgtatcttctattaacttgaaatgttttatttgttataaagcc

SEQ ID NO: 57287 - DNA, 120 bp, Artificial Sequence
  ENSG00000070669_31 (sequence is synthesized)
agatggatttttggctgtatgttcagaagctaaaggtaataataaatttttctatagattttcattattgtcttggttgtacgttttcttttaaattatatttgaaaatctcttagagag

SEQ ID NO: 57288 - DNA, 120 bp, Artificial Sequence
  ENSG00000070669_32 (sequence is synthesized)
caatccagaattttacaagtgactaagttatgagtctttacctttttttaaaaaaacagaggagttgtactctccttttcagcacttaaattctgtaatccttgaaggatgattctttag

SEQ ID NO: 57289 - DNA, 120 bp, Artificial Sequence
  ENSG00000070669_33 (sequence is synthesized)
tgtggtactttgcgcagttatagcacagcaagtgttaggatttctaaaacagctttattgataattcacataccatgtaattcacccacttgaagtatacagttcagtggtttttagtat

SEQ ID NO: 57290 - DNA, 120 bp, Artificial Sequence
  ENSG00000070669_34 (sequence is synthesized)
attcacagatgttggtaaacaacactccaatcagttttaggattgtttttccacctcaaaaaaaaccaaatcaaatcctatgccctttaccttagtttttgctggcaggatcaactaggt

SEQ ID NO: 57291 - DNA, 120 bp, Artificial Sequence
  ENSG00000070669_35 (sequence is synthesized)
ttttgtttgtttgtttgtttgaagagatggggtcttgctcagtcgcccagcccaggctggagtgcggtggtttgatagctcagtgcagccttgaactcgtgggctcaagcgattctccca

SEQ ID NO: 57292 - DNA, 120 bp, Artificial Sequence
  ENSG00000070669_36 (sequence is synthesized)
cctcagcctccctagtagctaggagtataggcatgcaccacaacaccctgcctcctgtgccctttagctttgaattccatctctccatatccatcagctgcacccctgcagttgtagccc

SEQ ID NO: 57293 - DNA, 120 bp, Artificial Sequence
  ENSG00000070669_37 (sequence is synthesized)
cggcaatcaccagtctttctgcctctggattccctattctgtatgtttcatatgaacgggattatatatcataccggcttttgtgactggattctttcacttggtatagtgctttcaaga

SEQ ID NO: 57294 - DNA, 120 bp, Artificial Sequence
  ENSG00000070669_38 (sequence is synthesized)
tttgtctatgccgtagcatgtatcagtacttacttcttatggccaaatgatattccattacatggatacactgcattttgtttattcgcttgtcagttgatggacatttaggacattatt

SEQ ID NO: 57295 - DNA, 120 bp, Artificial Sequence
  ENSG00000070669_39 (sequence is synthesized)
taccccttttggctattatgaataatgctgctataaacattggtgtacaagtttttgtgtggacatttcccttgggtgtatatctaggagtagaattgctgggacacatgataactatgt

SEQ ID NO: 57296 - DNA, 120 bp, Artificial Sequence
  ENSG00000070718_0 (sequence is synthesized)
atacccaatcagcggccttcaggcgcagatcgtgggcggagcggtagccaggccgcgggccggccaatcagcgggcgagcggctgcctcagcgcgcgcggcgggcggggcggggcctgtc

SEQ ID NO: 57297 - DNA, 120 bp, Artificial Sequence
  ENSG00000070718_1 (sequence is synthesized)
cgcgcctaggagcagtgggcgctgagagcagcaaggccagggagggccttttggttgaatggaactgaatatcgctgcttttgtttttagagttgaaaacttacagagtcctgaggcttt

SEQ ID NO: 57298 - DNA, 120 bp, Artificial Sequence
  ENSG00000070718_2 (sequence is synthesized)
cagactgaaaaaggctttcttctgtcactgacaatcgccaccatgatccatagtcttttcttgatcaactcctctggagacattttcctggagaaacattggaaaagtgtggtcagccgt

SEQ ID NO: 57299 - DNA, 120 bp, Artificial Sequence
  ENSG00000070718_3 (sequence is synthesized)
tctgtttgtgattacttttttgaggcgcaagagagagctactgaggcagaaaatgtgcctccggttatccctacccctcaccactatctcttaagtgtttaccgccacaagatctttttt

SEQ ID NO: 57300 - DNA, 120 bp, Artificial Sequence
  ENSG00000070718_4 (sequence is synthesized)
gtggccgtgatccagacggaggtcccccctctgtttgtcattgagtttcttcaccgagtggtggacacatttcaggattattttggagtctgttcagagccagtgatcaaagacaatgta

SEQ ID NO: 57301 - DNA, 120 bp, Artificial Sequence
  ENSG00000070718_5 (sequence is synthesized)
gttgtggtttatgaggtattggaagagatgcttgacaatggttttccattggctaccgagtcgaacattcttaaagaactcataaagcctcctaccatccttcgaacggttgtcaacacc

SEQ ID NO: 57302 - DNA, 120 bp, Artificial Sequence
  ENSG00000070718_6 (sequence is synthesized)
atcacaggaagcacgaatgtgggtgaccagcttcccactgggcagctgtcagtggtgccttggcgacggactggggtgaaatataccaacaatgaggcctattttgatgtgattgaagag

SEQ ID NO: 57303 - DNA, 120 bp, Artificial Sequence
  ENSG00000070718_7 (sequence is synthesized)
attgatgcaattattgataaatcaggctccacaattactgctgagatccagggggtgattgatgcctgtgtcaagctgactggcatgccagaccttacactttccttcatgaaccctagg

SEQ ID NO: 57304 - DNA, 120 bp, Artificial Sequence
  ENSG00000070718_8 (sequence is synthesized)
ttgttggatgatgtcagcttccatccttgtgttcgtttcaaacgctgggaatctgagcgcatcctctccttcatccctcctgatggaaacttccgcctgctgtcttaccatgtcagtgca

SEQ ID NO: 57305 - DNA, 120 bp, Artificial Sequence
  ENSG00000070718_9 (sequence is synthesized)
cagaatctggttgcaatcccagtgtatgtcaaacataacatcagtttccgggacagtagttcccttggacgctttgaaataacggtgggacccaagcagacgatggggaagaccattgag

SEQ ID NO: 57306 - DNA, 120 bp, Artificial Sequence
  ENSG00000070718_10 (sequence is synthesized)
ggagtgactgtcaccagccagatgcccaagggggtcctgaacatgagccttactccatcacaggggacacacacattcgacccagtcacaaagatgctgtcttgggatgtaggaaaaata

SEQ ID NO: 57307 - DNA, 120 bp, Artificial Sequence
  ENSG00000070718_11 (sequence is synthesized)
aatccacaaaagctaccaagtttgaaggggaccatgagtcttcaggctggagcttccaaaccagatgaaaaccccacaattaacctgcagtttaagatccagcagctggccatttctgga

SEQ ID NO: 57308 - DNA, 120 bp, Artificial Sequence
  ENSG00000070718_12 (sequence is synthesized)
ctcaaggtgaatcgtctggatatgtatggagaaaagtacaaaccctttaagggcataaaatacatgaccaaagctgggaagttccaagttcgaacctgaagggagcatttgctgagggaa

SEQ ID NO: 57309 - DNA, 120 bp, Artificial Sequence
  ENSG00000070718_13 (sequence is synthesized)
tagtcttgcacattttttcatttcttacttgtctaaaagtaaaaaaaaatatcagcctgtctcctaggtcagtcccctcctggacccacccgctcccttttttccttagccttcagtgcc

SEQ ID NO: 57310 - DNA, 120 bp, Artificial Sequence
  ENSG00000070718_14 (sequence is synthesized)
atggaactaatcaagggaggaaaaggtcaccagggagaactggacagaactgaaacacagcaacaccagttctcaaggacaaggtgtgtgatgggggtaggaagcttggtgcttatgtaa

SEQ ID NO: 57311 - DNA, 120 bp, Artificial Sequence
  ENSG00000070718_15 (sequence is synthesized)
tatctaaagccaatgaaagacttctttgttgattttttaagatagaaagattaaaaagaaagaaagatgggaagaaaatgaatgtcagtcaaggaaaggccacttaaggatctgctctat

SEQ ID NO: 57312 - DNA, 120 bp, Artificial Sequence
  ENSG00000070718_16 (sequence is synthesized)
gaaggagaagaaagaggaaaaagaagtaaaggagttaggaggagacacttaaatgaaagattggcaagaaaagcagtcggactctaccttaaggagggatgggaaggaaagagttgagtt

SEQ ID NO: 57313 - DNA, 120 bp, Artificial Sequence
  ENSG00000070718_17 (sequence is synthesized)
ggtttctttctgattcctctactcatgtagaaaacacttgtacttctggaaatggactggagactttttaaatttgagtccactattgacatggaaaccccagtggaatcagattttccc

SEQ ID NO: 57314 - DNA, 120 bp, Artificial Sequence
  ENSG00000070718_18 (sequence is synthesized)
tcaaagaccatgatggtatcggactagttttcagacactgcctgttgctgtccatcagcacttggtctcttatcttcagtgagaaggtgacccgccttcttcccatggtggctgcctaaa

SEQ ID NO: 57315 - DNA, 120 bp, Artificial Sequence
  ENSG00000070718_19 (sequence is synthesized)
gtgcttcttttctaacccaaaacagttctactcacttccttttacagaattcaccggccattttcctgttacctgatccttctacaggatttttaaaaagtaagagagtttcagagaagc

SEQ ID NO: 57316 - DNA, 120 bp, Artificial Sequence
  ENSG00000070718_20 (sequence is synthesized)
cgatcccataatccccagtgcagccagggtttgtgtgtcatcgtactggagtagagggccgactcttcccatgaaggtgagcacagctgtgagtgagtgagctcatatctccatttgtca

SEQ ID NO: 57317 - DNA, 120 bp, Artificial Sequence
  ENSG00000070718_21 (sequence is synthesized)
gtgctggactggtaccagatcgtaaccttcccgttggtcggaaacttttccatctgtcgccctagaaaaagagaaagcttaccatcgagggtgtggttgatccttgaagctgcttggtaa

SEQ ID NO: 57318 - DNA, 120 bp, Artificial Sequence
  ENSG00000070718_22 (sequence is synthesized)
agttatcatttcctcagtcttttcttttgtactcctatcatgtattcattaatatctaccagtcccttttcattctaagacaaaacatttctcctaaatctctgaataaaatcagtgctg

SEQ ID NO: 57319 - DNA, 120 bp, Artificial Sequence
  ENSG00000070718_23 (sequence is synthesized)
taggaagatggactgtgttgatcatgggtgtaagcaacccagtttaagaaacatggcaactaaagggatacctcaggctttctttcccagtgggtcatttttgtcctagttcagtgtgtc

SEQ ID NO: 57320 - DNA, 120 bp, Artificial Sequence
  ENSG00000070718_24 (sequence is synthesized)
tgttactatttaaatatttatacaaaagggtttttgtttatagcttaaggaatgatactgtgctctgcttggtgcatggagaaaaaggaagacccgtactctccacaccctagagctttt

SEQ ID NO: 57321 - DNA, 120 bp, Artificial Sequence
  ENSG00000070718_25 (sequence is synthesized)
ctctaaatattgtgcaaagtttttgctagttttatcttctgactttgggactagtttttgctgcagagttgtgttgctttgtgattttcctctgggatagtgtactgtacacaaccagat

SEQ ID NO: 57322 - DNA, 120 bp, Artificial Sequence
  ENSG00000070718_26 (sequence is synthesized)
gtgttccacactccgtgactccgcagtttgtcctggagtgacatacacatccaccatggaaagggaagcatctctgcctgtggattctcaagtacttggaagcacctctcctgaggaacc

SEQ ID NO: 57323 - DNA, 120 bp, Artificial Sequence
  ENSG00000070718_27 (sequence is synthesized)
tacaggattctaaggtttcctaggtcactgaacaactaatcttggtccctgaatatttctaggtttgtaagtgcagcagttttatttcctctagaactcatcctgtttcaagggaagtac

SEQ ID NO: 57324 - DNA, 120 bp, Artificial Sequence
  ENSG00000070718_28 (sequence is synthesized)
ctaagaagatatagagtgtttctagggtaagggacctgcaggtgtaagcatagatgaaataactgtcctgtcacatgtgcagcaggccatggagtgtagcgggcatcgctgccgccattc

SEQ ID NO: 57325 - DNA, 120 bp, Artificial Sequence
  ENSG00000070718_29 (sequence is synthesized)
ctgcagcatcaccataagcagtgcagggtgtctccatcgagctgtttggttccatgtgtgtttaacatgtgcagaagtagcttctctgtttaagtttaataaagttgagtttcaccagtc

SEQ ID NO: 57326 - DNA, 120 bp, Artificial Sequence
  ENSG00000070718_30 (sequence is synthesized)
cgcgcctaggagcagtgggcgctgagagcagcaaggccagggagggctatcttcaggctcatgcaggaggggaagattgggcctggtcttgaaagatggagttgaaaacttacagagtcc

SEQ ID NO: 57327 - DNA, 120 bp, Artificial Sequence
  ENSG00000070718_31 (sequence is synthesized)
gttacctgggttcacattccagcttctgtggttactaattgggtaacctcaggtgagttgcttaacccctatgtatctcttttctcatctgtaaattgaaaataataaaagtgccttgtt

SEQ ID NO: 57328 - DNA, 120 bp, Artificial Sequence
  ENSG00000070718_32 (sequence is synthesized)
gccgcgggccggccaatcagcgggcgagcggctgcctcagcgcgcgcggcgggcggggcggggcctgtccgcgcctaggagcagtgggcgctgagagcagcaaggccaggtgaggagtag

SEQ ID NO: 57329 - DNA, 120 bp, Artificial Sequence
  ENSG00000070718_33 (sequence is synthesized)
gtagggacgaccccgagcctggagagggggcaggagtgggggcgcgcgagggtcggggcggggtctcaggatgcagccgggcggcctctcagggctgcggacgcggcggggagaggtgag

SEQ ID NO: 57330 - DNA, 120 bp, Artificial Sequence
  ENSG00000070718_34 (sequence is synthesized)
gggccgggttcagagttcggggagggcgtccttcccggcgccgcggctgcgggcggaggggacactgttgccatggcagcgcacgtgcgctcgctggcgcggcccggcacccctgcgctc

SEQ ID NO: 57331 - DNA, 80 bp, Artificial Sequence
  ENSG00000070718_35 (sequence is synthesized)
ttcaccccggaacgcgcgtgccccttcagccaggcccctgcccgcctgcgccccgcggcctccgtcgccgccggctctgg

SEQ ID NO: 57332 - DNA, 120 bp, Artificial Sequence
  ENSG00000070718_36 (sequence is synthesized)
tctccctcgcaccccgggctgcctggctgtctctccctcctgctgtctcctccaggcggcgctgggcaccgcaggcctctgcgttttgaccacccgcgccggttcgcggaatggccacat

SEQ ID NO: 57333 - DNA, 120 bp, Artificial Sequence
  ENSG00000070718_37 (sequence is synthesized)
cctggcgactggcaccagagagatgcaaccgtctgagggccttggggtgtctgtcccccagggaaatttttttttttttttggaggtggagggggcggggttctccctctgttgcccggg

SEQ ID NO: 57334 - DNA, 120 bp, Artificial Sequence
  ENSG00000070718_38 (sequence is synthesized)
ctgatctcgaactcgtgagctccagcggtctgcccgcggaggcctccctaagtactgggatcacaggcgggagccccaagggatctttttaaatgtcttactgcattaacaagtgcctaa

SEQ ID NO: 57335 - DNA, 120 bp, Artificial Sequence
  ENSG00000070718_39 (sequence is synthesized)
ggagtgctcagagaatagctctgattggatgaataaagacccccaagggcagctttccattcctcccaccaattctggtgggcagaaatagaaagcaaaccacatatgtaattgtacatg

SEQ ID NO: 57336 - DNA, 120 bp, Artificial Sequence
  ENSG00000070718_40 (sequence is synthesized)
cacatatgtaattgtacatgttctggtaaccactttaaaataataaaacaggttaaattaattttaatatatttgatttaacccaggatatccaaaatgttattacaacatataatcaat

SEQ ID NO: 57337 - DNA, 120 bp, Artificial Sequence
  ENSG00000070718_41 (sequence is synthesized)
tttgaaattttttttttcatgcaaagcctttcagatttgtcgtgtgtcttacacttaacagcacacctcagtccgcaccagccacctttcaagtgctcgctggtcccatagtggctatcg

SEQ ID NO: 57338 - DNA, 120 bp, Artificial Sequence
  ENSG00000070718_42 (sequence is synthesized)
tattaagctgcgcatttcttgtgtatgtgtgagctgttgccaaaacatgacatcaaattcagtgttcttggaagccctcttcaaagaacactgattgtgttgcagtcaggcaacgcaaaa

SEQ ID NO: 57339 - DNA, 120 bp, Artificial Sequence
  ENSG00000070718_43 (sequence is synthesized)
tcttcaaggagtttgcggttcggttgagaaaatagacacccacagataagtagtattttaaatggatgcaatttgggcgatagtaaagataactgggagtatatgattgacagtcagatg

SEQ ID NO: 57340 - DNA, 120 bp, Artificial Sequence
  ENSG00000070718_44 (sequence is synthesized)
actgatcattatcgtttcgaattcaagggagggctatcttcaggctcatgcaggaggggaagattgggcctggtcttgaaagatgggtaagtcttggactgttgggaaaagatggggagg

SEQ ID NO: 57341 - DNA, 120 bp, Artificial Sequence
  ENSG00000070718_45 (sequence is synthesized)
tttcttcaccgagtggtggacacatttcagtactactgttctggaatttcagttctcatgcaacataccggcccctttgcacagtgaaaacgattattttggagtctgttcagagccagt

SEQ ID NO: 57342 - DNA, 120 bp, Artificial Sequence
  ENSG00000070718_46 (sequence is synthesized)
tttaacttctgtgtcatatgaggtctggaatgagtcatatgaacactggaattgtggaattggagaagagaatgaggacccacacactatgataaaagttaaaaagcaagtcaaagagtt

SEQ ID NO: 57343 - DNA, 120 bp, Artificial Sequence
  ENSG00000070718_47 (sequence is synthesized)
ccttctcttgtactcatatctgcaccacgtctagaacaacttcccttcccaagagaattaaaatacattttttgtttttccctgcaatactctgtagtactactgttctggaatttcagt

SEQ ID NO: 57344 - DNA, 120 bp, Artificial Sequence
  ENSG00000070718_48 (sequence is synthesized)
gtactttttgattttgtttgtattattcagagtcattagaaaagttaatttagttactagacagtagcttttcaaaaagaaaaaattagattactggggtttttttctgtttattttttc

SEQ ID NO: 57345 - DNA, 120 bp, Artificial Sequence
  ENSG00000070718_49 (sequence is synthesized)
agataaaaagtaaggacatagttaagggagaagaagctacccacagggcagaaaaagcatcatgtgaaaggaagaactaccattttcccagtgcacgaatgaaatgactctttgtctctc

SEQ ID NO: 57346 - DNA, 120 bp, Artificial Sequence
  ENSG00000070718_50 (sequence is synthesized)
ggcgtctttattccaggagaggcttcttacaagataaggcactgcgagtcgattgttacgccacacctgtaacaattttctataaacatctcatggccatcaaaaaaccttaaaactcaa

SEQ ID NO: 57347 - DNA, 120 bp, Artificial Sequence
  ENSG00000070718_51 (sequence is synthesized)
attctgtttgaaaaggcagaccagatggcaacaaggggttttaaaaatagactaggttaccccatatagaagttgggaaaaacctcatcttctgtttgaaaaattcttcaattgagtgca

SEQ ID NO: 57348 - DNA, 120 bp, Artificial Sequence
  ENSG00000070729_0 (sequence is synthesized)
gtgtctgaggggccagctacgagtggcagcaagaaggcaattcctggctggcggttggcatctaagcaggcatcaggatgttgggctgggtccagagggtgctgcctcagcccccaggga

SEQ ID NO: 57349 - DNA, 120 bp, Artificial Sequence
  ENSG00000070729_1 (sequence is synthesized)
cccctcggaagaccaagatgcaggaggaagaggaagtggaaccagagccagagatggaggcggaggtggaaccagaaccgaatcctgaggaggccgagacagagtccgagtccatgcccc

SEQ ID NO: 57350 - DNA, 120 bp, Artificial Sequence
  ENSG00000070729_2 (sequence is synthesized)
ccgaagagtcattcaaggaggaggaagtggctgtggcagacccaagccctcaggagaccaaggaggctgcccttacttccaccatatccctccgggcccagggcgctgagatttctgaaa

SEQ ID NO: 57351 - DNA, 120 bp, Artificial Sequence
  ENSG00000070729_3 (sequence is synthesized)
tgaatagtcccagccgcagggtactgacctggctcatgaagggcgtagagaaggtgatcccgcagcctgttcacagcatcacggaggacccggctcagatcctggggcatggcagcactg

SEQ ID NO: 57352 - DNA, 120 bp, Artificial Sequence
  ENSG00000070729_4 (sequence is synthesized)
gggacacagggtgcacagatgaacccaatgaggcccttgaggcccaagacactaggcctgggctgcggctgcttctgtggctggagcagaatctggaaagagtgcttcctcagcccccca

SEQ ID NO: 57353 - DNA, 120 bp, Artificial Sequence
  ENSG00000070729_5 (sequence is synthesized)
aatcctctgaggtctggagagatgagcctgcagttgctacaggtgctgcctcagacccagcgcctccaggacgcccccaggaaatggggcccaagctgcaggcccgggagaccccctccc

SEQ ID NO: 57354 - DNA, 120 bp, Artificial Sequence
  ENSG00000070729_6 (sequence is synthesized)
tgcccacacccatccccctgcagcccaaggaggaacccaaggaggcaccagctccagagccccagcccggctcccaggcccagacctcctccctgccaccaaccagggaccctgccaggc

SEQ ID NO: 57355 - DNA, 120 bp, Artificial Sequence
  ENSG00000070729_7 (sequence is synthesized)
tggtggcatgggtcctgcacaggctggagatggccttgccgcagccagtgctacatgggaaaataggggaacaggagcctgactcccctgggatatgtgatgtgcagaccatcagcatcc

SEQ ID NO: 57356 - DNA, 120 bp, Artificial Sequence
  ENSG00000070729_8 (sequence is synthesized)
ttcctggaggacaagtggagcctgaccttgtcctagaggaggttgaaccgccctgggaggatgcccaccaggatgtcagtaccagcccacagggtacagaggtggttccagcttatgaag

SEQ ID NO: 57357 - DNA, 120 bp, Artificial Sequence
  ENSG00000070729_9 (sequence is synthesized)
gttccagcttatgaagaagagaacaaagctgtggagaagatgcccagagagctgtcccggattgaagaggagaaagaagatgaggaggaggaagaggaagaggaggaggaggaggaagag

SEQ ID NO: 57358 - DNA, 120 bp, Artificial Sequence
  ENSG00000070729_10 (sequence is synthesized)
tgctgctggatagctgtgtggtgtcgcaggtgggcgtgggccagagtgaagaagacgggacccggccccagagcacttcagatcagaagctgtgggaggaagttggggaggaggccaaga

SEQ ID NO: 57359 - DNA, 120 bp, Artificial Sequence
  ENSG00000070729_11 (sequence is synthesized)
aggaggctgaagagaaggccaaggaggaggccgaggaggtggctgaagaggaggctgaaaaggagccccaggactgggcggagaccaaggaggagcctgaggctgaggccgaggctgcca

SEQ ID NO: 57360 - DNA, 120 bp, Artificial Sequence
  ENSG00000070729_12 (sequence is synthesized)
gttcaggagtgcctgccacgaaacagcacccagaagtgcaggtggaagatactgatgctgatagctgccccctcatggcagaagagaatccaccctcaaccgtgttgccgccaccgtctc

SEQ ID NO: 57361 - DNA, 120 bp, Artificial Sequence
  ENSG00000070729_13 (sequence is synthesized)
ctgccaaatcagacacccttatagtcccaagctcagcctcggggacacacaggaagaagctgccctctgaggatgatgaggctgaagagctcaaggcgttgtcaccagcagagtccccag

SEQ ID NO: 57362 - DNA, 120 bp, Artificial Sequence
  ENSG00000070729_14 (sequence is synthesized)
tggttgcctggtctgaccccaccaccccgaaggacactgatggccaggaccgtgcggcctccacggccagcacaaatagcgccatcatcaacgaccggctccaggagctggtgaagctct

SEQ ID NO: 57363 - DNA, 120 bp, Artificial Sequence
  ENSG00000070729_15 (sequence is synthesized)
tcaaggagcggacagagaaagtgaaggagaaactcattgaccctgacgtcacctctgatgaggagagccccaagccctccccagccaagaaagccccagagccagctccagacacaaagc

SEQ ID NO: 57364 - DNA, 120 bp, Artificial Sequence
  ENSG00000070729_16 (sequence is synthesized)
ccgctgaagccgagccagtggaagaggagcactattgcgacatgctctgctgcaagttcaaacaccgcccctggaagaagtaccagtttccccagagcattgacccgctgaccaacctga

SEQ ID NO: 57365 - DNA, 120 bp, Artificial Sequence
  ENSG00000070729_17 (sequence is synthesized)
tgtatgtcctatggctgttcttcgtggtgatggcctggaattggaactgttggctgattcccgtgcgctgggccttcccctaccagaccccggacaacatccaccactggctgctgatgg

SEQ ID NO: 57366 - DNA, 120 bp, Artificial Sequence
  ENSG00000070729_18 (sequence is synthesized)
attacctatgcgacctcatctacttcctggacatcaccgtgttccagacacgcctgcagtttgtcagaggcggggacatcattacggacaaaaaggacatgcgaaataactacctgaagt

SEQ ID NO: 57367 - DNA, 120 bp, Artificial Sequence
  ENSG00000070729_19 (sequence is synthesized)
ctcgccgcttcaagatggacctgctcagcctcctgcccttggattttctctatttgaaagtcggtgtgaaccccctcctccgcctgccccgctgtttaaagtacatggccttcttcgagt

SEQ ID NO: 57368 - DNA, 120 bp, Artificial Sequence
  ENSG00000070729_20 (sequence is synthesized)
ttaacagccgcctggaatccatcctcagcaaagcctacgtgtacagggtcatcaggaccacagcctaccttctctacagcctgcatttgaattcctgtctttattactgggcatcggcct

SEQ ID NO: 57369 - DNA, 120 bp, Artificial Sequence
  ENSG00000070729_21 (sequence is synthesized)
atcagggcctcggctccactcactgggtttacgatggcgtgggaaacagttatattcgctgttactactttgctgtgaagaccctcatcaccatcggggggctgcctgaccccaagacac

SEQ ID NO: 57370 - DNA, 120 bp, Artificial Sequence
  ENSG00000070729_22 (sequence is synthesized)
tctttgaaattgtcttccagctgctgaattatttcacgggcgtctttgctttctctgtgatgatcggacagatgagagatgtggtaggggccgccaccgccggacagacctactaccgca

SEQ ID NO: 57371 - DNA, 120 bp, Artificial Sequence
  ENSG00000070729_23 (sequence is synthesized)
gtgaagtacatgaatttctacaagatccccaagtccgtgcagaaccgcgtcaagacctggtacgagtacacctggcactcgcaaggcatgctggatgagtcagagctgatggtgcagctt

SEQ ID NO: 57372 - DNA, 120 bp, Artificial Sequence
  ENSG00000070729_24 (sequence is synthesized)
ccagacaagatgcggctggacctcgccatcgacgtgaactacaacatcgttagcaaagtcgcactctttcagggctgtgaccggcagatgatctttgacatgctgaagaggcttcgctct

SEQ ID NO: 57373 - DNA, 120 bp, Artificial Sequence
  ENSG00000070729_25 (sequence is synthesized)
gttgtctacctgcccaacgactatgtgtgcaagaagggggagatcggccgtgagatgtacatcatccaggcagggcaagtgcaggtcttgggcggccctgatgggaaatctgtgctggtg

SEQ ID NO: 57374 - DNA, 120 bp, Artificial Sequence
  ENSG00000070729_26 (sequence is synthesized)
acgctgaaagctggatctgtgtttggagaaataagcttgctggctgttgggggcgggaaccggcgcacggccaacgtggtggcgcacgggtttaccaacctcttcatcctggataagaag

SEQ ID NO: 57375 - DNA, 120 bp, Artificial Sequence
  ENSG00000070729_27 (sequence is synthesized)
gacctgaatgagattttggtgcattatcctgagtctcagaagttactccggaagaaagccaggcgcatgctgagaagcaacaataagcccaaggaggagaagagcgtgctgatccttcca

SEQ ID NO: 57376 - DNA, 120 bp, Artificial Sequence
  ENSG00000070729_28 (sequence is synthesized)
ccccgggcgggcaccccaaagctcttcaacgctgccctcgctatgacaggaaagatgggtggcaagggggcaaaaggcggcaaacttgctcacctccgggcccggctcaaagaactggcc

SEQ ID NO: 57377 - DNA, 120 bp, Artificial Sequence
  ENSG00000070729_29 (sequence is synthesized)
gcgctggaggcggctgcaaagcagcaagagttggtggaacaggccaagagctcgcaagacgtcaagggagaggaaggctccgccgccccagaccagcacacgcacccaaaggaggccgcc

SEQ ID NO: 57378 - DNA, 120 bp, Artificial Sequence
  ENSG00000070729_30 (sequence is synthesized)
gcgccccggacgccccccgagcccccggggtctccaccgagctctccaccgcctgcctcccttgggaggccggagggagaggaggaggggccggccgagcccgaagagcactcggtgagg

SEQ ID NO: 57379 - DNA, 120 bp, Artificial Sequence
  ENSG00000070729_31 (sequence is synthesized)
cactcggtgaggatctgcatgagcccgggcccggagccgggagagcagatcctgtcggtgaagatgccggaggaaagggaggagaaggcggagtaaggtggggtgaggcggatcccgcgc

SEQ ID NO: 57380 - DNA, 120 bp, Artificial Sequence
  ENSG00000070729_32 (sequence is synthesized)
gcagttccagcaggtgtgtccccagcgcccgctgcgcccctgcgccccagcgccccaccttcccccacggctcaagagaagatgcttttccgtagtcgtgacctcagtggctgcagctct

SEQ ID NO: 57381 - DNA, 120 bp, Artificial Sequence
  ENSG00000070729_33 (sequence is synthesized)
gaccgtcccgccagcacgccagccccgactcagctcctcgcggggctgggcctgagctcgacaagttgcatcaagtgttcgagtccctgagctctcactatcatttgagagccctacctt

SEQ ID NO: 57382 - DNA, 120 bp, Artificial Sequence
  ENSG00000070729_34 (sequence is synthesized)
ttcctgactgttcctctttttaagaacaaaatgattttccacttttaaagttcatgggtgagggataaaatgaggctccaatacatgggaagctttgctgaaaaagtaaagtgttattga

SEQ ID NO: 57383 - DNA, 120 bp, Artificial Sequence
  ENSG00000070729_35 (sequence is synthesized)
ctttgctgaaaaagtaaagtgttattgaatgtgtggggtttcccctcaggaatttgtctaacacatttcaaggatagaaaatacttcactgccgggcatggtggctcatgcctataatcc

SEQ ID NO: 57384 - DNA, 120 bp, Artificial Sequence
  ENSG00000070729_36 (sequence is synthesized)
tataatcccagtgctttgggaagccgaagcaggaggatcactggaggccaagagttggagagcagactgggcaacatagcgagacctcatctcaaacaaaaacaaaaacaaacaaaaaaa

SEQ ID NO: 57385 - DNA, 120 bp, Artificial Sequence
  ENSG00000070729_37 (sequence is synthesized)
caggaggatggcttgagcccaggagtttctggctgcagtgagctggacacagtgagaccctgtctcaaaaaaactaaaagatagccctgcacagtggttcacatctgcaatcccagcagt

SEQ ID NO: 57386 - DNA, 86 bp, Artificial Sequence
  ENSG00000070729_38 (sequence is synthesized)
tgtctcaaaaaaactaaaagatagccctgcacagtggttcacatctgcaatcccagcagtttgggaagctgagatgggaggattgt

SEQ ID NO: 57387 - DNA, 120 bp, Artificial Sequence
  ENSG00000070729_39 (sequence is synthesized)
aagcaaacaacaacaacgtacacaaacaaaaaaacaaagaaaggagggcagcccgagctgttcagctgagaattgccatggttctgagctgagcttgggacgcggttttcctttgcgggc

SEQ ID NO: 57388 - DNA, 120 bp, Artificial Sequence
  ENSG00000070729_40 (sequence is synthesized)
aatcacagtagggggctagatgcccattaaggtagttagtgcttatcttccccagactctattcaattccaatgcaatgccattatctcagaacagatagaagggaaatggacttactgg

SEQ ID NO: 57389 - DNA, 120 bp, Artificial Sequence
  ENSG00000070729_41 (sequence is synthesized)
ccaggagctgctagcgtttctgcctctgccaggaggaacagcccggtaggagcatcctctgcctgtcatcctgagaaaccccattcgccagcagggatcagtccgttactcacttttgac

SEQ ID NO: 57390 - DNA, 120 bp, Artificial Sequence
  ENSG00000070729_42 (sequence is synthesized)
actctcgctgtagagatggtggcagcaacttcaattaatcctagaaaatgaaatctcccagctgatgacagcacttacattccctaaagctttccagatcgtgtcatgttgcttttatga

SEQ ID NO: 57391 - DNA, 120 bp, Artificial Sequence
  ENSG00000070729_43 (sequence is synthesized)
gaaaaaagaaaaaaaaagaaaaaagggtcattcagggaatgaatatttatcaagaggattttatttgcataccaaatggctcttgggggagtgagtgattaaaaacaaaatctagtattc

SEQ ID NO: 57392 - DNA, 120 bp, Artificial Sequence
  ENSG00000070729_44 (sequence is synthesized)
aaaaacaaaatctagtattctagtattaggccatttgtttccacctgcaacagtgaacataaaggacctggaattccaataggtcctgcccattttatataaaattacaggaaaatgtga

SEQ ID NO: 57393 - DNA, 120 bp, Artificial Sequence
  ENSG00000070729_45 (sequence is synthesized)
gctgctcagaggcctttgaaggtttgcaaatgtctgtatgtatttgtccatccactaaaaacaacattcatttccactgtggaaaaatgaaagaatgtgggagtccccaggctggtctaa

SEQ ID NO: 57394 - DNA, 120 bp, Artificial Sequence
  ENSG00000070729_46 (sequence is synthesized)
gcatttccaaaccccagagtcagaaacagatttgtctagttgatggcttgtcacgtgatccgggtaatcatcacattgaatatagtgatgattgaccttattattttaccctattttttt

SEQ ID NO: 57395 - DNA, 120 bp, Artificial Sequence
  ENSG00000070729_47 (sequence is synthesized)
gctgaagagctcaaggcgttgtcaccagcagagtccccagtggttgcctggtctgaccccaccaccccgaaggacactgagtgagacccctctggggtctcagaaaattgaaagactgcg

SEQ ID NO: 57396 - DNA, 120 bp, Artificial Sequence
  ENSG00000070729_48 (sequence is synthesized)
gggagggtgggggatgtgggggggctagtgtggatgcttttagaaccttctaccgcaaggcagactttgccagtggcttccgagcagtaagtcgggatcggtcgcctgcccaggctgctt

SEQ ID NO: 57397 - DNA, 120 bp, Artificial Sequence
  ENSG00000070729_49 (sequence is synthesized)
aagagaagaccttcccgggggaggtggccactgacaccccaccctatttgaacagcgaacccctccctctccacacactcccaggcaggacaaggggagccagagtcacctgcaccagcc

SEQ ID NO: 57398 - DNA, 120 bp, Artificial Sequence
  ENSG00000070729_50 (sequence is synthesized)
ccagagcctcccagaccagaacaaggggaaggccagccatgggcagcctgcaagatttaggctagacagcaggacttacccccagagggctgtggaaaaggcccatagccgggcgtggtg

SEQ ID NO: 57399 - DNA, 87 bp, Artificial Sequence
  ENSG00000070729_51 (sequence is synthesized)
ggaggattgcttgagccccgaagttcgagaccaccgccttttttaaattaataaattaaaaagccccatggatggaggactcagtat

SEQ ID NO: 57400 - DNA, 120 bp, Artificial Sequence
  ENSG00000070729_52 (sequence is synthesized)
ttaataaattaaaaagccccatggatggaggactcagtattgagcatctctttgagaggacgcgtgcacagcccccagtgtggtacctggcaccgtcagcacctcgacaggatacagttt

SEQ ID NO: 57401 - DNA, 120 bp, Artificial Sequence
  ENSG00000070729_53 (sequence is synthesized)
ttcccagaagaggttctccctaggcctggccacactctctccttccaaggcttggggacaccaatgagcagcaacaaatgttttcattaacattaaaagagtgtaaatgagcacatcaaa

SEQ ID NO: 57402 - DNA, 120 bp, Artificial Sequence
  ENSG00000070729_54 (sequence is synthesized)
gatgggcactgcccttagctctgctgtcattctggggaaagccctgggacatcctgggaattggctgaagtgagcttcaggtggagggcgggctctccctaagtaagcctgaagctccca

SEQ ID NO: 57403 - DNA, 120 bp, Artificial Sequence
  ENSG00000070729_55 (sequence is synthesized)
agcaaccgaggccttttggttccacctggcctccctggggatgcttctgccattccctgcacatctcctcaatctgattagaagcaggaaggattgctggctcctctgccactggagcca

SEQ ID NO: 57404 - DNA, 120 bp, Artificial Sequence
  ENSG00000070729_56 (sequence is synthesized)
ccctggctcgggagctgggctcccacttgcatgcaccgacccaggcttgggatgaacgccacagcccccagctgaacccctgcaccatgggcatcctgactggtcccgaccgagagatcc

SEQ ID NO: 57405 - DNA, 120 bp, Artificial Sequence
  ENSG00000070729_57 (sequence is synthesized)
tgagactctctggccccagcaccatggctacaccatgtcagaacatggagctgaattgcctagtccaggaccagatacctggccaggtggcctctgcctctgccctccaaaacctggtag

SEQ ID NO: 57406 - DNA, 120 bp, Artificial Sequence
  ENSG00000070729_58 (sequence is synthesized)
agcatctccctaatgtgcccagctaccgcatcccaatcacccgcatccctgtcctcacctcccggagaaccagcttgtccaactccagcttcgccaaggagaccaggagctccatccgcc

SEQ ID NO: 57407 - DNA, 120 bp, Artificial Sequence
  ENSG00000070729_59 (sequence is synthesized)
aactagtgcctgccacgaaacagcacccagaagtgcaggtggaagatactgatgctgatagctgccccctcatggcagaagagaatccaccctcaaccgtgttgccgccaccgtctcctg

SEQ ID NO: 57408 - DNA, 120 bp, Artificial Sequence
  ENSG00000070729_60 (sequence is synthesized)
gtctcagaagttactccggaagaaagccaggccaagagctcgcaagacgtcaagggagaggaaggctccgccgccccagaccagcacacgcacccaaaggaggccgccaccgacccaccc

SEQ ID NO: 57409 - DNA, 120 bp, Artificial Sequence
  ENSG00000070731_0 (sequence is synthesized)
ctcccttctgcctgggacgtcagcggacggggcgctcgcgggccggggctgtatggggctcccgcgcgggtcgttcttctggctgctgctcctgctcacggctgcctgctcggggctcct

SEQ ID NO: 57410 - DNA, 120 bp, Artificial Sequence
  ENSG00000070731_1 (sequence is synthesized)
ctttgccctgtacttctcggcggtgcagcggtacccggggccagcggccggagccagggacaccacatcatttgaagcattctttcaatccaaggcatcgaattcttggacaggaaaggg

SEQ ID NO: 57411 - DNA, 120 bp, Artificial Sequence
  ENSG00000070731_2 (sequence is synthesized)
ccaggcctgccgacacctgcttcacctggccattcagcggcacccccacttccgtggcctgttcaatctctccattccagtgctgctgtggggggacctcttcaccccagcgctctggga

SEQ ID NO: 57412 - DNA, 120 bp, Artificial Sequence
  ENSG00000070731_3 (sequence is synthesized)
ccgcctgagccaacacaaagccccgtatggctggcgggggctctctcaccaagtcatcgcctccaccctgagccttctgaacggctcagagagtgccaagctgtttgccccgcccaggga

SEQ ID NO: 57413 - DNA, 120 bp, Artificial Sequence
  ENSG00000070731_4 (sequence is synthesized)
cacccctccaaagtgtatccggtgtgccgtggtgggcaacggaggcattctgaatgggtcccgccagggtcccaacatcgatgcccatgactatgtattcagactcaatggagctgtgat

SEQ ID NO: 57414 - DNA, 120 bp, Artificial Sequence
  ENSG00000070731_5 (sequence is synthesized)
caaaggcttcgagcgcgatgtgggcaccaagacttccttctatggtttcactgtgaacacgatgaagaactccctcgtctcctactggaatctgggcttcacctccgtgccacaaggaca

SEQ ID NO: 57415 - DNA, 120 bp, Artificial Sequence
  ENSG00000070731_6 (sequence is synthesized)
ggacctgcagtatatcttcatcccctcagacatccgcgactatgtgatgctgagatcggccattctgggcgtgcctgtccctgagggcctagataaaggggacaggccgcacgcctattt

SEQ ID NO: 57416 - DNA, 120 bp, Artificial Sequence
  ENSG00000070731_7 (sequence is synthesized)
gagacctatatatgcctagtaccggggctctcatgctgctgacagctttgcatacctgtgaccaggtcagtgcctatggattcatcacaagcaactactggaaattttccgaccactatt

SEQ ID NO: 57417 - DNA, 120 bp, Artificial Sequence
  ENSG00000070731_8 (sequence is synthesized)
tcgaacgaaaaatgaagccattgatattttatgcaaaccacgatctgtccctggaagctgccctgtggagggacctgcacaaggccggcatccttcagctgtaccagcgctgaccccaat

SEQ ID NO: 57418 - DNA, 120 bp, Artificial Sequence
  ENSG00000070731_9 (sequence is synthesized)
gcactgagccctttgcttcttcaagagttgcggccctgatcctctcaagtggccaaaagcttttttaacttttcaatcttcaccttcccttgccaacagagggcactggggtgaattcaa

SEQ ID NO: 57419 - DNA, 120 bp, Artificial Sequence
  ENSG00000070731_10 (sequence is synthesized)
gattttcatcgaggtctgttcaatataggacaccccagcttgtccttggctcatccaagaactcttctgtatctaaaacaatacatctcaatcttggccaagggaaaatggactgctttg

SEQ ID NO: 57420 - DNA, 120 bp, Artificial Sequence
  ENSG00000070731_11 (sequence is synthesized)
ctggattggcactgagcaactttaggaaatgtcggtggagtgttcagcaagatcagacagcagtccaggtcaaaggcaaacacacacgctccagcccaaatcctcctggtggcacatcct

SEQ ID NO: 57421 - DNA, 120 bp, Artificial Sequence
  ENSG00000070731_12 (sequence is synthesized)
accccagatgctaaagtgattcaaggactccaggacacctcttaagagcctttctaagaacatgataggcttacttctgctccataataaagtgggagaaaaaagccagaatataactta

SEQ ID NO: 57422 - DNA, 120 bp, Artificial Sequence
  ENSG00000070731_13 (sequence is synthesized)
agactagataactgcgtacatgatggaccatttttttttttttggctgggtagagaaatcatataaaacgcaggctgtttagcatggagatgactctcagaacactgggagggtctggca

SEQ ID NO: 57423 - DNA, 120 bp, Artificial Sequence
  ENSG00000070731_14 (sequence is synthesized)
cttgatgggggttagttgcttggcagcctgcctgccactgagggaagtcccattagagatgtatcaccaccttgtcaccaacaggatgatgtcaccaggtaataaaccttcatcctcata

SEQ ID NO: 57424 - DNA, 120 bp, Artificial Sequence
  ENSG00000070731_15 (sequence is synthesized)
gctgcatcatctgagagacccaaaagcttgactggagctgacatcaagatggcgtctcacgggcccttgccacttgggccctctgtaggctatttgagtgtcctcacgacatggcagcta

SEQ ID NO: 57425 - DNA, 120 bp, Artificial Sequence
  ENSG00000070731_16 (sequence is synthesized)
acttcatccagagtgagtgatctgagaacgtaaaggaagccacagtgccttttatgacctagtctctaagccacacaccatcactttcctctttatcagaaaaatcctgtgcatgagtcg

SEQ ID NO: 57426 - DNA, 120 bp, Artificial Sequence
  ENSG00000070731_17 (sequence is synthesized)
ctaagtccagcccatactccaggggatggcaattgggtgccacctcctgaaggagcattagaggatttgtggacctacactgaaaccagtacagcacctctgggtgggaatgaaaggtat

SEQ ID NO: 57427 - DNA, 120 bp, Artificial Sequence
  ENSG00000070731_18 (sequence is synthesized)
ttgggtggagggctgtccacactgaggagctaaacatgtcctggttcccctctgggctcattgtctctattctgacaggacctgcagtatatcttcatcccctcagacatccgcgactat

SEQ ID NO: 57428 - DNA, 120 bp, Artificial Sequence
  ENSG00000070731_19 (sequence is synthesized)
gtgatgctgagatcggccattctgggcgtgcctgtccctgagggcctagataaaggggacagggtaccgcggctactccggcgccctgaccctcccctccatctcccccttgcaatacga

SEQ ID NO: 57429 - DNA, 120 bp, Artificial Sequence
  ENSG00000070731_20 (sequence is synthesized)
cggctctgggcgctctgtccacttctatcatgggtcctaggccgcacgcctattttggaccagaagcctctgccagtaaattcaagctgctacatccggacttcatcagctacctgacag

SEQ ID NO: 57430 - DNA, 120 bp, Artificial Sequence
  ENSG00000070731_21 (sequence is synthesized)
ctttctgatgctggagcctgctagaccaggggtccccaatcccaagcctggtccgagacctgttaggaacagggcatcgcagcaggagggacaccacatcatttgaagcattctttcaat

SEQ ID NO: 57431 - DNA, 120 bp, Artificial Sequence
  ENSG00000070731_22 (sequence is synthesized)
tgcaccactgtactccagcaaagcactgggattacagatgtgagccaccacgatgggcacagacagactttgtccgcccctagagctaagggggtcggtcagtccaaaagcttccaaggg

SEQ ID NO: 57432 - DNA, 120 bp, Artificial Sequence
  ENSG00000070731_23 (sequence is synthesized)
cgactatgtgatgctgagatcggccattctgggcgtgcctgtccctgagggcctagataaaggggacagccccgctcctaccgctcagggtaccgcggctactccggcgccctgaccctc

SEQ ID NO: 57433 - DNA, 80 bp, Artificial Sequence
  ENSG00000070731_24 (sequence is synthesized)
cagccccgggggacccgccgcccagctcccgagggtgcggcagcctctggccactcagccggggccgagagggagctgcc

SEQ ID NO: 57434 - DNA, 120 bp, Artificial Sequence
  ENSG00000070731_25 (sequence is synthesized)
gggccagcggccggagccagctgccaacccagagtcccctccacctgtggctgctggggtgaagggaggggtctgagagaagcctggccaccttttgaaaggggacaccacatcatttga

SEQ ID NO: 57435 - DNA, 120 bp, Artificial Sequence
  ENSG00000070748_0 (sequence is synthesized)
aaatgctgagctaggggcaggaggcatgggcgggacagtgttctgtgcccccttctagagcctaaatttgttgcccgagttcctccgggaagcgctccgggtagattctgggggccggga

SEQ ID NO: 57436 - DNA, 120 bp, Artificial Sequence
  ENSG00000070748_1 (sequence is synthesized)
gctgagatccctgggcggggagctggggaagggatggggctgaggacagcgaagaagagggggcttgggggaggggggaaatggaagagagaggagggaggaggtacaagaggaaggaga

SEQ ID NO: 57437 - DNA, 120 bp, Artificial Sequence
  ENSG00000070748_2 (sequence is synthesized)
gaagtgcggccagcttgctttctccagtcgggtggccgcggggacccgggcgacgtcggaggccctgccgggaacccaggctgcagcccccacccccgcgctgcgacacgccccccaccc

SEQ ID NO: 57438 - DNA, 120 bp, Artificial Sequence
  ENSG00000070748_3 (sequence is synthesized)
cttccggctcacacccccgcccacactcctgagtggtgcggtgcagcgtcggccgaggcagcagagccgaggagagcaggtccacacctctgcatccctgcaccaggactcaccaagacg

SEQ ID NO: 57439 - DNA, 120 bp, Artificial Sequence
  ENSG00000070748_4 (sequence is synthesized)
cccatcctggaaaaggtcccccgtaagatggcagcaaaaactcccagcagtgaggagtctgggctgcccaaactgcccgtgcccccgctgcagcagaccctggccacgtacctgcagtgc

SEQ ID NO: 57440 - DNA, 120 bp, Artificial Sequence
  ENSG00000070748_5 (sequence is synthesized)
atgcgacacttggtgtctgaggagcagttcaggaagagccaggccattgtgcagcagtttggggcccctggtggcctcggcgagaccctgcagcagaaactcctggagcggcaggagaag

SEQ ID NO: 57441 - DNA, 120 bp, Artificial Sequence
  ENSG00000070748_6 (sequence is synthesized)
acagccaactgggtgtctgagtactggctgaatgacatgtatctcaacaaccgcctggccctgcctgtcaactccagccctgccgtgatctttgctcggcagcacttccctggcaccgat

SEQ ID NO: 57442 - DNA, 120 bp, Artificial Sequence
  ENSG00000070748_7 (sequence is synthesized)
gaccagctgaggtttgcagccagcctcatctctggtgtactcagctacaaggccctgctggacagccactccattcccactgactgtgccaaaggccagctgtcagggcagcccctttgc

SEQ ID NO: 57443 - DNA, 120 bp, Artificial Sequence
  ENSG00000070748_8 (sequence is synthesized)
atgaagcaatactatgggctcttctcctcctaccggctccccggccatacccaggacacgctggtggctcagaacagcagcatcatgccggagcctgagcacgtcatcgtagcctgctgc

SEQ ID NO: 57444 - DNA, 120 bp, Artificial Sequence
  ENSG00000070748_9 (sequence is synthesized)
aatcagttctttgtcttggatgttgtcattaatttccgccgtctcagtgagggggatctgttcactcagttgagaaagatagtcaaaatggcttccaacgaggacgagcgtttgcctcca

SEQ ID NO: 57445 - DNA, 120 bp, Artificial Sequence
  ENSG00000070748_10 (sequence is synthesized)
tgaaagactccaccaaccgggactcgctggacatgattgagcgctgcatctgccttgtatgcctggacgcgccaggaggcgtggagctcagcgacacccacagggcactccagctccttc

SEQ ID NO: 57446 - DNA, 120 bp, Artificial Sequence
  ENSG00000070748_11 (sequence is synthesized)
acggcggaggctacagcaagaacggggccaatcgctggtacgacaagtccctgcagtttgtggtgggccgagacggcacctgcggtgtggtgtgcgaacactccccattcgatggcatcg

SEQ ID NO: 57447 - DNA, 120 bp, Artificial Sequence
  ENSG00000070748_12 (sequence is synthesized)
tcctggtgcagtgcactgagcatctgctcaagcacgtgacgcagagcagcaggaagctgatccgagcagactccgtcagcgagctccccgccccccggaggctgcggtggaaatgctccc

SEQ ID NO: 57448 - DNA, 120 bp, Artificial Sequence
  ENSG00000070748_13 (sequence is synthesized)
cggaaattcaaggccacttagcctcctcggcagaaaaacttcaacgaatagtaaagaaccttgacttcattgtctataagtttgacaactatgggaaaacattcattaagaagcagaaat

SEQ ID NO: 57449 - DNA, 120 bp, Artificial Sequence
  ENSG00000070748_14 (sequence is synthesized)
gcagccctgatgccttcatccaggtggccctccagctggccttctacaggctccatcgaagactggtgcccacctacgagagcgcgtccatccgccgattccaggagggacgcgtggaca

SEQ ID NO: 57450 - DNA, 120 bp, Artificial Sequence
  ENSG00000070748_15 (sequence is synthesized)
acatcagatcggccactccagaggcactggcttttgtgagagccgtgactgaccacaaggctgctgtgccagcttctgagaagcttctgctcctgaaggatgccatccgtgcccagactg

SEQ ID NO: 57451 - DNA, 120 bp, Artificial Sequence
  ENSG00000070748_16 (sequence is synthesized)
catacacagtcatggccataacagggatggccattgacaaccacctgctggcactgcgggagctggcccgggccatgtgcaaggagctgcccgagatgttcatggatgaaacctacctga

SEQ ID NO: 57452 - DNA, 120 bp, Artificial Sequence
  ENSG00000070748_17 (sequence is synthesized)
tgagcaaccggtttgtcctctccactagccaggtgcccacaaccacggagatgttctgctgctatggtcctgtggtcccaaatgggtatggtgcctgctacaacccccagccagagacca

SEQ ID NO: 57453 - DNA, 120 bp, Artificial Sequence
  ENSG00000070748_18 (sequence is synthesized)
tccttttctgcatctctagctttcacagctgcaaagagacttcttctagcaagtttgcaaaagctgtggaagaaagcctcattgacatgagagacctctgcagtctgctgccgcctactg

SEQ ID NO: 57454 - DNA, 120 bp, Artificial Sequence
  ENSG00000070748_19 (sequence is synthesized)
agagcaagccattggcaacaaaggaaaaagccacgaggcccagccagggacaccaaccttgactcctgccactaggtttcacctcccaaacccagcctctagaacagccagaccctgcag

SEQ ID NO: 57455 - DNA, 120 bp, Artificial Sequence
  ENSG00000070748_20 (sequence is synthesized)
tcaacgccgctctggggacgcgtcaggcccagcgcacagcctgggcagctcagcctgtcagctgagcacgggcgcctcaaggggtgcggccctctcagaaggaaggtccacacctctgca

SEQ ID NO: 57456 - DNA, 120 bp, Artificial Sequence
  ENSG00000070748_21 (sequence is synthesized)
cccgccccgttgaggctttgagaaaggagtaggagccgagcattccggcagaggaagaaaaacggcccatcttttagagtccgacctctggaaattcgggtggccgcggggacccgggcg

SEQ ID NO: 57457 - DNA, 120 bp, Artificial Sequence
  ENSG00000070748_22 (sequence is synthesized)
cccgccccgttgaggctttgagaaaggagtaggagccgagcattccggcagaggaagaaaaacggcccatcttttagagtccgacctctggaaatgtccacacctctgcatccctgcacc

SEQ ID NO: 57458 - DNA, 120 bp, Artificial Sequence
  ENSG00000070748_23 (sequence is synthesized)
ctgcctctccccagactaaggcaggtggcccctaggggccctggctgcccagcctccctgcatacctccctgggcactcctatggcatctacactggcagcctgcagacccgagactgcc

SEQ ID NO: 57459 - DNA, 120 bp, Artificial Sequence
  ENSG00000070748_24 (sequence is synthesized)
taggtcacaacgcctccagcaggcccagagtctccctgccctggccacaggccaggctcccaattagcccagatgcatcctggagcacagggccttaaaggcctccattcacccacgcat

SEQ ID NO: 57460 - DNA, 120 bp, Artificial Sequence
  ENSG00000070748_25 (sequence is synthesized)
acctcagtgcactcctgaagggcagggactacgtccgcaccttccagaacgctaggacacagaccaggctctagaagcccggggaaaccccagatgcatgcatactgttttgcatgcaat

SEQ ID NO: 57461 - DNA, 120 bp, Artificial Sequence
  ENSG00000070748_26 (sequence is synthesized)
tctcatctcgaattgtaatccccacatgtcaagggagggacccggtgagaggtgattggatcatgagagcggtttcccccatgctgttctcatgacagtcagtgagttcccaggagatct

SEQ ID NO: 57462 - DNA, 120 bp, Artificial Sequence
  ENSG00000070748_27 (sequence is synthesized)
gatggtttaaaagtgcttggcagtcccccccttgttctctgtctctcctgctgccatgggaagaaggtccttgcttccccttcgcgttctgccatgattgtaaatttcctgatgcctccc

SEQ ID NO: 57463 - DNA, 120 bp, Artificial Sequence
  ENSG00000070748_28 (sequence is synthesized)
acggcggaggctacagcaagaacggggccaatcgctggtacgacaagtccctgcagagctgtcagctttttggatgtccacccccgtggcctggcgatttcaacatacctccctcaatcc

SEQ ID NO: 57464 - DNA, 120 bp, Artificial Sequence
  ENSG00000070748_29 (sequence is synthesized)
ctgagaagtagaacagcccagcatctccatggaagaaagactggcagattatcaggcgaaccagagaagccagcagggcttcatggacctgaattcaagatgatggagaactggtctcag

SEQ ID NO: 57465 - DNA, 120 bp, Artificial Sequence
  ENSG00000070756_0 (sequence is synthesized)
ccccttctccccggcggttagtgctgagagtgcggagtgtgtgctccgggctcggaacacacatttattattaaaaaatccaaaaaaaatctaaaaaaatcttttaaaaaaccccaaaaa

SEQ ID NO: 57466 - DNA, 120 bp, Artificial Sequence
  ENSG00000070756_1 (sequence is synthesized)
aatttacaaaaaatccgcgtctcccccgccggagacttttattttttttcttcctcttttataaaataacccggtgaagcagccgagaccgacccgcccgcccgcggccccgcagcagct

SEQ ID NO: 57467 - DNA, 120 bp, Artificial Sequence
  ENSG00000070756_2 (sequence is synthesized)
ccaagaaggaaccaagagaccgaggccttcccgctgcccggacccgacaccgccaccctcgctccccgccggcagccggcagccagcggcagtggatcgaccccgttctgcggccgttga

SEQ ID NO: 57468 - DNA, 120 bp, Artificial Sequence
  ENSG00000070756_3 (sequence is synthesized)
gtagttttcaattccggttgatttttgtccctctgcgcttgctccccgctcccctccccccggctccggcccccagccccggcactcgctctcctcctctcacggaaaggtcgcggcctg

SEQ ID NO: 57469 - DNA, 120 bp, Artificial Sequence
  ENSG00000070756_4 (sequence is synthesized)
tggccctgcgggcagccgtgccgagatgaaccccagtgcccccagctaccccatggcctcgctctacgtgggggacctccaccccgacgtgaccgaggcgatgctctacgagaagttcag

SEQ ID NO: 57470 - DNA, 120 bp, Artificial Sequence
  ENSG00000070756_5 (sequence is synthesized)
cccggccgggcccatcctctccatccgggtctgcagggacatgatcacccgccgctccttgggctacgcgtatgtgaacttccagcagccggcggacgcggagcgtgctttggacaccat

SEQ ID NO: 57471 - DNA, 120 bp, Artificial Sequence
  ENSG00000070756_6 (sequence is synthesized)
gaattttgatgttataaagggcaagccagtacgcatcatgtggtctcagcgtgatccatcacttcgcaaaagtggagtaggcaacatattcattaaaaatctggacaaatccattgataa

SEQ ID NO: 57472 - DNA, 120 bp, Artificial Sequence
  ENSG00000070756_7 (sequence is synthesized)
taaagcactgtatgatacattttctgcttttggtaacatcctttcatgtaaggtggtttgtgatgaaaatggttccaagggctatggatttgtacactttgagacgcaggaagcagctga

SEQ ID NO: 57473 - DNA, 120 bp, Artificial Sequence
  ENSG00000070756_8 (sequence is synthesized)
aagagctattgaaaaaatgaatggaatgctcctaaatgatcgcaaagtatttgttggacgatttaagtctcgtaaagaacgagaagctgaacttggagctagggcaaaagaattcaccaa

SEQ ID NO: 57474 - DNA, 120 bp, Artificial Sequence
  ENSG00000070756_9 (sequence is synthesized)
tgtttacatcaagaattttggagaagacatggatgatgagcgccttaaggatctctttggcaagtttgggcctgccttaagtgtgaaagtaatgactgatgaaagtggaaaatccaaagg

SEQ ID NO: 57475 - DNA, 120 bp, Artificial Sequence
  ENSG00000070756_10 (sequence is synthesized)
atttggatttgtaagctttgaaaggcatgaagatgcacagaaagctgtggatgagatgaacggaaaggagctcaatggaaaacaaatttatgttggtcgagctcagaaaaaggtggaacg

SEQ ID NO: 57476 - DNA, 120 bp, Artificial Sequence
  ENSG00000070756_11 (sequence is synthesized)
atgatgaacgtctccggaaagagttttctccatttggtacaatcactagtgcaaaggttatgatggagggtggtcgcagcaaagggtttggttttgtatgtttctcctccccagaagaag

SEQ ID NO: 57477 - DNA, 120 bp, Artificial Sequence
  ENSG00000070756_12 (sequence is synthesized)
ccactaaagcagttacagaaatgaacggtagaattgtggccacaaagccattgtatgtagctttagctcagcgcaaagaagagcgccaggctcacctcactaaccagtatatgcagagaa

SEQ ID NO: 57478 - DNA, 120 bp, Artificial Sequence
  ENSG00000070756_13 (sequence is synthesized)
tggcaagtgtacgagctgttcccaaccctgtaatcaacccctaccagccagcacctccttcaggttacttcatggcagctatcccacagactcagaaccgtgctgcatactatcctccta

SEQ ID NO: 57479 - DNA, 120 bp, Artificial Sequence
  ENSG00000070756_14 (sequence is synthesized)
gccaaattgctcaactaagaccaagtcctcgctggactgctcagggtgccagacctcatccattccaaaatatgcccggtgctatccgcccagctgctcctagaccaccatttagtacta

SEQ ID NO: 57480 - DNA, 120 bp, Artificial Sequence
  ENSG00000070756_15 (sequence is synthesized)
tgagaccagcttcttcacaggttccacgagtcatgtcaacacagcgtgttgctaacacatcaacacagacaatgggtccacgtcctgcagctgcagccgctgcagctactcctgctgtcc

SEQ ID NO: 57481 - DNA, 120 bp, Artificial Sequence
  ENSG00000070756_16 (sequence is synthesized)
gcaccgttccacagtataaatatgctgcaggagttcgcaatcctcagcaacatcttaatgcacagccacaagttacaatgcaacagcctgctgttcatgtacaaggtcaggaacctttga

SEQ ID NO: 57482 - DNA, 120 bp, Artificial Sequence
  ENSG00000070756_17 (sequence is synthesized)
ctgcttccatgttggcatctgcccctcctcaagagcaaaagcaaatgttgggtgaacggctgtttcctcttattcaagccatgcaccctactcttgctggtaaaatcactggcatgttgt

SEQ ID NO: 57483 - DNA, 120 bp, Artificial Sequence
  ENSG00000070756_18 (sequence is synthesized)
tggagattgataattcagaacttcttcatatgctcgagtctccagagtcactccgttctaaggttgatgaagctgtagctgtactacaagcccaccaagctaaagaggctgcccagaaag

SEQ ID NO: 57484 - DNA, 120 bp, Artificial Sequence
  ENSG00000070756_19 (sequence is synthesized)
cagttaacagtgccaccggtgttccaactgtttaaaattgatcagggaccatgaaaagaaacttgtgcttcaccgaagaaaaatatctaaacatcgaaaaacttaaatattatggaaaaa

SEQ ID NO: 57485 - DNA, 120 bp, Artificial Sequence
  ENSG00000070756_20 (sequence is synthesized)
aaacattgcaaaatataaaataaataaaaaaaggaaaggaaactttgaaccttatgtaccgagcaaatgccaggtctagcaaacataatgctagtcctagattacttattgatttaaaaa

SEQ ID NO: 57486 - DNA, 120 bp, Artificial Sequence
  ENSG00000070756_21 (sequence is synthesized)
caaaaaaacacaaaaaaatagtaaaatataaaaacaaattaatgttttatagaccctgggaaaaagaattttcagcaaagtacaaaaatttaaagcattcctttctttaattttgtaatt

SEQ ID NO: 57487 - DNA, 78 bp, Artificial Sequence
  ENSG00000070756_22 (sequence is synthesized)
tacaaaaatttaaagcattcctttctttaattttgtaattctttactgtggaatagctcagaatgtcagtaatttgga

SEQ ID NO: 57488 - DNA, 120 bp, Artificial Sequence
  ENSG00000070756_23 (sequence is synthesized)
gagcatattttgaaatgtacatagcaaaagatcattttacagttcatttaaatgtattgctaatttttcaaggaaaagtggaactaactatagaggaattaaaggaattttacccgttaa

SEQ ID NO: 57489 - DNA, 120 bp, Artificial Sequence
  ENSG00000070756_24 (sequence is synthesized)
atacacatgtttacattgttgagctacatttagtttagtgcttgaaataggaactgtgcagtaatggatatctttatttcacaaatatccaggttagatggctaacagattgtctctcaa

SEQ ID NO: 57490 - DNA, 120 bp, Artificial Sequence
  ENSG00000070756_25 (sequence is synthesized)
ctgtttaaaaaacaaggacattctcctccataaccatgacaccgccatgaaaacgatcagcaccgtcgaatcctcacgccccactcaagttccttgattgcttcaataatgtcctccgta

SEQ ID NO: 57491 - DNA, 120 bp, Artificial Sequence
  ENSG00000070756_26 (sequence is synthesized)
atctagttcaaaatcgggagttacatttcattgtcatgcctaaaacgtaagaattgctcattcactttggagcagttcttcagtctatccttgattttcatgaccttgacacttttgaac

SEQ ID NO: 57492 - DNA, 120 bp, Artificial Sequence
  ENSG00000070756_27 (sequence is synthesized)
attatagaccagttattcaatagaatatctttcaatctgggtttgtccgatacctctttattattagattgaaatgatacattttggtggaactatcacagaattgacattgcattcttc

SEQ ID NO: 57493 - DNA, 120 bp, Artificial Sequence
  ENSG00000070756_28 (sequence is synthesized)
tcattacatcctgtctggtggcctgtgattctgttttatctcattaccaatggcgtttgttttgagcatttgattaagttgttatctgccactataaagttgctatttttctctttataa

SEQ ID NO: 57494 - DNA, 120 bp, Artificial Sequence
  ENSG00000070756_29 (sequence is synthesized)
gttggtgtcagcgagcgccgcggccgttggggactccagctcccagcaggcaccgcttctgcggccgacgcgcgtggcggcggtgccggctgggactcgtagtgcggtccggcagccgag

SEQ ID NO: 57495 - DNA, 120 bp, Artificial Sequence
  ENSG00000070756_30 (sequence is synthesized)
gcattaacagggtttagttatttgattcagtgatttataattgtctaaattgtaacgctctttttttgctcctcattctaccattacgttaactttttttttcttttttttaataggtta

SEQ ID NO: 57496 - DNA, 120 bp, Artificial Sequence
  ENSG00000070756_31 (sequence is synthesized)
gtccttgtatgaattaatgtttttacttattgatgctctgagtctgggaaaatggcaagtgttaagactcagctttaaaaagttttgtcactttttagtcttttatgcaaacctcagatc

SEQ ID NO: 57497 - DNA, 120 bp, Artificial Sequence
  ENSG00000070756_32 (sequence is synthesized)
gaagaagacagcataaacacttttcactcagtaagttttcccagttaatgtatattcacatctttaaaatgcagcattccaaaatatgcccggtgctatccgcccagctgctcctagacc

SEQ ID NO: 57498 - DNA, 120 bp, Artificial Sequence
  ENSG00000070759_0 (sequence is synthesized)
ctttcgcggcccgggagctcagcagagctaccagctgccctgttggcttcgctggtcggatcgtcctcctggccccgccaaacaggcggggggagcggccccgactgtggggccatggca

SEQ ID NO: 57499 - DNA, 120 bp, Artificial Sequence
  ENSG00000070759_1 (sequence is synthesized)
gtagtctcctcgttcgccgccgccgctagcctagctgagtcgccggcttctgcgctaggggctcccaccgcctccgcaggctaaggagccgctgccaccaacgagctgtgagggttacta

SEQ ID NO: 57500 - DNA, 120 bp, Artificial Sequence
  ENSG00000070759_2 (sequence is synthesized)
tgctccctctttgccgccgtctcctcctcttgcccgcgcaggcacccctctggctgctcagtcctgcctcagtgtcaaaccagaagagaagtaaaattcaacaaaaatttatgtgtggag

SEQ ID NO: 57501 - DNA, 120 bp, Artificial Sequence
  ENSG00000070759_3 (sequence is synthesized)
ttccttcttaaaagaagaaaaaagtgattatttagactatggatcggagcaaacggaattcaattgcaggatttcctccacgtgtggagcgtcttgaagagtttgaaggaggtggtggag

SEQ ID NO: 57502 - DNA, 120 bp, Artificial Sequence
  ENSG00000070759_4 (sequence is synthesized)
gagaaggaaatgtgagccaggtgggaagagtttggccatcttcgtatcgagctcttataagtgccttttccagactgacgcgtttggatgatttcacctgtgaaaaaatagggtctggct

SEQ ID NO: 57503 - DNA, 120 bp, Artificial Sequence
  ENSG00000070759_5 (sequence is synthesized)
tcttttctgaagtgttcaaggtacgacaccgagcttctggtcaggtgatggctcttaagatgaacacattgagcagtaaccgggcaaacatgctgaaagaagtacagctcatgaatagac

SEQ ID NO: 57504 - DNA, 120 bp, Artificial Sequence
  ENSG00000070759_6 (sequence is synthesized)
tctcccatcccaacatccttaggttcatgggtgtatgtgttcatcaaggacaattgcatgcacttacagagtatatcaactccgggaacctggaacagttgctagacagtaacctgcatt

SEQ ID NO: 57505 - DNA, 120 bp, Artificial Sequence
  ENSG00000070759_7 (sequence is synthesized)
tgccttggactgtgagggtaaaactggcctatgacatagcagtgggcctcagctaccttcacttcaaaggcatttttcatcgggacctcacatctaagaactgcctgataaagagggatg

SEQ ID NO: 57506 - DNA, 120 bp, Artificial Sequence
  ENSG00000070759_8 (sequence is synthesized)
agaatggttactctgcagtggtagctgactttggcctggctgagaagatccccgatgtcagcatggggagtgagaagctggccgtggtgggttccccattctggatggcacctgaggttc

SEQ ID NO: 57507 - DNA, 120 bp, Artificial Sequence
  ENSG00000070759_9 (sequence is synthesized)
tccgagatgagccctataatgaaaaggcagatgtgttctcttatggtatcatcctctgcgagatcatcgcccgcatccaggccgatccggactatcttccccgcacagagaatttcgggc

SEQ ID NO: 57508 - DNA, 120 bp, Artificial Sequence
  ENSG00000070759_10 (sequence is synthesized)
tggactatgatgctttccagcacatggtgggagactgtcccccagattttctgcaacttactttcaactgctgtaacatggatcccaaactgcgcccatcttttgtggagattgggaaga

SEQ ID NO: 57509 - DNA, 120 bp, Artificial Sequence
  ENSG00000070759_11 (sequence is synthesized)
ccctggaggaaattctgagccgcctacaggaagaagagcaggagagggataggaagctgcagcccacagccaggggactcttggagaaagcacctggggtgaagcgactaagctcactgg

SEQ ID NO: 57510 - DNA, 120 bp, Artificial Sequence
  ENSG00000070759_12 (sequence is synthesized)
ttttcccgtaagcccccacgtacagtgagtgtcttggacccatactaccggccacgagatggtgctgcccgcacccccaaagtcaacccttttagtgctcgccaggacctcatggggggc

SEQ ID NO: 57511 - DNA, 120 bp, Artificial Sequence
  ENSG00000070759_13 (sequence is synthesized)
aagatcaagttttttgacctgcccagcaagtctgtcatctctctggtatttgacctggatgcaccagggcccggaactatgcccctggctgactggcaggagcccctggccccacctatt

SEQ ID NO: 57512 - DNA, 120 bp, Artificial Sequence
  ENSG00000070759_14 (sequence is synthesized)
cgccggtggcgttccttgcctggttcgcctgagttcttgcatcaagaggcttgtccatttgtgggccgggaagaatcgctatctgatgggcccccaccacgcctaagtagtctcaagtac

SEQ ID NO: 57513 - DNA, 120 bp, Artificial Sequence
  ENSG00000070759_15 (sequence is synthesized)
agagttaaagagatcccaccattccgggcatctgccctaccagctgctcaagcccatgaggctatggactgctccattctccaggaagaaaatggttttgggtccaggccccaggggacc

SEQ ID NO: 57514 - DNA, 120 bp, Artificial Sequence
  ENSG00000070759_16 (sequence is synthesized)
agtccatgccctgcgggtgcttctgaggagatggaggtagaagaaaggccagcaggctcaactccagccaccttctccacctcaggcataggcctgcaaacccagggaaagcaggatggg

SEQ ID NO: 57515 - DNA, 120 bp, Artificial Sequence
  ENSG00000070759_17 (sequence is synthesized)
tgagggggtttagtccctgcctcaccttggggatggaccttcagctgaaaccatatggccccctaggtgcacagccttgattcttccctggagcctacagagcaggcaggctaggccaag

SEQ ID NO: 57516 - DNA, 120 bp, Artificial Sequence
  ENSG00000070759_18 (sequence is synthesized)
ccaggctcaacttctgggctcccagtgcccattggctgtgtatgacgggaggcagcagtgagaggccttcctagttagggccaacagctgataccaagcctctgaaatccagcaaggagg

SEQ ID NO: 57517 - DNA, 120 bp, Artificial Sequence
  ENSG00000070759_19 (sequence is synthesized)
tctgcctcccaccagaccctctccagtgtacttccccagataggaccagaggatgtctagttctaggctgagctggcaggcagctattaccccggttctttccccaccccaggtctgtct

SEQ ID NO: 57518 - DNA, 120 bp, Artificial Sequence
  ENSG00000070759_20 (sequence is synthesized)
cttgccttttcttggggcatataagctactgagtggaacatggagctgatcaagaggccgtaatggtcatggctgtttcccagacctgaatattggggtgcttcttgccagtattctaag

SEQ ID NO: 57519 - DNA, 120 bp, Artificial Sequence
  ENSG00000070759_21 (sequence is synthesized)
acatttgagtaattgctgtttgcacttactgcatggtcagaccacgtcactacatttctatgcaaggggacagcaaggcagcgtggtggtcatggctcttagctaacctattcaaagacc

SEQ ID NO: 57520 - DNA, 120 bp, Artificial Sequence
  ENSG00000070759_22 (sequence is synthesized)
ttttcctgttgattaatctattttcatatttataaaggagtcttaatgttctgccccataagactttcaaccttgtggttgggagtggggctggttttgtaggccctagggcctgcttct

SEQ ID NO: 57521 - DNA, 120 bp, Artificial Sequence
  ENSG00000070759_23 (sequence is synthesized)
atgtatttatcaacatgtgatacattcaattggttaaatggtttatacagggactgatttgcttcccttcctgccatggctggagctttgggaacagtctgtccttacagagctgcaata

SEQ ID NO: 57522 - DNA, 120 bp, Artificial Sequence
  ENSG00000070759_24 (sequence is synthesized)
agaaataaccaaagatgaagctggtcaaatattttcataacttgcttctgttgatttttttttttgtaaaactttcccaagacattttcagacttaaaaataaagtcagtgttacaggtg

SEQ ID NO: 57523 - DNA, 120 bp, Artificial Sequence
  ENSG00000070759_25 (sequence is synthesized)
ccaatggaggttgggtagaggtggaaggagagctcattttcacctagaagagggcctcaggttcctccactggatcttctgcatctgctggcagatgaaggaagaagctgtggaaaatag

SEQ ID NO: 57524 - DNA, 120 bp, Artificial Sequence
  ENSG00000070759_26 (sequence is synthesized)
tgttgaggttttatggaacaggcctagaaatgacataatcacttctgcccatataccactggccagaacttagtgttacagtcttaaccaactataataaacactgggaaatgtaatcta

SEQ ID NO: 57525 - DNA, 120 bp, Artificial Sequence
  ENSG00000070761_0 (sequence is synthesized)
attgaaggcggggaaataccgcggcgcggacggtagttgctgtggtttccgttctgagctcgcagcttaggagctgaagatcgcggacttagcgttgccgcgtccgagtccggccatcag

SEQ ID NO: 57526 - DNA, 120 bp, Artificial Sequence
  ENSG00000070761_1 (sequence is synthesized)
tggctgcagatccggaggccaggagctcaaccacccttcttcggaacagggccggcctgctgctgtgccctcgacgctcggtgcctgtatctactccggggcctaggtcggctccggggg

SEQ ID NO: 57527 - DNA, 120 bp, Artificial Sequence
  ENSG00000070761_2 (sequence is synthesized)
cggcttaggagaaggccgccggcgagatgttcaaaaacacgttccagagcggcttcctctccatcctctacagcatcggcagcaagcctctgcaaatctgggacaaaaaggtacggaatg

SEQ ID NO: 57528 - DNA, 120 bp, Artificial Sequence
  ENSG00000070761_3 (sequence is synthesized)
gccacatcaaaagaatcactgataatgacatccagtccctggtgctagagattgaagggacaaatgtaagcaccacatatatcacatgccctgcagaccccaagaagacgctgggaatta

SEQ ID NO: 57529 - DNA, 120 bp, Artificial Sequence
  ENSG00000070761_4 (sequence is synthesized)
aacttcctttccttgtcatgattatcaaaaacctgaagaagtattttaccttcgaagtgcaggtactagatgacaagaatgtgcgtcgtcgctttcgggcaagtaactaccagagcacca

SEQ ID NO: 57530 - DNA, 120 bp, Artificial Sequence
  ENSG00000070761_5 (sequence is synthesized)
tcacacggcgagcatacggcaccaattacatcgagaccctcagagtgcagatccatgcaaattgtcgcatccgacgggtttacttctcagacagactctactcagaagatgagctgccgg

SEQ ID NO: 57531 - DNA, 120 bp, Artificial Sequence
  ENSG00000070761_6 (sequence is synthesized)
cagagttcaaactgtatctcccagttcagaacaaggcaaagcaataactggaattgtgactcgagggatagacccctggatgtgactcttctttttaaaaggaaactatgtggaggacga

SEQ ID NO: 57532 - DNA, 120 bp, Artificial Sequence
  ENSG00000070761_7 (sequence is synthesized)
tgcaaaaacatatttatcttagtttgctctgctgtagttctgttatttatacttggtgttgcttgtcatggacaccggtgaacatgccgtaactctgtgactgcattgtaagtgcagtgg

SEQ ID NO: 57533 - DNA, 120 bp, Artificial Sequence
  ENSG00000070761_8 (sequence is synthesized)
gggtaagcagtcctgtgagtggcgcatgaacgctggagcttattccgccgcctgccccagtgtggggggagatacctttaccatgaacttacagaattaaagatggcccataaggaattc

SEQ ID NO: 57534 - DNA, 120 bp, Artificial Sequence
  ENSG00000070761_9 (sequence is synthesized)
cagaccaatatttcttcctgcggtttattctatgttttatatattatctaaatatatgtatatgctgtgtcatactcataatctggaaatgaataaagtgatatattcctggtttgtaaa

SEQ ID NO: 57535 - DNA, 120 bp, Artificial Sequence
  ENSG00000070761_10 (sequence is synthesized)
atgacatccagtccctggtgctagagattgaagggacaaatgtaaggtaggttgccacctctgttctcccagagacatcatatactagggaggcagtacgtcatagaggttaatagcaca

SEQ ID NO: 57536 - DNA, 120 bp, Artificial Sequence
  ENSG00000070761_11 (sequence is synthesized)
gactgcggagtcagagtgccggatgtgagtctatctctgccacttagagcttaccatgggcaagttactgaatcccccagaccttagcatactcatctgtacaatgggcagaataatagt

SEQ ID NO: 57537 - DNA, 120 bp, Artificial Sequence
  ENSG00000070761_12 (sequence is synthesized)
acattttccttatagggttattgcgaggagtaaataaatgaatatatataaaacacgtaaagccttgcttagcacatagtaagcacgatgtcagtattagctatattattaaccaaagtg

SEQ ID NO: 57538 - DNA, 120 bp, Artificial Sequence
  ENSG00000070761_13 (sequence is synthesized)
gtctcagccttgggaaagcaagctgtgggaattcaggtccttgtctggacaaggttgtgtgcttcttccaagacagagctagtgtgatgcttcttctctgtatttcacaggtactagatg

SEQ ID NO: 57539 - DNA, 120 bp, Artificial Sequence
  ENSG00000070761_14 (sequence is synthesized)
tgtacatgaatgtgtccactcttggctataccaaagtgatagcctttgaactgatgggaaaaagtgaccctacaaagtatctttatccttttgcatgtattcttttctgcttctagtata

SEQ ID NO: 57540 - DNA, 120 bp, Artificial Sequence
  ENSG00000070761_15 (sequence is synthesized)
agcccagtgcagtccttgttatgtaaatttgatattagtaataaaatttaatcaggtttttaaagaaacagcacctagaaaacctagtaatttcaaagtgtcagagttagcgtggtatcc

SEQ ID NO: 57541 - DNA, 120 bp, Artificial Sequence
  ENSG00000070761_16 (sequence is synthesized)
attacatcgagaccctcagagtgcagaatccatccctaagacaagccaaggagatgccggagatgacgcgtttccagtcctggaagagggcctctagaagattcaggaaaagggggagaa

SEQ ID NO: 57542 - DNA, 120 bp, Artificial Sequence
  ENSG00000070761_17 (sequence is synthesized)
acactgcgtctaatattggcttgtggcccacatagcagaacagtgtgggtttctggcttcagttgccacactgtccagggagctttggcctcacaaaggtccaggaaatattcagaagtc

SEQ ID NO: 57543 - DNA, 120 bp, Artificial Sequence
  ENSG00000070761_18 (sequence is synthesized)
gggtcaggtatagaggtgaatacagcaagtaagacctccctcttgccagaatccatccctaagacaagccaaggagatgccggagatgacgcgtttccagtcctggaagagggcctctag

SEQ ID NO: 57544 - DNA, 80 bp, Artificial Sequence
  ENSG00000070770_0 (sequence is synthesized)
ctctcctccttcttctccgctgccgccgccgctgcccctttcccggccggtggctgccgctgccggtgccgccgccgccg

SEQ ID NO: 57545 - DNA, 120 bp, Artificial Sequence
  ENSG00000070770_1 (sequence is synthesized)
cccgcccgccatgcccggcccggccgcgggcagcagggcccgggtctacgccgaggtgaacagtctgaggagccgcgagtactgggactacgaggctcacgtcccgagctggggtaatca

SEQ ID NO: 57546 - DNA, 120 bp, Artificial Sequence
  ENSG00000070770_2 (sequence is synthesized)
agatgattaccaactggttcgaaaacttggtcggggaaaatatagtgaagtatttgaggccattaatatcaccaacaatgagagagtggttgtaaaaatcctgaagccagtgaagaaaaa

SEQ ID NO: 57547 - DNA, 120 bp, Artificial Sequence
  ENSG00000070770_3 (sequence is synthesized)
gaagataaaacgagaggttaagattctggagaaccttcgtggtggaacaaatatcattaagctgattgacactgtaaaggaccccgtgtcaaagacaccagctttggtatttgaatatat

SEQ ID NO: 57548 - DNA, 120 bp, Artificial Sequence
  ENSG00000070770_4 (sequence is synthesized)
caataatacagattttaagcaactctaccagatcctgacagactttgatatccggttttatatgtatgaactacttaaagctctggattactgccacagcaagggaatcatgcacaggga

SEQ ID NO: 57549 - DNA, 120 bp, Artificial Sequence
  ENSG00000070770_5 (sequence is synthesized)
tcaggagtacaatgttcgtgtagcctcaaggtacttcaagggaccagagctcctcgtggactatcagatgtatgattatagcttggacatgtggagtttgggctgtatgttagcaagcat

SEQ ID NO: 57550 - DNA, 120 bp, Artificial Sequence
  ENSG00000070770_6 (sequence is synthesized)
gatctttcgaagggaaccattcttccatggacaggacaactatgaccagcttgttcgcattgccaaggttctgggtacagaagaactgtatgggtatctgaagaagtatcacatagacct

SEQ ID NO: 57551 - DNA, 120 bp, Artificial Sequence
  ENSG00000070770_7 (sequence is synthesized)
agatccacacttcaacgatatcctgggacaacattcacggaaacgctgggaaaactttatccatagtgagaacagacaccttgtcagccctgaggccctagatcttctggacaaacttct

SEQ ID NO: 57552 - DNA, 120 bp, Artificial Sequence
  ENSG00000070770_8 (sequence is synthesized)
gcgatacgaccatcaacagagactgactgccaaagaggccatggagcacccatacttctaccctgtggtgaaggagcagtcccagccttgtgcagacaatgctgtgctttccagtggtct

SEQ ID NO: 57553 - DNA, 120 bp, Artificial Sequence
  ENSG00000070770_9 (sequence is synthesized)
cacggcagcacgatgaagactggaaagcgacgggtctgttgcggttctcccacttttccataagcagaacaagaaccaaatcaaacgtcttaacgcgtatagagagatcacgttccgtga

SEQ ID NO: 57554 - DNA, 120 bp, Artificial Sequence
  ENSG00000070770_10 (sequence is synthesized)
gcagacacaaaacggtggcaggtttggcgagcacgaactagaccaagcgaagggcagcccaccaccgtatatcaaacctcacttccgaatgtaaaaggctcacttgcctttggcttcctg

SEQ ID NO: 57555 - DNA, 120 bp, Artificial Sequence
  ENSG00000070770_11 (sequence is synthesized)
ttgacttcttcccgacccagaaagcatggggaatgtgaagggtatgcagaatgttgttggttactgttgctccccgagcccctcgactcgtcccgtggccgcctgtttttccagcaaacc

SEQ ID NO: 57556 - DNA, 120 bp, Artificial Sequence
  ENSG00000070770_12 (sequence is synthesized)
acgctaactagctgaccacagactccacagtggggggacgggcgcagtatgtggcatggcggcagttacatattattattttaaaagtatatattattgaataaaaggttttaaaagaaa

SEQ ID NO: 57557 - DNA, 120 bp, Artificial Sequence
  ENSG00000070770_13 (sequence is synthesized)
agaacttaagcagaatgtttcttgatacccagaggatttagtgaagtttttaaacttatattgaggcctccatcgaggaatcttcacatagaaactttccagtggaactgggaaaaaagt

SEQ ID NO: 57558 - DNA, 120 bp, Artificial Sequence
  ENSG00000070770_14 (sequence is synthesized)
ggccaagtcaaggggtaccagggacattataccttagaacctcccatagctcttgttggtccatatgttttctctttgctgctttattaatacctactgtgaatgtaacaaatcatccca

SEQ ID NO: 57559 - DNA, 120 bp, Artificial Sequence
  ENSG00000070770_15 (sequence is synthesized)
aacttaatgacttttaaaaaatgattattgtttcttataattgagttagccaggtgattctttaggtctcagttgatttgactggggcaggatggtccaggatgacctcattcacaatct

SEQ ID NO: 57560 - DNA, 120 bp, Artificial Sequence
  ENSG00000070770_16 (sequence is synthesized)
gcggcattgatgcttgccaataaaaccaaccaaccaaacacaaaccttgaaggaaaactacagtgtgataaaaagaaattcttatcattccttctaaatgcacagaagagtaaagaccta

SEQ ID NO: 57561 - DNA, 120 bp, Artificial Sequence
  ENSG00000070770_17 (sequence is synthesized)
aaagtctgtcaaaaagcaagaaagaaactccccagtgctagtctccagggagctgtcactgtggcagcatggggatgcacctagttcaggatctgaaggagctctgcctttggaatgcat

SEQ ID NO: 57562 - DNA, 120 bp, Artificial Sequence
  ENSG00000070770_18 (sequence is synthesized)
gggagatagagactcggagttgttgtacatttacctttgtttaacagggcaccactgttgaattaacccattcagtcaacaagctctgaatgtctgacttcctatctattccattgtggt

SEQ ID NO: 57563 - DNA, 120 bp, Artificial Sequence
  ENSG00000070770_19 (sequence is synthesized)
ctgggtttcctttggtgaaattcaggctcaagtcttagcgaaatgtcagcagtctatactgacacaccagcctcatttacaaaaaggagatattaaaacagtgacagtatttttttttta

SEQ ID NO: 57564 - DNA, 120 bp, Artificial Sequence
  ENSG00000070770_20 (sequence is synthesized)
agctctttacaaatccacgttttatgtattttttaatgacatgagctctccaggaaatgtacctcatccccgcagttttcctccaagtggattcatttgggagcaaactgcagtcacttt

SEQ ID NO: 57565 - DNA, 120 bp, Artificial Sequence
  ENSG00000070770_21 (sequence is synthesized)
cacaagagtcctctttgatgtcaggagggatcacgaaaccttgcaatgccatgaactggtccatggttatcatcaaaagttccatgctaagtgcataacttggagctcactataaccttt

SEQ ID NO: 57566 - DNA, 81 bp, Artificial Sequence
  ENSG00000070770_22 (sequence is synthesized)
gccttgtaaggagaacttcaccatttcccagcacatccctatgtgtgcgcctattttaatgcacctctctgaaacagagac

SEQ ID NO: 57567 - DNA, 120 bp, Artificial Sequence
  ENSG00000070770_23 (sequence is synthesized)
tgtgtgcgcctattttaatgcacctctctgaaacagagacctttttgttcacaaccataactaaagctggaaagtcagtcttcaggcaaggcgagggaggaaaacatcccattagaattt

SEQ ID NO: 57568 - DNA, 120 bp, Artificial Sequence
  ENSG00000070770_24 (sequence is synthesized)
tttcaggaaagacttatggaaaaaaatatctctctcccacctccttttatccccatgagacacagtttcccactgtaatcagggtaatatgcatttgtaagttctgatatgtgatacatt

SEQ ID NO: 57569 - DNA, 120 bp, Artificial Sequence
  ENSG00000070770_25 (sequence is synthesized)
tatgtgatggcaaagataagtctgtcttgcatgcaggtactagagttgtgtgggcagggtcatctgaaactcaagcaactcagaggaatatacaaggggcttggggaagaaaatggtgct

SEQ ID NO: 57570 - DNA, 120 bp, Artificial Sequence
  ENSG00000070770_26 (sequence is synthesized)
cccggagcaagtgttggatccattttgcaaaccttcatgttagcagagaaagctagagtttgtttaaacaaaaatagggctgatttcattttggggactcaggagcaacatggtttgtag

SEQ ID NO: 57571 - DNA, 120 bp, Artificial Sequence
  ENSG00000070770_27 (sequence is synthesized)
gcagtcccctcaccccagctgcagggccatgccacagctgtggggacttcacacacctaggctagaactagaggtgtctaccacatcaccctttaagatttctttattaactatttaata

SEQ ID NO: 57572 - DNA, 120 bp, Artificial Sequence
  ENSG00000070770_28 (sequence is synthesized)
atgccatacatttttataaggttagatgtttgtttgaaacatttgtttacattccatattccaataaaatcttattggtattggtagcagatcctactctaaatgtagattctatttttg

SEQ ID NO: 57573 - DNA, 120 bp, Artificial Sequence
  ENSG00000070770_29 (sequence is synthesized)
tcgtttggtctgtgggaacttaaaatacaaatgaaactcttctcttattatagagttgagtttatagagtaaaaaataaataagatcccaaagccaaggaatgcattcagttaaggttct

SEQ ID NO: 57574 - DNA, 120 bp, Artificial Sequence
  ENSG00000070770_30 (sequence is synthesized)
cataccaatgctgcctgcttgcattgcacattctgtatactaatgtaaacatttgttctacctgaaaatcaaaagcaagatgtgagctctttggctaaacctgtattgatatgtcaggca

SEQ ID NO: 57575 - DNA, 120 bp, Artificial Sequence
  ENSG00000070770_31 (sequence is synthesized)
gcaaaactcagtgtttgagattatcaaaagccttctaatatgcccttataggcaatcctgaagcattggttatcatcagggagatgtgccactgcgtgtctttcctgctccccctccaat

SEQ ID NO: 57576 - DNA, 120 bp, Artificial Sequence
  ENSG00000070770_32 (sequence is synthesized)
ctggaccaggcaagaggtgcctactggagggtcttggtgaagcggtaactccattcctttcccttgggtcccccaaaggtaataaaagtacctggaggagaatagtcaggtgattgacct

SEQ ID NO: 57577 - DNA, 120 bp, Artificial Sequence
  ENSG00000070770_33 (sequence is synthesized)
ctgcctgtctctctgacggtgatgtaggtgcagacaccgcctgcctgccttgtcctggggttttgtaactgcagctttgacacaggcattcttcctttgaagcacacagcttgcttttcc

SEQ ID NO: 57578 - DNA, 120 bp, Artificial Sequence
  ENSG00000070770_34 (sequence is synthesized)
agcacctagacttttacctctcttcatgccttagacttagaccataactgggcttgaaatgctcaccccttcctgggtctggtcttggcacctaggctattcctttccaaactgaagtga

SEQ ID NO: 57579 - DNA, 120 bp, Artificial Sequence
  ENSG00000070770_35 (sequence is synthesized)
gtccagtttcagaccatctcttttcctgtctccaaaaaccatttttgtttccaaacctagctcccccgaaattttaagactatttacctagattcggagatggtcttggagagttccaaa

SEQ ID NO: 57580 - DNA, 120 bp, Artificial Sequence
  ENSG00000070770_36 (sequence is synthesized)
aggggtgtgtgtgtgtctgtgtgtgtgtctgtgtgtgtgtctgtgtgtgtgtctgtgtgtgtgtctgtgtgtctaatatttagactaaaccatggtaaatgtacgcacccagtatccttt

SEQ ID NO: 57581 - DNA, 120 bp, Artificial Sequence
  ENSG00000070770_37 (sequence is synthesized)
tcagttagcatattctttcttaaactcatctcagtacttttcatttgtttgcttcattatcttaaacaggttaaaagtgcctatgataaggacttaattatttcctaaagaaaagcaaaa

SEQ ID NO: 57582 - DNA, 120 bp, Artificial Sequence
  ENSG00000070770_38 (sequence is synthesized)
aatgtggggaacagggtagtgttatactatcatctcaggtactgcctatgttcaagaacatagacctggtatggtgagaacaaaaggttcctatgccaaatccagatggctatatcattt

SEQ ID NO: 57583 - DNA, 120 bp, Artificial Sequence
  ENSG00000070770_39 (sequence is synthesized)
gttggctacaagtgagcctgactgcaaggtttgcttctgctgagaaatcccatggtgagagtagaactcatgaagtgctgagtcacatttgcacctctggtgtggtggcagttcactctc

SEQ ID NO: 57584 - DNA, 120 bp, Artificial Sequence
  ENSG00000070770_40 (sequence is synthesized)
ccctggatgctgtcagctggccttgctttcatcctatccctgtaggcagggtaggtggctgggtaggagaagctattgagtgtatgacgcagaccaagctttcctgggccttctcaccaa

SEQ ID NO: 57585 - DNA, 120 bp, Artificial Sequence
  ENSG00000070770_41 (sequence is synthesized)
ctagagaagcgctgatgtcgttcattgaggcacttaaacaccagtcactcagccaggcctcctcccagacattctgtaacatgtcagcactcacaaggtttaaagcaaatgtgttccctt

SEQ ID NO: 57586 - DNA, 120 bp, Artificial Sequence
  ENSG00000070770_42 (sequence is synthesized)
gcagagaggaaggtgctctcagactgatagattagaggagacagacaaactcgtaatccttggggacttgaagagagtggctaggggaagggctgttaaaagaaaagggaccaataagaa

SEQ ID NO: 57587 - DNA, 120 bp, Artificial Sequence
  ENSG00000070770_43 (sequence is synthesized)
aatccatctaaaggtagctcttgaggaggaaattaacttcttgaggggataaattagagggtaccaagtttatgttctggaatgtaccctggggagggcgctgcccactggattggtccc

SEQ ID NO: 57588 - DNA, 120 bp, Artificial Sequence
  ENSG00000070770_44 (sequence is synthesized)
agtggactgaaaggtggtgctctcgagtcaggcgcttagtcccagagagagctgggtgccgcggggctcgtggtctgtgcctactcagggaaatgacttaggttctcccaggtgctctgt

SEQ ID NO: 57589 - DNA, 120 bp, Artificial Sequence
  ENSG00000070770_45 (sequence is synthesized)
tgataaggatggaagcagaactactttgagacacaagcaacaattggaagagtttttttatatgaactgaaatagatctaagagagcctggttaacagtttcctttaataccagttcaga

SEQ ID NO: 57590 - DNA, 120 bp, Artificial Sequence
  ENSG00000070770_46 (sequence is synthesized)
ttaaatggttactttaggaacctgtgttactgtgtgagcacccacagaaacaagcaaacttatttcctacaaaaaatgaggggataataaccgatcagagtcacagtcgtttcaatataa

SEQ ID NO: 57591 - DNA, 120 bp, Artificial Sequence
  ENSG00000070770_47 (sequence is synthesized)
acccttccgaaagcaaaagcagggaccacatgagcacacaagaagccaaagtttgtcagtgatcttaataaattaagactgagtaacatcctgcctttagaaaaaaataaccccgaggtg

SEQ ID NO: 57592 - DNA, 120 bp, Artificial Sequence
  ENSG00000070770_48 (sequence is synthesized)
gagaccagggcaggggaggtggcggagaagcatcgggccagatcaaccgttaataacatgcttctgagctatgtggatgtataaatgaaaacacccccaactaggtattgtagaggctgg

SEQ ID NO: 57593 - DNA, 120 bp, Artificial Sequence
  ENSG00000070770_49 (sequence is synthesized)
aaaaagatgtgatgggattatacaggtgatgcatatttttgttttgagactcaacaatgtgctacaaatgtgatacttaaccctgaactgcatgtattggggattgttttttaaaaagaa

SEQ ID NO: 57594 - DNA, 120 bp, Artificial Sequence
  ENSG00000070770_50 (sequence is synthesized)
aaaaaacaactttgaatcaataaattaacagtttttcacttgctggctcttcttgctgtaaatggtgactaagaggttgggacagaaatcttgacaactagtggaaaacttggataatct

SEQ ID NO: 57595 - DNA, 120 bp, Artificial Sequence
  ENSG00000070770_51 (sequence is synthesized)
tcaaggaccatggagccttctgtttccttctgtttgcagaaaagcaacactgcctgggttgtgatcctttacaagtgactacttcagacacaattggccacctctttgtatcactggatg

SEQ ID NO: 57596 - DNA, 120 bp, Artificial Sequence
  ENSG00000070770_52 (sequence is synthesized)
actgatgtatgatttatgtgctgctgcccttagagggaagaaaaatgccatgttaaatcctgttttcttaaataaaaatgttgacaataaccagccttcccaagtgggagacaaaccatt

SEQ ID NO: 57597 - DNA, 120 bp, Artificial Sequence
  ENSG00000070770_53 (sequence is synthesized)
acaaatcaaccaagacccagagaaaggatgtatatgctcagcgtcatgtagtcagggggtggaagcactcggtgtaggaccttgtgtacctgtcatgaagtcttggtagatgcgaggagc

SEQ ID NO: 57598 - DNA, 120 bp, Artificial Sequence
  ENSG00000070770_54 (sequence is synthesized)
ataattaggacattagctggatgtttgactttgtgatgtcctgatctgtactggaagaattgaggaacactcaccaggagtcaaatgaagttaattcgtttctaatgatttttggagtta

SEQ ID NO: 57599 - DNA, 120 bp, Artificial Sequence
  ENSG00000070778_0 (sequence is synthesized)
cagcgctggcgtcaatgctcccttcctcgggccattggagactccgttgctttttaatggcggcagcggctgctgggtgagcagctggaggccggacagtgttcgtcccatccggagagg

SEQ ID NO: 57600 - DNA, 120 bp, Artificial Sequence
  ENSG00000070778_1 (sequence is synthesized)
atcgctttctcctggcgtcaccagcgctgggttggtgggggtagcttttccctctttgctcctccattcttgaagaaagaagaagatgccactgccatttgggttgaaactgaaacgcac

SEQ ID NO: 57601 - DNA, 120 bp, Artificial Sequence
  ENSG00000070778_2 (sequence is synthesized)
ccggcgctacacggtgtccagcaagagttgcctggttgcccggatccaactgcttaataacgagtttgtggagttcaccctgtccgtggagagcactggccaggaaagcctcgaggccgt

SEQ ID NO: 57602 - DNA, 120 bp, Artificial Sequence
  ENSG00000070778_3 (sequence is synthesized)
ggcccagaggctggagctgcgggaggtcacttacttcagcctctggtactacaacaagcaaaatcagcgccggtgggtagatttggaaaaacctttgaagaagcagctggataaatatgc

SEQ ID NO: 57603 - DNA, 120 bp, Artificial Sequence
  ENSG00000070778_4 (sequence is synthesized)
attggaacctaccgtctattttggagtggtgttttatgtgccttcagtttctcagctgcagcaggagattaccaggtatcagtattatctgcaactgaagaaagatatcttggaaggaag

SEQ ID NO: 57604 - DNA, 120 bp, Artificial Sequence
  ENSG00000070778_5 (sequence is synthesized)
tattccttgtaccttagaacaagcaattcagctagcaggcttagctgttcaagcggattttggtgactttgatcagtatgaatcccaggactttcttcagaaatttgccttgtttcctgt

SEQ ID NO: 57605 - DNA, 120 bp, Artificial Sequence
  ENSG00000070778_6 (sequence is synthesized)
gggatggttacaagatgaaaaagtattggaagaagcaacccaaaaagtggccttactacatcagaaatacagagggctcacagctcctgatgctgaaatgctgtacatgcaggaggtaga

SEQ ID NO: 57606 - DNA, 120 bp, Artificial Sequence
  ENSG00000070778_7 (sequence is synthesized)
gagaatggatggctatggagaagagagctaccctgctaaggatagccaaggaagtgacatatccattggagcgtgtcttgaaggtatctttgtgaaacacaagaatggaaggcatcctgt

SEQ ID NO: 57607 - DNA, 120 bp, Artificial Sequence
  ENSG00000070778_8 (sequence is synthesized)
ggtatttaggtggcatgacattgccaacatgtcccacaacaagtccttttttgcattagagctggcaaataaagaggagaccattcaatttcaaactgaagacatggaaacagcaaaata

SEQ ID NO: 57608 - DNA, 120 bp, Artificial Sequence
  ENSG00000070778_9 (sequence is synthesized)
catttggagactctgtgttgcgcgacacaagttttacagactaaaccagtgtaacctgcaaactcagactgtcacagtgaacccaatcaggaggaggtcttcttcaaggatgtctctgcc

SEQ ID NO: 57609 - DNA, 120 bp, Artificial Sequence
  ENSG00000070778_10 (sequence is synthesized)
taaaccccagccctacgtgatgcctcccccaccgcagttgcactataatggacattatacagaaccatatgcttcttcccaagataacctctttgtgcccaaccagaacggatactactg

SEQ ID NO: 57610 - DNA, 120 bp, Artificial Sequence
  ENSG00000070778_11 (sequence is synthesized)
tcactctcagacaagcttggatagagcccagattgacctcaacggtcggatccgtaatggcagtgtctacagtgcacacagcaccaactccttaaataatcctcagccctacttgcagcc

SEQ ID NO: 57611 - DNA, 120 bp, Artificial Sequence
  ENSG00000070778_12 (sequence is synthesized)
ctcgccgatgtcgtccaaccctagcatcaccgggagtgacgtcatgaggcctgactacctcccgtcccatcggcacagcgccgtgatacccccgtcctaccgccccaccccagactatga

SEQ ID NO: 57612 - DNA, 120 bp, Artificial Sequence
  ENSG00000070778_13 (sequence is synthesized)
gactgtgatgaagcagctcaacaggggcctggtgcatgcggaacggcagagccactcgctgcgaaacctcaacatcggcagctcgtacgcctacagcaggcccgcggcgctggtctacag

SEQ ID NO: 57613 - DNA, 120 bp, Artificial Sequence
  ENSG00000070778_14 (sequence is synthesized)
ccagcccgagatccgcgagcacgcacagctcccctcgccagcggccgcacactgcccgttcagcctgagctacagcttccacagcccgtctccctacccctaccctgccgagcggcggcc

SEQ ID NO: 57614 - DNA, 120 bp, Artificial Sequence
  ENSG00000070778_15 (sequence is synthesized)
cgtggtgggcgcggtcagcgtgccggagctgaccaatgcgcagctgcaggcgcaggactacccgtctcccaacatcatgcggacgcaggtgtaccggccacccccaccctacccgccccc

SEQ ID NO: 57615 - DNA, 120 bp, Artificial Sequence
  ENSG00000070778_16 (sequence is synthesized)
caggcccgccaacagcacgccagacctgtcccgccacctttacatcagcagcagcaaccccgacctcatcacgcggcgcgtgcaccactcggtgcaaacgttccaggaggacagcctgcc

SEQ ID NO: 57616 - DNA, 120 bp, Artificial Sequence
  ENSG00000070778_17 (sequence is synthesized)
cgtggcgcactcgctgcaggaggtcagcgagcccctcaccgccgcgcgccacgcgcagctgcacaaacggaacagcatcgaggtggccgggctcagccacggcctggagggcctgcggct

SEQ ID NO: 57617 - DNA, 120 bp, Artificial Sequence
  ENSG00000070778_18 (sequence is synthesized)
caaggagcgcaccctatccgcgtcggcggcagaggtggcgccgcgagccgtctcggtgggctcccagcccagcgttttcaccgagaggacacagcgagaagggccggaggaggcggaggg

SEQ ID NO: 57618 - DNA, 120 bp, Artificial Sequence
  ENSG00000070778_19 (sequence is synthesized)
cttgaggtacggccataagaagtccctgtcggacgccaccatgctaatccacagcagcgaggaggaggaggacgaggacttcgaggaggagagcggggcccgggcgcctcctgcacgtgc

SEQ ID NO: 57619 - DNA, 120 bp, Artificial Sequence
  ENSG00000070778_20 (sequence is synthesized)
gcgcgagcctcggcccggcctggcccaggacccacctggctgccctcgcgtcctgctcgccgggcccctgcacatcctggagcccaaggcccacgtcccagacgcggagaagaggatgat

SEQ ID NO: 57620 - DNA, 120 bp, Artificial Sequence
  ENSG00000070778_21 (sequence is synthesized)
ggacagcagccccgtccgcacgaccgcagaggcccagcggccctggagagacgggctgctgatgccctccatgtcggagtccgacctcaccacgtcaggccgctaccgagcccggaggga

SEQ ID NO: 57621 - DNA, 120 bp, Artificial Sequence
  ENSG00000070778_22 (sequence is synthesized)
ctctctgaagaaaaggccggtgtcggaccttctctctgggaagaagaacatcgtggaagggctcccgcctctagggggaatgaaaaagactcgagtagatgcaaaaaaaattggtcctct

SEQ ID NO: 57622 - DNA, 120 bp, Artificial Sequence
  ENSG00000070778_23 (sequence is synthesized)
taaactggctgccctaaatggactctccctatctcgagtgcctctgcctgatgaaggaaaggaagtggctaccagagcaacgaatgatgaaaggtgtaaaattctggaacaacgattaga

SEQ ID NO: 57623 - DNA, 120 bp, Artificial Sequence
  ENSG00000070778_24 (sequence is synthesized)
acaaggaatggtattcacagaatatgaaagaattcttaagaaacggctagttgatggggagtgctcaacagcacgactccctgaaaatgcagaaagaaatcgattccaagatgttcttcc

SEQ ID NO: 57624 - DNA, 120 bp, Artificial Sequence
  ENSG00000070778_25 (sequence is synthesized)
gaatcgaatgggattatattgccacacagggaccattacagaatacctgtcaagatttttggcagatggtatgggaacagggaattgcaattatagcaatggtgacagcagaagaggagg

SEQ ID NO: 57625 - DNA, 120 bp, Artificial Sequence
  ENSG00000070778_26 (sequence is synthesized)
gtggaagggagaagagctttaggtactggccacgacttggttccaggcacaacactgtcacctatggaaggtttaagatcacgacccggttccgcacagactctggctgctatgccacca

SEQ ID NO: 57626 - DNA, 120 bp, Artificial Sequence
  ENSG00000070778_27 (sequence is synthesized)
caggcctgaagatgaagcacctccttactgggcaagagaggaccgtctggcacctccaatacacagactggcctgaacatggctgtccagaagacctcaagggatttttatcatatcttg

SEQ ID NO: 57627 - DNA, 120 bp, Artificial Sequence
  ENSG00000070778_28 (sequence is synthesized)
aagagatccagtctgttcgacgccatacaaatagcacaagtgatccccaaagccccaaccctccgttgttggtccactgcagtgctggggtaggaaggactggcgtggtgattttgtcgg

SEQ ID NO: 57628 - DNA, 120 bp, Artificial Sequence
  ENSG00000070778_29 (sequence is synthesized)
agatcatgatcgcctgcctggaacacaatgaggtgctggacatcccgagagtgctggacatgctgaggcaacagagaatgatgctggtgcagactctctgccagtacacatttgtgtaca

SEQ ID NO: 57629 - DNA, 120 bp, Artificial Sequence
  ENSG00000070778_30 (sequence is synthesized)
gagtcctcatccagttcctgaaaagctccaggctcatctaagctcccacaatttcttacggggccagtcatgtgaagcgtttacagcttaaaaaaaaagcgcttgcctaactcatacttt

SEQ ID NO: 57630 - DNA, 120 bp, Artificial Sequence
  ENSG00000070778_31 (sequence is synthesized)
cccgttgacacttgatccacgcagcgtggcactgggacgtaagtggcgcagtctgaatggcggcacgctgaaggaaacgtgcgaagcacaggctgaagaggggtttctaacctgggaaag

SEQ ID NO: 57631 - DNA, 120 bp, Artificial Sequence
  ENSG00000070778_32 (sequence is synthesized)
gtgctcaaggaggacttggtttcaagggccttgccctgccccggtctgtccggtttgcagtacttgcacacattttggagattgtattttctagacaattctctattttactgaagctat

SEQ ID NO: 57632 - DNA, 120 bp, Artificial Sequence
  ENSG00000070778_33 (sequence is synthesized)
gctgggcaattctggcaatcattaaagtgcatagatttctatcttaaactaatttttgataatggagtttttattttatgacaaatatttagggatttttctagtgagaaacaactttgt

SEQ ID NO: 57633 - DNA, 120 bp, Artificial Sequence
  ENSG00000070778_34 (sequence is synthesized)
gtaaggatgatccacagatatgagttgctcctatataactttgtatttaaaaatcatgttattatcttttgttattttttaaaaaccttgggtacttaataatggtttagttgccaaact

SEQ ID NO: 57634 - DNA, 120 bp, Artificial Sequence
  ENSG00000070778_35 (sequence is synthesized)
gaaaactatactgagaatctgtgttattttgaaacatcaaaaggatttttctatccagaacattttttatcctaaaaattctatatagttgtaccttctgtttttcaaatgagagctcaa

SEQ ID NO: 57635 - DNA, 120 bp, Artificial Sequence
  ENSG00000070778_36 (sequence is synthesized)
ttcatttagatactgaaatgagtcagttaatgtaaagttgaggatgaaggcacattatttaaaatgtaagagaataagcattattttttcagtattattcatagatctaaatgaatttga

SEQ ID NO: 57636 - DNA, 120 bp, Artificial Sequence
  ENSG00000070778_37 (sequence is synthesized)
ttttattggttgaaaatgaagtgaaaaacaattgcctagggtggttttaagcacttttttgttaaaaacaaatctgagttttaatatatgtgttgctttgtagatgacacaataacaatg

SEQ ID NO: 57637 - DNA, 120 bp, Artificial Sequence
  ENSG00000070778_38 (sequence is synthesized)
ggcgctgagaagcgttttgggagagattaaggactaagagtatgtaagatgactaggacaagagtaggtggagtgtgatggtaaatgcaggatgccttcgtctttacaaaaatgcagtat

SEQ ID NO: 57638 - DNA, 120 bp, Artificial Sequence
  ENSG00000070778_39 (sequence is synthesized)
tatctatactcagactgaggtgctgggatggcgagcaggggaccccacagcactgtccccagggaattcaagtcctgtgaccgccagtgacttactccgtttccttggggcttttcccac

SEQ ID NO: 57639 - DNA, 120 bp, Artificial Sequence
  ENSG00000070778_40 (sequence is synthesized)
ctcaacctgtattgtttctttttcataaataaattcagcattatagtatcattaaaagaagccttaaagaggcgtatttttccttttggttgaaggaagggaatagttaataatagtttt

SEQ ID NO: 57640 - DNA, 120 bp, Artificial Sequence
  ENSG00000070778_41 (sequence is synthesized)
cacctcttctcccaaaaagtacagtccaaatttgtgcacagagattgctgtggtattcaagaggtacttgcattttagctccttaataattccctggccagtgttagctgtttagtgccc

SEQ ID NO: 57641 - DNA, 120 bp, Artificial Sequence
  ENSG00000070778_42 (sequence is synthesized)
cctcacccatcccatttaggcacatcccaatagacagagccaggctgagttacagggggagagtgtcatctctggccccgattaagatggccttgtcacagtgaccgctgagtaggcatg

SEQ ID NO: 57642 - DNA, 120 bp, Artificial Sequence
  ENSG00000070778_43 (sequence is synthesized)
gatgagtgggatatttagctgaggaaccctttcccttttccttctttttggggtctcttcttacagtgaacttccaaaatgtcaaatctagggctgtttcccaaattacactattctagg

SEQ ID NO: 57643 - DNA, 120 bp, Artificial Sequence
  ENSG00000070778_44 (sequence is synthesized)
catcattttgattcccatgtcactccttaactcacttccttgagcactacatgtatgttgtcagccacgagacaggacttcctaaatagtgtgtgcaccagcctaactctgccttaccca

SEQ ID NO: 57644 - DNA, 120 bp, Artificial Sequence
  ENSG00000070778_45 (sequence is synthesized)
gaaaccaaccacctaagaggaaaactcagaagatattaatgaaaactaattgaaagtacgcacacttctcatgtaggaacaaaattaaaattttacatttttattttacaaaattaaaaa

SEQ ID NO: 57645 - DNA, 120 bp, Artificial Sequence
  ENSG00000070778_46 (sequence is synthesized)
attacattttgtaggaacaaaatgtaaattttgtaaatacaaaattctttttaaagtcctgtttaaagaacagtagaactaagtgaaaatattcagaacgagctccttagaagaaaggaa

SEQ ID NO: 57646 - DNA, 120 bp, Artificial Sequence
  ENSG00000070778_47 (sequence is synthesized)
taagaactttttactggaactattttccatctctagaaaaagtgcttcttcccctccccctccctctccatggtacgtttttgtgaaaatgcttttctgtcaggtttaaacaaacagttt

SEQ ID NO: 57647 - DNA, 120 bp, Artificial Sequence
  ENSG00000070778_48 (sequence is synthesized)
gacatagctcgttgacaagaacatattgtaaaacaaatctaattaaagagtaatatgtggtctatttgtgttcctgttgtaataatttgataagtaaacttctgagggcaaaattactgt

SEQ ID NO: 57648 - DNA, 120 bp, Artificial Sequence
  ENSG00000070778_49 (sequence is synthesized)
ttaatattactcttaaaatgttgcatgtttggcgtcattcctaagagccatgtaattttaaacttttaattgcagttagtgaatatgaaaggatttctgaataaaaatctatccacatta

SEQ ID NO: 57649 - DNA, 120 bp, Artificial Sequence
  ENSG00000070778_50 (sequence is synthesized)
gccccgctgctccggccgcgcgtcccgcgtcggtccgacggtctgtccgtcctcctgccaccccccgcccccacggggcttctttgtgcggcgctcctcgccggccggtcccacctccag

SEQ ID NO: 57650 - DNA, 120 bp, Artificial Sequence
  ENSG00000070778_51 (sequence is synthesized)
ccggtcccacctccaggcctcgcccctcgccgtcgccaccgccggactctgcccaggggaatggtctgcgagccgggtttttggagacaggaagtgaggcgtgcgagccccatgagcgcg

SEQ ID NO: 57651 - DNA, 120 bp, Artificial Sequence
  ENSG00000070778_52 (sequence is synthesized)
ttgccaaatgaccccatgagactacaatcagaaaagtccagaaggcaggaaattctacatgacaaatggctccatttctgttaataacatgaaaataaaaggtaataaaaactttctttt

SEQ ID NO: 57652 - DNA, 120 bp, Artificial Sequence
  ENSG00000070778_53 (sequence is synthesized)
ttatagcaagagatatttagaaacatccattaaatgtaatctgtagaccttgtttggattctaatttaagaaaattgtaaaaatgcatttttgaggcaatcatgaaaattgcatatgaat

SEQ ID NO: 57653 - DNA, 120 bp, Artificial Sequence
  ENSG00000070778_54 (sequence is synthesized)
taatcatctggaatcctgacctgtggagaaaaaggcagggtagggttgtggttctgtttcagatgtgccgtctatgtgagaaaggcatccattgccggatctcgagtcatttaaccatgc

SEQ ID NO: 57654 - DNA, 120 bp, Artificial Sequence
  ENSG00000070778_55 (sequence is synthesized)
ttcccaaggggaggacgcgggagaagccggggcctgagtgctccaaggccccgtgggcttcttgggtttgttgcctccggccgctcattaactcaggatggcgtggaagacctcgcccgc

SEQ ID NO: 57655 - DNA, 120 bp, Artificial Sequence
  ENSG00000070778_56 (sequence is synthesized)
tattactatcccattattgatgaaggtatggagacttacagaagtgaaatgtcttgccctgccacacaactagtaagtggagcagcaagactcgagcctgtgctcttagccgctgtgcta

SEQ ID NO: 57656 - DNA, 120 bp, Artificial Sequence
  ENSG00000070778_57 (sequence is synthesized)
gcctgttagagtagttcctgcctgcttttttcatattgacagatatcaactgacagatcattttcatttgatctgtctctcttgtttgatgaagctccatgagggcagggtctcctcttc

SEQ ID NO: 57657 - DNA, 120 bp, Artificial Sequence
  ENSG00000070778_58 (sequence is synthesized)
aatctttctgggtttattggcaaaggagaacactccctctgtgtgttcctggtcttcagtgcattgaaacttcttttcacaggggttgtatttgtgtatatttcatatatacatataaat

SEQ ID NO: 57658 - DNA, 120 bp, Artificial Sequence
  ENSG00000070785_0 (sequence is synthesized)
agaggcggcgtggagatcgctgggagcggttgcggcgtgccgggagctgagttatagctgtgacttctgccctgccaggccgcacacaagctggctgacccggtttgtaaaaatggaatt

SEQ ID NO: 57659 - DNA, 120 bp, Artificial Sequence
  ENSG00000070785_1 (sequence is synthesized)
tcaagcagtagtgatggcagtaggtggaggatctcggatgacagacctaacttccagcattcccaaacctctgcttccagttgggaacaaacctttaatttggtacccattgaacctgct

SEQ ID NO: 57660 - DNA, 120 bp, Artificial Sequence
  ENSG00000070785_2 (sequence is synthesized)
tgagcgtgttggatttgaagaagtcattgtggttacaaccagggatgttcaaaaggctctatgtgcagaattcaagatgaaaatgaagccagatattgtgtgtattcctgatgacgctga

SEQ ID NO: 57661 - DNA, 120 bp, Artificial Sequence
  ENSG00000070785_3 (sequence is synthesized)
catgggaactgcagattctttgcgctacatatatccaaaacttaagacagatgtgctggtgctgagctgtgatctgataacagacgttgccttacatgaggttgtggacctgtttagagc

SEQ ID NO: 57662 - DNA, 120 bp, Artificial Sequence
  ENSG00000070785_4 (sequence is synthesized)
ttatgatgcatcacttgctatgttgatgagaaaaggccaagatagcatagaacctgttcccggtcaaaaggggaaaaaaaaagcagtggagcagcgtgacttcattggagtggacagcac

SEQ ID NO: 57663 - DNA, 120 bp, Artificial Sequence
  ENSG00000070785_5 (sequence is synthesized)
aggaaagaggctgctcttcatggctaatgaagcagacttggatgaagagctggtcattaagggatccatcctacagaagcatcctagaatacgtttccacacgggtcttgtggatgccca

SEQ ID NO: 57664 - DNA, 120 bp, Artificial Sequence
  ENSG00000070785_6 (sequence is synthesized)
cctctactgtttgaaaaaatacatcgtggatttcctaatggaaaatgggtcaataacttctatccggagtgaactgattccatatttagtgagaaaacagttttcctcagcttcctcaca

SEQ ID NO: 57665 - DNA, 120 bp, Artificial Sequence
  ENSG00000070785_7 (sequence is synthesized)
ccctatgatgcctgctggaatgcctgtcgaggagacaggtgggaagacttgtccagatcacaggtgcgctgctatgtccacatcatgaaagaggggctctgctctcgagtgagcacactg

SEQ ID NO: 57666 - DNA, 120 bp, Artificial Sequence
  ENSG00000070785_8 (sequence is synthesized)
ggactctacatggaagcaaacagacaggtgcccaaattgctgtctgctctctgtccagaagaaccaccagtccattcgtcagcccagattgtcagcaaacacctggttggagttgacagc

SEQ ID NO: 57667 - DNA, 120 bp, Artificial Sequence
  ENSG00000070785_9 (sequence is synthesized)
ctcattgggccagagacacagattggagagaagtcatccattaagcgctcagtcattggctcatcctgtctcataaaagatagagtgactattaccaattgccttctcatgaactcagtc

SEQ ID NO: 57668 - DNA, 120 bp, Artificial Sequence
  ENSG00000070785_10 (sequence is synthesized)
actgtggaggaaggaagcaatatccaaggcagtgtcatctgcaacaatgctgtgatcgagaagggtgcagacatcaaggactgcttgattggaagtggccagaggattgaagccaaagct

SEQ ID NO: 57669 - DNA, 120 bp, Artificial Sequence
  ENSG00000070785_11 (sequence is synthesized)
aaacgagtgaatgaggtgatcgtggggaatgaccagctcatggagatctgagttctgagcaagtcagactccttccttttggcctccaaagccacagatgttggccggcccacctgttta

SEQ ID NO: 57670 - DNA, 120 bp, Artificial Sequence
  ENSG00000070785_12 (sequence is synthesized)
actctgtatttatttcccaataaagaagggcttccaaaggcatgctggagacttgtggagcagtccaaagctccatgtcaggtgggctccaggtgtacacagtgtatgttcatgtgtcat

SEQ ID NO: 57671 - DNA, 120 bp, Artificial Sequence
  ENSG00000070785_13 (sequence is synthesized)
gtggtaaagatcatctggagcaagtgtgtgggacaggacagatacagtggcctaactcttgtgtgccaagatgtatcggtggggcagcagctgtccaatgtaaagctcctaggaaggcta

SEQ ID NO: 57672 - DNA, 120 bp, Artificial Sequence
  ENSG00000070785_14 (sequence is synthesized)
ctttctgactggctgacccaacccagtcctgaaagtatccctcacctaaaaggacctgggagtacttcagtcccttatcctaatcagcctttctagacccataggcctagctgctggcag

SEQ ID NO: 57673 - DNA, 77 bp, Artificial Sequence
  ENSG00000070785_15 (sequence is synthesized)
aagcagatggagttcactccaatctccacctcccgggttcaagcacttcacctgcctcagcctcccgagtagctggg

SEQ ID NO: 57674 - DNA, 120 bp, Artificial Sequence
  ENSG00000070785_16 (sequence is synthesized)
agataatggaaaaatgccttcaaaattctgaaggaaggttaattttaacctaaaattgtatacccaggcaaagtgctaatcaagagggcaatagaataaaaacattttcagatatcaaaa

SEQ ID NO: 57675 - DNA, 120 bp, Artificial Sequence
  ENSG00000070785_17 (sequence is synthesized)
aaagaaaagaacctccccatcctcagttactgagaagtttcatggctctttgccgaatattctctaagtcaatatctgaagcaggagcccgtgatacagtggagtgtcactttaggcctg

SEQ ID NO: 57676 - DNA, 80 bp, Artificial Sequence
  ENSG00000070785_18 (sequence is synthesized)
ttcctgagtagctgggattacagctacccaaacctctttccctgacttatcaagagagattattggttcattcattctcc

SEQ ID NO: 57677 - DNA, 120 bp, Artificial Sequence
  ENSG00000070785_19 (sequence is synthesized)
caccccagtggagcagcgtgacttcattggagtggacagcacaggaaagaggctgctcttcatggctaatgaagcagacttggatgaagagctggtcattaagggatccatcctacagaa

SEQ ID NO: 57678 - DNA, 120 bp, Artificial Sequence
  ENSG00000070785_20 (sequence is synthesized)
ctctccgctgagtgtgcttcccctccgtcatccatcgctcggcggtcttctcttctccatgggtctgctctgcgcgttccatcgagtttctcggccatcgcgcgcctgcgccattgggct

SEQ ID NO: 57679 - DNA, 120 bp, Artificial Sequence
  ENSG00000070785_21 (sequence is synthesized)
tccaaaacttaagatggccctcagccttgatgaaattgtgttcttgatagagatgttcctgatgtacctgatatgtccagaagcccactgctcaggagctaacgtccaacacgatctctt

SEQ ID NO: 57680 - DNA, 120 bp, Artificial Sequence
  ENSG00000070785_22 (sequence is synthesized)
gtcgcagtcctgccaataccatagctttatatttctctgatggattgagttctgtgcggacaatatctagctttccagaaagggtactgtttcaggcagcacagatagctggtgagcgac

SEQ ID NO: 57681 - DNA, 120 bp, Artificial Sequence
  ENSG00000070785_23 (sequence is synthesized)
taaactcaccactgccatgctgatcacagaatatgtgagagcaggcagtgacccatgcatagccatagagtttgatgccacacttttgataattacaaagtagcatgtcttcacacaaag

SEQ ID NO: 57682 - DNA, 120 bp, Artificial Sequence
  ENSG00000070785_24 (sequence is synthesized)
ggtcattaagggatccatcctacagaaacatttgagttgctgccacctcttggctattgtgaatagtgctgcagtgaacgtgggtgtacagacatctcttcaagaccttgctttcagttc

SEQ ID NO: 57683 - DNA, 120 bp, Artificial Sequence
  ENSG00000070785_25 (sequence is synthesized)
ttttggatatatatttagaagtgggattactggatcatatggtagagaactatgatgtttaattttttgaggaaactacatactgtttccatggcattttcactattttacaatcccacc

SEQ ID NO: 57684 - DNA, 120 bp, Artificial Sequence
  ENSG00000070785_26 (sequence is synthesized)
aacagtgcataagagccccagtttctccacaccagtacttacatggtagctggtctcagatacagaaggaaaagagaattcatttatgttatatcaaaacaaataaaacatctgggcaga

SEQ ID NO: 57685 - DNA, 120 bp, Artificial Sequence
  ENSG00000070808_0 (sequence is synthesized)
gtttgcactcggcagcacgggcaggcaagtggtccctaggttcgggagcagagcagcagcgcctcagtcctggtcccccagtcccaagcctcacctgcctgcccagcgccaggatggcca

SEQ ID NO: 57686 - DNA, 120 bp, Artificial Sequence
  ENSG00000070808_1 (sequence is synthesized)
ccatcacctgcacccgcttcacggaagagtaccagctcttcgaggaattgggcaagggagccttctcggtggtgcgaaggtgtgtgaaggtgctggctggccaggagtatgctgccaaga

SEQ ID NO: 57687 - DNA, 120 bp, Artificial Sequence
  ENSG00000070808_2 (sequence is synthesized)
tcatcaacacaaagaagctgtcagccagagaccatcagaagctggagcgtgaagcccgcatctgccgcctgctgaagcaccccaacatcgtccgactacatgacagcatctcagaggagg

SEQ ID NO: 57688 - DNA, 120 bp, Artificial Sequence
  ENSG00000070808_3 (sequence is synthesized)
gacaccactacctgatcttcgacctggtcactggtggggaactgtttgaagatatcgtggcccgggagtattacagtgaggcggatgccagtcactgtatccagcagatcctggaggctg

SEQ ID NO: 57689 - DNA, 120 bp, Artificial Sequence
  ENSG00000070808_4 (sequence is synthesized)
tgctgcactgccaccagatgggggtggtgcaccgggacctgaagcctgagaatctgttgctggcctccaagctcaagggtgccgcagtgaagctggcagactttggcctggccatagagg

SEQ ID NO: 57690 - DNA, 120 bp, Artificial Sequence
  ENSG00000070808_5 (sequence is synthesized)
cttgtggggtcatcctgtacatcctgctggttgggtaccccccgttctgggatgaggaccagcaccgcctgtaccagcagatcaaagccggcgcctatgatttcccatcgccggaatggg

SEQ ID NO: 57691 - DNA, 120 bp, Artificial Sequence
  ENSG00000070808_6 (sequence is synthesized)
acactgtcaccccggaagccaaggatctgatcaataagatgctgaccattaacccatccaaacgcatcacagctgccgaagcccttaagcacccctggatctcgcaccgctccaccgtgg

SEQ ID NO: 57692 - DNA, 120 bp, Artificial Sequence
  ENSG00000070808_7 (sequence is synthesized)
catcctgcatgcacagacaggagaccgtggactgcctgaagaagttcaatgccaggaggaaactgaagggagccattctcaccacgatgctggccaccaggaacttctccggagggaaga

SEQ ID NO: 57693 - DNA, 120 bp, Artificial Sequence
  ENSG00000070808_8 (sequence is synthesized)
gtgggggaaacaagaagagcgatggtgtgaaggaatcctcagagagcaccaacaccaccatcgaggatgaagacaccaaagtgtggtcccggaacagcaagcccgtgcacaccaccatcc

SEQ ID NO: 57694 - DNA, 120 bp, Artificial Sequence
  ENSG00000070808_9 (sequence is synthesized)
tgaatccccacatccacctgatgggcgacgagtcagcctgcatcgcctacatccgcatcacgcagtacctggacgctggcggcatcccacgcaccgcccagtcggaggagacccgtgtct

SEQ ID NO: 57695 - DNA, 120 bp, Artificial Sequence
  ENSG00000070808_10 (sequence is synthesized)
ggcaccgccgggatggcaaatggcagatcgtccacttccacagatctggggcgccctccgtcctgccccactgagggaccaggctggggtcgctgcgttgctgtgccgcagagatccact

SEQ ID NO: 57696 - DNA, 120 bp, Artificial Sequence
  ENSG00000070808_11 (sequence is synthesized)
tttccctgtaaaccttagaacccagctgttgccagggcaacggggcaatacctgtctctctagagatgaagttgccagggtaactgcatcctgtcattcgttcctggggaccatccggaa

SEQ ID NO: 57697 - DNA, 120 bp, Artificial Sequence
  ENSG00000070808_12 (sequence is synthesized)
tgcggcacccactggctgttaccatggcaactgcctttttgccccacttaatcccatcccgtctgctacaagggccccacagttggaggtgggggaggtgggaagagaaaagatcacttg

SEQ ID NO: 57698 - DNA, 120 bp, Artificial Sequence
  ENSG00000070808_13 (sequence is synthesized)
tggacaaagtttgctctattccacctcctccaggccctccttgggtccatcaccccaggggtgctgggtccatcccacccccaggcccacacaggcttgcagtattgtgtgcggtatggt

SEQ ID NO: 57699 - DNA, 120 bp, Artificial Sequence
  ENSG00000070808_14 (sequence is synthesized)
cagggcgtccgagagcaggtttcgcagtggaaggcaggcaggtgttggggaggcagttaccggggcaacgggaacagggcgttttggaggtggttgccatggggacctggatgctgacga

SEQ ID NO: 57700 - DNA, 120 bp, Artificial Sequence
  ENSG00000070808_15 (sequence is synthesized)
gaggatgaagacaccaaagtgcggaaacaggaaattataaaagtgacagagcagctgattgaagccataagcaatggagattttgagtcctacacgaagatgtgcgaccctggcatgaca

SEQ ID NO: 57701 - DNA, 120 bp, Artificial Sequence
  ENSG00000070808_16 (sequence is synthesized)
gtggagctgctggttctcccaggtggattttgctggaattctcccatgtcatcaccccaccaccgtcacttctgtacctgcatcaagaaaacctgcttgttcacaaaagtcatcgcaact

SEQ ID NO: 57702 - DNA, 120 bp, Artificial Sequence
  ENSG00000070808_17 (sequence is synthesized)
tcagagcgaacggccacatctccccacctctcacccccaccctctcccctgccaggctggggcttcctcaggcatgggtgtccacagcactggccccctctccccagcctcagctgctgt

SEQ ID NO: 57703 - DNA, 120 bp, Artificial Sequence
  ENSG00000070808_18 (sequence is synthesized)
ccgcctgatctgtcttgggctgtaggctagaatgcccgggctggtgcccaccaggggctggggagaaggaggggtggcatgatgaggaaggcagcatccgtccgtccctctcccagacct

SEQ ID NO: 57704 - DNA, 120 bp, Artificial Sequence
  ENSG00000070808_19 (sequence is synthesized)
ctcctcttccagtgtccccggggaagggcagatgacactcccttccccctaagccaaccgcactgaaggagtggggagaagagcatacgccaggagcctcctgcctcaaagtgctcccct

SEQ ID NO: 57705 - DNA, 120 bp, Artificial Sequence
  ENSG00000070808_20 (sequence is synthesized)
ttccctcggtgtgggggatgtggccctctcaggtgcccctacttgctttctgcttccttctggtgaagtccacctccaacattaacctgcccaccccacccccgtcatccctggagaatt

SEQ ID NO: 57706 - DNA, 120 bp, Artificial Sequence
  ENSG00000070808_21 (sequence is synthesized)
ccagctttgtcgtatctcagagagggaatctaattgtttttggggggcaaaagaaagcaacgtttaggtatcacttctacttggaccgcatgcctttttatagccaaatttctgtgtatt

SEQ ID NO: 57707 - DNA, 120 bp, Artificial Sequence
  ENSG00000070808_22 (sequence is synthesized)
tcgtaaatggatttcgcgttaatggatatttatgtaataactagacttctcagattattgtgagaagggtcaggttggaaggggtgtaggaagaggggtgaggggtagtttttttctgtt

SEQ ID NO: 57708 - DNA, 120 bp, Artificial Sequence
  ENSG00000070808_23 (sequence is synthesized)
ctagtttttttttttttttttgtcatctctgaggtggaccttgtcacctgtggttattggggccaaggtggactcagctccggggagaagggcctctctgccatttcggtcccaaggtga

SEQ ID NO: 57709 - DNA, 120 bp, Artificial Sequence
  ENSG00000070808_24 (sequence is synthesized)
gctgacacaggcgttccttttgggactgtggaagcatcagatgccagcactgactcaggaacagcaagtcagggcagagaggaggagggaggctgtcaggatggaaatacctggactttt

SEQ ID NO: 57710 - DNA, 120 bp, Artificial Sequence
  ENSG00000070808_25 (sequence is synthesized)
ctttgcttccctcgcaaactggggtcttctctaccgaacttcccaggatttcatctcaccatatctgtgtgccgcccccagcaccccccacccacctctggggggcccgtgagcgtgtgt

SEQ ID NO: 57711 - DNA, 120 bp, Artificial Sequence
  ENSG00000070808_26 (sequence is synthesized)
cttcattgcctctctccccttggcgtctgatgaccacagcaaagcactgggaatttctactcttcatgcctcatcctgcagcctcgggttcgcattctctctttcttttcctctttccct

SEQ ID NO: 57712 - DNA, 120 bp, Artificial Sequence
  ENSG00000070808_27 (sequence is synthesized)
ctttccctgggattgactctgagtggaataccttggcacatccactaggatctactgtctgcactgttttctttgcatgactttatacgcagtaagtatgttgaaaacaaacaaaaagaa

SEQ ID NO: 57713 - DNA, 120 bp, Artificial Sequence
  ENSG00000070808_28 (sequence is synthesized)
gaaaacactcaacaaaaccaatctacatgttttggactaaaaaaaaaaatagaggttgtattctcagtgtccgactcggaattatgttgctgcctctctgtgcttttggcctctgtgtgg

SEQ ID NO: 57714 - DNA, 120 bp, Artificial Sequence
  ENSG00000070808_29 (sequence is synthesized)
ccgtgttttgccagcatgagatactgtcccctctggaggattttaggggaggaagagccacgtccccagggattggaggaggctccggtaccctcgaccctcctgggtgttggttggagc

SEQ ID NO: 57715 - DNA, 120 bp, Artificial Sequence
  ENSG00000070808_30 (sequence is synthesized)
agaactggtgaggatgtttgatccgagattttctgagctctccccaatcaccagctgtctgctgggttcttttctcaagtcctgctgcccaggcccaggtgagacaggcaacgccaggtc

SEQ ID NO: 57716 - DNA, 120 bp, Artificial Sequence
  ENSG00000070808_31 (sequence is synthesized)
tgcaggccaggagagatgctgcccaggcctcctggtttccaagctggtccatcactggcctctgtccttggcagagaccttgctgcccaggcccaggggcaggctcttggcctgccccag

SEQ ID NO: 57717 - DNA, 120 bp, Artificial Sequence
  ENSG00000070808_32 (sequence is synthesized)
gcccagagggcttcccagtaaggcccagtgatcccattatcccaggggcaaaaccacctgtccccttttgagctgccagttccctacagccatccccagtcaagggtgagggtgtggcct

SEQ ID NO: 57718 - DNA, 120 bp, Artificial Sequence
  ENSG00000070808_33 (sequence is synthesized)
tcaccaggggctgctgtaattaccgagcaaggtctgagctcttcttcagcctcagttccctcattggttaaaagggttctttgttcccatccagccgatgaaggagcaaacgtctggcta

SEQ ID NO: 57719 - DNA, 120 bp, Artificial Sequence
  ENSG00000070808_34 (sequence is synthesized)
tgtgaagcctaatttacctgcaggaactggcagggatagtcactggctggactcctgtttacttctagacctggtcaggctccatcccctcccccacctgcccctgattcccctcgtcgg

SEQ ID NO: 57720 - DNA, 120 bp, Artificial Sequence
  ENSG00000070808_35 (sequence is synthesized)
tgcctgtcaactgcttttcagcagtggactgcaggggaaagagcagtgatttggggtgagtaggcttcaattcccagctctgaccagacttgctgtgtgaccttgggcaagttcctttcc

SEQ ID NO: 57721 - DNA, 120 bp, Artificial Sequence
  ENSG00000070808_36 (sequence is synthesized)
ctctttggagcttggtttccctgccagaggaaactgagctggaggagcctgaggtcctgcctttcattggctgacacacctcctgtccactgtgtcactctccaagtgccagagaagtgg

SEQ ID NO: 57722 - DNA, 120 bp, Artificial Sequence
  ENSG00000070808_37 (sequence is synthesized)
aggcagatcgctaccccaggctgagatggcccccactgtgaaggccacgcctgtgggtgggcagccacctggtgccaccacagggcaccagggatgatcctgatgtggcaggcaggggag

SEQ ID NO: 57723 - DNA, 120 bp, Artificial Sequence
  ENSG00000070808_38 (sequence is synthesized)
gtggcaggcaggggagactcacagaaaaatctgcccagagcctaccctcaccagacaaactctgtgctcctccaaaacatcctttagatgcaaaataataataataataataataaataa

SEQ ID NO: 57724 - DNA, 120 bp, Artificial Sequence
  ENSG00000070808_39 (sequence is synthesized)
acccaagtcaaaaccttggctccagcatgaaaacacgtttacaggaaagtgttctcctgggtttgtgcccaccatggtgcgaatcctgacccaaggcctcctgtctcccttcaaagggag

SEQ ID NO: 57725 - DNA, 120 bp, Artificial Sequence
  ENSG00000070808_40 (sequence is synthesized)
aaggcctcctgtctcccttcaaagggagacccttttgggggatgagtttgccagactccccgtgctggtttctttgttactatttgtttggggttttgttttagttctttttttttttct

SEQ ID NO: 57726 - DNA, 120 bp, Artificial Sequence
  ENSG00000070808_41 (sequence is synthesized)
acttgaatgaacactgctcaaactttctgctattggggggggcgggtgggatgggaagaaggggcgtttgttttattcttggtgttttcagtgcaataaatagctacaaacttctgtgca

SEQ ID NO: 57727 - DNA, 120 bp, Artificial Sequence
  ENSG00000070808_42 (sequence is synthesized)
gttccagcgttcagttaatggaatcctcagagagcaccaacaccaccatcgaggatgaagacaccaaaggtagggaggggccttcagtgtcgggaccccttagacttctggaaccagctc

SEQ ID NO: 57728 - DNA, 120 bp, Artificial Sequence
  ENSG00000070808_43 (sequence is synthesized)
tgagcagacctctttttcctgacagctcccacgtgccaacctcatttcttgctcatctacagagagcttcgctctggtgccttataaactgggcacactgggaggcatcattcccatgga

SEQ ID NO: 57729 - DNA, 90 bp, Artificial Sequence
  ENSG00000070808_44 (sequence is synthesized)
cttataaactgggcacactgggaggcatcattcccatggagggcgggggtggtactggaactactgctggtgtgtagataggttttcgag

SEQ ID NO: 57730 - DNA, 120 bp, Artificial Sequence
  ENSG00000070808_45 (sequence is synthesized)
gatcgctgggccagctctgctccctgcagtctgccctccggctgcgtgtggatgctgctcgtcctcgccctgtgggccctggtgccctgcctggcgttgttaaccctctactttttctcc

SEQ ID NO: 57731 - DNA, 120 bp, Artificial Sequence
  ENSG00000070808_46 (sequence is synthesized)
atgtgcaattctctcctgaagtgagagggcccagcgggatctgcttgtagaggtgaagtcggccatttagtctggctagagtatagggcctgaggaacaggcctggaggagtctcggaga

SEQ ID NO: 57732 - DNA, 120 bp, Artificial Sequence
  ENSG00000070808_47 (sequence is synthesized)
agcctcacatttaagaatcatggaaacggaggccagagagggcgagggatgtgcttgagtcactgcaacccaggcctcttcctctttccactgcaccccatggtcttcctggagaactca

SEQ ID NO: 57733 - DNA, 120 bp, Artificial Sequence
  ENSG00000070814_0 (sequence is synthesized)
taagggcgcgagggaagtggcgggcggggactaaggcggggcgtgcaggtagccggccggccgggggtcgcgggtatggccgaggccaggaagcggcgggagctacttcccctgatctac

SEQ ID NO: 57734 - DNA, 120 bp, Artificial Sequence
  ENSG00000070814_1 (sequence is synthesized)
caccatctgctgcgggctggctatgtgcgtgcggcgcgggaagtgaaggagcagagcggccagaagtgtttcctggctcagcccgtaacccttctggacatctatacacactggcaacaa

SEQ ID NO: 57735 - DNA, 120 bp, Artificial Sequence
  ENSG00000070814_2 (sequence is synthesized)
acctcagagcttggtcggaagcggaaggcagaggaagatgcggcactgcaagctaagaaaacccgtgtgtcagaccccatcagcacctcggagagctcggaagaggaggaagaagcagaa

SEQ ID NO: 57736 - DNA, 120 bp, Artificial Sequence
  ENSG00000070814_3 (sequence is synthesized)
gccgaaaccgccaaagccaccccaagactagcatctaccaactcctcagtcctgggggcggacttgccatcaagcatgaaagaaaaagccaaggcagagacagagaaagctggcaagact

SEQ ID NO: 57737 - DNA, 120 bp, Artificial Sequence
  ENSG00000070814_4 (sequence is synthesized)
gggaattccatgccacaccctgccactgggaagacggtggccaaccttctttctgggaagtctcccaggaagtcagcagagccctcagcaaatactacgttggtctcagaaactgaggag

SEQ ID NO: 57738 - DNA, 120 bp, Artificial Sequence
  ENSG00000070814_5 (sequence is synthesized)
gagggcagcgtcccggcctttggagctgctgccaagcctgggatggtgtcagcgggccaggccgacagctccagcgaggacacctccagctccagtgatgagacagacgtggaggtaaag

SEQ ID NO: 57739 - DNA, 120 bp, Artificial Sequence
  ENSG00000070814_6 (sequence is synthesized)
gcctctgaaaaaattctccaggtcagagctgcctcagcccctgccaaggggacccctgggaaaggggctaccccagcaccccctgggaaggcaggggctgtagcctcccagaccaaggca

SEQ ID NO: 57740 - DNA, 120 bp, Artificial Sequence
  ENSG00000070814_7 (sequence is synthesized)
gggaagccagaggaggactcagagagcagcagcgaggagtcatctgacagtgaggaggagacgccagctgccaaggccctgcttcaggcgaaggcctcaggaaaaacctctcaggtcgga

SEQ ID NO: 57741 - DNA, 120 bp, Artificial Sequence
  ENSG00000070814_8 (sequence is synthesized)
gctgcctcagcccctgccaaggagtcccccaggaaaggagctgccccagcgccccctgggaagacagggcctgcagttgccaaggcccaggcggggaagcgggaggaggactcgcagagc

SEQ ID NO: 57742 - DNA, 120 bp, Artificial Sequence
  ENSG00000070814_9 (sequence is synthesized)
agcagcgaggaatcggacagtgaggaggaggcgcctgctcaggcgaagccttcagggaaggccccccaggtcagagccgcctcggcccctgccaaggagtcccccaggaaaggggctgcc

SEQ ID NO: 57743 - DNA, 120 bp, Artificial Sequence
  ENSG00000070814_10 (sequence is synthesized)
ccagcacctcctaggaaaacagggcctgcagccgcccaggtccaggtggggaagcaggaggaggactcaagaagcagcagcgaggagtcagacagtgacagagaggcactggcagccatg

SEQ ID NO: 57744 - DNA, 120 bp, Artificial Sequence
  ENSG00000070814_11 (sequence is synthesized)
aatgcagctcaggtgaagcccttggggaaaagcccccaggtgaaacctgcctctaccatgggcatggggcccttggggaaaggcgccggcccagtgccacccgggaaggtggggcctgca

SEQ ID NO: 57745 - DNA, 120 bp, Artificial Sequence
  ENSG00000070814_12 (sequence is synthesized)
accccctcagcccaggtggggaagtgggaggaggactcagagagcagtagtgaggagtcatcagacagcagtgatggagaggtgcccacagctgtggccccggctcaggaaaagtccttg

SEQ ID NO: 57746 - DNA, 120 bp, Artificial Sequence
  ENSG00000070814_13 (sequence is synthesized)
gggaacatcctccaggccaaacccacctccagtcctgccaaggggccccctcagaaggcagggcctgtagccgtccaggtcaaggctgaaaagcccatggacaactcggagagcagcgag

SEQ ID NO: 57747 - DNA, 120 bp, Artificial Sequence
  ENSG00000070814_14 (sequence is synthesized)
gagtcatcggacagtgcggacagtgaggaggcaccagcagccatgactgcagctcaggcaaaaccagctctgaaaattcctcagaccaaggcctgcccaaagaaaaccaataccactgca

SEQ ID NO: 57748 - DNA, 120 bp, Artificial Sequence
  ENSG00000070814_15 (sequence is synthesized)
tctgccaaggtcgcccctgtgcgagtgggcacccaagccccccggaaagcaggaactgcgacttctccagcaggctcatccccagctgtggctgggggcacccagagaccagcagaggat

SEQ ID NO: 57749 - DNA, 120 bp, Artificial Sequence
  ENSG00000070814_16 (sequence is synthesized)
tcttcaagcagtgaggaatcagatagtgaggaagagaagacaggtcttgcagtaaccgtgggacaggcaaagtctgtggggaaaggcctccaggtgaaagcagcctcagtgcctgtcaag

SEQ ID NO: 57750 - DNA, 120 bp, Artificial Sequence
  ENSG00000070814_17 (sequence is synthesized)
gggtccttggggcaagggactgctccagtactccctgggaagacggggcctacagtcacccaggtgaaagctgaaaagcaggaagactctgagagcagtgaggaggaatcagacagtgag

SEQ ID NO: 57751 - DNA, 120 bp, Artificial Sequence
  ENSG00000070814_18 (sequence is synthesized)
gaagcagctgcatctccagcacaggtgaaaacctcagtaaagaaaacccaggccaaagccaacccagctgccgccagagcaccttcagcaaaagggacaatttcagcccctggaaaagtt

SEQ ID NO: 57752 - DNA, 120 bp, Artificial Sequence
  ENSG00000070814_19 (sequence is synthesized)
gtcactgcagctgctcaagccaagcagaggtctccatccaaggtgaagccaccagtgagaaacccccagaacagtaccgtcttggcgaggggcccagcatctgtgccatctgtggggaag

SEQ ID NO: 57753 - DNA, 120 bp, Artificial Sequence
  ENSG00000070814_20 (sequence is synthesized)
gccagaggaggactcagggagcagtgaggaggagtcagacagtgaggaggaggcggagacgctggctcaggtgaagccttcagggaagacccaccagatcagagctgccttggctcctgc

SEQ ID NO: 57754 - DNA, 120 bp, Artificial Sequence
  ENSG00000070814_21 (sequence is synthesized)
caaggagtcccccaggaaaggggctgccccaacacctcctgggaagacagggccttcggctgcccaggcagggaagcaggatgactcagggagcagcagcgaggaatcagacagtgatgg

SEQ ID NO: 57755 - DNA, 120 bp, Artificial Sequence
  ENSG00000070814_22 (sequence is synthesized)
ggaggcaccggcagctgtgacctctgcccaggtgattaaaccccctctgatttttgtcgaccctaatcgtagtccagctggcccagctgctacacccgcacaagcccaggctgcaagcac

SEQ ID NO: 57756 - DNA, 120 bp, Artificial Sequence
  ENSG00000070814_23 (sequence is synthesized)
cccgaggaaggcccgagcctcggagagcacagccaggagctcctcctccgagagcgaggatgaggacgtgatccccgctacacagtgcttgactcctggcatcagaaccaatgtggtgac

SEQ ID NO: 57757 - DNA, 120 bp, Artificial Sequence
  ENSG00000070814_24 (sequence is synthesized)
catgcccactgcccacccaagaatagcccccaaagccagcatggctggggccagcagcagcaaggagtccagtcggatatcagatggcaagaaacaggagggaccagccactcaggtgtc

SEQ ID NO: 57758 - DNA, 120 bp, Artificial Sequence
  ENSG00000070814_25 (sequence is synthesized)
aaagaagaacccagcttccctcccactgacccaggctgccctgaaggtcctcgcccagaaagccagtgaggctcagcctcctgttgccaggacccagccttcaagtggggttgacagtgc

SEQ ID NO: 57759 - DNA, 120 bp, Artificial Sequence
  ENSG00000070814_26 (sequence is synthesized)
tgtgggaacactccctgcaacaagtccccagagcacctccgtccaggccaaagggaccaacaagctcagaaaacctaagcttcctgaggtccagcaggccaccaaagcccctgagagctc

SEQ ID NO: 57760 - DNA, 120 bp, Artificial Sequence
  ENSG00000070814_27 (sequence is synthesized)
agatgacagtgaggacagcagcgacagttcttcagggagtgaggaagatggtgaagggccccagggggccaagtcagcccacacgctgggtcccaccccctccaggacagagaccctggt

SEQ ID NO: 57761 - DNA, 120 bp, Artificial Sequence
  ENSG00000070814_28 (sequence is synthesized)
ggaggagaccgcagcagagtccagcgaggatgatgtggtggcgccatcccagtctctcctctcaggttatatgacccctggactaaccccagccaattcccaggcctcaaaagccactcc

SEQ ID NO: 57762 - DNA, 120 bp, Artificial Sequence
  ENSG00000070814_29 (sequence is synthesized)
caagctagactccagcccctcagtttcctctactctggccgccaaagatgacccagatggcaagcaggaggcaaagccccaacaggcagcaggcatgttgtcccctaaaacaggtggaaa

SEQ ID NO: 57763 - DNA, 120 bp, Artificial Sequence
  ENSG00000070814_30 (sequence is synthesized)
agaggctgcttcaggcaccacacctcagaagtcccggaagcccaagaaaggggctgggaacccccaagcctcaaccctggcgctgcaaagcaacatcacccagtgcctcctgggccaacc

SEQ ID NO: 57764 - DNA, 120 bp, Artificial Sequence
  ENSG00000070814_31 (sequence is synthesized)
ctggcccctgaatgaggcccaggtgcaggcctcagtggtgaaggtcctgactgagctgctggaacaggaaagaaagaaggtggtggacaccaccaaggagagcagcaggaagggctggga

SEQ ID NO: 57765 - DNA, 120 bp, Artificial Sequence
  ENSG00000070814_32 (sequence is synthesized)
gagccgcaagcggaagctatcgggagaccagccagctgccaggacccccaggagcaagaagaagaagaagctgggggccggggaaggtggggaggcctctgtttccccagaaaagacctc

SEQ ID NO: 57766 - DNA, 120 bp, Artificial Sequence
  ENSG00000070814_33 (sequence is synthesized)
cacgacttccaaggggaaagcaaagagagacaaagcaagtggtgatgtcaaggagaagaaagggaaggggtctcttggctcccaaggggccaaggacgagccagaagaggagcttcagaa

SEQ ID NO: 57767 - DNA, 120 bp, Artificial Sequence
  ENSG00000070814_34 (sequence is synthesized)
aagaggagcttcagaaggggatggggacggttgaaggtggagatcaaagcaacccaaagagcaagaaggagaagaagaaatccgacaagagaaaaaaagacaaagaaaaaaaagaaaaga

SEQ ID NO: 57768 - DNA, 120 bp, Artificial Sequence
  ENSG00000070814_35 (sequence is synthesized)
ggcctcaaccaaagattctgagtcaccgtcccagaagaaaaagaagaaaaagaagaagacagcagagcagactgtatgacgagcaccagcaccaggcacagggatttcctagccgagcag

SEQ ID NO: 57769 - DNA, 120 bp, Artificial Sequence
  ENSG00000070814_36 (sequence is synthesized)
tggccatccccatgcctctgacctccaccgacctctgcccaccatgggttggaactaaactgttaccttccctcgctccacagaagaagacagccagcttcaggggtccctgtgctggcc

SEQ ID NO: 57770 - DNA, 120 bp, Artificial Sequence
  ENSG00000070814_37 (sequence is synthesized)
aagccagtgagcctgcggggaggctggtccaaggagaaagtggaccagctcccatgacctcaccccactcccccaacacaggacgcttcatatagatgtgtacagtatatgtattttttt

SEQ ID NO: 57771 - DNA, 120 bp, Artificial Sequence
  ENSG00000070814_38 (sequence is synthesized)
aagtgacctcctctccttccacagaccccacatgcccaaaggcctcgggacttcccaccaccttgctccacagatccagctaggcctgacctgtgcctcatcccgtgccgctcggtctct

SEQ ID NO: 57772 - DNA, 120 bp, Artificial Sequence
  ENSG00000070814_39 (sequence is synthesized)
ggctgatcccgaggctttgtcttcctctcgtcagttcttttggttgtgttttttgttttttttttaataactcaaaaaaaaaataaaagacttggaggaagggtgcaagctcccagtgca

SEQ ID NO: 57773 - DNA, 120 bp, Artificial Sequence
  ENSG00000070814_40 (sequence is synthesized)
gtgggggatgtgacaccccaggtcaaaggaggggccctgcccccagccaagagggccaagaagccagaagaggagtcagagagtagtgaggagggatctgaaagtgaggaggaggcccct

SEQ ID NO: 57774 - DNA, 120 bp, Artificial Sequence
  ENSG00000070814_41 (sequence is synthesized)
gcccaggaccctctctcaagcacctgtggcataccttcatgtgctccactgcacccagagcttaagccacagtcctgctcaggctacacctccaagggtgggaccaggcccaccttatct

SEQ ID NO: 57775 - DNA, 120 bp, Artificial Sequence
  ENSG00000070814_42 (sequence is synthesized)
tcctgtactccagaggcccaagtcagccatgctggtgtggtccaagcttctgtgtgaaccctggcccttccatcagacagcattaccctttgtcctcctctagccccaagctcccagaag

SEQ ID NO: 57776 - DNA, 120 bp, Artificial Sequence
  ENSG00000070814_43 (sequence is synthesized)
cttctgccaggcacctcagagcaccagctcccctgtcccagggcctaaccacagatcctggagttctgcaacctccagaccagagcggtctcatgaaccacctccccttgaatatcacat

SEQ ID NO: 57777 - DNA, 120 bp, Artificial Sequence
  ENSG00000070814_44 (sequence is synthesized)
accacattgttatcaattcatcagtaaggtcagatgctgtttgcacacctccagcaatagggtgctcactgcctctcactttccaatggcacagattacaaaagtaaagaacaaccacca

SEQ ID NO: 57778 - DNA, 120 bp, Artificial Sequence
  ENSG00000070814_45 (sequence is synthesized)
gacctctgcccagaaggacagtaactccaaacctgccagaagcaagaccctggccccagcacccccagagaggaacacggaggggtcctcggagagcagtgaggaagagctgccactgac

SEQ ID NO: 57779 - DNA, 120 bp, Artificial Sequence
  ENSG00000070814_46 (sequence is synthesized)
gggaagcaagcccacggagcgtagaaggtgcaggcgtggccctgcatcgcggcaccagcactcatctgccccatgacctctgcacttggtttgcctccctcggcctcagtggcctaatct

SEQ ID NO: 57780 - DNA, 120 bp, Artificial Sequence
  ENSG00000070814_47 (sequence is synthesized)
gcctccacgtctcatgctgcgggggagttgggaatccatcaaggatgcagacacatagcttcatgttaccatcctcttctctcttgctcctggtggacctggctgatgcatcacagagct

SEQ ID NO: 57781 - DNA, 120 bp, Artificial Sequence
  ENSG00000070814_48 (sequence is synthesized)
cattcctgcaagtctgggctcagcctcagatcctcatgccagcaccaggcagccaataccaatagaattgttaggtgagatgaaacctgtttgccattcatagatgagaaaagctcatct

SEQ ID NO: 57782 - DNA, 120 bp, Artificial Sequence
  ENSG00000070814_49 (sequence is synthesized)
ggctcctttagcagatgtttgtttcttgcagccccaagactagcatctaccaactcctcagtcctgggggcggacttgccatcaagcatgaaagaaaaagccaaggtgagtgggactgcc

SEQ ID NO: 57783 - DNA, 120 bp, Artificial Sequence
  ENSG00000070814_50 (sequence is synthesized)
ttccaagctattgcctatgggatttaaggtgcctggtaggggacagtcttacatgtcagagaaggatagggttgtgagtaattgccccacctggattcagagctcaacctgtgtcaccag

SEQ ID NO: 57784 - DNA, 120 bp, Artificial Sequence
  ENSG00000070814_51 (sequence is synthesized)
ttgtgggatcttagtcccttcacctctctgggcctcagtttacttttctataaagataaggatgatgcctgctgcagtgggccactgggcacattctacacctggggtaggcgatttctt

SEQ ID NO: 57785 - DNA, 120 bp, Artificial Sequence
  ENSG00000070814_52 (sequence is synthesized)
tcctctttcatgcctgcgttcacccgttcactcaacagatcttgactaatacctgttatgttccaggcactgtgctaggtgtggaggcaccgtagtgatcaagacatctgtggttctgaa

SEQ ID NO: 57786 - DNA, 120 bp, Artificial Sequence
  ENSG00000070814_53 (sequence is synthesized)
actctaaaagcattttccaaactggaaactgctcaaaaaacaaggtgtcattttctaataatccagaaagcagagttagatacatacatgtataaagaattgtgcctctgcgattgcctg

SEQ ID NO: 57787 - DNA, 120 bp, Artificial Sequence
  ENSG00000070814_54 (sequence is synthesized)
gagcattagcaacaatgtctcaaagtaattatgaagtaatgataagatcaacaacaaactgctacttaccacttagtaaataactaccatgtcccaagaactgggattctgttttctcaa

SEQ ID NO: 57788 - DNA, 120 bp, Artificial Sequence
  ENSG00000070814_55 (sequence is synthesized)
cacctctggtgagaggaggtgctgtttttaacctcactttaaagattgggaaacagattgaaggggtagtttacccaaactcacacagctaagaagtggtaagattgggttcagatgcaa

SEQ ID NO: 57789 - DNA, 120 bp, Artificial Sequence
  ENSG00000070814_56 (sequence is synthesized)
caggtgaggcagaggggaggggtggagagtagccccatgcctaaaccccagcacctgcatgggtgtggccacctttgccacatccagctcctgtctccacacgtccaccctctgggctct

SEQ ID NO: 57790 - DNA, 120 bp, Artificial Sequence
  ENSG00000070814_57 (sequence is synthesized)
gctggaagccgccctgcatggcctgtgccctgcctcaaaagacctcctgtggttttgacttttcctctctgaacctagagccctgtgcggctggcttcgtttgctctcctcccctcactc

SEQ ID NO: 57791 - DNA, 120 bp, Artificial Sequence
  ENSG00000070814_58 (sequence is synthesized)
atgactgcagctcaggtgaggcctggggaaggaggctgctacatggcctgatctgccacaccacagtcagcacccccggggagctgtgctccctcaggcagagcatgggttttggctggt

SEQ ID NO: 57792 - DNA, 61 bp, Artificial Sequence
  ENSG00000070814_59 (sequence is synthesized)
ttgccaggcctctgagccaccaacactcactcctcagaacgggggtatatatcacttgagg

SEQ ID NO: 57793 - DNA, 76 bp, Artificial Sequence
  ENSG00000070814_60 (sequence is synthesized)
gagaccagggtttagggccaggtaaggaaaagaaaggaaggccaggttaaggcttaaggctccagttccaccatgc

SEQ ID NO: 57794 - DNA, 120 bp, Artificial Sequence
  ENSG00000070814_61 (sequence is synthesized)
gaaggccaggttaaggcttaaggctccagttccaccatgccctcctccgtctgctgtcatccacatctccttaggtaaaacctgctactaaaaccccccaaacgaagacttccgtagcta

SEQ ID NO: 57795 - DNA, 120 bp, Artificial Sequence
  ENSG00000070814_62 (sequence is synthesized)
aaagtgtcctgggtctatatctaggtcgaggtctccaccagctctataagctaggccagtatttcccaccaaggcatatgagaccaagaatctacatgttagttattgtgcatacgttaa

SEQ ID NO: 57796 - DNA, 120 bp, Artificial Sequence
  ENSG00000070814_63 (sequence is synthesized)
cgttatacaaaatgactctccctgtcagagtcccagggaagcttggagtgtggcacaggtccccctgaggtcctggagagatggaggaagtctcatcctgcaccttggcccggagcctca

SEQ ID NO: 57797 - DNA, 120 bp, Artificial Sequence
  ENSG00000070814_64 (sequence is synthesized)
cataggcaggcgcatcttctcaggcagggcttgtctagcttagtgcaaagcctggaccctggagagtggggagaaagaaaatctgaacaattccctctgtctgcttgcagaagatagcag

SEQ ID NO: 57798 - DNA, 120 bp, Artificial Sequence
  ENSG00000070814_65 (sequence is synthesized)
ggcttgctacatcctacagaagtgtaggatgacaaactccagcactgccaaggcacaggtgtgtgatggaaatgactgatgcaggcctggcaggaatgatagatgtcggccgggtgcggt

SEQ ID NO: 57799 - DNA, 120 bp, Artificial Sequence
  ENSG00000070814_66 (sequence is synthesized)
tgtggtggcgccatcccaggtaactgcaagggagaggactggcagcccataggccttagggtggagccccaggccaggctcctgtctacccgatccctcaggtcaggggtctgggtcccc

SEQ ID NO: 57800 - DNA, 120 bp, Artificial Sequence
  ENSG00000070814_67 (sequence is synthesized)
tctgcacctgtggctgagcctgggcctcagtttccccacctgtacaacttcatgaggaagtcaatccaaatgatttcagagacctgactttgctgtttgaccactctcagctttttggta

SEQ ID NO: 57801 - DNA, 120 bp, Artificial Sequence
  ENSG00000070814_68 (sequence is synthesized)
tcagactcccttcactggctcccaaaaactccagggccatgtttctggaacagtggaaagcagggaaatagaaatggggcctcaggaattagaaataaggctttggcattcaaatgtcgc

SEQ ID NO: 57802 - DNA, 120 bp, Artificial Sequence
  ENSG00000070814_69 (sequence is synthesized)
acctagcatgctgtgactagcgataagtgtgcaaggagtgttgaagcagtaggaagacttgtggtgaggcggggcaggggatgggggtgagggacctgcagagagaccagggccttcctg

SEQ ID NO: 57803 - DNA, 120 bp, Artificial Sequence
  ENSG00000070814_70 (sequence is synthesized)
aagggctctgcccttcccggctggcaggggccacctggggctaccaacaggatactgtgcttctccagtaggtcccaccccctccaggacagagaccctggtggaggagaccgcagcaga

SEQ ID NO: 57804 - DNA, 120 bp, Artificial Sequence
  ENSG00000070814_71 (sequence is synthesized)
tagctgacccttggggtctgtagaagggattgaccttgattctgggtgatgtccggacaaaaacattctttagcagatttattttaaggttactatctgtatgtggcaaaagctagtaat

SEQ ID NO: 57805 - DNA, 120 bp, Artificial Sequence
  ENSG00000070814_72 (sequence is synthesized)
tttccatttgtattaataagaaatttcctttttaaatgtgcctgtctagaaagtgtattaattaaaatagttcaggaggcacacgccaagggctgaagtgctgctctgtgccttgttgtc

SEQ ID NO: 57806 - DNA, 120 bp, Artificial Sequence
  ENSG00000070814_73 (sequence is synthesized)
cacccactctgcactgatagggcagggtgatcctagaggccccaggctgctttcctcacagcaggccatgactcgggctgggttatggcagtggggtggggtggtggcagcctctttcac

SEQ ID NO: 57807 - DNA, 120 bp, Artificial Sequence
  ENSG00000070814_74 (sequence is synthesized)
cagggcagtgggccccttcttgccctcctgtagcaacagtcctcccaacatggtcctgtctgcccccagagcctctccaagtgagaccttgtggccttgcattggacctgaagatgctca

SEQ ID NO: 57808 - DNA, 120 bp, Artificial Sequence
  ENSG00000070814_75 (sequence is synthesized)
gaccccatctctaaaatttattttaattagccggtgtgatggtgcacgcttgtagtcccaattacttgagaggccaaggcagaagaatgacttgaagccaggaggttgaggctatagtga

SEQ ID NO: 57809 - DNA, 120 bp, Artificial Sequence
  ENSG00000070814_76 (sequence is synthesized)
gccatgatcatgccactacactccagccagggtggtacagtgagaccctgtctcaaaaaaaaagtacaggtgggccccacgcccaggtgtctggctcccatggccctggacagcctggaa

SEQ ID NO: 57810 - DNA, 120 bp, Artificial Sequence
  ENSG00000070814_77 (sequence is synthesized)
gtgggggtgtatccagccctgggtggtgctgatgcacctggtaggatagcccttgcctcagaggaagctgcgtcttttggcttgtggagcaagtgttggctctctccaaccatcaccatc

SEQ ID NO: 57811 - DNA, 120 bp, Artificial Sequence
  ENSG00000070814_78 (sequence is synthesized)
aacttttcttccctgtaaataggctcacggtgtgggccttgggcctcagaggatagcttagacaataggctgacagtcacgtttggaggacactcagcacatgcaggagaccccaggcag

SEQ ID NO: 57812 - DNA, 120 bp, Artificial Sequence
  ENSG00000070814_79 (sequence is synthesized)
tagactggccccaggctgttctgactcattgtaaagccttggaaatcccctggccactctggacctctgtgtcttaaccatacaaaacagcagttgatgtatccagtctgtgtcaaggca

SEQ ID NO: 57813 - DNA, 120 bp, Artificial Sequence
  ENSG00000070814_80 (sequence is synthesized)
tggcacatgtagaaaatagtcacattgtatttggagggcagactggattattcaattcacctaacctggggcatccacactccctgaccctactggagctaagggtcaaatatgtaccag

SEQ ID NO: 57814 - DNA, 120 bp, Artificial Sequence
  ENSG00000070814_81 (sequence is synthesized)
tgtaccagctgggcacacttgggacagctccagggcttccccagccttggtgttctgggtgtttgcagataagcagcagaaaagtgggcctggcgcagtggctcgtgcctataatcccag

SEQ ID NO: 57815 - DNA, 120 bp, Artificial Sequence
  ENSG00000070831_0 (sequence is synthesized)
gcagtgctgccaacgccccggtggagaagctgaggtcatcatcagatttgaaatatttaaagtggatacaaaactatttcagcaatgcagacaattaagtgtgttgttgtgggcgatggt

SEQ ID NO: 57816 - DNA, 120 bp, Artificial Sequence
  ENSG00000070831_1 (sequence is synthesized)
gctgttggtaaaacatgtctcctgatatcctacacaacaaacaaatttccatcggaatatgtaccgactgtttttgacaactatgcagtcacagttatgattggtggagaaccatatact

SEQ ID NO: 57817 - DNA, 120 bp, Artificial Sequence
  ENSG00000070831_2 (sequence is synthesized)
cttggactttttgatactgcagggcaagaggattatgacagattacgaccgctgagttatccacaaacagatgtatttctagtctgtttttcagtggtctctccatcttcatttgaaaac

SEQ ID NO: 57818 - DNA, 120 bp, Artificial Sequence
  ENSG00000070831_3 (sequence is synthesized)
gtgaaagaaaagtgggtgcctgagataactcaccactgtccaaagactcctttcttgcttgttgggactcaaattgatctcagagatgacccctctactattgagaaacttgccaagaac

SEQ ID NO: 57819 - DNA, 120 bp, Artificial Sequence
  ENSG00000070831_4 (sequence is synthesized)
aaacagaagcctatcactccagagactgctgaaaagctggcccgtgacctgaaggctgtcaagtatgtggagtgttctgcacttacacagagaggtctgaagaatgtgtttgatgaggct

SEQ ID NO: 57820 - DNA, 120 bp, Artificial Sequence
  ENSG00000070831_5 (sequence is synthesized)
atcgtttaaaaacaaaggaataaaaccatcctgtttgaaagcctctgcgtctttttactcaccaccttagagcaacctctgtattagtttttgatcaagaatgcaatatcatataaattt

SEQ ID NO: 57821 - DNA, 120 bp, Artificial Sequence
  ENSG00000070831_6 (sequence is synthesized)
tttgtgatcagtagtcaagttggacttgttttaacgttctgctgcttgagttgcctgatgctcagagctttttggtttggattactattgcaaaagggaacttggtctggctttaagaat

SEQ ID NO: 57822 - DNA, 120 bp, Artificial Sequence
  ENSG00000070831_7 (sequence is synthesized)
gtcctcttggagaaaataacaagagttttaacacttctagatcttagttctagatggagaaagtaacacaaacatcattttactcttatgatcaattgttaattgtaattgcatgacaaa

SEQ ID NO: 57823 - DNA, 120 bp, Artificial Sequence
  ENSG00000070831_8 (sequence is synthesized)
ccttatggaaaaggggtgacctagtagagtgtaatggggaagggaggattcttttctggttttcctttgtgcggtgaaactttgtgttgctgttgctttggctgtctgtgctgtagtgga

SEQ ID NO: 57824 - DNA, 120 bp, Artificial Sequence
  ENSG00000070831_9 (sequence is synthesized)
gtatttgtcagtctggggtggggaagatattgatgtatctgctactgctttatgagttcatttgttacattatcttttaagaataacatccatttaaacagttgacttacagtttgttaa

SEQ ID NO: 57825 - DNA, 120 bp, Artificial Sequence
  ENSG00000070831_10 (sequence is synthesized)
tgctgagatgtaaagctgccacctttatattttcctgcttctgattttattgtgagggaaatatacaattgtggttaccttcaaattttgaaattaaaaatatacaaccgtttgtataaa

SEQ ID NO: 57826 - DNA, 69 bp, Artificial Sequence
  ENSG00000070831_11 (sequence is synthesized)
gtcaggtgcgtgcccctgtccggcagccgaggagaccccgcgcagtgctgccaacgccccggtggagaa

SEQ ID NO: 57827 - DNA, 120 bp, Artificial Sequence
  ENSG00000070831_12 (sequence is synthesized)
gttctgcacttacacagaaaggcctaaagaatgtatttgacgaagcaatattggctgccctggagcctccagaaccgaagaagagccgcaggtgtgtgctgctatgaacatctctccaga

SEQ ID NO: 57828 - DNA, 120 bp, Artificial Sequence
  ENSG00000070831_13 (sequence is synthesized)
gccctttctgcacagctggtgtcggcatcatactaaaagcaatgtttaaatcaaactaaagattaaaaattaaaattcgtttttgcaataatgacaaatgccctgcacctacccacatgc

SEQ ID NO: 57829 - DNA, 120 bp, Artificial Sequence
  ENSG00000070831_14 (sequence is synthesized)
actcgtgtgagacaaggcccataggtatggccccccccttccccctcccagtactagttaattttgagtaattgtattgtcagaaaagtgattagtactatttttttttgttgtttcaaa

SEQ ID NO: 57830 - DNA, 120 bp, Artificial Sequence
  ENSG00000070831_15 (sequence is synthesized)
attgttgaagctgctccctggttccactctggagagtaatctgggacatcttagtgttttgttttgtttttttccctcctcttttttttgggggggagtgtgtgtggggtttgtttttta

SEQ ID NO: 57831 - DNA, 120 bp, Artificial Sequence
  ENSG00000070831_16 (sequence is synthesized)
gtcttgtttttttaattcattaaccagtggttagcccttaaggggaggaggacggattgattccacattccacttcctagatctagtttagaaaacatgttccccatctggtgctcttag

SEQ ID NO: 57832 - DNA, 120 bp, Artificial Sequence
  ENSG00000070831_17 (sequence is synthesized)
gaaggagtatagtaaatgcctcatttaataacatactcctttttgaaagttgccttttctctccacccttgagtagatccagtatttgatgaaactcatgaaagtgggtggagcccatct

SEQ ID NO: 57833 - DNA, 120 bp, Artificial Sequence
  ENSG00000070831_18 (sequence is synthesized)
tgcccctcctcttttctaggacgcactatatgtgactgtgactttcaaggacatttgtttgccatttgctgatttttttgggaagttaatttctaacttctttcactgataaatgaagaa

SEQ ID NO: 57834 - DNA, 120 bp, Artificial Sequence
  ENSG00000070831_19 (sequence is synthesized)
aagtattgcacctttgaaatgcaccaaatgaattgagtttgtaattaaaaaaatttttttccctttcagtcattgtcttatatgcttagcatagatttgcagctcagtagtatatggtgt

SEQ ID NO: 57835 - DNA, 120 bp, Artificial Sequence
  ENSG00000070831_20 (sequence is synthesized)
tcctagaatgcagctgaagacctgttatgtagaggaaatacgaggggtggtgctagaagacagacatctgtggaatgattcacatcctctcaagttaggaggatggaggcctgcttcatt

SEQ ID NO: 57836 - DNA, 120 bp, Artificial Sequence
  ENSG00000070831_21 (sequence is synthesized)
aagaagctgggggtagggtgggggtggggagaacacttaacaacatggggaccagtcaggggaatccccttatttctgttttgcatatgaggaaccctagagcagccaggtgaggctctc

SEQ ID NO: 57837 - DNA, 120 bp, Artificial Sequence
  ENSG00000070831_22 (sequence is synthesized)
tagtttaataaaaatcatggaaagactcttaatgcagactcttcttaagtgttaatagggattttttcagcttattttggttgcagtttccaatttttaaaaatgttgaggtaatctttc

SEQ ID NO: 57838 - DNA, 120 bp, Artificial Sequence
  ENSG00000070831_23 (sequence is synthesized)
ccaccttcccaaacctaattcttgtagatgcattagtgttgaaccaatgctttctcatgtctcaattctttgtatatgcattcttttcagatgtattaaacaaacaaaaacccttcacaa

SEQ ID NO: 57839 - DNA, 120 bp, Artificial Sequence
  ENSG00000070831_24 (sequence is synthesized)
acttccgcgggcacccaactgtgcgtctcctgcgcgctgacgtcaggtgcgtgcccctgtccggcagccgaggagaccccgcgcagtgctgccaacgccccggtggagaagctgaggtga

SEQ ID NO: 57840 - DNA, 120 bp, Artificial Sequence
  ENSG00000070831_25 (sequence is synthesized)
gtgcggggcccgaggttccccgcgggagctgccaccctaccttcccatccccgccgtctccgtcctctcccagtcctcggggacaccccgtctgcgggatcgtggggggcccgggagcac

SEQ ID NO: 57841 - DNA, 120 bp, Artificial Sequence
  ENSG00000070831_26 (sequence is synthesized)
ggttcccgcgcggcgctccaaagctcggggagtggtggtctccctttcctggagtcatttgtgggagttagggtcttatcctgatctttcctcgtcccccgctcccccgtcctccgaggt

SEQ ID NO: 57842 - DNA, 120 bp, Artificial Sequence
  ENSG00000070831_27 (sequence is synthesized)
ttgggataaaattttaaagctttattatttttattttctggcattttagtttgagataatatttagccctctatatgttcaggtttgtgctttctcctctaagtttgacccttcccttaa

SEQ ID NO: 57843 - DNA, 120 bp, Artificial Sequence
  ENSG00000070831_28 (sequence is synthesized)
ataccaagtaggtccataataattcttagtgaagcagtgttcaggaagctcactgctcatggtggaaggaaatgtcagtgtacctttaatccatagatcattgaaaagcagctcattttc

SEQ ID NO: 57844 - DNA, 120 bp, Artificial Sequence
  ENSG00000070831_29 (sequence is synthesized)
ccccaagttttctgcatcagtggttctccaactggagtgcagcttgaacaatgtgatttttaagttttccaggcatttctaaaatgtagccaagtttgggaatcaccacacctagttggt

SEQ ID NO: 57845 - DNA, 120 bp, Artificial Sequence
  ENSG00000070831_30 (sequence is synthesized)
tatctcaaactactactatcagaatacaggttctgtgctgcgaatctgaatatgggatacattttctttaggtagcaagaaaggtttatttacctttaggacattatactgatctgcatg

SEQ ID NO: 57846 - DNA, 120 bp, Artificial Sequence
  ENSG00000070831_31 (sequence is synthesized)
agaatcttagaaactaagaacccttaaaatcagttaaggttggtacactgtggcctcattttgatagttctctgcatggagtcatgtttggcatgatttgcatactgtgctagaattaag

SEQ ID NO: 57847 - DNA, 120 bp, Artificial Sequence
  ENSG00000070831_32 (sequence is synthesized)
ctgggttggttgagaaggggttaggaagaggcagatgtaagctttaacagttctaaccaagaaatgcatcttatttattccttgttgactatactagggagagatacctggatcatgtga

SEQ ID NO: 57848 - DNA, 120 bp, Artificial Sequence
  ENSG00000070831_33 (sequence is synthesized)
taccctggaaagcagggacatatgtatccttagtgtagtcaggggcgtataggtccttgactattgctatatctttgtcctaaagcaatgcttgacatgatatggctctagaagtagtca

SEQ ID NO: 57849 - DNA, 120 bp, Artificial Sequence
  ENSG00000070831_34 (sequence is synthesized)
ttggatgggtatattattttataaatgagtaagtgaaataaagcaggtcatacagttgtgtcaacgaattatccgtgtatcagaagaacaaggatgatggggattgattgaagctaatgt

SEQ ID NO: 57850 - DNA, 120 bp, Artificial Sequence
  ENSG00000070831_35 (sequence is synthesized)
tttcttaaatattttcagattgatttctgcatgtcagaagaacttgggtagcaagtggatgcagcttaggttttccatttaaatattgttttctatttgacgtaacaaacttgcttatag

SEQ ID NO: 57851 - DNA, 120 bp, Artificial Sequence
  ENSG00000070831_36 (sequence is synthesized)
tcgtggcttagaaggtgagtgatattctccagggagtatgatttagaggctggaaagggttattgaaaatagtccttacaggcttagtttgtgtcagaatttatagtatttaatacgatg

SEQ ID NO: 57852 - DNA, 120 bp, Artificial Sequence
  ENSG00000070831_37 (sequence is synthesized)
agattttatagttaaagcgatgttcttcaagctggactttatgccacaaggggagtgtattctaaaggggaagaaaaggattgtggtttaaaagaacaattgtaatatttccttcattct

SEQ ID NO: 57853 - DNA, 120 bp, Artificial Sequence
  ENSG00000070831_38 (sequence is synthesized)
gaggtgtatttttctcacattttcatattgtaattaggatacctgttaacattggtgtacatttaatgtagtagtactttttctccttttgccctgcaagttgtcactaaatttgtgcta

SEQ ID NO: 57854 - DNA, 120 bp, Artificial Sequence
  ENSG00000070831_39 (sequence is synthesized)
tcataattgttaccttcatagaatgcttaaatagtggtacttctttgacttgttaggtttggactattttccttttcttcttccatttgtgaggtaaattagtggttattttggtgctgg

SEQ ID NO: 57855 - DNA, 120 bp, Artificial Sequence
  ENSG00000070831_40 (sequence is synthesized)
gtgctaagaaactcgcaaaacaagggccctgctcaagaaggattgaaacttagtccttgctgggtacaaatttagaaatttgttatataactgtggggcaagggacaacatttcaccagg

SEQ ID NO: 57856 - DNA, 120 bp, Artificial Sequence
  ENSG00000070831_41 (sequence is synthesized)
aagtagcaactccatcatctttcaggaagggctgatggttagggcatctctgaatgattattggagggaagtggctttatgtcacacttgttttctgtaagtcttactctgtatctaccc

SEQ ID NO: 57857 - DNA, 120 bp, Artificial Sequence
  ENSG00000070831_42 (sequence is synthesized)
gtcttactctgtatctacccgacttcagatcatggtgatttaattacatggcccaatcatgttttctttccagggctgcttgaatgcttgaatacttttttttttgagatggagtctcgt

SEQ ID NO: 57858 - DNA, 120 bp, Artificial Sequence
  ENSG00000070831_43 (sequence is synthesized)
ctggccagaatgaatacttttaattactactatgagtcttttttcaaagtgcctccaccttaaaaaaaattccttattttattcacttgccagaataatgttgcatttgaaccatgccaa

SEQ ID NO: 57859 - DNA, 120 bp, Artificial Sequence
  ENSG00000070831_44 (sequence is synthesized)
cggtagcttattaaaacagcatttatttttctcattcatgggtcagctgaacttgtctctagccttcagattgggctcaggtgggctttgtgtttgtcattctggagcctagttccagag

SEQ ID NO: 57860 - DNA, 120 bp, Artificial Sequence
  ENSG00000070831_45 (sequence is synthesized)
agcagtggctgcttgagtgtggacttgcttatggtgggccaaagaggggcaagggaaagcgcatttacactttctcgtattccattgcccagagatggcatatagccgatcccaagtcag

SEQ ID NO: 57861 - DNA, 88 bp, Artificial Sequence
  ENSG00000070831_46 (sequence is synthesized)
attcatttttttaaaaaaacggggtcttgcactgttgcccgggctggagtgcagtggtggcatctccgctcactgcaacctccacctc

SEQ ID NO: 57862 - DNA, 87 bp, Artificial Sequence
  ENSG00000070831_47 (sequence is synthesized)
aggtgtctagggagactgggtgtcactatgttggccagacagatctcaaactcctgacctcctgatccgccctcctcagcctcccaa

SEQ ID NO: 57863 - DNA, 120 bp, Artificial Sequence
  ENSG00000070831_48 (sequence is synthesized)
ctgggattataggcatgagtcactgcgcccggcctattcattcattcttacagtgaattagtaaattcaacaaataggtttttttaaagcaattaaggcactgaggatatacagagagta

SEQ ID NO: 57864 - DNA, 120 bp, Artificial Sequence
  ENSG00000070831_49 (sequence is synthesized)
ggcactgaggatatacagagagtaaaatagatgtctcctgacttctacttggaattttctttcccttacagttttgatagctgctttctcttgaataactatgtcatctctttccacttt

SEQ ID NO: 57865 - DNA, 120 bp, Artificial Sequence
  ENSG00000070831_50 (sequence is synthesized)
gcattgctcccaagagagtaatgtaaaagttttatctgtgcatgcatattcatgacacattcatttgtcattatttatcaaaaacctgttcccttccctggcactggagacattggagaa

SEQ ID NO: 57866 - DNA, 120 bp, Artificial Sequence
  ENSG00000070831_51 (sequence is synthesized)
tgacagtctcaagcagtgcagagatgtaagcaggcagaggtaaggactttggtctcaatagcctacagggtgcttcatccactcactgtattctgtgtgcctgtgccgcggtgcaggtgg

SEQ ID NO: 57867 - DNA, 120 bp, Artificial Sequence
  ENSG00000070831_52 (sequence is synthesized)
tcagttggaacccctgatgggtatctgggccactgcccaggccacacagagcctttgtgcaaattagaaaaggcccttccaaagatactttatgaacgacttgtaataatttagtgattt

SEQ ID NO: 57868 - DNA, 120 bp, Artificial Sequence
  ENSG00000070831_53 (sequence is synthesized)
tattttccaaagcaaggcatttggttgctacctgctagaactgttacagtaaatacacagatctattttgtgagcaaatagtactgccttggatgtggtacccttgtgcagtgcacaact

SEQ ID NO: 57869 - DNA, 120 bp, Artificial Sequence
  ENSG00000070831_54 (sequence is synthesized)
tggacagttcatacacaatgttgtattgagatgattgttattctacattgtatttatttagatagtgggattgaaaataggctaagatggagaactgggtggggaacaatttgtaatcct

SEQ ID NO: 57870 - DNA, 120 bp, Artificial Sequence
  ENSG00000070831_55 (sequence is synthesized)
ttttagttcatatgtcacaatcacagaattgagactagctagtttaaatccctgcatcttgcacatggtgaggaaaggtgaggacatttagatgacctttgcctgtcaccacacagctgt

SEQ ID NO: 57871 - DNA, 120 bp, Artificial Sequence
  ENSG00000070831_56 (sequence is synthesized)
atggtagcagagctgggcgtgaaacctgcattcctggcctctccttttgtggtgcttacagtgctgtgttaggtccagttttacctcttaaatctgtattattacttttttttcgagacc

SEQ ID NO: 57872 - DNA, 65 bp, Artificial Sequence
  ENSG00000070831_57 (sequence is synthesized)
ttacctcttaaatctgtattattacttttttttcgagaccagtctctgcaattctcatgcctcag

SEQ ID NO: 57873 - DNA, 120 bp, Artificial Sequence
  ENSG00000070831_58 (sequence is synthesized)
cgtgagccactgcgcccggcctgaaatgtgtattcttaagtccgcctttcaaagttgagtactgcattcttgcggctctacctaagtttctcctagaatctccctgcacttcttgttttg

SEQ ID NO: 57874 - DNA, 120 bp, Artificial Sequence
  ENSG00000070831_59 (sequence is synthesized)
ctgccatcaggtaatttgtgcattagaactagcttggaacagaatgggtaaacttctgtgaagttagacacttgcctcttagaggcatatccagtgagtctttaaagccctacgttatag

SEQ ID NO: 57875 - DNA, 120 bp, Artificial Sequence
  ENSG00000070831_60 (sequence is synthesized)
aaaaatgtgaagtatgtctaataaaggagtacagtggaaggtttaaaagcacattgctgattagtggggtcaggatgggaggagagccctgattttaatgcagtgtcatagtctcatagg

SEQ ID NO: 57876 - DNA, 120 bp, Artificial Sequence
  ENSG00000070831_61 (sequence is synthesized)
tgatttccccaaaagcaaataaatgctcgatggattttgggtccaccatgcatctctgaagtagaagtgacagattttcaaggctaaggtaagtatagcattttctcaaccctattacaa

SEQ ID NO: 57877 - DNA, 120 bp, Artificial Sequence
  ENSG00000070831_62 (sequence is synthesized)
tagagcacaggatcataactgttctgtttgctctgatgcgtcccgcagagcagtgctttttctcggtgtgaactgtggatcacttgtctcagtcatcaggattcctggaccctgtaggat

SEQ ID NO: 57878 - DNA, 120 bp, Artificial Sequence
  ENSG00000070831_63 (sequence is synthesized)
ttactctcaatctttaggggtagagactaggagcctacattttgaacaagcatctttttattttgatgaagtttgcattattactcctaacaacgtgccctttggcaggtagcttccact

SEQ ID NO: 57879 - DNA, 120 bp, Artificial Sequence
  ENSG00000070831_64 (sequence is synthesized)
tttctggcctcattatctgtaaaattgcatacttagttatcattgaggtctcaaatgcagttcgggttcctggttggtgaacaattagatgggaaggctgaaaaaaaaaatactcctgag

SEQ ID NO: 57880 - DNA, 120 bp, Artificial Sequence
  ENSG00000070831_65 (sequence is synthesized)
attctgaatctgtaagtatgcaatgggacctgagaatcaatctaatttctaaaagattcccagatagaactttgttgagctatgtttagggaccagtgcacaccttggtgatagaacctt

SEQ ID NO: 57881 - DNA, 120 bp, Artificial Sequence
  ENSG00000070831_66 (sequence is synthesized)
tttgaaactttgaaaaagttaaaagggttctgtgtaatgttacctaagaagcttatttttaaaaaaggaaagcagtgcttagggccatattgttttgaaataggatctgagcaccattta

SEQ ID NO: 57882 - DNA, 120 bp, Artificial Sequence
  ENSG00000070831_67 (sequence is synthesized)
aatttttataaattattttttagaggcatcacttctttaaagcccatcagattaatgtgccattggtttgaaaaccatgacatgagatgatttcttaaggttttatttgtgtcagacatg

SEQ ID NO: 57883 - DNA, 88 bp, Artificial Sequence
  ENSG00000070831_68 (sequence is synthesized)
catgagatgatttcttaaggttttatttgtgtcagacatgaattttagagtatttctgggctataggtcattacagctttacttattt

SEQ ID NO: 57884 - DNA, 120 bp, Artificial Sequence
  ENSG00000070831_69 (sequence is synthesized)
caagcgatcctcccgcctcagcctcccgagtagaaggtactacaggtgtgtgacaccacgcctggctcatttttgcattttgtgtagagagggggttttgccattttacccaggctggtc

SEQ ID NO: 57885 - DNA, 82 bp, Artificial Sequence
  ENSG00000070831_70 (sequence is synthesized)
gctcatttttgcattttgtgtagagagggggttttgccattttacccaggctggtctcgaactcctgagctgatccttagcc

SEQ ID NO: 57886 - DNA, 120 bp, Artificial Sequence
  ENSG00000070831_71 (sequence is synthesized)
gtgaacaaaggagggcccaggcatgtttgcagagtggctgggggccctgcttcaccacggcatagggacgggtgcagtaggaagaaaggtagcctcaaggcccccataaataaattggtg

SEQ ID NO: 57887 - DNA, 120 bp, Artificial Sequence
  ENSG00000070831_72 (sequence is synthesized)
cattaaggaaggaatattaatcacatccaggagggctctgccctaactgctgagaatcataaaagaaatggggacatattctggcgaaataacagctttgttaattgagctcttactgtg

SEQ ID NO: 57888 - DNA, 120 bp, Artificial Sequence
  ENSG00000070831_73 (sequence is synthesized)
tgcctttgcactgtgttaagcacatggtgttatcacacttgctactcacaacagctctgaggttgatagtacaggtatcttctttttatggagcaggactctgagacatcataattgctt

SEQ ID NO: 57889 - DNA, 120 bp, Artificial Sequence
  ENSG00000070831_74 (sequence is synthesized)
ggtatatgcagccagagttggaaatcctatctgtctgattttggaaactgtgtgcttaccattacatatcttatgtggaaataaaatgtatatgattaattacaaagctgaaaatcgtag

SEQ ID NO: 57890 - DNA, 120 bp, Artificial Sequence
  ENSG00000070831_75 (sequence is synthesized)
ttgaagcatcatatagtgcacagggcaagcaaagcagcataaaaggcttcatctgtaagggtaggtttgttgggtaggagctttttgggggaggtgactttaggatcagttgtagcatga

SEQ ID NO: 57891 - DNA, 120 bp, Artificial Sequence
  ENSG00000070831_76 (sequence is synthesized)
gagaatatgacaccttcttcctttagaggatctaaaggtgtagctttagaggattgtagggtgcctttgcccattgtgtcatttggtccttcttaaaatttgagtgtttattctctacat

SEQ ID NO: 57892 - DNA, 120 bp, Artificial Sequence
  ENSG00000070831_77 (sequence is synthesized)
ggcactcttttaagcctttgtgtgaattaactcagtcttctcagcaatcccccattttttcatatgtggaaactgaggcatgttatgatacaaagcttgtccaagaattcagagctagct

SEQ ID NO: 57893 - DNA, 120 bp, Artificial Sequence
  ENSG00000070831_78 (sequence is synthesized)
tgtccaagaattcagagctagtaagtgagggaactgggatttgaatttaagcagtctgtctctagagtctgctcagctggcctttttttctttcttcttcttcttcttcttttttttttt

SEQ ID NO: 57894 - DNA, 120 bp, Artificial Sequence
  ENSG00000070831_79 (sequence is synthesized)
ttttgtataataggcctgtgagttgggaagagcagggtttgtttggtgagaaagttgcaccttagtgaatacccaaggtctgagggaggcttggagccagctctgcaacctggctccctt

SEQ ID NO: 57895 - DNA, 120 bp, Artificial Sequence
  ENSG00000070831_80 (sequence is synthesized)
ctttcattagcttgacccaagcacagggagatgactggggctctgccttcatcttctctgcaaacggtcagggatactcatgcagtttttgagtttaagtagtaaactcctaaacttcaa

SEQ ID NO: 57896 - DNA, 120 bp, Artificial Sequence
  ENSG00000070831_81 (sequence is synthesized)
gtcatgtttgtattagtgatttcacttgacctcagtacaactctgtaaaagaggcagggatggatgatgtcatttgtcaaatggtaaaactgaggcgaaacaacttggcattgttggtgt

SEQ ID NO: 57897 - DNA, 120 bp, Artificial Sequence
  ENSG00000070831_82 (sequence is synthesized)
tgtgcgaagtacatgcataggctttggatttgagtttggctctgccactaacttgatctatgtcttcaggcaagtaacttaaatgctctgagtgttgcattctctgtgaagtggaaatag

SEQ ID NO: 57898 - DNA, 120 bp, Artificial Sequence
  ENSG00000070831_83 (sequence is synthesized)
ctgtactttgcccaagagttgtgagagtgacatgaattgctatatgtgaggttcttagcatagtgcctggcaagtagaaggtactcatctgtgaatggggtagatagcagctgtcttcat

SEQ ID NO: 57899 - DNA, 120 bp, Artificial Sequence
  ENSG00000070831_84 (sequence is synthesized)
cactgtcatcattgttggctcacatcaaatcaggaccagaaaaccctgttgacttctgggtcttaaactgctgtatcagtgaggggcttcctcctcatactcattgccaggagtagagta

SEQ ID NO: 57900 - DNA, 120 bp, Artificial Sequence
  ENSG00000070831_85 (sequence is synthesized)
aggcttttaatttcatctctaaccaactctgatagggctggaaatgtgtatggagttccagacccaccatggggccccagtgctagcttcttagccctcctttgtaaggtttgcactagt

SEQ ID NO: 57901 - DNA, 120 bp, Artificial Sequence
  ENSG00000070831_86 (sequence is synthesized)
ttgatgggagagggattttttttgtcttgattctgaagctcttaaagaaatgctcctttttctccataacttgaggatttcacaattgtattggaattattggtgttaaggagttaggtc

SEQ ID NO: 57902 - DNA, 120 bp, Artificial Sequence
  ENSG00000070831_87 (sequence is synthesized)
catctcttggcagcttgtgaagggtgggcaggcacctgtgaattcttcactggcttcttgtaagaatgactttactggagggtgctgagtttgtgattatctcctctgctgctagaaaac

SEQ ID NO: 57903 - DNA, 120 bp, Artificial Sequence
  ENSG00000070831_88 (sequence is synthesized)
tccgtgaaccctggtacatatagcgtgataaatcaagtcctgtttttgctcctaacttgcattatggtgtttgatactatatcttcatttctcccatggtagtaataacactgttggaaa

SEQ ID NO: 57904 - DNA, 120 bp, Artificial Sequence
  ENSG00000070831_89 (sequence is synthesized)
gagctctcagttggaagttgaagatccaggttctagttgaggcaccagagtttccttgggcaagttgccatacctttttgggccttggtttcctcatctcaataaaatgagtttctgttc

SEQ ID NO: 57905 - DNA, 120 bp, Artificial Sequence
  ENSG00000070831_90 (sequence is synthesized)
gtggcaggagggcagctcgctggctgctcgcggcggtgcctgtccgagctcccctccgcgccggccgcgtcctctgggcggggtggccccgagccacggcctccaggctgctcttccttt

SEQ ID NO: 57906 - DNA, 120 bp, Artificial Sequence
  ENSG00000070831_91 (sequence is synthesized)
agtcatttattagagcattaggatacaggagttatttctaacagtgatcagcagtgctcaaagatgcccagcaagaatatgaacagcttcatattgtatgttcttttgttagaggcctct

SEQ ID NO: 57907 - DNA, 120 bp, Artificial Sequence
  ENSG00000070831_92 (sequence is synthesized)
gtgttttttggagaatattattagttcctaaaccccttgtgttggtaagctctcgtattgtactgaatgattcgtagtggtcagggttgtgttaaaacaaaaaccttacaggaaaggttc

SEQ ID NO: 57908 - DNA, 120 bp, Artificial Sequence
  ENSG00000070831_93 (sequence is synthesized)
agataagcataaacttgcaagagacgatgtgaatgattttttttttttctaaacacttaaattttcatctgaatatgtctgatcttttcttgccaattctgacaattgatactatactgt

SEQ ID NO: 57909 - DNA, 120 bp, Artificial Sequence
  ENSG00000070831_94 (sequence is synthesized)
ttcttgggcaattcaaccaggatagggaattagtcataataattgagactttaatgtcaaagaaggcagccatggctatttctgccacagttctcaagcgtgctttatatagtgtcccta

SEQ ID NO: 57910 - DNA, 120 bp, Artificial Sequence
  ENSG00000070831_95 (sequence is synthesized)
ttcctatatttttggaagtattccttcctcatgcattccggccgtttttgagtgatttaattggaactccttttgtagtttgatgggaaactcagattttgaagatagggagcaatgtta

SEQ ID NO: 57911 - DNA, 120 bp, Artificial Sequence
  ENSG00000070831_96 (sequence is synthesized)
gggtatttggaatgggacttgtaactgatgtgtatggtttaaactttttcaccttcatgatatcgctgattccgtcctttgagtactgttctgggggcaaaggaaaaggttatggaaata

SEQ ID NO: 57912 - DNA, 120 bp, Artificial Sequence
  ENSG00000070831_97 (sequence is synthesized)
attagcacaaaagttttatgttctactggtactggtgctttgaagtttgaacactgagcagacatgcctaatagggcaagattgaagggtggaggtttctaataattatattaaactcat

SEQ ID NO: 57913 - DNA, 120 bp, Artificial Sequence
  ENSG00000070831_98 (sequence is synthesized)
tatatttatgcttatgttttcaggtaattcattcatttttattgtgtttctaaaaaacactattggattcttaactacgtgtatactagggtaaatggcatatatgattacttattacat

SEQ ID NO: 57914 - DNA, 120 bp, Artificial Sequence
  ENSG00000070831_99 (sequence is synthesized)
atgcactaggtatttagtttatagggcctagtgcataatttaatagtaagtttagtacttggttggatatttacagataaaacttttatgcttaactgggatatccctcaaaataacttc

SEQ ID NO: 57915 - DNA, 120 bp, Artificial Sequence
  ENSG00000070831_100 (sequence is synthesized)
gaggcctagtatcagatgatttaaacataatcttctaatcctcgtttttttgggcagtttagtgctattatagaagcagttatttaaaagtttagaagattttacaccttctcatgcata

SEQ ID NO: 57916 - DNA, 120 bp, Artificial Sequence
  ENSG00000070831_101 (sequence is synthesized)
gcaactgttttgagagttttaaaaaatgcctggtgcttctctgtgtgttttagtaacattcccagaaaagtgtgcctgtgtgtgtatattgggggagacaagggaaagtcatgtgtgaaa

SEQ ID NO: 57917 - DNA, 120 bp, Artificial Sequence
  ENSG00000070831_102 (sequence is synthesized)
cactcatgtccatgttagacactaattctgtgtgcttctgatgcatacctctgttctctagatatgggttgctttgagggaagacacataggccctgtggattcacttttaggttactag

SEQ ID NO: 57918 - DNA, 120 bp, Artificial Sequence
  ENSG00000070831_103 (sequence is synthesized)
tgatgctttagataattggatgcttttaatgtaagatttttacagtatcaacaggtgtatatagtaaatccgtttgtagagagtatgaagtttaaaaggtcttagcaggtacatttttct

SEQ ID NO: 57919 - DNA, 120 bp, Artificial Sequence
  ENSG00000070831_104 (sequence is synthesized)
caaaagaggggaagttagaaaatggggtctgtggttgtgtttgggagctagaactttgaggcttacagattctgtttgttgattcctctaaaactaaagtcttaatataaacagatggtg

SEQ ID NO: 57920 - DNA, 120 bp, Artificial Sequence
  ENSG00000070831_105 (sequence is synthesized)
gtcaagcaaagattagttttgtttcatagagcatttgttgatcttcgtccatggtaagcaagaaaggaattccttcttgttaagggatacactccagtttctaatagtcctcctcctctt

SEQ ID NO: 57921 - DNA, 120 bp, Artificial Sequence
  ENSG00000070831_106 (sequence is synthesized)
tttttccttataaagtatatttccctttctgtactccttccttccttttatattttactgccagagttggttcctagatgtgcagaaagaattgcagtggaattttaacttttatgtggc

SEQ ID NO: 57922 - DNA, 120 bp, Artificial Sequence
  ENSG00000070831_107 (sequence is synthesized)
atttctactttgtaaatgatgtagaaagaggaaggctttttaacttttgctgcttttaaagaatttactgctgtttctgatttattttgtgtctaatgtgacatgtgggtaccagtcctg

SEQ ID NO: 57923 - DNA, 120 bp, Artificial Sequence
  ENSG00000070831_108 (sequence is synthesized)
tgggatgtcatggatgggggcagggtggaggtgggaacacttggggtggtctggggttggcacttacaattggagctgtgttctgggacttttaggacatatttacttgggatcaaactg

SEQ ID NO: 57924 - DNA, 120 bp, Artificial Sequence
  ENSG00000070831_109 (sequence is synthesized)
atcaaactaaagaacatgtgaaacaaccttgggtggtaaacttgtggcttcagatttaggtgattttaggtgagtctgtagacctgggtcctaagtaccaccaatgctgagtcacactgt

SEQ ID NO: 57925 - DNA, 120 bp, Artificial Sequence
  ENSG00000070831_110 (sequence is synthesized)
catgttggagtttctggctgaggtgtaagtgtatttctgtatcttaatccccgtaagatctgagaatattcttcgttttcactccatgctttatgctctgatacccatgcagacatctta

SEQ ID NO: 57926 - DNA, 120 bp, Artificial Sequence
  ENSG00000070831_111 (sequence is synthesized)
aagcactggactgcttgctaaaactcattctaggaccccattctttgttttcttatgacttgggtggtggttacttgctctaataacattgctgaataactgaagtgtatgctgttttta

SEQ ID NO: 57927 - DNA, 120 bp, Artificial Sequence
  ENSG00000070831_112 (sequence is synthesized)
gagtctgttctttaaagtccttctagttggtactgttgcacaattaacactttttaaatgtctgaacctttccgttctgggaaaccagtttactctgaaatcttgattaatcacattcag

SEQ ID NO: 57928 - DNA, 120 bp, Artificial Sequence
  ENSG00000070831_113 (sequence is synthesized)
atatgtcattgaacctagaaacacatagcatgcctgttagtctgctatttgtgtccttcagttattcaggggctgaattcacataagcctgaaattgtaatagatttatttccaaaatgt

SEQ ID NO: 57929 - DNA, 120 bp, Artificial Sequence
  ENSG00000070831_114 (sequence is synthesized)
gttagaagtcaacatattgcattttaataaaaattgctttcctgctcagttaaccttgcttgaggtgaagtttttggtcagttatctactctcctggttataatgggcttaagatctagc

SEQ ID NO: 57930 - DNA, 120 bp, Artificial Sequence
  ENSG00000070831_115 (sequence is synthesized)
attctagcgtttttcttaaggcacattgcttctgtgaattcagctcatttaatccggactgctgttgtacctgctagtctttctaatcctctaacctggctgctattctctctcctcccc

SEQ ID NO: 57931 - DNA, 120 bp, Artificial Sequence
  ENSG00000070831_116 (sequence is synthesized)
tcagtggaaagtcagaaggggtgacacagggtttgcaagaagtgctgggaggcaaaactccagtagacaagattctaacgagtggtggtctcaatttggtgaagtatgccctacatcttg

SEQ ID NO: 57932 - DNA, 120 bp, Artificial Sequence
  ENSG00000070831_117 (sequence is synthesized)
agctgaagcttccctttcggggagttacctaactacctcccgaagccgtcgttctgctgcttggttaattcctcttatcgggggggaattttctttgttcgtttgtttttcctccccttt

SEQ ID NO: 57933 - DNA, 120 bp, Artificial Sequence
  ENSG00000070831_118 (sequence is synthesized)
aagtccaagataaatgtagtgtggaagattacgtcatcgcggtataaggagtgagacttaactcctacaagtcagggacttaaattcaaacagcattttgcagccttagtcggtcaccca

SEQ ID NO: 57934 - DNA, 120 bp, Artificial Sequence
  ENSG00000070831_119 (sequence is synthesized)
gtggcttatcctgcctgcttcccaacacgtcgtattcacagatgatgttttgaaagcttgttacttgtgttcatgaccgccttcagtgcacctaaaagctaggaaggtttaaaatcccag

SEQ ID NO: 57935 - DNA, 120 bp, Artificial Sequence
  ENSG00000070831_120 (sequence is synthesized)
gattagtttgtgtcagggaataaagtgtaagacaacaccgtccacggccccttgcgtggcattaactttaaatagaggtccctttgactatactagaatgaggtgggtttatttgtggga

SEQ ID NO: 57936 - DNA, 120 bp, Artificial Sequence
  ENSG00000070831_121 (sequence is synthesized)
acacttttcggtccaaaatgactttcccagactgtttattctcctttatgacttactgcatgctgggaatctccctaggttgattcaagtgcactttttgtggtgaagttgtgttgaaaa

SEQ ID NO: 57937 - DNA, 120 bp, Artificial Sequence
  ENSG00000070831_122 (sequence is synthesized)
gaggatcagtttatgcctgatctatgctagacattttagttttgttattaaaaacgagacttcgatctttaagcaaaaaacttaatattttcataattttgagatcacaatttttatttt

SEQ ID NO: 57938 - DNA, 120 bp, Artificial Sequence
  ENSG00000070831_123 (sequence is synthesized)
ccgcagcctccgcctcccggggtcaaagatcgggtttcctcatgttgtccaggctgatctggaatgcctgaactcaagctatttgctcctgttggcctctgaaagtgctgggatataggc

SEQ ID NO: 57939 - DNA, 60 bp, Artificial Sequence
  ENSG00000070831_124 (sequence is synthesized)
tgcagtggcacaatcatagctgggactacaggtcatcatcagatttgaaatatttaaagt

SEQ ID NO: 57940 - DNA, 120 bp, Artificial Sequence
  ENSG00000070882_0 (sequence is synthesized)
gagaagttctgggcaaagtactcagaactggccgcgtgctggtggcgcccgccagccggcccgggagaggggacttgagcgcttcgcggccggtgcgcagcgcggctccggccccgcagt

SEQ ID NO: 57941 - DNA, 120 bp, Artificial Sequence
  ENSG00000070882_1 (sequence is synthesized)
ctgtctgcaagtggccatccccgcccccgactcctgcggccggtgcgggagctgtcagctgcacgttgcgggggtaccggagaagccggggttgccttctcccggttctgtgcgctaacc

SEQ ID NO: 57942 - DNA, 120 bp, Artificial Sequence
  ENSG00000070882_2 (sequence is synthesized)
ccggagcccggccccggggaactagggagcgtctccggctgcacagcgctcaggttttagggtttcctttgggccacccaaaatgttttttaaatactttggataagagctaaaccacct

SEQ ID NO: 57943 - DNA, 120 bp, Artificial Sequence
  ENSG00000070882_3 (sequence is synthesized)
gccactggggacttccatactctcggctcccttgtcatctgatggcattttgattgtctcgaggccaagtgacttgctgtccatgatgagtgatgagaagaaccttggtgtgtcccaaaa

SEQ ID NO: 57944 - DNA, 120 bp, Artificial Sequence
  ENSG00000070882_4 (sequence is synthesized)
attggtatcaccttcaaggagcacaagtagctgctcttccaagcaaggaagtcgacaggacagctgggaagtggtggaaggactgaggggggagatgaattacacccaggagccaccagt

SEQ ID NO: 57945 - DNA, 120 bp, Artificial Sequence
  ENSG00000070882_5 (sequence is synthesized)
tcagaaaggatttttgctgaaaaagaggaagtggcccttaaaaggctggcataagagattcttctatctggacaaaggaatcttgaaatatgccaagagccaaaccgatatagagagaga

SEQ ID NO: 57946 - DNA, 120 bp, Artificial Sequence
  ENSG00000070882_6 (sequence is synthesized)
gaagctgcatggctgcattgatgtcgggctctcagtgatgtctgtaaagaagtcatcaaaatgcatagaccttgacaccgaggagcacatctaccatctgaaggtcaagtcagaagaagt

SEQ ID NO: 57947 - DNA, 120 bp, Artificial Sequence
  ENSG00000070882_7 (sequence is synthesized)
ctttgatgagtgggtatcgaaacttcgccaccacagaatgtatcgtcagaatgaaattgccatgtttccacatgaagttaaccactttttctcagggtccaccatcacagactcttcatc

SEQ ID NO: 57948 - DNA, 120 bp, Artificial Sequence
  ENSG00000070882_8 (sequence is synthesized)
tggggtgtttgactccatttcaagtaggaagcgtagcagtatatcaaagcagaatttatttcaaactggaagcaatgtatcattttcttgtggtggtgagacacgagttccattatggtt

SEQ ID NO: 57949 - DNA, 120 bp, Artificial Sequence
  ENSG00000070882_9 (sequence is synthesized)
acagtcttcagaggacatggaaaaatgctccaaagacctggcgcactgtcatgcctacctggtagaaatgagccagctcctgcaaagcatggacgtcctgcatcggacatactcggcacc

SEQ ID NO: 57950 - DNA, 120 bp, Artificial Sequence
  ENSG00000070882_10 (sequence is synthesized)
agctatcaacgccatccagggtggatcttttgaaagtcccaaaaaggaaaaaagatcgcacaggaggtggcggtccagagctattggcaaagatgctaaaggaacactgcaggtcccgaa

SEQ ID NO: 57951 - DNA, 120 bp, Artificial Sequence
  ENSG00000070882_11 (sequence is synthesized)
acctttttctggcccagtaagactacactcctccaatcctaatttgtcaacactagattttggagaagagaaaaattattctgatggctctgaaacctcatcagagttttctaaaatgca

SEQ ID NO: 57952 - DNA, 120 bp, Artificial Sequence
  ENSG00000070882_12 (sequence is synthesized)
agaagatctgtgtcatattgcccataaagtttacttcactttaaggtcagcttttaatatcatgtcagcggagagagagaaactgaagcagctgatggagcaggatgcctcctcctcccc

SEQ ID NO: 57953 - DNA, 120 bp, Artificial Sequence
  ENSG00000070882_13 (sequence is synthesized)
gtctgctcaggtcattggtctgaagaacgccctgtcatccgccctagcacaaaacacagatcttaaagaacgcttacgcagaatccatgccgagtctctgctcctcgactcccccgctgt

SEQ ID NO: 57954 - DNA, 120 bp, Artificial Sequence
  ENSG00000070882_14 (sequence is synthesized)
cgccaagtcgggtgacaatctggcagaggaaaactccagagatgaaaaccgagctctagttcatcagctttctaatgaaagtagactctccatcactgactccctttctgagttttttga

SEQ ID NO: 57955 - DNA, 120 bp, Artificial Sequence
  ENSG00000070882_15 (sequence is synthesized)
tgctcaggaagttctgttatctccaagctcttcagaaaacgagatttctgatgatgactcatatgtcagtgacataagtgataatctttccttagataatctcagtaatgatttagataa

SEQ ID NO: 57956 - DNA, 120 bp, Artificial Sequence
  ENSG00000070882_16 (sequence is synthesized)
tgagagacagaccttggggcctgtccttgatagtggtcgggaagcgaagtcccggagaagaacgtgcctgccggcgccctgcccgagcagcagtaacatcagcctgtggaacatcctgag

SEQ ID NO: 57957 - DNA, 120 bp, Artificial Sequence
  ENSG00000070882_17 (sequence is synthesized)
gaacaacatcgggaaggacctgtccaaggtggccatgccggtggagctgaacgagcccctgaacacgctgcagaggctctgcgaggagctggagtacagcgagctcctggacaaggccgc

SEQ ID NO: 57958 - DNA, 120 bp, Artificial Sequence
  ENSG00000070882_18 (sequence is synthesized)
gcagattcccagccccctggaaaggatggtatatgtggcagcctttgccatatcagcgtatgcatctagctactaccgagctggaagcaagccatttaatccggttcttggagaaacata

SEQ ID NO: 57959 - DNA, 120 bp, Artificial Sequence
  ENSG00000070882_19 (sequence is synthesized)
tgaatgtattcgggaggacaagggcttccagtttttttcagaacaggtcagccaccatccgcctatctctgcgtgtcatgctgagtctagaaattttgttttctggcaagatgtgagatg

SEQ ID NO: 57960 - DNA, 120 bp, Artificial Sequence
  ENSG00000070882_20 (sequence is synthesized)
gaaaaacaaattctggggcaaatccatggaaattgttccaattggcacaacccatgtgactctgccagtttttggggatcattttgagtggaacaaagtgacctcttgcatccataacat

SEQ ID NO: 57961 - DNA, 120 bp, Artificial Sequence
  ENSG00000070882_21 (sequence is synthesized)
cttaagcgggcagaggtggattgagcactatggagagattgtcatcaagaacctgcatgatgattcctgctactgcaaagtgaattttataaaggcaaaatactggagcactaatgccca

SEQ ID NO: 57962 - DNA, 120 bp, Artificial Sequence
  ENSG00000070882_22 (sequence is synthesized)
tgagattgaaggcacagtgtttgacaggagtggaaaagcggttcatcggctgtttgggaaatggcatgaaagcatctactgtggcggcggctcctcttctgcctgtgtatggagagcaaa

SEQ ID NO: 57963 - DNA, 120 bp, Artificial Sequence
  ENSG00000070882_23 (sequence is synthesized)
tcctatgccgaaaggctacgagcaatactatagcttcacacagtttgcgctggaattaaatgaaatggatccatcatcaaagtctttattgccacctactgacactcgatttaggccaga

SEQ ID NO: 57964 - DNA, 120 bp, Artificial Sequence
  ENSG00000070882_24 (sequence is synthesized)
ccagaggtttctagaggaagggaacttagaagaagctgaaatacaaaagcagaggattgaacaactgcagagagaaaggcggcgggtcttagaagaaaatcatgtggagcaccagcctcg

SEQ ID NO: 57965 - DNA, 120 bp, Artificial Sequence
  ENSG00000070882_25 (sequence is synthesized)
gtttttcaggaaatccgacgatgactcttgggtgagcaacggcacctatttggaacttagaaaagatcttggtttttccaaactggaccatcctgtcttatggtgaaaaagtaaagaaga

SEQ ID NO: 57966 - DNA, 120 bp, Artificial Sequence
  ENSG00000070882_26 (sequence is synthesized)
aagataacattagtgtatttctcctgtgcttgccttctgaagtggcacaaacctgtgtttatatatttaaaagatactctaggatgatcacttgtgcttagcttagcattgtaactcttt

SEQ ID NO: 57967 - DNA, 120 bp, Artificial Sequence
  ENSG00000070882_27 (sequence is synthesized)
aagtctatattttcctcagtgcgtttctttacaatttcaaatgttaccctgattgtttatatgaatgtagaacaccttgacatttctttttatatataaactatttaataaaaatgaaag

SEQ ID NO: 57968 - DNA, 120 bp, Artificial Sequence
  ENSG00000070882_28 (sequence is synthesized)
gaagctttaacactaattttccaaaggttagggaagattccaattaaatttatgccttataaaattatgttgtagaaaaaaaatcaacctctcccaggtgcattaagaaataagaattcc

SEQ ID NO: 57969 - DNA, 120 bp, Artificial Sequence
  ENSG00000070882_29 (sequence is synthesized)
cagggttactcacccatgcgtaagctacccaagtttaatttggtagctgaaatatctttttgcctcagacagctcttgaattgctcatacagaacaattctgctggtgctggagtctgaa

SEQ ID NO: 57970 - DNA, 120 bp, Artificial Sequence
  ENSG00000070882_30 (sequence is synthesized)
gaatattttcatttgcattttagtggttagggagaggatataagattaatggaatgtatatttttatataagacgtatacggcaccttcttgaaaaggaagcatttgaacttgttcctcc

SEQ ID NO: 57971 - DNA, 120 bp, Artificial Sequence
  ENSG00000070882_31 (sequence is synthesized)
ctatagttctattgccttatatgcaaaattgtaccctgttgctcagagaaattattcataagagaaaagaattccaattaattaaatatcacaatagcatcccagagagacagtaggaaa

SEQ ID NO: 57972 - DNA, 120 bp, Artificial Sequence
  ENSG00000070882_32 (sequence is synthesized)
tttctccttagtgagagctgagtccttgagaagttaagagactgtttcctgcttcccaccccaccccgttttttgtccctccgtttgatcacctccctgttgagtatggaatgtcccagt

SEQ ID NO: 57973 - DNA, 120 bp, Artificial Sequence
  ENSG00000070882_33 (sequence is synthesized)
ttaatataaaacatacagtttattccacacagcagtttgactttgtaaaagtttagcaaaataactgattgttttggataactcaacatgtttttcttaaatgctgttttagtattttct

SEQ ID NO: 57974 - DNA, 120 bp, Artificial Sequence
  ENSG00000070882_34 (sequence is synthesized)
acctcttaataagcaccatattttagatcttgtataaaaagttgccatctgccttatagacaaatgtagagaattgatgttcttgctttgtgttgtgttctggtaaagctttaagtgagt

SEQ ID NO: 57975 - DNA, 120 bp, Artificial Sequence
  ENSG00000070882_35 (sequence is synthesized)
gtcttacccctttcctatactttcttgttatccatatcattcttttgtgagttttgcagcagtcttgaataatacagattataactactgaaaggggaaccttcgtctttttaaatgtgt

SEQ ID NO: 57976 - DNA, 120 bp, Artificial Sequence
  ENSG00000070882_36 (sequence is synthesized)
tatttcacattacaataatatgtgtagtagttgaattgtgttatcaaagcatgtccaacttctgtccagatgacattaaaaccaaagcctaattgttaagcctcttattctaaagtccat

SEQ ID NO: 57977 - DNA, 120 bp, Artificial Sequence
  ENSG00000070882_37 (sequence is synthesized)
agcaatgctatggaatatcaagtataatgatgtagtaaaaagatttctccagaaaacactttgagatacttaaagaaattcagagcatatcgaatgttatgaatgaagagtaaaataatt

SEQ ID NO: 57978 - DNA, 120 bp, Artificial Sequence
  ENSG00000070882_38 (sequence is synthesized)
acaggaaaagaatgcatgatttttcattgtcacaccaaataaccagttggacaatattgcattttcaaaatggagagttatttaaagtggatgtgtagccttctggaatctgcacgtgac

SEQ ID NO: 57979 - DNA, 120 bp, Artificial Sequence
  ENSG00000070882_39 (sequence is synthesized)
tggcattttaaaacaactcattaaatattggattcattttatcgagatgccaagatgaacacaatgtgaatatcatttccatttctaagcagttgaatgacacagtcagattctttggtg

SEQ ID NO: 57980 - DNA, 120 bp, Artificial Sequence
  ENSG00000070882_40 (sequence is synthesized)
tatgctttgttctttccatctcaagcatttatccaaattctgctcacagacatgaggaagcaggctgtagatttaagggcactcaaggggaaaacaaatgtagtttccacagtgtgagga

SEQ ID NO: 57981 - DNA, 120 bp, Artificial Sequence
  ENSG00000070882_41 (sequence is synthesized)
taaatgtagaatcgtggtaatattggctgttaaattggcctgctccagagactggctcaaaaaagaaagaagcaacgaaaacaaaatgcacagcctgaatggacgtagcactgtcatgtg

SEQ ID NO: 57982 - DNA, 120 bp, Artificial Sequence
  ENSG00000070882_42 (sequence is synthesized)
gcatttggaaaatctttaattatcctaatgttatttcacttgcccttatgctttattttagagtcccagggacaactggatgaaacattacgtctgtagtcatcttatttgagatggggg

SEQ ID NO: 57983 - DNA, 120 bp, Artificial Sequence
  ENSG00000070882_43 (sequence is synthesized)
tgggaacgaattaaaatatgatagagaactatatgcagattttaaaatctagtcagtactagcatctataaagggcttttctgaaatttaaacagcttggtgatgcatcctgatattata

SEQ ID NO: 57984 - DNA, 120 bp, Artificial Sequence
  ENSG00000070882_44 (sequence is synthesized)
agcttaaaactatcttgagggggaaatgacttcttttctccttctgtcccttttctcaaaagcatctttcccccaaatgtatgtctctaggacattttatagttttaagaggaagaaaac

SEQ ID NO: 57985 - DNA, 120 bp, Artificial Sequence
  ENSG00000070882_45 (sequence is synthesized)
agaaacgtggcatcatttgggaagaaccaaggtagaatttaattttctggactttaaatctcctggttaaataatgctaatcactgtaccatttgagttacatgttttaacctctttttt

SEQ ID NO: 57986 - DNA, 120 bp, Artificial Sequence
  ENSG00000070882_46 (sequence is synthesized)
ttttctaattattccatccaaaatttctggtgaattacacagaaatttttggaaatgggactttgtgcaggtaaccaccctgcacttcaggtaatgttcctgtcacagctgtcgactacc

SEQ ID NO: 57987 - DNA, 120 bp, Artificial Sequence
  ENSG00000070882_47 (sequence is synthesized)
ccacgctgcaggaaatccattcagaaatgagctaacagtctccagtgtagcaggagagccagtcacttccctccccaggccccaaagcaccccaaggctggtattccttgagtcataggt

SEQ ID NO: 57988 - DNA, 120 bp, Artificial Sequence
  ENSG00000070882_48 (sequence is synthesized)
attaataataaaagcctcaatgcagcttctccatgtagttcctctcctacaagccaggtggattctggtcctaactaaagagatgggagttcacctgagggcaagaagtacccaggatgc

SEQ ID NO: 57989 - DNA, 120 bp, Artificial Sequence
  ENSG00000070882_49 (sequence is synthesized)
ccaaacagccgcacaggtgtcctgtgcttcctgtgagacttcctgggggaaatatacaaactaatatattttttaatgtttacgtcatttacactgctgcttttctcatattctgctttt

SEQ ID NO: 57990 - DNA, 120 bp, Artificial Sequence
  ENSG00000070882_50 (sequence is synthesized)
aattacttgtagtaaatcatttgtttgggcttcaagcactgtcttccatctgcatcttccagatttatcatgagtgatcttgttctactgttaaagatgtcaagcctaaaaagtaataaa

SEQ ID NO: 57991 - DNA, 120 bp, Artificial Sequence
  ENSG00000070882_51 (sequence is synthesized)
gtttttatttggctgttgaaccttgatgtagcccctactacatacactacaagttatgccttctggctactacagaatctccgcagaccttttagttatgagtagaagcaataagaaggt

SEQ ID NO: 57992 - DNA, 120 bp, Artificial Sequence
  ENSG00000070882_52 (sequence is synthesized)
gtccttatggtcttaggaataatagttccaatgtattggcataatttgtttgaatgtctttattttgatattaacaccggcataaatctatttttgctaccagatgatagctattttcat

SEQ ID NO: 57993 - DNA, 120 bp, Artificial Sequence
  ENSG00000070882_53 (sequence is synthesized)
ttgctctattttcctctgcattgtactaatctgttactcagtgttagtcttcatttttctgtgttggaaacctgcgtcatgtaaatatctgcaaatcatgacagtctaaagtgcaaacca

SEQ ID NO: 57994 - DNA, 120 bp, Artificial Sequence
  ENSG00000070882_54 (sequence is synthesized)
ttttcagagactttggggaatgcagtgatcagaagtggctaatttattttatttctgattattttatccagagggtacttttttaatggatatttgtaaatcttccacttaaccactgaa

SEQ ID NO: 57995 - DNA, 120 bp, Artificial Sequence
  ENSG00000070882_55 (sequence is synthesized)
aattattttgttttaatcccacccttccatccatacctctgcctccccaaaaagctcctattaatttgcttatccccctcatgtagctagttgaatgtgaataaataacatggaaaaaaa

SEQ ID NO: 57996 - DNA, 120 bp, Artificial Sequence
  ENSG00000070882_56 (sequence is synthesized)
agacatttcgcgagggggatggttccagaaagcgaagatctgagcgtggtgaatgaaatgtgaacagaatagctccggaaagagtctcagaaaccttgaattggggtcagtttggagact

SEQ ID NO: 57997 - DNA, 120 bp, Artificial Sequence
  ENSG00000070882_57 (sequence is synthesized)
gaaaatgcgtcgagcgctgcaggtggtggttggcagggggatttaacactgtggagcccttactccgtcccaggcgctgagcccagcgagccacgcgcggtgcccagctcggtgaggttt

SEQ ID NO: 57998 - DNA, 120 bp, Artificial Sequence
  ENSG00000070882_58 (sequence is synthesized)
gtccccaagccacgaggccattcacggggcccatcagagagacagcccctgttccctccggtttcattttgattgttccgtaaacaggttcattactcagagctgtctggcttcctccgc

SEQ ID NO: 57999 - DNA, 120 bp, Artificial Sequence
  ENSG00000070882_59 (sequence is synthesized)
ctggctgtttccagtcaccttgtgaggatttggagacggggttggggtgcttctccgtggcacttggtgcctggggtagttctgttctgtgggtttgtgcttcctctttctccagaagcc

SEQ ID NO: 58000 - DNA, 120 bp, Artificial Sequence
  ENSG00000070882_60 (sequence is synthesized)
ttctggctgattgttccgatgtgcccggctggaaaacatgtctttagggctgtctgcatgtttatttttacttccctgggtggacagaatttaatttctcgagctgtttttctcatccag

SEQ ID NO: 58001 - DNA, 120 bp, Artificial Sequence
  ENSG00000070882_61 (sequence is synthesized)
attatgtgcgtcgaggataagccaacctttataggtaagagtgctagtcattttatggactcataggatcactgaatttgaaagctagacaggatcgtcaggctgaaggaatcttggtaa

SEQ ID NO: 58002 - DNA, 120 bp, Artificial Sequence
  ENSG00000070882_62 (sequence is synthesized)
cttggagagcattcaaggaaaaagtccagaaagtgcgctgtcagaccacgtcactaagagtttcatcaagctcttagagatcgctcctgcagggcccactgctgtgcttttctgaaacat

SEQ ID NO: 58003 - DNA, 72 bp, Artificial Sequence
  ENSG00000070882_63 (sequence is synthesized)
actcccgaccttaggtgatctgcctgccttgggagagagttaagtgttatcataagtaagtatgtaaggtaa

SEQ ID NO: 58004 - DNA, 120 bp, Artificial Sequence
  ENSG00000070882_64 (sequence is synthesized)
gagagagttaagtgttatcataagtaagtatgtaaggtaatacatatgttaatcagcttgatttagccattccacaatgtatacatgtttcaagacactatgttgtacatgataaatata

SEQ ID NO: 58005 - DNA, 120 bp, Artificial Sequence
  ENSG00000070882_65 (sequence is synthesized)
agaactagcaaactaatatgcagtatggagccactcttacagtcctttctctagcttttccttttttctttccttaatatctgtaataagctgatgctaaaggactaagccaacaactca

SEQ ID NO: 58006 - DNA, 80 bp, Artificial Sequence
  ENSG00000070886_0 (sequence is synthesized)
gtgtgcgctgggagccgcgtgtgcgccggggtgtgcgcccggccgggtgtgcggagagcgagggagcgcgctccctcccg

SEQ ID NO: 58007 - DNA, 120 bp, Artificial Sequence
  ENSG00000070886_1 (sequence is synthesized)
ccccgcccggggccgcctgccccctgcgctctgggtcgtcacggccgcggcggcggcggccacctgcgtgtccgcggcgcgcggcgaagtgaatttgctggacacgtcgaccatccacgg

SEQ ID NO: 58008 - DNA, 120 bp, Artificial Sequence
  ENSG00000070886_2 (sequence is synthesized)
gtgaatttgctggacacgtcgaccatccacggggactggggctggctcacgtatccggctcatgggtgggactccatcaacgaggtggacgagtccttccagcccatccacacgtaccag

SEQ ID NO: 58009 - DNA, 120 bp, Artificial Sequence
  ENSG00000070886_3 (sequence is synthesized)
gtttgcaacgtcatgagccccaaccagaacaactggctgcgcacgagctgggtcccccgagacggcgcccggcgcgtctatgctgagatcaagtttaccctgcgcgactgcaacagcatg

SEQ ID NO: 58010 - DNA, 120 bp, Artificial Sequence
  ENSG00000070886_4 (sequence is synthesized)
cctggtgtgctgggcacctgcaaggagaccttcaacctctactacctggagtcggaccgcgacctgggggccagcacacaagaaagccagttcctcaaaatcgacaccattgcggccgac

SEQ ID NO: 58011 - DNA, 120 bp, Artificial Sequence
  ENSG00000070886_5 (sequence is synthesized)
gagagcttcacaggtgccgaccttggtgtgcggcgtctcaagctcaacacggaggtgcgcagtgtgggtcccctcagcaagcgcggcttctacctggccttccaggacataggtgcctgc

SEQ ID NO: 58012 - DNA, 120 bp, Artificial Sequence
  ENSG00000070886_6 (sequence is synthesized)
ctggccatcctctctctccgcatctactataagaagtgccctgccatggtgcgcaatctggctgccttctcggaggcagtgacgggggccgactcgtcctcactggtggaggtgaggggc

SEQ ID NO: 58013 - DNA, 120 bp, Artificial Sequence
  ENSG00000070886_7 (sequence is synthesized)
cagtgcgtgcggcactcagaggagcgggacacacccaagatgtactgcagcgcggagggcgagtggctcgtgcccatcggcaaatgcgtgtgcagtgccggctacgaggagcggcgggat

SEQ ID NO: 58014 - DNA, 120 bp, Artificial Sequence
  ENSG00000070886_8 (sequence is synthesized)
gcctgtgtggcctgtgagctgggcttctacaagtcagcccctggggaccagctgtgtgcccgctgccctccccacagccactccgcagctccagccgcccaagcctgccactgtgacctc

SEQ ID NO: 58015 - DNA, 120 bp, Artificial Sequence
  ENSG00000070886_9 (sequence is synthesized)
agctactaccgtgcagccctggacccgccgtcctcagcctgcacccggccaccctcggcaccagtgaacctgatctccagtgtgaatgggacatcagtgactctggagtgggcccctccc

SEQ ID NO: 58016 - DNA, 120 bp, Artificial Sequence
  ENSG00000070886_10 (sequence is synthesized)
ctggacccaggtggccgcagtgacatcacctacaatgccgtgtgccgccgctgcccctgggcactgagccgctgcgaggcatgtgggagcggcacccgctttgtgccccagcagacaagc

SEQ ID NO: 58017 - DNA, 120 bp, Artificial Sequence
  ENSG00000070886_11 (sequence is synthesized)
ctggtgcaggccagcctgctggtggccaacctgctggcccacatgaactactccttctggatcgaggccgtcaatggcgtgtccgacctgagccccgagccccgccgggccgctgtggtc

SEQ ID NO: 58018 - DNA, 120 bp, Artificial Sequence
  ENSG00000070886_12 (sequence is synthesized)
aacatcaccacgaaccaggcagccccgtcccaggtggtggtgatccgtcaagagcgggcggggcagaccagcgtctcgctgctgtggcaggagcccgagcagccgaacggcatcatcctg

SEQ ID NO: 58019 - DNA, 120 bp, Artificial Sequence
  ENSG00000070886_13 (sequence is synthesized)
gagtatgagatcaagtactacgagaaggacaaggagatgcagagctactccaccctcaaggccgtcaccaccagagccaccgtctccggcctcaagccgggcacccgctacgtgttccag

SEQ ID NO: 58020 - DNA, 120 bp, Artificial Sequence
  ENSG00000070886_14 (sequence is synthesized)
gtccgagcccgcacctcagcaggctgtggccgcttcagccaggccatggaggtggagaccgggaaaccccggccccgctatgacaccaggaccattgtctggatctgcctgacgctcatc

SEQ ID NO: 58021 - DNA, 120 bp, Artificial Sequence
  ENSG00000070886_15 (sequence is synthesized)
acgggcctggtggtgcttctgctcctgctcatctgcaagaagaggcactgtggctacagcaaggccttccaggactcggacgaggagaagatgcactatcagaatggacaggcaccccca

SEQ ID NO: 58022 - DNA, 120 bp, Artificial Sequence
  ENSG00000070886_16 (sequence is synthesized)
cctgtcttcctgcctctgcatcaccccccgggaaagctcccagagccccagttctatgcggaaccccacacctacgaggagccaggccgggcgggccgcagtttcactcgggagatcgag

SEQ ID NO: 58023 - DNA, 120 bp, Artificial Sequence
  ENSG00000070886_17 (sequence is synthesized)
gcctctaggatccacatcgagaaaatcatcggctctggagactccggggaagtctgctacgggaggctgcgggtgccagggcagcgggatgtgcccgtggccatcaaggccctcaaagcc

SEQ ID NO: 58024 - DNA, 120 bp, Artificial Sequence
  ENSG00000070886_18 (sequence is synthesized)
ggctacacggagagacagaggcgggacttcctgagcgaggcgtccatcatggggcaattcgaccatcccaacatcatccgcctcgagggtgtcgtcacccgtggccgcctggcaatgatt

SEQ ID NO: 58025 - DNA, 120 bp, Artificial Sequence
  ENSG00000070886_19 (sequence is synthesized)
gtgactgagtacatggagaacggctctctggacaccttcctgaggacccacgacgggcagttcaccatcatgcagctggtgggcatgctgagaggagtgggtgccggcatgcgctacctc

SEQ ID NO: 58026 - DNA, 120 bp, Artificial Sequence
  ENSG00000070886_20 (sequence is synthesized)
ctggaggacgacccggatgctgcctacaccaccacgggcgggaagatccccatccgctggacggccccagaggccatcgccttccgcaccttctcctcggccagcgacgtgtggagcttc

SEQ ID NO: 58027 - DNA, 120 bp, Artificial Sequence
  ENSG00000070886_21 (sequence is synthesized)
ggcgtggtcatgtgggaggtgctggcctatggggagcggccctactggaacatgaccaaccgggatgtcatcagctctgtggaggaggggtaccgcctgcccgcacccatgggctgcccc

SEQ ID NO: 58028 - DNA, 120 bp, Artificial Sequence
  ENSG00000070886_22 (sequence is synthesized)
cacgccctgcaccagctcatgctcgactgttggcacaaggaccgggcgcagcggcctcgcttctcccagattgtcagtgtcctcgatgcgctcatccgcagccctgagagtctcagggcc

SEQ ID NO: 58029 - DNA, 120 bp, Artificial Sequence
  ENSG00000070886_23 (sequence is synthesized)
accgccacagtcagcaggtgcccaccccctgccttcgtccggagctgctttgacctccgagggggcagcggtggcggtgggggcctcaccgtgggggactggctggactccatccgcatg

SEQ ID NO: 58030 - DNA, 120 bp, Artificial Sequence
  ENSG00000070886_24 (sequence is synthesized)
ggccggtaccgagaccacttcgctgcgggcggatactcctctctgggcatggtgctacgcatgaacgcccaggacgtgcgcgccctgggcatcaccctcatgggccaccagaagaagatc

SEQ ID NO: 58031 - DNA, 120 bp, Artificial Sequence
  ENSG00000070886_25 (sequence is synthesized)
ctgggcagcattcagaccatgcgggcccagctgaccagcacccaggggccccgccggcacctctgatgtacagccagcagggcccaggcagccaccaagcccaccccaggtcatgccagc

SEQ ID NO: 58032 - DNA, 120 bp, Artificial Sequence
  ENSG00000070886_26 (sequence is synthesized)
ggcagaggacgtgaggggctggcagcaggcagggcggccccaggcctctgccctcctctcaggtgctggaggagctgaaggcttcgccacaggacctggagttatcaggggtcaggcgcc

SEQ ID NO: 58033 - DNA, 120 bp, Artificial Sequence
  ENSG00000070886_27 (sequence is synthesized)
tgggaaggggcctttggtggccaccctggtgaggacacctgtcccccagggcaggcaccttctcttttccagagcctggggcctccacgtcacagagtccaacagggacatcactcgcct

SEQ ID NO: 58034 - DNA, 120 bp, Artificial Sequence
  ENSG00000070886_28 (sequence is synthesized)
gcctctgtgtgcgtgcatgtgtgtgtgtggtggggggtgttctcacaaggtcatgggatctcatgtgaacagtgtgtgatcaagtgtgtccaccccttcgggtctcagcatggacgtgtg

SEQ ID NO: 58035 - DNA, 120 bp, Artificial Sequence
  ENSG00000070886_29 (sequence is synthesized)
catgttatgagcgtgtgcttatccgttaaggctggaggcacatgtgggtgatggtggatgatgtgtcatgaatgaggaggtgtgtgagcagggaactcagtgtgacaccgccaggtccag

SEQ ID NO: 58036 - DNA, 120 bp, Artificial Sequence
  ENSG00000070886_30 (sequence is synthesized)
cacccatgggggcgggggagaggctcacccctacgtccccccacacctggaggctggagccaggggccacttctgaactgcaccagcaccaggcccaccctcgtctctgcctgggtgagc

SEQ ID NO: 58037 - DNA, 120 bp, Artificial Sequence
  ENSG00000070886_31 (sequence is synthesized)
ccaccccggctgtatctcaggtctgggtcctccctctagccgaggaggccacctgcagcctccacccggctctcaccgctgcttcaacaggaaaacagggttcccggtcagtccggctgg

SEQ ID NO: 58038 - DNA, 120 bp, Artificial Sequence
  ENSG00000070886_32 (sequence is synthesized)
ccgccttcatggaggcatcatggcagagcacatgagatgtcctcagctgggcttggctgcctggccagggccgggggctcagcagcctcctctagcctctgatgccttccctccacggcc

SEQ ID NO: 58039 - DNA, 120 bp, Artificial Sequence
  ENSG00000070886_33 (sequence is synthesized)
caggtctcctcactcaaagtcccttcgccaacctttcaatgcccagccctgacacctgccctttgtcccccaggcctaggatcagggaccagaggatcctatcttctcagcacccagccc

SEQ ID NO: 58040 - DNA, 120 bp, Artificial Sequence
  ENSG00000070886_34 (sequence is synthesized)
accccttcctgtagcatatggggagactaaggcctggagagaggggtgatgccccgtcccaggttgcactgcaaccaagtgtcagagtcggggctccggcctcctgccaaggctcttgtc

SEQ ID NO: 58041 - DNA, 120 bp, Artificial Sequence
  ENSG00000070886_35 (sequence is synthesized)
cccatacaccatcccacaagggcgctgggggtggaagtgccctggaagcccctcccctctcacactgacctccccccttacggcccaccagggtatgtaaatatctcttttctaccatgt

SEQ ID NO: 58042 - DNA, 120 bp, Artificial Sequence
  ENSG00000070886_36 (sequence is synthesized)
cagaatattttttcctcactcctgacaatgcaaaaatggtcttcaaagcacataaaaagcacccagggtgagaaagccccatcccgggggccgttggcaggcagggaagcaggaacccca

SEQ ID NO: 58043 - DNA, 120 bp, Artificial Sequence
  ENSG00000070886_37 (sequence is synthesized)
ccgtgtgccccctgccagccccagagggagtggcgagcccagctgcccagccctgccccccctccccatagccagcacagctatcccgcggggacaccagcactgagccccctctccctc

SEQ ID NO: 58044 - DNA, 120 bp, Artificial Sequence
  ENSG00000070886_38 (sequence is synthesized)
ctgcaataattcggggagtctcagccccatccaggtgccgcggccagctctctacacctctatatattatattactatatagccgagctgttcttccttcctatggaagtcggaaacatg

SEQ ID NO: 58045 - DNA, 120 bp, Artificial Sequence
  ENSG00000070886_39 (sequence is synthesized)
gtcagaacacgatctgggggggggatcctgtcttcctccccaccccaccccactcttacccaatttctgggctctggatcctcacagtcatggaggcaccgtgggcctggcacttgcaaa

SEQ ID NO: 58046 - DNA, 120 bp, Artificial Sequence
  ENSG00000070886_40 (sequence is synthesized)
agtgtggcccctcactctagtgtgtggtccctctcagggtcctggggatctgcctctctgtggtctccatcctgactcttgaacttacccacaataagaataaattctgcctcatctttg

SEQ ID NO: 58047 - DNA, 120 bp, Artificial Sequence
  ENSG00000070886_41 (sequence is synthesized)
agacccatccagggatcagagctctgccggggacgtgctgtgggcctttaggcaagtgcctctctggccctgcgctcctcaccaggacccagagctggaggctcttcattgcctttagaa

SEQ ID NO: 58048 - DNA, 120 bp, Artificial Sequence
  ENSG00000070886_42 (sequence is synthesized)
aagtggaacacattctataagtaagagaaatcccaaaagctcagaggcaggctagtgtggccgtcgaaagcctaggttccagaactttccctctctgtgcctcagtttcctccctggtgc

SEQ ID NO: 58049 - DNA, 120 bp, Artificial Sequence
  ENSG00000070886_43 (sequence is synthesized)
aatgggaataatagtacctgcctgaggtcctctcaggaggcttaaatgagaggaatgaaattgcttagcccagcacctggcccgtggtaaatgctcaataaatgtcattaaaaaataaaa

SEQ ID NO: 58050 - DNA, 120 bp, Artificial Sequence
  ENSG00000070915_0 (sequence is synthesized)
ctggcccctccctggacacccaggcgacaatggcagaactgcccacaacagagacgcctggggacgccactttgtgcagcgggcgcttcaccatcagcacactgctgagcagtgatgagc

SEQ ID NO: 58051 - DNA, 120 bp, Artificial Sequence
  ENSG00000070915_1 (sequence is synthesized)
cctctccaccagctgcctatgacagcagccaccccagccacctgacccacagcagcaccttctgcatgcgcacctttggctacaacacgatcgatgtggtgcccacatatgagcactatg

SEQ ID NO: 58052 - DNA, 120 bp, Artificial Sequence
  ENSG00000070915_2 (sequence is synthesized)
ccaacagcacccagcctggtgagccccggaaggtccggcccacactggctgacctgcactccttcctcaagcaggaaggcagacacctgcatgccctggcctttgacagccggcccagcc

SEQ ID NO: 58053 - DNA, 120 bp, Artificial Sequence
  ENSG00000070915_3 (sequence is synthesized)
acgagatgactgatgggctggtggagggcgaggcaggcaccagcagcgagaagaaccccgaggagccagtgcgcttcggctgggtcaagggggtgatgattcgttgcatgctcaacattt

SEQ ID NO: 58054 - DNA, 120 bp, Artificial Sequence
  ENSG00000070915_4 (sequence is synthesized)
ggggcgtgatcctctacctgcggctgccctggattacggcccaggcaggcatcgtcctgacctggatcatcatcctgctgtcggtcacggtgacctccatcacaggcctctccatctcag

SEQ ID NO: 58055 - DNA, 120 bp, Artificial Sequence
  ENSG00000070915_5 (sequence is synthesized)
ccatctccaccaatggcaaggtcaagtcaggtggcacctacttcctcatctcccggagtctgggcccagagcttgggggctccatcggcctcattttcgctttcgccaatgccgtgggtg

SEQ ID NO: 58056 - DNA, 120 bp, Artificial Sequence
  ENSG00000070915_6 (sequence is synthesized)
tggccatgcacacggtgggctttgcagagaccgtgcgggacctgctccaggagtatggggcacccatcgtggaccccattaacgacatccgcatcattgccgtggtctcggtcactgtgc

SEQ ID NO: 58057 - DNA, 120 bp, Artificial Sequence
  ENSG00000070915_7 (sequence is synthesized)
tgctggccatctccctggctggcatggagtgggagtccaaggcccaggtgctgttcttccttgtcatcatggtctcctttgccaactatttagtggggacgctgatccccccatctgagg

SEQ ID NO: 58058 - DNA, 120 bp, Artificial Sequence
  ENSG00000070915_8 (sequence is synthesized)
acaaggcctccaaaggcttcttcagctaccgggcggacatttttgtccagaacttggtgcctgactggcggggtccagatggcaccttcttcggaatgttctccatcttcttcccctcgg

SEQ ID NO: 58059 - DNA, 120 bp, Artificial Sequence
  ENSG00000070915_9 (sequence is synthesized)
ccacaggcatcctggcaggggccaacatatctggtgacctcaaggaccctgctatagccatccccaaggggaccctcatggccattttctggacgaccatttcctacctggccatctcag

SEQ ID NO: 58060 - DNA, 120 bp, Artificial Sequence
  ENSG00000070915_10 (sequence is synthesized)
ccaccattggctcctgcgtggtgcgtgatgcctctggggtcctgaatgacacagtgacccctggctggggtgcctgcgaggggctggcctgcagctatggctggaacttcaccgagtgca

SEQ ID NO: 58061 - DNA, 120 bp, Artificial Sequence
  ENSG00000070915_11 (sequence is synthesized)
cccagcagcacagctgccactacggcctcatcaactattaccagaccatgagcatggtgtcaggcttcgcgcccctgatcacggctggcatcttcggggccaccctctcctctgccctgg

SEQ ID NO: 58062 - DNA, 120 bp, Artificial Sequence
  ENSG00000070915_12 (sequence is synthesized)
cctgccttgtctctgctgccaaagtcttccagtgcctttgcgaggaccagctgtacccactgatcggcttcttcggcaaaggctatggcaagaacaaggagcccgtgcgtggctacctgc

SEQ ID NO: 58063 - DNA, 120 bp, Artificial Sequence
  ENSG00000070915_13 (sequence is synthesized)
tggcctacgccatcgctgtggccttcatcatcatcgctgagctcaacaccatagcccccatcatttccaacttcttcctctgctcctatgccctcatcaacttcagctgcttccacgcct

SEQ ID NO: 58064 - DNA, 120 bp, Artificial Sequence
  ENSG00000070915_14 (sequence is synthesized)
ccatcaccaactcgcctgggtggagaccttcattccaatactacaacaagtgggcggcgctgtttggggctatcatctccgtggtcatcatgttcctcctcacctggtgggcggccctca

SEQ ID NO: 58065 - DNA, 120 bp, Artificial Sequence
  ENSG00000070915_15 (sequence is synthesized)
tcgccattggcgtggtgctcttcctcctgctctatgtcatctacaagaagccagaggtaaattggggctcctcggtacaggctggctcctacaacctggccctcagctactcggtgggcc

SEQ ID NO: 58066 - DNA, 120 bp, Artificial Sequence
  ENSG00000070915_16 (sequence is synthesized)
tcaatgaggtggaagaccacatcaagaactaccgcccccagtgcctggtgctcacggggccccccaacttccgcccggccctggtggactttgtgggcaccttcacccggaacctcagcc

SEQ ID NO: 58067 - DNA, 120 bp, Artificial Sequence
  ENSG00000070915_17 (sequence is synthesized)
tgatgatctgtggccacgtgctcatcggaccccacaagcagaggatgcctgagctccagctcatcgccaacgggcacaccaagtggctgaacaagaggaagatcaaggccttctactcgg

SEQ ID NO: 58068 - DNA, 120 bp, Artificial Sequence
  ENSG00000070915_18 (sequence is synthesized)
atgtcattgccgaggacctccgcagaggcgtccagatcctcatgcaggccgcaggtctcgggagaatgaagcccaacattctggtggttgggttcaagaagaactggcagtcggctcacc

SEQ ID NO: 58069 - DNA, 120 bp, Artificial Sequence
  ENSG00000070915_19 (sequence is synthesized)
cggccacagtggaagactacattggcatcctccatgatgcctttgatttcaactatggcgtgtgtgtcatgaggatgcgggagggactcaacgtgtccaagatgatgcaggcgcacatta

SEQ ID NO: 58070 - DNA, 120 bp, Artificial Sequence
  ENSG00000070915_20 (sequence is synthesized)
accccgtgtttgacccagcggaggacgggaaggaagccagcgccagaggtgccaggccatcagtctctggcgctttggaccccaaggccctggtgaaggaggagcaggccaccaccatct

SEQ ID NO: 58071 - DNA, 120 bp, Artificial Sequence
  ENSG00000070915_21 (sequence is synthesized)
tccagtcggagcagggcaagaagaccatagacatctactggctctttgacgatggaggcctcaccctcctcattccctatctccttggccgcaagaggaggtggagcaaatgcaagatcc

SEQ ID NO: 58072 - DNA, 120 bp, Artificial Sequence
  ENSG00000070915_22 (sequence is synthesized)
gtgtgttcgtaggcggccagattaacaggatggaccaggagagaaaggcgatcatttctctgctgagcaagttccgactgggattccatgaagtccacatcctccctgacatcaaccaga

SEQ ID NO: 58073 - DNA, 120 bp, Artificial Sequence
  ENSG00000070915_23 (sequence is synthesized)
ttccgtctgaatgatggcttcaaggatgaggccactgtcaacgagatgcggcgggactgcccctggaagatctcagatgaggagattacgaagaacagagtcaagtcccttcggcaggtg

SEQ ID NO: 58074 - DNA, 120 bp, Artificial Sequence
  ENSG00000070915_24 (sequence is synthesized)
aggctgaatgagattgtgctggattactcccgagacgctgctctcatcgtcatcactttgcccatagggaggaaggggaagtgccccagctcgctgtacatggcctggctggagaccctg

SEQ ID NO: 58075 - DNA, 120 bp, Artificial Sequence
  ENSG00000070915_25 (sequence is synthesized)
tcccaggacctcagacctccagtcatcctgatccgaggaaaccaggaaaacgtgctcaccttttactgccagtaactccaggctttgacatccctgtccacagctctgagtgtgtgggat

SEQ ID NO: 58076 - DNA, 120 bp, Artificial Sequence
  ENSG00000070915_26 (sequence is synthesized)
aagttggaacttgattgcctctagtccacagggatgagactcatgttctgttgcactttaagtggcagcatctgatgatctcaccgaaaaagatggtagatttccaaatctggctggact

SEQ ID NO: 58077 - DNA, 120 bp, Artificial Sequence
  ENSG00000070915_27 (sequence is synthesized)
ccacttccatgggacacattccctgggtcttgtgtttataggctagagaaatagcagatggagctgcaaggaaaactctctaaagcatcctattccttttaaaggatttcttttgatttt

SEQ ID NO: 58078 - DNA, 120 bp, Artificial Sequence
  ENSG00000070915_28 (sequence is synthesized)
gatgaccattaattaagagttcagtctttgatttgtatgcaaattggagtcccaatgctgggcgtgaatcttgacagtttctacagaccttcctgggtgaaagttcctaaatcatgccct

SEQ ID NO: 58079 - DNA, 120 bp, Artificial Sequence
  ENSG00000070915_29 (sequence is synthesized)
gcttcctccaataggagaatgggagcctcacctgtaggacctacaggctctctaaggaatgcaggtctctctctgagcctccacagccaggcaaatacatatatatatatttttttttta

SEQ ID NO: 58080 - DNA, 120 bp, Artificial Sequence
  ENSG00000070915_30 (sequence is synthesized)
gatgaagttttttctcttgttgcccaggctagggtgtaatggcatgatctcaggtcactgcaacctcctcccgggttcaagcatttcttctgtctcagcctcccgaatagctgggattac

SEQ ID NO: 58081 - DNA, 120 bp, Artificial Sequence
  ENSG00000070915_31 (sequence is synthesized)
agtgctggggttacaggcctgagccactgcgcccggcccaggcaaatttcttgaaccacttctcactcccgtcactttcaataaggggtctttgatgtcttcactggttctttggacgag

SEQ ID NO: 58082 - DNA, 120 bp, Artificial Sequence
  ENSG00000070915_32 (sequence is synthesized)
ggacttttcgaacttttttggttgcaacacacagtaagaaatatacttcacactgagacttgcagcgcacacacacggaaacgaccaaaacaaaaatgtcacaaaacaatacttaccctt

SEQ ID NO: 58083 - DNA, 120 bp, Artificial Sequence
  ENSG00000070915_33 (sequence is synthesized)
ccctgggggacgtcctccagtatgttctgttctgtttatttttcactgttggttgcaatccaataaaatgactttgggatccactcatgggtggggacccacacatttgaaaggcatggc

SEQ ID NO: 58084 - DNA, 120 bp, Artificial Sequence
  ENSG00000070915_34 (sequence is synthesized)
cacctttctgttgtgccttgcatttgtccacacacagggagtctggctgagctggggaaaggccacggctgggtgtcattgccattttcccagctcatctcaccgggaagaaaagcagat

SEQ ID NO: 58085 - DNA, 120 bp, Artificial Sequence
  ENSG00000070915_35 (sequence is synthesized)
tgacagaacacgtgaggaggggtattgatggcaggagagtcaaaaaagagttttaaagaaggggcaaggttgaaggagtctagtggcaagggtaagatttcaggcatggttaagaacaga

SEQ ID NO: 58086 - DNA, 120 bp, Artificial Sequence
  ENSG00000070915_36 (sequence is synthesized)
cgacaaggatgtcaggaatgaagatgtggagaggggtgtagagatggcaaggttggcaaggaacagataggcaggagcaggtccaagccaagcctagcccaagaccaggtgaaaggagag

SEQ ID NO: 58087 - DNA, 120 bp, Artificial Sequence
  ENSG00000070915_37 (sequence is synthesized)
gggaggaggagccacctgcaagagatggaaagagcaggcggcagagggggctggcagggaggggctgttaagagtggggttggaggtgggagagaagctaggacaagggagatggagaaa

SEQ ID NO: 58088 - DNA, 120 bp, Artificial Sequence
  ENSG00000070915_38 (sequence is synthesized)
ggacctatacctggctcacggaaggccttcaggtcactacacgttgaacatccccagtgtttgagcccccaaagctagggtgcaagagcactgccatcgaatgccagtgggtgaggccaa

SEQ ID NO: 58089 - DNA, 120 bp, Artificial Sequence
  ENSG00000070915_39 (sequence is synthesized)
gtgagggtatttgcagctctagacataaccaagaagcgtaaaggtgagttgtttggtggtacgactgcctgtgccttcttccgatggcactggggtggctgaaggaacagacatctttgg

SEQ ID NO: 58090 - DNA, 120 bp, Artificial Sequence
  ENSG00000070915_40 (sequence is synthesized)
gtttcatcagcctcctccaagactgctgcagtgcctacactttagacttcagaaggagactaaagacttctagaatttagaaggagatctgaagtctcctttctggagttacaacccaaa

SEQ ID NO: 58091 - DNA, 120 bp, Artificial Sequence
  ENSG00000070915_41 (sequence is synthesized)
ggatgttagcatttctcaggtcatcccactgcaaagcccagaaggcttggggctcccaggctgctctgaagccccactgtctgaccgcctcagggcttgctacgagggactggggcacgg

SEQ ID NO: 58092 - DNA, 120 bp, Artificial Sequence
  ENSG00000070915_42 (sequence is synthesized)
ccaagctgactaggaacagctctcgtgctcctgagggacctggaggatgggcctgcctcccagccattgagctggattctgggataattcttaactcgaaataaggggaagcatccatca

SEQ ID NO: 58093 - DNA, 120 bp, Artificial Sequence
  ENSG00000070915_43 (sequence is synthesized)
gggaatgctggcctttctagagccacgtagaaaacaattttctggttcttcaaacctcaaagagtccttggtccaaaaaacagaatgttttggcttcgggtgtcaaaaaaaaaattttca

SEQ ID NO: 58094 - DNA, 120 bp, Artificial Sequence
  ENSG00000070915_44 (sequence is synthesized)
cgatgtcagaaatagtatgtttttaacaatagtaatagctttgtaaaaaaataaaaagctttaacagcgaggccataaacaatgaaatgaataaaaacggtggtcattcagtcaacggaa

SEQ ID NO: 58095 - DNA, 120 bp, Artificial Sequence
  ENSG00000070915_45 (sequence is synthesized)
cacatgaaaaaaagatgcccaggagaattcaaaaggcaccagcaccagttactcttcattgacaggacagagcactttgcccatagggaggaaggggaagtgccccagctcgctgtacat

SEQ ID NO: 58096 - DNA, 120 bp, Artificial Sequence
  ENSG00000070915_46 (sequence is synthesized)
catggaagccactttgtaaatggcagtgtccgatgggtttcagcctgaaaatgggagctgtggcaacactgccagctccccgcagggacctggcacccctagaaatggggttatcgtctc

SEQ ID NO: 58097 - DNA, 120 bp, Artificial Sequence
  ENSG00000070915_47 (sequence is synthesized)
gtctgtccagagtcaggtgtctcagctctgggaaggggctcagcaggggcaccacggagggcccaagccttcccctaggaagcagaagggccaaagttcccataaacatagccctggcga

SEQ ID NO: 58098 - DNA, 120 bp, Artificial Sequence
  ENSG00000070915_48 (sequence is synthesized)
ttcttagcatgtggctgggcctgagcccgccccacacctgagctccagctggcaggggtcgagggcctcacgtgtcccaggcatcagtgacctccccttgccattgctttttcctgttgg

SEQ ID NO: 58099 - DNA, 120 bp, Artificial Sequence
  ENSG00000070915_49 (sequence is synthesized)
ctgccttttcctaccaaattccacttggcaaagagggaacccagctctttcaagagggacatcaactcctggttgttcaggaattacttggccctccttggctatcggccattcccagct

SEQ ID NO: 58100 - DNA, 120 bp, Artificial Sequence
  ENSG00000070950_0 (sequence is synthesized)
gtaatgcggtagcgcggggaatttcgagtggtgttggagcgccggaggctagtgggtggctgacccccagcatcctcgggagcgaccatggactccctggccgagtctcggtggcctccg

SEQ ID NO: 58101 - DNA, 120 bp, Artificial Sequence
  ENSG00000070950_1 (sequence is synthesized)
ggcctggcagtcatgaagacaatagatgatttgctgcggtgtggaatttgcttcgagtatttcaacattgcaatgataatacctcagtgttcacataactactgctctctctgtataaga

SEQ ID NO: 58102 - DNA, 120 bp, Artificial Sequence
  ENSG00000070950_2 (sequence is synthesized)
aaatttctgtcctataaaactcagtgtccaacttgctgtgtgactgtcacagagccggatctgaaaaataaccgcatattagatgaactggtaaaaagcttgaattttgcacggaatcat

SEQ ID NO: 58103 - DNA, 120 bp, Artificial Sequence
  ENSG00000070950_3 (sequence is synthesized)
ctgctgcagtttgctttagagtcaccagccaaatctcctgcttcttcctcttcaaagaatcttgctgtcaaagtatatactcctgtagcctccagacagtctttaaagcaggggagcagg

SEQ ID NO: 58104 - DNA, 120 bp, Artificial Sequence
  ENSG00000070950_4 (sequence is synthesized)
ttaatggataatttcttgatcagagaaatgagtggttctacatcagagttgttgataaaagaaaataaaagcaaattcagccctcaaaaagaggcgagccctgctgcaaagaccaaagag

SEQ ID NO: 58105 - DNA, 120 bp, Artificial Sequence
  ENSG00000070950_5 (sequence is synthesized)
acacgttctgtagaagagatcgctccagatccctcagaggctaagcgtcctgagccaccctcgacatccactttgaaacaagttactaaagtggattgtcctgtttgcggggttaacatt

SEQ ID NO: 58106 - DNA, 120 bp, Artificial Sequence
  ENSG00000070950_6 (sequence is synthesized)
ccagaaagtcacattaataagcatttagacagctgtttatcacgcgaagagaagaaggaaagcctcagaagttctgttcacaaaaggaagccgctgcccaaaactgtatataatttgctc

SEQ ID NO: 58107 - DNA, 120 bp, Artificial Sequence
  ENSG00000070950_7 (sequence is synthesized)
tctgatcgtgatttaaagaaaaagctaaaagagcatggattatctattcaaggaaataaacaacagctcattaaaaggcaccaagaatttgtacacatgtacaatgcccaatgcgatgct

SEQ ID NO: 58108 - DNA, 120 bp, Artificial Sequence
  ENSG00000070950_8 (sequence is synthesized)
ttgcatcctaaatcagctgctgaaatagttcgagaaatcgaaaatatagagaagactaggatgcgtcttgaagctagtaaactcaatgaaagtgtaatggtttttacaaaggaccaaaca

SEQ ID NO: 58109 - DNA, 120 bp, Artificial Sequence
  ENSG00000070950_9 (sequence is synthesized)
gaaaaggaaatagatgaaatccacagtaaatatcgtaaaaaacataagagtgaatttcagcttctggtggatcaggctagaaaaggatacaagaaaattgctggaatgtcacaaaaaaca

SEQ ID NO: 58110 - DNA, 120 bp, Artificial Sequence
  ENSG00000070950_10 (sequence is synthesized)
gtaacaataacaaaagaagatgaatctacagaaaagctatcttctgtatgcatgggacaggaagataatatgacctcagtaacaaaccacttttctcaatcaaagctggactccccagag

SEQ ID NO: 58111 - DNA, 120 bp, Artificial Sequence
  ENSG00000070950_11 (sequence is synthesized)
gaattggaacctgacagagaagaggattcttctagctgtattgatattcaagaagttctttcttcatcagaatcagattcatgcaatagttccagttcagacatcataagagatctttta

SEQ ID NO: 58112 - DNA, 120 bp, Artificial Sequence
  ENSG00000070950_12 (sequence is synthesized)
gaagaagaggaagcctgggaagcatcacataaaaacgatcttcaagacacagaaataagtccaagacagaatcgccgcacaagagccgctgaaagtgctgagattgaaccaagaaacaag

SEQ ID NO: 58113 - DNA, 120 bp, Artificial Sequence
  ENSG00000070950_13 (sequence is synthesized)
cgtaataggaattaatgtgggcttttgctgacttttcaaatgcattgattagaataccgtacttttggttgccacagatagattttctatttataaatgcccaaggaaagatgctaaatt

SEQ ID NO: 58114 - DNA, 120 bp, Artificial Sequence
  ENSG00000070950_14 (sequence is synthesized)
ctaaatattacggttagctgatattcattcttttctgcttttccagaggggaaaaatgttacaaaatatccttacttggtcagttgcctcctgcctctaaaacatctctctctaaaaata

SEQ ID NO: 58115 - DNA, 120 bp, Artificial Sequence
  ENSG00000070950_15 (sequence is synthesized)
ctgacatttcacacaggtaccagctttgcagaggaggtagactctttggcactttggcacagggatttggtttggtttggtttggtttgataattaaatttcagaatgtccttaggccat

SEQ ID NO: 58116 - DNA, 120 bp, Artificial Sequence
  ENSG00000070950_16 (sequence is synthesized)
tctccttctcttccatggagaatccagcctcacaaaaggattctttcaacttctttattgcaagaaacagttgagttaaatgtttgtttttggaaaggcgggatgtcagttcacatcctt

SEQ ID NO: 58117 - DNA, 120 bp, Artificial Sequence
  ENSG00000070950_17 (sequence is synthesized)
ggtgtgtgtaagtaccgatgcacgccaccaccatgcctgtgttacagcagctccatgatggttgttgcccgaggttaatgtagttgtttgttagacctgtgtcttacacatttctcagag

SEQ ID NO: 58118 - DNA, 120 bp, Artificial Sequence
  ENSG00000070950_18 (sequence is synthesized)
taggatattagtattataatttaaagctacgacagtcacaaagtcacaataacttagaaacattgcgcatattcttctgaaatagcacttaaaaatgattagtgtcagtattttttcact

SEQ ID NO: 58119 - DNA, 120 bp, Artificial Sequence
  ENSG00000070950_19 (sequence is synthesized)
tgggtcaatcaaatctgtaacactgaatccaagctattaaacaaaaagtatgcaatgaatgaattttgtaaatgaatagagagtatcagtttacaataatgttcttaaaacagtatcctc

SEQ ID NO: 58120 - DNA, 120 bp, Artificial Sequence
  ENSG00000070950_20 (sequence is synthesized)
tggatagttgagtatgggttagaaatcattgaaatggattggtcagaaattgctatctgtgtaaaatgtctaccagtagccagatgcttccagagttcttaatgcctctctggcatttca

SEQ ID NO: 58121 - DNA, 120 bp, Artificial Sequence
  ENSG00000070950_21 (sequence is synthesized)
gagccagcatcccccaactcccacccctctgccatcacccaacccaaacacatcagctttcaaatgagatgatagtaaatgcggcaatgttaagacaagaaatttatgatttgccagatt

SEQ ID NO: 58122 - DNA, 120 bp, Artificial Sequence
  ENSG00000070950_22 (sequence is synthesized)
caacatttatgacctccccttccaaagactgtctccgttgaccttgtctttttggtatgccttggggtttctgataatgtgtggagtctcattatggctgagagtttagtgttttcacag

SEQ ID NO: 58123 - DNA, 120 bp, Artificial Sequence
  ENSG00000070950_23 (sequence is synthesized)
tgaagtgcagacatttgatttctttatgagttccctgtgttagaaatggctatagaaaaatttgtcataataatttcatttgcatgaaatcctgaggggtgcattaaggaaactaaaagc

SEQ ID NO: 58124 - DNA, 120 bp, Artificial Sequence
  ENSG00000070950_24 (sequence is synthesized)
cagaaattatgtcaaaatgaaaactgtttgtttcatgacaaattatatagtctataaattaaactggaagtaattattactttaattgcagcaaaaggagtttgtgagggagcggtgaga

SEQ ID NO: 58125 - DNA, 120 bp, Artificial Sequence
  ENSG00000070950_25 (sequence is synthesized)
cccaagattgggaaagtaggcacatgagttcattcagcaaatatttggttatctatgtctgtcactgtgctgacactgggaatacaaaggtggccaaagatcatctagaacaatggttcc

SEQ ID NO: 58126 - DNA, 120 bp, Artificial Sequence
  ENSG00000070950_26 (sequence is synthesized)
cagtggggtgggcagaaagattttgccccccaggagacagctggcaatgtgtggagacacttttggaggtggagggtggtgaggggtactaccagtatcaatgggtggaggccagggatg

SEQ ID NO: 58127 - DNA, 120 bp, Artificial Sequence
  ENSG00000070950_27 (sequence is synthesized)
aggctaaacacccaaccctcatggattagtttgccagggctgccgtcacaagatactgcagacggggaagcttacacaacagaaatgtgtattctcagaattctggaggctggaagtcca

SEQ ID NO: 58128 - DNA, 120 bp, Artificial Sequence
  ENSG00000070950_28 (sequence is synthesized)
agatcagtagggtttcttcttcggcctctctccttggcttccactcatggtgtccttgcatggtcttttctctgtgtgcacatgactgtgcaggactggtgtcccgatttcttgtaggga

SEQ ID NO: 58129 - DNA, 120 bp, Artificial Sequence
  ENSG00000070950_29 (sequence is synthesized)
cagcagtcattggatcagggcccatgcgtatggcctcattttacttcagttacctcttttttagatagagggccctatctctaaatactgtcacattctgagataccggcagttaagact

SEQ ID NO: 58130 - DNA, 120 bp, Artificial Sequence
  ENSG00000070950_30 (sequence is synthesized)
tccaacatatttagtggtaggggttaaggggcacgctttagactacaacactccacagtaaagaattatccagtctaacatgtcagttgtgccaagactgagaaacctgtaatgtaaagg

SEQ ID NO: 58131 - DNA, 120 bp, Artificial Sequence
  ENSG00000070950_31 (sequence is synthesized)
aactcccaagtctacctgaaaagtaaggtctaaagagcatttattgagcactatctgttagcacttagcatatgtttaatattcatacattgaaagaaatgtatgttcatatccatctga

SEQ ID NO: 58132 - DNA, 120 bp, Artificial Sequence
  ENSG00000070950_32 (sequence is synthesized)
caaagattaaggaacttagagtaagtaatagatccaaaattgaaactgataaacttctggttctaaaattcaccttttagtgaaaatacagtttctcaccaaacttacagtaattcagag

SEQ ID NO: 58133 - DNA, 120 bp, Artificial Sequence
  ENSG00000070950_33 (sequence is synthesized)
ttattaactctttctacctcctcactcccctcaaagttataacatctcccatcaacatcagctcagaatggcagtgatgcttatggtttgtgggggtgcaggtgagctgctggatgcact

SEQ ID NO: 58134 - DNA, 120 bp, Artificial Sequence
  ENSG00000070950_34 (sequence is synthesized)
ttagatggcctagtatgccaggccgtcctttcatcctctactctcgtctttctttttcgacctcatgttgaggattactggtctagttgaaaaaagaattcatacacataagaccatgta

SEQ ID NO: 58135 - DNA, 120 bp, Artificial Sequence
  ENSG00000070950_35 (sequence is synthesized)
tataatagagggaggtatgcctttaaaaacaaaattacatggtaaagactgatgtgtcaacagggatagacaacatagagaaggctagaactgtttctggaaaaaaacccaaaaacaatg

SEQ ID NO: 58136 - DNA, 120 bp, Artificial Sequence
  ENSG00000070950_36 (sequence is synthesized)
gatttcaaacttcttagcatccgataaaagaaagtagcaattattcaaatgagaaacacttctgtctgttatgtacatattatgaaagtatgaacataagagggaaaaccacaaccatta

SEQ ID NO: 58137 - DNA, 120 bp, Artificial Sequence
  ENSG00000070950_37 (sequence is synthesized)
cattttttaccatttcagtaatttttttttggtttttagtctgtttttagacatccttaagaacaactatctgaggctgtaaacaagtatttacattaacacccatgatactgactttat

SEQ ID NO: 58138 - DNA, 120 bp, Artificial Sequence
  ENSG00000070950_38 (sequence is synthesized)
actccctacctgcattgagaccttaaagggggcatttctccattccttctgtgtatttctgggtatccccaggttcagatattcagaatacagatacaagtccatgcttgcatatgttgc

SEQ ID NO: 58139 - DNA, 120 bp, Artificial Sequence
  ENSG00000070950_39 (sequence is synthesized)
tgctccccccgacagacttctaccagcatctgccctcctcaccgctgctctgtcacgtgcactgcggctggccctgctggaaagtcctaccttgcctaggacgccatccccgatatagcc

SEQ ID NO: 58140 - DNA, 120 bp, Artificial Sequence
  ENSG00000070950_40 (sequence is synthesized)
ccaagatgcaaacctgccaagtgctagggcagccctgccttcctgtccatttcagtctcttggccttgctgtgttccaagtggaaatgggagtgtgctttcctggtttgctagtgtacta

SEQ ID NO: 58141 - DNA, 120 bp, Artificial Sequence
  ENSG00000070950_41 (sequence is synthesized)
tcacccggaccacagcgtcctgtgcaaaaatttgcttcctctctcttcccctttcactctttctcttttctcttccccacccccttttttttctctttccccttacctttctttcctttc

SEQ ID NO: 58142 - DNA, 120 bp, Artificial Sequence
  ENSG00000070950_42 (sequence is synthesized)
cactcttcctgtccttccttccttcaactattaggactatatgtcaagtaatgtgcaaaacaaagacagttcctgccctgatggagcttgtagatcagaagggaagatgagcattaagta

SEQ ID NO: 58143 - DNA, 120 bp, Artificial Sequence
  ENSG00000070950_43 (sequence is synthesized)
attatatagattaatgtacaactgtgatgagtgcaacaaaagagaggttcatggcactatcaaacatgcaatggacggattttgtttttgcctataaactcttgccatagaaagcttgaa

SEQ ID NO: 58144 - DNA, 120 bp, Artificial Sequence
  ENSG00000070950_44 (sequence is synthesized)
aatcagtccagggggacagcattaatcaccatgttctttccttatccctgtcttccccaaaattcatgtgttgaaacttaacaagaggtgggaactttaggatgtgattaagtcgtgagg

SEQ ID NO: 58145 - DNA, 120 bp, Artificial Sequence
  ENSG00000070950_45 (sequence is synthesized)
gcacagctcttatagatggggtcacggtccttctaaaagggcttgagggagtggttttgtttccttccatcccttccgccacatgaggacacagtcttcgttccctctggaggactcagc

SEQ ID NO: 58146 - DNA, 120 bp, Artificial Sequence
  ENSG00000070950_46 (sequence is synthesized)
aacaacacaccatcttggaagcagagagcagtcctcaccagacacggaatctgccagtgccttgatcttggacttaccagcctccatacctgtgagaaataaatttctattgtctataag

SEQ ID NO: 58147 - DNA, 120 bp, Artificial Sequence
  ENSG00000070950_47 (sequence is synthesized)
ttacccagactgtggtattttcttctggcagcacaaatggacacccagaaactgatgcatgcatcttctgactcctttgattccaaaatacaaaatattagaataaagttatggaagtca

SEQ ID NO: 58148 - DNA, 120 bp, Artificial Sequence
  ENSG00000070950_48 (sequence is synthesized)
taaaaacttctgttcagagcaaggacggatagtcactgcgattagggtgggcgacccggaggggggtcatgagcctggaccttgacagatctggtgaggtaagtgcggcagaagcctggc

SEQ ID NO: 58149 - DNA, 120 bp, Artificial Sequence
  ENSG00000070950_49 (sequence is synthesized)
acatattccaaggatcctgcgtctcaacaaaccctttcttctgcaaaagaacagcctgcttttattccaagctctgagattccttataggaagctgtttctctccagttatgccatgtta

SEQ ID NO: 58150 - DNA, 120 bp, Artificial Sequence
  ENSG00000070950_50 (sequence is synthesized)
tgccttaacctgggccaacagtgcctacacacggagaatgcaatggttgaggccaattcattaacagggattgtttagccacatccgttgttaattgacaacatgtctatggaattagaa

SEQ ID NO: 58151 - DNA, 120 bp, Artificial Sequence
  ENSG00000070950_51 (sequence is synthesized)
ttttaaacactcacatttgagatttgaaggtttgtaatatttccctttttgtcattttggggagatttttattaaggtctttttttgattattttaggtaatggtttttacaaaggacca

SEQ ID NO: 58152 - DNA, 120 bp, Artificial Sequence
  ENSG00000070950_52 (sequence is synthesized)
tgagaaattatacttctatgcagctgattttcaaacaaaattatatttttgctttctggtttaaagaagtagtaatcctcatgcaaggtaaagattttcagtttactacttgtttctata

SEQ ID NO: 58153 - DNA, 120 bp, Artificial Sequence
  ENSG00000070950_53 (sequence is synthesized)
tatttctgctaagaaatggaatcctatgtaataactgtagttatgtatcagatgttatttctgtatggataaattgttcttatgggcaattaatacagtcatgcatcacttaacaatggg

SEQ ID NO: 58154 - DNA, 120 bp, Artificial Sequence
  ENSG00000070950_54 (sequence is synthesized)
aactacttttgccttttatatgtgttctctctttactttgtgcacctttggattagggaatgcagggttgcatattttatagtcaaagaagggaagtaacagtcattattcacacatgga

SEQ ID NO: 58155 - DNA, 120 bp, Artificial Sequence
  ENSG00000070950_55 (sequence is synthesized)
aaatttactagagtaagattttcttcctttacttaacagaaattctcctgtagtatagaataattaagagttaaaacgcagatttgaggacttccttacttttgggtgctctgaagatac

SEQ ID NO: 58156 - DNA, 120 bp, Artificial Sequence
  ENSG00000070961_0 (sequence is synthesized)
ggccaaaggtcaagatacttctctgggaaatgttgctgctgatgctgctttacaaagtcatacaatgagtgtttggtttaagaaagattttcatacttaaaagattttcatcttggaaat

SEQ ID NO: 58157 - DNA, 120 bp, Artificial Sequence
  ENSG00000070961_1 (sequence is synthesized)
acatcaagtgaaaattaaattcttttgggaaacattttccttctgatatattatacttgtaatgggcgacatggcaaacaactcagttgcttacagtggtgtgaaaaactctttgaagga

SEQ ID NO: 58158 - DNA, 120 bp, Artificial Sequence
  ENSG00000070961_2 (sequence is synthesized)
agctaatcatgatggagactttggaattacgctcgcagagctgcgggctctcatggagctcaggtccacagatgcattacgaaaaatacaggaaagctatggagatgtctatggaatttg

SEQ ID NO: 58159 - DNA, 120 bp, Artificial Sequence
  ENSG00000070961_3 (sequence is synthesized)
caccaaattgaaaacatctcccaatgaaggtttaagtggaaaccctgcagatttagaaagaagagaagcagtgtttggaaagaattttatacctcctaaaaagccaaaaacctttcttca

SEQ ID NO: 58160 - DNA, 120 bp, Artificial Sequence
  ENSG00000070961_4 (sequence is synthesized)
attagtatgggaagcattacaagatgtcactttaattatattagaaattgcagccatagtatcattgggcctttctttttatcagcctccagaaggggataatgcactttgtggagaagt

SEQ ID NO: 58161 - DNA, 120 bp, Artificial Sequence
  ENSG00000070961_5 (sequence is synthesized)
ttctgttggggaggaagaaggtgaaggtgaaactggttggattgaaggagctgcaatcctcttgtctgtagtgtgtgtggtgttagtaacagctttcaatgactggagtaaggaaaaaca

SEQ ID NO: 58162 - DNA, 120 bp, Artificial Sequence
  ENSG00000070961_6 (sequence is synthesized)
gtttagaggtttgcagagccgaattgaacaagaacagaagttcactgtcatcaggggtggtcaggtcattcagatacctgtagctgacattactgttggagatattgctcaagtgaaata

SEQ ID NO: 58163 - DNA, 120 bp, Artificial Sequence
  ENSG00000070961_7 (sequence is synthesized)
tggtgatcttcttccagctgacggcatacttattcaaggcaacgatcttaaaattgatgaaagctcattgactggtgaatcagatcatgttaaaaagtctttagataaggatcccttact

SEQ ID NO: 58164 - DNA, 120 bp, Artificial Sequence
  ENSG00000070961_8 (sequence is synthesized)
tctatcaggtactcatgtaatggaaggctctggaagaatggtagttacagctgtaggtgtaaattctcaaactggaattatctttaccttacttggagctggaggtgaagaggaagagaa

SEQ ID NO: 58165 - DNA, 120 bp, Artificial Sequence
  ENSG00000070961_9 (sequence is synthesized)
gaaagatgagaagaaaaaggaaaagaaaaataagaaacaagatggagctattgagaatcgcaacaaagcaaaagcccaggatggtgcagccatggaaatgcagccattgaagagtgaaga

SEQ ID NO: 58166 - DNA, 120 bp, Artificial Sequence
  ENSG00000070961_10 (sequence is synthesized)
aggtggagatggtgatgaaaaagataaaaagaaagcaaatttgccaaaaaaggaaaaatctgttttacaagggaaacttacaaaactggctgttcagattggcaaagcaggtctgttgat

SEQ ID NO: 58167 - DNA, 120 bp, Artificial Sequence
  ENSG00000070961_11 (sequence is synthesized)
gtctgccatcacagttatcattctagtattatattttgtcattgacaccttctgggttcagaaaagaccatggcttgctgagtgcacaccaatttatatacaatactttgtgaagttctt

SEQ ID NO: 58168 - DNA, 120 bp, Artificial Sequence
  ENSG00000070961_12 (sequence is synthesized)
cattattggagttacagttttagtggtcgcagtgccagaaggtcttccacttgcagtcacgatctcactggcttattcagtcaaaaaaatgatgaaagataataacttagtaaggcatct

SEQ ID NO: 58169 - DNA, 120 bp, Artificial Sequence
  ENSG00000070961_13 (sequence is synthesized)
ggatgcttgtgaaaccatgggaaatgctacagctatttgttcagataaaacaggaactttgacaatgaacagaatgacagtcgttcaagcttacataaatgaaaaacattataaaaaggt

SEQ ID NO: 58170 - DNA, 120 bp, Artificial Sequence
  ENSG00000070961_14 (sequence is synthesized)
tcctgaaccagaagctattccaccaaatattttgtcctatcttgtaacaggaatttctgtgaattgtgcttatacatcaaaaatattgccaccagagaaagagggtggattacctcgtca

SEQ ID NO: 58171 - DNA, 120 bp, Artificial Sequence
  ENSG00000070961_15 (sequence is synthesized)
cgttggtaataaaactgaatgtgccttgttgggacttcttttggatttaaaacgggattatcaggatgttagaaatgaaataccagaagaagcactgtacaaagtctacaccttcaattc

SEQ ID NO: 58172 - DNA, 120 bp, Artificial Sequence
  ENSG00000070961_16 (sequence is synthesized)
tgttaggaagtccatgagtactgtcctgaaaaattcagatggaagttatcgaatattcagcaagggtgcatctgagataattctgaaaaagtgtttcaaaatcttgagtgctaatggtga

SEQ ID NO: 58173 - DNA, 120 bp, Artificial Sequence
  ENSG00000070961_17 (sequence is synthesized)
ggcaaaagtattcagaccaagggaccgtgatgatattgtaaaaactgtgattgaaccgatggcatcagaaggcttgagaaccatatgtcttgcattcagagattttccagcaggagaacc

SEQ ID NO: 58174 - DNA, 120 bp, Artificial Sequence
  ENSG00000070961_18 (sequence is synthesized)
agaaccagagtgggataatgaaaatgatattgtcaccggccttacatgcattgctgttgtggggattgaagatcctgtgagacctgaggtgccagatgcaattaaaaagtgtcagagggc

SEQ ID NO: 58175 - DNA, 120 bp, Artificial Sequence
  ENSG00000070961_19 (sequence is synthesized)
tggaattactgtgcggatggtcactggtgataatattaatactgctcgggccattgctaccaaatgtggtattttacatcctggggaagattttctgtgcctagaaggtaaagattttaa

SEQ ID NO: 58176 - DNA, 120 bp, Artificial Sequence
  ENSG00000070961_20 (sequence is synthesized)
cagaagaatacgaaatgaaaaaggagagattgagcaagagaggatagacaagatttggccaaaacttcgagtacttgcaagatcatctcctactgataagcatacactggttaaaggtat

SEQ ID NO: 58177 - DNA, 120 bp, Artificial Sequence
  ENSG00000070961_21 (sequence is synthesized)
aattgacagcactgtctcagaccaacgccaggttgtagctgtaactggtgatggtacaaatgatggcccagcactaaagaaagcagatgttggatttgcaatgggtattgctggaactga

SEQ ID NO: 58178 - DNA, 120 bp, Artificial Sequence
  ENSG00000070961_22 (sequence is synthesized)
tgtagctaaagaagcatccgatattattctcacagatgacaactttacaagcattgttaaagcagttatgtggggacgaaatgtctatgacagcatctcaaaattccttcagttccaact

SEQ ID NO: 58179 - DNA, 120 bp, Artificial Sequence
  ENSG00000070961_23 (sequence is synthesized)
tactgttaatgtagtagcagtgattgttgcttttacgggcgcctgcattactcaagactcaccgcttaaggctgtgcagatgctgtgggtaaacctcataatggatacactcgcttccct

SEQ ID NO: 58180 - DNA, 120 bp, Artificial Sequence
  ENSG00000070961_24 (sequence is synthesized)
ggctctggcaacggaaccacccactgagtctctcttgcttcggaaaccttatggtagaaataagcctctcatctcacgtacaatgatgaagaatattttgggtcatgcattctatcaact

SEQ ID NO: 58181 - DNA, 120 bp, Artificial Sequence
  ENSG00000070961_25 (sequence is synthesized)
tgtagtagtctttacactcttatttgctggagaaaagttttttgacattgatagtggaagaaatgctcctttgcatgctcctccttcagaacattatactattgtttttaatacctttgt

SEQ ID NO: 58182 - DNA, 120 bp, Artificial Sequence
  ENSG00000070961_26 (sequence is synthesized)
gctgatgcaacttttcaacgaaataaatgcccggaaaattcatggtgaaagaaatgtattcgaaggaatctttaacaatgccatcttctgcacaattgttttaggcacttttgtggtaca

SEQ ID NO: 58183 - DNA, 120 bp, Artificial Sequence
  ENSG00000070961_27 (sequence is synthesized)
gataataattgtgcagtttggtggaaaacctttcagttgttcagaactttcaatagaacagtggctatggtcaatattcctaggaatgggaacattactctggggccagcttatttcaac

SEQ ID NO: 58184 - DNA, 120 bp, Artificial Sequence
  ENSG00000070961_28 (sequence is synthesized)
agaaatacctgaggaggaattagcagaggatgttgaagagattgatcacgctgaaagggagttgcggcgtggccaaatcttgtggtttagaggtctgaacagaatccaaacacagattcg

SEQ ID NO: 58185 - DNA, 120 bp, Artificial Sequence
  ENSG00000070961_29 (sequence is synthesized)
agtggtgaatgcatttcgtagttctttatatgaagggttagaaaaaccggaatcaagaagttcgattcacaactttatgacacatcctgagtttaggatagaagattcagagcctcatat

SEQ ID NO: 58186 - DNA, 120 bp, Artificial Sequence
  ENSG00000070961_30 (sequence is synthesized)
cccccttattgatgacactgatgccgaagatgatgctcctacaaaacgtaactccagtcctccaccctctcccaacaaaaataacaatgctgttgacagtggaattcaccttacaataga

SEQ ID NO: 58187 - DNA, 120 bp, Artificial Sequence
  ENSG00000070961_31 (sequence is synthesized)
aatgaacaagtctgctacctcttcatccccaggaagcccactacatagtttggaaacatcactctgattgtaagctgaatgttaacacactagctgcattgtaaagaaacaaattgaaac

SEQ ID NO: 58188 - DNA, 120 bp, Artificial Sequence
  ENSG00000070961_32 (sequence is synthesized)
tgggtcttttcacatattgtgatggacaagctagtattcttgtctttggacttcaacagaagacacacttgtacgaatgtagatttatttttttaaaaaaaaaaaagcaaagctttctgc

SEQ ID NO: 58189 - DNA, 120 bp, Artificial Sequence
  ENSG00000070961_33 (sequence is synthesized)
cagactgagggtgctttttggggggtgggagaaatgaactgacagataaacagtaactcagcgtaagtgacctgtggatcatcagtagtacccaagcatggtcctgaacagtgtattagc

SEQ ID NO: 58190 - DNA, 120 bp, Artificial Sequence
  ENSG00000070961_34 (sequence is synthesized)
agagctttagtttatctcagtcctggatgggagagagagggaggagtaaaactgggcaagacaaagagccctggatcgttgaattgatagtttaatttctgctgttggctgttaataatt

SEQ ID NO: 58191 - DNA, 120 bp, Artificial Sequence
  ENSG00000070961_35 (sequence is synthesized)
tggattatttatgtttataaatgatacagatctgtttacaaggtttgtagatactttttttgttcctgttcatagatgggaagcttccttataactgatgcagagaaaaattagtccttc

SEQ ID NO: 58192 - DNA, 120 bp, Artificial Sequence
  ENSG00000070961_36 (sequence is synthesized)
aaatactgctgtattttcaggaaaaaaaaaaaaaggggtgtttctattgaaactgtactaaatttttgcctacaatttaccttgttaaatattgtagataaattgctaatactaatagcc

SEQ ID NO: 58193 - DNA, 120 bp, Artificial Sequence
  ENSG00000070961_37 (sequence is synthesized)
acgaaaaaaacaaaacaaaacaaaaaaacatgagcagtggtgttctaatgaagttatgacatctgtcctaattagtttcttaaatacatttactacttaatggttttgaagcaactgttt

SEQ ID NO: 58194 - DNA, 120 bp, Artificial Sequence
  ENSG00000070961_38 (sequence is synthesized)
tttactacttaatggttttgaagcaactgtttaatttttaaaatttttgaaaacttgctaataaccttttgttcagaatttagtagattgtttaatgcaggacatcaactacataatgaa

SEQ ID NO: 58195 - DNA, 120 bp, Artificial Sequence
  ENSG00000070961_39 (sequence is synthesized)
agatgcttgaaatgcttttgttatttcaggcaaatcaaattaaatcagactatcaaactacaagagaaccttagtcttttttgtttttgtctaaacatgttagtttagtgatgtcttggt

SEQ ID NO: 58196 - DNA, 120 bp, Artificial Sequence
  ENSG00000070961_40 (sequence is synthesized)
gaactgtgagtgaactgtattgatttttctaatctttagagaccttcacacagcatgagggctgttggcattttgaaaaaggttaataagtagaagcatacatgttttccttttgttttt

SEQ ID NO: 58197 - DNA, 120 bp, Artificial Sequence
  ENSG00000070961_41 (sequence is synthesized)
gaaacttgtttgtaaacataaataaatatgcccttttattaaataaattcatggcaatgtttttttaaaagacatttcagcttctttactcagttctgcatatacagtgcatcagtctgt

SEQ ID NO: 58198 - DNA, 120 bp, Artificial Sequence
  ENSG00000070961_42 (sequence is synthesized)
tctctttgaccacaattggaatacatttcaagatggtaacagccccatgaagtaccgctttaattccttgctggtaatctaatagaatcagattaagaaaattaacacaattttaccatt

SEQ ID NO: 58199 - DNA, 120 bp, Artificial Sequence
  ENSG00000070961_43 (sequence is synthesized)
tgacatactcttcattgaatttagtttgtctaaaatagtctcacaggtaaaaaacataacaacaatgaccaccattgtctttgatacatttattttaattcttaagtggccaaataacag

SEQ ID NO: 58200 - DNA, 120 bp, Artificial Sequence
  ENSG00000070961_44 (sequence is synthesized)
attaggtaaaatgagattacatgaaaaggttctaaaatgatatatttagatgcaataattaaccatatgctagaatgcccacctctaagccaattggattctttagctctctttttcttt

SEQ ID NO: 58201 - DNA, 120 bp, Artificial Sequence
  ENSG00000070961_45 (sequence is synthesized)
ccttcatctaccttcttctcttttttgcctctgtctttaccctttagaaactggcatgtgttagggcccagatttcaccagatacacaatcctcaggctgacataaagtttacgaggact

SEQ ID NO: 58202 - DNA, 120 bp, Artificial Sequence
  ENSG00000070961_46 (sequence is synthesized)
gctactataactgagagtgctgaccaagcaaagaaacatttagttgatggtgcttgatatttttggtgggtgggggaaatctttttctcaccatcaaatctttgcagtaatcctctgcag

SEQ ID NO: 58203 - DNA, 120 bp, Artificial Sequence
  ENSG00000070961_47 (sequence is synthesized)
gtcttagaaacacattggctctgtcagcatttgtaattgtacatttattcatcaggtatttatagtgaatcatactgtaaaaaagaggtagcatgatatgctggaaagcatattagacta

SEQ ID NO: 58204 - DNA, 120 bp, Artificial Sequence
  ENSG00000070961_48 (sequence is synthesized)
ggagtcaagacctggtttctagtcttggttttgccattaatgtgctgcatgatcttgggaaaatcatttaccctaaataagggtggtggactatcttgaagaaccctttcaactctaaaa

SEQ ID NO: 58205 - DNA, 120 bp, Artificial Sequence
  ENSG00000070961_49 (sequence is synthesized)
attgaccctatcaactggagagcccacaaggcatagggaatagagaaaagggaaatgttttcagttttcttttttattttggttatgcttaaatatgaatgtaattaccaaaagatttag

SEQ ID NO: 58206 - DNA, 120 bp, Artificial Sequence
  ENSG00000070961_50 (sequence is synthesized)
aagtgcatgtgctttggaggatttgtattgagcttttacagtattcatttttcaactcaaggcaatggctttctacaccaactctaatccataaacgggtcttatgacatctatgaagta

SEQ ID NO: 58207 - DNA, 120 bp, Artificial Sequence
  ENSG00000070961_51 (sequence is synthesized)
gtagcaagacatgcttagtgtgtatttctctctttgagacactgtaatttctaccagaaatttccagagcattatgtaggtagaaaaaaatgcaagcaagctgttaaagatcttggatcc

SEQ ID NO: 58208 - DNA, 120 bp, Artificial Sequence
  ENSG00000070961_52 (sequence is synthesized)
cattatatagtatgtatagctgaaatctgtaattcaatcactttttctcttttatcctctaaccaaaaaattgtttaattttgcatcccaaatgtttttaatctttgtatattttttaaa

SEQ ID NO: 58209 - DNA, 120 bp, Artificial Sequence
  ENSG00000070961_53 (sequence is synthesized)
aatccttttctcctcatcattgccttttttgtggttgtaaatagacttacttgcactttgaagatgagttactccttgtcatcttacaaatatgtgatatggtaattttcataacagatg

SEQ ID NO: 58210 - DNA, 120 bp, Artificial Sequence
  ENSG00000070961_54 (sequence is synthesized)
tcagttttgaaccaagaattggtgatttgtttataagaaaaaaactggcttcatttctgtgaaattgctctttgaaaatttctttttacacgtgtaagccaactgagataccgtgatggt

SEQ ID NO: 58211 - DNA, 120 bp, Artificial Sequence
  ENSG00000070961_55 (sequence is synthesized)
gttgatttctttcaatgatgcttaccatctattttagccactgagccttttattatttgtctatttgtaaagtttatttgtcttaactcatttaataaatatactgtttatctgtttctg

SEQ ID NO: 58212 - DNA, 120 bp, Artificial Sequence
  ENSG00000070961_56 (sequence is synthesized)
agcgtgagtagggagccccggctggtggacgccgagcctctcggctccttggccgccccatccccgaggtgcagctgcacctccgcgtggcgccccgagccctgcgagccggctgcggac

SEQ ID NO: 58213 - DNA, 120 bp, Artificial Sequence
  ENSG00000070961_57 (sequence is synthesized)
gcgctgaggacggagcccccatcctctgcgtttcccgctgccccttaacgccccgcgaccctcccgcagcctgcctttccttccccctcggaaaatggttcccactgccgggcgagatgt

SEQ ID NO: 58214 - DNA, 120 bp, Artificial Sequence
  ENSG00000070961_58 (sequence is synthesized)
attttgggtcatgcattctatcaacttgtagtagtctttacactcttatttgctggtaagaattcagtgtctaataaagcttcagttaattgtttcttttccaagctaatcatccaagat

SEQ ID NO: 58215 - DNA, 120 bp, Artificial Sequence
  ENSG00000070961_59 (sequence is synthesized)
gttataatgttacaaattttcaagagcctaaattctactcctgacttcccatttatctttaatttcttcttaatcagtgagtgcttagtaaatttgggaggacaataagctagatagtag

SEQ ID NO: 58216 - DNA, 120 bp, Artificial Sequence
  ENSG00000070961_60 (sequence is synthesized)
aataaacaggagaataaacagtcctgatgtcttaccctggctctccactaatttagatatgtgatcctgagattatcaccatagttttgggagcttctgtttccttgcctataaaacaag

SEQ ID NO: 58217 - DNA, 120 bp, Artificial Sequence
  ENSG00000070961_61 (sequence is synthesized)
tccttccatgctgccatttcagatcaaataaaaggtctagctaagttgtaatttgtatacctccttgaaatctaatttggtatgataattacaaaatagtcatttttcattctttcagga

SEQ ID NO: 58218 - DNA, 120 bp, Artificial Sequence
  ENSG00000070961_62 (sequence is synthesized)
tgtttgctatgtgctaggcactgttctaagtaccttaaatatattatctcagataactttcacagtaaccctatgaattagattgtgttacctcccttttacaatgaggcacagaggtta

SEQ ID NO: 58219 - DNA, 120 bp, Artificial Sequence
  ENSG00000070961_63 (sequence is synthesized)
aataacctatccatatatgcttactatgtgtctggcacagacctatgccatgtatatgacatggtctttgctatcacagtttttaagtttttttagaacactatactgtgaaacaatttc

SEQ ID NO: 58220 - DNA, 120 bp, Artificial Sequence
  ENSG00000070961_64 (sequence is synthesized)
ttttcaacgaaataaatgcccggaaaattcatggtgaaagaaatgtattcgaaggaatctttaacaatgccatcttctgcacaattgttttaggcacttttgtggtacagcttatttcaa

SEQ ID NO: 58221 - DNA, 120 bp, Artificial Sequence
  ENSG00000070961_65 (sequence is synthesized)
gtggcagcgggagcagctgcgccgccagcgtggagcgggaggcgtgtgggtgtggagaaaagggagcgccagaccggaacggatgtgtatatctcatgattgatatggagaaactagtca

SEQ ID NO: 58222 - DNA, 120 bp, Artificial Sequence
  ENSG00000070961_66 (sequence is synthesized)
aattgaaaacatctcccaatgaaggtgagttttattatgcttgtttttggttctttgtgcaaagagttctatatatttggcttataaatgagcatgcttatattatcttggcgattgtat

SEQ ID NO: 58223 - DNA, 120 bp, Artificial Sequence
  ENSG00000070961_67 (sequence is synthesized)
ggaggaacaaacttaaaggcagggtaccttataaaaagccattgcagtaggttgggcaacaagcaacagagacatgatgcagggcaagtttgaggtagaatccacaggacttactggctt

SEQ ID NO: 58224 - DNA, 120 bp, Artificial Sequence
  ENSG00000070961_68 (sequence is synthesized)
ctaaggatgtaggataagagagctgaaagaagaggtacaggtgactcttaggtttctgctagacaggtaaaggaaacatggtttcacttttagacacctgaatcgatacccactttacag

SEQ ID NO: 58225 - DNA, 120 bp, Artificial Sequence
  ENSG00000070961_69 (sequence is synthesized)
gtggaactatgactctcctcttacagtgaggtaggggcaggatgtggattctaaagtcattagaatatgatggaattagatggaaattgaaggtatgggaataggtaaggtaacacttaa

SEQ ID NO: 58226 - DNA, 120 bp, Artificial Sequence
  ENSG00000070961_70 (sequence is synthesized)
aagatatggattgtgagccacccttaaccctaaacaaaagaataccaacattttactcatgtaatctgggtagtaaaaccagaagggtagaaagccaaccagaaaagaattgcctaatgg

SEQ ID NO: 58227 - DNA, 120 bp, Artificial Sequence
  ENSG00000070961_71 (sequence is synthesized)
ttgcctggggaaatggtgctttaaaaagccttctgtaaataaatactgcaaacaaattagtagatgacaactgaaaacgaagcctgagctaagtctggcagtggaattggaaagagatta

SEQ ID NO: 58228 - DNA, 120 bp, Artificial Sequence
  ENSG00000070961_72 (sequence is synthesized)
tgctgggcctgccccacagtattcgctaagatagatctgggtccatgcccaagaattcacgtttctaacaagttcccaggagtttctgattgttctgtggaccacactttgagagctact

SEQ ID NO: 58229 - DNA, 120 bp, Artificial Sequence
  ENSG00000070961_73 (sequence is synthesized)
ctcaagtaggtgatgacttgtctatcaaaacttgtttactttaaatttaaaaagtatattaaatgcctcttaaaaaatacttaatatttaagctgaagcttaatattttaggttagttaa

SEQ ID NO: 58230 - DNA, 120 bp, Artificial Sequence
  ENSG00000070961_74 (sequence is synthesized)
aaaatataatcctgttctgtttctcaagtttttaaaccctaaaggtttcctgagaattgctgagcccctgagtagttgtgaatgtctattaggaaacatatcttttctaggactcaccgc

SEQ ID NO: 58231 - DNA, 120 bp, Artificial Sequence
  ENSG00000070985_0 (sequence is synthesized)
gaggccaccatgcaggatgtccaaggcccccgtcccggaagccccggggatgctgaagaccggcgggagctgggcttgcacaggggcgaggtcaactttggagggtctgggaagaagcga

SEQ ID NO: 58232 - DNA, 120 bp, Artificial Sequence
  ENSG00000070985_1 (sequence is synthesized)
ggcaagtttgtacgggtgccgagcggagtggccccgtctgtgctctttgacctgctgcttgctgagtggcacctgccggcccccaacctggtggtgtccctggtgggtgaggagcagcct

SEQ ID NO: 58233 - DNA, 120 bp, Artificial Sequence
  ENSG00000070985_2 (sequence is synthesized)
ttcgccatgaagtcctggctgcgggatgtgctgcgcaaggggctggtgaaggcggctcagagcacaggagcctggatcctgaccagtgccctccgcgtgggcctggccaggcatgtcggg

SEQ ID NO: 58234 - DNA, 120 bp, Artificial Sequence
  ENSG00000070985_3 (sequence is synthesized)
caggccgtgcgcgaccactcgctggccagcacgtccaccaaggtccgtgtggttgctgtcggcatggcctcgctgggccgcgtcctgcaccgccgcattctggaggaggcccaggaggat

SEQ ID NO: 58235 - DNA, 120 bp, Artificial Sequence
  ENSG00000070985_4 (sequence is synthesized)
tttcctgtccactaccctgaggatgacggcggcagccagggccccctctgttcactggacagcaacctctcccacttcatcctggtggagccaggccccccggggaagggcgatgggctg

SEQ ID NO: 58236 - DNA, 120 bp, Artificial Sequence
  ENSG00000070985_5 (sequence is synthesized)
acggagctgcggctgaggctggagaagcacatctcggagcagagggcgggctacgggggcactggcagcatcgagatccctgtcctctgcttgctggtcaatggtgatcccaacaccttg

SEQ ID NO: 58237 - DNA, 120 bp, Artificial Sequence
  ENSG00000070985_6 (sequence is synthesized)
gagaggatctccagggccgtggagcaggctgccccgtggctgatcctggtaggctcggggggcatcgccgatgtgcttgctgccctagtgaaccagccccacctcctggtgcccaaggtg

SEQ ID NO: 58238 - DNA, 120 bp, Artificial Sequence
  ENSG00000070985_7 (sequence is synthesized)
gccgagaagcagtttaaggagaagttccccagcaagcatttctcttgggaggacatcgtgcgctggaccaagctgctgcagaacatcacctcacaccagcacctgctcaccgtgtatgac

SEQ ID NO: 58239 - DNA, 120 bp, Artificial Sequence
  ENSG00000070985_8 (sequence is synthesized)
ttcgagcaggagggctccgaggagctggacacggtcatcctgaaggcgctggtgaaagcctgcaagagccacagccaggagcctcaggactatctggatgagctcaagctggccgtggcc

SEQ ID NO: 58240 - DNA, 120 bp, Artificial Sequence
  ENSG00000070985_9 (sequence is synthesized)
tgggaccgcgtggacatcgccaagagtgagatcttcaatggggacgtggagtggaagtcctgtgacctggaggaggtgatggtggacgccctggtcagcaacaagcccgagtttgtgcgc

SEQ ID NO: 58241 - DNA, 120 bp, Artificial Sequence
  ENSG00000070985_10 (sequence is synthesized)
ctctttgtggacaacggcgcagacgtggccgacttcctgacgtatgggcggctgcaggagctctaccgctccgtgtcacgcaagagcctgctcttcgacctgctgcagcggaagcaggag

SEQ ID NO: 58242 - DNA, 120 bp, Artificial Sequence
  ENSG00000070985_11 (sequence is synthesized)
gaggcccggctgacgctggccggcctgggcacccagcaggcccgggagccacccgcggggccaccggccttctccctgcacgaggtctcccgcgtactcaaggacttcctgcaggacgcc

SEQ ID NO: 58243 - DNA, 120 bp, Artificial Sequence
  ENSG00000070985_12 (sequence is synthesized)
tgccgaggcttctaccaggacggccggccaggggaccgcaggagggcggagaagggcccggccaagcggcccacgggccagaagtggctgctggacctgaaccagaagagcgagaacccc

SEQ ID NO: 58244 - DNA, 120 bp, Artificial Sequence
  ENSG00000070985_13 (sequence is synthesized)
tggcgggacctgttcctgtgggccgtgctgcagaaccgccacgagatggccacctacttctgggccatgggccaggaaggtgtggcagccgcactggccgcctgcaaaatcctcaaagag

SEQ ID NO: 58245 - DNA, 120 bp, Artificial Sequence
  ENSG00000070985_14 (sequence is synthesized)
atgtcgcacctggagacggaggccgaggcggcccgagccacgcgcgaggcgaaatacgagcggctggcccttgacctcttctccgagtgctacagcaacagtgaggcccgcgccttcgcc

SEQ ID NO: 58246 - DNA, 120 bp, Artificial Sequence
  ENSG00000070985_15 (sequence is synthesized)
ctgctggtgcgccggaaccgctgctggagcaagaccacctgcctgcacctggccaccgaggctgacgccaaggccttctttgcccacgacggcgttcaggccttcctgaccaggatctgg

SEQ ID NO: 58247 - DNA, 120 bp, Artificial Sequence
  ENSG00000070985_16 (sequence is synthesized)
cagtgaggaagctcccctgaggacaggcctggaggacctgcaggacctggacagcctggacacggagaagagcccgctgtatggcctgcagagccgggtggaggagctggtggaggcgcc

SEQ ID NO: 58248 - DNA, 120 bp, Artificial Sequence
  ENSG00000070985_17 (sequence is synthesized)
gagggctcagggtgaccgaggcccacgtgctgtcttcctgctcacacgctggcggaaattctggggcgctcccgtgactgtgttcctggggaacgtggtcatgtacttcgccttcctctt

SEQ ID NO: 58249 - DNA, 120 bp, Artificial Sequence
  ENSG00000070985_18 (sequence is synthesized)
cctgttcacctacgtcctgctggtggacttcaggccgcccccccagggcccctcagggcccgaggtcaccctctacttctgggtctttacgctggtgctggaggaaatccggcagggctt

SEQ ID NO: 58250 - DNA, 120 bp, Artificial Sequence
  ENSG00000070985_19 (sequence is synthesized)
cttcacagacgaggacacacacctggtgaagaagttcacactgtatgtgggggacaactggaacaagtgtgacatggtggccatcttcctgttcatcgtgggtgtcacctgcaggatgct

SEQ ID NO: 58251 - DNA, 120 bp, Artificial Sequence
  ENSG00000070985_20 (sequence is synthesized)
gccgtcggcgtttgaggctggccgcacagtcctcgccatggacttcatggtgttcacgctgcggctgatccatatctttgccatacacaagcagctgggccccaagatcatcgtggtaga

SEQ ID NO: 58252 - DNA, 120 bp, Artificial Sequence
  ENSG00000070985_21 (sequence is synthesized)
gcgcatgatgaaggacgtcttcttcttcctcttctttctgagcgtgtggctcgtggcctacggtgtcaccacccaggcgctgctgcacccccatgacggccgcctggagtggatcttccg

SEQ ID NO: 58253 - DNA, 120 bp, Artificial Sequence
  ENSG00000070985_22 (sequence is synthesized)
ccgggtgctctaccggccctacctgcagatcttcggccagatcccactggacgagattgatgaagcccgtgtgaactgctccacccacccactgctgctggaggactcaccatcctgccc

SEQ ID NO: 58254 - DNA, 120 bp, Artificial Sequence
  ENSG00000070985_23 (sequence is synthesized)
cagcctctatgccaactggctggtcatcctcctgctggtcaccttcctgttggtcaccaatgtgctgctcatgaacctgctcatcgccatgttcagctacacgttccaggtggtgcaggg

SEQ ID NO: 58255 - DNA, 120 bp, Artificial Sequence
  ENSG00000070985_24 (sequence is synthesized)
caacgcagacatgttctggaagttccagcgctacaacctgattgtggagtaccacgagcgccccgccctggccccgcccttcatcctgctcagccacctgagcctgacgctccgccgggt

SEQ ID NO: 58256 - DNA, 120 bp, Artificial Sequence
  ENSG00000070985_25 (sequence is synthesized)
cttcaagaaggaggctgagcacaagcgggagcacctggagagagacctgccagaccccctggaccagaaggtcgtcacctgggagacagtccagaaggagaacttcctgagcaagatgga

SEQ ID NO: 58257 - DNA, 120 bp, Artificial Sequence
  ENSG00000070985_26 (sequence is synthesized)
gaagcggaggagggacagcgagggggaggtgctgcggaaaaccgcccacagagtggacttcattgccaagtacctcgggggtctgagagagcaagaaaagcgcatcaagtgtctggagtc

SEQ ID NO: 58258 - DNA, 120 bp, Artificial Sequence
  ENSG00000070985_27 (sequence is synthesized)
acagatcaactactgctcggtgctcgtgtcctccgtggctgacgtgctggcccagggtggcggcccccggagctctcagcactgtggcgagggaagccagctggtggctgctgaccacag

SEQ ID NO: 58259 - DNA, 120 bp, Artificial Sequence
  ENSG00000070985_28 (sequence is synthesized)
aggtggtttagatggctgggaacaacccggggctggccagcctccctcggacacctgagctgcttggcctgccacgtgtggggccacctctcctcagctggccaccctgcacgttgtgca

SEQ ID NO: 58260 - DNA, 120 bp, Artificial Sequence
  ENSG00000070985_29 (sequence is synthesized)
ctgacctttgccgacctccagcggaaccccccagggggcaccagccccccagcagacaatggccctcctggtgcctcaccacagaccctcacccaaaggaaccgctccttgtccctcctg

SEQ ID NO: 58261 - DNA, 120 bp, Artificial Sequence
  ENSG00000070985_30 (sequence is synthesized)
gcctccccggaggcacagcagtgtcatggggctgtctcccctgacaggcacaactccccgggcagaaaacgtgccccaccgcatccctacctggaaactgaccagcctgcactgtggaaa

SEQ ID NO: 58262 - DNA, 120 bp, Artificial Sequence
  ENSG00000070985_31 (sequence is synthesized)
agctggccctgtggcgtgacgggggagcacccccatccagactgcgaagctgctctggggtctgcacccacccctgccctgacttgtgttgcctgacaagagactcatctttttttgaaa

SEQ ID NO: 58263 - DNA, 120 bp, Artificial Sequence
  ENSG00000071051_0 (sequence is synthesized)
gggagcggcgcagacaaagagcggcgcctgggcgggcgcagcgcggccaccgccccgggacccgcgccgctgccctccggctccgcgggcggcccacggcgagatttcatgtgttctttg

SEQ ID NO: 58264 - DNA, 120 bp, Artificial Sequence
  ENSG00000071051_1 (sequence is synthesized)
tttgtatacaagcgacgtcccagattataattctctgctgagatttgagttggatttgaggatttggagaatccctgcagctttgtaacttcagaggtgtaattagctgaaaacatcatc

SEQ ID NO: 58265 - DNA, 120 bp, Artificial Sequence
  ENSG00000071051_2 (sequence is synthesized)
gttttgaagagttctgcgttttgccagtcacctctcaactgtgtgccaaagaaggactccatgaaagatgacagaagaagttattgtgatagccaagtgggactacaccgcccagcagga

SEQ ID NO: 58266 - DNA, 120 bp, Artificial Sequence
  ENSG00000071051_3 (sequence is synthesized)
ccaggagctggacatcaagaagaacgagcggctgtggttgctggacgactccaagacgtggtggcgggtgaggaacgcggccaacaggacgggctatgtaccgtccaactacgtggagcg

SEQ ID NO: 58267 - DNA, 120 bp, Artificial Sequence
  ENSG00000071051_4 (sequence is synthesized)
gaagaacagcctgaagaagggctccctcgtgaagaacctgaaggacacactaggcctcggcaagacgcgcaggaagaccagcgcgcgggatgcgtcccccacgcccagcacggacgccga

SEQ ID NO: 58268 - DNA, 120 bp, Artificial Sequence
  ENSG00000071051_5 (sequence is synthesized)
gtaccccgccaatggcagcggcgccgaccgcatctacgacctcaacatcccggccttcgtcaagttcgcctatgtggccgagcgggaggatgagttgtccctggtgaaggggtcgcgcgt

SEQ ID NO: 58269 - DNA, 120 bp, Artificial Sequence
  ENSG00000071051_6 (sequence is synthesized)
caccgtcatggagaagtgcagcgacggttggtggcggggcagctacaacgggcagatcggctggttcccctccaactacgtcttggaggaggtggacgaggcggctgcggagtccccaag

SEQ ID NO: 58270 - DNA, 120 bp, Artificial Sequence
  ENSG00000071051_7 (sequence is synthesized)
cttcctgagcctgcgcaagggcgcctcgctgagcaatggccagggctcccgcgtgctgcatgtggtccagacgctgtaccccttcagctcagtcaccgaggaggagctcaacttcgagaa

SEQ ID NO: 58271 - DNA, 120 bp, Artificial Sequence
  ENSG00000071051_8 (sequence is synthesized)
gggggagaccatggaggtgattgagaagccggagaacgaccccgagtggtggaaatgcaaaaatgcccggggccaggtgggcctcgtccccaaaaactacgtggtggtcctcagtgacgg

SEQ ID NO: 58272 - DNA, 120 bp, Artificial Sequence
  ENSG00000071051_9 (sequence is synthesized)
gcctgccctgcaccctgcgcacgccccacagataagctacaccgggccctcgtccagcgggcgcttcgcgggcagagagtggtactacgggaacgtgacgcggcaccaggccgagtgcgc

SEQ ID NO: 58273 - DNA, 120 bp, Artificial Sequence
  ENSG00000071051_10 (sequence is synthesized)
acttcctcattagggacagcgagtcctcgcccagcgacttctccgtgtcccttaaagcgtcagggaagaacaaacacttcaaggtgcagctcgtggacaatgtctactgcattgggcagc

SEQ ID NO: 58274 - DNA, 120 bp, Artificial Sequence
  ENSG00000071051_11 (sequence is synthesized)
ggcgcttccacaccatggacgagctggtggaacactacaaaaaggcgcccatcttcaccagcgagcacggggagaagctctacctcgtcagggccctgcagtgacggcgccccggcccca

SEQ ID NO: 58275 - DNA, 120 bp, Artificial Sequence
  ENSG00000071051_12 (sequence is synthesized)
cactcgcctcccgggccccacggtggagctgcccgcccggccttgtggcagaggctcctcccgcggggacggccccgacggcttctctgcgagtctctctttatgttcaggtcgcttggt

SEQ ID NO: 58276 - DNA, 120 bp, Artificial Sequence
  ENSG00000071051_13 (sequence is synthesized)
cggttcgtctcccatttgccatccaggcctcacacccacactcgagcccacccggccggccagctttagaggaggggaggagcagggcgagttcacattattccttttccatcggaagtg

SEQ ID NO: 58277 - DNA, 120 bp, Artificial Sequence
  ENSG00000071051_14 (sequence is synthesized)
gcgctcgtgcattcaactcgttcccgctcatggaacccctctttaaaaagacgcagggcacctgtgagcgcaggagcgagcctaaggccacccagcggcagcgcccgtgtcctgggcact

SEQ ID NO: 58278 - DNA, 120 bp, Artificial Sequence
  ENSG00000071051_15 (sequence is synthesized)
cagcgtgctgggcagagcaggtgcgatggccccagtcctagcagccctcgcccatgtcctgtgcccttacatggctcccggactgtgcagggagccgatacgtttgctgatagcaatact

SEQ ID NO: 58279 - DNA, 120 bp, Artificial Sequence
  ENSG00000071051_16 (sequence is synthesized)
ggaaccaccgggtgcgatggcagtgaggagactgcccagtgcctttggggctgtgcttgcaataaagaatttcctggaaaggcagtctgcaaaagagggaaccggtgactcagaaagaca

SEQ ID NO: 58280 - DNA, 120 bp, Artificial Sequence
  ENSG00000071051_17 (sequence is synthesized)
gatgttttggtaatttaccccaaatgtgccatccacatagtgctttttcctcttgcccttcggcttgtttgaatctcacaattatgtatttaattctcaaagaaatatgtatctgtagcc

SEQ ID NO: 58281 - DNA, 120 bp, Artificial Sequence
  ENSG00000071051_18 (sequence is synthesized)
atatgtatctgtagccgtttgttgacactaatacagatgattaaggaaaacagctgatctttggggaagggagctaccaacactttatacacacacacacgtgcacacacacacacacac

SEQ ID NO: 58282 - DNA, 120 bp, Artificial Sequence
  ENSG00000071051_19 (sequence is synthesized)
tattatttacagggaaatttttcagggtttacaaaagagtatgtgattggtagtaagagacacacagaatgtttatgaagaaattgcattttctttttcctttacatttgaacttcttta

SEQ ID NO: 58283 - DNA, 120 bp, Artificial Sequence
  ENSG00000071051_20 (sequence is synthesized)
tagtttaaatataacgtcttgagatggcacattcctacgattgaagaaggggtcttgagatcccctaaacttgcatacccagttttttggatattgtaataaaaaaaagtattatgacaa

SEQ ID NO: 58284 - DNA, 120 bp, Artificial Sequence
  ENSG00000071051_21 (sequence is synthesized)
tggagtgaagtggtcgtttattggctggccctctgatatgaggtggtggtgaattggtgggcgtcagtgcagtaagtgagcgagccggacgtcgattgactggtcttcagaagcagaagg

SEQ ID NO: 58285 - DNA, 120 bp, Artificial Sequence
  ENSG00000071051_22 (sequence is synthesized)
tggtgtgacttagtttttgattgctggatttcactggagtgaagtggtcgtttattggctggccctctgatatgaggtggtggtgaattggtgggcgtcagtgcagtaagtgagcgagcc

SEQ ID NO: 58286 - DNA, 120 bp, Artificial Sequence
  ENSG00000071051_23 (sequence is synthesized)
ggagcttttgtgcccggcttcaggctctgcgccctgccccagatttacaggactctaacagccacctgaatgaaccaaagtttctcacaatcgctcggctctctcggtttttttcagggc

SEQ ID NO: 58287 - DNA, 120 bp, Artificial Sequence
  ENSG00000071054_0 (sequence is synthesized)
atggcgaacgactcccctgcaaaaagtctggtggacatcgacctctcctccctgcgggatcctgctgggatttttgagctggtggaagtggttggaaatggcacctatggacaagtctat

SEQ ID NO: 58288 - DNA, 120 bp, Artificial Sequence
  ENSG00000071054_1 (sequence is synthesized)
aagggtcgacatgttaaaacgggtcagttggcagccatcaaagttatggatgtcactgaggatgaagaggaagaaatcaaactggagataaatatgctaaagaaatactctcatcacaga

SEQ ID NO: 58289 - DNA, 120 bp, Artificial Sequence
  ENSG00000071054_2 (sequence is synthesized)
aacattgcaacatattatggtgctttcatcaaaaagagccctccaggacatgatgaccaactctggcttgttatggagttctgtggggctgggtccattacagaccttgtgaagaacacc

SEQ ID NO: 58290 - DNA, 120 bp, Artificial Sequence
  ENSG00000071054_3 (sequence is synthesized)
aaagggaacacactcaaagaagactggatcgcttacatctccagagaaatcctgaggggactggcacatcttcacattcatcatgtgattcaccgggatatcaagggccagaatgtgttg

SEQ ID NO: 58291 - DNA, 120 bp, Artificial Sequence
  ENSG00000071054_4 (sequence is synthesized)
ctgactgagaatgcagaggtgaaacttgttgactttggtgtgagtgctcagctggacaggactgtggggcggagaaatacgttcataggcactccctactggatggctcctgaggtcatc

SEQ ID NO: 58292 - DNA, 120 bp, Artificial Sequence
  ENSG00000071054_5 (sequence is synthesized)
gcctgtgatgagaacccagatgccacctatgattacagaagtgatctttggtcttgtggcattacagccattgagatggcagaaggtgctccccctctctgtgacatgcatccaatgaga

SEQ ID NO: 58293 - DNA, 120 bp, Artificial Sequence
  ENSG00000071054_6 (sequence is synthesized)
gcactgtttctcattcccagaaaccctcctccccggctgaagtcaaaaaaatggtcgaagaagttttttagttttatagaagggtgcctggtgaagaattacatgcagcggccctctaca

SEQ ID NO: 58294 - DNA, 120 bp, Artificial Sequence
  ENSG00000071054_7 (sequence is synthesized)
gagcagcttttgaaacatccttttataagggatcagccaaatgaaaggcaagttagaatccagcttaaggatcatatagatcgtaccaggaagaagagaggcgagaaagatgaaactgag

SEQ ID NO: 58295 - DNA, 120 bp, Artificial Sequence
  ENSG00000071054_8 (sequence is synthesized)
tatgagtacagtgggagtgaggaagaagaggaggaagtgcctgaacaggaaggagagccaagttccattgtgaacgtgcctggtgagtctactcttcgccgagatttcctgagactgcag

SEQ ID NO: 58296 - DNA, 120 bp, Artificial Sequence
  ENSG00000071054_9 (sequence is synthesized)
caggagaacaaggaacgttccgaggctcttcggagacaacagttactacaggagcaacagctccgggagcaggaagaatataaaaggcaactgctggcagagagacagaagcggattgag

SEQ ID NO: 58297 - DNA, 120 bp, Artificial Sequence
  ENSG00000071054_10 (sequence is synthesized)
cagcagaaagaacagaggcgacggctagaagagcaacaaaggagagagcgggaagctagaaggcagcaggaacgtgaacagcgaaggagagaacaagaagaaaagaggcgtctagaggag

SEQ ID NO: 58298 - DNA, 120 bp, Artificial Sequence
  ENSG00000071054_11 (sequence is synthesized)
ttggagagaaggcgcaaagaagaagaggagaggagacgggcagaagaagaaaagaggagagttgaaagagaacaggagtatatcaggcgacagctagaagaggagcagcggcacttggaa

SEQ ID NO: 58299 - DNA, 120 bp, Artificial Sequence
  ENSG00000071054_12 (sequence is synthesized)
gtccttcagcagcagctgctccaggagcaggccatgttactggagtgccgatggcgggagatggaggagcaccggcaggcagagaggctccagaggcagttgcaacaagaacaagcatat

SEQ ID NO: 58300 - DNA, 120 bp, Artificial Sequence
  ENSG00000071054_13 (sequence is synthesized)
ctcctgtctctacagcatgaccataggaggccgcacccgcagcactcgcagcagccgccaccaccgcagcaggaaaggagcaagccaagcttccatgctcccgagcccaaagcccactac

SEQ ID NO: 58301 - DNA, 120 bp, Artificial Sequence
  ENSG00000071054_14 (sequence is synthesized)
gagcctgctgaccgagcgcgagaggtggaagatagatttaggaaaactaaccacagctcccctgaagcccagtctaagcagacaggcagagtattggagccaccagtgccttcccgatca

SEQ ID NO: 58302 - DNA, 120 bp, Artificial Sequence
  ENSG00000071054_15 (sequence is synthesized)
gtgagaacaacatctcgctcccctgttctgtcccgtcgagattccccactgcagggcagtgggcagcagaatagccaggcaggacagagaaactccaccagtattgagcccaggcttctg

SEQ ID NO: 58303 - DNA, 120 bp, Artificial Sequence
  ENSG00000071054_16 (sequence is synthesized)
tgggagagagtggagaagctggtgcccagacctggcagtggcagctcctcagggtccagcaactcaggatcccagcccgggtctcaccctgggtctcagagtggctccggggaacgcttc

SEQ ID NO: 58304 - DNA, 120 bp, Artificial Sequence
  ENSG00000071054_17 (sequence is synthesized)
agagtgagatcatcatccaagtctgaaggctctccatctcagcgcctggaaaatgcagtgaaaaaacctgaagataaaaaggaagttttcagacccctcaagcctgctgatctgaccgca

SEQ ID NO: 58305 - DNA, 120 bp, Artificial Sequence
  ENSG00000071054_18 (sequence is synthesized)
ctggccaaagagcttcgagcagtggaagatgtacggccacctcacaaagtaacggactactcctcatccagtgaggagtcggggacgacggatgaggaggacgacgatgtggagcaggaa

SEQ ID NO: 58306 - DNA, 120 bp, Artificial Sequence
  ENSG00000071054_19 (sequence is synthesized)
ggggctgacgagtccacctcaggaccagaggacaccagagcagcgtcatctctgaatttgagcaatggtgaaacggaatctgtgaaaaccatgattgtccatgatgatgtagaaagtgag

SEQ ID NO: 58307 - DNA, 120 bp, Artificial Sequence
  ENSG00000071054_20 (sequence is synthesized)
ccggccatgaccccatccaaggagggcactctaatcgtccgccagactcagtccgctagtagcacactccagaaacacaaatcttcctcctcctttacaccttttatagaccccagatta

SEQ ID NO: 58308 - DNA, 120 bp, Artificial Sequence
  ENSG00000071054_21 (sequence is synthesized)
ctacagatttctccatctagcggaacaacagtgacatctgtggtgggattttcctgtgatgggatgagaccagaagccataaggcaagatcctacccggaaaggctcagtggtcaatgtg

SEQ ID NO: 58309 - DNA, 120 bp, Artificial Sequence
  ENSG00000071054_22 (sequence is synthesized)
aatcctaccaacactaggccacagagtgacaccccggagattcgtaaatacaagaagaggtttaactctgagattctgtgtgctgccttatggggagtgaatttgctagtgggtacagag

SEQ ID NO: 58310 - DNA, 120 bp, Artificial Sequence
  ENSG00000071054_23 (sequence is synthesized)
agtggcctgatgctgctggacagaagtggccaagggaaggtctatcctcttatcaaccgaagacgatttcaacaaatggacgtacttgagggcttgaatgtcttggtgacaatatctggc

SEQ ID NO: 58311 - DNA, 120 bp, Artificial Sequence
  ENSG00000071054_24 (sequence is synthesized)
aaaaaggataagttacgtgtctactatttgtcctggttaagaaataaaatacttcacaatgatccagaagttgagaagaagcagggatggacaaccgtaggggatttggaaggatgtgta

SEQ ID NO: 58312 - DNA, 120 bp, Artificial Sequence
  ENSG00000071054_25 (sequence is synthesized)
cattataaagttgtaaaatatgaaagaatcaaatttctggtgattgctttgaagagttctgtggaagtctatgcgtgggcaccaaagccatatcacaaatttatggcctttaagtcattt

SEQ ID NO: 58313 - DNA, 120 bp, Artificial Sequence
  ENSG00000071054_26 (sequence is synthesized)
ggagaattggtacataagccattactggtggatctcactgttgaggaaggccagaggttgaaagtgatctatggatcctgtgctggattccatgctgttgatgtggattcaggatcagtc

SEQ ID NO: 58314 - DNA, 120 bp, Artificial Sequence
  ENSG00000071054_27 (sequence is synthesized)
tatgacatttatctaccaacacatatccagtgtagcatcaaaccccatgcaatcatcatcctccccaatacagatggaatggagcttctggtgtgctatgaagatgagggggtttatgta

SEQ ID NO: 58315 - DNA, 120 bp, Artificial Sequence
  ENSG00000071054_28 (sequence is synthesized)
aacacatatggaaggatcaccaaggatgtagttctacagtggggagagatgcctacatcagtagcatatattcgatccaatcagacaatgggctggggagagaaggccatagagatccga

SEQ ID NO: 58316 - DNA, 120 bp, Artificial Sequence
  ENSG00000071054_29 (sequence is synthesized)
tctgtggaaactggtcacttggatggtgtgttcatgcacaaaagggctcaaagactaaaattcttgtgtgaacgcaatgacaaggtgttctttgcctctgttcggtctggtggcagcagt

SEQ ID NO: 58317 - DNA, 120 bp, Artificial Sequence
  ENSG00000071054_30 (sequence is synthesized)
caggtttatttcatgaccttaggcaggacttctcttctgagctggtagaagcagtgtgatccagggattactggcctccagagtcttcaagatcctgagaacttggaattccttgtaact

SEQ ID NO: 58318 - DNA, 80 bp, Artificial Sequence
  ENSG00000071054_31 (sequence is synthesized)
gtgtgagcgccgccgcccgtgcacgctccgtccgccctccgcgcggcccggccggcagagagccccgagcggcccgagag

SEQ ID NO: 58319 - DNA, 120 bp, Artificial Sequence
  ENSG00000071054_32 (sequence is synthesized)
ccgcggccccgcgaggagagtaccgggccggctcggctgccgcgcgaggagcgcggtcggcggcctggtctgcggctgagatacacagagcgacagagacatttattgttatttgttttt

SEQ ID NO: 58320 - DNA, 120 bp, Artificial Sequence
  ENSG00000071054_33 (sequence is synthesized)
cgatcccattccttcagtgacccttctcccaaatttgcacaccaccatcttcgttctcaggacccatgtccaccttcccgcagtgaggtgctcagtcagagctctgactctaagtcagag

SEQ ID NO: 58321 - DNA, 120 bp, Artificial Sequence
  ENSG00000071054_34 (sequence is synthesized)
gagctgcaccgagggcaaccaggacagctgtgtgtgcagacctcatgtgttgggttctctcccctccttcctgttcctcttatataccagtttatccccattctttttttttttcttact

SEQ ID NO: 58322 - DNA, 120 bp, Artificial Sequence
  ENSG00000071054_35 (sequence is synthesized)
ccaaaataaatcaaggctgcaatgcagctggtgctgttcagattctaccatcaggtgctataagtgtttgggattgagcatcatactggaaagcaaacacctttcctccagctccagaat

SEQ ID NO: 58323 - DNA, 120 bp, Artificial Sequence
  ENSG00000071054_36 (sequence is synthesized)
tccttgtctctgaatgactctgtcttgtgggtgtctgacagtggcgacgatgaacatgccgttggttttattggcagtgggcacaaggaggtgagaagtggtggtaaaaggagcggagtg

SEQ ID NO: 58324 - DNA, 120 bp, Artificial Sequence
  ENSG00000071054_37 (sequence is synthesized)
ctgaagcagagagcagatttaatatagtaacattaacagtgtatttaattgacatttcttttttgtaatgtgacgatatgtggacaaagaagaagatgcaggtttaagaagttaatattt

SEQ ID NO: 58325 - DNA, 120 bp, Artificial Sequence
  ENSG00000071054_38 (sequence is synthesized)
ataaaatgtgaaagacacagttactaggataacttttttgtgggtggggcttgggagatggggtggggtgggttaaggggtcccattttgtttctttggatttggggtgggggtcctggc

SEQ ID NO: 58326 - DNA, 120 bp, Artificial Sequence
  ENSG00000071054_39 (sequence is synthesized)
tcccattttgtttctttggatttggggtgggggtcctggccaagaactcagtcatttttctgtgtaccaggttgcctaaatcatgtgcagatggttctaaaaaaaaaaaaaaaaaaaaaa

SEQ ID NO: 58327 - DNA, 120 bp, Artificial Sequence
  ENSG00000071054_40 (sequence is synthesized)
ttgtataatggccagaactttgtcgtgtgacagtattagcactgcctcagttaaaggtttaatttttgtttaaacctagacgtgcaacaaaagttttaccacagtctgcacttgcagaag

SEQ ID NO: 58328 - DNA, 120 bp, Artificial Sequence
  ENSG00000071054_41 (sequence is synthesized)
aaagaaaaaaattcaaaccacatgtttattttttttttgcctacctcattgttcttaatgcattgagaggtgatttagtttatatgtttttggaagaaaccattaatgtttaatttaatc

SEQ ID NO: 58329 - DNA, 120 bp, Artificial Sequence
  ENSG00000071054_42 (sequence is synthesized)
ttaataccaaaacgaccagattgaagtttgacttttattgtcacaaatcagcaggcacaagaactgtccatgaagatgggaaatagccttaaggctgatgcagtttacttacaagtttag

SEQ ID NO: 58330 - DNA, 120 bp, Artificial Sequence
  ENSG00000071054_43 (sequence is synthesized)
aaaccagaatgctttgtttttaccagattcaccattagaggttgatggggcaactgcagcccatgacacaagatctcattgttctcgatgtagaggggttggtagcagacaggtggttac

SEQ ID NO: 58331 - DNA, 120 bp, Artificial Sequence
  ENSG00000071054_44 (sequence is synthesized)
attagaatagtcacacaaactgttcagtgttgcaggaaccttttcttgggggtgggggagtttcccttttctaaaaatgcaatgcactaaaactattttaagaatgtagttaattctgct

SEQ ID NO: 58332 - DNA, 120 bp, Artificial Sequence
  ENSG00000071054_45 (sequence is synthesized)
tattcataaagtgggcatcttctgtgttttaggtgtaatatcgaagtcctggcttttctcgttttctcacttgctctcttgttctctgtttttttaaaccaattttactttatgaatata

SEQ ID NO: 58333 - DNA, 120 bp, Artificial Sequence
  ENSG00000071054_46 (sequence is synthesized)
ttcatgacatttgtaataaatgtcttgagaaagaatttgtttcatggcttcatggtcatcactcaagctcccgtaaggatattaccgtctcaggaaaggatcaggactccatgtcacagt

SEQ ID NO: 58334 - DNA, 120 bp, Artificial Sequence
  ENSG00000071054_47 (sequence is synthesized)
cctgccatcttactttcctcttgtcgagttctgagtggaaataactgcattatggctgctttaacctcagtcatcaaaagaaacttgctgttttttaggcttgatctttttcctttgtgg

SEQ ID NO: 58335 - DNA, 120 bp, Artificial Sequence
  ENSG00000071054_48 (sequence is synthesized)
ttaattttcctgtatattgtgaaaatgggggattttccctctgctcccacccacctaaacacagcagccatttgtacctgtttgcttcccatcccacttggcacccactctgacctcttg

SEQ ID NO: 58336 - DNA, 120 bp, Artificial Sequence
  ENSG00000071054_49 (sequence is synthesized)
tcagtttcctgttcctggttccatctttttgaaaaaggccctcctttgagctacaaacatctggtaagacaagtacatccactcatgaatgcagacacagcagctggtggttttgtgtat

SEQ ID NO: 58337 - DNA, 120 bp, Artificial Sequence
  ENSG00000071054_50 (sequence is synthesized)
acctgtaaagacaagctgagaagcttactttttggggaagtaaaagaagatggaaatggatgtttcatttgtatgagtttggagcagtgctgaaggccaaagccgcctactggtttgtag

SEQ ID NO: 58338 - DNA, 120 bp, Artificial Sequence
  ENSG00000071054_51 (sequence is synthesized)
ttaacctagagaaggttgaaaaattaatcctacctttaaagggatttgaggtaggctggattccatcgccacaggactttagttagaattaaattcctgcttgtaatttatatccatgtt

SEQ ID NO: 58339 - DNA, 120 bp, Artificial Sequence
  ENSG00000071054_52 (sequence is synthesized)
taggcttttcataagatgaaacatgccacagtgaacacactcgtgtacatatcaagagaagaaggaaaggcacaggtggagaacagtaaaaggtgggcagatgtctttgaagaaatgctc

SEQ ID NO: 58340 - DNA, 120 bp, Artificial Sequence
  ENSG00000071054_53 (sequence is synthesized)
aatgtctgatgctaagtgggagaaggcagagaacaaaggatgtggcataatggtcttaacattatccaaagacttgaagctccatgtctgtaagtcaaatgttacacaaaaaaaaatgca

SEQ ID NO: 58341 - DNA, 120 bp, Artificial Sequence
  ENSG00000071054_54 (sequence is synthesized)
aatggtgtttcattggaattaccaagtgcttagaacttgctggctttcccataggtggtaaaggggtctgagctcacaccgagttgtgcttggcttgcttgtgcagctccaggcacccgg

SEQ ID NO: 58342 - DNA, 120 bp, Artificial Sequence
  ENSG00000071054_55 (sequence is synthesized)
tgggcactctggtggtgtttgtggtgaactgaattgaatccattgttgggcttaagttactgaaattggaacaccctttgtccttctcggcgggggcttcctggtctgtgctttacttgg

SEQ ID NO: 58343 - DNA, 120 bp, Artificial Sequence
  ENSG00000071054_56 (sequence is synthesized)
cttttttccttcccgtcttagcctcacccccttgtcaaccagattgagttgctatagcttgatgcagggacccagtgaagtttctccgttaaagattgggagtcgtcgaaatgtttagat

SEQ ID NO: 58344 - DNA, 120 bp, Artificial Sequence
  ENSG00000071054_57 (sequence is synthesized)
tcttttaggaaaggaattattttccccccttttacagggtagtaacttctccacagaagtgccaatatggcaaaattacacaagaaaacagtattgcaatgacaccattacataaggaac

SEQ ID NO: 58345 - DNA, 120 bp, Artificial Sequence
  ENSG00000071054_58 (sequence is synthesized)
attgaactgttagaggagtgctcttccaaacaaaacaaaaatgtctctaggtttagtcagagctttcacaagtaataacctttctgtattaaaatcagagtaaccctttctgtattgagt

SEQ ID NO: 58346 - DNA, 120 bp, Artificial Sequence
  ENSG00000071054_59 (sequence is synthesized)
gcagtgttttttactcttttctcatgcacatgttacgttggagaaaatgtttacaaaaatggttttgttacactaatgcgcaccacatatttatggtttattttaagtgactttttatgg

SEQ ID NO: 58347 - DNA, 120 bp, Artificial Sequence
  ENSG00000071054_60 (sequence is synthesized)
gttatttaggttttcgtcttagttgtagcacacttaccctaattttgccaattattaatttgctaaatagtaatacaaatgacaaactgcattaaatttactaattataaaagctgcaaa

SEQ ID NO: 58348 - DNA, 120 bp, Artificial Sequence
  ENSG00000071054_61 (sequence is synthesized)
gcagactggtggcaagtacacagcccttttttttgcagtgctaacttgtctactgtgtattatgaaaattactgttgtccccccacccttttttccttaaataaagtaaaaatgacacct

SEQ ID NO: 58349 - DNA, 120 bp, Artificial Sequence
  ENSG00000071054_62 (sequence is synthesized)
ccggccatgaccccatccaaggagggcactctaatcgtccgccagagtacagttgaccaaaagcgtgccagccatcatgagagcaatggctttgccggtcgcattcacctcttgccagat

SEQ ID NO: 58350 - DNA, 120 bp, Artificial Sequence
  ENSG00000071054_63 (sequence is synthesized)
ctcttacagcaaagccattcctcctccacttcctccacctcctcctccccatcctccagccagccgacacccaccatgtccccacagacaccccaggacaagctcactgctaatgagact

SEQ ID NO: 58351 - DNA, 120 bp, Artificial Sequence
  ENSG00000071054_64 (sequence is synthesized)
ctattctgttattcctcagaggccagctaaatgctacaggccttacagcttcgtactggcttcttctgttttagggtgttggtggcactttctccctgtgctttgcatgactctggcaga

SEQ ID NO: 58352 - DNA, 120 bp, Artificial Sequence
  ENSG00000071054_65 (sequence is synthesized)
ccatgtaattgtgcacgctttgtggaattttaagcctgtcagagttttcatttcctgcttgaactgatttctgtacttctccctctccccttctttctcccgcgcttccttgtactgtgc

SEQ ID NO: 58353 - DNA, 120 bp, Artificial Sequence
  ENSG00000071054_66 (sequence is synthesized)
ctgctttccactgggacctagttgttcctagactattccgtgaccccatgagcacttactatgtagttctcgtggattcagcagcaggtcgccttgtgtttccccttctcttcgttggtg

SEQ ID NO: 58354 - DNA, 120 bp, Artificial Sequence
  ENSG00000071054_67 (sequence is synthesized)
tgtgcatatgtcagtgcttcccccagcaccccagcgtgtactttattttttccttttgatttgaggatatatgatccaggggaaatttcagtttggtataactactttaattagccataa

SEQ ID NO: 58355 - DNA, 120 bp, Artificial Sequence
  ENSG00000071054_68 (sequence is synthesized)
aatatgtggttgagaggcctgcagtcttttctgcgagggcccctcacagatttgaggaattataaggaatgacctaaaccccagacatacttgttcccttccattggtatcgtctgcttt

SEQ ID NO: 58356 - DNA, 120 bp, Artificial Sequence
  ENSG00000071054_69 (sequence is synthesized)
ccctgtataaagtctcaagtgagtaaaaccttttttctgttgttccagccatacacttggtgtacagtcagccttacaaaattatgcagaacaaagtatagttcttatttaatgaaattt

SEQ ID NO: 58357 - DNA, 120 bp, Artificial Sequence
  ENSG00000071054_70 (sequence is synthesized)
ccttctaaggaaactgatgctttaaaaaaaatacaaaagaaagaaaagcctttttatctctttcttggcattaacctttacttattcttcgtgagttcagcatttacaatactggctttt

SEQ ID NO: 58358 - DNA, 120 bp, Artificial Sequence
  ENSG00000071054_71 (sequence is synthesized)
gcctgctgaccgagcgcgagaggtatcctctttcctttgtcacttagacattgccctggaaagtcgtataacgactcttcagaactgtgtcatatgagttctagaacgggccatagagtt

SEQ ID NO: 58359 - DNA, 120 bp, Artificial Sequence
  ENSG00000071054_72 (sequence is synthesized)
tagctaattatctggtttcttcattttctaactaggaaattgaatttcagaggagtggagggccttgcccaaggtttcatattcagtcagtgctttttccataaaggaccagagtgcctc

SEQ ID NO: 58360 - DNA, 120 bp, Artificial Sequence
  ENSG00000071054_73 (sequence is synthesized)
agttaacatatcccagaagaacttgaaactgaactaaactaaaagattacatgacacagtcactcttaaaaatgtggatgagggaaagagtggtctgatgaactattctgccaagctagt

SEQ ID NO: 58361 - DNA, 120 bp, Artificial Sequence
  ENSG00000071054_74 (sequence is synthesized)
ataaagctaaagtgtgcctgtggctcaactttctgactttgcagatgtcaagatgccctgctagattggtgcattagggttacccagagcctcagagtaggctgcggcagggactgctcg

SEQ ID NO: 58362 - DNA, 120 bp, Artificial Sequence
  ENSG00000071054_75 (sequence is synthesized)
gtttgttctggagtgcttttatatttggtggagtgaaatgcattccggatttctgatgatagttttttagtctgttggtttagttgcttgtgacagattaatttttttctacttcatcat

SEQ ID NO: 58363 - DNA, 120 bp, Artificial Sequence
  ENSG00000071054_76 (sequence is synthesized)
catatacagtcttagaattctgagcaaggaggagagcttagagactgccttgctaatttttatcttcataaatattttctttttcctgaatctaatcctagcactgctttatgtaccttc

SEQ ID NO: 58364 - DNA, 120 bp, Artificial Sequence
  ENSG00000071054_77 (sequence is synthesized)
ttttttccagctacccctctcttttctggtagcagaagaaaacagaaaacttacctttagatttcttccacttttagactttctttgatatttctgcttttcccctactaacactgagtt

SEQ ID NO: 58365 - DNA, 120 bp, Artificial Sequence
  ENSG00000071054_78 (sequence is synthesized)
gagtctttttccaatggcaactccgagtctgtgcatcccgccctgcagagaccagcggagccacaggtagcgacagccagctttgctgtggttgaggagactcatgcaacggctcgctga

SEQ ID NO: 58366 - DNA, 120 bp, Artificial Sequence
  ENSG00000071054_79 (sequence is synthesized)
gccgcaggcctgctgtaatatcacagtttagtttgtcaccacactgaaaaagaggagagattagcaggagtgagtttagactaaaagaaggcatagactcagttgatagggaaatatctt

SEQ ID NO: 58367 - DNA, 120 bp, Artificial Sequence
  ENSG00000071054_80 (sequence is synthesized)
tttctttctttttgagatttctatgtactcattaagagtatctagagtgagtgatttcttctaactttttgccttccctaactcaggtgttaagtgcctcctttttctgatacaaagatc

SEQ ID NO: 58368 - DNA, 120 bp, Artificial Sequence
  ENSG00000071054_81 (sequence is synthesized)
ttttagtttagtttttagagaactgggattataaatacatagagggagagccaggaattttctttgaagtattttaaaagtaagcgctttactgtgtgagccctggctcttggccagtcc

SEQ ID NO: 58369 - DNA, 120 bp, Artificial Sequence
  ENSG00000071054_82 (sequence is synthesized)
tatgaatgggccttagatgatgcccctgaaattgcatgcaaaatgtctttatttgctcaaatgtgtattttttgtgggggtggggggaatgaccttttatcagattctcacagggttcaa

SEQ ID NO: 58370 - DNA, 120 bp, Artificial Sequence
  ENSG00000071054_83 (sequence is synthesized)
gatccaaaaaagtttagatctagtgggttaggtgtggatttctctgaaataggccagggaaaaggctgtgacctctccttgggtctgctgcagcgttctagccttggctaggtgagggga

SEQ ID NO: 58371 - DNA, 120 bp, Artificial Sequence
  ENSG00000071054_84 (sequence is synthesized)
actgttgggccgatgctgtgtggctggagcagaacccacagtgctgtccatagaggagaacaagcaacgaagatcatggctaaagatcttagagatccttaaaatgccgattcctaatct

SEQ ID NO: 58372 - DNA, 120 bp, Artificial Sequence
  ENSG00000071054_85 (sequence is synthesized)
cttgctgaaaactactgacttttagatattttcccgcttgccactctgtaatccagaatattaggaacaagttcttaaactcgagtttacttttcactggtgtttgcatgtgtgggggac

SEQ ID NO: 58373 - DNA, 120 bp, Artificial Sequence
  ENSG00000071054_86 (sequence is synthesized)
aaaagtttatgttcttgtggcaggaaactgtgggatctgcagcatggaggagttaaaaaaaaaaaaaaaagggctggggcacagtggcacgtgcctgaaatcccagcactttgggaggcc

SEQ ID NO: 58374 - DNA, 61 bp, Artificial Sequence
  ENSG00000071054_87 (sequence is synthesized)
aaaaccccatttctgctaaaaatataaaaatcagccgggtgtggtggcaggcacctgtaat

SEQ ID NO: 58375 - DNA, 72 bp, Artificial Sequence
  ENSG00000071054_88 (sequence is synthesized)
tggagtttgcagcttgcagtgagctgagatagtgctactgcatgccagcctgagtgacagagtgagactcca

SEQ ID NO: 58376 - DNA, 120 bp, Artificial Sequence
  ENSG00000071054_89 (sequence is synthesized)
aaacacagtgctcacctaccgagcgcagccaggagcgcagcgccagacaattacaggagctgttttggatatggccgggcagcccagcgatgctcagcgaatcccacaactacaaccaca

SEQ ID NO: 58377 - DNA, 120 bp, Artificial Sequence
  ENSG00000071054_90 (sequence is synthesized)
ggcacaagccagctgcactcccagttctgcttccatctagctaaaagttcagtcttacccatgttttctatttctgttcttcttaagaatgtgggaactgagcatattacttagcttggc

SEQ ID NO: 58378 - DNA, 120 bp, Artificial Sequence
  ENSG00000071054_91 (sequence is synthesized)
gggcactctaatcgtccgccaggtacccgtgtcttctctgttgtcagaggctgagcttctcctgtggtcattaacccacttgctcattcactcactcatgctgtttctccatcatcatct

SEQ ID NO: 58379 - DNA, 120 bp, Artificial Sequence
  ENSG00000071054_92 (sequence is synthesized)
gttttcatgttaacaagtcccagagggtcaagtgtcgagtgtcgggggctagggaggcaggtgtgtactgcatgcccagaaggtagcgagtagtctccaccccacatcgctgctcctctg

SEQ ID NO: 58380 - DNA, 120 bp, Artificial Sequence
  ENSG00000071073_0 (sequence is synthesized)
atgtagggataatctttatagatgcaatttagccctgccaaaagtctgtttataatgatgaatagtaaatgaagaaacttacattttgcattaccgaatgagcttgactttctcttttcc

SEQ ID NO: 58381 - DNA, 120 bp, Artificial Sequence
  ENSG00000071073_1 (sequence is synthesized)
cctgaataggaagggaaaaggccgaggcatcagcgtgtgaagaccgcaaagacgatcccgagtacagttgtgaacagcattgctgctaggctcctcctgcagatcatctgaaatgaacct

SEQ ID NO: 58382 - DNA, 120 bp, Artificial Sequence
  ENSG00000071073_2 (sequence is synthesized)
ctcttattgatttttattggcctagagccaggagtactgcattcagttgactttcagggtaaaaagaaaacagtcctggttgttgtcatcataaacatatggaccagtgtgatggtgaaa

SEQ ID NO: 58383 - DNA, 120 bp, Artificial Sequence
  ENSG00000071073_3 (sequence is synthesized)
tgagatgaggctccgcaatggaactgtagccactgctttagcatttatcacttccttccttactttgtcttggtatactacatggcaaaatgggaaagaaaaactgattgcttatcaacg

SEQ ID NO: 58384 - DNA, 120 bp, Artificial Sequence
  ENSG00000071073_4 (sequence is synthesized)
agaattccttgctttgaaagaacgtcttcgaatagctgaacacagaatctcacagcgctcttctgaattaaatacgattgtgcaacagttcaagcgtgtaggagcagaaacaaatggaag

SEQ ID NO: 58385 - DNA, 120 bp, Artificial Sequence
  ENSG00000071073_5 (sequence is synthesized)
taaggatgcgttgaataagttttcagataataccctaaagctgttaaaggagttaacaagcaaaaaatctcttcaagtgccaagtatttattatcatttgcctcatttattgaaaaatga

SEQ ID NO: 58386 - DNA, 120 bp, Artificial Sequence
  ENSG00000071073_6 (sequence is synthesized)
aggaagtcttcaacctgctgtacagattggcaacggaagaacaggagtttcaatagtcatgggcattcccacagtgaagagagaagttaaatcttacctcatagaaactcttcattccct

SEQ ID NO: 58387 - DNA, 120 bp, Artificial Sequence
  ENSG00000071073_7 (sequence is synthesized)
tattgataacctgtatcctgaagagaagttggactgtgttatagtagtcttcataggagagacagatattgattatgtacatggtgttgtagccaacctggagaaagaattttctaaaga

SEQ ID NO: 58388 - DNA, 120 bp, Artificial Sequence
  ENSG00000071073_8 (sequence is synthesized)
aatcagttctggcttggtggaagtcatatcaccccctgaaagctattatcctgacttgacaaacctaaaggagacatttggagactccaaagaaagagtaagatggagaacaaagcaaaa

SEQ ID NO: 58389 - DNA, 120 bp, Artificial Sequence
  ENSG00000071073_9 (sequence is synthesized)
cctagattactgttttctaatgatgtatgctcaagaaaagggcatatattacattcagcttgaagatgatattattgtcaaacaaaattattttaataccataaaaaattttgcacttca

SEQ ID NO: 58390 - DNA, 120 bp, Artificial Sequence
  ENSG00000071073_10 (sequence is synthesized)
actttcttctgaggaatggatgattctagagttttcccagctgggcttcattggtaaaatgtttcaagcgccggatcttactctgattgtagaattcatattcatgttttacaaggagaa

SEQ ID NO: 58391 - DNA, 120 bp, Artificial Sequence
  ENSG00000071073_11 (sequence is synthesized)
acccattgattggctcctggaccatattctctgggtgaaagtctgcaaccctgaaaaagatgcaaaacattgtgatagacagaaagcaaatctgcgaattcgcttcagaccttccctttt

SEQ ID NO: 58392 - DNA, 120 bp, Artificial Sequence
  ENSG00000071073_12 (sequence is synthesized)
ccaacatgttggtctgcactcatcactatcaggaaaaatccaaaaactcacggataaagattatatgaaaccattacttcttaaaatccatgtaaacccacctgcggaggtatctacttc

SEQ ID NO: 58393 - DNA, 120 bp, Artificial Sequence
  ENSG00000071073_13 (sequence is synthesized)
cttgaaggtctaccaagggcatacgctggagaaaacttacatgggagaggatttcttctgggctatcacaccgatagctggagactacatcttgtttaaatttgataaaccagtcaatgt

SEQ ID NO: 58394 - DNA, 120 bp, Artificial Sequence
  ENSG00000071073_14 (sequence is synthesized)
agaaagttatttgttccatagcggcaaccaagaacatcctggagatattctgctaaacacaactgtggaagttttgccttttaagagtgaaggtttggaaataagcaaagaaaccaaaga

SEQ ID NO: 58395 - DNA, 120 bp, Artificial Sequence
  ENSG00000071073_15 (sequence is synthesized)
caaacgattagaagatggctatttcagaataggaaaatttgagaatggtgttgcagaaggaatggtggatccaagtctcaatcccatttcagcctttcgactttcagttattcagaattc

SEQ ID NO: 58396 - DNA, 120 bp, Artificial Sequence
  ENSG00000071073_16 (sequence is synthesized)
tgctgtttgggccattcttaatgagattcatattaaaaaagccaccaactgatcatctgagaaaccaacacattttttcctgtgaatttgttaattaaagatagttaagcatgtatcttt

SEQ ID NO: 58397 - DNA, 120 bp, Artificial Sequence
  ENSG00000071073_17 (sequence is synthesized)
tttttatttctacttgaacactacctcttgtgaagtctactgtagataagacgattgtcatttccacttggaaagtgaatctcccataataattgtatttgtttgaaactaagctgtcct

SEQ ID NO: 58398 - DNA, 120 bp, Artificial Sequence
  ENSG00000071073_18 (sequence is synthesized)
cagattttaacttgactcaaacatttttcaattatgacagcctgttaatatgacttgtactattttggtattatactaatacataagagttgtacatattgttacattctttaaatttga

SEQ ID NO: 58399 - DNA, 120 bp, Artificial Sequence
  ENSG00000071073_19 (sequence is synthesized)
ttgagaaaaactaatgttacatacattttatgaagggggtacttttgaggttcacttattttactattatagaccctcttttatagattatcagggattatatatataaatatataaata

SEQ ID NO: 58400 - DNA, 120 bp, Artificial Sequence
  ENSG00000071073_20 (sequence is synthesized)
taaaaatgttatggaattaatttattagaaacacttaagaagtacatatttttgtgcagtagatttttgaatcgatactttttttgaaaaccagtttccttgcttttttaagttctttct

SEQ ID NO: 58401 - DNA, 120 bp, Artificial Sequence
  ENSG00000071073_21 (sequence is synthesized)
atatttttctttggaaatgcaaacattacaaaccaatgccatttttcaaatgcactgccatttaagattgattatagatggatttcttaattgaagtacttttataatcacagtgactga

SEQ ID NO: 58402 - DNA, 120 bp, Artificial Sequence
  ENSG00000071073_22 (sequence is synthesized)
acaaaatattttcaaagacatttgtcattccttaaagccaagattttaaagactaatgtccttcctgagggttactttactatactgtgtatggtgtatagccacagaaagtcagtctga

SEQ ID NO: 58403 - DNA, 120 bp, Artificial Sequence
  ENSG00000071073_23 (sequence is synthesized)
taaattttcaatgtgtaagtgtgatgcattcaacccagattattgtagacttaacttattatatttcctctgatatgtaaaatgacaaactcttctttcctttttaatctttgtctttaa

SEQ ID NO: 58404 - DNA, 120 bp, Artificial Sequence
  ENSG00000071073_24 (sequence is synthesized)
tccatgaattaggtgcattatctgctgttgattcttttatatctgcactcattttatgacgtcagacaaaatgttttctaggtgttgctattgtatgagtcataattggtataattttaa

SEQ ID NO: 58405 - DNA, 120 bp, Artificial Sequence
  ENSG00000071073_25 (sequence is synthesized)
agaaaattgtaatattgttttttggtgaaatatattattagtagtatattttccaaaatgattttattgtagtatgaactgataagtgagtcccgtgtccaagagactgtatttattact

SEQ ID NO: 58406 - DNA, 120 bp, Artificial Sequence
  ENSG00000071073_26 (sequence is synthesized)
cttaaacacgctattccaaatgatattactactataaacaaagaatattaccggtctcagcaatcagtgatctttataaaagtacttttaaaaaatgatgaattatcaccaggcgctgtg

SEQ ID NO: 58407 - DNA, 120 bp, Artificial Sequence
  ENSG00000071073_27 (sequence is synthesized)
ctgggcgacacagctagactccgtctcaaaaaaaaaaaaagatgaagtatcaacatcagttcccagccagtctgcttggacacactggggtgccacaagtgggttgcaggttggttgcag

SEQ ID NO: 58408 - DNA, 120 bp, Artificial Sequence
  ENSG00000071073_28 (sequence is synthesized)
acgggcagagatggattctgctgagctttcagagtgaccactggctggggcctagcgctggggcaaggttccagctggctgcctctagcctggaggagcttcatctagttacccaatgtg

SEQ ID NO: 58409 - DNA, 120 bp, Artificial Sequence
  ENSG00000071073_29 (sequence is synthesized)
ctgaaccaacagcatgaaatagcatcatttcctgtgctgtgttacaaagtgcaaacgtttggaaacactgatacagtacaattatttccatcactccatgttgttataatttttagttac

SEQ ID NO: 58410 - DNA, 120 bp, Artificial Sequence
  ENSG00000071073_30 (sequence is synthesized)
ttttcttgattgaaaagtcaatcacattgccaaaaatgatttttatgtcagttaaaggccagttgaaatttttttattaggatgttttaaatttacttttcactttcttgaatttttttc

SEQ ID NO: 58411 - DNA, 120 bp, Artificial Sequence
  ENSG00000071073_31 (sequence is synthesized)
ttctcaaatttccttggcccagtgcccatgagcaaatttcattcaaaaacaggaataaccttttgtcataaaattttggcaccagcttggtatactaaattactgcaaagataactgagt

SEQ ID NO: 58412 - DNA, 120 bp, Artificial Sequence
  ENSG00000071073_32 (sequence is synthesized)
accagaagtaaaaatctctgcaggtgggcttaggagtactcttgggtccctggttcctcagttgccaactctggtttcatgaagaaagaccatgctctgaaaatctagggaggagaaagt

SEQ ID NO: 58413 - DNA, 120 bp, Artificial Sequence
  ENSG00000071073_33 (sequence is synthesized)
tctttaaagacagcctgcctggctagctttttcctgttttcatgcagtttgccctcccagcattggtccacctgttgttcccaagaaactcattcttgttcccaagactccttttagcca

SEQ ID NO: 58414 - DNA, 120 bp, Artificial Sequence
  ENSG00000071073_34 (sequence is synthesized)
aatctttcctatcattccaggacttttttgtgcttctctccccatgaatctacccgtgcctagggtgtgtgccaggcacgtggcaggtggccagtcagcatctggatgtgagaccaatta

SEQ ID NO: 58415 - DNA, 82 bp, Artificial Sequence
  ENSG00000071073_35 (sequence is synthesized)
tggcaggtggccagtcagcatctggatgtgagaccaattattccagcctgccctcctctttctctttttatcattttgtatt

SEQ ID NO: 58416 - DNA, 120 bp, Artificial Sequence
  ENSG00000071073_36 (sequence is synthesized)
cctcccaaagtgctgggattataggtgtgtgccaccatgtccagccccctttctctctcttaactccctctccctgctgtcgttgccatactcttgcatacacaatcggttgtctagttt

SEQ ID NO: 58417 - DNA, 120 bp, Artificial Sequence
  ENSG00000071073_37 (sequence is synthesized)
cttgcatacacaatcggttgtctagtttttgattgtttgtgtgtatggtgtgtgctgtctctctgaccagatttcaggttcctgaggcgagcctgcagctcatactgctcatctgtcctc

SEQ ID NO: 58418 - DNA, 120 bp, Artificial Sequence
  ENSG00000071073_38 (sequence is synthesized)
tcctatggtgggtgctcagggcctctcactgttagttactccctcctttctgcccagttctgcactcaactagtagaagcagccatcctttccccaagcaggaaattgtagtggtcgccc

SEQ ID NO: 58419 - DNA, 120 bp, Artificial Sequence
  ENSG00000071073_39 (sequence is synthesized)
ttaagagcagtgtgagggcagaagattaagggaggggaagagtccctggaactggaagaaggtaaatactttgccttgagagggcgccgaatcattttaccaaaatagtaaatggaaaaa

SEQ ID NO: 58420 - DNA, 120 bp, Artificial Sequence
  ENSG00000071073_40 (sequence is synthesized)
gtgtcaaaggttgggactagttttaaaaacacatatagccagtagacacatgggggctgtttaaataaaaacatttttttacccggttctgccatcacacacactagtgacattccaagt

SEQ ID NO: 58421 - DNA, 120 bp, Artificial Sequence
  ENSG00000071073_41 (sequence is synthesized)
actcagtggccatgtggagctagtggccaccacacttgacaccacggatgcagaacttttccatcactgcagaaagctctgttgaacagtactgtgtccagagtgctaattatgaacagc

SEQ ID NO: 58422 - DNA, 120 bp, Artificial Sequence
  ENSG00000071073_42 (sequence is synthesized)
ttagaaaccacaattaatacattctcatgaggttaaaagcagacatgggaatagaacataatgcaaatgatgatgaatattttgggtgagaagagaaagctgaggacccatttctaggat

SEQ ID NO: 58423 - DNA, 120 bp, Artificial Sequence
  ENSG00000071073_43 (sequence is synthesized)
tctaagatgtaagatttcttaagttctttatcttagtctcatgcattctccacatcacgcgctgtaccatactgtgtagtcagaacagacagtgtgattgaaaagctttggaaaaagtta

SEQ ID NO: 58424 - DNA, 120 bp, Artificial Sequence
  ENSG00000071073_44 (sequence is synthesized)
acacaaaggattatttagcacataggctgtagatacgtatgtgtgtatttgttcaacaattggagatggttgaatacccttgaacaaagtgtgtatcttctcaaatcagtggttgcacta

SEQ ID NO: 58425 - DNA, 120 bp, Artificial Sequence
  ENSG00000071073_45 (sequence is synthesized)
gtcaataattagaaggtgttgttatttttaaaactataagcaaaattatgaaggcctttaaaaaatctatcataataatgaaaaagaggttgtctcccaacagtgctgtccctcaaagaa

SEQ ID NO: 58426 - DNA, 120 bp, Artificial Sequence
  ENSG00000071073_46 (sequence is synthesized)
aagactggttatgtggaaacagcacgtttggagagattattctagtgaataacagtgtatatttgtggtaggcaaatttctaagaatgacccctactgacacccccaccaatgaccttgt

SEQ ID NO: 58427 - DNA, 120 bp, Artificial Sequence
  ENSG00000071073_47 (sequence is synthesized)
ataatatcctcccactttgagcatgggtggaacctgtttgatccatgattatatcatgttatgtagcaaaaggaagactgtctgggggtggctaatcaaatcttgtgactcctttaaaag

SEQ ID NO: 58428 - DNA, 120 bp, Artificial Sequence
  ENSG00000071073_48 (sequence is synthesized)
cagagagttttctcgggctggtggcagaagtcaagagacaaagcagaaggacctcaggcaccattgctgttttaaggtagagggggctgcatgagaaggaatgcacatggctttgaggag

SEQ ID NO: 58429 - DNA, 120 bp, Artificial Sequence
  ENSG00000071073_49 (sequence is synthesized)
ctgagagaggccttggctaacagcaaaggagctgggaactgcagtcctacagccacgggaactgaattcagcccataagctcattcataggcttggaaaggcattcatctccagtctcca

SEQ ID NO: 58430 - DNA, 120 bp, Artificial Sequence
  ENSG00000071073_50 (sequence is synthesized)
gataagacccagcctggccaacactttgaatccagccttgtgagaccctaagccgagaactcacttaagcctgcttggacttctgacctacagaactatgagataataaatcagtggtgt

SEQ ID NO: 58431 - DNA, 120 bp, Artificial Sequence
  ENSG00000071073_51 (sequence is synthesized)
tttaagctgctaaatttgtggcaatttgttatgtaggaataggaaatgaatacagtattttaaaagaggtaaagaggaaatcttcatacttgattccctgtagtatgctggatatttctt

SEQ ID NO: 58432 - DNA, 120 bp, Artificial Sequence
  ENSG00000071073_52 (sequence is synthesized)
ggtaaatgcatgaataaagtctttagtagcaagtcatgtacctggaccttgttggggatgttctcgccagagatctcaattagtcttcattggacgtttgttggcaaagttgcagcatct

SEQ ID NO: 58433 - DNA, 120 bp, Artificial Sequence
  ENSG00000071073_53 (sequence is synthesized)
tactgagtagcgtttggtaaaggaactgctagaatgagactataggaataggactgaaacagtgtgtaagggatcttttttatttctagaagaggtgttactttatactgatttagactg

SEQ ID NO: 58434 - DNA, 120 bp, Artificial Sequence
  ENSG00000071073_54 (sequence is synthesized)
ctctgagcctgtcagaagtaaattcaagaatgattaacagtggtattttagatacattaagagcaaaaataacctttgccttgtagagatcagataatctgtgtatcgagggatttaatt

SEQ ID NO: 58435 - DNA, 120 bp, Artificial Sequence
  ENSG00000071073_55 (sequence is synthesized)
ttttttaaccaaaacttagtttctctttttatcatctagcacagatcaaatcctgtatgggccagccaaatgtttgtagtttgagaatgttttgcaaatacctctctgcttccaagccat

SEQ ID NO: 58436 - DNA, 120 bp, Artificial Sequence
  ENSG00000071073_56 (sequence is synthesized)
taatagctaatgaagttttattttggtttgtccattaatttttctgcttatttttactgtattgccatgtccttgatacgagacaagtagaactaaaagagagaaaatgagaggttaaga

SEQ ID NO: 58437 - DNA, 120 bp, Artificial Sequence
  ENSG00000071073_57 (sequence is synthesized)
ctgtcagaagatgagaaatgtgagtcataaccataccttagtgttttaagggaactttatccagtccaatccctttatagaaaaggaacttttccaagttatgttgcagtatttatagtg

SEQ ID NO: 58438 - DNA, 120 bp, Artificial Sequence
  ENSG00000071073_58 (sequence is synthesized)
tgtaaaattttgtttgactttggtagttgtgcattttaaattatgaatcttatatgctacgataactagtatgcttactttctttaatgcatgtgatcatacaatgctaaaaaggtattt

SEQ ID NO: 58439 - DNA, 120 bp, Artificial Sequence
  ENSG00000071073_59 (sequence is synthesized)
tttaaagacccaaccaaactgaggattttgttatacatatctgtatcaacacctatatataaactcttcttcttacctgaaacactccttcacccggtttgggcactaactagatcattt

SEQ ID NO: 58440 - DNA, 120 bp, Artificial Sequence
  ENSG00000071073_60 (sequence is synthesized)
tcaaaggaacaaacaggaaggagcaagctggcactccagggtgcatctgagctgagaatttagaagacctcattcaagaaagtaaactgagcattgatgggaaagcactttgcgcgaagt

SEQ ID NO: 58441 - DNA, 120 bp, Artificial Sequence
  ENSG00000071073_61 (sequence is synthesized)
aacattcccactgttaatgttgcagtcaaaattgtggaaaaaaaaaagtggtgctaaaattgttctgaaatgaagattgtttgttgtggggaatattttaatactcttggactttaggga

SEQ ID NO: 58442 - DNA, 120 bp, Artificial Sequence
  ENSG00000071073_62 (sequence is synthesized)
ggctattttatgtgtcacttgctcctagttgtttcattgtattagtaattagcaaactgtcctggaaccaagggtttggtacttttgcctgattagcattccattatttatttgaaatgc

SEQ ID NO: 58443 - DNA, 120 bp, Artificial Sequence
  ENSG00000071073_63 (sequence is synthesized)
tcagtgtttgctcaaatttggtgaaaatatcttttgaagacatattctctgagccttaaaaatggctgctatcgacagtactgtaagatgcactgccagtagatttgatacttttcattt

SEQ ID NO: 58444 - DNA, 120 bp, Artificial Sequence
  ENSG00000071073_64 (sequence is synthesized)
cagtgtaggcagtaatgttttctaagaaagatttagaaatcagcaaagtgtaacaattgtgtttcatttatggaatggaaaaactgaagtgtcccattcagaacactttggaaaggttgt

SEQ ID NO: 58445 - DNA, 120 bp, Artificial Sequence
  ENSG00000071073_65 (sequence is synthesized)
ctgcattaggggatgtttctggaagcatcccttagagaagctgcctgaggaatctccttgccaggttgtaccagatttttttttttcttaaatgtattgtatatattttccttaaaatgt

SEQ ID NO: 58446 - DNA, 120 bp, Artificial Sequence
  ENSG00000071073_66 (sequence is synthesized)
cttcattggctgaatgattcctatccgtagtaatattttaggtacttgttggatttttaaaggaagattatttattttcagatttgctgctataattgaaaacctagtaactggtcctgt

SEQ ID NO: 58447 - DNA, 120 bp, Artificial Sequence
  ENSG00000071073_67 (sequence is synthesized)
tgattgtgccttcatcactgtttctctgtgccacgaccgttcatgtgtatttgaaataaagaagtttaaaaagccatgttgaattcaagattccttctaataaaaataggtgaaacttaa

SEQ ID NO: 58448 - DNA, 120 bp, Artificial Sequence
  ENSG00000071073_68 (sequence is synthesized)
aaaatcagtcaccataactttctttttacagacaaaacaaaaccaatgaggagggaatatagtttgaagctgttttgtatttttttccaggaggagaaggaccatataattccagaaggg

SEQ ID NO: 58449 - DNA, 120 bp, Artificial Sequence
  ENSG00000071073_69 (sequence is synthesized)
agttgtaaaatacagtttgctgtttatacttcgcagccattcattttttagtgtgaagtttaatgtctttcatttttatcagttctttttttcttatggttaagccatgtgaaaatgaat

SEQ ID NO: 58450 - DNA, 120 bp, Artificial Sequence
  ENSG00000071073_70 (sequence is synthesized)
gccgtttaaaatcctccacacttgtgagtgtaaatatttaatacatgtagtttttatttatcgaagctgaaaacattttagagttgaatttggtaaaatattctaggtaagtctcattaa

SEQ ID NO: 58451 - DNA, 120 bp, Artificial Sequence
  ENSG00000071073_71 (sequence is synthesized)
gtccaggaccgcttggaaataatgtagagttttcttagaatatgtaaaaacttaatattagcttttattttactgtgttttcttaaactagcttttagatccacttctcttatgtgtttc

SEQ ID NO: 58452 - DNA, 120 bp, Artificial Sequence
  ENSG00000071073_72 (sequence is synthesized)
tgtaggctaccaggaattcactgacagggtttaatactgtaaatttaaatatgaattttttaaagcattcagtacctatttgtgaactttgatctgcgtgcaaacagtcctaggcaccag

SEQ ID NO: 58453 - DNA, 120 bp, Artificial Sequence
  ENSG00000071073_73 (sequence is synthesized)
aatagggaccctaaaattgtaatttttgaagcactcatttgatgaaacattaagatattactgaaaaaagggtctgtggtcaaggaagtttggaaaaatatgtattaagaatttttttcc

SEQ ID NO: 58454 - DNA, 120 bp, Artificial Sequence
  ENSG00000071073_74 (sequence is synthesized)
tgcctaaatgcttaggtcaaataccctggcaatctgcatgttacatgctatctgctggcagtttctttctgatataaaaatgaaacagtattcttggacagaggacacagaatttctaat

SEQ ID NO: 58455 - DNA, 120 bp, Artificial Sequence
  ENSG00000071073_75 (sequence is synthesized)
tccagtggggcttgttttgttttcagtttcttataattgtacttggagaaacagatactgatcagtgttttatattctaaaagacagccaagttgaataataaagactttcgttttggca

SEQ ID NO: 58456 - DNA, 120 bp, Artificial Sequence
  ENSG00000071082_0 (sequence is synthesized)
cttcctttccaacttggacgctgcagaatggctcccgcaaagaagggtggcgagaagaaaaagggccgttctgccatcaacgaagtggtaacccgagaatacaccatcaacattcacaag

SEQ ID NO: 58457 - DNA, 120 bp, Artificial Sequence
  ENSG00000071082_1 (sequence is synthesized)
cgcatccatggagtgggcttcaagaagcgtgcacctcgggcactcaaagagattcggaaatttgccatgaaggagatgggaactccagatgtgcgcattgacaccaggctcaacaaagct

SEQ ID NO: 58458 - DNA, 120 bp, Artificial Sequence
  ENSG00000071082_2 (sequence is synthesized)
gtctgggccaaaggaataaggaatgtgccataccgaatccgtgtgcggctgtccagaaaacgtaatgaggatgaagattcaccaaataagctatatactttggttacctatgtacctgtt

SEQ ID NO: 58459 - DNA, 120 bp, Artificial Sequence
  ENSG00000071082_3 (sequence is synthesized)
accactttcaaaaatctacagacagtcaatgtggatgagaactaatcgctgatcgtcagatcaaataaagttataaaattgccttcatgtttttgttctttttagttgcaacataatgta

SEQ ID NO: 58460 - DNA, 120 bp, Artificial Sequence
  ENSG00000071082_4 (sequence is synthesized)
cttgtataccctatcctaattatgggatcatttgaagagcttttcccaaattgatggcctgtgctgccttctccccatcccctggggttttaaagtgatttcaaactgcaacctagtttt

SEQ ID NO: 58461 - DNA, 120 bp, Artificial Sequence
  ENSG00000071082_5 (sequence is synthesized)
cagaaaccaggatgtagaatccagttgccattgacatcttaacattttaggaaacaactttaaaatgatatactatctatctatctatctgtagcatcttaaaggtaatgaaattaatgt

SEQ ID NO: 58462 - DNA, 120 bp, Artificial Sequence
  ENSG00000071082_6 (sequence is synthesized)
ggcagtaggtcttttaagcttctgcctacatccatattgagtatagttgttgtcttctaaaataattaattgatttttggtgagataaccagattcatattttaagccttttgtaatggc

SEQ ID NO: 58463 - DNA, 120 bp, Artificial Sequence
  ENSG00000071082_7 (sequence is synthesized)
cccgtggtacctggagtcaaggttcagaagtaaaaagttccttaaggtatcaataacaaaaatttgtattaatagttcagtcctaaagcagtgttgctgagattatgtttcaccagcatt

SEQ ID NO: 58464 - DNA, 120 bp, Artificial Sequence
  ENSG00000071082_8 (sequence is synthesized)
tacaagctgtatgttaaatgctgccataaagaggtctctgaagccgtagggcacacccaaggcagggctgagaagtacctagtagtgttgcaccacccaaaaaccatggatgggcagcag

SEQ ID NO: 58465 - DNA, 120 bp, Artificial Sequence
  ENSG00000071082_9 (sequence is synthesized)
caacatctccagcttacccattcactgccacagtctacagcttaagacacttaactacaaggtaaaagaaaaggaccaagtaaatacaaaaagtttcttattaaaaaacttggaagccaa

SEQ ID NO: 58466 - DNA, 120 bp, Artificial Sequence
  ENSG00000071082_10 (sequence is synthesized)
ctttccaacttggacgctgcagagtgagtatgggtggcggagtctgggctcctggaatccagccccatcctcctttgggattgtgctaactgggaccgcaaaatctctcccgagccagcc

SEQ ID NO: 58467 - DNA, 120 bp, Artificial Sequence
  ENSG00000071082_11 (sequence is synthesized)
cggggctccggttgtggggagatgggaatacaccctgcttttaaaggctcccagagcctgaggaagaaagtgaccaggcttaggggagccggagcggcagggatttccgggtcggaggca

SEQ ID NO: 58468 - DNA, 120 bp, Artificial Sequence
  ENSG00000071082_12 (sequence is synthesized)
tctgaggggcgcaggggcgcgggtgcgtgggccactgggtgaccgacttagcctggccagactctcagcacctggaagcgccccgagagtgacagcgtgaggctgggagggaggacttgg

SEQ ID NO: 58469 - DNA, 120 bp, Artificial Sequence
  ENSG00000071082_13 (sequence is synthesized)
tttcaaaagtaagttctccatcccataaagccatttaaattcattagaaaaatgtccttacctcttaaaatgtgaattcatctgttaagctaggggtgacacacgtcattgtaccctttt

SEQ ID NO: 58470 - DNA, 120 bp, Artificial Sequence
  ENSG00000071082_14 (sequence is synthesized)
taaattgttggtgtgggaagatgctaaagaatgcaaaactgatccatatctgggatgtaaaaaggttgtggaaaatagaatgcccagacccgtctacaaaaggtttttagagttgaaata

SEQ ID NO: 58471 - DNA, 120 bp, Artificial Sequence
  ENSG00000071082_15 (sequence is synthesized)
tgaaatgtgatgtgggtatggaaattgactgttacttcctttacagatctacagacagtcaatgtggatgagaactaatcgctgatcgtcagatcaaataaagttataaaattgccttca

SEQ ID NO: 58472 - DNA, 120 bp, Artificial Sequence
  ENSG00000071082_16 (sequence is synthesized)
taaggtgctaaagttatctgtattcgaaggtgaacttttgcaatgacaccagcttcacttaaccctgcaagagcccatatcagttcagtaatttggttaatgcatgtggaagtataaaaa

SEQ ID NO: 58473 - DNA, 120 bp, Artificial Sequence
  ENSG00000071082_17 (sequence is synthesized)
aaaaaaatactgtgaccgtgacttagggtgtgtagtatctgcagggaagccccttaatttagtggcttatgaactgagacccaagggaaggagccagcagtgtagggtgggaaagagcat

SEQ ID NO: 58474 - DNA, 120 bp, Artificial Sequence
  ENSG00000071082_18 (sequence is synthesized)
tgcagagagaggaagcttggcaggatctgggagcggggtggtgaacgcaggtaaagtggaataaatcactgtgagcccagtggaggagggaggggtgagggtcgctctagacatcatggc

SEQ ID NO: 58475 - DNA, 120 bp, Artificial Sequence
  ENSG00000071082_19 (sequence is synthesized)
aagtccaccaggagagaagtggttcttggcctgcggcagttttacctgtccttcccggggttgtggcgggggtggggggcagtgttttttgtcactactgagggatactgtgggccaggg

SEQ ID NO: 58476 - DNA, 120 bp, Artificial Sequence
  ENSG00000071082_20 (sequence is synthesized)
actactaaacatcctacaactcatggggctgctccctcaacaaaaaattgcctagctcagatgttagttctcatgttgggggaccctgctctaaagtggaaccagaaagcaggggaggct

SEQ ID NO: 58477 - DNA, 120 bp, Artificial Sequence
  ENSG00000071082_21 (sequence is synthesized)
tgtgctgtaaaggacgtcatgaggtgccagaacagaagtggagtgaggggcagctagaggaatgatgacagtgtggactagttgattctggaaacgggttgggggaggactgtctgcatc

SEQ ID NO: 58478 - DNA, 120 bp, Artificial Sequence
  ENSG00000071082_22 (sequence is synthesized)
tgtgtggtatttaaaccttaggattaagtgagatgaacaagacagggacctgagacctagctcttctgtgggtggacattgaagggtgcagcaggagaggtgtcctccgatgcctgcctt

SEQ ID NO: 58479 - DNA, 120 bp, Artificial Sequence
  ENSG00000071082_23 (sequence is synthesized)
taggaatcggggcctagaacaatacccggcatcgatagaggaaagagaatcagctgtgatgctacggagagggtaagacaggacaaggggattgcatgtggaagatagagaaatagagta

SEQ ID NO: 58480 - DNA, 120 bp, Artificial Sequence
  ENSG00000071082_24 (sequence is synthesized)
atagagtatgcgcctgtggcagagtttttaacactgttttttgttcgttttgagatggagttaatgttgcccaggctggagcgcaatggcgtagtctcagctcactgcaacctccacctc

SEQ ID NO: 58481 - DNA, 120 bp, Artificial Sequence
  ENSG00000071082_25 (sequence is synthesized)
gtagctgggattacaggcagccgccaccacgcctggctcttagttttgcatttttagtagagaggggttttaccatgttggccagggtgatctcgaactcctgacctcagatgatgcacc

SEQ ID NO: 58482 - DNA, 120 bp, Artificial Sequence
  ENSG00000071082_26 (sequence is synthesized)
tcagcctcccaaagtgctggggttacaggggcaagccaccatgccgtttcttcatattttaatgtaacagaaaaatcacgtaacaaagtttctggtgatagacaaaagactaacacattt

SEQ ID NO: 58483 - DNA, 120 bp, Artificial Sequence
  ENSG00000071082_27 (sequence is synthesized)
tttctggtgatagacaaaagactaacacatttggaccatttggacccagatatctgcttaggattaaccggttgggtatcaatggtggctaccttaacatgtcttcaaacaagcatccct

SEQ ID NO: 58484 - DNA, 120 bp, Artificial Sequence
  ENSG00000071082_28 (sequence is synthesized)
cctgtggtaacagcatttaatgttcacctgggggttatgtttcattttccagggaactgtaagttctaggttggtcagagtagagcaaaggacagcattagaagcaggcatatgagatat

SEQ ID NO: 58485 - DNA, 120 bp, Artificial Sequence
  ENSG00000071082_29 (sequence is synthesized)
caaaaccggccccatcgctgaggaccaggtgagcctcttcagaatgcatcatttccacccatactaaatgactacatcatctctttggacatcccaattcacaaaagtctgaagtagttc

SEQ ID NO: 58486 - DNA, 120 bp, Artificial Sequence
  ENSG00000071082_30 (sequence is synthesized)
ccagtaactgcagggttcttgaccatttcaatgtcctctgtccacaggatgggacaaaaacaagggcagatgctgtagtctgcaagctcatatcctcaaagagaccaaaatgccatttat

SEQ ID NO: 58487 - DNA, 120 bp, Artificial Sequence
  ENSG00000071082_31 (sequence is synthesized)
aattttactgtcatattcactgcagccatgttatttaaatagtcattacagaatcatgaaaataaccacaagaacttttaagtgtgaaataaaggtctcataaatttctgttccttaaaa

SEQ ID NO: 58488 - DNA, 120 bp, Artificial Sequence
  ENSG00000071082_32 (sequence is synthesized)
aaatggcattttcttctctacttggtgaaaagtcattatagaggattcgaacggttccaatgctcgcaattctacttcaagcatgtgctcattctacatatcaacccctttttcactgac

SEQ ID NO: 58489 - DNA, 120 bp, Artificial Sequence
  ENSG00000071082_33 (sequence is synthesized)
aaatgtaatgttgacaatctaggctaatgggactagattttgaatccaatcaacactttttcatataaagttttcagaataacaaagctttccctcattcatacagatattgctgtacta

SEQ ID NO: 58490 - DNA, 120 bp, Artificial Sequence
  ENSG00000071082_34 (sequence is synthesized)
atctataattatgttttagaattcaaattataacactgactaaacatcactaatgaaacatttgtgacctccttttttccgaagtttaatttttgctttgaattcatattttatcagtat

SEQ ID NO: 58491 - DNA, 120 bp, Artificial Sequence
  ENSG00000071082_35 (sequence is synthesized)
cgaggacgtctgtctcccatattaccctggcagagggccaggcctgttctacacggccggggtttcaacaaggtactgatgtcttctgcccttgcctcttcgacaggcaagtaataagac

SEQ ID NO: 58492 - DNA, 120 bp, Artificial Sequence
  ENSG00000071082_36 (sequence is synthesized)
ttaagtgaagagaattctttaggcacacaaattcacatttgatgtaatctcattatacttcctgatctgtgattgaaaactttcatttcgtaactagtatgtctgtcccacctttaaaaa

SEQ ID NO: 58493 - DNA, 120 bp, Artificial Sequence
  ENSG00000071082_37 (sequence is synthesized)
gtttttcattatgaaagtaagtatttgttagaattaagtctatttaaatgaaaaaaacttagatatgagtctgcatggcctcaggaaaatgatgttttaaaatagagattttaggttgtc

SEQ ID NO: 58494 - DNA, 120 bp, Artificial Sequence
  ENSG00000071082_38 (sequence is synthesized)
tgcactctagcttttttgtcgttttcttaaggcttttttaactgcatcaaaaattcagatacgaaacatacactaaaaaataatacatcatatcttaatttccactgaacttgatttaaa

SEQ ID NO: 58495 - DNA, 120 bp, Artificial Sequence
  ENSG00000071082_39 (sequence is synthesized)
ttcagagttacacagtatgaatatcacaatcagatatgttcaaaaaggtctgaacaattgattttctgaaaccatgaaggactacaaatgcttctaataaatcaatgtaattaaaatgtc

SEQ ID NO: 58496 - DNA, 120 bp, Artificial Sequence
  ENSG00000071127_0 (sequence is synthesized)
ccgcagccgccgagccgagcgcttgactatatatggtcaaagctgggggcgagccgcgcgcgggaccgcgcttccgggttcggggcgtccgcaaccacagcgcgcagggcaggcgcgagc

SEQ ID NO: 58497 - DNA, 120 bp, Artificial Sequence
  ENSG00000071127_1 (sequence is synthesized)
tggcctctgagccccggcctcggaccgcccactccactcccggcacgcccggtgccgccttccggctccagtccccgggctcggcctcggcgaggtgtaattcgcagcgcgggccggccc

SEQ ID NO: 58498 - DNA, 120 bp, Artificial Sequence
  ENSG00000071127_2 (sequence is synthesized)
cggaggctctcggcgagcgcggcgcggtaacaagtgggcgaggatgccgtacgagatcaagaaggtgttcgccagcctcccgcaggtggagaggggcgtctccaagatcatcggcggcga

SEQ ID NO: 58499 - DNA, 120 bp, Artificial Sequence
  ENSG00000071127_3 (sequence is synthesized)
ccctaagggcaacaattttctgtacaccaatggaaagtgcgtcatcctaaggaacatcgacaacccagcccttgctgacatctacacagagcacgcccatcaggtggtggtggccaagta

SEQ ID NO: 58500 - DNA, 120 bp, Artificial Sequence
  ENSG00000071127_4 (sequence is synthesized)
tgcgcccagcggattctacattgcctccggagatgtgtctgggaagctgaggatctgggataccacgcagaaggagcacctgttgaagtatgagtaccagcctttcgctgggaagatcaa

SEQ ID NO: 58501 - DNA, 120 bp, Artificial Sequence
  ENSG00000071127_5 (sequence is synthesized)
agacattgcttggactgaagacagtaagaggatcgccgtggtcggggaaggaagggagaagtttggagcagtcttcctctgggatagtggctcttctgtgggcgagattacaggacacaa

SEQ ID NO: 58502 - DNA, 120 bp, Artificial Sequence
  ENSG00000071127_6 (sequence is synthesized)
caaagtcatcaacagcgtggacatcaagcagagccggccataccggctggccacgggaagcgatgataactgcgcggcattctttgagggacccccattcaagttcaagttcacaattgg

SEQ ID NO: 58503 - DNA, 120 bp, Artificial Sequence
  ENSG00000071127_7 (sequence is synthesized)
cgaccacagccgctttgtcaactgtgtgcgattctctcctgatgggaacagatttgccacagccagtgctgacggccagatatacatctatgacgggaagactggggagaaggtgtgcgc

SEQ ID NO: 58504 - DNA, 120 bp, Artificial Sequence
  ENSG00000071127_8 (sequence is synthesized)
gctgggcggaagcaaggcccacgacggtgggatttacgcaattagttggagtcccgacagcacccatttgctttctgcttctggggacaaaacttccaagatttgggacgtcagcgtgaa

SEQ ID NO: 58505 - DNA, 120 bp, Artificial Sequence
  ENSG00000071127_9 (sequence is synthesized)
ctccgtggtcagcacatttcccatgggctccacggttctggaccagcagctgggctgcctatggcagaaggaccacctgctcagtgtctccctgtccgggtacatcaactatctggacag

SEQ ID NO: 58506 - DNA, 120 bp, Artificial Sequence
  ENSG00000071127_10 (sequence is synthesized)
aaacaaccccagcaagcccctgcacgtcatcaagggtcacagtaaatcgatccagtgtctgacggtgcataaaaacggcggcaagtcctacatttactctgggagccacgacggacacat

SEQ ID NO: 58507 - DNA, 120 bp, Artificial Sequence
  ENSG00000071127_11 (sequence is synthesized)
taattactgggattcagagacgggggagaacgactccttcgctgggaaaggccacacgaaccaggtgtccaggatgaccgtggatgagtcggggcagctcatcagctgcagcatggacga

SEQ ID NO: 58508 - DNA, 120 bp, Artificial Sequence
  ENSG00000071127_12 (sequence is synthesized)
caccgtgcggtacaccagcctcatgctgcgggactacagcggacaaggagttgtgaaactggacgttcagccaaagtgcgtagccgtcggccccgggggatacgccgtggtcgtgtgcat

SEQ ID NO: 58509 - DNA, 120 bp, Artificial Sequence
  ENSG00000071127_13 (sequence is synthesized)
gatcagaggaagtgcttcagcatcgacaaccccggctacgagcccgaagttgtggcagtgcaccccggcggggacacggtggcaattgggggtgtggacggcaacgtccgcctgtattcc

SEQ ID NO: 58510 - DNA, 120 bp, Artificial Sequence
  ENSG00000071127_14 (sequence is synthesized)
atcctgggcaccacgctgaaggatgagggcaagctcctagaggccaagggccccgtgaccgacgtggcctactcccacgacggcgccttcctcgcggtgtgcgacgccagcaaggtggtc

SEQ ID NO: 58511 - DNA, 120 bp, Artificial Sequence
  ENSG00000071127_15 (sequence is synthesized)
acagtgttcagcgttgctgacggctactcggagaacaatgttttttatggacaccatgcaaaaatcgtctgcctggcctggtccccagacaatgaacactttgcctccggtggcatggac

SEQ ID NO: 58512 - DNA, 120 bp, Artificial Sequence
  ENSG00000071127_16 (sequence is synthesized)
atgatggtgtatgtttggaccctgagtgacccggaaaccagagtcaagatccaagatgcacaccggctgcaccatgtcagcagcctggcctggctggacgagcacacgctggtcacgacc

SEQ ID NO: 58513 - DNA, 120 bp, Artificial Sequence
  ENSG00000071127_17 (sequence is synthesized)
tcccatgatgcctctgtcaaggagtggacaatcacctactgaggagccccacccccgcctctggatggaccgaatcagggactagagtttaactgcagcggaacatgtcatttctctatt

SEQ ID NO: 58514 - DNA, 120 bp, Artificial Sequence
  ENSG00000071127_18 (sequence is synthesized)
tctgtgacgcgcccccatgcccccaccccaccacaagaggcaggagggcccagtcatgaccctcgtctctgcagggtgtctgtacacgttcttctgaaagctttagacagtaacagtttg

SEQ ID NO: 58515 - DNA, 120 bp, Artificial Sequence
  ENSG00000071127_19 (sequence is synthesized)
cacatgaaaaataaagcgagcacctaaacaatgtgtggagcataactaaaacccacagcccaaccaaaccttgagaatgcgaaacattccagaggcagtagcctccaaagcacacagagc

SEQ ID NO: 58516 - DNA, 120 bp, Artificial Sequence
  ENSG00000071127_20 (sequence is synthesized)
ccctggccccgccgcggctctcactatctgtcaggggaggttgtacaggtgaatgagccggggggctcatgttcctgcctgcagaacatttctgtactagtgagaagagggaatatgcat

SEQ ID NO: 58517 - DNA, 120 bp, Artificial Sequence
  ENSG00000071127_21 (sequence is synthesized)
tgcagttcagcaaagccggaattctgtgttgaacagatgtctgtctccctagtgtgtgactcacaccttgtggctgccttcagagcgccacctccagatcagatggggacacacaacccc

SEQ ID NO: 58518 - DNA, 120 bp, Artificial Sequence
  ENSG00000071127_22 (sequence is synthesized)
tggatatgtttcattgtcagattttgtgcttgattttaagaatggaattgtgggtatctttcctttttttttaatgtatcttaactgttgcctgtcagtgtttacaaactagtgcgttga

SEQ ID NO: 58519 - DNA, 120 bp, Artificial Sequence
  ENSG00000071127_23 (sequence is synthesized)
cggcaccgtgtccaagtttttagaacccttgttagccagaccgaggtgtcctggtcaccgtttcaccatcatgctttgatgttcccctgtctttccctcttctgctctcaagagcaaagg

SEQ ID NO: 58520 - DNA, 120 bp, Artificial Sequence
  ENSG00000071127_24 (sequence is synthesized)
ttaatttaaggacaaagatgaagtcactgtaaactaatctgtcattgtttttaccttccttttctttttcagtgcagaaattaaaagtaagtataaagcaccgtgattgggagtgttttt

SEQ ID NO: 58521 - DNA, 120 bp, Artificial Sequence
  ENSG00000071127_25 (sequence is synthesized)
gcgtgtgtcggaatcactggtaaatgttggctgagaacaatccctccccttgcacttgtgaaaacactttgagcgctttaagagattagcctgagaaataattaaatatcttttctcttc

SEQ ID NO: 58522 - DNA, 120 bp, Artificial Sequence
  ENSG00000071127_26 (sequence is synthesized)
agagactgttcttggcttagggtacaggagggggctttccaaggatgccccgttcgtagtgaaacaggcttcattttgtcacggaaccgcaggctgagctgggcctggctgggcaggtga

SEQ ID NO: 58523 - DNA, 120 bp, Artificial Sequence
  ENSG00000071127_27 (sequence is synthesized)
aagcatagggaggctccctgtatgcagctgaacacgcggcagctctcagactctgctcttgtggctaccacctaatgggtaggtagtggagacctggctattttgggagctgtattgaag

SEQ ID NO: 58524 - DNA, 120 bp, Artificial Sequence
  ENSG00000071127_28 (sequence is synthesized)
aagttggcgccgtgggccgagccggaggagccccgctgcccccaagggcctggcccggggcgcggaccaggaagtcgcgcggttcctggcgctcgtggaaagtggaggccgccctcccgg

SEQ ID NO: 58525 - DNA, 120 bp, Artificial Sequence
  ENSG00000071127_29 (sequence is synthesized)
agcctacctgtaaattggagtagtgacctctggcccctccgtcacccacctgagactgggaggacataggaaaaacccagcccttgctgacatctacacagagcacgcccatcaggtggt

SEQ ID NO: 58526 - DNA, 120 bp, Artificial Sequence
  ENSG00000071127_30 (sequence is synthesized)
gtttcagtacaagctgaagcagaactccatgatgctgtgcctgagctgaaatgcaagcagcattccctgtgtgcccctcgtcctgagggaccgtagcccagctttggtcttcatttgcct

SEQ ID NO: 58527 - DNA, 120 bp, Artificial Sequence
  ENSG00000071127_31 (sequence is synthesized)
aaacccagcacagggtgctcagcagggtcaggggcaccagtttgttccaggggtgggctggagcctgtcttcttcaccaggctgctgtgcccctgtgtgcttgcttggggacttgtccag

SEQ ID NO: 58528 - DNA, 120 bp, Artificial Sequence
  ENSG00000071127_32 (sequence is synthesized)
ctttctacggcagcacggcctggggaggaggtcgtccaggctgggagagcccacgaggccatctgtctggcgggatgggcaggtgcccctgtatgtgagcgtgagacctcccccatcccc

SEQ ID NO: 58529 - DNA, 120 bp, Artificial Sequence
  ENSG00000071127_33 (sequence is synthesized)
agggagtgaggactgtggggaggggggctcgttgatacaggtcagtcttggctatgtgttggctgcaagggaggacaggcaggagtgtggaccggacaccgtcagttgtccaccagggat

SEQ ID NO: 58530 - DNA, 120 bp, Artificial Sequence
  ENSG00000071127_34 (sequence is synthesized)
gaggctggactgagactgctgcagccccgctggttggctggggtggggcagaggcagggggccggtgagggcagcctcaggaagctgctgcccctgaactccccgggaggttccccaatc

SEQ ID NO: 58531 - DNA, 120 bp, Artificial Sequence
  ENSG00000071127_35 (sequence is synthesized)
cctctccctctttgttcactggccgggcctccgtgtggaaagggctatttttagccctcgctttttttggttaatgggcttttcgcggcttctctctttgaaggggctatttcaggagca

SEQ ID NO: 58532 - DNA, 120 bp, Artificial Sequence
  ENSG00000071127_36 (sequence is synthesized)
gacatcagtgtctgcatttggactccttggctcgaggtgcaggaaaaggtgatggggatgagctactcgaggggcatctgtgtccctggactgtgccgggcccctcccttgcccctgctg

SEQ ID NO: 58533 - DNA, 120 bp, Artificial Sequence
  ENSG00000071127_37 (sequence is synthesized)
ggttctggggccagggagggacacatgacaccaccctgccagagcctgtgggaggcgtcggcagaggtgaaccacagacttggatttggggtcctggggtttgcgcgagcaggaatgtcc

SEQ ID NO: 58534 - DNA, 120 bp, Artificial Sequence
  ENSG00000071127_38 (sequence is synthesized)
tcgcttctgggacctggaactggagtaggaatgtccatgttttgacctcagggagccactgaaatgggcacttgtgacaggttggaattgaacagtggctgattagtttcctccattttg

SEQ ID NO: 58535 - DNA, 120 bp, Artificial Sequence
  ENSG00000071127_39 (sequence is synthesized)
tagcaagagccatcagcgtccactgtcccacccactcatctgggcttgggtgattcgggcatttggggtgagctcttttctcttagttcttaactcattcgtcagaaggacccaggggtc

SEQ ID NO: 58536 - DNA, 120 bp, Artificial Sequence
  ENSG00000071127_40 (sequence is synthesized)
agccaggcccagccatctccctggcccactgcacttcaaggaagctcaggctggcttggaggagccagtgcgaagtcagcggcaaggcgaggctgtgctggccaaggaagcggagttcgg

SEQ ID NO: 58537 - DNA, 120 bp, Artificial Sequence
  ENSG00000071127_41 (sequence is synthesized)
cagcgagagaactcgatgtgctggtcagaggtctaggattcgagctgtggttatgtcatggtcaaggttgtgtggcctcatctggaaggagtagtggtgcatacacccctgtccaccccc

SEQ ID NO: 58538 - DNA, 120 bp, Artificial Sequence
  ENSG00000071127_42 (sequence is synthesized)
cgcccaacagggggtctagaagtgctttgcctcaggccctcccaccactgccttcactgcagccggctccttcctgcagctctctcgggaactgccctgtgaggccctttgacacaggga

SEQ ID NO: 58539 - DNA, 120 bp, Artificial Sequence
  ENSG00000071127_43 (sequence is synthesized)
atgtggaccctatggactgacatggacaagggaccgtgggccatgttgacacagataggaggtggaccccatcggctaaccccgacgggaacaggccctcagtgcatgacggctccctca

SEQ ID NO: 58540 - DNA, 120 bp, Artificial Sequence
  ENSG00000071127_44 (sequence is synthesized)
tggtgggtaacagcagaaggggggatgcaaatgggcctgcggagttagggatctgacctctgggatgactctgggctggagcacccccaggcttgctgagcagctgcccaaggcccagga

SEQ ID NO: 58541 - DNA, 120 bp, Artificial Sequence
  ENSG00000071127_45 (sequence is synthesized)
atccagcaaacaccagctgcgctgctggccgtactgagggaccacgggggccccatgcacaggacacctgctgagctgagtgaaggcctcacttttgacatcttcacttcccccactcac

SEQ ID NO: 58542 - DNA, 120 bp, Artificial Sequence
  ENSG00000071127_46 (sequence is synthesized)
cccttaaatcccacctgggaccagggtctccccctccctaagacagccacgtccagtgtataatgtgagcctcatgtggcgttgaaatttcctggtagccacatttaaaaaagaaacagg

SEQ ID NO: 58543 - DNA, 120 bp, Artificial Sequence
  ENSG00000071127_47 (sequence is synthesized)
tgaaatgatttgtaacagtaggttttatttagccccgcatgtcatcatttctccctgagggggttgtgatgtccccgcgtggccatgcacgtattgtaaggcagctctgtgttgtccaaa

SEQ ID NO: 58544 - DNA, 120 bp, Artificial Sequence
  ENSG00000071127_48 (sequence is synthesized)
ccctcccctccccgagtgcccccctaccactctcctcctagtgtgtagtcaagtcccctcatccattctccttgaagacatccttttgtgttaaacattaatggggccctttcctattta

SEQ ID NO: 58545 - DNA, 120 bp, Artificial Sequence
  ENSG00000071127_49 (sequence is synthesized)
aaaatgtctgagcccacccccagagcccattccccagctgcaggcttcaggtgcaggacaggcaaagagggaaggcagcccggtctggaagggaggagagacaaagcaggtttcaacgtc

SEQ ID NO: 58546 - DNA, 120 bp, Artificial Sequence
  ENSG00000071127_50 (sequence is synthesized)
cgtcctggtttataaggcaatcgccagtctggtagtgagaatcaaacaagttcatgaatgaaatggatccagaaaaaaatacagcaagagctagtcagatagagattaggaggtcggggt

SEQ ID NO: 58547 - DNA, 120 bp, Artificial Sequence
  ENSG00000071127_51 (sequence is synthesized)
ctgtgtcttcactgtgaggtcacaggccaccaaacatgaagtgacctcagcatcgggttctcgtgcagatagttgagttctgcatctggaaaagagccagcctggtgatgtggacagagt

SEQ ID NO: 58548 - DNA, 120 bp, Artificial Sequence
  ENSG00000071127_52 (sequence is synthesized)
gctaaagcctggcctcacagccaagtcatgcttggtggttgaaggcgctcctgggcacctgtgccacccgcaggccaaggcttccttcatcaggatgtatgccgtgccaggcaggggtgg

SEQ ID NO: 58549 - DNA, 120 bp, Artificial Sequence
  ENSG00000071127_53 (sequence is synthesized)
gggctgaatctcaccctgtctaggtggggctgcagatctagaggctgggggccacccggacctggggagcagagagctggtgggaacccccttgcctgcagctgggagcctccctgggct

SEQ ID NO: 58550 - DNA, 120 bp, Artificial Sequence
  ENSG00000071127_54 (sequence is synthesized)
tcatgggcagagctagccacagaggagccataagcgcacaggcaccgtctcactattggcatctcggttgggtggaggcaagattatggggaatcgaatctgttcacccacggtgtgact

SEQ ID NO: 58551 - DNA, 120 bp, Artificial Sequence
  ENSG00000071127_55 (sequence is synthesized)
gtcacagaggggaaagtcagtggcccccccagtcctgtgtgttccagcctcttactggttgtcatgcctgccccattttaatagggcatggatacagtgtagctgtttgtgtggtgtctg

SEQ ID NO: 58552 - DNA, 120 bp, Artificial Sequence
  ENSG00000071127_56 (sequence is synthesized)
catgtcatcgcttttatacataagaagacattgttatttcactcctgtggaacttggttgtcaagacttggagagagggagccactggcatctgtaggtggagccagggatgctgctaat

SEQ ID NO: 58553 - DNA, 120 bp, Artificial Sequence
  ENSG00000071127_57 (sequence is synthesized)
gtcatcctaaggaacatcgacgtgagtaccccctaccccgggcgcggttctgctccggagccaccttgggatgggataattcgccttcctctccacttctcacctcctgcccattggccc

SEQ ID NO: 58554 - DNA, 120 bp, Artificial Sequence
  ENSG00000071127_58 (sequence is synthesized)
ggggagggtgagggcgccacgccccctctaccgggagccacacctcggagccccggaagccggcctcagattcacccaggtccttgtctgctccttcttgatgaggaaactgagtcttag

SEQ ID NO: 58555 - DNA, 120 bp, Artificial Sequence
  ENSG00000071127_59 (sequence is synthesized)
agtcaacaggtgaccggccgagaccggtccggggctccttctcccttctgtccccgccgtccccgccctgccctgacatgccccgccgcatttgtgtctccgcagagaaggtgttcgcca

SEQ ID NO: 58556 - DNA, 120 bp, Artificial Sequence
  ENSG00000071189_0 (sequence is synthesized)
gctcttccaagatggcggcgcgtccgtcgcgagcgaccgggccgaggggaggccagcgaagccgagtaaaaccgccgcccgggagaagactgaaggagcagttgccgccgttggcggcgg

SEQ ID NO: 58557 - DNA, 120 bp, Artificial Sequence
  ENSG00000071189_1 (sequence is synthesized)
cccgagcagttttcgctgctgctacggctgttgccatgaggcgaggctagggaggacctcacttccccggggtgtaataatgttaactgaggccagtctatccatatggggatggggaag

SEQ ID NO: 58558 - DNA, 120 bp, Artificial Sequence
  ENSG00000071189_2 (sequence is synthesized)
ccttggcattgtcctttttctgataacctttggaccctttgtaatattttatttgacattttatatcctctgctttgtgggtgggggtttagtggttactctcctgtttggaaaaacaaa

SEQ ID NO: 58559 - DNA, 120 bp, Artificial Sequence
  ENSG00000071189_3 (sequence is synthesized)
ctcagagaagtacctagaacagtgtgaacactcatttcttcctccaacatcacctggggttcctaagtgcttagaagaaatgaaacgggaagccaggactattaagattgatagaagatt

SEQ ID NO: 58560 - DNA, 120 bp, Artificial Sequence
  ENSG00000071189_4 (sequence is synthesized)
gacgggtgccaatataattgatgaacctctccagcaagttatccagttttccttgagggattatgtccagtattggtattatacactaagcgatgatgaatcttttcttcttgaaattag

SEQ ID NO: 58561 - DNA, 120 bp, Artificial Sequence
  ENSG00000071189_5 (sequence is synthesized)
gcagactcttcaaaacgcactcattcagtttgctactaggtcaaaagaaatagactggcaaccttattttactacacgcattgtagatgactttggcacacacttacgagtattcagaaa

SEQ ID NO: 58562 - DNA, 120 bp, Artificial Sequence
  ENSG00000071189_6 (sequence is synthesized)
ggctcaacagaaaataacagagaaagatgatcaagtgaaaggtacagcagaagatcttgtagataccttctttgaagttgaagttgaaatggagaaggaggtttgccgtgatctagtgtg

SEQ ID NO: 58563 - DNA, 120 bp, Artificial Sequence
  ENSG00000071189_7 (sequence is synthesized)
cacttcccccaaagatgaagaaggattcctaagggatttgtgtgaggtcttactatatttattgctacctcctggagatttccagaacaagatcatgcgatactttgtcagggaaatcct

SEQ ID NO: 58564 - DNA, 120 bp, Artificial Sequence
  ENSG00000071189_8 (sequence is synthesized)
tgcacgaggaattcttcttccattaataaatcaactcagtgatcctgattatattaatcagtatgtcatatggatgatccgtgattctaactgcaactatgaggcctttatgaacattat

SEQ ID NO: 58565 - DNA, 120 bp, Artificial Sequence
  ENSG00000071189_9 (sequence is synthesized)
taaattgagtgacaatattggagagctagaagcagtcagagataaggcagcagaagaattacagtatcttagatctctagatacagctggtgatgatatcaacactatcaaaaatcaaat

SEQ ID NO: 58566 - DNA, 120 bp, Artificial Sequence
  ENSG00000071189_10 (sequence is synthesized)
aaatagcttactattcgtaaagaaggtatgtgactcaagaatacagcgattgcagtcaggcaaagaaataaatactgtgaaacttgcagcaaactttgggaaactttgcacagtccccct

SEQ ID NO: 58567 - DNA, 120 bp, Artificial Sequence
  ENSG00000071189_11 (sequence is synthesized)
ggacagcattcttgtagacaatgttgcactacaattttttatggattacatgcagcaaactggaggtcaagcacatctattcttttggatgacagtggaaggataccgggttaccgccca

SEQ ID NO: 58568 - DNA, 120 bp, Artificial Sequence
  ENSG00000071189_12 (sequence is synthesized)
acagcagctagaagttttattaagtcgtcagagagatggaaaacatcaaaccaaccaaaccaaaggtcttttaagagcagctgctgttggaatttatgaacagtatttatcagaaaaggc

SEQ ID NO: 58569 - DNA, 120 bp, Artificial Sequence
  ENSG00000071189_13 (sequence is synthesized)
atctccaagagttactgttgatgactatttagtagcaaaattagcagatactttgaatcatgaagatccaacccctgaaatctttgatgacattcaaagaaaggtatatgaattgatgct

SEQ ID NO: 58570 - DNA, 120 bp, Artificial Sequence
  ENSG00000071189_14 (sequence is synthesized)
acgagatgaaagattttatccttccttcagacagaatgcactttatgtgcgcatgttagctgagcttgacatgttaaaagatcctagtttcagaggatccgatgatggggatggagaatc

SEQ ID NO: 58571 - DNA, 120 bp, Artificial Sequence
  ENSG00000071189_15 (sequence is synthesized)
ttttaatgggtctcctacaggaagcataaatttgtctttagatgacctttcaaatgtttcttctgatgactcagtacaacttcatgcctacatttcagacacaggcgtttgtaatgatca

SEQ ID NO: 58572 - DNA, 120 bp, Artificial Sequence
  ENSG00000071189_16 (sequence is synthesized)
tggcaagacatatgcattatatgccatcactgtacaccggcgcaacctaaacagtgaggagatgtggaaaacctatcgtcgttatagtgacttccatgacttccacatgagaatcactga

SEQ ID NO: 58573 - DNA, 120 bp, Artificial Sequence
  ENSG00000071189_17 (sequence is synthesized)
acagtttgaaagtctctcaagcatattgaaacttcctggaaaaaagacttttaataatatggatagagattttttagaaaagagaaaaaaggatctaaatgcatatttgcagttactgtt

SEQ ID NO: 58574 - DNA, 120 bp, Artificial Sequence
  ENSG00000071189_18 (sequence is synthesized)
agctcctgaaatgatgaaggcatcccccgctttagctcactatgtgtatgatttccttgagaacaaagcctacagtaaaggaaaaggggattttgctcgcaagatggacacttttgtaaa

SEQ ID NO: 58575 - DNA, 120 bp, Artificial Sequence
  ENSG00000071189_19 (sequence is synthesized)
tccacttcgcaattcaatgaggaatgtttcaaatgcagttaaatcccttcctgatagcttggcagagggaatgactaaaatgtcagacaacatgggcaaaatgtcagaaagattaggtca

SEQ ID NO: 58576 - DNA, 120 bp, Artificial Sequence
  ENSG00000071189_20 (sequence is synthesized)
agacataaagcaatcattttttaaggtgcctcctttaattcctaagactgattcagaccctgaacatcgccgagtttcggctcaacttgacgataatgtggatgacaatattccacttag

SEQ ID NO: 58577 - DNA, 120 bp, Artificial Sequence
  ENSG00000071189_21 (sequence is synthesized)
ggtaatgctgcttctcatggatgaagtattcgacttaaaagaaagaaatcagtggttgcgaaggaatatcaaaaacctacttcaacagcttattagagctacatatggcgatactattaa

SEQ ID NO: 58578 - DNA, 120 bp, Artificial Sequence
  ENSG00000071189_22 (sequence is synthesized)
tagaaaaatagttgaccatgttgactggatgacttcacctgaacaagtagccgactcagtgaaacgtttcagagatgcattttggccaaatggcattttagcagaggctgttccatgcag

SEQ ID NO: 58579 - DNA, 120 bp, Artificial Sequence
  ENSG00000071189_23 (sequence is synthesized)
agataaaagtattcgaatgagaacaagagtagcaggaaaaacgaaattacttgcaattatgccagatgagctgaagcacattattggggctgagacaacacggaaaggtattcttcgtgt

SEQ ID NO: 58580 - DNA, 120 bp, Artificial Sequence
  ENSG00000071189_24 (sequence is synthesized)
ttttgaaatgtttcagcacaaccaattaaataggagaatggtttatgtcttcttggaaggctttttagaaaccttatttccacagtataaattccgtgaacttttcaacaaactgcattc

SEQ ID NO: 58581 - DNA, 120 bp, Artificial Sequence
  ENSG00000071189_25 (sequence is synthesized)
acggtcaaagcagatgcagaaatataaacagaaacttcaaactactcaagcgccttctttgcagaaaaggtgacactccactctatgaagctggtgttcattttgtccaggactaatggt

SEQ ID NO: 58582 - DNA, 120 bp, Artificial Sequence
  ENSG00000071189_26 (sequence is synthesized)
taatccaccactaccaagagagatttctgtgtcttaaatgatttggtgcatattttgcaacattgagagaaaactgcccccatctcaagcaagaatggcgttggtttcttccatttcaaa

SEQ ID NO: 58583 - DNA, 120 bp, Artificial Sequence
  ENSG00000071189_27 (sequence is synthesized)
ctaatcagcattctccagcaatgacaaagtgccagagtgtatatatgaaagctaaggaaagcacaaaacaatggttcagagataaattggctaatttgtttaacagttggagactgtgca

SEQ ID NO: 58584 - DNA, 120 bp, Artificial Sequence
  ENSG00000071189_28 (sequence is synthesized)
atgtacgacttggaggagtttgtttggcataatgattttgtaggtctgtcagcattttgatatattgtggattagccaggtgaatgatccttgaaacatctctttcaggtctggagaaag

SEQ ID NO: 58585 - DNA, 120 bp, Artificial Sequence
  ENSG00000071189_29 (sequence is synthesized)
agacagaatgcccttaaagtgtgaaataaccttatacctgaattacagttttgtgatataaaataaagctgagtataaaataaaaccaatcaaacacagaatttgattggatttgttatt

SEQ ID NO: 58586 - DNA, 120 bp, Artificial Sequence
  ENSG00000071189_30 (sequence is synthesized)
cattggtatacaacaatttttattcttatgtgtgctttaagggctgtgttttgctcttagggtactcaattttatgtttccttttggcattctttgtgcaaaaagaagcatgtggtggct

SEQ ID NO: 58587 - DNA, 120 bp, Artificial Sequence
  ENSG00000071189_31 (sequence is synthesized)
ggctctcatttaaatttcaaaattattagttttatctttaacagattactgattatacagaagatataatttattggaagaactgccaaatacattttgtccttctaaaaatatggaaat

SEQ ID NO: 58588 - DNA, 120 bp, Artificial Sequence
  ENSG00000071189_32 (sequence is synthesized)
atagtagtctggaaagttaccatatgataatttttaattgtgtgatctagacatgccttaggtaactgcagaaatagcaaattaaatgattaatgagcttattagtcatagtaaacatac

SEQ ID NO: 58589 - DNA, 120 bp, Artificial Sequence
  ENSG00000071189_33 (sequence is synthesized)
gtgtacatatatgaaaataaatgatgaaaaaagaactataatatttttaaaaatatgcttttatttatatttcacataatgtaaagttctacaaaataaagctagtaggcaagacccctc

SEQ ID NO: 58590 - DNA, 120 bp, Artificial Sequence
  ENSG00000071189_34 (sequence is synthesized)
gctagtaggcaagacccctcagtgtatacctttaaacccataaattaattttatatcaataaaataaaatactttctctagttttggagcttctgtatttcctatagttttctgactgtc

SEQ ID NO: 58591 - DNA, 120 bp, Artificial Sequence
  ENSG00000071189_35 (sequence is synthesized)
cattttatccatcttagaagtattcacatcccttctatgcaggatttctgcatagttttaaatactttcattgcctaagggtttgggtgtgtcagctttttttgttttaaaaatatttaa

SEQ ID NO: 58592 - DNA, 120 bp, Artificial Sequence
  ENSG00000071189_36 (sequence is synthesized)
cactaaaaccttaaaataatgaagctacttatcagaccactgagccaagatcctggtattaaaagaaagtctgggtgcttaagataaagggacagagtattggtatcccagttatttggg

SEQ ID NO: 58593 - DNA, 120 bp, Artificial Sequence
  ENSG00000071189_37 (sequence is synthesized)
agctttaagattggaacaagatatcactgtcttgttttcacttagatcctacttacaaagtgagggttattaacagaataaagccttcctttaaagctttataataatcatatttattaa

SEQ ID NO: 58594 - DNA, 120 bp, Artificial Sequence
  ENSG00000071189_38 (sequence is synthesized)
taatgctgttgtgcatacttatagtatgcatatattcagcatatgttgcatgtcttcagaattacataaaatgaaatccctttcattgcaacttgcaagtgagaaaagatccttagtggc

SEQ ID NO: 58595 - DNA, 120 bp, Artificial Sequence
  ENSG00000071189_39 (sequence is synthesized)
tctggtggaagaaatagtatttcttcttctcagggtgtctccctgccttggcccctccctgagccccaggctttaaaagtgaaaatgtttgaaacatgaaacatgtctgtaggaagcatc

SEQ ID NO: 58596 - DNA, 120 bp, Artificial Sequence
  ENSG00000071189_40 (sequence is synthesized)
agcatggccataagtgcagtgattttcatatatgcctctgcccatttcaaatatatttttgacatgaataaatctaacagtatacagaataattcatgtaagaccctaacgtgtacatgt

SEQ ID NO: 58597 - DNA, 120 bp, Artificial Sequence
  ENSG00000071189_41 (sequence is synthesized)
gaaaaagcatttctatataatgtgaggagcactggccatcaattagggaaataaaggtcatgtaatattgcaaattttcaaaatagagccctgcaagataactgcaatcataccaaaaac

SEQ ID NO: 58598 - DNA, 120 bp, Artificial Sequence
  ENSG00000071189_42 (sequence is synthesized)
tatttgagtaaatggatttttaaagtaatttttgtttagaagagtttatatttcagaagcagaaaatgtcaaatgatagtctttgtaaatggtggtgcaccttctctatgcacatctgtc

SEQ ID NO: 58599 - DNA, 120 bp, Artificial Sequence
  ENSG00000071189_43 (sequence is synthesized)
ttttacatcagaaagagctgtggtcatgctaaaattagagataactttttgaatgacttggtcaagctgtgtgtaaaatatttaaccataagtcaagtacagtgtactatgtttaataaa

SEQ ID NO: 58600 - DNA, 120 bp, Artificial Sequence
  ENSG00000071189_44 (sequence is synthesized)
gttacatttaatgcatttattgcatatatgaatatatacatgaagaggctttatgtcttctggtatttgattttgaatgttttttaagtcagtggtgcctttaggcaagaactttcgaaa

SEQ ID NO: 58601 - DNA, 120 bp, Artificial Sequence
  ENSG00000071189_45 (sequence is synthesized)
ttaatcattctttgtgttttctgatttttcaggtaacatgtacactatttagaaaccatcatagtttattcaccttaaaaaattgattgtattatttaaatatatcacttagatgggcat

SEQ ID NO: 58602 - DNA, 120 bp, Artificial Sequence
  ENSG00000071189_46 (sequence is synthesized)
ttcctataattaggatattccaaatagttgctgaaatcaattgtgccattgaccaatggatgcacttggttagccttaatttttttaaaaaaaaaaaaaacaaaaactttcttgaatatt

SEQ ID NO: 58603 - DNA, 120 bp, Artificial Sequence
  ENSG00000071189_47 (sequence is synthesized)
tcagtttgttcattttaagtttgtgctgctggtatttgggaagaaaaatcaatcagttaagtgctaccagaaagtgtaccaatttttataaaaattaagaatgatataaatttcacaatc

SEQ ID NO: 58604 - DNA, 120 bp, Artificial Sequence
  ENSG00000071189_48 (sequence is synthesized)
taaaattttaattttgtgcaatattttcatttaatgcatgtgtatttgagtaattgtaagataaatgaatttttaattttttgagatgtagcttaaactgtcttcttaatccaacaactt

SEQ ID NO: 58605 - DNA, 120 bp, Artificial Sequence
  ENSG00000071189_49 (sequence is synthesized)
acattccgttgttgctgcatccttttatttaaggacttgttttaaaagtctttttgtcactccttggaaaattcttttattagtagtaaattttgcttttaggagcatggctcctgtatt

SEQ ID NO: 58606 - DNA, 120 bp, Artificial Sequence
  ENSG00000071189_50 (sequence is synthesized)
acaagggaaaaaatatgaagagcacattttaggattataattgttaaaagataatgtgtgcatatcattgtacagtaagtgtcaactgtgtgcctaactgttctatcaatactttctttc

SEQ ID NO: 58607 - DNA, 120 bp, Artificial Sequence
  ENSG00000071189_51 (sequence is synthesized)
tttaacaaagaagaaacaacaatcagaatgtcagttatttttattcaactaaaaggattaaaaaatttatttggtttgtgttctgtccattagaaaatactaataaagtattaacaaaca

SEQ ID NO: 58608 - DNA, 120 bp, Artificial Sequence
  ENSG00000071189_52 (sequence is synthesized)
gagtttttagcattcatcatgccagtgtaactgccttttgattataacaactaccttttgatggcttaatacatatcaggcactgtactaggcatttctcatatgttcttaatcagtcct

SEQ ID NO: 58609 - DNA, 120 bp, Artificial Sequence
  ENSG00000071189_53 (sequence is synthesized)
catgacagtactgtaaagctaaggactgttaacatcaccgctttatatgtgaggaaacggaagctcagagaggttaaataacctatccaaggtttatagctactaagcaacagttggtat

SEQ ID NO: 58610 - DNA, 120 bp, Artificial Sequence
  ENSG00000071189_54 (sequence is synthesized)
tctgacttggctttaagtgatgtgaaagcttatgcttttagccacttcgctctgctgccttgaaacatattgggagttaagttaaataaataaaatacatgacaggtgaaagggctaata

SEQ ID NO: 58611 - DNA, 120 bp, Artificial Sequence
  ENSG00000071189_55 (sequence is synthesized)
aaatataaagtatgaatttttcaggaagaatatttgttgtacttaggaaaacaagttatttcaaaaactccatttacatagaaagaactgattggctgattattaatctttattacttaa

SEQ ID NO: 58612 - DNA, 120 bp, Artificial Sequence
  ENSG00000071189_56 (sequence is synthesized)
tttctcgtttttcttctttcaatcagagaagttatataatgtaaaaagcaatttaatgcggctgggaggtggtgatggttgttttgccccttgttaatgagtatctttgaaaatgcctgc

SEQ ID NO: 58613 - DNA, 120 bp, Artificial Sequence
  ENSG00000071189_57 (sequence is synthesized)
atgtcttttctctgtattttaattctggatgtagagaatgaacagacatatttgtacattctttaatatcacacaataccaatttttttctctaattttgttttcttacctgtattttct

SEQ ID NO: 58614 - DNA, 120 bp, Artificial Sequence
  ENSG00000071189_58 (sequence is synthesized)
ctataaattttaatgaccagccttctcttctgtcaattaaattaaaaatttgccacaattttaattcttacctatataccgtttcatttgctgataaaaaagcaaattatagaaatgaca

SEQ ID NO: 58615 - DNA, 120 bp, Artificial Sequence
  ENSG00000071189_59 (sequence is synthesized)
ttttagaaaaataagaaacaattgcttaggatattatttaatatactattatagtaaacctgattgtgctatatggactgactcagttatctagctggaagaaatctttattcactaaat

SEQ ID NO: 58616 - DNA, 120 bp, Artificial Sequence
  ENSG00000071189_60 (sequence is synthesized)
atttattgaaagttattatgtgccaggtgctgttctttgcacttatgtttgccttcttggagcttactttccagtagaaatagagagactcaaaaacacacagaacaaataaatggaacg

SEQ ID NO: 58617 - DNA, 120 bp, Artificial Sequence
  ENSG00000071189_61 (sequence is synthesized)
tagtttgttagataagtggtaagtactaaagagaaagatactgcaggaaaatggaatagatagtgtcagatgagttgcagttttagatggggtggccagggcaggcctcactgagatgat

SEQ ID NO: 58618 - DNA, 120 bp, Artificial Sequence
  ENSG00000071189_62 (sequence is synthesized)
gatggtggtgtgaagatctgaaggaagtgagggtaaatatgaaagcatataaatttatatatacataatccttgcctattttttagtaaattctcaaaatttttgctttaaattatatct

SEQ ID NO: 58619 - DNA, 120 bp, Artificial Sequence
  ENSG00000071189_63 (sequence is synthesized)
tacccctagttagataaagactttttggaaattgcatgtttctttccaaagcagcaaaataatatctatattatcagtattatgaataattatttgtaattatgaataagaatatgaata

SEQ ID NO: 58620 - DNA, 120 bp, Artificial Sequence
  ENSG00000071189_64 (sequence is synthesized)
attaataatcatacatgttggtctcataacttggtgttatttatgattaaacaccaaatttgctcactcttagtcacagcaccatcggttttctattttctttgctttcttcactttgaa

SEQ ID NO: 58621 - DNA, 120 bp, Artificial Sequence
  ENSG00000071189_65 (sequence is synthesized)
tttaaataaaattcaacccaacttgtactatccctatttcttgagcatgctttgttattctagttactgcttatttgctcattcatgttcttttcaccaaggctaatccttcatctcatt

SEQ ID NO: 58622 - DNA, 120 bp, Artificial Sequence
  ENSG00000071189_66 (sequence is synthesized)
gcacctatcaaaatcctgcccaagtagaaagtctcctttacctgccacttccttaaagggaacttttctttgttatcgcatctgaaagtctccccactaccaatattcttatacttttag

SEQ ID NO: 58623 - DNA, 120 bp, Artificial Sequence
  ENSG00000071189_67 (sequence is synthesized)
catttttatggtatagttactatgccaggggtttttgtagatcagggattaatttttttttttcctgtgttccaatgaaactttattcaccatcatggattagtttgtttccttacagca

SEQ ID NO: 58624 - DNA, 120 bp, Artificial Sequence
  ENSG00000071189_68 (sequence is synthesized)
agcatttgtcactattcattaggcctactaagaatatttgtataatattacaaagtttacagatcactttttacattatttcattaaagacttataaatccttataaggatgttattata

SEQ ID NO: 58625 - DNA, 120 bp, Artificial Sequence
  ENSG00000071189_69 (sequence is synthesized)
ctccttttcagatgagaaaagagagtcagggtggtgggtaagtatcacatgggtattaagggacatgtttgtaatcatagtttgggatctttgagactgttttttattttttatctctta

SEQ ID NO: 58626 - DNA, 120 bp, Artificial Sequence
  ENSG00000071189_70 (sequence is synthesized)
cacctgtgctatattgtctcccagtagcttttgcattaagtgcgtaaatagatgcatgcatgcaaagatgcatattaagtttcagctatagtacatagctgaaatgcattaactggttac

SEQ ID NO: 58627 - DNA, 120 bp, Artificial Sequence
  ENSG00000071189_71 (sequence is synthesized)
ctactgttcatcagttactctgctgtgtaccttaatttaagaacatttaagagtttaggccttgtgtttcctttgaataattatgtgtgttttcctccacttcatttagatgagctgaag

SEQ ID NO: 58628 - DNA, 120 bp, Artificial Sequence
  ENSG00000071189_72 (sequence is synthesized)
agaaaaaacttgactggaagctccagaaaattatagtggaaaaggagacagactgagtccctgggcttagaagatttagagattgattatattgggagctagtttcaagatgaaatacta

SEQ ID NO: 58629 - DNA, 120 bp, Artificial Sequence
  ENSG00000071189_73 (sequence is synthesized)
ctcatttcttcctccaacatcacctggggttcctaagaagaaatgaaacgggaagccaggactattaagattgatagaagattgacgggtgccaatataattgatgaacctctccagcaa

SEQ ID NO: 58630 - DNA, 120 bp, Artificial Sequence
  ENSG00000071189_74 (sequence is synthesized)
tgccttttaaaattacaactctgttttagaaataatttttgaaatgtaaaaatatagttgggagatagggtgtttaagcagtaatttattaaagaaattaagtaaaaatgtttctgaagt

SEQ ID NO: 58631 - DNA, 120 bp, Artificial Sequence
  ENSG00000071189_75 (sequence is synthesized)
tgccatcacagtggaggtagcaacagggttgcttgtgtcacccctctcccagctccacacaactcagcagagagactgactctgtttgggagaatgtaagggaagaaagcaagagtttct

SEQ ID NO: 58632 - DNA, 120 bp, Artificial Sequence
  ENSG00000071189_76 (sequence is synthesized)
gcctgagagaagagagcatggaggcagagcagaaacttcgttagcaggcattctgtcctttggttaaaagataaaagtggccaagatgtggaaaaaggataataaaacacaaaggaataa

SEQ ID NO: 58633 - DNA, 120 bp, Artificial Sequence
  ENSG00000071189_77 (sequence is synthesized)
tccacatcttatttaggaccataaaggcaataccactacaagtctttcagagccacaacattagtaggcttagggtgcctctaatgtatatatggctacagttactagaaacatagatca

SEQ ID NO: 58634 - DNA, 120 bp, Artificial Sequence
  ENSG00000071189_78 (sequence is synthesized)
caacacccaagttcctttgaatacctggaaagccttcccaagaaggactgggacaaacaagcccagactgtaaagactgcaataaatgcctaactcttcaatgtccagacatcagtgaac

SEQ ID NO: 58635 - DNA, 120 bp, Artificial Sequence
  ENSG00000071189_79 (sequence is synthesized)
atccacaagcatcaagaccattcaggaaaacattggcctcaccaaatggactaaataagacaccacagaccaatcctggagacagagatatgtgtccttttgggtggaaaaatcagaata

SEQ ID NO: 58636 - DNA, 120 bp, Artificial Sequence
  ENSG00000071189_80 (sequence is synthesized)
gttgttttgaggaagtacaacaaaattcaagataatacagagaaggaattcagaatcttatcagataaatttaacaaagagattaaaataataaatagaatcaagcacaaatcttggagt

SEQ ID NO: 58637 - DNA, 120 bp, Artificial Sequence
  ENSG00000071189_81 (sequence is synthesized)
tgaaaaatgcagttgacctactgacgaatgcatcagaatttcttaacagaattgatcaagcagaagaaggaatgagtgaacttgaagacaggctaattgaaaatacacagaggagaaaaa

SEQ ID NO: 58638 - DNA, 120 bp, Artificial Sequence
  ENSG00000071189_82 (sequence is synthesized)
agaataaaaaggaatgaggcacaactacaagatctagaaaatagcctcaaaagggcaaatttaagagttattgtccttaaagaggaggtagagagagagttaggcgtagaaaatttattc

SEQ ID NO: 58639 - DNA, 120 bp, Artificial Sequence
  ENSG00000071189_83 (sequence is synthesized)
agatagataataacagagagcctctcaaacctagtaaaagatatcaatattaaaatacaagaaggttatagaacactgagcagatttaacccaagactacctcaagatacttaataatca

SEQ ID NO: 58640 - DNA, 120 bp, Artificial Sequence
  ENSG00000071189_84 (sequence is synthesized)
aactctcaaaggtcaaggatgaagaaaggatcctaaaagcagcaagagaaaaagaaaaaaacatggaatggtgctccagtacatttgccagcagacttctcagtggaagttgtacaggcc

SEQ ID NO: 58641 - DNA, 120 bp, Artificial Sequence
  ENSG00000071189_85 (sequence is synthesized)
aggagagagtggcatgccatattttagtgtggattaggaacttcagcaaagtattatcagaggaactgagtgtctctgtactttattctaaataactatgtcctacttacccgctcttag

SEQ ID NO: 58642 - DNA, 120 bp, Artificial Sequence
  ENSG00000071189_86 (sequence is synthesized)
accagtaaggaaaacaacttttaaggggaggaattgtttattaaaaggtaagtagaacagcagattattactgtgggataactccaagattttacaactagagctcttaaaacctttaaa

SEQ ID NO: 58643 - DNA, 120 bp, Artificial Sequence
  ENSG00000071189_87 (sequence is synthesized)
ccacttattgctacttcccccctcccccttccctagaccctctgttttatgtgagtgctatgaaaatagattagtttcagtgtaactgctcttctccacatagttttgctgtaacccttc

SEQ ID NO: 58644 - DNA, 120 bp, Artificial Sequence
  ENSG00000071189_88 (sequence is synthesized)
tcctaattatgacacatatctattggaagtcctcttggacgagaagggaccaaaggaacataagtcagtggaaaatattcaagtttatatttttcagaaaagaagtatattttggtgagt

SEQ ID NO: 58645 - DNA, 120 bp, Artificial Sequence
  ENSG00000071189_89 (sequence is synthesized)
ttgttttaacaaactttttttgtcagatatactaaaattcttactttacaaaccagctatatactgcttcccatatgatgaaagtgttttgacttctattcttgtacttaaactgcttga

SEQ ID NO: 58646 - DNA, 120 bp, Artificial Sequence
  ENSG00000071189_90 (sequence is synthesized)
ttttttttgatgggaggctatttcacacctgtttaaattatgtttactttcatttttatttttgaaggctttttttcccctccatccttgatgtctaactttttgaaagccttttaatgg

SEQ ID NO: 58647 - DNA, 120 bp, Artificial Sequence
  ENSG00000071189_91 (sequence is synthesized)
gcaacgttatgtgaaagggaatacttgtgttctagaaattatttatttttgaaagaaagattttatgtttggatgagtttgtagattttttttttttattccattaaaatatgttgctac

SEQ ID NO: 58648 - DNA, 120 bp, Artificial Sequence
  ENSG00000071189_92 (sequence is synthesized)
catcacacgcaaagattgccctgctaggtatttccagccatgctgccctctcaggccctttcctctatctccattgattataaagctttagatttggagttggctagaggaagggcattg

SEQ ID NO: 58649 - DNA, 120 bp, Artificial Sequence
  ENSG00000071189_93 (sequence is synthesized)
gatgtgtttcccaacctcattggggagcctggcacaagttttatgatttgaacaataattgttacagagatagatttgtactcctcatccctcgtgattaggagcaagaatttacaaagt

SEQ ID NO: 58650 - DNA, 120 bp, Artificial Sequence
  ENSG00000071189_94 (sequence is synthesized)
agccagccagaattacagatgcagactcactgtggaacacagaacatataattggtataatcaaagaaagtcagaatttgaatttaatctcttttatttcatatgcaccattattgagtg

SEQ ID NO: 58651 - DNA, 120 bp, Artificial Sequence
  ENSG00000071189_95 (sequence is synthesized)
ttaggtattctttcagataactcttctaaatattttttattgctttctatagcaacactatcctgatgactttttttttctttgaaagggtgagaataggaagaattcattattcttgtg

SEQ ID NO: 58652 - DNA, 120 bp, Artificial Sequence
  ENSG00000071189_96 (sequence is synthesized)
cctgactattgaaaaatatataaaaatgtgtaacacattttagacctgggaagagatttgaactagtaatctgaaaacttgagtttgcattctagctccacctctagctatgggactgtg

SEQ ID NO: 58653 - DNA, 120 bp, Artificial Sequence
  ENSG00000071189_97 (sequence is synthesized)
agcaagtgtctttaaactctgaaccttggtttttctcatatgtaaaataagtgtaataataactgccctgttctgtgttcctctcaggataattgtcaggatcaaaattcatcttattca

SEQ ID NO: 58654 - DNA, 120 bp, Artificial Sequence
  ENSG00000071189_98 (sequence is synthesized)
actaatattttgggcatactttgtaccaaccagatgctggggatacagcagtgaataaaacaaagtccctgctcagtggagtgaaatgaaatacctgtgacagtgttttgaaaattgtga

SEQ ID NO: 58655 - DNA, 120 bp, Artificial Sequence
  ENSG00000071189_99 (sequence is synthesized)
aggaatttagaaatttaagtttttatgccatccaacacccataattttactgatgaggaagctaaggtccagaaaggtaaagtggttagtctaatgttatctagtgagttagaatcaaat

SEQ ID NO: 58656 - DNA, 120 bp, Artificial Sequence
  ENSG00000071189_100 (sequence is synthesized)
tgttcttaagtttggtattttttctcctacccaattaaatattttataatctaggttatttatcttagtttcctgctcttctttcctgttattgcaatactttccctgtttttgatcccc

SEQ ID NO: 58657 - DNA, 120 bp, Artificial Sequence
  ENSG00000071189_101 (sequence is synthesized)
tagtcacctttcttttcactgtaggtattaagtttttttttcttttgaaaacattcagtgctatcaagcttagtgaaaaagcaaggttttttccatcctacactgatctaaatttatatc

SEQ ID NO: 58658 - DNA, 120 bp, Artificial Sequence
  ENSG00000071189_102 (sequence is synthesized)
tttgcttgaccatttaccttaaatttctggaaaattaaaacaatacagataataactactttagaggctgctttgaggctaaaaaatggtatcaaataaagttcttagcgtgcagtaaaa

SEQ ID NO: 58659 - DNA, 67 bp, Artificial Sequence
  ENSG00000071189_103 (sequence is synthesized)
cgatgatgaatcttttcttcttgaaattaggcagactcttcaaaacgcactcattcagtttgctact

SEQ ID NO: 58660 - DNA, 120 bp, Artificial Sequence
  ENSG00000071189_104 (sequence is synthesized)
accttggtctcactgtgtctcctagaatatgtaatttaaattctggctctgaaattacagggaattgtggtagtgatttgagaaccctttcagttctaaaatagtaagattctctggtca

SEQ ID NO: 58661 - DNA, 120 bp, Artificial Sequence
  ENSG00000071189_105 (sequence is synthesized)
ggttgttactaatcttgatttcttttcaatcatgtttcctcccaaaacacacactaacatactccatcacactccacattttgaataccatttggggagttatttttttttaagtatata

SEQ ID NO: 58662 - DNA, 120 bp, Artificial Sequence
  ENSG00000071189_106 (sequence is synthesized)
ggattgctaattagagttaatttactttgggattaaagtactcttcatatctattgttttattagtaggggtcttatagtaggataacaaaatttatttaaaccttttaatatatttcta

SEQ ID NO: 58663 - DNA, 120 bp, Artificial Sequence
  ENSG00000071189_107 (sequence is synthesized)
aatgatcagaaagaatgcttgattctaaacataaaatacatttactaatctcttctcgatgattaaaacccttgtatcaatgaaataaaaagtttttgtacaaccagactattgctgttc

SEQ ID NO: 58664 - DNA, 120 bp, Artificial Sequence
  ENSG00000071189_108 (sequence is synthesized)
tttatagaatgctgaaaacaataaatctgtagtgttatgagtttgattttttttaagttttctgaagtgtaagttctcccaccacgttcagttttaagctatcagcatgaagtcactgaa

SEQ ID NO: 58665 - DNA, 120 bp, Artificial Sequence
  ENSG00000071189_109 (sequence is synthesized)
catggaaataggaagagatgtacacaattgtttgcctactccagctcacagttggagaggatacagctaagtgaagagggggcagaggcagatttgtaaacctgaagtaatgagttgtat

SEQ ID NO: 58666 - DNA, 120 bp, Artificial Sequence
  ENSG00000071189_110 (sequence is synthesized)
ttccttgtgtggttgctaatttagctcctatgaaagaattccccgtatatttttgaggactatggtagggggtactcatacattaactttaagttcaggaatgtttgtgaagaaggtcaa

SEQ ID NO: 58667 - DNA, 120 bp, Artificial Sequence
  ENSG00000071189_111 (sequence is synthesized)
attagtttcattattttaatcaatactgacaactaaatccttaaagtggatgataaaaggagactctggagagatggttatggtaacatgtagtatttatgactgaattgacgtaggggg

SEQ ID NO: 58668 - DNA, 120 bp, Artificial Sequence
  ENSG00000071189_112 (sequence is synthesized)
gattgatttagtggattcaaaatgaagcttacaattctgtgcctttacaattttacccaaattcaatttcagcctgagtttttgacaccgttaacaaagtagttcttcaaggactctgaa

SEQ ID NO: 58669 - DNA, 120 bp, Artificial Sequence
  ENSG00000071189_113 (sequence is synthesized)
ggatggaaacaagtaaaggattatgtatttagagtgaagagtagtatatcctttctaatagtgaattaagagggggacttagtatctgattcagagactcaggagaaggaatttttttct

SEQ ID NO: 58670 - DNA, 120 bp, Artificial Sequence
  ENSG00000071189_114 (sequence is synthesized)
ttcacagataagccactcagttgctttctctcaacaaaaaaaagtctgagtcagttgatcaaaaggccttctaatggagtaaaacttttctcaaaatctactcaaagttacttgtcaaaa

SEQ ID NO: 58671 - DNA, 120 bp, Artificial Sequence
  ENSG00000071189_115 (sequence is synthesized)
gaagataaagaccttttgttgaagattaatacatattattataattttatgtgattggttattatattgatcttattaacatacctttaaaaaggccaactcttaacgtgcgtgtgtgtg

SEQ ID NO: 58672 - DNA, 120 bp, Artificial Sequence
  ENSG00000071189_116 (sequence is synthesized)
tgtgtgtgtgtgtgtttgtgtatgtgtatatgtatataccttttcccttgagattcctttcagttctaaaatactaagattctatggacctctgtgtgtgtgtgtgtgtgtgtgtgttgt

SEQ ID NO: 58673 - DNA, 120 bp, Artificial Sequence
  ENSG00000071189_117 (sequence is synthesized)
tgtctatgtatacctacacattatgcagtatatagtatactctaccattcttactgtttttaaaaaaggtcttcgtagtcatttctctgaaaaactaatgtggcatcaggagcataacat

SEQ ID NO: 58674 - DNA, 120 bp, Artificial Sequence
  ENSG00000071189_118 (sequence is synthesized)
ttattataggattgttttctgtggaaaaagcagcttttacttttatcattttgacataaggcaccttttccaggaaaatattctgccatgaatgtgaagatcgcctttactgccaagcga

SEQ ID NO: 58675 - DNA, 120 bp, Artificial Sequence
  ENSG00000071189_119 (sequence is synthesized)
tcaccctctcctctagtcaggcaagtctacaagatgacccttgcatatatatttatcatgctcatccccctcttctgctcattcctgtgtcctttcttctcccatataaatactgctctt

SEQ ID NO: 58676 - DNA, 120 bp, Artificial Sequence
  ENSG00000071189_120 (sequence is synthesized)
tcatcaagatttaagtgtagcctctttaatgaagcctctttaaattatgacatattccttaatctatagtctttgtgtgtgtggttctcgtcaacaaaattttaagctgattttgaaatg

SEQ ID NO: 58677 - DNA, 120 bp, Artificial Sequence
  ENSG00000071189_121 (sequence is synthesized)
gttcctattctgtgctattgcagtgaaagttctcttaactgatgtttggttagccagtgctctccattccctttgtatgctgtactgactgataaccttagcattaagactaggctctat

SEQ ID NO: 58678 - DNA, 120 bp, Artificial Sequence
  ENSG00000071189_122 (sequence is synthesized)
tacatctatccacttctgtttccacccttggagttgtatgcttatcaaaagtcagttgtgtgatacctggaccccacctccagaaaatctgatacaattagtctgtagtgtgacctgaat

SEQ ID NO: 58679 - DNA, 120 bp, Artificial Sequence
  ENSG00000071189_123 (sequence is synthesized)
attggtgatttagaggagacagataatcaaacacgttgaaataaaagttgtatttgtttttgagcctaaatatcccagttacactttttatgataatcaggtcgtttaattaacagtcaa

SEQ ID NO: 58680 - DNA, 120 bp, Artificial Sequence
  ENSG00000071189_124 (sequence is synthesized)
cttagattgaagaaatatgaatatgacaaggtagtttctatgaaaaccaagtcacttgctttggaattactcgcagctggttgaagagtgtaattgaattaagtgagcgaaaggcagcta

SEQ ID NO: 58681 - DNA, 120 bp, Artificial Sequence
  ENSG00000071189_125 (sequence is synthesized)
tgaaatttgaaagtcttcaaggactctgcatgcagatttgttcacaaatgtctttattgccatgccattttaaagaaactggaaaccataggttttgcagtgtaggaacagttcatagtt

SEQ ID NO: 58682 - DNA, 120 bp, Artificial Sequence
  ENSG00000071189_126 (sequence is synthesized)
ttttcaagacccaggtcatgttaataccactcagcagagccttaaccaaagaaaaagtcttattcctacacaggaagatttatataattgaacttaaagtgaaatatattcatggctccc

SEQ ID NO: 58683 - DNA, 120 bp, Artificial Sequence
  ENSG00000071189_127 (sequence is synthesized)
tcttttgatcgaatgtttaaatttacctactgcccaattaccagttttttatacactccatccctgtgtatgtatatgtgtggttttatgtagctaatataatcatagactcaaagatgt

SEQ ID NO: 58684 - DNA, 120 bp, Artificial Sequence
  ENSG00000071189_128 (sequence is synthesized)
aatgagtgttgttagagaaaacaaactttgggaaatgatgtgacttgctgaatttcatagactggcactgatgcctttgatttgagtaaaagacccatcatttgggggagtcttttgtta

SEQ ID NO: 58685 - DNA, 120 bp, Artificial Sequence
  ENSG00000071189_129 (sequence is synthesized)
gaatcaaaggcatctgtgtcagtccagtgcgttttccagaaatacttgattttggtagtgttttgtgctactgatgatgagctgtacactgcttagaatagatggaacaagtgaggcaat

SEQ ID NO: 58686 - DNA, 120 bp, Artificial Sequence
  ENSG00000071189_130 (sequence is synthesized)
ttacaatcctaaactcaaccacatatttgggcctttacttgcctttttaagggattggcattaagtagccatgggacaaaaagagcttctcagtacatattctactttaacactttaagg

SEQ ID NO: 58687 - DNA, 120 bp, Artificial Sequence
  ENSG00000071189_131 (sequence is synthesized)
agtaaggaagcaattgttgtttgtgcctcctgttgccattgtccaaacacccattgtaaacagtgctccgaccctgaaaaaggaatcaataaatcaatatgcattgagtgcctctaataa

SEQ ID NO: 58688 - DNA, 120 bp, Artificial Sequence
  ENSG00000071203_0 (sequence is synthesized)
acacaggttggagcagagaaagaggaaacatagaggtgccaaaggaacaaagacataatgatgtcatccaagccaacaagccatgctgaagtaaatgaaaccatacccaacccttaccca

SEQ ID NO: 58689 - DNA, 120 bp, Artificial Sequence
  ENSG00000071203_1 (sequence is synthesized)
ccaagcagctttatggctcctggatttcaacagcctctgggttcaatcaacttagaaaaccaagctcagggtgctcagcgtgctcagccctacggcatcacatctccgggaatctttgct

SEQ ID NO: 58690 - DNA, 120 bp, Artificial Sequence
  ENSG00000071203_2 (sequence is synthesized)
agcagtcaaccgggtcaaggaaatatacaaatgataaatccaagtgtgggaacagcagtaatgaactttaaagaagaagcaaaggcactaggggtgatccagatcatggttggattgatg

SEQ ID NO: 58691 - DNA, 120 bp, Artificial Sequence
  ENSG00000071203_3 (sequence is synthesized)
cacattggttttggaattgttttgtgtttaatatccttctcttttagagaagtattaggttttgcctctactgctgttattggtggatacccattctggggtggcctttcttttattatc

SEQ ID NO: 58692 - DNA, 120 bp, Artificial Sequence
  ENSG00000071203_4 (sequence is synthesized)
ttggccttcattggagtgattctgctgctggtggatatgtgcatcaatggggtagctggccaagactactgggccgtgctttctggaaaaggcatttcagccacgctgatgatcttctcc

SEQ ID NO: 58693 - DNA, 120 bp, Artificial Sequence
  ENSG00000071203_5 (sequence is synthesized)
ctcttggagttcttcgtagcttgtgccacagcccattttgccaaccaagcaaacaccacaaccaatatgtctgtcctggttattccaaatatgtatgaaagcaaccctgtgacaccagcg

SEQ ID NO: 58694 - DNA, 120 bp, Artificial Sequence
  ENSG00000071203_6 (sequence is synthesized)
tcttcttcagctcctcccagatgcaacaactactcagctaatgcccctaaatagtaaaagaaaaaggggtatcagtctaatctcatggagaaaaactacttgcaaaaacttcttaagaag

SEQ ID NO: 58695 - DNA, 120 bp, Artificial Sequence
  ENSG00000071203_7 (sequence is synthesized)
atgtcttttattgtctacaatgatttctagtctttaaaaactgtgtttgagatttgtttttaggttggtcgctaatgatggctgtatctcccttcactgtctcttcctacattaccacta

SEQ ID NO: 58696 - DNA, 120 bp, Artificial Sequence
  ENSG00000071203_8 (sequence is synthesized)
ctacatgctggcaaaggtgaaggatcagaggactgaaaaatgattctgcaactctcttaaagttagaaatgtttctgttcatattactttttccttaataaaatgtcattagaaacaaaa

SEQ ID NO: 58697 - DNA, 120 bp, Artificial Sequence
  ENSG00000071203_9 (sequence is synthesized)
aggaaacatagaggtgccaaaggaacaaagtaagtccattgatacgttcttgcctatctctcctccaaatcaatgggcacaaactgtggctggtctacctgtgtgggttctgttctctag

SEQ ID NO: 58698 - DNA, 120 bp, Artificial Sequence
  ENSG00000071203_10 (sequence is synthesized)
attggagggatgaagacaagttcttgactctatgttgaggccagttgaaaaatgagggagaataaaaccatgaacgaaacaagaaagaaacaaaacagaagaggaatgaaaaagacataa

SEQ ID NO: 58699 - DNA, 120 bp, Artificial Sequence
  ENSG00000071203_11 (sequence is synthesized)
aaggcactaggggtaagtctatttactaccagaattttaatttcacatttgcaaggtcttcttataagttataggagagtatcatccaattgctaaaaagttctgaacgttattctgaaa

SEQ ID NO: 58700 - DNA, 120 bp, Artificial Sequence
  ENSG00000071203_12 (sequence is synthesized)
ttatctcttttagacagaaatatttagtctgcctatagactttcccttgagttcatttcattttagatcaagcaaaaatataacaagacacagaggagcctccctagctggagaatttgg

SEQ ID NO: 58701 - DNA, 120 bp, Artificial Sequence
  ENSG00000071203_13 (sequence is synthesized)
taatattgacgtgacagaagcactgttacatctagcttgatctcatttcttcaaaggactttttggacaatctcaatcccatctctggattagttacaagtctggtttttgcataaaggt

SEQ ID NO: 58702 - DNA, 120 bp, Artificial Sequence
  ENSG00000071203_14 (sequence is synthesized)
gaatttacataacaatgaacaatgatggctgcccccagaaaaggaaactacaaatgggcagtctgggaaaggctgagtgtgaaagaattgggggacattccatctgctatgcctctttca

SEQ ID NO: 58703 - DNA, 120 bp, Artificial Sequence
  ENSG00000071205_0 (sequence is synthesized)
ggggcgccgcagctagcgctggtctcggtggcagctcctccgcgccgcaggactcggctctacgggacatgtccgtgccgcgctcgccgcgcgcccgggcctgctagctcctctgtgctc

SEQ ID NO: 58704 - DNA, 120 bp, Artificial Sequence
  ENSG00000071205_1 (sequence is synthesized)
cctgaacgcgcggcgccgcacctggcagcggcctcggagctcggctcgggcaggagcgcgcggccgtgcgcaccgcgcagcgaccgctgccgtcatggggctgcagcccctggagttcag

SEQ ID NO: 58705 - DNA, 120 bp, Artificial Sequence
  ENSG00000071205_2 (sequence is synthesized)
cgactgctacctcgacagcccgtggttccgggagaggatccgcgctcacgaagcggaactcgagaggaccaacaagttcatcaaagagctcattaaggacgggaagaacctcatcgctgc

SEQ ID NO: 58706 - DNA, 120 bp, Artificial Sequence
  ENSG00000071205_3 (sequence is synthesized)
gacgaaaagtctgtcagtggcccagcggaagtttgctcattcactcagagactttaagtttgagtttatcggtgatgctgtgacagatgatgaacgatgcatagatgcttccttacgtga

SEQ ID NO: 58707 - DNA, 120 bp, Artificial Sequence
  ENSG00000071205_4 (sequence is synthesized)
attttcaaattttttgaagaatctggaggaacagagagaaattatggcattaagtgtaactgaaaccctgattaaacccttggaaaaattcagaaaagagcaacttggagctgtaaagga

SEQ ID NO: 58708 - DNA, 120 bp, Artificial Sequence
  ENSG00000071205_5 (sequence is synthesized)
agaaaaaaagaagtttgacaaagagacagaaaagaattatagtctaattgataaacatttgaatttatcagcaaaaaagaaagactcacatttacaagaggcagatatccaagtagagca

SEQ ID NO: 58709 - DNA, 120 bp, Artificial Sequence
  ENSG00000071205_6 (sequence is synthesized)
gaaccggcaacacttctatgaactgtctctcgagtatgtgtgtaagctgcaggaaatccaagaaagaaagaagtttgagtttgtggaacctatgctgtcattttttcaggggatgtttac

SEQ ID NO: 58710 - DNA, 120 bp, Artificial Sequence
  ENSG00000071205_7 (sequence is synthesized)
cttctatcatcagggccatgaacttgccaaagacttcaatcactacaaaatggaactacagatcaacattcagaatacacggaatcgatttgaaggaacaaggtcagaagtggaagagct

SEQ ID NO: 58711 - DNA, 120 bp, Artificial Sequence
  ENSG00000071205_8 (sequence is synthesized)
catgaacaaaatcagacagaatcccaaggaccacaaacgagcaagtcagtttacagccgaaggctacctgtatgtccaggaaaaaaggcctgctccgtttggttccagttgggtcaaaca

SEQ ID NO: 58712 - DNA, 120 bp, Artificial Sequence
  ENSG00000071205_9 (sequence is synthesized)
ctattgcatgtatcgaaaagcagcaaagaagttcaacatgatcccatttgagcacagatctggagggaaacttggggacggagaggtgttctttttgaaagaatgtaccaagaggcatac

SEQ ID NO: 58713 - DNA, 120 bp, Artificial Sequence
  ENSG00000071205_10 (sequence is synthesized)
tgactccattgacagaaggttttgttttgacatagaagctgctgatcggcctggcgtttccttgaccatgcaggcattttccgaagaggaaaggaagcagtggttggaagctctgggtgg

SEQ ID NO: 58714 - DNA, 120 bp, Artificial Sequence
  ENSG00000071205_11 (sequence is synthesized)
aaaggaagctctgtcccatagttttaatacagccatcatcccaagaccagaaggaaatgcacagttggataagatggggttcacaattatcagaaaatgcatcagtgccgttgaaacacg

SEQ ID NO: 58715 - DNA, 120 bp, Artificial Sequence
  ENSG00000071205_12 (sequence is synthesized)
aggtataaatgaccaaggattgtacagagttgtgggggtgagttcaaaggtccagagacttctgagtatgttgatggatgtaaaaacatgcaatgaggtggacctggagaattctgcaga

SEQ ID NO: 58716 - DNA, 120 bp, Artificial Sequence
  ENSG00000071205_13 (sequence is synthesized)
gaaacagtatttgaggagtcttccagagcctctcatgacctatgagttacatggagatttcattgttccagccaaaagcggcagcccagaatctcgtgttaatgcgatccatttcttggt

SEQ ID NO: 58717 - DNA, 120 bp, Artificial Sequence
  ENSG00000071205_14 (sequence is synthesized)
acacaaactgccagagaagaataaagagatgttggatattttggtgaaacacttaacaaatgtttcaaatcactccaagcagaacctgatgactgtggcaaacttaggagtggtgtttgg

SEQ ID NO: 58718 - DNA, 120 bp, Artificial Sequence
  ENSG00000071205_15 (sequence is synthesized)
accaactctgatgaggccacaggaagaaactgtcgctgccctcatggacttgaagtttcagaatattgttgtggaaatcttaattgaaaaccatgaaaagatttttcggacgccgcccga

SEQ ID NO: 58719 - DNA, 120 bp, Artificial Sequence
  ENSG00000071205_16 (sequence is synthesized)
tactacattccctgagcccacctgcctgtcagcatcacccccaaatgcgccaccaaggcagtcgaagagacaaggccagagaaccaagaggcccgtggccgtctacaatctttgtctgga

SEQ ID NO: 58720 - DNA, 120 bp, Artificial Sequence
  ENSG00000071205_17 (sequence is synthesized)
gctggaagatggtgacaatccttacccttccaaggaggacacccctaccagcagtctggactcactttcctccccgtctcccgtgactacagctgtccctgggcctcctggaccagacaa

SEQ ID NO: 58721 - DNA, 120 bp, Artificial Sequence
  ENSG00000071205_18 (sequence is synthesized)
aaaccaccttctggcagatggagggagctttggagactgggcatccactatcccaggccagacccgatcgtctatggtccagtggcttaacccacagtctccaaccacaacaagctccaa

SEQ ID NO: 58722 - DNA, 120 bp, Artificial Sequence
  ENSG00000071205_19 (sequence is synthesized)
ctcagctgtgacacctctttcacccgggtcgtcccctttccccttttctcctcctgctactgtagcggacaagccacctgaaagcatccgcagtcggaaggctcgagccgtgtatccgtg

SEQ ID NO: 58723 - DNA, 120 bp, Artificial Sequence
  ENSG00000071205_20 (sequence is synthesized)
tgaagcagaacacagctcggaattatcttttgaaataggagcaatttttgaggatgtacaaacctccagggaacctggctggctagaagggactctgaacggcaagagggggctgattcc

SEQ ID NO: 58724 - DNA, 120 bp, Artificial Sequence
  ENSG00000071205_21 (sequence is synthesized)
acagaactacgtcaagctgctgtagctcctggcctcagagcccctgctgaccctggcacccagggacctgcctgggggcagagagctgtcttcctcctccgaggctctgggctgcaccca

SEQ ID NO: 58725 - DNA, 120 bp, Artificial Sequence
  ENSG00000071205_22 (sequence is synthesized)
caggtacctccacacttgggagttaccatcatcacagtcagccctgggggtggggggtggtgggcagggatgggacgcaccacacagaactgtgattgtggatcaggaggggaatgtcag

SEQ ID NO: 58726 - DNA, 120 bp, Artificial Sequence
  ENSG00000071205_23 (sequence is synthesized)
gattcgcaaaatggacttttcatttgtcaagtattgggacttgtgatttttaattatccagcatatagaatgagagggagggcagccttctgccacctgtgtcgcctccactggcagtca

SEQ ID NO: 58727 - DNA, 120 bp, Artificial Sequence
  ENSG00000071205_24 (sequence is synthesized)
cgccaccagagccaccctggctccctctcctccctgagcacctgctgctgcgattttaaagggaactgtactactcgcagtgataggtttgcagagtgtgtgcttggctgtggcagccta

SEQ ID NO: 58728 - DNA, 120 bp, Artificial Sequence
  ENSG00000071205_25 (sequence is synthesized)
gcttggagaagctgctgttggtgcaagggagatggtctcaagtcagagggaagcagagacgcgcgtctcaagcctgcccttcctagacggccacctgcaggaccccacactcactgcact

SEQ ID NO: 58729 - DNA, 120 bp, Artificial Sequence
  ENSG00000071205_26 (sequence is synthesized)
ggcagcgtgcactggcgtatttgtaacaggcttctcggtgctcctcacccgtgtgctgttttccaaacaccacctttttgcctcaaggtctctgtaaatgaaataaactgtaatttacta

SEQ ID NO: 58730 - DNA, 120 bp, Artificial Sequence
  ENSG00000071205_27 (sequence is synthesized)
gggaagcagtaggaaccttagctgcttggaatggaatggttgattatccagaatgtttgggatatgtggaatgtatcaacacgaggcacagtggtgtactgtcagtaatgcagcatttgc

SEQ ID NO: 58731 - DNA, 120 bp, Artificial Sequence
  ENSG00000071205_28 (sequence is synthesized)
tgacgattgttttttagaaagcaagttgcctcatttagaatagatttctatatgcgtgtgatatgtactcttcagagacagagactcctggtagtgtcagaaaacaaacaacaacaacaa

SEQ ID NO: 58732 - DNA, 120 bp, Artificial Sequence
  ENSG00000071205_29 (sequence is synthesized)
tgtggagaaattttgttcttggaatagaagcaagatcattcctccatcaccataacatacatgcagttttgccaagagaatgtggaacgtagctgccctgccccaggcctgtctcatgtt

SEQ ID NO: 58733 - DNA, 120 bp, Artificial Sequence
  ENSG00000071205_30 (sequence is synthesized)
gatgtctcttttccagccagaaatctctgtgtctggtgatgcctttgcccaagttttgctctggcccgctgggcttgttctgcctgctcttcctggcaggctgcactcggcttgtgctac

SEQ ID NO: 58734 - DNA, 120 bp, Artificial Sequence
  ENSG00000071205_31 (sequence is synthesized)
tggcctggatctcatgcctgccaagggcgagccaggcacggagtggcgaggagttcgtgagtgagttcagggtcatccggccactgtgcacagccgggcatgccgactgtggtggggcag

SEQ ID NO: 58735 - DNA, 120 bp, Artificial Sequence
  ENSG00000071205_32 (sequence is synthesized)
gcagctccaggcacaggcactggctccgtgcaaggctgtggctggaccaggcatactgcaggtcgcttccattgtgggcactgggaacacggtggcacccggaaacttggagacaccagg

SEQ ID NO: 58736 - DNA, 120 bp, Artificial Sequence
  ENSG00000071205_33 (sequence is synthesized)
aaccgcagagccccaaagaggatgtcacagccctggcttagggagcccctaggtctgggctccccgaagggccgcagctcttctctccttctcgtcgcccacaatgtagtgagcagggga

SEQ ID NO: 58737 - DNA, 120 bp, Artificial Sequence
  ENSG00000071205_34 (sequence is synthesized)
gggggaggatcacccctgtttgtgttacagctctttcagtctggccattccttgggtcccaagttcttgtcccacatccaagaggaatgaggtatggagacaactggagggtgagcaagg

SEQ ID NO: 58738 - DNA, 120 bp, Artificial Sequence
  ENSG00000071205_35 (sequence is synthesized)
tacaggggaacttcattgagcaacagaacagttctcaggagacctgaagtgagtagcctttttctgcaggcaggtcgacgtaatgagtgtccagctctcactggagaggagacctgtagt

SEQ ID NO: 58739 - DNA, 120 bp, Artificial Sequence
  ENSG00000071205_36 (sequence is synthesized)
gcatagctcctttccacaggcaggtcatcctgactagtggaggagacccccagagggttgctccttccaacagctggtagtccccatgtctttctgagtctggctgagtccagagttttt

SEQ ID NO: 58740 - DNA, 120 bp, Artificial Sequence
  ENSG00000071205_37 (sequence is synthesized)
ctgggctcagaagggaggaagtgtgctgattggcccatgcgcagccatgagtgggcctggaaaaagcaccgtaagttttcatcccaggctgcagactccacctagaactggcagcccagc

SEQ ID NO: 58741 - DNA, 120 bp, Artificial Sequence
  ENSG00000071205_38 (sequence is synthesized)
ggctcccaggcttcaggccatccctggcttgaagctggggtttcaccagggacctgtctgtcccttcccacctaggaacctgtctcccgcagctgtcaacatgtcatccatggcgcccaa

SEQ ID NO: 58742 - DNA, 120 bp, Artificial Sequence
  ENSG00000071205_39 (sequence is synthesized)
ggtatttgtgccaagaggtgcctgcaggcccctgttaagctgctctcagccccctggcctccctcctgtgcttgttggcatccaaagtccagagggggccgagctggaggttggggttac

SEQ ID NO: 58743 - DNA, 120 bp, Artificial Sequence
  ENSG00000071205_40 (sequence is synthesized)
caggggcgctggcatgtcagaaccaccctgtgtgcatgcatacccggctgggtggcaacagtacctgggcttggctacaactttgctccacactgcatcaggcgccgggagccgggagag

SEQ ID NO: 58744 - DNA, 120 bp, Artificial Sequence
  ENSG00000071205_41 (sequence is synthesized)
gccagggagcaggagcaggcacttcttgagcctgctggtggggcagtgggccttcgccggcccccaagagcacagggatgccctggtccagagctgtggctgcacggctgcagctgtgtc

SEQ ID NO: 58745 - DNA, 120 bp, Artificial Sequence
  ENSG00000071205_42 (sequence is synthesized)
tgggagcatggggctcctgccctgataactctgtagaagttggggctcctgcctgtttctggcccccgcgggcaccatggagtgcgcagccctggctgcactttgccctctgcagctggt

SEQ ID NO: 58746 - DNA, 120 bp, Artificial Sequence
  ENSG00000071205_43 (sequence is synthesized)
gtcctcacagcggctgctccagactggccgctgctgccatcattgccagtaatcccagggattctggtgatttaatcacagagcatgtggcacaacagttctggattttcagaacattaa

SEQ ID NO: 58747 - DNA, 120 bp, Artificial Sequence
  ENSG00000071205_44 (sequence is synthesized)
gggggtggtgatagaggttgactggtaatgcaagggtaattacagtagcaagaacaaccaggagagagaatttactaaaagataaaatcaaattgataaatctgatgctggtataaattt

SEQ ID NO: 58748 - DNA, 120 bp, Artificial Sequence
  ENSG00000071205_45 (sequence is synthesized)
cttcaagagcctttgcagtaataacaaatgaggaaatcacccttcttatgtctttattaaatagtcaacaaaattacagtgtttttgctgggagatgtgccaactaactgctgatggctg

SEQ ID NO: 58749 - DNA, 120 bp, Artificial Sequence
  ENSG00000071205_46 (sequence is synthesized)
aactatcaaactctggttattggaggcacaaaaatatgattcagatgagtgttaggtagaaattctcattttagcttagtaatatatattaaagtatttgctgaaatggtttttattaca

SEQ ID NO: 58750 - DNA, 120 bp, Artificial Sequence
  ENSG00000071205_47 (sequence is synthesized)
ttttgaaatgtgtttcaaatgtgttaaatgcttttcaaaaacaacacatttttggttataaaacgtgaataaaatttcaataaaatgtatgattttattttaaagtctatggcccagtgg

SEQ ID NO: 58751 - DNA, 120 bp, Artificial Sequence
  ENSG00000071205_48 (sequence is synthesized)
tattaagtacattcacattgttttgcaactgtcaccaccatgcatctccagggctttttaaaaaatcttcccagactgcagctctgtacctattaacaataactctccattctcccctgc

SEQ ID NO: 58752 - DNA, 120 bp, Artificial Sequence
  ENSG00000071205_49 (sequence is synthesized)
tccagctcctggcagccgtcgttctgctttcagtttctatgaatttaactactctaggtgtctcatgtgagtgggatcatatagtatctgtccctttgtgactagtttatttcacttagc

SEQ ID NO: 58753 - DNA, 120 bp, Artificial Sequence
  ENSG00000071205_50 (sequence is synthesized)
ctgatgtcctcaaggtttatccatgttgtagtatgtatcagaatttccttcctgtctaaggctgaataatattctgttatacatatggattggctacattttatttactcatccatccat

SEQ ID NO: 58754 - DNA, 120 bp, Artificial Sequence
  ENSG00000071205_51 (sequence is synthesized)
ccatgggcattggggtcactttgccccctgctgctatgaacaggggtgtacacatatctgttcgagtctctgctttcagttcttttgggtatatgcccagctgtagaattgctgggtcat

SEQ ID NO: 58755 - DNA, 120 bp, Artificial Sequence
  ENSG00000071205_52 (sequence is synthesized)
gtggtaatactatttttcatttgagggaaaaatttattttaattttttgctgggagttgtgcctgttaactgctggtggctgaactattgaattctggttaatgaagccacaaaaatatg

SEQ ID NO: 58756 - DNA, 120 bp, Artificial Sequence
  ENSG00000071205_53 (sequence is synthesized)
attttgaggagtgttaggtagaaatgttcatgttagcttagtaacacgttatgtttcaatattattttacttaaagcactatttttcacagtgcttgtaccatcttgcattcccactaat

SEQ ID NO: 58757 - DNA, 120 bp, Artificial Sequence
  ENSG00000071205_54 (sequence is synthesized)
gatgcacaagggtttcagtttcttgacatcctcaccaacaccactacttttcttttttgtacagtagccaccctagtgagtgtgaggtggcatctccttgtgagtttgatttgcatccta

SEQ ID NO: 58758 - DNA, 120 bp, Artificial Sequence
  ENSG00000071205_55 (sequence is synthesized)
atgatgagcgatgttgagtgtcttttcacatgcttattggccttttgtatatcctctctggagaaatgcccagataaatatttttaagagtaaaattagctaagttaggaaaaatatcac

SEQ ID NO: 58759 - DNA, 120 bp, Artificial Sequence
  ENSG00000071205_56 (sequence is synthesized)
atgatacctagtaagaatggtttcttggacatgagttctctctccactattctctgtggagtcctgctcttctcccagttcctttctagttaggcaagctaagctggaagctttttttgg

SEQ ID NO: 58760 - DNA, 120 bp, Artificial Sequence
  ENSG00000071205_57 (sequence is synthesized)
aatagcgtcctgaccagctggtgcccccttctctcccaggggatcagacgttctgagggccgcagatgggcgtccagccctggcccgcctttgagagccgggttcttgagatgctgccat

SEQ ID NO: 58761 - DNA, 120 bp, Artificial Sequence
  ENSG00000071205_58 (sequence is synthesized)
ggctggctccttctcacttgccgccatcactccctgagcgctgaggtgctgggccctttctcaggcagactttattcctagaggatttgttcatcgaaatgtttgttgattgtgattgca

SEQ ID NO: 58762 - DNA, 120 bp, Artificial Sequence
  ENSG00000071205_59 (sequence is synthesized)
tgtggttcagccttggggcatcagttgtggttggggtgagtttttcaagaagagaagtccctttgatcttcagttcttgggggtcaacttcaacaaacagagtaggagtcacaagctttt

SEQ ID NO: 58763 - DNA, 120 bp, Artificial Sequence
  ENSG00000071205_60 (sequence is synthesized)
tctgcaaagaaactgatagtaaatattttagacttctgtggaccataaagttcctgttgcacctgctcaattctgctgttgcagcaggaaagtagctgcagacaatacataaatgaattg

SEQ ID NO: 58764 - DNA, 120 bp, Artificial Sequence
  ENSG00000071205_61 (sequence is synthesized)
tcgtacctgtgttgcaatactttatttacaaaatcaggcagcacaccgtattttggcccatggaccacagtgtgatgacctctgatgtagcgtttcacttttcaccatctccagtttgac

SEQ ID NO: 58765 - DNA, 120 bp, Artificial Sequence
  ENSG00000071205_62 (sequence is synthesized)
taacctctgtgattttaacataggcagatatccaagtagagcagaaccggcaacacttctatgaactgtctctcgagtatgtgtgtaagctgcaggaaatccaagaaagaaagaagtttg

SEQ ID NO: 58766 - DNA, 120 bp, Artificial Sequence
  ENSG00000071205_63 (sequence is synthesized)
agtttgtggaacctgtgagtattgccaagttgtttgctggtggatttttgcaatgtaagataagtatttattttcctagatctgatttatggtttatagttactagaggccatagtgcat

SEQ ID NO: 58767 - DNA, 120 bp, Artificial Sequence
  ENSG00000071205_64 (sequence is synthesized)
cagacacagatagccatgaagtcaaggaattgcctctaaatcagtggttctcagctgtatttgcactgataatacacgtaatattcccattgctacatgatctcaaggaaggcaaccatg

SEQ ID NO: 58768 - DNA, 120 bp, Artificial Sequence
  ENSG00000071205_65 (sequence is synthesized)
tgcaatttctgccaccttagcctatagctctatcttttaaaaatttctctgaaataatttatactagaatgagtgaacatgggttgtttataccggttcaaactttggtactttaaacaa

SEQ ID NO: 58769 - DNA, 120 bp, Artificial Sequence
  ENSG00000071205_66 (sequence is synthesized)
tcgtttgtaacatgacttcaaacacaattcacaatgcttatggcaatctaagtttagaagcaggatatggaacatttgagacaattttgtgagttactctaacatttctttttacttata

SEQ ID NO: 58770 - DNA, 120 bp, Artificial Sequence
  ENSG00000071205_67 (sequence is synthesized)
ttagaaacacatgatttttgtttgtgattatatagatgttttctagtagcttcagttgtttatatatgaagatgtatgcacatgaatgtatatatcataatgtaaaggatatttcatgtg

SEQ ID NO: 58771 - DNA, 120 bp, Artificial Sequence
  ENSG00000071205_68 (sequence is synthesized)
gatttcagcaaaaaaacactggatctcattctcaggattcattttaattttaatatcgacttattgaatggtttctttttcttaaacagctttattaagataatattcacacagtataca

SEQ ID NO: 58772 - DNA, 120 bp, Artificial Sequence
  ENSG00000071205_69 (sequence is synthesized)
atttactcattgtgagtatggtttatagaaacaagaataaccaagtaatgattaaaaatgagcatttgtggagctatggtttagttggagcgatagtcattaacctaaaccattagagaa

SEQ ID NO: 58773 - DNA, 120 bp, Artificial Sequence
  ENSG00000071205_70 (sequence is synthesized)
aaactcaacctcctcaaagctttctttttaatgtgaaataataataatggcctgcttttattgggcatttataatgctcagtctctgttcaagccattgttctaagtgttgtaccgaact

SEQ ID NO: 58774 - DNA, 120 bp, Artificial Sequence
  ENSG00000071205_71 (sequence is synthesized)
cattattccacactataactcaatgaggagataaggaaatagaagtagagaaaggctgagtaatttgcctaaggtcccataacaggtcatggctgacgttgggaatggagcctgctgggt

SEQ ID NO: 58775 - DNA, 120 bp, Artificial Sequence
  ENSG00000071205_72 (sequence is synthesized)
gtcagagccccagattcctaaccacccacggtgtggcatttggaagaaaatgaatctcaagatttccttaactgtctccccagatcacttctttttacttctagatttattgacttacat

SEQ ID NO: 58776 - DNA, 120 bp, Artificial Sequence
  ENSG00000071205_73 (sequence is synthesized)
gtggagcagaggcaacagccctctaattcagagacaggttgggagttggtaggaaagtaaaggtttaattacgggtttgaggctgcccctggcaagtcatggaatatctttgtcaacaaa

SEQ ID NO: 58777 - DNA, 120 bp, Artificial Sequence
  ENSG00000071205_74 (sequence is synthesized)
acacaggggttgcagtctgctggatgtggctggggagagcctggagctctttgattctgtgattttactttcttaaagattgtgtcaacctatagtgataagatttcaattacaaatatt

SEQ ID NO: 58778 - DNA, 120 bp, Artificial Sequence
  ENSG00000071205_75 (sequence is synthesized)
gggattctcctgactaaagaggacaaatggatgacttaataattcaatttttcctgcagaacatgccatataagctgtctaatggctgtgatatttaagggaaaaaagcatcattttcta

SEQ ID NO: 58779 - DNA, 120 bp, Artificial Sequence
  ENSG00000071205_76 (sequence is synthesized)
taaagaccaattaatagataatatgtacttgtgtttacttgaatattagtgacttccctttaatcagtttatttcagtggaataacagtgagatggcggggggaacacttggttgtttat

SEQ ID NO: 58780 - DNA, 120 bp, Artificial Sequence
  ENSG00000071205_77 (sequence is synthesized)
catgtgcatacaactgaaagtgccgcttgctataagccaaggctactgagtgatactgttaacgatgatgatgataatagctatacatgaattacattgtggatgttgaaataatatact

SEQ ID NO: 58781 - DNA, 120 bp, Artificial Sequence
  ENSG00000071205_78 (sequence is synthesized)
atgtctaattcttccttactcccaacccatctcttattttttgctttgatctctactacagattttacgaagtgccagaagtgtctagtcatagaacatagcttatagtattttagagaa

SEQ ID NO: 58782 - DNA, 120 bp, Artificial Sequence
  ENSG00000071205_79 (sequence is synthesized)
atcatatatataatgttttcctaggaaactgcaggattgtggtttgcccatttaaaaatggaagctttgtgagctagacaagaggacctttgatgatcaaggttttaattatttttttct

SEQ ID NO: 58783 - DNA, 120 bp, Artificial Sequence
  ENSG00000071205_80 (sequence is synthesized)
tttaaatttaatcagagattttattttggaatcttctgttaaaaaaataaaaggctatgacctcttcccttcattggaaggaatggattttgggctctagcctgtcttgaatgaactcca

SEQ ID NO: 58784 - DNA, 120 bp, Artificial Sequence
  ENSG00000071205_81 (sequence is synthesized)
aaagtgaacaggtattgtcataaattaagaaaaaagtccttgtgaaacaagaaaaaataatgaatacatcttatagtgattaatgagctatggattcatagtagtaaaatttttgtttct

SEQ ID NO: 58785 - DNA, 120 bp, Artificial Sequence
  ENSG00000071205_82 (sequence is synthesized)
gagcattattttataggaacataactttaaaccagcattagtgaagaacagatatattatttgcaggaatagatcaattaattggcttttgggagttcttgaagaaatgaattgaattta

SEQ ID NO: 58786 - DNA, 120 bp, Artificial Sequence
  ENSG00000071205_83 (sequence is synthesized)
ataagctcatataccattatgcgtttatgtgaaggcagcattaatcttatttaatgctgaggattcaggaggttcaactttgttggaaagagagcatctgttttacttgtattaatagac

SEQ ID NO: 58787 - DNA, 120 bp, Artificial Sequence
  ENSG00000071205_84 (sequence is synthesized)
tcatttattttggaggcagccatatgtaagcaggaaggaatttatattttatttttcattttctctttgtttacttctaaatcccctgccatttgtttctctcactcacacacttggatg

SEQ ID NO: 58788 - DNA, 120 bp, Artificial Sequence
  ENSG00000071205_85 (sequence is synthesized)
gaaactcagttgtttacaattcaaaacaaaatgcttttattaaaaataatgctgtttgccattgttaggatttagtctcatcccacaaaattgtatttttttttcttgtttttttaacac

SEQ ID NO: 58789 - DNA, 120 bp, Artificial Sequence
  ENSG00000071205_86 (sequence is synthesized)
ataaggaatctggacattatgtactactgtcataaacacttattgaagtattatcaaaatgacacagtattaagtcttgtgtaaacctggattatatttaaatgttagctatttagttac

SEQ ID NO: 58790 - DNA, 80 bp, Artificial Sequence
  ENSG00000071242_0 (sequence is synthesized)
actcgcaggggaggcggagaaggaggcggagggagcgattgtggccccggccgcggtggccggcgcggcctgccctttgt

SEQ ID NO: 58791 - DNA, 120 bp, Artificial Sequence
  ENSG00000071242_1 (sequence is synthesized)
ccacgcgtgcccgcccgcggacctgagccccgcgcctgggatgccggggatgcgcgtcccccggccctgcggctgctccgggctgggcgcggggcgatggacctgagcatgaagaagttc

SEQ ID NO: 58792 - DNA, 120 bp, Artificial Sequence
  ENSG00000071242_2 (sequence is synthesized)
gagcatgaagaagttcgccgtgcgcaggttcttctctgtgtacctgcgcaggaagtcgcgctccaagagctccagcctgagccggctcgaggaagaaggcgtcgtgaaggagatagacat

SEQ ID NO: 58793 - DNA, 120 bp, Artificial Sequence
  ENSG00000071242_3 (sequence is synthesized)
cagccatcatgtgaaggagggctttgagaaggcagatccttcccagtttgagctgctgaaggttttaggacaaggatcctatggaaaggtgttcctggtgaggaaggtgaaggggtccga

SEQ ID NO: 58794 - DNA, 120 bp, Artificial Sequence
  ENSG00000071242_4 (sequence is synthesized)
cgctgggcagctctacgccatgaaggtccttaagaaagccaccctaaaagttcgggaccgagtgagatcgaagatggagagagacatcttggcagaagtgaatcaccccttcattgtgaa

SEQ ID NO: 58795 - DNA, 120 bp, Artificial Sequence
  ENSG00000071242_5 (sequence is synthesized)
gcttcattatgcctttcagacggaaggaaagctctacctgatcctggacttcctgcggggaggggacctcttcacccggctctccaaagaggtcatgttcacggaggaggatgtcaagtt

SEQ ID NO: 58796 - DNA, 120 bp, Artificial Sequence
  ENSG00000071242_6 (sequence is synthesized)
ctacctggctgagctggccttggctttagaccatctccacagcctggggatcatctacagagatctgaagcctgagaacatcctcctggatgaagaggggcacattaagatcacagattt

SEQ ID NO: 58797 - DNA, 120 bp, Artificial Sequence
  ENSG00000071242_7 (sequence is synthesized)
cggcctgagtaaggaggccattgaccacgacaagagagcgtactccttctgcgggacgatcgagtacatggcgcccgaggtggtgaaccggcgaggacacacgcagagtgccgactggtg

SEQ ID NO: 58798 - DNA, 120 bp, Artificial Sequence
  ENSG00000071242_8 (sequence is synthesized)
gtccttcggcgtgctcatgtttgagatgctcacggggtccctgccgttccaggggaaggacaggaaggagaccatggctctcatcctcaaagccaagctggggatgccgcagttcctcag

SEQ ID NO: 58799 - DNA, 120 bp, Artificial Sequence
  ENSG00000071242_9 (sequence is synthesized)
tggggaggcacagagtttgctgcgagctctcttcaaacggaacccctgcaaccggctgggtgctggcattgacggagtggaggaaattaagcgccatcccttctttgtgaccatagactg

SEQ ID NO: 58800 - DNA, 120 bp, Artificial Sequence
  ENSG00000071242_10 (sequence is synthesized)
gaacacgctgtaccggaaggagatcaagccaccgttcaaaccagcagtgggcaggcctgaggacaccttccactttgaccccgagttcacagcgcggacgcccacagactctcctggcgt

SEQ ID NO: 58801 - DNA, 120 bp, Artificial Sequence
  ENSG00000071242_11 (sequence is synthesized)
ccccccgagtgcaaacgctcatcacctgtttagaggattcagctttgtggcctcaagcctgatccaggagccctcacagcaagatctgcacaaagtcccagttcacccaatcgtgcagca

SEQ ID NO: 58802 - DNA, 120 bp, Artificial Sequence
  ENSG00000071242_12 (sequence is synthesized)
gttacacgggaacaacatccacttcaccgatggctacgagatcaaggaggacatcggggtgggctcctactcagtgtgcaagcgatgtgtgcataaagccacagacaccgagtatgccgt

SEQ ID NO: 58803 - DNA, 120 bp, Artificial Sequence
  ENSG00000071242_13 (sequence is synthesized)
gaagatcattgataagagcaagagagacccctcggaagagattgagatcctcctgcggtacggccagcacccgaacatcatcaccctcaaggatgtctatgatgatggcaagtttgtgta

SEQ ID NO: 58804 - DNA, 120 bp, Artificial Sequence
  ENSG00000071242_14 (sequence is synthesized)
cctggtaatggagctgatgcgtggtggggagctcctggaccgcatcctccggcagagatacttctcggagcgcgaagccagtgacgtcctgtgcaccatcaccaagaccatggactacct

SEQ ID NO: 58805 - DNA, 120 bp, Artificial Sequence
  ENSG00000071242_15 (sequence is synthesized)
ccattcccagggggttgttcatcgagacctgaagccgagtaacatcctgtacagggatgagtcggggagcccagaatccatccgagtctgcgacttcggctttgccaagcagctgcgcgc

SEQ ID NO: 58806 - DNA, 120 bp, Artificial Sequence
  ENSG00000071242_16 (sequence is synthesized)
ggggaacgggctgctcatgacaccctgctacacggccaatttcgtggccccggaggtcctgaagcgtcaaggctatgatgcggcgtgtgacatctggagtttggggatcctgttgtacac

SEQ ID NO: 58807 - DNA, 120 bp, Artificial Sequence
  ENSG00000071242_17 (sequence is synthesized)
catgctggcaggatttaccccttttgcaaatgggccagacgatacccctgaggagattctggcgcggatcggcagtgggaagtatgccctttctgggggaaactgggactcgatatctga

SEQ ID NO: 58808 - DNA, 120 bp, Artificial Sequence
  ENSG00000071242_18 (sequence is synthesized)
cgcagctaaagacgtcgtgtccaagatgctccacgtggaccctcatcagcgcctgacggcgatgcaagtgctcaaacacccgtgggtggtcaacagagagtacctgtccccaaaccagct

SEQ ID NO: 58809 - DNA, 120 bp, Artificial Sequence
  ENSG00000071242_19 (sequence is synthesized)
cagccgacaggacgtgcacctggtgaagggcgcgatggccgccacctactttgctctaaacagaacacctcaggccccgcggctggagcccgtgctgtcatccaacctggctcagcgcag

SEQ ID NO: 58810 - DNA, 120 bp, Artificial Sequence
  ENSG00000071242_20 (sequence is synthesized)
aggcatgaagagactcacgtccacgcggctgtagcgggtgggaccctggccccagcgtcccctgccagcatcctcgtgggctcacagaccccggcctcggagcccgtctggcacccagag

SEQ ID NO: 58811 - DNA, 120 bp, Artificial Sequence
  ENSG00000071242_21 (sequence is synthesized)
tgaccacaagtccagcagggaggcggcgcccgccctcgccgtgtccgtgttttctttttcagccccggagagggtcctgacctgggggcttctccaagcctcactgcgccagcctccccg

SEQ ID NO: 58812 - DNA, 120 bp, Artificial Sequence
  ENSG00000071242_22 (sequence is synthesized)
cccgctctcttttctcccaagcgaaaccaaatgcgccccttcacctcgcgtgcccgtgcgaggccgggggcttctttcagagcccgcgggtcctctcatacatggcttctgtttctgccg

SEQ ID NO: 58813 - DNA, 120 bp, Artificial Sequence
  ENSG00000071242_23 (sequence is synthesized)
agagatctgttttccaattatgaagccggtcggtttggtcagactcccgacacccacgtcccaggtacccggtgggaaagtggcagtgcgagggcgcagccattggtggttgcagggccc

SEQ ID NO: 58814 - DNA, 120 bp, Artificial Sequence
  ENSG00000071242_24 (sequence is synthesized)
aggaggagatgcctggttctgcccaaaataatccaaagagccgtttcctcctcgcccttcagtttttgcctgaggtgctgggtagcccatcctttcctctgtcccagattcaaatgagga

SEQ ID NO: 58815 - DNA, 120 bp, Artificial Sequence
  ENSG00000071242_25 (sequence is synthesized)
gtaagagcccagacgagaggaaggcaggctggatctttgccttgagagctccgtgtcaccaggatggaagggggtgcctctcggaggagcctgtgtccacctccagtctcggctttcccc

SEQ ID NO: 58816 - DNA, 120 bp, Artificial Sequence
  ENSG00000071242_26 (sequence is synthesized)
ggggggccaagcgcactgggctgccgtctgtccccagctcccgtggccacacagctatctggaggctttgcagggagtcgtgggttctcgcacctgctcagccctgtgtcggcttcctgt

SEQ ID NO: 58817 - DNA, 120 bp, Artificial Sequence
  ENSG00000071242_27 (sequence is synthesized)
gtgctcacctaaagctgtggttttgctgtgttcacttcgatttttctggtctgtggagaaactgtgaattggagaaatggagctctgtggcttcccacccaaaccttctcagtccagctg

SEQ ID NO: 58818 - DNA, 120 bp, Artificial Sequence
  ENSG00000071242_28 (sequence is synthesized)
gaggctggagggagacacaggccccacccagcagactgaggggcagaggcacaggtgggagggcagcggagatcagcgtggacaggagcgatgcactttgtagatgctgtggctttgtgt

SEQ ID NO: 58819 - DNA, 120 bp, Artificial Sequence
  ENSG00000071242_29 (sequence is synthesized)
tgcgttttgtgtctctgttgcacagatctgttttttcacactgatccgtattcccctgggtgtgcacacagggcgggtgtggggcatttaggccatgctgtgctctacttcattgagtaa

SEQ ID NO: 58820 - DNA, 120 bp, Artificial Sequence
  ENSG00000071242_30 (sequence is synthesized)
aatcgagtgagaggttccgggcagcaggatcgacgcccagtccagccggcagagggaacacacgggtccttcattgtcctgtaagggtgttgaagatgctccctggcggcccccaagcag

SEQ ID NO: 58821 - DNA, 120 bp, Artificial Sequence
  ENSG00000071242_31 (sequence is synthesized)
actagatgggaggaggcgccgctcagcccctcaccctgcatcactgaagagcggcgcctctgcagcaagcagggcttcaggaggtgcccgctggccacagccaggttttccctaagaaga

SEQ ID NO: 58822 - DNA, 120 bp, Artificial Sequence
  ENSG00000071242_32 (sequence is synthesized)
tgttattttgttgggttttgttccccctccatctcgattctcgtacccaactaaaaaaaaaaaaataaagaaaaaatgtgctgcgttctgaaaaataactccttagcttggtctgattgt

SEQ ID NO: 58823 - DNA, 120 bp, Artificial Sequence
  ENSG00000071242_33 (sequence is synthesized)
tttcagaccttaaaatataaacttgtttcacaagctttaatccatgtggattttttttttcttagagaaccacaaaacataaaaggagcaagtcggactgaatacctgtttccatagtgc

SEQ ID NO: 58824 - DNA, 120 bp, Artificial Sequence
  ENSG00000071242_34 (sequence is synthesized)
ccacagggtattcctcacattttctccatagaagatgctttttcccaaggctagaacgacttccaccatgatgaatttgctttttaggtcttaattatttcacttctttttagaaactta

SEQ ID NO: 58825 - DNA, 120 bp, Artificial Sequence
  ENSG00000071242_35 (sequence is synthesized)
ggaagaagtggataatcctgaggtcacacaatctgtcctcccagaaatgaacaaaagtcatcaccttttctgcttgctacacaggcaacgattcccccatcagctgcccggaccctttgg

SEQ ID NO: 58826 - DNA, 120 bp, Artificial Sequence
  ENSG00000071242_36 (sequence is synthesized)
cctggcttggtgtgcaggcctgtctgtttgcttaaagtcagtgggttctggtgcagggagtgagaagtgggggaagtgaaagggaaagcatccgtgagaaagcggccacggttttccctc

SEQ ID NO: 58827 - DNA, 120 bp, Artificial Sequence
  ENSG00000071242_37 (sequence is synthesized)
cttgtgtgcccatggggcaccagctcatggtctttttcagtcatcccagtttgtacagacttagcttctgaactctaagaatgccaaagggaccgacgagactccccatcacagcgagct

SEQ ID NO: 58828 - DNA, 120 bp, Artificial Sequence
  ENSG00000071242_38 (sequence is synthesized)
ctgtccttacatgtatttgatgtgcatcagcggaggagaacactggcttggccctgctccgctgagtgtctgtgaaatacctctactttccctcccatatccagaacaaaatgatacttg

SEQ ID NO: 58829 - DNA, 120 bp, Artificial Sequence
  ENSG00000071242_39 (sequence is synthesized)
acatccttccacaaaagtcagcctaaagaagttatggtatcatatgttaaactaagctttcaaaaaccttagtgaaatagcaagtgactgctttcaagcagcagtcgacatgtaaatgaa

SEQ ID NO: 58830 - DNA, 120 bp, Artificial Sequence
  ENSG00000071242_40 (sequence is synthesized)
ggtgttcttagaattcgcattttgccagctcagcgcacctccacaacgaatgaaatgctccgtatgatttgcacaaatgacatagacctccccaaaagttaactggctctccttcctcac

SEQ ID NO: 58831 - DNA, 120 bp, Artificial Sequence
  ENSG00000071242_41 (sequence is synthesized)
acagttcatcataacccaaccccccacccccgggtcatgaaaatcacagaacttataaacacattgaaccctagatctcaggcttcctgacctaccgccagtggccccttgctggccacc

SEQ ID NO: 58832 - DNA, 120 bp, Artificial Sequence
  ENSG00000071242_42 (sequence is synthesized)
ctatagggtcctccttccctggcagccccccatgtgggagaaatacctgattctcccaatctgcagtgggagagctttgctgaattccatcccaaagtcaaacatgggcaagaggtgagg

SEQ ID NO: 58833 - DNA, 120 bp, Artificial Sequence
  ENSG00000071242_43 (sequence is synthesized)
atttcacttttaccctcaagtccgatttgtctgtgattttaaactaactgtgtatgtattgatgtttggaagattgtttgaattttaaagtgataatagtacttaatgttatccagtatt

SEQ ID NO: 58834 - DNA, 120 bp, Artificial Sequence
  ENSG00000071242_44 (sequence is synthesized)
gttcattaaatggtgttatcctaaagctgcacttgggatttttacctaacgctttactgattctctcaagcacatggcaaagtttgatttgcactccgttcatttctgacacgttttgct

SEQ ID NO: 58835 - DNA, 120 bp, Artificial Sequence
  ENSG00000071242_45 (sequence is synthesized)
gcctcctacctttctaagcgtcatgcaaattcgagaatggagaaggacgctgccggtccctgagcggtgtggagagggcggaaggtggactccagcgcagcttgaggggctgaggacgga

SEQ ID NO: 58836 - DNA, 120 bp, Artificial Sequence
  ENSG00000071242_46 (sequence is synthesized)
ggctgcagcatctgtgtcgttctactgagcacgcttctctgcctcgctcctgactcagcactttgttcactggctcagcagttatgtttacacatcatttttatgttcctgctttgtaat

SEQ ID NO: 58837 - DNA, 120 bp, Artificial Sequence
  ENSG00000071242_47 (sequence is synthesized)
tcatgtttgagatgggtggccactgtacagatatttattacgctttccagactttctgaatagatttttttgaataaacatggttttatgaagtgtaatctttttctagcctaacaataa

SEQ ID NO: 58838 - DNA, 120 bp, Artificial Sequence
  ENSG00000071242_48 (sequence is synthesized)
atggcagcggcatcctcagactcaactttcaccctcgtttagagccaattaagcagaaaaggaaagtttaaaaatgccaatcgcacagttgctggaactatggaaaaagatcgaggtgga

SEQ ID NO: 58839 - DNA, 120 bp, Artificial Sequence
  ENSG00000071242_49 (sequence is synthesized)
gcctatggaaatagagaccacagaggaggatctcaacctggatgtggagcccaccacagaagacactgcagaagaaggcaaaagtgactcagctgcctgcaagacaaaggtagctggatc

SEQ ID NO: 58840 - DNA, 120 bp, Artificial Sequence
  ENSG00000071242_50 (sequence is synthesized)
agagaccctgggagtcctagctggttcctggatggaaattctttgaccagcgtcctatatggcctaaagggaaaagtacaggagctctggaggggaagaaggcgtcgtgaaggagataga

SEQ ID NO: 58841 - DNA, 120 bp, Artificial Sequence
  ENSG00000071242_51 (sequence is synthesized)
aattcgaagctgcaagtgcagcgtttactctgccaaagtcgcagtacagattccgaagccgcagcgccgtcccctcctttcctcgccccagcccgagcgggaagcggcagcagctcccca

SEQ ID NO: 58842 - DNA, 120 bp, Artificial Sequence
  ENSG00000071242_52 (sequence is synthesized)
gagccctggcttggcagggaggggacggcgcccgagcagccatattgcagccccccgggtccctcctccggccggcgcaggccccgcgctcacgacctcctctgggagccggatctgtcc

SEQ ID NO: 58843 - DNA, 120 bp, Artificial Sequence
  ENSG00000071242_53 (sequence is synthesized)
tctccatcgccgccacccgccggcctctgcgtcccttggcttccgacatcccgtctggccgtccccctgtgccggtccgagcctctgtttatttcctttcctactatcaatactcgacca

SEQ ID NO: 58844 - DNA, 120 bp, Artificial Sequence
  ENSG00000071242_54 (sequence is synthesized)
aaacgtcctaggccctggttggaatggaagcagctttgccaggagcatgggtcctgggcctcagatgatctgaattctcgtcccttgaatagaagaaggcgtcgtgaaggagatagacat

SEQ ID NO: 58845 - DNA, 120 bp, Artificial Sequence
  ENSG00000071242_55 (sequence is synthesized)
ctcccacccaccagccaaaacttggctctcaactctcccactgcaaacctctccccggtctttcaacacaggctagtttcctattgtttaggaatgcaacacattaccccacatctagtg

SEQ ID NO: 58846 - DNA, 120 bp, Artificial Sequence
  ENSG00000071242_56 (sequence is synthesized)
gcttaaaacaacctgagcttattgtcttccagctctggatgtcagaattctgaaatctgtctcactgggctaaagtccagtgtccccaaggctggttccttccgcgggctctgggggctg

SEQ ID NO: 58847 - DNA, 120 bp, Artificial Sequence
  ENSG00000071242_57 (sequence is synthesized)
agagtggatacacagcagatggtggccaggctgggtgcccgacagaagtctgacccacacctgcagccagcccctttatctacaatacatagctcgggaggccagcagctgtgtcaggct

SEQ ID NO: 58848 - DNA, 120 bp, Artificial Sequence
  ENSG00000071242_58 (sequence is synthesized)
atcattgcagccagcgcagtcctccatgggaggcctcagagcatgattgcagagtgactgcatgatcgcgtggccctggtccgtctccccaacgagttgctgcacccaggacagcaggtt

SEQ ID NO: 58849 - DNA, 120 bp, Artificial Sequence
  ENSG00000071242_59 (sequence is synthesized)
gtccgctccggcggagggaaggcgccggttccgcggagggcggctcctggccgagctgcagggcccgctggcaggcggcggtccctcgctcgctgtgccgctgaggttttggctgcgttt

SEQ ID NO: 58850 - DNA, 120 bp, Artificial Sequence
  ENSG00000071242_60 (sequence is synthesized)
gctgatcaacaattaaagtttggttcggcagagaaaaacatgatgacaaagtgtgcatagggatgttttaaggaaggaaaacataatgacggccccaagctggaagaaagagcagccggg

SEQ ID NO: 58851 - DNA, 120 bp, Artificial Sequence
  ENSG00000071242_61 (sequence is synthesized)
actgtttacagtagctgtgctggaaaccacatgctcctgccatggatgcagccgattcaggaacagacttgatcttcctaaggcattgcatgcaaatcctcatcaagctctagataaaat

SEQ ID NO: 58852 - DNA, 120 bp, Artificial Sequence
  ENSG00000071242_62 (sequence is synthesized)
ggctgggtgagaaaacggccctctgcccccgtgtgagttgctccaggctcctaggcttctgagtctaagactggcatttctcccacctccacatcccctgaagataaaatgtcttcgttc

SEQ ID NO: 58853 - DNA, 120 bp, Artificial Sequence
  ENSG00000071242_63 (sequence is synthesized)
acttcgcattctcatcagaggagaaggccagcctcggggctgaggttttctcagcttctctcctttgcttctgagtttgcaaagcgggggttttgtctgcagccagagttttttcaactc

SEQ ID NO: 58854 - DNA, 120 bp, Artificial Sequence
  ENSG00000071242_64 (sequence is synthesized)
acagctggtgcctgtgaggggcaggactcccggcttgggaatctgtggctgcctggagaggggtgaggggagggaagaggaggtgtgcggggtggctgcctggtgacgaggacgggcgca

SEQ ID NO: 58855 - DNA, 120 bp, Artificial Sequence
  ENSG00000071242_65 (sequence is synthesized)
gcagcccacaaggtgataaaaggagtggcggctgccctggcagaatggctggacggcaaggggagcccggcccccgggacctggggagtgcatcatgatgatcaggctgccacacaagaa

SEQ ID NO: 58856 - DNA, 120 bp, Artificial Sequence
  ENSG00000071243_0 (sequence is synthesized)
ccggagtcgagcgggtgctgctagcggaggcgccatattggaggggacaaaactccggcgacagcgagtgacacaaataaacccctggacccccttgttccctcagctctaagggccgcg

SEQ ID NO: 58857 - DNA, 120 bp, Artificial Sequence
  ENSG00000071243_1 (sequence is synthesized)
atgttgtacctagaagactatctggaaatgattgagcagcttcctatggatctgcgggaccgcttcacggaaatgcgcgagatggacctgcaggtgcagaatgcaatggatcaactagaa

SEQ ID NO: 58858 - DNA, 120 bp, Artificial Sequence
  ENSG00000071243_2 (sequence is synthesized)
caaagagtcagtgaattctttatgaatgcaaagaaaaataaacctgagtggagggaagagcaaatggcatccatcaaaaaagactactataaagctttggaagatgcagatgagaaggtt

SEQ ID NO: 58859 - DNA, 120 bp, Artificial Sequence
  ENSG00000071243_3 (sequence is synthesized)
cagttggcaaaccagatatatgacttggtagatcgacacttgagaaagctggatcaggaactggctaagtttaaaatggagctggaagctgataatgctggaattacagaaatattagag

SEQ ID NO: 58860 - DNA, 120 bp, Artificial Sequence
  ENSG00000071243_4 (sequence is synthesized)
aggcgatctttggaattagacactccttcacagccagtgaacaatcaccatgctcattcacatactccagtggaaaaaaggaaatataatccaacttctcaccatacgacaacagatcat

SEQ ID NO: 58861 - DNA, 120 bp, Artificial Sequence
  ENSG00000071243_5 (sequence is synthesized)
attcctgaaaagaaatttaaatctgaagctcttctatccacccttacgtcagatgcctctaaggaaaatacactaggttgtcgaaataataattccacagcctcttctaacaatgcctac

SEQ ID NO: 58862 - DNA, 120 bp, Artificial Sequence
  ENSG00000071243_6 (sequence is synthesized)
aatgtgaattcctcccaacctctgggatcctataacattggctcgttatcttcaggaactggtgcaggggcaattaccatggcagctgctcaagcagttcaggctacagctcagatgaag

SEQ ID NO: 58863 - DNA, 120 bp, Artificial Sequence
  ENSG00000071243_7 (sequence is synthesized)
gagggacgaagaacatcaagtttaaaagccagttatgaagcatttaagaataatgactttcagttgggaaaagaattttcaatggccagggaaacagttggctattcatcatcttcggca

SEQ ID NO: 58864 - DNA, 120 bp, Artificial Sequence
  ENSG00000071243_8 (sequence is synthesized)
cttatgacaacattaacacagaatgccagttcatcagcagccgactcacggagtggtcgaaagagcaaaaacaacaacaagtcttcaagccagcagtcatcatcttcctcctcctcttct

SEQ ID NO: 58865 - DNA, 120 bp, Artificial Sequence
  ENSG00000071243_9 (sequence is synthesized)
tccttatcatcgtgttcttcatcatcaactgttgtacaagaaatctctcaacaaacaactgtagtgccagaatctgattcaaatagtcaggttgattggacttacgacccaaatgaacct

SEQ ID NO: 58866 - DNA, 120 bp, Artificial Sequence
  ENSG00000071243_10 (sequence is synthesized)
cgatactgcatttgtaatcaggtatcttatggtgagatggtgggatgtgataaccaagattgccctatagaatggttccattatggctgcgttggattgacagaggcaccaaaaggcaaa

SEQ ID NO: 58867 - DNA, 120 bp, Artificial Sequence
  ENSG00000071243_11 (sequence is synthesized)
tggtactgtccacagtgcactgctgcaatgaagagaagaggcagcagacacaaataaaggtggtccttttgtttgatgaagaaataaacttcagctgaagattttatataggactttaaa

SEQ ID NO: 58868 - DNA, 120 bp, Artificial Sequence
  ENSG00000071243_12 (sequence is synthesized)
aagaagagaagagaaagaagaaacaatgcatttccaggcaaccacttaaaggatttacatagacaatcctataagatcttgaacttgaattttatgggttgtattttaataatgtaagta

SEQ ID NO: 58869 - DNA, 120 bp, Artificial Sequence
  ENSG00000071243_13 (sequence is synthesized)
aattatttatgcactcctggtgtgctatgaatattattccagttagccttggattatttcagtggccaacatatgcagacatttgtactcctcaaccattttctcaaagtaatgggcatt

SEQ ID NO: 58870 - DNA, 120 bp, Artificial Sequence
  ENSG00000071243_14 (sequence is synthesized)
ctatgatttagacttcaaggaattccaatgatgaagattttaaggaaagtattttatattcaacaggtatattctgctgcatgtactgtactccagagctgttatgtaacactgtatata

SEQ ID NO: 58871 - DNA, 120 bp, Artificial Sequence
  ENSG00000071243_15 (sequence is synthesized)
gcttctaaaaagaatttaagataatggtttttaaaatgcctttataataagctttgtttctttgtgaaactaattcagcaggctgaaggaaatggttcatgtgataatgtgggctggtat

SEQ ID NO: 58872 - DNA, 120 bp, Artificial Sequence
  ENSG00000071243_16 (sequence is synthesized)
cctctagagtacctgggtacataaacagaaactcctgtaggtaaaaagtaatttgtgccattagtctttctatgtttctgcatccagatagagtgcagttcatgagggagggggcggggg

SEQ ID NO: 58873 - DNA, 120 bp, Artificial Sequence
  ENSG00000071243_17 (sequence is synthesized)
actgaaggggaaagggcgttaaagtgatacatttttataccaaatgtgtttatttttttgtgcaagtaatccttaaaattgcaattgtattaggtgttaaaataaagtttttaaaaaatt

SEQ ID NO: 58874 - DNA, 120 bp, Artificial Sequence
  ENSG00000071243_18 (sequence is synthesized)
acttgtatttatactttacatacttaataatgaaaatttctgaattccaattaactttcaactttcataatctaaaaagaatcagagacccaggacacagaatactgtgtaatctgtgat

SEQ ID NO: 58875 - DNA, 120 bp, Artificial Sequence
  ENSG00000071243_19 (sequence is synthesized)
gtctttaatgatgtttagagtttgtgatataagaatacaggaaagacatttttaatgtaaatttgaaatgccaatgtatttttttaagaacatcatctggcttttccttcagtctaaaag

SEQ ID NO: 58876 - DNA, 120 bp, Artificial Sequence
  ENSG00000071243_20 (sequence is synthesized)
acatgaaagaagtgtaagtatagcagttaaaacgaaaataatggttatgggtgttttgactggaggcaatgtagccaaatagagtaaagagacccccctggtcgggagctccaaattgag

SEQ ID NO: 58877 - DNA, 120 bp, Artificial Sequence
  ENSG00000071243_21 (sequence is synthesized)
ctatttttgattctaccacttactgatatgacagttaattcaaattttgtatcactctgggccttactacaccagggtgatgctgactgcagaatagatcttattctaaggtgctattta

SEQ ID NO: 58878 - DNA, 120 bp, Artificial Sequence
  ENSG00000071243_22 (sequence is synthesized)
ataaatttgcatagtggaggttttatttaaagtataatattgagtctggtcgatagaaaaatccttaacttttaagatacttaatatatcatatatattttatattgaaacttactgggt

SEQ ID NO: 58879 - DNA, 120 bp, Artificial Sequence
  ENSG00000071243_23 (sequence is synthesized)
gggtccatcagatttctgctttaattaaaccacttatgagcttcttagaacttattcagataacagtgtaaaatctatgcagtgctacccaaagggtgtgaggtagataggggatttcaa

SEQ ID NO: 58880 - DNA, 120 bp, Artificial Sequence
  ENSG00000071243_24 (sequence is synthesized)
agatctcttccacctttgagatcccatgattctgagctgccacagtctgattatacaactctaccagctccctaaacaagttaggttcatttgtgagtactcatcatttcataatatcat

SEQ ID NO: 58881 - DNA, 120 bp, Artificial Sequence
  ENSG00000071243_25 (sequence is synthesized)
gattatcacgatttcatgatactcaatattttgagattttataaccctttaagaagtgataaataatgtagtattcaattcgtttatcaaagtatattgcctggaaatgctcacatgtat

SEQ ID NO: 58882 - DNA, 120 bp, Artificial Sequence
  ENSG00000071243_26 (sequence is synthesized)
catttacatcctctatatattatgactattccaaactcattcattttatagaaatggtcaaaggaaaaagccttatgtacagccttatttgaagagaaagttctttgtctgagtcaggaa

SEQ ID NO: 58883 - DNA, 120 bp, Artificial Sequence
  ENSG00000071243_27 (sequence is synthesized)
catcctgttatccagctgctacatcccctttcagtgtgaattccactccttaccaaatcacttagaaaacactttgacaagttttaaactcaaacactgaatattttatgaagcatgtgt

SEQ ID NO: 58884 - DNA, 120 bp, Artificial Sequence
  ENSG00000071243_28 (sequence is synthesized)
aaagaaagaaaccaaaatttggtgcaggtatttagtaatgggtagaacctgttaatatctgagtcatatataatggggccaaacatggaactacctcatcaaccccccaaaaatgtggcc

SEQ ID NO: 58885 - DNA, 120 bp, Artificial Sequence
  ENSG00000071243_29 (sequence is synthesized)
aactattaatattctttgtgacatttacaccaaggggcatagtaagtatttttggtattataaaatacacattcaaaatctctgttgtacaaaactcatgtaacagttgggacaaaatat

SEQ ID NO: 58886 - DNA, 120 bp, Artificial Sequence
  ENSG00000071243_30 (sequence is synthesized)
ccaaatgtgggttcacagttcacaggtggtgaaaattgaggccttactgctatggagtgtatatcaaaatgttcatggtgacacatttgaagcaataaatggcttaattaaatgccaaaa

SEQ ID NO: 58887 - DNA, 120 bp, Artificial Sequence
  ENSG00000071243_31 (sequence is synthesized)
tatgacttggtaagtaaaagtaatgtgcatactgtgccataagtacttgaataacagattatatcttaaattgtattggcttaaatgtagtaggaagaagcaactaaaactgaagtattg

SEQ ID NO: 58888 - DNA, 120 bp, Artificial Sequence
  ENSG00000071243_32 (sequence is synthesized)
ctctcttgatcacatctaatttgacatttcagtgtccattttatggtttctttgtggaaaagtcagagtggttagttaatgtggtgagaactgtacattttagcaagtctatacggcggt

SEQ ID NO: 58889 - DNA, 120 bp, Artificial Sequence
  ENSG00000071243_33 (sequence is synthesized)
aaggtggtttctgatgttagatattttttaaacaagaattaatgtttaactttattttactaatccttgtcttcttaaggtagtgtgtttacttgccttatacatcattttgagattgtt

SEQ ID NO: 58890 - DNA, 120 bp, Artificial Sequence
  ENSG00000071243_34 (sequence is synthesized)
tctgtggtaaaatacacctaagaagactgctttgacaagagttcttggtagtctgattaaaatgaagaagaatcatttgaatcagtgtttatgtgagtgatgttaaaagatcgtatgtaa

SEQ ID NO: 58891 - DNA, 120 bp, Artificial Sequence
  ENSG00000071243_35 (sequence is synthesized)
aacaagattctttttttgcagcagcacttctaaaagattgaaaacaccaagaagatagatagaatattcactatttctcatattgatgcaattgtggtgctctttttcatttgaaacatc

SEQ ID NO: 58892 - DNA, 120 bp, Artificial Sequence
  ENSG00000071243_36 (sequence is synthesized)
ttctcctaaaatatacactttaagaaatagtcatttctgtttttgcattaaagtaaattaaagcagaaaacacatgctcacttttggctaacttcagtgtatagatttcatacttatgtt

SEQ ID NO: 58893 - DNA, 120 bp, Artificial Sequence
  ENSG00000071243_37 (sequence is synthesized)
gtctttcctgggtacagatttattactgaacaagtacgtgtaagtaaaatgtcattggtgagcaggacacaagataaaaggtgaacaccacatatggtgtgaattgtaaatgcttatacc

SEQ ID NO: 58894 - DNA, 120 bp, Artificial Sequence
  ENSG00000071243_38 (sequence is synthesized)
acaaacttgaaaatgtgtcatgtagagccatggaaaatgtctagttgtttttatgtagtacacacattttaatggtgctaacaacctgggctcttttgttcatagagttattctgaaaaa

SEQ ID NO: 58895 - DNA, 120 bp, Artificial Sequence
  ENSG00000071243_39 (sequence is synthesized)
aatttcataaaagacactgcctaaagataggtagaataggctgtagcttgatttactgtggaataaaaaccaaaaaaaaaaaggtcttaattgtttcagtctttaattatgtctataaac

SEQ ID NO: 58896 - DNA, 120 bp, Artificial Sequence
  ENSG00000071243_40 (sequence is synthesized)
ttagaaaaaggcatttacatttgaatctagactaatttgtttagtaacattcttcctcatattcaatgactgtatgtatcagtccttatttagagactgcctgctttttaattcatatag

SEQ ID NO: 58897 - DNA, 120 bp, Artificial Sequence
  ENSG00000071243_41 (sequence is synthesized)
atagctctttggttctattctttgttttgtttattattttgttgttttattgcttgttagacctttactaaagatattttgtgtatttagaaaaaatataacataaatatatgcttttta

SEQ ID NO: 58898 - DNA, 80 bp, Artificial Sequence
  ENSG00000071246_0 (sequence is synthesized)
ggacgtggtcggcggcagcggggcccaggggcggcggggctgcagcagcggcggccccagcttcgccgagcagcgatcgg

SEQ ID NO: 58899 - DNA, 120 bp, Artificial Sequence
  ENSG00000071246_1 (sequence is synthesized)
ctggtgggcttctcgttggcgggctccgcgttggcgggctgctccccaggcaccagcgcagcgcgcgctcgcccggcttcgtcactcgcctccagctacatccgccggccgaggctgcgc

SEQ ID NO: 58900 - DNA, 120 bp, Artificial Sequence
  ENSG00000071246_2 (sequence is synthesized)
ctccgggcttgcggtccccgccccgcggtccttcctccaccctcagccagggcagctgcagcccgagcgaacagccacggagcatcctccgcccgcccgggccgcgccaccgcccatgct

SEQ ID NO: 58901 - DNA, 80 bp, Artificial Sequence
  ENSG00000071246_3 (sequence is synthesized)
tgctgcagccagtcccaggcagcgaccccgcggccgcagcccgccgctcagtgacctcagcctggcccctgcgcgccgcc

SEQ ID NO: 58902 - DNA, 120 bp, Artificial Sequence
  ENSG00000071246_4 (sequence is synthesized)
ccaggtgccagccgtcctcccgctgagacgcgcccgagtggggacccgctgggcctcggggctcgcagccttcgcctccccgccgcgcccgctccctttctggggactccgccgctgttt

SEQ ID NO: 58903 - DNA, 120 bp, Artificial Sequence
  ENSG00000071246_5 (sequence is synthesized)
tttctggggactccgccgctgtttctggggacgaggggacaggggacccagacaaagcccactttgtgcagggagttggccgcaggcggggaatgtgcgcgtcggcgcgcgccccctccc

SEQ ID NO: 58904 - DNA, 120 bp, Artificial Sequence
  ENSG00000071246_6 (sequence is synthesized)
cgctcccggccagctgcgagtcttggctcccggacttgtctcgtcgcgtcggagaaatcgccccccagcgccgctctcccgcccgggggtcttggttccgagctcgcgcggccgggagtc

SEQ ID NO: 58905 - DNA, 120 bp, Artificial Sequence
  ENSG00000071246_7 (sequence is synthesized)
gcctcggtcttccttggggcgcgcgcagatgtgagcgtgcgagagttgtgtaggggattttgttccctccgaaactgagacccagggcgcccagtgggcacccgtgccttgactctgtcc

SEQ ID NO: 58906 - DNA, 120 bp, Artificial Sequence
  ENSG00000071246_8 (sequence is synthesized)
tttctgcagccgctggtccgagctgtctggcctcagtttccctccgacttttctccgctctgccagccctcactgctgcccgtcattgttctcgcagttagatgggggtgctttgtgacg

SEQ ID NO: 58907 - DNA, 120 bp, Artificial Sequence
  ENSG00000071246_9 (sequence is synthesized)
gctgccaagttggggtgtgttctctttattccgtttttcaaacagaacaaggcctccaaggctgaccccagacaacccaccccctcggaccctaattcaccttattgcactgattttttt

SEQ ID NO: 58908 - DNA, 120 bp, Artificial Sequence
  ENSG00000071246_10 (sequence is synthesized)
tatcaagtcgtattttattgtacaggagccacgccctgatttcttaaaggcgccttgcactctggccatgtgttatctctgcagccggtgtgtgggaggcctcttgtgagccagttgttt

SEQ ID NO: 58909 - DNA, 120 bp, Artificial Sequence
  ENSG00000071246_11 (sequence is synthesized)
tcccgcctccaccacccccctcgaagatttagggatgccaggggggaagaaggtggctgggggtggcagcagcggtgccactccaacgtccgctgcggccaccgccccctctggggtcag

SEQ ID NO: 58910 - DNA, 120 bp, Artificial Sequence
  ENSG00000071246_12 (sequence is synthesized)
gcgtttggagaccagcgaaggaacctcagcccagagagatgaggagccagaagaggaaggggaagaggacctgcgagacggaggcgtccccttctttgtcaaccggggtgggctacctgt

SEQ ID NO: 58911 - DNA, 120 bp, Artificial Sequence
  ENSG00000071246_13 (sequence is synthesized)
ggatgaggccacctgggaaaggatgtggaaacacgtggccaagatccaccccgatggagagaaggtggcgcaacggatccgtggggccacagacctgcccaagatccccataccgagtgt

SEQ ID NO: 58912 - DNA, 120 bp, Artificial Sequence
  ENSG00000071246_14 (sequence is synthesized)
gcctacgttccagccgtctacacctgtccctgagcgcctggaagctgtgcagcgctacatcagagagctgcagtacaatcacacagggacacagttctttgaaattaagaagagcagacc

SEQ ID NO: 58913 - DNA, 120 bp, Artificial Sequence
  ENSG00000071246_15 (sequence is synthesized)
tctgacagggctgatggacctggccaaggaaatgaccaaagaggccctgccaatcaaatgcctggaagccgtgatcctgggaatttacctcaccaacagcatgcccaccctggagcgctt

SEQ ID NO: 58914 - DNA, 120 bp, Artificial Sequence
  ENSG00000071246_16 (sequence is synthesized)
ccccatcagcttcaagacctacttctcagggaactacttccgccacatcgtgctgggggtgaacttcgcgggccgctacggtgcgctgggcatgagtcggcgcgaggacctgatgtacaa

SEQ ID NO: 58915 - DNA, 120 bp, Artificial Sequence
  ENSG00000071246_17 (sequence is synthesized)
gccgcccgccttccgcacgctcagcgagctcgtgctggacttcgaggccgcctacggccgctgctggcacgtgctcaagaaggtgaagctgggccagagcgtgtcacacgacccgcacag

SEQ ID NO: 58916 - DNA, 120 bp, Artificial Sequence
  ENSG00000071246_18 (sequence is synthesized)
cgtggagcagatcgagtggaagcactcggtgctggacgtggagcgcctgggccgcgatgacttccgcaaggagctggagcgccacgcccgcgacatgcggctcaagattggcaaagggac

SEQ ID NO: 58917 - DNA, 120 bp, Artificial Sequence
  ENSG00000071246_19 (sequence is synthesized)
gggccctccctctcccaccaaggaccggaagaaggatgtttcttccccgcagcgggcccagtccagcccccaccgcaggaacagccgcagtgaaagacggccctcgggtgacaagaagac

SEQ ID NO: 58918 - DNA, 120 bp, Artificial Sequence
  ENSG00000071246_20 (sequence is synthesized)
ttccgagcccaaagccatgccagaccttaacgggtaccagatccgggtctgaggcggatgccagcaccccaggccccacccactcttgggggccaggatccacctgctggaaccagcctt

SEQ ID NO: 58919 - DNA, 120 bp, Artificial Sequence
  ENSG00000071246_21 (sequence is synthesized)
atgcatggggaaggcggggctggtgacaaggcagggcaagaggctgcaggaagagtgtgttccagctcagccccccaagctgctctcgctcccactgagccaagccccctaactttgggc

SEQ ID NO: 58920 - DNA, 120 bp, Artificial Sequence
  ENSG00000071246_22 (sequence is synthesized)
ctagaggccgttagtattttatttggagtttttaactctacaactgaagtttaaggtatttggggaaaacttagtccaaatggatctgctgatggtgggaaggccagtgcttaacaaatc

SEQ ID NO: 58921 - DNA, 120 bp, Artificial Sequence
  ENSG00000071246_23 (sequence is synthesized)
catgtgtcatggggccaggtgagggaaactgctggttctgctggtgcctctgcccctggcttctctctgggagttgggtgcatcttatcagtgggaaatctcccagccttaccaggcctg

SEQ ID NO: 58922 - DNA, 120 bp, Artificial Sequence
  ENSG00000071246_24 (sequence is synthesized)
tgatggggggtgggggtggggtggagatgtttctccagttctgcctgccctggcagaatcttgacccagggaaagggaagcagggtaggagtccttctgagaaaggtctgtgtagcccat

SEQ ID NO: 58923 - DNA, 120 bp, Artificial Sequence
  ENSG00000071246_25 (sequence is synthesized)
taaccaggagcttggcacaggccacatctgccccaagagcatgagctcgtggctcaggagagccttcaggcccttgaggcccccatgggcagtgctgtgtgggcagaggaggggtgatat

SEQ ID NO: 58924 - DNA, 120 bp, Artificial Sequence
  ENSG00000071246_26 (sequence is synthesized)
tagcccacaggctccctgcggagggtctgggcttggcggaggacccagaatggcactgaggccagcatggctgtgggagttgagcaaaccctgggtgccagtccaggagctgtggctgga

SEQ ID NO: 58925 - DNA, 120 bp, Artificial Sequence
  ENSG00000071246_27 (sequence is synthesized)
catggggtgatggggcgggatgcttgggcctgggtctctccgccagcagtgccaggagcccttgctggggaaatcaagaccagactaggatgcttctgccccaggcctgccttccattct

SEQ ID NO: 58926 - DNA, 120 bp, Artificial Sequence
  ENSG00000071246_28 (sequence is synthesized)
ttaacagcccatcttggcttggggttgcaatgatggctgggccagtcacttgtggcagggcatcagggccctggcagggaagaacctaggcacctggggttgtccccagcctgcccgtca

SEQ ID NO: 58927 - DNA, 120 bp, Artificial Sequence
  ENSG00000071246_29 (sequence is synthesized)
gcatgagatacccagtgggaaagtgagaggatgcggagaggttggcagagccaggggtaggttctggaggctcaagcaacaaggaggtgcaggtaaagggtgcagtgcagccactgaggg

SEQ ID NO: 58928 - DNA, 120 bp, Artificial Sequence
  ENSG00000071246_30 (sequence is synthesized)
acagctgggaactgggggatgcaagtgagaaagggatgtgggggagagttcaggatcaggctgcttgaggagtaatgggttacctacagcagagacgagatggctgtttgtcaggaggcg

SEQ ID NO: 58929 - DNA, 120 bp, Artificial Sequence
  ENSG00000071246_31 (sequence is synthesized)
gtagaaaggtagaaaggattcagattgtggaagggtaaacggatgagatgaccattaaggttttgttttactgagaggctgtaagtctgccagggacagctgtcagtaaggctgcagaag

SEQ ID NO: 58930 - DNA, 120 bp, Artificial Sequence
  ENSG00000071246_32 (sequence is synthesized)
ggctggggggctacacaaggaagagcagaactagggttgtaagctcaaatgacgagcaaacggtgagaaggaggcctgaagggctgtgtggggactatggctacctgaagagggcacacc

SEQ ID NO: 58931 - DNA, 120 bp, Artificial Sequence
  ENSG00000071246_33 (sequence is synthesized)
ctgttaaaggggccacagctgctcagctgttcttacagtgccggccctgtgttgccagattgtctgctttgtcagaggccagaattctgactttttatgtgaaataggatttttaaatgc

SEQ ID NO: 58932 - DNA, 120 bp, Artificial Sequence
  ENSG00000071246_34 (sequence is synthesized)
tggtgatcacttaaaaaaaacttaaaaacccaatactggcaaaagaggatgccagtttgcaatccctgaagtagagagagctcgtgctggggagaagtccaccaagatgctttgaggcgg

SEQ ID NO: 58933 - DNA, 120 bp, Artificial Sequence
  ENSG00000071246_35 (sequence is synthesized)
gctgtagcaaagtcctgtttctcagagctgggctgggctggggtaggatccttgcagctgaggaggaggaaaagccactgagtctcctcccagagcgggacaaaccagaggccctttgca

SEQ ID NO: 58934 - DNA, 120 bp, Artificial Sequence
  ENSG00000071246_36 (sequence is synthesized)
gttgctgggtcaccagcgggggtggcgcatggagtacagacagtgtagctcttggcctgccagggagacggatggtgcctttgaagcaaagaggaagggaaggcagaaccagggatgcct

SEQ ID NO: 58935 - DNA, 120 bp, Artificial Sequence
  ENSG00000071246_37 (sequence is synthesized)
ttgctgatgagagtgcctgtcagggaaggcgccacaggctggcagctcttcaaaccagcagcgcttgacccagagccagatccagcatggcctggccagaggcaccctgggaggccagct

SEQ ID NO: 58936 - DNA, 120 bp, Artificial Sequence
  ENSG00000071246_38 (sequence is synthesized)
ggtcagtcccttgcctccccaagttccccctggggtcaatgagccctgggaggatgcctaacctaactccagccagactaataggggcatggtgacccttgactcaccatcccatcccag

SEQ ID NO: 58937 - DNA, 120 bp, Artificial Sequence
  ENSG00000071246_39 (sequence is synthesized)
ctttcagggagtgggggtagtgtggtctccatgttcctactatgcctaagaagagatggctcaccttgggaggtgccaggctgaaactaggtcctttccgggtctggatgctgccgctca

SEQ ID NO: 58938 - DNA, 120 bp, Artificial Sequence
  ENSG00000071246_40 (sequence is synthesized)
ggagcaggggcgtggcctcagctgcctctgggagcttcccgggaatgacagggtttgaggggagtagatatgagagggagccgctcctggttctggagtcttaggaggttccaacttgca

SEQ ID NO: 58939 - DNA, 120 bp, Artificial Sequence
  ENSG00000071246_41 (sequence is synthesized)
ggatcctttcccagagccctccatggagaaaacagcaaaatgaagcccttacctgcttgctgtctgcaagggagggagccgagccccagctgataatcccccagcactcacccttcctga

SEQ ID NO: 58940 - DNA, 120 bp, Artificial Sequence
  ENSG00000071246_42 (sequence is synthesized)
gctgagacttcggggctgtggagaccagcacaggacatagtggtgctttttaaatttatttttaactgtttctcatatgtagcaacccctcctcccctcctgggcatgtttacacaggct

SEQ ID NO: 58941 - DNA, 120 bp, Artificial Sequence
  ENSG00000071246_43 (sequence is synthesized)
ctgctctgggggctggcctggctgtgaggtttctggggaggcagagaggcagggactttggggccttagtcaccatccatggtatcacctcatctcacttcctgtgagggacagggcctg

SEQ ID NO: 58942 - DNA, 120 bp, Artificial Sequence
  ENSG00000071246_44 (sequence is synthesized)
gctgatgtgatcccagctccccccagttcaggactgtctttcagctcctttgcccctggaggtgggggctgctggctgaggaggggtcaaggtgagttcaagaaagctacctgtggaaaa

SEQ ID NO: 58943 - DNA, 120 bp, Artificial Sequence
  ENSG00000071246_45 (sequence is synthesized)
tggaccaggttgggggggtgattgcaaagtctccccaaagcctggctcctcatgctcagtgccaggggcagaacactggggagccaggtatagagagccttcctgtcataactgccagtc

SEQ ID NO: 58944 - DNA, 120 bp, Artificial Sequence
  ENSG00000071246_46 (sequence is synthesized)
ctcttcctccaaggcctctgcatattctcatgttcccctcacccatcatgccagccacccctatccctcttctagcagggccaagatggggacagcagcagccctctggccttgggatgt

SEQ ID NO: 58945 - DNA, 120 bp, Artificial Sequence
  ENSG00000071246_47 (sequence is synthesized)
gatgataaagcaagcctagggccagggtttggggagcagagagagccaagaagttgaccacgtgtgatttccagcccttcccactgggacttgacttcccaggtcaaggagtccgtctca

SEQ ID NO: 58946 - DNA, 120 bp, Artificial Sequence
  ENSG00000071246_48 (sequence is synthesized)
ttctggctggtcgagtgaccagaggcctgtgtgaatgtgtgcacctgcttttcctgcctggaatgttttctggctcagctgcagcaacatctgtgagcccagtgtctgccctgtgtccct

SEQ ID NO: 58947 - DNA, 120 bp, Artificial Sequence
  ENSG00000071246_49 (sequence is synthesized)
gggctcgctccaagtgcaggaacatacatgcagggcccaacatgatgatggtgtgaagggcaggaaacagtcctctgaaggagtggggaggtgggcagtctgcccccgccaggtaccatc

SEQ ID NO: 58948 - DNA, 120 bp, Artificial Sequence
  ENSG00000071246_50 (sequence is synthesized)
gcctcctgccagcttccttagaccaggcagggctgccatggtgctagctgcaagtccatcagtattgaccgtctcgctccatcttggtcctccggagtcccaagtttccttttcatcaaa

SEQ ID NO: 58949 - DNA, 120 bp, Artificial Sequence
  ENSG00000071246_51 (sequence is synthesized)
tctgacaagagagaagaaacatgggtgtgcttggcccacagggcctggtggtgatggacctccccgctccctcaagctctggatggctgcagtgttgtactagactttgttcaggctgtt

SEQ ID NO: 58950 - DNA, 120 bp, Artificial Sequence
  ENSG00000071246_52 (sequence is synthesized)
ctcatctcagtattgccccttcctttcactttcacacttcatctcattcctgttgtcactttccccgaaacgaataaagtctccccagctcctgctgtgtaggctgggcagaaaccacaa

SEQ ID NO: 58951 - DNA, 120 bp, Artificial Sequence
  ENSG00000071246_53 (sequence is synthesized)
ggttgaatgggctccagggctctcccatatgcagtcatctgcttggccccaagatggagaagcaccccactaaagtggaagaaccccccaaaatggaggagccccgaggtcccagtaccc

SEQ ID NO: 58952 - DNA, 120 bp, Artificial Sequence
  ENSG00000071246_54 (sequence is synthesized)
cacatctcagttgctaccttcccaggcttactgggcagctcttttttgagtcacgtggatacagggaccgttttctgaaccccaaatcagggcacagtgtctcacaaagacagttgtacc

SEQ ID NO: 58953 - DNA, 120 bp, Artificial Sequence
  ENSG00000071246_55 (sequence is synthesized)
atttccaagaactagacagtctgggaggcacagttggaatgcccagatgttggcatttccagaacatgttgatttctggacgagatattaaagcaaaactgccttaaaaaaaaaaaaaac

SEQ ID NO: 58954 - DNA, 120 bp, Artificial Sequence
  ENSG00000071246_56 (sequence is synthesized)
acccccgcctccaacccaaagggcagaagtggggcctgtagctgagtcaccagggtagccttggagacagaccagccaccaggagaggctgtcctccccagccccacagtcaacagcggg

SEQ ID NO: 58955 - DNA, 120 bp, Artificial Sequence
  ENSG00000071246_57 (sequence is synthesized)
agaggaggaagtgtttatggctggttctccatcctaactggtcaatgcctgagccctaccttttcttctcagtcattttattattaaaaatgtcataaatacacgtgaaacctagaacaa

SEQ ID NO: 58956 - DNA, 120 bp, Artificial Sequence
  ENSG00000071282_0 (sequence is synthesized)
gcacagagctccctcccaggcccgcgaacttggccattcagccgccgctgtccccgctgcgcgccctcgcgcctctgcctgagaagccaggcgctgttcccccaccccagaagaggatgg

SEQ ID NO: 58957 - DNA, 120 bp, Artificial Sequence
  ENSG00000071282_1 (sequence is synthesized)
caaaggtggctaaggacctcaacccaggagttaaaaagatgtccctgggccagctgcagtcagcaagaggtgtggcatgtttgggatgcaaggggacgtgttcgggcttcgagccacatt

SEQ ID NO: 58958 - DNA, 120 bp, Artificial Sequence
  ENSG00000071282_2 (sequence is synthesized)
catggaggaaaatatgcaagtcttgcaaatgcagccaagaggaccactgcctaacatctgacctagaagacgatcggaaaattggccgcttgctgatggactccaagtattccaccctca

SEQ ID NO: 58959 - DNA, 120 bp, Artificial Sequence
  ENSG00000071282_3 (sequence is synthesized)
ctgctcgggtgaaaggcggggacggcatccggatttacaagaggaaccggatgatcatgaccaaccctattgctactgggaaagatcccacttttgacaccatcacctacgagtgggctc

SEQ ID NO: 58960 - DNA, 120 bp, Artificial Sequence
  ENSG00000071282_4 (sequence is synthesized)
cccctggagtcacccagaaactgggactgcagtacatggagctcatccccaaggagaagcagccagtgacaggcacagagggtgccttttaccgccgccgccagctcatgcaccagctcc

SEQ ID NO: 58961 - DNA, 120 bp, Artificial Sequence
  ENSG00000071282_5 (sequence is synthesized)
ccatctatgaccaggatccctcgcgctgccgtggacttttggagaatgagttgaaactgatggaagaatttgtcaagcaatataagagcgaggccctcggcgtgggagaagtggccctcc

SEQ ID NO: 58962 - DNA, 120 bp, Artificial Sequence
  ENSG00000071282_6 (sequence is synthesized)
cggggcagggtggcttgcccaaggaggaggggaagcagcaggaaaagccagagggggcagagaccactgctgctaccaccaacggcagtctcagtgacccgtccaaagaagtggaatacg

SEQ ID NO: 58963 - DNA, 120 bp, Artificial Sequence
  ENSG00000071282_7 (sequence is synthesized)
tctgcgagctctgcaagggagcggcccctcctgacagccccgtggtctactcggacagggcaggctacaacaagcagtggcaccccacctgctttgtgtgtgccaagtgctccgagccgc

SEQ ID NO: 58964 - DNA, 120 bp, Artificial Sequence
  ENSG00000071282_8 (sequence is synthesized)
tggtggacctcatctacttctggaaggatggtgcaccctggtgcggccgccattactgcgagagtctgcggccccggtgctccggctgcgatgagataatattcgctgaggactaccagc

SEQ ID NO: 58965 - DNA, 120 bp, Artificial Sequence
  ENSG00000071282_9 (sequence is synthesized)
gtgtggaagatctggcctggcaccgaaagcactttgtctgtgagggttgtgagcagctgctgagcggccgggcgtacatcgtcaccaagggtcagcttctgtgcccaacttgcagcaagt

SEQ ID NO: 58966 - DNA, 120 bp, Artificial Sequence
  ENSG00000071282_10 (sequence is synthesized)
ccaaacgctcctgaagggctgcccacccacagccagaatccacaggatcccaccgagaaggagagccaggtgtgccgagaccatcctaagggtccgatgtgacagcaagcaagtgaaata

SEQ ID NO: 58967 - DNA, 120 bp, Artificial Sequence
  ENSG00000071282_11 (sequence is synthesized)
aacaatgatttgcttttcagtgagaatatatatatgagatatatatagatatatattctaggttgggtggtggtagatccttgagggtcagtagtttcaaaaccaaaaatattctaagaa

SEQ ID NO: 58968 - DNA, 120 bp, Artificial Sequence
  ENSG00000071282_12 (sequence is synthesized)
gtcttaggatggagttccttttctttctgttgttgtttcccagctacaaccaactaaagacacaaatggcgttctgcaaggggactctgggaggagttttccagaatgcaattccgagtg

SEQ ID NO: 58969 - DNA, 120 bp, Artificial Sequence
  ENSG00000071282_13 (sequence is synthesized)
agcaaatcgcatagctgtagaatgtgcgtgcttttttgtggacacaggagctcctccaggagcaggctgggatcccaactatcgcttgttgcctctttttcaagtggaatttgaatttta

SEQ ID NO: 58970 - DNA, 120 bp, Artificial Sequence
  ENSG00000071282_14 (sequence is synthesized)
aataaacaactttttttggcatgataaacagatcaataaaagttttgtgaattccacatacacccttatctaattatttacaccatggcagtgattttgcaacacccagtgctggcagaa

SEQ ID NO: 58971 - DNA, 120 bp, Artificial Sequence
  ENSG00000071282_15 (sequence is synthesized)
aatatagtaaaatactaatgagcctctctatcaatgtatctcatcagacttccactgggagtgtaggctttgggacagaacccccgccccacctgcctattccagatactcccagatcac

SEQ ID NO: 58972 - DNA, 120 bp, Artificial Sequence
  ENSG00000071282_16 (sequence is synthesized)
taatgtaacaaaggtatcatgttttatggtacactgaaaagtggcctgctgggaactgatgagcttctctttagccagggacctgactcagctgccctcagagcccaggaaaatagcgaa

SEQ ID NO: 58973 - DNA, 120 bp, Artificial Sequence
  ENSG00000071282_17 (sequence is synthesized)
tgaacccctctgggaataagaccagtactgggaaaccactgaacaggggccacctaagctccaccaatgggtgccacatgggatgtggtgactaatgtgggcagatctttaaaaatacag

SEQ ID NO: 58974 - DNA, 120 bp, Artificial Sequence
  ENSG00000071282_18 (sequence is synthesized)
cactttttcaaatgccaaaacaatcagaaacaaaattttttcaataaaaattaatctaaaatttaacaatgccacttttatgagaaatctcaatttttaatgttgccaactaaacattga

SEQ ID NO: 58975 - DNA, 120 bp, Artificial Sequence
  ENSG00000071282_19 (sequence is synthesized)
atgagtcacgtagaataggtctttgggccaaattgtatctccattttatggtctctctgaacattttcagctcttaaattaatttctttcccacagtttctaagaaaaacatatttttct

SEQ ID NO: 58976 - DNA, 120 bp, Artificial Sequence
  ENSG00000071282_20 (sequence is synthesized)
actgggagtataaggatgaaaaagacacaagtcctaggagcttacggtctggtcgccagtggttttctttcttgaacttcctcatctgctgccagttttctttaacctcaccatccaaat

SEQ ID NO: 58977 - DNA, 120 bp, Artificial Sequence
  ENSG00000071282_21 (sequence is synthesized)
ttcactctgaccatctcgtacctagaaaacccccattcatgtgctttataagtttcaccaaagccattgctatatcctcccaaggcagtggttttctgctcccagctcctttctctagtc

SEQ ID NO: 58978 - DNA, 120 bp, Artificial Sequence
  ENSG00000071282_22 (sequence is synthesized)
accctcagtttcctcgtcatgttcatcttctcaaagataagtttcaagtgtgtcatttccttcactcaatctccatggctcttcattgcctgccaagttaacaaccaagtcctcatggac

SEQ ID NO: 58979 - DNA, 120 bp, Artificial Sequence
  ENSG00000071282_23 (sequence is synthesized)
atttgaatccttccaaaacttggcttatgtctttctggccttggagccctttatttccctagatttctagttccctatttcttcctaagcatgcagaagctccctctgatcaagcccttc

SEQ ID NO: 58980 - DNA, 120 bp, Artificial Sequence
  ENSG00000071282_24 (sequence is synthesized)
cctttgcttttgctagttgaagactggctacctgaagaccaactctggctgttgaaattctattcatcctataaggtgcttctcaagcataacctgcttctctggcactttcctgaagca

SEQ ID NO: 58981 - DNA, 120 bp, Artificial Sequence
  ENSG00000071282_25 (sequence is synthesized)
ccagtgaaatattcaccaattcatcattcattcatccattccacaagtatttcagtgagcacggcaaagttccaattcccatgctgaatataggggatgcggggtgcacaaaaagaacag

SEQ ID NO: 58982 - DNA, 120 bp, Artificial Sequence
  ENSG00000071282_26 (sequence is synthesized)
tgacccctacgcccatagatgttacggtctgtgggggagatgggcctcaagcaaatattctcacaagtcaatgcaaaattacactactgtgcatgctataaaaggaagatttgtgttact

SEQ ID NO: 58983 - DNA, 120 bp, Artificial Sequence
  ENSG00000071282_27 (sequence is synthesized)
ataatgcatgtaaactggacttaggaatatcgagagaggtgcccctgggaaagtgatgcttgaactgggctgtaaaggatgagtagccttgccaggcatagtggctcaggcctgtattct

SEQ ID NO: 58984 - DNA, 120 bp, Artificial Sequence
  ENSG00000071282_28 (sequence is synthesized)
actttgggaggccaaagcgggtggatcacttgagcctaggagttcgagaccggcctgggcaacatggcaaaactccacccctacaaaaaatacaaaaactatctggcatggtggcacacc

SEQ ID NO: 58985 - DNA, 86 bp, Artificial Sequence
  ENSG00000071282_29 (sequence is synthesized)
acccctacaaaaaatacaaaaactatctggcatggtggcacacctgtagtatcagttactctagaggataacctgagcccagtagc

SEQ ID NO: 58986 - DNA, 120 bp, Artificial Sequence
  ENSG00000071282_30 (sequence is synthesized)
aaaaaaaaaaaggataggttgcctctaagttggcaaagagaggaaggacaatggttaaagatggatacatgaatgcatgtgcaaaggccctgtggtggaagccccaccagtttattcaac

SEQ ID NO: 58987 - DNA, 120 bp, Artificial Sequence
  ENSG00000071282_31 (sequence is synthesized)
acctatttgctggtgttggagatacagtggtgaacatggcccatggatggaactgaaagaaaactggtgtggcaggagcacagagcatggtgaggagggtgggcctggggcatgagaggc

SEQ ID NO: 58988 - DNA, 120 bp, Artificial Sequence
  ENSG00000071282_32 (sequence is synthesized)
aggcatggccagcctgctccagttctggggcaattcaaaagactggtctctgttctaggagcaagggggagccttcaaacagctttaaggagggggtggtgatggctggacagggagatc

SEQ ID NO: 58989 - DNA, 120 bp, Artificial Sequence
  ENSG00000071282_33 (sequence is synthesized)
atgagatacgtcatctcttctctgttgaaaccccagcacaatgcatgattgacttggtccactgggtcacaccatcatggatgggcattatctcccacaacagtccccatggggcaccac

SEQ ID NO: 58990 - DNA, 120 bp, Artificial Sequence
  ENSG00000071282_34 (sequence is synthesized)
cacctgcccctgcctttctcatgtctattaatgacacccacccttgcatttggagcacctgaatcatctctgccacttgccttcatatctgatgggtcactcagtccagtcctttctctc

SEQ ID NO: 58991 - DNA, 120 bp, Artificial Sequence
  ENSG00000071282_35 (sequence is synthesized)
catcctcgctttcactccatccccaaagtcatatctcaccttgaacattttctgctcagactgacaagtctccccgacgggaactcaccctctccacccaccacttccagatgaattgct

SEQ ID NO: 58992 - DNA, 120 bp, Artificial Sequence
  ENSG00000071282_36 (sequence is synthesized)
cagaaacacaccctcatcttgcactctcctcttcaagaacaatcaggggctccctgttgcacacacagaaaaaaattgaaactgttttaccttgcagtcgagtttcttatttttcctgcc

SEQ ID NO: 58993 - DNA, 120 bp, Artificial Sequence
  ENSG00000071282_37 (sequence is synthesized)
ccaaccctccttccttcctgttatcctttcagaagccaaatgggcagtttacagtcacagtgtgtgcccctgctttcctcacctctgtaccatcactcacgctgtgctttttgcctgcaa

SEQ ID NO: 58994 - DNA, 120 bp, Artificial Sequence
  ENSG00000071282_38 (sequence is synthesized)
ttccccacactgtgtttaattgctgcctctgctggggggctgcaatagctgagtgggattctgtaccagaattggaaagatccatgttaactcttgcctgattctatctcccatgtcagc

SEQ ID NO: 58995 - DNA, 120 bp, Artificial Sequence
  ENSG00000071282_39 (sequence is synthesized)
aggaagaggggctgccatccccacccctcccactctctaggaagactttcctccctcacccttcccttggggtgttttaggtgccctttatctgtaagttcataatatcccaggcttaca

SEQ ID NO: 58996 - DNA, 120 bp, Artificial Sequence
  ENSG00000071282_40 (sequence is synthesized)
gtaattcttccaaggcctttattgtgctataattatttattcatgaaagccttcccctatgaacttctaaagaataatcgtattatctttatttccccaactcttagtacaaatcctggc

SEQ ID NO: 58997 - DNA, 120 bp, Artificial Sequence
  ENSG00000071282_41 (sequence is synthesized)
aactaaatgaaagaacaaacaacctggggttctgggatggttcgtctttgctgatggcactgtgttccaaaatggccaaggtcaaatataaaaatttcagactgaggtagacactgctgg

SEQ ID NO: 58998 - DNA, 120 bp, Artificial Sequence
  ENSG00000071282_42 (sequence is synthesized)
cagcctacacattgccaccacaccccacttccttcttcctagtggcaaggaagcagtgggtggagagggtgagttcctgtcagggagacttgtcagtctgagcagaaaatgttcaaagtg

SEQ ID NO: 58999 - DNA, 120 bp, Artificial Sequence
  ENSG00000071282_43 (sequence is synthesized)
agatatgactttggggatggagacaaagggaggatggagagaaacgactggactgagagaagagcccactcccctttatgtaaattggctttgccaacctggtctgcagctggagaaagg

SEQ ID NO: 59000 - DNA, 120 bp, Artificial Sequence
  ENSG00000071282_44 (sequence is synthesized)
ccatgcgcctctattaccagccagtggggcttccgccttaggagggtcttagaaaagtgtttttccttaatgaaaggagatactgtgcagtaaatagccctgctgttgttttcttttctt

SEQ ID NO: 59001 - DNA, 120 bp, Artificial Sequence
  ENSG00000071282_45 (sequence is synthesized)
ttgatagaatgtcaaacttacgaaaaaagttacaagaagagaacaaagagctattagagggtgttgctgacacaatgctttatcactcttgaatattttcgtgtgtaattcctacaaata

SEQ ID NO: 59002 - DNA, 120 bp, Artificial Sequence
  ENSG00000071282_46 (sequence is synthesized)
aggacattctcccacatagccacaatacaaccatcaaaatcaggaagttaacgctgatgtgtttctaccatgtaatcctcagatccaattcaagtgtcaccagctgtcccaataatgtct

SEQ ID NO: 59003 - DNA, 120 bp, Artificial Sequence
  ENSG00000071282_47 (sequence is synthesized)
tttataacaaaaacattcagtctaagatcactcattctatttagttatcttgtctattcttcaatttggaagtgttctttgttctttcctgaatgttcatgaccttgacatcttagaaga

SEQ ID NO: 59004 - DNA, 120 bp, Artificial Sequence
  ENSG00000071282_48 (sequence is synthesized)
ttaaaggttatttaaagttgttgagttaaatatccattaaattaggtttgtcagatatttcctcgaaattagattcagcttatgcattttttggaaggaataccacagaagtgatgttgt

SEQ ID NO: 59005 - DNA, 120 bp, Artificial Sequence
  ENSG00000071282_49 (sequence is synthesized)
tttctttctgttgcatccaatcagatgatacaggattttgatttgttccattactgttgacatgaattttgaacatttgataatgccagtatcagccagatttttccattgtaaagtcat

SEQ ID NO: 59006 - DNA, 120 bp, Artificial Sequence
  ENSG00000071282_50 (sequence is synthesized)
tcctttgtcctttgtatttaataagtatgtttagggactttgagactatgtcaatgtcctgttcttcatcaaaattccactcactcattcttagtattcattgacgtttactgatcgaac

SEQ ID NO: 59007 - DNA, 120 bp, Artificial Sequence
  ENSG00000071282_51 (sequence is synthesized)
taattattattatgatagttgccaaatgttggtttttctaattcaatcatttctttagtgtttattagcattctactataaggaaaagcactatcttctccccatttattaattcacata

SEQ ID NO: 59008 - DNA, 120 bp, Artificial Sequence
  ENSG00000071282_52 (sequence is synthesized)
tttacatcagcttggagttattgatttctattttattaaatagtttataattgattaccatccttatttattttaatgctcaaattgtcccaaattatggccaaagaaagctccttcaaa

SEQ ID NO: 59009 - DNA, 120 bp, Artificial Sequence
  ENSG00000071282_53 (sequence is synthesized)
ctggttgctatgtccttttgacatggcccatcattctttaaacacattttacatctggcacaataacgtgctacatacccatcttgtatttttcctgccccatctttgaaatcagccatt

SEQ ID NO: 59010 - DNA, 120 bp, Artificial Sequence
  ENSG00000071282_54 (sequence is synthesized)
ctcaaggggttccttcttaatctggctgttgttgtgttggaactcctggtaccatcttagaaccttaaggagacaagcgaaccaagccaataagctttccatgatgctgcttagagttaa

SEQ ID NO: 59011 - DNA, 120 bp, Artificial Sequence
  ENSG00000071282_55 (sequence is synthesized)
acagagcccaggtactaagttatgtcatggagacagtgaactaacctctggactgcttgctacatgagacaattgattttcttattttctatgtagggtggtacatttcctcattttgag

SEQ ID NO: 59012 - DNA, 120 bp, Artificial Sequence
  ENSG00000071282_56 (sequence is synthesized)
atatttcttcaacatatagcttttcattagtggggattttgtcaattataaccaaaaacaatgtgacggatacccaagatgtttcatgttgtagcttgggtgaattacacatttctgaag

SEQ ID NO: 59013 - DNA, 120 bp, Artificial Sequence
  ENSG00000071282_57 (sequence is synthesized)
ccattacacttcctagtttatttggatttaagttgacaaataaaaattgcatatgtttatggtctataacatggtgtttcgatatatgtatacatcgtggaatggctaaatcaagctaac

SEQ ID NO: 59014 - DNA, 120 bp, Artificial Sequence
  ENSG00000071282_58 (sequence is synthesized)
atatccattacctcacatagttattttttgtggtgagaacattttaaaaatattgtcttagcaattttcaatcaagcctgtcccatggagacacaagcaatagtgacatgagcacttgac

SEQ ID NO: 59015 - DNA, 120 bp, Artificial Sequence
  ENSG00000071282_59 (sequence is synthesized)
tcgctgggttatcaggctttggctccaaatgtttggcttcaaatatgaaaaagttacatgaaagatgaaactatgcaatggcatggctgttggtcattcacatctctctctgccaagaat

SEQ ID NO: 59016 - DNA, 120 bp, Artificial Sequence
  ENSG00000071282_60 (sequence is synthesized)
ggggatgacgctgttgaaggaagaaatgtgttttctcctttttctcaagtgatatttgccttaggtcagattctactagtttaaagcaaaacgatctcctggtctgattcctttgggtct

SEQ ID NO: 59017 - DNA, 120 bp, Artificial Sequence
  ENSG00000071282_61 (sequence is synthesized)
ctaataatggaaactgcaaggatcagcataaagtgttcctttgttctgacgttggtataacattgcttcttgaaaaatgaaagtatttggacatacagacagaagcaatattattcaggt

SEQ ID NO: 59018 - DNA, 87 bp, Artificial Sequence
  ENSG00000071282_62 (sequence is synthesized)
aagtatttggacatacagacagaagcaatattattcaggtcttccttgttgcaagtgagggaaatccaattaaaactggtttaaacc

SEQ ID NO: 59019 - DNA, 120 bp, Artificial Sequence
  ENSG00000071282_63 (sequence is synthesized)
tcagaaagtgcagaagaagggctagcttcaggaacaattggatgcagtagttcaaatcacaagttaagtctctgcttcttttctccatctctcttctgtcttcctccacactggctttat

SEQ ID NO: 59020 - DNA, 120 bp, Artificial Sequence
  ENSG00000071282_64 (sequence is synthesized)
tcttaggtaggcttacccagatagtcataaacacagccaccagtggcagctgggctcacttttgtccttggagccagtgagcccatgaaaaaggagcttctctttctggagcttcccagg

SEQ ID NO: 59021 - DNA, 120 bp, Artificial Sequence
  ENSG00000071282_65 (sequence is synthesized)
ggtaactttgatcagccaacaagggtcagtcctatgcttatcccttgaccaatctctgtgcccagagggcagggtactctgattggcaataccttcatcgtgggccaaccactgtgggga

SEQ ID NO: 59022 - DNA, 120 bp, Artificial Sequence
  ENSG00000071282_66 (sequence is synthesized)
agggggagggattagaaaagacagccacacccaaatctcatgaagcagtcccctttattttaaaaaagtccctgtgagagcaacaggagcaaagcatggagaagaagcaatcttggagaa

SEQ ID NO: 59023 - DNA, 120 bp, Artificial Sequence
  ENSG00000071282_67 (sequence is synthesized)
gctggaagagaactgacccaaagaatccaagagactaagactgtgcagggttggggaacggaagctcacacaggaggcctggacagagctgcagcagagccaggagagaagccaagtggc

SEQ ID NO: 59024 - DNA, 120 bp, Artificial Sequence
  ENSG00000071282_68 (sequence is synthesized)
acagctcatcttgaagtaattataatgccactaaaattctcatttgtattaattttttttaattactggcaagataaggcaaatgtttttaaaggcctaaataaaatgatattccctgaa

SEQ ID NO: 59025 - DNA, 120 bp, Artificial Sequence
  ENSG00000071282_69 (sequence is synthesized)
cttaaaggccccacctctcaatactgccatgcagaggattatgtttcaacctgagtgtttggaggggatgttcaacccataggaagtggcagtgtggaagaagtgctgctgaggagtgag

SEQ ID NO: 59026 - DNA, 120 bp, Artificial Sequence
  ENSG00000071282_70 (sequence is synthesized)
tcactgggggccattttgagaaaacagaaaggagaagccagagttggggagatgaaagcctcatggcttggtttgtcttaaactgccccacagaaggcgaaaggaatgcttgaggctgga

SEQ ID NO: 59027 - DNA, 120 bp, Artificial Sequence
  ENSG00000071282_71 (sequence is synthesized)
ccacgtgggtctagcgtgtactgcgtttctggtccccagcccctgttttaccttttgctcctcctgccccatcaaccaagtgtcttcatttgtttctatggcaattaacttttggagata

SEQ ID NO: 59028 - DNA, 120 bp, Artificial Sequence
  ENSG00000071282_72 (sequence is synthesized)
gaagtcccagcacacgagatccccaagcacattatctaccttgctgaacaggctggcagtcacacatgagccaggcgacccagggaaatgccagcccaaacaaagctgctgccacatcca

SEQ ID NO: 59029 - DNA, 120 bp, Artificial Sequence
  ENSG00000071282_73 (sequence is synthesized)
caaaggtggctaaggacctcaacccaggagttaaaaagatggtgatcacatgggatatacatataaagtaatcgagcgaatactggagattggtgcatttcgaccgcatatgtccctggg

SEQ ID NO: 59030 - DNA, 120 bp, Artificial Sequence
  ENSG00000071462_0 (sequence is synthesized)
gacataaaaaccgggtgccggcaggcgccagtcgcaggtgtgctgctgaggcgtgagaatggcgtcccgcggccggcgtccggagcatggcggacccccagagctgttttatgacgagac

SEQ ID NO: 59031 - DNA, 120 bp, Artificial Sequence
  ENSG00000071462_1 (sequence is synthesized)
agaagcccggaaatacgttcgcaactcacggatgattgatatccagaccaggatggctgggcgagcattggagcttctttatctgccagagaataagccctgttacctgctggatattgg

SEQ ID NO: 59032 - DNA, 120 bp, Artificial Sequence
  ENSG00000071462_2 (sequence is synthesized)
ctgtggcactgggctgagtggaagttatctgtcagatgaagggcactattgggtgggcctggatatcagccctgccatgctggatgaggctgtggaccgagagatagagggagacctgct

SEQ ID NO: 59033 - DNA, 120 bp, Artificial Sequence
  ENSG00000071462_3 (sequence is synthesized)
gctgggggatatgggccagggcatcccattcaagccaggcacatttgatggttgcatcagcatttctgctgtgcagtggctctgtaatgctaacaagaagtctgaaaaccctgccaagcg

SEQ ID NO: 59034 - DNA, 120 bp, Artificial Sequence
  ENSG00000071462_4 (sequence is synthesized)
cctgtactgcttttttgcttctcttttttctgttctcgtccggggatcccgagctgtcctgcagctgtaccctgagaactcagagcagttggagctgatcacaacccaggccacaaaggc

SEQ ID NO: 59035 - DNA, 120 bp, Artificial Sequence
  ENSG00000071462_5 (sequence is synthesized)
ccctaacagtgccaaagcaaagaaattctacctctgcttgttttctgggccttcgacctttataccagaggggctgagtgaaaatcaggatgaagttgaacccagggagtctgtgttcac

SEQ ID NO: 59036 - DNA, 120 bp, Artificial Sequence
  ENSG00000071462_6 (sequence is synthesized)
caatgagaggttcccattaaggatgtcgaggcggggaatggtgaggaagagtcgggcatgggtgctggagaagaaggagcggcacaggcgccagggcagggaagtcagacctgacaccca

SEQ ID NO: 59037 - DNA, 120 bp, Artificial Sequence
  ENSG00000071462_7 (sequence is synthesized)
gtacaccggccgcaagcgcaagccccgcttctaagtcaccacgcggttctggaaaggcacttgcctctgcacttttctatattgttcagctgacaaagtagtattttagaaaagttctaa

SEQ ID NO: 59038 - DNA, 77 bp, Artificial Sequence
  ENSG00000071462_8 (sequence is synthesized)
attgttcagctgacaaagtagtattttagaaaagttctaaagttataaaaatgttttctgcagtaaaaaaaaagttc

SEQ ID NO: 59039 - DNA, 120 bp, Artificial Sequence
  ENSG00000071462_9 (sequence is synthesized)
tgagacctgcctgggcaacataatgaaacttcctttccagggaggaaaaaaaaaaaaaaaaaaagctctgagagcatcttattttgtttaaaggcaagaaataaaatttccttttgtgga

SEQ ID NO: 59040 - DNA, 120 bp, Artificial Sequence
  ENSG00000071462_10 (sequence is synthesized)
cctgcctcgaacacctgtgtgccacatccttcagggagcacccctgcccggcttcacgtgaacacagaaatggccaaatgtcctccaggagaggaaaagggcccacggataagaggagga

SEQ ID NO: 59041 - DNA, 120 bp, Artificial Sequence
  ENSG00000071462_11 (sequence is synthesized)
gccgctggccgccggcgaaagtgagtccaactgggaggcatcaggagacaggggtcttgagtccacctttgccgctgacatttatgtgacctcagcctggtgttttcccctctctgggac

SEQ ID NO: 59042 - DNA, 120 bp, Artificial Sequence
  ENSG00000071462_12 (sequence is synthesized)
tcttccttccctaaaacctgccttacaaggggtctgtgtccaaatactgtccagacccagcactaggggtcatggacgtagggaacatggtgagggggtcatggcaggagggatggggcc

SEQ ID NO: 59043 - DNA, 120 bp, Artificial Sequence
  ENSG00000071462_13 (sequence is synthesized)
tacactcaccccagaggcaaagatggcggggttcccactctccagcatgtcctccagctcctcactggtcgtggtcctgccggctgcaagcgagtggggtcacactgagcccagccctct

SEQ ID NO: 59044 - DNA, 120 bp, Artificial Sequence
  ENSG00000071462_14 (sequence is synthesized)
ccccggcccttaacacagcagccgcctcaggcccccgcccctccagccccaaactcagcagctgcctcgggccacccgcctcgggcccctaactaagcagcagccttgagccacgcactc

SEQ ID NO: 59045 - DNA, 120 bp, Artificial Sequence
  ENSG00000071462_15 (sequence is synthesized)
agcagcagactcgggccccgcccctccaggctccaggccccgccccaggccccacccccagctcactgatctccagctgcctctggatgcggcctttgcagcgctcgcggtagtcggact

SEQ ID NO: 59046 - DNA, 120 bp, Artificial Sequence
  ENSG00000071462_16 (sequence is synthesized)
gcgtggcgttgtactccgacatgacctccacaaactttctggacagcgtggagtgctgggggcccgagatggaggtgcaggggtcaggccctgcggggaccgacccagagactcaggtgc

SEQ ID NO: 59047 - DNA, 120 bp, Artificial Sequence
  ENSG00000071462_17 (sequence is synthesized)
ccgcccatcctagactccgtggccgcacctgtgtcttccggatcctcaggtcagcggaggagcggttcaggccttcctcttgctcgatggactgctcgatgcctgggggcacaggtggct

SEQ ID NO: 59048 - DNA, 120 bp, Artificial Sequence
  ENSG00000071462_18 (sequence is synthesized)
gctaagtcataaccaggccccttcaaccccgtcccctacccgcacacccagcatctatccaccttcccacatcccctagggtatgtgtgtggcctgtggctggtgggatcagtgccaggc

SEQ ID NO: 59049 - DNA, 120 bp, Artificial Sequence
  ENSG00000071462_19 (sequence is synthesized)
accgatggaggaggggcctacagaagcccttccagctgtgacgctgtgtggtgtgtgcatgtgtgtaaatgcacacccactccaagctctgcgtgtgtgtgaggtctggtagctccggcc

SEQ ID NO: 59050 - DNA, 120 bp, Artificial Sequence
  ENSG00000071462_20 (sequence is synthesized)
accctatgcctgggtaccactccttttctgctcagaaaggctgtgtacgagggaccatgcccacagcggggagagccaggtggcccctcctgcagggcatgtggccccgaggccttggca

SEQ ID NO: 59051 - DNA, 120 bp, Artificial Sequence
  ENSG00000071462_21 (sequence is synthesized)
ctcatggggtgcacgtgtctgttcacccagaataccgggcttctgcaagagaccaggaagtactggccacttcttcaaccctctttagcagaggtgaggggcagtgcccatccagagtgg

SEQ ID NO: 59052 - DNA, 120 bp, Artificial Sequence
  ENSG00000071462_22 (sequence is synthesized)
agccctccctcgccaaagccttaggtgggtgtgtccctgggcccagcccagagtctggcaccaacgggccttgccaagtagctgctgagtgaatgggcacatgacgccaccctcagaaag

SEQ ID NO: 59053 - DNA, 120 bp, Artificial Sequence
  ENSG00000071462_23 (sequence is synthesized)
gaaagcaagatccggcgcaccccctcagggcgagcaaaaccccatgggctccgcagaggaagcaggcctagaatgccccccacccacccccagacaagcctgactcactctttaacttgg

SEQ ID NO: 59054 - DNA, 120 bp, Artificial Sequence
  ENSG00000071462_24 (sequence is synthesized)
aagaatcttatgcagattggcgggaaaaggaggaaacatgcaccctagtgtggcccctgatggcacatttgatgacctgatatcctaagggggtggcatctgcggaggtggggtgggatg

SEQ ID NO: 59055 - DNA, 120 bp, Artificial Sequence
  ENSG00000071462_25 (sequence is synthesized)
ccttctcttggcagatgacatggtattacagataaggtgatgcgactgatttccataaccaaataagtaaatgccatttaggaagggtgagagggcaccgacagttctccgttgtgtgat

SEQ ID NO: 59056 - DNA, 120 bp, Artificial Sequence
  ENSG00000071462_26 (sequence is synthesized)
tggcggagtaggatgtagatgttgaaagataagtgaagagctgttcctgactaataacatgaatgactctggattccaattggtggccatctccctaaacttgagtggggagctgggtcc

SEQ ID NO: 59057 - DNA, 120 bp, Artificial Sequence
  ENSG00000071462_27 (sequence is synthesized)
ctgcactggaaagtgagaatgaggggagttgctttgttctgtaattctcctgagggaggtgtgggccatgccagattctagcctgtacttttctctacgtggcttacagcgaccttaagt

SEQ ID NO: 59058 - DNA, 120 bp, Artificial Sequence
  ENSG00000071462_28 (sequence is synthesized)
tctcccaggcaggatttgtcctggagcagactggcttctgaaggaggggagggaggtgaagctgtctgctcctctcaacctccgctgcctgacccgctgcctttctttcctcagttggag

SEQ ID NO: 59059 - DNA, 120 bp, Artificial Sequence
  ENSG00000071462_29 (sequence is synthesized)
ctttctctctgccctcacccaagcctctcaggtcacatgcagcagggacaccaaggtgacggtagaaacatcaggtcccatttggactgtgcctgtttggggctaggggtttggggtcct

SEQ ID NO: 59060 - DNA, 120 bp, Artificial Sequence
  ENSG00000071462_30 (sequence is synthesized)
ggatgtctgggtgcagccatgcagcctggactccctttgtgagcccacacatgccccttccccttgccacgcctggcaggctgtctccttcttttctgatgctgccctccacctgcatct

SEQ ID NO: 59061 - DNA, 120 bp, Artificial Sequence
  ENSG00000071462_31 (sequence is synthesized)
gggaccctctcccttgggtgctgtggctctcccttccttcctgcatcctcatcttgactctcctgggtcactgctgtcggcacacagacatgctgcacaatttctccttttctagaaaag

SEQ ID NO: 59062 - DNA, 120 bp, Artificial Sequence
  ENSG00000071462_32 (sequence is synthesized)
ttccttccttaaccccataacaacaactaaccaccccgttgttgcttcccttcatagcagaactcagacctgcctcttcttcccctcccaccattctctcaatccacttctcaggctgac

SEQ ID NO: 59063 - DNA, 120 bp, Artificial Sequence
  ENSG00000071462_33 (sequence is synthesized)
aattctgtctcatcacaaattgttcttgtcaactccaccaccaatttccatcaagccacatctggtcacttgtgactttttttcatgtccttaatgtgcctgctcggtagggtcaaagac

SEQ ID NO: 59064 - DNA, 120 bp, Artificial Sequence
  ENSG00000071462_34 (sequence is synthesized)
agcagtgcgctccctccttgacgcttccttcacttggccttccacccaccatcgtggtttcctcagccttcctggctgctcctcactccactgctgcttcctcttcgagtgctgggccca

SEQ ID NO: 59065 - DNA, 120 bp, Artificial Sequence
  ENSG00000071462_35 (sequence is synthesized)
gcctggattggatcccttctctacctgtggtgctgtaaatgccagccggaaggtcctaattcccaaatgtgtatcttcagtctcttgccacctggggtttcccaatgccccctcagtgtc

SEQ ID NO: 59066 - DNA, 120 bp, Artificial Sequence
  ENSG00000071462_36 (sequence is synthesized)
tggggtttcccaatgccccctcagtgtctatacctggagtttccatgggtagtctctctctgttacccaggctagagtgcagtggtggaatcttagctcactgcagcctcgaactcctgg

SEQ ID NO: 59067 - DNA, 85 bp, Artificial Sequence
  ENSG00000071462_37 (sequence is synthesized)
gtgcatgccaccatgcctggttaatttttaaagtttttggtagagatgaggtcttgccatgttgttccctgtctcggcctcccaa

SEQ ID NO: 59068 - DNA, 120 bp, Artificial Sequence
  ENSG00000071462_38 (sequence is synthesized)
gatcttgaactcctggcctcaagcaatccccctgtctcggcctcccaaagttctgggatgactgatgtgagccaccatgcctggccatcctccattcttttttttttttgagatggagtc

SEQ ID NO: 59069 - DNA, 65 bp, Artificial Sequence
  ENSG00000071462_39 (sequence is synthesized)
tgagatggagtctcactctttccccccaggctggagtgcttgcgtcagcctcccgagtagctggg

SEQ ID NO: 59070 - DNA, 120 bp, Artificial Sequence
  ENSG00000071462_40 (sequence is synthesized)
ctccattctttaccattcttgatcattcctgtctttccctacatttcacatcttgtcagcctgtcattgagccctgctgtccgtccctcagtgtgtatccccgtgctgaccctccctgct

SEQ ID NO: 59071 - DNA, 120 bp, Artificial Sequence
  ENSG00000071462_41 (sequence is synthesized)
tccaacgagcctaatccagcactgcccctagcctggattgctgaacagctgcctgtgttgtctccttgcctttgcagtctttgcctctttcagattattttctgcatagcagcaagactg

SEQ ID NO: 59072 - DNA, 120 bp, Artificial Sequence
  ENSG00000071462_42 (sequence is synthesized)
gtctttttctttttttctaaaatgtaagttgtatcttgtcattgctcttttagtgccttcattgcagttgtgctccccgctcatgttgattttccttaacacccttcactgctctaagtc

SEQ ID NO: 59073 - DNA, 120 bp, Artificial Sequence
  ENSG00000071462_43 (sequence is synthesized)
atacacataccagttgacttggttattatttgtatctccagctagagtgaaaacttggtgaggactggtattatatccctgacattaaaaatagtgtcttgttagtaaaaagtgctcagt

SEQ ID NO: 59074 - DNA, 120 bp, Artificial Sequence
  ENSG00000071462_44 (sequence is synthesized)
tatatctgaggtccagttgacatgagggaaaggtcttaagacctttaagacatttaagaggaaaaatgagcccaaaatgcatgtgtttggaaggcccacagctgggcacagccatgcatg

SEQ ID NO: 59075 - DNA, 120 bp, Artificial Sequence
  ENSG00000071462_45 (sequence is synthesized)
ttcctcacgtccaccataggtttatgctgcctgaccccttgggtctttgctcatttcccttagtttccctagtccattccccatggggagctgggacccttctggatgacctcttctctg

SEQ ID NO: 59076 - DNA, 120 bp, Artificial Sequence
  ENSG00000071462_46 (sequence is synthesized)
aggcgcccatctcgtgctcccagggagcactcccatctcctccctcccaggggaagtacacattgccttatctccatgtgtcttaggatccttcttgtccttacactggtgtcttcaaac

SEQ ID NO: 59077 - DNA, 120 bp, Artificial Sequence
  ENSG00000071462_47 (sequence is synthesized)
gacatgtcctaaaagtaaatgtgggtaagttgaatgacctgagcatccattcctcagctattcaaaaagtaggggtagtgccacctatcttggcagtgtgttgagggtgcccagcacgta

SEQ ID NO: 59078 - DNA, 120 bp, Artificial Sequence
  ENSG00000071462_48 (sequence is synthesized)
ccttgccatccctcgttctgtaggctctcacttccagttcctcagatgaggtacagggcagggaggagcttctcccgttactgtcatctcagtctaaccacattcaggacacttgtttat

SEQ ID NO: 59079 - DNA, 120 bp, Artificial Sequence
  ENSG00000071462_49 (sequence is synthesized)
tttaaataaacaggtgaattaagaaaaagttttttaagtctttacctaatcagtctccaggctctctttttggcctgttcctcccttcctcctggccgcctccctcccatgcctctcatg

SEQ ID NO: 59080 - DNA, 120 bp, Artificial Sequence
  ENSG00000071462_50 (sequence is synthesized)
tgcctcctgcagggctgggcccccacttctcttgggacctgtgctttggggcactccccgtcttcacctccttcctttagctccattgatgactttcccccttgctgcttctcccatggc

SEQ ID NO: 59081 - DNA, 120 bp, Artificial Sequence
  ENSG00000071462_51 (sequence is synthesized)
tcacctcttgccccctggttcgccactctgccctcactttgtactctttgtagaatcttgagatgactcctcctgtgtccccagccctgctctgcagctgctcctgctttgtgctggctc

SEQ ID NO: 59082 - DNA, 120 bp, Artificial Sequence
  ENSG00000071462_52 (sequence is synthesized)
atcaggctcaggcatccgaatggcagctccttggcttgccctgtctctggtttctacggatggtcacaggggtcttcggggttaccccgccctctttccttcttccctcatacccctcag

SEQ ID NO: 59083 - DNA, 120 bp, Artificial Sequence
  ENSG00000071462_53 (sequence is synthesized)
tccttccttttcagaccctcctttccatccctgtcttcctgcccccaagctgtgggaccctaagctcctgctgtgaactgtcgactgtgctcttgaagtctaggtgatgatgtgtcattg

SEQ ID NO: 59084 - DNA, 120 bp, Artificial Sequence
  ENSG00000071462_54 (sequence is synthesized)
cattggtagaaagcggcctgcttactgctgcttagctgcttcccgaagagggaacagactgctcgctggtgtttaggtctccatgcccggcccagctctctcctcctctgcccacccaac

SEQ ID NO: 59085 - DNA, 120 bp, Artificial Sequence
  ENSG00000071462_55 (sequence is synthesized)
aacctctgtggcccggatggatgttatcaggaaggagggtgtccagagcggggaattgtgttatagggaaggtggagcatttgagagaaggggcatccgaggccaccagactcggaggta

SEQ ID NO: 59086 - DNA, 120 bp, Artificial Sequence
  ENSG00000071462_56 (sequence is synthesized)
agtcgcaggtgtgctgctgaggcgtgagaatggcgtcccgcggccggcgtccggagcatggcggacccccagagctgttttatgacgagacagaagcccggaaatacgttcgcaacattt

SEQ ID NO: 59087 - DNA, 120 bp, Artificial Sequence
  ENSG00000071462_57 (sequence is synthesized)
gaagcccggaaatacgttcgcaagtgaggggagcctgaatactgcggggcgtccgggggtcgggaagcggcaagttgcccctgttgctggcgttgcccggaaaggccgtagaatttgggg

SEQ ID NO: 59088 - DNA, 120 bp, Artificial Sequence
  ENSG00000071462_58 (sequence is synthesized)
gtgtgctgcctgggctgcaggagggagggtagtggcatagccctttcaggccactcagtggtgcagaggagtgctggggtgtgggtcaccagggtccaggcaggcggagggggtgcgggt

SEQ ID NO: 59089 - DNA, 120 bp, Artificial Sequence
  ENSG00000071462_59 (sequence is synthesized)
gggtgcgggcgtcctggagggccggacgccaggtccgcgcaggtcctcgtcgctgagtaggccgcgatcatacttgcgacggagggtggcactgcccagcaccacgtaggcctgggagat

SEQ ID NO: 59090 - DNA, 120 bp, Artificial Sequence
  ENSG00000071462_60 (sequence is synthesized)
tggctgtggaggggacgccgagcagatcatacagcgccgtgcgcgaatacgagcagtcgccctgggaataagtcctcgctcctaggcccaggctgggtgcagaattttgtggaaagccac

SEQ ID NO: 59091 - DNA, 120 bp, Artificial Sequence
  ENSG00000071462_61 (sequence is synthesized)
gggcctgcagcaacctccaagctcacggatgattgatatccagaccaggatggctgggcgagcattggagcttctttatctgccagagaataagccctgttacctgctggatattgggtg

SEQ ID NO: 59092 - DNA, 120 bp, Artificial Sequence
  ENSG00000071537_0 (sequence is synthesized)
aggagactagagcaggaagagcagcggcgaggcggcggtggtggctgagtccgtggtggcagaggcgaaggcgacagctctaggggttggcaccggccccgagaggaggatgcgggtccg

SEQ ID NO: 59093 - DNA, 120 bp, Artificial Sequence
  ENSG00000071537_1 (sequence is synthesized)
gatagggctgacgctgctgctgtgtgcggtgctgctgagcttggcctcggcgtcctcggatgaagaaggcagccaggatgaatccttagattccaagactactttgacatcagatgagtc

SEQ ID NO: 59094 - DNA, 120 bp, Artificial Sequence
  ENSG00000071537_2 (sequence is synthesized)
agtaaaggaccatactactgcaggcagagtagttgctggtcaaatatttcttgattcagaagaatctgaattagaatcctctattcaagaagaggaagacagcctcaagagccaagaggg

SEQ ID NO: 59095 - DNA, 120 bp, Artificial Sequence
  ENSG00000071537_3 (sequence is synthesized)
ggaaagtgtcacagaagatatcagctttctagagtctccaaatccagaaaacaaggactatgaagagccaaagaaagtacggaaaccagctttgaccgccattgaaggcacagcacatgg

SEQ ID NO: 59096 - DNA, 120 bp, Artificial Sequence
  ENSG00000071537_4 (sequence is synthesized)
ggagccctgccacttcccttttcttttcctagataaggagtatgatgaatgtacatcagatgggagggaagatggcagactgtggtgtgctacaacctatgactacaaagcagatgaaaa

SEQ ID NO: 59097 - DNA, 120 bp, Artificial Sequence
  ENSG00000071537_5 (sequence is synthesized)
gtggggcttttgtgaaactgaagaagaggctgctaagagacggcagatgcaggaagcagaaatgatgtatcaaactggaatgaaaatccttaatggaagcaataagaaaagccaaaaaag

SEQ ID NO: 59098 - DNA, 120 bp, Artificial Sequence
  ENSG00000071537_6 (sequence is synthesized)
agaagcatatcggtatctccaaaaggcagcaagcatgaaccataccaaagccctggagagagtgtcatatgctcttttatttggtgattacttgccacagaatatccaggcagcgagaga

SEQ ID NO: 59099 - DNA, 120 bp, Artificial Sequence
  ENSG00000071537_7 (sequence is synthesized)
gatgtttgagaagctgactgaggaaggctctcccaagggacagactgctcttggctttctgtatgcctctggacttggtgttaattcaagtcaggcaaaggctcttgtatattatacatt

SEQ ID NO: 59100 - DNA, 120 bp, Artificial Sequence
  ENSG00000071537_8 (sequence is synthesized)
tggagctcttgggggcaatctaatagcccacatggttttgggttacagatactgggctggcatcggcgtcctccagagttgtgaatctgccctgactcactatcgtcttgttgccaatca

SEQ ID NO: 59101 - DNA, 120 bp, Artificial Sequence
  ENSG00000071537_9 (sequence is synthesized)
tgttgctagtgatatctcgctaacaggaggctcagtagtacagagaatacggctgcctgatgaagtggaaaatccaggaatgaacagtggaatgctagaagaagatttgattcaatatta

SEQ ID NO: 59102 - DNA, 120 bp, Artificial Sequence
  ENSG00000071537_10 (sequence is synthesized)
ccagttcctagctgaaaaaggtgatgtacaagcacaggttggtcttggacaactgcacctgcacggagggcgtggagtagaacagaatcatcagagagcatttgactacttcaatttagc

SEQ ID NO: 59103 - DNA, 120 bp, Artificial Sequence
  ENSG00000071537_11 (sequence is synthesized)
agcaaatgctggcaattcacatgccatggcctttttgggaaagatgtattcggaaggaagtgacattgtacctcagagtaatgagacagctctccactactttaagaaagctgctgacat

SEQ ID NO: 59104 - DNA, 120 bp, Artificial Sequence
  ENSG00000071537_12 (sequence is synthesized)
gggcaacccagttggacagagtgggcttggaatggcctacctctatgggagaggagttcaagttaattatgatctagcccttaagtatttccagaaagctgctgaacaaggctgggtgga

SEQ ID NO: 59105 - DNA, 120 bp, Artificial Sequence
  ENSG00000071537_13 (sequence is synthesized)
tgggcagctacagcttggttccatgtactataatggcattggagtcaagagagattataaacaggccttgaagtattttaatttagcttctcagggaggccatatcttggctttctataa

SEQ ID NO: 59106 - DNA, 120 bp, Artificial Sequence
  ENSG00000071537_14 (sequence is synthesized)
cctagctcagatgcatgccagtggcaccggcgtgatgcgatcatgtcacactgcagtggagttgtttaagaatgtatgtgaacgaggccgttggtctgaaaggcttatgactgcctataa

SEQ ID NO: 59107 - DNA, 120 bp, Artificial Sequence
  ENSG00000071537_15 (sequence is synthesized)
cagctataaagatggcgattacaatgctgcagtgatccagtacctcctcctggctgaacagggctatgaagtggcacaaagcaatgcagcctttattcttgatcagagagaagcaagcat

SEQ ID NO: 59108 - DNA, 120 bp, Artificial Sequence
  ENSG00000071537_16 (sequence is synthesized)
tgtaggtgagaatgaaacttatcccagagctttgctacattggaacagggccgcctctcaaggctatactgtggctagaattaagctcggagactaccatttctatgggtttggcaccga

SEQ ID NO: 59109 - DNA, 120 bp, Artificial Sequence
  ENSG00000071537_17 (sequence is synthesized)
tgtagattatgaaactgcatttattcattaccgtctggcttctgagcagcaacacagtgcacaagctatgtttaatctgggatatatgcatgagaaaggactgggcattaaacaggatat

SEQ ID NO: 59110 - DNA, 120 bp, Artificial Sequence
  ENSG00000071537_18 (sequence is synthesized)
tcaccttgcgaaacgtttttatgacatggcagctgaagccagcccagatgcacaagttccagtcttcctagccctctgcaaattgggcgtcgtctatttcttgcagtacatacgggaaac

SEQ ID NO: 59111 - DNA, 120 bp, Artificial Sequence
  ENSG00000071537_19 (sequence is synthesized)
aaacattcgagatatgttcacccaacttgatatggaccagcttttgggacctgagtgggacctttacctcatgaccatcattgcgctgctgttgggaacagtcatagcttacaggcaaag

SEQ ID NO: 59112 - DNA, 120 bp, Artificial Sequence
  ENSG00000071537_20 (sequence is synthesized)
gcagcaccaagacatgcctgcacccaggcctccagggccacggccagctccaccccagcaggaggggccaccagagcagcagccaccacagtaataggcactgggtccagccttgatcag

SEQ ID NO: 59113 - DNA, 120 bp, Artificial Sequence
  ENSG00000071537_21 (sequence is synthesized)
tgacagcgaaggaagttatctgctgggaacacttgcatttgatttaggaccttggatcagtggtcacctcccagaagaggcacggcacaaggaagcattgaattcctaaagctgcttaga

SEQ ID NO: 59114 - DNA, 120 bp, Artificial Sequence
  ENSG00000071537_22 (sequence is synthesized)
atctgatgcctttattttcagggataagtaactcttacctaaactgagctgaatgtttgtttcagtgccatatggaataacaactttcagtggcttttttttttcttttctggaaacata

SEQ ID NO: 59115 - DNA, 120 bp, Artificial Sequence
  ENSG00000071537_23 (sequence is synthesized)
tgtgagacactcagagtaatgtctactgtatccagctatctttcttggatccttttggtcattatttcagtgtgcataagttcttaatgtcaaccatctttaaggtattgtgcatcgaca

SEQ ID NO: 59116 - DNA, 120 bp, Artificial Sequence
  ENSG00000071537_24 (sequence is synthesized)
ctaaaaactgatcagtgtaaaaaggaaaacccagttgcaagtttaaacgtgttcgaaagtctgaaaatagaacttgccttttaagttaaaaaaaaaaaaagctatcttgaaaatgttttg

SEQ ID NO: 59117 - DNA, 120 bp, Artificial Sequence
  ENSG00000071537_25 (sequence is synthesized)
gaactgcgataactgagaaactcttaccagtccacatgcaattagacatattcagcatatttgttattttaaaagggagggttgggaggtttcttattggtgattgtcacacggtatacc

SEQ ID NO: 59118 - DNA, 120 bp, Artificial Sequence
  ENSG00000071537_26 (sequence is synthesized)
atactcctctccttcaaagaatgaaaggccttgttaaggagttttttgtgagctttacttctttggaatggaatatacttatgcaaaaccttgtgaactgactccttgcactaacgcgag

SEQ ID NO: 59119 - DNA, 120 bp, Artificial Sequence
  ENSG00000071537_27 (sequence is synthesized)
tttgccccacctactctgtaatttgcttgtttgttttgaatatacagagccttgatccagaagccagaggatggactaagtgggagaaattagaaaacaaaacgaactctggttggggta

SEQ ID NO: 59120 - DNA, 120 bp, Artificial Sequence
  ENSG00000071537_28 (sequence is synthesized)
ctacgatcacagacacagacatacttttcctaaagttgaagcatttgttcccaggatttattttactttgcatttctttttgcacaaagaacacatcaccttcctgaattctttaaatat

SEQ ID NO: 59121 - DNA, 120 bp, Artificial Sequence
  ENSG00000071537_29 (sequence is synthesized)
gaaatatcattgccagggtatggcttacagtgactactattataatactaaaactcagagaatcaaagatggattaaactcagtggttgatgaaagccaaaacctgtttgtactgttcta

SEQ ID NO: 59122 - DNA, 120 bp, Artificial Sequence
  ENSG00000071537_30 (sequence is synthesized)
tactattcaggtatctttttatttctgatagttttatattataatagaaagccagccactgcttagctatcatagtcaccattttctcactgttaacattaggaaaatcaaggctactat

SEQ ID NO: 59123 - DNA, 120 bp, Artificial Sequence
  ENSG00000071537_31 (sequence is synthesized)
gcttcaggattgtctggttaaatagtatgggaaaaaaactgaagagtttcacataattacacacgtgaaataattaaagcttaaactgaatttgtatttcattttattgtcagatggtgg

SEQ ID NO: 59124 - DNA, 120 bp, Artificial Sequence
  ENSG00000071537_32 (sequence is synthesized)
ccagaaaacttgaaaagtttattgcttgtagagttgtactgctttgatttttgaagttggggtagtagttagaactagatttaactagtctataatgaacatgaaggcttttatatatga

SEQ ID NO: 59125 - DNA, 120 bp, Artificial Sequence
  ENSG00000071537_33 (sequence is synthesized)
agttgtatacctttttgtgtttagagaattatgggaaacctggtaagcaaaactttcctcccagataattgcttccaaattcgaagagttagtcaccaagagagccatatgtatgaaagc

SEQ ID NO: 59126 - DNA, 120 bp, Artificial Sequence
  ENSG00000071537_34 (sequence is synthesized)
gtatctgtgaaaggtaggaaacttaccccccctaagtgtaatgttgctttaggcaactcttgtaaatagtgagacttgtttggtctcttacatgtagagatttgagtgcagttggtacag

SEQ ID NO: 59127 - DNA, 120 bp, Artificial Sequence
  ENSG00000071537_35 (sequence is synthesized)
tactttggtgtctccaccactgtcccttctccccgcttcaaaataagtgtaatccacggtagcagccacacttcctttagaaggaactgttataatttatttaaaagttgaaaaaccacc

SEQ ID NO: 59128 - DNA, 120 bp, Artificial Sequence
  ENSG00000071537_36 (sequence is synthesized)
caagatgactaccaactttcacttttttcttctgccatccaccctcatttttcctttagcaagatttttatatctaactttccttccctccattgagtacgtgctttgagaaaacatttc

SEQ ID NO: 59129 - DNA, 120 bp, Artificial Sequence
  ENSG00000071537_37 (sequence is synthesized)
ttaaaacagtgtgtgccacctaaggctggatgggaaagtgcagtcttgttgttcatataaaaacacacttcttattagtttaccacttgcctttttctattgttaatgttctgaatttcc

SEQ ID NO: 59130 - DNA, 120 bp, Artificial Sequence
  ENSG00000071537_38 (sequence is synthesized)
ttttcttggcttgtttctacttcattttaccctgggtcacttgctgccagcagtttgtgaatggtgtctttcaaataacttagttcttatggcttcacttaaagactgtctcaaaaatac

SEQ ID NO: 59131 - DNA, 120 bp, Artificial Sequence
  ENSG00000071537_39 (sequence is synthesized)
tttgctctcttcttcttttttgttcatgggacatggtacctaagcaaataggagttgggtttggtttttctcctaaaataatgctcaatacttacctaatcaaatggcatccatttgaat

SEQ ID NO: 59132 - DNA, 120 bp, Artificial Sequence
  ENSG00000071537_40 (sequence is synthesized)
aaaatgacaataactaaagctagttaatgtcagtgacattaaactaactccaggattcaggagttttaatgttagaatttagatttaacagatagagtgtggcttcatttgtccatggta

SEQ ID NO: 59133 - DNA, 120 bp, Artificial Sequence
  ENSG00000071537_41 (sequence is synthesized)
gcccatctctcctaagaccttttctagtctgtcttcctgccttcgaacttgatgacagtaaaaccctgtttagtattctcttgtgcatttggtttgttggttagccgactgtcttgaaac

SEQ ID NO: 59134 - DNA, 120 bp, Artificial Sequence
  ENSG00000071537_42 (sequence is synthesized)
tattcattttgcttctagttttattttacagaggtagcattggtgggtttttttttttttttctgtctctgtgtttgaagtttcagtttctgttttctaggtaaggcttatttttgatta

SEQ ID NO: 59135 - DNA, 120 bp, Artificial Sequence
  ENSG00000071537_43 (sequence is synthesized)
gcagtcaatggcaaagaaaaagtaaatcaaagatgacttcttttcaaaatgtattgtttagcacttaactcagatgaatttataaattattaatcttgatactaaggatttgttactttt

SEQ ID NO: 59136 - DNA, 120 bp, Artificial Sequence
  ENSG00000071537_44 (sequence is synthesized)
ttgcatattaggttaatttttaccttacatgtgagagtcttaccactaagccattctgtctctgtactgttgggaagttttggaaacccctgccagtgatctggtgatgatctgatgatt

SEQ ID NO: 59137 - DNA, 120 bp, Artificial Sequence
  ENSG00000071537_45 (sequence is synthesized)
tatttaaagagccgttgatgcctccaggaaacttaagtattttattaatatatatataggaatttttttttattttgctttgtctttctctcccttcttttatcctcatgttcattcttc

SEQ ID NO: 59138 - DNA, 120 bp, Artificial Sequence
  ENSG00000071537_46 (sequence is synthesized)
aaaccagtgttttggaagtatgcatgcaggcctataaatgaaaaacacaattctttatgtgtatagcatgtgtattaatgtctaactacatacgcaaaaacttcctttacagaggttcgg

SEQ ID NO: 59139 - DNA, 120 bp, Artificial Sequence
  ENSG00000071537_47 (sequence is synthesized)
actaacatttcacatgcacatttcaaaacaagatgtgtcatgaaaacagcccctttacctgccaagacaagcagggctatatttcagtgacagctgatatttgttttgaaagtgaatctc

SEQ ID NO: 59140 - DNA, 120 bp, Artificial Sequence
  ENSG00000071537_48 (sequence is synthesized)
tctcataatatatatatgtattacacattattatgactagaagtatgtaagaaatgatcagaacaaaagaaaatttctattttcatgcaaatatttttcatcagtcatcactctcaaata

SEQ ID NO: 59141 - DNA, 120 bp, Artificial Sequence
  ENSG00000071537_49 (sequence is synthesized)
ttaaaatataacactcctgaatgcctgaggcacgatctggattttaaatgtgtggtattcattgaaaagaagctctccacccacttggtatttcaagaaaatttaaaacgatcccaagga

SEQ ID NO: 59142 - DNA, 120 bp, Artificial Sequence
  ENSG00000071537_50 (sequence is synthesized)
aagatgatttgtatgttaaagtgactgcacaagtaaaagtccaatgttgtgtgcatgaaaaggattccttggttatgtgcagggaatcatctcacatgctgtttttcctatttggtttga

SEQ ID NO: 59143 - DNA, 120 bp, Artificial Sequence
  ENSG00000071537_51 (sequence is synthesized)
gaaacaggctgacactattctctttgattagaaaataaactcataaaactcataatgttgatataatcaagatgtaaccactataaatatgtagaagaggaagttttaaaagaccttaag

SEQ ID NO: 59144 - DNA, 120 bp, Artificial Sequence
  ENSG00000071537_52 (sequence is synthesized)
ctggcattgtgaaggaacaccatggtagactctttttgtaaatgtattttgtatttaatgaaatgcagtataaaggttggtgaagtgtaatataattgtgtaaacaaatcctgttaatag

SEQ ID NO: 59145 - DNA, 120 bp, Artificial Sequence
  ENSG00000071537_53 (sequence is synthesized)
agagatgtacagaatcgttttgtactgtatcttgaaacttgtgaaataaagattccacctctggttatcctgtatgctgtaatataccacaaccaagcacctttccagacagactttttt

SEQ ID NO: 59146 - DNA, 120 bp, Artificial Sequence
  ENSG00000071537_54 (sequence is synthesized)
taagctgaatgattcaattttttaatgttttttggaaattcagaagcttctgaaaacattcacttgtggcaatttgaatttatctttcattttaaactcctgaaattcagatttttacaa

SEQ ID NO: 59147 - DNA, 120 bp, Artificial Sequence
  ENSG00000071537_55 (sequence is synthesized)
gtccaatattgccctagggagaacatgaatttgctaagaaatgttatcttttaaatctctgatatctttgtcttgaagcagccttgatatgtagtaagcgtgattcactttagcctgatt

SEQ ID NO: 59148 - DNA, 120 bp, Artificial Sequence
  ENSG00000071537_56 (sequence is synthesized)
ataatattatttatctaaagtttgtttatgcattgccttgtcccaggaattttttaagaggacttgcagagacacgtaccacacagtaacatttagactaaatatgctctgagtaaagga

SEQ ID NO: 59149 - DNA, 120 bp, Artificial Sequence
  ENSG00000071537_57 (sequence is synthesized)
gaaatgaaaaaatattaaatcaagagtgaacatgtacacaaagtgcaattggaagtgggctacaaatttggcccccagcttcccagcaggcaactcaaagaggtaactgaggtaaaatgt

SEQ ID NO: 59150 - DNA, 120 bp, Artificial Sequence
  ENSG00000071537_58 (sequence is synthesized)
tccagctcagaagcattggatcttggataaaaagcctacatgatgcaaactgtggcaactgagatgtcagatctcaagatctcaaattgtacttgtgggagcacagtcagtgaccccaga

SEQ ID NO: 59151 - DNA, 120 bp, Artificial Sequence
  ENSG00000071537_59 (sequence is synthesized)
tgaccttgactgacctaaaagttgtgggggaagtcggatgtcagagccttaacaccagcaggtgaccatccaacctggggcaatgcctgcctgttcaccacttagcctctttctggcaag

SEQ ID NO: 59152 - DNA, 120 bp, Artificial Sequence
  ENSG00000071537_60 (sequence is synthesized)
tcattagaatgtcctccatcttcattggctgcaacttgatgagctacagcctctttcctaacttcctttatgatgctagtttaggttggttataccagcttggaagtatgcttagattaa

SEQ ID NO: 59153 - DNA, 120 bp, Artificial Sequence
  ENSG00000071537_61 (sequence is synthesized)
gttacagcagatacacaaattagatgcaagtaaaaaaaatcagaatttctgtagtagaaactacgaaaaataaaaaggaaagtttttactttttgggtatttttttacgaataagaaaaa

SEQ ID NO: 59154 - DNA, 120 bp, Artificial Sequence
  ENSG00000071537_62 (sequence is synthesized)
gtgagcgttaatcagttcaaaaggaggtactgctgtgtaatgggctttgtacgttccttctcatgtcacttacgtcactacttcgccatcaaattgaacaagcttttaattagatcctga

SEQ ID NO: 59155 - DNA, 120 bp, Artificial Sequence
  ENSG00000071537_63 (sequence is synthesized)
aaattcactatgctagtagtttattggtagtattatattttgagtagaactctgattttccctagaggccaaattctttttatctgggttaatttcttttaaacataacaatgttaatgc

SEQ ID NO: 59156 - DNA, 120 bp, Artificial Sequence
  ENSG00000071537_64 (sequence is synthesized)
tgaattgtatattaaatcccatttctaaaaaccacacaattttttctcatgtaagttgagtggaatgtggttagttaactgaatttggaatgttcatataaataatttgttgctgctcaa

SEQ ID NO: 59157 - DNA, 120 bp, Artificial Sequence
  ENSG00000071537_65 (sequence is synthesized)
ttacaaagtttgtgtactatgaattaaaattctttgttttatgtaagcatgtcaatgggaggagaaaaaagtttgatctgttttaaacatactttatttattggcagttctgcatttaac

SEQ ID NO: 59158 - DNA, 120 bp, Artificial Sequence
  ENSG00000071537_66 (sequence is synthesized)
tggtcctgcaggtatcgggtgtgttcccttctcctcagctcaggtacccgaggaccttatcaggggagggataaatgcaggcataaagcagctactgcagtttttaggtagcgtttgaca

SEQ ID NO: 59159 - DNA, 120 bp, Artificial Sequence
  ENSG00000071537_67 (sequence is synthesized)
cttcctgacgctaaagcatttttcatggaggcagatgttttctggtttagggaaaactgagactaactcatggcagtttgaaacagtatttaattcagtaaacattaaatcagatgactc

SEQ ID NO: 59160 - DNA, 120 bp, Artificial Sequence
  ENSG00000071537_68 (sequence is synthesized)
cctacctctatgggagaggagttcaagttgtaagtgttcagtctgacattctctctttaatgagcagtcagctggagaggtagggacatgttccttaattagcttccagtcagcccaggt

SEQ ID NO: 59161 - DNA, 120 bp, Artificial Sequence
  ENSG00000071537_69 (sequence is synthesized)
ctgttccattgtaagcaaagctgaacctctttctgttgtctgagtttgtctcactaccaccccatacccgacagacaccatctcaactgtcttagaacagctctgtgtctggcactttct

SEQ ID NO: 59162 - DNA, 120 bp, Artificial Sequence
  ENSG00000071537_70 (sequence is synthesized)
cccagaggtatggagttgtttcttgttcttccatctctgctctctaccccacgtcctctaaccatctctcaggacttaaacatctccttgcctgcttttttactcaatcctgacaaaatg

SEQ ID NO: 59163 - DNA, 120 bp, Artificial Sequence
  ENSG00000071537_71 (sequence is synthesized)
cataactgccttccattgaggaggaggaaagctttctgttctgccctttaccccttctagctaccacctgtcttctcccagcccttcactcagagtcaaactaagctgctgtcattcact

SEQ ID NO: 59164 - DNA, 120 bp, Artificial Sequence
  ENSG00000071537_72 (sequence is synthesized)
ggtttatagcggccacaactttttcagctttcatgatccagatttgcttgtattaagaccaaatattcagttgaacttccttcaaattcttgttaatggatataacacatggaatctaca

SEQ ID NO: 59165 - DNA, 120 bp, Artificial Sequence
  ENSG00000071537_73 (sequence is synthesized)
tgtaaatgaaagttggtggagtccacaatttttctttaaaatgattagtttggctgattgcccctaaaaagagagatctgataaatggctctttttaaattttctctgagttggaattgt

SEQ ID NO: 59166 - DNA, 120 bp, Artificial Sequence
  ENSG00000071537_74 (sequence is synthesized)
atcattttttacattagattatcataattttaaaaatttttctttagtttttcaaaattttgtaaatggtggctatagaaaaacaacatgaaatattatacaatattttgcaacaatgcc

SEQ ID NO: 59167 - DNA, 120 bp, Artificial Sequence
  ENSG00000071537_75 (sequence is synthesized)
tgccctaagaattgttaaaattcatggagttatttgtgcagaatgactccagagagctctactttctgttttttacttttcatgattggctgtcttcccatttattctggtcatttattg

SEQ ID NO: 59168 - DNA, 120 bp, Artificial Sequence
  ENSG00000071537_76 (sequence is synthesized)
ctagtgacactgtgcctgcttccagtagtctcattttccctattttgctaatttgttactttttctttgctaatttggaagattaactcatttttaataaaattatgtctaagattaaaa

SEQ ID NO: 59169 - DNA, 120 bp, Artificial Sequence
  ENSG00000071539_0 (sequence is synthesized)
agattcgaagctagggcggggcccgcgggctgaggcagcggctgtggcggcgacgctgggcgtgaggtggcggcggccgcgccctggttgggtccccactgctctcgggggcgccatgga

SEQ ID NO: 59170 - DNA, 120 bp, Artificial Sequence
  ENSG00000071539_1 (sequence is synthesized)
cgaggccgtgggcgacctgaagcaggcgcttccctgtgtggccgagtcgccaacggtccacgtggaggtgcatcagcgcggcagcagcactgcaaagaaagaagacataaacctgagtgt

SEQ ID NO: 59171 - DNA, 120 bp, Artificial Sequence
  ENSG00000071539_2 (sequence is synthesized)
tagaaagctactcaacagacataatattgtgtttggtgattacacatggactgagtttgatgaaccttttttgaccagaaatgtgcagtctgtgtctattattgacacagaattaaaggt

SEQ ID NO: 59172 - DNA, 120 bp, Artificial Sequence
  ENSG00000071539_3 (sequence is synthesized)
taaagactcacagcccatcgatttgagtgcatgcactgttgcacttcacattttccagctgaatgaagatggccccagcagtgaaaatctggaggaagagacagaaaacataattgcagc

SEQ ID NO: 59173 - DNA, 120 bp, Artificial Sequence
  ENSG00000071539_4 (sequence is synthesized)
aaatcactgggttctacctgcagctgaattccatgggctttgggacagcttggtatacgatgtggaagtcaaatcccatctcctcgattatgtgatgacaactttactgttttcagacaa

SEQ ID NO: 59174 - DNA, 120 bp, Artificial Sequence
  ENSG00000071539_5 (sequence is synthesized)
gaacgtcaacagcaacctcatcacctggaaccgggtggtgctgctccacggtcctcctggcactggaaaaacatccctgtgtaaagcgttagcccagaaattgacaattagactttcaag

SEQ ID NO: 59175 - DNA, 120 bp, Artificial Sequence
  ENSG00000071539_6 (sequence is synthesized)
caggtaccgatatggccaattaattgaaataaacagccacagcctcttttctaagtggttttcggaaagtggcaagctggtaaccaagatgtttcagaagattcaggatttgattgatga

SEQ ID NO: 59176 - DNA, 120 bp, Artificial Sequence
  ENSG00000071539_7 (sequence is synthesized)
taaagacgccctggtgttcgtgctgattgatgaggtggagagtctcacagccgcccgaaatgcctgcagggcgggcaccgagccatcagatgccatccgcgtggtcaatgctgtcttgac

SEQ ID NO: 59177 - DNA, 120 bp, Artificial Sequence
  ENSG00000071539_8 (sequence is synthesized)
ccaaattgatcagattaaaaggcattccaatgttgtgattctgaccacttctaacatcaccgagaagatcgacgtggccttcgtggacagggctgacatcaagcagtacattgggccacc

SEQ ID NO: 59178 - DNA, 120 bp, Artificial Sequence
  ENSG00000071539_9 (sequence is synthesized)
ctctgcagcagccatcttcaaaatctacctctcttgtttggaagaactgatgaagtgtcagatcatataccctcgccagcagctgctgaccctccgagagctagagatgattggcttcat

SEQ ID NO: 59179 - DNA, 120 bp, Artificial Sequence
  ENSG00000071539_10 (sequence is synthesized)
ttgaatgacatttcaaggaagagcgagggcctcagcggccgggtcctgagaaaactcccctttctggctcatgcgctgtatgtccaggcccccaccgtcaccatagaggggttcctccag

SEQ ID NO: 59180 - DNA, 120 bp, Artificial Sequence
  ENSG00000071539_11 (sequence is synthesized)
gccctgtctctggcagtggacaagcagtttgaagagagaaagaagcttgcagcttacatctgatcctgggcttccccatctggtgcttttcccatggagaacacacaaccagtaagtgag

SEQ ID NO: 59181 - DNA, 120 bp, Artificial Sequence
  ENSG00000071539_12 (sequence is synthesized)
gttgccccacacagccgtctcccagggaatcccttctgcaaaccaaacgttacttagactgcaagctagaaagccaccaaggccaggctttgttaaaagaagtgtattctatttatgttg

SEQ ID NO: 59182 - DNA, 120 bp, Artificial Sequence
  ENSG00000071539_13 (sequence is synthesized)
ttttaaaatgcatactgagagacaaacatcttgtcattttcactgtttgtaaaagataattcagattgtttgtctccttgtgaagaaccatcgaaacctgtttgttcccagcccaccccc

SEQ ID NO: 59183 - DNA, 120 bp, Artificial Sequence
  ENSG00000071539_14 (sequence is synthesized)
agtggatgggatgcataatgccagcaagttttgtttaacagcaaaaaaggaagattaatgcaggtgttatagaagccagaagagaaactgtgtcaccctaaagaagcatataatcatagc

SEQ ID NO: 59184 - DNA, 120 bp, Artificial Sequence
  ENSG00000071539_15 (sequence is synthesized)
attaaaaatgcacacattactccaggtggaaggtggcaattgctttctgatatcagctcgtttgatttagtgcaaaaatgttttcaagactatttaatggatgtaaaaaagcctatttct

SEQ ID NO: 59185 - DNA, 120 bp, Artificial Sequence
  ENSG00000071539_16 (sequence is synthesized)
acattataccaactgagaaaaaaatggtcggtaaagtgttctttcataataaataatcagacatggtcccatttgcaggaaaagtgcagactctgagtgttccagggaaacacatgctgg

SEQ ID NO: 59186 - DNA, 120 bp, Artificial Sequence
  ENSG00000071539_17 (sequence is synthesized)
acatcccttgtaacccggtatgggcgcccctgcattgctgggatgtttctgcccacggttttgtttgtgcaataacgttatcacatttctaatgaggattcacattaatataatataaaa

SEQ ID NO: 59187 - DNA, 120 bp, Artificial Sequence
  ENSG00000071539_18 (sequence is synthesized)
taaataggtcagttactggtctctttctccgaatgttatgttttgcttttatctcacagtaaaataaatataattaatggtttgcatgtgaaattcacttttgaaagaacatgttacctt

SEQ ID NO: 59188 - DNA, 120 bp, Artificial Sequence
  ENSG00000071539_19 (sequence is synthesized)
accttttgttttagaagttttcaagtattaaaatattttttagaattttcttgttttgattctaagtatctcttccaagtgcttttaattttactaaaaattactcacatgattacttaa

SEQ ID NO: 59189 - DNA, 120 bp, Artificial Sequence
  ENSG00000071539_20 (sequence is synthesized)
gattaaaaggtaaccaggacatgcagcaattttccctgagaagtgatgagaagtttgtcccaaagaaatgcgtgatacttgtgcaaccctagatcttagtgcccagctctttcaccggaa

SEQ ID NO: 59190 - DNA, 120 bp, Artificial Sequence
  ENSG00000071539_21 (sequence is synthesized)
agtgcatttggcattgagtatcgactccttttccacattggaagcagcatatcacaaatgctttttaaagaaattgtttttagtgtgttaaaaatgtaatagaaggccaggcgcggtggc

SEQ ID NO: 59191 - DNA, 120 bp, Artificial Sequence
  ENSG00000071539_22 (sequence is synthesized)
acaaccaataattcagattgtttgtctccttgtgaagaaccatcgaaacctgtttgttcccagcccacccccagtggatgggatgcataatgccagcaagttttgtttaacagcaaaaaa

SEQ ID NO: 59192 - DNA, 120 bp, Artificial Sequence
  ENSG00000071539_23 (sequence is synthesized)
aggcatgacagaaggttccctgcagttatggaggatgagtatgggtgaggtgctgtggaccccagctccagtatcactgggcaagtcttgacaggacaccaaggtcatggaggtcagcct

SEQ ID NO: 59193 - DNA, 120 bp, Artificial Sequence
  ENSG00000071539_24 (sequence is synthesized)
tgtggagcccatgctgcactcagatgagatctgtgggtccaaacagctcaggccatctgagtttgtcctgtttgatttgcttgttatataaaatcaatcaatcaaaagatagatgagtga

SEQ ID NO: 59194 - DNA, 120 bp, Artificial Sequence
  ENSG00000071553_0 (sequence is synthesized)
agtggaggctgaggctatgatggcggccatggcgacggctcgagtgcggatggggccgcggtgcgcccaggcgctctggcgcatgccgtggctgccggtgtttttgtcgttggcggcggc

SEQ ID NO: 59195 - DNA, 120 bp, Artificial Sequence
  ENSG00000071553_1 (sequence is synthesized)
ggcggcggcggcagcggcggagcagcaggtcccgctggtgctgtggtcgagtgaccgggacttgtgggctcctgcggccgacactcatgaaggccacatcaccagcgacttgcagctctc

SEQ ID NO: 59196 - DNA, 120 bp, Artificial Sequence
  ENSG00000071553_2 (sequence is synthesized)
tacctacttagatcccgccctggagctgggtcccaggaatgtgctgctgttcctgcaggacaagctgagcattgaggatttcacagcatatggcggtgtgtttggaaacaagcaggacag

SEQ ID NO: 59197 - DNA, 120 bp, Artificial Sequence
  ENSG00000071553_3 (sequence is synthesized)
cgccttttctaacctagagaatgccctggacctggccccctcctcactggtgcttcctgccgtcgactggtatgcagtcagcactctgaccacttacctgcaggagaagctcggggccag

SEQ ID NO: 59198 - DNA, 120 bp, Artificial Sequence
  ENSG00000071553_4 (sequence is synthesized)
ccccttgcatgtggacctggccaccctgcgggagctgaagctcaatgccagcctccctgctctgctgctcattcgcctgccctacacagccagctctggtctgatggcacccagggaagt

SEQ ID NO: 59199 - DNA, 120 bp, Artificial Sequence
  ENSG00000071553_5 (sequence is synthesized)
cctcacaggcaacgatgaggtcatcgggcaggtcctgagcacactcaagtccgaagatgtcccatacacagcggccctcacagcggtccgcccttccagggtggcccgtgatgtagccgt

SEQ ID NO: 59200 - DNA, 120 bp, Artificial Sequence
  ENSG00000071553_6 (sequence is synthesized)
ggtggccggagggctaggtcgccagctgctacaaaaacagccagtatcacctgtgatccatcctcctgtgagttacaatgacaccgctccccggatcctgttctgggcccaaaacttctc

SEQ ID NO: 59201 - DNA, 120 bp, Artificial Sequence
  ENSG00000071553_7 (sequence is synthesized)
tgtggcgtacaaggaccagtgggaggacctgactcccctcacctttggggtgcaggaactcaacctgactggctccttctggaatgactcctttgccaggctctcactgacctatgaacg

SEQ ID NO: 59202 - DNA, 120 bp, Artificial Sequence
  ENSG00000071553_8 (sequence is synthesized)
cagtgacattcaagttcattctggccaaccgcctctacccagtgtctgcccggcactggtttaccatggagcgcctcgaagtccacagcaatggctccgtcgcctacttcaatgcttccc

SEQ ID NO: 59203 - DNA, 120 bp, Artificial Sequence
  ENSG00000071553_9 (sequence is synthesized)
aggtcacagggcccagcatctactccttccactgcgagtatgtcagcagcctgagcaagaagggtagtctcctcgtggcccgcacgcagccctctccctggcagatgatgcttcaggact

SEQ ID NO: 59204 - DNA, 120 bp, Artificial Sequence
  ENSG00000071553_10 (sequence is synthesized)
tccagatccaggctttcaacgtaatgggggagcagttctcctacgccagcgactgtgccagcttcttctcccccggcatctggatggggctgctcacctccctgttcatgctcttcatct

SEQ ID NO: 59205 - DNA, 120 bp, Artificial Sequence
  ENSG00000071553_11 (sequence is synthesized)
tcacctatggcctgcacatgatcctcagcctcaagaccatggatcgctttgatgaccacaagggccccactatttctttgacccagattgtgtgaccctgtgccagtgggggggttgagg

SEQ ID NO: 59206 - DNA, 120 bp, Artificial Sequence
  ENSG00000071553_12 (sequence is synthesized)
gtgggacggtgtccgtgttgttgctttcccaccctgcagcgcactggactgaagagcttccctcttcctactgcagcatgaactgcaagctcccctcagcccatcttgctccctcttcag

SEQ ID NO: 59207 - DNA, 120 bp, Artificial Sequence
  ENSG00000071553_13 (sequence is synthesized)
cccgctgaggagctttcttgggctgcccccatctctcccaacaaggtgtacatattctgcgtagatgctagaccaaccagcttcccagggttcgtcgctgtgaggcgtaagggacatgaa

SEQ ID NO: 59208 - DNA, 120 bp, Artificial Sequence
  ENSG00000071553_14 (sequence is synthesized)
ttctagggtctcctttctccttatttattcttgtggctacatcatccctggctgtggatagtgcttttgtgtagcaaatgctccctccttaaggttatagggctccctgagtttgggagt

SEQ ID NO: 59209 - DNA, 120 bp, Artificial Sequence
  ENSG00000071553_15 (sequence is synthesized)
gtggaagtactacttaactgtctgtcctgcttggctgtcgttatcgttttctggtgatgttgtgctaacaataagaagtacacgggtttatttctgtggcctgagaaggaagggacctcc

SEQ ID NO: 59210 - DNA, 120 bp, Artificial Sequence
  ENSG00000071553_16 (sequence is synthesized)
acgacaggtgggctgggtgcgatcgccggctgtttggcatgttcccaccgggagtgccgggcaggagcatggggtgcttggttgtttccttcctaataaaataaacgcgggtcgccatgc

SEQ ID NO: 59211 - DNA, 120 bp, Artificial Sequence
  ENSG00000071553_17 (sequence is synthesized)
cctcaggaagctgacattcttgtgagggtggccagtaaatactaagtcggtataggatatgatgtcagtgttacggcctttagggaaggaagcaggctaaggggacagagtgactgggat

SEQ ID NO: 59212 - DNA, 120 bp, Artificial Sequence
  ENSG00000071553_18 (sequence is synthesized)
gctattttagataagggtggtcaggccaggcctcattgaggaggtgatatatgagcagcgatcttaatggagggagggagccgtttggggaaggacattcctggaacagcaaatgcgagg

SEQ ID NO: 59213 - DNA, 120 bp, Artificial Sequence
  ENSG00000071553_19 (sequence is synthesized)
gtcctgggcgaggtgtgctcttggccagctcaaggaagagctggtgtggctggagcacagtgagtgagagaaaggggtaggagatgtaggagatggtttgcaggtggctaggcgatgaag

SEQ ID NO: 59214 - DNA, 120 bp, Artificial Sequence
  ENSG00000071553_20 (sequence is synthesized)
taggaccttgtaggccatgagggggaaggtcagttgcagttcgaaatgtgtgagaaagccttgggtaacgtggagcagggagtggtgtgatttctcaattaaagaaagcccacaggaccc

SEQ ID NO: 59215 - DNA, 120 bp, Artificial Sequence
  ENSG00000071553_21 (sequence is synthesized)
accagcagttcctgggctttccgactgagaaccccggtggccaaacagcagcaaggtcctgcccacaagggaggggaggctgggcgagtgtgtataccaaacaggttagggaagctgatt

SEQ ID NO: 59216 - DNA, 120 bp, Artificial Sequence
  ENSG00000071553_22 (sequence is synthesized)
aaaatctcctcagggcctaactgggaagggccagaggaagctggggatgggagtggagggtaggagcaaaaggacaaaggacatctgtaggttgtggagaaaaagggatggggtcggggc

SEQ ID NO: 59217 - DNA, 120 bp, Artificial Sequence
  ENSG00000071553_23 (sequence is synthesized)
cactgtggtcctaagagctcaaaagacttcaatgctcgatgcttcctccagcatgttctgagatcctcacctctccccttccgccaaaagcaggtggggggagggtcccgtccagactgg

SEQ ID NO: 59218 - DNA, 120 bp, Artificial Sequence
  ENSG00000071553_24 (sequence is synthesized)
acatagccgactctccttttctctggctgggaggcctgccacaaatgctcttggctgccccaccccctccccgcagcttccctgttccctccccagttcctcttgtctgtagggtgggca

SEQ ID NO: 59219 - DNA, 120 bp, Artificial Sequence
  ENSG00000071553_25 (sequence is synthesized)
aggcggctgactcctactcctgagttaccacaagtcagctgcctgcagatctccccaccccatgactgccttccatgtcttctcaccctgccctgagagtgctggagggaagagctgagc

SEQ ID NO: 59220 - DNA, 120 bp, Artificial Sequence
  ENSG00000071553_26 (sequence is synthesized)
ggcagccaggccccctccccccatgacactgacgcccattccccaagggaagcttcagtgaccttgtcccaactgtagggaggtgtgggtcgtctcatgggaaggcctgtagtaaacgct

SEQ ID NO: 59221 - DNA, 120 bp, Artificial Sequence
  ENSG00000071553_27 (sequence is synthesized)
tcagtgggcatggcgacagcctcggaaatggcaccaacttgattggaggaagcgacggaccagaggccagctgagcattgaggatttcacagcatatggcggtgtgtttggaaacaagca

SEQ ID NO: 59222 - DNA, 120 bp, Artificial Sequence
  ENSG00000071553_28 (sequence is synthesized)
gagtgaccggtgagcgggccggggtgggatgcgctgtggcggctgaggcgccctcgcccgactccggcgctgtcctaggcgaggggtggtgaggcccggaggtggactgttccttgctcg

SEQ ID NO: 59223 - DNA, 120 bp, Artificial Sequence
  ENSG00000071553_29 (sequence is synthesized)
ggggctcgcagcgaatctgccggcgacagagctccagtccacatgcgcccccgtctgacagcacctcttctgtgccctgccagggacttgtgggctcctgcggccgacactcatgaaggc

SEQ ID NO: 59224 - DNA, 120 bp, Artificial Sequence
  ENSG00000071553_30 (sequence is synthesized)
ttgattggaggaagcgacggaccagaggccaggtacctactgagtaccaagcactttggatatctgacttagtccaatatggtgggtggggattatcgtccctgtttgtttatagatgag

SEQ ID NO: 59225 - DNA, 120 bp, Artificial Sequence
  ENSG00000071553_31 (sequence is synthesized)
aagactgaggctggaggttaagtgacttgtccaagctcatacagctaatgggtggcagagttgtaattctagctgtgatgatcataataatgataattggaaaatgctcacctgtttagt

SEQ ID NO: 59226 - DNA, 120 bp, Artificial Sequence
  ENSG00000071553_32 (sequence is synthesized)
gctttgtaggcacttgctacactgatgtcattatcttggtttcactgccaaggaaagtaaggtttgtcgagatacaatgtttcactacagttgatagataccactttggttccagcctga

SEQ ID NO: 59227 - DNA, 120 bp, Artificial Sequence
  ENSG00000071553_33 (sequence is synthesized)
gtctgccaatcctccctcccaattggagctcataacccgcatgctgttttccttcccatccaggatctttgccccaaaagcaggcgtggagaccatgagatgactctaagatagcaagtc

SEQ ID NO: 59228 - DNA, 120 bp, Artificial Sequence
  ENSG00000071553_34 (sequence is synthesized)
tctgctaggccctcccttgttggtggcctgtatggctcattgcccttgtagtctcccttggttgctgtgtgggcagatggtggtggcctgaagtcttttcaggaggtggtaaataatata

SEQ ID NO: 59229 - DNA, 120 bp, Artificial Sequence
  ENSG00000071553_35 (sequence is synthesized)
gtcaaataggaactgagtcctagttctaccatgtaaccagccattggaggcatgaaataatctttgtgaatgacagtttctacatctgtaaaatgaagacaccacctatatcagagggct

SEQ ID NO: 59230 - DNA, 69 bp, Artificial Sequence
  ENSG00000071553_36 (sequence is synthesized)
agggggaattcttataatccacataaaacatctagccaggatcccccagtcttagggcattcacccatt

SEQ ID NO: 59231 - DNA, 120 bp, Artificial Sequence
  ENSG00000071553_37 (sequence is synthesized)
atctagccaggatcccccagtcttagggcattcacccattcattcatttgcccaatatggaaagcctactatgtgccaggtattgtgaagtgttggggatatggcagtgagcagaagaac

SEQ ID NO: 59232 - DNA, 120 bp, Artificial Sequence
  ENSG00000071553_38 (sequence is synthesized)
gactcctttgccaggttcattctggccaaccgcctctacccagtgtctgcccggcactggtttaccatggagcgcctcgaagtccacagcaatggctccgtcgcctacttcaatgcttcc

SEQ ID NO: 59233 - DNA, 120 bp, Artificial Sequence
  ENSG00000071553_39 (sequence is synthesized)
agtgagactttgctggccctgagaatgcacggggaaggtggctgtcccctgccttggcccccatcacttgccaaacctcctcagatgtctcccctatttccctaatagctgagcattgag

SEQ ID NO: 59234 - DNA, 120 bp, Artificial Sequence
  ENSG00000071553_40 (sequence is synthesized)
caccaacttgattggaggaagcgacggaccagaggccagttcctcttgtctgtagggtgggcaaggcggctgactcctactcctgagttaccacaagtcagctgcctgcagatctcccca

SEQ ID NO: 59235 - DNA, 80 bp, Artificial Sequence
  ENSG00000071564_0 (sequence is synthesized)
ggaacatgtctcccgccgcaggaagatgaggcagcggcggcggctgcgggcgtagcgggccggagccgacgcggcggcgg

SEQ ID NO: 59236 - DNA, 120 bp, Artificial Sequence
  ENSG00000071564_1 (sequence is synthesized)
cccccccgcttcatgccgccgcccccccccacgcgccgcgtgcccggccgcgcccagcagggtttccaggcctgaggtgcccgccctggccccaggagaatgaaccagccgcagaggatg

SEQ ID NO: 59237 - DNA, 120 bp, Artificial Sequence
  ENSG00000071564_2 (sequence is synthesized)
ccagccgcagaggatggcgcctgtgggcacagacaaggagctcagtgacctcctggacttcagcatgatgttcccgctgcctgtcaccaacgggaagggccggcccgcctccctggccgg

SEQ ID NO: 59238 - DNA, 120 bp, Artificial Sequence
  ENSG00000071564_3 (sequence is synthesized)
ggcgcagttcggaggttcaggtcttgaggaccggcccagctcaggctcctggggcagcggcgaccagagcagctcctcctttgaccccagccggaccttcagcgagggcacccacttcac

SEQ ID NO: 59239 - DNA, 120 bp, Artificial Sequence
  ENSG00000071564_4 (sequence is synthesized)
tgagtcgcacagcagcctctcttcatccacattcctgggaccgggactcggaggcaagagcggtgagcggggcgcctatgcctccttcgggagagacgcaggcgtgggcggcctgactca

SEQ ID NO: 59240 - DNA, 120 bp, Artificial Sequence
  ENSG00000071564_5 (sequence is synthesized)
ggctggcttcctgtcaggcgagctggccctcaacagccccgggcccctgtccccttcgggcatgaaggggacctcccagtactacccctcctactccggcagctcccggcggagagcggc

SEQ ID NO: 59241 - DNA, 120 bp, Artificial Sequence
  ENSG00000071564_6 (sequence is synthesized)
agacggcagcctagacacgcagcccaagaaggtccggaaggtcccgccgggtcttccatcctcggtgtacccacccagctcaggtgaggactacggcagggatgccaccgcctacccgtc

SEQ ID NO: 59242 - DNA, 120 bp, Artificial Sequence
  ENSG00000071564_7 (sequence is synthesized)
cgccaagacccccagcagcacctatcccgcccccttctacgtggcagatggcagcctgcacccctcagccgagctctggagtcccccgggccaggcgggcttcgggcccatgctgggtgg

SEQ ID NO: 59243 - DNA, 120 bp, Artificial Sequence
  ENSG00000071564_8 (sequence is synthesized)
gggctcatccccgctgcccctcccgcccggtagcggcccggtgggcagcagtggaagcagcagcacgtttggtggcctgcaccagcacgagcgtatgggctaccagctgcatggagcaga

SEQ ID NO: 59244 - DNA, 120 bp, Artificial Sequence
  ENSG00000071564_9 (sequence is synthesized)
ggtgaacggtgggctcccatctgcatcctccttctcctcagcccccggagccacgtacggcggcgtctccagccacacgccgcctgtcagcggggccgacagcctcctgggctcccgagg

SEQ ID NO: 59245 - DNA, 120 bp, Artificial Sequence
  ENSG00000071564_10 (sequence is synthesized)
gaccacagctggcagctccggggatgccctcggcaaagcactggcctcgatctactccccggatcactcaagcaataacttctcgtccagcccttctacccccgtgggctccccccaggg

SEQ ID NO: 59246 - DNA, 120 bp, Artificial Sequence
  ENSG00000071564_11 (sequence is synthesized)
cctggcaggaacgtcacagtggcctcgagcaggagcccccggtgccttatcgcccagctacgacgggggtctccacggcctgcagagtaagatagaagaccacctggacgaggccatcca

SEQ ID NO: 59247 - DNA, 120 bp, Artificial Sequence
  ENSG00000071564_12 (sequence is synthesized)
cgtgctccgcagccacgccgtgggcacagccggcgacatgcacacgctgctgcctggccacggggcgctggcctcaggtttcaccggccccatgtcactgggcgggcggcacgcaggcct

SEQ ID NO: 59248 - DNA, 120 bp, Artificial Sequence
  ENSG00000071564_13 (sequence is synthesized)
ggttggaggcagccaccccgaggacggcctcgcaggcagcaccagcctcatgcacaaccacgcggccctccccagccagccaggcaccctccctgacctgtctcggcctcccgactccta

SEQ ID NO: 59249 - DNA, 120 bp, Artificial Sequence
  ENSG00000071564_14 (sequence is synthesized)
cagtgggctagggcgagcaggtgccacggcggccgccagcgagatcaagcgggaggagaaggaggacgaggagaacacgtcagcggctgaccactcggaggaggagaagaaggagctgaa

SEQ ID NO: 59250 - DNA, 120 bp, Artificial Sequence
  ENSG00000071564_15 (sequence is synthesized)
ggccccccgggcccggaccagcccagacgaggacgaggacgaccttctccccccagagcagaaggccgagcgggagaaggagcgccgggtggccaataacgcccgggagcggctgcgggt

SEQ ID NO: 59251 - DNA, 120 bp, Artificial Sequence
  ENSG00000071564_16 (sequence is synthesized)
ccgtgacatcaacgaggcctttaaggagctggggcgcatgtgccaactgcacctcaacagcgagaagccccagaccaaactgctcatcctgcaccaggctgtctcggtcatcctgaactt

SEQ ID NO: 59252 - DNA, 120 bp, Artificial Sequence
  ENSG00000071564_17 (sequence is synthesized)
ggagcagcaagtgcgagagcggaacctgaatcccaaagcagcctgtttgaaacggcgagaagaggaaaaggtgtcaggtgtggttggagacccccagatggtgctttcagctccccaccc

SEQ ID NO: 59253 - DNA, 120 bp, Artificial Sequence
  ENSG00000071564_18 (sequence is synthesized)
gggacgagccacccgctttcagccctgtgctctggccccagaacggccactcgagaccccgggcttcatccacatccacacctcacacacctgttgtcagcatcgagccaacaccaacct

SEQ ID NO: 59254 - DNA, 120 bp, Artificial Sequence
  ENSG00000071564_19 (sequence is synthesized)
gacaaggttcggagtgatgggggcggccaaggtgacactgggtccaggagctccctggggccctggcctaccactcactggcctcgctccccctgtccccgaatctcagccaccgtgtca

SEQ ID NO: 59255 - DNA, 120 bp, Artificial Sequence
  ENSG00000071564_20 (sequence is synthesized)
ctctgtgacctgtcccatggatcctgaaactgcatcttggccctgttgcctgggctgacaggagcattttttttttttccagtaaacaaaacctgaaagcaagcaacaaaacatacactt

SEQ ID NO: 59256 - DNA, 120 bp, Artificial Sequence
  ENSG00000071564_21 (sequence is synthesized)
tgtcagagaagaaaaaaatgccttaactataaaaagcggagaaatggaaacatatcactcaagggggatgctgtggaaacctggcttattcttctaaagccaccagcaaattgtgcctaa

SEQ ID NO: 59257 - DNA, 120 bp, Artificial Sequence
  ENSG00000071564_22 (sequence is synthesized)
gcgaaatattttttttaaggaaaataaaaacattagttacaagattttttttttcttaatgtagatgaaaattagcaaggatgctgcctttggtctctggtttttttaagctttttttgc

SEQ ID NO: 59258 - DNA, 120 bp, Artificial Sequence
  ENSG00000071564_23 (sequence is synthesized)
atatgttttgtaagcaacaaatttttttgtataaaagtcccgtgtctctcgctatttctgctgctgttcctagactgagcattgcatttcttgatcaaccagatgattaaacgttgtatt

SEQ ID NO: 59259 - DNA, 120 bp, Artificial Sequence
  ENSG00000071564_24 (sequence is synthesized)
aaaaagaccccgtgtaaacctgagcccccccgtccccccccccccccggaagccactgcacacagacagaacggggacaggcggcgggtcttttgtttttttgatgttgggggttctctt

SEQ ID NO: 59260 - DNA, 120 bp, Artificial Sequence
  ENSG00000071564_25 (sequence is synthesized)
ggttttgtcatgtggaaagtgatgcgtgggcgttccctgatgaaggcaccttggggcttccctgccgcatcctctcccctcaggaaggggactgacctgggcttgggggaagggacgtca

SEQ ID NO: 59261 - DNA, 120 bp, Artificial Sequence
  ENSG00000071564_26 (sequence is synthesized)
gcaaggtggctctgaccctcccaggtgactctgccaagcagctgtggcccccagggctaccctacacaacgccctccccaggcccccctaagctgctctcccttggaacctgcacagctc

SEQ ID NO: 59262 - DNA, 120 bp, Artificial Sequence
  ENSG00000071564_27 (sequence is synthesized)
tctgaaatggggcattttgttgggaccagtgacccctggcatggggaccacaccctggagcccggtgctggggacctcctggacaccctgtccttcactcctttgccccagggacccagg

SEQ ID NO: 59263 - DNA, 120 bp, Artificial Sequence
  ENSG00000071564_28 (sequence is synthesized)
ctcatgctctgaactctggctgagaggatgctgctcaggagccagcacaggacaccccccaccccaccccaccatgtccccattacaccagagggccatcgtgacgtagacaggatgcca

SEQ ID NO: 59264 - DNA, 120 bp, Artificial Sequence
  ENSG00000071564_29 (sequence is synthesized)
ggggcctggccagcctcccccaatgctggggagcatccctgggcctggggccacacctgctgccctccctctgtgtggtccaagggcaagagtggctggagccgggggactgtgctggtc

SEQ ID NO: 59265 - DNA, 120 bp, Artificial Sequence
  ENSG00000071564_30 (sequence is synthesized)
tgagccccacgaaggccttgggctgtgcgtccgaccctgctgcagaaccagcagggtgtcccctcgggcccatctgtgtcccatgtcccagcacccaggcctctctccaggtctcctttt

SEQ ID NO: 59266 - DNA, 120 bp, Artificial Sequence
  ENSG00000071564_31 (sequence is synthesized)
ctggtcttttgccatgagggtaaccagctcttcccagctggctggggactgtcttgggtttaaaactgcaagtctcctaccctgggatcccatccagttccacacgaactagggcagtgg

SEQ ID NO: 59267 - DNA, 120 bp, Artificial Sequence
  ENSG00000071564_32 (sequence is synthesized)
tcactgtggcacccaggtgtgggcctggctagctgggggccttcatgtgcccttcatgcccctccctgcattgaggccttgtggacccctgggctggctgtgttcatccccgctgcaggt

SEQ ID NO: 59268 - DNA, 120 bp, Artificial Sequence
  ENSG00000071564_33 (sequence is synthesized)
cgggcgtctccccccgtgccactcctgagactcccaccgttacccccaggagatcctggactgcctgactcccctccccagactggcttgggagcctgggccccatggtagatgcaaggg

SEQ ID NO: 59269 - DNA, 120 bp, Artificial Sequence
  ENSG00000071564_34 (sequence is synthesized)
aaacctcaaggccagctcaatgcctggtatctgcccccagtccaggccaggcggaggggaggggctgtccggctgcctctcccttctcggtggcttcccctacgccctgggagtttgatc

SEQ ID NO: 59270 - DNA, 120 bp, Artificial Sequence
  ENSG00000071564_35 (sequence is synthesized)
tcttaagggaacttgcctctccctcttgttttgctcctggccctgcccctaggtctgggtgggcagtggccccatagcctctggaactgtgcgttctgcatagaattcaaacgagattca

SEQ ID NO: 59271 - DNA, 120 bp, Artificial Sequence
  ENSG00000071564_36 (sequence is synthesized)
cccagcgcgaggaggaagaaacagcagttcctgggaaccacaattatggggggtggggggtgtgatctgagtgcctcaagatggttttcaaaaaaatttttttaaagaaaataattgtat

SEQ ID NO: 59272 - DNA, 120 bp, Artificial Sequence
  ENSG00000071564_37 (sequence is synthesized)
acgtgtcaacacagctggctggatgattgggactttaaaacgaccctctttcaggtggattcagagacctgtcctgtatataacagcactgtagcaataaacgtgacattttataacgat

SEQ ID NO: 59273 - DNA, 120 bp, Artificial Sequence
  ENSG00000071564_38 (sequence is synthesized)
atggccaataacgcgcgggagcgggtgcgcgtgcgggatattaacgaggccttccgggagctggggcgcatgtgccagatgcacctcaagtcggacaaagcgcagaccaagctgctcatc

SEQ ID NO: 59274 - DNA, 120 bp, Artificial Sequence
  ENSG00000071564_39 (sequence is synthesized)
ggacgcacatgtgcacaggccacacgcacaccgcacccacactgggaggccgtcggcgggccccacgctcttcccccaacctcactgtctccctctggccccctcccggcgccctcccca

SEQ ID NO: 59275 - DNA, 120 bp, Artificial Sequence
  ENSG00000071564_40 (sequence is synthesized)
ttcatccacattcctgggaccgggactcggaggtgagtgcctggcctggtgcggtccctctgctgtgcacagatgtgcagacgtgggccttggcatggtcagtgcacgcacagcgccagg

SEQ ID NO: 59276 - DNA, 120 bp, Artificial Sequence
  ENSG00000071564_41 (sequence is synthesized)
ggggaatcaccaaatttccctcggggcggggtaggatcgggctgttcctccctttcccgggggtagggggcctcagaggaagcccggggttggttggaaatgagagagttggagaaagga

SEQ ID NO: 59277 - DNA, 120 bp, Artificial Sequence
  ENSG00000071564_42 (sequence is synthesized)
gaggttctggctgccctgcgtgcagtttaaacttggcaacttgatgccctggtgttccctgggggagttagggagtttatatttgcacaccctccccccatttttcagactccctgtggt

SEQ ID NO: 59278 - DNA, 120 bp, Artificial Sequence
  ENSG00000071564_43 (sequence is synthesized)
ctctggggaggactctgcagggacctagactctggaattccagcttccctgcgcctgctcccagggctccccgtgcccccagggctctgctggaactcagaccccagggcggttgagggt

SEQ ID NO: 59279 - DNA, 120 bp, Artificial Sequence
  ENSG00000071564_44 (sequence is synthesized)
acaaagaggggatttctctgcttctgaagttgggtctccctcgacctcggaggctcctccccacccccagcctcggaggtgtctcccgggctgcccccgtccccacctggggacccctgg

SEQ ID NO: 59280 - DNA, 120 bp, Artificial Sequence
  ENSG00000071564_45 (sequence is synthesized)
ggaaagtcgagactggaggggcctggagtgcatttctttggaatggaaatttttctctgtacctttttctgggggtggaatgggtcttggcaggtggatcccccatcccccatcttagaa

SEQ ID NO: 59281 - DNA, 120 bp, Artificial Sequence
  ENSG00000071564_46 (sequence is synthesized)
gcggccgccagcgagatcaagcgggaggagaaggaggacgaggagaacacgtcagcggctgaccactcggaggaggagaagaaggagctgaaggccccccgggcccggaccagagcagaa

SEQ ID NO: 59282 - DNA, 120 bp, Artificial Sequence
  ENSG00000071575_0 (sequence is synthesized)
ggggggggcggaggctccgtggaaatgtgtcggtgacattgaatggggagaccgagcgcgagcgaggcgcgcgcgcgcacacgcgcactcacggccccgctcgctccgagatccccggcc

SEQ ID NO: 59283 - DNA, 120 bp, Artificial Sequence
  ENSG00000071575_1 (sequence is synthesized)
acgtaagtaactattaataccgcctcgccgggggatgcgggcgtgctgagcgcggggattggcctcgggcaccgtcggccgtcccctttaatttttaaatacacggtcccctcttttctc

SEQ ID NO: 59284 - DNA, 120 bp, Artificial Sequence
  ENSG00000071575_2 (sequence is synthesized)
tggggggggcaagcaagaaatcaaagaaggaggagacaagccgtcaattttctccaaaacaaaccccaccgggcaatttggtctcggggtagggggagacggggtgattgcaaattattc

SEQ ID NO: 59285 - DNA, 120 bp, Artificial Sequence
  ENSG00000071575_3 (sequence is synthesized)
caggacgagatccagttctccagcgggaaaggggcaaaggaacgccgcgcgttggaagggccagggacgcagctccccttgcagcgcccgcaggacccccgcaagctcgtgccggcgaaa

SEQ ID NO: 59286 - DNA, 120 bp, Artificial Sequence
  ENSG00000071575_4 (sequence is synthesized)
tcggagaccgccgatctgtcctcgttctctcctgcacgtctggctgcattcggaggaagacctggggcgcgagcgagcggcgacagcatgagcctgtgctgacctccgcgcggcgggccg

SEQ ID NO: 59287 - DNA, 120 bp, Artificial Sequence
  ENSG00000071575_5 (sequence is synthesized)
agcccagggctttgtcgcggtacctgcgcccagcccgcgccgcaactctgtgcccagcttttgcaatcttttgttggcagcgctgaccgcaccaagttaaatgctcccttgcaatttttc

SEQ ID NO: 59288 - DNA, 120 bp, Artificial Sequence
  ENSG00000071575_6 (sequence is synthesized)
ttttttttgtttgtttgtttaatttttggagagctcgcgatcttggaaaagcctcagacgccatctacagttaaaacgtaggtaactgccctctcccgcaccccccccttacacgccccc

SEQ ID NO: 59289 - DNA, 120 bp, Artificial Sequence
  ENSG00000071575_7 (sequence is synthesized)
caccctttccaccaaaaaaagggggtgcagcgcggattctggctgccgtgcgtcgccagccggtagacccgtgcttgtttcctttctctttttgtttggcttctaacgcgttgggactga

SEQ ID NO: 59290 - DNA, 120 bp, Artificial Sequence
  ENSG00000071575_8 (sequence is synthesized)
gtcgccgccgtgagctccccgaagactgcacaaactaccgcgggctcctccgccccgtctgcgattcggaagccggcctgggggtcgcgtcgggagccctggcgctgcagctccgcacct

SEQ ID NO: 59291 - DNA, 120 bp, Artificial Sequence
  ENSG00000071575_9 (sequence is synthesized)
tagcagcccgggtactcatccagatccacgccggggacacacacacagagtaactaaaagtgcggcgattctgcacatcgccgactgctttggggtaacaaaaagacccgagttgcctgc

SEQ ID NO: 59292 - DNA, 120 bp, Artificial Sequence
  ENSG00000071575_10 (sequence is synthesized)
cgaccgaggacccccgggagccgggctcggagcagacgaggtatccggcggcgcccatttgggggcttctaactctttctccacgcagcccctcttctgtcccctcccctctcgctccct

SEQ ID NO: 59293 - DNA, 120 bp, Artificial Sequence
  ENSG00000071575_11 (sequence is synthesized)
tttaaaatcagtggcaccgaggcgcctgcagccgcactcgccagcgactcatctctccagcgggtttttttttgtttgtcgtgtgcgatcctcacactcatgaacatacacaggtctacc

SEQ ID NO: 59294 - DNA, 120 bp, Artificial Sequence
  ENSG00000071575_12 (sequence is synthesized)
cccatcacaatagcgagatatgggagatcgcggaacaaaacccaggatttcgaagagttgtcgtctataaggtccgcggagcccagccagagtttcagcccgaacctcggctccccgagc

SEQ ID NO: 59295 - DNA, 120 bp, Artificial Sequence
  ENSG00000071575_13 (sequence is synthesized)
ccgcccgagactccgaacttgtcgcattgcgtttcttgtatcgggaaatacttattgttggaacctctggagggagaccacgtttttcgtgccgtgcatctgcacagcggagaggagctg

SEQ ID NO: 59296 - DNA, 120 bp, Artificial Sequence
  ENSG00000071575_14 (sequence is synthesized)
gtgtgcaaggtgtttgatatcagctgctaccaggaatccctggcaccgtgcttttgcctgtctgctcatagtaacatcaaccaaatcactgaaattatcctgggtgagaccaaagcctat

SEQ ID NO: 59297 - DNA, 120 bp, Artificial Sequence
  ENSG00000071575_15 (sequence is synthesized)
gtgttctttgagcgaagctatggggacatgcattccttcgtccgcacctgcaagaagctgagagaggaggaggcagccagactgttctaccagattgcctcggcagtggcccactgccat

SEQ ID NO: 59298 - DNA, 120 bp, Artificial Sequence
  ENSG00000071575_16 (sequence is synthesized)
gacggggggctggtgctgcgggacctcaagctgcggaaattcatctttaaggacgaagagaggactcgggtcaagctggaaagcctggaagacgcctacattctgcggggagatgatgat

SEQ ID NO: 59299 - DNA, 120 bp, Artificial Sequence
  ENSG00000071575_17 (sequence is synthesized)
tccctctccgacaagcatggctgcccggcttacgtaagcccagagatcttgaacaccagtggcagctactcgggcaaagcagccgacgtgtggagcctgggggtgatgctgtacaccatg

SEQ ID NO: 59300 - DNA, 120 bp, Artificial Sequence
  ENSG00000071575_18 (sequence is synthesized)
caacattccagagactctgtcgcccaaggccaagtgcctcatccgaagcattctgcgtcgggagccctcagagcggctgacctcgcaggaaattctggaccatccttggttttctacaga

SEQ ID NO: 59301 - DNA, 120 bp, Artificial Sequence
  ENSG00000071575_19 (sequence is synthesized)
ttttagcgtctcgaattcagcatatggtgctaaggaagtgtctgaccagctggtgccggacgtcaacatggaagagaacttggaccctttctttaactgagctcatgccccacggagact

SEQ ID NO: 59302 - DNA, 120 bp, Artificial Sequence
  ENSG00000071575_20 (sequence is synthesized)
tagcaggttccaggagtgagcgagggcagcggaaaggagttcttccgggggacacgaattgcctggctgagtagcaagaaagacacactcttaagtttcttggttcagagcaggaaaacc

SEQ ID NO: 59303 - DNA, 120 bp, Artificial Sequence
  ENSG00000071575_21 (sequence is synthesized)
ttcaaggagctgactgaccacgtagcatgggggcaagaggcgtgggatggggattggggtgagatggatgggagcccgctggagcttgtcttccctaacatagcctgggagaccacccct

SEQ ID NO: 59304 - DNA, 120 bp, Artificial Sequence
  ENSG00000071575_22 (sequence is synthesized)
tgccacttgggccacttccgcctaccccacttttcattttgttccaaaatagttgcagatcctgacagaatcaaaactctctgcctcaaacacacatcctggcatcgcactgttagcatt

SEQ ID NO: 59305 - DNA, 120 bp, Artificial Sequence
  ENSG00000071575_23 (sequence is synthesized)
taacttcttgttaggattcagggaaggaacagttggccaagaattttttttcttttaaacaagccaaccacctagctggtaattaatgaggttcacttaaaaaaaaaattcggtgcacac

SEQ ID NO: 59306 - DNA, 120 bp, Artificial Sequence
  ENSG00000071575_24 (sequence is synthesized)
agactgacatgaaacctgggtgctacagtaaaagaaaacaaaagtccagtttgtgtctcttaatcgctcacttcaactcatttcttctaaataaactatttaatatcctggtcaggaaat

SEQ ID NO: 59307 - DNA, 120 bp, Artificial Sequence
  ENSG00000071575_25 (sequence is synthesized)
gacatgttaatgctttgctccctgaagggggaaaaaatctgtcctttaacaagctattctgttttgtgtcaattggttcgtggcaggaagctattagaagtcaaacgtccagatgcatta

SEQ ID NO: 59308 - DNA, 120 bp, Artificial Sequence
  ENSG00000071575_26 (sequence is synthesized)
ctgctatcttagtttaaagggggaaagaaaagggaagaagaaaggaaaagagaaatccaactcctttttcatgttttgcttttgaacaatgagggtttgtgtgacaggcattcctctttg

SEQ ID NO: 59309 - DNA, 120 bp, Artificial Sequence
  ENSG00000071575_27 (sequence is synthesized)
ctgagatgatagcaatggcctgagattttagcaagctcctggagtctgatgcttttgcagtactctgatcgcaactaaacatttgtctttgttttattagaaactagtgaaacaaagcag

SEQ ID NO: 59310 - DNA, 120 bp, Artificial Sequence
  ENSG00000071575_28 (sequence is synthesized)
gttgtcccacatgtataaaatacagggcagctatttagttttctttacagagaatgatccttttaaggcttgtaaggccctctggtttggacaaaaaccctcagtagagacaagcgggaa

SEQ ID NO: 59311 - DNA, 120 bp, Artificial Sequence
  ENSG00000071575_29 (sequence is synthesized)
ggataattagctgaaagctatgatgatataaataaaaacagctctctatcccaatacgcacctttgtattttcaagaactcttctatttattaaggaaaatgtcacattgtgatgtatta

SEQ ID NO: 59312 - DNA, 120 bp, Artificial Sequence
  ENSG00000071575_30 (sequence is synthesized)
agccagtacttcaattacgggttgacttgggatgacatattacatgctgtagttaacatttataattctttttccttgtttgagtatttctgtctctgaaataaccttttacttggcttt

SEQ ID NO: 59313 - DNA, 120 bp, Artificial Sequence
  ENSG00000071575_31 (sequence is synthesized)
tctagatagctttatttgatttcgagtggcaaaatgttttttattacggcttttctattgctgtatgatacagaactcttttggcataaatatttgtgttcccagtacctcacttgttcg

SEQ ID NO: 59314 - DNA, 120 bp, Artificial Sequence
  ENSG00000071575_32 (sequence is synthesized)
gatttgactgcctgtatatgttttgtgaaatggtcctgtttttgggtaggtgacacgtggactctagtatgtaaatgttacttgaatctgtgcttcataatagtgtgtggcatgtatgtg

SEQ ID NO: 59315 - DNA, 120 bp, Artificial Sequence
  ENSG00000071575_33 (sequence is synthesized)
cagactcttggatgctttatgcctgcgcagcaggagccctgtcctcacgttcccaggagggcggcttcacccttcgtaaccaggagacaaggcggccatggatttgcccttgattctatt

SEQ ID NO: 59316 - DNA, 120 bp, Artificial Sequence
  ENSG00000071575_34 (sequence is synthesized)
ttgctaatggaagatagaaaggagagaaggttttttttttttttaacattctgaagatggtgctgtgtcaagaaggaccttttttttcccctctcccctattttttaagtaccttggagg

SEQ ID NO: 59317 - DNA, 120 bp, Artificial Sequence
  ENSG00000071575_35 (sequence is synthesized)
aggagaggttggtgacatgcatggtggggatctatggcctctggtgctttgtcctgtatttggtttaatgtttttgtcctaatctcttcaatcaataaaattgtgcgtatttaactaaaa

SEQ ID NO: 59318 - DNA, 120 bp, Artificial Sequence
  ENSG00000071575_36 (sequence is synthesized)
gggacctcaagctgcggaaattcatctttaaggacgaagagagatgcctctgcccctggagcctggagatgtttcccctggttttgccttcgataccctctgtgatcttggattggtcct

SEQ ID NO: 59319 - DNA, 120 bp, Artificial Sequence
  ENSG00000071575_37 (sequence is synthesized)
tcgtctgtttccaccctccccctaccagcctcatatttctccttctgttaccttctgtatgctgtattggctctaaggtcttttcaattaataataaattggtgtatgtgcttctttgaa

SEQ ID NO: 59320 - DNA, 80 bp, Artificial Sequence
  ENSG00000071626_0 (sequence is synthesized)
gccgccgccgttgcgcagatccgggccgcggctgtggggagggcgacggagcgggtgaccttccggaggcgggagcgagc

SEQ ID NO: 59321 - DNA, 120 bp, Artificial Sequence
  ENSG00000071626_1 (sequence is synthesized)
gaggaggcccgggagcgccgagcgtcgccgccgccgccgccatgaacaactcgggcgccgacgagatcgggaagctcttcgtgggcggtcttgactggagcacgacccaagagactctgc

SEQ ID NO: 59322 - DNA, 120 bp, Artificial Sequence
  ENSG00000071626_2 (sequence is synthesized)
gcagctacttttcccaatatggagaagtcgtagattgtgttatcatgaaagataaaaccaccaaccagtctcgaggctttgggtttgtcaaatttaaagacccaaactgtgtggggacgg

SEQ ID NO: 59323 - DNA, 120 bp, Artificial Sequence
  ENSG00000071626_3 (sequence is synthesized)
tgctggccagcagaccgcacacgctagatggccgaaacatcgaccccaagccatgcacaccccgggggatgcagccggagagaacacggccgaaggaaggatggcagaaaggacccagga

SEQ ID NO: 59324 - DNA, 120 bp, Artificial Sequence
  ENSG00000071626_4 (sequence is synthesized)
gcgataacagtaaatcaaataagatatttgtcggtggaattcctcacaattgtggtgagacagagctcagggaatacttcaagaagttcggagtggtcacggaggtagtcatgatctatg

SEQ ID NO: 59325 - DNA, 120 bp, Artificial Sequence
  ENSG00000071626_5 (sequence is synthesized)
acgccgagaagcagaggccccgaggttttggatttattactttcgaggacgaacaatcagtggaccaggctgtcaacatgcattttcacgacatcatgggcaaaaaagtggaagttaaac

SEQ ID NO: 59326 - DNA, 120 bp, Artificial Sequence
  ENSG00000071626_6 (sequence is synthesized)
gagctgagcctcgggacagcaagagccaagcgccgggacagccaggtgccagccagtgggggagccgggttgtgcccaacgctgccaatggctgggcaggccagcccccgcccacgtggc

SEQ ID NO: 59327 - DNA, 120 bp, Artificial Sequence
  ENSG00000071626_7 (sequence is synthesized)
agcaaggatatggcccgcaaggaatgtgggtgccggcaggacaggcgattggtggctatggaccgccccctgcaggaagaggagcccccccgccacccccaccgttcacctcctacatcg

SEQ ID NO: 59328 - DNA, 120 bp, Artificial Sequence
  ENSG00000071626_8 (sequence is synthesized)
tgtccacccctcctggaggctttccccctccccagggcttccctcagggctacggtgccccgccacagttcagttttggctacgggcctccacctccaccgccagatcagtttgcccctc

SEQ ID NO: 59329 - DNA, 120 bp, Artificial Sequence
  ENSG00000071626_9 (sequence is synthesized)
cgggggttcctcctccaccagccactcccggggcagcacctctggctttcccaccgcctccgtctcaggctgccccggacatgagcaagcccccgacagctcagccagacttcccctatg

SEQ ID NO: 59330 - DNA, 120 bp, Artificial Sequence
  ENSG00000071626_10 (sequence is synthesized)
gtcagtatgcaggttacgggcaggacttgagtggcttcggacagggcttctcagaccccagccagcagcctccttcctacgggggtccctccgtgccagggtcggggggcccccccgccg

SEQ ID NO: 59331 - DNA, 120 bp, Artificial Sequence
  ENSG00000071626_11 (sequence is synthesized)
gcggcagcggctttggacgagggcagaaccacaacgtgcaagggttccacccctaccgacgctagcccgcggcgccgcgacgtctgcacggcccagacccaggattccaaacttgtgaac

SEQ ID NO: 59332 - DNA, 120 bp, Artificial Sequence
  ENSG00000071626_12 (sequence is synthesized)
tcgtgacaatcacaaacttggcggcaaagtggcgactcaaccttgggggggggggcggggggagggcgcgaggcttttggagcggctgtgggtgtcgtctggactgaggtttttaaatat

SEQ ID NO: 59333 - DNA, 120 bp, Artificial Sequence
  ENSG00000071626_13 (sequence is synthesized)
ttctttctctaacccatcagcacaataaaaaaaagtcactggttcaacaacagggtttaaaaaaaatgtcttcagctttaattcaaaacttcaggtttctttttcttccttttttttgga

SEQ ID NO: 59334 - DNA, 120 bp, Artificial Sequence
  ENSG00000071626_14 (sequence is synthesized)
aattattttcctgagccttttgttttacggtatattgtaaacttttatgttaaagaaaaaatatacatttacaaattgtgagatttttaagagaaattttctacgatgtatactggctta

SEQ ID NO: 59335 - DNA, 120 bp, Artificial Sequence
  ENSG00000071626_15 (sequence is synthesized)
ttttttaatttaaaacggggtttccgtcggcactggtggagggggtgcgctgttagtcccctcgctcctggctttgggggttgggacttggtggtccagaaactctgggagcttctagaa

SEQ ID NO: 59336 - DNA, 120 bp, Artificial Sequence
  ENSG00000071626_16 (sequence is synthesized)
gaaatctactgagtgtatttctgttttttgtttaattccttgcttttgtcgactgacctgcttggtagtgtctgaggtgaactgtgggggttgcgcacagccagccgcgtggatcccacg

SEQ ID NO: 59337 - DNA, 120 bp, Artificial Sequence
  ENSG00000071626_17 (sequence is synthesized)
cagcgctgaaccgaaccgagtaggaagcctttctccccaggcacgtggcttcagggcgtttcccattgaccagtttgaccctggtttgaataaagagaagtgcgtttggattagaaacca

SEQ ID NO: 59338 - DNA, 120 bp, Artificial Sequence
  ENSG00000071626_18 (sequence is synthesized)
cgccatgggtctgcggtgtcccttacccactgggggggctcggcagcctgaggagctccctcttcctgatgcagagccctcactgctcactgccatggaggaggcaggagatcccgccgg

SEQ ID NO: 59339 - DNA, 120 bp, Artificial Sequence
  ENSG00000071626_19 (sequence is synthesized)
accccgcttggagggctgggcctggagcatgcatgggtgcggggtcaacgcctcaggagacttggagcttgggagccccctgttctgggacacttgtggccgtccagctgctgccctggg

SEQ ID NO: 59340 - DNA, 120 bp, Artificial Sequence
  ENSG00000071626_20 (sequence is synthesized)
aatgtgatcagcaagggacctttgagagccgaggttccgcttaaaatggaaagcacagtggaaacatcatgaaggactggttgtttgaattgggtcacttactgtggaactccggcacca

SEQ ID NO: 59341 - DNA, 120 bp, Artificial Sequence
  ENSG00000071626_21 (sequence is synthesized)
gccacatgctctcggtagtactcagccaccatgcagtcaagtgacctctggttgtgtcatcttcatactgtgttacccccggaggtgagagggacaggaggccacccccccaacccccag

SEQ ID NO: 59342 - DNA, 120 bp, Artificial Sequence
  ENSG00000071626_22 (sequence is synthesized)
gccagcccttggaaggcatgtgtcagaaaggggtccctaaatccttgttttacctggacccttggaggttcttgagaagtggactctgaaataaataactggtagaaattctacagtgtg

SEQ ID NO: 59343 - DNA, 120 bp, Artificial Sequence
  ENSG00000071626_23 (sequence is synthesized)
gaatttcttgcagttagcaaaagcttaggggtccaggtttttgcaggattcctgtcttggtcctttcaaaccaaggagctctgctggctctgccaggccgcctcacatgcccagtgggat

SEQ ID NO: 59344 - DNA, 120 bp, Artificial Sequence
  ENSG00000071626_24 (sequence is synthesized)
tctgacccggcctccttggtgcggcagcttctcccgttaacggaagaagacgcttagcccctctgacagggccatggttgttttttcaattaaaatgtcctggagggagcatcgtgctca

SEQ ID NO: 59345 - DNA, 120 bp, Artificial Sequence
  ENSG00000071626_25 (sequence is synthesized)
ttatctcctgcccctgccctctaccccagccagaggtcttgatagcagaacttttttaaaaacagtagcatgtgtagttatttttgtatacacgtggcttagattgggttgcagacttca

SEQ ID NO: 59346 - DNA, 120 bp, Artificial Sequence
  ENSG00000071626_26 (sequence is synthesized)
ttaattccatttgaacccaactaaaacaggagacacaatccttgttctgacatcgagtgcagcttgtggtttaaaatgagcctgccggctgcatgggtgcgcgacagtacaagcagggct

SEQ ID NO: 59347 - DNA, 120 bp, Artificial Sequence
  ENSG00000071626_27 (sequence is synthesized)
tcaaggagtctgcgcccagtgttttaagggactacgacactgacaatttggggaaagcgtggtcttgatatacggggcagaaagagctctgtacagtgcacacacctgctgccgtccctg

SEQ ID NO: 59348 - DNA, 120 bp, Artificial Sequence
  ENSG00000071626_28 (sequence is synthesized)
ggcagcccctgggtccccccagccatgactgttctgcgcgagctcctgagctgggcgacctcagtgtgggtctcgccttccaagccagacagtcgttggagtccagcttgcccggcgccg

SEQ ID NO: 59349 - DNA, 120 bp, Artificial Sequence
  ENSG00000071626_29 (sequence is synthesized)
gccttcactggttggctggagcggcacttggcgtcgccgccggcccctcatgggggttttccgtttgtggagtgtttggtaccgcgtggtagttaaccctccatgccaggcgactgcatt

SEQ ID NO: 59350 - DNA, 120 bp, Artificial Sequence
  ENSG00000071626_30 (sequence is synthesized)
gctgcattcaggtaggaaagggtgaaagaatttttttttgtttttgtttttttaaagtacaaggaccgctctgctttgtaagcaggaaccgcagtcccctgaggagggtgtgtgaagact

SEQ ID NO: 59351 - DNA, 120 bp, Artificial Sequence
  ENSG00000071626_31 (sequence is synthesized)
cgctcatttgagttctttgaaatgggtcccttggtcctgctgtcacattgccttgagctaacggatcctgttcccatcataggccggtccttggggcattgggcaggtgggggctttgtg

SEQ ID NO: 59352 - DNA, 120 bp, Artificial Sequence
  ENSG00000071626_32 (sequence is synthesized)
cctctgtggctgctgctgtctgttctctaacaggcagaactgagggattctgaactcaggatgtgcagctctccagactgagaccccaaggctgactccaggtggatccattgtctcttt

SEQ ID NO: 59353 - DNA, 120 bp, Artificial Sequence
  ENSG00000071626_33 (sequence is synthesized)
attctcattacgatttatcagaaaagtgagacaaattcaggattctcaaatgctgaggcagccccggaattggggggatctttctgttgttagtccacccatattttcaagcaggcatta

SEQ ID NO: 59354 - DNA, 120 bp, Artificial Sequence
  ENSG00000071626_34 (sequence is synthesized)
aaggaaggtcagccactgcgcctagaataagtaggtcaggcctgctccatccattgtccccggccccgcaccctcctcctgagaagactgtggctcctgacacgtctagagaggaagggc

SEQ ID NO: 59355 - DNA, 120 bp, Artificial Sequence
  ENSG00000071626_35 (sequence is synthesized)
cccgggctgctgagcgaacacagtatgaagattgcttactgatccaaatgtccattttattgcatgtttgttactttttttgttagatgtaatgtaagattctcttatcacatccattcc

SEQ ID NO: 59356 - DNA, 120 bp, Artificial Sequence
  ENSG00000071626_36 (sequence is synthesized)
aacaccagccgtgtttctcaggtatgagttaaaagcacaggtgggcgggctccaagcagtccagagggcgatgaggatgccgattgctgggaagatcctggtccctttttgtccccatgt

SEQ ID NO: 59357 - DNA, 120 bp, Artificial Sequence
  ENSG00000071626_37 (sequence is synthesized)
tttcaagaggaaggaggacgctgccattttacttgagtgaaagacccttcgtcacgcacgaaacccccgagggctctgggctcggtcctgctgccccgcagtgggcgggctctgtgtgtc

SEQ ID NO: 59358 - DNA, 120 bp, Artificial Sequence
  ENSG00000071626_38 (sequence is synthesized)
ttacggttgcatctgttgtacctgagaaacattttttaaacaaaaaaattcaacacaaaagaattttttaagaaaaaaatgctactggcctaaataaggtttatagttaagtatttagtc

SEQ ID NO: 59359 - DNA, 120 bp, Artificial Sequence
  ENSG00000071626_39 (sequence is synthesized)
ttaagttgtaagatgctaagtgtagtcataagttacccgagggtgtgtctaaagggaagggggtgctgggacccgcagcctcgccctaaaccagagctcggtttgtttaggtggaagtta

SEQ ID NO: 59360 - DNA, 120 bp, Artificial Sequence
  ENSG00000071626_40 (sequence is synthesized)
aaatttaaatcagtcgttcttagggaaaaaagaaggaacagggacaagctcctggcggttggctgtggcagacacttcaccaggggctgactcgcgggggctgagtgtacaggccccagg

SEQ ID NO: 59361 - DNA, 120 bp, Artificial Sequence
  ENSG00000071626_41 (sequence is synthesized)
tggtggttgatgagaggtgatgagtgtgccagccaccttgcaggggtctttcctggcgagctggcaggagcagggaggagcacgttgctcctgctgctggtggggcagtaacgtgttcaa

SEQ ID NO: 59362 - DNA, 120 bp, Artificial Sequence
  ENSG00000071626_42 (sequence is synthesized)
cctgacagcgacgtttttgctgaaagccgaagccaagggtggtgtggttggccgtcagggatacagggccccgcgtgggaatggtgctttcagtgaggctggcaggattcttgcggctca

SEQ ID NO: 59363 - DNA, 120 bp, Artificial Sequence
  ENSG00000071626_43 (sequence is synthesized)
ggtgggagctttggcctgcacggtgttttgctctctggagaccaagggtgatgatggtgctggcactgagtcacagctgagattcagctcagggacttcatttctgaatgcgtgtcctct

SEQ ID NO: 59364 - DNA, 120 bp, Artificial Sequence
  ENSG00000071626_44 (sequence is synthesized)
ttcccagggaaagcaggcaggatgggagagtcgccgatagaaccacctcttccctgcctcctgggcttgggggaagcttgaatgacatctaaggccccgtgcctgggtaagccttgtggt

SEQ ID NO: 59365 - DNA, 120 bp, Artificial Sequence
  ENSG00000071626_45 (sequence is synthesized)
gtctcagacatgcccagtgggtgccatggctgactcaaggtggcacagtccccattgggagttggcacagtccccattgggagttggcacagccaaggccctggggccacctggagcggc

SEQ ID NO: 59366 - DNA, 120 bp, Artificial Sequence
  ENSG00000071626_46 (sequence is synthesized)
agtgaggtggaaaggtgagtgggcccttgggcgtcgctgcagggtcgatggcggacgccttgggagagctccagctcttctgcccggaggagacagccccaggacgggggtggcgcgggt

SEQ ID NO: 59367 - DNA, 120 bp, Artificial Sequence
  ENSG00000071626_47 (sequence is synthesized)
ctttggtgggggcaggcaggaagtgccagtgctgagactgaatttcaggcccttctcatctgccaataagagacagccccagaatgggggtggcgcgggtttgtcgggggtaagtaagtg

SEQ ID NO: 59368 - DNA, 120 bp, Artificial Sequence
  ENSG00000071626_48 (sequence is synthesized)
gggccagtgctgagactggagcttcagggccttcaccttcatctgtgggcctctcgttagttcgtgagtgcaggctcattgggaggcttctgtctgtgtccccccacccccgccccaggc

SEQ ID NO: 59369 - DNA, 120 bp, Artificial Sequence
  ENSG00000071626_49 (sequence is synthesized)
tgtaattcagaggccgtgtggcataggcttctagtttactgtgcatcatttcagatgtagacttctacattctttttcctgattataaaatactcgcaaaagctgtaggaaagcgagcct

SEQ ID NO: 59370 - DNA, 120 bp, Artificial Sequence
  ENSG00000071626_50 (sequence is synthesized)
gtgtcccacttggcagcagtgcaggtgagcgtggtgccgtcaccactggcctgtcccaggaactcatcgcccgccacgcatgaggtcagcgtgcggctctgtggcacggtcctctcccca

SEQ ID NO: 59371 - DNA, 120 bp, Artificial Sequence
  ENSG00000071626_51 (sequence is synthesized)
tggcaaggattgggatcatctttcatgtctgcagacagcatgggcgaggctgactcgccattgctgtgagctttgtatgccgtcacgtgcacaaggacgtttgcgtcagctgcttctgtg

SEQ ID NO: 59372 - DNA, 120 bp, Artificial Sequence
  ENSG00000071626_52 (sequence is synthesized)
gtttgaattaagacctcagcttggcttggatgggggcatttctaaggcgagcgctgtcttgatcctgaatgttttctcattgaatcgcaggaagctcttcgtgggcggtcttgactggag

SEQ ID NO: 59373 - DNA, 120 bp, Artificial Sequence
  ENSG00000071626_53 (sequence is synthesized)
ctaagcctgttgctgttgcgtgatcagcatggttttccctgaaatttgccttttcagatctcgtctctaagggtcaggaagcacagggcggctggcacaccccgcctctaattcttcccg

SEQ ID NO: 59374 - DNA, 120 bp, Artificial Sequence
  ENSG00000071626_54 (sequence is synthesized)
cctcagccctccccaccgaagaacggggctggggggttgcttgttgacgttttgaagacggcagtgggtgcctttcctgtggaagctcttcgtgggcggtcttgactggagcacgaccca

SEQ ID NO: 59375 - DNA, 120 bp, Artificial Sequence
  ENSG00000071626_55 (sequence is synthesized)
ggcctgcctgatatccagcaacagagggcaagggcggcagcacctccagcatgacagtcccttccaagcacgtcaggatgctcccttgcctgtgctggcagcttcctaaacatggggact

SEQ ID NO: 59376 - DNA, 120 bp, Artificial Sequence
  ENSG00000071626_56 (sequence is synthesized)
gggcatggtggcaggtttttgtccttctgaaagagcaattttgctgtgaggttacttgctccttgagttcttgtctgaggcccacctggcggctgctccgtgaggaacgaggtggccctg

SEQ ID NO: 59377 - DNA, 120 bp, Artificial Sequence
  ENSG00000071626_57 (sequence is synthesized)
ctgcagctcagcatcccgccacgctcccaggagtgtgtgtttcctggggggagcggcccgggaccgtggctctgtggtccattctgtggatgtccacaaggcctgggcgttctgtgggtt

SEQ ID NO: 59378 - DNA, 120 bp, Artificial Sequence
  ENSG00000071626_58 (sequence is synthesized)
tgggtggcagtcccgtctgggcagctcctgctgggctgggtgtgggtctcctgctggtctgcccccagctgcacaacgtgtcttgtgccttgccctcttgtacctctgcaggttttggct

SEQ ID NO: 59379 - DNA, 120 bp, Artificial Sequence
  ENSG00000071626_59 (sequence is synthesized)
cctcccctgctggacgctccccagcctttacctggtgggaaaggggagagggaggagaggggggtgtgggggttgttggagagatctcgtggcaactcgggtccagcagaagggagcgtg

SEQ ID NO: 59380 - DNA, 120 bp, Artificial Sequence
  ENSG00000071626_60 (sequence is synthesized)
ggagtcttgtcgcagcagagcactcgtcatacagcaggtgctgcagggcctgcatgtgtgggaacctgagtggcgactgggtcgagggaagtgagtcgcaggcagctgtgatcactgtct

SEQ ID NO: 59381 - DNA, 120 bp, Artificial Sequence
  ENSG00000071626_61 (sequence is synthesized)
agaggttcaggccctcggtgtgggtcccgggtgcactggccccttggtgggttccagtttctggcgtcatcagcctcctgctgggtccagaccccgcttggggcagaagctgggtctgta

SEQ ID NO: 59382 - DNA, 120 bp, Artificial Sequence
  ENSG00000071626_62 (sequence is synthesized)
gtaggcgtggcctggacgtgggcttcaccctggactggatggctgtcgtggcttgggtctgcctggacgtgatctgcaggcagcgcatgtgcttccggggcaggagcttgtgggggggcg

SEQ ID NO: 59383 - DNA, 120 bp, Artificial Sequence
  ENSG00000071626_63 (sequence is synthesized)
gggtcagcatgggtcaaggtctgcatgtcagtagttctcgccctgcactgagccaggagtcacagcagccttgctcaggaccaacgcggtggcctcagtgggcagggctccaactacggt

SEQ ID NO: 59384 - DNA, 120 bp, Artificial Sequence
  ENSG00000071626_64 (sequence is synthesized)
cagctcctccagcaccaggggtcattcacaagcagggtttgagaacatggggcacctgtctgcaggtggccacgggcttccggggtgcctgtgaacacgcttcctctaggcctggtggag

SEQ ID NO: 59385 - DNA, 120 bp, Artificial Sequence
  ENSG00000071626_65 (sequence is synthesized)
gccggggtgtgggagctgtgttcggccgaggtgcccgcccacccacctcgcatggctgtggttcccctgcccccacgcccaggccttgggccgaggttgccgcatgtgtgggttcttgac

SEQ ID NO: 59386 - DNA, 120 bp, Artificial Sequence
  ENSG00000071626_66 (sequence is synthesized)
ccactcaccaccaaaccctggcgtgtctgagactggcaggggggtgtgaggcgcccggttggggcgtggcgtgtgtcagccgctgctcttggtggcggctgcttgggttggtcaccctgg

SEQ ID NO: 59387 - DNA, 120 bp, Artificial Sequence
  ENSG00000071626_67 (sequence is synthesized)
tctcgtctcttgccaggcctgggttcctattctccagccccgccgggctgcggcccacactttgtttacagtcttatggtcaggctgagcagtgatgtggcctaggtaggtgccgcctcc

SEQ ID NO: 59388 - DNA, 120 bp, Artificial Sequence
  ENSG00000071626_68 (sequence is synthesized)
tggcttcctctgccgtcccgggcgggggtggacgctggcggtgccctctgggaaggggcccttgccggtgccaagacattggccacaagccttcagcgggcccaggatcccccagagaga

SEQ ID NO: 59389 - DNA, 120 bp, Artificial Sequence
  ENSG00000071626_69 (sequence is synthesized)
gcccacgcccacctgtgcccacgtgcacccgaatgggaacccagaggtcgtgggaggggcttcctgcaaggtgtgcagcggggtggggagcggcgtgagcagctctgtccttgtaaagac

SEQ ID NO: 59390 - DNA, 120 bp, Artificial Sequence
  ENSG00000071626_70 (sequence is synthesized)
accgctgtccatgctcctgaggtcggctgtgtgggccggacgggctgcagggtgtgctggcccctcagccagtggtgtcactggggcagtcaggttgggcccagaaacccttccctgaca

SEQ ID NO: 59391 - DNA, 120 bp, Artificial Sequence
  ENSG00000071626_71 (sequence is synthesized)
cgtgccaccgatggacgtgccctgacaggaaggacaacgtggggtctggtctgcgacggaggggcaggccctgtatcgctgcaagggcccgtcaggggttttctgaaactccgagagcca

SEQ ID NO: 59392 - DNA, 120 bp, Artificial Sequence
  ENSG00000071626_72 (sequence is synthesized)
gctttctagaagcctggtccaccgtgccttgggccatgtgtgtctccaagccccgaggcttctctacctcccctcacccccccaaccacgtcttcgggattgaacagggaagcggtgagg

SEQ ID NO: 59393 - DNA, 120 bp, Artificial Sequence
  ENSG00000071626_73 (sequence is synthesized)
ttacgtgggccatggagggctctggaagccgcttttctctgtgtgtgcccctgctcacatgtttttgagggagagaacatgcccggggtcctctccccggcccaggtgctggcctcagaa

SEQ ID NO: 59394 - DNA, 120 bp, Artificial Sequence
  ENSG00000071626_74 (sequence is synthesized)
gggccccacccgcaccccgtgggacccgtggactcaaggcaggctcggcggagctgtgtccaggtggcctcgctcgacggcagtgccaaccgcccagggaccgccccgagctcacaggac

SEQ ID NO: 59395 - DNA, 80 bp, Artificial Sequence
  ENSG00000071655_0 (sequence is synthesized)
ccggaacagccgcggcaagtggcggcggcggcagcggcagcggaggcagctgaggcggcggcggcgagtgggggtccggg

SEQ ID NO: 59396 - DNA, 120 bp, Artificial Sequence
  ENSG00000071655_1 (sequence is synthesized)
cggaagaggtgggagtgcccggcgctcccgcagggctgggagagggaagaagtgcccagaaggtcggggctgtcggccggccacagggatgtcttttactatagcccgagcgggaagaag

SEQ ID NO: 59397 - DNA, 120 bp, Artificial Sequence
  ENSG00000071655_2 (sequence is synthesized)
ttccgcagcaagccgcagctggcgcgctacctgggcggctccatggacctgagcaccttcgacttccgcacgggcaagatgctgatgagcaagatgaacaagagccgccagcgcgtgcgc

SEQ ID NO: 59398 - DNA, 120 bp, Artificial Sequence
  ENSG00000071655_3 (sequence is synthesized)
tacgactcctccaaccaggtcaagggcaagcccgacctgaacacggcgctgcccgtgcgccagacggcgtccatcttcaagcagccggtgaccaagattaccaaccaccccagcaacaag

SEQ ID NO: 59399 - DNA, 120 bp, Artificial Sequence
  ENSG00000071655_4 (sequence is synthesized)
gtcaagagcgacccgcagaaggcggtggaccagccgcgccagctcttctgggagaagaagctgagcggcctgaacgccttcgacattgctgaggagctggtcaagaccatggacctcccc

SEQ ID NO: 59400 - DNA, 120 bp, Artificial Sequence
  ENSG00000071655_5 (sequence is synthesized)
aagggcctgcagggggtgggacctggctgcacggatgagacgctgctgtcggccatcgccagcgccctgcacactagcaccatgcccatcacgggacagctctcggccgccgtggagaag

SEQ ID NO: 59401 - DNA, 120 bp, Artificial Sequence
  ENSG00000071655_6 (sequence is synthesized)
aaccccggcgtatggctcaacaccacgcagcccctgtgcaaagccttcatggtgaccgacgaggacatcaggaagcaggaagagctggtgcagcaggtgcggaagcggctggaggaggcg

SEQ ID NO: 59402 - DNA, 120 bp, Artificial Sequence
  ENSG00000071655_7 (sequence is synthesized)
ctgatggccgacatgctggcgcacgtggaggagctggcccgtgacggggaggcgccgctggacaaggcctgcgctgaggacgacgacgaggaagacgaggaggaggaggaggaggagccc

SEQ ID NO: 59403 - DNA, 120 bp, Artificial Sequence
  ENSG00000071655_8 (sequence is synthesized)
gacccggacccggagatggagcacgtctagggcagaggccctgccgagagcccgtgctgcctgctggagccgcctgcagacgcggtcctcggccccacgtgaaccaggctcggcggcgaa

SEQ ID NO: 59404 - DNA, 120 bp, Artificial Sequence
  ENSG00000071655_9 (sequence is synthesized)
gcccagccttggagacacccaggaggaaggccgtgctcctggctccctcctcggcccgtccccacttcccggggcctcggggcacacagctggggctgcccccacccgaaagaccctcca

SEQ ID NO: 59405 - DNA, 120 bp, Artificial Sequence
  ENSG00000071655_10 (sequence is synthesized)
cgctcgtcctctacagagtccggcttcgggaagtgccgggtgctcctgggccctgcctggctccctacgacctttgggctcgaggccagctcctccccatgcccgctgtcccagctcctt

SEQ ID NO: 59406 - DNA, 120 bp, Artificial Sequence
  ENSG00000071655_11 (sequence is synthesized)
gagactggagagcagccagcaggtgcccggcagctcggcgccacggcttgctgacagctgggagggtttctcggtctggaggcgtagttttgaaactcacatcacccactgtgcagcgtg

SEQ ID NO: 59407 - DNA, 120 bp, Artificial Sequence
  ENSG00000071655_12 (sequence is synthesized)
aggacgggactctggtctgctgtggggggcatgcaggacggcgccactctctgccctgccatgcggctggtggtgccacagagcctcaccgtgcctgagtggcatgcccaggaggccgct

SEQ ID NO: 59408 - DNA, 120 bp, Artificial Sequence
  ENSG00000071655_13 (sequence is synthesized)
ctccttcagtaaatgtaacacagtcgaggcacgtcatcgggcagccttccctgtgtgccaacgccagccttcgcttctgaaaaccaaactccagccgctgccagtcgggacttggtcgcc

SEQ ID NO: 59409 - DNA, 120 bp, Artificial Sequence
  ENSG00000071655_14 (sequence is synthesized)
cggcgctgccagaatgctccactgccagccggcccccctgcctcggtttcccttctgtttagtggcgacacaggcacccagctttggggtggtgctgacgctcccaggggtgccaggagc

SEQ ID NO: 59410 - DNA, 120 bp, Artificial Sequence
  ENSG00000071655_15 (sequence is synthesized)
cactgggacagggtgaggctcccagacgctcctcgaggtgcccagctctccagggagcttctggcccaaggccgtctgagggatctgctccttaaccccccagtgccttggcgagggcag

SEQ ID NO: 59411 - DNA, 120 bp, Artificial Sequence
  ENSG00000071655_16 (sequence is synthesized)
gttccaagccacagacgcctgccccgagtggactctgcggccagtccctggtgccctcctggccctgctgcccagtgagggctcctacgggtgggttcattggcctgggcccagcgagcc

SEQ ID NO: 59412 - DNA, 120 bp, Artificial Sequence
  ENSG00000071655_17 (sequence is synthesized)
cccacctgcattgaccttaggcccatagagagggcctgtcccggtgctgccccagccaggatctggtcgctgccccagggggactgatgggcagagtcgcccctgtggctggactgtgac

SEQ ID NO: 59413 - DNA, 120 bp, Artificial Sequence
  ENSG00000071655_18 (sequence is synthesized)
catccctgatggggcctgaccgcgggagctgaggaagcgccgctccaccgtctgccctccaaggacccgcatggaggcagtgggctggcagcttcctgctgctccctgtcagagtcaaag

SEQ ID NO: 59414 - DNA, 120 bp, Artificial Sequence
  ENSG00000071655_19 (sequence is synthesized)
cacaaatcctcaggacgggctcaagggccagggcagccgagggaagctccaggtggggaccacgtcttcctgaggttggtgcccactggctgggaccctttgcagtggggtggcctcccc

SEQ ID NO: 59415 - DNA, 120 bp, Artificial Sequence
  ENSG00000071655_20 (sequence is synthesized)
tctgtctgcctggtggagggagccgtgggcgtggggacgtgactgaataaagccaccatgggtggatgtgcttggagcctggagttcggtgcgtccgctagactttggtgcccacgtttg

SEQ ID NO: 59416 - DNA, 120 bp, Artificial Sequence
  ENSG00000071655_21 (sequence is synthesized)
agcttctgtctttggttgggtgatgaaaggctgaaagcggtgtggggacagggccagcaggtcccccaacctcgcggacattcacaacccaagagtcaggcttaggggtattcagagaag

SEQ ID NO: 59417 - DNA, 120 bp, Artificial Sequence
  ENSG00000071655_22 (sequence is synthesized)
cccctgaggtgccgctggctcagcctagggatcgtgggtcttggccctgctgccccggtgaggaagatgggctggggctcagacccagcaccgctccttccaaaggaagggaagcaggag

SEQ ID NO: 59418 - DNA, 120 bp, Artificial Sequence
  ENSG00000071655_23 (sequence is synthesized)
gggctgcctggcagggagggccccccaggtcctcaggtcctgcacagccgctgcagggaggggagctgtgccccgggaccctggacttcagctcactagccatggccactggaagctgct

SEQ ID NO: 59419 - DNA, 120 bp, Artificial Sequence
  ENSG00000071655_24 (sequence is synthesized)
ttctggacctgaaggctgggaggccaccctcccctcatctgcccggcactcagagacactctgtttccctcttcccatctcccactgtgtccctgtctcccttggtctctctctgtctct

SEQ ID NO: 59420 - DNA, 120 bp, Artificial Sequence
  ENSG00000071655_25 (sequence is synthesized)
gtctatccctgtctctatctctccctcttgtctctctcttgcgccgtctccctctctgtccctctttgtttcttgctctctctcctgtctctctccctcggtctctgtctctgtctcttg

SEQ ID NO: 59421 - DNA, 120 bp, Artificial Sequence
  ENSG00000071655_26 (sequence is synthesized)
ctgtctctccctctctgtcgcagcccagcttcctgtcactgacagaccccgatcagtccctctgatcccggggttctggccatgtcctggccttggtctgagatgtgatgatccctaccc

SEQ ID NO: 59422 - DNA, 120 bp, Artificial Sequence
  ENSG00000071655_27 (sequence is synthesized)
ctgccacagggccctccccactggaagcccatccaggccctgggctgtcgctgttgacgaagcttgagggtcctttcctctctccctgaaaccttggggacccccacaggccaaggcaat

SEQ ID NO: 59423 - DNA, 120 bp, Artificial Sequence
  ENSG00000071655_28 (sequence is synthesized)
actggcctttgctagaggtcgtgcccggtgagaagtgagttgtaggcgtgggcacctgaggggccagcccagtgctcaggccctcgtcaaattccctgccctggaaaagtctcagaccct

SEQ ID NO: 59424 - DNA, 120 bp, Artificial Sequence
  ENSG00000071655_29 (sequence is synthesized)
caggctgaaccccctgggcgcaccgaggctccacactccagccccagaacccagacctggcatggggcggggaagcctgagctcccaatgctgggatctttcgtgggggcctcatgacca

SEQ ID NO: 59425 - DNA, 120 bp, Artificial Sequence
  ENSG00000071655_30 (sequence is synthesized)
gcctgccctgtgcggtgcctggccccatcctcaaaggccacttggctgcccccagccccgcccatgtctcagccccaagaccttctgggactttttttttttttagacaagagtttcgct

SEQ ID NO: 59426 - DNA, 82 bp, Artificial Sequence
  ENSG00000071655_31 (sequence is synthesized)
ccagcttcccaaattgccgggattacaggtgtgaaccaccatggcagcccttctggcacttgccagcagcagcaagagcctc

SEQ ID NO: 59427 - DNA, 120 bp, Artificial Sequence
  ENSG00000071655_32 (sequence is synthesized)
ggcagcccttctggcacttgccagcagcagcaagagcctcacgtgtcccccgcctcccctcagaccaagctccccaccgctgccgccacagagggtaccagggaggagaggctcaggacc

SEQ ID NO: 59428 - DNA, 120 bp, Artificial Sequence
  ENSG00000071655_33 (sequence is synthesized)
cccgtggcgaggatgcacctcccagccctcggcccagccacacggaccacagggctcccgagtctcagcaacaccagctaaggggcatcatgcctctcctgccacacccagggcccgtgc

SEQ ID NO: 59429 - DNA, 120 bp, Artificial Sequence
  ENSG00000071655_34 (sequence is synthesized)
cttgctgtccctgcagcccccagacccaggcagacagggacagcccttctgaccaccgcacacactcgccaccgcaaagatccccggggatgcccctcgcctgtgtgtgtccctcatggc

SEQ ID NO: 59430 - DNA, 120 bp, Artificial Sequence
  ENSG00000071655_35 (sequence is synthesized)
tgtcacagcaaatctccaggagcccggaggtgcccatggaaaacacccccagcttccggaacgttctttcggacagggccataccggagcaagactcagctttctggtagcgggtggctg

SEQ ID NO: 59431 - DNA, 120 bp, Artificial Sequence
  ENSG00000071655_36 (sequence is synthesized)
ggcactgcctgtgagattctgtcacactcgctccagattcaaggggtccaaaaagtgtaaacaagtcaagtgcccatccagggatgaacgaacacagcccggcccggccacaccatggag

SEQ ID NO: 59432 - DNA, 120 bp, Artificial Sequence
  ENSG00000071655_37 (sequence is synthesized)
caggactcggccatgaacaggaaccaggctctgacaccggccacggcgcagatgcccctggaggagtccaccctcagcaagagacacacagacaccgacacggcgtgcaatcccatttgt

SEQ ID NO: 59433 - DNA, 120 bp, Artificial Sequence
  ENSG00000071655_38 (sequence is synthesized)
gtgaatgtccaggacaggccgattcagagacaggaaggggacacgtgggtgccagtgactggggattatggggactgggggaaatggctaaagggcacccacaaaagttaatgataatgt

SEQ ID NO: 59434 - DNA, 74 bp, Artificial Sequence
  ENSG00000071655_39 (sequence is synthesized)
gggattacaggcatgagccaccgtgcctcaccagaattgtgtacttttttttcttcttcttcttcggacttggc

SEQ ID NO: 59435 - DNA, 120 bp, Artificial Sequence
  ENSG00000071655_40 (sequence is synthesized)
aacttggctcaccgcaacctcctcctcccgggttcaatagattctccagcctcagcctgctgagtagctgagattacgggcgcccgccaccacacccagctaatctttgtacttttagta

SEQ ID NO: 59436 - DNA, 120 bp, Artificial Sequence
  ENSG00000071655_41 (sequence is synthesized)
gagacagggtttcaccatgttggccacgggcaaaagaattttgttgagggcaaataatatgagaccacaaaactgccttccctgctcagttttaattttcacagttttaatttttagcct

SEQ ID NO: 59437 - DNA, 120 bp, Artificial Sequence
  ENSG00000071655_42 (sequence is synthesized)
tctctggttaccaaaataaccacgctcacggccgttcatttgaagatatttccagttaacgtgtgtgaagtgggttttttgagatgtaatttacaagcaataaaatgctcctgtctctgc

SEQ ID NO: 59438 - DNA, 120 bp, Artificial Sequence
  ENSG00000071655_43 (sequence is synthesized)
gcaggaggtcacagcgggcggagggcacagagcggaaggcgcaggccacagggtgcagagcgcaaggcgcatggcgaggacgcggcccgcggcgggcgttccagagccggccggaccgac

SEQ ID NO: 59439 - DNA, 80 bp, Artificial Sequence
  ENSG00000071655_44 (sequence is synthesized)
cctgcgggagcggcctccccggaccgtgggggtcctggcgggcgcgggggacacgaggggcgccggcaaagcagggggtc

SEQ ID NO: 59440 - DNA, 120 bp, Artificial Sequence
  ENSG00000071655_45 (sequence is synthesized)
ctcactgaatgtggcgtcctcaaggtgcatccacgctgtggcctgtgtcagagcctcgctccttttcatggctgagtatgtcccatcgtgtggatgggcgtttgtccgttcatccattga

SEQ ID NO: 59441 - DNA, 120 bp, Artificial Sequence
  ENSG00000071655_46 (sequence is synthesized)
aggcgtctgggctgcttccaccttctggctcctggggacatccgtgtagaagtgatggtgtggatgcgtgctcatttttcgggcagatacctaagagtggcgtggccgggtcatctggaa

SEQ ID NO: 59442 - DNA, 120 bp, Artificial Sequence
  ENSG00000071655_47 (sequence is synthesized)
actcagtgaagagctgtcaggcttttccaacatggctgttccatcttacatcccaaccatgatgacggtgtgttgggttgggtgcttgtcatcctgtagtgtgacctcatgtgacacaca

SEQ ID NO: 59443 - DNA, 82 bp, Artificial Sequence
  ENSG00000071655_48 (sequence is synthesized)
aactcactacaacctctgcctcctggtttcaactgggttcaagtgatccttccacctcagcctcacaagtagctgggatttc

SEQ ID NO: 59444 - DNA, 120 bp, Artificial Sequence
  ENSG00000071655_49 (sequence is synthesized)
ttgcgtgcgtgtgcgcccggcgcgcggaggcccagtgcgcgtgcgccgcttgttgggccgcatggctttcggccggccgttcagggactggctgccggacggcgactgcggcctttgttc

SEQ ID NO: 59445 - DNA, 120 bp, Artificial Sequence
  ENSG00000071655_50 (sequence is synthesized)
gtgcgcgctgggccaggggcgcctggcggcggccagatgctaccggggggcaggggtggagggtgggctgtccctttggttcccgtgagacgcagggggtgccttcttggggcgctcctg

SEQ ID NO: 59446 - DNA, 120 bp, Artificial Sequence
  ENSG00000071655_51 (sequence is synthesized)
gcagcctctccgtggcccatgctgaagtacagtggcgccgttactactcacagcagcctctacctcccgggctcaagtggttctctcagcacagcctcctgagtagctgggaccacaggt

SEQ ID NO: 59447 - DNA, 90 bp, Artificial Sequence
  ENSG00000071655_52 (sequence is synthesized)
tcctgagtagctgggaccacaggtatgcagcgtgacacctggctaatttttgaattattttgtagagacaggagtctcaaagctcaatca

SEQ ID NO: 59448 - DNA, 120 bp, Artificial Sequence
  ENSG00000071655_53 (sequence is synthesized)
atgctgggattacaggcgggagtcgccacgcctggcctaacttgcttttttttctgttatgaatgtagtaacacaagcgggagagggaatttagaaatggaacccaagttggggttcctt

SEQ ID NO: 59449 - DNA, 120 bp, Artificial Sequence
  ENSG00000071655_54 (sequence is synthesized)
gtctggggctggggtcgcgacctgaagctggggctgggactgggtttgggtctgcggccgaggcctgggtttggggtctggggtccgcccggggcgccgaccgtcccgcctccccgcagc

SEQ ID NO: 59450 - DNA, 120 bp, Artificial Sequence
  ENSG00000071655_55 (sequence is synthesized)
gtctagggcaggtgctgcggggccacgggggctccctggagtcgggtcctggcagtggggactgcctggtgaacacagatgtgcttgggatgacgggtgcctcccaagagcttcccatct

SEQ ID NO: 59451 - DNA, 120 bp, Artificial Sequence
  ENSG00000071655_56 (sequence is synthesized)
aaggatccgatgtggaggctggggctagggccagggtgtgaggatcggggccagtgctctgggtctggctggcgcccagatctaggggccagttgtggggtgctggggtctgggatgaag

SEQ ID NO: 59452 - DNA, 120 bp, Artificial Sequence
  ENSG00000071677_0 (sequence is synthesized)
atgaaggtgctgagggcctggctcctgtgcctgctgatgctgggcctggccctgcggggagctgcaagtcgtacccatcggcactccatggagatccgcacccctgacatcaatcctgcc

SEQ ID NO: 59453 - DNA, 120 bp, Artificial Sequence
  ENSG00000071677_1 (sequence is synthesized)
cctgtgggccgcttcggtcggaggagggcaaccctgggggacgtccccaagcctggcctgcgaccccggctgacctgcttccccctggaaggcggtgctatgtcgtcccaggatggctga

SEQ ID NO: 59454 - DNA, 120 bp, Artificial Sequence
  ENSG00000071794_0 (sequence is synthesized)
agattgttgcagaaggagacggcgtcgacgtctgactggactcgcggcgacttacctttcagtcgtgcgctcctgatccggcgctcggaatttgtccccggcttcagggctgcggggcct

SEQ ID NO: 59455 - DNA, 120 bp, Artificial Sequence
  ENSG00000071794_1 (sequence is synthesized)
ggaaggaggcgtatcgaggcggctcgaaaacgatccaggggagccgaggcgctcctcttgtcatcccactcagcgccatgtcctggatgttcaagagggatccagtttggaagtacttgc

SEQ ID NO: 59456 - DNA, 120 bp, Artificial Sequence
  ENSG00000071794_2 (sequence is synthesized)
agactgtccagtatggagttcatggaaattttccacgcctctcatatccaactttctttccacgttttgaattccaagatgttatccctccagatgactttctaactagtgatgaagaag

SEQ ID NO: 59457 - DNA, 120 bp, Artificial Sequence
  ENSG00000071794_3 (sequence is synthesized)
tagattccgttttatttggaagtttgagaggtcatgtggttggactacgctattacacgggagtagttaataataatgaaatggttgcattacaacgagatcctaataacccttatgata

SEQ ID NO: 59458 - DNA, 120 bp, Artificial Sequence
  ENSG00000071794_4 (sequence is synthesized)
agaatgcaattaaagtaaacaatgtgaatggaaatcaagttggccatttaaagaaagagcttgcaggtgctttggcctatatcatggacaacaaattggcacaaattgaaggggtagttc

SEQ ID NO: 59459 - DNA, 120 bp, Artificial Sequence
  ENSG00000071794_5 (sequence is synthesized)
cttttggtgcaaacaatgcttttaccatgcctctgcatatgactttttggggaaaagaagaaaatagaaaagcggtttcagatcagttgaagaaacatggatttaaattgggtcctgcac

SEQ ID NO: 59460 - DNA, 120 bp, Artificial Sequence
  ENSG00000071794_6 (sequence is synthesized)
caaaaactttaggattcaatttggaaagtggttggggctctggaagagctggaccaagctatagtatgccagtgcatgctgcagtacagatgacaactgaacagcttaaaacagaatttg

SEQ ID NO: 59461 - DNA, 120 bp, Artificial Sequence
  ENSG00000071794_7 (sequence is synthesized)
acaaattgtttgaagatttaaaagaagatgataaaacccatgaaatggaaccagctgaggctattgaaacaccactgcttccacatcaaaaacaagctctagcttggatggtgtcacggg

SEQ ID NO: 59462 - DNA, 120 bp, Artificial Sequence
  ENSG00000071794_8 (sequence is synthesized)
aaaatagcaaagaacttccaccattctgggaacagcgaaatgacttatactataacacaataacaaatttttctgagaaggaccgaccagaaaatgtccatggaggaattttagctgatg

SEQ ID NO: 59463 - DNA, 120 bp, Artificial Sequence
  ENSG00000071794_9 (sequence is synthesized)
atatgggtttgggtaaaactcttacggccattgcagtaatccttaccaacttccatgatggcagacctcttcctattgaaagagttaaaaagaatctactgaagaaggaatataatgtta

SEQ ID NO: 59464 - DNA, 120 bp, Artificial Sequence
  ENSG00000071794_10 (sequence is synthesized)
acgatgactctatgaaacttggaggaaacaataccagtgaaaaggcagatggactaagcaaagacgcatctagatgtagtgaacaacccagtatttcagatatcaaggagaagagtaagt

SEQ ID NO: 59465 - DNA, 120 bp, Artificial Sequence
  ENSG00000071794_11 (sequence is synthesized)
ttcgcatgtcagaattgtctagctcccgccccaaaagaagaaaaactgctgtccagtacatagaaagcagtgattcagaggaaattgaaacaagtgaattgccgcagaaaatgaaaggca

SEQ ID NO: 59466 - DNA, 120 bp, Artificial Sequence
  ENSG00000071794_12 (sequence is synthesized)
aactgaaaaatgtacagtctgaaactaaaggcagggcgaaagcaggatcttctaaggttatagaagatgtggcatttgcatgtgcattaacttcatctgttcctacaacaaaaaagaaaa

SEQ ID NO: 59467 - DNA, 120 bp, Artificial Sequence
  ENSG00000071794_13 (sequence is synthesized)
tgttgaaaaagggagcttgtgcagtggaggggtcaaagaaaactgatgttgaggagagaccaagaacaacactgatcatctgtccgctttctgtgttaagcaactggattgaccagtttg

SEQ ID NO: 59468 - DNA, 120 bp, Artificial Sequence
  ENSG00000071794_14 (sequence is synthesized)
gacaacatataaaatcagatgtacacttgaatttttatgtttattatggtcctgatcgtattagagaaccggccttactttcaaaacaggatattgttttgactacgtataatattttaa

SEQ ID NO: 59469 - DNA, 120 bp, Artificial Sequence
  ENSG00000071794_15 (sequence is synthesized)
ctcatgactatggaactaaaggagatagtccattacatagcataaggtggctaagagtgatcctggatgaaggacatgccatacgaaatccaaatgctcagcagacaaaagctgtacttg

SEQ ID NO: 59470 - DNA, 120 bp, Artificial Sequence
  ENSG00000071794_16 (sequence is synthesized)
acttagaatcagaaagaagatgggttttgacaggtactccaatccagaattctttaaaggacttgtggtctcttctttcctttttaaaacttaaaccatttattgatagagaatggtggc

SEQ ID NO: 59471 - DNA, 120 bp, Artificial Sequence
  ENSG00000071794_17 (sequence is synthesized)
atagaacaatacagcgtcctgtcacaatgggagatgaaggaggacttaggcgtttacagtccctaattaaaaatattacacttagaagaacaaagacaagcaaaattaaaggaaaacctg

SEQ ID NO: 59472 - DNA, 120 bp, Artificial Sequence
  ENSG00000071794_18 (sequence is synthesized)
ttttggagttaccagaacgtaaagtatttattcagcacattacactttcagatgaagagagaaagatttatcagtctgtgaaaaatgaaggcagagccactattggaaggtattttaatg

SEQ ID NO: 59473 - DNA, 120 bp, Artificial Sequence
  ENSG00000071794_19 (sequence is synthesized)
aagggactgtcctggcacattatgcagatgtcctgggtcttttgcttagactgcggcaaatttgttgccatacttaccttcttacaaatgcagtgtcttccaatggcccctcaggaaatg

SEQ ID NO: 59474 - DNA, 120 bp, Artificial Sequence
  ENSG00000071794_20 (sequence is synthesized)
atacacctgaagaactgagaaagaagttaataaggaagatgaagttaattctgagctcaggttcagatgaggaatgtgcaatttgcctggattctttaacagttcctgtgataacacatt

SEQ ID NO: 59475 - DNA, 120 bp, Artificial Sequence
  ENSG00000071794_21 (sequence is synthesized)
gtgcacatgtattttgtaaaccctgtatttgccaagtcattcagaatgagcagccacatgctaaatgccctttatgcagaaatgatatacatgaagataatttattagaatgtcctccag

SEQ ID NO: 59476 - DNA, 120 bp, Artificial Sequence
  ENSG00000071794_22 (sequence is synthesized)
atggacatccagttcaaagattaatgcgctaatgcacgcattgactgacttaagaaagaagaatcccaacataaaaagtttggttgtttctcagtttacaacattcctgtctttaataga

SEQ ID NO: 59477 - DNA, 120 bp, Artificial Sequence
  ENSG00000071794_23 (sequence is synthesized)
aataccacttaaagcctctggatttgtgtttactcgtttggatggttccatggcccaaaagaaaagagttgaatcaattcagtgttttcaaaacactgaagcaggatctccaactataat

SEQ ID NO: 59478 - DNA, 120 bp, Artificial Sequence
  ENSG00000071794_24 (sequence is synthesized)
gcttctgtccttaaaagcaggtggagttggtttgaatctgtctgcagcttctcgagtgtttttaatggatccagcctggaatcctgctgctgaagatcagtgctttgacagatgccatag

SEQ ID NO: 59479 - DNA, 120 bp, Artificial Sequence
  ENSG00000071794_25 (sequence is synthesized)
acttggtcagaagcaagaagttatcatcacaaaattcattgtaaaggactctgttgaagaaaatatgctgaaaatacaaaacaaaaagagagaacttgcagcaggagcctttggaactaa

SEQ ID NO: 59480 - DNA, 120 bp, Artificial Sequence
  ENSG00000071794_26 (sequence is synthesized)
aaaaccaaatgctgacgaaatgaaacaagccaaaattaatgaaatcagaacattaattgacttataatttgtgggattttagtaaggtcagtttgattggatacttaagttttagaaatg

SEQ ID NO: 59481 - DNA, 120 bp, Artificial Sequence
  ENSG00000071794_27 (sequence is synthesized)
agaaaaatacagagttttagaaatgagatctagagaacacgtcttctaaaaggggcatattttatattagtgaagaggtattactgacacaatttcttctatatatgaacctatttttaa

SEQ ID NO: 59482 - DNA, 120 bp, Artificial Sequence
  ENSG00000071794_28 (sequence is synthesized)
tgaaacttcaaatagcaataagttccgttatatactgtggcctgaaataatttgagaaaaaaggttactttgttattcagcttttcataatatctatgctgagtattttcacgtatcttc

SEQ ID NO: 59483 - DNA, 120 bp, Artificial Sequence
  ENSG00000071794_29 (sequence is synthesized)
caagtactcagctttttcgtatttcaaataaggtcagaccttttatacttttgaccaaatagttattttctatgttggacacttagttatttaccaaagcctccgatttgtgatgcagtg

SEQ ID NO: 59484 - DNA, 120 bp, Artificial Sequence
  ENSG00000071794_30 (sequence is synthesized)
tttgtagtccttgtaaacaatatatacagactatacaagaattaattttattgggctttcaaaaaccatatttgcattccagaaccaaatcttaaatgagaccaaagtccaggttagcac

SEQ ID NO: 59485 - DNA, 120 bp, Artificial Sequence
  ENSG00000071794_31 (sequence is synthesized)
aggtttttatttttcctacagctacattgagatatagttcacataaatgacttggagttttatgttcatgaaaaaattagggattatgttaagagtactattttttccattttagttaag

SEQ ID NO: 59486 - DNA, 120 bp, Artificial Sequence
  ENSG00000071794_32 (sequence is synthesized)
tagtactacactcattgtttaaatgtaacttgctgtgtctgaggtataaatatagtctgtgggagtgagaggcaaaccagtcctacccaatttgatttgaatattttaaattatggaact

SEQ ID NO: 59487 - DNA, 120 bp, Artificial Sequence
  ENSG00000071794_33 (sequence is synthesized)
gctaaatagatatttctataaatagataatttttatttatgtagctttttttggaagtaactttataaatttttataattcagaagactactatatgtgagaggcgtgatatctggatgg

SEQ ID NO: 59488 - DNA, 120 bp, Artificial Sequence
  ENSG00000071794_34 (sequence is synthesized)
aagttgggctggatgatctccaaagtcgtttcaactcttaaagacatcttaatcctgaatgtaaacaattgttatgtgtttagaatcagaatttgattttgaacttgagtaattcatcct

SEQ ID NO: 59489 - DNA, 120 bp, Artificial Sequence
  ENSG00000071794_35 (sequence is synthesized)
cttttcttttttttttacttttttgttaataagcaaacttatttgctgcagaatttgggttgactcctgagcatatttaaaacaaagaagctagaaatttagcagtcagattaggtaggt

SEQ ID NO: 59490 - DNA, 120 bp, Artificial Sequence
  ENSG00000071794_36 (sequence is synthesized)
agctagaaatttagcagtcagattaggtaggtggttttatttcaaagggaaactttaatccaaagaaagattaattactctaacaaacaagagaagcttcatgtttgatgatacagattt

SEQ ID NO: 59491 - DNA, 120 bp, Artificial Sequence
  ENSG00000071794_37 (sequence is synthesized)
aagaatacctgagacttaagagtgttggaagtcatttgatagaaagatgagatcggagacaatgttgtgttatagggcacacattgaaggtatatgccaaatctctcaccagataagtcc

SEQ ID NO: 59492 - DNA, 120 bp, Artificial Sequence
  ENSG00000071794_38 (sequence is synthesized)
ttttctccctgtgccgttttcttgctcaaagggaacagtgaattagccagctagaatcttcctggtccctttttgaggcagtagcaggtaaggaaagggctgattttcatcaaaaccaag

SEQ ID NO: 59493 - DNA, 120 bp, Artificial Sequence
  ENSG00000071794_39 (sequence is synthesized)
acctttctgcagggatgatagtggaataataatgtgggattagcccgctagcattaggagcagttgggaagttacctggtagatcaagcattacacacaaaaaatcaagttgatcagagt

SEQ ID NO: 59494 - DNA, 120 bp, Artificial Sequence
  ENSG00000071794_40 (sequence is synthesized)
atgggttctccatatagcaatacttcagtgagattaagtataaacagtttttggcaaaaaacaacacagtctactctttctgcttacaaagacaaagccttacaaactcactatgaaggt

SEQ ID NO: 59495 - DNA, 120 bp, Artificial Sequence
  ENSG00000071794_41 (sequence is synthesized)
aaagggaggacagcttgcttctttgcccagacatttacaaagttgtttttaaaacacactcataagtaagtttggcaagttgtttaaaaaatgtctctttgttttgtacagttctgttag

SEQ ID NO: 59496 - DNA, 120 bp, Artificial Sequence
  ENSG00000071794_42 (sequence is synthesized)
atgttgttatattttaaaagtttaatttaaaaaatttaatttgtccttcctaagaaggataaatatataaaaaagccactggaatgaaaacttcctatatgctatgctgttgtcttatta

SEQ ID NO: 59497 - DNA, 120 bp, Artificial Sequence
  ENSG00000071794_43 (sequence is synthesized)
tgctgttgtcttattattatatagaaaaataactttagaaaaatattgaagacattgtattaccacttgtgattcaaacaattttgtggttaaaactggattttaaatttaaaaatcaat

SEQ ID NO: 59498 - DNA, 120 bp, Artificial Sequence
  ENSG00000071794_44 (sequence is synthesized)
cctcagcctcttgagaccagtttggacaacatataaaatcagatgtacacttgaatttttatgtttattatggtcctgatcgtattagagaaccggccttactttcaaaacaggatattg

SEQ ID NO: 59499 - DNA, 120 bp, Artificial Sequence
  ENSG00000071794_45 (sequence is synthesized)
tagtgtgagactcagctaggaatacatccaataatttttttaccaatgaaatggaattataatgaggtctttccaggaattccggtgatagataccctttgatgaaagattcatattgga

SEQ ID NO: 59500 - DNA, 120 bp, Artificial Sequence
  ENSG00000071794_46 (sequence is synthesized)
tctgccttttattgtgtggtggtatgttattgtcatgttataatgatgcttctctatgaggtatattatgtgagttggctactattttggcttctgaatgtttcttaaatttcaaattta

SEQ ID NO: 59501 - DNA, 120 bp, Artificial Sequence
  ENSG00000071794_47 (sequence is synthesized)
gctatgagagatacagattttagcatacatttaaaaatttttaggcatatttatatttgttcttctgttaagtgttgctcatacttcgttctttcttatatagccacatgctaaatgccc

SEQ ID NO: 59502 - DNA, 120 bp, Artificial Sequence
  ENSG00000071794_48 (sequence is synthesized)
ctattacacgggagtagttttggcatgttgtccaggctgatctggaactcctgggctcaagtgatccgtccgccttggcctctccaagtgctgggatgctgcacccggcctctaattttt

SEQ ID NO: 59503 - DNA, 80 bp, Artificial Sequence
  ENSG00000071859_0 (sequence is synthesized)
gccgccgccgccgccgccgccgctgccatggctcaatacaagggcgccgcgagcgaggccggccgcgccatgcacctgat

SEQ ID NO: 59504 - DNA, 120 bp, Artificial Sequence
  ENSG00000071859_1 (sequence is synthesized)
gcgaggccggccgcgccatgcacctgatgaagaagcgggagaagcagcgcgagcagatggagcagatgaagcagcgcatcgcggaggagaacatcatgaaatccaacattgacaagaagt

SEQ ID NO: 59505 - DNA, 120 bp, Artificial Sequence
  ENSG00000071859_2 (sequence is synthesized)
tctctgcgcactacgacgcggtggaggcagagctcaagtccagcaccgtgggtctcgtgaccctgaatgacatgaaggccaagcaggaggctctggtgaaggagcgggagaagcagctgg

SEQ ID NO: 59506 - DNA, 120 bp, Artificial Sequence
  ENSG00000071859_3 (sequence is synthesized)
ccaagaaggagcagtccaaggagctgcagatgaagctggagaagcttcgagagaaggagcgtaagaaggaagccaagcggaagatctccagcctgtccttcaccctggaggaggaagaag

SEQ ID NO: 59507 - DNA, 120 bp, Artificial Sequence
  ENSG00000071859_4 (sequence is synthesized)
agggaggcgaggaggaagaggaggcggccatgtatgaggaggagatggaaagggaagagatcaccacgaagaagagaaaactggggaagaacccagacgttgacacaagcttcttgcctg

SEQ ID NO: 59508 - DNA, 120 bp, Artificial Sequence
  ENSG00000071859_5 (sequence is synthesized)
gaggagaatcggcttcgggaagagctgcggcaggagtgggaagccaagcaggagaagatcaagagtgaggagatcgagatcaccttcagctactgggatggctctgggcaccggcggaca

SEQ ID NO: 59509 - DNA, 120 bp, Artificial Sequence
  ENSG00000071859_6 (sequence is synthesized)
gtcaagatgagaaagggcaacaccatgcagcagttcctgcagaaggcgctcgagatccttcggaaagacttcagtgagctgaggtccgcaggggtggagcagctcatgtacatcaaggag

SEQ ID NO: 59510 - DNA, 120 bp, Artificial Sequence
  ENSG00000071859_7 (sequence is synthesized)
gacttgatcatccctcaccatcacagcttctacgacttcatcgtcaccaaggcacgggggaagagtggaccactcttcaactttgatgttcatgacgatgtgcggttgctcagtgacgcc

SEQ ID NO: 59511 - DNA, 120 bp, Artificial Sequence
  ENSG00000071859_8 (sequence is synthesized)
actgtggagaaggatgagtcccatgcaggcaaggtggtgctgaggagctggtacgagaagaacaagcacatctttcccgccagccgctgggaaccctacgaccctgaaaagaagtgggac

SEQ ID NO: 59512 - DNA, 120 bp, Artificial Sequence
  ENSG00000071859_9 (sequence is synthesized)
aagtacacgatccgctgagcatccaggaggctgcgcggccccggctcctcagctccctcagtgtgccccgtggtgtcaccgggactccaggcacccgctcccctgcgaccatgccaggca

SEQ ID NO: 59513 - DNA, 120 bp, Artificial Sequence
  ENSG00000071859_10 (sequence is synthesized)
cgctgggaggaggacggcagctgctcgtgtcctgcccctgccacatcagtgactgctttattcttttccaataaagaagtgcacgtgtcagagctggagcgcctgcattgtgagaaacca

SEQ ID NO: 59514 - DNA, 120 bp, Artificial Sequence
  ENSG00000071859_11 (sequence is synthesized)
ttcagccccagtacccgcagtgggtgcagcaccctgggctttggctcaggctggtgggggcagtgtgcgcaggcggggggtgtggggaggggccgagatggaccatcaagacgccgcttt

SEQ ID NO: 59515 - DNA, 120 bp, Artificial Sequence
  ENSG00000071859_12 (sequence is synthesized)
ggacagcaggacccgtctggggcaatggggacccagcctgggctgggcaggccccacatagggcacacaggtggctctgggtcaaggaaggggctgggtcagggtcgggaaggacatgat

SEQ ID NO: 59516 - DNA, 120 bp, Artificial Sequence
  ENSG00000071859_13 (sequence is synthesized)
gaaggaactgaccttcctgacttgggaagccccagggatcctgaggataactggctccagggcctggccccctgtctggggagtgaggcccaggcctggctgaggctctgcagcgtctgg

SEQ ID NO: 59517 - DNA, 120 bp, Artificial Sequence
  ENSG00000071859_14 (sequence is synthesized)
acagcttctacgacttcatcgtcaccaaggcacgggggaagagtggtgagtgccgccgacccagccgcccccatagcaccttgccgccgatgttgtcactggggcagcagcgggacattg

SEQ ID NO: 59518 - DNA, 120 bp, Artificial Sequence
  ENSG00000071859_15 (sequence is synthesized)
cagagcagctcagggatggaaacagccccatttggcactcttagcatttgaagagccctgcccagcctcatggaaccttccatcgacaagggcacaggggcagatttggactataacgca

SEQ ID NO: 59519 - DNA, 120 bp, Artificial Sequence
  ENSG00000071859_16 (sequence is synthesized)
ccggggcaggcccctggctcgctgacttccagcagggcacacagaagcaagccagcgacagtctcatctgtgaaatgggcctggagccgggcgttctccgaggctgaggccactagctga

SEQ ID NO: 59520 - DNA, 120 bp, Artificial Sequence
  ENSG00000071859_17 (sequence is synthesized)
tgaccggcctccggcaggagggagccgagccagtgtttctgttgggaggcacggcggggacgggcctctcgtcgcctcgcctgggcacccagcgtcctggctctggcccctcggccctca

SEQ ID NO: 59521 - DNA, 120 bp, Artificial Sequence
  ENSG00000071859_18 (sequence is synthesized)
gagccaggcctctgccccctcggccctcagagccaggcctctgccctggtcctatggacaccgggcagggcggttcgtctccccctggagaggcggggaggcctgagccagacctggcaa

SEQ ID NO: 59522 - DNA, 120 bp, Artificial Sequence
  ENSG00000071859_19 (sequence is synthesized)
gtccactggccaggaggctccttccagaaccccttgcacctgtgaggcaggcacgaccctcccgggtgccagcggttcacccactgcttccgagaacatcatgaaatccaacattgacaa

SEQ ID NO: 59523 - DNA, 120 bp, Artificial Sequence
  ENSG00000071889_0 (sequence is synthesized)
cgccattgccgggcctgcctggccaccctgcgcagcggccttgcgtcctctcccggggcggagcgggtcggcgggcctgacagggaacctccctgaccgagcccacgtctccccacggcc

SEQ ID NO: 59524 - DNA, 120 bp, Artificial Sequence
  ENSG00000071889_1 (sequence is synthesized)
agagaaatctccggcccggcccgcatcgccagcccccaggcccggaggaacggcccgagcccaggagaaccacatcttcgtcccagccccggaggctcctgtgggcaagatcgtgagcca

SEQ ID NO: 59525 - DNA, 120 bp, Artificial Sequence
  ENSG00000071889_2 (sequence is synthesized)
acgggttcctgaggcccctcctggccaggcagggtttccccgcgcgtttccgaggagccctgcctggccgggcggctggacaaacagtgcacttgccggcggtcccaacccagcaggaga

SEQ ID NO: 59526 - DNA, 120 bp, Artificial Sequence
  ENSG00000071889_3 (sequence is synthesized)
agtggacatgaggttggcaggccctctccgcattgtggtcctagtcgtcagtgtgggtgtcacatggatcgtggtcagcatcctcctgggtgggcctggcagtggctttcctcgcatcca

SEQ ID NO: 59527 - DNA, 120 bp, Artificial Sequence
  ENSG00000071889_4 (sequence is synthesized)
gcaactcttcaccagtccagagagctcggtgactgcagcgccacgggccaggaagtacaagtgtggcctgccccagccgtgtcctgaggagcacctggccttccgcgtggtcagcggggc

SEQ ID NO: 59528 - DNA, 120 bp, Artificial Sequence
  ENSG00000071889_5 (sequence is synthesized)
cgccaacgtcattgggcccaagatctgcctcgaggacaagatgctgatgagcagcgtcaaggacaacgtgggccgcgggctgaacatcgccctggtgaacggggtcagcggcgagctcat

SEQ ID NO: 59529 - DNA, 120 bp, Artificial Sequence
  ENSG00000071889_6 (sequence is synthesized)
cgaggcccgggcctttgacatgtgggccggagatgtcaacgacctgttgaagtttattcggccactgcacgaaggcaccctggtgttcgtggcatcctacgacgacccagccaccaagat

SEQ ID NO: 59530 - DNA, 120 bp, Artificial Sequence
  ENSG00000071889_7 (sequence is synthesized)
tgggcagcaggaacgccaaggagctggccttccgggacagctgggtgtttgtcggggccaagggtgtgcagaacaagagcccctttgagcagcacgtgaagaacagtaagcacagcaaca

SEQ ID NO: 59531 - DNA, 120 bp, Artificial Sequence
  ENSG00000071889_8 (sequence is synthesized)
agtacgaaggctggcccgaggcgctggagatggaaggctgtatcccgcggagaagcacggccagctagcacggccagtgccaggaccgggccgagggaggccagaccaagggaggcacgc

SEQ ID NO: 59532 - DNA, 120 bp, Artificial Sequence
  ENSG00000071889_9 (sequence is synthesized)
gcgctgccgggcggacagaggctgaggctcacaccccacacccgggcaggagcgctccctggccccaacacatcggggctccgaggcagtgaccagaacgtggtctcaaggtggtggggg

SEQ ID NO: 59533 - DNA, 120 bp, Artificial Sequence
  ENSG00000071889_10 (sequence is synthesized)
ctatgggggctgcagggggtagccctgccgcactttgtcacgggagcccagggtacccgcctccttttcgtaacactgttccccccggtcagcccatctagccctgtcctccattcctca

SEQ ID NO: 59534 - DNA, 120 bp, Artificial Sequence
  ENSG00000071889_11 (sequence is synthesized)
cgccatctccatccccatcttgagtcctggaacggccctgggtgcctgcccctcactgtgcatctctgggagcagcccggcaggttggggcgtcttccagaacctctcccttctggagcc

SEQ ID NO: 59535 - DNA, 120 bp, Artificial Sequence
  ENSG00000071889_12 (sequence is synthesized)
actctgcactgcgggctaaacatgtttccagtgtgattccttccagtgagccaaacccggtggctgcttcatgagcctgactgcctctcgcctgctctcagcaggaagggacccctggag

SEQ ID NO: 59536 - DNA, 120 bp, Artificial Sequence
  ENSG00000071889_13 (sequence is synthesized)
caggctggcccggggtggtgaagtagctggagcccgatcacagtcccgcggtttgtcagggggcccaccttctagatgaccccttaataaagtgatggccccacagaagaaatgccttca

SEQ ID NO: 59537 - DNA, 120 bp, Artificial Sequence
  ENSG00000071889_14 (sequence is synthesized)
gcggctggacaaacaggtcgtagcaccgatcgcgcccgcccccagcaggggtcccgcacaggcttgcccctgacccccacccaaacctgtccttccgctttgcccccaaacagtgcactt

SEQ ID NO: 59538 - DNA, 120 bp, Artificial Sequence
  ENSG00000071889_15 (sequence is synthesized)
caccagtaggacacagagtatggaagtgtccccagcctcggcctgagccacatccccctacttgtgtcctgctctgcggtcacttgttctaccatgtgtgctggtcctgacctccccttc

SEQ ID NO: 59539 - DNA, 120 bp, Artificial Sequence
  ENSG00000071889_16 (sequence is synthesized)
cactccaggccggcagtgtttctgctggtgtcagattctcaagagccttgttggtctcttttgcaagttatagaggcccaagctataaaatcagagagttttcccacagacgcttcctag

SEQ ID NO: 59540 - DNA, 120 bp, Artificial Sequence
  ENSG00000071889_17 (sequence is synthesized)
ataaccccatcttcattgtagatttctgctgaaagggttgagtggacccacgagtcacatacctcagctctggggcaaacgcttgaacagccttgctgttctgtccaggggacacttttg

SEQ ID NO: 59541 - DNA, 120 bp, Artificial Sequence
  ENSG00000071889_18 (sequence is synthesized)
cagtttttgtaatatgattaggccaagaattttccacatcttcgctttctggctcctttgtgctcaacagtttcttccttatgtctctcacattttactataagcagcaaggagaagtca

SEQ ID NO: 59542 - DNA, 120 bp, Artificial Sequence
  ENSG00000071889_19 (sequence is synthesized)
ggctacgctctcaacactgcttggaaatctcctcagctgaatatccaagttcagcacccagcacttacacattctcctttcgacaaaacactagaacacaattcaaccaagttttttttt

SEQ ID NO: 59543 - DNA, 120 bp, Artificial Sequence
  ENSG00000071889_20 (sequence is synthesized)
gattataggcgtgagccaccacacctgggccaagttcctttataacaaggatcagctttcctccagcgcccaataactcaataacatgtccctcattttcctctgaggcttaaccaaaag

SEQ ID NO: 59544 - DNA, 120 bp, Artificial Sequence
  ENSG00000071889_21 (sequence is synthesized)
ttttttttttttttttttggtagagacagaggtcttactctgttgctcaggctggagttcagtggtatcatccccgtgcactgtaagctcaaactcctgggctcaagcgatcctctcacc

SEQ ID NO: 59545 - DNA, 87 bp, Artificial Sequence
  ENSG00000071889_22 (sequence is synthesized)
gttcagtggtatcatccccgtgcactgtaagctcaaactcctgggctcaagcgatcctctcacctcagtctcccaagtagctgcgtt

SEQ ID NO: 59546 - DNA, 84 bp, Artificial Sequence
  ENSG00000071889_23 (sequence is synthesized)
ttattttttattatttattttttgaatgtattgagacagggtcttgctctctcacccaggctggagggcagtggcgcaatcata

SEQ ID NO: 59547 - DNA, 89 bp, Artificial Sequence
  ENSG00000071889_24 (sequence is synthesized)
ctggtcttgatcacctggcctcaagtgatgcacatgcgtgaatcaccacacccaacccaaaagcacctttaacattcatgtttctagca

SEQ ID NO: 59548 - DNA, 120 bp, Artificial Sequence
  ENSG00000071889_25 (sequence is synthesized)
acccaacccaaaagcacctttaacattcatgtttctagcaacgttctgttcttgatgatatttgtattctctaagaccacagaggctgtctctattgctctcccctcctctcaccagaat

SEQ ID NO: 59549 - DNA, 120 bp, Artificial Sequence
  ENSG00000071889_26 (sequence is synthesized)
tacctttaacatccatactcctaccaacagtctcttaaaggcaatccagaccttttctaacatgtacctcaaacttctatagccttgatatggtttaaatgtcatctctaaaactcatgt

SEQ ID NO: 59550 - DNA, 120 bp, Artificial Sequence
  ENSG00000071889_27 (sequence is synthesized)
tgaaatttgtcaatgtattggtattgagaggagggcctttttgaggtagttacgtcatgagggctctgccctcatgaatggatgaatgccactattatgggtgagttagttaccttgaag

SEQ ID NO: 59551 - DNA, 120 bp, Artificial Sequence
  ENSG00000071889_28 (sequence is synthesized)
ttcagcccccttttttcctgcgtctcatatgcttgcttccaccttccacctttctgccacgggatgaccctcaccagatgccggcgccatgcttttggacttcccagcctccagaaccat

SEQ ID NO: 59552 - DNA, 120 bp, Artificial Sequence
  ENSG00000071889_29 (sequence is synthesized)
gagccaaatgaatctgttgtctttataaattacccagtctgtggtattctgttatggcagcagcaaatggactaagacaagcctctactgactacccagttccaaagccatttccacatt

SEQ ID NO: 59553 - DNA, 120 bp, Artificial Sequence
  ENSG00000071889_30 (sequence is synthesized)
gtgccaaaacctgtatccatttcctggaactgccatttcaactgggtggcttaaacaacagaaatggattctctccccattctgaaagccagaagtctgaaatcaaagtgtcagcagggc

SEQ ID NO: 59554 - DNA, 120 bp, Artificial Sequence
  ENSG00000071889_31 (sequence is synthesized)
gttactcaccctgaaagttctacaggagggtccttcctgacctccccaggttccagtggccccaggcataccttggcctctggctgtgtcactcctgtctcttcctccactgtaccatgg

SEQ ID NO: 59555 - DNA, 120 bp, Artificial Sequence
  ENSG00000071889_32 (sequence is synthesized)
ctgtcttccctctgtgtgtctttgtcacttctgttcttataaggacatcagtcatgttgcattaaggacccaacctactccagtatgaccccatctgaactgcaaaggccctatttgcaa

SEQ ID NO: 59556 - DNA, 120 bp, Artificial Sequence
  ENSG00000071889_33 (sequence is synthesized)
acatcacattctgaagtaccacagattagaacttcagcataccttgaggggacagaattcaacccataatagaagccatcctgctccagtcctcccaaccaacccccatcaaaatcggga

SEQ ID NO: 59557 - DNA, 120 bp, Artificial Sequence
  ENSG00000071889_34 (sequence is synthesized)
gacaggctgcaccccctgccacactaccccctgccacactgcctttgctcaggttggcctcatccatgcagctagacccccagcctgacttacttcacccctgctttgttcctggctgtg

SEQ ID NO: 59558 - DNA, 120 bp, Artificial Sequence
  ENSG00000071889_35 (sequence is synthesized)
ctgatgagcagcgtcaaggacaacgtgggccgcgggctgaacatcgccctggtgaacggggtcagcggcgagctcatcgaggcccgggcctttgacatgtgggccggaggtgagttgcag

SEQ ID NO: 59559 - DNA, 120 bp, Artificial Sequence
  ENSG00000071889_36 (sequence is synthesized)
cgcagcgtcttgcattttgactgcagcaaaatgacctgggcagcttcccctgagacactgctctctctgtctgtacttggagcttctcagtcacctccgtgggttcagaaaggacagggg

SEQ ID NO: 59560 - DNA, 120 bp, Artificial Sequence
  ENSG00000071889_37 (sequence is synthesized)
ggcccaatccctacttctgtttccttgtttggagaacgggcttgtgggagggtgctcagtggtgcctgatgacccctgttccgtggcacctgcccccccagatgtcaacgacctgttgaa

SEQ ID NO: 59561 - DNA, 120 bp, Artificial Sequence
  ENSG00000071889_38 (sequence is synthesized)
gtttattcggccactgcacgaaggcaccctggtgttcgtggcatcctacgacgacccagccaccaagtaggtgcttggggaggccagcctcagccttgcccttctgcagcaacagctgac

SEQ ID NO: 59562 - DNA, 120 bp, Artificial Sequence
  ENSG00000071894_0 (sequence is synthesized)
gagttcgctgctgtcccggttcctctcgagtcggctccaactgccagcccgggttggcgccatgtacgccgtgtacaaacaggcgcatccgcccaccggtctggagttctccatgtactg

SEQ ID NO: 59563 - DNA, 120 bp, Artificial Sequence
  ENSG00000071894_1 (sequence is synthesized)
caacttcttcaacaacagcgagcgcaacctggtagtggccgggacctcgcagctctacgtgtaccgcctcaaccgcgacgccgaggctctgaccaagaatgacaggagcacagaggggaa

SEQ ID NO: 59564 - DNA, 120 bp, Artificial Sequence
  ENSG00000071894_2 (sequence is synthesized)
ggcccaccgggagaagctcgagcttgctgcctccttctccttctttggcaacgtcatgtccatggccagcgtgcagctggcaggagccaagcgggatgccctgctcctaagcttcaagga

SEQ ID NO: 59565 - DNA, 120 bp, Artificial Sequence
  ENSG00000071894_3 (sequence is synthesized)
tgccaagctgtctgtggtggagtacgacccgggcacccatgacctgaagaccctgtcactgcactactttgaggagcctgagcttcgggacgggtttgtgcagaatgtacacacgccgcg

SEQ ID NO: 59566 - DNA, 120 bp, Artificial Sequence
  ENSG00000071894_4 (sequence is synthesized)
agtgcgggtggaccccgacgggcgctgtgcagccatgcttgtctacggcacgcggctggtggtcctgcccttccgcagggagagcctggctgaggagcacgaggggctcgtgggtgaggg

SEQ ID NO: 59567 - DNA, 120 bp, Artificial Sequence
  ENSG00000071894_5 (sequence is synthesized)
gcagaggtccagcttcctgcccagctacatcatcgacgtgcgggccctagacgagaagctgctcaacatcatcgacctgcagttcctgcatggctactacgagcctaccctcctcatcct

SEQ ID NO: 59568 - DNA, 120 bp, Artificial Sequence
  ENSG00000071894_6 (sequence is synthesized)
gtttgagcccaaccagacctggcctgggcgcgtggccgtgcggcaggacacgtgctccattgtggccatctcactgaacatcacgcagaaggtgcaccccgtcatctggtccctcaccag

SEQ ID NO: 59569 - DNA, 120 bp, Artificial Sequence
  ENSG00000071894_7 (sequence is synthesized)
cctgccctttgactgcacccaggctctggctgtgcccaagcccataggtggggtggtggtgtttgccgtcaactcgctgttgtacctgaaccagagcgtccccccgtatggcgtggctct

SEQ ID NO: 59570 - DNA, 120 bp, Artificial Sequence
  ENSG00000071894_8 (sequence is synthesized)
caacagcctcaccacaggaaccacggctttcccgcttcgcacccaggagggtgtgcggatcaccctggactgcgcccaggccaccttcatctcctacgacaagatggtcatctccctcaa

SEQ ID NO: 59571 - DNA, 120 bp, Artificial Sequence
  ENSG00000071894_9 (sequence is synthesized)
gggcggcgagatctacgtgctgaccctcatcaccgacggcatgcgcagtgtccgagcgttccactttgacaaggcggccgccagcgtcctcaccaccagcatggtcaccatggagcccgg

SEQ ID NO: 59572 - DNA, 120 bp, Artificial Sequence
  ENSG00000071894_10 (sequence is synthesized)
gtacctgttcctgggttctcgcctgggcaattccctcctcctcaagtacacggagaagctgcaggagcccccggccagtgctgtccgtgaggctgccgacaaggaagagcctccctcaaa

SEQ ID NO: 59573 - DNA, 120 bp, Artificial Sequence
  ENSG00000071894_11 (sequence is synthesized)
gaagaagcgagtggatgcgacggccggctggtcagctgcgggtaagtcggtgccgcaggatgaggtggacgagattgaagtgtacggcagcgaggcccagtcgggaacacagctggccac

SEQ ID NO: 59574 - DNA, 120 bp, Artificial Sequence
  ENSG00000071894_12 (sequence is synthesized)
ctactcctttgaggtgtgtgacagcatcctgaacattggaccctgtgccaatgccgccgtgggcgagcctgccttcctctctgaagagtttcagaacagccccgagccggacctggagat

SEQ ID NO: 59575 - DNA, 120 bp, Artificial Sequence
  ENSG00000071894_13 (sequence is synthesized)
tgtggtttgctccggccacgggaagaacggggctttgtcggtgctgcagaagagcatccggccccaggtggtgacaacctttgagcttcccggctgctatgacatgtggacagtcatcgc

SEQ ID NO: 59576 - DNA, 120 bp, Artificial Sequence
  ENSG00000071894_14 (sequence is synthesized)
cccggtgcgtaaggaggaggaggacaatcccaagggggagggcacagagcaggaacccagcaccacccctgaagcagacgacgacggccgcagacacggattcctgattctgagccggga

SEQ ID NO: 59577 - DNA, 120 bp, Artificial Sequence
  ENSG00000071894_15 (sequence is synthesized)
agactccaccatgatcctgcagacggggcaggagatcatggagctggacaccagtggcttcgccactcagggccccacggtctttgctgggaacatcggggacaaccgctacattgtcca

SEQ ID NO: 59578 - DNA, 120 bp, Artificial Sequence
  ENSG00000071894_16 (sequence is synthesized)
agtgtcaccactgggcatccgcctgctggaaggagtgaatcagctgcacttcatccccgtggacctgggcgcccccatcgtgcagtgcgccgtggccgacccctatgtggtcatcatgag

SEQ ID NO: 59579 - DNA, 120 bp, Artificial Sequence
  ENSG00000071894_17 (sequence is synthesized)
tgccgagggccacgtcaccatgttcctgctgaagagtgactcctacggtggccgccaccaccgcctggcgctgcacaagcccccgctgcaccatcagtccaaggtgattacgctgtgcct

SEQ ID NO: 59580 - DNA, 120 bp, Artificial Sequence
  ENSG00000071894_18 (sequence is synthesized)
ctgggtggggcccgtgacgagctcgggggccgcagtggcccggaggccgagggcctgggctcagagactagccccacagtggatgacgaggaggagatgctgtatggggattcgggctcc

SEQ ID NO: 59581 - DNA, 120 bp, Artificial Sequence
  ENSG00000071894_19 (sequence is synthesized)
ctcttcagccccagcaaggaggaggcccgaagaagcagccagccccctgctgaccgggaccctgcacccttccgggcagagcctacccactggtgcctgctggtgcgggagaatggcacc

SEQ ID NO: 59582 - DNA, 120 bp, Artificial Sequence
  ENSG00000071894_20 (sequence is synthesized)
atggagatctaccagcttcccgactggcggctggtgttcctggtgaagaacttccctgtggggcagcgggtccttgtggacagctcctttggacagcccactacacagggcgaggcccgc

SEQ ID NO: 59583 - DNA, 120 bp, Artificial Sequence
  ENSG00000071894_21 (sequence is synthesized)
agggaggaggccacgcgccagggggagctgcccctcgtcaaggaggtgctgctggtggcgctgggcagccgccagagcaggccctacctgctggtgcatgtggaccaagagctgcttatc

SEQ ID NO: 59584 - DNA, 120 bp, Artificial Sequence
  ENSG00000071894_22 (sequence is synthesized)
tacgaggccttcccccacgactctcagctcggccagggcaatctcaaagtccgctttaagaaggtccctcacaacatcaacttccgtgagaagaagccaaagccatccaagaagaaagca

SEQ ID NO: 59585 - DNA, 120 bp, Artificial Sequence
  ENSG00000071894_23 (sequence is synthesized)
gaaggtggcggcgcagaggagggggctggggcccggggccgcgtggcgcgtttccgctacttcgaggatatttatggctactcaggggtcttcatctgcggcccctcccctcactggctc

SEQ ID NO: 59586 - DNA, 120 bp, Artificial Sequence
  ENSG00000071894_24 (sequence is synthesized)
ttggtgaccggccgaggggctctgcggctacaccccatggccatcgacggcccggtcgactctttcgctccattccacaatgtcaactgtccccgcggcttcctgtacttcaacagacag

SEQ ID NO: 59587 - DNA, 120 bp, Artificial Sequence
  ENSG00000071894_25 (sequence is synthesized)
ggcgagctgaggatcagtgtcctgcctgcctacctgtcctatgatgccccatggcctgtcaggaagatcccgctgcgctgcacggcccactatgtggcttaccacgtggagtctaaggtg

SEQ ID NO: 59588 - DNA, 120 bp, Artificial Sequence
  ENSG00000071894_26 (sequence is synthesized)
tatgctgtggccaccagcaccaacacgccgtgtgcccgcatcccacgcatgactggcgaggagaaggagtttgagaccatcgagagagatgagcggtacatccacccccagcaggaggcc

SEQ ID NO: 59589 - DNA, 120 bp, Artificial Sequence
  ENSG00000071894_27 (sequence is synthesized)
ttctccatccagctcatctccccggtcagctgggaggctattcccaatgccaggatcgagctgcaggagtgggagcatgtgacctgcatgaagacagtgtctctgcgcagtgaggagacc

SEQ ID NO: 59590 - DNA, 120 bp, Artificial Sequence
  ENSG00000071894_28 (sequence is synthesized)
gtgtcgggcctcaaaggctacgtggccgccgggacctgcctcatgcagggggaggaggtcacgtgccgagggcggatcttgatcatggatgtgattgaggtggtgcccgagcctggccag

SEQ ID NO: 59591 - DNA, 120 bp, Artificial Sequence
  ENSG00000071894_29 (sequence is synthesized)
cccttgaccaagaacaagttcaaagtcctttacgagaaggagcagaaggggcccgtgaccgccctgtgccactgcaatggccacctggtgtcggccatcggccagaagattttcctgtgg

SEQ ID NO: 59592 - DNA, 120 bp, Artificial Sequence
  ENSG00000071894_30 (sequence is synthesized)
agcctgcgggccagcgagctgacgggcatggccttcatcgacacgcagctctacatacaccagatgatcagcgtcaagaacttcatcctggcagccgacgtcatgaagagcatttcgctg

SEQ ID NO: 59593 - DNA, 120 bp, Artificial Sequence
  ENSG00000071894_31 (sequence is synthesized)
ctgcgctaccaggaggaaagcaagacgctgagcctggtgtcgcgggatgccaagcccctggaggtgtacagcgtggacttcatggtggacaatgcccagctgggttttctggtgtctgac

SEQ ID NO: 59594 - DNA, 120 bp, Artificial Sequence
  ENSG00000071894_32 (sequence is synthesized)
cgcgaccgcaacctcatggtgtacatgtacctgcccgaagccaaggagagtttcgggggcatgcgcctgctgcgtcgggcagacttccacgtgggtgcccacgtgaacacgttctggagg

SEQ ID NO: 59595 - DNA, 120 bp, Artificial Sequence
  ENSG00000071894_33 (sequence is synthesized)
accccgtgccggggggccactgaagggctcagcaaaaagtcggtcgtgtgggagaataagcacatcacgtggtttgccaccctggacggcggcatcgggctgctgctgcccatgcaggag

SEQ ID NO: 59596 - DNA, 120 bp, Artificial Sequence
  ENSG00000071894_34 (sequence is synthesized)
aagacctaccggcggctgctgatgctgcagaacgcgctgaccaccatgctgccacaccacgccggcctcaacccccgcgccttccggatgctgcacgtggaccgccgcaccctccagaat

SEQ ID NO: 59597 - DNA, 120 bp, Artificial Sequence
  ENSG00000071894_35 (sequence is synthesized)
gccgtgcgcaacgtgctggatggggagctgctcaaccgctacctgtacctgagcaccatggagcgcagcgagctagccaagaagatcggcaccacaccagacataatcctggacgacttg

SEQ ID NO: 59598 - DNA, 120 bp, Artificial Sequence
  ENSG00000071894_36 (sequence is synthesized)
ctggagacggaccgcgtcaccgcccacttctagccccgtggatgccgtcaccaccagcacacggaactacctcccaccccctttttgtacaaaacacaaggaaaaacattttttgcttga

SEQ ID NO: 59599 - DNA, 120 bp, Artificial Sequence
  ENSG00000071894_37 (sequence is synthesized)
gcagcgcgaggccggggaggggcgcggtgcggggccgggctcctgcgtgggcgaccccgctcacccttcctctcccggccttgcgcagcccgggttggcgccatgtacgccgtgtacaaa

SEQ ID NO: 59600 - DNA, 120 bp, Artificial Sequence
  ENSG00000071894_38 (sequence is synthesized)
cctgaggaccaggaaggagtgtccagagggcgatggggttgaggtcgaggaggtggaacctgtgacttggttgctccaaaggtctggaaaggggtggttgggagctggggctgcagcccc

SEQ ID NO: 59601 - DNA, 120 bp, Artificial Sequence
  ENSG00000071894_39 (sequence is synthesized)
tggggtccccaccactgctctgccggctcgccgggcaagccctcgcagggcctggcctccacacttctcaggagagctgacgtgagtgctagctctgccccttggctgctctgtgacttt

SEQ ID NO: 59602 - DNA, 120 bp, Artificial Sequence
  ENSG00000071894_40 (sequence is synthesized)
atttaagccaccacaccaccaggtcacttgagaccctgcctgggatgcggtgagtgcttcctgggtgcctgaggactcaggactgtccatgaaagagggcagccctggctccctctgcct

SEQ ID NO: 59603 - DNA, 120 bp, Artificial Sequence
  ENSG00000071894_41 (sequence is synthesized)
ggttttcagtccccagcatggcagtctgtgggctgccctttgcagcctccagtgccctcctggcctagctttcccatcccctgtggccagcacccctagccccagctgagcgtgggaaaa

SEQ ID NO: 59604 - DNA, 120 bp, Artificial Sequence
  ENSG00000071894_42 (sequence is synthesized)
gcaacctcatggtgtacatgtacctgcccgaaggtgagtgcttcctccaccccctctgcctgggccggggctgggctagcagtgacccctaggcctttctggtctagccaaggagagttt

SEQ ID NO: 59605 - DNA, 120 bp, Artificial Sequence
  ENSG00000071894_43 (sequence is synthesized)
cgcttcgtgagtgtggggtggctggggcggggggggcccggggacggcttgggcctgcctagtcggcctgaccacccaccccacaggcacccaggagggtgtgcggatcaccctggactg

SEQ ID NO: 59606 - DNA, 120 bp, Artificial Sequence
  ENSG00000071894_44 (sequence is synthesized)
agcccataggtgtgtgtcctgggagtggataggggagtgtgtggagagagcactgagcctgcccaccagcctgtgtccacctccaggtggggtggtggtgtttgccgtcaactcgctgtt

SEQ ID NO: 59607 - DNA, 120 bp, Artificial Sequence
  ENSG00000071894_45 (sequence is synthesized)
gcctggccagcccttgaccaagaacaagttcaaagtcctttacgagaaggagcagaaggggcccgtgaccgccctgtgccactgcaatggccacctggtgtcggccatcggccagaagct

SEQ ID NO: 59608 - DNA, 120 bp, Artificial Sequence
  ENSG00000071894_46 (sequence is synthesized)
gagtgtgggggagcaggtgtgtctgggtggggggccctagggttggcctggctcacaccaaaaccctcaccctacccctgccagccaccctggacggcggcatcgggctgctgctgccca

SEQ ID NO: 59609 - DNA, 120 bp, Artificial Sequence
  ENSG00000071909_0 (sequence is synthesized)
ctagatcgaaagtcctttggtaatgatgtgtcatacattctagtcatcaaagacaccattttctgggcctgaagtgttctgctggtttttggaggaatgagaatccaatctctcataagc

SEQ ID NO: 59610 - DNA, 120 bp, Artificial Sequence
  ENSG00000071909_1 (sequence is synthesized)
cggattcagaaaataggtcatcgatgaaacatctgtatggattatttcactataatcctatgatgcttggacttgaatcacttccagatcccacagacacctgggaaattatagagacca

SEQ ID NO: 59611 - DNA, 120 bp, Artificial Sequence
  ENSG00000071909_2 (sequence is synthesized)
ttggtaaaggcacctatggcaaagtctacaaggtaactaacaagagagatgggagcctggctgcagtgaaaattctggatccagtcagtgatatggatgaagaaattgaggcagaataca

SEQ ID NO: 59612 - DNA, 120 bp, Artificial Sequence
  ENSG00000071909_3 (sequence is synthesized)
acattttgcagttccttcctaatcatcccaatgttgtaaagttttatgggatgttttacaaagcggatcactgtgtagggggacagctgtggctggtcctggagctgtgtaatgggggct

SEQ ID NO: 59613 - DNA, 120 bp, Artificial Sequence
  ENSG00000071909_4 (sequence is synthesized)
cagtcactgagcttgtcaaaggtctactcagatgtggccagcggttggatgaagcaatgatctcatacatcttgtacggggccctcttgggccttcagcatttgcacaacaaccgaatca

SEQ ID NO: 59614 - DNA, 120 bp, Artificial Sequence
  ENSG00000071909_5 (sequence is synthesized)
tccaccgtgatgtgaaggggaataacattcttctgacaacagaaggaggagttaagctcgttgactttggtgtttcagctcaactcaccagtacacgtctgcggagaaacacatctgttg

SEQ ID NO: 59615 - DNA, 120 bp, Artificial Sequence
  ENSG00000071909_6 (sequence is synthesized)
gcaccccgttctggatggcccctgaggtcattgcctgtgagcagcagtatgactcttcctatgacgctcgctgtgacgtctggtccttggggatcacagctattgaactgggggatggag

SEQ ID NO: 59616 - DNA, 120 bp, Artificial Sequence
  ENSG00000071909_7 (sequence is synthesized)
accctcccctctttgacatgcatcctgtgaaaacactctttaagattccaagaaatcctccacctactttacttcatccagaaaaatggtgtgaagaattcaaccactttatttcacagt

SEQ ID NO: 59617 - DNA, 120 bp, Artificial Sequence
  ENSG00000071909_8 (sequence is synthesized)
gtcttattaaggattttgaaaggcgaccttccgtcacacatctccttgaccacccatttattaaaggagtacatggaaaagttctgtttctgcaaaaacagctggccaaggttctccaag

SEQ ID NO: 59618 - DNA, 120 bp, Artificial Sequence
  ENSG00000071909_9 (sequence is synthesized)
accagaagcatcaaaatcctgttgctaaaaccaggcatgagaggatgcataccagaagaccttatcatgtggaagatgctgaaaaatactgccttgaggatgatttggtcaacctagagg

SEQ ID NO: 59619 - DNA, 120 bp, Artificial Sequence
  ENSG00000071909_10 (sequence is synthesized)
ttctggatgaggatacaattatccatcagttgcagaaacgttatgcagacttgctaatttacacatatgttggagacatcttaattgccttaaaccccttccagaatctaagcatatact

SEQ ID NO: 59620 - DNA, 120 bp, Artificial Sequence
  ENSG00000071909_11 (sequence is synthesized)
ctccacagttttccagactttatcatggggtgaaacgcgcctccaatcccccccacatatttgcatcagcagatgctgcttaccagtgcatggttactctcagcaaagaccagtgcattg

SEQ ID NO: 59621 - DNA, 120 bp, Artificial Sequence
  ENSG00000071909_12 (sequence is synthesized)
tcatcagcggagagagtggctctgggaagacagaaagcgcccacctgattgttcagcatttgactttcttgggaaaggccaataatcagaccttgagagagaaaattctacaagtcaact

SEQ ID NO: 59622 - DNA, 120 bp, Artificial Sequence
  ENSG00000071909_13 (sequence is synthesized)
ccctggtggaagcctttgggaactcatgcactgccatcaatgacaactcgagccgttttggaaaatatctggaaatgatgtttacaccaactggagttgtgatgggggcaagaatctctg

SEQ ID NO: 59623 - DNA, 120 bp, Artificial Sequence
  ENSG00000071909_14 (sequence is synthesized)
aatatctcctggaaaaatccagagttataaaacaggcagcgagagagaaaaattttcatatattttactatatttatgctggtcttcatcaccaaaagaagctttctgatttcagacttc

SEQ ID NO: 59624 - DNA, 120 bp, Artificial Sequence
  ENSG00000071909_15 (sequence is synthesized)
ctgaggaaaaacctcctaggtacatagctgatgaaactggaagggtgatgcacgacataacttccaaggagtcttacagaagacaattcgaagcaattcagcattgcttcaggattatag

SEQ ID NO: 59625 - DNA, 120 bp, Artificial Sequence
  ENSG00000071909_16 (sequence is synthesized)
ggttcacggacaaagaggtgcactcagtgtacagaattttggctgggattttgaatattgggaacattgagttcgcagctatttcctctcaacatcagactgataaaagtgaggtgccca

SEQ ID NO: 59626 - DNA, 120 bp, Artificial Sequence
  ENSG00000071909_17 (sequence is synthesized)
atgctgaagctttgcaaaatgctgcctctgttctgtgcattagccctgaagagctccaggaggccctcacctcccactgtgtggtcacccggggcgagaccatcatccgtgccaacactg

SEQ ID NO: 59627 - DNA, 120 bp, Artificial Sequence
  ENSG00000071909_18 (sequence is synthesized)
tagacagggctgcggacgttcgagacgccatgtccaaagccctgtatgggaggctcttcagctggattgtgaatcgcattaatacactcctgcagccagacgaaaacatatgtagtgcag

SEQ ID NO: 59628 - DNA, 120 bp, Artificial Sequence
  ENSG00000071909_19 (sequence is synthesized)
gaggtggaatgaatgtggggatcttggatatctttggattcgagaattttcagagaaattcatttgagcagctctgcataaacatcgccaatgagcaaatccagtactatttcaatcagc

SEQ ID NO: 59629 - DNA, 120 bp, Artificial Sequence
  ENSG00000071909_20 (sequence is synthesized)
atgtttttgctcttgagcagatggaatatcagaatgaaggcattgatgctgtacccgtggaatatgaggacaaccgcccgctcttggacatgttcctccagaaacccctgggactgcttg

SEQ ID NO: 59630 - DNA, 120 bp, Artificial Sequence
  ENSG00000071909_21 (sequence is synthesized)
cacttttggatgaggaaagtcggtttccccaagcaactgaccagaccctggttgataaatttgaagataatctacgatgcaaatacttctggaggcccaaaggagtggaactgtgctttg

SEQ ID NO: 59631 - DNA, 120 bp, Artificial Sequence
  ENSG00000071909_22 (sequence is synthesized)
gcattcagcattatgctggaaaggtattatatgatgcttctggggttcttgagaaaaatagagacactctccctgccgatgtggttgtggtcctgagaacgtcagaaaacaagcttcttc

SEQ ID NO: 59632 - DNA, 120 bp, Artificial Sequence
  ENSG00000071909_23 (sequence is synthesized)
tctcaatccctctgaccaaaacaggtaatttggcccagacaagagctaggataacagtggcctcaagttctttgcctccacatttcagtgctgggaaagccaaggtggacactctggagg

SEQ ID NO: 59633 - DNA, 120 bp, Artificial Sequence
  ENSG00000071909_24 (sequence is synthesized)
tgatacggcatccggaagaaaccaccaacatgaagaggcaaactgtggcttcttacttccggtattctctgatggacctgctctccaaaatggtggttggacagccccactttgtgcgct

SEQ ID NO: 59634 - DNA, 120 bp, Artificial Sequence
  ENSG00000071909_25 (sequence is synthesized)
gcattaaacccaatgatgaccgagaggccctgcagttctctcgagagagggtgctggcccagctccgctccacagggattctggagacagtcagcatccgccgccagggctattcccacc

SEQ ID NO: 59635 - DNA, 120 bp, Artificial Sequence
  ENSG00000071909_26 (sequence is synthesized)
gcatcctttttgaagaatttgtgaaaaggtattattacttggcattcacagcacatcaaacacctcttgctagcaaagagagctgtgtggctatcttggaaaagtccagattagatcact

SEQ ID NO: 59636 - DNA, 120 bp, Artificial Sequence
  ENSG00000071909_27 (sequence is synthesized)
gggtactgggaaaaacaaaggtttttctcaaatattaccatgttgagcaattaaatttgctgcttcgagaagtcataggcagagtggttgtgctgcaggcatataccaaggggtggcttg

SEQ ID NO: 59637 - DNA, 120 bp, Artificial Sequence
  ENSG00000071909_28 (sequence is synthesized)
gagccaggagatacaaaagggtcagagagaagagagagaagggagccattgccatccagtcagcctggagaggatatgatgctcggaggaaatttaagaaaataagcaacagaaggaatg

SEQ ID NO: 59638 - DNA, 120 bp, Artificial Sequence
  ENSG00000071909_29 (sequence is synthesized)
agtctgctgctcataatcaagcaggggacacttcaaaccaaagcagtgggccacattcccccgtcgcagcaggtacgaggggaagtgccgaggttcaagactgcagcgagcctggtgacc

SEQ ID NO: 59639 - DNA, 120 bp, Artificial Sequence
  ENSG00000071909_30 (sequence is synthesized)
ataaagttctcaggggctctgtacatcgtaggagccattcacaagcagaatccaacaatggccgtacacagacttcaagcaactctcctgctgtcacagagaaaaatgggcattcacaag

SEQ ID NO: 59640 - DNA, 120 bp, Artificial Sequence
  ENSG00000071909_31 (sequence is synthesized)
cccagagttctccaaaagggtgcgatatcttcgcaggacatgcaaacaagcactcggtttctgggactgatttgctgtcttctcggatatgccatcctgctccagatcagcaaggattga

SEQ ID NO: 59641 - DNA, 120 bp, Artificial Sequence
  ENSG00000071909_32 (sequence is synthesized)
gtctctggggagcccctcaaaagcctggttcagaaaatggtcttgcacagaagcatcgaacacctcgccgacgatgtcagcagcccaaaatgctgagtagccctgaggacaccatgtact

SEQ ID NO: 59642 - DNA, 120 bp, Artificial Sequence
  ENSG00000071909_33 (sequence is synthesized)
ataaccagttaaatggaactctagaatatcaagggagcaagaggaagccaagaaaacttggccaaatcaaagtacttgatggggaagatgaatattacaaatctctgtcaccagtggact

SEQ ID NO: 59643 - DNA, 120 bp, Artificial Sequence
  ENSG00000071909_34 (sequence is synthesized)
gtatccctgaggagaacaactcagcccacccttcctttttttcttcatcctcaaaaggagactcttttgctcaacattaaattgtgcttcctaaccctaaatctgtccagagtaggaaca

SEQ ID NO: 59644 - DNA, 120 bp, Artificial Sequence
  ENSG00000071909_35 (sequence is synthesized)
ttcatggtaatcgactgtctgtcattgcgtaagaaagcactgatatggggtcagcttctttggacatatggtccatgcctgaaccttactgaaccacttgcagattccaaaacatcttat

SEQ ID NO: 59645 - DNA, 120 bp, Artificial Sequence
  ENSG00000071909_36 (sequence is synthesized)
cctatcctctaccactctcccacatgtgttgtgcagcctgagctgggcgctgccttcctttctcatcccatggggccctgtgggacactgagaacacctttacaatagtttaaacagtca

SEQ ID NO: 59646 - DNA, 120 bp, Artificial Sequence
  ENSG00000071909_37 (sequence is synthesized)
ttcatgcccccagtgtctaggaagataacagccagtctcaccccagtctaatcatggaccctgataatattgcttgatttttcctatcaagttacttttcaatccattcagaatctgccc

SEQ ID NO: 59647 - DNA, 120 bp, Artificial Sequence
  ENSG00000071909_38 (sequence is synthesized)
cagtggagacccaggagttcctttcctgcactcttctccatcctcccacctttgctgggcttttctatcactcccacctcccccagagtcagggctccattgctgagtgccccatcctgg

SEQ ID NO: 59648 - DNA, 120 bp, Artificial Sequence
  ENSG00000071909_39 (sequence is synthesized)
aggattggccccaagatctcctagaacaggataattgcctgtgtttaggcagataggcctaaatctttcagattctttctacaaggcaaataacccctctcttgttaattatgatgctga

SEQ ID NO: 59649 - DNA, 120 bp, Artificial Sequence
  ENSG00000071909_40 (sequence is synthesized)
gaaagcctctgtctctttatttcaccttgccaagacacccacactactttggtgatgaaaagaaaggaatgagagggaaagtttggacctgtcactttggtgacagggaaagtccaggtc

SEQ ID NO: 59650 - DNA, 120 bp, Artificial Sequence
  ENSG00000071909_41 (sequence is synthesized)
actttattctgtaactctccattcactggtcaaataactccatgaggctatcagtggctacagtggaaggacctgatcttgtccatctttgtgtgcacagagcctagcacagggcttggt

SEQ ID NO: 59651 - DNA, 120 bp, Artificial Sequence
  ENSG00000071909_42 (sequence is synthesized)
agagggtatatctagtgaatggagaatacatggagaaacttaactaagttacacaagcatatctgacaggaatgttaccttcaattgtatgttacatatgattagtcacttttcatacac

SEQ ID NO: 59652 - DNA, 120 bp, Artificial Sequence
  ENSG00000071909_43 (sequence is synthesized)
tataacctctgatttttcactcaagtttgggctgattatattgtaatgatgttagataatactcaacatgattcagtatgacaaacttttttgagcacctactttatataaaacatgaca

SEQ ID NO: 59653 - DNA, 120 bp, Artificial Sequence
  ENSG00000071909_44 (sequence is synthesized)
aattgcagtgtgatgtaatcaaaaacaaagaagccctataagaccatttctctagaacagatgttcttaatatttttcttactctaaaatatgtggtagatagtatgcaagaaaagccgg

SEQ ID NO: 59654 - DNA, 120 bp, Artificial Sequence
  ENSG00000071909_45 (sequence is synthesized)
tggataatgaaatggtaatggataatgcaacaagtatttctaccactatggtattttggtgaactggagagagtggaaccaaaaagcgtttccagggctgggcgtggtggctcatgcctg

SEQ ID NO: 59655 - DNA, 120 bp, Artificial Sequence
  ENSG00000071909_46 (sequence is synthesized)
tctggggttcttgagaaaaatagagacactctccctgccgatgtggttgtggtcctgagaacgtcagaaaacaagcttcttcagcagctcttctcaatccctctgaccaaaacagctccc

SEQ ID NO: 59656 - DNA, 120 bp, Artificial Sequence
  ENSG00000071909_47 (sequence is synthesized)
actttccagactattgaagagattaaaaagcatgaggagtagaataaggaggcccaaggtcaccaggagacagggctcctcccaggtttctgcagcccccttctgcttacacctggctgc

SEQ ID NO: 59657 - DNA, 120 bp, Artificial Sequence
  ENSG00000071909_48 (sequence is synthesized)
atctggctgtggagctgcctgtgcctgagaggcacactctcactgcaaggttctcagtgaccttgtggtaaaaggaggcagccacagtcaatatgaattctctctgttctcttctcatgc

SEQ ID NO: 59658 - DNA, 120 bp, Artificial Sequence
  ENSG00000071909_49 (sequence is synthesized)
ttatgcagccagccttttgcctgcagatgggccacttcagacatgatgaaatgttctttgtaatacttcctattgataggaaatcctctgaagattttaggtgtgaaaatttgaagtagc

SEQ ID NO: 59659 - DNA, 120 bp, Artificial Sequence
  ENSG00000071909_50 (sequence is synthesized)
agcaacactgctttctaacccttcggctgagacttttcaaactgaatgatctagatagaaaaacattaaaaggaaggatgttataacatggtttcaaggcatattttcctgtttgggtaa

SEQ ID NO: 59660 - DNA, 120 bp, Artificial Sequence
  ENSG00000071909_51 (sequence is synthesized)
tgttccacttgcaactagtaaactgagagaaaagcttaaaaggctcaggggaagaaagaaacagagtttcaaaaagaacttgaaaattcatttttgtctttgaatcatgaattctgactt

SEQ ID NO: 59661 - DNA, 120 bp, Artificial Sequence
  ENSG00000071909_52 (sequence is synthesized)
ccaaatagtagtttggggtgttaaagaagttatgaacttgggagaaactaggaaaaataagaatagcaccagagggaacattctctgaacctcaaagtttgatttttgcttcagaaccta

SEQ ID NO: 59662 - DNA, 120 bp, Artificial Sequence
  ENSG00000071909_53 (sequence is synthesized)
acacctaaattttgagagaaataaccttgaagaaaatcttgttatcagagttttgaaagggagcacattaataggccttttatgaagataaataatgaaatgaggtatttaaagatctca

SEQ ID NO: 59663 - DNA, 120 bp, Artificial Sequence
  ENSG00000071909_54 (sequence is synthesized)
gaaattgtaattttacaagtaaaataaatatagccaatttttcaatagctgaacttcacccaaaaggtaatgtttataagtagagcagaaaaaatgcagataaattttattttattgttt

SEQ ID NO: 59664 - DNA, 120 bp, Artificial Sequence
  ENSG00000071909_55 (sequence is synthesized)
aaaaaataatgtgtagaatatataaattttttatgttactgttaatatacgagtgcttttggaagtttcacttttgtcactgattgtctacttttggtttgataatatgagctgcttttc

SEQ ID NO: 59665 - DNA, 120 bp, Artificial Sequence
  ENSG00000071909_56 (sequence is synthesized)
aaattgttgaatggaaatgttcataactccctgcttgtccgtgcacaatgtaattctaaacctggcttgtttctcatttaaatatatctataaataaacttaaaaagaaaacagaagtaa

SEQ ID NO: 59666 - DNA, 120 bp, Artificial Sequence
  ENSG00000071909_57 (sequence is synthesized)
gtctgaactttctgttgtagaccatgtcctcctaaggtcatttgaaaatttaattgtttgtgtagctatgggatgaagttcagggagcattcagttgctgtgactatgatcctgtgctgt

SEQ ID NO: 59667 - DNA, 120 bp, Artificial Sequence
  ENSG00000071909_58 (sequence is synthesized)
gtttatttagatagcccctagaatgatgaagagaaaaggatttggatttttgcaataaagctctttatattgtagccttaatgatggattatatcagctgaaaatattttgtttgataaa

SEQ ID NO: 59668 - DNA, 120 bp, Artificial Sequence
  ENSG00000071909_59 (sequence is synthesized)
atttgataaaatatttcaattaacccttaagaagttgtttgttcttcataagaaagagcttcatttagggaaatagtgaagttaatatagcttgaattctaaatttgaagtctgtgataa

SEQ ID NO: 59669 - DNA, 120 bp, Artificial Sequence
  ENSG00000071909_60 (sequence is synthesized)
tccccatttaaaatatgcatgtttaatagagctgttaattgcactggacctgtttatgctgagtctaactctggggattgttaccttcaatgtctaaatcactaaagtgtaatacaaagt

SEQ ID NO: 59670 - DNA, 120 bp, Artificial Sequence
  ENSG00000071909_61 (sequence is synthesized)
ggttaattctgtatttatgccacctaggttttaagtgcagtgctttgagaaattaacttaccattctgtcggtgctctatcagtaggaacagcctattaaataaaattttaaatacaaca

SEQ ID NO: 59671 - DNA, 120 bp, Artificial Sequence
  ENSG00000071967_0 (sequence is synthesized)
gccactacccagagggctgccgccgcctctccaagttcttgtggcccccgcggtgcggagtatggggcgctgatggccatggagggctactggcgcttcctggcgctgctggggtcggca

SEQ ID NO: 59672 - DNA, 120 bp, Artificial Sequence
  ENSG00000071967_1 (sequence is synthesized)
ctgctcgtcggcttcctgtcggtgatcttcgccctcgtctgggtcctccactaccgagaggggcttggctgggatgggagcgcactagagtttaactggcacccagtgctcatggtcacc

SEQ ID NO: 59673 - DNA, 120 bp, Artificial Sequence
  ENSG00000071967_2 (sequence is synthesized)
ggcttcgtcttcatccagggcatcgccatcatcgtctacagactgccgtggacctggaaatgcagcaagctcctgatgaaatccatccatgcagggttaaatgcagttgctgccattctt

SEQ ID NO: 59674 - DNA, 120 bp, Artificial Sequence
  ENSG00000071967_3 (sequence is synthesized)
gcaattatctctgtggtggccgtgtttgagaaccacaatgttaacaatatagccaatatgtacagtctgcacagctgggttggactgatagctgtcatatgctatttgttacagcttctt

SEQ ID NO: 59675 - DNA, 120 bp, Artificial Sequence
  ENSG00000071967_4 (sequence is synthesized)
tcaggtttttcagtctttctgcttccatgggctccgctttctctccgagcatttctcatgcccatacatgtttattctggaattgtcatctttggaacagtgattgcaacagcacttatg

SEQ ID NO: 59676 - DNA, 120 bp, Artificial Sequence
  ENSG00000071967_5 (sequence is synthesized)
ggattgacagagaaactgattttttccctgagagatcctgcatacagtacattcccgccagaaggtgttttcgtaaatacgcttggccttctgatcctggtgttcggggccctcattttt

SEQ ID NO: 59677 - DNA, 120 bp, Artificial Sequence
  ENSG00000071967_6 (sequence is synthesized)
tggatagtcaccagaccgcaatggaaacgtcctaaggagccaaattctaccattcttcatccaaatggaggcactgaacagggagcaagaggttccatgccagcctactctggcaacaac

SEQ ID NO: 59678 - DNA, 120 bp, Artificial Sequence
  ENSG00000071967_7 (sequence is synthesized)
atggacaaatcagattcagagttaaacagtgaagtagcagcaaggaaaagaaacttagctctggatgaggctgggcagagatctaccatgtaaaatgttgtagagatagagccatataac

SEQ ID NO: 59679 - DNA, 120 bp, Artificial Sequence
  ENSG00000071967_8 (sequence is synthesized)
gtcacgtttcaaaactagctctacagttttgcttctcctattagccatatgataattgggctatgtagtatcaatatttactttaatcacaaaggatggtttcttgaaataatttgtatt

SEQ ID NO: 59680 - DNA, 120 bp, Artificial Sequence
  ENSG00000071967_9 (sequence is synthesized)
gattgaggcctatgaactgacctgaattggaaaggatgtgattaatataaataatagcagatataaattgtggttatgttacctttatcttgttgaggaccacaacattagcacggtgcc

SEQ ID NO: 59681 - DNA, 120 bp, Artificial Sequence
  ENSG00000071967_10 (sequence is synthesized)
ttgtgcagaatagatactcaatatgtgaatatgtgtctactagtagttaattggataaactggcagcatccctggcctgttgtcatgcagtcatttcctgttaattctgggagacaatga

SEQ ID NO: 59682 - DNA, 120 bp, Artificial Sequence
  ENSG00000071967_11 (sequence is synthesized)
tttcacaactagcgggaagcagtcctaaaagtttaaaatccgataaggaatatctgggacagggtttagatcatgactctacacagataccatgatgagagtatattaaagaaatttagg

SEQ ID NO: 59683 - DNA, 120 bp, Artificial Sequence
  ENSG00000071967_12 (sequence is synthesized)
aaagcacctggttcctttctccccatgcctgccttctgctccctccccagctggtttgggctcaaattgtccctggagactagggtttatgttagggtattgatagattagagcaggtgg

SEQ ID NO: 59684 - DNA, 120 bp, Artificial Sequence
  ENSG00000071967_13 (sequence is synthesized)
ttgaagagatcttctctggtcagacttggaagaatttccaaaactgaagttagccccaagacttccctagggttgatgtactttatgatccagatgctaaacttcttagaatgaaaatat

SEQ ID NO: 59685 - DNA, 120 bp, Artificial Sequence
  ENSG00000071967_14 (sequence is synthesized)
gcttcaacacttaagtagcatacactgccctacaaacctcagagagcacttttccccaagttcttgtttttatttttgaaagtactcacacagcacttactatgctccaaacactcctct

SEQ ID NO: 59686 - DNA, 120 bp, Artificial Sequence
  ENSG00000071967_15 (sequence is synthesized)
aagcactttacacatattagctcattcagtccccagacagacgggatgaagtaggtattgttactgttcccattttacaggtgagagatttgaagcctggggaggctagtaactcacccc

SEQ ID NO: 59687 - DNA, 120 bp, Artificial Sequence
  ENSG00000071967_16 (sequence is synthesized)
aaggtcacacggctcatacatggtgggactgagactcagatgcaggcagtctggcacctcagtctggattctaaccatttcactaagctatttttgtcttgtactactttgacccacccc

SEQ ID NO: 59688 - DNA, 120 bp, Artificial Sequence
  ENSG00000071967_17 (sequence is synthesized)
attaaagggatgctttttaccttttgctgtttgctgtggcagattccccagataaccaaggaaaaggggccacccatacctggaaataggccatagggcccctactactgccaacaagcc

SEQ ID NO: 59689 - DNA, 120 bp, Artificial Sequence
  ENSG00000071967_18 (sequence is synthesized)
atggcctaccttgacacttgtttgatcttaaaattgtgtcttggtaacaaaagatttggacaggcatatctgtagctttcaagttaattaattgcaatatttttttcttcaggattttag

SEQ ID NO: 59690 - DNA, 120 bp, Artificial Sequence
  ENSG00000071967_19 (sequence is synthesized)
ctgctgaacaactttcagtttggagctaaaagagacctgtctcatggtctgcccttccctggggcaatagctagggtctttcctgatttttatggaattttaggggatattttgagcttt

SEQ ID NO: 59691 - DNA, 120 bp, Artificial Sequence
  ENSG00000071967_20 (sequence is synthesized)
gggttctcagtagtgaattgagacttggaggtgacttttcatgtttggagtatcatctctgtctgggatctgggctgacaaattaaaacctagagtagtgcttatgctgaaatgatactt

SEQ ID NO: 59692 - DNA, 120 bp, Artificial Sequence
  ENSG00000071967_21 (sequence is synthesized)
ttcattttttggttgatttttttgccttcccttcaattttaaactgaagcattttaatatgggtagaaactctacaccaaatacactaaacattttggtgcttagtggatttctttttag

SEQ ID NO: 59693 - DNA, 120 bp, Artificial Sequence
  ENSG00000071967_22 (sequence is synthesized)
gtaactggtacttacttccaaagactgaatacaagccacactccatcatatcccttaaacttcatgaaaaaccattcaagatccccttgctgcaacactgttctcttcttctctactaaa

SEQ ID NO: 59694 - DNA, 120 bp, Artificial Sequence
  ENSG00000071967_23 (sequence is synthesized)
ttctatttccaaaattggtaatagagccagaaggatccccagtacccagccctctgcctggcacaaagtggtagcacaattaaattcagtatgggtggagcatggtacagtcttggtgcc

SEQ ID NO: 59695 - DNA, 120 bp, Artificial Sequence
  ENSG00000071967_24 (sequence is synthesized)
atagaaggagtagttgcatagtcacacatcatttgataagttggatgttccattacatagaggaacacaaaattccagggtttttggaggaagggattagatagtgactaagccgccaga

SEQ ID NO: 59696 - DNA, 120 bp, Artificial Sequence
  ENSG00000071967_25 (sequence is synthesized)
attgaggtggccattcctttttgtataggctaagaaacaggttatcagtgaaaagttaattatggctttggcactagaatagcactgttgcaaagtatttaagcaccccccatctcagcc

SEQ ID NO: 59697 - DNA, 120 bp, Artificial Sequence
  ENSG00000071967_26 (sequence is synthesized)
ctttattttatctttcatgtgggctaatgtgaggataatcttacagatattataggaatttcttttctatctttatgaaaacaacgtatataaaatatatctagaaaacctttgtttgag

SEQ ID NO: 59698 - DNA, 120 bp, Artificial Sequence
  ENSG00000071967_27 (sequence is synthesized)
actcttatttaatgggcttttgattctaatgataattgtacctttatctttcaaaagctgatatttcctacctaagcatctcccgagaaaaatatctcattaaaaagcccataaataata

SEQ ID NO: 59699 - DNA, 120 bp, Artificial Sequence
  ENSG00000071967_28 (sequence is synthesized)
ggggagaagaaagccttaggtatcaattccaaaacagtgattgaaatttcccaaaataattatggcttctgtcatctccagagataatctggcttggtttaccccataatctaatttcag

SEQ ID NO: 59700 - DNA, 120 bp, Artificial Sequence
  ENSG00000071967_29 (sequence is synthesized)
aaaagaaagctttattttaacactcatctgaatcaacattaaagccttttctctcaaagcgtttattgagaaactcaaatgaatatactttttgaattactgtcatcaaaagtgtacggc

SEQ ID NO: 59701 - DNA, 120 bp, Artificial Sequence
  ENSG00000071967_30 (sequence is synthesized)
ttcctgtgctgcttgtgtcaaatggaacctgccctctaaagcactttctttcctttacttgcgtggtttcatgtaagctgtgctgtttagaaacaacatctcagactttacaaagaaatg

SEQ ID NO: 59702 - DNA, 120 bp, Artificial Sequence
  ENSG00000071967_31 (sequence is synthesized)
acaaagaaggcaattgcactttttaagggatatcgacaagcagtttctgttttctaaaggacaaaatacagagtgtgtgtcatttttaattagattctttcccctgctgagttggaaatt

SEQ ID NO: 59703 - DNA, 120 bp, Artificial Sequence
  ENSG00000071967_32 (sequence is synthesized)
ccagtgcagcactgattgaccacagttgccaatctaaaagcacaaagacagaagtaaagctttatgctaattttatttcaatatgatagaaaatttatcttggtatgtccttttttagat

SEQ ID NO: 59704 - DNA, 120 bp, Artificial Sequence
  ENSG00000071967_33 (sequence is synthesized)
aactccagcaggaaactgtaactgctatgtctttaggaaaatgtagaagaaagaacattattgttctttaattcctacaaggtactcgaaaaccttaagtgaaaaagatttctatctttt

SEQ ID NO: 59705 - DNA, 120 bp, Artificial Sequence
  ENSG00000071967_34 (sequence is synthesized)
aagtgaaaaagatttctatctttttatcttagcgcatttatggaaaaaatattaactatcctgaatattttataattttgtaggaaaaatatgcatctattttttcttgacttcttttat

SEQ ID NO: 59706 - DNA, 120 bp, Artificial Sequence
  ENSG00000071967_35 (sequence is synthesized)
ccatttctgagttggggccagctccccacccccaagaggccccacattccgggccagcagcccagaaagtccctccccgcaggcggagacagccccaagaagtcgacgccccggtcccgc

SEQ ID NO: 59707 - DNA, 89 bp, Artificial Sequence
  ENSG00000071967_36 (sequence is synthesized)
atctcagctcactgcaacctccatctccaggactcaagcaatcctcctgcctcagcatccacagtagctgggaccacagacgagatggg

SEQ ID NO: 59708 - DNA, 120 bp, Artificial Sequence
  ENSG00000071967_37 (sequence is synthesized)
agaaacttgagcccgggcgcgatgccggagcgccgcgcagtcgggccgctgcagcccacgcgccccggaaagtcgcccctgtggaccgagcctgcgcgatcgggggcgcggaaacacttt

SEQ ID NO: 59709 - DNA, 120 bp, Artificial Sequence
  ENSG00000071967_38 (sequence is synthesized)
cgcctcagccttttgctgaacttgcttccaggctgcagatgaggaggggaaggcagcggggaaaagattgccggagcgagaatttgcccgtatttgtaacatcctcggccctggccatca

SEQ ID NO: 59710 - DNA, 65 bp, Artificial Sequence
  ENSG00000071967_39 (sequence is synthesized)
aaactgagacatttttaagaagaaaggagacaacaggcataaatcagattgttaagattaggaat

SEQ ID NO: 59711 - DNA, 120 bp, Artificial Sequence
  ENSG00000071991_0 (sequence is synthesized)
gcaatggggcacatcgagagtttgctgagaagactgtgaagcaaaaagaagaaagtttttcctactcttccttatgtgtccaacacgaagtttgctgttcagttttcacagaacttctag

SEQ ID NO: 59712 - DNA, 120 bp, Artificial Sequence
  ENSG00000071991_1 (sequence is synthesized)
aagttgaagttacaaaggtatatagaaggtacacagaatcagaaaagattataaaagaaagcaagatttttgttagtgacgtcctgtttcctctgaagagtaatagttggaatcaaaaga

SEQ ID NO: 59713 - DNA, 120 bp, Artificial Sequence
  ENSG00000071991_2 (sequence is synthesized)
gtcaacgcaatgaactgttatttactgctgcgttttatgttgggaattcctctcctatggccttgtcttggagcaacagaaaactctcaaacaaagaaagtcaagcagccagtgcgatct

SEQ ID NO: 59714 - DNA, 120 bp, Artificial Sequence
  ENSG00000071991_3 (sequence is synthesized)
catttgagagtgaagcgtggctgggtgtggaaccaattttttgtaccagaggaaatgaatacgactagtcatcacatcggccagctaagatctgatttagacaatggaaacaattctttc

SEQ ID NO: 59715 - DNA, 120 bp, Artificial Sequence
  ENSG00000071991_4 (sequence is synthesized)
cagtacaagcttttgggagctggagctggaagtacttttatcattgatgaaagaacaggtgacatatatgccatacagaagcttgatagagaggagcgatccctctacatcttaagagcc

SEQ ID NO: 59716 - DNA, 120 bp, Artificial Sequence
  ENSG00000071991_5 (sequence is synthesized)
caggtaatagacatcgctactggaagggctgtggaacctgagtctgagtttgtcatcaaagtttcggatatcaatgacaatgaaccaaaattcctagatgaaccttatgaggccattgta

SEQ ID NO: 59717 - DNA, 120 bp, Artificial Sequence
  ENSG00000071991_6 (sequence is synthesized)
ccagagatgtctccagaaggaacattagttatccaggtgacagcaagtgatgctgacgatccctcaagtggtaataatgctcgtctcctctacagcttacttcaaggccagccatatttt

SEQ ID NO: 59718 - DNA, 120 bp, Artificial Sequence
  ENSG00000071991_7 (sequence is synthesized)
tctgttgaaccaacaacaggagtcataagaatatcttctaaaatggatagagaactgcaagatgagtattgggtaatcattcaagccaaggacatgattggtcagccaggagcgttgtct

SEQ ID NO: 59719 - DNA, 120 bp, Artificial Sequence
  ENSG00000071991_8 (sequence is synthesized)
ggaacaacaagtgtattaattaaactttcagatgttaatgacaataagcctatatttaaagaaagtttataccgcttgactgtctctgaatctgcacccactgggacttctataggaaca

SEQ ID NO: 59720 - DNA, 120 bp, Artificial Sequence
  ENSG00000071991_9 (sequence is synthesized)
atcatggcatatgataatgacataggagagaatgcagaaatggattacagcattgaagaggatgattcgcaaacatttgacattattactaatcatgaaactcaagaaggaatagttata

SEQ ID NO: 59721 - DNA, 120 bp, Artificial Sequence
  ENSG00000071991_10 (sequence is synthesized)
ttaaaaaagaaagtggattttgagcaccagaaccactacggtattagagcaaaagttaaaaaccatcatgttcctgagcagctcatgaagtaccacactgaggcttccaccactttcatt

SEQ ID NO: 59722 - DNA, 120 bp, Artificial Sequence
  ENSG00000071991_11 (sequence is synthesized)
aagatccaggtggaagatgttgatgagcctcctcttttcctccttccatattatgtatttgaagtttttgaagaaaccccacagggatcatttgtaggcgtggtgtctgccacagaccca

SEQ ID NO: 59723 - DNA, 120 bp, Artificial Sequence
  ENSG00000071991_12 (sequence is synthesized)
gacaataggaaatctcctatcaggtattctattactaggagcaaagtgttcaatatcaatgataatggtacaatcactacaagtaactcactggatcgtgaaatcagtgcttggtacaac

SEQ ID NO: 59724 - DNA, 120 bp, Artificial Sequence
  ENSG00000071991_13 (sequence is synthesized)
ctaagtattacagccacagaaaaatacaatatagaacagatctcttcgatcccactgtatgtgcaagttcttaacatcaatgatcatgctcctgagttctctcaatactatgagacttat

SEQ ID NO: 59725 - DNA, 120 bp, Artificial Sequence
  ENSG00000071991_14 (sequence is synthesized)
gtttgtgaaaatgcaggctctggtcaggtaattcagactatcagtgcagtggatagagatgaatccatagaagagcaccatttttactttaatctatctgtagaagacactaacaattca

SEQ ID NO: 59726 - DNA, 120 bp, Artificial Sequence
  ENSG00000071991_15 (sequence is synthesized)
agttttacaatcatagataatcaagataacacagctgtcattttgactaatagaactggttttaaccttcaagaagaacctgtcttctacatctccatcttaattgccgacaatggaatc

SEQ ID NO: 59727 - DNA, 120 bp, Artificial Sequence
  ENSG00000071991_16 (sequence is synthesized)
ccgtcacttacaagtacaaacacccttaccatccatgtctgtgactgtggtgacagtgggagcacacagacctgccagtaccaggagcttgtgctttccatgggattcaagacagaagtc

SEQ ID NO: 59728 - DNA, 120 bp, Artificial Sequence
  ENSG00000071991_17 (sequence is synthesized)
atcattgctattctcatttgcattatgatcatatttgggtttatttttttgactttgggtttaaaacaacggagaaaacagattctatttcctgagaaaagtgaagatttcagagagaat

SEQ ID NO: 59729 - DNA, 120 bp, Artificial Sequence
  ENSG00000071991_18 (sequence is synthesized)
atattccaatatgatgatgaagggggtggagaagaagatacagaggcctttgatatagcagagctgaggagtagtaccataatgcgggaacgcaagactcggaaaaccacaagcgctgag

SEQ ID NO: 59730 - DNA, 120 bp, Artificial Sequence
  ENSG00000071991_19 (sequence is synthesized)
atcaggagcctatacaggcagtctttgcaagttggccccgacagtgccatattcaggaaattcattctggaaaagctcgaagaagctaatactgatccgtgtgcccctccttttgattcc

SEQ ID NO: 59731 - DNA, 120 bp, Artificial Sequence
  ENSG00000071991_20 (sequence is synthesized)
ctccagacctacgcttttgagggaacagggtcattagctggatccctgagctccttagaatcagcagtctctgatcaggatgaaagctatgattaccttaatgagttgggacctcgcttt

SEQ ID NO: 59732 - DNA, 120 bp, Artificial Sequence
  ENSG00000071991_21 (sequence is synthesized)
aaaagattagcatgcatgtttggttctgcagtgcagtcaaataattagggctttttaccatcaaaatttttaaaagtgctaatgtgtattcgaacccaatggtagtcttaaagagttttg

SEQ ID NO: 59733 - DNA, 120 bp, Artificial Sequence
  ENSG00000071991_22 (sequence is synthesized)
tgccctggctctatggcggggaaagccctagtctatggagttttctgatttccctggagtaaatactccatggttattttaagctacctacatgctgtcattgaacagagatgtggggag

SEQ ID NO: 59734 - DNA, 120 bp, Artificial Sequence
  ENSG00000071991_23 (sequence is synthesized)
aaatgtaaacaatcagctcacaggcatcaatacaaccagatttgaagtaaaataatttaggaagatattaaaagtagatgagaggacacaagatgtagtcgatccttatgcgattatatc

SEQ ID NO: 59735 - DNA, 120 bp, Artificial Sequence
  ENSG00000071991_24 (sequence is synthesized)
attatttacttaggaaagagtaaaaataccaaacgagaaaatttaaaggagcaaaaatttgcaagtcaaatagaaatgtacaaatcgagataacatttacatttctatcatattgacatg

SEQ ID NO: 59736 - DNA, 120 bp, Artificial Sequence
  ENSG00000071991_25 (sequence is synthesized)
aaaattgaaaatgtatagtcagagaaattttcatgaattattccatgaagtattgtttcctttatttaaaaaaaaaaaaaaaaaaaaagaatgctaggtaatcttcgtagaaaactagaa

SEQ ID NO: 59737 - DNA, 120 bp, Artificial Sequence
  ENSG00000071991_26 (sequence is synthesized)
aggctttctggggatcacagaacttttgtatgaataaaagccttataaaaccagctctggcatatgactaaaatattcctctactatttttcaatgtcatctaatgcaaacgctcaacct

SEQ ID NO: 59738 - DNA, 120 bp, Artificial Sequence
  ENSG00000071991_27 (sequence is synthesized)
ttttaaatggttaatgtgagaaaggcactgaattaagatatcttagtgttattttatttactcaattttcatctttcacactgtaagaataaaatgtttttgtggttaagttcctgatac

SEQ ID NO: 59739 - DNA, 120 bp, Artificial Sequence
  ENSG00000071991_28 (sequence is synthesized)
tatatagagataaactttaaaactttaacacctaggataatgtgggtgattacataaatgtttaaaaacatttaccttatatggaaagcagatttctgactaagatgccatgattcattc

SEQ ID NO: 59740 - DNA, 120 bp, Artificial Sequence
  ENSG00000071991_29 (sequence is synthesized)
tagtttgatattttaaaactttgccaagagcactctttaaaactgatttcaaatttgaacagatacttggtgtatacaaattaatcagagttatatagtataaatttgtattatttttga

SEQ ID NO: 59741 - DNA, 120 bp, Artificial Sequence
  ENSG00000071991_30 (sequence is synthesized)
tattacaactttgtattaaaaaggaaaatatatttaggtgtttgtcatagattttttttcatatgcaactcaaaacacattcttatgtcaaaatacaatagcaaaatacaagtcaatatt

SEQ ID NO: 59742 - DNA, 120 bp, Artificial Sequence
  ENSG00000071991_31 (sequence is synthesized)
tactcataattaaatgcaaactttatgaaactggtggaaagtgtggaaaaatttaagtaaatttttacctctactaaaaattatttagacaacttaaaggaatactggattcaaacttca

SEQ ID NO: 59743 - DNA, 120 bp, Artificial Sequence
  ENSG00000071991_32 (sequence is synthesized)
gttactattcactgtaaatattatgatcaactgaactgacttaccattcatgggataaaacatgatacaattctcagtatttgcttttctgttaagagcttggaatatgactgatgcttc

SEQ ID NO: 59744 - DNA, 120 bp, Artificial Sequence
  ENSG00000071991_33 (sequence is synthesized)
agtgtcatttttttattattgaatataaaattaggtgcaatagatacatttattgtagccttaagaaggaaatcaatgctaagctgttgggcataaaactttacagtaacattagataac

SEQ ID NO: 59745 - DNA, 120 bp, Artificial Sequence
  ENSG00000071991_34 (sequence is synthesized)
aagataataaaacactttaattttaatcgaccttttaagaatgatctttattattctatccaaatcaaggtagacttcaaaatttatggtttgaacaggaagaaagtagtgaatacaaaa

SEQ ID NO: 59746 - DNA, 120 bp, Artificial Sequence
  ENSG00000071991_35 (sequence is synthesized)
ttcttaaaattggttcatatgatcatttttttattaatagcatgtgagactaagctgaaccaaactggccatatatgttaaatcaaataatttgagtaattttgaaatattgatgaagta

SEQ ID NO: 59747 - DNA, 120 bp, Artificial Sequence
  ENSG00000071991_36 (sequence is synthesized)
gttaaatggttataatatattttattggtactttgaaatttaaacatctatatcacataataaagaaagtttttcatcaatctgaaacaggcaccattaaattggtgacacaaatattat

SEQ ID NO: 59748 - DNA, 120 bp, Artificial Sequence
  ENSG00000071991_37 (sequence is synthesized)
catttcacaaaagcttgagaaaaccagatttgaagtgaaataatttaggaagatattaaaagtggatgagaggacataagatgtagtcaatccttaacgcaatgataccattattaggaa

SEQ ID NO: 59749 - DNA, 120 bp, Artificial Sequence
  ENSG00000071991_38 (sequence is synthesized)
agaggaaaaataccaaacaagagaaaatttaaaggagcaaaaatttgcaagtcaaatagaaatgcacaaatcgagagaacatttacatttctatcacattgacatgaaaattgaaaatgt

SEQ ID NO: 59750 - DNA, 120 bp, Artificial Sequence
  ENSG00000071991_39 (sequence is synthesized)
atagtcagagaaattttcatgaattattccatgaagtgttgtttcctttatttaaaaagaatgctaggtaatcttagtagaaaactaaaaagtatgataaacaacagatggaagaattca

SEQ ID NO: 59751 - DNA, 120 bp, Artificial Sequence
  ENSG00000071991_40 (sequence is synthesized)
tggaaaatagacgagaaaaagtaaataaggctttctggagatgacggaaattttgtatgaataaaagccttataaacaatgaatacatttggataaacaactcattaaaatgcacattaa

SEQ ID NO: 59752 - DNA, 120 bp, Artificial Sequence
  ENSG00000071991_41 (sequence is synthesized)
tggaatacctgtacaaatagttttaatacttgtgtccagtggcactaaagagatatattaaaatagattctggttgagttgattataagattgtcaatcataggatacacagggaaagca

SEQ ID NO: 59753 - DNA, 120 bp, Artificial Sequence
  ENSG00000071991_42 (sequence is synthesized)
cagacacgattgctcatctctttggtagtctaaaatatgttccttttaaccacatcaaaagatactatctgattctaatacagaaggtgcaacttcctaggaattatactttgtattata

SEQ ID NO: 59754 - DNA, 120 bp, Artificial Sequence
  ENSG00000071991_43 (sequence is synthesized)
ttcaataattattttatgttttgcatcacatgggtgttgcaagaacacagctcttaaactaaaaaggcattacattaagaatttatttttgtaaattttaataaactctaaattaatgca

SEQ ID NO: 59755 - DNA, 120 bp, Artificial Sequence
  ENSG00000071991_44 (sequence is synthesized)
aaatatttatgaaaatagcacagcttcacattaatacccacagtacttaaatatctcccttagttgactcacagctttgtatgtaagcttcaaatttttaatggtaaaaataagaaaatt

SEQ ID NO: 59756 - DNA, 120 bp, Artificial Sequence
  ENSG00000071991_45 (sequence is synthesized)
aggactagcgaactgctagttgttccctcagtgcatgtgcttgagcctaacagatctttgtttgaattagttactttcaattaagcgaacatataatatttgttaaactgcttaatcttt

SEQ ID NO: 59757 - DNA, 120 bp, Artificial Sequence
  ENSG00000071991_46 (sequence is synthesized)
ccagatctcactttgtaaaatgacgtccaatcaacctatttcacatggttgttatgaagaattaataataagatatgtaaaaccagcagcaccaatagtgcctgacaaaatataactgct

SEQ ID NO: 59758 - DNA, 120 bp, Artificial Sequence
  ENSG00000071991_47 (sequence is synthesized)
caataaataacagtgaattattataacaacagctaatggtattctattggaacacatggtctgtttcttttccaattctgagtgatctcaacagcctcacggcacattgaaaataaaagt

SEQ ID NO: 59759 - DNA, 120 bp, Artificial Sequence
  ENSG00000071991_48 (sequence is synthesized)
caacttcctcaccttccccataggccatggactttcccatctctacccacttgtgcagtttctcctctttcctctctcctcctcagttactaaagcaatcttccttcaaacacttctatt

SEQ ID NO: 59760 - DNA, 120 bp, Artificial Sequence
  ENSG00000071991_49 (sequence is synthesized)
ttccattacatcacttcattcaggttggtgatcagctgcaacttcctcagaaagaccactgctgcttccagtgaccctggctttgtcttgctttgtattagattactcagctccctggta

SEQ ID NO: 59761 - DNA, 120 bp, Artificial Sequence
  ENSG00000071991_50 (sequence is synthesized)
ttattgttgtctttatcgcttattagaatgtaacccttaatgggcaagaaattgtcagtcttgttcatttatcatcgtataaaaaatgtttctagcacacagaaagtgaccaataaatat

SEQ ID NO: 59762 - DNA, 120 bp, Artificial Sequence
  ENSG00000071991_51 (sequence is synthesized)
ttctggaattaatgtagtaatgaatccaatctattttacttagtgacttgtagaaattcttttggtttccattgactatttttatagaatattaatatggaattaaagtatttttcaaaa

SEQ ID NO: 59763 - DNA, 120 bp, Artificial Sequence
  ENSG00000071991_52 (sequence is synthesized)
gttgaagttacaaaggacttccacagctatattaaataggagtggtgagagtcagcatccttgtcttgttccagttctcaagggaaatgtttccagcgcttgcccattcagtatcatgtt

SEQ ID NO: 59764 - DNA, 120 bp, Artificial Sequence
  ENSG00000071991_53 (sequence is synthesized)
gtattccttgaagattacatttcaaagagatggtcaccattacttgataaatacaatcctggatcctaaagcttccaagaaacttgttgaacttttgaaagatttccatacgcttcaaag

SEQ ID NO: 59765 - DNA, 89 bp, Artificial Sequence
  ENSG00000071991_54 (sequence is synthesized)
aacttgttgaacttttgaaagatttccatacgcttcaaagggacaaagaaaaaacttacatacaaagctttttttttccctctctctct

SEQ ID NO: 59766 - DNA, 120 bp, Artificial Sequence
  ENSG00000071991_55 (sequence is synthesized)
aaatattttcccttgctttcaacaagtacaaggcctctaatttttaatttgttttgttctttcaaattatcattgcaaatagtacatatattttaaataaaaacactaaaacaaactaaa

SEQ ID NO: 59767 - DNA, 80 bp, Artificial Sequence
  ENSG00000071994_0 (sequence is synthesized)
gatttccgccttccgacccagctgtgggctgcgccccacgccagcccgcgccccgcatggctgccgccggggccaggcct

SEQ ID NO: 59768 - DNA, 80 bp, Artificial Sequence
  ENSG00000071994_1 (sequence is synthesized)
gtggcgactgcgcagcgagcagttccccagcaaggtgggcgggcggccggcatggctgggcgcggccgggctgccggggc

SEQ ID NO: 59769 - DNA, 120 bp, Artificial Sequence
  ENSG00000071994_2 (sequence is synthesized)
tgcaggtgtatgcgccgctgcctggccgcccggacgccttccaccgctgcatcttcctcttctgctgccgcgagcagccgtgctgtgccggcctgcgagtttttaggaatcaactaccca

SEQ ID NO: 59770 - DNA, 120 bp, Artificial Sequence
  ENSG00000071994_3 (sequence is synthesized)
ggaaaaacgatttttactcatatgagccaccttctgagaatcctcccccagaaacaggagaatcagtgtgtctccagcttaagtctggtgctcatctctgcagggtttgtggctgtttag

SEQ ID NO: 59771 - DNA, 120 bp, Artificial Sequence
  ENSG00000071994_4 (sequence is synthesized)
gccccaaaacgtgctccagatgccacaaagcatattactgcagcaaggagcatcagaccctagactggagattgggacataagcaggcttgtgcacaaccagatcatctggaccatataa

SEQ ID NO: 59772 - DNA, 120 bp, Artificial Sequence
  ENSG00000071994_5 (sequence is synthesized)
ttccagaccacaacttcctttttccagaatttgaaattgtaatagaaacagaagatgagattatgcctgaggttgtggaaaaggaagattactcagagattatagggagcatgggtgaag

SEQ ID NO: 59773 - DNA, 120 bp, Artificial Sequence
  ENSG00000071994_6 (sequence is synthesized)
cacttgaggaagaactggattccatggcaaaacatgaatccagggaagataaaatttttcagaagtttaaaactcagatagcccttgaaccagaacagattcttagatatggcagaggta

SEQ ID NO: 59774 - DNA, 120 bp, Artificial Sequence
  ENSG00000071994_7 (sequence is synthesized)
ttgcccccatctggatttctggtgaaaatattcctcaagaaaaggatattccagattgcccctgtggtgccaagagaatattggaattccaggtcatgcctcagctcctaaactacctga

SEQ ID NO: 59775 - DNA, 120 bp, Artificial Sequence
  ENSG00000071994_8 (sequence is synthesized)
aggctgacagactgggcaagagcattgactggggcatcctggctgtcttcacctgtgctgagagctgcagcttgggtactggctatacagaagaatttgtgtggaagcaggatgtaacag

SEQ ID NO: 59776 - DNA, 120 bp, Artificial Sequence
  ENSG00000071994_9 (sequence is synthesized)
atacaccgtaaaggcatcttaaagccttgaaaaatgttaataatcttttataccttgcaattccatttctgggattttatcctaaggaaatacttataccaaaaatagaggtgcagagat

SEQ ID NO: 59777 - DNA, 120 bp, Artificial Sequence
  ENSG00000071994_10 (sequence is synthesized)
gttgacagattgcttacacagtgtctacttattagtgaaacaaaagtgtccagtgacagggaattaaataaattttggtacatccacagaggaaggctacacagtcttaattataacacc

SEQ ID NO: 59778 - DNA, 120 bp, Artificial Sequence
  ENSG00000071994_11 (sequence is synthesized)
tatattgacaacagacataccattataggtggtattcatggtatgatcctattcttgtaaaaatatttgtatgtatgcacagaaatctgcaaagatgtacacttagtgaactggttacca

SEQ ID NO: 59779 - DNA, 120 bp, Artificial Sequence
  ENSG00000071994_12 (sequence is synthesized)
acgaatggtgggactaactaaaatggtctttttacttatatgtgcatttctttttataataaaaatgggttatatgcctaatgaagtcaaaccatctcactctgagcatttcccacccta

SEQ ID NO: 59780 - DNA, 120 bp, Artificial Sequence
  ENSG00000071994_13 (sequence is synthesized)
aacctcaggttggtgagtatgatgaacaggaaacccagtaattctgaagcagcagtatcacagttggcaggatgaggaacaacagtggctttgtgatcacagaactggaatttaaagagg

SEQ ID NO: 59781 - DNA, 120 bp, Artificial Sequence
  ENSG00000071994_14 (sequence is synthesized)
ctggaccttcagaactgatcttggtcagccagcggccctgcttacagatgagacactgaaaggcaaaaggcgatggtcttccctttccgtgtcagcattgtatacaggttccctatcgca

SEQ ID NO: 59782 - DNA, 120 bp, Artificial Sequence
  ENSG00000071994_15 (sequence is synthesized)
catacaagggttatggaatgtaagccaaaataagggtctggcctaggaggcagcagcctgaggaaaggaaggccctgaagtcagttttcaaagggctgacccttggcctattatgtttct

SEQ ID NO: 59783 - DNA, 120 bp, Artificial Sequence
  ENSG00000071994_16 (sequence is synthesized)
gatacatctgtttaagcaagcggctcctaagactacactaaggtttcttccatcccctagcagctcacagttgacaattcccagttctctcagcaccagtgatgcctgcccttaagacac

SEQ ID NO: 59784 - DNA, 120 bp, Artificial Sequence
  ENSG00000071994_17 (sequence is synthesized)
attgctgttgatcagtgcttgaatactgacggctaattctgataaatttctcaggcttatttccttaatctacattggctcacattgtcccctaacacatccctgttaactgaaatgcat

SEQ ID NO: 59785 - DNA, 120 bp, Artificial Sequence
  ENSG00000071994_18 (sequence is synthesized)
tgccaccataaatcctcacgttttcataggtaacatcacttgctaatgtaattgtctacttggctattttatttgtaatttaaaaagttctgtcctagtagtccatattatataagtata

SEQ ID NO: 59786 - DNA, 120 bp, Artificial Sequence
  ENSG00000071994_19 (sequence is synthesized)
catatgcaatttgtattaattgtataagatagttatacatagcaccatatgggaaactgcagtatggagtttctcccatggggaggttatcagctacttaagagctagaggatactagtt

SEQ ID NO: 59787 - DNA, 120 bp, Artificial Sequence
  ENSG00000071994_20 (sequence is synthesized)
tcgaacctgggatggctaaatctatgaaaatcacctataactatggtgtcacagccctgtggctactggagtaagttgtcatcaactagtgacaagagctggtcgcaacacttagtagga

SEQ ID NO: 59788 - DNA, 120 bp, Artificial Sequence
  ENSG00000071994_21 (sequence is synthesized)
agcacagtggcataaggaaacctggactagtggggcctttatatctaaaattatgtattattccttataggcagaatctgtaagtacgttatgactgctaatgacttttaaagcaaacat

SEQ ID NO: 59789 - DNA, 120 bp, Artificial Sequence
  ENSG00000071994_22 (sequence is synthesized)
gttaacgatctttctatggtaaaaactgttatttggggacatcaccagatgatgtggacattcttgcaggtattttggcatacccaggcaagctgtcattggtgtatattccagttaacc

SEQ ID NO: 59790 - DNA, 120 bp, Artificial Sequence
  ENSG00000071994_23 (sequence is synthesized)
tctggagatgatcgtaacagtttacagggcctttccatttgggatggatatatcaagagggagacaaactggtccaaatcaccagaaagaaaatctcacagcaccgacttggcatctgtg

SEQ ID NO: 59791 - DNA, 120 bp, Artificial Sequence
  ENSG00000071994_24 (sequence is synthesized)
ttaaaaaatagcaactatatttaaaataaactgtacaacataaaaaatttaaattaaaaaatgcattaagcaagttgcctttagaaatgtgaagacattttaaaacactacaagataatg

SEQ ID NO: 59792 - DNA, 120 bp, Artificial Sequence
  ENSG00000071994_25 (sequence is synthesized)
agcaagtctcacctacataatcatggctccacagacggtgccagtccatgcatccaccatttctcaacacctacaaagttttaagatctgcttggttcagatactgtccagccacagcag

SEQ ID NO: 59793 - DNA, 120 bp, Artificial Sequence
  ENSG00000071994_26 (sequence is synthesized)
ctccctctgctgtagagagcagcatattcagctttgcctttttatttcagatactgaatatcctttggcaatttcagatatcacagcaaaaaaaaaaaaagttccaagtgtttttggcaa

SEQ ID NO: 59794 - DNA, 120 bp, Artificial Sequence
  ENSG00000071994_27 (sequence is synthesized)
acagtcttatggaggagcccaaataatatctggggaagttaaagtccatataatgactgataagagtacaatacaggtgccatgggaacacgtgacatcactgaagactgcctggaaggg

SEQ ID NO: 59795 - DNA, 120 bp, Artificial Sequence
  ENSG00000071994_28 (sequence is synthesized)
gccgcgcgtgtgttcatgcctatacgataaacatgatacataatgaaaatgcttatctttaggagaaaggagagcctagagtagcaggatcaaggatgaaagctggacttcaaatatgcc

SEQ ID NO: 59796 - DNA, 120 bp, Artificial Sequence
  ENSG00000071994_29 (sequence is synthesized)
ttgttagtgtaaatgtgactgtggaactgtatgagtattttaagattatggagtaaagtaagttttaaaaagcagtccctaatcatcaaaagtaaaaaactcttgatgtagtcatataac

SEQ ID NO: 59797 - DNA, 120 bp, Artificial Sequence
  ENSG00000071994_30 (sequence is synthesized)
cacactaagaactcttccaggtgacttcaaaacataggacagtacatctctagtagaatatgccctgagaatgaaaagaatgtaacagtgttagtattttgaataaacatgttattacta

SEQ ID NO: 59798 - DNA, 120 bp, Artificial Sequence
  ENSG00000071994_31 (sequence is synthesized)
ggttaaacataatacttggaagaaagggctccatgtgcctagaagagaggtactgagaggaagactcactttggaggctgtagcatacaattttcagatattgcctcaggtaaaaatata

SEQ ID NO: 59799 - DNA, 120 bp, Artificial Sequence
  ENSG00000071994_32 (sequence is synthesized)
cttcctggactttgttttctgacacataagaggtgtgttctgctccctgtaaagacaagggtgggtatccagatggtcccatgagtagggctgcacaagatgctggaggcttggtaagtt

SEQ ID NO: 59800 - DNA, 120 bp, Artificial Sequence
  ENSG00000071994_33 (sequence is synthesized)
cctctgggtcgcagatcggtttctcgggtcgggatagtgtgagtgcctagcacagtgtcgggcacgcagaagggccccttaaaagtttctctttcatctggccagttttagatacacaat

SEQ ID NO: 59801 - DNA, 120 bp, Artificial Sequence
  ENSG00000071994_34 (sequence is synthesized)
tttgtcagtttacttacagtgcatactcttgggtagtacttgtgctgaccaagtatcttagaggcttattttattatagtagccaacatttatccagcacttaccttatataaagggctg

SEQ ID NO: 59802 - DNA, 120 bp, Artificial Sequence
  ENSG00000071994_35 (sequence is synthesized)
tttgtgcatgagctcattaaaatcgtgacagcagaccaatgagtgagaaactgccccattttgaaggtgaggaaattgaggttctgggtataactttctttggtcacataatattaaatt

SEQ ID NO: 59803 - DNA, 120 bp, Artificial Sequence
  ENSG00000071994_36 (sequence is synthesized)
agccatacacaaaaccaccacaaaattagatttatagactcaaaatgaaaacatcagcttactggtttgtagttcataccagtcatacattccaaaacatgttttgagtcttactctgtg

SEQ ID NO: 59804 - DNA, 120 bp, Artificial Sequence
  ENSG00000071994_37 (sequence is synthesized)
attatgttggtgttactgagaactgagatgttgggcgtaggaggaagataatgttgattgtgtctacgtaccatttctctctaaaaggaactccaggctctttggagaggtggttgattc

SEQ ID NO: 59805 - DNA, 120 bp, Artificial Sequence
  ENSG00000071994_38 (sequence is synthesized)
cagaactaggtcaggaaacgttcatataatgtgggaacatggtcatatcaaagattaaggataaggattactagggccatgtcagaactcaagcaacatgaaaaggctcctgcttgcaaa

SEQ ID NO: 59806 - DNA, 120 bp, Artificial Sequence
  ENSG00000071994_39 (sequence is synthesized)
agatggacagtttgaacatccacaaggacgctaactgcatcagatatgtttaatgggttcaaaatgatactttaaaaaaactcagtaatcatctttataggatacttgggaacagactca

SEQ ID NO: 59807 - DNA, 120 bp, Artificial Sequence
  ENSG00000071994_40 (sequence is synthesized)
ttttcaaattggtaaataaaaggaaagagtttgccttcgaggggtacataacttaattatgaatgaagtgatatgtgtggaatttacttcagagtaatggaggtggaagtggcagagaaa

SEQ ID NO: 59808 - DNA, 120 bp, Artificial Sequence
  ENSG00000071994_41 (sequence is synthesized)
ggaaacactggacttgatagtgttgaaactgattaatgatatgtggcggttcattatagtatttccacttttctgtatgtccaaaattttctaaaataaaaggagaattgaatagaaaaa

SEQ ID NO: 59809 - DNA, 120 bp, Artificial Sequence
  ENSG00000071994_42 (sequence is synthesized)
gagatgttgcctaaggtacatgaggtttaggcaccattggcccccccgccagaaagaaaaaaggttatttttgcccatttccaacaggtaactttggcttgtaaaatgtgacatgttaac

SEQ ID NO: 59810 - DNA, 120 bp, Artificial Sequence
  ENSG00000071994_43 (sequence is synthesized)
atttttctccttaacctcccctaccataaacgtaaatcacgaaagaaaactaaactcccataaaccagtcactggttcaaataaatacacaggaagaatagatctaggtcttaaacacta

SEQ ID NO: 59811 - DNA, 120 bp, Artificial Sequence
  ENSG00000071994_44 (sequence is synthesized)
aggcagtttttagcaatgcatatgcttttagacaaaatacagaaaaccactcagttgctgtaggaagcttattacagtgaaatttacttatgtttgtagtagttttcaaaacactatgtt

SEQ ID NO: 59812 - DNA, 120 bp, Artificial Sequence
  ENSG00000071994_45 (sequence is synthesized)
tcacttggtatttgtccctcctaaaattttttaactatgaaggtaggcacagactctgggcagaattctgcaattagagcagaggctcattcttagtcccttcacaatatattcatagga

SEQ ID NO: 59813 - DNA, 120 bp, Artificial Sequence
  ENSG00000071994_46 (sequence is synthesized)
ttaagttgccaacattaggtagtaaaagcatcatctgggagatatattttgatgccctctgagtcagataaactgaaataatcactttgaggtgattgagaaggcattagtggcacactg

SEQ ID NO: 59814 - DNA, 120 bp, Artificial Sequence
  ENSG00000071994_47 (sequence is synthesized)
gtacagccaggtctgatgggggaactgtgacatgccttttgggtcagtgctacatcaagagtaggaacattcatggagtagatagcatgttaccattggcaacttataggtaaggtattg

SEQ ID NO: 59815 - DNA, 120 bp, Artificial Sequence
  ENSG00000071994_48 (sequence is synthesized)
tctccacctccagtgtggttatgtcattattattagtgcctctgttaacttttgttattttaaataatgtataccttcctttcttgttctagtaattaaagtctttgactatatacttta

SEQ ID NO: 59816 - DNA, 120 bp, Artificial Sequence
  ENSG00000071994_49 (sequence is synthesized)
agggggacggcggcaagcaccgctgccgccccagcctcagagctccctctccgcgctgccccaggagcaccttctcccgggcccttccaggatgtgctcatttttgctacataagcttct

SEQ ID NO: 59817 - DNA, 120 bp, Artificial Sequence
  ENSG00000072041_0 (sequence is synthesized)
atacgcatgtacacgcgcacccgcacccgcgcgcctgtatcccgtgctgtttccctggcagacacacaggcgctcacgagtctctccttgccagcctgcagggcggcgacccccaaaacc

SEQ ID NO: 59818 - DNA, 120 bp, Artificial Sequence
  ENSG00000072041_1 (sequence is synthesized)
cagctccgggtcccaacctaggcaagaagctgcttctctgccaacagctcctcttcggcctccgtcacagccacctggaccctaccctttcgcgactgctgctgctgctgcccggacgtg

SEQ ID NO: 59819 - DNA, 120 bp, Artificial Sequence
  ENSG00000072041_2 (sequence is synthesized)
gaagcagcaagaggcgcttggtcaagacacactgacggtacctacagaatactggacatacggattcagaatccataaggctttatcaccttgaatcaaggatttatttgatatcatcct

SEQ ID NO: 59820 - DNA, 120 bp, Artificial Sequence
  ENSG00000072041_3 (sequence is synthesized)
cggtctttacttcctatcaagtaacattgttttgaaaaatagagttaacacatttgccataagggagtttttttttttttttttaaatacttcgcatactctccaatgcccaaaaatagc

SEQ ID NO: 59821 - DNA, 120 bp, Artificial Sequence
  ENSG00000072041_4 (sequence is synthesized)
aaggtggtaaaaagagaattagatgatgatgttactgagtctgtcaaagaccttctttccaatgaagacgcagctgatgatgcttttaagacaagtgaactaattgttgatggccaggaa

SEQ ID NO: 59822 - DNA, 120 bp, Artificial Sequence
  ENSG00000072041_5 (sequence is synthesized)
gagaaagatacagatgttgaagaaggatctgaagtcgaagatgaaagaccagcttggaacagtaaactacaatacatcctggcccaagttggattttctgtaggtttaggaaatgtgtgg

SEQ ID NO: 59823 - DNA, 120 bp, Artificial Sequence
  ENSG00000072041_6 (sequence is synthesized)
cgatttccatacctatgtcagaagaatgggggcggtgcatatcttttaccatatttaatactacttatggtaataggtattcccctttttttcttggaactctctgtgggtcaaagaatt

SEQ ID NO: 59824 - DNA, 120 bp, Artificial Sequence
  ENSG00000072041_7 (sequence is synthesized)
cggcgaggcagcattggtgtatggaattacataagccctaaactgggcgggattggatttgcaagttgtgtagtgtgctattttgtagctctctactacaacgtcatcattggctggagt

SEQ ID NO: 59825 - DNA, 120 bp, Artificial Sequence
  ENSG00000072041_8 (sequence is synthesized)
ttgttttatttttctcagtcttttcagcaacccctgccttgggatcagtgtcctttggtgaaaaatgcttcacacacttttgtagaaccagaatgtgaacaaagttctgccaccacctat

SEQ ID NO: 59826 - DNA, 120 bp, Artificial Sequence
  ENSG00000072041_9 (sequence is synthesized)
tactggtacagggaagcactgaatatttcaagttccatttctgaaagtgggggcttaaactggaagatgaccatctgcttgttggctgcctgggtcatggtttgcttggctatgatcaaa

SEQ ID NO: 59827 - DNA, 120 bp, Artificial Sequence
  ENSG00000072041_10 (sequence is synthesized)
ggcattcagtcttctggaaaaatcatatattttagttctctgtttccatatgtggtacttatttgcttcctcatcagagcattccttttaaatggttcaattgatggcattcgccacatg

SEQ ID NO: 59828 - DNA, 120 bp, Artificial Sequence
  ENSG00000072041_11 (sequence is synthesized)
tttacccctaagcttgaaataatgctggagcccaaggtctggagagaagctgctactcaagtgttctttgccttaggtctgggatttggtggtgtcattgccttttcaagctacaacaag

SEQ ID NO: 59829 - DNA, 120 bp, Artificial Sequence
  ENSG00000072041_12 (sequence is synthesized)
agagacaacaactgccactttgatgctgtcctggtgtccttcatcaattttttcacttctgtcctggcaacattggtggtgtttgcagttctgggcttcaaagcaaatgtcataaatgag

SEQ ID NO: 59830 - DNA, 120 bp, Artificial Sequence
  ENSG00000072041_13 (sequence is synthesized)
aaatgcattacacaaaattcagagacgatcatgaaatttttgaaaatggggaacattagtcaggatattattccccatcatatcaacctttcaactgttactgcagaagattatcattta

SEQ ID NO: 59831 - DNA, 120 bp, Artificial Sequence
  ENSG00000072041_14 (sequence is synthesized)
gtttatgacatcattcaaaaagtgaaagaagaagagtttcctgctcttcatctcaattcctgtaaaattgaagaagagctaaataaagctgttcaggggaccggcttagcttttattgcc

SEQ ID NO: 59832 - DNA, 120 bp, Artificial Sequence
  ENSG00000072041_15 (sequence is synthesized)
tttacagaagcgatgacacattttcctgcatctcccttctggtcagtgatgtttttcctcatgctggtcaatctaggccttggcagtatgtttggaaccattgaagggattgtcacgcct

SEQ ID NO: 59833 - DNA, 120 bp, Artificial Sequence
  ENSG00000072041_16 (sequence is synthesized)
attgtggacactttcaaagtgaggaaagaaattcttactgttatctgttgtcttctggcattttgtattggcctgatatttgtgcaacgctctggaaattactttgttacaatgtttgat

SEQ ID NO: 59834 - DNA, 120 bp, Artificial Sequence
  ENSG00000072041_17 (sequence is synthesized)
gattattctgctacactgcctctgctaattgtagtcattttggagaatattgctgtatgctttgtttatggcatagataagtttatggaagacctaaaagatatgctgggctttgctccc

SEQ ID NO: 59835 - DNA, 120 bp, Artificial Sequence
  ENSG00000072041_18 (sequence is synthesized)
agcagatattactactatatgtggaaatatatttctcctctaatgctattatcattgctaatagctagtgttgtgaatatgggattaagtcctcctggctataacgcatggattgaagat

SEQ ID NO: 59836 - DNA, 120 bp, Artificial Sequence
  ENSG00000072041_19 (sequence is synthesized)
agatgatagttctggtaatttagcatctgtgacctataagagaggaagggtcctgaaagagcctgtgaacttagagggcgatgatacaagcctcattcacggaaaaataccgagcgagat

SEQ ID NO: 59837 - DNA, 120 bp, Artificial Sequence
  ENSG00000072041_20 (sequence is synthesized)
gccatctccaaattttggtaaaaatatttatcgaaaacagagtggatccccaactctggatactgctcccaatggacggtatggaatagggtacttgatggcagatattatgccagatat

SEQ ID NO: 59838 - DNA, 120 bp, Artificial Sequence
  ENSG00000072041_21 (sequence is synthesized)
gccagaatctgatttgtagctgggggaaaagtcagtgggttttatttggttcatttttaccaatgaacattggccctagtaggagaagcattaggcttcacttatcagagggcaatctca

SEQ ID NO: 59839 - DNA, 120 bp, Artificial Sequence
  ENSG00000072041_22 (sequence is synthesized)
ggtgttccgtggctgtgatctttaatcctaacagtatatgtcagttcaacttgagcattcttttggattctttggtttacatttgtgcagaaaggattgcagacaaatcttaggagggct

SEQ ID NO: 59840 - DNA, 120 bp, Artificial Sequence
  ENSG00000072041_23 (sequence is synthesized)
gaggtacatgtttgccaggatttttttttaagtacctttggtgtattttcaaatatttctatctcttaaaaaaatggtattacctcagtttctaataatttctgggtttagtagtgttga

SEQ ID NO: 59841 - DNA, 120 bp, Artificial Sequence
  ENSG00000072041_24 (sequence is synthesized)
caattaaaaatggtatacattaaaatttataagtttgccttcagggtaacttccagtgtcacaatgagcagttctgtaagtgggtgcctctcagcacatttctatgaatatattatgtag

SEQ ID NO: 59842 - DNA, 120 bp, Artificial Sequence
  ENSG00000072041_25 (sequence is synthesized)
ataggctgtattgattttggtagcattgacaccttcttaggcaattagttgaagaaaactgcaaaatattttcttatgtaatagctgtatagagcaatagcaatcaaagcatgagaaggc

SEQ ID NO: 59843 - DNA, 120 bp, Artificial Sequence
  ENSG00000072041_26 (sequence is synthesized)
actaacgctgggatgaaagatgagattcagaggtgactgagaatcatgtgagtgatggctgtatattttgtgtaaaatatatgtgtgaaaatgaactaagagtgagttactcagcactct

SEQ ID NO: 59844 - DNA, 120 bp, Artificial Sequence
  ENSG00000072041_27 (sequence is synthesized)
caagaattatgcagattctgcatttttcttatgccgtgtgcctaaaaacctacttgatatttattgtggtttcaagattattcatagtatatttatacaatatacttgcaatgcatttaa

SEQ ID NO: 59845 - DNA, 120 bp, Artificial Sequence
  ENSG00000072041_28 (sequence is synthesized)
gtacttaaagtactaatttgaaaacttgaagcaagatggcattttaattaatatatttctgttttgcttctgttttatgcaaatataaatcatttttaagtgattgttaaaattgtaatg

SEQ ID NO: 59846 - DNA, 120 bp, Artificial Sequence
  ENSG00000072041_29 (sequence is synthesized)
cattacattttaatctacaaataaacaaagtttaaaaatgatgtttgtttttcacattgattttctttgtatcacctgaactggattgtctttcatttcagtcagcacttagacatttca

SEQ ID NO: 59847 - DNA, 120 bp, Artificial Sequence
  ENSG00000072041_30 (sequence is synthesized)
taataactaaacatcacattccaagtgggatgaattacattaattgaatagagttaccaccgcttcagagtctaaggaaaaatagagtattatggttcaatggtgttcttatgtagtctt

SEQ ID NO: 59848 - DNA, 120 bp, Artificial Sequence
  ENSG00000072041_31 (sequence is synthesized)
atgattcttgaaaaagtacttacagcctcccaagaaaccatgtgtacaattgactgcttgctgattcaatattgtctgcaaagtataaaagactatgatttttaaataaaactgttgtat

SEQ ID NO: 59849 - DNA, 120 bp, Artificial Sequence
  ENSG00000072041_32 (sequence is synthesized)
atatgaaattggatagagcagaggaacctcactgagtgtcctctagttaaaaatctttcatttatcctaccaccagatcagttacatttttaaaacaatgatggatatagcagcaaaata

SEQ ID NO: 59850 - DNA, 120 bp, Artificial Sequence
  ENSG00000072041_33 (sequence is synthesized)
agtgaggtaatacacatgccatatcaattgatttatttcagccagtattctcgctctgctatagatagatgttaataaatggtatcacagcatttaaagtattaaatccactggtgcata

SEQ ID NO: 59851 - DNA, 120 bp, Artificial Sequence
  ENSG00000072041_34 (sequence is synthesized)
gtcttttaaaatatattcatgaatattgtgtttgtatccctttaaaatgtttaatattttataaataggcagtatatgcacattatacaaaactaaaaaattatgacaattcagtgtgaa

SEQ ID NO: 59852 - DNA, 120 bp, Artificial Sequence
  ENSG00000072041_35 (sequence is synthesized)
agtgtgaagtaagttctcatccaacatttctcctggccatccattctccatctttaaaggcaatcaccattgccagtttcttctgtatccttctggaaatacaatatattacataaatga

SEQ ID NO: 59853 - DNA, 120 bp, Artificial Sequence
  ENSG00000072041_36 (sequence is synthesized)
cagcattctatattctctcttctatatcttacctatttctgtgaataatttattttggacagcattttatgtatgaatattcacaaatgtgcttccttatttcagaggctgaactaataa

SEQ ID NO: 59854 - DNA, 120 bp, Artificial Sequence
  ENSG00000072041_37 (sequence is synthesized)
aaattttgtttatttttgtgttgaggcaatatttttatatggtaccctaatctttaatacttaacctgccagactttaaccgtaacacaataatgtattgccaaatagcaccattcttct

SEQ ID NO: 59855 - DNA, 120 bp, Artificial Sequence
  ENSG00000072041_38 (sequence is synthesized)
tctctcactctcttgccatgggggctcttaaaaaaaaaagtatacatctaaggtgtacaacatgctgttttgatgtatataaatatagtgaaagcaaataaagtatatatctaaggtgta

SEQ ID NO: 59856 - DNA, 120 bp, Artificial Sequence
  ENSG00000072041_39 (sequence is synthesized)
gtttaggggacggttcagccattttcaaaaggaggctaagctttgtgttcagaggtgtatattttaggaattctccacgtggcttaattacgagcatgccttgattgttagcagagcctg

SEQ ID NO: 59857 - DNA, 120 bp, Artificial Sequence
  ENSG00000072041_40 (sequence is synthesized)
cagtcttctggaaaagttagtatgttagagcccttcctcattctgctaatcaccatttctggattcatccctctctcaaattctgttacagatttctgtgggcaaatcacacataacact

SEQ ID NO: 59858 - DNA, 120 bp, Artificial Sequence
  ENSG00000072041_41 (sequence is synthesized)
tcattctaggtagttaaatattagtgaaaagtgacacttcaaaagtgtgcttacatttttaaaaagacaaataaaaacagtgttttatagtgaaatctaaggttaattataatctttcct

SEQ ID NO: 59859 - DNA, 120 bp, Artificial Sequence
  ENSG00000072041_42 (sequence is synthesized)
tatttcaacaagatctttaaaatttttgtgaatacttaaaagtcctttctttttgccctttattcaattagtcctaatgtttcagttctctaattaccaattagttaaattatggaaatt

SEQ ID NO: 59860 - DNA, 120 bp, Artificial Sequence
  ENSG00000072041_43 (sequence is synthesized)
ggggaaagtggtaaaatgagtaattcattcattttgtttgtttgatatcatttgtttctctctgctgtaggtgttctaaggaatagctgcataagacattttgaaataatgtaatgtgaa

SEQ ID NO: 59861 - DNA, 120 bp, Artificial Sequence
  ENSG00000072041_44 (sequence is synthesized)
gtgtttcttaaagctctgaacatcattaagtagttaataataattccaacaaggaattcagagtaatgtaaaagactaaatatcattccttctaaggcaaattgaaaattagaatggttg

SEQ ID NO: 59862 - DNA, 120 bp, Artificial Sequence
  ENSG00000072041_45 (sequence is synthesized)
tggtttaaaaagacattaagtgaattctaggtagcttgtttgttattatttttaaaggacgctctaggaaagtaattgctattcactattttgctttcgtattacttttttttttttttt

SEQ ID NO: 59863 - DNA, 120 bp, Artificial Sequence
  ENSG00000072041_46 (sequence is synthesized)
ttcattatcacagccattgttctaaagctctccacatctcttggctggatcatagcaagaatttactgttggctcttctctctgccgtttaactgtccagctgtgctattttccttttca

SEQ ID NO: 59864 - DNA, 120 bp, Artificial Sequence
  ENSG00000072041_47 (sequence is synthesized)
accactcatcatcatatactagcaggaatggcaatagtagtagtagtagcagcagcaatagtagaagtagtcataataacaataataataaatgatgataaagatgtttctgacaagaat

SEQ ID NO: 59865 - DNA, 120 bp, Artificial Sequence
  ENSG00000072041_48 (sequence is synthesized)
tagggtaagaacagtaattgaagccaattatttattacaaatgtattttgctttgggtactgtgataactactttttatactttatcccatttaattataaaaaccactcttgagaagta

SEQ ID NO: 59866 - DNA, 120 bp, Artificial Sequence
  ENSG00000072041_49 (sequence is synthesized)
atttttattttcagaaccattttacagatttaaaataaacaggtttgaggaattagtttaacttatccaaagtttcgtggctattaagttctagtatttggagtcaaatgcaagtctgtc

SEQ ID NO: 59867 - DNA, 120 bp, Artificial Sequence
  ENSG00000072041_50 (sequence is synthesized)
taaatctagagcccatgttctttaactgcaacactataatgtctcaccccgtcctagtcccaccaattagtcaactcttttagggcagaagtctgtctaattcatctttgcttcctgtta

SEQ ID NO: 59868 - DNA, 120 bp, Artificial Sequence
  ENSG00000072041_51 (sequence is synthesized)
ctttatatttaattaaaaattttagtgactttttaacttgtaaattgtagctgattttacatttatcttcctgaaggaaactctgtatcattttgtcttttgaatttgtgaatatacttg

SEQ ID NO: 59869 - DNA, 120 bp, Artificial Sequence
  ENSG00000072041_52 (sequence is synthesized)
ttaacacatctaaatatctttaagtctttggcaatgttattgtattatatgactaaataacttcgaattgttcaattgtgtatgtcttccactatgtcagagccacattcccgtcacatt

SEQ ID NO: 59870 - DNA, 120 bp, Artificial Sequence
  ENSG00000072041_53 (sequence is synthesized)
ataaatgaaggagtggattcttaaataagacctaaccatatttatatgattcctaacataatatcatttggtagaaagaaaaccaactgtggtcatccagagaagctcaaaaactcttgt

SEQ ID NO: 59871 - DNA, 120 bp, Artificial Sequence
  ENSG00000072041_54 (sequence is synthesized)
actcaggttctcttactaccacgttttgtttctgtttcttcttagtctgtgtcttagcatcacttaaagaactattcatccttttcttatcacagaatcttggggttgttcttctcatgt

SEQ ID NO: 59872 - DNA, 120 bp, Artificial Sequence
  ENSG00000072041_55 (sequence is synthesized)
catgtagtgtaaatttatatagaaaatgtaatacaatttatttagtacatacatttattattttaatgagaatgcctcaggaaaagactagtatttgggcaatatttgaagaaagaattt

SEQ ID NO: 59873 - DNA, 120 bp, Artificial Sequence
  ENSG00000072041_56 (sequence is synthesized)
aacaggcactgatggggagaaagctagctgtaggtaatgtgagcaaagatgtggaagccaaaattgtcacaattcctcaatctgaaacaatgagttaaatataataacaatgactttatg

SEQ ID NO: 59874 - DNA, 120 bp, Artificial Sequence
  ENSG00000072041_57 (sequence is synthesized)
aggaattaaaggttaagctttgtgtttacctactaaacagaaaatgcctccaaataaacagtgtcacaagtacagaagagagaaatattgtttaaggctagcacatggaaaaacaactta

SEQ ID NO: 59875 - DNA, 120 bp, Artificial Sequence
  ENSG00000072041_58 (sequence is synthesized)
gaggatttagcagctaaaagaagaatgagtcagctggtgatgtgcttggtcaaaacacacagtcatacatgcatatacatataccccaaaatgctaagtggaaactgcatgaattaaaag

SEQ ID NO: 59876 - DNA, 120 bp, Artificial Sequence
  ENSG00000072041_59 (sequence is synthesized)
aggggtatgatagggacattgtcctttgggctaggtaggcacatatcagttggaccacatctgcaatactggattttactgaaatcttgtattttcctttttattatgagaaatttcagc

SEQ ID NO: 59877 - DNA, 120 bp, Artificial Sequence
  ENSG00000072041_60 (sequence is synthesized)
tcagtgatcaaagtcttcaaatagttaaaccaaaagaagaatagggctgctttgtgtggccatagagagcaaaactatgatcaaatagtgggtattatggaggaggttgtgatggtggta

SEQ ID NO: 59878 - DNA, 120 bp, Artificial Sequence
  ENSG00000072041_61 (sequence is synthesized)
agccttcaaagaaagaaaggcctttcaagaatcaaacttgataataatgaaatcagttgcctcaatggtagagagctcagcatcactggaggtggtcacacagaggtagcatgtgcccta

SEQ ID NO: 59879 - DNA, 120 bp, Artificial Sequence
  ENSG00000072041_62 (sequence is synthesized)
gttacagaatctattaaggggatgactgtctcaaatatgtaggacagaaatgagaagccccaagcttgcttttaactctaaggtagtattttctactctgactactttcctgttgttact

SEQ ID NO: 59880 - DNA, 120 bp, Artificial Sequence
  ENSG00000072041_63 (sequence is synthesized)
actactatgctaaatactatgcatacattatcttgtttattctttctatcagctagataatttgcatattttatccccattttactgcaaagttgacaagctcagggaaaataaatagtt

SEQ ID NO: 59881 - DNA, 120 bp, Artificial Sequence
  ENSG00000072041_64 (sequence is synthesized)
ggccagaattaagcaaccaatacatgatagacagggctaaaactgggctacagaattttcaaaaagaatgatacattctgaaggtatgtttataataaacatttttcatatgtaaaacaa

SEQ ID NO: 59882 - DNA, 120 bp, Artificial Sequence
  ENSG00000072041_65 (sequence is synthesized)
attcgcttccgttcgctttagcaaaggcagaaggcgactaccgaggacagagtgttttcacgtgaccacagttcccctttgcttgaggtacctacagaatactggacatacggattcaga

SEQ ID NO: 59883 - DNA, 120 bp, Artificial Sequence
  ENSG00000072041_66 (sequence is synthesized)
tttcttagatgttatgtggatgatcagattgctcaactccattataatttgtttccaaactaatctgttcaggcaagataaagatataaatgtggattgttgctgaggttaagtctggtc

SEQ ID NO: 59884 - DNA, 120 bp, Artificial Sequence
  ENSG00000072041_67 (sequence is synthesized)
gaggttaagtctggtcagatttttccacttatgcttgaaaagtaaccatatttcaatcaaatatataatatgtatatttcataataatataagcaatattagtctcattattaattcaaa

SEQ ID NO: 59885 - DNA, 120 bp, Artificial Sequence
  ENSG00000072041_68 (sequence is synthesized)
caacactgtagaacattattaaatgaataaatgacctataaatatttggtgcctgaagaagtcactttgctattaattatacgaatagagtatggaaatttatacttttaaatttttctc

SEQ ID NO: 59886 - DNA, 120 bp, Artificial Sequence
  ENSG00000072041_69 (sequence is synthesized)
taaactttgactcatttattattgtacttggtaaatgagtttccacgggctcagggagatgaattactgtcttagaataaatttgtatgaatgttgaggctacacccaggtaacctaatt

SEQ ID NO: 59887 - DNA, 120 bp, Artificial Sequence
  ENSG00000072041_70 (sequence is synthesized)
cctaataggttatatgccatgtatcaggaaaggtattgcctgtttatatgatggacatgttataaaagttttaaaagtttgaatataataatttataataaagtttaaaggccttgtctc

SEQ ID NO: 59888 - DNA, 120 bp, Artificial Sequence
  ENSG00000072042_0 (sequence is synthesized)
aagccatagtcggcgagcaacgctggagcatcccgctctggtgccgctgcagccggcagagatggttgagctcatgttcccgctgttgctcctccttctgcccttccttctgtatatggc

SEQ ID NO: 59889 - DNA, 120 bp, Artificial Sequence
  ENSG00000072042_1 (sequence is synthesized)
tgcgccccaaatcaggaaaatgctgtccagtggggtgtgtacatcaactgttcagcttcctgggaaagtagttgtggtcacaggagctaatacaggtatcgggaaggagacagccaaaga

SEQ ID NO: 59890 - DNA, 120 bp, Artificial Sequence
  ENSG00000072042_2 (sequence is synthesized)
gctggctcagagaggagctcgagtatatttagcttgccgggatgtggaaaagggggaattggtggccaaagagatccagaccacgacagggaaccagcaggtgttggtgcggaaactgga

SEQ ID NO: 59891 - DNA, 120 bp, Artificial Sequence
  ENSG00000072042_3 (sequence is synthesized)
cctgtctgatactaagtctattcgagcttttgctaagggcttcttagctgaggaaaagcacctccacgttttgatcaacaatgcaggagtgatgatgtgtccgtactcgaagacagcaga

SEQ ID NO: 59892 - DNA, 120 bp, Artificial Sequence
  ENSG00000072042_4 (sequence is synthesized)
tggctttgagatgcacataggagtcaaccacttgggtcacttcctcctaacccatctgctgctagagaaactaaaggaatcagccccatcaaggatagtaaatgtgtcttccctcgcaca

SEQ ID NO: 59893 - DNA, 120 bp, Artificial Sequence
  ENSG00000072042_5 (sequence is synthesized)
tcacctgggaaggatccacttccataacctgcagggcgagaaattctacaatgcaggcctggcctactgtcacagcaagctagccaacatcctcttcacccaggaactggcccggagact

SEQ ID NO: 59894 - DNA, 120 bp, Artificial Sequence
  ENSG00000072042_6 (sequence is synthesized)
aaaaggctctggcgttacgacgtattctgtacaccctggcacagtccaatctgaactggttcggcactcatctttcatgagatggatgtggtggcttttctcctttttcatcaagactcc

SEQ ID NO: 59895 - DNA, 120 bp, Artificial Sequence
  ENSG00000072042_7 (sequence is synthesized)
tcagcagggagcccagaccagcctgcactgtgccttaacagaaggtcttgagattctaagtgggaatcatttcagtgactgtcatgtggcatgggtctctgcccaagctcgtaatgagac

SEQ ID NO: 59896 - DNA, 120 bp, Artificial Sequence
  ENSG00000072042_8 (sequence is synthesized)
tatagcaaggcggctgtgggacgtcagttgtgacctgctgggcctcccaatagactaacaggcagtgccagttggacccaagagaagactgcagcagactacacagtacttcttgtcaaa

SEQ ID NO: 59897 - DNA, 120 bp, Artificial Sequence
  ENSG00000072042_9 (sequence is synthesized)
atgattctccttcaaggttttcaaaacctttagcacaaagagagcaaaaccttccagccttgcctgcttggtgtccagttaaaactcagtgtactgccagattcgtctaaatgtctgtca

SEQ ID NO: 59898 - DNA, 120 bp, Artificial Sequence
  ENSG00000072042_10 (sequence is synthesized)
tctgttactgccagagttactagagatatcataataggataagaagaccctcatatgacctgcacagctcattttccttctgaaagaaactactacctaggagaatctaagctatagcag

SEQ ID NO: 59899 - DNA, 120 bp, Artificial Sequence
  ENSG00000072042_11 (sequence is synthesized)
ggatgatttatgcaaatttgaactagcttctttgttcacaattcagttcctcccaaccaaccagtcttcacttcaagagggccacactgcaacctcagcttaacatgaataacaaagact

SEQ ID NO: 59900 - DNA, 79 bp, Artificial Sequence
  ENSG00000072042_12 (sequence is synthesized)
gccacactgcaacctcagcttaacatgaataacaaagactggctcaggagcagggcttgcccaggcatggtggatcacc

SEQ ID NO: 59901 - DNA, 120 bp, Artificial Sequence
  ENSG00000072042_13 (sequence is synthesized)
ttcctgtttatgtgtgccaagggagtattttcacaaagttcaaaacagccacaataatcagagatggagcaaaccagtgccatccagtctttatgcaaatgaaatgctgcaaagggaagc

SEQ ID NO: 59902 - DNA, 120 bp, Artificial Sequence
  ENSG00000072042_14 (sequence is synthesized)
agattctgtatatgttggtaactacccaccaagagcacatgggtagcagggaagaagtaaaaaaagagaaggagaatactggaagataatgcacaaaatgaagggactagttaaggatta

SEQ ID NO: 59903 - DNA, 120 bp, Artificial Sequence
  ENSG00000072042_15 (sequence is synthesized)
actagccctttaaggattaactagttaaggattaatagcaaaagatattaaatatgctaacatagctatggaggaattgagggcaagcacccaggactgatgaggtcttaacaaaaacca

SEQ ID NO: 59904 - DNA, 120 bp, Artificial Sequence
  ENSG00000072042_16 (sequence is synthesized)
aaaaaaaaaaaaaaaatcctaaaaacaaacaaacaaaaaaaacaattcttcattcagaaaaattatcttagggactgatattggtaattatggtcaatttaataatattttggggcattt

SEQ ID NO: 59905 - DNA, 120 bp, Artificial Sequence
  ENSG00000072042_17 (sequence is synthesized)
aataatattttggggcatttccttacattgtcttgacaagattaaaatgtctgtgccaaaattttgtattttatttggagacttcttatcaaaagtaatgctgccaaaggaagtctaagg

SEQ ID NO: 59906 - DNA, 120 bp, Artificial Sequence
  ENSG00000072042_18 (sequence is synthesized)
aattagtagtgttcccatcacttgtttggagtgtgctattctaaaagattttgatttcctggaatgacaattatattttaactttggtgggggaaagagttataggaccacagtcttcac

SEQ ID NO: 59907 - DNA, 120 bp, Artificial Sequence
  ENSG00000072042_19 (sequence is synthesized)
ttctgatacttgtaaattaatcttttattgcacttgttttgaccattaagctatatgtttagaaatggtcattttacggaaaaattagaaaaattctgataatagtgcagaataaatgaa

SEQ ID NO: 59908 - DNA, 120 bp, Artificial Sequence
  ENSG00000072042_20 (sequence is synthesized)
aatggacccttaatgaatattattaatttatttttctttacctatttgctaatcagatacctctgttgtgaagaaagggtaaaaatgtgtgttttttaaaaaaatgttggaaataacatt

SEQ ID NO: 59909 - DNA, 120 bp, Artificial Sequence
  ENSG00000072042_21 (sequence is synthesized)
atgagatttattgctcaaaggagataatttgggtttgtctgggtatacccttttttaaaagtacattgtctcatatagcttttgtcttttaactctagagtttttaccttttagtagggg

SEQ ID NO: 59910 - DNA, 120 bp, Artificial Sequence
  ENSG00000072042_22 (sequence is synthesized)
aatttgactctcttttgtaataactgctacatttgattttatgccatcttttatactgataattatgcattctgtttgttttcttcctgtctttgttatgtcagtccagttttctttatt

SEQ ID NO: 59911 - DNA, 120 bp, Artificial Sequence
  ENSG00000072042_23 (sequence is synthesized)
tcctgtctttgttatgtcagtccagttttctttattcttttttggattcctaattctattgttttacattaaaaagaatttaaaaagaatttgaggccaggcgcagtggcttacgcctgt

SEQ ID NO: 59912 - DNA, 120 bp, Artificial Sequence
  ENSG00000072042_24 (sequence is synthesized)
acctaaggtcaggtgaaactccgcctcaaaaaaaaaaaaaaagaatttgaatctgcatttctctattgtcctcaggattgaaatactatggactcccctctcaaataagcgaagacattt

SEQ ID NO: 59913 - DNA, 120 bp, Artificial Sequence
  ENSG00000072042_25 (sequence is synthesized)
gaaaaggtccctcttcctcatagaagtggtggataaaatatagccaaaaacttctgtagctgaactcatagtcactgggacacaatttatgtcaaagggatatcttccagaggcagaaac

SEQ ID NO: 59914 - DNA, 120 bp, Artificial Sequence
  ENSG00000072042_26 (sequence is synthesized)
aaaaaatgaattcaaaacgtcatagcagtgagtaagagctgaagccagaaatctcatgggagtctcagcactcagtacaggctttttagggtctggggtctaaatacttacacagggata

SEQ ID NO: 59915 - DNA, 120 bp, Artificial Sequence
  ENSG00000072042_27 (sequence is synthesized)
ggagatgaggccacaggcctttgagagctggagctgtatttgaggttctacacaaagttgagattcacaaagggccatctggtccatagtatagaagctaataaaaatcctggccaccag

SEQ ID NO: 59916 - DNA, 120 bp, Artificial Sequence
  ENSG00000072042_28 (sequence is synthesized)
ctcagagacatgacaaagaagtttaccatctctttagacatagatggatacttacctgcaaaaaattagaacccgagctggcatcatgtgtggggtctgaattcgtaccaccaaatgata

SEQ ID NO: 59917 - DNA, 120 bp, Artificial Sequence
  ENSG00000072042_29 (sequence is synthesized)
tgaggatatttatgggtttgatttttgtatgtgtgtgtaatactctatggaaaattaacgtaaaaacctgtagtgtctcatcaaaagcaaatccaagagcactctataggcatatcccct

SEQ ID NO: 59918 - DNA, 120 bp, Artificial Sequence
  ENSG00000072042_30 (sequence is synthesized)
tatagcccagggatctaggcctccaaggaaaaagctttcactggtgtgaactcatagtcataaattacaaaccacatgaggaaatgaaccatgagagagaattggaagatgcaataaaga

SEQ ID NO: 59919 - DNA, 120 bp, Artificial Sequence
  ENSG00000072042_31 (sequence is synthesized)
ggtgaagccagtatttatttctttggggacctgaatcccagggcagaggtacatagagaacattcttttttctcttgctttggaatctttccattcagcttgggaagtctttttattgag

SEQ ID NO: 59920 - DNA, 120 bp, Artificial Sequence
  ENSG00000072042_32 (sequence is synthesized)
agaggtggatgcaacaattcccaaaagcagtgagtaagtagctcctgaactacaaggatctggaaggtcatttggtagtataaaatggaattctgccccatagtaaaagtaggtgggatt

SEQ ID NO: 59921 - DNA, 120 bp, Artificial Sequence
  ENSG00000072042_33 (sequence is synthesized)
caactaaagtcttaaaatgaaaaacaatagaaaataaatatgaaggaaaaatggagggaagattgaagtcctgcatcctcattttcaaagcctgagcgtgaggcagctttctaagatgta

SEQ ID NO: 59922 - DNA, 120 bp, Artificial Sequence
  ENSG00000072042_34 (sequence is synthesized)
atagccttggctagccacttccacgctccatcgtcttgtccctgcagaggaaaagcacctccacgttttgatcaacaatgcaggagtgatgatgtgtccgtactcgaagacagcagatgg

SEQ ID NO: 59923 - DNA, 120 bp, Artificial Sequence
  ENSG00000072042_35 (sequence is synthesized)
ctttgagatgcacataggagtcaaccacttgggtaagaaatctggccttatcacaaagctagagagacccaaaattctctttgggaaacttaggggtcagattgaggcttcttgttgtgt

SEQ ID NO: 59924 - DNA, 120 bp, Artificial Sequence
  ENSG00000072042_36 (sequence is synthesized)
gattgaacctcaggaccataatagaccatgtgtgcataatagtttggtcctacctgatagctgaggaatacctgagggctgctccaggttctgcccgctttttaatctgtgatttagatt

SEQ ID NO: 59925 - DNA, 89 bp, Artificial Sequence
  ENSG00000072042_37 (sequence is synthesized)
tacttaaactcctggcctcaggcaccttcctgcctcagcctctttaagtgctgagattaccggcgtgagccaccgcacccagccaacca

SEQ ID NO: 59926 - DNA, 120 bp, Artificial Sequence
  ENSG00000072042_38 (sequence is synthesized)
gctgagattaccggcgtgagccaccgcacccagccaaccagctcttaagaatgagattaaccaaagtaggaatgagctgggacttcatattcacatagtctagacctatctcgctcatat

SEQ ID NO: 59927 - DNA, 120 bp, Artificial Sequence
  ENSG00000072042_39 (sequence is synthesized)
aaggatgcctcatgtctttggctgttgttatttccctaaaccttcattaaacttgttttctagttgataatgaaaagttggagggaaagaccttatttctgaattatctgcctcccatag

SEQ ID NO: 59928 - DNA, 120 bp, Artificial Sequence
  ENSG00000072062_0 (sequence is synthesized)
acagacagcggcagagatcttgggctgaggttcccgggcgggcgggcgcggagagacgcgggaagcaggggctgggcgggggtcgcggcgccgcagctagcgcagccagcccgagggccg

SEQ ID NO: 59929 - DNA, 120 bp, Artificial Sequence
  ENSG00000072062_1 (sequence is synthesized)
ccggccgcagccagcacccgccgcgccgcagctccgggaccggccccggccgccgccgccgcgatgggcaacgccgccgccgccaagaagggcagcgagcaggagagcgtgaaagaattc

SEQ ID NO: 59930 - DNA, 120 bp, Artificial Sequence
  ENSG00000072062_2 (sequence is synthesized)
agggcagcgagcaggagagcgtgaaagaattcttagccaaagccaaagaagattttcttaaaaaatgggaaagtcccgctcagaacacagcccacttggatcagtttgaacgaatcaaga

SEQ ID NO: 59931 - DNA, 120 bp, Artificial Sequence
  ENSG00000072062_3 (sequence is synthesized)
ccctcggcacgggctccttcgggcgggtgatgctggtgaaacacaaggagaccgggaaccactatgccatgaagatcctcgacaaacagaaggtggtgaaactgaaacagatcgaacaca

SEQ ID NO: 59932 - DNA, 120 bp, Artificial Sequence
  ENSG00000072062_4 (sequence is synthesized)
ccctgaatgaaaagcgcatcctgcaagctgtcaactttccgttcctcgtcaaactcgagttctccttcaaggacaactcaaacttatacatggtcatggagtacgtgcccggcggggaga

SEQ ID NO: 59933 - DNA, 120 bp, Artificial Sequence
  ENSG00000072062_5 (sequence is synthesized)
tgttctcacacctacggcggatcggaaggttcagtgagccccatgcccgtttctacgcggcccagatcgtcctgacctttgagtatctgcactcgctggatctcatctacagggacctga

SEQ ID NO: 59934 - DNA, 120 bp, Artificial Sequence
  ENSG00000072062_6 (sequence is synthesized)
agccggagaatctgctcattgaccagcagggctacattcaggtgacagacttcggtttcgccaagcgcgtgaagggccgcacttggaccttgtgcggcacccctgagtacctggcccctg

SEQ ID NO: 59935 - DNA, 120 bp, Artificial Sequence
  ENSG00000072062_7 (sequence is synthesized)
agattatcctgagcaaaggctacaacaaggccgtggactggtgggccctgggggttcttatctatgaaatggccgctggctacccgcccttcttcgcagaccagcccatccagatctatg

SEQ ID NO: 59936 - DNA, 120 bp, Artificial Sequence
  ENSG00000072062_8 (sequence is synthesized)
agaagatcgtctctgggaaggtgcgcttcccttcccacttcagctctgacttgaaggacctgctgcggaacctcctgcaggtagatctcaccaagcgctttgggaacctcaagaatgggg

SEQ ID NO: 59937 - DNA, 120 bp, Artificial Sequence
  ENSG00000072062_9 (sequence is synthesized)
tcaacgatatcaagaaccacaagtggtttgccacaactgactggattgccatctaccagaggaaggtggaagctcccttcataccaaagtttaaaggccctggggatacgagtaactttg

SEQ ID NO: 59938 - DNA, 120 bp, Artificial Sequence
  ENSG00000072062_10 (sequence is synthesized)
acgactatgaggaagaagaaatccgggtctccatcaatgagaagtgtggcaaggagttttctgagttttaggggcatgcctgtgcccccatgggttttcttttttcttttttcttttttt

SEQ ID NO: 59939 - DNA, 120 bp, Artificial Sequence
  ENSG00000072062_11 (sequence is synthesized)
gcatctaatttcacccccaccccaccctccagggttagggggagcaggaagcccagataatcagagggacagaaacaccagctgctccccctcatccccttcaccctcctgccccctctc

SEQ ID NO: 59940 - DNA, 120 bp, Artificial Sequence
  ENSG00000072062_12 (sequence is synthesized)
ccacttttcccttcctctttccccacagccccccagcccctcagccctcccagcccacttctgcctgttttaaacgagtttctcaactccagtcagaccaggtcttgctggtgtatccag

SEQ ID NO: 59941 - DNA, 120 bp, Artificial Sequence
  ENSG00000072062_13 (sequence is synthesized)
ggacagggtatggaaagaggggctcacgcttaactccagcccccacccacacccccatcccacccaaccacaggccccacttgctaagggcaaatgaacgaagcgccaaccttcctttcg

SEQ ID NO: 59942 - DNA, 120 bp, Artificial Sequence
  ENSG00000072062_14 (sequence is synthesized)
gagtaatcctgcctgggaaggagagatttttagtgacatgttcagtgggttgcttgctagaatttttttaaaaaaacaacaatttaaaatcttatttaagttccaccagtgcctccctcc

SEQ ID NO: 59943 - DNA, 120 bp, Artificial Sequence
  ENSG00000072062_15 (sequence is synthesized)
ctccttcctctactcccacccctcccatgtccccccattcctcaaatccattttaaagagaagcagactgactttggaaagggaggcgctggggtttgaacctccccgctgctaatctcc

SEQ ID NO: 59944 - DNA, 120 bp, Artificial Sequence
  ENSG00000072062_16 (sequence is synthesized)
cctgggcccctccccggggaatcctctctgccaatcctgcgagggtctaggcccctttaggaagcctccgctctctttttccccaacagacctgtcttcacccttgggctttgaaagcca

SEQ ID NO: 59945 - DNA, 120 bp, Artificial Sequence
  ENSG00000072062_17 (sequence is synthesized)
gacaaagcagctgcccctctccctgccaaagaggagtcatcccccaaaaagacagagggggagccccaagcccaagtctttcctcccagcagcgtttccccccaactccttaattttatt

SEQ ID NO: 59946 - DNA, 120 bp, Artificial Sequence
  ENSG00000072062_18 (sequence is synthesized)
ctccgctagattttaacgtccagccttccctcagctgagtggggagggcatccctgcaaaagggaacagaagaggccaagtccccccaagccacggcccggggttcaaggctagagctgc

SEQ ID NO: 59947 - DNA, 120 bp, Artificial Sequence
  ENSG00000072062_19 (sequence is synthesized)
tggggaggggctgcctgttttactcacccaccagcttccgcctcccccatcctgggcgcccctcctccagcttagctgtcagctgtccatcacctctcccccactttctcatttgtgctt

SEQ ID NO: 59948 - DNA, 120 bp, Artificial Sequence
  ENSG00000072062_20 (sequence is synthesized)
ttttctctcgtaatagaaaagtggggagccgctggggagccaccccattcatccccgtatttccccctctcataacttctccccatcccaggaggagttctcaggcctggggtggggccc

SEQ ID NO: 59949 - DNA, 120 bp, Artificial Sequence
  ENSG00000072062_21 (sequence is synthesized)
cgggtgggtgcgggggcgattcaacctgtgtgctgcgaaggacgagacttcctcttgaacagtgtgctgttgtaaacatatttgaaaactattaccaataaagttttgtttaaaaaaaaa

SEQ ID NO: 59950 - DNA, 120 bp, Artificial Sequence
  ENSG00000072062_22 (sequence is synthesized)
agactgcgtctccgccccgccctctcacccccggattgacactgagcgttctgctggggggcttggcggacccggcacctccgccaatcggcggcctcgcagggcggaccccgggcccag

SEQ ID NO: 59951 - DNA, 120 bp, Artificial Sequence
  ENSG00000072062_23 (sequence is synthesized)
aaataaaaaataataatagctgacatttatctggcactatcatcacacggggccactgttcaactccctttgtcaagatgaactcattcattcctcaaaaccaccccactttacagatga

SEQ ID NO: 59952 - DNA, 120 bp, Artificial Sequence
  ENSG00000072062_24 (sequence is synthesized)
ggaaaactgaggcctagagaggtgagatcagttacccaaagtcacagagttcatcagagaccaggctgggctctgaactggatcttgaccccaagtcctggcccttagccactttgctgg

SEQ ID NO: 59953 - DNA, 120 bp, Artificial Sequence
  ENSG00000072062_25 (sequence is synthesized)
gctgtgtctcagcagagacgagaatgactgttttcaagcctgtttcctgggttgttaagtggagacaatggatacaaggcaggttgccgagtgagtcagatgagacagtgtagacagcag

SEQ ID NO: 59954 - DNA, 120 bp, Artificial Sequence
  ENSG00000072062_26 (sequence is synthesized)
ccggcacagggtctgccggggaagtttcaacattagccaggcggtgatgttcaccttgggataccatggggccgaggagtgggcatcgggcgagacttcccttgaaccagctctggagca

SEQ ID NO: 59955 - DNA, 120 bp, Artificial Sequence
  ENSG00000072062_27 (sequence is synthesized)
atgcccttgcgattgccacggagaggaacagggccagctgggggccaaggtgacagctgagccccccaagggcacctgctacccgagcccccgaggcctccatcccaggcccggcctccc

SEQ ID NO: 59956 - DNA, 71 bp, Artificial Sequence
  ENSG00000072062_28 (sequence is synthesized)
acatatctacatacatacagaggtgaggtcttgcacctcgaccccccaaaatgctgggattacaggggtga

SEQ ID NO: 59957 - DNA, 120 bp, Artificial Sequence
  ENSG00000072062_29 (sequence is synthesized)
gtgagccaccgcaccgggccgaatccctctcttgacacgtcacctccccaccaaaggcagttgtcctttctgacttcaaacaccgtgcctttgttttgtctgggcgtggacatgatataa

SEQ ID NO: 59958 - DNA, 120 bp, Artificial Sequence
  ENSG00000072062_30 (sequence is synthesized)
atggaatcattcatgttcttttgtgtcttcttttgcttaacataatcagtttgaaatgcagccacattgttgagtggatgcatgggctgtcctgttggcggtggtggtggtgagtggaat

SEQ ID NO: 59959 - DNA, 120 bp, Artificial Sequence
  ENSG00000072062_31 (sequence is synthesized)
tccattgtatgactatagctcagtctgtgattccattttcctgtggatggacccacaggctgtttcccatgtcgggctatctaagaatcaggtgccttgcgtttctgacggctggactgg

SEQ ID NO: 59960 - DNA, 120 bp, Artificial Sequence
  ENSG00000072062_32 (sequence is synthesized)
aggtgtcttcctctggggtaggctctgcagggccacctgctggaccattttggggcatgaccactgacgttcacctccccatttgtccccatcagtgagccccatgcccgtttctacgcg

SEQ ID NO: 59961 - DNA, 120 bp, Artificial Sequence
  ENSG00000072062_33 (sequence is synthesized)
gaagaaacagaccgttccctgctcacccatcctattccctggggagccctgcttgttgtcagaataatctagaagttccttaagtcaggccaggtggtgaagctggacgcgccggccaca

SEQ ID NO: 59962 - DNA, 120 bp, Artificial Sequence
  ENSG00000072062_34 (sequence is synthesized)
ctgaggccaacacctcaagcccccttgctgtccagccccaaccccgcggttccagaatcccatgggcttccaaaatcccgagcctcacgggaacatcttggccacagaacacaaaccgcc

SEQ ID NO: 59963 - DNA, 120 bp, Artificial Sequence
  ENSG00000072062_35 (sequence is synthesized)
ctgccagacgaccctccttttcgctcctcatcccagttagtgtgagttttcgcaaattccaaggcagaaaaacgaatgtatttggttcctgttcccaggtgctgtccatagcctcaccca

SEQ ID NO: 59964 - DNA, 120 bp, Artificial Sequence
  ENSG00000072062_36 (sequence is synthesized)
ggattgccctcacttagcatttatagcccatgcttcctctcccaaacccagacttgcctaactctgagggttcagatgaggggtggtgaagccatctcagctcacatctatgacaggtgc

SEQ ID NO: 59965 - DNA, 120 bp, Artificial Sequence
  ENSG00000072062_37 (sequence is synthesized)
aaagtgcccaccatccaccaggccccagaatccccatcagtcacaccctgagatagtggcaccctctgtaggagaggtgaggaaacaggctgggaaaagggatgtgtcttggccaagatc

SEQ ID NO: 59966 - DNA, 120 bp, Artificial Sequence
  ENSG00000072062_38 (sequence is synthesized)
acactttggtgagtaggtaatcaccgtaggcaatcattgtaggcactgatggccggagagaggttggggaccccacctctgccctcagctcaaccaccttgctgggaagacccgaccatc

SEQ ID NO: 59967 - DNA, 120 bp, Artificial Sequence
  ENSG00000072062_39 (sequence is synthesized)
ccccgacttggtccagcatctcctacacaggagcttttggttggcccggagtcatgacactgtggtgggagcaccctcaggctcagcctgggccccagtcccagctctgccaccgactgg

SEQ ID NO: 59968 - DNA, 120 bp, Artificial Sequence
  ENSG00000072062_40 (sequence is synthesized)
ccccagtcccagctctgccaccgactggctttgaaactttggggctgggtacaatggctcacacctgtaatgccagcaccttgggaagtggaggcttgaggccaggagttccagaccagc

SEQ ID NO: 59969 - DNA, 120 bp, Artificial Sequence
  ENSG00000072062_41 (sequence is synthesized)
aataattttttaaccaggggccatcttttttattctgggccccactaattctgcagcctatcatgatcccattttacagatgacaaaactgtggcctcagagccttactcaagctcccag

SEQ ID NO: 59970 - DNA, 120 bp, Artificial Sequence
  ENSG00000072062_42 (sequence is synthesized)
agcaaggtactacagagttctctctccagccaaggcaggctaaccaggtcctgacatacctctgagccagccctcactttcacccattaacagcaggataagggtcgcccctgtagaaca

SEQ ID NO: 59971 - DNA, 120 bp, Artificial Sequence
  ENSG00000072062_43 (sequence is synthesized)
tgattcctacagggagccaggatcgctgttgtcatttaatgtttgaacaccagccggggaggcccccaaggccttcagatcgggtccaagtctcaggggtgggcccttgaccagccactg

SEQ ID NO: 59972 - DNA, 120 bp, Artificial Sequence
  ENSG00000072062_44 (sequence is synthesized)
ctctgcaaaccttggctagcttggagcaggtacctttaaaagcttctgtggcaaccagctcctcctccctggtcccctgaggccatcccaaggaagctgacttagaggctctgcgttttc

SEQ ID NO: 59973 - DNA, 120 bp, Artificial Sequence
  ENSG00000072062_45 (sequence is synthesized)
ctggtttctcagcaaaaggaagattccagggagagcccaagggggctggggatggatctgggatcaggcagcagccagggtggggacttggagaccaccttccagctgtggctgcagctg

SEQ ID NO: 59974 - DNA, 120 bp, Artificial Sequence
  ENSG00000072062_46 (sequence is synthesized)
ctcctctgggcccacctggctgtacgtttcctgggctacctgcaccgcaccttccgggggcctaagccacagccagcaccctgagcctccctggccagggggcagaaggccgccagatca

SEQ ID NO: 59975 - DNA, 120 bp, Artificial Sequence
  ENSG00000072071_0 (sequence is synthesized)
ctaatttttggtcggcggcggtgctgggccaggggaaggaagggacacggaggccgccctcgtcccgccacctcctacccgcttccccccagccccggctccgggagatgtgccgggcgg

SEQ ID NO: 59976 - DNA, 120 bp, Artificial Sequence
  ENSG00000072071_1 (sequence is synthesized)
ggggcccgggttcgccgagccgcaggagagacacgctgggccgaccccagagaggcgctggacaggctggtggtccaggccgtggtgcctgccaggtgatgtggggcaaagccccccgca

SEQ ID NO: 59977 - DNA, 120 bp, Artificial Sequence
  ENSG00000072071_2 (sequence is synthesized)
caggccactgagagctccggacacgcacccggctgccaccatggcccgcctagccgcagtgctctggaatctgtgtgtcaccgccgtcctggtcacctcggccacccaaggcctgagccg

SEQ ID NO: 59978 - DNA, 120 bp, Artificial Sequence
  ENSG00000072071_3 (sequence is synthesized)
ggccgggctcccgttcgggctgatgcgccgggagctggcgtgtgaaggctaccccatcgagctgcggtgccccggcagcgacgtcatcatggtggagaatgccaactacgggcgcacgga

SEQ ID NO: 59979 - DNA, 120 bp, Artificial Sequence
  ENSG00000072071_4 (sequence is synthesized)
cgacaagatttgcgatgctgaccctttccagatggagaatgtgcagtgctacctgccggacgccttcaagatcatgtcacagaggtgtaacaaccgcacccagtgcgtggtggtcgccgg

SEQ ID NO: 59980 - DNA, 120 bp, Artificial Sequence
  ENSG00000072071_5 (sequence is synthesized)
ctcggatgcctttcctgacccctgtcctgggacctacaagtacctggaggtgcagtacgactgtgtcccctacatcttcgtgtgcccagggaccctgcagaaggtgctggagcccacctc

SEQ ID NO: 59981 - DNA, 120 bp, Artificial Sequence
  ENSG00000072071_6 (sequence is synthesized)
gacacacgagtcagagcaccagtctggcgcatggtgcaaggacccgctgcaggcgggtgaccgcatctacgtgatgccctggatcccctaccgcacggacacactgactgagtatgcctc

SEQ ID NO: 59982 - DNA, 120 bp, Artificial Sequence
  ENSG00000072071_7 (sequence is synthesized)
gtgggaggactacgtggccgcccgccacaccaccacctaccgcctgcccaaccgcgtggatggcacaggctttgtggtctacgatggtgccgtcttctacaacaaggagcgcacgcgcaa

SEQ ID NO: 59983 - DNA, 120 bp, Artificial Sequence
  ENSG00000072071_8 (sequence is synthesized)
catcgtcaagtatgacctacggacgcgcatcaagagcggggagacggtcatcaataccgccaactaccatgacacctcgccctaccgctggggcggaaagaccgacattgacctggcggt

SEQ ID NO: 59984 - DNA, 120 bp, Artificial Sequence
  ENSG00000072071_9 (sequence is synthesized)
ggacgagaacgggctgtgggtcatctacgccactgagggcaacaacgggcggctggtggtgagccagctgaacccctacacactgcgctttgagggcacgtgggagacgggttacgacaa

SEQ ID NO: 59985 - DNA, 120 bp, Artificial Sequence
  ENSG00000072071_10 (sequence is synthesized)
gcgctcggcatccaacgccttcatggtgtgtggggtcctgtacgtcctgcgttccgtgtacgtggatgatgacagcgaggcggctggcaaccgcgtggactatgccttcaacaccaatgc

SEQ ID NO: 59986 - DNA, 120 bp, Artificial Sequence
  ENSG00000072071_11 (sequence is synthesized)
caaccgcgaggagcctgtcagcctcaccttccccaacccctaccagttcatctcctccgttgactacaaccctcgcgacaaccagctgtacgtctggaacaactatttcgtggtgcgcta

SEQ ID NO: 59987 - DNA, 120 bp, Artificial Sequence
  ENSG00000072071_12 (sequence is synthesized)
cagcctggagttcgggccgcccgaccccagtgctggcccagccacttccccacccctcagcacgaccaccacagccaggcccacgcccctcaccagcacagcctcgcccgcagccaccac

SEQ ID NO: 59988 - DNA, 120 bp, Artificial Sequence
  ENSG00000072071_13 (sequence is synthesized)
cccgctccgccgggcacccctcaccacgcacccagtgggtgccatcaaccagctgggacctgatctgcctccagccacagccccagtccccagcacccggcggcccccagccccgaatct

SEQ ID NO: 59989 - DNA, 120 bp, Artificial Sequence
  ENSG00000072071_14 (sequence is synthesized)
acacgtgtcccctgagctcttctgcgagccccgagaggtacggcgggtccagtggccggccacccagcagggcatgctggtggagaggccctgccccaaggggactcgaggaattgcctc

SEQ ID NO: 59990 - DNA, 120 bp, Artificial Sequence
  ENSG00000072071_15 (sequence is synthesized)
cttccagtgtctaccagccttggggctctggaacccccggggccctgacctcagcaactgcacctccccctgggtcaaccaggtggcccagaagatcaagagtggggagaacgcggccaa

SEQ ID NO: 59991 - DNA, 120 bp, Artificial Sequence
  ENSG00000072071_16 (sequence is synthesized)
catcgccagcgagctggcccgacacacccggggctccatctacgcgggggacgtctcctcctctgtgaagctgatggagcagctgctggacatcctggatgcccagctgcaggccctgcg

SEQ ID NO: 59992 - DNA, 120 bp, Artificial Sequence
  ENSG00000072071_17 (sequence is synthesized)
gcccatcgagcgcgagtcagccggcaagaactacaacaagatgcacaagcgagagagaacttgtaaggattatatcaaggccgtggtggagacagtggacaatctgctccggccagaagc

SEQ ID NO: 59993 - DNA, 120 bp, Artificial Sequence
  ENSG00000072071_18 (sequence is synthesized)
tctggagtcctggaaggacatgaatgccacggagcaggtgcacacggccaccatgctcctcgacgtcctggaggagggcgccttcctgctggccgacaatgtcagggagcctgcccgctt

SEQ ID NO: 59994 - DNA, 120 bp, Artificial Sequence
  ENSG00000072071_19 (sequence is synthesized)
cctggctgccaaggagaacgtggtcctggaggtcacagtcctgaacacagagggccaggtgcaggagctggtgttcccccaggaggagtacccgagaaagaactccatccagctgtctgc

SEQ ID NO: 59995 - DNA, 120 bp, Artificial Sequence
  ENSG00000072071_20 (sequence is synthesized)
caaaaccatcaagcagaacagccgcaatggggtggtcaaagttgtcttcatcctctacaacaacctgggcctcttcctgtccacggagaatgccacagtgaagctggccggcgaagcagg

SEQ ID NO: 59996 - DNA, 120 bp, Artificial Sequence
  ENSG00000072071_21 (sequence is synthesized)
cccgggtggccctgggggcgcctctctagtggtgaactcacaggtcatcgcagcatccatcaacaaggagtccagccgcgtcttcctcatggaccctgtcatcttcaccgtggcccacct

SEQ ID NO: 59997 - DNA, 120 bp, Artificial Sequence
  ENSG00000072071_22 (sequence is synthesized)
ggaggacaagaaccacttcaatgctaactgctccttctggaactactcggagcgttccatgctgggctactggtcgacccaaggctgccgcctggtggagtccaacaagacccataccac

SEQ ID NO: 59998 - DNA, 120 bp, Artificial Sequence
  ENSG00000072071_23 (sequence is synthesized)
catcacctgggtgggcattgtgatctccctggtctgcttggccatctgcatctccaccttctgcttcctgcgggggctgcagaccgaccgcaacaccatccacaagaacctgtgcatcaa

SEQ ID NO: 59999 - DNA, 120 bp, Artificial Sequence
  ENSG00000072071_24 (sequence is synthesized)
cctcttcctggctgagctgctcttcctggtcgggatcgacaagactcagtatgagattgcctgccccatcttcgccggcctgctgcactatttcttcctggctgccttctcctggctgtg

SEQ ID NO: 60000 - DNA, 120 bp, Artificial Sequence
  ENSG00000072071_25 (sequence is synthesized)
cctggagggcgtgcacctctacctgctactagtggaggtgtttgagagcgagtattcccgcaccaagtactactacctgggtggctactgcttcccggccctggtggtgggcatcgcggc

SEQ ID NO: 60001 - DNA, 120 bp, Artificial Sequence
  ENSG00000072071_26 (sequence is synthesized)
tgccattgactaccgcagctacggcaccgagaaggcctgctggctccgagtggacaattacttcatctggagtttcatcgggccagtctccttcgttatcgtggtcaacctggtgttcct

SEQ ID NO: 60002 - DNA, 120 bp, Artificial Sequence
  ENSG00000072071_27 (sequence is synthesized)
catggtgaccctgcacaagatgatccgaagctcatctgtgctcaagcccgactccagccgcctggacaacattaaatcctgggcgctgggggccatcgcgctgctgttcctgctgggcct

SEQ ID NO: 60003 - DNA, 120 bp, Artificial Sequence
  ENSG00000072071_28 (sequence is synthesized)
cacctgggctttcggcctcctcttcatcaacaaggagtcggtggtcatggcctatctcttcaccaccttcaacgccttccagggggtcttcatcttcgtctttcactgcgccttacagaa

SEQ ID NO: 60004 - DNA, 120 bp, Artificial Sequence
  ENSG00000072071_29 (sequence is synthesized)
gaaggtgcacaaggagtacagcaagtgcctgcgtcactcctactgctgcatccgctccccacccgggggcactcacggatccctcaagacctcagccatgcgaagcaacacccgctacta

SEQ ID NO: 60005 - DNA, 120 bp, Artificial Sequence
  ENSG00000072071_30 (sequence is synthesized)
cacagggacccagagccgaattcggaggatgtggaatgacactgtgaggaaacagacggagtcctccttcatggcgggtgacatcaacagcacccccaccctgaaccgaggtaccatggg

SEQ ID NO: 60006 - DNA, 120 bp, Artificial Sequence
  ENSG00000072071_31 (sequence is synthesized)
gaaccacctgctgaccaaccccgtgctgcagccccgtgggggcaccagtccctacaacaccctcatcgccgagtcagtgggcttcaatccctcctcgccccctgtcttcaactccccagg

SEQ ID NO: 60007 - DNA, 120 bp, Artificial Sequence
  ENSG00000072071_32 (sequence is synthesized)
gagctaccgggaacccaagcaccccttgggaggccgggaagcctgtggcatggacaccctgcccctgaacggcaacttcaataacagttactccttgcgaagtggggatttccctcccgg

SEQ ID NO: 60008 - DNA, 120 bp, Artificial Sequence
  ENSG00000072071_33 (sequence is synthesized)
ggatgggggccctgagccgccccgaggccggaacctagccgatgcggcggcctttgagaagatgatcatctcagagctggtgcacaacaacctgcgggggagcagcagcgcggccaaggg

SEQ ID NO: 60009 - DNA, 120 bp, Artificial Sequence
  ENSG00000072071_34 (sequence is synthesized)
ccctccaccgcctgagccccctgtgccacctgtgccagggggcgggggcgaggaagaggcgggcgggcccgggggtgctgaccgggccgagattgaacttctctataaggccctggagga

SEQ ID NO: 60010 - DNA, 120 bp, Artificial Sequence
  ENSG00000072071_35 (sequence is synthesized)
gcctctgctgctgccccgggcccagtcggtgctgtaccagagcgatctggacgagtcggagagctgcacggccgaggacggcgccaccagccggcccctctcctcccctcctggccggga

SEQ ID NO: 60011 - DNA, 120 bp, Artificial Sequence
  ENSG00000072071_36 (sequence is synthesized)
ctccctctatgccagcggggccaacctgcgggactcaccctcctacccggacagcagccctgaggggcccagtgaggccctgcccccaccccctcccgcaccccccggcccccccgaaat

SEQ ID NO: 60012 - DNA, 120 bp, Artificial Sequence
  ENSG00000072071_37 (sequence is synthesized)
ctactacacctcgcgcccgccagccctggtggcccggaatcccctgcagggctactaccaggtgcggcgtcctagccacgagggctacctggcagccccaggccttgaggggccagggcc

SEQ ID NO: 60013 - DNA, 120 bp, Artificial Sequence
  ENSG00000072071_38 (sequence is synthesized)
cgatggggacgggcagatgcagctggtcaccagtctctgagggcacctcatggaccaggggctggtggcccaggccagggagggaaccctgggcagggctctggtgggagagggagacag

SEQ ID NO: 60014 - DNA, 120 bp, Artificial Sequence
  ENSG00000072071_39 (sequence is synthesized)
atggaggcagtggctggtgggccactctctccaggtgcccctcagccatgggccctacagtcccctcaggggactctaacctgggggcctgaggtgccagggttcacagacagggtttcc

SEQ ID NO: 60015 - DNA, 120 bp, Artificial Sequence
  ENSG00000072071_40 (sequence is synthesized)
caccagccacacgcaccagctctatttgggggaagtgtagtgaggaggagcccagaggaccccaggggagtgaggagggagaacttggaagggtgcagcccacttccagactctcccctc

SEQ ID NO: 60016 - DNA, 120 bp, Artificial Sequence
  ENSG00000072071_41 (sequence is synthesized)
tcccacccttctaccctgtgaagggaaatgagggctttagtttcctgggcagggaggggcagcttctgaggttgccaaaggcccccactggatggaacctgttagctgctcctctccgca

SEQ ID NO: 60017 - DNA, 120 bp, Artificial Sequence
  ENSG00000072071_42 (sequence is synthesized)
gccagaaatgctgccggctgcacccagagggagcagtgaggcaggacagatggacaggttcctcctgcgctgtaattccctgctccctggagactgggaaaaggccgcagggcaggggga

SEQ ID NO: 60018 - DNA, 120 bp, Artificial Sequence
  ENSG00000072071_43 (sequence is synthesized)
ctgggcggtggtggctggtggtttaaaggttgaactttctctgaagctcctttccccttgctcttggtccctgccccgcaagcaaacctgccccctctgcctcccagtgcacccaatgac

SEQ ID NO: 60019 - DNA, 120 bp, Artificial Sequence
  ENSG00000072071_44 (sequence is synthesized)
cccctcccttggggcgactcctgatgaagcacaactccccgcagggcccccagcccacaggggtggccatatttgggcagttcccagtcctgtgggctcggctatctggggagcagattt

SEQ ID NO: 60020 - DNA, 120 bp, Artificial Sequence
  ENSG00000072071_45 (sequence is synthesized)
tgggtctggatctccctggggagtgggtcctgggcttggatctttccctagggggccctcttactccttcctctctcctcctccttccccattgctgtaaatatttcaacgaaatggaaa

SEQ ID NO: 60021 - DNA, 120 bp, Artificial Sequence
  ENSG00000072071_46 (sequence is synthesized)
cacttgaagccaccgggagcctgcggcccgggccagcccgggctttctccggagcagagcagcgctgctggcctggcagccaggacttctccgtgtacgtgcatccccagtccccgccgg

SEQ ID NO: 60022 - DNA, 120 bp, Artificial Sequence
  ENSG00000072071_47 (sequence is synthesized)
ggcgggcgggccgccagagcagctttttacaatccagagacagaaaacaaaatctagatgcaacagcgaaacaaagaacccatttccttcctggcaccctcctttcctgctccgcctgcc

SEQ ID NO: 60023 - DNA, 120 bp, Artificial Sequence
  ENSG00000072071_48 (sequence is synthesized)
cggcatcatcagcccttctggggcgtgtacctctcactgcctgccccaggaccagaggcctgtctcccccttccctccccaccggcccgggggagacctcttcacacccaaagatgcttt

SEQ ID NO: 60024 - DNA, 120 bp, Artificial Sequence
  ENSG00000072071_49 (sequence is synthesized)
gtcaagatggctgcgctgtccctttgagttcctgcttcttgtatattgctctggggactctcgccggggaagatggggctgatttcccacctagagaggttgatggcagaaggaaaatgg

SEQ ID NO: 60025 - DNA, 120 bp, Artificial Sequence
  ENSG00000072071_50 (sequence is synthesized)
ggaggcactggggttgtggagggcatgggtatggctgaggagggtgctgggaacggcaaggcggtctgggggatggggaggggcaaaggtgagagatcaccttccctatcctccaccttc

SEQ ID NO: 60026 - DNA, 120 bp, Artificial Sequence
  ENSG00000072071_51 (sequence is synthesized)
ccgcagggaagacgaagccaggtgccagggctggggtcgggacacccatgttctgggcggcttgaccccaaatcccagaccccggaagctccaggctcgggatgtgtcctgagcacctgt

SEQ ID NO: 60027 - DNA, 120 bp, Artificial Sequence
  ENSG00000072071_52 (sequence is synthesized)
cccggccccctcctctccagcctgtcaggccagcctccccagcccccttccctcaactctaggggcagcatagccccaggccaccctagcccagcccctgcattgccgtttccccagagg

SEQ ID NO: 60028 - DNA, 120 bp, Artificial Sequence
  ENSG00000072071_53 (sequence is synthesized)
tggcccctccacctctgctctgacctctccccatctctctgcccctccttttctcacaagtgccatgagttttcaaacatcttcgggtctcagcctgctgctgccatgaactttgttggg

SEQ ID NO: 60029 - DNA, 120 bp, Artificial Sequence
  ENSG00000072071_54 (sequence is synthesized)
ttaagggggaggggctctaggaaggaactggggggaaggggacaggtaggtggctggagggaccctttttgctgctagaaagcccctcccttctcccggggagctggggctggcttgtcc

SEQ ID NO: 60030 - DNA, 120 bp, Artificial Sequence
  ENSG00000072071_55 (sequence is synthesized)
ccatcaattaggggagaaggggtcagaccaaagatggtggtttgtcccgtgtaagggaacaggtgtggggaagaggtggggttgggttccaactctggctttttctggtagaaaggccta

SEQ ID NO: 60031 - DNA, 120 bp, Artificial Sequence
  ENSG00000072071_56 (sequence is synthesized)
acccattacaccagaagaccatgggtgaagtctagatggggaggagaagtgaggccagggacagtcttgccagacgactctgaggagggcaagggacagttccatggcccttcccggact

SEQ ID NO: 60032 - DNA, 120 bp, Artificial Sequence
  ENSG00000072071_57 (sequence is synthesized)
gcactaggctgggagctctgttgtgtggaggggtggtcagaggtctgtgaagagcgggcaggaggcatgagcaggcgaggagctggcctgtcccgggaagcagcccagcctgtggctgcc

SEQ ID NO: 60033 - DNA, 120 bp, Artificial Sequence
  ENSG00000072071_58 (sequence is synthesized)
cccgacaccaggaggagggccaggagagttccagggggctgaggcacacagagaggccaacttcctccctgcccagccttccttgtatctctccagactcggacaatcaaagggagagag

SEQ ID NO: 60034 - DNA, 120 bp, Artificial Sequence
  ENSG00000072071_59 (sequence is synthesized)
ggtgtatcgggtcctgttccagccggcatcgccgggtggcttccaggcctcagagctgtgtggcagggccccctgctggggctggacatcactgcagtccagtgcaaagccgcccccaga

SEQ ID NO: 60035 - DNA, 120 bp, Artificial Sequence
  ENSG00000072071_60 (sequence is synthesized)
gcccaggtgtccccccaacctaaccagacctggtgccttgacgcccccaccccagctgggacggtacagagaagggtcttggtttcctctcctactcccttccttaggctcctgaactcg

SEQ ID NO: 60036 - DNA, 120 bp, Artificial Sequence
  ENSG00000072071_61 (sequence is synthesized)
tttgctcctaaatcttgttaattctttttctctggattttggtttcttttggctttcccttgccttcccctttctctgtctccaacactctttccccatgtctttctggctgtctctatg

SEQ ID NO: 60037 - DNA, 120 bp, Artificial Sequence
  ENSG00000072071_62 (sequence is synthesized)
ttcctcttctcttatcctcaactttctgtccattcgggcctcctccccacctcccacgccccagcccctccctccttggtctccttttcgatatgccaaaccaattttgggtcgagtgca

SEQ ID NO: 60038 - DNA, 120 bp, Artificial Sequence
  ENSG00000072071_63 (sequence is synthesized)
tttaacgagaacaaaacaaaaggctcataacaacaagaacgtttcagaaaaaaacaaaaagttttaaaaaaattgttgagtcaaaaagtcaaacaataaagaaattaagatttcttggaa

SEQ ID NO: 60039 - DNA, 120 bp, Artificial Sequence
  ENSG00000072071_64 (sequence is synthesized)
gggacctacaagtacctggaggtgcagtacgactgtgtcccctacagtgagtcatcttgttccttgtgcggatgcgggcccttctcgcatgagtgagtgaggaggagacaccttgaccca

SEQ ID NO: 60040 - DNA, 120 bp, Artificial Sequence
  ENSG00000072071_65 (sequence is synthesized)
tcacacatgtgcacacatgcatggggcctgggcacagtggggacagccgggcctgctctctccaacacacattctctaatcccagacaccagtgtccacactcagtgcctgctcccccgc

SEQ ID NO: 60041 - DNA, 120 bp, Artificial Sequence
  ENSG00000072071_66 (sequence is synthesized)
acccctcgcaggcaggcacatgtgctcgggcccagggcccagggcccagcgggggtcgtggagcagctggggagacatgggctggcaggtctggaaggcaggactgtggggtcacctccc

SEQ ID NO: 60042 - DNA, 120 bp, Artificial Sequence
  ENSG00000072071_67 (sequence is synthesized)
tggcctacaaagggagcagggacagatggggtgggaaggggcagatggcgatggggaagtggagagagagataggagaggctgcacaggccagggaagccggggagggcaggatggtccc

SEQ ID NO: 60043 - DNA, 120 bp, Artificial Sequence
  ENSG00000072071_68 (sequence is synthesized)
ctgtcctgggacctacaagtacctggaggtgcagtacgactgtgtcccctacaaagtggagcagaaagggattgggggggtggggcggggccccccacctttctgacatcagcgctgcct

SEQ ID NO: 60044 - DNA, 120 bp, Artificial Sequence
  ENSG00000072080_0 (sequence is synthesized)
agtgtttgataaagacagctcctcttaggaagaactgtcatccccaaacacatagagagacactctctgtctctcgattacaatcatgatttccagaatggagaagatgacgatgatgat

SEQ ID NO: 60045 - DNA, 120 bp, Artificial Sequence
  ENSG00000072080_1 (sequence is synthesized)
gaagatattgattatgtttgctcttggaatgaactactggtcttgctcaggtttcccagtgtacgactacgatccatcctccttaagggatgccctcagtgcctctgtggtaaaagtgaa

SEQ ID NO: 60046 - DNA, 120 bp, Artificial Sequence
  ENSG00000072080_2 (sequence is synthesized)
ttcccagtcactgagtccgtatctgtttcgggcattcagaagctcattaaaaagagttgaggtcctagatgagaacaacttggtcatgaatttagagttcagcatccgggagactacatg

SEQ ID NO: 60047 - DNA, 120 bp, Artificial Sequence
  ENSG00000072080_3 (sequence is synthesized)
caggaaggattctggagaagatcccgctacatgtgccttccagagggactactatgtgtccacagctgtttgcagaagcaccgtgaaggtatctgcccagcaggtgcagggcgtgcatgc

SEQ ID NO: 60048 - DNA, 120 bp, Artificial Sequence
  ENSG00000072080_4 (sequence is synthesized)
gacatgttgggatctcataaatggagaaacaattatctatttggtctcatttcagacgagtccataagtgaacaattttatgatcggtcacttgggatcatgagaagggtattgcctcct

SEQ ID NO: 60049 - DNA, 120 bp, Artificial Sequence
  ENSG00000072080_5 (sequence is synthesized)
ggaaacagaaggtacccaaaccaccggcacagagcaagaataaatactgactttgagtaacggccttgaggtgtccctcgcccttttggtttgttcaaggagctgctgctttgcatagct

SEQ ID NO: 60050 - DNA, 120 bp, Artificial Sequence
  ENSG00000072080_6 (sequence is synthesized)
gctctagtgtctggtatcatcggatctggttttgaataattcccaggagtcctgggtccctggcctccaaagctggaatgtgaacgcatgccacggtggtctgaccctcacactcctttt

SEQ ID NO: 60051 - DNA, 120 bp, Artificial Sequence
  ENSG00000072080_7 (sequence is synthesized)
ctcttaacagcaaaatgcaatggaaggaagaaaagttccaacaaagaatgattttgtgaattctgtgatttttcttctgatcagtttcaatctgtaataaatgccttatttttcctgtaa

SEQ ID NO: 60052 - DNA, 120 bp, Artificial Sequence
  ENSG00000072080_8 (sequence is synthesized)
gtaacggccttgagcaaaatgcaatggaaggaagaaaagttccaacaaagaatgattttgtgaattctgtgatttttcttctgatcagtttcaatctgtaataaatgccttatttttcct

SEQ ID NO: 60053 - DNA, 120 bp, Artificial Sequence
  ENSG00000072080_9 (sequence is synthesized)
atgatttccagaatggagaagatgacgatgatgatgaagatattgattatgtttgctcttggaatgaactactggtcttgctcaggttgaggtcctagatgagaacaacttggtcatgaa

SEQ ID NO: 60054 - DNA, 68 bp, Artificial Sequence
  ENSG00000072080_10 (sequence is synthesized)
tgaattcccagtcactgagtccgtatctgtttcgggcattcagaagctcattaataaactaccatcag

SEQ ID NO: 60055 - DNA, 120 bp, Artificial Sequence
  ENSG00000072110_0 (sequence is synthesized)
aggaattcccaatgagaggcgatggggggaagtttgggcaactcggcctggccaatggagagcctcgggagggctctgccccttccccccgcccccgcccgcctcggctcccgcagcgct

SEQ ID NO: 60056 - DNA, 120 bp, Artificial Sequence
  ENSG00000072110_1 (sequence is synthesized)
agtgtgtccgcctagttcagtgtgcgtggagattaggtccaagcgcccgcccagaggcaggcagtccgcgagcccagccgccgctgtcgccgccagtagcagccttcgccagcagcgccg

SEQ ID NO: 60057 - DNA, 120 bp, Artificial Sequence
  ENSG00000072110_2 (sequence is synthesized)
cggcggaaccgggcgcaggggagcgagcccggccccgccagcccagcccagcccagccctactccctccccacgccagggcagcagccgttgctcagagagaaggtggaggaagaaatcc

SEQ ID NO: 60058 - DNA, 120 bp, Artificial Sequence
  ENSG00000072110_3 (sequence is synthesized)
agaccctagcacgcgcgcaccatcatggaccattatgattctcagcaaaccaacgattacatgcagccagaagaggactgggaccgggacctgctcctggacccggcctgggagaagcag

SEQ ID NO: 60059 - DNA, 120 bp, Artificial Sequence
  ENSG00000072110_4 (sequence is synthesized)
cagagaaagacattcacggcatggtgtaactcccacctccggaaggcggggacacagatcgagaacatcgaagaggacttccgggatggcctgaagctcatgctgctgctggaggtcatc

SEQ ID NO: 60060 - DNA, 120 bp, Artificial Sequence
  ENSG00000072110_5 (sequence is synthesized)
tcaggtgaacgcttggccaagccagagcgaggcaagatgagagtgcacaagatctccaacgtcaacaaggccctggatttcatagccagcaaaggcgtcaaactggtgtccatcggagcc

SEQ ID NO: 60061 - DNA, 120 bp, Artificial Sequence
  ENSG00000072110_6 (sequence is synthesized)
gaagaaatcgtggatgggaatgtgaagatgaccctgggcatgatctggaccatcatcctgcgctttgccatccaggacatctccgtggaagagacttcagccaaggaagggctgctcctg

SEQ ID NO: 60062 - DNA, 120 bp, Artificial Sequence
  ENSG00000072110_7 (sequence is synthesized)
tggtgtcagagaaagacagccccttacaaaaatgtcaacatccagaacttccacataagctggaaggatggcctcggcttctgtgctttgatccaccgacaccggcccgagctgattgac

SEQ ID NO: 60063 - DNA, 120 bp, Artificial Sequence
  ENSG00000072110_8 (sequence is synthesized)
tacgggaagctgcggaaggatgatccactcacaaatctgaatacggcttttgacgtggcagagaagtacctggacatccccaagatgctggatgccgaagacatcgttggaactgcccga

SEQ ID NO: 60064 - DNA, 120 bp, Artificial Sequence
  ENSG00000072110_9 (sequence is synthesized)
ccggatgagaaagccatcatgacttacgtgtctagcttctaccacgccttctctggagcccagaaggcggagacagcagccaatcgcatctgcaaggtgttggccgtcaaccaggagaac

SEQ ID NO: 60065 - DNA, 120 bp, Artificial Sequence
  ENSG00000072110_10 (sequence is synthesized)
gagcagcttatggaagactacgagaagctggccagtgatctgttggagtggatccgccgcacaatcccgtggctggagaaccgggtgcccgagaacaccatgcatgccatgcaacagaag

SEQ ID NO: 60066 - DNA, 120 bp, Artificial Sequence
  ENSG00000072110_11 (sequence is synthesized)
ctggaggacttccgggactaccggcgcctgcacaagccgcccaaggtgcaggagaagtgccagctggagatcaacttcaacacgctgcagaccaagctgcggctcagcaaccggcctgcc

SEQ ID NO: 60067 - DNA, 120 bp, Artificial Sequence
  ENSG00000072110_12 (sequence is synthesized)
ttcatgccctctgagggcaggatggtctcggacatcaacaatgcctggggctgcctggagcaggtggagaagggctatgaggagtggttgctgaatgagatccggaggctggagcgactg

SEQ ID NO: 60068 - DNA, 120 bp, Artificial Sequence
  ENSG00000072110_13 (sequence is synthesized)
gaccacctggcagagaagttccggcagaaggcctccatccacgaggcctggactgacggcaaagaggccatgctgcgacagaaggactatgagaccgccaccctctcggagatcaaggcc

SEQ ID NO: 60069 - DNA, 120 bp, Artificial Sequence
  ENSG00000072110_14 (sequence is synthesized)
ctgctcaagaagcatgaggccttcgagagtgacctggctgcccaccaggaccgtgtggagcagattgccgccatcgcacaggagctcaatgagctggactattatgactcacccagtgtc

SEQ ID NO: 60070 - DNA, 120 bp, Artificial Sequence
  ENSG00000072110_15 (sequence is synthesized)
gcgaagggaagctctggagcggaccgagaaactgctggagaccattgaccagctgtacttggagtatgccaagcgggctgcacccttcaacaactggatggagggggccatggaggacct

SEQ ID NO: 60071 - DNA, 120 bp, Artificial Sequence
  ENSG00000072110_16 (sequence is synthesized)
gcaggacaccttcattgtgcacaccattgaggagatccagggactgaccacagcccatgagcagttcaaggccaccctccctgatgccgacaaggagcgcctggccatcctgggcatcca

SEQ ID NO: 60072 - DNA, 120 bp, Artificial Sequence
  ENSG00000072110_17 (sequence is synthesized)
caatgaggtgtccaagattgtccagacctaccacgtcaatatggcgggcaccaacccctacacaaccatcacgcctcaggagatcaatggcaaatgggaccacgtgcggcagctggtgcc

SEQ ID NO: 60073 - DNA, 120 bp, Artificial Sequence
  ENSG00000072110_18 (sequence is synthesized)
tcggagggaccaagctctgacggaggagcatgcccgacagcagcacaatgagaggctacgcaagcagtttggagcccaggccaatgtcatcgggccctggatccagaccaagatggagga

SEQ ID NO: 60074 - DNA, 120 bp, Artificial Sequence
  ENSG00000072110_19 (sequence is synthesized)
gatcgggaggatctccattgagatgcatgggaccctggaggaccagctcagccacctgcggcagtatgagaagagcatcgtcaactacaagccaaagattgatcagctggagggcgacca

SEQ ID NO: 60075 - DNA, 120 bp, Artificial Sequence
  ENSG00000072110_20 (sequence is synthesized)
ccagctcatccaggaggcgctcatcttcgacaacaagcacaccaactacaccatggagcacatccgtgtgggctgggagcagctgctcaccaccatcgccaggaccatcaatgaggtaga

SEQ ID NO: 60076 - DNA, 120 bp, Artificial Sequence
  ENSG00000072110_21 (sequence is synthesized)
gaaccagatcctgacccgggatgccaagggcatcagccaggagcagatgaatgagttccgggcctccttcaaccactttgaccgggatcactccggcacactgggtcccgaggagttcaa

SEQ ID NO: 60077 - DNA, 120 bp, Artificial Sequence
  ENSG00000072110_22 (sequence is synthesized)
agcctgcctcatcagcttgggttatgatattggcaacgacccccagggagaagcagaatttgcccgcatcatgagcattgtggaccccaaccgcctgggggtagtgacattccaggcctt

SEQ ID NO: 60078 - DNA, 120 bp, Artificial Sequence
  ENSG00000072110_23 (sequence is synthesized)
cattgacttcatgtcccgcgagacagccgacacagatacagcagaccaagtcatggcttccttcaagatcctggctggggacaagaactacattaccatggacgagctgcgccgcgagct

SEQ ID NO: 60079 - DNA, 120 bp, Artificial Sequence
  ENSG00000072110_24 (sequence is synthesized)
gccacccgaccaggctgagtactgcatcgcgcggatggccccctacaccggccccgactccgtgccaggtgctctggactacatgtccttctccacggcgctgtacggcgagagtgacct

SEQ ID NO: 60080 - DNA, 120 bp, Artificial Sequence
  ENSG00000072110_25 (sequence is synthesized)
ctaatccaccccgcccggccgccctcgtcttgtgcgccgtgccctgccttgcacctccgccgtcgcccatctcctgcctgggttcggtttcagctcccagcctccacccgggtgagctgg

SEQ ID NO: 60081 - DNA, 120 bp, Artificial Sequence
  ENSG00000072110_26 (sequence is synthesized)
ggcccacgtggcatcgatcctccctgcccgcgaagtgacagtttacaaaattattttctgcaaaaaagaaaaaaaagttacgttaaaaaccaaaaaactacatattttattatagaaaaa

SEQ ID NO: 60082 - DNA, 120 bp, Artificial Sequence
  ENSG00000072110_27 (sequence is synthesized)
gtattttttctccaccagacaaatggaaaaaaagaggaaagattaactatttgcaccgaaatgtcttgttttgttgcgacataggaaaataaccaagcacaaagttatattccatccttt

SEQ ID NO: 60083 - DNA, 120 bp, Artificial Sequence
  ENSG00000072110_28 (sequence is synthesized)
ttactgatttttttttcttctatctgttccatctgctgtattcatttctccaatctcatgtccattttggtgtgggagtcggggtagggggtactcttgtcaaaaggcacattggtgcat

SEQ ID NO: 60084 - DNA, 120 bp, Artificial Sequence
  ENSG00000072110_29 (sequence is synthesized)
gtgtgtttgctagctcacttgtccatgaaaatattttatgatattaaagaaaatcttttgaaatggctgttttttaaggaagagaatttatgtggcttctcatttttaaatcccctcaga

SEQ ID NO: 60085 - DNA, 120 bp, Artificial Sequence
  ENSG00000072110_30 (sequence is synthesized)
ggtgtgactagtctctttatcagcacacacttaaaaaatttttaatattgtctattaaaaataggacaaacttggagagtatggacaactttgatattgcttggcacagatggtattaaa

SEQ ID NO: 60086 - DNA, 120 bp, Artificial Sequence
  ENSG00000072110_31 (sequence is synthesized)
cctcatcagcttgggttatgatattggcaacgacccccagaagaagacaggcatgatggacacggatgatttccgcgcctgcctgatctccatgggttacaacatgggagaagcagaatt

SEQ ID NO: 60087 - DNA, 120 bp, Artificial Sequence
  ENSG00000072110_32 (sequence is synthesized)
aactcagtgggttggaagctgtaaccccgacatgggcttgcgctacgtcctgcccctccgacccccgggaaaggtgggcagctcggttcgagttgaggggctgcagaacgaggacattca

SEQ ID NO: 60088 - DNA, 120 bp, Artificial Sequence
  ENSG00000072110_33 (sequence is synthesized)
gctttggagccagcagcactggtgtggaggcaagctctgctgtctgacttgctgtgtccttgagctggtccttattctgagcctcagtttcttcctctgtaaaaagacaatctgtcttgc

SEQ ID NO: 60089 - DNA, 120 bp, Artificial Sequence
  ENSG00000072110_34 (sequence is synthesized)
acgctaaggccggatgggaaggccgtgtgacctaatgtttcatgtcacggccacgccttctcgggtgtgcagaaggcggagacagcagccaatcgcatctgcaaggtgttggccgtcaac

SEQ ID NO: 60090 - DNA, 120 bp, Artificial Sequence
  ENSG00000072110_35 (sequence is synthesized)
aaaacacacacaatgggcttcctcaaagcaggatgacctgggccgcggtgcccaaggcctatgcagggctgggccctatacagcgacatcggtcatctacatcggacatgggaaggtccc

SEQ ID NO: 60091 - DNA, 120 bp, Artificial Sequence
  ENSG00000072110_36 (sequence is synthesized)
gtaaccccgacatgggcttgcgctacgtcctgcccctccgacccccgggaaaggtgggcagctcggttcgagttgaggggctgcagaacgagggtcagtcttaggggatatttggggcca

SEQ ID NO: 60092 - DNA, 120 bp, Artificial Sequence
  ENSG00000072110_37 (sequence is synthesized)
cgggagctgggctcggagctggcgatgggacccgggcacagtggccagtggcaggaagaggtcagaaaccactcgtggtggtggggggagggcgcctcaaccctaccgctgcttcctgcc

SEQ ID NO: 60093 - DNA, 120 bp, Artificial Sequence
  ENSG00000072110_38 (sequence is synthesized)
tgcgcgacattcacggcatggtgtaactcccacctccggaaggcggggacacagatcgagaacatcgaagaggacttccgggatggcctgaagctcatgctgctgctggaggtcatctca

SEQ ID NO: 60094 - DNA, 120 bp, Artificial Sequence
  ENSG00000072110_39 (sequence is synthesized)
ggagcgcggggaggtggcgccgctggcgggcaggtctccttgggggtccgtggtccaggccaccctgcggctgttgcaaccatccccgcgtgggctgtgctcgggggcggtggtcttcag

SEQ ID NO: 60095 - DNA, 120 bp, Artificial Sequence
  ENSG00000072110_40 (sequence is synthesized)
gctggggctgagaccccggctcggggctgcttgctccggatcgattttcccttttcttccgcccctggccacctctccatatggcgtgcggtggcagcgccgcttcctgggccgccctgg

SEQ ID NO: 60096 - DNA, 120 bp, Artificial Sequence
  ENSG00000072110_41 (sequence is synthesized)
gttcaacctgagcggcgggcctcccgggaccctgctgccccttaggcggaggggagagcgccggagagatcggcggccgcctccggatctgcctggagaaggaccagctggagtgcggct

SEQ ID NO: 60097 - DNA, 120 bp, Artificial Sequence
  ENSG00000072110_42 (sequence is synthesized)
ggggacgagaaaactggggggcgtacgcgggctcccccgcgggccctgtgggggcggggtcaggacagcagaccgttttattgcttaactcagtgggttggaagctgtaaccccgacatg

SEQ ID NO: 60098 - DNA, 120 bp, Artificial Sequence
  ENSG00000072110_43 (sequence is synthesized)
ccaacgattacatgcagccagaagaggactgggaccgggacctgctcctggacccggcctgggagaagcagcagagaaagagctgacctctcacctttctgcgagagacggccaggccat

SEQ ID NO: 60099 - DNA, 120 bp, Artificial Sequence
  ENSG00000072110_44 (sequence is synthesized)
ctggacaggtcacagaccagattctcaagtccacacctctctacagatattgttgggatcatcccagccagttaaccccacctgagctgcctccatgtgtaacccacctgtggttttcct

SEQ ID NO: 60100 - DNA, 120 bp, Artificial Sequence
  ENSG00000072110_45 (sequence is synthesized)
gcccatgtctctgctagaggggcctgtgggttgggctgagttactcgccatggacagtggtggggtcctggaacccaccagctgagatggtttgggcggttctagtctgcacctccccag

SEQ ID NO: 60101 - DNA, 120 bp, Artificial Sequence
  ENSG00000072110_46 (sequence is synthesized)
agaggtcatggcagagaggccaggcacagaggaaacccgctgagcctgcttccttagttctggcagatgggtcagcccccacaggactcaggattcaatttagcccggggttctggctcc

SEQ ID NO: 60102 - DNA, 120 bp, Artificial Sequence
  ENSG00000072110_47 (sequence is synthesized)
cagcttgggttatgatattggcaacgacccccaggtactcgcctcctgcatggagcacgctcaggggtggcgtctggggcaagaaataatgcgtttttcctttttctcttctctctgtct

SEQ ID NO: 60103 - DNA, 120 bp, Artificial Sequence
  ENSG00000072110_48 (sequence is synthesized)
ggatctcctgtccccctcctgtgggccatggggctcgtcctctcctgctgtctctgtctgccccatcactggtccaccctctgccctctgctgtctttcatggcaacctactgggtgccc

SEQ ID NO: 60104 - DNA, 120 bp, Artificial Sequence
  ENSG00000072110_49 (sequence is synthesized)
gctgtcttccgtcctcgctgctcttcatcccatgggtggatttttgcatctccctgctctgtcttcctcctgtctttggacatttccaccgatgtgtgttcgcatcttctcctatgttcc

SEQ ID NO: 60105 - DNA, 120 bp, Artificial Sequence
  ENSG00000072110_50 (sequence is synthesized)
tttacctatcctgacccccaaaaccataaatctcatccccgttctggccatctgttcctgtcttcctggccccgggccggcccttcctcttcctgccttcccgaccctccttgtgtcttg

SEQ ID NO: 60106 - DNA, 120 bp, Artificial Sequence
  ENSG00000072110_51 (sequence is synthesized)
gtaccactgccccccacagaagaagacaggcatgatggacacggatgatttccgcgcctgcctgatctccatgggttacaacatggtaacgtaaaccccaccctctgtctgccctggtga

SEQ ID NO: 60107 - DNA, 120 bp, Artificial Sequence
  ENSG00000072110_52 (sequence is synthesized)
gaaggcagccagctggcgggagcagccaagtcccaggagtggcaggctggaggccctcaggctaggggctgccctccctggaggagccccagggcccatgtccttggggaagatggctcc

SEQ ID NO: 60108 - DNA, 120 bp, Artificial Sequence
  ENSG00000072110_53 (sequence is synthesized)
ctgaaagccggcccggccacgggcgtgtgtgtatccgggaggcctgacctcctcgcctcaatctctgtgccacttcatcttctggtacttctcactcccactgtggacagctgggctgac

SEQ ID NO: 60109 - DNA, 120 bp, Artificial Sequence
  ENSG00000072110_54 (sequence is synthesized)
cctgaggctggcaggaaggactggtggtgtgggacatcccaggtttcgggctggcatgcgtcacctcacatggagcatggaaaccgagacttccacctctgtcctggcggtgactctggt

SEQ ID NO: 60110 - DNA, 120 bp, Artificial Sequence
  ENSG00000072110_55 (sequence is synthesized)
tgggcctgccgcccctctggattgtcccaggccgtcccccaccccccaaccttcctagtctgtccccccttgcacagacattctgagcagagcagtcaggtgactcctgagccatggtgc

SEQ ID NO: 60111 - DNA, 120 bp, Artificial Sequence
  ENSG00000072110_56 (sequence is synthesized)
caagtgcagagcccacaggctgtccagcgcagggcatgggcatggggctaggagcagtgaacctgggagtaaatcccagccctgccgtcattagtgtgttacctcaggtgaagtggggga

SEQ ID NO: 60112 - DNA, 120 bp, Artificial Sequence
  ENSG00000072110_57 (sequence is synthesized)
gttcaaatcccagttctgctgcttcctggctgtgtgaccctgggcaaatcacttagcctgtctgggcttcagatttctcatctgtacaatgaagataataaaatacctatctttatggtt

SEQ ID NO: 60113 - DNA, 120 bp, Artificial Sequence
  ENSG00000072110_58 (sequence is synthesized)
gtagtaaggattaaatgaattgaaataaagcttttagattaatacttgatatgctacataggtgtcagccattgttaatcattgttgtcattatagttattatcaacatgattatttgct

SEQ ID NO: 60114 - DNA, 120 bp, Artificial Sequence
  ENSG00000072110_59 (sequence is synthesized)
ctaagaggaactcaggcatctgcagggtgtggggaaccctgagctgggtctcccctgttgggtgttgtgtccccatcatacccttaggacaacccaggttaggtcagggggatgtgccct

SEQ ID NO: 60115 - DNA, 120 bp, Artificial Sequence
  ENSG00000072110_60 (sequence is synthesized)
tctcttccagccataggctgctctgagcccccagggtcttcagtccatatgagatattcccagcaggccatgggctgacaggcctgggtttggctgttccctccagggagaagcagaatt

SEQ ID NO: 60116 - DNA, 120 bp, Artificial Sequence
  ENSG00000072110_61 (sequence is synthesized)
ttgccaggagctaaggaagctcatgttgtgggaggtcacctgggtagtgagcctctggagcagcccttctccctgacctgtgaggtggtgaacacaccagagaggttgctgctaatttga

SEQ ID NO: 60117 - DNA, 120 bp, Artificial Sequence
  ENSG00000072110_62 (sequence is synthesized)
catgtattcagttctaccaattttactacactctgacctgggaattccatttcttgagactgtctaaagaatctatcctgggcgtgaggagtggcagcggccaggcagcacagtttcgca

SEQ ID NO: 60118 - DNA, 120 bp, Artificial Sequence
  ENSG00000072110_63 (sequence is synthesized)
aaggctgtcagcatgccgcggcccgcagacacctggcacgcgccctccctgccgccaggatgcccaaggggaaggtcagctctgctgaaggagccgccaaggaaaagcccaagaggagat

SEQ ID NO: 60119 - DNA, 120 bp, Artificial Sequence
  ENSG00000072110_64 (sequence is synthesized)
cggcgcggttgtcagttaaacctcctgcaaaagtggaagcgaagccgaaaaacgcagcagtgaaggataaatcttcagacaaaaaagtgcaaacaaaagggaaaaagggagcaaagggaa

SEQ ID NO: 60120 - DNA, 120 bp, Artificial Sequence
  ENSG00000072110_65 (sequence is synthesized)
aacaggccgaagtggctaactaagaaactaaagatttacctgcagaaaacggggaaatgaaaagtgaggagagtccagcctctgatgaagcaggagagaaagaagccgagtctgattaat

SEQ ID NO: 60121 - DNA, 120 bp, Artificial Sequence
  ENSG00000072110_66 (sequence is synthesized)
ttgtacaatccagaggaatattttttatcaactattttgtaaatgcaagctttttagtagctctagaaacatttttaagaaggagggtatcccacctcatcccattttttaagtgtaaat

SEQ ID NO: 60122 - DNA, 120 bp, Artificial Sequence
  ENSG00000072110_67 (sequence is synthesized)
aggagggtatcccacctcatcccattttttaagtgtaaatgcttttttttaagaggtgaaatcatttgctgattgtttattttttggtacaaccagaaaatagtgtgggatattgaatta

SEQ ID NO: 60123 - DNA, 120 bp, Artificial Sequence
  ENSG00000072110_68 (sequence is synthesized)
tgggaggctttgactgtctcgggtgtcagcttaacattccatagatgggggggttagtttttatatcctataatacaaagcatattaaatggcaatatggagtcagtcctgcatttaata

SEQ ID NO: 60124 - DNA, 120 bp, Artificial Sequence
  ENSG00000072110_69 (sequence is synthesized)
tcttgaacattttaaattacttctgttgccatgttgtttttttagtagaattgtttcctaaagaaaaccactctttgatcatggctctccctgtcagaattgtgcactctgtaacatctt

SEQ ID NO: 60125 - DNA, 120 bp, Artificial Sequence
  ENSG00000072110_70 (sequence is synthesized)
tggttgtggtagtcctgttttcctaataactttgtcactgtgctgtgaaagattacaaatttgaatatgtagtgtacgtgctattcagttgtgaactggtgggccgtatgtgacagctga

SEQ ID NO: 60126 - DNA, 120 bp, Artificial Sequence
  ENSG00000072110_71 (sequence is synthesized)
ccaacatgtgaaaatactggtacttgatagcctcttaaggaaaatttgcttcccgattttaagctggaaagtcactggaataactttaaaaaagaattacactacatggctttttagaat

SEQ ID NO: 60127 - DNA, 120 bp, Artificial Sequence
  ENSG00000072110_72 (sequence is synthesized)
ttcattacgtatgttaagaattgtgtacaaattgaaacgtctgtactgatcttcaaccaataaaatctcaattattaaaatacaaaaaaaaaaatccatcctgaacatggagacatccac

SEQ ID NO: 60128 - DNA, 120 bp, Artificial Sequence
  ENSG00000072110_73 (sequence is synthesized)
actagggcaagctgagggcccagcaactcacagtagggcagtgaagggttaggggagtggacgtgcagcctttctgcagacgtctacatgagaagactatggagccagggcagaaattcc

SEQ ID NO: 60129 - DNA, 83 bp, Artificial Sequence
  ENSG00000072110_74 (sequence is synthesized)
tgctgctaaatattttaaaagcaggaaacataatttatatatgcccaaagaatatccacataaggaaagactgaataggagtg

SEQ ID NO: 60130 - DNA, 120 bp, Artificial Sequence
  ENSG00000072110_75 (sequence is synthesized)
cccaaagaatatccacataaggaaagactgaataggagtggataagtaggcttacctgtaatttttttcctaagctttatatattaccattctgttttaaagaagaaagagtagggggaa

SEQ ID NO: 60131 - DNA, 120 bp, Artificial Sequence
  ENSG00000072110_76 (sequence is synthesized)
ggaaagaaatgccacctggggacacaaccttggctcccagcccagccttatttattgagatgggccgagcataccagcagcagagggttgggtatgtgagtgagggaggctgggccagcc

SEQ ID NO: 60132 - DNA, 120 bp, Artificial Sequence
  ENSG00000072110_77 (sequence is synthesized)
cccatcctgtgcctgtcaacttcacaaggcagctggtgagcgtcgtctaacaatggccctgggaggtcatttcttgttcctgctttcctcctgtggaaacaaatttaagaaacgcaagac

SEQ ID NO: 60133 - DNA, 120 bp, Artificial Sequence
  ENSG00000072110_78 (sequence is synthesized)
ctgcttgtgccctgtagatagagggcagtgtgtctgagggtcagagaaggcgctagccactgtcgggttctgtgcagagtgcactggacacactgaccgagggaaggggcccctgcaggg

SEQ ID NO: 60134 - DNA, 120 bp, Artificial Sequence
  ENSG00000072110_79 (sequence is synthesized)
ctgtgtgtatagcgtcatgccctatgcattcccacagactcctgcatagccttcctgcgtagacactttcatggccttggaagtgctctgaggagagtgcttttccccgttgcgccggtt

SEQ ID NO: 60135 - DNA, 120 bp, Artificial Sequence
  ENSG00000072110_80 (sequence is synthesized)
ggtggatgttctagttgcacatctgcttttgcaccctgcagatccctgcacaatgggcacctccttgagaagcacccccagaagtggagctcctggggccctgaggggtgggcggttggg

SEQ ID NO: 60136 - DNA, 120 bp, Artificial Sequence
  ENSG00000072110_81 (sequence is synthesized)
atggcctccttagggctgggatgggaactgagaatcatttgagggcttaataagtgattttggaggccccagtccccaccctatgggagcagagtgaggtggtctgacaaggtgcttcct

SEQ ID NO: 60137 - DNA, 120 bp, Artificial Sequence
  ENSG00000072110_82 (sequence is synthesized)
ctccttcaaccactttgaccgggtgagagccccatcctgtgctttcttagtgcagcccccaacccctgccccagggccctggagggcacttccccgggacgtgggctgccatgcaagtga

SEQ ID NO: 60138 - DNA, 120 bp, Artificial Sequence
  ENSG00000072121_0 (sequence is synthesized)
gactcggctcaaacatggctgcgctgagagctctattgctttgggcgccgggagcaggaggtactccgcgaatgagaacattgagaatgtgttcggcataactcatttctttgtatctcc

SEQ ID NO: 60139 - DNA, 120 bp, Artificial Sequence
  ENSG00000072121_1 (sequence is synthesized)
ctgcactctgtgctgggaaaatgaatcatccatttggaaaagaggaagctgcttcgcagaagcagctttttggatttttctgcgaatgcctgcggaggggagaatgggagctggcacagg

SEQ ID NO: 60140 - DNA, 120 bp, Artificial Sequence
  ENSG00000072121_2 (sequence is synthesized)
catgtgtacctcagctacaggagggacaaggggatatcccaaagagggtagaagacatacttcaggcattggtggtgtgtccaaatctgctgagatgtgggcaggacatcaaccctcaaa

SEQ ID NO: 60141 - DNA, 120 bp, Artificial Sequence
  ENSG00000072121_3 (sequence is synthesized)
gagtagcctgggtctggcttcttgtactggagaaatggttggcccgggaaaagaagttactcccagttgttttccggagaaagcttgagtttcttttattgtcagaagacctccaaggtg

SEQ ID NO: 60142 - DNA, 120 bp, Artificial Sequence
  ENSG00000072121_4 (sequence is synthesized)
acattccagagaacatcctcgaggagctgtatgagaccttaacacagggtgcagtaggccacgtgcctgacggaaatccaaggagggagagctggactcctcgtctcagctccgaagctg

SEQ ID NO: 60143 - DNA, 120 bp, Artificial Sequence
  ENSG00000072121_5 (sequence is synthesized)
tctctgtgctctgggatctcctgaggcagtctccccagccagcacaggccctgctggagctcctgcttgaggaggatgacggtactggcctctgtcactggcctctgcagaatgcactgg

SEQ ID NO: 60144 - DNA, 120 bp, Artificial Sequence
  ENSG00000072121_6 (sequence is synthesized)
tggacctcattcgaaaggcattgcgggctttgcagggccctgattcggtgccccctggggtagtcgatgccatctatggagccctgcggactctgcgttgccccgcagaaccacttgggg

SEQ ID NO: 60145 - DNA, 120 bp, Artificial Sequence
  ENSG00000072121_7 (sequence is synthesized)
ttgagttgcatctcctgtgtgaggaactactagaggcctgcaggaccgaggggagtcccctgcgggaggagcggctgctcagctgcctgctgcacaaggccagccggggcctgctgtccc

SEQ ID NO: 60146 - DNA, 120 bp, Artificial Sequence
  ENSG00000072121_8 (sequence is synthesized)
tgtatggccatacctatgcagagaaggtcacagaaaagccaccgagggctacagcctcgggaaaagtctcaccggatcatctagatcctgagcgggcaatgctagccctgttctccaatc

SEQ ID NO: 60147 - DNA, 120 bp, Artificial Sequence
  ENSG00000072121_9 (sequence is synthesized)
ccaacccagccgaggcttggaaagtggcctatttctactgcctgagcaacaacaaacacttcctcgagcagattctggtaacagcactaacattgttgaaagaagaagacttcccaaatc

SEQ ID NO: 60148 - DNA, 120 bp, Artificial Sequence
  ENSG00000072121_10 (sequence is synthesized)
ttggctgcctacttgatagagaattcaggcccctcagttgcctgcttgtactcctgggctggacacactgccagagcctagagtcagccaagaggctgctccagaccctgcacaggaccc

SEQ ID NO: 60149 - DNA, 120 bp, Artificial Sequence
  ENSG00000072121_11 (sequence is synthesized)
agggcccaggctgtgatgagctcctcagggatgcctgtgatgggttgtgggctcacctggaggtcctggagtggtgcatacagcagagcagcaaccccataccaaagagagatctgttgt

SEQ ID NO: 60150 - DNA, 120 bp, Artificial Sequence
  ENSG00000072121_12 (sequence is synthesized)
atcatttacacggtggagacagccactcagtgctctacactctccatcaccttacaaaccttccagccctcagggaggaagatgttctcaagctcttacagaaagtgccagccaaggacc

SEQ ID NO: 60151 - DNA, 120 bp, Artificial Sequence
  ENSG00000072121_13 (sequence is synthesized)
cccagcaagagcctgatgcagttgatgctccagtccctgagcacctgagccagtgtcagaacctgacactctaccagggcttctgtgccatgaagtatgccatctatgccctctgtgtaa

SEQ ID NO: 60152 - DNA, 120 bp, Artificial Sequence
  ENSG00000072121_14 (sequence is synthesized)
actcacaccagcactcccagtgccaggactgcaaagacagcctctctgaggacctggcctcagctacagagccagcgaatgactctctctcctccccaggtgctgcaaatctcttctcaa

SEQ ID NO: 60153 - DNA, 120 bp, Artificial Sequence
  ENSG00000072121_15 (sequence is synthesized)
cttacctggccaggtgtcaacagtatctgtgcagtattcctgactctctgtgcctggagcttctggaaaacatcttctcattgcttctcatcacctctgctgatcttcacccagagcctc

SEQ ID NO: 60154 - DNA, 120 bp, Artificial Sequence
  ENSG00000072121_16 (sequence is synthesized)
acttgcctgaggactatgctgaggatgatgacattgaggggaagagcccctcaggtttgaggtccccatcagagagccctcagcacatagcacatcctgaaaggaagtcagaacggggtt

SEQ ID NO: 60155 - DNA, 120 bp, Artificial Sequence
  ENSG00000072121_17 (sequence is synthesized)
ccctgggagtcccaaagacccttgcttatacaatgccaagccatgtgaaggcagagccaaaagacagttacccagggcctcataggcacagctttttggacttaaaacactttactagtg

SEQ ID NO: 60156 - DNA, 120 bp, Artificial Sequence
  ENSG00000072121_18 (sequence is synthesized)
gtatcagtggatttctggctgatgaatttgcaataggggccttcctcaggcttctccaagagcaactggatgagatcagtagccgcagccctcctgagaagccaaagcaagaaagtcaga

SEQ ID NO: 60157 - DNA, 120 bp, Artificial Sequence
  ENSG00000072121_19 (sequence is synthesized)
gctgctcaggaagcagagatggactgcagagccgcctgcatcgactttccaaggttgtctctgaggcccagtggagacacaaggtggtgacaagcaaccatcgttcagaggagcaacctt

SEQ ID NO: 60158 - DNA, 120 bp, Artificial Sequence
  ENSG00000072121_20 (sequence is synthesized)
cccgaagataccagcctgccacacgtcaccccagtctccgccggggtcgtcggacaagaaggagccaggcagatggccgagacagaggttcaaacccatccctggaaagtacaagtagtg

SEQ ID NO: 60159 - DNA, 120 bp, Artificial Sequence
  ENSG00000072121_21 (sequence is synthesized)
agctgagcacaagtacgtcagagggaagtctgagtgccatgtctggccggaatgagctgcacagtagattgcacccccatcctcaaagttcactcatccccatgatgttctccccacctg

SEQ ID NO: 60160 - DNA, 120 bp, Artificial Sequence
  ENSG00000072121_22 (sequence is synthesized)
agtcactgctggcatcctgcatccttcgcgggaacttcgcagaagcccatcaggtgctgttcacgttcaacctgaagtcctcacccagttcaggggaactgatgttcatggagcgctacc

SEQ ID NO: 60161 - DNA, 120 bp, Artificial Sequence
  ENSG00000072121_23 (sequence is synthesized)
aggaagtgatccaagaactggcccaagtagagcacaagattgaaaaccagaactcagatgcgggtagcagcaccattcggagaactggcagtggccgctcaactctacaggccattggca

SEQ ID NO: 60162 - DNA, 120 bp, Artificial Sequence
  ENSG00000072121_24 (sequence is synthesized)
gcgctgcagcagcaggaatggtgttttactctatctctgacgtgactgacaagctgctcaacacctctggagaccccatccccatgctccaggaggacttttggataagcacggctctag

SEQ ID NO: 60163 - DNA, 120 bp, Artificial Sequence
  ENSG00000072121_25 (sequence is synthesized)
tggagcccactgctcccctgagagaggttctggaagacctcagtccccctgccatggctgcatttgacctagcttgctctcagtgccagctctggaaaacctgcaagcagcttttggaga

SEQ ID NO: 60164 - DNA, 120 bp, Artificial Sequence
  ENSG00000072121_26 (sequence is synthesized)
cagccgaacggcgtttgaatagtagccttgaaaggcggggtcgacggatagaccacgtactcctaaatgctgatggcattcgaggttttccagttgttcttcagcaaatcagtaagagtc

SEQ ID NO: 60165 - DNA, 120 bp, Artificial Sequence
  ENSG00000072121_27 (sequence is synthesized)
tcaattatctgcttatgtcagccagtcaaaccaaatcagagagtgtggaagaaaagggaggaggccctccacggtgcagcatcactgaactgcttcagatgtgctggcccagcctaagcg

SEQ ID NO: 60166 - DNA, 120 bp, Artificial Sequence
  ENSG00000072121_28 (sequence is synthesized)
aggactgtgttgccagccacaccaccctctcccagcagctagatcaggtccttcagtcactgagagaggcactagagctgccagagcccaggactcctccactgtcttccctggtggagc

SEQ ID NO: 60167 - DNA, 120 bp, Artificial Sequence
  ENSG00000072121_29 (sequence is synthesized)
aggcagcccagaaagctccagaggcagaggcccaccctgtgcagatccagactcagctcctccagaagaacctgggcaaacagaccccatcaggcagcaggcagatggactacttgggca

SEQ ID NO: 60168 - DNA, 120 bp, Artificial Sequence
  ENSG00000072121_30 (sequence is synthesized)
ccttcttcagttactgcagcacccttgctgcagttctccttcaaagtttgagctctgagcctgatcatgtggaggtcaaggtaggaaatccctttgttctgctgcaacagagctcttccc

SEQ ID NO: 60169 - DNA, 120 bp, Artificial Sequence
  ENSG00000072121_31 (sequence is synthesized)
aactggtgtcacatctcctgtttgagagacaagttcccccagagagactggcagcccttctggcccaagagaatctcagcctaagtgtgccacaggtcatcgtcagctgctgctgtgagc

SEQ ID NO: 60170 - DNA, 120 bp, Artificial Sequence
  ENSG00000072121_32 (sequence is synthesized)
cccttgctctttgctcatcccggcaaagccagcagacctcctccctcctgactcgtctgggtactctggcccagctacacgcctctcactgcctggatgacctcccactttctacaccga

SEQ ID NO: 60171 - DNA, 120 bp, Artificial Sequence
  ENSG00000072121_33 (sequence is synthesized)
gctccccgaggacaactgagaaccctacattggaaagaaagccctactcctccccaagggactcatcactcccagccctcacctcctctgccttggcctttcttaagtcacgctcaaagc

SEQ ID NO: 60172 - DNA, 120 bp, Artificial Sequence
  ENSG00000072121_34 (sequence is synthesized)
tcctagctacggtggcctgcctgggggcttccccgaggttaaaggtcagcaaacccagcttgtcatggaaggaacttcgtggccgcagggaggtgcctctggctgcagagcaggtagccc

SEQ ID NO: 60173 - DNA, 120 bp, Artificial Sequence
  ENSG00000072121_35 (sequence is synthesized)
gggagtgtgagcgccttctggaacaattccctctgtttgaggccttcctcctggctgcctgggagcccctgcgagggtctttgcagcaggggcagagtctggcagtgaatctctgtggtt

SEQ ID NO: 60174 - DNA, 120 bp, Artificial Sequence
  ENSG00000072121_36 (sequence is synthesized)
gggccagtctttctaccgttctcctgggcctacattctcccattgccctagatgtactgagtgaggcttttgaggaatccttggtggccagagattggtcccgggcccttcagctcactg

SEQ ID NO: 60175 - DNA, 120 bp, Artificial Sequence
  ENSG00000072121_37 (sequence is synthesized)
aagtgtacgggcgagatgtggacgatttgagcagcataaaggatgcagtcctgagctgtgctgtggcatgtgacaaagaaggttggcaatacctgtttcccgtgaaggatgcatctctga

SEQ ID NO: 60176 - DNA, 120 bp, Artificial Sequence
  ENSG00000072121_38 (sequence is synthesized)
gaagtcggctggccctacagtttgtggacaggtggcccctggagtcatgcctggagattctggcctactgcatttcagacacggctgtccaagaaggactaaagtgtgagctacagagga

SEQ ID NO: 60177 - DNA, 120 bp, Artificial Sequence
  ENSG00000072121_39 (sequence is synthesized)
agctggcggagctgcaggtgtatcagaagattctgggtttgcagtctcccccagtgtggtgtgactggcagaccttgaggagctgttgtgttgaggacccatcaactgtcatgaacatga

SEQ ID NO: 60178 - DNA, 120 bp, Artificial Sequence
  ENSG00000072121_40 (sequence is synthesized)
agccttcatcaaaagcatcttctccaccttctagaaagaagagatcatgacaaggctctgcaactcctgcgaagaatccctgaccccaccatgtgccttgaagtgacagagcaatccctc

SEQ ID NO: 60179 - DNA, 120 bp, Artificial Sequence
  ENSG00000072121_41 (sequence is synthesized)
gaccagcacactagcttggccacttctcacttcttggccaactacctcaccacccacttctatggacaactgactgctgtccgacaccgtgaaatccaggcgctgtatgtgggatccaag

SEQ ID NO: 60180 - DNA, 120 bp, Artificial Sequence
  ENSG00000072121_42 (sequence is synthesized)
attctgctgaccctgcctgagcagcaccgggccagctattcccacttgtcctctaaccccctgttcatgctggagcagctgcttatgaacatgaaggtggattgggccactgtggctgtg

SEQ ID NO: 60181 - DNA, 120 bp, Artificial Sequence
  ENSG00000072121_43 (sequence is synthesized)
cagactctccagcagctgctggttggacaggagattggcttcactatggacgaggtggactcactgctttccagatacgcagagaaagccctggactttccataccctcagagggagaaa

SEQ ID NO: 60182 - DNA, 120 bp, Artificial Sequence
  ENSG00000072121_44 (sequence is synthesized)
cgatcagattctgtgattcacctccaagaaattgtccaccaggctgcagatcccgagaccctccctagatcaccatcagcagagttctctcctgctgctcctcctggtatctccagtata

SEQ ID NO: 60183 - DNA, 120 bp, Artificial Sequence
  ENSG00000072121_45 (sequence is synthesized)
cattcccctagtctaagggaaaggagtttcccaccaacccagccctcacaggaatttgtgcccccagcgacaccccctgccaggcaccagtgggtaccggatgagactgagagtatctgc

SEQ ID NO: 60184 - DNA, 120 bp, Artificial Sequence
  ENSG00000072121_46 (sequence is synthesized)
atggtctgctgcagggagcacttcaccatgtttaacaggcgtcatcattgtcgccgctgtggccggctagtgtgcagctcctgctccactaagaaaatggtggttgaaggctgcagagag

SEQ ID NO: 60185 - DNA, 120 bp, Artificial Sequence
  ENSG00000072121_47 (sequence is synthesized)
aaccctgctcgtgtgtgtgatcagtgctatagttactgcaacaaagatgtaccagaggagccttcagaaaaaccagaagctctagacagctccaagaatgaaagccctccatactcgttt

SEQ ID NO: 60186 - DNA, 120 bp, Artificial Sequence
  ENSG00000072121_48 (sequence is synthesized)
gtggtgagagtccccaaagcagatgaggtggaatggattttggatctcaaagaggaggaaaatgagctggtgcggagtgaattttactatgagcaggcccccagcgcctccttgtgcatt

SEQ ID NO: 60187 - DNA, 120 bp, Artificial Sequence
  ENSG00000072121_49 (sequence is synthesized)
gccatcctgaatctgcaccgggacagcattgcctgtggtcaccagctgattgagcactgctgcaggctctccaagggcctcaccaacccagaggtggatgccgggctgctcacggacatc

SEQ ID NO: 60188 - DNA, 120 bp, Artificial Sequence
  ENSG00000072121_50 (sequence is synthesized)
atgaagcagctgctgttcagcgccaagatgatgttcgtcaaagccggccagagccaagacttggctctttgtgacagctacatcagcaaggtagatgtgctgaatattttagttgctgct

SEQ ID NO: 60189 - DNA, 120 bp, Artificial Sequence
  ENSG00000072121_51 (sequence is synthesized)
gcctatcgccacgtgccatctttggatcagatcttgcagccagctgcagtaaccaggctaaggaaccagcttttggaagccgagtactaccaactgggcgttgaggtctccacaaagact

SEQ ID NO: 60190 - DNA, 120 bp, Artificial Sequence
  ENSG00000072121_52 (sequence is synthesized)
gggcttgataccaccggggcgtggcatgcttggggcatggcctgcctcaaagccgggaacctcactgctgcacgggagaagttcagtcgctgtctgaagcccccatttgacctcaatcag

SEQ ID NO: 60191 - DNA, 120 bp, Artificial Sequence
  ENSG00000072121_53 (sequence is synthesized)
ctgaatcatggctcaaggctggtgcaggatgtggttgagtacctagagtccacagtgaggccctttgtatccttgcaagatgacgattactttgccaccctgagggaactggaagctacc

SEQ ID NO: 60192 - DNA, 120 bp, Artificial Sequence
  ENSG00000072121_54 (sequence is synthesized)
cttcggacgcagagcctttctctggcagtgattcctgaagggaaaatcatgaacaacacctactaccaggaatgcctcttctacctgcacaactatagcaccaacctggccatcatcagc

SEQ ID NO: 60193 - DNA, 120 bp, Artificial Sequence
  ENSG00000072121_55 (sequence is synthesized)
ttctacgtgaggcacagctgcctgcgggaagctcttctgcaccttctcaacaaggagagtcctccagaagtttttatagaaggcattttccaaccaagctataaaagtgggaagctacac

SEQ ID NO: 60194 - DNA, 120 bp, Artificial Sequence
  ENSG00000072121_56 (sequence is synthesized)
actttggagaacttgctagaatccattgatccaaccttggagagctggggaaagtacttgattgctgcctgccaacatttacagaagaagaactactaccacattctgtatgagctgcag

SEQ ID NO: 60195 - DNA, 120 bp, Artificial Sequence
  ENSG00000072121_57 (sequence is synthesized)
cagtttatgaaggaccaagttcgggccgccatgacctgtattcggttcttcagtcacaaagcaaagtcatatacagaactgggagagaagctctcatggctacttaaggccaaggaccac

SEQ ID NO: 60196 - DNA, 120 bp, Artificial Sequence
  ENSG00000072121_58 (sequence is synthesized)
ctgaagatctacctccaagaaacatcccgcagctctggaaggaagaaaaccacattcttcagaaagaagatgactgcagctgatgtgtcaaggcacatgaacacacttcagctgcagatg

SEQ ID NO: 60197 - DNA, 120 bp, Artificial Sequence
  ENSG00000072121_59 (sequence is synthesized)
gaagtgaccaggttcttgcatcggtgcgaaagtgctgggacctctcaaatcaccactttgcctctgccaaccctgtttggaaataaccacatgaaaatggatgttgcctgcaaggtcatg

SEQ ID NO: 60198 - DNA, 120 bp, Artificial Sequence
  ENSG00000072121_60 (sequence is synthesized)
ctgggagggaaaaatgtagaagatggttttggaattgctttccgtgttctgcaggacttccagctggatgctgccatgacctactgcagagctgcccgccagttggtggagaaagagaag

SEQ ID NO: 60199 - DNA, 120 bp, Artificial Sequence
  ENSG00000072121_61 (sequence is synthesized)
tacagtgagatccagcaactgctcaaatgtgtcagtgagtcaggcatggcagccaaaagtgacggggacaccatcctcctcaactgcctggaagcgttcaagagaattccgccccaggag

SEQ ID NO: 60200 - DNA, 120 bp, Artificial Sequence
  ENSG00000072121_62 (sequence is synthesized)
ctggagggcctgatccaggcaatacacaatgatgacaacaaggttcgggcctacctgatatgttgcaaactgcgttctgcctacttgattgctgtgaagcaagaacactcacgggccaca

SEQ ID NO: 60201 - DNA, 120 bp, Artificial Sequence
  ENSG00000072121_63 (sequence is synthesized)
gcccttgtccagcaggtgcagcaggccgccaagagcagcggggatgcagtagtgcaagacatctgtgcccagtggcttctgacaagccacccccggggtgcccatggcccaggctccagg

SEQ ID NO: 60202 - DNA, 120 bp, Artificial Sequence
  ENSG00000072121_64 (sequence is synthesized)
aagtgaccttgggcagtggggccaggaacacgtggcctgagagctgggcaacagcagtgatggcgatgccctccacctctttcctccagtggagtgggacttctctggctctgccctagg

SEQ ID NO: 60203 - DNA, 120 bp, Artificial Sequence
  ENSG00000072121_65 (sequence is synthesized)
ttggaaagagttggattggaccctacttgccttcccgggcaaggataggacctttcacgcaagtgccatgtttctctaaaattgtggaatctatgtgtgtttgtctggagatggccagtt

SEQ ID NO: 60204 - DNA, 120 bp, Artificial Sequence
  ENSG00000072121_66 (sequence is synthesized)
ctttctacctcagagtgagtgagtgagtatgtgtgcacacacgtgtgcatgttcctgtgcgctgatgtttacgcccaagcatttctgaacaaatgaaactcttctccatttaaaagaggc

SEQ ID NO: 60205 - DNA, 120 bp, Artificial Sequence
  ENSG00000072121_67 (sequence is synthesized)
actttactttagacttgccactctgaaaaccttccctgcgttttggttcttgacccgggttgtcctgtttgtatagtcccccctctgtggacgtgctttagtagctcctcttacctagag

SEQ ID NO: 60206 - DNA, 120 bp, Artificial Sequence
  ENSG00000072121_68 (sequence is synthesized)
ggcttttacagagaattagagcaacaccaaaaggattgcctcttttccttccttcccattccaaaattcagagatggctttggggcaagtgctacctgtggaataaacctgttttccagg

SEQ ID NO: 60207 - DNA, 120 bp, Artificial Sequence
  ENSG00000072121_69 (sequence is synthesized)
tgtctcttctcccaagcacaagaagtcctggagtctttggaaggtagtctgaatagaagggttttcaggtgcaggcatctgaaagctgtgggtatgtgtataaatgatcaggtctgtgag

SEQ ID NO: 60208 - DNA, 120 bp, Artificial Sequence
  ENSG00000072121_70 (sequence is synthesized)
gctaacacgggcaagagggaaagaaaggctaaccatccaaacagggatacaggggaggcggtggggggtggtggggggagcgggtgctcacaagcacagagctgcctgttgtgaatgtcc

SEQ ID NO: 60209 - DNA, 120 bp, Artificial Sequence
  ENSG00000072121_71 (sequence is synthesized)
ctgctgcaaagttggtgggtgagagaatgggacttcctctttgagagtctggggagagaaaaggtggccaggatcctaggactgaatgactcgattttacctatttgagctgcagtcctg

SEQ ID NO: 60210 - DNA, 120 bp, Artificial Sequence
  ENSG00000072121_72 (sequence is synthesized)
tttgcgctccttgaattggttaggaagctgcttccttttccctcctgcttcccttcagtctcttcaggaccacaggatggatatgcagacatgtggggtcattgggaagggagtgcgctt

SEQ ID NO: 60211 - DNA, 120 bp, Artificial Sequence
  ENSG00000072121_73 (sequence is synthesized)
cttttctctgtcttagaaaagggagtcaagggttggctttggaattgggcctctggacagagtcagaatgagggaataatgaataggtcacatctggttggtggaaaactaggtgaagtg

SEQ ID NO: 60212 - DNA, 120 bp, Artificial Sequence
  ENSG00000072121_74 (sequence is synthesized)
cttctttaatatgcactgtcttgtcttcccacgcaagatgtgacaatgtttgagaaaaggtgtgtcatactcagtgacttcaatttgcaaatgtggggcctaaagaaagctctgcagctc

SEQ ID NO: 60213 - DNA, 120 bp, Artificial Sequence
  ENSG00000072121_75 (sequence is synthesized)
tgaacctctcactggccagagctcagcctattggtcccatccatgatgctgagacaaacagaaactggaagctgaagtcagtgtctctggtgctcagaaaccctgtggatttccctctga

SEQ ID NO: 60214 - DNA, 120 bp, Artificial Sequence
  ENSG00000072121_76 (sequence is synthesized)
accaagatttttagtagtaaaataaacaactcatggacatctgtcagatgagaagttttggtcctgttagagaggagaaagactgtaatgaaactactagacccatttgggctaaagttt

SEQ ID NO: 60215 - DNA, 120 bp, Artificial Sequence
  ENSG00000072121_77 (sequence is synthesized)
ggcttttccttccttgagtcatagaacgtatccatctcccaggaaatgtccttctctggcgtctgcttgcccttctgagtctgccttttttgcactgaacataagcactttatactaatg

SEQ ID NO: 60216 - DNA, 120 bp, Artificial Sequence
  ENSG00000072121_78 (sequence is synthesized)
ggtcacaaatcttgcagcccttaatttgggataagaccagattttcctgacattttcctctaactcattgaactatcaaattataggcaaccactgactagactgatatgagatgaggct

SEQ ID NO: 60217 - DNA, 120 bp, Artificial Sequence
  ENSG00000072121_79 (sequence is synthesized)
aaaagcctttgaacaccacgctgtagtctccaacagaaaaacaccaccaaaacagatacccatgttgaggggttgaatgttttactacaaacaagccacaataaagtgtctatcaacatg

SEQ ID NO: 60218 - DNA, 120 bp, Artificial Sequence
  ENSG00000072121_80 (sequence is synthesized)
gcaccttctcaacaaggtgggacatggacacagctcaaaaaggcagtgcctgccttactcctctggcttggaccactcagccttaagcgggacaataaccccctgacacttaaccctgtg

SEQ ID NO: 60219 - DNA, 120 bp, Artificial Sequence
  ENSG00000072121_81 (sequence is synthesized)
ttgagctatggggccatctctagcagagtcaagtcaaaacaggggactctgcacaactgttattcagtgagtgtgaaaagtcttagcctagatcccaaatcactgccctcaccagcaaag

SEQ ID NO: 60220 - DNA, 120 bp, Artificial Sequence
  ENSG00000072121_82 (sequence is synthesized)
gcatgtttcattccttctgccaaaacatgcagcagaatcggatagtggttaagagcatgtctctggaatgagatgctcagtgtgagtcttgtgtggccttgggcatattgcttagagtct

SEQ ID NO: 60221 - DNA, 120 bp, Artificial Sequence
  ENSG00000072121_83 (sequence is synthesized)
gcttccacgcgcctccctacctggcctgggatggtgtccagcttctgacccagctgctggtccattcagagttgttactacaagggccaggaagtaaccatggtgccaatcctatagttg

SEQ ID NO: 60222 - DNA, 120 bp, Artificial Sequence
  ENSG00000072121_84 (sequence is synthesized)
aaccccaaatagatgatgaaagaagaatatgctctcctttttttcttctcccatcctctgcccccctcccactggaagcaaaggcaccactgaagaacattacatctttggagctcttaa

SEQ ID NO: 60223 - DNA, 120 bp, Artificial Sequence
  ENSG00000072121_85 (sequence is synthesized)
atacacaatgatgacaacaaggtgagcggaattgtctccaaacgctggtgatgccaatgaattgtgtctcaggcttgcctagtcacctttatcccttgctccccacaatagttccataca

SEQ ID NO: 60224 - DNA, 120 bp, Artificial Sequence
  ENSG00000072121_86 (sequence is synthesized)
acccgtatctcagcttctgtattatcagaggtggagctgaggcttggataggggtgtagaaaggagggaatagatgaggagcaggtgaacatggactgcatgcgtctttgccttcccaag

SEQ ID NO: 60225 - DNA, 120 bp, Artificial Sequence
  ENSG00000072121_87 (sequence is synthesized)
tctttatccccaagacaaacatgtcctaggctgctcttgaatctccattttatactgatgtcttctctcagagagccctaggaaatccctcacctcacctccatctttgggtggactgat

SEQ ID NO: 60226 - DNA, 120 bp, Artificial Sequence
  ENSG00000072121_88 (sequence is synthesized)
ggattgaggttcccagagtaagcaggtatctctttatcctagagggaaaaaggtacagtaagaaaaaaatccccaccccacactttgaccaacaatgtccaacaatgtctcggtctccag

SEQ ID NO: 60227 - DNA, 120 bp, Artificial Sequence
  ENSG00000072121_89 (sequence is synthesized)
aatgaacctctcctcaggggccaaagaactcgtccctgtttgggaaaatggtgaacctttgcttcccgttgcctttgggaggagtgccagtcagaataaaaatcttcccagatgccccca

SEQ ID NO: 60228 - DNA, 120 bp, Artificial Sequence
  ENSG00000072121_90 (sequence is synthesized)
tagattagagtgggttcaagagaaaaatcacaggagggaattggagacagtgagggtagataaccctgtctaggggcttctctgtaaaaggaaggagagaagtgaagcagtcgctagaat

SEQ ID NO: 60229 - DNA, 120 bp, Artificial Sequence
  ENSG00000072121_91 (sequence is synthesized)
gagattctcaaaggtatctgtgacacataaaagattaagaagcactgcattgggaggatgctgaaggttcatcaatagaaggaaattcagagtggatcccagacagtgccagaaccaggc

SEQ ID NO: 60230 - DNA, 120 bp, Artificial Sequence
  ENSG00000072121_92 (sequence is synthesized)
ccaggcaggtaatctgaagagctcattcccatgcactaggcaagtggtgtaatgctgcttgtctaatactctttaagaaacagcacatggtcaaaaacaacaaaagcgttgtaaaattat

SEQ ID NO: 60231 - DNA, 120 bp, Artificial Sequence
  ENSG00000072121_93 (sequence is synthesized)
cctattcccactccctcaaggtaacccttgttaatagtttcctatgtatcctttcagaaattttccatgcaatataaacatgtatatccttttatatatatacacatgcattatactata

SEQ ID NO: 60232 - DNA, 120 bp, Artificial Sequence
  ENSG00000072121_94 (sequence is synthesized)
tattgagaactgcagcttgcttttttcatttatatccttttatatatacagatgtattatactataaattgagaacttttttcacttaccattttaaatactgcttagtattccattgtc

SEQ ID NO: 60233 - DNA, 63 bp, Artificial Sequence
  ENSG00000072121_95 (sequence is synthesized)
ttcaaacttctgacctcagatgatccgctcacctctgcctcccaaactgctgggattataggc

SEQ ID NO: 60234 - DNA, 120 bp, Artificial Sequence
  ENSG00000072121_96 (sequence is synthesized)
gggattataggcgtgaaccaccgcgcccagcctaaaagtcttgcttcatgtttatcatgtgttacaaatggcacctgctaaaataaccttggggaaaacaaataaaggcattttgaaagg

SEQ ID NO: 60235 - DNA, 120 bp, Artificial Sequence
  ENSG00000072121_97 (sequence is synthesized)
aacaaataaaggcattttgaaagggatactttttaatcattgtcatcaataccatgtagaaatgtgatctgcactggcttagaaagtgacttcttctccactactttttcttgtttttcc

SEQ ID NO: 60236 - DNA, 120 bp, Artificial Sequence
  ENSG00000072121_98 (sequence is synthesized)
acatgttgcctccatacacaagtagaacttgtcaggagctatcgcaaagctccatgacttcgcacctttgcccatcagctgacagatatttttaaacattcaatttttgagggcaaggac

SEQ ID NO: 60237 - DNA, 120 bp, Artificial Sequence
  ENSG00000072121_99 (sequence is synthesized)
tggtgtgtccttttccaatagagacccaagcagttggtgttcttagaaagtataagccactggtagttaataccatgtataaatggattgatggcaatctccccttctctcctccctctt

SEQ ID NO: 60238 - DNA, 120 bp, Artificial Sequence
  ENSG00000072121_100 (sequence is synthesized)
gcagcattgagggacagagttcacaccgaagagagaggacgttcccctagcactttgtgctaattggtatttaaaaattcatgaatcaagtgagccaaaagcttaaagaaggagaaaaac

SEQ ID NO: 60239 - DNA, 120 bp, Artificial Sequence
  ENSG00000072121_101 (sequence is synthesized)
gatccagatctccatggcataaccaacagcgacagtcttctttaaaagctttcagaaagctgcaaagttttcatggaaaagcggcacacgagtataaaataaagccagaaaagcaactct

SEQ ID NO: 60240 - DNA, 120 bp, Artificial Sequence
  ENSG00000072121_102 (sequence is synthesized)
tcccaacacataagtttgtactgtaagtttccttaacaaagcaacggcattctgtttgcaggcccaacccaaacctggattgcatcatcaggcacaaactcagcttctcaggatgaacag

SEQ ID NO: 60241 - DNA, 120 bp, Artificial Sequence
  ENSG00000072121_103 (sequence is synthesized)
cccagcgagtccggcacctcccatgcacacaggtggtggagagaaccgcattgccttcacacacctgaagtacttgccactcaggggctccaggccctcagccagggcgcagtgcaggct

SEQ ID NO: 60242 - DNA, 120 bp, Artificial Sequence
  ENSG00000072121_104 (sequence is synthesized)
ggtctgcgccccctcccgtgccgtcttgacaaagggggagaagagccgccagagcaggcagagcagggaggagtgccggaccagctcagagcggacgacgcctgggtgcactgcgcattc

SEQ ID NO: 60243 - DNA, 120 bp, Artificial Sequence
  ENSG00000072121_105 (sequence is synthesized)
tggaagtgaagatcattgttcccaaactctggcttattcactgtaacaaatggacccctagatccgcagatgtcagagccagcagctcacccagtgctccaggagagcacagaatcatta

SEQ ID NO: 60244 - DNA, 120 bp, Artificial Sequence
  ENSG00000072121_106 (sequence is synthesized)
aggaataagaaccagcctgacctgattttacagctgagaagatgaagtcaggggaggttaaaggggcacatccacatccacatccacatgcggctagcatgtggtagagcaagaacttgg

SEQ ID NO: 60245 - DNA, 120 bp, Artificial Sequence
  ENSG00000072121_107 (sequence is synthesized)
acccaggggtctgaaatccagccctaactccctgagtccaggcagtggcagctctgtagctcagatcaccatgtggacctcagcaaatggcacccagaaggaagcaccctaggtttaaag

SEQ ID NO: 60246 - DNA, 120 bp, Artificial Sequence
  ENSG00000072121_108 (sequence is synthesized)
ctgagcacccacattccggttctgatgccctcacctgccatatactctttagctggccatttccttggacctcagctctgctctataaactaggagtaataatacctgttaccaaaggcc

SEQ ID NO: 60247 - DNA, 120 bp, Artificial Sequence
  ENSG00000072121_109 (sequence is synthesized)
ctgaggtcaggagtttgagaccaacctggacaacatggtgaaagctcgtctcttctaaaaatacaaaattagccaggcgtgatattgcgtgcttgtaatcccaactactcaagaggctga

SEQ ID NO: 60248 - DNA, 60 bp, Artificial Sequence
  ENSG00000072121_110 (sequence is synthesized)
aaaattagccaggcgtgatattgcgtgcttgtaatcccaactactcaagcactactgcac

SEQ ID NO: 60249 - DNA, 120 bp, Artificial Sequence
  ENSG00000072121_111 (sequence is synthesized)
aaaaaaaacaaaaaaaacaaaaagcctctgtctgttgcaaaaagctactgtgaaaatcaaatgagataagagataagatgtgacacaaatacaaggtaactttttgaggttcttaacccc

SEQ ID NO: 60250 - DNA, 120 bp, Artificial Sequence
  ENSG00000072121_112 (sequence is synthesized)
gggagacccaggaatagcaatgacctgggaaaagaatcagtggaaattcagctaacagtgtcagtcctggctcagcatcaagcaggttaaaaattttttttttccatcacatatagttag

SEQ ID NO: 60251 - DNA, 120 bp, Artificial Sequence
  ENSG00000072121_113 (sequence is synthesized)
ataagtaaccatatatggttagataagtaatagatgtaattttttttaaaaaaaggagacaatttttaaaaagataaaaatgacatatgacatataatcccatacacagactgattagtg

SEQ ID NO: 60252 - DNA, 120 bp, Artificial Sequence
  ENSG00000072121_114 (sequence is synthesized)
ttaaaattctggtgaattttctatgttatgttgtttaatgaaactggggttgtcccatatcataatatgtagaattgtgtatcctgcctgttctgcctttgacactgaaaaattatgaac

SEQ ID NO: 60253 - DNA, 61 bp, Artificial Sequence
  ENSG00000072121_115 (sequence is synthesized)
atcctgcctgttctgcctttgacactgaaaaattatgaacatttttccacattgttaaata

SEQ ID NO: 60254 - DNA, 120 bp, Artificial Sequence
  ENSG00000072121_116 (sequence is synthesized)
gttggtgtgcacattgttaaatattctttgcaagcaatattttcagtgcctgctgagaactttttgagtttcatttttctctctcgctccctgtgctgtcagcaagatgacgattacttt

SEQ ID NO: 60255 - DNA, 120 bp, Artificial Sequence
  ENSG00000072121_117 (sequence is synthesized)
acatttaagtttccagttgtttaccattataaacagtgctgtagtaaaaaaccttgtacatgtctgtgcatacttgtgtaaatacaggataagctcctagcagcagaattactaggtcag

SEQ ID NO: 60256 - DNA, 120 bp, Artificial Sequence
  ENSG00000072121_118 (sequence is synthesized)
atctatatgggtatcatatatagatattacccagttgccttaaaaataaggtagaccaatatggatttctttttttctatagggattaatattaagtattcattgtatgccagatgctgc

SEQ ID NO: 60257 - DNA, 120 bp, Artificial Sequence
  ENSG00000072121_119 (sequence is synthesized)
tctacattccttatatttataattgttaacttatttaatcctcacaatactatgaagtaggtcttattatttttcccgttttatttttatttccttttttcttctttttgagatggagtc

SEQ ID NO: 60258 - DNA, 120 bp, Artificial Sequence
  ENSG00000072121_120 (sequence is synthesized)
gaattacaggcgtgagtcaccgggcccggcctcccttttatttttagttggcatataataattgtacatatttaagggatacacagtgatatttcaatatgtttataaaatgtgtaatga

SEQ ID NO: 60259 - DNA, 120 bp, Artificial Sequence
  ENSG00000072121_121 (sequence is synthesized)
ataaaatgtgtaatgaccaaattggagtaatatctatcacctcaaacatttgtcatttctttgtgttgtgaacattcaaaatcctttcttcggcctggcacggtggctcacacctgtaat

SEQ ID NO: 60260 - DNA, 88 bp, Artificial Sequence
  ENSG00000072121_122 (sequence is synthesized)
ttcaagaccagcctggcttgaaagttagctcggtgtagtggtgggtgcccagctcgggagcctgaggcacgagaatcacttgaacctg

SEQ ID NO: 60261 - DNA, 78 bp, Artificial Sequence
  ENSG00000072121_123 (sequence is synthesized)
gtgggtgcccagctcgggaggggtgagctgagattgtgccactggactctagcctgggtgacagagtgagaatccatc

SEQ ID NO: 60262 - DNA, 120 bp, Artificial Sequence
  ENSG00000072121_124 (sequence is synthesized)
taagggatctcttttcctaccagacggtcccagggtgagagacatgtggttcaatatttgggcattggtcaatgtgcccccactcaactaccctctgaagaataagcagaggcacagtgt

SEQ ID NO: 60263 - DNA, 120 bp, Artificial Sequence
  ENSG00000072121_125 (sequence is synthesized)
atttcacgtgctctgaaattttacctctatagtatacatccattacttagtcaatattggcttttgattatcatctgcaactgaatgtaagcctggctgccaaagtgtgcctgaaactgc

SEQ ID NO: 60264 - DNA, 120 bp, Artificial Sequence
  ENSG00000072121_126 (sequence is synthesized)
gggctttgtagactcaagactgctgagaagaatcaggcagtcatgtaaaggggttgaaggcatgtgtgtttccttccaggagtatgaactgtgtgaagagtggggctgcctgtaccccat

SEQ ID NO: 60265 - DNA, 120 bp, Artificial Sequence
  ENSG00000072133_0 (sequence is synthesized)
agtcaccaccgagcggctgtcgttgtggtggcagtggtgagcgcgagccgagcggcagctcttggagaggcagcacagagttgtcttctctatgggaatcaccgggcggcggcggcggcg

SEQ ID NO: 60266 - DNA, 120 bp, Artificial Sequence
  ENSG00000072133_1 (sequence is synthesized)
cttctctatgggaatcaccgggcggcggcggcggcgacccccagctcccagcctctgagagacccggcggcgagggcagcgctcgctgaaggcggggctgggggtcgcggcggcggcggc

SEQ ID NO: 60267 - DNA, 120 bp, Artificial Sequence
  ENSG00000072133_2 (sequence is synthesized)
ggatgcgcggccgcgccagcggtaggcggcagctcctgtttgagtgctcctgaaggggagatgctaccattcgctcctcaggacgagccctgggaccgagaaatggaagtgttcagcggc

SEQ ID NO: 60268 - DNA, 120 bp, Artificial Sequence
  ENSG00000072133_3 (sequence is synthesized)
ggcggcgcgagcagcggcgaggtaaatggtcttaaaatggttgatgagccaatggaagagggagaagcagattcttgtcatgatgaaggagttgttaaagaaatccctattactcatcat

SEQ ID NO: 60269 - DNA, 120 bp, Artificial Sequence
  ENSG00000072133_4 (sequence is synthesized)
gttaaggaaggctatgagaaagcagatcctgcacagtttgagttgctcaaggttcttggtcaggggtcatttggaaaggtttttcttgttagaaagaagaccggtcctgatgctgggcag

SEQ ID NO: 60270 - DNA, 120 bp, Artificial Sequence
  ENSG00000072133_5 (sequence is synthesized)
ctctatgcaatgaaggtgttaaaaaaagcctctttaaaagttcgagacagagttcggacaaagatggagagggatatactggtggaagtaaatcatccatttattgtcaaattgcactat

SEQ ID NO: 60271 - DNA, 120 bp, Artificial Sequence
  ENSG00000072133_6 (sequence is synthesized)
gcctttcagactgaagggaaactgtacttaatactggattttctcaggggaggagatgttttcacaagattatccaaagaggttctgtttacagaggaagatgtgaaattctacctcgca

SEQ ID NO: 60272 - DNA, 120 bp, Artificial Sequence
  ENSG00000072133_7 (sequence is synthesized)
gaactggcccttgctttggatcatctgcaccaattaggaattgtttatagagacctgaagccagaaaacattttgcttgatgaaataggacatatcaaattaacagattttggactcagc

SEQ ID NO: 60273 - DNA, 120 bp, Artificial Sequence
  ENSG00000072133_8 (sequence is synthesized)
aaggagtcagtagatcaagaaaagaaggcttactcattttgtggtacagtagagtatatggctcctgaagtagtaaataggagaggccattcccagagtgctgattggtggtcatatggt

SEQ ID NO: 60274 - DNA, 120 bp, Artificial Sequence
  ENSG00000072133_9 (sequence is synthesized)
gttcttatgtttgaaatgcttactggtactctgccatttcaaggtaaagacagaaatgagaccatgaatatgatattaaaagcaaaacttggaatgcctcaatttcttagtgctgaagca

SEQ ID NO: 60275 - DNA, 120 bp, Artificial Sequence
  ENSG00000072133_10 (sequence is synthesized)
caaagtcttctaaggatgttattcaaaaggaatccagcaaatagattgggatcagaaggagttgaagaaatcaaaagacatctgttttttgcaaatattgactgggataaattatataaa

SEQ ID NO: 60276 - DNA, 120 bp, Artificial Sequence
  ENSG00000072133_11 (sequence is synthesized)
agagaagttcaacctcctttcaaacctgcttctggaaaaccagatgatactttttgttttgatcctgaatttactgcaaaaacacctaaagattctcccggtttgccagccagtgcaaat

SEQ ID NO: 60277 - DNA, 120 bp, Artificial Sequence
  ENSG00000072133_12 (sequence is synthesized)
gctcatcagctcttcaaaggattcagctttgttgcaacttctattgcagaagaatataaaatcactcctatcacaagtgcaaatgtattaccaattgttcagataaatggaaatgctgca

SEQ ID NO: 60278 - DNA, 120 bp, Artificial Sequence
  ENSG00000072133_13 (sequence is synthesized)
caatttggtgaagtatatgaattgaaggaggatattggtgttggctcctactctgtttgcaagcgatgcatacatgcaactaccaacatggaatttgcagtgaagatcattgacaaaagt

SEQ ID NO: 60279 - DNA, 120 bp, Artificial Sequence
  ENSG00000072133_14 (sequence is synthesized)
aagcgagacccttcagaagagattgaaatattgatgcgctatggacaacatcccaacattattactttgaaggatgtctttgatgatggtagatatgtttaccttgttacggatttaatg

SEQ ID NO: 60280 - DNA, 120 bp, Artificial Sequence
  ENSG00000072133_15 (sequence is synthesized)
aaaggaggagagttacttgaccgtattctcaaacaaaaatgtttctcggaacgggaggctagtgatatactatatgtaataagtaagacagttgactatcttcattgtcaaggagttgtt

SEQ ID NO: 60281 - DNA, 120 bp, Artificial Sequence
  ENSG00000072133_16 (sequence is synthesized)
catcgtgatcttaaacctagtaatattttatacatggatgaatcagccagtgcagattcaatcaggatatgtgattttgggtttgcaaaacaacttcgaggagaaaatggacttctctta

SEQ ID NO: 60282 - DNA, 120 bp, Artificial Sequence
  ENSG00000072133_17 (sequence is synthesized)
actccatgctacactgcaaactttgttgcacctgaggttcttatgcaacagggatatgatgctgcttgtgatatctggagtttaggagtccttttttacacaatgttggctggctacact

SEQ ID NO: 60283 - DNA, 120 bp, Artificial Sequence
  ENSG00000072133_18 (sequence is synthesized)
ccatttgctaatggccccaatgatactcctgaagagatactgctgcgtataggcaatggaaaattctctttgagtggtggaaactgggacaatatttcagacggagcaaaggatttgctt

SEQ ID NO: 60284 - DNA, 120 bp, Artificial Sequence
  ENSG00000072133_19 (sequence is synthesized)
tcccatatgcttcatatggacccacatcagcggtatactgctgaacaaatattaaagcactcatggataactcacagagaccagttgccaaatgatcagccaaagagaaatgatgtgtca

SEQ ID NO: 60285 - DNA, 120 bp, Artificial Sequence
  ENSG00000072133_20 (sequence is synthesized)
catgttgttaagggagcaatggttgcaacatactctgccctgactcacaagacctttcaaccagtcctagagcctgtagctgcttcaagcttagcccagcgacggagcatgaaaaagcga

SEQ ID NO: 60286 - DNA, 120 bp, Artificial Sequence
  ENSG00000072133_21 (sequence is synthesized)
acatcaactggcctgtaagatttgtggtgttcctaggccaaactggatgaagatgaaattaaatgtgtggcttttttcctattcttatcaaaggcatcgttgtctgctaaattacttgaa

SEQ ID NO: 60287 - DNA, 120 bp, Artificial Sequence
  ENSG00000072133_22 (sequence is synthesized)
tattaagtaatattaaatccccatttttaggggaagtgagatttaaaaaaccattcacaggtccacaatattcatactatgtgtttgcagtagtgttcaagtgtttatttaagcatataa

SEQ ID NO: 60288 - DNA, 120 bp, Artificial Sequence
  ENSG00000072133_23 (sequence is synthesized)
ttggtgtccaccaggtcctcacaacttctctgcacacaagcttctaaaattcctttcaaataaagttactttaatattttttttcttgtttcatacaattatggtttggggagtcattac

SEQ ID NO: 60289 - DNA, 120 bp, Artificial Sequence
  ENSG00000072133_24 (sequence is synthesized)
caacaatcagtatacatatataatagtataatgacaagcaatgttagtatttttaaacatcagatcctgaaggataggctttttctaatgaaagaaaaacaacaaaaacttattataaaa

SEQ ID NO: 60290 - DNA, 120 bp, Artificial Sequence
  ENSG00000072133_25 (sequence is synthesized)
gcttgttattccgtaaaaccaaaggactccattcatttgactcactgtagttactaaaatgtaaacatagtggtttggtgccagagcaaaatacatttgtgctaatatatgaattcttga

SEQ ID NO: 60291 - DNA, 120 bp, Artificial Sequence
  ENSG00000072133_26 (sequence is synthesized)
tatagttggtgccaaagtttttatagaagaattatatctcagataatgtgtgcaggcagatctgtatattatccataataagtggcctcatttagaaataaaggtttttataaggcttct

SEQ ID NO: 60292 - DNA, 120 bp, Artificial Sequence
  ENSG00000072133_27 (sequence is synthesized)
gtaaattttacatcatggaaatttagtacaagtgaaactttttttttttccaaaggctttatactgttggtgtaatcttataaataggtcatagttaagcctttgaaaatgaagtatgtg

SEQ ID NO: 60293 - DNA, 120 bp, Artificial Sequence
  ENSG00000072133_28 (sequence is synthesized)
gtgttgacactatcctggtgttatataaactgactttcaagttaaccaattggattgtaatcatcatctatcccctttataaatgaactacactgttgtttttctgacttcgatgtgctt

SEQ ID NO: 60294 - DNA, 120 bp, Artificial Sequence
  ENSG00000072133_29 (sequence is synthesized)
tgaagtacagtgtagcatatcattctaccttgaatcctatgataatacagttgacatcttgctgtagtggacttgtgcatatagcacacatgatatagtatattgtattacagtaaactt

SEQ ID NO: 60295 - DNA, 120 bp, Artificial Sequence
  ENSG00000072133_30 (sequence is synthesized)
caatgctacttaatcattttacttcatgaagataaactaacattttaaatatgaataatattaatggtctacaaaaaatttgagcacattttaaaatcatatttataaaaaactggccaa

SEQ ID NO: 60296 - DNA, 120 bp, Artificial Sequence
  ENSG00000072133_31 (sequence is synthesized)
ccaaattggtcttatttaatgtataattcagaaccactgtgtagtatgtattcttttctctaaatgatgaaatgctaaagaatcatttcacgttgttgaagaaaataccgttgctacaac

SEQ ID NO: 60297 - DNA, 120 bp, Artificial Sequence
  ENSG00000072133_32 (sequence is synthesized)
ctactactactactactactactactgacagaaagaattcatgaatgtaaactggaggatatcacagttttctttagtgaatataagtgaactacttgtgcgtgttaggtgtactatttg

SEQ ID NO: 60298 - DNA, 120 bp, Artificial Sequence
  ENSG00000072133_33 (sequence is synthesized)
gaactacttgtgcgtgttaggtgtactatttgctatgtattttattttgctttattcagagagaaagttgattactgagtgctgaattatacaatttaggctaggaaactcgtaactttg

SEQ ID NO: 60299 - DNA, 120 bp, Artificial Sequence
  ENSG00000072133_34 (sequence is synthesized)
gtatttaataaaagaaactatacatattctgtttgtaatgtaaataatctataccccatgcacaaatatctgtttcctgggtgtgatatattaaagtatgtattcttattttgaggtatc

SEQ ID NO: 60300 - DNA, 120 bp, Artificial Sequence
  ENSG00000072133_35 (sequence is synthesized)
tagttaggtatcatgtcttatggctttttatgttccattttggctttttttctcatttgctttattactatatgtacttgcatgtaacagtttgtaagcatatattctgacttattttcc

SEQ ID NO: 60301 - DNA, 120 bp, Artificial Sequence
  ENSG00000072133_36 (sequence is synthesized)
ttctgtcattatctagtgctgttatgccttcctatcagaatcgataagtcaaactcagaggtgtgattttggtgttgaagttttcaggacagagatactatttccatggatgcattttaa

SEQ ID NO: 60302 - DNA, 120 bp, Artificial Sequence
  ENSG00000072133_37 (sequence is synthesized)
gtaataaaattaggggaagtgaaatcagaaaatgaaaaatgattacaaaataactttcaggttttctataatcaatggctttaaaaagtagacagtcttaattaattttaaattagcttg

SEQ ID NO: 60303 - DNA, 120 bp, Artificial Sequence
  ENSG00000072133_38 (sequence is synthesized)
ctcagaaaggtcatgccatacagtcctatcataaaaggaacactataagaattaagcaatgaacagcatgatttctgatcacccagtgaggactgacagtgtataaaagatacaggtatg

SEQ ID NO: 60304 - DNA, 120 bp, Artificial Sequence
  ENSG00000072133_39 (sequence is synthesized)
ctactggatgtacccgataattgtttgagagttttctagtgaaaaactcaaatatgctagcttaaccacagtagtagggggcaaccttattatatgggagagcttcaaaacatactgtca

SEQ ID NO: 60305 - DNA, 120 bp, Artificial Sequence
  ENSG00000072133_40 (sequence is synthesized)
ttttgtagaaggagcccaggtaaggatgcctaatcctgtccagtttggctagaactccatagccaaaaatgcagatttggattgaacatttttttgatgggacttctatcaatgcttaac

SEQ ID NO: 60306 - DNA, 120 bp, Artificial Sequence
  ENSG00000072133_41 (sequence is synthesized)
tagtaaaaacacatcttttctataagactttagaatactgtggtttctaatgggttcttgaataatgattttgcattgtgtttttctagttaatggtttttggtagtatttaatgatagc

SEQ ID NO: 60307 - DNA, 120 bp, Artificial Sequence
  ENSG00000072133_42 (sequence is synthesized)
acagtttggggttttattgttcttgaagggggaggatattgaatttgtttttcttagagaaaacatcaggtttgctcaaatagactaacaacctgttgtccttaagcacatactaccatg

SEQ ID NO: 60308 - DNA, 120 bp, Artificial Sequence
  ENSG00000072133_43 (sequence is synthesized)
aataaactcaggaaacaattttcaagaaaattcgaatgcagtgctggtgatggggatttttgtgggaaaaaacaatggtttcaagtcctttcacaaagatcaaacttcagcctattttgt

SEQ ID NO: 60309 - DNA, 120 bp, Artificial Sequence
  ENSG00000072133_44 (sequence is synthesized)
tagactcagcaatgtctaaaacagtgttttttgtaatttattgtcattggtaattcaatataataaaacaattttgatagcacctctgtttggctcaaagggattccatatgtttaggca

SEQ ID NO: 60310 - DNA, 120 bp, Artificial Sequence
  ENSG00000072133_45 (sequence is synthesized)
acccacaaccttaagaacagatgcttggtatttataatgtctgcccattggaacaacatgttaaaatagtactgcccagagaaacttccatacagattgactagtattttctagatagag

SEQ ID NO: 60311 - DNA, 120 bp, Artificial Sequence
  ENSG00000072133_46 (sequence is synthesized)
gtctttcatatatgaagaaggaaaacaaccatttatcttggccctaaggcccacaagaaaacttaggctttaaagtgggcaaagcatatttgtggtattctgtacattctctttctcctg

SEQ ID NO: 60312 - DNA, 120 bp, Artificial Sequence
  ENSG00000072133_47 (sequence is synthesized)
gctttccagccccttcatgctatctatcttatttgagcacctcacagcaatactccatcaacgaaatttaccctatccccagaaggattctgtgtgatccttactccttgttccttcctc

SEQ ID NO: 60313 - DNA, 120 bp, Artificial Sequence
  ENSG00000072133_48 (sequence is synthesized)
ttcctcttccccaaatcaggatatccattctatcagaacagacatttccagctaaaaaggtgaaaggaaagctatcttattaaattaatttacatttttctgtcagtggctaatagttaa

SEQ ID NO: 60314 - DNA, 120 bp, Artificial Sequence
  ENSG00000072133_49 (sequence is synthesized)
ttggcattttttaaggaagttgtgcattaatcaagtttttagttgctggatcttcaggcaatctaacaaggtgataattttaaattcagttcctatcacggaaaatattttgggggaaag

SEQ ID NO: 60315 - DNA, 120 bp, Artificial Sequence
  ENSG00000072133_50 (sequence is synthesized)
gaacagtgtgtcccagggtcagagtatctaataaactgtttctttttttgcacaatttccttcctacttcctttctacttctcaatctaccttttctcttaaaaacttttaaacttttta

SEQ ID NO: 60316 - DNA, 120 bp, Artificial Sequence
  ENSG00000072133_51 (sequence is synthesized)
atcacaatgaacttctatgacaaaatgatgtggaggtagacagagattggcgattatttctgtatatgttgtttttaaacccatagttttgtattcttgtttctcacagtacatgaccta

SEQ ID NO: 60317 - DNA, 120 bp, Artificial Sequence
  ENSG00000072133_52 (sequence is synthesized)
tatagcataagaagttttattccccccaccccccatcccattcctgttataaagaaaaaaaaaagcacagagagattgaatccaaactactcatggagtccaaatttttccagatccctt

SEQ ID NO: 60318 - DNA, 120 bp, Artificial Sequence
  ENSG00000072133_53 (sequence is synthesized)
ttccagattttaggacctagaaatcctttaagtcacaatgttatttcaaaaaaaaaaaaaaaaaaatgcaagccatattaagtatatattggccaactgcaattaaacttctttaaaaca

SEQ ID NO: 60319 - DNA, 120 bp, Artificial Sequence
  ENSG00000072133_54 (sequence is synthesized)
tttttgttttacatttcaaagcttattcaggcatttttggcatgtacctcaagatcaatgattgttgaaattagcagaataaatcaatagtgggctatttgcctttttatgtgggaatat

SEQ ID NO: 60320 - DNA, 120 bp, Artificial Sequence
  ENSG00000072133_55 (sequence is synthesized)
agtggcattgatagtgattattcacaacatacattatactcatggatgcactgttcctggttttagtcttacagtgtagtgaattccatcatatactttcaataaaatgttatgcttgat

SEQ ID NO: 60321 - DNA, 120 bp, Artificial Sequence
  ENSG00000072133_56 (sequence is synthesized)
cacctaaaattcagtttggttgctaatacataagagaaaagggaactatacttgaatatattaaattatagacataagtttctttgaaatatttagaaaaacaaaagttttagaatatgg

SEQ ID NO: 60322 - DNA, 120 bp, Artificial Sequence
  ENSG00000072133_57 (sequence is synthesized)
aaatccaagcttacattatattggcaaattatgtatgtttcaattattcactaaataaattttagctaaatgcttataaataaatatatatatgtaattgccaagttagggtttgctttg

SEQ ID NO: 60323 - DNA, 120 bp, Artificial Sequence
  ENSG00000072133_58 (sequence is synthesized)
tattcacatttctaaacgctggacaatagagcttctgtggatgactgttttgctgtaattccaactgtctagttatgggaactaataatttattcttcaaaaggtattaagcatttaatt

SEQ ID NO: 60324 - DNA, 120 bp, Artificial Sequence
  ENSG00000072133_59 (sequence is synthesized)
ttacgtggacaattatagagaatgtactaactgcattcgtttattaaaaaattgtcaaaatgtgactgattaggttacttttatctttcctatgaactaatattgctcaggtcacatttt

SEQ ID NO: 60325 - DNA, 120 bp, Artificial Sequence
  ENSG00000072133_60 (sequence is synthesized)
ctttctctttccaaattcattctctctgaaattgctgcttataacaaatatgtagtgttttgttttttagtatgataaaattatttttaacagcaggaaagcagtctatcaagaaacagc

SEQ ID NO: 60326 - DNA, 63 bp, Artificial Sequence
  ENSG00000072133_61 (sequence is synthesized)
cgacatttaaaaagttacacattaaaccttaaatatccaaattccagcatggtttgtaagtta

SEQ ID NO: 60327 - DNA, 120 bp, Artificial Sequence
  ENSG00000072133_62 (sequence is synthesized)
tccaaattccagcatggtttgtaagttagaatttatcttgcattaaattccatagtacaaaaaaaaggagaaggtggtttttctgtttgataaaaaaaaaaaaaaacaggaagtactgtt

SEQ ID NO: 60328 - DNA, 120 bp, Artificial Sequence
  ENSG00000072133_63 (sequence is synthesized)
ggtagttgggagttacataggctttatgaagcaaccacagtttgctatagccacattttttaaaaaattggtttgccaacacatcccaagcacttttgaattcctaaacttatttctgat

SEQ ID NO: 60329 - DNA, 120 bp, Artificial Sequence
  ENSG00000072133_64 (sequence is synthesized)
attaaatatatatgtatatactgacatttcattgcatttctgaagactgaaatggcattaaataaaagttgtgtgtgaatttgatttacgtgtacttaaaaacttcaaagctgcagttaa

SEQ ID NO: 60330 - DNA, 120 bp, Artificial Sequence
  ENSG00000072133_65 (sequence is synthesized)
acaatccccagtgttcaaaaactattttattgttctgactatattatgaattttatgttaccatttattttattaatgttttctttaaaccattggttttttgacattaaaattttcatt

SEQ ID NO: 60331 - DNA, 120 bp, Artificial Sequence
  ENSG00000072133_66 (sequence is synthesized)
tattatactaagttttttatcatgtaagaccaaatccagtagttcattttacaatgtttctttctctcacaatgctgctaaagaaatggctatcattttgaatttacaacatgccaaaga

SEQ ID NO: 60332 - DNA, 120 bp, Artificial Sequence
  ENSG00000072133_67 (sequence is synthesized)
agacatagaagttatatttatttttgttcttgttaaaactctgtgagcaacagttctcaagatatgttaaattactggcattctctgggtaccaaataaaaaggctgcaactttctaaca

SEQ ID NO: 60333 - DNA, 120 bp, Artificial Sequence
  ENSG00000072133_68 (sequence is synthesized)
tgctaccattcgctcctcaggacgagccctgggaccgagaaatggaagtgttcagcggcggcggcgcgagcagcggcgagtttgctggctgggaacattttgggggacagctgcggactc

SEQ ID NO: 60334 - DNA, 120 bp, Artificial Sequence
  ENSG00000072133_69 (sequence is synthesized)
cagctcgctgttgaaccccggacgctttacgaacccagtgcaacaaacacaccaagaaagttggatccttttctgataacttaatcgactgcgtactactccagtagaggccaccataca

SEQ ID NO: 60335 - DNA, 120 bp, Artificial Sequence
  ENSG00000072134_0 (sequence is synthesized)
ggcctgagggcgcgcgcacgcgtccggcgcgccccctcccggccgccatgttggctggtgtgtgggtgtcaaactgagccagacgcggcggtggcggcggctccgcgggctacggtcgct

SEQ ID NO: 60336 - DNA, 120 bp, Artificial Sequence
  ENSG00000072134_1 (sequence is synthesized)
cggtcgctcccgcctctcgagcgctgccggtggccgcagcggcgcacccacgccggcccggaggagcagagtgttcatttctgtgtcgggcacagtgctaagtgctgggtgctcactggt

SEQ ID NO: 60337 - DNA, 120 bp, Artificial Sequence
  ENSG00000072134_2 (sequence is synthesized)
gatgaggcagatgaaggttaccaaacttgtggacaggagcctcatatcagagacgtggacctcactgtagcctggtcatggcttccagcttttcgaatctgaggctccaaaggaggaaat

SEQ ID NO: 60338 - DNA, 120 bp, Artificial Sequence
  ENSG00000072134_3 (sequence is synthesized)
gaccattcagggatcttactccagcttgattacggagactgaaccttcatagggtgcgcacttaccaaggacaggaaggtttctctgtttgaagggctttaaacttataacaaagaaaat

SEQ ID NO: 60339 - DNA, 120 bp, Artificial Sequence
  ENSG00000072134_4 (sequence is synthesized)
aaaaatgacgacttcgtctatcagacggcagatgaaaaacatcgtgaacaattactcagaggcagaaatcaaagtccgggaagccacctccaatgacccgtggggcccgtccagttctct

SEQ ID NO: 60340 - DNA, 120 bp, Artificial Sequence
  ENSG00000072134_5 (sequence is synthesized)
gatgaccgagattgccgacctgacctacaacgtggtggccttctcggagatcatgagcatggtgtggaagcggctgaatgaccatggcaagaactggcggcatgtgtacaaggcgctgac

SEQ ID NO: 60341 - DNA, 120 bp, Artificial Sequence
  ENSG00000072134_6 (sequence is synthesized)
cctgctggactacctcatcaagacaggctccgaacgtgtggcccagcagtgccgggagaacatcttcgccatccagaccctgaaggacttccagtacattgaccgagatggcaaggacca

SEQ ID NO: 60342 - DNA, 120 bp, Artificial Sequence
  ENSG00000072134_7 (sequence is synthesized)
gggcatcaatgtgcgtgagaagtcaaagcaactggtggctctcctcaaggacgaggaacggttgaaggctgagagggcccaggctctcaaaaccaaagagcgcatggcccaggttgccac

SEQ ID NO: 60343 - DNA, 120 bp, Artificial Sequence
  ENSG00000072134_8 (sequence is synthesized)
tggcatgggcagcaaccagatcacctttgggcgaggctccagccagcccaacctctccaccagccactcggagcaggagtatggcaaggccgggggctccccggcctcctaccatggctc

SEQ ID NO: 60344 - DNA, 120 bp, Artificial Sequence
  ENSG00000072134_9 (sequence is synthesized)
gcctgaggcctcgctgtgcccccagcaccgcacaggggccccgctgggtcagagtgaggagctgcagccactgagccagcgccaccccttcctgccgcacctggggctggcctcccgccc

SEQ ID NO: 60345 - DNA, 120 bp, Artificial Sequence
  ENSG00000072134_10 (sequence is synthesized)
aaatggcgactggtcccagccctgcctcacttgtgaccgcgcagcccgagccacctccccgcgagtgtcctccgagctggagcaagcccggccccagactagtggagaagaggagcttca

SEQ ID NO: 60346 - DNA, 120 bp, Artificial Sequence
  ENSG00000072134_11 (sequence is synthesized)
gctgcagctggcacttgccatgagcagagaagtggctgagcaggaagaacgcctcaggcggggtgatgacctcagattacagatggccctggaagaaagccgaagggacacagttaaaat

SEQ ID NO: 60347 - DNA, 120 bp, Artificial Sequence
  ENSG00000072134_12 (sequence is synthesized)
tccaaaaaagaaagagcatggctctctcccacagcagactacgctgttggatttaatggatgctctccccagctcgggccccgcggcccagaaagcagagccctggggcccgtcagcctc

SEQ ID NO: 60348 - DNA, 120 bp, Artificial Sequence
  ENSG00000072134_13 (sequence is synthesized)
cactaaccagaccaacccctggggcgggccagcggctcctgcgagtacttcagacccctggccatcgtttggtaccaagccagctgcctccattgacccatggggggtgcccactggagc

SEQ ID NO: 60349 - DNA, 120 bp, Artificial Sequence
  ENSG00000072134_14 (sequence is synthesized)
caccgtacaatctgtccccaagaactcggacccctgggcagcttcacagcagcctgcctccagtgctgggaaaagagcttctgacgcgtggggcgcagtctccaccaccaagcccgtgtc

SEQ ID NO: 60350 - DNA, 120 bp, Artificial Sequence
  ENSG00000072134_15 (sequence is synthesized)
tgtctctgggtcctttgagctcttcagtaatctgaatggtacaattaaagatgacttttctgaatttgacaaccttcggacttcaaaaaaaacagccgaatctgtgacctctctgccatc

SEQ ID NO: 60351 - DNA, 120 bp, Artificial Sequence
  ENSG00000072134_16 (sequence is synthesized)
ccaaaacaatggaactaccagccctgacccctttgagtctcaacccctgactgtcgcctcaagcaagcccagcagtgcccggaaaacacctgagtccttcctgggccccaacgcggccct

SEQ ID NO: 60352 - DNA, 120 bp, Artificial Sequence
  ENSG00000072134_17 (sequence is synthesized)
ggtgaacctggactcactggtgaccaggcctgccccaccagcccagtccctcaaccctttcctggcaccaggtgctcccgccacctcggcccctgttaaccctttccaggtgaaccagcc

SEQ ID NO: 60353 - DNA, 120 bp, Artificial Sequence
  ENSG00000072134_18 (sequence is synthesized)
ccagccgctgacactgaaccagcttcgggggagcccagtcctggggaccagcacatcctttgggcctggcccaggagtggagtccatggctgtggcctcgatgacctccgcggccccaca

SEQ ID NO: 60354 - DNA, 120 bp, Artificial Sequence
  ENSG00000072134_19 (sequence is synthesized)
gccagctctgggggccactggttcctctctgacaccactgggccctgcaatgatgaacatggtgggcagtgtgggtatacccccatcagcagcccaggccactggcacaaccaacccttt

SEQ ID NO: 60355 - DNA, 120 bp, Artificial Sequence
  ENSG00000072134_20 (sequence is synthesized)
tctgtgggacgggatccaagagtttggggattaggggtattagggcttttcagctccagcttcctgatgaaagggctgtctttacagccccaaccctcagaccctcgccttccaaggcag

SEQ ID NO: 60356 - DNA, 120 bp, Artificial Sequence
  ENSG00000072134_21 (sequence is synthesized)
gcccctcagcctggcctgctctcaccacctcctccaaagcactgaggtcctggcagggctcctctgaggccttggacgaggacgtggagtcatcagtgttgcccttgcccctaacctcag

SEQ ID NO: 60357 - DNA, 120 bp, Artificial Sequence
  ENSG00000072134_22 (sequence is synthesized)
cccgagggtctccaggatgttgcctggcccaggacttgggacagtggccttgtctttgtcctccccaccccccagccctagggacaccccaggcagtcctgggtgtggacacgatgaagc

SEQ ID NO: 60358 - DNA, 120 bp, Artificial Sequence
  ENSG00000072134_23 (sequence is synthesized)
accggctccataagacaccttttggggaagtggttgtgcatattttatttttctttgactcgtgtgagttcaaagtaaacaccaccaccgtggacaactcttgaattaaatccactagag

SEQ ID NO: 60359 - DNA, 120 bp, Artificial Sequence
  ENSG00000072134_24 (sequence is synthesized)
cgagctttaaaactaatctgagcataacccccaacgtggctctatgcttgtgtacctttgcacatattttgtttagtacagtttcatatttgagtttgcagaattatctaatagtctttt

SEQ ID NO: 60360 - DNA, 120 bp, Artificial Sequence
  ENSG00000072134_25 (sequence is synthesized)
tttggctaatatttttataacgtggttcttatttaactgtctagttttgatagaatttaccaggtctggctgaatgaagatgttggcacgtgtcattttagtggtttaaatcctcttatt

SEQ ID NO: 60361 - DNA, 120 bp, Artificial Sequence
  ENSG00000072134_26 (sequence is synthesized)
tatggttttaactctaagaaaattttaaaaggaagagatgtttggatgacaaaaaaatgccttattgaaaaactaaagcaaattctttataggaagaaaatatgggaatttgattacaca

SEQ ID NO: 60362 - DNA, 120 bp, Artificial Sequence
  ENSG00000072134_27 (sequence is synthesized)
tagatgatgatgtttatttaaaaaaaaaacaacagcaacaaaaaatcctagcctccagttgccttttcctttctttagctcctgtttttggtgaattactaaactgattgactttcagcc

SEQ ID NO: 60363 - DNA, 120 bp, Artificial Sequence
  ENSG00000072134_28 (sequence is synthesized)
tttttggctagatcctgagaggctatttttcttacgaatataccaacatcctgaaagttaaagaaaaaaatctaatgtatgaatgtgactcaccaatttttatcaactaattcctttttt

SEQ ID NO: 60364 - DNA, 120 bp, Artificial Sequence
  ENSG00000072134_29 (sequence is synthesized)
ttattaaaggcatgcagggattaacaggacttctgtttacaatggaaatctgaaatggaagaaacatctttaaccttgtgtgtctgtgatctcctctgtcttaatccacgctcaggctaa

SEQ ID NO: 60365 - DNA, 120 bp, Artificial Sequence
  ENSG00000072134_30 (sequence is synthesized)
agatggggataatgtggaaatggcagttgtcccgagggcgtggggtggggggtgcttctgtgcccacgggtccctgggcaacagtccctaggctaagacaggggtggggggctaagggac

SEQ ID NO: 60366 - DNA, 120 bp, Artificial Sequence
  ENSG00000072134_31 (sequence is synthesized)
cagggctggccctgatccacctacctgctaactccagatattatttttaagttggagacctaaaaataattctcttgtattttggagatgaagaaaaaagtcattcacctgggagggatt

SEQ ID NO: 60367 - DNA, 120 bp, Artificial Sequence
  ENSG00000072134_32 (sequence is synthesized)
tttaacaaacatgcactaatattacctccctcttccaaactcctactgtcctcacctcacccaccactgtaaaagtattacgtcgtgcattaaagaccagaaaagacttgcttttaccca

SEQ ID NO: 60368 - DNA, 120 bp, Artificial Sequence
  ENSG00000072134_33 (sequence is synthesized)
gggaggggacattcccccaatcctgtgtctgggcagcttgcctggtggatgtttctggccctttttccaccatgggaatttctcacctctagctctaagggcagctgaccacctgccagc

SEQ ID NO: 60369 - DNA, 120 bp, Artificial Sequence
  ENSG00000072134_34 (sequence is synthesized)
ccctctctggttccagaagattacccttcgcaccggcacaggagagatcttaaatggtctctgggctgctgggacatgcaggctctgagtggggactgcacccactcatgctgttcctga

SEQ ID NO: 60370 - DNA, 120 bp, Artificial Sequence
  ENSG00000072134_35 (sequence is synthesized)
ggccgccctctccagtcccaggagccgtgtctagagttcctgaccagccaccttctgccagaactgcaggcctgcggctgggtcttaggctcccgctgccatttgggtaagccggtggct

SEQ ID NO: 60371 - DNA, 120 bp, Artificial Sequence
  ENSG00000072134_36 (sequence is synthesized)
ggtctcgtctgccgggggaagggtggggaggtgcaatgggatgggaggcaggatgcttgcccagaaaggtgctttccttcagacggtgcagggcctgggccagccttacaggtcagtaga

SEQ ID NO: 60372 - DNA, 120 bp, Artificial Sequence
  ENSG00000072134_37 (sequence is synthesized)
ctagactcgactacttggggtcagtgattcttttgtaacgagtctttcatgatgtgactttgaggccccaacatgacagccactgggccaccgggacccaagaagacagccccctgcccc

SEQ ID NO: 60373 - DNA, 120 bp, Artificial Sequence
  ENSG00000072134_38 (sequence is synthesized)
atcttctggcacaggccatcccgagtgcatgtccctgttgcccactgcactgatcatgaagccaccggccactgccacgcatgttgcacctgtgccatcgtgctccctcctgatgggcac

SEQ ID NO: 60374 - DNA, 120 bp, Artificial Sequence
  ENSG00000072134_39 (sequence is synthesized)
cgtggtggaggaagtcacccagctgtttctcagtcccagaggccggtggctggttttgaacttgtgttgactgttgatacttatttactgtataaatataatttatcatttgtaccatga

SEQ ID NO: 60375 - DNA, 120 bp, Artificial Sequence
  ENSG00000072134_40 (sequence is synthesized)
ctggtaagtgagtgttatctggaggaagagaggggatagatgatgtgtttggttggagcgagttaatagatagccaggggtctcagttttctttgtgaaatgaggggctgggctataacc

SEQ ID NO: 60376 - DNA, 120 bp, Artificial Sequence
  ENSG00000072134_41 (sequence is synthesized)
agattagttttaaggctgtattagcttgggccagatgctggaggcttctgaaagccaagtggaggtctttatcctttttctagaattgctgttaggaatctttataaattcttgaacagg

SEQ ID NO: 60377 - DNA, 120 bp, Artificial Sequence
  ENSG00000072134_42 (sequence is synthesized)
gaaggtcaggcgaaaagtggttgtcaaggagaattttctggacattcggaaacacagtggaccaaagcagttttgaaggtattgacaggcatttttgagttaagatagacctgaaattag

SEQ ID NO: 60378 - DNA, 120 bp, Artificial Sequence
  ENSG00000072134_43 (sequence is synthesized)
tctctttcttgtcctcatgtgtatttttttttatttaaataaactttaaaaaaatagagatgggggtattgctgttttgaccaggctggcctcaagtaatcctcccatttcagcttcgca

SEQ ID NO: 60379 - DNA, 120 bp, Artificial Sequence
  ENSG00000072134_44 (sequence is synthesized)
gctgggattacaggtgtgagccaccatatctggtctcacatgtaattttaaatctgccaagatcagcttcccccagtgtttccgattcttccacagctggcttttgccaggcagtgaaaa

SEQ ID NO: 60380 - DNA, 120 bp, Artificial Sequence
  ENSG00000072134_45 (sequence is synthesized)
aaaagacaacccataaaatagccattccagtggaagtgttttgaaaatagagcaatagtcatgatgtttacttcttttctcctaaaggcttaaacttgagtgtaagttttattcattgtt

SEQ ID NO: 60381 - DNA, 120 bp, Artificial Sequence
  ENSG00000072134_46 (sequence is synthesized)
gactggtgatattgattttatcttgggttcgtcctaaggaggctgggtatgtccactcagctccccagttttacccagtacctgctgctggaccacagtctcccaccctcacagggggct

SEQ ID NO: 60382 - DNA, 120 bp, Artificial Sequence
  ENSG00000072134_47 (sequence is synthesized)
acttcagacccctggccatcgtttggtaaagaccccattactggtctcccgtgcttgcctgctggatgggtgaggggcagggcagtgcttcttgctgtctctcacccacttgggtctggt

SEQ ID NO: 60383 - DNA, 120 bp, Artificial Sequence
  ENSG00000072134_48 (sequence is synthesized)
cgattgtggtgggtgtccaggctcctccagccctcagcagtgatatccaactggcccttgccctcctccttgaggatggtggcatggtgttccctctttgttttgagtggttttctgctt

SEQ ID NO: 60384 - DNA, 120 bp, Artificial Sequence
  ENSG00000072134_49 (sequence is synthesized)
tgggagaaggaaagtcaacctcccctcaacctcccatttgcatcagaaatggcttgtgccttctctgggacatgtttcaactcttgcagcctcagcgttacacccagcgtcccagctgaa

SEQ ID NO: 60385 - DNA, 120 bp, Artificial Sequence
  ENSG00000072134_50 (sequence is synthesized)
ggaaccaaaatacacagcatggaacatccaaatcaagctgctgtaattagatggaaattatgatgtgcttaccaccactgctgatgaaaaggggatacatttgctataattctgcttgtt

SEQ ID NO: 60386 - DNA, 120 bp, Artificial Sequence
  ENSG00000072134_51 (sequence is synthesized)
tccttccggccggccccctgctcgcatcttggcttgctgaggctgcgggtcttggccgggccttcgagaatcccccgccgcctccccttctggatgtatctgcgccgcctcctttctccc

SEQ ID NO: 60387 - DNA, 120 bp, Artificial Sequence
  ENSG00000072134_52 (sequence is synthesized)
tgtgcgctggtacctccctccaaattgagggggcttccacctgggtgttgagagagaagactgccctgggcccacagcctgtgggtcctgtcctcacccctggggggctgggcaggctgg

SEQ ID NO: 60388 - DNA, 120 bp, Artificial Sequence
  ENSG00000072134_53 (sequence is synthesized)
cctccaggcactccttctggtgacttcctacagaccctcatccaagcaaccagacccagcttgatgcacctccaccactgccagcacccctttgccttttggggtgagggtgttagaagc

SEQ ID NO: 60389 - DNA, 120 bp, Artificial Sequence
  ENSG00000072134_54 (sequence is synthesized)
ctcccagcgtgctggtgaccccaggctgtcttgcctctttggctctcagaattctcctccatgaggtagggtaagcggggagaggcccctgttgccagcccatcctgagggtgtgcactg

SEQ ID NO: 60390 - DNA, 120 bp, Artificial Sequence
  ENSG00000072134_55 (sequence is synthesized)
ggcagtggagttgccatgaagtcctgtgagatgcccccagtcattggcttctgtgtccacccagggtcctttgagctcttcagtaatctgaatggtacaattaaagatgacttttctgaa

SEQ ID NO: 60391 - DNA, 120 bp, Artificial Sequence
  ENSG00000072134_56 (sequence is synthesized)
atactgggaagaggtcagctgccccctgtgatttgttttctattcaaggaagcttttggtcccagtctcccatgttccaggtgtgttcatttctgtgtcgggcacagtgctaagtgctgg

SEQ ID NO: 60392 - DNA, 120 bp, Artificial Sequence
  ENSG00000072134_57 (sequence is synthesized)
atctgttctctcaagcttgctagccaagttcctccccacaccctaaattgtaatgactgcagcagatgtgagatggatgttccctcctctactccaggccagtttcccaaggcctctggg

SEQ ID NO: 60393 - DNA, 120 bp, Artificial Sequence
  ENSG00000072134_58 (sequence is synthesized)
taatgtctatgtgattaaacagtctcttgggaatagaactcctttcagttaagcagctctattttccagaaatccctggataattttatgaccatgtggtaaagtgttcatttctgtgtc

SEQ ID NO: 60394 - DNA, 62 bp, Artificial Sequence
  ENSG00000072134_59 (sequence is synthesized)
ctcgagcgctgccggtggccgcagcggcgcacccacgccggcccggaggagcagagaaatga

SEQ ID NO: 60395 - DNA, 120 bp, Artificial Sequence
  ENSG00000072134_60 (sequence is synthesized)
actgcacctcaggaaagataaagccagtgaattgaggattgcggagtattgcacacattcaggtgtcctgcagtggacaccatgacactgactccagcatgcctagaaatcaccatgggg

SEQ ID NO: 60396 - DNA, 120 bp, Artificial Sequence
  ENSG00000072134_61 (sequence is synthesized)
gcttaagagagtggcaccccctcagctctgcccccagaatgactggatttttgaacagactcccaggaagttctgatgtatctggttgatggaccacactggtggaacactgtgggaaag

SEQ ID NO: 60397 - DNA, 120 bp, Artificial Sequence
  ENSG00000072134_62 (sequence is synthesized)
atgtgcttaggcattgcttgctgtggccagaaccttgcaggggtgagagacacaggactgtacatcttggcctcttacctactgtgtccgcgtcagcctccctcacagcctgatggcccc

SEQ ID NO: 60398 - DNA, 120 bp, Artificial Sequence
  ENSG00000072134_63 (sequence is synthesized)
agacgcggcggtggcggcggctccgcgggctacggtcgctcccgcctctcgagcgctgccggtggccgcagcggcgcacccacgccggcccggaggagcagagtgagatggatgttccct

SEQ ID NO: 60399 - DNA, 120 bp, Artificial Sequence
  ENSG00000072134_64 (sequence is synthesized)
tggagtggcctgaaggggattagagtgcgcgcgttcggatcctggctcactgcccatcccgcagtgctgcttagatgaggctcagcggacatcaaccatcactaccaccagtccctgcaa

SEQ ID NO: 60400 - DNA, 120 bp, Artificial Sequence
  ENSG00000072134_65 (sequence is synthesized)
gtaactccctcagaaatctgcattgttcagaaatctaccgtgttcctctgaagctactatggaaagagttagatgtgacctcctggaggcacaggtgggaaggcagagtggctctcagat

SEQ ID NO: 60401 - DNA, 120 bp, Artificial Sequence
  ENSG00000072134_66 (sequence is synthesized)
aaactgagccagacgcggcggtggcggcggctccgcgggctacggtcgctcccgcctctcgagcgctgccggtggccgcagcggcgcacccacgccggcccggaggagcagagggtctca

SEQ ID NO: 60402 - DNA, 120 bp, Artificial Sequence
  ENSG00000072134_67 (sequence is synthesized)
atcttggctcactacaacctccacctctcgggctcaagcagttctcgtgcctcagcctcctgagtaagctgggattacagtgttcatttctgtgtcgggcacagtgctaagtgctgggtg

SEQ ID NO: 60403 - DNA, 120 bp, Artificial Sequence
  ENSG00000072134_68 (sequence is synthesized)
agcttgttgtgactggagagctggctggacggggagggagatgggacggctcagtttccaagttcttctcagcccctcctagagggcttcactggaggaagaggcacaggtaccaagcca

SEQ ID NO: 60404 - DNA, 120 bp, Artificial Sequence
  ENSG00000072135_0 (sequence is synthesized)
gggctggaccttgctggcccgcggcgccatgagccgcagcctggactcggcgcggagcttcctggagcggctggaagcgcggggcggccgggagggggcagtcctcgccggcgagttcag

SEQ ID NO: 60405 - DNA, 120 bp, Artificial Sequence
  ENSG00000072135_1 (sequence is synthesized)
ggcagtcctcgccggcgagttcagcgacatccaggcctgctcggccgcctggaaggctgacggcgtgtgctccaccgtggccggcagtcggccagagaacgtgaggaagaaccgctacaa

SEQ ID NO: 60406 - DNA, 120 bp, Artificial Sequence
  ENSG00000072135_2 (sequence is synthesized)
agacgtgctgccttatgatcagacgcgagtaatcctctccctgctccaggaagagggacacagcgactacattaatggcaacttcatccggggcgtggatggaagcctggcctacattgc

SEQ ID NO: 60407 - DNA, 120 bp, Artificial Sequence
  ENSG00000072135_3 (sequence is synthesized)
cacgcaaggacccttgcctcacaccctgctagacttctggagactggtctgggagtttggggtcaaggtgatcctgatggcctgtcgagagatagagaatgggcggaaaaggtgtgagcg

SEQ ID NO: 60408 - DNA, 120 bp, Artificial Sequence
  ENSG00000072135_4 (sequence is synthesized)
gtactgggcccaggagcaggagccactgcagactgggcttttctgcatcactctgataaaggagaagtggctgaatgaggacatcatgctcaggaccctcaaggtcacattccagaagga

SEQ ID NO: 60409 - DNA, 120 bp, Artificial Sequence
  ENSG00000072135_5 (sequence is synthesized)
gtcccgttctgtgtaccagctacagtatatgtcctggccagaccgtggggtccccagcagtcctgaccacatgctcgccatggtggaggaagcccgtcgcctccagggatctggccctga

SEQ ID NO: 60410 - DNA, 120 bp, Artificial Sequence
  ENSG00000072135_6 (sequence is synthesized)
acccctctgtgtccactgcagtgcgggttgtgggcgaacaggcgtcctgtgcaccgtggattatgtgaggcagctgctcctgacccagatgatcccacctgacttcagtctctttgatgt

SEQ ID NO: 60411 - DNA, 120 bp, Artificial Sequence
  ENSG00000072135_7 (sequence is synthesized)
ggtccttaagatgaggaagcagcggcctgcggccgtgcagacagaggagcagtacaggttcctgtaccacacggtggctcagatgttctgctccacactccagaatgccagcccccacta

SEQ ID NO: 60412 - DNA, 120 bp, Artificial Sequence
  ENSG00000072135_8 (sequence is synthesized)
ccagaacatcaaagagaattgtgccccactctacgacgatgccctcttcctccggactccccaggcacttctcgccataccccgcccaccaggaggggtcctcaggagcatctctgtgcc

SEQ ID NO: 60413 - DNA, 120 bp, Artificial Sequence
  ENSG00000072135_9 (sequence is synthesized)
tctgtgcccgggtccccgggccacgccatggctgacacctacgcggtggtgcagaagcgcggggctccagcgggcgccgggagtgggacgcagacggggacggggacggggacgggggcg

SEQ ID NO: 60414 - DNA, 120 bp, Artificial Sequence
  ENSG00000072135_10 (sequence is synthesized)
ggaggaggcgccgctctacagcaaggtgacgccgcgcgcccagcgacccggggcgcacgcggaggacgcgagggggacgctgcctggccgcgttcctgctgaccaaagtcctgccggatc

SEQ ID NO: 60415 - DNA, 120 bp, Artificial Sequence
  ENSG00000072135_11 (sequence is synthesized)
tggcgcctacgaggacgtggcgggtggagctcagaccggtgggctaggtttcaacctgcgcattgggaggccgaagggtccccgggacccgcctgctgagtggacccgggtgtaagtcta

SEQ ID NO: 60416 - DNA, 120 bp, Artificial Sequence
  ENSG00000072135_12 (sequence is synthesized)
acgccagttcctgcctgttgcctcttgtgagctcggactgctgatgccccggtgctgctgagcgccgtgcgcagaatggaaacagtgggcctggatcaaagttaaagtttctcagggtgg

SEQ ID NO: 60417 - DNA, 120 bp, Artificial Sequence
  ENSG00000072135_13 (sequence is synthesized)
gaaatgtgggggctttgccccaatgactgtagcattcaaggcttgaggctggaggaggtagctagggtatagtggctggtgaggctgcacagagcagattcaagaaagaagatcaggaag

SEQ ID NO: 60418 - DNA, 120 bp, Artificial Sequence
  ENSG00000072135_14 (sequence is synthesized)
gggcatgacccctgagttatgaaggggagaagggacagatgagcttccggagactgctctcctcaccacacagcactagtccatcctcagcacctgagcctccctcacttggacactcag

SEQ ID NO: 60419 - DNA, 120 bp, Artificial Sequence
  ENSG00000072135_15 (sequence is synthesized)
gtggatggacacttcgccatccaggcagaactaagccaggcataaccacagccaagcagattaaccccaggcagaccgataaaaagacctccagataggcagacagacagatggaccacc

SEQ ID NO: 60420 - DNA, 120 bp, Artificial Sequence
  ENSG00000072135_16 (sequence is synthesized)
aacctggacagacagccaaagcttcagagatacagtccacaggtggacaaagggatccccagccagagagagagagaccagccaacagcttgatagaccagtgcagccagagagaccacc

SEQ ID NO: 60421 - DNA, 120 bp, Artificial Sequence
  ENSG00000072135_17 (sequence is synthesized)
aaacagagcccccaaaagacagacatctctgctagctggacagccaggtggaccccctaagttagattactagacagatataaacagatcccctgctgaacagatacacagagttctcag

SEQ ID NO: 60422 - DNA, 120 bp, Artificial Sequence
  ENSG00000072135_18 (sequence is synthesized)
accccacccccaccctcaggtgggctggctggctgacagaccttctggccagacagactcctaaccaaccagatggactgccagacaggcagacatcagccacatggaatcctgacatcc

SEQ ID NO: 60423 - DNA, 120 bp, Artificial Sequence
  ENSG00000072135_19 (sequence is synthesized)
cagccagccggccagactctcatcttgatgtcttgatggatggaccccagctagtcagacatgatcctccagattgacagacaagtcccccaaatgagtacacatctccagctattcaga

SEQ ID NO: 60424 - DNA, 120 bp, Artificial Sequence
  ENSG00000072135_20 (sequence is synthesized)
cagatggacccccagcaaatcaggacctatctaggcagaccccagccagacccccgccagacagactcccaaccagactgaccccttactattcacacagcctgccgagtagctgggact

SEQ ID NO: 60425 - DNA, 90 bp, Artificial Sequence
  ENSG00000072135_21 (sequence is synthesized)
accccttactattcacacagcctgccgagtagctgggactacaggtctaattttttttttttttaagaaatgagtttttcaacctcaagc

SEQ ID NO: 60426 - DNA, 120 bp, Artificial Sequence
  ENSG00000072135_22 (sequence is synthesized)
gtgtgagccaccaggctcagccccctaagatttgaaacactttaaatggcccatggtagggttcctgctaggataaaacattaagcggctgttaaaagaaataaaaggaggacacgtctc

SEQ ID NO: 60427 - DNA, 120 bp, Artificial Sequence
  ENSG00000072135_23 (sequence is synthesized)
tgtgcactggtgtggacaaatctccaagtcactgcaaaatggaaaaagtataagatgctctttccctgaacctcaagggtcccgcccctctcactttcaggtctctggacctctgactga

SEQ ID NO: 60428 - DNA, 120 bp, Artificial Sequence
  ENSG00000072135_24 (sequence is synthesized)
cactgtgcctgcccaggtccctgtatgcactgccacagtgccctgggccccatgtccacccctgtcctgcccttctctgggatagggctggccttcctctgcctctgcctggctgcatcc

SEQ ID NO: 60429 - DNA, 120 bp, Artificial Sequence
  ENSG00000072135_25 (sequence is synthesized)
atggtcgatctcaagtgccttggcatgaactccactctcctgcagccttcaatcaaggaatgatggggatgtgtacataccccaccccaccccttggcagggtgatgctgaggtgtggat

SEQ ID NO: 60430 - DNA, 120 bp, Artificial Sequence
  ENSG00000072135_26 (sequence is synthesized)
ttttaacagttcccagactttcccaggaggcttgggtttgggtgcccacagtgggagctggtgtgatatcataccttcgccggccgcctttccttcctgttctctgtgcccctactccca

SEQ ID NO: 60431 - DNA, 120 bp, Artificial Sequence
  ENSG00000072135_27 (sequence is synthesized)
ctctagagctgccccgtttctctgttttcgtgaaagagctgaccctgtgctgcctcccactctcccaatgcccctgccactcctgtgagcctgctgctggtgaggtcggtgctgacctct

SEQ ID NO: 60432 - DNA, 120 bp, Artificial Sequence
  ENSG00000072135_28 (sequence is synthesized)
gtgttgctggataatgagtcatctatctctggaggagaagaaaggcaggtcctccacagccctgataaaatctccaagtctcccagtttcgggtccctctcctgggatgcagacccactg

SEQ ID NO: 60433 - DNA, 120 bp, Artificial Sequence
  ENSG00000072135_29 (sequence is synthesized)
cctgcccagctggtacgatccacatgccctcttcttgggaataggggcatgggaaagtgactaaagatactgttctggctgctgtgttcactgtgagtaataaactgtccatttctccga

SEQ ID NO: 60434 - DNA, 120 bp, Artificial Sequence
  ENSG00000072135_30 (sequence is synthesized)
cgtgtcctgctcaagtgccttgtctgtctgccccagatgatcccacctgacttcagtctctttgatgtggtccttaagatgaggaagcagcggcctgcggccgtgcagacagaggtgaac

SEQ ID NO: 60435 - DNA, 88 bp, Artificial Sequence
  ENSG00000072135_31 (sequence is synthesized)
tctagccaggacttacttttaaatctaatctgacagtctctgcctttaattggaatattcagcctttaatgtaattatcaataatgtt

SEQ ID NO: 60436 - DNA, 120 bp, Artificial Sequence
  ENSG00000072135_32 (sequence is synthesized)
attggaatattcagcctttaatgtaattatcaataatgttgggtttaaacctaccatcttgctatttgttttctatttgctctgtttgttcttttcttctttttttctctttcagagtga

SEQ ID NO: 60437 - DNA, 120 bp, Artificial Sequence
  ENSG00000072135_33 (sequence is synthesized)
cctgacccaggtacgatacaggcatcctgtgtgtgcagtgtgctgcccatgaccacgtgtcctgctcaagtgccttgtctgtctgccccagatgatcccacctgacttcagtctctttga

SEQ ID NO: 60438 - DNA, 120 bp, Artificial Sequence
  ENSG00000072135_34 (sequence is synthesized)
tagggacacagaagcgaggcctccaacccaaggagccctccctcccatctagcgcaccgcctcggcgggaaggaagcccgtggtttgcgcgctgagcagcctccccactcccgccctgcc

SEQ ID NO: 60439 - DNA, 120 bp, Artificial Sequence
  ENSG00000072135_35 (sequence is synthesized)
ccctcggcagtttccctggccccctcacccaaatcaccttcctctcccctgaccctccttgtctaggtgatcctgatggcctgtcgagagatagagaatgggcgggtaggtgccctctgc

SEQ ID NO: 60440 - DNA, 120 bp, Artificial Sequence
  ENSG00000072135_36 (sequence is synthesized)
ccgacgctgatgtccaggcgtccctggccacgccccggaagcgccccctggcggtcgcagtcgcggtccaggggcagggttcctggcaatacttgtcttggccgcgcccaaaggctggag

SEQ ID NO: 60441 - DNA, 120 bp, Artificial Sequence
  ENSG00000072135_37 (sequence is synthesized)
gccacgtccggggtgtgtgccttctcccgcccggcgccctcggctctccccttcgggcctccggggaagcgtccccgctaggggtggggtcttgggactccctggggcttccggagctga

SEQ ID NO: 60442 - DNA, 120 bp, Artificial Sequence
  ENSG00000072135_38 (sequence is synthesized)
agattctgggaatcaagaggctctgcaggggatccatcaggaccctcacccccatccccaaatgccccatctaaaaggggttgtggtcaggacctgaccaggcacactctgattctcttg

SEQ ID NO: 60443 - DNA, 120 bp, Artificial Sequence
  ENSG00000072135_39 (sequence is synthesized)
ttacagtgggagggtatcctggactgtatttcccctgcatggtcagcagcgcacctccattgagtctgcatgtgtttaatctgatggctctgttggctggcgtctgttataggttataag

SEQ ID NO: 60444 - DNA, 120 bp, Artificial Sequence
  ENSG00000072135_40 (sequence is synthesized)
tatagctgcctgtgcttccaccacgagcacctggggtgtcttgtggcatgattgagctagctctgaagctgactccctcttctcactccctgccttttctcccttaccttttgcagaaaa

SEQ ID NO: 60445 - DNA, 120 bp, Artificial Sequence
  ENSG00000072135_41 (sequence is synthesized)
caggttttggaaatgggcttcaggagggtctggtgaggcagaggggacagagcatggaggggagtacagggcatggggctagtcttgtagtctgagtgcctattttgagaacccttgctc

SEQ ID NO: 60446 - DNA, 120 bp, Artificial Sequence
  ENSG00000072135_42 (sequence is synthesized)
accctccatggactgtaattgtgagcacttgttcagcacagactcagctggggaataagcacacagctcttgctcaacaaaatgtaagtgattaaaaaggttttccttgttcagatataa

SEQ ID NO: 60447 - DNA, 120 bp, Artificial Sequence
  ENSG00000072135_43 (sequence is synthesized)
tgggaggagggaggagggatcttgctagctcctccttgaccccaggacccgagggtccagctcttggagtgaccttattgtagctctgtgggaagccccattgttcctctaagtttttgt

SEQ ID NO: 60448 - DNA, 120 bp, Artificial Sequence
  ENSG00000072135_44 (sequence is synthesized)
tgatatgttattcatcccccagtgttggcaacccctctcctgctgggcttcccagccatttcacaccttagaccataaggccctattctgactgcttcccctgtaggctctgatctctct

SEQ ID NO: 60449 - DNA, 120 bp, Artificial Sequence
  ENSG00000072135_45 (sequence is synthesized)
cctccatggactgtaattgtgagcacttgttcagcacagactcagctggggaataagcacacagctcttgctcaacaaaatgtaagtgattaaaaaggttttccttgttcagatataatc

SEQ ID NO: 60450 - DNA, 120 bp, Artificial Sequence
  ENSG00000072163_0 (sequence is synthesized)
cgcccacccctctcgcgggcggagcggctcttggccttttttgggcgtctccctgctccgcggcccgggctggcgggcgggcgctcggctggcggctgcagcagcagagggagacccgcg

SEQ ID NO: 60451 - DNA, 120 bp, Artificial Sequence
  ENSG00000072163_1 (sequence is synthesized)
gacccgcggcaaccccggcaacccagggctcggcgtcgctgccaccatgacgggaagcaatatgtcggacgccttggccaacgccgtgtgccagcgctgccaggcccgcttctcccccgc

SEQ ID NO: 60452 - DNA, 120 bp, Artificial Sequence
  ENSG00000072163_2 (sequence is synthesized)
cgagcgcattgtcaacagcaatggggagctgtaccatgagcactgcttcgtgtgtgcccagtgcttccggcccttccccgaggggctcttctatgagtttgaaggccggaagtactgcga

SEQ ID NO: 60453 - DNA, 120 bp, Artificial Sequence
  ENSG00000072163_3 (sequence is synthesized)
acacgacttccaaatgctgtttgctccgtgctgtggatcctgcggtgagttcatcattggccgcgtcatcaaggccatgaacaacaactggcacccgggctgcttccgctgcgagctgtg

SEQ ID NO: 60454 - DNA, 120 bp, Artificial Sequence
  ENSG00000072163_4 (sequence is synthesized)
tgatgtggagctggctgacctgggctttgtgaagaatgccggcaggcatctctgccggccttgccacaaccgtgagaaggccaagggcctgggcaagtacatctgccagcggtgccacct

SEQ ID NO: 60455 - DNA, 120 bp, Artificial Sequence
  ENSG00000072163_5 (sequence is synthesized)
ggtcatcgacgagcagcccctcatgttcaggagcgacgcctaccaccctgaccacttcaactgcacccactgtgggaaggagctgacagccgaggcccgcgagctgaagggtgagctcta

SEQ ID NO: 60456 - DNA, 120 bp, Artificial Sequence
  ENSG00000072163_6 (sequence is synthesized)
ctgcctgccctgccatgacaagatgggcgtccccatctgcggggcctgccgccggcccatcgagggccgagtggtcaacgcgctgggcaagcagtggcacgtggagcactttgtctgtgc

SEQ ID NO: 60457 - DNA, 120 bp, Artificial Sequence
  ENSG00000072163_7 (sequence is synthesized)
caagtgtgagaagccattcctggggcaccggcactatgagaagaagggcctggcctactgcgagactcactacaaccagctcttcggggacgtctgctacaactgcagccatgtgattga

SEQ ID NO: 60458 - DNA, 120 bp, Artificial Sequence
  ENSG00000072163_8 (sequence is synthesized)
atgtggtgtcggccctcaacaaggcctggtgtgtgagctgcttctcctgctccacctgcaacagcaagctcaccctgaagaacaagtttgtggagttcgacatgaagcccgtgtgtaaga

SEQ ID NO: 60459 - DNA, 120 bp, Artificial Sequence
  ENSG00000072163_9 (sequence is synthesized)
ggtgctacgagaagttcccgctggagctgaagaagcggctgaagaagctgtcggagctgacctcccgcaaggcccagcccaaggccacagacctcaactctgcctgaaggccctcttgcg

SEQ ID NO: 60460 - DNA, 120 bp, Artificial Sequence
  ENSG00000072163_10 (sequence is synthesized)
cagctgcctctcggcccctccgccttctcccctcctgctgtccatgcttggccccctcgtccccatccacctgtgccctccgcatcttaccctccctttctctttcctcattgccttctc

SEQ ID NO: 60461 - DNA, 120 bp, Artificial Sequence
  ENSG00000072163_11 (sequence is synthesized)
ccttcctgttccctcatctctgccttccccatgtctctcctctccttggccgtggcttctgtctgtgaggaggcaggagctggggagtgggagcctatgaccccacgtctgacagccatg

SEQ ID NO: 60462 - DNA, 120 bp, Artificial Sequence
  ENSG00000072163_12 (sequence is synthesized)
tccacctgtgcccacagcttccgcccacagacctccagggacaggagcaaattgcaccacagctccccgcctggcctggccctccccaggcggctcagtggctcatgctgtcctgtgaga

SEQ ID NO: 60463 - DNA, 120 bp, Artificial Sequence
  ENSG00000072163_13 (sequence is synthesized)
gcccctgccccagagcggccccactaagcgcatgtggctcctgggctacccacagccagggcagcctgctggagccacagggccagggccatgcagatggaggcctctgggagccacctc

SEQ ID NO: 60464 - DNA, 120 bp, Artificial Sequence
  ENSG00000072163_14 (sequence is synthesized)
caatccctcaccactcactcaaccagtggcacagtgtccttgtgcccacactgagccagcaagtcctgctgtccacacccacaagctacctggagggacaggacccacctccatccttcg

SEQ ID NO: 60465 - DNA, 120 bp, Artificial Sequence
  ENSG00000072163_15 (sequence is synthesized)
gaaggccttcctggaatcccaccttggcctccgccctcggttccgccccgcccctctccccccgaccttggggcttgtgtcgagcccttgggtggggccaggaggaggtgatggcgtcag

SEQ ID NO: 60466 - DNA, 120 bp, Artificial Sequence
  ENSG00000072163_16 (sequence is synthesized)
aggaggtgtggtcagaggtgacttgttcccacctccagggaggacgcttcgtcttcggccagcgcagacctggtgtttgtttgttgggctcacgcttgcacaatgaaggcttgttcacac

SEQ ID NO: 60467 - DNA, 120 bp, Artificial Sequence
  ENSG00000072163_17 (sequence is synthesized)
aagtgcatgactcaggactgggtgggagggggctgtccctgaggccctggtctcccccagccaagtcctggcagggggatgctgttcttcaggatcccatgacctggggctcttggggag

SEQ ID NO: 60468 - DNA, 120 bp, Artificial Sequence
  ENSG00000072163_18 (sequence is synthesized)
ccccagcccggagagtgacctgtggctttgctggggaaaggggcttggagggtacagggcagtgtccaggattgcagtctcaaatccgaggcccacaggggagctgcctctgtgatcgcc

SEQ ID NO: 60469 - DNA, 120 bp, Artificial Sequence
  ENSG00000072163_19 (sequence is synthesized)
attaaggctgtggcctggggtctcagggcagcccaggaaccaaaaatagcctgtaacttgtcactttgtaagtcctgccctccagacacacttccctttcttctccccaagcctctcttc

SEQ ID NO: 60470 - DNA, 120 bp, Artificial Sequence
  ENSG00000072163_20 (sequence is synthesized)
ccagttagctcccctgacttggagtcacctctaagccttggcccaggcccctctgcagtgagatggagggactcatcccccggagagtggcatctgcaggcccactggctgcctgtggtc

SEQ ID NO: 60471 - DNA, 120 bp, Artificial Sequence
  ENSG00000072163_21 (sequence is synthesized)
accccctagggttctagcggggctgcctcccattttcctcagagcatccctgccagctggctggttctcactctcctgttttctaggaaaagaaagtggggagagacaggaacagggtcc

SEQ ID NO: 60472 - DNA, 120 bp, Artificial Sequence
  ENSG00000072163_22 (sequence is synthesized)
agggctcggcgtcgctgccaccatgacgggaagatgaggtcaccagaggccacagaggctgagccactcaggaggccagtcacaggtccaccagtgtccggccagtgtttgtccctgcag

SEQ ID NO: 60473 - DNA, 120 bp, Artificial Sequence
  ENSG00000072163_23 (sequence is synthesized)
ttttgcagtctgtccgtggatactgtgaacatcaggctactcggccgggctcctgcgctcagggcttcgagaaatgctcattttggggctgcccctctgccggcctctctggattcagag

SEQ ID NO: 60474 - DNA, 120 bp, Artificial Sequence
  ENSG00000072163_24 (sequence is synthesized)
ggcagccgctgctccttttgttttgtgggcctggctctgggcccggagcagcacctccctggggaggccgcctttccttccgcggcttcttccgtctcctcctgaccccaaggtgcctcc

SEQ ID NO: 60475 - DNA, 120 bp, Artificial Sequence
  ENSG00000072163_25 (sequence is synthesized)
ggcctctgcctccagctaaggacctctggccaagcctcctgcccagggagaggtgaagctgccgtgcctgggtgccccgtggtggccggacactcctggcggctgctcagtcttgcacgt

SEQ ID NO: 60476 - DNA, 120 bp, Artificial Sequence
  ENSG00000072163_26 (sequence is synthesized)
ggctgtgccaagcgggccaggcagctgctatttccctcagagaagttgctggcggcgctcagggaaggaagcacccgaggaggcggagcggcatctcagccacagagcaatatgtcggac

SEQ ID NO: 60477 - DNA, 120 bp, Artificial Sequence
  ENSG00000072163_27 (sequence is synthesized)
ataggcctctgtggaggtggcaggtgggcatgtgtggcctcggggagggcctgtggtggcagcgccatggccaggtggtggcagtttcctttgcattagcgccactccatccctggcccg

SEQ ID NO: 60478 - DNA, 120 bp, Artificial Sequence
  ENSG00000072163_28 (sequence is synthesized)
agccctctcccaggcatctggctcctctatgggtcaaggctgcctaatggttaggggcagcggtgctgtcattgcagcctggactgccggcaagccacttcccctctgcaagcccccatc

SEQ ID NO: 60479 - DNA, 120 bp, Artificial Sequence
  ENSG00000072163_29 (sequence is synthesized)
gcgtaacgtgagctcgcgaccagcgcgggggaggcgcccacacgcccgtcccgtcttggtgtctggccccaggcggccgcgcctcccctccgaggtggtcccatagcccctgcaccaggc

SEQ ID NO: 60480 - DNA, 120 bp, Artificial Sequence
  ENSG00000072163_30 (sequence is synthesized)
ccatggcggcccggctgggtgcgctggccgcgtcggggctgtaccggcggcgccagcaccggcagagcccgccgccagccacgggcaatatgtcggacgccttggccaacgccgtgtgcc

SEQ ID NO: 60481 - DNA, 120 bp, Artificial Sequence
  ENSG00000072163_31 (sequence is synthesized)
aggctgtgggcaccccctcaggagctctgccaggtgctgagcccaggcctgcaccctcagccctggctcctggcctggggtctcgagacctgggcagctctcttcagtctcagtgtcttc

SEQ ID NO: 60482 - DNA, 120 bp, Artificial Sequence
  ENSG00000072163_32 (sequence is synthesized)
ctttgaagaatgttctggggctggtgtgaggtcccgggcacatggggctgacagtgccagcaaccccctccctcccttgctctggtacagaaggcagggggcgctggtgggatgcagtca

SEQ ID NO: 60483 - DNA, 120 bp, Artificial Sequence
  ENSG00000072163_33 (sequence is synthesized)
cctgttgtccttcccggaagggtggttctcatgggttgccgtgccctcaacccagccttgcagctgggccctgggaggcagggcctgggagatgcctgagaggggccgtgttggagggcc

SEQ ID NO: 60484 - DNA, 120 bp, Artificial Sequence
  ENSG00000072163_34 (sequence is synthesized)
aggctggctgcatgatggccctgggctggggtgtgactgcctgcagctactctgacagcctgctcggcccacagctcttcggggacgtctgctacaactgcagccatgtgattgaaggcg

SEQ ID NO: 60485 - DNA, 120 bp, Artificial Sequence
  ENSG00000072163_35 (sequence is synthesized)
gcgctcggctggcggctgcagcagcagagggagacccgcggcaaccccggcaacccagggctcggcgtcgctgccaccatgacgggaaggaaaagaaagtggggagagacaggaacaggg

SEQ ID NO: 60486 - DNA, 120 bp, Artificial Sequence
  ENSG00000072163_36 (sequence is synthesized)
gcattctgaacttcagcacaaggcaaacgcagaaccagggcttggaatttcgccgctatgcagctgcacccctgccacccaggagatctgaggctcctcagagctgggaggaccgggcat

SEQ ID NO: 60487 - DNA, 120 bp, Artificial Sequence
  ENSG00000072163_37 (sequence is synthesized)
caaagtgcccagagatcagaaggcgctgccgcctcggctctgcagggacagaatgggcccctcggggagccgtgccctggggtggaggcgctgctggcatgaccctgcagaagggcaggg

SEQ ID NO: 60488 - DNA, 120 bp, Artificial Sequence
  ENSG00000072163_38 (sequence is synthesized)
gtgacagggcagtctgctttcccataccctgggctgagcccctttgaagcccccagctgctcagtgaagttgcaggggtctggcctctcttctcctggaggtggccaggctgtgtgggag

SEQ ID NO: 60489 - DNA, 120 bp, Artificial Sequence
  ENSG00000072163_39 (sequence is synthesized)
cagtgctgtgcaggatggagtccagacacccagcagtagcagaaatcgcctgtacgtgtttgggcccttcttcatctggcaaaccccgaaggaagggggcatctctgccggccttgccac

SEQ ID NO: 60490 - DNA, 120 bp, Artificial Sequence
  ENSG00000072163_40 (sequence is synthesized)
acatcctgggctgcctgggaagtgggcagcagtggcggggggcagggggccgagggggtacacagaactggcccagctctttcctaactccccaccttgcctctctgagcggcagccgtc

SEQ ID NO: 60491 - DNA, 120 bp, Artificial Sequence
  ENSG00000072163_41 (sequence is synthesized)
aggccccctacaggcatcaccatcccacgagggagcccatgggccaggcagagagcaggcggagtgctaggtggacagggcttgggagggtccgaagaggggacaggcacgtgctcccca

SEQ ID NO: 60492 - DNA, 120 bp, Artificial Sequence
  ENSG00000072163_42 (sequence is synthesized)
gatggggttatttctgtccattgtgctggtgtggccactgcacatctcccctcaagtccacatcgatgtcatgttggcagccaggagttggccatgacgggaatattcacaccatggaca

SEQ ID NO: 60493 - DNA, 120 bp, Artificial Sequence
  ENSG00000072163_43 (sequence is synthesized)
ctggcaaacgccccacagcagggcctgcctctgcgccccagagagctggctgttgagcatttaccagaacatcacttgtgcttgtggtggcggtggtggccaggggtcagatgctggctc

SEQ ID NO: 60494 - DNA, 120 bp, Artificial Sequence
  ENSG00000072163_44 (sequence is synthesized)
tgtttcaaggtagagctgatgggactggctggtggatggatgtggggcctgtggtccgcctggcagagcaagagccgctgttcctcacagtgtcttcagcctcctgaggaatgctgtcta

SEQ ID NO: 60495 - DNA, 120 bp, Artificial Sequence
  ENSG00000072163_45 (sequence is synthesized)
agtgtagaggcagcgggaggggtgggcaaagctctaggaggggtggccatatgcccagaacaaagcctctctctctcacacacagcaggtgcccagaagattttcattgctgaaagagtt

SEQ ID NO: 60496 - DNA, 120 bp, Artificial Sequence
  ENSG00000072163_46 (sequence is synthesized)
taagcccttcctgactctacaggtcactgggtagggctatatccagtttagtctaataagacactcattttagagaacagggaaaaaccaattaaaaaacagaaaatacaattgttagag

SEQ ID NO: 60497 - DNA, 120 bp, Artificial Sequence
  ENSG00000072163_47 (sequence is synthesized)
gaaagcagaggcaggctttggccccgcttgtggccagcacaggggccctcgctggcagctgccgcctggagggtgtgcacactggctcctgctggccgcagccctgagctcttcccactt

SEQ ID NO: 60498 - DNA, 120 bp, Artificial Sequence
  ENSG00000072163_48 (sequence is synthesized)
ccccgtgcccaggcccttcctgcgttcccttccttctgtctcctatacccgggtcttcatggcctctgagagagctggatactcccacagagaaggtatacgaaataggaccaagtgaca

SEQ ID NO: 60499 - DNA, 120 bp, Artificial Sequence
  ENSG00000072163_49 (sequence is synthesized)
ctacacttcagactggatctcatccctcctggcttaaaaccgcctcgcccccagcctgttctccggaccaacagggtccagatcctcagtagacaccagtggccctttgacaggtggcct

SEQ ID NO: 60500 - DNA, 120 bp, Artificial Sequence
  ENSG00000072163_50 (sequence is synthesized)
cacggacctctccagcttccacgggggcacctccctttgcaccccaccatcccaaaagggccagtgtcctctctggccaggcctgggacccactgctccagcctcagcccggcatgcccc

SEQ ID NO: 60501 - DNA, 120 bp, Artificial Sequence
  ENSG00000072163_51 (sequence is synthesized)
tgcctcagtgcctcatcccctgctgtcaggtcctgacccaacaagggcctgggctgctcatggggatgataggtggtttgcttgtcctctctctgcgacccctttgcagtttgaaggccg

SEQ ID NO: 60502 - DNA, 120 bp, Artificial Sequence
  ENSG00000072163_52 (sequence is synthesized)
gcggggagccagggctggcccagggtaagggcggtggggcctccacctggggaagtgttgaggagggagaggggagcagggtgggcagacagaggggtcccgagagcaaggctgcagggc

SEQ ID NO: 60503 - DNA, 120 bp, Artificial Sequence
  ENSG00000072163_53 (sequence is synthesized)
agaggtgggctgggggctgggaagcagccatggcaggaagcttctctctccagggctctgtttggggggcacttgagactcaggaggcgggtgggctggacccctagactgcagacgagg

SEQ ID NO: 60504 - DNA, 120 bp, Artificial Sequence
  ENSG00000072163_54 (sequence is synthesized)
gttgagatggagcagtggaagggacctgagggggcagggcaagagaccgggagtgggcttggtgctggtgttggagagaggagttgcataggcagcccctcagcccccgtcctcgcccac

SEQ ID NO: 60505 - DNA, 120 bp, Artificial Sequence
  ENSG00000072163_55 (sequence is synthesized)
ccccaccgtcccctccagtcctctccgtgcctatccagacaccccctctggtttggaggaggaggggggcccaagaacagacctgcttctcagaggcctgggtgcagaacacagcccact

SEQ ID NO: 60506 - DNA, 120 bp, Artificial Sequence
  ENSG00000072163_56 (sequence is synthesized)
caggctggtggacacgtggcctcaggttggggggtgccccagctcagggtcatggtaagagccctaaagctcctccacactcccagcccagggcgggtggctggctcccaacgaggccct

SEQ ID NO: 60507 - DNA, 120 bp, Artificial Sequence
  ENSG00000072163_57 (sequence is synthesized)
tcctcaggggtactgcccctccctgtgctcagccagggaccccagcctgcccacgggagccaggagacccgagtgcacacacacggttgggtagctgtgcccacctctcctcttccccct

SEQ ID NO: 60508 - DNA, 120 bp, Artificial Sequence
  ENSG00000072163_58 (sequence is synthesized)
gctggcattctaagagactccaaggtcaggagaaaaccttgggggcagtctgtccagagtgcctgggggttgtggatgacagaacccgctgcatggacagccctgtgcagacacggagct

SEQ ID NO: 60509 - DNA, 120 bp, Artificial Sequence
  ENSG00000072163_59 (sequence is synthesized)
gaagagttcctcaggtgtgagcactgggtcacctggagtgcccccaccgggtggtgggctctcatgttctcatgggtacactgggaacagtgagcccaccacctcccctgatgacctggc

SEQ ID NO: 60510 - DNA, 120 bp, Artificial Sequence
  ENSG00000072163_60 (sequence is synthesized)
cagcgctgtgtccggaagctgtgccttgggtggcggcttgggtgggaggccatgcggtcctgccctgatgcaggccccagcccccagccctcatcctcacatgcagatccctgggggaat

SEQ ID NO: 60511 - DNA, 120 bp, Artificial Sequence
  ENSG00000072163_61 (sequence is synthesized)
gcaaggtgctgctcagtgatcccaggcttgcagggggtgcctgcaggaggccccacgtggacaggcagggccgcctctgcctatgagggcccaccatgccgcagcaccaggctggcacct

SEQ ID NO: 60512 - DNA, 120 bp, Artificial Sequence
  ENSG00000072163_62 (sequence is synthesized)
gactcctggggctgaggctgccgagggggaggccagactgggaggggatggtgactcacaaggttaccatcagtgccttagaggaggggtagggtctgctgaccccagggcattcacaga

SEQ ID NO: 60513 - DNA, 120 bp, Artificial Sequence
  ENSG00000072163_63 (sequence is synthesized)
ggtgtcagtcccctctgcccagtgtgaatcctgaaaggcctgcacctgcccagactctgctttctgtccccttctgtcactgctgcctcctggggccactgtggtcccctggagtcactg

SEQ ID NO: 60514 - DNA, 120 bp, Artificial Sequence
  ENSG00000072163_64 (sequence is synthesized)
ggccctgtgttccctcccccaccccacctgctctcctggggcctgggtgctgcagctgtgagcccagccgggcctgcggcagcctagccaggcctgctgagtcccacgcttccctcacag

SEQ ID NO: 60515 - DNA, 120 bp, Artificial Sequence
  ENSG00000072163_65 (sequence is synthesized)
aagatgcctgaagttctaacaccagagatggtttcctgctgcttccaggaacagggtctgttcttagtccaatgtggagttcctcatggggaccccattccccaggaatccaggttccac

SEQ ID NO: 60516 - DNA, 120 bp, Artificial Sequence
  ENSG00000072163_66 (sequence is synthesized)
agtactctgacttggtctggctggtctcggctggcactttccctaggactgctaaaaccacggtgagggcggagagctgagggccgaagaaggcggggcatctctgccggccttgccaca

SEQ ID NO: 60517 - DNA, 120 bp, Artificial Sequence
  ENSG00000072182_0 (sequence is synthesized)
gggctccggagcacatgctgagcggagcggctggggctgcgcggcgtggcggagcagcgctcgctccctcgctcactcgctcgctcgcagggacacacgcaggggctgacagctgtgctg

SEQ ID NO: 60518 - DNA, 120 bp, Artificial Sequence
  ENSG00000072182_1 (sequence is synthesized)
gtgctgataagggaagccacaaggagacgatcgaggagagagacaagcggcagcagaggcagcagcggcagaggcagcaccagggctgcggagctgctgggagtgggagtgactccccca

SEQ ID NO: 60519 - DNA, 120 bp, Artificial Sequence
  ENSG00000072182_2 (sequence is synthesized)
cctcgggcccccaccctgtccctgtcctcttcccgcttgccctgagtttagaagagcagccgctgccaccactgccactcgggagggcaccagggctgctggctagggagggacagggca

SEQ ID NO: 60520 - DNA, 120 bp, Artificial Sequence
  ENSG00000072182_3 (sequence is synthesized)
gggaggctctggccagtcccagcagccggggacagatgccgatcgagattgtgtgcaaaatcaaatttgctgaggaggatgcgaaacccaaggagaaggaggcaggggatgagcagagcc

SEQ ID NO: 60521 - DNA, 120 bp, Artificial Sequence
  ENSG00000072182_4 (sequence is synthesized)
tcctcggggctgttgcccctggagcagccccccgagacctggccacctttgccagcaccagcaccctgcatggactgggccgggcctgtggcccaggcccccacggactgcgcagaaccc

SEQ ID NO: 60522 - DNA, 120 bp, Artificial Sequence
  ENSG00000072182_5 (sequence is synthesized)
tgtgggcactggccctactcacctcgctggctgccttcctgtaccaggcggctggcctggcccggggctacctgacccggcctcacctggtggcaatggaccccgctgccccagccccag

SEQ ID NO: 60523 - DNA, 120 bp, Artificial Sequence
  ENSG00000072182_6 (sequence is synthesized)
tggcgggcttcccggctgtcaccctctgcaatatcaaccgcttccggcattcggcactcagcgatgccgacatcttccacctggccaatctgacagggctgccccccaaagaccgggatg

SEQ ID NO: 60524 - DNA, 120 bp, Artificial Sequence
  ENSG00000072182_7 (sequence is synthesized)
ggcaccgtgcggctggcctgcgctacccagagcctgacatggtagacatcctcaaccgcactggccaccagctcgccgacatgcttaagagctgcaacttcagtgggcatcactgctccg

SEQ ID NO: 60525 - DNA, 120 bp, Artificial Sequence
  ENSG00000072182_8 (sequence is synthesized)
ccagcaacttctctgtggtctatactcgctatgggaagtgttacaccttcaacgcggacccgcggagctcgctgcccagccgggcagggggcatgggcagtggcctggagatcatgctgg

SEQ ID NO: 60526 - DNA, 120 bp, Artificial Sequence
  ENSG00000072182_9 (sequence is synthesized)
acatccagcaggaggagtacctgcccatctggagggagacaaatgagacgtcgtttgaggcaggtattcgggtgcagatccacagccaggaggagccgccctacatccaccagctggggt

SEQ ID NO: 60527 - DNA, 120 bp, Artificial Sequence
  ENSG00000072182_10 (sequence is synthesized)
tcggggtgtccccaggcttccagacctttgtgtcctgccaggaacagcggctgacctacctgccccagccctggggcaactgccgcgcagagagtgagctcagggagcctgagcttcagg

SEQ ID NO: 60528 - DNA, 120 bp, Artificial Sequence
  ENSG00000072182_11 (sequence is synthesized)
aaggaggccgtgcttcagcgctgccactgccggatggtgcacatgccagactccctgggtgggggccctgagggcccgtgcttctgccccaccccctgcaacctgacacgctatgggaaa

SEQ ID NO: 60529 - DNA, 120 bp, Artificial Sequence
  ENSG00000072182_12 (sequence is synthesized)
gagatctccatggtcaggatccccaacaggggctcagcccggtacctggcgaggaagtacaaccgcaacgagacctacatacgggagaacttcctggtcctagatgtcttctttgaggcc

SEQ ID NO: 60530 - DNA, 120 bp, Artificial Sequence
  ENSG00000072182_13 (sequence is synthesized)
ctgacctctgaagccatggagcagcgagcagcctatggcctgtcagccctgctgggagacctcgggggacagatgggcctgttcattggggccagcatcctcacgttgctggagatcctc

SEQ ID NO: 60531 - DNA, 120 bp, Artificial Sequence
  ENSG00000072182_14 (sequence is synthesized)
gactacatctatgaggtgtcctgggatcgactgaagcgggtatggaggcgtcccaagacccccctgcggacctccactgggggcatctccactttggggcttcaggagctgaaggaacag

SEQ ID NO: 60532 - DNA, 120 bp, Artificial Sequence
  ENSG00000072182_15 (sequence is synthesized)
agtccctgcccgagccggggccgagtggagggtgggggggtcagcagtctgctccccaatcaccaccacccccacggtcccccaggaggtctctttgaagattttgcttgctaggacggt

SEQ ID NO: 60533 - DNA, 120 bp, Artificial Sequence
  ENSG00000072182_16 (sequence is synthesized)
gctgtgactgaaaggacccaggagtctgggacccctcctgggatccccagcacattctcctgctcctgggagaggcctgggggcggtgctcactgggagggccaggactcagttcctgct

SEQ ID NO: 60534 - DNA, 120 bp, Artificial Sequence
  ENSG00000072182_17 (sequence is synthesized)
ctcatcctcccctgccctgatgtcagctgctttgcacaaaggtccttcttgtccacaccccttatccccaggctggtgccccgggagggctggagaccaggccatgggccctcacggaga

SEQ ID NO: 60535 - DNA, 120 bp, Artificial Sequence
  ENSG00000072182_18 (sequence is synthesized)
ggaagggaaggaaggagagggagggggaggatagagcccatcccagccggggagggggagccctctgtacatttgtaaatatttagggaaagccgggtggggggaggggatacagatgta

SEQ ID NO: 60536 - DNA, 120 bp, Artificial Sequence
  ENSG00000072182_19 (sequence is synthesized)
gaaggtgggtagggctacaggggtgggtgatttagggacagccagggtcccagccccaatgtcagcaggatagggagagccccaggactcaggagtgctgggctggtcctacttcctgcc

SEQ ID NO: 60537 - DNA, 120 bp, Artificial Sequence
  ENSG00000072182_20 (sequence is synthesized)
cctctccaggcccagctcccctcttggcagggggagaggatggcccagcaggcctggcccagctcccagttccccctgcaccagccccacccctagagtcccttctatagggagggggca

SEQ ID NO: 60538 - DNA, 120 bp, Artificial Sequence
  ENSG00000072182_21 (sequence is synthesized)
ggagaccttccagacttcggctgagcttggagggtgggaagggagccttctcagtcctctctccctccagtctgattttataaagtgctgacgagattgggaataaagaggcataaagaa

SEQ ID NO: 60539 - DNA, 120 bp, Artificial Sequence
  ENSG00000072182_22 (sequence is synthesized)
gtgagaggaaaggagaggaagagctggagggggtgaggaagtaaggggagggaggcagagggttctgcttggtctccaggctaggaggcggtgcctggaggatacaggaacggggatcct

SEQ ID NO: 60540 - DNA, 120 bp, Artificial Sequence
  ENSG00000072182_23 (sequence is synthesized)
cctggagaaggcagggtgggagtgggggccgtgggcaaagcagaagggggcagtgcggggtgcctggtggagctggcctggctggaaagtcaggttcagggttctctgccagggtcccct

SEQ ID NO: 60541 - DNA, 120 bp, Artificial Sequence
  ENSG00000072182_24 (sequence is synthesized)
gactggctggcaggcctgagggctcagagtcaggagaaggggatgggtgaggaggaggagggtgtcctactgggagtttgctgtggcagtaagtcctgtgggcagctgggcatggtaagg

SEQ ID NO: 60542 - DNA, 120 bp, Artificial Sequence
  ENSG00000072182_25 (sequence is synthesized)
acgcttctcctcaaccaaatttcctgagcccactgctgtccccgaccctgaaccccaaggtgtcctgggatcgactgaagcgggtatggaggcgtcccaagacccccctgcggacctcca

SEQ ID NO: 60543 - DNA, 120 bp, Artificial Sequence
  ENSG00000072182_26 (sequence is synthesized)
ctgggggcatctccactttggggcttcaggagctgaaggaacaggtgaggacaagctctaaatgcctgcagcatgcagccacacctccccaggactgaatacatccattgtttctgaacc

SEQ ID NO: 60544 - DNA, 120 bp, Artificial Sequence
  ENSG00000072182_27 (sequence is synthesized)
agcctgtggagggggccctggagcctctgcccgaggtgacaaggaaaggctggcggtgtgagccctgggggcaccacttgagctctcccggtcccactctctcttttctttctcctgcag

SEQ ID NO: 60545 - DNA, 120 bp, Artificial Sequence
  ENSG00000072182_28 (sequence is synthesized)
tacatcgagtgtgcagaccacacactgggtccgtgctgcctaccctttcctacctctccatcagcctcttcatgtctctgtccactcttctcctcactgtcttggatcctcccctcccaa

SEQ ID NO: 60546 - DNA, 120 bp, Artificial Sequence
  ENSG00000072182_29 (sequence is synthesized)
acccagtgagcggctagggtgcagcaggagtttgggggatagccccagtcttgggatctctgtcctgggctggggactgccccctcccctggcctggctcctgacgcccgtgctgccggt

SEQ ID NO: 60547 - DNA, 120 bp, Artificial Sequence
  ENSG00000072182_30 (sequence is synthesized)
gcacagggctcgcctttgggctcagaggggatgtggagcaaacctgccctctagaagctcagagcctgccagctgtgttgactttgctggggctgtgggcactggaggactgggtgggat

SEQ ID NO: 60548 - DNA, 120 bp, Artificial Sequence
  ENSG00000072182_31 (sequence is synthesized)
agccctccatgccaccctgctaggctccagagcctcccggggcaaggcactgctcatgtgcacaggcaggtgcatgtatacaacatgtgtatgtgtctgtacccgtgtgagtgtgagtgt

SEQ ID NO: 60549 - DNA, 120 bp, Artificial Sequence
  ENSG00000072182_32 (sequence is synthesized)
ttgggatttttaaacatggtttcacatatgcatgtgggaatgccggcatgcagatgcctgtgtgcatgttaatatgtatttgtgtacgtgcatgctcatttatatccgtggttgcgtatt

SEQ ID NO: 60550 - DNA, 120 bp, Artificial Sequence
  ENSG00000072182_33 (sequence is synthesized)
tgtgggggttgtgtgtgtggtgttcaagcacatttatgcaaatgtgtgcatatgtgtgtgcatgcatgtatgtgcttacatttgggcgtgtgggggacaggggaagtgatcgtagattcc

SEQ ID NO: 60551 - DNA, 120 bp, Artificial Sequence
  ENSG00000072182_34 (sequence is synthesized)
tctgcggacctctgcaggtacagacacttgggtaagtggaggcagcagggtggggggttgcagagaagccaggactgggagtgaaggtctgggcttctcatcttggttcagccaatgagc

SEQ ID NO: 60552 - DNA, 120 bp, Artificial Sequence
  ENSG00000072182_35 (sequence is synthesized)
tcacccactttgagaaagtgaaatgacttctctcttggtctcaggaaaaatgcattgctggctatcggtgtgggtaaggcaaaccccatctgtccacagatcttgcctgatctgcagttc

SEQ ID NO: 60553 - DNA, 120 bp, Artificial Sequence
  ENSG00000072182_36 (sequence is synthesized)
atccatctatccatccattcatcgattcgcgcattctccagacctttacagcctgtgctgggtactggaggtgagagtgggggcgacagccctgcccttggagagcttacaccccggcag

SEQ ID NO: 60554 - DNA, 120 bp, Artificial Sequence
  ENSG00000072182_37 (sequence is synthesized)
ggctgtggacagccattcccacacagcccgtcaactcctggagaggggagcctcgggtgtgctgcaaggccccaaggaggggtgtgcagccctagcctgggaaggtagggaggattccta

SEQ ID NO: 60555 - DNA, 120 bp, Artificial Sequence
  ENSG00000072182_38 (sequence is synthesized)
gaggaagggacacattagctgaggcttgatgggtgtataagagtcaggtgcaaagggggacatacactgaagacctgtggccagaaagagcatgctgtgtccggggcactgaaaggtctg

SEQ ID NO: 60556 - DNA, 120 bp, Artificial Sequence
  ENSG00000072182_39 (sequence is synthesized)
tgtggctgcagggcagagaacaggggagggagtagaaagagtagaggagggaggccaggcacggtggctcacaagtgtagacccagcactttgggaggccagggtctgtggatcacttga

SEQ ID NO: 60557 - DNA, 120 bp, Artificial Sequence
  ENSG00000072182_40 (sequence is synthesized)
cctgggcaacatggtgagaccctgtctctgcaaaaaataaaaaagtgaactgggtgtggtggtgcacatctatagtcccacctattcgggaggctgaggcaagaggataggcttgagcct

SEQ ID NO: 60558 - DNA, 120 bp, Artificial Sequence
  ENSG00000072182_41 (sequence is synthesized)
gctgaggcaagaggataggcttgagcctgggaggttgaggctgcggtgagctgggatcacaccattgcactctagtctgagctacagagttaccctgtctcaaaaaaaaaaaaaaaaaaa

SEQ ID NO: 60559 - DNA, 120 bp, Artificial Sequence
  ENSG00000072195_0 (sequence is synthesized)
ccgaaggcgggcgggcagcaggaaggcaggccgccggccccccagacttgtctcctagggcaccgtcccgcgggtgcccccgtggccgcccagttccggcgtccccccagcccagctctc

SEQ ID NO: 60560 - DNA, 120 bp, Artificial Sequence
  ENSG00000072195_1 (sequence is synthesized)
cagctctcagtggccatgcagaaagcccggggcacgcgaggcgaggatgcgggcacgagggcaccccccagccccggagtgcccccgaaaagggccaaggtgggggccggcggcggggct

SEQ ID NO: 60561 - DNA, 120 bp, Artificial Sequence
  ENSG00000072195_2 (sequence is synthesized)
cctgtggccgtggccggggcgccagtcttcctgcggcccctgaagaacgcggcggtgtgcgcgggcagcgacgtgcggctgcgggtggtggtgagcgggacgccccagcccagcctccgc

SEQ ID NO: 60562 - DNA, 120 bp, Artificial Sequence
  ENSG00000072195_3 (sequence is synthesized)
ccgctggttccgggatgggcagctcctgcccgcgccggcccccgagcccagctgcctgtggctgcggcgctgcggggcgcaggacgccggcgtgtacagctgcatggcccagaacgagcg

SEQ ID NO: 60563 - DNA, 120 bp, Artificial Sequence
  ENSG00000072195_4 (sequence is synthesized)
cgggcctcctgcgaggcggtgctcacagtgctggaggtcggagactcagagacggctgaggatgacatcagcgatgtgcagggaacccagcgcctggagcttcgggatgacggggccttc

SEQ ID NO: 60564 - DNA, 120 bp, Artificial Sequence
  ENSG00000072195_5 (sequence is synthesized)
agcacccccacggggggttctgacaccctggtgggcacctccctggacacacccccgacctccgtgacaggcacctcagaggagcaagtgagctggtggggcagcgggcagacggtcctg

SEQ ID NO: 60565 - DNA, 120 bp, Artificial Sequence
  ENSG00000072195_6 (sequence is synthesized)
gagcaggaagcgggcagtgggggtggcacccgccgcctcccgggcagcccaaggcaagcacaggcaaccggggccgggccacggcacctgggggtggagccgctggtgcgggcatctcga

SEQ ID NO: 60566 - DNA, 120 bp, Artificial Sequence
  ENSG00000072195_7 (sequence is synthesized)
gctaatctggtgggcgcaagctgggggtcagaggatagcctttccgtggccagtgacctgtacggcagcgcattcagcctgtacagaggacgggcgctctctatccacgtcagcgtccct

SEQ ID NO: 60567 - DNA, 120 bp, Artificial Sequence
  ENSG00000072195_8 (sequence is synthesized)
cagagcgggttgcgcagggaggagcccgaccttcagcctcaactggccagcgaagccccacgccgccctgcccagccgcctccttccaaatccgcgctgctccccccaccgtcccctcgg

SEQ ID NO: 60568 - DNA, 120 bp, Artificial Sequence
  ENSG00000072195_9 (sequence is synthesized)
gtcgggaagcggtccccgccgggacccccggcccagcccgcggccacccccacgtcgccccaccgtcgcactcaggagcctgtgctgcccgaggacaccaccaccgaagagaagcgaggg

SEQ ID NO: 60569 - DNA, 120 bp, Artificial Sequence
  ENSG00000072195_10 (sequence is synthesized)
aagaagtccaagtcgtccgggccctccctggcgggcaccgcggaatcccgaccccagacgccactgagcgaggcctcaggccgcctgtcggcgttgggccgatcgcctaggctggtgcgc

SEQ ID NO: 60570 - DNA, 120 bp, Artificial Sequence
  ENSG00000072195_11 (sequence is synthesized)
gccggctcccgcatcctggacaagctgcagttcttcgaggagcgacggcgcagcctggagcgcagcgactcgccgccggcgcccctgcggccctgggtgcccctgcgcaaggcccgctct

SEQ ID NO: 60571 - DNA, 120 bp, Artificial Sequence
  ENSG00000072195_12 (sequence is synthesized)
ctggagcagcccaagtcggagcgcggcgcaccgtggggcacccccggggcctcgcaggaagaactgcgggcgccaggcagcgtggccgagcggcgccgcctgttccagcagaaagcggcc

SEQ ID NO: 60572 - DNA, 120 bp, Artificial Sequence
  ENSG00000072195_13 (sequence is synthesized)
tcgctggacgagcgcacgcgtcagcgcagcccggcctcagacctcgagctgcgcttcgcccaggagctgggccgcatccgccgctccacgtcgcgggaggagctggtgcgctcgcacgag

SEQ ID NO: 60573 - DNA, 120 bp, Artificial Sequence
  ENSG00000072195_14 (sequence is synthesized)
cgagtccctgcgcgccacgctgcagcgtgccccatcccctcgagagcccggcgagcccccgctcttctctcggccctccacccccaagacatcgcgggccgtgagccccgccgccgccca

SEQ ID NO: 60574 - DNA, 120 bp, Artificial Sequence
  ENSG00000072195_15 (sequence is synthesized)
ccctctccgagcagcgcggagaagccgggggacgagcctgggaggcccaggagccgcgggccggcgggcaggacagagccgggggaaggcccgcagcaggaggttaggcgtcgggaccaa

SEQ ID NO: 60575 - DNA, 120 bp, Artificial Sequence
  ENSG00000072195_16 (sequence is synthesized)
ttcccgctgacccggagcagagccatccaggagtgcaggagccctgtgccgccccccgccgccgatcccccagaggccaggacgaaagcaccccccggtcggaagcgggagcccccggcg

SEQ ID NO: 60576 - DNA, 120 bp, Artificial Sequence
  ENSG00000072195_17 (sequence is synthesized)
caggccgtgcgcttcctgccctgggccacgccgggcctggagggcgctgctgtaccccagaccttggagaagaacagggcggggcctgaggcagagaagaggcttcgcagagggccggag

SEQ ID NO: 60577 - DNA, 120 bp, Artificial Sequence
  ENSG00000072195_18 (sequence is synthesized)
gaggacggtccctgggggccctgggaccgccgaggggcccgcagccagggcaaaggtcgccgggcccggcccacctcccctgagctcgagtcttcggatgactcctacgtgtccgctgga

SEQ ID NO: 60578 - DNA, 120 bp, Artificial Sequence
  ENSG00000072195_19 (sequence is synthesized)
gaagagcccctagaggcccctgtgtttgagatccccctgcagaatgtggtggtggcaccaggggcagatgtgctgctcaagtgtatcatcactgccaaccccccgccccaagtgtcctgg

SEQ ID NO: 60579 - DNA, 120 bp, Artificial Sequence
  ENSG00000072195_20 (sequence is synthesized)
cacaaggatgggtcagcgctgcgcagcgagggccgcctcctcctccgggctgagggtgagcggcacaccctgctgctcagggaggccagggcagcagatgccgggagctatatggccacc

SEQ ID NO: 60580 - DNA, 120 bp, Artificial Sequence
  ENSG00000072195_21 (sequence is synthesized)
gccaccaacgagctgggccaggccacctgtgccgcctcactgaccgtgagacccggtgggtctacatcccctttcagcagccccatcacctccgacgaggaatacctgagccccccagag

SEQ ID NO: 60581 - DNA, 120 bp, Artificial Sequence
  ENSG00000072195_22 (sequence is synthesized)
gagttcccagagcctggggagacctggccgcgaacccccaccatgaagcccagtcccagccagaaccgccgttcttctgacactggctccaaggcaccccccaccttcaaggtctcactt

SEQ ID NO: 60582 - DNA, 120 bp, Artificial Sequence
  ENSG00000072195_23 (sequence is synthesized)
atggaccagtcagtaagagaaggccaagatgtcatcatgagcatccgcgtgcagggggagcccaagcctgtggtctcctggctgagaaaccgccagcccgtgcgcccagaccagcggcgc

SEQ ID NO: 60583 - DNA, 120 bp, Artificial Sequence
  ENSG00000072195_24 (sequence is synthesized)
tttgcggaggaggctgagggtgggctgtgccggctgcggatcctggctgcagagcgtggcgatgctggtttctacacttgcaaagcggtcaatgagtatggtgctcggcagtgcgaggcc

SEQ ID NO: 60584 - DNA, 120 bp, Artificial Sequence
  ENSG00000072195_25 (sequence is synthesized)
cgcttggaggtccgagcacaccctgaaagccggtccctggccgtgctggcccccctgcaggacgtggacgtgggggccggggagatggcgctgtttgagtgcctggtggcggggcccact

SEQ ID NO: 60585 - DNA, 120 bp, Artificial Sequence
  ENSG00000072195_26 (sequence is synthesized)
gacgtggaggtggattggctgtgccgtggccgcctgctgcagcctgcactgctcaaatgcaagatgcatttcgatggccgcaaatgcaagctgctacttacatctgtacatgaggacgac

SEQ ID NO: 60586 - DNA, 120 bp, Artificial Sequence
  ENSG00000072195_27 (sequence is synthesized)
agtggcgtctacacctgcaagctcagcacggccaaagatgagctgacctgcagtgcccggctgaccgtgcggccctcgttggcacccctgttcacacggctgctggaagatgtggaggtg

SEQ ID NO: 60587 - DNA, 120 bp, Artificial Sequence
  ENSG00000072195_28 (sequence is synthesized)
ttggagggccgagctgcccgtttcgactgcaagatcagtggcaccccgccccctgttgttacctggactcattttggctgccccatggaggagagtgagaacttgcggctgcggcaggac

SEQ ID NO: 60588 - DNA, 120 bp, Artificial Sequence
  ENSG00000072195_29 (sequence is synthesized)
gggggtctgcactcactgcacattgcccatgtgggcagcgaggacgaggggctctatgcggtcagtgctgttaacacccatggccaggcccactgctcagcccagctgtatgtagaagag

SEQ ID NO: 60589 - DNA, 120 bp, Artificial Sequence
  ENSG00000072195_30 (sequence is synthesized)
ccccggacagccgcctcaggccccagctcgaagctggagaagatgccatccattcccgaggagccagagcagggtgagctggagcggctgtccattcctgacttcctgcggccactgcag

SEQ ID NO: 60590 - DNA, 120 bp, Artificial Sequence
  ENSG00000072195_31 (sequence is synthesized)
gacctggaggtgggactggccaaggaggccatgctagagtgccaggtgaccggcctgccctaccccaccatcagctggttccacaatggccaccgcatccagagcagcgacgaccggcgc

SEQ ID NO: 60591 - DNA, 120 bp, Artificial Sequence
  ENSG00000072195_32 (sequence is synthesized)
atgacacagtacagggatgtccatcgcttggtgttccctgccgtggggcctcagcacgccggtgtctacaagagcgtcattgccaacaagctgggcaaagctgcctgctatgcccacctg

SEQ ID NO: 60592 - DNA, 120 bp, Artificial Sequence
  ENSG00000072195_33 (sequence is synthesized)
tatgtcacagatgtggtcccaggccctccagatggcgccccgcaggtggtggctgtgacggggaggatggtcacactcacatggaacccccccaggagtctggacatggccatcgacccg

SEQ ID NO: 60593 - DNA, 120 bp, Artificial Sequence
  ENSG00000072195_34 (sequence is synthesized)
gactccctgacgtacacagtgcagcaccaggtgctgggctcggaccagtggacggcactggtcacaggcctgcgggagccagggtgggcagccacagggctgcgtaagggggtccagcac

SEQ ID NO: 60594 - DNA, 120 bp, Artificial Sequence
  ENSG00000072195_35 (sequence is synthesized)
atcttccgggtcctcagcaccactgtcaagagcagcagcaagccctcacccccttctgagcctgtgcagctgctggagcacggcccaaccctggaggaggcccctgccatgctggacaaa

SEQ ID NO: 60595 - DNA, 120 bp, Artificial Sequence
  ENSG00000072195_36 (sequence is synthesized)
ccagacatcgtgtatgtggtggagggacagcctgccagcgtcaccgtcacattcaaccatgtggaggcccaggtcgtctggaggagctgccgaggggccctcctagaggcacgggccggt

SEQ ID NO: 60596 - DNA, 120 bp, Artificial Sequence
  ENSG00000072195_37 (sequence is synthesized)
gtgtacgagctgagccagccagatgatgaccagtactgtcttcggatctgccgggtgagccgccgggacatgggggccctcacctgcaccgcccgaaaccgtcacggcacacagacctgc

SEQ ID NO: 60597 - DNA, 120 bp, Artificial Sequence
  ENSG00000072195_38 (sequence is synthesized)
tcggtcacattggagctggcagaggcccctcggtttgagtccatcatggaggacgtggaggtgggggctggggaaactgctcgctttgcggtggtggtcgagggaaaaccactgccggac

SEQ ID NO: 60598 - DNA, 120 bp, Artificial Sequence
  ENSG00000072195_39 (sequence is synthesized)
atcatgtggtacaaggacgaggtgctgctgaccgagagcagccatgtgagcttcgtgtacgaggagaatgagtgctccctggtggtgctcagcacgggggcccaggatggaggcgtctac

SEQ ID NO: 60599 - DNA, 120 bp, Artificial Sequence
  ENSG00000072195_40 (sequence is synthesized)
acctgcaccgcccagaacctggcgggtgaggtctcctgcaaagcagagttggctgtgcattcagctcagacagctatggaggtcgagggggtcggggaggatgaggaccatcgaggaagg

SEQ ID NO: 60600 - DNA, 120 bp, Artificial Sequence
  ENSG00000072195_41 (sequence is synthesized)
agactcagcgacttttatgacatccaccaggagatcggcaggggtgctttctcctacttgcggcgcatagtggagcgtagctccggcctggagtttgcggccaagttcatccccagccag

SEQ ID NO: 60601 - DNA, 120 bp, Artificial Sequence
  ENSG00000072195_42 (sequence is synthesized)
gccaagccaaaggcatcagcgcgtcgggaggcccggctgctggccaggctccagcacgactgtgtcctctacttccatgaggccttcgagaggcgccggggactggtcattgtcaccgag

SEQ ID NO: 60602 - DNA, 120 bp, Artificial Sequence
  ENSG00000072195_43 (sequence is synthesized)
ctctgcacagaggagctgctggagcgaatcgccaggaaacccaccgtgtgtgagtctgagatccgggcctatatgcggcaggtgctagagggaatacactacctgcaccagagccacgtg

SEQ ID NO: 60603 - DNA, 120 bp, Artificial Sequence
  ENSG00000072195_44 (sequence is synthesized)
ccaggagagccccagtactgccagtatggcacacctgagtttgtagcacccgagattgtcaatcagagccccgtgtctggagtcactgacatctggcctgtgggtgttgttgccttcctc

SEQ ID NO: 60604 - DNA, 120 bp, Artificial Sequence
  ENSG00000072195_45 (sequence is synthesized)
tgtctgacaggaatctccccgtttgttggggaaaatgaccggacaacattgatgaacatccgaaactacaacgtggccttcgaggagaccacattcctgagcctgagcagggaggcccgg

SEQ ID NO: 60605 - DNA, 120 bp, Artificial Sequence
  ENSG00000072195_46 (sequence is synthesized)
ggcttcctcatcaaagtgttggtgcaggaccggctgagacctaccgcagaagagaccctagaacatccttggttcaaaactcaggcaaagggcgcagaggtgagcacggatcacctgaag

SEQ ID NO: 60606 - DNA, 120 bp, Artificial Sequence
  ENSG00000072195_47 (sequence is synthesized)
ctattcctctcccggcggaggtggcagcgctcccagatcagctacaaatgccacctggtgctgcgccccatccccgagctgctgcgggcccccccagagcgggtgtgggtgaccatgccc

SEQ ID NO: 60607 - DNA, 120 bp, Artificial Sequence
  ENSG00000072195_48 (sequence is synthesized)
agaaggccaccccccagtggggggctctcatcctcctcggattctgaagaggaagagctggaagagctgccctcagtgccccgcccactgcagcccgagttctctggctcccgggtgtcc

SEQ ID NO: 60608 - DNA, 120 bp, Artificial Sequence
  ENSG00000072195_49 (sequence is synthesized)
ctcacagacattcccactgaggatgaggccctggggaccccagagactggggctgccacccccatggactggcaggagcagggaagggctccctctcaggaccaggaggctcccagccca

SEQ ID NO: 60609 - DNA, 120 bp, Artificial Sequence
  ENSG00000072195_50 (sequence is synthesized)
caggaccaggaggctcccagcccagaggccctcccctccccaggccaggagcccgcagctggggctagccccaggcggggagagctccgcaggggcagctcggctgagagcgccctgccc

SEQ ID NO: 60610 - DNA, 120 bp, Artificial Sequence
  ENSG00000072195_51 (sequence is synthesized)
gcctgcacaaggcggcgtctgtggagctgccgcagcgccggagccccagcccgggagccacccgcctggcccggggaggcctgggtgagggcgagtatgcccagaggctgcaggccctgc

SEQ ID NO: 60611 - DNA, 120 bp, Artificial Sequence
  ENSG00000072195_52 (sequence is synthesized)
ctgcgccagcggctgctgcggggaggccccgaggatggcaaggtcagcggcctcaggggtcccctgctggagagcctggggggccgtgctcgggacccccggatggcacgagctgcctcc

SEQ ID NO: 60612 - DNA, 120 bp, Artificial Sequence
  ENSG00000072195_53 (sequence is synthesized)
agcgaggcagcgccccaccaccagcccccactcgagaaccggggcctgcaaaagagcagcagcttctcccagggtgaggcggagccccggggccggcaccgccgagcgggggcgcccctc

SEQ ID NO: 60613 - DNA, 120 bp, Artificial Sequence
  ENSG00000072195_54 (sequence is synthesized)
gagatccccgtggccaggcttggggcccgtaggctacaggagtctccttccctgtctgccctcagcgaggcccagccatccagccctgcacggcccagcgcccccaaacccagtacccct

SEQ ID NO: 60614 - DNA, 120 bp, Artificial Sequence
  ENSG00000072195_55 (sequence is synthesized)
aagtctgcagaaccttctgccaccacacctagtgatgctccgcagccccccgcaccccagcctgcccaagacaaggctccagagcccaggccagaaccagtccgagcctccaagcctgca

SEQ ID NO: 60615 - DNA, 120 bp, Artificial Sequence
  ENSG00000072195_56 (sequence is synthesized)
ccacccccccaggccctgcaaaccctagcgctgcccctcacaccctatgctcagatcattcagtccctccagctgtcaggccacgcccagggcccctcgcagggccctgccgcgccgcct

SEQ ID NO: 60616 - DNA, 120 bp, Artificial Sequence
  ENSG00000072195_57 (sequence is synthesized)
tcagagcccaagccccacgctgctgtctttgccagggtggcctccccacctccgggagcccccgagaagcgcgtgccctcagccgggggtcccccggtgctagccgagaaagcccgagtt

SEQ ID NO: 60617 - DNA, 120 bp, Artificial Sequence
  ENSG00000072195_58 (sequence is synthesized)
cccacggtgccccccaggccaggcagcagtctcagtagcagcatcgaaaacttggagtcggaggccgtgttcgaggccaagttcaagcgcagccgcgagtcgcccctgtcgctggggctg

SEQ ID NO: 60618 - DNA, 120 bp, Artificial Sequence
  ENSG00000072195_59 (sequence is synthesized)
cggctgctgagccgttcgcgctcggaggagcgcggccccttccgtggggccgaggaggaggatggcatataccggcccagcccggcggggaccccgctggagctggtgcgacggcctgag

SEQ ID NO: 60619 - DNA, 120 bp, Artificial Sequence
  ENSG00000072195_60 (sequence is synthesized)
cgctcacgctcggtgcaggacctcagggctgtcggagagcctggcctcgtccgccgcctctcgctgtcactgtcccagcggctgcggcggacccctcccgcgcagcgccacccggcctgg

SEQ ID NO: 60620 - DNA, 120 bp, Artificial Sequence
  ENSG00000072195_61 (sequence is synthesized)
gaggcccgcggcggggacggagagagctcggagggcgggagctcggcgcggggctccccggtgctggcgatgcgcaggcggctgagcttcaccctggagcggctgtccagccgattgcag

SEQ ID NO: 60621 - DNA, 120 bp, Artificial Sequence
  ENSG00000072195_62 (sequence is synthesized)
cgcagtggcagcagcgaggactcggggggcgcgtcgggccgcagcacgccgctgttcggacggcttcgcagggccacgtccgagggcgagagtctgcggcgccttggccttccgcacaac

SEQ ID NO: 60622 - DNA, 120 bp, Artificial Sequence
  ENSG00000072195_63 (sequence is synthesized)
cagttggccgcccaggccggcgccaccacgccttccgccgagtccctgggctccgaggccagcgccacgtcgggctcctcagccccaggggaaagccgaagccggctccgctggggcttc

SEQ ID NO: 60623 - DNA, 120 bp, Artificial Sequence
  ENSG00000072195_64 (sequence is synthesized)
tctcggccgcggaaggacaaggggttatcgccaccaaacctctctgccagcgtccaggaggagttgggtcaccagtacgtgcgcagtgagtcagacttccccccagtcttccacatcaaa

SEQ ID NO: 60624 - DNA, 120 bp, Artificial Sequence
  ENSG00000072195_65 (sequence is synthesized)
ctcaaggaccaggtgctgctggagggggaggcagccaccctgctctgcctgccagcggcctgccctgcaccgcacatctcctggatgaaagacaagaagtccttgaggtcagagccctca

SEQ ID NO: 60625 - DNA, 120 bp, Artificial Sequence
  ENSG00000072195_66 (sequence is synthesized)
gtgatcatcgtgtcctgcaaagatgggcggcagctgctcagcatcccccgggcgggcaagcggcacgccggtctctatgagtgctcggccaccaacgtactgggcagcatcaccagctcc

SEQ ID NO: 60626 - DNA, 120 bp, Artificial Sequence
  ENSG00000072195_67 (sequence is synthesized)
tgtaccgtggctgtggcccgagtcccaggaaagctagctcctccagaggtaccccagacctaccaggacacggcgctggtgctgtggaagccgggagacagccgggcaccttgcacgtat

SEQ ID NO: 60627 - DNA, 120 bp, Artificial Sequence
  ENSG00000072195_68 (sequence is synthesized)
acgctggagcggcgagtggatggggagtctgtgtggcaccctgtgagctcaggcatccccgactgttactacaacgtgacccacctgccagttggcgtgactgtgaggttccgtgtggcc

SEQ ID NO: 60628 - DNA, 120 bp, Artificial Sequence
  ENSG00000072195_69 (sequence is synthesized)
tgtgccaaccgtgctgggcaggggcccttcagcaactcttctgagaaggtctttgtcaggggtactcaagattcttcagctgtgccatctgctgcccaccaagaggcccctgtcacctca

SEQ ID NO: 60629 - DNA, 120 bp, Artificial Sequence
  ENSG00000072195_70 (sequence is synthesized)
aggccagccagggcccggcctcctgactctcctacctcactggccccacccctagctcctgctgcccccacacccccgtcagtcactgtcagcccctcatctccccccacacctcctagc

SEQ ID NO: 60630 - DNA, 120 bp, Artificial Sequence
  ENSG00000072195_71 (sequence is synthesized)
caggccttgtcctcgctcaaggctgtgggtccaccaccccaaacccctccacgaagacacaggggcctgcaggctgcccggccagcggagcccaccctacccagtacccacgtcacccca

SEQ ID NO: 60631 - DNA, 120 bp, Artificial Sequence
  ENSG00000072195_72 (sequence is synthesized)
agtgagcccaagcctttcgtccttgacactgggaccccgatcccagcctccactcctcaaggggttaaaccagtgtcttcctctactcctgtgtatgtggtgacttcctttgtgtctgca

SEQ ID NO: 60632 - DNA, 120 bp, Artificial Sequence
  ENSG00000072195_73 (sequence is synthesized)
ccaccagcccctgagcccccagcccctgagccccctcctgagcctaccaaggtgactgtgcagagcctcagcccggccaaggaggtggtcagctcccctgggagcagtccccgaagctct

SEQ ID NO: 60633 - DNA, 120 bp, Artificial Sequence
  ENSG00000072195_74 (sequence is synthesized)
cccaggcctgagggtaccactcttcgacagggtccccctcagaaaccctacaccttcctggaggagaaagccaggggccgctttggtgttgtgcgagcgtgccgggagaatgccacgggg

SEQ ID NO: 60634 - DNA, 120 bp, Artificial Sequence
  ENSG00000072195_75 (sequence is synthesized)
cgaacgttcgtggccaagatcgtgccctatgctgccgagggcaagcggcgggtcctgcaggagtacgaggtgctgcggaccctgcaccacgagcggatcatgtccctgcacgaggcctac

SEQ ID NO: 60635 - DNA, 120 bp, Artificial Sequence
  ENSG00000072195_76 (sequence is synthesized)
atcacccctcggtacctcgtgctcattgctgagagctgtggcaaccgggaactcctctgtgggctcagtgacaggttccggtattctgaggatgacgtggccacttacatggtgcagctg

SEQ ID NO: 60636 - DNA, 120 bp, Artificial Sequence
  ENSG00000072195_77 (sequence is synthesized)
ctacaaggcctggactacctccacggccaccacgtgctccacctagacatcaagccagacaacctgctgctggcccctgacaatgccctcaagattgtggactttggcagtgcccagccc

SEQ ID NO: 60637 - DNA, 120 bp, Artificial Sequence
  ENSG00000072195_78 (sequence is synthesized)
tacaacccccaggcccttaggccccttggccaccgcacgggcacgctggagttcatggctccggagatggtgaagggagaacccatcggctctgccacggacatctggggagcgggtgtg

SEQ ID NO: 60638 - DNA, 120 bp, Artificial Sequence
  ENSG00000072195_79 (sequence is synthesized)
ctcacttacattatgctcagtggacgctccccgttctatgagccagacccccaggaaacggaggctcggattgtggggggccgctttgatgccttccagctgtaccccaatacatcccag

SEQ ID NO: 60639 - DNA, 120 bp, Artificial Sequence
  ENSG00000072195_80 (sequence is synthesized)
agcgccaccctcttcttgcgaaaggttctctctgtacatccctggagccggccctccctgcaggactgcctggcccacccatggttgcaggacgcctacctgatgaagctgcgccgccag

SEQ ID NO: 60640 - DNA, 120 bp, Artificial Sequence
  ENSG00000072195_81 (sequence is synthesized)
acgctcaccttcaccaccaaccggctcaaggagttcctgggcgagcagcggcggcgccgggctgaggctgccacccgccacaaggtgctgctgcgctcctaccctggcggcccctagagg

SEQ ID NO: 60641 - DNA, 120 bp, Artificial Sequence
  ENSG00000072195_82 (sequence is synthesized)
cacggaccacagccaggcctcgggcttcaactggggttcccaccaatgccacgggacattccagggcccacgctgagccaggcgggcctggggcttcggttaccaccagcagcaacatct

SEQ ID NO: 60642 - DNA, 120 bp, Artificial Sequence
  ENSG00000072195_83 (sequence is synthesized)
ggctgggctcttacctcatagaccttcaaggacagagaccccagggcctggacctgatgccaccccaggccaaagccagagtgggagacccattggtcaggctcagcagggtgggaacag

SEQ ID NO: 60643 - DNA, 120 bp, Artificial Sequence
  ENSG00000072195_84 (sequence is synthesized)
gcagagggacaagaggggaatggagaagtggagaggaaaaggaatcgagggacaggaagggggaggctctaggaaggttctgggttgggggtcagtgcatctcagggagaaccaaggaag

SEQ ID NO: 60644 - DNA, 120 bp, Artificial Sequence
  ENSG00000072195_85 (sequence is synthesized)
gtgggcatggctggagaggaggaaaaggaaggagccccaggtgtcagggcagtaggctgggagtcagtgtggcaaagcgggggcaggacacagatacagtggcaggggcccagggctggg

SEQ ID NO: 60645 - DNA, 120 bp, Artificial Sequence
  ENSG00000072195_86 (sequence is synthesized)
acatgagagaaggcagcgaggcggcagagggagaagagaggactcaggtggaggtggggtgggtcagctgtcagcatccctcagaggagaaatgtggagagctggaggccagcagtcact

SEQ ID NO: 60646 - DNA, 120 bp, Artificial Sequence
  ENSG00000072195_87 (sequence is synthesized)
cacactcgctctgtcctcctgtccagtggatacagccctgggcgctctgctggcccaaggatgtccccactgcccctccatggcctctggccttcttcccattcatatttatttatttat

SEQ ID NO: 60647 - DNA, 120 bp, Artificial Sequence
  ENSG00000072195_88 (sequence is synthesized)
tgacttttatgaagtttccccttccatccgatccctactgcccatgttgtcctgaccatccctcccagccatccagctgtctgtctgtctgccacaaggaaataaaaatggcaagcagca

SEQ ID NO: 60648 - DNA, 89 bp, Artificial Sequence
  ENSG00000072195_89 (sequence is synthesized)
tattgtaatagagggtgggcctgactcctaatgggaggcccaggtctgcggctggactggacacaagcaggtgccagtggcagcaccag

SEQ ID NO: 60649 - DNA, 120 bp, Artificial Sequence
  ENSG00000072195_90 (sequence is synthesized)
taagtgccaaggataccagaaccactggggcagctggaataacaagcccaagtatgggggtccccagtgctgggcacatcccaggtatctccctccccacccattgccacaggacacctc

SEQ ID NO: 60650 - DNA, 120 bp, Artificial Sequence
  ENSG00000072195_91 (sequence is synthesized)
tggggactgggtgcctcacgccccttctgtcttgactgccctccatgccctgccccacaaacgctctgataacagtctgtccctgtctctctcctgctgctcctatggaagcgaagtttt

SEQ ID NO: 60651 - DNA, 120 bp, Artificial Sequence
  ENSG00000072195_92 (sequence is synthesized)
accactgaaagggccttaaggggcccctagtccagctgcttatattattgttgagtgaaccaaagcccagagacaggaagtgacctgcccaaagctgcacagcacattgttccgtgctca

SEQ ID NO: 60652 - DNA, 120 bp, Artificial Sequence
  ENSG00000072195_93 (sequence is synthesized)
gcttactacacaacaccaccttccctgttgctccatcacggagccctggcggcagccagagaccctgcacctgccactggccaagctctctctacactcttctgagcctttgtcaccctg

SEQ ID NO: 60653 - DNA, 120 bp, Artificial Sequence
  ENSG00000072195_94 (sequence is synthesized)
ctctgcccaggaccctccctcatccccctccccctctcctctcgcccctttgcccaccctcccatcccattgctgtgcagaagctactgtgaggtagcggtggggagagtctggtggctg

SEQ ID NO: 60654 - DNA, 120 bp, Artificial Sequence
  ENSG00000072195_95 (sequence is synthesized)
gacccgttcggaggggcccttggggtggcttaggcttggagcatcacagggaccctagggtgccagggtgagcacagctgtgacgtgtgaagaggcctgggcccccagagcctggggcat

SEQ ID NO: 60655 - DNA, 120 bp, Artificial Sequence
  ENSG00000072195_96 (sequence is synthesized)
atgtgcaggggccctctcaggcagcagaaatgccaggccctggctagggggccctcgagggccatgggttttcctccccaaaggccacaaccgtttatcttgccttccacctcacccttc

SEQ ID NO: 60656 - DNA, 120 bp, Artificial Sequence
  ENSG00000072195_97 (sequence is synthesized)
gcctcaatggctcctcgcttcctctcctcgcttctcactcagcccccagcccctgaccttccccaaggctcagagctcagaccctgacagtcatggtccctctgctggcccccctgcctc

SEQ ID NO: 60657 - DNA, 120 bp, Artificial Sequence
  ENSG00000072195_98 (sequence is synthesized)
agttcccctcctctgtgcctgccgttcctgtagttgccacttccttggtctccagattcttcagccctcctccccggcctgctttctctccagggcctggctctgcctcgcttctctgta

SEQ ID NO: 60658 - DNA, 120 bp, Artificial Sequence
  ENSG00000072195_99 (sequence is synthesized)
ttaacccatgtcttggtgcttctttctcttggggattccttccgacacccccaggctttggggtgctcctgatcccatgaatgcctggttgcccggggtctctgcctgcccaggaacccc

SEQ ID NO: 60659 - DNA, 120 bp, Artificial Sequence
  ENSG00000072195_100 (sequence is synthesized)
gaggaaccagtctctggctagctgccggccctcgcagcccagagctgtccttgggggagccaagagtggcagtgctgccctgacggtgtgagaggcagccctctatgcagaagggcccta

SEQ ID NO: 60660 - DNA, 120 bp, Artificial Sequence
  ENSG00000072195_101 (sequence is synthesized)
gccaggtctgcgtgcctgtgcgtgcatgtgtgcgtgtgcgtgcgcatgcgtgcgtgtatgtgcatgcatgtgtgtgcatgtgtgtgcgtgtgtgcgtgcgtgtgcatgtgtgcgtatggg

SEQ ID NO: 60661 - DNA, 120 bp, Artificial Sequence
  ENSG00000072195_102 (sequence is synthesized)
tgtgtgcatgcgtgtgtgtgtgcgcgcgtgtgcgtgcacgtgtgcgtgcatgtgtgcgtgtgcatgcgtgtgtgtgcatgtgtgtgtgtgcgcgtgcgtgcgcgtatgctgcactaacct

SEQ ID NO: 60662 - DNA, 120 bp, Artificial Sequence
  ENSG00000072195_103 (sequence is synthesized)
gccgcttgctgactgaggtttttgtctgtacacaggcgagtgagctcagggggccacctgtgctccccccgctaccctccgagccgcgcccctgtctcaggcacctctcggacctcgctg

SEQ ID NO: 60663 - DNA, 120 bp, Artificial Sequence
  ENSG00000072195_104 (sequence is synthesized)
tgtttcactgcctcctgcccacagacccaggcctgccggcccggacccgtcccagcctcccctccccaccccatgcagcccccagggggatagcccatgggcccctgtggaccctccctc

SEQ ID NO: 60664 - DNA, 120 bp, Artificial Sequence
  ENSG00000072195_105 (sequence is synthesized)
cccaagtggacacatggctgtgcaggccaggaggcccacagatggactgagtgctgggaaggggcggctgcgaggggtatcaaccccccgagtctctccctgaaggggagcaccgggcga

SEQ ID NO: 60665 - DNA, 120 bp, Artificial Sequence
  ENSG00000072195_106 (sequence is synthesized)
gtgcatgtgctactgctgctacaggcctgtctatctgtttgtctgtctgtgtgtctgtgacagtcagggaaggatgcctcggagctgaggtggggtgagacagagtgggagagattacgg

SEQ ID NO: 60666 - DNA, 120 bp, Artificial Sequence
  ENSG00000072195_107 (sequence is synthesized)
catggcatggaggggcccaaggagcaggggctgttgacaaaggccttaccaggaagggttaggacactgaccattctagaaatgggtttcgaatggcacaacactttctatttcacaaaa

SEQ ID NO: 60667 - DNA, 120 bp, Artificial Sequence
  ENSG00000072195_108 (sequence is synthesized)
gaccaaaagccagaggccccaggctctgtgctgatgaacagcctggctgagccctggccctggcaggtttagggcccatttggggccccctccttctctgtcagggctggggtgctctgt

SEQ ID NO: 60668 - DNA, 120 bp, Artificial Sequence
  ENSG00000072195_109 (sequence is synthesized)
ctgggaatgagggagttaaccaagtttggtgcaggagcaggggcagggggccactgtagtgagcgtggagaaatttggaaacacctatttcttaactcaaataaagtccagtttgtacct

SEQ ID NO: 60669 - DNA, 120 bp, Artificial Sequence
  ENSG00000072195_110 (sequence is synthesized)
tttttggtggatgactccagctctgctttcctatccctcgagcgtttgggggtgcaagctgtagggctgtggccaacaggtgggtctacatcccctttcagcagccccatcacctccgac

SEQ ID NO: 60670 - DNA, 120 bp, Artificial Sequence
  ENSG00000072195_111 (sequence is synthesized)
agagacggctgaggatgacatcagcgatgtgcagggaacccagcgcctggagcttcgggatgacggggccttcagcacccccacgggcacctcagaggagcaagtgagctggtggggcag

SEQ ID NO: 60671 - DNA, 120 bp, Artificial Sequence
  ENSG00000072195_112 (sequence is synthesized)
caacctcctccttcccctcctcaggcgccttcccctcccccagggccttctccgtgcagggcctcagctgggtcagccgagtgagtggggctgggcaggctggacaggctgggctcctgc

SEQ ID NO: 60672 - DNA, 120 bp, Artificial Sequence
  ENSG00000072195_113 (sequence is synthesized)
tccctggggagccacgctggggtgggcagtgggcaggcagcaggagggcctggtgccagggcagagccttcaggacaggcacaggctggggtctgtgtgcagagcctcggggtgggtcta

SEQ ID NO: 60673 - DNA, 120 bp, Artificial Sequence
  ENSG00000072195_114 (sequence is synthesized)
ggccgccggcccggccccctcccccgccatgaagaagctgtgggtgaagaagcgtttccagaaaaccggccattcccgccgggcctttggccgactcacccatgttttccgctcctgcag

SEQ ID NO: 60674 - DNA, 120 bp, Artificial Sequence
  ENSG00000072195_115 (sequence is synthesized)
agctctgctttcctatccctcgagcgtttgggggtgcaagctgtagggctgtggccaacaggtgcccctggggtttgcacggcaggaagctgagaagggaaagggggaggggcaggctag

SEQ ID NO: 60675 - DNA, 120 bp, Artificial Sequence
  ENSG00000072195_116 (sequence is synthesized)
atagtgccgcctcattggccctggaccgaggtcgggatgtgacttgtctgcggtgtgtgttcctctgcaccaggcccagctcacccaagaaatgggcgtcctagccatgctgctccaggg

SEQ ID NO: 60676 - DNA, 120 bp, Artificial Sequence
  ENSG00000072195_117 (sequence is synthesized)
ttccatagacctgcttcccctgcttttggagcctgcagttggtagtttaggtctctagtccatgtcaggaatgtgggtgccctgctccagtggaattctcccaccaggcccaggagtggc

SEQ ID NO: 60677 - DNA, 120 bp, Artificial Sequence
  ENSG00000072195_118 (sequence is synthesized)
ccctctgctgcccgaaccctttgccccaggcctttccctatggtgtcccctcctgggaggatcagcagggtcggtgttggcagagccagtggcagaggaggttccaggggctcagggagg

SEQ ID NO: 60678 - DNA, 120 bp, Artificial Sequence
  ENSG00000072195_119 (sequence is synthesized)
ggaagaagctgggcgaggtcgcaggagcctgggggtgaagtcagggcagggccggcctgcggggagctgccgcaactcctgggctctgggcgacattccagccagctctcccaggctctc

SEQ ID NO: 60679 - DNA, 120 bp, Artificial Sequence
  ENSG00000072195_120 (sequence is synthesized)
cgccatgaagaagctgtgggtgaagaagcgtttccagaaaaccggccattcccgccgggcctttggccgactcacccatgcgaagttttccgctcctgcagaaagcaaagttacgactca

SEQ ID NO: 60680 - DNA, 120 bp, Artificial Sequence
  ENSG00000072195_121 (sequence is synthesized)
cacacatttgacaattcacctcgtgttgctctgtgacaccgctgttattgcttaagtcttgggttgcttttagcttgttctttgtctgtttgaaagcttgtgcccctccaggtgccttgc

SEQ ID NO: 60681 - DNA, 120 bp, Artificial Sequence
  ENSG00000072195_122 (sequence is synthesized)
atggggcctggtacgccatacatgatggctgacgtgttaaagacatacacagtgcagtcctgtctttctccagaagccaacgctctaattgtggatgaagttgaggaacggccacactaa

SEQ ID NO: 60682 - DNA, 120 bp, Artificial Sequence
  ENSG00000072195_123 (sequence is synthesized)
catggagtcaaggctgccctgacctgtttcgagaatgctccttctgacttccttttttccctaaggacattcaggaggcagaccctcttctccccaagtccctgctttctagaagcccct

SEQ ID NO: 60683 - DNA, 120 bp, Artificial Sequence
  ENSG00000072195_124 (sequence is synthesized)
ctgtctgggtttggctttctaggatgcaggccaccaggactctctctcccgctgtcatccctgcagggatcatggccccttaccccgttattcctgtgtccggcagagtcttcggatgac

SEQ ID NO: 60684 - DNA, 120 bp, Artificial Sequence
  ENSG00000072195_125 (sequence is synthesized)
tttctcaagatggatgtctcctggcctgccttggtccctcaaagtgaaaaccggccattcccgccgggcctttggccgactcacccatggtgcgtggaccgtgggcgtccttgctctagc

SEQ ID NO: 60685 - DNA, 120 bp, Artificial Sequence
  ENSG00000072195_126 (sequence is synthesized)
ccatgcctactcctcctcttggtccctgtccctctgtgaggcatcgagttcctgaagacagcccatgagatgtggaaccctcccactcacccccacacttatctaccacccacccgacca

SEQ ID NO: 60686 - DNA, 120 bp, Artificial Sequence
  ENSG00000072195_127 (sequence is synthesized)
ggccccctgtgccctacagctgagagaggacccagcagaagggagggcggctcactagcacacccctgcatggactgggtgccctgttctccatgtgaggcctaatgggaaggagttcat

SEQ ID NO: 60687 - DNA, 120 bp, Artificial Sequence
  ENSG00000072195_128 (sequence is synthesized)
tgccatgctttggcaaccagtacgtggctcctgcttgtcatggcagccagagggaaactgaggcacagaacctgctagaatctgggaaagttgaaaatactcccaggaaccttttctcct

SEQ ID NO: 60688 - DNA, 120 bp, Artificial Sequence
  ENSG00000072195_129 (sequence is synthesized)
aacctaaccactgggcatttttgaggacgattcaacagtagaagggagggaccttgaggaaggtgcctgtcacatcatgatgcagacagataagggactcagagacggctgaggatgaca

SEQ ID NO: 60689 - DNA, 120 bp, Artificial Sequence
  ENSG00000072195_130 (sequence is synthesized)
cttggaagccagcccgggcccagacccagactttgctgcaccatggatgcacttcttgctgcctgccccatccttgccccatccttgcccactcgcctcctccctgcagtggatgggggt

SEQ ID NO: 60690 - DNA, 120 bp, Artificial Sequence
  ENSG00000072195_131 (sequence is synthesized)
cagcctggcctctggcactacgtgggggctcagggaaaggggcctccacccagctcccttcccctccatcccctggggaccctcttgccttgcccctgcccctgcggctgagcccccagg

SEQ ID NO: 60691 - DNA, 120 bp, Artificial Sequence
  ENSG00000072195_132 (sequence is synthesized)
cgggcctgctggggtccaaccccacaacctcagctttgctgctctctggctgtgttcccctgacaaatcgctaaacctctctgagcttcagctttcccatctgtaaaaacggaactcaag

SEQ ID NO: 60692 - DNA, 120 bp, Artificial Sequence
  ENSG00000072195_133 (sequence is synthesized)
tgttgatgaggggtgttagaggagtggtgggtgctgaggacctgatgtcaagcccagcacagagcctgcgctctcctcctcccaggcccaaccctggaggaggcccctgccatgctggac

SEQ ID NO: 60693 - DNA, 120 bp, Artificial Sequence
  ENSG00000072195_134 (sequence is synthesized)
ggcaggtgggtgacagcgggccttcttcctagcctccctccaaggcccaaagctctctactcacacccccaggtacacaacctgcctgacactgctgcagatccaaacccatgtcctctg

SEQ ID NO: 60694 - DNA, 120 bp, Artificial Sequence
  ENSG00000072195_135 (sequence is synthesized)
gtcctctggtcaggcctgtccatgtcatggctatacaaataccatattagtaataatgacaacaatcatactaacaagatttattggccagacgcggtggctcacacctgtaatctcagc

SEQ ID NO: 60695 - DNA, 120 bp, Artificial Sequence
  ENSG00000072195_136 (sequence is synthesized)
ttttcatctctctgcacattcctgttcccatgtgggcctttttctgggaggaacagaacctttccacacggcagctcccgggagagcaggagagagcaggggaacaagccagcaagcagg

SEQ ID NO: 60696 - DNA, 120 bp, Artificial Sequence
  ENSG00000072195_137 (sequence is synthesized)
cccgccatgaagaagctgtgggtgaagaagcgtttccagaaaaccggccattcccgccgggcctttggccgactcacccatgactcagagacggctgaggatgacatcagcgatgtgcag

SEQ ID NO: 60697 - DNA, 120 bp, Artificial Sequence
  ENSG00000072195_138 (sequence is synthesized)
atctcgagctaatctggtgggcgcaagctgggggtcagaggatagcctttccgtggccagtgacctgtacggcagcgcattcagcctgtacagaggacgggcgctctctatccacgtagt

SEQ ID NO: 60698 - DNA, 120 bp, Artificial Sequence
  ENSG00000072201_0 (sequence is synthesized)
acaactccggcggcccaaggagctgctcggttcacccacaaggaatgagagctgcctgcctgctgctgcttggagagccccagacagtcgcttgaagaggtgtgtggatgtctcctagat

SEQ ID NO: 60699 - DNA, 120 bp, Artificial Sequence
  ENSG00000072201_1 (sequence is synthesized)
cttgacttgctcctgaggaaatattgtgtgactgagtttcctgttatactgctctccaatccatcatgaaccagccagagtctgccaacgatcctgaacccctgtgtgcagtgtgtggcc

SEQ ID NO: 60700 - DNA, 120 bp, Artificial Sequence
  ENSG00000072201_2 (sequence is synthesized)
aagcccactccttggaggaaaaccacttctacagctatccagaggaagtggatgatgacctcatctgccacatctgcctgcaggctttgctggaccccctggacactccgtgtggacaca

SEQ ID NO: 60701 - DNA, 120 bp, Artificial Sequence
  ENSG00000072201_3 (sequence is synthesized)
cctactgcaccctctgcctcaccaacttcctggtggagaaggacttctgtcccatggaccgcaagcctctggttctgcagcactgcaagaagtccagcatcctggtcaacaaactcctca

SEQ ID NO: 60702 - DNA, 120 bp, Artificial Sequence
  ENSG00000072201_4 (sequence is synthesized)
acaagctactggtgacctgcccattcagggagcactgcacccaggtgttgcagcgctgtgacctcgagcatcactttcaaaccagctgtaaaggtgcctcccactacggcctgaccaaag

SEQ ID NO: 60703 - DNA, 120 bp, Artificial Sequence
  ENSG00000072201_5 (sequence is synthesized)
ataggaagaggcgctcacaagatggctgtccagacggctgtgcgagcctcacagccacggctccctccccagaggtttctgcagctgccaccatctccttaatgacagacgagcctggcc

SEQ ID NO: 60704 - DNA, 120 bp, Artificial Sequence
  ENSG00000072201_6 (sequence is synthesized)
tagacaaccctgcctacgtgtcctcggcagaggacgggcagccagcaatcagcccagtggactctggccggagcaaccgaactagggcacggccctttgagagatccactattagaagca

SEQ ID NO: 60705 - DNA, 120 bp, Artificial Sequence
  ENSG00000072201_7 (sequence is synthesized)
gatcatttaaaaaaataaatcgagctttgagtgttcttcgaaggacaaagagcgggagtgcagttgccaaccatgccgaccagggcagggaaaattctgaaaacaccactgcccctgaag

SEQ ID NO: 60706 - DNA, 120 bp, Artificial Sequence
  ENSG00000072201_8 (sequence is synthesized)
tctttccaaggttgtaccacctgattccagatggtgaaattaccagcatcaagatcaatcgagtagatcccagtgaaagcctctctattaggctggtgggaggtagcgaaaccccactgg

SEQ ID NO: 60707 - DNA, 120 bp, Artificial Sequence
  ENSG00000072201_9 (sequence is synthesized)
tccatatcattatccaacacatttatcgtgatggggtgatcgccagagacggccggctactgccaggagacatcattctaaaggtcaacgggatggacatcagcaatgtccctcacaact

SEQ ID NO: 60708 - DNA, 120 bp, Artificial Sequence
  ENSG00000072201_10 (sequence is synthesized)
acgctgtgcgtctcctgcggcagccctgccaggtgctgtggctgactgtgatgcgtgaacagaagttccgcagcaggaacaatggacaggccccggatgcctacagaccccgagatgaca

SEQ ID NO: 60709 - DNA, 120 bp, Artificial Sequence
  ENSG00000072201_11 (sequence is synthesized)
gctttcatgtgattctcaacaaaagtagccccgaggagcagcttggaataaaactggtgcgcaaggtggatgagcctggggttttcatcttcaatgtgctggatggcggtgtggcatatc

SEQ ID NO: 60710 - DNA, 120 bp, Artificial Sequence
  ENSG00000072201_12 (sequence is synthesized)
gacatggtcagcttgaggagaatgaccgtgtgttagccatcaatggacatgatcttcgatatggcagcccagaaagtgcggctcatctgattcaggccagtgaaagacgtgttcacctcg

SEQ ID NO: 60711 - DNA, 120 bp, Artificial Sequence
  ENSG00000072201_13 (sequence is synthesized)
tcgtgtcccgccaggttcggcagcggagccctgacatctttcaggaagccggctggaacagcaatggcagctggtccccagggccaggggagaggagcaacactcccaagcccctccatc

SEQ ID NO: 60712 - DNA, 120 bp, Artificial Sequence
  ENSG00000072201_14 (sequence is synthesized)
ctacaattacttgtcatgagaaggtggtaaatatccaaaaagaccccggtgaatctctcggcatgaccgtcgcagggggagcatcacatagagaatgggatttgcctatctatgtcatca

SEQ ID NO: 60713 - DNA, 120 bp, Artificial Sequence
  ENSG00000072201_15 (sequence is synthesized)
gtgttgagcccggaggagtcataagcagagatggaagaataaaaacaggtgacattttgttgaatgtggatggggtcgaactgacagaggtcagccggagtgaggcagtggcattattga

SEQ ID NO: 60714 - DNA, 120 bp, Artificial Sequence
  ENSG00000072201_16 (sequence is synthesized)
tagtactcaaagctttggaagtcaaagagtatgagccccaggaagactgcagcagcccagcagccctggactccaaccacaacatggccccacccagtgactggtccccatcctgggtca

SEQ ID NO: 60715 - DNA, 120 bp, Artificial Sequence
  ENSG00000072201_17 (sequence is synthesized)
tgtggctggaattaccacggtgcttgtataactgtaaagatattgtattacgaagaaacacagctggaagtctgggcttctgcattgtaggaggttatgaagaatacaatggaaacaaac

SEQ ID NO: 60716 - DNA, 120 bp, Artificial Sequence
  ENSG00000072201_18 (sequence is synthesized)
cttttttcatcaaatccattgttgaaggaacaccagcatacaatgatggaagaattagatgtggtgatattcttcttgctgtcaatggtagaagtacatcaggaatgatacatgcttgct

SEQ ID NO: 60717 - DNA, 120 bp, Artificial Sequence
  ENSG00000072201_19 (sequence is synthesized)
tggcaagactgctgaaagaacttaaaggaagaattactctaactattgtttcttggcctggcacttttttatagaatcaatgatgggtcagaggaaaacagaaaaatcacaaataggcta

SEQ ID NO: 60718 - DNA, 120 bp, Artificial Sequence
  ENSG00000072201_20 (sequence is synthesized)
agaagttgaaacactatatttatcttgtcagtttttatatttaaagaaagaatacattgtaaaaatgtcaggaaaagtatgatcatctaatgaaagccagttacacctcagaaaatatga

SEQ ID NO: 60719 - DNA, 120 bp, Artificial Sequence
  ENSG00000072201_21 (sequence is synthesized)
ttccaaaaaaattaaaactactagttttttttcagtgtggaggatttctcattactctacaacattgtttatattttttctattcaataaaaagccctaaaacaactaaaatgatttgta

SEQ ID NO: 60720 - DNA, 120 bp, Artificial Sequence
  ENSG00000072201_22 (sequence is synthesized)
taccccactgaattcaagctgatttaaatttaaaatttggtatatgctgaagtctgccaagggtacattatggccatttttaatttacagctaaaatattttttaaaatgcattgctgag

SEQ ID NO: 60721 - DNA, 120 bp, Artificial Sequence
  ENSG00000072201_23 (sequence is synthesized)
aaacgttgctttcatcaaacaagaataaatatttttcagaagttatagttgtcttttagtatgtgatactaattaagattacttttgtattatcactatttaaaagatcctagtaattta

SEQ ID NO: 60722 - DNA, 120 bp, Artificial Sequence
  ENSG00000072201_24 (sequence is synthesized)
ttctttcaaataccatgttatttgttaccatcaccgatgaatacctcctaggcttatccctaaaaatgctcgctcagagaattaattataaacttgttttgtttttagtaagaaatggct

SEQ ID NO: 60723 - DNA, 120 bp, Artificial Sequence
  ENSG00000072201_25 (sequence is synthesized)
aaagctctttttttccacaatcgttagtaactgtataaaaactcatgctgctccaccagtgggccttggaaaatgcatcaagaaggccaaaccagcttgaccctggctcacagacatggt

SEQ ID NO: 60724 - DNA, 120 bp, Artificial Sequence
  ENSG00000072201_26 (sequence is synthesized)
catgaggcgatttaaatttgtgccacaatgaagagtgtgtgtacacatgcctcctagaaactacactatgggtaattaattaatttatttcatagaggccacccagatgccttataggtt

SEQ ID NO: 60725 - DNA, 120 bp, Artificial Sequence
  ENSG00000072201_27 (sequence is synthesized)
ttattaatttggatatgaaagtgtaccccatttggtttcaccaggaacccaaatttagaatattgaaaagccatcaaaaagttgtgatatcaaaaatgtatgagtctcttaatatactaa

SEQ ID NO: 60726 - DNA, 120 bp, Artificial Sequence
  ENSG00000072201_28 (sequence is synthesized)
gcaagagtgtcacagcagtaatgataaagactagttttaatctcaagccttagaggggccctttgttgccttttgtgatgcagcctcttaagagagtggtgtttgattaacaaaaaaact

SEQ ID NO: 60727 - DNA, 120 bp, Artificial Sequence
  ENSG00000072201_29 (sequence is synthesized)
gtggcccaagtggaacccttgaccttttctcagataatctgtgtatgtacacagctaacacagctctttagattccctgttaagtgactcattcacattcctttcttggatataaagtca

SEQ ID NO: 60728 - DNA, 120 bp, Artificial Sequence
  ENSG00000072201_30 (sequence is synthesized)
ttgctgtctttttatttttgaaatagtacaagacaaagatttttaacttaacatgaaaaattcactcttttattttggaaaaaaagttaacttttcatactaacaaacagaacaagattt

SEQ ID NO: 60729 - DNA, 120 bp, Artificial Sequence
  ENSG00000072201_31 (sequence is synthesized)
aaggtaaatttcttaaacattatccagaaaaataacaagatttatagtatctacttctggtactaatatacacaaaaggccaaaaccatgcctattctgcaggtgtagcttcggtgctct

SEQ ID NO: 60730 - DNA, 120 bp, Artificial Sequence
  ENSG00000072201_32 (sequence is synthesized)
cctgttcaggggcaggctcactgcccgcttcttttccttctttgcttcttttagattttttgtgtttgtgtctcctgtgactatctccttcttcactttcatggcgacgtctactattac

SEQ ID NO: 60731 - DNA, 120 bp, Artificial Sequence
  ENSG00000072201_33 (sequence is synthesized)
agaagagatttgtcactgatgctaatgcatgctgctctgcaggggaccactctccctcgaagctccccatagctgctctcagttttatggatctgctctactcaaagccttgcagaaggg

SEQ ID NO: 60732 - DNA, 120 bp, Artificial Sequence
  ENSG00000072201_34 (sequence is synthesized)
gcaggggatgcccaggttaacccccgcacgtacaaaggtggagcagttttcatgcatagctgggacgaagaacactggaaagagaaagaaaaattttccgagctactgctaagccagaaa

SEQ ID NO: 60733 - DNA, 120 bp, Artificial Sequence
  ENSG00000072201_35 (sequence is synthesized)
gcacattcaagtgtttccccagctgtgtttacagctttgggtttctaagcctcttgagaagtaatcagttttgatcatcttaaatcccaaagtaaattttcttttctggatattatccta

SEQ ID NO: 60734 - DNA, 120 bp, Artificial Sequence
  ENSG00000072201_36 (sequence is synthesized)
gttgctaacacaggttagtctggcctattgaaccatcttttactgctgtgaccttcaaaaatgaaagctgtggttttgccctgagaagaagaaaaggagatttgaaatatgactcagatt

SEQ ID NO: 60735 - DNA, 120 bp, Artificial Sequence
  ENSG00000072201_37 (sequence is synthesized)
acacggggctggacacgtgctgtgctcaggaaagaaagtaaattccacctggcaaattgctctaactgatttatttgtccacaaagagacgccacctacctgcttgcaggtattcaggca

SEQ ID NO: 60736 - DNA, 120 bp, Artificial Sequence
  ENSG00000072201_38 (sequence is synthesized)
cagcctaagctctctcgccaaccgtggtggctccttgcgttcctacatcctctcatctgagaatcagagagcataatcttcttacgggcccgtgatttattaacgtggcttaatctgaag

SEQ ID NO: 60737 - DNA, 120 bp, Artificial Sequence
  ENSG00000072201_39 (sequence is synthesized)
gttctcagtcaaattctttgtgatctactgattgtgggggcatggcaaggtttgcttaaaggagcttggctggtttgggcccttgtagctgacagaaggtggccagggagaaggcagcac

SEQ ID NO: 60738 - DNA, 120 bp, Artificial Sequence
  ENSG00000072201_40 (sequence is synthesized)
actgctcggagaatgaaggcgcttctgttgctggtcttgccttggctcagtcctgctaactacattgacaatgtgggcaacctgcacttcctgtattcagaactctgtaaaggtgcctcc

SEQ ID NO: 60739 - DNA, 120 bp, Artificial Sequence
  ENSG00000072201_41 (sequence is synthesized)
tgtgtgaaaagggaagagaggatatagcggcaggcaaatcaaattccaagttcaacaagcctattatacattcttcaattgtatttgaagagggctgactgaggaatggcagcagagcca

SEQ ID NO: 60740 - DNA, 120 bp, Artificial Sequence
  ENSG00000072201_42 (sequence is synthesized)
ttctgaggcctccccagccatgtggaactcaggacactggggaaatagccgagttttgaagaatgtcagcagggagccaccagggatcatcctccccggtaagaagagacctccagagac

SEQ ID NO: 60741 - DNA, 120 bp, Artificial Sequence
  ENSG00000072210_0 (sequence is synthesized)
agtcctcccccggcgcctccgactggcagtgggactcagcgggcgtggaggtcgcggctgagcgagcgagccctgggcgagtgaattgtggctgtgggttgacggtggagacaccccccg

SEQ ID NO: 60742 - DNA, 120 bp, Artificial Sequence
  ENSG00000072210_1 (sequence is synthesized)
gagggaggcggagggaagggaggcgaggcctgcacctgcatgcttcccgcctcccactccccagcgcccccggaccgtgcagttctctgcaggaccaggccatggagctcgaagtccggc

SEQ ID NO: 60743 - DNA, 120 bp, Artificial Sequence
  ENSG00000072210_2 (sequence is synthesized)
gggtccgacaggcgttcctgtccggccggtcgcgacctctgcggtttcggctgcagcagctggaggccctgcggaggatggtgcaggagcgcgagaaggatatcctgacggccatcgccg

SEQ ID NO: 60744 - DNA, 120 bp, Artificial Sequence
  ENSG00000072210_3 (sequence is synthesized)
ccgacctgtgcaagagtgaattcaatgtgtacagtcaggaagtcattactgtccttggggaaattgattttatgcttgagaatcttcctgaatgggttactgctaaaccagttaagaaga

SEQ ID NO: 60745 - DNA, 120 bp, Artificial Sequence
  ENSG00000072210_4 (sequence is synthesized)
acgtgctcaccatgctggatgaggcctatattcagccacagcctctgggagtggtgctgataatcggagcttggaattaccccttcgttctcaccattcagccactgataggagccatcg

SEQ ID NO: 60746 - DNA, 120 bp, Artificial Sequence
  ENSG00000072210_5 (sequence is synthesized)
ctgcaggaaatgctgtgattataaagccttctgaactgagtgaaaatacagccaagatcttggcaaagcttctccctcagtatttagaccaggatctctatattgttattaatggtggtg

SEQ ID NO: 60747 - DNA, 120 bp, Artificial Sequence
  ENSG00000072210_6 (sequence is synthesized)
ttgaggaaaccacggagctcctgaagcagcgatttgaccacattttctatacgggaaacactgcggttggcaaaattgtcatggaagctgctgccaagcatctgacccctgtgactcttg

SEQ ID NO: 60748 - DNA, 120 bp, Artificial Sequence
  ENSG00000072210_7 (sequence is synthesized)
aactgggagggaaaagtccatgttatattgataaagattgtgacctggacattgtttgcagacgcataacctggggaaaatacatgaattgtggccaaacctgcattgcacccgactata

SEQ ID NO: 60749 - DNA, 120 bp, Artificial Sequence
  ENSG00000072210_8 (sequence is synthesized)
ttctctgtgaagcatccctccaaaatcaaattgtatggaagattaaggaaacagtgaaggaattttatggagaaaatataaaagagtctcctgattatgaaaggatcatcaatcttcgtc

SEQ ID NO: 60750 - DNA, 120 bp, Artificial Sequence
  ENSG00000072210_9 (sequence is synthesized)
attttaagaggatactaagtttgcttgaaggacaaaagatagcttttggtggggagactgatgaggccacacgctacatagccccaacagtacttaccgatgttgatcctaaaaccaagg

SEQ ID NO: 60751 - DNA, 120 bp, Artificial Sequence
  ENSG00000072210_10 (sequence is synthesized)
tgatgcaagaagaaatttttggaccaattcttccaatagtgcctgtgaaaaatgtagatgaggccataaatttcataaatgaacgtgaaaagcctctggctctttatgtattttcgcata

SEQ ID NO: 60752 - DNA, 120 bp, Artificial Sequence
  ENSG00000072210_11 (sequence is synthesized)
accataagctcatcaaacggatgattgatgagacatccagtggaggtgtcacaggcaatgacgtcattatgcacttcacgctcaactctttcccatttggaggagtgggttccagtggga

SEQ ID NO: 60753 - DNA, 120 bp, Artificial Sequence
  ENSG00000072210_12 (sequence is synthesized)
tgggagcttatcacggaaaacatagttttgatactttttctcatcagcgtccctgtttattaaaaagtttaaagagagaaggtgctaacaaactcagatatcctcccaacagccagtcaa

SEQ ID NO: 60754 - DNA, 120 bp, Artificial Sequence
  ENSG00000072210_13 (sequence is synthesized)
aggtggattggggaaaattttttctcttgaaacggttcaacaaagaaaaactcggtctcctgttgctcactttcctgggtattgtagccgctgtgcttgtcaaggcagaatattactgaa

SEQ ID NO: 60755 - DNA, 120 bp, Artificial Sequence
  ENSG00000072210_14 (sequence is synthesized)
gaatgatcctgttcaacctcctagtgcctctactgaattattcctcttttaaatggttaatgaaccaataatttttaaatcataccaaaaatagtaagaaaatatgcaaacactctgtga

SEQ ID NO: 60756 - DNA, 120 bp, Artificial Sequence
  ENSG00000072210_15 (sequence is synthesized)
gcttatctaaatcttggaactttgagctaggggaggagaatgtattagactaaatacaaactgcggggttgtaagggagtctcagaacctcactgaatccttcactccagttaatggcac

SEQ ID NO: 60757 - DNA, 120 bp, Artificial Sequence
  ENSG00000072210_16 (sequence is synthesized)
tgctcacttcctgcctctgctgccaccatcactgtgtgaagctttcaagagcttggtacttcccagggctaccggcagtcctctgtagtccagagaggtgagattagatcttcttggttc

SEQ ID NO: 60758 - DNA, 120 bp, Artificial Sequence
  ENSG00000072210_17 (sequence is synthesized)
cctgtgaggtttcaggcactaaaactctatgtggggaagggaggggttactcctcctccaatgggactcaaggacttgacctccaggagtaggcccctggtcagaagtgccatctcacca

SEQ ID NO: 60759 - DNA, 120 bp, Artificial Sequence
  ENSG00000072210_18 (sequence is synthesized)
gtggtcttcattcttcctcattcattctttatcatcctgtgttctgtttagttgcaacaatctcttgtgactaatgtcactcaaagcatcttgtaaatcctagggcttcctggaagttag

SEQ ID NO: 60760 - DNA, 120 bp, Artificial Sequence
  ENSG00000072210_19 (sequence is synthesized)
ttgccaaagtcatgcaagcatcacctgtcattcttgtgttggagttatagaattctacatcttataaaacctaactggcatttaaaaaatactgtggccgggcgtggtggctcatgcctg

SEQ ID NO: 60761 - DNA, 120 bp, Artificial Sequence
  ENSG00000072210_20 (sequence is synthesized)
tgagtccaggaatttgagaccagcctggacaacacagtgagacctcatctctatcaaaaaataaaaattagctagatgtggtggcatgagcctgtgttcccagctgcttaggaggctgaa

SEQ ID NO: 60762 - DNA, 120 bp, Artificial Sequence
  ENSG00000072210_21 (sequence is synthesized)
gtggcatgagcctgtgttcccagctgcttaggaggctgaagcaggaggattgattgagcctgcgaggccaaggctgcagcaggctgtgattgcaccactgcacttcagcttgggcaacag

SEQ ID NO: 60763 - DNA, 120 bp, Artificial Sequence
  ENSG00000072210_22 (sequence is synthesized)
agcaagaccctgtctccgaaacaaataaaaaatactgtaataaaagtacttataaacatactaatcctctttcaggaccctaaagttgcaggttagtaggtcttcaaggacaaatctgta

SEQ ID NO: 60764 - DNA, 120 bp, Artificial Sequence
  ENSG00000072210_23 (sequence is synthesized)
agtttcttatttctgtagtgcaagtaaaatttcactttttgaaactatagagagatccctttctgattagcctacagaacttaaagtgagggaaccatttcctctcacagacaaagaggc

SEQ ID NO: 60765 - DNA, 120 bp, Artificial Sequence
  ENSG00000072210_24 (sequence is synthesized)
ctgggatattaggactttggggtttgagagcatcatggggcagacagatggtggatggtctggacaagaagcgagtaagccactgcggttggtcatactgaagggaattgatggcaagag

SEQ ID NO: 60766 - DNA, 120 bp, Artificial Sequence
  ENSG00000072210_25 (sequence is synthesized)
gatcccctgagcaagtcagaagttactctcatcagtcgttcatggtcacaacctgaggtactctgctgagtgggcaaggctgaagaagaggcctgtggaatgcagcattacctgctggac

SEQ ID NO: 60767 - DNA, 120 bp, Artificial Sequence
  ENSG00000072210_26 (sequence is synthesized)
agagcagggcaggcagttctatgccttggagctcctgactgcagggactctgtccccacactcaaaaagactcagctcactcaatgagagaatgtgatttactttatagaacgtataatc

SEQ ID NO: 60768 - DNA, 120 bp, Artificial Sequence
  ENSG00000072210_27 (sequence is synthesized)
aactttgttgaataatttgttctattaaggctgtctaaagtatgtgatgtcttcatcatagtatgaagtgttgaaaattaataacgagcctagtttaggaaaaagctgcttaaaactgtg

SEQ ID NO: 60769 - DNA, 120 bp, Artificial Sequence
  ENSG00000072210_28 (sequence is synthesized)
gctctaagagagtaatcataaaataccttagataaaattgcactatggaattttcattgagtatgtttaaattattggcttgtctactaatacacatctgcttcaaaatgaacatatttc

SEQ ID NO: 60770 - DNA, 120 bp, Artificial Sequence
  ENSG00000072210_29 (sequence is synthesized)
ataaaattggcatcaattttaatgacgctcctggtatggaacctcagatataccctattggagacaatcctttgatcataaattctccccaactataaatcattttatgtctttatcata

SEQ ID NO: 60771 - DNA, 120 bp, Artificial Sequence
  ENSG00000072210_30 (sequence is synthesized)
tgaggagaaaggccctgttgatttttctggtagttcacagactgcgttggtccagtaagcagagatgaacaccagatttcaaaacccagccctgtctgttaagagtgaggcagaatatta

SEQ ID NO: 60772 - DNA, 120 bp, Artificial Sequence
  ENSG00000072210_31 (sequence is synthesized)
gagaagctctgagtaacggacgtgcgaggatgatgcttgtgcaagaaggaaatgaccgctgtcccggctccgcgggagacgaaccccggcttcccgccctcagggactagctctccaggg

SEQ ID NO: 60773 - DNA, 90 bp, Artificial Sequence
  ENSG00000072210_32 (sequence is synthesized)
tgaactgagtgaaaatacagccaagatcttggcaaagcttctccctcagtatttagacctagtgctgtggtgtgatctcggctcactgca

SEQ ID NO: 60774 - DNA, 120 bp, Artificial Sequence
  ENSG00000072210_33 (sequence is synthesized)
ttttaaaaaaaggtttgactttggaattcatggcagcaaatgtcgtgaaatcaaggtgtagtatacaatttaggggctactttctttgccttcctgaggctggaggtgtggtcggaagct

SEQ ID NO: 60775 - DNA, 120 bp, Artificial Sequence
  ENSG00000072210_34 (sequence is synthesized)
tacttgggtctctggtcaatatctgtctcttttgttcttttcccaagacctcggttcctcagtttgataatgcatcttggtaggatagaatattttagcctcatggaaaatacggaggcc

SEQ ID NO: 60776 - DNA, 120 bp, Artificial Sequence
  ENSG00000072210_35 (sequence is synthesized)
caggctgagtctgcattctccaatcttaccaaacccccaagaagcctccctcaggtgcagtgcagtgtgccaggcaggttcgagttcccaaagggtttggcaggcatgtttctctgtgag

SEQ ID NO: 60777 - DNA, 120 bp, Artificial Sequence
  ENSG00000072210_36 (sequence is synthesized)
ggtctagagaagcagcaatatataaaagaagcagcaatatataaaacctttagcagaaacaaaaaaatgtggtttgattcctggctcaatgaacttgggcaaggccttttctgagctctt

SEQ ID NO: 60778 - DNA, 120 bp, Artificial Sequence
  ENSG00000072210_37 (sequence is synthesized)
tcttgggcctcagcttgctcatctacagggtgagggagtaggtgtcagtgattccccaggccactttcaacccttccgctcaattctcattactaatagttgttaatatttctttggatt

SEQ ID NO: 60779 - DNA, 120 bp, Artificial Sequence
  ENSG00000072210_38 (sequence is synthesized)
caatctggaactaggtagagatttggttttcttttccactttgctgcttttctgctcctttctgagcttttaatcctctttttatcaaattaccttttatttaaaataaatgactttgaa

SEQ ID NO: 60780 - DNA, 120 bp, Artificial Sequence
  ENSG00000072210_39 (sequence is synthesized)
tctgtactgtatatttacctgaatagtctatttattgtaattacatttttctgaaatggcttttatgtacttaatagtttccttattttgttacactcttggattttattttattaatta

SEQ ID NO: 60781 - DNA, 120 bp, Artificial Sequence
  ENSG00000072210_40 (sequence is synthesized)
ccttactagaattagaagggatttagagcagaagtattgtacacaaagtaaagttccaataaagcttataagctacagaaggcattgtgggagatgtgggttttaaaaggtcgagaaaca

SEQ ID NO: 60782 - DNA, 120 bp, Artificial Sequence
  ENSG00000072210_41 (sequence is synthesized)
taagaggttaatgttgataaatttcattaggcctttgacaactaaatatgacatttgaaccttgagattgcagcagcccttcctcagtcttcaataggaaggattaaattcagtactact

SEQ ID NO: 60783 - DNA, 120 bp, Artificial Sequence
  ENSG00000072210_42 (sequence is synthesized)
tttgaattttagaaacaaaattgtataccagtttttgaattccatgtagagacttcagcttcctactgaaaatgctaggataataagttagtactctcatcttctgtctctactctgaca

SEQ ID NO: 60784 - DNA, 120 bp, Artificial Sequence
  ENSG00000072210_43 (sequence is synthesized)
ttagctagttgacagtggacagaatatagccttcattatcacgttgtcttactcttattgttattgttgttttttgaggaagggcataatcctttggcctaaaccgtgcttcctaggctt

SEQ ID NO: 60785 - DNA, 120 bp, Artificial Sequence
  ENSG00000072210_44 (sequence is synthesized)
cctagggatatgtagtccttttttgtacaatgcatgtagagtctcttcagacaggaggtgtctgagtcccagtgctgagcttgtgttgcaaggctggttgtgggtaggtttttaaagcag

SEQ ID NO: 60786 - DNA, 120 bp, Artificial Sequence
  ENSG00000072210_45 (sequence is synthesized)
aggtaccgctttgcccctgaccaggggtaaattcttcaataactgactctgtccggataaggaggataataatgctctaccagcttcagttaccgtgttaggggatcaataatatatgct

SEQ ID NO: 60787 - DNA, 120 bp, Artificial Sequence
  ENSG00000072210_46 (sequence is synthesized)
atgtagattaagccatagaaaagttaaagcttgaaacatttgttgggcagctgaaccatgaagtgaatgaaattaattcgccttcaagtggaaacatgagatccacaagccagcttttac

SEQ ID NO: 60788 - DNA, 120 bp, Artificial Sequence
  ENSG00000072210_47 (sequence is synthesized)
ttcacacttccaccttggagtcttgaatacctctctgtcttccttgcttgccatctgttctcttacttttgatgctgttattgtccaagatgttctctcttagaatagctggtaatgata

SEQ ID NO: 60789 - DNA, 120 bp, Artificial Sequence
  ENSG00000072210_48 (sequence is synthesized)
gcacaatgcatagatgggctcagtccacagaagctacgtgaattctcccagtaacagatgaggaaattgaggctcagagatgttcagtagcttgcctaaggttgcataagctagtgagtg

SEQ ID NO: 60790 - DNA, 120 bp, Artificial Sequence
  ENSG00000072210_49 (sequence is synthesized)
gcagagcccagattcaaaccagatacacttcaaaagcaagcgctctcagctactgtgccggatataccattcattcagaatagcgtgggctaagcccactctgtgttgtgagacagagaa

SEQ ID NO: 60791 - DNA, 120 bp, Artificial Sequence
  ENSG00000072210_50 (sequence is synthesized)
cattcagactaagacatgcatgacctgtcctgtgggagccactcttcaccagaggcacttctgcacacacccgcgtctcatgcattttccctggtcaaattcaaccatttgttctcctta

SEQ ID NO: 60792 - DNA, 120 bp, Artificial Sequence
  ENSG00000072210_51 (sequence is synthesized)
gtgtctttgttgctgagctcatgtaaaaaaacactggagtctccagattagttctatgtgggttcatgcttcccagatgccatcggactgtgtgttctcctcttgtccttggtcagttcc

SEQ ID NO: 60793 - DNA, 120 bp, Artificial Sequence
  ENSG00000072210_52 (sequence is synthesized)
ctctcccatccctcacagggactggtcttgacactctctgggttttactgaatgttacatgtttatgttgaagagattgctgatgttagacgttaggatttatttggcagtgcaagagtt

SEQ ID NO: 60794 - DNA, 120 bp, Artificial Sequence
  ENSG00000072210_53 (sequence is synthesized)
tctctgattttctgaggttttcccagcacaatggagacttttcctgacaatgttactctttgtacttgaaccccataccttatggctccaagatacattattaagctttggtggttgatg

SEQ ID NO: 60795 - DNA, 120 bp, Artificial Sequence
  ENSG00000072210_54 (sequence is synthesized)
tcctcaagagtaacaggagtctttcactgtctcttggcgccactgtcaaaaatggtgagctgtaagtcctgacatcatgtggttgtccttaggaattttaaaaaagttatatctgttctc

SEQ ID NO: 60796 - DNA, 120 bp, Artificial Sequence
  ENSG00000072210_55 (sequence is synthesized)
aagattacagctagatctagcaagaaattttaacgttcttctggccagtgatctgtgaagtacataatccaaagtattgtgtgtgcctaataaaatctttaaatgcccatttgagagggt

SEQ ID NO: 60797 - DNA, 120 bp, Artificial Sequence
  ENSG00000072210_56 (sequence is synthesized)
atctgaaaattagaaaataagaggtttcaggttctctctgctaaatccggtttagctactaagaagtgccaaatcatagaactgactctgtgctctgggtggtgtggctttctctgccct

SEQ ID NO: 60798 - DNA, 120 bp, Artificial Sequence
  ENSG00000072210_57 (sequence is synthesized)
tcagagattccaggtcagggttccaggttggcttcctaagtagaaatccatttgtcaaaaccagacaccctcagttagtgaatgtttagggcatgggtttctgcccatgcataggaaagg

SEQ ID NO: 60799 - DNA, 120 bp, Artificial Sequence
  ENSG00000072210_58 (sequence is synthesized)
tcttcccaagtggggcagggctccacaaagaggaggatggccttggaggctggctgacatcctgctttatacctgaacatcttgcaggcagagccaaaagccacaaccaggagagtctgt

SEQ ID NO: 60800 - DNA, 120 bp, Artificial Sequence
  ENSG00000072210_59 (sequence is synthesized)
accgaactctggtcatccaggactttcctttggctggactggaagaggggaaaggacattgggaggctgtttctcctcttttcctgcagcaggcaatggcttcactgtttaccaagtact

SEQ ID NO: 60801 - DNA, 120 bp, Artificial Sequence
  ENSG00000072210_60 (sequence is synthesized)
gtttgccgtgagctggcctgagaacttccctgctatgtaaaatattccacctcatttggaaaatactttctaagttccaaacaactgatttagaaatgagtttttaacttttttataaaa

SEQ ID NO: 60802 - DNA, 120 bp, Artificial Sequence
  ENSG00000072210_61 (sequence is synthesized)
attgccagataaatatatgaatctattttagttgcaagacattcaaacaacacaatgtaacaaatgaatatttgactgaattactgaattatatagctgttctggatgttttcccctcag

SEQ ID NO: 60803 - DNA, 120 bp, Artificial Sequence
  ENSG00000072210_62 (sequence is synthesized)
tgaggccacacgctacataggtaatggaaattctccttttcctatgggaagatggcaatttggcagtttttgctgacactacttattaacactagataaactattaaatatatagcattt

SEQ ID NO: 60804 - DNA, 120 bp, Artificial Sequence
  ENSG00000072210_63 (sequence is synthesized)
aattgttaaagtactaaatcctgctttctggtatactgtacctgtagcttttgttataaactatttaaaatgtctgtgtttctgtgtattgaatgatgccaccagcgttgctccagttgt

SEQ ID NO: 60805 - DNA, 120 bp, Artificial Sequence
  ENSG00000072210_64 (sequence is synthesized)
tcatatttacacataactccttttttcctcctaacaatcctgagaagcagaatagaacttgatgtaattatctgtagtttgtggatgggaaaacagcacaaagaaggaaatagcttggcc

SEQ ID NO: 60806 - DNA, 120 bp, Artificial Sequence
  ENSG00000072210_65 (sequence is synthesized)
actattccacaattaaccagtgacggtaccattccagaaataatgttttggtccatcatgcttgaccttattatttgtgtaccttctttgtgctttttcttctttgccttgaatatgtat

SEQ ID NO: 60807 - DNA, 120 bp, Artificial Sequence
  ENSG00000072210_66 (sequence is synthesized)
tactttgaatgttaagcacatttttctacagtaacatataaggtgacagaaaaattagacacattttgctggcaaagaagctgcaccacctagctttacttatcccctttatcagataag

SEQ ID NO: 60808 - DNA, 120 bp, Artificial Sequence
  ENSG00000072210_67 (sequence is synthesized)
gtgcaagaaggaaatgaccgctgtcccggctccgcgggagacgaaccccggcttcccgccctcagggactagctctccagggaactgggacggaccaggccatggagctcgaagtccggc

SEQ ID NO: 60809 - DNA, 120 bp, Artificial Sequence
  ENSG00000072210_68 (sequence is synthesized)
ggaggtgctgagagcgagcaagggttgcccgcacgctctcacctctcacccagcctataagagtacttctgctttcaaaaaagacatgtctgtggcatgaaaacatgccacacatacaca

SEQ ID NO: 60810 - DNA, 120 bp, Artificial Sequence
  ENSG00000072210_69 (sequence is synthesized)
aaaagtgccctcctgaactagagggcagatcctcacactgacttaacatgctggcatttaagaatatcaagaactgaataaagaaaatgatctgcccaactgcgggtagttcatctgtct

SEQ ID NO: 60811 - DNA, 120 bp, Artificial Sequence
  ENSG00000072210_70 (sequence is synthesized)
gagtcagaggttcttatgccttcctggggaggaagttatgatgccgcgaagaaattggcactgctgagttctacatgcagttgctacagggaggagtcttcatttagctttaagcgaaat

SEQ ID NO: 60812 - DNA, 120 bp, Artificial Sequence
  ENSG00000072210_71 (sequence is synthesized)
acagcttaaaaatatcttacctgtattctgtacatcaacttgtgatggattgaggccagttctggttcttggaatgatatttttctctttgttagagccattttgttctaatagctgtga

SEQ ID NO: 60813 - DNA, 120 bp, Artificial Sequence
  ENSG00000072210_72 (sequence is synthesized)
ctctgtgaagcatccctccaaaatcaaattgtatggaagattaaggaaacagtgaaggtttgtattaaaaacatctgattccactgattttaataagataaggagtcaaattaactattc

SEQ ID NO: 60814 - DNA, 120 bp, Artificial Sequence
  ENSG00000072210_73 (sequence is synthesized)
gcaggcagcatccccatttgtttctcccttcaggaaaatttcaaaatcatatgtgactcagtgaacttattgactaatatgaaaatgctatgtgtaccatagaatatatgctgggagcaa

SEQ ID NO: 60815 - DNA, 120 bp, Artificial Sequence
  ENSG00000072210_74 (sequence is synthesized)
ggttgcattggtgttaaatctacttaaactgtctagttgatttgttgatgattagttgtggcatatactttttttaaaaaagttaaataatcgtgtgtccgtggttttgagggaatgttg

SEQ ID NO: 60816 - DNA, 120 bp, Artificial Sequence
  ENSG00000072210_75 (sequence is synthesized)
ccaaccctttaggtataatcagagagactctttggcatattggccattgctgctgaaggttatcagtttttgtgtatgtagagggcctagggtggccagtagtttggaggagtgacttaa

SEQ ID NO: 60817 - DNA, 120 bp, Artificial Sequence
  ENSG00000072210_76 (sequence is synthesized)
ttaaataactacttacagtataccctttatataattaacaatctttcagcgtgtttaaagtaaatatttgcagtgagggaaccaaggaagactgcatgtagagtcctaagccaagacttg

SEQ ID NO: 60818 - DNA, 75 bp, Artificial Sequence
  ENSG00000072210_77 (sequence is synthesized)
accaaggaagactgcatgtagagtcctaagccaagacttgaagaaatataggatttaagttggtagaaaggaatg

SEQ ID NO: 60819 - DNA, 88 bp, Artificial Sequence
  ENSG00000072210_78 (sequence is synthesized)
taaaaatacaaaaaaatcagccggggatggtggtgcatgtcgagatttgcttgaaccctggcaagaatcgcttgaacccgggaggcaa

SEQ ID NO: 60820 - DNA, 87 bp, Artificial Sequence
  ENSG00000072210_79 (sequence is synthesized)
ggcagatgggcaacgtagcaaaatcttgtcgctacaagaaatacaaaaattcaggaattttatggagaaaatataaaagagtctcct

SEQ ID NO: 60821 - DNA, 120 bp, Artificial Sequence
  ENSG00000072210_80 (sequence is synthesized)
ccggggcgctctcagcaggatggccaacaccttccctccatccctacaccccgccgccccctggcccgtggccgcgctcggctcccgcactgctcactccaccccctacatcccagcccg

SEQ ID NO: 60822 - DNA, 89 bp, Artificial Sequence
  ENSG00000072210_81 (sequence is synthesized)
gaggtggctgaggcccggcgagaattcgagtgtggcgctggtgggctggcattgctgggggacccggggcaccctcctcagcaagggct

SEQ ID NO: 60823 - DNA, 120 bp, Artificial Sequence
  ENSG00000072210_82 (sequence is synthesized)
ggcggcgccggccagctgctccgagtgtggggcccattgagcctgcgcccacccagaactcgctctggcttgtgagcgccacgcgcagccccggttcctgcctgcgcctctccctccaca

SEQ ID NO: 60824 - DNA, 120 bp, Artificial Sequence
  ENSG00000072210_83 (sequence is synthesized)
caagcatctgacccctgtgactcttgaactgggagggaaaagtccatgttatattgataaagattgtgacctggacattgtttgcagctgttctggatgttttcccctcagacgcataac

SEQ ID NO: 60825 - DNA, 86 bp, Artificial Sequence
  ENSG00000072210_84 (sequence is synthesized)
ctctgctgtgcctggccaccccatctgggaagtgaggcgcgcctctgcctggctgccaccacgtctaggaagtgaggagcgtctct

SEQ ID NO: 60826 - DNA, 120 bp, Artificial Sequence
  ENSG00000072210_85 (sequence is synthesized)
accataaggtaagctttagagagaacagctagttagcataagcaactgtcaagagtcatgttccttctttgctgtaaaacaatgcaaaaaacaatgtgaaacaatgatggtttcttttgt

SEQ ID NO: 60827 - DNA, 120 bp, Artificial Sequence
  ENSG00000072210_86 (sequence is synthesized)
gtcatgtcagagtccatccactaagtgaggttgtgttccgaggttgctgtcttggttaatgagactctggggttatcacagcatccattcccctcctccctcgggttagatctgagtctg

SEQ ID NO: 60828 - DNA, 120 bp, Artificial Sequence
  ENSG00000072210_87 (sequence is synthesized)
cagggttgagtgtcacaaggtttttgattcacaaacatctcctgtataattggaagacttatatgtgccagcattaaatgcttttctgatgttaatccacagggcattgctgaataacag

SEQ ID NO: 60829 - DNA, 120 bp, Artificial Sequence
  ENSG00000072210_88 (sequence is synthesized)
cctgcacaaaatggcattcacacccactgtgtgggacaaagaccccgacactgtcacataaatggttgtgatatgatggattttagtttctaacatgacgctagcttcttgttagagtgg

SEQ ID NO: 60830 - DNA, 120 bp, Artificial Sequence
  ENSG00000072210_89 (sequence is synthesized)
tggaactgcatcacctggttgagcagttctgccactttctgcatggctcactcattcatgtcactaggtgaccagccgctactaagagaccatggcccaaatgttttctggagagcttct

SEQ ID NO: 60831 - DNA, 120 bp, Artificial Sequence
  ENSG00000072210_90 (sequence is synthesized)
gatggtaatgtatagatagtcatgtgacagcttttggagcttgtgagactattgagatacagatagctacaggtatttgaagtgagaccaaatgtgtggggctcagtaaagactgggtta

SEQ ID NO: 60832 - DNA, 120 bp, Artificial Sequence
  ENSG00000072210_91 (sequence is synthesized)
ttaacaaaacaatggtttgacatttaaaaccatggataatgtgggcaggaaggaaccctgaagccgaaagtaggctggccagggtataagtcaggtgtggagcacttcccagcagtgggt

SEQ ID NO: 60833 - DNA, 120 bp, Artificial Sequence
  ENSG00000072210_92 (sequence is synthesized)
cacccgaggtcactatagtccagacttgacgtttgccatgaacaattgtcaagggcttgctggcacccaagggtaaatgacgtttactagtcaagtgttcttgtgcttttctgagcctta

SEQ ID NO: 60834 - DNA, 120 bp, Artificial Sequence
  ENSG00000072210_93 (sequence is synthesized)
ggccaaacaaccatttatttcttaaaaaataggatgctaaatctaaagtcttaaatatttttacatttcataaagactaaataatacctattaatcatgtgttataatttaaagcagaga

SEQ ID NO: 60835 - DNA, 120 bp, Artificial Sequence
  ENSG00000072210_94 (sequence is synthesized)
taagaaagaaataataacagtttttaaagctggaatatagtctaagctgtccccttttaaagagtcttttgctgctgtgttggggagtacaactccaggttgtggctgagtaggcccaga

SEQ ID NO: 60836 - DNA, 120 bp, Artificial Sequence
  ENSG00000072210_95 (sequence is synthesized)
agttgggtatcagtcactttgctaaattaaccagttgagattgtttgtctatctggcatggtgtccccaaactcgagaattttcactgacacaaagccagaatgtgcatgctttgagcac

SEQ ID NO: 60837 - DNA, 120 bp, Artificial Sequence
  ENSG00000072210_96 (sequence is synthesized)
gaccctgtctcaaaaaaaaaaaaaaaagagaaaattatgtaccaggaagttcaggacaatagttcactatgtgttccaggcagagtaacttgggggatgaggtgctagggtcttgacatg

SEQ ID NO: 60838 - DNA, 120 bp, Artificial Sequence
  ENSG00000072210_97 (sequence is synthesized)
catggaaattggactatcatttttagtcataggactaaaaatggatccagatgagcacatgaagggagagttgcccagattcagggtatgtgggaagagagagtggttaaagatacttgt

SEQ ID NO: 60839 - DNA, 120 bp, Artificial Sequence
  ENSG00000072210_98 (sequence is synthesized)
gagattgaaaatatttgggaattggagaatgcttagttgagtgtggtgatgaattcaatttcaaaggaataagggcctctgcctccctttgaggcatttatactcttaacacagtggttc

SEQ ID NO: 60840 - DNA, 120 bp, Artificial Sequence
  ENSG00000072210_99 (sequence is synthesized)
tcaagctacatgttaccctagtgagccatttaaaaacaagtttgcaagccttaccctccaaagattcagctcgtctgaggcctccaggtgattctatgatgcattcagcattgaaaacta

SEQ ID NO: 60841 - DNA, 120 bp, Artificial Sequence
  ENSG00000072210_100 (sequence is synthesized)
ctgttggtgactctcgagtcagagcccaggcacatgcattttagcaagctgcaccagtgattccgaccacccagacttgagaattgctcttggtagaggttggatgaacaatgttcattt

SEQ ID NO: 60842 - DNA, 120 bp, Artificial Sequence
  ENSG00000072210_101 (sequence is synthesized)
tgatttgggatgaaattgggaactctcacaaggctttgaagtgatgcagcaattcagtaattttgtttgttttactaagtaaatattgattgtatgattattgacgttcttttaccttgg

SEQ ID NO: 60843 - DNA, 120 bp, Artificial Sequence
  ENSG00000072210_102 (sequence is synthesized)
taatttaccaaagctgtattttgatccttcgggtggtttcaccatcatgtgtaagtggtggaaataccagttcaaagaagaccaaaacaacaaagtggagcaaagattggcaaatggttt

SEQ ID NO: 60844 - DNA, 120 bp, Artificial Sequence
  ENSG00000072210_103 (sequence is synthesized)
ctgtaaagggctagatggtaaatatttcaggctttgcagatgttagggtctctgctgtaactaccgaacttactgtagggggaaagcaggcacagccaatgtgctaacaaataggcaact

SEQ ID NO: 60845 - DNA, 120 bp, Artificial Sequence
  ENSG00000072210_104 (sequence is synthesized)
ctgatgcagagcaagacttctttccccagcctgctcccactgtcagccccaggaggtgaaggcctgtgggtggactctaagagatccataagaacctttggaactatggacaatgacaga

SEQ ID NO: 60846 - DNA, 120 bp, Artificial Sequence
  ENSG00000072210_105 (sequence is synthesized)
tctctgtgtgtgtgcatgctttattttctggtcctcgacctgccaaaaagctgaaacttgctactatcatactactgttaaattacttgaggggtggggtgttagattctgtgaggatat

SEQ ID NO: 60847 - DNA, 120 bp, Artificial Sequence
  ENSG00000072210_106 (sequence is synthesized)
aaaaccagattgattttggggcatggctggattttgtacttactgaaattgaattgtgggtctttgtgacatttatatactcctgttgttttaaataggaattttatggagaaaatataa

SEQ ID NO: 60848 - DNA, 120 bp, Artificial Sequence
  ENSG00000072210_107 (sequence is synthesized)
ggcctgatggctgccagatgcatattctagcaggactctacattaacttgtagagtctaagacagggtcagtgaaccacagcctgctggccagctacccgtttttgtcactgaagttatt

SEQ ID NO: 60849 - DNA, 120 bp, Artificial Sequence
  ENSG00000072210_108 (sequence is synthesized)
ggaacacagccacacccacttgtttaatcatccacagctgctttcatgggacagtgacagagctgagtagttgcaacagaggctgaatggccctcagagcctaaattattacagaaaagt

SEQ ID NO: 60850 - DNA, 120 bp, Artificial Sequence
  ENSG00000072210_109 (sequence is synthesized)
ttgctgatctctggtctaagagattaaaacagcgtagaacttgattgcagaattctgagctgtctgatcaaagggttagccctttgatccttttggtattggactttccttgtcacttac

SEQ ID NO: 60851 - DNA, 120 bp, Artificial Sequence
  ENSG00000072210_110 (sequence is synthesized)
agctttgttcttgaatgtgcatgaaatcagcttaccacagaggtgaaggcaagaactctggtacaacagctttggtgagggatattttattaggcttgagtttttttcctccaaagttca

SEQ ID NO: 60852 - DNA, 120 bp, Artificial Sequence
  ENSG00000072210_111 (sequence is synthesized)
ctacctgataaagtttatctttggtgattagtcattatagggatgggcttgcaaagaggccctcatgatagctgccttctcaaagcagtttgcgtattttgagatgaaagaggaaatccg

SEQ ID NO: 60853 - DNA, 120 bp, Artificial Sequence
  ENSG00000072210_112 (sequence is synthesized)
taattaaagttaagatggaatgaggaaggcaattgtgtctgtggtgccctcagccgttcaactgaggatataacattgaaaatattgaccatatcagtgaagaatgggcttggaaaaggc

SEQ ID NO: 60854 - DNA, 88 bp, Artificial Sequence
  ENSG00000072210_113 (sequence is synthesized)
aatattgaccatatcagtgaagaatgggcttggaaaaggcaatggtaatagttgtgtttatgttttgtttaaaatttgaaagggggcc

SEQ ID NO: 60855 - DNA, 63 bp, Artificial Sequence
  ENSG00000072210_114 (sequence is synthesized)
caaaaatttgaaaggggtttggctcatcttacagtatcccagccttagtggaattggagatac

SEQ ID NO: 60856 - DNA, 69 bp, Artificial Sequence
  ENSG00000072210_115 (sequence is synthesized)
aggaactttttgttttctttctatatgtaaggtgggccaagttggggtatgttttcaagggttttttgg

SEQ ID NO: 60857 - DNA, 120 bp, Artificial Sequence
  ENSG00000072274_0 (sequence is synthesized)
agagcgtcgggatatcgggtggcggctcgggacggaggacgcgctagtgttcttctgtgtggcagttcagaatgatggatcaagctagatcagcattctctaacttgtttggtggagaac

SEQ ID NO: 60858 - DNA, 120 bp, Artificial Sequence
  ENSG00000072274_1 (sequence is synthesized)
cattgtcatatacccggttcagcctggctcggcaagtagatggcgataacagtcatgtggagatgaaacttgctgtagatgaagaagaaaatgctgacaataacacaaaggccaatgtca

SEQ ID NO: 60859 - DNA, 120 bp, Artificial Sequence
  ENSG00000072274_2 (sequence is synthesized)
caaaaccaaaaaggtgtagtggaagtatctgctatgggactattgctgtgatcgtctttttcttgattggatttatgattggctacttgggctattgtaaaggggtagaaccaaaaactg

SEQ ID NO: 60860 - DNA, 120 bp, Artificial Sequence
  ENSG00000072274_3 (sequence is synthesized)
agtgtgagagactggcaggaaccgagtctccagtgagggaggagccaggagaggacttccctgcagcacgtcgcttatattgggatgacctgaagagaaagttgtcggagaaactggaca

SEQ ID NO: 60861 - DNA, 120 bp, Artificial Sequence
  ENSG00000072274_4 (sequence is synthesized)
gcacagacttcaccggcaccatcaagctgctgaatgaaaattcatatgtccctcgtgaggctggatctcaaaaagatgaaaatcttgcgttgtatgttgaaaatcaatttcgtgaattta

SEQ ID NO: 60862 - DNA, 120 bp, Artificial Sequence
  ENSG00000072274_5 (sequence is synthesized)
aactcagcaaagtctggcgtgatcaacattttgttaagattcaggtcaaagacagcgctcaaaactcggtgatcatagttgataagaacggtagacttgtttacctggtggagaatcctg

SEQ ID NO: 60863 - DNA, 120 bp, Artificial Sequence
  ENSG00000072274_6 (sequence is synthesized)
ggggttatgtggcgtatagtaaggctgcaacagttactggtaaactggtccatgctaattttggtactaaaaaagattttgaggatttatacactcctgtgaatggatctatagtgattg

SEQ ID NO: 60864 - DNA, 120 bp, Artificial Sequence
  ENSG00000072274_7 (sequence is synthesized)
tcagagcagggaaaatcacctttgcagaaaaggttgcaaatgctgaaagcttaaatgcaattggtgtgttgatatacatggaccagactaaatttcccattgttaacgcagaactttcat

SEQ ID NO: 60865 - DNA, 120 bp, Artificial Sequence
  ENSG00000072274_8 (sequence is synthesized)
tctttggacatgctcatctggggacaggtgacccttacacacctggattcccttccttcaatcacactcagtttccaccatctcggtcatcaggattgcctaatatacctgtccagacaa

SEQ ID NO: 60866 - DNA, 120 bp, Artificial Sequence
  ENSG00000072274_9 (sequence is synthesized)
tctccagagctgctgcagaaaagctgtttgggaatatggaaggagactgtccctctgactggaaaacagactctacatgtaggatggtaacctcagaaagcaagaatgtgaagctcactg

SEQ ID NO: 60867 - DNA, 120 bp, Artificial Sequence
  ENSG00000072274_10 (sequence is synthesized)
tgagcaatgtgctgaaagagataaaaattcttaacatctttggagttattaaaggctttgtagaaccagatcactatgttgtagttggggcccagagagatgcatggggccctggagctg

SEQ ID NO: 60868 - DNA, 120 bp, Artificial Sequence
  ENSG00000072274_11 (sequence is synthesized)
caaaatccggtgtaggcacagctctcctattgaaacttgcccagatgttctcagatatggtcttaaaagatgggtttcagcccagcagaagcattatctttgccagttggagtgctggag

SEQ ID NO: 60869 - DNA, 120 bp, Artificial Sequence
  ENSG00000072274_12 (sequence is synthesized)
actttggatcggttggtgccactgaatggctagagggatacctttcgtccctgcatttaaaggctttcacttatattaatctggataaagcggttcttggtaccagcaacttcaaggttt

SEQ ID NO: 60870 - DNA, 120 bp, Artificial Sequence
  ENSG00000072274_13 (sequence is synthesized)
ctgccagcccactgttgtatacgcttattgagaaaacaatgcaaaatgtgaagcatccggttactgggcaatttctatatcaggacagcaactgggccagcaaagttgagaaactcactt

SEQ ID NO: 60871 - DNA, 120 bp, Artificial Sequence
  ENSG00000072274_14 (sequence is synthesized)
tagacaatgctgctttccctttccttgcatattctggaatcccagcagtttctttctgtttttgcgaggacacagattatccttatttgggtaccaccatggacacctataaggaactga

SEQ ID NO: 60872 - DNA, 120 bp, Artificial Sequence
  ENSG00000072274_15 (sequence is synthesized)
ttgagaggattcctgagttgaacaaagtggcacgagcagctgcagaggtcgctggtcagttcgtgattaaactaacccatgatgttgaattgaacctggactatgagaggtacaacagcc

SEQ ID NO: 60873 - DNA, 120 bp, Artificial Sequence
  ENSG00000072274_16 (sequence is synthesized)
aactgctttcatttgtgagggatctgaaccaatacagagcagacataaaggaaatgggcctgagtttacagtggctgtattctgctcgtggagacttcttccgtgctacttccagactaa

SEQ ID NO: 60874 - DNA, 120 bp, Artificial Sequence
  ENSG00000072274_17 (sequence is synthesized)
caacagatttcgggaatgctgagaaaacagacagatttgtcatgaagaaactcaatgatcgtgtcatgagagtggagtatcacttcctctctccctacgtatctccaaaagagtctcctt

SEQ ID NO: 60875 - DNA, 120 bp, Artificial Sequence
  ENSG00000072274_18 (sequence is synthesized)
tccgacatgtcttctggggctccggctctcacacgctgccagctttactggagaacttgaaactgcgtaaacaaaataacggtgcttttaatgaaacgctgttcagaaaccagttggctc

SEQ ID NO: 60876 - DNA, 120 bp, Artificial Sequence
  ENSG00000072274_19 (sequence is synthesized)
tagctacttggactattcagggagctgcaaatgccctctctggtgacgtttgggacattgacaatgagttttaaatgtgatacccatagcttccatgagaacagcagggtagtctggttt

SEQ ID NO: 60877 - DNA, 120 bp, Artificial Sequence
  ENSG00000072274_20 (sequence is synthesized)
ttaggcagcagcttttaatacagggtagataacctgtacttcaagttaaagtgaataaccacttaaaaaatgtccatgatggaatattcccctatctctagaattttaagtgctttgtaa

SEQ ID NO: 60878 - DNA, 120 bp, Artificial Sequence
  ENSG00000072274_21 (sequence is synthesized)
tgggaactgcctctttcctgttgttgttaatgaaaatgtcagaaaccagttatgtgaatgatctctctgaatcctaagggctggtctctgctgaaggttgtaagtggtcgcttactttga

SEQ ID NO: 60879 - DNA, 120 bp, Artificial Sequence
  ENSG00000072274_22 (sequence is synthesized)
gtgatcctccaacttcatttgatgctaaataggagataccaggttgaaagaccttctccaaatgagatctaagcctttccataaggaatgtagctggtttcctcattcctgaaagaaaca

SEQ ID NO: 60880 - DNA, 120 bp, Artificial Sequence
  ENSG00000072274_23 (sequence is synthesized)
gttaactttcagaagagatgggcttgttttcttgccaatgaggtctgaaatggaggtccttctgctggataaaatgaggttcaactgttgattgcaggaataaggccttaatatgttaac

SEQ ID NO: 60881 - DNA, 120 bp, Artificial Sequence
  ENSG00000072274_24 (sequence is synthesized)
ctcagtgtcatttatgaaaagaggggaccagaagccaaagacttagtatattttcttttcctctgtcccttcccccataagcctccatttagttctttgttatttttgtttcttccaaag

SEQ ID NO: 60882 - DNA, 120 bp, Artificial Sequence
  ENSG00000072274_25 (sequence is synthesized)
cacattgaaagagaaccagtttcaggtgtttagttgcagactcagtttgtcagactttaaagaataatatgctgccaaattttggccaaagtgttaatcttaggggagagctttctgtcc

SEQ ID NO: 60883 - DNA, 120 bp, Artificial Sequence
  ENSG00000072274_26 (sequence is synthesized)
ttttggcactgagatatttattgtttatttatcagtgacagagttcactataaatggtgtttttttaatagaatataattatcggaagcagtgccttccataattatgacagttatactg

SEQ ID NO: 60884 - DNA, 120 bp, Artificial Sequence
  ENSG00000072274_27 (sequence is synthesized)
tcggttttttttaaataaaagcagcatctgctaataaaacccaacagatactggaagttttgcatttatggtcaacacttaagggttttagaaaacagccgtcagccaaatgtaattgaa

SEQ ID NO: 60885 - DNA, 120 bp, Artificial Sequence
  ENSG00000072274_28 (sequence is synthesized)
taaagttgaagctaagatttagagatgaattaaatttaattaggggttgctaagaagcgagcactgaccagataagaatgctggttttcctaaatgcagtgaattgtgaccaagttataa

SEQ ID NO: 60886 - DNA, 120 bp, Artificial Sequence
  ENSG00000072274_29 (sequence is synthesized)
atcaatgtcacttaaaggctgtggtagtactcctgcaaaattttatagctcagtttatccaaggtgtaactctaattcccattttgcaaaatttccagtacctttgtcacaatcctaaca

SEQ ID NO: 60887 - DNA, 120 bp, Artificial Sequence
  ENSG00000072274_30 (sequence is synthesized)
cattatcgggagcagtgtcttccataatgtataaagaacaaggtagtttttacctaccacagtgtctgtatcggagacagtgatctccatatgttacactaagggtgtaagtaattatcg

SEQ ID NO: 60888 - DNA, 120 bp, Artificial Sequence
  ENSG00000072274_31 (sequence is synthesized)
ggaacagtgtttcccataattttcttcatgcaatgacatcttcaaagcttgaagatcgttagtatctaacatgtatcccaactcctataattccctatcttttagttttagttgcagaaa

SEQ ID NO: 60889 - DNA, 120 bp, Artificial Sequence
  ENSG00000072274_32 (sequence is synthesized)
cattttgtggtcattaagcattgggtgggtaaattcaaccactgtaaaatgaaattactacaaaatttgaaatttagcttgggtttttgttacctttatggtttctccaggtcctctact

SEQ ID NO: 60890 - DNA, 120 bp, Artificial Sequence
  ENSG00000072274_33 (sequence is synthesized)
taatgagatagtagcatacatttataatgtttgctattgacaagtcattttaactttatcacattatttgcatgttacctcctataaacttagtgcggacaagttttaatccagaattga

SEQ ID NO: 60891 - DNA, 120 bp, Artificial Sequence
  ENSG00000072274_34 (sequence is synthesized)
ccttttgacttaaagcagagggactttgtatagaaggtttgggggctgtggggaaggagagtcccctgaaggtctgacacgtctgcctacccattcgtggtgatcaattaaatgtaggta

SEQ ID NO: 60892 - DNA, 120 bp, Artificial Sequence
  ENSG00000072274_35 (sequence is synthesized)
tgaataagttcgaagctccgtgagtgaaccatcattataaacgtgatgatcagctgtttgtcatagggcagttggaaacggcctcctagggaaaagttcatagggtctcttcaggttctt

SEQ ID NO: 60893 - DNA, 120 bp, Artificial Sequence
  ENSG00000072274_36 (sequence is synthesized)
agtgtcacttacctagatttacagcctcacttgaatgtgtcactactcacagtctctttaatcttcagttttatctttaatctcctcttttatcttggactgacatttagcgtagctaag

SEQ ID NO: 60894 - DNA, 120 bp, Artificial Sequence
  ENSG00000072274_37 (sequence is synthesized)
tgaaaaggtcatagctgagattcctggttcgggtgttacgcacacgtacttaaatgaaagcatgtggcatgttcatcgtataacacaatatgaatacagggcatgcattttgcagcagtg

SEQ ID NO: 60895 - DNA, 120 bp, Artificial Sequence
  ENSG00000072274_38 (sequence is synthesized)
agtctcttcagaaaacccttttctacagttagggttgagttacttcctatcaagccagtacgtgctaacaggctcaatattcctgaatgaaatatcagactagtgacaagctcctggtct

SEQ ID NO: 60896 - DNA, 120 bp, Artificial Sequence
  ENSG00000072274_39 (sequence is synthesized)
tgagatgtcttctcgttaaggagatgggccttttggaggtaaaggataaaatgaatgagttctgtcatgattcactattctagaacttgcatgacctttactgtgttagctctttgaatg

SEQ ID NO: 60897 - DNA, 120 bp, Artificial Sequence
  ENSG00000072274_40 (sequence is synthesized)
ttcttgaaattttagactttctttgtaaacaaatgatatgtccttatcattgtataaaagctgttatgtgcaacagtgtggagattccttgtctgatttaataaaatacttaaacactga

SEQ ID NO: 60898 - DNA, 120 bp, Artificial Sequence
  ENSG00000072274_41 (sequence is synthesized)
agagcgtcgggatatcgggtggcggctcgggacggaggacgcgctagtgtgagtgcgggcttctagaactacaccgaccctcgtgtcctcccttcatcctgcggggctggctggagcggc

SEQ ID NO: 60899 - DNA, 120 bp, Artificial Sequence
  ENSG00000072274_42 (sequence is synthesized)
cgctccggtgctgtccagcagccatagggagccgcacggggagcgggaaagcggtcgcggccccaggcggggcggccgggatggagcggggccgcgagcctgtggggaaggggctgtggc

SEQ ID NO: 60900 - DNA, 120 bp, Artificial Sequence
  ENSG00000072274_43 (sequence is synthesized)
cctcagagcgtcgggatatcgggtggcggctcgggacggaggacgcgctagtgttcttctgtgtggcagttcagaatgatggatcaagctagatcagcattctctaacttggatttatga

SEQ ID NO: 60901 - DNA, 120 bp, Artificial Sequence
  ENSG00000072274_44 (sequence is synthesized)
taggccttggcctccttttatctcttacttgggttgcctgtcttaggtttgatctataacactcttctgtctcaagattttagagctgttccgataccataatgctcattaaatctaatg

SEQ ID NO: 60902 - DNA, 120 bp, Artificial Sequence
  ENSG00000072274_45 (sequence is synthesized)
gacagatttgtcatgaagaaactcaatgatcgtgtcatgagagaaggtccacagatgatgctccttctcacggatgcgaggccatcaaatcactttttgtctccgctgctctctctccat

SEQ ID NO: 60903 - DNA, 120 bp, Artificial Sequence
  ENSG00000072274_46 (sequence is synthesized)
gggaatgcctgtgctatagtcaactatgtacatattcagaggagtaaaggaaaacaagtttttaaggacaaatgacgaggattacaaaattactttgaggtaattattcttggctaccaa

SEQ ID NO: 60904 - DNA, 120 bp, Artificial Sequence
  ENSG00000072274_47 (sequence is synthesized)
gatcaataacaaggatgacaccagtccaaggttgacaggcagttgctaggcagattttctcacgagagaagttttttggtgcaaggttgcagtggcctttgtgtaaggttgtagtttttg

SEQ ID NO: 60905 - DNA, 120 bp, Artificial Sequence
  ENSG00000072274_48 (sequence is synthesized)
ttggaagcaaatgctacgctagaaaatatccgcaggacactggcggtgcagcagctcagtctcatgtttcaagggggtcttttggaaaaaactacctatgttttgaataggtagctattt

SEQ ID NO: 60906 - DNA, 120 bp, Artificial Sequence
  ENSG00000072274_49 (sequence is synthesized)
gaaataaagctagtatataatttattaagtggtttaaagtatacaaaactgagatgcattatatactttaaaactacttagaatttgatgaaaaccagtattttcaaggcttacctgaaa

SEQ ID NO: 60907 - DNA, 120 bp, Artificial Sequence
  ENSG00000072274_50 (sequence is synthesized)
agggcatatgatacgatagaacagggattctgtagaacctggaagaaagtagtcactctaggagtaggttagcttgagagaagtagcaagaatgtacttaaagcagcagataatgagata

SEQ ID NO: 60908 - DNA, 120 bp, Artificial Sequence
  ENSG00000072274_51 (sequence is synthesized)
gaattggggtaaattgcggtaggaatatgttagaagcaagggtggaactgtcgtcactgttacctcgatggcgaagccagaatgtgaggctcttgctcttagaactcacgtgagtaccat

SEQ ID NO: 60909 - DNA, 120 bp, Artificial Sequence
  ENSG00000072274_52 (sequence is synthesized)
cttatttgcagatctcctatcttgctctttgtaggttactttaaaaaaaattattcctattcttttattcttttacctggggtctcaaaaaaagattttgttagttttttttttcttttt

SEQ ID NO: 60910 - DNA, 120 bp, Artificial Sequence
  ENSG00000072274_53 (sequence is synthesized)
tggctcagaaaaaaaagattttggaatctgctatcttggaattagaccttctgattcatcttaagtgggataccttccatccttgtctgtgtataacctttcctcaggtaaagctaactt

SEQ ID NO: 60911 - DNA, 120 bp, Artificial Sequence
  ENSG00000072274_54 (sequence is synthesized)
aaatatagtttctctgcaaactcttcttgtaacttaaatttgtgaatttttattttattttagaattatttttttaaaaatccaatgtttggatttacctctgaagatttttctcaagat

SEQ ID NO: 60912 - DNA, 120 bp, Artificial Sequence
  ENSG00000072274_55 (sequence is synthesized)
gtgcatcatcatgcttacactgttttcaatgatctctgggtccagaagttaaggaactccaagaatgaaattgtgaaaggatgggtttcagcccagcagaagcattatctttgccagttg

SEQ ID NO: 60913 - DNA, 68 bp, Artificial Sequence
  ENSG00000072274_56 (sequence is synthesized)
tgctctgatatttttaaaaaaggtgacttggattaaagtatgcaaactcaaggagtagtacgagccca

SEQ ID NO: 60914 - DNA, 120 bp, Artificial Sequence
  ENSG00000072274_57 (sequence is synthesized)
tggattaaagtatgcaaactcaaggagtagtacgagcccacttgagtgaagttagcttagttgctaaagagcttgataccaaaattacttttgtttacttgatgaatgggatagttgttg

SEQ ID NO: 60915 - DNA, 120 bp, Artificial Sequence
  ENSG00000072274_58 (sequence is synthesized)
cacagggccactgatctagattactgtcttatttgtcaagtacttatagttgtagaagtagcagtgtgaaaattatcggaatggagaaggggcaatgataaaacaatttattttcaggta

SEQ ID NO: 60916 - DNA, 120 bp, Artificial Sequence
  ENSG00000072274_59 (sequence is synthesized)
ctgggctcaagtgatcctcccagctcggcctcccaaagtgttgggattgcagttgtgaactaccccacccggcctaggcccacttttaaaatgttaattaagaagaaaacattttttcct

SEQ ID NO: 60917 - DNA, 120 bp, Artificial Sequence
  ENSG00000072274_60 (sequence is synthesized)
caccataactaaaggaactgacaacatgagcctagttagtaataacttaaagttgagattgttttaactatcataaataatttcttttcaagaagatataatacaagttttttatttaaa

SEQ ID NO: 60918 - DNA, 120 bp, Artificial Sequence
  ENSG00000072274_61 (sequence is synthesized)
tccttgcatattctggaatcccagcagtttctttctgtttttgcgaggtaagtctgttcatttaaatgacaaatggagagaggctctctaaaaggaagtgatctgtatttgggaataggg

SEQ ID NO: 60919 - DNA, 120 bp, Artificial Sequence
  ENSG00000072274_62 (sequence is synthesized)
aggtattctttatcatcccttcccatattggacacgagcttgtgggcttaggctgttgtccagaagtgatgtttttataggtttgattttaccacttttgcctttgcgtttagtctcagt

SEQ ID NO: 60920 - DNA, 120 bp, Artificial Sequence
  ENSG00000072274_63 (sequence is synthesized)
agagtccagaattgaaaatgaatccctaatgctactgtatgtgataaataaacagatttatacttattagtgttttcccttctcttctagggatacctttcgtccctgcatttaaaggct

SEQ ID NO: 60921 - DNA, 120 bp, Artificial Sequence
  ENSG00000072310_0 (sequence is synthesized)
agcagagctgcggccgggggaacccagtttccgaggaacttttcgccggcgccgggccgcctctgaggccagggcaggacacgaacgcgcggagcggcggcggcgactgagagccggggc

SEQ ID NO: 60922 - DNA, 120 bp, Artificial Sequence
  ENSG00000072310_1 (sequence is synthesized)
cgcggcggcgctccctaggaagggccgtacgaggcggcgggcccggcgggcctcccggaggaggcggctgcgccatggacgagccacccttcagcgaggcggctttggagcaggcgctgg

SEQ ID NO: 60923 - DNA, 120 bp, Artificial Sequence
  ENSG00000072310_2 (sequence is synthesized)
gcgagccgtgcgatctggacgcggcgctgctgaccgacatcgaagacatgcttcagcttatcaacaaccaagacagtgacttccctggcctatttgacccaccctatgctgggagtgggg

SEQ ID NO: 60924 - DNA, 120 bp, Artificial Sequence
  ENSG00000072310_3 (sequence is synthesized)
cagggggcacagaccctgccagccccgataccagctccccaggcagcttgtctccacctcctgccacattgagctcctctcttgaagccttcctgagcgggccgcaggcagcgccctcac

SEQ ID NO: 60925 - DNA, 120 bp, Artificial Sequence
  ENSG00000072310_4 (sequence is synthesized)
ccctgtcccctccccagcctgcacccactccattgaagatgtacccgtccatgcccgctttctcccctgggcctggtatcaaggaagagtcagtgccactgagcatcctgcagaccccca

SEQ ID NO: 60926 - DNA, 120 bp, Artificial Sequence
  ENSG00000072310_5 (sequence is synthesized)
ccccacagcccctgccaggggccctcctgccacagagcttcccagccccagccccaccgcagttcagctccacccctgtgttaggctaccccagccctccgggaggcttctctacaggaa

SEQ ID NO: 60927 - DNA, 120 bp, Artificial Sequence
  ENSG00000072310_6 (sequence is synthesized)
gccctcccgggaacacccagcagccgctgcctggcctgccactggcttccccgccaggggtcccgcccgtctccttgcacacccaggtccagagtgtggtcccccagcagctactgacag

SEQ ID NO: 60928 - DNA, 120 bp, Artificial Sequence
  ENSG00000072310_7 (sequence is synthesized)
tcacagctgcccccacggcagcccctgtaacgaccactgtgacctcgcagatccagcaggtcccggtcctgctgcagccccacttcatcaaggcagactcgctgcttctgacagccatga

SEQ ID NO: 60929 - DNA, 120 bp, Artificial Sequence
  ENSG00000072310_8 (sequence is synthesized)
agacagacggagccactgtgaaggcggcaggtctcagtcccctggtctctggcaccactgtgcagacagggcctttgccgaccctggtgagtggcggaaccatcttggcaacagtcccac

SEQ ID NO: 60930 - DNA, 120 bp, Artificial Sequence
  ENSG00000072310_9 (sequence is synthesized)
tggtcgtagatgcggagaagctgcctatcaaccggctcgcagctggcagcaaggccccggcctctgcccagagccgtggagagaagcgcacagcccacaacgccattgagaagcgctacc

SEQ ID NO: 60931 - DNA, 120 bp, Artificial Sequence
  ENSG00000072310_10 (sequence is synthesized)
gctcctccatcaatgacaaaatcattgagctcaaggatctggtggtgggcactgaggcaaagctgaataaatctgctgtcttgcgcaaggccatcgactacattcgctttctgcaacaca

SEQ ID NO: 60932 - DNA, 120 bp, Artificial Sequence
  ENSG00000072310_11 (sequence is synthesized)
gcaaccagaaactcaagcaggagaacctaagtctgcgcactgctgtccacaaaagcaaatctctgaaggatctggtgtcggcctgtggcagtggagggaacacagacgtgctcatggagg

SEQ ID NO: 60933 - DNA, 120 bp, Artificial Sequence
  ENSG00000072310_12 (sequence is synthesized)
gcgtgaagactgaggtggaggacacactgaccccacccccctcggatgctggctcacctttccagagcagccccttgtcccttggcagcaggggcagtggcagcggtggcagtggcagtg

SEQ ID NO: 60934 - DNA, 120 bp, Artificial Sequence
  ENSG00000072310_13 (sequence is synthesized)
actcggagcctgacagcccagtctttgaggacagcaaggcaaagccagagcagcggccgtctctgcacagccggggcatgctggaccgctcccgcctggccctgtgcacgctcgtcttcc

SEQ ID NO: 60935 - DNA, 120 bp, Artificial Sequence
  ENSG00000072310_14 (sequence is synthesized)
tctgcctgtcctgcaaccccttggcctccttgctgggggcccgggggcttcccagcccctcagataccaccagcgtctaccatagccctgggcgcaacgtgctgggcaccgagagcagag

SEQ ID NO: 60936 - DNA, 120 bp, Artificial Sequence
  ENSG00000072310_15 (sequence is synthesized)
atggccctggctgggcccagtggctgctgcccccagtggtctggctgctcaatgggctgttggtgctcgtctccttggtgcttctctttgtctacggtgagccagtcacacggccccact

SEQ ID NO: 60937 - DNA, 120 bp, Artificial Sequence
  ENSG00000072310_16 (sequence is synthesized)
caggccccgccgtgtacttctggaggcatcgcaagcaggctgacctggacctggcccggggagactttgcccaggctgcccagcagctgtggctggccctgcgggcactgggccggcccc

SEQ ID NO: 60938 - DNA, 120 bp, Artificial Sequence
  ENSG00000072310_17 (sequence is synthesized)
tgcccacctcccacctggacctggcttgtagcctcctctggaacctcatccgtcacctgctgcagcgtctctgggtgggccgctggctggcaggccgggcagggggcctgcagcaggact

SEQ ID NO: 60939 - DNA, 120 bp, Artificial Sequence
  ENSG00000072310_18 (sequence is synthesized)
gtgctctgcgagtggatgctagcgccagcgcccgagacgcagccctggtctaccataagctgcaccagctgcacaccatggggaagcacacaggcgggcacctcactgccaccaacctgg

SEQ ID NO: 60940 - DNA, 120 bp, Artificial Sequence
  ENSG00000072310_19 (sequence is synthesized)
cgctgagtgccctgaacctggcagagtgtgcaggggatgccgtgtctgtggcgacgctggccgagatctatgtggcggctgcattgagagtgaagaccagtctcccacgggccttgcatt

SEQ ID NO: 60941 - DNA, 120 bp, Artificial Sequence
  ENSG00000072310_20 (sequence is synthesized)
ttcttcgtggatggggactggtccgtgctcagtaccccatgggagagcctgtacagcttggccgggaacccagtggaccccctggcccaggtgactcagctattccgggaacatctctta

SEQ ID NO: 60942 - DNA, 120 bp, Artificial Sequence
  ENSG00000072310_21 (sequence is synthesized)
gagcgagcactgaactgtgtgacccagcccaaccccagccctgggtcagctgatggggacaaggaattctcggatgccctcgggtacctgcagctgctgaacagctgttctgatgctgcg

SEQ ID NO: 60943 - DNA, 120 bp, Artificial Sequence
  ENSG00000072310_22 (sequence is synthesized)
ggggctcctgcctacagcttctccatcagttccagcatggccaccaccaccggcgtagacccggtggccaagtggtgggcctctctgacagctgtggtgatccactggctgcggcgggat

SEQ ID NO: 60944 - DNA, 120 bp, Artificial Sequence
  ENSG00000072310_23 (sequence is synthesized)
gaggaggcggctgagcggctgtgcccgctggtggagcacctgccccgggtgctgcaggagtctgagagacccctgcccagggcagctctgcactccttcaaggctgcccgggccctgctg

SEQ ID NO: 60945 - DNA, 120 bp, Artificial Sequence
  ENSG00000072310_24 (sequence is synthesized)
ggctgtgccaaggcagagtctggtccagccagcctgaccatctgtgagaaggccagtgggtacctgcaggacagcctggctaccacaccagccagcagctccattgacaaggccgtgcag

SEQ ID NO: 60946 - DNA, 120 bp, Artificial Sequence
  ENSG00000072310_25 (sequence is synthesized)
ctgttcctgtgtgacctgcttcttgtggtgcgcaccagcctgtggcggcagcagcagcccccggccccggccccagcagcccagggcaccagcagcaggccccaggcttccgcccttgag

SEQ ID NO: 60947 - DNA, 120 bp, Artificial Sequence
  ENSG00000072310_26 (sequence is synthesized)
ctgcgtggcttccaacgggacctgagcagcctgaggcggctggcacagagcttccggcccgccatgcggagggtgttcctacatgaggccacggcccggctgatggcgggggccagcccc

SEQ ID NO: 60948 - DNA, 120 bp, Artificial Sequence
  ENSG00000072310_27 (sequence is synthesized)
acacggacacaccagctcctcgaccgcagtctgaggcggcgggcaggccccggtggcaaaggaggcgcggtggcggagctggagccgcggcccacgcggcgggagcacgcggaggccttg

SEQ ID NO: 60949 - DNA, 120 bp, Artificial Sequence
  ENSG00000072310_28 (sequence is synthesized)
ctgctggcctcctgctacctgccccccggcttcctgtcggcgcccgggcagcgcgtgggcatgctggctgaggcggcgcgcacactcgagaagcttggcgatcgccggctgctgcacgac

SEQ ID NO: 60950 - DNA, 120 bp, Artificial Sequence
  ENSG00000072310_29 (sequence is synthesized)
tgtcagcagatgctcatgcgcctgggcggtgggaccactgtcacttccagctagaccccgtgtccccggcctcagcacccctgtctctagccactttggtcccgtgcagcttctgtcctg

SEQ ID NO: 60951 - DNA, 120 bp, Artificial Sequence
  ENSG00000072310_30 (sequence is synthesized)
cgtcgaagctttgaaggccgaaggcagtgcaagagactctggcctccacagttcgacctgcggctgctgtgtgccttcgcggtggaaggcccgaggggcgcgatcttgaccctaagaccg

SEQ ID NO: 60952 - DNA, 120 bp, Artificial Sequence
  ENSG00000072310_31 (sequence is synthesized)
gcggccatgatggtgctgacctctggtggccgatcggggcactgcaggggccgagccattttggggggcccccctccttgctctgcaggcaccttagtggcttttttcctcctgtgtaca

SEQ ID NO: 60953 - DNA, 120 bp, Artificial Sequence
  ENSG00000072310_32 (sequence is synthesized)
gggaagagaggggtacatttccctgtgctgacggaagccaacttggctttcccggactgcaagcagggctctgccccagaggcctctctctccgtcgtgggagagagacgtgtacatagt

SEQ ID NO: 60954 - DNA, 120 bp, Artificial Sequence
  ENSG00000072310_33 (sequence is synthesized)
gtaggtcagcgtgcttagcctcctgacctgaggctcctgtgctactttgccttttgcaaactttattttcatagattgagaagttttgtacagagaattaaaaatgaaattatttataat

SEQ ID NO: 60955 - DNA, 120 bp, Artificial Sequence
  ENSG00000072310_34 (sequence is synthesized)
ctgggttttgtgtcttcagctgatggatgtgctgactagtgagagtgcttgggccctcccccagcacctagggaaaggcttcccctccccctccggccacaaggtacacaacttttaact

SEQ ID NO: 60956 - DNA, 120 bp, Artificial Sequence
  ENSG00000072310_35 (sequence is synthesized)
tagctcttcccgatgtttgtttgttagtgggaggagtggggagggctggctgtatggcctccagcctacctgttccccctgctcccagggcacatggttgggctgtgtcaacccttaggg

SEQ ID NO: 60957 - DNA, 120 bp, Artificial Sequence
  ENSG00000072310_36 (sequence is synthesized)
cctccatggggtcagttgtcccttctcacctcccagctctgtccccatcaggtccctgggtggcacgggaggatggactgacttccaggacctgttgtgtgacaggagctacagcttggg

SEQ ID NO: 60958 - DNA, 120 bp, Artificial Sequence
  ENSG00000072310_37 (sequence is synthesized)
tctccctgcaagaagtctggcacgtctcacctcccccatcccggcccctggtcatctcacagcaaagaagcctcctccctcccgacctgccgccacactggagagggggcacaggggcgg

SEQ ID NO: 60959 - DNA, 120 bp, Artificial Sequence
  ENSG00000072310_38 (sequence is synthesized)
gggaggtttcctgttctgtgaaaggccgactccctgactccattcatgcccccccccccagcccctcccttcattcccattccccaacctaaagcctggcccggctcccagctgaatctg

SEQ ID NO: 60960 - DNA, 120 bp, Artificial Sequence
  ENSG00000072310_39 (sequence is synthesized)
gtcggaatccacgggctgcagattttccaaaacaatcgttgtatctttattgacttttttttttttttttttctgaatgcaatgactgttttttactcttaaggaaaataaacatctttt

SEQ ID NO: 60961 - DNA, 120 bp, Artificial Sequence
  ENSG00000072310_40 (sequence is synthesized)
cgctgctgaccgacatcgaaggtgaagtcggcgcggggaggggtagggccaacggcctggacgccccaagggcgggcgcagatcgcggagccatggattgcactttcgaagacatgcttc

SEQ ID NO: 60962 - DNA, 120 bp, Artificial Sequence
  ENSG00000072310_41 (sequence is synthesized)
ctgccctgcccacctcacccttggctgtagccctgcattcagctctagtcccttggttacctctggtcctgaaagagacctggtgcctccctttggccctaacccagccccatcaaagcg

SEQ ID NO: 60963 - DNA, 120 bp, Artificial Sequence
  ENSG00000072310_42 (sequence is synthesized)
tcctgggctagctttaggagctacagtagtccctaggcctccaagggcctaggctctgatttggggtcacatatccagcctttactcctggctctgttcctttcggcccacagaatctct

SEQ ID NO: 60964 - DNA, 120 bp, Artificial Sequence
  ENSG00000072310_43 (sequence is synthesized)
agagctcaggctctgaagtctgcagtcttgggcccgaccctgggctcagccccagcctagctgtggggcaagattgtgagccttgtggtgcccaccttgtccaggtattgtgatgcactc

SEQ ID NO: 60965 - DNA, 120 bp, Artificial Sequence
  ENSG00000072310_44 (sequence is synthesized)
gcagcagcaggcattgctttagacagcacaggtgctcgcaaaatggctgtatgtccgggaacaccagctcctgtgggtggctttctgtcctggtggcattgcccacacatacagctgtgt

SEQ ID NO: 60966 - DNA, 120 bp, Artificial Sequence
  ENSG00000072310_45 (sequence is synthesized)
gccaacaagggttgtgcaaataaggttgtgtttggatgtgtgtgatgccctgtttgggggtcagtctctgcctcactcacgcaccctcttctccttttcacagacatgcttcagcttatc

SEQ ID NO: 60967 - DNA, 120 bp, Artificial Sequence
  ENSG00000072310_46 (sequence is synthesized)
tctgctgtgatgtgagtagaggtctgtgcaggctttagaaactggggctccactcggctgcttgagatgccctgttactagcagtcctggtgtgcttgttgccggggtaggcgcaacctc

SEQ ID NO: 60968 - DNA, 120 bp, Artificial Sequence
  ENSG00000072310_47 (sequence is synthesized)
gcactggaggcctggcttgaagccagtgcatttgcatcagagcccaggcagggactgtccataggaagccacatggggcaatgactcatccaaggccagtcggtgatagagacctgaaga

SEQ ID NO: 60969 - DNA, 120 bp, Artificial Sequence
  ENSG00000072310_48 (sequence is synthesized)
ccgggaagaccctaacagatcctacctcccatttcatagacagaataactgaggcctggagccacgtggggtcccacagtaaggtgggcagaatcctgaccccccccttcccagccccat

SEQ ID NO: 60970 - DNA, 120 bp, Artificial Sequence
  ENSG00000072310_49 (sequence is synthesized)
ggagatggacagtaggcaggatgaataagtgctcgagaccaccacgtttggctcgttgcagagaaagcaggaagaggatggtgagggtcccctggtggtagccagggaaggcctccctga

SEQ ID NO: 60971 - DNA, 120 bp, Artificial Sequence
  ENSG00000072310_50 (sequence is synthesized)
gatggcggcaggcacagcagcagctagccagaccctgctgtctgcatcttacattctaaccctatgcccggcctgggaggtgggtgctactaggcgaggaacggttcaggtagaaggaac

SEQ ID NO: 60972 - DNA, 120 bp, Artificial Sequence
  ENSG00000072310_51 (sequence is synthesized)
aagtgcaaaggtcctgaggcagtaatgttgcaaagcagctccgcacccccttgctagggctctccaaccccacaacccccgacctgacaggccacctgtgcgctccccctccctcccaca

SEQ ID NO: 60973 - DNA, 120 bp, Artificial Sequence
  ENSG00000072310_52 (sequence is synthesized)
acctgccccgggtgctgcaggagtctgagtgagtgcacggcaggttcctcctgcctggtcccgggctcagccttcctcatcccctgggcactgtgcctcactcagcctttgttctgtgca

SEQ ID NO: 60974 - DNA, 120 bp, Artificial Sequence
  ENSG00000072310_53 (sequence is synthesized)
ggaggagtcaccaccttttttcctcagggaactcgagccagggaagtggggggcactcagccagggcttgtggactggtctgactggcactcttctgccctggtcccaacaggagacccc

SEQ ID NO: 60975 - DNA, 120 bp, Artificial Sequence
  ENSG00000072310_54 (sequence is synthesized)
cccctctcctgtccctcatcctcattcctgtcctgtcccttgtcgcctgaatctctggctgtctctggccaccccagtccttctccctgccatgggttgttgctgtgggggttgcaggaa

SEQ ID NO: 60976 - DNA, 120 bp, Artificial Sequence
  ENSG00000072310_55 (sequence is synthesized)
gggaaaggcctgggtgcctctcgttcccattggggctttcagaagcacatgcagggattgatgggcagatggctaattggagaagtgaccccaggcagtgccgctgtggagtaaggaagc

SEQ ID NO: 60977 - DNA, 120 bp, Artificial Sequence
  ENSG00000072310_56 (sequence is synthesized)
gcctgggcatctttgggagggacactcggggtgagcccccaggcttgtgaacttggggctctggatttcctgggagctgtgtccccagctttccctctgtccatagatggccctggctgg

SEQ ID NO: 60978 - DNA, 120 bp, Artificial Sequence
  ENSG00000072310_57 (sequence is synthesized)
gcaggccccggtggcaaaggaggtgagggggcagctgctgaccagggatgtgctgtctgctcagcagggaagggcgcacatgggatgtgataccaagggaggctgtgtgtgtgtcagacg

SEQ ID NO: 60979 - DNA, 120 bp, Artificial Sequence
  ENSG00000072310_58 (sequence is synthesized)
ggacagacaggcctggcgcagtggctcacacctagcactttgggaggctcagttgggaggacagcttgagcccaggagttggaggccgcagtgagcctgagtgacagggagagtccctgt

SEQ ID NO: 60980 - DNA, 120 bp, Artificial Sequence
  ENSG00000072310_59 (sequence is synthesized)
ctcaaaaaaaaaaaaagaccaagcatcttcttgatggttacctgatgacaattcctttcacaaggaatcagtggggtgactgtcatttgtgggatacatgactgcacgtgcgtgactcag

SEQ ID NO: 60981 - DNA, 120 bp, Artificial Sequence
  ENSG00000072310_60 (sequence is synthesized)
tctgtggactttgtgtgtgggctgagactagggtggggagaggggaacccgccaggcccccgccaggtacctgtgtgccaggtacaggcggctggtgccgtggcttgtgtgtgggcaggg

SEQ ID NO: 60982 - DNA, 120 bp, Artificial Sequence
  ENSG00000072310_61 (sequence is synthesized)
tgtatatgtatacatatatatacactatataacgaggccagatataatacacacgtttaccattttacagtcatatgtacaggaagttgctagggcggccctgggctgggggctgcgtca

SEQ ID NO: 60983 - DNA, 120 bp, Artificial Sequence
  ENSG00000072310_62 (sequence is synthesized)
ggcctatcgaagcgtggacagagctgaggacacggacggacaggcggacggactggcagggactggcccgggccggtggtggctgcgtggacaagtggcgtcgcggtagccccttacccg

SEQ ID NO: 60984 - DNA, 120 bp, Artificial Sequence
  ENSG00000072310_63 (sequence is synthesized)
gcaaaggcttcctttctcccccgcctagtccacggagctaggagccgccctccgcctcttccagtactgtttcgacccccacccccaagcccagggctcccagctgcacgccacgaccga

SEQ ID NO: 60985 - DNA, 120 bp, Artificial Sequence
  ENSG00000072315_0 (sequence is synthesized)
accccacatcacaaccacgacgggttgtccgcagctcgcagccaccccaaagggaggaataaagaacaggagcagagggaagccgggcgcagaaagaagggaaaaggaagagctcagggt

SEQ ID NO: 60986 - DNA, 120 bp, Artificial Sequence
  ENSG00000072315_1 (sequence is synthesized)
tggacatttttggagacaggggtggggaggataaagggagcgtgcctccttgattttcccctccccacccctctttgcttttctctccccttctctgtatagcatattccagaaacggca

SEQ ID NO: 60987 - DNA, 120 bp, Artificial Sequence
  ENSG00000072315_2 (sequence is synthesized)
gcagaaggggacagaaacctctagtgtagaaaagggttttggaggggtagccagcgctcccgccagccgctacctaacagctggagcttgagtgtgcgtgtaagagtgtgaatgcggctc

SEQ ID NO: 60988 - DNA, 120 bp, Artificial Sequence
  ENSG00000072315_3 (sequence is synthesized)
tctctctttttttctctctctctcccctctctctccatcccttccttcctccctccttctccctctccttcacactacagtgtcagctacccctgtcagtttccccgtgtcagtttcttc

SEQ ID NO: 60989 - DNA, 120 bp, Artificial Sequence
  ENSG00000072315_4 (sequence is synthesized)
cctagctcttattgtgtgtgactggctgcgtgaagggagtgggtgcgcttgaaggggctcaggttgggttagagagctgggagaacagggtagggacattggtagagcaaagagtttcag

SEQ ID NO: 60990 - DNA, 120 bp, Artificial Sequence
  ENSG00000072315_5 (sequence is synthesized)
ggcactggcgaaggtgaaaggtgaggagggccgatctgttacaggcaagtttggcaataactgagcatccaaaggggaagccaaggtaggagccagtacttgcgctcgtctttacacccc

SEQ ID NO: 60991 - DNA, 120 bp, Artificial Sequence
  ENSG00000072315_6 (sequence is synthesized)
gcccctttccctgtgctcatccgcccacccacccatcagcctagaggccccgggctgtcccagtcggctgctgtttcgcgccgcaaaagaggagtccggcaaggcgccgcaccacgcatc

SEQ ID NO: 60992 - DNA, 120 bp, Artificial Sequence
  ENSG00000072315_7 (sequence is synthesized)
ctggccggtggacatccagacgacacagattttatccgaaaaaaccacttggctcaggatttctgcattgctatgaaccatggcccaactgtactacaaaaaggtcaactactcaccgta

SEQ ID NO: 60993 - DNA, 120 bp, Artificial Sequence
  ENSG00000072315_8 (sequence is synthesized)
cagagaccgcatccccctgcaaattgtgagggctgagacagagctctctgcagaggagaaggccttcctcaatgctgtggagaagggggactatgccactgtgaagcaggcccttcagga

SEQ ID NO: 60994 - DNA, 120 bp, Artificial Sequence
  ENSG00000072315_9 (sequence is synthesized)
ggctgagatctactataatgttaacatcaactgcatggaccccttgggccggagtgccctgctcattgccattgagaacgagaacctggagatcatggagctactgctgaaccacagcgt

SEQ ID NO: 60995 - DNA, 120 bp, Artificial Sequence
  ENSG00000072315_10 (sequence is synthesized)
gtatgtgggtgatgcattgctctatgccatacgcaaggaagtggtgggcgctgtggagcttctgctcagctacaggcggcccagcggagagaagcaggtccccactctgatgatggacac

SEQ ID NO: 60996 - DNA, 120 bp, Artificial Sequence
  ENSG00000072315_11 (sequence is synthesized)
gcagttctctgaattcacaccggacatcactcccatcatgctggctgcccacaccaacaactacgaaatcatcaaattgcttgtccaaaaacgggtcactatcccacggccccaccagat

SEQ ID NO: 60997 - DNA, 120 bp, Artificial Sequence
  ENSG00000072315_12 (sequence is synthesized)
ccgctgcaactgtgtggagtgtgtgtctagttcagaggtagacagcctgcgccactctcgctcccgactgaacatctataaggctctggcaagcccctcactcattgccttatcaagtga

SEQ ID NO: 60998 - DNA, 120 bp, Artificial Sequence
  ENSG00000072315_13 (sequence is synthesized)
ggaccccatcctaactgccttccgtctgggctgggagctcaaggagctcagcaaggtggagaatgagttcaaggccgagtatgaggagctctctcagcagtgcaagctctttgccaaaga

SEQ ID NO: 60999 - DNA, 120 bp, Artificial Sequence
  ENSG00000072315_14 (sequence is synthesized)
cctgctggaccaagctcggagctccagggaactggagatcatcctcaaccatcgagatgaccacagtgaagagcttgaccctcagaagtaccatgacctggccaagttgaaggtggcaat

SEQ ID NO: 61000 - DNA, 120 bp, Artificial Sequence
  ENSG00000072315_15 (sequence is synthesized)
caaataccaccagaaagagtttgttgctcagcccaactgccaacagttgcttgccaccctgtggtatgatggcttccctggatggcggcggaaacactgggtagtcaagcttctaacctg

SEQ ID NO: 61001 - DNA, 120 bp, Artificial Sequence
  ENSG00000072315_16 (sequence is synthesized)
catgaccattgggttcctgtttcccatgctgtctatagcctacctgatctcacccaggagcaaccttgggctgttcatcaagaaaccctttatcaagtttatctgccacacagcatccta

SEQ ID NO: 61002 - DNA, 120 bp, Artificial Sequence
  ENSG00000072315_17 (sequence is synthesized)
tttgaccttcctctttatgcttctcctggcttctcagcacattgtcaggacagaccttcatgtacaggggcctcccccaactgtcgtggaatggatgatattgccttgggttctaggttt

SEQ ID NO: 61003 - DNA, 120 bp, Artificial Sequence
  ENSG00000072315_18 (sequence is synthesized)
catttggggtgagattaaggaaatgtgggatggtggatttactgaatacatccatgactggtggaacctgatggattttgcaatgaactccctctacctggcaactatttccctgaagat

SEQ ID NO: 61004 - DNA, 120 bp, Artificial Sequence
  ENSG00000072315_19 (sequence is synthesized)
tgtggcctatgtcaagtataatggttctcgtccaagggaggaatgggaaatgtggcacccgactctgattgcggaagcactcttcgcaatatccaacattttaagttcgttgcgtctcat

SEQ ID NO: 61005 - DNA, 120 bp, Artificial Sequence
  ENSG00000072315_20 (sequence is synthesized)
atccctgttcacagccaactcccacttaggacctctgcagatctctttgggacgcatgctgcttgatatcctcaaattcctctttatctactgcctggtactactagcttttgccaatgg

SEQ ID NO: 61006 - DNA, 120 bp, Artificial Sequence
  ENSG00000072315_21 (sequence is synthesized)
actgaaccagctttacttctattatgaaaccagagctatcgatgagcctaacaactgcaaggggatccgatgtgagaaacagaacaatgccttctccacgctctttgagactcttcagtc

SEQ ID NO: 61007 - DNA, 120 bp, Artificial Sequence
  ENSG00000072315_22 (sequence is synthesized)
actcttctggtctgtatttggccttttaaatctatatgtcaccaatgtgaaagccagacacgaattcaccgagtttgtaggagctaccatgtttggaacatacaatgtcatctccctggt

SEQ ID NO: 61008 - DNA, 120 bp, Artificial Sequence
  ENSG00000072315_23 (sequence is synthesized)
agtgctgctgaacatgctgattgctatgatgaacaactcctatcagcttattgccgatcatgctgatatcgagtggaagtttgcaaggacgaagctctggatgagttactttgatgaagg

SEQ ID NO: 61009 - DNA, 120 bp, Artificial Sequence
  ENSG00000072315_24 (sequence is synthesized)
ttctgccccaaaagagaccctgacggtagacggagaaggcgcaacttgagaagtttcacagaacgcaatgctgacagcctgatacaaaatcaacattatcaggaagttatcaggaattta

SEQ ID NO: 61010 - DNA, 120 bp, Artificial Sequence
  ENSG00000072315_25 (sequence is synthesized)
gtcaaaagatatgtggctgctatgataagaaattccaaaacacatgagggacttacagaagaaaattttaaggaattaaagcaagacatctccagctttcggtatgaagtgcttgacctc

SEQ ID NO: 61011 - DNA, 120 bp, Artificial Sequence
  ENSG00000072315_26 (sequence is synthesized)
ttgggaaatagaaaacatccaaggagcttttccactagcagcactgaactgtctcagagagacgataataatgatggcagtggtggggctcgggccaaatccaagagtgtctcttttaat

SEQ ID NO: 61012 - DNA, 120 bp, Artificial Sequence
  ENSG00000072315_27 (sequence is synthesized)
ttaggctgcaagaaaaagacttgccatgggccacctctcatcagaaccatgccaaggtccagtggtgcccaaggaaagtcaaaagctgagtcatcaagcaaacgctccttcatgggtcct

SEQ ID NO: 61013 - DNA, 120 bp, Artificial Sequence
  ENSG00000072315_28 (sequence is synthesized)
tctctcaagaaactgggtctcctattctccaaatttaatggtcatatgtctgaacccagttcagagccaatgtacacaatttctgatggaattgttcagcagcactgtatgtggcaggac

SEQ ID NO: 61014 - DNA, 120 bp, Artificial Sequence
  ENSG00000072315_29 (sequence is synthesized)
atcagatattctcagatggagaaagggaaagcagaggcctgttctcaaagtgaaattaacctcagtgaggtagaattaggtgaagtccagggcgctgctcagagcagtgaatgccctcta

SEQ ID NO: 61015 - DNA, 120 bp, Artificial Sequence
  ENSG00000072315_30 (sequence is synthesized)
gcctgttccagctctcttcactgtgcatccagcatctgctcctcaaattctaaacttttagactcctcagaggatgtatttgaaacttggggagaggcttgtgacttgctcatgcacaaa

SEQ ID NO: 61016 - DNA, 120 bp, Artificial Sequence
  ENSG00000072315_31 (sequence is synthesized)
tggggtgatggacaggaagaacaagttacaactcgcctctaagtcaagccctaatcatctgttctggaactcaacagaaatctgtaatttccttgctctcagaggtgacacagaatatga

SEQ ID NO: 61017 - DNA, 120 bp, Artificial Sequence
  ENSG00000072315_32 (sequence is synthesized)
ttccctcactgcccctgccccccagaaaggagagtgaaactcttatttgcaccatcttttatagccacattctccatttttgttcttgttttattattactttcattattatttgccttt

SEQ ID NO: 61018 - DNA, 120 bp, Artificial Sequence
  ENSG00000072315_33 (sequence is synthesized)
ttaatacctatacacactaagtccatcttacaaccgactgaaggggtgttgcacctaatcatcagaggtgcagttgggtgcttaacctttttgctttgcttttctcacccatgcttcctt

SEQ ID NO: 61019 - DNA, 120 bp, Artificial Sequence
  ENSG00000072315_34 (sequence is synthesized)
gaagccccaggtgccactttgctggtcttgttgccgcacagattcctgaccatcctcagaatctcatgccattttcccgcagagctgagggatgtggtcagcagtccccaccagctatca

SEQ ID NO: 61020 - DNA, 120 bp, Artificial Sequence
  ENSG00000072315_35 (sequence is synthesized)
gataaggcaaactaccctgcccatctttgttgccattcagtgctacgcgctgcccatgctgggtcaatgaacagcatcaaagggaggctgaagagatttcaaagaattgtcagcttgtgg

SEQ ID NO: 61021 - DNA, 120 bp, Artificial Sequence
  ENSG00000072315_36 (sequence is synthesized)
tttctgggtataagtggcttgtttcgttcttaaatactacaacttcttattgtgggggctattgagttttcttgtttcttaaagatgtgttagtttcctaatgtgtgccaatgaaatatt

SEQ ID NO: 61022 - DNA, 120 bp, Artificial Sequence
  ENSG00000072315_37 (sequence is synthesized)
taccccatagtatatgtcatatctaataagttaggcgaattatttttctgtttgtgtgtttcagttaacttactacatttgaaaatttgatagtatcaaaattagtatttagaatttgtg

SEQ ID NO: 61023 - DNA, 120 bp, Artificial Sequence
  ENSG00000072315_38 (sequence is synthesized)
ctattttttaaaaacatctactacactctaaccaatagtcactacatctcatacattggcaagataaatagttgtcatatttgttgggtcctattctactgttgatagttttaattatca

SEQ ID NO: 61024 - DNA, 120 bp, Artificial Sequence
  ENSG00000072315_39 (sequence is synthesized)
ttgctatcaaataatttctaagataaaagcctgaatttgaaatatttttatcagaaaaatggcatattgctgaagtgtcaaaatatgagaaaagagcatcttcattttaattaactgctt

SEQ ID NO: 61025 - DNA, 120 bp, Artificial Sequence
  ENSG00000072315_40 (sequence is synthesized)
tataaaaatggcaactttaggtatagataacctaattcaggttgcagttttaatattcattgggggcagtggaattgcatgtgtaaattatgttagatatatatcataacaaccctagtg

SEQ ID NO: 61026 - DNA, 120 bp, Artificial Sequence
  ENSG00000072315_41 (sequence is synthesized)
gattcatggaattataaacgtgatccaaattctactgtcttccaagaaagctacatttatacatccaaacaaattcttttccacagcttaagagtacctcatcagaatacagtggttcaa

SEQ ID NO: 61027 - DNA, 120 bp, Artificial Sequence
  ENSG00000072315_42 (sequence is synthesized)
gttaaaaaataaagtccataatgcatatggtcatcattctagacctgataaccactgagaacctgctgagcaaggacggcttttaccaacattagcacaaaggtttcctcagtttagact

SEQ ID NO: 61028 - DNA, 120 bp, Artificial Sequence
  ENSG00000072315_43 (sequence is synthesized)
ctaacatatgacctgaaacaactctaggtctgagtcctagagattacataaatagtgtgtagcccagaaaagtaaaataggtgtcacgctgttttttttaatgtcaacaccaataggaat

SEQ ID NO: 61029 - DNA, 120 bp, Artificial Sequence
  ENSG00000072315_44 (sequence is synthesized)
ccatttagattaatgtatgtaatttctgataaaagtaagagaaatgaggaactttcgaactgcaaatatgcctccaaactagcttttgataagtgtggtttctgttatttgaatggattc

SEQ ID NO: 61030 - DNA, 120 bp, Artificial Sequence
  ENSG00000072315_45 (sequence is synthesized)
ccatctttgtctctagcctggagaagagcaaaatggagggggaggggccagaaataggaggaggttttgaagaataaagcctcatatccaggaaaaagtgatcaagtgaaaaagctgcat

SEQ ID NO: 61031 - DNA, 120 bp, Artificial Sequence
  ENSG00000072315_46 (sequence is synthesized)
caagacccatttggcaagaggttgtccgaaaataattccttgatcatatctgaagtggttatttactcaaatcaatttctcccctgcttcgctaagactgtcataaaatggccttgacat

SEQ ID NO: 61032 - DNA, 120 bp, Artificial Sequence
  ENSG00000072315_47 (sequence is synthesized)
ttaatcacaggttactttccagaaaggtttctaaagttacagattcagcttttcaaattgtcaaattcactttgaataataatagaacctgggctacattcctaactcatattaacagca

SEQ ID NO: 61033 - DNA, 120 bp, Artificial Sequence
  ENSG00000072364_0 (sequence is synthesized)
gtcagtcacagccctggctgcaggagtccagctgccgtcgccgccgccagcggacggggcggggatcctggtgccaggtcttcgttaacccgcccccgccgcctcagtcagctgtcccag

SEQ ID NO: 61034 - DNA, 120 bp, Artificial Sequence
  ENSG00000072364_1 (sequence is synthesized)
cccgggcccgaccgtcatggagcggtgcggggcctacgcctgttccgtgtgaggcgcatcgctgccgccgccgccgacgccgccttcgtttgtcgaggcctccggaacccccgccgcctc

SEQ ID NO: 61035 - DNA, 120 bp, Artificial Sequence
  ENSG00000072364_2 (sequence is synthesized)
ccggagcccctcgcccttggcagcctgtcaccgccccctgggcgggctcgaatgcgcgtccggtgaaggtgcaggcccggcgccgccactgccgcagccaggagatggttcgggcctagc

SEQ ID NO: 61036 - DNA, 120 bp, Artificial Sequence
  ENSG00000072364_3 (sequence is synthesized)
ggagccgggactggagcaacatgaaccgtgaagaccggaatgtgctgcgtatgaaagaacgggaaaggcggaatcaggaaattcagcagggcgaagacgccttcccacctagctctcctc

SEQ ID NO: 61037 - DNA, 120 bp, Artificial Sequence
  ENSG00000072364_4 (sequence is synthesized)
tctttgcagagccatacaaagttactagcaaagaagataagttatcaagtcgtattcagagtatgcttggaaactacgatgaaatgaaggatttcataggagacagatctataccaaagc

SEQ ID NO: 61038 - DNA, 120 bp, Artificial Sequence
  ENSG00000072364_5 (sequence is synthesized)
ttgttgcaattcccaagcctacagtaccaccatcagcagatgaaaaatctaacccaaatttctttgaacagagacatggaggctctcatcagagtagcaaatggactccagtaggacccg

SEQ ID NO: 61039 - DNA, 120 bp, Artificial Sequence
  ENSG00000072364_6 (sequence is synthesized)
cacccagcacttctcagtctcagaaacggtcctcaggcttacagagtggacatagtagccagcggaccagcgcaggtagcagtagtggcactaacagtagtggtcagaggcacgaccgtg

SEQ ID NO: 61040 - DNA, 120 bp, Artificial Sequence
  ENSG00000072364_7 (sequence is synthesized)
agtcatataacaatagtgggagcagtagccggaaaaaaggccagcatggatcagaacactccaaatcacgttcttccagccctggaaaaccccaggctgtttcttcattaaactctagtc

SEQ ID NO: 61041 - DNA, 120 bp, Artificial Sequence
  ENSG00000072364_8 (sequence is synthesized)
attccaggtctcatgggaatgatcaccatagcaaggaacatcaacgctccaaatcacctcgggaccctgatgcaaactgggattctccttcccgtgtacctttttcaagtgggcagcact

SEQ ID NO: 61042 - DNA, 120 bp, Artificial Sequence
  ENSG00000072364_9 (sequence is synthesized)
caactcaatctttcccaccctcattgatgtcaaagtccaattcaatgttacagaaacccactgcctatgtgcggcccatggacggacaggagtccatggaaccaaagctgtcctctgagc

SEQ ID NO: 61043 - DNA, 120 bp, Artificial Sequence
  ENSG00000072364_10 (sequence is synthesized)
actacagcagccaatcccatggcaacagcatgactgagctgaagcccagcagcaaagcacatctcaccaagctgaaaataccttcccaaccactggatgcatcagcttctggtgatgtga

SEQ ID NO: 61044 - DNA, 120 bp, Artificial Sequence
  ENSG00000072364_11 (sequence is synthesized)
gctgtgtggatgaaatcctaaaagagatgacgcattcatggcctccccctctaacggctattcatacaccatgcaaaacagaaccttccaaatttccttttccaactaaggagtctcagc

SEQ ID NO: 61045 - DNA, 120 bp, Artificial Sequence
  ENSG00000072364_12 (sequence is synthesized)
agtccaattttggcactggagaacaaaaaagatataatccttctaaaacttcaaatgggcaccagtctaaatctatgttaaaagatgacttaaaactaagcagcagtgaagacagtgatg

SEQ ID NO: 61046 - DNA, 120 bp, Artificial Sequence
  ENSG00000072364_13 (sequence is synthesized)
gggaacaggattgtgataagacaatgccgaggagtacaccaggaagtaactctgaaccttcacaccataatagtgaaggagcagataactccagggatgattctagtagccacagtggat

SEQ ID NO: 61047 - DNA, 120 bp, Artificial Sequence
  ENSG00000072364_14 (sequence is synthesized)
ctgaaagcagctctggatctgactcagagagtgaaagtagttccagtgacagtgaggcaaatgagccatcccagagtgcatctcccgagcctgaacccccgccaacaaacaaatggcaac

SEQ ID NO: 61048 - DNA, 120 bp, Artificial Sequence
  ENSG00000072364_15 (sequence is synthesized)
ttgataattggctgaataaagtgaacccacataaagtgtcacccgcctcttcagtggacagtaacatcccatcatctcaaggctacaaaaaggaaggccgagagcagggcactgggaata

SEQ ID NO: 61049 - DNA, 120 bp, Artificial Sequence
  ENSG00000072364_16 (sequence is synthesized)
gctacactgatacaagtggacctaaagaaacgagttccgctactccgggacgagactccaaaaccatccaaaagggatcagaaagtgggcgtgggaggcagaaatctcctgcacagagtg

SEQ ID NO: 61050 - DNA, 120 bp, Artificial Sequence
  ENSG00000072364_17 (sequence is synthesized)
acagcacaacacagagaagaactgtaggcaaaaaacaacccaaaaaggctgagaaggcagctgctgaagagcctcgtggaggcctgaagatagaaagtgaaacccctgtagacttggcta

SEQ ID NO: 61051 - DNA, 120 bp, Artificial Sequence
  ENSG00000072364_18 (sequence is synthesized)
gcagcatgccctccagcagacacaaagcagccaccaaaggctcaaggaaacccaatataaagaaggagtctaagtcttcccctcgacctacagcagagaaaaagaaatataagtcaacaa

SEQ ID NO: 61052 - DNA, 120 bp, Artificial Sequence
  ENSG00000072364_19 (sequence is synthesized)
gtaaatcttcccagaaatcaagggaaatcatagaaacagatacctcatcctcagattcagatgaaagtgagagccttcctccttcctcacaaactcctaagtaccccgagagcaatagga

SEQ ID NO: 61053 - DNA, 120 bp, Artificial Sequence
  ENSG00000072364_20 (sequence is synthesized)
ctcctgttaaaccctcctcagtggaggaagaagatagcttttttcggcaacgaatgttctctcctatggaagagaaggaacttctttcacccctcagtgagcctgatgacaggtacccac

SEQ ID NO: 61054 - DNA, 120 bp, Artificial Sequence
  ENSG00000072364_21 (sequence is synthesized)
ttattgtgaagattgacctgaatcttttgactagaataccaggaaagccttacaaagaaacagagccgcccaagggggaaaagaaaaatgtgccagaaaagcacacgagagaggctcaga

SEQ ID NO: 61055 - DNA, 120 bp, Artificial Sequence
  ENSG00000072364_22 (sequence is synthesized)
aacaagcctcagaaaaagtttccaacaaaggcaagaggaagcataagaatgaagatgataaccgagccagtgagagcaagaaacccaaaacggaggacaagaattcagcaggccataagc

SEQ ID NO: 61056 - DNA, 120 bp, Artificial Sequence
  ENSG00000072364_23 (sequence is synthesized)
catccagcaacagagagtcatctaagcagagtgctgcaaaagaaaaggatttgttgccttctcccgctgggcctgttccttcaaaagatccaaaaacagagcatggctctcggaagagga

SEQ ID NO: 61057 - DNA, 120 bp, Artificial Sequence
  ENSG00000072364_24 (sequence is synthesized)
ctattagtcagtcttcttccttaaagtcaagcagtaacagcaacaaggagacgagtggcagcagcaaaaacagttcctccacatcaaagcagaagaagaccgaagggaagacttccagta

SEQ ID NO: 61058 - DNA, 120 bp, Artificial Sequence
  ENSG00000072364_25 (sequence is synthesized)
gctccaaggaggttaaggaaaaggctccaagtagctcctctaactgtcctccatctgcaccaactcttgattcttctaagcctcggagaacaaagcttgtctttgatgacagaaattatt

SEQ ID NO: 61059 - DNA, 120 bp, Artificial Sequence
  ENSG00000072364_26 (sequence is synthesized)
cagcagaccattatttacaagaagcaaaaaagctaaagcacaatgcagatgcattgtctgataggtttgagaaagctgtatactatcttgatgctgtggtatctttcattgaatgtggga

SEQ ID NO: 61060 - DNA, 120 bp, Artificial Sequence
  ENSG00000072364_27 (sequence is synthesized)
atgcattagagaagaatgctcaggaatccaaatccccattccctatgtattcagagacggtggatctcatcaaatacactatgaagctaaagaattacttggcaccagatgctacagctg

SEQ ID NO: 61061 - DNA, 120 bp, Artificial Sequence
  ENSG00000072364_28 (sequence is synthesized)
cagataaacgactcacagtactttgcctgcgatgcgagtctttgctgtacctgaggctgttcaaactgaagaaggaaaatgctctgaagtactcaaagacactgacagagcacctgaaga

SEQ ID NO: 61062 - DNA, 120 bp, Artificial Sequence
  ENSG00000072364_29 (sequence is synthesized)
attcttataataattctcaagcaccatcgcctggcttgggaagcaaagctgtggggatgccttcccctgtttctccaaagctgtcaccaggcaattcaggaaattattcatctggggcca

SEQ ID NO: 61063 - DNA, 120 bp, Artificial Sequence
  ENSG00000072364_30 (sequence is synthesized)
gtagtgcttctgcaagtggttcttcagtgaccattccacagaagatccaccagatggcagccagctatgttcaggtcacatccaacttcctctatgccaccgaaatttgggaccaagctg

SEQ ID NO: 61064 - DNA, 120 bp, Artificial Sequence
  ENSG00000072364_31 (sequence is synthesized)
aacagctttccaaagagcaaaaagaattctttgctgaactggataaagtaatgggccctctcatctttaatgcaagcatcatgacagatctagttcgttatacccggcagggactgcact

SEQ ID NO: 61065 - DNA, 120 bp, Artificial Sequence
  ENSG00000072364_32 (sequence is synthesized)
ggcttcgccaggatgccaagttgatatcttgaactgaacacattctcgttgcctctgattttctccacaacactgtgtcacatcacgaaggaaaactgccataacataccacctagtcga

SEQ ID NO: 61066 - DNA, 120 bp, Artificial Sequence
  ENSG00000072364_33 (sequence is synthesized)
cactaagaatgaggaatagttttctcctcgttggttcatgtgttgttgtttttgataatccaaagcgatcatgtcagttggccctttaatatttccaatgtgaaagattatttaaatgct

SEQ ID NO: 61067 - DNA, 120 bp, Artificial Sequence
  ENSG00000072364_34 (sequence is synthesized)
tttaaatctgcagcacattgataagatggtttccgtgagctatgataagattgaaattccagttgcaattcataactaatgaattgaaattttatttattttaatttttttaagttccca

SEQ ID NO: 61068 - DNA, 120 bp, Artificial Sequence
  ENSG00000072364_35 (sequence is synthesized)
gattggggctagtttaagacttagttatttctgcctataaatttactctgttgaatatttagcataaatttaatgtagacatttttatttatataccttgggagctttattacctaatat

SEQ ID NO: 61069 - DNA, 120 bp, Artificial Sequence
  ENSG00000072364_36 (sequence is synthesized)
ctttttgtggtagctgttctaagagtaagaattggttcgtctaaaataaggacatattctttctacacctgctacctgacctgatatttgaaatcttaactccaattttattattgtgga

SEQ ID NO: 61070 - DNA, 120 bp, Artificial Sequence
  ENSG00000072364_37 (sequence is synthesized)
atttacagttagtattaaggatattcttctacacatgaaaaaatcacttaaatatgagaaaatggcattctacatgtatgtactatgaaatgtgtctgatttggtatgcattatttcaaa

SEQ ID NO: 61071 - DNA, 120 bp, Artificial Sequence
  ENSG00000072364_38 (sequence is synthesized)
aactgtgaatgtgtgttaataacactacagcaatcacacagtgactatagcttgcatttaatgcattacaaaagagggaggacaaactttctagaagaagcatttcatgttgaagggttt

SEQ ID NO: 61072 - DNA, 120 bp, Artificial Sequence
  ENSG00000072364_39 (sequence is synthesized)
gttgctaatcatttgacacttaatcgaaacagaataagttactgtggaaaaaaggatgatccaactcctgaggattgccgcctgtgtgtctttaattgattatctttgatagttagagtt

SEQ ID NO: 61073 - DNA, 120 bp, Artificial Sequence
  ENSG00000072364_40 (sequence is synthesized)
atttttcagatttttccccctcatactggattgtgatgctctgatatgagcatgcaatgactgatacagaaataggctggagcttcggtgtgtgcttttgctatacagcttacagttcta

SEQ ID NO: 61074 - DNA, 120 bp, Artificial Sequence
  ENSG00000072364_41 (sequence is synthesized)
atgcctgatgtagagatgatgaatttctcctttttaaacctatcttctgtttactccttttgcattatgaaggccctcttcaatgatgtatgtttctgatggaatcagaaaatttcacac

SEQ ID NO: 61075 - DNA, 120 bp, Artificial Sequence
  ENSG00000072364_42 (sequence is synthesized)
tagaaaagtgtacctaacttgattcagtgtgagctcttgggacagggagtggagccaggggtagagcttaaagaagctggctctgtaagagttgtatatcaaagtaccttttgctacaag

SEQ ID NO: 61076 - DNA, 120 bp, Artificial Sequence
  ENSG00000072364_43 (sequence is synthesized)
gtgcatatagaagtctaagataagaaatgtaccctctatactttatttttcatgcccctatcatgtttggtgtgccttaaatcttacctttaaatgaagactctatggattgtttacaaa

SEQ ID NO: 61077 - DNA, 120 bp, Artificial Sequence
  ENSG00000072364_44 (sequence is synthesized)
tgaagttttacactaggaccagatcgtccatacatgattggtcttctacaataataatgttcaattctttcattttaaatctttctttagggtcatataaagattagttctttcagaaaa

SEQ ID NO: 61078 - DNA, 120 bp, Artificial Sequence
  ENSG00000072364_45 (sequence is synthesized)
gctattgctttggtacatgacttagtctaaccagttgggtaatgctgctttgaaaaatagtttgtccctctccccattccaaaaatgaatccattcagtcagaaaaaaagattatcctac

SEQ ID NO: 61079 - DNA, 120 bp, Artificial Sequence
  ENSG00000072364_46 (sequence is synthesized)
tatttgtagatgattgctaaggcttgaaataggaaaggggaaagaagggatagaaaagtttcaagtccagtagtgcagtgaatcctttgtgtttgagacttttttacacttatttctgaa

SEQ ID NO: 61080 - DNA, 120 bp, Artificial Sequence
  ENSG00000072364_47 (sequence is synthesized)
gttagtgaactttcattgtccctgtggcctcatatttatagagcttcttaactgttttgtacctcagattgtttttagatgtcattgaagattgagatgtacaaattatgttgaatttaa

SEQ ID NO: 61081 - DNA, 120 bp, Artificial Sequence
  ENSG00000072364_48 (sequence is synthesized)
cctgtttctcttggagaaattgcctctgatatctttctaacttaatcttagtgtgttctaggaacagttttccataagaggacaacttctcaatgatcatgatagttatttagtaagaaa

SEQ ID NO: 61082 - DNA, 120 bp, Artificial Sequence
  ENSG00000072364_49 (sequence is synthesized)
taatggttgttaatcaaatacatgttatgtcttgtccttctctgatttttctgacttggattccttaatttgcagtgatgtcttagaaatggaaaaagtatcctctgggctttcagactt

SEQ ID NO: 61083 - DNA, 120 bp, Artificial Sequence
  ENSG00000072364_50 (sequence is synthesized)
tcagcaacaacagccagtgggatacctctgagttcttgtgttctagtctcttgtatgtcctgaaaggcagcaggagcatttttggggtcacactgatattttgttaaagcagagtttcct

SEQ ID NO: 61084 - DNA, 120 bp, Artificial Sequence
  ENSG00000072364_51 (sequence is synthesized)
gcatggtttatggtgctgctctaatattttctctttaaaactgtgtcaatttttggagaatgaatttttcaaccttttcattgtggaggatttttcccacaaggtagtaatgggcaatgg

SEQ ID NO: 61085 - DNA, 120 bp, Artificial Sequence
  ENSG00000072364_52 (sequence is synthesized)
atcaaaatcctatcataaatgattgaattttcaatgtcatagtgtgtggaaatactactccctttcctccatgtctatcttcttagatgttctgtctttgtcatcatctgctccagcaca

SEQ ID NO: 61086 - DNA, 120 bp, Artificial Sequence
  ENSG00000072364_53 (sequence is synthesized)
tactttggactcctttacaggtgaccttcccccctccctcctcaataggtgtcctcagtgttttctaagcatttaaaactgaatttgacaagtggctaaaaacttagtctgagacttgta

SEQ ID NO: 61087 - DNA, 120 bp, Artificial Sequence
  ENSG00000072364_54 (sequence is synthesized)
cttagtatatggttaattatagaaacaacaactattttaaacagttactctgttgactgctctttatgactacacttgtatgccaggaggcagcagcctatacaccattagactctttac

SEQ ID NO: 61088 - DNA, 120 bp, Artificial Sequence
  ENSG00000072364_55 (sequence is synthesized)
aagcaaccaacgaaccaattgcagtggttgcagttgtcacagtagtcttgcctgggccagactgggctgggctgtgggaagcattccccttcaggggagtttccacagctcagcccaggc

SEQ ID NO: 61089 - DNA, 120 bp, Artificial Sequence
  ENSG00000072364_56 (sequence is synthesized)
tccagtctggctagagagcatccagcccattccttgcctcagtgccacctttttctgggcaagtagccaagaagtgactttatatgcagtgagtacttcagataaacttacagctacagc

SEQ ID NO: 61090 - DNA, 120 bp, Artificial Sequence
  ENSG00000072364_57 (sequence is synthesized)
tgccgaagagtggagaaggttgaccaccatttatttaattctctagtgtaaaaacaattgagagcagtgtgcgtgagcccacagacacctgtgtttctgggagctctggcagtggcggat

SEQ ID NO: 61091 - DNA, 120 bp, Artificial Sequence
  ENSG00000072364_58 (sequence is synthesized)
tcataggcacttgggctgcactttgaatgacacacttggctttattagattcactagtttttaaaaaattgttgttcgtttcttttcattaaaggtttaatcagacagatcagacagcat

SEQ ID NO: 61092 - DNA, 120 bp, Artificial Sequence
  ENSG00000072364_59 (sequence is synthesized)
aattttgtatttaatgacagaaacgttggtacatttcttcatgaatgagcttgcattctgaagcaagagcctacaaaaggcacttgttataaatgaaagttctggctctagaggccagta

SEQ ID NO: 61093 - DNA, 120 bp, Artificial Sequence
  ENSG00000072364_60 (sequence is synthesized)
ctctggagtttcagagcagccagtgattgttccagtcagtgatgcctagttatatagaggaggagtacactgtgcactcttctaggtgtaagggtatgcaactttggatcttaaaattct

SEQ ID NO: 61094 - DNA, 120 bp, Artificial Sequence
  ENSG00000072364_61 (sequence is synthesized)
gtacacatacacactttatatatatgtatgtatgtatgaaaacatgaaattagtttgtcaaatatgtgtgtgtttagtattttagcttagtgcaactatttccacattatttattaaatt

SEQ ID NO: 61095 - DNA, 120 bp, Artificial Sequence
  ENSG00000072364_62 (sequence is synthesized)
gatctaagacactttcttgttgacaccttgaatattaatgttcaagggtgcaatgtgtattcctttagattgttaaagcttaattactatgatttgtagtaaattaacttttaaaatgta

SEQ ID NO: 61096 - DNA, 120 bp, Artificial Sequence
  ENSG00000072364_63 (sequence is synthesized)
tttgagcccttctgtagtgtcgtagggctcttacagggtgggaaagattttaattttccagttgctaattgaacagtatggcctcattatatattttgatttataggagtttgtgtctgg

SEQ ID NO: 61097 - DNA, 120 bp, Artificial Sequence
  ENSG00000072364_64 (sequence is synthesized)
gtcccaggaacatctactggggatgactgttaggcagcttgtgatgatgttttttaaaaaacctaagtaacttggggagacagagcatttcaaacccatatagacacctatcatacctgt

SEQ ID NO: 61098 - DNA, 120 bp, Artificial Sequence
  ENSG00000072364_65 (sequence is synthesized)
atatcccctaatacatggaacataaatttcatttcagctttatgcattaatgtattgaagaggcaggctttttttccagtaataatactgtacatctaaggttgctattcagtaaaacta

SEQ ID NO: 61099 - DNA, 120 bp, Artificial Sequence
  ENSG00000072364_66 (sequence is synthesized)
atagaagagataattattgaataccttggaatatgtagtgagaagaggccaaatttttcatgtttgtgagcatgtctttcagatactcgctaatggagaaattcactttagacctctaga

SEQ ID NO: 61100 - DNA, 120 bp, Artificial Sequence
  ENSG00000072364_67 (sequence is synthesized)
ccccaaaaccaagttagcaagtgacaaaaagtaaattattaatagtctgtaaagtggatgctggtcttacaaagctcctattcacatgaaccctatggttaattagaaagaacttgctgt

SEQ ID NO: 61101 - DNA, 120 bp, Artificial Sequence
  ENSG00000072364_68 (sequence is synthesized)
ctccagaaaagggaatggaaataataactatgtatcttcttttcatgtaatttggtcacagaataaggtattcaagttaagtctaatccaagtcttagagatctttaagtatcctaaaat

SEQ ID NO: 61102 - DNA, 120 bp, Artificial Sequence
  ENSG00000072364_69 (sequence is synthesized)
agcagcctaagtagtcatcatgtaaagaagttgactttcaggaatgtcagcattgacctctccttgccactgttactcagctaaacataacttgccattcttaaaaataaaaaagctccc

SEQ ID NO: 61103 - DNA, 120 bp, Artificial Sequence
  ENSG00000072364_70 (sequence is synthesized)
acccagaaactctagtgatactcagttttgacctcttactgcttccatgtgggacttcttttcagcttttaaccattggaattttctacctgctatgttcctctctggaaaatatcaatt

SEQ ID NO: 61104 - DNA, 120 bp, Artificial Sequence
  ENSG00000072364_71 (sequence is synthesized)
tggaaatgctgcctttcaaatcaatgccatgatcatccatattgttgagtttgttgttggtgttccagaagtgtccccattttacaactttatgcacacacctggcaaatcattaacatg

SEQ ID NO: 61105 - DNA, 120 bp, Artificial Sequence
  ENSG00000072364_72 (sequence is synthesized)
agcattcaacagtactgggatgggtggggtgggggtagggggctcaccaacagaactggccagttgacattgcctgaaaaggcaccacctttaagggccagttgtggggttggtaagcac

SEQ ID NO: 61106 - DNA, 120 bp, Artificial Sequence
  ENSG00000072364_73 (sequence is synthesized)
agttatgaaaatttctatctagcctccgttttgaatggttttaagaaattttgtatatggaggatggaaatgcttatatatttattgaaaatccttttatttgaaattaaaattatttgg

SEQ ID NO: 61107 - DNA, 120 bp, Artificial Sequence
  ENSG00000072364_74 (sequence is synthesized)
tatataattgtttgatatttggggagggttttggaggggagataatgtcactgataaattaaaagcctgttgattttgcagaaaggtactgttagtgactgataaggatgcctttgtttt

SEQ ID NO: 61108 - DNA, 120 bp, Artificial Sequence
  ENSG00000072364_75 (sequence is synthesized)
gtacatgaaccaaatctttgttttacatttcttttatccaaaatatttaggcatctgacattttcaaccagaatttcaattatatactgtgatttttatttgttgcaatacattacaatt

SEQ ID NO: 61109 - DNA, 120 bp, Artificial Sequence
  ENSG00000072364_76 (sequence is synthesized)
tcagaggtactttggggctcaaaagctaggatttctaagtcagtatgtgcatttcacacgataaagctgttaatggtgagcaaagtattatatactaactagatttttccacatctgtat

SEQ ID NO: 61110 - DNA, 120 bp, Artificial Sequence
  ENSG00000072364_77 (sequence is synthesized)
agtatattatatgtattttgtggtattgagagtatagaaagtttagagtgtcaaacatgcgtttaatgtgtatttttaaacaaatttatggcaattaaaatatttggagacaagggtatc

SEQ ID NO: 61111 - DNA, 120 bp, Artificial Sequence
  ENSG00000072364_78 (sequence is synthesized)
acatttcaatttgtaaagatctttttaactctactgtgtcattaagatgctttgtacaatgccaaaccatagttggagaaactaagtttaataaatatcaaatagattttctgtattaaa

SEQ ID NO: 61112 - DNA, 120 bp, Artificial Sequence
  ENSG00000072364_79 (sequence is synthesized)
caaggaggttaaggtaaagtgttgggggcctggggcttttgaaaatcattcaacttgccatgtgacttttccagggtgacactgtgctttgaaattattgtaacatctcagtaaatatat

SEQ ID NO: 61113 - DNA, 120 bp, Artificial Sequence
  ENSG00000072364_80 (sequence is synthesized)
aggcctatgtcttttaccctctatatgtaataatcctgataaatgaatacagtgatataagactgtgaaggtggtaagtcagctggtcacatacatattgaaagaaaaacccttgggtac

SEQ ID NO: 61114 - DNA, 89 bp, Artificial Sequence
  ENSG00000072364_81 (sequence is synthesized)
agtggctcatatggaaggatcatttgaggaatttgagtccagcctgggcaatgtggtgagaccctgtctgtaaaagaactttaaaattt

SEQ ID NO: 61115 - DNA, 80 bp, Artificial Sequence
  ENSG00000072364_82 (sequence is synthesized)
cctcccaaagtgttgggattactggtgtgagccaccatgccctcgtatcctaatttttatgatctaatgggtagtagtgg

SEQ ID NO: 61116 - DNA, 120 bp, Artificial Sequence
  ENSG00000072364_83 (sequence is synthesized)
cctcgtatcctaatttttatgatctaatgggtagtagtgggttgagctgaaaaattgttatgctttaaaaaattcaagaactgtaagtcattggagatcaaaatacactacttttattaa

SEQ ID NO: 61117 - DNA, 120 bp, Artificial Sequence
  ENSG00000072364_84 (sequence is synthesized)
ctcttttttccctgttctgtttaattgggccagtcttaaaaatcatctggttactttatttcaaggtggtgtttaatatgtaatattttgaacttagggtcagatatagaaatgttggtt

SEQ ID NO: 61118 - DNA, 120 bp, Artificial Sequence
  ENSG00000072364_85 (sequence is synthesized)
aaactttgaggaggaaaagtacaagtagttaatagagtgaaagaagatttccttctcactgattggagattgtaatgaaattttaagaaagtatgttaaaagatgacttaaaactaagca

SEQ ID NO: 61119 - DNA, 120 bp, Artificial Sequence
  ENSG00000072364_86 (sequence is synthesized)
catatggattaaaaattgtcttgccattcctattctagtgggagacagacagtaaataagtgaataaatagataaattcagatagtgacaactgttatgaagataattagcagggtaatg

SEQ ID NO: 61120 - DNA, 120 bp, Artificial Sequence
  ENSG00000072364_87 (sequence is synthesized)
aatggaactgagagcatcttggatcaagaggtattaagaaagctttgaaggcaatatgcgagagagatttaaaagacattaatacagccggacacggtggctcactcctgtaatcccagc

SEQ ID NO: 61121 - DNA, 89 bp, Artificial Sequence
  ENSG00000072364_88 (sequence is synthesized)
tgtaatcccagcactttggaaggctgagccaagagactctcttgaggccaggagtttgcgaccagcctggtttggaaggaaaaaaaaaa

SEQ ID NO: 61122 - DNA, 120 bp, Artificial Sequence
  ENSG00000072364_89 (sequence is synthesized)
aaatgttagctgttttccttatcattgtcccttcctcccactctcctagcaagctcttcctgattagcgttttattatgtgccttgtatttgattacaggctgatttctgtaactattca

SEQ ID NO: 61123 - DNA, 120 bp, Artificial Sequence
  ENSG00000072364_90 (sequence is synthesized)
caggtttcataatttgaattgtaaactcctcaaagccagggagcatttattaatcttcttattacctacaccatagtgcctagcacacaattgtgcttaatatttattgactaagtatgt

SEQ ID NO: 61124 - DNA, 120 bp, Artificial Sequence
  ENSG00000072364_91 (sequence is synthesized)
agaattttggaggagctgtcatgaaaccagtatttataaatacaaatctggtttttagctgtataatttttatccttgacctggttgaaaacaaactgtaataattacatttcaggagat

SEQ ID NO: 61125 - DNA, 120 bp, Artificial Sequence
  ENSG00000072401_0 (sequence is synthesized)
gcacactcgcgcacactcgcgctcgggcgcacacggagcagggaccggcgcccggagcgagccagggagcggctaaccggggacccaccgcgcggagccagcctagctgccagcgagccc

SEQ ID NO: 61126 - DNA, 120 bp, Artificial Sequence
  ENSG00000072401_1 (sequence is synthesized)
aacccgcgacgacccacgcccctgagccccgcagccgacccctgccggccggtgtccccaccgccatccctgacccatggcgctgaagaggattcagaaagaattgagtgatctacagcg

SEQ ID NO: 61127 - DNA, 120 bp, Artificial Sequence
  ENSG00000072401_2 (sequence is synthesized)
cgatccacctgctcactgttcagctggacctgtgggagatgacttgttccactggcaagccactattatggggcctcctgatagcgcatatcaaggtggagtcttctttctcactgtaca

SEQ ID NO: 61128 - DNA, 120 bp, Artificial Sequence
  ENSG00000072401_3 (sequence is synthesized)
ttttccgacagattatccttttaaaccaccaaagattgctttcacaacaaaaatttaccatccaaacataaacagtaatggaagtatttgtctcgatattctgaggtcacaatggtcacc

SEQ ID NO: 61129 - DNA, 120 bp, Artificial Sequence
  ENSG00000072401_4 (sequence is synthesized)
agctctgactgtatcaaaagttttattgtccatatgttctctactttgtgatcctaatccagatgaccccttagtaccagatattgcacaaatctataaatcagacaaagaaaaatacaa

SEQ ID NO: 61130 - DNA, 120 bp, Artificial Sequence
  ENSG00000072401_5 (sequence is synthesized)
cagacatgcaagagaatggactcagaaatatgcaatgtaaaaatcaaaaacattttcatatataccagagtactgtaaaatctaggtttttttcaacattagcagtaaattgagcactgt

SEQ ID NO: 61131 - DNA, 120 bp, Artificial Sequence
  ENSG00000072401_6 (sequence is synthesized)
ttactgtttcattgtaccatgaaaccatttgatttttacccattttaaatgtgtttctgaagcaagacaaaacaaacttccaaaaatacccttaagactgtgatgagagcatttatcatt

SEQ ID NO: 61132 - DNA, 120 bp, Artificial Sequence
  ENSG00000072401_7 (sequence is synthesized)
ttgtatgcattgagaaagacatttattatggtttttaagatacttggacatctgcatcttcagcttacaagatctacaatgcagctgaaaagcaaccaaattattttttgctgaaactag

SEQ ID NO: 61133 - DNA, 120 bp, Artificial Sequence
  ENSG00000072401_8 (sequence is synthesized)
atgtttttacatgagaaatactgtatgtgttgtctaagatgtcagttttataaatctgtattcagatttcattctttgttagctcactttataatttgtatttttttactgtatagacta

SEQ ID NO: 61134 - DNA, 120 bp, Artificial Sequence
  ENSG00000072401_9 (sequence is synthesized)
aatatattctatttacatgtatgtcaactcattacttttttcctgtgaacagtattgaaaaaccccaacggctgataattaagtgaattaactgtgtctcccttgtcttaggatattctg

SEQ ID NO: 61135 - DNA, 120 bp, Artificial Sequence
  ENSG00000072401_10 (sequence is synthesized)
taactttattgcaatgtgaattaattgcactgctaagtaggaagatgtgtaacttttatttgttgctattcacatttgaattttttcctgtataggcaatattatattgacaccttttac

SEQ ID NO: 61136 - DNA, 120 bp, Artificial Sequence
  ENSG00000072401_11 (sequence is synthesized)
agatcttactgtagctttttccatataaataaaatgctttttctactatttgtcttgattacttaaaaaaataaaaatataagtaaggatcaaaactctaaaattttgcatgaaaattac

SEQ ID NO: 61137 - DNA, 120 bp, Artificial Sequence
  ENSG00000072401_12 (sequence is synthesized)
atccaaattgtgaaaatcagatctattttgtttgccattagtcaccattagttatataaattttattgttttaggttagtatctctttactaaattgtcagtctataagataatatatgt

SEQ ID NO: 61138 - DNA, 120 bp, Artificial Sequence
  ENSG00000072401_13 (sequence is synthesized)
tgatcccttgctgtagaggagaatttagagtaatttggggtttgtcttggattatatctaaatggattatttgttaaaagtactgaaatgagtataaggcagtatcacccatccaaaaga

SEQ ID NO: 61139 - DNA, 120 bp, Artificial Sequence
  ENSG00000072401_14 (sequence is synthesized)
aaggtctttatagacctgcacagtcactagattaattcattaaaatgcccccaccctgatgtaattgacattacatttcttaacattttaaaatctagaatttctaaaatggaatttaat

SEQ ID NO: 61140 - DNA, 120 bp, Artificial Sequence
  ENSG00000072401_15 (sequence is synthesized)
gccatcacaatttgaaaaactttttttttttttttactatagaagttacaaaggaagttctaaaattatgcctccctctgtttttataagttgccatcgaaaagtgatttaaataagcag

SEQ ID NO: 61141 - DNA, 120 bp, Artificial Sequence
  ENSG00000072401_16 (sequence is synthesized)
gttatctttatagattttaaagaaaactagaaagttttaatgttttaacttggggaaaaatacatctctttaatgtttagcatgcttgtcaaccttgagtgagtgtcatttttaagaaca

SEQ ID NO: 61142 - DNA, 120 bp, Artificial Sequence
  ENSG00000072401_17 (sequence is synthesized)
gttgtagcccttctgattattgcagtagctgtagaagtatgtaagaatatgtgatgggtgtagtcattagcaaagcatttaaatcacttgagtattttgtcatggttcattattattaaa

SEQ ID NO: 61143 - DNA, 120 bp, Artificial Sequence
  ENSG00000072401_18 (sequence is synthesized)
tgttagaaaatatgtgtttttataaatgaatgtaaaataattaaatgaattgtgaaatggatgtttaagaaaatataggcttaaaaagtaaatctataaaatgatgtcttaaaacagcca

SEQ ID NO: 61144 - DNA, 120 bp, Artificial Sequence
  ENSG00000072401_19 (sequence is synthesized)
tgtcttaaaacagccatatcatgaaaaattctacttagctatattattataagctacatttgccctgaatttgaacactcaacatcactagatttaaatatttagtatattttgatagta

SEQ ID NO: 61145 - DNA, 120 bp, Artificial Sequence
  ENSG00000072401_20 (sequence is synthesized)
aagggttttgtttcttgaatatcttcactttaaacaaaaaaaaaaaacaactttcatttgtgtggcatttatttttggaagtgtcttcttttttttctttattaaagtttttgaaacttg

SEQ ID NO: 61146 - DNA, 120 bp, Artificial Sequence
  ENSG00000072401_21 (sequence is synthesized)
atactctgtatttgaaaaatagatgtatatattctaggtgataaattaaaaatgaaagaatttaatcattggaaagtattaaatatatattgcttatcttctccaaggaagaggagttct

SEQ ID NO: 61147 - DNA, 120 bp, Artificial Sequence
  ENSG00000072401_22 (sequence is synthesized)
ctccaaggaagaggagttctctcgtacccatccaaactgacctaattctcaagctgcttcatcttgctagtactgtaggttcatttgcaatttgtagataatgctccttcaggattggct

SEQ ID NO: 61148 - DNA, 120 bp, Artificial Sequence
  ENSG00000072401_23 (sequence is synthesized)
tttgtaaatttctgttagaagctggtttctgcattttgatttttgtgtatttggatacattttcatataggttgcagagaaatccatgagttaaaaaattatttttcctgttttatttct

SEQ ID NO: 61149 - DNA, 120 bp, Artificial Sequence
  ENSG00000072401_24 (sequence is synthesized)
gcatgaacctaagtcacattgacccagtaattgatatatgtgtgattattgcaattaagtataagaaggtagaatatatagttttattagacagatgcttctgaaatattaattttgtat

SEQ ID NO: 61150 - DNA, 120 bp, Artificial Sequence
  ENSG00000072401_25 (sequence is synthesized)
agccatggttaattactttagatgctgctcaaccagtcataccggctactagagacttatttattacactgtccaaaatactcttcagttcctttgagggcaaaagaaggaagctgactt

SEQ ID NO: 61151 - DNA, 120 bp, Artificial Sequence
  ENSG00000072401_26 (sequence is synthesized)
gtttgtgttcacattctcactagctagaactgtgtgtagcacaaagtagataattatttgatttgtgttgatgacttttctcctctaaagttatgtaaagttgaggatattttaccctag

SEQ ID NO: 61152 - DNA, 120 bp, Artificial Sequence
  ENSG00000072415_0 (sequence is synthesized)
attctttatccggaatttcaagggccgccggagggctgtcgcttctgcagtgcgtaggagcggccggggcgggaggctccgcggagccgaggcgtggagaataagaaagccttgagtttt

SEQ ID NO: 61153 - DNA, 120 bp, Artificial Sequence
  ENSG00000072415_1 (sequence is synthesized)
gtgaaaaaccggagaagagaaactaaaaggacagtagaaaaggcttttccagtttgcataatatttccttcatggatactttttcatagcattattatgtgatgtgagaagttttttttt

SEQ ID NO: 61154 - DNA, 120 bp, Artificial Sequence
  ENSG00000072415_2 (sequence is synthesized)
ttgaagtaacatggattttatactacagaatcaagagaattggcttataggaaaaattgatttataaaaagtggtacaggttttcatagataaccatgacaacatcccatatgaatgggc

SEQ ID NO: 61155 - DNA, 120 bp, Artificial Sequence
  ENSG00000072415_3 (sequence is synthesized)
atgttacagaggaatcagacagcgaagtaaaaaatgttgatcttgcatcaccagaggaacatcagaagcaccgagagatggctgttgactgccctggagatttgggcaccaggatgatgc

SEQ ID NO: 61156 - DNA, 120 bp, Artificial Sequence
  ENSG00000072415_4 (sequence is synthesized)
caatacgtcgaagtgcacagttggagcgtattcggcaacaacaggaggacatgaggcgtaggagagaggaagaagggaaaaagcaagaacttgaccttaattcttccatgagacttaaga

SEQ ID NO: 61157 - DNA, 120 bp, Artificial Sequence
  ENSG00000072415_5 (sequence is synthesized)
aactagcccaaattcctccaaagaccggaatagataaccctatgtttgatacagaggaaggaattgtcttagaaagtcctcattatgctgtgaaaatattagaaatagaagacttgtttt

SEQ ID NO: 61158 - DNA, 120 bp, Artificial Sequence
  ENSG00000072415_6 (sequence is synthesized)
cttcacttaaacatatccaacatactttggtagattctcagagccaggaggatatttcactgcttttacaacttgttcaaaataaggatttccagaatgcatttaagatacacaatgcca

SEQ ID NO: 61159 - DNA, 120 bp, Artificial Sequence
  ENSG00000072415_7 (sequence is synthesized)
tcacagtacacatgaacaaggccagtcctccatttcctcttatctccaacgcacaagatcttgctcaagaggtacaaactgttttgaagccagttcatcataaggaaggacaagaactaa

SEQ ID NO: 61160 - DNA, 120 bp, Artificial Sequence
  ENSG00000072415_8 (sequence is synthesized)
ctgctttgctgaatactccacatattcaggcacttttactggcccacgataaggttgctgagcaggaaatgcagctagagcccattacagatgagagagtttatgaaagtattggccagt

SEQ ID NO: 61161 - DNA, 120 bp, Artificial Sequence
  ENSG00000072415_9 (sequence is synthesized)
atggaggagaaactgtaaaaatagttcgtatagaaaaggctcgtgatattccgttgggtgctacagttcgtaatgaaatggactctgtcatcattagccggatagtaaaagggggtgctg

SEQ ID NO: 61162 - DNA, 120 bp, Artificial Sequence
  ENSG00000072415_10 (sequence is synthesized)
cagagaaaagtggtctgttgcatgaaggagatgaagttctagagattaatggcattgaaattcgggggaaagatgtcaatgaggtttttgacttgttgtctgatatgcatggtactttga

SEQ ID NO: 61163 - DNA, 120 bp, Artificial Sequence
  ENSG00000072415_11 (sequence is synthesized)
cttttgtcctgattcccagtcaacagatcaagccgcctcctgccaaggaaacagtaatccatgtaaaagctcattttgactatgacccctcagatgacccttatgttccatgtcgagagt

SEQ ID NO: 61164 - DNA, 120 bp, Artificial Sequence
  ENSG00000072415_12 (sequence is synthesized)
taggtctgtcttttcaaaaaggtgatatacttcatgtgatcagtcaagaagatccaaactggtggcaggcctacagggaaggggacgaagataatcaacctctagccgggcttgttccag

SEQ ID NO: 61165 - DNA, 120 bp, Artificial Sequence
  ENSG00000072415_13 (sequence is synthesized)
ggaaaagctttcagcagcaaagggaagccatgaaacaaaccatagaagaagataaggagccagaaaaatcaggaaaactgtggtgtgcaaagaagaataaaaagaagaggaaaaaggttt

SEQ ID NO: 61166 - DNA, 120 bp, Artificial Sequence
  ENSG00000072415_14 (sequence is synthesized)
tatataatgccaataaaaatgatgattatgacaacgaggagatcttaacctatgaggaaatgtcactttatcatcagccagcaaataggaagagacctatcatcttgattggtccacaga

SEQ ID NO: 61167 - DNA, 120 bp, Artificial Sequence
  ENSG00000072415_15 (sequence is synthesized)
actgtggccagaatgaattgcgtcagaggctcatgaacaaagaaaaggaccgctttgcatctgcagttcctcatacaacccggagtaggcgagaccaagaagtagccggtagagattacc

SEQ ID NO: 61168 - DNA, 120 bp, Artificial Sequence
  ENSG00000072415_16 (sequence is synthesized)
actttgtttcgcggcaagcattcgaggcagacatagcagctggaaagttcattgagcatggtgaatttgagaagaatttgtatggaactagcatagattctgtacggcaagtgatcaact

SEQ ID NO: 61169 - DNA, 120 bp, Artificial Sequence
  ENSG00000072415_17 (sequence is synthesized)
ctggcaaaatatgtcttttaagtcttcgtacacagtcattgaagactctccggaattcagatttgaaaccatatattatcttcattgcacccccttcacaagaaagacttcgggcattat

SEQ ID NO: 61170 - DNA, 120 bp, Artificial Sequence
  ENSG00000072415_18 (sequence is synthesized)
tggccaaagaaggcaagaatccaaagcctgaagagttgagagaaatcattgagaagacaagagagatggagcagaacaatggccactactttgatacggcaattgtgaattccgatcttg

SEQ ID NO: 61171 - DNA, 120 bp, Artificial Sequence
  ENSG00000072415_19 (sequence is synthesized)
ataaagcctatcaggaattgcttaggttaattaacaaacttgatactgaacctcagtgggtaccatccacttggctgaggtgaaagaaacatccattctgtggcatgttggacttgatct

SEQ ID NO: 61172 - DNA, 120 bp, Artificial Sequence
  ENSG00000072415_20 (sequence is synthesized)
ggcaaaaactgccaataggaggactgcccgacactgcagcaagattgaggataagatggaaggcagcagtataagctgtagatctgttcttagatctcttgaattagtgagacgacagtt

SEQ ID NO: 61173 - DNA, 120 bp, Artificial Sequence
  ENSG00000072415_21 (sequence is synthesized)
cccttaggcagtttgtgcatggcatcctttattctctatacatggctttagcggttcttgcctcattttgggattctaaatggaagctttcaacagagcattccattttgtcctgttaaa

SEQ ID NO: 61174 - DNA, 120 bp, Artificial Sequence
  ENSG00000072415_22 (sequence is synthesized)
tccatgtctcacacaaatattgatgtgattattcttaagtgttaaatcattaacacttaaatgacttcattgggaatattgagcagagggactgtgcttctatgcactgggcaaggcagt

SEQ ID NO: 61175 - DNA, 120 bp, Artificial Sequence
  ENSG00000072415_23 (sequence is synthesized)
atttgcttaggaaactaatttagtcatcagagatactttcctaaaaaggaaaaataaaaaacaaaatggtgccactttgggttgaagctactttgttaggcttgaattcatttatatgtc

SEQ ID NO: 61176 - DNA, 120 bp, Artificial Sequence
  ENSG00000072415_24 (sequence is synthesized)
ttttgattcttaaaaaaacaaaaaacattccattagaagcaccagtttttttgctcagactttgtggatcagactctacactcaacacactctaatctacttaaaggtatacaaaatatg

SEQ ID NO: 61177 - DNA, 120 bp, Artificial Sequence
  ENSG00000072415_25 (sequence is synthesized)
ctgatcttttttaaattatgatttcctgaatttttttcttaagtcgtctcaactgatttactcacttagcttcccttccctcatcagcatagtataatagaatgtatgttacatttttat

SEQ ID NO: 61178 - DNA, 120 bp, Artificial Sequence
  ENSG00000072415_26 (sequence is synthesized)
gaatggcaggtgttcattataatctgtattgacttaaaaagtttcttcctcatgatgctaatagttttttgtatacatgggaggatagcacatttgacagtttttgcatttttatgtatg

SEQ ID NO: 61179 - DNA, 120 bp, Artificial Sequence
  ENSG00000072415_27 (sequence is synthesized)
agcacagtatcctatgactgtgctacgtatatataggtaataaactggaattctgttgatgaatatagctgctgtactgtatattaatatttaatagatcaacaaatggtcattgaaaac

SEQ ID NO: 61180 - DNA, 120 bp, Artificial Sequence
  ENSG00000072415_28 (sequence is synthesized)
acttgtttagcattagaataaaattatatatgtccttgggaaatattatgacagttgactttaagatcaaaaggaagggaagacctgaaagtcatttgaacattttaggaaaagaatatt

SEQ ID NO: 61181 - DNA, 120 bp, Artificial Sequence
  ENSG00000072415_29 (sequence is synthesized)
ggagagaaaaaggtattaaatatatagaaataggtttttaacctaacaaggtctgcctcttatgacgagaatgcaacagcttggtaaatcataaaagaaacatttaagctaataggattt

SEQ ID NO: 61182 - DNA, 120 bp, Artificial Sequence
  ENSG00000072415_30 (sequence is synthesized)
tcgtactgtctctatagctgtagctttaaaattcaacgtatataattggcatggaaacttaatttgcagtcttttcaagcctttaggatagtgtgatgtgtaacaaacaacctcaaatgt

SEQ ID NO: 61183 - DNA, 120 bp, Artificial Sequence
  ENSG00000072415_31 (sequence is synthesized)
gaatgccttgattttatttttatggtgactttagctacagcatttcctatacccagagctaaacactggaataatactgacatcatttaatttaacataagcaattatgtttaaggagta

SEQ ID NO: 61184 - DNA, 120 bp, Artificial Sequence
  ENSG00000072415_32 (sequence is synthesized)
atttgtgtcatgtacatatttgattgattttttttcttctacataattttatttgaacaaatgtagacagtttatatgtcgcctttttctgttcaaatttgcatggcctattaagttggc

SEQ ID NO: 61185 - DNA, 120 bp, Artificial Sequence
  ENSG00000072415_33 (sequence is synthesized)
tggagagtgttttatgtggaaatattttcaagataatgttccttaggaagaaaataacattcttgggttgagggaaggaatgccatacactactgtctcttcagatctgaaatactccag

SEQ ID NO: 61186 - DNA, 120 bp, Artificial Sequence
  ENSG00000072415_34 (sequence is synthesized)
tttagagccaggaaatttcacaggtcacaccgatttttagcattaaaaactaaggaatatacttagcacttacttaatcttttcagttttccagtttacgtctcaggaatgaagtgtagt

SEQ ID NO: 61187 - DNA, 120 bp, Artificial Sequence
  ENSG00000072415_35 (sequence is synthesized)
ctatggttgacaatggagttttgtgatcctgcttattgtaactgacaactgttttcaactccaagagctaaactattggcagttcatgttaagttagagtgagggtgtaggtagtgtcag

SEQ ID NO: 61188 - DNA, 120 bp, Artificial Sequence
  ENSG00000072415_36 (sequence is synthesized)
tgagtggctcttgtgcctgctgtagacattaggcctgcactagggccatgtgctgtcaagattcaggaacatggctttaacaagcagatcttgtatcaaggcagaggtgatgccatgcca

SEQ ID NO: 61189 - DNA, 120 bp, Artificial Sequence
  ENSG00000072415_37 (sequence is synthesized)
tacttttaggaagtctgagatgataaatatttcaaggtcagtgaagtctatcaatcattctccccttcctcatcagcaatggtagatagaaatgtcctaaacttttctaaatcctagtga

SEQ ID NO: 61190 - DNA, 120 bp, Artificial Sequence
  ENSG00000072415_38 (sequence is synthesized)
tgaggatgtgctgatattcaacatagtccttaaagtgaaaactgagttgttgctgacctccacaaaagaatatggaaaaaagccttgctgtacacctagttgtacagccactctggccaa

SEQ ID NO: 61191 - DNA, 120 bp, Artificial Sequence
  ENSG00000072415_39 (sequence is synthesized)
ttccatttcctgtccctctgtggttctgactggagaccccagtgtgggggaggtcttaccatttaatatagaaatgatatcaataactaatgctatgtacttggaaaatccaaataagga

SEQ ID NO: 61192 - DNA, 120 bp, Artificial Sequence
  ENSG00000072415_40 (sequence is synthesized)
agttttaggttggtgcataactttgtttctcaaattttcgttgtcagaacaaatggaaggagaatattatttagactaatccagatttgctttctatgaaaatctaatgtctggattatc

SEQ ID NO: 61193 - DNA, 120 bp, Artificial Sequence
  ENSG00000072415_41 (sequence is synthesized)
ttccttttctcatggcctaagaaataaggatcaataaggaatgatttgaatgtaattttgtgaatgtgtggaaaatataaagcagggatttagccttaataaaggtaaccttctgacatc

SEQ ID NO: 61194 - DNA, 120 bp, Artificial Sequence
  ENSG00000072415_42 (sequence is synthesized)
tgttgttaatccccctttgtactcttttcctgtatctgcactgttattttgagatgtcatactgtacactgtattgtaaaaataaaaagtaaaattatatttcaaattttaaaagccact

SEQ ID NO: 61195 - DNA, 120 bp, Artificial Sequence
  ENSG00000072415_43 (sequence is synthesized)
aagcaatttctcttgctatttgctcggccactcaaggtttccacacatgtaaagaccaccctcctcttcaagtttttgccaaaagcaagaccattggatcctccagctacaacacaaaat

SEQ ID NO: 61196 - DNA, 120 bp, Artificial Sequence
  ENSG00000072415_44 (sequence is synthesized)
actttttgatttgttctttacagagggatagtgccccctgttggcacaggtataggtaggtcctgtttccttaattattaaaaccaacaactaagtgtattaaagatggacaacgcaagg

SEQ ID NO: 61197 - DNA, 120 bp, Artificial Sequence
  ENSG00000072415_45 (sequence is synthesized)
cttcccccacacgctgcgcaaactccggccagcgggagacccctggcagccaggcgggcttcctcaggcgcgcgagctgcggccgtggagggtgtgagcccaacctttgtccctcggagc

SEQ ID NO: 61198 - DNA, 120 bp, Artificial Sequence
  ENSG00000072415_46 (sequence is synthesized)
cctctctccgaggtcgcgacgcgcgggactctcccggccgggtctgggaaatcggcgagggaacgctttcctttagaagtcagaatgtagtcagcgttcctctgcctgactcagctgctg

SEQ ID NO: 61199 - DNA, 120 bp, Artificial Sequence
  ENSG00000072415_47 (sequence is synthesized)
aatgtaagtaatgacagtttgaattccagaccaagatcctttgttttcgtggaaacgccgtataactattgtttactgttaccaacatagagctaaaagcatgtggcttaaatgttaagt

SEQ ID NO: 61200 - DNA, 120 bp, Artificial Sequence
  ENSG00000072415_48 (sequence is synthesized)
cactataacatgtttttttagatattaaagagttctgcatgggccctaacatttaaagccttgaaatttaccttttatatcaaaccacaaactttatgcaaaatactaaaaaagaatttt

SEQ ID NO: 61201 - DNA, 120 bp, Artificial Sequence
  ENSG00000072415_49 (sequence is synthesized)
caaaccacaaactttatgcaaaatactaaaaaagaattttcagattttgaatttctgatttccttaaagttttgtaaaatagtaataaatttgtaactacagtttaaattctttgatttt

SEQ ID NO: 61202 - DNA, 120 bp, Artificial Sequence
  ENSG00000072415_50 (sequence is synthesized)
atggaaacaaatagtttaacctcttagaatgtcagaggaatgctgatcacttaaaatgagacttcccagctgctggtcaaagggcattacttgctggagaaagaggggaaggatgaattt

SEQ ID NO: 61203 - DNA, 120 bp, Artificial Sequence
  ENSG00000072415_51 (sequence is synthesized)
aaaaaattctagagttctggacactagtgtagactgaacatgtttatgcgtatgaagtatatctcttctattttactctgcctaaaaattaagatactggtaatataggaaattggattt

SEQ ID NO: 61204 - DNA, 120 bp, Artificial Sequence
  ENSG00000072415_52 (sequence is synthesized)
ctgctgacctgtcttgattctcagctcttaaacaaatggttctattcgttggtacccttttcagtgggtctgtaccctttaggctatttcagtccctccagtctcaatcatttgcacttg

SEQ ID NO: 61205 - DNA, 120 bp, Artificial Sequence
  ENSG00000072415_53 (sequence is synthesized)
ttgtgaagcttatttagcttcccattgcccccttctcccgcaactaaaaccctttctcccttactagtttgaggttagcattgaaacagcttcggcatgccagcctgaaaatttttcttg

SEQ ID NO: 61206 - DNA, 120 bp, Artificial Sequence
  ENSG00000072415_54 (sequence is synthesized)
ctttgtggactatgtaaagatttttgtatttgtgttcgttttctggcagggatgggagcagggattctgatgaggatttgaaatgtagtcctttgaagctttctttctttcttatttttt

SEQ ID NO: 61207 - DNA, 120 bp, Artificial Sequence
  ENSG00000072415_55 (sequence is synthesized)
ttttaaacttataattggcaagttgagaagaaaagaattagggccagtaactgcctctgctgtcttcataagatggcctgttatttacacacaatgaggtaattctctagttcagtcatt

SEQ ID NO: 61208 - DNA, 120 bp, Artificial Sequence
  ENSG00000072415_56 (sequence is synthesized)
taccagcttctgaattgtcaaaggacttttttttttttttttaaagagagggagagtgcaattgctttggactgggaggactttttcacttttatgatgtatatagactacatgtatggg

SEQ ID NO: 61209 - DNA, 120 bp, Artificial Sequence
  ENSG00000072415_57 (sequence is synthesized)
ctagagtatttgtggagtgcctgcttaaaaattataatcttaatgctaaaactataggatacagtataatgtttctttaattctggaagaactttaggatctttcattgccttcattaaa

SEQ ID NO: 61210 - DNA, 120 bp, Artificial Sequence
  ENSG00000072415_58 (sequence is synthesized)
aggatagtctggaaagatttcttgtagaattagggacttgagggaggtcttgaaggtagaaatcaatggaaaagtagttcatcagtcatttgggcagaaagatgggatagacacaaatga

SEQ ID NO: 61211 - DNA, 120 bp, Artificial Sequence
  ENSG00000072415_59 (sequence is synthesized)
ggaaggtaaattagaaggctcatgcaggtgcgtagtaaaagatatagctagaaatcttggattcattttttgagtttgaagtttattctccaggtagtgtgaaagccatcagaagttctg

SEQ ID NO: 61212 - DNA, 120 bp, Artificial Sequence
  ENSG00000072415_60 (sequence is synthesized)
aacagaggagtggtttgctcatatacttaattaagcaaacacttagcaggtatcacggctatagaggtcaacaagacggatccctgccaattagataatttacctgtgtgatctacagtt

SEQ ID NO: 61213 - DNA, 120 bp, Artificial Sequence
  ENSG00000072415_61 (sequence is synthesized)
accttgaaattaatgtgtctaaacccatatttccctttacttctatctgattctcctatattctccatcataattagtgacattgtcatctacctaataagccagggatagtggttaaga

SEQ ID NO: 61214 - DNA, 120 bp, Artificial Sequence
  ENSG00000072415_62 (sequence is synthesized)
gtgatggttctggagttatactgcctaggttcatattctgaagccttctgttgtttggccttctgctgggcaatgttacggattcagagatgggtcagcctggttcctgacttcaaggag

SEQ ID NO: 61215 - DNA, 120 bp, Artificial Sequence
  ENSG00000072415_63 (sequence is synthesized)
cttctagtctgatgagatagaaaggcagagatataaatagcagtagtccaacttgatcaagaatgtgacagggattataggattccagaggacagtgtatttgagctcagacttaaaaga

SEQ ID NO: 61216 - DNA, 120 bp, Artificial Sequence
  ENSG00000072415_64 (sequence is synthesized)
gtaggcaaagatcagatcctaggcagtctgattctggaggcttttctcttaaacatgctgtcttgggtaactggatggatgtagtgacattagttagaattgaaaacagggagaggatta

SEQ ID NO: 61217 - DNA, 120 bp, Artificial Sequence
  ENSG00000072415_65 (sequence is synthesized)
attaaagagaataggagattaaagggaaatatgagtttaattttggacatatttctagattcttgtgggaaattctgatagatagaataatggtcagccgggcacggtggctcacgcctg

SEQ ID NO: 61218 - DNA, 120 bp, Artificial Sequence
  ENSG00000072415_66 (sequence is synthesized)
ctttatccggaatttcaagggccgccggagggctgtcgcttctgcagtgcgtaggagcggccggggcgggaggctccgcggagccgaggcgtggagaggaacatcagaagcaccgagaga

SEQ ID NO: 61219 - DNA, 120 bp, Artificial Sequence
  ENSG00000072415_67 (sequence is synthesized)
cggctgcggcggtgacggcggcgacggaggaggcaggcggtggggcgggggcggggactaaggattctgaggtggggagtcgggagtttctggattctttatccggaatttcaagggccg

SEQ ID NO: 61220 - DNA, 120 bp, Artificial Sequence
  ENSG00000072415_68 (sequence is synthesized)
gagggctgtcgcttctgcagtgcgtaggagcggccggggcgggaggctccgcggagccgaggcgtggagattttaagtttcttaaggatacggactctgcctcagcagcctttttcttga

SEQ ID NO: 61221 - DNA, 120 bp, Artificial Sequence
  ENSG00000072415_69 (sequence is synthesized)
caatgactatccaagtttttggtaccaagtgggtactcgccttgttgaatgaaaagaataagaaagccttgagttttgtgaaaaaccggagaagagaaactaaaaggacagtagaaaagg

SEQ ID NO: 61222 - DNA, 120 bp, Artificial Sequence
  ENSG00000072422_0 (sequence is synthesized)
gaggcggcagggcgaggcagtgccatgctgcctttgtgcaaagttgggcggcgggcggcgcgccgcgcgcaggggccccgcacacccgcgaccgcgcgcagccgtggctgctgctgagtg

SEQ ID NO: 61223 - DNA, 120 bp, Artificial Sequence
  ENSG00000072422_1 (sequence is synthesized)
cgcgcgcagccgtggctgctgctgagtggcgggggcccccccgctccccccggcccttgaaggcggagagagctcgcgtctcgctcggcttcagggtaagtccagctgtgagcagagtgt

SEQ ID NO: 61224 - DNA, 120 bp, Artificial Sequence
  ENSG00000072422_2 (sequence is synthesized)
tctgttcttcacttccagcaagccagagtttcataaatggacgctgacatggactacgaaagacccaacgttgaaactatcaaatgtgtggtcgtgggtgacaatgccgtggggaagacg

SEQ ID NO: 61225 - DNA, 120 bp, Artificial Sequence
  ENSG00000072422_3 (sequence is synthesized)
cgcttgatctgtgccagggcgtgcaacaccacactcacgcagtatcagctgctggccacccacgtgccaacagtgtgggcgattgaccagtaccgcgtgtgccaggaggtcttggagcgt

SEQ ID NO: 61226 - DNA, 120 bp, Artificial Sequence
  ENSG00000072422_4 (sequence is synthesized)
tctcgggatgttgttgatgaagtgagtgtttctctcaggctttgggatacttttggtgatcatcacaaagacagacgctttgcatatggcaggtctgatgttgtggtcctctgtttttcg

SEQ ID NO: 61227 - DNA, 120 bp, Artificial Sequence
  ENSG00000072422_5 (sequence is synthesized)
attgctaatcccaattccctaaatcatgtgaaaagcatgtggtatccagaaatcaagcacttttgccctcgaacacccgttatccttgttgggtgccagcttgatctccgctatgccgac

SEQ ID NO: 61228 - DNA, 120 bp, Artificial Sequence
  ENSG00000072422_6 (sequence is synthesized)
ctggaagctgttaatcgagccaggcgcccgttagcaaggcccataaagagaggggatattttgcccccagaaaaaggccgagaggtagcaaaggaacttggcttaccatactatgaaaca

SEQ ID NO: 61229 - DNA, 120 bp, Artificial Sequence
  ENSG00000072422_7 (sequence is synthesized)
agcgtgtttgaccagtttggtatcaaggatgtgtttgacaatgcaatccgagcagcgctgatttcccgcaggcacctgcaattctggaaatcccacctaaagaaagtccagaaaccttta

SEQ ID NO: 61230 - DNA, 120 bp, Artificial Sequence
  ENSG00000072422_8 (sequence is synthesized)
cttcaggcacccttcctacctccaaaagcccctccaccggtcatcaaaattccagagtgtccttccatggggacaaatgaagctgcctgtttactggacaatcctctatgtgccgatgtt

SEQ ID NO: 61231 - DNA, 120 bp, Artificial Sequence
  ENSG00000072422_9 (sequence is synthesized)
ctgttcatccttcaggaccaggaacacatctttgcacatcgaatttacctcgctacctcttcttccaaattttatgatctgtttttaatggaatgtgaagaatccccaaatgggagtgaa

SEQ ID NO: 61232 - DNA, 120 bp, Artificial Sequence
  ENSG00000072422_10 (sequence is synthesized)
ggagcctgtgagaaagagaagcagagcagagatttccaggggcggatattgagtgtcgacccagaggaagaaagggaggagggcccgcctaggattcctcaggccgaccagtggaagtct

SEQ ID NO: 61233 - DNA, 120 bp, Artificial Sequence
  ENSG00000072422_11 (sequence is synthesized)
tcaaacaagagcctggtggaggctctggggctggaagccgagggtgcagttcctgagacacagactttgaccggatggagtaaggggttcattggcatgcacagggaaatgcaagtcaac

SEQ ID NO: 61234 - DNA, 120 bp, Artificial Sequence
  ENSG00000072422_12 (sequence is synthesized)
cccatttcaaagcggatggggcccatgactgtggtcaggatggacgcttcagtccagccaggcccttttcggaccctgctccagtttctttatacgggacaactggatgaaaaggaaaag

SEQ ID NO: 61235 - DNA, 120 bp, Artificial Sequence
  ENSG00000072422_13 (sequence is synthesized)
gatttggtgggcctggctcagatcgcagaggtcctcgagatgttcgatttgaggatgatggtggaaaacatcatgaacaaggaagccttcatgaaccaggagattacgaaagcctttcac

SEQ ID NO: 61236 - DNA, 120 bp, Artificial Sequence
  ENSG00000072422_14 (sequence is synthesized)
gtaaggaaagccaatcggataaaagagtgtctcagcaagggaacgttctcggacgtgacatttaaattggacgatggagccatcagtgcccacaagccgctgctgatctgtagctgtgag

SEQ ID NO: 61237 - DNA, 120 bp, Artificial Sequence
  ENSG00000072422_15 (sequence is synthesized)
tggatggcagccatgttcggggggtcatttgtggaaagtgccaacagtgaggtgtatctcccgaacataaacaagatatcaatgcaagcagtattggattatctctataccaagcagttg

SEQ ID NO: 61238 - DNA, 120 bp, Artificial Sequence
  ENSG00000072422_16 (sequence is synthesized)
tctcctaacttggatctggacccgctggaattaattgccttggcaaacagattttgcctgccacacttggttgcacttgcagaacagcatgccgttcaggagttgaccaaagccgccacg

SEQ ID NO: 61239 - DNA, 120 bp, Artificial Sequence
  ENSG00000072422_17 (sequence is synthesized)
agtggcgtgggcattgacggagaagtgctctcttacttggaattggctcagtttcacaatgcccaccagttggccgcctggtgtttgcaccacatctgcaccaactacaacagtgtatgc

SEQ ID NO: 61240 - DNA, 120 bp, Artificial Sequence
  ENSG00000072422_18 (sequence is synthesized)
aagaagatcactaccagcgtgtgaaaagggaacgagagaaggaagatattgcactaaataagcatcgctcaagacgaaagtggtgcttctggaattcatctccagcagtggcctgaagag

SEQ ID NO: 61241 - DNA, 120 bp, Artificial Sequence
  ENSG00000072422_19 (sequence is synthesized)
gaagagaaaaaaaacaaaaaacagaaaccaatcggtaatctgatccaccacttttcaaagcactactataaaattcgtcttgttagagatacgacatagttcaggtttcgggcactgatc

SEQ ID NO: 61242 - DNA, 120 bp, Artificial Sequence
  ENSG00000072422_20 (sequence is synthesized)
ttcctccacttttgtgcatttatctttgttaggatcaaagcacaagctcaccatcaatgagcctggacaaaaagggaagctgactctcactgcattccttaaactgatatgtatattttt

SEQ ID NO: 61243 - DNA, 120 bp, Artificial Sequence
  ENSG00000072422_21 (sequence is synthesized)
tttgttaggaggcttaataaactttagtctgttattttgtttctttttatacaaagaaaaaaaattcagctttcatgtttctgattccagattggaaaatatttttatatggtctgttgt

SEQ ID NO: 61244 - DNA, 120 bp, Artificial Sequence
  ENSG00000072422_22 (sequence is synthesized)
attttgttgaaatgaaaatactgtgtattactttattttacaggccacaattgattatgaagtcaccctgtgattctctttgcccacatgaccaccgagcattattacgtaattagaggg

SEQ ID NO: 61245 - DNA, 120 bp, Artificial Sequence
  ENSG00000072422_23 (sequence is synthesized)
ttatccttttgttgtgaaaggaaggaggggactgaaatctcccaaagtgcaaattggagagtgtttaatctttgttctgttgaataacatcggtgtaattacaaagtcaactccaagaat

SEQ ID NO: 61246 - DNA, 120 bp, Artificial Sequence
  ENSG00000072422_24 (sequence is synthesized)
gtgtatttacaatatttgccatgttaagtgctggtaattatatggttatatgtgccatgtaaaatatagtgatatcaaatattctgttgtttccaatgtctagtttcaagaggacaatct

SEQ ID NO: 61247 - DNA, 120 bp, Artificial Sequence
  ENSG00000072422_25 (sequence is synthesized)
ttataatcattagaagggcttattaaatcccagcattatccagggcaaactcactggtggacctgaatacataagataccattagtgcgctggtgttcggattgctgtattagggtttac

SEQ ID NO: 61248 - DNA, 120 bp, Artificial Sequence
  ENSG00000072422_26 (sequence is synthesized)
atctctcagtattccttgaacttgccatgcttctgcatgcagattcttcactgacttgaattgagatgggcaagggaaaaggtccctggactccctcctgccatctacaggcttgtcaca

SEQ ID NO: 61249 - DNA, 120 bp, Artificial Sequence
  ENSG00000072422_27 (sequence is synthesized)
tctcaccaccagaaacaggcttcctcaggcttctcacctgtggccaacttcactttgtaagacccatatttttaactcttcccagggaaaattcatgttgctgcagaagtaggctaaggc

SEQ ID NO: 61250 - DNA, 120 bp, Artificial Sequence
  ENSG00000072422_28 (sequence is synthesized)
agaccacccacttctgctgaaatgcattgggagcctgtgaaagcacaaagctggaggctgggcgcctgcgttctcctacacggaaaggaatctaattccaagagtctaggaaatggtgct

SEQ ID NO: 61251 - DNA, 120 bp, Artificial Sequence
  ENSG00000072422_29 (sequence is synthesized)
attgtgagttcgttctgactctttctcattctgagttttcagtgttaaactaggaagtgtgacagcaggggagctttcgtgaggcagtcagtcattgcttctctgtaaattaaaatgtta

SEQ ID NO: 61252 - DNA, 120 bp, Artificial Sequence
  ENSG00000072422_30 (sequence is synthesized)
cagcacacacatacacacacagagagcatttcaaggccacagctccacacctgccatgggatgttaatgtggcagggggtggggctcattctgttgggaggtcaaattaccaatgccaag

SEQ ID NO: 61253 - DNA, 120 bp, Artificial Sequence
  ENSG00000072422_31 (sequence is synthesized)
gactgttgattttgtttttatttttattttttcttctagcttttcagaagatggaaatgagacagttgagtccaaaccccaatgctgacagccatatgcatttgaaaatctatctagatt

SEQ ID NO: 61254 - DNA, 120 bp, Artificial Sequence
  ENSG00000072422_32 (sequence is synthesized)
acagatgggcatttattactggcagtggaaacaccagatagaagatcttaggagaggcccagaaatgcatcaccttgtcatgacaaaagagaaggcagtagagtagggatagttacaaat

SEQ ID NO: 61255 - DNA, 120 bp, Artificial Sequence
  ENSG00000072422_33 (sequence is synthesized)
gcatccatcttaattattttcaataggcttgtaaatcttatcgatggaaggagaaaggagacaagatgtggaagaattgacatgtatcccaccataaaatggtagaagatgagttttcaa

SEQ ID NO: 61256 - DNA, 120 bp, Artificial Sequence
  ENSG00000072422_34 (sequence is synthesized)
tgagtagtcatagttgaaattttacaaccaaagctcccatttgattgtaatcttgccaaaatataatggatgtataaatgaacttggggtataagcaataatatccactagtgttgttat

SEQ ID NO: 61257 - DNA, 120 bp, Artificial Sequence
  ENSG00000072422_35 (sequence is synthesized)
cagctactgtaaccaagtggctggttcatttggttgatgctgattatggcctttaaccatggtggtttgttgtgtgttttttatttcacaaaaagccaataaaattgtttagctataaaa

SEQ ID NO: 61258 - DNA, 120 bp, Artificial Sequence
  ENSG00000072422_36 (sequence is synthesized)
ggcgggacccagagccgccgcgggagcttccagcgtccccaggttttataataatcaagaagcacatgaaagaggcctcttcatcaagcattcttgactaagttatgaaaatggaattga

SEQ ID NO: 61259 - DNA, 120 bp, Artificial Sequence
  ENSG00000072501_0 (sequence is synthesized)
aggcctggacgtattctcgcgacatttgccggtcgcccggcttgcactgcggcgtttcccgcgcgggctacctcagttctcgggcgtacggcgcggcctgtcctactgccgccggcgccg

SEQ ID NO: 61260 - DNA, 120 bp, Artificial Sequence
  ENSG00000072501_1 (sequence is synthesized)
cggccgtcatggggttcctgaaactgattgagattgagaactttaagtcgtacaagggtcgacagattatcggaccatttcagaggttcaccgccatcattggacccaatggctctggta

SEQ ID NO: 61261 - DNA, 120 bp, Artificial Sequence
  ENSG00000072501_2 (sequence is synthesized)
agtcaaatctcatggatgccatcagctttgtgctaggtgaaaaaaccagcaacctgcgggtaaagaccctgcgggacctgatccatggagctcctgtgggcaagccagctgccaaccggg

SEQ ID NO: 61262 - DNA, 120 bp, Artificial Sequence
  ENSG00000072501_3 (sequence is synthesized)
cctttgtcagcatggtctactctgaggagggtgctgaggaccgtacctttgcccgtgtcattgtaggaggttcttctgagtacaagatcaacaacaaagtggtccaactacatgagtaca

SEQ ID NO: 61263 - DNA, 120 bp, Artificial Sequence
  ENSG00000072501_4 (sequence is synthesized)
gtgaggaattagagaagttgggcattctcatcaaagctcgtaacttcctcgttttccagggtgctgtggaatctattgccatgaagaaccccaaagagaggacagctctatttgaagaga

SEQ ID NO: 61264 - DNA, 120 bp, Artificial Sequence
  ENSG00000072501_5 (sequence is synthesized)
ttagtcgttctggggagctggcgcaggagtatgacaagcgaaagaaggaaatggtgaaggctgaagaggacacacagtttaattaccatcgcaagaaaaatattgcggctgaacgcaagg

SEQ ID NO: 61265 - DNA, 120 bp, Artificial Sequence
  ENSG00000072501_6 (sequence is synthesized)
aagcaaagcaggagaaagaagaggctgaccggtaccagcgcctgaaggatgaggtagtacgggctcaggtacagctgcagctctttaagctttaccataatgaagtggaaattgagaagc

SEQ ID NO: 61266 - DNA, 120 bp, Artificial Sequence
  ENSG00000072501_7 (sequence is synthesized)
tcaacaaggaactggcctcaaagaacaaggagatcgagaaggacaagaagcgtatggacaaggtggaggatgaactgaaggagaagaagaaggagctgggcaaaatgatgcgggagcagc

SEQ ID NO: 61267 - DNA, 120 bp, Artificial Sequence
  ENSG00000072501_8 (sequence is synthesized)
agcagattgagaaggagatcaaggagaaggactcagaattgaaccagaagcggcctcagtacatcaaagccaaggagaacacctcccacaaaatcaagaagctggaagcagccaagaagt

SEQ ID NO: 61268 - DNA, 120 bp, Artificial Sequence
  ENSG00000072501_9 (sequence is synthesized)
ctctgcagaatgctcagaagcactacaagaagcgtaaaggtgacatggatgagctggagaaggagatgctgtcagtggagaaggctcggcaggagtttgaagaacggatggaagaagaga

SEQ ID NO: 61269 - DNA, 120 bp, Artificial Sequence
  ENSG00000072501_10 (sequence is synthesized)
gtcagagtcagggcagagatttgacgttggaggagaatcaggtgaagaaataccaccggttgaaagaagaagccagcaagagagcagctaccctggcccaggagctggagaaattcaatc

SEQ ID NO: 61270 - DNA, 120 bp, Artificial Sequence
  ENSG00000072501_11 (sequence is synthesized)
gagaccagaaagctgaccaggaccgtctggatctggaagaacggaagaaagtagagacagaggccaagatcaagcaaaagctgcgggaaattgaagagaatcagaagcggattgagaaac

SEQ ID NO: 61271 - DNA, 120 bp, Artificial Sequence
  ENSG00000072501_12 (sequence is synthesized)
tggaggaatacatcaccactagcaagcagtccctagaagagcagaagaagctagagggggagctgacagaggaggtggagatggccaagcggcgtattgatgaaatcaataaggagctga

SEQ ID NO: 61272 - DNA, 120 bp, Artificial Sequence
  ENSG00000072501_13 (sequence is synthesized)
accaggtgatggagcagctaggggatgcccgcatcgaccgccaggagagcagccgccagcagcgaaaggcagagataatggaaagcatcaagcgcctttaccctggctctgtgtacggcc

SEQ ID NO: 61273 - DNA, 120 bp, Artificial Sequence
  ENSG00000072501_14 (sequence is synthesized)
gcctcattgacctatgccagcccacacaaaagaagtatcagattgctgtaaccaaggttttgggcaagaacatggatgccattattgtggactcggagaagacaggccgggactgtattc

SEQ ID NO: 61274 - DNA, 120 bp, Artificial Sequence
  ENSG00000072501_15 (sequence is synthesized)
agtatatcaaggagcagcgtggggagcctgagaccttcttgcctcttgactacctggaggtgaagcctacagatgagaaactccgggagctgaagggggccaagctagtgattgatgtga

SEQ ID NO: 61275 - DNA, 120 bp, Artificial Sequence
  ENSG00000072501_16 (sequence is synthesized)
ttcgctatgagccacctcatatcaaaaaggccctgcagtatgcttgtggcaatgcccttgtctgtgacaacgtggaagatgcccgccgcattgcctttggaggccaccagcgccacaaga

SEQ ID NO: 61276 - DNA, 120 bp, Artificial Sequence
  ENSG00000072501_17 (sequence is synthesized)
cagtggcactggatggaaccctattccagaagtcaggagtgatctctggtggggccagtgacctgaaggccaaggcacggcgctgggatgagaaagcagtagacaagttgaaagagaaga

SEQ ID NO: 61277 - DNA, 120 bp, Artificial Sequence
  ENSG00000072501_18 (sequence is synthesized)
aggagcgcttgacagaggagctgaaagagcagatgaaggcaaaacggaaagaggcagagctgcgtcaggtgcagtctcaggcccatggactgcagatgcggctcaagtactcccagagtg

SEQ ID NO: 61278 - DNA, 120 bp, Artificial Sequence
  ENSG00000072501_19 (sequence is synthesized)
acctagaacagaccaagacacgacatctagccctgaatctgcaggaaaaatccaagctggagagtgagctagccaactttgggcctcgcattaatgatatcaagaggatcattcagagcc

SEQ ID NO: 61279 - DNA, 120 bp, Artificial Sequence
  ENSG00000072501_20 (sequence is synthesized)
gagagagggaaatgaaagacttgaaggagaagatgaaccaggtagaggatgaggtgtttgaagagttttgtcgggagattggtgtgcgcaacatccgggagtttgaggaagaaaaggtga

SEQ ID NO: 61280 - DNA, 120 bp, Artificial Sequence
  ENSG00000072501_21 (sequence is synthesized)
aacggcagaatgaaatcgccaagaagcgtttggagtttgagaatcagaagactcgcttgggcattcagttggattttgaaaagaaccaactgaaggaggaccaagataaagtacacatgt

SEQ ID NO: 61281 - DNA, 120 bp, Artificial Sequence
  ENSG00000072501_22 (sequence is synthesized)
gggagcagacagtgaaaaaagatgaaaatgagatagaaaagctcaaaaaggaggaacaaagacacatgaagatcatagatgagaccatggctcagctacaagacctgaagaatcagcatc

SEQ ID NO: 61282 - DNA, 120 bp, Artificial Sequence
  ENSG00000072501_23 (sequence is synthesized)
tggccaagaagtcggaagtgaatgacaagaatcatgagatggaggagattcgtaagaaactcgggggcgccaacaaggaaatgacccatttacagaaggaggtgacagccattgagacca

SEQ ID NO: 61283 - DNA, 120 bp, Artificial Sequence
  ENSG00000072501_24 (sequence is synthesized)
agcttgaacagaagcgcagtgaccgtcacaacttgctacaggcctgtaagatgcaggacattaagttgccactgtcaaaaggcaccatggatgatattagtcaggaagagggtagctccc

SEQ ID NO: 61284 - DNA, 120 bp, Artificial Sequence
  ENSG00000072501_25 (sequence is synthesized)
agggggaggactcagtgagtggttcacagagaatttccagtatctatgcacgagaggccctcattgagattgactacggtgatctgtgtgaggatctgaaggatgcccaggctgaggaag

SEQ ID NO: 61285 - DNA, 120 bp, Artificial Sequence
  ENSG00000072501_26 (sequence is synthesized)
agatcaagcaagagatgaacacactgcagcagaagctgaatgagcagcagagtgtgcttcagcgtattgccgcccccaacatgaaggccatggaaaagctggaaagtgtccgagacaagt

SEQ ID NO: 61286 - DNA, 120 bp, Artificial Sequence
  ENSG00000072501_27 (sequence is synthesized)
tccaggagacctcagatgagtttgaagcagcccgaaagcgagcaaagaaggccaagcaggcattcgaacagatcaagaaggagcgctttgaccgcttcaatgcttgttttgaatctgtgg

SEQ ID NO: 61287 - DNA, 120 bp, Artificial Sequence
  ENSG00000072501_28 (sequence is synthesized)
ctaccaacattgatgagatctataaggccctgtcccgcaatagcagtgcccaggcattcctgggccctgagaaccctgaagagccctacttggatggcatcaactacaactgtgtggctc

SEQ ID NO: 61288 - DNA, 120 bp, Artificial Sequence
  ENSG00000072501_29 (sequence is synthesized)
ctgggaaacgcttccggcctatggacaacttgtcaggcggggagaagacagtggcagctctggccctgctctttgccatccacagctacaagccagcccccttcttcgtcctggatgaga

SEQ ID NO: 61289 - DNA, 120 bp, Artificial Sequence
  ENSG00000072501_30 (sequence is synthesized)
ttgatgctgccttggataacaccaacattggcaaggtggcaaattacatcaaggagcagtcgacttgcaacttccaggccatcgtcatctctctcaaggaggagttctacaccaaggccg

SEQ ID NO: 61290 - DNA, 120 bp, Artificial Sequence
  ENSG00000072501_31 (sequence is synthesized)
agagcctcattggagtctatcctgagcaaggggactgtgtgatcagcaaagtcctgaccttcgacctcaccaagtacccagatgccaaccccaaccccaatgagcagtagcagtattttt

SEQ ID NO: 61291 - DNA, 120 bp, Artificial Sequence
  ENSG00000072501_32 (sequence is synthesized)
gccctcccgccctgtctggatccctaagctgtccctctcccaatctctggatatttgactcccaaccttccccctacctcctggccctttttggtgtagtcatgggatttaggcactgct

SEQ ID NO: 61292 - DNA, 120 bp, Artificial Sequence
  ENSG00000072501_33 (sequence is synthesized)
aatcaagcatgaagaggaacagaggtgatgttaggtctggagcaaaaattcctgaacgacagggagtattctggcctctgaaaggaggtgctgagctgaacagggccatctgttcatcac

SEQ ID NO: 61293 - DNA, 120 bp, Artificial Sequence
  ENSG00000072501_34 (sequence is synthesized)
acacacccccttcctccccctcatcacccataatcgtgggccccttgggcctcttgcccactgtgtgtgtgggtatgtatgtgtgtatgtatgtatccgcatgtgtgcatgtgagtatgt

SEQ ID NO: 61294 - DNA, 120 bp, Artificial Sequence
  ENSG00000072501_35 (sequence is synthesized)
ttgcaaaataataaaggatattggagacctgttttagaaggagcctaggctgaatttgattccaagagagcttaggatgacagcacccctgagctgggcaaaggtactcaggacctcata

SEQ ID NO: 61295 - DNA, 120 bp, Artificial Sequence
  ENSG00000072501_36 (sequence is synthesized)
ggagtcttaggcagttacctgaaactgccttcattcactcatttgtgtattcattcatttatgtattcatcagacacataccgaacaccctctatttgtcaggctctgtgcttggaatac

SEQ ID NO: 61296 - DNA, 120 bp, Artificial Sequence
  ENSG00000072501_37 (sequence is synthesized)
agagttgaatcagacatgatctctaccctcctagtaaggagatacagtgggttcatgaatgactatagttagctgaatgtcatatgtactttgaatttgagaagtgggtgatcccctcta

SEQ ID NO: 61297 - DNA, 120 bp, Artificial Sequence
  ENSG00000072501_38 (sequence is synthesized)
ggcttcctggaggtcacatttaagctagaccttgacaaattggtaggatttggtcaggcactaggagtggagcatgagctctggggacagacagttatgggttctggtcccactttttat

SEQ ID NO: 61298 - DNA, 120 bp, Artificial Sequence
  ENSG00000072501_39 (sequence is synthesized)
cacttactagttgtttgaccttgggcaagtcatttgaccttctgtgcctcagtttcctcatctgtaaaatggggctaacaatattacctacctcataggatttaatgatgtcaagctcct

SEQ ID NO: 61299 - DNA, 120 bp, Artificial Sequence
  ENSG00000072501_40 (sequence is synthesized)
gcctggacccctgagagcttctgatcccagctattagggacagaagaagcctccaaatctggaaggtgctgaatgccctgctgactgggaaagtttcagggcactgatggggtctacctg

SEQ ID NO: 61300 - DNA, 120 bp, Artificial Sequence
  ENSG00000072501_41 (sequence is synthesized)
gtaagcggagggcctgaggaaacctgtagcttcaatcatgtctggtaaccgggtgcctgagccccaatctgggttgtgaggaaataggggagaggtatcctgggccacatcccagcctaa

SEQ ID NO: 61301 - DNA, 120 bp, Artificial Sequence
  ENSG00000072501_42 (sequence is synthesized)
cacctgtgaggttcattttaggaactaacctcattagctataaggatcatgcagaggcagcaaagccgggtgcgatgagctcagcctttactcattcacatacaccatcacactttaatt

SEQ ID NO: 61302 - DNA, 120 bp, Artificial Sequence
  ENSG00000072501_43 (sequence is synthesized)
ccaatctgtatattgctttttaaaagttaagtccattctaattacccaaatatgcatgaattcattctccttttgagaagttagattgttaaagatagtctcattcagctaccaaccact

SEQ ID NO: 61303 - DNA, 120 bp, Artificial Sequence
  ENSG00000072501_44 (sequence is synthesized)
ccttgatccttcccttcttagtggctgttgtttgttgtacttccgtttagactttgttttaatgcttgtacgtacatatgtgaactcattggaaatattgtgtgtttaatgcaaatgata

SEQ ID NO: 61304 - DNA, 120 bp, Artificial Sequence
  ENSG00000072501_45 (sequence is synthesized)
tattgaattgtttagcaatttgttttctttgcttaacgatgtttttgagatctgtgcatgttacttaatgtagctcaatccatcttctgtaattgctgtatagattgtcatcatatgatt

SEQ ID NO: 61305 - DNA, 120 bp, Artificial Sequence
  ENSG00000072501_46 (sequence is synthesized)
accacattttacttacgcatttcttttgtgatggacattaagactgtttttaggttttgctattacaaaatactacacaggagcatcactatgcctgtgtgaaagtatatgtatgaaagt

SEQ ID NO: 61306 - DNA, 120 bp, Artificial Sequence
  ENSG00000072501_47 (sequence is synthesized)
ttacctagggttgattcctagaagtggaattgcaaagtcataggatatttatatattggtttttaataatacttccaaattgccctcctgtactatttactcagtatttttcttgaggtt

SEQ ID NO: 61307 - DNA, 120 bp, Artificial Sequence
  ENSG00000072501_48 (sequence is synthesized)
gatctgaggtctaacattgttatcctatatcattttcatcccaagtagtgatatctgtgaaatcacaggtttgatgtgtgctaattatgtattcttctaatacatattaaaagacataac

SEQ ID NO: 61308 - DNA, 120 bp, Artificial Sequence
  ENSG00000072501_49 (sequence is synthesized)
tatcaaaacaaaataaatttgtctgttttcaaccaaagaagtcacgtaccactggtggtactgtgtgccataatttggcaaatgctggcctttatggacgagcacaattcgggggtcaga

SEQ ID NO: 61309 - DNA, 120 bp, Artificial Sequence
  ENSG00000072501_50 (sequence is synthesized)
cctggttcaaattctagctgtagaaacttgtgcaagttacttcacctctgagcctaagtttccacatctgtaaaaggagataataaacacctaccttgcagtagtgaagcaaagagaaaa

SEQ ID NO: 61310 - DNA, 120 bp, Artificial Sequence
  ENSG00000072501_51 (sequence is synthesized)
ttaaatatatatgaagcaatttggctggcatctagatcattcacagccctttaaaggtcacctttgctgttctccccactttacagataaggaaactgaggcccaaaaaggtttgaaccc

SEQ ID NO: 61311 - DNA, 120 bp, Artificial Sequence
  ENSG00000072501_52 (sequence is synthesized)
aggtcttccaagtcattcaagtgctttctccactgtacaggtggttatcaaccttggctgcgcatcagaatcgtttgtaaagctttttctttttcctttttaaaaagtaaagcaatatat

SEQ ID NO: 61312 - DNA, 120 bp, Artificial Sequence
  ENSG00000072501_53 (sequence is synthesized)
acacaggtaaaaaaataaaatagtacagaagggcttataatgagaagcagcagttccctgcttgcacccccacatccaaaggatgtggagctctttaaaaataaattgctctggtcccac

SEQ ID NO: 61313 - DNA, 120 bp, Artificial Sequence
  ENSG00000072501_54 (sequence is synthesized)
ctctggaaatctgattcagccagcatggataataacccagataactaacccctacctcacaggataaaaaggattacatgagatgccttaggctaaggccctggcacacaggaacacatg

SEQ ID NO: 61314 - DNA, 120 bp, Artificial Sequence
  ENSG00000072501_55 (sequence is synthesized)
tgctacaaaggagctttggggacttaagtcctgaggatccaggaggtgaggtgacttgtccaagattccactggtttagtggcagagcctagacttccactcggatctatttagtgcttg

SEQ ID NO: 61315 - DNA, 120 bp, Artificial Sequence
  ENSG00000072501_56 (sequence is synthesized)
ccccctgctctctcctgtcgtgccccaccacctcctggcatcacagggcaaccgttgtcaaggctatgctcacgggaggctgggcaccacagtgtttccaagagcaagctggatccgagt

SEQ ID NO: 61316 - DNA, 120 bp, Artificial Sequence
  ENSG00000072501_57 (sequence is synthesized)
agattccctagggcttgttggaggaactagtttgactcccttatactgtggacgcagtagccttgctgtagggagttgaagagtactccacaacagtatcttaagtttaactgggcactt

SEQ ID NO: 61317 - DNA, 120 bp, Artificial Sequence
  ENSG00000072501_58 (sequence is synthesized)
ccctctggaaatcacagtgttgtgcaccaggaacacaaagatgagtcaaatctttatcctgcctttgaggagctcactgtttagttggggaaaccatttgtaaaacagccattaaccata

SEQ ID NO: 61318 - DNA, 120 bp, Artificial Sequence
  ENSG00000072501_59 (sequence is synthesized)
cagtgtgatcaacactgacaggagcacaggaaaaacatctagcttatgtgaagattcagagaaggcatcctgtagtctaggtggtgatacctgaactgagtcttgagggacgggtaggaa

SEQ ID NO: 61319 - DNA, 120 bp, Artificial Sequence
  ENSG00000072501_60 (sequence is synthesized)
ttagccagttgaggaagtagaaggaatttccagatattggaaacagtatgcatgaagacatgaaggcaagaaacagcaaaacaaatactgaagcatgaagattcctggggtggggggaaa

SEQ ID NO: 61320 - DNA, 120 bp, Artificial Sequence
  ENSG00000072501_61 (sequence is synthesized)
gcagcaagaaaaggtagagaggaaccagattggaagagggtcgtaaatgcatggctacagaattcagatttgttttgtaggacagtgtggttcccaaactggctgtataccacaaacagg

SEQ ID NO: 61321 - DNA, 120 bp, Artificial Sequence
  ENSG00000072501_62 (sequence is synthesized)
tacggcattctgggccccggcccctaaaacattcattaagtctggggtgaagatttggaatcttgaatgcttataaaggttaccacatgactagggtacagccagatttggaaaccatag

SEQ ID NO: 61322 - DNA, 120 bp, Artificial Sequence
  ENSG00000072501_63 (sequence is synthesized)
cttgaaggcagtgagggagccatgaaatggtttttaatagggggactccagatcagatgtgaacttaacctgtttctggctggctagccaaccagcatggaaaacagattaggttagatg

SEQ ID NO: 61323 - DNA, 120 bp, Artificial Sequence
  ENSG00000072501_64 (sequence is synthesized)
ttcatgctgtatgtgcccgtgcctgtagcttccctgttaatcagcttcttacactactatatttgcttattttgtctctgaataagctttaggcaccacaagggtgggcctggggatatt

SEQ ID NO: 61324 - DNA, 120 bp, Artificial Sequence
  ENSG00000072501_65 (sequence is synthesized)
ttgcttaccagtatagcccctgcaaaaaagcacagtgcctgacacaaaacaggcacccagtaaagtttttgaatgaatgaatgcatgagtgaatccatttgtgagagagcgaatggagat

SEQ ID NO: 61325 - DNA, 120 bp, Artificial Sequence
  ENSG00000072501_66 (sequence is synthesized)
gacaagattagctaggagactggaaaaagaccaggaggcctgcactagggcaaaggccagtaggaatagattggaggtgttaaggtgtgaactgttaaggtaagatgataacttaatgac

SEQ ID NO: 61326 - DNA, 120 bp, Artificial Sequence
  ENSG00000072501_67 (sequence is synthesized)
tgattattggatgtggagggtgactgagaggatagaatgagtacccatgaatagccatgattcctaccctgtcccagtcatctctttccttatccatctctgaaacaatctgcttacatc

SEQ ID NO: 61327 - DNA, 120 bp, Artificial Sequence
  ENSG00000072501_68 (sequence is synthesized)
ctcctcagcaactggaattcctcaagttagttagacattctgtgtgctgtgtggtctctcactgcccccccactccccacccctccacaagccattgattcattcatccagttcaataaa

SEQ ID NO: 61328 - DNA, 120 bp, Artificial Sequence
  ENSG00000072501_69 (sequence is synthesized)
tcttggctaagcacctccagtgtgcagtaaggctcttccaagccaggactctgactccctctttcctacctcaagagatgtttttgagggctttcccaggtaagagtcacatctcttata

SEQ ID NO: 61329 - DNA, 120 bp, Artificial Sequence
  ENSG00000072501_70 (sequence is synthesized)
caataacttatagtgagatacccagaatgtcagacttgtaagggaagactgcccaaaccccttctgaggtcctcagaggggaattaacttcctaaggtccgactgctaggaagtgttgga

SEQ ID NO: 61330 - DNA, 120 bp, Artificial Sequence
  ENSG00000072501_71 (sequence is synthesized)
gccagaaatggaagctaggtttcctttctatgtcatctctggagtcttgatcttgatctatcccattgtagatcaggacaggcagaggtggtcagggagaaggtgggacttaggttgaac

SEQ ID NO: 61331 - DNA, 120 bp, Artificial Sequence
  ENSG00000072501_72 (sequence is synthesized)
cttgaaggtcaatgtattggacaggtcaaacaagatggttgccaattacactgcccccttctggaaacccttagcaaacctgccatgcttgcagtcccttctaaggggtttccttagcat

SEQ ID NO: 61332 - DNA, 120 bp, Artificial Sequence
  ENSG00000072501_73 (sequence is synthesized)
aagttgccatgctctgtaccatgtgacctcacaatcctggccacagatagctagatgtggatagtgtctggttcaagggcaaccaatctctaggctggccagtggcctgttagctggact

SEQ ID NO: 61333 - DNA, 120 bp, Artificial Sequence
  ENSG00000072501_74 (sequence is synthesized)
ggcataaggacttcaccttacaggggtggcatgtatcaaatggcaaatgtatgaaacaaccagatctttcagggaggcagaatgtgagctattcagaagaagtgaacgttaattagaatt

SEQ ID NO: 61334 - DNA, 120 bp, Artificial Sequence
  ENSG00000072501_75 (sequence is synthesized)
taatgaggcattagtggtggtggatgaggggtggccagaaactaaacagcaaaagcaaagagaaagctgcagaaaccataagtaagcagaggtcatgagacatttgtataatgagatcac

SEQ ID NO: 61335 - DNA, 120 bp, Artificial Sequence
  ENSG00000072501_76 (sequence is synthesized)
ggagccacagggtggcagaagccatgaagcagcaaggcaacaatgggctagaagccatgaagcaataggagccacgaggaacagaaaccgtgagacaaaactgactatgagatccacaaa

SEQ ID NO: 61336 - DNA, 120 bp, Artificial Sequence
  ENSG00000072501_77 (sequence is synthesized)
gcagcagaaggcttgaatagataagatcatgagacagtagaagcgatgagactgcaagaaccacaaggtagccagaaccatgtggcaacatggcaacaggaatggaagaggcagcaggag

SEQ ID NO: 61337 - DNA, 120 bp, Artificial Sequence
  ENSG00000072501_78 (sequence is synthesized)
ctacaatgcagaaaagccatggattaataggaactgaagcgccgggagccatgaagctgcaggacccatgaggcagaaaaagccatgggctagcatcgaggggggcagaaagaagttagt

SEQ ID NO: 61338 - DNA, 120 bp, Artificial Sequence
  ENSG00000072501_79 (sequence is synthesized)
cagtagcagtaggaggagtataaatacagccagaaaggagttgagtcaccaatttgggaagcactagagaagggagcaacagatgcctgcagctgagggggtgacaagataagccaggct

SEQ ID NO: 61339 - DNA, 120 bp, Artificial Sequence
  ENSG00000072501_80 (sequence is synthesized)
ctagagctgctttggatcatgaaccattttcaagtttctgttcttccatgaggctgcctgtgtagctgttcttgtcttccttatttccctgtgaatgctttaataaatccccatcactaa

SEQ ID NO: 61340 - DNA, 120 bp, Artificial Sequence
  ENSG00000072501_81 (sequence is synthesized)
cacagagatctgcgaaggtgatggtttggtggaatctggattgcatccctgtttcactatctactgcagcatatctggctttggtttttctggacctgtcttccccatccaccctcatct

SEQ ID NO: 61341 - DNA, 120 bp, Artificial Sequence
  ENSG00000072501_82 (sequence is synthesized)
gctcagcatgtcctcaccggcctctgcatgtatttagttccgcctccaggcttttgctcacgaggttgctggctaataatccctttccatgtaaatctagcttgatcatcacctttcacc

SEQ ID NO: 61342 - DNA, 120 bp, Artificial Sequence
  ENSG00000072501_83 (sequence is synthesized)
ccttcacccttcctcattctcctcccctttaggaagccctccttgatcactgtggcataccctgaccttcccctcctgaatgccagtagtacttgagtctgactcccgcagcttatattg

SEQ ID NO: 61343 - DNA, 120 bp, Artificial Sequence
  ENSG00000072501_84 (sequence is synthesized)
cttgattgtacagcatcaatttcttgagtgctgctctgtaccagaccctgcggagggattagggacacagatgtatcagacagggtctctggcctcgaggagctcacagtctagtagaag

SEQ ID NO: 61344 - DNA, 120 bp, Artificial Sequence
  ENSG00000072501_85 (sequence is synthesized)
agcgtcctctctcgcctcgcattggtacactccaactcctttctactcttctctggaggcggcacttttgaatttcagacccagcgctccagtctttagaatgcttgaggtgtcgatccc

SEQ ID NO: 61345 - DNA, 120 bp, Artificial Sequence
  ENSG00000072501_86 (sequence is synthesized)
catccacaggtggcaaattacatcaaggagcagtcgacttgcaacttccaggccatcgtcatctctctcaaggaggagttctacaccaaggccgagagcctcattggagtctatcctgag

SEQ ID NO: 61346 - DNA, 120 bp, Artificial Sequence
  ENSG00000072506_0 (sequence is synthesized)
cccatcccgtggagtggccggcgacaagatggcagcagcgtgtcggagcgtgaagggcctggtggcggtaataaccggaggagcctcgggcctgggcctggccacggcggagcgacttgt

SEQ ID NO: 61347 - DNA, 120 bp, Artificial Sequence
  ENSG00000072506_1 (sequence is synthesized)
ggggcagggagcctctgctgtgcttctggacctgcccaactcgggtggggaggcccaagccaagaagttaggaaacaactgcgttttcgccccagccgacgtgacctctgagaaggatgt

SEQ ID NO: 61348 - DNA, 120 bp, Artificial Sequence
  ENSG00000072506_2 (sequence is synthesized)
gcaaacagctctggctctagcaaaaggaaagtttggccgtgtggatgtagctgtcaactgtgcaggcatcgcggtggctagcaagacgtacaacttaaagaagggccagacccatacctt

SEQ ID NO: 61349 - DNA, 120 bp, Artificial Sequence
  ENSG00000072506_3 (sequence is synthesized)
ggaagacttccagcgagttcttgatgtgaatctcatgggcaccttcaatgtgatccgcctggtggctggtgagatgggccagaatgaaccagaccagggaggccaacgtggggtcatcat

SEQ ID NO: 61350 - DNA, 120 bp, Artificial Sequence
  ENSG00000072506_4 (sequence is synthesized)
caacactgccagtgtggctgccttcgagggtcaggttggacaagctgcatactctgcttccaaggggggaatagtgggcatgacactgcccattgctcgggatctggctcccataggtat

SEQ ID NO: 61351 - DNA, 120 bp, Artificial Sequence
  ENSG00000072506_5 (sequence is synthesized)
ccgggtgatgaccattgccccaggtctgtttggcaccccactgctgaccagcctcccagagaaagtgtgcaacttcttggccagccaagtgcccttccctagccgactgggtgaccctgc

SEQ ID NO: 61352 - DNA, 120 bp, Artificial Sequence
  ENSG00000072506_6 (sequence is synthesized)
tgagtatgctcacctcgtacaggccatcatcgagaacccattcctcaatggagaggtcatccggctggatggggccattcgtatgcagccttgaagggagaaggcagagaaaacacacgc

SEQ ID NO: 61353 - DNA, 120 bp, Artificial Sequence
  ENSG00000072506_7 (sequence is synthesized)
tcctctgcccttcctttccctggggtactactctccagcttgggaggaagcccagtagccattttgtaactgcctaccagtcgccctctgtgcctaataaagtctctttttctcacagag

SEQ ID NO: 61354 - DNA, 120 bp, Artificial Sequence
  ENSG00000072506_8 (sequence is synthesized)
gcgtgtcggagcgtgaaggtagaaggttctttgcctctgttgcttgccttcctttacgggccgggacagcgcggccgtggaactaggagaaagagatcggtttcgagggaaagggtcatg

SEQ ID NO: 61355 - DNA, 120 bp, Artificial Sequence
  ENSG00000072518_0 (sequence is synthesized)
gaattcacccgtagtctgtggccgggaggagaaggcgcgccccacctcccgtttctagccgcttcggatgtttccggctgctgccggcgaaaagagccgagggccggcggtggtggcggc

SEQ ID NO: 61356 - DNA, 120 bp, Artificial Sequence
  ENSG00000072518_1 (sequence is synthesized)
catgttgggagcagcaggtccggcggcggctgcctgtgtgccgggcgcggagcagtgccgctgagggcaggggaggagcgaggcaggcggccggctgcggcggcagagagtaggcggagc

SEQ ID NO: 61357 - DNA, 80 bp, Artificial Sequence
  ENSG00000072518_2 (sequence is synthesized)
ggggtcgggggggtgcggtccggagccgctcggagccggcgcggcctagcccgagcggcgcatccccgggctggcgtgag

SEQ ID NO: 61358 - DNA, 120 bp, Artificial Sequence
  ENSG00000072518_3 (sequence is synthesized)
tgcccggcctccccgcacccccggccggggcccatgcggcgggtgctcctgctgtgagaagccccgcccggccgggctccgcgccttcccttccctcccttcctccaagcttctcggttc

SEQ ID NO: 61359 - DNA, 120 bp, Artificial Sequence
  ENSG00000072518_4 (sequence is synthesized)
cctcccccgagataccggcgccatgtccagcgctcggacccccctacccacgctgaacgagagggacacggagcagcccaccttgggacaccttgactccaagcccagcagtaagtccaa

SEQ ID NO: 61360 - DNA, 120 bp, Artificial Sequence
  ENSG00000072518_5 (sequence is synthesized)
catgattcggggccgcaactcagccacctctgctgatgagcagccccacattggaaactaccggctcctcaagaccattggcaagggtaattttgccaaggtgaagttggcccgacacat

SEQ ID NO: 61361 - DNA, 120 bp, Artificial Sequence
  ENSG00000072518_6 (sequence is synthesized)
cctgactgggaaagaggtagctgtgaagatcattgacaagactcaactgaactcctccagcctccagaaactattccgcgaagtaagaataatgaaggttttgaatcatcccaacatagt

SEQ ID NO: 61362 - DNA, 120 bp, Artificial Sequence
  ENSG00000072518_7 (sequence is synthesized)
taaattatttgaagtgattgagactgagaaaacgctctaccttgtcatggagtacgctagtggcggagaggtatttgattacctagtggctcatggcaggatgaaagaaaaagaggctcg

SEQ ID NO: 61363 - DNA, 120 bp, Artificial Sequence
  ENSG00000072518_8 (sequence is synthesized)
agccaaattccgccagatagtgtctgctgtgcagtactgtcaccagaagtttattgtccatagagacttaaaggcagaaaacctgctcttggatgctgatatgaacatcaagattgcaga

SEQ ID NO: 61364 - DNA, 120 bp, Artificial Sequence
  ENSG00000072518_9 (sequence is synthesized)
ctttggcttcagcaatgaattcacctttgggaacaagctggacaccttctgtggcagtcccccttatgctgccccagaactcttccagggcaaaaaatatgatggacccgaggtggatgt

SEQ ID NO: 61365 - DNA, 120 bp, Artificial Sequence
  ENSG00000072518_10 (sequence is synthesized)
gtggagcctaggagttatcctctatacactggtcagcggatccctgccttttgatggacagaacctcaaggagctgcgggaacgggtactgaggggaaaataccgtattccattctacat

SEQ ID NO: 61366 - DNA, 120 bp, Artificial Sequence
  ENSG00000072518_11 (sequence is synthesized)
gtccacggactgtgaaaacctgcttaagaaatttctcattcttaatcccagcaagagaggcactttagagcaaatcatgaaagatcgatggatgaatgtgggtcacgaagatgatgaact

SEQ ID NO: 61367 - DNA, 120 bp, Artificial Sequence
  ENSG00000072518_12 (sequence is synthesized)
ggacagagctgatggtgtccatgggttatacacgggaagagatccaggactcgctggtgggccagagatacaacgaggtgatggccacctatctgctcctgggctacaagagctccgagc

SEQ ID NO: 61368 - DNA, 120 bp, Artificial Sequence
  ENSG00000072518_13 (sequence is synthesized)
tggaaggcgacaccatcaccctgaaaccccggccttcagctgatctgaccaatagcagcgccccatccccatcccacaaggtacagcgcagcgtgtcggccaatcccaagcagcggcgct

SEQ ID NO: 61369 - DNA, 120 bp, Artificial Sequence
  ENSG00000072518_14 (sequence is synthesized)
tcagcgaccaggctggtcctgccattcccacctctaattcttactctaagaagactcagagtaacaacgcagaaaataagcggcctgaggaggaccgggagtcagggcggaaagccagca

SEQ ID NO: 61370 - DNA, 120 bp, Artificial Sequence
  ENSG00000072518_15 (sequence is synthesized)
gcacagccaaggtgcctgccagccccctgcccggtctggagaggaagaagaccaccccaaccccctccacgaacagcgtcctctccaccagcacaaatcgaagcaggaattccccacttt

SEQ ID NO: 61371 - DNA, 120 bp, Artificial Sequence
  ENSG00000072518_16 (sequence is synthesized)
tggagcgggccagcctcggccaggcctccatccagaatggcaaagacagcacagccccccagcgtgtccctgttgcctccccatccgcccacaacatcagcagcagtggtggagccccag

SEQ ID NO: 61372 - DNA, 120 bp, Artificial Sequence
  ENSG00000072518_17 (sequence is synthesized)
accgaactaacttcccccggggtgtgtccagccgaagcaccttccatgctgggcagctccgacaggtgcgggaccagcagaatttgccctacggtgtgaccccagcctctccctctggcc

SEQ ID NO: 61373 - DNA, 120 bp, Artificial Sequence
  ENSG00000072518_18 (sequence is synthesized)
acagccagggccggcggggggcctctgggagcatcttcagcaagttcacctccaagtttgtacgcaggaacctgaatgaacctgaaagcaaagaccgagtggagacgctcagacctcacg

SEQ ID NO: 61374 - DNA, 120 bp, Artificial Sequence
  ENSG00000072518_19 (sequence is synthesized)
tggtgggcagtggcggcaacgacaaagaaaaggaagaatttcgggaggccaagccccgctccctccgcttcacgtggagtatgaagaccacgagctccatggagcccaacgagatgatgc

SEQ ID NO: 61375 - DNA, 120 bp, Artificial Sequence
  ENSG00000072518_20 (sequence is synthesized)
gggagatccgcaaggtgctggacgcgaacagctgccagagcgagctgcatgagaagtacatgctgctgtgcatgcacggcacgccgggccacgaggacttcgtgcagtgggagatggagg

SEQ ID NO: 61376 - DNA, 120 bp, Artificial Sequence
  ENSG00000072518_21 (sequence is synthesized)
tgtgcaaactgccgcggctctctctcaacggggttcgatttaagcggatatcgggcacctccatggccttcaaaaacattgcctccaaaatagccaacgagctgaagctttaacaggctg

SEQ ID NO: 61377 - DNA, 120 bp, Artificial Sequence
  ENSG00000072518_22 (sequence is synthesized)
ccaggagcgggggcggcgggggcgggccagctggacgggctgccggccgctgcgccgccccacctgggcgagactgcagcgatggattggtgtgtctcccctgctggcacttctcccctc

SEQ ID NO: 61378 - DNA, 120 bp, Artificial Sequence
  ENSG00000072518_23 (sequence is synthesized)
cctggcccttctcagttttctcttacatgtttgtggggggtgggagattgttctccagcaccccacattcacccctgcccagagattcccccttctcctctcccctactggaggcaaagg

SEQ ID NO: 61379 - DNA, 120 bp, Artificial Sequence
  ENSG00000072518_24 (sequence is synthesized)
cgccagcaccagaaatccatgtcggcctccgtgcaccccaacaaggcctctgggctgccccccacggagagtaactgtgaggtgccgcggcccagcacagccccccagcgtgtccctgtt

SEQ ID NO: 61380 - DNA, 120 bp, Artificial Sequence
  ENSG00000072518_25 (sequence is synthesized)
aaaaaagaaaaaaaaaatcccagcggccacctttcctccctgccccattgggacagtcgagactggatctgtggggtttcccgggagggtggctcagggctggaacactctcaggcaaga

SEQ ID NO: 61381 - DNA, 120 bp, Artificial Sequence
  ENSG00000072518_26 (sequence is synthesized)
gtggtggagctcccgtcaggccctccgccaggcccactgtgggcttctcccctctcctccctccttcccctccaagcaaaccaccagaggtggccttcccctgacctcaggcccctgggc

SEQ ID NO: 61382 - DNA, 120 bp, Artificial Sequence
  ENSG00000072518_27 (sequence is synthesized)
cggtggggcagggggcgggggtgctgcgcagccctgcagtgggtggggctgggggctgctccggggctgctgaggctggagggccggcacaaggctccgcctccctccacactgtaccct

SEQ ID NO: 61383 - DNA, 120 bp, Artificial Sequence
  ENSG00000072518_28 (sequence is synthesized)
acactgtaccctctgcccctcctccccagagctgggcatttccttccacaagctgctgtggggacgtgtgttccctcaaagtctgtgccatcttctcccacccctcccgggtagaaggag

SEQ ID NO: 61384 - DNA, 120 bp, Artificial Sequence
  ENSG00000072518_29 (sequence is synthesized)
gggctgaccccagggctgggagaggggaggggactggagggcagactggcttctcggtccccagggggccgcttgggctgttggtctccagagcagggccactgggcactctgtgatggg

SEQ ID NO: 61385 - DNA, 120 bp, Artificial Sequence
  ENSG00000072518_30 (sequence is synthesized)
ggagcctttgtctgaaagcacagccccctcgcccttcctctccccatggcttccccttcattggcattaatctgggcaccagctctctccatagcagtgacttccctcaccactctcatc

SEQ ID NO: 61386 - DNA, 120 bp, Artificial Sequence
  ENSG00000072518_31 (sequence is synthesized)
tctcagccttgccttttcttcctgacactgtcgccccctcctctcaggagacactgccgagggccacctggcagaaggctgagttaggcagcagggccgggagcgtctgccctccacagg

SEQ ID NO: 61387 - DNA, 120 bp, Artificial Sequence
  ENSG00000072518_32 (sequence is synthesized)
gtgggggacagataggctaagcgactcccagcttgctaccctcagtggccagtgtgggcgtgggcggtttggggcgcttggctggtggtggccactgcatcccttaatttatttctctgc

SEQ ID NO: 61388 - DNA, 120 bp, Artificial Sequence
  ENSG00000072518_33 (sequence is synthesized)
ctgctgtttctgttcttgagaaattgggggtgggagtcctacacagaggctgcccctaccctcacctgagttgtacatttttttgtgatgggttttattttttattattttattttattt

SEQ ID NO: 61389 - DNA, 120 bp, Artificial Sequence
  ENSG00000072518_34 (sequence is synthesized)
tttttttgatttatgatgactccacccctcttcatcacccccgctcccaggccaggctcagcgattaagccgagcccttgcgtcctaggaaggggccttgccaacctcagccctcctgcc

SEQ ID NO: 61390 - DNA, 120 bp, Artificial Sequence
  ENSG00000072518_35 (sequence is synthesized)
ccacactcctactgcggctcagaccaagggctccccctccctcccttcccccctcctgccctatggaacagcccgggtgctctgagggggctgggagggcatggcttggctcccaaaggg

SEQ ID NO: 61391 - DNA, 120 bp, Artificial Sequence
  ENSG00000072518_36 (sequence is synthesized)
ggtaggggcccggggcacccaggcaaggtggcccctccccgtctagccccctcctccccaaccctgcacttagtttctcctctggatcaaacacgtaataaagagaatgtttggaatctg

SEQ ID NO: 61392 - DNA, 120 bp, Artificial Sequence
  ENSG00000072518_37 (sequence is synthesized)
cggggggcctctgggagcatcttcagcaagttcacctccaagtttgtacgcagaaatctgtctttcaggtttgccagaaggaacctgaatgaacctgaaagcaaagaccgagtggagacg

SEQ ID NO: 61393 - DNA, 120 bp, Artificial Sequence
  ENSG00000072518_38 (sequence is synthesized)
cttcctgccctattcccctcctgccccttccctcccaccttgcttctggtgtgctgtcctggaattgcacgcgcttcctgaccaccaggctctggcccttgagaagccagcggggctttg

SEQ ID NO: 61394 - DNA, 120 bp, Artificial Sequence
  ENSG00000072518_39 (sequence is synthesized)
tccctgttgctctccttgccaaacccagtctctctgctagtggtggtttcggttgcgacaccgtccaggttcccaggcaggaaccgctcggcctggctgcttagctacttttcactgagg

SEQ ID NO: 61395 - DNA, 120 bp, Artificial Sequence
  ENSG00000072518_40 (sequence is synthesized)
aggtggtggaaggtgtcgcctgctctggctgagtaagggtggctggctgagccggcagcccccgccctaggcctggctcttcccggcctctgtactttgccctcgctgcctgacaggttc

SEQ ID NO: 61396 - DNA, 120 bp, Artificial Sequence
  ENSG00000072518_41 (sequence is synthesized)
agtttctcttcatggattacctgctcgcggcaggcaggcaggcagctccccacctggaagcctgcagactcgccgagctgagagaatcatgctgcagatctcatgcttcttttttacttt

SEQ ID NO: 61397 - DNA, 120 bp, Artificial Sequence
  ENSG00000072518_42 (sequence is synthesized)
tcacatccctgctgtgggaaacatcttacagcatagaagaaggggtgcagggcccaccttgggacaccttgactccaagcccagcagtaagtccaacatgattcggggccgcaactcagc

SEQ ID NO: 61398 - DNA, 120 bp, Artificial Sequence
  ENSG00000072518_43 (sequence is synthesized)
agacccgggccctgcctgcctcactccctaggagccatgtctcacagggtgatgtctgtcagcagcaccgtctcctgtccctgccagcgcattgctccctgctccctggagttccatcct

SEQ ID NO: 61399 - DNA, 120 bp, Artificial Sequence
  ENSG00000072518_44 (sequence is synthesized)
ggctgtgtccagtccagctttcccctcccctattccacgccattgcctcctccccatcttcctctgactgctacttgcagtttgccaagtgtggggctgaccgtggccatctcagctaca

SEQ ID NO: 61400 - DNA, 120 bp, Artificial Sequence
  ENSG00000072518_45 (sequence is synthesized)
agtatcttaagtaggtgtggtaatgactacagagaagtgctttttcaggatgagaagatgagggagaaaatttacaccattgctggattgtgttaagaactcggagaggaaaccacaggg

SEQ ID NO: 61401 - DNA, 120 bp, Artificial Sequence
  ENSG00000072518_46 (sequence is synthesized)
aggatgcactgctgaggaaatcgtctggcttcctggagtggggaccagagccagagagccaagccctcctggctttgctgagttctgtccttgcccctgacaccaacgtgtctgcctgcg

SEQ ID NO: 61402 - DNA, 120 bp, Artificial Sequence
  ENSG00000072518_47 (sequence is synthesized)
attgtccagcgttggagagatcatgtggtctgtcagaaggctggagttatttatagtgggagaaaagcccaggagcatggcacgggaagaactgatttcacaccagctcagcgcctgatg

SEQ ID NO: 61403 - DNA, 120 bp, Artificial Sequence
  ENSG00000072518_48 (sequence is synthesized)
atgcccaccttgggacaccttgactccaagcccagcagtaagtccaacatgattcggggccgcaactcagccacctctgctgatgagcagccccacattggaaactaccggctcctcaag

SEQ ID NO: 61404 - DNA, 120 bp, Artificial Sequence
  ENSG00000072571_0 (sequence is synthesized)
gccagtcaccttcagtttctggagctggccgtcaacatgtcctttcctaaggcgcccttgaaacgattcaatgacccttctggttgtgcaccatctccaggtgcttatgatgttaaaact

SEQ ID NO: 61405 - DNA, 120 bp, Artificial Sequence
  ENSG00000072571_1 (sequence is synthesized)
ttagaagtattgaaaggaccagtatcctttcagaaatcacaaagatttaaacaacaaaaagaatctaaacaaaatcttaatgttgacaaagatactaccttgcctgcttcagctagaaaa

SEQ ID NO: 61406 - DNA, 120 bp, Artificial Sequence
  ENSG00000072571_2 (sequence is synthesized)
gttaagtcttcggaatcaaaggaatctcaaaagaatgataaagatttgaagatattagagaaagagattcgtgttcttctacaggaacgtggtgcccaggacaggcggatccaggatctg

SEQ ID NO: 61407 - DNA, 120 bp, Artificial Sequence
  ENSG00000072571_3 (sequence is synthesized)
gaaactgagttggaaaagatggaagcaaggctaaatgctgcactaagggaaaaaacatctctctctgcaaataatgctacactggaaaaacaacttattgaattgaccaggactaatgaa

SEQ ID NO: 61408 - DNA, 120 bp, Artificial Sequence
  ENSG00000072571_4 (sequence is synthesized)
ctactaaaatctaagttttctgaaaatggtaaccagaagaatttgagaattctaagcttggagttgatgaaacttagaaacaaaagagaaacaaagatgaggggtatgatggctaagcaa

SEQ ID NO: 61409 - DNA, 120 bp, Artificial Sequence
  ENSG00000072571_5 (sequence is synthesized)
gaaggcatggagatgaagctgcaggtcacccaaaggagtctcgaagagtctcaagggaaaatagcccaactggagggaaaacttgtttcaatagagaaagaaaagattgatgaaaaatct

SEQ ID NO: 61410 - DNA, 120 bp, Artificial Sequence
  ENSG00000072571_6 (sequence is synthesized)
gaaacagaaaaactcttggaatacatcgaagaaattagttgtgcttcagatcaagtggaaaaatacaagctagatattgcccagttagaagaaaatttgaaagagaagaatgatgaaatt

SEQ ID NO: 61411 - DNA, 120 bp, Artificial Sequence
  ENSG00000072571_7 (sequence is synthesized)
ttaagccttaagcagtctcttgaggagaatattgttatattatctaaacaagtagaagatctaaatgtgaaatgtcagctgcttgaaaaagaaaaagaagaccatgtcaacaggaataga

SEQ ID NO: 61412 - DNA, 120 bp, Artificial Sequence
  ENSG00000072571_8 (sequence is synthesized)
gaacacaacgaaaatctaaatgcagagatgcaaaacttaaaacagaagtttattcttgaacaacaggaacgtgaaaagcttcaacaaaaagaattacaaattgattcacttctgcaacaa

SEQ ID NO: 61413 - DNA, 120 bp, Artificial Sequence
  ENSG00000072571_9 (sequence is synthesized)
gagaaagaattatcttcgagtcttcatcagaagctctgttcttttcaagaggaaatggttaaagagaagaatctgtttgaggaagaattaaagcaaacactggatgagcttgataaatta

SEQ ID NO: 61414 - DNA, 120 bp, Artificial Sequence
  ENSG00000072571_10 (sequence is synthesized)
cagcaaaaggaggaacaagctgaaaggctggtcaagcaattggaagaggaagcaaaatctagagctgaagaattaaaactcctagaagaaaagctgaaagggaaggaggctgaactggag

SEQ ID NO: 61415 - DNA, 120 bp, Artificial Sequence
  ENSG00000072571_11 (sequence is synthesized)
aaaagtagtgctgctcatacccaggccaccctgcttttgcaggaaaagtatgacagtatggtgcaaagccttgaagatgttactgctcaatttgaaagctataaagcgttaacagccagt

SEQ ID NO: 61416 - DNA, 120 bp, Artificial Sequence
  ENSG00000072571_12 (sequence is synthesized)
aatcaagaatatgtaaggatgcttctagatctgcagaccaagtcagcactaaaggaaacagaaattaaagaaatcacagtttcttttcttcaaaaaataactgatttgcagaaccaactc

SEQ ID NO: 61417 - DNA, 120 bp, Artificial Sequence
  ENSG00000072571_13 (sequence is synthesized)
aagcaacaggaggaagactttagaaaacagctggaagatgaagaaggaagaaaagctgaaaaagaaaatacaacagcagaattaactgaagaaattaacaagtggcgtctcctctatgaa

SEQ ID NO: 61418 - DNA, 120 bp, Artificial Sequence
  ENSG00000072571_14 (sequence is synthesized)
gaactatataataaaacaaaaccttttcagctacaactagatgcttttgaagtagaaaaacaggcattgttgaatgaacatggtgcagctcaggaacagctaaataaaataagagattca

SEQ ID NO: 61419 - DNA, 120 bp, Artificial Sequence
  ENSG00000072571_15 (sequence is synthesized)
tatgctaaattattgggtcatcagaatttgaaacaaaaaatcaagcatgttgtgaagttgaaagatgaaaatagccaactcaaatcggaagtatcaaaactccgctgtcagcttgctaaa

SEQ ID NO: 61420 - DNA, 120 bp, Artificial Sequence
  ENSG00000072571_16 (sequence is synthesized)
aaaaaacaaagtgagacaaaacttcaagaggaattgaataaagttctaggtatcaaacactttgatccttcaaaggcttttcatcatgaaagtaaagaaaattttgccctgaagacccca

SEQ ID NO: 61421 - DNA, 120 bp, Artificial Sequence
  ENSG00000072571_17 (sequence is synthesized)
ttaaaagaaggcaatacaaactgttaccgagctcctatggagtgtcaagaatcatggaagtaaacatctgagaaacctgttgaagattatttcattcgtcttgttgttattgatgttgct

SEQ ID NO: 61422 - DNA, 120 bp, Artificial Sequence
  ENSG00000072571_18 (sequence is synthesized)
gttattatatttgacatgggtattttataatgttgtatttaattttaactgccaatccttaaatatgtgaaaggaacattttttaccaaagtgtcttttgacattttattttttcttgca

SEQ ID NO: 61423 - DNA, 120 bp, Artificial Sequence
  ENSG00000072571_19 (sequence is synthesized)
aatacctcctccctaatgctcacctttatcacctcattctgaaccctttcgctggctttccagcttagaatgcatctcatcaacttaaaagtcagtatcatattattatcctcctgttct

SEQ ID NO: 61424 - DNA, 120 bp, Artificial Sequence
  ENSG00000072571_20 (sequence is synthesized)
gaaaccttagtttcaagagtctaaaccccagattcttcagcttgatcctggaggtcttttctagtctgagcttctttagctaggctaaaacaccttggcttgttattgcctctactttga

SEQ ID NO: 61425 - DNA, 120 bp, Artificial Sequence
  ENSG00000072571_21 (sequence is synthesized)
ttctgataatgctcacttggtcctacctattatccttctacttgtccagttcaaataagaaataaggacaagcctaacttcatagaaacctctctatttttaatcagttgtttaataatt

SEQ ID NO: 61426 - DNA, 120 bp, Artificial Sequence
  ENSG00000072571_22 (sequence is synthesized)
tacaggttcttaggctccatcctgtttgtatgaaattataatctgtggattggcctttaagcctgcattcttaacaaactcttcagttaattcttagatacactaaaaatctgagaaact

SEQ ID NO: 61427 - DNA, 120 bp, Artificial Sequence
  ENSG00000072571_23 (sequence is synthesized)
ctacatgtaactatttcttcagagtttgtcatatactgcttgtcatctgcatgtctactcagcatttgattaacatttgtgtaatatgaaataaaattacacagtaagtcatttaaccaa

SEQ ID NO: 61428 - DNA, 120 bp, Artificial Sequence
  ENSG00000072571_24 (sequence is synthesized)
gggaagtgcgcttgcgcaaatgctaggttacacttgagtaactccgggaatgactgggtgggtggggcggggaacagtaacggtctcctattggatggcagcctaaactcgcaggccagc

SEQ ID NO: 61429 - DNA, 120 bp, Artificial Sequence
  ENSG00000072571_25 (sequence is synthesized)
taattggacgcaatcagaacccagcattctttcttcgtgttcctgtgcgggattggtgtgcccaggggtttggctttccaattggctaacgccggggtgggtggggaatgtggggagatt

SEQ ID NO: 61430 - DNA, 120 bp, Artificial Sequence
  ENSG00000072571_26 (sequence is synthesized)
tccgcattcagttgtcgaggagtgccagtcaccttcagtttctggagctggccgtcaacatgtcctttcctaaggcgcccttgaaacgattcaatgacccttctgattcgtgttcttcta

SEQ ID NO: 61431 - DNA, 120 bp, Artificial Sequence
  ENSG00000072571_27 (sequence is synthesized)
aaacatctgaaagtattgtatttgattagaatgggttaagtgtatgaatcaaggttataagtaaatctgtaaattaatgaaatgagttatcattagaactctagcaagttttacatttct

SEQ ID NO: 61432 - DNA, 120 bp, Artificial Sequence
  ENSG00000072571_28 (sequence is synthesized)
gcctaggtcattatgtttaaatgtgcccttagttcacaattataatggtcttcaattctcaatcacttctatgtttaaattgttcattacctagtaaacatttcaaaattatgtgatgct

SEQ ID NO: 61433 - DNA, 120 bp, Artificial Sequence
  ENSG00000072571_29 (sequence is synthesized)
ttgatttattaagtaccaccatttgagttgttttgtttttgtgtatttgtttgtggggaagggtaagtgtttttgaagaaaagtgggaaaaaatgccaatatctaagagaggtttgctac

SEQ ID NO: 61434 - DNA, 120 bp, Artificial Sequence
  ENSG00000072571_30 (sequence is synthesized)
tttgaatggccgtttacggcaccggcaggccccggatgaaagaactgaaatccagaaaagttcacatgcaacgaacaatgggacagaattggaaccagtgaagccggaactcactacacc

SEQ ID NO: 61435 - DNA, 120 bp, Artificial Sequence
  ENSG00000072609_0 (sequence is synthesized)
gccgcaatgtctcttgacagcggcggcggcgcagccggttccgggttcggcgcggggcggggatgtgaatcccgatggagcggcccgaggaaggcaagcagtcgccgccgccgcagccct

SEQ ID NO: 61436 - DNA, 120 bp, Artificial Sequence
  ENSG00000072609_1 (sequence is synthesized)
ggggacggctcctgcgtctgggcgcggaggagggcgagccgcacgtcctcctgaggaagcgggagtggaccatcgggcggagacgaggttgcgacctttccttccccagcaataaactgg

SEQ ID NO: 61437 - DNA, 120 bp, Artificial Sequence
  ENSG00000072609_2 (sequence is synthesized)
tctctggagatcactgtagaattgtagtggatgaaaaatcaggtcaggtgacactggaagataccagcaccagtggaacagtgattaacaagctgaaggttgttaagaagcagacatgcc

SEQ ID NO: 61438 - DNA, 120 bp, Artificial Sequence
  ENSG00000072609_3 (sequence is synthesized)
ctttacagactggggatgtcatctacttggtgtacaggaagaatgaaccggaacacaacgtggcatacctctatgaatctttaagtgaaaagcaaggcatgacacaagaatcctttgaag

SEQ ID NO: 61439 - DNA, 120 bp, Artificial Sequence
  ENSG00000072609_4 (sequence is synthesized)
ctaacaaggaaaatgtgttccatgggaccaaagatacctcaggtgcaggtgcagggcgaggggccgatccccgggtccctccgtcgtcgcccgccactcaggtgtgctttgaggaaccac

SEQ ID NO: 61440 - DNA, 120 bp, Artificial Sequence
  ENSG00000072609_5 (sequence is synthesized)
agccatcaacatcgacgtcagacctcttccccacagcctcggcctcttccacggagccttctcctgcagggcgagagcgttcctccagttgtgggtctgggggtggtggcatctccccta

SEQ ID NO: 61441 - DNA, 120 bp, Artificial Sequence
  ENSG00000072609_6 (sequence is synthesized)
aaggaagtggtccctctgtggcaagtgatgaagtctccagctttgcctcagctctcccagacagaaagactgcgtccttttcgtcgttggaaccccaggatcaggaggatttggagcccg

SEQ ID NO: 61442 - DNA, 120 bp, Artificial Sequence
  ENSG00000072609_7 (sequence is synthesized)
tgaagaagaaaatgagaggagatggggaccttgacctgaacgggcagttgttggtcgcacaaccgcgtagaaatgcccaaaccgtccacgaggacgtcagagcagcggctgggaagccag

SEQ ID NO: 61443 - DNA, 120 bp, Artificial Sequence
  ENSG00000072609_8 (sequence is synthesized)
acaagatggaggagacgctgacatgcatcatctgccaggacctgctgcacgactgcgtgagtttgcagccctgcatgcacacgttctgcgcggcttgctactcgggctggatggagcgct

SEQ ID NO: 61444 - DNA, 120 bp, Artificial Sequence
  ENSG00000072609_9 (sequence is synthesized)
cgtccctgtgtcctacctgccgctgtcccgtggagcggatctgtaaaaaccacatcctcaacaacctcgtggaagcatacctcatccagcatccagacaagagtcgcagtgaagaagatg

SEQ ID NO: 61445 - DNA, 120 bp, Artificial Sequence
  ENSG00000072609_10 (sequence is synthesized)
tgcaaagtatggatgccagaaataaaatcactcaagacatgctgcagcccaaagtcaggcggtctttttctgatgaagaagggagttcagaggacctgctggagctgtcagacgttgaca

SEQ ID NO: 61446 - DNA, 120 bp, Artificial Sequence
  ENSG00000072609_11 (sequence is synthesized)
tcagacattagccagccatacgtcgtgtgccggcagtgtcctgagtacagaaggcaggcggcgcagcctccccactgcccagcacccgagggcgagccaggagccccacaggccctgggg

SEQ ID NO: 61447 - DNA, 120 bp, Artificial Sequence
  ENSG00000072609_12 (sequence is synthesized)
gatgcaccctccacgtccgtcagcctgacgacagcagtccaggattacgtgtgccctctgcaaggaagccacgccctgtgcacctgctgcttccagcccatgcccgaccggagagcggag

SEQ ID NO: 61448 - DNA, 120 bp, Artificial Sequence
  ENSG00000072609_13 (sequence is synthesized)
cgcgagcaggacccgcgtgtcgcccctcagcagtgtgcggtctgcctgcagcctttctgccacctgtactggggctgcacccggaccggctgctacggctgcctggccccgttttgtgag

SEQ ID NO: 61449 - DNA, 120 bp, Artificial Sequence
  ENSG00000072609_14 (sequence is synthesized)
ctcaacctgggtgacaagtgtctggacggcgtgctgaacaacaacagctacgagtcagacatcctgaagaattacctggcaaccagaggtttgacatggaaaaacatgttgaccgagagc

SEQ ID NO: 61450 - DNA, 120 bp, Artificial Sequence
  ENSG00000072609_15 (sequence is synthesized)
ctcgtggctctccagcggggagtgtttctgctgtctgattacagagtcacgggagacaccgttctgtgttactgctgtggcctgcgcagcttccgtgagctgacctatcagtatcggcag

SEQ ID NO: 61451 - DNA, 120 bp, Artificial Sequence
  ENSG00000072609_16 (sequence is synthesized)
aacattcctgcttccgagttgccagtggccgtaacatcccgtcctgactgctactggggccgtaactgccgcactcaggtgaaagctcaccacgccatgaaattcaatcatatctgtgaa

SEQ ID NO: 61452 - DNA, 120 bp, Artificial Sequence
  ENSG00000072609_17 (sequence is synthesized)
cagacaaggttcaaaaactaagcatccagaggccctgagcagctttcagcactggaggtgaagagagcgtgtttttaaaatacagagacaagcacgtcaaggtgttttcacagccccctg

SEQ ID NO: 61453 - DNA, 120 bp, Artificial Sequence
  ENSG00000072609_18 (sequence is synthesized)
agggaagggacgcagggtctccgacaggtgctctggggtgactcttctgtggagctttaccctctgagtgagaccctccccagagccccgggggccgcagcccgccctcctggtgagcgc

SEQ ID NO: 61454 - DNA, 120 bp, Artificial Sequence
  ENSG00000072609_19 (sequence is synthesized)
tgggcagggctcgtggtggcatcagcagcagagacgaagcctttctgtaacatgcggccgtcccgccgagaggggcagttttgctcttttgtacattttccgaaactacagttaaagcag

SEQ ID NO: 61455 - DNA, 120 bp, Artificial Sequence
  ENSG00000072609_20 (sequence is synthesized)
aagtctgtttttaggaaaagtttcaagggagaagggcaagtttatcaaaaacattgtttcaggagaagggagcataagtttacagcctacaggacgtacacaatatcctgctgctgggaa

SEQ ID NO: 61456 - DNA, 120 bp, Artificial Sequence
  ENSG00000072609_21 (sequence is synthesized)
aaccacagcattttatctattttttattttaataggtttggtgcttatcttctaataagatttaaatgtcacaaactgtagcacaaataatataatttataatttacaaattgactaaaa

SEQ ID NO: 61457 - DNA, 120 bp, Artificial Sequence
  ENSG00000072609_22 (sequence is synthesized)
agaataagcatatgcttctgtttattaaaaaaagaaaccttccaatgtccaaaactgctaaccctcgacgtggccgccaagttagtcgctccttgctaaccggtgagtgaccgcggcccc

SEQ ID NO: 61458 - DNA, 120 bp, Artificial Sequence
  ENSG00000072609_23 (sequence is synthesized)
gagcctggggctggacgcaggtcccaggacatgctgctcccttgtgtgagtgaccgcggccccgagcctggggctggacgcaggtcccaggacgtgctgctcccttgtgtgagtgaccac

SEQ ID NO: 61459 - DNA, 120 bp, Artificial Sequence
  ENSG00000072609_24 (sequence is synthesized)
ggccccaagcccagggctggaggcaggtcccaggacgcgccgctccctcatgctgcccgggcccttcctccaagaccctacagagcctgaggggcaccttggcttccgcctgtgctagct

SEQ ID NO: 61460 - DNA, 120 bp, Artificial Sequence
  ENSG00000072609_25 (sequence is synthesized)
ttgccatgtcatctggaataatacttgaaattttgatttttggaaaaaaaagttttttatcttttgttgaaatcacctgttatccttgtttgtaaactgataacttttttgcttcttctc

SEQ ID NO: 61461 - DNA, 120 bp, Artificial Sequence
  ENSG00000072609_26 (sequence is synthesized)
aggaatacagttttcaactgttgtcttgctcttgatagaaactgagaagcagcaatctgtatttgtggaggaaagtcctctcttttgcatattctaataaatgagccgcgtttgctcctc

SEQ ID NO: 61462 - DNA, 120 bp, Artificial Sequence
  ENSG00000072609_27 (sequence is synthesized)
atggagaggagagcctcgtgtattttttcctacaggttctttttttacagttgacatttttatctgctcgtttttggaagtacaagggaagtgtggaaaagacaagtgattcggggcttt

SEQ ID NO: 61463 - DNA, 120 bp, Artificial Sequence
  ENSG00000072609_28 (sequence is synthesized)
gcaggcgcctggtgtggctcccagtacgttgcccaccgcgctctgcttttaacgggagagtaggcgggtcctgaggagcacggggcgtgcgcgcacgtgctggcccttgccctgctctgg

SEQ ID NO: 61464 - DNA, 120 bp, Artificial Sequence
  ENSG00000072609_29 (sequence is synthesized)
cgtcgtctcctgggagcacacgtcagtggggacctagtgaccctggggatggggctccaaagcgtgggggctgagctggggatgcagagtggcgtgtccttgcccttcgactcgttctgg

SEQ ID NO: 61465 - DNA, 120 bp, Artificial Sequence
  ENSG00000072609_30 (sequence is synthesized)
tccctctctaacactggggtgctggacaggaatggggcccggcccttcccctcacaccaagcagctgagcgacggtggagctgagctgtgatggctgcggacccgcgttgcaccggccct

SEQ ID NO: 61466 - DNA, 120 bp, Artificial Sequence
  ENSG00000072609_31 (sequence is synthesized)
acaggaagaatgaaccggaacacagaacgttcctcctggctacaccccatttcttgctcacatgggttcctgccgtgaatagtgtctgttgagtgggagtgtcgactttgcagcctgagc

SEQ ID NO: 61467 - DNA, 120 bp, Artificial Sequence
  ENSG00000072609_32 (sequence is synthesized)
ccagccattcctcaggaataccactgtggccatgagcagccaatcccaaaatggcagccaaggagaaactgatggggatggtttgggttctacaggagaagaacttgagttatggggaat

SEQ ID NO: 61468 - DNA, 120 bp, Artificial Sequence
  ENSG00000072609_33 (sequence is synthesized)
atgatattagctggtttgacatcaagtcatttgtgagtcatcagatcttctcctgaaaatgggagacacagtagggcccctcccaggagctcttggctgttgctgatggcagaagccaag

SEQ ID NO: 61469 - DNA, 120 bp, Artificial Sequence
  ENSG00000072609_34 (sequence is synthesized)
actgcccggacccagccctggcccaatggggctcgcacctccaaagcccacgtccacacgttccgagcccgccgtcccatcgcaaacatccgggggccgccactgcgcctaacgaccgcc

SEQ ID NO: 61470 - DNA, 120 bp, Artificial Sequence
  ENSG00000072609_35 (sequence is synthesized)
catctctgacgcctcgggtcggcgtttgatttttaacccaagaaaagagtaaaagtcaagcggaaatcaacgcagaagcggtgctgcagcctctgagcttcctgacggccgtgtccagag

SEQ ID NO: 61471 - DNA, 120 bp, Artificial Sequence
  ENSG00000072609_36 (sequence is synthesized)
gccgggctcacttcagtgcgctcagcttctcgcggggacaagcgtctgggcggggacggcccgaggcgggggtgtggcgaggctggagaacgctgaaagctggtgggcttgggaagacaa

SEQ ID NO: 61472 - DNA, 120 bp, Artificial Sequence
  ENSG00000072609_37 (sequence is synthesized)
acgacgctctgaaatttggctcccaggttgcgacctttccttccccagcaataaactggtctctggagatcactgtagaattgtagtggatgaaaaatcaggtcaggtgacactggaaga

SEQ ID NO: 61473 - DNA, 82 bp, Artificial Sequence
  ENSG00000072609_38 (sequence is synthesized)
taaataaataaataacgtctacaaagccaaggtgacaacatggaaaaatacctaggtagaaaaaggccacctaggctgggca

SEQ ID NO: 61474 - DNA, 74 bp, Artificial Sequence
  ENSG00000072609_39 (sequence is synthesized)
cggtgagaccccatctttactaaaaatgaaaaaattggccagttgtgggcatctgtaatcccagctactgggga

SEQ ID NO: 61475 - DNA, 81 bp, Artificial Sequence
  ENSG00000072609_40 (sequence is synthesized)
gaggttgcagtgagccgagattgctccactatactccagcctaccacctgaatatgtgcagttgggggcaagcatgttgca

SEQ ID NO: 61476 - DNA, 120 bp, Artificial Sequence
  ENSG00000072609_41 (sequence is synthesized)
agccacctgaatatgtgcagttgggggcaagcatgttgcatgttcagagctagaatgaagcccatcgaagccgtgttagggtggtggagcaggtgagatttctttcttttgtgtctctca

SEQ ID NO: 61477 - DNA, 120 bp, Artificial Sequence
  ENSG00000072609_42 (sequence is synthesized)
ctgttttcctgggatgagcatgtggtgttcagtttaagaaacgatgtgggtctgaggccgggtgcagtgcatcacgcctgtaaatgttcagtttaagaaacgatacgggtctgaggccgg

SEQ ID NO: 61478 - DNA, 120 bp, Artificial Sequence
  ENSG00000072609_43 (sequence is synthesized)
tgggtctgaggccgggcgcagtgcatcatgcctgtaatcctagcgctttgagaggctgaggtgggaggatcccttgaagccaggagtttgaaaccatcctgggcaacatggtgagaccct

SEQ ID NO: 61479 - DNA, 72 bp, Artificial Sequence
  ENSG00000072609_44 (sequence is synthesized)
gagaccctgtctctacaaaaataaaaaataaattagccgggctggatcccttgaacccaggaggcggaggtt

SEQ ID NO: 61480 - DNA, 120 bp, Artificial Sequence
  ENSG00000072609_45 (sequence is synthesized)
gggccacagagcgagactccatctctaaaaaataacaaaccagaaaatgtgagcctcgccttttttcagggatacaactcctcgccatcacagtccatcacaacctgggtggcgttagct

SEQ ID NO: 61481 - DNA, 120 bp, Artificial Sequence
  ENSG00000072609_46 (sequence is synthesized)
gtccatcacaacctgggtggcgttagctggatgtggccccgccccgatttccatgagacccctcctgaacaatgtttccagaaagagttgagctcctgagcctggtgctgacgaattgtg

SEQ ID NO: 61482 - DNA, 120 bp, Artificial Sequence
  ENSG00000072609_47 (sequence is synthesized)
ctgcagcccaaagtcaggcggtctttttctgatgaagaagggagttcagaggacctgctggagctgtcagacgttgacagtgagtcctcagacattaggtgcggtctgcctgcagccttt

SEQ ID NO: 61483 - DNA, 120 bp, Artificial Sequence
  ENSG00000072609_48 (sequence is synthesized)
ggggtggggcgggcgccgagtctcggcctctggggtcgggagtctccatgggcgtttccggggtctccgcagatgtgaatcccgatggagcggcccgaggaaggcaagcagtcgccgccg

SEQ ID NO: 61484 - DNA, 120 bp, Artificial Sequence
  ENSG00000072609_49 (sequence is synthesized)
gttcccacagctctcggtgagggcttcttgaaggtgccgccctttagcaagaccagggccttttctctggtccctgtctcttctggccatttgccttcccacgtctaggaagctacctcg

SEQ ID NO: 61485 - DNA, 120 bp, Artificial Sequence
  ENSG00000072609_50 (sequence is synthesized)
gtttctaggatttacatatgtttaacatgcgcattcgccctcctgccgagcactttgctgacagcacacacaatggtggggccttgaggcttgccacagacacacctggcaggcgcccgc

SEQ ID NO: 61486 - DNA, 120 bp, Artificial Sequence
  ENSG00000072609_51 (sequence is synthesized)
tcagccccacactctgctttgatgcccacagaaggagctcaacagctcgtgtgtgtttgaagggcacagagaacagatgccaagtcctcagcttttcttgtgcaacagcctgggctcgtt

SEQ ID NO: 61487 - DNA, 120 bp, Artificial Sequence
  ENSG00000072609_52 (sequence is synthesized)
gctgggctgtgtgcactgtggcctggctttcatgtctcattcacacctgggctgtgtaggtcttggcagaacttttgagagactctggtaactgttacactggaaccttttgggacttcc

SEQ ID NO: 61488 - DNA, 120 bp, Artificial Sequence
  ENSG00000072609_53 (sequence is synthesized)
aggaggctcttggacaagacttctcgtgctgcaggccgtgaacgtgcagccctctgcaaatgccacttataagggtctgagctttggctttgcacactttcaggggccttttatgaaatg

SEQ ID NO: 61489 - DNA, 120 bp, Artificial Sequence
  ENSG00000072609_54 (sequence is synthesized)
ttttctctcgttatttcagtgtttcttcctctaaacgagtatttcttattcctctctttttttgcgtcacagaattacctggcaaccagaggtttgacatggaaaaacatgttgaccgag

SEQ ID NO: 61490 - DNA, 120 bp, Artificial Sequence
  ENSG00000072609_55 (sequence is synthesized)
gtaatcccagcagtttgggaggccaaaacaggaggatctcttgaccctgttgcgacctttccttccccagcaataaactggtctctggagatcactgtagaattgtagtggatgaaaaat

SEQ ID NO: 61491 - DNA, 120 bp, Artificial Sequence
  ENSG00000072609_56 (sequence is synthesized)
cgcttctgatcgaagaacccacttcacagtaaatgaggtgcaccgtgggcccatgctcatggaattcatgggtcttgctgtgttctccatcatcctaccgattttggttctgtttttctg

SEQ ID NO: 61492 - DNA, 120 bp, Artificial Sequence
  ENSG00000072609_57 (sequence is synthesized)
gctcttcaggccccagttgctttgacctttgcatgttctcttggtgaacttgagggcaggggatggtggggtccatagcctgatgtttatagggatgaggccactgttggtcatcaaatg

SEQ ID NO: 61493 - DNA, 120 bp, Artificial Sequence
  ENSG00000072609_58 (sequence is synthesized)
atacctattcctggctggactgcagaggtgtgtcaaattcgtgttagctcaaaatcaagccttaacagaattattaggggagatactcccaggacagaatccttgcagcggggttctgct

SEQ ID NO: 61494 - DNA, 120 bp, Artificial Sequence
  ENSG00000072609_59 (sequence is synthesized)
gttacgataccaagaccaggtgctggggagactcggagagctgatctttttaaggagggagtggaatggaaatcatttctgcttgtcctctgtttaaaattgagttttatcattgaactt

SEQ ID NO: 61495 - DNA, 64 bp, Artificial Sequence
  ENSG00000072609_60 (sequence is synthesized)
tggccagactggtctcgaaatcctgacctcaagtgatccggctaattttgtatttttagtagag

SEQ ID NO: 61496 - DNA, 120 bp, Artificial Sequence
  ENSG00000072609_61 (sequence is synthesized)
gaagctgggattcggctgcatgtacagctcggtaatgtccccagcgtttgaattgggaaacagttgctgctgtgcatttcttccatccgtatttgtgcacatgcgcagtgacgtcaatgt

SEQ ID NO: 61497 - DNA, 120 bp, Artificial Sequence
  ENSG00000072609_62 (sequence is synthesized)
ttagacgtgaagcagtcgagtcacagagtgtgactgggaattggaccttgatagacgtttgataagtttgttatccagacaccgatcggaaagggtgcacctaatgcactctacaaggtc

SEQ ID NO: 61498 - DNA, 120 bp, Artificial Sequence
  ENSG00000072609_63 (sequence is synthesized)
tgcatgagggcctctttttgccagtttagaaggagaagtaggaatggggcccggcccttcccctcacaccaagcagctgagcgacggtggagctgagctgtgatggctgcggacccgcgt

SEQ ID NO: 61499 - DNA, 120 bp, Artificial Sequence
  ENSG00000072609_64 (sequence is synthesized)
tcactctgtcacctgctgtccctcagtgactcctgtgaaacctgctcaggtctcttcattctgccaatgctgggaagccacaacctgttcatccagtgtggaggctttgtcttcagctga

SEQ ID NO: 61500 - DNA, 120 bp, Artificial Sequence
  ENSG00000072609_65 (sequence is synthesized)
gcaccagaagaagccacaatgcagagaccctgagtttgtgcaagggtggggctgagaggggaggtcccgtgttagtgcaggggtgaggccgggaggggaggtcccgagtttgtgtagggg

SEQ ID NO: 61501 - DNA, 120 bp, Artificial Sequence
  ENSG00000072609_66 (sequence is synthesized)
cgaggctgagcagggaggttctgagttagtgcaggggcgaggctgagcagggaggtcccgagttagtgcaggggcgaggctaagggggaggtcccaagtttgtgcaggggtgaggctgag

SEQ ID NO: 61502 - DNA, 120 bp, Artificial Sequence
  ENSG00000072609_67 (sequence is synthesized)
cagggaggtcccaagttagtgcaggggcgaggctgagaggggagatcccgagtttgtgcaggggcgaggctgagaggggaggtccctagttagtgcaggggtgaggccgagaagggaggt

SEQ ID NO: 61503 - DNA, 120 bp, Artificial Sequence
  ENSG00000072609_68 (sequence is synthesized)
cccaagtttgtgcatggatgaagccaaaaggggagtttgcacgtttgtgcaggggtgaggccaagaagggaagtcttgagttggtgcaggggtgagggagaggggaggtcctgagtttgt

SEQ ID NO: 61504 - DNA, 120 bp, Artificial Sequence
  ENSG00000072609_69 (sequence is synthesized)
gcagaggcgaggctgagaggggaggtccctaagtgcaggggtgaggccgagaggggaggttgcaaatttgtgcaggggtgaggccaagaggggaggtcctgagttagtgcgggggtgagg

SEQ ID NO: 61505 - DNA, 120 bp, Artificial Sequence
  ENSG00000072609_70 (sequence is synthesized)
ccgagaggggaggtcctgagtttgtgcagaggcgaggctgagaggggaggtccttagtgcaggggtgaggctgagagggggaggtcccaagtttgtgcaggggtgaggccgaggggaggt

SEQ ID NO: 61506 - DNA, 120 bp, Artificial Sequence
  ENSG00000072609_71 (sequence is synthesized)
tgcaagtttgtgcaggggtgaggccaagaggggaggtcctgagttagtgcgggggtgaggccgagaggggagttcctgagtttgtgcagaggcgaggctgagaggggaggttgccagttt

SEQ ID NO: 61507 - DNA, 120 bp, Artificial Sequence
  ENSG00000072609_72 (sequence is synthesized)
gtgcaggtgcgaggctgagaggggaggctggcattcgccaatgaagtgggctggggctaccctgcgtctgtgtcttagagagatcggttgatactcactcttccccttcccatctccaaa

SEQ ID NO: 61508 - DNA, 120 bp, Artificial Sequence
  ENSG00000072609_73 (sequence is synthesized)
aagtagaaacaagaacacttgccctgtagaggatgctggtctttcctcaggaccagctgcacctgtccaggaagggcaggcagctcagagagcctctgggctccaggtgtcctagggact

SEQ ID NO: 61509 - DNA, 120 bp, Artificial Sequence
  ENSG00000072609_74 (sequence is synthesized)
cactcctgcttccttagtccttcagagaagtccaactcctggcccactgtgaagaggatttctacctggagcagtcggaacagcttgggtttggctgtgatgtgagggaggaggccttgg

SEQ ID NO: 61510 - DNA, 120 bp, Artificial Sequence
  ENSG00000072609_75 (sequence is synthesized)
gagcagggcagttatcctcccagcgtggtaaggagccgtgttttatggaggcagggagatcagggcagttactcctcgggtgtggtaaggagctgtgttttatggaagcaggtggccgtg

SEQ ID NO: 61511 - DNA, 120 bp, Artificial Sequence
  ENSG00000072609_76 (sequence is synthesized)
aactcattccgtcttttcatgagcttctgtacttcctcgtcctcaagacccagccatcccacccagcaaaactgaccggctgtggtggttttggagccctgctctccttgtggggtggct

SEQ ID NO: 61512 - DNA, 120 bp, Artificial Sequence
  ENSG00000072609_77 (sequence is synthesized)
gcgtgggtcgtccacaggctttctggaggacagcctggtgctgctgcagatcccactgcttcttcctggctccttggcccagccttgggacaaacccagggcagggctgcagctgcccgc

SEQ ID NO: 61513 - DNA, 120 bp, Artificial Sequence
  ENSG00000072609_78 (sequence is synthesized)
tggccccacagaccgtctccccacgcactcctcatctgcggctccctctgtgctccctggtgcccctcagaagcgggggtcagccctgcccacccctccgtgtgctgcccaggctccaag

SEQ ID NO: 61514 - DNA, 120 bp, Artificial Sequence
  ENSG00000072609_79 (sequence is synthesized)
ccagggaagggggcctcaggttctaggtgaacccgtccaccccagtgaggcctctctgggatggcctctgtcatagcttctgactgcagccaggaagtctgggcagattggcttaaaaca

SEQ ID NO: 61515 - DNA, 120 bp, Artificial Sequence
  ENSG00000072609_80 (sequence is synthesized)
gactgagggattcaggccaaccctcctccctaggccagctacaaaggctgttttaaatctgctttaagtcatcttaatgacctcagggccagcaggatgggagtggtcgggcccaggtgt

SEQ ID NO: 61516 - DNA, 120 bp, Artificial Sequence
  ENSG00000072609_81 (sequence is synthesized)
gagagccggggtccaggggctgctcccagcaccacacggccttcaccccaggggtgtggccaaggcagagaggcagctgagtttggaaggggcttccgccagcaagggtttcctggtgac

SEQ ID NO: 61517 - DNA, 120 bp, Artificial Sequence
  ENSG00000072609_82 (sequence is synthesized)
agccccccagcttcgggctggcaggctgggagagtggagcaatgctggccctgaggcagctgcagccggctccctgaagaggccccagagtcactgccagggccgctaggttgccgggag

SEQ ID NO: 61518 - DNA, 120 bp, Artificial Sequence
  ENSG00000072609_83 (sequence is synthesized)
gctgtccccgcggccgtgcccgccctctgcctccacgtgggctccgttttggcatgcacgctagctcctgcgccttctgagggcggctgcagccgtgtagagaagccgggtcttgcctcc

SEQ ID NO: 61519 - DNA, 120 bp, Artificial Sequence
  ENSG00000072609_84 (sequence is synthesized)
ctgaggacggagggccgcatgcagagcacagcctagccctgcagatccgcgcgctgaccagcagcaggacggagccgggtgatcttcgggggagccacctccagaaacgcctagtgctgg

SEQ ID NO: 61520 - DNA, 120 bp, Artificial Sequence
  ENSG00000072609_85 (sequence is synthesized)
taactggtagacagccattattcaagcatcctctacacttagaattgagttacactgaaaacaaaggtgatgagtgctcaggacgcactactttctagttagtttaccgcacctgcctgt

SEQ ID NO: 61521 - DNA, 120 bp, Artificial Sequence
  ENSG00000072609_86 (sequence is synthesized)
tacctgcaggcccgagggtgtgtgcttctgtggcctgtgtgggatggcaccccttccagccttacccactcagctcagttggcctggttggaatgggccctgggaggagtgtttgcactg

SEQ ID NO: 61522 - DNA, 120 bp, Artificial Sequence
  ENSG00000072609_87 (sequence is synthesized)
tggaaattggtaaatgcttcaaatcagggtggtttttaattttgcttttgttttcttctgaagagaaggttgttaaacaccagcacagtgctgcaccaggcagccagcatataatcatga

SEQ ID NO: 61523 - DNA, 120 bp, Artificial Sequence
  ENSG00000072609_88 (sequence is synthesized)
gaaataagtagttgtttaagccactgcatttggggtggtttattacatagtaatgataaccatatcatggcccttgaaggcccagcatgtatgacccctgcctccacccctcagaaaacc

SEQ ID NO: 61524 - DNA, 120 bp, Artificial Sequence
  ENSG00000072609_89 (sequence is synthesized)
tcttctccctacctgcttctcctggagcccctcaggtgttcctctgcttctccaccgaaccagctaattctcacaaacagcccctcaggtaccagcccctccctctgcagcctctcctca

SEQ ID NO: 61525 - DNA, 120 bp, Artificial Sequence
  ENSG00000072609_90 (sequence is synthesized)
ttcagctcctgcagggctgcccccaccccgccagccagtctagtttccccccagcacctgtcactatcggaaaggaaacatctgtttaccgtttgtctccccctctcaaaaaaatagagc

SEQ ID NO: 61526 - DNA, 120 bp, Artificial Sequence
  ENSG00000072609_91 (sequence is synthesized)
agggatcttgcctgtctgcccactgttgtttatttgtctgaaatgtttggccccagggcagcatctactgatcactgaccagttggctactgaacggtgaaggtctgatgagctgatgag

SEQ ID NO: 61527 - DNA, 120 bp, Artificial Sequence
  ENSG00000072609_92 (sequence is synthesized)
ccgtcccctgggcttgaaatctttcccgcggcacaaacaggcgccccttcctctgtcgctcacttttcacggttgtctccttctgaggcggtgagtctagatggtggggtcttaaagttc

SEQ ID NO: 61528 - DNA, 120 bp, Artificial Sequence
  ENSG00000072609_93 (sequence is synthesized)
ctcacacagagcagacacttggtcgtgcatgtctgtggaaggaatggactcaggagagaatgttgaaggccagtcagaccaggagtgagtgccgtgcgccgtgctgggagcctgtcactg

SEQ ID NO: 61529 - DNA, 120 bp, Artificial Sequence
  ENSG00000072609_94 (sequence is synthesized)
tgagtgccgtgcgccgtgctgggagcctgtcactgtgagtgccgtgcgccgtgctgggagcctgtcactgtgagtgccgtgcgccctgctgggagcctgtcactgtgagtgccgtgcgcc

SEQ ID NO: 61530 - DNA, 120 bp, Artificial Sequence
  ENSG00000072609_95 (sequence is synthesized)
gtgctgggagcctgtcactgtgagggccgagcgccgtgctgggagcctgtcactgtgagggccgtgcgccgtgctgggagcctgtcactgtgagggccgtgcgccgtgctgggagcctgt

SEQ ID NO: 61531 - DNA, 120 bp, Artificial Sequence
  ENSG00000072609_96 (sequence is synthesized)
cactgtgagggccgtgcgccgtgctgggagcctggcactgtgagtgccgtgcgccgtgctgggagcctggcactgtgagggccgtgcgccgtgctgggagcctggcactgtgagtgccgt

SEQ ID NO: 61532 - DNA, 120 bp, Artificial Sequence
  ENSG00000072609_97 (sequence is synthesized)
gcgccgtgctgggagcctgtcactgtgagtgccgtgcgccgtgctgggagcctgtcactgtgagtgccgtgcgccgtgctgggagcctggcactgtgagtgccgtgcgccgtgctgggag

SEQ ID NO: 61533 - DNA, 120 bp, Artificial Sequence
  ENSG00000072609_98 (sequence is synthesized)
cctggcactgtgagtgccgtgcgccgtgctgggagcctggcactgtgagtgccgtgcgccgtgctgggagcctggcactctgagtgccgtgcgccgtgctgggagcctgtcactgtgagt

SEQ ID NO: 61534 - DNA, 120 bp, Artificial Sequence
  ENSG00000072609_99 (sequence is synthesized)
gccgtgcgccgtgctgggagcctgtcactgtgagtgccgtgcgccgtgctgggagcctggcactgtgagtgccgtgcgccgtgctgggagcctatcactgtgagggccgtgcgctgtgct

SEQ ID NO: 61535 - DNA, 120 bp, Artificial Sequence
  ENSG00000072609_100 (sequence is synthesized)
gggagcctggcactgtgagggccgtgcgctgtgctgggagcatgcatttgtgagacccgccctgcccagtgctggccttgaatgtgggtccacttgggccgctggatcaaaacgccgcag

SEQ ID NO: 61536 - DNA, 120 bp, Artificial Sequence
  ENSG00000072609_101 (sequence is synthesized)
aacaggcggcttaaacaacagaaagtattttctcacagttctggggcctggaactctgagatcagggtgtcagcggggccggttcctctttggtctgtctccttggctcgtgggcagcat

SEQ ID NO: 61537 - DNA, 120 bp, Artificial Sequence
  ENSG00000072609_102 (sequence is synthesized)
ctccttgagttctcacgtcatcttctcttcatgcgtgtttgtgccctaatctcttcctgcgaggacaccagtcctattggattagggcccacaccagtggcctcattttatcttaatcac

SEQ ID NO: 61538 - DNA, 120 bp, Artificial Sequence
  ENSG00000072609_103 (sequence is synthesized)
ctctttaaagaccacacctactaaaactggaacgatatagagaagattagcatggcccacgtgcaggcatgacacccaaattcatgacgtgttccatgtctgcagatacagtcacctctg

SEQ ID NO: 61539 - DNA, 120 bp, Artificial Sequence
  ENSG00000072609_104 (sequence is synthesized)
aggtcctgggatttagggcttgaacatattgtaacactctgccatcaaagctcgcacgccacggggttttataaaaattgggtggttttgtttgttgttgtttggcaaaccccacatgct

SEQ ID NO: 61540 - DNA, 120 bp, Artificial Sequence
  ENSG00000072609_105 (sequence is synthesized)
ggataccattgacactccgtggtgggctgagccatgtccccgtcccgccaccacagatacccgtatccgatcacttgagcctgtgatgatgttgccttgcaccgtaaaaggggctttgca

SEQ ID NO: 61541 - DNA, 120 bp, Artificial Sequence
  ENSG00000072609_106 (sequence is synthesized)
gatatggtggaattaaggaccttgagatgaggggaggatcctggattagcttgtgggccctctgtgcaacagtaggagtcgttgtaagagggaagcaagaggccgggcgtggtggctcac

SEQ ID NO: 61542 - DNA, 120 bp, Artificial Sequence
  ENSG00000072609_107 (sequence is synthesized)
aaaaaaaaaaaaaaaagcaagcaagaagtcaaaggcaggaagaggaggcttggtgacagagaagaggtgggagggatgtgctttgcagagggagcaagggcctccagccaggagaggagg

SEQ ID NO: 61543 - DNA, 120 bp, Artificial Sequence
  ENSG00000072609_108 (sequence is synthesized)
agcaagggcctccagccaggagaggagggcaggctgtcgaagcagaaaagaaaacagatctccctgcagggccaccagaaggaaccagccctgcctgccccttcattttggacttccgag

SEQ ID NO: 61544 - DNA, 120 bp, Artificial Sequence
  ENSG00000072609_109 (sequence is synthesized)
ctccagaactgcaagagaataaatctagtttaagcagcaaagttggtggtaacttcttagagcagccacaggaagctcactaccccccacacactcatcccgtttggtttttgttttcag

SEQ ID NO: 61545 - DNA, 120 bp, Artificial Sequence
  ENSG00000072609_110 (sequence is synthesized)
gaagggtccagtctgtctcagaggtgctgtggttggaggtggagtgtggggcatggctgagcacccaacatccgcttcaccctctcccctgctccccagcacgttccttcaccctgtagc

SEQ ID NO: 61546 - DNA, 120 bp, Artificial Sequence
  ENSG00000072609_111 (sequence is synthesized)
tctaggtctctgtggcagacactcagctctaactgctgacctgatggctccacttggtgttcaaacatcccagattcatgttgtcaaagagagctgtttccagtggggaccccaggccca

SEQ ID NO: 61547 - DNA, 120 bp, Artificial Sequence
  ENSG00000072609_112 (sequence is synthesized)
ccacgtacgcccggcagacctgccctctccactgtcagaagatggcatggcctccctgtagctcaggcccaaccccaggagtcatcctgctggctgtcctcagtgccccaggcttctctt

SEQ ID NO: 61548 - DNA, 120 bp, Artificial Sequence
  ENSG00000072609_113 (sequence is synthesized)
caggggcttcttgtggctctgattgttgccccctcacctcactgctcttctcccagatctgtgcgtgcattggtcctccttgtcacgcacgttcagctcaaatattacttcctcaaaggt

SEQ ID NO: 61549 - DNA, 120 bp, Artificial Sequence
  ENSG00000072609_114 (sequence is synthesized)
aatattacttcctcaaaggtgcctttgagtactcgttctccttgcctttccctctcctgggacactgttcccaccagtacctgcatgattccttttttttcttttccttttctttttttg

SEQ ID NO: 61550 - DNA, 88 bp, Artificial Sequence
  ENSG00000072609_115 (sequence is synthesized)
cttttccttttctttttttgtttttgagacagtgtcttgctctgttgtcagggctggagggcagtggcgcaatgtgatgatcctccca

SEQ ID NO: 61551 - DNA, 82 bp, Artificial Sequence
  ENSG00000072609_116 (sequence is synthesized)
gatctgcccgcctctacctcccacagtgctgggattccaggcgtaagccgccacgcccagcaactccgtttcttacttgttg

SEQ ID NO: 61552 - DNA, 120 bp, Artificial Sequence
  ENSG00000072609_117 (sequence is synthesized)
gtaagccgccacgcccagcaactccgtttcttacttgttggctcacattctcctgagaagtcctccctcaaccatcggcctgaaatagcagcgagcctccccagggttgcctctgccttt

SEQ ID NO: 61553 - DNA, 120 bp, Artificial Sequence
  ENSG00000072609_118 (sequence is synthesized)
tcttgactctttctgtcaccttctatgcttgttgtctggtccccactagaatataccttctgtaagagcagggatttgggacagtgcctagaatagtacttgcagacagtaggctacgat

SEQ ID NO: 61554 - DNA, 120 bp, Artificial Sequence
  ENSG00000072609_119 (sequence is synthesized)
aaatatgaatgacggccccatgcagatggtagcccctctcgctcgaacgcttcacccagttttattttcttttcatcagttaccgccctctgaaggtatccacacacaaacatgaaactg

SEQ ID NO: 61555 - DNA, 120 bp, Artificial Sequence
  ENSG00000072609_120 (sequence is synthesized)
gaccaaagcagggaccccccgcacgcagaatagtgctgggctcgcgtaaggcacctcagtgggtccatcagctgatgcatggacagacaaaatgggtgtatccagacactggagtatcgt

SEQ ID NO: 61556 - DNA, 120 bp, Artificial Sequence
  ENSG00000072609_121 (sequence is synthesized)
gcagcgaggaaacgtgctgagtgtggatggaccttaaacacaccatgcaagtgaaaaggcgtcacagaaggccacatacgatatgatcccatttctatgaaatgtccagaagaggcacat

SEQ ID NO: 61557 - DNA, 120 bp, Artificial Sequence
  ENSG00000072609_122 (sequence is synthesized)
tcataaagacagaaggtgactgagtggttgtcgggctgggtggaggggatagggagtgaatgcaagaaggatccttctgaggtaacggaagtatccggaaactgggttggagtgatgggt

SEQ ID NO: 61558 - DNA, 120 bp, Artificial Sequence
  ENSG00000072609_123 (sequence is synthesized)
gcacagctctgcacatttactacagtcgctgaactgcacacacaacacgggtatattttattgcatagaaattgtattaaagctgttaagaattttacttagattagcatttttcccaca

SEQ ID NO: 61559 - DNA, 120 bp, Artificial Sequence
  ENSG00000072609_124 (sequence is synthesized)
ctgtgccatcaacttagtatatgattagattcattgtttctaactgtatttaaatttaatgtttgtcacattttgcttgctaaatttttaaaattttaaattactgtgggtacataaaag

SEQ ID NO: 61560 - DNA, 120 bp, Artificial Sequence
  ENSG00000072609_125 (sequence is synthesized)
gtgtatatatttatggagtaccttgatattttaatacagacatacaatgtataatgatcaactcccagtaactggggtatccatcacctcaagcctgtatcatttctttgttaggaacat

SEQ ID NO: 61561 - DNA, 120 bp, Artificial Sequence
  ENSG00000072609_126 (sequence is synthesized)
tccagttccactctttttgttatttaaaaatatacaatacattattattaactatattcaccctcctgtgctatggaatactagatcttatgctaattaaatgttttccctatttctccc

SEQ ID NO: 61562 - DNA, 120 bp, Artificial Sequence
  ENSG00000072609_127 (sequence is synthesized)
agttctgcgcgttcacgtccccgatcgggccgtgtccgccgcggccctgcgaggtccgaggggcaatagccctctggaacaagacaattcatgtgagataagaaagaagagcccacaaga

SEQ ID NO: 61563 - DNA, 120 bp, Artificial Sequence
  ENSG00000072609_128 (sequence is synthesized)
ccaaggatgtattctcagtttacagaccactgaccagaggccactccagggtgtcaggactaagagaagtcacaaaacagcagatttcccaagagcagcggaaaatgatccagtcacagg

SEQ ID NO: 61564 - DNA, 120 bp, Artificial Sequence
  ENSG00000072609_129 (sequence is synthesized)
cgagggctaagcctggtcacagacatctccgcatttgtttctctgcaaatgggctccttgcccccagctccaccccacgtagagataggcacaaatagagttaagatgtgagttgagtga

SEQ ID NO: 61565 - DNA, 120 bp, Artificial Sequence
  ENSG00000072609_130 (sequence is synthesized)
gcacacactcctcgtaagccacttgtcattcctaaactacgacatctcaggctgccagctgcactgggctccagtcagtgacaccttacaggcatggttctctcctgagctggatggatc

SEQ ID NO: 61566 - DNA, 120 bp, Artificial Sequence
  ENSG00000072609_131 (sequence is synthesized)
attccgcccgcggcgtcgccacagggtgagggagcttggcttcctgagaagccacccaggagccccggcttggggatgacttgaggccgcgtcttcggttgcgacctttccttccccagc

SEQ ID NO: 61567 - DNA, 120 bp, Artificial Sequence
  ENSG00000072657_0 (sequence is synthesized)
gagaagtagcgcgcgctgggcaagcaagacgctttccaagttgggcgcgtcccagagctcacagcccggtgtccagagtgaggcggggctgatgggggtcgcggaagctgccgtcgcttg

SEQ ID NO: 61568 - DNA, 120 bp, Artificial Sequence
  ENSG00000072657_1 (sequence is synthesized)
tgtccagaacccgtcttaaaagaacccgggccagcatccccagtcgcgcgccctcggcccgcgtgagctctccgatgcctgctctggctgtggcccgggtggcccgcccgcggggggtgc

SEQ ID NO: 61569 - DNA, 120 bp, Artificial Sequence
  ENSG00000072657_2 (sequence is synthesized)
cagagggggcgggggaggaggaggaggcggtgtgatggccctggacggcgagctgggggagcaagaggaggagaagaaaaagaagaagaaaaagaagaggaagaagaagaaggaggagga

SEQ ID NO: 61570 - DNA, 120 bp, Artificial Sequence
  ENSG00000072657_3 (sequence is synthesized)
ggaggaggaggagggggccgagaagagcagctcacccttcgcagccgcgatgggggaagacgacgccgcgcttcgggctggcagcagggggctctccgacccgtgggcagactcagtggg

SEQ ID NO: 61571 - DNA, 120 bp, Artificial Sequence
  ENSG00000072657_4 (sequence is synthesized)
agtgcgaccccgcaccacggagcgccacatcgccgtacacaagcggcttgtgctggccttcgctgtgtccctcgtggcattgctcgcggtcacaatgctcgctgtgctgctcagcctgcg

SEQ ID NO: 61572 - DNA, 120 bp, Artificial Sequence
  ENSG00000072657_5 (sequence is synthesized)
cttcgacgagtgcggggcgagtgccacgccaggcgccgacggtggcccctcaggctttccggagcgcggcggcaacgggagcctccctggatcggcccggcgcaaccaccacgcaggcgg

SEQ ID NO: 61573 - DNA, 120 bp, Artificial Sequence
  ENSG00000072657_6 (sequence is synthesized)
ggactcctggcagcccgaggcgggtggggtggccagtccggggaccacgtcggcccagccgccgtcggaggaggagcgggagccgtgggagccgtggacgcagctgcgcctgtcgggcca

SEQ ID NO: 61574 - DNA, 120 bp, Artificial Sequence
  ENSG00000072657_7 (sequence is synthesized)
cctgaagccgctgcactacaatctgatgctcaccgccttcatggagaacttcaccttctccggggaggtcaacgtggagatcgcgtgccggaacgccacccgctacgtagtgctgcacgc

SEQ ID NO: 61575 - DNA, 120 bp, Artificial Sequence
  ENSG00000072657_8 (sequence is synthesized)
ttcccgagtggcggtggagaaagtgcagctggccgaggaccgggcgttcggggctgtccctgtagccggttttttcctctacccgcaaacccaggtcttagtggtggtgctgaataggac

SEQ ID NO: 61576 - DNA, 120 bp, Artificial Sequence
  ENSG00000072657_9 (sequence is synthesized)
actggacgcgcagaggaattacaatctgaagattatctacaacgcgctcatcgagaatgagctcctgggcttcttccgcagctcctatgtgctccacggggagagaagattccttggtgt

SEQ ID NO: 61577 - DNA, 120 bp, Artificial Sequence
  ENSG00000072657_10 (sequence is synthesized)
tactcagttttcgcctacacatgccagaaaggcatttccttgttttgatgagccaatctacaaggctactttcaaaatcagcatcaagcatcaagcaacctatttatctttatctaatat

SEQ ID NO: 61578 - DNA, 120 bp, Artificial Sequence
  ENSG00000072657_11 (sequence is synthesized)
gccagtggaaacttccgtgtttgaggaagatggatgggttacggatcacttttcacagacccctctcatgtccacatattatttagcctgggcaatttgcaacttcacatacagagaaac

SEQ ID NO: 61579 - DNA, 120 bp, Artificial Sequence
  ENSG00000072657_12 (sequence is synthesized)
taccaccaagagtggggttgtagtacgattatatgcaagacctgatgctatcagaagaggatccggggactatgctctccatataacaaagagattaatagaattttatgaagactactt

SEQ ID NO: 61580 - DNA, 120 bp, Artificial Sequence
  ENSG00000072657_13 (sequence is synthesized)
taaagtgccctattccttgccaaaactagatcttttagctgtgcctaagcatccgtatgctgctatggagaactggggactaagtatttttgtggaacaaagaatactgctggatcccag

SEQ ID NO: 61581 - DNA, 120 bp, Artificial Sequence
  ENSG00000072657_14 (sequence is synthesized)
tgtttcatctatttcttatttgctggatgtcaccatggtcattgttcatgagatatgtcaccagtggtttggtgaccttgtgacgcctgtgtggtgggaagacgtgtggctgaaggaagg

SEQ ID NO: 61582 - DNA, 120 bp, Artificial Sequence
  ENSG00000072657_15 (sequence is synthesized)
gtttgctcactactttgaatttgttggtacagactacctctatcctggctggaacatggaaaagcagaggtttctgaccgatgttctgcatgaagtgatgctgctggacggtttggccag

SEQ ID NO: 61583 - DNA, 120 bp, Artificial Sequence
  ENSG00000072657_16 (sequence is synthesized)
ttcccatccagtatcacaggaagtgctgcaggcaacagatattgacagggtgtttgactggatcgcatataaaaagggtgctgctttaataagaatgctggctaattttatgggccattc

SEQ ID NO: 61584 - DNA, 120 bp, Artificial Sequence
  ENSG00000072657_17 (sequence is synthesized)
agttttccagaggggtttgcaagattatttaaccattcataagtatggtaatgcagccagaaatgatctctggaatacattatcggaggctttaaaaagaaatgggaaatatgtaaatat

SEQ ID NO: 61585 - DNA, 120 bp, Artificial Sequence
  ENSG00000072657_18 (sequence is synthesized)
acaagaagtaatggatcagtggacactccagatgggttatcctgttatcaccatcttgggaaacacaacagcagaaaatagaataataattacccaacagcattttatctatgatatcag

SEQ ID NO: 61586 - DNA, 120 bp, Artificial Sequence
  ENSG00000072657_19 (sequence is synthesized)
tgctaaaactaaagcacttaaacttcagaataacagttacctgtggcagattccattaactattgtggtaggaaatagaagccatgtgtcttcagaagcaattatttgggtgtctaacaa

SEQ ID NO: 61587 - DNA, 120 bp, Artificial Sequence
  ENSG00000072657_20 (sequence is synthesized)
atcagagcaccacagaataacttatttggacaaaggaagctggctgctggggaacatcaatcaaactggctattttagagtcaactatgacctaaggaactggagattattaattgatca

SEQ ID NO: 61588 - DNA, 120 bp, Artificial Sequence
  ENSG00000072657_21 (sequence is synthesized)
attaatccggaatcatgaggttctttctgtcagtaaccgagcgggcttgatcgatgatgccttcagcctagccagggctggctatttgcctcagaatattcctctggagattatcagata

SEQ ID NO: 61589 - DNA, 120 bp, Artificial Sequence
  ENSG00000072657_22 (sequence is synthesized)
cctgtctgaggagaaggattttcttccttggcatgctgccagccgagctctttatcctctagataaattactggaccgcatggaaaactacaacattttcaatgaatatattttaaagca

SEQ ID NO: 61590 - DNA, 120 bp, Artificial Sequence
  ENSG00000072657_23 (sequence is synthesized)
agttgcaacaacatatatcaagcttgggtggccgaaaaataattttaatggatctcttgttcaagcatcctaccaacatgaagaactacgtagagaagttataatgctggcctgcagttt

SEQ ID NO: 61591 - DNA, 120 bp, Artificial Sequence
  ENSG00000072657_24 (sequence is synthesized)
tggcaacaagcactgtcaccaacaggcatcaacacttatttcagattggatttccagcaacaggaacagaataccactaaatgttagagacatcgtatactgtacaggagtgtcactact

SEQ ID NO: 61592 - DNA, 120 bp, Artificial Sequence
  ENSG00000072657_25 (sequence is synthesized)
ggatgaggatgtctgggaattcatatggatgaaattccattccaccacagcagtttctgagaagaaaatattattggaagccttaacttgcagtgatgacaggaatttattaaacaggct

SEQ ID NO: 61593 - DNA, 120 bp, Artificial Sequence
  ENSG00000072657_26 (sequence is synthesized)
tctaaatctgtcactgaattctgaggtggtgctggatcaagatgcaattgatgtcataatccatgtagctcgaaatccacatggtcgagaccttgcctggaagtttttcagggataaatg

SEQ ID NO: 61594 - DNA, 120 bp, Artificial Sequence
  ENSG00000072657_27 (sequence is synthesized)
gaagatattaaataccaggtatggagaagcattgtttatgaattccaaactcatcagtggtgtcacagaatttcttaatactgaaggtgaactcaaagagctcaagaacttcatgaaaaa

SEQ ID NO: 61595 - DNA, 120 bp, Artificial Sequence
  ENSG00000072657_28 (sequence is synthesized)
ctatgatggggtagctgctgcttctttctcacgagctgtggaaactgtcgaagccaatgtgcgctggaaaatgctttaccaagacgagcttttccaatggttaggaaaagctctaagaca

SEQ ID NO: 61596 - DNA, 120 bp, Artificial Sequence
  ENSG00000072657_29 (sequence is synthesized)
ctaatatatgtatcttataaacaaacaattcaactcagaagtttatgagaagacacgctttttgtggaatgaggaaaatgtactacctagaaaatggccagattttcagtgttaacgtgt

SEQ ID NO: 61597 - DNA, 120 bp, Artificial Sequence
  ENSG00000072657_30 (sequence is synthesized)
ttttttagtttttattttttggttttgggggatattttttatttgtttcattcattctgttctgtttctctactgggtgttcctctctaaagaaactcttgcaagtgaaactagccatga

SEQ ID NO: 61598 - DNA, 120 bp, Artificial Sequence
  ENSG00000072657_31 (sequence is synthesized)
aactagccatgattgcttcagctgtacattccttgctgtacaggaccaaatatgatagtgatgcatgttgatgttacagtcaatttggaaaaacatattcagaatatctgtgcatggata

SEQ ID NO: 61599 - DNA, 120 bp, Artificial Sequence
  ENSG00000072657_32 (sequence is synthesized)
tattgtcctgcctgtgttccagcatgcttatttcaaacgtccagtgttgtgtgtgaatatgtgttacacctaggatgggcattatgcaaaagcacaaagattatatatgacaatcagtat

SEQ ID NO: 61600 - DNA, 120 bp, Artificial Sequence
  ENSG00000072657_33 (sequence is synthesized)
tgcaatgaaagaaaaactaaaaacagaaatgatattctcaattttgggcaatgtgagaggtaaaatagcccttgacatgatgaacatcacttatttcagcacttggattgtctggcaatg

SEQ ID NO: 61601 - DNA, 120 bp, Artificial Sequence
  ENSG00000072657_34 (sequence is synthesized)
attactgtgttgctaactcattttctttgagttaaagctgtgtatacattttaaaaggcatatagatagtgtatgcatatgtatatgtacatagggaagccccatatgtatatagtatgt

SEQ ID NO: 61602 - DNA, 120 bp, Artificial Sequence
  ENSG00000072657_35 (sequence is synthesized)
tgtacactgcacatgtacaaagaatgtcttcagatcaaagaaaatttatctctttttataaacttaaggacagttgcaaaaggcttcaaggaatttatctcaacattattctttctatgt

SEQ ID NO: 61603 - DNA, 120 bp, Artificial Sequence
  ENSG00000072657_36 (sequence is synthesized)
cctaactaaatttctcaactgttatgaatttttcatctacttcttgaacagtggtctattctgctacatgaagatgaatacaaacaaaatttttgtataaactactattccagttctcct

SEQ ID NO: 61604 - DNA, 120 bp, Artificial Sequence
  ENSG00000072657_37 (sequence is synthesized)
gtgtcagtcttgcctatagattttgccatcgttttctgtcaaagttccttttgcatgaaacaattatgcaaacttataattattagtgctgaaaaagagtttattttccatcttgtttgt

SEQ ID NO: 61605 - DNA, 120 bp, Artificial Sequence
  ENSG00000072657_38 (sequence is synthesized)
tttcctaccttatgctgagtagtccagagagttaaaaaaattctctgcatgttggtcttttaagtctgttttgctctaatcctccattaagcgagcatacctcaagtgggtctattagca

SEQ ID NO: 61606 - DNA, 120 bp, Artificial Sequence
  ENSG00000072657_39 (sequence is synthesized)
tttaatgaccttttgtgccagttgtgccatcccttaagatgaaaagttccttttcttgtgttaatgtacaaagcttttcttttggcactgacaactgtgttctacctgggaattttgaat

SEQ ID NO: 61607 - DNA, 120 bp, Artificial Sequence
  ENSG00000072657_40 (sequence is synthesized)
agccattttcatggctgtgtgttgtgtaacacaaatgtttttaaatggtattctcacccagtaggccagctctccaaacgttgcttagatgcttcaaaattagcatattttaagtttacc

SEQ ID NO: 61608 - DNA, 120 bp, Artificial Sequence
  ENSG00000072657_41 (sequence is synthesized)
agtataaaataccaatgcaactactctacatagccaaatgtttgtaaatcacgtcttattttcctgaggtttttcactccaccaaatcttacaaatcattgaaagaaatatattctaaca

SEQ ID NO: 61609 - DNA, 120 bp, Artificial Sequence
  ENSG00000072657_42 (sequence is synthesized)
gtacgcactgaatagtgaaaataattagacattttaagaaccagagccatagaattattttaaattagtagaaaagaggagctatttccgaatctatagaataaagtaccacctaaaact

SEQ ID NO: 61610 - DNA, 120 bp, Artificial Sequence
  ENSG00000072657_43 (sequence is synthesized)
gaattttatcatataagcaagtaatacctattagtcatacctaaatttttcagcacttcattcaattaaaatacatgaattttaaatattttacatgatgtgaataggcatgataatact

SEQ ID NO: 61611 - DNA, 120 bp, Artificial Sequence
  ENSG00000072657_44 (sequence is synthesized)
aaaatctaaactttttccatttatcagaaatgataaaatccagttaccacatatcacgtttataaaatccttaattaaatgagtaacttctaaaatataacaatactaaatatcacactg

SEQ ID NO: 61612 - DNA, 120 bp, Artificial Sequence
  ENSG00000072657_45 (sequence is synthesized)
tcacactgcgatggaggtcccaaatatgtggtctatcaccactgaattcatgtaatagataagaaaaaaattagaggtggatgtcttgttttgtgtcatgaattactaaaatctcttagt

SEQ ID NO: 61613 - DNA, 120 bp, Artificial Sequence
  ENSG00000072657_46 (sequence is synthesized)
gtatatttttgagtaaaattaccatttccagatttgagtttgaagggcttttatagttgtattttcctcctcactgttaataatcataatcctttttcagtattttagtggccttgaaca

SEQ ID NO: 61614 - DNA, 120 bp, Artificial Sequence
  ENSG00000072657_47 (sequence is synthesized)
actggtttatctacaatctcaaatcctaagtgtataattatgtgcaatgttcaatacctcatataatacttgctcaacagtatagtggtaccaatggcattaagatggtgtttttgttct

SEQ ID NO: 61615 - DNA, 120 bp, Artificial Sequence
  ENSG00000072657_48 (sequence is synthesized)
atttttcaataatttattctttctaatgttgaaattatatcaggctttaccggtttttttagttgtttaaataagtaatattttcaaaagaataaaataaccaatgatatctcttggaat

SEQ ID NO: 61616 - DNA, 120 bp, Artificial Sequence
  ENSG00000072657_49 (sequence is synthesized)
gaataatctgtaaaacgtagttataaaattctattttctacttagagtttttatcttttcttttttgtcggctttacaaattatatgtatgcatgaaataactaactgttgaaagtgtcc

SEQ ID NO: 61617 - DNA, 120 bp, Artificial Sequence
  ENSG00000072657_50 (sequence is synthesized)
aacctccagccatagcaatttgctgtgccaatatgtgtacaaaaaagtagtttcaattagaaaggacaacattatttatcacattgagtattaaacatttccaggtaactcgtaaataaa

SEQ ID NO: 61618 - DNA, 120 bp, Artificial Sequence
  ENSG00000072657_51 (sequence is synthesized)
aagatttccccatttttacacattttttcttaaaatttttctataatctttgaagtttctaaaatacacaatctcaacctctaagactaacatctacaatactaggtctattcttgagtt

SEQ ID NO: 61619 - DNA, 120 bp, Artificial Sequence
  ENSG00000072657_52 (sequence is synthesized)
agtttcaataacatgtattttagttgggtcataaacttgcattattttatattatctccaggacaattatatcataggactaagatttttgtgatagtattatttacaaatattataagt

SEQ ID NO: 61620 - DNA, 120 bp, Artificial Sequence
  ENSG00000072657_53 (sequence is synthesized)
tatcttgtgaggctattattaaggttatgccatgtattgataaaatgcattgctttctcaaagaactgttacacattttgttttatttgactcatcacaaaaacataataaatgttgtga

SEQ ID NO: 61621 - DNA, 120 bp, Artificial Sequence
  ENSG00000072657_54 (sequence is synthesized)
catcacaaaaacataataaatgttgtgagccctaatattctgatgagaaaactggggctcaggtagcaacatgagctatttaaaactacaaaatagggctgggcacagtggctcatgcct

SEQ ID NO: 61622 - DNA, 120 bp, Artificial Sequence
  ENSG00000072657_55 (sequence is synthesized)
atcacttgagcccaggggtttgagaccagtctgggaaacatattgaggccccatttctataaaaataaaaatgaaaactagccaggcatggtggtgtgcacctgttgtcccagctactgg

SEQ ID NO: 61623 - DNA, 86 bp, Artificial Sequence
  ENSG00000072657_56 (sequence is synthesized)
tggtggtgtgcacctgtttatttaagtccaaaagttcagtgctctagtgagctatgatcactgtactccagcctgggtgacagagt

SEQ ID NO: 61624 - DNA, 120 bp, Artificial Sequence
  ENSG00000072657_57 (sequence is synthesized)
aataaaatcacaatgtttgttgttattttgggaaccaatataacaacctaagtctatcacaacatcattccccaactaaaatataaatatatgttgaaaatatctctatcgattgcatta

SEQ ID NO: 61625 - DNA, 120 bp, Artificial Sequence
  ENSG00000072657_58 (sequence is synthesized)
attggagattttccaaatactagaccagcatcaaaatacacagttaaatatatttgcaataattccattgtttgttaacttttgcatttctaatttgcaggatgttaaacaactggatga

SEQ ID NO: 61626 - DNA, 120 bp, Artificial Sequence
  ENSG00000072657_59 (sequence is synthesized)
ctggatgaaatgttatgatttaatttggtcagtataaataatcaaatattgggacaaataatttaattcatttagtttattaattatatttcctgtctgtatcttttattgaacattgtt

SEQ ID NO: 61627 - DNA, 120 bp, Artificial Sequence
  ENSG00000072657_60 (sequence is synthesized)
accttaaagtactgataatttgcttaattttcaacacaaatttatctgacaaattctgtctatagtaacagatggtcagaatgcagataaattgtgtgcatctcaatcagtaaaaataat

SEQ ID NO: 61628 - DNA, 120 bp, Artificial Sequence
  ENSG00000072657_61 (sequence is synthesized)
attcagtaaaatgtctataaatctatgcagattaagttgtgaaaaacaatgcaattttagtactactggattagatgcagtaaaggaatccctaaggaagtttacaataatatatttaat

SEQ ID NO: 61629 - DNA, 120 bp, Artificial Sequence
  ENSG00000072657_62 (sequence is synthesized)
taaaatctactggcaattagaattttaaggaattcttttctaagaagttggagaacctaaaatagcttgcttattcgcctgggtactctcatgaagtaaccatgtacacctaataaagaa

SEQ ID NO: 61630 - DNA, 120 bp, Artificial Sequence
  ENSG00000072657_63 (sequence is synthesized)
atagtaaaagcacatataatgaaaaataattaagatttcttacacctgattttttcattatcagagataattatcagagataatttttcattatcagagatcatagctgaattatcattt

SEQ ID NO: 61631 - DNA, 120 bp, Artificial Sequence
  ENSG00000072657_64 (sequence is synthesized)
gacaatacataagaatatatattgtatagatacaatatataactatacttaaagaaatatttattgagcatcttttatttcacaaggcacttagtgagggaaaggaatacagagatgaat

SEQ ID NO: 61632 - DNA, 120 bp, Artificial Sequence
  ENSG00000072657_65 (sequence is synthesized)
atggcctgaaggaatgaactcatattacaataaatgaaaaagaaaaagaaataatgaaccaagggaatgagggcaacaggaaaaataattccttgctacagacgggaagtcaatcatttt

SEQ ID NO: 61633 - DNA, 120 bp, Artificial Sequence
  ENSG00000072657_66 (sequence is synthesized)
taggtatacataatattatacaactatttttgtacactagttctcaaaacatttatgatacctagtataatttttattgtttgatttcctagtgcttacttgtgttttacagaaatatgt

SEQ ID NO: 61634 - DNA, 120 bp, Artificial Sequence
  ENSG00000072657_67 (sequence is synthesized)
ttttgaaattataataaaataatagagtttaaactctaataattggaatataaattgggatggaatttatccttaagaaaagctgtttaaacaatttagtagtattagtaagttgcagga

SEQ ID NO: 61635 - DNA, 120 bp, Artificial Sequence
  ENSG00000072657_68 (sequence is synthesized)
aggaatactttaatctacttacgaaaaagtagttcaagttttctaaaatggtttcagcatactatcggtatctcacaatgtgttaattttaagttaattatatattctttaaagcagatt

SEQ ID NO: 61636 - DNA, 120 bp, Artificial Sequence
  ENSG00000072657_69 (sequence is synthesized)
aatacttgtcctaagcataatttatttgttgaaattagtatatgtgaacttatgaaaaaatgttcttgtaaattattctagaatcccaaattttaattatataagaacaaccttttgttc

SEQ ID NO: 61637 - DNA, 120 bp, Artificial Sequence
  ENSG00000072657_70 (sequence is synthesized)
aaccttttgttcaattgctttgaactaatgatgaagttttttaaaatattaagtattttatttaatgtgatatagattcaggaaaagtctaacaaaaatgtacttcagtagttttatttt

SEQ ID NO: 61638 - DNA, 120 bp, Artificial Sequence
  ENSG00000072657_71 (sequence is synthesized)
ttttattttaaagtttaggtaaggaaagtttttaaactgtcttaaatatttaataaaagcagttgttaaaaatatatgttctaatgttaactatatgacatatatgccattgcatgcatt

SEQ ID NO: 61639 - DNA, 120 bp, Artificial Sequence
  ENSG00000072657_72 (sequence is synthesized)
cattttgttttttaaataggtttttcaccactggccccactagtagatgattttaccccagattttgaaaacataccactttaatggcctttatttcaaatacttcgtactttagggata

SEQ ID NO: 61640 - DNA, 120 bp, Artificial Sequence
  ENSG00000072657_73 (sequence is synthesized)
gtattttgaagatgtttatcttttgtacattcctagttcatttattaatgtactaagaaaaagaaaacaaaatgactgattcttttgttttgaattaaatgtttgtgctgtattaatgtt

SEQ ID NO: 61641 - DNA, 120 bp, Artificial Sequence
  ENSG00000072657_74 (sequence is synthesized)
aagtgagttaagataaagggaagctacaaaaatttgaatgcctactaaatgctaggcactttataggtgtcttctaatatatgtctattggtatcacatcaattaataaccctgtgaaat

SEQ ID NO: 61642 - DNA, 120 bp, Artificial Sequence
  ENSG00000072657_75 (sequence is synthesized)
gtcattagctctaattcaccaaagagtagatggaggcagagttgttatcagtttacataattaattagtggtattcacttggattcaaaactctgcaaactgaagccttatatagctcaa

SEQ ID NO: 61643 - DNA, 120 bp, Artificial Sequence
  ENSG00000072657_76 (sequence is synthesized)
actagtcattaatctgccctcagcatgtatgaaaacataatgtttatccgtacagaccattctctatagcagatttgaataggtacttagcacactttatcattgtcactggctctttcg

SEQ ID NO: 61644 - DNA, 120 bp, Artificial Sequence
  ENSG00000072657_77 (sequence is synthesized)
aaagaagtattaatttgtgcattctggtttaccattcatttcttaacaaagttgctttatacgttccataaaaagttttcatgaaaacattttacattagcatgttgtgtagtgggtttt

SEQ ID NO: 61645 - DNA, 120 bp, Artificial Sequence
  ENSG00000072657_78 (sequence is synthesized)
aagttataacaggtaattaacagatatttcggccaacgagacacacacacacatgaaaaaaataagtgaaaagacagaataaattgcaaaggttttacgagtggaccacaaagttaaggt

SEQ ID NO: 61646 - DNA, 120 bp, Artificial Sequence
  ENSG00000072657_79 (sequence is synthesized)
taaacttctgtctttgcatgtggaggagacatattagtctagccagaactttccttttgcttagcagtgaggtcagagaagtatctctgtcattctgcttagaagtatacatggactgca

SEQ ID NO: 61647 - DNA, 120 bp, Artificial Sequence
  ENSG00000072657_80 (sequence is synthesized)
attgcttaatttacttaaacttaacattttcaatgggtttgctgtgtgaagatacagtctaagataagtgctttgacttgcctctgcagaggtcaacttatttctcatcacacacatttt

SEQ ID NO: 61648 - DNA, 120 bp, Artificial Sequence
  ENSG00000072657_81 (sequence is synthesized)
tcttatgtcatataagtaaaggaaagagtgaaacgttttatagaaaatattacagtggagttaagaacatctgcctcaaatgtacagtgcatttactttttaagttaatcatttagtagc

SEQ ID NO: 61649 - DNA, 120 bp, Artificial Sequence
  ENSG00000072657_82 (sequence is synthesized)
tacccttttaacctctactatgttcacagtattgcatttgctcttgtaaacaattttgttcccacctttacatagcgtatgacctactcagtgagaacattcattattaagtttttgcta

SEQ ID NO: 61650 - DNA, 120 bp, Artificial Sequence
  ENSG00000072657_83 (sequence is synthesized)
ttaattttcatttaaaataggtttattaactagcaaatctcaaatgcaaaacatttttgagtgaatttttcctcaaatgttgtattctacctttcaaaatattgtgtaacagcaattcca

SEQ ID NO: 61651 - DNA, 120 bp, Artificial Sequence
  ENSG00000072657_84 (sequence is synthesized)
cattatccttttgaatgctacctatatattgccacatataaagatatttttcatttttcatttttcattgctatcttttaatccctttgcattttgataatatcgaaaacagattagggc

SEQ ID NO: 61652 - DNA, 120 bp, Artificial Sequence
  ENSG00000072657_85 (sequence is synthesized)
tgaaaaactaaaaaagattagggcttgtattatgcattgtctagttacttgaacaataagagaaattctatctttgagctttcataattggctttctggacaccactgagtttattagat

SEQ ID NO: 61653 - DNA, 120 bp, Artificial Sequence
  ENSG00000072657_86 (sequence is synthesized)
aatctttaaaaatattatgaactattttgagtggacctaaatttattcagtaataaagtttactttcctaaatccattccccaagtgaacaggcttatttaaaatatgtcatataaaagc

SEQ ID NO: 61654 - DNA, 120 bp, Artificial Sequence
  ENSG00000072657_87 (sequence is synthesized)
acttttcctttctaacattttatgatttaggaattaaaaagtagctgttctttcagtaaataagtgttaataaagcagtgaccaaataaataaccttttgttagtttagcagataaatgt

SEQ ID NO: 61655 - DNA, 120 bp, Artificial Sequence
  ENSG00000072657_88 (sequence is synthesized)
tttcaatgtatgcctttaaaattattcagtaaaaattgaattagtacgtattcaacatgaaatttttagtcttttctgaccaagcactaataaaattgatttccctaaatgagaaaattt

SEQ ID NO: 61656 - DNA, 120 bp, Artificial Sequence
  ENSG00000072657_89 (sequence is synthesized)
gtcttctgtattttaagcagaaaaaatatgaattctgcctctgataatcaaattttgtacagcaatgtgtaatgtgtcacaatttaaaaagttttaattttctgacatgcagataaggcc

SEQ ID NO: 61657 - DNA, 120 bp, Artificial Sequence
  ENSG00000072657_90 (sequence is synthesized)
aaaataaataataccatctgtttttttcacttgaaaatacatttttaaaattttgagtatatatattatagaggtccatgcaaatggaaaaaaattattctcttctgacatggacttttt

SEQ ID NO: 61658 - DNA, 120 bp, Artificial Sequence
  ENSG00000072657_91 (sequence is synthesized)
catgactatacacatgctgaggctagaataaaaacatatatttgtgctatattgtaaaaataaaaacaatttgttctcctttctaattatatgcctttagaataaatgaaatgatctgca

SEQ ID NO: 61659 - DNA, 120 bp, Artificial Sequence
  ENSG00000072657_92 (sequence is synthesized)
aagttaggcctggtggctaaggcctgtaatcgcaaccctttggcaggccatggagggagactagctcgagcccaggagctcaaggccagcatgggccacataatggaatcctgttgctac

SEQ ID NO: 61660 - DNA, 120 bp, Artificial Sequence
  ENSG00000072657_93 (sequence is synthesized)
accaagagtggggttgtaataaacgtggacccaaatgcaatgagaagaaacctagtatatatcactagagatgttaggaattaaaacaaaagggggactgttctaggcactggggacaca

SEQ ID NO: 61661 - DNA, 120 bp, Artificial Sequence
  ENSG00000072657_94 (sequence is synthesized)
gcagtaaataaaatgggcaaagcttcatgaagcttacattgtttctattccagtgggttgctctttgtggccaggatgtagcagaaaaataaaaaaaagaagatggagttttttgatact

SEQ ID NO: 61662 - DNA, 120 bp, Artificial Sequence
  ENSG00000072657_95 (sequence is synthesized)
agaagagaaggcattcctgacccaaagagcatcagaagaaaagtccatataaacttgcttaccttatcacattagagcctgtttgtttgctgcaggagaaagcaaagggcaagataaaac

SEQ ID NO: 61663 - DNA, 120 bp, Artificial Sequence
  ENSG00000072657_96 (sequence is synthesized)
ctgaagacacagaagaaagatgggatcaataatagaacatggcttggtgaagagaagagaaactgaggcacaagtgttatgtggtcaagatcatacagctaataggtggcagtctgactc

SEQ ID NO: 61664 - DNA, 120 bp, Artificial Sequence
  ENSG00000072657_97 (sequence is synthesized)
ttttattttcttatcctcttctttacccctagagctgtataataatgtactactagtgccattgtgactttagctgcatgagacaatcttcctttcattcttcatcttacatttcacttt

SEQ ID NO: 61665 - DNA, 120 bp, Artificial Sequence
  ENSG00000072657_98 (sequence is synthesized)
aaatataatggctaaagaagaagaaaattatgagaacatttcaaaaacttacagattttttttttcatttctgagcctggtttcagaaatggaaacagcattgttaaaataaccttaaca

SEQ ID NO: 61666 - DNA, 120 bp, Artificial Sequence
  ENSG00000072657_99 (sequence is synthesized)
acatttgcaaactgtggaagtaatttgctccttttgggacatttttcggcatggcttttgttagaagtttttttgtgtcttctggatggctctcttgtacctcgtttaaggtttctcttg

SEQ ID NO: 61667 - DNA, 120 bp, Artificial Sequence
  ENSG00000072682_0 (sequence is synthesized)
ggaggcgccgagctgaccgggcgacgccgcgggaggttctggaaacgccgggagctgcgagtgtccagctgcggagacccgtgataattcgttaactaattcaacaaacgggacccttct

SEQ ID NO: 61668 - DNA, 120 bp, Artificial Sequence
  ENSG00000072682_1 (sequence is synthesized)
gtgtgccagaaaccgcaagcagttgctaacccagtgggacaggcggattggaagagcgggaaggtcctggcccagagcagtgtgacacttccctctgtgaccatgaaactctgggtgtct

SEQ ID NO: 61669 - DNA, 120 bp, Artificial Sequence
  ENSG00000072682_2 (sequence is synthesized)
gcattgctgatggcctggtttggtgtcctgagctgtgtgcaggccgaattcttcacctctattgggcacatgactgacctgatttatgcagagaaagagctggtgcagtctctgaaagag

SEQ ID NO: 61670 - DNA, 120 bp, Artificial Sequence
  ENSG00000072682_3 (sequence is synthesized)
tacatccttgtggaggaagccaagctttccaagattaagagctgggccaacaaaatggaagccttgactagcaagtcagctgctgatgctgagggctacctggctcaccctgtgaatgcc

SEQ ID NO: 61671 - DNA, 120 bp, Artificial Sequence
  ENSG00000072682_4 (sequence is synthesized)
tacaaactggtgaagcggctaaacacagactggcctgcgctggaggaccttgtcctgcaggactcagctgcaggttttatcgccaacctctctgtgcagcggcagttcttccccactgat

SEQ ID NO: 61672 - DNA, 120 bp, Artificial Sequence
  ENSG00000072682_5 (sequence is synthesized)
gaggacgagataggagctgccaaagccctgatgagacttcaggacacatacaggctggacccaggcacaatttccagaggggaacttccaggaaccaagtaccaggcaatgctgagtgtg

SEQ ID NO: 61673 - DNA, 120 bp, Artificial Sequence
  ENSG00000072682_6 (sequence is synthesized)
gatgactgctttgggatgggccgctcggcctacaatgaaggggactattatcatacggtgttgtggatggagcaggtgctaaagcagcttgatgccggggaggaggccaccacaaccaag

SEQ ID NO: 61674 - DNA, 120 bp, Artificial Sequence
  ENSG00000072682_7 (sequence is synthesized)
tcacaggtgctggactacctcagctatgctgtcttccagttgggtgatctgcaccgtgccctggagctcacccgccgcctgctctcccttgacccaagccacgaacgagctggagggaat

SEQ ID NO: 61675 - DNA, 120 bp, Artificial Sequence
  ENSG00000072682_8 (sequence is synthesized)
ctgcggtactttgagcagttattggaggaagagagagaaaaaacgttaacaaatcagacagaagctgagctagcaaccccagaaggcatctatgagaggcctgtggactacctgcctgag

SEQ ID NO: 61676 - DNA, 120 bp, Artificial Sequence
  ENSG00000072682_9 (sequence is synthesized)
tctgtaggtaccaccatggcaacagggccccacagctgctcattgcccccttcaaagaggaggacgagtgggacagcccgcacatcgtcaggtactacgatgtcatgtctgatgaggaaa

SEQ ID NO: 61677 - DNA, 120 bp, Artificial Sequence
  ENSG00000072682_10 (sequence is synthesized)
tcgagaggatcaaggagatcgcaaaacctaaacttgcacgagccaccgttcgtgatcccaagacaggagtcctcactgtcgccagctaccgggtttccaaaagctcctggctagaggaag

SEQ ID NO: 61678 - DNA, 120 bp, Artificial Sequence
  ENSG00000072682_11 (sequence is synthesized)
atgatgaccctgttgtggcccgagtaaatcgtcggatgcagcatatcacagggttaacagtaaagactgcagaattgttacaggttgcaaattatggagtgggaggacagtatgaaccgc

SEQ ID NO: 61679 - DNA, 120 bp, Artificial Sequence
  ENSG00000072682_12 (sequence is synthesized)
acttcgacttctctaggaatgatgagcgagatactttcaagcatttagggacggggaatcgtgtggctactttcttaaactacatgagtgatgtagaagctggtggtgccaccgtcttcc

SEQ ID NO: 61680 - DNA, 120 bp, Artificial Sequence
  ENSG00000072682_13 (sequence is synthesized)
ctgatctgggggctgcaatttggcctaagaagggtacagctgtgttctggtacaacctcttgcggagcggggaaggtgactaccgaacaagacatgctgcctgccctgtgcttgtgggct

SEQ ID NO: 61681 - DNA, 120 bp, Artificial Sequence
  ENSG00000072682_14 (sequence is synthesized)
gcaagtgggtctccaataagtggttccatgaacgaggacaggagttcttgagaccttgtggatcaacagaagttgactgacatccttttctgtccttccccttcctggtccttcagccca

SEQ ID NO: 61682 - DNA, 120 bp, Artificial Sequence
  ENSG00000072682_15 (sequence is synthesized)
tgtcaacgtgacagacacctttgtatgttcctttgtatgttcctatcaggctgatttttggagaaatgaatgtttgtctggagcagagggagaccatactagggcgactcctgtgtgact

SEQ ID NO: 61683 - DNA, 120 bp, Artificial Sequence
  ENSG00000072682_16 (sequence is synthesized)
gaagtcccagcccttccattcagcctgtgccatccctggccccaaggctaggatcaaagtggctgcagcagagttagctgtctagcgcctagcaaggtgcctttgtacctcaggtgtttt

SEQ ID NO: 61684 - DNA, 120 bp, Artificial Sequence
  ENSG00000072682_17 (sequence is synthesized)
aggtgtgagatgtttcagtgaaccaaagttctgataccttgtttacatgtttgtttttatggcatttctatctattgtggctttaccaaaaaataaaatgtccctaccagaagccttaaa

SEQ ID NO: 61685 - DNA, 120 bp, Artificial Sequence
  ENSG00000072682_18 (sequence is synthesized)
aggtgacccatgagctggagtggtcagaggaaggctggcaaaagggcatcgtggacagaggaacagcctatgtgagtgggagcagagaccttggccaatgccattccttatggccttgta

SEQ ID NO: 61686 - DNA, 120 bp, Artificial Sequence
  ENSG00000072682_19 (sequence is synthesized)
gtggaagcaaggtgatggggaaggaacactgtaggggatagctgtccacggacgctgtctacaagaccctggagtgagataacgtgcctggtactgtgccctgcatgtgtaagatgccca

SEQ ID NO: 61687 - DNA, 120 bp, Artificial Sequence
  ENSG00000072682_20 (sequence is synthesized)
ttcctatgcatcaccttcatgcaggcagagtctggataatgaatgctttagcagcaaaaaagcatcttgggtcttggatttcagacctggtttcaacacttgtgttccctctaagtgtca

SEQ ID NO: 61688 - DNA, 120 bp, Artificial Sequence
  ENSG00000072682_21 (sequence is synthesized)
gtgtccttttctggaaagtagggtaaatagtttctctttgtctcccagagaacatagcacatgtgttcatgattgtaatgctgttataatgtgtacttcatttttaaattttgagataag

SEQ ID NO: 61689 - DNA, 120 bp, Artificial Sequence
  ENSG00000072682_22 (sequence is synthesized)
aattgttcatgatacacagatgtatacttaaaaaaatatgaaggtgagcaggagcacctgtgtcaacaccaagttagaaaagagaacgttttcaagtcagtacctcaggagccccttggg

SEQ ID NO: 61690 - DNA, 120 bp, Artificial Sequence
  ENSG00000072682_23 (sequence is synthesized)
aacccctcctagatcacatctccttcactgcccccagcactttggagataaatcattgtctcatgatgtgtggtactcattcctttgcttgtctttatagttttaccatctatgattaga

SEQ ID NO: 61691 - DNA, 120 bp, Artificial Sequence
  ENSG00000072682_24 (sequence is synthesized)
tccctaaataagtagttattctgttttccctgattttgaacttttactaatagaatgagagtaaatatttttgggtatgtggcttcttttgttcaacattgttttaagattcatccgtgt

SEQ ID NO: 61692 - DNA, 120 bp, Artificial Sequence
  ENSG00000072682_25 (sequence is synthesized)
tgcttgtgtagctgtaatttgttttaatctttatagtacattcagttttgttaatgcttattgtaggactgtaccataatacaggcagcatgctgctgataaacactggaattgatttca

SEQ ID NO: 61693 - DNA, 120 bp, Artificial Sequence
  ENSG00000072682_26 (sequence is synthesized)
gccagctccggctccggctccggctccggctcccgcgaggccgggtagcctgggcgttcccaggggtcgcagaggacggcgaaccccggcggagccaccggagctggggaccaggacgca

SEQ ID NO: 61694 - DNA, 120 bp, Artificial Sequence
  ENSG00000072682_27 (sequence is synthesized)
tggggaccaggacgcaggcaggcgtgtggagcgtgaggtggggacgtggcggcggctcaagtgggcggagccccggcagcggcccgaggcggagtcgccaagggaggaggcgccgagctg

SEQ ID NO: 61695 - DNA, 120 bp, Artificial Sequence
  ENSG00000072682_28 (sequence is synthesized)
gaagaaaggacagggagggaagtcccttcaggggcgggtgagttcccagacttctacctcagaaaggtaggtgctttctgggaaatgtctctgttgctggagtcccagagccctatcccc

SEQ ID NO: 61696 - DNA, 120 bp, Artificial Sequence
  ENSG00000072682_29 (sequence is synthesized)
tgtccatgggaaaatgagggtgtttctgctcagggcagagcttctgtgatgcttgcagtcaggtccctgagcacagtctcttaagaatgtgttctgaaaggccatctctttcccagggta

SEQ ID NO: 61697 - DNA, 120 bp, Artificial Sequence
  ENSG00000072682_30 (sequence is synthesized)
tattggctaagcccgttctgcaccctcccaagggctgggagtcctaggtcttgtccgggcagggtccagcttggagcccattagatgggccattggatcagaaagtcttttctcccccag

SEQ ID NO: 61698 - DNA, 120 bp, Artificial Sequence
  ENSG00000072682_31 (sequence is synthesized)
cgcttcccccaacgcaacatctaggttcttaggaaacttcatttgttgtgaaaatcggaaatgaaaagacagttggtgacaaactcctttctccatcacctccttattggacagaaacga

SEQ ID NO: 61699 - DNA, 85 bp, Artificial Sequence
  ENSG00000072682_32 (sequence is synthesized)
aaactcctttctccatcacctccttattggacagaaacgacccaggaatgcgcctcgcaagccaaagaagaagaagaggaagagg

SEQ ID NO: 61700 - DNA, 120 bp, Artificial Sequence
  ENSG00000072682_33 (sequence is synthesized)
gaagaagaagaggaagaagaagaagaatgcagcagtaggttgtttacagattggtcacgagtcttggcaagaaagtctgaagacgggaccagctgcacatgttttaccctaagagcttgc

SEQ ID NO: 61701 - DNA, 120 bp, Artificial Sequence
  ENSG00000072682_34 (sequence is synthesized)
gttttaccctaagagcttgctatataaaggatactttctggaaggctggttggtgtgaggattcagtcttgcagccactcgagacatcacttctgttcgagaaaccaggagctctaagag

SEQ ID NO: 61702 - DNA, 120 bp, Artificial Sequence
  ENSG00000072682_35 (sequence is synthesized)
aatgtataatgagaacttctatgtgtggagagttaaacaagaagctgtctcatcccagggaagatgaagagaaaatggcggatctgggcttgaagtgcacacagtgttggaaaaggcccc

SEQ ID NO: 61703 - DNA, 120 bp, Artificial Sequence
  ENSG00000072682_36 (sequence is synthesized)
acctaaggctctaggaccagcagtccctgagaagtagctgtgtgtaggattaagacaagctgactgcggagagctgtgacattgggcattcaagcatgaagcattgttggcccagagagg

SEQ ID NO: 61704 - DNA, 120 bp, Artificial Sequence
  ENSG00000072682_37 (sequence is synthesized)
gtgcacaagcattctccctcagagaaccatggtgttccagagccagagagagatggagagcttccacaatccttgtgaagatctgttatcctaacaccaatatatcccctttaagaaaat

SEQ ID NO: 61705 - DNA, 120 bp, Artificial Sequence
  ENSG00000072682_38 (sequence is synthesized)
ggtggccccctgtaaattgtcaatatagcaaattggctcccataatatattgaaacactattaccaccttggggattctttttcaaattacaagcttgatttaatataaaacgtaatgat

SEQ ID NO: 61706 - DNA, 120 bp, Artificial Sequence
  ENSG00000072682_39 (sequence is synthesized)
taatacattagattaaaagaagaaaggaatcttgtaattatctcaaaaggcattgacaaaattcatcagccattcacacgataaaagttagaaaaccatgaagagaggaaatgttcttaa

SEQ ID NO: 61707 - DNA, 120 bp, Artificial Sequence
  ENSG00000072682_40 (sequence is synthesized)
cattttaaagaacagatataaaaaaccaaaagccagcattagatttaacagtctaggaagttctattaatgggagaatccaatgtcctcttcactactgttgttcagtgttgctctggaa

SEQ ID NO: 61708 - DNA, 120 bp, Artificial Sequence
  ENSG00000072682_41 (sequence is synthesized)
taatatccaagagaatcaattgaaaaatgattatgaccagtaggagaatccagtaggagggagcagagtagaataaattaatatatgtatatagattttaatagcttttaagagtgctaa

SEQ ID NO: 61709 - DNA, 120 bp, Artificial Sequence
  ENSG00000072682_42 (sequence is synthesized)
gtcacaactgattggaaaatgtgatgaaaacaatttaccattcacgataatggtgaaacattaaaaatatctagaaatgaattttgagtacatcaaaagcctataaacttttttcttttt

SEQ ID NO: 61710 - DNA, 120 bp, Artificial Sequence
  ENSG00000072682_43 (sequence is synthesized)
tatttcctttttcttatcctagtggtggtgagaacaaagggcctatgaactttgatctaggatagatttaaaagaagacaaaaggtatgcaggcatatgtcatgtttctagaaaaatcaa

SEQ ID NO: 61711 - DNA, 120 bp, Artificial Sequence
  ENSG00000072682_44 (sequence is synthesized)
tatttttaatttattagtaaattcaatgcaattccaaacaaaatttgtttgggtgggaggaattgacaagatgattctaaggatcaactgaaaagtaagtatgaaaaaaacccacaaata

SEQ ID NO: 61712 - DNA, 120 bp, Artificial Sequence
  ENSG00000072682_45 (sequence is synthesized)
ttggattaagagactaataaagtaagatttgccctataagtatcaaagtatgcaatagagctaaaataattaagaatgtgatagcagcataggaaaagacgaatatgttagtggaacaaa

SEQ ID NO: 61713 - DNA, 120 bp, Artificial Sequence
  ENSG00000072682_46 (sequence is synthesized)
agagagtccatagcatgagataaagaaaacattttaattcagggaataaaaggtagtttactcaataactcatgttggggccatttactattatgcataaaaaataaggctataattcta

SEQ ID NO: 61714 - DNA, 120 bp, Artificial Sequence
  ENSG00000072682_47 (sequence is synthesized)
tatgctatataatttcccacattataaagtaaatcccaaatggattcatgatctatatattttaattttcccaatgtgaatgcttttataaactactcatatgctttaccagaaatgact

SEQ ID NO: 61715 - DNA, 120 bp, Artificial Sequence
  ENSG00000072682_48 (sequence is synthesized)
ggtaaaaaaatatatagattaatatttttataatcatggtgctacggtttgaatgtgtcccccagagttcatgtgttggaaacttaatctacaatgcaacagtgttgagaggtgggctct

SEQ ID NO: 61716 - DNA, 120 bp, Artificial Sequence
  ENSG00000072682_49 (sequence is synthesized)
tacgaggtgataaggtcatgagggctctgcccccaatggattaatgccaacagaggtgggtttgttattgtgggaatgtgtccttgtgaaggaggagctcggtccccctttgtctctctc

SEQ ID NO: 61717 - DNA, 120 bp, Artificial Sequence
  ENSG00000072682_50 (sequence is synthesized)
accctctagccttctgccatggaataatgcagcaagaaggcccttgaaagatgctggcaccttgatattggacttctcagcttccagaattttgagaaataaatttcttttctttataaa

SEQ ID NO: 61718 - DNA, 120 bp, Artificial Sequence
  ENSG00000072682_51 (sequence is synthesized)
cgtaatgaccaatgtttgacccctagatgccaagatattcatcagcaagatctttaaacaatgcctgtagaatagaaaactcttcataaagatgcttatttaacctctccagtggtcacg

SEQ ID NO: 61719 - DNA, 120 bp, Artificial Sequence
  ENSG00000072682_52 (sequence is synthesized)
ctgcagcctcgaactcctgggctcaaggggtcctcccacctcagccttctgagtagtttggactataggtgcatgccgccacagctggctattttttttttcatttttattttttctaga

SEQ ID NO: 61720 - DNA, 120 bp, Artificial Sequence
  ENSG00000072682_53 (sequence is synthesized)
gttgtgaaaatcggaaatgaaaagacagttggtgacaaactcctttctccatcacctccttattggacagaaacgacccaggaatgcgcctcgcacacttccctctgtgaccatgaaact

SEQ ID NO: 61721 - DNA, 120 bp, Artificial Sequence
  ENSG00000072682_54 (sequence is synthesized)
cggatgtgggtctcctgtgggcctcaactcttgaacactcatgacatggagactgttctaatgaatcacactggttaagtaggcatgggaagagcctttcttggctaaagggctggccat

SEQ ID NO: 61722 - DNA, 120 bp, Artificial Sequence
  ENSG00000072682_55 (sequence is synthesized)
cacgtcagggtggcttctgccttgattactttctcatcctgttgtcactcctgggaccctcttggtgagagaaccatctgggtatgcccatcttcttcccaggataacttctatgtagct

SEQ ID NO: 61723 - DNA, 120 bp, Artificial Sequence
  ENSG00000072682_56 (sequence is synthesized)
tcagcaaattgaggcctgagatcatgtcttgtcttatttgtgtctgattccagggcacagtgcagggggtcatcatgaaggagtcattcattcaggctactaaactgaccaataggattg

SEQ ID NO: 61724 - DNA, 120 bp, Artificial Sequence
  ENSG00000072682_57 (sequence is synthesized)
taacatgcttgctttcttttcacagtctccaataagtggttccatgaacgaggacaggagttcttgagaccttgtggatcaacagaagttgactgacatccttttctgtccttccccttc

SEQ ID NO: 61725 - DNA, 120 bp, Artificial Sequence
  ENSG00000072682_58 (sequence is synthesized)
aggcagggaaatccgtcagcctccagggacgctctccctacagccccggcgaggggatcgggtcgtggcgacctctccagacgcccaggggctgggcaggagggcgggccaaggcccgca

SEQ ID NO: 61726 - DNA, 120 bp, Artificial Sequence
  ENSG00000072682_59 (sequence is synthesized)
ggtgcctataagaggaaacctttgagagggtgatgtggggctggcctggttacttcatgccagtgcttgagaggagctaagtacatgggctaaggagtcactgtttattttctatttaag

SEQ ID NO: 61727 - DNA, 120 bp, Artificial Sequence
  ENSG00000072682_60 (sequence is synthesized)
accttttcccttacattgggggtcccagctgttatctagattaaggggctagaagtatctgtggggagttactgtattcatttttcattgcctcttgatgaaaagggccccagaacctgg

SEQ ID NO: 61728 - DNA, 120 bp, Artificial Sequence
  ENSG00000072682_61 (sequence is synthesized)
caccagggaattctcactaggaaaattgtcacaggtcaagacctatgtgggtggacgcattagtcttccttttcctctggttccacagctgggccaacaaaatggaagccttgactagca

SEQ ID NO: 61729 - DNA, 120 bp, Artificial Sequence
  ENSG00000072682_62 (sequence is synthesized)
tccaggtgagcgccccgcccgctcagccgccagatcaaccttagcgctggggcgcgggctggggtcgccaggcggtgcgttctgcccgcgcggggctgagagttaggggccggggccgga

SEQ ID NO: 61730 - DNA, 120 bp, Artificial Sequence
  ENSG00000072682_63 (sequence is synthesized)
tccggggccgggggtcgcgccgctagccgccagcagcgcagtccgggccgccaccctgcaccctccgccctgtttctgcacccgtctgggttcttgtgccgccgcccgcaagccttcccg

SEQ ID NO: 61731 - DNA, 120 bp, Artificial Sequence
  ENSG00000072682_64 (sequence is synthesized)
atatatttctctctgagaaaatggatttgtcaacctctttctttggcttctcagctctctcggcctttgggtttgcatagtcctgctatccatggaacaatggctcacaagggccaacac

SEQ ID NO: 61732 - DNA, 120 bp, Artificial Sequence
  ENSG00000072694_0 (sequence is synthesized)
gccctctagggtagaatccgccaagctttgagagaaggctgtgactgctgtgctctgggcgccagctcgctccagggagtgatgggaatcctgtcattcttacctgtccttgccactgag

SEQ ID NO: 61733 - DNA, 120 bp, Artificial Sequence
  ENSG00000072694_1 (sequence is synthesized)
agtgactgggctgactgcaagtccccccagccttggggtcatatgcttctgtggacagctgtgctattcctggctcctgttgctgggacacctgcagctcccccaaaggctgtgctgaaa

SEQ ID NO: 61734 - DNA, 120 bp, Artificial Sequence
  ENSG00000072694_2 (sequence is synthesized)
ctcgagccccagtggatcaacgtgctccaggaggactctgtgactctgacatgccgggggactcacagccctgagagcgactccattcagtggttccacaatgggaatctcattcccacc

SEQ ID NO: 61735 - DNA, 120 bp, Artificial Sequence
  ENSG00000072694_3 (sequence is synthesized)
cacacgcagcccagctacaggttcaaggccaacaacaatgacagcggggagtacacgtgccagactggccagaccagcctcagcgaccctgtgcatctgactgtgctttctgagtggctg

SEQ ID NO: 61736 - DNA, 120 bp, Artificial Sequence
  ENSG00000072694_4 (sequence is synthesized)
gtgctccagacccctcacctggagttccaggagggagaaaccatcgtgctgaggtgccacagctggaaggacaagcctctggtcaaggtcacattcttccagaatggaaaatccaagaaa

SEQ ID NO: 61737 - DNA, 120 bp, Artificial Sequence
  ENSG00000072694_5 (sequence is synthesized)
ttttcccgttcggatcccaacttctccatcccacaagcaaaccacagtcacagtggtgattaccactgcacaggaaacataggctacacgctgtactcatccaagcctgtgaccatcact

SEQ ID NO: 61738 - DNA, 120 bp, Artificial Sequence
  ENSG00000072694_6 (sequence is synthesized)
gtccaagctcccagctcttcaccgatggggatcattgtggctgtggtcactgggattgctgtagcggccattgttgctgctgtagtggccttgatctactgcaggaaaaagcggatttca

SEQ ID NO: 61739 - DNA, 120 bp, Artificial Sequence
  ENSG00000072694_7 (sequence is synthesized)
gctctcccaggataccctgagtgcagggaaatgggagagaccctccctgagaaaccagccaatcccactaatcctgatgaggctgacaaagttggggctgagaacacaatcacctattca

SEQ ID NO: 61740 - DNA, 120 bp, Artificial Sequence
  ENSG00000072694_8 (sequence is synthesized)
atttgagaagaaaatcagagagggaagatctggtatttcctggcctaaattccccttggggaggacagggagatgctgcagttccaaaagagaaggtttcttccagagtcatctacctga

SEQ ID NO: 61741 - DNA, 120 bp, Artificial Sequence
  ENSG00000072694_9 (sequence is synthesized)
gtcctgaagctccctgtcctgaaagccacagacaatatggtcccaaataaccgactgcaccttctgtgcttcagctcttcttgacatcaaggctcttccgttccacatccacacagccaa

SEQ ID NO: 61742 - DNA, 120 bp, Artificial Sequence
  ENSG00000072694_10 (sequence is synthesized)
tccaattaatcaaaccactgttattaacagataatagcaacttgggaaatgcttatgttacaggttacgtgagaacaatcatgtaaatctatatgatttcagaaatgttaaaatagacta

SEQ ID NO: 61743 - DNA, 120 bp, Artificial Sequence
  ENSG00000072694_11 (sequence is synthesized)
agaaatgttaaaatagactaacctctaccagcacattaaaagtgattgtttctgggtgataaaattattgatgatttttattttctttatttttctataaagatcatatattacttttat

SEQ ID NO: 61744 - DNA, 120 bp, Artificial Sequence
  ENSG00000072694_12 (sequence is synthesized)
acattctgtttaccttttcaaggctgtattggttggagtgtagactgaactgcctggggtctgtttctcttcagtgatgagactcttaggaaggcaggaatggataggatagggggagga

SEQ ID NO: 61745 - DNA, 120 bp, Artificial Sequence
  ENSG00000072694_13 (sequence is synthesized)
gaggagagatggggatttagaatgtagagtgagtgccccttttcttaaaactgaatacagtcacgcaccacataatgatgtttagttcaacaacagactgcatatatgatggtgatccca

SEQ ID NO: 61746 - DNA, 120 bp, Artificial Sequence
  ENSG00000072694_14 (sequence is synthesized)
taaaattataataccatatttctattgtaccttttctattcctatgtttagatatatgagtacttaccattgtgttacaattgcctaaagtattcagtacagtagcatgctgtacaggtt

SEQ ID NO: 61747 - DNA, 120 bp, Artificial Sequence
  ENSG00000072694_15 (sequence is synthesized)
tgtagcctaggggcaataggctatacgctacagcctaggtgtgtagtaggccacaccatttaggtttgtataagtacctgctatgatgttcacacaacaaaattgcctgcatttctcaaa

SEQ ID NO: 61748 - DNA, 120 bp, Artificial Sequence
  ENSG00000072694_16 (sequence is synthesized)
atgtatccccatatttcaacaatgcatgactgtactcttctgccaatgaccttgtattcttgtttccatgtcttcttctctttcctcctatggcaaataaaacactgttttgcaacacaa

SEQ ID NO: 61749 - DNA, 120 bp, Artificial Sequence
  ENSG00000072694_17 (sequence is synthesized)
atgaaatctgctttcaggcagaggtttgcaggaaaggggggtggcctgcttactgggaagtatcgctgtgagttgcctcagcacatatcagtggttgtttttgcctcagttctgattgaa

SEQ ID NO: 61750 - DNA, 120 bp, Artificial Sequence
  ENSG00000072694_18 (sequence is synthesized)
cagaagaaggtttcaaggccaaaaacaggcagccaagtgtgagagaagcagaaggaaatccctactgcataaaacccatttccattttaatggcagaattgaaaagcacagaccacaact

SEQ ID NO: 61751 - DNA, 120 bp, Artificial Sequence
  ENSG00000072694_19 (sequence is synthesized)
gaatcctagccctggaaatgactcactatacaacatgatgaattcatttaacccttgagtttccatttcttcacctgctccgtggggcactaacgcctccctcagaggcttctggtgaga

SEQ ID NO: 61752 - DNA, 120 bp, Artificial Sequence
  ENSG00000072694_20 (sequence is synthesized)
atcagtgtttccctgcccccgccccgccctccatgccccttctccacgttctcactgtgctaggtgctcttctctgtctttctcttccaccagcctgtgggaaacctgagatgaaagtcg

SEQ ID NO: 61753 - DNA, 120 bp, Artificial Sequence
  ENSG00000072694_21 (sequence is synthesized)
tgtcttacccatctttgtatttccagcatctgaaactgggcagagcttaataaatattttgctggagaggttgatgatcttacaaagctcccattgaaaggtggctctctgtaaagcaaa

SEQ ID NO: 61754 - DNA, 120 bp, Artificial Sequence
  ENSG00000072694_22 (sequence is synthesized)
attgtgatgaacattgtccttgtggcttttcacttagtcccctcccttcacctgaagagcaaattttcctcaaaagtacacagcaaacgaatgacccactggtgacactgctgcctttag

SEQ ID NO: 61755 - DNA, 120 bp, Artificial Sequence
  ENSG00000072694_23 (sequence is synthesized)
accctgctggaaagaagctccacatttattaacattcccgaagtaaatttatcaggtagcattcatcaggtaacatttgttgcacattcatgacttttctactgtccacaaaggcatatg

SEQ ID NO: 61756 - DNA, 120 bp, Artificial Sequence
  ENSG00000072694_24 (sequence is synthesized)
tccttatcatatgcggactcctcggtcacactggattcttccttccctcctcgacatggaagagatggcatcttagggtctcttgtgttcttcctgcagaggcctgtcgggcaggaaaag

SEQ ID NO: 61757 - DNA, 120 bp, Artificial Sequence
  ENSG00000072694_25 (sequence is synthesized)
gctgcagctgccttcctgggagaaggaggagatgagtgtatcctgaacacctattatgtgctaggggctattgtagatacatgacactatcatgctcattttcacgaatgaggaaactga

SEQ ID NO: 61758 - DNA, 120 bp, Artificial Sequence
  ENSG00000072694_26 (sequence is synthesized)
ggctcagaagacttaaattatttgcccaagagttcataaatgacagagccagcattagagtccaggactgtctgatttcagacctaagctgttccctctgcacatcgtgtcccaccagta

SEQ ID NO: 61759 - DNA, 120 bp, Artificial Sequence
  ENSG00000072694_27 (sequence is synthesized)
tcagtttccacttggcccaggccctaaccccagacattgccagaatccctctctttgggctagatacacattcagatctaggcccgtattgtattatagtcattcattcgtttattagat

SEQ ID NO: 61760 - DNA, 120 bp, Artificial Sequence
  ENSG00000072694_28 (sequence is synthesized)
cattcatttgacaagacttgaacaaactagcttatgtgtcagccaatgcgtgagacatggtgggtgatgccaagagaagtccagtccctgcccttggggagttctcagcattgtgaggaa

SEQ ID NO: 61761 - DNA, 120 bp, Artificial Sequence
  ENSG00000072694_29 (sequence is synthesized)
gacagggtcattataataagatgggataagagcaatgatagggacatgaaaagcctaggatagaagtacagaggaggctccatagcccaacaagggctgaggcagttggagaaggtcttg

SEQ ID NO: 61762 - DNA, 120 bp, Artificial Sequence
  ENSG00000072694_30 (sequence is synthesized)
gggagagcagtgtagtgtagtgatggagtgcacatagtggggccagactgcctgagttcaaatctagttctacagcataccaactatatgacccaagtgagtcactccacctctctgtgc

SEQ ID NO: 61763 - DNA, 120 bp, Artificial Sequence
  ENSG00000072694_31 (sequence is synthesized)
ctcagctgtctcaagtggaaaatggggacactaataggacttacctcagagggttgccatggggatgaaagaggctgatgctcttacacagtgcctggtaggcagtaacagcacacaaac

SEQ ID NO: 61764 - DNA, 120 bp, Artificial Sequence
  ENSG00000072694_32 (sequence is synthesized)
agggctgttgccattctggaggaggtggtgtgtgagggcagcgcttagctagggaaggaggaccctccaggcactgggccaaggcagggattgaagccgggtggggctcatatgggtgtc

SEQ ID NO: 61765 - DNA, 120 bp, Artificial Sequence
  ENSG00000072694_33 (sequence is synthesized)
gaagggggagtagagagggtactgcaagccaccaagaaagaaagaatcctgctaacacctcacaaagcacttttcaattggttcatagccaacacctcagttactgatgataagtaaata

SEQ ID NO: 61766 - DNA, 120 bp, Artificial Sequence
  ENSG00000072694_34 (sequence is synthesized)
cagagaaacagagagagagagactgagacacaggggtgtttttaaaaggcagagcaagcctcagacagatgccatggcgtggactttctgacactcctgggcatccccatgggtgagctg

SEQ ID NO: 61767 - DNA, 120 bp, Artificial Sequence
  ENSG00000072694_35 (sequence is synthesized)
aattctgcctctggaccagcccttttccaggcgggagcagcctctgagcaggggagctgggggtgggaggacaggaaacatctgccagagtgaaggcctgagctggtcccatccaaccct

SEQ ID NO: 61768 - DNA, 120 bp, Artificial Sequence
  ENSG00000072694_36 (sequence is synthesized)
ggccctggtccttggtcctgaggactcaggccccaccgcctaatcctactaacctcctgtgtgcccctcccagctctcccaggataccctgagtgcagggaaatgggagagaccctccct

SEQ ID NO: 61769 - DNA, 120 bp, Artificial Sequence
  ENSG00000072694_37 (sequence is synthesized)
gagaaaccaggtgagtacaggttgtctcagggattcagtgatggctcaccagggctgccggctggactggagccagggagaaggggcttgtgcaagttcagctgggagccagggagggag

SEQ ID NO: 61770 - DNA, 120 bp, Artificial Sequence
  ENSG00000072694_38 (sequence is synthesized)
cagcagtgggaggatggctggggctcaaatcgcttggtcagctcttagtctaactcctgggcctaaagacgacctctctggagatgagaagagaaacaccagtcccagatacagaagaga

SEQ ID NO: 61771 - DNA, 120 bp, Artificial Sequence
  ENSG00000072694_39 (sequence is synthesized)
gggctgtgtccgaatttctggtaccaggaatctggtgatatttccagagcaagaaatcagagatactttggtcttcctgtggagctttggcagagctggcaaaggatggggttaggggct

SEQ ID NO: 61772 - DNA, 120 bp, Artificial Sequence
  ENSG00000072694_40 (sequence is synthesized)
gtaagactgaggccaataggacgtgggaggcaggagtctaaggggaaaggaggaggaggcctggaaaccccttgatttgctgaggaatctgcctctgtggagggatggggtggagtggcc

SEQ ID NO: 61773 - DNA, 120 bp, Artificial Sequence
  ENSG00000072694_41 (sequence is synthesized)
aggctcagctgtctgtggaacactaggaggaggtttgggcttgagaaaattctgggggactaggggcactagtgggctctactctgtgggcaaaactcagttctgatgcccatgcactca

SEQ ID NO: 61774 - DNA, 120 bp, Artificial Sequence
  ENSG00000072694_42 (sequence is synthesized)
aggttgactgaattttggcctggttctgccctcatcacacagtggagccctgagcaagtcagtctccctgatggggttcagtctcctcactgaggaaatgagtgggtggccagggtgacc

SEQ ID NO: 61775 - DNA, 120 bp, Artificial Sequence
  ENSG00000072694_43 (sequence is synthesized)
tctcaggtcttctagatttgacattctgagaaccaggggccacccaagccctggcccaggtgggagtgtgtaaaggaacttccaggaggatgccaggcaacttccagactgtagttaaag

SEQ ID NO: 61776 - DNA, 120 bp, Artificial Sequence
  ENSG00000072694_44 (sequence is synthesized)
tcagagcacaaaggaaaccagtgctttctctgggggcttccatgacagtaagaacaggcagaaaaaagaggctgtcaaagaccccacctcagatggctggagtatgattcagagcagagc

SEQ ID NO: 61777 - DNA, 120 bp, Artificial Sequence
  ENSG00000072694_45 (sequence is synthesized)
caacagatttaagagcttgagcaaaatatcacttgttcagctgtgcttgcagcaaggtcgcatgtctgctggccaggcccagtggtgataggggcctgtgttcacaccagggccaaaaca

SEQ ID NO: 61778 - DNA, 120 bp, Artificial Sequence
  ENSG00000072694_46 (sequence is synthesized)
gatctggaaaaaacaaagtccaagcaactggattatccatcttgttgtgtggttctgtctgcactggcataagcacatttcacaaggcacttttgcagccaggcattggggctgcataaa

SEQ ID NO: 61779 - DNA, 120 bp, Artificial Sequence
  ENSG00000072694_47 (sequence is synthesized)
tggttttttaaaaatcctttcccaaaaggcaaagctgggttgctgggattcttgggaaatgtaatagaatgggaattcagaatgcggtttactgcagaatttacagcatggcaataaagg

SEQ ID NO: 61780 - DNA, 120 bp, Artificial Sequence
  ENSG00000072694_48 (sequence is synthesized)
ctctctatgttcagggggtgagagaagagactagatgcattgtctcagatgtctcctgacttcctgagaaatgccactttgcagatatggggctgcttttcacactggctaagtcagttc

SEQ ID NO: 61781 - DNA, 120 bp, Artificial Sequence
  ENSG00000072694_49 (sequence is synthesized)
atggcaaaatatgagggaattcagtgtgtttcagacactaaccaaagtccatccttcctttctccttccgtccctcccttcctccctttctcactcactctctctttctttttaatgcca

SEQ ID NO: 61782 - DNA, 120 bp, Artificial Sequence
  ENSG00000072694_50 (sequence is synthesized)
tggagtaccatatttttcaaagttccaacaaagatgcactacatttagacaatgtggaaatggccctcagccttctctccctgaagtctgtggccagcaaaaatctggactttacttcac

SEQ ID NO: 61783 - DNA, 120 bp, Artificial Sequence
  ENSG00000072694_51 (sequence is synthesized)
tctgatgctgaacacccccctcccccacctcttccccaatatctcagatcccaagcctccctggtttgcttctaggaaagctcagcaattccctgaaaagaatgcagctcaagtgactgc

SEQ ID NO: 61784 - DNA, 120 bp, Artificial Sequence
  ENSG00000072694_52 (sequence is synthesized)
tccactttttcaccttggcctttgcggaaggctgtggctgggctaccctatgcatcgatcaatgaggtcatatttacccagtgcttggcctagaggcccaagacagggtcagcagtgctt

SEQ ID NO: 61785 - DNA, 120 bp, Artificial Sequence
  ENSG00000072694_53 (sequence is synthesized)
gctttggctctagtttgggcgttggttttgcagcctcagcatcagcacaggcaggccctcttctccagcagtgctctggctgatatttcttctttttcccacagccaatcccactaatcc

SEQ ID NO: 61786 - DNA, 120 bp, Artificial Sequence
  ENSG00000072736_0 (sequence is synthesized)
agggcgcgagagcgcacccgcggcggcggtggcggcgactgtgggggggcggcggggaacattggctaagccgacagtggaggcttaggcaccggtggcgggcggctgcggttcctggtg

SEQ ID NO: 61787 - DNA, 120 bp, Artificial Sequence
  ENSG00000072736_1 (sequence is synthesized)
ctgctcggcgcgcggccagctttcggaacggaacgctcggcgtcgcgggccccgcccggaaagtttgccgtggagtcgcgacctcttggcccgcgcggcccggcatgaagcggcgttgag

SEQ ID NO: 61788 - DNA, 120 bp, Artificial Sequence
  ENSG00000072736_2 (sequence is synthesized)
gagctgctgccgccgcttgccgctgccgccgccgccgcctgaggaggagctgcagcaccctgggccacgccgatgactactgcaaactgtggcgcccacgacgagctcgacttcaaactc

SEQ ID NO: 61789 - DNA, 120 bp, Artificial Sequence
  ENSG00000072736_3 (sequence is synthesized)
gtctttggcgaggacggggcgccggcgccgccgcccccgggctcgcggcctgcagatcttgagccagatgattgtgcatccatttacatctttaatgtagatccacctccatctacttta

SEQ ID NO: 61790 - DNA, 120 bp, Artificial Sequence
  ENSG00000072736_4 (sequence is synthesized)
accacaccactttgcttaccacatcatggattaccgtctcactcttctgttttgtcaccatcgtttcagctccaaagtcacaaaaactatgaaggaacttgtgagattcctgaatctaaa

SEQ ID NO: 61791 - DNA, 120 bp, Artificial Sequence
  ENSG00000072736_5 (sequence is synthesized)
tatagcccattaggtggtcccaaaccctttgagtgcccaagtattcaaattacatctatctctcctaactgtcatcaagaattagatgcacatgaagatgacctacagataaatgaccca

SEQ ID NO: 61792 - DNA, 120 bp, Artificial Sequence
  ENSG00000072736_6 (sequence is synthesized)
gaacgggaatttttggaaaggccttctagagatcatctctatcttcctcttgagccatcctaccgggagtcttctcttagtcctagtcctgccagcagcatctcttctaggagttggttc

SEQ ID NO: 61793 - DNA, 120 bp, Artificial Sequence
  ENSG00000072736_7 (sequence is synthesized)
tctgatgcatcttcttgtgaatcgctttcacatatttatgatgatgtggactcagagttgaatgaagctgcagcccgatttacccttggatcccctctgacttctcctggtggctctcca

SEQ ID NO: 61794 - DNA, 120 bp, Artificial Sequence
  ENSG00000072736_8 (sequence is synthesized)
gggggctgccctggagaagaaacttggcatcaacagtatggacttggacactcattatcacccaggcaatctccttgccactctcctagatccagtgtcactgatgagaattggctgagc

SEQ ID NO: 61795 - DNA, 120 bp, Artificial Sequence
  ENSG00000072736_9 (sequence is synthesized)
cccaggccagcctcaggaccctcatcaaggcccacatccccctgtgggaaacggaggcactccagtgctgaagtttgttatgctgggtccctttcaccccatcactcacctgttccttca

SEQ ID NO: 61796 - DNA, 120 bp, Artificial Sequence
  ENSG00000072736_10 (sequence is synthesized)
cctggtcactcccccaggggaagtgtgacagaagatacgtggctcaatgcttctgtccatggtgggtcaggccttggccctgcagtttttccatttcagtactgtgtagagactgacatc

SEQ ID NO: 61797 - DNA, 120 bp, Artificial Sequence
  ENSG00000072736_11 (sequence is synthesized)
cctctcaaaacaaggaaaacttctgaagatcaagctgccatactaccaggaaaattagagctgtgttcagatgaccaagggagtttatcaccagcccgggagacttcaatagatgatggc

SEQ ID NO: 61798 - DNA, 120 bp, Artificial Sequence
  ENSG00000072736_12 (sequence is synthesized)
cttggatctcagtatcctttaaagaaagattcatgtggtgatcagtttctttcagttccttcaccctttacctggagcaaaccaaagcctggccacacccctatatttcgcacatcttca

SEQ ID NO: 61799 - DNA, 120 bp, Artificial Sequence
  ENSG00000072736_13 (sequence is synthesized)
ttacctccactagactggcctttaccagctcattttggacaatgtgaactgaaaatagaagtgcaacctaaaactcatcatcgagcccattatgaaactgaaggtagccgaggggcagta

SEQ ID NO: 61800 - DNA, 120 bp, Artificial Sequence
  ENSG00000072736_14 (sequence is synthesized)
aaagcatctactgggggacatcctgttgtgaagctcctgggctataacgaaaagccaataaatctacaaatgtttattgggacagcagatgatcgatatttacgacctcatgcattttac

SEQ ID NO: 61801 - DNA, 120 bp, Artificial Sequence
  ENSG00000072736_15 (sequence is synthesized)
caggtgcatcgaatcactgggaagacagtcgctactgcaagccaagagataataattgccagtacaaaagttctggaaattccacttcttcctgaaaataatatgtcagccagtattgat

SEQ ID NO: 61802 - DNA, 120 bp, Artificial Sequence
  ENSG00000072736_16 (sequence is synthesized)
tgtgcaggtattttgaaactccgcaattcagatatagaacttcgaaaaggagaaactgatattggcagaaagaatactagagtacgacttgtgtttcgtgtacacatcccacagcccagt

SEQ ID NO: 61803 - DNA, 120 bp, Artificial Sequence
  ENSG00000072736_17 (sequence is synthesized)
ggaaaagtcctttctctgcagatagcctctatacccgttgagtgctcccagcggtctgctcaagaacttcctcatattgagaagtacagtatcaacagttgttctgtaaatggaggtcat

SEQ ID NO: 61804 - DNA, 120 bp, Artificial Sequence
  ENSG00000072736_18 (sequence is synthesized)
gaaatggttgtgactggatctaattttcttccagaatccaaaatcatttttcttgaaaaaggacaagatggacgacctcagtgggaggtagaagggaagataatcagggaaaaatgtcaa

SEQ ID NO: 61805 - DNA, 120 bp, Artificial Sequence
  ENSG00000072736_19 (sequence is synthesized)
ggggctcacattgtccttgaagttcctccatatcataacccagcagttacagctgcagtgcaggtgcacttttatctttgcaatggcaagaggaaaaaaagccagtctcaacgttttact

SEQ ID NO: 61806 - DNA, 120 bp, Artificial Sequence
  ENSG00000072736_20 (sequence is synthesized)
tatacaccagttttgatgaagcaagaacacagagaagagattgatttgtcttcagttccatctttgcctgtgcctcatcctgctcagacccagaggccttcctctgattcagggtgttca

SEQ ID NO: 61807 - DNA, 120 bp, Artificial Sequence
  ENSG00000072736_21 (sequence is synthesized)
catgacagtgtactgtcaggacagagaagtttgatttgctccatcccacaaacatatgcatccatggtgacctcatcccatctgccacagttgcagtgtagagatgagagtgttagtaaa

SEQ ID NO: 61808 - DNA, 120 bp, Artificial Sequence
  ENSG00000072736_22 (sequence is synthesized)
gaacagcatatgattccttctccaattgtacaccagccttttcaagtcacaccaacacctcctgtggggtcttcctatcagcctatgcaaactaatgttgtgtacaatggaccaacttgt

SEQ ID NO: 61809 - DNA, 120 bp, Artificial Sequence
  ENSG00000072736_23 (sequence is synthesized)
cttcctattaatgctgcctctagtcaagaatttgattcagttttgtttcagcaggatgcaactctttctggtttagtgaatcttggctgtcaaccactgtcatccataccatttcattct

SEQ ID NO: 61810 - DNA, 120 bp, Artificial Sequence
  ENSG00000072736_24 (sequence is synthesized)
tcaaattcaggctcaacaggacatctcttagcccatacacctcattctgtgcataccctgcctcatctgcaatcaatgggatatcattgttcaaatacaggacaaagatctctttcttct

SEQ ID NO: 61811 - DNA, 120 bp, Artificial Sequence
  ENSG00000072736_25 (sequence is synthesized)
ccagtggctgaccagattacaggtcagccttcgtctcagttacaacctattacatatggtccttcacattcagggtctgctacaacagcttccccagcagcttctcatcccttggctagt

SEQ ID NO: 61812 - DNA, 120 bp, Artificial Sequence
  ENSG00000072736_26 (sequence is synthesized)
ccaccagaatgcattctggacagcactcaactcaagcacaaagtacgggccaggggggtctttctgcaccttcatccttaatatgtcacagtttgtgtgatccagcgtcatttccacctg

SEQ ID NO: 61813 - DNA, 120 bp, Artificial Sequence
  ENSG00000072736_27 (sequence is synthesized)
atggggcaactgtgagcattaaacctgaaccagaagatcgagagcctaactttgcaaccattggtctgcaggacatcactttagatgatgtgaacgagataattgggagagacatgtccc

SEQ ID NO: 61814 - DNA, 120 bp, Artificial Sequence
  ENSG00000072736_28 (sequence is synthesized)
agatttctgtttcccaaggagcaggggtgagcaggcaggctcccctcccgagtcctgagtccctggatttaggaagatctgatgggctctaacagtgcttactgcagccttgtgtccacc

SEQ ID NO: 61815 - DNA, 120 bp, Artificial Sequence
  ENSG00000072736_29 (sequence is synthesized)
accaacttctcagcatgtttctctccttggaccttgggtttccaactctgcagccttcaggtctggggccaggagtgggacccaccatttgtggggaaagtagcattcctccacctcagg

SEQ ID NO: 61816 - DNA, 120 bp, Artificial Sequence
  ENSG00000072736_30 (sequence is synthesized)
ccttgggtagatttggcaaaagaacaggagcagcataggctgtttgagctttggggaaatgaactttgctttttatatttaactaggatacttttatatgatgggtgctttgagtgtgaa

SEQ ID NO: 61817 - DNA, 120 bp, Artificial Sequence
  ENSG00000072736_31 (sequence is synthesized)
tgcagcaggctctcttgtttccgaggtgctgcttttgcaggtgacctggttacttagctaggattggtgatttgtactgctttatggtcatttgaagggccctttagtttttatgataat

SEQ ID NO: 61818 - DNA, 70 bp, Artificial Sequence
  ENSG00000072736_32 (sequence is synthesized)
tttatggtcatttgaagggccctttagtttttatgataatttttaaaataggaacttttgataagacctt

SEQ ID NO: 61819 - DNA, 120 bp, Artificial Sequence
  ENSG00000072736_33 (sequence is synthesized)
tgcctcagaaagtcagcatgtgtcctgaagacgttcatagatttataggaaataaagccaaatgtagctcatacctctttataaaactaaactgttgttagataaaatgagaagagacca

SEQ ID NO: 61820 - DNA, 120 bp, Artificial Sequence
  ENSG00000072736_34 (sequence is synthesized)
ttccatcattgaagtgttggaatataaaaagacattccagagcatagccttttggtaactttctaggtaatcttgcaatctctccatactggctccatgttgaaattgctttttccctca

SEQ ID NO: 61821 - DNA, 120 bp, Artificial Sequence
  ENSG00000072736_35 (sequence is synthesized)
ggaccctgggtaagatggctacatttaaggtgactctgaatggtggggttctagcttggtcactttcatttcttgccatcataaaaactagtaggctgtggagtgcgcttcctgtttgtg

SEQ ID NO: 61822 - DNA, 120 bp, Artificial Sequence
  ENSG00000072736_36 (sequence is synthesized)
tcatctggtcgtagaaccttttccaaacagaagcatctgcctttggctgttctgtgacctttgaagccagtctcagtggtttaggcagctttgcagttctaactctagctagaggccagg

SEQ ID NO: 61823 - DNA, 120 bp, Artificial Sequence
  ENSG00000072736_37 (sequence is synthesized)
ctgtgtgcagagctaaagcacaaatgagcagtacatcagcatgggcagagaaaatacaggactccagatgggaaggttttaagagtcacactggcatggaaggcttatctgccattctat

SEQ ID NO: 61824 - DNA, 120 bp, Artificial Sequence
  ENSG00000072736_38 (sequence is synthesized)
ttatagcctgaaatgattctggcctaccctgtcctgtctgtatgatctaaaaaccagccttttccccagaaggctctgagcacatccagaagtgataacctgaccctccacaccaaagac

SEQ ID NO: 61825 - DNA, 120 bp, Artificial Sequence
  ENSG00000072736_39 (sequence is synthesized)
accctggtgctgctgctggtgagactggtgtccaaggcagggcccagcagaaactgcagcctgctgtctaccaaaggaggtacccgagttgggtactttaaaaaaaaaaaaaacctgccc

SEQ ID NO: 61826 - DNA, 120 bp, Artificial Sequence
  ENSG00000072736_40 (sequence is synthesized)
ttacccctctccctaatgggattttttttacctgttcctgggcccattacagagcctctgaagtttgcagtatgctttcaaatgaaataatatacttccattgattcaggaagcagattt

SEQ ID NO: 61827 - DNA, 120 bp, Artificial Sequence
  ENSG00000072736_41 (sequence is synthesized)
tttgagtgcctatatgtgagacagtgtgctggttgaaggcctgatgctgttattccaggagactgcaggcccttgatgccaggactctctctactaaggccagttcaggtctgggaaagg

SEQ ID NO: 61828 - DNA, 120 bp, Artificial Sequence
  ENSG00000072736_42 (sequence is synthesized)
gagctggcctattgcccaccacctgttgtcagtaggttaggagctgttgactcaggatgaggaagtatggtctttaaaaaaaacaaaatatattttagatttctcccctaaagttagtta

SEQ ID NO: 61829 - DNA, 120 bp, Artificial Sequence
  ENSG00000072736_43 (sequence is synthesized)
gagaaaaaggtctattcttcagcagatcactgtggcccctcttggagctgggtgttttcaaattttcttgaaaagtgagttgtgtcacagaatgtggatagtgagatttgcttctgggcc

SEQ ID NO: 61830 - DNA, 120 bp, Artificial Sequence
  ENSG00000072736_44 (sequence is synthesized)
tgtggttggacgcccacagcttcctttggaggggcaagaagttggcctctcggttgacattccagagaaatggccagacttgcccctacccttttgcccctggtgtagctgcctcacatg

SEQ ID NO: 61831 - DNA, 120 bp, Artificial Sequence
  ENSG00000072736_45 (sequence is synthesized)
aggttattgcaagagttccccttgcaataccctttgtgccctcaagaattaaaagcctctatgatccagagttgctatgcaccaaattttgatgccttctaaataccttgatgcctgtag

SEQ ID NO: 61832 - DNA, 120 bp, Artificial Sequence
  ENSG00000072736_46 (sequence is synthesized)
cactagaaatgctttcctatttaaaataaacattaaattttaaaatagagctttgtatactatgtaagcagttttatatcagctttgtaaaagctttggtgttaagagtcaatatttttt

SEQ ID NO: 61833 - DNA, 120 bp, Artificial Sequence
  ENSG00000072736_47 (sequence is synthesized)
ggctttgtagataaagacttaaatttttgtgcaacatagtggtgttaaagcacacatccattggactatgcaaatcaatttctactagcagcactgagcaactgggcacgtgctagtacg

SEQ ID NO: 61834 - DNA, 120 bp, Artificial Sequence
  ENSG00000072736_48 (sequence is synthesized)
caccccctcctactctaactgtgctagctcttgggttgaggaatggaatgggtagccttctgcttactggagatgcacagagaaacatggctgaaaacagctttaaaaagaacatgtctt

SEQ ID NO: 61835 - DNA, 120 bp, Artificial Sequence
  ENSG00000072736_49 (sequence is synthesized)
tgggttcatgtgtggtgctgctgcccgggtgtaaactatccccacccagggccagccattatcaccagacctcttctgggcctggctgtgaagccctgtttttggtattcagaatggatc

SEQ ID NO: 61836 - DNA, 120 bp, Artificial Sequence
  ENSG00000072736_50 (sequence is synthesized)
tttaaggctcagatgggctcaaattgaaaccttgtgttttataaaatggatgtttagtaaaggaactggttctcagttatgtttacagcacttggaattgtgtgttcttgtacattttgt

SEQ ID NO: 61837 - DNA, 120 bp, Artificial Sequence
  ENSG00000072736_51 (sequence is synthesized)
attttaaaaccttttatgggagtgcagtgctccttacacaaatacaaagggaagaagagccagcagttgaggctcctcagttttagtgctgaaataataaacagtgacaggtcaacagta

SEQ ID NO: 61838 - DNA, 120 bp, Artificial Sequence
  ENSG00000072736_52 (sequence is synthesized)
gacttggaacaccagccatcaggttcagcagagaaatggcctaaccacagtgtgctctcatgtccagctcctttctggagaatctagaggtgaacgagataattgggagagacatgtccc

SEQ ID NO: 61839 - DNA, 120 bp, Artificial Sequence
  ENSG00000072736_53 (sequence is synthesized)
tagctggactctcggtccggtccctgccctctggagactcagccattaaagttgaggtggggggatgaggatgtgggcggcgtccaggtaactctgaggggccctgatgccttccctaga

SEQ ID NO: 61840 - DNA, 120 bp, Artificial Sequence
  ENSG00000072736_54 (sequence is synthesized)
gccagccatcaggagtaacacgatgcgcccccacatcaccgaacccagaacctcagtgcttcagcaccccttcctcgacatgagctccgcccaatgaggagaagggtcttctgcattggc

SEQ ID NO: 61841 - DNA, 120 bp, Artificial Sequence
  ENSG00000072736_55 (sequence is synthesized)
gaatttcttaatgttcatgtttgatgttcagtagactgttctgtagagttgcattgaaaaaacatacctgaacgtgaggcatgaggattctctaggcgatcttgagccagatgattgtgc

SEQ ID NO: 61842 - DNA, 120 bp, Artificial Sequence
  ENSG00000072736_56 (sequence is synthesized)
ctatggattgcttattggcatatggttgggcttttaaataagttgttattagaaatatatgttaatatataactttgccaggtaccacggctcacgcctgtatcccagcactttggaagg

SEQ ID NO: 61843 - DNA, 60 bp, Artificial Sequence
  ENSG00000072736_57 (sequence is synthesized)
agccaggcatggtggtgtgtgcagttgcagggagctaagatcgcgccattgcactccagc

SEQ ID NO: 61844 - DNA, 120 bp, Artificial Sequence
  ENSG00000072736_58 (sequence is synthesized)
tgatttgtttaccagtaataattttgacttgcttcagttgagacctacgttttggccagtcccagcaggaagatatctgaggaatctagagtgaacgagataattgggagagacatgtcc

SEQ ID NO: 61845 - DNA, 120 bp, Artificial Sequence
  ENSG00000072736_59 (sequence is synthesized)
ttgatgcacagcttctactgtccatgggaaagaagaaggtgtatggaaagcactcaagatacttaactacattaacctggaaattactatcaatcatcaccacttacaattttttggcta

SEQ ID NO: 61846 - DNA, 120 bp, Artificial Sequence
  ENSG00000072736_60 (sequence is synthesized)
caagtagtcacatggccctacttacatgcagaagtactgggaaaagtagtccctggctgggcagcctttcctcatcaaaactctgtattctgtagtataatatagaactctatacttaaa

SEQ ID NO: 61847 - DNA, 120 bp, Artificial Sequence
  ENSG00000072736_61 (sequence is synthesized)
ccacttagtcatgactgagtcttagcccgaggaagggatgggaaaaagggaggaagaaggaggccaagcaagtgatgaggaagatacgtacatcgcttttgctcacatttcattgaagaa

SEQ ID NO: 61848 - DNA, 120 bp, Artificial Sequence
  ENSG00000072736_62 (sequence is synthesized)
aacgaattgcatgggccatacctagctacactggggaagccaggaaatatactctgtagctgggtgtcagtgtgactaactaaacctcgattactgtggaagaatgaattaagataatta

SEQ ID NO: 61849 - DNA, 120 bp, Artificial Sequence
  ENSG00000072736_63 (sequence is synthesized)
gcagcctaccatagataccttctaaattttcaggaacttatttctgtctgtagcttgaaaaatcaaatgaatattttttggtttttcccttttttttgttttatttggagacagggtctc

SEQ ID NO: 61850 - DNA, 120 bp, Artificial Sequence
  ENSG00000072736_64 (sequence is synthesized)
actgcaccctgcccaatatatatatttttaaatagagatggaagtctcactatgttgcccaggctagtctggaactcctgggctctcctgttctggcttcccaaaatgctgggattacag

SEQ ID NO: 61851 - DNA, 120 bp, Artificial Sequence
  ENSG00000072736_65 (sequence is synthesized)
gtgtgagccactgcacatagcccctatattttgttaaataagtgaataaataacacctaagttttgaatcattgctcactgctctttcgtggtagaggaaattgacgagaattgtttcag

SEQ ID NO: 61852 - DNA, 120 bp, Artificial Sequence
  ENSG00000072736_66 (sequence is synthesized)
ttctttggcttttattgatgagttccataaattagatcttggtaatttggggctgcagtggttttacatctctgaaggtttgggagtacttgtatcacaactaaatttccatacagtgag

SEQ ID NO: 61853 - DNA, 120 bp, Artificial Sequence
  ENSG00000072736_67 (sequence is synthesized)
aacggccttctctcgtctggtttagaaggaatcgccgggggaatacaggccaaactacaattcccgagagatcttgagccagatgattgtgcatccatttacatctttaatgtagatcca

SEQ ID NO: 61854 - DNA, 120 bp, Artificial Sequence
  ENSG00000072756_0 (sequence is synthesized)
agcccggaagtgcgcgtggcggcggtggcggctgcggcaacagcggggccgatgtgtagttggtgactgcctctccagatgctgaggtgcctgtatcattggcacaggccagtgctgaac

SEQ ID NO: 61855 - DNA, 120 bp, Artificial Sequence
  ENSG00000072756_1 (sequence is synthesized)
cgtaggtggagtaggctgtgccttccgaagcagtatctattcacaatgaagttgcagtctcccgaattccagtcacttttcacagaaggactgaagagtctgacagaattatttgtcaaa

SEQ ID NO: 61856 - DNA, 120 bp, Artificial Sequence
  ENSG00000072756_2 (sequence is synthesized)
gagaatcacgaattaagaatagcaggaggagcagtgagggatttattaaatggagtaaagcctcaggatatagattttgccaccactgctacccctactcaaatgaaggagatgtttcag

SEQ ID NO: 61857 - DNA, 120 bp, Artificial Sequence
  ENSG00000072756_3 (sequence is synthesized)
tcggctgggattcggatgataaacaacagaggagaaaagcacggaacaattactgccaggcttcatgaagaaaattttgagattactacactacggattgatgtcaccactgatggaaga

SEQ ID NO: 61858 - DNA, 120 bp, Artificial Sequence
  ENSG00000072756_4 (sequence is synthesized)
catgctgaggtagaatttacaactgactggcagaaagatgcggaacgcagagatctcactataaattctatgtttttaggttttgatggcactttatttgactactttaatggttatgaa

SEQ ID NO: 61859 - DNA, 120 bp, Artificial Sequence
  ENSG00000072756_5 (sequence is synthesized)
gatttaaaaaataagaaagttagatttgttggacatgctaaacagagaatacaagaggattatcttagaattttaagatacttcaggttttatgggagaattgtagacaaacctggtgac

SEQ ID NO: 61860 - DNA, 120 bp, Artificial Sequence
  ENSG00000072756_6 (sequence is synthesized)
catgatcctgagactttggaagcaattgcagaaaatgcaaaaggcttggctggaatatcaggagaaaggatttgggtggaactgaaaaaaattcttgttggtaaccatgtaaatcatttg

SEQ ID NO: 61861 - DNA, 120 bp, Artificial Sequence
  ENSG00000072756_7 (sequence is synthesized)
attcaccttatctatgatcttgatgtggctccttatataggtttacctgctaatgcaagtttagaagaatttgacaaagtcagtaaaaatgttgatggtttttcaccaaagccagtgact

SEQ ID NO: 61862 - DNA, 120 bp, Artificial Sequence
  ENSG00000072756_8 (sequence is synthesized)
cttttggcctcattattcaaagtacaagatgatgtcacaaaattggatttgaggttgaagatcgcaaaagaggagaaaaaccttggcttatttatagttaaaaataggaaagatttaatt

SEQ ID NO: 61863 - DNA, 120 bp, Artificial Sequence
  ENSG00000072756_9 (sequence is synthesized)
actgaagtaccaaggagagcactgtctcctaaaggaaatgcagcagtggtccattcctccatttcctgtaagtggccatgacatcagaaaagtgggcatttcttcaggaaaagaaattgg

SEQ ID NO: 61864 - DNA, 120 bp, Artificial Sequence
  ENSG00000072756_10 (sequence is synthesized)
ggctctattacaacagttgcgagaacagtggaaaaaaagtggttaccaaatggaaaaagatgaacttctgagttacataaagaagacctaaaactgatggctactaaaaagcagagcatt

SEQ ID NO: 61865 - DNA, 120 bp, Artificial Sequence
  ENSG00000072756_11 (sequence is synthesized)
tctggtaagactaaattttctcccctccctcttaatgaggttttagagactacaccagaataaaagacagtttaggggacctctgtagaacaacaagggtcttattttgtgaattatata

SEQ ID NO: 61866 - DNA, 120 bp, Artificial Sequence
  ENSG00000072756_12 (sequence is synthesized)
tttcaagaactaaacagagatccacctttctggatctgatttatatcactgaaatgtacagttcttttggaatagtttcacctgagaaaacatagttggctattatctatcttaacctgt

SEQ ID NO: 61867 - DNA, 120 bp, Artificial Sequence
  ENSG00000072756_13 (sequence is synthesized)
tcaggcttttaaaaaaaactgtttttgcatagggtagtactaagatcttaaaaagtggtaactgtcttgaagaaaaaacgtttattgtttgtttgcaattgaaataacagggttacctta

SEQ ID NO: 61868 - DNA, 120 bp, Artificial Sequence
  ENSG00000072756_14 (sequence is synthesized)
acaatgactgtctatgatgtgtcagttcttatctgaattccaaaataaacctgtgcttaaaaaagaaataattgaccaagtaagtttgcataaaatgtgaatactaaatgtgtccccagt

SEQ ID NO: 61869 - DNA, 120 bp, Artificial Sequence
  ENSG00000072756_15 (sequence is synthesized)
tgctggcattcatatgtacaggatttgttctagcaagctatgcttcagtatgtggttgatatttttctgtcacaatgatttctttatgcatgcagagcctggggaagtcatgggattaac

SEQ ID NO: 61870 - DNA, 120 bp, Artificial Sequence
  ENSG00000072756_16 (sequence is synthesized)
ttgagggtcactattgagcctattaattaattattgttttaataaaacaaacattggtattggaagataaatatgtttatgtggtatctgacaatgtgtattaggtgtcatatacaatgg

SEQ ID NO: 61871 - DNA, 120 bp, Artificial Sequence
  ENSG00000072756_17 (sequence is synthesized)
taatatgcctgtctttaaagtgttattttattaattaaaaggatatggctattattatatattctctaaagatttgagtcctaaatgctttcatcaggtaaataaaatgtataatacaaa

SEQ ID NO: 61872 - DNA, 120 bp, Artificial Sequence
  ENSG00000072756_18 (sequence is synthesized)
gctgcggcaacagcggggccggtacggggcgaaggcgtggaaaatatcccagaccgactcagaattacagagctttccagagcttatataccttatgtgtagttggtgactgcctctcca

SEQ ID NO: 61873 - DNA, 120 bp, Artificial Sequence
  ENSG00000072756_19 (sequence is synthesized)
agagttggtggcgtgagttgctgccccttccttcctgctgtgggccagaggcgccaccgcgcccggtcctcgaggaagacgggagcgggacgtggcgagaggcctcctcagcagtgggca

SEQ ID NO: 61874 - DNA, 120 bp, Artificial Sequence
  ENSG00000072756_20 (sequence is synthesized)
aaatagccccgacgcggaggtcgtgtccccgccacgtttccggcgaccgcaggcgcggattccttggcttccctcagcactttcccctccgcgcggacggccccgagacgctttttcact

SEQ ID NO: 61875 - DNA, 120 bp, Artificial Sequence
  ENSG00000072756_21 (sequence is synthesized)
gggccttgtcgccagcacccggcgtggggggtgagacgcgccttttcagggctggggttccccagagcgttttcctaagtcgaggcggaggtgcgaggaaactgagtgggtctttccgcc

SEQ ID NO: 61876 - DNA, 120 bp, Artificial Sequence
  ENSG00000072756_22 (sequence is synthesized)
ccacgtggcctgccgggaagcgcggctcctccacccgcttccgtggaatggaatggtttttctctgcaggtttacaccggggtcactcgagagctgctgcggcctccttatgggcaggac

SEQ ID NO: 61877 - DNA, 120 bp, Artificial Sequence
  ENSG00000072756_23 (sequence is synthesized)
ccccgtatggggagaacgaggatgtgatatgtagaagggaaggccgcggtgtgccagaaatcagaggagattgcaagatggcaggaaaagaatcaggaaaatgggggcagcaaaactaaa

SEQ ID NO: 61878 - DNA, 120 bp, Artificial Sequence
  ENSG00000072756_24 (sequence is synthesized)
ttcatgggaaaatacaatgtctaggagctatcccagggtcgtgaatcctcgagtgcaggtggggaagtagggtgatacccacctgtgaccatgacaagttttggagaccagaaactcggt

SEQ ID NO: 61879 - DNA, 120 bp, Artificial Sequence
  ENSG00000072756_25 (sequence is synthesized)
tagagtttctagaaccccgcatccctctcatactgcctgaagccctgctctggggagagtgtcatcacagtaccatgtggcatgcgagtgtcgtggtaatgctccccgaccaaaccacca

SEQ ID NO: 61880 - DNA, 120 bp, Artificial Sequence
  ENSG00000072756_26 (sequence is synthesized)
ggagttgcctccattgtgcacgttgcaaaacctgtctggaaggagcataggaaatggctttagctaagtgccagtagcttcttgctgttgccacagtttcattagtgttgattctcaatg

SEQ ID NO: 61881 - DNA, 120 bp, Artificial Sequence
  ENSG00000072756_27 (sequence is synthesized)
ttgtctgctgatgttgctaaagcagccacacagtagcattacaaagcctgtgggaattttaatagcaccttcataaatatatttagtagtatatgtagaaatatgacctatacagcactg

SEQ ID NO: 61882 - DNA, 120 bp, Artificial Sequence
  ENSG00000072756_28 (sequence is synthesized)
gctatctattagattcacctggggagcttttaaagcacacatgctcgggttctacctgcagcctactgaattagaatctctgggtgggatgaccatctatatttttaataaaagctccac

SEQ ID NO: 61883 - DNA, 120 bp, Artificial Sequence
  ENSG00000072756_29 (sequence is synthesized)
aagttaattctgatgcacagaagatagacgaaccattactttaacatgactcaccttgtattagcttattctcaaagctactttcccattcttgaaattggatgatggctttttaggtac

SEQ ID NO: 61884 - DNA, 120 bp, Artificial Sequence
  ENSG00000072756_30 (sequence is synthesized)
gtgccagagataaatggcccagaatatgttgattcttttagattgttttaggcagactttaagtagagggcttaaatgcatgtttggttttgccgatgcttcactatcttttttaattgg

SEQ ID NO: 61885 - DNA, 120 bp, Artificial Sequence
  ENSG00000072756_31 (sequence is synthesized)
agagagtgaaaattgctaaaaattgctgtccaatagaaatttatgagcccatatgtaatataaacttttttactaaccacattaaaaagatagaaatggtgaaataaattttaataatta

SEQ ID NO: 61886 - DNA, 120 bp, Artificial Sequence
  ENSG00000072756_32 (sequence is synthesized)
taagccagcattcggatattttcattgttgttttaattatttttattaaaaaacgtaagtagagggtctctttgtgttgcccaggctggtctcaaaactcctgggctcactccttggcct

SEQ ID NO: 61887 - DNA, 80 bp, Artificial Sequence
  ENSG00000072756_33 (sequence is synthesized)
atgtgcacgttttcattgttggaagaaaggcttggctgggtgtacccagcctgtaatctcttggggaggccaaggtagga

SEQ ID NO: 61888 - DNA, 120 bp, Artificial Sequence
  ENSG00000072756_34 (sequence is synthesized)
ccagtcataacatctttgtactctatgagcaaatagtaattttggaccttgataaaacaattttgtagagtgtaatatttctaagaggaaatgtcacaggggctatgatgcaagaaagcc

SEQ ID NO: 61889 - DNA, 120 bp, Artificial Sequence
  ENSG00000072756_35 (sequence is synthesized)
tcagaaatgactgcatacaggaaataatctcatcatttccaaagatgtcttcatgtcccatcaatgacatgctaccagacatatcagattccacaggataatggcaccaagctacccaag

SEQ ID NO: 61890 - DNA, 120 bp, Artificial Sequence
  ENSG00000072756_36 (sequence is synthesized)
tagatgtttctggtattctagactgccgttcatgcttgtttcctaaagtatacttaaaagtttcaaatacagtttcacttagaaactgcaaccctccaagtaatgttatgtttacttagg

SEQ ID NO: 61891 - DNA, 120 bp, Artificial Sequence
  ENSG00000072756_37 (sequence is synthesized)
tattaatgttatgtttacttaggtatgtatcagaggcaataatttccaaagcagatcttagaatataaccaatttgttagataactttatctctatcacatctgtttacaagcaaagtat

SEQ ID NO: 61892 - DNA, 120 bp, Artificial Sequence
  ENSG00000072756_38 (sequence is synthesized)
gattcggatgataaacaacagaggagaaaagcacggaacaattactgccaggtttttctaccacacctgcatgtacaaaccctgctgctttttcaaggcttggcacagacgccaccctaa

SEQ ID NO: 61893 - DNA, 120 bp, Artificial Sequence
  ENSG00000072756_39 (sequence is synthesized)
ctacggattgatgtcaccactgatggaagacatgctgaggtagaatttacaactgactggcagaaagatgcggaacgcagagatctcactataaattctatgtttttagccttcgaaatt

SEQ ID NO: 61894 - DNA, 120 bp, Artificial Sequence
  ENSG00000072756_40 (sequence is synthesized)
tgccatgtatgtcaagatggttcccttttaaaagttactatgcatataaaactattaacagcttggaaagagttaagcattaagtgtgaacttaccaatgtactgttgcttttgggataa

SEQ ID NO: 61895 - DNA, 120 bp, Artificial Sequence
  ENSG00000072756_41 (sequence is synthesized)
tcattctgcattttttggaaataaggttctaaatattgattactatagtttcttgaacatcattttaacaattgtgtttaacgttctaaacctgaaactggctagccatatgtagaaagc

SEQ ID NO: 61896 - DNA, 120 bp, Artificial Sequence
  ENSG00000072778_0 (sequence is synthesized)
agagctgggtcagagctcgagccagcggcgcccggagagattcggagatgcaggcggctcggatggccgcgagcttggggcggcagctgctgaggctcgggggcggaagctcgcggctca

SEQ ID NO: 61897 - DNA, 120 bp, Artificial Sequence
  ENSG00000072778_1 (sequence is synthesized)
cggcgctcctggggcagccccggcccggccctgcccggcggccctatgccgggggtgccgctcagctggctctggacaagtcagattcccacccctctgacgctctgaccaggaaaaaac

SEQ ID NO: 61898 - DNA, 120 bp, Artificial Sequence
  ENSG00000072778_2 (sequence is synthesized)
cggccaaggcggaatctaagtcctttgctgtgggaatgttcaaaggccagctcaccacagatcaggtgttcccatacccgtccgtgctcaacgaagagcagacacagtttcttaaagagc

SEQ ID NO: 61899 - DNA, 120 bp, Artificial Sequence
  ENSG00000072778_3 (sequence is synthesized)
tggtggagcctgtgtcccgtttcttcgaggaagtgaacgatcccgccaagaatgacgctctggagatggtggaggagaccacttggcagggcctcaaggagctgggggcctttggtctgc

SEQ ID NO: 61900 - DNA, 120 bp, Artificial Sequence
  ENSG00000072778_4 (sequence is synthesized)
aagtgcccagtgagctgggtggtgtgggcctttgcaacacccagtacgcccgtttggtggagatcgtgggcatgcatgaccttggcgtgggcattaccctgggggcccatcagagcatcg

SEQ ID NO: 61901 - DNA, 120 bp, Artificial Sequence
  ENSG00000072778_5 (sequence is synthesized)
gtttcaaaggcatcctgctctttggcacaaaggcccagaaagaaaaatacctccccaagctggcatctggggagactgtggccgctttctgtctaaccgagccctcaagcgggtcagatg

SEQ ID NO: 61902 - DNA, 120 bp, Artificial Sequence
  ENSG00000072778_6 (sequence is synthesized)
cagcctccatccgaacctctgctgtgcccagcccctgtggaaaatactataccctcaatggaagcaagctttggatcagtaatgggggcctagcagacatcttcacggtctttgccaaga

SEQ ID NO: 61903 - DNA, 120 bp, Artificial Sequence
  ENSG00000072778_7 (sequence is synthesized)
caccagttacagatccagccacaggagccgtgaaggagaagatcacagcttttgtggtggagaggggcttcgggggcattacccatgggccccctgagaagaagatgggcatcaaggctt

SEQ ID NO: 61904 - DNA, 120 bp, Artificial Sequence
  ENSG00000072778_8 (sequence is synthesized)
caaacacagcagaggtgttctttgatggagtacgggtgccatcggagaacgtgctgggtgaggttgggagtggcttcaaggttgccatgcacatcctcaacaatggaaggtttggcatgg

SEQ ID NO: 61905 - DNA, 120 bp, Artificial Sequence
  ENSG00000072778_9 (sequence is synthesized)
gaggcatcattgctaaggcggtagatcatgccactaatcgtacccagtttggggagaaaattcacaactttgggctgatccaggagaagctggcacggatggttatgctgcagtatgtaa

SEQ ID NO: 61906 - DNA, 120 bp, Artificial Sequence
  ENSG00000072778_10 (sequence is synthesized)
ctgagtccatggcttacatggtgagtgctaacatggaccagggagccacggacttccagatagaggccgccatcagcaaaatctttggctcggaggcagcctggaaggtgacagatgaat

SEQ ID NO: 61907 - DNA, 120 bp, Artificial Sequence
  ENSG00000072778_11 (sequence is synthesized)
gcatccaaatcatggggggtatgggcttcatgaaggaacctggagtagagcgtgtgctccgagatcttcgcatcttccggatctttgaggggacaaatgacattcttcggctgtttgtgg

SEQ ID NO: 61908 - DNA, 120 bp, Artificial Sequence
  ENSG00000072778_12 (sequence is synthesized)
ctctgcagggctgtatggacaaaggaaaggagctctctgggcttggcagtgctctaaagaatccctttgggaatgctggcctcctgctaggagaggcaggcaaacagctgaggcggcggg

SEQ ID NO: 61909 - DNA, 120 bp, Artificial Sequence
  ENSG00000072778_13 (sequence is synthesized)
cagggctgggcagcggcctgagtctcagcggacttgtccacccggagttgagtcggagtggcgagctggcagtacgggctctggagcagtttgccactgtggtggaggccaagctgataa

SEQ ID NO: 61910 - DNA, 120 bp, Artificial Sequence
  ENSG00000072778_14 (sequence is synthesized)
aacacaagaaggggattgtcaatgaacagtttctgctgcagcggctggcagacggggccatcgacctctatgccatggtggtggttctctcgagggcctcaagatccctgagtgagggcc

SEQ ID NO: 61911 - DNA, 120 bp, Artificial Sequence
  ENSG00000072778_15 (sequence is synthesized)
accccacggcccagcatgagaaaatgctctgtgacacctggtgtatcgaggctgcagctcggatccgagagggcatggccgccctgcagtctgacccctggcagcaagagctctaccgca

SEQ ID NO: 61912 - DNA, 120 bp, Artificial Sequence
  ENSG00000072778_16 (sequence is synthesized)
acttcaaaagcatctccaaggccttggtggagcggggtggtgtggtcaccagcaacccacttggcttctgaatactcccggccagggcctgtcccagttatgtgccttccctcaagccaa

SEQ ID NO: 61913 - DNA, 120 bp, Artificial Sequence
  ENSG00000072778_17 (sequence is synthesized)
agccgaagcccctttccttaaggccctggtttgtcccgaaggggcctagtgttcccagcactgtgcctgctctcaagagcacttactgcctcgcaaataataaaaatttctagccagtca

SEQ ID NO: 61914 - DNA, 120 bp, Artificial Sequence
  ENSG00000072778_18 (sequence is synthesized)
gtgcccagtgagctgggtggtgtgggcctttgcaacacccaggtgagggcgccctatcgccacatcccagtatgccataccccagcttggcagactcagctcttttgccatagacctaga

SEQ ID NO: 61915 - DNA, 120 bp, Artificial Sequence
  ENSG00000072778_19 (sequence is synthesized)
ggtggagcctgtgtcccgtttcttcgaggtaaggaatgactcggggcttggtccctggtgaggtgtttggagatgttaagctcaaaaggagcctggatgtgggatcctgtgccttcccca

SEQ ID NO: 61916 - DNA, 120 bp, Artificial Sequence
  ENSG00000072778_20 (sequence is synthesized)
ggcatcattgctaaggcggtgagtaccctgcccgagtccctaggtaacccaaacagaagtctcactgtcccccttgccatgtgtccctgatcacttgcaggcactccctacactagaaac

SEQ ID NO: 61917 - DNA, 120 bp, Artificial Sequence
  ENSG00000072778_21 (sequence is synthesized)
tcctcccctaccagcagcccgacttgctagcttaggtctccatccagcgtagactgaactctggttgtatgcaaaacccatccctctggcgcaagcccagcccctctcctagggagactg

SEQ ID NO: 61918 - DNA, 120 bp, Artificial Sequence
  ENSG00000072778_22 (sequence is synthesized)
ctcaggtaagtcaccgcagccttggcaagggggtgtgggagcggcggtccgcttcggcgcccgccatcggcagggatctccctcttggtgccaggtacctgcctactgctcagtcgccga

SEQ ID NO: 61919 - DNA, 120 bp, Artificial Sequence
  ENSG00000072778_23 (sequence is synthesized)
aggggaaagggcaagccagggtgccctagggcgaaactaggggaaaggtcaccgcttcgcgccgcctccccgcgcggctctcgcctgttctccccttgacacagcggaagtcccttccct

SEQ ID NO: 61920 - DNA, 120 bp, Artificial Sequence
  ENSG00000072778_24 (sequence is synthesized)
tctaagttggggattgcctaacaatagactgactagtagcaagtcaccctcctacctagacctaagacagaccagcattctctgctgtgccctttgcacaccccacttcttttctacaca

SEQ ID NO: 61921 - DNA, 120 bp, Artificial Sequence
  ENSG00000072778_25 (sequence is synthesized)
ctggggatggcccaggtcaggcactgccctaggtcaggaactgccctaggtcaggaactgccctgttgcccacactctcctgttaaggtcaggtccccctgcagccagtgacaaccccag

SEQ ID NO: 61922 - DNA, 120 bp, Artificial Sequence
  ENSG00000072778_26 (sequence is synthesized)
gaactgacccagaacaagtatctgcctgacctgacaagctaggtcagcccttatcttggagatctgggtgatgaggccaagtctgacaaagccctttgcaattttccttcccatgtccca

SEQ ID NO: 61923 - DNA, 120 bp, Artificial Sequence
  ENSG00000072778_27 (sequence is synthesized)
actatgcaacctcagtccatggcttacatggtgagtgctaacatggaccagggagccacggacttccagatagaggccgccatcagcaaaatctttggctcggaggcagcctggaaggtg

SEQ ID NO: 61924 - DNA, 120 bp, Artificial Sequence
  ENSG00000072778_28 (sequence is synthesized)
gactgggctcctgggcagatggctgttgcaagtcaccctggggacgtgtgcaaaagccaaagcaggtggactgaatgtggcctttgggactaatatgtatgcaactgagctaaagttttg

SEQ ID NO: 61925 - DNA, 120 bp, Artificial Sequence
  ENSG00000072778_29 (sequence is synthesized)
ttcccatacccgtccggtaagggaagggataatcagagctgggtggggccagggtggtttcccctgccagcctggcctgaccagcctgtcccccaccctctgcagtgctcaacgaagagc

SEQ ID NO: 61926 - DNA, 120 bp, Artificial Sequence
  ENSG00000072778_30 (sequence is synthesized)
gtcactatacagagacagtccatgttggggggcctggccgcggcggcgggaacccggataatgggaaaggagatagaagcagaagcacagaggcccctgaggcaaacatggagacctggc

SEQ ID NO: 61927 - DNA, 120 bp, Artificial Sequence
  ENSG00000072778_31 (sequence is synthesized)
aggagaggcaggcaaacagctgaggcggcgggcagggctgggcagcggcctgagtctcagcggacttgtccacccggagttgagtcggagtggcgagctggtaagtggccaggggtccag

SEQ ID NO: 61928 - DNA, 120 bp, Artificial Sequence
  ENSG00000072778_32 (sequence is synthesized)
aggggattgtcagtaagtgagctctacaccattccgcccctccctttcctctccttgagactaatgcccccacccccacccccaccccacctaccggacagatgaacagtttctgctgca

SEQ ID NO: 61929 - DNA, 120 bp, Artificial Sequence
  ENSG00000072778_33 (sequence is synthesized)
ggattgtcagtgaggaggcaggcagggaatgcctgagccgcagggggcctgggcctggatcccagccggcccagatttattttcatctcctgcttcctgccagggcctcaagatccctga

SEQ ID NO: 61930 - DNA, 120 bp, Artificial Sequence
  ENSG00000072778_34 (sequence is synthesized)
atgctgggagggagtccagtttgggtgctcagctcccaaaaccagtctcatctgttctttgtccctaggaggcagcctggaaggtgacagatgaatgcatccaaatcatggggggtatgg

SEQ ID NO: 61931 - DNA, 120 bp, Artificial Sequence
  ENSG00000072778_35 (sequence is synthesized)
gcttcatgaaggtacaggacggtcttctgcagagcctcggctgggccaggggtgggtaggcacatctcagcacgggcatataatttgtgtggccctgtgctaggaacctggagtagagcg

SEQ ID NO: 61932 - DNA, 120 bp, Artificial Sequence
  ENSG00000072778_36 (sequence is synthesized)
gtatcgaggtgagactcggggctgccaagctcaggtgagggctggaggtgcaggcccaacccctccttccctctccccaggctgcagctcggatccgagagggcatggccgccctgcagt

SEQ ID NO: 61933 - DNA, 120 bp, Artificial Sequence
  ENSG00000072786_0 (sequence is synthesized)
gctcccggcgcggcgctgcccagggcacacttgaccgaggtcgggctgcggggaaaggcgggtctggggagaaccccgagagacgcggcgtcctccaactcctcctccttctcctcgcgg

SEQ ID NO: 61934 - DNA, 120 bp, Artificial Sequence
  ENSG00000072786_1 (sequence is synthesized)
ccgccgaagccacagcccgagcccgagcccgagcccgagccggcgccaccgcgcccccggccatggcttttgccaatttccgccgcatcctgcgcctgtctaccttcgagaagagaaagt

SEQ ID NO: 61935 - DNA, 120 bp, Artificial Sequence
  ENSG00000072786_2 (sequence is synthesized)
cccgcgaatatgagcacgtccgccgcgacctggaccccaacgaggtgtgggagatcgtgggcgagctgggcgacggcgccttcggcaaggtttacaaggccaagaataaggagacgggtg

SEQ ID NO: 61936 - DNA, 120 bp, Artificial Sequence
  ENSG00000072786_3 (sequence is synthesized)
ctttggctgcggccaaagtcattgaaaccaagagtgaggaggagctggaggactacatcgtggagattgagatcctggccacctgcgaccacccctacattgtgaagctcctgggagcct

SEQ ID NO: 61937 - DNA, 120 bp, Artificial Sequence
  ENSG00000072786_4 (sequence is synthesized)
actatcacgacgggaagctgtggatcatgattgagttctgtccagggggagccgtggacgccatcatgctggagctggacagaggcctcacggagccccagatacaggtggtttgccgcc

SEQ ID NO: 61938 - DNA, 120 bp, Artificial Sequence
  ENSG00000072786_5 (sequence is synthesized)
agatgctagaagccctcaacttcctgcacagcaagaggatcatccaccgagatctgaaagctggcaacgtgctgatgaccctcgagggagacatcaggctggctgactttggtgtgtctg

SEQ ID NO: 61939 - DNA, 120 bp, Artificial Sequence
  ENSG00000072786_6 (sequence is synthesized)
ccaagaatctgaagactctacagaaacgagattccttcatcggcacgccttactggatggcccccgaggtggtcatgtgtgagaccatgaaagacacgccctacgactacaaagccgaca

SEQ ID NO: 61940 - DNA, 120 bp, Artificial Sequence
  ENSG00000072786_7 (sequence is synthesized)
tctggtccctgggcatcacgctgattgagatggcccagatcgagccgccacaccacgagctcaaccccatgcgggtcctgctaaagatcgccaagtcggaccctcccacgctgctcacgc

SEQ ID NO: 61941 - DNA, 120 bp, Artificial Sequence
  ENSG00000072786_8 (sequence is synthesized)
cctctaagtggtctgtagagttccgtgacttcctgaagatagccctggataagaacccagaaacccgacccagtgccgcgcagctgctggagcatcccttcgtcagcagcatcaccagta

SEQ ID NO: 61942 - DNA, 120 bp, Artificial Sequence
  ENSG00000072786_9 (sequence is synthesized)
acaaggctctgcgggagctggtggctgaggccaaggccgaggtgatggaagagatcgaagacggccgggatgagggggaagaggaggacgccgtggatgccgcctccaccctggagaacc

SEQ ID NO: 61943 - DNA, 120 bp, Artificial Sequence
  ENSG00000072786_10 (sequence is synthesized)
atactcagaactcctctgaggtgagtccgccaagcctcaatgctgacaagcctctcgaggagtcaccttccaccccgctggcacccagccagtctcaggacagtgtgaatgagccctgca

SEQ ID NO: 61944 - DNA, 120 bp, Artificial Sequence
  ENSG00000072786_11 (sequence is synthesized)
gccagccctctggggacagatccctccaaaccaccagtcccccagtcgtggcccctggaaatgagaacggcctggcagtgcctgtgcccctgcggaagtcccgacccgtgtcaatggatg

SEQ ID NO: 61945 - DNA, 120 bp, Artificial Sequence
  ENSG00000072786_12 (sequence is synthesized)
ccagaattcaggtagcccaggagaagcaagttgctgagcagggtggggacctcagcccagcagccaacagatctcaaaaggccagccagagccggcccaacagcagcgccctggagacct

SEQ ID NO: 61946 - DNA, 120 bp, Artificial Sequence
  ENSG00000072786_13 (sequence is synthesized)
tgggtggggagaagctggccaatggcagcctggagccacctgcccaggcagctccagggccttccaagagggactcggactgcagcagcctctgcacctctgagagcatggactatggta

SEQ ID NO: 61947 - DNA, 120 bp, Artificial Sequence
  ENSG00000072786_14 (sequence is synthesized)
ccaatctctccactgacctgtcgctgaacaaagagatgggctctctgtccatcaaggacccgaaactgtacaaaaaaaccctcaagcggacacgcaaatttgtggtggatggtgtggagg

SEQ ID NO: 61948 - DNA, 120 bp, Artificial Sequence
  ENSG00000072786_15 (sequence is synthesized)
tgagcatcaccacctccaagatcatcagcgaagatgagaagaaggatgaggagatgagatttctcaggcgccaggaactccgagagcttcggctgctccagaaagaagagcatcggaacc

SEQ ID NO: 61949 - DNA, 120 bp, Artificial Sequence
  ENSG00000072786_16 (sequence is synthesized)
agacccagctgagtaacaagcatgagctgcagctggagcaaatgcataaacgttttgaacaggaaatcaacgccaagaagaagttctttgacacggaattagagaacctggagcgtcagc

SEQ ID NO: 61950 - DNA, 120 bp, Artificial Sequence
  ENSG00000072786_17 (sequence is synthesized)
aaaagcagcaagtggagaagatggagcaagaccatgccgtgcgccgccgggaggaggccaggcggatccgcctggagcaggatcgggactacaccaggttccaagagcagctcaaactga

SEQ ID NO: 61951 - DNA, 120 bp, Artificial Sequence
  ENSG00000072786_18 (sequence is synthesized)
tgaagaaagaggtgaagaacgaggtggagaagctcccccgacagcagcggaaggaaagcatgaagcagaagatggaggagcacacgcagaaaaagcagcttcttgaccgggactttgtag

SEQ ID NO: 61952 - DNA, 120 bp, Artificial Sequence
  ENSG00000072786_19 (sequence is synthesized)
ccaagcagaaggaggacctggagctggccatgaagaggctcaccaccgacaacaggcgggagatctgtgacaaggagcgcgagtgcctcatgaagaagcaggagctccttcgagaccggg

SEQ ID NO: 61953 - DNA, 120 bp, Artificial Sequence
  ENSG00000072786_20 (sequence is synthesized)
aagcagccctgtgggagatggaagagcaccagctgcaggagaggcaccagctggtgaagcagcagctcaaagaccagtacttcctccagcggcacgagctgctgcgcaagcatgagaagg

SEQ ID NO: 61954 - DNA, 120 bp, Artificial Sequence
  ENSG00000072786_21 (sequence is synthesized)
agcgggagcagatgcagcgctacaaccagcgcatgatagagcagctgaaggtgcggcagcaacaggaaaaggcgcggctgcccaagatccagaggagtgagggcaagacgcgcatggcca

SEQ ID NO: 61955 - DNA, 120 bp, Artificial Sequence
  ENSG00000072786_22 (sequence is synthesized)
tgtacaagaagagcctccacatcaacggcgggggcagcgcagctgagcagcgtgagaagatcaagcagttctcccagcaggaggagaagaggcagaagtcggagcggctgcagcaacagc

SEQ ID NO: 61956 - DNA, 120 bp, Artificial Sequence
  ENSG00000072786_23 (sequence is synthesized)
agaaacacgagaaccagatgcgggacatgctggcgcagtgtgagagcaacatgagcgagctgcagcagctgcagaatgaaaagtgccacctcctggtagagcacgaaacccagaaactga

SEQ ID NO: 61957 - DNA, 120 bp, Artificial Sequence
  ENSG00000072786_24 (sequence is synthesized)
agagccataaccagaacctgaaggaatggcgggacaagcttcggccgcgcaagaaggctctggaagaggatctgaaccagaagaagcgggagcaggagatgttcttcaagctgagcgagg

SEQ ID NO: 61958 - DNA, 120 bp, Artificial Sequence
  ENSG00000072786_25 (sequence is synthesized)
aggcggagtgcccaaacccctccaccccaagcaaggccgccaagttcttcccctacagttctgcggatgcttcttaacaaccgcccggggctgtggctggcagcttggtgggccccaggg

SEQ ID NO: 61959 - DNA, 120 bp, Artificial Sequence
  ENSG00000072786_26 (sequence is synthesized)
ccttctccttcattctctgtgaacatgtaactcaggaccccttttccctcttgcgtctgtgccagctcaaatccagcccctcgccctgtgccaccccaactgtgcctgatagacctgccc

SEQ ID NO: 61960 - DNA, 120 bp, Artificial Sequence
  ENSG00000072786_27 (sequence is synthesized)
cagcgttcctgacttcttgctggcctgtggagggtgaggtgtaattatttgtcacctgaacctaatgtatattctccttgagccccagatcccttcaagctggaagggatggggctgttg

SEQ ID NO: 61961 - DNA, 120 bp, Artificial Sequence
  ENSG00000072786_28 (sequence is synthesized)
gtggggtcagggtccaagaggaatgggtgttctgtggcctcgagtcctctcctgtttgcgaaaataccagttttgctctctgtgggacaaagcactgctgatgaagtccccgtgggctca

SEQ ID NO: 61962 - DNA, 120 bp, Artificial Sequence
  ENSG00000072786_29 (sequence is synthesized)
tccgggctggaattcttggtttttcagccattccctgcagagtcactcaatcatcaagtccctcacagccatttctgttcccagaggagccaggcctgcagctggctgctcaggagatgg

SEQ ID NO: 61963 - DNA, 120 bp, Artificial Sequence
  ENSG00000072786_30 (sequence is synthesized)
cctcattcctcctgttctcccagtttgctttccacttaagacaaagccttgtctatgtggggggcggggaccggggaaagagggaggctgaaatgtttattctgcttctcccgtgtttca

SEQ ID NO: 61964 - DNA, 120 bp, Artificial Sequence
  ENSG00000072786_31 (sequence is synthesized)
tgccatctcgcgtcccccttcctgcacatgggtgtgaatgcacacacatacgcgtacacacaggacttggtctgctggcctggcctcttctgcccaggtgggttggaacacgtttgctgc

SEQ ID NO: 61965 - DNA, 120 bp, Artificial Sequence
  ENSG00000072786_32 (sequence is synthesized)
ctgagcctgtgccactgagcatgttaggtggagcagttggtgtggcacgtgcggggtgttggcaccggaggcatggaaaagcacaggctgtactgccaggctgcgatgcgtgctggcccc

SEQ ID NO: 61966 - DNA, 120 bp, Artificial Sequence
  ENSG00000072786_33 (sequence is synthesized)
cgcacaggctcctgtgtgcagggactgattcctcagcacacgaggcttccacaacccagtctgctccatagcactctggcccaccctgtctgcaggtgaaacaggagggctgtttgcctc

SEQ ID NO: 61967 - DNA, 120 bp, Artificial Sequence
  ENSG00000072786_34 (sequence is synthesized)
tgccccatccccccgactgtgttcaggagtcccaccttgcatttcagacctgggctggcagtctgttggacttctcttcaggaagaaaaagcatcagggggaaatggaatgcccctgccc

SEQ ID NO: 61968 - DNA, 120 bp, Artificial Sequence
  ENSG00000072786_35 (sequence is synthesized)
caggaacatggcagaagcacaggttctgtacctcagatggactcctgctgggccttcggggtctcagttggcttcccccagattctgattctacagctgcagaatgtatataacgcaata

SEQ ID NO: 61969 - DNA, 120 bp, Artificial Sequence
  ENSG00000072786_36 (sequence is synthesized)
aaagcaaatgtttgaaccagtatgcgggtttacttacaaggaaaccttttttcaccctgatttctaattattttattgaaacaactataaaatgtatggtttctccaggaagatatctgc

SEQ ID NO: 61970 - DNA, 120 bp, Artificial Sequence
  ENSG00000072786_37 (sequence is synthesized)
tttttaaaacaacaaacaagaacaacaacacaaaactggtaatgatttggagtaatcatgcgggcatattgagtctgggtagtgtttcgctggtggtagagtggttgagacttcctggga

SEQ ID NO: 61971 - DNA, 120 bp, Artificial Sequence
  ENSG00000072786_38 (sequence is synthesized)
ttgagacttcctgggaggactttttccgccttcactcctacagatttaagattctttatttttaggccgggcatggtgactcacctgaggtgaggagttcgagactagcctggccaacat

SEQ ID NO: 61972 - DNA, 120 bp, Artificial Sequence
  ENSG00000072786_39 (sequence is synthesized)
ccactgcactccagcctaggtgacagggcgagactctgtctctcaaaaaaaaaaaaaaaaaaaattctttgagacagggtctctaatatgttgcccaagctgatctcaaactcgtggctc

SEQ ID NO: 61973 - DNA, 120 bp, Artificial Sequence
  ENSG00000072786_40 (sequence is synthesized)
gctcaactgattctcccgcttcaaccttgagtagctgggacgacagatacatgctactgcacccagctaggttaaggttctgtatactctgtctttctaaagcaattccctggaaatttt

SEQ ID NO: 61974 - DNA, 120 bp, Artificial Sequence
  ENSG00000072786_41 (sequence is synthesized)
ctcaacattggttataactgaatgcttgggaagggaggggcagcccttcaacaggaaaaggggactgcccaaatcttaaatgcacagtcaagattctcttggagctagcaatggttctca

SEQ ID NO: 61975 - DNA, 120 bp, Artificial Sequence
  ENSG00000072786_42 (sequence is synthesized)
ggttagtgagcatttagcttgcctgctgcagaatttgacccagatgggggtgttttttaggtctctcacaaatgagacaagcgaaacaattgtctccttttattctctttggtgcattgg

SEQ ID NO: 61976 - DNA, 120 bp, Artificial Sequence
  ENSG00000072786_43 (sequence is synthesized)
tgctggggaaacatgaactagcggcagtgtaactgcagaacatagacccagttctaccaggccaggccagcgttgggaaccaccagacagggctgctttgggctttgcttacagtatttc

SEQ ID NO: 61977 - DNA, 120 bp, Artificial Sequence
  ENSG00000072786_44 (sequence is synthesized)
catgtgtagcctggcgtgtgagaaagtattaggtgaaatgccagtttcatggttcaggtgaaagtctgtgatcattcccctcgtggctcgtccttcacatcacttttgcccttcaaggag

SEQ ID NO: 61978 - DNA, 120 bp, Artificial Sequence
  ENSG00000072786_45 (sequence is synthesized)
ttgccgcgtccccgctcagtgccgcctgagccctcagagctcccctgtgcttttctggatggggactggcggggtcacctagcctcaccgtggagccaccgtgcaatgcccatctctgag

SEQ ID NO: 61979 - DNA, 120 bp, Artificial Sequence
  ENSG00000072786_46 (sequence is synthesized)
aggcccacgcggtattcctcgtgccctgtgttagtgctttctgtataagggacagacagaactgggtttttttcctctgtctggttttagagtaaatgtaactaacttttattttccctt

SEQ ID NO: 61980 - DNA, 120 bp, Artificial Sequence
  ENSG00000072786_47 (sequence is synthesized)
tatgaaagatagaaattatttttatgtagtttccagactttatacaaaatttttgtaaaatgttctctggaaagttaactacaagaatgtaaatatgcttctaataaaataacaaggtta

SEQ ID NO: 61981 - DNA, 120 bp, Artificial Sequence
  ENSG00000072786_48 (sequence is synthesized)
gatttacgtatagagtttgaataaatgggatttatagtcaagaagaaataataaatgaacgatgctggtgccctcgtagccacagcgtgaggtgtgtctcagtcttcagggcctgcgtct

SEQ ID NO: 61982 - DNA, 120 bp, Artificial Sequence
  ENSG00000072786_49 (sequence is synthesized)
agtagccctcgcccccgcaatgaggcagtgtggtgggtggggagatggtttttcagaggaagggaggattcggactggccagaaaaaaaaattgcggtctacctaccctgcccagcctgt

SEQ ID NO: 61983 - DNA, 120 bp, Artificial Sequence
  ENSG00000072786_50 (sequence is synthesized)
gagaatcgcacaggcccagcagaggggaactgactttggtgtgtctgccaagaatctgaagactctacagaaacgagattccttcatcggcacgccttactggactctgtgttccgggtt

SEQ ID NO: 61984 - DNA, 120 bp, Artificial Sequence
  ENSG00000072786_51 (sequence is synthesized)
cgcggtaggcatcggaactgcagcaggacgtggcggggagccgcgtggaggcgtttttctgtggaagagcgtcctaaggaagacagtgggatgcaaagtcacgcagatcatgattcggga

SEQ ID NO: 61985 - DNA, 120 bp, Artificial Sequence
  ENSG00000072786_52 (sequence is synthesized)
gtgctgccaaccccgacagtggctcgtggtggcccttgaccctgaatgtccaagaagcacctgtaaaggccagattcttagccctatgttgtcccttggttggttcaggatggcccccga

SEQ ID NO: 61986 - DNA, 120 bp, Artificial Sequence
  ENSG00000072786_53 (sequence is synthesized)
cactgcactccagctctggtgacagaccgagactgttctttgatccaggatccagatgaagcccacatgttgaaattggttgatgcgtctctaagtctcccttaaatttctcctccacca

SEQ ID NO: 61987 - DNA, 120 bp, Artificial Sequence
  ENSG00000072786_54 (sequence is synthesized)
acctaaatctggcctcatccttcatggccccattatcccctcctccatgcagccttcctcgattgccctgcctccatctggaagtaagctcttccatctctggataccccaacactttac

SEQ ID NO: 61988 - DNA, 120 bp, Artificial Sequence
  ENSG00000072786_55 (sequence is synthesized)
attgaccacctcccaaacccttagcacctcctaccttgttttagggttatttatttgtaagtcacatctccttgaccaacccagtatattcccctgcccacttggcatcttttaagtctg

SEQ ID NO: 61989 - DNA, 120 bp, Artificial Sequence
  ENSG00000072786_56 (sequence is synthesized)
cacgcagagggacagcagattggcctggaggaggcagttgcatggagagctttgaagatgtacacatcctttggcttggattttctgcttctagaaatcctgagggaatctgaaaatcct

SEQ ID NO: 61990 - DNA, 120 bp, Artificial Sequence
  ENSG00000072786_57 (sequence is synthesized)
atagccaagcaattatggttgttttcagtgtgtcactattattataattttataatggcactgttattataatgggattttgattaacatcattatgcatttttttaaatttaagactgt

SEQ ID NO: 61991 - DNA, 120 bp, Artificial Sequence
  ENSG00000072786_58 (sequence is synthesized)
ttcattagggcagagtcctggatttggaattactggattaaaatggtatgggtattttaaaggttcttgctatttattgccaaattgctttcctgaaggctgctgccagtgcaggctctc

SEQ ID NO: 61992 - DNA, 120 bp, Artificial Sequence
  ENSG00000072786_59 (sequence is synthesized)
gttagtagagaggaaagtgttcatctcggtacttcctctcagcagcagatagtcttacatttttaatgctttctaatttgctagatagaaaatggcatctgttagtcgacttggaatgtg

SEQ ID NO: 61993 - DNA, 120 bp, Artificial Sequence
  ENSG00000072786_60 (sequence is synthesized)
ttggatgacaagtgcccccaagaggagccagggctggctgcagtgaggccccaggaggttctccaggggcgtcctgcttcagctcaaggggctaggaataggggaaacgatgcagggaag

SEQ ID NO: 61994 - DNA, 120 bp, Artificial Sequence
  ENSG00000072786_61 (sequence is synthesized)
ggggaaacgatgcagggaagccaatggcccaagtggctccctcactgactgttacttgctgtgtatgtctctttcttttcttttttttccctttcttcttttctttctttctttctttct

SEQ ID NO: 61995 - DNA, 120 bp, Artificial Sequence
  ENSG00000072786_62 (sequence is synthesized)
cactgacctgtcgctgaacaaagagatgggctctctgtccatcaagataagcagatggaggctcagagaagtgaggagccagcccagggccaggtaggagtgggaagatggacagacccc

SEQ ID NO: 61996 - DNA, 120 bp, Artificial Sequence
  ENSG00000072786_63 (sequence is synthesized)
gagctggaaggggctgactcctttcctggcctccccgataaatcccggggtgttactaaactcaccatgggtcacctgaccctctacccaaagctcattttagaggaaatactgtatgat

SEQ ID NO: 61997 - DNA, 120 bp, Artificial Sequence
  ENSG00000072786_64 (sequence is synthesized)
tttgtttttccttcccaaatgtacttggtgaaaaacacgcagtagagactcgaacatatttgctaagcaaaggggagtgacaggagccgcaacggccaatcagctttaggcagggaaggg

SEQ ID NO: 61998 - DNA, 120 bp, Artificial Sequence
  ENSG00000072786_65 (sequence is synthesized)
aagcacagttccaacaggccaccgggacaagcatgcacagcagctgttacctgtgagcagcgtcttccttaggaccggcatcctgccacttctcttcctgaagacactgagtgaaaaaaa

SEQ ID NO: 61999 - DNA, 120 bp, Artificial Sequence
  ENSG00000072803_0 (sequence is synthesized)
cagctagagtgggtgcgatagccgcctccgcctctgccgcctccgccgtcgcctcctccgcccgggccgttcgctgctgcgcggggagagcgaggcggggccgccggggccgccatggag

SEQ ID NO: 62000 - DNA, 120 bp, Artificial Sequence
  ENSG00000072803_1 (sequence is synthesized)
ggggccgccggggccgccatggagcccgactcggtgattgaggacaagaccatcgagctcatgtgttctgtgccaaggtctttgtggctaggctgcgccaacctggtagagagcatgtgc

SEQ ID NO: 62001 - DNA, 120 bp, Artificial Sequence
  ENSG00000072803_2 (sequence is synthesized)
gcactgagttgcctgcagagcatgcccagtgtcagatgtctccagataagtaatggaacatcatctgtgatcgtctccagaaagaggccatcagaaggaaactatcaaaaagaaaaagac

SEQ ID NO: 62002 - DNA, 120 bp, Artificial Sequence
  ENSG00000072803_3 (sequence is synthesized)
ttgtgtattaaatattttgaccagtggtctgaatcagatcaagtggaatttgtggaacatcttatttcacgaatgtgtcattatcagcatggacatattaactcttacctgaagcccatg

SEQ ID NO: 62003 - DNA, 120 bp, Artificial Sequence
  ENSG00000072803_4 (sequence is synthesized)
ttgcagcgggactttattaccgctttaccagagcaaggcttagatcacatagcagaaaacattctttcgtacctggatgccaggtctctgtgtgcagcagagctggtatgtaaagaatgg

SEQ ID NO: 62004 - DNA, 120 bp, Artificial Sequence
  ENSG00000072803_5 (sequence is synthesized)
cagcgagtgatctcagaaggaatgctttggaagaagctgattgaacgaatggtacgcactgatcccctatggaaaggactttcagaaagaagagggtgggatcagtacctgtttaaaaac

SEQ ID NO: 62005 - DNA, 120 bp, Artificial Sequence
  ENSG00000072803_6 (sequence is synthesized)
agacccacagatggccctccaaattcattttataggtcattatacccaaagattatccaggatatagagactatagaatctaactggcggtgtggacgacacaacttgcagaggattcag

SEQ ID NO: 62006 - DNA, 120 bp, Artificial Sequence
  ENSG00000072803_7 (sequence is synthesized)
tgccgctctgaaaatagtaaaggtgtctactgtttacagtacgatgatgaaaaaattatcagtggcctacgagataattctattaagatatgggataaaaccagcctggaatgtttgaaa

SEQ ID NO: 62007 - DNA, 120 bp, Artificial Sequence
  ENSG00000072803_8 (sequence is synthesized)
gtgttaacaggacacacaggctctgtcctctgtctgcagtatgatgagcgtgtcattgtaactggctcttcagattctacggtgagagtgtgggatgtgaacacgggtgaagttcttaac

SEQ ID NO: 62008 - DNA, 120 bp, Artificial Sequence
  ENSG00000072803_9 (sequence is synthesized)
acattgatccaccacaatgaggctgtattgcacttacgcttcagcaatggactgatggtgacctgttccaaggaccgctccattgctgtgtgggacatggcttctgcgaccgacatcact

SEQ ID NO: 62009 - DNA, 120 bp, Artificial Sequence
  ENSG00000072803_10 (sequence is synthesized)
ttacgccgtgtcctggttggccaccgggctgccgtcaatgtagtagactttgacgacaagtacatcgtgtctgcctctggtgacaggaccatcaaagtctggagcacgagcacctgtgaa

SEQ ID NO: 62010 - DNA, 120 bp, Artificial Sequence
  ENSG00000072803_11 (sequence is synthesized)
tttgttcgtactctcaatgggcacaagcggggcattgcctgtctccagtacagggatcgcctggttgttagtggatcatcagataataccattaggctctgggatattgaatgtggtgcc

SEQ ID NO: 62011 - DNA, 120 bp, Artificial Sequence
  ENSG00000072803_12 (sequence is synthesized)
tgtttaagagtcctagagggacatgaagaattggtccgatgcatccggtttgataacaagaggattgtcagtggggcctatgatgggaaaattaaagtttgggacttgcaagctgctctt

SEQ ID NO: 62012 - DNA, 120 bp, Artificial Sequence
  ENSG00000072803_13 (sequence is synthesized)
gaccctcgagccccagcaagcacattgtgtttgcgcacattggtggaacattctggacgtgtgtttcggctccagtttgatgagtttcagatcatcagcagctcccatgatgacactatt

SEQ ID NO: 62013 - DNA, 120 bp, Artificial Sequence
  ENSG00000072803_14 (sequence is synthesized)
ttgatttgggatttcttaaatgtgcctcccagtgcccagaatgagacccgttctccctccagaacatacacttacatctctagataacagtctgcactttcacccgtttcagggttttct

SEQ ID NO: 62014 - DNA, 120 bp, Artificial Sequence
  ENSG00000072803_15 (sequence is synthesized)
agtcttgaactactggctacgtggctaccaaatgcctaagggagttcgttcacagctgagttatgaagctggaattggttctagacgctgggtagatgcaaagcagcctaactcttcaag

SEQ ID NO: 62015 - DNA, 120 bp, Artificial Sequence
  ENSG00000072803_16 (sequence is synthesized)
taccgacatttctcacctctgattccggctctcctttgagaaggagaccttagcttccccggcttcaagtagaacagaagcccgtttccttccctcatcagtgaaaaaatctaatgtttc

SEQ ID NO: 62016 - DNA, 120 bp, Artificial Sequence
  ENSG00000072803_17 (sequence is synthesized)
aaatgtaaattgttcatagaaaaggaacatagaatctgttttacagaagtaaatcgaccgtcaagagaagacttggcctctaatttatattgctttgcactttggtttgatattaagaaa

SEQ ID NO: 62017 - DNA, 120 bp, Artificial Sequence
  ENSG00000072803_18 (sequence is synthesized)
tttgggtgccaaacacctacccagaatgtccagggctttcattttcaaaagttagcattctccttttgaccgtccaagtcattatgaattctgacttgttgtattaggaacatgttggac

SEQ ID NO: 62018 - DNA, 120 bp, Artificial Sequence
  ENSG00000072803_19 (sequence is synthesized)
agtggaaaattttctctggattgttttagtaatatttttgggattatacttcctttctgtaccaatttcttttaatttaaagaactataagtcagttatattatctaccaacaggtaata

SEQ ID NO: 62019 - DNA, 120 bp, Artificial Sequence
  ENSG00000072803_20 (sequence is synthesized)
tagctctttcttttattaactgttctctgtcccccaaccatctcctgatatttggtagagtaacacctttatacgtgtgcttgcctcctaatttaaaatactgtattcgcatgtagatat

SEQ ID NO: 62020 - DNA, 120 bp, Artificial Sequence
  ENSG00000072803_21 (sequence is synthesized)
aatgtacataacagtttaacctcaaagttgctggagtcagggccccctgtgcttgagacactaatacagagtgtgttcgcacttagccatgggctgggctcaagaacctgatacctgggt

SEQ ID NO: 62021 - DNA, 120 bp, Artificial Sequence
  ENSG00000072803_22 (sequence is synthesized)
tgatgtggattacctagaacccttcctgcagtattcatacagtgtttttattttgttgttgtcattgcgtgtgtgtggtttgtgtgtgtttttaatgagaatcttgttttaaaatgtaat

SEQ ID NO: 62022 - DNA, 120 bp, Artificial Sequence
  ENSG00000072803_23 (sequence is synthesized)
ttctaaggtttaacaccaaaatgttttatttgttgtggagtatatattatacaatagagaggtaccttaaacattttttgttcttattctttttctcataagtactcctgagtacaagtg

SEQ ID NO: 62023 - DNA, 120 bp, Artificial Sequence
  ENSG00000072803_24 (sequence is synthesized)
gtcacctcccatagtattcatttggcttcgctgtcaaaaatcattattctgtgcagtcgtggccctgggaaggggaaataagaaggccctgttgacgggctgtcttggctctggaattca

SEQ ID NO: 62024 - DNA, 120 bp, Artificial Sequence
  ENSG00000072803_25 (sequence is synthesized)
tgcatcctggccttgccaaggttctggcagggcctgctggtgtgttggagcctgcagggcaggtcaggctggttcagaggcccatgctgaggggtgggtgctctgaagtggagtgaagcc

SEQ ID NO: 62025 - DNA, 120 bp, Artificial Sequence
  ENSG00000072803_26 (sequence is synthesized)
tcaagcccatgaatgccaccccagtcatctctggtgtcagctgctgctgtggccccagcaggttctcaaagctcccaagtcctccctacgacacagcccaaatgtgtaaatggcactgtt

SEQ ID NO: 62026 - DNA, 120 bp, Artificial Sequence
  ENSG00000072803_27 (sequence is synthesized)
gccctgacagtgcatggaaaggacgttggcatccaattggcactccttctcccttattcaatattaggtttgatttgcccttcgccattgtttccaaagatcaaggaatgtcaataacat

SEQ ID NO: 62027 - DNA, 120 bp, Artificial Sequence
  ENSG00000072803_28 (sequence is synthesized)
tttaaaggaccaataaacagcctcctataaagtaaacctcttcccgtggaagcacactctactactaaagggaaggccctgggctctgatttgtcctttgcattgagaacggtgtgggga

SEQ ID NO: 62028 - DNA, 120 bp, Artificial Sequence
  ENSG00000072803_29 (sequence is synthesized)
tcagtgtgtgtgtatgtgatttgtttattgagttggctttgcttttttagtttttcttttaaaaataaaatccttccttcccatgttactaaattaatttatgtttttgagaggttgagt

SEQ ID NO: 62029 - DNA, 120 bp, Artificial Sequence
  ENSG00000072803_30 (sequence is synthesized)
ctcaaagtgtaaacaataaacctccattcataaggtggatgttgtaagcttgatggtggttgtgaaagtgatttagctttgaccacttttcatcctacagcttcaatatcaaactggtta

SEQ ID NO: 62030 - DNA, 120 bp, Artificial Sequence
  ENSG00000072803_31 (sequence is synthesized)
ggaaagcccagggggaagggagggggcaggggaggaggcaattctgaatgaatgaatggattttttgttgtttttgcatgtttaatatagaagttcccctcgttccttgggagatgatgg

SEQ ID NO: 62031 - DNA, 120 bp, Artificial Sequence
  ENSG00000072803_32 (sequence is synthesized)
cctttgaatatgcagacaacctttgaattgtgcctactaaattatagcaggggactttggcacccaaggagttctgactttctgggattataatagtaattcccagccatactctggact

SEQ ID NO: 62032 - DNA, 120 bp, Artificial Sequence
  ENSG00000072803_33 (sequence is synthesized)
ttattttgctaaccataactgagcaaatgtaaattactgctatattaatgttttaaagcactgggatagtctaattctaacttgtaattaattatgtttgccaattatctgtttgaaata

SEQ ID NO: 62033 - DNA, 120 bp, Artificial Sequence
  ENSG00000072803_34 (sequence is synthesized)
aatttgtgtctgaacagctattgaaactgttaaattgtacagatattattcatgacagctttgtactgtggaatgtgcttaataaaaaacaaaaaagtttgacttttgtccagtaaattg

SEQ ID NO: 62034 - DNA, 120 bp, Artificial Sequence
  ENSG00000072803_35 (sequence is synthesized)
ctaagtaatgtcaataaatcgagtatgggtattatgcagtgcacctaatctggcttcatgcaattgttacttcagctactgattcaaagccaatactcttaataaagtgttgcaatactc

SEQ ID NO: 62035 - DNA, 120 bp, Artificial Sequence
  ENSG00000072803_36 (sequence is synthesized)
gtagtcgtggcgctctcgaggccctgccatgagcaagctcttaactcttcaggtctgcacgtcctacgcccaccgtccagtgctactctcagctcggagttcagcttcgggctgccaaga

SEQ ID NO: 62036 - DNA, 120 bp, Artificial Sequence
  ENSG00000072803_37 (sequence is synthesized)
ccggggccgccatggagcccgactcggtgattgaggacaagaccatcgagctcatgaacacttcagttatggaagatcaaaatgaagatgagtccccaaagaaaaatactctttggcaga

SEQ ID NO: 62037 - DNA, 120 bp, Artificial Sequence
  ENSG00000072803_38 (sequence is synthesized)
tggatacagtaaacggaaagaatcttggaagatgcttgactgctgtcttttctcagactagtctgaaagggaaaacccccattcattctggattggtggatctgaagtacaaaatatttt

SEQ ID NO: 62038 - DNA, 120 bp, Artificial Sequence
  ENSG00000072803_39 (sequence is synthesized)
actccgtgttctaagtacttccacagcaaacaagactcatgttctaagtacttccacagcaaacaagacccaggctcaggcctcaggcctgaaacctgaggctgcaaattgacaaaccag

SEQ ID NO: 62039 - DNA, 120 bp, Artificial Sequence
  ENSG00000072803_40 (sequence is synthesized)
ctgtgtcctaggaactgatgacttaggaacagtattgacaactctgtgttctgctgagggccagtgaattctatacacattaaactttgtagattgaataaatgtttacatataaacata

SEQ ID NO: 62040 - DNA, 120 bp, Artificial Sequence
  ENSG00000072803_41 (sequence is synthesized)
gtcgcctcctccgcccgggccgttcgctgctgcgcggggagagcgaggcggggccgccggggccgccatggagcccgactcggtgattgaggacaagaccatcgagctcatggcactcat

SEQ ID NO: 62041 - DNA, 120 bp, Artificial Sequence
  ENSG00000072803_42 (sequence is synthesized)
ccagcagaaattgatgctatcactttaggaaaggcgatcctgcctcctccacgggtataagtaatggaacatcatctgtgatcgtctccagaaagaggccatcagaaggaaactatcaaa

SEQ ID NO: 62042 - DNA, 120 bp, Artificial Sequence
  ENSG00000072803_43 (sequence is synthesized)
cagaacatacacttacatctctagataacagtctgcactttcacccgtttcaggatgaatcagagaagagtatctgttgagagacccctaaaacctattctgcttccatgaaacacaaca

SEQ ID NO: 62043 - DNA, 120 bp, Artificial Sequence
  ENSG00000072803_44 (sequence is synthesized)
aaaaggggagtttccctgcacaagcttctctctctttgcttgctgccattctacttaagatgtgacctgctcctccttgctttctgccatgattatgaggcctccccatccatgtggaac

SEQ ID NO: 62044 - DNA, 120 bp, Artificial Sequence
  ENSG00000072818_0 (sequence is synthesized)
agcactgcctggaagtgtggggtgagagctcctcctaggacacccctttccccttggggaaagaattgtgcccccaggcccttccccgcggaggtccctctcctccttccccctcatctc

SEQ ID NO: 62045 - DNA, 120 bp, Artificial Sequence
  ENSG00000072818_1 (sequence is synthesized)
cccttcctgggacagaaagtgcctccacctgcatccccaggggcccggcctccagggcccgctggccccacagcaggcaagctgagatgacggtcaagctggatttcgaggagtgtctca

SEQ ID NO: 62046 - DNA, 120 bp, Artificial Sequence
  ENSG00000072818_2 (sequence is synthesized)
aggactcaccccgtttccgagcctctattgagctggtggaagccgaagtgtcagaattggagacccgtctggaaaagctcctgaaactgggcactggtctcctggaaagtgggcgccatt

SEQ ID NO: 62047 - DNA, 120 bp, Artificial Sequence
  ENSG00000072818_3 (sequence is synthesized)
accttgctgccagccgcgccttcgttgtcggcatttgtgacctggcccgcctgggtccaccagagcccatgatggcggagtgtctggaaaaattcaccgtgagcctgaaccacaagctgg

SEQ ID NO: 62048 - DNA, 120 bp, Artificial Sequence
  ENSG00000072818_4 (sequence is synthesized)
acagccatgcggagcttctagatgccacccaacacacactgcagcagcagatccagaccctggtcaaggaaggtctgcggggtttccgagaggctcgccgggatttctggcggggggctg

SEQ ID NO: 62049 - DNA, 120 bp, Artificial Sequence
  ENSG00000072818_5 (sequence is synthesized)
agagcctggaggctgccctgacccacaacgcagaggttcccaggcgccgggcccaggaggcagaagaggcaggagctgctttgaggacggctcgagctgggtaccggggacgggcactgg

SEQ ID NO: 62050 - DNA, 120 bp, Artificial Sequence
  ENSG00000072818_6 (sequence is synthesized)
attatgccctgcagatcaacgtgattgaggacaagaggaagtttgacatcatggagtttgtgctgcgtttggtggaggcccaggctacccatttccagcagggccatgaggagctgagcc

SEQ ID NO: 62051 - DNA, 120 bp, Artificial Sequence
  ENSG00000072818_7 (sequence is synthesized)
ggctgtcccagtatcgaaaggagctgggcgcccagttgcaccagctggtcttgaattcagcacgagagaagagggacatggagcagagacacgtgctgctgaaacagaaggagctgggtg

SEQ ID NO: 62052 - DNA, 120 bp, Artificial Sequence
  ENSG00000072818_8 (sequence is synthesized)
gggaggagccagaaccaagcttaagagaggggcctggtggcctggtgatggaaggacatctcttcaaacgggccagcaacgcatttaagacctggagcagacgctggttcaccattcaga

SEQ ID NO: 62053 - DNA, 120 bp, Artificial Sequence
  ENSG00000072818_9 (sequence is synthesized)
gcaaccaactggtttaccagaagaagtacaaggaccctgtgactgtggtggtggatgaccttcgtctctgcacagtgaaactctgccctgactcagaaaggcggttctgctttgaggtgg

SEQ ID NO: 62054 - DNA, 120 bp, Artificial Sequence
  ENSG00000072818_10 (sequence is synthesized)
atgacagcccccggggtccaggccagggctcaggacacctggccataggctctgctgccaccctgggctctggtggaatggccaggggaagggagcctgggggagtcgggcacgtggtgg

SEQ ID NO: 62055 - DNA, 120 bp, Artificial Sequence
  ENSG00000072818_11 (sequence is synthesized)
cccaggtccagagtgtggatggcaatgcccagtgctgcgactgccgggagccagccccggagtgggccagcatcaaccttggtgtcaccctctgcattcagtgttccggcatccacagga

SEQ ID NO: 62056 - DNA, 120 bp, Artificial Sequence
  ENSG00000072818_12 (sequence is synthesized)
gccttggtgttcacttctccaaagtccggtctctgacccttgactcatgggagccagaactagtgaagctcatgtgtgagctgggaaatgtcatcatcaaccagatctatgaggcccgcg

SEQ ID NO: 62057 - DNA, 120 bp, Artificial Sequence
  ENSG00000072818_13 (sequence is synthesized)
tggaggccatggcagtgaagaaaccagggcccagctgctcccggcaggagaaggaggcctggattcacgctaaatacgtggagaagaagttcctgaccaagctgcctgagattcgagggc

SEQ ID NO: 62058 - DNA, 120 bp, Artificial Sequence
  ENSG00000072818_14 (sequence is synthesized)
gaagaggtggccgggggcgcccaagggggcagcctcctgtgcccccaaagccttccatcaggccccggccagggagcttgagatccaagccagagcccccctctgaggacctgggaagcc

SEQ ID NO: 62059 - DNA, 120 bp, Artificial Sequence
  ENSG00000072818_15 (sequence is synthesized)
tgcaccctggggccctactgtttcgagcgtctgggcatcctccatctcttcccaccatggctgatgcccttgcccatggagctgatgtcaactgggtcaatgggggccaagataatgcca

SEQ ID NO: 62060 - DNA, 120 bp, Artificial Sequence
  ENSG00000072818_16 (sequence is synthesized)
caccgctgatccaggccacagctgctaattctcttctggcctgtgagtttctcctccagaacggggcgaacgtgaaccaagcggacagtgcgggccggggcccgctgcaccacgcaacca

SEQ ID NO: 62061 - DNA, 120 bp, Artificial Sequence
  ENSG00000072818_17 (sequence is synthesized)
ttcttggccacacggggctcgcctgcctgttcctgaaacggggagctgatctgggggctcgagactctgaaggcagggaccctctgaccatcgccatggaaacagccaacgctgacatcg

SEQ ID NO: 62062 - DNA, 120 bp, Artificial Sequence
  ENSG00000072818_18 (sequence is synthesized)
tcaccctgctacgactggcaaagatgagggaggctgaagcggcccaggggcaggcaggagatgagacgtatcttgacatcttccgcgacttctccctcatggcgtcagacgacccggaga

SEQ ID NO: 62063 - DNA, 120 bp, Artificial Sequence
  ENSG00000072818_19 (sequence is synthesized)
agctgagccgtcgcagtcatgacctccacacgctgtgacccgaggcccacggggcccgcgcctgcctcccttccccgccaccgggccctctgccattaaagcctccgtgcttcgctcttc

SEQ ID NO: 62064 - DNA, 120 bp, Artificial Sequence
  ENSG00000072818_20 (sequence is synthesized)
ggagtagaaggcaggcgggagggcgggcagggtgcaaggatgcttggcccaccctgagaggcgtaattcgcccatcaacattgctgtcaggcatctttttagcactagacgtgaccccgg

SEQ ID NO: 62065 - DNA, 80 bp, Artificial Sequence
  ENSG00000072818_21 (sequence is synthesized)
ggcgggaggattgcttgagcccaggagttggacaccaacctagccaacatggcgaaactgtctccacaatgatcccggca

SEQ ID NO: 62066 - DNA, 60 bp, Artificial Sequence
  ENSG00000072818_22 (sequence is synthesized)
tcatgcctatgatccctctaacatggcaaaaccccagctctactaaaaaatacgaaaaaa

SEQ ID NO: 62067 - DNA, 120 bp, Artificial Sequence
  ENSG00000072818_23 (sequence is synthesized)
gccgtagcaggctgggtctcgagtcgggagggtgctgccaccccatgcctggtactctttctgtgcctcttcttgcctaggagtgtctggaaaaattcaccgtgagcctgaaccacaagc

SEQ ID NO: 62068 - DNA, 120 bp, Artificial Sequence
  ENSG00000072818_24 (sequence is synthesized)
gggtaacagagcaagacccggtctcaaaaacaaaaacaacaacaacaacaaaaattttttaaagggggagtgagatgggagagaagggggccttatttctcggaaaccagccctgctgcc

SEQ ID NO: 62069 - DNA, 120 bp, Artificial Sequence
  ENSG00000072818_25 (sequence is synthesized)
ctcttcccatggccacaggagcctccccagtgacggagttgtgagattgggggtttctggtgtcctgacttccgtcccagggatcaccttgggtttcccacgttgcagagactaactgaa

SEQ ID NO: 62070 - DNA, 84 bp, Artificial Sequence
  ENSG00000072818_26 (sequence is synthesized)
tgcatcccctgagttcaagtgatcctccctcctcagcatcctaaatagctgggaccacaggcgtgtgccatcacgctcggctaa

SEQ ID NO: 62071 - DNA, 73 bp, Artificial Sequence
  ENSG00000072818_27 (sequence is synthesized)
tcccctgagttcaagtgatcctccctcctcagcatcctaaatagctgggaccacaggcgtgtgccatcacgct

SEQ ID NO: 62072 - DNA, 75 bp, Artificial Sequence
  ENSG00000072818_28 (sequence is synthesized)
actgtacctggcccccaagaggagcctcgctatgttgcgcaggctgcagcacagtggtgcgatctcagctcactg

SEQ ID NO: 62073 - DNA, 120 bp, Artificial Sequence
  ENSG00000072818_29 (sequence is synthesized)
caggtgtgagcccagcctaaatagtattttttaaattgtagcaatagacattttattagaaaaagaattttactgccatctgctggaaagttgtcttcataactatatgaaatctgggtt

SEQ ID NO: 62074 - DNA, 120 bp, Artificial Sequence
  ENSG00000072818_30 (sequence is synthesized)
gtccaagataggaatagcatcctttagatgttccaatctgcacaattgtccacccttctctggaatgtctcgtggaacagtcagcccaggtgtctgtcctctcagtaagatcctcatggg

SEQ ID NO: 62075 - DNA, 120 bp, Artificial Sequence
  ENSG00000072818_31 (sequence is synthesized)
caaaaagcacagcctctcttccgtccctcatcctaaagctgcctatgtctgtaatgatttccttctcttacagacgctggttcaccattcagagcaaccaactggtttaccagaagaagt

SEQ ID NO: 62076 - DNA, 120 bp, Artificial Sequence
  ENSG00000072818_32 (sequence is synthesized)
acaaggtgagtggacctgggtcctggatgcctgggccccagggagactcagctcttgcctgcagctggacatctggccccttatcaccttatcctgccaggaccctgtgactgtggtggt

SEQ ID NO: 62077 - DNA, 120 bp, Artificial Sequence
  ENSG00000072818_33 (sequence is synthesized)
ggatgaccttcgtctctgcacagtgaaactctgccctgactcagaaaggcggttctgctttgaggtggtgtccaccagcaagtgagtgcaatccccaggggtgatactctaatatatcta

SEQ ID NO: 62078 - DNA, 120 bp, Artificial Sequence
  ENSG00000072818_34 (sequence is synthesized)
aacaactgccaatctgaaaggcagggcccaccacaatggaggccccccatgcagctccagactttaatttaattctttggcggctggactggggggccattgtggaagagggtacagggt

SEQ ID NO: 62079 - DNA, 120 bp, Artificial Sequence
  ENSG00000072818_35 (sequence is synthesized)
gatgggggatatttaggagaatattaccaactggtacagaagtctttcaatgcaactggaactggttgaatactggctgaatgtcagtctgcccatgctgccactttgcttcccaggcct

SEQ ID NO: 62080 - DNA, 120 bp, Artificial Sequence
  ENSG00000072818_36 (sequence is synthesized)
cagacccctctgccatctccctcaccctcctacctaggtcctgcctcctccaggctgactcagagcgcctcctgcagctgtgggtcagtgctgtgcagagcagcattgcttctgccttca

SEQ ID NO: 62081 - DNA, 120 bp, Artificial Sequence
  ENSG00000072818_37 (sequence is synthesized)
gtcaggctcgccttgatgacagcccccggggtccaggccaggtaccttaacctgggggtgcggagccaggctgcctgtggagatggggcaccctttaccctaggccccttggccaccctt

SEQ ID NO: 62082 - DNA, 120 bp, Artificial Sequence
  ENSG00000072818_38 (sequence is synthesized)
acaaggcccatgcgggagccccactccttcgggccacagtgcggctccaatacagagcgcatcacaccggcccctcttccttccctgtcctggcttcctctcttagcttctggctttgtc

SEQ ID NO: 62083 - DNA, 120 bp, Artificial Sequence
  ENSG00000072818_39 (sequence is synthesized)
actgggtaccaggcctgggcccaagcctctggggtgccagttggacccaggcgggcctagcccctctgtgtcctagtctggccagaattgggggatacccagaatttgttggcttggttg

SEQ ID NO: 62084 - DNA, 120 bp, Artificial Sequence
  ENSG00000072818_40 (sequence is synthesized)
gaagaagtgtggggtcaaggctgctgagggtgggggagccagtgaagactaggcagagaaacggtcatgaggccttagcaagtatctaaggccctcgccccccacctcagtgtggtggaa

SEQ ID NO: 62085 - DNA, 120 bp, Artificial Sequence
  ENSG00000072818_41 (sequence is synthesized)
gggaggtgacatgggagaggttgtccaggccaaagtgtcacaagtgtcactagagaagggaggtggctggagtgatgagggccttgaaatgaaacctaaggaagaaggaatggtgacgag

SEQ ID NO: 62086 - DNA, 120 bp, Artificial Sequence
  ENSG00000072818_42 (sequence is synthesized)
agccttgcctcccagtgtcttcaggagcagcagcagctccccaggccactgcccccctgcacagggcctgaccctccccctctggccctccaggagccttggtgttcacttctccaaagt

SEQ ID NO: 62087 - DNA, 120 bp, Artificial Sequence
  ENSG00000072818_43 (sequence is synthesized)
ccggtctctgacccttgactcatgggagccagaactagtgaaggtaacttagcgtattgtgaagattgggggcaagaacttggggtggggcaaggacatggcggtgcaggggcgtgatcc

SEQ ID NO: 62088 - DNA, 120 bp, Artificial Sequence
  ENSG00000072818_44 (sequence is synthesized)
ggcagtgaagaaaccagggcccagctgctcccggtgagcttggggtttagcctcccaggggaatgggggacccctggagcagaagagggaagactgcgtgcttctcccctcccacaggca

SEQ ID NO: 62089 - DNA, 120 bp, Artificial Sequence
  ENSG00000072818_45 (sequence is synthesized)
cagagtgtgaagcccaggccttccgctggacaatgtcggagggaccggactgccgtttcaggggttacggtggagtgtgacattaagaatgagaaggaatgtggggctgggcgtgggcag

SEQ ID NO: 62090 - DNA, 120 bp, Artificial Sequence
  ENSG00000072818_46 (sequence is synthesized)
ggagggtaaggggtgccaacagcacaagaaaaggagagagagagggggtgggtttggctggagcgtcaggggttgagagctgaggccaagtgtggttggaccagatgaggtgatgatgcc

SEQ ID NO: 62091 - DNA, 120 bp, Artificial Sequence
  ENSG00000072818_47 (sequence is synthesized)
gtctctcccccacaccctagggactcgtacacatgcatacgcatacttacacatacccacacttgcatcactctattccctccacagtcccaagctccccatcatttagaagagacctgt

SEQ ID NO: 62092 - DNA, 120 bp, Artificial Sequence
  ENSG00000072818_48 (sequence is synthesized)
gatccaggccacagctgctgtaagagccctgctgacctctccaccccaccctagggctctgacacctactcctgactctgggccctgcccttacctcctttccccaccacctgttcccta

SEQ ID NO: 62093 - DNA, 120 bp, Artificial Sequence
  ENSG00000072818_49 (sequence is synthesized)
gggcttccacccatagggagagatcaacaatagagactggttgctaagagtgtgtgatttggaggcagagaacctgagtttgaacccaggctctcacctcttacaggagacttttttttt

SEQ ID NO: 62094 - DNA, 120 bp, Artificial Sequence
  ENSG00000072818_50 (sequence is synthesized)
gattactggcgtgagccactgtgcccggcctacaggagacttttaacaagttattaacctctcagcctcatctgtaaaatagtaacatacctcaaaagcttgtactatggatttatatat

SEQ ID NO: 62095 - DNA, 120 bp, Artificial Sequence
  ENSG00000072818_51 (sequence is synthesized)
ctatggatttatatatgaatacatgcaaagagctagagccaagcctagcttggttacagttagctgtaaccccttccacactcctgattaccacactccaccctcccattctctgaactg

SEQ ID NO: 62096 - DNA, 120 bp, Artificial Sequence
  ENSG00000072818_52 (sequence is synthesized)
gcgccaccctaagacatcttgaaatccaccactagggatgccaccctcaaccccccttctcgacttctccatgcagaattctcttctggcctgtgagtttctcctccagaacggggcgaa

SEQ ID NO: 62097 - DNA, 120 bp, Artificial Sequence
  ENSG00000072818_53 (sequence is synthesized)
cgtgaaccaagcggacagtgcgggccggggcccgctgcaccacgcaaccattcttggccacacggggtagggatgatggcatggggaggaaggctgggagaagttgggcggccggctgac

SEQ ID NO: 62098 - DNA, 120 bp, Artificial Sequence
  ENSG00000072818_54 (sequence is synthesized)
cctggctcttctctccaggctcgcctgcctgttcctgaaacggggagctgatctgggggctcgagactctgaaggcagggaccctctgaccatcgccatggaaacagccaacgctgacat

SEQ ID NO: 62099 - DNA, 120 bp, Artificial Sequence
  ENSG00000072832_0 (sequence is synthesized)
ggcgggccgagcagccggggcagccgcgcgtgggcatccacgggcgccgagcctccgtccgtgtctctatccctcccgggcctttgtcagcgcgcccgctgggagcggggccgagagcgc

SEQ ID NO: 62100 - DNA, 120 bp, Artificial Sequence
  ENSG00000072832_1 (sequence is synthesized)
tgtcagcgcgcccgctgggagcggggccgagagcgccggttccagtcagacagccccgcaggtcagcggccgggccgagggcgccagagggggccatgtcgtaccagggcaagaagagca

SEQ ID NO: 62101 - DNA, 120 bp, Artificial Sequence
  ENSG00000072832_2 (sequence is synthesized)
tcccgcacatcacgagtgaccgactcctcatcaaaggtggacggatcatcaacgatgaccaatccctttatgctgacgtctacctggaggatggacttatcaaacaaataggagagaact

SEQ ID NO: 62102 - DNA, 120 bp, Artificial Sequence
  ENSG00000072832_3 (sequence is synthesized)
taatcgttcctggtggagtgaagaccattgaagccaacgggcggatggttattcccggaggtattgatgtcaacacgtacctgcagaagccctcccaggggatgactgcggctgatgact

SEQ ID NO: 62103 - DNA, 120 bp, Artificial Sequence
  ENSG00000072832_4 (sequence is synthesized)
tcttccaagggaccagggcggcactggtgggcgggaccacgatgatcattgaccatgttgttcctgaacctgggtccagcctactgacctctttcgagaagtggcacgaagcagctgaca

SEQ ID NO: 62104 - DNA, 120 bp, Artificial Sequence
  ENSG00000072832_5 (sequence is synthesized)
ccaaatcctgctgtgattactccctccacgtggacatcacaagctggtacgatggcgttcgggaggagctggaggtgctggtgcaggacaaaggcgtcaattccttccaagtctacatgg

SEQ ID NO: 62105 - DNA, 120 bp, Artificial Sequence
  ENSG00000072832_6 (sequence is synthesized)
cctataaggatgtctaccaaatgtccgacagccagctctatgaagcctttaccttccttaagggcctgggagctgtgatcttggtccatgcagaaaatggagatttgatagctcaggaac

SEQ ID NO: 62106 - DNA, 120 bp, Artificial Sequence
  ENSG00000072832_7 (sequence is synthesized)
aaaagcggatcctggagatgggcatcacgggtcccgagggccatgccctgagcagacctgaagagctggaggccgaggcggtgttccgggccatcaccattgcgggccggatcaactgcc

SEQ ID NO: 62107 - DNA, 120 bp, Artificial Sequence
  ENSG00000072832_8 (sequence is synthesized)
ctgtgtacatcaccaaggtcatgagcaagagtgcagccgacatcatcgctctggccaggaagaaagggcccctagtttttggagagcccattgccgccagcctggggaccgatggcaccc

SEQ ID NO: 62108 - DNA, 120 bp, Artificial Sequence
  ENSG00000072832_9 (sequence is synthesized)
attactggagcaagaactgggccaaggctgcggcgttcgtgacttcccctcccctgagcccggaccctaccacgcccgactacttgacctccctactggcctgtggggacttgcaggtca

SEQ ID NO: 62109 - DNA, 120 bp, Artificial Sequence
  ENSG00000072832_10 (sequence is synthesized)
caggcagcggccactgtccctacagcactgcccagaaggcggtgggcaaggacaactttaccctgatccccgagggtgtcaacgggatagaggagcggatgacggtcgtctgggacaagg

SEQ ID NO: 62110 - DNA, 120 bp, Artificial Sequence
  ENSG00000072832_11 (sequence is synthesized)
cggtggctactggcaaaatggatgagaaccagtttgtcgctgtcaccagcaccaatgcagccaagatctttaacctgtacccaaggaaagggcggattgccgtgggctcggatgccgacg

SEQ ID NO: 62111 - DNA, 120 bp, Artificial Sequence
  ENSG00000072832_12 (sequence is synthesized)
cataacagccaaaagtcacaagtcggcggtggagtacaacatcttcgagggtatggagtgccacggctccccactagtggtcatcagccagggcaagatcgtctttgaagacggaaacat

SEQ ID NO: 62112 - DNA, 120 bp, Artificial Sequence
  ENSG00000072832_13 (sequence is synthesized)
caacgtcaacaagggcatgggccgcttcattccgcggaaggcgttcccggagcacctgtaccagcgcgtcaaaatcaggaataaggtttttggattgcaaggggtttccaggggcatgta

SEQ ID NO: 62113 - DNA, 120 bp, Artificial Sequence
  ENSG00000072832_14 (sequence is synthesized)
tgacggtcctgtgtacgaggtaccagctacacccaaatatgcaactcccgctccttcagccaaatcttcgccttctaaacaccagcccccacccatcagaaacctccaccagtccaactt

SEQ ID NO: 62114 - DNA, 120 bp, Artificial Sequence
  ENSG00000072832_15 (sequence is synthesized)
cagcttatcaggtgcccagatagatgacaacaatcccaggcgcaccggccaccgcatcgtggcgccccctggtggccgctccaacatcaccagcctcggttgaacgtggatgcgcggagg

SEQ ID NO: 62115 - DNA, 120 bp, Artificial Sequence
  ENSG00000072832_16 (sequence is synthesized)
agctagcctgaaggattctgggaatcatgtccatcccttttcctgtcagtgtttttgaaacccacagttttagttggtgctgatggagggagggggaagtcgaaggatgctctttccctt

SEQ ID NO: 62116 - DNA, 120 bp, Artificial Sequence
  ENSG00000072832_17 (sequence is synthesized)
ttctgtttaggaagaagtggtactagtgtggtgtgtttgcttggaaattccttgccccacagttgtgttcatgctgaatccacctcggagcatggtgttttcattcccccttcctagtga

SEQ ID NO: 62117 - DNA, 120 bp, Artificial Sequence
  ENSG00000072832_18 (sequence is synthesized)
accacaggttttagcattgtcttgttctgtcccttccacttctaactccactggctccatgattctctgagtggtggttcctttgcaccctgtagatgttctaggatagttgatgcatgt

SEQ ID NO: 62118 - DNA, 120 bp, Artificial Sequence
  ENSG00000072832_19 (sequence is synthesized)
tactaaattacgtatgcaagtctgtgagtgcgtctgaggggacatcgccaaggactgactgagacacgatgccgagacctcaagccctgaggggcagtcccaaaacccttacagtgaaga

SEQ ID NO: 62119 - DNA, 120 bp, Artificial Sequence
  ENSG00000072832_20 (sequence is synthesized)
tgtttactcattgcccccacctctggtccacactagaaagaagctcgccccacctccacctgtgagatccgtgaattctcggaatggcaggggaagccttgcactaggttgcagagaagc

SEQ ID NO: 62120 - DNA, 120 bp, Artificial Sequence
  ENSG00000072832_21 (sequence is synthesized)
atcctccacatcctgtgtcagaaaccctggtctccgtggcacttgtaactcaccgtgctgtcttctggtctgtgtgtgttcttcaagccagctctaggcttcaggccgagccaggttcac

SEQ ID NO: 62121 - DNA, 120 bp, Artificial Sequence
  ENSG00000072832_22 (sequence is synthesized)
actcagaaagaggtctccccatccccattcggggctgacgatggggggctgatggctgcccctgcgtggcctgagtcctggtccctctgaggcagttgacggggcagtcagatttttaaa

SEQ ID NO: 62122 - DNA, 120 bp, Artificial Sequence
  ENSG00000072832_23 (sequence is synthesized)
gttttgtacaaagttttcctttgtaatcactcccatttttacttaacaaccaacttgttgtggctcttatttctgaattcaaagcttgtgaaaaaataaagaaaatgaactgcccactga

SEQ ID NO: 62123 - DNA, 120 bp, Artificial Sequence
  ENSG00000072832_24 (sequence is synthesized)
atgcaccccacagcccggtacctcccccgctggaggagggaaaaagatcatccagcgctccccactccccgcctttactgatggagtggaagtccggacctagggacagcgccatgatgg

SEQ ID NO: 62124 - DNA, 120 bp, Artificial Sequence
  ENSG00000072832_25 (sequence is synthesized)
aagctcggtccacccctccccgcagctaaaaataacctaatggggcgacgctggcggctgcggcccgggaagggttaatgttcccgacgctgggccgcgagagggtggggacggtggtgg

SEQ ID NO: 62125 - DNA, 120 bp, Artificial Sequence
  ENSG00000072832_26 (sequence is synthesized)
aggcagaacagccgggctgcgtccctgggtgtggccggaaacaaaggaatccccgtctttacgctttgtctcggggtggggagctgagggcgcagcggtcaggagctggccctccgcccc

SEQ ID NO: 62126 - DNA, 120 bp, Artificial Sequence
  ENSG00000072832_27 (sequence is synthesized)
taaggcttcctcctatggagagacaggagcccagagctgggggtcagggtgctatcacctgcagagaaggagggagccaggcctggggtcagggcactgtcacctgatatggaggatgaa

SEQ ID NO: 62127 - DNA, 120 bp, Artificial Sequence
  ENSG00000072832_28 (sequence is synthesized)
gccccgtgttgggttagggcactgccactgactcatgctgggaccctgtacaggtccctgaacacatgctgttctccagtgcctggagcaggtgccctcccaaccttggccatccctgag

SEQ ID NO: 62128 - DNA, 120 bp, Artificial Sequence
  ENSG00000072832_29 (sequence is synthesized)
gtcacctgggctgctgtcagcagttcccagcaggctgacagcctcctgcctggaagccctgctgctttcagggtctctgcccccacaaccctttcccagtggggctagggctgtggctcc

SEQ ID NO: 62129 - DNA, 120 bp, Artificial Sequence
  ENSG00000072832_30 (sequence is synthesized)
attgccctccttcctcgtcctcctgcaggctggtgtggaggtgtcctccccacagcatccccagccctgccccccatagacctggcccactccttgtccctctgtactgagttttctccc

SEQ ID NO: 62130 - DNA, 120 bp, Artificial Sequence
  ENSG00000072832_31 (sequence is synthesized)
tccctgtctcagctccccactccttccccctttctggaaccatctcccaacaaactatctgccccccgaatctttgcctcgctgttgacttctacaagaacatacatgaagatgggcccg

SEQ ID NO: 62131 - DNA, 120 bp, Artificial Sequence
  ENSG00000072832_32 (sequence is synthesized)
ttgctgctgccttgtctgggactcaggggtcctttccgggggtgggtaggtggtagtgtcaggcaaagtgacttctctttggaagggatttggggtcctcctgcatgaagctttgtgtgt

SEQ ID NO: 62132 - DNA, 120 bp, Artificial Sequence
  ENSG00000072832_33 (sequence is synthesized)
atgagtatgcgtgtgtgtaagtgtatatatgggtgtgtatacctgtatgagtgtgtgtgtgggcatgtatgcatgtgtatacatatgtgagtatgcctttgtgaagatctgtatgtgatt

SEQ ID NO: 62133 - DNA, 120 bp, Artificial Sequence
  ENSG00000072832_34 (sequence is synthesized)
taagtgtgtgtgcgtgttcacgcgtgtatgctactgtgtaggcctgttttgttactgcatgtgcatgcatatatgtgtgcatgactgcatgtatgtgagtgcgtgtgcgtggtgtgtgcg

SEQ ID NO: 62134 - DNA, 120 bp, Artificial Sequence
  ENSG00000072832_35 (sequence is synthesized)
tctgtatgtgtatgcatgtgggtatgtagatgtgtgtgtatgcatgcttgtgtgtatgaatgcctgtgtgcggctgcatgtgtgtgaagtgcacctgtcgtgtgtgcgtgttgtgtgtgt

SEQ ID NO: 62135 - DNA, 120 bp, Artificial Sequence
  ENSG00000072832_36 (sequence is synthesized)
gtgtgcatgcacatttgaagtgacctcaggtttctctctcgcccgcagggctctgctttatctgcccagaagggcacacatgcacagtgtcgatcaatcacactctcccttcctctgttt

SEQ ID NO: 62136 - DNA, 120 bp, Artificial Sequence
  ENSG00000072832_37 (sequence is synthesized)
ctggtacggggaacctaggacttaacaactccaaggaagggagtgtaggagttggggagggacagtgtccccatctgcaatttccggtcattgacagggattttaggccccgctgagagc

SEQ ID NO: 62137 - DNA, 120 bp, Artificial Sequence
  ENSG00000072832_38 (sequence is synthesized)
cagggatgcatgaatgcgtggagggaaatgagttgtaaacagagtgtaggggaacctggcatctccatgctgctttgctgcagctaatatgttttgcacccggggtacatcattttacct

SEQ ID NO: 62138 - DNA, 120 bp, Artificial Sequence
  ENSG00000072832_39 (sequence is synthesized)
ctgtaagcctcaatttcctgtctgtaaaatgggaaaattatgcctagtgttcctgggatactgagctggcttctctgtgaagctaaaacctcacctctattttaaggcccaggtgtctct

SEQ ID NO: 62139 - DNA, 120 bp, Artificial Sequence
  ENSG00000072832_40 (sequence is synthesized)
ggcctcctgccctggattaggggactggcccctggggtggtgaaggtcagggccccagcccccaaccacagtgctgggggagctgtaccaagcctaggccaccctcgctctggatggcaa

SEQ ID NO: 62140 - DNA, 80 bp, Artificial Sequence
  ENSG00000072832_41 (sequence is synthesized)
ccgcgggcgggcaggcgggagcgcggtgggtggccggccttggacgggtatggcggaccggcggcgcgcgtggaacaccg

SEQ ID NO: 62141 - DNA, 120 bp, Artificial Sequence
  ENSG00000072832_42 (sequence is synthesized)
gcggaccggcggcgcgcgtggaacaccgaggacgacctgcccgtgtacctggcgcggccgggcagcgcggcgcagaccccgcgccagaagtacggcggcatgttcgccgcggtggagggc

SEQ ID NO: 62142 - DNA, 120 bp, Artificial Sequence
  ENSG00000072832_43 (sequence is synthesized)
gcctacgagaacaagaccatcgacttcgacgcctacagtgtgggccgccgcggctcggcgcgcacgccgcgcagcgctggccggcccgacgcggtcgggctgccagggccgggaggcagc

SEQ ID NO: 62143 - DNA, 120 bp, Artificial Sequence
  ENSG00000072832_44 (sequence is synthesized)
gaggacacggccagcgacgtgagcgagccctcgggctccgcggtcagctctcccggagagcgcgacgagcggccgccgacgctgcgcatccgccgccccgcgccccgcgacctgcccctc

SEQ ID NO: 62144 - DNA, 120 bp, Artificial Sequence
  ENSG00000072832_45 (sequence is synthesized)
cagcttatcagcattaccagagcctgcagctcctgagaatcgcacaatagcccttcggctgcaatcattctttccgtcagagtcatcatcagctgtcgggctttggagctggaacactta

SEQ ID NO: 62145 - DNA, 120 bp, Artificial Sequence
  ENSG00000072832_46 (sequence is synthesized)
aactggtccacaagaaagtgctggatatttgccatctgtttccagaaagcttccatctgtgaaatgagcacaagcagcaagaagtgaggtgaaaaacttacttaagaaagccaaacggtg

SEQ ID NO: 62146 - DNA, 120 bp, Artificial Sequence
  ENSG00000072840_0 (sequence is synthesized)
ccggctcggcgaagcagggaaggggagagaagcaggagtcgggagactgcacaggccagaaagtctgcggagcgggccgcgcccctggcccgcccgggctccaagtcccgcgtcgccgcc

SEQ ID NO: 62147 - DNA, 80 bp, Artificial Sequence
  ENSG00000072840_1 (sequence is synthesized)
ggctccaagtcccgcgtcgccgccctggcggggacggtgcagcaggcggcgggatgcggcggggcggcagcctgagcgcc

SEQ ID NO: 62148 - DNA, 120 bp, Artificial Sequence
  ENSG00000072840_2 (sequence is synthesized)
cccgccctgctggcccccgccgtgctgctgggcgccgcgctcggcctcggcctcggcctttggcttggctgccgcgcgggccgccagcgcacgcgacaccagaaagacgacactcaaaat

SEQ ID NO: 62149 - DNA, 120 bp, Artificial Sequence
  ENSG00000072840_3 (sequence is synthesized)
gacactcaaaatctgctcaagaatttggagtctaatgcgcagaccccctcggaaactggctccccatcaaggaggaggaagagagaagtgcagatgtcgaaggacaaggaagctgttgat

SEQ ID NO: 62150 - DNA, 120 bp, Artificial Sequence
  ENSG00000072840_4 (sequence is synthesized)
gaatgtgagccgccttccaacagcaatatcacagcattcgccctgaaggccaaagtcatctaccccatcaatcagaagttccggcctctggccgatggctcctccaacccgtctctgcat

SEQ ID NO: 62151 - DNA, 120 bp, Artificial Sequence
  ENSG00000072840_5 (sequence is synthesized)
gaaaacttaaagcaggctgttttgccacaccagccggtagaggcctctccttccagcagtctggggagcctgagccagggtgagaaggacgactgcagctcctcatccagcgtccactcg

SEQ ID NO: 62152 - DNA, 120 bp, Artificial Sequence
  ENSG00000072840_6 (sequence is synthesized)
gccaccagcgatgacaggtttctcagccgcaccttcctccgggtgaacgccttccctgaagtgctggcctgcgagagtgtagacgttgacctgtgtatctacagccttcacttaaaagac

SEQ ID NO: 62153 - DNA, 120 bp, Artificial Sequence
  ENSG00000072840_7 (sequence is synthesized)
ctgctgcatttggacacggcactgaggcaggaaaagcatatgatgtttattcagatttttaaaatgtgcctccttgaccttcttcctaaaaagaagtcagatgatgaactataccagaag

SEQ ID NO: 62154 - DNA, 120 bp, Artificial Sequence
  ENSG00000072840_8 (sequence is synthesized)
atcctttcaaaacaagaaaaagatttggaggaactagaaaagggacttcaggtcaaactgtcaaacacagaaatgtcgggggctggtgactctgagtacatcaccctggctgatgtggaa

SEQ ID NO: 62155 - DNA, 120 bp, Artificial Sequence
  ENSG00000072840_9 (sequence is synthesized)
aagaaggagagagaatactctgaacagctaatcgataatatggaagctttctggaaacagatggcaaatatccagcactttcttgtggaccagtttaagtgttccagctccaaagcccga

SEQ ID NO: 62156 - DNA, 120 bp, Artificial Sequence
  ENSG00000072840_10 (sequence is synthesized)
cagctgatgatgactctgacggaaagaatgattgcagccgaagggctattgtgcgattctcaggagctgcaggctctggacgccctggagaggacgatggggcgggcgcacatggcaaaa

SEQ ID NO: 62157 - DNA, 120 bp, Artificial Sequence
  ENSG00000072840_11 (sequence is synthesized)
gtgattgagtttctgaagctgcaagtccaggaggagaccaggtgccggctggctgccatctcccacggcctggagctgctggctggtgaggggaagctgtccgggcggcagaaggaggag

SEQ ID NO: 62158 - DNA, 120 bp, Artificial Sequence
  ENSG00000072840_12 (sequence is synthesized)
ctgctcacgcagcagcacaaggccttctggcaggaggcagagcgcttcagccgggagtttgtccagcgaggcaaagacctggtcacggcgtctctggctcaccaggtggagggaacggca

SEQ ID NO: 62159 - DNA, 120 bp, Artificial Sequence
  ENSG00000072840_13 (sequence is synthesized)
aaactcacgctggcccaagaggaggaacagagaagcttcctggctgaggcccagccgactgctgacccggaaaagtttctcgaggcttttcatgaggtcctggagaggcagaggctgatg

SEQ ID NO: 62160 - DNA, 120 bp, Artificial Sequence
  ENSG00000072840_14 (sequence is synthesized)
cagtgtgacctggaggaagaggagaatgtcagagccaccgaggctgtggttgcactctgccaggagctgtacttcagcaccgtggacactttccagaagttcgtggatgccctgttcctt

SEQ ID NO: 62161 - DNA, 120 bp, Artificial Sequence
  ENSG00000072840_15 (sequence is synthesized)
cagacgctccctggcatgactggcctccccccggaagagtgtgactacttgaggcaggaagtccaggagaacgctgcctggcagctggggaagtcaaatcgcttccggaggcagcagtgg

SEQ ID NO: 62162 - DNA, 120 bp, Artificial Sequence
  ENSG00000072840_16 (sequence is synthesized)
aaactcttccaggagctcctagagcaagaccagcaggtgtggatggaggagtgtgcgctgtccagcgtgctgcagacacacctgcgggaggaccacgagggcaccatccgcggcgtcttg

SEQ ID NO: 62163 - DNA, 120 bp, Artificial Sequence
  ENSG00000072840_17 (sequence is synthesized)
ggccgactgggcggcctcactgaagagtccacgcggtgtgtcctgcaggggcatgacctgctgttgcgctcagccctccggaggctggcactccgcggcaacgccctggccaccctgacg

SEQ ID NO: 62164 - DNA, 120 bp, Artificial Sequence
  ENSG00000072840_18 (sequence is synthesized)
cagatgcggctatcggggaagaagcacctcctgcaggagctgcgggaacagcgtgcactggagcaggggtcctcccagtgcctggacgagcatcagtggcagctgctcagggccctggag

SEQ ID NO: 62165 - DNA, 120 bp, Artificial Sequence
  ENSG00000072840_19 (sequence is synthesized)
gcgcgtgtgctggaggaggccagccggctagaggaggaagcacagcagacacggctgcagctccagcagcggctcctggccgaggcccaggaggtggggcagcttctgcagcagcacatg

SEQ ID NO: 62166 - DNA, 120 bp, Artificial Sequence
  ENSG00000072840_20 (sequence is synthesized)
gagtgcgccattgggcaggcgctgctggtgcatgcacggaatgcagccaccaagagccgggccaaggacagggatgacttcaagaggacactgatggaggcggcagtggagagcgtctac

SEQ ID NO: 62167 - DNA, 120 bp, Artificial Sequence
  ENSG00000072840_21 (sequence is synthesized)
gtgaccagcgctggtgtcagccgcctggtgcaggcgtattaccagcaaatcggaaggatcatggaggaccacgaggagagaaaactgcagcacctgaagaccctgcagggtgagaggatg

SEQ ID NO: 62168 - DNA, 120 bp, Artificial Sequence
  ENSG00000072840_22 (sequence is synthesized)
gaaaattacaaactgcggaaaaagcaagaactcagcaacccttcgtcgggcagcaggacggcaggtggcgctcatgagacctcccaggcggtccaccagaggatgctgtcccagcagaag

SEQ ID NO: 62169 - DNA, 120 bp, Artificial Sequence
  ENSG00000072840_23 (sequence is synthesized)
aggttcctggcccagttcccagtgcaccagcagatgcgtctgcacgcccagcagcagcaggcaggagtcatggaccttctggaagcccagctggagacccagctacaggaagctgaacag

SEQ ID NO: 62170 - DNA, 120 bp, Artificial Sequence
  ENSG00000072840_24 (sequence is synthesized)
aacttcatctccgagctggcagccttggcccgagtgccccttgctgaaagcaaactgttgcctgctaagcgtgggctgctagagaagcccctaaggactaaaaggaagaagcccctgccc

SEQ ID NO: 62171 - DNA, 120 bp, Artificial Sequence
  ENSG00000072840_25 (sequence is synthesized)
caggaaagaggggacctgggggtgcccaacaatgaggaccttgcctccggggaccagacctcaggctcactcagcagcaaaaggctgagtcagcaagaaagtgaagctggggacagtggg

SEQ ID NO: 62172 - DNA, 120 bp, Artificial Sequence
  ENSG00000072840_26 (sequence is synthesized)
gaagccctgggtctgggtgtgaattccaccttccctcctgcagtgctgagaggcagcgaggacggagaggacagcggcatctctaggctcttctgagagggacagagaaagaatagaaat

SEQ ID NO: 62173 - DNA, 120 bp, Artificial Sequence
  ENSG00000072840_27 (sequence is synthesized)
gtgccctaaaagcataaatgagtatcacctgagaaaattaggcattcccgtcttggaaacacgtctctgtgagtttgcatttcatttggcttggagccctggctcgatgcctcatggatc

SEQ ID NO: 62174 - DNA, 120 bp, Artificial Sequence
  ENSG00000072840_28 (sequence is synthesized)
tttctccccaaggagggacgtcttgaggggtccgagcctcaggccaaggacccctgatgcagactctggaatccctggcccaaaggcctgtctgggcccatctggggctgaggacacaca

SEQ ID NO: 62175 - DNA, 120 bp, Artificial Sequence
  ENSG00000072840_29 (sequence is synthesized)
gatacataatgacacctgcagaaatgtattctctgaggacacttagaatatgaggaagagggtgtggcccaaccctcacttcacctggggaggggcttcttccggacagtagacaccctg

SEQ ID NO: 62176 - DNA, 120 bp, Artificial Sequence
  ENSG00000072840_30 (sequence is synthesized)
cccgtgcagagagatgtcatgggggcacctgctctccctgatagatgctgagagcatccagaaacttccagaccagccctctcaccacacccagaagaggcctttcccatctggagagaa

SEQ ID NO: 62177 - DNA, 120 bp, Artificial Sequence
  ENSG00000072840_31 (sequence is synthesized)
gcttccagaccagcccttcacacaccacagccaggaggggcctttcccacctggagagaaacttccagaccagcccctcataccacagccaagaggggcctttctcacctggagagaaat

SEQ ID NO: 62178 - DNA, 120 bp, Artificial Sequence
  ENSG00000072840_32 (sequence is synthesized)
ttccagaccatcccctctcaccacagccaggagaggcctttcccaccggtagagaaacttccagaccagcccctcacaccacagccaagagaagcctttccagcctggagagaaacttcc

SEQ ID NO: 62179 - DNA, 120 bp, Artificial Sequence
  ENSG00000072840_33 (sequence is synthesized)
agaccagccctctcactacagccaggagaggcctttcccgcctggaaacttccggacaagcctctcacacaccacagccaggagaggcctttcccacctggacagaaacttccagaccag

SEQ ID NO: 62180 - DNA, 120 bp, Artificial Sequence
  ENSG00000072840_34 (sequence is synthesized)
cccctctcaccacagccaggagaggcctttaccacctggagagaagcttccagaccagcccctcacaccacagccaggagaggcctttcccacctggagagaaacttccagaccagcccc

SEQ ID NO: 62181 - DNA, 120 bp, Artificial Sequence
  ENSG00000072840_35 (sequence is synthesized)
tcataccacagccaagaggggcctttctcacctggagagaaacttccagaccagcccctcacaccaccgccaggagaggcctttcccaccgggagagaaacttccagaccagcccctcac

SEQ ID NO: 62182 - DNA, 120 bp, Artificial Sequence
  ENSG00000072840_36 (sequence is synthesized)
accacagccaggagaggcctttcccaccgggagagaaacttccagaccagccctctcactacagccagaagaggcctttcccaccgggagaggaacttccagaccagcccctcacaccac

SEQ ID NO: 62183 - DNA, 120 bp, Artificial Sequence
  ENSG00000072840_37 (sequence is synthesized)
agccaggagaggcctttcccgcctggagagaagcttcaggccagctcctcacaccacagccaggagagaccttttctgcctggagagaaactttcagaccagccccacacaccacagcca

SEQ ID NO: 62184 - DNA, 120 bp, Artificial Sequence
  ENSG00000072840_38 (sequence is synthesized)
ggagaggccgttcctgcctggagagaagcttccagaccagcccttcacaccacagccaggagaggcctttcccacctggagagaaacttccagaccagcccctctcaccacagccaggag

SEQ ID NO: 62185 - DNA, 120 bp, Artificial Sequence
  ENSG00000072840_39 (sequence is synthesized)
aggccgttcccacctggagggaaaattgctcctttgatggaggttagggactgtcaccctcagcactgtgaacataccgggcgagatcattcttcaggggaaggagctgcccagagcatc

SEQ ID NO: 62186 - DNA, 120 bp, Artificial Sequence
  ENSG00000072840_40 (sequence is synthesized)
acaggatgttccagtgtccctggtctctgcccaccagatgccagcactcccaccattcgtggcaaccaaggatgtctccagacactgccccgtgtccatggggttatcacccactgtgct

SEQ ID NO: 62187 - DNA, 120 bp, Artificial Sequence
  ENSG00000072840_41 (sequence is synthesized)
gagtcaaagggtgccttgccctggtctaatccaggacatagccgtggatacgtccaaaaatccccagaacctagtgagccctctggctctgggagcccctatctcaggaattttcagggt

SEQ ID NO: 62188 - DNA, 120 bp, Artificial Sequence
  ENSG00000072840_42 (sequence is synthesized)
catttgtgacttttcatttcttaaaacctgaaatagactctcttagaaacaagtgactccttcccagtggccaaaacttaatcatcagagcgcttccttcagttcctcacccatcagcca

SEQ ID NO: 62189 - DNA, 120 bp, Artificial Sequence
  ENSG00000072840_43 (sequence is synthesized)
gtgggctctccaaagttaaccaacagctccctcttgtggttcactaaaaaacttggttattccatggagttgtgcaaagctatggcttccttggtgcaatattcttaaaacctgctttgc

SEQ ID NO: 62190 - DNA, 73 bp, Artificial Sequence
  ENSG00000072840_44 (sequence is synthesized)
tatggcttccttggtgcaatattcttaaaacctgctttgcatagaaatcatctccatctcccgggttcaagcg

SEQ ID NO: 62191 - DNA, 76 bp, Artificial Sequence
  ENSG00000072840_45 (sequence is synthesized)
ctccccagtagctgggactacagacgtgtgccaccacgcctggctaaatcttttttgtactctcgaactcctgacc

SEQ ID NO: 62192 - DNA, 120 bp, Artificial Sequence
  ENSG00000072840_46 (sequence is synthesized)
cccaaagtgctgagattaggcgttagccaccgcgcccggccagaaatcacttttatattgtcacatgggccctctgcacagagtccgatggctcctcccggggaagcctgattttgtgac

SEQ ID NO: 62193 - DNA, 120 bp, Artificial Sequence
  ENSG00000072840_47 (sequence is synthesized)
gtgtgtatagtaaatgcaggccctctggcagcaccataattggtcggttaccctgagcccagagctctgaaagcatctgtggaatgatcacgggacccttctcctctgagaaggctcccg

SEQ ID NO: 62194 - DNA, 120 bp, Artificial Sequence
  ENSG00000072840_48 (sequence is synthesized)
gctgcctccccgccaccgagcttgtagcctgaatgcctggctgtcgcatggagcattttgcttctggggtgtcttccttagccaaagggaacgtgtcatttgctcgaccctggcccaccc

SEQ ID NO: 62195 - DNA, 120 bp, Artificial Sequence
  ENSG00000072840_49 (sequence is synthesized)
ttgccgcccagctgttgtgctgggcacagtctggggcacaggcctccatgatgaagacgcgtgggctgtcggtgctttcatccgtcacaaactggcacctgtacctgccagcaggagcat

SEQ ID NO: 62196 - DNA, 120 bp, Artificial Sequence
  ENSG00000072840_50 (sequence is synthesized)
gatggggacttccatgctggaattgctccctgattaaaatgagatatggctatttggaagacactgcattttagccagtgtacctgggcacagactcggggctgccctgaagctgatgaa

SEQ ID NO: 62197 - DNA, 120 bp, Artificial Sequence
  ENSG00000072840_51 (sequence is synthesized)
ggcttgaaggacggaagggctgagccacatgaaggcagcactcagggccaggggagagagaagaggatcagcagtgcagccccaggatgcctcgcaggtaccctgcctccattttggtta

SEQ ID NO: 62198 - DNA, 120 bp, Artificial Sequence
  ENSG00000072840_52 (sequence is synthesized)
ccatccccacttattatgggctgtgggctgttatggtgatggatggatgtggatttggaaggggaccatgagagatgatgtattatgatgaactcatgatttaattctttggtgaaaata

SEQ ID NO: 62199 - DNA, 120 bp, Artificial Sequence
  ENSG00000072840_53 (sequence is synthesized)
ctctgccagaaggccatgagaagacatagagacacagggaaggaggctgtttgaagacagaaggagggactggagtgatgcagccacaagccgaggaacacctgcagccaccaaaagcca

SEQ ID NO: 62200 - DNA, 120 bp, Artificial Sequence
  ENSG00000072840_54 (sequence is synthesized)
gaagagcccaggaagggcccctcccagagcctttggagggggcgaggctctgccaacaccttggtttcatactaatgccctccggaacggtgagagaataaacttcgttgtcttaatgca

SEQ ID NO: 62201 - DNA, 120 bp, Artificial Sequence
  ENSG00000072840_55 (sequence is synthesized)
ctcgctcatgaaggagagggggagttcatccctctgagctccgctctcccaggcagtgccattagttaatgaccctggtggcttcttctcagctgttaattaacatgccctggtggttcc

SEQ ID NO: 62202 - DNA, 120 bp, Artificial Sequence
  ENSG00000072840_56 (sequence is synthesized)
cacacaaacaagaaacaaaatgcacaatcctagcaagcaggattgttgaagtgagtaaccacatgcctgctctgtccctctgtcccgagttcaggtgtggatggaggagtgtgcgctgtc

SEQ ID NO: 62203 - DNA, 120 bp, Artificial Sequence
  ENSG00000072840_57 (sequence is synthesized)
aggccccagcttccagcaggtttgccagaacccgaatcctatcacccttggtgctgcagggtgcggtattcattcgccggggctgccatagcaaggtcccacagaccgggcagcttacac

SEQ ID NO: 62204 - DNA, 120 bp, Artificial Sequence
  ENSG00000072849_0 (sequence is synthesized)
aggcgacggtggggaagatggcgtaccagagcttgcggctggagtacctgcagatcccaccggtcagccgcgcctacaccactgcctgcgtcctcaccaccgccgccgtgcagttggaat

SEQ ID NO: 62205 - DNA, 120 bp, Artificial Sequence
  ENSG00000072849_1 (sequence is synthesized)
tgatcacaccttttcagttgtacttcaatcctgaattaatctttaaacactttcaaatatggagattaatcaccaacttcttattttttgggccagttggattcaattttttatttaaca

SEQ ID NO: 62206 - DNA, 120 bp, Artificial Sequence
  ENSG00000072849_2 (sequence is synthesized)
tgatttttctatatcgttactgtcgaatgctagaagaaggctctttccgaggtcggacagcagactttgtatttatgttcctttttggtggattcttaatgaccctttttggtctgtttg

SEQ ID NO: 62207 - DNA, 120 bp, Artificial Sequence
  ENSG00000072849_3 (sequence is synthesized)
tgagcttagttttcttgggccaggcctttacaataatgctcgtctatgtgtggagccgaaggaacccctatgtccgcatgaacttcttcggccttctcaacttccaggccccctttctgc

SEQ ID NO: 62208 - DNA, 120 bp, Artificial Sequence
  ENSG00000072849_4 (sequence is synthesized)
cctgggtgctcatgggattttccttgttgttggggaactcaatcattgtggaccttttgggtattgcagttggacacatatattttttcttggaagatgtatttcccaatcaacctggtg

SEQ ID NO: 62209 - DNA, 120 bp, Artificial Sequence
  ENSG00000072849_5 (sequence is synthesized)
gaataagaattctgaaaacaccatctattttgaaagctatttttgatacaccagatgaggatccaaattacaatccactacctgaggaacggccaggaggcttcgcctggggtgagggcc

SEQ ID NO: 62210 - DNA, 120 bp, Artificial Sequence
  ENSG00000072849_6 (sequence is synthesized)
agcggcttggaggttaaagcagcagtgccaataatgagacccagctgggaaggactcggtgatacccactgggatcttttatcctttgttgcaaaagtgtggacacttttgacagcttgg

SEQ ID NO: 62211 - DNA, 120 bp, Artificial Sequence
  ENSG00000072849_7 (sequence is synthesized)
cagattttaactccagaagcactttatgaaatggtacactgactaatccagaagacatttccaacagtttgccagtggttcctcactacactggtactgaaagtgtaatttcttagagcc

SEQ ID NO: 62212 - DNA, 120 bp, Artificial Sequence
  ENSG00000072849_8 (sequence is synthesized)
aaaaaactggagaaacaaatatcctgccacctctaacaagtacatgagtacttgatttttatggtataaggcagagccttttcttcctcttcttgatagatgaggccatggtgtaaatgg

SEQ ID NO: 62213 - DNA, 120 bp, Artificial Sequence
  ENSG00000072849_9 (sequence is synthesized)
aagtttcagagaggacaaaataaaacggaattccatttttctctcactgtattaaagcttttgtgtgtgatcttttaaattctgataatgtattgtagccctcctgcgtagatctgagct

SEQ ID NO: 62214 - DNA, 120 bp, Artificial Sequence
  ENSG00000072849_10 (sequence is synthesized)
cagaacagtttacacagctgttcttcctgtgtcttcacaacttttaactggatttcatttcaggattggaaatacgtggctgtcatgctgtggttgtgtacatcttactaactcagaatg

SEQ ID NO: 62215 - DNA, 120 bp, Artificial Sequence
  ENSG00000072849_11 (sequence is synthesized)
caagattcagcaggaagatgatttatttctgtcatctggataggttgttttgcatctgggttttgccaaactttgtcagacaacatgaaaaaaaaggagggaggatggttcttgtagcag

SEQ ID NO: 62216 - DNA, 120 bp, Artificial Sequence
  ENSG00000072849_12 (sequence is synthesized)
taggaattcagctataggaaagtcagctgtaagctaatgtggcatcttatttgctttacttacatttctccattaagaagtatccagggaaagattggtaagggccacatttttgtaaaa

SEQ ID NO: 62217 - DNA, 120 bp, Artificial Sequence
  ENSG00000072849_13 (sequence is synthesized)
ccacatttttgtaaaactaggaagattttcattagactttttttttcttttatttttaaaaaagttttaattaaaaatttttttttaaatacagatggggtctcactgtgttgcccaggc

SEQ ID NO: 62218 - DNA, 71 bp, Artificial Sequence
  ENSG00000072849_14 (sequence is synthesized)
aagtgctaggatgacaggcatgagccaccatgcccagccaattaaaaaaaaaaaatagagacagggtctca

SEQ ID NO: 62219 - DNA, 120 bp, Artificial Sequence
  ENSG00000072849_15 (sequence is synthesized)
aattaaaaaaaaaaaatagagacagggtctcagattttcattagatttggaaaccaagttagaatgttgactttggagccagacgaacagataccagttagctaggcatatgttcttcca

SEQ ID NO: 62220 - DNA, 120 bp, Artificial Sequence
  ENSG00000072849_16 (sequence is synthesized)
gggtctttggctagttaacattagtcatttgcttcgtgaaaattcaagaaccttttcagagccaagtacctggattaccttcccaatcaggtagaaattagacagggtccacagaagtag

SEQ ID NO: 62221 - DNA, 120 bp, Artificial Sequence
  ENSG00000072849_17 (sequence is synthesized)
taacttccagaacctggaagagtcgaaagagcacccctaggaaagagatgattccaaacagctttcattaacggcatgtaggcacaggtccctttcccaaaagtggattgttagtagtag

SEQ ID NO: 62222 - DNA, 120 bp, Artificial Sequence
  ENSG00000072849_18 (sequence is synthesized)
ttcattcaacctttgttaaggggtagctttccagaatgtgacattgtcctcagaaagatagacataggcttaaacataatggacatcctaaataggaattttcagattgtttttgaagtg

SEQ ID NO: 62223 - DNA, 120 bp, Artificial Sequence
  ENSG00000072849_19 (sequence is synthesized)
aaaagtgttttaatgtctttaaatggaattgcataactaatggtatttaagtattttacatgttgctaataactttgaatatgattgttgcaattttatggaacctgggtctatgggact

SEQ ID NO: 62224 - DNA, 120 bp, Artificial Sequence
  ENSG00000072849_20 (sequence is synthesized)
gctttttaagcagtttaaaaaaggttttcaaagtttaaaagccaatcttagcatgtataatccttatgggattcttaagttttatcctatcttgtttttgctcaagaacgctttatcagt

SEQ ID NO: 62225 - DNA, 120 bp, Artificial Sequence
  ENSG00000072849_21 (sequence is synthesized)
tttttgttttttttttttaaattgtttttgggctagaaatgagtttctctagttttatttgttctccctgagttggagttatgcaatgaatggcatttttgtggtaaaatactaatccta

SEQ ID NO: 62226 - DNA, 120 bp, Artificial Sequence
  ENSG00000072849_22 (sequence is synthesized)
gtggtaaaatactaatcctaaaatctgttaactcactgttcatttaagtagggaatatctgtatacattaatgactaggtaaaacaggaaatacattttgaatatacagcctaaaggcag

SEQ ID NO: 62227 - DNA, 120 bp, Artificial Sequence
  ENSG00000072849_23 (sequence is synthesized)
gcagttacagggtttttgatttctccgattttatagggtgcaagttcccagtggcaggatgccctgctgtgtgactgactacactgtgtcctgagcagtggtaatttcaatcacctctca

SEQ ID NO: 62228 - DNA, 120 bp, Artificial Sequence
  ENSG00000072849_24 (sequence is synthesized)
tcagtttggccagccctacaaccaccattcctagccctgtgttgcttgacaggatacctgtgcttgaatggacataaggaaaagtccttactttctccccaatttacctctcaatcttag

SEQ ID NO: 62229 - DNA, 120 bp, Artificial Sequence
  ENSG00000072849_25 (sequence is synthesized)
ttcttccagaacacacttccctttcacaatgcaaataaactgaaagtgagatttgatacatggaattttgagaccaaccaactaaccttacacataatttgagggattcctggattcttc

SEQ ID NO: 62230 - DNA, 120 bp, Artificial Sequence
  ENSG00000072849_26 (sequence is synthesized)
tagtgatactgaaaagcacacttgactaaagcatagtgttttttgtttgttatggaaatacggtatacgttcatttaaaaataaatggacatacaaattgcatctccttaggagatacat

SEQ ID NO: 62231 - DNA, 120 bp, Artificial Sequence
  ENSG00000072849_27 (sequence is synthesized)
tttatatacatttcggtgcgtttttttccagtatggatttctatttgtttctctcttcctcttgttttttctgtgtcactcttgtatgtcctcatatctttcatacctcttgtgtagtct

SEQ ID NO: 62232 - DNA, 120 bp, Artificial Sequence
  ENSG00000072849_28 (sequence is synthesized)
ctagaagcagaacacctaagtcctgggtctggataatgaaaccctcagtctctggggcctctgaaaataaggaagcattggagctattgccatgttgagtaatgggcttcctagaactat

SEQ ID NO: 62233 - DNA, 120 bp, Artificial Sequence
  ENSG00000072849_29 (sequence is synthesized)
tgtcatctatcctgccagtgttttatgttgtagctgtttttctttgacaggtgagttccagctatgttgttagtcatgatcctgccattattttctgtgttctgtaggatgtctccaggc

SEQ ID NO: 62234 - DNA, 120 bp, Artificial Sequence
  ENSG00000072849_30 (sequence is synthesized)
tacttaaacatattttatgagtttgcaataaaattgttgaatcttgtatgatcaagtcactcctctgctcagaaatccacagtgacttcttagtaagcccctacattatatgcatacttg

SEQ ID NO: 62235 - DNA, 120 bp, Artificial Sequence
  ENSG00000072849_31 (sequence is synthesized)
tttttttcttaactttactcccacttctacctaacagggacctcaacttaagtctcttcagttcttcaaggcctggccttgttcctgattcctcaaaaaatcttgactctaaggcctatt

SEQ ID NO: 62236 - DNA, 120 bp, Artificial Sequence
  ENSG00000072849_32 (sequence is synthesized)
ttattgtctgtctctgaatccctataaagcttcaagtctgtatgacattcttaacgccaaattatatattgtcttgtactgttcctagctggtacatgtatattagtcttgtctccctca

SEQ ID NO: 62237 - DNA, 120 bp, Artificial Sequence
  ENSG00000072849_33 (sequence is synthesized)
tgagaatgtaagctccttaagggcagggaccatgtcttaatttttgtatccaccacagtgcctagcacagtgcttggcacatgggtgctgaataaatacctttgtttattgatcagcaaa

SEQ ID NO: 62238 - DNA, 120 bp, Artificial Sequence
  ENSG00000072849_34 (sequence is synthesized)
aaaacaccatctatttttcctagaatcagctgtttcttcaaggagccctggttcctttaaagtggagaatggtatttagaagccaagatctgggtgctagatgtgctcattgctattgga

SEQ ID NO: 62239 - DNA, 120 bp, Artificial Sequence
  ENSG00000072849_35 (sequence is synthesized)
ttgtcatctgtctcccacagttctctagatcttagcttcagggcactatcatttattttacagcacattttctgtgacaagtttccaaacctagcagtcggacaggatgagcaagtcaaa

SEQ ID NO: 62240 - DNA, 120 bp, Artificial Sequence
  ENSG00000072849_36 (sequence is synthesized)
ttaacccaggtgggttactgttaagcaactcagttatatcattactgcttggcgtacttcacttttaaactaagttggtaagacatttacttggtggctaccaaaaccaataaattattt

SEQ ID NO: 62241 - DNA, 120 bp, Artificial Sequence
  ENSG00000072849_37 (sequence is synthesized)
tttcagaaaaagaattttcatctatacaatagacttagatatggtacggtctgacaagatggttttgttccagctagctttattcatctctgtaaaggtgctaatcgtgagcaagcttta

SEQ ID NO: 62242 - DNA, 120 bp, Artificial Sequence
  ENSG00000072849_38 (sequence is synthesized)
atataattattgactgaagaattaacacattttccaaagaggcaagaacttcacgaaagcagagtatttgtttgaagtagctgtaaatctcgataatttagcctaagcagatttttgcct

SEQ ID NO: 62243 - DNA, 120 bp, Artificial Sequence
  ENSG00000072849_39 (sequence is synthesized)
gattgctctgggtaattattttctgggtgtttctccttctattctaaagatgtaacaacttgacttttccaattcaaacttctgttagaacacaatctttagttctcctgctcagtcttt

SEQ ID NO: 62244 - DNA, 120 bp, Artificial Sequence
  ENSG00000072849_40 (sequence is synthesized)
cctattaaacttttaatgttgatattttccttaatgccatctgctagctttttggtctgtttgtgagcttagttttcttgggccaggcctttacaataatgctcgtctatgtgtggagcc

SEQ ID NO: 62245 - DNA, 120 bp, Artificial Sequence
  ENSG00000072849_41 (sequence is synthesized)
atattagttcattaatttttaataattatgttgacattcatcctaaatataggcaatttgtgttggtaggtctacctgcaatctaaattttaattctctccctcatcctttatttctgct

SEQ ID NO: 62246 - DNA, 120 bp, Artificial Sequence
  ENSG00000072849_42 (sequence is synthesized)
ggatcttcaggtcggaggccggggtgaggccgacccacaggccgccttgctccctcgcgaagacgcttatgccagtctcgcccgtccccgctcctcctcagagaaaatgctgccccgcag

SEQ ID NO: 62247 - DNA, 120 bp, Artificial Sequence
  ENSG00000072849_43 (sequence is synthesized)
cacttaccggagcgaccatgagggtgacgatttgaagcacacacaggcttcccgccacctcctttaaaccgccgctggcttgccagggacagacggcgcggttggctccccaaaattccg

SEQ ID NO: 62248 - DNA, 120 bp, Artificial Sequence
  ENSG00000072849_44 (sequence is synthesized)
tttttctgtatcctttattaaatggggtcagcatcaaaactttttcttaggaagtaaaaaattaagttgaaacttttcatcctgttacttgtttttggtaccatcttagctatgatttct

SEQ ID NO: 62249 - DNA, 120 bp, Artificial Sequence
  ENSG00000072849_45 (sequence is synthesized)
ttcaaatgggaggttttaaccataaaaagatagcacttctgctcttttgttacttacaaatctgatcaagggaggggagaattgatttaactgaggcatacctccacagtaaccaacagg

SEQ ID NO: 62250 - DNA, 120 bp, Artificial Sequence
  ENSG00000072849_46 (sequence is synthesized)
ttcgaagccgtaaaacaacctgaatgcaatggtaattcagcagaatttgggcataagttttggaatgggttcatgaggagtgggaacctgagatctccttgggtcctggttgctggaact

SEQ ID NO: 62251 - DNA, 120 bp, Artificial Sequence
  ENSG00000072849_47 (sequence is synthesized)
actggctgaaagacagtggttgtgtctgctgggcttgtcaagttccggtttgttgaaaggaaaaccccagctctgatccaatggtaattggggccacagagcagggcattcctcttccac

SEQ ID NO: 62252 - DNA, 120 bp, Artificial Sequence
  ENSG00000072849_48 (sequence is synthesized)
agtcgcgggaaaactaaagtgggcggggggcctttgggcccgccccgccgccggggcctgctggcggaaggggaaatggggtgggtggggggtggggcaggcgacggtggggaagatggc

SEQ ID NO: 62253 - DNA, 120 bp, Artificial Sequence
  ENSG00000072849_49 (sequence is synthesized)
gtaccagagcttgcggctggagtacctgcagatcccaccggtcagccgcgcctacaccactgcctgcgtcctcaccaccgccgccgtggtgagcagctgcagtgccaccttctcattatc

SEQ ID NO: 62254 - DNA, 120 bp, Artificial Sequence
  ENSG00000072849_50 (sequence is synthesized)
ttcaggaaactggggtttgggcctcggggaggcccagaggggctggtcccggggatgggtggaggcgtacagggattactctggggttcgagttggcgccaagaatgcttatccagtgac

SEQ ID NO: 62255 - DNA, 120 bp, Artificial Sequence
  ENSG00000072858_0 (sequence is synthesized)
acatatttacatacatacacatatggtgagggagagaacgtgatgacgtgagactctccatggagagtaggaggtaataaagaaataaaacaggtgtctgaggagaggttctattagaga

SEQ ID NO: 62256 - DNA, 120 bp, Artificial Sequence
  ENSG00000072858_1 (sequence is synthesized)
ggggagaatagagagtaattatcgttcagacaggcaagagttctctgcaggtagcagcctgggaaagcgaactcgcgcaccctcttgggggacgggctcttttgctttctatttcttctc

SEQ ID NO: 62257 - DNA, 120 bp, Artificial Sequence
  ENSG00000072858_2 (sequence is synthesized)
ctgcagccagggtgcacacgtatttgaaacagaccgaatttcctcctcgatgtggcgtcaggttgacttttcgagactagcgggtatttctttttaatgactccaatgcctttttattat

SEQ ID NO: 62258 - DNA, 120 bp, Artificial Sequence
  ENSG00000072858_3 (sequence is synthesized)
tgctgttattgaggttgagggagaagagatcggtctaaattctggctgggtaagtggggggattctcggcgatgagaaacgggggacttagaagccggaggaaaatcagcagccccacat

SEQ ID NO: 62259 - DNA, 120 bp, Artificial Sequence
  ENSG00000072858_4 (sequence is synthesized)
ctccacttctccagtccgccctactctccacccgtgacctccagtggagaccccaggcggcagcatcagtatttgatcggcccttcgtcagcacgctgccagccctggccggctgggttc

SEQ ID NO: 62260 - DNA, 120 bp, Artificial Sequence
  ENSG00000072858_5 (sequence is synthesized)
gccaggcatcacccgctcggctctgaagcggacgcctggccctgcaccgggctttggaaggaccctctctgcgctcgccccctccccagggtggctccgctttcgagcccgggcgcggtg

SEQ ID NO: 62261 - DNA, 120 bp, Artificial Sequence
  ENSG00000072858_6 (sequence is synthesized)
tgcgcgctgccctggctcctgctggcggcgtcgcccgggcacccggcgaaatcccccaggcagcccccggcaccgcgccgcgaccccttcgacgctgccaggggcgccgatttcgatcat

SEQ ID NO: 62262 - DNA, 120 bp, Artificial Sequence
  ENSG00000072858_7 (sequence is synthesized)
cccttcgacgctgccaggggcgccgatttcgatcatgtctacagcggggtggtgaacctcagcaccgagaacatctactctttcaactacaccagccagcccgaccaggtgacagccgtg

SEQ ID NO: 62263 - DNA, 120 bp, Artificial Sequence
  ENSG00000072858_8 (sequence is synthesized)
agggtgtatgtgaacagttcctctgagaatctcaactacccggtccttgttgtggttcgccagcagaaagaggtgctgtcctggcaggttcctctgctcttccaaggactataccagagg

SEQ ID NO: 62264 - DNA, 120 bp, Artificial Sequence
  ENSG00000072858_9 (sequence is synthesized)
agctacaactatcaagaagtgagccgcaccttatgtccctcagaagcaaccaatgagacgggacccttgcagcaactgatatttgtagatgtcgcatccatggcacccctgggtgctcag

SEQ ID NO: 62265 - DNA, 120 bp, Artificial Sequence
  ENSG00000072858_10 (sequence is synthesized)
tacaaactgctagttaccaagctgaagcacttccagctccggacaaatgttgcctttcactttactgccagcccctctcaacctcagtattttctatacaagtttcccaaagacgtggac

SEQ ID NO: 62266 - DNA, 120 bp, Artificial Sequence
  ENSG00000072858_11 (sequence is synthesized)
tcagttatcattaaagtggtgtctgaaatggcttatccatgttctgttgtctcagtccagaatatcatgtgcccggtgtatgatctcgaccacaatgtggaatttaatggtgtctatcag

SEQ ID NO: 62267 - DNA, 120 bp, Artificial Sequence
  ENSG00000072858_12 (sequence is synthesized)
tccatgaccaagaaagctgccatcacgctacagaagaaggattttccaggcgagcagttcttcgtggtatttgtgataaagcctgaagattatgcctgtggaggatctttcttcatccag

SEQ ID NO: 62268 - DNA, 120 bp, Artificial Sequence
  ENSG00000072858_13 (sequence is synthesized)
gaaaaggaaaaccagacctggaatctacagcgaaaaaagaaccttgaagtgaccattgtcccttccattaaagaatctgtttatgtgaaatccagtcttttcagtgtcttcatcttcctg

SEQ ID NO: 62269 - DNA, 120 bp, Artificial Sequence
  ENSG00000072858_14 (sequence is synthesized)
tccttctacttgggatgccttcttgttgggtttgttcattatctgaggtttcagagaaaatccattgatggaagctttgggtccaatgatggctctggaaatatggtggcatctcatccc

SEQ ID NO: 62270 - DNA, 120 bp, Artificial Sequence
  ENSG00000072858_15 (sequence is synthesized)
attgctgccagcacacccgaagggagcaattatgggacaatagatgagtcaagctccagtcctggaaggcagatgtcctcctccgatggtgggccaccgggccagtcagacacagacagc

SEQ ID NO: 62271 - DNA, 120 bp, Artificial Sequence
  ENSG00000072858_16 (sequence is synthesized)
tccgtggaggagagcgacttcgacaccatgccagacattgagagtgataaaaacatcatccggaccaagatgttcctttacctgtcagatttgtccaggaaggaccggagaattgtcagc

SEQ ID NO: 62272 - DNA, 120 bp, Artificial Sequence
  ENSG00000072858_17 (sequence is synthesized)
aaaaaatataaaatttatttttggaacatcatcaccattgctgtgttttacgcgctgcccgtgatccagctggtcattacctatcagacagtggtaaatgtcactggcaaccaggacatc

SEQ ID NO: 62273 - DNA, 120 bp, Artificial Sequence
  ENSG00000072858_18 (sequence is synthesized)
tgttactacaacttcctctgtgctcaccccttgggcgtcctgagtgccttcaacaacattctcagcaatctgggccacgtgcttctgggcttcctcttcctgctgatagtcttgcgccgc

SEQ ID NO: 62274 - DNA, 120 bp, Artificial Sequence
  ENSG00000072858_19 (sequence is synthesized)
gacatcctccatcggagagccctggaagccaaggacatctttgctgtggagtacgggattcccaaacactttggtctcttctacgctatgggcattgcattgatgatggaaggggtgctc

SEQ ID NO: 62275 - DNA, 120 bp, Artificial Sequence
  ENSG00000072858_20 (sequence is synthesized)
agtgcttgctaccatgtctgccctaattattccaacttccaattcgacacctccttcatgtacatgatcgctggcctgtgcatgctgaagctctatcagacccgccacccagacatcaat

SEQ ID NO: 62276 - DNA, 120 bp, Artificial Sequence
  ENSG00000072858_21 (sequence is synthesized)
tcatggtcaccgtccttggagtggtgtttggaaaaaatgacgtatggttctgggtcatcttctctgcaatccacgttctggcctcgctagccctcagcacccagatatattatatgggtc

SEQ ID NO: 62277 - DNA, 120 bp, Artificial Sequence
  ENSG00000072858_22 (sequence is synthesized)
gtttcaagatagatttgggaattttccggcgggctgccatggtgttctacacagactgtatccagcagtgtagccgacctctatatatggatagaatggtgttgctggttgtggggaatc

SEQ ID NO: 62278 - DNA, 120 bp, Artificial Sequence
  ENSG00000072858_23 (sequence is synthesized)
tggttaactggtccttcgccctctttggattgatataccgccccagggactttgcttcctacatgctgggcatcttcatctgtaaccttttgctgtacctggccttttacatcatcatga

SEQ ID NO: 62279 - DNA, 120 bp, Artificial Sequence
  ENSG00000072858_24 (sequence is synthesized)
agctccgcagctctgaaaaggtcctcccagtcccgctcttctgcatcgtggccaccgctgtgatgtgggctgccgccctatattttttcttccagaatctcagcagctgggagggaactc

SEQ ID NO: 62280 - DNA, 120 bp, Artificial Sequence
  ENSG00000072858_25 (sequence is synthesized)
cggccgaatcccgggagaagaaccgcgagtgcattctgctggatttcttcgatgaccatgacatctggcacttcctctctgctactgctctgtttttctcattcttggttttgttaactt

SEQ ID NO: 62281 - DNA, 120 bp, Artificial Sequence
  ENSG00000072858_26 (sequence is synthesized)
tggatgatgaccttgatgtggttcggagagaccagatccctgtcttctgaacctccaacattaagagaggggagggagcgatcaatcttggtgctgtttcacaaaaattacagtgaccac

SEQ ID NO: 62282 - DNA, 120 bp, Artificial Sequence
  ENSG00000072858_27 (sequence is synthesized)
agcaaagtaaccactgccagatgctccactcaccctctgtagagccaactctgcattcacacaggaaggagaggggctgcgggagatttaaacctgcaagaaaggaggcagaaggggagc

SEQ ID NO: 62283 - DNA, 120 bp, Artificial Sequence
  ENSG00000072858_28 (sequence is synthesized)
catgttttgaggacagacgcaaacctgaggagctgagaaacacttgctccttccatctgcagctttgggagtgcaacagggataggcactgcatccaagtcaactcaccatcttggggtc

SEQ ID NO: 62284 - DNA, 120 bp, Artificial Sequence
  ENSG00000072858_29 (sequence is synthesized)
cctcccaccctcacggagacttgccagcaatggcagaatgctgctgcacacttccctccagttgtcaccctgcccagaaaggccagcagcttggacttcctgcccagaaactgtgttggc

SEQ ID NO: 62285 - DNA, 120 bp, Artificial Sequence
  ENSG00000072858_30 (sequence is synthesized)
ccccttcacacctctgcaacacctgctgctccagcaagaggatgtgattctttagaatatggcggggaggtgaccccaggccctgccctactgggatagatgttttaatggcaccagcta

SEQ ID NO: 62286 - DNA, 120 bp, Artificial Sequence
  ENSG00000072858_31 (sequence is synthesized)
gtcacctcccagaagaaactctgtatatttcccccaggtttctgatgccatcagaagggctcaggagtggggtttgtcacacattcctcttaacaagtaactgtcactgggaccgagtcc

SEQ ID NO: 62287 - DNA, 120 bp, Artificial Sequence
  ENSG00000072858_32 (sequence is synthesized)
tgggtgcttacatattccttcgtgtcttcatctcactgacctgtgtggacctcatcactctgactctgccttcttggaaaggccctgtcactccacagatgtctggccagcttcaaggca

SEQ ID NO: 62288 - DNA, 120 bp, Artificial Sequence
  ENSG00000072858_33 (sequence is synthesized)
gaaggaaaaacaggaaaagctcttttaacagcagcaggaacaagagaaatgactaaccatactaaaagactggtaacagcagcagcagccagacaggcctcaccttaaggacttgggctg

SEQ ID NO: 62289 - DNA, 120 bp, Artificial Sequence
  ENSG00000072858_34 (sequence is synthesized)
ccagagcaaattcagcagagcttatttggcctcccattcacacagctcagttctgtgcccacatcacctttggggaagaaatcagcattctaatcagggacactacttcaggagtcctcc

SEQ ID NO: 62290 - DNA, 120 bp, Artificial Sequence
  ENSG00000072858_35 (sequence is synthesized)
acagcgagtccgtcatctgtcactttatgtagatcagggttctagacttcttccctgaggttctcagaagcagctctcaggatgaacgtattgtcctcttcccctcttcttgcaaagtgc

SEQ ID NO: 62291 - DNA, 120 bp, Artificial Sequence
  ENSG00000072858_36 (sequence is synthesized)
acagctaatctaatgttgtctctcggttgcacctgacattctctccccagtaaggtgttggcaagctcagcatctgggttccactctcacactgtctggcagctctgtgtctgagaagtt

SEQ ID NO: 62292 - DNA, 120 bp, Artificial Sequence
  ENSG00000072858_37 (sequence is synthesized)
ctacattgaccaggcccccttgttgcctggagtatgacgtaatcagaaaatagacgtataaatgtgcacatgcgtatgtatttgcttgtgaaattaaagtcacctcttgcctctgctttc

SEQ ID NO: 62293 - DNA, 120 bp, Artificial Sequence
  ENSG00000072858_38 (sequence is synthesized)
ctgatcattcgttagagaaatggatcaggcatttttttaaattattattctttctctaaactatttgcattgtgttcaaaaacccattttagaagtttgaacagcaagcttttcctgatt

SEQ ID NO: 62294 - DNA, 120 bp, Artificial Sequence
  ENSG00000072858_39 (sequence is synthesized)
ttaaaaacacaaagttgctttcaatgaaatattttgtgatttttttaaagtccccaaatgtgtacttagccttctgttattccttattctttaagcagtgttggcttccattgaccatat

SEQ ID NO: 62295 - DNA, 89 bp, Artificial Sequence
  ENSG00000072858_40 (sequence is synthesized)
tccttattctttaagcagtgttggcttccattgaccatatgaaggccaccaattaaatggttgtgttaatccaacatgtaaaaaacttt

SEQ ID NO: 62296 - DNA, 87 bp, Artificial Sequence
  ENSG00000072858_41 (sequence is synthesized)
aggaggatcacttgagcccaggagattgacgccgcagtgaactatgattgtgccccatctcttaaaaaataaaaaaaaataaaaatt

SEQ ID NO: 62297 - DNA, 120 bp, Artificial Sequence
  ENSG00000072858_42 (sequence is synthesized)
ggattacaggtgtgtgccaccgcacctggccccaaagacatgttttgaagagatcctagtagacaaatccgcaacaaaatctataaggaacaaatgtaaaatgctgaggttttcactgtc

SEQ ID NO: 62298 - DNA, 120 bp, Artificial Sequence
  ENSG00000072858_43 (sequence is synthesized)
gttcatattttaacatatgaaacatgaaatagaagtataatattatttttgtatccaaatagttaacagagcagatgcccttagattctaatatgtgttcagtcctgaagatagccaagt

SEQ ID NO: 62299 - DNA, 120 bp, Artificial Sequence
  ENSG00000072858_44 (sequence is synthesized)
taaatataaaaacaggagaagaggaaaaataaaagtccattgagaaggaatagagagaaagaacaggtcttgtgaatgagaagttcatttggatcaacacagcatttcctagaatgagtc

SEQ ID NO: 62300 - DNA, 120 bp, Artificial Sequence
  ENSG00000072858_45 (sequence is synthesized)
gggacaataggtatgtcctaccaggtctgttcatgaaagtgtttcctaattctgcagagaatatgatagaaaggcattccagccactaataactgggaatgtgggcaaagcagctatcct

SEQ ID NO: 62301 - DNA, 120 bp, Artificial Sequence
  ENSG00000072858_46 (sequence is synthesized)
atgagattgtcttttatttgtaagatgagttgcttggagatttggaagcttcctcccagctctaactttctccagttctgttgttctgtttcttggatctgctagccccacttgggcaga

SEQ ID NO: 62302 - DNA, 120 bp, Artificial Sequence
  ENSG00000072858_47 (sequence is synthesized)
attccttcaatgtttgccatctaatactaaggccccctagggactttttcatatccagcccgggtttagggcatgaaagatgtgtcccagggagcctgacatcaattgaccagttgtttc

SEQ ID NO: 62303 - DNA, 120 bp, Artificial Sequence
  ENSG00000072858_48 (sequence is synthesized)
gtgtgttaatgatctaataatatttagtcaattgcatacttattatgcagtgagaaaaaggacttcatgaggtttgagcaccactgtttataatctaaatcttctctgcatactttgggg

SEQ ID NO: 62304 - DNA, 120 bp, Artificial Sequence
  ENSG00000072858_49 (sequence is synthesized)
gactgtcagaagatacacctggactgtggtttgggaaagttcttgacagagatggtgataaatagggaaagctgaacacacatctcctcgtgtctacctgcctcatgtttaccatttcta

SEQ ID NO: 62305 - DNA, 120 bp, Artificial Sequence
  ENSG00000072858_50 (sequence is synthesized)
cccagaggatgggacagctctatatcccctctgcagtaacctagaaaataagacatagtgtgacagtcctgaaaggccccaatgttcgcattctttcgtagtccttttatcataacaaag

SEQ ID NO: 62306 - DNA, 120 bp, Artificial Sequence
  ENSG00000072858_51 (sequence is synthesized)
atgaattccaccttggggctgcataagagggtacacagaatattcccattcaaagcaagatggtaacttttttgtaaaaaaagtgcctgtgctgtgtaaggtggcagataatggcccatc

SEQ ID NO: 62307 - DNA, 120 bp, Artificial Sequence
  ENSG00000072858_52 (sequence is synthesized)
tgtgcagaggagcactggttacattgtaaactagtgacagtgcatctccgtgagccctgtctgctctttgtgttcctgctggggctcagaggacggaggaaaaccacatttcctcttctc

SEQ ID NO: 62308 - DNA, 120 bp, Artificial Sequence
  ENSG00000072858_53 (sequence is synthesized)
actcttgattttacaggtggtaaatgtcactggcaaccaggacatctgttactacaacttcctctgtgctcaccccttgggcgtcctgagtgccttcaacaacattctcagcaatctggg

SEQ ID NO: 62309 - DNA, 120 bp, Artificial Sequence
  ENSG00000072858_54 (sequence is synthesized)
agtgtacttactgggccagcatccaaaagggatggccatccatgatgtgcctaggatctccttcctttctgattggtttaaaaactaatatgtctggccaggcgcagtggctcacacctg

SEQ ID NO: 62310 - DNA, 79 bp, Artificial Sequence
  ENSG00000072858_55 (sequence is synthesized)
caagaggcagaggttgaagtgagccaagagcacagcactgcactccagcctgggcgacaacagcaaaactccattgaaa

SEQ ID NO: 62311 - DNA, 120 bp, Artificial Sequence
  ENSG00000072858_56 (sequence is synthesized)
atttttgctttggttgcctgtgcttttgaggtctttgtgtacaggtttttgtgtggatggatgttttcttggaagctaacttttcgaaccagacatctagtagcgtttttgtggctttct

SEQ ID NO: 62312 - DNA, 120 bp, Artificial Sequence
  ENSG00000072858_57 (sequence is synthesized)
ttttccccagtcatttaaaggtttgaaaactaatcttagttgaagagccatacagaaacaggtggcaggctagatttggcagatgggtcatagttttggtgactcctgtattagtgtaaa

SEQ ID NO: 62313 - DNA, 120 bp, Artificial Sequence
  ENSG00000072858_58 (sequence is synthesized)
agaaaatcaaacctaaaataatgtgccctgatgattcaagctacttagaatagtgttgttttgttttagcaactggacataaagtgtttgcctcttcactttttttaacaggctctggaa

SEQ ID NO: 62314 - DNA, 120 bp, Artificial Sequence
  ENSG00000072858_59 (sequence is synthesized)
tgctagttaccaagctgaagcacttccagctccggtaagcgggactttctctgtttacctgtctgtgtttcctgtgcttgtggatgctcaattcatcttccatccttacagactggtact

SEQ ID NO: 62315 - DNA, 120 bp, Artificial Sequence
  ENSG00000072858_60 (sequence is synthesized)
ctggaaggaaattatccacttagcatatgattttagcacttcctgaactctcctgcccataactgagcagcagggccttaatctatacaaaagagtgggagtgcagaaggtaagagtggt

SEQ ID NO: 62316 - DNA, 120 bp, Artificial Sequence
  ENSG00000072858_61 (sequence is synthesized)
gactgtcatttttacaaagaaatctgaaattaaggagaaggtaggactgcttgttctagagactcaaaaaaaggtagtaggacattctcgtgtagcaattgtagcctctcttaaaacact

SEQ ID NO: 62317 - DNA, 120 bp, Artificial Sequence
  ENSG00000072864_0 (sequence is synthesized)
gcagccgcctctgccgccgccgccgcgttggcctcgccgcccctgctcggacaccatgccacaaggagagtgatctcttcccctgttttcacaatggaggactccggaaagactttcagc

SEQ ID NO: 62318 - DNA, 120 bp, Artificial Sequence
  ENSG00000072864_1 (sequence is synthesized)
tccgaggaggaagaagctaactattggaaagatctggcgatgacctacaaacagagggcagaaaatacgcaagaggaactccgagaattccaggagggaagccgagaatatgaagctgaa

SEQ ID NO: 62319 - DNA, 120 bp, Artificial Sequence
  ENSG00000072864_2 (sequence is synthesized)
ttggagacgcagctgcaacaaattgaaaccaggaacagagacctcctgtccgaaaataaccgccttcgcatggagctggaaaccatcaaggagaagtttgaagtgcagcactctgaaggc

SEQ ID NO: 62320 - DNA, 120 bp, Artificial Sequence
  ENSG00000072864_3 (sequence is synthesized)
taccggcagatctcagccttggaggatgacctcgcgcagaccaaagccattaaagaccaattgcagaaatacatcagagagctggagcaagcaaatgacgacctggaaagagccaagcgc

SEQ ID NO: 62321 - DNA, 120 bp, Artificial Sequence
  ENSG00000072864_4 (sequence is synthesized)
gccacgatcatgtctctcgaagactttgagcagcgcttgaatcaggccatcgaaagaaatgccttcctggaaagtgaacttgatgaaaaagagaatctcctggaatctgttcagagactg

SEQ ID NO: 62322 - DNA, 120 bp, Artificial Sequence
  ENSG00000072864_5 (sequence is synthesized)
aaggatgaagccagagatttgcggcaggaactggccgtgcagcagaagcaggagaaacccaggacccccatgcccagctcagtggaagctgagaggacagacacagctgtgcaggccacg

SEQ ID NO: 62323 - DNA, 120 bp, Artificial Sequence
  ENSG00000072864_6 (sequence is synthesized)
ggctccgtgccgtccacgcccattgctcaccgaggacccagctcaagtttaaacacacctgggagcttcagacgtggcctggacgactccaccggggggacccccctcacacctgcggcc

SEQ ID NO: 62324 - DNA, 120 bp, Artificial Sequence
  ENSG00000072864_7 (sequence is synthesized)
cggatatcagccctcaacattgtgggagacctactgcggaaagtcggggcactggagtccaaactcgcttcctgccggaacctcgtgtacgatcagtccccaaaccgaacaggtggccca

SEQ ID NO: 62325 - DNA, 120 bp, Artificial Sequence
  ENSG00000072864_8 (sequence is synthesized)
gcctctgggcggagcagcaagaacagagatggcggggagagacggccaagcagcaccagcgtgcctttgggtgataaggggttggacacgagttgccgctggttgtccaaatcaacaacc

SEQ ID NO: 62326 - DNA, 120 bp, Artificial Sequence
  ENSG00000072864_9 (sequence is synthesized)
aggtcgtccagctcctgctgaagcctgttcttggtcttttccagtttatcataagcggccgccttctcctcgtactgctgggtgaggttctcgatctccttctggaacctcttcttcccc

SEQ ID NO: 62327 - DNA, 120 bp, Artificial Sequence
  ENSG00000072864_10 (sequence is synthesized)
tcttccagagcttccacggtgctggcaaagtcctgcagcttcttcttcgagtcggagagctacaaggacagcgtccagggtagggtgagagggggaccatgagtggcccctgtccctggc

SEQ ID NO: 62328 - DNA, 120 bp, Artificial Sequence
  ENSG00000072864_11 (sequence is synthesized)
cccacagactctgagaagcgaagaccatgtctcctcgttggagaaacccaatagcaggggaagctggggggtcaagcaccatcgcaccaacactccaccgcgatctgcctgcgggggatc

SEQ ID NO: 62329 - DNA, 120 bp, Artificial Sequence
  ENSG00000072864_12 (sequence is synthesized)
tcagcgcagagaagttgagaggacccatgaaggaagcaaggacacggggcaggcacctggatgttgagagtggagatgtggcgctccaggttctgcttggcctccatctcctcgtccagc

SEQ ID NO: 62330 - DNA, 120 bp, Artificial Sequence
  ENSG00000072864_13 (sequence is synthesized)
cagctcctgcaaaagggatgcaaagaggtcccagggacctgccccgaggaaggccaccccccaggtcccctggatgatgtggcaggacactcacctgggtgtcctggagctgggaactga

SEQ ID NO: 62331 - DNA, 120 bp, Artificial Sequence
  ENSG00000072864_14 (sequence is synthesized)
gggacgccacgtccttggccagcttaatggccttcccctcggcctcgttaagcatccctgtgacgctctcaacttcattctaagggtgccaagagactggttagtcaaagcctctagaag

SEQ ID NO: 62332 - DNA, 120 bp, Artificial Sequence
  ENSG00000072864_15 (sequence is synthesized)
gggatcctcgttgaaaggagccctttttactcaaaacacatgggctagtacttgaggtgttcactgattgagaaaatacccgtgaggtatgggactctgataaaaaaaaaaaaaaacaca

SEQ ID NO: 62333 - DNA, 120 bp, Artificial Sequence
  ENSG00000072864_16 (sequence is synthesized)
cacacacacaaaaaaaacagaatctgtggcttgaagggaactccgtcacctatgagttgggaccctggccctagactctgtggttctaagaacttatttgagccccaatggtattgactg

SEQ ID NO: 62334 - DNA, 120 bp, Artificial Sequence
  ENSG00000072864_17 (sequence is synthesized)
ggacctgatcccactaaatggatcctagatccctgccaaggttggtagagacaaagcagcaggtctgagagtccagacgaggtgctctggctggtccactctctaaggctggagaaggga

SEQ ID NO: 62335 - DNA, 120 bp, Artificial Sequence
  ENSG00000072864_18 (sequence is synthesized)
gaccaggatggtacttgaacgtcccagggatgctgtcccatcccttccttcctcactcctactctttgaccctgatggccaaagccagagacgcaggccctaaaggtaaaaacgtcctct

SEQ ID NO: 62336 - DNA, 120 bp, Artificial Sequence
  ENSG00000072864_19 (sequence is synthesized)
ctgtattctctggcttttactccctagtgtctctgcataagtccctttgaggctgttagcctacccctccatctcttccattgacaaggaggatatgaatgatcttgacactgcttatat

SEQ ID NO: 62337 - DNA, 120 bp, Artificial Sequence
  ENSG00000072864_20 (sequence is synthesized)
gagggcggcaaaagccctgctctcaactgcatgtgagaaaaaaacatctcacttaattcttccctcgccccttggtccctggctgtggacatgttaaacatttgtgaaaactttggccac

SEQ ID NO: 62338 - DNA, 120 bp, Artificial Sequence
  ENSG00000072864_21 (sequence is synthesized)
gtccccatgagtggcaaggcagggtaaatggctatgccaagtgaaagaagaccaaagacaaaaagaccatgtcattcagcagcttaaaacccctcaacagcttcacattgcccagagtaa

SEQ ID NO: 62339 - DNA, 120 bp, Artificial Sequence
  ENSG00000072864_22 (sequence is synthesized)
ggatcaacatacatgtaataggttctcaaaagccctacatcatctgggtacaagctccccctccaaccccactctgtactatctccccctacccccaaccccagctgggcactccagctc

SEQ ID NO: 62340 - DNA, 120 bp, Artificial Sequence
  ENSG00000072864_23 (sequence is synthesized)
tactggctgtatgtctctctcctaatttttctacttaccacagggcctttgcacacgctgttccctctgcctggtagacttatccatgctccttagggaagcctttcgtggctcctcctc

SEQ ID NO: 62341 - DNA, 120 bp, Artificial Sequence
  ENSG00000072864_24 (sequence is synthesized)
ccccaggttaggccccctggttatttacacttgggcatcatgtgccttccctttgctgcatcatttgacattcatttgtgtgattattcatgtctttcccttcccttcccttccccttac

SEQ ID NO: 62342 - DNA, 120 bp, Artificial Sequence
  ENSG00000072864_25 (sequence is synthesized)
tcggctggagtcctactggggcagcgacagtgtctcttcttccttgctgttggatctcaggattaagcacagtgcctggcatacagcaggtgctcaataaatacttatcaaattggaaaa

SEQ ID NO: 62343 - DNA, 120 bp, Artificial Sequence
  ENSG00000072864_26 (sequence is synthesized)
ggggggggcggggcctcgcggccctgcagcctcgtcaggctcagtcccctcccgataaacccctaaatagggactttcccggggggtgaccctggcttttttggcgaaaacccccagttt

SEQ ID NO: 62344 - DNA, 120 bp, Artificial Sequence
  ENSG00000072864_27 (sequence is synthesized)
aaggaggccttccccctggcttcacgttgtggagtcgaaaggaaccttgaagcggagaatgagctcgtgacgtggacccgaggaaaaaacctgccaaccaggatttaatagaattcagct

SEQ ID NO: 62345 - DNA, 120 bp, Artificial Sequence
  ENSG00000072864_28 (sequence is synthesized)
ctttcaggctttggagggaaggcgatttgaacgggatttcaatgaaaaaccctgtcccttcggctttttttttttcctctctcgggtctcgtcacgtgatggtcctactttatttttaaa

SEQ ID NO: 62346 - DNA, 120 bp, Artificial Sequence
  ENSG00000072864_29 (sequence is synthesized)
aattaaatggcgcatattccccagcatcctaaatctagtgcaacctagtggcaagtggagaaaaaaataactgccaacctggcttcctacgaggtcccccggagttctcgcaaagttgcg

SEQ ID NO: 62347 - DNA, 120 bp, Artificial Sequence
  ENSG00000072864_30 (sequence is synthesized)
acccagttggcaaaaatacagtgtgtgcaaagactcaactggacattgccaccaagaatcaagagatttttggggactttagcaagaaaacgttatttttaaaagccctgctccaaagct

SEQ ID NO: 62348 - DNA, 120 bp, Artificial Sequence
  ENSG00000072864_31 (sequence is synthesized)
tgctccaaagctggttacaaatgaatactgcgtttccagtgacaggttgggcgagcagaaaggaaatcttacgacggagtcttgccctgtcgcctaggctagagtgcagtggtgtgatct

SEQ ID NO: 62349 - DNA, 120 bp, Artificial Sequence
  ENSG00000072864_32 (sequence is synthesized)
ttcagcaacaggttttcatgtccacaggttccgaggagatctctcaatcgccagtgcagtcggtggagcccactcgctgcgtcctcctggagcctgcgtttgaatttaggagaagtttga

SEQ ID NO: 62350 - DNA, 120 bp, Artificial Sequence
  ENSG00000072864_33 (sequence is synthesized)
acatgtcttcatcgccgctgccgtcagcccagggggtagtcaagatgttgctttaggaaaaccacggaagctgaaggtcttggtgttggttggacacgagttgccgctggttgtccaaat

SEQ ID NO: 62351 - DNA, 120 bp, Artificial Sequence
  ENSG00000072864_34 (sequence is synthesized)
aggtttttgttttaagttagtttgagaaataagagcagtcaccatagttagttagctttgcggcccaagccaatgaccgaggccatcacctgtgctctggggtttgtccctgggaaatgt

SEQ ID NO: 62352 - DNA, 120 bp, Artificial Sequence
  ENSG00000072864_35 (sequence is synthesized)
cttttcatccttacctgccaccgtgtgcattgcaaagagggacaaaaggggctctctgggaagggctctaagttgtcggtgatgaggctaccgtgttgtttttgagatagagtcttgctc

SEQ ID NO: 62353 - DNA, 76 bp, Artificial Sequence
  ENSG00000072864_36 (sequence is synthesized)
ctgcaacctccgcctcctgggttcaaacggttcttgttcctgagtcttattttttgtatttttaatagagacgggg

SEQ ID NO: 62354 - DNA, 71 bp, Artificial Sequence
  ENSG00000072864_37 (sequence is synthesized)
ttttgccatgttgcccagtgaatgctgggatttcaagcatgagccatcgttcccatgccccattgtgttgc

SEQ ID NO: 62355 - DNA, 120 bp, Artificial Sequence
  ENSG00000072864_38 (sequence is synthesized)
gcctcccagaatgctgggatttcaagcatgagccatcgttcccatgccccattgtgttgcactaacccaagcggaggtcctgattggtcttttttttttttttcttttttgagacagagt

SEQ ID NO: 62356 - DNA, 120 bp, Artificial Sequence
  ENSG00000072864_39 (sequence is synthesized)
accagcgtgcctttgggtgataaggggagagaaaattgagaccctgtgagaccctgctcctgactcttgatgttcacccttataactctctgggccccggtgctagccagtttgtcacag

SEQ ID NO: 62357 - DNA, 67 bp, Artificial Sequence
  ENSG00000072864_40 (sequence is synthesized)
agccgcctctgccgccgccgccgcgttggcctcgccgcccctgctcggagtctcactctcgcccagg

SEQ ID NO: 62358 - DNA, 120 bp, Artificial Sequence
  ENSG00000072864_41 (sequence is synthesized)
cgagttcctctttggcttccaaggcctcttcaagggcccgagccagggacagggccttggtttccttctccctggcttctgcctcagctctgtccctctcatccgcgtatttggaagaga

SEQ ID NO: 62359 - DNA, 120 bp, Artificial Sequence
  ENSG00000072864_42 (sequence is synthesized)
acttctaggcatatccggggttggacacgagttgccgctggttgtccaaatcaacaaccaggtcgtccagctcctgctgaagcctgttcttggtcttttccagtttatcataagcggccg

SEQ ID NO: 62360 - DNA, 120 bp, Artificial Sequence
  ENSG00000072864_43 (sequence is synthesized)
agggtgaaggattccagaagtggatttcctacttcctacaagcggagttggataattggtaggcactggagtccaaactcgcttcctgccggaacctcgtgtacgatcagtccccaaacc

SEQ ID NO: 62361 - DNA, 72 bp, Artificial Sequence
  ENSG00000072864_44 (sequence is synthesized)
agccgcctctgccgccgccgccgcgttggcctcgccgcccctgctcggacggagtcttgttcagtcctccgg

SEQ ID NO: 62362 - DNA, 120 bp, Artificial Sequence
  ENSG00000072952_0 (sequence is synthesized)
aaactcaagccggctctcactgtggcttgtggctccgggaaatggaacccagcttgggacagggatgggaatggatttgacttgtccttttggcatctccccagcctgtggagcccaggc

SEQ ID NO: 62363 - DNA, 120 bp, Artificial Sequence
  ENSG00000072952_1 (sequence is synthesized)
ctcttggagcatctttggggctgacgcagcggaggttccgggcacacgtggccactcccagcaggaggctgccatgccccacattcccgaggacgaggagccccccggagagccacaggc

SEQ ID NO: 62364 - DNA, 120 bp, Artificial Sequence
  ENSG00000072952_2 (sequence is synthesized)
agcccagagccctgccggccaaggtcctcctgccgcaggagtatcttgcagtccaactcccacgattgtcctgactggggatgccacttcaccagaaggagaaaccgacaaaaacctggc

SEQ ID NO: 62365 - DNA, 120 bp, Artificial Sequence
  ENSG00000072952_3 (sequence is synthesized)
caacagagttcacagtccccacaagaggctttctcaccgacacttgaaggtgtccactgcctccctgacatctgtggaccccgcggggcacatcattgacctggtgaatgaccagctgcc

SEQ ID NO: 62366 - DNA, 120 bp, Artificial Sequence
  ENSG00000072952_4 (sequence is synthesized)
agacatcagcatctcagaggaggacaagaagaaaaacctggcgctgctggaagaagccaagttggtgagtgagcgattcctgacccgccgtgggaggaagtccaggagcagccccggaga

SEQ ID NO: 62367 - DNA, 120 bp, Artificial Sequence
  ENSG00000072952_5 (sequence is synthesized)
ctccccatcagctgtttccccgaacctcagccccagcgcttctcctacatcctctcggagcaactcacttacagtccccaccccgccaggtttggatgtgtgcagtggcccgccatcccc

SEQ ID NO: 62368 - DNA, 120 bp, Artificial Sequence
  ENSG00000072952_6 (sequence is synthesized)
tctgcctggagcaccaccacagcagaagggggatgaggccgacgtctcttcacctcaccctggcgagcctaacgtccccaaagggctagctgacaggaagcagaatgaccagaggaaagt

SEQ ID NO: 62369 - DNA, 120 bp, Artificial Sequence
  ENSG00000072952_7 (sequence is synthesized)
gtctcagggcaggctggctcctcgtcctcctccagttgagaagtccaaagagattgcaatagaacaaaaggaaaacttcgatcccctccagtaccccgagaccacacccaaaggcctagc

SEQ ID NO: 62370 - DNA, 120 bp, Artificial Sequence
  ENSG00000072952_8 (sequence is synthesized)
tcctgttacaaacagcagtgggaaaatggccctgaacagccctcagcctggccccgtggagagcgagctggggaagcagctcttgaaaacgggctgggagggcagccctctgccgagaag

SEQ ID NO: 62371 - DNA, 120 bp, Artificial Sequence
  ENSG00000072952_9 (sequence is synthesized)
tccaacccaggatgcggcaggagtgggtcccccagcctcccaggggagaggcccagctggagagccgatggggcccgaggctggctccaaagctgagcttccacccactgtgtcccggcc

SEQ ID NO: 62372 - DNA, 120 bp, Artificial Sequence
  ENSG00000072952_10 (sequence is synthesized)
cccgctgctgcgagggctctcctgggacagtggccctgaagaacctggcccccggctgcagaaagtgcttgccaagctgccactggcagaggaagaaaagcgttttgcaggcaaggccgg

SEQ ID NO: 62373 - DNA, 120 bp, Artificial Sequence
  ENSG00000072952_11 (sequence is synthesized)
cggcaagctggccaaggcccctggtctcaaagactttcagatacaagtgcagcccgtgcggatgcagaaactgaccaagctccgagaggagcacatcctgatgagaaatcagaacttagt

SEQ ID NO: 62374 - DNA, 120 bp, Artificial Sequence
  ENSG00000072952_12 (sequence is synthesized)
aagcttccagaccttagtgaagcagctgagcaggaaaaagggcttccttctgaactctccccagctattgaggaagaagagtcaaagagtggcttagatgtcatgcctaatatttctgat

SEQ ID NO: 62375 - DNA, 120 bp, Artificial Sequence
  ENSG00000072952_13 (sequence is synthesized)
gtgctgctgcgcaaactgcgggtccacaggagtctccctggaagtgcccctccactcactgaaaaggaagttgagaacgtgtttgtgcaactgtccttggcctttagaaatgacagctac

SEQ ID NO: 62376 - DNA, 120 bp, Artificial Sequence
  ENSG00000072952_14 (sequence is synthesized)
actctggaatctagaattaaccaggctgaaagggaacgcaacctgacagaggagaacactgagaaagaactggaaaacttcaaagcttccattacgtcctcagcttcactctggcaccac

SEQ ID NO: 62377 - DNA, 120 bp, Artificial Sequence
  ENSG00000072952_15 (sequence is synthesized)
tgtgagcaccgggaaacctaccagaagttgctggaggacatcgctgtcctgcaccgcctggctgcccgcctctccagccgagctgaggtggtaggcgccgtccgccaggaaaagcgcatg

SEQ ID NO: 62378 - DNA, 120 bp, Artificial Sequence
  ENSG00000072952_16 (sequence is synthesized)
tcgaaagcaacggaagtgatgatgcagtatgtggagaatctaaagaggacgtatgagaaggaccatgcggagctcatggagtttaaaaagcttgcaaatcagaattcaagccgcagctgt

SEQ ID NO: 62379 - DNA, 120 bp, Artificial Sequence
  ENSG00000072952_17 (sequence is synthesized)
ggcccctctgaagatggggtccctcgcacggcacggtccatgtccctcacgctgggaaagaatatgcctcgccggagggtcagcgttgctgtggttcctaagtttaatgccctgaatctg

SEQ ID NO: 62380 - DNA, 120 bp, Artificial Sequence
  ENSG00000072952_18 (sequence is synthesized)
cctggccaaactcccagctcatcatccattccctccttaccagccttgtcggaatcacccaatgggaaaggcagcctacctgtcacttcagcactgcctgcacttttggaaaatggaaag

SEQ ID NO: 62381 - DNA, 120 bp, Artificial Sequence
  ENSG00000072952_19 (sequence is synthesized)
acaaatggggacccagattgtgaagcctctgctcctgcgctgaccctgagctgcctggaggagcttagtcaggagaccaaggccaggatggaggaagaagcctacagcaagggattccaa

SEQ ID NO: 62382 - DNA, 120 bp, Artificial Sequence
  ENSG00000072952_20 (sequence is synthesized)
gaaggtctaaagaagaccaaagaacttcaagacctgaaggaggaggaggaagaacagaagagtgagagtcctgaggaacctgaagaggtagaagaaactgaggaagaggaaaagggccca

SEQ ID NO: 62383 - DNA, 120 bp, Artificial Sequence
  ENSG00000072952_21 (sequence is synthesized)
agaagcagcaaacttgaagaattggtccatttcttacaagtcatgtatcccaaactgtgtcagcactggcaagtgatctggatgatggctgcagtgatgctggtcttgactgttgtgctg

SEQ ID NO: 62384 - DNA, 120 bp, Artificial Sequence
  ENSG00000072952_22 (sequence is synthesized)
gggctctacaattcctataactcttgtgcagagcaggctgatgggccccttggaagatccacttgctcggcagcccagagggactcctggtggagctcaggactccagcatgagcagcct

SEQ ID NO: 62385 - DNA, 120 bp, Artificial Sequence
  ENSG00000072952_23 (sequence is synthesized)
acagagcagtaggaaacctcacacctagccagtgccctgctctgagacactcagactaccaccctttccccaagtataacgtcaggcccaagtgtggacacactgccgcccatcccatca

SEQ ID NO: 62386 - DNA, 120 bp, Artificial Sequence
  ENSG00000072952_24 (sequence is synthesized)
attatcccccgagccaggccggagtggggctcccagaggagctctcggctctaagtcccagcccctctcagaggaggcgtgcggccgaggttctgcagccagaggcttctcggctctgag

SEQ ID NO: 62387 - DNA, 120 bp, Artificial Sequence
  ENSG00000072952_25 (sequence is synthesized)
gaagggttcttttaacactcggcacttctgtgggagctattcatacacagtgacttgatgttcttggaggatcaacaaaactgccctgggaaagcatccagtggatgaagaagtcacctt

SEQ ID NO: 62388 - DNA, 120 bp, Artificial Sequence
  ENSG00000072952_26 (sequence is synthesized)
caccaaggaactctattggaagggaaggtctcctgcccctagctcaggtggctggggagaactaaaacaccttcactggtggttgggggtaaggagcggggcacgggggaggaggaggta

SEQ ID NO: 62389 - DNA, 120 bp, Artificial Sequence
  ENSG00000072952_27 (sequence is synthesized)
gggggcagtaaaaaacttactctcttttttcctctctgtaattggttatcaggaagaatttgcttaatgactaacaccctaagcatcagacctggaatttggagttgcaaagtgactatc

SEQ ID NO: 62390 - DNA, 120 bp, Artificial Sequence
  ENSG00000072952_28 (sequence is synthesized)
ttcccatttcccatctcattttcaataacttcagcctcccattctttcctttggaatgagagtttctttttacagaagtaggaaaggcttctcagaaaaaaaaaaaaaagtataggctga

SEQ ID NO: 62391 - DNA, 120 bp, Artificial Sequence
  ENSG00000072952_29 (sequence is synthesized)
atttagctcagtgcttgaaatgggaagatatgaattattatatacgcatctgtccacacatacacacatactgttgtgtacacacacacaacatgcctgtgcacagagccaacaaccctt

SEQ ID NO: 62392 - DNA, 120 bp, Artificial Sequence
  ENSG00000072952_30 (sequence is synthesized)
caaaagtgtgctctgggtgtgtacctctggataaataagatgcatgccaagccaacccacagattttcaccagtgtggggcagtcaccaggcacctgttcaatgagctgtccacatggat

SEQ ID NO: 62393 - DNA, 120 bp, Artificial Sequence
  ENSG00000072952_31 (sequence is synthesized)
tgaagatgttttaaaaacacagaaaactcatggcttcaatggcagacttactagtctccatttcaaatgccaactctgagctgctgtacagcacaatctattccctattctctctttgaa

SEQ ID NO: 62394 - DNA, 120 bp, Artificial Sequence
  ENSG00000072952_32 (sequence is synthesized)
aacagttaacccacctcacaggtgaatgaggagagaagatgtgctttctgcttcagtctcttactctgtgtgtgaccacatgcaagagtaaacttgcacctcagtgcttcagttcaaatg

SEQ ID NO: 62395 - DNA, 120 bp, Artificial Sequence
  ENSG00000072952_33 (sequence is synthesized)
gggtttccaaccccagtataattaggggtgtttcagagcatccccagttatttagcacaacactgaaggagcacatcccctctccattttgacttctctccccacttttacagccactgc

SEQ ID NO: 62396 - DNA, 120 bp, Artificial Sequence
  ENSG00000072952_34 (sequence is synthesized)
cttcatcagttttgtagaggtttgatttccatgtgggttttgttgtcattgttttgcatttttgttttgttattgatattgtttgctttcattgctaaaactcatatacgacttactatg

SEQ ID NO: 62397 - DNA, 120 bp, Artificial Sequence
  ENSG00000072952_35 (sequence is synthesized)
agccaagcactgttctcagtattacataggtatgaattcatttaagtcctgaagaaaaagaaaaaaaaatacgaagtggatattacccttcccattttcaaataaggaaactgaagcaca

SEQ ID NO: 62398 - DNA, 120 bp, Artificial Sequence
  ENSG00000072952_36 (sequence is synthesized)
aaaagaacaagtaacttgacaaggacaccccggtagtaaatcatggggctggagctcaaccccagggtaggctggctccagagctgtgctctccttgactcttctgatggtctcctagct

SEQ ID NO: 62399 - DNA, 120 bp, Artificial Sequence
  ENSG00000072952_37 (sequence is synthesized)
ggaagcctcacatttcagtctcattcccccaagtggcccatcagctactccatctctggctccccaactaaacagtttctctcatagtgctggacctccactcactagttttttttccag

SEQ ID NO: 62400 - DNA, 120 bp, Artificial Sequence
  ENSG00000072952_38 (sequence is synthesized)
ctgttcttctcttttcttcaggtcactcttctcgaccgagtgcaaaaattatcccctccataccagctttgatgaccttccttccatactcctcaccagacacaacataataggtcacac

SEQ ID NO: 62401 - DNA, 120 bp, Artificial Sequence
  ENSG00000072952_39 (sequence is synthesized)
actcctctgtgctttctggcacgttttaaacattattattattgacctttacctatagtataccatggcctatttatgtatccatctcccctagcatttttcctcaaagacaagaaccat

SEQ ID NO: 62402 - DNA, 120 bp, Artificial Sequence
  ENSG00000072952_40 (sequence is synthesized)
gtcttacccatctcttgggtaagtgcctagcatggtggctgacgcttgggagggtgtcattaaatgttgctcaaaagaacaagcaaacatttaaggtggtggagagcagcctggggacag

SEQ ID NO: 62403 - DNA, 120 bp, Artificial Sequence
  ENSG00000072952_41 (sequence is synthesized)
ctgacatgctgcatgcttctcagtaccagcaccatcacaatgcaaaaagcaacatctttcttaacctcagcttattctgtttttcagtctactctgtgagagagcaggaatgagaccaga

SEQ ID NO: 62404 - DNA, 120 bp, Artificial Sequence
  ENSG00000072952_42 (sequence is synthesized)
ctagcaacaccattgccaagctcaaggactgggctcaatgcagtcactccttcagagagaccccccaccccaagcatgccccactttaaaatagcatgtttattgaagggggcatccttt

SEQ ID NO: 62405 - DNA, 120 bp, Artificial Sequence
  ENSG00000072952_43 (sequence is synthesized)
acagtagctagaaaatgactgaggcccaagccagggttgatcaaggatgtgccattaaggtaaagagttacagagcagggcagagggactctgggggcagaagtggatgatttgcccggc

SEQ ID NO: 62406 - DNA, 120 bp, Artificial Sequence
  ENSG00000072952_44 (sequence is synthesized)
ctcttccagggggtctggatacaactgaaggagctttagctacatgaggccctcagagccaaagacaggatgcaaatagagttctagagagtggccgtggaagcagaactccaggtgggg

SEQ ID NO: 62407 - DNA, 120 bp, Artificial Sequence
  ENSG00000072952_45 (sequence is synthesized)
aatgttcaatctctgcctcccttaaagcagggccaggctcagctggccccattgttcacttggtcacaagtttcctacctttgtttctggatgagtcaaaggccaggaaggcagttatgg

SEQ ID NO: 62408 - DNA, 120 bp, Artificial Sequence
  ENSG00000072952_46 (sequence is synthesized)
agagctcctgcacctccagctgccccacagaaaagcctgcaagagtacttccaggcacaggccctctcccaccctattccatttgtaagcaagggaggtcgaggaaaaggacatctccaa

SEQ ID NO: 62409 - DNA, 120 bp, Artificial Sequence
  ENSG00000072952_47 (sequence is synthesized)
aagggagcataagaatagccatatatacaggggctgaaaaagtgctcatgagtccatcttttctggaaagcaaagaccagcctgaagcagtgggagctgctgcccaagcggtagtgaact

SEQ ID NO: 62410 - DNA, 120 bp, Artificial Sequence
  ENSG00000072952_48 (sequence is synthesized)
ggagagaaacaggccctggattttcagtgaggatgtggatctgaagagtcccccaaatgcctctgaagtctgacatctctgcttagccctaggagtctggttccctgccttcagttgcag

SEQ ID NO: 62411 - DNA, 120 bp, Artificial Sequence
  ENSG00000072952_49 (sequence is synthesized)
agtgatgtgtttgtgtcattgttgatgtcacctcctaaaaagaccttcactttctggctgccacaaagccatatgtgttgctccccatatacagcctgacagagtaaatggagaggaagt

SEQ ID NO: 62412 - DNA, 120 bp, Artificial Sequence
  ENSG00000072952_50 (sequence is synthesized)
gctggatttgtgtatcactggctatcagttcctcatgttgttaagcctcacacaggtgtgctagcattgaactgtagagtgtcacatacctgagtttgaaaataaaagcacatttccaaa

SEQ ID NO: 62413 - DNA, 120 bp, Artificial Sequence
  ENSG00000072952_51 (sequence is synthesized)
ggcgctggcccagggtcttctccaggctcacatgcttgctggaggctccaggcgggtggggagatctgcagggtccctttgttcccgtccggccaggacagtgtccagtggcacgagttg

SEQ ID NO: 62414 - DNA, 120 bp, Artificial Sequence
  ENSG00000072952_52 (sequence is synthesized)
gaataactcagttttaggtaagcctcccctatatcctagaataacctgcctcttcggctgggaagcggagggaaccttctcttccttaaagacagggtctcgcactgtcacccaggctgg

SEQ ID NO: 62415 - DNA, 79 bp, Artificial Sequence
  ENSG00000072952_53 (sequence is synthesized)
agagtgaagagaggctggccagaggaggaaaggagaataactcagttttagacaggccacctcccgggttcaagcaatt

SEQ ID NO: 62416 - DNA, 120 bp, Artificial Sequence
  ENSG00000072952_54 (sequence is synthesized)
cctcccaagtagctgggattacagagattccatcaagaagacttctgcactgggtttgaggctctgaccatccacagtcctgggtcctattctcaactccaaaaacaccgcaaggagagt

SEQ ID NO: 62417 - DNA, 120 bp, Artificial Sequence
  ENSG00000072952_55 (sequence is synthesized)
tggtgaagtctttaaggaggcccaataaataacacctctttccttcactgaagctttaaggcttgttgggaattcagagactaatatcacccgtatgactgatgaagctggtgttggaaa

SEQ ID NO: 62418 - DNA, 120 bp, Artificial Sequence
  ENSG00000072952_56 (sequence is synthesized)
gtgtttggatcaacagggtcctcctgccgcaggagtatcttgcagtccaactcccacgattgtcctgactggggatgccacttcaccagaaggagaaaccgacaaaaacctggccaacag

SEQ ID NO: 62419 - DNA, 120 bp, Artificial Sequence
  ENSG00000072952_57 (sequence is synthesized)
attcggctttccacactctcaagtttagcctctgacatcttacctttcttgctcatggtttccttaactatgtatacatcccttaaatgaacatgaagtgatcataagccttcatattgc

SEQ ID NO: 62420 - DNA, 120 bp, Artificial Sequence
  ENSG00000072952_58 (sequence is synthesized)
tacaggcagcttgaatacagtctccagggtgttacccagagactgtggggtcatttccattctgtatctccaagatctcataagctaaaatagaacagattgagcgttcactcaccaaca

SEQ ID NO: 62421 - DNA, 120 bp, Artificial Sequence
  ENSG00000072952_59 (sequence is synthesized)
cagcattagaaatgaggaggctttttcccagcccttctgaactatggctattgctacctccaagacagtgagcctggtcacttctcttcctgcagaatatgcctcgccggagggtcagcg

SEQ ID NO: 62422 - DNA, 120 bp, Artificial Sequence
  ENSG00000072952_60 (sequence is synthesized)
tgtccactgcctccctgacatctgtggcgcattagcttgtgaaagaaacaggccagaagcaagaatgcactgggggcgcagatggtgccggagaccccgcggggcacatcattgacctgg

SEQ ID NO: 62423 - DNA, 120 bp, Artificial Sequence
  ENSG00000072952_61 (sequence is synthesized)
gaataacctgcctcttcggctgggaagcggagggaaccttctcttccttaaaggagacaaatctgggagctctgagccactaggatgaacaccagagtctctctgagccttggcttggtt

SEQ ID NO: 62424 - DNA, 120 bp, Artificial Sequence
  ENSG00000072952_62 (sequence is synthesized)
ttgttgatgctgtgcatgcttagagaactcagctgccctgtttggagaatggcgagggcactgagtggactctatgtaccagcaccttgcatgtatttcctgatttaatcgttacaacaa

SEQ ID NO: 62425 - DNA, 120 bp, Artificial Sequence
  ENSG00000072954_0 (sequence is synthesized)
ggacggacgaggccggggccccgggtggcacccggcaggcgggcaggcgggcgccatggagctgctctcggcgctgagcctgggcgaactggcgctcagcttctcgcgggtgccgctctt

SEQ ID NO: 62426 - DNA, 120 bp, Artificial Sequence
  ENSG00000072954_1 (sequence is synthesized)
cagcttctcgcgggtgccgctcttccccgtcttcgacctcagttacttcatcgtctccatcctctacctcaagtatgagccaggagcagtcgaactgtcccggcgccaccccatcgcgtc

SEQ ID NO: 62427 - DNA, 120 bp, Artificial Sequence
  ENSG00000072954_2 (sequence is synthesized)
ctggctgtgcgccatgctgcattgcttcgggagctacatcctggctgatctgctccttggggagccactgatcgattacttcagcaacaactccagcatcctgctggcctcagctgtctg

SEQ ID NO: 62428 - DNA, 120 bp, Artificial Sequence
  ENSG00000072954_3 (sequence is synthesized)
gtacttgattttcttctgccccctggacctcttctacaagtgtgtctgcttcctgcctgtgaaactcatcttcgtggccatgaaggaggtggtgcgagtccgcaagatcgcggtgggcat

SEQ ID NO: 62429 - DNA, 120 bp, Artificial Sequence
  ENSG00000072954_4 (sequence is synthesized)
ccatcacgcccatcaccactaccaccacgggtggttcgtcatgattgcaactgggtgggtcaaaggttctggtgtcgccctcatgtccaactttgagcagctgctccgaggggtctggaa

SEQ ID NO: 62430 - DNA, 120 bp, Artificial Sequence
  ENSG00000072954_5 (sequence is synthesized)
gccagagaccaacgagatcctgcacatgtctttccccaccaaggccagcctgtatggagccatcctcttcaccctccagcagacccgctggctcccagtgtccaaagccagcctcatctt

SEQ ID NO: 62431 - DNA, 120 bp, Artificial Sequence
  ENSG00000072954_6 (sequence is synthesized)
catcttcaccttgttcatggtgtcctgtaaggtgtttctgacagccacccactcacacagctccccctttgatgccctggagggctacatctgccccgtgctgtttggttcggcctgcgg

SEQ ID NO: 62432 - DNA, 120 bp, Artificial Sequence
  ENSG00000072954_7 (sequence is synthesized)
gggtgaccatcaccacgacaaccatggtgggtcccacagcggtggtgggccaggagctcagcattcggccatgcccgccaagtccaaggaggagttgagcgagggctccaggaagaagaa

SEQ ID NO: 62433 - DNA, 120 bp, Artificial Sequence
  ENSG00000072954_8 (sequence is synthesized)
ggccaagaaggcggattagggggtggcccaaggggcaccggggagaggacccggacccaggaccctctgagctgggaggcttcctgcgctcagatctatcctttcctggccttgacttcc

SEQ ID NO: 62434 - DNA, 120 bp, Artificial Sequence
  ENSG00000072954_9 (sequence is synthesized)
ccatctgcaaatcagggtcattggctcaccctccagggctgatgtgggggttgagatatggggatgaggatgaagaacttttgtagaaatcggggttccctctttctctctgccaggacc

SEQ ID NO: 62435 - DNA, 85 bp, Artificial Sequence
  ENSG00000072954_10 (sequence is synthesized)
ctctgcatattgactcctgaagaacttcaagccatgttgagatccattcatttgatggacattttctaagtacctgtgagccagg

SEQ ID NO: 62436 - DNA, 120 bp, Artificial Sequence
  ENSG00000072954_11 (sequence is synthesized)
attcatttgatggacattttctaagtacctgtgagccaggtgctgccatttcaaagtctcttcttaccacgctcctcagtggctagacattttcacgtggccagaaagtcccgactcttg

SEQ ID NO: 62437 - DNA, 120 bp, Artificial Sequence
  ENSG00000072954_12 (sequence is synthesized)
ctgggcgtccctggacaagttgccttcctcctctgagcttggcgctccccatctgtatagtggagacccttggcccccctctgtacggaagggccgatgcgaagctgcagttaaaaaagg

SEQ ID NO: 62438 - DNA, 120 bp, Artificial Sequence
  ENSG00000072954_13 (sequence is synthesized)
ctcacatgctcctagcctcgtgcagtcaggaggggagaccaggacagttggaaattatgattgcaaatggctttgcattttagatcattcgtgtgtgtggatcagagaaacgcacaagtt

SEQ ID NO: 62439 - DNA, 120 bp, Artificial Sequence
  ENSG00000072954_14 (sequence is synthesized)
ccctggcacaaaggaagccctcagtagacacgtctagggcaggcttgagagatcagatggcgtgaaaggcttgtgatctgttcgtctcaggctccccctaaaccaaagaaatggaaacag

SEQ ID NO: 62440 - DNA, 120 bp, Artificial Sequence
  ENSG00000072954_15 (sequence is synthesized)
ctggttggggttccacgatccagctctatcaaggggctctgagtgtgcacagttgggacctggatgtatcaggtctccctcaggctggagtccactgtcactcattcagccattgaacaa

SEQ ID NO: 62441 - DNA, 120 bp, Artificial Sequence
  ENSG00000072954_16 (sequence is synthesized)
acatacagatgcttacctgctctgtggtcagccttgtgctgctgctgggcgggccaggagcctgcttcagtgtgagcgaggtggatgatattatagctgaagggtccctcctggtcaccc

SEQ ID NO: 62442 - DNA, 120 bp, Artificial Sequence
  ENSG00000072954_17 (sequence is synthesized)
tcatctcagcctaggtcaccaggatgtctgagaggggtgggtgcatgggacgggcgtggccagtctcaggtgaggtttgggcccagacctcgttggagtcccagacgttgccaggctgtt

SEQ ID NO: 62443 - DNA, 120 bp, Artificial Sequence
  ENSG00000072954_18 (sequence is synthesized)
ggaaaattgccttgttcctgtgatgcctgggagttaggtgggtcctggggaggtttcatcctcttgcttgtccacctcagctcggtgtggaggggcagccaataaatcattgtgaatgaa

SEQ ID NO: 62444 - DNA, 120 bp, Artificial Sequence
  ENSG00000072954_19 (sequence is synthesized)
aaaggtaaataggatgatgacaatgaaaaatcatcccagtggagaacttttggttcagtggtactaccaggcaccccagctaggaaagccattgctccaggcacaggggcataaagactg

SEQ ID NO: 62445 - DNA, 120 bp, Artificial Sequence
  ENSG00000072954_20 (sequence is synthesized)
cagtaggtgttcaaacctccctacaggtatcagccgatacctttagggtaaatgggaagattcttctagaaatgttactgtcaggggtacctaagacagtgatgatgatgacaaaagcca

SEQ ID NO: 62446 - DNA, 120 bp, Artificial Sequence
  ENSG00000072954_21 (sequence is synthesized)
gcattgccagagcaggttttctcacttgcagcactactgacatgtggggctggatcattctttgtggtgggggctgccttgtgcactataggatgttgaacagcacccctggcctccacc

SEQ ID NO: 62447 - DNA, 120 bp, Artificial Sequence
  ENSG00000072958_0 (sequence is synthesized)
acacttgtttcatagacttccccaccagactgtgagctccatagggctgggccccaggtcggtttcaccaccaggctctctcgcctaactcggcccacgggaggccgtttccagctgctc

SEQ ID NO: 62448 - DNA, 120 bp, Artificial Sequence
  ENSG00000072958_1 (sequence is synthesized)
tggctccatagctcagcctggcagcggccactgggtgccctgatttggtcggccccgccccaccgggccttacttccgggatgcttctggcgggagcaagaaacatggttacatacgacg

SEQ ID NO: 62449 - DNA, 120 bp, Artificial Sequence
  ENSG00000072958_2 (sequence is synthesized)
taatgcgcctgcgcacagtccgtcctgcgcctgcgcattcctgacagcacctcccggaccggacataacggtccccgcgcggctccccgaaccggaagtggaggtgagctgtcgcgggcg

SEQ ID NO: 62450 - DNA, 120 bp, Artificial Sequence
  ENSG00000072958_3 (sequence is synthesized)
gcgcccggccttgctcaacgcccagcagtccccaccgtcgctgccgccgccaccgccctcggccgctgccgaggcctcctgcagccatcatgtccgccagcgccgtctacgtgctggacc

SEQ ID NO: 62451 - DNA, 120 bp, Artificial Sequence
  ENSG00000072958_4 (sequence is synthesized)
tgaagggcaaggtgctcatctgccggaactaccgtggcgacgtggacatgtcagaggtggagcacttcatgcccatcctgatggagaaggaggaggaggggatgctgtcgcccatcctgg

SEQ ID NO: 62452 - DNA, 120 bp, Artificial Sequence
  ENSG00000072958_5 (sequence is synthesized)
cccacgggggggtccgtttcatgtggatcaaacacaacaacctgtatctggttgccacatccaagaagaacgcgtgcgtgtcgctggtcttttctttcctctataaggtggtgcaggtgt

SEQ ID NO: 62453 - DNA, 120 bp, Artificial Sequence
  ENSG00000072958_6 (sequence is synthesized)
tttccgagtacttcaaggagctggaggaggagagcatccgggacaactttgttatcatctacgagctgctggacgagctcatggacttcggctacccccagaccaccgacagcaagatcc

SEQ ID NO: 62454 - DNA, 120 bp, Artificial Sequence
  ENSG00000072958_7 (sequence is synthesized)
tgcaggagtacatcactcaggaaggccacaagctggaaacaggggccccgcggccaccagccaccgtcaccaacgcggtgtcctggcggtccgaaggcatcaagtatcggaagaatgagg

SEQ ID NO: 62455 - DNA, 120 bp, Artificial Sequence
  ENSG00000072958_8 (sequence is synthesized)
tgttcttggacgtcatcgagtctgtcaacctcttggtcagcgccaacggcaatgtcctgcgcagcgagatcgtgggctccatcaagatgcgagtcttcctctcgggcatgcccgagctgc

SEQ ID NO: 62456 - DNA, 120 bp, Artificial Sequence
  ENSG00000072958_9 (sequence is synthesized)
gcctgggcctcaacgacaaggtcctctttgacaacacgggccgcggcaaaagcaaatccgtggagctggaggatgtgaagttccaccagtgtgtgcggctatcacgcttcgagaatgacc

SEQ ID NO: 62457 - DNA, 120 bp, Artificial Sequence
  ENSG00000072958_10 (sequence is synthesized)
gcaccatctccttcatcccacccgacggcgagttcgagctcatgtcctaccgtctcaacacccacgtcaagcctttgatatggatcgagtcggtgatcgagaagcactcccacagccgca

SEQ ID NO: 62458 - DNA, 120 bp, Artificial Sequence
  ENSG00000072958_11 (sequence is synthesized)
tcgagtacatgatcaaggccaaaagccagttcaagcggcggtcaacagccaacaacgtggagatccacattcccgtgcccaatgatgccgactcacccaagttcaagacgacggtgggga

SEQ ID NO: 62459 - DNA, 120 bp, Artificial Sequence
  ENSG00000072958_12 (sequence is synthesized)
gcgttaagtgggtccccgagaacagcgagatcgtgtggtccatcaagtccttcccgggcggcaaggagtacctgatgcgggcccacttcggcctgcctagtgtggaggccgaagacaagg

SEQ ID NO: 62460 - DNA, 120 bp, Artificial Sequence
  ENSG00000072958_13 (sequence is synthesized)
agggcaagcccccgatcagtgtcaagttcgagatcccttacttcactacctccggcatccaggtgcgctacctgaagatcattgagaagagtgggtaccaggccctgccctgggtgcgtt

SEQ ID NO: 62461 - DNA, 120 bp, Artificial Sequence
  ENSG00000072958_14 (sequence is synthesized)
atatcacgcagaatggagattaccagctccggacccagtgaggggctgtcgcagccaacaccccggcctcggggctcctggtggcagcaccaggggacacacctgccaaacccaccagat

SEQ ID NO: 62462 - DNA, 120 bp, Artificial Sequence
  ENSG00000072958_15 (sequence is synthesized)
ggaggggccctccctggtctctggccaccctcccagcctctgcccagggacccctgccttccccaggccatctgctctgccgtcgacactcgtctcagaagcccctttcccagaagaggc

SEQ ID NO: 62463 - DNA, 120 bp, Artificial Sequence
  ENSG00000072958_16 (sequence is synthesized)
tggtcttcaagaagtctcgtttctttgcccctgaagtcagtttcaggggaaggatgtgaaatttttccgtgtagaggttacagccttttatgctgttgagctcccaggtaccaaaaagct

SEQ ID NO: 62464 - DNA, 120 bp, Artificial Sequence
  ENSG00000072958_17 (sequence is synthesized)
tggccaacgcttgccagccagccagctgcaggtggcatctgccacgaaggaagcgccagcctcgccaggccagcaggggcgtcgttttgttgccattttgttgaacgttatgggtttatg

SEQ ID NO: 62465 - DNA, 120 bp, Artificial Sequence
  ENSG00000072958_18 (sequence is synthesized)
ggtgttcctggaacttgtctttgtgcattcgttgctgtttgtgttaccctcactgtccccatgtcccacccacgtcctacggcactcaggaagcacttggtgaggacgagccctcaccct

SEQ ID NO: 62466 - DNA, 120 bp, Artificial Sequence
  ENSG00000072958_19 (sequence is synthesized)
tcttgtcttccttcccggcagcgcccgcagcgggccatttacacgtcgaggctggcacctggcgcgctcgggggccactgtagcgtctgcctgctccctggactcgcaggcctcgcctgt

SEQ ID NO: 62467 - DNA, 120 bp, Artificial Sequence
  ENSG00000072958_20 (sequence is synthesized)
ggcgccttcccagggccagcctgggtcacgagatgctgtcactcagccagatcagtattgacccaccaggggaggtggggtttggtgagagacgccagcctcagactttttcccactgag

SEQ ID NO: 62468 - DNA, 120 bp, Artificial Sequence
  ENSG00000072958_21 (sequence is synthesized)
ggtccagagagcggggccacgtgtcacccacgtctgcgcttggtcacccgtcctccccaccctgtgtgtgtttatgtcatagttacattaaattccattcattgaatactccacagcctt

SEQ ID NO: 62469 - DNA, 120 bp, Artificial Sequence
  ENSG00000072958_22 (sequence is synthesized)
cctctgatgcagcgtggtcccaactcctcctgcgtgaccacagggcttgcctggttttgtcgccgaccttccctgtggccccacgaggtgtcaccagctccctctgcttccccagctgaa

SEQ ID NO: 62470 - DNA, 120 bp, Artificial Sequence
  ENSG00000072958_23 (sequence is synthesized)
acacaggaaaagcagctgcgggaagaggcagctgcagtgctggaccatgggccaccactcctgggccacacagaggaggccacagaggcagagtcttctctcatccaatctgctgcaccc

SEQ ID NO: 62471 - DNA, 120 bp, Artificial Sequence
  ENSG00000072958_24 (sequence is synthesized)
tcagatggccaacagcttgtccccacctctccccaaactgatggcccactcagagcatggtccttgtgtccacagcagcatcccctgtgtcctagctagaaatgcaggttcgtgggccag

SEQ ID NO: 62472 - DNA, 120 bp, Artificial Sequence
  ENSG00000072958_25 (sequence is synthesized)
ccctgacctgccaaagtggaggctctggggccagggtcccggaaaacattaacaaggcccccagatgcttcttctgtgaactgctacttggtccatgggggaaatagcacatatgcagga

SEQ ID NO: 62473 - DNA, 120 bp, Artificial Sequence
  ENSG00000072958_26 (sequence is synthesized)
agtgctgcctgctcttggccccctccccgaccagtgctgatggccctgcctggccagcaccctcttgccttcattctccccctccctctcctgtcttgccgagctcgtcctcaggtgtct

SEQ ID NO: 62474 - DNA, 120 bp, Artificial Sequence
  ENSG00000072958_27 (sequence is synthesized)
agtgggcatccgacctaacagcctgagtagaaccttccgcccacgtaggtcttccccatctcagtcaatgacgctgccccagcccaggcctcagaccaaagccctgaaggcatccctggg

SEQ ID NO: 62475 - DNA, 120 bp, Artificial Sequence
  ENSG00000072958_28 (sequence is synthesized)
gcccctcccctcactgtccacacccatatcagcagccagccctcatggcccctccagaaaaccctggggctgaccccatttgccatcctcgctgccacccccggggcctagctccagtgt

SEQ ID NO: 62476 - DNA, 120 bp, Artificial Sequence
  ENSG00000072958_29 (sequence is synthesized)
gggctgtcactgtccccaccctgtggagcccccatgctgggacaccgcagggacaggagagggctggtccacaggacagaagagagacttcagtttccagcaacttatcagataagacct

SEQ ID NO: 62477 - DNA, 120 bp, Artificial Sequence
  ENSG00000072958_30 (sequence is synthesized)
gcaaaccctccactacagactgtagaaatgcaggaaatgaagcagacgcacctagccgtgcccataaaaaagcaaggagacccacaggagcccaagacgaaggaagtagacgcggaagac

SEQ ID NO: 62478 - DNA, 120 bp, Artificial Sequence
  ENSG00000072958_31 (sequence is synthesized)
accgtgggggctcacaccggagttgctcttggaaaccaccgggtttaggtttgggggccaggtggcagataggactttgggcatcgggaagatggtgaaatgcagtggagatgactcctg

SEQ ID NO: 62479 - DNA, 120 bp, Artificial Sequence
  ENSG00000072958_32 (sequence is synthesized)
cgtgaagctgggatcctcgagggtcatgatacttaacagtaaaaagatggactagaaaaaacatttgccctccacccctgagaataagcactgtgtcctctctctgcctgagatccacag

SEQ ID NO: 62480 - DNA, 120 bp, Artificial Sequence
  ENSG00000072958_33 (sequence is synthesized)
gagaaaaagtcaccactcatttagaccccacgcttgtaatatcaatctggtttgcagacaaccaggccaagatgtttatgacagaaaacctccctggagggacctaacttcatgccttgt

SEQ ID NO: 62481 - DNA, 120 bp, Artificial Sequence
  ENSG00000072958_34 (sequence is synthesized)
tacctaagatcctcgcacacaatagaccctcaacatgagggcacatcctgaaaattacaaaacacgtgcatgaaagcaaacttgaaacagcaggatcagatcctcacgaacttcaaagat

SEQ ID NO: 62482 - DNA, 120 bp, Artificial Sequence
  ENSG00000072958_35 (sequence is synthesized)
tatcggcatgtaaacaaatacactatgcagtcaatctgttgcaagtgcctaaaggcacagagactctgaatagaaaagagcaaaatgctgttaagacagagctgttacaacatccaacaa

SEQ ID NO: 62483 - DNA, 120 bp, Artificial Sequence
  ENSG00000072958_36 (sequence is synthesized)
ggcaaataatttgcatgcgggttataacgtctacaaatcagaaaaagagaacctaacaaaatgggctgtgtgtgaacagacagtatgaagaagatgaaatacaaatggcgaccgttcggc

SEQ ID NO: 62484 - DNA, 120 bp, Artificial Sequence
  ENSG00000072958_37 (sequence is synthesized)
atgaagaagatgaaatacaaatggcgaccgttcggccaggcgtggtggctcacgcccgtgagcccaatactttgggaagccgaggcagaccgatcactggaggtcaggagttcgagacca

SEQ ID NO: 62485 - DNA, 73 bp, Artificial Sequence
  ENSG00000072958_38 (sequence is synthesized)
accagcatggccagcatggtgaagccccatctatactaaaaatacaatatgctgaggcaggagaatggcttga

SEQ ID NO: 62486 - DNA, 73 bp, Artificial Sequence
  ENSG00000072958_39 (sequence is synthesized)
ggtggaggttgcagtgagccaagatagtgtcaacaaaaaccggcctagcgcagtggcttatgcctgtaatccc

SEQ ID NO: 62487 - DNA, 76 bp, Artificial Sequence
  ENSG00000072958_40 (sequence is synthesized)
agtgagccgagatcataccagaaaaaaaaaaggcaaacgttcaaccatgtagctattcaggaaatatgtacacata

SEQ ID NO: 62488 - DNA, 120 bp, Artificial Sequence
  ENSG00000072958_41 (sequence is synthesized)
acgttcaaccatgtagctattcaggaaatatgtacacataaaccaagaccacagttagatgctatttgcatcatgtcggccccccccaaaaaaatttttttttttgagacagggtcttgc

SEQ ID NO: 62489 - DNA, 120 bp, Artificial Sequence
  ENSG00000072958_42 (sequence is synthesized)
tggcgtgatcacggctcactgcagcctcgagctgccaggctcagccaatcctgcctcagcctcttgaggagctgggactacaagcacatgccaccatgctgggccaatttttcatatttt

SEQ ID NO: 62490 - DNA, 120 bp, Artificial Sequence
  ENSG00000072958_43 (sequence is synthesized)
tgccaccatgctgggccaatttttcatattttttatagagatggggtctcgtcattttgtccacactggtctccaactcctgggcttgagccatcatcctgccttggcctcccaaagtgc

SEQ ID NO: 62491 - DNA, 120 bp, Artificial Sequence
  ENSG00000072958_44 (sequence is synthesized)
caggcgtgagccacctcgccacgcctcctgaacatctagaacgtgctagctatgtactgactgtgggaaagttgagaacatcctccctgaagtcatctttatgccagaattctcttgcag

SEQ ID NO: 62492 - DNA, 120 bp, Artificial Sequence
  ENSG00000072958_45 (sequence is synthesized)
aactctagttgagaaaagccctgagaagtccatgcaccaatatatagagaaatatcaggtgtacagttacacttacagcagcatagttcatgatagcaggaaattggaaagcaaccaaaa

SEQ ID NO: 62493 - DNA, 120 bp, Artificial Sequence
  ENSG00000072958_46 (sequence is synthesized)
gtccttcaataggaaaagggaccactgtagtccattcatgcaagagattacagcagtgaaaatgaattcaactagagcagtgatatggctcagaatacaacttaaacaacattgagcggg

SEQ ID NO: 62494 - DNA, 120 bp, Artificial Sequence
  ENSG00000072958_47 (sequence is synthesized)
aaaaatgtttacaaaagaaaatgcagtaatctagtataaaatacggaaataatattttgcgtgcttagggatctatatatatccagcaaaagtctaacgagatgcttgagaatttgaaaa

SEQ ID NO: 62495 - DNA, 120 bp, Artificial Sequence
  ENSG00000072958_48 (sequence is synthesized)
aattcacatccctggttatctctgaaaggcaaaaacaggaagggggtatgactggggcctctgctgtgttggcaatttccttaagcttggtattgcttagtggcttgttctgtattcttt

SEQ ID NO: 62496 - DNA, 89 bp, Artificial Sequence
  ENSG00000072958_49 (sequence is synthesized)
tggcttgttctgtagacagggtgtcactctgttgcccaggccaaagtgcagtggcatggtcacggctcactgcagcttcaaactcctgg

SEQ ID NO: 62497 - DNA, 85 bp, Artificial Sequence
  ENSG00000072958_50 (sequence is synthesized)
aagactgcaaagctgggcatggtagtattagaggattacttgagcccaggagtttaaggacagcctgggcaacatagtgagaccc

SEQ ID NO: 62498 - DNA, 120 bp, Artificial Sequence
  ENSG00000072958_51 (sequence is synthesized)
aaacaaaccaacaaaacaccccccaaaaatgacaatgcagatttggaagaaaaaaatagattaaaaatgtagtcataggaattaacaacttggggccgggcatggtggctcacgcctata

SEQ ID NO: 62499 - DNA, 120 bp, Artificial Sequence
  ENSG00000072958_52 (sequence is synthesized)
accagcctggccaacatggtaaaacctgattgctactaaaaatacaaaagaattagctgggcgtagtggctcatacctgtaatcccagctactcaggtggctggggcaggagattcgctt

SEQ ID NO: 62500 - DNA, 120 bp, Artificial Sequence
  ENSG00000072958_53 (sequence is synthesized)
ccagctactcaggtggctggggcaggagattcgcttgaacccgggagatggcgctcgcagtgagtcaagatggcaccgttgtactcttgcctgagcgacacagtgagacactgtctcaaa

SEQ ID NO: 62501 - DNA, 120 bp, Artificial Sequence
  ENSG00000072958_54 (sequence is synthesized)
aaaaaaaattaacaacttggttggagggtgttaaaatacaagtgagacatagatgaagagaattagtgcactagaagagagctgtctgaggcagttacccgggacatagcacagctaatg

SEQ ID NO: 62502 - DNA, 120 bp, Artificial Sequence
  ENSG00000072958_55 (sequence is synthesized)
agacatatatatatttacagtcaaccctccacatccatgggttctgcatccatggattcaaccaagagtgagttgaaaatatttgaaaaacaattgtgtctgtgctggacatgtacaggt

SEQ ID NO: 62503 - DNA, 120 bp, Artificial Sequence
  ENSG00000072958_56 (sequence is synthesized)
tttcttttttattgtcattattccttaaataatacagtataatgattatgtagcatctacattgtattaggtaatctagagatgatttaaagatgatgtgcataggatatatgcaaatat

SEQ ID NO: 62504 - DNA, 120 bp, Artificial Sequence
  ENSG00000072958_57 (sequence is synthesized)
atattgtgccattttatataaaagacttgagcatcctcagattttggtatccaaggggagtcctggaagcaatcccttgaggatatggagggacgactctgtgtgtgtgtgtgtgtgtgt

SEQ ID NO: 62505 - DNA, 120 bp, Artificial Sequence
  ENSG00000072958_58 (sequence is synthesized)
gtgtgtgtgtgtgtgtgtgtgtgatgtgcgtgtgtggttagcacaagacaataagaaggcccaacatgccagcaagtatctaacacaaaccaaaaaatgagaactggggagcagccacat

SEQ ID NO: 62506 - DNA, 120 bp, Artificial Sequence
  ENSG00000072958_59 (sequence is synthesized)
gagcagccacatgcaaagagatcgtggccagaattttccaaaattaatgaaaatcttgaagtgttttttgtttttcattttgacggagtttcgcgtttgttgcccaggctggagtgcaat

SEQ ID NO: 62507 - DNA, 84 bp, Artificial Sequence
  ENSG00000072958_60 (sequence is synthesized)
tgacggagtttcgcgtttgttgcccaggctggagtgcaatggcgaaatctcggctcatatctcagcctcccaagcagctgggat

SEQ ID NO: 62508 - DNA, 120 bp, Artificial Sequence
  ENSG00000072958_61 (sequence is synthesized)
cctgaaaatcttgaaattttaagatccaggaaaccgttgagtccaaagcatgatacacaaacctaaattcgtaactaaaataatcatagtcgaaccacagaacatatcagactcagggaa

SEQ ID NO: 62509 - DNA, 120 bp, Artificial Sequence
  ENSG00000072958_62 (sequence is synthesized)
gatcctaacagcaacactaagagattaaaatgtctctccaaagagcaattggacagagaactggtttcacaactggaacaacaaaagtccgaagatagagcatggcttcaaattactgag

SEQ ID NO: 62510 - DNA, 120 bp, Artificial Sequence
  ENSG00000072958_63 (sequence is synthesized)
aagtccgaagatagagcatggcttcaaattactgagagaagtgcagtctagaattctgagcccacctcatctgtaaaaggtaggacaagccgggcatggtggctcccgcctgtaatccca

SEQ ID NO: 62511 - DNA, 65 bp, Artificial Sequence
  ENSG00000072958_64 (sequence is synthesized)
gttcccagctacttgggagactgaggcagacagaattgcttgaaccagggagacagaggttgcag

SEQ ID NO: 62512 - DNA, 90 bp, Artificial Sequence
  ENSG00000072958_65 (sequence is synthesized)
gcgccactgtactccagcttgggcaaacaagataaaaacaatttatcaataacagattccccgaaaaaaggaacttgtgtacataaggaa

SEQ ID NO: 62513 - DNA, 120 bp, Artificial Sequence
  ENSG00000072958_66 (sequence is synthesized)
aacagattccccgaaaaaaggaacttgtgtacataaggaaaggaagaaagatgtgagaaggaatgccggaaaaccttagaaaccattggatctgtctaaactgtcattgactgtgtaaag

SEQ ID NO: 62514 - DNA, 120 bp, Artificial Sequence
  ENSG00000072958_67 (sequence is synthesized)
caataataacagtgactaacgtatagagtagcgacaaaaggcgcaactgaagtactagacaacatcctggtgttcatgcctttcaaggtcactatgctatttgggaggagattcggctaa

SEQ ID NO: 62515 - DNA, 120 bp, Artificial Sequence
  ENSG00000072958_68 (sequence is synthesized)
agtccacgagggccacgtatttatatataatttctagaccagtggttggaaaagggttgaaagaaaacttttaacagattaataggaagaaggaaaagagaaggaggcgtagaaaaatca

SEQ ID NO: 62516 - DNA, 70 bp, Artificial Sequence
  ENSG00000072958_69 (sequence is synthesized)
gcgccattgcactccagcctgggcaattcaggaggccaggttcagtggctcatgcctgtaatcccagtgc

SEQ ID NO: 62517 - DNA, 72 bp, Artificial Sequence
  ENSG00000072958_70 (sequence is synthesized)
cccagtgctttgggaggctgaggctgagacaggtaactctgtctctacaaaaattagccaggcatggtggcg

SEQ ID NO: 62518 - DNA, 78 bp, Artificial Sequence
  ENSG00000072958_71 (sequence is synthesized)
gtctaaactactcaggaggctgagttgggaggatcacctgagttcaggaagctgaggctgcagtgagctgtgattgca

SEQ ID NO: 62519 - DNA, 120 bp, Artificial Sequence
  ENSG00000072958_72 (sequence is synthesized)
tcaaaaaaaaaaaataaaataaaggaaaaatcaggataaatgcagggatgttctaaactttttaaaataataaataatagtacttaaaactgcactgggacttttgggacacccctagca

SEQ ID NO: 62520 - DNA, 120 bp, Artificial Sequence
  ENSG00000072958_73 (sequence is synthesized)
tctctggctgcagaaagcataaaataagattgtagaaataaatccagatattaggaaccacaacaggtgtaaatgaagcaaagctgctagttgaagatgttgtcggattgaactgaaata

SEQ ID NO: 62521 - DNA, 120 bp, Artificial Sequence
  ENSG00000072958_74 (sequence is synthesized)
caaaatcctgtgatatcctgtttatacgcgatacatctaaaatgtaagtacacaacacaattgaaagtaaaaaaacattaaaagatgtgacacttaaaatataagcacacaacacagtta

SEQ ID NO: 62522 - DNA, 120 bp, Artificial Sequence
  ENSG00000072958_75 (sequence is synthesized)
aaagtaaaaagacattaaaagatgccaaaagaaatctcatatggttatattaattccagacagaatagatgtatttatttatttattcattcatttaattttttgagatggagtctcgct

SEQ ID NO: 62523 - DNA, 71 bp, Artificial Sequence
  ENSG00000072958_76 (sequence is synthesized)
ctgacctcaggtgatccacccccactggcctcccaaagtgctagtggcaggtgtgagccaccacacacggc

SEQ ID NO: 62524 - DNA, 120 bp, Artificial Sequence
  ENSG00000072958_77 (sequence is synthesized)
cccaaagtgctagtggcaggtgtgagccaccacacacggccagaatagactttaaagcaagaaagcaaaagaaaaaatgtattagatccccgagaagtttccacacaactccaagaatta

SEQ ID NO: 62525 - DNA, 120 bp, Artificial Sequence
  ENSG00000072958_78 (sequence is synthesized)
ttattagagttcccactctctgaggaattttcaagagaaattagttagaattcaacaagaaataaattactttaaaatatttccaaatatgagaggttttttttgtttttgtttttgttt

SEQ ID NO: 62526 - DNA, 90 bp, Artificial Sequence
  ENSG00000072958_79 (sequence is synthesized)
gcccaggctggagtgcagttggcctcctaggctgaaatagtcctcccatctcagtctcacaagtagctgggattacaggtgagcaccacc

SEQ ID NO: 62527 - DNA, 120 bp, Artificial Sequence
  ENSG00000072958_80 (sequence is synthesized)
ctcaagtgatccacctgcctcagcctccacagtgctggaattacaggtgtgagtcaccatgcccagccaatatgagagattttaaagcacatttttcaatcaccatgtgtcaaagaagaa

SEQ ID NO: 62528 - DNA, 79 bp, Artificial Sequence
  ENSG00000072958_81 (sequence is synthesized)
tttaaagcacatttttcaatcaccatgtgtcaaagaagaaaatataatggaagttagaaaatattagagaaaggaggct

SEQ ID NO: 62529 - DNA, 83 bp, Artificial Sequence
  ENSG00000072958_82 (sequence is synthesized)
ggcgaaaaagtggcacacgcctgtaaatcccagctactcaggaggctgaggcccaagaatggcttgaaccctggaggcagagg

SEQ ID NO: 62530 - DNA, 120 bp, Artificial Sequence
  ENSG00000072958_83 (sequence is synthesized)
gccactgcactccagcctgggcaacgaaacgagagtctgtctccaaataaataattagagaatatttttcaatctggatgcaggtgacatgggtgtgctctcgagaatccatcaagcatt

SEQ ID NO: 62531 - DNA, 120 bp, Artificial Sequence
  ENSG00000072958_84 (sequence is synthesized)
atgggtgtgctctcgagaatccatcaagcattgatgatttgcacactcttttgtgtatatgttacacttcagcaaaaacattcacaaaggggaaaaaggcaaaagatacttaaagcagcc

SEQ ID NO: 62532 - DNA, 120 bp, Artificial Sequence
  ENSG00000072958_85 (sequence is synthesized)
agaggtaaagacacatcaccttcagacatgacaaccagacagacagacagctggcttttcaaaggaacccagaaaacagttgggtgacattttcaacatgctaaaagaaaaccactaacc

SEQ ID NO: 62533 - DNA, 120 bp, Artificial Sequence
  ENSG00000072958_86 (sequence is synthesized)
caaatcagagacccagcaaaagtatttcaagaatgaggttacagtaaaaacattttgcagacaaataacgaaagagtttgccagcagcaggctaacactaaagaaaattgtaaacagtgt

SEQ ID NO: 62534 - DNA, 120 bp, Artificial Sequence
  ENSG00000072958_87 (sequence is synthesized)
actcacatcaggcacaaggaaagtgatctcagacggaagggcatgatgcaagaagaaataaaagcaaagaagtagaaaatacatgagaaaatctagacaaagattgcataaacagtttct

SEQ ID NO: 62535 - DNA, 120 bp, Artificial Sequence
  ENSG00000072958_88 (sequence is synthesized)
ggagtttttttaagtgatagaattatacaacaggaaaaaaagtctgcagggagtaaactgagttaaaatgttccaagttaatgactgtctgggaggagaataaataacatggatacactt

SEQ ID NO: 62536 - DNA, 64 bp, Artificial Sequence
  ENSG00000072958_89 (sequence is synthesized)
gcatgcgccaccaggcctgcctaactttgtatttttggtagaggcggggtttctccatgttggt

SEQ ID NO: 62537 - DNA, 120 bp, Artificial Sequence
  ENSG00000072958_90 (sequence is synthesized)
gcccagccaaatctgcattttgataagtatgcattttactatctaagggagctaaaacatttttattattttagcactgtaactttgcttttcttctttgttttgtttttttgagacaga

SEQ ID NO: 62538 - DNA, 84 bp, Artificial Sequence
  ENSG00000072958_91 (sequence is synthesized)
gcctcctgagtagccaatgtaattttatagagttgtggtttcaccatattggccaagctggtctagaactcctggcctcaagtg

SEQ ID NO: 62539 - DNA, 120 bp, Artificial Sequence
  ENSG00000072958_92 (sequence is synthesized)
ggggagaccagaattccacccagaatgacctctctgttcctaggagtgtgacagcatttgggggggaaaatagcgtagagttggaatttttaaaattcagtttgacaaaatgacttttag

SEQ ID NO: 62540 - DNA, 120 bp, Artificial Sequence
  ENSG00000072958_93 (sequence is synthesized)
ctggagcattaagtccctttacatttaatgtaataactgatattacatttaagtataaatttaaatctaccgtcttactttgttttctatttttgtcctttctatgttctcttttatgtc

SEQ ID NO: 62541 - DNA, 120 bp, Artificial Sequence
  ENSG00000072958_94 (sequence is synthesized)
ctctctggatttattacagattgtttgtggcttttaaaaaaagtcattgcttgaatgatgagagcttatatttaaaaaggcagggggctaaaataaataaataatttaaaaaataaaaat

SEQ ID NO: 62542 - DNA, 120 bp, Artificial Sequence
  ENSG00000072958_95 (sequence is synthesized)
cctgggcctcaacgacaaggtcctctttgacaacacgggccgtgagtacccttgccaagggccctgcccatgaggatggcctcaccaggcacacacattacagcctagggcagggttggg

SEQ ID NO: 62543 - DNA, 120 bp, Artificial Sequence
  ENSG00000072958_96 (sequence is synthesized)
ccaggcggaggaacgagctggtttcaagcacttggttgagcagcacttcacactgcttgagacagctgtgtagagtattcatccttccctggacatagaaggtgcaggggagtgaagatc

SEQ ID NO: 62544 - DNA, 120 bp, Artificial Sequence
  ENSG00000072958_97 (sequence is synthesized)
ttatgagccccatcctggtgtgaggcagagaggccggtagacctcacctgagagccccatcctgtttctgggtaaccgggcgggggtcttaagtgggtaatccccgccctgttgctacgt

SEQ ID NO: 62545 - DNA, 120 bp, Artificial Sequence
  ENSG00000072958_98 (sequence is synthesized)
gtccagacaaatccctttcacccccctgaggcctgtgctcatcctgtcgtcatggcctcccctgccagccccaggctgccccagcaggaaagattaaggggggaccaacagggcgggagc

SEQ ID NO: 62546 - DNA, 120 bp, Artificial Sequence
  ENSG00000072958_99 (sequence is synthesized)
tgcaggagtgagtgggcaggggtggggcctggggccaggcctgggcggtgtcatgacatcgacgtcatcaggtgtggaaacagaaggggcaaatttgtgttcatgttgtcccccacctgc

SEQ ID NO: 62547 - DNA, 120 bp, Artificial Sequence
  ENSG00000072958_100 (sequence is synthesized)
aagcagccccaggtgaaccagaggctgccttttctggagctgctgaaatccaagggctattttcaagtcggtcagaacctgccctgtaccccccacccaaccctgccgaaatgtcaaggc

SEQ ID NO: 62548 - DNA, 120 bp, Artificial Sequence
  ENSG00000072958_101 (sequence is synthesized)
accgtcgctgccgccgccaccgccctcggccgctgccgaggcctcctgcagccatcatgtccgccagcgccgtctacgtgctggacctgaagggcaaggctatgaaagagagagaccagg

SEQ ID NO: 62549 - DNA, 120 bp, Artificial Sequence
  ENSG00000073008_0 (sequence is synthesized)
agtcacttgtctggagcttgaagaagtgggtattccccttcccaccccaggcactggaggagcggccccccggggattccaggacctgagctccgggagctggactcgcagcgaccgcgg

SEQ ID NO: 62550 - DNA, 120 bp, Artificial Sequence
  ENSG00000073008_1 (sequence is synthesized)
cagagcgagcgggcgccgggaagcgaggagacgcccgcgggaggcccagctgctcggagcaactggcatggcccgagccatggccgccgcgtggccgctgctgctggtggcgctactggt

SEQ ID NO: 62551 - DNA, 120 bp, Artificial Sequence
  ENSG00000073008_2 (sequence is synthesized)
gctgtcctggccacccccaggaaccggggacgtcgtcgtgcaggcgcccacccaggtgcccggcttcttgggcgactccgtgacgctgccctgctacctacaggtgcccaacatggaggt

SEQ ID NO: 62552 - DNA, 120 bp, Artificial Sequence
  ENSG00000073008_3 (sequence is synthesized)
gacgcatgtgtcacagctgacttgggcgcggcatggtgaatctggcagcatggccgtcttccaccaaacgcagggccccagctattcggagtccaaacggctggaattcgtggcagccag

SEQ ID NO: 62553 - DNA, 120 bp, Artificial Sequence
  ENSG00000073008_4 (sequence is synthesized)
actgggcgcggagctgcggaatgcctcgctgaggatgttcgggttgcgcgtagaggatgaaggcaactacacctgcctgttcgtcacgttcccgcagggcagcaggagcgtggatatctg

SEQ ID NO: 62554 - DNA, 120 bp, Artificial Sequence
  ENSG00000073008_5 (sequence is synthesized)
gctccgagtgcttgccaagccccagaacacagctgaggttcagaaggtccagctcactggagagccagtgcccatggcccgctgcgtctccacagggggtcgcccgccagcccaaatcac

SEQ ID NO: 62555 - DNA, 120 bp, Artificial Sequence
  ENSG00000073008_6 (sequence is synthesized)
ctggcactcagacctgggcgggatgcccaatacgagccaggtgccagggttcctgtctggcacagtcactgtcaccagcctctggatattggtgccctcaagccaggtggacggcaagaa

SEQ ID NO: 62556 - DNA, 120 bp, Artificial Sequence
  ENSG00000073008_7 (sequence is synthesized)
tgtgacctgcaaggtggagcacgagagctttgagaagcctcagctgctgactgtgaacctcaccgtgtactaccccccagaggtatccatctctggctatgataacaactggtaccttgg

SEQ ID NO: 62557 - DNA, 120 bp, Artificial Sequence
  ENSG00000073008_8 (sequence is synthesized)
ccagaatgaggccaccctgacctgcgatgctcgcagcaacccagagcccacaggctataattggagcacgaccatgggtcccctgccaccctttgctgtggcccagggcgcccagctcct

SEQ ID NO: 62558 - DNA, 120 bp, Artificial Sequence
  ENSG00000073008_9 (sequence is synthesized)
gatccgtcctgtggacaaaccaatcaacacaactttaatctgcaacgtcaccaatgccctaggagctcgccaggcagaactgaccgtccaggtcaaagagggacctcccagtgagcactc

SEQ ID NO: 62559 - DNA, 120 bp, Artificial Sequence
  ENSG00000073008_10 (sequence is synthesized)
aggcatgtcccgtaacgccatcatcttcctggttctgggaatcctggtttttctgatcctgctggggatcgggatttatttctattggtccaaatgttcccgtgaggtcctttggcactg

SEQ ID NO: 62560 - DNA, 120 bp, Artificial Sequence
  ENSG00000073008_11 (sequence is synthesized)
tcatctgtgtccctcgagtacagagcatgccagcgcctcagctaatgggcatgtctcctattcagctgtgagcagagagaacagctcttcccaggatccacagacagagggcacaaggtg

SEQ ID NO: 62561 - DNA, 120 bp, Artificial Sequence
  ENSG00000073008_12 (sequence is synthesized)
acagcgtcgggactgagaggggagagagactggagctggcaaggacgtgggcctccagagttggacccgaccccaatggatgaagaccccctccaaagagaccagcctccctccctgtgc

SEQ ID NO: 62562 - DNA, 120 bp, Artificial Sequence
  ENSG00000073008_13 (sequence is synthesized)
cagacctcaaaacgacgggggcaggtgcaagttcataggtctccaagaccaccctcctttcatttgctagaaggactcactagactcaggaaagctgttaggctcacagttacagtttat

SEQ ID NO: 62563 - DNA, 120 bp, Artificial Sequence
  ENSG00000073008_14 (sequence is synthesized)
tacagtaaaaggacagagattaagatcagcaaagggaggaggtgcacagcacacgttccacgacagatgaggcgacggcttccatctgccctctcccagtggagccatataggcagcacc

SEQ ID NO: 62564 - DNA, 120 bp, Artificial Sequence
  ENSG00000073008_15 (sequence is synthesized)
tgattctcacagcaacatgtgacaacatgcaagaagtactgccaatactgccaaccagagcagctcactcgagatctttgtgtccagagttttttgtttgtcttgagacagggtctggct

SEQ ID NO: 62565 - DNA, 120 bp, Artificial Sequence
  ENSG00000073008_16 (sequence is synthesized)
tttgtttgtcttgagacagggtctggctctgttggcagactagagtacagtggtgagatcacagttcattgcagccttgacttctcaacgccaagtcatcctcccacctcagcctcctga

SEQ ID NO: 62566 - DNA, 84 bp, Artificial Sequence
  ENSG00000073008_17 (sequence is synthesized)
tccaagtgatacttctgccttggcctcccaaagtgctgaattaagcagctcaccatccacacggctgacctcatacatcaagcc

SEQ ID NO: 62567 - DNA, 120 bp, Artificial Sequence
  ENSG00000073008_18 (sequence is synthesized)
gcagctcaccatccacacggctgacctcatacatcaagccaataccgtgtggcccaagacccccaccataaatcacatcattagcatgaaccacccagagtggcccaagactccaagatc

SEQ ID NO: 62568 - DNA, 120 bp, Artificial Sequence
  ENSG00000073008_19 (sequence is synthesized)
agctaccaggcaggatattccaagggcttagagatgaatgcccaggagctgaggataaagggcccgatctttctttgggcaaggttaagcctttactgcatagcagaccacacagaaggg

SEQ ID NO: 62569 - DNA, 120 bp, Artificial Sequence
  ENSG00000073008_20 (sequence is synthesized)
tgtgggccaccagagaattttggtaaaaatttggcctctggccttgagcttctaaatctctgtatccgtcagatctctgtggttacaagaaacagccactgaccctggtcaccagaggct

SEQ ID NO: 62570 - DNA, 120 bp, Artificial Sequence
  ENSG00000073008_21 (sequence is synthesized)
gcaattcaggccgcaagcagctgcctggggggtgtccaaggagcagagaaaactactagatgtgaacttgaagaaggttgtcagctgcagccactttctgccagcatctgcagccacttt

SEQ ID NO: 62571 - DNA, 120 bp, Artificial Sequence
  ENSG00000073008_22 (sequence is synthesized)
ctgccagcatctgcagccagcaagctgggactggcaggaaataacccacaaaagaagcaaatgcaatttccaacacaagggggaagggatgcagggggaggcagcgctgcagttgctcag

SEQ ID NO: 62572 - DNA, 120 bp, Artificial Sequence
  ENSG00000073008_23 (sequence is synthesized)
gacacgctcctataggaccaagatggatgcgacccaagacccaggaggcccagctgctcagtgcaactgacaagttaaaaaggtctatgatcttgagggcagacagcagaattcctctta

SEQ ID NO: 62573 - DNA, 120 bp, Artificial Sequence
  ENSG00000073008_24 (sequence is synthesized)
gagagaagaccttgggccaagatgctaaatgggaatgcaaagcttgagctgctctgcaagagaaaataagcaggacagaggatttgctctggacagagatggaagagccgggaacagaga

SEQ ID NO: 62574 - DNA, 120 bp, Artificial Sequence
  ENSG00000073008_25 (sequence is synthesized)
agtgtggggaagagataggaaccagcaggatggcaggggcaaagggctcaagggtgaggaggccagtgggaccccacagagttggggagataaaggaacattggttgctttggtggcacg

SEQ ID NO: 62575 - DNA, 120 bp, Artificial Sequence
  ENSG00000073008_26 (sequence is synthesized)
taagctccttgtctgtctccagcacccagaatctcattaaagcttatttattgtacctccagcggctgtgtgcaatggggtcttttgtggaaatcaaggagcagacaggtttcatgtgta

SEQ ID NO: 62576 - DNA, 120 bp, Artificial Sequence
  ENSG00000073008_27 (sequence is synthesized)
ctgtcaccacgtgggatggaaccagaggcatggaagcaagacgctaaatgaagagggccataagggctgggattcccaggcaccttaggaacagcttgtctttttttttttcctctccaa

SEQ ID NO: 62577 - DNA, 87 bp, Artificial Sequence
  ENSG00000073008_28 (sequence is synthesized)
caccttaggaacagcttgtctttttttttttcctctccaaaaaaaatgtttaagggacggtgtctcatagctcattgcagcctctaa

SEQ ID NO: 62578 - DNA, 120 bp, Artificial Sequence
  ENSG00000073008_29 (sequence is synthesized)
tagctgtgaccacagctgcccctcaccatgctaagctaatttttttaattagatagtacataaacgtcccaaaattagaagataaaaagacatgagggatccattctaatttgtgtttgg

SEQ ID NO: 62579 - DNA, 120 bp, Artificial Sequence
  ENSG00000073008_30 (sequence is synthesized)
agtgtaatggtccagctccattcttctgcacatggatatccagttttacacaacactgtgaatgtaatgaatgccactgaatcatacactcaaaaatagctaaaatggcaaattgtctgt

SEQ ID NO: 62580 - DNA, 120 bp, Artificial Sequence
  ENSG00000073008_31 (sequence is synthesized)
ctcaaaaatagctaaaatggcaaattgtctgttatctctttttaaccaccatttttgaaaattaattataccaaaaaaccattgaatagtgcactttatttatttatttatttgtttatt

SEQ ID NO: 62581 - DNA, 84 bp, Artificial Sequence
  ENSG00000073008_32 (sequence is synthesized)
ctggagtgcagtggcgtgatcatggctcattgcagcctcgacctgctgggctcgggctatccttggcgccaccccacctggcta

SEQ ID NO: 62582 - DNA, 120 bp, Artificial Sequence
  ENSG00000073008_33 (sequence is synthesized)
cccacctggctaaatctctttttaacttttgtagagataggcatctcgctatgttgcctaggctgggctggaactcctgggctcaagtgctcctcctgccttggcctcccaaagcgctag

SEQ ID NO: 62583 - DNA, 120 bp, Artificial Sequence
  ENSG00000073008_34 (sequence is synthesized)
gattacagatgtgagccaccgcgcccaccctgaaccttactttttttgctcagtttctggtaattcagagaatgcctcctgagttgttctacacccacctcatattccatgggagggctg

SEQ ID NO: 62584 - DNA, 120 bp, Artificial Sequence
  ENSG00000073008_35 (sequence is synthesized)
tacagggcttttttaacgaggcctctaaggacaggcatttgtatcctttccagcctttcactattacaatgttgtagtgaataactttacacactgtcatttattttacttttttttttt

SEQ ID NO: 62585 - DNA, 120 bp, Artificial Sequence
  ENSG00000073008_36 (sequence is synthesized)
tttattttagagaaaggaatcttgccatcttgcccaggctggtctcaaattcctgggcccaaacaatcctcccgccttggcctcctaaagtactgggatttataggcataagccaccgtg

SEQ ID NO: 62586 - DNA, 120 bp, Artificial Sequence
  ENSG00000073008_37 (sequence is synthesized)
cctggccaatgcacactgtcatttagctcatgttaacacctgagtgtaggacacactcctggaggtggaattgctgggccaaagagtatgtttcttgtcattgtgatagatattgacaaa

SEQ ID NO: 62587 - DNA, 120 bp, Artificial Sequence
  ENSG00000073008_38 (sequence is synthesized)
tgaaccctcacagaagttgtgctgagttctgttcccaccagcgacgtaggcgatgacctttttctggagggagggggcatccttggagtccacagagccaggaatggagagtgggcccag

SEQ ID NO: 62588 - DNA, 120 bp, Artificial Sequence
  ENSG00000073008_39 (sequence is synthesized)
aattttggtataggtgttgtataaacttatagtaaggttaagaaaaccgcaactatccttatcagagacttggcggggggcagggtatgatggagatcataaggaggctaaaacactcca

SEQ ID NO: 62589 - DNA, 120 bp, Artificial Sequence
  ENSG00000073008_40 (sequence is synthesized)
caccctccctctgcattgctcctgcacgggagtcgggaatcttttcaggttgatacgatctcaccttgaggagctgtgaggtcccagaagcctctgggttgcagattgcttggggtgaaa

SEQ ID NO: 62590 - DNA, 79 bp, Artificial Sequence
  ENSG00000073008_41 (sequence is synthesized)
gtcccagaagcctctgggttgcagattgcttggggtgaaaatgtctgtgctactgaaatctaactttttacaaaaaatt

SEQ ID NO: 62591 - DNA, 78 bp, Artificial Sequence
  ENSG00000073008_42 (sequence is synthesized)
actcagaaggctgaggtgggagaatcccttgaacccgggaagtggaggctggagtaaaccatgatcgagtcaaaaaaa

SEQ ID NO: 62592 - DNA, 120 bp, Artificial Sequence
  ENSG00000073008_43 (sequence is synthesized)
gggcacagcatgcaggcccagttctgctgctctgctgtttgttctgctttcctccacatattggcatcaccctctggtgccaagatggctgctgcattccaggcatcacatccagactca

SEQ ID NO: 62593 - DNA, 120 bp, Artificial Sequence
  ENSG00000073008_44 (sequence is synthesized)
gacccagagaagctgcccatccctacctgggtgagcctttgtaggaacgagaaaccgcatccagcagcagaaacctcacccagcagcgtcttttccggtctcattcaccagcgccgccca

SEQ ID NO: 62594 - DNA, 120 bp, Artificial Sequence
  ENSG00000073008_45 (sequence is synthesized)
ccgctcaaccaatccctggccaaaagaatgggaccgcctggaaggctggaccaaacaggacctgccctctggggctggggagaggcccagatgaaggctgcaggacaggatggactccta

SEQ ID NO: 62595 - DNA, 120 bp, Artificial Sequence
  ENSG00000073008_46 (sequence is synthesized)
gacctctgttaccagcagtgactacctctgtctgggtggttggaacatgtttgaattttattctaagtactgtctacaagttctgcaataaaccttgactcttcttttaataatgcaaaa

SEQ ID NO: 62596 - DNA, 120 bp, Artificial Sequence
  ENSG00000073008_47 (sequence is synthesized)
actgaatcctcaccccactgccatgaggtttcccccatttgactgatgagggtgcagagccagggagccttgttcactggttcattgattacatttacaaatattatttacagagtggga

SEQ ID NO: 62597 - DNA, 120 bp, Artificial Sequence
  ENSG00000073050_0 (sequence is synthesized)
tcccttggccccaggagacaggggttgcagaaagccgagatcgtgccactgcactccatcctgggtgagagagcaagaccctgtctcaacaaaaaatttttaaaaaataaaataaataat

SEQ ID NO: 62598 - DNA, 120 bp, Artificial Sequence
  ENSG00000073050_1 (sequence is synthesized)
aatacagcaaaaagatttgctttctcggcttcagtgtgggcggtaactccatcgtgcaatgagaaaggcgaatttcttccagacaccaatcccggaggtcgcttctgttgctaggctccc

SEQ ID NO: 62599 - DNA, 120 bp, Artificial Sequence
  ENSG00000073050_2 (sequence is synthesized)
agaaagcagggttcggacgtcattgggaggcgaggctagagcggggttgtgtgtggcggagggaggcggggctggaggaaacgctcgttgctaaggaacgcagcgctcttcccgctctgg

SEQ ID NO: 62600 - DNA, 120 bp, Artificial Sequence
  ENSG00000073050_3 (sequence is synthesized)
agaggcgcgactgggcttgcgcagtgtcgacgccggcgccggcgcgccggggtttgaaaggcccgagcctcgcgcgcttgcgcactttagccagcgcagggcgcaccccgccccctccca

SEQ ID NO: 62601 - DNA, 120 bp, Artificial Sequence
  ENSG00000073050_4 (sequence is synthesized)
ctctccctgcccctcggaccccatactctacctcatccttctggccaggcgaagcccacgacgttgacatgccggagatccgcctccgccatgtcgtgtcctgcagcagccaggactcga

SEQ ID NO: 62602 - DNA, 120 bp, Artificial Sequence
  ENSG00000073050_5 (sequence is synthesized)
ctcactgtgcagaaaatcttctcaaggcagacacttaccgaaaatggcgggcagccaaggcaggcgagaagaccatctctgtggtcctacagttggagaaggaggagcagatacacagtg

SEQ ID NO: 62603 - DNA, 120 bp, Artificial Sequence
  ENSG00000073050_6 (sequence is synthesized)
tggacattgggaatgatggctcagctttcgtggaggtgctggtgggcagttcagctggaggcgctggggagcaagactatgaggtccttctggtcacctcatctttcatgtccccttccg

SEQ ID NO: 62604 - DNA, 120 bp, Artificial Sequence
  ENSG00000073050_7 (sequence is synthesized)
agagccgcagtggctcaaaccccaaccgcgttcgcatgtttgggcctgacaagctggtccgggcagccgccgagaagcgctgggaccgggtcaaaattgtttgcagccagccctacagca

SEQ ID NO: 62605 - DNA, 120 bp, Artificial Sequence
  ENSG00000073050_8 (sequence is synthesized)
aggactccccctttggcttgagttttgtacggtttcatagccccccagacaaagatgaggcagaggccccgtcccagaaggtgacagtgaccaagcttggccagttccgtgtgaaggagg

SEQ ID NO: 62606 - DNA, 120 bp, Artificial Sequence
  ENSG00000073050_9 (sequence is synthesized)
aggatgagagcgccaactctctgaggccgggggctctcttcttcagccggatcaacaagacatccccagtcacagccagcgacccagcaggacctagctatgcagctgctaccctccagg

SEQ ID NO: 62607 - DNA, 120 bp, Artificial Sequence
  ENSG00000073050_10 (sequence is synthesized)
cttctagtgctgcctcctcagcctctccagtctccagggccataggcagcacctccaagccccaggagtctcccaaagggaagaggaagttggatttgaaccaagaagaaaagaagaccc

SEQ ID NO: 62608 - DNA, 120 bp, Artificial Sequence
  ENSG00000073050_11 (sequence is synthesized)
gacctaaattgccagctccaactcgtaccccagccacagccccagtccctgcccgagcacagggggcagtgacaggcaaaccccgaggagaaggcaccgagcccagacgaccccgagctg

SEQ ID NO: 62609 - DNA, 120 bp, Artificial Sequence
  ENSG00000073050_12 (sequence is synthesized)
gcccagaggagctggggaagatccttcagggtgtggtagtggtgctgagtggcttccagaaccccttccgctccgagctgcgagataaggccctagagcttggggccaagtatcggccag

SEQ ID NO: 62610 - DNA, 120 bp, Artificial Sequence
  ENSG00000073050_13 (sequence is synthesized)
actggacccgggacagcacgcacctcatctgtgcctttgccaacacccccaagtacagccaggtcctaggcctgggaggccgcatcgtgcgtaaggagtgggtgctggactgtcaccgca

SEQ ID NO: 62611 - DNA, 120 bp, Artificial Sequence
  ENSG00000073050_14 (sequence is synthesized)
tgcgtcggcggctgccctcccagaggtacctcatggcagggccaggttccagcagtgaggaggatgaggcctctcacagcggtggcagcggagatgaagcccccaagcttcctcagaagc

SEQ ID NO: 62612 - DNA, 120 bp, Artificial Sequence
  ENSG00000073050_15 (sequence is synthesized)
aaccccagaccaaaaccaagcccactcaggcagctggacccagctcaccccagaagcccccaacccctgaagagaccaaagcagcctcaccagtgctccaggaagatatagacattgagg

SEQ ID NO: 62613 - DNA, 120 bp, Artificial Sequence
  ENSG00000073050_16 (sequence is synthesized)
gggtacagtcagaaggacaggacaatggggcggaagattctggggacacagaggatgagctgaggagggtggcagagcagaaggaacacagactgccccctggccaggaggagaatgggg

SEQ ID NO: 62614 - DNA, 120 bp, Artificial Sequence
  ENSG00000073050_17 (sequence is synthesized)
aagacccgtatgcaggctccacggatgagaacacggacagtgaggaacaccaggagcctcctgatctgccagtccctgagctcccagatttcttccagggcaagcacttctttctttacg

SEQ ID NO: 62615 - DNA, 120 bp, Artificial Sequence
  ENSG00000073050_18 (sequence is synthesized)
gggagttccctggggacgagcggcggaaactcatccgatacgtcacagccttcaatggggagctcgaggactatatgagtgaccgggttcagtttgtgatcacagcacaggaatgggatc

SEQ ID NO: 62616 - DNA, 120 bp, Artificial Sequence
  ENSG00000073050_19 (sequence is synthesized)
ccagctttgaggaggccctgatggacaacccctccctggcattcgttcgtccccgatggatctacagttgcaatgagaagcagaagttacttcctcaccagctctatggggtggtgccgc

SEQ ID NO: 62617 - DNA, 120 bp, Artificial Sequence
  ENSG00000073050_20 (sequence is synthesized)
acacacacacacacacacacacgatgcatttaataaagatgagttggttctcatccaagagtctcccaaaactctaagaggctccctgggacctggggaagaatgctgggcacctccgtc

SEQ ID NO: 62618 - DNA, 120 bp, Artificial Sequence
  ENSG00000073050_21 (sequence is synthesized)
cctgggacctggggaagaatgctgggcacctccgtcagagatctggtagagaaggaactctttgtctcttctgcttggccccttatccctgtgttggcaagaggcagggaactgggaatc

SEQ ID NO: 62619 - DNA, 120 bp, Artificial Sequence
  ENSG00000073050_22 (sequence is synthesized)
tgaccctcagcactgcccctcaactttttctggccctctgagccacacctgtatcttggctgtccctttgtggctggaggcctgggtacccatgaggcttgtctctctcctgaagcctca

SEQ ID NO: 62620 - DNA, 120 bp, Artificial Sequence
  ENSG00000073050_23 (sequence is synthesized)
tccctgtgcccctcagcagagaggaaaggagacccaaggattaagtccaggatgaccacaggaatcagtgtgtggtcctgggcaggtggcatctactttctgggttccagtttcctcagc

SEQ ID NO: 62621 - DNA, 120 bp, Artificial Sequence
  ENSG00000073050_24 (sequence is synthesized)
tggaacaaaatgaatcattgccacgtactctgcctcctgcagccagtgggctcagggctggaaggtgtccaggaaggtcgtctaagccaatcaactccactttaaagaaggggaaactgg

SEQ ID NO: 62622 - DNA, 120 bp, Artificial Sequence
  ENSG00000073060_0 (sequence is synthesized)
cctgcgtgcgctgccgtcccggatccaccgtgcctctgcggcctgcgtgcccggagtccccgcctgtgtcgtctctgtcgccgtccccgtctcctgccaggcgcggagccctgcgagccg

SEQ ID NO: 62623 - DNA, 120 bp, Artificial Sequence
  ENSG00000073060_1 (sequence is synthesized)
cgggtgggccccaggcgcgcagacatgggctgctccgccaaagcgcgctgggctgccggggcgctgggcgtcgcggggctactgtgcgctgtgctgggcgctgtcatgatcgtgatggtg

SEQ ID NO: 62624 - DNA, 120 bp, Artificial Sequence
  ENSG00000073060_2 (sequence is synthesized)
ccgtcgctcatcaagcagcaggtccttaagaacgtgcgcatcgaccccagtagcctgtccttcaacatgtggaaggagatccctatccccttctatctctccgtctacttctttgacgtc

SEQ ID NO: 62625 - DNA, 120 bp, Artificial Sequence
  ENSG00000073060_3 (sequence is synthesized)
atgaaccccagcgagatcctgaagggcgagaagccgcaggtgcgggagcgcgggccctacgtgtacagggagttcaggcacaaaagcaacatcaccttcaacaacaacgacaccgtgtcc

SEQ ID NO: 62626 - DNA, 120 bp, Artificial Sequence
  ENSG00000073060_4 (sequence is synthesized)
ttcctcgagtaccgcaccttccagttccagccctccaagtcccacggctcggagagcgactacatcgtcatgcccaacatcctggtcttgggtgcggcggtgatgatggagaataagccc

SEQ ID NO: 62627 - DNA, 120 bp, Artificial Sequence
  ENSG00000073060_5 (sequence is synthesized)
atgaccctgaagctcatcatgaccttggcattcaccaccctcggcgaacgtgccttcatgaaccgcactgtgggtgagatcatgtggggctacaaggacccccttgtgaatctcatcaac

SEQ ID NO: 62628 - DNA, 120 bp, Artificial Sequence
  ENSG00000073060_6 (sequence is synthesized)
aagtactttccaggcatgttccccttcaaggacaagttcggattatttgctgagctcaacaactccgactctgggctcttcacggtgttcacgggggtccagaacatcagcaggatccac

SEQ ID NO: 62629 - DNA, 120 bp, Artificial Sequence
  ENSG00000073060_7 (sequence is synthesized)
ctcgtggacaagtggaacgggctgagcaaggttgacttctggcattccgatcagtgcaacatgatcaatggaacttctgggcaaatgtggccgcccttcatgactcctgagtcctcgctg

SEQ ID NO: 62630 - DNA, 120 bp, Artificial Sequence
  ENSG00000073060_8 (sequence is synthesized)
gagttctacagcccggaggcctgccgatccatgaagctaatgtacaaggagtcaggggtgtttgaaggcatccccacctatcgcttcgtggctcccaaaaccctgtttgccaacgggtcc

SEQ ID NO: 62631 - DNA, 120 bp, Artificial Sequence
  ENSG00000073060_9 (sequence is synthesized)
atctacccacccaacgaaggcttctgcccgtgcctggagtctggaattcagaacgtcagcacctgcaggttcagtgcccccttgtttctctcccatcctcacttcctcaacgctgacccg

SEQ ID NO: 62632 - DNA, 120 bp, Artificial Sequence
  ENSG00000073060_10 (sequence is synthesized)
gttctggcagaagcggtgactggcctgcaccctaaccaggaggcacactccttgttcctggacatccacccggtcacgggaatccccatgaactgctctgtgaaactgcagctgagcctc

SEQ ID NO: 62633 - DNA, 120 bp, Artificial Sequence
  ENSG00000073060_11 (sequence is synthesized)
tacatgaaatctgtcgcaggcattggacaaactgggaagattgagcctgtggtcctgccgctgctctggtttgcagagagcggggccatggagggggagactcttcacacattctacact

SEQ ID NO: 62634 - DNA, 120 bp, Artificial Sequence
  ENSG00000073060_12 (sequence is synthesized)
cagctggtgttgatgcccaaggtgatgcactatgcccagtacgtcctcctggcgctgggctgcgtcctgctgctggtccctgtcatctgccaaatccggagccaagagaaatgctattta

SEQ ID NO: 62635 - DNA, 120 bp, Artificial Sequence
  ENSG00000073060_13 (sequence is synthesized)
ttttggagtagtagtaaaaagggctcaaaggataaggaggccattcaggcctattctgaatccctgatgacatcagctcccaagggctctgtgctgcaggaagcaaaactgtagggtcct

SEQ ID NO: 62636 - DNA, 120 bp, Artificial Sequence
  ENSG00000073060_14 (sequence is synthesized)
ccccccagcccctacaccccgcttctcccggactctcccagcggacagccccccagccccacagcctgagcctcccagctgccatgtgcctgttgcacacctgcacacacgccctggcac

SEQ ID NO: 62637 - DNA, 120 bp, Artificial Sequence
  ENSG00000073060_15 (sequence is synthesized)
acatacacacatgcgtgcaggcttgtgcagacactcagggatggagctgctgctgaagggacttgtagggagaggctcgtcaacaagcactgttctggaaccttctctccacgtggccca

SEQ ID NO: 62638 - DNA, 120 bp, Artificial Sequence
  ENSG00000073060_16 (sequence is synthesized)
caggcctgaccacaggggctgtgggtcctgcgtccccttcctcgggtgagcctggcctgtcccgttcagccgttgggcccaggcttcctcccctccaaggtgaaacactgcagtcccggt

SEQ ID NO: 62639 - DNA, 120 bp, Artificial Sequence
  ENSG00000073060_17 (sequence is synthesized)
gtggtggctccccatgcaggacgggccaggctgggagtgccgccttcctgtgccaaattcagtggggactcagtgcccaggccctggccacgagctttggccttggtctacctgccaggc

SEQ ID NO: 62640 - DNA, 120 bp, Artificial Sequence
  ENSG00000073060_18 (sequence is synthesized)
caggcaaagcgcctttacacaggcctcggaaaacaatggagtgagcacaagatgccctgtgcagctgcccgagggtctccgcccaccccggccggactttgatccccccgaagtcttcac

SEQ ID NO: 62641 - DNA, 120 bp, Artificial Sequence
  ENSG00000073060_19 (sequence is synthesized)
aggcactgcatcgggttgtctggcgcccttttcctccagcctaaactgacatcatcctatggactgagccggccactctctggccgaagtggccgcaggctgtgcccccgagctgccccc

SEQ ID NO: 62642 - DNA, 120 bp, Artificial Sequence
  ENSG00000073060_20 (sequence is synthesized)
accccctcacagggtccctcagattataggtgcccaggctgaggtgaagaggcctgggggccctgccttccgggcgctcctggaccctggggcaaacctgtgacccttttctactggaat

SEQ ID NO: 62643 - DNA, 120 bp, Artificial Sequence
  ENSG00000073060_21 (sequence is synthesized)
agaaatgagttttatcatctttgaaaaataattcactcttgaagtaataaacgtttaaaaaaatgggatgcctgcctctgtgacagccttgtttgctgaggtcgtgggggtgggggcctc

SEQ ID NO: 62644 - DNA, 120 bp, Artificial Sequence
  ENSG00000073060_22 (sequence is synthesized)
tgggaagttccgggctcctcttctcttggtcaatagctcctttctggtggctgccaagagcgtctctcccagggccgggctgctggcttaccttcctgttgttttcaaatttcaaccttg

SEQ ID NO: 62645 - DNA, 120 bp, Artificial Sequence
  ENSG00000073060_23 (sequence is synthesized)
tgcaatgttgagtttcatagaaatactgcatgagtacgcccttgtttagaagcagcagggtctgagtcccatcccacagcccccagtgcagacgcttttgccacttttgcatggggcccc

SEQ ID NO: 62646 - DNA, 120 bp, Artificial Sequence
  ENSG00000073060_24 (sequence is synthesized)
ctggatgtgtttctgtgcatttatctacaaatcctggtgcccataggacatgccccgtgttgttctaggcctttgctttctgctcgttacataaatggtgaagaagagaagcgggtaaga

SEQ ID NO: 62647 - DNA, 120 bp, Artificial Sequence
  ENSG00000073060_25 (sequence is synthesized)
gaacagattggagccatctaaaagttctcatcttaagtgtagatcattgcaaaggatggaattttctccgattgtcatcatcgttgatgtttgaatatgagaccatttcatcagtattta

SEQ ID NO: 62648 - DNA, 120 bp, Artificial Sequence
  ENSG00000073060_26 (sequence is synthesized)
agtgtgcccgctgggatctaactaggagaggagagggtattcactgccgaacatttcaaagaatatacgaacaagctcttttatggtcagaaatgttagcccttttccccttaaacttgt

SEQ ID NO: 62649 - DNA, 120 bp, Artificial Sequence
  ENSG00000073060_27 (sequence is synthesized)
atttcctttcttcttccctcctaaaattttatctaaatgatatttatatttgatgcttttaagccttttattaatcactcctatacttgcctgcaacataaatatataagttgaagcaaa

SEQ ID NO: 62650 - DNA, 120 bp, Artificial Sequence
  ENSG00000073060_28 (sequence is synthesized)
ttccaggtggcctggtgctgctgctgctctggagaacacctggaggagaacaaaggcccatgatgaacggttctcagcctagtgtgcatatgagaatcacacagggagtttcaacacaca

SEQ ID NO: 62651 - DNA, 120 bp, Artificial Sequence
  ENSG00000073060_29 (sequence is synthesized)
gggcagcccgggctgacagccattcgcttgcctgctgggggaaaggggcctcagatcggaccctctggccaaccgcagcctggagcccacctccagcagcagtcctgcgtctctgccgga

SEQ ID NO: 62652 - DNA, 120 bp, Artificial Sequence
  ENSG00000073060_30 (sequence is synthesized)
gtgggagcggtcactgctgggggctgcgcagcacgcttgcgtcttttgcatgccgcgttgccactactctgcctgttctggaaggcctgggaccctcccttggagggggcacaggtgggc

SEQ ID NO: 62653 - DNA, 120 bp, Artificial Sequence
  ENSG00000073060_31 (sequence is synthesized)
tttgagtaatgagacctggtacttgcatcatccattcatcaagtcagcacccggggatgccaggttctgttaggggcgaggggacgtacagcagtagaggagacagctgagatccctgct

SEQ ID NO: 62654 - DNA, 120 bp, Artificial Sequence
  ENSG00000073060_32 (sequence is synthesized)
cagggggattgaggggggctggcatcccagccggggagacagatgaaaaccaagtaaatcagcagaaaagataatttcactcatgataggagctgtgaggggttagagccaaatagaaat

SEQ ID NO: 62655 - DNA, 120 bp, Artificial Sequence
  ENSG00000073060_33 (sequence is synthesized)
acagcgtgagccacgtgtgaggttttcagtttaaattttctaatagccacttaacagtcaaaggaaacaggtggaattaattttaatcttatttaacccaaatatatgcaaagtattatc

SEQ ID NO: 62656 - DNA, 120 bp, Artificial Sequence
  ENSG00000073060_34 (sequence is synthesized)
acttcaacatgtaatcagtataaacggcatcaatatttttgcagtgtttttgcatgaagtctttgaaatcctgtgtgtacgatacatgtgcagcaggtctcattttggactggccccgtt

SEQ ID NO: 62657 - DNA, 120 bp, Artificial Sequence
  ENSG00000073060_35 (sequence is synthesized)
tcaagggctcaccaactgaatgcagcttccagactggagagtgcatgtctggagcaagtggggacaaggacagatggagcttcaggaaggcctctctgaagaggtagatagtgagctttg

SEQ ID NO: 62658 - DNA, 120 bp, Artificial Sequence
  ENSG00000073060_36 (sequence is synthesized)
acatggaggccagggaggcactcagcacacagccacatgaggaatgctgcctggagcggccactgcaaaggccctgtggcagggacaggcaaggcacattggacggtcaggtagggccag

SEQ ID NO: 62659 - DNA, 120 bp, Artificial Sequence
  ENSG00000073060_37 (sequence is synthesized)
ggtggctggaggggagtgagggcagggacagaggtaggaggtggtgtctgagagtggacagggcgggccacccagggcctcgtggtgcacagtgagcagtttggaactgattctgggagt

SEQ ID NO: 62660 - DNA, 120 bp, Artificial Sequence
  ENSG00000073060_38 (sequence is synthesized)
gacagaggcattggaggcttttaaagaggggaatcactaggtcagctgctggctggggaatgggccccgggctgggaggggtggaagcctgggcccagcggggaggccccagtgcgtgag

SEQ ID NO: 62661 - DNA, 120 bp, Artificial Sequence
  ENSG00000073060_39 (sequence is synthesized)
atggcttgaacaggatggggcagctgctatcaggagggaacggaagtggggaagagctccagccctgggcttcagacctccagaagcagcaggaagaggggtgataacagtgtccctcct

SEQ ID NO: 62662 - DNA, 120 bp, Artificial Sequence
  ENSG00000073060_40 (sequence is synthesized)
tgcttcggggtcatttatttattcattcatgcattcactgcaaggccctttgcacaggtcaggggatgcagatgaccagaacataagatctgcagcaaagatgggcaaggcaggccttta

SEQ ID NO: 62663 - DNA, 120 bp, Artificial Sequence
  ENSG00000073060_41 (sequence is synthesized)
ggcaagttactacagtcacacgaaggacaggagagctgtgatcacagagctcaaggggcagtggagatgggcgagtggctgccatggcaggggaagggatgctgcccactggcaggtcat

SEQ ID NO: 62664 - DNA, 120 bp, Artificial Sequence
  ENSG00000073060_42 (sequence is synthesized)
caggaaaggctgtttttggatgcatggaccagaaagccactctctgaggtggcccccacctgcatcatcctagggccacaggccgaggccttctgaggggccttggggctgccccgctgc

SEQ ID NO: 62665 - DNA, 120 bp, Artificial Sequence
  ENSG00000073060_43 (sequence is synthesized)
tctgctggtcttggctcctctgcagcacctgcttcctttagcactggtgaatgattcttcctcttcccctgtctcagggaaggcttgcctgcttccatgcttgcatgctgggtgacaata

SEQ ID NO: 62666 - DNA, 120 bp, Artificial Sequence
  ENSG00000073060_44 (sequence is synthesized)
aagcattcctggttcttcaccttggctttcagacctgaaacccgacttcctttcaaaattcctgtcctcggggggaaaaggtttccacaatgtgagatggtagcctggacaccagctgtc

SEQ ID NO: 62667 - DNA, 120 bp, Artificial Sequence
  ENSG00000073060_45 (sequence is synthesized)
atcatgttgctgctctagcgtttgagctcccgatgaacaatgaccattgggtccaaccagcccttttgggagcccccttctctgttactgccccagggggagccagaacccagcagggct

SEQ ID NO: 62668 - DNA, 120 bp, Artificial Sequence
  ENSG00000073060_46 (sequence is synthesized)
gtgactccagcgagcaaaatggaactccctccagtttctagactgaattatgtagggaggacagaaggactcagaacccacactcccagaccatgaataccttcccgtggcagagcatca

SEQ ID NO: 62669 - DNA, 120 bp, Artificial Sequence
  ENSG00000073060_47 (sequence is synthesized)
ccataggtgtccacaagtgacgacgcacagccacatgagggggtccctggggactggctgagggactgggccagaggaggccatgacagcctcatccctctgtctccttctgtctgtctc

SEQ ID NO: 62670 - DNA, 120 bp, Artificial Sequence
  ENSG00000073060_48 (sequence is synthesized)
caaattgtccaccagaatggggacagggaaggagggtcaggaagcacagaaggtctaggctgtggctagggtccctttccctgccgcagcccccaaatcagcatcccaccctcaaatcca

SEQ ID NO: 62671 - DNA, 120 bp, Artificial Sequence
  ENSG00000073060_49 (sequence is synthesized)
gtaagaatgctacgatcggcagtgtggctccctccctgcaggtttcactggaggccacgtaagtgaaatttatcccattatgtgtgttttgatgtagcaggaccttaccagttttttttg

SEQ ID NO: 62672 - DNA, 73 bp, Artificial Sequence
  ENSG00000073060_50 (sequence is synthesized)
tgcaacctccacctcccgggttcaagtgggagcctcagcctcagcctcagcctcagcctcccgagcattgagt

SEQ ID NO: 62673 - DNA, 71 bp, Artificial Sequence
  ENSG00000073060_51 (sequence is synthesized)
cttatcagtttttatgtaatttgtcctgatttaaaaaaaaaaaatcacatgcgggtaaactcaacatattt

SEQ ID NO: 62674 - DNA, 120 bp, Artificial Sequence
  ENSG00000073060_52 (sequence is synthesized)
taaaaaaaaaaaatcacatgcgggtaaactcaacatattttaatttctctttagagaaattttccacttgagccaggtatggtggctcttgcctgtaatctgagctactcgggaggttga

SEQ ID NO: 62675 - DNA, 79 bp, Artificial Sequence
  ENSG00000073060_53 (sequence is synthesized)
tgagccatcctgtctcaaaaattaaaaaaagcagtaattttttcttctcaagtcattcttttaaaataaatcaaaagta

SEQ ID NO: 62676 - DNA, 120 bp, Artificial Sequence
  ENSG00000073060_54 (sequence is synthesized)
ttttcttctcaagtcattcttttaaaataaatcaaaagtattttaacagaacaatctgttcctcgttgattttaaacagccccccagctaagtccactggttgtcggtctccatggccca

SEQ ID NO: 62677 - DNA, 120 bp, Artificial Sequence
  ENSG00000073060_55 (sequence is synthesized)
tctccccaccttgcttcctcgctggcttaaattttcaagtggacgagcccttttcagcttggcttgtccacctcccaggtgtgtttcctgaagatgcttgtacttatgtctaagagcggc

SEQ ID NO: 62678 - DNA, 120 bp, Artificial Sequence
  ENSG00000073060_56 (sequence is synthesized)
agctccccacatctcagccacctgcaatcgttgagggttgttggactctaaacttatgtgcctttcctgtttcctctttgccttttgcaaattgaagaaccgtgtaaaaccatttttatg

SEQ ID NO: 62679 - DNA, 64 bp, Artificial Sequence
  ENSG00000073060_57 (sequence is synthesized)
accacacctagctaatttttgtattttgtagagatggggtttcgccaagtggtgttgggattac

SEQ ID NO: 62680 - DNA, 120 bp, Artificial Sequence
  ENSG00000073060_58 (sequence is synthesized)
ttacaggcgtgagctactgcgcccagcccaaagaatatttttggaaccagcttctctgtgggctccagccatccctggcagacgcctcggcctgcagcctaagaacagttccccctcagg

SEQ ID NO: 62681 - DNA, 120 bp, Artificial Sequence
  ENSG00000073060_59 (sequence is synthesized)
acagttccccctcaggaaagaaactgacagctttgtggttctgcgttgaaggctgccctccctgccaccggaagtgactcccctcagcaaggccaaggtggctcacgtgtcccatcaccc

SEQ ID NO: 62682 - DNA, 120 bp, Artificial Sequence
  ENSG00000073067_0 (sequence is synthesized)
aggggagtggagcctcaccagccacgtcctcatggccctgctgctcttgctgttcctgggcctcctggggctctgggggctgctctgcgcctgcgcccaagacccctccccagctgcccg

SEQ ID NO: 62683 - DNA, 120 bp, Artificial Sequence
  ENSG00000073067_1 (sequence is synthesized)
gtggcccccggggcctcgcccgctgccgctcgtcgggaacctgcacttgctgcgtctgtcgcaacaggaccggtccctgatggagctctcagaacgctacgggccggtgttcaccgtgca

SEQ ID NO: 62684 - DNA, 120 bp, Artificial Sequence
  ENSG00000073067_2 (sequence is synthesized)
cctggggcgccagaagacggtggtgctgacggggttcgaggcggtcaaagaggcgctggcgggccccgggcaggagctggccgaccggcctcccatcgccatcttccagctcatccagcg

SEQ ID NO: 62685 - DNA, 120 bp, Artificial Sequence
  ENSG00000073067_3 (sequence is synthesized)
aggtggaggcatcttcttctcatctggggcgcgctggagggctgcccgccagttcacggtgcgtgccctgcacagcctgggcgtgggccgggagccggtggctgacaagattctgcagga

SEQ ID NO: 62686 - DNA, 120 bp, Artificial Sequence
  ENSG00000073067_4 (sequence is synthesized)
gctgaaatgcctctctgggcagctggatggctacagaggccggcccttcccgctggccctactgggctgggctccctccaatatcaccttcgcgctcctcttcggccgccgatttgacta

SEQ ID NO: 62687 - DNA, 120 bp, Artificial Sequence
  ENSG00000073067_5 (sequence is synthesized)
ccgggaccccgtgtttgtgtccctgctgggtctcatcgatgaggtcatggtcctcttggggtcccctggcctgcagctgttcaacgtctacccatggctcggggccctgctccagctgca

SEQ ID NO: 62688 - DNA, 120 bp, Artificial Sequence
  ENSG00000073067_6 (sequence is synthesized)
ccggcccgtcctgcgcaagatcgaggaggtccgtgccattctgaggaccctcctggaggcgcggaggccccacgtgtgcccgggggaccccgtgtgcagctatgtggacgccctgatcca

SEQ ID NO: 62689 - DNA, 120 bp, Artificial Sequence
  ENSG00000073067_7 (sequence is synthesized)
gcagggacagggggatgaccccgagggcctgtttgctgaggccaacgcggtggcctgcaccctggacatggtcatggccgggacggagacgacctcggccacgctgcagtgggccgcact

SEQ ID NO: 62690 - DNA, 120 bp, Artificial Sequence
  ENSG00000073067_8 (sequence is synthesized)
tctgatgggccggcacccggacgtgcagggccgggtgcaggaggagctagaccgcgtgctgggccctgggcggactccccggctggaggaccagcaggctctgccctacacaagcgccgt

SEQ ID NO: 62691 - DNA, 120 bp, Artificial Sequence
  ENSG00000073067_9 (sequence is synthesized)
gccccgctgcaccgcggccgacacacagctgggcggcttcctgctccccaagggcacgcccgtgattcccctgctgacctcggtgctcctggatgagacacagtggcagaccccaggcca

SEQ ID NO: 62692 - DNA, 120 bp, Artificial Sequence
  ENSG00000073067_10 (sequence is synthesized)
gttcaaccccggccatttcctggacgcgaatgggcactttgtgaagcgggaggccttcctgcctttctctgcaggccgccgcgtctgtgttggggagcgcctggccaggaccgagctctt

SEQ ID NO: 62693 - DNA, 120 bp, Artificial Sequence
  ENSG00000073067_11 (sequence is synthesized)
cctgctgtttgccggcctcctgcagaggtaccgcctgctgcccccgcctggcgtcagtccggcctccctggacaccacgcccgcccgggcttttaccatgaggccgagggcccaggccct

SEQ ID NO: 62694 - DNA, 120 bp, Artificial Sequence
  ENSG00000073067_12 (sequence is synthesized)
gtgtgcggtgcccaggccctaggagctcccccagcccccaggtcctcctgaccactcccctcccagccctgggtcctcccaccctctctcctcccaccccacagctcggactgctctggg

SEQ ID NO: 62695 - DNA, 120 bp, Artificial Sequence
  ENSG00000073067_13 (sequence is synthesized)
agggccctgaggactcccaccctcacccccacccccacagggtcagcaactgcttccggttacacccaggactacccctgcccgaccctgtgggacccccacccctctgatgctgtctgc

SEQ ID NO: 62696 - DNA, 120 bp, Artificial Sequence
  ENSG00000073067_14 (sequence is synthesized)
agctcagtccctgccagcccccaggagcgcctccagggccccgcccactctcccacccctgaagctgcactcccacccacctagctccccccagggccccccagcacctacagctggggc

SEQ ID NO: 62697 - DNA, 120 bp, Artificial Sequence
  ENSG00000073067_15 (sequence is synthesized)
tgcagggagacaacgggtggctgcatccagccagagacaggcgcaggtgggtgtcctcagcgtgcgagccctgcaccccccaggtcctgggactcctgcagaccccactccattcccgct

SEQ ID NO: 62698 - DNA, 120 bp, Artificial Sequence
  ENSG00000073067_16 (sequence is synthesized)
cctggaacacttcctgcagctgtgcctggaggcagtcggcctgcagtgccagactctgagccaagccactggggccatgcgtatgactggtgcagggaggcaaggcccacattctccttc

SEQ ID NO: 62699 - DNA, 120 bp, Artificial Sequence
  ENSG00000073067_17 (sequence is synthesized)
agagacaggcactggcgccagaggcttccttggggcggggggagggcacctcagcccctgaagacaagcagcactgcagtggcaaaaatggaaacactgacccggtgcggtggctcatgc

SEQ ID NO: 62700 - DNA, 120 bp, Artificial Sequence
  ENSG00000073067_18 (sequence is synthesized)
gctgtccccttccgggacacggacagggggtttcctggcagttcctggtcctcccttgagggctaagggtccccccgttctgtggccgcctccagcacatccacccagagtccctgggcg

SEQ ID NO: 62701 - DNA, 120 bp, Artificial Sequence
  ENSG00000073067_19 (sequence is synthesized)
tgaacacagccgctggggacgatcaccgcctgcccagcgtgcagccctggggctgcgtccttatctccgctcctcctgcctcctgcccagctgttcaacgtctacccatggctcggggcc

SEQ ID NO: 62702 - DNA, 120 bp, Artificial Sequence
  ENSG00000073067_20 (sequence is synthesized)
gtggggcggcacctccagggctccaggggtgggacggccccagctccgcctgccgcctctgcacccacctcctgatctcaggttctgaaggcggctgtggtggctgctcctgtgctcccc

SEQ ID NO: 62703 - DNA, 120 bp, Artificial Sequence
  ENSG00000073067_21 (sequence is synthesized)
tggggaggtccccacccctcccctccaggagcaggcctggtgcagcccactctgtgcctggacatcccccgcaggccgccgcgtctgtgttggggagcgcctggccaggaccgagctctt

SEQ ID NO: 62704 - DNA, 120 bp, Artificial Sequence
  ENSG00000073111_0 (sequence is synthesized)
cttttcgcgcgaaacctggttgttgctgtagtggcggagaggatcgtggtactgctatggcggaatcatcggaatccttcaccatggcatccagcccggcccagcgtcggcgaggcaatg

SEQ ID NO: 62705 - DNA, 120 bp, Artificial Sequence
  ENSG00000073111_1 (sequence is synthesized)
atcctctcacctccagccctggccgaagctcccggcgtactgatgccctcacctccagccctggccgtgaccttccaccatttgaggatgagtccgaggggctcctaggcacagaggggc

SEQ ID NO: 62706 - DNA, 120 bp, Artificial Sequence
  ENSG00000073111_2 (sequence is synthesized)
ccctggaggaagaagaggatggagaggagctcattggagatggcatggaaagggactaccgcgccatcccagagctggacgcctatgaggccgagggactggctctggatgatgaggacg

SEQ ID NO: 62707 - DNA, 120 bp, Artificial Sequence
  ENSG00000073111_3 (sequence is synthesized)
tagaggagctgacggccagtcagagggaggcagcagagcgggccatgcggcagcgtgaccgggaggctggccggggcctgggccgcatgcgccgtgggctcctgtatgacagcgatgagg

SEQ ID NO: 62708 - DNA, 120 bp, Artificial Sequence
  ENSG00000073111_4 (sequence is synthesized)
aggacgaggagcgccctgcccgcaagcgccgccaggtggagcgggccacggaggacggcgaggaggacgaggagatgatcgagagcatcgagaacctggaggatctcaaaggccactctg

SEQ ID NO: 62709 - DNA, 120 bp, Artificial Sequence
  ENSG00000073111_5 (sequence is synthesized)
tgcgcgagtgggtgagcatggcgggcccccggctggagatccaccaccgcttcaagaacttcctgcgcactcacgtcgacagccacggccacaacgtcttcaaggagcgcatcagcgaca

SEQ ID NO: 62710 - DNA, 120 bp, Artificial Sequence
  ENSG00000073111_6 (sequence is synthesized)
tgtgcaaagagaaccgtgagagcctggtggtgaactatgaggacttggcagccagggagcacgtgctggcctacttcctgcctgaggcaccggcggagctgctgcagatctttgatgagg

SEQ ID NO: 62711 - DNA, 120 bp, Artificial Sequence
  ENSG00000073111_7 (sequence is synthesized)
ctgccctggaggtggtactggccatgtaccccaagtacgaccgcatcaccaaccacatccatgtccgcatctcccacctgcctctggtggaggagctgcgctcgctgaggcagctgcatc

SEQ ID NO: 62712 - DNA, 120 bp, Artificial Sequence
  ENSG00000073111_8 (sequence is synthesized)
tgaaccagctgatccgcaccagtggggtggtgaccagctgcactggcgtcctgccccagctcagcatggtcaagtacaactgcaacaagtgcaatttcgtcctgggtcctttctgccagt

SEQ ID NO: 62713 - DNA, 120 bp, Artificial Sequence
  ENSG00000073111_9 (sequence is synthesized)
cccagaaccaggaggtgaaaccaggctcctgtcctgagtgccagtcggccggcccctttgaggtcaacatggaggagaccatctatcagaactaccagcgtatccgaatccaggagagtc

SEQ ID NO: 62714 - DNA, 120 bp, Artificial Sequence
  ENSG00000073111_10 (sequence is synthesized)
caggcaaagtggcggctggccggctgccccgctccaaggacgccattctcctcgcagatctggtggacagctgcaagccaggagacgagatagagctgactggcatctatcacaacaact

SEQ ID NO: 62715 - DNA, 120 bp, Artificial Sequence
  ENSG00000073111_11 (sequence is synthesized)
atgatggctccctcaacactgccaatggcttccctgtctttgccactgtcatcctagccaaccacgtggccaagaaggacaacaaggttgctgtaggggaactgaccgatgaagatgtga

SEQ ID NO: 62716 - DNA, 120 bp, Artificial Sequence
  ENSG00000073111_12 (sequence is synthesized)
agatgatcactagcctctccaaggatcagcagatcggagagaagatctttgccagcattgctccttccatctatggtcatgaagacatcaagagaggcctggctctggccctgttcggag

SEQ ID NO: 62717 - DNA, 120 bp, Artificial Sequence
  ENSG00000073111_13 (sequence is synthesized)
gggagcccaaaaacccaggtggcaagcacaaggtacgtggtgatatcaacgtgctcttgtgcggagaccctggcacagcgaagtcgcagtttctcaagtatattgagaaagtgtccagcc

SEQ ID NO: 62718 - DNA, 120 bp, Artificial Sequence
  ENSG00000073111_14 (sequence is synthesized)
agggagtggaccttggaggctggggccctggttctggctgaccgaggagtgtgtctcattgatgaatttgacaagatgaatgaccaggacagaaccagcatccatgaggccatggagcaa

SEQ ID NO: 62719 - DNA, 120 bp, Artificial Sequence
  ENSG00000073111_15 (sequence is synthesized)
cagagcatctccatctcgaaggctggcatcgtcacctccctgcaggctcgctgcacggtcattgctgccgccaaccccataggagggcgctacgacccctcgctgactttctctgagaac

SEQ ID NO: 62720 - DNA, 120 bp, Artificial Sequence
  ENSG00000073111_16 (sequence is synthesized)
gtggacctcacagagcccatcatctcacgctttgacatcctgtgtgtggtgagggacaccgtggacccagtccaggacgagatgctggcccgcttcgtggtgggcagccacgtcagacac

SEQ ID NO: 62721 - DNA, 120 bp, Artificial Sequence
  ENSG00000073111_17 (sequence is synthesized)
caccccagcaacaaggaggaggaggggctggccaatggcagcgctgctgagcccgccatgcccaacacgtatggcgtggagcccctgccccaggaggtcctgaagaagtacatcatctac

SEQ ID NO: 62722 - DNA, 120 bp, Artificial Sequence
  ENSG00000073111_18 (sequence is synthesized)
gccaaggagagggtccacccgaagctcaaccagatggaccaggacaaggtggccaagatgtacagtgacctgaggaaagaatctatggcgacaggcagcatccccattacggtgcggcac

SEQ ID NO: 62723 - DNA, 120 bp, Artificial Sequence
  ENSG00000073111_19 (sequence is synthesized)
atcgagtccatgatccgcatggcggaggcccacgcgcgcatccatctgcgggactatgtgatcgaagacgacgtcaacatggccatccgcgtgatgctggagagcttcatagacacacag

SEQ ID NO: 62724 - DNA, 120 bp, Artificial Sequence
  ENSG00000073111_20 (sequence is synthesized)
aagttcagcgtcatgcgcagcatgcgcaagacttttgcccgctacctttcattccggcgtgacaacaatgagctgttgctcttcatactgaagcagttagtggcagagcaggtgacatat

SEQ ID NO: 62725 - DNA, 120 bp, Artificial Sequence
  ENSG00000073111_21 (sequence is synthesized)
cagcgcaaccgctttggggcccagcaggacactattgaggtccctgagaaggacttggtggataaggctcgtcagatcaacatccacaacctctctgcattttatgacagtgagctcttc

SEQ ID NO: 62726 - DNA, 120 bp, Artificial Sequence
  ENSG00000073111_22 (sequence is synthesized)
aggatgaacaagttcagccacgacctgaaaaggaaaatgatcctgcagcagttctgaggccctatgccatccataaggattccttgggattctggtttggggtggtcagtgccctctgtg

SEQ ID NO: 62727 - DNA, 120 bp, Artificial Sequence
  ENSG00000073111_23 (sequence is synthesized)
ctttatggacacaaaaccagagcacttgatgaactcggggtactagggtcagggcttatagcaggatgtctggctgcacctggcatgactgtttgtttctccaagcctgctttgtgcttc

SEQ ID NO: 62728 - DNA, 120 bp, Artificial Sequence
  ENSG00000073111_24 (sequence is synthesized)
tcacctttgggtgggatgccttgccagtgtgtcttacttggttgctgaacatcttgccacctccgagtgctttgtctccactcagtaccttggatcagagctgctgagttcaggatgcct

SEQ ID NO: 62729 - DNA, 120 bp, Artificial Sequence
  ENSG00000073111_25 (sequence is synthesized)
gcgtgtggtttaggtgttagccttcttacatggatgtcaggagagctgctgccctcttggcgtgagttgcgtattcaggctgcttttgctgcctttggccagagagctggttgaagatgt

SEQ ID NO: 62730 - DNA, 120 bp, Artificial Sequence
  ENSG00000073111_26 (sequence is synthesized)
ttgtaatcgttttcagtctcctgcaggtttctgtgcccctgtggtggaagagggcacgacagtgccagcgcagcgttctgggctcctcagtcgcaggggtgggatgtgagtcatgcggat

SEQ ID NO: 62731 - DNA, 120 bp, Artificial Sequence
  ENSG00000073111_27 (sequence is synthesized)
tatccactcgccacagttatcagctgccattgctccctgtctgtttccccactctcttatttgtgcattcggtttggtttctgtagttttaatttttaataaagttgaataaaatataaa

SEQ ID NO: 62732 - DNA, 120 bp, Artificial Sequence
  ENSG00000073111_28 (sequence is synthesized)
aagaacccaggctctgtcacccactgtgttcttggtttttcctcctggggaagcagttatgctttctgtctaaattaggctattttgggccctggttagggtaagctctttgctgtctca

SEQ ID NO: 62733 - DNA, 120 bp, Artificial Sequence
  ENSG00000073111_29 (sequence is synthesized)
gacagcaggtgctaagtacccacctatgtcttcctcttccactgccctcatccccttctgccatcagagcagcctggggtccctgagatgggaggataggggaatccaccctgatggagg

SEQ ID NO: 62734 - DNA, 120 bp, Artificial Sequence
  ENSG00000073111_30 (sequence is synthesized)
ccatcgaacctagtctgcgaagatctggggttcccataggagaggtgggtgtttctcagcgtcaggaagccaggagcttcagttcagccaacacacattggttcctggaagacctcctag

SEQ ID NO: 62735 - DNA, 120 bp, Artificial Sequence
  ENSG00000073111_31 (sequence is synthesized)
gcttgaattgggagcccacggggtccccaggagccgatctgaggaagtcattgtgcagcagagggttcccctcttctgcatatcctgccagagtggggaacagtgaaagtgggacctggg

SEQ ID NO: 62736 - DNA, 120 bp, Artificial Sequence
  ENSG00000073111_32 (sequence is synthesized)
acacctgggtttcctgttgagtcatgttcctggaatcaccttggatgttctcagaaggcatgggaggagagcccagtgcccctctggccaggatggagttggctgttggtctcagcagcg

SEQ ID NO: 62737 - DNA, 120 bp, Artificial Sequence
  ENSG00000073111_33 (sequence is synthesized)
aatgcgtaaaagaacccaggctctgtcacccactgtgttcttggtttttcctcctggggaagcagttatgctttctgtctaaattaggctattttgggccctggttagggtaagctcttt

SEQ ID NO: 62738 - DNA, 120 bp, Artificial Sequence
  ENSG00000073111_34 (sequence is synthesized)
ttgtttggaagccactgactcagattgctcagctgagagcattccaggtgagagaacagcaagggcaaagatctggaggctggaaggggtttggtgtgttggaggacaagagtcacaggt

SEQ ID NO: 62739 - DNA, 120 bp, Artificial Sequence
  ENSG00000073111_35 (sequence is synthesized)
ggagagaaagaagggaaggcccctgatggtaaaaaggaagctgtatcatgcctcaccagcttcctaggtttctgacaaccgcaccttctcttgcaggaatcatcggaatccttcaccatg

SEQ ID NO: 62740 - DNA, 120 bp, Artificial Sequence
  ENSG00000073111_36 (sequence is synthesized)
gtccctttgtcttgtatactgtctgttccacatctgagttccagacctcttgttttggtggctcttctatgccatctctatcacaataccttgcgcactgtgtgtgctgaaataggtcta

SEQ ID NO: 62741 - DNA, 120 bp, Artificial Sequence
  ENSG00000073111_37 (sequence is synthesized)
atgcttaaggggagataatagacagtaaacaggtaaataggcaaatgacataacctcagtggtttttcatggagaaagcacggtgatgtgggtgaccccgatatttgagctggcttctat

SEQ ID NO: 62742 - DNA, 120 bp, Artificial Sequence
  ENSG00000073146_0 (sequence is synthesized)
gggagcggcgcgggcgcgtgcgggcggcggcagcggcggtgacggcagcctaggccgggcgagggccatgctgagcctcgcagccaagctggtggccttcttctggaggacggcggacac

SEQ ID NO: 62743 - DNA, 120 bp, Artificial Sequence
  ENSG00000073146_1 (sequence is synthesized)
ggaggacggcggacacccctagggaggaagccgggcagctggagcccgagctcgcggaaggtgacactaagctgaaaactgtacggggtgtcgtgacaaggtactgcagcgattatggca

SEQ ID NO: 62744 - DNA, 120 bp, Artificial Sequence
  ENSG00000073146_2 (sequence is synthesized)
tgattgatgatatgatctacttctccagtgatgctgtgactagcagagtgcttctgaatgttggacaggaagtgattgcagttgtggaagaaaataaagtgtccaatggactgaaagcaa

SEQ ID NO: 62745 - DNA, 120 bp, Artificial Sequence
  ENSG00000073146_3 (sequence is synthesized)
tcagggtagaagctgtctctgataagtgggaagacgacagcagaaaccatgggagtccctcagactgcggcccccgagtgttgattggctgtgtgacttccctggtggagggcgcaggct

SEQ ID NO: 62746 - DNA, 120 bp, Artificial Sequence
  ENSG00000073146_4 (sequence is synthesized)
gtatcagtcagaccacctacttctctctggagagtgtgtgcgaaggcttcgagccctgcaagggagactgggtggaggctgagtaccggatccggcctggcacgtggagcagcgaagcca

SEQ ID NO: 62747 - DNA, 120 bp, Artificial Sequence
  ENSG00000073146_5 (sequence is synthesized)
cctcagtgaagccactgagatacaagcgcgtggacaaggtctgcatctctagcctctgtggaaggaacggggtgttagaggaaagcatcttctttaccttggactccttgaaactgccag

SEQ ID NO: 62748 - DNA, 120 bp, Artificial Sequence
  ENSG00000073146_6 (sequence is synthesized)
atgggtacacaccccggagaggtgacgtggtcaatgcagtggtggtggagagcagccagtcatgctatgtctggagggcactttgtatgaccctagtgaagaggcgagacgccgcccctg

SEQ ID NO: 62749 - DNA, 120 bp, Artificial Sequence
  ENSG00000073146_7 (sequence is synthesized)
ttcatgaggccactcatttctatggaacgattttgctgaagaacaaaggtgatattgaagttacacaggtgacgcattttggaaccctaaaggaaggaagaagtaaaaccatggtgatct

SEQ ID NO: 62750 - DNA, 120 bp, Artificial Sequence
  ENSG00000073146_8 (sequence is synthesized)
ggatagagaataaaggagacattcctcaaaacttagtcagctgtaaactggctggctgggataaatctaaacaattcagattccaaatgctggataaagaccagatgtgccccgtggtat

SEQ ID NO: 62751 - DNA, 120 bp, Artificial Sequence
  ENSG00000073146_9 (sequence is synthesized)
cttttgtttctgttcctgagaaggagaattcatcagatgaaaatattaattcattaaatagccacacaaaaaacaaaacctctcagatgtcggagagcagtttggtgaacaacagaggaa

SEQ ID NO: 62752 - DNA, 120 bp, Artificial Sequence
  ENSG00000073146_10 (sequence is synthesized)
tctctccaggtgattgtacctgtaaaggagaaaatggagaaaaagacaacattctatcaaggaagcagatgacagagcctgagcctggggggcttgtccctccagggggaaaaaccttca

SEQ ID NO: 62753 - DNA, 120 bp, Artificial Sequence
  ENSG00000073146_11 (sequence is synthesized)
ttgtggtcatctgtgacggaaaaaatcctggccgctgcaaggagctccttttgctctgtttttccgatttcctaattgggcgataccttgaagtaaatgttatcagtggggaggagtcac

SEQ ID NO: 62754 - DNA, 120 bp, Artificial Sequence
  ENSG00000073146_12 (sequence is synthesized)
taattgctgcgcgcgaaccattttcttggaaaaagcttaaaagttcacaagcgttaacatccgcaaaaactacagttgttgtgaccgcacagaaaaggaactcaagacgacaacttccaa

SEQ ID NO: 62755 - DNA, 120 bp, Artificial Sequence
  ENSG00000073146_13 (sequence is synthesized)
gttttcttccccaatatccaatcccagatagacttagaaaatgtgtggaacaaaaaattgacatcctgactttccagccattacttgcagagcttctgaacatgtcaaattacaaggaga

SEQ ID NO: 62756 - DNA, 120 bp, Artificial Sequence
  ENSG00000073146_14 (sequence is synthesized)
agttttcgactttgctgtggcttgaggagatttatgcagaaatggaactgaaagagtataacatgagcgggatcatcttaagaaggaatggggatctgctggttctggaggtcccagggt

SEQ ID NO: 62757 - DNA, 120 bp, Artificial Sequence
  ENSG00000073146_15 (sequence is synthesized)
tggccgaagggaggccttctctctacgcaggtgataaactgattttaaaaactcaagagtacaatggacatgccatcgaatacatcagctacgtgactgagattcatgaagaagatgtaa

SEQ ID NO: 62758 - DNA, 120 bp, Artificial Sequence
  ENSG00000073146_16 (sequence is synthesized)
acttaggtgtaaaagtgttgtttccagaagaaattattttacagtctccacaagtgacgggaaattggaaccatgcacaagacaccaaaagcagtggacagtccaccagcaaaaagaata

SEQ ID NO: 62759 - DNA, 120 bp, Artificial Sequence
  ENSG00000073146_17 (sequence is synthesized)
ggaaaacaatgacggaccaagctgagcatggaacagaggagaggcgtgttggtgacaaggacctgccggtgctggcaccctttactgcagagatgagcgattgggtagatgaaattcaga

SEQ ID NO: 62760 - DNA, 120 bp, Artificial Sequence
  ENSG00000073146_18 (sequence is synthesized)
cccctaaagcaagaaagatggagtttttcaacccagtgctaaatgaaaatcagaagttagcagttaaaaggattctgagtggtgactgccgtcccctcccgtatattctctttggacctc

SEQ ID NO: 62761 - DNA, 120 bp, Artificial Sequence
  ENSG00000073146_19 (sequence is synthesized)
ctggtactggaaagacagtgacaataatagaggctgttttacaggtacactttgccttgccggacagtcggattttagtctgtgcgccctccaacagtgctgctgacctcgtgtgtctgc

SEQ ID NO: 62762 - DNA, 120 bp, Artificial Sequence
  ENSG00000073146_20 (sequence is synthesized)
ggctgcacgagagcaaggtgctacagccggccaccatggtccgggtgaacgccacctgcaggttcgaggagatagttattgacgccgtcaaaccgtattgcagagacggagaagacatct

SEQ ID NO: 62763 - DNA, 120 bp, Artificial Sequence
  ENSG00000073146_21 (sequence is synthesized)
ggaaagcctcacgcttccggataatcatcaccacatgcagcagctcagggctgttttaccaaataggagtgagagttgggcacttcactcacgtgtttgtggacgaggctgggcaggcaa

SEQ ID NO: 62764 - DNA, 120 bp, Artificial Sequence
  ENSG00000073146_22 (sequence is synthesized)
gtgagccggaatgcctcattcctctggggctgatgtcggacatcagtggccagatcgtgctggcaggagaccccatgcagctcggcccagtcattaagtccagactcgccatggcctatg

SEQ ID NO: 62765 - DNA, 120 bp, Artificial Sequence
  ENSG00000073146_23 (sequence is synthesized)
ggctgaacgtgtcctttttggaacggctgatgtctcgacccgcgtaccagagggacgaaaatgctttcggtgcttgtggcgcacataatcccctgttggtcacaaagctggtgaagaact

SEQ ID NO: 62766 - DNA, 120 bp, Artificial Sequence
  ENSG00000073146_24 (sequence is synthesized)
accggtcccacgaggccctgctgatgctgccctcacggctgttctaccacagggaactcgaggtctgtgcggaccccacagtggtgacctccttgctgggctgggagaagttgcctaaga

SEQ ID NO: 62767 - DNA, 120 bp, Artificial Sequence
  ENSG00000073146_25 (sequence is synthesized)
aaggcttccctctcatcttccatggtgtgcggggcagcgaggcacgggagggaaaaagcccatcgtggttcaacccggccgaggccgtccaggtcctgcgctactgctgcctcctggccc

SEQ ID NO: 62768 - DNA, 120 bp, Artificial Sequence
  ENSG00000073146_26 (sequence is synthesized)
acagcatctccagtcaggtgtctgccagcgacattggcgtcatcacgccctaccggaagcaggtggagaaaatcagaattcttttgcgtaatgttgatctgatggatataaaggttggat

SEQ ID NO: 62769 - DNA, 120 bp, Artificial Sequence
  ENSG00000073146_27 (sequence is synthesized)
cagtagaggagtttcaaggacaagagtatctggtcatcatcatttcgaccgtacggtcaaatgaagatagatttgaagatgatcgatattttttgggtttcttgtccaactcaaaaagat

SEQ ID NO: 62770 - DNA, 120 bp, Artificial Sequence
  ENSG00000073146_28 (sequence is synthesized)
ttaatgttgcaatcaccagacccaaagctttgctgatagtgctgggaaacccccatgttctcgttcgagacccctgttttggtgctttgctggaatacagtattacaaacggtgtttaca

SEQ ID NO: 62771 - DNA, 120 bp, Artificial Sequence
  ENSG00000073146_29 (sequence is synthesized)
tgggatgcgatttacctcctgcactgcagtctctgcaaaactgtggcgagggggtggcagacccctcctacccagtggtgccagaatccacaggaccagagaagcatcaggagcccagct

SEQ ID NO: 62772 - DNA, 120 bp, Artificial Sequence
  ENSG00000073146_30 (sequence is synthesized)
gatctgcagtggctgacagcagggaggccatgtgctcagcctggccacgttgccgttacagtctgctccgtggctcctgtggcctgcccttgtctcgcagccaggcagggtcgtgtgtgg

SEQ ID NO: 62773 - DNA, 120 bp, Artificial Sequence
  ENSG00000073146_31 (sequence is synthesized)
gtgtggggctgccaggttggacgcagctgctgctgccctgactttggcatatgccagcctgttcctgccacagggcagtcactgccgcctaccctgaaataaaccctcgagtgaccccca

SEQ ID NO: 62774 - DNA, 120 bp, Artificial Sequence
  ENSG00000073146_32 (sequence is synthesized)
ataggtctttgagtgcagtgcgggccggcaggcaacgctgggcccggcctttcctcatctccgctggcggggatccccgttcgcctcaggaggcttccgaccccacagcatcccgccgct

SEQ ID NO: 62775 - DNA, 120 bp, Artificial Sequence
  ENSG00000073146_33 (sequence is synthesized)
ctgggcgcccgtcctctgtgaggtctctccggtgacaccagcccctcttcccgccctcactttgtgtgtttacgccgagcagctgccaagtcgtctctccatgtcgttcctccctgtccg

SEQ ID NO: 62776 - DNA, 120 bp, Artificial Sequence
  ENSG00000073146_34 (sequence is synthesized)
gagagccgtgtgtggctaccggattggacagcacggatctgaacaagacagggattttttttgttaatgtgtgttgatgagtcaaaggtcaagagccgaagagccagtcctcactggggt

SEQ ID NO: 62777 - DNA, 120 bp, Artificial Sequence
  ENSG00000073146_35 (sequence is synthesized)
agccccgaaaaacgcggccccgcagacttggcctgtcctttcagaacgcgctgcgccaaggcgtgccatttccttgtctggttttcaagcccatctttctaaagcccgggatgcgcccgg

SEQ ID NO: 62778 - DNA, 86 bp, Artificial Sequence
  ENSG00000073146_36 (sequence is synthesized)
gttttcaagcccatctttctaaagcccgggatgcgcccggatgccctcaccgttcctttctcctgaggtgtttgtgtgtgtgtgtg

SEQ ID NO: 62779 - DNA, 72 bp, Artificial Sequence
  ENSG00000073146_37 (sequence is synthesized)
acctctcccgaggttctgatggcttctcccgatgtttccttatgtgggaatggaatccacagtagtgggtcc

SEQ ID NO: 62780 - DNA, 120 bp, Artificial Sequence
  ENSG00000073146_38 (sequence is synthesized)
gggagcttcctgctgcaggcagcgtgttcagggcctctggatccacgagggccgatgcccggggggccggctgtgttacctggagcacttgctccgtggatctcttcggtagaacacgcg

SEQ ID NO: 62781 - DNA, 120 bp, Artificial Sequence
  ENSG00000073146_39 (sequence is synthesized)
ctcagcggtagctggagctccagctcttggcagcgctcagatcctatgcctgtactgtaaccgtcgccccaggttcctcccgtggctgggaagctgcagtaaaggcacgttcaggactca

SEQ ID NO: 62782 - DNA, 120 bp, Artificial Sequence
  ENSG00000073146_40 (sequence is synthesized)
ggaccgtggctgcagcagtggccagacggctgagggcgtgcgctgctcctgggccagacttgtctgcccagccccgaaccttttccagcaccgtgtttgttgagattctccagtcttccg

SEQ ID NO: 62783 - DNA, 120 bp, Artificial Sequence
  ENSG00000073146_41 (sequence is synthesized)
gccgactagtggctcctctctgtgcttctggcagacctgccatcaggggtaacttgcacggcccaggcttctcctgcatgtgttggaagcctggaaaaataaagctttgtcatggccaaa

SEQ ID NO: 62784 - DNA, 120 bp, Artificial Sequence
  ENSG00000073146_42 (sequence is synthesized)
agacgctgcgtgcaaagcactgggtgctgatgtggcttagcatctcctgacacctgtggcctgtcctccctccagccgggtgacacccagacccccagctcctgcacacccctgggcaac

SEQ ID NO: 62785 - DNA, 120 bp, Artificial Sequence
  ENSG00000073146_43 (sequence is synthesized)
cctgctgtgcccccggggtgctgagcgtggctttgccagtgtgtcagaggcatcaattgctaaaacaattcggcagaaattaccatttagaacatctttgctctagagttgggcacttca

SEQ ID NO: 62786 - DNA, 120 bp, Artificial Sequence
  ENSG00000073146_44 (sequence is synthesized)
gtcaggtgtctgccagcgacattggcgtcatcacgccctaccggaagcaggtacgccctgcccaggcacgcctggttctgtgaggtccctgcagccctgctccttggctcctgcagctcc

SEQ ID NO: 62787 - DNA, 120 bp, Artificial Sequence
  ENSG00000073146_45 (sequence is synthesized)
acagaggcaggaacaagctccttgtgagcagcagcaggtttttaaaggggcaggaccgcacttgaatgtcgttcaacatgagaggtcacccaactgccatccatgggccagttccgggca

SEQ ID NO: 62788 - DNA, 120 bp, Artificial Sequence
  ENSG00000073146_46 (sequence is synthesized)
agagcctcgaacagtttttacatttctaaatggttacatttatatgtcccttgatatttggccctttgggaaaacatttgccaacccccagctctaacccagtgtttctcaaagggggca

SEQ ID NO: 62789 - DNA, 120 bp, Artificial Sequence
  ENSG00000073146_47 (sequence is synthesized)
ctttgggtatatttgaatgggacgcttctcatttcgtatgactctgtgatgtgattataggagagttagcgtccccaggccccaggggctggtcccaggaagcatctccacacgttcaca

SEQ ID NO: 62790 - DNA, 120 bp, Artificial Sequence
  ENSG00000073146_48 (sequence is synthesized)
gtggctctggagctctggtggggacacaggtgcctcccatgccgaacaccaggtttcattcatgaagcatgtgtccctgtggtgttcacaccaccaagcagaacttggaaagaaccccca

SEQ ID NO: 62791 - DNA, 120 bp, Artificial Sequence
  ENSG00000073146_49 (sequence is synthesized)
aaatacagaagaaaaggtgagtcccctaggccatcacagtaacagatcacctgtaccgcgcgtgtgctgaccgcagagcccgtcaaagatgttatgtttccttttttctgacctcgggga

SEQ ID NO: 62792 - DNA, 120 bp, Artificial Sequence
  ENSG00000073146_50 (sequence is synthesized)
ctcgagaggtgagtgcttagttctcccagaggtacagagattacgaaggcttatggagacaagtaagttgccagacatcacacagccagtgtcctggtgtcttaacctcagcttgtaggt

SEQ ID NO: 62793 - DNA, 120 bp, Artificial Sequence
  ENSG00000073146_51 (sequence is synthesized)
gccatcctgctgagacatccagcttagagctgccatcctcagctctaagcatcagacatgcatctcgtttctcctgaaggatttcctccatccttgatatgtgcttgtggggagggagga

SEQ ID NO: 62794 - DNA, 120 bp, Artificial Sequence
  ENSG00000073146_52 (sequence is synthesized)
ttttccacatgaaacttggctttcctagtaagcattgtcccccgtccccagtttaactaaaactgcaatttgtgttctaatcaattcagattagaagaaagcaataaagaattaaaaaac

SEQ ID NO: 62795 - DNA, 120 bp, Artificial Sequence
  ENSG00000073150_0 (sequence is synthesized)
atgcaccacctcctggagcagtcggcggacatggcgaccgcgctgctggcgggagagaagctgcgggagctgatcctgccgggcgcgcaggacgacaaggcgggcgcgctggccgcgctg

SEQ ID NO: 62796 - DNA, 120 bp, Artificial Sequence
  ENSG00000073150_1 (sequence is synthesized)
cttctgcagctgaagctggagctgccgttcgaccgggtggtcaccatcggcaccgtgctggtgcccatcctgctggtcaccctggtcttcaccaagaacttcgcagaggaacccatttac

SEQ ID NO: 62797 - DNA, 120 bp, Artificial Sequence
  ENSG00000073150_2 (sequence is synthesized)
tgttacaccccgcacaacttcacgcgcgaccaggcgctgtacgcccgcggctactgctggacggagctgcgggacgcgctgcccggcgtggacgccagcctgtggccgtcgctgtttgag

SEQ ID NO: 62798 - DNA, 120 bp, Artificial Sequence
  ENSG00000073150_3 (sequence is synthesized)
cacaagttcctgccctacgcgctgctggccttcgccgccatcatgtacgtgcccgcgctgggctgggagttcctggcctccacgcgcctcacctccgagctcaacttcctgctgcaggag

SEQ ID NO: 62799 - DNA, 120 bp, Artificial Sequence
  ENSG00000073150_4 (sequence is synthesized)
atcgacaactgttaccaccgggcggccgagggccgcgcgcccaagatcgagaagcagatccagtccaagggcccgggcatcacggagcgcgagaagcgcgagatcatcgagaacgcggag

SEQ ID NO: 62800 - DNA, 120 bp, Artificial Sequence
  ENSG00000073150_5 (sequence is synthesized)
aaggagaagagcccggagcagaacctgttcgagaagtacctggagcgccgcggccgcagcaacttcctggccaagctgtacctggcgcggcacgtgctgatcctgctgctgagcgccgtg

SEQ ID NO: 62801 - DNA, 120 bp, Artificial Sequence
  ENSG00000073150_6 (sequence is synthesized)
cccatctcctacctgtgcacctactacgccacgcagaagcagaacgagttcacctgcgcgctgggcgcgtccccggacggggcggcaggtgcggggcccgcggtgcgcgtgagctgcaag

SEQ ID NO: 62802 - DNA, 120 bp, Artificial Sequence
  ENSG00000073150_7 (sequence is synthesized)
ctcccgtccgtgcaactgcagcgcatcatcgcgggcgtggacatcgtgctgctgtgcgtcatgaacctcatcatcctcgtcaacctcatccacctcttcatcttccgcaagagcaacttc

SEQ ID NO: 62803 - DNA, 120 bp, Artificial Sequence
  ENSG00000073150_8 (sequence is synthesized)
atcttcgacaagctgcacaaggtgggcatcaagacgcgccggcagtggcgccgctcgcagttctgcgacatcaacatcctggccatgttctgcaacgagaaccgcgaccacatcaagtcg

SEQ ID NO: 62804 - DNA, 120 bp, Artificial Sequence
  ENSG00000073150_9 (sequence is synthesized)
ctcaaccggctggacttcatcaccaacgagagcgacctcatgtacgacaacgtggtccggcagctgctggcggcgctggcgcagtccaaccacgacgccacccccacggtgcgcgactcg

SEQ ID NO: 62805 - DNA, 120 bp, Artificial Sequence
  ENSG00000073150_10 (sequence is synthesized)
ggggtgcagaccgtggaccccagcgccaaccccgccgagcccgacggcgccgccgagccgcccgtggtcaagcggccgcgcaagaagatgaagtggatccccaccagcaacccgcttccg

SEQ ID NO: 62806 - DNA, 120 bp, Artificial Sequence
  ENSG00000073150_11 (sequence is synthesized)
cagcccttcaaggagccgctggccatcatgcgcgtggagaacagcaaggcggagaagccgaagcccgcgcgcaggaagacggccacggacacgctgatcgcgccgctgctggaccgctcc

SEQ ID NO: 62807 - DNA, 120 bp, Artificial Sequence
  ENSG00000073150_12 (sequence is synthesized)
cccccgccccgccgcccgcccctgacaagaagcacgcgcgccacttctccctggacgtgcacccctacatcctcggcaccaagaaggccaaggccgaggcggtgcccgccgccctgcccg

SEQ ID NO: 62808 - DNA, 120 bp, Artificial Sequence
  ENSG00000073150_13 (sequence is synthesized)
cctcccggagccaggaggggggcttcctgtcccaggcggaggactgtgggctaggcctggccccggcgcccatcaaagatgctccgctccccgagaaggaaatcccgtaccccacagagc

SEQ ID NO: 62809 - DNA, 120 bp, Artificial Sequence
  ENSG00000073150_14 (sequence is synthesized)
cagcccgggcagggcttccctcggggggcccgttccacgtccgctcacctcccgccgcccctgctgtggcccctctgacaccagccagcctgggcaaggcggagcccctcaccatcctga

SEQ ID NO: 62810 - DNA, 120 bp, Artificial Sequence
  ENSG00000073150_15 (sequence is synthesized)
gccgaaacgccacacacccgctgctgcacatcaacacgctgtacgaggcccgggaggaggaggacgggggcccccgcctgccgcaggacgtgggggacctcatcgccatccctgccccac

SEQ ID NO: 62811 - DNA, 120 bp, Artificial Sequence
  ENSG00000073150_16 (sequence is synthesized)
agcagatcctcatcgccaccttcgacgagccgagaacggtcgtgagtactgtggagttttgagggatggcaccgtccaggccgccgagagcccctctgcctgtgtcgtgtggcctggcca

SEQ ID NO: 62812 - DNA, 120 bp, Artificial Sequence
  ENSG00000073150_17 (sequence is synthesized)
gcctcccggtggacaccagccctgcgtggacgtggcctgtgcttcgcccgcactgcgcgcatccccaacctctgtccgcatgcctggggccttcgcccccacgtgctcgacaggggaacc

SEQ ID NO: 62813 - DNA, 120 bp, Artificial Sequence
  ENSG00000073150_18 (sequence is synthesized)
cgcccggacggcatcgccaggcactggctggggtggggaaaggtggcccagtggagccggtggccaggaaggctgaagcccgcttcccatgctcctgcatcaggtgcccagccgtgggtg

SEQ ID NO: 62814 - DNA, 120 bp, Artificial Sequence
  ENSG00000073150_19 (sequence is synthesized)
ggggccctgaggtgaagagtttatttttttagtccgtttcgtcctggccccgggctgtggcgagacagcccaactcccccagcccagctcccccagcccagagccagggaagaggaaggt

SEQ ID NO: 62815 - DNA, 120 bp, Artificial Sequence
  ENSG00000073150_20 (sequence is synthesized)
ggggccagtcccaccagtggggtggccacgcccatggggtcacatgctcaggggtcaccccctgcagggacctgatgccctcgggtgggagggaccgaggtccaccctcgggtcaaaggt

SEQ ID NO: 62816 - DNA, 120 bp, Artificial Sequence
  ENSG00000073150_21 (sequence is synthesized)
caacgtgcactttctccttgtcgcctgacagacattttattttactaagactgctgtaccgaacaagcatatttatcatcaggagacaggatgggtttaaagcaggatggtgtgtgtgtg

SEQ ID NO: 62817 - DNA, 120 bp, Artificial Sequence
  ENSG00000073150_22 (sequence is synthesized)
aacgggcatgagcagaggtgagcgtgagcgagcgggtgtgtatgtacgagtgtgcacgtgtgtgcgtgtgcacagagggtgtggtgccagcttgagtgggagtgtgtgagtgtgagcagg

SEQ ID NO: 62818 - DNA, 120 bp, Artificial Sequence
  ENSG00000073150_23 (sequence is synthesized)
cgggcgagtgcgtgagtgcacgccagcgcgtggcccatgtatgaggagtgaaggggcccaacgcaataaccacgtcccccacccgggccccccgccgcggctgaggccacatggcttcct

SEQ ID NO: 62819 - DNA, 120 bp, Artificial Sequence
  ENSG00000073150_24 (sequence is synthesized)
gtgggagccccggccggcacccggctggtcccaccccaaatacctcagccatggagaccatgtcatgcagaattaacaaggtagcaccgagcatatcaataaatattattctgataatca

SEQ ID NO: 62820 - DNA, 120 bp, Artificial Sequence
  ENSG00000073169_0 (sequence is synthesized)
ggcttccggcgggagcggggccgcggatggccgtatacagggcagcgctcggggcttcgctcgcggctgcccgactcttgcccctcggtcgctgttccccgtcgccggcgccccgctcta

SEQ ID NO: 62821 - DNA, 120 bp, Artificial Sequence
  ENSG00000073169_1 (sequence is synthesized)
cccctcggtcgctgttccccgtcgccggcgccccgctctacgttgtcgggcgccgccatggagcccgcgcctcgctggctggcggggctgcgcttcgacaaccgcgccctgcgcgccctg

SEQ ID NO: 62822 - DNA, 80 bp, Artificial Sequence
  ENSG00000073169_2 (sequence is synthesized)
gcgtgcagcccaccccgctgcggcagccgcgcctcgtggcgctgtcagagcccgcgctggcgttgctgggcctgggcgcg

SEQ ID NO: 62823 - DNA, 120 bp, Artificial Sequence
  ENSG00000073169_3 (sequence is synthesized)
ccgcgcgcgaggccgaggccgaggccgcgctgttcttcagcggcaacgcgctcctgccgggcgccgagcccgccgcgcactgctactgcggccaccaattcggccagttcgccgggcagc

SEQ ID NO: 62824 - DNA, 120 bp, Artificial Sequence
  ENSG00000073169_4 (sequence is synthesized)
tgggcgacggcgccgccatgtacctgggcgaggtgtgcacggcgaccggcgagcgctgggagctgcagctcaagggcgccgggcccacgcccttctccagacaggccgacggtcgcaagg

SEQ ID NO: 62825 - DNA, 120 bp, Artificial Sequence
  ENSG00000073169_5 (sequence is synthesized)
tcctacggtcaagcatccgggagtttctatgcagcgaagccatgttccacctgggagtccccaccacacgggccggcgcctgcgtcacgtccgagtccacggtggtgcgcgacgtgttct

SEQ ID NO: 62826 - DNA, 120 bp, Artificial Sequence
  ENSG00000073169_6 (sequence is synthesized)
atgatggtaatcccaaatatgaacaatgcacggttgtgttgcgtgtagcttccactttcataaggtttggatcctttgagatttttaagtctgcagatgagcacacagggcgtgcaggcc

SEQ ID NO: 62827 - DNA, 120 bp, Artificial Sequence
  ENSG00000073169_7 (sequence is synthesized)
ccagcgtggggaggaacgacattcgagtgcagctgctcgactatgtcatcagctccttttaccccgagatccaggctgctcatgccagcgacagcgtgcagagaaatgctgccttcttcc

SEQ ID NO: 62828 - DNA, 120 bp, Artificial Sequence
  ENSG00000073169_8 (sequence is synthesized)
gggaggtgacgcggcgcacggcgcggatggtggccgagtggcagtgtgtgggcttctgccacggcgtgctcaacaccgacaacatgagcatcctggggctcaccatcgactacgggccct

SEQ ID NO: 62829 - DNA, 120 bp, Artificial Sequence
  ENSG00000073169_9 (sequence is synthesized)
gcttcctggacaggtacgaccccgaccacgtgtgcaatgcctccgacaacaccggccgctacgcgtacagcaagcagcccgaggtgtgcaggtggaacctgcggaagctggccgaggccc

SEQ ID NO: 62830 - DNA, 120 bp, Artificial Sequence
  ENSG00000073169_10 (sequence is synthesized)
tgcagccggaactgcccctggagctgggggaggccatcctggccgaggagtttgacgccgagttccaaaggcactacctgcagaagatgcgcaggaagctgggcctcgtgcaggtggagc

SEQ ID NO: 62831 - DNA, 120 bp, Artificial Sequence
  ENSG00000073169_11 (sequence is synthesized)
tggaggaagacggggcgctggtgtccaagctcctggagaccatgcatctgaccggtgccgacttcacaaacaccttctacttgctgagctccttcccagtggagctagagtcgccaggcc

SEQ ID NO: 62832 - DNA, 120 bp, Artificial Sequence
  ENSG00000073169_12 (sequence is synthesized)
tggcggaattcctggccaggctgatggagcagtgtgcctccctggaggagctgaggctggccttccggccccagatggatccccggcagctatccatgatgctgatgctggcgcagtcaa

SEQ ID NO: 62833 - DNA, 120 bp, Artificial Sequence
  ENSG00000073169_13 (sequence is synthesized)
acccgcagctgttcgcgcttatgggcacccgggcaggcatcgccagggagctggagcgtgtggagcagcagtctcggctggagcagctgagtgcggcagagctgcagagcaggaaccagg

SEQ ID NO: 62834 - DNA, 120 bp, Artificial Sequence
  ENSG00000073169_14 (sequence is synthesized)
gccactgggctgactggctacaggcgtacagagcccggctggacaaggacctggaaggcgctggggacgctgccgcctggcaggctgagcacgtgcgcgtgatgcacgccaacaacccga

SEQ ID NO: 62835 - DNA, 120 bp, Artificial Sequence
  ENSG00000073169_15 (sequence is synthesized)
agtacgtgctgaggaactacatcgcgcagaatgccatcgaggctgccgagcgcggggacttctcagaggtgcggcgggtgctgaaactactggagaccccttaccactgcgaggcggggg

SEQ ID NO: 62836 - DNA, 120 bp, Artificial Sequence
  ENSG00000073169_16 (sequence is synthesized)
ccgccacagacgccgaggccacggaagccgacggggcggacggcaggcagcgctcctacagcagtaagcccccgctctgggcagcagaactgtgcgtgacatgatcttcgtaacggcctc

SEQ ID NO: 62837 - DNA, 120 bp, Artificial Sequence
  ENSG00000073169_17 (sequence is synthesized)
ggcacgctccacacccctggagtctcccgaggcccccatgtgctgctgagtggccaagatgatgccaggctgccctatacactgggggattctgccctggcccatgcacacccgtctttc

SEQ ID NO: 62838 - DNA, 120 bp, Artificial Sequence
  ENSG00000073169_18 (sequence is synthesized)
catgatggcagagacatccagtcaggacctgacccgtctctgtctgaggccggctcagcagtgcagcctggtccctgggggctggacccaggctcctaaataaaccagcaactccctcga

SEQ ID NO: 62839 - DNA, 120 bp, Artificial Sequence
  ENSG00000073169_19 (sequence is synthesized)
tgcgcgacgtgttctatgatggtaatcccaaatatgaacaatgcacggttgtgttgcgtgtagcttccactttcataaggggctggggtcaggtttgggctgttgacgcctcgggtcttc

SEQ ID NO: 62840 - DNA, 120 bp, Artificial Sequence
  ENSG00000073282_0 (sequence is synthesized)
ctatgtctgatagcatttgaccctattgcttttagcctcccggctttatatctatatatacacaggtatatgtgtatattttatataattgttctccgttcgttgatatcaaagacagtt

SEQ ID NO: 62841 - DNA, 120 bp, Artificial Sequence
  ENSG00000073282_1 (sequence is synthesized)
gaaggaaatgaattttgaaacttcacggtgtgccaccctacagtactgccctgacccttacatccagcgtttcgtagaaaccccagctcatttctcttggaaagaaagttattaccgatc

SEQ ID NO: 62842 - DNA, 120 bp, Artificial Sequence
  ENSG00000073282_2 (sequence is synthesized)
caccatgtcccagagcacacagacaaatgaattcctcagtccagaggttttccagcatatctgggattttctggaacagcctatatgttcagttcagcccattgacttgaactttgtgga

SEQ ID NO: 62843 - DNA, 120 bp, Artificial Sequence
  ENSG00000073282_3 (sequence is synthesized)
tgaaccatcagaagatggtgcgacaaacaagattgagattagcatggactgtatccgcatgcaggactcggacctgagtgaccccatgtggccacagtacacgaacctggggctcctgaa

SEQ ID NO: 62844 - DNA, 120 bp, Artificial Sequence
  ENSG00000073282_4 (sequence is synthesized)
cagcatggaccagcagattcagaacggctcctcgtccaccagtccctataacacagaccacgcgcagaacagcgtcacggcgccctcgccctacgcacagcccagctccaccttcgatgc

SEQ ID NO: 62845 - DNA, 120 bp, Artificial Sequence
  ENSG00000073282_5 (sequence is synthesized)
tctctctccatcacccgccatcccctccaacaccgactacccaggcccgcacagtttcgacgtgtccttccagcagtcgagcaccgccaagtcggccacctggacgtattccactgaact

SEQ ID NO: 62846 - DNA, 120 bp, Artificial Sequence
  ENSG00000073282_6 (sequence is synthesized)
gaagaaactctactgccaaattgcaaagacatgccccatccagatcaaggtgatgaccccacctcctcagggagctgttatccgcgccatgcctgtctacaaaaaagctgagcacgtcac

SEQ ID NO: 62847 - DNA, 120 bp, Artificial Sequence
  ENSG00000073282_7 (sequence is synthesized)
ggaggtggtgaagcggtgccccaaccatgagctgagccgtgaattcaacgagggacagattgcccctcctagtcatttgattcgagtagaggggaacagccatgcccagtatgtagaaga

SEQ ID NO: 62848 - DNA, 120 bp, Artificial Sequence
  ENSG00000073282_8 (sequence is synthesized)
tcccatcacaggaagacagagtgtgctggtaccttatgagccaccccaggttggcactgaattcacgacagtcttgtacaatttcatgtgtaacagcagttgtgttggagggatgaaccg

SEQ ID NO: 62849 - DNA, 120 bp, Artificial Sequence
  ENSG00000073282_9 (sequence is synthesized)
ccgtccaattttaatcattgttactctggaaaccagagatgggcaagtcctgggccgacgctgctttgaggcccggatctgtgcttgcccaggaagagacaggaaggcggatgaagatag

SEQ ID NO: 62850 - DNA, 120 bp, Artificial Sequence
  ENSG00000073282_10 (sequence is synthesized)
catcagaaagcagcaagtttcggacagtacaaagaacggtgatggtacgaagcgcccgtttcgtcagaacacacatggtatccagatgacatccatcaagaaacgaagatccccagatga

SEQ ID NO: 62851 - DNA, 120 bp, Artificial Sequence
  ENSG00000073282_11 (sequence is synthesized)
tgaactgttatacttaccagtgaggggccgtgagacttatgaaatgctgttgaagatcaaagagtccctggaactcatgcagtaccttcctcagcacacaattgaaacgtacaggcaaca

SEQ ID NO: 62852 - DNA, 120 bp, Artificial Sequence
  ENSG00000073282_12 (sequence is synthesized)
gcaacagcagcagcaccagcacttacttcagaaacagacctcaatacagtctccatcttcatatggtaacagctccccacctctgaacaaaatgaacagcatgaacaagctgccttctgt

SEQ ID NO: 62853 - DNA, 120 bp, Artificial Sequence
  ENSG00000073282_13 (sequence is synthesized)
gagccagcttatcaaccctcagcagcgcaacgccctcactcctacaaccattcctgatggcatgggagccaacattcccatgatgggcacccacatgccaatggctggagacatgaatgg

SEQ ID NO: 62854 - DNA, 120 bp, Artificial Sequence
  ENSG00000073282_14 (sequence is synthesized)
actcagccccacccaggcactccctcccccactctccatgccatccacctcccactgcacacccccacctccgtatcccacagattgcagcattgtcagtttcttagcgaggttgggctg

SEQ ID NO: 62855 - DNA, 120 bp, Artificial Sequence
  ENSG00000073282_15 (sequence is synthesized)
ttcatcatgtctggactatttcacgacccaggggctgaccaccatctatcagattgagcattactccatggatgatctggcaagtctgaaaatccctgagcaatttcgacatgcgatctg

SEQ ID NO: 62856 - DNA, 120 bp, Artificial Sequence
  ENSG00000073282_16 (sequence is synthesized)
gaagggcatcctggaccaccggcagctccacgaattctcctccccttctcatctcctgcggaccccaagcagtgcctctacagtcagtgtgggctccagtgagacccggggtgagcgtgt

SEQ ID NO: 62857 - DNA, 120 bp, Artificial Sequence
  ENSG00000073282_17 (sequence is synthesized)
tattgatgctgtgcgattcaccctccgccagaccatctctttcccaccccgagatgagtggaatgacttcaactttgacatggatgctcgccgcaataagcaacagcgcatcaaagagga

SEQ ID NO: 62858 - DNA, 120 bp, Artificial Sequence
  ENSG00000073282_18 (sequence is synthesized)
gggggagtgagcctcaccatgtgagctcttcctatccctctcctaactgccagccccctaaaagcactcctgcttaatcttcaaagccttctccctagctcctccccttcctcttgtctg

SEQ ID NO: 62859 - DNA, 120 bp, Artificial Sequence
  ENSG00000073282_19 (sequence is synthesized)
atttcttaggggaaggagaagtaagaggctacctcttacctaacatctgacctggcatctaattctgattctggctttaagccttcaaaactatagcttgcagaactgtagctgccatgg

SEQ ID NO: 62860 - DNA, 120 bp, Artificial Sequence
  ENSG00000073282_20 (sequence is synthesized)
gttgggtgtctccttaagctgcagagatttctcattgacttttataaagcatgttcacccttatagtctaagactatatatataaatgtataaatatacagtatagatttttgggtgggg

SEQ ID NO: 62861 - DNA, 120 bp, Artificial Sequence
  ENSG00000073282_21 (sequence is synthesized)
ggcattgagtattgtttaaaatgtaatttaaatgaaagaaaattgagttgcacttattgaccattttttaatttacttgttttggatggcttgtctatactccttcccttaaggggtatc

SEQ ID NO: 62862 - DNA, 120 bp, Artificial Sequence
  ENSG00000073282_22 (sequence is synthesized)
atgtatggtgataggtatctagagcttaatgctacatgtgagtgacgatgatgtacagattctttcagttctttggattctaaatacatgccacatcaaacctttgagtagatccatttc

SEQ ID NO: 62863 - DNA, 120 bp, Artificial Sequence
  ENSG00000073282_23 (sequence is synthesized)
cattgcttattatgtaggtaagactgtagatatgtattcttttctcagtgttggtatattttatattactgacatttcttctagtgatgatggttcacgttggggtgatttaatccagtt

SEQ ID NO: 62864 - DNA, 120 bp, Artificial Sequence
  ENSG00000073282_24 (sequence is synthesized)
ataagaagaagttcatgtccaaacgtcctctttagtttttggttgggaatgaggaaaattcttaaaaggcccatagcagccagttcaaaaacacccgacgtcatgtatttgagcatatca

SEQ ID NO: 62865 - DNA, 120 bp, Artificial Sequence
  ENSG00000073282_25 (sequence is synthesized)
gtaacccccttaaatttaataccagataccttatcttacaatattgattgggaaaacatttgctgccattacagaggtattaaaactaaatttcactactagattgactaactcaaatac

SEQ ID NO: 62866 - DNA, 120 bp, Artificial Sequence
  ENSG00000073282_26 (sequence is synthesized)
acatttgctactgttgtaagaattctgattgatttgattgggatgaatgccatctatctagttctaacagtgaagttttactgtctattaatattcagggtaaataggaatcattcagaa

SEQ ID NO: 62867 - DNA, 120 bp, Artificial Sequence
  ENSG00000073282_27 (sequence is synthesized)
atgttgagtctgtactaaacagtaagatatctcaatgaaccataaattcaactttgtaaaaatcttttgaagcatagataatattgtttggtaaatgtttcttttgtttggtaaatgttt

SEQ ID NO: 62868 - DNA, 120 bp, Artificial Sequence
  ENSG00000073282_28 (sequence is synthesized)
cttttaaagaccctcctattctataaaactctgcatgtagaggcttgtttacctttctctctctaaggtttacaataggagtggtgatttgaaaaatataaaattatgagattggttttc

SEQ ID NO: 62869 - DNA, 120 bp, Artificial Sequence
  ENSG00000073282_29 (sequence is synthesized)
ctgtggcataaattgcatcactgtatcattttcttttttaaccggtaagagtttcagtttgttggaaagtaactgtgagaacccagtttcccgtccatctcccttagggactacccatag

SEQ ID NO: 62870 - DNA, 120 bp, Artificial Sequence
  ENSG00000073282_30 (sequence is synthesized)
acatgaaaggtccccacagagcaagagataagtctttcatggctgctgttgcttaaaccacttaaacgaagagttcccttgaaactttgggaaaacatgttaatgacaatattccagatc

SEQ ID NO: 62871 - DNA, 120 bp, Artificial Sequence
  ENSG00000073282_31 (sequence is synthesized)
tttcagaaatataacacatttttttgcatgcatgcaaatgagctctgaaatcttcccatgcattctggtcaagggctgtcattgcacataagcttccattttaattttaaagtgcaaaag

SEQ ID NO: 62872 - DNA, 120 bp, Artificial Sequence
  ENSG00000073282_32 (sequence is synthesized)
ggccagcgtggctctaaaaggtaatgtgtggattgcctctgaaaagtgtgtatatattttgtgtgaaattgcatactttgtattttgattattttttttttcttcttgggatagtgggat

SEQ ID NO: 62873 - DNA, 120 bp, Artificial Sequence
  ENSG00000073282_33 (sequence is synthesized)
ttccagaaccacacttgaaacctttttttatcgtttttgtattttcatgaaaataccatttagtaagaataccacatcaaataagaaataatgctacaattttaagaggggagggaaggg

SEQ ID NO: 62874 - DNA, 120 bp, Artificial Sequence
  ENSG00000073282_34 (sequence is synthesized)
aaagtttttttttattatttttttaaaattttgtatgttaaagagaatgagtccttgatttcaaagttttgttgtacttaaatggtaataagcactgtaaacttctgcaacaagcatgca

SEQ ID NO: 62875 - DNA, 120 bp, Artificial Sequence
  ENSG00000073282_35 (sequence is synthesized)
gctttgcaaacccattaaggggaagaatgaaagctgttccttggtcctagtaagaagacaaactgcttcccttactttgctgagggtttgaataaacctaggacttccgagctatgtcag

SEQ ID NO: 62876 - DNA, 120 bp, Artificial Sequence
  ENSG00000073282_36 (sequence is synthesized)
tactattcaggtaacactagggccttggaaattcctgtactgtgtctcatggatttggcactagccaaagcgaggcacccttactggcttacctcctcatggcagcctactctccttgag

SEQ ID NO: 62877 - DNA, 120 bp, Artificial Sequence
  ENSG00000073282_37 (sequence is synthesized)
tgtatgagtagccagggtaaggggtaaaaggatagtaagcatagaaaccactagaaagtgggcttaatggagttcttgtggcctcagctcaatgcagttagctgaagaattgaaaagttt

SEQ ID NO: 62878 - DNA, 120 bp, Artificial Sequence
  ENSG00000073282_38 (sequence is synthesized)
ttgtttggagacgtttataaacagaaatggaaagcagagttttcattaaatccttttaccttttttttttcttggtaatcccctaaaataacagtatgtgggatattgaatgttaaaggg

SEQ ID NO: 62879 - DNA, 120 bp, Artificial Sequence
  ENSG00000073282_39 (sequence is synthesized)
ttctattatttttataattgtacaaaattaagcaaatgttaaaagttttatatgctttattaatgttttcaaaaggtattatacatgtgatacattttttaagcttcagttgcttgtctt

SEQ ID NO: 62880 - DNA, 120 bp, Artificial Sequence
  ENSG00000073282_40 (sequence is synthesized)
cttgtcttctggtactttctgttatgggcttttggggagccagaagccaatctacaatctctttttgtttgccaggacatgcaataaaatttaaaaaataaataaaaactaattaagaaa

SEQ ID NO: 62881 - DNA, 120 bp, Artificial Sequence
  ENSG00000073282_41 (sequence is synthesized)
agagagagaaagagagagagggacttgagttctgttatcttcttaagtagattcatattgtaagggtctcggggtgggggggttggcaaaatcctggagccagaagaaaggacagcagca

SEQ ID NO: 62882 - DNA, 120 bp, Artificial Sequence
  ENSG00000073282_42 (sequence is synthesized)
agaaacatctcctttcagcctgcttcaggaatgagcttgtggagccccggagagaaactccaaaacaatctgacgtcttctttagacattccaagcccccaaaccgatcagtgtacccat

SEQ ID NO: 62883 - DNA, 120 bp, Artificial Sequence
  ENSG00000073282_43 (sequence is synthesized)
agagccctatctctatattttaagtgtgtgtgttgtatttccatgtgtatatgtgagtgtgtgtgtgtgtatgtgtgtgcgtgtgtatctagccctcataaacaggacttgaagacactt

SEQ ID NO: 62884 - DNA, 120 bp, Artificial Sequence
  ENSG00000073282_44 (sequence is synthesized)
tggctcagagacccaactgctcaaaggcacaaagccactagtgagagaatcttttgaagggactcaaacctttacaagaaaggatgttttctgcagattttgtatccttagaccggccat

SEQ ID NO: 62885 - DNA, 120 bp, Artificial Sequence
  ENSG00000073282_45 (sequence is synthesized)
tggtgggtgaggaaccactgtgtttgtctgtgagctttctgttgtttcctgggagggaggggtcaggtggggaaaggggcattaagatgtttattggaacccttttctgtcttcttctgt

SEQ ID NO: 62886 - DNA, 120 bp, Artificial Sequence
  ENSG00000073282_46 (sequence is synthesized)
tgtttttctaaaattcacagggaagcttttgagcaggtctcaaacttaagatgtctttttaagaaaaggagaaaaaagttgttattgtctgtgcataagtaagttgtaggtgactgagag

SEQ ID NO: 62887 - DNA, 120 bp, Artificial Sequence
  ENSG00000073282_47 (sequence is synthesized)
actcagtcagacccttttaatgctggtcatgtaataatattgcaagtagtaagaaacgaaggtgtcaagtgtactgctgggcagcgaggtgatcattaccaaaagtaatcaactttgtgg

SEQ ID NO: 62888 - DNA, 120 bp, Artificial Sequence
  ENSG00000073282_48 (sequence is synthesized)
gtggagagttctttgtgagaacttgcattatttgtgtcctcccctcatgtgtaggtagaacatttcttaatgctgtgtacctgcctctgccactgtatgttggcatctgttatgctaaag

SEQ ID NO: 62889 - DNA, 120 bp, Artificial Sequence
  ENSG00000073282_49 (sequence is synthesized)
tttttcttgtacatgaaaccctggaagacctactacaaaaaaactgttgtttggcccccatagcaggtgaactcattttgtgcttttaatagaaagacaaatccaccccagtaatattgc

SEQ ID NO: 62890 - DNA, 120 bp, Artificial Sequence
  ENSG00000073282_50 (sequence is synthesized)
ccttacgtagttgtttaccattattcaaagctcaaaatagaatttgaagccctctcacaaaatctgtgattaatttgcttaattagagcttctatccctcaagcctacctaccataaaac

SEQ ID NO: 62891 - DNA, 120 bp, Artificial Sequence
  ENSG00000073282_51 (sequence is synthesized)
cagccatattactgatactgttcagtgcatttagccaggagacttacgttttgagtaagtgagatccaagcagacgtgttaaaatcagcactcctggactggaaattaaagattgaaagg

SEQ ID NO: 62892 - DNA, 120 bp, Artificial Sequence
  ENSG00000073282_52 (sequence is synthesized)
gtagactacttttcttttttttactcaaaagtttagagaatctctgtttctttccattttaaaaacatattttaagataatagcataaagactttaaaaatgttcctcccctccatcttc

SEQ ID NO: 62893 - DNA, 120 bp, Artificial Sequence
  ENSG00000073282_53 (sequence is synthesized)
ccacacccagtcaccagcactgtattttctgtcaccaagacaatgatttcttgttattgaggctgttgcttttgtggatgtgtgattttaattttcaataaacttttgcatcttggttta

SEQ ID NO: 62894 - DNA, 120 bp, Artificial Sequence
  ENSG00000073282_54 (sequence is synthesized)
gagtggcacaggctttctcttcagtctttgggccatgctatctatagctctgttaaacctgtcttttcagtcatgtgtgaaaaggcaggtggctctgaatggccaaggcctttgggaaga

SEQ ID NO: 62895 - DNA, 120 bp, Artificial Sequence
  ENSG00000073282_55 (sequence is synthesized)
cagcacttacttcagaaacagtgagtgtatcaacgtgtcattttaggaggcatgagtgagggtgactttatttggatcagcaatagggtgattgatgagcaatgtggaacataatgggag

SEQ ID NO: 62896 - DNA, 120 bp, Artificial Sequence
  ENSG00000073282_56 (sequence is synthesized)
atagcagattgtcatagattcagatgacctggtatggcaaccctctttcagttgcaaccttttttacgtgtcttattataaccttcccttcagaattccacttatgttctgaaattaaat

SEQ ID NO: 62897 - DNA, 120 bp, Artificial Sequence
  ENSG00000073282_57 (sequence is synthesized)
acaaaccatttctggtgaattacaaagaaactcacactaacagttctcgtctctatatgcctggtccatacacactaacagtaagtacacactctatttggtagtgatgtgtatatttga

SEQ ID NO: 62898 - DNA, 120 bp, Artificial Sequence
  ENSG00000073282_58 (sequence is synthesized)
aaacatgaaatcttttctcatcccaatggattgtcttataaatctcctgggatgcacactatccacttttgggaataacactgtagaccagggatagcaaataggctttactataatata

SEQ ID NO: 62899 - DNA, 120 bp, Artificial Sequence
  ENSG00000073282_59 (sequence is synthesized)
aagtgacttgtttgaatgctgtaatgagaagaattctgagacctagtgcatgataattggggaaatatctgggtgcagaaggataaggtagcatcatgttgccgtattttagaatctctg

SEQ ID NO: 62900 - DNA, 120 bp, Artificial Sequence
  ENSG00000073331_0 (sequence is synthesized)
tttatgagaaacagtgtgtttcagagaggctgtaccagaattaactctgctcagagttagatttgctggtcttaaagtacttttcctctttaagataaaagaagttcttctaaatcagga

SEQ ID NO: 62901 - DNA, 120 bp, Artificial Sequence
  ENSG00000073331_1 (sequence is synthesized)
atggattgaaatctaatgaaccgaaactttgggtaattgatcaccctagacccagggacacccaattcatcgtaatcatcatgaataatcaaaaagtggtagctgtgctactgcaagagt

SEQ ID NO: 62902 - DNA, 120 bp, Artificial Sequence
  ENSG00000073331_2 (sequence is synthesized)
gcaagcaagtgctggatcagctcttgttggaagcgccagatgtgtcggaagaggacaagagcgaggaccagcgctgcagagctttactccccagcgagttaaggaccctgatccaggagg

SEQ ID NO: 62903 - DNA, 120 bp, Artificial Sequence
  ENSG00000073331_3 (sequence is synthesized)
caaaggaaatgaagtggcccttcgtgcctgaaaagtggcagtacaaacaagccgtgggcccagaggacaaaacaaacctgaaggatgtgattggcgccgggttgcagcagttactggcgt

SEQ ID NO: 62904 - DNA, 120 bp, Artificial Sequence
  ENSG00000073331_4 (sequence is synthesized)
ccctgagggcctccatcctcgctcgggactgtgcggctgcggcggctattgtgttcttggtggaccggttcctgtatgggctcgacgtctctggaaaacttctgcaggtcgccaaaggtc

SEQ ID NO: 62905 - DNA, 120 bp, Artificial Sequence
  ENSG00000073331_5 (sequence is synthesized)
tccacaagttgcagccagccacgccaattgccccgcaggtggttattcgccaagcccgaatctccgtgaactcaggaaaacttttaaaagcagagtatattctgagcagtctaataagca

SEQ ID NO: 62906 - DNA, 120 bp, Artificial Sequence
  ENSG00000073331_6 (sequence is synthesized)
acaatggagcaacgggtacctggctgtacagaaatgaaagtgacaaggtcctggtgcagtcggtctgtatacagatcagagggcagattctgcaaaagctggggatgtggtacgaagcag

SEQ ID NO: 62907 - DNA, 120 bp, Artificial Sequence
  ENSG00000073331_7 (sequence is synthesized)
cagagttaatatgggcctccattgtaggatatttggcacttcctcagccggataaaaagggcctctccacgtcgctaggtatactggcagacatctttgtttccatgagcaagaacgatt

SEQ ID NO: 62908 - DNA, 120 bp, Artificial Sequence
  ENSG00000073331_8 (sequence is synthesized)
atgaaaagtttaaaaacaatccacaaattaatttgagcctgctgaaggagtttgaccaccatttgctgtccgctgcagaagcctgcaagctggcagctgccttcagtgcctatacgccgc

SEQ ID NO: 62909 - DNA, 120 bp, Artificial Sequence
  ENSG00000073331_9 (sequence is synthesized)
tcttcgtgctcacagctgtgaatatccgtggcacgtgtttattgtcctacagtagttcaaatgactgtcctccagaattgaaaaacttacatctgtgtgaagccaaagaggcctttgaga

SEQ ID NO: 62910 - DNA, 120 bp, Artificial Sequence
  ENSG00000073331_10 (sequence is synthesized)
ttggcctcctcaccaagagagatgatgagcctgttactggaaaacaggagcttcacagctttgtcaaagctgctttcggtctcaccacagtgcacagaaggctccatggggagacaggga

SEQ ID NO: 62911 - DNA, 120 bp, Artificial Sequence
  ENSG00000073331_11 (sequence is synthesized)
cggtccatgcagcaagtcagctctgtaaggaagcaatggggaagctgtacaatttcagcacttcctccagaagtcaggacagagaagctctgtctcaagaagttatgtctgtgattgccc

SEQ ID NO: 62912 - DNA, 120 bp, Artificial Sequence
  ENSG00000073331_12 (sequence is synthesized)
aggtgaaggaacatttacaagttcaaagcttctcaaatgtagatgacagatcttatgttcccgagagtttcgagtgcaggttggataaacttatcttgcatgggcaaggggatttccaaa

SEQ ID NO: 62913 - DNA, 120 bp, Artificial Sequence
  ENSG00000073331_13 (sequence is synthesized)
aaatccttgacacctattcacagcaccatacttcggtgtgtgaagtatttgaaagtgattgtggaaacaacaaaaatgaacagaaagatgcaaaaacaggagtctgcatcactgctctaa

SEQ ID NO: 62914 - DNA, 120 bp, Artificial Sequence
  ENSG00000073331_14 (sequence is synthesized)
aaacagaaataaaaaacatagatactgtgagtactactcaagaaaagccacattgtcaaagagacacaggaatatcttcctccctaatgggtaagaatgttcagagggaactcagaaggg

SEQ ID NO: 62915 - DNA, 120 bp, Artificial Sequence
  ENSG00000073331_15 (sequence is synthesized)
gaggaaggagaaactggacccattctgatgcatttcgagtctccttggatcaagatgtggagactgagactgagccatcggactacagcaatggtgagggagctgttttcaacaagtctc

SEQ ID NO: 62916 - DNA, 120 bp, Artificial Sequence
  ENSG00000073331_16 (sequence is synthesized)
tgagtggcagccagacttccagtgcttggagcaacttatcagggtttagttcctctgcaagctgggaggaagtgaattatcacgttgacgacaggtcagccagaaaagagcctggcaaag

SEQ ID NO: 62917 - DNA, 120 bp, Artificial Sequence
  ENSG00000073331_17 (sequence is synthesized)
aacatctggtggacactcagtgttccactgccttgtctgaggagctagagaatgacagggaaggcagagctatgcattcattgcattcacagcttcatgatctctctcttcaggaaccca

SEQ ID NO: 62918 - DNA, 120 bp, Artificial Sequence
  ENSG00000073331_18 (sequence is synthesized)
tggtgcagggcttctagaaggagctccagaaggtatccaggaagtcagaaatatgggacccagaaatacttctgctcactccagaccctcatatcgttctgcttcttggtcttctgattc

SEQ ID NO: 62919 - DNA, 120 bp, Artificial Sequence
  ENSG00000073331_19 (sequence is synthesized)
tggtaggcccaagaatatgggcacacatccttcagtccaaaaagaagaagcctttgaaataattgttgagtttccagaaaccaactgcgatgtcaaagacaggcaggggaaagagcaggg

SEQ ID NO: 62920 - DNA, 120 bp, Artificial Sequence
  ENSG00000073331_20 (sequence is synthesized)
agaagaaattagtgaaagaggcgcaggccctacatttaaagctagtccctcctgggttgacccagaaggagaaacagcagaaagcactgaagatgcacccttagactttcacagggtcct

SEQ ID NO: 62921 - DNA, 120 bp, Artificial Sequence
  ENSG00000073331_21 (sequence is synthesized)
gcacaattctctgggaaacatttccatgctgccatgtagctccttcacccctaattggcctgttcaaaatcctgactccagaaaaagtggtggcccagtcgcagagcagggcatcgaccc

SEQ ID NO: 62922 - DNA, 120 bp, Artificial Sequence
  ENSG00000073331_22 (sequence is synthesized)
tgatgcctccacagtggatgaggaggggcaactgctcgacagcatggatgttccctgcacaaatgggcacggctctcatagactgtgcattctgagacagccgcctggtcagagggcgga

SEQ ID NO: 62923 - DNA, 120 bp, Artificial Sequence
  ENSG00000073331_23 (sequence is synthesized)
gacccccaattcctctgtaagcggtaacatcctcttccctgtcctcagcgaggactgcactaccacagaggaaggaaatcagcctggaaacatgctaaactgcagccagaactccagctc

SEQ ID NO: 62924 - DNA, 120 bp, Artificial Sequence
  ENSG00000073331_24 (sequence is synthesized)
atcctcagtgtggtggctgaaatcacctgcattttccagtggttcttctgagggggacagcccttggtcctatctgaattccagtgggagttcttgggtttcattgccgggaaagatgag

SEQ ID NO: 62925 - DNA, 120 bp, Artificial Sequence
  ENSG00000073331_25 (sequence is synthesized)
gaaagagatccttgaggctcgcaccttgcaacctgatgactttgaaaagctgttggcaggagtgaggcatgattggctgtttcagagactagagaatacgggggtttttaagcccagtca

SEQ ID NO: 62926 - DNA, 120 bp, Artificial Sequence
  ENSG00000073331_26 (sequence is synthesized)
actccaccgagcacatagtgctcttttgttaaaatattcaaaaaaatctgaactgtggacggcccaggaaactattgtctatttgggggactacttgactgtgaagaaaaaaggcagaca

SEQ ID NO: 62927 - DNA, 120 bp, Artificial Sequence
  ENSG00000073331_27 (sequence is synthesized)
aagaaatgctttttgggttcatcatcttcatcaagaagaaattctggggaggtatgttgggaaagactataaggagcagaaggggctctggcaccacttcactgatgtggagcgacagat

SEQ ID NO: 62928 - DNA, 120 bp, Artificial Sequence
  ENSG00000073331_28 (sequence is synthesized)
gaccgcacagcactatgtgacagaatttaacaagagactctatgaacaaaacattcccacccagatattctacatcccatccacaatactactgattttagaggacaagacaataaaggg

SEQ ID NO: 62929 - DNA, 120 bp, Artificial Sequence
  ENSG00000073331_29 (sequence is synthesized)
atgtatcagtgtggagccttacatactgggagaatttgtaaaattgtcaaataacacgaaagtggtgaaaacagaatacaaagccacagaatatggcttggcctatggccatttttctta

SEQ ID NO: 62930 - DNA, 120 bp, Artificial Sequence
  ENSG00000073331_30 (sequence is synthesized)
tgagttttctaatcatagagatgttgtggtcgatttacaaggttgggtaaccggtaatggaaaaggactcatctacctcacagatccccagattcactccgttgatcagaaagttttcac

SEQ ID NO: 62931 - DNA, 120 bp, Artificial Sequence
  ENSG00000073331_31 (sequence is synthesized)
taccaattttggaaagagaggaattttttacttctttaataaccagcatgtggaatgtaatgaaatctgccatcgtctttctttgactagaccttcaatggagaaaccatgcacatagaa

SEQ ID NO: 62932 - DNA, 120 bp, Artificial Sequence
  ENSG00000073331_32 (sequence is synthesized)
tacggcacagtctggtcctttggggcttgggcagggccgtgacacaggttctggccaatgatttgcaagaggaattgatcagtatcactttaagtcctgcatttaattggcagcacaaga

SEQ ID NO: 62933 - DNA, 120 bp, Artificial Sequence
  ENSG00000073331_33 (sequence is synthesized)
tcctgcagagcctctttccctctgccacagttatcaagaatgggtcaggagaccgctgcttctgggcataagtcctgcaaggaaagcaacatggaaaacagccccaactcacccatgagg

SEQ ID NO: 62934 - DNA, 120 bp, Artificial Sequence
  ENSG00000073331_34 (sequence is synthesized)
gatgaaaagcactcttgagaaaggcatgtgttgtttaagccattgagattttagagctttttgtcactatctgtcaagactgatactactggggcttttcctattgatttgggagttctt

SEQ ID NO: 62935 - DNA, 120 bp, Artificial Sequence
  ENSG00000073331_35 (sequence is synthesized)
tacatattaaaaaaatgtgagcctttgtgatacgaattcaatttgttttcctgtcttttgacatttgactttgcataaaagtttatctgtgcataattttatatgtagttgaattcatca

SEQ ID NO: 62936 - DNA, 120 bp, Artificial Sequence
  ENSG00000073331_36 (sequence is synthesized)
atcttttattttgtatggctttttggttatgtataatacttagatcctccttatactctgagtttctttctttttaattctcctgtatttccttctagtataattaaatctgtaaaaagt

SEQ ID NO: 62937 - DNA, 120 bp, Artificial Sequence
  ENSG00000073331_37 (sequence is synthesized)
ctccccagtcctggtctcctgccctacacagtccaagcaagtgggccaagagattgcagcaaaggagaggggccagagaggaatcttatcttctgtcctggcttctccagttttcctcct

SEQ ID NO: 62938 - DNA, 120 bp, Artificial Sequence
  ENSG00000073331_38 (sequence is synthesized)
gcctgcacattaaacacacagggactgacgtgctgagacctggtacttcggccttcaaggggctcctttattgagaatcaatgtcttctcctaggtaattgatcaccctagacccaggga

SEQ ID NO: 62939 - DNA, 88 bp, Artificial Sequence
  ENSG00000073331_39 (sequence is synthesized)
tggtacatatacaccatggaacactatgtgtattaatccactctcacactgctatgaagagatacctgagactgggtaatttagaaag

SEQ ID NO: 62940 - DNA, 68 bp, Artificial Sequence
  ENSG00000073331_40 (sequence is synthesized)
agggccatcagatcttgtgagaattcattcactctcacgagaacagcatgggaaaaactgcctcaatt

SEQ ID NO: 62941 - DNA, 120 bp, Artificial Sequence
  ENSG00000073331_41 (sequence is synthesized)
gaattcattcactctcacgagaacagcatgggaaaaactgcctcaattacctcctaccaggtccttcccatgacacatgggaattatgggactacaattcgagatgagatttgggtgggg

SEQ ID NO: 62942 - DNA, 78 bp, Artificial Sequence
  ENSG00000073331_42 (sequence is synthesized)
ttttagcaaactaatgcaagaacagaaaactaaataccacttgttctcacttataggtgagagctaagtgatgagagt

SEQ ID NO: 62943 - DNA, 120 bp, Artificial Sequence
  ENSG00000073331_43 (sequence is synthesized)
acttgttctcacttataggtgagagctaagtgatgagagtaggtggacacatagagggaacaacacacaccagggcttatcagagggtggacagtgggaggagggagaggatcaggaaaa

SEQ ID NO: 62944 - DNA, 80 bp, Artificial Sequence
  ENSG00000073331_44 (sequence is synthesized)
caggaaaaataactaatgggtactaggctgaatacctgggtgatgaagtaattcgcacaacaaacccccatgaaaaaaaa

SEQ ID NO: 62945 - DNA, 120 bp, Artificial Sequence
  ENSG00000073331_45 (sequence is synthesized)
cacaaattaatttggtaattatcataacactgagtggcatcacctgtaaaattgtcaatcgtgtccttggtggttggttagtggctgtctttctcaggagattgggaggcagggagctca

SEQ ID NO: 62946 - DNA, 120 bp, Artificial Sequence
  ENSG00000073331_46 (sequence is synthesized)
cagagagtgctcagaaagttactggtgaatgaatgaatgaatatcaacaaaatgattttgagcctcacttctttcctttcaaagtataacaaaatgcagtttccaaacttgggccatctt

SEQ ID NO: 62947 - DNA, 120 bp, Artificial Sequence
  ENSG00000073331_47 (sequence is synthesized)
gatgataaaggggtaataattttaaaactttgtaatcaccatctgttcaaatcagagcatcagtcccttgttccaggctctcgtccttgataataatgactgctaatttttatatatcac

SEQ ID NO: 62948 - DNA, 120 bp, Artificial Sequence
  ENSG00000073331_48 (sequence is synthesized)
gtttatgagaaacagtgtgtttcagagaggctgtaccagaattaactctgctcagagttagatttgctggtcttaaagtacttttcctctttaagataaaactggacccttggtgctacc

SEQ ID NO: 62949 - DNA, 120 bp, Artificial Sequence
  ENSG00000073331_49 (sequence is synthesized)
tggagatccctctacttgttgatgggcagcttcccgggccactcctctcaggtactctactgaaggtttttcattctcctcaagctccagttctgccacctcacttcttactctcagccc

SEQ ID NO: 62950 - DNA, 120 bp, Artificial Sequence
  ENSG00000073331_50 (sequence is synthesized)
tgacgtgctgagacctggtaaattcagacagtggggttcacggttcatcgtatcctttgaaggactcctccaccacttcattcaagatatctgatgtcatttctcttgacttcgttttaa

SEQ ID NO: 62951 - DNA, 120 bp, Artificial Sequence
  ENSG00000073331_51 (sequence is synthesized)
gatgatgtcattgttgattttaaattataaaatggaatgcttccaaaggaggttacagttcctgctgcaatatatcagtcttagaacatgaacaacttgtaattgttaagtgcatgttca

SEQ ID NO: 62952 - DNA, 120 bp, Artificial Sequence
  ENSG00000073331_52 (sequence is synthesized)
aaattgttaatttccacttgccttagtttcctcatcgaaaagagaatggcatttaagatcctaggagtgtcacaaatattaataaaatgtgtttttttctagtgagttttgttagagagg

SEQ ID NO: 62953 - DNA, 120 bp, Artificial Sequence
  ENSG00000073331_53 (sequence is synthesized)
aataaatgaagcagagtgtcatgaactaatgtggaagttctcccagatgatgatgattgaaagaagaaaacagcagaacaatatgtttagtgtgacgtcatttacgtatgagagagaaag

SEQ ID NO: 62954 - DNA, 120 bp, Artificial Sequence
  ENSG00000073331_54 (sequence is synthesized)
agatcacaccattgtactccagcctggggcacaagatcaagacttcgtctcaaaaaaaaaaaaagagagacgactcacaaggcctgctcacctcactcttgcctgaaattgggagacaaa

SEQ ID NO: 62955 - DNA, 120 bp, Artificial Sequence
  ENSG00000073331_55 (sequence is synthesized)
ggcctgctcacctcactcttgcctgaaattgggagacaaaacctttcaaaccacagttacagataaaggctcagatttccaattccatcaacatggaggactgagcacgtgcagaatctt

SEQ ID NO: 62956 - DNA, 120 bp, Artificial Sequence
  ENSG00000073331_56 (sequence is synthesized)
ctcccattacacatacataaatatggtgaattaaagatttgtaggtacctgaaacataaaaggtatttaaaatcacagcaatagactactgcttacgacacatagccaaaggaacttaca

SEQ ID NO: 62957 - DNA, 120 bp, Artificial Sequence
  ENSG00000073331_57 (sequence is synthesized)
cttgagcaaagtcctcaagggaaggggctgtcattttaatccctgggcagagatgagagacaattgccttgtgcccatgtgagaagtaaaatatttgcatcaagctggaattcttaaagg

SEQ ID NO: 62958 - DNA, 120 bp, Artificial Sequence
  ENSG00000073331_58 (sequence is synthesized)
tttgcacaggctacaaaaggagactgaacaatcccaccagcctgcccagagaagttacaaggacgcttgctctccgcccaagctctgggatggaggggaaaaaaactctcatctaaaata

SEQ ID NO: 62959 - DNA, 120 bp, Artificial Sequence
  ENSG00000073331_59 (sequence is synthesized)
atgaaccgaaactttgggtaagttttcatatgaaacttttgagttaagttattttttcctaactacatagcaatacgtagtcattgtagaaaataggaagaggaaaacaatagaaaagta

SEQ ID NO: 62960 - DNA, 120 bp, Artificial Sequence
  ENSG00000073331_60 (sequence is synthesized)
cgattttaagtgcacatttcaatggtattaagtacactcacattgttgcactgcaataactaccatccatccacagaactcttttttatctcacaaatttgaaactctgcatccagtaaa

SEQ ID NO: 62961 - DNA, 120 bp, Artificial Sequence
  ENSG00000073331_61 (sequence is synthesized)
gaataactcccatttctctcttccccagcccctggcaaacaccattctcctctctgtgtctatcagtgtgactactctaggtacttcatataagtgatatcatgctgtatttgtcctttt

SEQ ID NO: 62962 - DNA, 120 bp, Artificial Sequence
  ENSG00000073331_62 (sequence is synthesized)
gtgacactgttttcgttcattccttaaggtattcatgaatttttcaagtttatagaatgctaatatactttagaatgcaaaataatggtttgagaaattttaacaggaggtggcaattat

SEQ ID NO: 62963 - DNA, 120 bp, Artificial Sequence
  ENSG00000073331_63 (sequence is synthesized)
tttgtaaaaaactgagataactacatatattacacatattatatatacaaatatataataattctgtttcccagtgaaatggaaaaattgtctatattacaactggaaaaacattgctgt

SEQ ID NO: 62964 - DNA, 120 bp, Artificial Sequence
  ENSG00000073331_64 (sequence is synthesized)
ctgtgtcaatctaatctaagcctaagttttcctaacagaatctaatgagtcttggttctgtatttgttttcaaaggttttctctatacaagagcacagatactagctgttcctcccctgt

SEQ ID NO: 62965 - DNA, 120 bp, Artificial Sequence
  ENSG00000073331_65 (sequence is synthesized)
ctctgatatccccaagtgaggcatttagactctaagtggtctaatagattaaatttctttgaagcacaagacagccccctacccttatgctcagctctgccagattgactaatgtgaggg

SEQ ID NO: 62966 - DNA, 120 bp, Artificial Sequence
  ENSG00000073331_66 (sequence is synthesized)
aaatagctgtttgaaaaacattacttgcccataagatcttgtgttgtaaagccaaatccagtaaaagtgaagagtggtcagtgagtctaacatgaaccctgtcatcttgaaatatttaca

SEQ ID NO: 62967 - DNA, 120 bp, Artificial Sequence
  ENSG00000073331_67 (sequence is synthesized)
tatccttggtgggccaaagaagcagatttgatttcaccattcctcacagcattttaattttgaaatgctactttctaaaagttaggtagcttaaaaaagtaaatgcacccttgtttcatc

SEQ ID NO: 62968 - DNA, 120 bp, Artificial Sequence
  ENSG00000073331_68 (sequence is synthesized)
agtgtgacttgctgtctaagctactgaagtctggcatattccttccctgagccccacctagggtcctgttgactttcttatatcctcaagattaaggctgttcaggaagcatcaagtcaa

SEQ ID NO: 62969 - DNA, 120 bp, Artificial Sequence
  ENSG00000073331_69 (sequence is synthesized)
agtcattgacatgcttatttctcaactcatttattggaaattaattgaactggtacttctatgccagatagaagagagcctggggagtagcacaggaactcagattgcagctcaggattc

SEQ ID NO: 62970 - DNA, 120 bp, Artificial Sequence
  ENSG00000073331_70 (sequence is synthesized)
aggctttgattctggggataacatagggagaaccgttttcctttttgatagcgttgctttttacccacattctctcggaagattgtcaaggaagaaagcttgctaatttatatatatata

SEQ ID NO: 62971 - DNA, 120 bp, Artificial Sequence
  ENSG00000073331_71 (sequence is synthesized)
ttttctcaaataaaaaatatatttgttaggcattaaagcatgacaatatcctaaaatttttactttattgctttacgtaagattgtatttttgagtcatcccaaaataaatatatagaca

SEQ ID NO: 62972 - DNA, 120 bp, Artificial Sequence
  ENSG00000073331_72 (sequence is synthesized)
catcctcctaaaaaacaaacaaaacaggttaagcagactggggattgcaagcaaaggaaagtgaatgcttaaggagaacacaatggtgagccagggttttaaataaatgtggtcagtatt

SEQ ID NO: 62973 - DNA, 120 bp, Artificial Sequence
  ENSG00000073331_73 (sequence is synthesized)
agtggaaaagtagaataaaataataactataacttaactatcactatagagtttacaaagtgcttgtaacactttacagagtgattcagatgctctttgacttacaaaggagttgccccc

SEQ ID NO: 62974 - DNA, 120 bp, Artificial Sequence
  ENSG00000073331_74 (sequence is synthesized)
agtaaatccatcataagttggaaatataataggtcaaaaatattatacattaaaaatgcatttactacacccaacctactaaacatcatagcttagcttagcctaccttaagcaagctca

SEQ ID NO: 62975 - DNA, 120 bp, Artificial Sequence
  ENSG00000073331_75 (sequence is synthesized)
gaacccttacattagtgtacagttgggcaaaatcatctaatataatgcctattttgtaataaggtattgaatattttgtgtaatttagtgaatactgtgctgcaagcgaaaaacagaatg

SEQ ID NO: 62976 - DNA, 120 bp, Artificial Sequence
  ENSG00000073331_76 (sequence is synthesized)
gttgtagtctactaaatgtatattgctttcacaccattgtaaagtaaaaaaatcataagttgaacaattgttaagttggggttctcctgtattaccattatcatccctcttttgaacaag

SEQ ID NO: 62977 - DNA, 120 bp, Artificial Sequence
  ENSG00000073331_77 (sequence is synthesized)
gaaattaaggtgcgaagagattaatttgctcaggggaagaacagaccagtaagtggtgaaattgtgacttacagccttctccttcatccaactccaattctccatcaggaagcaccaagt

SEQ ID NO: 62978 - DNA, 120 bp, Artificial Sequence
  ENSG00000073331_78 (sequence is synthesized)
gaagagcttgaaaaaacaggtagaagccatgaggtttacttattgtatctaaagtaagctgtaggccatccagtaacactttttgtattgatgatggaaatgttctacagctgtgttcaa

SEQ ID NO: 62979 - DNA, 120 bp, Artificial Sequence
  ENSG00000073331_79 (sequence is synthesized)
tatggtagccactagctacagatggctctcaagcacttgaaatgtggtgaatgggaccgaagaactgaatttttattttagctattttttattcatttctatgtaaatagtcacatgtgg

SEQ ID NO: 62980 - DNA, 120 bp, Artificial Sequence
  ENSG00000073331_80 (sequence is synthesized)
ccagggctgccattttattggacagtgcagctctaaagcagtggctataaatgtgagacctcccaacaatagattagcatcatctgaaatctggtcagaaattcaaattcttgggtgcaa

SEQ ID NO: 62981 - DNA, 120 bp, Artificial Sequence
  ENSG00000073331_81 (sequence is synthesized)
atcaaaaacccttactgaatcaaacaccctgggggtgggagtccagcaatcagcattagagaagccctccagatgattctgatgctaaagtttgagagccactgtttgcaggaaagagta

SEQ ID NO: 62982 - DNA, 120 bp, Artificial Sequence
  ENSG00000073331_82 (sequence is synthesized)
gagtggcaagcaagggggaagggcagagagactgaatggggatatagtggagagggtcaaggtaaggagtaaggagaatccagtgagaaggctgtaggagaccaatccaataaaaaaaaa

SEQ ID NO: 62983 - DNA, 120 bp, Artificial Sequence
  ENSG00000073331_83 (sequence is synthesized)
aaagcaaagccgctcaccactccctgcctgaatcaaaggagcagcttaggtgctagccttacttaccctagaaagtctcattatgtgagcaataaatcttctcataccctcttggtacat

SEQ ID NO: 62984 - DNA, 120 bp, Artificial Sequence
  ENSG00000073331_84 (sequence is synthesized)
gtgtgcagtcatcagttttgacatccaaacaaattttcctcagatgggatccaccccacgctccgcaaagcaaccataagacagtgggggtaacagtgtagaaatactactctgtggagg

SEQ ID NO: 62985 - DNA, 120 bp, Artificial Sequence
  ENSG00000073331_85 (sequence is synthesized)
aaagaagtagactatgaaggagagtgttttggggaaagatctctgtgtcgtcttagagttcacctgctttgtgactagtgaatgcactacagaaactggcagacagcaacaccctcagcc

SEQ ID NO: 62986 - DNA, 120 bp, Artificial Sequence
  ENSG00000073331_86 (sequence is synthesized)
tgcctcggaagagacaaaagtaaatacccgtctcaaagagaatgcactgaaatatgatatcagctgcaagagagggccatctcctccggtcaaatgagaaaaatcatattatcctcgctg

SEQ ID NO: 62987 - DNA, 120 bp, Artificial Sequence
  ENSG00000073331_87 (sequence is synthesized)
gagcaggagcagcgggggatgacttccgatccgacacccccaaaatctcctggacaaagctgctgtctttgcgggataaacagaaaagggccagtccccacctcacccccagcccgccgc

SEQ ID NO: 62988 - DNA, 120 bp, Artificial Sequence
  ENSG00000073331_88 (sequence is synthesized)
gagcgaggggaatcgaggagactgggcgcaggatgggggtggacacccggccgctgctcctccgcgcgggaagttcttctaaatcaggaatggattgaaatctaatgaaccgaaactttg

SEQ ID NO: 62989 - DNA, 120 bp, Artificial Sequence
  ENSG00000073331_89 (sequence is synthesized)
agcttcccgggccactcctctcaggaagttcttctaaatcaggaatggattgaaatctaatgaaccgaaactttgggtggttgaattcataaatgtgaaatgcacagatacaaaaggcca

SEQ ID NO: 62990 - DNA, 120 bp, Artificial Sequence
  ENSG00000073331_90 (sequence is synthesized)
ctctgtgactgctttttatatttctaagatttacccatgttgttatatgtaaccataagttattcatttgtttattttttcccaatgtatgaatgtacttcaatttccttccttccttcc

SEQ ID NO: 62991 - DNA, 120 bp, Artificial Sequence
  ENSG00000073331_91 (sequence is synthesized)
ttccttccttcctttctttctctttctttcttcctttctttctctctctttctgtcttctctctttttcttcttcctttcctttcctttcctttttttttttttttttgagatagggtct

SEQ ID NO: 62992 - DNA, 120 bp, Artificial Sequence
  ENSG00000073350_0 (sequence is synthesized)
ggcaggcgcggcggagcgagcggggccggcggcgggcgccgagggacgccgaggcctcgggcgggggctggcccggggttccaggtctccagtgggggctgcagactaagcaaaatgagg

SEQ ID NO: 62993 - DNA, 120 bp, Artificial Sequence
  ENSG00000073350_1 (sequence is synthesized)
actaagcaaaatgaggcggttcctgaggccagggcatgaccctgtgcgggagaggctcaagcgggacctgttccagtttaacaagacggtggagcatggcttcccgcaccagcccagcgc

SEQ ID NO: 62994 - DNA, 120 bp, Artificial Sequence
  ENSG00000073350_2 (sequence is synthesized)
cctcggctacagcccgtccctgcgcatcctggccatcggcacccgttctggagccatcaagctctacggagccccaggcgtggagttcatggggctgcaccaggagaacaacgctgtgac

SEQ ID NO: 62995 - DNA, 120 bp, Artificial Sequence
  ENSG00000073350_3 (sequence is synthesized)
gcagatccacctcctgcccggccagtgccagctggtcaccctgctggatgacaacagcctgcacctttggagcctgaaggtcaagggcggggcatcggagctgcaggaggatgagagctt

SEQ ID NO: 62996 - DNA, 120 bp, Artificial Sequence
  ENSG00000073350_4 (sequence is synthesized)
cacactgcgtggacccccaggggctgcccccagtgccacacagatcaccgtggtcctgccacattcctcctgcgagctgctctacctgggcaccgagagtggcaacgtgtttgtggtgca

SEQ ID NO: 62997 - DNA, 120 bp, Artificial Sequence
  ENSG00000073350_5 (sequence is synthesized)
gctgccagcttttcgtgcgctggaggaccggaccatcagctcggacgcggtgctgcagcggttgccagaggaggcccgccaccggcgtgtgttcgagatggtggaggcactgcaggagca

SEQ ID NO: 62998 - DNA, 120 bp, Artificial Sequence
  ENSG00000073350_6 (sequence is synthesized)
ccctcgagaccccaaccagatcctgatcggctacagccgaggcctcgttgtcatctgggacctacagggcagccgcgtgctctaccacttcctcagcagccagcaactggagaacatctg

SEQ ID NO: 62999 - DNA, 120 bp, Artificial Sequence
  ENSG00000073350_7 (sequence is synthesized)
gtggcagcgggacggccgcctgctcgtcagctgtcactctgacggcagctactgccagtggcccgtgtccagcgaagcccagcaaccagagcccctccgcagcctcgtgccttacggtcc

SEQ ID NO: 63000 - DNA, 120 bp, Artificial Sequence
  ENSG00000073350_8 (sequence is synthesized)
ctttccttgcaaagcgattaccagaatcctctggctgaccactaggcaggggttgcccttcaccatcttccagggtggcatgccacgggccagctacggggaccgccactgcatctcagt

SEQ ID NO: 63001 - DNA, 120 bp, Artificial Sequence
  ENSG00000073350_9 (sequence is synthesized)
gatccacgatggccagcagacggccttcgacttcacctcccgtgtcatcggcttcactgtcctcacagaggcagaccctgcagccacctttgacgacccctatgccctggtggtgctggc

SEQ ID NO: 63002 - DNA, 120 bp, Artificial Sequence
  ENSG00000073350_10 (sequence is synthesized)
tgaggaggagctggtggtgattgacctgcagacagcaggctggccaccggtccagctgccctacctggcttctctgcactgttccgccatcacctgctctcaccacgtctccaacatccc

SEQ ID NO: 63003 - DNA, 120 bp, Artificial Sequence
  ENSG00000073350_11 (sequence is synthesized)
gctgaagctgtgggagcggatcattgccgccggcagccggcagaacgcacacttctccaccatggagtggccaattgatggtggcaccagcctgaccccagccccaccccagagggacct

SEQ ID NO: 63004 - DNA, 120 bp, Artificial Sequence
  ENSG00000073350_12 (sequence is synthesized)
gctgctcacagggcacgaggacggcacggtgcggttctgggatgcctcgggtgtctgcctgcggctgctctacaaactcagcactgtgcgcgtgttcctcaccgacacggaccccaacga

SEQ ID NO: 63005 - DNA, 120 bp, Artificial Sequence
  ENSG00000073350_13 (sequence is synthesized)
gaacttcagtgcccagggcgaggacgagtggcccccactccgcaaggtgggctcctttgacccctacagtgatgacccccggctgggcatccagaagatcttcctctgcaagtacagcgg

SEQ ID NO: 63006 - DNA, 120 bp, Artificial Sequence
  ENSG00000073350_14 (sequence is synthesized)
ctacctggctgtggcaggcacggcagggcaggtgctggtactggaactgaatgacgaggcagcggagcaggctgtggagcaggtggaggccgacctgctgcaggaccaagagggctaccg

SEQ ID NO: 63007 - DNA, 120 bp, Artificial Sequence
  ENSG00000073350_15 (sequence is synthesized)
ctggaaggggcacgagcgcctggcagcccgctcagggcccgtgcgctttgagcctggctttcagcccttcgtgttggtgcagtgtcagcccccggctgtggtcacctccttggccctgca

SEQ ID NO: 63008 - DNA, 120 bp, Artificial Sequence
  ENSG00000073350_16 (sequence is synthesized)
ctctgagtggcggctcgtggccttcggcaccagccatggctttggcctctttgaccaccagcagcggcggcaggtctttgttaagtgcacactgcaccccagtgaccagctggccttgga

SEQ ID NO: 63009 - DNA, 120 bp, Artificial Sequence
  ENSG00000073350_17 (sequence is synthesized)
gggcccactctcccgcgtcaagtccctcaagaagtccttgcgtcagtcattccgccggatgcgtcggagccgggtgtccagccggaagcggcacccggctggccccccaggagaggcaca

SEQ ID NO: 63010 - DNA, 120 bp, Artificial Sequence
  ENSG00000073350_18 (sequence is synthesized)
ggaggggagtgccaaggctgagcggccaggcctccagaacatggagctggcgcctgtgcagcgcaagatcgaggctcgctcggcagaggactccttcacaggcttcgtccggaccctgta

SEQ ID NO: 63011 - DNA, 120 bp, Artificial Sequence
  ENSG00000073350_19 (sequence is synthesized)
ctttgctgacacctacctgaaggacagctcccggcactgcccctcgctgtgggctggcaccaatgggggcaccatctatgccttctccctgcgtgtgcctcccgccgagcggagaatgga

SEQ ID NO: 63012 - DNA, 120 bp, Artificial Sequence
  ENSG00000073350_20 (sequence is synthesized)
tgagcctgtgcgggcagagcaggccaaggagatccagctgatgcaccgggcgccggtggtgggcatcctggtgctcgacggacacagcgtaccccttcccgagcccctcgaagtggccca

SEQ ID NO: 63013 - DNA, 120 bp, Artificial Sequence
  ENSG00000073350_21 (sequence is synthesized)
tgatctgtcgaagagccctgacatgcagggaagccaccagctgctcgtcgtatcagaggagcagttcaaggtgttcacgctgcccaaggtgagtgccaagctgaagttgaagctgacggc

SEQ ID NO: 63014 - DNA, 120 bp, Artificial Sequence
  ENSG00000073350_22 (sequence is synthesized)
cctggagggctcaagagtgcggcgggtcagcgtggcccacttcggcagtcgtcgagccgaggactacggggagcaccacctggcagtccttaccaacctgggcgacatccaggtggtctc

SEQ ID NO: 63015 - DNA, 120 bp, Artificial Sequence
  ENSG00000073350_23 (sequence is synthesized)
gctgcccctgctcaagccccaggtgcgctacagctgcatccgccgggaggacgtcagtggcatcgcctcctgcgtcttcaccaaatatggccaaggcttctacctgatctcaccctcgga

SEQ ID NO: 63016 - DNA, 120 bp, Artificial Sequence
  ENSG00000073350_24 (sequence is synthesized)
gtttgagcgcttctctctctccaccaagtggctggtggagccccggtgtctggtggattcagcagaaaccaagaaccaccgccctggtaacggtgcgggccccaagaaggccccgagccg

SEQ ID NO: 63017 - DNA, 120 bp, Artificial Sequence
  ENSG00000073350_25 (sequence is synthesized)
agccaggaactcagggactcagagtgatggcgaggagaagcagcccggcctggtgatggagcgcgctctgctcagtgatgagagagcggcaactggcgttcacatcgagccgccgtgggg

SEQ ID NO: 63018 - DNA, 120 bp, Artificial Sequence
  ENSG00000073350_26 (sequence is synthesized)
tgcagcctcagcaatggcggagcagagtgagtggctgagcgtccaggctgcgcgatgagcacacactactactgatggcctttcgggggtccctgccccaaccggagaggccggtgcaca

SEQ ID NO: 63019 - DNA, 120 bp, Artificial Sequence
  ENSG00000073350_27 (sequence is synthesized)
gggccccgccaggggctgggggcatcccggcttccacaatgcagctgctctgggcctcgggagaggagagaccccagtcccctgggctgcccttcccgggcctcgtctgtctgggtcctt

SEQ ID NO: 63020 - DNA, 120 bp, Artificial Sequence
  ENSG00000073350_28 (sequence is synthesized)
tggtcaatgttgcacagtttttattgctcccatccctttttgtagtgggctgggttttaagttataaatgttaactgcctctgggtgaaaaagtttttaataaacacctattacctcttg

SEQ ID NO: 63021 - DNA, 120 bp, Artificial Sequence
  ENSG00000073350_29 (sequence is synthesized)
tcagtgatgagagagtcctgaaggaaatccagagcacactggagggagaccgcgggtgaggcaccgcccaggccagctggggtgggcccgaggctctgccagagggctcaggggagcgct

SEQ ID NO: 63022 - DNA, 120 bp, Artificial Sequence
  ENSG00000073350_30 (sequence is synthesized)
ttttgcaaaaatgcactgaatatgaatgtacagtttaacagattcttgtagagcatccttgcagccttcctgccgggcatagaaatagaactttgatgccctccggaggtcttatgcacc

SEQ ID NO: 63023 - DNA, 120 bp, Artificial Sequence
  ENSG00000073350_31 (sequence is synthesized)
cttcctagtcaaggctccctcttgcccccacattgacttttccagaagtcactgccttgccttgccttataattgtaccgcctgtgtttacatcactggaggttgtgtccatgtctctgt

SEQ ID NO: 63024 - DNA, 120 bp, Artificial Sequence
  ENSG00000073350_32 (sequence is synthesized)
tcactggaggttgtgtccatgtctctgtcttgttctacatgctgcccttctccccttggtgacatgtcctagccatctttctttctttttttttggaaatggagtctcactctgtcaccc

SEQ ID NO: 63025 - DNA, 78 bp, Artificial Sequence
  ENSG00000073350_33 (sequence is synthesized)
cgcctcccaagtagctggggttatagccatgtgccaccacgcccagctaatgttttatatttttagtagagacagggt

SEQ ID NO: 63026 - DNA, 60 bp, Artificial Sequence
  ENSG00000073350_34 (sequence is synthesized)
cctcaagtggatccactgcgcccagcccctagccatatttctatgctggcacatggagca

SEQ ID NO: 63027 - DNA, 120 bp, Artificial Sequence
  ENSG00000073350_35 (sequence is synthesized)
cccagcccctagccatatttctatgctggcacatggagcagccacctctgcatagggagccccatggctgtgccatgctgggggccattccccctggtggacggcatcggaggctcacgg

SEQ ID NO: 63028 - DNA, 120 bp, Artificial Sequence
  ENSG00000073350_36 (sequence is synthesized)
acatggcaggcgccatgttgctctcccagggccccaagtggcacatacacactgtgcagaggcatggggtgcaggcgatgggaacgccgcctcggtccagcgtgctgccctctgtccctc

SEQ ID NO: 63029 - DNA, 120 bp, Artificial Sequence
  ENSG00000073350_37 (sequence is synthesized)
gagagggtaaaggctttgtccaaagccacacagcagggttcgcctcacccagtttcttggggaacttctcggagcaagattcccaagcacaggtctaccatgtggatgtggcatgagcta

SEQ ID NO: 63030 - DNA, 120 bp, Artificial Sequence
  ENSG00000073350_38 (sequence is synthesized)
ggccaggtgcagtggctcctgcctgtaaccccagtgctgtgggaggccaaggtggtaggatcgcttgaacccaggagttcaagtccagcctggacaacgtagggagacccttgtctctac

SEQ ID NO: 63031 - DNA, 120 bp, Artificial Sequence
  ENSG00000073350_39 (sequence is synthesized)
gccgaggcctcgggcgggggctggcccggggttccagataacgagtgaggactcgctgtgtgcactcggatacagcagtgaataaaaggacaaaaggtcttgaatgggaaaaagaaagct

SEQ ID NO: 63032 - DNA, 120 bp, Artificial Sequence
  ENSG00000073350_40 (sequence is synthesized)
gccgagggacgccgaggcctcgggcgggggctggcccggggttccagatgttggatgtgatccttaaacaaagcaaagatgtctgccgtcgttgaaagttgtttctaaaaggtctccagt

SEQ ID NO: 63033 - DNA, 120 bp, Artificial Sequence
  ENSG00000073350_41 (sequence is synthesized)
gcccaggcggggcgccctgacccggcctctaccttccagagaagcagcccggcctggtgatggagcgcgctctgctcagtgatgagagagtcctgaaggaaatccagagcacactggagg

SEQ ID NO: 63034 - DNA, 120 bp, Artificial Sequence
  ENSG00000073350_42 (sequence is synthesized)
cctgattattctccactagggcccgtgggaaagagaacctttctgagcacagcccatgagcgcacagggaagctggactggggctagccagagagaggggaggggaccggcagagacccc

SEQ ID NO: 63035 - DNA, 120 bp, Artificial Sequence
  ENSG00000073350_43 (sequence is synthesized)
aggcacggtggcatgggccagcaccccctgaccgagtgctctgtgccacccgtgcccacttgagtttctcatggctgtggctggttggagaggctgaggccgagagtccctggacagcct

SEQ ID NO: 63036 - DNA, 120 bp, Artificial Sequence
  ENSG00000073350_44 (sequence is synthesized)
tccccgaggtcagaaggaggaagcatctgcccggtgccctggcctggagtcactgcaggcctctcccctgccccgacttgggctctgatctgggaaggatggccttggtgtttctacctt

SEQ ID NO: 63037 - DNA, 120 bp, Artificial Sequence
  ENSG00000073350_45 (sequence is synthesized)
atccgcaccccgcctcctccatctgcaccccgcctcctccatccgcaccccgtgttatgctggagggtccctggcgtctttcctgcctcctagcccaggctctctgccatctgtctcctg

SEQ ID NO: 63038 - DNA, 120 bp, Artificial Sequence
  ENSG00000073350_46 (sequence is synthesized)
tcttggcagaaagtgaccaatgtttgtcctggcttgaaatgttatgacctcattaaagggccttatgggcttgttttccgaggagtcaggggaccccgtccatggcatctcccctgctgg

SEQ ID NO: 63039 - DNA, 120 bp, Artificial Sequence
  ENSG00000073350_47 (sequence is synthesized)
ggggacagcagagcctgctggtctccagatgacgtgtctctccctggctggttctcccctgctgtatcacagcaagggctgagctgacctgggattggggtcttctatgttggggcctgt

SEQ ID NO: 63040 - DNA, 120 bp, Artificial Sequence
  ENSG00000073350_48 (sequence is synthesized)
gtggttgtcagagagccttccagcctctcccaggagggaaaacctgggagtaaaccctggttgcccagctccacccgactcccacgctaagggtcagacacccaaacatggcttctcggc

SEQ ID NO: 63041 - DNA, 120 bp, Artificial Sequence
  ENSG00000073350_49 (sequence is synthesized)
atgaccgtgaagtctctgacctgggtaggtggtggtgccaggccttgggagggggagcccaggccaggagtggcgaagaacagatttgaggaaaagtaatgtattttgatcgttttgatt

SEQ ID NO: 63042 - DNA, 120 bp, Artificial Sequence
  ENSG00000073350_50 (sequence is synthesized)
gtgttttttcacaggtgctaccaagcgacagccaacatgtcttttgcagctcaggatcagggtggcagcctgacagttgccagggtagggcttcgcctttctatggagttgctcccaccg

SEQ ID NO: 63043 - DNA, 120 bp, Artificial Sequence
  ENSG00000073350_51 (sequence is synthesized)
gcctgactgggaaaaatctcccagggatcaggtcactggcctggtgccccagggccagggctgctgtgtctcctccccaccctaggctccatgcatgggtcctgctgcctcgggggaggg

SEQ ID NO: 63044 - DNA, 120 bp, Artificial Sequence
  ENSG00000073350_52 (sequence is synthesized)
cagcccctctctgtgtttgcatcattgcacatgggccccgagggcctggcactcaaggcaggcaggggatggtgtccgaccttccagagctttcctgagcctactcctagctacggagcc

SEQ ID NO: 63045 - DNA, 120 bp, Artificial Sequence
  ENSG00000073350_53 (sequence is synthesized)
gacagagtgtgaaaccctgtctcgagaaaagaaaaaaaaaaaaaaagacaaatggtttaatcatccagcgcacatttattgagcactagctgggtccaggcctgagtgaggtgatgtgat

SEQ ID NO: 63046 - DNA, 120 bp, Artificial Sequence
  ENSG00000073350_54 (sequence is synthesized)
tgtgtgcagtaaagaaaatgccacccctagcaactggtgtgctgaagaccacgcgtgctgctgcctgtggggagaggcttgacaggtgcatctgagcagggagagcaggccccatggagg

SEQ ID NO: 63047 - DNA, 120 bp, Artificial Sequence
  ENSG00000073350_55 (sequence is synthesized)
agaaaccagggaagagggttggcaggcacagctgcatgcctctggggtgcctatcctggttgggaccctgccttccagccaggtgtatccccccaggagccctgtgccagggagctctca

SEQ ID NO: 63048 - DNA, 120 bp, Artificial Sequence
  ENSG00000073350_56 (sequence is synthesized)
gcagccttgcatgcagagccagggctactgcccacacctgctgccctcctggagatggaaaggctttgctcaagcagccaagaacagggctttctggatctgcagatgccctggctccaa

SEQ ID NO: 63049 - DNA, 120 bp, Artificial Sequence
  ENSG00000073350_57 (sequence is synthesized)
actgtgaagctggcctggccccggggtggcagcctactggacttggagagagaggccctgctccacctgtttgggccgggcctaatcgatacctgagtgccaggacagacccctgcagct

SEQ ID NO: 63050 - DNA, 120 bp, Artificial Sequence
  ENSG00000073350_58 (sequence is synthesized)
gaactcagggactcagagtgatggcgaggagaagcagcccggcctggtgatggagcgcgctctgctcagtgatgagagtgagttgggtgggagagggtggggctggcaggaggggtgggg

SEQ ID NO: 63051 - DNA, 120 bp, Artificial Sequence
  ENSG00000073350_59 (sequence is synthesized)
aaggggggtcagggtcaagggaggctgggcaggccactgccctgaggcggggtacagatccatgggcacccacggagaaagggggtggaagggctgtggctagccgccccaagggcctca

SEQ ID NO: 63052 - DNA, 120 bp, Artificial Sequence
  ENSG00000073417_0 (sequence is synthesized)
agtagccgggccaaggcgggagcggctgcctctcagggtcgctccagggccgcgctaggaaagccgccgccgccgcagcgcccgcaccgcgataaaaggggcggccgcgtttcctgacgc

SEQ ID NO: 63053 - DNA, 120 bp, Artificial Sequence
  ENSG00000073417_1 (sequence is synthesized)
gtttcctgacgcgagatccgcgctcgccgccgcccgcccaggcggcgatgacacggcgcccgcggcggcccggaggcgccgggtgggccgtttgctgaccggatcgcggctacccgccag

SEQ ID NO: 63054 - DNA, 120 bp, Artificial Sequence
  ENSG00000073417_2 (sequence is synthesized)
ccgccagcatgggctgtgccccgagcatccacatttccgagcgcctggtggccgaggacgcgcctagccccgcggcaccgccgctgtcgtccggcgggccgcgcctcccgcagggccaga

SEQ ID NO: 63055 - DNA, 120 bp, Artificial Sequence
  ENSG00000073417_3 (sequence is synthesized)
cagaagacggccgccttgccccggacccgcggcgccggcctcttggagtcggagcttcgcgacggcagcggcaagaaggtagcagtagctgatgtgcagtttggccccatgagatttcat

SEQ ID NO: 63056 - DNA, 120 bp, Artificial Sequence
  ENSG00000073417_4 (sequence is synthesized)
caagatcaacttcaggtacttttagtgtttaccaaagaagataaccaatgtaatggattctgcagggcatgtgaaaaagcagggtttaagtgtacagttaccaaggaggctcaggctgtc

SEQ ID NO: 63057 - DNA, 120 bp, Artificial Sequence
  ENSG00000073417_5 (sequence is synthesized)
cttgcctgtttcctggacaaacatcatgacattatcatcatagaccacagaaatcctcgacagctggatgcagaggcactgtgcaggtctatcagatcatcaaaactctcagaaaacaca

SEQ ID NO: 63058 - DNA, 120 bp, Artificial Sequence
  ENSG00000073417_6 (sequence is synthesized)
gttattgttggtgtagtacgcagggtggatagagaagagttgtccgtaatgcctttcatttctgctggatttacaaggaggtatgtagaaaaccccaacatcatggcctgctacaatgaa

SEQ ID NO: 63059 - DNA, 120 bp, Artificial Sequence
  ENSG00000073417_7 (sequence is synthesized)
ctgctccagctggagtttggagaggtgcgatcacaactgaaactcagggcttgtaactcagtattcactgcattagaaaacagtgaagatgcaattgaaattacaagcgaagaccgtttt

SEQ ID NO: 63060 - DNA, 120 bp, Artificial Sequence
  ENSG00000073417_8 (sequence is synthesized)
atacagtatgcaaatcctgcatttgaaacaacaatgggctatcagtcaggtgaattaatagggaaggagttaggagaagtgcctataaatgaaaaaaaggctgacttgctcgatactata

SEQ ID NO: 63061 - DNA, 120 bp, Artificial Sequence
  ENSG00000073417_9 (sequence is synthesized)
aattcatgcatcaggataggcaaggagtggcaaggaatttactatgccaaaaagaaaaacggagataatatacaacaaaatgtgaagataatacctgtcattggacagggaggaaaaatt

SEQ ID NO: 63062 - DNA, 120 bp, Artificial Sequence
  ENSG00000073417_10 (sequence is synthesized)
agacactatgtgtccattatcagagtgtgcaatggcaacaataaggctgagaaaatatccgaatgtgttcagtctgacactcatacagataatcagacaggcaaacataaagacaggaga

SEQ ID NO: 63063 - DNA, 120 bp, Artificial Sequence
  ENSG00000073417_11 (sequence is synthesized)
aaaggctcactagacgtcaaagctgttgcctcccgtgcaactgaagtttccagccagagacgacactcttccatggcccggatacattccatgacaattgaggcgcccatcaccaaggta

SEQ ID NO: 63064 - DNA, 120 bp, Artificial Sequence
  ENSG00000073417_12 (sequence is synthesized)
atcaatattatcaatgctgcccaggaaagtagtcccatgcctgtgacagaagccctagaccgtgtgctggaaattctaagaaccactgagttatattcaccacagtttggtgctaaagat

SEQ ID NO: 63065 - DNA, 120 bp, Artificial Sequence
  ENSG00000073417_13 (sequence is synthesized)
gatgatccccatgccaatgaccttgttgggggcttaatgtctgatggtttgcgaagactatcagggaatgaatatgttctttcaacaaaaaacactcaaatggtttcaagcaatataatc

SEQ ID NO: 63066 - DNA, 120 bp, Artificial Sequence
  ENSG00000073417_14 (sequence is synthesized)
actcccatctcccttgatgatgtcccaccacggatagctcgggccatggaaaatgaggaatactgggactttgatatttttgaactggaggctgccacccacaataggcctttgatttat

SEQ ID NO: 63067 - DNA, 120 bp, Artificial Sequence
  ENSG00000073417_15 (sequence is synthesized)
cttggtctcaaaatgtttgctcgctttggaatctgtgaattcttacactgctccgagtcaacgctaagatcatggttacaaattatcgaagccaattatcattcctccaatccctaccac

SEQ ID NO: 63068 - DNA, 120 bp, Artificial Sequence
  ENSG00000073417_16 (sequence is synthesized)
cttcatgccactgcctattttctctccaaggagaggataaaggaaactttagatccaattgatgaggtcgctgcactcatcgcagccaccattcatgatgtggatcaccctgggagaacc

SEQ ID NO: 63069 - DNA, 120 bp, Artificial Sequence
  ENSG00000073417_17 (sequence is synthesized)
aactccttcctgtgtaatgctggaagtgagctggccattttgtacaatgacactgctgtgctggagagccaccatgcggccttggccttccagctgaccactggagatgataaatgcaat

SEQ ID NO: 63070 - DNA, 120 bp, Artificial Sequence
  ENSG00000073417_18 (sequence is synthesized)
atatttaaaaacatggagaggaatgattatcggacactgcgccaggggattatcgacatggtcttagccacagaaatgacaaagcactttgagcatgtcaacaaatttgtcaacagcatc

SEQ ID NO: 63071 - DNA, 120 bp, Artificial Sequence
  ENSG00000073417_19 (sequence is synthesized)
aacaaacccttggcaacactagaagaaaatggggaaactgataaaaaccaggaagtgataaacactatgcttaggactccagagaaccggaccctaatcaaacgaatgctgattaaatgt

SEQ ID NO: 63072 - DNA, 120 bp, Artificial Sequence
  ENSG00000073417_20 (sequence is synthesized)
gctgatgtgtccaatccctgccgacccctgcagtactgcatcgagtgggctgcacgcatttcggaagaatatttttctcagactgatgaagagaagcagcagggcttacctgtggtgatg

SEQ ID NO: 63073 - DNA, 120 bp, Artificial Sequence
  ENSG00000073417_21 (sequence is synthesized)
ccagtgtttgacagaaatacctgcagcatccccaaatcccaaatctctttcattgattacttcatcacagacatgtttgatgcttgggatgcctttgtagacctgcctgatttaatgcag

SEQ ID NO: 63074 - DNA, 120 bp, Artificial Sequence
  ENSG00000073417_22 (sequence is synthesized)
catcttgacaacaactttaaatactggaaaggactggacgaaatgaagctgcggaacctccgaccacctcctgaatagtgggagacaccacccagagccctgaagctttgttccttcggt

SEQ ID NO: 63075 - DNA, 120 bp, Artificial Sequence
  ENSG00000073417_23 (sequence is synthesized)
catttggaattcctgagggcagccagagctccttggtcctttcagtactaggcagaacagcccccgatctgcatagcctgtgaaagcccacggggacatcagtaaccttctgcagccacc

SEQ ID NO: 63076 - DNA, 120 bp, Artificial Sequence
  ENSG00000073417_24 (sequence is synthesized)
atccaatgccattactgtcaagtgagacttggccactgtagcctgggcctgctgcaggagctcttcagaaaggcacatgaggaccacggtttgcctcagtttctggtaaaacacaaggtc

SEQ ID NO: 63077 - DNA, 120 bp, Artificial Sequence
  ENSG00000073417_25 (sequence is synthesized)
tggagtgcccctgcaaagggtattgatggacttcctgccagtgacagagcatgtctattgcaaacaattctctcagttacgttcagcacttaagaacggctaatggcaataggatcttta

SEQ ID NO: 63078 - DNA, 120 bp, Artificial Sequence
  ENSG00000073417_26 (sequence is synthesized)
gcaactttttcacatcatagaaggtgcaatcgctcacttgggaacactactgagagtgacttctcttttaaaattgagtagcagatgaaaaattaaaatttgaacttgattattaatatc

SEQ ID NO: 63079 - DNA, 120 bp, Artificial Sequence
  ENSG00000073417_27 (sequence is synthesized)
aattaaaatgttttatttattttattaaaagctcaatattttctatgaattcaaaaatacttcagagccaaagccaacttcaaataccgtgaccaaatttacatgattcatattcattat

SEQ ID NO: 63080 - DNA, 120 bp, Artificial Sequence
  ENSG00000073417_28 (sequence is synthesized)
gcattacttggtatacagacttattttcataatgcaaattaataaaatgacacttttactgcactatagaaatattcatgtatgttaaacttttctgattgaggctaactggaaaaagct

SEQ ID NO: 63081 - DNA, 120 bp, Artificial Sequence
  ENSG00000073417_29 (sequence is synthesized)
ggggtcgtattctaagtgctaaagaaggctgcttctactgtatagaacccagggctctgaaacagctctagccgcctaatgcacttcacaggtaactccccaaggtaaaactagactctc

SEQ ID NO: 63082 - DNA, 120 bp, Artificial Sequence
  ENSG00000073417_30 (sequence is synthesized)
ttgttggttcgcaaagaaaagttaggacttaacacttttttctaaaattttataattcaatttccaaaagtctactctattttatactgtttctacaaaatattccttataaaaacaaag

SEQ ID NO: 63083 - DNA, 120 bp, Artificial Sequence
  ENSG00000073417_31 (sequence is synthesized)
aacaaaaattgaatatttaatgaattgacattttataaccaacctgtttttatctacggtgggaatctttgatgccagaaatttataaagaggttctgtatcttcacaccttgaataagc

SEQ ID NO: 63084 - DNA, 120 bp, Artificial Sequence
  ENSG00000073417_32 (sequence is synthesized)
ataataccataaaaaatgacacttgacatgtcaatgtatttgtcatttcattttaaactcgtatttgtggtttttttcccagataaaaatgaaattaaaccatttctttttaagaaatca

SEQ ID NO: 63085 - DNA, 120 bp, Artificial Sequence
  ENSG00000073417_33 (sequence is synthesized)
gcggccgaggcgagcccggcgatgtgagaggcggccgtcggctcctgcctcaggaagggcatgttcggaggggcggcctcggcacgccacccgcctaagcgcccccttcccaccgcagcc

SEQ ID NO: 63086 - DNA, 120 bp, Artificial Sequence
  ENSG00000073417_34 (sequence is synthesized)
tcggagaggacaggaaggagccggctgcaccgcgccagggtctccgcaaaccgggagcccagggagggcgggaagactggcgggggtccgaggcagcccgctacaggatacgtgatggac

SEQ ID NO: 63087 - DNA, 120 bp, Artificial Sequence
  ENSG00000073417_35 (sequence is synthesized)
gagtgggcctgctgccctcctggagcctcaggagaacatagcagaaagcccagccgggtatcacccaagcagaagctcgtctgggctccagaattcttcgtgggttatgtgcttatggct

SEQ ID NO: 63088 - DNA, 120 bp, Artificial Sequence
  ENSG00000073417_36 (sequence is synthesized)
gattccgtctcaaaaaaaaaaaaaaaagttaatcctttaaagcctatttgttctccaaattacatcactttacagacactcaaatggtttcaagcaatataatcactcccatctcccttg

SEQ ID NO: 63089 - DNA, 120 bp, Artificial Sequence
  ENSG00000073417_37 (sequence is synthesized)
ccagctggagtttggagaggtgcgatcacaactgaaactcagataatcagacaggcaaacataaagacaggagaaaaggctcactagacgtcaaagctgttgcctcccgtgcaactgaag

SEQ ID NO: 63090 - DNA, 120 bp, Artificial Sequence
  ENSG00000073417_38 (sequence is synthesized)
ctccagtaagtgactgaggtcagtggtcaatcacaggggtggacctgctgggcccagggcagccttgagtgcattggtggagagggctgccctgagttgtcctgtgggaggaccacctgg

SEQ ID NO: 63091 - DNA, 120 bp, Artificial Sequence
  ENSG00000073417_39 (sequence is synthesized)
agtatggattgtgcacaagcctggtacctggtcagggtggggccctaaggaaggagtaacagggcaccaggtggctctgagtcaccagggcctgggggagagtctgctggccacagtgat

SEQ ID NO: 63092 - DNA, 120 bp, Artificial Sequence
  ENSG00000073417_40 (sequence is synthesized)
atatgtatatttgattgtctcatgattaattgggaagaattttgtcatttttactgaagtcacttgtacagagacgccaaaggatgtttgtgatctcttctttatttattggtggccttg

SEQ ID NO: 63093 - DNA, 120 bp, Artificial Sequence
  ENSG00000073417_41 (sequence is synthesized)
gtcacagtgagaagaaatgttctcagagcgttttgtgtattgcaaaagggaggtgccattttcgtaatgaaaaattaacgacatatccatcaaattagagactcagaagagaaataatgc

SEQ ID NO: 63094 - DNA, 120 bp, Artificial Sequence
  ENSG00000073417_42 (sequence is synthesized)
ctattacctgaaatcagtttggggttgggatcattttttatcttaattgctttagcaatgtaagtgaatcagaactgaagtggaaaatgttcttgggtttatgttttcaacacaaagtat

SEQ ID NO: 63095 - DNA, 120 bp, Artificial Sequence
  ENSG00000073417_43 (sequence is synthesized)
agaagtctcttcaactggagggggaatggcttgcaacaatgggagaaagtgcaacaatgcaccccttctttgtctgcacctctgtatcagtgatcagagcacagatccctgatatttgga

SEQ ID NO: 63096 - DNA, 120 bp, Artificial Sequence
  ENSG00000073417_44 (sequence is synthesized)
ggacatggttgtttttgccttccctgggtcctgcaagttgtgttcaggttgctttaggaacacatgcacagctgcccaccatgggcctgggtacctgctatgtgctaagagctaaaatta

SEQ ID NO: 63097 - DNA, 120 bp, Artificial Sequence
  ENSG00000073417_45 (sequence is synthesized)
actgcggtttaccatccaagccttcccctggaagttgcacgtcttcaattgttcctaaaatagttgcatcagacatattctgccagtgcaatattgtctaggtggggaaacagattcctg

SEQ ID NO: 63098 - DNA, 120 bp, Artificial Sequence
  ENSG00000073417_46 (sequence is synthesized)
gtgcttcttactctactgtcttctctaaatccatcttttaagactctcctgtggacctcttggaccatcttccctcataaaaattctggctttggcatccagttacaccagtatgagact

SEQ ID NO: 63099 - DNA, 120 bp, Artificial Sequence
  ENSG00000073417_47 (sequence is synthesized)
ggcccatagttacacaactcaagagaataggtaataaccatgcactgtctgttctgactctttcaccctactgaagaatcttcctcctcagtctttggtctagaatattagggaccctca

SEQ ID NO: 63100 - DNA, 120 bp, Artificial Sequence
  ENSG00000073417_48 (sequence is synthesized)
ttctttttatgccttctgagagataaaattattgcagagcaatgcagaaactgagccagtggcccataattactagacatcagcttctcatggttaaaaatatatgtggatttttctccc

SEQ ID NO: 63101 - DNA, 120 bp, Artificial Sequence
  ENSG00000073417_49 (sequence is synthesized)
atcactaagcaaacttcgtaatgtgtttactagaataggtcactgtttgaggggagagattggaggagggcagtcagttgggaaacattttgtaggaagtcttatggatctagttcttct

SEQ ID NO: 63102 - DNA, 120 bp, Artificial Sequence
  ENSG00000073417_50 (sequence is synthesized)
gttgctgtgacgaatcataccatcacacagaggcccagattgggatctcatcaacacctacagagtcactgggcaaattacaaaatgtgtctcttcccctgggtagcagcccagtgccag

SEQ ID NO: 63103 - DNA, 120 bp, Artificial Sequence
  ENSG00000073417_51 (sequence is synthesized)
aattcatcacctggagctggttttcagtcccaccttctcccttccttgggcccctttgtgttgtatacaggctattcaaatcttctggtggtcctgagtttacagcacagtgtatggagc

SEQ ID NO: 63104 - DNA, 120 bp, Artificial Sequence
  ENSG00000073417_52 (sequence is synthesized)
taaacaaacctgggtggaatcccagcactaccacttgctgtgtggtcttaatgcagggtacttagaacttcagttttctagctataaactctcaccacattactatcagattcagtgaaa

SEQ ID NO: 63105 - DNA, 120 bp, Artificial Sequence
  ENSG00000073417_53 (sequence is synthesized)
taacatgtgcagcccttagcacagtaaccagaacacactaagtcttccattggtgctgtgattgttattactcactggggtttggttatgatattacatttatctttgatttagcattac

SEQ ID NO: 63106 - DNA, 120 bp, Artificial Sequence
  ENSG00000073417_54 (sequence is synthesized)
attctcaaatggataagtacttacagtaagtgctattatgctcctctgtaaaatagaaagtgtcaaccatttttcaatgacattccatggttctgactgctggattgcattattcatgtg

SEQ ID NO: 63107 - DNA, 120 bp, Artificial Sequence
  ENSG00000073417_55 (sequence is synthesized)
ccatttgggtgtaagatttcattgtccatcaggaaaaaaatggaaataggcacagagggaatcagcgtttatttagtatctattattggggggctctctatattgtcatctcatttggcc

SEQ ID NO: 63108 - DNA, 120 bp, Artificial Sequence
  ENSG00000073417_56 (sequence is synthesized)
tttaacaaatgagaagttgaggctgaggaagattaattcacttaaagtcacatgtagctagtaaaaggcaaagccagaatcacattcattttatttgttcattttatttctcctttcctg

SEQ ID NO: 63109 - DNA, 120 bp, Artificial Sequence
  ENSG00000073417_57 (sequence is synthesized)
ctccccacttttcctgggggctataaggagatccttaggattcctcataatcatttcatttatctactatttactttatttgcctctagaatagaaattttgctttcatttttggcactg

SEQ ID NO: 63110 - DNA, 120 bp, Artificial Sequence
  ENSG00000073417_58 (sequence is synthesized)
tttaaattattatttaatttcttcaaaagttggctcctgacccagatggacaggtgaattctttagccctttaaggaatttttccatgttacataaaacttttcagagtcttgaaaaaga

SEQ ID NO: 63111 - DNA, 120 bp, Artificial Sequence
  ENSG00000073417_59 (sequence is synthesized)
tggaaaacttccagatcattttgtcaaactcacaaaactctgacatcaacctgacaaagatagcactaaaagggggaagaaaactaaatcaattcccagttaatgtaagtggtgcctatt

SEQ ID NO: 63112 - DNA, 120 bp, Artificial Sequence
  ENSG00000073417_60 (sequence is synthesized)
ttaaattttatttaaaattgtttctctcctttattaatattagtttatgctggtctaagtcaatatctcagactaaggacttttttggtgatgggtctagagaaagactggctgaggagg

SEQ ID NO: 63113 - DNA, 120 bp, Artificial Sequence
  ENSG00000073417_61 (sequence is synthesized)
tgactcctatctgttgagaacacctgtattttggtaagtccttaacttgtgtgagactaacaaatatgcagaaatataactgtttcagggtggagataggaaaactagatttgctcacgt

SEQ ID NO: 63114 - DNA, 120 bp, Artificial Sequence
  ENSG00000073417_62 (sequence is synthesized)
agtatgcttttcttagaaatctgaaatattcttacctgaaagtaataggggagaaagaaaactatacagaaggcttccttgccttcagtgtcataccccagtttttaaaagctctcttgt

SEQ ID NO: 63115 - DNA, 120 bp, Artificial Sequence
  ENSG00000073464_0 (sequence is synthesized)
gaaatcgacatttgcctctggcaggaaaatgagcttgtcagtttctgcctccattagaccctcaacccaaaggagcaggagatttcggtagcgttttaactttatctcagaatctgaaag

SEQ ID NO: 63116 - DNA, 120 bp, Artificial Sequence
  ENSG00000073464_1 (sequence is synthesized)
cggaaggccaggcaagctgcacacatcaagcgaaacgcctgaggggcggccagcgcgagggtttctggccatcgaccctcacctcccgggacttccagggtcttccccccaccccgcgca

SEQ ID NO: 63117 - DNA, 120 bp, Artificial Sequence
  ENSG00000073464_2 (sequence is synthesized)
cacctccctgcctcgccccgagggcgtcacgtggcagcgtggggcccgcctcctggtgatgtcacggcgctcgcagccgtcgcgctgaagaaaggatgctcgaggatgctgtccaggtgg

SEQ ID NO: 63118 - DNA, 120 bp, Artificial Sequence
  ENSG00000073464_3 (sequence is synthesized)
gcggccgcgggcgcgatgcggcactgcaggtgtaattagcatggtcaatgcgggagcgatgagtggctctggaaacctgatggatttcctcgatgagccgttccctgatgtggggacgta

SEQ ID NO: 63119 - DNA, 120 bp, Artificial Sequence
  ENSG00000073464_4 (sequence is synthesized)
tgaggacttccacaccatcgactggctaagggaaaagtcacgggacaccgacagacacaggaagatcaccagcaagagcaaggagtccatatgggagttcatcaagagcctgctggatgc

SEQ ID NO: 63120 - DNA, 120 bp, Artificial Sequence
  ENSG00000073464_5 (sequence is synthesized)
ctggtcgggatgggtggtgatgctgctcatcggcctgctggcgggcaccttggctggggtcatcgatctcgccgtggactggatgacggacctgaaggagggggtctgcctgtctgcctt

SEQ ID NO: 63121 - DNA, 120 bp, Artificial Sequence
  ENSG00000073464_6 (sequence is synthesized)
ctggtatagccatgagcagtgttgctggacttctaacgagaccacttttgaggacagagacaagtgtcccctgtggcagaaatggtcggagctgctggtgaatcagtcagagggtgccag

SEQ ID NO: 63122 - DNA, 120 bp, Artificial Sequence
  ENSG00000073464_7 (sequence is synthesized)
tgcttacattctgaattacttaatgtacatcctatgggcgctgctgtttgcatttttggctgtctccctggtgcgtgtatttgcaccatatgcctgtggctctggcataccagagataaa

SEQ ID NO: 63123 - DNA, 120 bp, Artificial Sequence
  ENSG00000073464_8 (sequence is synthesized)
gaccattttgagcggctttatcatcaggggctacttggggaagtggaccctgctaatcaagacagtcacgctggtgctggtagtgtcctccggtctgagccttgggaaggaagggccgct

SEQ ID NO: 63124 - DNA, 120 bp, Artificial Sequence
  ENSG00000073464_9 (sequence is synthesized)
agtgcacgtggcttgttgctgtggcaacttcttcagcagccttttctccaagtacagcaagaatgagggcaagaggcgggaggtgctttcagctgcagcggctgctggagtctctgttgc

SEQ ID NO: 63125 - DNA, 120 bp, Artificial Sequence
  ENSG00000073464_10 (sequence is synthesized)
ctttggtgcaccaattggaggcgtgcttttcagtctagaagaggtcagttactactttcccctgaagaccttgtggaggtcatttttcgcagccctggtggcggcctttacgctgagatc

SEQ ID NO: 63126 - DNA, 120 bp, Artificial Sequence
  ENSG00000073464_11 (sequence is synthesized)
catcaatccctttgggaatagccgtctcgttctcttttatgtggaataccacacgccctggtacatggctgaactcttccccttcatcctgcttggggtcttcgggggcttgtggggaac

SEQ ID NO: 63127 - DNA, 120 bp, Artificial Sequence
  ENSG00000073464_12 (sequence is synthesized)
cctcttcatccgctgcaacatcgcctggtgcaggaggcgcaagaccaccaggctggggaagtacccggtgctggaggtcattgtggtgactgccatcactgccatcattgcctaccccaa

SEQ ID NO: 63128 - DNA, 120 bp, Artificial Sequence
  ENSG00000073464_13 (sequence is synthesized)
tccctacacacgccagagcaccagcgagctcatttctgagctgttcaatgactgtggagcccttgagtcttcccagctctgtgactacatcaatgaccccaacatgactcggcctgtgga

SEQ ID NO: 63129 - DNA, 120 bp, Artificial Sequence
  ENSG00000073464_14 (sequence is synthesized)
tgacattccagaccggccggctggtgtcggtgtttacacggccatgtggcagctggccctggcactgatcttcaaaatcgtcgttaccatatttacctttggcatgaagatcccgtcggg

SEQ ID NO: 63130 - DNA, 120 bp, Artificial Sequence
  ENSG00000073464_15 (sequence is synthesized)
cctcttcatccccagcatggctgtgggcgcgatagcgggcaggatggtgggaattggcgtggagcagctggcctaccatcaccatgactggatcatcttcaggaactggtgcagacccgg

SEQ ID NO: 63131 - DNA, 120 bp, Artificial Sequence
  ENSG00000073464_16 (sequence is synthesized)
tgcagactgtgtcacgccagggctgtacgcaatggtgggagctgcggcctgcctcggtggagttaccaggatgacggtgtcattggtggtcatcatgtttgaattaaccgggggtctgga

SEQ ID NO: 63132 - DNA, 120 bp, Artificial Sequence
  ENSG00000073464_17 (sequence is synthesized)
gtacatcgtgcccctgatggcggcggctgtgaccagcaagtgggtagctgatgcatttgggaaagaaggcatctacgaggcccacatccacttaaatgggtaccctttccttgacgtgaa

SEQ ID NO: 63133 - DNA, 120 bp, Artificial Sequence
  ENSG00000073464_18 (sequence is synthesized)
ggacgagtttactcaccgcacactggccaccgacgtcatgcggccccggcggggagagccgccactgtcggtgctcacccaggacagcatgactgtcgaggacgtggagacgctcatcaa

SEQ ID NO: 63134 - DNA, 120 bp, Artificial Sequence
  ENSG00000073464_19 (sequence is synthesized)
ggagaccgactacaacggcttccccgtggtggtctccagagactccgagcgcctcattggatttgcccagaggagggaactgattctcgcaataaagaacgccagacagaggcaggaggg

SEQ ID NO: 63135 - DNA, 120 bp, Artificial Sequence
  ENSG00000073464_20 (sequence is synthesized)
cattgtgagcaattccatcatgtacttcacggaggaaccccccgagctgccggccaacagcccacatcccctgaagctgcggcgcatcctgaacctcagcccgtttacagtgacagacca

SEQ ID NO: 63136 - DNA, 120 bp, Artificial Sequence
  ENSG00000073464_21 (sequence is synthesized)
cactccgatggaaacggtggtggatatcttccggaaactggggcttcggcagtgcctggtgacgcggagcgggagacttcttggcatcatcacaaaaaaggatgttctgagacatatggc

SEQ ID NO: 63137 - DNA, 120 bp, Artificial Sequence
  ENSG00000073464_22 (sequence is synthesized)
ccagatggcaaaccaggaccccgaatccatcatgtttaattagcaacaaggtggcaattattttcagaaaaacactgactgtgtcatttaaaaagaaataaatgatatgttattatccca

SEQ ID NO: 63138 - DNA, 120 bp, Artificial Sequence
  ENSG00000073464_23 (sequence is synthesized)
atgaaagatcatgcattggggacagcagaaacaaaagcttttttggaaaggcggggaagaaggatgaaacctttaaaaacaaaaacaaaaacatcaatgagtaggcattttatagcttta

SEQ ID NO: 63139 - DNA, 120 bp, Artificial Sequence
  ENSG00000073464_24 (sequence is synthesized)
accccgtatgagtttcaagctgtgtttcctaatgagtttgctactgctgtgggggcatgtgggtgggtaaatgatgtaaatgatgtgatctgtacaagtatgtggagcatgaatgctgac

SEQ ID NO: 63140 - DNA, 120 bp, Artificial Sequence
  ENSG00000073464_25 (sequence is synthesized)
tcaagaaacttttactccttctgctcaaggctgatgtttgtaacttatgaacacacgtgaagtgttgagtccaaaagacaaaggggcatcggcatgtcagcgtccttatttattggttct

SEQ ID NO: 63141 - DNA, 120 bp, Artificial Sequence
  ENSG00000073464_26 (sequence is synthesized)
tgaagttttgctgctatgttactgaatcatactaaagacatttgcgcttactttgttgaaaaagaaaaagaaattaaatttgaacacagtgaaagctgcaagtatgccagtgggtccgct

SEQ ID NO: 63142 - DNA, 120 bp, Artificial Sequence
  ENSG00000073464_27 (sequence is synthesized)
cacgaccgtcctgtttcttgctcctgttctcagcctgttatctggcttatccatcagtttctgaaccaacatcaggggcacctgccatgatgagtgtgaagaaatcatttctctatgcaa

SEQ ID NO: 63143 - DNA, 120 bp, Artificial Sequence
  ENSG00000073464_28 (sequence is synthesized)
tacagtactgcggtgtgtctcctcccatacaaagggacacatccttattttgagggtatactcacccgatcattgatttgcatccccatggcatttgcttcatttatttattgcttttgc

SEQ ID NO: 63144 - DNA, 120 bp, Artificial Sequence
  ENSG00000073464_29 (sequence is synthesized)
ccatgcattcaatattgatcagctcagcacttccatgggccatagccggtatgcccccagcctgccataagcgtgctttcattttcaagtagcatatgcaagagtccaaacaggctaccc

SEQ ID NO: 63145 - DNA, 120 bp, Artificial Sequence
  ENSG00000073464_30 (sequence is synthesized)
aatgttactacttatttttcctctcaggtcttatcagatacggctgtggagaggatgaggcatatgcgttgtcagttggaatccctccaaatggattgcaagagaaatactaaattgatt

SEQ ID NO: 63146 - DNA, 120 bp, Artificial Sequence
  ENSG00000073464_31 (sequence is synthesized)
ctaaatctgttccattatcttctctgtaggatgcaaaacatccagttgtaatgtataagcatgcacttcatactagcaatcacagcacaggaggacagcattaaattttatatagccaat

SEQ ID NO: 63147 - DNA, 120 bp, Artificial Sequence
  ENSG00000073464_32 (sequence is synthesized)
ttgggcactgggcatctttgtatttgaacttaacgacacatttactcttttagtcaggatttcggtcttttctgcgggaaggaattaagctatgtattaggtccaccatacgatctgtgt

SEQ ID NO: 63148 - DNA, 120 bp, Artificial Sequence
  ENSG00000073464_33 (sequence is synthesized)
aagtaagattatcccacttgccctttctctttagtctttgtcccttccttttcactaagtgcccctcatccttttcaatctcattgtcactggatagtgctgtatcacttaggtgtgcat

SEQ ID NO: 63149 - DNA, 120 bp, Artificial Sequence
  ENSG00000073464_34 (sequence is synthesized)
tcggctgcaaataacagaaaacccagcaaacactgaagggctggataagaaccctgagagggggtactccaggactgtctccataacatcattgggatccccatcccgttgctatttctt

SEQ ID NO: 63150 - DNA, 120 bp, Artificial Sequence
  ENSG00000073464_35 (sequence is synthesized)
tttcaccgtttttaccttttgtcctctggcttattgcctcagagttgcaagatggttcctgaactgtcaggtatcatgtctgctttctaagtgggaagaggaagggagaggcaagcaact

SEQ ID NO: 63151 - DNA, 120 bp, Artificial Sequence
  ENSG00000073464_36 (sequence is synthesized)
aggtacaatgtctatcaggaaagcaaagcttccccagagacgctcagcttgtatccattgactggaagtctgtcacgtggctccccctagccgcacactagtgtgggaaggaaaatattg

SEQ ID NO: 63152 - DNA, 120 bp, Artificial Sequence
  ENSG00000073464_37 (sequence is synthesized)
agctaggcacattactctctgaacgaaattcatattatcttattaaggaagagtgttggtcttcaggaggggaagtttgctgtattggatgccatcatcgtgtccttgtcattgcccttc

SEQ ID NO: 63153 - DNA, 120 bp, Artificial Sequence
  ENSG00000073464_38 (sequence is synthesized)
cggttttcattcttgctaaacccctgtgaatgttcttctaaccttcctgttccccaccccttttctcagatttgacctagaattcccagcccaaatccataatttcttagctctaatacg

SEQ ID NO: 63154 - DNA, 120 bp, Artificial Sequence
  ENSG00000073464_39 (sequence is synthesized)
aattttcatgttggacaaaaacctagctacaaatgggtttctatggaacttctaattaatgtgcaaaatacatattttctccaggttaagaaattttaagtcagatcatgctgacacaat

SEQ ID NO: 63155 - DNA, 120 bp, Artificial Sequence
  ENSG00000073464_40 (sequence is synthesized)
aagaaaatttgtttgtgtaattcattgacctcttccttccaaaataacatcaagtagccacctcagtgtgacaatatccagtcaatagtagagaatttaatccttggtcctataaaagaa

SEQ ID NO: 63156 - DNA, 120 bp, Artificial Sequence
  ENSG00000073464_41 (sequence is synthesized)
taaaattcattgtcgtatttatagcacgtaagccttgagtaacaggtcttaatgttagtgttggtgttgtggtttctgcggaacgtttacaagtgaagttggattctcctgggctttaaa

SEQ ID NO: 63157 - DNA, 120 bp, Artificial Sequence
  ENSG00000073464_42 (sequence is synthesized)
tccaaaaagtcttaatgaccgcttcatgtagttcccctcttattcccctgtggtctcctcagagccagcgtgtgctgggaaagagtattagtcatagcctggctttatagaatccaggag

SEQ ID NO: 63158 - DNA, 120 bp, Artificial Sequence
  ENSG00000073464_43 (sequence is synthesized)
gtccttttagctgaaacaagtggcttcaaaagggaacatgaaacagtgaaaagatagccaaaggtcagtgaaaccacagcatttctttctaatctggctgaggccatgggggggaatgag

SEQ ID NO: 63159 - DNA, 120 bp, Artificial Sequence
  ENSG00000073464_44 (sequence is synthesized)
gggaaattatgcttccgggccaaggtcaccgagggggaccttgggatttgtgtcctccccagtgcttagagtagagatacctgcaaattcatggcaaacagttggaagagttacttgact

SEQ ID NO: 63160 - DNA, 120 bp, Artificial Sequence
  ENSG00000073464_45 (sequence is synthesized)
gaaacaacccaatcttactttctttcgtaagttgaacctctgatttattgtggggttcaggctctcctcaatagaaggccagagttggacaggtggactaaggtcaaggatgaggagtct

SEQ ID NO: 63161 - DNA, 120 bp, Artificial Sequence
  ENSG00000073464_46 (sequence is synthesized)
gcagtggggactaccacagcaaactgccttccttccgtggagtcctaactcagccatgtggtccactcacccaggggcccgggggctcagacaaaccccatggggaacatgctgccatgc

SEQ ID NO: 63162 - DNA, 120 bp, Artificial Sequence
  ENSG00000073464_47 (sequence is synthesized)
tctgtctttcttgtaaacgtagttgggtagggatcccaagggtatttgctctctccaaatgcagaacttccatccactttatctggtgatctgatgaacagcatggggacgtggaggtga

SEQ ID NO: 63163 - DNA, 120 bp, Artificial Sequence
  ENSG00000073464_48 (sequence is synthesized)
aataagcatctttcagaataaggtttttttttttttcctcttccagaaccaaaggctttagacatttgtagaactttctggattccttctgaatcgggttttaacataaaaaaccatcaa

SEQ ID NO: 63164 - DNA, 120 bp, Artificial Sequence
  ENSG00000073464_49 (sequence is synthesized)
cacatcatgggaaaggagctctttcatgatatacatcacatgtttcttgctctcactgaggaaatgtgttgtacaaaagcaccaaataagggcaccctggaagtgacatgtgtgtttctt

SEQ ID NO: 63165 - DNA, 120 bp, Artificial Sequence
  ENSG00000073464_50 (sequence is synthesized)
ctaagtcgtttttagtgcatcccctgcgattgcatgatgctcatgtggcttttagggaaaggcagaatgtgctagaagtcgaagtcattcaatattcagtgcttactgttactttgaacc

SEQ ID NO: 63166 - DNA, 120 bp, Artificial Sequence
  ENSG00000073464_51 (sequence is synthesized)
aggtaatctcagttctttattcagtccttcccaaagaccttacaaaggagatgtgtaaactgatagattttgagcctaataagtcacagaaatggaaaattttagagcagtttgtttcac

SEQ ID NO: 63167 - DNA, 120 bp, Artificial Sequence
  ENSG00000073464_52 (sequence is synthesized)
ttaggtgagaactgattactttaaattaccaacatgtgcaaattctacttagtattcattattagatgctaagctggaaaagatgagaaacccaaggagaactattgaattaccacataa

SEQ ID NO: 63168 - DNA, 120 bp, Artificial Sequence
  ENSG00000073464_53 (sequence is synthesized)
ttgtaatattatgctttaattttgtatgggcagtgttctatcagactaagcttctagcctttgaaatgatttacatgaggagagagcctgtatatctgacttgggaaacattaagcagac

SEQ ID NO: 63169 - DNA, 120 bp, Artificial Sequence
  ENSG00000073464_54 (sequence is synthesized)
cctattttcactggcgcggtaataactatttatttgctatcctagaggtgctgggaatgagcctacgtgcgactttgatgagatatattcacatttggtgttggaacgaccacatagcaa

SEQ ID NO: 63170 - DNA, 120 bp, Artificial Sequence
  ENSG00000073464_55 (sequence is synthesized)
cgtgttggtttttttttattgtaacactctgtgtaaacgttgacaccttattaaatattaaatgtctgaactctatttttaaaaataaaacaagcacagagtctgcaacaaacatgtaaa

SEQ ID NO: 63171 - DNA, 120 bp, Artificial Sequence
  ENSG00000073536_0 (sequence is synthesized)
ctctttctcctccacgtggggacgcaggatggcggcagcagtgccggacgaggcggtggcgcgcgatgtgcagcggttgctagtgcagttccaggatgagggcgggcagctgctgggttc

SEQ ID NO: 63172 - DNA, 120 bp, Artificial Sequence
  ENSG00000073536_1 (sequence is synthesized)
cccgttcgacgtgcccgtggacatcaccccggacaggctgcagctcgtgtgcaacgcgctactggcccaggaggatcccctgccactggctttctttgtccacgatgctgagatcgtctc

SEQ ID NO: 63173 - DNA, 120 bp, Artificial Sequence
  ENSG00000073536_2 (sequence is synthesized)
ctcactggggaagacgttggagtcccaggcagtggagacagagaaggtcctagacatcatctaccagccacaggctatcttcagagtccgggctgtgactcgctgcaccagctccttgga

SEQ ID NO: 63174 - DNA, 120 bp, Artificial Sequence
  ENSG00000073536_3 (sequence is synthesized)
gggtcacagtgaggcagtcatttctgtggccttcagccctacgggaaagtacctggccagtggctctggagacaccaccgtgcgcttctgggatctcagcacagagacaccacatttcac

SEQ ID NO: 63175 - DNA, 120 bp, Artificial Sequence
  ENSG00000073536_4 (sequence is synthesized)
atgcaagggacacagacactgggtccttagtatatcctggtctccagatggcaggaagctggcctcaggctgcaagaatggccagattctcctctgggacccaagcacagggaagcaggt

SEQ ID NO: 63176 - DNA, 120 bp, Artificial Sequence
  ENSG00000073536_5 (sequence is synthesized)
gggcaggaccctcgctggccacagcaagtggatcacaggcctgagctgggagcccctccatgcgaaccctgagtgccgctatgtggccagcagctccaaggatggcagtgtgcggatctg

SEQ ID NO: 63177 - DNA, 120 bp, Artificial Sequence
  ENSG00000073536_6 (sequence is synthesized)
ggacacaactgcaggccgctgtgagcgcatcctcaccgggcacacccagtcggtcacctgtctccggtggggaggggacgggcttctctactctgcctcccaggaccgcaccatcaaagt

SEQ ID NO: 63178 - DNA, 120 bp, Artificial Sequence
  ENSG00000073536_7 (sequence is synthesized)
ctggagagctcatgacggtgtgctgtgccggactctgcaaggccacggccactgggtgaacaccatggccctcagcactgactatgccctgcgcactggggcctttgaacctgctgaggc

SEQ ID NO: 63179 - DNA, 120 bp, Artificial Sequence
  ENSG00000073536_8 (sequence is synthesized)
ctcagttaatccccaagacctccaaggatccttgcaggagttgaaggagagggctctgagccgatacaacctcgtgcggggccagggtccagagaggctggtgtctggctccgacgactt

SEQ ID NO: 63180 - DNA, 120 bp, Artificial Sequence
  ENSG00000073536_9 (sequence is synthesized)
caccttattcctgtggtccccagcagaggacaaaaagcctctcactcggatgacaggacaccaagctctcatcaaccaggtgctcttctctcctgactcccgcatcgtggctagtgcctc

SEQ ID NO: 63181 - DNA, 120 bp, Artificial Sequence
  ENSG00000073536_10 (sequence is synthesized)
ctttgacaagtccatcaagctgtgggatggcaggacgggcaagtacctggcttccctacgcggccacgtggctgccgtgtaccagattgcgtggtcagctgacagtcggctcctggtcag

SEQ ID NO: 63182 - DNA, 120 bp, Artificial Sequence
  ENSG00000073536_11 (sequence is synthesized)
cggcagcagtgacagcacactgaaggtgtgggatgtgaaggcccagaagctggccatggacctgcccggccacgcggatgaggtatatgctgttgactggagtccagatggccagagagt

SEQ ID NO: 63183 - DNA, 120 bp, Artificial Sequence
  ENSG00000073536_12 (sequence is synthesized)
ggcaagtggtgggaaggacaaatgcctccggatatggaggagatgagacggcccgaagttctctctgacccccacctcgactcggcctctgccagctgccttccctgccagagaacaaag

SEQ ID NO: 63184 - DNA, 120 bp, Artificial Sequence
  ENSG00000073536_13 (sequence is synthesized)
gctgagatggcagtgcacacaccctccccaccagtggggacctgagaatgcgtgtggcctgctgtcctcgatagaccggaatggggttttcccacagatccccgcctgtggcacacccca

SEQ ID NO: 63185 - DNA, 120 bp, Artificial Sequence
  ENSG00000073536_14 (sequence is synthesized)
gagccagaaatcgaaggtcacaggaagttgtcactgaacttggcccgtgtctgctactctgtaccttgctggtacagacaggggtggtgggcagccaggctctatgagtgggcccctagt

SEQ ID NO: 63186 - DNA, 120 bp, Artificial Sequence
  ENSG00000073536_15 (sequence is synthesized)
gtcagctctgtacagggtcagatcccaggttctatgaccaaataagtaacttaagttttgtgtgttgggttctaattccttgtcctagaatccccatgactcaatcaaggactgtgctaa

SEQ ID NO: 63187 - DNA, 120 bp, Artificial Sequence
  ENSG00000073536_16 (sequence is synthesized)
atgagattgtccagcccccgcccttgcactggactacgccaaaaccacactgaccaggcacttgccttccctctcttcccccgtgttggtaagagagaggccagttgtgatagtggccaa

SEQ ID NO: 63188 - DNA, 120 bp, Artificial Sequence
  ENSG00000073536_17 (sequence is synthesized)
ggagaatctagggctgtattgttgtccactgcagtaggcaccggccacatgtgactgctggcatgaaatagaagtgcagttcctccatcgcactgggtaaggcctccagtattggacagc

SEQ ID NO: 63189 - DNA, 120 bp, Artificial Sequence
  ENSG00000073536_18 (sequence is synthesized)
acacagaaaggttttcatcatcaagagagttctgctggtcagccctgctccaggggatgcctctgccttcgcatagcacactgcttgaggccctgccaggcaccaagcactgccctgggc

SEQ ID NO: 63190 - DNA, 120 bp, Artificial Sequence
  ENSG00000073536_19 (sequence is synthesized)
ccatgggatagagcggggaaggtgatggctcttccagaggattccctcagatggggaggcagcagtatgagctctgagcagaagtgggtattgttgatacagaggaagttctttgccacg

SEQ ID NO: 63191 - DNA, 120 bp, Artificial Sequence
  ENSG00000073536_20 (sequence is synthesized)
agaactttcaagcagtgaaaggaattcccatcaggactcagaccccaggccgagatcttgccctgaatgtaccctgcctctgctttctcctgcatcccatgctaagcagggtcatggtct

SEQ ID NO: 63192 - DNA, 120 bp, Artificial Sequence
  ENSG00000073536_21 (sequence is synthesized)
gtataaactgctcagaactagcatcttgctccttcttaccctcctccacccttgtctgtgcttttgggttttgcgcgtcacctagctgtggtgcttggcctccaccttgcacatatctgc

SEQ ID NO: 63193 - DNA, 120 bp, Artificial Sequence
  ENSG00000073536_22 (sequence is synthesized)
agtgaggctacataagaagcgaacaaaactatcagccactgagctccttggtgccagctgtttgtctgctgtgctctcagactgcaccaggcctggaaggttctcaagctccaaaacttt

SEQ ID NO: 63194 - DNA, 120 bp, Artificial Sequence
  ENSG00000073536_23 (sequence is synthesized)
tgatgaggaaacaacataagaaatgattagcccatgccctcacatctagtaagagaaagctgggattaaaccaggccctgccccaaagcttattgtgcactttgtaccacatccctccgt

SEQ ID NO: 63195 - DNA, 120 bp, Artificial Sequence
  ENSG00000073536_24 (sequence is synthesized)
ccagagctcaagctagtttgacagttcatgggccaccacgtctgtccatgacagctatttctgtatttttctggtgtaagagccttttagtcttagagcaccagtctccctgttccccta

SEQ ID NO: 63196 - DNA, 120 bp, Artificial Sequence
  ENSG00000073536_25 (sequence is synthesized)
ccccgccccactggggaaggggtgatggcagcatcctattgcctagctgcctgttttctatctccccacccatgtagactctgtcctggtggaagctaggaggtgggtgccagccagccc

SEQ ID NO: 63197 - DNA, 120 bp, Artificial Sequence
  ENSG00000073536_26 (sequence is synthesized)
atctgaggctgtctgcagcataaagcagactttagggtgctggatgacctgcagttctttaatgagggacctagacccagcccagatttggaggaggagggagtctagcagctgtgggca

SEQ ID NO: 63198 - DNA, 120 bp, Artificial Sequence
  ENSG00000073536_27 (sequence is synthesized)
gtggctgagcctggcatggcctggcctgagatgcctccaggtgaatggggcccctatgtagccttggccccagcccaggggtggggtgcccataccactctgccagaccccgggcccgca

SEQ ID NO: 63199 - DNA, 120 bp, Artificial Sequence
  ENSG00000073536_28 (sequence is synthesized)
gggtgctggtggtatggtaggtctcatggctctggtttctgagggcctggggttgaagctgaaagtaggtgaggggtgtcctggggccctcccccttaacagggaaataggtattccaga

SEQ ID NO: 63200 - DNA, 120 bp, Artificial Sequence
  ENSG00000073536_29 (sequence is synthesized)
tcctccagcctccgcatctcctccggcccgatggacacgatcttttgccggggttccttgcgccgcacggtgatctggatggggtagttctcaggaaagctgctgaagtcagtggccagg

SEQ ID NO: 63201 - DNA, 120 bp, Artificial Sequence
  ENSG00000073536_30 (sequence is synthesized)
gttgcaaactgaagtgaaacaagaaaacccttcagagttccttcccagatctgaacctggctctctctctgtctctatcaccccttttttttctgtctgctgactcagaccttaaacagc

SEQ ID NO: 63202 - DNA, 120 bp, Artificial Sequence
  ENSG00000073536_31 (sequence is synthesized)
cttatccaacctagccattgacgcaggaaacaggtgcaaagatgcatgactcaagcctgtacctcctcattatgggatatttccaaccaaagggctgtctgtactcaggcctctataccc

SEQ ID NO: 63203 - DNA, 120 bp, Artificial Sequence
  ENSG00000073536_32 (sequence is synthesized)
ccatacccctaccccatacccaggctgttcccttcttcgtccccctttagcctcttgtcttccctatttctttcaatgcccttgacttcccagcctactcacaatcatgggcactgaatt

SEQ ID NO: 63204 - DNA, 120 bp, Artificial Sequence
  ENSG00000073536_33 (sequence is synthesized)
gcagagtctaaaaaccaatggctttggaaggggaacattatagtgatgttgaaaaatacattcgtttgcattcctagtgggccccagagtggcttaatccttaaacctcccagaagcatg

SEQ ID NO: 63205 - DNA, 120 bp, Artificial Sequence
  ENSG00000073536_34 (sequence is synthesized)
cattctggaattgatgcttcttgacccaggcagaaggaaagctagccagatgagtcatgtgggcataggggtgttcccaacctccaaagccctggttccctggctttggacttctctcca

SEQ ID NO: 63206 - DNA, 120 bp, Artificial Sequence
  ENSG00000073536_35 (sequence is synthesized)
cccccaaggcccctcttttcccagggctcactttgtagggcttgcaccacttccccaccccagctgtgttggctgcacggacactgaggcagtaacacgtgttaggctttagctccatca

SEQ ID NO: 63207 - DNA, 120 bp, Artificial Sequence
  ENSG00000073536_36 (sequence is synthesized)
gcttgacagtagtgcccaaaatcttgttgaagatccatggacgattctttgcctcgggcaactcattctcctgtgtcttggccacctcctgtaacaggagctggtagaaactgaccggct

SEQ ID NO: 63208 - DNA, 120 bp, Artificial Sequence
  ENSG00000073536_37 (sequence is synthesized)
gcttgcccaaggcgtaggtccaggaaatctaggggaagagagagccccgaggcttcctcagatatgtcctgtccttcctgtcccttcaccctcccaactggggtcaggacgtcccatgcc

SEQ ID NO: 63209 - DNA, 120 bp, Artificial Sequence
  ENSG00000073536_38 (sequence is synthesized)
catcccctgctcctgctggggcccaggcaggtcagatggaaggtgcaaggtactgcagcactgagtgtggaacccctgccccgaagcatgtactactctcctgggcagccccacccactt

SEQ ID NO: 63210 - DNA, 120 bp, Artificial Sequence
  ENSG00000073536_39 (sequence is synthesized)
tagggtacaccctcattccatatttcttatacgccaggggtcctcaacccttgggccaccaactgatagcagtccatggcctgttaggaactggatagcacagcaggaggagattggtgg

SEQ ID NO: 63211 - DNA, 90 bp, Artificial Sequence
  ENSG00000073536_40 (sequence is synthesized)
cacggctcagggtaccaaggcattagattcccataggcacgtgaaccctattgtgaattgtatgggagggatctaagttgaatgctcctt

SEQ ID NO: 63212 - DNA, 71 bp, Artificial Sequence
  ENSG00000073536_41 (sequence is synthesized)
tcagcagaggcattagattcccataggcacgtgaaccctattgtgaattgtatgggagggatctaagttga

SEQ ID NO: 63213 - DNA, 120 bp, Artificial Sequence
  ENSG00000073536_42 (sequence is synthesized)
ggacgcaggatggcggcagcagtgccggtgggtgtgcgtggatgggggcggggggcgtcgccgcggggcgctagggcccgggtccctgaggcctgagagaggcgaagtggggcccttctg

SEQ ID NO: 63214 - DNA, 120 bp, Artificial Sequence
  ENSG00000073578_0 (sequence is synthesized)
agggactggcgggactgcgcggcggcaacagcagacatgtcgggggtccggggcctgtcgcggctgctgagcgctcggcgcctggcgctggccaaggcgtggccaacagtgttgcaaaca

SEQ ID NO: 63215 - DNA, 120 bp, Artificial Sequence
  ENSG00000073578_1 (sequence is synthesized)
ggaacccgaggttttcacttcactgttgatgggaacaagagggcatctgctaaagtttcagattccatttctgctcagtatccagtagtggatcatgaatttgatgcagtggtggtaggc

SEQ ID NO: 63216 - DNA, 120 bp, Artificial Sequence
  ENSG00000073578_2 (sequence is synthesized)
gctggaggggcaggcttgcgagctgcatttggcctttctgaggcagggtttaatacagcatgtgttaccaagctgtttcctaccaggtcacacactgttgcagcacagggaggaatcaat

SEQ ID NO: 63217 - DNA, 120 bp, Artificial Sequence
  ENSG00000073578_3 (sequence is synthesized)
gctgctctggggaacatggaggaggacaactggaggtggcatttctacgacaccgtgaagggctccgactggctgggggaccaggatgccatccactacatgacggagcaggcccccgcc

SEQ ID NO: 63218 - DNA, 120 bp, Artificial Sequence
  ENSG00000073578_4 (sequence is synthesized)
gccgtggtcgagctagaaaattatggcatgccgtttagcagaactgaagatgggaagatttatcagcgtgcatttggtggacagagcctcaagtttggaaagggcgggcaggcccatcgg

SEQ ID NO: 63219 - DNA, 120 bp, Artificial Sequence
  ENSG00000073578_5 (sequence is synthesized)
tgctgctgtgtggctgatcggactggccactcgctattgcacaccttatatggaaggtctctgcgatatgataccagctattttgtggagtattttgccttggatctcctgatggagaat

SEQ ID NO: 63220 - DNA, 120 bp, Artificial Sequence
  ENSG00000073578_6 (sequence is synthesized)
ggggagtgccgtggtgtcatcgcactgtgcatagaggacgggtccatccatcgcataagagcaaagaacactgttgttgccacaggaggctacgggcgcacctacttcagctgcacgtct

SEQ ID NO: 63221 - DNA, 120 bp, Artificial Sequence
  ENSG00000073578_7 (sequence is synthesized)
gcccacaccagcactggcgacggcacggccatgatcaccagggcaggccttccttgccaggacctagagtttgttcagttccaccctacaggcatatatggtgctggttgtctcattacg

SEQ ID NO: 63222 - DNA, 120 bp, Artificial Sequence
  ENSG00000073578_8 (sequence is synthesized)
gaaggatgtcgtggagagggaggcattctcattaacagtcaaggcgaaaggtttatggagcgatacgcccctgtcgcgaaggacctggcgtctagagatgtggtgtctcggtccatgact

SEQ ID NO: 63223 - DNA, 120 bp, Artificial Sequence
  ENSG00000073578_9 (sequence is synthesized)
ctggagatccgagaaggaagaggctgtggccctgagaaagatcacgtctacctgcagctgcaccacctacctccagagcagctggccacgcgcctgcctggcatttcagagacagccatg

SEQ ID NO: 63224 - DNA, 120 bp, Artificial Sequence
  ENSG00000073578_10 (sequence is synthesized)
atcttcgctggcgtggacgtcacgaaggagccgatccctgtcctccccaccgtgcattataacatgggcggcattcccaccaactacaaggggcaggtcctgaggcacgtgaatggccag

SEQ ID NO: 63225 - DNA, 120 bp, Artificial Sequence
  ENSG00000073578_11 (sequence is synthesized)
acatggtgccaaccgcctcggggcaaactcgctcttggacctggttgtctttggtcgggcatgtgccctgagcatcgaagagtcatgcaggcctggagataaagtccctccaattaaacc

SEQ ID NO: 63226 - DNA, 120 bp, Artificial Sequence
  ENSG00000073578_12 (sequence is synthesized)
aaacgctggggaagaatctgtcatgaatcttgacaaattgagatttgctgatggaagcataagaacatcggaactgcgactcagcatgcagaagtcaatgcaaaatcatgctgccgtgtt

SEQ ID NO: 63227 - DNA, 120 bp, Artificial Sequence
  ENSG00000073578_13 (sequence is synthesized)
ccgtgtgggaagcgtgttgcaagaaggttgtgggaaaatcagcaagctctatggagacctaaagcacctgaagacgttcgaccggggaatggtctggaacacggacctggtggagaccct

SEQ ID NO: 63228 - DNA, 120 bp, Artificial Sequence
  ENSG00000073578_14 (sequence is synthesized)
ggagctgcagaacctgatgctgtgtgcgctgcagaccatctacggagcagaggcacggaaggagtcacggggcgcgcatgccagggaagactacaaggtgcggattgatgagtacgatta

SEQ ID NO: 63229 - DNA, 120 bp, Artificial Sequence
  ENSG00000073578_15 (sequence is synthesized)
ctccaagcccatccaggggcaacagaagaagccctttgaggagcactggaggaagcacaccctgtcctatgtggacgttggcactgggaaggtcactctggaatatagacccgtgatcga

SEQ ID NO: 63230 - DNA, 120 bp, Artificial Sequence
  ENSG00000073578_16 (sequence is synthesized)
caaaactttgaacgaggctgactgtgccaccgtcccgccagccattcgctcctactgatgagacaagatgtggtgatgacagaatcagcttttgtaattatgtataatagctcatgcatg

SEQ ID NO: 63231 - DNA, 120 bp, Artificial Sequence
  ENSG00000073578_17 (sequence is synthesized)
tgtccatgtcataactgtcttcatacgcttctgcactctggggaagaaggagtacattgaagggagattggcacctagtggctgggagcttgccaggaacccagtggccagggagcgtgg

SEQ ID NO: 63232 - DNA, 120 bp, Artificial Sequence
  ENSG00000073578_18 (sequence is synthesized)
cacttacctttgtcccttgcttcattcttgtgagatgataaaactgggcacagctcttaaataaaatataaatgaacaaactttcttttatttccaaatccatttgaaatattttactgt

SEQ ID NO: 63233 - DNA, 120 bp, Artificial Sequence
  ENSG00000073578_19 (sequence is synthesized)
tttactgttgtgactttagtcatatttgttgacctaaaaatcaaatgtaatctttgtattgtgttacatcaaaatccagatattttgtatagtttcttttttctttttcttttctttttt

SEQ ID NO: 63234 - DNA, 120 bp, Artificial Sequence
  ENSG00000073578_20 (sequence is synthesized)
agctcactgcagcctcaaactcctgggcagctcaggtgatcttcctgactcagccttctgagtagttggggctacaggtgtgcaccaccatgcccagctcatttattttgtaattgtagg

SEQ ID NO: 63235 - DNA, 120 bp, Artificial Sequence
  ENSG00000073578_21 (sequence is synthesized)
agtagttggggctacaggtgtgcaccaccatgcccagctcatttattttgtaattgtagggacagggtctcactgtgttgcctaggctggtctcaagtgatcctccctccttggcctccc

SEQ ID NO: 63236 - DNA, 120 bp, Artificial Sequence
  ENSG00000073578_22 (sequence is synthesized)
actacaagagcctgccctgtggtcacttgttcttcagatgaactgatttttgtgcagagcgcacgtgttggattctgcctggtgcggattgatgagtacgattactccaagcccatccag

SEQ ID NO: 63237 - DNA, 120 bp, Artificial Sequence
  ENSG00000073578_23 (sequence is synthesized)
catggtgcctcacaggcagtctgcttggagtcctggaccctggctgtatcctgctggaaaggatgtgtgtgggtctaagatgtgtatgtaatagaaacatttatttattcagaagcttta

SEQ ID NO: 63238 - DNA, 120 bp, Artificial Sequence
  ENSG00000073578_24 (sequence is synthesized)
tgtaacttttaagtgaaatgcaaaacaacaggtctaaaagttaagcagttcttggtatggctgcttctatggattaaaagtttacaaataatattttgtgccacagtcaatgcaaaatca

SEQ ID NO: 63239 - DNA, 120 bp, Artificial Sequence
  ENSG00000073578_25 (sequence is synthesized)
accaccagcactgtctgagcgggcacacgggccggggttgcttctgtgagtttcagcaccgctcgccctcaccttcgtgtgcaggcgcatgtgcacagccacctctcttagctgctggca

SEQ ID NO: 63240 - DNA, 120 bp, Artificial Sequence
  ENSG00000073578_26 (sequence is synthesized)
tgtgtgtgagtatgtgacggagtatgggagagagagacacacacccaacctgaagtcggcatgtgagccttgggtgttgtgtctgatacccacagatgttttttggcagctttcaaagtg

SEQ ID NO: 63241 - DNA, 120 bp, Artificial Sequence
  ENSG00000073578_27 (sequence is synthesized)
tgtgggttatttggctttcagtaaaacagtttgcagctctttcattgcctgaccctgttctttaatgtaatgacatttgctaaatatctgctggtatggcctttagaggttttacatttt

SEQ ID NO: 63242 - DNA, 120 bp, Artificial Sequence
  ENSG00000073578_28 (sequence is synthesized)
tatattaaaaaaacagagaagtcaggcgtgagccaccacgcctggcctacttccctctctctgacctgcagcacagacaccctgttggggaaggtgggctggtggaggcatgggcacctt

SEQ ID NO: 63243 - DNA, 120 bp, Artificial Sequence
  ENSG00000073578_29 (sequence is synthesized)
aagagcgacttgtgctggctgagggaacggcaggtccaggcgggcagcgctgtccggcgcctacctttctgcggtgccggaatctgctcgtctgcaaccgtccgctttggtagctgccag

SEQ ID NO: 63244 - DNA, 120 bp, Artificial Sequence
  ENSG00000073578_30 (sequence is synthesized)
ccacatggggctgttgctaatgtggcaggtgtagctgaagagctgaatgttttgacttattttaattaattaagtggttatgtgttgccagtagctcccatctgggctgtgactgcatgg

SEQ ID NO: 63245 - DNA, 120 bp, Artificial Sequence
  ENSG00000073578_31 (sequence is synthesized)
tctgcggacctcactctggcaccagactccgagtggagctgcatgcggccaccggacagtgtggagtgcctcttcgggttgtgtagaagtaggaaatgtgtcaccaaaataggagctgtt

SEQ ID NO: 63246 - DNA, 120 bp, Artificial Sequence
  ENSG00000073578_32 (sequence is synthesized)
gctgctgcgttctctagcacacctgccttgtctgtactgctcggcgtggaatgcctctcgggctctgacagtgtcactgacactgttgctgatctccttggatttacctggtccatttgg

SEQ ID NO: 63247 - DNA, 120 bp, Artificial Sequence
  ENSG00000073578_33 (sequence is synthesized)
atcaagttctttcacctattcacatgagcagataccaccttaaaaccttaaagtttggcttaacacttcttgccctttttttttcctttcttttagtctctgcgatatgataccagctat

SEQ ID NO: 63248 - DNA, 120 bp, Artificial Sequence
  ENSG00000073578_34 (sequence is synthesized)
ggcgggactgcgcggcggcaacagcagacatgtcgggggtccggggcctgtcgcggctgctgagcgctcggcgcctggcgctggccaaggcgtgcactgacacagcttgcaaactgttcg

SEQ ID NO: 63249 - DNA, 120 bp, Artificial Sequence
  ENSG00000073578_35 (sequence is synthesized)
aagcaattgaggcggatgtggcagccaaaagaatggtgatgagcaaagttcacaagaagagtctttttccgttatgaactatgcattatatgtaacaagaaaacttctctttgatgaagt

SEQ ID NO: 63250 - DNA, 120 bp, Artificial Sequence
  ENSG00000073578_36 (sequence is synthesized)
gttgacattttcataaaataggttactttgggtttgcagatttgtgttaaacttgtttagtgtagattagctgcgaatatcttgactcctttaaggtgttaaggtttttgtttgttttta

SEQ ID NO: 63251 - DNA, 120 bp, Artificial Sequence
  ENSG00000073578_37 (sequence is synthesized)
ttgtctctttagatcttacaggaaaagatagatgtttccttcaagaaagtactgtattgttttctagattgcactttaaatttctattaccggaggatggagggggcttaataatttatt

SEQ ID NO: 63252 - DNA, 120 bp, Artificial Sequence
  ENSG00000073578_38 (sequence is synthesized)
ttcctgccacctggtgggactcagccccacccctgcattttctctgcattttctttcgttgccccaaaagtaaatccaaaaaatgcctttttcccccctggtaactttgatccctgggtt

SEQ ID NO: 63253 - DNA, 120 bp, Artificial Sequence
  ENSG00000073578_39 (sequence is synthesized)
ctcgccatcttctggatcactgtgaccttttccttgctttgggtcggcatccactgatgccagcagtggcatctccaagccaatgtgctttgctgttagaaggccaaggttagaagtgca

SEQ ID NO: 63254 - DNA, 88 bp, Artificial Sequence
  ENSG00000073578_40 (sequence is synthesized)
caatgtgctttgctgttagaaggccaaggttagaagtgcagctagagtggcaagaccaggaaattcatttcaagcctgccctgtggag

SEQ ID NO: 63255 - DNA, 120 bp, Artificial Sequence
  ENSG00000073578_41 (sequence is synthesized)
cttggaagctctgtgatttcaatgaagattgtgcttttaatctgtgttatttgtatagtctgcagatgtggatcctgactctgcaagaagtagctcaccgtaacaaagctgcctttgctt

SEQ ID NO: 63256 - DNA, 120 bp, Artificial Sequence
  ENSG00000073578_42 (sequence is synthesized)
accgtaacaaagctgcctttgcttttatcactttgcaaaacaaataaaggggacacgttgggaacaggccccccaatgtggccataaactgtccccaaaactggccataaacaaaatctc

SEQ ID NO: 63257 - DNA, 120 bp, Artificial Sequence
  ENSG00000073578_43 (sequence is synthesized)
gctcttgatggccatgatgcccacgctggaaggttgtcggtttactggaatgagggcaagggacacctggcccacccagggtggaaaaccgtttaaggcattcttaaaccacaaacaata

SEQ ID NO: 63258 - DNA, 87 bp, Artificial Sequence
  ENSG00000073578_44 (sequence is synthesized)
gcatgagcgatctgtgccttaaggacattttttgtttcccgtaaggaatacttttagtaaatcttatcactggcttgctgtcaataa

SEQ ID NO: 63259 - DNA, 88 bp, Artificial Sequence
  ENSG00000073578_45 (sequence is synthesized)
gacccctgatttcccacttcacatgcagcaccgctgggttagggtctccacaaccgagctggtctcagcagtaaatattgaaaaggaa

SEQ ID NO: 63260 - DNA, 120 bp, Artificial Sequence
  ENSG00000073578_46 (sequence is synthesized)
cacaaccgagctggtctcagcagtaaatattgaaaaggaatagatacaattgtcattatttacagatagaatttccaaacaattcccagggaataaactgaaaaactaacagaaacaaaa

SEQ ID NO: 63261 - DNA, 120 bp, Artificial Sequence
  ENSG00000073578_47 (sequence is synthesized)
caagaatgtagtaaggtgtctggataagagatttgtatctaaaaatcagtagctttacaatgtgccagcagtagtctgctcagacatcagtaaatatctcattcacatttcaaaaaaaat

SEQ ID NO: 63262 - DNA, 120 bp, Artificial Sequence
  ENSG00000073578_48 (sequence is synthesized)
tgaaaatgccctgaaataatgtaaccagaaatacgaaaaaaaggatatgaaaacatgtggctgctaatggacatgaaagaatgtaatactagattctgagatgcaatgtttttcatttgt

SEQ ID NO: 63263 - DNA, 120 bp, Artificial Sequence
  ENSG00000073578_49 (sequence is synthesized)
tcttcctgaaaaaccattaggttgatgtgcattacagtgttacgattatgtatgagtctaaggaaaatcagatgaaatgtccaaattaaaccatgaaggtgcattggtagaggaagagaa

SEQ ID NO: 63264 - DNA, 120 bp, Artificial Sequence
  ENSG00000073578_50 (sequence is synthesized)
gttagagggagaagcaaggaggaggagggatcactgaggtggtgcctgtcccacaggaagcaaaagctgacgcctagttcccagcatacctacagtaaacttcaggtccactgcatagca

SEQ ID NO: 63265 - DNA, 120 bp, Artificial Sequence
  ENSG00000073578_51 (sequence is synthesized)
cgtctctcatcacagtaaaactatgaaggaactcagtgtacaaggagcttctacaagataggcagaagacagtagccagatgggccaagggccccagccacccacgcccctccctctcct

SEQ ID NO: 63266 - DNA, 120 bp, Artificial Sequence
  ENSG00000073578_52 (sequence is synthesized)
tgaagacgtgcagctccaacaccaccatcaccagggctctgctcagctcctcctagtgtgtatcaccacagggctgctggcttgtgtcacgttcaccaccagaccccgcgtcaggagtcc

SEQ ID NO: 63267 - DNA, 120 bp, Artificial Sequence
  ENSG00000073578_53 (sequence is synthesized)
cgccaggggtgtggagaggcagcgctgcctggttggccgtggagctgtatggaacatggtgcctcacaggcagtctgcttggagtcctggaccctggctgtatcctgctggaaaggatgt

SEQ ID NO: 63268 - DNA, 120 bp, Artificial Sequence
  ENSG00000073578_54 (sequence is synthesized)
aaaaaaaaaaaaaaaaaaaacagagaagtcaaatggttttttggaatatggtggccctccgtacccattggttccacatgtgtggtttcagccaactatgtattgaaaataaaattgcat

SEQ ID NO: 63269 - DNA, 120 bp, Artificial Sequence
  ENSG00000073578_55 (sequence is synthesized)
gcatccttacaaatatgcagactttttttccttgtcattgttcccttaacaatacagtgtaacagctatttacgtagcatttacattgtattaggtactatgagtcatcctggagttgct

SEQ ID NO: 63270 - DNA, 88 bp, Artificial Sequence
  ENSG00000073578_56 (sequence is synthesized)
ttacattgtattaggtactatgagtcatcctggagttgctgtaaaacttaaacgtaaaacttgaaatgaggatgatttaaagtatagc

SEQ ID NO: 63271 - DNA, 120 bp, Artificial Sequence
  ENSG00000073578_57 (sequence is synthesized)
gtatccgtgggggtcctggacccaacctgccacggatacgcagggacgactgtatttggcatagaggcctttctaatgcacttaccaaggacacctgcagcaggctgtgatccctgagac

SEQ ID NO: 63272 - DNA, 120 bp, Artificial Sequence
  ENSG00000073578_58 (sequence is synthesized)
gagcgtgagtttagtgagggcagagtttttgttctggttctcagctgtgtcccagcacctgggattgtccctggcacacagtagctgcttagaaaagatttgatgagagggtgaccatac

SEQ ID NO: 63273 - DNA, 120 bp, Artificial Sequence
  ENSG00000073578_59 (sequence is synthesized)
atgaggggaaattttcctcagtatcaaaacatgttgaaactcacacacttccaagatgacgtattctcaggtctcctgccgttgccgttctctgccgtatgtgatggtgttctgtcttac

SEQ ID NO: 63274 - DNA, 120 bp, Artificial Sequence
  ENSG00000073578_60 (sequence is synthesized)
acatcaagggatctttataattcattcctttgagtggtttgtggttcacacagagcttgtcagtcacttaggctccttgttgggcgaggtgggtggaagctgttgctctccctgcgtaga

SEQ ID NO: 63275 - DNA, 120 bp, Artificial Sequence
  ENSG00000073578_61 (sequence is synthesized)
cgaagaggtgaacggggtagaacagtctggaacatcagtctcccctgctgatgttcctccacctgccgtgctcctgggtctgagccggagcacaggtggtgagggccccgggaacatggg

SEQ ID NO: 63276 - DNA, 120 bp, Artificial Sequence
  ENSG00000073578_62 (sequence is synthesized)
cacgggggacagtcgcagatgctgacattggaggtcctctgacctgcttgtaacagcaggtgctcaggggcagaggggaaactgggggataccttcggaagcttccctctgaagaagagt

SEQ ID NO: 63277 - DNA, 120 bp, Artificial Sequence
  ENSG00000073578_63 (sequence is synthesized)
gagtagctatggtccttacttccctcttagatacggtctttacttccctctctttttttttcttggagatgcagtctcactctgttgcttcggctggagagcagtggtgcgatctcagct

SEQ ID NO: 63278 - DNA, 120 bp, Artificial Sequence
  ENSG00000073578_64 (sequence is synthesized)
ctcctccccctgctccagccacatggcctcttgctgtgccttactcagctcaccctctcaggggtctctccctggagcctcttccctggggactttgaagggcgggagacttgttgtcac

SEQ ID NO: 63279 - DNA, 120 bp, Artificial Sequence
  ENSG00000073578_65 (sequence is synthesized)
tcctaattcagactccagtcacacttgggttttctctgaccatcttgcctactaccttccccacctacccccgccaccccaacaccttaagaaaaggagatcacctaaagaggaggaatc

SEQ ID NO: 63280 - DNA, 120 bp, Artificial Sequence
  ENSG00000073584_0 (sequence is synthesized)
caaagggaagcgaagccggagctgcgggcgctttttctgcccgcggtgtctcagattcattcttaaggaactgagaacttaatcttccaaaatgtcaaaaagaccatcttatgccccacc

SEQ ID NO: 63281 - DNA, 120 bp, Artificial Sequence
  ENSG00000073584_1 (sequence is synthesized)
tcccaccccagctcctgcaacacaaatgcccagcacaccagggtttgtgggatacaatccatacagtcatctcgcctacaacaactacaggctgggagggaacccgggcaccaacagccg

SEQ ID NO: 63282 - DNA, 120 bp, Artificial Sequence
  ENSG00000073584_2 (sequence is synthesized)
ggtcacggcatcctctggtatcacgattccaaaacccccaaagccaccagataagccgctgatgccctacatgaggtacagcagaaaggtctgggaccaagtaaaggcttccaaccctga

SEQ ID NO: 63283 - DNA, 120 bp, Artificial Sequence
  ENSG00000073584_3 (sequence is synthesized)
cctaaagttgtgggagattggcaagattattggtggcatgtggcgagatctcactgatgaagaaaaacaagaatatttaaacgaatacgaagcagaaaagatagagtacaatgaatctat

SEQ ID NO: 63284 - DNA, 120 bp, Artificial Sequence
  ENSG00000073584_4 (sequence is synthesized)
gaaggcctatcataattcccccgcgtaccttgcttacataaatgcaaaaagtcgtgcagaagctgctttagaggaagaaagtcgacagagacaatctcgcatggagaaaggagaaccgta

SEQ ID NO: 63285 - DNA, 120 bp, Artificial Sequence
  ENSG00000073584_5 (sequence is synthesized)
catgagcattcagcctgctgaagatccagatgattatgatgatggcttttcaatgaagcatacagccaccgcccgtttccagagaaaccaccgcctcatcagtgaaattcttagtgagag

SEQ ID NO: 63286 - DNA, 120 bp, Artificial Sequence
  ENSG00000073584_6 (sequence is synthesized)
tgtggtgccagacgttcggtcagttgtcacaacagctagaatgcaggtcctcaaacggcaggtccagtccttaatggttcatcagcgaaaactagaagctgaacttcttcaaatagagga

SEQ ID NO: 63287 - DNA, 120 bp, Artificial Sequence
  ENSG00000073584_7 (sequence is synthesized)
acgacaccaggagaagaagaggaaattcctggaaagcacagattcatttaacaatgaacttaaaaggttgtgcggtctgaaagtagaagtggatatggagaaaattgcagctgagattgc

SEQ ID NO: 63288 - DNA, 120 bp, Artificial Sequence
  ENSG00000073584_8 (sequence is synthesized)
acaggcagaggaacaggcccgcaaaaggcaggaggaaagggagaaggaggccgcagagcaagctgagcgcagtcagagcagcatcgttcctgaggaagaacaagcagctaacaaaggcga

SEQ ID NO: 63289 - DNA, 120 bp, Artificial Sequence
  ENSG00000073584_9 (sequence is synthesized)
ggagaagaaagacgacgagaacattccgatggagacagaggagacacaccttgaagaaacaacagagagccaacagaatggtgaagaaggcacgtctactcctgaggacaaggagagtgg

SEQ ID NO: 63290 - DNA, 120 bp, Artificial Sequence
  ENSG00000073584_10 (sequence is synthesized)
gcaggagggggtcgacagtatggcagaggaaggaaccagtgatagtaacactggctcggagagcaacagtgcaacagtggaggagccaccaacagatcccataccagaagatgagaaaaa

SEQ ID NO: 63291 - DNA, 120 bp, Artificial Sequence
  ENSG00000073584_11 (sequence is synthesized)
agaataagtgttgccttgttttgtgtgttctaaatactttttttaatgaaaaaatgttttttggttttaatggtgttacgtggtttgtgtattaattttttttcttgtccatatcacacc

SEQ ID NO: 63292 - DNA, 120 bp, Artificial Sequence
  ENSG00000073584_12 (sequence is synthesized)
accaaaggcttttggaccatttagcatcatgagcctaatggctcagtcagtcacctttcttaagtgttgtgaagatggctcttttctttggatcttgtttctagccctcaactgctgaaa

SEQ ID NO: 63293 - DNA, 120 bp, Artificial Sequence
  ENSG00000073584_13 (sequence is synthesized)
gcctcagaatttagattaattgagaaaacacccacctcttttagagaattatcctttgatgctgcagaatctactcttacaatgccttcctacagctcactggggtgcttaccaaagcca

SEQ ID NO: 63294 - DNA, 120 bp, Artificial Sequence
  ENSG00000073584_14 (sequence is synthesized)
tagctttaaaccttcccagtccccatcagtagcttcctgaaagtctcctctcttgtttacttctgcaaagggtagcttcttaaaaacgtgatcatgtatgagtatgtatttgttcactta

SEQ ID NO: 63295 - DNA, 120 bp, Artificial Sequence
  ENSG00000073584_15 (sequence is synthesized)
cccttttttacttttaatcaatgtcagataccaagagttgtgttaagctgagtgtagtgtgtaactaactacacttggatcttactgatccagaaatagtccccatagttagagtagtta

SEQ ID NO: 63296 - DNA, 120 bp, Artificial Sequence
  ENSG00000073584_16 (sequence is synthesized)
cttatgaagtggttattaaagtgaacacagcacatatacattatctatactgctttttgttatgattaatactgggtatgttctggtaaatccatccttattgtatagaaaaaaaattac

SEQ ID NO: 63297 - DNA, 120 bp, Artificial Sequence
  ENSG00000073584_17 (sequence is synthesized)
ttttttaccaggttttccaaagacagaatagatcacaaagctcaaggaatttaatattcttgtaatggactagataattcaaactgattagcccattccagaagaaaaacagctgggaat

SEQ ID NO: 63298 - DNA, 120 bp, Artificial Sequence
  ENSG00000073584_18 (sequence is synthesized)
taagttaatccacttgaaattgttttacaataatcagaacatccaaacctcaaggctcaggatcccatagaccagagcccacctttttgataaacttagtaaagtcttggagactagaag

SEQ ID NO: 63299 - DNA, 120 bp, Artificial Sequence
  ENSG00000073584_19 (sequence is synthesized)
caagatagtttgtgacacataagcttcccaaaaactagaatagatttttactgaatagtggtatatctgatggtatatgtttcttaaaggtccaaatgtaataaaaaaaaaaatgaaaaa

SEQ ID NO: 63300 - DNA, 120 bp, Artificial Sequence
  ENSG00000073584_20 (sequence is synthesized)
aaggtctcagtgtttttaatgcactacatatttgtatgcaagacaagcatccagtttttttctgtaatgcagtgacagtgtggaatgaccactcagccattataaatttgtgtactcagg

SEQ ID NO: 63301 - DNA, 120 bp, Artificial Sequence
  ENSG00000073584_21 (sequence is synthesized)
ggtctttgattccaaaagtaaagggaatatgtttctacattaacaggaatatggagaaatctgtaacgtttgaattatctttgaaagaatggctaaatgataaatgttaagtcctgtgcc

SEQ ID NO: 63302 - DNA, 120 bp, Artificial Sequence
  ENSG00000073584_22 (sequence is synthesized)
tatatggagaggactctgtaccagcatgagttaatttaagtggattcactgctattcagttcatagcacattagtgactaggaatgtgtgttcagcctcctgagagaggaggggaggaag

SEQ ID NO: 63303 - DNA, 120 bp, Artificial Sequence
  ENSG00000073584_23 (sequence is synthesized)
cttgatactgggtggaaacaactcttgacatctgtttccttgtgtgtcaaagaacgaatttgtatcaaatagatctgttttgagctttggccattatttggctaagaacttcagccatct

SEQ ID NO: 63304 - DNA, 120 bp, Artificial Sequence
  ENSG00000073584_24 (sequence is synthesized)
catctcagacaaattggacagcctctttgatacattttctagtagtcaaaatggggcagatgtagtttaatatgggtggaaaactgccccagcaagataccaggttatttactgtggtat

SEQ ID NO: 63305 - DNA, 120 bp, Artificial Sequence
  ENSG00000073584_25 (sequence is synthesized)
cgaaagctctaagagaatggaagtggttcttttgcccggctggaaatagcagtgggaagacaagtctatccagaccaagcctgtccatacaacactggcaatcagttgatgagggaatta

SEQ ID NO: 63306 - DNA, 90 bp, Artificial Sequence
  ENSG00000073584_26 (sequence is synthesized)
ctgtccatacaacactggcaatcagttgatgagggaattaagtcagatgggagacgtctcaatctgtcgcccaggttggagtgcagtggt

SEQ ID NO: 63307 - DNA, 60 bp, Artificial Sequence
  ENSG00000073584_27 (sequence is synthesized)
cccaggttcaagcaattctctctgcctcagcctctagagcagctgggattacaggctctc

SEQ ID NO: 63308 - DNA, 120 bp, Artificial Sequence
  ENSG00000073584_28 (sequence is synthesized)
aggcgtgagccactgtgcccggcctcagttgggatttgacagctctgaacctcagcaggggaagattgatgtaaaaatccacttggtcagagtgatatatgtagacttgatgtttgagat

SEQ ID NO: 63309 - DNA, 120 bp, Artificial Sequence
  ENSG00000073584_29 (sequence is synthesized)
tgatatatgtagacttgatgtttgagatggttctcagtttagagaatgtgggatatggtagaggtctttgtttttttcccatgtcccaaaaggtgctgggcaagtagcttgaactcgagc

SEQ ID NO: 63310 - DNA, 120 bp, Artificial Sequence
  ENSG00000073584_30 (sequence is synthesized)
ctgttttaattataaaatagatcaaactgctctttcttggtgcccttactgctccttgatttttagtgcatttattttgagtatgaatgcataaagtctgagggcctaaattttgttaat

SEQ ID NO: 63311 - DNA, 120 bp, Artificial Sequence
  ENSG00000073584_31 (sequence is synthesized)
tttttttaacaaatgggagaggggaatcctcgatagtcacccaattttcctttttttttgagacagtctgactgttgcccaggctggagtgtaatggcgccatctcggctcactgcaaca

SEQ ID NO: 63312 - DNA, 61 bp, Artificial Sequence
  ENSG00000073584_32 (sequence is synthesized)
agtcccccaattttctaacagttttaaattctgtaacttctcctgtctgtaaacaaggctg

SEQ ID NO: 63313 - DNA, 120 bp, Artificial Sequence
  ENSG00000073584_33 (sequence is synthesized)
ttttaaattctgtaacttctcctgtctgtaaacaaggctgtcttttcaaatggctctcctacaggatgtgataattatctattctataaagccgaggtttggagaggtaaatagctattt

SEQ ID NO: 63314 - DNA, 120 bp, Artificial Sequence
  ENSG00000073584_34 (sequence is synthesized)
cacattaacacaataatgtcaatgccctatggaaaagataaaatacttggactatattttaaaggggaatctggggtcatgcatattgaagtttaactagatccctccagatttttggtt

SEQ ID NO: 63315 - DNA, 120 bp, Artificial Sequence
  ENSG00000073584_35 (sequence is synthesized)
ttgatcctacacatttagatactagttttggattttagacagttggtgctgacagtgtgaaactcctattgcctgcagttaaattgaagctttggtttctcgtgaacaggcagtgaagct

SEQ ID NO: 63316 - DNA, 120 bp, Artificial Sequence
  ENSG00000073584_36 (sequence is synthesized)
ggtattatactttaagtcctcatttcagaaatagtttccctccacccccaagcactaccacacatggtctccccacctggtttcagctagtgcattagttttatcttgttttttaccgct

SEQ ID NO: 63317 - DNA, 120 bp, Artificial Sequence
  ENSG00000073584_37 (sequence is synthesized)
gggcaaaccttgctggaacaacaactgacttcatgatttgcacatttggagggcttaacgtctttgcaaatgaaaaatccactgtacaataacaagctcaaaggaactcggagccttttt

SEQ ID NO: 63318 - DNA, 120 bp, Artificial Sequence
  ENSG00000073584_38 (sequence is synthesized)
agaagaaatcgtgctgaattataatgtggcttactgcaataatgtttctttgatcaggatggaaaggaaaatactgagtttagcagaaaacgatgtctaaatgtatttgtaatgatacaa

SEQ ID NO: 63319 - DNA, 120 bp, Artificial Sequence
  ENSG00000073584_39 (sequence is synthesized)
ttgtttataaatgttttactattaggttgaaccataagaaattgccagtgtacaatttcatctacaaaatgactggcttaacctaaattctgcattttatactccaagaataagctcttc

SEQ ID NO: 63320 - DNA, 120 bp, Artificial Sequence
  ENSG00000073584_40 (sequence is synthesized)
gtggcagctttctaagtgtgaaatgatggaactttctatttgccagaatgacctacacttctctaatagtttatctcatattgttagccaaacgctgattaaaatgcaaatttcaaacta

SEQ ID NO: 63321 - DNA, 120 bp, Artificial Sequence
  ENSG00000073584_41 (sequence is synthesized)
gaggcctccttgaggcctagcagagcgagggttgggagggagtcccatctggggccccctccttggaggcaaggccagtcccccgaaattggtcaaagcacctgtgaataccccgtttta

SEQ ID NO: 63322 - DNA, 120 bp, Artificial Sequence
  ENSG00000073584_42 (sequence is synthesized)
ggcgcctgcgaggacgcaaacgccgcgaagcaagtcctccacgcctccatcccaggtttagtgaagtgtagactctgacccacagcctaaaggaaagcaagaccggagtcggggagggcc

SEQ ID NO: 63323 - DNA, 120 bp, Artificial Sequence
  ENSG00000073584_43 (sequence is synthesized)
cctccaggagcgggctcagcgggagtctggccgaactgcttgctgccacagtggttccgcggcctcgcgctgagcgccatccgccgtctcccaccgcggcccccaccgcccctccgcaag

SEQ ID NO: 63324 - DNA, 120 bp, Artificial Sequence
  ENSG00000073584_44 (sequence is synthesized)
gctcggcacctcccgccacttcctcggtcgctgcggcggctccggctcctcacagccgctaaacccaggcctattctgtgttaggtcgggcctcctcggccctcttcgccgtgacgaatc

SEQ ID NO: 63325 - DNA, 120 bp, Artificial Sequence
  ENSG00000073584_45 (sequence is synthesized)
agcgcccggctgggaaagtatcaaaattcggggagttttgaggatccaatgggtcctgaaaaaaatccctgagtgtgctaagcatcaccgcatcttcactagaaggttagtttttctaaa

SEQ ID NO: 63326 - DNA, 120 bp, Artificial Sequence
  ENSG00000073584_46 (sequence is synthesized)
agatgagtttaagctgaaagtggggacggtcgttcccgctggtgggaaccgaaggagccgaggcagcgctgaggcggagaccaggtggcacccgcggcgctgcaaggacacacaagctgt

SEQ ID NO: 63327 - DNA, 120 bp, Artificial Sequence
  ENSG00000073584_47 (sequence is synthesized)
tgcgagggggtcaactctccgggccttggcttagaaacctgggacgattacaccctaaaagcgcttggaaaaactgcagaactcgtgctgattttcgccaaagctactcccccgccgtga

SEQ ID NO: 63328 - DNA, 120 bp, Artificial Sequence
  ENSG00000073584_48 (sequence is synthesized)
agcaacaggatgaaattcagcttaaaagaaaaaaaaaaaagcacttcctactaaataaaataattatttgcatctttccttgaaccaaccccaacatttaaagaaacagtactgtaaaac

SEQ ID NO: 63329 - DNA, 120 bp, Artificial Sequence
  ENSG00000073584_49 (sequence is synthesized)
tccaacctcctgtgctcagtttgttttgttttttctttgtaaatgggaaataagtgaaagttttaccatttctttcttattaatcttcactattaagagtctttaagttgttactgagtg

SEQ ID NO: 63330 - DNA, 120 bp, Artificial Sequence
  ENSG00000073584_50 (sequence is synthesized)
aatgctcattctggctattttgttaaacctaaccttcaactggttatgtttttctctcctttcttgtctctctctaaaattttcatattaaacaataaagcttctgaaactactcattgt

SEQ ID NO: 63331 - DNA, 120 bp, Artificial Sequence
  ENSG00000073584_51 (sequence is synthesized)
aaatattttcaagctgttcaagtaaagatttcattatctatggggcagatcttgctattgaatcttattccactccataaattatattttattggtttggaagtatatatgttttaagta

SEQ ID NO: 63332 - DNA, 120 bp, Artificial Sequence
  ENSG00000073584_52 (sequence is synthesized)
gttgtgaacgtgttttttcacccaggaagctctggcccagcttggtcagcatgtaaaataattttccaacccacaaaacagatttagcagtaactgttcaggtcttgctgaaatggcttc

SEQ ID NO: 63333 - DNA, 120 bp, Artificial Sequence
  ENSG00000073584_53 (sequence is synthesized)
cttgttggttttttgggagggggggttttgtttgtttttaaaaaaacactgttagcatgaccaaattctacaaaattagttctttaatattaatccttccttccatacccccaccaccta

SEQ ID NO: 63334 - DNA, 120 bp, Artificial Sequence
  ENSG00000073584_54 (sequence is synthesized)
aatttcaggctagtctacttttcactactaattaggtccttgtgtaacttagttttctccgctaaaaaactactcatatttactaaccctcagatacatattttagttacatttatcaac

SEQ ID NO: 63335 - DNA, 120 bp, Artificial Sequence
  ENSG00000073584_55 (sequence is synthesized)
aatttgtttttctttagtgagatactttagaaaagagataccgtaccatatgttctcatttcaatttatgtcatatacaggctctaaagttaattccagtagactataaagtcctatgct

SEQ ID NO: 63336 - DNA, 120 bp, Artificial Sequence
  ENSG00000073584_56 (sequence is synthesized)
tgctttgttttctttcttaaatcgaagaacatttgttatgaccatctccatggcattctgctagtggctatacaggtggagctgaacaattgagattctgacctcaaagagctaaccatg

SEQ ID NO: 63337 - DNA, 120 bp, Artificial Sequence
  ENSG00000073584_57 (sequence is synthesized)
tttttataacattattgcctcataatgttgaacagtgattcttattatttatgctacctttgaaggtgtcattttgacaaaaatactgcctctgacaatgcatcatcttgacaaacttga

SEQ ID NO: 63338 - DNA, 120 bp, Artificial Sequence
  ENSG00000073584_58 (sequence is synthesized)
ttttttgagattaaaatatttcaaaaaccaagtgtccccttataatttattatgcataaaaaggaattttttttgcctttctttagttatatttttgtgtcattatagtttcacattaac

SEQ ID NO: 63339 - DNA, 120 bp, Artificial Sequence
  ENSG00000073584_59 (sequence is synthesized)
acacaaaatatagaagactagggattaaaacatccaacagaatggatactaaatgaattattcttcttccttttttctttccattacttctaccaccaccaccaccatcaccaccactac

SEQ ID NO: 63340 - DNA, 120 bp, Artificial Sequence
  ENSG00000073584_60 (sequence is synthesized)
caacactatcaccactatcacctctgccacccaaatgtaccgctgcaagtaatatacacttctttcatgcctttgatacttcaactgtgttttgcctacttaaatatgctttatttgcgt

SEQ ID NO: 63341 - DNA, 120 bp, Artificial Sequence
  ENSG00000073584_61 (sequence is synthesized)
cttttctaactgtatagactagaaattgatcagccgttctcttttctcctaaagagtatcaaatgtaatatctgcttaaatgtctttcttttgggtactaaggatatgtgcagcggcatg

SEQ ID NO: 63342 - DNA, 120 bp, Artificial Sequence
  ENSG00000073584_62 (sequence is synthesized)
ttttaggaaattgtgtttattttgtaacagctacagcttagttggaatgtgttaagtgtattttacattatacaattaaggaccgatattgttaattgcatgtaaaaatgaaattgtcac

SEQ ID NO: 63343 - DNA, 120 bp, Artificial Sequence
  ENSG00000073584_63 (sequence is synthesized)
atattttgattgaattttacaaggtaaaataccctaattttggtctctctctactatattctttctatgcattatgccttggttctcatgaacattgagtgtcattgtattagccccaag

SEQ ID NO: 63344 - DNA, 120 bp, Artificial Sequence
  ENSG00000073584_64 (sequence is synthesized)
gctactgctatataagagcccatttgtgattacatcaacacataattcacaaaaaccaagggttctgttgctgaaatgagcagttgtattttgaaagggtgagagctatcaggaaactag

SEQ ID NO: 63345 - DNA, 120 bp, Artificial Sequence
  ENSG00000073584_65 (sequence is synthesized)
atgaaaaaagaagtctataaactagaaaagtagttcacattgagacaaaatgcagaaatgttttcatgattgaccagtggaagatggatcaaagaagaaatggaagagaaatcctataaa

SEQ ID NO: 63346 - DNA, 120 bp, Artificial Sequence
  ENSG00000073584_66 (sequence is synthesized)
agaatgactgggttaaaaagatcagatagtaccccagaatgaaatccatgcatttcttacaagtctttgttttaaatcatgtatgtgacatccatcaaatccaacatatgttcttttcaa

SEQ ID NO: 63347 - DNA, 120 bp, Artificial Sequence
  ENSG00000073584_67 (sequence is synthesized)
ttgacaaatcctggcttcccgatttgagtctctactcatttctcacattatataaaatgatttaaaactgtcgttgaaatcagatccatttcttttttttgtttttagtagataaataca

SEQ ID NO: 63348 - DNA, 120 bp, Artificial Sequence
  ENSG00000073584_68 (sequence is synthesized)
ttggtggcatccacatgtcaaataaattgtattttgttttgcatgtagtgttttcagagttctagttgatcacacttcaagccttcctatttcagtcttcatatattgctaagttgtttt

SEQ ID NO: 63349 - DNA, 120 bp, Artificial Sequence
  ENSG00000073584_69 (sequence is synthesized)
tttgaacatttctgaatttgcagtgatagctattttcagtgaagaaaatatttggacgaatagaagaaaggcgcattagaattttttaagggactctcttttcagtttgccagtgaactc

SEQ ID NO: 63350 - DNA, 120 bp, Artificial Sequence
  ENSG00000073584_70 (sequence is synthesized)
ataagtttttatttcttatcctaaatggaaaagaaagtataatttaagtatcgtcttagtattttggttatattgagtaagatttgtatgtgaatttcccacaagaaaaagaaatatcct

SEQ ID NO: 63351 - DNA, 120 bp, Artificial Sequence
  ENSG00000073584_71 (sequence is synthesized)
tttcaataagatgtgcctataccacaaatcccaggtgatatgattcctacaccatgcctaaatctacctgttaaatatgtcaatctaacctgttcctgatttggagaagaggtttaagga

SEQ ID NO: 63352 - DNA, 120 bp, Artificial Sequence
  ENSG00000073584_72 (sequence is synthesized)
agtggacctttcccagatgtttaataagtttgtcattaaaaactataatatagaaccttgtaatggaaagtatattcgttaagaaatacgtgtgaacttaagaattttgaggcatcctat

SEQ ID NO: 63353 - DNA, 120 bp, Artificial Sequence
  ENSG00000073584_73 (sequence is synthesized)
caatctttactgctatgctaaatattttttcccaaggaattgctcaggcctgaaacagtattctttaacatttacctattgatcataatcatttctttgtgctgcattttgtatttttta

SEQ ID NO: 63354 - DNA, 120 bp, Artificial Sequence
  ENSG00000073584_74 (sequence is synthesized)
ttaactatacttttatcactatacctgttactttatttttcctcattcttttttccaaaatagtgtttttattgaatgttgttcactttgaaacagggctaactttattataaacctgta

SEQ ID NO: 63355 - DNA, 120 bp, Artificial Sequence
  ENSG00000073584_75 (sequence is synthesized)
ggatcctttttttataagattgttcccattctctggcaaaattgcaataaatttgaaatatcatagagtatacacatatcttctaggcctgtaaatgctagagccctctgatatgttaaa

SEQ ID NO: 63356 - DNA, 120 bp, Artificial Sequence
  ENSG00000073584_76 (sequence is synthesized)
ctcccatacagtcattaattactttcattttattgtgatttattcatcaaatgtcgtcattaaatgtaatttataatttgcactttgcattcagacaaggaaatctagttggtagcccaa

SEQ ID NO: 63357 - DNA, 120 bp, Artificial Sequence
  ENSG00000073584_77 (sequence is synthesized)
aatgtaaaacggaagccttatgtataccccagaactttcactattttgcctcaccagctgctctggaatatcctatattatacaactgctagagctgctgttttttcttgtagacccaag

SEQ ID NO: 63358 - DNA, 120 bp, Artificial Sequence
  ENSG00000073584_78 (sequence is synthesized)
agtttcagagaagacctagaaccacatttttttggcacacacacacacacatacaggtgtatagatatatatatatagtttataggcaagaaaaccaacttttgaaagaatatatctggc

SEQ ID NO: 63359 - DNA, 120 bp, Artificial Sequence
  ENSG00000073584_79 (sequence is synthesized)
cgcagaggcagtgccaagactttgtacggctgtctttaatttaggtttttctttctaagtgcaagtattctggtacctgccactgagggtgattcccagtactaaatttgacatgatatt

SEQ ID NO: 63360 - DNA, 120 bp, Artificial Sequence
  ENSG00000073584_80 (sequence is synthesized)
gacattcagtattttaacctttaaatgcttacattatttatcaagatgtggttattaccgttaagattaattgtctttggtgtcctaggacagcattctgcaaagtaatacctgtaagcc

SEQ ID NO: 63361 - DNA, 120 bp, Artificial Sequence
  ENSG00000073584_81 (sequence is synthesized)
tttaatccatagcactacagactaactctcattcactgtccaacagaaataaaatgcaagtcacgtgaaattttatattttctactagtgacatatttttaaaagttaagcaaaacaagt

SEQ ID NO: 63362 - DNA, 120 bp, Artificial Sequence
  ENSG00000073584_82 (sequence is synthesized)
gttttaacaatatgttttatttaattcaacatatcctaaataaaattatttcaacacagaaggaacatttttaaaatcagctttcctttttttaaacagtctttatacacatctcaattc

SEQ ID NO: 63363 - DNA, 120 bp, Artificial Sequence
  ENSG00000073584_83 (sequence is synthesized)
tcattcatttacagctaaaaagtagattttcatacccaaattgttccaacattcttaaaagttctttagtcacactggttcatttcaggggtttaataaccacatgtggctagtggcttc

SEQ ID NO: 63364 - DNA, 120 bp, Artificial Sequence
  ENSG00000073584_84 (sequence is synthesized)
taagggaggtgctaaactgacatagcagcgcaacataggcctctgtaacagggtttcccctgtaacaaggttttcttaagtgtggttcctccctgtctggtgggtcactgaggtgattaa

SEQ ID NO: 63365 - DNA, 120 bp, Artificial Sequence
  ENSG00000073584_85 (sequence is synthesized)
gtggttcagagaggagcgtttgttttaatatgtattactaaagagaaagctctttttttttttaagtgagttagtttaaagaaaaatattaagtaaacgatagtacaggctgttagtaga

SEQ ID NO: 63366 - DNA, 120 bp, Artificial Sequence
  ENSG00000073584_86 (sequence is synthesized)
gctgttagtagatatatgaaaaactatgaaggtgatagagcaaagactgagattaaggaaacactagatagctattaaaaataagcctgtagtgtgtgtgcagtggctcacacctgtaat

SEQ ID NO: 63367 - DNA, 66 bp, Artificial Sequence
  ENSG00000073584_87 (sequence is synthesized)
cctgtaatcccagcgctttgggaggccaggatgggcagatcacatggggtcaggagttcaagacca

SEQ ID NO: 63368 - DNA, 86 bp, Artificial Sequence
  ENSG00000073584_88 (sequence is synthesized)
ctgggccactgtactccagcctgggtaacaagagggagattctgtctcaaaacgaaacagaagcatataaaccagacccatactgt

SEQ ID NO: 63369 - DNA, 120 bp, Artificial Sequence
  ENSG00000073584_89 (sequence is synthesized)
tcaaaacgaaacagaagcatataaaccagacccatactgtatgaacttgggtcataccattacacactgacaacagctggctaagtgtaaactgacaaaaattaaatttggaatcagaca

SEQ ID NO: 63370 - DNA, 120 bp, Artificial Sequence
  ENSG00000073584_90 (sequence is synthesized)
tttatttttcttctataaaattacttgagggcctgggaaactgaatattgttagaggtgatgtattctctgctgtcataattttacaaatgggcattttcattcatttttaaagtgctac

SEQ ID NO: 63371 - DNA, 120 bp, Artificial Sequence
  ENSG00000073584_91 (sequence is synthesized)
aagtgacaaagtcactgcccagttcatatgttgttcattagttgttaaatgccttaagttactaccaagagagtgaaacattgggcagaatttcaattactgccatcacatacagccttc

SEQ ID NO: 63372 - DNA, 120 bp, Artificial Sequence
  ENSG00000073584_92 (sequence is synthesized)
acattgattccgaagccagaagagacatgttgtatctcgtttatgttttagccaaatccttctcagacacaacattatcacttaaagactgtgagataaattactaccttggccaatgaa

SEQ ID NO: 63373 - DNA, 120 bp, Artificial Sequence
  ENSG00000073584_93 (sequence is synthesized)
cacattacgtcctctgtatggtttttatcaagtaactgccccagtgctcccatgacgctgggcaggtccacttgttaggccagtgagggccatagttcgttggtaattaagtgttaacat

SEQ ID NO: 63374 - DNA, 120 bp, Artificial Sequence
  ENSG00000073584_94 (sequence is synthesized)
tgcttttaaaaagctaaatgcattctaattatatcttgttttcttattggttcactaaattcgctgaattaaaggctcttaagggagaagctaatgagtatgtggaaacatgaagtttcc

SEQ ID NO: 63375 - DNA, 120 bp, Artificial Sequence
  ENSG00000073584_95 (sequence is synthesized)
tttccatttaattcagaaatccaataagaatgtataaatatagctcatgctactatttgtatgggtgtacatgagggtatacccatacaaattgtatacatgcacacgaatggcagagct

SEQ ID NO: 63376 - DNA, 120 bp, Artificial Sequence
  ENSG00000073584_96 (sequence is synthesized)
tcctaattgccattctgtatgagtagttagcaggtgttctgattgttctggtcttgtgcagccaggcagggtctgaagctgcgaggagacccagagatagccacctgcagtgtgaacaca

SEQ ID NO: 63377 - DNA, 120 bp, Artificial Sequence
  ENSG00000073584_97 (sequence is synthesized)
ctcaaccacatatctagtgtgctgtataaacattaatagtttctctgtatactgctatgatgtgcaaaaggttagaagctttagctgcaagcgacaagaacatcaggaaaatgatttaag

SEQ ID NO: 63378 - DNA, 120 bp, Artificial Sequence
  ENSG00000073584_98 (sequence is synthesized)
atcccatcttaaagtagcagtaacaaagaggaaggctataagaactttaaagacaatatcaatgagggaggaagcaataatagtacctgaagacaagaataagttgataaaagtggggaa

SEQ ID NO: 63379 - DNA, 120 bp, Artificial Sequence
  ENSG00000073584_99 (sequence is synthesized)
aaacagaagtcatttttaaaaataatgtactggaatattgtcaaatgttctcataaatacagacagtggaatgtaatactatagagaatagaatatggaatagaaacagtattgaatgtt

SEQ ID NO: 63380 - DNA, 120 bp, Artificial Sequence
  ENSG00000073584_100 (sequence is synthesized)
aagcagaatcagcagtgctaaagacacactagcatcctcacactttaattactcaaatggggtgattaatgcaagagaaacatacagaactaaaaatcagaagacaatccagtctacaga

SEQ ID NO: 63381 - DNA, 120 bp, Artificial Sequence
  ENSG00000073584_101 (sequence is synthesized)
tattgggaggatggaggtcagtacaagaggaaacaaaggctagcaacgtaagtagaaaataactaaagctttcattaacaccatgaacactgagaaggactaaagagattcactcagaaa

SEQ ID NO: 63382 - DNA, 120 bp, Artificial Sequence
  ENSG00000073584_102 (sequence is synthesized)
cagtctgaaacttgggcctatgatgtttttaactttcagattgggtcttaaagttgctagtaaattcaggtagcaattaagatgccaatatgagaatgtctttagcataccagtacgaaa

SEQ ID NO: 63383 - DNA, 120 bp, Artificial Sequence
  ENSG00000073584_103 (sequence is synthesized)
atgattagaaagaggaatacttgggaggtggaaatgtatgtcaaatgtacataacagaaaggtggcatctgcatgaagtacaacagctactgacttctttaacagaggactatcaaaaga

SEQ ID NO: 63384 - DNA, 77 bp, Artificial Sequence
  ENSG00000073584_104 (sequence is synthesized)
gaggactatcaaaagatagacattaactgaagcaggaggatcgtttgtggccaagagtttgagaccagcctgggcaa

SEQ ID NO: 63385 - DNA, 120 bp, Artificial Sequence
  ENSG00000073584_105 (sequence is synthesized)
ttatctctacaggatacttaaaaattagctgggcatggcggcttgtgcctgtagtcccagctactccagctgaggctgaggtaggaggatcagttgagcccaggagttcaaggctgcagt

SEQ ID NO: 63386 - DNA, 120 bp, Artificial Sequence
  ENSG00000073584_106 (sequence is synthesized)
tatgatcatgccactgtcctccatcctggatgacagggcaataaccagtctcaaaaaaaagaaaaaaaaaagagggcatgtgcaattatccacacaagacaatgaaggcttttattcagt

SEQ ID NO: 63387 - DNA, 120 bp, Artificial Sequence
  ENSG00000073584_107 (sequence is synthesized)
gagagcctcttcatcataggataaatagctgttcaattagatcataaccagagaagccattcccccaaaaaaggaagcagacgactaacatgcaaagaagaacaagcccaaattgcttag

SEQ ID NO: 63388 - DNA, 120 bp, Artificial Sequence
  ENSG00000073584_108 (sequence is synthesized)
accttatgtccccatctgtggtcaacactggggccatataaatgaaagaagaaaacaaaagctaacaacaaaaacagataacttagacagatgtagcacagatgtaccatatataaccct

SEQ ID NO: 63389 - DNA, 120 bp, Artificial Sequence
  ENSG00000073584_109 (sequence is synthesized)
aaaggtgaaaaactcttaaaaagtagaaaggttacagagttttaaaaaaactgtatcttacccagtagttttaatttcagaagtttatttcctaaagaaattactcaaaaggaaacaaaa

SEQ ID NO: 63390 - DNA, 120 bp, Artificial Sequence
  ENSG00000073584_110 (sequence is synthesized)
ttgcaacaacaactgcctggcctgcgaagtctaaaatattttctatctggctctttacagaaaaaaattgccagctctgtcctagaaaaacccttacttctaggtatactgattttcctg

SEQ ID NO: 63391 - DNA, 120 bp, Artificial Sequence
  ENSG00000073584_111 (sequence is synthesized)
attaaaagcatccctcaaggtaaaaaataataataataacttgtataaataaaacttacataaagtactgattacattgatcgtcacttgtaattttgagatcaccttacctcatggcac

SEQ ID NO: 63392 - DNA, 120 bp, Artificial Sequence
  ENSG00000073584_112 (sequence is synthesized)
tgttttaacactgcctagtacactgtgtaaacaggactaagctaaaagtagttatggaaaacaaaaccaaaggcttcctggagcatcgttgcaagaagtgggagggacagtagtcatact

SEQ ID NO: 63393 - DNA, 120 bp, Artificial Sequence
  ENSG00000073584_113 (sequence is synthesized)
tggtactcagatgacaaccatctggaaaacatgtaatggaatatagatatctttaccaggtatttctgcaaaatttaatccagcagattaacatttgaaatggtcatattttaagtttca

SEQ ID NO: 63394 - DNA, 120 bp, Artificial Sequence
  ENSG00000073584_114 (sequence is synthesized)
gtatctgagtctctttctgttttgtatgaatgtgttttttattgtaatgaatttggagcatgagcacatttttgtggttaaaacgagcttgaaaattaaaataactgatttttgctaatt

SEQ ID NO: 63395 - DNA, 120 bp, Artificial Sequence
  ENSG00000073584_115 (sequence is synthesized)
ttgcaactagacaaacactcagtcctttgcctctgttttggcatctatgaatggggcatgtcttatgcttaaggtttgcaggtctttactcagattctgtcctagttcaaggaaaaaacc

SEQ ID NO: 63396 - DNA, 120 bp, Artificial Sequence
  ENSG00000073584_116 (sequence is synthesized)
tgaagaaaatcgtttgagactattagagctaaaacctcatgcttttaatttcttacaggaaacagcccagcatgactttaaacaaagtgtctaaaagaccaaccttatattatttctaca

SEQ ID NO: 63397 - DNA, 120 bp, Artificial Sequence
  ENSG00000073584_117 (sequence is synthesized)
ggagacagaaaaaaattgccagctctgtcctagaaaaacccttacttctaggtatactgattttcctgattaaaagcatccctcaagaggagacacaccttgaagaaacaacagagagcc

SEQ ID NO: 63398 - DNA, 120 bp, Artificial Sequence
  ENSG00000073584_118 (sequence is synthesized)
tagactcatgtgataaatgatctaaagttcaaaacattatttggtacactgtttgaaagtatggaccattaaaaaatgagacacaattatgaagcctgatcctgtcttgcagcgaaaact

SEQ ID NO: 63399 - DNA, 120 bp, Artificial Sequence
  ENSG00000073584_119 (sequence is synthesized)
gtctttgctgcttctttgcttaacatccaactttagatcggcttagccagcttttctgtgcatattcagaggaaaggtccaaaaaaatacggtttttaaagcaattagttctgatttcaa

SEQ ID NO: 63400 - DNA, 120 bp, Artificial Sequence
  ENSG00000073584_120 (sequence is synthesized)
aattccagaactaaaatccaacaagaggagcgtgattaaataaactgttaaaatccttaagatagaatgttctatagccattaaagtcatttcttttggagaatatttaatgacgtgagg

SEQ ID NO: 63401 - DNA, 120 bp, Artificial Sequence
  ENSG00000073584_121 (sequence is synthesized)
aaaatgttaagtgaaggaggactgcaagactacatgaattaatatctcatttttataaaaataatagcaaccacatgttagtttgaagggggaaaacacagaagacaataattatctcta

SEQ ID NO: 63402 - DNA, 120 bp, Artificial Sequence
  ENSG00000073584_122 (sequence is synthesized)
cagccatttaaaaaaaattttttaacctagctttttgagtattttcaacattcgttgtagcatctcacactgaaaaaataaatagtgagatctggaatgtatatagaagaaaagaaaaat

SEQ ID NO: 63403 - DNA, 120 bp, Artificial Sequence
  ENSG00000073584_123 (sequence is synthesized)
ctatgttattgaagtaactcatcctaagtgtctgtagtgattggagatattcttgcttatcaaattgaagtatttataagtgagtgacgtgatgtctgagatctatcttaaagtaatcca

SEQ ID NO: 63404 - DNA, 120 bp, Artificial Sequence
  ENSG00000073584_124 (sequence is synthesized)
catttttataaggtgattggcattagtctcaaggattgagtttctagtagaggctggtctttcagacctggctttttcagggctggaaagcttttggctggtacaccagtttgaatcgct

SEQ ID NO: 63405 - DNA, 120 bp, Artificial Sequence
  ENSG00000073584_125 (sequence is synthesized)
acccatagttatttgtcttttggatttagtagttgaccttctaactaagactcatttctctacagtgaaaaagagaaaaacgttttaatgtcacctcaaagaaatgcagagtgaaggttg

SEQ ID NO: 63406 - DNA, 120 bp, Artificial Sequence
  ENSG00000073584_126 (sequence is synthesized)
aatgaaattaatttgaagtatcagactagatatgtacaacgagaagtgcatttctaatccttagtataagagataggatttctgaaacttagcatgtttcatttaagtgatcagcctaag

SEQ ID NO: 63407 - DNA, 120 bp, Artificial Sequence
  ENSG00000073584_127 (sequence is synthesized)
taaaaaatccaaaagtcaaatactacattggaatgtagtgttggtgagaatttatacaacccagaatggctgtaaagtttttaatacctggtttttgtttgctgtattcataaataacaa

SEQ ID NO: 63408 - DNA, 120 bp, Artificial Sequence
  ENSG00000073584_128 (sequence is synthesized)
gtgccttctattaatgtaacttcaaaaaagccctctcaccctgtagtcaagctggaactgaaagcttgtagctatcaaatgaatgtctatcttgataagcatattgcttagcttgatagg

SEQ ID NO: 63409 - DNA, 120 bp, Artificial Sequence
  ENSG00000073584_129 (sequence is synthesized)
ttttgtttgtctaaatttttcattgtttctgcataatatgtacttcataagcatatcaagttttatgtgccatgcatatttcatggtatctgaaaaagaattctgacaaagtgtgtgtat

SEQ ID NO: 63410 - DNA, 120 bp, Artificial Sequence
  ENSG00000073584_130 (sequence is synthesized)
gtatgcatttcacaatgcatacaatttttatgtgcatcaatacatgtttttccctggcctaaacatgttgtttcacaagtgtaatggatggcaaggttttcaaatgataaagaacatttc

SEQ ID NO: 63411 - DNA, 120 bp, Artificial Sequence
  ENSG00000073584_131 (sequence is synthesized)
agtttaaacaatgaacggaatcaatcatggatcttaatgttaatgcagcaattttttcacgggcagtaaacaagaatgattgcatttaatagctctatacagtcacctcttgattatcta

SEQ ID NO: 63412 - DNA, 120 bp, Artificial Sequence
  ENSG00000073584_132 (sequence is synthesized)
tgttaatggaatagaaatgataactataatattacagtaatttgtcttttggttttgtgtaagtattttgctcttaacttggatgtagctgtgggggattctcagttaaaaaagtgagat

SEQ ID NO: 63413 - DNA, 120 bp, Artificial Sequence
  ENSG00000073584_133 (sequence is synthesized)
tgttcgatggagactaggaagagaaagtgtactccctatctgaagtcactcatctgtttcttcccattccttcttggcgaatgttaagaactgaacatttggcgtggacactagctacat

SEQ ID NO: 63414 - DNA, 120 bp, Artificial Sequence
  ENSG00000073584_134 (sequence is synthesized)
agtagattaattatagagagttgttggacatggaaaatttggtgttttggtcctttgtggacatttactttgtattattgtcctcttaacaccaaattgaagtataatcaaactgctata

SEQ ID NO: 63415 - DNA, 120 bp, Artificial Sequence
  ENSG00000073584_135 (sequence is synthesized)
tgaagaagggcctagaaaatgtggaggttttacactacttgccctgctttctatatctagtttaagctgttaggactcaatggctctgattttgaccataataaaagcattttgatttta

SEQ ID NO: 63416 - DNA, 120 bp, Artificial Sequence
  ENSG00000073584_136 (sequence is synthesized)
gatgcagtactgaggctctgtctacctgagtcaagtcagtttctcaaggcctcagatttcttgcctgtaaaaaggagataattatcccaacaccctgtttacatcatatcttttgatatt

SEQ ID NO: 63417 - DNA, 120 bp, Artificial Sequence
  ENSG00000073584_137 (sequence is synthesized)
aactttggcacttcctggctgcatatggcttcagacaagttgtttaaactttccgagactcccttgtttcatctgtaaaatggggatagctgtacatataaagtactttgtctcagattc

SEQ ID NO: 63418 - DNA, 120 bp, Artificial Sequence
  ENSG00000073598_0 (sequence is synthesized)
actgcccccacagtttctctctgcttctggtcagctgggttgtcctgcatggtgacgggtgtcatcccgaacaaatcagatggcatcagaggcactccatcaagtgggagatggggagga

SEQ ID NO: 63419 - DNA, 120 bp, Artificial Sequence
  ENSG00000073598_1 (sequence is synthesized)
ggctgtactgaagaaagaaaacttcaacatgatgaatgcccttgaccaactgccaaaacccttttcaaaccccaagtctatgaaccggaccgtcactaccaaaggactcccactagcctc

SEQ ID NO: 63420 - DNA, 120 bp, Artificial Sequence
  ENSG00000073598_2 (sequence is synthesized)
aaagggcaatttggtcaacttcttggaggatgataccatcaacctactgaagccgctgccagtagaggattcagactgcagctctgatgagaccagcatctctgccttctcatccacctt

SEQ ID NO: 63421 - DNA, 120 bp, Artificial Sequence
  ENSG00000073598_3 (sequence is synthesized)
gctgaaccccatcaaattagctgtgacccagcccaacagcagcttctttgcagggatgctggagggggagctgaacaaactcagcttctccccaatggccaagaatgcagaaaatgagga

SEQ ID NO: 63422 - DNA, 120 bp, Artificial Sequence
  ENSG00000073598_4 (sequence is synthesized)
cctggcgctcggcccctgcccatgcccatcgaagtcccagatggccacaaggggcctgctggaccttgacaaccctgagctggagacagaaacctcctcaacgcactcagaatcttctgt

SEQ ID NO: 63423 - DNA, 120 bp, Artificial Sequence
  ENSG00000073598_5 (sequence is synthesized)
ttgagcacaccgtcaacaattccacagctgtgatttcctggacctacgccttgggcaagcagccggtcagtttctaccagctcctgttacaggaggtggccaagacacaggagaatgagt

SEQ ID NO: 63424 - DNA, 120 bp, Artificial Sequence
  ENSG00000073598_6 (sequence is synthesized)
tgcccgaggcaaagaatcgtccatggatcttcaacaagattttgggcactactgtcaagctgatggagctaaagcctaacacgtgttactgcctcagtgtccgtgcagccaacacagctg

SEQ ID NO: 63425 - DNA, 120 bp, Artificial Sequence
  ENSG00000073598_7 (sequence is synthesized)
gggtggggaagtggtgcaagccctacaaatttgcaaccctggccactgacttcagcagctttcctgagaactaccccatccagatcaccgtgcggcgcaaggaaccccggcaaaagatcg

SEQ ID NO: 63426 - DNA, 120 bp, Artificial Sequence
  ENSG00000073598_8 (sequence is synthesized)
tgtccatcgggccggaggagatgcggaggctggaggatctggaatacctatttccctgttaagggggagggccccaggacacccctcacctactttcagcttcaaccccaggccctcaga

SEQ ID NO: 63427 - DNA, 120 bp, Artificial Sequence
  ENSG00000073598_9 (sequence is synthesized)
aaccagagccatgagacctaccataccaccagcaccctgcgggcccggggtctggcagagtggtatgggcaccccacccctgggctggggccaaggctacataggggccccattcacctg

SEQ ID NO: 63428 - DNA, 120 bp, Artificial Sequence
  ENSG00000073598_10 (sequence is synthesized)
gaggcatctcaggccaggccatgccaggctcagccactgcccacagctgctagactccctcctcctccaaatctgggctgggtctaggtccctcattaaagaactgcaggtcatccagca

SEQ ID NO: 63429 - DNA, 69 bp, Artificial Sequence
  ENSG00000073605_0 (sequence is synthesized)
aatatgatggcttagcttgggttcagaggcctgacacctcaggctgccaaatgtggaagatttaaatac

SEQ ID NO: 63430 - DNA, 120 bp, Artificial Sequence
  ENSG00000073605_1 (sequence is synthesized)
cctgacacctcaggctgccaaatgtggaagatttaaatacttgaaccaataccctcctcccaaaaactgaaattggcttctgtttctgagttggtccaggcgcaatgttcagcgtatttg

SEQ ID NO: 63431 - DNA, 120 bp, Artificial Sequence
  ENSG00000073605_2 (sequence is synthesized)
aggaaatcacaagaattgtagttaaggagatggatgctggaggggatatgattgccgttagaagccttgttgatgctgatagattccgctgcttccatctggtgggggagaagagaactt

SEQ ID NO: 63432 - DNA, 120 bp, Artificial Sequence
  ENSG00000073605_3 (sequence is synthesized)
tctttggatgccggcactacacaacaggcctcaccctgatggacattctggacacagatggggacaagtggttagatgaactggattctgggctccaaggtcaaaaggctgagtttcaaa

SEQ ID NO: 63433 - DNA, 120 bp, Artificial Sequence
  ENSG00000073605_4 (sequence is synthesized)
ttctggataatgtagactcaacgggagagttgatagtgagattacccaaagaaataacaatttcaggcagtttccagggcttccaccatcagaaaatcaagatatcggagaaccggatat

SEQ ID NO: 63434 - DNA, 120 bp, Artificial Sequence
  ENSG00000073605_5 (sequence is synthesized)
cccagcagtatctggctacccttgaaaacaggaagctgaagagggaactacccttttcattccgatcaattaatacgagagaaaacctgtatctggtgacagaaactctggagacggtaa

SEQ ID NO: 63435 - DNA, 120 bp, Artificial Sequence
  ENSG00000073605_6 (sequence is synthesized)
gctataaacacaagggccaaagggaagtgaccatccccccaaatcgggtcctgagctatcgagtaaagcagcttgtcttccccaacaaggagacgatgagaaagtctttgggttcggagg

SEQ ID NO: 63436 - DNA, 120 bp, Artificial Sequence
  ENSG00000073605_7 (sequence is synthesized)
attccagaaacatgaaggagaagttggaggacatggagagtgtcctcaaggacctgacagaggagaagagaaaagatgtgctaaactccctcgctaagtgcctcggcaaggaggatattc

SEQ ID NO: 63437 - DNA, 120 bp, Artificial Sequence
  ENSG00000073605_8 (sequence is synthesized)
ggcaggatctagagcaaagagtatctgaggtcctgatttccggggagctacacatggaggacccagacaagcctctcctaagcagcctttttaatgctgctggggtcttggtagaagcgc

SEQ ID NO: 63438 - DNA, 120 bp, Artificial Sequence
  ENSG00000073605_9 (sequence is synthesized)
gtgcaaaagccattctggacttcctggatgccctgctagagctgtctgaagagcagcagtttgtggctgaggccctggagaaggggacccttcctctgttgaaggaccaggtgaaatctg

SEQ ID NO: 63439 - DNA, 120 bp, Artificial Sequence
  ENSG00000073605_10 (sequence is synthesized)
tcatggagcagaactgggatgagctggccagcagtcctcctgacatggactatgaccctgaggcacgaattctctgtgcgctgtatgttgttgtctctatcctgctggagctggctgagg

SEQ ID NO: 63440 - DNA, 120 bp, Artificial Sequence
  ENSG00000073605_11 (sequence is synthesized)
ggcctacctctgtctcttcctaactacaaaagccctttctccccacaagcctctgggttttccctttaccagtctgtcctcactgccatcgccactaccatcctgtcaccagtgggacct

SEQ ID NO: 63441 - DNA, 120 bp, Artificial Sequence
  ENSG00000073605_12 (sequence is synthesized)
ctttaaaacaagcagccaaccattctttgatgtatcccattcgctccatgttaacatccaaaaccagcctggatttcatacatggacttctgattaaaagtggcaggttgtgcatgttaa

SEQ ID NO: 63442 - DNA, 120 bp, Artificial Sequence
  ENSG00000073605_13 (sequence is synthesized)
acaactttcagtttcattattttagcttcctgagattcagaggccaggaactgtgcagagatctgtggggattctcacaacttccatttctggtgaacagctgaggtcagagaggagttg

SEQ ID NO: 63443 - DNA, 120 bp, Artificial Sequence
  ENSG00000073605_14 (sequence is synthesized)
cggcaatataaattttggagccagatctctcagggccatctcagctataaacacaaggttaggatcctgggaggcagggactgtggaggccagtgttggcccacaccccgcaggtcaagg

SEQ ID NO: 63444 - DNA, 120 bp, Artificial Sequence
  ENSG00000073605_15 (sequence is synthesized)
cgatgccagccttagactcttccttcactcctctccgagcagccctgctgctcttggccaccttgccccaagaaagggtgggtggcattgcccagtccttcccttgttactctctagcgg

SEQ ID NO: 63445 - DNA, 120 bp, Artificial Sequence
  ENSG00000073605_16 (sequence is synthesized)
gcattgcccagtccttcccttgttactctctagcggtgccctcttttcatttgcattttctttctttcttttttaaatagagatgaggtcttgcatgttgtccaggctggtctcaaactc

SEQ ID NO: 63446 - DNA, 60 bp, Artificial Sequence
  ENSG00000073605_17 (sequence is synthesized)
cccaagtagctgggaatacaggtgccctccaccacgccaagttaaggttggcaggctgct

SEQ ID NO: 63447 - DNA, 78 bp, Artificial Sequence
  ENSG00000073605_18 (sequence is synthesized)
cctgactttaaactaaaggagtgagactagaaggtccctgtgattctgaattatgtggcttcctctggaatttctagg

SEQ ID NO: 63448 - DNA, 120 bp, Artificial Sequence
  ENSG00000073605_19 (sequence is synthesized)
tgtgattctgaattatgtggcttcctctggaatttctaggttttccccttgatcccagcagggttgtactgcctaagagagcttggaaagggatagagaagtctgacccaaatttgcgga

SEQ ID NO: 63449 - DNA, 120 bp, Artificial Sequence
  ENSG00000073605_20 (sequence is synthesized)
gcgactgagtgtatgctgccccctttctgggccttggcttcttcctcaatcatctaggcacagtcctatgactgcctgtttttgaggatgtgggaagggtctgcaaatacagtgctttcc

SEQ ID NO: 63450 - DNA, 120 bp, Artificial Sequence
  ENSG00000073605_21 (sequence is synthesized)
cattgacacacgctggtgaggatgcaggctccctggcaccagcagtgagggctcagattgcaagagtaaaaacttccatcactgggaagagaagtctgcaggggactggaggtgatctga

SEQ ID NO: 63451 - DNA, 120 bp, Artificial Sequence
  ENSG00000073605_22 (sequence is synthesized)
agattctgaaataactcttcctctctctgcagagaaggatggtgcttcatcctgtttaggtaagggtgatagccaagtgtgttcagggtggctgcaccaacccaccctgagtccatgtgg

SEQ ID NO: 63452 - DNA, 120 bp, Artificial Sequence
  ENSG00000073605_23 (sequence is synthesized)
ctcaagactgctgctcaggtggggtcagctgagtgggtaggaagtcgggaggcactgcctagcaggtttcaactttagtctggaggctgcatctgtctcctctaaacacagtggttctca

SEQ ID NO: 63453 - DNA, 120 bp, Artificial Sequence
  ENSG00000073605_24 (sequence is synthesized)
ttggttataccccaaaatcacaccaggaaactttaaaactagtgacgactgagtcccgtctccagaaactctgacttaattgtgggggtgtggcctggacatcaggatttgtaataactc

SEQ ID NO: 63454 - DNA, 120 bp, Artificial Sequence
  ENSG00000073605_25 (sequence is synthesized)
ctccaaatcctaattacttctagtgtggcctgaggactgcactttgaatggcaagggccaaataaccaagtttttgtttttttccaggaagtggagaagaatttggggttgggactagac

SEQ ID NO: 63455 - DNA, 120 bp, Artificial Sequence
  ENSG00000073605_26 (sequence is synthesized)
tgggggtgagctggggagatggaagatggaagtggggtcagtgggaggcaatgatggtaggtatcttggaagaaggatgcttaattttaacacggaaagactggaagaagggaagataca

SEQ ID NO: 63456 - DNA, 120 bp, Artificial Sequence
  ENSG00000073605_27 (sequence is synthesized)
aagaggtggtctccagaagacagtcagacaaataacagagccttagaaataaaaccttttgggctgggtggcccaggttctcaattgctgcctctacaggaaagtctttgggttcggagg

SEQ ID NO: 63457 - DNA, 120 bp, Artificial Sequence
  ENSG00000073605_28 (sequence is synthesized)
ggaagggaatgcccatattctcaagggacccagaagtcccagggtacagccccttcttattccatagttttctgccggctcacatccatgcagctggtttgtgacaattccctggacaga

SEQ ID NO: 63458 - DNA, 120 bp, Artificial Sequence
  ENSG00000073605_29 (sequence is synthesized)
attattttagcttcctgagattcagaggccaggaactgtgcagagatctgtggggattctcacaacttccatttctggtgaacagctgaggtcagagaggaggcgcaatgttcagcgtat

SEQ ID NO: 63459 - DNA, 120 bp, Artificial Sequence
  ENSG00000073605_30 (sequence is synthesized)
atgaaccaccacgcctggcctgtcatcccttcaaatgttctttcagaactgaggcatgcagaggctggaagacaggctgggctcaccggggtggttatctctgagagaggacatgggtga

SEQ ID NO: 63460 - DNA, 120 bp, Artificial Sequence
  ENSG00000073605_31 (sequence is synthesized)
ggtcagaggcctctccctggagaaggaggtaggtggagaagccagatggcatccagataaggaagaccagcatctccttgagagtgtacacgggagcacgagatggggagggaggctgag

SEQ ID NO: 63461 - DNA, 120 bp, Artificial Sequence
  ENSG00000073605_32 (sequence is synthesized)
tgctccttacaggcccaccctgttgcctccaggtgttagctgctgttgtcctgggtcttcagtgttgaccgtcgcatggcatttgggcagctggttctgctgggttatggtcctcatgtc

SEQ ID NO: 63462 - DNA, 120 bp, Artificial Sequence
  ENSG00000073605_33 (sequence is synthesized)
cctggcacagacacagccattgcctgctggcacttgatacctactcatattccatttctctattccaaacacactggattgcatggcccagggcgccacggtgtgcaccattgtctggcc

SEQ ID NO: 63463 - DNA, 120 bp, Artificial Sequence
  ENSG00000073605_34 (sequence is synthesized)
gcgccacggtgtgcaccattgtctggcccacactcacctagaatacataccaggatctcctacccactccttaggtacaagaagaagaaggggttctggccgggcatggtggctcacacc

SEQ ID NO: 63464 - DNA, 120 bp, Artificial Sequence
  ENSG00000073605_35 (sequence is synthesized)
aaaaaaaaaaaaggggggttctggccttaatctgcctccagctcagttataaggtggcttatctaaaggcttgggaggtggggcacccagccctacccacccgtccaggaagttccacac

SEQ ID NO: 63465 - DNA, 120 bp, Artificial Sequence
  ENSG00000073605_36 (sequence is synthesized)
ctggacaactttcagtttcattattttagcttcctgagattcagaggccaggaactgtgcagagatctgtggggattctcacaacttccatttctggtgaacagctgaggtcagagagga

SEQ ID NO: 63466 - DNA, 120 bp, Artificial Sequence
  ENSG00000073605_37 (sequence is synthesized)
ggtgggtaccacttgagatgggcctgtggttcccgggtactgtctttccagacacctagaattcccaggttggtagtgaactgagagtcaaccaccatgatggggccagagacagaggag

SEQ ID NO: 63467 - DNA, 120 bp, Artificial Sequence
  ENSG00000073605_38 (sequence is synthesized)
gaagcagtgagtggataagtgcctgtgctgggcagaagggatataggggaaggtggccaaaggtaggatggggaagtggatcccaggaagcttttgtttcttctgaggccaatttaccac

SEQ ID NO: 63468 - DNA, 120 bp, Artificial Sequence
  ENSG00000073605_39 (sequence is synthesized)
cacctcattgggaaattgttggtagggaggcacccatccaattgccttgcagaatacagcaaggcagggagcccaagaatcagagccaagggaagaaacgaccagttgaggttagtaatg

SEQ ID NO: 63469 - DNA, 120 bp, Artificial Sequence
  ENSG00000073605_40 (sequence is synthesized)
tgaagtctggcaaccgtgcccgtcattcctccctggttcctctgttcatcaacgttggggctagtctggctggggcatggtgggcctgcctttccatcccttgggccccttggaacaagg

SEQ ID NO: 63470 - DNA, 120 bp, Artificial Sequence
  ENSG00000073605_41 (sequence is synthesized)
gggcaactctgctgtgggagatgtagaaaatgggtctcactttctctatttggggcaatagctgctacttttttcctccagatgggtaccatgaggggcagaggagaatctgggatctgt

SEQ ID NO: 63471 - DNA, 120 bp, Artificial Sequence
  ENSG00000073605_42 (sequence is synthesized)
gatgtttagccctctttactgagtcatggctgcctcacgttctagaagtaaggcaggcaaatcattccaggtactgattgtcctggaacctttggctcttccttgacctcatgtcacgtg

SEQ ID NO: 63472 - DNA, 120 bp, Artificial Sequence
  ENSG00000073605_43 (sequence is synthesized)
cgtccatgtgaagagagtccacgaaacgggctttatatgagcaacaaggctgggtgcaggcaagctgagtccaaaaaaggggtcagcaaagggtggtggcattatcattagttcttatat

SEQ ID NO: 63473 - DNA, 80 bp, Artificial Sequence
  ENSG00000073605_44 (sequence is synthesized)
ggtcagcaaagggtggtggcattatcattagttcttatatgtttgggataggcttacaaagtacattctcaagggtggag

SEQ ID NO: 63474 - DNA, 120 bp, Artificial Sequence
  ENSG00000073605_45 (sequence is synthesized)
cttcctctctctgcagagaaggatggtgcttcatcctgtttaggaaagtctttgggttcggaggattccagaaacatgaaggagaagttggaggacatggagagtgtcctcaaggacctg

SEQ ID NO: 63475 - DNA, 120 bp, Artificial Sequence
  ENSG00000073614_0 (sequence is synthesized)
gacagcacggtaacttccggaaaagtcctgaacctcagtggaaaagccttgcaagaaacaataacaaacgggaggaggaagcgattctggggtttctgtgttgaacggttcttgtccgcg

SEQ ID NO: 63476 - DNA, 120 bp, Artificial Sequence
  ENSG00000073614_1 (sequence is synthesized)
aagatgcgcttcggcctctgtcaggggacttgaacgggcttagtgggcttcagccagcttttctccaccggttccccacggggacccccccccccccccggccgttgcaatggcgggcgt

SEQ ID NO: 63477 - DNA, 120 bp, Artificial Sequence
  ENSG00000073614_2 (sequence is synthesized)
ggggccggggggctacgcggcggagttcgtgccaccgccagagtgccccgtctttgagccgagttgggaggagttcacagatccgctcagctttatcggccgcatccggcctttggcgga

SEQ ID NO: 63478 - DNA, 120 bp, Artificial Sequence
  ENSG00000073614_3 (sequence is synthesized)
gaaaaccggcatctgcaaaattcggccgcccaaggactggcagcctccatttgcctgtgaagtaaaaagctttcgtttcactccaagagtccagcgcctgaatgaacttgaggcaatgac

SEQ ID NO: 63479 - DNA, 120 bp, Artificial Sequence
  ENSG00000073614_4 (sequence is synthesized)
cagagtgagattggatttcttggatcaactagcaaaattttgggaacttcaaggatctactctgaagatccctgtggtagagagaaaaatcctggatctgtatgctttgagcaagattgt

SEQ ID NO: 63480 - DNA, 120 bp, Artificial Sequence
  ENSG00000073614_5 (sequence is synthesized)
tgccagcaaaggaggttttgaaatggtcaccaaagagaagaaatggtctaaagtgggtagtcgcttgggatatctgccaggaaaaggaactgggtctcttttgaagtcacattatgaaag

SEQ ID NO: 63481 - DNA, 120 bp, Artificial Sequence
  ENSG00000073614_6 (sequence is synthesized)
aattctctacccatatgagcttttccagtctggtgtgagccttatgggtgtgcagatgcctaatttagatcttaaagaaaaagtggagcctgaggttctcagcactgatacccaaacttc

SEQ ID NO: 63482 - DNA, 120 bp, Artificial Sequence
  ENSG00000073614_7 (sequence is synthesized)
cccagagccaggcacaaggatgaacattctgccgaagagaacaagacgtgtgaagactcagtcagaatctggagatgtgagtagaaacacggaactgaagaaacttcagatttttggggc

SEQ ID NO: 63483 - DNA, 120 bp, Artificial Sequence
  ENSG00000073614_8 (sequence is synthesized)
tgggcccaaggttgtgggcttggcaatgggaacaaaagataaagaagatgaggtcacccgaagacgaaaagttaccaacaggtcagacgcatttaacatgcaaatgagacaacggaaagg

SEQ ID NO: 63484 - DNA, 120 bp, Artificial Sequence
  ENSG00000073614_9 (sequence is synthesized)
cactctctctgttaactttgttgatctctatgtttgtatgttttgtggtcggggaaacaatgaagataaattgcttttgtgtgatggatgtgatgacagctatcatacattttgtctaat

SEQ ID NO: 63485 - DNA, 120 bp, Artificial Sequence
  ENSG00000073614_10 (sequence is synthesized)
tcctccactacctgatgtgcccaaaggagactggaggtgtcctaaatgtgtcgccgaggaatgtagcaaacctcgagaagcctttggatttgaacaagctgtacgagagtatacacttca

SEQ ID NO: 63486 - DNA, 120 bp, Artificial Sequence
  ENSG00000073614_11 (sequence is synthesized)
gagctttggagagatggcagataattttaagtctgattattttaatatgccagtccatatggttcccacagaactagtagaaaaggaattttggcggctggtaagcagcattgaagaaga

SEQ ID NO: 63487 - DNA, 120 bp, Artificial Sequence
  ENSG00000073614_12 (sequence is synthesized)
tgttattgtggaatatggagcagatatctcctcaaaagactttggaagtggatttccggtgaaggatgggcggagaaagattctgccagaagaagaggaatatgcactttctggttggaa

SEQ ID NO: 63488 - DNA, 120 bp, Artificial Sequence
  ENSG00000073614_13 (sequence is synthesized)
tttgaataacatgcctgtcctggaacagtctgttcttgcacatattaatgtggacatctctggtatgaaagtgccgtggctctatgtgggaatgtgcttctcttctttttgctggcacat

SEQ ID NO: 63489 - DNA, 120 bp, Artificial Sequence
  ENSG00000073614_14 (sequence is synthesized)
tgaggatcactggagttattccatcaactacttgcactggggggagccaaagacatggtatggtgtgccatctcatgctgcagagcaactggaggaggtgatgagagagctggcccccga

SEQ ID NO: 63490 - DNA, 120 bp, Artificial Sequence
  ENSG00000073614_15 (sequence is synthesized)
gttatttgaatcccagcctgatcttctgcatcagttagttaccatcatgaaccccaacgtgctaatggagcatggtgtgcctgtgtacaggaccaatcagtgtgctggcgagtttgttgt

SEQ ID NO: 63491 - DNA, 120 bp, Artificial Sequence
  ENSG00000073614_16 (sequence is synthesized)
gacatttcctcgtgcctatcactctggatttaaccagggctacaactttgctgaagctgtgaacttctgtactgctgactggttgcccattggacgtcaatgtgtaaatcattaccgacg

SEQ ID NO: 63492 - DNA, 120 bp, Artificial Sequence
  ENSG00000073614_17 (sequence is synthesized)
cctaaggcgccactgtgtcttttcacacgaggaactaattttcaagatggcagcagatccagaatgcttagatgtggggctggctgccatggtctgcaaagaattgactctcatgactga

SEQ ID NO: 63493 - DNA, 120 bp, Artificial Sequence
  ENSG00000073614_18 (sequence is synthesized)
agaagaaacacgattaagagagtctgttgtacagatgggtgtcctgatgtcagaagaagaagtgtttgaacttgttcctgatgatgagcggcagtgttcagcatgcagaaccacatgttt

SEQ ID NO: 63494 - DNA, 120 bp, Artificial Sequence
  ENSG00000073614_19 (sequence is synthesized)
tctctctgctctcacatgttcctgtaatcctgagcggcttgtatgtctctaccatccaactgatctgtgcccctgccccatgcagaagaaatgtcttagatatcgctacccattagaaga

SEQ ID NO: 63495 - DNA, 120 bp, Artificial Sequence
  ENSG00000073614_20 (sequence is synthesized)
cctcccttctctgctatatggtgtaaaagtcagggcacagtcctatgacacttgggtcagtcgtgttacagaagcattgtctgctaacttcaaccacaaaaaagatttgattgaattgcg

SEQ ID NO: 63496 - DNA, 120 bp, Artificial Sequence
  ENSG00000073614_21 (sequence is synthesized)
agtaatgctggaagatgctgaggataggaaatacccagagaatgatctctttcgaaaactcagggatgctgtaaaagaagctgagacctgtgcttctgtggctcagctgcttctgagcaa

SEQ ID NO: 63497 - DNA, 120 bp, Artificial Sequence
  ENSG00000073614_22 (sequence is synthesized)
aaagcagaaacacagacagagcccagatagtgggaggactcggaccaaactgacagtggaagaattgaaggcctttgtccaacaactttttagtcttccgtgtgtcatcagccaagctcg

SEQ ID NO: 63498 - DNA, 120 bp, Artificial Sequence
  ENSG00000073614_23 (sequence is synthesized)
gcaagtaaagaatctgctagatgatgtggaagagtttcatgaacgtgctcaggaggccatgatggatgaaaccccagattcttccaaactccagatgttgatagatatgggctctagtct

SEQ ID NO: 63499 - DNA, 120 bp, Artificial Sequence
  ENSG00000073614_24 (sequence is synthesized)
ctatgtggaactccctgaattaccacgactgaagcaagagctacaacaggctcggtggttggacgaagtaagactgaccttatcagatccgcaacaagtcactttggatgtcatgaagaa

SEQ ID NO: 63500 - DNA, 120 bp, Artificial Sequence
  ENSG00000073614_25 (sequence is synthesized)
gctgatagactctggggtagggttggcaccccaccatgctgtggagaaagcaatggctgaactacaggagctccttacagtctctgaacgatgggaagaaaaggctaaggtctgcctaca

SEQ ID NO: 63501 - DNA, 120 bp, Artificial Sequence
  ENSG00000073614_26 (sequence is synthesized)
ggcaagaccgaggcacagtgtggcaagtttagaaagcattgtgaatgaagccaagaacattccagcctttctacccaatgtgttgtccttgaaagaagccttacaaaaggctcgagaatg

SEQ ID NO: 63502 - DNA, 120 bp, Artificial Sequence
  ENSG00000073614_27 (sequence is synthesized)
gaccgctaaagtggaagctattcagagtggcagcaattacgcttatttggagcagcttgagagcttgtctgcgaaaggacgccctattcctgtgcgtcttgaagcactgccgcaagtgga

SEQ ID NO: 63503 - DNA, 120 bp, Artificial Sequence
  ENSG00000073614_28 (sequence is synthesized)
atcacaggtagcagcagcacgggcatggagagaacggactgggcggacgtttcttaagaagaattctagccatacattgttacaggtgctgagcccccggaccgacattggtgtatatgg

SEQ ID NO: 63504 - DNA, 120 bp, Artificial Sequence
  ENSG00000073614_29 (sequence is synthesized)
gagtggcaaaaataggaggaaaaaagtaaaagaactaatagaaaaagaaaaagaaaaggatctggacctggagcctctgagtgatctggaggaaggattggaggaaaccagagatacagc

SEQ ID NO: 63505 - DNA, 120 bp, Artificial Sequence
  ENSG00000073614_30 (sequence is synthesized)
catggtggtggcagttttcaaagaacgggagcaaaaagagattgaagccatgcattctctcagagcagccaacctagccaagatgacaatggtggaccgcatagaagaagtaaaattttg

SEQ ID NO: 63506 - DNA, 120 bp, Artificial Sequence
  ENSG00000073614_31 (sequence is synthesized)
catttgccgcaagacagccagtgggtttatgctacagtgtgagctctgcaaagactggttccataacagctgtgttcctcttcctaaatcaagttcccaaaaaaaaggatccagctggca

SEQ ID NO: 63507 - DNA, 120 bp, Artificial Sequence
  ENSG00000073614_32 (sequence is synthesized)
agctaaagaagtaaaattcctttgccctctttgtatgcggtctcgaaggcccaggctagagactattctgtcactcctggtatcccttcagaagttgcccgtacggttgcctgaaggaga

SEQ ID NO: 63508 - DNA, 120 bp, Artificial Sequence
  ENSG00000073614_33 (sequence is synthesized)
ggccctgcagtgtttgacagaacgtgctatgagttggcaagatagagcgcggcaggctctagccacagatgaactatcctctgccctggccaaactatctgtgttgagccagcgtatggt

SEQ ID NO: 63509 - DNA, 120 bp, Artificial Sequence
  ENSG00000073614_34 (sequence is synthesized)
ggaacaggcggctcgagaaaaaactgaaaagatcatcagtgcagaactccaaaaagcagctgccaatccagacttacagggacacttacctagtttccagcagtctgcttttaaccgggt

SEQ ID NO: 63510 - DNA, 120 bp, Artificial Sequence
  ENSG00000073614_35 (sequence is synthesized)
ggtgagcagtgtgtcatcttctcctcgacaaacaatggactatgatgatgaagaaacagactctgatgaagacattcgagagacatatggctacgacatgaaggacacagccagtgtgaa

SEQ ID NO: 63511 - DNA, 120 bp, Artificial Sequence
  ENSG00000073614_36 (sequence is synthesized)
gtcctctagtagtcttgaacccaatcttttttgtgatgaagagattcccatcaaatccgaggaggtggtgacccacatgtggacagcaccttcattttgtgcagagcatgcttattcttc

SEQ ID NO: 63512 - DNA, 120 bp, Artificial Sequence
  ENSG00000073614_37 (sequence is synthesized)
tgcttctaagagttgttctcaaggttctagcaccccaaggaaacaacctcggaagagccctttggtgccccgaagtttggaacctccagtgctggagttgtcacctggagctaaggcaca

SEQ ID NO: 63513 - DNA, 120 bp, Artificial Sequence
  ENSG00000073614_38 (sequence is synthesized)
actggaagaacttatgatggttggagatctcctggaagtatctctggacgagactcaacacatatggcggattttgcaggccacacacccaccctctgaagacagattcttgcatatcat

SEQ ID NO: 63514 - DNA, 120 bp, Artificial Sequence
  ENSG00000073614_39 (sequence is synthesized)
ggaggatgacagcatggaagagaaaccactaaaagtgaaaggaaaggactcttcagagaagaaacggaaacggaagctagaaaaggtagagcaactttttggagaaggaaaacagaagtc

SEQ ID NO: 63515 - DNA, 120 bp, Artificial Sequence
  ENSG00000073614_40 (sequence is synthesized)
caaggagttaaagaaaatggacaaacctagaaagaagaaattaaaattaggtgcagacaaatcaaaggagctgaataaactggccaagaaactagcaaaagaagaagagagaaagaaaaa

SEQ ID NO: 63516 - DNA, 120 bp, Artificial Sequence
  ENSG00000073614_41 (sequence is synthesized)
gaaggagaaggctgctgcagccaaagttgaacttgtgaaagagagcactgaaaagaaaagagagaaaaaggtgctggacatcccctcaaagtatgactggtcaggagcagaggagtctga

SEQ ID NO: 63517 - DNA, 120 bp, Artificial Sequence
  ENSG00000073614_42 (sequence is synthesized)
tgatgagaatgctgtgtgcgcagcacagaactgccaaaggccctgcaaggacaaggtagactgggtacaatgtgatggtggctgtgatgagtggtttcatcaagtttgtgtgggtgtatc

SEQ ID NO: 63518 - DNA, 120 bp, Artificial Sequence
  ENSG00000073614_43 (sequence is synthesized)
tccagaaatggctgaaaatgaagattacatctgtataaactgtgcaaagaagcaggggccagttagcccaggtccagcaccacctccttccttcataatgagctacaaactaccaatgga

SEQ ID NO: 63519 - DNA, 120 bp, Artificial Sequence
  ENSG00000073614_44 (sequence is synthesized)
gcagatgcttggttagtttgggacatggggggacatggaccacattgagaccttagtcatcaagtagagtggtttatatccacttggaatgttgcttccaaagatgaatggccttcagag

SEQ ID NO: 63520 - DNA, 120 bp, Artificial Sequence
  ENSG00000073614_45 (sequence is synthesized)
aaagtccccttagtgctggcttcctctttgcatggactctgtgggttacattctctatcaacatatctatgcagagggtgtcttctttggtacaacagccaatatttcatgtctcctttg

SEQ ID NO: 63521 - DNA, 120 bp, Artificial Sequence
  ENSG00000073614_46 (sequence is synthesized)
agtgtggtttactgcattaaggccagatgcttaattgagctctagggtggctggttagtattaatacattggtgtgctaacagggcatataggatgtggcttttgtccagctgatagtag

SEQ ID NO: 63522 - DNA, 120 bp, Artificial Sequence
  ENSG00000073614_47 (sequence is synthesized)
ttagaggcttacaacttaggagcagcaccaactgaaggtgctaattgcttggatctccttcattgggatagttggagagggattggagtaccactttccttccactgttacctggtactt

SEQ ID NO: 63523 - DNA, 120 bp, Artificial Sequence
  ENSG00000073614_48 (sequence is synthesized)
aatgccctaaagatacaactaggagtaacagggccaaagttatttctgttagacgtcaaggaatggtatcacagtctattgacctcagcgatttgtgcttgtttgtgctagaagaacatc

SEQ ID NO: 63524 - DNA, 120 bp, Artificial Sequence
  ENSG00000073614_49 (sequence is synthesized)
ccaaataggagaacctctcacaagctggggcaggtcaccttatctttgtaagatgaggatatcatctagatcagaaatctgactagattggattctgaggagaagaacctactacaaggc

SEQ ID NO: 63525 - DNA, 120 bp, Artificial Sequence
  ENSG00000073614_50 (sequence is synthesized)
aaggagccgttttttggctttgaaaagtcttgctgtcttgggtctacattttagggaagagcaggtacatggatccaggcttctgccaaaaaaaaaaagagaagaagatgacgatgatga

SEQ ID NO: 63526 - DNA, 120 bp, Artificial Sequence
  ENSG00000073614_51 (sequence is synthesized)
ccagtcgtactatcttactgagccacagtgatgcatgcttttcggggaaaacttcattcacaagtattccagacaccaggcttcaggcatggccatgagcaagaccagcaaataacagct

SEQ ID NO: 63527 - DNA, 120 bp, Artificial Sequence
  ENSG00000073614_52 (sequence is synthesized)
ttttgccttgcagccctgaccccaatgtctgctgtttccaacactggtgatttctaactacggcccacagcagatgctgttgaataacaccatggcttcatcagaggatgtggggttgta

SEQ ID NO: 63528 - DNA, 120 bp, Artificial Sequence
  ENSG00000073614_53 (sequence is synthesized)
gtacctctgggtgatgaagttgttttagtaaatccatttttaaaaaaaaaaaaggacttgtttttacttttttctaaatgtctctgactactgactgttctatacatagattatttttcc

SEQ ID NO: 63529 - DNA, 120 bp, Artificial Sequence
  ENSG00000073614_54 (sequence is synthesized)
ttttttaatatacatatatgaatatataaatatatatatttactgttaccagcagcatatgacagagtttcaacatcaaaaatccatttgggggcttgctttttcttttttgctttaaaa

SEQ ID NO: 63530 - DNA, 120 bp, Artificial Sequence
  ENSG00000073614_55 (sequence is synthesized)
aaaaaaatcccattccttctttgtagtacaaggagttagcactccctcctccatcccagcctgaccagatcttccattttgcttttgttcatatagataattatatgtcctttgtgtgtt

SEQ ID NO: 63531 - DNA, 120 bp, Artificial Sequence
  ENSG00000073614_56 (sequence is synthesized)
gggacttgtccctgtctgttgggaaacttggtctcactctagtctgtgctggctcttttttcttttgtgtgtgaatgtttgaaactatggtgctgtgtcctcttccctcctgttgtgttc

SEQ ID NO: 63532 - DNA, 120 bp, Artificial Sequence
  ENSG00000073614_57 (sequence is synthesized)
tctgttcttcttaaggtattaggtaagctgtatgtaaactcttattagaaggggactaatttttttttaaaggacaaaaaaaaaaatgactaaaaatagtgttttgtcatcactgtctgg

SEQ ID NO: 63533 - DNA, 120 bp, Artificial Sequence
  ENSG00000073614_58 (sequence is synthesized)
tgtctttattttggtttaaaaaaatctgtggtttgacttaaattcatcagttttccttttaaaggggggattggggtggacctagcaacagcttatagtttcctcttccctttttgcccc

SEQ ID NO: 63534 - DNA, 120 bp, Artificial Sequence
  ENSG00000073614_59 (sequence is synthesized)
agtctcttttaaagaactgtcttctagtaactagaagtgaaatgtactgtccagttacagtttgagtgggtatgagatttaactcaaaaggaatcttacaaaaaaaaagatgttttctta

SEQ ID NO: 63535 - DNA, 120 bp, Artificial Sequence
  ENSG00000073614_60 (sequence is synthesized)
taaaatccaatttctgtaaatgttttctctgaagttcatactacctactttttattcattcttaatactgtataacattttgagtgttttgacttgttcagaggtttgttagtgttgctg

SEQ ID NO: 63536 - DNA, 120 bp, Artificial Sequence
  ENSG00000073614_61 (sequence is synthesized)
tgcatatgtcttgaggtctcatctgaagtaagtttgtgtatgatcgaagatttcaatggatattgcaaggtaactaattaactgatttcataagttttcgttttgccaagctaacgatta

SEQ ID NO: 63537 - DNA, 120 bp, Artificial Sequence
  ENSG00000073614_62 (sequence is synthesized)
tcaattaagaatttcctctggttgatgttatacaagaaagcacaatattttttgcctgttgatcttctttgtaacagtcttcagatatttgtgggttaaaaattgaatgtaattttaagt

SEQ ID NO: 63538 - DNA, 120 bp, Artificial Sequence
  ENSG00000073614_63 (sequence is synthesized)
gacagatgcctggaatacatttaaaatttttatttttccttcctaatcatccattaactattccactatcagtggagagtcatgaggatgctgagaaagtatgaatagcttcctgtcacc

SEQ ID NO: 63539 - DNA, 120 bp, Artificial Sequence
  ENSG00000073614_64 (sequence is synthesized)
ttctgacgttttgaaacttaaatatgtcttttcgttgatactgtgggattttctgtatttacttgacagtcatggaggatttggtatgacttgaccacaggtttagaccaaggctgagaa

SEQ ID NO: 63540 - DNA, 120 bp, Artificial Sequence
  ENSG00000073614_65 (sequence is synthesized)
gaacagaagggagaaattaatggcaaaacaaaaaatacacaaatctgcggttttggaattaatgaaacaagattcatctatttaaagaaatgttggtgttctaatacaaagcattatttt

SEQ ID NO: 63541 - DNA, 120 bp, Artificial Sequence
  ENSG00000073614_66 (sequence is synthesized)
cacttagagaaaattacttacttgctcccttctgtattgtaatattttgtattaagacatgatttaaaatgtctttctacccttatctcctctaaactgcaactgaagttgcaattcttc

SEQ ID NO: 63542 - DNA, 120 bp, Artificial Sequence
  ENSG00000073614_67 (sequence is synthesized)
atcattagtattttaactctggcaaaggttatagaaagaaaaatggaaatatggtaggcctgtggtattcttaaaagctaagtcattagaactatgcagatccccaagtttaaaagtaca

SEQ ID NO: 63543 - DNA, 120 bp, Artificial Sequence
  ENSG00000073614_68 (sequence is synthesized)
aatacagcaccagtagttagctttctagctgggggagaagacaggagatttttcttccacagatgtttattttgcttcctgataggtactgcagcaaagccatgttgatgtgtagatgca

SEQ ID NO: 63544 - DNA, 120 bp, Artificial Sequence
  ENSG00000073614_69 (sequence is synthesized)
tgacttcctcactaagctgctgcacaccagctttgcctgcatgattcaaatttgtgcctcagtaaaattataaattattgcatgtcataccttgaataatggaaacggcaaacattaaac

SEQ ID NO: 63545 - DNA, 120 bp, Artificial Sequence
  ENSG00000073614_70 (sequence is synthesized)
ctgtgattacccataatgtactttaataataaaaaacatggcagccaggtgcagtagagtgcacctgtggtcaggaggctgaagtgggaagattgcttcaacctgtgagtttgagtcccg

SEQ ID NO: 63546 - DNA, 120 bp, Artificial Sequence
  ENSG00000073614_71 (sequence is synthesized)
cctggtcaacagcgagaccccatgtgtctgtctgtctctctctttttttaaaggacagaggctaagctgtaaggttagcatggttctgcctgggctttgcttctgtgcttctgtgcaggc

SEQ ID NO: 63547 - DNA, 120 bp, Artificial Sequence
  ENSG00000073614_72 (sequence is synthesized)
tgagctgtaaggttagcatggttctgcctgggctttgcttctgcgcttctgtgcaggctgagctgtaaggttagcatggttctgcctgggctttgcttctgcgcttctgtgcaggctgag

SEQ ID NO: 63548 - DNA, 120 bp, Artificial Sequence
  ENSG00000073614_73 (sequence is synthesized)
ctgtaaggttagcatggttctgcctgggctttgcttctgcgcttctgtgctagcaggtgcccacaaaatgtctttttgaatttcttaatttttgggttctggatgcaattcgtgcacgcc

SEQ ID NO: 63549 - DNA, 120 bp, Artificial Sequence
  ENSG00000073614_74 (sequence is synthesized)
aagaaactacttgcttgtcagtattttaattctgtagtacatgtgtgtgaatatcagccagtacttacagtaggaggatgaacagaaaaactgagaagacctgtctttcaaaagatgggt

SEQ ID NO: 63550 - DNA, 120 bp, Artificial Sequence
  ENSG00000073614_75 (sequence is synthesized)
ttatccactttttaagggaaaaagtgacagtttggcatgggatttgaaaagtggaaattgtggaaaaattgagctgttgaagtcccacatataaccagatttaataaagcttcacatgtg

SEQ ID NO: 63551 - DNA, 120 bp, Artificial Sequence
  ENSG00000073614_76 (sequence is synthesized)
aattagctccatatgtgtgtagaaggttgcttttatagcaggtccttaagtactccttttgaaattcctcctttttttttaagtcataccattacttctttggatatgaatgtcccaagt

SEQ ID NO: 63552 - DNA, 120 bp, Artificial Sequence
  ENSG00000073614_77 (sequence is synthesized)
ggtatctcctactgtagtatgaggaagaatggctgttaatgtattttttgaattttggtcttgtcttggcctggatcatatccagtcaccactatgcaacaaatgatgtgcactgggcaa

SEQ ID NO: 63553 - DNA, 120 bp, Artificial Sequence
  ENSG00000073614_78 (sequence is synthesized)
ggatatgatgggttatgaaagctgtatcttgtttgttttttcttttgcagtactccaagtggtctaaacaggaatgtcttgtaaaacctcaagactccctattgattattcccttacata

SEQ ID NO: 63554 - DNA, 120 bp, Artificial Sequence
  ENSG00000073614_79 (sequence is synthesized)
tttatttacaatttatcagggtaattggtggtgccttatgaaaagtataactcgatttcttgatctttgagcatgttttgtgtttcttgtgttttctaaaagaatattagatatggttaa

SEQ ID NO: 63555 - DNA, 120 bp, Artificial Sequence
  ENSG00000073614_80 (sequence is synthesized)
ttgcattacatctaaaagatttaaaaaattgtgtgtatgctcaggttccccacacccatacccaccctaacccctgtcatttacattggtggcaactttaaatggtaaccaagcaaaagt

SEQ ID NO: 63556 - DNA, 120 bp, Artificial Sequence
  ENSG00000073614_81 (sequence is synthesized)
acattttgataatgagtattgataatcctgaggaaaactagtgagtatatgggagccacctttgacctgtgccaaagcagtttctaatttcatttgctaactataaaataaagaactgag

SEQ ID NO: 63557 - DNA, 120 bp, Artificial Sequence
  ENSG00000073614_82 (sequence is synthesized)
ccaaaataatttgatcagtggtgtgattagcctattatcattgctgagaatagtgtttttggagtgtgaagtgattcctgaagatttcacctgccttctgtttccagcaagaatccagtg

SEQ ID NO: 63558 - DNA, 120 bp, Artificial Sequence
  ENSG00000073614_83 (sequence is synthesized)
atgaccaacacatttcctcacttttggttcttgagaagtttatccctttgcaacaaaccattaatagggaaaacaaggaaatgctttccctttctctttggcttcttaaagctcacaacc

SEQ ID NO: 63559 - DNA, 120 bp, Artificial Sequence
  ENSG00000073614_84 (sequence is synthesized)
aattcagaccccaagttacttcagagaagcaaatggcaccttttccccattgccaaggatcccagcttatgcagatatgaaggacggatcatttctgaaaatgttaagactctgcttgca

SEQ ID NO: 63560 - DNA, 120 bp, Artificial Sequence
  ENSG00000073614_85 (sequence is synthesized)
gtggacttggcctcagtttcatgaaatgtgtaactctgtatgtgtatgttaggaggagggttggttgaaagagcgggggcagggaggggaatctgattacctcttgggaaataattttct

SEQ ID NO: 63561 - DNA, 120 bp, Artificial Sequence
  ENSG00000073614_86 (sequence is synthesized)
tgccaacaaaaagatacacttgaagtttcttaaggtggcaagtccattaaaaaaaaaaattgtgttggaccctcccagtttagatcaagtatttcttgggggtcttgctattgtggttga

SEQ ID NO: 63562 - DNA, 120 bp, Artificial Sequence
  ENSG00000073614_87 (sequence is synthesized)
taccaataaatggaagatccagaatattttcatttaaagctcaaccattaattggaacatggtgaaacattgtacacattgtaaaagtagggaacagtacaaaagaatggaatcaaatac

SEQ ID NO: 63563 - DNA, 120 bp, Artificial Sequence
  ENSG00000073614_88 (sequence is synthesized)
tatattatgtgaataaactagagtgattttggaatttcactctcttcaccccttctcacttgtatgttctgtaaagtgtatttctactttggtaggaagaaagacttgatttaatatttc

SEQ ID NO: 63564 - DNA, 120 bp, Artificial Sequence
  ENSG00000073614_89 (sequence is synthesized)
tcctgtttctttcagagtaaaaaccaaaattttatccggcctgtgaagccgtacattatctttgacctcttgttgccatgtctcttgcttccccagtaatgctccagttttatctcctac

SEQ ID NO: 63565 - DNA, 120 bp, Artificial Sequence
  ENSG00000073614_90 (sequence is synthesized)
tagaatattgcctctttatatttaaatggatttggtattctgtcttctttctaataaaagggaggacctggagggtaagtagtggttctgtgctgggatatgttataagcgagttattta

SEQ ID NO: 63566 - DNA, 120 bp, Artificial Sequence
  ENSG00000073614_91 (sequence is synthesized)
ttgcccaggctggagtgcagcggcacgatgattgctcattgcagcctcagcctgctcagctcaagcagttctcctgcctcagcctaatgagtagctgggactataggagcacaccaccac

SEQ ID NO: 63567 - DNA, 120 bp, Artificial Sequence
  ENSG00000073614_92 (sequence is synthesized)
agctgggactataggagcacaccaccacccccggctaattgttgtattttttgtagagacgaagccttattgtgttgcccaggttggtctcgaactcctgagctcaagcagtcttcccaa

SEQ ID NO: 63568 - DNA, 67 bp, Artificial Sequence
  ENSG00000073614_93 (sequence is synthesized)
agctcaagcagtcttcccaatatttttaatttaaagttattttagcttttgattagatagaatcaca

SEQ ID NO: 63569 - DNA, 120 bp, Artificial Sequence
  ENSG00000073614_94 (sequence is synthesized)
ggaagttatattaattcaagagatggaattacattcaaagaataatatttaataaaagaactaacactaaactttgtaaggtctttcaacagtatattgccaaaccccataagagaactc

SEQ ID NO: 63570 - DNA, 120 bp, Artificial Sequence
  ENSG00000073614_95 (sequence is synthesized)
ctcatctcagggctagggtttctgaaaaggttatctgagctctagtctcaccggatggtattactagacaagaactccagactaattattgccgcagtgaaaaagtcttagcggggaaag

SEQ ID NO: 63571 - DNA, 120 bp, Artificial Sequence
  ENSG00000073614_96 (sequence is synthesized)
agaaggagcagcaataattctaaaatttagaggtttaggaaaaattggtttatagtggaggtggaaggaaatgttgaaatctcttgacgtagggaactcaagatcaacgattttagaatc

SEQ ID NO: 63572 - DNA, 120 bp, Artificial Sequence
  ENSG00000073670_0 (sequence is synthesized)
ctccccacccccgtccctgctcccgccctccccgcgccgctggcagccgcagcccccggaccgggaggaatgagcgagccatgaggctgctgcggcgctgggcgttcgcggctctgctgc

SEQ ID NO: 63573 - DNA, 120 bp, Artificial Sequence
  ENSG00000073670_1 (sequence is synthesized)
cggctctgctgctgtcgctgctccccacgcccggtcttgggacccaaggtcctgctggagctctgcgatgggggggcttaccccagctgggaggcccaggagcccctgaggtcacggaac

SEQ ID NO: 63574 - DNA, 120 bp, Artificial Sequence
  ENSG00000073670_2 (sequence is synthesized)
ccagccgtctggttagggagagctccgggggagaggtccgaaagcagcagctggacacaagggtccgccaggagccaccagggggcccgcctgtccatctggcccaggtgagtttcgtca

SEQ ID NO: 63575 - DNA, 120 bp, Artificial Sequence
  ENSG00000073670_3 (sequence is synthesized)
tcccagccttcaactcaaacttcaccctggacctggagctgaaccaccacctcctctcctcgcaatacgtggagcgccacttcagccgggaggggacaacccagcacagcaccggggctg

SEQ ID NO: 63576 - DNA, 120 bp, Artificial Sequence
  ENSG00000073670_4 (sequence is synthesized)
gagaccactgctactaccaggggaagctccgggggaacccgcactccttcgccgccctctccacctgccaggggctgcatggggtcttctctgatgggaacttgacttacatcgtggagc

SEQ ID NO: 63577 - DNA, 120 bp, Artificial Sequence
  ENSG00000073670_5 (sequence is synthesized)
cccaagaggtggctggaccttggggagcccctcagggaccccttccccacctcatttaccggacccctctcctcccagatcccctcggatgcagggaaccaggctgcctgtttgctgtgc

SEQ ID NO: 63578 - DNA, 120 bp, Artificial Sequence
  ENSG00000073670_6 (sequence is synthesized)
ctgcccagtcggctcctccaaaccggccgaggctgagaaggaaaaggcaggtccgccggggccaccctacagtgcacagtgaaaccaagtatgtggagctaattgtgatcaacgaccacc

SEQ ID NO: 63579 - DNA, 120 bp, Artificial Sequence
  ENSG00000073670_7 (sequence is synthesized)
agctgttcgagcagatgcgacagtcggtggtcctcaccagcaactttgccaagtccgtggtgaacctggccgatgtgatatacaaggagcagctcaacactcgcatcgtcctggttgcca

SEQ ID NO: 63580 - DNA, 120 bp, Artificial Sequence
  ENSG00000073670_8 (sequence is synthesized)
tggaaacatgggcagatggggacaagatccaggtgcaggatgacctcctggagaccctggcccggctcatggtctaccgacgggagggtctgcctgagcccagtgatgccacccacctct

SEQ ID NO: 63581 - DNA, 120 bp, Artificial Sequence
  ENSG00000073670_9 (sequence is synthesized)
tctcgggcaggaccttccagagcacgagcagcggggcagcctacgtggggggcatatgctccctgtcccacggcgggggtgtgaacgagtacggcaacatgggggcgatggccgtgaccc

SEQ ID NO: 63582 - DNA, 120 bp, Artificial Sequence
  ENSG00000073670_10 (sequence is synthesized)
ttgcccagacgctgggacagaacctgggcatgatgtggaacaaacaccggagctcggcaggggactgcaagtgtccagacatctggctgggctgcatcatggaggacactgggttctacc

SEQ ID NO: 63583 - DNA, 120 bp, Artificial Sequence
  ENSG00000073670_11 (sequence is synthesized)
tgccccgcaagttctcgcgctgtagcatcgacgagtacaaccagtttctgcaggagggtggtggcagctgcctcttcaacaagcccctcaagctcctggaccccccagagtgcgggaacg

SEQ ID NO: 63584 - DNA, 120 bp, Artificial Sequence
  ENSG00000073670_12 (sequence is synthesized)
gcttcgtggaggcaggggaggagtgcgactgcggctcggtgcaggagtgcagccgcgcaggtggcaactgctgcaagaaatgcaccctgactcacgacgccatgtgcagcgacgggctct

SEQ ID NO: 63585 - DNA, 120 bp, Artificial Sequence
  ENSG00000073670_13 (sequence is synthesized)
gctgtcgccgctgcaagtacgaaccacggggtgtgtcctgccgagaggccgtgaacgagtgcgacatcgcggagacctgcaccggggactctagccagtgcccgcctaacctgcacaagc

SEQ ID NO: 63586 - DNA, 120 bp, Artificial Sequence
  ENSG00000073670_14 (sequence is synthesized)
tggacggttactactgtgaccatgagcagggccgctgctacggaggtcgctgcaaaacccgggaccggcagtgccaggttctttggggccatgcggctgctgatcgcttctgctacgaga

SEQ ID NO: 63587 - DNA, 120 bp, Artificial Sequence
  ENSG00000073670_15 (sequence is synthesized)
agctgaatgtggaggggacggagcgtgggagctgtgggcgcaagggatctggctgggtccagtgcagtaagcaggacgtgctgtgtggcttcctcctctgtgtcaacatctctggagctc

SEQ ID NO: 63588 - DNA, 120 bp, Artificial Sequence
  ENSG00000073670_16 (sequence is synthesized)
ctcggctaggggacctggtgggagacatcagtagtgtcaccttctaccaccagggcaaggagctggactgcaggggaggccacgtgcagctggcggacggctctgacctgagctatgtgg

SEQ ID NO: 63589 - DNA, 120 bp, Artificial Sequence
  ENSG00000073670_17 (sequence is synthesized)
aggatggcacagcctgcgggcctaacatgttgtgcctggaccatcgctgcctgccagcttctgccttcaacttcagcacctgccccggcagtggggagcgccggatttgctcccaccacg

SEQ ID NO: 63590 - DNA, 120 bp, Artificial Sequence
  ENSG00000073670_18 (sequence is synthesized)
actgcagtatccataaccccctgcccacgtccccacccacgggggagacggagagatataaaggtcccagcggcaccaacatcatcattggctccattgctggggctgtcctggttgcag

SEQ ID NO: 63591 - DNA, 120 bp, Artificial Sequence
  ENSG00000073670_19 (sequence is synthesized)
ccatcgtcctgggcggcacgggctggggatttaaaaacattcgccgaggaaggtccggaggggcctaagtgccaccctcctccctccaagcctggcacccaccgtctcggccctgaacca

SEQ ID NO: 63592 - DNA, 120 bp, Artificial Sequence
  ENSG00000073670_20 (sequence is synthesized)
cgaggctgcccccatccagccacggagggaggcaccatgcaaatgtcttccaggtccaaacccttcaactcctggctccgcaggggtttgggtgggggctgtggccctgcccttggcacc

SEQ ID NO: 63593 - DNA, 120 bp, Artificial Sequence
  ENSG00000073670_21 (sequence is synthesized)
accagggtggaccaggcctggagggcacttcctccacagtcccccacccacctcctgcggctcagccttgcacacccactgccccgtgtgaatgtagcttccacctcatggattgccaca

SEQ ID NO: 63594 - DNA, 120 bp, Artificial Sequence
  ENSG00000073670_22 (sequence is synthesized)
gctcaactcgggggcgcctggagggatgcccccaggcagccaccagtggacctagcctggatggcccctccttgcaaccaggcagctgagaccagggtcttacctctctgggacctaggg

SEQ ID NO: 63595 - DNA, 120 bp, Artificial Sequence
  ENSG00000073670_23 (sequence is synthesized)
ggacggggctgacatctacattttttaaaactgaatcttaatcgatgaatgtaaactcgggggtgctggggccagggcagatgtggggatgttttgacatttacaggagggcccggagaa

SEQ ID NO: 63596 - DNA, 120 bp, Artificial Sequence
  ENSG00000073670_24 (sequence is synthesized)
actgaggtatggccatgccctagaccctccccaaggatgaccacacccgaagtcctgtcactgagcacagtcaggggctgggcatcccagcttgcccccgcttagccccgctgagcttgg

SEQ ID NO: 63597 - DNA, 120 bp, Artificial Sequence
  ENSG00000073670_25 (sequence is synthesized)
aggaagtatgagtgctgattcaaaccaaagctgcctgtgccatgcccaaggcctaggttatgggtacggcaaccacatgtcccagatcgtctccaattcgaaaacaaccgtcctgctgtc

SEQ ID NO: 63598 - DNA, 120 bp, Artificial Sequence
  ENSG00000073670_26 (sequence is synthesized)
cctgtcaggacacatggattttggcagggcggggggggttctagaaaatatagttcctataataaaatggcaccttccccctttcaagaagggtgattctggggccgactcagggtttag

SEQ ID NO: 63599 - DNA, 120 bp, Artificial Sequence
  ENSG00000073670_27 (sequence is synthesized)
gtgccccctggtgtggcctagatgtccccacctgggccatctttctggggaggactctcccaggtagggaaggccagaggtggcccagtgcctggagggttagggtctctgcctgggata

SEQ ID NO: 63600 - DNA, 120 bp, Artificial Sequence
  ENSG00000073670_28 (sequence is synthesized)
tgcaagaggaagtaggaaagggaggtctcatggatgatcctaggctgctagaagtccttaaggccccatctagtccattccactccctacccccattccagagccgagtagtaagtttac

SEQ ID NO: 63601 - DNA, 120 bp, Artificial Sequence
  ENSG00000073670_29 (sequence is synthesized)
agatgtttcccccattacgtacccccacccatccctgctgcagcgagcctgagagccaggtagagccaggcacagctcctcagtcttctcacacagtcctgccggtggccttccctcatg

SEQ ID NO: 63602 - DNA, 120 bp, Artificial Sequence
  ENSG00000073670_30 (sequence is synthesized)
acccttgcttgggagggtggagcactggctccttgaccctaaaaggtagctggcaggggcaagatgggggccagctacctaatggatgaaagccacaagtgaatacagttcttgtcacca

SEQ ID NO: 63603 - DNA, 120 bp, Artificial Sequence
  ENSG00000073670_31 (sequence is synthesized)
gggttgccctgccctcactcggcagggagttctgacaccccagggcccgtgagctacctgcttgagcccctgtttctggggcaccttcgaggaggcgttgtggagggcatcgccccctgt

SEQ ID NO: 63604 - DNA, 120 bp, Artificial Sequence
  ENSG00000073670_32 (sequence is synthesized)
ttattcacaacaccctcaggggcaaacaggcctgggacccgctgacaccattttgggtagctggatgcacccgacagcagtggggtccacacactgagctccagctggcactgcccactc

SEQ ID NO: 63605 - DNA, 120 bp, Artificial Sequence
  ENSG00000073670_33 (sequence is synthesized)
aagggctgagtggaggggcccctccggccagctctgctccaccagccctgcaagctgatgcagggcgggggaagggctgggtgttgcactattgctgcgctgccttaaggcatctgtcct

SEQ ID NO: 63606 - DNA, 120 bp, Artificial Sequence
  ENSG00000073670_34 (sequence is synthesized)
ctggtggtgcacccgtgcacacaggtacagtgcatctgggcacagcttttggatccacacctctgcacaagtgtgaatacctctgcacatatgggcgtatctgtgtgtgctcgtgtatat

SEQ ID NO: 63607 - DNA, 120 bp, Artificial Sequence
  ENSG00000073670_35 (sequence is synthesized)
ggggtggggaacatgagacttcctgtgaccagtccaccctggctcccagctgtctgtatcctcctgccccgccctggcgagtgcctaccctggcagaacccagggaggagtggaggctgc

SEQ ID NO: 63608 - DNA, 120 bp, Artificial Sequence
  ENSG00000073670_36 (sequence is synthesized)
ctctgcctgggcctccacacagcatcctgtacatacgccacctgggctgggggtggggaggcagggccaggagcatcgattaaagatcacatcctggggcttccagggagctcacaccaa

SEQ ID NO: 63609 - DNA, 120 bp, Artificial Sequence
  ENSG00000073670_37 (sequence is synthesized)
gctgctgcagccaccttttcctgcagtgctcggggtgacagccggtccggagcgcgggagggtaggggagcgggagaggagggaaggtgcgtccacccacctgtccccagctggccgggc

SEQ ID NO: 63610 - DNA, 120 bp, Artificial Sequence
  ENSG00000073711_0 (sequence is synthesized)
ctttcccagaaggctccatattctcaacatgtgcaggtcaatttgacataaagctaccaacaaggagcaacaggcccactgcaggctgtgtttataacttgaaaattatgagcaggtatt

SEQ ID NO: 63611 - DNA, 120 bp, Artificial Sequence
  ENSG00000073711_1 (sequence is synthesized)
gggagccacagactgtatttgggaaccagctgcatgtcaggacaagcatagattgtggtctgtggaggctgggagagcacaatgcttgaatttcatttctttgggagataagaagaaaaa

SEQ ID NO: 63612 - DNA, 120 bp, Artificial Sequence
  ENSG00000073711_2 (sequence is synthesized)
ataccttcctacctgacaagattgacaacttgctaaatctgattatcttcagaagtgtgctggacagttgcgaagtaaacatttacttttcaaagatgatgatcaaggaaacatctctac

SEQ ID NO: 63613 - DNA, 120 bp, Artificial Sequence
  ENSG00000073711_3 (sequence is synthesized)
gaagggacccggatttaaggggagagctagctttcctggcaaggggctgtgattttgttctcccttcacggtttaagaagcggctgaagtcatttcagcagacacagattcaaaataaac

SEQ ID NO: 63614 - DNA, 120 bp, Artificial Sequence
  ENSG00000073711_4 (sequence is synthesized)
cagaaaagaaacctggaacaccactcccacctccagccacctctccaagtagtccccgacctctctccccggttccccatgtgaataatgttgtgaatgcgccattgtccataaacattc

SEQ ID NO: 63615 - DNA, 120 bp, Artificial Sequence
  ENSG00000073711_5 (sequence is synthesized)
cacggttctactttcctgaaggactcccagatacctgtagtaatcatgaacaaactctaagcagaattgaaactgctttcatggatattgaagaacagaaagcagacatttatgaaatgg

SEQ ID NO: 63616 - DNA, 120 bp, Artificial Sequence
  ENSG00000073711_6 (sequence is synthesized)
ggaaaattgcaaaggtctgtggctgtcctctctattggaaagcccccatgttcagggctgcagggggagagaagacaggatttgtgacagcacagtcattcattgccatgtggagaaagt

SEQ ID NO: 63617 - DNA, 120 bp, Artificial Sequence
  ENSG00000073711_7 (sequence is synthesized)
tgctgaataaccatcatgatgatgcctctaaattcatctgtcttctagcaaagcccaactgcagctctctagaacaggaggatttcatccctctacttcaggatgtggtggatacccacc

SEQ ID NO: 63618 - DNA, 120 bp, Artificial Sequence
  ENSG00000073711_8 (sequence is synthesized)
ctggtctcacgttcctgaaagatgctccagaattccactcccgctacatcaccacggttattcagagaatattctacacagtcaacagatcttggagtggaaaaattacttcgacagaga

SEQ ID NO: 63619 - DNA, 120 bp, Artificial Sequence
  ENSG00000073711_9 (sequence is synthesized)
tggaagaagaggaagatataaaccaaattacagattacttctcctatgaacatttctatgttatttattgtaaattctgggaactagatactgatcacgacctctacatcagccaggccg

SEQ ID NO: 63620 - DNA, 120 bp, Artificial Sequence
  ENSG00000073711_10 (sequence is synthesized)
atctgtctcgatacaatgaccaggcttcatcaagcaggattattgaaaggatattctctggtgcagtaacaaggggaaaaacaatacagaaagagggaagaatgagctatgcagattttg

SEQ ID NO: 63621 - DNA, 120 bp, Artificial Sequence
  ENSG00000073711_11 (sequence is synthesized)
tttggtttttgatctctgaagaagacaaaaggaatcctaccagcattgagtattggttccgctgcatggatgtggatggagacggtgtactctccatgtatgagctggagtacttctatg

SEQ ID NO: 63622 - DNA, 120 bp, Artificial Sequence
  ENSG00000073711_12 (sequence is synthesized)
aggagcagtgtgaacggatggaagccatgggaattgagcccttgccattccatgatttactgtgccagatgcttgacctagtgaagccagctgttgatggcaaaataactctaagagatc

SEQ ID NO: 63623 - DNA, 120 bp, Artificial Sequence
  ENSG00000073711_13 (sequence is synthesized)
tgaagaggtgcagaatggctcacatcttctatgacactttctttaatctggagaaatacttagaccatgaacagagagatccctttgcggtccagaaggatgttgagaacgatgggcctg

SEQ ID NO: 63624 - DNA, 120 bp, Artificial Sequence
  ENSG00000073711_14 (sequence is synthesized)
agccctcagactgggaccggtttgccgctgaggagtatgagacgcttgttgcagaggaatctgcccaagcacaattccaggaaggctttgaagattatgaaacagatgaacctgcctctc

SEQ ID NO: 63625 - DNA, 120 bp, Artificial Sequence
  ENSG00000073711_15 (sequence is synthesized)
cctctgaatttggaaacaaaagcaataaaatattaagtgcaagccttccagagaaatgtggaaagcttcaatcagtggatgaagaatagctgccggtgtctacaatgaaacgaagatgtg

SEQ ID NO: 63626 - DNA, 120 bp, Artificial Sequence
  ENSG00000073711_16 (sequence is synthesized)
tattttaaatgtttctttcttgtgaagagatgttctcgtttgcatactgctttttaaagactttgatttctccaagtgtgtatcatctgcactaggaactttgtttttaagcaataggtc

SEQ ID NO: 63627 - DNA, 120 bp, Artificial Sequence
  ENSG00000073711_17 (sequence is synthesized)
tggatacacatttaacttaggaggctcctccaatttgcctcaaacctcttacggagcttctcctcagaagtggtaccatcgccttccaaagtcagcactctacactcttgaatgtaccaa

SEQ ID NO: 63628 - DNA, 120 bp, Artificial Sequence
  ENSG00000073711_18 (sequence is synthesized)
gcgctcgggcctccgctcttcacgcgccgcattcgtagcccgagagtccgcgccgcggggaggcttggaggcaagcgctgcccgcgagctgagccgccggaggaggagccgcgggcaacg

SEQ ID NO: 63629 - DNA, 120 bp, Artificial Sequence
  ENSG00000073711_19 (sequence is synthesized)
aggtttctctgtcattcacagaaaaatgaatcatttaaacctttggaggactcagttatcacaatacttctctactaccaactaagatttatgatagtaaatttatgagagcaaatttcc

SEQ ID NO: 63630 - DNA, 120 bp, Artificial Sequence
  ENSG00000073711_20 (sequence is synthesized)
atgttatagaactgttgaagaactaaaagaggatattctttcatcaaaataattctgcagtatcataatattactaaataaaattaaaaagcacaattattaaattattaaatttgccac

SEQ ID NO: 63631 - DNA, 120 bp, Artificial Sequence
  ENSG00000073711_21 (sequence is synthesized)
acatgtgcagcagctactgtatcctgatagtgaccaaacctcaaatataaatggtttcccttcatgggaaaagccattatatttggaagaaaccactgaacattgttattaaatatattt

SEQ ID NO: 63632 - DNA, 120 bp, Artificial Sequence
  ENSG00000073711_22 (sequence is synthesized)
tcagctaactgtcatttaggagaattttcatgaaacaagttctagaaagttccaagtcccaccagtaagtggatttgatattatggcagcaacttacagacttgtggttagtactgtgaa

SEQ ID NO: 63633 - DNA, 120 bp, Artificial Sequence
  ENSG00000073711_23 (sequence is synthesized)
ccactacagcagcgtggtgatagaccggcgttttgaacaagctatacattattgcactggaacctgccacaccttcacacatggaattgactgcattgtggtacaccatagtgtttgtgc

SEQ ID NO: 63634 - DNA, 120 bp, Artificial Sequence
  ENSG00000073711_24 (sequence is synthesized)
agacctcttgcacatccctgtgtctcagttcaaagatgcagatctgaactctatgtttctaccccatgaaaatgggctttcttcggctgaaggagactatccccaacaggccttcacagg

SEQ ID NO: 63635 - DNA, 120 bp, Artificial Sequence
  ENSG00000073711_25 (sequence is synthesized)
catacccagggtcaagagaggatctacatttcagaatacctacaacttaaaggatattgcaggagaagcaatcagttttgccagtgggaaaataaaagaattttcctttgaaaaactcaa

SEQ ID NO: 63636 - DNA, 120 bp, Artificial Sequence
  ENSG00000073711_26 (sequence is synthesized)
aaactctaaccatgcagcttacagaaagggaaggaaagttaagtctgactcatttaataggaggtcagttgatttggacttgctttgtggccattataacaacgatgggaacgccccatc

SEQ ID NO: 63637 - DNA, 120 bp, Artificial Sequence
  ENSG00000073711_27 (sequence is synthesized)
ctttggtttactgcggagttcctcagttgaggaaaaacctttgtctcatagaaactcactggatacgaacctgacttccatgtttcttcaaaacttttctgaagaagacttggttactca

SEQ ID NO: 63638 - DNA, 120 bp, Artificial Sequence
  ENSG00000073711_28 (sequence is synthesized)
gattttggaaaaacataaaatagataatttttcttctgggacagacataaagatgtgcttggacatcttattgaaatgctccgaggatttaaaaaaatgcacagacatcataaaacaatg

SEQ ID NO: 63639 - DNA, 120 bp, Artificial Sequence
  ENSG00000073711_29 (sequence is synthesized)
cataaagaaaaaatcagggagtagcatcagtgaaggaagtggtaatgatacaatttctagctctgaaactgtctatatgaatgtaatgaccaggttagcatcctatctgaaaaagttacc

SEQ ID NO: 63640 - DNA, 120 bp, Artificial Sequence
  ENSG00000073711_30 (sequence is synthesized)
atttgaattcatgcagtctgggaataatgaggctctagatttaacagaactgatcagtaatatgcctagcttacaactgactcccttctccccagtgtttggcactgaacaaccccctaa

SEQ ID NO: 63641 - DNA, 120 bp, Artificial Sequence
  ENSG00000073711_31 (sequence is synthesized)
atatgaagatgttgtccagctctcagcttctgactctggacgatttcaaactattgaattgcaaaatgacaagcctaattctaggaagatggacactgtacaatccattccaaacaactc

SEQ ID NO: 63642 - DNA, 120 bp, Artificial Sequence
  ENSG00000073711_32 (sequence is synthesized)
cacaaattccttatataacttagaggtaaatgatcctagaactctaaaagctgtccaggtccaatcacagtcattaaccatgaatcctttagaaaatgtttcttctgacgacttaatgga

SEQ ID NO: 63643 - DNA, 120 bp, Artificial Sequence
  ENSG00000073711_33 (sequence is synthesized)
aactctttatattgaagaagagtcagatggaaagaaagcattagataaaggacaaaagacagagaatggacctagtcatgagttattaaaggtaaatgaacatagagcagaatttccaga

SEQ ID NO: 63644 - DNA, 120 bp, Artificial Sequence
  ENSG00000073711_34 (sequence is synthesized)
acatgctactcatcttaaaaaatgccccaccccaatgcaaaatgaaattggtaagatatttgagaaatcatttgttaatctacctaaggaagactgtaaatcaaaagtttctaaatttga

SEQ ID NO: 63645 - DNA, 120 bp, Artificial Sequence
  ENSG00000073711_35 (sequence is synthesized)
agagggagaccagagagattttacaaattccagtagccaggaagagatagataaattgttaatggatttggaatctttttcacagaagatggagacctctctaagagagccacttgcgaa

SEQ ID NO: 63646 - DNA, 120 bp, Artificial Sequence
  ENSG00000073711_36 (sequence is synthesized)
gggtaaaaactctaattttttaaatagtcacagtcagttgaccggtcagacccttgtagatcttgagcctaaatctaaagtctcttcacccatagaaaaagtctcaccttcctgtctaac

SEQ ID NO: 63647 - DNA, 120 bp, Artificial Sequence
  ENSG00000073711_37 (sequence is synthesized)
aaggattattgaaaccaatggacacaaaatagaggaagaggatcgagccctcttactgcgaatcctggaaagcattgaagactttgctcaagaactagttgaatgcaaatcaagcagagg

SEQ ID NO: 63648 - DNA, 120 bp, Artificial Sequence
  ENSG00000073711_38 (sequence is synthesized)
gagcctatcacaagaaaaggaaatgatgcaaattctacaggaaaccttgacaacttcctcccaggccaatttatcagtctgtagaagtcctgttggtgataaagccaaagatactacttc

SEQ ID NO: 63649 - DNA, 120 bp, Artificial Sequence
  ENSG00000073711_39 (sequence is synthesized)
ctgtgttggctggcatccctgagtcccctccgggctcctatggagcctagaagaaaccttcacttgcagaaaacttgagtcagaaaattctggaacttgaaaaagtagtaagggcctcca

SEQ ID NO: 63650 - DNA, 120 bp, Artificial Sequence
  ENSG00000073711_40 (sequence is synthesized)
gaattgacttagccctagtaataaaagcactgccaaaacatctcagagacttcttttatgtatactggagttcaaagatctttaacttacctggcttaatgtaatttcacagttacctgc

SEQ ID NO: 63651 - DNA, 120 bp, Artificial Sequence
  ENSG00000073711_41 (sequence is synthesized)
caaactactagtcactttacatcctcaggtattgtaaccactgggccttccaactttgctggcaagctctggtaacctccctgactgtggatcttatataaaatctcaagataaaaaaac

SEQ ID NO: 63652 - DNA, 120 bp, Artificial Sequence
  ENSG00000073711_42 (sequence is synthesized)
acttcttaaatgaagtatagaatttgactcatacttggaaaaagcccttttaacttttatcttttattcattgaactattgaatgatgtatttaatatccaaattagttgataactgttt

SEQ ID NO: 63653 - DNA, 120 bp, Artificial Sequence
  ENSG00000073711_43 (sequence is synthesized)
tcacttcctatcagaaggcctgcttgaagacataaaggaataatgatacattaaaattcttactagatagatatattccttcctcccaggagtattagactagctaatagtaaaggcctc

SEQ ID NO: 63654 - DNA, 120 bp, Artificial Sequence
  ENSG00000073711_44 (sequence is synthesized)
aacgttattctttacttcatgttgaaaacaattactacagatatttcatccacctcagtatttatcaaggaaatggaaaatgatacagctataaaagaaagctgttatttactgtagttg

SEQ ID NO: 63655 - DNA, 120 bp, Artificial Sequence
  ENSG00000073711_45 (sequence is synthesized)
tagatgtattcactacagaatcctacatttttcagcaggccacagtccagccaaatcctataatatccttgaaaagaaactattaaaaaggatagacatttctgatgtaagtaaaacccc

SEQ ID NO: 63656 - DNA, 120 bp, Artificial Sequence
  ENSG00000073711_46 (sequence is synthesized)
caagcaacttaatatccatctgtcagtcatcaacttttcccctagattttttttttaactagttctgaaagtgtcaagaatagcttccctttccaccctacctaggttccctccttgctg

SEQ ID NO: 63657 - DNA, 120 bp, Artificial Sequence
  ENSG00000073711_47 (sequence is synthesized)
gcataaaggccaagcagtgaaatgaaccttgggttagagttatggtaggcaaaaagaaaaggagaatttaggaaataaatatgctataaacaaggtacagtacagtgagagttaacaatc

SEQ ID NO: 63658 - DNA, 120 bp, Artificial Sequence
  ENSG00000073711_48 (sequence is synthesized)
ctaggaatcctgcctgtcacaagctcccagttccctgtcattttatcttcatgattagaactgatcttccatttaactattacagaaagcagtaactattgcaactatctaatagttcac

SEQ ID NO: 63659 - DNA, 120 bp, Artificial Sequence
  ENSG00000073711_49 (sequence is synthesized)
acaaaagaattaaaagcttaaaaataatttttaggaaacacaatattcaaaatctaaacacactgataaattattaagattaagattatttatgtgataaatgaaatctcctaccaatcc

SEQ ID NO: 63660 - DNA, 120 bp, Artificial Sequence
  ENSG00000073711_50 (sequence is synthesized)
atccagcctttaccagggaagaaaagcaattatttcatttcagatagaaatacaaaaaaaaaaaaaatacttttcttagaagccagatatggtttaaatgttttattatccataatgatc

SEQ ID NO: 63661 - DNA, 120 bp, Artificial Sequence
  ENSG00000073711_51 (sequence is synthesized)
taaactaataagattcaccaaaaagtaaaaattcaattttacaatatacatttttttttttaactatttggctttacctttttaccttggttctccttactgaagtcctcttgctttcac

SEQ ID NO: 63662 - DNA, 73 bp, Artificial Sequence
  ENSG00000073711_52 (sequence is synthesized)
tttaccttggttctccttactgaagtcctcttgctttcactttgatctggtttttgaagtctcttaattattg

SEQ ID NO: 63663 - DNA, 89 bp, Artificial Sequence
  ENSG00000073711_53 (sequence is synthesized)
ggagtagtctctacaaaaaataaatttagctgggcatggtggtgcacatctgtagtcctaccaacttgggaggctgaggcaggagaatc

SEQ ID NO: 63664 - DNA, 120 bp, Artificial Sequence
  ENSG00000073711_54 (sequence is synthesized)
gcactccagcctaggcgacagagcaagaccccattctcttacaaagtctctattataaaagtacatccatcaataccattccatttaaaatgggctattgtaatttacccacattatcac

SEQ ID NO: 63665 - DNA, 120 bp, Artificial Sequence
  ENSG00000073711_55 (sequence is synthesized)
aatgggctattgtaatttacccacattatcacattttcaggaattataagaatgtgttttattgtactccttccttggagctgaatgcaaggaatgtgaattctgaggaattaaggtaga

SEQ ID NO: 63666 - DNA, 120 bp, Artificial Sequence
  ENSG00000073711_56 (sequence is synthesized)
atatatttgactttctggtaaagatcatggttaagtataatcattactgccaaactggaattttcaagttattataatatcccaggccccttgataaaagctgagggttatcatgacctt

SEQ ID NO: 63667 - DNA, 120 bp, Artificial Sequence
  ENSG00000073711_57 (sequence is synthesized)
aatgctaattcaatgagaaatgagtttaatagcataacattaccaaggtaatcaaactaataaaattccatatatcttccctgcatcttgtcactgtgtaccattcaaagtgtttataaa

SEQ ID NO: 63668 - DNA, 120 bp, Artificial Sequence
  ENSG00000073711_58 (sequence is synthesized)
actctagattcatcaaatgagatttgctcagctttttgaaatgttaagatgtgtttggagaaggctgcatgactttgtttttcccttttagcaaaactaaataaagttgtcaaatatgaa

SEQ ID NO: 63669 - DNA, 120 bp, Artificial Sequence
  ENSG00000073711_59 (sequence is synthesized)
actggaaaccgagatcactgaacaatcaaactactgttttagtgatattgataaaccctgtacataaaggaggaggctaaaagaactaaagctctggccgggcacggtggctcacgcctg

SEQ ID NO: 63670 - DNA, 120 bp, Artificial Sequence
  ENSG00000073712_0 (sequence is synthesized)
attagccgctccggccacaggcagcgcttcgccagccgaggaaccggacgcggacaccgccgccccgcgagcctccagcccctcgcctgttgccgcgcgagtcccgggcccggagcgcta

SEQ ID NO: 63671 - DNA, 120 bp, Artificial Sequence
  ENSG00000073712_1 (sequence is synthesized)
ggagcgcgcggaaggagccatggctctggacgggataaggatgccagatggctgctacgcggacgggacgtgggaactgagtgtccatgtgacggacctgaaccgcgatgtcaccctgag

SEQ ID NO: 63672 - DNA, 120 bp, Artificial Sequence
  ENSG00000073712_2 (sequence is synthesized)
agtgaccggcgaggtgcacattggaggcgtgatgcttaagctggtggagaaactcgatgtaaaaaaagattggtctgaccatgctctctggtgggaaaagaagagaacttggcttctgaa

SEQ ID NO: 63673 - DNA, 120 bp, Artificial Sequence
  ENSG00000073712_3 (sequence is synthesized)
gacacattggaccttagataagtatggtattcaggcagatgctaagcttcagttcacccctcagcacaaactgctccgcctgcagcttcccaacatgaagtatgtgaaggtgaaagtgaa

SEQ ID NO: 63674 - DNA, 120 bp, Artificial Sequence
  ENSG00000073712_4 (sequence is synthesized)
tttctctgatagagtcttcaaagctgtttctgacatctgtaagacttttaatatcagacaccccgaagaactttctctcttaaagaaacccagagatccaacaaagaaaaaaaagaagaa

SEQ ID NO: 63675 - DNA, 120 bp, Artificial Sequence
  ENSG00000073712_5 (sequence is synthesized)
gctagatgaccagtctgaagatgaggcacttgaattagaggggcctcttatcactcctggatcaggaagtatatattcaagcccaggactgtatagtaaaacaatgacccccacttatga

SEQ ID NO: 63676 - DNA, 120 bp, Artificial Sequence
  ENSG00000073712_6 (sequence is synthesized)
tgctcatgatggaagccccttgtcaccaacttctgcttggtttggtgacagtgctttgtcagaaggcaatcctggtatacttgctgtcagtcaaccaatcacgtcaccagaaatcttggc

SEQ ID NO: 63677 - DNA, 120 bp, Artificial Sequence
  ENSG00000073712_7 (sequence is synthesized)
aaaaatgttcaagcctcaagctcttcttgataaagcaaaaatcaaccaaggatggcttgattcctcaagatctctcatggaacaagatgtgaaggaaaatgaggccttgctgctccgatt

SEQ ID NO: 63678 - DNA, 120 bp, Artificial Sequence
  ENSG00000073712_8 (sequence is synthesized)
caagtattacagcttttttgatttgaatccaaagtatgatgcaatcagaatcaatcagctttacgagcaggccaaatgggccattctcctggaagagattgaatgcacagaagaagaaat

SEQ ID NO: 63679 - DNA, 120 bp, Artificial Sequence
  ENSG00000073712_9 (sequence is synthesized)
gatgatgtttgcagccctgcagtatcatatcaataagctgtcaatcatgacatcagagaatcatttgaacaacagtgacaaagaagttgatgaagttgatgctgccctttcagacctgga

SEQ ID NO: 63680 - DNA, 120 bp, Artificial Sequence
  ENSG00000073712_10 (sequence is synthesized)
gattactctggaagggggtaaaacgtcaacaattttgggtgacattacttccattcctgaacttgctgactacattaaagttttcaagccaaaaaagctgactctgaaaggttacaaaca

SEQ ID NO: 63681 - DNA, 120 bp, Artificial Sequence
  ENSG00000073712_11 (sequence is synthesized)
atattggtgcaccttcaaagacacatccatttcttgttataagagcaaagaagaatccagtggcacaccagctcatcagatgaacctcaggggatgtgaagttaccccagatgtaaacat

SEQ ID NO: 63682 - DNA, 120 bp, Artificial Sequence
  ENSG00000073712_12 (sequence is synthesized)
ttcaggccaaaaatttaacattaaactcctgattccagttgcagaaggcatgaatgaaatctggcttcgttgtgacaatgaaaaacagtatgcacactggatggcagcctgcagattagc

SEQ ID NO: 63683 - DNA, 120 bp, Artificial Sequence
  ENSG00000073712_13 (sequence is synthesized)
cagaatattctttcctttctgaagatgcagcatttaaacccagatcctcagttaataccagagcagatcacgactgatataactcctgaatgtttggtgtctccccgctatctaaaaaag

SEQ ID NO: 63684 - DNA, 120 bp, Artificial Sequence
  ENSG00000073712_14 (sequence is synthesized)
tataagaacaagcagataacagcgagaatcttggaggcccatcagaatgtagctcagatgagtctaattgaagccaagatgagatttattcaagcttggcagtcactacctgaatttggc

SEQ ID NO: 63685 - DNA, 120 bp, Artificial Sequence
  ENSG00000073712_15 (sequence is synthesized)
atcactcacttcattgcaaggttccaagggggcaaaaaagaagaacttattggaattgcatacaacagactgattcggatggatgccagcactggagatgcaattaaaacatggcgtttc

SEQ ID NO: 63686 - DNA, 120 bp, Artificial Sequence
  ENSG00000073712_16 (sequence is synthesized)
agcaacatgaaacagtggaatgtcaactgggaaatcaaaatggtcaccgtagagtttgcagatgaagtacgattgtccttcatttgtactgaagtagattgcaaagtggttcatgaattc

SEQ ID NO: 63687 - DNA, 120 bp, Artificial Sequence
  ENSG00000073712_17 (sequence is synthesized)
attggtggctacatatttctctcaacacgtgcaaaagaccaaaacgagagtttagatgaagagatgttctacaaacttaccagtggttgggtgtgaataggaatactgtttaatgaaact

SEQ ID NO: 63688 - DNA, 120 bp, Artificial Sequence
  ENSG00000073712_18 (sequence is synthesized)
ccacggccataacaatatttaactttaaaagctgtttgttatatgctgcttaataaagtaagcttgaaatttatcattttatcatgaaaacttctttgccttaccagaccagttaatatg

SEQ ID NO: 63689 - DNA, 120 bp, Artificial Sequence
  ENSG00000073712_19 (sequence is synthesized)
tgcactaaacaagcacgactattaatctatcatgttatgatataataaacttgaatttgtcacacattccttagggccatgaattgaaaactgaaatagtgggcaaatcaggaacaaacc

SEQ ID NO: 63690 - DNA, 120 bp, Artificial Sequence
  ENSG00000073712_20 (sequence is synthesized)
atcactgatttactgatttaagctagccaaactgtaagaaacaagccatctattttaaagctatccagggcttaacctatatgaactctatttatcatgtctaatgcatgtgatttaatg

SEQ ID NO: 63691 - DNA, 120 bp, Artificial Sequence
  ENSG00000073712_21 (sequence is synthesized)
tatgtttaatttgatatcatgttttaaaatatcctacttctggtagccatttaattcctccccctacccccaaataaatcaggcatgcaggaggcctgatatttagtaatgtcattgtgt

SEQ ID NO: 63692 - DNA, 120 bp, Artificial Sequence
  ENSG00000073712_22 (sequence is synthesized)
ttgaccttgaaggaaaatgctattagtccgtcgtgcttgatttgtttttgtccttgaataagcatgttatgtatattgtctcgtgtttttatttttacaccatattgtattacactttta

SEQ ID NO: 63693 - DNA, 120 bp, Artificial Sequence
  ENSG00000073712_23 (sequence is synthesized)
gtattcaccagcataatcactgtctgcctaaaatatgcaactctttgcattacaatatgaagtaaagttctatgaagtatgcattttgtgtaactaatgtaaaaacacaaattttataaa

SEQ ID NO: 63694 - DNA, 120 bp, Artificial Sequence
  ENSG00000073712_24 (sequence is synthesized)
attgtacagttttttaaaaactactcacaactagcagatggcttaaatgtagcaatctctgcgttaattaaatgcctttaagagatataattaacgtgcagttttaatatctactaaatt

SEQ ID NO: 63695 - DNA, 120 bp, Artificial Sequence
  ENSG00000073712_25 (sequence is synthesized)
aagaatgacttcattatgatcatgatttgccacaatgtccttaactctaatgcctggactggccatgttctagtctgttgcgctgttacaatctgtattggtgctagtcagaaaattcct

SEQ ID NO: 63696 - DNA, 120 bp, Artificial Sequence
  ENSG00000073712_26 (sequence is synthesized)
agctcacatagcccaaaagggtgcgagggagaggtggattaccagtattgttcaataatccatggttcaaagactgtataaatgcattttattttaaataaaagcaaaacttttatttaa

SEQ ID NO: 63697 - DNA, 120 bp, Artificial Sequence
  ENSG00000073712_27 (sequence is synthesized)
cacaggcagcgcttcgccagccgaggaaccggacgcggacaccgccgccccgcgagcctccagcccctcgcctgttgccgcgcgagtcccgggcccggagcgctaggagcgcgcggtgag

SEQ ID NO: 63698 - DNA, 120 bp, Artificial Sequence
  ENSG00000073712_28 (sequence is synthesized)
ggcacttgaattagaggggcctcttatcactcctggatcaggcactgatgttctttacattggccctctgaaaggaagtatatattcaagcccaggactgtatagtaaaacaatgacccc

SEQ ID NO: 63699 - DNA, 120 bp, Artificial Sequence
  ENSG00000073712_29 (sequence is synthesized)
gtttcccagtaatgttaatgaacaaaaggttatctgcctagcgagttccttttccaagcgtttgagacaattcgacaagattatgagactgcgaactggagtcttttatctttaaaagga

SEQ ID NO: 63700 - DNA, 120 bp, Artificial Sequence
  ENSG00000073712_30 (sequence is synthesized)
ccacaattttacacatagttacacagtttggtaaattttcattgaaatttgcttttgttcactctgtttagaattcttttctttggaaattaataccataaaagggctgctacttaggaa

SEQ ID NO: 63701 - DNA, 120 bp, Artificial Sequence
  ENSG00000073712_31 (sequence is synthesized)
aatggttctttggtacaacataaaaagtcctttacaggggaatttcacttggtataggccctggtattctctgcccccaacatcatgccataaaaggaaaaggctttagtttgggggtgg

SEQ ID NO: 63702 - DNA, 120 bp, Artificial Sequence
  ENSG00000073712_32 (sequence is synthesized)
ggagacgaagacctttaaaataaacattttgtttttatctaattttgctttaatctttgttaaggaataattttaaaacatactaaaaaggctcaatgaaatgcccagaacacttactaa

SEQ ID NO: 63703 - DNA, 120 bp, Artificial Sequence
  ENSG00000073712_33 (sequence is synthesized)
ttccttaactttaagtataatatttattatatgggtctaaaattatttctacctaaatgttcagaattttaatgacagaatatttgtctttaagtctcagaggttgtgtaagcctagaaa

SEQ ID NO: 63704 - DNA, 120 bp, Artificial Sequence
  ENSG00000073712_34 (sequence is synthesized)
ttgtttatcccgtggtcatatgatgtgggagtagtaaggaatggaggaaatgctgccctggggaactgtatggaatgtagattgtaagttaaaaagagaaagtaaagcaagtgctaattt

SEQ ID NO: 63705 - DNA, 120 bp, Artificial Sequence
  ENSG00000073712_35 (sequence is synthesized)
catttttcattcgtagttttttaaaattatttatacagaatcttgtttctaaaagtgaacttatttgccttcaaaggcaataagtaatttcaaacctgaccaattttatcatttcacagt

SEQ ID NO: 63706 - DNA, 120 bp, Artificial Sequence
  ENSG00000073712_36 (sequence is synthesized)
aaggtatcagggagataaaagagcttaaacgagagctgccacacattgttttcactgtcaactatttgttttctcagaagccttttaaatgatagttcttgactagaaactatcaactga

SEQ ID NO: 63707 - DNA, 120 bp, Artificial Sequence
  ENSG00000073712_37 (sequence is synthesized)
agatttatctttaactgacaggaggacagtttgtgtgtggtccgtggttaaagatccttctggccttgcctttcatgttgccatctaatcaaatgcacatttttaaccctcctttctctc

SEQ ID NO: 63708 - DNA, 120 bp, Artificial Sequence
  ENSG00000073712_38 (sequence is synthesized)
ctaatcaaatgcacatttttaaccctcctttctctcactagagctataggttagattttttggtgtgtattttgttctctttgaggcagagtctctctgtctcccaggctggagtgcagt

SEQ ID NO: 63709 - DNA, 69 bp, Artificial Sequence
  ENSG00000073712_39 (sequence is synthesized)
cagtggcaccatcatagctcaagcgcactgcagcctccatctcccaggctgaggcaggagaatcacctg

SEQ ID NO: 63710 - DNA, 120 bp, Artificial Sequence
  ENSG00000073712_40 (sequence is synthesized)
attgtttccagagaatagcgaccatgatgttattgccctggtgcctagtaagtagtgacattcagaagtttagttgctactgtgtgtcagataccacactagtcacactggacatagtgc

SEQ ID NO: 63711 - DNA, 120 bp, Artificial Sequence
  ENSG00000073712_41 (sequence is synthesized)
tcagtaattattaagctgtatccagttgcgttctggaggctgtaggaagatgtgcaggccacaaggacattcttccctacctgggcatagactcgtagttttcttttgggtctatcaaaa

SEQ ID NO: 63712 - DNA, 120 bp, Artificial Sequence
  ENSG00000073712_42 (sequence is synthesized)
taacctgttgtatttaacctactttaattcccttcaattatatatatattaactaaacatgctgtgggtatttttaaataaatatgactctcaaactggatttttaaattttgaagaatt

SEQ ID NO: 63713 - DNA, 120 bp, Artificial Sequence
  ENSG00000073712_43 (sequence is synthesized)
attctatatgttgatttatgttaatctaaatggaaatgactaatgccataaagccgaaattcctcatgtagtatacggcatctctttgttttcccttccaggaaaaaggatgcaaaaaac

SEQ ID NO: 63714 - DNA, 120 bp, Artificial Sequence
  ENSG00000073712_44 (sequence is synthesized)
acatggtaactgaggggtttgcttttcttgtgtaaaaaaagaaacagatgggcactgcacttattttatgccttcaaattcttatttctgaaaagcagtgcatggatcatattatctgac

SEQ ID NO: 63715 - DNA, 120 bp, Artificial Sequence
  ENSG00000073712_45 (sequence is synthesized)
taaatctgagaagactttaaaggcttttggatacttttattttgctactaaaataattggctttaccttaaccggtgagaactgggtacacgatgtaactgggtacacgatgtaggggga

SEQ ID NO: 63716 - DNA, 120 bp, Artificial Sequence
  ENSG00000073712_46 (sequence is synthesized)
aagaaatatttgctctttttatcttctccctacaaatttctacccttaggttctttagcaacatttaacattctaaaataatgtggagtgtttctcagtgttctaaatggaaagtaattg

SEQ ID NO: 63717 - DNA, 120 bp, Artificial Sequence
  ENSG00000073712_47 (sequence is synthesized)
ctgcttcctcattttcatttttcattcttgcatttactttgcttggtttctacctaaagtagttttttgcatgacttttggctggaattttggtttgcaggtgaccgcaactttttcttt

SEQ ID NO: 63718 - DNA, 120 bp, Artificial Sequence
  ENSG00000073712_48 (sequence is synthesized)
gcttcgttgccattttttctgattgcctttttttttctttctgcttcctttttctttcctcgcattgccatctacagccaggctatataagagatttggtaagttctccatatttaccac

SEQ ID NO: 63719 - DNA, 120 bp, Artificial Sequence
  ENSG00000073712_49 (sequence is synthesized)
aaaagaaaaagaataaataaaaattcatagccacaaccttccctcatggaatttaccccagtagtgaaatttaaatttaaaatagaaatgattatggtgatttcaagtaccttaaagctg

SEQ ID NO: 63720 - DNA, 120 bp, Artificial Sequence
  ENSG00000073712_50 (sequence is synthesized)
ctaacaaatattcctgctagaaacatgtattccaggtattcattctgattatagacatagtgctaaatttaattaaaactcgtgtatatgtggattagaatgtgctgttctgtaatagta

SEQ ID NO: 63721 - DNA, 120 bp, Artificial Sequence
  ENSG00000073712_51 (sequence is synthesized)
gtaccgttaggtgtatgcatttggaatatgtctcaagtgtggcaactatgtactcctaatagtactttttgttgatatatgaaaactgaaattaagacttattttgaaaaatccttatac

SEQ ID NO: 63722 - DNA, 120 bp, Artificial Sequence
  ENSG00000073712_52 (sequence is synthesized)
attacattattacagtgtccaaatgtagcttcagatattttgatttcaactcttacaatatgattttggggtacggggtgcgtaattcaatcttttgatcttttgtctcagttctcccat

SEQ ID NO: 63723 - DNA, 120 bp, Artificial Sequence
  ENSG00000073712_53 (sequence is synthesized)
atattaaacatctaaagcatacctatgtagacccattaactcatattacaatagaattcaaagactgttagaatgtattttgtaagcttttaatttctacattaaaaattcaagataatt

SEQ ID NO: 63724 - DNA, 78 bp, Artificial Sequence
  ENSG00000073712_54 (sequence is synthesized)
tgtaagcttttaatttctacattaaaaattcaagataattgtgtttgttttactactaagagaatagcacgtgggagg

SEQ ID NO: 63725 - DNA, 66 bp, Artificial Sequence
  ENSG00000073712_55 (sequence is synthesized)
agtactcttttagggttagagagaacacttatcttgaagaaaagcagtccaacatgttcccccaca

SEQ ID NO: 63726 - DNA, 120 bp, Artificial Sequence
  ENSG00000073712_56 (sequence is synthesized)
tgaatatagtccttctctgatacaaattagtacattaagaataaaaaggcctataaattctgatgattatttgtaccaccacctcttaaagtacagacagaccatggttgactattcatt

SEQ ID NO: 63727 - DNA, 120 bp, Artificial Sequence
  ENSG00000073712_57 (sequence is synthesized)
tctcacttaaatttgcctatttcataattagcccagttactaaaattctaagtgcataatttgcttagaatgttgccttttttgtctttctgtaatggataaagccgatctactctgaaa

SEQ ID NO: 63728 - DNA, 120 bp, Artificial Sequence
  ENSG00000073712_58 (sequence is synthesized)
tagcagctactgtttgttgaatgcctaccctgtgccagacatgatacttagaggcttacattagtaccctgtctctaaacctcatcacagccttttaaggcagttggacaaatgaagaca

SEQ ID NO: 63729 - DNA, 120 bp, Artificial Sequence
  ENSG00000073712_59 (sequence is synthesized)
ctgcaatagagagacctgagggccatcattgtctatgaccacgcacaaagtaactacagaatcatttcaaactcagatgctttaggcttaaaaacctggcacatttaccactgtacatca

SEQ ID NO: 63730 - DNA, 120 bp, Artificial Sequence
  ENSG00000073712_60 (sequence is synthesized)
tgttgcccccagtcttggagtatacgagtatcatttaaaatgaaccatcttttactaataagtcatttggtttagcatcatattggatttattgtatcaattcctattacttcaaagaat

SEQ ID NO: 63731 - DNA, 120 bp, Artificial Sequence
  ENSG00000073712_61 (sequence is synthesized)
cttatatttctgaaatactcaaacgtgatacctaaaatttaagtatctgaagcgaacgttaaaacacaggaagtaggctttcctgcacgacttgaagagaggcattctcattaattgaat

SEQ ID NO: 63732 - DNA, 120 bp, Artificial Sequence
  ENSG00000073712_62 (sequence is synthesized)
caatcaccagagaccatttgagaactgaacgacctaaaacccttgcattcctagtcttccttttcagaacatgaaaacttaaagtgtaggggaagggcaataaacttagcttcttctttg

SEQ ID NO: 63733 - DNA, 120 bp, Artificial Sequence
  ENSG00000073712_63 (sequence is synthesized)
ggacttaaaggcattattcgtttaggttttagacagactgatcatttgaggatcaacaagtgttttgtgatatgacagactttaagtagcacagtagttttgtgtggacccagccaccta

SEQ ID NO: 63734 - DNA, 120 bp, Artificial Sequence
  ENSG00000073712_64 (sequence is synthesized)
ctttacctccagtcaactcttgattatggtaatagttatatctcatttggggctcaagaggatcctaaaacaaaaatgtaaaaaaagattggtctgaccatgctctctggtgggaaaaga

SEQ ID NO: 63735 - DNA, 120 bp, Artificial Sequence
  ENSG00000073712_65 (sequence is synthesized)
gattatggtaatagttatatctcatttggggctcaagaggatcctaaaacaaaagtaaatggtacagagaattacaatattagcagagtacaaaagtatatatttatcagaaataagtca

SEQ ID NO: 63736 - DNA, 120 bp, Artificial Sequence
  ENSG00000073712_66 (sequence is synthesized)
cgtgcccagaaaagttatctgtgcttataagtcacaatgacatgttgccttagcaaagattatctaatgtaaactttgcttctagtttatggacgtgtgagaatactaaacaaattttgc

SEQ ID NO: 63737 - DNA, 120 bp, Artificial Sequence
  ENSG00000073712_67 (sequence is synthesized)
atttctttcctgaattagtactttaaaaatatgcaactagaaatttatcctccctaaaagtaatattttaacctcctcttcattccaaactctaagttgcttacttatttttaagatgtg

SEQ ID NO: 63738 - DNA, 120 bp, Artificial Sequence
  ENSG00000073734_0 (sequence is synthesized)
agaatgatgaaaaccgaggttggaaaaggttgtgaaaccttttaactctccacagtggagtccattatttcctctggcttcctcaaattcatattcacagggtcgttggctgtgggttgc

SEQ ID NO: 63739 - DNA, 120 bp, Artificial Sequence
  ENSG00000073734_1 (sequence is synthesized)
aattaccatgtctgactcagtaattcttcgaagtataaagaaatttggagaggagaatgatggttttgagtcagataaatcatataataatgataagaaatcaaggttacaagatgagaa

SEQ ID NO: 63740 - DNA, 120 bp, Artificial Sequence
  ENSG00000073734_2 (sequence is synthesized)
gaaaggtgatggcgttagagttggcttctttcaattgtttcggttttcttcatcaactgacatttggctgatgtttgtgggaagtttgtgtgcatttctccatggaatagcccagccagg

SEQ ID NO: 63741 - DNA, 120 bp, Artificial Sequence
  ENSG00000073734_3 (sequence is synthesized)
cgtgctactcatttttggcacaatgacagatgtttttattgactacgacgttgagttacaagaactccagattccaggaaaagcatgtgtgaataacaccattgtatggactaacagttc

SEQ ID NO: 63742 - DNA, 120 bp, Artificial Sequence
  ENSG00000073734_4 (sequence is synthesized)
cctcaaccagaacatgacaaatggaacacgttgtgggttgctgaacatcgagagcgaaatgatcaaatttgccagttactatgctggaattgctgtcgcagtacttatcacaggatatat

SEQ ID NO: 63743 - DNA, 120 bp, Artificial Sequence
  ENSG00000073734_5 (sequence is synthesized)
tcaaatatgcttttgggtcattgccgcagctcgtcagatacagaaaatgagaaaattttactttaggagaataatgagaatggaaatagggtggtttgactgcaattcagtgggggagct

SEQ ID NO: 63744 - DNA, 120 bp, Artificial Sequence
  ENSG00000073734_6 (sequence is synthesized)
gaatacaagattctctgatgatattaataaaatcaatgatgccatagctgaccaaatggcccttttcattcagcgcatgacctcgaccatctgtggtttcctgttgggatttttcagggg

SEQ ID NO: 63745 - DNA, 120 bp, Artificial Sequence
  ENSG00000073734_7 (sequence is synthesized)
ttggaaactgaccttggttattatttctgtcagccctctcattgggattggagcagccaccattggtctgagtgtgtccaagtttacggactatgagctgaaggcctatgccaaagcagg

SEQ ID NO: 63746 - DNA, 120 bp, Artificial Sequence
  ENSG00000073734_8 (sequence is synthesized)
ggtggtggctgatgaagtcatttcatcaatgagaacagtggctgcttttggtggtgagaaaagagaggttgaaaggtatgagaaaaatcttgtgttcgcccagcgttggggaattagaaa

SEQ ID NO: 63747 - DNA, 120 bp, Artificial Sequence
  ENSG00000073734_9 (sequence is synthesized)
aggaatagtgatgggattctttactggattcgtgtggtgtctcatctttttgtgttatgcactggccttctggtacggctccacacttgtcctggatgaaggagaatatacaccaggaac

SEQ ID NO: 63748 - DNA, 120 bp, Artificial Sequence
  ENSG00000073734_10 (sequence is synthesized)
ccttgtccagattttcctcagtgtcatagtaggagctttaaatcttggcaatgcctctccttgtttggaagcctttgcaactggacgtgcagcagccaccagcatttttgagacaataga

SEQ ID NO: 63749 - DNA, 120 bp, Artificial Sequence
  ENSG00000073734_11 (sequence is synthesized)
caggaaacccatcattgactgcatgtcagaagatggttacaagttggatcgaatcaagggtgaaattgaattccataatgtgaccttccattatccttccagaccagaggtgaagattct

SEQ ID NO: 63750 - DNA, 120 bp, Artificial Sequence
  ENSG00000073734_12 (sequence is synthesized)
aaatgacctcaacatggtcattaaaccaggggaaatgacagctctggtaggacccagtggagctggaaaaagtacagcactgcaactcattcagcgattctatgacccctgtgaaggaat

SEQ ID NO: 63751 - DNA, 120 bp, Artificial Sequence
  ENSG00000073734_13 (sequence is synthesized)
ggtgaccgtggatggccatgacattcgctctcttaacattcagtggcttagagatcagattgggatagtggagcaagagccagttctgttctctaccaccattgcagaaaatattcgcta

SEQ ID NO: 63752 - DNA, 120 bp, Artificial Sequence
  ENSG00000073734_14 (sequence is synthesized)
tggcagagaagatgcaacaatggaagacatagtccaagctgccaaggaggccaatgcctacaacttcatcatggacctgccacagcaatttgacacccttgttggagaaggaggaggcca

SEQ ID NO: 63753 - DNA, 120 bp, Artificial Sequence
  ENSG00000073734_15 (sequence is synthesized)
gatgagtggtggccagaaacaaagggtagctatcgccagagccctcatccgaaatcccaagattctgcttttggacatggccacctcagctctggacaatgagagtgaagccatggtgca

SEQ ID NO: 63754 - DNA, 120 bp, Artificial Sequence
  ENSG00000073734_16 (sequence is synthesized)
agaagtgctgagtaagattcagcatgggcacacaatcatttcagttgctcatcgcttgtctacggtcagagctgcagataccatcattggttttgaacatggcactgcagtggaaagagg

SEQ ID NO: 63755 - DNA, 120 bp, Artificial Sequence
  ENSG00000073734_17 (sequence is synthesized)
gacccatgaagaattactggaaaggaaaggtgtttacttcactctagtgactttgcaaagccagggaaatcaagctcttaatgaagaggacataaaggatgcaactgaagatgacatgct

SEQ ID NO: 63756 - DNA, 120 bp, Artificial Sequence
  ENSG00000073734_18 (sequence is synthesized)
tgcgaggacctttagcagagggagctaccaggatagtttaagggcttccatccggcaacgctccaagtctcagctttcttacctggtgcacgaacctccattagctgttgtagatcataa

SEQ ID NO: 63757 - DNA, 120 bp, Artificial Sequence
  ENSG00000073734_19 (sequence is synthesized)
gtctacctatgaagaagatagaaaggacaaggacattcctgtgcaggaagaagttgaacctgccccagttaggaggattctgaaattcagtgctccagaatggccctacatgctggtagg

SEQ ID NO: 63758 - DNA, 120 bp, Artificial Sequence
  ENSG00000073734_20 (sequence is synthesized)
gtctgtgggtgcagctgtgaacgggacagtcacacccttgtatgcctttttattcagccagattcttgggactttttcaattcctgataaagaggaacaaaggtcacagatcaatggtgt

SEQ ID NO: 63759 - DNA, 120 bp, Artificial Sequence
  ENSG00000073734_21 (sequence is synthesized)
gtgcctactttttgtagcaatgggctgtgtatctcttttcacccaatttctacagggatatgcctttgctaaatctggggagctcctaacaaaaaggctacgtaaatttggtttcagggc

SEQ ID NO: 63760 - DNA, 120 bp, Artificial Sequence
  ENSG00000073734_22 (sequence is synthesized)
aatgctggggcaagatattgcctggtttgatgacctcagaaatagccctggagcattgacaacaagacttgctacagatgcttcccaagttcaaggggctgccggctctcagatcgggat

SEQ ID NO: 63761 - DNA, 120 bp, Artificial Sequence
  ENSG00000073734_23 (sequence is synthesized)
gatagtcaattccttcactaacgtcactgtggccatgatcattgccttctcctttagctggaagctgagcctggtcatcttgtgcttcttccccttcttggctttatcaggagccacaca

SEQ ID NO: 63762 - DNA, 120 bp, Artificial Sequence
  ENSG00000073734_24 (sequence is synthesized)
gaccaggatgttgacaggatttgcctctcgagataagcaggccctggagatggtgggacagattacaaatgaagccctcagtaacatccgcactgttgctggaattggaaaggagaggcg

SEQ ID NO: 63763 - DNA, 120 bp, Artificial Sequence
  ENSG00000073734_25 (sequence is synthesized)
gttcattgaagcacttgagactgagctggagaagcccttcaagacagccattcagaaagccaatatttacggattctgctttgcctttgcccagtgcatcatgtttattgcgaattctgc

SEQ ID NO: 63764 - DNA, 120 bp, Artificial Sequence
  ENSG00000073734_26 (sequence is synthesized)
ttcctacagatatggaggttacttaatctccaatgaggggctccatttcagctatgtgttcagggtgatctctgcagttgtactgagtgcaacagctcttggaagagccttctcttacac

SEQ ID NO: 63765 - DNA, 120 bp, Artificial Sequence
  ENSG00000073734_27 (sequence is synthesized)
cccaagttatgcaaaagctaaaatatcagctgcacgcttttttcaactgctggaccgacaacccccaatcagtgtatacaatactgcaggtgaaaaatgggacaacttccaggggaagat

SEQ ID NO: 63766 - DNA, 120 bp, Artificial Sequence
  ENSG00000073734_28 (sequence is synthesized)
gcgtttgttgggagcagtggatgtggcaaaagcactagcattcagctgttggaacgtttctatgatcctgatcaagggaaggtgatgatagatggtcatgacagcaaaaaagtaaatgtc

SEQ ID NO: 63767 - DNA, 120 bp, Artificial Sequence
  ENSG00000073734_29 (sequence is synthesized)
cagttcctccgctcaaacattggaattgtttcccaggaaccagtgttgtttgcctgtagcataatggacaatatcaagtatggagacaacaccaaagaaattcccatggaaagagtcata

SEQ ID NO: 63768 - DNA, 120 bp, Artificial Sequence
  ENSG00000073734_30 (sequence is synthesized)
gcagctgcaaaacaggctcagctgcatgattttgtcatgtcactcccagagaaatatgaaactaacgttgggtcccaggggtctcaactctctagaggggagaaacaacgcattgctatt

SEQ ID NO: 63769 - DNA, 120 bp, Artificial Sequence
  ENSG00000073734_31 (sequence is synthesized)
gctcgggccattgtacgagatcctaaaatcttgctactagatgaagccacttctgccttagacacagaaagtgaaaagacggtgcaggttgctctagacaaagccagagagggtcggacc

SEQ ID NO: 63770 - DNA, 120 bp, Artificial Sequence
  ENSG00000073734_32 (sequence is synthesized)
tgcattgtcattgcccatcgcttgtccaccatccagaacgcggatatcattgctgtcatggcacagggggtggtgattgaaaaggggacccatgaagaactgatggcccaaaaaggagcc

SEQ ID NO: 63771 - DNA, 120 bp, Artificial Sequence
  ENSG00000073734_33 (sequence is synthesized)
tactacaaactagtcaccactggatcccccatcagttgacccaatgcaagaatctcagacacacatgacgcaccagttacaggggttgtttttaaagaaaaaaacaatcccagcaggagg

SEQ ID NO: 63772 - DNA, 120 bp, Artificial Sequence
  ENSG00000073734_34 (sequence is synthesized)
gattgctgggattgttttttctttaaagaagaatgttaatattttacttttacagtcattttcctacatcggaatccaagctaatttctaatggccttccataataattctgctttagat

SEQ ID NO: 63773 - DNA, 120 bp, Artificial Sequence
  ENSG00000073734_35 (sequence is synthesized)
gtgtatacagaaaatgaaagaaactagggtccatatgagggaaaacccaatgtcaagtggcagctcagccaccactcagtgcttctctgtgcaggagccagtcctgattaatatgtggga

SEQ ID NO: 63774 - DNA, 120 bp, Artificial Sequence
  ENSG00000073734_36 (sequence is synthesized)
attagtgagacatcagggagtaagtgacactttgaactcctcaagggcagagaactgtctttcatttttgaaccctcggtgtacacagaggcgggtctataacaggcaatcaacaaacgt

SEQ ID NO: 63775 - DNA, 120 bp, Artificial Sequence
  ENSG00000073734_37 (sequence is synthesized)
ttcttgagctagaccaaggtcagatttgaaaagaacagaaggactgaagaccagctgtgtttcttaactaaatttgtctttcaagtgaaaccagcttccttcatctctaaggctaaggat

SEQ ID NO: 63776 - DNA, 120 bp, Artificial Sequence
  ENSG00000073734_38 (sequence is synthesized)
agggaaagggtggatgctctcaggctgagggaggcagaaagggaaagtattagcatgagctttccagttagggctgttgatttatgctttaacttcagagtgagtgtaggggtggtgatg

SEQ ID NO: 63777 - DNA, 120 bp, Artificial Sequence
  ENSG00000073734_39 (sequence is synthesized)
ctaccattactgtgaggacctaccagtgtggctggagcagggactctctcccaggccttttactcctcagcacctccctgcatactgattgttgtttttagtttctgtgaaattatattc

SEQ ID NO: 63778 - DNA, 120 bp, Artificial Sequence
  ENSG00000073734_40 (sequence is synthesized)
atgaaatgaaaatagcgcattttactttgctgtagtttcataaggttttatacaaaaaagcaagtaaatatggcagaaaagcactcatttgcccctgctccctcaaaacaccacagaatg

SEQ ID NO: 63779 - DNA, 120 bp, Artificial Sequence
  ENSG00000073734_41 (sequence is synthesized)
acatagaactaaaggcggcaggaatctacaagaatgaagaaaacacagtgatgccacctgcaaaatcttgggagccagaaagcaaatggacaattgataatagagttacaagatgagaga

SEQ ID NO: 63780 - DNA, 120 bp, Artificial Sequence
  ENSG00000073734_42 (sequence is synthesized)
aaacaaaaatgtaacctgttagttgggggagcctagaaacatcctgttttgtaccacagacccctagaaagtttcaagatgtaaaaacactggatccttctggaaggaggagacaagggg

SEQ ID NO: 63781 - DNA, 120 bp, Artificial Sequence
  ENSG00000073734_43 (sequence is synthesized)
acagagggactgaagacagaagaatggaccaaaagcctgtatggaaacagaattgcagagccccgcctgcagcaggatggctgcctttccccagttccagcgagaaactgcatactccct

SEQ ID NO: 63782 - DNA, 120 bp, Artificial Sequence
  ENSG00000073734_44 (sequence is synthesized)
ctctgaggaggctcacagggaggtttgcacttagagacacaagatgaagttgaaggggcagctaacatacaagagacagggggattgaatgtaaagctgtgtatgaacagaagaactccc

SEQ ID NO: 63783 - DNA, 120 bp, Artificial Sequence
  ENSG00000073734_45 (sequence is synthesized)
gaacagaagaactcccagcccctctcttctggcaggagattgaagaatgattttctggggaaattggccaatcttagaaaagaggtcgggccaggcgctgtggctcactcctgtaatccc

SEQ ID NO: 63784 - DNA, 120 bp, Artificial Sequence
  ENSG00000073734_46 (sequence is synthesized)
aaagaaaaagaaaagaggtcaaggactccgtccttggaatcctaagaaaattttccagccgtattacccttctatgaagcccacctgtcaaccaacaagcacccactcgatcagagcttc

SEQ ID NO: 63785 - DNA, 120 bp, Artificial Sequence
  ENSG00000073734_47 (sequence is synthesized)
cccaggctttttggtgtctcctccttgcatgggaattgacttccaaggaccaccagacactgaggaagtattttaacatataaagcaaaagcaacaatagggcagctggagaaaggaaat

SEQ ID NO: 63786 - DNA, 120 bp, Artificial Sequence
  ENSG00000073734_48 (sequence is synthesized)
tagaagtaacagagccaatgcagtgattagaaaaacactcaaaaaatggtaataaatgtgttcaatgggtcaagagaacatatttccatctatttaaataaaaacaggaatcaataaaag

SEQ ID NO: 63787 - DNA, 120 bp, Artificial Sequence
  ENSG00000073734_49 (sequence is synthesized)
tgaacatacaaaaaagagctcttgtcacagaaatgaaaaccttgggagcaggactgcacccacggttcccaccaacctatcctgccatcatgttttctccctactccagcttcctcccaa

SEQ ID NO: 63788 - DNA, 120 bp, Artificial Sequence
  ENSG00000073734_50 (sequence is synthesized)
gctcactctacgtagatggtttttcttcccttagccaacaaacgaaattctgcctataaattaagccaggacactaggatatggaggtatattatttatgtctcttttccagtgtttcct

SEQ ID NO: 63789 - DNA, 120 bp, Artificial Sequence
  ENSG00000073734_51 (sequence is synthesized)
ggtatataacagcaaagatggtttagcaagttaactggtcaggccagaattcttgatggttgccaagtcaggaggcagacggtgaaggaatgcattctggttatgaaaaatggcaatgac

SEQ ID NO: 63790 - DNA, 120 bp, Artificial Sequence
  ENSG00000073734_52 (sequence is synthesized)
gagtaagttgcagagtaaagatgccttttagaggaaattaaggtttgcaataaatgcatgctaatcctctaattttgatgaaagactaaagctcttgttttggtttgcatttcaaagagc

SEQ ID NO: 63791 - DNA, 120 bp, Artificial Sequence
  ENSG00000073734_53 (sequence is synthesized)
aagagcataggctcttgtgctgggaggtggccagtttcctggaaaggaatttatggagtctgaaagaggaattagtacaaattatattttcaaataagatacttgaaagttattgatgac

SEQ ID NO: 63792 - DNA, 120 bp, Artificial Sequence
  ENSG00000073734_54 (sequence is synthesized)
agggaaaagattgtctaaagagggcttgaaattggggaaataattgaggctcagtgacaaaggagaagattacaacttcaaaaatgaataaataaataacattgcatgtttattttacaa

SEQ ID NO: 63793 - DNA, 120 bp, Artificial Sequence
  ENSG00000073734_55 (sequence is synthesized)
ggccaacaattttcttaaaggaagctattgtggtcaaataaaggtttggagggtgatctctgcagttgtactgagtgcaacagctcttggaagagccttctcttacaccccaagttatgc

SEQ ID NO: 63794 - DNA, 120 bp, Artificial Sequence
  ENSG00000073734_56 (sequence is synthesized)
atattttgctgtgttgtctaacaggagcaaagagacacggatttgctctgtgctttaatcctctgagatagatatttaggaccgtgaccaatttttattttggttgaaaaatcttatttg

SEQ ID NO: 63795 - DNA, 120 bp, Artificial Sequence
  ENSG00000073734_57 (sequence is synthesized)
aagttgagctaaagaggaatatttacacagcccagtaaaccctggaataaaagcataaatcaattcctttatttcacacataaatattgattagacaataacccgtctggggaagggata

SEQ ID NO: 63796 - DNA, 120 bp, Artificial Sequence
  ENSG00000073734_58 (sequence is synthesized)
actatgacagaaaggacattatagtggatcactgtcagaagccatcaaattcttttcccttcatgactggtgtcaccttccatctagcaatttgacacccttgttggagaaggaggaggc

SEQ ID NO: 63797 - DNA, 120 bp, Artificial Sequence
  ENSG00000073734_59 (sequence is synthesized)
gcctgattcctgaacatcctttgtgcagctacttcagcctgggttgcctgccttcacccatcttgttacagaagaaaaagacacctctcacttgtttaagccactgaagtagtttttttg

SEQ ID NO: 63798 - DNA, 120 bp, Artificial Sequence
  ENSG00000073737_0 (sequence is synthesized)
aggaagaaaatataaagtacacttttaaaacatgaagtcttcatagcagcttatagtcgttcagagaaacatgttccactgagaatgacttgagagagaggattacatcattatgccaga

SEQ ID NO: 63799 - DNA, 120 bp, Artificial Sequence
  ENSG00000073737_1 (sequence is synthesized)
aggaagaagccactgtgcatgctctatcaccagcctcaccctcctggtcagccttacaagagtgacactggatatactccagaagttggacccaccacagcctgcacactggacttcttg

SEQ ID NO: 63800 - DNA, 120 bp, Artificial Sequence
  ENSG00000073737_2 (sequence is synthesized)
gcttttatgagctattcaagagatatttagtcatcacgttgtgtcacaatgggagtgactcacagagcaaggagagaacctgaggattcctcacacatgtagtactcagagctctacgga

SEQ ID NO: 63801 - DNA, 120 bp, Artificial Sequence
  ENSG00000073737_3 (sequence is synthesized)
aacccaggcacctcgacctcaagaggatcagcctggccagggtggcacaactcttccttccccgtgcacagcaggaaagctgccatcagctgagcaagtccaccaacagtttctgtgtcc

SEQ ID NO: 63802 - DNA, 120 bp, Artificial Sequence
  ENSG00000073737_4 (sequence is synthesized)
cacttcatctttaataaggacaccatcttcttgtattatacaagaaaggagtgtacctatcacacacagggggaaaaatgctcttttgggtgctaggcctcctaatcctctgtggttttc

SEQ ID NO: 63803 - DNA, 120 bp, Artificial Sequence
  ENSG00000073737_5 (sequence is synthesized)
tgtggactcgtaaaggaaaactaaagattgaagacatcactgataagtacatttttatcactggatgtgactcgggctttggaaacttggcagccagaacttttgataaaaagggatttc

SEQ ID NO: 63804 - DNA, 120 bp, Artificial Sequence
  ENSG00000073737_6 (sequence is synthesized)
atgtaatcgctgcctgtctgactgaatcaggatcaacagctttaaaggcagaaacctcagagagacttcgtactgtgcttctggatgtgaccgacccagagaatgtcaagaggactgccc

SEQ ID NO: 63805 - DNA, 120 bp, Artificial Sequence
  ENSG00000073737_7 (sequence is synthesized)
ttgaagtgaacctgtttggactcatcagtgtgacactaaatatgcttcctttggtcaagaaagctcaagggagagttattaatgtctccagtgttggaggtcgccttgcaatcgttggag

SEQ ID NO: 63806 - DNA, 120 bp, Artificial Sequence
  ENSG00000073737_8 (sequence is synthesized)
ggggctatactccatccaaatatgcagtggaaggtttcaatgacagcttaagacgggacatgaaagcttttggtgtgcacgtctcatgcattgaaccaggattgttcaaaacaaacttgg

SEQ ID NO: 63807 - DNA, 120 bp, Artificial Sequence
  ENSG00000073737_9 (sequence is synthesized)
cagatccagtaaaggtaattgaaaaaaaactcgccatttgggagcagctgtctccagacatcaaacaacaatatggagaaggttacattgaaaaaagtctagacaaactgaaaggcaata

SEQ ID NO: 63808 - DNA, 120 bp, Artificial Sequence
  ENSG00000073737_10 (sequence is synthesized)
aatcctatgtgaacatggacctctctccggtggtagagtgcatggaccacgctctaacaagtctcttccctaagactcattatgccgctggaaaagatgccaaaattttctggatacctc

SEQ ID NO: 63809 - DNA, 120 bp, Artificial Sequence
  ENSG00000073737_11 (sequence is synthesized)
tgtctcacatgccagcagctttgcaagactttttattgttgaaacagaaagcagagctggctaatcccaaggcagtgtgactcagctaaccacaaatgtctcctccaggctatgaaattg

SEQ ID NO: 63810 - DNA, 120 bp, Artificial Sequence
  ENSG00000073737_12 (sequence is synthesized)
gccgatttcaagaacacatctccttttcaaccccattccttatctgctccaacctggactcatttagatcgtgcttatttggattgcaaaagggagtcccaccatcgctggtggtatccc

SEQ ID NO: 63811 - DNA, 120 bp, Artificial Sequence
  ENSG00000073737_13 (sequence is synthesized)
agggtccctgctcaagttttctttgaaaaggagggctggaatggtacatcacataggcaagtcctgccctgtatttaggctttgcctgcttggtgtgatgtaagggaaattgaaagactt

SEQ ID NO: 63812 - DNA, 120 bp, Artificial Sequence
  ENSG00000073737_14 (sequence is synthesized)
gcccattcaaaatgatctttaccgtggcctgccccatgcttatggtccccagcatttacagtaacttgtgaatgttaagtatcatctcttatctaaatattaaaagataagtcaaacatt

SEQ ID NO: 63813 - DNA, 120 bp, Artificial Sequence
  ENSG00000073737_15 (sequence is synthesized)
atttatttttaagaaacagaggaaggtgaataagagaagtgaaattaaataatcctattttaacttttttactaggaaaacaaactcaggaagaaaaagaaaagcagaagtgatcaagga

SEQ ID NO: 63814 - DNA, 120 bp, Artificial Sequence
  ENSG00000073737_16 (sequence is synthesized)
gagcgctcgagttgcaatattttcctttggctgctgacaggcagttactataaagcattgtgcatggtaggaaaatggaggctaagaaaagttaatttgtccgagggccctctgatgata

SEQ ID NO: 63815 - DNA, 120 bp, Artificial Sequence
  ENSG00000073737_17 (sequence is synthesized)
gtgaaactgggatggaacctctgcctgcttgcttctgaggtctgggctcctaactactgctctactgcctcgagccaagagatttacgccctattaagcaatttgttgtgcgataaattg

SEQ ID NO: 63816 - DNA, 120 bp, Artificial Sequence
  ENSG00000073737_18 (sequence is synthesized)
atctgaaaaattaataattccttaattatcaaatatccattatttaaatttataattgtgtcataaatattgtcataaatagatttgctgttttaaagcttgttccttcattttctctgt

SEQ ID NO: 63817 - DNA, 120 bp, Artificial Sequence
  ENSG00000073737_19 (sequence is synthesized)
tttgttttagataaacattgtcataaatagatttgttgttttaaagcttgttccttcattttctctgattgttttgttttagattcagaggttacttatgcttgtttgttacatggatgt

SEQ ID NO: 63818 - DNA, 120 bp, Artificial Sequence
  ENSG00000073737_20 (sequence is synthesized)
tacatgtgtaatgggggatattggacttctagtgtactcatcacccatatactgaacactgtactcaaaagggattgaaagaaactaggaaacttggcaggaagatcattcttaagccag

SEQ ID NO: 63819 - DNA, 120 bp, Artificial Sequence
  ENSG00000073737_21 (sequence is synthesized)
gaaaaaaatttttaatgctcacatgtgaacatgtgatggtcataccagaaggagcacccacctccctccctctgtgacagacacattttcttagccttcacctttccttctttcaagttg

SEQ ID NO: 63820 - DNA, 120 bp, Artificial Sequence
  ENSG00000073737_22 (sequence is synthesized)
ctgaaaatccacagtgtttctgttcatttgttactttcattctcacctatcttctctcttgctccatctaccagaacaataattccccatataatacttctcacttcacttttcaacgca

SEQ ID NO: 63821 - DNA, 120 bp, Artificial Sequence
  ENSG00000073737_23 (sequence is synthesized)
ggacctcttgttggtctgatctgtttgtctgtccgctttatcaatattatcagatgtaagtttacatgaatacacacacatattcactaaactgaggggaaaaaatgccttgtaggtcat

SEQ ID NO: 63822 - DNA, 120 bp, Artificial Sequence
  ENSG00000073737_24 (sequence is synthesized)
aaaaaagcagggaaattcccaacaattcatatttgatccctggatccaggggtggcagcaataagcctgctttagatatttactccccattttatgatccggtggtttggtttttcaaat

SEQ ID NO: 63823 - DNA, 120 bp, Artificial Sequence
  ENSG00000073737_25 (sequence is synthesized)
gatgatatggctcctttcgcaatgacttgatgtttaggaggtgtgcttcaataaatacattttaaaatcaacaatcaagttagagttgtacaaatggctctgaaatgtcccactacactg

SEQ ID NO: 63824 - DNA, 120 bp, Artificial Sequence
  ENSG00000073737_26 (sequence is synthesized)
ttagaccaagggcacagattgtgcttctgtactatttatcctagtatccctcggcatatattaactgctctaaaaatctccttggctacacgctgcatcaaatcaaagttaaatgttata

SEQ ID NO: 63825 - DNA, 120 bp, Artificial Sequence
  ENSG00000073737_27 (sequence is synthesized)
ccacctttctattctatttttaatattcaaagagggtgctcagattttagaacaaatttcaatgtttaagtacacacaaaaaaatcattaactcatatatttcaagagtaggaaatggga

SEQ ID NO: 63826 - DNA, 120 bp, Artificial Sequence
  ENSG00000073737_28 (sequence is synthesized)
taactcatatatttcaagagtaggaaatgggaactggtgttaaaactcttataacaaatgtcactgtcttaagggacagtgtttaaaaacgcatacctggccgggcgcggtggctcatgc

SEQ ID NO: 63827 - DNA, 120 bp, Artificial Sequence
  ENSG00000073754_0 (sequence is synthesized)
gtctttgtccctcctcttaacatacttgcagctaaaactaaatattgctgcttggggacctccttctagccttaaatttcagctcatcaccttcacctgccttggtcatggctctgctat

SEQ ID NO: 63828 - DNA, 120 bp, Artificial Sequence
  ENSG00000073754_1 (sequence is synthesized)
tctccttgatccttgccatttgcaccagacctggattcctagcgtctccatctggagtgcggctggtggggggcctccaccgctgtgaagggcgggtggaggtggaacagaaaggccagt

SEQ ID NO: 63829 - DNA, 120 bp, Artificial Sequence
  ENSG00000073754_2 (sequence is synthesized)
ggggcaccgtgtgtgatgacggctgggacattaaggacgtggctgtgttgtgccgggagctgggctgtggagctgccagcggaacccctagtggtattttgtatgagccaccagcagaaa

SEQ ID NO: 63830 - DNA, 120 bp, Artificial Sequence
  ENSG00000073754_3 (sequence is synthesized)
aagagcaaaaggtcctcatccaatcagtcagttgcacaggaacagaagatacattggctcagtgtgagcaagaagaagtttatgattgttcacatgatgaagatgctggggcatcgtgtg

SEQ ID NO: 63831 - DNA, 120 bp, Artificial Sequence
  ENSG00000073754_4 (sequence is synthesized)
agaacccagagagctctttctccccagtcccagagggtgtcaggctggctgacggccctgggcattgcaagggacgcgtggaagtgaagcaccagaaccagtggtataccgtgtgccaga

SEQ ID NO: 63832 - DNA, 120 bp, Artificial Sequence
  ENSG00000073754_5 (sequence is synthesized)
caggctggagcctccgggccgcaaaggtggtgtgccggcagctgggatgtgggagggctgtactgactcaaaaacgctgcaacaagcatgcctatggccgaaaacccatctggctgagcc

SEQ ID NO: 63833 - DNA, 120 bp, Artificial Sequence
  ENSG00000073754_6 (sequence is synthesized)
agatgtcatgctcaggacgagaagcaacccttcaggattgcccttctgggccttgggggaagaacacctgcaaccatgatgaagacacgtgggtcgaatgtgaagatccctttgacttga

SEQ ID NO: 63834 - DNA, 120 bp, Artificial Sequence
  ENSG00000073754_7 (sequence is synthesized)
gactagtaggaggagacaacctctgctctgggcgactggaggtgctgcacaagggcgtatggggctctgtctgtgatgacaactggggagaaaaggaggaccaggtggtatgcaagcaac

SEQ ID NO: 63835 - DNA, 120 bp, Artificial Sequence
  ENSG00000073754_8 (sequence is synthesized)
tgggctgtgggaagtccctctctccctccttcagagaccggaaatgctatggccctggggttggccgcatctggctggataatgttcgttgctcaggggaggagcagtccctggagcagt

SEQ ID NO: 63836 - DNA, 120 bp, Artificial Sequence
  ENSG00000073754_9 (sequence is synthesized)
gatgtggctgtcatctgctcaggatagtatcctggtgttgcttgacctggcccccctggccccgcctgccctctgcttgttctcctgagccctgattatcctcatactcattctggggct

SEQ ID NO: 63837 - DNA, 120 bp, Artificial Sequence
  ENSG00000073754_10 (sequence is synthesized)
caggcttgagccactactccctcatcccctcaggagtctgaacactgggcttatgccttactctcagggacaagcagcccccattgctgcctgtagatgtgagctgttgagttccctctt

SEQ ID NO: 63838 - DNA, 120 bp, Artificial Sequence
  ENSG00000073754_11 (sequence is synthesized)
gctggggaagatgagcttccatgtatcctgtgctcaaccctgaccctttgacactggttctggcctttcctgccttttctcaagctgcctggaatcctcaaacctgtcactttggtcaga

SEQ ID NO: 63839 - DNA, 120 bp, Artificial Sequence
  ENSG00000073754_12 (sequence is synthesized)
tgtgcagaccattactaaggtctatgtctgcaaacattactaatctaggtcctattactaatctatgtctgcaaacattaaaggaatgaaacaatgaaaggaacatttgaaagaaaatgt

SEQ ID NO: 63840 - DNA, 120 bp, Artificial Sequence
  ENSG00000073754_13 (sequence is synthesized)
gggtagacaatttcttgcaacttgggggaaagtttagaattcttttgattggactactttttttttttttcctcaagcttcaggtgaccacaatagcaacacctccctattctgttattt

SEQ ID NO: 63841 - DNA, 120 bp, Artificial Sequence
  ENSG00000073754_14 (sequence is synthesized)
cttagtgtaggtagacaattctttcaggagcagagcagcgtcctataatcctagaccttttcatgacgtgtaaaaaatgatgtttcatcctctgattgccccaataaaaatctttgttgt

SEQ ID NO: 63842 - DNA, 120 bp, Artificial Sequence
  ENSG00000073754_15 (sequence is synthesized)
ccatccctatacaacctgccaacatggttgacatttaatgagaggaatgtcaaaaatacattttactttattcaaagaaaaatatattggttactgggaaaaggtcaagaaagaggcaga

SEQ ID NO: 63843 - DNA, 120 bp, Artificial Sequence
  ENSG00000073754_16 (sequence is synthesized)
aagagatcagggagggctaaagttgtgtcttatgccaagcgaaagtgaaaaatatcattttcactttatcaactgagactttggggcctgtaagcttgaggcaagacagaaataagagaa

SEQ ID NO: 63844 - DNA, 120 bp, Artificial Sequence
  ENSG00000073754_17 (sequence is synthesized)
tcaagacttgattgtaaaaattgacaactttagattctgaggctaggctgagtacttattatacggctacatttacacatttacacttatctaataaatcagatttcacagtctcaacaa

SEQ ID NO: 63845 - DNA, 120 bp, Artificial Sequence
  ENSG00000073754_18 (sequence is synthesized)
gaggcctccccagccatgtggaactgtgatgaacaccagttaataaaagaggagtgaggagctgaaaataggaaactacaccctacccctgcccccgagaccacgtgtgacagaaatgat

SEQ ID NO: 63846 - DNA, 120 bp, Artificial Sequence
  ENSG00000073754_19 (sequence is synthesized)
ctgcccccgagaccacgtgtgacagaaatgatgtggacacagagaagattggcagaccctcaagaagagaaatcggtgtggggggtctgggtagaacagatggtttgctcaatcacacgg

SEQ ID NO: 63847 - DNA, 120 bp, Artificial Sequence
  ENSG00000073756_0 (sequence is synthesized)
aattgtcatacgacttgcagtgagcgtcaggagcacgtccaggaactcctcagcagcgcctccttcagctccacagccagacgccctcagacagcaaagcctacccccgcgccgcgccct

SEQ ID NO: 63848 - DNA, 120 bp, Artificial Sequence
  ENSG00000073756_1 (sequence is synthesized)
gcccgccgctgcgatgctcgcccgcgccctgctgctgtgcgcggtcctggcgctcagccatacagcaaatccttgctgttcccacccatgtcaaaaccgaggtgtatgtatgagtgtggg

SEQ ID NO: 63849 - DNA, 120 bp, Artificial Sequence
  ENSG00000073756_2 (sequence is synthesized)
atttgaccagtataagtgcgattgtacccggacaggattctatggagaaaactgctcaacaccggaatttttgacaagaataaaattatttctgaaacccactccaaacacagtgcacta

SEQ ID NO: 63850 - DNA, 120 bp, Artificial Sequence
  ENSG00000073756_3 (sequence is synthesized)
catacttacccacttcaagggattttggaacgttgtgaataacattcccttccttcgaaatgcaattatgagttatgtgttgacatccagatcacatttgattgacagtccaccaactta

SEQ ID NO: 63851 - DNA, 120 bp, Artificial Sequence
  ENSG00000073756_4 (sequence is synthesized)
caatgctgactatggctacaaaagctgggaagccttctctaacctctcctattatactagagcccttcctcctgtgcctgatgattgcccgactcccttgggtgtcaaaggtaaaaagca

SEQ ID NO: 63852 - DNA, 120 bp, Artificial Sequence
  ENSG00000073756_5 (sequence is synthesized)
gcttcctgattcaaatgagattgtggaaaaattgcttctaagaagaaagttcatccctgatccccagggctcaaacatgatgtttgcattctttgcccagcacttcacgcatcagttttt

SEQ ID NO: 63853 - DNA, 120 bp, Artificial Sequence
  ENSG00000073756_6 (sequence is synthesized)
caagacagatcataagcgagggccagctttcaccaacgggctgggccatggggtggacttaaatcatatttacggtgaaactctggctagacagcgtaaactgcgccttttcaaggatgg

SEQ ID NO: 63854 - DNA, 120 bp, Artificial Sequence
  ENSG00000073756_7 (sequence is synthesized)
aaaaatgaaatatcagataattgatggagagatgtatcctcccacagtcaaagatactcaggcagagatgatctaccctcctcaagtccctgagcatctacggtttgctgtggggcagga

SEQ ID NO: 63855 - DNA, 120 bp, Artificial Sequence
  ENSG00000073756_8 (sequence is synthesized)
ggtctttggtctggtgcctggtctgatgatgtatgccacaatctggctgcgggaacacaacagagtatgcgatgtgcttaaacaggagcatcctgaatggggtgatgagcagttgttcca

SEQ ID NO: 63856 - DNA, 120 bp, Artificial Sequence
  ENSG00000073756_9 (sequence is synthesized)
gacaagcaggctaatactgataggagagactattaagattgtgattgaagattatgtgcaacacttgagtggctatcacttcaaactgaaatttgacccagaactacttttcaacaaaca

SEQ ID NO: 63857 - DNA, 120 bp, Artificial Sequence
  ENSG00000073756_10 (sequence is synthesized)
attccagtaccaaaatcgtattgctgctgaatttaacaccctctatcactggcatccccttctgcctgacacctttcaaattcatgaccagaaatacaactatcaacagtttatctacaa

SEQ ID NO: 63858 - DNA, 120 bp, Artificial Sequence
  ENSG00000073756_11 (sequence is synthesized)
caactctatattgctggaacatggaattacccagtttgttgaatcattcaccaggcaaattgctggcagggttgctggtggtaggaatgttccacccgcagtacagaaagtatcacaggc

SEQ ID NO: 63859 - DNA, 120 bp, Artificial Sequence
  ENSG00000073756_12 (sequence is synthesized)
ttccattgaccagagcaggcagatgaaataccagtcttttaatgagtaccgcaaacgctttatgctgaagccctatgaatcatttgaagaacttacaggagaaaaggaaatgtctgcaga

SEQ ID NO: 63860 - DNA, 120 bp, Artificial Sequence
  ENSG00000073756_13 (sequence is synthesized)
gttggaagcactctatggtgacatcgatgctgtggagctgtatcctgcccttctggtagaaaagcctcggccagatgccatctttggtgaaaccatggtagaagttggagcaccattctc

SEQ ID NO: 63861 - DNA, 120 bp, Artificial Sequence
  ENSG00000073756_14 (sequence is synthesized)
cttgaaaggacttatgggtaatgttatatgttctcctgcctactggaagccaagcacttttggtggagaagtgggttttcaaatcatcaacactgcctcaattcagtctctcatctgcaa

SEQ ID NO: 63862 - DNA, 120 bp, Artificial Sequence
  ENSG00000073756_15 (sequence is synthesized)
taacgtgaagggctgtccctttacttcattcagtgttccagatccagagctcattaaaacagtcaccatcaatgcaagttcttcccgctccggactagatgatatcaatcccacagtact

SEQ ID NO: 63863 - DNA, 120 bp, Artificial Sequence
  ENSG00000073756_16 (sequence is synthesized)
tcccacagtactactaaaagaacgttcgactgaactgtagaagtctaatgatcatatttatttatttatatgaaccatgtctattaatttaattatttaataatatttatattaaactcc

SEQ ID NO: 63864 - DNA, 120 bp, Artificial Sequence
  ENSG00000073756_17 (sequence is synthesized)
acatcttctgtaacagaagtcagtactcctgttgcggagaaaggagtcatacttgtgaagacttttatgtcactactctaaagattttgctgttgctgttaagtttggaaaacagttttt

SEQ ID NO: 63865 - DNA, 120 bp, Artificial Sequence
  ENSG00000073756_18 (sequence is synthesized)
gaacgaaagtaaagatgtttgaatacttaaacactgtcacaagatggcaaaatgctgaaagtttttacactgtcgatgtttccaatgcatcttccatgatgcattagaagtaactaatgt

SEQ ID NO: 63866 - DNA, 120 bp, Artificial Sequence
  ENSG00000073756_19 (sequence is synthesized)
ttgaaattttaaagtacttttggttatttttctgtcatcaaacaaaaacaggtatcagtgcattattaaatgaatatttaaattagacattaccagtaatttcatgtctactttttaaaa

SEQ ID NO: 63867 - DNA, 120 bp, Artificial Sequence
  ENSG00000073756_20 (sequence is synthesized)
tcagcaatgaaacaataatttgaaatttctaaattcatagggtagaatcacctgtaaaagcttgtttgatttcttaaagttattaaacttgtacatataccaaaaagaagctgtcttgga

SEQ ID NO: 63868 - DNA, 120 bp, Artificial Sequence
  ENSG00000073756_21 (sequence is synthesized)
tttaaatctgtaaaatcagtagaaattttactacaattgcttgttaaaatattttataagtgatgttcctttttcaccaagagtataaacctttttagtgtgactgttaaaacttccttt

SEQ ID NO: 63869 - DNA, 120 bp, Artificial Sequence
  ENSG00000073756_22 (sequence is synthesized)
taaatcaaaatgccaaatttattaaggtggtggagccactgcagtgttatcttaaaataagaatattttgttgagatattccagaatttgtttatatggctggtaacatgtaaaatctat

SEQ ID NO: 63870 - DNA, 120 bp, Artificial Sequence
  ENSG00000073756_23 (sequence is synthesized)
atcagcaaaagggtctacctttaaaataagcaataacaaagaagaaaaccaaattattgttcaaatttaggtttaaacttttgaagcaaacttttttttatccttgtgcactgcaggcct

SEQ ID NO: 63871 - DNA, 120 bp, Artificial Sequence
  ENSG00000073756_24 (sequence is synthesized)
ggtactcagattttgctatgaggttaatgaagtaccaagctgtgcttgaataatgatatgttttctcagattttctgttgtacagtttaatttagcagtccatatcacattgcaaaagta

SEQ ID NO: 63872 - DNA, 120 bp, Artificial Sequence
  ENSG00000073756_25 (sequence is synthesized)
gcaatgacctcataaaatacctcttcaaaatgcttaaattcatttcacacattaattttatctcagtcttgaagccaattcagtaggtgcattggaatcaagcctggctacctgcatgct

SEQ ID NO: 63873 - DNA, 120 bp, Artificial Sequence
  ENSG00000073756_26 (sequence is synthesized)
gttccttttcttttcttcttttagccattttgctaagagacacagtcttctcatcacttcgtttctcctattttgttttactagttttaagatcagagttcactttctttggactctgcc

SEQ ID NO: 63874 - DNA, 120 bp, Artificial Sequence
  ENSG00000073756_27 (sequence is synthesized)
tatattttcttacctgaacttttgcaagttttcaggtaaacctcagctcaggactgctatttagctcctcttaagaagattaaaagagaaaaaaaaaggcccttttaaaaatagtataca

SEQ ID NO: 63875 - DNA, 120 bp, Artificial Sequence
  ENSG00000073756_28 (sequence is synthesized)
cttattttaagtgaaaagcagagaattttatttatagctaattttagctatctgtaaccaagatggatgcaaagaggctagtgcctcagagagaactgtacggggtttgtgactggaaaa

SEQ ID NO: 63876 - DNA, 120 bp, Artificial Sequence
  ENSG00000073756_29 (sequence is synthesized)
agttacgttcccattctaattaatgccctttcttatttaaaaacaaaaccaaatgatatctaagtagttctcagcaataataataatgacgataatacttcttttccacatctcattgtc

SEQ ID NO: 63877 - DNA, 120 bp, Artificial Sequence
  ENSG00000073756_30 (sequence is synthesized)
actgacatttaatggtactgtatattacttaatttattgaagattattatttatgtcttattaggacactatggttataaactgtgtttaagcctacaatcattgatttttttttgttat

SEQ ID NO: 63878 - DNA, 120 bp, Artificial Sequence
  ENSG00000073756_31 (sequence is synthesized)
gtcacaatcagtatattttctttggggttacctctctgaatattatgtaaacaatccaaagaaatgattgtattaagatttgtgaataaatttttagaaatctgattggcatattgagat

SEQ ID NO: 63879 - DNA, 120 bp, Artificial Sequence
  ENSG00000073756_32 (sequence is synthesized)
atttaaggttgaatgtttgtccttaggataggcctatgtgctagcccacaaagaatattgtctcattagcctgaatgtgccataagactgaccttttaaaatgttttgagggatctgtgg

SEQ ID NO: 63880 - DNA, 120 bp, Artificial Sequence
  ENSG00000073756_33 (sequence is synthesized)
atgcttcgttaatttgttcagccacaatttattgagaaaatattctgtgtcaagcactgtgggttttaatatttttaaatcaaacgctgattacagataatagtatttatataaataatt

SEQ ID NO: 63881 - DNA, 120 bp, Artificial Sequence
  ENSG00000073756_34 (sequence is synthesized)
gaaaaaaattttcttttgggaagagggagaaaatgaaataaatatcattaaagataactcaggagaatcttctttacaattttacgtttagaatgtttaaggttaagaaagaaatagtca

SEQ ID NO: 63882 - DNA, 120 bp, Artificial Sequence
  ENSG00000073756_35 (sequence is synthesized)
atatgcttgtataaaacactgttcactgttttttttaaaaaaaaaacttgatttgttattaacattgatctgctgacaaaacctgggaatttgggttgtgtatgcgaatgtttcagtgcc

SEQ ID NO: 63883 - DNA, 120 bp, Artificial Sequence
  ENSG00000073756_36 (sequence is synthesized)
tcagacaaatgtgtatttaacttatgtaaaagataagtctggaaataaatgtctgtttatttttgtactatttaaaaattgacagatcttttctgaagataaactttgattgtttctata

SEQ ID NO: 63884 - DNA, 120 bp, Artificial Sequence
  ENSG00000073756_37 (sequence is synthesized)
aaagactagtcagtaactttagaatttctgccacggaaattatttttcttaaacttactaaaagagtagttagttatattgctagtaaaattattttattgatataagaagcctaacttt

SEQ ID NO: 63885 - DNA, 120 bp, Artificial Sequence
  ENSG00000073756_38 (sequence is synthesized)
gtttgaaaagtctaaacttttagtctagtctacagttgtcagacaaatagcaaattgtacccctaccttaaaaatattttcaaaaagtatctataatcttataggaataaatattttagg

SEQ ID NO: 63886 - DNA, 120 bp, Artificial Sequence
  ENSG00000073756_39 (sequence is synthesized)
cttgaatactagtgttatttttgaaatgtaaaaaggcaaattagttctaggctggtgtcccattgaattttaagcagagctcctgttgaaatgtaggtaagcatctttccagcaaataaa

SEQ ID NO: 63887 - DNA, 120 bp, Artificial Sequence
  ENSG00000073756_40 (sequence is synthesized)
gacaagcaggctaatactgataggtaaacaagaaaatgatttatataaaaccctcttccccagggaaaattagtgtgctatctttgttatgttttgagtaaatgacaagatgtggtaaat

SEQ ID NO: 63888 - DNA, 120 bp, Artificial Sequence
  ENSG00000073756_41 (sequence is synthesized)
gaaaactcacacattctatatacattaaatatgtaagcatgactgataaaatagctatcttttgatactgacaaggaagaaaacagaaatgaaggaatagcaaattttaaaaattgcatt

SEQ ID NO: 63889 - DNA, 120 bp, Artificial Sequence
  ENSG00000073792_0 (sequence is synthesized)
ggggggcggaggaggaggagagacgagggcagcggaggaggcgaggagcgccgggtaccgggccgggggagccgcgggctctcggggaagagacggatgatgaacaagctttacatcggg

SEQ ID NO: 63890 - DNA, 120 bp, Artificial Sequence
  ENSG00000073792_1 (sequence is synthesized)
aacctgagccccgccgtcaccgccgacgacctccggcagctctttggggacaggaagctgcccctggcgggacaggtcctgctgaagtccggctacgccttcgtggactaccccgaccag

SEQ ID NO: 63891 - DNA, 120 bp, Artificial Sequence
  ENSG00000073792_2 (sequence is synthesized)
aactgggccatccgcgccatcgagaccctctcgggtaaagtggaattgcatgggaaaatcatggaagttgattactcagtctctaaaaagctaaggagcaggaaaattcagattcgaaac

SEQ ID NO: 63892 - DNA, 120 bp, Artificial Sequence
  ENSG00000073792_3 (sequence is synthesized)
atccctcctcacctgcagtgggaggtgttggatggacttttggctcaatatgggacagtggagaatgtggaacaagtcaacacagacacagaaaccgccgttgtcaacgtcacatatgca

SEQ ID NO: 63893 - DNA, 120 bp, Artificial Sequence
  ENSG00000073792_4 (sequence is synthesized)
acaagagaagaagcaaaaatagccatggagaagctaagcgggcatcagtttgagaactactccttcaagatttcctacatcccggatgaagaggtgagctccccttcgccccctcagcga

SEQ ID NO: 63894 - DNA, 120 bp, Artificial Sequence
  ENSG00000073792_5 (sequence is synthesized)
gcccagcgtggggaccactcttcccgggagcaaggccacgcccctgggggcacttctcaggccagacagattgatttcccgctgcggatcctggtccccacccagtttgttggtgccatc

SEQ ID NO: 63895 - DNA, 120 bp, Artificial Sequence
  ENSG00000073792_6 (sequence is synthesized)
atcggaaaggagggcttgaccataaagaacatcactaagcagacccagtcccgggtagatatccatagaaaagagaactctggagctgcagagaagcctgtcaccatccatgccacccca

SEQ ID NO: 63896 - DNA, 120 bp, Artificial Sequence
  ENSG00000073792_7 (sequence is synthesized)
gaggggacttctgaagcatgccgcatgattcttgaaatcatgcagaaagaggcagatgagaccaaactagccgaagagattcctctgaaaatcttggcacacaatggcttggttggaaga

SEQ ID NO: 63897 - DNA, 120 bp, Artificial Sequence
  ENSG00000073792_8 (sequence is synthesized)
ctgattggaaaagaaggcagaaatttgaagaaaattgaacatgaaacagggaccaagataacaatctcatctttgcaggatttgagcatatacaacccggaaagaaccatcactgtgaag

SEQ ID NO: 63898 - DNA, 120 bp, Artificial Sequence
  ENSG00000073792_9 (sequence is synthesized)
ggcacagttgaggcctgtgccagtgctgagatagagattatgaagaagctgcgtgaggcctttgaaaatgatatgctggctgttaaccaacaagccaatctgatcccagggttgaacctc

SEQ ID NO: 63899 - DNA, 120 bp, Artificial Sequence
  ENSG00000073792_10 (sequence is synthesized)
agcgcacttggcatcttttcaacaggactgtccgtgctatctccaccagcagggccccgcggagctccccccgctgccccctaccaccccttcactacccactccggatacttctccagc

SEQ ID NO: 63900 - DNA, 120 bp, Artificial Sequence
  ENSG00000073792_11 (sequence is synthesized)
ctgtacccccatcaccagtttggcccgttcccgcatcatcactcttatccagagcaggagattgtgaatctcttcatcccaacccaggctgtgggcgccatcatcgggaagaagggggca

SEQ ID NO: 63901 - DNA, 120 bp, Artificial Sequence
  ENSG00000073792_12 (sequence is synthesized)
cacatcaaacagctggcgagattcgccggagcctctatcaagattgcccctgcggaaggcccagacgtcagcgaaaggatggtcatcatcaccgggccaccggaagcccagttcaaggcc

SEQ ID NO: 63902 - DNA, 120 bp, Artificial Sequence
  ENSG00000073792_13 (sequence is synthesized)
cagggacggatctttgggaaactgaaagaggaaaacttctttaaccccaaagaagaagtgaagctggaagcgcatatcagagtgccctcttccacagctggccgggtgattggcaaaggt

SEQ ID NO: 63903 - DNA, 120 bp, Artificial Sequence
  ENSG00000073792_14 (sequence is synthesized)
ggcaagaccgtgaacgaactgcagaacttaaccagtgcagaagtcatcgtgcctcgtgaccaaacgccagatgaaaatgaggaagtgatcgtcagaattatcgggcacttctttgctagc

SEQ ID NO: 63904 - DNA, 120 bp, Artificial Sequence
  ENSG00000073792_15 (sequence is synthesized)
gcaagtgaggctcccacaggcaccagcaaaacaacggatgaatgtagcccttccaacacctgacagaatgagaccaaacgcagccagccagatcgggagcaaaccaaagaccatctgagg

SEQ ID NO: 63905 - DNA, 120 bp, Artificial Sequence
  ENSG00000073792_16 (sequence is synthesized)
aatgagaagtctgcggaggcggccagggactctgccgaggccctgagaaccccaggggccgaggaggggcggggaaggtcagccaggtttgccagaaccaccgagccccgcctcccgccc

SEQ ID NO: 63906 - DNA, 120 bp, Artificial Sequence
  ENSG00000073792_17 (sequence is synthesized)
cccagggcttctgcaggcttcagccatccacttcaccatccactcggatctctcctgaactcccacgacgctatcccttttagttgaactaacataggtgaacgtgttcaaagccaagca

SEQ ID NO: 63907 - DNA, 120 bp, Artificial Sequence
  ENSG00000073792_18 (sequence is synthesized)
aaatgcacaccctttttctgtggcaaatcgtctctgtacatgtgtgtacatattagaaagggaagatgttaagatatgtggcctgtgggttacacagggtgcctgcagcggtaatatatt

SEQ ID NO: 63908 - DNA, 120 bp, Artificial Sequence
  ENSG00000073792_19 (sequence is synthesized)
ttagaaataatatatcaaataactcaactaactccaatttttaatcaattattaatttttttttctttttaaagagaaagcaggcttttctagactttaaagaataaagtctttgggagg

SEQ ID NO: 63909 - DNA, 120 bp, Artificial Sequence
  ENSG00000073792_20 (sequence is synthesized)
tctcacggtgtagagaggagctttgaggccacccgcacaaaattcacccagagggaaatctcgtcggaaggacactcacggcagttctggatcacctgtgtatgtcaacagaagggatac

SEQ ID NO: 63910 - DNA, 120 bp, Artificial Sequence
  ENSG00000073792_21 (sequence is synthesized)
cgtctccttgaagaggaaactctgtcactcctcatgcctgtctagctcatacacccatttctctttgcttcacaggttttaaactggttttttgcatactgctatataattctctgtctc

SEQ ID NO: 63911 - DNA, 120 bp, Artificial Sequence
  ENSG00000073792_22 (sequence is synthesized)
tctctgtttatctctcccctccctcccctccccttcttctccatctccattcttttgaatttcctcatccctccatctcaatcccgtatctacgcacccccccccccccaggcaaagcag

SEQ ID NO: 63912 - DNA, 120 bp, Artificial Sequence
  ENSG00000073792_23 (sequence is synthesized)
tgctctgagtatcacatcacacaaaaggaacaaaagcgaaacacacaaaccagcctcaacttacacttggttactcaaaagaacaagagtcaatggtacttgtcctagcgttttggaaga

SEQ ID NO: 63913 - DNA, 120 bp, Artificial Sequence
  ENSG00000073792_24 (sequence is synthesized)
ggaaaacaggaacccaccaaaccaaccaatcaaccaaacaaagaaaaaattccacaatgaaagaatgtattttgtctttttgcattttggtgtataagccatcaatattcagcaaaatga

SEQ ID NO: 63914 - DNA, 120 bp, Artificial Sequence
  ENSG00000073792_25 (sequence is synthesized)
ttcctttctttaaaaaaaaaaaatgtggaggaaagtagaaatttaccaaggttgttggcccagggcgttaaattcacagatttttttaacgagaaaaacacacagaagaagctacctcag

SEQ ID NO: 63915 - DNA, 120 bp, Artificial Sequence
  ENSG00000073792_26 (sequence is synthesized)
gtgtttttacctcagcaccttgctcttgtgtttcccttagagattttgtaaagctgatagttggagcatttttttatttttttaataaaaatgagttggaaaaaaaataagatatcaact

SEQ ID NO: 63916 - DNA, 120 bp, Artificial Sequence
  ENSG00000073792_27 (sequence is synthesized)
gccagcctggagaaggtgacagtccaagtgtgcaacagctgttctgaattgtcttccgctagccaagaacctatatggccttcttttggacaaaccttgaaaatgtttatttaaaaaaaa

SEQ ID NO: 63917 - DNA, 120 bp, Artificial Sequence
  ENSG00000073792_28 (sequence is synthesized)
aaaagatgacaaagaaaaacagagagagagaatattggagatgtcctgaattttaatagggtacgcgccattagggctttttgcgctaaaggatgaacatgtactggtttatgtggacaa

SEQ ID NO: 63918 - DNA, 120 bp, Artificial Sequence
  ENSG00000073792_29 (sequence is synthesized)
ttgcgctaaaggatgaacatgtactggtttatgtggacaagccattataccaccagactgcaatgccagtttcctctactgcaaacagtgttctgtgacaaaaaaaaaaaaaaaaaaaag

SEQ ID NO: 63919 - DNA, 120 bp, Artificial Sequence
  ENSG00000073792_30 (sequence is synthesized)
aggctaagggagagatagctaatgaccggtattgtgtactgagatcagacttcagggatgaagcagctgtatgttctcatgtcctggacactaccacgttgatggctttctaaatccagg

SEQ ID NO: 63920 - DNA, 120 bp, Artificial Sequence
  ENSG00000073792_31 (sequence is synthesized)
agacttcagggatgaagcagctgtatgttctcatgtcctggacactaccacgttgatggctttctaaatccaggagcacgtggcaaagactggtcctcactgatagtgtgtggaagatag

SEQ ID NO: 63921 - DNA, 120 bp, Artificial Sequence
  ENSG00000073792_32 (sequence is synthesized)
gagacagtggcttctttcaacaggactactaacagactaacatcaagctgggggctgtgacaagctttcatgctgagaggctaaaagttcataaagagggtactgataacctcacagcca

SEQ ID NO: 63922 - DNA, 120 bp, Artificial Sequence
  ENSG00000073792_33 (sequence is synthesized)
ggacttttggctcaatatgggacagtggagaatgtggaacaaggtaataagtgaggaagccttttgggttttggagagagatattatctgttatttcttataggttaggtcaactccagg

SEQ ID NO: 63923 - DNA, 120 bp, Artificial Sequence
  ENSG00000073792_34 (sequence is synthesized)
gagaaatagtaagttcatatttctttgaaataagcttcctagagtatatgtatttacatctatgtaagatgtatcttacatagatgtgagagatatctgtctctttctatgtatgtctat

SEQ ID NO: 63924 - DNA, 120 bp, Artificial Sequence
  ENSG00000073792_35 (sequence is synthesized)
ctcctgcaagtctcttttcaattctctgctaagctgctggtggcctgtcaggtggccacaggccctgagcatcaatccacgccaagatggaacctctccctggttcttcctggctcttta

SEQ ID NO: 63925 - DNA, 120 bp, Artificial Sequence
  ENSG00000073792_36 (sequence is synthesized)
gctaaaaatacttgccattcagctaatgaggaagtgccttaggataggtatgcagagtttttcctgacttcctaggataaaagcattaaaataatcaggaaaccaactagtaaattatga

SEQ ID NO: 63926 - DNA, 120 bp, Artificial Sequence
  ENSG00000073792_37 (sequence is synthesized)
atgataagtgcgctggacaacatcacgtgaagacattaaaattataactttgaagactgaaataaggaaaagcttatgatatagtgtttattaagaaaagcaagaataaaaaaaaaaaaa

SEQ ID NO: 63927 - DNA, 120 bp, Artificial Sequence
  ENSG00000073803_0 (sequence is synthesized)
atgacacacaccacagcgaagtctgtgcggaatcctaaaccagcccaatttacatccattcatgaatctgtgacgtcagcaagcctttgggctcctttgcggtgggctggaggattgtgt

SEQ ID NO: 63928 - DNA, 120 bp, Artificial Sequence
  ENSG00000073803_1 (sequence is synthesized)
gggtggaatccccctcccctttatttttccaattctgcaaggcttttaaaattcaccttacatcttttcaaagcaagaaaatggaacagcatgtgtaggaattcttcgttgttgttttgg

SEQ ID NO: 63929 - DNA, 120 bp, Artificial Sequence
  ENSG00000073803_2 (sequence is synthesized)
agccctctcttaagtcagaactctgtcccaaaaatcttctgagtgtcatctcaggactttggttatactcatggcacgatggccaactttcaggagcacctgagctgctcctcttctcca

SEQ ID NO: 63930 - DNA, 120 bp, Artificial Sequence
  ENSG00000073803_3 (sequence is synthesized)
cacttacccttcagtgaaagcaaaaccttcaatggactacaagatgagctcacagctatggggaaccacccttctcccaagctgctcgaggaccagcaggaaaaggggatggtacgaaca

SEQ ID NO: 63931 - DNA, 120 bp, Artificial Sequence
  ENSG00000073803_4 (sequence is synthesized)
gagctaatcgagagcgtgcacagccccgtcaccacaacagtgttgacgagcgtaagtgaggattccagggaccagtttgagaacagcgttcttcagctaagggaacacgatgaatcagag

SEQ ID NO: 63932 - DNA, 120 bp, Artificial Sequence
  ENSG00000073803_5 (sequence is synthesized)
acggcggtgtctcaggggaacagcaacacggtggacggagagagcacaagcggaactgaagacataaagattcagttcagcaggtcaggcagtggcagtggtgggtttcttgaaggacta

SEQ ID NO: 63933 - DNA, 120 bp, Artificial Sequence
  ENSG00000073803_6 (sequence is synthesized)
tttggatgcttaaggcctgtatggaatatcattgggaaggcatattccactgattacaaattgcagcagcaagatacttgggaagtgccatttgaggagatctcagagctgcagtggctg

SEQ ID NO: 63934 - DNA, 120 bp, Artificial Sequence
  ENSG00000073803_7 (sequence is synthesized)
ggtagtggagcccaaggagcggtcttcttgggcaagttccgggcggaagaggtggccatcaagaaagtgagagaacagaatgagacggatatcaagcatttgaggaagttgaagcaccct

SEQ ID NO: 63935 - DNA, 120 bp, Artificial Sequence
  ENSG00000073803_8 (sequence is synthesized)
aacatcatcgcattcaagggtgtttgtactcaggccccatgttattgtattatcatggaatactgtgcccatggacaactctacgaggtcttacgagctggcaggaagatcacacctcga

SEQ ID NO: 63936 - DNA, 120 bp, Artificial Sequence
  ENSG00000073803_9 (sequence is synthesized)
ttgctagtagactggtccacaggaattgcaagtggaatgaattatttgcacctccataaaattattcatcgtgatctcaaatcacctaatgttttagtgacccacacagatgcggtaaaa

SEQ ID NO: 63937 - DNA, 120 bp, Artificial Sequence
  ENSG00000073803_10 (sequence is synthesized)
atttcagattttggtacatctaaggaactcagtgacaaaagtaccaagatgtcatttgctggcacggtcgcatggatggcgccagaggtgatacggaatgaacctgtctctgaaaaagtt

SEQ ID NO: 63938 - DNA, 120 bp, Artificial Sequence
  ENSG00000073803_11 (sequence is synthesized)
gatatatggtcttttggagtggtgctttgggagctgctgacaggagagatcccttacaaagatgtagattcttcagccattatctggggtgttggaagcaacagcctccaccttccagtt

SEQ ID NO: 63939 - DNA, 120 bp, Artificial Sequence
  ENSG00000073803_12 (sequence is synthesized)
ccttccacttgccctgatggattcaaaatccttatgaaacagacgtggcagagtaaacctcgaaaccgaccttcttttcggcagacactcatgcatttagacattgcctctgcagatgta

SEQ ID NO: 63940 - DNA, 120 bp, Artificial Sequence
  ENSG00000073803_13 (sequence is synthesized)
cttgccaccccacaagaaacttacttcaagtctcaggctgaatggagagaagaagtgaaaaaacattttgagaagatcaaaagtgaaggaacttgtatacaccggttagatgaagaactg

SEQ ID NO: 63941 - DNA, 120 bp, Artificial Sequence
  ENSG00000073803_14 (sequence is synthesized)
attcgaaggcgcagagaagagctcaggcatgcgctggatattcgtgaacactatgagcggaagcttgagcgggcgaataatttatacatggaattgagtgccatcatgctgcagctagaa

SEQ ID NO: 63942 - DNA, 120 bp, Artificial Sequence
  ENSG00000073803_15 (sequence is synthesized)
atgcgggagaaggagctcattaagcgtgagcaagcagtggaaaagaagtatcctgggacctacaaacgacaccctgttcgtcctatcatccatcccaatgccatggagaaactcatgaaa

SEQ ID NO: 63943 - DNA, 120 bp, Artificial Sequence
  ENSG00000073803_16 (sequence is synthesized)
aggaaaggagtgcctcacaaatctgggatgcagaccaaacggccagacttgttgagatcagaagggatccccaccacagaagtggctcccactgcatcccctttgtccggaagtcccaaa

SEQ ID NO: 63944 - DNA, 120 bp, Artificial Sequence
  ENSG00000073803_17 (sequence is synthesized)
atgtccacttctagcagcaagagccgatatcgaagcaaaccacgccaccgccgagggaatagcagaggcagccatagtgactttgccgcaatcttgaaaaaccagccagcccaggaaaat

SEQ ID NO: 63945 - DNA, 120 bp, Artificial Sequence
  ENSG00000073803_18 (sequence is synthesized)
tcaccccatcccacttacctgcaccaagctcaatcccaatacccttctcttcatcaccataattctctgcagcagcaataccagcagccccctcctgccatgtcccagagtcaccatccc

SEQ ID NO: 63946 - DNA, 120 bp, Artificial Sequence
  ENSG00000073803_19 (sequence is synthesized)
agactcaatatgcacggacaggacatagcaacctgcgccaacaacctgaggtatttcggcccagcagcagccctgcggagcccactcagcaaccatgctcagagacagctgcccggctcg

SEQ ID NO: 63947 - DNA, 120 bp, Artificial Sequence
  ENSG00000073803_20 (sequence is synthesized)
agccctgacctcatctccacagccatggctgcagactgctggagaagttctgagcctgacaagggccaagctggtccctggggctgttgccaggctgacgcttatgacccctgccttcag

SEQ ID NO: 63948 - DNA, 120 bp, Artificial Sequence
  ENSG00000073803_21 (sequence is synthesized)
tgcaggccagaacagtatgggtccttagacataccctctgctgagccagtggggaggagccctgacctttccaagtcaccagcacataatcctctcttggaaaacgcccagagttctgag

SEQ ID NO: 63949 - DNA, 120 bp, Artificial Sequence
  ENSG00000073803_22 (sequence is synthesized)
aaaacggaagaaaatgaattcagcggctgtaggtctgagtcatccctcggcacctctcatctcggcacccctccagcgctacctcgaaaaacaaggcctctgcagaagagtggagatgac

SEQ ID NO: 63950 - DNA, 120 bp, Artificial Sequence
  ENSG00000073803_23 (sequence is synthesized)
tcctcagaagaggaagaaggggaagtagatagtgaagttgaatttccacgaagacagaggccccatcgctgtatcagcagctgccagtcatattcaacctttagctctgagaatttctct

SEQ ID NO: 63951 - DNA, 120 bp, Artificial Sequence
  ENSG00000073803_24 (sequence is synthesized)
gtgtctgatggagaagagggaaataccagtgaccactcaaacagtcctgatgagttagctgataaacttgaagaccgcttggcagagaagctagacgacctgctgtcccagacgccagag

SEQ ID NO: 63952 - DNA, 120 bp, Artificial Sequence
  ENSG00000073803_25 (sequence is synthesized)
attcccattgacatatcctcacactcggatgggctctctgacaaggagtgtgccgtgcgccgtgtgaagactcagatgtctctgggcaagctgtgtgtggaggaacgtggctatgagaac

SEQ ID NO: 63953 - DNA, 120 bp, Artificial Sequence
  ENSG00000073803_26 (sequence is synthesized)
cccatgcagtttgaagaatcggactgtgactcttcagatggggagtgttctgatgccacagttaggaccaataaacactacagctctgctacctggtaatgaaggaatacacatcctgaa

SEQ ID NO: 63954 - DNA, 120 bp, Artificial Sequence
  ENSG00000073803_27 (sequence is synthesized)
gatctcgtgactatactggcatttcagatccaccccacccccagactcatcccactctctcccagcattttgtctgggaagagagactaccccatctttaccaccccctagaaatgagct

SEQ ID NO: 63955 - DNA, 120 bp, Artificial Sequence
  ENSG00000073803_28 (sequence is synthesized)
gcaataacaggaacatgagacttcgcaaatctctggaaaataatatccaaatgaaattaagtctcactgaacatttcaatcaagaatggcagggatctattttattgaatattctagcta

SEQ ID NO: 63956 - DNA, 120 bp, Artificial Sequence
  ENSG00000073803_29 (sequence is synthesized)
ctgtaacattgatatttatttttgtttgacattttaacactttgtactgcaaagagtgaactatatatgagatagagagacaataatttcttgcaaaaaaaaaaagagataaaagaaaga

SEQ ID NO: 63957 - DNA, 120 bp, Artificial Sequence
  ENSG00000073803_30 (sequence is synthesized)
acagaaaaaaagaaataagtggaatttaagagcaacatccttgggaatttgtggggccgggaggtattattgctgcttgaacaggggaccaggtcttttggccataagtgactaaagaag

SEQ ID NO: 63958 - DNA, 120 bp, Artificial Sequence
  ENSG00000073803_31 (sequence is synthesized)
agccagagcaagacattgaacattttagaacacaaagaacagcaaaagaaaagcaattccaggcaacttgtgaacagaccatattcacttcaaccagcttgtccaggtggcttacggaaa

SEQ ID NO: 63959 - DNA, 120 bp, Artificial Sequence
  ENSG00000073803_32 (sequence is synthesized)
tgacctagaaaagtctggtgaccagatacttgcacccaatgtcttcaagggcatgtgcttcctctaggagggaaaaacagacaaacaaacaaacaaacaaacctgtgtatgtggaagctg

SEQ ID NO: 63960 - DNA, 120 bp, Artificial Sequence
  ENSG00000073803_33 (sequence is synthesized)
gtttcatttttaaatgtttaagcagcagttggtagtgaggtttacagatagtgtcaaatcttgtttttggcaaatacgtccctttttagtgctgtcactgtcattaccttggcaaatgtg

SEQ ID NO: 63961 - DNA, 120 bp, Artificial Sequence
  ENSG00000073803_34 (sequence is synthesized)
ctaccttgacccaacgtgttgatctttcatactcaagtgccatttccttgtagctcatttcctttctgcctgctgaccacttcctgtaggaacaaaggttggggggcagtactgaggagg

SEQ ID NO: 63962 - DNA, 120 bp, Artificial Sequence
  ENSG00000073803_35 (sequence is synthesized)
agaaaagggtgagagaggaagaacatctacagtggtgttaggaaaacgaacgtggaatttataaaactccattctcaggatcactcagttcagctacgaggagaagatggaaccacccct

SEQ ID NO: 63963 - DNA, 120 bp, Artificial Sequence
  ENSG00000073803_36 (sequence is synthesized)
ctctggagccaggttgcttgtctacttgagtcatattgattcaagcaggagaacagactttgaaggcagctaggatgtatgtgtgtctatacaatgtctgagcccaaaccatccctttgt

SEQ ID NO: 63964 - DNA, 89 bp, Artificial Sequence
  ENSG00000073803_37 (sequence is synthesized)
gtgtgtctatacaatgtctgagcccaaaccatccctttgtttttattcaataactcattctatcttagaagtttgctctttttgcccag

SEQ ID NO: 63965 - DNA, 66 bp, Artificial Sequence
  ENSG00000073803_38 (sequence is synthesized)
tatcttagaagtcttaatgactggctaccactgtcagaataaaagcaaaaacaagcagcttgcaaa

SEQ ID NO: 63966 - DNA, 120 bp, Artificial Sequence
  ENSG00000073803_39 (sequence is synthesized)
accactgtcagaataaaagcaaaaacaagcagcttgcaaaaggcaactcctctcccagcacaatagcatttttgttcaatgctacttgtaaaatatcttttacttcactccaaatcaatg

SEQ ID NO: 63967 - DNA, 120 bp, Artificial Sequence
  ENSG00000073803_40 (sequence is synthesized)
atttgaacatttgtggaaagaacaagggatgctgagcagggataggaaggatttttacattgccaaaagcatgaggtcctgcctgtctccagggtcatgggctctgaaaagcattccaag

SEQ ID NO: 63968 - DNA, 120 bp, Artificial Sequence
  ENSG00000073803_41 (sequence is synthesized)
gtacttcatggtgccttggccttaaggaaaaatttttttagaattttatgtacaaataggtgttgacctagtacctgtccctgtctccaagacagattaccgtcaaacaacctctctaga

SEQ ID NO: 63969 - DNA, 120 bp, Artificial Sequence
  ENSG00000073803_42 (sequence is synthesized)
ttcactggactctttgacactgcatcatgttggacgttaggaaatacttgcacagacagctgttaaaccatttccaatgcacatgaaaatgttgccgctcctctgggttttactgattgc

SEQ ID NO: 63970 - DNA, 120 bp, Artificial Sequence
  ENSG00000073803_43 (sequence is synthesized)
atcagccaaaaaggaaaggcaggagggaatttagagttccttttgcttgtttgatccatttgtttacactttatgttgatacattgatttaaaatgtagtgtctgtgatttatagctctt

SEQ ID NO: 63971 - DNA, 120 bp, Artificial Sequence
  ENSG00000073803_44 (sequence is synthesized)
aggatgaaggaaaatgtttaatttatacaaagagcagtattgtttgcattaatttattccattttgtaaaaattctgtagctggactacatgaaagatcttaagttatggcattattatc

SEQ ID NO: 63972 - DNA, 120 bp, Artificial Sequence
  ENSG00000073803_45 (sequence is synthesized)
attgttattttattttataatattatcattctcattttctgtcgatcagaaggtgtgatttatgatgtggcacaatggttgtgtttattgctaaccaggaattattatggattttatgat

SEQ ID NO: 63973 - DNA, 120 bp, Artificial Sequence
  ENSG00000073803_46 (sequence is synthesized)
tttaatgaaggaatgaaaatggaattcccatttgggagctccctggtattgatcttagctgtgttccctaattttctgtgtacaacaatcatctgaggacgcatgttctgccctgaagcc

SEQ ID NO: 63974 - DNA, 120 bp, Artificial Sequence
  ENSG00000073803_47 (sequence is synthesized)
caatggatacattgtgattttgacttgatcatgaaagctcctgggtgggccgatgacccccaggatgtcaaatagtggatggacatatagttaaaaagctgtaaactttctaaagtttct

SEQ ID NO: 63975 - DNA, 120 bp, Artificial Sequence
  ENSG00000073803_48 (sequence is synthesized)
taggaaataaattcatgggactatattagaaataaaaagagaatgatttaatgtcctgagaggaacagacctagagggtttccgcacagggctcatggattcgtttcaagaattgacaac

SEQ ID NO: 63976 - DNA, 120 bp, Artificial Sequence
  ENSG00000073803_49 (sequence is synthesized)
atagtttgcaatctccttcctgccagacccctttgttctcccacctttattctcctagtggagagtagcagggagactaaaaaaagaaatggtatacagtagtcccctcttacccatggc

SEQ ID NO: 63977 - DNA, 120 bp, Artificial Sequence
  ENSG00000073803_50 (sequence is synthesized)
ttcattttcatggtttcagttacgctcaacagcagtccaaaaatatttgatggaacattccagaaataaacaattcataaattttaattgcacagcattctgaggagcatgatgagatct

SEQ ID NO: 63978 - DNA, 120 bp, Artificial Sequence
  ENSG00000073803_51 (sequence is synthesized)
tgccccttgctgccctggaggtgatcctccctctgtccagcatattcatgctgctcatccattagtcacttagtagcagtctcggtgatcagatcgactgtctcggttatcagatgactg

SEQ ID NO: 63979 - DNA, 120 bp, Artificial Sequence
  ENSG00000073803_52 (sequence is synthesized)
tatcgcagtgcttgtgttcaagtacccctatttaattaataatagccccaaagggcaagagtgctgtgcctaatttacaaattaaattttatcatagatatgtaagtatagaaaaaaaaa

SEQ ID NO: 63980 - DNA, 90 bp, Artificial Sequence
  ENSG00000073803_53 (sequence is synthesized)
cagaaataagggaggactaccgtatatacatgtagggcatgacataaaatgcctaactgtgatgtcatcctagaacaagactaaagaact

SEQ ID NO: 63981 - DNA, 120 bp, Artificial Sequence
  ENSG00000073803_54 (sequence is synthesized)
gcctaactgtgatgtcatcctagaacaagactaaagaactttaagaaggaggcctggtcacttagaggaccaacgactggaaaaaaattcttgaaaggctatattttccatcctcttgac

SEQ ID NO: 63982 - DNA, 120 bp, Artificial Sequence
  ENSG00000073803_55 (sequence is synthesized)
ttcagatctcactgtactgtaaatctctctggttcattattccttggaacagagatgctacaactctatgtcttctttctatccaacataaaacactggcagttttgtccaattcttgcc

SEQ ID NO: 63983 - DNA, 120 bp, Artificial Sequence
  ENSG00000073803_56 (sequence is synthesized)
cacctttagtggcaacagagaaacatgagggtcagcttttatcttacatctttcagtgatggtcttcctagaaaacctacccctgatacctcgtaattttgatcagttttttttgaattc

SEQ ID NO: 63984 - DNA, 120 bp, Artificial Sequence
  ENSG00000073803_57 (sequence is synthesized)
tcatcttgattatctgttatgctattgtcatcatacaccttatgtggattaactgttatgagtatgttagggtagtacgtagtggctgaatctcagtcattcattgtatagtcgagagtt

SEQ ID NO: 63985 - DNA, 120 bp, Artificial Sequence
  ENSG00000073803_58 (sequence is synthesized)
gaataaagtccatattgaacacatttttttaagtagaattgactagaggtttcagaggagaataaggtccttagtggaggttaaaaagggaaataccttctctagcccagcctggtcctt

SEQ ID NO: 63986 - DNA, 120 bp, Artificial Sequence
  ENSG00000073803_59 (sequence is synthesized)
cgctgcctgccttgtgataaccgggaaaatcttgaattgatgtatgtttctttgagaacgactccacagtcatctgaagagtgttgaatcaagagctcagggaagttatgagctaattct

SEQ ID NO: 63987 - DNA, 120 bp, Artificial Sequence
  ENSG00000073803_60 (sequence is synthesized)
tcagtcctgacaagtgtgttacaacagtgcttccaggaacctcacaagactgtgatttcaagctgcttcattgatggaaagtttcaccatcttgggatgaatgtccatgttccgttagcg

SEQ ID NO: 63988 - DNA, 120 bp, Artificial Sequence
  ENSG00000073803_61 (sequence is synthesized)
tctgtttttaactgactgcaagatgatgagttttaatttgggttgcagatgagcatttggttctgattttcatctatttcaagatcatatcctctggataacagttccttttaaaattgc

SEQ ID NO: 63989 - DNA, 120 bp, Artificial Sequence
  ENSG00000073803_62 (sequence is synthesized)
tttgcagaggggctgagaagcctgcatctactttgaaattataatggaccttaccaccacttaagtttagacctgtttgcaagatggtggggagctcctactgagaaagatgaagatgct

SEQ ID NO: 63990 - DNA, 120 bp, Artificial Sequence
  ENSG00000073803_63 (sequence is synthesized)
agctctattgtaaactggcgtcttcatctagctacttgaagttgagatactatattttaaaatgttggcatcaaacaaatctatccttctagaagtaaagacattttgagtaggatttag

SEQ ID NO: 63991 - DNA, 120 bp, Artificial Sequence
  ENSG00000073803_64 (sequence is synthesized)
taagtactggacatctcctgtagagcttcatcatgctaaattattcccctctccttttctaaataatagatgtgcttgggtttgggatttacctggcaccaacccagactttttttgggg

SEQ ID NO: 63992 - DNA, 120 bp, Artificial Sequence
  ENSG00000073803_65 (sequence is synthesized)
tttgggatttacctggcaccaacccagactttttttgggggggggtgagggcgcaggatctcactctgtcaccaggttggagtacagtggcatgattatggctcactgcagcctcaacct

SEQ ID NO: 63993 - DNA, 120 bp, Artificial Sequence
  ENSG00000073803_66 (sequence is synthesized)
gctgggaccacaggtgtgtgccaccatgcacaacaattttttttttttttttgtagagatgggcgtctccctgtgttgcccaggctggtatcgaactctgggctctagcgatcctcctgc

SEQ ID NO: 63994 - DNA, 120 bp, Artificial Sequence
  ENSG00000073803_67 (sequence is synthesized)
tttggcctcccaaagtactgggattacaaacgtgagctgccatgcccagcctccagactattttaaatgccctctcccactgtggaacattggcatcctttaagaataaatgcatccttt

SEQ ID NO: 63995 - DNA, 120 bp, Artificial Sequence
  ENSG00000073803_68 (sequence is synthesized)
ttgatcaaatgatttactctttttttcttcaatgtcctcatgtctcaatttttttttccttttcttaaaacagtcccacttgaacttcctggaactgaattctccagaacataatattta

SEQ ID NO: 63996 - DNA, 120 bp, Artificial Sequence
  ENSG00000073803_69 (sequence is synthesized)
taatccatagaattcctgccctgctctgcagtagagtgtgctatgttttgttttcccactgagccagaagccgaaatattatactaccacttaccaccatctaccacctccaagaccaag

SEQ ID NO: 63997 - DNA, 120 bp, Artificial Sequence
  ENSG00000073803_70 (sequence is synthesized)
accaacattatgtattgagcatcgtatctttcctactgagcctagacacagcctcagaacctctcaacatagcacttggagcaacaattgccgcttgattggaattgccatttgagcttg

SEQ ID NO: 63998 - DNA, 120 bp, Artificial Sequence
  ENSG00000073803_71 (sequence is synthesized)
agttagccccaatggcagaacgacaggctcgcactagtgtccacctgtggctgtcaggggcggtaccacagaaaggggaaaggccacttgcctctacccactgcccttttggacaacaat

SEQ ID NO: 63999 - DNA, 120 bp, Artificial Sequence
  ENSG00000073803_72 (sequence is synthesized)
tccaattgaaggaacaccaatcactgatggatcccattccaaaatgtctcttcattcacatcatttaattctgttgaatgaatatgttcctccctcaccttttataaacagaaaattaat

SEQ ID NO: 64000 - DNA, 120 bp, Artificial Sequence
  ENSG00000073803_73 (sequence is synthesized)
ataagtcccagttacttgcttcttagactctgtgagactcatgtaccaaaacaatgtgacattcttttcgagactttgacttgtacggtcagtatgaatttagtgcctttccaggcagca

SEQ ID NO: 64001 - DNA, 120 bp, Artificial Sequence
  ENSG00000073803_74 (sequence is synthesized)
aaatgtttcttctttgctgatttcataggacaaatatcctagcatactcacaccaccagtgtcccaccctcacagactggcacattagaatcatattaatctgcttgtttgcatgttaca

SEQ ID NO: 64002 - DNA, 120 bp, Artificial Sequence
  ENSG00000073803_75 (sequence is synthesized)
actgatactgcaaaagcctattcaagtcggactgaactaggctaagcagaggacccttgtggaacctggagcatttctcagggacaggtggctaaagaggggagctctaaaatcactgct

SEQ ID NO: 64003 - DNA, 120 bp, Artificial Sequence
  ENSG00000073803_76 (sequence is synthesized)
ctgagaaacaggaggtgggttaaggcttttgttaactgtcatgtggccagggtacgatggcaggacttcacagagcagagccctaagcagatggcaaggccactgtaaggaagctcccgg

SEQ ID NO: 64004 - DNA, 120 bp, Artificial Sequence
  ENSG00000073803_77 (sequence is synthesized)
cagcatcccaggtctgctctccagagccacttcacagcactcagggatcgctggctcccggccctaggctgctgtccagtgaccaggtggacagggtcctccagtgactgcaggccaagg

SEQ ID NO: 64005 - DNA, 120 bp, Artificial Sequence
  ENSG00000073803_78 (sequence is synthesized)
gaaccccagccagcatgtgcaagctattaggaagatgtcccatcttgcccatatcaccccagtggctcttcaccttcagagtgaccacttcccagactctggaagtgggaagaccctctt

SEQ ID NO: 64006 - DNA, 120 bp, Artificial Sequence
  ENSG00000073803_79 (sequence is synthesized)
tgacgctttattacagtaatttgagctcctatcgacttggagcgaatgaatttctcttttgtggttaggtctccaaatgaacctccttacctggctcccctctggtctcctgtactgtca

SEQ ID NO: 64007 - DNA, 120 bp, Artificial Sequence
  ENSG00000073803_80 (sequence is synthesized)
gtccccagctcccagtgttgttttctgatgccggctccctctctgtattgaacggcaatgggaacaagaatgactatcaaagcaaacaaatgcatggaattaaacaaaaagtgtacttca

SEQ ID NO: 64008 - DNA, 120 bp, Artificial Sequence
  ENSG00000073803_81 (sequence is synthesized)
tgggtggggcggagcgtctgggatgcgctgggagcctaggatccccgacagaacactgaaatctatggactctaaaatggacttcatttaaagaaacccacggaccattaatggacaaaa

SEQ ID NO: 64009 - DNA, 120 bp, Artificial Sequence
  ENSG00000073803_82 (sequence is synthesized)
accaggtgctactaaacagatagagaactctcaatgaaacagagtaactcttagaagggcccattgtgtttgttataatagttatataactccattcattgtgacacaataaatatgata

SEQ ID NO: 64010 - DNA, 120 bp, Artificial Sequence
  ENSG00000073803_83 (sequence is synthesized)
aggtaacctgcgggcggatctgaacggggggcgagggtggcagctggagttgatggcctagatcgctcggggccctaagcgcgggtggacacagttttgcagaacactgaaatctatgga

SEQ ID NO: 64011 - DNA, 120 bp, Artificial Sequence
  ENSG00000073803_84 (sequence is synthesized)
ataacctcatcaagacttagatcttcttcagaagcttcaagtctcatctgcattaaagctctccattgaaccctctcacaaaagtacaagcttaaaggggctaaaatccattaatacatt

SEQ ID NO: 64012 - DNA, 120 bp, Artificial Sequence
  ENSG00000073803_85 (sequence is synthesized)
ccattttatatcccttcctctgacttctcttcaatttccttggcctctagggtccttcatattgcttacgttcctttagactagagccaaggagacagtgctttccaaaaaaaaaaaaaa

SEQ ID NO: 64013 - DNA, 120 bp, Artificial Sequence
  ENSG00000073803_86 (sequence is synthesized)
agtttagtctgtgaggaaactggcggctgctggtagttccatgctgtctgttcagacttcagcttggtggattagaactactgaaaagaaagtttcagcactcagcagtagttttatttt

SEQ ID NO: 64014 - DNA, 120 bp, Artificial Sequence
  ENSG00000073803_87 (sequence is synthesized)
tttttaatggaaaagaaagccgtgaggtgtatcagcaagtgtgctgctaaaacaggtcccgtgtgcacgaaatgatttctaatgtcttatgttgagtgcaagtgtttacagttagaaaat

SEQ ID NO: 64015 - DNA, 120 bp, Artificial Sequence
  ENSG00000073803_88 (sequence is synthesized)
gtggagggtgacgccatgggtggggcggagcgtctgggatgcgctgggagcctaggatccccgacagttttgcagaacactgaaatctatggactctaaaatggacttcatttaaagaaa

SEQ ID NO: 64016 - DNA, 120 bp, Artificial Sequence
  ENSG00000073803_89 (sequence is synthesized)
tcccctcggaaaccaaagcccagccatcggagattttaagatttttcaggctttccttataatcttccttacatttgtctctttaaacacatttaagtcgacctttgagaagttgctgat

SEQ ID NO: 64017 - DNA, 120 bp, Artificial Sequence
  ENSG00000073803_90 (sequence is synthesized)
agagtaacaaaccctcccacctcgctgtgttggttggtagcttccaaggccactgtaaatgtgtatcagtgtgaacctgatccagaaacagccaggaagggagcaaagtttagtttagtc

SEQ ID NO: 64018 - DNA, 120 bp, Artificial Sequence
  ENSG00000073803_91 (sequence is synthesized)
tgtgaggaaactggcggctgctggtagttccatgctgtctgttcagacttcagcttggtgtaagtagttttttttaaaaaaaactattatgacattttcatataaaaaggattgtaagaa

SEQ ID NO: 64019 - DNA, 120 bp, Artificial Sequence
  ENSG00000073803_92 (sequence is synthesized)
gttcaatgtgatgtccactaaattttggacatctaaatgtctgtgtagtataacttttattcataatgagttggtatctcagtggtaccttaggtctgtacattgacattcttgaggttt

SEQ ID NO: 64020 - DNA, 81 bp, Artificial Sequence
  ENSG00000073803_93 (sequence is synthesized)
gttgaattaacaataaggaaatgaggatgaagcggtaaaaatgttttgggttacattatactctcagaagctatgtggttt

SEQ ID NO: 64021 - DNA, 120 bp, Artificial Sequence
  ENSG00000073803_94 (sequence is synthesized)
tgttttgggttacattatactctcagaagctatgtggtttagagaaaagggcccccaaccacaaaagttagtggttcttattctgtctgcttcgtactaggtatatggtaactgagaaag

SEQ ID NO: 64022 - DNA, 120 bp, Artificial Sequence
  ENSG00000073803_95 (sequence is synthesized)
tcacttaacctctctgaaccttaacttcgtcatctataaagtgaatctaacattttccccccggcctacctcacagggttgttgtgaggatcaaatgaaataatgtacatgaaaagacat

SEQ ID NO: 64023 - DNA, 120 bp, Artificial Sequence
  ENSG00000073803_96 (sequence is synthesized)
atataaaatgtataatacagacaaagggtcctgttacacagttggaagtcattccctcagattttgggcctaggaaggtaggtgatttaaactcactgaaagcatgtaccatgtccaggt

SEQ ID NO: 64024 - DNA, 120 bp, Artificial Sequence
  ENSG00000073803_97 (sequence is synthesized)
tggatacatggcaacaaggctatgttaaattttttttctctgagttgagtccctaaaatactatcatgggctaattctaagaaggagcacgaatatatattcccctaaaattatagctta

SEQ ID NO: 64025 - DNA, 120 bp, Artificial Sequence
  ENSG00000073803_98 (sequence is synthesized)
gcattgtcaatgctttagagcagttatgggagttatagattataacatattagtgatttgtgaaacttttttactaaaatgtgaccctcatttttctttacatgaaagaacatagaatat

SEQ ID NO: 64026 - DNA, 120 bp, Artificial Sequence
  ENSG00000073803_99 (sequence is synthesized)
ttcacaatgcatcccacgtggtaagaataaaaaattgttttagttatatgtacaaatgtgtgtgtgtgaacgtgtgtgtacttggtcattaaataaaatgtacttttttttttcctgtga

SEQ ID NO: 64027 - DNA, 120 bp, Artificial Sequence
  ENSG00000073849_0 (sequence is synthesized)
gctcttcttccttccttctccagtcccttccactgtgcgtcttctgtcccccgttcttccccagcggacccctctttcgagactccctagtggggtccccagctcccgggcgatcctgcc

SEQ ID NO: 64028 - DNA, 120 bp, Artificial Sequence
  ENSG00000073849_1 (sequence is synthesized)
cttgccgagcgcgttttctggagtcacctgggggaggggagtcctgggcagggccgggctggggaagacgcctggggcactgcccggcgttaacaaagggagccgataccgaccggcgtg

SEQ ID NO: 64029 - DNA, 120 bp, Artificial Sequence
  ENSG00000073849_2 (sequence is synthesized)
ggcgcggagcgggcggccgccaccgagcgtgctgagcaaccgcagcctccgcggccgagagtgcagcgagcaaggggagagccagttgcgcagagccctgcaaccagcagtccagggaga

SEQ ID NO: 64030 - DNA, 120 bp, Artificial Sequence
  ENSG00000073849_3 (sequence is synthesized)
agtggtgaatgtcatggagcccagctgaaatggactggcccccttgagcctgtcccaagccctggtgccaggtgtccatccccgtgctgagatgagttttgatcatcctgagaaaaatgg

SEQ ID NO: 64031 - DNA, 120 bp, Artificial Sequence
  ENSG00000073849_4 (sequence is synthesized)
gccttggcctgcagacccaataaaccttccctcccatggataatagtgctaattcctgaggacctgaagggcctgccgcccctgggggattagccagaagcaggcttgttttcctgctca

SEQ ID NO: 64032 - DNA, 120 bp, Artificial Sequence
  ENSG00000073849_5 (sequence is synthesized)
gaacaaagtgacttccctgaacacatcttcattatgattcacaccaacctgaagaaaaagttcagctgctgcgtcctggtctttcttctgtttgcagtcatctgtgtgtggaaggaaaag

SEQ ID NO: 64033 - DNA, 120 bp, Artificial Sequence
  ENSG00000073849_6 (sequence is synthesized)
aagaaagggagttactatgattcctttaaattgcaaaccaaggaattccaggtgttaaagagtctggggaaattggccatggggtctgattcccagtctgtatcctcaagcagcacccag

SEQ ID NO: 64034 - DNA, 120 bp, Artificial Sequence
  ENSG00000073849_7 (sequence is synthesized)
gacccccacaggggccgccagaccctcggcagtctcagaggcctagccaaggccaaaccagaggcctccttccaggtgtggaacaaggacagctcttccaaaaaccttatccctaggctg

SEQ ID NO: 64035 - DNA, 120 bp, Artificial Sequence
  ENSG00000073849_8 (sequence is synthesized)
caaaagatctggaagaattacctaagcatgaacaagtacaaagtgtcctacaaggggccaggaccaggcatcaagttcagtgcagaggccctgcgctgccacctccgggaccatgtgaat

SEQ ID NO: 64036 - DNA, 120 bp, Artificial Sequence
  ENSG00000073849_9 (sequence is synthesized)
gtatccatggtagaggtcacagattttcccttcaatacctctgaatgggagggttatctgcccaaggagagcattaggaccaaggctgggccttggggcaggtgtgctgttgtgtcgtca

SEQ ID NO: 64037 - DNA, 120 bp, Artificial Sequence
  ENSG00000073849_10 (sequence is synthesized)
gcgggatctctgaagtcctcccaactaggcagagaaatcgatgatcatgacgcagtcctgaggtttaatggggcacccacagccaacttccaacaagatgtgggcacaaaaactaccatt

SEQ ID NO: 64038 - DNA, 120 bp, Artificial Sequence
  ENSG00000073849_11 (sequence is synthesized)
cgcctgatgaactctcagttggttaccacagagaagcgcttcctcaaagacagtttgtacaatgaaggaatcctaattgtatgggacccatctgtataccactcagatatcccaaagtgg

SEQ ID NO: 64039 - DNA, 120 bp, Artificial Sequence
  ENSG00000073849_12 (sequence is synthesized)
taccagaatccggattataatttctttaacaactacaagacttatcgtaagctgcaccccaatcagcccttttacatcctcaagccccagatgccttgggagctatgggacattcttcaa

SEQ ID NO: 64040 - DNA, 120 bp, Artificial Sequence
  ENSG00000073849_13 (sequence is synthesized)
gaaatctccccagaagagattcagccaaaccccccatcctctgggatgcttggtatcatcatcatgatgacgctgtgtgaccaggtggatatttatgagttcctcccatccaagcgcaag

SEQ ID NO: 64041 - DNA, 120 bp, Artificial Sequence
  ENSG00000073849_14 (sequence is synthesized)
actgacgtgtgctactactaccagaagttcttcgatagtgcctgcacgatgggtgcctaccacccgctgctctatgagaagaatttggtgaagcatctcaaccagggcacagatgaggac

SEQ ID NO: 64042 - DNA, 120 bp, Artificial Sequence
  ENSG00000073849_15 (sequence is synthesized)
atctacctgcttggaaaagccacactgcctggcttccggaccattcactgctaagcacaggctcctcactcttctccatcaggcattaaatgaatggtctcttggccaccccagcctggg

SEQ ID NO: 64043 - DNA, 120 bp, Artificial Sequence
  ENSG00000073849_16 (sequence is synthesized)
aagaacattttcctgaacaattccagcctgctccttttactctaggggcctctgtcagcaagaccatggggacttcaagagcctgtggtcaggaaatcaggtccagccttccctgtagcc

SEQ ID NO: 64044 - DNA, 120 bp, Artificial Sequence
  ENSG00000073849_17 (sequence is synthesized)
agacagtttatgagcccagagcctcctgccacacacatgcacacatatctagcattctttccagacagcatcctccccgccttccaccttggtagatgcaaggtctatctctcccatcag

SEQ ID NO: 64045 - DNA, 120 bp, Artificial Sequence
  ENSG00000073849_18 (sequence is synthesized)
ggctgccaaagctgggctttgtttttcccagcagaatgatgccattctcacaaaccaatgctctatattgcttgaagtctgcatctaaatattgatttcacgttttaaagaaattctctt

SEQ ID NO: 64046 - DNA, 120 bp, Artificial Sequence
  ENSG00000073849_19 (sequence is synthesized)
aggtggtacaggggattggaaacatgctccgcgcctccagagaaaagttgctcccgaggtccatgcccctggaacgtgttcctatcactctggctggttgggctggtccttagactgggt

SEQ ID NO: 64047 - DNA, 120 bp, Artificial Sequence
  ENSG00000073849_20 (sequence is synthesized)
gcttatgattaaagggtcttggttagcccactttccctctccatgtggagatggaaggtagagaaggatacagtgtctatcctcaagttgctacggttcagtgagagaggcagacatctg

SEQ ID NO: 64048 - DNA, 120 bp, Artificial Sequence
  ENSG00000073849_21 (sequence is synthesized)
aacaggcaggtaggattcagtgtgctcagtgcactggggatttggagagagatgggcttgctctctctgtgcacccaggagggccacgcacttaaaactgtgtttgtggatcagagaagg

SEQ ID NO: 64049 - DNA, 120 bp, Artificial Sequence
  ENSG00000073849_22 (sequence is synthesized)
ctttatagcacagggggcattcagatgagtcttagaggaagagaagaaacatggcaagcagattacatctgagccgtttgaattgtgtttttctttcttcccatgtttattttctaagat

SEQ ID NO: 64050 - DNA, 120 bp, Artificial Sequence
  ENSG00000073849_23 (sequence is synthesized)
ctacctgaacttagagactcaagatatttttttaggaaacctcctacccatgtctgaggtagcaagtgcagcctcacgacagataccaggcaatccagagccacaaaacgtgattcctcc

SEQ ID NO: 64051 - DNA, 120 bp, Artificial Sequence
  ENSG00000073849_24 (sequence is synthesized)
aggctctgcctggcctgaccctgtcctgtcagctgggtttacataccagtcccattcttccttttcaatacctacccccaaatcttctcctaaccaccatctgttttttttttttaaagc

SEQ ID NO: 64052 - DNA, 120 bp, Artificial Sequence
  ENSG00000073849_25 (sequence is synthesized)
attttttgctttaaaagcatcctgaccccaatttctttgagctcacgggccttttgctgaaggtctctcagggtgtagtggtgtggctctctggacttaacgtcactctcagaggtcaga

SEQ ID NO: 64053 - DNA, 120 bp, Artificial Sequence
  ENSG00000073849_26 (sequence is synthesized)
accttggagatcagaactgattctcaccaggtgtgagaggtgtggtagcagattgcaatgctctgcacctcttccttgcaagtgagcaacttcaggctctctgggcagaggctggcccac

SEQ ID NO: 64054 - DNA, 120 bp, Artificial Sequence
  ENSG00000073849_27 (sequence is synthesized)
tgtagtttgcagacatgctctccagatggttttactaagtcccctctccctgatagggaatcctgctggaccagcgcagccctggtgtggagaggttaaaagacttgcacaggatcacca

SEQ ID NO: 64055 - DNA, 120 bp, Artificial Sequence
  ENSG00000073849_28 (sequence is synthesized)
agtcatgctgtagagccaggattcctagacccagggctctgcactctcaaggctggccccatgtgctcaaggggatctaatgtttgggctccaaactaaccatctcggagctgggctcct

SEQ ID NO: 64056 - DNA, 120 bp, Artificial Sequence
  ENSG00000073849_29 (sequence is synthesized)
catttactgccaaaccctcagcttatgtagctagaaagggccctggagtgagaaagcctggattttcaaattgatgctcccctactgactagctgtgccactctgggcaaatgctcttcc

SEQ ID NO: 64057 - DNA, 120 bp, Artificial Sequence
  ENSG00000073849_30 (sequence is synthesized)
ttgagcctgtttccacacctgtaaagtggggatgatgatcctatctcactgcttttgtgaggattacaggaaagcacctgtcctggctctgtacctggcacgtagtaggtgctcagttca

SEQ ID NO: 64058 - DNA, 120 bp, Artificial Sequence
  ENSG00000073849_31 (sequence is synthesized)
tgctggtttccttcctgcctttagtagggacctgctctgtgctcacacctcggctgcatgcaccctgctgtgacggaggctagtgtggaagaggtcctgtcctcagggaattaactgtct

SEQ ID NO: 64059 - DNA, 120 bp, Artificial Sequence
  ENSG00000073849_32 (sequence is synthesized)
tattgggagacaacaactgtcctccttggaacacccaagaaaccatgcaaagcagtggacaacacagaacacgccctcctcctcgctgcctgcagctccaatctgattctgcttgggaat

SEQ ID NO: 64060 - DNA, 120 bp, Artificial Sequence
  ENSG00000073849_33 (sequence is synthesized)
gggcggagcacgtgggctgcttaactgctgtataggacaagccccttacccctctctgggcccatgaattcctggcttggtttatgttctgatttgacacactgattttaatcttcgaat

SEQ ID NO: 64061 - DNA, 120 bp, Artificial Sequence
  ENSG00000073849_34 (sequence is synthesized)
catgacactgagtgcagaggaggtggcattccgacagcaggacatacatgttggtgtgaagactgggacgacactgggtagaatctagtttttaattattattaatataaaggatcaaat

SEQ ID NO: 64062 - DNA, 120 bp, Artificial Sequence
  ENSG00000073849_35 (sequence is synthesized)
taatttaaatatgattctgaagtctacagaacttttagttctgtgctgtctatgtggacactttggtaaaatgcaaattatgatatggacgttatcattggtctggtgagatgtttcata

SEQ ID NO: 64063 - DNA, 120 bp, Artificial Sequence
  ENSG00000073849_36 (sequence is synthesized)
tttgtgacagttaatttaaaaattatgagttaatgctgcctgtgtctatggggttctgtcttctttgatagccatctattcatctggatcatgggaccctctctaatccttccaccaatc

SEQ ID NO: 64064 - DNA, 120 bp, Artificial Sequence
  ENSG00000073849_37 (sequence is synthesized)
aaataagctattgctattggtttggagttgagatatcagtctcggaaacttctgaaaaatgctaataattacccaaggattatgtcaaattttaaaataaatgtgtgtgtgtttctttaa

SEQ ID NO: 64065 - DNA, 120 bp, Artificial Sequence
  ENSG00000073849_38 (sequence is synthesized)
aactttctgatagcttaataggaggaggttcctgtagggcggcacaaccagggagggcgtggaagctctgcatcccttctcccataccttgctctacacatctcttcatctgtatcctct

SEQ ID NO: 64066 - DNA, 120 bp, Artificial Sequence
  ENSG00000073849_39 (sequence is synthesized)
ttcatggcccacaaaggagagagaagacctccgatctcttgtgccatgctcactatgctatgtgaaatttgctatgttagaccttgacatcctggatggtggggatgatgactggtttct

SEQ ID NO: 64067 - DNA, 120 bp, Artificial Sequence
  ENSG00000073849_40 (sequence is synthesized)
ctgcacagccctgggcccagtatcctgcccagcccttaggagtcctcatggaatgagctcagctcccgcgatgctcctgtttgtccactgaggcaaggggagagccagttgcgcagagcc

SEQ ID NO: 64068 - DNA, 120 bp, Artificial Sequence
  ENSG00000073849_41 (sequence is synthesized)
tcaggaaagaaggagcagttagttgtttctggttcagtcaaaccatctgcttcagcctcagcccgttgggaggcaaggtcaattggtggccaaagaggcttctgctttgtcagagcaggt

SEQ ID NO: 64069 - DNA, 120 bp, Artificial Sequence
  ENSG00000073849_42 (sequence is synthesized)
ctttggaatcttgatgggagttgtattttctcagttgctggtgaaatttgaattcccaagggaatacatttatcctccaggtaagactgcaccggattcaggtgaatgcttaagtatacc

SEQ ID NO: 64070 - DNA, 120 bp, Artificial Sequence
  ENSG00000073849_43 (sequence is synthesized)
tcctctgctctgcaagggagctcttgggaaacacacacacacgcacacacacacgcgcgtgccacgctctctctctttcaacccaagggtgacagagtgaaacattatgcagagaggtta

SEQ ID NO: 64071 - DNA, 120 bp, Artificial Sequence
  ENSG00000073849_44 (sequence is synthesized)
gcaaaggcaagaaggcaacgacgttccatctgtggaaggacctaccaaccagggaaccattggaggataaactgagaaatggcccagttccatttgcctcttacagagatcattccgtcg

SEQ ID NO: 64072 - DNA, 120 bp, Artificial Sequence
  ENSG00000073849_45 (sequence is synthesized)
gtaatcatgtccccactctgccacatgacttctcagatctacacagaacacaaattgggctttttcaagtatttatcaaaacaaaaattatggtcactttcaggacataggaagaggtga

SEQ ID NO: 64073 - DNA, 120 bp, Artificial Sequence
  ENSG00000073849_46 (sequence is synthesized)
aaatagagccaattccctgtgtgctcctttccccttttccctgcatagggttctctcatctgtagagttacggcaacctgtgagagattcatagtaatcacctacagtgtggcatttttc

SEQ ID NO: 64074 - DNA, 120 bp, Artificial Sequence
  ENSG00000073849_47 (sequence is synthesized)
atttgaattttttcttaggatagattcctaaacatggaagtattgagtcaaagagtataaatgtgctttaaaaaaaatgctcttaatacattttgcagaattcttcaagcaaggttgtca

SEQ ID NO: 64075 - DNA, 120 bp, Artificial Sequence
  ENSG00000073849_48 (sequence is synthesized)
cactcatgtttaaggcaggtataactacccatgtgcaggccagcccaggagccagtgtggtggggagaggccataaccagccattgctggttccctcagccagcagaggcacacatgagc

SEQ ID NO: 64076 - DNA, 120 bp, Artificial Sequence
  ENSG00000073849_49 (sequence is synthesized)
ttctcaccagcccggtgagggtctcctgttgggaggtgtgcatttttgcatgcactctggcctctgcacacaaactgaatatttcatctggtgctcaaccacaagcacagccatctgttc

SEQ ID NO: 64077 - DNA, 120 bp, Artificial Sequence
  ENSG00000073849_50 (sequence is synthesized)
cgtgttggaacagatgtgttggactgtgttggctgtgttggactgtgttggctgtgttggacttcgtgagagagcctatgtcagtctccatcaggatgtgtatgtagtgtactggactct

SEQ ID NO: 64078 - DNA, 120 bp, Artificial Sequence
  ENSG00000073849_51 (sequence is synthesized)
ctaggtgattgaaaggattccagagataattttgattatatgagtccctgacttcagactccactcttgtgaccaccacacaagctgtgactccaggaggctgggatgccgtgctatttt

SEQ ID NO: 64079 - DNA, 120 bp, Artificial Sequence
  ENSG00000073849_52 (sequence is synthesized)
cactgtacccttgcccccgtaatctcaaagcctgactggatggaaccctttctattctatggctagtggcttgtgataaatgtcctttcaggtcaacacagtgcaggctggtatctttac

SEQ ID NO: 64080 - DNA, 120 bp, Artificial Sequence
  ENSG00000073849_53 (sequence is synthesized)
ctttctttcaccgaagttaagtgctgcaccagaacttagaagcctcatggggctctggggcctcaggctgtaccttgtgctatgtcagctattacttcatgtcaaacatttgcatatgaa

SEQ ID NO: 64081 - DNA, 120 bp, Artificial Sequence
  ENSG00000073849_54 (sequence is synthesized)
tgttcaagcgacagcttatctctttcttcctgcagttggttaccacagagaagcgcttcctcaaagacagtttgtacaatgaaggaatcctaattgtatgggacccatctgtataccact

SEQ ID NO: 64082 - DNA, 120 bp, Artificial Sequence
  ENSG00000073849_55 (sequence is synthesized)
cagatatcccaaagatggggaaattgaaatgtggagaatgaaagtcccccattccaggacttgatttactaagcagaaggcgcagatctgcaacagcagctctttccggggaaggagaca

SEQ ID NO: 64083 - DNA, 120 bp, Artificial Sequence
  ENSG00000073849_56 (sequence is synthesized)
tgagtggcaggcctgctggattctaacctctctggaatagtcctctcactgttaatgcatgtcagttgacctctccctgatgcaggctgctgtggcctcaggagcatggcctgagaaggg

SEQ ID NO: 64084 - DNA, 120 bp, Artificial Sequence
  ENSG00000073849_57 (sequence is synthesized)
cagagagcactaatcttgggacacttaactcttaagttggatctaccaatgcctgacaggctctggcgacccctggcaccctcactatctgactttcaacagttttgcactgatctcact

SEQ ID NO: 64085 - DNA, 120 bp, Artificial Sequence
  ENSG00000073849_58 (sequence is synthesized)
tagaactcaaatttgcctaggtcaggacaaggactctgaacccatagatgtcctatgctctagttttctcccctttaaaaatgagagatggggccagatggtacgtggggctcttttcag

SEQ ID NO: 64086 - DNA, 120 bp, Artificial Sequence
  ENSG00000073849_59 (sequence is synthesized)
ctctgagagtgttcccggactctgatcctgaagcctgaagctgatcttgggtcgccaagctcaactctcccccaaagcacaggctataggctaggccccaccctgctatccagtgaaacc

SEQ ID NO: 64087 - DNA, 120 bp, Artificial Sequence
  ENSG00000073849_60 (sequence is synthesized)
tgcggctggaagagaaacctgtagtctgctgcaagaaaagggctgtgcctcaggagcaacacttgttgatcctttcccctccccatgtccactgatgaagatgactcctggggggagcag

SEQ ID NO: 64088 - DNA, 120 bp, Artificial Sequence
  ENSG00000073849_61 (sequence is synthesized)
gtcccaggaggatggttgcaaggggagagccagttgcgcagagccctgcaaccagcagtccagggagaagtggtgaatgtcatggagcccagctgaaatggactggcccccttgagcctg

SEQ ID NO: 64089 - DNA, 120 bp, Artificial Sequence
  ENSG00000073849_62 (sequence is synthesized)
cgctgctaccaataatcaaaagcctacaattgacctttgaaaagacttgaagcatagatctgcacatcatttccaggttctgaaattctgttgtttttcctgattagtggaggactctat

SEQ ID NO: 64090 - DNA, 120 bp, Artificial Sequence
  ENSG00000073849_63 (sequence is synthesized)
ataagccactccacaggagaaatgacttcattttttcaacaaatatatgccgtggaaaagaagaagtaagggagcgaggaactcttctagataagagagaattgaaaatggcacatcatc

SEQ ID NO: 64091 - DNA, 120 bp, Artificial Sequence
  ENSG00000073849_64 (sequence is synthesized)
actcagtccaggcctctatcatgcctggcacatagtgttgaatattgtattcaataaatattcaacagtaaatatttgttgaatacagtattaaatactatagaatttagacaggtccct

SEQ ID NO: 64092 - DNA, 120 bp, Artificial Sequence
  ENSG00000073849_65 (sequence is synthesized)
gtatcaacaacagcaacaatgaccaccaccaccaccaccaccaccacaacaaaataacaagaatgtccaatgtagggggttgctttttgatccacttgcctttggctagtggtgtctttc

SEQ ID NO: 64093 - DNA, 120 bp, Artificial Sequence
  ENSG00000073849_66 (sequence is synthesized)
tctccttagcgccatattcttcagcacttttcggcagctgtatgtggttctattttggtctcctctttactgcacggcgattatgttttcaagaggcaaatcttcagggtgactagagtg

SEQ ID NO: 64094 - DNA, 120 bp, Artificial Sequence
  ENSG00000073849_67 (sequence is synthesized)
acacgttatctgagttctggatggaggtaaaggaatatcacggtggtacttaagctccaagaacttacggcacacctgcttgagtggatcatgggtgagctggagaacctgaagtagcaa

SEQ ID NO: 64095 - DNA, 120 bp, Artificial Sequence
  ENSG00000073849_68 (sequence is synthesized)
tgggagcatatctaggctgccaattaagtctcttgatcttcctgagttcctgattcctcactggagaagaagacaatgattccatgacccaacctgatgatgtgtttatttaaagaaaaa

SEQ ID NO: 64096 - DNA, 120 bp, Artificial Sequence
  ENSG00000073849_69 (sequence is synthesized)
attattgactgagcagacagagagacgtgtcctcgccaacatctacaaatagctctgggctttggcaggcctggatgcaggatcttggaaaagaggagcgtgggtctgctgtttacagtg

SEQ ID NO: 64097 - DNA, 120 bp, Artificial Sequence
  ENSG00000073861_0 (sequence is synthesized)
agtgacagcggcccgctggagaggaagcccgagagctgccgcgcgcctgccggacgagggcgtagaagccaggcgtcagagcccgggctccggtggggtcccccacccggccctcgggtc

SEQ ID NO: 64098 - DNA, 120 bp, Artificial Sequence
  ENSG00000073861_1 (sequence is synthesized)
ccccgccccctgctccctgcccatcccagcccacgcgaccctctcgcgcgcggaggggcgggtcctcgacggctacgggaaggtgccagcccgccccggatgggcatcgtggagccgggt

SEQ ID NO: 64099 - DNA, 120 bp, Artificial Sequence
  ENSG00000073861_2 (sequence is synthesized)
tgcggagacatgctgacgggcaccgagccgatgccggggagcgacgagggccgggcgcctggcgccgacccgcagcaccgctacttctacccggagccgggcgcgcaggacgcggacgag

SEQ ID NO: 64100 - DNA, 120 bp, Artificial Sequence
  ENSG00000073861_3 (sequence is synthesized)
ttctacccggagccgggcgcgcaggacgcggacgagcgtcgcgggggcggcagcctggggtctccctacccggggggcgccttggtgcccgccccgccgagccgcttccttggagcctac

SEQ ID NO: 64101 - DNA, 120 bp, Artificial Sequence
  ENSG00000073861_4 (sequence is synthesized)
cggacgccgagggctaccagccgggcgagggctacgccgccccggacccgcgcgccgggctctacccggggccgcgtgaggactacgcgctacccgcgggactggaggtgtcggggaaac

SEQ ID NO: 64102 - DNA, 120 bp, Artificial Sequence
  ENSG00000073861_5 (sequence is synthesized)
cccgcgggactggaggtgtcggggaaactgagggtcgcgctcaacaaccacctgttgtggtccaagtttaatcagcaccagacagagatgatcatcaccaagcagggacggcggatgttc

SEQ ID NO: 64103 - DNA, 120 bp, Artificial Sequence
  ENSG00000073861_6 (sequence is synthesized)
ccattcctgtcatttactgtggccgggctggagcccaccagccactacaggatgtttgtggacgtggtcttggtggaccagcaccactggcggtaccagagcggcaagtgggtgcagtgt

SEQ ID NO: 64104 - DNA, 120 bp, Artificial Sequence
  ENSG00000073861_7 (sequence is synthesized)
ggaaaggccgagggcagcatgccaggaaaccgcctgtacgtccacccggactcccccaacacaggagcgcactggatgcgccaggaagtttcatttgggaaactaaagctcacaaacaac

SEQ ID NO: 64105 - DNA, 120 bp, Artificial Sequence
  ENSG00000073861_8 (sequence is synthesized)
aagggggcgtccaacaatgtgacccagatgattgtgctccagtccctccataagtaccagccccggctgcatatcgttgaggtgaacgacggagagccagaggcagcctgcaacgcttcc

SEQ ID NO: 64106 - DNA, 120 bp, Artificial Sequence
  ENSG00000073861_9 (sequence is synthesized)
aacacgcatatctttactttccaagaaacccagttcattgccgtgactgcctaccagaatgccgagattactcagctgaaaattgataataacccctttgccaaaggattccgggagaac

SEQ ID NO: 64107 - DNA, 120 bp, Artificial Sequence
  ENSG00000073861_10 (sequence is synthesized)
ttccttgggggagatcactactctcctctcctacccaaccagtatcctgttcccagccgcttctaccccgaccttcctggccaggcgaaggatgtggttccccaggcttactggctgggg

SEQ ID NO: 64108 - DNA, 120 bp, Artificial Sequence
  ENSG00000073861_11 (sequence is synthesized)
gccccccgggaccacagctatgaggctgagtttcgagcagtcagcatgaagcctgcattcttgccctctgcccctgggcccaccatgtcctactaccgaggccaggaggtcctggcacct

SEQ ID NO: 64109 - DNA, 120 bp, Artificial Sequence
  ENSG00000073861_12 (sequence is synthesized)
ggagctggctggcctgtggcaccccagtaccctcccaagatgggcccggccagctggttccgccctatgcggactctgcccatggaacccggccctggaggctcagagggacggggacca

SEQ ID NO: 64110 - DNA, 120 bp, Artificial Sequence
  ENSG00000073861_13 (sequence is synthesized)
gaggaccagggtccccccttggtgtggactgagattgcccccatccggccggaatccagtgattcaggactgggcgaaggagactctaagaggaggcgcgtgtccccctatccttccagt

SEQ ID NO: 64111 - DNA, 120 bp, Artificial Sequence
  ENSG00000073861_14 (sequence is synthesized)
ggtgacagctcctcccctgctggggccccttctccttttgataaggaagctgaaggacagttttataactattttcccaactgagcagatgacatgatgaaaggaacagaaacagtgtta

SEQ ID NO: 64112 - DNA, 120 bp, Artificial Sequence
  ENSG00000073861_15 (sequence is synthesized)
ttaggttggaggacaccgactaatttgggaaacggatgaaggactgagaaggcccccgctccctctggcccttctctgtttagtagttggttggggaagtggggctcaagaaggattttg

SEQ ID NO: 64113 - DNA, 120 bp, Artificial Sequence
  ENSG00000073861_16 (sequence is synthesized)
gggttcaccagatgcttcctggcccacgatgaaacctgagaggggtgtccccttgccccatcctctgccctaactacagtcgtttacctggtgctgcgtcttgcttttggtttccagctg

SEQ ID NO: 64114 - DNA, 120 bp, Artificial Sequence
  ENSG00000073861_17 (sequence is synthesized)
gagaaaagaagacaagaaagtcttgggcatgaaggagctttttgcatctagtgggtgggaggggtcaggtgtgggacatgggagcaggagactccactttcttcctttgtacagtaactt

SEQ ID NO: 64115 - DNA, 120 bp, Artificial Sequence
  ENSG00000073861_18 (sequence is synthesized)
tcaaccttttcgttggcatgtgtgttaatccctgatccaaaaagaacaaatacacgtatgttataaccatcagcccgccagggtcagggaaaggactcacctgactttggacagctggcc

SEQ ID NO: 64116 - DNA, 120 bp, Artificial Sequence
  ENSG00000073861_19 (sequence is synthesized)
tgggctccccctgctcaaacacagtggggatcagagaaaaggggctggaaaggggggaatggcccacatctcaagaagcaagatattgtttgtggtggttgtgtgtgggtgtgtgttttt

SEQ ID NO: 64117 - DNA, 120 bp, Artificial Sequence
  ENSG00000073861_20 (sequence is synthesized)
tctttttctttctttttattttttttgaatgggggaggctatttattgtactgagagtggtgtctggatatattccttttgtcttcatcactttctgaaaataaacataaaactgttgaa

SEQ ID NO: 64118 - DNA, 120 bp, Artificial Sequence
  ENSG00000073910_0 (sequence is synthesized)
agcctctttgtatgccgcagacatggccagccagcaggattcgggcttctttgagatcagtatcaaatatttactgaaatcctggagtaatacttctcccgttggcaacggttacatcaa

SEQ ID NO: 64119 - DNA, 120 bp, Artificial Sequence
  ENSG00000073910_1 (sequence is synthesized)
gcctccggttccacctgcttctggcacgcacagggagaaagggccgccaaccatgctacccatcaatgtggacccagacagtaaaccaggagaatatgtcctcaaaagtttatttgtcaa

SEQ ID NO: 64120 - DNA, 120 bp, Artificial Sequence
  ENSG00000073910_2 (sequence is synthesized)
cttcaccactcaggctgaacgcaagattcgtatcattatggcagagcccctggaaaagccattgacaaaatctctgcaacgtggagaagacccccaatttgatcaggtcatcagctcaat

SEQ ID NO: 64121 - DNA, 120 bp, Artificial Sequence
  ENSG00000073910_3 (sequence is synthesized)
gagctccctttctgagtactgcctgccttccattctacgtacattatttgactggtataaaaggcaaaatggcattgaggatgaatcacatgaatacagaccaagaacaagcaataaatc

SEQ ID NO: 64122 - DNA, 120 bp, Artificial Sequence
  ENSG00000073910_4 (sequence is synthesized)
aaaaagcgatgaacaacagcgagattatttaatggaaagacgggacctcgccattgattttattttttctttagtattaatagaagttttgaaacagattccacttcatcctgtaataga

SEQ ID NO: 64123 - DNA, 120 bp, Artificial Sequence
  ENSG00000073910_5 (sequence is synthesized)
cagtttaatacatgatgttattaacttggctttcaagcactttaaatacaaagaagggtaccttggtcccaacactggcaatatgcatattgtggcagacctgtatgcagaagtcattgg

SEQ ID NO: 64124 - DNA, 120 bp, Artificial Sequence
  ENSG00000073910_6 (sequence is synthesized)
agtgttggcacaagccaaattccctgctgtaaagaagaaatttatggcggagctaaaagaattacggcacaaagagcagaacccatatgtggttcaaagcattatcagcttaataatggg

SEQ ID NO: 64125 - DNA, 120 bp, Artificial Sequence
  ENSG00000073910_7 (sequence is synthesized)
catgaaattctttcgaattaagatgtatccagtggaggattttgaggcctctcttcagtttatgcaggaatgtgcacattacttcctcgaggtcaaagacaaagatatcaagcatgcctt

SEQ ID NO: 64126 - DNA, 120 bp, Artificial Sequence
  ENSG00000073910_8 (sequence is synthesized)
ggctgggctttttgttgaaatacttgttccagttgctgctgctgttaaaaatgaagtaaatgttccctgccttagaaattttgtggaaagcctgtatgacaccacgctggaactttcttc

SEQ ID NO: 64127 - DNA, 120 bp, Artificial Sequence
  ENSG00000073910_9 (sequence is synthesized)
tcgaaagaagcattccttggccttgtaccccctggtgacctgtttgctctgtgtcagtcagaagcagctgttcctgaacaggtggcacattttcctcaacaactgcttgtccaaccttaa

SEQ ID NO: 64128 - DNA, 120 bp, Artificial Sequence
  ENSG00000073910_10 (sequence is synthesized)
aaacaaagatcccaagatggctcgagttgcactggaatctctctacagattactttgggtttacatgattcgaattaaatgtgaaagcaacacagctactcagagccgacttataaccat

SEQ ID NO: 64129 - DNA, 120 bp, Artificial Sequence
  ENSG00000073910_11 (sequence is synthesized)
catcacaacacttttccccaaagggtcccgcggtgtggtaccaagggacatgcctctgaacatctttgtgaaaatcatccagttcattgcccaggaacgtttagattttgcaatgaaaga

SEQ ID NO: 64130 - DNA, 120 bp, Artificial Sequence
  ENSG00000073910_12 (sequence is synthesized)
aatcattttcgattttctttgtgtgggaaaaccagcaaaagcattcagtctcaacccagagagaatgaacattggtttacgggcattcttggtcatagctgatagcttgcagcagaaaga

SEQ ID NO: 64131 - DNA, 120 bp, Artificial Sequence
  ENSG00000073910_13 (sequence is synthesized)
tggggaacctcccatgccggttacaggagccgttcttccttcaggaaacacgttaagagtaaagaaaacatatttgagtaaaacactaactgaagaggaagccaaaatgataggcatgtc

SEQ ID NO: 64132 - DNA, 120 bp, Artificial Sequence
  ENSG00000073910_14 (sequence is synthesized)
cttatattactctcaagtacgaaaagctgtagacaacattttaaggcaccttgataaagaagtaggaaggtgtatgatgctgactaatgtacagatgttaaacaaagaaccggaagacat

SEQ ID NO: 64133 - DNA, 120 bp, Artificial Sequence
  ENSG00000073910_15 (sequence is synthesized)
gatcacgggtgagagaaagccaaaaatagatcttttcaggacctgtgttgctgctattcctcgactgcttcctgatgggatgtcaaaacttgaacttattgacttactggctaggctctc

SEQ ID NO: 64134 - DNA, 120 bp, Artificial Sequence
  ENSG00000073910_16 (sequence is synthesized)
tattcatatggatgatgaattgcgacatattgcacaaaattctcttcagggtttacttgttgacttctcagattggagggaagatgtactatttggctttaccaacttcctgctccggga

SEQ ID NO: 64135 - DNA, 120 bp, Artificial Sequence
  ENSG00000073910_17 (sequence is synthesized)
agtaaatgatatgcatcacacactccttgattcgtccctgaagttgctgctgcagctgctcacccagtggaaactagtcatccagacacaaggaaaagtctatgaacaagccaacaaaat

SEQ ID NO: 64136 - DNA, 120 bp, Artificial Sequence
  ENSG00000073910_18 (sequence is synthesized)
cagaaattcagagctcatcgcaaatggctccagtcacagaattcagtcggaacgaggtccccactgcagtgtactccacgctgtagaaggttttgctctggttttactctgcagtttcca

SEQ ID NO: 64137 - DNA, 120 bp, Artificial Sequence
  ENSG00000073910_19 (sequence is synthesized)
ggtggccacacgcaaactgtccgttttaatactcaaggaaattcgagcgttgtttattgccctggggcagcctgaggatgacgacaggccgatgattgatgtcatggatcagctaagttc

SEQ ID NO: 64138 - DNA, 120 bp, Artificial Sequence
  ENSG00000073910_20 (sequence is synthesized)
ttccattctagaaagttttattcatgtagcagtttcggattcagcaacattaccactcacccacaatgtggatctgcagtggttggtggaatggaacgcagtcctggtcaatagccatta

SEQ ID NO: 64139 - DNA, 120 bp, Artificial Sequence
  ENSG00000073910_21 (sequence is synthesized)
tgatgtgaaaagcccttcccatgtctggatatttgcacagtctgtcaaagacccctgggtcctctgcctcttcagcttcctccggcaggagaacttacccaagcactgccccacagccct

SEQ ID NO: 64140 - DNA, 120 bp, Artificial Sequence
  ENSG00000073910_22 (sequence is synthesized)
cagctatgcctggccttatgccttcactcggctccagtcggtgatgcctctggtggacccaaatagcccaattaatgccaagaaaaccagcactgccggcagcggagacaactatgttac

SEQ ID NO: 64141 - DNA, 120 bp, Artificial Sequence
  ENSG00000073910_23 (sequence is synthesized)
tttgtggagaaattacctaattctttgttttggagttgcaaaacccagtattatgagcccaggacacttaagagcttccactccagaaataatggcgaccacacctgatggtacagtgag

SEQ ID NO: 64142 - DNA, 120 bp, Artificial Sequence
  ENSG00000073910_24 (sequence is synthesized)
ctacgataacaaggccataggcaccccatcggtgggagttctgttaaagcagttggtgcctttgatgagactagagagcattgagatcacagagtccttagttttaggatttggaagaac

SEQ ID NO: 64143 - DNA, 120 bp, Artificial Sequence
  ENSG00000073910_25 (sequence is synthesized)
aaattcccttgttttcagagaattggtagaagaacttcatccattaatgaaagaagctctggaaagaagaccagagaacaagaaacgccgagaacggcgagacttgttaaggctacaact

SEQ ID NO: 64144 - DNA, 120 bp, Artificial Sequence
  ENSG00000073910_26 (sequence is synthesized)
acttcgaatttttgaacttttggctgatgctggtgtaataagtgacagcacaaatggagccctagagcgggatactttagccctgggagctttgttcttagaatatgtggacttgacccg

SEQ ID NO: 64145 - DNA, 120 bp, Artificial Sequence
  ENSG00000073910_27 (sequence is synthesized)
catgctcctagaagctgaaaatgacaaagaagttgaaattcttaaagatatccgggcacattttagtgcaatggtggccaacttgattcagtgtgttccagttcaccaccgaagatttct

SEQ ID NO: 64146 - DNA, 120 bp, Artificial Sequence
  ENSG00000073910_28 (sequence is synthesized)
cttcccccagcaaagtctgaggcaccaccttttcatcttattcagccagtgggcaggacccttcagcattatgttcactcctctggatcgttacagtgacagaaatcatcagattacaag

SEQ ID NO: 64147 - DNA, 120 bp, Artificial Sequence
  ENSG00000073910_29 (sequence is synthesized)
atatcagtattgtgcattaaaagcaatgtcagcagtactgtgctgtggccctgtctttgacaatgtgggcctttccccagatggctacctatataaatggcttgacaacattctggcttg

SEQ ID NO: 64148 - DNA, 120 bp, Artificial Sequence
  ENSG00000073910_30 (sequence is synthesized)
tcaagatttacgagttcatcaacttggctgcgaagttgttgtcttgctactggaacttaatcctgaccaaataaatctttttaactgggcaattgaccgatgctacacaggttcctacca

SEQ ID NO: 64149 - DNA, 120 bp, Artificial Sequence
  ENSG00000073910_31 (sequence is synthesized)
acttgcatctggctgcttcaaagccatagcaactgtgtgtggaagcaggaactatcccttcgacatagtgacattgttaaaccttgttctattcaaggcctctgacaccaacagagagat

SEQ ID NO: 64150 - DNA, 120 bp, Artificial Sequence
  ENSG00000073910_32 (sequence is synthesized)
ttatgaaatctccatgcagctcatgcagatccttgaagcaaagctttttgtatactcaaagaaagtcgctgagcaaagaccgggaagtattctctatggaacacacggcccgctgccacc

SEQ ID NO: 64151 - DNA, 120 bp, Artificial Sequence
  ENSG00000073910_33 (sequence is synthesized)
cctctacagcgtgtcacttgccctcttgtcatgtgagctggccaggatgtaccctgagctcacactccccctcttctcagaggtaagccagcgattccccacaacacaccccaacgggcg

SEQ ID NO: 64152 - DNA, 120 bp, Artificial Sequence
  ENSG00000073910_34 (sequence is synthesized)
ccagatcatgcttacctacctgctgccctggctgcacaacatcgagctggtggacagcaggctcctcctcccggggtcgagccccagcagcccagaggacgaagtcaaggaccgggaagg

SEQ ID NO: 64153 - DNA, 120 bp, Artificial Sequence
  ENSG00000073910_35 (sequence is synthesized)
tgacgtgactgcttctcacgggctgagaggaaatggctggggctctccagaagccacgtcactggtcctgaacaacctcatgtacatgacggccaagtatggagatgaagttcctgggcc

SEQ ID NO: 64154 - DNA, 120 bp, Artificial Sequence
  ENSG00000073910_36 (sequence is synthesized)
agaaatggaaaatgcttggaatgctttagccaacaatgagaaatggagcaacaacctgaggatcaccttgcagttcctgattagcctctgtggggtcagcagcgacacagttctcctacc

SEQ ID NO: 64155 - DNA, 120 bp, Artificial Sequence
  ENSG00000073910_37 (sequence is synthesized)
ctatattaaaaaagtggcaatatacttgtgccgtaacaacaccattcaaaccatggaagagcttctctttgagctgcagcagacagagcccgtgaaccccatcgtccagcattgtgacaa

SEQ ID NO: 64156 - DNA, 120 bp, Artificial Sequence
  ENSG00000073910_38 (sequence is synthesized)
cccgcccttctaccgcttcacggccagtagcaaggcttccgcagcagcctcaggaaccacctctagcagcaatacagtggttgctggccaggaaaatttcccagatgctgaggagaacaa

SEQ ID NO: 64157 - DNA, 120 bp, Artificial Sequence
  ENSG00000073910_39 (sequence is synthesized)
gatattgaaagaatctgatgaaaggtttagtaatgtcatcagagcccacactcgcctcgagtcaagatacagcaatagctctggaggatcctacgatgaagataaaaatgatccaatttc

SEQ ID NO: 64158 - DNA, 120 bp, Artificial Sequence
  ENSG00000073910_40 (sequence is synthesized)
tccctacacgggctggttgctgactattacagagaccaagcagccgcagcccttaccgatgccttgtactggaggatgctgggcccccctggttgactatctcccggagaccatcactcc

SEQ ID NO: 64159 - DNA, 120 bp, Artificial Sequence
  ENSG00000073910_41 (sequence is synthesized)
ccgggggccactccacaggtgcaatattgctgtaatttttatgactgaaatggtggtggatcacagtgtacgagaagactgggcgcttcatctaccattattacttcatgctgtcttctt

SEQ ID NO: 64160 - DNA, 120 bp, Artificial Sequence
  ENSG00000073910_42 (sequence is synthesized)
aggtttagaccactaccggcctgaagtctttgaacacagcaaaaaactgcttcttcacctcttgattgccctctcttgcaacagcaatttccattccattgcttccgtgctcctgcagac

SEQ ID NO: 64161 - DNA, 120 bp, Artificial Sequence
  ENSG00000073910_43 (sequence is synthesized)
ccgagagatgggtgaagctaagactctaaccgtgcagccagcctaccaacctgaatatctctatacaggtggctttgacttcctgagagaggaccagtcatccccggtgcctgactcagg

SEQ ID NO: 64162 - DNA, 120 bp, Artificial Sequence
  ENSG00000073910_44 (sequence is synthesized)
gcttagttcaagctccacctcctctagcatcagtctgggaggcagcagtggaaacctcccacagatgacccaggaggtagaagatgtggacacagctgctgaaacagatgagaaggcaaa

SEQ ID NO: 64163 - DNA, 120 bp, Artificial Sequence
  ENSG00000073910_45 (sequence is synthesized)
caagctcattgagtttctcacgaccagggcatttggtccactttggtgccatgaagacatcacacctaaaaatcaaaattcaaagagtgctgaacagctcactaattttctacgtcacgt

SEQ ID NO: 64164 - DNA, 120 bp, Artificial Sequence
  ENSG00000073910_46 (sequence is synthesized)
tgtatctgtatttaaagattccaaatcaggcttccatctggagcaccagttgagtgaagttgcattgcagacagccctcgcaagctcttcaaggcactatgctggtcggtccttccagat

SEQ ID NO: 64165 - DNA, 120 bp, Artificial Sequence
  ENSG00000073910_47 (sequence is synthesized)
attccgggccctcaagcaacctctgtcagcacatgccttatctgaccttctctcaagattggtggaggtgataggagaacatggagatgagattcagggttatgtaatggaagcgctcct

SEQ ID NO: 64166 - DNA, 120 bp, Artificial Sequence
  ENSG00000073910_48 (sequence is synthesized)
aaccttggaggcggctgtggataacttgtctgactgcttgaagaacagtgacctcctaactgtattgtcccgctcttcctcaccagatttaagctccagcagtaaactaacagcaagcag

SEQ ID NO: 64167 - DNA, 120 bp, Artificial Sequence
  ENSG00000073910_49 (sequence is synthesized)
aaagagcacaggacaactaaacatgaacccgggaaccaccagcggcaacaccgcaactgccgaacggagccggcatcaacgaagcttctctgtgcccaagaagtttggtgtcatcgaccg

SEQ ID NO: 64168 - DNA, 120 bp, Artificial Sequence
  ENSG00000073910_50 (sequence is synthesized)
atcctctgacccacctcgaagtgccacactggacagaattcaggcttgtacccaacaaggcctctcctcaaaaaccagaagctcatcctccttgaaggacagtctcacggacccatccca

SEQ ID NO: 64169 - DNA, 120 bp, Artificial Sequence
  ENSG00000073910_51 (sequence is synthesized)
cataaaccatcccaccaacctgctggccaccatattctgggtcacagtggccttgatggagtctgattttgagtttgaatacttaatggccttaaggctgttgagcagactactggcaca

SEQ ID NO: 64170 - DNA, 120 bp, Artificial Sequence
  ENSG00000073910_52 (sequence is synthesized)
tatgccactcgataaggctgagaaccgagaaaagcttgagaaactccaggcacagctgaagtgggccgacttctccgggctgcagcagctgctgctgaaaggattcacatccctcaccac

SEQ ID NO: 64171 - DNA, 120 bp, Artificial Sequence
  ENSG00000073910_53 (sequence is synthesized)
gaccctgcagctcttcagtctgctgacaccagtgtccaaaatatccatggtggatgcatcccacgctattgggtttccactgaatgtcttgtgtctcctgcctcagctgattcagcattt

SEQ ID NO: 64172 - DNA, 120 bp, Artificial Sequence
  ENSG00000073910_54 (sequence is synthesized)
tgaaaatcccaatcagttctgtaaggatatagccgaaaggattgctcaggtttgtttagaagagaagaaccccaaactttcaaatcttgcacatgtcatgactctttataaaacgcacag

SEQ ID NO: 64173 - DNA, 120 bp, Artificial Sequence
  ENSG00000073910_55 (sequence is synthesized)
ctacacgagggactgtgccacgtgggtcaatgtggtctgtcgataccttcatgaagcatatgctgacattaccttgaatatggttacctacctggcagagctgctggagaagggcctccc

SEQ ID NO: 64174 - DNA, 120 bp, Artificial Sequence
  ENSG00000073910_56 (sequence is synthesized)
tagtgtgcagcagcccctgctccaggtgatctacagtcttctcagctacatggacctttctgtcgttcctgtcaaacagttcaatgtggaagttctgaagacaattgaaaaatatgtgca

SEQ ID NO: 64175 - DNA, 120 bp, Artificial Sequence
  ENSG00000073910_57 (sequence is synthesized)
aagtgttcactggagagaagctctgaatatcttgaagctggtagtttctcggtcagccagccttgttttaccttcataccagcacagtgacctctcaaaaatagaaatacatcgagtgtg

SEQ ID NO: 64176 - DNA, 120 bp, Artificial Sequence
  ENSG00000073910_58 (sequence is synthesized)
gactagtgcttccaaggaattacctgggaaaaccctggacttccacttcgatatttcggagactccaatcatcgggaggcggtatgatgagctgcagaattcttctgggcgtgatgggaa

SEQ ID NO: 64177 - DNA, 120 bp, Artificial Sequence
  ENSG00000073910_59 (sequence is synthesized)
gcccagggccatggccgtcacccggagcacatcttccacttcctcaggctccaactccaacgtccttgttccagtgagctggaaaaggccccagtattctcagaagagaacaaaagagaa

SEQ ID NO: 64178 - DNA, 120 bp, Artificial Sequence
  ENSG00000073910_60 (sequence is synthesized)
gttggtacatgtcctttctctgtgtggccaagaagtaggattgagcaaaaatccatcagtgattttttcatcgtgtggggatctggatctgcttgagcaccagacaagcttggtatcttc

SEQ ID NO: 64179 - DNA, 120 bp, Artificial Sequence
  ENSG00000073910_61 (sequence is synthesized)
tgaggacggtgcccgagagcaggagaacatggatgacacaaacagcgagcagcagtttagagtcttcagagacttcgacttcctagatgtggagctggaggatggagagggtgagagtat

SEQ ID NO: 64180 - DNA, 120 bp, Artificial Sequence
  ENSG00000073910_62 (sequence is synthesized)
ggacaatttcaactggggagtgcgcagacgttctctggacagcctggataagtgtgatatgcagattctggaggagcgccaactgtcaggaagcactcctagcctgaataaaatgcacca

SEQ ID NO: 64181 - DNA, 120 bp, Artificial Sequence
  ENSG00000073910_63 (sequence is synthesized)
tgaggactccgatgaatcatccgaggaggaggacctcacagccagccagatcctggagcactcagacctaatcatgactctctccccctctgaagagacgaatcccatggagctgctcac

SEQ ID NO: 64182 - DNA, 120 bp, Artificial Sequence
  ENSG00000073910_64 (sequence is synthesized)
cacagcctgtgactcgacccctgcagaacctcattcctttaacaccagaatgtccagctttgatgcttccttgcctgatatgaataatctgcagatttctgagggttcaaaggctgaagc

SEQ ID NO: 64183 - DNA, 120 bp, Artificial Sequence
  ENSG00000073910_65 (sequence is synthesized)
tgttcgtgaggaggaggacaccaccgtgcatgaggatgatctttctagttccatcaatgaactcccagcagcttttgaatgcagcgacagctttagcctggacatgactgagggggaaga

SEQ ID NO: 64184 - DNA, 120 bp, Artificial Sequence
  ENSG00000073910_66 (sequence is synthesized)
aaaaggcaatcgggcactggaccagtttaccctggcgagctttggagaaggtgacaggggagtctctccccctccctcgcccttcttctcagccatccttgccgcctttcagcccgcagc

SEQ ID NO: 64185 - DNA, 120 bp, Artificial Sequence
  ENSG00000073910_67 (sequence is synthesized)
ctgtgacgatgccgaggaggcctggcgcagccacatcaaccagcttatgtgtgactcagatggctcctgtgctgtgtatacatttcatgtgttctcctccttgtttaagaatattcagaa

SEQ ID NO: 64186 - DNA, 120 bp, Artificial Sequence
  ENSG00000073910_68 (sequence is synthesized)
aaggttctgcttcctaacctgtgatgcagccagttaccttggagataacctccggggaatcggatccaaatttgtcagctcttcccagatgctcacctcctgctctgaatgtcctacact

SEQ ID NO: 64187 - DNA, 120 bp, Artificial Sequence
  ENSG00000073910_69 (sequence is synthesized)
ttttgtggatgccgagactctcctttcatgtggacttctggacaagctcaagttcagtgtgttagaactgcaagaatatttggatacctacaacaacaggaaagaggccacactctcttg

SEQ ID NO: 64188 - DNA, 120 bp, Artificial Sequence
  ENSG00000073910_70 (sequence is synthesized)
gcttgcaaattgtaaggcaacatttgcagggggatcaagagatggagtaattacctgtcaaccaggggactccgaagaaaagcaattggaactgtgtcagagattatataagctacactt

SEQ ID NO: 64189 - DNA, 120 bp, Artificial Sequence
  ENSG00000073910_71 (sequence is synthesized)
ccagctgctattgctttttcagtcctactgtaagctcatcggccaggtgcacgaagttagctccatgccagagctgctgaatatgtccagggaactgagtgacctaaagaaacacctgaa

SEQ ID NO: 64190 - DNA, 120 bp, Artificial Sequence
  ENSG00000073910_72 (sequence is synthesized)
ggaagccagtgcagtcattgcagctgaccctctctattcagacggcgcgtggtccgagcccaccttcacgtccactgaagcagccatccagtccatgctggagtgcctgaagaacaacga

SEQ ID NO: 64191 - DNA, 120 bp, Artificial Sequence
  ENSG00000073910_73 (sequence is synthesized)
actcggcaaagctttgcggcagatcagggagtgcagaagtctgtggcccaatgacatctttggaagcagttctgatgatgaggtccagacactactgaatatttatttccgtcaccaaac

SEQ ID NO: 64192 - DNA, 120 bp, Artificial Sequence
  ENSG00000073910_74 (sequence is synthesized)
tctgggacagacgggtacttatgccctggtggggtctaaccagagcctgaccgagatctgcaccaagctgatggagctgaacatggagatccgggacatgatccgcagggcccagagtta

SEQ ID NO: 64193 - DNA, 120 bp, Artificial Sequence
  ENSG00000073910_75 (sequence is synthesized)
ccgagtcctcactacttttcttccagactccagtgtttctggcactagtctctgacaggagcctcctgtccccactgggttccaaactggcagtgctgccatgctggggcaacgtcattc

SEQ ID NO: 64194 - DNA, 120 bp, Artificial Sequence
  ENSG00000073910_76 (sequence is synthesized)
agtgtcttctcggccttcaaaaggcttggacagactgttctccctcttgttacctgtagggctttttctaaagaggatggcagaacttccaacgtgtagcaatactataagaaccaaggt

SEQ ID NO: 64195 - DNA, 120 bp, Artificial Sequence
  ENSG00000073910_77 (sequence is synthesized)
agcttagaacgtcctggacagactccactcatcatgctgtgtggcacaaatgtgttacatttgaccgagcatatgcaactcgctactgaagaagtgacttccgttgcataccaaagccga

SEQ ID NO: 64196 - DNA, 120 bp, Artificial Sequence
  ENSG00000073910_78 (sequence is synthesized)
ctacactgaacagtaccttcctttctagaaacaattttagattggcaaaagtgcaatgttttcttcactcaaaaaattttatattctcaaacatgtatattctttccctgtcttgttcca

SEQ ID NO: 64197 - DNA, 120 bp, Artificial Sequence
  ENSG00000073910_79 (sequence is synthesized)
cttttcttttttcttttttctttttcctttctttcgtgggctgagaaaggggcaggcaaaatgaagctggccactgaaaactgtaagatggtcaaaagctgacagcctgtgtatgtgaaa

SEQ ID NO: 64198 - DNA, 120 bp, Artificial Sequence
  ENSG00000073910_80 (sequence is synthesized)
gaaaagggaattgtaaatggactgcaatgtaatgtacactgtaatttgaatacaattactgtatctaaaaggagctgctatgaagtacctttcttatgttgctaggctactgtttctgaa

SEQ ID NO: 64199 - DNA, 120 bp, Artificial Sequence
  ENSG00000073910_81 (sequence is synthesized)
agccctggatctctttgcaccaaaaatggtccagatagactctttttaaggatcttggctgctttttactagaaggttgcttttatgagcatatttatactgctgaaggatgagtgttaa

SEQ ID NO: 64200 - DNA, 120 bp, Artificial Sequence
  ENSG00000073910_82 (sequence is synthesized)
ttttaattaactttgccgttttgtagagaaaactattcacaagataaattccaagtcttttcacctgtcaggcatgcatattttaatatctgtttggatagtcagaagtagaatcataaa

SEQ ID NO: 64201 - DNA, 120 bp, Artificial Sequence
  ENSG00000073910_83 (sequence is synthesized)
ggtaaaatatgagttgttactttgtttcttcgatgtcatattttatgtgtaatatatatgtaaagggccattcttaagttctctccttaaacttaatgctgtcaagtgttagatgtgtgc

SEQ ID NO: 64202 - DNA, 120 bp, Artificial Sequence
  ENSG00000073910_84 (sequence is synthesized)
atgtgaacttgttgcactgcagaaacatattcagagtttatctatgtaacttattcactctgtaaatacatttaaagtttttgtgatgtaagcttaattgatattctgttcagaactttc

SEQ ID NO: 64203 - DNA, 120 bp, Artificial Sequence
  ENSG00000073910_85 (sequence is synthesized)
tttagactaaaaaaaaaaaaaaagacaaaatacacgttgaccatggactttatttctggttaatgaaaatgtttgtcctgggcacacatgaagttttgcatgtgggttgccaaagtaata

SEQ ID NO: 64204 - DNA, 120 bp, Artificial Sequence
  ENSG00000073910_86 (sequence is synthesized)
accccaaggggcacccctcgcatgtatgatctgaatggcacccgtgggggtcatgccatgcatggccctgtgaagctggaggtaagtattatctctttggaagttggcatcaaaactgtg

SEQ ID NO: 64205 - DNA, 120 bp, Artificial Sequence
  ENSG00000073910_87 (sequence is synthesized)
agcttcaaccaattctctgtaatcaaccaaagagaaaaatcagaaaaaagtgagagctctaattctccataacctataattaggttgtcatccttcaaatttggaagttaattctatagt

SEQ ID NO: 64206 - DNA, 120 bp, Artificial Sequence
  ENSG00000073910_88 (sequence is synthesized)
gagcaggaaaaagtagtagagttgtaattctgtcaccaacacctatcccccaggaacacagggagaaacatgtaacaatctcatttatgccgtctttctactcatattttacatggacca

SEQ ID NO: 64207 - DNA, 120 bp, Artificial Sequence
  ENSG00000073910_89 (sequence is synthesized)
acaaatatagcttgctttactagcatatggctactgaatcattggcagtaatattctaggagtattctatagaagagagcctaacctaggattttttttaaatcctagtagttgctacag

SEQ ID NO: 64208 - DNA, 120 bp, Artificial Sequence
  ENSG00000073910_90 (sequence is synthesized)
atgcaactactagattttaataattttctggactgctgaaaacatatttttctgatgatttatttttttcaacttgcctgaaagatgatttgctatgatttgtagaaacaactgaatcat

SEQ ID NO: 64209 - DNA, 120 bp, Artificial Sequence
  ENSG00000073910_91 (sequence is synthesized)
gatctctctgaaaaatatcataaaataaaggtttctgtggctaaccacagtagacaactttcagagagttttgttgggagccacagtagaaagaacagattcgtcatgaactgagttttc

SEQ ID NO: 64210 - DNA, 120 bp, Artificial Sequence
  ENSG00000073910_92 (sequence is synthesized)
taccatggcttcttacccagcagagaaccaccgtgatggtttactcttaaaaagggaaggaaaaaaaaaaaggatttcaacagtacattacaatccaagatattaacataggaagcagtg

SEQ ID NO: 64211 - DNA, 120 bp, Artificial Sequence
  ENSG00000073910_93 (sequence is synthesized)
gtctgtgtttttctcaattttatttttaaaaggagatgtattaatgtgaaaggtttcttctacttttcctctatctcttcacctcctctactttaagtggagatgggaaaaattgtgtag

SEQ ID NO: 64212 - DNA, 120 bp, Artificial Sequence
  ENSG00000073910_94 (sequence is synthesized)
gatgcagccccacgccagcagagcccagcaataactttagatctaccagtcaaatcttgtcggctattgctctgtgcctctgttacagaagcattaatgttaattgccttccccagggat

SEQ ID NO: 64213 - DNA, 120 bp, Artificial Sequence
  ENSG00000073910_95 (sequence is synthesized)
acaaagaagtagaagtaccaaaggaaagggtagatatttaacagatgcctcagtgataagaaagatgcctccttgtgtctcactgttttctagcactgaaacatgatacactttgtatcc

SEQ ID NO: 64214 - DNA, 120 bp, Artificial Sequence
  ENSG00000073910_96 (sequence is synthesized)
acctgcagaataaagcaatccagacaggcgctctgtaacttagacatcacttgattaaaattatagtctccaaatatagtgttttagaaaaggcactgcacatttttagaggcacgtgaa

SEQ ID NO: 64215 - DNA, 120 bp, Artificial Sequence
  ENSG00000073910_97 (sequence is synthesized)
tgtcattcccacctctaacccatctaacatcggtgagatgttaagaaaatgtgccgatgttactgtgaaataaagatgcctgtaattaattgtaggcatcacacacatgcgtgaacatcc

SEQ ID NO: 64216 - DNA, 120 bp, Artificial Sequence
  ENSG00000073910_98 (sequence is synthesized)
agagttaggtctcaaggctcttctggttctaagtcctaacaaacaatgatcttttcagtgaactgtagaattctggaaagaataagcgtacctccaggctgcttacatcaatagcttaca

SEQ ID NO: 64217 - DNA, 120 bp, Artificial Sequence
  ENSG00000073910_99 (sequence is synthesized)
cgtgcttcctgatgcctgccttaacaacaaaaaattcgtgtccataggtgagtattagggtatgttcattgtatctcaatgaaactagtttttaaagttttcaatgcatttgtttgagat

SEQ ID NO: 64218 - DNA, 120 bp, Artificial Sequence
  ENSG00000073910_100 (sequence is synthesized)
caattaatatttggatacctatcatgacccaggatatttctttgttcagcaaatatttattgcatgcccactctgggctaggcactgttttagaggacaccgcagctatcaaggcagatg

SEQ ID NO: 64219 - DNA, 120 bp, Artificial Sequence
  ENSG00000073910_101 (sequence is synthesized)
tggtccctgttcccatgaggctcctacatttgagtggaggaagatgtacttgtctacgttgggtgatgattagtgccatgaagaacaaaacggatacagtgagtaatgtggacagggcta

SEQ ID NO: 64220 - DNA, 120 bp, Artificial Sequence
  ENSG00000073910_102 (sequence is synthesized)
tcttagctatcactctaataaggtgatatctgaggagagatctgaatgaagtgaggatacaatggatatccaaggaaaagagcattccagcaaaggaaaaaacacatgcagagaccctga

SEQ ID NO: 64221 - DNA, 120 bp, Artificial Sequence
  ENSG00000073910_103 (sequence is synthesized)
aggagaagcagggtcactttgtcaaagggacagcaaggaagccaatgaccgggtgaaatgagtgaagagagcgttcagagaggacagccaaaagctctgtgggccacggcaggactttgt

SEQ ID NO: 64222 - DNA, 120 bp, Artificial Sequence
  ENSG00000073910_104 (sequence is synthesized)
cccttgctgagcaagatgggaagccactgaatgtttgcgggcagggtagtgacatgctgtgacttatgtttaaaaggattactccttcatagcgatgaagaaaagctctataacaaaagt

SEQ ID NO: 64223 - DNA, 120 bp, Artificial Sequence
  ENSG00000073910_105 (sequence is synthesized)
tccgttgtggtggttatacagcattgtgaatgtacttaatgccaatgaattgtgtactttaaaatggtaaattttatgttatatatgttttaccacaataaaaataatttttttaaagga

SEQ ID NO: 64224 - DNA, 120 bp, Artificial Sequence
  ENSG00000073910_106 (sequence is synthesized)
agggggcggcgctcccggcccatcccttagccccgcggcggccgtgtgggccggaggctgcctgcaccgcgtcagggaggccggcctagaaaccctccctcccagaagaaagccgatccc

SEQ ID NO: 64225 - DNA, 120 bp, Artificial Sequence
  ENSG00000073910_107 (sequence is synthesized)
agttcaggtggggtcttcctcggttgcgtacctggctggagccgagctggtgggcggccggcagccggcgtttctggtgatgacagccccgaaatgaaagcagcgcggccgccgcctccg

SEQ ID NO: 64226 - DNA, 120 bp, Artificial Sequence
  ENSG00000073910_108 (sequence is synthesized)
agggctgcagggagatcagcgtccagcaaataagaagcaagtcctggacccggaggaggaggagcggccgagcatctctctctgctccgccgtgtcctttagatgagcactcccggccgg

SEQ ID NO: 64227 - DNA, 120 bp, Artificial Sequence
  ENSG00000073910_109 (sequence is synthesized)
cctccccagccacgtggaaatttcattgcatctctaactgtgaagcatacagtgaccaaaacagaatgtcatgggagaggggattcagccaaaacaggagaacaagcagcatatgggtca

SEQ ID NO: 64228 - DNA, 120 bp, Artificial Sequence
  ENSG00000073910_110 (sequence is synthesized)
caacaatagaatgttagtgtgagttatttggctgagggtcctaagagaccaggccttaagagtctaggcctctgtagcaaacaggcagcctgttttctagttccttctgaaagaactcca

SEQ ID NO: 64229 - DNA, 120 bp, Artificial Sequence
  ENSG00000073910_111 (sequence is synthesized)
gcagctgagttcatagcagtgggcctagcttggtttaaggaagcaaaagggagagagagaagtggtcctgacacacatcatgcccacaggcatatcagattaaaatgaacatctcaccct

SEQ ID NO: 64230 - DNA, 120 bp, Artificial Sequence
  ENSG00000073910_112 (sequence is synthesized)
gcacctggaaaaaaggggggctcaggcaccatgtgtgatgggttgttcattcagcactcttaaaccaacaagttgggatgtttaatcagctagttcttatactatcatgctgattttaca

SEQ ID NO: 64231 - DNA, 120 bp, Artificial Sequence
  ENSG00000073910_113 (sequence is synthesized)
attatctgttgtgaaaagcaaggaaccatctgcttggaggaaacaggcagctccaggtacttccttgttgcttagtcagaggacaagtgtgatgaggactgttcacgaccaagaggaaaa

SEQ ID NO: 64232 - DNA, 120 bp, Artificial Sequence
  ENSG00000073910_114 (sequence is synthesized)
gagagccctggccaggactcacatagcaggaacaccagcatgtaggctaacattgcttctcgtttttaagtcaaagttctattccaaacacaagttttttttttctcaaatccacaatct

SEQ ID NO: 64233 - DNA, 120 bp, Artificial Sequence
  ENSG00000073910_115 (sequence is synthesized)
aaaaaacttacttaaaattattttatttttataattaaatggattttgagcatttctaaagttagactgctgtatttgttttctttctgcatgtaggtttttattggaaacataaggtag

SEQ ID NO: 64234 - DNA, 120 bp, Artificial Sequence
  ENSG00000073910_116 (sequence is synthesized)
tcataggaacaatggtggctagatgctttctgaccttcctgcgggtaaacagcctctgtcaaggaactgtagagatgggggtctggtctgggttccctcctcagagcctcctcatcacag

SEQ ID NO: 64235 - DNA, 120 bp, Artificial Sequence
  ENSG00000073910_117 (sequence is synthesized)
cacagtgaaggcactctgtgattaggcgtgtctccttaagtgttatgttctctgttagaattctgtcattctggaagcctgcagacaggtgtgtttgatgacgtttcagtggggccttca

SEQ ID NO: 64236 - DNA, 120 bp, Artificial Sequence
  ENSG00000073910_118 (sequence is synthesized)
ggagacatgcagaacttatggtcagggcatccataaacatgtgctatgaagagagtgcctcctgagattgtattcagtggccttaggttgcaaatgggctcagtggttacagtttgtgag

SEQ ID NO: 64237 - DNA, 120 bp, Artificial Sequence
  ENSG00000073910_119 (sequence is synthesized)
gacaggaacagtgtcttcctacaccgtggtattccccacaacacttaccacagggttaggtgcttaagagctggtgaagtcatcaggcaaggtggaagacagacgatgtgcaagaagtgt

SEQ ID NO: 64238 - DNA, 120 bp, Artificial Sequence
  ENSG00000073910_120 (sequence is synthesized)
gtcacagccactcagctggccacacccctgcccatctggtcacgcagcttccttaaatagctgcttctcaggcaggccttgctcaaggccagagtcaagggagcctcagagacaagagtt

SEQ ID NO: 64239 - DNA, 120 bp, Artificial Sequence
  ENSG00000073910_121 (sequence is synthesized)
tgaacacttcctctcatgagaggacttcagcccagggatttcacaaagtcagtatctgcttcacaattggtttcatgttctgatcccccatcttactaaacatgtaatctgggacaagcc

SEQ ID NO: 64240 - DNA, 120 bp, Artificial Sequence
  ENSG00000073910_122 (sequence is synthesized)
actggctctctcagaacctgtttcttcatctgtgaaatgggaatgcaaacaccagtttcaccagctgtcttaaacccaaatgagataatgcataactacaaaatgatacacaaatgaggt

SEQ ID NO: 64241 - DNA, 120 bp, Artificial Sequence
  ENSG00000073910_123 (sequence is synthesized)
ttttcataattagtactttttctttgaatgtgtgagtggtagatgcaattggaacccttttgcaactcttcttggttggaaagttatctaaagttgctaatcagaccctctgctaatgta

SEQ ID NO: 64242 - DNA, 120 bp, Artificial Sequence
  ENSG00000073910_124 (sequence is synthesized)
aattctatatactgagacactgctaaacacccattaattttaactttctcattaaaaaggatgacatagaaacccttctttgtagtcaatatagatgtattttctcaaagtgaatcatta

SEQ ID NO: 64243 - DNA, 120 bp, Artificial Sequence
  ENSG00000073910_125 (sequence is synthesized)
aacttaagggctttgtcatgtgaggcctctgaaaattgtacaatattagaaacatcaatgtctgtgtttaataaacttactggtagctttactgtgttgaatgtctccacctaattttgt

SEQ ID NO: 64244 - DNA, 120 bp, Artificial Sequence
  ENSG00000073910_126 (sequence is synthesized)
ttgtttaaaaccttgcttttggaaatttagcccttcaacttttctttaacaaaatcttggaatgaacttctgatttaaaaaaaaaaaaaaaagcttatatataatgttgtacatgagctc

SEQ ID NO: 64245 - DNA, 120 bp, Artificial Sequence
  ENSG00000073910_127 (sequence is synthesized)
accacttgaaagtaatttacttaaataatgagattaaattttaaaacctttgagtgtcaacacatttttatttaaaatttgatatatatggcctttcctgtttaaaaatactgattaaca

SEQ ID NO: 64246 - DNA, 120 bp, Artificial Sequence
  ENSG00000073910_128 (sequence is synthesized)
aaaactgagatagcctgtttactttttatttatttacaataaataaatacaataaataaaatttatttatttattggacaagtttactgaggatggagtttttggttttgttttgcttcg

SEQ ID NO: 64247 - DNA, 120 bp, Artificial Sequence
  ENSG00000073910_129 (sequence is synthesized)
ttttctaaaaaaggacggaaacacaccctttccttaggcgtcctgcgtcccccgattcctgctccctggttgccgcgtccttggctggcgtcagaaaaatggctacaaactttctagtag

SEQ ID NO: 64248 - DNA, 120 bp, Artificial Sequence
  ENSG00000073910_130 (sequence is synthesized)
gtgagaagatctggttccacaagttcaaatatggcgatgcagaaaggagattctacgaacagatgaacgggcctgtggccggcgcctccctccaggaggccagcatgatcctccatgata

SEQ ID NO: 64249 - DNA, 120 bp, Artificial Sequence
  ENSG00000073910_131 (sequence is synthesized)
ttgccagagccagagagaacatcccgaaatccctggccggaagcttaggcccaggggcgtctagcggccccagcggagaccacagcgagctcgtcgtccggatcgccagtctggaagtgg

SEQ ID NO: 64250 - DNA, 120 bp, Artificial Sequence
  ENSG00000073910_132 (sequence is synthesized)
acaaccagagagacctggctgaacgtgctggagaagagcttgcccggccactgggccacagccccgcagacccagcacatgtctcccatgcgccaagtggagcccccggccaagaagcta

SEQ ID NO: 64251 - DNA, 120 bp, Artificial Sequence
  ENSG00000073910_133 (sequence is synthesized)
gccacaccagcagaggatgacgaggacgatgacattgacctgtttggcagcgacaatgaggcaacacagctgcggcattaccaatgaggagcggctgcagcagtacgcggagaagaaggc

SEQ ID NO: 64252 - DNA, 120 bp, Artificial Sequence
  ENSG00000073910_134 (sequence is synthesized)
caagaagcccgcgctggtggccaagtcctccatcctgctggacttcaagccttgggacgatgagacggacacggcccacctggaggcctgtgtgcgcttcatccagccggacgggctggt

SEQ ID NO: 64253 - DNA, 120 bp, Artificial Sequence
  ENSG00000073910_135 (sequence is synthesized)
gcggggggcctccaagctggtgcccgtgggctacggtatctggaagctgcagattcagcgtgtggtggaggacaaggtggggacagacttgctggaggaggagatcaccaagtttgaaga

SEQ ID NO: 64254 - DNA, 120 bp, Artificial Sequence
  ENSG00000073910_136 (sequence is synthesized)
gtgtatgcagagtgtcgacatcgcagctttcaacaagatctggcctgagtgtgtgtgtgtgcccgcgtgcatgaggccctgacacaattaaaaactgagaccggcaaaaaaaaaaaaaaa

SEQ ID NO: 64255 - DNA, 120 bp, Artificial Sequence
  ENSG00000073910_137 (sequence is synthesized)
cttgttaagcttcccaaacaagtgcagggtaaagcatgagaacatcagagtctggggcggcggcggtggctgcaacggtggctgtgacggtggctgccgctgggtttggctttctggatt

SEQ ID NO: 64256 - DNA, 120 bp, Artificial Sequence
  ENSG00000073910_138 (sequence is synthesized)
tttgttcagagtcgctaatgtatcccccacaatggcagttgatgacagcaatttatattccagaacgaagaacaaactaaattcatctcaaaatgattataaatcatcaagaaggagtag

SEQ ID NO: 64257 - DNA, 120 bp, Artificial Sequence
  ENSG00000073910_139 (sequence is synthesized)
cctgccacctgaactactcataggaaatgacattagaggaagacttcaaagaaacattaagaacttggatcccattcacctgaggcacccgaagaagagaccatccatatttccagcttc

SEQ ID NO: 64258 - DNA, 120 bp, Artificial Sequence
  ENSG00000073910_140 (sequence is synthesized)
tggtatgaacagtctgccctggacggaaggcctgttttagtttgtcttctactgtaggtctttagcacctgactaaaaatacacctggggccaaaaatataagggccctgcattgtggct

SEQ ID NO: 64259 - DNA, 120 bp, Artificial Sequence
  ENSG00000073910_141 (sequence is synthesized)
gagacacttatggtggcagtgagcaacaggaccatggagcccatcattatgtgttttggctttggaacatggtctgtgtagctgttccagactgttagtttgggtttcttttcaggctca

SEQ ID NO: 64260 - DNA, 120 bp, Artificial Sequence
  ENSG00000073910_142 (sequence is synthesized)
ggcgcagcgaagtagcctccggcggtggcaactacggcggcggcgccggggcgatgctgtgggtctcgttgggcgccggtgtcctggcctcttcctcagatgaaaagattctgaagaata

SEQ ID NO: 64261 - DNA, 120 bp, Artificial Sequence
  ENSG00000073910_143 (sequence is synthesized)
gagccaattacaatttttcgtagcacaaacaaccaaagggagaacggtttctcaggagaggactcttgattcgcaggtgattttttcatcgtgtggggatctggatctgcttgagcacca

SEQ ID NO: 64262 - DNA, 120 bp, Artificial Sequence
  ENSG00000073910_144 (sequence is synthesized)
tcctggaaacgcgaatggcatttgtggaacaagataagacacaacttaacctcattttctttcatactaatgtctttcatttgatagatgccattcatcatattccttttaacattgctc

SEQ ID NO: 64263 - DNA, 120 bp, Artificial Sequence
  ENSG00000073910_145 (sequence is synthesized)
aggaaatgacattagaggaagacttcaaagaaacattaagaacttggatcccattcacctgaggcacccgaagaagagaccatccatatttccagttcattgcatctctaactgtgaagc

SEQ ID NO: 64264 - DNA, 120 bp, Artificial Sequence
  ENSG00000073910_146 (sequence is synthesized)
atacagtgaccaaaacagaatgtcatgggagaggggattcagccaaaacaggagaacaagcagcatatgggtcaaaacttcagaaagcctacatataggcatgtgaacatattttgtcct

SEQ ID NO: 64265 - DNA, 120 bp, Artificial Sequence
  ENSG00000073910_147 (sequence is synthesized)
cttacaacataggtaccaaagaagggaagaaaatacataggactggattcagaacaatatgagaaaaacaaaggccagaacttccatttctcaaagagataaagcctggatgagcaaagg

SEQ ID NO: 64266 - DNA, 120 bp, Artificial Sequence
  ENSG00000073910_148 (sequence is synthesized)
tgactgtgtttgctaacagacaacgacatcacctagggaaatgctgaatacttctcaaattaatctctggttgcatataaatattcttctgttgacgagtggattaatagaaatttattt

SEQ ID NO: 64267 - DNA, 120 bp, Artificial Sequence
  ENSG00000073910_149 (sequence is synthesized)
ctgtgatgtaatttcaattcacttcctgcagttttgctcttttctttagtgatgtttaacatacttgtcatgagagggtaatactttcttttaggttcagtacttggacaatggtaatta

SEQ ID NO: 64268 - DNA, 120 bp, Artificial Sequence
  ENSG00000073910_150 (sequence is synthesized)
gaggatgtggaaacttacctgacacagtaaagtgcattctggaatgtaaatttccctttctccatggcattctgttttcaacttaactattgcttatgtatgctgattttaccagaccct

SEQ ID NO: 64269 - DNA, 120 bp, Artificial Sequence
  ENSG00000073910_151 (sequence is synthesized)
agagttaatggggaagaatgttgtaatctcagacttagcttggacaaaaaaaaatttttcatctactgtattggttggccaaaggtttttaccttgaattttctgcatttaggttatctt

SEQ ID NO: 64270 - DNA, 120 bp, Artificial Sequence
  ENSG00000073910_152 (sequence is synthesized)
ttgtgtacttatagttcctccattatttttagaatatttggaatatcgttggttacaataaataggtctaccagtatgctggaacatgcgagagttacagacgataatagtaagaatgtt

SEQ ID NO: 64271 - DNA, 120 bp, Artificial Sequence
  ENSG00000073910_153 (sequence is synthesized)
gttttctaattgtgtagcacactagacattcatatgcattgtcttatttatcaaactaagcatatgagtcagatagtactactatttccaatttgcaaataaaaaaacctgagactctca

SEQ ID NO: 64272 - DNA, 120 bp, Artificial Sequence
  ENSG00000073910_154 (sequence is synthesized)
cgggcagcagagcccgggcgcagcgagcgcagcgcagcgcagggagcgcaggcggtggcggcaccaggttcccggggctccagcgctcggcgcagcgaagtagcctccggcggtggcaac

SEQ ID NO: 64273 - DNA, 120 bp, Artificial Sequence
  ENSG00000073910_155 (sequence is synthesized)
cagcgctcggcgcagcgaagtagcctccggcggtggcaactacggcggcggcgccggggcgatgctgtgggtctcgttgggcgccggtgtcctggcctcttcctcagaacgaagaacaaa

SEQ ID NO: 64274 - DNA, 120 bp, Artificial Sequence
  ENSG00000073921_0 (sequence is synthesized)
gccattttcctgcagctgcctgttcctcttaccctgcccggctccagctgacccgggaaggggtgggctgaactgaggcgggggcaagggagtgcccgacatcttgtccgactccgcggg

SEQ ID NO: 64275 - DNA, 120 bp, Artificial Sequence
  ENSG00000073921_1 (sequence is synthesized)
tgacacgagccggttctctctggactggtggcagcgcgcggccccgaaccgcgccccaggccggcaggcggggaaggagccggtgggggtagggggtgcggtggggggtggggaccctcc

SEQ ID NO: 64276 - DNA, 120 bp, Artificial Sequence
  ENSG00000073921_2 (sequence is synthesized)
ggctcttgggggtcccagtccccgccggctgctgagcgggtggggtggtggaggagctgcagagatgtccggccagagcctgacggaccgaatcactgccgcccagcacagtgtcaccgg

SEQ ID NO: 64277 - DNA, 120 bp, Artificial Sequence
  ENSG00000073921_3 (sequence is synthesized)
ctctgccgtatccaagacagtatgcaaggccacgacccacgagatcatggggcccaagaaaaagcacctggactacttaattcagtgcacaaatgagatgaatgtgaacatcccacagtt

SEQ ID NO: 64278 - DNA, 120 bp, Artificial Sequence
  ENSG00000073921_4 (sequence is synthesized)
ggcagacagtttatttgaaagaactactaatagtagttgggtggtggtcttcaaatctctcattacaactcatcatttgatggtgtatggaaatgagcgttttattcagtatttggcttc

SEQ ID NO: 64279 - DNA, 120 bp, Artificial Sequence
  ENSG00000073921_5 (sequence is synthesized)
aagaaacacgttgtttaacttaagcaattttttggataaaagtggattgcaaggatatgacatgtctacatttattaggcggtatagtagatatttaaatgagaaagcagtttcatacag

SEQ ID NO: 64280 - DNA, 120 bp, Artificial Sequence
  ENSG00000073921_6 (sequence is synthesized)
acaagttgcatttgatttcacaaaagtgaagagaggggctgatggagttatgagaacaatgaacacagaaaaactcctaaaaactgtaccaattattcagaatcagatggatgcacttct

SEQ ID NO: 64281 - DNA, 120 bp, Artificial Sequence
  ENSG00000073921_7 (sequence is synthesized)
tgattttaatgttaatagcaatgaacttacaaatggggtaataaatgctgccttcatgctcctgttcaaagatgccattagactgtttgcagcatacaatgaaggaattattaatttgtt

SEQ ID NO: 64282 - DNA, 120 bp, Artificial Sequence
  ENSG00000073921_8 (sequence is synthesized)
ggaaaaatattttgatatgaaaaagaaccaatgcaaagaaggtcttgacatctataagaagttcctaactaggatgacaagaatctcagagttcctcaaagttgcagagcaagttggaat

SEQ ID NO: 64283 - DNA, 120 bp, Artificial Sequence
  ENSG00000073921_9 (sequence is synthesized)
tgacagaggtgatataccagacctttcacaggcccctagcagtcttcttgatgctttggaacaacatttagcttccttggaaggaaagaaaatcaaagattctacagctgcaagcagggc

SEQ ID NO: 64284 - DNA, 120 bp, Artificial Sequence
  ENSG00000073921_10 (sequence is synthesized)
aactacactttccaatgcagtgtcttccctggcaagcactggtctatctctgaccaaagtggatgaaagggaaaagcaggcagcattagaggaagaacaggcacgtttgaaagctttaaa

SEQ ID NO: 64285 - DNA, 120 bp, Artificial Sequence
  ENSG00000073921_11 (sequence is synthesized)
ggaacagcgcctaaaagaacttgcaaagaaacctcatacctctttaacaactgcagcctctcctgtatccacctcagcaggagggataatgactgcaccagccattgacatattttctac

SEQ ID NO: 64286 - DNA, 120 bp, Artificial Sequence
  ENSG00000073921_12 (sequence is synthesized)
ccctagttcttctaacagcacatcaaagctgcccaatgatctgcttgatttgcagcagccaacttttcacccatctgtacatcctatgtcaactgcttctcaggtagcaagtacatgggg

SEQ ID NO: 64287 - DNA, 120 bp, Artificial Sequence
  ENSG00000073921_13 (sequence is synthesized)
agatcctttctctgctactgtagatgctgttgatgatgccattccaagcttaaatcctttcctcacaaaaagtagtggtgatgttcacctttccatttcttcagatgtatctacttttac

SEQ ID NO: 64288 - DNA, 120 bp, Artificial Sequence
  ENSG00000073921_14 (sequence is synthesized)
tactaggacacctactcatgaaatgtttgttggattcactccttctccagttgcacagccacacccttcagctggccttaatgttgactttgaatctgtgtttggaaataaatctacaaa

SEQ ID NO: 64289 - DNA, 120 bp, Artificial Sequence
  ENSG00000073921_15 (sequence is synthesized)
tgttattgtagattctgggggctttgatgaactaggtggacttctcaaaccaacagtggcctctcagaaccagaaccttcctgttgccaaactcccacctagcaagttagtatctgatga

SEQ ID NO: 64290 - DNA, 120 bp, Artificial Sequence
  ENSG00000073921_16 (sequence is synthesized)
cttggattcatctttagccaaccttgtgggcaatcttggcatcggaaatggaaccactaagaatgatgtaaattggagtcaaccaggtgaaaagaagttaactgggggatctaactggca

SEQ ID NO: 64291 - DNA, 120 bp, Artificial Sequence
  ENSG00000073921_17 (sequence is synthesized)
aatggcctatcctgctactacaccaacaggcatgataggatatggaattcctccacaaatgggaagtgttcctgtaatgacgcaaccaaccttaatatacagccagcctgtcatgagacc

SEQ ID NO: 64292 - DNA, 120 bp, Artificial Sequence
  ENSG00000073921_18 (sequence is synthesized)
tccaaacccctttggccctgtatcaggagcacagatacagtttatgtaacttgatggaagaaaatggaattactccaaaaagacaagtgctcaagcagcaaaatccttacttccagcaaa

SEQ ID NO: 64293 - DNA, 120 bp, Artificial Sequence
  ENSG00000073921_19 (sequence is synthesized)
atccaaactgctgtctcttaaatctcttaaactctcttcttccattagaatgctacaagtaactcagtgaaggcccatgaaggaaattgggactagtttataggagaacgtatcaataca

SEQ ID NO: 64294 - DNA, 120 bp, Artificial Sequence
  ENSG00000073921_20 (sequence is synthesized)
gtttataaagccaagaattgctatgatttaagactaagatctgtctttttggtgactaacccttcaattctttcaactcctgttaatacccataatcagtaacctatcaagaaaagccct

SEQ ID NO: 64295 - DNA, 120 bp, Artificial Sequence
  ENSG00000073921_21 (sequence is synthesized)
tatttggaaagtgtgaaatttgtatttggaaaagctgcctggagagaagaactgtgtcctttactgtatttcaacaggactcttttgggggatcaaaattaaaattcctaattatgcatt

SEQ ID NO: 64296 - DNA, 120 bp, Artificial Sequence
  ENSG00000073921_22 (sequence is synthesized)
atctttcttttctccagtcctcacaaatacagaaacaataactgaaattaacttttctttttttaaaaaaaattatattcagtttgcagtagacattccttaagtatttgtatttattta

SEQ ID NO: 64297 - DNA, 120 bp, Artificial Sequence
  ENSG00000073921_23 (sequence is synthesized)
tgattatcaattttacataacattaatattgtatcagacctccttatgaaaatgagtatggatgtgcacagtatgtttgatttttatccacaagaatgaatctgattcagaatgcttttc

SEQ ID NO: 64298 - DNA, 120 bp, Artificial Sequence
  ENSG00000073921_24 (sequence is synthesized)
tcagctgacatacagagcactaaatattttaaggcaagtccataggtctgaatctcttaagaattctcggcctctgtgggatttagggaagcattataaatgcattaatccttatagtca

SEQ ID NO: 64299 - DNA, 120 bp, Artificial Sequence
  ENSG00000073921_25 (sequence is synthesized)
attctgtgcctaggattttgccagggaacagttcactgactaggaaaagcactacattttaaattcagcattagtgcattgggaaggatctttactgctttgtgcttggcatgtcattat

SEQ ID NO: 64300 - DNA, 120 bp, Artificial Sequence
  ENSG00000073921_26 (sequence is synthesized)
tttccatttgacattagggcctttccaaaatgaatgtgaggaattgctttcacttcaagactttccttcttttcactaaaactctagaaggtgttacaagggggagggaaggggggcaaa

SEQ ID NO: 64301 - DNA, 120 bp, Artificial Sequence
  ENSG00000073921_27 (sequence is synthesized)
gtccttgaacattttctttggctcgtgccatgttatgatcatataccttttaaataaggggaaatagtatctttaaagttaatgtctagccaagagtttagtaaacgaagaattaaactg

SEQ ID NO: 64302 - DNA, 120 bp, Artificial Sequence
  ENSG00000073921_28 (sequence is synthesized)
cactgttgatcggtgctttgtgtaaatacatctttaacatttgggtggagaggggccttaagaaggacagttcattgtaggaaagcaattctgtacatgagtttaagcattcttgttgca

SEQ ID NO: 64303 - DNA, 120 bp, Artificial Sequence
  ENSG00000073921_29 (sequence is synthesized)
ttgtctctgcagattctatttttgtttacaatattaaaatgtatgttagcaaaatgggtggattttcaaataaaatgcagcttccacaaaagttttgttatggtattctggtctgagatg

SEQ ID NO: 64304 - DNA, 120 bp, Artificial Sequence
  ENSG00000073921_30 (sequence is synthesized)
cattttcatttttcctttctctttttattatcaatattgtcatttttccctaataaaatatacccaggtgattatatttgttgatctaataacatggaaggtttgttttatatgaatttt

SEQ ID NO: 64305 - DNA, 120 bp, Artificial Sequence
  ENSG00000073921_31 (sequence is synthesized)
caaaaagatgtctctttacactttttgttaccttgtagactcttattgataaatgcaactacttattaaaattgttcactttttgtcttttgatcagatgcctttagtcaggtaagttta

SEQ ID NO: 64306 - DNA, 120 bp, Artificial Sequence
  ENSG00000073921_32 (sequence is synthesized)
agggaaaatacgcagtttaatgttttggtacatataattatgtctgccaaagaaacctttgattgtatcatattgcctatttagtagtgcatagggttcagagtacatgataaaggatca

SEQ ID NO: 64307 - DNA, 120 bp, Artificial Sequence
  ENSG00000073921_33 (sequence is synthesized)
aaagctttgcattgataagtgtctcataatatttgctgtgattggagaaaaaatgtagtcgtagccaataaattttatcagcttttaagtttcagtattattaaaccattttcatataaa

SEQ ID NO: 64308 - DNA, 120 bp, Artificial Sequence
  ENSG00000073921_34 (sequence is synthesized)
gctgtgttatatatggtaatgtgtatcatctcctaaggattttgcttaaatatttatatgtattttatggagttttctttttaatggctaatgtttggggctgataatgtgattcactac

SEQ ID NO: 64309 - DNA, 120 bp, Artificial Sequence
  ENSG00000073921_35 (sequence is synthesized)
ttaagataaactgctgcttttgacatttctttacatttctaacctttttattaatccttaaacactgtcaaggtttttcagtgttttttaaatttaacacaaattcattggaattttatt

SEQ ID NO: 64310 - DNA, 120 bp, Artificial Sequence
  ENSG00000073921_36 (sequence is synthesized)
aaaatatatattatactacaaattcttttaattagtgcttgctttttttctgtggtagacatctgatgcaaccctgtttatgcaatgcccaaaattttgcactgttgacactgttgatag

SEQ ID NO: 64311 - DNA, 120 bp, Artificial Sequence
  ENSG00000073921_37 (sequence is synthesized)
tacttgtaatcaataaactattttttatataaagagatgaggccaaagactacaattcccttgtcaaccttgatagtgttttagtatagatgttctttcattagatactggaaatacaag

SEQ ID NO: 64312 - DNA, 120 bp, Artificial Sequence
  ENSG00000073921_38 (sequence is synthesized)
ggattttaggtagttagtgaatgtacatgtgaactaaaatgctctctgtgtattttctgttgtgtaagtacttgttctaatccagtgttattgcattatgtaattgttctccctgggaaa

SEQ ID NO: 64313 - DNA, 120 bp, Artificial Sequence
  ENSG00000073921_39 (sequence is synthesized)
aacagaatggcatgcattttccacaatacgcaccccctgtaatggcctatcctgctactacaccaacaggcatgataggatatggaattcctccacaaatgggaagtgttcctgtaatga

SEQ ID NO: 64314 - DNA, 120 bp, Artificial Sequence
  ENSG00000073921_40 (sequence is synthesized)
gagtattaagataagtaacatatagcccccattgtcaaagggatcaatgcagtttttgaccagttttaacattttgatgtattcctgaagattgttctaacactatgaccacgtaaaatg

SEQ ID NO: 64315 - DNA, 120 bp, Artificial Sequence
  ENSG00000073921_41 (sequence is synthesized)
ttggataaaagtggattgcaagacgagaggttgagccttgaaggatgagaggtgtttaccgtcttaggatggggtatagtagatagaaccatatgaaccgaagagctgaggaatgtgagc

SEQ ID NO: 64316 - DNA, 120 bp, Artificial Sequence
  ENSG00000073921_42 (sequence is synthesized)
atgtaacacctgacgtgtacagtagtaggatatgacatgtctacatttattaggcggtatagtagatatttaaatgagaaagcagtttcatacagacaagttgcatttgatttcacaaaa

SEQ ID NO: 64317 - DNA, 120 bp, Artificial Sequence
  ENSG00000073921_43 (sequence is synthesized)
tatgtgtttcctgtcctattccacaccctagagaatgaataccggccagctagtatctaaatttagaatggcagcaacgtgtcgggttttcggagtagagataaacaaaaccaggtgaca

SEQ ID NO: 64318 - DNA, 120 bp, Artificial Sequence
  ENSG00000073921_44 (sequence is synthesized)
acttcaggggaagctgtgaaggcagctgcacctcctttgtcaagctgttggtttcaaccacagacacgaggacacacttgagacttaattcagtgcacaaatgagatgaatgtgaacatc

SEQ ID NO: 64319 - DNA, 120 bp, Artificial Sequence
  ENSG00000073921_45 (sequence is synthesized)
cagtcaattcagtatgaagtggtgactttcttcattttccatttaaagacatttactaatgtctattttttggataacttttccagtgaataaacaaggagaaaaggcaaagacctcctt

SEQ ID NO: 64320 - DNA, 120 bp, Artificial Sequence
  ENSG00000073921_46 (sequence is synthesized)
ctgcatgctcagtagtatgtcgagcttttaggagtatggttttactttaaaatttaagtacttgcaagatttttaaaaaatgtttcatgtttacatagttttcagttcttaacgtttttg

SEQ ID NO: 64321 - DNA, 120 bp, Artificial Sequence
  ENSG00000073921_47 (sequence is synthesized)
ataatgtttcttaatatctccaactaggtcacgtttgtataacaaaagtaagattgtcattcttattaagtagctaaaactccactgttaattagtacatgaagaacatacctgtttatt

SEQ ID NO: 64322 - DNA, 120 bp, Artificial Sequence
  ENSG00000073921_48 (sequence is synthesized)
tttagaactatttagaactatttaagatacttttttaaatctaaagatttttaaagctgtaaaaagcatgatgaaatcttagatcactgctgtatctaagtttaagtggtatagttatcc

SEQ ID NO: 64323 - DNA, 120 bp, Artificial Sequence
  ENSG00000073921_49 (sequence is synthesized)
ttctaataagtctgcttttctgctaatttcaaaacactttttttcactgaccattaatcgacagttcttaatgatcacaagtgtcacttactcacagctgtcttagcaattctttttagt

SEQ ID NO: 64324 - DNA, 120 bp, Artificial Sequence
  ENSG00000073969_0 (sequence is synthesized)
cgggcggcgggggcgcgcgcgcggcgggggcgggctttgccgagcgcagagctgcagccgccgagccggacgtgtccgcgaagatggcgggccggagcatgcaagcggcaagatgtccta

SEQ ID NO: 64325 - DNA, 120 bp, Artificial Sequence
  ENSG00000073969_1 (sequence is synthesized)
gcatgcaagcggcaagatgtcctacagatgaattatctttaaccaattgtgcagttgtgaatgaaaaggatttccagtctggccagcatgtgattgtgaggacctctcccaatcacaggt

SEQ ID NO: 64326 - DNA, 120 bp, Artificial Sequence
  ENSG00000073969_2 (sequence is synthesized)
acacatttacactgaagacacatccatcggtggttccagggagcattgcattcagtttacctcagagaaaatgggctgggctttctattgggcaagaaatagaagtctccttatatacat

SEQ ID NO: 64327 - DNA, 120 bp, Artificial Sequence
  ENSG00000073969_3 (sequence is synthesized)
ttgacaaagccaaacagtgtattggcacaatgaccatcgagattgatttcctgcagaaaaaaagcattgactccaacccttatgacaccgacaagatggcagcagaatttattcagcaat

SEQ ID NO: 64328 - DNA, 120 bp, Artificial Sequence
  ENSG00000073969_4 (sequence is synthesized)
tcaacaaccaggccttctcagtgggacaacagcttgtctttagcttcaatgaaaagctttttggcttactggtgaaggacattgaagccatggatcctagcatcctgaagggagagcctg

SEQ ID NO: 64329 - DNA, 120 bp, Artificial Sequence
  ENSG00000073969_5 (sequence is synthesized)
cgacagggaaaaggcagaagattgaagtaggactggttgttggaaacagtcaagttgcatttgaaaaagcagaaaattcgtcacttaatcttattggcaaagctaaaaccaaggaaaatc

SEQ ID NO: 64330 - DNA, 120 bp, Artificial Sequence
  ENSG00000073969_6 (sequence is synthesized)
gccaatcaattatcaatcctgactggaactttgaaaaaatgggaataggaggtctagacaaggaattttcagatattttccgacgagcatttgcttcccgagtatttcctccagagattg

SEQ ID NO: 64331 - DNA, 120 bp, Artificial Sequence
  ENSG00000073969_7 (sequence is synthesized)
tggagcagatgggttgtaaacatgttaaaggcatcctgttatatggacccccaggttgtggtaagactctcttggctcgacagattggcaagatgttgaatgcaagagagcccaaagtgg

SEQ ID NO: 64332 - DNA, 120 bp, Artificial Sequence
  ENSG00000073969_8 (sequence is synthesized)
tcaatgggccagaaatccttaacaaatatgtgggagaatcagaggctaacattcgcaaactttttgctgatgctgaagaggagcaaaggaggcttggtgctaacagtggtttgcacatca

SEQ ID NO: 64333 - DNA, 120 bp, Artificial Sequence
  ENSG00000073969_9 (sequence is synthesized)
tcatctttgatgaaattgatgccatctgcaagcagagagggagcatggctggtagcacgggagttcatgacactgttgtcaaccagttgctgtccaaaattgatggcgtggagcagctaa

SEQ ID NO: 64334 - DNA, 120 bp, Artificial Sequence
  ENSG00000073969_10 (sequence is synthesized)
acaacatcctagtcattggaatgaccaatagaccagatctgatagatgaggctcttcttagacctggaagactggaagttaaaatggagataggcttgccagatgagaaaggccgactac

SEQ ID NO: 64335 - DNA, 120 bp, Artificial Sequence
  ENSG00000073969_11 (sequence is synthesized)
agattcttcacatccacacagcaagaatgagagggcatcagttactctctgctgatgtagacattaaagaactggccgtggagaccaagaatttcagtggtgctgaattggagggtctgg

SEQ ID NO: 64336 - DNA, 120 bp, Artificial Sequence
  ENSG00000073969_12 (sequence is synthesized)
tgcgagcagcccagtccactgctatgaatagacacataaaggccagtactaaagtggaagtggacatggagaaagcagaaagcctgcaagtgacgagaggagacttccttgcttctttgg

SEQ ID NO: 64337 - DNA, 120 bp, Artificial Sequence
  ENSG00000073969_13 (sequence is synthesized)
agaatgatatcaaaccagcctttggcacaaaccaagaagattatgcaagttacattatgaacggtatcatcaaatggggtgacccagttactcgagttctagatgatggggagctgctgg

SEQ ID NO: 64338 - DNA, 120 bp, Artificial Sequence
  ENSG00000073969_14 (sequence is synthesized)
tgcagcagactaagaacagtgaccgcacaccattggtcagcgtgcttctggaaggccctcctcacagtgggaagactgctttagctgcaaaaattgcagaggaatccaacttcccgttca

SEQ ID NO: 64339 - DNA, 120 bp, Artificial Sequence
  ENSG00000073969_15 (sequence is synthesized)
tcaagatctgttctcctgataaaatgattggcttttctgaaacagccaaatgtcaggccatgaagaagatctttgatgatgcgtacaaatcccagctcagttgtgtggttgtggatgaca

SEQ ID NO: 64340 - DNA, 120 bp, Artificial Sequence
  ENSG00000073969_16 (sequence is synthesized)
cctattggccctcgattttcaaatcttgtattacaggctcttctcgttttactgaaaaaggcacctcctcagggccgcaagcttcttatcattgggaccactagccgcaaagatgtcctt

SEQ ID NO: 64341 - DNA, 120 bp, Artificial Sequence
  ENSG00000073969_17 (sequence is synthesized)
caggagatggaaatgcttaacgctttcagcaccaccatccacgtgcccaacattgccacaggagagcagctgttggaagctttggagcttttgggcaacttcaaggataaggaacgcacc

SEQ ID NO: 64342 - DNA, 120 bp, Artificial Sequence
  ENSG00000073969_18 (sequence is synthesized)
acaattgcacagcaagtcaaagggaagaaggtctggataggaatcaagaagttactaatgctgatcgagatgtccctacagatggatcctgaataccgtgtgagaaaattcttggccctc

SEQ ID NO: 64343 - DNA, 120 bp, Artificial Sequence
  ENSG00000073969_19 (sequence is synthesized)
ttaagagaagaaggagctagcccccttgattttgattgaaaatgaactatttgaaacacacagtgaccaagggaagtgaccaaggtgaagatggcctaggatcttcactgtcttactcaa

SEQ ID NO: 64344 - DNA, 120 bp, Artificial Sequence
  ENSG00000073969_20 (sequence is synthesized)
gatactggactaagtggaacgttctctaccttcaacatgtgctcgctctgcatgattagtgcaataaaactcccttccttatgcatactgagatagcttagtgtctcgtggaaggtgtca

SEQ ID NO: 64345 - DNA, 120 bp, Artificial Sequence
  ENSG00000073969_21 (sequence is synthesized)
atttggtttagaatgctgcgcttaccttcccatgcaggctaaagtgattccttcttgctcagtccctctgggtgggaaccatccagtacttgtggacactacacgtttcaacctctctac

SEQ ID NO: 64346 - DNA, 120 bp, Artificial Sequence
  ENSG00000073969_22 (sequence is synthesized)
tagcaccatcacccttgaaaactctcagtcagtgtcatgaatgttgcatgacaacagttggccgattagaaggcagactttctacatgcaaatctggcttagtaaatcgaggtgtgggcc

SEQ ID NO: 64347 - DNA, 120 bp, Artificial Sequence
  ENSG00000073969_23 (sequence is synthesized)
agagatcctctgacagctgtcctgagctaacactaaaagtcactgggtatttggttaaaggtctcccacaagactggtattctctttgcctgaagaaacaaggcattgaatctctaaaat

SEQ ID NO: 64348 - DNA, 120 bp, Artificial Sequence
  ENSG00000073969_24 (sequence is synthesized)
gctgttctcaatcattgtcagagatgttttcaagttgcagtcagaagatctttcttaatagaaagtcagatgactaccgtgttggttgtgacttccccttaagtataactaatttgctct

SEQ ID NO: 64349 - DNA, 120 bp, Artificial Sequence
  ENSG00000073969_25 (sequence is synthesized)
gtggtaagagatatgctcattattaccacttagaagatgttgttaaaaacatgtgaaagataggtatggaaaaagcatacacccccaaacagaaaggagttattaaagtaatttacaaac

SEQ ID NO: 64350 - DNA, 120 bp, Artificial Sequence
  ENSG00000073969_26 (sequence is synthesized)
ctctcagcactaattagtgtccaactccaagtgggtcaattccttagtataatattaaggcttactagtatcactgctttttccttagcttaatgacttacttagaatttatcctttatt

SEQ ID NO: 64351 - DNA, 120 bp, Artificial Sequence
  ENSG00000073969_27 (sequence is synthesized)
ttaaatgatctgtactatctagtgtctaaaacactattctccagaaaaatcaatcattttctagccctctccctcagtcctttattgtccattccaatacattgaacacatttcctttac

SEQ ID NO: 64352 - DNA, 120 bp, Artificial Sequence
  ENSG00000073969_28 (sequence is synthesized)
cctccacacacttcttccaaaaggaagcacccgttgagtccttttgagggtgatttgtcttacaactgactgacttagcaggaatttaattaggtcatatttggtgatgagacttatgga

SEQ ID NO: 64353 - DNA, 120 bp, Artificial Sequence
  ENSG00000073969_29 (sequence is synthesized)
gtgtgcctctctctcccaactgctgcttaaaatgcaaggacaagcaattagaagccatcctaaggtgcttacctcacacgccacccatgaggcttgtggccacagtggcacttgggtgtg

SEQ ID NO: 64354 - DNA, 120 bp, Artificial Sequence
  ENSG00000073969_30 (sequence is synthesized)
gctcctctgttatttgtcctcatgtgagaaagcagatcatctccaaatcttgccatttgtatacttttggtggagacttggatgtcatatcttctttgttttgggttttcttccctagct

SEQ ID NO: 64355 - DNA, 120 bp, Artificial Sequence
  ENSG00000073969_31 (sequence is synthesized)
tattttgtggcttttaaagaagtggattgtattgtgagatcctgtgattcctggtggccagtatcctggattcctctaagatcttgcctctttcctcctcatgaaagcagcacacattgt

SEQ ID NO: 64356 - DNA, 120 bp, Artificial Sequence
  ENSG00000073969_32 (sequence is synthesized)
gttaacttatgtctcttgttaaatgagcttaatgtctttgtgttttgtccaaaactgtattgaaaaaatattgtttaatgcaaatgaaggaatgcaataaagagtaaatatacttgaaaa

SEQ ID NO: 64357 - DNA, 120 bp, Artificial Sequence
  ENSG00000073969_33 (sequence is synthesized)
caaggaagttggttgtactgttggtttgctctccctgtcctgcttcgcaaaacttccttgtcacaatgcaggaaaaacttaatgtagcccccttgattttgattgaaaatgaactatttg

SEQ ID NO: 64358 - DNA, 120 bp, Artificial Sequence
  ENSG00000073969_34 (sequence is synthesized)
gttatgtattaaactgtcagatagactagaacatgctaaaacacttttggaaaggcttcagggaagaggaagaagtcgaacatatgggagaaaggaacaatcagtaatgtcatgttcctg

SEQ ID NO: 64359 - DNA, 120 bp, Artificial Sequence
  ENSG00000073969_35 (sequence is synthesized)
agaagatggaaaggaagatttgattggtttatggttgaacgagggacacagcttccaaaacagggaagggaaggcagggatgtctaaatgtaggccctcctcacagtgggaagactgctt

SEQ ID NO: 64360 - DNA, 120 bp, Artificial Sequence
  ENSG00000073969_36 (sequence is synthesized)
atcctcccttcccatcccttggggcttgttccctcgtcctccacacagccgcagggtcgcggtcgccgaagccccctctgacgggctctgggggtctttccgcacccccttgcgagggct

SEQ ID NO: 64361 - DNA, 120 bp, Artificial Sequence
  ENSG00000073969_37 (sequence is synthesized)
agtctcactaaaccacatggaatgggaaaggaacagtttcccaaaggaagggtttgctcttaatgcagaggaagggatgctgggagtcaaaaataatagatgttcattatagcaatgagt

SEQ ID NO: 64362 - DNA, 120 bp, Artificial Sequence
  ENSG00000073969_38 (sequence is synthesized)
tttctattactagtggtcagatcttaaacattcattgtatcagaagactggttacatctatgagaatgggaaggaaatagttatggtacctctgttcctatatcttttatgaagtgtgtg

SEQ ID NO: 64363 - DNA, 120 bp, Artificial Sequence
  ENSG00000074047_0 (sequence is synthesized)
gattgccacccaggacgatgagcggctgagatggagacgtctgcctcagccactgcctccgagaagcaagaagccaaaagtgggatcctggaggccgctggcttccccgacccgggtaaa

SEQ ID NO: 64364 - DNA, 120 bp, Artificial Sequence
  ENSG00000074047_1 (sequence is synthesized)
aaggcctctcctttggtggtggctgcagcggcagcagcagcggtagctgcccaaggagtgccgcagcatctcttgccaccattccatgcgcccctaccgattgacatgcgacaccaggaa

SEQ ID NO: 64365 - DNA, 120 bp, Artificial Sequence
  ENSG00000074047_2 (sequence is synthesized)
ggaaggtaccattacgagcctcattctgtccacggtgtgcacgggccccctgccctcagcggcagccctgtcatctctgacatctccttgatccggctttccccgcacccggctggccct

SEQ ID NO: 64366 - DNA, 120 bp, Artificial Sequence
  ENSG00000074047_3 (sequence is synthesized)
ggggagtcccccttcaacgccccccacccgtacgtgaacccccacatggagcactacctccgttctgtgcacagcagccccacgctctccatgatctctgcagccaggggcctcagcccc

SEQ ID NO: 64367 - DNA, 120 bp, Artificial Sequence
  ENSG00000074047_4 (sequence is synthesized)
gctgatgtggcccaggagcaccttaaggagaggggactgtttggccttcctgctccaggcaccaccccctcagactattaccaccagatgaccctcgtggcaggccaccccgcgccctac

SEQ ID NO: 64368 - DNA, 120 bp, Artificial Sequence
  ENSG00000074047_5 (sequence is synthesized)
ggggacctgctgatgcagagcgggggcgctgccagcgcaccccatctccacgactacctcaaccccgtggacgtgtcccgtttctccagcccgcgggtgacgccccgcctgagccgcaag

SEQ ID NO: 64369 - DNA, 120 bp, Artificial Sequence
  ENSG00000074047_6 (sequence is synthesized)
cgggcgctgtccatctccccactctcagacgccagcctggacctgcagcggatgatccgcacctcacccaactcgctagtggcctacatcaacaactcccgaagcagctcggcggccagc

SEQ ID NO: 64370 - DNA, 120 bp, Artificial Sequence
  ENSG00000074047_7 (sequence is synthesized)
ggttcctacgggcatctgtcagcgggtgccctcagcccagccttcaccttcccccaccccatcaaccccgtggcctaccagcagattctgagccagcagaggggtctggggtcagccttt

SEQ ID NO: 64371 - DNA, 120 bp, Artificial Sequence
  ENSG00000074047_8 (sequence is synthesized)
ggacacacaccacccctgatccagccctcacccaccttcctggcccagcagcccatggccctcacctccatcaatgccacgcccacccagctcagcagcagcagcaactgtctgagtgac

SEQ ID NO: 64372 - DNA, 120 bp, Artificial Sequence
  ENSG00000074047_9 (sequence is synthesized)
accaaccagaacaagcagagcagtgagtcggccgtcagcagcaccgtcaaccctgtcgccattcacaagcgcagcaaggtcaagaccgagcctgagggcctgcggccggcctcccctctg

SEQ ID NO: 64373 - DNA, 120 bp, Artificial Sequence
  ENSG00000074047_10 (sequence is synthesized)
gcgctgacgcagggccaggtgtctggacacggctcatgtgggtgtgcccttcccctctcccaggagcagctggctgacctcaaggaagatctggacagggatgactgtaagcaggaggct

SEQ ID NO: 64374 - DNA, 120 bp, Artificial Sequence
  ENSG00000074047_11 (sequence is synthesized)
gaggtggtcatctatgagaccaactgccactgggaagactgcaccaaggagtacgacacccaggagcagctggtgcatcacatcaacaacgagcacatccacggggagaagaaggagttt

SEQ ID NO: 64375 - DNA, 120 bp, Artificial Sequence
  ENSG00000074047_12 (sequence is synthesized)
gtgtgccgctggcaggcctgcacgcgggagcagaagcccttcaaggcgcagtacatgctggtggtgcacatgcggcgacacacgggcgagaagccccacaagtgcacgttcgagggctgc

SEQ ID NO: 64376 - DNA, 120 bp, Artificial Sequence
  ENSG00000074047_13 (sequence is synthesized)
tcgaaggcctactcccgcctggagaacctgaagacacacctgcggtcccacaccggggagaagccatatgtgtgtgagcacgagggctgcaacaaagccttctccaacgcctcggaccgc

SEQ ID NO: 64377 - DNA, 120 bp, Artificial Sequence
  ENSG00000074047_14 (sequence is synthesized)
gccaagcaccagaatcgcacccactccaacgagaaaccctacatctgcaagatcccaggctgcaccaagagatacacagaccccagctctctccggaagcatgtgaaaacggtccacggc

SEQ ID NO: 64378 - DNA, 120 bp, Artificial Sequence
  ENSG00000074047_15 (sequence is synthesized)
ccagatgcccacgtcaccaagaagcagcgcaatgacgtgcacctccgcacaccgctgctcaaagagaatggggacagtgaggccggcacggagcctggcggcccagagagcaccgaggcc

SEQ ID NO: 64379 - DNA, 120 bp, Artificial Sequence
  ENSG00000074047_16 (sequence is synthesized)
agcagcaccagccaggccgtggaggactgcctgcacgtcagagccatcaagaccgagagctccgggctgtgtcagtccagccccggggcccagtcgtcctgcagcagcgagccctctcct

SEQ ID NO: 64380 - DNA, 120 bp, Artificial Sequence
  ENSG00000074047_17 (sequence is synthesized)
ctgggcagtgcccccaacaatgacagtggcgtggagatgccggggacggggcccgggagcctgggagacctgacggcactggatgacacacccccaggggccgacacctcagccctggct

SEQ ID NO: 64381 - DNA, 120 bp, Artificial Sequence
  ENSG00000074047_18 (sequence is synthesized)
gccccctccgctggtggcctccagctgcgcaaacacatgaccaccatgcaccggttcgagcagctcaagaaggagaagctcaagtcactcaaggattcctgctcatgggccgggccgact

SEQ ID NO: 64382 - DNA, 120 bp, Artificial Sequence
  ENSG00000074047_19 (sequence is synthesized)
ccacacacgcggaacaccaagctgcctcccctcccgggaagtggctccatcctggaaaacttcagtggcagtgggggcggcgggcccgcggggctgctgccgaacccgcggctgtcggag

SEQ ID NO: 64383 - DNA, 120 bp, Artificial Sequence
  ENSG00000074047_20 (sequence is synthesized)
ctgtccgcgagcgaggtgaccatgctgagccagctgcaggagcgccgcgacagctccaccagcacggtcagctcggcctacaccgtgagccgccgctcctccggcatctccccctacttc

SEQ ID NO: 64384 - DNA, 120 bp, Artificial Sequence
  ENSG00000074047_21 (sequence is synthesized)
tccagccgccgctccagcgaggcctcgcccctgggcgccggccgcccgcacaacgcgagctccgctgactcctacgaccccatctccacggacgcgtcgcggcgctcgagcgaggccagc

SEQ ID NO: 64385 - DNA, 120 bp, Artificial Sequence
  ENSG00000074047_22 (sequence is synthesized)
cagtgcagcggcggctccgggctgctcaacctcacgccggcgcagcagtacagcctgcgggccaagtacgcggcagccactggcggccccccgcccactccgctgccgggcctggagcgc

SEQ ID NO: 64386 - DNA, 80 bp, Artificial Sequence
  ENSG00000074047_23 (sequence is synthesized)
atgagcctgcggaccaggctggcgctgctggacgcgcccgagcgcacgctgcccgccggctgcccacgcccactggggcc

SEQ ID NO: 64387 - DNA, 120 bp, Artificial Sequence
  ENSG00000074047_24 (sequence is synthesized)
cccgccttcccccacgaggctccaggcggcggagccaggcgggccagcgaccctgtgcggcggcccgatgccctgtccctgccgcgggtgcagcgcttccacagcacccacaacgtgaac

SEQ ID NO: 64388 - DNA, 120 bp, Artificial Sequence
  ENSG00000074047_25 (sequence is synthesized)
ttccacagcacccacaacgtgaaccccggcccgctgccgccctgtgccgacaggcgaggcctccgcctgcagagccacccgagcaccgacggcggcctggcccgcggcgcctactcgccc

SEQ ID NO: 64389 - DNA, 120 bp, Artificial Sequence
  ENSG00000074047_26 (sequence is synthesized)
atcagcgagaacgtggcgatggaggccgtggcggcaggagtggacggcgcggggcccgaggccgacctggggctgccggaggacgacctggtgcttccagacgacgtggtgcagtacatc

SEQ ID NO: 64390 - DNA, 120 bp, Artificial Sequence
  ENSG00000074047_27 (sequence is synthesized)
aaggcgcacgccagtggcgctctggacgagggcaccgggcaggtgtatcccacggaaagcactggcttctctgacaaccccagactacccagcccggggctgcacggccagcgcaggatg

SEQ ID NO: 64391 - DNA, 120 bp, Artificial Sequence
  ENSG00000074047_28 (sequence is synthesized)
tgccagttaggctttggggcgccctccagcctgaacaaaaataacatgcctgtgcagtggaatgaggtgagctccggcaccgtagacgccctggccagccaggtgaagcctccacccttt

SEQ ID NO: 64392 - DNA, 120 bp, Artificial Sequence
  ENSG00000074047_29 (sequence is synthesized)
cctcagggcaacctggcggtggtgcagcagaagcctgcctttggccagtacccgggctacagtccgcaaggcctacaggctagccctgggggcctggacagcacgcagccacacctgcag

SEQ ID NO: 64393 - DNA, 120 bp, Artificial Sequence
  ENSG00000074047_30 (sequence is synthesized)
ccccgcagcggagccccctcccagggcatccccagggtaaactacatgcagcagctgcgacagccagtggcaggcagccagtgtcctggcatgactaccactatgagcccccatgcctgc

SEQ ID NO: 64394 - DNA, 120 bp, Artificial Sequence
  ENSG00000074047_31 (sequence is synthesized)
tatggccaagtccacccccagctgagccccagcaccatcagtggggccctcaaccagttcccccaatcctgcagcaacatgccagccaagccagggcatctggggcaccctcagcagaca

SEQ ID NO: 64395 - DNA, 120 bp, Artificial Sequence
  ENSG00000074047_32 (sequence is synthesized)
gaagtggcacctgaccccaccacgatgggcaatcgccacagggaacttggggtccccgattcagccctggctggagtgccaccacctcacccagtccagagctacccacagcagagccat

SEQ ID NO: 64396 - DNA, 120 bp, Artificial Sequence
  ENSG00000074047_33 (sequence is synthesized)
cacctggcagcctccatgagccaggagggctaccaccaggtccccagccttctgcctgcccgccagcctggcttcatggagccccaaacaggcccgatgggggtggctacagcaggcttt

SEQ ID NO: 64397 - DNA, 120 bp, Artificial Sequence
  ENSG00000074047_34 (sequence is synthesized)
ggcctagtgcagccccggcctcccctcgagcccagccccactggccgccaccgtggggtacgtgctgtgcagcagcagctggcctacgccagggccacaggccatgccatggctgccatg

SEQ ID NO: 64398 - DNA, 120 bp, Artificial Sequence
  ENSG00000074047_35 (sequence is synthesized)
ccgtccagtcaggaaacagcagaggctgtgcccaagggagcgatgggcaacatggggtcggtgcctccccagccgcctccgcaggacgcaggtggggccccggaccacagcatgctctac

SEQ ID NO: 64399 - DNA, 120 bp, Artificial Sequence
  ENSG00000074047_36 (sequence is synthesized)
tactacggccagatccacatgtacgaacaggatggaggcctggagaacctcgggagctgccaggtcatgcggtcccagccaccacagccacaggcctgtcaggacagcatccagccccag

SEQ ID NO: 64400 - DNA, 120 bp, Artificial Sequence
  ENSG00000074047_37 (sequence is synthesized)
cccttgccctcaccaggggtcaaccaggtgtccagcactgtggactcccagctcctggaggccccccagattgacttcgatgccatcatggatgatggcgatcactcgagtttgttctcg

SEQ ID NO: 64401 - DNA, 120 bp, Artificial Sequence
  ENSG00000074047_38 (sequence is synthesized)
ggtgctctgagccccagcctcctccacagcctctcccagaactcctcccgcctcaccaccccccgaaactccttgaccctgccctccatccccgcaggcatcagcaacatggctgtcggg

SEQ ID NO: 64402 - DNA, 120 bp, Artificial Sequence
  ENSG00000074047_39 (sequence is synthesized)
gacatgagctccatgctcaccagcctcgccgaggagagcaagttcctgaacatgatgacctagaggcccgagcgcctggtgctgagtgcacccggaggggtcatcgctgcccagagcctg

SEQ ID NO: 64403 - DNA, 120 bp, Artificial Sequence
  ENSG00000074047_40 (sequence is synthesized)
gggattccagctgtcttgtctttttccaaaaaagtgttaaataggcttgaggggttgttgcgcaatggccgcttcagatgacagatgttgtaagagaaggtttatgggcatcctctctgg

SEQ ID NO: 64404 - DNA, 120 bp, Artificial Sequence
  ENSG00000074047_41 (sequence is synthesized)
tcttttggattattcctcagaacaatgaaaaaagtctccataggacaggaaggaatgcaaaactcatttacacagtgctttccagcctttggtgcttacaggaccgcgctgttccggctt

SEQ ID NO: 64405 - DNA, 120 bp, Artificial Sequence
  ENSG00000074047_42 (sequence is synthesized)
cttcacggctgacattcggctaacgagggattactttggccaaaacctttcaaaggatatgcagaaagatggtagggagcatttgggtttgaatctgaatgctatactggatactctgct

SEQ ID NO: 64406 - DNA, 120 bp, Artificial Sequence
  ENSG00000074047_43 (sequence is synthesized)
ccggaaagatgagctttttattctactacttggaaggaaaaggaattcctggtccacctgaattcctctatgaagcctaactcttgaggtctctaacataccttgtcatagaggaaaagc

SEQ ID NO: 64407 - DNA, 120 bp, Artificial Sequence
  ENSG00000074047_44 (sequence is synthesized)
acagattatacctggatgattcaggagcacattctgattccaggtttggtagagctggctcttctactccgtaaagccgagtctgggactggcagcccatccaagtgtatatgaatgaat

SEQ ID NO: 64408 - DNA, 120 bp, Artificial Sequence
  ENSG00000074047_45 (sequence is synthesized)
aaagcatccaagtatatatgaatgaataaagtatgtaagtatcaccagaaaaaggaaagaaaaaatgtactccttggggcaagcccagaagctgccctggcctctccagaccgtgtttac

SEQ ID NO: 64409 - DNA, 120 bp, Artificial Sequence
  ENSG00000074047_46 (sequence is synthesized)
agtgtttgcatgtagaatgtagcccttcctgaaaagaagacttgtttctaaatacctcggggctgctggagccgctgtgggttagggatggactgaggcctcgaggagtgagggtgcacc

SEQ ID NO: 64410 - DNA, 120 bp, Artificial Sequence
  ENSG00000074047_47 (sequence is synthesized)
cggggcccagcctcaggctgccctagggatctctcagtaggaagaggaagttgcgtgtttacccaatcctgtttctccaatgcaacgtccacccactttaccaccaaaaactccagggcc

SEQ ID NO: 64411 - DNA, 120 bp, Artificial Sequence
  ENSG00000074047_48 (sequence is synthesized)
tgacggcagcccggtcccccagcactcaccagcagcccagtgttctccaccaagccacagtgtgcatgcctggtatcctccggattcccttccttctgcccgctgagtcactgggcagag

SEQ ID NO: 64412 - DNA, 120 bp, Artificial Sequence
  ENSG00000074047_49 (sequence is synthesized)
aatgatgacatgtgtaggtggtgtggttgggggtggaaaggggaaggggttgatcctcaggactctgagggagcatcgttgaattttcctgttcagtgtgaccaagacccacctggaaat

SEQ ID NO: 64413 - DNA, 120 bp, Artificial Sequence
  ENSG00000074047_50 (sequence is synthesized)
tgtgaccaagacccacctggaaatggaatttggaactggcttcaggagacatcattcctgaacacactgtagggtgaattggtgcatcttccccaccatacacacacacacacacacaca

SEQ ID NO: 64414 - DNA, 120 bp, Artificial Sequence
  ENSG00000074047_51 (sequence is synthesized)
ccaaaccttttcatggggaatgtgtggcaaccttgccaaacagcaccactcagagtgtgactctgactgtgaccttggccttaatgaggaacttcttaggagagtttgaggacaaggcca

SEQ ID NO: 64415 - DNA, 120 bp, Artificial Sequence
  ENSG00000074047_52 (sequence is synthesized)
acatcgtcatctgggctcgctgcgtcccagcacatcaaactctgtccagagacaaggccaactgcaaatgaaagccagggaacattgctaagggtctgtggctctgtggtggtgttcatc

SEQ ID NO: 64416 - DNA, 120 bp, Artificial Sequence
  ENSG00000074047_53 (sequence is synthesized)
gccttcctgagataggatttcccttgccagtcccaacctgtatatattctgtacagaagacatccctgaatatactgtaggtgagtcgtccagccaaatttatatctccaaaacattttt

SEQ ID NO: 64417 - DNA, 120 bp, Artificial Sequence
  ENSG00000074047_54 (sequence is synthesized)
agctttttctacatgctatgaattgagatgacatgctcaacttgtaaataagtctttttgtacattaaaaaagtaattttttcataatttatcttgtctatctgcttcccccttgacagt

SEQ ID NO: 64418 - DNA, 120 bp, Artificial Sequence
  ENSG00000074047_55 (sequence is synthesized)
agttaatgagaacctgggcagtaaatttggtgcattcgagcagaaattaggctgtattttttcttaacagtgtcaaaattgactatcccgcctttgccaagaaatgtttaatgctgaggc

SEQ ID NO: 64419 - DNA, 120 bp, Artificial Sequence
  ENSG00000074047_56 (sequence is synthesized)
tgaagttcgtggactcctacaataatgctataaatgcatagaagaaaagacacaggactgtgaaagaaagtgatgatgcgatgtctaaaacgttcaaggcaccgcatctgtgatcaagaa

SEQ ID NO: 64420 - DNA, 120 bp, Artificial Sequence
  ENSG00000074047_57 (sequence is synthesized)
gtcaactcctcagccttggtccccttgaatggtgaccaggctggctggcgttccttcacactacttccaaacaacaagtttttgggttttatgctcattaaagagcctttggtaagcact

SEQ ID NO: 64421 - DNA, 120 bp, Artificial Sequence
  ENSG00000074047_58 (sequence is synthesized)
cttttgcatgcaaaccatatatgatctattgtaataataacagtaagggtctatccaggtaggtcctgtgtagctgagaaccactggttgtaaccaaccaaagcctgcagaagctggtgt

SEQ ID NO: 64422 - DNA, 120 bp, Artificial Sequence
  ENSG00000074054_0 (sequence is synthesized)
tttttttttttttaatccccgcaccaagcgcttaacctcattggggtggaggagaaggcggcggctctctggtccgcagcggcaacagtaacgaaaaacagggctaatggactgctgaat

SEQ ID NO: 64423 - DNA, 120 bp, Artificial Sequence
  ENSG00000074054_1 (sequence is synthesized)
tatgaagtatttcagacccagtagtagaacatcactctgccactcactcctttatctcctactagttatttaaattggacttttaatatcctaccagctgctcttcagacacacatggtg

SEQ ID NO: 64424 - DNA, 120 bp, Artificial Sequence
  ENSG00000074054_2 (sequence is synthesized)
cattgttgccattccccagattgcatctttgaaacacaggctcttagtaaccttcagcgaacaaagaggcaacctcccagatacgtctgctgggagggagtcatcgtgactgccctctag

SEQ ID NO: 64425 - DNA, 120 bp, Artificial Sequence
  ENSG00000074054_3 (sequence is synthesized)
cttttgctggatctggatttgaattccactatggagcctcgcatggagtcctgcctggcgcaggtgttgcagaaggatgtggggaaacgattgcaggttggccaagaactgatagactat

SEQ ID NO: 64426 - DNA, 120 bp, Artificial Sequence
  ENSG00000074054_4 (sequence is synthesized)
ttctcagacaaacagaagtctgctgaccttgagcatgaccagaccatgttagataaacttgtggatggacttgctacctcttgggtgaactctagcaattacaaggtggttctgctgggc

SEQ ID NO: 64427 - DNA, 120 bp, Artificial Sequence
  ENSG00000074054_5 (sequence is synthesized)
atggacatcctgtccgccctggtgacccggctgcaggatcggttcaaggcgcagatcggcacagtgctgccaagtctaatagacagactaggagatgctaaagactctgtgagggagcag

SEQ ID NO: 64428 - DNA, 120 bp, Artificial Sequence
  ENSG00000074054_6 (sequence is synthesized)
gaccaaactctgctgctaaagatcatggatcaagctgctaatccccagtacgtatgggacagaatgcttggaggcttcaaacacaagaatttccgtactcgagaaggcatctgtctctgc

SEQ ID NO: 64429 - DNA, 120 bp, Artificial Sequence
  ENSG00000074054_7 (sequence is synthesized)
cttatagcaacactcaatgcctctggagcacagactttaacactaagcaagattgtgccacatatatgcaacttacttggagatccaaacagccaggttcgagatgcagcaataaacagc

SEQ ID NO: 64430 - DNA, 120 bp, Artificial Sequence
  ENSG00000074054_8 (sequence is synthesized)
ttagtggaaatttacagacatgtaggagaacgtgtgagggcagatctcagtaaaaaaggattgccacagtcccggttgaatgtaatttttacaaaatttgatgaagtccagaaatctgga

SEQ ID NO: 64431 - DNA, 120 bp, Artificial Sequence
  ENSG00000074054_9 (sequence is synthesized)
aacatgatacaatctgcaaatgataaaaatttcgacgatgaagattctgtggatggtaacagaccttcctctgctagttctacatcatccaaggctccaccaagttctcggagaaacgtt

SEQ ID NO: 64432 - DNA, 120 bp, Artificial Sequence
  ENSG00000074054_10 (sequence is synthesized)
ggaatgggaaccacccgccggcttggttcatccacccttggatccaagtcttcagctgcaaaagaaggagctggtgctgttgatgaagaggattttattaaagcatttgatgatgtacct

SEQ ID NO: 64433 - DNA, 120 bp, Artificial Sequence
  ENSG00000074054_11 (sequence is synthesized)
gtagtacagatttattccagccgagaccttgaggaatccataaacaaaattagggaaatattatctgatgacaagcatgattgggagcagagagtaaatgctctaaaaaagattagatct

SEQ ID NO: 64434 - DNA, 120 bp, Artificial Sequence
  ENSG00000074054_12 (sequence is synthesized)
ttacttttggctggtgctgctgagtatgataacttctttcaacatttgcgtcttttggatggagcctttaaactctctgctaaggacctgcggtctcaggtagtgcgggaggcttgtatc

SEQ ID NO: 64435 - DNA, 120 bp, Artificial Sequence
  ENSG00000074054_13 (sequence is synthesized)
acgttggggcatctgtcatcagttctggggaataagtttgaccatggagctgaagccattatgccaactatctttaatttaattccaaacagtgccaaaattatggccacatctggtgtt

SEQ ID NO: 64436 - DNA, 120 bp, Artificial Sequence
  ENSG00000074054_14 (sequence is synthesized)
gtagctgttaggttaattattcggcacacacacatccctaggttaatacctgtcataacaagcaactgtacctctaagtctgtcgcagttagaaggcgctgttttgaatttttagatttg

SEQ ID NO: 64437 - DNA, 120 bp, Artificial Sequence
  ENSG00000074054_15 (sequence is synthesized)
cttttacaagaatggcagacacattcactagaacgacacatatcagtattagctgaaacaataaagaagggaatacatgatgctgattccgaagcaagaatagaagccagaaaatgttac

SEQ ID NO: 64438 - DNA, 120 bp, Artificial Sequence
  ENSG00000074054_16 (sequence is synthesized)
tggggtttccacagtcacttcagcagagaagcagagcacttgtaccacaccttggagtcctcctaccagaaagccctgcagtcccacctgaagaactcagacagcatagtgtctctgcct

SEQ ID NO: 64439 - DNA, 120 bp, Artificial Sequence
  ENSG00000074054_17 (sequence is synthesized)
cagtcagaccgctcatcttccagctctcaagagagtctaaatcgtccgctgtctgccaaaagaagtcctactggaagtaccacatctagagcttctacagttagtaccaaatctgtgtca

SEQ ID NO: 64440 - DNA, 120 bp, Artificial Sequence
  ENSG00000074054_18 (sequence is synthesized)
acgactgggtccctccagcgatctcgaagtgatattgatgtgaacgcagcagccagtgccaaatccaaagtctcctcatcttcgggcacgacgcctttcagctctgcagcagctttgcct

SEQ ID NO: 64441 - DNA, 120 bp, Artificial Sequence
  ENSG00000074054_19 (sequence is synthesized)
ccagggtcatacgcatccttaggtcggatccgcacaagacggcaaagctctgggagtgccaccaacgtcgcctctacacctgataaccggggccgcagtcgcgctaaagtggtttcacag

SEQ ID NO: 64442 - DNA, 120 bp, Artificial Sequence
  ENSG00000074054_20 (sequence is synthesized)
tcccagcgatccagatctgctaatcctgctggtgctggcagccggtcaagttccccaggaaaattgttgggaagtggttatggtggacttactgggggctcctcacgaggcccacctgtg

SEQ ID NO: 64443 - DNA, 120 bp, Artificial Sequence
  ENSG00000074054_21 (sequence is synthesized)
acaccgtcttcagaaaagcgaagcaagattcccaggagccagggatgtagccgggaaacaagtccaaaccgaataggattagcacggagcagccgtatccctcgacccagcatgagtcag

SEQ ID NO: 64444 - DNA, 120 bp, Artificial Sequence
  ENSG00000074054_22 (sequence is synthesized)
gggtgcagccgcgataccagccgtgagagcagccgagatacaagccctgctcggggctttcctccacttgatcggtttgggcttggccagccaggaagaatacctggttctgtgaatgcc

SEQ ID NO: 64445 - DNA, 120 bp, Artificial Sequence
  ENSG00000074054_23 (sequence is synthesized)
atgagagttctgagcacaagtacagatcttgaagctgctgttgctgatgctttgaagaagcctgtgaggaggagatatgagccgtatgggatgtattctgacgatgatgccaacagtgat

SEQ ID NO: 64446 - DNA, 120 bp, Artificial Sequence
  ENSG00000074054_24 (sequence is synthesized)
gcctcaagtgtttgctctgagcgctcatatggctccaggaatggtggcattccccattatctgcggcagactgaggatgtagcagaagttctcaaccactgtgctagttcaaactggtca

SEQ ID NO: 64447 - DNA, 120 bp, Artificial Sequence
  ENSG00000074054_25 (sequence is synthesized)
gaaaggaaagaagggcttctgggcctgcagaacttactgaagagccaaagaacactgagtcgagttgaactgaaaaggttgtgtgagatcttcactcggatgtttgctgaccctcatagc

SEQ ID NO: 64448 - DNA, 120 bp, Artificial Sequence
  ENSG00000074054_26 (sequence is synthesized)
aagagagttttcagtatgtttttggagactcttgtggattttataataattcataaggatgatttacaagactggctttttgttcttctcacacaattacttaagaaaatgggagcagat

SEQ ID NO: 64449 - DNA, 120 bp, Artificial Sequence
  ENSG00000074054_27 (sequence is synthesized)
ttacttggatctgtgcaagcaaaagttcaaaaggctctagatgtcacaagggactcctttccatttgatcaacaatttaacattttgatgagatttattgtggatcaaactcaaactcca

SEQ ID NO: 64450 - DNA, 120 bp, Artificial Sequence
  ENSG00000074054_28 (sequence is synthesized)
aacctcaaggtcaaagttgcaatcctgaaatacattgagtctctggccagacagatggatccaacagattttgtaaactctagtgagacaaggcttgctgtttctagaatcataacctgg

SEQ ID NO: 64451 - DNA, 120 bp, Artificial Sequence
  ENSG00000074054_29 (sequence is synthesized)
acaacagaaccaaagagttcagacgtgagaaaggcagcacagattgtgctaatctctctgtttgaattgaatactcctgaatttaccatgttacttggtgccttgccaaaaacattccag

SEQ ID NO: 64452 - DNA, 120 bp, Artificial Sequence
  ENSG00000074054_30 (sequence is synthesized)
gatggtgccaccaaactcctgcacaaccacctcaagaattccagtaacaccagtgtgggctctccaagcaatacgattggccggacgccctcccgacacaccagcagcaggaccagcccc

SEQ ID NO: 64453 - DNA, 120 bp, Artificial Sequence
  ENSG00000074054_31 (sequence is synthesized)
ctgacctcacccaccaactgttcccatgggggtctgtctccaagtcggttatggggttggagtgccgacgggttagcgaagcacccacctcccttttctcagcctaactccatccccacc

SEQ ID NO: 64454 - DNA, 120 bp, Artificial Sequence
  ENSG00000074054_32 (sequence is synthesized)
gctccctcccacaaggctctcaggcgctcttactctcccagcatgctggactatgatacagagaacctgaactctgaagaaatctatagttctctacgtggagttacagaagccattgaa

SEQ ID NO: 64455 - DNA, 120 bp, Artificial Sequence
  ENSG00000074054_33 (sequence is synthesized)
gcaaaaaggagtgtgatattgtgtcccgcgatgggggcgctgcctcccctgccactgagggccgggggggtagtgaagtagaaggaggccggacagctctggataacaagacctcactac

SEQ ID NO: 64456 - DNA, 120 bp, Artificial Sequence
  ENSG00000074054_34 (sequence is synthesized)
tcaacacccagcctccgcgcgccttcccggggccgcgggcgcgagactacaacccgtacccctactcagatgccatcaacacctacgacaagaccgccctgaaagaggctgtgttcgatg

SEQ ID NO: 64457 - DNA, 120 bp, Artificial Sequence
  ENSG00000074054_35 (sequence is synthesized)
acgacatggagcagcttcgagacgtgcccatcgaccattctgacctggtggctgaccttctgaaagagctgtccaaccacaatgagcgagtggaggaacggaagggagccctgctggagc

SEQ ID NO: 64458 - DNA, 120 bp, Artificial Sequence
  ENSG00000074054_36 (sequence is synthesized)
tgctcaagatcacgcgggaagacagccttggtgtctgggaggagcacttcaagaccattctgctcctgctgctggagacccttggagacaaagaccattcaattcgagcactggcgttaa

SEQ ID NO: 64459 - DNA, 120 bp, Artificial Sequence
  ENSG00000074054_37 (sequence is synthesized)
gagttttgagggaaattctgagaaatcaaccagcaagatttaaaaactacgccgagctgacgattatgaagactctggaagcccacaaagactcccataaggaggtggtgagagcggctg

SEQ ID NO: 64460 - DNA, 120 bp, Artificial Sequence
  ENSG00000074054_38 (sequence is synthesized)
aggaggctgcgtccacactggccagttccatccacccggagcagtgcatcaaggtgctctgccccatcatccagacggccgactaccccatcaaccttgctgccatcaagatgcagacca

SEQ ID NO: 64461 - DNA, 120 bp, Artificial Sequence
  ENSG00000074054_39 (sequence is synthesized)
aagtcgtcgagaggatcgcaaaggagtcattgctgcagctccttgtcgacatcatcccaggcttgctgcagggttatgacaacaccgaaagtagtgtgcgtaaggccagcgtgttttgct

SEQ ID NO: 64462 - DNA, 120 bp, Artificial Sequence
  ENSG00000074054_40 (sequence is synthesized)
tagtggcaatttattccgtaatcggagaagacctgaaacctcaccttgcacagctcacagggagcaagatgaagctactaaacttatacataaagagggcccagaccaccaacagcaaca

SEQ ID NO: 64463 - DNA, 120 bp, Artificial Sequence
  ENSG00000074054_41 (sequence is synthesized)
gcagctcctcctccgatgtctccacgcacagctaatggcagtacctgtctcttgtgtagacctagaagcaatcggtggtgcctctcagagacctttccccacccccttcatcggctgccc

SEQ ID NO: 64464 - DNA, 120 bp, Artificial Sequence
  ENSG00000074054_42 (sequence is synthesized)
agtcagtacaaggaggcccacaaatatttattacaatcagtattttggtcccttccagcttttctgtagaatcttactggtattgaatgtaaaggaagcaaggcctgtattgcagtcttc

SEQ ID NO: 64465 - DNA, 120 bp, Artificial Sequence
  ENSG00000074054_43 (sequence is synthesized)
atacaaaacaaaaggaataagaacagaaaagagccatactgaaacatgtcttgtacagcctgctgagatggcgaaaccctgtgtgtggggtgcagtttttaaaaatcagagcgctctagc

SEQ ID NO: 64466 - DNA, 120 bp, Artificial Sequence
  ENSG00000074054_44 (sequence is synthesized)
cactacttggtagaaagtagcattttttttttcagttaataacatatttgggggtggggtggggtgttactttgtgttcttcctccttagcctattttcttgtgcgtatggtctgtgtgg

SEQ ID NO: 64467 - DNA, 120 bp, Artificial Sequence
  ENSG00000074054_45 (sequence is synthesized)
ggcccctttcacagctgacaccacgaaaggtgatatatctttaagttgtgttctgagacctactaaaaatgggaatcaagtcttggcaagaacagtctgaagatggccttttaacaaacg

SEQ ID NO: 64468 - DNA, 120 bp, Artificial Sequence
  ENSG00000074054_46 (sequence is synthesized)
ctgggaattttgcttgtcatatccagactggaggccgactgccctggctttcagcgtagaattgggagtgcaccctgacagtctccttccagctctccctaatcgactccaccgacaagg

SEQ ID NO: 64469 - DNA, 120 bp, Artificial Sequence
  ENSG00000074054_47 (sequence is synthesized)
tccctaccccagagcttccatgcaaaggaattcttcaagtttaaatctggacacaaaaataagataaatgtatggcatcatttagggatgcctgagatggcagttcatgaagcacagaag

SEQ ID NO: 64470 - DNA, 120 bp, Artificial Sequence
  ENSG00000074054_48 (sequence is synthesized)
ataaagaagaagtctttcatctttactgctgagatccttgggaacactgttgtcatgggggctctgccaagaccctcatctctgggctacacggtgattcagattgagcaccaacttgtt

SEQ ID NO: 64471 - DNA, 120 bp, Artificial Sequence
  ENSG00000074054_49 (sequence is synthesized)
tcctcccctcaaagttctgcctaagccgttcagttctaacatggtctcagttaatctggtaaatggcatctttaccatcttagttctgacttctcagtttaatgtgggattaagagccaa

SEQ ID NO: 64472 - DNA, 120 bp, Artificial Sequence
  ENSG00000074054_50 (sequence is synthesized)
gaaaagcctagagagactggatatcacaattttttttaattttataaactgaagtagttccttgaatgtctgttgatgaaatagtcactgtttaaggaaaaaagtaattatgaggtgtag

SEQ ID NO: 64473 - DNA, 120 bp, Artificial Sequence
  ENSG00000074054_51 (sequence is synthesized)
cagattgcagaaaaacaggattagaaacacacttaaaaagaacacacatttagagtctctcttcctcctcagcgaaccactaggccccctttttaaaaacacctttagagcctaattact

SEQ ID NO: 64474 - DNA, 120 bp, Artificial Sequence
  ENSG00000074054_52 (sequence is synthesized)
ccaataaaagtaactagaggtttggagtctggttaaataaattctgagtaaaattcttaagccaaatggaaattcttaatgcaatcatgaggacttctattgtctcttactgttgtatta

SEQ ID NO: 64475 - DNA, 120 bp, Artificial Sequence
  ENSG00000074054_53 (sequence is synthesized)
gatcctataaattgaactgatttttccataaggaaaatgcttcttttgagattaattctaataacgtatttgctattgcagtgcagagcccactgcaactgctaggactgaaagcagagg

SEQ ID NO: 64476 - DNA, 120 bp, Artificial Sequence
  ENSG00000074054_54 (sequence is synthesized)
ctgggtgccagagcacgtgattcttaacatcatttccacagacccctctgccctgaccctctgcattggatgcaggaagctgggaaagactgatgttgatttggaaacatgggctgaaaa

SEQ ID NO: 64477 - DNA, 80 bp, Artificial Sequence
  ENSG00000074054_55 (sequence is synthesized)
tgggaaagactgatgttgatttggaaacatgggctgaaaatgaaggccccatagtgcataggaacagtaaagccagggtg

SEQ ID NO: 64478 - DNA, 120 bp, Artificial Sequence
  ENSG00000074054_56 (sequence is synthesized)
gtggtacctcactgctgctgtttagggaacttgagggacgcgtttcaaggggttgggtattactgacgagctttggctcaaaatatagcaggaccaggtcttttgttgataagtactgtt

SEQ ID NO: 64479 - DNA, 120 bp, Artificial Sequence
  ENSG00000074054_57 (sequence is synthesized)
tgtttattaatatgtcattaatggtatttcttttttacactctacaagtgaattagggagtctcttgttgacccctttgttgcaggaatgtgcgtcgggctaggttatccatgagtttct

SEQ ID NO: 64480 - DNA, 120 bp, Artificial Sequence
  ENSG00000074054_58 (sequence is synthesized)
ttattcctaatgcagttagaaagacctttctccttgagctctttgactcccagaaggtaccccagtccccagtgtacttagaaaggatctcgaacattgctggacgtcctcatagtactc

SEQ ID NO: 64481 - DNA, 120 bp, Artificial Sequence
  ENSG00000074054_59 (sequence is synthesized)
acaaagggctagccttgaatgtcactcgcccagtcttcagtctcctgacttagagatacaatcacgtcacaggtctcttggcctcaatctgaaaactgctgccgccgcgccgaggagact

SEQ ID NO: 64482 - DNA, 120 bp, Artificial Sequence
  ENSG00000074054_60 (sequence is synthesized)
cgcatgccgccaccacctcactgggagggcgccgagcccaccgtcgccccctagaccctgacagctgcagctgccttgccttgccgccgcctccctgcagggcccctgttccaatgaaaa

SEQ ID NO: 64483 - DNA, 120 bp, Artificial Sequence
  ENSG00000074054_61 (sequence is synthesized)
acagaacacaaaagagcagagcacctaagcctgtctctgcctccctgtctaccggactggccagggcccaagacccccgctgctccactgcggggctgggcgggctgactccctgcttcc

SEQ ID NO: 64484 - DNA, 120 bp, Artificial Sequence
  ENSG00000074054_62 (sequence is synthesized)
tccaagctgctgcctcccctgcagccagggtctgggcagggtgcagccggtcctcggggcacgcagcttccttcaagtacactgtgtgtgcttcccggacctgcggcgatgccacgggcc

SEQ ID NO: 64485 - DNA, 120 bp, Artificial Sequence
  ENSG00000074054_63 (sequence is synthesized)
tgccttttctatgcgcctcactagcttaccaccctgtgcaggtaatgcaactgactttgtctcatcagtctttttctttccctgccaccctttatttatcaagcgtaatgttacacttta

SEQ ID NO: 64486 - DNA, 120 bp, Artificial Sequence
  ENSG00000074054_64 (sequence is synthesized)
aaggacagcaaataagaactttgtagaatcccaccaggactttgctaacaataatgtttggaaataaagaagtgctctgaaaaaatatcagccaccaaaatagttatgttggcactgtgt

SEQ ID NO: 64487 - DNA, 120 bp, Artificial Sequence
  ENSG00000074054_65 (sequence is synthesized)
tcacacgcatggtccccacacccccaggttgggtgggtttttttgttttttgggtttttttgggggggggggctttttcatgttacatccatatctgtatttatatcttatttgtttcac

SEQ ID NO: 64488 - DNA, 120 bp, Artificial Sequence
  ENSG00000074054_66 (sequence is synthesized)
tttcaagtgtatcatggcaaatgtacagatttttttgttaataatgtgctaggatttgctaaaaaagaaaaaaaaaaaacccttttgagtttgccctagaataaatgagacttaattcaa

SEQ ID NO: 64489 - DNA, 120 bp, Artificial Sequence
  ENSG00000074054_67 (sequence is synthesized)
gccatgagagttctgagcacaagtacagatcttgaagctgctgttgctgatgctttgctgttaggagactccaggagcaagaagaagcctgtgaggaggagatatgagccgtatgggatg

SEQ ID NO: 64490 - DNA, 120 bp, Artificial Sequence
  ENSG00000074054_68 (sequence is synthesized)
ccagggtcatacgcatccttagagtccagacacatgagggaagacatggagtacataggcctggactcaggtcggatccgcacaagacggcaaagctctgggagtgccaccaacgtcgcc

SEQ ID NO: 64491 - DNA, 120 bp, Artificial Sequence
  ENSG00000074054_69 (sequence is synthesized)
aaagtgctgggattacagtaatgagccaccatgcccggctcaagaaagcctcttttttcttaactttttctactaattatgattgcattctcccaccttttcctttcatttttggtgtca

SEQ ID NO: 64492 - DNA, 120 bp, Artificial Sequence
  ENSG00000074054_70 (sequence is synthesized)
agtgagggcatgccctggcaaccggtgtcatgatattatttatgagtttgtcaagccattggagatctttgttacttttaaaaagggaagataatggaaacatcataagaaacacaatca

SEQ ID NO: 64493 - DNA, 120 bp, Artificial Sequence
  ENSG00000074054_71 (sequence is synthesized)
gacccattccagttaacacttctttcagtagttttacaatactttttgctcaattatgtgaagtgtgacagattttaaattttattcagtgacatagctctgaagtctttatttcaaact

SEQ ID NO: 64494 - DNA, 120 bp, Artificial Sequence
  ENSG00000074054_72 (sequence is synthesized)
ttgaagcagttattaatatggaaaagtgaaattctataaaatcctgtttctctgatttttcattgatttttgctggcaggcaatagcgtgtttatcagaatgtttgttcctagaagagta

SEQ ID NO: 64495 - DNA, 120 bp, Artificial Sequence
  ENSG00000074054_73 (sequence is synthesized)
agtatctgctatatgtggctccacgtgggtgactggattacttgaatagtcgagacttctcttacatcattatagattttttagtaatttttgttctcatacctagttgttcaggcttgc

SEQ ID NO: 64496 - DNA, 120 bp, Artificial Sequence
  ENSG00000074054_74 (sequence is synthesized)
caggtcgtgggtaatgtgaccacagtgagaatgcctcaccactgagaaagaatctgcagactcgtacacaattaccatttagaatggtgaatactctcccaggaatgaaagaaatacttg

SEQ ID NO: 64497 - DNA, 120 bp, Artificial Sequence
  ENSG00000074054_75 (sequence is synthesized)
caattctttgttttctgaggctcccgaagggtcgcaaaagcggcggctcggttttacccagaagaccgcgcgtcggccgctcgaaaatttgcatacgcttttctcgccggggcggggctg

SEQ ID NO: 64498 - DNA, 120 bp, Artificial Sequence
  ENSG00000074054_76 (sequence is synthesized)
gcgggggcgggaccgcggcgcgctcttgaactccacccgcagctaacccgggtttggctacgctgtattgccttttatttcgtttctcctcaccgagtattttccattatagctgtacat

SEQ ID NO: 64499 - DNA, 120 bp, Artificial Sequence
  ENSG00000074054_77 (sequence is synthesized)
agctctttttgtggaagatcatccttcttcgtgctaatctctttggtcctccagtcggcatgcgtctggactctcggactgcgtctgggccggaaatgtctaggcctccccggagcgggt

SEQ ID NO: 64500 - DNA, 120 bp, Artificial Sequence
  ENSG00000074054_78 (sequence is synthesized)
cagactgcttgtgattggtattattttcttcagatgcttttttgtttttgatgcctagaatgccctcttattagtgattttacttataaaatatttttttaaacaactttaatcaacatt

SEQ ID NO: 64501 - DNA, 120 bp, Artificial Sequence
  ENSG00000074054_79 (sequence is synthesized)
ggccttatcttgcccctttccatgtaatggggtcacgatgtccttttcttattgggcttagcttcagctttactttctgggttgtgcttactgtttacatcaaaacatttatttgttcat

SEQ ID NO: 64502 - DNA, 120 bp, Artificial Sequence
  ENSG00000074054_80 (sequence is synthesized)
ttttcacatattttctgagcacgtttagtaaggtcatgtttttatcagcaacaagctgctgcttggcttacgtgcatggtctgcaactgggtttatagtagttgaggaaacttcattcct

SEQ ID NO: 64503 - DNA, 120 bp, Artificial Sequence
  ENSG00000074054_81 (sequence is synthesized)
gcatctagttgctttaacacagaatttcttaaaactttattagcatagaatgtggtcttttaggatgtacttttttacttgtgagtttcatttttgtttcatatgtaattgagaaaaagt

SEQ ID NO: 64504 - DNA, 120 bp, Artificial Sequence
  ENSG00000074054_82 (sequence is synthesized)
ttcattttaaaagacctgattaaatgctacattccatgaaattccatcttggtccccccctacatatgttaagagttccaataattttaatcagtcaagtggcaggttccagaagcatga

SEQ ID NO: 64505 - DNA, 120 bp, Artificial Sequence
  ENSG00000074054_83 (sequence is synthesized)
ttctgatttttgtattattaatttaaaaataaaaaaagcttcatcatgctgggacacttgaatgtgacaaactaggcatttctgacatgcctggtctgtgatctgcacatcgcacataga

SEQ ID NO: 64506 - DNA, 120 bp, Artificial Sequence
  ENSG00000074054_84 (sequence is synthesized)
gaactcttaaaggggggagtaatctggtcaaagtcctgccttctcccacctgtggagctggtcccttatatggaaacaggaatagatgctgagaattaccagaattaaacctctacaaga

SEQ ID NO: 64507 - DNA, 120 bp, Artificial Sequence
  ENSG00000074054_85 (sequence is synthesized)
aaaagtttctccatccacatggagaagagaaatgagaagagagtgctgtggggaggggctggaggaaggggatgggaggattgccaggaggtggcaggccatgcccagggccagctagag

SEQ ID NO: 64508 - DNA, 120 bp, Artificial Sequence
  ENSG00000074054_86 (sequence is synthesized)
gggacttgcatggcaactgagtgacagggaggctgctgcatgccatgccgtggtgactcagatagctttctgatgctttggattaatggtttggtttagggataagtaaaaatagaagaa

SEQ ID NO: 64509 - DNA, 120 bp, Artificial Sequence
  ENSG00000074071_0 (sequence is synthesized)
gacttccggccggaccgctgaggacgcggacccgccatggcgcggaagaaggtgcgtccgcggctgatcgcggagctggcccgccgcgtgcgcgccctgcgggagcaactgaacaggccg

SEQ ID NO: 64510 - DNA, 120 bp, Artificial Sequence
  ENSG00000074071_1 (sequence is synthesized)
cgcgactcccagctctacgcggtggactacgagaccttgacgcggccgttctctggacgccggctgccggtccgggcctgggccgacgtgcgccgcgagagccgcctcttgcagctgctc

SEQ ID NO: 64511 - DNA, 120 bp, Artificial Sequence
  ENSG00000074071_2 (sequence is synthesized)
ggccgcctcccgctcttcggcctgggccgcctggtcacgcgcaagtcctggctgtggcagcacgacgagccgtgctactggcgcctcacgcgggtgcggcccgactacacggcgcagaac

SEQ ID NO: 64512 - DNA, 120 bp, Artificial Sequence
  ENSG00000074071_3 (sequence is synthesized)
ttggaccacgggaaggcctggggcatcctgaccttcaaagggaagactgagagcgaggcgcgggagatcgaacacgtcatgtaccatgactggcggctggtgcccaagcacgaggaggag

SEQ ID NO: 64513 - DNA, 120 bp, Artificial Sequence
  ENSG00000074071_4 (sequence is synthesized)
tccgggccatgattatcgcagaacgacagaaaaatggagacacaagcaccgaggagcccatgctgaatgtgcagaggatacgcatggaaccctgggattaccctgcaaaacaggaagaca

SEQ ID NO: 64514 - DNA, 120 bp, Artificial Sequence
  ENSG00000074071_5 (sequence is synthesized)
aaggaagggccaagggcacccccgtctagaatgccagaaccagcgggtggccttaggggctgtgaggcagtggggaccttattgatgaaagaaaccgtctttgcgttacacccgagtctg

SEQ ID NO: 64515 - DNA, 120 bp, Artificial Sequence
  ENSG00000074071_6 (sequence is synthesized)
cctctcggagcagggagctcaccttccgcgacgtgttctgagggtctgcatcttaggggggagggctggggcaaatcgccacctgtgcctttcctctggccctgctgcccccacacccaa

SEQ ID NO: 64516 - DNA, 120 bp, Artificial Sequence
  ENSG00000074071_7 (sequence is synthesized)
ctccgagggcccacgctggggaaagcgggaagcgctcgctccctttcccccattagtgctctctctgcctggatcccggcagaagctatgaaagggaataaagagaaaagaagtacccag

SEQ ID NO: 64517 - DNA, 80 bp, Artificial Sequence
  ENSG00000074181_0 (sequence is synthesized)
cttcggcgaagttggcggcgcggaggctggcccgggacgcgcccggagcccagggaaggagggaggaggggagggtcgcg

SEQ ID NO: 64518 - DNA, 120 bp, Artificial Sequence
  ENSG00000074181_1 (sequence is synthesized)
gtcgcccgatgtcgccgccaccgccaccgccacccgtgcgggcgctgcccctgctgctgctgctagcggggccgggggctgcagcccccccttgcctggacggaagcccgtgtgcaaatg

SEQ ID NO: 64519 - DNA, 120 bp, Artificial Sequence
  ENSG00000074181_2 (sequence is synthesized)
aatggaggtcgttgcacccagctgccctcccgggaggctgcctgcctgtgcccgcctggctgggtgggtgagcggtgtcagctggaggacccctgtcactcaggcccctgtgctggccgt

SEQ ID NO: 64520 - DNA, 120 bp, Artificial Sequence
  ENSG00000074181_3 (sequence is synthesized)
ggtgtctgccagagttcagtggtggctggcaccgcccgattctcatgccggtgcccccgtggcttccgaggccctgactgctccctgccagatccctgcctcagcagcccttgtgcccac

SEQ ID NO: 64521 - DNA, 120 bp, Artificial Sequence
  ENSG00000074181_4 (sequence is synthesized)
ggtgcccgctgctcagtggggcccgatggacgcttcctctgctcctgcccacctggctaccagggccgcagctgccgaagcgacgtggatgagtgccgggtgggtgagccctgccgccat

SEQ ID NO: 64522 - DNA, 120 bp, Artificial Sequence
  ENSG00000074181_5 (sequence is synthesized)
ggtggcacctgcctcaacacacctggctccttccgctgccagtgtccagctggctacacagggccactatgtgagaaccccgcggtgccctgtgcaccctcaccatgccgtaacgggggc

SEQ ID NO: 64523 - DNA, 120 bp, Artificial Sequence
  ENSG00000074181_6 (sequence is synthesized)
acctgcaggcagagtggcgacctcacttacgactgtgcctgtcttcctgggtttgagggtcagaattgtgaagtgaacgtggacgactgtccaggacaccgatgtctcaatggggggaca

SEQ ID NO: 64524 - DNA, 120 bp, Artificial Sequence
  ENSG00000074181_7 (sequence is synthesized)
tgcgtggatggcgtcaacacctataactgccagtgccctcctgagtggacaggccagttctgcacggaggacgtggatgagtgtcagctgcagcccaacgcctgccacaatgggggtacc

SEQ ID NO: 64525 - DNA, 120 bp, Artificial Sequence
  ENSG00000074181_8 (sequence is synthesized)
tgcttcaacacgctgggtggccacagctgcgtgtgtgtcaatggctggacaggcgagagctgcagtcagaatatcgatgactgtgccacagccgtgtgcttccatggggccacctgccat

SEQ ID NO: 64526 - DNA, 120 bp, Artificial Sequence
  ENSG00000074181_9 (sequence is synthesized)
gaccgcgtggcttctttctactgtgcctgccccatgggcaagactggcctcctgtgtcacctggatgacgcctgtgtcagcaacccctgccacgaggatgctatctgtgacacaaatccg

SEQ ID NO: 64527 - DNA, 120 bp, Artificial Sequence
  ENSG00000074181_10 (sequence is synthesized)
gtgaacggccgggccatttgcacctgtcctcccggcttcacgggtggggcatgtgaccaggatgtggacgagtgctctatcggcgccaacccctgcgagcacttgggcaggtgcgtgaac

SEQ ID NO: 64528 - DNA, 120 bp, Artificial Sequence
  ENSG00000074181_11 (sequence is synthesized)
acgcagggctccttcctgtgccagtgcggtcgtggctacactggacctcgctgtgagaccgatgtcaacgagtgtctgtcggggccctgccgaaaccaggccacgtgcctcgaccgcata

SEQ ID NO: 64529 - DNA, 120 bp, Artificial Sequence
  ENSG00000074181_12 (sequence is synthesized)
ggccagttcacctgtatctgtatggcaggcttcacaggaacctattgcgaggtggacattgacgagtgtcagagtagcccctgtgtcaacggtggggtctgcaaggaccgagtcaatggc

SEQ ID NO: 64530 - DNA, 120 bp, Artificial Sequence
  ENSG00000074181_13 (sequence is synthesized)
ttcagctgcacctgcccctcgggcttcagcggctccacgtgtcagctggacgtggacgaatgcgccagcacgccctgcaggaatggcgccaaatgcgtggaccagcccgatggctacgag

SEQ ID NO: 64531 - DNA, 120 bp, Artificial Sequence
  ENSG00000074181_14 (sequence is synthesized)
tgccgctgtgccgagggctttgagggcacgctgtgtgatcgcaacgtggacgactgctcccctgacccatgccaccatggtcgctgcgtggatggcatcgccagcttctcatgtgcctgt

SEQ ID NO: 64532 - DNA, 120 bp, Artificial Sequence
  ENSG00000074181_15 (sequence is synthesized)
gctcctggctacacgggcacacgctgcgagagccaggtggacgaatgccgcagccagccctgccgccatggcggcaaatgcctagacctggtggacaagtacctctgccgctgcccttct

SEQ ID NO: 64533 - DNA, 120 bp, Artificial Sequence
  ENSG00000074181_16 (sequence is synthesized)
gggaccacaggtgtgaactgcgaagtgaacattgacgactgtgccagcaacccctgcacctttggagtctgccgtgatggcatcaaccgctacgactgtgtctgccaacctggcttcaca

SEQ ID NO: 64534 - DNA, 120 bp, Artificial Sequence
  ENSG00000074181_17 (sequence is synthesized)
gggcccctttgtaacgtggagatcaatgagtgtgcttccagcccatgcggcgagggaggttcctgtgtggatggggaaaatggcttccgctgcctctgcccgcctggctccttgccccca

SEQ ID NO: 64535 - DNA, 120 bp, Artificial Sequence
  ENSG00000074181_18 (sequence is synthesized)
ctctgcctccccccgagccatccctgtgcccatgagccctgcagtcacggcatctgctatgatgcacctggcgggttccgctgtgtgtgtgagcctggctggagtggcccccgctgcagc

SEQ ID NO: 64536 - DNA, 120 bp, Artificial Sequence
  ENSG00000074181_19 (sequence is synthesized)
cagagcctggcccgagacgcctgtgagtcccagccgtgcagggccggtgggacatgcagcagcgatggaatgggtttccactgcacctgcccgcctggtgtccagggacgtcagtgtgaa

SEQ ID NO: 64537 - DNA, 120 bp, Artificial Sequence
  ENSG00000074181_20 (sequence is synthesized)
ctcctctccccctgcaccccgaacccctgtgagcatgggggccgctgcgagtctgcccctggccagctgcctgtctgctcctgcccccagggctggcaaggcccacgatgccagcaggat

SEQ ID NO: 64538 - DNA, 120 bp, Artificial Sequence
  ENSG00000074181_21 (sequence is synthesized)
gtggacgagtgtgctggccccgcaccctgtggccctcatggtatctgcaccaacctggcagggagtttcagctgcacctgccatggagggtacactggcccttcctgcgatcaggacatc

SEQ ID NO: 64539 - DNA, 120 bp, Artificial Sequence
  ENSG00000074181_22 (sequence is synthesized)
aatgactgtgaccccaacccatgcctgaacggtggctcgtgccaagacggcgtgggctccttttcctgctcctgcctccctggtttcgccggcccacgatgcgcccgcgatgtggatgag

SEQ ID NO: 64540 - DNA, 120 bp, Artificial Sequence
  ENSG00000074181_23 (sequence is synthesized)
tgcctgagcaacccctgcggcccgggcacctgtaccgaccacgtggcctccttcacctgcacctgcccgccaggctacggaggcttccactgcgaacaggacctgcccgactgcagcccc

SEQ ID NO: 64541 - DNA, 120 bp, Artificial Sequence
  ENSG00000074181_24 (sequence is synthesized)
agctcctgcttcaatggcgggacctgtgtggacggcgtgaactcgttcagctgcctgtgccgtcccggctacacaggagcccactgccaacatgaggcagacccctgcctctcgcggccc

SEQ ID NO: 64542 - DNA, 120 bp, Artificial Sequence
  ENSG00000074181_25 (sequence is synthesized)
tgcctacacgggggcgtctgcagcgccgcccaccctggcttccgctgcacctgcctcgagagcttcacgggcccgcagtgccagacgctggtggattggtgcagccgccagccttgtcaa

SEQ ID NO: 64543 - DNA, 120 bp, Artificial Sequence
  ENSG00000074181_26 (sequence is synthesized)
aacgggggtcgctgcgtccagactggggcctattgcctttgtccccctggatggagcggacgcctctgtgacatccgaagcttgccctgcagggaggccgcagcccagatcggggtgcgg

SEQ ID NO: 64544 - DNA, 120 bp, Artificial Sequence
  ENSG00000074181_27 (sequence is synthesized)
ctggagcagctgtgtcaggcgggtgggcagtgtgtggatgaagacagctcccactactgcgtgtgcccagagggccgtactggtagccactgtgagcaggaggtggacccctgcttggcc

SEQ ID NO: 64545 - DNA, 120 bp, Artificial Sequence
  ENSG00000074181_28 (sequence is synthesized)
cagccctgccagcatggggggacctgccgtggctatatggggggctacatgtgtgagtgtcttcctggctacaatggtgataactgtgaggacgacgtggacgagtgtgcctcccagccc

SEQ ID NO: 64546 - DNA, 120 bp, Artificial Sequence
  ENSG00000074181_29 (sequence is synthesized)
tgccagcacgggggttcatgcattgacctcgtggcccgctatctctgctcctgtcccccaggaacgctgggggtgctctgcgagattaatgaggatgactgcggcccaggcccaccgctg

SEQ ID NO: 64547 - DNA, 120 bp, Artificial Sequence
  ENSG00000074181_30 (sequence is synthesized)
gactcagggccccggtgcctacacaatggcacctgcgtggacctggtgggtggtttccgctgcacctgtcccccaggatacactggtttgcgctgcgaggcagacatcaatgagtgtcgc

SEQ ID NO: 64548 - DNA, 120 bp, Artificial Sequence
  ENSG00000074181_31 (sequence is synthesized)
tcaggtgcctgccacgcggcacacacccgggactgcctgcaggacccaggcggaggtttccgttgcctttgtcatgctggcttctcaggtcctcgctgtcagactgtcctgtctccctgc

SEQ ID NO: 64549 - DNA, 120 bp, Artificial Sequence
  ENSG00000074181_32 (sequence is synthesized)
gagtcccagccatgccagcatggaggccagtgccgtcctagcccgggtcctgggggtgggctgaccttcacctgtcactgtgcccagccgttctggggtccgcgttgcgagcgggtggcg

SEQ ID NO: 64550 - DNA, 80 bp, Artificial Sequence
  ENSG00000074181_33 (sequence is synthesized)
gccagcagacgccccgcgggccgcgctgcgcctgccccccagggttgtcgggaccctcctgccgcagcttcccggggtcg

SEQ ID NO: 64551 - DNA, 80 bp, Artificial Sequence
  ENSG00000074181_34 (sequence is synthesized)
gtctccacgggggctcctgccgccccgcgccgctcgcgcccttcttccgctgcgcttgcgcgcagggctggaccgggccg

SEQ ID NO: 64552 - DNA, 120 bp, Artificial Sequence
  ENSG00000074181_35 (sequence is synthesized)
cccgaggtctcggaggagccgcggtgcccgcgcgccgcctgccaggccaagcgcggggaccagcgctgcgaccgcgagtgcaacagcccaggctgcggctgggacggcggcgactgctcg

SEQ ID NO: 64553 - DNA, 120 bp, Artificial Sequence
  ENSG00000074181_36 (sequence is synthesized)
cctggcggcaatgcgaggcgctgcagtgctggcgcctcttcaacaacagccgctgcgaccccgcctgcagctcgcccgcctgcctctacgacaacttcgactgccacgccggtggccgcg

SEQ ID NO: 64554 - DNA, 120 bp, Artificial Sequence
  ENSG00000074181_37 (sequence is synthesized)
agcgcacttgcaacccggtgtacgagaagtactgcgccgaccactttgccgacggccgctgcgaccagggctgcaacacggaggagtgcggctgggatgggctggattgtgccagcgagg

SEQ ID NO: 64555 - DNA, 120 bp, Artificial Sequence
  ENSG00000074181_38 (sequence is synthesized)
tgccggccctgctggcccgcggcgtgctggtgctcacagtgctgctgccgccagaggagctactgcgttccagcgccgactttctgcagcggctcagcgccatcctgcgcacctcgctgc

SEQ ID NO: 64556 - DNA, 120 bp, Artificial Sequence
  ENSG00000074181_39 (sequence is synthesized)
gcttccgcctggacgcgcacggccaggccatggtcttcccttaccaccggcctagtcctggctccgaaccccgggcccgtcgggagctggcccccgaggtgatcggctcggtagtaatgc

SEQ ID NO: 64557 - DNA, 120 bp, Artificial Sequence
  ENSG00000074181_40 (sequence is synthesized)
tggagattgacaaccggctctgcctgcagtcgcctgagaatgatcactgcttccccgatgcccagagcgccgctgactacctgggagcgttgtcagcggtggagcgcctggacttcccgt

SEQ ID NO: 64558 - DNA, 120 bp, Artificial Sequence
  ENSG00000074181_41 (sequence is synthesized)
acccactgcgggacgtgcggggggagccgctggagcctccagaacccagcgtcccgctgctgccactgctagtggcgggcgctgtcttgctgctggtcattctcgtcctgggtgtcatgg

SEQ ID NO: 64559 - DNA, 120 bp, Artificial Sequence
  ENSG00000074181_42 (sequence is synthesized)
tggcccggcgcaagcgcgagcacagcaccctctggttccctgagggcttctcactgcacaaggacgtggcctctggtcacaagggccggcgggaacccgtgggccaggacgcgctgggca

SEQ ID NO: 64560 - DNA, 120 bp, Artificial Sequence
  ENSG00000074181_43 (sequence is synthesized)
tgaagaacatggccaagggtgagagcctgatgggggaggtggccacagactggatggacacagagtgcccagaggccaagcggctaaaggtagaggagccaggcatgggggctgaggagg

SEQ ID NO: 64561 - DNA, 120 bp, Artificial Sequence
  ENSG00000074181_44 (sequence is synthesized)
ctgtggattgccgtcagtggactcaacaccatctggttgctgctgacatccgcgtggcaccagccatggcactgacaccaccacagggcgacgcagatgctgatggcatggatgtcaatg

SEQ ID NO: 64562 - DNA, 120 bp, Artificial Sequence
  ENSG00000074181_45 (sequence is synthesized)
tgcgtggcccagatggcttcaccccgctaatgctggcttccttctgtgggggggctctggagccaatgccaactgaagaggatgaggcagatgacacatcagctagcatcatctccgacc

SEQ ID NO: 64563 - DNA, 120 bp, Artificial Sequence
  ENSG00000074181_46 (sequence is synthesized)
tgatctgccagggggctcagcttggggcacggactgaccgtactggcgagactgctttgcacctggctgcccgttatgcccgtgctgatgcagccaagcggctgctggatgctggggcag

SEQ ID NO: 64564 - DNA, 120 bp, Artificial Sequence
  ENSG00000074181_47 (sequence is synthesized)
acaccaatgcccaggaccactcaggccgcactcccctgcacacagctgtcacagccgatgcccagggtgtcttccagattctcatccgaaaccgctctacagacttggatgcccgcatgg

SEQ ID NO: 64565 - DNA, 120 bp, Artificial Sequence
  ENSG00000074181_48 (sequence is synthesized)
cagatggctcaacggcactgatcctggcggcccgcctggcagtagagggcatggtggaagagctcatcgccagccatgctgatgtcaatgctgtggatgagcttgggaaatcagccttac

SEQ ID NO: 64566 - DNA, 120 bp, Artificial Sequence
  ENSG00000074181_49 (sequence is synthesized)
actgggctgcggctgtgaacaacgtggaagccactttggccctgctcaaaaatggagccaataaggacatgcaggatagcaaggaggagacccccctattcctggccgcccgcgagggca

SEQ ID NO: 64567 - DNA, 120 bp, Artificial Sequence
  ENSG00000074181_50 (sequence is synthesized)
gctatgaggctgccaagctgctgttggaccactttgccaaccgtgagatcaccgaccacctggacaggctgccgcgggacgtagcccaggagagactgcaccaggacatcgtgcgcttgc

SEQ ID NO: 64568 - DNA, 120 bp, Artificial Sequence
  ENSG00000074181_51 (sequence is synthesized)
tggatcaacccagtgggccccgcagcccccccggtccccacggcctggggcctctgctctgtcctccaggggccttcctccctggcctcaaagcggcacagtcggggtccaagaagagca

SEQ ID NO: 64569 - DNA, 120 bp, Artificial Sequence
  ENSG00000074181_52 (sequence is synthesized)
ggaaggcggggctggggccgcaggggccccgggggcggggcaagaagctgacgctggcctgcccgggccccctggctgacagctcggtcacgctgtcgcccgtggactcgctggactccc

SEQ ID NO: 64570 - DNA, 120 bp, Artificial Sequence
  ENSG00000074181_53 (sequence is synthesized)
cgctggactccccgcggcctttcggtgggccccctgcttcccctggtggcttcccccttgaggggccctatgcagctgccactgccactgcagtgtctctggcacagcttggtggcccag

SEQ ID NO: 64571 - DNA, 120 bp, Artificial Sequence
  ENSG00000074181_54 (sequence is synthesized)
gccgggcgggtctagggcgccagccccctggaggatgtgtactcagcctgggcctgctgaaccctgtggctgtgcccctcgattgggcccggctgcccccacctgcccctccaggcccct

SEQ ID NO: 64572 - DNA, 120 bp, Artificial Sequence
  ENSG00000074181_55 (sequence is synthesized)
cgttcctgctgccactggcgccgggaccccagctgctcaacccagggacccccgtctccccgcaggagcggcccccgccttacctggcagtcccaggacatggcgaggagtacccggcgg

SEQ ID NO: 64573 - DNA, 120 bp, Artificial Sequence
  ENSG00000074181_56 (sequence is synthesized)
ctggggcacacagcagccccccaaaggcccgcttcctgcgggttcccagtgagcacccttacctgaccccatcccccgaatcccctgagcactgggccagcccctcacctccctccctct

SEQ ID NO: 64574 - DNA, 120 bp, Artificial Sequence
  ENSG00000074181_57 (sequence is synthesized)
cagactggtccgaatccacgcctagcccagccactgccactggggccatggccaccaccactggggcactgcctgcccagccacttcccttgtctgttcccagctcccttgctcaggccc

SEQ ID NO: 64575 - DNA, 120 bp, Artificial Sequence
  ENSG00000074181_58 (sequence is synthesized)
agacccagctggggccccagccggaagttacccccaagaggcaagtgttggcctgagacgctcgtcagttcttagatcttgggggcctaaagagacccccgtcctgcctcctttctttct

SEQ ID NO: 64576 - DNA, 120 bp, Artificial Sequence
  ENSG00000074181_59 (sequence is synthesized)
ctgtctcttccttccttttagtctttttcatcctcttctctttccaccaaccctcctgcatccttgccttgcagcgtgaccgagataggtcatcagcccagggcttcagtcttcctttat

SEQ ID NO: 64577 - DNA, 120 bp, Artificial Sequence
  ENSG00000074181_60 (sequence is synthesized)
ttataatgggtgggggctaccacccaccctctcagtcttgtgaagagtctgggacctccttcttccccacttctctcttccctcattcctttctctctccttctggcctctcatttcctt

SEQ ID NO: 64578 - DNA, 120 bp, Artificial Sequence
  ENSG00000074181_61 (sequence is synthesized)
tatttttctttttttttttacattttgtatagaaacaaattcatttaaacaaacttattattattattttttacaaaatatatatatggagatgctccctccccctgtgaaccccccagt

SEQ ID NO: 64579 - DNA, 120 bp, Artificial Sequence
  ENSG00000074181_62 (sequence is synthesized)
gagatgctccctccccctgtgaaccccccagtgcccccgtggggctgagtctgtgggcccattcggccaagctggattctgtgtacctagtacacaggcatgactgggatcccgtgtacc

SEQ ID NO: 64580 - DNA, 120 bp, Artificial Sequence
  ENSG00000074181_63 (sequence is synthesized)
gagtacacgacccaggtatgtaccaagtaggcacccttgggcgcacccactggggccaggggtcgggggagtgttgggagcctcctccccaccccacctccctcacttcactgcattcca

SEQ ID NO: 64581 - DNA, 120 bp, Artificial Sequence
  ENSG00000074181_64 (sequence is synthesized)
gatgggacatgttccatagccttgctggggaagggcccactgccaactccctctgccccagccccacccttggccatctccctttgggaactagggggctgctggtgggaaatgggagcc

SEQ ID NO: 64582 - DNA, 120 bp, Artificial Sequence
  ENSG00000074181_65 (sequence is synthesized)
agggcagatgtatgcattcctttgtgtccctgtaaatgtgggactacaagaagaggagctgcctgagtggtactttctcttcctggtaatcctctggcccagcctcatggcagaatagag

SEQ ID NO: 64583 - DNA, 120 bp, Artificial Sequence
  ENSG00000074181_66 (sequence is synthesized)
gtatttttaggctatttttgtaatatggcttctggtcaaaatccctgtgtagctgaattcccaagccctgcattgtacagccccccactcccctcaccacctaataaaggaatagttaac

SEQ ID NO: 64584 - DNA, 120 bp, Artificial Sequence
  ENSG00000074181_67 (sequence is synthesized)
actcagtgttgttggtctgtgtctaggtaaggtggggagtggtggcagtgggacttctatctcccccacccagggctaacttgagctcccatcttggggtaaatacatttgacttgccag

SEQ ID NO: 64585 - DNA, 120 bp, Artificial Sequence
  ENSG00000074181_68 (sequence is synthesized)
tctacttatgcttcctcttttggcagatgactaccgattggattagtggttgtcacctgacttaagctgagccaatcagattcttttgctcgagaactttctttaatggagaggctaaga

SEQ ID NO: 64586 - DNA, 120 bp, Artificial Sequence
  ENSG00000074181_69 (sequence is synthesized)
aagttgtcagttggtggagctcttaaggtcacaatcagatttagaaatatcagtggccaattcgaggtggtgggcaaagagacaagcaaacagggcagaagaatgaagctaatattcagg

SEQ ID NO: 64587 - DNA, 120 bp, Artificial Sequence
  ENSG00000074181_70 (sequence is synthesized)
gagaatcagaaatgagagctcaaatggctccttgagggctgggggggttatctcggctcccagtgcagttatcaattccagttaattgagtgttcattccattgagatcaacaggtattt

SEQ ID NO: 64588 - DNA, 120 bp, Artificial Sequence
  ENSG00000074181_71 (sequence is synthesized)
attaattgctttctaagtatctgatcatggttctgcatgaatttcacttttacttcatgctcctatgggttttggagataaccttggacccatgtaataaatacttctttacttgtgcca

SEQ ID NO: 64589 - DNA, 120 bp, Artificial Sequence
  ENSG00000074181_72 (sequence is synthesized)
gagtagtaggggcgtggcgtctaggaggaggatgtggctttaggggagacatcgaagggaagggagtttctggaaaatgctgacatttccgccgggtgtggtagctcacacctgtaatcc

SEQ ID NO: 64590 - DNA, 63 bp, Artificial Sequence
  ENSG00000074181_73 (sequence is synthesized)
tcacgccattgcactccagcctggcgactgagtgacactccgtctcaaaaaacaaagaaacaa

SEQ ID NO: 64591 - DNA, 120 bp, Artificial Sequence
  ENSG00000074181_74 (sequence is synthesized)
ccttggtccactgggtgtcagcagtggcacagtgccattgcaatccagcctgggcaacagagtgagactctctcaaaaaacaaaacaaaataaaaccccaaacattggattaaaatataa

SEQ ID NO: 64592 - DNA, 120 bp, Artificial Sequence
  ENSG00000074181_75 (sequence is synthesized)
ggcctcccaaagtgctgggattacctactggtagtgcgctgaacatctgtgtgtgtccttttgtgctggggttctttgcgtcttcatgggtatgtccaggtgggtctgtgtcccactaag

SEQ ID NO: 64593 - DNA, 120 bp, Artificial Sequence
  ENSG00000074201_0 (sequence is synthesized)
ctcttccagggcgggcggtgtggtgcacgcattgctgtgctccaactccctcagggcctgtgttgccgcactctgctgctatgagcttcctcaaaagtttcccgccgcctgggccagcgg

SEQ ID NO: 64594 - DNA, 120 bp, Artificial Sequence
  ENSG00000074201_1 (sequence is synthesized)
aggggctcctgcggcagcagccagacactgaggctgtgctgaacgggaagggcctcggcactggtaccctttacatcgctgagagccgcctgtcttggttagatggctctggattaggat

SEQ ID NO: 64595 - DNA, 120 bp, Artificial Sequence
  ENSG00000074201_2 (sequence is synthesized)
tctcactggaataccccaccattagtttacatgcattatccagggaccgaagtgactgtctaggagagcatttgtatgttatggtgaatgccaaatttgaagaagaatcaaaagaacctg

SEQ ID NO: 64596 - DNA, 120 bp, Artificial Sequence
  ENSG00000074201_3 (sequence is synthesized)
ttgctgatgaagaagaggaagacagtgatgatgatgttgaacctattactgaatttagatttgtgcctagtgataaatcagcgttggaggcaatgttcactgcaatgtgcgaatgccagg

SEQ ID NO: 64597 - DNA, 120 bp, Artificial Sequence
  ENSG00000074201_4 (sequence is synthesized)
ccttgcatccagatcctgaggatgaggattcagatgactacgatggagaagaatatgatgtggaagcacatgaacaaggacagggggacatccctacattttacacctatgaagaaggat

SEQ ID NO: 64598 - DNA, 120 bp, Artificial Sequence
  ENSG00000074201_5 (sequence is synthesized)
tatcccatctaacagcagaaggccaagccacactggagagattagaaggaatgctttctcagtctgtgagcagccagtataatatggctggggtcaggacagaagattcaataagagatt

SEQ ID NO: 64599 - DNA, 120 bp, Artificial Sequence
  ENSG00000074201_6 (sequence is synthesized)
atgaagatgggatggaggtggataccacaccaacagttgctggacagtttgaggatgcagatgttgatcactgaaaatgatttatgcaagtttaagattctgctcctaagtgtaggagag

SEQ ID NO: 64600 - DNA, 120 bp, Artificial Sequence
  ENSG00000074201_7 (sequence is synthesized)
aacttggtgcctcttccactctggagtgaagttaatgaaagtctttttccttttccaaaacccaacctgaaccagttctttcttgagacagactatactgagacaacaagttgtcaccag

SEQ ID NO: 64601 - DNA, 120 bp, Artificial Sequence
  ENSG00000074201_8 (sequence is synthesized)
cagaagatagataatatgacctttattaacttgatgaattaacttaaccaagagggtatttgtagtttactatttaccctaaaactttctgtgtctgggtaccctctgagtaggcctata

SEQ ID NO: 64602 - DNA, 120 bp, Artificial Sequence
  ENSG00000074201_9 (sequence is synthesized)
attcctaccttgactgtgtgcatcatttgtaagctagcagatctatgtggtgaaaatgcacaggagcttggtagactgcgggggaaagagagagctcctttcgccatgttttaccagtct

SEQ ID NO: 64603 - DNA, 120 bp, Artificial Sequence
  ENSG00000074201_10 (sequence is synthesized)
gctgttataacctcttaggttgtatcctttaatttccagccttttaggttagtttctgtaacagaacaagtgagtctgggatgaagtcctcaaagtacttcaaatggtaattgttttgtt

SEQ ID NO: 64604 - DNA, 120 bp, Artificial Sequence
  ENSG00000074201_11 (sequence is synthesized)
tttgtaatagcttaacaaataaacctaggttttctatattactttgctctcattcttgactaaaaccattaatgagaaatgttttttaaaaaataatgctggcaaatatgagaattttgt

SEQ ID NO: 64605 - DNA, 120 bp, Artificial Sequence
  ENSG00000074201_12 (sequence is synthesized)
atttcaggggatttctgccacttccttttagatcagcagtaatttcttatatttatcaactctcaatttttagttttcatagatacctgggtattataaggctgatttgtaattactgat

SEQ ID NO: 64606 - DNA, 120 bp, Artificial Sequence
  ENSG00000074201_13 (sequence is synthesized)
ttatacttggacttttgaaatcattatgtgtccttaaaaataaggttatacaagctaaccttcttaacaggatcacatggctaattagtgactaaactgatgtttggtaccactcagccc

SEQ ID NO: 64607 - DNA, 120 bp, Artificial Sequence
  ENSG00000074201_14 (sequence is synthesized)
agtgttcatttcagcactgtcacttggtttcccttatcttgcaaggtagactgaaaaaaaacgaattttcctttttctaaccagactctcagaatttctgagtctgttaacaataggcaa

SEQ ID NO: 64608 - DNA, 120 bp, Artificial Sequence
  ENSG00000074201_15 (sequence is synthesized)
gtaaaacagccacttgaaatggaaactaaaatttactgagacctctgtactagccactgtcctgagttctttattatgtattataatattcttaattatcttatgagatacgcttttatc

SEQ ID NO: 64609 - DNA, 120 bp, Artificial Sequence
  ENSG00000074201_16 (sequence is synthesized)
ccactttatagttgaggaaactgagttatagagagaggtaaaataacttgcttaaggtcatgtagatagtgaattgtgatttttgagcctgtgctttaaaacatcatacagccttaccac

SEQ ID NO: 64610 - DNA, 120 bp, Artificial Sequence
  ENSG00000074201_17 (sequence is synthesized)
ctaccagcagcagaaagcatgcacactctccccactgctgcagggtttcagtgttaacatttcaatggccagtacaagagcttccccagtttctctgctacccatctgagcaacacccat

SEQ ID NO: 64611 - DNA, 120 bp, Artificial Sequence
  ENSG00000074201_18 (sequence is synthesized)
aattctatcctagaagtttgtccattcttcagtaatcagtcaggacattctcacaggctaatattagaaattccatttgagttccttttaaaaggaacaaatttataattgtgactttcc

SEQ ID NO: 64612 - DNA, 120 bp, Artificial Sequence
  ENSG00000074201_19 (sequence is synthesized)
atgaacataaattgctctgatagcaaaatgtcgagaagattcagagtgtacttggtttcttgttggtgttgctgtggtcaatgcaatatgcaaaaaggcaggagaccaaagcatgtgggc

SEQ ID NO: 64613 - DNA, 120 bp, Artificial Sequence
  ENSG00000074201_20 (sequence is synthesized)
acctctctgggcttatttcctcattagactaagtgactttcaaagattgagctgtaacattcactagatagttagaaccgtagcattgagaaaatagaagctgagaaaaaagagcaggtc

SEQ ID NO: 64614 - DNA, 120 bp, Artificial Sequence
  ENSG00000074201_21 (sequence is synthesized)
aggcttttaaaagataaaatttataatgatcagccagacaatatttattgatttcatttgagcctaattttagggttgctggaattgttttctttgtgtgttcctgatgtagagacactt

SEQ ID NO: 64615 - DNA, 120 bp, Artificial Sequence
  ENSG00000074201_22 (sequence is synthesized)
taaaggtacatagacatttcccctccaaaatgtaagtcatctaaatgttcctaaaagctagggttaatggttctctgttctaggttcttcatttaaaaaatgtattcattaagatatggt

SEQ ID NO: 64616 - DNA, 120 bp, Artificial Sequence
  ENSG00000074201_23 (sequence is synthesized)
ttactgctattgtgaaaactgtataacattgcttcttatactgaccatgaattgtgatactggacctgtgctttcttctcacatcctgccagtggaactatcagaaaataacctcttaga

SEQ ID NO: 64617 - DNA, 120 bp, Artificial Sequence
  ENSG00000074201_24 (sequence is synthesized)
atgggatggaggtggataccacaccaacagttgctggacagtttgaggatgcagatgttgatcactgaaaatgatttatgcaagtttaagaaggagtatctgggcctttcagcttctaca

SEQ ID NO: 64618 - DNA, 120 bp, Artificial Sequence
  ENSG00000074201_25 (sequence is synthesized)
cgctgtgcagatgctcacagtaccccagaagtcctcatgctagagatgtaaaaaggcatattcctataagaaaaacagccatgaaacagaagtcatgagacatcaatcaatatatgtaag

SEQ ID NO: 64619 - DNA, 120 bp, Artificial Sequence
  ENSG00000074201_26 (sequence is synthesized)
gcaggaagggggcttccaggtcataggaaaaaggaggaaaaaaatgtactggggaacaagacaagatcaatcagactctgccactcttctgctgatccagctcaactatgatcttttttg

SEQ ID NO: 64620 - DNA, 120 bp, Artificial Sequence
  ENSG00000074201_27 (sequence is synthesized)
caggacagaagattcaataagagattatgaaggtatacacacacccaccaaagcaagagagagattttaagaaattggcccacgtgactgaaggctggcaagtccaaaatctgcatggta

SEQ ID NO: 64621 - DNA, 120 bp, Artificial Sequence
  ENSG00000074201_28 (sequence is synthesized)
aaaaaaggtaaacatatattcccacaaaatatagcagtctaagcctctaaacagtacaaatgaggacagtgtagcagtttatgctcataaaaagatgaaatctacataagatgttatgat

SEQ ID NO: 64622 - DNA, 120 bp, Artificial Sequence
  ENSG00000074201_29 (sequence is synthesized)
gctgttagactgatttcttgattgtccctgtgtctgtgagtcaccacacttaagatgcaaacttctggttggcactgtgtgtcttcattgccaagggcagaaggagtatctgggcctttc

SEQ ID NO: 64623 - DNA, 120 bp, Artificial Sequence
  ENSG00000074201_30 (sequence is synthesized)
agcttctacagtggaaggacgctgccgctgtgcagatgctcacagtaccccaggtaagaaggatgcttagatgctggattgcaaaaaatgtacagctgtctactacaaccccaaatcttt

SEQ ID NO: 64624 - DNA, 120 bp, Artificial Sequence
  ENSG00000074201_31 (sequence is synthesized)
acctattaatatcaaaggttgtgaatgtagtgagaatattgtagacactctgtcatctgggtatattttgtgagtggactctggttagttttactgattggtgctgttgacttaatctca

SEQ ID NO: 64625 - DNA, 120 bp, Artificial Sequence
  ENSG00000074201_32 (sequence is synthesized)
cctgctggatggcagaggagttatggcagttttaaagtggaagatctcaggatggctggaaagagccctatcagctgagagcagtcttcacccttcaccctgatgccagcagtcttacca

SEQ ID NO: 64626 - DNA, 120 bp, Artificial Sequence
  ENSG00000074201_33 (sequence is synthesized)
tggaaaatcccacgagccatgaagagattgcaatgatctctcataatgaactcttattattttatgacttgtcttttgcttcaaccgctttcaagattgatcttacaatttggcagattt

SEQ ID NO: 64627 - DNA, 120 bp, Artificial Sequence
  ENSG00000074201_34 (sequence is synthesized)
tgtaaatactgtggcgttttgtgtacccattaaatttatttgcactgatggttacttttattacaaaaaaagattggttacagtttaatttccttgttcagtggaggcaatgttcactgc

SEQ ID NO: 64628 - DNA, 120 bp, Artificial Sequence
  ENSG00000074201_35 (sequence is synthesized)
tatgcaagtttaaggtgagtagttcattttctcccttgtcgctgatcatgaaaatcatatgaaatgattactttctactttttaaaattctttcttgagacagggtcttactctgtcacc

SEQ ID NO: 64629 - DNA, 120 bp, Artificial Sequence
  ENSG00000074211_0 (sequence is synthesized)
ggcggcccgcgcccctgctaggctgcggcggcatggcccgcgcgcccggcgcgacctctgcggattgcatcggtgtgtggcggcggggcatgcccagagcaccgggcacggccttcaatg

SEQ ID NO: 64630 - DNA, 120 bp, Artificial Sequence
  ENSG00000074211_1 (sequence is synthesized)
cccagagcaccgggcacggccttcaatgggcgaggacacggacacgcggaaaattaaccacagcttcctgcgggaccacagctatgtgactgaagctgacatcatctctaccgttgagtt

SEQ ID NO: 64631 - DNA, 120 bp, Artificial Sequence
  ENSG00000074211_2 (sequence is synthesized)
caaccacacgggagagctgctggccacaggtgacaagggcggccgggtcgtcatcttccagcgggaaccagagagtaaaaatgcgccccacagccagggcgaatacgacgtgtacagcac

SEQ ID NO: 64632 - DNA, 120 bp, Artificial Sequence
  ENSG00000074211_3 (sequence is synthesized)
tttccagagccacgagccggagtttgactatctcaagagcctggagatagaggagaagatcaacaagatcaagtggctcccacagcagaacgccgcccactcactcctgtccaccaacga

SEQ ID NO: 64633 - DNA, 120 bp, Artificial Sequence
  ENSG00000074211_4 (sequence is synthesized)
taaaactatcaaattatggaagattaccgaacgagataaaaggcccgaaggatacaacctgaaggatgaagaggggaaacttaaggacctgtccacggtgacgtcactgcaggtgccagt

SEQ ID NO: 64634 - DNA, 120 bp, Artificial Sequence
  ENSG00000074211_5 (sequence is synthesized)
gctgaagcccatggatctgatggtggaggtgagccctcggaggatctttgccaatggccacacctaccacatcaactccatctccgtcaacagtgactgcgagacctacatgtcggcgga

SEQ ID NO: 64635 - DNA, 120 bp, Artificial Sequence
  ENSG00000074211_6 (sequence is synthesized)
tgacctgcgcatcaacctctggcacctggccatcaccgacaggagcttcaacatcgtggacatcaagccggccaacatggaggaccttacggaggtgatcacagcatctgagttccatcc

SEQ ID NO: 64636 - DNA, 120 bp, Artificial Sequence
  ENSG00000074211_7 (sequence is synthesized)
gcaccactgcaacctcttcgtctacagcagcagcaagggctccctgcggctctgcgacatgcgggcagctgccctgtgtgacaagcattccaagctctttgaagagcctgaggaccccag

SEQ ID NO: 64637 - DNA, 120 bp, Artificial Sequence
  ENSG00000074211_8 (sequence is synthesized)
taaccgctcattcttctcggaaatcatctcctccgtgtccgacgtgaagttcagccacagcggccgctacatgctcacccgggactaccttacagtcaaggtctgggacctgaacatgga

SEQ ID NO: 64638 - DNA, 120 bp, Artificial Sequence
  ENSG00000074211_9 (sequence is synthesized)
ggcaagacccatagagacctaccaggtccatgactaccttcggagcaagctctgttccctgtacgagaacgactgcattttcgacaagtttgaatgtgcctggaacgggagcgacagcgt

SEQ ID NO: 64639 - DNA, 120 bp, Artificial Sequence
  ENSG00000074211_10 (sequence is synthesized)
catcatgaccggggcctacaacaacttcttccgcatgttcgatcggaacaccaagcgggacgtgaccctggaggcctcgagggaaagcagcaagccccgggctgtgctcaagccacggcg

SEQ ID NO: 64640 - DNA, 120 bp, Artificial Sequence
  ENSG00000074211_11 (sequence is synthesized)
cgtgtgcgtggggggcaagcgccggcgtgatgacatcagtgtggacagcttggacttcaccaagaagatcctgcacacggcctggcacccggctgagaacatcattgccatcgccgccac

SEQ ID NO: 64641 - DNA, 120 bp, Artificial Sequence
  ENSG00000074211_12 (sequence is synthesized)
caacaacctgtacatcttccaggacaaggtaaactctgacatgcactaggtatgtgcagttcccggcccctgccacccagcctcatgcaagtcatccccgacatgaccttcacgaccgca

SEQ ID NO: 64642 - DNA, 120 bp, Artificial Sequence
  ENSG00000074211_13 (sequence is synthesized)
atgcaaggaggggaagaaagtcacagcactgatgaggacagctgcagaggtggcagtgtgtggacacaggaagtttgggccccctccctgccccagctttcctaggccagaattgtgttt

SEQ ID NO: 64643 - DNA, 120 bp, Artificial Sequence
  ENSG00000074211_14 (sequence is synthesized)
ggcagtaattgtctgtttaaaaaaataaaaaggaaaggaagcgttcaccgccacaaatcataaaatggacatgactgtggagtcttacagttcagggttctttcattcacgtcccttcct

SEQ ID NO: 64644 - DNA, 120 bp, Artificial Sequence
  ENSG00000074211_15 (sequence is synthesized)
gtctcggtctgcggtctttaccacatcaataggactttttatgcgtccgggttaatttttcactccagtgcgtcctgttgcagggaccggagctgatgggagctgcttctcccccatgcc

SEQ ID NO: 64645 - DNA, 120 bp, Artificial Sequence
  ENSG00000074211_16 (sequence is synthesized)
cagatcagggctccagggacagatgatgagtctcaaacgagccagccaggggttcttttggttataaatggggcaattcgccctgtctcagagctgatgacctcaccgttgttttttgga

SEQ ID NO: 64646 - DNA, 120 bp, Artificial Sequence
  ENSG00000074211_17 (sequence is synthesized)
tggtgaattcatgctgagaatttgcagatgcaagctcctctcctaggtcttctgaatgtcttgaaacatcccaggtcccaggtctggtgcggtttcccgagaggagcggagtggggtttg

SEQ ID NO: 64647 - DNA, 120 bp, Artificial Sequence
  ENSG00000074211_18 (sequence is synthesized)
tcttctgtgtgcctgtgtcctcatctgattcacctgccatttgctgagcctctgctgtgtaccaggcgtggtgctcagccctagaggcagttgacttaccctctgcagccctccctgccg

SEQ ID NO: 64648 - DNA, 120 bp, Artificial Sequence
  ENSG00000074211_19 (sequence is synthesized)
cctcacccttcagcattcactgggcaccttcccggagcggacactgactcccatgcacgattttttggaatcttcctcctgactgtgaggtgggtgttcattcatttcctccataaacac

SEQ ID NO: 64649 - DNA, 120 bp, Artificial Sequence
  ENSG00000074211_20 (sequence is synthesized)
caacttctcgaagcgtgccaggctctgggctggatgctggggataagcgggaacccttaggatcccctctgtccacgagaagaagctgaggctctgagcggatgcacaggtcacccatgg

SEQ ID NO: 64650 - DNA, 120 bp, Artificial Sequence
  ENSG00000074211_21 (sequence is synthesized)
caggtgccgtgcagtggtgtcaggaacccgtccgggtcttcacacaaggttctctccagtccatctcgtgggcggctcatgttagagcgacattcaaatggaaggtttggaaaggaatgc

SEQ ID NO: 64651 - DNA, 120 bp, Artificial Sequence
  ENSG00000074211_22 (sequence is synthesized)
ctctgtcttgtgaagtaggacatggcagacttggcgacgacaagggtccaggagaactgagacgcaggatggaagacagagaagaccccccggagctcctcgctctgcttggtggcttca

SEQ ID NO: 64652 - DNA, 120 bp, Artificial Sequence
  ENSG00000074211_23 (sequence is synthesized)
ggagtgtggccctccccaggactccacttcatcctgggcttgcaccctccttgagccaatgcactgaactgcctttgaaaggaaattgcatgttctgaccattttaggatacctttactt

SEQ ID NO: 64653 - DNA, 120 bp, Artificial Sequence
  ENSG00000074211_24 (sequence is synthesized)
taaggaccacacagtcccagaggacacatccctcgggaactctgcccctctgacaatgagggccacagagaaggtggtgtttccatggtagatgctcctgttctggtgataccaaacctg

SEQ ID NO: 64654 - DNA, 120 bp, Artificial Sequence
  ENSG00000074211_25 (sequence is synthesized)
cccacccctctgagtcgtctttgctcatggacttgcagcagagccacgtagtttggcattttgattcagaaagtggggagcagagacccagccaaatccaaactttttttttggttttgt

SEQ ID NO: 64655 - DNA, 120 bp, Artificial Sequence
  ENSG00000074211_26 (sequence is synthesized)
tttgttttgttttttacaagatataacataacccaggaaacagacccagctgaggttattctcagtggattacagtatacttttgtgtgtgtaaaagcacaaagtgcatgtgtactcact

SEQ ID NO: 64656 - DNA, 120 bp, Artificial Sequence
  ENSG00000074211_27 (sequence is synthesized)
tctggccatataacatttacacagggaaatggatcattgatttttttttaatcaacgtgaatgaagaatgtttgtttatatatcactataaaatccagttgacctggacagtattatatg

SEQ ID NO: 64657 - DNA, 120 bp, Artificial Sequence
  ENSG00000074211_28 (sequence is synthesized)
tacatatctattctaattaaatttaacaatcaaaggattggattacttttttcccccttgtaaagaggttcgagaatgtggtcaattgtatagatagcgtgttaaagccaaaacccagct

SEQ ID NO: 64658 - DNA, 120 bp, Artificial Sequence
  ENSG00000074211_29 (sequence is synthesized)
ctgagggccttacccattacttggatatttgctacgatccatctccctttgtgagtcaaatgttaagagaagaaacttgtatttgcagctagaggttactgtcacatcatagatttaaca

SEQ ID NO: 64659 - DNA, 120 bp, Artificial Sequence
  ENSG00000074211_30 (sequence is synthesized)
tttaccatcttcaaagtacaaatcttacatgtccttcaaaaggaggtcttaatacagttcctagttccttacttctgttttaaactttgggtaccaaaccaaaaagaagaaaaaagaaag

SEQ ID NO: 64660 - DNA, 120 bp, Artificial Sequence
  ENSG00000074211_31 (sequence is synthesized)
gaaaagatcttctttgaagaaaagtatgtctctggatccctggaaaataatgatgtccaaagcaaattgtgaagatcaaatgtgtgttaagaaaaggtgtcgaggggagggacaaaacca

SEQ ID NO: 64661 - DNA, 120 bp, Artificial Sequence
  ENSG00000074211_32 (sequence is synthesized)
gaaacggtggaaggaccagtgtaatagtcacagacttgcatcctggctctgcttacatttcctggtactctcgaatgtacgggcgttcacatagtcattgtgaagttgttggggtttttt

SEQ ID NO: 64662 - DNA, 120 bp, Artificial Sequence
  ENSG00000074211_33 (sequence is synthesized)
tggttttgtttttaatttagctcttctctgaggacgaagctgttggtggtggtggtggtgggggtggtggtgtgggatacatggtggtcaagttgtcagccctgatcagtttggactctg

SEQ ID NO: 64663 - DNA, 120 bp, Artificial Sequence
  ENSG00000074211_34 (sequence is synthesized)
taactcataggtgcattctttttttctttggtgtctcacaaattacccaattgttgaataaaactataaatatgttaataccagctttttccaataaaataacaaatgttacatcaaaaa

SEQ ID NO: 64664 - DNA, 120 bp, Artificial Sequence
  ENSG00000074211_35 (sequence is synthesized)
ataatccattgccagatcctcctgggaggcccgcctgcccgggcccctccctgtcctccagaggcagggtccctgagtgggagggagaaggcggctggtttggggctggcctttttattc

SEQ ID NO: 64665 - DNA, 120 bp, Artificial Sequence
  ENSG00000074211_36 (sequence is synthesized)
ctgctgacatcatctctaccgttgagttcaaccacacgggagagctgctggccacaggtgacaagggcggccgggtcgtcatcttccagcgggaaccagagaactctgggtaagacagca

SEQ ID NO: 64666 - DNA, 120 bp, Artificial Sequence
  ENSG00000074211_37 (sequence is synthesized)
ttgcttctggtttactctgcactgctcacctccgagggccagatccacacccctgtgacagatgcggaaactcagagaagccacccagctagtgaacagcagacctggctgcccgacgcc

SEQ ID NO: 64667 - DNA, 120 bp, Artificial Sequence
  ENSG00000074211_38 (sequence is synthesized)
aggacagtggccagcaacgtcacacaccacccggcctcagagagggcgtctccccccgcaaacacggactgtgcctggaattagatgcagaagacatccaggaaaccaaggaggagggag

SEQ ID NO: 64668 - DNA, 120 bp, Artificial Sequence
  ENSG00000074211_39 (sequence is synthesized)
atcattcaaaggattcctgcggtggtgcagagctgcggcaaagggccctcgcccgtggggttcactctcatcacccagaagcagggagaagggcctgcggctgcaggcctggctgccaca

SEQ ID NO: 64669 - DNA, 120 bp, Artificial Sequence
  ENSG00000074211_40 (sequence is synthesized)
ccggcctccagacaacacacagcagaagtaaaatagaaagaagaccttttttgaaatgacctgtgttagtcacctctctcaggatgcgtgaggcggacacgttgaggccacctcagctga

SEQ ID NO: 64670 - DNA, 120 bp, Artificial Sequence
  ENSG00000074211_41 (sequence is synthesized)
atgtgttttgggggaaacagagagaaaggtgtggcctctccacttctgtggacaccccaaataggaagaagggtgcacacaaagcaccgcttcctccacgaagccctcctcaggcacatc

SEQ ID NO: 64671 - DNA, 120 bp, Artificial Sequence
  ENSG00000074211_42 (sequence is synthesized)
gaggagaaccagctgcccaagctcttggctgctgcccttctgaggcctgcctgatttgggccacatagatctggttttggccattgactggcaacatggcagtagccaactgcagagcca

SEQ ID NO: 64672 - DNA, 120 bp, Artificial Sequence
  ENSG00000074211_43 (sequence is synthesized)
atcctcgtgggtgtgcgttgtctcattgtgactttgatttggatttccctaatgactcatcacgttgagcaacctttcctgtgcatgctgaccattcggtgaaatctgacatcatctcta

SEQ ID NO: 64673 - DNA, 120 bp, Artificial Sequence
  ENSG00000074211_44 (sequence is synthesized)
gagggagcctccatctcctctgctgccaaatggaaatcacagtagtgtctcccgcaggggctggcgtgaggttaaaggaggtagcagatatgaaaatgacatataaattgtaaattgccc

SEQ ID NO: 64674 - DNA, 120 bp, Artificial Sequence
  ENSG00000074211_45 (sequence is synthesized)
acagacattagtgtgtgttgcctggtaaccacccagcatttgtggactgcatttacttgggatagcaatagttatattggcattttaatttaatagcattgttatgttcccatcataaaa

SEQ ID NO: 64675 - DNA, 120 bp, Artificial Sequence
  ENSG00000074211_46 (sequence is synthesized)
ataatatacactgtgtgtatgcccaccctcatcaaattatatacattaagtatgtgcagcgttttatatattgattgtacctcaatacagctattaaaaaatgatgtaacttcattatag

SEQ ID NO: 64676 - DNA, 120 bp, Artificial Sequence
  ENSG00000074211_47 (sequence is synthesized)
aaaatctagaaaatatggacaagttgaaagaggaggaaatattattttgttccagctaccctaaagctacctccgttcacattttggagaattctcttccagcttttttccccactgccc

SEQ ID NO: 64677 - DNA, 120 bp, Artificial Sequence
  ENSG00000074211_48 (sequence is synthesized)
agtttctttgcttatttcacatggctataatcactgatgtagatcattacaagcattttatacccaattttatatcccgttccttcaccctcagggggttttaatatgaaatagcaagaa

SEQ ID NO: 64678 - DNA, 120 bp, Artificial Sequence
  ENSG00000074211_49 (sequence is synthesized)
ccagcgccccatcggggaccctagcacagctgggctgggtggttctggcttctgcccagatgtgtctgggtgtccctgggccagggcaggctgccccacggagggacaatgtcaggacag

SEQ ID NO: 64679 - DNA, 120 bp, Artificial Sequence
  ENSG00000074211_50 (sequence is synthesized)
ctgggacctgaccctgttctgactccatgcccggtgggcgtttccgtgttcccacagagctgcttttcttatcttgtctttttaagttcagtgacatgtgcatctgtcttgatggatgga

SEQ ID NO: 64680 - DNA, 120 bp, Artificial Sequence
  ENSG00000074211_51 (sequence is synthesized)
tggatacgtccagcccgtcatcccacttctaaccaccctctctcaatcttttctgttgcctcaaagctggcattgactcatggctcagaaggccagggcaggccaggagctgtcctaaaa

SEQ ID NO: 64681 - DNA, 120 bp, Artificial Sequence
  ENSG00000074211_52 (sequence is synthesized)
ggcccagactggaaaaagaaaaggcatttcttggatagatatctctggcctggctactgcatacaggcaccatttgaagccgtgaattaagcctgaggctcctgccctcatgaagtttac

SEQ ID NO: 64682 - DNA, 120 bp, Artificial Sequence
  ENSG00000074211_53 (sequence is synthesized)
gttctggccaggaagagagcctacagatgataaaagcctttacagaaagaaaaacatcagattaggttggggcagggatggtcagggtgtcctgtatgagggtgctggggtgcagacagc

SEQ ID NO: 64683 - DNA, 120 bp, Artificial Sequence
  ENSG00000074211_54 (sequence is synthesized)
agtttcagcaaggtgatccaagctgtgctcacgggaaggcagcagtggggcagaattggaagaataggaaggagccatgctggtacccagggaaagccactgcaggccgagagagcaggt

SEQ ID NO: 64684 - DNA, 120 bp, Artificial Sequence
  ENSG00000074211_55 (sequence is synthesized)
cttgggacagcaggtggccaggacttttgggaaagggcaaggagcctggtgtttggaggggaataagcaggtggagagcagtagatgaggctggggaaggggaggaggtaccttttgctg

SEQ ID NO: 64685 - DNA, 120 bp, Artificial Sequence
  ENSG00000074211_56 (sequence is synthesized)
agttaaaaacacgagaccccgtgcatacaacagtaaatgttttcatcatcttgcatctgcgattctgtggtctgggcttggctgggcttgccctgctctgtgggtcagtggggccctgct

SEQ ID NO: 64686 - DNA, 120 bp, Artificial Sequence
  ENSG00000074211_57 (sequence is synthesized)
ggaggctgggcttggccgggggttgggggggttcttctgcacccactcttcctcctccccctcaggggccagtgggccagcctgcgcaggtcctgctcctggtaccgccagaggcgttga

SEQ ID NO: 64687 - DNA, 120 bp, Artificial Sequence
  ENSG00000074211_58 (sequence is synthesized)
tggcaacccccagtacctaagcccctttgcatctctgtttgcggcttgtcgaattgccgttctgcaggccaaagcaaaacacagggacaagcccagaatcaaggtggggggcagagaaca

SEQ ID NO: 64688 - DNA, 120 bp, Artificial Sequence
  ENSG00000074211_59 (sequence is synthesized)
ggtcacctggcccaccatgggaggggtgaaggtttggctccagatgcggcccacctgggcctcggcaggtgggggctgcctttagaacactctgtgcttttctctgagtacacaatggga

SEQ ID NO: 64689 - DNA, 120 bp, Artificial Sequence
  ENSG00000074211_60 (sequence is synthesized)
gccgctggagggttttgagcaggggagtgccaggatcagtcctgggtgttaccagcctctctgctgccagtctgttgaggctacgtcatagccagggagaaagagctgtggcagtcatcc

SEQ ID NO: 64690 - DNA, 120 bp, Artificial Sequence
  ENSG00000074211_61 (sequence is synthesized)
tagccagggagaaagagctgtggcagtcatccagtgagaggtgggagagtggctggcatcccgatatgctgtgaaggctgagcaggcaggattggatgtggggtgtgtgtgtgtgtgtgt

SEQ ID NO: 64691 - DNA, 120 bp, Artificial Sequence
  ENSG00000074211_62 (sequence is synthesized)
ctgagactggggaagctgcagaggatgaggctgaggagggatcagaattcagttatggtgaccaatgaagggttttgaatagagggacacagggatgcactggctcaggagtttggtcat

SEQ ID NO: 64692 - DNA, 120 bp, Artificial Sequence
  ENSG00000074211_63 (sequence is synthesized)
cacgttggccgccagagggagaacagaggctgggacagggaaccctgtggagtgtcctctctgtggctacagggagcaacggtcagatctgtggctggtttgaaagtagatccattttgc

SEQ ID NO: 64693 - DNA, 120 bp, Artificial Sequence
  ENSG00000074211_64 (sequence is synthesized)
taaaggtggtatcacagattttggagactacagaatccaggccaggagagcaaagaacgacagaggtcccattcacagcagcgggccatcccgggctcctactagcttttgctgcttggg

SEQ ID NO: 64694 - DNA, 120 bp, Artificial Sequence
  ENSG00000074211_65 (sequence is synthesized)
cctatggggatggtattctagaactttccatcttccaagacatactggaaatgtggatttttataggaaatcttctacttttcaaatattaagaatgacttcaaattaaaagtaataatc

SEQ ID NO: 64695 - DNA, 120 bp, Artificial Sequence
  ENSG00000074211_66 (sequence is synthesized)
attttggggctgcagtaaaacttgttggtggagcaggcctcaggcttcaggttggtgagctgtcctccagtgggggtttctcttccaggctagggccttgtcctcccctgctctccccca

SEQ ID NO: 64696 - DNA, 120 bp, Artificial Sequence
  ENSG00000074211_67 (sequence is synthesized)
ctcccagggctggccacccagaatgtgcaggccactcatctctgtgactcgtagaacctgagaatgttggtgatggaaggggtgttcccctagttcccacatgcaaaaagtggggcctgg

SEQ ID NO: 64697 - DNA, 120 bp, Artificial Sequence
  ENSG00000074211_68 (sequence is synthesized)
agatggggctgtcttttttctccaaacacttgcccatccaggaaggccagccctgggcattgaagactccaggtatgggggtgactccataaggagaggttcctgagtgacctgaagaaa

SEQ ID NO: 64698 - DNA, 120 bp, Artificial Sequence
  ENSG00000074211_69 (sequence is synthesized)
catggttgggatgaagtgcagggagggtcagggcaggcagggctgagcttcgcttctgcgagcagagattagagagcgatcccagaggcctgcctggaggtggggccacagagcaggagt

SEQ ID NO: 64699 - DNA, 120 bp, Artificial Sequence
  ENSG00000074211_70 (sequence is synthesized)
ctgaaggagagggggtaattcacctctgtcctactgtgtgggaagccctgagtgggcccctagcagagggttgccttgcgcttatctatggagatattgggaagggcttccctgacccag

SEQ ID NO: 64700 - DNA, 120 bp, Artificial Sequence
  ENSG00000074211_71 (sequence is synthesized)
gttgctggagcatgggggcctgggtggcaggggtaggtgtgggagattcaagacaggaggatgaggccacatccaggtggcttcagataccaccgtgagtcccatagagtgtccagttac

SEQ ID NO: 64701 - DNA, 120 bp, Artificial Sequence
  ENSG00000074211_72 (sequence is synthesized)
tataaagtctgccagccactgtggtcgccccaggcctgtgccaagtcccgagatctctgccctgcagccagtgcagagggaagaggagggcaggaggggacaggttggtggcccctcgcc

SEQ ID NO: 64702 - DNA, 120 bp, Artificial Sequence
  ENSG00000074211_73 (sequence is synthesized)
gatgctcctgacccctcaggctccctgctgcctcctgcccagggctgtggggcctcggggagcggggagctcgccattgctgtggcactgttgagcacccgggagaggcgggttctgaca

SEQ ID NO: 64703 - DNA, 120 bp, Artificial Sequence
  ENSG00000074219_0 (sequence is synthesized)
cccacttttcccaaacaaagctcccggcaactttctccctcgcagcgccccgcccgcccgcggctccccagccccaggccgggaggcccagatgggggaaccccgggctggggccgccct

SEQ ID NO: 64704 - DNA, 120 bp, Artificial Sequence
  ENSG00000074219_1 (sequence is synthesized)
ggacgatggcagcggctggacgggcagtgaggaaggcagtgaggagggtaccggcggcagtgagggggctgggggtgacgggggcccggatgcagagggggtgtggagcccagacattga

SEQ ID NO: 64705 - DNA, 120 bp, Artificial Sequence
  ENSG00000074219_2 (sequence is synthesized)
gcagagcttccaggaggccctggccatctatccaccctgcggccgccggaaaataattttgtctgatgaaggcaagatgtatggtcggaatgaactgatcgcccgctacatcaagctgag

SEQ ID NO: 64706 - DNA, 120 bp, Artificial Sequence
  ENSG00000074219_3 (sequence is synthesized)
aacggggaagacccgaactcgaaaacaggtttctagtcacatccaggttttggcccgaaggaaatcaagggaaatccagtccaagttgaaggaccaggtttccaaggacaaggctttcca

SEQ ID NO: 64707 - DNA, 120 bp, Artificial Sequence
  ENSG00000074219_4 (sequence is synthesized)
gacaatggcaaccatgtcctctgcccagctcatctccgcgccttctctgcaggccaaactgggtcccactggtcctcaggcctctgagcttttccagttttggtctggaggatctgggcc

SEQ ID NO: 64708 - DNA, 120 bp, Artificial Sequence
  ENSG00000074219_5 (sequence is synthesized)
cccctggaatgttccagatgtgaagccattctcacagacaccgttcaccttgtcactgactcccccatctactgacctcccagggtacgagcccccccaagccctctcacccctgccccc

SEQ ID NO: 64709 - DNA, 120 bp, Artificial Sequence
  ENSG00000074219_6 (sequence is synthesized)
acctaccccatcgcccccagcctggcaggctcggggcctgggcaccgcccggttgcagctggtagagttctcagccttcgtggaaccgccagatgcagttgattcttaccagaggcacct

SEQ ID NO: 64710 - DNA, 120 bp, Artificial Sequence
  ENSG00000074219_7 (sequence is synthesized)
gttcgtgcacatcagccagcactgccccagccccggagcgccgccgctcgagagtgtggacgtccggcagatctacgacaaattccctgagaaaaagggtggcctccgagagctatatga

SEQ ID NO: 64711 - DNA, 120 bp, Artificial Sequence
  ENSG00000074219_8 (sequence is synthesized)
tcgtggccccccccatgccttcttcctggtcaagttctgggcggacctgaactggggcccaagtggtgaggaggcaggggccggtggcagcatcagcagtggtggcttctacggagtgag

SEQ ID NO: 64712 - DNA, 120 bp, Artificial Sequence
  ENSG00000074219_9 (sequence is synthesized)
cagtatgagagcctggaacacatgaccctcacctgttcctccaaggtctgctcttttggcaagcaggtggtggagaaggtggagacggaacgggcccagctggaggacggcagatttgtg

SEQ ID NO: 64713 - DNA, 120 bp, Artificial Sequence
  ENSG00000074219_10 (sequence is synthesized)
taccgcctgctgcgctcgcccatgtgcgagtacctggtgaatttcttgcacaagttgcggcagctgcctgagcgatacatgatgaacagcgtcctggaaaacttcaccatcctccaggtg

SEQ ID NO: 64714 - DNA, 120 bp, Artificial Sequence
  ENSG00000074219_11 (sequence is synthesized)
gtgacaaacagagacacccaggaactgctgctctgcaccgcctatgtcttcgaggtctccaccagcgagcgtggggcccagcatcacatttaccgcctggtcagggactgaagggggacc

SEQ ID NO: 64715 - DNA, 120 bp, Artificial Sequence
  ENSG00000074219_12 (sequence is synthesized)
ccaaaactggctcaccccccagaacaccctcctcccagggagggtcctccagctcacctcatgcttcttatttggggagagggctgtgatgtaaaggggttgacctcagaggcctaagca

SEQ ID NO: 64716 - DNA, 120 bp, Artificial Sequence
  ENSG00000074219_13 (sequence is synthesized)
actggggccatcccccccattagaggggcccccaaaacttggttggagagctgaacaggctgggactgaggaaaggataaaccccgatattgggacctcacagtgggtgtctgaaaggac

SEQ ID NO: 64717 - DNA, 120 bp, Artificial Sequence
  ENSG00000074219_14 (sequence is synthesized)
agatcactccggagtatcagggattgtggggacaggagtgagacaaccccccaggtacagcactggcttttcttttcagcccctgacaggccacccccactcctctgcatgtcttggaga

SEQ ID NO: 64718 - DNA, 120 bp, Artificial Sequence
  ENSG00000074219_15 (sequence is synthesized)
gcgctagttacacattggcttgtcccctttactttttcccagccacccctccccctgaaatttctgcccctctctaccaccctcactccatgacctgtgagatcacaaagtgaagatgaa

SEQ ID NO: 64719 - DNA, 120 bp, Artificial Sequence
  ENSG00000074219_16 (sequence is synthesized)
ccctttctgtgcaggagcagagccaggtgggccctggacattttttttttttttaatataacgagatatttataagtgggtgctagggtcttgactttatctccgctgcacaagcagtgt

SEQ ID NO: 64720 - DNA, 120 bp, Artificial Sequence
  ENSG00000074219_17 (sequence is synthesized)
gttgaactttctaatctcatccctctcctaagtgagccctgagctagacggtttccttcctcccctctcaaagtttgtttgtttgtgttctgacagaggataaagctattttaccaaaaa

SEQ ID NO: 64721 - DNA, 120 bp, Artificial Sequence
  ENSG00000074219_18 (sequence is synthesized)
cttctcctccctcagactcaggagtccagaccccagccccttctccctcacacccaggagtccaggcctccagcccccgctccctcagacccaggagtccaggccccagatcctcctccc

SEQ ID NO: 64722 - DNA, 120 bp, Artificial Sequence
  ENSG00000074219_19 (sequence is synthesized)
tcagtcctaggagtccgggccccagcccctcctccctcagactcaggagttcaggccccagatcctcctccctcagacccaggaataccccccagctcctcttccctcagacccaggagt

SEQ ID NO: 64723 - DNA, 120 bp, Artificial Sequence
  ENSG00000074219_20 (sequence is synthesized)
ccaggtccccagcccctcctccctcagacccagtggtccagagtcccagccctctcagcttcaagtcccttgagggtggggtttgggggaagcttgctgagttctgtgttcctccaggcc

SEQ ID NO: 64724 - DNA, 120 bp, Artificial Sequence
  ENSG00000074219_21 (sequence is synthesized)
tgatggcagggcgcccctgtcccccagcttgtggttctgtgggtctctcctggtctcggcctcagctgctgccctgagtctctgtccctgccctttctaggcccagatgggggaaccccg

SEQ ID NO: 64725 - DNA, 120 bp, Artificial Sequence
  ENSG00000074219_22 (sequence is synthesized)
ggcctctgagcttttccagttttggtctggaggatctgggcccccctggaatgttccagagaagaaactccttcccagaagccccccagcagatttcccctaacgtctcattggctagga

SEQ ID NO: 64726 - DNA, 120 bp, Artificial Sequence
  ENSG00000074219_23 (sequence is synthesized)
ggacttgtgggcttctgtctgggatgggccggtcttcttagggtcatcctcgcatgggcaggttcaggttcaaggaagaagctgcttcctgtgcgttcatctgtcttctcggcatgtgtg

SEQ ID NO: 64727 - DNA, 120 bp, Artificial Sequence
  ENSG00000074266_0 (sequence is synthesized)
attccacagactttcgctccctagcagcgggtcggagatcgaaggaacgggccaattgcggctgaaacgtctttggaaggaggaagggggtgagggagcatccctttgagtttcgcctct

SEQ ID NO: 64728 - DNA, 120 bp, Artificial Sequence
  ENSG00000074266_1 (sequence is synthesized)
tctcgaggcggtggtgggaagggagacatacttaatactgccctcttaatccaacggaccttacatcgtgtagactgccgggagggcggcgggaaaagggcaagacgggagttggggaag

SEQ ID NO: 64729 - DNA, 120 bp, Artificial Sequence
  ENSG00000074266_2 (sequence is synthesized)
ggaaggagccaggaagccgcgcgggagggcgcgcgcgcgcgcccctttttcagcagtgtggcggggtcgcacgcacgcccgcctcggcggctgggcgcgatttgcgacagtggggggggc

SEQ ID NO: 64730 - DNA, 120 bp, Artificial Sequence
  ENSG00000074266_3 (sequence is synthesized)
ggtggaggtggcggcggcagcggcaactttgcggcaagctcgggccgggcttgcttgacggcggtgtggcggaggccccgccccaggcggcaggaacctggagggaggcggaggaatatg

SEQ ID NO: 64731 - DNA, 120 bp, Artificial Sequence
  ENSG00000074266_4 (sequence is synthesized)
tccgagagggaagtgtcgactgcgccggcgggaacagacatgcctgcggccaagaagcagaagctgagcagtgacgagaacagcaatccagacctctctggagacgagaatgatgacgct

SEQ ID NO: 64732 - DNA, 120 bp, Artificial Sequence
  ENSG00000074266_5 (sequence is synthesized)
gtcagtatagaaagtggtacaaacactgaacgccctgatacacctacaaacacgccaaatgcacctggaaggaaaagttggggaaagggaaaatggaagtcaaagaaatgcaaatattct

SEQ ID NO: 64733 - DNA, 120 bp, Artificial Sequence
  ENSG00000074266_6 (sequence is synthesized)
ttcaaatgtgtaaatagtctcaaggaagatcataaccaaccattgtttggagttcagtttaactggcacagtaaagaaggagatccattagtgtttgcaactgtaggaagcaacagagtt

SEQ ID NO: 64734 - DNA, 120 bp, Artificial Sequence
  ENSG00000074266_7 (sequence is synthesized)
accttgtatgaatgtcattcacaaggagaaatccggttgttgcaatcttacgtggatgctgatgctgatgaaaacttttacacttgtgcatggacctatgatagcaatacgagccatcct

SEQ ID NO: 64735 - DNA, 120 bp, Artificial Sequence
  ENSG00000074266_8 (sequence is synthesized)
ataacaatgcagtgtataaagcactatgttggccatggaaatgctatcaatgagctgaaattccatccaagagatccaaatcttctcctgtcagtaagtaaagatcatgctttacgatta

SEQ ID NO: 64736 - DNA, 120 bp, Artificial Sequence
  ENSG00000074266_9 (sequence is synthesized)
tggaatatccagacggacactctggtggcaatatttggaggcgtagaagggcacagagatgaagttctaagtgctgattatgatcttttgggtgaaaaaataatgtcctgtggtatggat

SEQ ID NO: 64737 - DNA, 120 bp, Artificial Sequence
  ENSG00000074266_10 (sequence is synthesized)
cattctcttaaactttggaggatcaattcaaagagaatgatgaatgcaattaaggaatcttatgattataatccaaataaaactaacaggccatttatttctcagaaaatccattttcct

SEQ ID NO: 64738 - DNA, 120 bp, Artificial Sequence
  ENSG00000074266_11 (sequence is synthesized)
gatttttctaccagagacatacataggaattatgttgattgtgtgcgatggttaggcgatttgatactttctaagtcttgtgaaaatgccattgtgtgctggaaacctggcaagatggaa

SEQ ID NO: 64739 - DNA, 120 bp, Artificial Sequence
  ENSG00000074266_12 (sequence is synthesized)
gatgatatagataaaattaaacccagtgaatctaatgtgactattcttgggcgatttgattacagccagtgtgacatttggtacatgaggttttctatggatttctggcaaaagatgctt

SEQ ID NO: 64740 - DNA, 120 bp, Artificial Sequence
  ENSG00000074266_13 (sequence is synthesized)
gcattgggcaatcaagttggcaaactttatgtttgggatttagaagtagaagatcctcataaagccaaatgtacaacactgactcatcataaatgtggtgctgctattcgacaaaccagt

SEQ ID NO: 64741 - DNA, 120 bp, Artificial Sequence
  ENSG00000074266_14 (sequence is synthesized)
tttagcagggatagcagcattcttatagctgtttgtgatgatgccagtatttggcgctgggatcgacttcgataaaatacttttgcctaatcaaaattagagtgtgtttgttgtctgtgt

SEQ ID NO: 64742 - DNA, 120 bp, Artificial Sequence
  ENSG00000074266_15 (sequence is synthesized)
aaaatagaattaatgtatcttgctagtaagggcacgtagagcatttagagttgtctttcagcattcaatcaggctgagctgaatgtagtgatgtttacattgtttacattctttgtactg

SEQ ID NO: 64743 - DNA, 120 bp, Artificial Sequence
  ENSG00000074266_16 (sequence is synthesized)
tcttcctgctcagactctactgcttttaataaaaatttatttttgtaaagctgtgtgtttagttactttcattgtggtgaaaaaaagttaaaagtaataaaattatgccttatcttttta

SEQ ID NO: 64744 - DNA, 120 bp, Artificial Sequence
  ENSG00000074266_17 (sequence is synthesized)
tgttctttttcctttacaaatctaccctgatgttttgtattgattactttgccctttgatgtcattcatcaaatactttggtgttattcattctacttttgtggctctgcatatgatctg

SEQ ID NO: 64745 - DNA, 120 bp, Artificial Sequence
  ENSG00000074266_18 (sequence is synthesized)
cagtgcttactttaaattaagttggcagttaggtatcaatggtggaaattaggtgtttatgttccataacataaacattatcataacattactaagacttaatgttttagtaattagatt

SEQ ID NO: 64746 - DNA, 120 bp, Artificial Sequence
  ENSG00000074266_19 (sequence is synthesized)
gtcagtctacctatgtaactgtttcctagagaaaaatcaggatagaagacagataaaatactagttacctaaaaatttaaataaatctattgttaggattttctggtaacaaattacttg

SEQ ID NO: 64747 - DNA, 120 bp, Artificial Sequence
  ENSG00000074266_20 (sequence is synthesized)
ggtatttatttctgtaagaaaagtttggaaggctttccacagcatttgctgtatttcttgaaggcagaagaaaaagtaagtaccatgctaacaatgtaaatttgtaaggcccttcataaa

SEQ ID NO: 64748 - DNA, 120 bp, Artificial Sequence
  ENSG00000074266_21 (sequence is synthesized)
gtgatgtattaattgctcttattcatatttacgaatcaggagtataagacccaaagaaatagccaagagcacagaggctggaactgagctttttctgaaacaagaaagctgtctgaggat

SEQ ID NO: 64749 - DNA, 120 bp, Artificial Sequence
  ENSG00000074266_22 (sequence is synthesized)
acccacccccacttaagaaattttaaattcctgtaaggcatcattttcagaaattattgctcaaggcaggactgtagatgtatctttagcagactttggaatgatgtttagttgttcctg

SEQ ID NO: 64750 - DNA, 120 bp, Artificial Sequence
  ENSG00000074266_23 (sequence is synthesized)
gaaagatgactatcttttgaaatagtgtagatatattgactttcatagattattaatgcttaattttaaggactgagtaggtagcttagtatattttcagtgagaaactgatcaggcctt

SEQ ID NO: 64751 - DNA, 120 bp, Artificial Sequence
  ENSG00000074266_24 (sequence is synthesized)
tattattggttagggtacccagaattgaggtgattaattttgggttatatatagtaaaacgcaggaaactacaatgtttataaacaaagtatctatcataggacaaagataaaattggat

SEQ ID NO: 64752 - DNA, 120 bp, Artificial Sequence
  ENSG00000074266_25 (sequence is synthesized)
aataatggagaaaaataaacaaaagtggaatgagactttagctttcaataaatagataaggtggttggttatgtaggaacacagaggaattaatagtcttacattttgtttttccaagtt

SEQ ID NO: 64753 - DNA, 120 bp, Artificial Sequence
  ENSG00000074266_26 (sequence is synthesized)
tgagtttctagcacatgcttttgggggggcctattcaaactatagcacttacctagctaattctacatctgatgtaaacattttaagttgctatgtaatatggattccatttttaggctt

SEQ ID NO: 64754 - DNA, 120 bp, Artificial Sequence
  ENSG00000074266_27 (sequence is synthesized)
tactgtgcataacttacatctagactttagtagtttttctttcacaagatgttgaaagttcacagtaaataaaaaacattcgcctaatttttgtatgtttatactagatcatgctttacg

SEQ ID NO: 64755 - DNA, 120 bp, Artificial Sequence
  ENSG00000074266_28 (sequence is synthesized)
agctgtgaacagtctccatggaactgtttccttataagaaagtgtgtttcatgtagcctgtcaggcagacattcacttacatttgacatagaagattttaatctccagatgaaggaataa

SEQ ID NO: 64756 - DNA, 120 bp, Artificial Sequence
  ENSG00000074266_29 (sequence is synthesized)
aacaagtaaagactatatttatttatttattttttaaattacttgcactgtataccaatccctggagtcttatgagagcagtatgatcttgctcctttccttttaatctaaaatcactaa

SEQ ID NO: 64757 - DNA, 120 bp, Artificial Sequence
  ENSG00000074266_30 (sequence is synthesized)
gttaatgtttgttttgccatttcgcagttattaaagaaaaaaattaaactatgtagccattaaagtgcttttccatcttttgtttgaagttgaaacataacgttttttgctatttggaag

SEQ ID NO: 64758 - DNA, 120 bp, Artificial Sequence
  ENSG00000074266_31 (sequence is synthesized)
tgttttattgtgctcacactgttttaggtaacttatttctagccattctctttgggtggcgtggtataatacaagaccagtttaaagataaataccacctttatattgatgtattgtaat

SEQ ID NO: 64759 - DNA, 120 bp, Artificial Sequence
  ENSG00000074266_32 (sequence is synthesized)
ccattggtccattatacaagtgtttttagttaggtttcagattttaacattatttttgcttatgttccatatttagctcatttgattcctgtagtaatttcacatctcttaggttgtttt

SEQ ID NO: 64760 - DNA, 120 bp, Artificial Sequence
  ENSG00000074266_33 (sequence is synthesized)
ccattaaactatgtaaaggggcaccatattttacagcatgtaacattttagttgaaggtactaaaatattcctatgttgaagtttggattcctttgtgagaatcataccttccttcgaat

SEQ ID NO: 64761 - DNA, 120 bp, Artificial Sequence
  ENSG00000074266_34 (sequence is synthesized)
accttgtcaacttggatttcctaaaagttgcagtagcattctacgtctggctttatgtgtgtaaaagccaagtgaactgttctttattaataactccaaattagtggtattgtctcgaag

SEQ ID NO: 64762 - DNA, 120 bp, Artificial Sequence
  ENSG00000074266_35 (sequence is synthesized)
gatgtcttgttgctgttgacagtgaggtaattagaagtaccacaactgtgaattcaataaacatcaagcctaaagttcttaggctcttataaaatggtgctcataattaatgcaaaggct

SEQ ID NO: 64763 - DNA, 120 bp, Artificial Sequence
  ENSG00000074266_36 (sequence is synthesized)
catatagtatctaggttagtaaggaaaatatactccttcaatagaactctctactgttatttcttagaatgagagcaggagacagtatgtagctcttctgtgtaatacaggagttcactg

SEQ ID NO: 64764 - DNA, 120 bp, Artificial Sequence
  ENSG00000074266_37 (sequence is synthesized)
gaggtggataggtgtgtgagattttcattactcattatgtgccttttgctaaattaaatagcatctctgggccttagtgtctgcctatgaaatgaggttgttacaatagatgatctgtta

SEQ ID NO: 64765 - DNA, 120 bp, Artificial Sequence
  ENSG00000074266_38 (sequence is synthesized)
catgcctgttaaaaattagtaaacagcaaatgaaaaaagttaaaatctgttttttattagacttttaaaaattcacttaaaagtgaactctaaaactaacttcaaaatattttgacttag

SEQ ID NO: 64766 - DNA, 120 bp, Artificial Sequence
  ENSG00000074266_39 (sequence is synthesized)
aattataaagtaagatgtcagctctttaaggattcatgtattttcacatgcacatgtcagtttcattggttggttgaggttggataggaaaagtaatatcactattcagctctttgtgtc

SEQ ID NO: 64767 - DNA, 120 bp, Artificial Sequence
  ENSG00000074266_40 (sequence is synthesized)
gtattcaatttaccttcaaaataagcaaaataaatattttagtgtaattgaatagataaaactaagtttaagtaattttttcttggtttatacattgtaaatgctcttatattccgatgt

SEQ ID NO: 64768 - DNA, 120 bp, Artificial Sequence
  ENSG00000074266_41 (sequence is synthesized)
atgctcttatattccgatgttgacaaactaattaaagctgtaaatcttgaaagtagtaaactctgatttatggcctatttagatgaaacccaaaatgtagtttgtattgtgatttgaaat

SEQ ID NO: 64769 - DNA, 120 bp, Artificial Sequence
  ENSG00000074266_42 (sequence is synthesized)
acagttttcactatgttgcacattaggcaaaaattggataaatataatttggagctgtaatttatataaaactttttggttttgcatacaggattatgatcttttgggtgaaaaaataat

SEQ ID NO: 64770 - DNA, 120 bp, Artificial Sequence
  ENSG00000074266_43 (sequence is synthesized)
ccgagagggaagtgtcgactgcgccggcgggaacagacatgcctgcggccaagaagcagaagctgagcagtgacgagaacagcaatccagacctctctggagacgagaattcttgtgaaa

SEQ ID NO: 64771 - DNA, 120 bp, Artificial Sequence
  ENSG00000074266_44 (sequence is synthesized)
agaaatttctgttcaaaatttcaggctttttctccacacttgtatgccaatgtagagaagatcatttatatttgcagtgccatccttaagtcatttttaacatttactgttttcagagtt

SEQ ID NO: 64772 - DNA, 120 bp, Artificial Sequence
  ENSG00000074266_45 (sequence is synthesized)
aaagttattcttttttattccaataatttttgtttttcctaagtaccttggtgacaagtcatttcttgtttttatacaaattatgtagtgcttgttgaacttaaaatatatctaaatttt

SEQ ID NO: 64773 - DNA, 120 bp, Artificial Sequence
  ENSG00000074266_46 (sequence is synthesized)
ataaaatttgagactgagctcttagtgaagtatattctggttttaagtgcttttcgtatgacttggaacatctgcttattttctaatccgctgttttagggtagacactgacaacgttat

SEQ ID NO: 64774 - DNA, 120 bp, Artificial Sequence
  ENSG00000074266_47 (sequence is synthesized)
atctttggcctctacccattagagcacagacacattgtcaaatgtcccttcgtgggcaaaccactgacctagacagtaatatgaatagtgcccacagttttgcaattttttctcattgta

SEQ ID NO: 64775 - DNA, 120 bp, Artificial Sequence
  ENSG00000074266_48 (sequence is synthesized)
ttctttaccacttactgcttaggtatgtgcatacaaatttgattttataggataggaaaagtataagtttgaagcctatttcaatcctatccccatatgagtgtcttgatgttaaacaac

SEQ ID NO: 64776 - DNA, 120 bp, Artificial Sequence
  ENSG00000074266_49 (sequence is synthesized)
tgctttacttgccttcgattgccctatttataaactgaattctaaggctatttatgtgagttcatcaactttcctaagatacctgttgagtacctactgtgtggcacagatactggatga

SEQ ID NO: 64777 - DNA, 120 bp, Artificial Sequence
  ENSG00000074266_50 (sequence is synthesized)
aggaataatagttaataaggtaaaggaaaccacctgtgattagaagcgaaatgggagactgcatggggaaagatgaaactagtgaagtaagcaagagccagattaatgccggattctgaa

SEQ ID NO: 64778 - DNA, 120 bp, Artificial Sequence
  ENSG00000074266_51 (sequence is synthesized)
aagccatgtattctaattctgtgtgtttgtaattgacctgtgctataaaacacttaaagtctctgggtgtcagagtatctagagctgaacttggtttaacttgaaagagaaatgttgact

SEQ ID NO: 64779 - DNA, 120 bp, Artificial Sequence
  ENSG00000074266_52 (sequence is synthesized)
atgaatgtacatcactgtacttgatagatggattaaccaggttctaagagctgtgaattccaaaacaatagaaaagccttgtttttactttgtaagattcagttcctcattaacatttct

SEQ ID NO: 64780 - DNA, 120 bp, Artificial Sequence
  ENSG00000074276_0 (sequence is synthesized)
gcctccgtggcgaaggggacacaggtccctgcggatgtgatggcccagctatggctgtcctgcttcctccttcctgccctcgtggtgtctgtggcagccaacgtggccccgaagttccta

SEQ ID NO: 64781 - DNA, 120 bp, Artificial Sequence
  ENSG00000074276_1 (sequence is synthesized)
gccaacatgacgtcagtgatcctgcctgaggacctgcctgtgggtgcccaggccttctggttggtagcggaagaccaggacaatgaccctctgacctatgggatgagcggccccaatgcc

SEQ ID NO: 64782 - DNA, 120 bp, Artificial Sequence
  ENSG00000074276_2 (sequence is synthesized)
tacttcttcgctgtcactccgaaaactggggaagtgaagctggccagcgctctggactacgagacactctacacattcaaagtcaccatctccgtgagcgacccctacatccaggtgcag

SEQ ID NO: 64783 - DNA, 120 bp, Artificial Sequence
  ENSG00000074276_3 (sequence is synthesized)
agggagatgctggtgattgtggaagatagaaacgacaacgcacccgttttccagaacaccgctttctccaccagcatcaacgagaccctgcccgtgggcagtgtggtgttctccgtgctg

SEQ ID NO: 64784 - DNA, 120 bp, Artificial Sequence
  ENSG00000074276_4 (sequence is synthesized)
gccgtggataaagacatggggtctgcaggcatggtcgtgtactccatagagaaggtcatccctagcactggggacagcgagcatctcttccggatcctggccaatggctccatagtcctc

SEQ ID NO: 64785 - DNA, 120 bp, Artificial Sequence
  ENSG00000074276_5 (sequence is synthesized)
aatggcagcctcagctacaacaacaagagcgctttctaccagctggagctgaaggcctgtgacttgggcggcatgtaccacaacaccttcaccatccagtgctccctgcctgtcttcctg

SEQ ID NO: 64786 - DNA, 120 bp, Artificial Sequence
  ENSG00000074276_6 (sequence is synthesized)
tccatctccgtggtggaccagcctgaccttgacccccagtttgtcagggagttttactcggcctctgtggctgaggatgcagccaagggaacctcggtgctgacggtggaggctgtggat

SEQ ID NO: 64787 - DNA, 120 bp, Artificial Sequence
  ENSG00000074276_7 (sequence is synthesized)
ggcgacaaaggcatcaatgaccctgtgatctacagcatctcctactccacgcggcccggctggtttgacatcggggcagatggggtgatcagggtcaacggctccctggaccgtgagcag

SEQ ID NO: 64788 - DNA, 120 bp, Artificial Sequence
  ENSG00000074276_8 (sequence is synthesized)
ctgctggaggcggatgaggaggtgcagctgcaggtcacggccaccgagacacacctcaacatctacgggcaggaggccaaggtgagcatctgggtgacagtgagagtgatggacgtcaat

SEQ ID NO: 64789 - DNA, 120 bp, Artificial Sequence
  ENSG00000074276_9 (sequence is synthesized)
gaccacaaacctgagttttacaactgcagcctcccagcctgcaccttcacccccgaagaggcccaagtgaacttcactggctacgtggacgagcatgcctccccccgcatccccatcgat

SEQ ID NO: 64790 - DNA, 120 bp, Artificial Sequence
  ENSG00000074276_10 (sequence is synthesized)
gacctcaccatggtggtctacgacccggacaagggcagcaatggcaccttcctgttgtcgctggggggccccgatgcagaagccttcagcgtctccccggagcgggcagtgggctcagcc

SEQ ID NO: 64791 - DNA, 120 bp, Artificial Sequence
  ENSG00000074276_11 (sequence is synthesized)
tccgttcaggtgctggtgagagtatccgcgctggtggactacgagaggcagacggcgatggcggtgcaggttgtggccacagactccgtcagccagaacttctccgtcgccatggtgacc

SEQ ID NO: 64792 - DNA, 120 bp, Artificial Sequence
  ENSG00000074276_12 (sequence is synthesized)
atccaccttagagacattaatgaccacaggcccacgtttccccagagcttgtacgtcctcacggtgccagagcacagcgccaccggctctgtggtcaccgacagcatccacgccacggac

SEQ ID NO: 64793 - DNA, 120 bp, Artificial Sequence
  ENSG00000074276_13 (sequence is synthesized)
ccagacacgggcgcgtggggccaaattacctacagcctgctcccaggaaatggggcagacctcttccaagtggatcccgtctcagggacggtgacggtgaggaacggtgagctgctggac

SEQ ID NO: 64794 - DNA, 120 bp, Artificial Sequence
  ENSG00000074276_14 (sequence is synthesized)
cgggagagccaggccgtgtactacctgacgctgcaggccacagacggcgggaacctgtcctcctccaccacactgcagatccacctgctggacatcaacgacaatgcacccgtggttagc

SEQ ID NO: 64795 - DNA, 120 bp, Artificial Sequence
  ENSG00000074276_15 (sequence is synthesized)
ggctcctacaacatcttcgtccaggaggaggagggcaatgtctccgtgaccatccaggcccacgacaatgatgagccgggcaccaacaacagccgtctgctcttcaacctgctgcctggc

SEQ ID NO: 64796 - DNA, 120 bp, Artificial Sequence
  ENSG00000074276_16 (sequence is synthesized)
acagtgcttgtgtctgactgcggcgagcctgtcctcggcaccaaagtcaatgtcaccatcactgtggaggacatcaatgataacctgcccatcttcaatcagtccagctacaactttacg

SEQ ID NO: 64797 - DNA, 120 bp, Artificial Sequence
  ENSG00000074276_17 (sequence is synthesized)
gtgaaggaggaggatccaggagtgctagtgggcgtggtgaaggcctgggacgcggaccagacggaagccaacaaccgcatcagcttcagcctgtcggggagtggtgccaactacttcatg

SEQ ID NO: 64798 - DNA, 120 bp, Artificial Sequence
  ENSG00000074276_18 (sequence is synthesized)
atccgaggcttggtgctgggggctgggtgggctgagggctacctccggctgcccccggacgtgagcctggattacgagacacagcccgtcttcaacttgacagtgagtgctgagaaccca

SEQ ID NO: 64799 - DNA, 120 bp, Artificial Sequence
  ENSG00000074276_19 (sequence is synthesized)
gacccccaggggggtgagaccatagtagacgtctgcgtgaatgtgaaagacgtgaacgacaatccccccaccctggatgtagcctcactccggggcatccgtgtggctgagaatggctca

SEQ ID NO: 64800 - DNA, 120 bp, Artificial Sequence
  ENSG00000074276_20 (sequence is synthesized)
cagcacggccaggtggctgtggtggttgcctcggatgtggacaccagtgcccagctggagatacagcttgtgaacattctctgcaccaaggccggggtcgatgtgggcagcctatgctgg

SEQ ID NO: 64801 - DNA, 120 bp, Artificial Sequence
  ENSG00000074276_21 (sequence is synthesized)
ggctggttctcagtggcggccaacggctctgtgtacatcaaccagagcaaagccatcgactacgaggcctgtgacctggtcacgctggttgtgcgggcctgtgacctagccacggacccc

SEQ ID NO: 64802 - DNA, 120 bp, Artificial Sequence
  ENSG00000074276_22 (sequence is synthesized)
ggcttccaggcctacagcaacaatggaagcctcctcattaccattgaggacgtgaatgacaatgcaccctattttctgcctgagaataagacttttgtgatcatccctgaactcgtgctg

SEQ ID NO: 64803 - DNA, 120 bp, Artificial Sequence
  ENSG00000074276_23 (sequence is synthesized)
cccaaccgggaggtggcttctgtccgggccagagacgatgattcagggaacaatggcgtcatcctgttctccatcctccgagtagacttcatctctaaggacggggccaccatccctttc

SEQ ID NO: 64804 - DNA, 120 bp, Artificial Sequence
  ENSG00000074276_24 (sequence is synthesized)
cagggtgtcttctcgatcttcacctcctccgaggccgacgtgttcgctgggagcattcagccggtgaccagcctcgactccactctccaaggcacctaccaagtgacagtccaggccagg

SEQ ID NO: 64805 - DNA, 120 bp, Artificial Sequence
  ENSG00000074276_25 (sequence is synthesized)
gacagaccttccttgggtcctttcctggaagccaccaccaccctgaatctcttcaccgtggaccagagttaccgctcgcggctgcagttctccacaccgaaggaggaggtgggcgccaac

SEQ ID NO: 64806 - DNA, 120 bp, Artificial Sequence
  ENSG00000074276_26 (sequence is synthesized)
agacaggcgattaatgcggctcttacccaggcaaccaggactacagtatacattgtggacattcaggacatagattctgcagctcgggcccgacctcactcctacctcgatgcctacttt

SEQ ID NO: 64807 - DNA, 120 bp, Artificial Sequence
  ENSG00000074276_27 (sequence is synthesized)
gtcttccccaatgggtcagccctgacccttgatgagctgagtgtgatgatccggaatgatcaggactcgctgacgcagctgctgcagctggggctggtggtgctgggctcccaggagagc

SEQ ID NO: 64808 - DNA, 120 bp, Artificial Sequence
  ENSG00000074276_28 (sequence is synthesized)
caggagtcagacctgtcgaaacagctcatcagtgtcatcataggattgggagtggctttgctgctggtccttgtgatcatgaccatggccttcgtgtgtgtgcggaagagctacaaccgg

SEQ ID NO: 64809 - DNA, 120 bp, Artificial Sequence
  ENSG00000074276_29 (sequence is synthesized)
aagcttcaagctatgaaggctgccaaggaggccaggaagacagcagcaggggtgatgccctcagcccctgccatcccagggactaacatgtacaacactgagcgagccaaccccatgctg

SEQ ID NO: 64810 - DNA, 120 bp, Artificial Sequence
  ENSG00000074276_30 (sequence is synthesized)
aacctccccaacaaagacctgggcttggagtacctctctccctccaatgacctggactctgtcagcgtcaactccctggacgacaactctgtggatgtggacaagaacagtcaggaaatc

SEQ ID NO: 64811 - DNA, 120 bp, Artificial Sequence
  ENSG00000074276_31 (sequence is synthesized)
aaggagcacaggccaccacacacaccaccagagccagatccagagcccctgagcgtggtcctgttaggacggcaggcaggcgcaagtggacagctggaggggccatcctacaccaacgct

SEQ ID NO: 64812 - DNA, 120 bp, Artificial Sequence
  ENSG00000074276_32 (sequence is synthesized)
ggcctggacaccacggacctgtgacaggggcccccactcttctggaccccttgaagaggccctaccacaccctaactgcacctgtctccctggagatgaaaatatatgacgctgccctgc

SEQ ID NO: 64813 - DNA, 120 bp, Artificial Sequence
  ENSG00000074276_33 (sequence is synthesized)
aaagggggcaggaaccgtcacattgttcagtgatgaaaaccgagggctgcaggagtgcggaccctggaagatcgaggaagacaagtctacccgaatcccccactgtccctccatcttact

SEQ ID NO: 64814 - DNA, 120 bp, Artificial Sequence
  ENSG00000074276_34 (sequence is synthesized)
cgtcctccttccctcacttcccagcccccggcaccagctcgactcgagcttagtggctttcaggcaacggaagctgtgtgaccttgggcaagacacggactctctccggaccccgcagcg

SEQ ID NO: 64815 - DNA, 120 bp, Artificial Sequence
  ENSG00000074276_35 (sequence is synthesized)
tgcggctggaggggtggggacgggacactgagtggtcacaagggacttgggctcacagcacaggggggacaaggggctggagagggtggcctttaaaagacaactgtggttatagaatga

SEQ ID NO: 64816 - DNA, 120 bp, Artificial Sequence
  ENSG00000074276_36 (sequence is synthesized)
agtcggccaggggtgcgtaagggcgcggcgcctggggcctggcagcctccgtgaccttggaggagtgacttcgttttctcgcctgtgaaaagggaaacaatacgaccccatggtcgttca

SEQ ID NO: 64817 - DNA, 120 bp, Artificial Sequence
  ENSG00000074276_37 (sequence is synthesized)
atgtcgaaagctgccagatgaaacaagagacaccaaggggtattgacaaatacaaaacctgtgcaagcaatcccctgatcaagagaaagtatttccatcaccccagaaagttccctgtgt

SEQ ID NO: 64818 - DNA, 120 bp, Artificial Sequence
  ENSG00000074276_38 (sequence is synthesized)
ccagttctagtcaatctctgctccctaaaggtgcccaggccttctggttggtagcggaagaccaggacaatgaccctctgacctatgggatgagcggccccaatgcctacttcttcgctg

SEQ ID NO: 64819 - DNA, 120 bp, Artificial Sequence
  ENSG00000074276_39 (sequence is synthesized)
gtggctgtaataggggtctcttttggtagagaggttgagggcaggtttagggggatgagccctgagctgggctcgtgaccagccttggtccaggtgggcagtgtcccgaccccgctgacc

SEQ ID NO: 64820 - DNA, 120 bp, Artificial Sequence
  ENSG00000074276_40 (sequence is synthesized)
cccacctccagcccccaacgccctctgccagcccccagggtccctggtgcctcatctcctgcacacccccttcccagctcttcaccgtggaccagagttaccgctcgcggctgcagttct

SEQ ID NO: 64821 - DNA, 120 bp, Artificial Sequence
  ENSG00000074276_41 (sequence is synthesized)
acctctctccctccaatgacctggactctgtcaggtgagcagtgcccctcacagccaggctaggtggtggtggtggtacaggtagtgacggtggtggtggtgatggtgttggtggtgatg

SEQ ID NO: 64822 - DNA, 120 bp, Artificial Sequence
  ENSG00000074276_42 (sequence is synthesized)
atggtgatgacaatggtgatggtgtggtcatggtagtagtggtagttatggtggtggtggtgatggtagtgaggtgatggtgatggtagcaatggtgacagtggtgatgatgacaacaat

SEQ ID NO: 64823 - DNA, 120 bp, Artificial Sequence
  ENSG00000074317_0 (sequence is synthesized)
ggtccaccccggcctggcctagcggagcccccgcgtccgcccgccgcagccgccgctccatccccagccccggccccgcatccaggcgggtcctggatattcgcgccgaacccagcactc

SEQ ID NO: 64824 - DNA, 120 bp, Artificial Sequence
  ENSG00000074317_1 (sequence is synthesized)
cggttcgacggggctgcagtttgcagggcccggataaccgaggcagtggcccctcccgcgtccccaggtttcaaggacgctaggactctccgcggccctgaggcttcgcactggggagtg

SEQ ID NO: 64825 - DNA, 120 bp, Artificial Sequence
  ENSG00000074317_2 (sequence is synthesized)
gggccgccaggatggacgtgttcatgaagggcctgtccatggccaaggagggcgttgtggcagccgcggagaaaaccaagcagggggtcaccgaggcggcggagaagaccaaggagggcg

SEQ ID NO: 64826 - DNA, 120 bp, Artificial Sequence
  ENSG00000074317_3 (sequence is synthesized)
tcctctacgtcggaagcaagacccgagaaggtgtggtacaaggtgtggcttcagtggctgaaaaaaccaaggaacaggcctcacatctgggaggagctgtgttctctggggcagggaaca

SEQ ID NO: 64827 - DNA, 120 bp, Artificial Sequence
  ENSG00000074317_4 (sequence is synthesized)
tcgcagcagccacaggactggtgaagagggaggaattccctactgatctgaagccagaggaagtggcccaggaagctgctgaagaaccactgattgagcccctgatggagccagaagggg

SEQ ID NO: 64828 - DNA, 120 bp, Artificial Sequence
  ENSG00000074317_5 (sequence is synthesized)
ggagagcccccaccagcagcacaattctgtccctgtccctgccccgccccccagagccagggctgtccttagactccttctccccaatcacgagatcttccttccgctctgaggcaaccc

SEQ ID NO: 64829 - DNA, 120 bp, Artificial Sequence
  ENSG00000074317_6 (sequence is synthesized)
cctcggagcctgtgttagtgtctgtccatctgtctgtcctacccgcccgcgtccaaccccggggcatggacagggccagggttgcggtcgcggctgggagcctcgcccctccagtgttgc

SEQ ID NO: 64830 - DNA, 120 bp, Artificial Sequence
  ENSG00000074317_7 (sequence is synthesized)
ctcctcccatccagcgtctgcgcggatgtagcatgttctatgtgtttttaaacgaagatccgagcgacggctcctccccgatccccgacagtggctctccaagcggcccccgggcagccc

SEQ ID NO: 64831 - DNA, 120 bp, Artificial Sequence
  ENSG00000074317_8 (sequence is synthesized)
cagagcaccccgcccgactcccattaacctcgagaacctttttttttttaaccaaaaccaggagccaggctgtgccatgtcccccgccccccatcccagccggcccggtccgaacgcggg

SEQ ID NO: 64832 - DNA, 120 bp, Artificial Sequence
  ENSG00000074317_9 (sequence is synthesized)
cgtcgtgtgttgtgattgtggcatggagagtccccatcccccccatgtgagcgtgtcccgggcgggtgggcccggccgcccccgagagtccatgaataaagctaatctgtctgtagccag

SEQ ID NO: 64833 - DNA, 120 bp, Artificial Sequence
  ENSG00000074317_10 (sequence is synthesized)
agccgcaccggcagggctgggctgggcgccgggtgggggcgacacgtggcggcgagtcttccaggtcccagcctacccctctgtgctctttggggtctggcacacacagcccaggtacaa

SEQ ID NO: 64834 - DNA, 120 bp, Artificial Sequence
  ENSG00000074317_11 (sequence is synthesized)
agagctgccgcagcgccggagccggagccggagccggagcgcgcgagctcgcagggcgcgaggaacgagcggtggctggctacgcacccgagacccgggcactgctgcgctcctgctcag

SEQ ID NO: 64835 - DNA, 120 bp, Artificial Sequence
  ENSG00000074317_12 (sequence is synthesized)
gtgggatggggggaaagcgggagggggctcagggtccagaagggcgccgcggtctcgggagtaggggggcatctgcgtcccgcgggaggggctggggtgagagtgcggggccagtgcacc

SEQ ID NO: 64836 - DNA, 120 bp, Artificial Sequence
  ENSG00000074317_13 (sequence is synthesized)
gccgggaaccagagggcgggggcgggggagactcccaaggcttctgcgggaatgctccgtggggagggcaggccctgggatactacaaggcagggcatcggtgtttccccctggctccca

SEQ ID NO: 64837 - DNA, 120 bp, Artificial Sequence
  ENSG00000074319_0 (sequence is synthesized)
gtagtggtgccgacttcctgttgtttgaggccgggttgggggtgtgcgattgtgtgggacggtctggggcagcccagcagcggctgaccctctgcctgcggggaagggagtcgccaggcg

SEQ ID NO: 64838 - DNA, 120 bp, Artificial Sequence
  ENSG00000074319_1 (sequence is synthesized)
gccgtcatggcggtgtcggagagccagctcaagaaaatggtgtccaagtacaaatacagagacctaactgtacgtgaaactgtcaatgttattactctatacaaagatctcaaacctgtt

SEQ ID NO: 64839 - DNA, 120 bp, Artificial Sequence
  ENSG00000074319_2 (sequence is synthesized)
ttggattcatatgtttttaacgatggcagttccagggaactaatgaacctcactggaacaatccctgtgccttatagaggtaatacatacaatattccaatatgcctatggctactggac

SEQ ID NO: 64840 - DNA, 120 bp, Artificial Sequence
  ENSG00000074319_3 (sequence is synthesized)
acatacccatataatccccctatctgttttgttaagcctactagttcaatgactattaaaacaggaaagcatgttgatgcaaatgggaagatatatcttccttatctacatgaatggaaa

SEQ ID NO: 64841 - DNA, 120 bp, Artificial Sequence
  ENSG00000074319_4 (sequence is synthesized)
cacccacagtcagacttgttggggcttattcaggtcatgattgtggtatttggagatgaacctccagtcttctctcgtcctatttcggcatcctatccgccataccaggcaacggggcca

SEQ ID NO: 64842 - DNA, 120 bp, Artificial Sequence
  ENSG00000074319_5 (sequence is synthesized)
ccaaatacttcctacatgccaggcatgccaggtggaatctctccatacccatccggataccctcccaatcccagtggttacccaggctgtccttacccacctggtggtccatatcctgcc

SEQ ID NO: 64843 - DNA, 120 bp, Artificial Sequence
  ENSG00000074319_6 (sequence is synthesized)
tcatctctgcggtcagtgacaaactgagatggcggatgaaggaggaaatggatcgtgcccaggcagagctcaatgccttgaaacgaacagaagaagacctgaaaaagggtcaccagaaac

SEQ ID NO: 64844 - DNA, 120 bp, Artificial Sequence
  ENSG00000074319_7 (sequence is synthesized)
tggaagagatggttacccgtttagatcaagaagtagccgaggttgataaaaacatagaacttttgaaaaagaaggatgaagaactcagttctgctctggaaaaaatggaaaatcagtctg

SEQ ID NO: 64845 - DNA, 120 bp, Artificial Sequence
  ENSG00000074319_8 (sequence is synthesized)
aaaacaatgatatcgatgaagttatcattcccacagctcccttatacaaacagatcctgaatctgtatgcagaagaaaacgctattgaagacactatcttttacttgggagaagccttga

SEQ ID NO: 64846 - DNA, 120 bp, Artificial Sequence
  ENSG00000074319_9 (sequence is synthesized)
gaaggggcgtgatagacctggatgtcttcctgaagcatgtacgtcttctgtcccgtaaacagttccagctgagggcactaatgcaaaaagcaagaaagactgccggtctcagtgacctct

SEQ ID NO: 64847 - DNA, 120 bp, Artificial Sequence
  ENSG00000074319_10 (sequence is synthesized)
actgacttctctgataccagctggaggttgagctcttcttaaagtattcttctcttccttttatcagtaggtgcccagaataagttattgcagtttatcattcaagtgtaaaatattttg

SEQ ID NO: 64848 - DNA, 120 bp, Artificial Sequence
  ENSG00000074319_11 (sequence is synthesized)
aatcaataatatattttctgttttcttttggtaaagactggcttttattaatgcactttctatcctctgtaaactttttgtgctgaatgttgggactgctaaataaaatttgttgcataa

SEQ ID NO: 64849 - DNA, 120 bp, Artificial Sequence
  ENSG00000074319_12 (sequence is synthesized)
taccagctggaggttgagctcttcttaaagtattcttctcttccttttatcaacttcagtgccctgaacggttagagaaattaatgaaggagctccaccaggtgccttcacaactctgag

SEQ ID NO: 64850 - DNA, 120 bp, Artificial Sequence
  ENSG00000074319_13 (sequence is synthesized)
tcatatcagaatctctccacagctctcctttcaaaaatgacaccgtgacatttcaggatgtgaaaaaacttactggaaagtgtgtaagaaaatataaaatactattgtacaatgtgataa

SEQ ID NO: 64851 - DNA, 120 bp, Artificial Sequence
  ENSG00000074319_14 (sequence is synthesized)
ataccagctggaggttgagctcttcttaaagcctcactgaaccataagtgttttcatcaaaaaggagcagagtggcaggtccaaactatatacctgataactttaggattaaagggaaag

SEQ ID NO: 64852 - DNA, 120 bp, Artificial Sequence
  ENSG00000074319_15 (sequence is synthesized)
tgtctgtatgattgataggaaatagatatttcagaggctcaatcgtgcctcaggcttaccacttgagtcgccatgctctccaaggatcagcccatgacagctttcagagtggatgccaag

SEQ ID NO: 64853 - DNA, 120 bp, Artificial Sequence
  ENSG00000074319_16 (sequence is synthesized)
cctttgcccaataaagtaacgaaaacgagcagagtccagattacaaccacttccaataacacggtttttgggaaatccactcaacttccaggctacataagttaagatatccactaagaa

SEQ ID NO: 64854 - DNA, 120 bp, Artificial Sequence
  ENSG00000074319_17 (sequence is synthesized)
gaaaaagttcatatcaagaaatgtcctcatctacaaggatatgttttttagatttacctaacttaaaactagtaaatctgatgttttgtggaggaggcaagaaacatggttctctatcca

SEQ ID NO: 64855 - DNA, 120 bp, Artificial Sequence
  ENSG00000074319_18 (sequence is synthesized)
accccagctatacgccaactcttaagaatatctaccaaatagaagtaatgaaaaaccttttcgttgatactttgcacagcttggtatgcagaaacacagaatgttcactccacagaaaat

SEQ ID NO: 64856 - DNA, 120 bp, Artificial Sequence
  ENSG00000074319_19 (sequence is synthesized)
cacggcaggcaccgccaccgctgccagaggagtgggcttgggaaagaagtggtcacctcacttggagctttgctcagaagcatcctcgtcccctgcagccctcccacgggaacgactgga

SEQ ID NO: 64857 - DNA, 120 bp, Artificial Sequence
  ENSG00000074319_20 (sequence is synthesized)
taaaagtgagctggtacagaaagccaactcactgagcaggctgagcgctatgatgatatggctgtagtcacgaaggcagtcacagaacgaggcatgaatactccaacgaagagagaaatc

SEQ ID NO: 64858 - DNA, 120 bp, Artificial Sequence
  ENSG00000074319_21 (sequence is synthesized)
tcttaaaagaggaaatgcttataccaatagcctgtatgaagcaaaatttatgtgaaagctaaagatatgcatgcagttaaatatataaataaatctcaatgccatacaaaaagaactttt

SEQ ID NO: 64859 - DNA, 120 bp, Artificial Sequence
  ENSG00000074319_22 (sequence is synthesized)
gataatctatgaactattttaaaaaagaaaaaacagcctcaaacttatgggataccgttaaacacaccaacatatatatgcatgtatggtaggaccagaaggaagggagaggagcagaaa

SEQ ID NO: 64860 - DNA, 120 bp, Artificial Sequence
  ENSG00000074319_23 (sequence is synthesized)
tatggtaggaccagaaggaagggagaggagcagaaaattattcaaagaagtaacagctgaaacttcccaaatagaaaaacattatacatccaagccgggtgcagtggctcatgcctgtag

SEQ ID NO: 64861 - DNA, 120 bp, Artificial Sequence
  ENSG00000074319_24 (sequence is synthesized)
tccaagattttttaacttgggttgtagaggcactgaccttgcaaaccacaaaccaagagagtttctttgtagtatggattaagattctttatcttcccaaaaaacactaaatgagatgta

SEQ ID NO: 64862 - DNA, 120 bp, Artificial Sequence
  ENSG00000074356_0 (sequence is synthesized)
gtacggggcctgcgggtgtcggtgaaggcggaggccccggcggggccggccctggggctcccgtcccctgaggcggagtccggtgttgaccgtggcgagccggagcccatggaggtggag

SEQ ID NO: 64863 - DNA, 120 bp, Artificial Sequence
  ENSG00000074356_1 (sequence is synthesized)
accgtggcgagccggagcccatggaggtggaggagggcgagctggaaatcgtgcctgtgcggcgctcgctcaaggaactgatcccggacacgagcagaagatatgaaaacaaggctggca

SEQ ID NO: 64864 - DNA, 120 bp, Artificial Sequence
  ENSG00000074356_2 (sequence is synthesized)
gcttcatcactggaattgatgtcacctccaaggaagcaattgaaaagaaagagcagcgagccaagcgcttccattttcgatcggaagtaaatcttgcccaaagaaatgtagccttggacc

SEQ ID NO: 64865 - DNA, 120 bp, Artificial Sequence
  ENSG00000074356_3 (sequence is synthesized)
gagacatgatgaagaaagcaatccccaaggtgagactggagacaatctatatttgcggagtagatgagatgagcacccaagatgtcttttcctattttaaagaatatcctccagctcaca

SEQ ID NO: 64866 - DNA, 120 bp, Artificial Sequence
  ENSG00000074356_4 (sequence is synthesized)
tcgaatggttggatgatacctcctgtaatgtagtttggctggatgaaatgacagccacacgagcacttatcaatatgagctccctgcctgcacaggataagatcagaagcagggatgcca

SEQ ID NO: 64867 - DNA, 120 bp, Artificial Sequence
  ENSG00000074356_5 (sequence is synthesized)
gtgaggacaagtcagctgagaaaaggaaaaaagacaagcaggaagacagttcagatgatgatgaagctgaagaaggagaggttgaagatgagaactcaagtgatgtagagttggatacgt

SEQ ID NO: 64868 - DNA, 120 bp, Artificial Sequence
  ENSG00000074356_6 (sequence is synthesized)
tgtctcaggtagaagaggagtctttgttaagaaacgatcttcgtccagctaacaaacttgctaaaggaaataggttattcatgagatttgctacaaaagatgacaaaaaggaacttggag

SEQ ID NO: 64869 - DNA, 120 bp, Artificial Sequence
  ENSG00000074356_7 (sequence is synthesized)
cagccagaagaagtcagtattacatgaaatatgggaatccaaattatggaggcatgaaaggaattcttagcaattcatggaagcgaagatatcattcccgtcgtattcagcgggacgtga

SEQ ID NO: 64870 - DNA, 120 bp, Artificial Sequence
  ENSG00000074356_8 (sequence is synthesized)
tcaagaagagagccctgattggggatgacgttggcttgacgtcgtataaacatcgacattctgggctagtgaatgttcccgaggaacccattgaagaggaggaagaggaggaggaggagg

SEQ ID NO: 64871 - DNA, 120 bp, Artificial Sequence
  ENSG00000074356_9 (sequence is synthesized)
aagaggaagaggaagaagaagaccaggacatggatgcagatgacagagtggtggtagagtaccacgaggagctcccggctctcaagcagccccgggagcggagcgcgtctagacgatcca

SEQ ID NO: 64872 - DNA, 120 bp, Artificial Sequence
  ENSG00000074356_10 (sequence is synthesized)
gtgccagcagctcagactcagatgaaatggactatgatctagaactgaaaatgatttccacgccttcaccaaagaaaagcatgaaaatgactatgtatgctgacgaagtggaatctcagt

SEQ ID NO: 64873 - DNA, 120 bp, Artificial Sequence
  ENSG00000074356_11 (sequence is synthesized)
tgaaaaatattaggaactccatgagggcagatagtgtatcttcaagcaatatcaaaaaccgaattggtaacaaattaccacctgagaaatttgcagatgtccgacatctattagatgaga

SEQ ID NO: 64874 - DNA, 120 bp, Artificial Sequence
  ENSG00000074356_12 (sequence is synthesized)
aacgtcagcactcccgtccacggccaccagtcagcagtactaaatcagatatacgccagcggttaggaaaaagaccacattctccggaaaaggcttttagtagtaaccccgtcgttcgga

SEQ ID NO: 64875 - DNA, 120 bp, Artificial Sequence
  ENSG00000074356_13 (sequence is synthesized)
gagagccctcttctgatgtgcatagtaggctaggtgttcccaggcaggatagtaaaggcctctacgccgatactcgggagaagaaatcaggtaatttatggactcgcctaggatctgcac

SEQ ID NO: 64876 - DNA, 120 bp, Artificial Sequence
  ENSG00000074356_14 (sequence is synthesized)
ccaagaccaaagaaaagaatacgaagaaagtggatcacagggcgcctggcgctgaggaagacgactctgagctgcaaagggcatggggggctctgattaaggagaaagagcagtctcgcc

SEQ ID NO: 64877 - DNA, 120 bp, Artificial Sequence
  ENSG00000074356_15 (sequence is synthesized)
aaaagaagagccggttagataacttaccatctctccagattgaagttagtcgggaaagcagctctggttcagaggcagagtcctgatgcccctggggcctatggcagctgccctaaagcc

SEQ ID NO: 64878 - DNA, 120 bp, Artificial Sequence
  ENSG00000074356_16 (sequence is synthesized)
tgacattcttgcacagggtggggcgcgcagtaggaacctcccccgcaggagctggcgccctctcgctcctgctcacacagtcaccctccgctcttgctacttcggcaagacatcttaaga

SEQ ID NO: 64879 - DNA, 120 bp, Artificial Sequence
  ENSG00000074356_17 (sequence is synthesized)
atgtgacacattttcaagggcatctctatctttcgctgcagagttgtagttctgggccctcgattcctttcccaccaccccacaggctttaccctttgagaaaaaggcagccctccagat

SEQ ID NO: 64880 - DNA, 120 bp, Artificial Sequence
  ENSG00000074356_18 (sequence is synthesized)
tttgtagacatttttcttaatatttttaacattgtgtcttttaaaagaaatgttttacacagttcatccaaagagcagagaactgaacttctcactattgccttggccctgacagctgtt

SEQ ID NO: 64881 - DNA, 120 bp, Artificial Sequence
  ENSG00000074356_19 (sequence is synthesized)
accagcacccttttcccaagaaaagtcaattcccaggtgcttattggacatccttcgagggggaagaggagggaagcggccagctcacccttccgggaccctagtgtggggcgaatctca

SEQ ID NO: 64882 - DNA, 120 bp, Artificial Sequence
  ENSG00000074356_20 (sequence is synthesized)
cggacctgacctcagaggtgcaccagtgccgcccaggtagataagagctgcagcattgactgtgcttccgttcttccctcggggattgctcatggcatgggcctcttacgtgctgtcagc

SEQ ID NO: 64883 - DNA, 120 bp, Artificial Sequence
  ENSG00000074356_21 (sequence is synthesized)
ttgatgtgaagatcaagttcagtgctgtgggatttttaggaacaaaaaactgtgacgtctggatttggggttgatttttgtgctggggtgggattatgggtcaatgttgaagaattttta

SEQ ID NO: 64884 - DNA, 120 bp, Artificial Sequence
  ENSG00000074356_22 (sequence is synthesized)
agtctgtattatgtttaaaacatgaatgatttgaaagtttaaatttttaatttttatatgtggaaattcttcctgttggctaaaggggaagctcaagtggtgtcgtcttttgtgctgtta

SEQ ID NO: 64885 - DNA, 120 bp, Artificial Sequence
  ENSG00000074356_23 (sequence is synthesized)
aatatatattctattctttggaagaaggcagagagaggagtcttattatttttaaatgctcctagttgtatagtctgtctgttgtacatagagttcagcttgttttttggctccagtagg

SEQ ID NO: 64886 - DNA, 120 bp, Artificial Sequence
  ENSG00000074356_24 (sequence is synthesized)
aaaaaaaatccatccatctgagatggggtcctgttgtttattatcactctagaagttatacattgatatttattctttctgtccccacgttgtggcacctgaagacatcttcaaaattgg

SEQ ID NO: 64887 - DNA, 120 bp, Artificial Sequence
  ENSG00000074356_25 (sequence is synthesized)
cagaaaagataatagttataaaaattttagttcatttatttttaaactcctttcagattattttaccattaggaggaggtagattgtttcgtcttcctgtctgatttttgttttgtagta

SEQ ID NO: 64888 - DNA, 120 bp, Artificial Sequence
  ENSG00000074356_26 (sequence is synthesized)
tttaattttgtattcctctgcagttttaagaaacagtgtttttcttcggtttgctggaacatgggcgttagagatggtaataaaccgtggtcctttttgcgatgtcacgactcttcacct

SEQ ID NO: 64889 - DNA, 120 bp, Artificial Sequence
  ENSG00000074356_27 (sequence is synthesized)
gcctgggctgttgtgcacacagtgcagcctggatcctgtcgatctttacttgtggcggagctaatggtcacattgatagttgattacactgtggcacgaattaatgcagaacactgttat

SEQ ID NO: 64890 - DNA, 120 bp, Artificial Sequence
  ENSG00000074356_28 (sequence is synthesized)
taataaaggaagtaaagggctgcaagatttgagagctgcaacaaaaactgtattgtcccatattttgttgattaaccttgctttttctccctccctttagagagattagaggatataacc

SEQ ID NO: 64891 - DNA, 120 bp, Artificial Sequence
  ENSG00000074356_29 (sequence is synthesized)
atgatatatttcagcttcttattaggattctaggaaagagatggttctggtttctctgccagttgagacttaagacatctgagatttctcagcttttctttccctgtgaagcatacagct

SEQ ID NO: 64892 - DNA, 120 bp, Artificial Sequence
  ENSG00000074356_30 (sequence is synthesized)
gagagccaggttcttaggaagggtcagggtttggggagttggtagagtgaggagtgcgggggcctgagaatcggacacctggatgccaacccctggctctgctccatggacctgggcctc

SEQ ID NO: 64893 - DNA, 120 bp, Artificial Sequence
  ENSG00000074356_31 (sequence is synthesized)
agttttcccgtctagcagttgagtgggctgttaccagaattcctggctttgttggtgcatctcagtggcggtttactcttcccaagctgtgacggcagtgggctcgccagcatgaatttc

SEQ ID NO: 64894 - DNA, 120 bp, Artificial Sequence
  ENSG00000074356_32 (sequence is synthesized)
tactgcaggtggaggaggcgccagggagacaactgagggcgcgcatgaggtgtagacaggggcttattcccatcccagcacagtctctgcttctactgacggggcaaagatgtcttgtgg

SEQ ID NO: 64895 - DNA, 120 bp, Artificial Sequence
  ENSG00000074356_33 (sequence is synthesized)
tcagcgtcccagctggcatgcctctgcagggtttagaatatgctccttcacagactttccttttggttttacaccagcagctcaggtccatttgttccacggcctttcagcactcagcag

SEQ ID NO: 64896 - DNA, 120 bp, Artificial Sequence
  ENSG00000074356_34 (sequence is synthesized)
tctcctgctacagatcagcgaagccattctggaaggaggtggtgtgcagtcaaaactgggtctttgatgtaaccaagagaaatacacactcgagtaaccttacagttttcacagacacac

SEQ ID NO: 64897 - DNA, 120 bp, Artificial Sequence
  ENSG00000074356_35 (sequence is synthesized)
agagagaacccagaaaggcagctttaaagatttttacttctcggagttactggccttattagtttctctaaccctcctgcccactctcagtcactcagatcttgcaacatcttgagtgtg

SEQ ID NO: 64898 - DNA, 120 bp, Artificial Sequence
  ENSG00000074356_36 (sequence is synthesized)
tcctgaatgatgaggccttttctttggagtttaagagtaagaatggatagtcaggacaggcccgtggcaggcagctgggcgtgattttaccctggacactccccacacatgtgggcacag

SEQ ID NO: 64899 - DNA, 120 bp, Artificial Sequence
  ENSG00000074356_37 (sequence is synthesized)
ggctgcacactttgtgtgttcctcttagtcttatgtgtaggagattttacatacatgtttgctgcttgatgataattgcagatacctcatttgtttcccactctcctctctggagagtta

SEQ ID NO: 64900 - DNA, 120 bp, Artificial Sequence
  ENSG00000074356_38 (sequence is synthesized)
ccaggtacccaggataatttgtggcgtcctcaggatgtagtctcctcctctggcccccttgtagtctgatcctgtgaacccctctccgttcttcagccactgccctttccagctgcattt

SEQ ID NO: 64901 - DNA, 120 bp, Artificial Sequence
  ENSG00000074356_39 (sequence is synthesized)
gtacagcagcctcttcactggtctctgccctgtctccattctgcacactgcagcgggatgaacctttgttgttgttaccagcttaatttagatgtaatttgcatacagttcagccattta

SEQ ID NO: 64902 - DNA, 120 bp, Artificial Sequence
  ENSG00000074356_40 (sequence is synthesized)
aagtgtacacttgagtggcttttagtatatttacagttatgcaccagcaccgtaatcaattttaaaacactttgatcacccaaagaaaccctgagtccattagcaattctccctattccc

SEQ ID NO: 64903 - DNA, 120 bp, Artificial Sequence
  ENSG00000074356_41 (sequence is synthesized)
tcttccctcttagcctctggccaccactgatcttccttctctctctgtggatttgcctgttctggatagttcatataaatgggatcatatactatgtgtctatttgtgactggcttctta

SEQ ID NO: 64904 - DNA, 120 bp, Artificial Sequence
  ENSG00000074356_42 (sequence is synthesized)
acatatttctgaggttcatccatgtcatagcttctatcagtatttcattttttaaaattgccaaataatagtccattttatgggtatgccaccttttttttaatccacattggttaatgg

SEQ ID NO: 64905 - DNA, 120 bp, Artificial Sequence
  ENSG00000074356_43 (sequence is synthesized)
atgggcatttgagttgtttctactttagggctatatatatatatttctatttctattatttatttttgagacacagtttcgctcttgttgtgcaggctggagtgcaatggcacgatctcg

SEQ ID NO: 64906 - DNA, 70 bp, Artificial Sequence
  ENSG00000074356_44 (sequence is synthesized)
aggtgatctgcccacctctctttttggctattatgaatagtgttgctacgaacattcccgaacaagtttt

SEQ ID NO: 64907 - DNA, 120 bp, Artificial Sequence
  ENSG00000074356_45 (sequence is synthesized)
ttatgaatagtgttgctacgaacattcccgaacaagtttttgcagggacaggtattttcatgactcttgggtatatacctaggagtggaattgctgagtcataattatctttaacctttt

SEQ ID NO: 64908 - DNA, 120 bp, Artificial Sequence
  ENSG00000074356_46 (sequence is synthesized)
caggaaccaccaggtggtttttccaagcagctgtatcattttccattccaccagcagtgtgcgagggttccagtttctccacatctccaccaacactcattattttctggtgtgaagtgg

SEQ ID NO: 64909 - DNA, 120 bp, Artificial Sequence
  ENSG00000074356_47 (sequence is synthesized)
gtggtatctcattgtagttttttgtttttattttttctttttaaaatacattttgtacagatggggtttcgttatgttgcccaggccgtctagcactcctggcctcaagtgatcctcctg

SEQ ID NO: 64910 - DNA, 120 bp, Artificial Sequence
  ENSG00000074356_48 (sequence is synthesized)
aggcatgagccaccacgcctggctctcattgtggttttgatttgtatttccctaatgactaatgatgtcgggcaccttttcacatgcttcaggatgaactttcttaaatatatatctgat

SEQ ID NO: 64911 - DNA, 120 bp, Artificial Sequence
  ENSG00000074356_49 (sequence is synthesized)
aactttcttaaatatatatctgattctgttattcctctgcttgaacgttttccaaagcttcactattgccccgagaataaattccacactcctgatcgcatgagcccagtaattcaaggc

SEQ ID NO: 64912 - DNA, 120 bp, Artificial Sequence
  ENSG00000074356_50 (sequence is synthesized)
ctccagcctgggcagcagagcaagacctgtctcaaaaaatacatacatacataaattccaccctttttgatagcatgttatgaggctcaccaaggtctatcctctggcagtatccctggc

SEQ ID NO: 64913 - DNA, 120 bp, Artificial Sequence
  ENSG00000074356_51 (sequence is synthesized)
aggtctatcctctggcagtatccctggcctgttctccccatctcccctgccctctgctcaccagttccctaaatgtatcttgatctcactagccctacagactgtgcacagagctgtttc

SEQ ID NO: 64914 - DNA, 120 bp, Artificial Sequence
  ENSG00000074356_52 (sequence is synthesized)
tcccctcaccaacttaaggtcttaggggcccttctaggaggcagtccccaacttccagagccagggtataggctacttctatgtgtcccatggtactgccacagaagagtctcagctctc

SEQ ID NO: 64915 - DNA, 120 bp, Artificial Sequence
  ENSG00000074356_53 (sequence is synthesized)
tccaggattcagttctaaggtcagtgcctaagataaaaatggagtgtaattaaaattcctcttagaaatctaaggaaggtgccctattgaagaccaacatcttgaggtcccatgtagtca

SEQ ID NO: 64916 - DNA, 120 bp, Artificial Sequence
  ENSG00000074356_54 (sequence is synthesized)
tttcttgcccatgtgggaacacattactgtttggttgagtaccaggtgaagtgattggcctgcagttagggctgtgttgtgcaaaaatcacttgttttggggtgttagaaccacatttag

SEQ ID NO: 64917 - DNA, 120 bp, Artificial Sequence
  ENSG00000074356_55 (sequence is synthesized)
gcgagaagatcacttttggggagcttgggaactgaggcaggccgcaggtgcagcagaggcatgagcttgcccgggcccgccctcttgtctatgctcatggagtgaaggaggggccagcgg

SEQ ID NO: 64918 - DNA, 120 bp, Artificial Sequence
  ENSG00000074356_56 (sequence is synthesized)
aatggcccaaacaactgatttgtttttctttttttaaatctttttcagacaaataccattgtgtttaagcgaaatgtgtgtataatgccaaatcactgtaccccacaaccctgcacacct

SEQ ID NO: 64919 - DNA, 120 bp, Artificial Sequence
  ENSG00000074356_57 (sequence is synthesized)
ctacactggactgtaatttcttgttcctagtttgtcttgctagactgtaagctccgtgagagcagggaccgtgtctgcttgttgagtgggctttcccctgtgcctgccagcatgcctggc

SEQ ID NO: 64920 - DNA, 120 bp, Artificial Sequence
  ENSG00000074356_58 (sequence is synthesized)
atctagcaggtcttctgtaaagatgggatgagtttgtaaaccctccagcctcaggagtggctccatcctctgaggctctggggccctctggcaggctagtcatttttctgccatgtacgt

SEQ ID NO: 64921 - DNA, 120 bp, Artificial Sequence
  ENSG00000074356_59 (sequence is synthesized)
acaatgctttattttcatgttgtattttcctttctagccagtaagcaagctcctaatgagcaagtttctttgtggtgttatctctgtatcctttcatcaggccagcccagagtaagtagt

SEQ ID NO: 64922 - DNA, 120 bp, Artificial Sequence
  ENSG00000074356_60 (sequence is synthesized)
gcttcgaaagtgtttggtaaatgaatgaattatggtaacccagcccagttctggcatcactgtctgcaggttagtctaattccagatgaaagccccagattcgaaaaagggaagattatt

SEQ ID NO: 64923 - DNA, 120 bp, Artificial Sequence
  ENSG00000074356_61 (sequence is synthesized)
cagaagtgcatatggttgtataagaaaaaaaaatctcattaaatagacctgagtaaacttcaaattttgatgatctggccatgtcggagctgaagcttaccagctctctaaagcatttgc

SEQ ID NO: 64924 - DNA, 120 bp, Artificial Sequence
  ENSG00000074356_62 (sequence is synthesized)
tagggaatcatgcagatggtccaaaatattttttagaaaagcattcatctgtcccgggatagaagtagaggaagctggtaggcaggcgctagaccctaaagaaggactgctgagccagtt

SEQ ID NO: 64925 - DNA, 120 bp, Artificial Sequence
  ENSG00000074356_63 (sequence is synthesized)
cttaagcctgtggtcctgtcggtgaggaaagtgagagcagtccagagcaggtgaaaagagcagagctcattcctccagtggctcttttgcctaaagcagcattcctcaaacttctcactc

SEQ ID NO: 64926 - DNA, 120 bp, Artificial Sequence
  ENSG00000074356_64 (sequence is synthesized)
gaagcattaagttacggtgagatgctaacacacgctttagacttaagtcaaaatttactgtgaagccacagcaaaccatggcttcacagatgaattagttgctacacaaataagttcgat

SEQ ID NO: 64927 - DNA, 120 bp, Artificial Sequence
  ENSG00000074356_65 (sequence is synthesized)
acataagtacagtaattgcttttaaaccttataataagcagtaaattagaagttaaaccatgtttttcttttacgaactgaaagaagagaatgcttttgatactgagaatcgcacactgt

SEQ ID NO: 64928 - DNA, 120 bp, Artificial Sequence
  ENSG00000074356_66 (sequence is synthesized)
gtccaggaagattgttcttgcataaccagacccacaataaatatctacaacttttcttacatgtttataaaataaatcttagaagaaaaatattgtagcttttttttttttttttttttc

SEQ ID NO: 64929 - DNA, 120 bp, Artificial Sequence
  ENSG00000074356_67 (sequence is synthesized)
aatgaagctctatgaacatttcacagaactttgttcctgggagtagttagggaaatgctgcttcaaaaagccaattttaagtagttgtgaggcatccgagtggaatttggctgcactatc

SEQ ID NO: 64930 - DNA, 120 bp, Artificial Sequence
  ENSG00000074356_68 (sequence is synthesized)
cataaaacttgagagtataggcggtatttcacctaccaaggtcagtaccctgcctcaggattcttactgttcatttgagcaattccggggccctctctggatgaccaggttcgtaaatag

SEQ ID NO: 64931 - DNA, 120 bp, Artificial Sequence
  ENSG00000074356_69 (sequence is synthesized)
ttgagactttgtgttatctcaaattgtcaccatcacctctgggccaatataggttagtgaggtcgagaggcccacaccattgacagaagagaattctcaggccgggcttggtggctcacg

SEQ ID NO: 64932 - DNA, 120 bp, Artificial Sequence
  ENSG00000074356_70 (sequence is synthesized)
gagactccgtctcaaaaaaaaaagaaaggattctcaccttcctgtcccttcctaggagttttgtggtagtgttcgatcctgtgatgtggccatcttctcctcagggcctgtgagaggcag

SEQ ID NO: 64933 - DNA, 120 bp, Artificial Sequence
  ENSG00000074356_71 (sequence is synthesized)
agaggcaggcagcatctttagctgaggtagaatgcctgttggggaaagtcaaataggatggtggctggggccggggctctggggactccttctgccccacatactcaattggaaagactg

SEQ ID NO: 64934 - DNA, 120 bp, Artificial Sequence
  ENSG00000074356_72 (sequence is synthesized)
agcaagtcccctcacctccctgggcctcagcttccctgtctgtcaaatggagggctcaactggggtgagctccagtttccttctagtgctaacgcgtgttcaaggatccttgctctcctt

SEQ ID NO: 64935 - DNA, 120 bp, Artificial Sequence
  ENSG00000074356_73 (sequence is synthesized)
tccggggagcatcaggggtgtgggctagatagcaggaaagaagtaggggtttgtaaacaagagatccaagcccctggacccttggtcccagcacccagtgcagccctcgccctcccagcc

SEQ ID NO: 64936 - DNA, 120 bp, Artificial Sequence
  ENSG00000074356_74 (sequence is synthesized)
ccttccttagaaaggacaagaaaatccactccttgttctctccctgtcccatcacccccgcagtcccccacagatctgaggccggaggatgccaacatggtgagcaccctcttgctgtct

SEQ ID NO: 64937 - DNA, 120 bp, Artificial Sequence
  ENSG00000074356_75 (sequence is synthesized)
tattcacgtaggcttttcttggtgcctgcacatggctcttgtaaggccaccaatcttgctggattatgacctcatctaaccttaattacttcctaaaagccatatgtccaagaagagcca

SEQ ID NO: 64938 - DNA, 120 bp, Artificial Sequence
  ENSG00000074356_76 (sequence is synthesized)
cattgggggttagggcttcaacatatgaatttggaggacatttacagttcagtccacagcacctggtcatgtggagatcccagtctgcatttgtgggatgaaatctctgcttttttaaag

SEQ ID NO: 64939 - DNA, 78 bp, Artificial Sequence
  ENSG00000074356_77 (sequence is synthesized)
cagtctgcatttgtgggatgaaatctctgcttttttaaagtttacacaccacctagctgggcacggggatcacctgat

SEQ ID NO: 64940 - DNA, 120 bp, Artificial Sequence
  ENSG00000074356_78 (sequence is synthesized)
gattgtgccactgcactccagtctggatgaaagagcaagactccatctcaaaaacaaaaataaaaaaagtctacacaccaaaagagctgaaggcaggagagtttgtggtggttcagagtc

SEQ ID NO: 64941 - DNA, 120 bp, Artificial Sequence
  ENSG00000074356_79 (sequence is synthesized)
agtcctgattctggaggaaacaggcctgtttggagtcccagctctgctccttactagctatgtggcctctcagaggcagcatccttatctgagaaatcgggttgaccttgtaggtggctg

SEQ ID NO: 64942 - DNA, 120 bp, Artificial Sequence
  ENSG00000074356_80 (sequence is synthesized)
agaggctcagatgagggctcgcatgtgaggccttggcactgagcagggcactcctaccgagtgttcaaaggtcgtgagtaccactgctctgcagccctgggctctggtctcagcaatgcc

SEQ ID NO: 64943 - DNA, 120 bp, Artificial Sequence
  ENSG00000074356_81 (sequence is synthesized)
gtcactctttctggcttcctaagagtcagaaggcaagtgggagaatagaaccatttcctgtgtctgaaggctgtgcctcagtgcttttgactcactctgaagacagcaggcagccctttc

SEQ ID NO: 64944 - DNA, 63 bp, Artificial Sequence
  ENSG00000074356_82 (sequence is synthesized)
gtgcttttgactcactctgaagacagcaggcagccctttctgttttttttggagatgccctcc

SEQ ID NO: 64945 - DNA, 65 bp, Artificial Sequence
  ENSG00000074356_83 (sequence is synthesized)
gcctcccaggttcaagcaattctcccaccatagcctcccgaagctggggctacaggcacacgctg

SEQ ID NO: 64946 - DNA, 120 bp, Artificial Sequence
  ENSG00000074356_84 (sequence is synthesized)
caaagtgctgggattacaggtgtcagctaccacgcccgacccacaggcagccctttcacctcacgccgagcacgtctcctccatccatgaacattttgcaacttttttttaaagagacag

SEQ ID NO: 64947 - DNA, 120 bp, Artificial Sequence
  ENSG00000074356_85 (sequence is synthesized)
ttaaagagacaggttcatactatgttgtctagattggactcaaactcctgggctcaagctttcccaagtagcttgaacctcttaagtaactgtgactacaagtgcacctggccacttttt

SEQ ID NO: 64948 - DNA, 87 bp, Artificial Sequence
  ENSG00000074356_86 (sequence is synthesized)
agtaactgtgactacaagtgcacctggccacagtggagtgcagtggcatgatctccgcccactgcgagctccgcctcctgggttcac

SEQ ID NO: 64949 - DNA, 120 bp, Artificial Sequence
  ENSG00000074356_87 (sequence is synthesized)
aggcgtgagccaccgcgcctggcccacctgcccattttttaaaaactttattcttcctggtatcaaggggagaaagaaaaaaattttttaaaatatttaaaactttattttgaaataatt

SEQ ID NO: 64950 - DNA, 120 bp, Artificial Sequence
  ENSG00000074356_88 (sequence is synthesized)
aactttattttgaaataatttcaaaatcacagcagtttgaagggtacaacaaagaacattttgccacattttctctttcattcgttccctcctcttctccctcacccctgtttcttccta

SEQ ID NO: 64951 - DNA, 120 bp, Artificial Sequence
  ENSG00000074356_89 (sequence is synthesized)
tcctctctgaaccatgaaccatttgaggattatttgtatacatcatgctcgtttatccgtaagatgttttagtgaacatttcccaagaacagggacagcctctcacatgcccatggtaca

SEQ ID NO: 64952 - DNA, 120 bp, Artificial Sequence
  ENSG00000074356_90 (sequence is synthesized)
gttctcaaattcaggaaatgtgtaatattctctgatcagcccaggagttgctaatttgtagttcctgtttcaaatttgccaactgtcccaataatgattttgaaagccgttgtttttctg

SEQ ID NO: 64953 - DNA, 120 bp, Artificial Sequence
  ENSG00000074356_91 (sequence is synthesized)
gtccaggatccaatccaggatcaagcgctgcctttagttgtcctctctgcagcctcctttcgtttggagcaggtcctcagcctttctgtctttcatgacattgatgtttgtgaagagtac

SEQ ID NO: 64954 - DNA, 120 bp, Artificial Sequence
  ENSG00000074356_92 (sequence is synthesized)
agtccagtttctgttgtagaacgtccttgaagttggtcccggaatatttgtttaaagtgagttgggaaaccacattcacatgtcttttggttatgtgtgtatttgtcaaacagccagcct

SEQ ID NO: 64955 - DNA, 120 bp, Artificial Sequence
  ENSG00000074356_93 (sequence is synthesized)
tgtgctgcgtgctgtgatggggagcattactcaacagagcctggccctgaccttggggatgtagtttgggtttgtggggaaagcagctaccgccaggtgggctttacggacccctgtgtg

SEQ ID NO: 64956 - DNA, 120 bp, Artificial Sequence
  ENSG00000074356_94 (sequence is synthesized)
tctcatgactagaggcactgacgcttggataaatacatactggatggatgcaggatgagtccgcattctagaagtgtgcagaggtacagaagtggccctgctccctgtccagcacccagt

SEQ ID NO: 64957 - DNA, 120 bp, Artificial Sequence
  ENSG00000074356_95 (sequence is synthesized)
catcagctttccctggcttcccgaggcaccctgacgttcacactccaaacacaaagtcttctctcaggaatctcgagtgagctgcagtctgggttctagccctgccctagcagggatctg

SEQ ID NO: 64958 - DNA, 120 bp, Artificial Sequence
  ENSG00000074356_96 (sequence is synthesized)
ctcagtgactgggctgctctcttcctgctttaggccaatgcgggggagaggagaccactgtgactctccccagtgcccttggagcgcagaatgaagtgaggggaggaggagggtcacgag

SEQ ID NO: 64959 - DNA, 120 bp, Artificial Sequence
  ENSG00000074356_97 (sequence is synthesized)
ccctggagcgctgggaagacaggctgtaggccgcaggccccgatcctgcctgggacgaggttcaacagaagtaggatggtttcatcatgacctggcaggaaaaccaccagacctggaatt

SEQ ID NO: 64960 - DNA, 120 bp, Artificial Sequence
  ENSG00000074356_98 (sequence is synthesized)
ttgcttttacaactgtttaacttctgtttcatacaggatggaaaccggtgaattgtaatctcacataaccgagcaagatctagtagtcataagcactttgtcagagcaaagcagacaagg

SEQ ID NO: 64961 - DNA, 120 bp, Artificial Sequence
  ENSG00000074356_99 (sequence is synthesized)
caaagtgttggaaatgtcatcggatcttcacagaaccttagccaagcagcctttcaatgcgagaaacaaaataacatggatttttatctagtaatgaagtcaacaccattgtccaccctg

SEQ ID NO: 64962 - DNA, 120 bp, Artificial Sequence
  ENSG00000074356_100 (sequence is synthesized)
ggttaacacattcacatctcaaagcgaatggggctgcagacactcgtgttagagagccttggaatgtcctgcctttttacgtttaattaaaattaaataaaatatacaaaattcagttca

SEQ ID NO: 64963 - DNA, 120 bp, Artificial Sequence
  ENSG00000074356_101 (sequence is synthesized)
tcagccatttctccaaggagctggtgggcatggtttgaggggttcgggggttgggggctatacatactggtttgtgttgtcacgtttacctacagccctggatatatttacagtggtgtt

SEQ ID NO: 64964 - DNA, 120 bp, Artificial Sequence
  ENSG00000074356_102 (sequence is synthesized)
tgttctttacagtcagagtgtccaagaactgtggaaggtctttgtattactacttttgacaaaaatttatgatgactgaccacctttctttcctgttaactgacatttcaacttgacaaa

SEQ ID NO: 64965 - DNA, 120 bp, Artificial Sequence
  ENSG00000074356_103 (sequence is synthesized)
tgtgatctttaccacatttactcatttgagtggctgagtacattctacatgtatagtattatgctgttttctttaagccattttgaggagcacaataaactggaaaaatgatttaccaaa

SEQ ID NO: 64966 - DNA, 120 bp, Artificial Sequence
  ENSG00000074356_104 (sequence is synthesized)
agccgctgttaccagcacccttttcccaagaaaagtcaattcccaggtgcttattggacatccttcgagggggaagaggagggaagcggccagctcacccttccgggaccctagtgtggg

SEQ ID NO: 64967 - DNA, 120 bp, Artificial Sequence
  ENSG00000074356_105 (sequence is synthesized)
gtctttgttaagaaacgatcttcgtccagctaacaaacttgctaaaggaaataggttattcatgagatttgctacaaaagccccaggtctaggatccatccaggactgagtgtatgacaa

SEQ ID NO: 64968 - DNA, 120 bp, Artificial Sequence
  ENSG00000074356_106 (sequence is synthesized)
aaaggtaaatgtaatatttggtattgttttatattttcaatcaaaatgatttattatggagtgacatccttcttttttgaatagaagttagatcaagtaatctcaaagttcccttcaaac

SEQ ID NO: 64969 - DNA, 120 bp, Artificial Sequence
  ENSG00000074356_107 (sequence is synthesized)
tataatattctgcgcttatgaaataattgcttgccacctgagttggaatttctgactttaaaagtgaatattaactatttgtatatttctgtgacttctggctaaagttattttctgttg

SEQ ID NO: 64970 - DNA, 120 bp, Artificial Sequence
  ENSG00000074356_108 (sequence is synthesized)
aaactggtttgcctcatatattttcagccagttaccatctgaattatgaaaactttcaaatgaaactttatttattacagcaacgtcctcctgaacattgccagtgtaccattcggttct

SEQ ID NO: 64971 - DNA, 120 bp, Artificial Sequence
  ENSG00000074356_109 (sequence is synthesized)
aattcccttctcataagattgtttacacatggtgacttttggtgggcatttaaaaatgtgtgtgtatgtgtatatatgtatgtgtatgtatgtgtatatatgtatatgtatgtatgtatc

SEQ ID NO: 64972 - DNA, 120 bp, Artificial Sequence
  ENSG00000074356_110 (sequence is synthesized)
gcgtgtatgtgtgtatgtatgcatgtgtatgtatgtatatgtatgtatgtgtatgtgtatatatgtatgtgtgtgtatgtatatgtgtgtgtatgtgtatgtgtgtgtgtatgtgtgtgt

SEQ ID NO: 64973 - DNA, 120 bp, Artificial Sequence
  ENSG00000074356_111 (sequence is synthesized)
gtatgtatgtatgtatgtatatgtattatacacatatacacatattggtttttttaatcatttgagagttagttgaagataaaaacccatcacccctaaatgtattccaaagaataagaa

SEQ ID NO: 64974 - DNA, 120 bp, Artificial Sequence
  ENSG00000074356_112 (sequence is synthesized)
cattgttttatacatagcacacttaacaaaatcaagaaatttaacattaatacagtactgttacctaatccgtagtcgattttcaaattttgtcagttgttccaataatgtcctttatat

SEQ ID NO: 64975 - DNA, 120 bp, Artificial Sequence
  ENSG00000074356_113 (sequence is synthesized)
attccccgcccagccccaggtctaggatccatccaggactgagtgtgtaagtatgtaatgtttccttagtcccccttaagctgaaactacttctatcctcccatgttttccaagaatata

SEQ ID NO: 64976 - DNA, 120 bp, Artificial Sequence
  ENSG00000074356_114 (sequence is synthesized)
ggtttactattttatacaatgtccctcagtttgggtttgtctgatgattcctcctgattgaatttgggttgtgcatttgagacaggcgtgccacagaagcgatgtcatgtcatttccaga

SEQ ID NO: 64977 - DNA, 120 bp, Artificial Sequence
  ENSG00000074356_115 (sequence is synthesized)
gttggcatgtgatccttcagaagtgaatatcatctttcatggggtggcaaaaatgccactattttgagaaagtctttttgattcctgggtacctgtaatgacctaaagctcttttatgcc

SEQ ID NO: 64978 - DNA, 120 bp, Artificial Sequence
  ENSG00000074356_116 (sequence is synthesized)
ttttggaaccttgtatcttgtattgtttatttttgttttctccattaagtcatctggctccaaacagcagttttaacctcattcgtctctgtattttgctttatcccctctacactgcat

SEQ ID NO: 64979 - DNA, 120 bp, Artificial Sequence
  ENSG00000074356_117 (sequence is synthesized)
tgctgtagtgggcactcagagtgtgaatgttggtagtggatttttactttttgttggcaaattgcgctgatctgattccagctatggaaaacattaaaaaaaaaattcaacattgtcttt

SEQ ID NO: 64980 - DNA, 80 bp, Artificial Sequence
  ENSG00000074370_0 (sequence is synthesized)
gccactgccgtcgggtaaggtcccagcacggacatggcctcgcgcggcgcccgcccgggcccgagtcccccgcgccccgc

SEQ ID NO: 64981 - DNA, 120 bp, Artificial Sequence
  ENSG00000074370_1 (sequence is synthesized)
ggcctcgacggtgcggacggcgcagacggccgggcgggcggcatggaggcggcgcatctgctcccggccgccgacgtgctgcgccacttctcggtgacagccgagggcggcctgagcccg

SEQ ID NO: 64982 - DNA, 120 bp, Artificial Sequence
  ENSG00000074370_2 (sequence is synthesized)
cgcgggagcgctacggccccaacgagctcccgagtgaggaagggaagtccctgtgggagctggtgctggaacagtttgaggacctcctggtgcgcatcctgctgctggctgcccttgtct

SEQ ID NO: 64983 - DNA, 120 bp, Artificial Sequence
  ENSG00000074370_3 (sequence is synthesized)
cctttgtcctggcctggttcgaggagggcgaggagaccacgaccgccttcgtggagcccctggtcatcatgctgatcctcgtggccaacgccattgtgggcgtgtggcaggaacgcaacg

SEQ ID NO: 64984 - DNA, 120 bp, Artificial Sequence
  ENSG00000074370_4 (sequence is synthesized)
ccgagagtgccatcgaggccctgaaggagtatgagcctgagatgggcaaggtgatccgctcggaccgcaagggcgtgcagaggatccgtgcccgggacatcgtcccaggggacattgtag

SEQ ID NO: 64985 - DNA, 120 bp, Artificial Sequence
  ENSG00000074370_5 (sequence is synthesized)
aagtggcagtgggggacaaagtgcctgctgacctccgcctcatcgagatcaagtccaccacgctgcgagtggaccagtccatcctgacgggtgaatctgtgtccgtgaccaagcacacag

SEQ ID NO: 64986 - DNA, 120 bp, Artificial Sequence
  ENSG00000074370_6 (sequence is synthesized)
aggccatcccagaccccagagctgtgaaccaggacaagaagaacatgctgttttctggcaccaatatcacatcgggcaaagcggtgggtgtggccgtggccaccggcctgcacacggagc

SEQ ID NO: 64987 - DNA, 120 bp, Artificial Sequence
  ENSG00000074370_7 (sequence is synthesized)
tgggcaagatccggagccagatggcggcagtcgagcccgagcggacgccgctgcagcgcaagctggacgagtttggacggcagctgtcccacgccatctctgtgatctgcgtggccgtgt

SEQ ID NO: 64988 - DNA, 120 bp, Artificial Sequence
  ENSG00000074370_8 (sequence is synthesized)
gggtcatcaacatcggccacttcgccgacccggcccacggtggctcctggctgcgtggcgctgtctactacttcaagatcgccgtggccctggcggtggcggccatccccgagggcctcc

SEQ ID NO: 64989 - DNA, 120 bp, Artificial Sequence
  ENSG00000074370_9 (sequence is synthesized)
cggctgtcatcactacatgcctggcactgggcacgcggcgcatggcacgcaagaacgccatcgtgcgaagcctgccgtccgtggagaccctgggctgcacctcagtcatctgctccgaca

SEQ ID NO: 64990 - DNA, 120 bp, Artificial Sequence
  ENSG00000074370_10 (sequence is synthesized)
agacgggcacgctcaccaccaatcagatgtctgtctgccggatgttcgtggtagccgaggccgatgcgggctcctgccttttgcacgagttcaccatctcgggtaccacgtatacccccg

SEQ ID NO: 64991 - DNA, 120 bp, Artificial Sequence
  ENSG00000074370_11 (sequence is synthesized)
agggcgaagtgcggcagggggatcagcctgtgcgctgcggccagttcgacgggctggtggagctggcgaccatctgcgccctgtgcaacgactcggctctggactacaacgaggccaagg

SEQ ID NO: 64992 - DNA, 120 bp, Artificial Sequence
  ENSG00000074370_12 (sequence is synthesized)
gtgtgtatgagaaggtgggagaggccacggagacagctctgacttgcctggtggagaagatgaacgtgttcgacaccgacctgcaggctctgtcccgggtggagcgagctggcgcctgta

SEQ ID NO: 64993 - DNA, 120 bp, Artificial Sequence
  ENSG00000074370_13 (sequence is synthesized)
acacggtcatcaagcagctgatgcggaaggagttcaccctggagttctcccgagaccggaaatccatgtccgtgtactgcacgcccacccgccctcaccctactggccagggcagcaaga

SEQ ID NO: 64994 - DNA, 120 bp, Artificial Sequence
  ENSG00000074370_14 (sequence is synthesized)
tgtttgtgaagggggctcctgagagtgtgatcgagcgctgtagctcagtccgcgtggggagccgcacagcacccctgacccccacctccagggagcagatcctggcaaagatccgggatt

SEQ ID NO: 64995 - DNA, 120 bp, Artificial Sequence
  ENSG00000074370_15 (sequence is synthesized)
ggggctcaggctcagacacgctgcgctgcctggcactggccacccgggacgcgcccccaaggaaggaggacatggagctggacgactgcagcaagtttgtgcagtacgagacggacctga

SEQ ID NO: 64996 - DNA, 120 bp, Artificial Sequence
  ENSG00000074370_16 (sequence is synthesized)
ccttcgtgggctgcgtaggcatgctggacccgccgcgacctgaggtggctgcctgcatcacacgctgctaccaggcgggcatccgcgtggtcatgatcacgggggataacaaaggcactg

SEQ ID NO: 64997 - DNA, 120 bp, Artificial Sequence
  ENSG00000074370_17 (sequence is synthesized)
ccgtggccatctgccgcaggcttggcatctttggggacacggaagacgtggcgggcaaggcctacacgggccgcgagtttgatgacctcagccccgagcagcagcgccaggcctgccgca

SEQ ID NO: 64998 - DNA, 120 bp, Artificial Sequence
  ENSG00000074370_18 (sequence is synthesized)
ccgcccgctgcttcgcccgcgtggagcccgcacacaagtcccgcatcgtggagaacctgcagtcctttaacgagatcactgctatgactggcgatggagtgaacgacgcaccagccctga

SEQ ID NO: 64999 - DNA, 120 bp, Artificial Sequence
  ENSG00000074370_19 (sequence is synthesized)
gcatcgccatgggctcaggcacggccgtggccaagtcggcggcagagatggtgctgtcagatgacaactttgcctccatcgtggctgcggtggaggagggccgggccatctacagcaaca

SEQ ID NO: 65000 - DNA, 120 bp, Artificial Sequence
  ENSG00000074370_20 (sequence is synthesized)
tgaagcaattcatccgctacctcatctcctccaatgttggcgaggtcgtctgcatcttcctcacggcaattctgggcctgcccgaagccctgatccctgtgcagctgctctgggtgaacc

SEQ ID NO: 65001 - DNA, 120 bp, Artificial Sequence
  ENSG00000074370_21 (sequence is synthesized)
tggtgacagacggcctacctgccacggctctgggcttcaacccgccagacctggacatcatggagaagctgccccggagcccccgagaagccctcatcagtggctggctcttcttccgat

SEQ ID NO: 65002 - DNA, 120 bp, Artificial Sequence
  ENSG00000074370_22 (sequence is synthesized)
acctggctatcggagtgtacgtaggcctggccacagtggctgccgccacctggtggtttgtgtatgacgccgagggacctcacatcaacttctaccagctgaggaacttcctgaagtgct

SEQ ID NO: 65003 - DNA, 120 bp, Artificial Sequence
  ENSG00000074370_23 (sequence is synthesized)
ccgaagacaacccgctctttgccggcatcgactgtgaggtgttcgagtcacgcttccccaccaccatggccttgtccgtgctcgtgaccattgaaatgtgcaatgccctcaacagcgtct

SEQ ID NO: 65004 - DNA, 120 bp, Artificial Sequence
  ENSG00000074370_24 (sequence is synthesized)
cggagaaccagtcgctgctgcggatgccgccctggatgaacccctggctgctggtggctgtggccatgtccatggccctgcacttcctcatcctgctcgtgccgcccctgcctctcattt

SEQ ID NO: 65005 - DNA, 120 bp, Artificial Sequence
  ENSG00000074370_25 (sequence is synthesized)
tccaggtgaccccactgagcgggcgccagtgggtggtggtgctccagatatctctgcctgtcatcctgctggatgaggccctcaagtacctgtcccggaaccacatgcacgaagaaatga

SEQ ID NO: 65006 - DNA, 120 bp, Artificial Sequence
  ENSG00000074370_26 (sequence is synthesized)
gccagaagtgagcgctgggaacagagtggagtctccggtgtgtacctcagactgatggtgcccatgtgttcgcctccgccccccacccttgccaccacactcgcccacttgcccaccggg

SEQ ID NO: 65007 - DNA, 120 bp, Artificial Sequence
  ENSG00000074370_27 (sequence is synthesized)
tcccgccggataaatgacaggcccgaggtcagaatggccatccccgggccccgtcctggggtctctgtccccacttccttctggcctgggaggtctgtaattcctgtctcctggactctc

SEQ ID NO: 65008 - DNA, 120 bp, Artificial Sequence
  ENSG00000074370_28 (sequence is synthesized)
ctgggaagttccctgctctgcagctctggcccaggagctgcaggctgggagggggcagccaagaagccggagctggcagcatacccagagatccggggcccccccacccccaaatcacga

SEQ ID NO: 65009 - DNA, 120 bp, Artificial Sequence
  ENSG00000074370_29 (sequence is synthesized)
gtgcagctggagcttgctcccccttgttcggaagctggacgttcacttggtgactggtgcctctgcactgacggaggactctgggggtccttcttaccggctctgacctctctcttcgtg

SEQ ID NO: 65010 - DNA, 120 bp, Artificial Sequence
  ENSG00000074370_30 (sequence is synthesized)
cctggtctgggactgggtcagccctgggggatcagaaggggccatctgggcccagctgtgtacagcgagggtgggcagccccctccactccactctgcttccacaaagtcggctcccgag

SEQ ID NO: 65011 - DNA, 120 bp, Artificial Sequence
  ENSG00000074370_31 (sequence is synthesized)
agctcgaggctgcttctgtttatatgtgcagggcccgggcgggtgaagggtcagagagacggacacaaggagccggcaggagggcggagcgaggatgtcctttcccgggagacaagtcgg

SEQ ID NO: 65012 - DNA, 120 bp, Artificial Sequence
  ENSG00000074370_32 (sequence is synthesized)
gaaagcctggctggactgcctcagccccgcgcgcctcctggactcagggttccccgtcctgagctcgggagatgttcagagtcacactgccgcccggtctgccacgcagaggtccaactt

SEQ ID NO: 65013 - DNA, 120 bp, Artificial Sequence
  ENSG00000074370_33 (sequence is synthesized)
gccacccgcgtccctggtacctgagaccaccgacatcctcaggttcctgaccgtggcgcccttctacccagcccagtgtgcggccgccgcgctgtctgcacagctgggggcctctgagcc

SEQ ID NO: 65014 - DNA, 120 bp, Artificial Sequence
  ENSG00000074370_34 (sequence is synthesized)
tggtgggcttcctggactcttggcctcactccttgccccctccccacgacacccatgagccgaaaggatgtcactaaggatggctgattccccaagggcacccgctctccctccctccct

SEQ ID NO: 65015 - DNA, 120 bp, Artificial Sequence
  ENSG00000074370_35 (sequence is synthesized)
gctggaggaacacgtcatatcagatgagaggaagatggcctctgatggacagaatttttctcttaactcagcttttgctactttggcaaaaactagcgaggggtagcagaaacctgcacc

SEQ ID NO: 65016 - DNA, 120 bp, Artificial Sequence
  ENSG00000074370_36 (sequence is synthesized)
aaggattgtccctatgtcttggccactcctagagcgtgtgcagactgatgattttatatgtaaatcaagactcacatccctttcctagtcccccacatccaaagcccctcagcctgcctt

SEQ ID NO: 65017 - DNA, 120 bp, Artificial Sequence
  ENSG00000074370_37 (sequence is synthesized)
gcagaccaatgggctccatgttctgtagccccctcccctacgcctcacccctcctccctctcacaggttctgggcggccagtgagagaaacgcagtgggggaggcagggagtctggtgcc

SEQ ID NO: 65018 - DNA, 120 bp, Artificial Sequence
  ENSG00000074370_38 (sequence is synthesized)
tgcagagattctctgcttctttcctggggggaggtggggaggtcttagcaggagcgggccctgtacccacctgctgacctgctgtttggtagagaaataaaggttgtgtgactgggggaa

SEQ ID NO: 65019 - DNA, 120 bp, Artificial Sequence
  ENSG00000074370_39 (sequence is synthesized)
ccagctgtaaatggaatcttaataacagtgaacagggcctgcgtagccttcatcttctataccgcaaaggtgaattccactcccgcatggttttgttggttgattttcacatgcatttcc

SEQ ID NO: 65020 - DNA, 120 bp, Artificial Sequence
  ENSG00000074370_40 (sequence is synthesized)
ctattcagtgatctccaggctcccgctagcctccccaggctaatgccagctgttctccttctgagccgctgcactcctgctccagaacgtctgcctttcccacgctgtgcccttgcttct

SEQ ID NO: 65021 - DNA, 120 bp, Artificial Sequence
  ENSG00000074370_41 (sequence is synthesized)
ccctggcacggtgcagctctccccaccgccgccccgaccccgcacccctcccgggatccccagcccaccccacggcagtgttttgtgtgctggttgtgcccaggcgtgggccaagggcag

SEQ ID NO: 65022 - DNA, 120 bp, Artificial Sequence
  ENSG00000074370_42 (sequence is synthesized)
cagggagcctgttgaacttacagctcgagttgttggagttccaggggagatgggtctagagccgcatgggtggcctgcagtgtccttccccactcgctatacacgaataaacatccccac

SEQ ID NO: 65023 - DNA, 120 bp, Artificial Sequence
  ENSG00000074370_43 (sequence is synthesized)
ctggggagccgagctcagagcccacgggaaacccagagacaccagcacggacccccaagccaaaggcgcctccccatcccagtcagttagcggggaccaagaggcctcactgccagatgt

SEQ ID NO: 65024 - DNA, 120 bp, Artificial Sequence
  ENSG00000074370_44 (sequence is synthesized)
ccgtgtgcgaatgtgtatttgtgtgcacatggcctgagtgcctgagtgagaggtgtgtgtaatgtgtatattttgcatgtgtgctctggtgcattttgagcgtgagtacaagcagaagga

SEQ ID NO: 65025 - DNA, 120 bp, Artificial Sequence
  ENSG00000074370_45 (sequence is synthesized)
tttgtgccggcgtgtgactgtgcacacactcgtattcacatgtgaggatgcctgtggggaatggtgagcgtgtgtgttgctggacatggatggattctgcatctctgcacctcagggcag

SEQ ID NO: 65026 - DNA, 120 bp, Artificial Sequence
  ENSG00000074370_46 (sequence is synthesized)
cagggcagatatgtaggtgtttgcttgtgtttgccggatggtgtggcatgtgctaggtttttgcacatgtctgattcttgggcatgccctcttcgtgtgcgtgtgtgtgtgtgtgtgtgt

SEQ ID NO: 65027 - DNA, 120 bp, Artificial Sequence
  ENSG00000074370_47 (sequence is synthesized)
gtgtgtacttggcctctgctaggcctaaagagcaggtatgtccaggatccagagctgggactggggaaggcaggactggccaggcccgaggcagagctgtgtacacacacccttcacatc

SEQ ID NO: 65028 - DNA, 120 bp, Artificial Sequence
  ENSG00000074370_48 (sequence is synthesized)
ccgcctctgctcctgggctgcagtggacgctgtgggtgtggagcgcagagcctctctgtctgcacatcggggaggcgttctcggatcaccaagtggagggtgtgaaggggctctggtggc

SEQ ID NO: 65029 - DNA, 120 bp, Artificial Sequence
  ENSG00000074370_49 (sequence is synthesized)
tgggtcccaaggtgtccgcagggtcttgcactgcaggggacctgggctcactgggccagcaacgggagcacctcttgggccacactgcctcactgtcttcacctgccaccccctacatgg

SEQ ID NO: 65030 - DNA, 120 bp, Artificial Sequence
  ENSG00000074370_50 (sequence is synthesized)
ccagggcactgtgtgctcttctgggcctcagcctctgacccctctgcacccagcctgtctttatccaggccttctcaggacagtctcgcaggcctggagtaggcagccgctgaccacctc

SEQ ID NO: 65031 - DNA, 120 bp, Artificial Sequence
  ENSG00000074370_51 (sequence is synthesized)
gtccaggacattgggacaaaccggagccggacacatctggcagagcagacggtccctgcctcagcctggaccctgcgttctatttccctcctggtgggcacggacggccaggccggtttg

SEQ ID NO: 65032 - DNA, 120 bp, Artificial Sequence
  ENSG00000074370_52 (sequence is synthesized)
gccctcggtcgggcagggggcctgcaggaccccaccctggggtcgactggccgcccggggaggagggaggcgaccccgcccgcctaagcacgcccctgcgctccccagatgttcgtggta

SEQ ID NO: 65033 - DNA, 120 bp, Artificial Sequence
  ENSG00000074410_0 (sequence is synthesized)
gacgtactcgccacggcacccaggctgcgcgcacgcggtcccggtgtgcagctggagagcgagcggccaccgggagcccccggcacagcccgcgcccgccccgcaggagcccgcgaagat

SEQ ID NO: 65034 - DNA, 120 bp, Artificial Sequence
  ENSG00000074410_1 (sequence is synthesized)
gcgaagatgccccggcgcagcctgcacgcggcggccgtgctcctgctggtgatcttaaaggaacagccttccagcccggccccagtgaacggttccaagtggacttattttggtcctgat

SEQ ID NO: 65035 - DNA, 120 bp, Artificial Sequence
  ENSG00000074410_2 (sequence is synthesized)
ggggagaatagctggtccaagaagtacccgtcgtgtgggggcctgctgcagtcccccatagacctgcacagtgacatcctccagtatgacgccagcctcacgcccctcgagttccaaggc

SEQ ID NO: 65036 - DNA, 120 bp, Artificial Sequence
  ENSG00000074410_3 (sequence is synthesized)
tacaatctgtctgccaacaagcagtttctcctgaccaacaatggccattcagtgaagctgaacctgccctcggacatgcacatccagggcctccagtctcgctacagtgccacgcagctg

SEQ ID NO: 65037 - DNA, 120 bp, Artificial Sequence
  ENSG00000074410_4 (sequence is synthesized)
cacctgcactgggggaacccgaatgacccgcacggctctgagcacaccgtcagcggacagcacttcgccgccgagctgcacattgtccattataactcagacctttatcctgacgccagc

SEQ ID NO: 65038 - DNA, 120 bp, Artificial Sequence
  ENSG00000074410_5 (sequence is synthesized)
actgccagcaacaagtcagaaggcctcgctgtcctggctgttctcattgagatgggctccttcaatccgtcctatgacaagatcttcagtcaccttcaacatgtaaagtacaaaggccag

SEQ ID NO: 65039 - DNA, 120 bp, Artificial Sequence
  ENSG00000074410_6 (sequence is synthesized)
gaagcattcgtcccgggattcaacattgaagagctgcttccggagaggaccgctgaatattaccgctaccgggggtccctgaccacacccccttgcaaccccactgtgctctggacagtt

SEQ ID NO: 65040 - DNA, 120 bp, Artificial Sequence
  ENSG00000074410_7 (sequence is synthesized)
ttccgaaaccccgtgcaaatttcccaggagcagctgctggctttggagacagccctgtactgcacacacatggacgacccttcccccagagaaatgatcaacaacttccggcaggtccag

SEQ ID NO: 65041 - DNA, 120 bp, Artificial Sequence
  ENSG00000074410_8 (sequence is synthesized)
aagttcgatgagaggctggtatacacctccttctcccaagtgcaagtctgtactgcggcaggactgagtctgggcatcatcctctcactggccctggctggcattcttggcatctgtatt

SEQ ID NO: 65042 - DNA, 120 bp, Artificial Sequence
  ENSG00000074410_9 (sequence is synthesized)
gtggtggtggtgtccatttggcttttcagaaggaagagtatcaaaaaaggtgataacaagggagtcatttacaagccagccaccaagatggagactgaggcccacgcttgaggtccccgg

SEQ ID NO: 65043 - DNA, 120 bp, Artificial Sequence
  ENSG00000074410_10 (sequence is synthesized)
agctcccgggcacatccaggaaggaccttgctttggaccctacacacttcggctctctggacacttgcgacacctcaaggtgttctctgtagctcaatctgcaaacatgccaggcctcag

SEQ ID NO: 65044 - DNA, 120 bp, Artificial Sequence
  ENSG00000074410_11 (sequence is synthesized)
ggatcctctgctgggtgcctccttgccttgggaccatggccaccccagagccatccgatcgatggatgggatgcactctcagaccaagcagcaggaattcaaagctgcttgctgtaactg

SEQ ID NO: 65045 - DNA, 120 bp, Artificial Sequence
  ENSG00000074410_12 (sequence is synthesized)
tgtgagattgtgaagtggtctgaattctggaatcacaaaccaagccatgctggtgggccattaatggttggaaaacactttcatccggggctttgccagagcgtgctttcaagtgtcctg

SEQ ID NO: 65046 - DNA, 120 bp, Artificial Sequence
  ENSG00000074410_13 (sequence is synthesized)
gaaattctgctgcttctccaagctttcagacaagaatgtgcactctctgcttaggttttgcttgggaaactcaacttctttcctctggagacggggcatctccctctgatttccttctgc

SEQ ID NO: 65047 - DNA, 120 bp, Artificial Sequence
  ENSG00000074410_14 (sequence is synthesized)
tatgacaaaacctttaatctgcaccttacaactcggggacaaatggggacaggaaggatcaagttgtagagagaaaaagaaaacaagagatatacattgtgatatattagggacactttc

SEQ ID NO: 65048 - DNA, 120 bp, Artificial Sequence
  ENSG00000074410_15 (sequence is synthesized)
acagtcctgtcctctggatcacagacactgcacagaccttagggaatggcaggttcaagttccacttcttggtggggatgagaagggagagagagctagagggacaaagagaatgagaag

SEQ ID NO: 65049 - DNA, 120 bp, Artificial Sequence
  ENSG00000074410_16 (sequence is synthesized)
acatggatgatctgggagagtctcactttggaatcagaattggaatcacattctgtttatcaagccataatgtaaggacagaataatacaatattaagtccaaatccaacctcctgtcag

SEQ ID NO: 65050 - DNA, 120 bp, Artificial Sequence
  ENSG00000074410_17 (sequence is synthesized)
tggagcagttatgttttatactctacagattttacaaataatgaggctgttccttgaaaatgtgttgttgctgtgtcctggaggagacatgagttccgagatgacccaatctgcctttga

SEQ ID NO: 65051 - DNA, 120 bp, Artificial Sequence
  ENSG00000074410_18 (sequence is synthesized)
atctggaggaaataggcagaaacaaaatgactgtagaacttattctctgtaggccaaatttcatttcagccacttctgcaggatccctactgccaacctggaatggagacttttatctac

SEQ ID NO: 65052 - DNA, 120 bp, Artificial Sequence
  ENSG00000074410_19 (sequence is synthesized)
ttctctctctctgaagatgtcaaatcgtggtttagatcaaatatatttcaagctataaaagcaggaggttatctgtgcagggggctggcatcatgtatttaggggcaagtaataatggaa

SEQ ID NO: 65053 - DNA, 120 bp, Artificial Sequence
  ENSG00000074410_20 (sequence is synthesized)
tgctactaagatactccatattcttccccgaatcacacagacagtttctgacaggcgcaactcctccattttcctcccgcaggtgagaaccctgtggagatgagtcagtgccatgactga

SEQ ID NO: 65054 - DNA, 120 bp, Artificial Sequence
  ENSG00000074410_21 (sequence is synthesized)
gaaggaaccgacccctagttgagagcaccttgcagttccccgagaactttctgattcacagtctcattttgacagcatgaaatgtcctcttgaagcatagctttttaaatatctttttcc

SEQ ID NO: 65055 - DNA, 78 bp, Artificial Sequence
  ENSG00000074410_22 (sequence is synthesized)
aatgtcctcttgaagcatagctttttaaatatctttttccttctactcctccctctgactctaagaattctctcttct

SEQ ID NO: 65056 - DNA, 120 bp, Artificial Sequence
  ENSG00000074410_23 (sequence is synthesized)
atctcaaaaaaaaaaaaaaaaaaattattctgtaccatcacaacttttcacaacgatggcaagccttatgtcttgggagcctgttttgctaggcaaagttacaagtgacctaatgggagc

SEQ ID NO: 65057 - DNA, 120 bp, Artificial Sequence
  ENSG00000074410_24 (sequence is synthesized)
gagctcaaatgtgtgtgtgtctctctgtgtgtttgtgtgtgtgtgtgcactcaagacctctaacagcctcgaagcctggggtggcatcccggccttgccattagcatgcctcatgcatca

SEQ ID NO: 65058 - DNA, 120 bp, Artificial Sequence
  ENSG00000074410_25 (sequence is synthesized)
ccagagcagtgggactgtctgtcaaaagactctgtatatcttttgtggatgagttttgtgagagaacagagagaccattgtacctggcacaagggctgttcatgaaaagggagacttact

SEQ ID NO: 65059 - DNA, 120 bp, Artificial Sequence
  ENSG00000074410_26 (sequence is synthesized)
gggaggtgcaagacagtggcatttctcctctcctcttgctgctcagcacagccctggattgcagccccgaggctgagaccagacaaagcccgggaggcagaaagatgctccaagaaccaa

SEQ ID NO: 65060 - DNA, 120 bp, Artificial Sequence
  ENSG00000074410_27 (sequence is synthesized)
cactatcaatgtctttgcaaatcctcacaggattcctgtgggtccagctttggaactgggaaacctttcttcggatccgcactcattccactgatgccagctgcccctgaaggatgccag

SEQ ID NO: 65061 - DNA, 120 bp, Artificial Sequence
  ENSG00000074410_28 (sequence is synthesized)
tactgtggtgtgtgagtctcagcagccgcccacacgctcctaactctgctgcatggcagatgcctaggtggaaatagcaaaaacaaggcccaggctggggccagggccagaggggaaggc

SEQ ID NO: 65062 - DNA, 120 bp, Artificial Sequence
  ENSG00000074410_29 (sequence is synthesized)
cctggattctcactcatgtgagatcttgaatctctttctttgttctgtttgtttagttagtatcatctggtaaaatagttaaaaaacaacaaaaaactctgtatctgtttctagcatgtg

SEQ ID NO: 65063 - DNA, 120 bp, Artificial Sequence
  ENSG00000074410_30 (sequence is synthesized)
ctgcattgactctattaatcacatttcaaattcaccctacattcctctcctcttcactagcctctctgaaggtgtcctggccagccctggagaagcactggtgtctgcagcacccctcag

SEQ ID NO: 65064 - DNA, 120 bp, Artificial Sequence
  ENSG00000074410_31 (sequence is synthesized)
ttcctgtgcctcagcccacaggccactgtgataatggtctgtttagcacttctgtatttattgtaagaatgattataatgaagatacacactgtaactacaagaaattataaatgttttt

SEQ ID NO: 65065 - DNA, 120 bp, Artificial Sequence
  ENSG00000074410_32 (sequence is synthesized)
cacatcaggctgttctttttttttttttggaggcgaggttaaagcattactatttgcaaagcactctgtagctccctgttatggggataggtaactaatcagaataataatgtcactcgc

SEQ ID NO: 65066 - DNA, 120 bp, Artificial Sequence
  ENSG00000074410_33 (sequence is synthesized)
atccacttcttagaacctggctccaaaggaaaataagctgatagactcaatcactttcctgaggatggaggcctatggcatgtgtggctgcaggtcgcgaagctgcttaatggtgctggg

SEQ ID NO: 65067 - DNA, 120 bp, Artificial Sequence
  ENSG00000074410_34 (sequence is synthesized)
aagcctagaggaattaaataaagaccctggaggaggtgggatcggagctgcaccttgaacaaatagctcagatttgaacagatggatggaaaagagggaggtgttcccaaccaaggggac

SEQ ID NO: 65068 - DNA, 120 bp, Artificial Sequence
  ENSG00000074410_35 (sequence is synthesized)
atgatacagggaacaggtcctatgtctctttactcctgagagtattaaacctagtaggtgggcagcccctcttggttgcctgttaccttattttgaattctttttgcaaaacatactatc

SEQ ID NO: 65069 - DNA, 120 bp, Artificial Sequence
  ENSG00000074410_36 (sequence is synthesized)
acccgtccaaataatcttttgtctaaatccagacttcacattctgactggggcaaaaagaggcagtccagtaaaggttataaaataggtaccatcattgtttgccttatttagaaaagca

SEQ ID NO: 65070 - DNA, 120 bp, Artificial Sequence
  ENSG00000074410_37 (sequence is synthesized)
tccaattttcactataatcaccctaagcctgagagaggtgaactgttcaagggtactttggctccagtgggtgacagtacctggcccagctttggaattgaaacatttctgatggtctgt

SEQ ID NO: 65071 - DNA, 120 bp, Artificial Sequence
  ENSG00000074410_38 (sequence is synthesized)
actctgctagaacacaggatgcttctgctctccctgctctggcatcctgccaggtgtcatggccacgcacaggcatgaagacagccgggaagccagagttcccacgaagcactcactcct

SEQ ID NO: 65072 - DNA, 120 bp, Artificial Sequence
  ENSG00000074410_39 (sequence is synthesized)
tggacttgctcccaccccactggggagagcactcctggagcaggaaatgagcatctctcatctccctgaattccacatccactggctgaatgatcagggaggcatagcagtgagagccat

SEQ ID NO: 65073 - DNA, 120 bp, Artificial Sequence
  ENSG00000074410_40 (sequence is synthesized)
aggtcggcagagggaactcaggccctcctttaggatggccatcacctcatctcaatccagccaaatcaaccatctagagcacacaggccgagagaaatgtaataaaatataacatgagac

SEQ ID NO: 65074 - DNA, 120 bp, Artificial Sequence
  ENSG00000074410_41 (sequence is synthesized)
acgtatgaaatttaaactttccggtagccacactagaaaaaggtaaaaaaaaaaaaaccagtgacattaatttaaatttaattttagataatccaacagatctaaaatactatcatttcc

SEQ ID NO: 65075 - DNA, 120 bp, Artificial Sequence
  ENSG00000074410_42 (sequence is synthesized)
acatgtaaccagtattttcatgtgtttttttctgcagtaaatctttgaaatctggtgtgtgttttacactgacagcacactcgattcagatgctagattttccttgtagatatttggtcg

SEQ ID NO: 65076 - DNA, 120 bp, Artificial Sequence
  ENSG00000074410_43 (sequence is synthesized)
ttatttagatttcataaaatttacagtttaaaagattccaatatccgagttgctccaaacacacttagaagttgttttccaaataatggaatcaatgatcggcttttagatgtaaactta

SEQ ID NO: 65077 - DNA, 120 bp, Artificial Sequence
  ENSG00000074410_44 (sequence is synthesized)
ttaaaataaagtagcgtttctcagttaagtcacattccaagcgctcaagatccatgccctgcgcagacccggacgacgaacccgactttcagagactgagggttctgcctagagagctcc

SEQ ID NO: 65078 - DNA, 120 bp, Artificial Sequence
  ENSG00000074410_45 (sequence is synthesized)
cacagaaatcagcccgagaagaaagccttgtgggtgaagccagggagggagacaggagggcaggaggaaaatcaagcctaaatgagcacatcgtggacgccgctcttcctctccccacat

SEQ ID NO: 65079 - DNA, 120 bp, Artificial Sequence
  ENSG00000074410_46 (sequence is synthesized)
ctcctcgcctcgccgcagtgggcccggctgtgccccaggtccccgcggtcgggagtgaatggcgctcgggtggcaggcacgtgggcacctggtgaactgcaggaccctggcaccgccacc

SEQ ID NO: 65080 - DNA, 120 bp, Artificial Sequence
  ENSG00000074410_47 (sequence is synthesized)
ccctcgcccctacacacacaggagtgcccctcccgttgtcacgtggccttcctgctgggtatctggagcagttgcagcctcgcttccggaaggaaacggggcctctggggcacagggacc

SEQ ID NO: 65081 - DNA, 120 bp, Artificial Sequence
  ENSG00000074410_48 (sequence is synthesized)
acctgccagtgcgttccagccgggctgccatccacactggagaccgccccgcacgtggtcctcgggctcggattcagctgtcgcaggatgtgaggggaaaggtatgtggcccgacaatgc

SEQ ID NO: 65082 - DNA, 120 bp, Artificial Sequence
  ENSG00000074410_49 (sequence is synthesized)
caccgagggtgtccccgggctccaccccgtgcctcttcattatagaatgactgggcagagataagggccagattactttgctgtattgaataattcaccataaaaatgattgcaaccagg

SEQ ID NO: 65083 - DNA, 120 bp, Artificial Sequence
  ENSG00000074410_50 (sequence is synthesized)
agtccagcaagatgccggtggaagacgcagctcctgggcctgccagaacaggtagcaaggcccttgtggcaagcagctcaccgaccttctccgggtgtctgtaccttcctgggcaaggca

SEQ ID NO: 65084 - DNA, 120 bp, Artificial Sequence
  ENSG00000074410_51 (sequence is synthesized)
gacttttagccctgagctttccagagtgtgatgctgaggcctcatctgaggatgagaactccaacaacagggaaaaccttgattagcgagccctgggagggtagcagaagatgtagggta

SEQ ID NO: 65085 - DNA, 120 bp, Artificial Sequence
  ENSG00000074410_52 (sequence is synthesized)
taaggctatgatttgaatgtgagcaggtacaatgcaaactgctggcaaggcagcagtgctcaggcagcagatgtgtttctagtggcctccaggatcactggagtggcctgtgcctcctca

SEQ ID NO: 65086 - DNA, 120 bp, Artificial Sequence
  ENSG00000074410_53 (sequence is synthesized)
aactgttctgcctgctaagaggttccaagtggacttattttggtaagtagagattttaaatacttttttgttgaaaagaaaatagaaatggttgtatttaatgagaaaaacagaaacttc

SEQ ID NO: 65087 - DNA, 120 bp, Artificial Sequence
  ENSG00000074410_54 (sequence is synthesized)
atgctctgtggaggtgattttgaagggtcggaagcacagttcttgtattgtagaaagagagtacaaaggcatctcctaagaacacttcaacttgggttgcatactgcactttctccaagc

SEQ ID NO: 65088 - DNA, 120 bp, Artificial Sequence
  ENSG00000074410_55 (sequence is synthesized)
agtccacgcggcacctcagtccccatcatcctccatatcacaatcaatgacttgatttcctcatttagtttcattggcagctcttcaaaacctctccaaatatcacaggtgtctgaaagc

SEQ ID NO: 65089 - DNA, 120 bp, Artificial Sequence
  ENSG00000074410_56 (sequence is synthesized)
accgcagaaattccaggctgagcttcaaaagaagtcaagctaggcaaatgaatagatgtctcctagttcttttttaaaaaaaagagctctaaatctgcatttgctaatatatcctcagtg

SEQ ID NO: 65090 - DNA, 120 bp, Artificial Sequence
  ENSG00000074416_0 (sequence is synthesized)
ccccgccgccgagccggcccagggataaagtggcggcgcagacgccgcaccctgtcgccgcgaagccggtcgcgcgcagctcgtcccggccctggcccgccgcaaacgaggatccgctgc

SEQ ID NO: 65091 - DNA, 120 bp, Artificial Sequence
  ENSG00000074416_1 (sequence is synthesized)
aggatccgctgcgctcggggaacgcgacagcggcgctcgtggccccggacctgaagacccttccagcatgccagaggaaagttcccccaggcggaccccgcagagcattccctaccagga

SEQ ID NO: 65092 - DNA, 120 bp, Artificial Sequence
  ENSG00000074416_2 (sequence is synthesized)
cctccctcacctggtcaatgcagacggacagtacctcttctgcaggtactggaaacccacaggcacacccaaggccctcatctttgtgtcccatggagccggagagcacagtggccgcta

SEQ ID NO: 65093 - DNA, 120 bp, Artificial Sequence
  ENSG00000074416_3 (sequence is synthesized)
tgaagagctggctcggatgctgatggggctggacctgctggtgttcgcccacgaccatgttggccacggacagagcgaaggggagaggatggtagtgtctgacttccacgttttcgtcag

SEQ ID NO: 65094 - DNA, 120 bp, Artificial Sequence
  ENSG00000074416_4 (sequence is synthesized)
ggatgtgttgcagcatgtggattccatgcagaaagactaccctgggcttcctgtcttccttctgggccactccatgggaggcgccatcgccatcctcacggccgcagagaggccgggcca

SEQ ID NO: 65095 - DNA, 120 bp, Artificial Sequence
  ENSG00000074416_5 (sequence is synthesized)
cttcgccggcatggtactcatttcgcctctggttcttgccaatcctgaatctgcaacaactttcaaggtccttgctgcgaaagtgctcaaccttgtgctgccaaacttgtccctcgggcc

SEQ ID NO: 65096 - DNA, 120 bp, Artificial Sequence
  ENSG00000074416_6 (sequence is synthesized)
catcgactccagcgtgctctctcggaataagacagaggtcgacatttataactcagaccccctgatctgccgggcagggctgaaggtgtgcttcggcatccaactgctgaatgccgtctc

SEQ ID NO: 65097 - DNA, 120 bp, Artificial Sequence
  ENSG00000074416_7 (sequence is synthesized)
acgggtggagcgcgccctccccaagctgactgtgcccttcctgctgctccagggctctgccgatcgcctatgtgacagcaaaggggcctacctgctcatggagttagccaagagccagga

SEQ ID NO: 65098 - DNA, 120 bp, Artificial Sequence
  ENSG00000074416_8 (sequence is synthesized)
caagactctcaagatttatgaaggtgcctaccatgttctccacaaggagcttcctgaagtcaccaactccgtcttccatgaaataaacatgtgggtctctcaaaggacagccacggcagg

SEQ ID NO: 65099 - DNA, 120 bp, Artificial Sequence
  ENSG00000074416_9 (sequence is synthesized)
aactgcgtccccaccctgaatgcattggccggtgcccggctcatggtctgggggatgcaggcaggggaagggcagagatggcttctcagatatggcttgccaaaaaaaaaaaaaaaaaaa

SEQ ID NO: 65100 - DNA, 120 bp, Artificial Sequence
  ENSG00000074416_10 (sequence is synthesized)
aatcagaaattggagaaatccttagcacaattttctaaaaaataacagacatttttgttatacattagactatcagacactggacctaccttaatggttagacactttatgcaaaaaaag

SEQ ID NO: 65101 - DNA, 120 bp, Artificial Sequence
  ENSG00000074416_11 (sequence is synthesized)
agaaaggtcccaggtgattttccacaaagaatgtgctaaaatgtccactgaaaacaaagccaagcctctgccctgcctctcccagctcccacaagggttccaggaattcctggtgttccc

SEQ ID NO: 65102 - DNA, 120 bp, Artificial Sequence
  ENSG00000074416_12 (sequence is synthesized)
aggacaccagactgcaataactggaggcgcctccttcctgcccacccttcgctcacgccccagcgccctctctgaccagcctccgcttggtggccttcctctggccgtgtgatgaggtgg

SEQ ID NO: 65103 - DNA, 120 bp, Artificial Sequence
  ENSG00000074416_13 (sequence is synthesized)
ttgctgtctccataggggccagctccccagggcagactcacgtgcccctctgaggctcagaaaatgcccagcccttcctcaaaatgagcagccacccatgactttgtgggctccttgtta

SEQ ID NO: 65104 - DNA, 120 bp, Artificial Sequence
  ENSG00000074416_14 (sequence is synthesized)
gcctgagaccaggctttgcagaggggcggggggtgaggcttagcccagaaggagaactgagcaggaaaccaaggctcttctctgtcccctgcccttcccctcctgccagggggaggctca

SEQ ID NO: 65105 - DNA, 120 bp, Artificial Sequence
  ENSG00000074416_15 (sequence is synthesized)
ggttggtccccgagtgccgcctgtactcacaaaggctgcctttcctctagagtcactaattttacctgatgctatgagagaatcatattgaagatgaaatgtctaatatataatgtatat

SEQ ID NO: 65106 - DNA, 120 bp, Artificial Sequence
  ENSG00000074416_16 (sequence is synthesized)
tttaaagcagagactattttggtggataggtgggagggagcaaggggagtttgagggaatcagagcttgatgctactgtacagaactggacaggttgggccggcagtggtggggccagag

SEQ ID NO: 65107 - DNA, 120 bp, Artificial Sequence
  ENSG00000074416_17 (sequence is synthesized)
gagaggggacttggctgggcctttcctatgggcaaggcccagtgctcttcctgcccaccagggaccatggagcagtggcaccctatggggctatgatccctaggcctgggcctgggcctg

SEQ ID NO: 65108 - DNA, 120 bp, Artificial Sequence
  ENSG00000074416_18 (sequence is synthesized)
cctatggcccagagctaccctgggagtgtcagtgctagcagcacagctacctctggtggcaggagaagagaggcccagcacagcagcaggccaggccttcctgtccaggtctgcatggag

SEQ ID NO: 65109 - DNA, 120 bp, Artificial Sequence
  ENSG00000074416_19 (sequence is synthesized)
cactcggtgacccagagcagggactggaggcacccccagccctgccccaggccacagcaggacaggccgggacaggcctcacccaaggccaaggctggcatcagccaatcattcagagct

SEQ ID NO: 65110 - DNA, 120 bp, Artificial Sequence
  ENSG00000074416_20 (sequence is synthesized)
gaggccctgggcctagcctgcccttctcaggtgccaataccaccccagccctgcccttggcctcactttttcccagcaataagtggggttcaccacccgcctcgggaatactttcccctt

SEQ ID NO: 65111 - DNA, 120 bp, Artificial Sequence
  ENSG00000074416_21 (sequence is synthesized)
ctaaatgggacttgctgttacctcaggaggctccttagtgcaaatatgaccctggtcagggctttgccaccgttgaagccctgcagaaggtgcaatgtaggggttctggggccacagagg

SEQ ID NO: 65112 - DNA, 120 bp, Artificial Sequence
  ENSG00000074416_22 (sequence is synthesized)
agaggccacttcccaccaggacccccaacatgaagtctaggcctcaggggctcccgcccttcttcctccagcagcgggaactgccactgctctcccaggccctgttctggaggctaacct

SEQ ID NO: 65113 - DNA, 120 bp, Artificial Sequence
  ENSG00000074416_23 (sequence is synthesized)
tggttcctggagagtgtgcccctccaccctccctccagcagccctgatcacaccatgagagccaggaacgggtcaccctgctgaagatcactctgtgccctgggggaggagccaagccct

SEQ ID NO: 65114 - DNA, 120 bp, Artificial Sequence
  ENSG00000074416_24 (sequence is synthesized)
caccccacaaggggcaggtgggggcttggttgctgacccggcccaagtccccacagagcaccttctgtagctccagcttgtctccctggcttctctttgaaggagaaaaatgtaaaatat

SEQ ID NO: 65115 - DNA, 120 bp, Artificial Sequence
  ENSG00000074416_25 (sequence is synthesized)
gcactgagaaagccagccccgcctgcttagtcagccccggcagcagggcagccatgggaactcaggaaaagcaggaaccctttccaaaagcccagagatgccctgggctcagatctgtaa

SEQ ID NO: 65116 - DNA, 120 bp, Artificial Sequence
  ENSG00000074416_26 (sequence is synthesized)
ttctcccaggagctgtgatagagcaggccacacaaagtccctacgcctccctgctgcctcccccagatgcatgtggtggcatcaccattccccaaattgaatatcagcatgcggcctgac

SEQ ID NO: 65117 - DNA, 120 bp, Artificial Sequence
  ENSG00000074416_27 (sequence is synthesized)
cagggactctttagatgcatgaatttatttatatgaaggctctcacagagacacacacagcacttcagtagcatttgcattcctggttaaagaatcaccaatatttaaaataaaaacttt

SEQ ID NO: 65118 - DNA, 120 bp, Artificial Sequence
  ENSG00000074416_28 (sequence is synthesized)
cctgaaattgggactgtcatgttatccagaagggctggtacatccgcccaccatgtccccctgctgggtcaggagccaacacaggaccctgcgtgtgagcgtgcctgacatctcacgcac

SEQ ID NO: 65119 - DNA, 120 bp, Artificial Sequence
  ENSG00000074416_29 (sequence is synthesized)
ggccactccagagccggtccctgtccttggaaagctgtgaagccttgcgttgagttccttctcgatactgacggctccgtgctgacattctgagctctggagtcacaccagcgcaggggc

SEQ ID NO: 65120 - DNA, 120 bp, Artificial Sequence
  ENSG00000074416_30 (sequence is synthesized)
gtggaggaactgaggtttggaaggaatgccaggtctcgcacagcttggcctcgagaaggtgagaggaaggcaaaggccagggaggggacccagagaggcctggcacacaaggcccaagca

SEQ ID NO: 65121 - DNA, 120 bp, Artificial Sequence
  ENSG00000074416_31 (sequence is synthesized)
ccaccgtcaacacagcccagtccatacagaaatgggtttcatgcctgaaaagctttttacagaaagatgccgcctgtagccagtgacagccgcaaccctacaggcctcagttccttgcag

SEQ ID NO: 65122 - DNA, 120 bp, Artificial Sequence
  ENSG00000074416_32 (sequence is synthesized)
aggtgaggggtagagagtcagcctccctcccttccagcagcgacccagcttccctccacttccaggtggtgctgggctcaccgagggagcactggtgggtgctctgaaaacccacaggat

SEQ ID NO: 65123 - DNA, 120 bp, Artificial Sequence
  ENSG00000074416_33 (sequence is synthesized)
cccacctccaggcccacctgggtcccatctcactctcttcttctttcaccaattgctaacatagaccttgttgggatcacgatggcttcacaagccagctgttgggtttgctatgtcact

SEQ ID NO: 65124 - DNA, 120 bp, Artificial Sequence
  ENSG00000074416_34 (sequence is synthesized)
gtggctcagtcacatccctgcgtgtatactgtctgcggggcacatatgtatccatttagagctaaaggaatcagtgtacactacagctaatcctaataaatccgatgttttcggaatggc

SEQ ID NO: 65125 - DNA, 120 bp, Artificial Sequence
  ENSG00000074416_35 (sequence is synthesized)
gtcgccgcgaagccggtcgcgcgcagctcgtcccggccctggcccgccgcaaacgaggatccgctgcgctcggggaacgcgacagcggcgctcgtggccccggtaactgcctcccggccc

SEQ ID NO: 65126 - DNA, 120 bp, Artificial Sequence
  ENSG00000074416_36 (sequence is synthesized)
ctgccccagcccgccagtgccgccgtcaggggtggggagcagcactggggtcccggacacgcccggcgtgggctcccgctacccatgtgtgcgtgtgtgtgtgtgcacggtgtgtgtgcg

SEQ ID NO: 65127 - DNA, 120 bp, Artificial Sequence
  ENSG00000074416_37 (sequence is synthesized)
cgcgtgtccgagtgtgcgcgcgtgtgcgcgcgcgcgcgccctccctgctccttcgcaccagcccccaaaccaacttgtccccatcaactccatctttctagtccccaccttccccggtgc

SEQ ID NO: 65128 - DNA, 120 bp, Artificial Sequence
  ENSG00000074416_38 (sequence is synthesized)
agacacccggcgaagcccacccggttttcccagcggcatttccgatgacagcttcggggctacgtgtcctgtgctgtcggagacgcacaggaagcaaagtttgtgagaagccttgggggc

SEQ ID NO: 65129 - DNA, 120 bp, Artificial Sequence
  ENSG00000074416_39 (sequence is synthesized)
gactttgccttgggcacccgcatttgtgcgtctgcgaggtgcctcggtgtgcgcggagctagtttcccagtttcccgggcccctcccttctccgagcccctctagcgatttgtttaggaa

SEQ ID NO: 65130 - DNA, 120 bp, Artificial Sequence
  ENSG00000074416_40 (sequence is synthesized)
aagtgatgacatgaactagtagtggagaatcgcagcgccgctccccgccctggggagggaggggagccccggagagcctgccggtgggagctggaagcaggctcccggctgagcgcccca

SEQ ID NO: 65131 - DNA, 120 bp, Artificial Sequence
  ENSG00000074416_41 (sequence is synthesized)
gcccgaaaggcagggtctgggtgcgggaagagggctcggagctgccttcctgctgccttggggccgcccagatgagggaacagcccgatttgcctggttctgattctccaggctgtcgtg

SEQ ID NO: 65132 - DNA, 120 bp, Artificial Sequence
  ENSG00000074416_42 (sequence is synthesized)
cattttctaaagcaaatacttctcaggaagtggctctcctctttttttttttttcctacgaagctcttttcttaaaagcttactttaactgcaaaaagttccactgttcatggaggaaga

SEQ ID NO: 65133 - DNA, 120 bp, Artificial Sequence
  ENSG00000074416_43 (sequence is synthesized)
aaatcaggcttgctgggtgagacgacagaatagggcttgctgtaattctctcctggaggcaggctctctctctggctctctgttcccccttccccaacctctgtgaaaccacttcaagga

SEQ ID NO: 65134 - DNA, 120 bp, Artificial Sequence
  ENSG00000074416_44 (sequence is synthesized)
tggctcaagctgcgctgatccttgaggcgccaacagcctaagctgtcagcatcttctccagagcctggaagtagaggccttgtcactttttggtataaaagttttgggttaagaggtgcc

SEQ ID NO: 65135 - DNA, 120 bp, Artificial Sequence
  ENSG00000074416_45 (sequence is synthesized)
agcagcagaaacatatgttcaaggatgaaggtaagtctgtcttcacaaatgactgatcctgaagatggactggcacctccaggcccaggtccctgcagaatcaggtgatgggtccccaaa

SEQ ID NO: 65136 - DNA, 120 bp, Artificial Sequence
  ENSG00000074416_46 (sequence is synthesized)
acacaaatggtggcacaatgagaaatctggtggtgggcttggacgaaatggtgtggatgctgggtggtctcttgctttcacctctgtggcaggcactgctgaggtgctgggtccctgggc

SEQ ID NO: 65137 - DNA, 120 bp, Artificial Sequence
  ENSG00000074416_47 (sequence is synthesized)
cttttcttggctctgagccatctggtcagggaatgggtaggaagctggcttacataaaacagtcatgtccctgagaaggctgtgtgggccccagcaggcaggtgggttgacctgggagca

SEQ ID NO: 65138 - DNA, 120 bp, Artificial Sequence
  ENSG00000074416_48 (sequence is synthesized)
gcgcctgcaaggctggcacttgcacaccatcccgttacacagagccttcctgcggttcctgagtgtggtggggatcctcccgccacagctggcagccccatgtctcctctggctgcacac

SEQ ID NO: 65139 - DNA, 120 bp, Artificial Sequence
  ENSG00000074416_49 (sequence is synthesized)
aggatcactagggaactttaaaaaggcactgatgccagggctccacttcggccaatacaatcagtctctcagggcagcactgggaggaggtgtttgtggtgtttcatggacacacacact

SEQ ID NO: 65140 - DNA, 120 bp, Artificial Sequence
  ENSG00000074416_50 (sequence is synthesized)
gccagcatcagggagtagtgacagggtactgagaacagcagaatatctagaagtgagttcttcataactgtggaacacagaagtcttccctcacagtgtggcccttgcccactgctgctg

SEQ ID NO: 65141 - DNA, 120 bp, Artificial Sequence
  ENSG00000074416_51 (sequence is synthesized)
gaggagagcgctaaggccctggaacactcgtccttacacagccagagtctagtgaaggccacagagccacagcccactgcctttatgcactgatccactccattttctcatttttagatt

SEQ ID NO: 65142 - DNA, 120 bp, Artificial Sequence
  ENSG00000074416_52 (sequence is synthesized)
gttttaacctttgaaagcacagatcccaatgcagacgagctcccaattcttggagttcacagacatttgatccgtgtttgaaaataccccagtccttgtgcagagttcccagaattccaa

SEQ ID NO: 65143 - DNA, 120 bp, Artificial Sequence
  ENSG00000074416_53 (sequence is synthesized)
gttttcctttcccaggctcgttcttggagctggcccatgatactagctggactcttgaacattcctgacccatcacggccacccttcgaggcttccgattatgcagacacaccatgcccc

SEQ ID NO: 65144 - DNA, 120 bp, Artificial Sequence
  ENSG00000074416_54 (sequence is synthesized)
tgcacagtgctcaaagtcaggctgccgcatgcttctatactagacagtcaaagtcggagcccagggctcagcaaagcacctggcacagtggcggctgcagaatgagatctgcttgcctgg

SEQ ID NO: 65145 - DNA, 120 bp, Artificial Sequence
  ENSG00000074416_55 (sequence is synthesized)
atgccaaggctggagggcagtaagcttcggtatcctcagaggcagggggctgccacctttgcactaagaaggaattactgatttctaccatttgagaaaaggagtgttgaccacatggaa

SEQ ID NO: 65146 - DNA, 120 bp, Artificial Sequence
  ENSG00000074416_56 (sequence is synthesized)
ctccgaataggttcatgcacatggaacaaagccctttaggagaaaagcccgttttttgctgtctgcctgatactggatggttgagaaacaatcgtggtgggcagtcacgccacacttgtg

SEQ ID NO: 65147 - DNA, 120 bp, Artificial Sequence
  ENSG00000074416_57 (sequence is synthesized)
cgggcctaggacacaggaaggtttagccctggcctacagggagggtgggcaagcacagcaatcttgtcccccaaaagaacatcagtggccgctggtgccaagacccacgggaaggttaga

SEQ ID NO: 65148 - DNA, 120 bp, Artificial Sequence
  ENSG00000074416_58 (sequence is synthesized)
cagagacagagacgtagtaatccaggctgtgtggcataagaagataaagcggccccccagcccggggcccctcccatggacctcatggtaccgagcctccattttctcatctgttcagtg

SEQ ID NO: 65149 - DNA, 120 bp, Artificial Sequence
  ENSG00000074416_59 (sequence is synthesized)
gagcctccattttctcatctgttcagtgaggatgaagcctcatctcccagggtttttgcaaagacagggagactggccgggcgccgtggcttacgcctataatcccagcaccttgggagg

SEQ ID NO: 65150 - DNA, 63 bp, Artificial Sequence
  ENSG00000074416_60 (sequence is synthesized)
aagatagggaaactgtgcccaatgcaccagaaggtggttcctcggtgcctgtgagtgcccttg

SEQ ID NO: 65151 - DNA, 120 bp, Artificial Sequence
  ENSG00000074416_61 (sequence is synthesized)
gcaccagaaggtggttcctcggtgcctgtgagtgcccttgccctctgccaagggtactgagctacgtgccctgtgcccttgatgtacactgagaattcactgcttgccaccttccgtcca

SEQ ID NO: 65152 - DNA, 120 bp, Artificial Sequence
  ENSG00000074416_62 (sequence is synthesized)
attctaatttcagcatttcacagctcacttttgaaatagcatctttcatccccaaatgtctgtgcacattgcagaaatgaaaacagcccctctctgaaggcagaagtgtgagatccgggt

SEQ ID NO: 65153 - DNA, 120 bp, Artificial Sequence
  ENSG00000074416_63 (sequence is synthesized)
tctctgttttcctgggaaaacaagagatccagaaggagagatgggggagggggtgggaaggtttgggcctcaatcaggctcaagttcaatgagcatgtgttaagctcctgctgtgttccc

SEQ ID NO: 65154 - DNA, 120 bp, Artificial Sequence
  ENSG00000074416_64 (sequence is synthesized)
tgggcttttgcacacagggtgttattcaccttccccgtggtcctctgggggagggtcaaggtcccactggcagctgaggaaacggaggctcagcgatgtggaaatcccagcccatgttca

SEQ ID NO: 65155 - DNA, 120 bp, Artificial Sequence
  ENSG00000074416_65 (sequence is synthesized)
cgaggcagcagagctaggaatcaaacccagcaatccttccctctgccacacagcctcctcatcgagctggtgctatttctacttccacccgagagaaatggacgcacactttctctgtgt

SEQ ID NO: 65156 - DNA, 120 bp, Artificial Sequence
  ENSG00000074416_66 (sequence is synthesized)
ggctcctgtgggcccttccgcactgccctgcttcgtgctcagttgatctgtgtgattctgcacctgccgtgtattttcagtaccccagagaaatggccagagctcatcccaggcaactct

SEQ ID NO: 65157 - DNA, 120 bp, Artificial Sequence
  ENSG00000074416_67 (sequence is synthesized)
tgccagtgatgcaaaattacaacccatgagcgatcatggggagggtatagagcgggcaaaattcagacgtgacttcccaccttgggcgcagcggctgcctggccagctcccccaaggtgg

SEQ ID NO: 65158 - DNA, 120 bp, Artificial Sequence
  ENSG00000074416_68 (sequence is synthesized)
agcagagccaggctgaatagaggctgagtcagaagggagagtccttgggcatgcaggcttaaggacgcaggcttgggagacgaacctggctgatgttcagtttgggcatcactctcctta

SEQ ID NO: 65159 - DNA, 120 bp, Artificial Sequence
  ENSG00000074416_69 (sequence is synthesized)
atgtactgtaaactgtcactgcggaagagccgggtgtggatgccacttgtgctcacagcccttgttttccctccccggctaggtccttgctgcgaaagtgctcaaccttgtgctgccaaa

SEQ ID NO: 65160 - DNA, 120 bp, Artificial Sequence
  ENSG00000074416_70 (sequence is synthesized)
acagctaaaatagtctttaagatgaagtttcctgaaatgatttaaaataaacacagatgggaagggggaaaaactgtaatgaggcacttaaaaaataaagtgagcattttcttaagaaca

SEQ ID NO: 65161 - DNA, 120 bp, Artificial Sequence
  ENSG00000074416_71 (sequence is synthesized)
ctgaatctgcaacaactttcaaggactattcgaggattttgaaacacttgatggaaaaggcatcaagaatgttaaagttttggattccacgtcctttttgggtgagcaactcccctctga

SEQ ID NO: 65162 - DNA, 120 bp, Artificial Sequence
  ENSG00000074416_72 (sequence is synthesized)
ggcttccctggtgtgctcacagctcaggatggaggttgtgggagagcaggagcagcagtcatctggtcgacctcgacaatgtgatccatctgggtgcgggacctgccatgactccttcct

SEQ ID NO: 65163 - DNA, 120 bp, Artificial Sequence
  ENSG00000074416_73 (sequence is synthesized)
tccccactgcttcctcgtcatgccgcctcaatggcccctgctcaaccgttctgctttccttcatgcacaatcaacccacttcctctgcttagctctttctcctcccatcctaccctttcc

SEQ ID NO: 65164 - DNA, 120 bp, Artificial Sequence
  ENSG00000074416_74 (sequence is synthesized)
tccttcaggagagattaggctcatgaaatcaacaaatcttaaaagagcagcagggaaaggggatctcttttgcagttgttcaaaacatcctgcccctgcatggcagctctcctctttctt

SEQ ID NO: 65165 - DNA, 120 bp, Artificial Sequence
  ENSG00000074416_75 (sequence is synthesized)
gcgcggggagggtgtgtcacgcctcccgagactggggctgtgcggcctcacggagaaactgaggcaggcgcgaagcgtcgagtgcgcgcgtggccctgcaggcaggcggagaccctggtg

SEQ ID NO: 65166 - DNA, 120 bp, Artificial Sequence
  ENSG00000074416_76 (sequence is synthesized)
gctcccatacacgtaacagcactcactgctctttgacgttagtgaatagaccgtaagctccctggagcagggaccttatcccagcgtctaccgcggcgcccgtcacctagcttcctcctt

SEQ ID NO: 65167 - DNA, 120 bp, Artificial Sequence
  ENSG00000074416_77 (sequence is synthesized)
ggagggacctcagaagtcccaggcttcatagtgtcaagttcaacagaaagagtagttttcatctttccacagttcttagaaaagtcctgagactgagttttactggcctccaggtcacca

SEQ ID NO: 65168 - DNA, 120 bp, Artificial Sequence
  ENSG00000074416_78 (sequence is synthesized)
tccttgtcacctctactgccagagacatcgagtgccttgaagtcctgggctttccggggattctgtggggtatttccagtatgttctactctcctcaaacctcagagcatctctgaaggc

SEQ ID NO: 65169 - DNA, 75 bp, Artificial Sequence
  ENSG00000074416_79 (sequence is synthesized)
atgttctactctcctcaaacctcagagcatctctgaaggccacacaagaacatttgtgttttagcccattctcat

SEQ ID NO: 65170 - DNA, 120 bp, Artificial Sequence
  ENSG00000074416_80 (sequence is synthesized)
gcatagtggcttctgcttctgggaggcctcaggaaactttcaatcatggcaaaatgtgaaaggaaagcaggcacgtcctacacagccagagtaggaacaagagagagagggaaaggtgct

SEQ ID NO: 65171 - DNA, 120 bp, Artificial Sequence
  ENSG00000074416_81 (sequence is synthesized)
ccagatctcacgagaactcactcactattaccaagacaataccaagggggatggcactaaaccattcatgagaaatccattcccatgatgcattcacctcccaccaggccccaccttcaa

SEQ ID NO: 65172 - DNA, 120 bp, Artificial Sequence
  ENSG00000074416_82 (sequence is synthesized)
caggccccaccttcaacattggggattacagttcaaaatgaggtttggtggggacacagatccaaaccatatcaacttgtaggggcagaaagacgtcacctttacttgaattgcaaccct

SEQ ID NO: 65173 - DNA, 120 bp, Artificial Sequence
  ENSG00000074416_83 (sequence is synthesized)
taccttttcatcgcaggctgtaggagcagagcctgacaaccagcacttgtcttggagatcactgcatctagaataatcctgccctagagatctaggtggacacacaggcaagtaggggcc

SEQ ID NO: 65174 - DNA, 120 bp, Artificial Sequence
  ENSG00000074416_84 (sequence is synthesized)
tggtggcccactgatttccctactgaaataaaaagccagatacaagacttctacatctgcaaaggtggagtggatgtgcttttccctacttttcccactaaatatgactaaaaaccctgg

SEQ ID NO: 65175 - DNA, 120 bp, Artificial Sequence
  ENSG00000074416_85 (sequence is synthesized)
acattatgtatacaaccaacgtaagaggatgctgaaaggaagagataaaaggcaaacctgctggggacctcaggacctgaggaacaacatggtgctcagcaattgcactcctgggccctc

SEQ ID NO: 65176 - DNA, 120 bp, Artificial Sequence
  ENSG00000074416_86 (sequence is synthesized)
agcagatgacctgttagacacactgtggtacttccatactgtggactgctacacccaacccacctggaattatgctgaatgaaaaggacctgaagacccttccagcatgccagaggaaag

SEQ ID NO: 65177 - DNA, 120 bp, Artificial Sequence
  ENSG00000074416_87 (sequence is synthesized)
cacctggagatgcccattagcgtcgcactgaagtctggaggtccctgccagaaattcggatggagatggcaggtcggcagtctagaggcagaagggaagtctggctggagatgtaaattc

SEQ ID NO: 65178 - DNA, 120 bp, Artificial Sequence
  ENSG00000074416_88 (sequence is synthesized)
ggatcctgacttcagctgtttttagttgcttatcacccaggctttctaaaagtttcacttcttgttaaaaaatatagtatctcacatcctagagtaatgaacgtccatttttttaaagca

SEQ ID NO: 65179 - DNA, 120 bp, Artificial Sequence
  ENSG00000074416_89 (sequence is synthesized)
atttgcttttcctcatgcaatcttctttgttttttaaagtgatacttaacaataatttcagcagaagtgaaacttgggttgccaggtgtctgtacttttattaggtttgactgaccctga

SEQ ID NO: 65180 - DNA, 120 bp, Artificial Sequence
  ENSG00000074416_90 (sequence is synthesized)
gctccaaacaatggaactagcactgtttgggaacttctgtaatctcacagaggacaacagatctaactgaatgttttcaagggaaaataaaaaggtctgttccatgttaaacctgggagc

SEQ ID NO: 65181 - DNA, 120 bp, Artificial Sequence
  ENSG00000074416_91 (sequence is synthesized)
ttttagcgtgaaggaactgagccgaaagatggtttaacgcttgcactctaagagagccaggattctaactgaaggtgcagaccagctgccccatctctttgcagagctgaacaggagaaa

SEQ ID NO: 65182 - DNA, 120 bp, Artificial Sequence
  ENSG00000074416_92 (sequence is synthesized)
atccttgtaagtgggagagatgcagactagattcagaaggatcttcccctggaaggatgcgagcaccaagagaatgccagaatttatacatttttctcctctgaaaccatacaaagggag

SEQ ID NO: 65183 - DNA, 120 bp, Artificial Sequence
  ENSG00000074416_93 (sequence is synthesized)
tgatccagctcaacgacctgtctgtctgcattaacagtagcctgaattatgacagtagtggctgtgctcccaaagggggttaaagtacttgagctatcccttctggaagcacagcccctt

SEQ ID NO: 65184 - DNA, 120 bp, Artificial Sequence
  ENSG00000074416_94 (sequence is synthesized)
ttgaagacagaagatgctgactaattagcagttccagccgtgctcctcagtagccaagggaaatgcaggaaagaaatcccatcagccaatcccagaaatatcagggccctcatctttgtg

SEQ ID NO: 65185 - DNA, 120 bp, Artificial Sequence
  ENSG00000074527_0 (sequence is synthesized)
ggagaaggacgggacggagccggggcagccagaagaggtgggaaaagcggaggaggacgcccaggaggaggcggcggcggcggccgggaagtgaaaggtctcgcaaagttcagcggcggc

SEQ ID NO: 65186 - DNA, 120 bp, Artificial Sequence
  ENSG00000074527_1 (sequence is synthesized)
gaaaggtctcgcaaagttcagcggcggctgcgggcgccgagccccgggctagcggcagacgagcccgcagggccgctccgcggggcagcgcagccaggccggctatggtcccggggctcc

SEQ ID NO: 65187 - DNA, 120 bp, Artificial Sequence
  ENSG00000074527_2 (sequence is synthesized)
cgagggtcaccccacctccccgcgcggtcccggcccctggctcccagctgccggcgaccgctgaccgagcccggcgccccaggaggaggaagaaaccagggccccgttccctcccgagga

SEQ ID NO: 65188 - DNA, 120 bp, Artificial Sequence
  ENSG00000074527_3 (sequence is synthesized)
cgttccctcccgaggacggcggcgcttcatcccgcagcccagaggtctcggctccctccggcacccgcccggcccggctgctcccggctcctcccggccatggggagctgcgcgcggctg

SEQ ID NO: 65189 - DNA, 120 bp, Artificial Sequence
  ENSG00000074527_4 (sequence is synthesized)
tgctctggggctgcacggtggtggccgcaggactgagtggagtagctggagtgagttcccgctgtgaaaaagcctgcaaccctcggatgggaaatttggctttggggcgaaaactctggg

SEQ ID NO: 65190 - DNA, 120 bp, Artificial Sequence
  ENSG00000074527_5 (sequence is synthesized)
cagacaccacctgcggtcagaatgctaccgaactgtactgcttctacagtgagaacacggatctgacttgtcggcagcccaaatgtgacaagtgcaatgctgcctatcctcacctggctc

SEQ ID NO: 65191 - DNA, 120 bp, Artificial Sequence
  ENSG00000074527_6 (sequence is synthesized)
acctgccatctgccatggcagactcatccttccggtttcctcgcacatggtggcagtctgcggaggatgtgcacagagaaaagatccagttagacctggaagctgaattctacttcactc

SEQ ID NO: 65192 - DNA, 120 bp, Artificial Sequence
  ENSG00000074527_7 (sequence is synthesized)
acctaattgtgatgttcaagtcccccaggccggctgccatggtgctggaccgctcccaggactttgggaaaacatggaagccttataagtactttgcgactaactgctccgctacatttg

SEQ ID NO: 65193 - DNA, 120 bp, Artificial Sequence
  ENSG00000074527_8 (sequence is synthesized)
gcctggaagatgatgttgtcaagaagggcgctatttgtacttctaaatactccagtccttttccatgcactggaggagaggttattttcaaagctttgtcaccaccatacgatacagaga

SEQ ID NO: 65194 - DNA, 120 bp, Artificial Sequence
  ENSG00000074527_9 (sequence is synthesized)
acccttacagtgccaaagttcaggagcagctgaagatcaccaaccttcgcgtgcagctgctgaaacgacagtcttgtccctgtcagagaaatgacctgaacgaagagcctcaacatttta

SEQ ID NO: 65195 - DNA, 120 bp, Artificial Sequence
  ENSG00000074527_10 (sequence is synthesized)
cacactatgcaatctatgatttcattgtcaagggcagctgcttctgcaatggccacgctgatcaatgcatacctgttcatggcttcagacctgtcaaggccccaggaacattccacatgg

SEQ ID NO: 65196 - DNA, 120 bp, Artificial Sequence
  ENSG00000074527_11 (sequence is synthesized)
tccatgggaagtgtatgtgtaagcacaacacagcaggcagccactgccagcactgtgccccgttatacaatgaccggccatgggaggcagctgatggcaaaacgggggctcccaacgagt

SEQ ID NO: 65197 - DNA, 120 bp, Artificial Sequence
  ENSG00000074527_12 (sequence is synthesized)
gcagaacctgcaagtgtaatgggcatgctgatacctgtcacttcgacgttaatgtgtgggaggcatcagggaatcgtagtggtggtgtctgtgatgactgtcagcacaacacagaaggac

SEQ ID NO: 65198 - DNA, 120 bp, Artificial Sequence
  ENSG00000074527_13 (sequence is synthesized)
agtattgccagaggtgcaagccaggcttctatcgtgacctgcggagacccttctcagctccagatgcttgcaaaccgtgttcctgccatccagtaggatcagctgtccttcctgccaact

SEQ ID NO: 65199 - DNA, 120 bp, Artificial Sequence
  ENSG00000074527_14 (sequence is synthesized)
cagtgaccttctgcgaccccagcaatggtgactgcccttgcaagcctggggtggcagggcgacgttgtgacaggtgcatggtgggatactggggcttcggagactatggctgtcgaccat

SEQ ID NO: 65200 - DNA, 120 bp, Artificial Sequence
  ENSG00000074527_15 (sequence is synthesized)
accctatcaccggagactgcatcagcagccacacagacatagactggtatcatgaagttcctgacttccgtcccgtgcacaataagagcgaaccagcctgggagtgggaggatgcgcagg

SEQ ID NO: 65201 - DNA, 120 bp, Artificial Sequence
  ENSG00000074527_16 (sequence is synthesized)
ggttttctgcacttctacactcaggtaaatgcgaatgtaaggaacagacattaggaaatgccaaggcattctgtggaatgaaatattcatatgtgctaaaaataaagattttatcagctc

SEQ ID NO: 65202 - DNA, 120 bp, Artificial Sequence
  ENSG00000074527_17 (sequence is synthesized)
atgataaaggtactcatgttgaggtcaatgtgaagattaaaaaggtcttaaaatctaccaaactgaagattttccgaggaaagcgaacattatatccagaatcatggacggacagaggat

SEQ ID NO: 65203 - DNA, 120 bp, Artificial Sequence
  ENSG00000074527_18 (sequence is synthesized)
gcacttgtccaatcctcaatcctggtttggaataccttgtagcaggacatgaggatataagaacaggcaaactaattgtgaatatgaaaagctttgtccagcactggaaaccttctcttg

SEQ ID NO: 65204 - DNA, 120 bp, Artificial Sequence
  ENSG00000074527_19 (sequence is synthesized)
gaagaaaagtcatggatattttaaaaagagagtgcaagtagcattaagatggatagcacataatggcacttgtctatgtacaaaacacaaactttagagcaagaagacctcagacaggaa

SEQ ID NO: 65205 - DNA, 120 bp, Artificial Sequence
  ENSG00000074527_20 (sequence is synthesized)
actggaattttttaaagtgccaaaacatatagaaatgtttgaatgcatgggtcttatctaacttatctcttctggacccatgtttaaatacagttttatttcatgaagagaaatgaaaac

SEQ ID NO: 65206 - DNA, 120 bp, Artificial Sequence
  ENSG00000074527_21 (sequence is synthesized)
ccctacactgatatctgttttctatgggactgattctgaaattcttaactattaagaatattttaatagcagcatgacatttagcagtaatccattaagggcagtacctctaacaaggac

SEQ ID NO: 65207 - DNA, 120 bp, Artificial Sequence
  ENSG00000074527_22 (sequence is synthesized)
gccttccagcttcagcgatgttacttacgtttgatgctacttaaagtaatgaatgacgttttaaggaatccctaaccctactatcagaaaaggtgtttgttaaagagccttctcttgtgt

SEQ ID NO: 65208 - DNA, 120 bp, Artificial Sequence
  ENSG00000074527_23 (sequence is synthesized)
gttacgcatgaactttggtctgtaggtgttaaatggaacctctccatgtgtatatagtatttccttgtataaagcactttactacctaccacttgtgttgtgaacgtttggtgactgctg

SEQ ID NO: 65209 - DNA, 120 bp, Artificial Sequence
  ENSG00000074527_24 (sequence is synthesized)
ttgaaagaaggaaaagggtgtgtgagaaagcctactgaagcagcagcactgccactacatgtggacaaaagtgaccatataaaagaagttgtgctatttaactctgaatacttggagaaa

SEQ ID NO: 65210 - DNA, 120 bp, Artificial Sequence
  ENSG00000074527_25 (sequence is synthesized)
ctaggtgaagatgcaaccagaaaggagaatatgtatgcgtgaagtctcagctttgagctggaggctagattccaagatgacagccatgatgaaactttttaaaaaactaaaccagaagag

SEQ ID NO: 65211 - DNA, 120 bp, Artificial Sequence
  ENSG00000074527_26 (sequence is synthesized)
actttaaaataagagaaagaaatcataaatgtagacatatgcttggctaaaggggaaatggactttaaattttaaagagctcatttgcaatgcacttgtatacacttcaaaaattattgt

SEQ ID NO: 65212 - DNA, 120 bp, Artificial Sequence
  ENSG00000074527_27 (sequence is synthesized)
agacacagaatttgttatatttttgtgcttagtatttaaacctgaacattgaaacagttttcctccttgtctttcttaacagtaatagtcattatatttacctgttttttaacacaatgt

SEQ ID NO: 65213 - DNA, 120 bp, Artificial Sequence
  ENSG00000074527_28 (sequence is synthesized)
atgtgatagtcaaaaaatcacagtttttcattattattcatcttctgtacccacgcataaccactatacatagtttcttttgtacttgaatatacaaaacatgaacacagtgccatatga

SEQ ID NO: 65214 - DNA, 120 bp, Artificial Sequence
  ENSG00000074527_29 (sequence is synthesized)
ataatttcacatacagaacctttttttctctgaagtcctgtggacttgcaaatatatatatatattgctttgttaatttgtttttatatttcatatatgtaataaaggaatatgatctga

SEQ ID NO: 65215 - DNA, 120 bp, Artificial Sequence
  ENSG00000074527_30 (sequence is synthesized)
gagggaacaaaggacccagctcgccatcccccggcacttcatggcctaaggaatgatgaggaggggtggcccagcgaccctgggcgcgcgtgggctggggccggtctctggtagaagccc

SEQ ID NO: 65216 - DNA, 120 bp, Artificial Sequence
  ENSG00000074527_31 (sequence is synthesized)
tccagaatcatggacggacagaggatgcacttgtccaatcctcaatcctgttcaacagccaaggccaaagaaagctgataagaaaactgaaaccttacacgccaacctgcttccttggct

SEQ ID NO: 65217 - DNA, 120 bp, Artificial Sequence
  ENSG00000074527_32 (sequence is synthesized)
attcttaattcatgcatacatttactcattcatcagtcatatattttagaacaccaaaactagcactaaagtattgtatcttctttttctatggatacaaaataaacttcgtgttctcag

SEQ ID NO: 65218 - DNA, 120 bp, Artificial Sequence
  ENSG00000074527_33 (sequence is synthesized)
agctcccactgtctgggctcaggaagcagaagagcttcaaagttcctacagaccttgacagagcttcctctggctttgcctgtgcggaacaattctgagggttattttcaaagctttgtc

SEQ ID NO: 65219 - DNA, 120 bp, Artificial Sequence
  ENSG00000074582_0 (sequence is synthesized)
gaaaggacccggggcggggccgaacgcagcttccccaaggtgcaggcgcggtgaaaccatcgagacggagggccagagagtcacggcggttttcgtaacaccccagggcctgtaaggttt

SEQ ID NO: 65220 - DNA, 120 bp, Artificial Sequence
  ENSG00000074582_1 (sequence is synthesized)
ggtgtttccctttcaagatgccactttcagactttattctggctctgaaggacaatccctactttggggctggatttgggctggtgggtgtgggcacagccctggccctggcccggaagg

SEQ ID NO: 65221 - DNA, 120 bp, Artificial Sequence
  ENSG00000074582_2 (sequence is synthesized)
gtgtccaactgggcctggtggcattccggcgccattacatgatcacactggaagtccctgctcgagacaggagctatgcctggttgcttagctggctcacccgccacagtacccgtactc

SEQ ID NO: 65222 - DNA, 120 bp, Artificial Sequence
  ENSG00000074582_3 (sequence is synthesized)
agcacctcagtgtcgagacttcgtaccttcagcatgagagtggccgcatttccactaagtttgaatttgtccccagccctggaaaccattttatctggtatcgggggaaatggattcggg

SEQ ID NO: 65223 - DNA, 120 bp, Artificial Sequence
  ENSG00000074582_4 (sequence is synthesized)
tagaacgaagtcgagagatgcagatgatagacttgcagacggggactccttgggaatctgtcaccttcacggccctgggcactgaccgaaaggttttcttcaacatcctggaggaagctc

SEQ ID NO: 65224 - DNA, 120 bp, Artificial Sequence
  ENSG00000074582_5 (sequence is synthesized)
gagagctagccttgcagcaggaggaagggaagaccgtgatgtacacagctgtgggctctgaatggcgtccctttggctatccacgccgccggcgaccactgaattctgtggttctacaac

SEQ ID NO: 65225 - DNA, 120 bp, Artificial Sequence
  ENSG00000074582_6 (sequence is synthesized)
cgaattgtcagagacgtccaggaattcatcgataaccccaagtggtacactgacagaggcattccttacagacgtggctacctgctttatgggccccctggttgcggaaagagcagtttt

SEQ ID NO: 65226 - DNA, 120 bp, Artificial Sequence
  ENSG00000074582_7 (sequence is synthesized)
atcacagccctggctggggaactggagcacagcatctgcctgctgagcctcacggactccagcctctctgatgaccgactcaaccacctgctgagcgtggccccgcagcagagcctggta

SEQ ID NO: 65227 - DNA, 120 bp, Artificial Sequence
  ENSG00000074582_8 (sequence is synthesized)
ctcctggaggatgtggatgctgcttttctcagtcgagacttggctgtggagaacccagtaaagtaccaaggcctaggtcgcctcaccttcagtggactgctcaatgccttggatggtgtg

SEQ ID NO: 65228 - DNA, 120 bp, Artificial Sequence
  ENSG00000074582_9 (sequence is synthesized)
gcttccaccgaggcccgcatcgtgttcatgaccaccaaccacgttgacaggctggaccctgccctgatacgcccggggcgagtggacctgaaggagtacgtgggctactgctcacactgg

SEQ ID NO: 65229 - DNA, 120 bp, Artificial Sequence
  ENSG00000074582_10 (sequence is synthesized)
cagctgacccagatgttccagaggttctatccagggcaggcaccttccttagctgagaactttgcagaacatgtccttcgagctacaaaccagatcagtcctgcccaggtgcagggctac

SEQ ID NO: 65230 - DNA, 120 bp, Artificial Sequence
  ENSG00000074582_11 (sequence is synthesized)
ttcatgctgtataaaaatgaccctgtaggggcaattcacaatgctgagtctctgaggaggtgatcaggctgggctcagctcagctctcctcctctagctcaataaacatctgccacacta

SEQ ID NO: 65231 - DNA, 120 bp, Artificial Sequence
  ENSG00000074582_12 (sequence is synthesized)
aaaccatcgagacggagggccagagagtcacggcggatcttattgtctacgatgtgacgatccgtggagaaagtagcagatgggcagattttcatttggggagaatgagggagaaaagaa

SEQ ID NO: 65232 - DNA, 120 bp, Artificial Sequence
  ENSG00000074582_13 (sequence is synthesized)
cgggcattccgagccaagagcactgcatgagcaaggagttgggaggttgcttacttgttgaacatatttgttgcgtatttgcatatttgctaaacaggttttcgtaacaccccagggcct

SEQ ID NO: 65233 - DNA, 120 bp, Artificial Sequence
  ENSG00000074582_14 (sequence is synthesized)
aaaccatgtggctggaggcgcgagctggggtgtgggcgaggttcaggagggggttcctgggtgtcgcggaggggccggggacgggagagctttgtctgtggccttccatgcataggtgtt

SEQ ID NO: 65234 - DNA, 120 bp, Artificial Sequence
  ENSG00000074582_15 (sequence is synthesized)
ttggaattctggatcccagttctgaggctcagccgaggtcactgctgtcagctcacctccctgcatgccaggcgcagggcaaagtggccggggttcggggttggaggagaggtgtactag

SEQ ID NO: 65235 - DNA, 120 bp, Artificial Sequence
  ENSG00000074582_16 (sequence is synthesized)
gggcgccgtattgtagagagccttgagtaccaggctgagtttatacccaattcaggggtctgctgggagccagccattgaaggtgctggagcagagagagatatggtattggagctgatc

SEQ ID NO: 65236 - DNA, 120 bp, Artificial Sequence
  ENSG00000074582_17 (sequence is synthesized)
cccagagccggcgggagccgcatctctatggtcggccgcggctggaacggcccccggggcccgctttgtgcgaccgcctccggctcagccgcctctaggatattggggatgtggaagcca

SEQ ID NO: 65237 - DNA, 120 bp, Artificial Sequence
  ENSG00000074582_18 (sequence is synthesized)
ggggaaatgaatctggggatcggggaccaggataaacatgaaacgtgtggaacatcagggtgtgaggtagaagtcaggcctctgagacacatgtccccaggcggtgaggagagtagctgg

SEQ ID NO: 65238 - DNA, 120 bp, Artificial Sequence
  ENSG00000074582_19 (sequence is synthesized)
aattcatcgataaccccaagtggtacactgacagaggcattccttacagacgtggctacctgctttatgggccccctggttgcggaaagagcagttttatacccagtaaagtaccaaggc

SEQ ID NO: 65239 - DNA, 120 bp, Artificial Sequence
  ENSG00000074582_20 (sequence is synthesized)
cgggagggcagggtgaggtaggagacaggtgggcaccagagaagaaatacgcttatcttccgggcaggagggctgaggaagagaaaggacagactaaggcagagagaaggcctggagaaa

SEQ ID NO: 65240 - DNA, 120 bp, Artificial Sequence
  ENSG00000074582_21 (sequence is synthesized)
caacgggccccggcctagcgacccaggttcccacctgcctctggctctgactcaccgcgtggtcttggacagacacagtcgcttcgcttctctgggcctcagctttcctatctgtaaaat

SEQ ID NO: 65241 - DNA, 120 bp, Artificial Sequence
  ENSG00000074582_22 (sequence is synthesized)
ggaggtgatgacagtgtccacatcgtcgggcaggagctggatcataagagccagcgaactggaaaggcggtttgtaacctggaaggcttgggatggagcatcgtcatgattttgtcctga

SEQ ID NO: 65242 - DNA, 120 bp, Artificial Sequence
  ENSG00000074582_23 (sequence is synthesized)
ggaggtaataaaggtctaaacaagacgttaaatattggggacgtaagggggaggatatttgaaggacattactcataacaagacatagggttactgacaagtcaacggacgcttctccct

SEQ ID NO: 65243 - DNA, 120 bp, Artificial Sequence
  ENSG00000074582_24 (sequence is synthesized)
tctggtaaggtggggagctagggagggctgtgagagtagaaaagaatgatgggagctgggtttgacccattcactcactcagttttgatcgttcttattcaggtatcgggggaaatggat

SEQ ID NO: 65244 - DNA, 120 bp, Artificial Sequence
  ENSG00000074590_0 (sequence is synthesized)
aatctcccaaggcctaaggaggcaagaggcctgcaaatcgcctcctgctcagcaaacgggttgctcagcaggcccggggtcctggtccaccccaggtccctggtttgcccacctccgatg

SEQ ID NO: 65245 - DNA, 120 bp, Artificial Sequence
  ENSG00000074590_1 (sequence is synthesized)
gcggccttcgctggcagggtgggcgcctctggggagccagctccgtcccggcgcctttagagccccatctcttccacgtccctggccttcctccccttccaggcggctgtccccgccggg

SEQ ID NO: 65246 - DNA, 120 bp, Artificial Sequence
  ENSG00000074590_2 (sequence is synthesized)
gtccagatggtgtcggagggccggcggttcgacggcgggcccggggttcagcctcccggcctccctccgtccctgactctcctttcttcggagagggcgcgggggccggggccaaagcgc

SEQ ID NO: 65247 - DNA, 120 bp, Artificial Sequence
  ENSG00000074590_3 (sequence is synthesized)
cgctcttggggttctcctggactcggagttgccccaggcgggcgcagctctgccccgcggggtgccagcctcgggcgggcaaggtccgtgagtcaccgcctgtaaccgaacaccaggcct

SEQ ID NO: 65248 - DNA, 120 bp, Artificial Sequence
  ENSG00000074590_4 (sequence is synthesized)
ccaggcctccctgccccctcccccagctccggccgccaggctgcggcgacacctacaagaaaatgaaggggcgcccaggcccgcggcggccccggccgtatcgcgagcaggtcccggcgg

SEQ ID NO: 65249 - DNA, 80 bp, Artificial Sequence
  ENSG00000074590_5 (sequence is synthesized)
tcgcggcgctctttcttccccggccccggggctcggccagccgcaaccgccgccccggcgccagcaggaatccaggccga

SEQ ID NO: 65250 - DNA, 120 bp, Artificial Sequence
  ENSG00000074590_6 (sequence is synthesized)
tagctgcgactggcgagcccgagagcgcccggggagggggcgcccggcttggaatttcccggtcccttccggcccagcgaggacaaagcactcctggccgccgccgccgccgccgccgtg

SEQ ID NO: 65251 - DNA, 120 bp, Artificial Sequence
  ENSG00000074590_7 (sequence is synthesized)
cgtggcctacgccgcgccgcacaaagggcgagtcgcgacacgctcccatccccctcccagctcacggcggccccggccccgggtggctgcagggaggtgggggaagccctggctgcaccg

SEQ ID NO: 65252 - DNA, 120 bp, Artificial Sequence
  ENSG00000074590_8 (sequence is synthesized)
gcgagcgccgcccccgccccgtctgcgcgtcctcccggggaggggttggggggcgcggcgccccacataacactccccctcctgcgctgcgagccaccctctcccctccctcctgcaaac

SEQ ID NO: 65253 - DNA, 120 bp, Artificial Sequence
  ENSG00000074590_9 (sequence is synthesized)
ctccccctcctgcgctgcgagccaccctctcccctccctcctgcaaacaccaccgcctcccctgccaccgccgccacctcgcccgacgctccacagctcgccgcggccggggggcggtgc

SEQ ID NO: 65254 - DNA, 120 bp, Artificial Sequence
  ENSG00000074590_10 (sequence is synthesized)
cagatgtgcagtccccgccgccgccagtgaccgagccgcagtccgagcggtatcgggccgcctccctgatgctgcgggggcgaccttgagcgtacagcggcttccctcggtggggacccc

SEQ ID NO: 65255 - DNA, 120 bp, Artificial Sequence
  ENSG00000074590_11 (sequence is synthesized)
gacatcccagcgctgtgcccggtcttgccctctgtagcccggctcgccccgcgcttggacatggaaggggccgccgcgcctgtggcgggggaccgccccgacttggggctgggggcgccg

SEQ ID NO: 65256 - DNA, 120 bp, Artificial Sequence
  ENSG00000074590_12 (sequence is synthesized)
ggctctccccgagaggcggtggcgggggcgactgcagccctggagcccaggaagccgcacggggtgaagcggcatcaccacaagcacaacttgaagcaccgctacgagctgcaggagacc

SEQ ID NO: 65257 - DNA, 120 bp, Artificial Sequence
  ENSG00000074590_13 (sequence is synthesized)
ctgggcaaaggcacctacggcaaagtcaagcgggccaccgagaggttttctggccgagtggttgctataaaatccattcgtaaggacaaaattaaggatgaacaagacatggttcacatc

SEQ ID NO: 65258 - DNA, 120 bp, Artificial Sequence
  ENSG00000074590_14 (sequence is synthesized)
agacgagagattgagatcatgtcatctctcaaccatcctcatatcatcagtatttatgaagtgtttgagaacaaagataagattgtgatcatcatggaatatgccagcaaaggggagctg

SEQ ID NO: 65259 - DNA, 120 bp, Artificial Sequence
  ENSG00000074590_15 (sequence is synthesized)
tacgattacatcagtgagcggcgacgcctcagtgagagggagacccggcacttcttccggcagatcgtctctgctgtgcactattgtcacaagaacggtgtggtccaccgggacttgaag

SEQ ID NO: 65260 - DNA, 120 bp, Artificial Sequence
  ENSG00000074590_16 (sequence is synthesized)
ctggaaaatatactgctcgatgacaactgcaatattaagattgctgactttgggctttccaacctgtaccagaaggataagttcttacaaacgttttgtgggagtccactctatgcatct

SEQ ID NO: 65261 - DNA, 120 bp, Artificial Sequence
  ENSG00000074590_17 (sequence is synthesized)
cctgagattgtcaatgggagaccttaccgagggccagaggtggacagctgggccctgggtgtgttgctttacactcttgtttatggaacaatgcccttcgatggtttcgatcacaaaaac

SEQ ID NO: 65262 - DNA, 120 bp, Artificial Sequence
  ENSG00000074590_18 (sequence is synthesized)
ctcattcggcaaatcagcagcggagagtaccgggagccaacacagccctcagatgctcgaggactcatacggtggatgctgatggtgaaccccgatcgccgggccactattgaggacatt

SEQ ID NO: 65263 - DNA, 120 bp, Artificial Sequence
  ENSG00000074590_19 (sequence is synthesized)
gccaaccactggtgggtgaactggggctataagagcagcgtgtgtgactgtgatgccctccatgactctgagtccccactcctggctcggatcattgactggcaccaccgttccacaggg

SEQ ID NO: 65264 - DNA, 120 bp, Artificial Sequence
  ENSG00000074590_20 (sequence is synthesized)
ctgcaggctgacaccgaagccaaaatgaagggcctggccaaacccacgacctctgaggtcatgctagagcggcagcggtcgctgaagaaatccaagaaagagaatgactttgctcagtct

SEQ ID NO: 65265 - DNA, 120 bp, Artificial Sequence
  ENSG00000074590_21 (sequence is synthesized)
ggtcaggatgcagtgcctgaaagcccatccaagttgagttctaagaggcccaaggggatcctgaagaagcgaagcaacagcgagcatcgctctcacagcactggcttcattgaaggtgta

SEQ ID NO: 65266 - DNA, 120 bp, Artificial Sequence
  ENSG00000074590_22 (sequence is synthesized)
gttggtcctgccttaccctctactttcaagatggagcaggacttgtgcaggactggcgtgctcctcccaagctcaccagaggcagaggtgccgggaaaactcagccccaagcagtcggcc

SEQ ID NO: 65267 - DNA, 120 bp, Artificial Sequence
  ENSG00000074590_23 (sequence is synthesized)
acgatgcccaagaaaggcatcttgaaaaagacccagcagagagaatcaggttactactcttccccagagcgcagtgagtcttcggagctgttggacagtaatgatgtgatgggcagcagc

SEQ ID NO: 65268 - DNA, 120 bp, Artificial Sequence
  ENSG00000074590_24 (sequence is synthesized)
atcccctcccccagccccccggacccagccagggtaacctcccacagcctctcctgccggaggaagggcatcttgaaacacagcagcaaatactcagcgggcaccatggacccagccctg

SEQ ID NO: 65269 - DNA, 120 bp, Artificial Sequence
  ENSG00000074590_25 (sequence is synthesized)
gtcagccctgaaatgcccacactggaatccctgtcagagcctggtgtccctgccgagggcctctcccggagctacagccgcccttccagtgtcatcagcgatgacagcgtgctgtccagc

SEQ ID NO: 65270 - DNA, 120 bp, Artificial Sequence
  ENSG00000074590_26 (sequence is synthesized)
gactcttttgacttgctggatttgcaggagaatcgccctgcccgccagcgcatccgcagctgcgtctctgcagaaaacttcctccagatccaggactttgaggggctccagaaccggccc

SEQ ID NO: 65271 - DNA, 120 bp, Artificial Sequence
  ENSG00000074590_27 (sequence is synthesized)
cggccccagtacctgaagcggtaccggaaccggctggcagacagcagcttctccctcctcacagacatggatgatgtgactcaggtctacaagcaagcgctggagatctgcagcaagctc

SEQ ID NO: 65272 - DNA, 120 bp, Artificial Sequence
  ENSG00000074590_28 (sequence is synthesized)
gaaaaaggattggcactgtctcacttggccaagtttgcagccttgagccaacacctaaaagggagaggtgggctcttctgccagttctgtcaattgtcagtcagaatttgggccctgttt

SEQ ID NO: 65273 - DNA, 120 bp, Artificial Sequence
  ENSG00000074590_29 (sequence is synthesized)
ggcatttgctttatggcacctcctagaggaccagctgtccaggggaggtggtattgaccggcactcagtgggtggagaggaagcatatgtggaaggagcatttccttagaagtcatccag

SEQ ID NO: 65274 - DNA, 120 bp, Artificial Sequence
  ENSG00000074590_30 (sequence is synthesized)
atgcttctggaggaggggcaggagacacttgggctgtttgccttgggtgagcccaaagaacttgccccttttctccttgtattagcaagctaggtctggctgcgtggagctggcaagtag

SEQ ID NO: 65275 - DNA, 120 bp, Artificial Sequence
  ENSG00000074590_31 (sequence is synthesized)
atttcagcaacttgagcttgagttgacgatcaattaatagtggctgccagttgtgctggcgtaagtggcccacatcatggggaaggagtgctgtgattgactagtaatggctaccacggg

SEQ ID NO: 65276 - DNA, 120 bp, Artificial Sequence
  ENSG00000074590_32 (sequence is synthesized)
aaagggaaggggaagcagtagcactaatgctatgtagttgtcatctttgatctggctaggccctgggaatcgggtttagtcatcctgtgggatctatgttaactctttcatgccactggt

SEQ ID NO: 65277 - DNA, 120 bp, Artificial Sequence
  ENSG00000074590_33 (sequence is synthesized)
gaggcatttgttaatttgctactcaactttgaggaaagacagggccttggtcagagagagaatgctctgaactctgctaaggacatagagtcagcccatggtgatttagctccttgctgt

SEQ ID NO: 65278 - DNA, 120 bp, Artificial Sequence
  ENSG00000074590_34 (sequence is synthesized)
tcacctcctctttcctgatgtctgccttgctctacagcacaacctcttgagggtggacagggagaaagatgatggtgtcagaggtcaaaactattatatatgacagggcacaagatggtc

SEQ ID NO: 65279 - DNA, 120 bp, Artificial Sequence
  ENSG00000074590_35 (sequence is synthesized)
tgtgatctttgcacagatgaatggaagttgatgcacaccaacaagaggcaacttgtcactttctttctcaatattaactggaatgctgcctcttgggttctcacctgcatggatgctttg

SEQ ID NO: 65280 - DNA, 120 bp, Artificial Sequence
  ENSG00000074590_36 (sequence is synthesized)
agttggacgtgatactgtccatattctccagaggattacctggctgaaccattggctctgttcaccagtgacagatggtttccccatccactgagtgtagcatcctcagaggtaggcaag

SEQ ID NO: 65281 - DNA, 120 bp, Artificial Sequence
  ENSG00000074590_37 (sequence is synthesized)
tttgcttctagggagttagcatgtagatgggatattgggatgaggaaaggaaaatcaggtagatggtgctttttttcccccaaatctaagtattctatgtcatggttttaaactttgcca

SEQ ID NO: 65282 - DNA, 120 bp, Artificial Sequence
  ENSG00000074590_38 (sequence is synthesized)
tgaactcctgggctttgggggaagagaaagttccattcatttaaatgaataaggtgttgaaagagtgcagggggttgggaggaagcatgtaagagagggaacatttccttagatgttacc

SEQ ID NO: 65283 - DNA, 120 bp, Artificial Sequence
  ENSG00000074590_39 (sequence is synthesized)
gcatgtaagagagggaacatttccttagatgttacccagatggttctgggggagacagaaaagaggtgcggcaggactcttatcttaaaaagtaaacaaaacaaaacaaaacaaaacaaa

SEQ ID NO: 65284 - DNA, 120 bp, Artificial Sequence
  ENSG00000074590_40 (sequence is synthesized)
atgacaagatgccactccaaccatgggacaccttcatgatactaggtttgtacttcctggtctctgggatgacttcagattctgctggccaaggcaaattgaactcagttcaagatggcc

SEQ ID NO: 65285 - DNA, 120 bp, Artificial Sequence
  ENSG00000074590_41 (sequence is synthesized)
accactggtagacgtgtagatagaaaagaggactggtcttgggaacatctttggaaaaaccaacaaacaatagttctagggagatgagaaaaaaattcaccttacagtgctaagaaagtg

SEQ ID NO: 65286 - DNA, 120 bp, Artificial Sequence
  ENSG00000074590_42 (sequence is synthesized)
cattagaatggaattgccctttccttaaggagacagtttgggctctccccttgccaccggctctggtgttttggcttatgcgttccttcaggttgagctgagcagtgtgttatgggaagc

SEQ ID NO: 65287 - DNA, 120 bp, Artificial Sequence
  ENSG00000074590_43 (sequence is synthesized)
tgctcaatttcctttcattcaattccacctccttcctgaactctaatagaggttaaaagggaaaaaaaaaattctgtagatagcaaattgtgtgtgtgggggggggtgggggtgtgggtg

SEQ ID NO: 65288 - DNA, 120 bp, Artificial Sequence
  ENSG00000074590_44 (sequence is synthesized)
catggaggacaacctgcaactctgagctccctacttcctgcctcatttcatgcagtcttttctgaacagcctatgctgctgccctgctggccccttgtgcacggcagctggccgtgtccg

SEQ ID NO: 65289 - DNA, 120 bp, Artificial Sequence
  ENSG00000074590_45 (sequence is synthesized)
tagctgtcagtatgacttagatctagctcctacctactggttgatgtgttttttccttttgccaagtgattgagtctgtttagtagtttccatcattctagtctttaagtaaaaatgaca

SEQ ID NO: 65290 - DNA, 120 bp, Artificial Sequence
  ENSG00000074590_46 (sequence is synthesized)
ctattgaggaaagtcagtctactcccttcttcctccccccaaacacgtgttctcttttgtcaggaaactcagccagtggactgtggcagagaaagtcctccactcagaggcagagactga

SEQ ID NO: 65291 - DNA, 120 bp, Artificial Sequence
  ENSG00000074590_47 (sequence is synthesized)
gttaagtcataggtggccttaggcatctgcattgtttgcaggggttaagttttccttccagtgagggctggagggatgaattagctggtacctgaagccccgcttagctctgacactctg

SEQ ID NO: 65292 - DNA, 120 bp, Artificial Sequence
  ENSG00000074590_48 (sequence is synthesized)
ccaacatcctctgattctaggtgtggtgttgactgtcctttcaaggaaaaacttgcaatagagggaaaagccattaaagcagctccctgcttcatcattaagtcctgtcatccctaccag

SEQ ID NO: 65293 - DNA, 120 bp, Artificial Sequence
  ENSG00000074590_49 (sequence is synthesized)
ccaatcccagtcaaagaagttatgctttattcacttctgtggaattacaagtgagagacacttttaggacctgatggacaaagcaggagattcactgtcagctttcctggtcctctcctt

SEQ ID NO: 65294 - DNA, 120 bp, Artificial Sequence
  ENSG00000074590_50 (sequence is synthesized)
acttctgtgggccttgcaccgtcttagtttacacatctgccaaaggggtagaattacacttctttttacaggtaaatgtcaaggcacaatcagttttcaggaagtgcttcaagaccccag

SEQ ID NO: 65295 - DNA, 120 bp, Artificial Sequence
  ENSG00000074590_51 (sequence is synthesized)
gtgaaatgaaaatgctaagtaccctctgaatggccatgcctgttaccaggtgctgcttcttcagatgatggggagcacttttcagggtgaaattcaggcgagttttgcccaggcctgctg

SEQ ID NO: 65296 - DNA, 120 bp, Artificial Sequence
  ENSG00000074590_52 (sequence is synthesized)
tcttgagtacaaatgtgaatgatcgactgactgcttgttgccaaactggaaatgttctgtagggatttactggcatggtatcattcctagaagaaaaaaagagagaaacttgactgcaca

SEQ ID NO: 65297 - DNA, 120 bp, Artificial Sequence
  ENSG00000074590_53 (sequence is synthesized)
ttaaaaaaaaaaaaaaatccacattgtgacttttatttaatttctattttttttggtaataaaaagttgacttttttatttgaatttgtcttttttatttattggtctgaaaggcatttc

SEQ ID NO: 65298 - DNA, 120 bp, Artificial Sequence
  ENSG00000074590_54 (sequence is synthesized)
aaaggtattataataatatattggtgtaatttaattggtgcaacatgctttatggctcctgtcaaaattggttttcactcatttgattggtttgagcccagaacagcctacaggggaaaa

SEQ ID NO: 65299 - DNA, 120 bp, Artificial Sequence
  ENSG00000074590_55 (sequence is synthesized)
acaagctggataaccacccaaagtgtttgtattttcgttggaaactgatttttgtttcattttggtttttgtttctgtttttatttttaaattaaataaattgcaatgaactgaaccaga

SEQ ID NO: 65300 - DNA, 120 bp, Artificial Sequence
  ENSG00000074590_56 (sequence is synthesized)
tctttaatctgtcagacatttccctttgctcaccctcctccttcctctttctctcttgttctcatcccagccgctcccattcaattccctctttgtcttctcatttcagaacggtgtggt

SEQ ID NO: 65301 - DNA, 120 bp, Artificial Sequence
  ENSG00000074590_57 (sequence is synthesized)
gcattctctgtagcataagtgagcttgttggctaaacggggtgtttgtgtattgctgttttccctctgcagtgtttgagaacaaagataagattgtgatcatcatggaatatgccagcaa

SEQ ID NO: 65302 - DNA, 120 bp, Artificial Sequence
  ENSG00000074603_0 (sequence is synthesized)
agattccgagtcaaccaccgttcactgggcgccccttgagctctgggcgctggcctcctggcttccacgtccgttatcttaattgagtctcgctggggttgggaggccgggtattgtcag

SEQ ID NO: 65303 - DNA, 120 bp, Artificial Sequence
  ENSG00000074603_1 (sequence is synthesized)
cgcttacagatgaggaaacggaagcccacagaggcgaagggattttccttaagtccgacttggcagatgggcttcggcctcagattttctggtttttcagctggtggtcttttttctctc

SEQ ID NO: 65304 - DNA, 120 bp, Artificial Sequence
  ENSG00000074603_2 (sequence is synthesized)
ctgcctcatgctaggtcgattccctccctgctcactgccctctcccattctgttccacccactcgcagcaggacactttcctttcctgccacacctgtcttctcacacacttttcttcta

SEQ ID NO: 65305 - DNA, 120 bp, Artificial Sequence
  ENSG00000074603_3 (sequence is synthesized)
agacttggcattcctcccatctctcttctcaatattctctgctatgcctctcctcttgttcctcattcatagtttttcaaggtctttgccccctctgtgctattgaatctctcaactagg

SEQ ID NO: 65306 - DNA, 120 bp, Artificial Sequence
  ENSG00000074603_4 (sequence is synthesized)
tgtggaccctaaagaatgagatagctaggcttcagtgaggctttaggtgtttaagtggacggctgtttggcccttgagttaaaaattaaggaatttcacttgagtggatccaaactcaag

SEQ ID NO: 65307 - DNA, 120 bp, Artificial Sequence
  ENSG00000074603_5 (sequence is synthesized)
agtcctaaagctattttctgagtcaacatgctctatttctgagtgaggggcttagtgctatgaggtgtcttgacatcttagtccattgttgctgtgctggcataacctcgctgtttttcc

SEQ ID NO: 65308 - DNA, 120 bp, Artificial Sequence
  ENSG00000074603_6 (sequence is synthesized)
tgcacttgccacttagcttttcccaccccatcccttcatcacctacttgggctatgggagcccaaaattaaaacttatagagtaacagatgtaatagcagaccttccttttttttttttt

SEQ ID NO: 65309 - DNA, 120 bp, Artificial Sequence
  ENSG00000074603_7 (sequence is synthesized)
cctaagccagaatttcaacaagtttaatgcttctttttccagaaaagttacctatttaaattattctcagagtaatgcagcaagaaaatggaatgcacttaagatgaatagaaaattgtt

SEQ ID NO: 65310 - DNA, 120 bp, Artificial Sequence
  ENSG00000074603_8 (sequence is synthesized)
tatctcgtgaaaagtcttaagttattaaattcaagttaattccctttctgcaaaaatggcctgtaactcttactggctatcctcctgagttaattctatctccatccagcttgatatgac

SEQ ID NO: 65311 - DNA, 120 bp, Artificial Sequence
  ENSG00000074603_9 (sequence is synthesized)
attattatgtaaaagaggaacaggaataggcacataaaaataaattttattaatcatatgccgtttttgatgatttgcaatagtcactgagtaacttcacatctgtatgccttttgtaac

SEQ ID NO: 65312 - DNA, 120 bp, Artificial Sequence
  ENSG00000074603_10 (sequence is synthesized)
tttttaaagcctttccatggttttcctttgtctggacaccaaagtttgctatgttaggatattcttttgactatattgggctacacatctctgaaataaaataattcttgaattctgata

SEQ ID NO: 65313 - DNA, 120 bp, Artificial Sequence
  ENSG00000074603_11 (sequence is synthesized)
acataaaacgcagatacaaaataatgtaggcattatatattgccccaaaaagtgatattttggtatcagttttaactactattttggggcttctctttttggccacatatggtccatctt

SEQ ID NO: 65314 - DNA, 120 bp, Artificial Sequence
  ENSG00000074603_12 (sequence is synthesized)
aatgatcaaagtcttatcttatttcattatcctggtgagcaggctttgatggtgaggaaaggaaagattcctgtgagaagagcaggatgagcagagggattctatgcttgaagtcgagtc

SEQ ID NO: 65315 - DNA, 120 bp, Artificial Sequence
  ENSG00000074603_13 (sequence is synthesized)
acttgaaaaagatctctttgaatgtggaagagatctgagcagatgaaaataaaatcaggaaaatgcaacatggcagcagcaatggaaacagaacagctgggtgttgagatatttgaaact

SEQ ID NO: 65316 - DNA, 120 bp, Artificial Sequence
  ENSG00000074603_14 (sequence is synthesized)
gcggactgtgaggagaatattgaatcacaggatcggcctaaattggagcctttttatgttgagcggtattcctggagtcagcttaaaaagctgcttgccgataccagaaaatatcatggc

SEQ ID NO: 65317 - DNA, 120 bp, Artificial Sequence
  ENSG00000074603_15 (sequence is synthesized)
tacatgatggctaaggcaccacatgatttcatgtttgtgaagaggaatgatccagatggacctcattcagacagaatctattaccttgccatgtctggtgagaacagagaaaatacactg

SEQ ID NO: 65318 - DNA, 120 bp, Artificial Sequence
  ENSG00000074603_16 (sequence is synthesized)
ttttattctgaaattcccaaaactatcaatagagcagcagtcttaatgctctcttggaagcctcttttggatctttttcaggcaacactggactatggaatgtattctcgagaagaagaa

SEQ ID NO: 65319 - DNA, 120 bp, Artificial Sequence
  ENSG00000074603_17 (sequence is synthesized)
ctattaagagaaagaaaacgcattggaacagtcggaattgcttcttacgattatcaccaaggaagtggaacatttctgtttcaagccggtagtggaatttatcacgtaaaagatggaggg

SEQ ID NO: 65320 - DNA, 120 bp, Artificial Sequence
  ENSG00000074603_18 (sequence is synthesized)
ccacaaggatttacgcaacaacctttaaggcccaatctagtggaaactagttgtcccaacatacggatggatccaaaattatgccctgctgatccagactggattgcttttatacatagc

SEQ ID NO: 65321 - DNA, 120 bp, Artificial Sequence
  ENSG00000074603_19 (sequence is synthesized)
aacgatatttggatatctaacatcgtaaccagagaagaaaggagactcacttatgtgcacaatgagctagccaacatggaagaagatgccagatcagctggagtcgctacctttgttctc

SEQ ID NO: 65322 - DNA, 120 bp, Artificial Sequence
  ENSG00000074603_20 (sequence is synthesized)
caagaagaatttgatagatattctggctattggtggtgtccaaaagctgaaacaactcccagtggtggtaaaattcttagaattctatatgaagaaaatgatgaatctgaggtggaaatt

SEQ ID NO: 65323 - DNA, 120 bp, Artificial Sequence
  ENSG00000074603_21 (sequence is synthesized)
attcatgttacatcccctatgttggaaacaaggagggcagattcattccgttatcctaaaacaggtacagcaaatcctaaagtcacttttaagatgtcagaaataatgattgatgctgaa

SEQ ID NO: 65324 - DNA, 120 bp, Artificial Sequence
  ENSG00000074603_22 (sequence is synthesized)
ggaaggatcatagatgtcatagataaggaactaattcaaccttttgagattctatttgaaggagttgaatatattgccagagctggatggactcctgagggaaaatatgcttggtccatc

SEQ ID NO: 65325 - DNA, 120 bp, Artificial Sequence
  ENSG00000074603_23 (sequence is synthesized)
ctactagatcgctcccagactcgcctacagatagtgttgatctcacctgaattatttatcccagtagaagatgatgttatggaaaggcagagactcattgagtcagtgcctgattctgtg

SEQ ID NO: 65326 - DNA, 120 bp, Artificial Sequence
  ENSG00000074603_24 (sequence is synthesized)
acgccactaattatctatgaagaaacaacagacatctggataaatatccatgacatctttcatgtttttccccaaagtcacgaagaggaaattgagtttatttttgcctctgaatgcaaa

SEQ ID NO: 65327 - DNA, 120 bp, Artificial Sequence
  ENSG00000074603_25 (sequence is synthesized)
acaggtttccgtcatttatacaaaattacatctattttaaaggaaagcaaatataaacgatccagtggtgggctgcctgctccaagtgatttcaagtgtcctatcaaagaggagatagca

SEQ ID NO: 65328 - DNA, 120 bp, Artificial Sequence
  ENSG00000074603_26 (sequence is synthesized)
attaccagtggtgaatgggaagttcttggccggcatggatctaatatccaagttgatgaagtcagaaggctggtatattttgaaggcaccaaagactcccctttagagcatcacctgtac

SEQ ID NO: 65329 - DNA, 120 bp, Artificial Sequence
  ENSG00000074603_27 (sequence is synthesized)
gtagtcagttacgtaaatcctggagaggtgacaaggctgactgaccgtggctactcacattcttgctgcatcagtcagcactgtgacttctttataagtaagtatagtaaccagaagaat

SEQ ID NO: 65330 - DNA, 120 bp, Artificial Sequence
  ENSG00000074603_28 (sequence is synthesized)
ccacactgtgtgtccctttacaagctatcaagtcctgaagatgacccaacttgcaaaacaaaggaattttgggccaccattttggattcagcaggtcctcttcctgactatactcctcca

SEQ ID NO: 65331 - DNA, 120 bp, Artificial Sequence
  ENSG00000074603_29 (sequence is synthesized)
gaaattttctcttttgaaagtactactggatttacattgtatgggatgctctacaagcctcatgatctacagcctggaaagaaatatcctactgtgctgttcatatatggtggtcctcag

SEQ ID NO: 65332 - DNA, 120 bp, Artificial Sequence
  ENSG00000074603_30 (sequence is synthesized)
gtgcagttggtgaataatcggtttaaaggagtcaagtatttccgcttgaataccctagcctctctaggttatgtggttgtagtgatagacaacaggggatcctgtcaccgagggcttaaa

SEQ ID NO: 65333 - DNA, 120 bp, Artificial Sequence
  ENSG00000074603_31 (sequence is synthesized)
tttgaaggcgcctttaaatataaaatgggtcaaatagaaattgacgatcaggtggaaggactccaatatctagcttctcgatatgatttcattgacttagatcgtgtgggcatccacggc

SEQ ID NO: 65334 - DNA, 120 bp, Artificial Sequence
  ENSG00000074603_32 (sequence is synthesized)
tggtcctatggaggatacctctccctgatggcattaatgcagaggtcagatatcttcagggttgctattgctggggccccagtcactctgtggatcttctatgatacaggatacacggaa

SEQ ID NO: 65335 - DNA, 120 bp, Artificial Sequence
  ENSG00000074603_33 (sequence is synthesized)
cgttatatgggtcaccctgaccagaatgaacagggctattacttaggatctgtggccatgcaagcagaaaagttcccctctgaaccaaatcgtttactgctcttacatggtttcctggat

SEQ ID NO: 65336 - DNA, 120 bp, Artificial Sequence
  ENSG00000074603_34 (sequence is synthesized)
gagaatgtccattttgcacataccagtatattactgagttttttagtgagggctggaaagccatatgatttacagatctatcctcaggagagacacagcataagagttcctgaatcggga

SEQ ID NO: 65337 - DNA, 120 bp, Artificial Sequence
  ENSG00000074603_35 (sequence is synthesized)
gaacattatgaactgcatcttttgcactaccttcaagaaaaccttggatcacgtattgctgctctaaaagtgatataattttgacctgtgtagaactctctggtatacactggctattta

SEQ ID NO: 65338 - DNA, 120 bp, Artificial Sequence
  ENSG00000074603_36 (sequence is synthesized)
tgccatgtaacatctactcctgaaaataaatgtggtgccatgcaggggtctacggtttgtggtagtaatctaataccttaaccccacatgctcaaaatcaaatgatacatattcctgaga

SEQ ID NO: 65339 - DNA, 120 bp, Artificial Sequence
  ENSG00000074603_37 (sequence is synthesized)
ctaaaaaaaaaaaaaaaaaaaagacattagcaccatgtattcatactaccctattttcacttttaatagtattataaacttcatgaacttaattagtgtatttttacagtatacttttga

SEQ ID NO: 65340 - DNA, 120 bp, Artificial Sequence
  ENSG00000074603_38 (sequence is synthesized)
tgtatttttacagtatacttttgagtttgttaaaatatgatgatattagtgattggtttggttcagttccagaatctttgactagttacagatttgatagcacttaaatgtaattgaata

SEQ ID NO: 65341 - DNA, 120 bp, Artificial Sequence
  ENSG00000074603_39 (sequence is synthesized)
gcttatgcttcattgcttgggcatatccagcatgttatgaactaataactattaaacttgacttaaccagtcattcattaataatttttcaaggataacttagtggcctcctaaagacac

SEQ ID NO: 65342 - DNA, 120 bp, Artificial Sequence
  ENSG00000074603_40 (sequence is synthesized)
ttgttttggcactgaccagtttttagccaatttaatctgtatctagtataaataattctcatttttctttgatgatattaacagagtgggcttttccttttgcataaaggctagtaactg

SEQ ID NO: 65343 - DNA, 120 bp, Artificial Sequence
  ENSG00000074603_41 (sequence is synthesized)
tatatgtagcatggatttaattagtcatgatattgataattacaggcagaaaatttttaatcaaatgattagagcttaaatatttgcaggcaagtttttttttttcctttaagaaaagga

SEQ ID NO: 65344 - DNA, 120 bp, Artificial Sequence
  ENSG00000074603_42 (sequence is synthesized)
aaaagtacacattcactagaattcttcagaaaatttagtggtgccagtttccatttggtatttccttattaaaatattctagaattttaaggagattgaagggaatcacagtggggtggg

SEQ ID NO: 65345 - DNA, 120 bp, Artificial Sequence
  ENSG00000074603_43 (sequence is synthesized)
gagacctgggtttggggaatgacagagagaagaggtggtgagggcctgattaaaaactaagcagaagtagttttaacaaaaatactcatgaaaatgtttggaaactgaaatttaaacaac

SEQ ID NO: 65346 - DNA, 120 bp, Artificial Sequence
  ENSG00000074603_44 (sequence is synthesized)
tgtaatattaaggaaaccagaatcaataaatcactgtcttgccagcacagctacagagtaacatgattcaggggaggaaaagttccttagagttacttttataattctttttttttttcc

SEQ ID NO: 65347 - DNA, 120 bp, Artificial Sequence
  ENSG00000074603_45 (sequence is synthesized)
ttagaaatcttacaaatttaaactttatccttttaaaattatttgaacataatttagatattgtaagcttaaaatacaaatgtttatagataacctctttaccataaactaatccctggc

SEQ ID NO: 65348 - DNA, 120 bp, Artificial Sequence
  ENSG00000074603_46 (sequence is synthesized)
tccctggcaagccatggctctctttttttttttggtgtttaaagcctgtaaacagtttttctgaatgatcatgaacttttcttggtttagcactaggatttagctatgaagagagctcat

SEQ ID NO: 65349 - DNA, 120 bp, Artificial Sequence
  ENSG00000074603_47 (sequence is synthesized)
aggctttcaggtgctaattgagatctgccctgttagagtcttggggtgctagattggtcacattgacaccagtggcagggaaggcatctatgagtttgatgctttttatcacacacttca

SEQ ID NO: 65350 - DNA, 120 bp, Artificial Sequence
  ENSG00000074603_48 (sequence is synthesized)
gtgtttagaaagttattaccaatacttttaaacaacactccaagaaaatttgctatatttctttctcatcactacagagagagtagatttccccatagagagcacagcctccattagtaa

SEQ ID NO: 65351 - DNA, 120 bp, Artificial Sequence
  ENSG00000074603_49 (sequence is synthesized)
ggttggtgactattggtaagaggtggacttcattgacaccaagtgggaggtagggaaagcccagaaatggcaggatgatatggtggttctgtcgttgggaaaggtattgggttttgctgt

SEQ ID NO: 65352 - DNA, 120 bp, Artificial Sequence
  ENSG00000074603_50 (sequence is synthesized)
ttgtatttatactgtataatagataccacgctttttcttattatctgtatatgtattgcttttcatgtttgatattttcccatgccaagatttgtttatatatattttcaatgttaaatt

SEQ ID NO: 65353 - DNA, 120 bp, Artificial Sequence
  ENSG00000074603_51 (sequence is synthesized)
tatatatattttcaatgttaaattaaattgatttgggtaactttcttccccaagaaagtattttcccccttaagtatatatctgactgtggagggtgttttgttttgttttgttttgttt

SEQ ID NO: 65354 - DNA, 120 bp, Artificial Sequence
  ENSG00000074603_52 (sequence is synthesized)
gatctatccttataatatatgcaaagtagaaatggtatacagtagcttttaagcagctactccattgaaacctctcacccattaaggctgtttcttcaaagtggcatctcttattttacc

SEQ ID NO: 65355 - DNA, 120 bp, Artificial Sequence
  ENSG00000074603_53 (sequence is synthesized)
gaaacaaacttagaaaacttcatgtactctggagttcacaggtgttttccttttgcatgttgccttctcctttcctcctatcacaaagaatgcttctattatcactcccagtcacttaaa

SEQ ID NO: 65356 - DNA, 120 bp, Artificial Sequence
  ENSG00000074603_54 (sequence is synthesized)
tgccattctgcttctttagcaggaaaaaatacctgaatgaattctcttacagaaagacagtttgactgaatttgctttttacaatcagtgtggaaaatatcatagtcaattgaggcaatc

SEQ ID NO: 65357 - DNA, 120 bp, Artificial Sequence
  ENSG00000074603_55 (sequence is synthesized)
agtagaaatctcactaaaagtttgtaccccctgagtatgggtaacagcttaaacggcaagaatatataaaagtagcaacagtttagtgggagccaaaaagcactaggttaaatatcatac

SEQ ID NO: 65358 - DNA, 120 bp, Artificial Sequence
  ENSG00000074603_56 (sequence is synthesized)
tacgtttttaaagacttgataaatgtgtacacttgaacaaccatccagagggatagttacttgagcattacagagtagtggaactcaaaatctaagattcatctgggatacttctaaaag

SEQ ID NO: 65359 - DNA, 84 bp, Artificial Sequence
  ENSG00000074603_57 (sequence is synthesized)
gaactcaaaatctaagattcatctgggatacttctaaaagaaatgtagagttttgaatctcactcttaaaaatgtgtattccca

SEQ ID NO: 65360 - DNA, 69 bp, Artificial Sequence
  ENSG00000074603_58 (sequence is synthesized)
gggaggccaaggcgggtgaatcacttgaagtcaggagatcaagaccagcttggtatgatggcgtgtgcc

SEQ ID NO: 65361 - DNA, 120 bp, Artificial Sequence
  ENSG00000074603_59 (sequence is synthesized)
gttgcagtgagccgagatggcgccactgtagtccagtctgggcgacagagtgagattctgcctcaaaataaataaataaataaaaatttgtattccattgatttgggtagacaccaggaa

SEQ ID NO: 65362 - DNA, 120 bp, Artificial Sequence
  ENSG00000074603_60 (sequence is synthesized)
attgatttgggtagacaccaggaatgtgcatttctaacaagctttccaggcgatcctatagtaagtcatctgtggactactttaagaaactcttctatagagaatggagttggattaata

SEQ ID NO: 65363 - DNA, 120 bp, Artificial Sequence
  ENSG00000074603_61 (sequence is synthesized)
ataggtgattttttacactggactgattcacaagaacctaaacagtagtccatgaagctgctcatctgtggtaactatttggccccgtctcactctgaaagcagcaggagatgttgttta

SEQ ID NO: 65364 - DNA, 120 bp, Artificial Sequence
  ENSG00000074603_62 (sequence is synthesized)
ctttgtttctatcccctttgtctggagattaattttggaatgaaagtttttctctctatgccattcctggttcttttccaaagcctcatacaagaggattaggtcacaatgcatgcatta

SEQ ID NO: 65365 - DNA, 120 bp, Artificial Sequence
  ENSG00000074603_63 (sequence is synthesized)
ccttttaaaagaatgcgatattgataccgatgcttacttttttttttttactacttgttttattccttccagaaagtatagcccgcctttctatagcatagttctctttaggtggaatga

SEQ ID NO: 65366 - DNA, 120 bp, Artificial Sequence
  ENSG00000074603_64 (sequence is synthesized)
ttcctataagatttctcattattaaatcatgcatttttcaagatggaatcaatatttgatttaatctaagctgatattctcatttgttagaagaacaacctacatgctagagagagagga

SEQ ID NO: 65367 - DNA, 120 bp, Artificial Sequence
  ENSG00000074603_65 (sequence is synthesized)
ggaaatatacccacgaccacacagccagttagtatccagttggtgctggactccagccaggtgtcctgcctcatggtagttaaatgatatatagaaaaggtaaatttttaaagaaatatt

SEQ ID NO: 65368 - DNA, 120 bp, Artificial Sequence
  ENSG00000074603_66 (sequence is synthesized)
tattaatatattcctataaaacattttaaaggtaaccacataaaaatggttaatttttccattccaaagtaaatgctaagcatgtttattaatgaagcagtacttctgattagtatatga

SEQ ID NO: 65369 - DNA, 120 bp, Artificial Sequence
  ENSG00000074603_67 (sequence is synthesized)
cattctgaagttaattaaactcattgcactaaatgtgtcttccttggtatagtggaggatttgaggattggaatatagagtagagtgcttgcttaagcctgggagcccatctttatagct

SEQ ID NO: 65370 - DNA, 120 bp, Artificial Sequence
  ENSG00000074603_68 (sequence is synthesized)
atttgatgtaagaaaagagacatggccatttctaaactatataaggtgagtgtgtctattcccagcagatataaaggaaaaaggaaacttttttgattcccaccttcccagcctcaccta

SEQ ID NO: 65371 - DNA, 120 bp, Artificial Sequence
  ENSG00000074603_69 (sequence is synthesized)
gccatcttccagcctcaaatatagagatgttagtgcaaggtcctgggctctaggtgatcatttcataagtcctttacagataaagaaaaagtagtgtttgtatgtttgtttttaagtaac

SEQ ID NO: 65372 - DNA, 120 bp, Artificial Sequence
  ENSG00000074603_70 (sequence is synthesized)
cccaaaacaaatttatattgtattcagcaaaattggaattcaggtgtttaattttagaacatgaagtgcctgctgttttaagcattgacttgtataaaaagaattgcatgtctccagtaa

SEQ ID NO: 65373 - DNA, 120 bp, Artificial Sequence
  ENSG00000074603_71 (sequence is synthesized)
gcttatgggttttctcatttttaggtatatggcttttaatcatgtaaagtgaaacattagttttcttgcattttattacaggttctttgttgcaataaagatgctgctgaaattaattga

SEQ ID NO: 65374 - DNA, 120 bp, Artificial Sequence
  ENSG00000074603_72 (sequence is synthesized)
ggccgctgctactgccgccgctgcttcttagtgccgcgttcgccgcctgggttgtcaccggcgccgccgccgaggaagccactgcaaccaggaccggagtggaggcggcgcagcatgaag

SEQ ID NO: 65375 - DNA, 120 bp, Artificial Sequence
  ENSG00000074603_73 (sequence is synthesized)
tcagcaacaacctttaaggcccaatctagtggaaactagttgtcccaacatacggatggatccaaaattatgccctgctgatccagactggattgcttttatacatagcaacgatatttg

SEQ ID NO: 65376 - DNA, 120 bp, Artificial Sequence
  ENSG00000074603_74 (sequence is synthesized)
gtgcagagccggtggtgcccttcccccctcccccccacttgccggaagaggaagccgaggctctgagattccgagtcaaccaccgttcactgggcgccccttgagctctgggcgctggcc

SEQ ID NO: 65377 - DNA, 120 bp, Artificial Sequence
  ENSG00000074603_75 (sequence is synthesized)
taaggcagttactgtgtttgccagtgttattggacatgctgagtaagacatggggattttctcccacagccagttctttgaccttatgttgtattctcatgtaagtttttttgtttttat

SEQ ID NO: 65378 - DNA, 120 bp, Artificial Sequence
  ENSG00000074603_76 (sequence is synthesized)
ttttgtttttggctcagtgaagtgagattgcgtgcactggcaggcctagtaatatagacaaggtggtggtggtaggaattaggactttaaagaagtagtatgttcagttcctagaggtag

SEQ ID NO: 65379 - DNA, 120 bp, Artificial Sequence
  ENSG00000074603_77 (sequence is synthesized)
gtagtataatagggaaataagaagacagggcctcaagagcaattccttctgctttactgcactaaaaattaaaaaggagaagtaggccaggtgcagtggctcacgcgtgtaatcccagca

SEQ ID NO: 65380 - DNA, 120 bp, Artificial Sequence
  ENSG00000074603_78 (sequence is synthesized)
aaggagagccttttataaaagctaccaaagggatttataggcactgtgaagtagacctgacctcaatttttttttaatttcatttttaaactgaacacagagaagggagagctgttgctt

SEQ ID NO: 65381 - DNA, 120 bp, Artificial Sequence
  ENSG00000074603_79 (sequence is synthesized)
ttcttactaagtttcattgcagctgtgctaaaaagcatttttttcttgccctccccactcccccgctttttttttgaccctctcagagaatcattctgataatagaagatagacccgtga

SEQ ID NO: 65382 - DNA, 120 bp, Artificial Sequence
  ENSG00000074603_80 (sequence is synthesized)
tttttcaaaatcgaagatgccagaaattgcttcttcctaaagctagcttgaaatgcctttctttagatggtctgattaggaaaacaaacaataaaaccattagtttgttcccactcaaca

SEQ ID NO: 65383 - DNA, 120 bp, Artificial Sequence
  ENSG00000074603_81 (sequence is synthesized)
tagttaaatgcagtcatgattagtgattgattactttgaaatctattagctgtggggtaagtccagatttttagagtgtccaccctctgcttaagagaactaaagtaagaggcatattta

SEQ ID NO: 65384 - DNA, 120 bp, Artificial Sequence
  ENSG00000074603_82 (sequence is synthesized)
gtagtgcctgtagttggataaaaattaagattctgttgcagtcaggctgacatacctgcctatcagattacatgactgtgtgtctgtatctgctttcagtttggaagcatggaaaagatg

SEQ ID NO: 65385 - DNA, 120 bp, Artificial Sequence
  ENSG00000074621_0 (sequence is synthesized)
acacccgaccctgccttgaattaggattccataggagagctgggggcaggagaatggggtgttccctgctgtccagcttcagacccactctttgagatattggattctgacaagtttcca

SEQ ID NO: 65386 - DNA, 120 bp, Artificial Sequence
  ENSG00000074621_1 (sequence is synthesized)
gagctgagaagacagccagatgtcaaggtctgaagggttgtggataccccctggctgggcttcatggagaaatcttctctgatcaccaacctgaatcccagagtagcctccatcttagga

SEQ ID NO: 65387 - DNA, 120 bp, Artificial Sequence
  ENSG00000074621_2 (sequence is synthesized)
cagaatgagaggccttctgtaaccagatataactggccagcatggggaaattgatcaggatggggccgcaagagaggtggttactccggacaaagcggcttcattggagtcgcctcctct

SEQ ID NO: 65388 - DNA, 120 bp, Artificial Sequence
  ENSG00000074621_3 (sequence is synthesized)
tcttactgggaatgttgatcatcggttctacttatcagcaccttaggagaccccggggcctttcctcattgtgggcagcagtctcttctcatcagcctataaaactggccagtcgggacc

SEQ ID NO: 65389 - DNA, 120 bp, Artificial Sequence
  ENSG00000074621_4 (sequence is synthesized)
tctccagtgaagagatgatgatgatgagcagcagcccttcaaaacctagctccgaaatggggggtaagatgctggtaccccaagcctcagtgggcagtgatgaagcaacactgagcatga

SEQ ID NO: 65390 - DNA, 120 bp, Artificial Sequence
  ENSG00000074621_5 (sequence is synthesized)
cagtggagaatatccccagtatgcctaaaagaacagccaagatgatcccaacaacaaccaagaataattacagcccaacagcagcaggtacagaaagaaggaaggaagacaccccaacat

SEQ ID NO: 65391 - DNA, 120 bp, Artificial Sequence
  ENSG00000074621_6 (sequence is synthesized)
ccagtagaacactgacttactacacctcaacttcaagcagacaaatagtaaaaaagtataccccaacacccaggggagaaatgaagagctacagcccaactcaagtgagggaaaaggtga

SEQ ID NO: 65392 - DNA, 120 bp, Artificial Sequence
  ENSG00000074621_7 (sequence is synthesized)
agtatactccttccccacgtggtagaagagtaggcacttacgtgccgtccacattcatgacaatggaaacaagccatgcgatcacccccaggacaacagtgaaagacagtgacattacag

SEQ ID NO: 65393 - DNA, 120 bp, Artificial Sequence
  ENSG00000074621_8 (sequence is synthesized)
caacctataaaatactcgaaaccaactctcttaagagaataatggaggaaaccaccccaaccactctcaagggaatgtttgatagcaccccaacttttctgacacatgaggtagaagcaa

SEQ ID NO: 65394 - DNA, 120 bp, Artificial Sequence
  ENSG00000074621_9 (sequence is synthesized)
acgtcttgacttctccaaggagcgtcatggaaaaaaacaacctgtttccccccagaagagtggaaagtaacagctcagcccatccctgggggttagtgggaaagagcaacccgaagactc

SEQ ID NO: 65395 - DNA, 120 bp, Artificial Sequence
  ENSG00000074621_10 (sequence is synthesized)
cccagggaacagtcctgttgcataccccagccacctctgaggggcaggtgacaataagcaccatgacaggcagcagcccagcagaaaccaaagccttcactgctgcctggagtcttagga

SEQ ID NO: 65396 - DNA, 120 bp, Artificial Sequence
  ENSG00000074621_11 (sequence is synthesized)
atccttcacccaggaccagtgtatcagccatcaaaacagccccagccatagtctggaggctggcaaagaaaccttccacagcacccagcacctcaacaacccctacggtcagggcaaagc

SEQ ID NO: 65397 - DNA, 120 bp, Artificial Sequence
  ENSG00000074621_12 (sequence is synthesized)
tgaccatgcaggtccatcactgtgtggttgtgaagccaaccccagccatgctcaccactccctccccaagcctcacaacagccctgctcccagaggagctcagtcctagtccctcagtgc

SEQ ID NO: 65398 - DNA, 120 bp, Artificial Sequence
  ENSG00000074621_13 (sequence is synthesized)
tgcctcccagcttgccagacctccaccccaagggagagtaccccccagatctgttcagtgtggaggagcggcggcagggctgggtggtcctgcacgtttttggcatgatgtatgtgtttg

SEQ ID NO: 65399 - DNA, 120 bp, Artificial Sequence
  ENSG00000074621_14 (sequence is synthesized)
tggccttggccattgtttgcgacgagtacttcgttccagccctgggtgtcatcacagacaagctgcagatctccgaggatgtggcaggcgccacattcatggctgctggaggctctgctc

SEQ ID NO: 65400 - DNA, 120 bp, Artificial Sequence
  ENSG00000074621_15 (sequence is synthesized)
ctgagctcttcacctccctcatcggtgtcttcatttcccacagcaacgtgggcattggtaccattgtgggctctgctgtgttcaacattctctttgtcattggcacttgttccctcttct

SEQ ID NO: 65401 - DNA, 120 bp, Artificial Sequence
  ENSG00000074621_16 (sequence is synthesized)
cccgagagatcctcaacctcacctggtggcccttattccgtgatgtctccttctacatccttgacctgataatgctcatcctcttcttcctggacagcctcattgcctggtgggagagcc

SEQ ID NO: 65402 - DNA, 120 bp, Artificial Sequence
  ENSG00000074621_17 (sequence is synthesized)
tgctgctgctgctggcctatgccttctatgtgttcaccatgaagtggaacaagcatatcgaggtctgggtgaaggagcagctcagcaggaggccagtggccaaggtcatggccttagaag

SEQ ID NO: 65403 - DNA, 120 bp, Artificial Sequence
  ENSG00000074621_18 (sequence is synthesized)
acctcagcaagccgggcgatggggccattgcggtggatgagctacaggataacaagaagctgaagctcccgtccttgctgacccgagggagcagctcgacctctctgcacaacagcacca

SEQ ID NO: 65404 - DNA, 120 bp, Artificial Sequence
  ENSG00000074621_19 (sequence is synthesized)
tccgcagcaccatctaccagctcatgctccacagcctggaccccctgagggaagttcgccttgccaaggagaaggaggaggagagcttgaatcaaggggccagagcccaaccccaggcca

SEQ ID NO: 65405 - DNA, 120 bp, Artificial Sequence
  ENSG00000074621_20 (sequence is synthesized)
aagcagaaagcaaaccagaagaggaggagccagccaagctccctgcggtcacggtcacaccagcccctgttccagacatcaagggagatcagaaggagaatccaggcggtcaggaagatg

SEQ ID NO: 65406 - DNA, 120 bp, Artificial Sequence
  ENSG00000074621_21 (sequence is synthesized)
tggctgaggccgagagcacaggtgaaatgccaggcgaagagggcgaaactgctggtgaaggtgaaactgaagagaaaagtggaggtgaaactcaaccagaaggtgaaggtgaaactgaaa

SEQ ID NO: 65407 - DNA, 120 bp, Artificial Sequence
  ENSG00000074621_22 (sequence is synthesized)
cacaaggaaaaggagaagaatgtgaagatgaaaatgaagcagaaggaaaaggagacaatgaaggtgaagatgagggtgaaatccacgcagaagatggtgaaatgaaaggtaatgaaggtg

SEQ ID NO: 65408 - DNA, 120 bp, Artificial Sequence
  ENSG00000074621_23 (sequence is synthesized)
aaactgaaagccaggaactcagtgctgaaaatcacggtgaagccaaaaatgatgagaaaggtgtagaagatggagggggaagtgatggaggggatagcgaagaggaggaagaggaggagg

SEQ ID NO: 65409 - DNA, 120 bp, Artificial Sequence
  ENSG00000074621_24 (sequence is synthesized)
aggaggaggaggaggaggaagaggaggagaagggaaatgaagagcctctgtccctggactggcctgaaaccaggcagaagcaggccatttacctcttccttctgcccatcgtgttcccac

SEQ ID NO: 65410 - DNA, 120 bp, Artificial Sequence
  ENSG00000074621_25 (sequence is synthesized)
caggccatttacctcttccttctgcccatcgtgttcccactgtggctgacagtccccgacgtccgaaggcaggagtctaggaagttttttgttttcaccttcctgggatctatcatgtgg

SEQ ID NO: 65411 - DNA, 120 bp, Artificial Sequence
  ENSG00000074621_26 (sequence is synthesized)
atagccatgttctcatacctcatggtgtggtgggctcaccaggttggtgaaacaatagggatttctgaagagatcatgggcctgacaatccttgcagcaggcacatcaattcctgacctc

SEQ ID NO: 65412 - DNA, 120 bp, Artificial Sequence
  ENSG00000074621_27 (sequence is synthesized)
atcaccagtgtgattgtcgctcgaaaaggcctgggagacatggctgtgtcaagctctgtgggcagtaacatatttgatatcactgtgggcttgcctgttccttggttgcttttctctctt

SEQ ID NO: 65413 - DNA, 120 bp, Artificial Sequence
  ENSG00000074621_28 (sequence is synthesized)
atcaatggattacagccagttccagtcagcagcaatggcttgttttgtgcaattgttttgctttttctcatgcttctgtttgtgatctcttcaattgcgtcatgtaaatggagaatgaac

SEQ ID NO: 65414 - DNA, 120 bp, Artificial Sequence
  ENSG00000074621_29 (sequence is synthesized)
aagatcctgggcttcacaatgttcctcctttactttgtattcctgataatcagtgtgatgttagaagatcgaatcatatcctgtcctgtatctgtctgaatcagtcactcttgctcacaa

SEQ ID NO: 65415 - DNA, 120 bp, Artificial Sequence
  ENSG00000074621_30 (sequence is synthesized)
tgggcatggatcagaagaccatgcagaagttactgtatctcttgtgaccctaatgaaagaatgtatatgatcctggaaagtgaactgggtgacctaggacctctgatatgaatgtgatct

SEQ ID NO: 65416 - DNA, 120 bp, Artificial Sequence
  ENSG00000074621_31 (sequence is synthesized)
gagactaaagtttgtccttggaaacacctgcagctcattgtggattaagaacctcacccctggaggggtggagtttctacccctgactcatgcagacatctattacatggaggcagtaga

SEQ ID NO: 65417 - DNA, 120 bp, Artificial Sequence
  ENSG00000074621_32 (sequence is synthesized)
aggacccctggagccagagggttttctaaatgagataactgggggcaaaggttgggataggcgcagcagctataagacaagctcctacgctcactgttccctgatcattccaaaggctgc

SEQ ID NO: 65418 - DNA, 120 bp, Artificial Sequence
  ENSG00000074621_33 (sequence is synthesized)
tggcccaaaagatgcagatgtggtctacatctcagccttcctgacctctgccccaaacacacgctgcaattttgtctcctccttttctgttcaaattgtgaggttctatcaggtttgtaa

SEQ ID NO: 65419 - DNA, 120 bp, Artificial Sequence
  ENSG00000074621_34 (sequence is synthesized)
tcactgtagcttcagttattggtgagtctaaggatccaaggctacagaaaaaaaagaaatataacaggaattaatgatcattccacgttttgtagcccactgcatctggatatataccag

SEQ ID NO: 65420 - DNA, 83 bp, Artificial Sequence
  ENSG00000074621_35 (sequence is synthesized)
tataccagtattttctagtttaaaggaggactacattaactcttattgttgtgtttctgaaaagtgaaatttaaaaagcagcc

SEQ ID NO: 65421 - DNA, 120 bp, Artificial Sequence
  ENSG00000074621_36 (sequence is synthesized)
tattgttgtgtttctgaaaagtgaaatttaaaaagcagcctgaaaaataaaaatttataatttgcccttgaattggaaggaatggagattagggaaggaaaactactctagaggccattt

SEQ ID NO: 65422 - DNA, 120 bp, Artificial Sequence
  ENSG00000074621_37 (sequence is synthesized)
aaaagtatgtatttattagaacatgcaaattcatgttgtctccatcagtggtcaccttgagggattagacattctaatggaatgtcctggctccaccctccagcatgttctcacccaaca

SEQ ID NO: 65423 - DNA, 120 bp, Artificial Sequence
  ENSG00000074621_38 (sequence is synthesized)
atgacagttgagtggagtgggaagggaagtcattctaaagagtccaaagtcagtagcgccacatctggtttataaagtaagagatccagtgggacaatgctatttttgtatgccaaccta

SEQ ID NO: 65424 - DNA, 120 bp, Artificial Sequence
  ENSG00000074621_39 (sequence is synthesized)
gataggattataaagcaagactgatttcttctgtggtttatgaatggatcttaaggtaattacaaaagggaaattccaagaatgcataacacaatgacaacatggtgagaaaagtgcagt

SEQ ID NO: 65425 - DNA, 120 bp, Artificial Sequence
  ENSG00000074621_40 (sequence is synthesized)
actacttccaaggtagctagtgtaaaggacacttgagtttttaaaactgtggttaaatgttttatgtggaatttgatgagtttgtatattaaataccactgcttgctgcttttactagaa

SEQ ID NO: 65426 - DNA, 120 bp, Artificial Sequence
  ENSG00000074621_41 (sequence is synthesized)
tcaagttaagggacacgttagaaatagaacagcttaatatcactggcttcagagcaaaatgagctcgggtgactgcagattatgatggtaaatatggctttaattacaaacatgaggaat

SEQ ID NO: 65427 - DNA, 120 bp, Artificial Sequence
  ENSG00000074621_42 (sequence is synthesized)
gattcactgaagatgaaaagataggacggatgtgatatgaaaaaaacccaaacattttggcattgaatgatggctaaggtgttccaagtattccatcttttaagatgaattgcttaatta

SEQ ID NO: 65428 - DNA, 120 bp, Artificial Sequence
  ENSG00000074621_43 (sequence is synthesized)
attgcctcgctaccccaggattctcattctttggaaataatttttattaaatttcaataaactgtgaatcccaatggtattttactttacaacatggatgggctcatccttatctttagg

SEQ ID NO: 65429 - DNA, 120 bp, Artificial Sequence
  ENSG00000074621_44 (sequence is synthesized)
tcatttggtcagaatcctcccgagaagactgatgaagagtatggaatcatgttccaattctatattcttaattatccttattcctgatgctactgcattgctgggtttccatagccaagg

SEQ ID NO: 65430 - DNA, 120 bp, Artificial Sequence
  ENSG00000074621_45 (sequence is synthesized)
cctaagaacaggaggagaaggcaatgcttgtgggagggaggtcccaataccaaaattctgggcactaacctggtgtctgcagcccgttcccgttagcctcggggatgtcacctcacccac

SEQ ID NO: 65431 - DNA, 120 bp, Artificial Sequence
  ENSG00000074621_46 (sequence is synthesized)
agcctgggatctgacgttcttcctcagactggagtaaggagtgatggaccgtaaaatgctgtgtaatgataaaaggctgaaatatccactgaatgattaaaaccaactctaataatctga

SEQ ID NO: 65432 - DNA, 120 bp, Artificial Sequence
  ENSG00000074621_47 (sequence is synthesized)
attgccctgaatctctccccattctcgggctctttccttccccttctgccccactgacccatgggcctcacctggcccggtgactctgtgtccgcttcacacttttgtcccctcactccc

SEQ ID NO: 65433 - DNA, 120 bp, Artificial Sequence
  ENSG00000074621_48 (sequence is synthesized)
ctgggccccgtcggtgcacgagcccaacccttcctgctattttcctcgtcactctttagccccctctctcgtatcctctgaaccggttgacagaatcctcttcctgttctttttaaactg

SEQ ID NO: 65434 - DNA, 69 bp, Artificial Sequence
  ENSG00000074621_49 (sequence is synthesized)
aaccggttgacagaatcctcttcctgttctttttaaactgcaattcctgaactacaaatcctggccggg

SEQ ID NO: 65435 - DNA, 120 bp, Artificial Sequence
  ENSG00000074621_50 (sequence is synthesized)
atgacctagttatgcttgagcaggcattgggctccaggcctctggccgctccagaagggcacttgactgtaaggatgaaatcctgtctctgagctgcactcagtgtgaagtgccaccacc

SEQ ID NO: 65436 - DNA, 120 bp, Artificial Sequence
  ENSG00000074621_51 (sequence is synthesized)
tggaagctgtgaaatgtttcagcatggtgctattcactaatggtgtgaactcaaaagattctacagacttcagattctgaagcttgttgaaaaagctaagttcctcaatatggatgaaaa

SEQ ID NO: 65437 - DNA, 120 bp, Artificial Sequence
  ENSG00000074621_52 (sequence is synthesized)
tctatctggctgtacttttagaggggaatttttctacttttgaaaaaaattctgaatatttatatatagtattaacagaataccccagtaagtcatatttcagataaatattctatagta

SEQ ID NO: 65438 - DNA, 120 bp, Artificial Sequence
  ENSG00000074621_53 (sequence is synthesized)
taatttgcatcatacccaatattttagatattaaaataagggtaaaatttggaatataatcacttgtctgcatatttcccaatgtaagttttcatgtagaatattaaaatttaaattgat

SEQ ID NO: 65439 - DNA, 120 bp, Artificial Sequence
  ENSG00000074621_54 (sequence is synthesized)
ggctaacgcacgagaatcttggggggaaaaaccccaaaactgtaattcctggctgaggtatgctttgtatatccttcttagctgacctgagcccaatttacctcaagacttggcctcttg

SEQ ID NO: 65440 - DNA, 120 bp, Artificial Sequence
  ENSG00000074621_55 (sequence is synthesized)
gtctcctcagcccaaatgctcactttatttcccctatcccctctttgagggaagcagagggccctcgttcctctcaccctggacaaggcatgcgtgctcagatttccctgtaaggcaaca

SEQ ID NO: 65441 - DNA, 120 bp, Artificial Sequence
  ENSG00000074621_56 (sequence is synthesized)
tgggctcttgcctgccactctggccacctggtgtctccattgtagtctgtgcctcagtgaggtccttaagagggcaagaggtgactttctttctaaccatgtagggagccagggaatccc

SEQ ID NO: 65442 - DNA, 120 bp, Artificial Sequence
  ENSG00000074621_57 (sequence is synthesized)
agctagagataggcttagatggatgccagcaggcccctgggtagttacggttcaaagaacaatgtggaaccacataggttacaaagtgagtacagaaaggcctctagaaggcctcaggca

SEQ ID NO: 65443 - DNA, 120 bp, Artificial Sequence
  ENSG00000074621_58 (sequence is synthesized)
tttgcctttttcttttagctgataggatggggcgagattaggagatgggacgaggaaggaggatgctttgaactgaacagacaaatctgtctgacttctcacagcttgttatgtgggaga

SEQ ID NO: 65444 - DNA, 120 bp, Artificial Sequence
  ENSG00000074621_59 (sequence is synthesized)
ttgtggggccagttgcttgtagttttttcctgtccctgggaatatccctgccagcactggggccagggccctgcagactgccctatttgcttcaaaacttctttccccaacctggctgat

SEQ ID NO: 65445 - DNA, 120 bp, Artificial Sequence
  ENSG00000074621_60 (sequence is synthesized)
tcatacctcatggtgtggtgggctcaccaggtgagtgaacagcaggaacgaaatcctctaccagcaggtcccaacgacactttccttcaggatcaatctccggtactcagggaatctcga

SEQ ID NO: 65446 - DNA, 120 bp, Artificial Sequence
  ENSG00000074621_61 (sequence is synthesized)
ggatcaagtgaattcgtgcagtttctatgttgtttgtaaaggcttaaaagtagactttttattccagtgaacgcagtgcttctcaagtgtggcttttctgtcatatcctgtagcatggca

SEQ ID NO: 65447 - DNA, 120 bp, Artificial Sequence
  ENSG00000074621_62 (sequence is synthesized)
tagaaggccttggaatcctgcctgattccagctgaacttggcttattagccttatttcctgctttctctgccatgtacccatccctctcacctggtgaaatcctacgcattctgagagcc

SEQ ID NO: 65448 - DNA, 120 bp, Artificial Sequence
  ENSG00000074621_63 (sequence is synthesized)
agcttttttcgcctgctctctggcattcaattagtcttcctctgagtacctatagtgtttctgttctgcctggaatactgaactgtaataattgtttactagctttcctctctaaaaggc

SEQ ID NO: 65449 - DNA, 120 bp, Artificial Sequence
  ENSG00000074621_64 (sequence is synthesized)
cgagattagggtctatgtcatcctgctcatacttcacctccagcctcttagttcctggcacacagcaagtgtccacattcctggaaatagaaatgctgacatgaacagctctttggaagg

SEQ ID NO: 65450 - DNA, 120 bp, Artificial Sequence
  ENSG00000074621_65 (sequence is synthesized)
gcagttcttgtggggaggtaggggtgttaagagttggaatgacagtgagcagcagatctggtgtaggtaacttttagtccaattgtgaaaagaagagcaacatggtccctgtggccagga

SEQ ID NO: 65451 - DNA, 120 bp, Artificial Sequence
  ENSG00000074621_66 (sequence is synthesized)
gcaggagtcttgcttgctcttcctctctgtggccatctcagctgtcggtccccctatcacccttcctcactcaggctgagggggtgtggctgagctccttagaaggcagtctgtttgcac

SEQ ID NO: 65452 - DNA, 120 bp, Artificial Sequence
  ENSG00000074621_67 (sequence is synthesized)
tgagtggcaatgtaactttctaaggggtgttaagtatgactggaaaacactgcattggctctgttcactggttttctgctttattcattatacatagaataaaagggcatttatattgtt

SEQ ID NO: 65453 - DNA, 120 bp, Artificial Sequence
  ENSG00000074621_68 (sequence is synthesized)
gaaagtaagctacaaagataatatagtccaaggatggcaaaaacatctccctgcaattatttctccattccatgtctatcacagacattaccaatcaatcatggtacttttctacaaagt

SEQ ID NO: 65454 - DNA, 120 bp, Artificial Sequence
  ENSG00000074621_69 (sequence is synthesized)
ttgggtcagagtccttctcaattcagtacccaagcaggccatcacttgagcttgtaaaggaaataaatcctatttcttggtcctgagtccaaccatgtcattttaccagagaggaaatag

SEQ ID NO: 65455 - DNA, 120 bp, Artificial Sequence
  ENSG00000074621_70 (sequence is synthesized)
gccttgagaagggaaatgacttaccctaaggtcacagccagtcagtgacaatgcagagaatgtaagacagaactttgggaattaggcaccacaactaggcctcgtaggatcagaatccag

SEQ ID NO: 65456 - DNA, 120 bp, Artificial Sequence
  ENSG00000074621_71 (sequence is synthesized)
tgatcctacaattccaggtaagatgtatgtcctgtctcatttgcagttcgccttgccaaggagaaggaggaggagagcttgaatcaaggggccagagcccaaccccaggccaaagcagaa

SEQ ID NO: 65457 - DNA, 120 bp, Artificial Sequence
  ENSG00000074621_72 (sequence is synthesized)
tcctctcagtccgtctgtattatggactagatgatctccagggttccttctaactcggaccctctgggatgccgggcatcatcactgtggggtgcttcccagttcgccttgccaaggaga

SEQ ID NO: 65458 - DNA, 90 bp, Artificial Sequence
  ENSG00000074621_73 (sequence is synthesized)
ctcgaaaaggcctgggagacatggctgtgtcaagctctgtgggcagtaacatatttgatatcactgtgggagtttgggtgatctcggcac

SEQ ID NO: 65459 - DNA, 120 bp, Artificial Sequence
  ENSG00000074657_0 (sequence is synthesized)
tctcgcccttgcacgggtcacgattatacaccttcgtgacctttagcgggcttacatatgtatctttttgtgttccgcaggctatgaccacctgctgtatgtacaatatgtgcttgttac

SEQ ID NO: 65460 - DNA, 120 bp, Artificial Sequence
  ENSG00000074657_1 (sequence is synthesized)
atttgtacaccatctcccttctagaatttaaagacctagctattacatcttgtttactcaatatcattcccccattaaggaaaaaaaaaaacctacatgaactgaacatgccatgtttca

SEQ ID NO: 65461 - DNA, 120 bp, Artificial Sequence
  ENSG00000074657_2 (sequence is synthesized)
atctggccccagtggctttttctctgaaagcaaacgtgtgtcttttacaccagggctttctccccaccccagggggtgtcttccatccttttgtggctcagttgaaggcgaaaagggctc

SEQ ID NO: 65462 - DNA, 120 bp, Artificial Sequence
  ENSG00000074657_3 (sequence is synthesized)
caaaccactaactaaccagaggagagccccttcttccacctccagggagaatttcagatttaatttgtccgaagatagcgtgctctcttcttactcatttgccatcattacgaggaaaac

SEQ ID NO: 65463 - DNA, 120 bp, Artificial Sequence
  ENSG00000074657_4 (sequence is synthesized)
aaaccaccaccttggcttcaagatcctgggtagaggctcacggtcttttcaaccatctttggcgaggccttgcttccttccactcgaggtatgttctgtcttgtgctttttcttttagaa

SEQ ID NO: 65464 - DNA, 120 bp, Artificial Sequence
  ENSG00000074657_5 (sequence is synthesized)
gctactaaagggtgttggggatgcttctgactattatgaaggccaaaaggcctgttgactggggctgcttttaaccctttcctatttgctgagaatgcagccgtgtgacagtaactgaac

SEQ ID NO: 65465 - DNA, 120 bp, Artificial Sequence
  ENSG00000074657_6 (sequence is synthesized)
attggtctaaagtctttccaaaaggtcaaggttcacaagaacatctgctcaaattaatgaccatgggggatatgaagaccccagactttgatgacctcctggcagcatttgacatcccag

SEQ ID NO: 65466 - DNA, 120 bp, Artificial Sequence
  ENSG00000074657_7 (sequence is synthesized)
atatggtcgatcctaaagcagctattgagtctggacacgatgaccatgaaagccacatgaagcagaatgctcacggagaggatgactcccacgcaccatcatcttctgatgtgggtgtca

SEQ ID NO: 65467 - DNA, 120 bp, Artificial Sequence
  ENSG00000074657_8 (sequence is synthesized)
gcgttatcgtcaagaatgttcggaacattgactcttccgagggcggggagaaagacggccacaaccccactggcaatggcttacataatgggtttctcacagcatcctcccttgacagtt

SEQ ID NO: 65468 - DNA, 120 bp, Artificial Sequence
  ENSG00000074657_9 (sequence is synthesized)
acagtaaagatggagcaaagtccttgaaaggagatgtgcctgcctctgaggtgacactgaaagactcgacattcagccagtttagcccgatctccagtgctgaagagtttgatgacgacg

SEQ ID NO: 65469 - DNA, 120 bp, Artificial Sequence
  ENSG00000074657_10 (sequence is synthesized)
agaagattgaggtggatgacccccctgacaaggaggacatgcgatcaagcttcaggtcgaatgtgttgacggggtcggctccccagcaggactacgataagctgaaggcactcggagggg

SEQ ID NO: 65470 - DNA, 120 bp, Artificial Sequence
  ENSG00000074657_11 (sequence is synthesized)
aaaactccagcaaaactggactctctacgtcaggcaatgtggagaaaaacaaagctgttaagagagaaacagaagccagttctataaacctgagtgtttatgaaccttttaaagtcagaa

SEQ ID NO: 65471 - DNA, 120 bp, Artificial Sequence
  ENSG00000074657_12 (sequence is synthesized)
aagcagaggataaattgaaggaaagctctgacaaggtgctggaaaacagagtcctagatgggaagctgagctccgagaagaatgacaccagcctccccagcgttgcgccatcaaagacaa

SEQ ID NO: 65472 - DNA, 120 bp, Artificial Sequence
  ENSG00000074657_13 (sequence is synthesized)
agtcgtcctccaagctctcgtcctgcatcgctgccatcgcggctctcagcgctaaaaaggcggcttcagactcctgcaaagaaccagtggccaattcgagggaatcctccccgttaccaa

SEQ ID NO: 65473 - DNA, 120 bp, Artificial Sequence
  ENSG00000074657_14 (sequence is synthesized)
aagaagtaaatgacagtccgagagccgctgacaagtctcctgaatcccagaatctcatcgacgggaccaaaaaaccatccctgaagcaaccggatagtcccagaagcatctcaagtgaga

SEQ ID NO: 65474 - DNA, 120 bp, Artificial Sequence
  ENSG00000074657_15 (sequence is synthesized)
acagcagcaaaggatccccgtcctctcccgcagggtccacaccagcaatccccaaagtccgcataaaaaccattaagacatcttctggggaaatcaagagaacagtgaccagggtattgc

SEQ ID NO: 65475 - DNA, 120 bp, Artificial Sequence
  ENSG00000074657_16 (sequence is synthesized)
cagaagtggatcttgactctggaaagaaaccttccgagcagacagcgtccgtgatggcctctgtgacatcccttctgtcgtctccagcatcagccgccgtcctttcctctccccccaggg

SEQ ID NO: 65476 - DNA, 120 bp, Artificial Sequence
  ENSG00000074657_17 (sequence is synthesized)
cgcctctccagtctgcggtcgtgaccaatgcagtttcccctgcagagctcacccccaaacaggtcacaatcaagcctgtggctactgctttcctcccagtgtctgctgtgaagacggcag

SEQ ID NO: 65477 - DNA, 120 bp, Artificial Sequence
  ENSG00000074657_18 (sequence is synthesized)
gatcccaagtcattaatttgaagctcgctaacaacaccacggtgaaagccacggtcatatctgctgcctctgtccagagtgccagcagcgccatcattaaagctgccaacgccatccagc

SEQ ID NO: 65478 - DNA, 120 bp, Artificial Sequence
  ENSG00000074657_19 (sequence is synthesized)
agcaaactgtcgtggtgccggcatccagcctggccaatgccaaactcgtgccaaagactgtgcaccttgccaaccttaaccttttgcctcagggtgcccaggccacctctgaactccgcc

SEQ ID NO: 65479 - DNA, 120 bp, Artificial Sequence
  ENSG00000074657_20 (sequence is synthesized)
aagtgctaaccaaacctcagcaacaaataaagcaggcaataatcaatgcagcagcctcgcaaccccccaaaaaggtgtctcgagtccaggtggtgtcgtccttgcagagttctgtggtgg

SEQ ID NO: 65480 - DNA, 120 bp, Artificial Sequence
  ENSG00000074657_21 (sequence is synthesized)
aagctttcaacaaggtgctgagcagtgtcaatccagtccctgtttacatcccaaacctcagtcctcccgccaatgcagggatcacgttaccgacgcgtgggtacaagtgcttggagtgtg

SEQ ID NO: 65481 - DNA, 120 bp, Artificial Sequence
  ENSG00000074657_22 (sequence is synthesized)
gggactcctttgcacttgaaaagagtctgacccagcactacgacagacggagcgtgcgcatcgaagtaacgtgcaaccattgtacaaagaacctcgttttttacaacaaatgcagcctcc

SEQ ID NO: 65482 - DNA, 120 bp, Artificial Sequence
  ENSG00000074657_23 (sequence is synthesized)
tttcccatgcccgtgggcataaggagaaaggggtggtaatgcaatgctcccacttaattttaaagccagtcccagcagatcaaatgatagtttctccgtcaagcaatacttccacttcaa

SEQ ID NO: 65483 - DNA, 120 bp, Artificial Sequence
  ENSG00000074657_24 (sequence is synthesized)
cttccactcttcagagccctgtgggagctggcacacacactgtcacaaaaattcagtctggcataactgggacagtcatatcggctccttcaagcactcccatcaccccagccatgcccc

SEQ ID NO: 65484 - DNA, 120 bp, Artificial Sequence
  ENSG00000074657_25 (sequence is synthesized)
tagatgaagacccctccaaactgtgtagacatagtctaaaatgtttggagtgtaatgaagtcttccaggacgagacatcactggctacacatttccagcaggctgcagatacgagtggac

SEQ ID NO: 65485 - DNA, 120 bp, Artificial Sequence
  ENSG00000074657_26 (sequence is synthesized)
aaaagacttgcactatctgccagatgctgcttcctaaccagtgcagttatgcatcacaccagagaatccatcagcacaaatctccctacacctgccctgagtgtggggccatctgcaggt

SEQ ID NO: 65486 - DNA, 120 bp, Artificial Sequence
  ENSG00000074657_27 (sequence is synthesized)
tggctgctctgaagtctcacattcaaggttctcactgtgaagtcttctacaagtgtcctatttgtccaatggcgtttaagtctgccccaagcacacattcccacgcctacacacagcatc

SEQ ID NO: 65487 - DNA, 120 bp, Artificial Sequence
  ENSG00000074657_28 (sequence is synthesized)
ctggcatcaagataggagaaccaaaaataatatataagtgttccatgtgcgacactgtgttcaccctgcaaaccttgctgtatcgccactttgaccaacacattgaaaaccagaaggtgt

SEQ ID NO: 65488 - DNA, 120 bp, Artificial Sequence
  ENSG00000074657_29 (sequence is synthesized)
ctgttttcaagtgtccagactgttctcttttatatgcacagaagcaacttatgatggaccatatcaagtctatgcatggaacattgaaaagtattgaagggcctccaaacttgggtataa

SEQ ID NO: 65489 - DNA, 120 bp, Artificial Sequence
  ENSG00000074657_30 (sequence is synthesized)
acttgcctttgagcattaagcctgcaactcaaaattcagcaaatcagaacaaagaggacaccaaatccatgaatgggaaagagaaattggaaaagaaatctccatctcctgtgaaaaaat

SEQ ID NO: 65490 - DNA, 120 bp, Artificial Sequence
  ENSG00000074657_31 (sequence is synthesized)
caatggaaaccaagaaagtggccagtcctgggtggacgtgttgggagtgtgactgcctgttcatgcagagagatgtgtacatatcccacgtgaggaaggagcacgggaagcaaatgaaga

SEQ ID NO: 65491 - DNA, 120 bp, Artificial Sequence
  ENSG00000074657_32 (sequence is synthesized)
aacacccctgccgccagtgtgacaagtctttcagctcgtcccacagcctgtgccggcacaaccggatcaagcacaaaggcatcaggaaagtgtacgcctgctcgcactgcccagactcca

SEQ ID NO: 65492 - DNA, 120 bp, Artificial Sequence
  ENSG00000074657_33 (sequence is synthesized)
gacgtacctttaccaaacgtttgatgctggagaagcacgtccagctgatgcatggcatcaaggaccctgacctgaaagaaatgacagatgccaccaatgaggaggaaacagaaataaaag

SEQ ID NO: 65493 - DNA, 120 bp, Artificial Sequence
  ENSG00000074657_34 (sequence is synthesized)
aagacactaaggtccccagtcccaagcggaagttggaagaaccagttctggagttcaggcctccccgaggagcaatcactcaaccactgaaaaagctgaaaatcaatgtttttaaggttc

SEQ ID NO: 65494 - DNA, 120 bp, Artificial Sequence
  ENSG00000074657_35 (sequence is synthesized)
acaagtgtgccgtgtgtggcttcaccaccgaaaacctgctgcaattccacgaacacatccctcagcacaaatcggatggttcttcctaccagtgccgggagtgtggcctctgctacacgt

SEQ ID NO: 65495 - DNA, 120 bp, Artificial Sequence
  ENSG00000074657_36 (sequence is synthesized)
ctcacgtctctctgtccaggcacctcttcatcgtacacaagttaaaggaacctcagccagtgtccaagcaaaatggggctggggaagataaccaacaggagaacaaacccagccacgagg

SEQ ID NO: 65496 - DNA, 120 bp, Artificial Sequence
  ENSG00000074657_37 (sequence is synthesized)
atgaatcccctgatggcgccgtgtcagacagaaagtgcaaagtgtgcgcaaaaacttttgaaactgaagctgccttaaatactcacatgcggacacacggcatggccttcatcaaatcca

SEQ ID NO: 65497 - DNA, 120 bp, Artificial Sequence
  ENSG00000074657_38 (sequence is synthesized)
aaaggatgagctcagccgagaaatagccacagatgctccatgaggaaaatccctgtccacattggaataaaaaagacatttttgttacaaagtttgcagtataatagagttaacagtact

SEQ ID NO: 65498 - DNA, 120 bp, Artificial Sequence
  ENSG00000074657_39 (sequence is synthesized)
gtctaggctgttgcaatatattctctttcaatgtaccttccttcacctcgtcgtatatatcctcgataagtattaaaacagtatttgagtttaaaagagtttgtatatatttaaatgaat

SEQ ID NO: 65499 - DNA, 120 bp, Artificial Sequence
  ENSG00000074657_40 (sequence is synthesized)
aactttttatactctttgttacatgtttgtatcagtatttagtggaaaaccatttgagttgttttgggttagaatttttctttttgtactgtttctttaaaacagagttcttagtaacag

SEQ ID NO: 65500 - DNA, 120 bp, Artificial Sequence
  ENSG00000074657_41 (sequence is synthesized)
gggcagttcctgaattcaaataaaccattttgtatgtttggattttgaatgggttaactaattacaggctaaaataatgccttttttagtgtttttaatttttagaattcactacataaa

SEQ ID NO: 65501 - DNA, 120 bp, Artificial Sequence
  ENSG00000074657_42 (sequence is synthesized)
ttgtaagtaattgtgggtctcaaaaacactaggaacttttaagtgtcttagcacttcctcgatgtgcctgccctgagggagtgagttcacatttgagacaactgcactccagtgtggacg

SEQ ID NO: 65502 - DNA, 120 bp, Artificial Sequence
  ENSG00000074657_43 (sequence is synthesized)
tgcctttgtcttcaggccatgccgaagggtgtttaaagcagtcttgcaggtcgctcctttcccagccgtggataaaaactgaagctaggaatctaataaggaatgctgatttcctcagtt

SEQ ID NO: 65503 - DNA, 120 bp, Artificial Sequence
  ENSG00000074657_44 (sequence is synthesized)
ccattttgaggaatggggaaggctattctaaagaaaaaaatgggatttgttttctcggcagatctgcaaggctggctttaagagcacaaggagggaaagtaacgaaagggctggactact

SEQ ID NO: 65504 - DNA, 120 bp, Artificial Sequence
  ENSG00000074657_45 (sequence is synthesized)
ataaaagttacaaatacgtagttagaccaatagatttatatagtcaggtttttgtcatgtaatttattaactaactattacagaaacacagctaagaatatcaagtatttctctggctct

SEQ ID NO: 65505 - DNA, 120 bp, Artificial Sequence
  ENSG00000074657_46 (sequence is synthesized)
tgacagaaaaaaatcagttgacttaaccctttgctgtcaaaagagttggcgtttcctgttctgggtgctactgccaaacgttatggtacttagagtcgggatgcacaacttcaaccaccg

SEQ ID NO: 65506 - DNA, 120 bp, Artificial Sequence
  ENSG00000074657_47 (sequence is synthesized)
acttatcaatgcagccgcctgtgtattgcaattggccgttaccttaagcactgagccacccgggtttagttcagccatttcaagaagtatatttaacgtcggtagttctgctttattaaa

SEQ ID NO: 65507 - DNA, 120 bp, Artificial Sequence
  ENSG00000074657_48 (sequence is synthesized)
atgcagcagaggtactcttctgtcccttccgtttatagttctctgagagagttctattttttggttttgttttgtgttttcttttgcattttgtatcttgtatttatccctgaacatgtt

SEQ ID NO: 65508 - DNA, 120 bp, Artificial Sequence
  ENSG00000074657_49 (sequence is synthesized)
ttgtaccttttttttttttttttttaagaaaaggaattcttttgtgtatatatagatacttgcatgatatactgtagtcaatgttcggttcctcaaaaggtcttgctgctgtcaggtgtt

SEQ ID NO: 65509 - DNA, 120 bp, Artificial Sequence
  ENSG00000074657_50 (sequence is synthesized)
atgcactccatccatcataactgtatgaaacacatttcatatgtaaataaacgtgggacatttggcccttgtgcttctgtgagagaattattgatggtgggtctctgacatctttgtgaa

SEQ ID NO: 65510 - DNA, 120 bp, Artificial Sequence
  ENSG00000074657_51 (sequence is synthesized)
gtttgggaagtaattaattgcagcgacaagctacagggtgttgcagaattcttcccactcagaagaatggcatattcgttctcattagtaatcagctattttgtcactttcttgttgact

SEQ ID NO: 65511 - DNA, 120 bp, Artificial Sequence
  ENSG00000074657_52 (sequence is synthesized)
ccatcagtacatgggtacaatccgagggtgtgaatttcagcttgaaattccattgctgttccttgttttgtttgtattgctctaagttgtattcataatagcactttcatatgtttctgc

SEQ ID NO: 65512 - DNA, 120 bp, Artificial Sequence
  ENSG00000074657_53 (sequence is synthesized)
atttgaaccttgcaataagcctgtgtggtaggccacataggtccgaataacctagttttacagttgagggagctgagctcagattcagttctttgccgaagccctcatagctggtaagtg

SEQ ID NO: 65513 - DNA, 120 bp, Artificial Sequence
  ENSG00000074657_54 (sequence is synthesized)
gctttgcatattagaacccaaatattttgctctctaaatctaatgctcgctctatgtggttatgtacatattgacaaatattcatttattcaacaaataaaaagtatgtacaaaacatga

SEQ ID NO: 65514 - DNA, 120 bp, Artificial Sequence
  ENSG00000074657_55 (sequence is synthesized)
acagatgcgtttccagaggcctccgtgccccctctcccactggccctgccttcgccccccgccccctccccagacagccccagttttcttcccccgaggtgaagggatttggacttctcc

SEQ ID NO: 65515 - DNA, 120 bp, Artificial Sequence
  ENSG00000074657_56 (sequence is synthesized)
cttgcgaggtgagcatttccaaggctgtgtgctcgtggggtggggggacacacgatgaccttctcctcctcaggaagacctaagagggaagagcaaaccccagcgagatcccccctgtgc

SEQ ID NO: 65516 - DNA, 120 bp, Artificial Sequence
  ENSG00000074657_57 (sequence is synthesized)
tgatgattttcagggacttgttggcaactcagcgagggttgccatagcttttttatgtagggtgaccagaaccggctgaaactggtttgaggcagatcagctcctgaacacaatgcagtc

SEQ ID NO: 65517 - DNA, 120 bp, Artificial Sequence
  ENSG00000074657_58 (sequence is synthesized)
actgagctactacagtaggatagcagcttcctcccttcatggcagccaaaagcagaggagcttgcaggaaggtaccatccctacacagtatgtgaatgcacacttagacaccacacagca

SEQ ID NO: 65518 - DNA, 120 bp, Artificial Sequence
  ENSG00000074657_59 (sequence is synthesized)
ctggtacgtgactaatggagccctaaaagattctgggtagagaagatggaaaaaaaggtgcaggtttgcagggtctgagattacttgggcttttcctgcctttttcttttgcttaaggga

SEQ ID NO: 65519 - DNA, 120 bp, Artificial Sequence
  ENSG00000074657_60 (sequence is synthesized)
tggacaaggagctgagatttatgacccttattagagaaaaaaatgtgccttgctagggtggggacacttggttgatgcagtctctctctctctttctcggtgtttataacaaaacaaaac

SEQ ID NO: 65520 - DNA, 120 bp, Artificial Sequence
  ENSG00000074657_61 (sequence is synthesized)
gttgtagagaggcctccctctgggatgttacaggaagataaagtaccaggattaatttgtgttcaatacagaggtctttctttaaagaattttaaaatgtctatgcatggaacattgaaa

SEQ ID NO: 65521 - DNA, 120 bp, Artificial Sequence
  ENSG00000074657_62 (sequence is synthesized)
ctcccttcatggcagccaaaagcagaggagcttgcaggaaggtaccatccctacacagtatgtgaatgcacacttagacaccacacagcactgaacatctgctcaaattaatgaccatgg

SEQ ID NO: 65522 - DNA, 120 bp, Artificial Sequence
  ENSG00000074657_63 (sequence is synthesized)
ctttccaaaaggtcaaggttcacaaggcacttcaagtaagtgcagcagtttttatctggccaatctactgtgacccagtcaagccaccacccatgtctgggctgggaaggtggggaaaga

SEQ ID NO: 65523 - DNA, 120 bp, Artificial Sequence
  ENSG00000074657_64 (sequence is synthesized)
ggctgctgcacatgcttgggatgtcttcagccatatgcatctgtccatctgttcatccacccatccgtctgtccatccgcccactcagctatctgtttatcaagaacatctgctcaaatt

SEQ ID NO: 65524 - DNA, 120 bp, Artificial Sequence
  ENSG00000074657_65 (sequence is synthesized)
gacgcatcccgtgtgagcagacacacatagctcgctttcttgggggctctttgtcagccaccaacacagagagcacacactgacacacacgtacacaaagatctgagccaggttgtggga

SEQ ID NO: 65525 - DNA, 120 bp, Artificial Sequence
  ENSG00000074657_66 (sequence is synthesized)
acacagaccccggcagcgggaacgcagatgacacgcccgtaacatggaagccgccgccgccgccgctccgacgacagcagcagcagccacagcagcagccgccggcggcgccgcgctgaa

SEQ ID NO: 65526 - DNA, 120 bp, Artificial Sequence
  ENSG00000074657_67 (sequence is synthesized)
attaggcatgccttactacaaagtctcttatttaatctaaatgtagggatataatagatttttatccttttaaaactcatcttttagctatggcgactttgacttcctgccaaaatcctg

SEQ ID NO: 65527 - DNA, 120 bp, Artificial Sequence
  ENSG00000074657_68 (sequence is synthesized)
tgtgtgctccacagttcctacattacatttctcaattgtattattgttttggcatagagtttttggattgggttgtcacacttaaatatgaaaataaaaaaaaaaggagcattttcttgc

SEQ ID NO: 65528 - DNA, 74 bp, Artificial Sequence
  ENSG00000074657_69 (sequence is synthesized)
cttaaatatgaaaataaaaaaaaaaggagcattttcttgcatatcccacatacattgtgtgttttttttttccc

SEQ ID NO: 65529 - DNA, 87 bp, Artificial Sequence
  ENSG00000074657_70 (sequence is synthesized)
caaactcctgaccttgggtgacccacctgctactggcacccagcctgatccctgagtgtcttgggggagcgattgattggcagtaca

SEQ ID NO: 65530 - DNA, 120 bp, Artificial Sequence
  ENSG00000074657_71 (sequence is synthesized)
atccctgagtgtcttgggggagcgattgattggcagtacagggtctctctgcacatgtcgagttggccacattggcgaggtgatttggctagcttgtttactcagggctggtcacagatt

SEQ ID NO: 65531 - DNA, 120 bp, Artificial Sequence
  ENSG00000074657_72 (sequence is synthesized)
cagtcctcggctgggccctttgccccttggctgcagtcaccactgaaggtggggcagcctgtgaccaaatgcaagggactgggtgggccaacatcaacccagactccagtggacagtcat

SEQ ID NO: 65532 - DNA, 120 bp, Artificial Sequence
  ENSG00000074657_73 (sequence is synthesized)
aagctgctgcttcatacgtgaacaccagaacgtatctcatcattagtgaaaggctgtcactcagctggaatatacctggagtgggttgataagaagaaagcatgtctcatgagagagaga

SEQ ID NO: 65533 - DNA, 120 bp, Artificial Sequence
  ENSG00000074657_74 (sequence is synthesized)
gagacaaaggaccctgaggctaaagcactgaaatgttacatggatgtcagtgcaggccagatggaccctatggatcaggagacttatgaaggttggctgtcagattcgcagggggttatg

SEQ ID NO: 65534 - DNA, 120 bp, Artificial Sequence
  ENSG00000074657_75 (sequence is synthesized)
ataaccgggtaggaatcatctgattcagtgaaattgaagctgtttagtgagataagaatgattatgaataaagtatgtgttgagaccaaatcaaaagaatcagaatttagaaggatgctc

SEQ ID NO: 65535 - DNA, 120 bp, Artificial Sequence
  ENSG00000074657_76 (sequence is synthesized)
tgggccaagaagacgatgggagatctggcccataatgcttcactgataggttttgtttatttccccatgaactcactgtaaagcagtaaaatgctgggattgttctgctaacttacggcc

SEQ ID NO: 65536 - DNA, 120 bp, Artificial Sequence
  ENSG00000074657_77 (sequence is synthesized)
aacaaaaaattcatcctcatggagagccctcgtcctttgggggtggtgctggctcctgccactgccctgcaagtgtctctaatgtgaggtcatcagggtttagggccaatcagtatgaat

SEQ ID NO: 65537 - DNA, 120 bp, Artificial Sequence
  ENSG00000074657_78 (sequence is synthesized)
tcctccgaagctattttgaaggcagatttgagaccacaagagactttttgtccttccctcagtagcattcttgatacctggttttatagcatacataataactagggccattacctcttt

SEQ ID NO: 65538 - DNA, 76 bp, Artificial Sequence
  ENSG00000074657_79 (sequence is synthesized)
gttttatagcatacataataactagggccattacctcttttttttctttttttgagacggagttttgctctaccct

SEQ ID NO: 65539 - DNA, 120 bp, Artificial Sequence
  ENSG00000074657_80 (sequence is synthesized)
tacaggcgtgaaccactgcacctggccagcctgttttctaaactatctttggcctgctttattaaaataagtttttctttgaaaaataattgacctatttttgatctgcttatcatctac

SEQ ID NO: 65540 - DNA, 120 bp, Artificial Sequence
  ENSG00000074657_81 (sequence is synthesized)
acctatttttgatctgcttatcatctactgagtgaccatacacactcgactgccatgagtataaacatgcatgctgcttttgtgcctggaagaatttggcgctggacactcatgtctttg

SEQ ID NO: 65541 - DNA, 120 bp, Artificial Sequence
  ENSG00000074657_82 (sequence is synthesized)
tcaaggcagaggacagggataattaacagcagcacaaaggagtcaaggagggaccttatactaatgtgttcagcatggtgctcattctgagagaatactgagtcattgtgaaaacttctt

SEQ ID NO: 65542 - DNA, 120 bp, Artificial Sequence
  ENSG00000074657_83 (sequence is synthesized)
ttgaaatgcaatattttccctttaaaattaaagccatctagacctgtaaattaagggccactcctagcaaaattgctgattgcgtgttgaaccatggtgtgaactcagcttattggacct

SEQ ID NO: 65543 - DNA, 120 bp, Artificial Sequence
  ENSG00000074657_84 (sequence is synthesized)
gtctgtgtgaactgacggctaaggaggaccttcgaccgtgagttcttccacaggagcttattttgtcagcaagtgcgttatctccttgcctttcaccccacaggcactgcccagactcca

SEQ ID NO: 65544 - DNA, 120 bp, Artificial Sequence
  ENSG00000074657_85 (sequence is synthesized)
agcttcctcccttcatggcagccaaaagcagaggagcttgcaggaaggtaccatccctacacagtatgtgaatgcacacttagacaccacacagcactgggtatgttctgtcttgtgctt

SEQ ID NO: 65545 - DNA, 120 bp, Artificial Sequence
  ENSG00000074657_86 (sequence is synthesized)
ccctccaaactgtgtagacatagtctaaaatgtttggagtgtaatgaagtcttccaggacgagacatcactggctacacatttccagcaggctgcagatacgagtggacaacaaatgaag

SEQ ID NO: 65546 - DNA, 71 bp, Artificial Sequence
  ENSG00000074657_87 (sequence is synthesized)
tgagagcagccttgacaatatggaacactgtctgctttttagattttctttccattttctaccgttctaaa

SEQ ID NO: 65547 - DNA, 120 bp, Artificial Sequence
  ENSG00000074657_88 (sequence is synthesized)
ctgctttttagattttctttccattttctaccgttctaaagtagtgcaatcacattactttagataaaagagaagcagcaggggaggggactcacctctactctgacatgccgtggtcat

SEQ ID NO: 65548 - DNA, 120 bp, Artificial Sequence
  ENSG00000074657_89 (sequence is synthesized)
gtgaagtcttctacaagtgtcctatttgtccaatggcgtttaagtctgccccaagcacacattcccacgcctacacacagcatcctggcatcaagataggagaaccaaagtaaagacctt

SEQ ID NO: 65549 - DNA, 120 bp, Artificial Sequence
  ENSG00000074657_90 (sequence is synthesized)
aagaccttgtccaaaaacgttacctattatttatgctcttgtcacgaatttttgctcaacaagtaaatatttatatttttttcttaagatgaatttttttttttttttgagacaagagtc

SEQ ID NO: 65550 - DNA, 120 bp, Artificial Sequence
  ENSG00000074657_91 (sequence is synthesized)
cctcttaagatgatttttgacaactcctaggaaaactattttttagaaaccctgtcatctttaaatttttccatagttccttttttatagggtacacttttgcttaaaaagtaatatttt

SEQ ID NO: 65551 - DNA, 120 bp, Artificial Sequence
  ENSG00000074657_92 (sequence is synthesized)
taagatgaaggcaacttaagacactggttactgaatttaacttcatagccagtataagtccctgattagtaaatttttttttgccttaatcttgctcttaatttgattgatttttgcttt

SEQ ID NO: 65552 - DNA, 120 bp, Artificial Sequence
  ENSG00000074657_93 (sequence is synthesized)
gcacatactgtgattttacaggatagagaattgtacgctggacatgtaactttcaagttggcttttcccttgggcttagaatcaattactgtagtgtttgaaatgaaggatgtataatta

SEQ ID NO: 65553 - DNA, 76 bp, Artificial Sequence
  ENSG00000074657_94 (sequence is synthesized)
gatttgcctgccggtttgaacaaggacatgtttgtcaagcggttatgggaaaatgatttttaaaaatgtaatcagt

SEQ ID NO: 65554 - DNA, 120 bp, Artificial Sequence
  ENSG00000074660_0 (sequence is synthesized)
agacgaacccgagcgctcccaccgagctgcctgccatggggctggggctgctgctcccgctgctgctgctctggactcgggggactcaggggtccgagctggaccccaaagggcagcacg

SEQ ID NO: 65555 - DNA, 120 bp, Artificial Sequence
  ENSG00000074660_1 (sequence is synthesized)
tctgtgtggccagcagcccctctgctgagctgcagtgctgcgcaggctggaggcagaaggatcaagaatgcaccatccccatctgtgaggggccggacgcctgccagaaagacgaggtgt

SEQ ID NO: 65556 - DNA, 120 bp, Artificial Sequence
  ENSG00000074660_2 (sequence is synthesized)
gtgtgaagccgggcctctgtcgatgcaagcctggattctttggggcccactgcagctcccgctgcccgggccagtactggggccccgactgccgtgagagctgcccctgccacccgcacg

SEQ ID NO: 65557 - DNA, 120 bp, Artificial Sequence
  ENSG00000074660_3 (sequence is synthesized)
ccagtgccaggccgaccgctggggagcccgctgcgagttcccgtgcgcctgcggcccccacgggcgctgcgaccccgcgaccggcgtgtgccactgcgaacccggctggtggtcgtccac

SEQ ID NO: 65558 - DNA, 120 bp, Artificial Sequence
  ENSG00000074660_4 (sequence is synthesized)
cgtgtgccactgcgaacccggctggtggtcgtccacgtgccgccgcccgtgccagtgcaacaccgcggcggcgcgctgcgagcaggccacgggcgcctgcgtgtgcaagccgggctggtg

SEQ ID NO: 65559 - DNA, 120 bp, Artificial Sequence
  ENSG00000074660_5 (sequence is synthesized)
gctgcagcttccgctgcaactgccacggctccccgtgcgagcaggactccggccgctgcgcctgccggccgggctggtggggtcccgaatgccagcagcagtgcgagtgtgtgcggggcc

SEQ ID NO: 65560 - DNA, 120 bp, Artificial Sequence
  ENSG00000074660_6 (sequence is synthesized)
cagcgccgcctccggcgagtgcacctgcccgcccggcttccgcggagcgcgctgcgagctgccctgcccggcaggcagccacggggtgcagtgcgcacacagctgtggccgctgcaaaca

SEQ ID NO: 65561 - DNA, 120 bp, Artificial Sequence
  ENSG00000074660_7 (sequence is synthesized)
aacacaatgagccgtgctctccagacacaggcagctgtgagtcctgcgagccgggctggaacgggacccagtgccagcagccctgcctgcctggcacctttggcgagagctgcgaacagc

SEQ ID NO: 65562 - DNA, 120 bp, Artificial Sequence
  ENSG00000074660_8 (sequence is synthesized)
agtgccctcactgccgacatggggaggcctgtgagccagatactggccactgtcagcgctgtgaccctggctggctggggcccaggtgtgaagacccctgccccactggtacctttgggg

SEQ ID NO: 65563 - DNA, 120 bp, Artificial Sequence
  ENSG00000074660_9 (sequence is synthesized)
aagactgtggctctacctgccccacctgtgttcaggggtcctgtgatactgtgacaggggactgtgtctgcagtgccggctactgggggcccagctgcaacgcctcctgcccagccggtt

SEQ ID NO: 65564 - DNA, 120 bp, Artificial Sequence
  ENSG00000074660_10 (sequence is synthesized)
tccatggaaacaactgctcagttccttgtgaatgcccagagggactctgccaccctgtctctgggtcctgccagccaggctctggcagtcgggacactgccctcatcgcgggcagccttg

SEQ ID NO: 65565 - DNA, 120 bp, Artificial Sequence
  ENSG00000074660_11 (sequence is synthesized)
tgcctctgctgctgctcttcctgggccttgcctgctgtgcctgctgctgctgggccccccgatcagacctcaaggacaggccagcgagagatggagctaccgtgtccaggatgaagctgc

SEQ ID NO: 65566 - DNA, 120 bp, Artificial Sequence
  ENSG00000074660_12 (sequence is synthesized)
aggtctgggggacactgaccagcttgggctccacgctgccctgccgttccctcagctcccacaagctaccctgggtgacagtctcacatcacgacccggaggtccccttcaaccacagct

SEQ ID NO: 65567 - DNA, 120 bp, Artificial Sequence
  ENSG00000074660_13 (sequence is synthesized)
tcatcgagccgccctctgccggctgggccactgatgactccttctcatccgatcctgagtctggagaggcagatgaggttcctgcctactgtgtgccaccccaagaagggatggtccctg

SEQ ID NO: 65568 - DNA, 120 bp, Artificial Sequence
  ENSG00000074660_14 (sequence is synthesized)
acgccattcgccatcccgcgcacctccagcctagctcgggccaagcggccatcggtctccttcgcggaaggtaccaagtttgcaccacagagtcgccgaagctcaggggagctctccagc

SEQ ID NO: 65569 - DNA, 120 bp, Artificial Sequence
  ENSG00000074660_15 (sequence is synthesized)
ccgctccgaaagcccaagaggctctcccggggggcgcagtcgggtcctgagggccgggaagccgaagagtccacaggcccagaggaagcagaagcccccgagtcctttccggcggctgcc

SEQ ID NO: 65570 - DNA, 120 bp, Artificial Sequence
  ENSG00000074660_16 (sequence is synthesized)
agtcccggggattcagccactggccaccggcggcccccacttggtggccggacagtggctgagcacgtggaagccattgagggcagcgtccaggagagctcgggccctgtgaccacgatc

SEQ ID NO: 65571 - DNA, 120 bp, Artificial Sequence
  ENSG00000074660_17 (sequence is synthesized)
tacatgctggcagggaagccccgcggatccgaaggccctgtccgctctgtcttccgccattttggtagcttccagaaaggccaggcggaagccaaggtcaagagggccatccctaagcct

SEQ ID NO: 65572 - DNA, 120 bp, Artificial Sequence
  ENSG00000074660_18 (sequence is synthesized)
ccgcgccaggccctgaatcggaaaaagggcagccctggccttgcctctggctctgtcggccagagccccaactcagccccaaaagctgggcttcctggggccacagggcctatggcagtc

SEQ ID NO: 65573 - DNA, 120 bp, Artificial Sequence
  ENSG00000074660_19 (sequence is synthesized)
agaccagaggaagcggtccgggggctgggggctggcaccgagagttcaaggagagcccaggagccagtctctggctgtggctccccagaacaggatccccagaagcaggctgaagaggaa

SEQ ID NO: 65574 - DNA, 120 bp, Artificial Sequence
  ENSG00000074660_20 (sequence is synthesized)
aggcaggaggaacctgagtatgagaatgttgtacccatctccaggccaccagaaccctgatgaccttgaatttggggagtggggagagtggatggactagactgtgctgtgtgctggaaa

SEQ ID NO: 65575 - DNA, 120 bp, Artificial Sequence
  ENSG00000074660_21 (sequence is synthesized)
atgatcccggggccaggacagacaaaccagagcctctgcgcctccacagggaaaaggcaaggcttccaggccagttggcccaggcccctggcagtgctcccggaggggcccaggaaggcc

SEQ ID NO: 65576 - DNA, 120 bp, Artificial Sequence
  ENSG00000074660_22 (sequence is synthesized)
tgggcagagaccctgtaggatggggtcaggaagggttgcctgcagggacttttgctctgctgtcctggaccctgtgtgcctcataagggctattctttctttcacgtgcaaaacattttt

SEQ ID NO: 65577 - DNA, 120 bp, Artificial Sequence
  ENSG00000074660_23 (sequence is synthesized)
tcataagggctattctttctttcacgtgcaaaacatttttctgaaatagcaaacaacctacatgtttgctgataaaagattggctaaacaaatttttttttttttttttgagacagaatc

SEQ ID NO: 65578 - DNA, 120 bp, Artificial Sequence
  ENSG00000074660_24 (sequence is synthesized)
tttaaaaaggatgtatgtgtataaaaacagattcaagggaaaggcactaaatggttttttcctctggaagatgagattgtaggtgatatttattttcttctgaaacttttgtatagtttg

SEQ ID NO: 65579 - DNA, 120 bp, Artificial Sequence
  ENSG00000074660_25 (sequence is synthesized)
caaattttctacagtgaacattcttttttacttttgttactagattgaatttgataaagtataataaaaagcaatgatctttgttaaaaaaataaaaagtactaacattacagacatgta

SEQ ID NO: 65580 - DNA, 120 bp, Artificial Sequence
  ENSG00000074660_26 (sequence is synthesized)
tacatgggcagtggatggaagggggcccctggctgggctctctgccctctctggcagaaagagagggaagggaaaggggttgggaagcaggagagccagagggtgggcatcaggaatcaa

SEQ ID NO: 65581 - DNA, 120 bp, Artificial Sequence
  ENSG00000074660_27 (sequence is synthesized)
ggaatcactaggggaaaggtggcttctcccgacaccctggcgggcagtatccaggcctgagatcaggagaaagccagctctcctccagcccagcagagatccatctcggcagggaggagc

SEQ ID NO: 65582 - DNA, 120 bp, Artificial Sequence
  ENSG00000074660_28 (sequence is synthesized)
gctgctgggccccccgatcagacctcaaggacaggtgaacgccagcccgtcccttccccacacagctcaggccacagggtgggagcaggggggcatctggtttccttgtggggtggggag

SEQ ID NO: 65583 - DNA, 120 bp, Artificial Sequence
  ENSG00000074660_29 (sequence is synthesized)
ccttgtcgcccacgtaggtcagaggtgatggaggtagttggcagtgcccgtggcctggagacactggagacaccgggtcagctgcctgccctcctcggaagccttcaatgaggaagtttc

SEQ ID NO: 65584 - DNA, 120 bp, Artificial Sequence
  ENSG00000074660_30 (sequence is synthesized)
tgagttgcatgggcaccaggctggcgaaccggagcctgcagcgggaggcagaaagctgacaccggcggggaccagaggaggagggctgggaccacggaaggagcagcccggctctgggcc

SEQ ID NO: 65585 - DNA, 120 bp, Artificial Sequence
  ENSG00000074660_31 (sequence is synthesized)
aggagggaaagagaccaggcctcagatggcccacgaaggaaagagacatcaatgtctgtgcagtggtttagcagagagtgtagctgcctgagagacggagaggggaggaagggttgggct

SEQ ID NO: 65586 - DNA, 120 bp, Artificial Sequence
  ENSG00000074660_32 (sequence is synthesized)
ggtggggcccgcgcagggggcttacgcagagctttgttcctttatgaaacctcgtcacattccaggctcctttgagactcacagcagcgtggaggtttggaacagggagtgtggggccgg

SEQ ID NO: 65587 - DNA, 120 bp, Artificial Sequence
  ENSG00000074660_33 (sequence is synthesized)
ccctcagctcagcggctctctccgagagcaccaccctccccgacacacaggttcatgcggccccaggggcctccctcctgttgaagactgggggagagcagtgggttctgggggggcctg

SEQ ID NO: 65588 - DNA, 120 bp, Artificial Sequence
  ENSG00000074660_34 (sequence is synthesized)
ggcaggatcccagctccctcccctctgaggcttcctgccctcctcgccctctggggacttgtagtctgtcacctgctggatttggccccaagttcaaggccctatttgcacctgagcttc

SEQ ID NO: 65589 - DNA, 120 bp, Artificial Sequence
  ENSG00000074660_35 (sequence is synthesized)
actgctgaggagtggccagttgggtccttgagtccaggagcgtggggcggaggggtggggccccacagtgggggccaggcctgccttggtctccccttccccgagtcttgcctcacccca

SEQ ID NO: 65590 - DNA, 120 bp, Artificial Sequence
  ENSG00000074660_36 (sequence is synthesized)
accgagctgcctgccatggggctggggctgctgctcccgctgctgctgctctggactcgggggactcaggggtccgagctggaccccaaagggcagcacgtctgtgtggccagcaggtgg

SEQ ID NO: 65591 - DNA, 80 bp, Artificial Sequence
  ENSG00000074660_37 (sequence is synthesized)
gagcgggcggggcggggacaggtgggctggcggggcgggggcggacacaagtgagcaggcggggcggggcggagacaggg

SEQ ID NO: 65592 - DNA, 120 bp, Artificial Sequence
  ENSG00000074695_0 (sequence is synthesized)
ctccgcgttccagaatccaagatggcgggatccaggcaaaggggtctccgggccagagttcggccgctgttctgcgccttgctgctgtcactcggtcgcttcgtccggggcgacggcgtg

SEQ ID NO: 65593 - DNA, 120 bp, Artificial Sequence
  ENSG00000074695_1 (sequence is synthesized)
ggaggagaccccgcggtcgcgttgccacatcgccgtttcgagtacaaatacagcttcaaggggccgcacctggtgcagagcgacgggaccgtgcccttctgggcccacgcggggaatgct

SEQ ID NO: 65594 - DNA, 120 bp, Artificial Sequence
  ENSG00000074695_2 (sequence is synthesized)
attccaagttcagatcaaattcgagtagcaccatctttaaaaagccaaagaggctcagtgtggacaaagacaaaagcggcctttgagaactgggaagttgaggtgacatttcgagtgact

SEQ ID NO: 65595 - DNA, 120 bp, Artificial Sequence
  ENSG00000074695_3 (sequence is synthesized)
ggaagaggtcgaattggagctgatggcctagcaatttggtatgcagaaaatcaaggcttggagggccctgtgtttggatcagctgatctgtggaatggtgttggaatattttttgattct

SEQ ID NO: 65596 - DNA, 120 bp, Artificial Sequence
  ENSG00000074695_4 (sequence is synthesized)
tttgacaatgatggaaagaaaaataatcctgctatagtaattataggcaacaatggacaaatccattatgaccatcaaaatgacggggctagtcaagctttggcaagttgccagagggac

SEQ ID NO: 65597 - DNA, 120 bp, Artificial Sequence
  ENSG00000074695_5 (sequence is synthesized)
ttccgcaacaaaccctatcctgtccgagcaaagattacctattaccagaacacactgacagtaatgatcaataatggctttacaccagataaaaatgattatgaattttgtgccaaagtg

SEQ ID NO: 65598 - DNA, 120 bp, Artificial Sequence
  ENSG00000074695_6 (sequence is synthesized)
gaaaatatgattatccctgcacaagggcattttggaatatctgctgcaactggaggtcttgcagatgaccatgatgtcctttcttttctgactttccagttgactgaacctggaaaagag

SEQ ID NO: 65599 - DNA, 120 bp, Artificial Sequence
  ENSG00000074695_7 (sequence is synthesized)
ccgcccacaccagataaagaaatttcggaaaaggaaaaagaaaagtatcaggaggaatttgagcactttcaacaagaattggataaaaaaaaagaggaattccagaagggccaccccgac

SEQ ID NO: 65600 - DNA, 120 bp, Artificial Sequence
  ENSG00000074695_8 (sequence is synthesized)
ctccaagggcagcctgcggaggaaatatttgagagtgtaggagatcgagagctaagacaagtctttgaaggacagaatcgtattcatcttgaaatcaagcagctgaaccggcagttagat

SEQ ID NO: 65601 - DNA, 120 bp, Artificial Sequence
  ENSG00000074695_9 (sequence is synthesized)
atgattcttgatgaacagagaagatatgtctcttccttaacagaggaaatctctaaaagaggagcaggaatgcctgggcagcatgggcagattactcaacaagaactggatactgttgtg

SEQ ID NO: 65602 - DNA, 120 bp, Artificial Sequence
  ENSG00000074695_10 (sequence is synthesized)
aaaactcagcatgagattctgagacaagtaaatgaaatgaaaaattccatgagtgaaaccgtcagactggtcagtggaatgcagcaccctggctctgctggaggcgtctatgagacaaca

SEQ ID NO: 65603 - DNA, 120 bp, Artificial Sequence
  ENSG00000074695_11 (sequence is synthesized)
cagcacttcattgacatcaaagagcacctgcacatagtaaagagggacatagataacttagtgcagcgaaatatgccatcaaatgaaaagccgaaatgcccagaactaccaccatttcca

SEQ ID NO: 65604 - DNA, 120 bp, Artificial Sequence
  ENSG00000074695_12 (sequence is synthesized)
tcatgtttgtctacggtccacttcattatatttgttgtggtgcaaactgtattattcattggttatatcatgtataggtctcagcaagaagcagctgccaaaaaattcttttgactacca

SEQ ID NO: 65605 - DNA, 120 bp, Artificial Sequence
  ENSG00000074695_13 (sequence is synthesized)
ttttcctgtgtacttcatctatttgtgtacaaaatgatgtcgttttgagggaatttaagtatttaaattgcttcatagtctaaattattaattttcttaataaaataactgtttaaacat

SEQ ID NO: 65606 - DNA, 120 bp, Artificial Sequence
  ENSG00000074695_14 (sequence is synthesized)
tgatttgcagttaagaataaaccttaaagcaaagacaaccacattttaatttgttcacagtatgtaaatctgtctaaatttcagtgaatttctggtcagtatgatgcagcctctgagcag

SEQ ID NO: 65607 - DNA, 120 bp, Artificial Sequence
  ENSG00000074695_15 (sequence is synthesized)
aatattgaccagtaagagggtaaataaagtgggggcaacccctggatatgaatgttaccccctaagtctccaatattgcaggtttccctgtataacgtaaacacacttgccctcatgcct

SEQ ID NO: 65608 - DNA, 120 bp, Artificial Sequence
  ENSG00000074695_16 (sequence is synthesized)
cccagaatatgaggtctaattaagaagtcccatcaggtttattttgtaaccaaagtcttttttagaggtcagacttcctaatcaaaggcctgggcctgcagtcctttcatcttaatgcaa

SEQ ID NO: 65609 - DNA, 120 bp, Artificial Sequence
  ENSG00000074695_17 (sequence is synthesized)
cttcctttgaaatcaaagaatattttgtctgagagctttaaggatctggtaatagacttcaaaatgttaagtgaaatttttttttcctctatttatcaatgatatatttcacttttaaag

SEQ ID NO: 65610 - DNA, 120 bp, Artificial Sequence
  ENSG00000074695_18 (sequence is synthesized)
gaaattttagaggaaaattaatagctgctttttgcctaaaaaaccttgtgggtggaaacattcctctgagaatggcttttataggtattttgcctggtaatgtattcattcatgattgcc

SEQ ID NO: 65611 - DNA, 120 bp, Artificial Sequence
  ENSG00000074695_19 (sequence is synthesized)
catattcttgaatgtcttcattccaatggggtcaggtcaatattatgaaaataatttttatatttatatttgtaacttaaggaatttatttctccctttactacagcatgtaaattcagc

SEQ ID NO: 65612 - DNA, 120 bp, Artificial Sequence
  ENSG00000074695_20 (sequence is synthesized)
aaattcacaaaacctgccactacattctggtttacattagttacttcatgctggctggggttagtgaccatttgcatactcttttaaatcaaggaggctgtagtagaagcagttttaaga

SEQ ID NO: 65613 - DNA, 120 bp, Artificial Sequence
  ENSG00000074695_21 (sequence is synthesized)
ttcttgaaggcaaaatttgaaaaacagtgaatacttctaattgtttccttttagtgccagaactaaggacattgtgaagcacttgttagtaaacttaaccttgaaatgtcagactggaag

SEQ ID NO: 65614 - DNA, 120 bp, Artificial Sequence
  ENSG00000074695_22 (sequence is synthesized)
gagtttttatagtctttgtgcatacttctaggtattacagaaacagtctgtaaatgacattttaagatgcaaatttaattctgttcacagctgatttatactgatttttgctgccttcaa

SEQ ID NO: 65615 - DNA, 120 bp, Artificial Sequence
  ENSG00000074695_23 (sequence is synthesized)
aatactcttttacttcttttagctaaaatggttgtctttcatttgccatagaattccaaacaatactatcttataaaatagtactgttgaattattccaagcctccctaggtttgctctc

SEQ ID NO: 65616 - DNA, 120 bp, Artificial Sequence
  ENSG00000074695_24 (sequence is synthesized)
aaatgtcatttacagattgggctaacgacctaaaatctatatataaagactttctgaagaactctgtattatagcaataccaaacgagtgctgtgtgtgcaaacagtctggcgttgcttt

SEQ ID NO: 65617 - DNA, 120 bp, Artificial Sequence
  ENSG00000074695_25 (sequence is synthesized)
ttatgttgatatttatcctagaacactgaaagagaatatgccagtgataactcactttacttcagtcatttcaacacagaaaatgcttctctagcatttttcttttgtagtgttaacatt

SEQ ID NO: 65618 - DNA, 120 bp, Artificial Sequence
  ENSG00000074695_26 (sequence is synthesized)
ttgaaattcatgtttcagaggcttcatcatcacagaatttactcttgctccatgaaaaaaaattaaataccttcagaggaatatttaagttgtaaactatgaaacttgagaaatcctctt

SEQ ID NO: 65619 - DNA, 120 bp, Artificial Sequence
  ENSG00000074695_27 (sequence is synthesized)
gagataaaaggctgccaaatccagtattataaagtccatggtcatatgtgcctgtgcattaaaggaataccagatctatgcagtatacatttttcaggctgaaattcaaggggaatcatt

SEQ ID NO: 65620 - DNA, 120 bp, Artificial Sequence
  ENSG00000074695_28 (sequence is synthesized)
ctgattattcttactacaaatggagatggctattatgaaacagcatgagcatgagccttttatcttttatacttagtgatatactttgcttgaaaatcactcagcaaagtagttcacatg

SEQ ID NO: 65621 - DNA, 120 bp, Artificial Sequence
  ENSG00000074695_29 (sequence is synthesized)
atgtgtatcatatttgaagtgtggtttttctcaaaatcattgactttaaggagctcatttctgaacaaaaaggtttgctctgtggaaaaatcaatcactgccaggattctttcatttctg

SEQ ID NO: 65622 - DNA, 120 bp, Artificial Sequence
  ENSG00000074695_30 (sequence is synthesized)
tactattttgtataattgaatttgttcacttctctcacaccagcaagtgttttacaggtgccttggattaaaacaaaattgattttaaaatttttatgtaagtcattgtgtctatgatgc

SEQ ID NO: 65623 - DNA, 120 bp, Artificial Sequence
  ENSG00000074695_31 (sequence is synthesized)
cacttttaaaaggaaaatgcaattgcgtaatggcttatatccttatttaatgtacctatttgtgttctaataattgtttgaatgttttattcagcttaaaactttaccatgaagtcataa

SEQ ID NO: 65624 - DNA, 120 bp, Artificial Sequence
  ENSG00000074695_32 (sequence is synthesized)
acagtaaacaatgttttgttatgtattaaggggatatcagtgtttctcaaagtatgatccatggaccatctgggtcatggcgcctggtttcagacaacctgaatcaaatcttaggggtgg

SEQ ID NO: 65625 - DNA, 120 bp, Artificial Sequence
  ENSG00000074695_33 (sequence is synthesized)
ggctttgggatgtcattgttcaataggcacctcaggagattctgagcacaccaatgtttgagaaccactaaaatgaggagtgggaaaaaaaaaataggtgttttgttaatttagagctga

SEQ ID NO: 65626 - DNA, 120 bp, Artificial Sequence
  ENSG00000074695_34 (sequence is synthesized)
gctgagaagataatatatttttattgtcaatgacattaacagatatgcactgattcttttatacctacaatttacttaatgttccttttattaaaacgcgtggttcatgagcaactacag

SEQ ID NO: 65627 - DNA, 120 bp, Artificial Sequence
  ENSG00000074695_35 (sequence is synthesized)
actgaatccagattattacctgttgctttcagtattttcgtgatggcttttaatcttatgaaatcatcttgagatcattcatggtcaagccatgaaaactcccatcttcaagcctgcctg

SEQ ID NO: 65628 - DNA, 120 bp, Artificial Sequence
  ENSG00000074695_36 (sequence is synthesized)
ctaaagcttctttgccttcctgattgtgattatggtaacaatttatatcagacagttgtactttttgataacttagggaaaacagaaatgacttgaacaagggattgcctgcctcactgc

SEQ ID NO: 65629 - DNA, 120 bp, Artificial Sequence
  ENSG00000074695_37 (sequence is synthesized)
attgcagagatacaatttttgtaaagaacacaaatagcagttgtgaatattaaggtgtgattatctttccctgtccatgtgcttattgaaagaagatagtgaacaaatgattatattgag

SEQ ID NO: 65630 - DNA, 120 bp, Artificial Sequence
  ENSG00000074695_38 (sequence is synthesized)
gatttttttaatttataagatctaatgtgaaatccacacttggaactttttagatctgtctgttgcttgtttaatatatttcttttatgacattacttaaagtttaaaagggttttctat

SEQ ID NO: 65631 - DNA, 120 bp, Artificial Sequence
  ENSG00000074695_39 (sequence is synthesized)
ccactgtcaatttcaattggataacattttgtcaagttttttttttcctgattatttgatgctagctggaattcaagaaatggcattgaccttattcaaataaagaaatattttagtaaa

SEQ ID NO: 65632 - DNA, 120 bp, Artificial Sequence
  ENSG00000074695_40 (sequence is synthesized)
ataaataaacctttattagacctcacatttcccagactgacttaactatggaattttttttcacctaatgtctatgagtgatcatggagctagtgttttcaggtacacgttttgaagaga

SEQ ID NO: 65633 - DNA, 120 bp, Artificial Sequence
  ENSG00000074695_41 (sequence is synthesized)
cttgtttatatagcaaacagttttataaagatttcacatttatttctttttccaaactgctattttgactaactgtaatagaaagtcatttgccttacagccatcaaatgaaaagccgaa

SEQ ID NO: 65634 - DNA, 120 bp, Artificial Sequence
  ENSG00000074695_42 (sequence is synthesized)
atgctgtatgagtgaaatcatctatatgtgcagctacaaagcggacaagtctgtgtgtgtgtgagtgtgcctataggaaatgattgcgtttggcactagtcctttactgtacagctgaac

SEQ ID NO: 65635 - DNA, 120 bp, Artificial Sequence
  ENSG00000074695_43 (sequence is synthesized)
acctagaaagatttattataacttcattaaaaatatcatccattatattcaatatccacttatactattggttttaacacagattacctagtagtattttctacatggtatttttagatg

SEQ ID NO: 65636 - DNA, 120 bp, Artificial Sequence
  ENSG00000074695_44 (sequence is synthesized)
tactttacctgtttttttttttaaatgatgtaatatattagacttgaaaagtaaaagtattggagatctgtgactgaaaaaaaaaaactttatagtgattttattgtatcaagagacttt

SEQ ID NO: 65637 - DNA, 120 bp, Artificial Sequence
  ENSG00000074695_45 (sequence is synthesized)
acagtatcacttttcattttgaatttttgatagaaattaaatgcacttaaatttggatatgcttacatactcttcattgttactctaagagaacggaggtggcttcacagctcagtgtaa

SEQ ID NO: 65638 - DNA, 120 bp, Artificial Sequence
  ENSG00000074695_46 (sequence is synthesized)
gtggtcatctgttgtaaacccctgatggtatgtttccatttagtcagtaaatgtttaagccccctactgtatagcacatgtgagagatatatatatctatagatagatagatagataggt

SEQ ID NO: 65639 - DNA, 120 bp, Artificial Sequence
  ENSG00000074695_47 (sequence is synthesized)
agatagatagatagacggataatctccaagccttcaggatacaaatatgagtaagacagatggactttctccccagagagcttatagcctaacagaggacacacaaatgtatcattccta

SEQ ID NO: 65640 - DNA, 120 bp, Artificial Sequence
  ENSG00000074695_48 (sequence is synthesized)
tgctgtgtgataaatgctgcgttgcagacactatcaagcggtcctgtggttagaatcctgtaactgccaggtggaggtggggaagggcaggaacattttctcagagttgagctgtgccct

SEQ ID NO: 65641 - DNA, 120 bp, Artificial Sequence
  ENSG00000074696_0 (sequence is synthesized)
gtcactgcgcaggcgcggcccgcgagcgtggggtatctcgaggtgccgggttgcaggcgctcaggagcgctagggtttgaggcctgctttctgctcgcgccagcagagcactacctgagg

SEQ ID NO: 65642 - DNA, 120 bp, Artificial Sequence
  ENSG00000074696_1 (sequence is synthesized)
cagcgaggcgcagcgagcctagcctccccgcgccctgggcagtgtggccatggagaatcaggtgttgacgccgcatgtctactgggctcagcgacaccgcgagctatatctgcgcgtgga

SEQ ID NO: 65643 - DNA, 120 bp, Artificial Sequence
  ENSG00000074696_2 (sequence is synthesized)
gctgagtgacgtacagaaccctgccatcagcatcactgaaaacgtgctgcatttcaaagctcaaggacatggtgccaaaggagacaatgtctatgaatttcacctggagttcttagacct

SEQ ID NO: 65644 - DNA, 120 bp, Artificial Sequence
  ENSG00000074696_3 (sequence is synthesized)
tgtgaaaccagagcctgtttacaaactgacccagaggcaggtaaacattacagtacagaagaaagtgagtcagtggtgggagagactcacaaagcaggaaaagcgaccactgtttttggc

SEQ ID NO: 65645 - DNA, 120 bp, Artificial Sequence
  ENSG00000074696_4 (sequence is synthesized)
tcctgactttgatcgttggctggatgaatctgatgcggaaatggagctcagagctaaggaagaagagcgcctaaataaactccgactggaaagcgaaggctctcctgaaactcttacaaa

SEQ ID NO: 65646 - DNA, 120 bp, Artificial Sequence
  ENSG00000074696_5 (sequence is synthesized)
cttaaggaaaggatacctgtttatgtataatcttgtgcaattcttgggattctcctggatctttgtcaacctgactgtgcgattctgtatcttgggaaaagagtccttttatgacacatt

SEQ ID NO: 65647 - DNA, 120 bp, Artificial Sequence
  ENSG00000074696_6 (sequence is synthesized)
ccatactgtggctgacatgatgtatttctgccagatgctggcagttgtggaaactatcaatgcagcaattggagtcactacgtcaccggtgctgccttctctgatccagcttcttggaag

SEQ ID NO: 65648 - DNA, 120 bp, Artificial Sequence
  ENSG00000074696_7 (sequence is synthesized)
aaattttattttgtttatcatctttggcaccatggaagaaatgcagaacaaagctgtggttttctttgtgttttatttgtggagtgcaattgaaattttcaggtactctttctacatgct

SEQ ID NO: 65649 - DNA, 120 bp, Artificial Sequence
  ENSG00000074696_8 (sequence is synthesized)
gacgtgcattgacatggattggaaggtgctcacatggcttcgttacactctgtggattcccttatatccactgggatgtttggcggaagctgtctcagtgattcagtccattccaatatt

SEQ ID NO: 65650 - DNA, 120 bp, Artificial Sequence
  ENSG00000074696_9 (sequence is synthesized)
caatgagaccggacgattcagtttcacattgccatatccagtgaaaatcaaagttagattttccttttttcttcagatttatcttataatgatatttttaggtttatacataaattttcg

SEQ ID NO: 65651 - DNA, 120 bp, Artificial Sequence
  ENSG00000074696_10 (sequence is synthesized)
tcacctttataaacagcgcagacggcgctatggacaaaaaaagaaaaagatccactaaaaagaaagatttagatggcttcttgccagtttgagcctaatctgattcttacagttttacct

SEQ ID NO: 65652 - DNA, 120 bp, Artificial Sequence
  ENSG00000074696_11 (sequence is synthesized)
tcttgaaccaatgtaaaagtttttttaatgttaaatgattaaattctcagtgaggctatcttccttttccccagtaacattcctgaatttactgttatcttattgtagtacttgcatgac

SEQ ID NO: 65653 - DNA, 120 bp, Artificial Sequence
  ENSG00000074696_12 (sequence is synthesized)
atggattcctgatatctgatgagaggttcattcttgtgtattcagttaatgacaccaaaaggctcagcccaccccaaccctatctcatgttcagtctgtctaatacatgccagagatttt

SEQ ID NO: 65654 - DNA, 120 bp, Artificial Sequence
  ENSG00000074696_13 (sequence is synthesized)
gaaggctgttaaagtgactcaggcaggaattaattattctgtacctaaggggttacttgtttaatgggatggcattgactttttgaaaatcaagtggactgagtcattgataaaacattt

SEQ ID NO: 65655 - DNA, 120 bp, Artificial Sequence
  ENSG00000074696_14 (sequence is synthesized)
ctaagagtggggctagagaacatactttacatctgacatcctttggcctaacaacatctattattatagtgctcagcagtgtgggcattgaagaggcgcagaatgctttgaaagaaacta

SEQ ID NO: 65656 - DNA, 120 bp, Artificial Sequence
  ENSG00000074696_15 (sequence is synthesized)
atcagaatcttggaacatcatgatcatgccattcttaagtaaatcaactattttcaacactgaagaaaaatgaaacattatttagaaaacaatgagattacaagttccaaactcagccag

SEQ ID NO: 65657 - DNA, 90 bp, Artificial Sequence
  ENSG00000074696_16 (sequence is synthesized)
cacctgtaatcccagcactttgggacacctaggtgggagcttgggcaacgtagtgagacccctatctctacaaaaaataaaaaaattagc

SEQ ID NO: 65658 - DNA, 89 bp, Artificial Sequence
  ENSG00000074696_17 (sequence is synthesized)
tctacaaaaaataaaaaaattagctgggtgtgatggcacacacctgttgtcccagctactcaagaagctgagatgggaggatccgagat

SEQ ID NO: 65659 - DNA, 120 bp, Artificial Sequence
  ENSG00000074696_18 (sequence is synthesized)
ctgcagctggggtgacagtgcaagaccctgtctcaaaccaaaccaaaccacacacacacaaacacacatacacacacacacacacgaggtccaaatggtagcagggatccaaagggaaca

SEQ ID NO: 65660 - DNA, 120 bp, Artificial Sequence
  ENSG00000074696_19 (sequence is synthesized)
cagtatgtaggtcaaactggcagtaacagtgtacagcctttgacaaactagaaatattagagtaggccaaacacacctccaaactgtaaggctgtgcacaaacataaaaaatggcagcct

SEQ ID NO: 65661 - DNA, 120 bp, Artificial Sequence
  ENSG00000074696_20 (sequence is synthesized)
tccatctcctgcactggctgagtccatttacttgtgtacttgttctagtgagtggtgggactgtacatttttgaatagacctcaaaaatacttcattctgctgctgttcagttggctttt

SEQ ID NO: 65662 - DNA, 120 bp, Artificial Sequence
  ENSG00000074696_21 (sequence is synthesized)
taaacctgtctgcagtaggacactgaaaacagcaagaacttcggggtgaacacccgctgatcctttaacaaggatttctggcaggaaactcacaaaaaggagaactgaaaatttagacat

SEQ ID NO: 65663 - DNA, 120 bp, Artificial Sequence
  ENSG00000074696_22 (sequence is synthesized)
acagttggccattgtaaaaaacatcagtttcctctcatacattccaagtaaaccaagtaaaataagtgttggagtaacacttgcataaaagaatttaaggagtgatagctctttctgttc

SEQ ID NO: 65664 - DNA, 120 bp, Artificial Sequence
  ENSG00000074696_23 (sequence is synthesized)
tgccattcccaacattcctgggggaaaggagactcaatgagttaatactatttcactgagcccaagatggaaacttggtttgacctaaaacatctgattaatataggctagctgatttct

SEQ ID NO: 65665 - DNA, 120 bp, Artificial Sequence
  ENSG00000074696_24 (sequence is synthesized)
taaaaattcgttgcattgaaggatattttgcatgtctgtaacacctgtcaatacttgtttgtattgatttctgatattcttgcagctgactacgtgtaattgggcagatcagctttgcag

SEQ ID NO: 65666 - DNA, 120 bp, Artificial Sequence
  ENSG00000074696_25 (sequence is synthesized)
tagattatgctgcatcctcgtggcaaaattctgtattcttagtgattgttacaaacccctttattgctgtctgagaaagtgaaagattgtgtatttctattaaaacatttacaatcaaaa

SEQ ID NO: 65667 - DNA, 120 bp, Artificial Sequence
  ENSG00000074696_26 (sequence is synthesized)
cactctgttgcccaggttggagtgcagcagtgtgatcatagctcaccgtagccttgaactcctgggtttgagcagtcctcctggctcagcctaccaagtaggactacagaaccctgccat

SEQ ID NO: 65668 - DNA, 120 bp, Artificial Sequence
  ENSG00000074696_27 (sequence is synthesized)
acactgggaaggagctgcctcttgcttgttaaccttgagctggaagtaggagttgggttgtttctcatccactggaaaaagtgttaagtagtttcactttacattatgatgctaaattga

SEQ ID NO: 65669 - DNA, 120 bp, Artificial Sequence
  ENSG00000074696_28 (sequence is synthesized)
ggaaatcattctcattacttttaattttaaaattcacaagagctggaggaagtgatttccccctctgttctgaaggttgtgagctcaggtttgctgagttgcacagagaacttaaaaagt

SEQ ID NO: 65670 - DNA, 120 bp, Artificial Sequence
  ENSG00000074696_29 (sequence is synthesized)
aaaacgtgctgcatttcaaaggtcagtatcccagcaaatgctcccatctctatacacagttaaggaggtgtggtggtggtttcccttttttaaaaaaatgtatttgtcttacttgttttt

SEQ ID NO: 65671 - DNA, 120 bp, Artificial Sequence
  ENSG00000074696_30 (sequence is synthesized)
tgctgatgttcacgcctctgatcctcatgaggtaagctaaattgttttgaaatatatgattagaaaagtcaaagaattggtttaaaatcctgtttcccccatggagaggcagtagataca

SEQ ID NO: 65672 - DNA, 120 bp, Artificial Sequence
  ENSG00000074696_31 (sequence is synthesized)
tccaggtattgaatagttaagctgaagggtgggtaatggaaggtcccattatttgtctagtgggtatgtgtattagtccattttcatgctgctcataaagacatacctgagactgggcag

SEQ ID NO: 65673 - DNA, 120 bp, Artificial Sequence
  ENSG00000074696_32 (sequence is synthesized)
aattggacttacagttccatgtggctgggaaggtctcacgatcatggtggagggcgaaaggcacttcttacgtggtggcggcaagagagaatgaggaagaagcaaaagcagaaactcctg

SEQ ID NO: 65674 - DNA, 120 bp, Artificial Sequence
  ENSG00000074696_33 (sequence is synthesized)
atcagatctcgtgagacttattcactatcctgagaatagcatgggaaagaccggccgcactgattcatttacctccccctaggtccctgccacaacacgtgggaatcctgggagatacaa

SEQ ID NO: 65675 - DNA, 120 bp, Artificial Sequence
  ENSG00000074696_34 (sequence is synthesized)
acgtgggaatcctgggagatacaattaaagttgaaatttgaatggggacacagccaaaccatatcattctagccgtggcccctccaaatctcataccctcacatttcaaaaccaatcatg

SEQ ID NO: 65676 - DNA, 67 bp, Artificial Sequence
  ENSG00000074696_35 (sequence is synthesized)
cttgagcctgtaaaatcaaagcacactagttacttcctagatacaaggggagtactggcattgggta

SEQ ID NO: 65677 - DNA, 89 bp, Artificial Sequence
  ENSG00000074696_36 (sequence is synthesized)
agtcccttctgcctttgagcctgtaaaatcaaagcacactagttacttcctagatacaaggggagtactggcattgggtaaatacagcc

SEQ ID NO: 65678 - DNA, 90 bp, Artificial Sequence
  ENSG00000074696_37 (sequence is synthesized)
aaggtgggttcccatggtcttaggcagctccactcctgtgactttgcagggagcagcctccctcccggctgctttcaccggctggcattg

SEQ ID NO: 65679 - DNA, 68 bp, Artificial Sequence
  ENSG00000074696_38 (sequence is synthesized)
cccatggtcttaggcagctccactcctgtgactttgcagggagcagcctccctcccggctgctttcac

SEQ ID NO: 65680 - DNA, 78 bp, Artificial Sequence
  ENSG00000074696_39 (sequence is synthesized)
accactttggggtctggaggatggcgtctgtgtgggggctccaaccccatgtttcccttcctcactgccctagcagag

SEQ ID NO: 65681 - DNA, 82 bp, Artificial Sequence
  ENSG00000074696_40 (sequence is synthesized)
caggcatttccatacatcttctgaaatctgggcggaggtttccaaacctcaattcttgacttctctgcacccacaggctcac

SEQ ID NO: 65682 - DNA, 120 bp, Artificial Sequence
  ENSG00000074696_41 (sequence is synthesized)
cagcacagggaccctgggcctccgcgcctgtgatgggagggactgccatgaaggcctctgacatggtctggttacattttccccatggtcttggggattacattggggattacgttaggc

SEQ ID NO: 65683 - DNA, 120 bp, Artificial Sequence
  ENSG00000074696_42 (sequence is synthesized)
ggggattacgttaggctccttgctacttgtgcaaatttctgcagccagcttgaggttctcctcaaaaaatgggtttttcttttctactgaatcatcaggctgcaaattttccaaactttt

SEQ ID NO: 65684 - DNA, 73 bp, Artificial Sequence
  ENSG00000074696_43 (sequence is synthesized)
gactgaagccattcaacaaatctctacgaggttccaaacttacctacattttcctatcttcttctgagccctc

SEQ ID NO: 65685 - DNA, 120 bp, Artificial Sequence
  ENSG00000074696_44 (sequence is synthesized)
tccacattttcgggtatcttttcagcaacatccaactttactggtaccaatttactgtattagtccgttttcccactgctgataaagacatacctgaaaccaggccgtttacaaaagaaa

SEQ ID NO: 65686 - DNA, 120 bp, Artificial Sequence
  ENSG00000074696_45 (sequence is synthesized)
gaggtttaattggatttacagttccatgtggcgggggaaggtctcacaattgtggtgcagggcaaaaggcacttcttacatggcggtggcaagagagaatgaggaagaaacaaaagcgga

SEQ ID NO: 65687 - DNA, 120 bp, Artificial Sequence
  ENSG00000074696_46 (sequence is synthesized)
gaatgaggaagaaacaaaagcggaaacccctgataagcccgccagatcttgtgagacttatttactaacatgggaatagcacgggaagaccagcccccatgattcagttacctccccctg

SEQ ID NO: 65688 - DNA, 120 bp, Artificial Sequence
  ENSG00000074696_47 (sequence is synthesized)
ggtcccttccacaacatgtgggaattctaggagatacaattcaagctgacatttgaatggggacacagccaaaccatatctgtatgttacattttgctaagaagtctcaattagtaaaaa

SEQ ID NO: 65689 - DNA, 120 bp, Artificial Sequence
  ENSG00000074696_48 (sequence is synthesized)
cacctatttgtacaggaatagcattattttacctgaacaagaaagaacatttaaaaccccagggttatttaccaaagtagacttttactatttcaggtctttttcattttttataatatc

SEQ ID NO: 65690 - DNA, 120 bp, Artificial Sequence
  ENSG00000074696_49 (sequence is synthesized)
cttatgaaatcacaaagttataaagagctttaagactagggaaatttgactcttaggcaggagctgaaaaacctaccttcagtctccttagttagaaatgtatgtggtctcctcccacct

SEQ ID NO: 65691 - DNA, 120 bp, Artificial Sequence
  ENSG00000074696_50 (sequence is synthesized)
tctgctccaagctcactcttgtggctgttgacaggaagcttcagtttcttgccatagcccgtctccatatggctactcatggcatggcttcccccaaagcaattggttagagagagagag

SEQ ID NO: 65692 - DNA, 120 bp, Artificial Sequence
  ENSG00000074696_51 (sequence is synthesized)
cccgaagccacagtgcctaatctcagaagtgacaaatcatcacacagaccaacccagtataacatgggaggggactacacaaaggtatgaaataacaggagatagaggttgttgggatca

SEQ ID NO: 65693 - DNA, 120 bp, Artificial Sequence
  ENSG00000074706_0 (sequence is synthesized)
tttaagtagaatcctcaagcttggcctcagagtactatgaggcttctgaatccaggaataagactgctcttggatttactctctttgtattgcatgtcaaaggcaacagaactggaccaa

SEQ ID NO: 65694 - DNA, 120 bp, Artificial Sequence
  ENSG00000074706_1 (sequence is synthesized)
gaaaattcataactttttgcttttgtttctactaagatgacatcatacatggctattgatggcagtgctcttgttcccttgcgtcagaagcccaggaggaaaactcaaggttttctcacg

SEQ ID NO: 65695 - DNA, 120 bp, Artificial Sequence
  ENSG00000074706_2 (sequence is synthesized)
atgagtcggaggaggatatcgtgtaaagatctgggccatgctgactgccaagggtggctgtataagaaaaaggaaaagggaagtttcctaagcaacaaatggaaaaagttctgggtgata

SEQ ID NO: 65696 - DNA, 120 bp, Artificial Sequence
  ENSG00000074706_3 (sequence is synthesized)
ctgaaggggtcgtcactgtactggtatagcaatcaaatggcagagaaagctgatggatttgtcaacctgcctgatttcactgtggaaagagcatctgaatgcaagaaaaagcatgctttt

SEQ ID NO: 65697 - DNA, 120 bp, Artificial Sequence
  ENSG00000074706_4 (sequence is synthesized)
aagatcagccatccacagatcaagaccttttattttgcagctgagaatgtgcaggaaatgaacgtgtggttaaataaacttggatcggctgtaatccatcaggaatccactacaaaggat

SEQ ID NO: 65698 - DNA, 120 bp, Artificial Sequence
  ENSG00000074706_5 (sequence is synthesized)
gaagaatgttacagtgaaagtgaacaggaagatccagaaatagctgcggagacaccaccccctcctcacgcttcccagactcagtctttgactgcacagcaggcatcttcatcctcaccc

SEQ ID NO: 65699 - DNA, 120 bp, Artificial Sequence
  ENSG00000074706_6 (sequence is synthesized)
agcctgagtggaacgtcgtattctttctcttccctggaaaatacagtgaagacacccagcagttttccttcctccttatctaaagagagacaatccttgcctgacacagttaacagtttg

SEQ ID NO: 65700 - DNA, 120 bp, Artificial Sequence
  ENSG00000074706_7 (sequence is synthesized)
tctgctgctgaagatgagggacaaccaataacgtttgctgtgcaagttcattcacctgtaccctcagaggcaggcatccacaaggccctggaaaacagttttgtcacatcagaaagtgga

SEQ ID NO: 65701 - DNA, 120 bp, Artificial Sequence
  ENSG00000074706_8 (sequence is synthesized)
tttttgaactctttatctagtgatgatacttcttcattgagtagcaatcatgaccatcttactgtcccagataagcctgctggatcaaagatcatggacaaagaagagacaaaagtgtct

SEQ ID NO: 65702 - DNA, 120 bp, Artificial Sequence
  ENSG00000074706_9 (sequence is synthesized)
gaagatgatgaaatggagaagctgtacaaatcattagagcaagctagtctatctcctcttggggaccgacgaccttcgactaaaaaggagttgagaaaatcctttgttaagcggtgtaaa

SEQ ID NO: 65703 - DNA, 120 bp, Artificial Sequence
  ENSG00000074706_10 (sequence is synthesized)
aatccatctataaacgagaaactccacaaaatccgaacattgaatagcacattaaagtgtaaagaacatgatctggccatgattaaccagttgctggatgacccgaagctgacagccagg

SEQ ID NO: 65704 - DNA, 120 bp, Artificial Sequence
  ENSG00000074706_11 (sequence is synthesized)
aaatacagagagtggaaagtcatgaacaccctgctgatccaggacatctatcagcagcagcgggcttcgcctgcccctgatgacactgatgacaccccccaggaactcaagaaatcacct

SEQ ID NO: 65705 - DNA, 120 bp, Artificial Sequence
  ENSG00000074706_12 (sequence is synthesized)
tcttctccctctgttgaaaattccatttgagacaaagtcagggttttctcctcttatattttatcacaagcaactcttcaagatgttgcaaaagcttacatttttccttaaaaggaaaac

SEQ ID NO: 65706 - DNA, 120 bp, Artificial Sequence
  ENSG00000074706_13 (sequence is synthesized)
tgaaacccagtccttcaagcatcagcttcccatctaaagatgcacgttagatgaagataatcaccgaatacaccagggctcctcatttcagtcgtaacgcatccattgagattggaatga

SEQ ID NO: 65707 - DNA, 120 bp, Artificial Sequence
  ENSG00000074706_14 (sequence is synthesized)
ttgagttcagttgaaaggcgttttttgtgttcctactgggagctcacggtgatgtggggctctaggggggatgtgagaaatgtctcttctgttcattgctctccagagaatgctatggac

SEQ ID NO: 65708 - DNA, 120 bp, Artificial Sequence
  ENSG00000074706_15 (sequence is synthesized)
aagaatcaaattttaccaggagtaattgcccatggaaacattctgtttttcaaaagaagaatgtacatattccacttgactgggaagctgtgtggcccaaatcactgtttgagtggagga

SEQ ID NO: 65709 - DNA, 120 bp, Artificial Sequence
  ENSG00000074706_16 (sequence is synthesized)
atgttttctagagcagtgactggaaggacaaacgtggtgttgcagaacaaaaattccttgcctttggtatggaatggtggtgccttttccatgtgatgagaaatgcttcatagacagtgg

SEQ ID NO: 65710 - DNA, 120 bp, Artificial Sequence
  ENSG00000074706_17 (sequence is synthesized)
catgtgggagagctgaaggaggaggcgtgttccatattccactcattcaaaggacagcttggtgttttcacactttatgcaggttaggggatctgattaatgtttcctttccttacaaca

SEQ ID NO: 65711 - DNA, 120 bp, Artificial Sequence
  ENSG00000074706_18 (sequence is synthesized)
gctagagaaaacatctcatcacaattggagacctctacttcctttgagctttcctactcaatggtaggagataggaatatgttccgcaaagaatgtctactgctcttgtccttggctgtg

SEQ ID NO: 65712 - DNA, 120 bp, Artificial Sequence
  ENSG00000074706_19 (sequence is synthesized)
atccctatacatagtgtgaatttatatccaggtttcccaggatcaatattgacaagacgactttggcatctgaattgttttaatatctttactcaaaaaaacaaaaaaacaaaaacccat

SEQ ID NO: 65713 - DNA, 120 bp, Artificial Sequence
  ENSG00000074706_20 (sequence is synthesized)
ggaagcaacaaaagagttaaacatgagggatttatttttgtatgtttatatgtcacttgtgtgctatgtgaatagctatgtttgttatttaaatatatttatagaagttcaaattactag

SEQ ID NO: 65714 - DNA, 120 bp, Artificial Sequence
  ENSG00000074706_21 (sequence is synthesized)
tgtttaaaagatgatatactattatatattgtgcttagtatatatttgatgagtctatactttttgcttgagaaaaatagaaatactattgattcactggtgttatgatgttgcactgtg

SEQ ID NO: 65715 - DNA, 120 bp, Artificial Sequence
  ENSG00000074706_22 (sequence is synthesized)
tctgaggaatgctcaggaaatcttgtgggaaaaaaatggggcatgcattcataatttttcattttcttccccaccccaacccccatgagctcttaaatttagatttctatctcttgtaag

SEQ ID NO: 65716 - DNA, 120 bp, Artificial Sequence
  ENSG00000074706_23 (sequence is synthesized)
tcactcttttaaccagcaaaggactttcatcttagattatcctttctattaaataaactttaagctttgtgccatttatgcctgcaaaccttagaccaaaggcaacacaactaatgtcat

SEQ ID NO: 65717 - DNA, 120 bp, Artificial Sequence
  ENSG00000074706_24 (sequence is synthesized)
cttttcattaaagactaatagaaatttagaaatcattgtgttaaagagagctatagagaaacaatatgaaagtcttcccttactaatcaccatgaatatttctcaccataggaataacca

SEQ ID NO: 65718 - DNA, 120 bp, Artificial Sequence
  ENSG00000074706_25 (sequence is synthesized)
caacccaccaagtacccatgttggccctgcctacccgtaacaaattgttcacacaacctattttgttttatagcttcaaagtgtggcttgacattcaaatggaaggaaccacctgaatta

SEQ ID NO: 65719 - DNA, 120 bp, Artificial Sequence
  ENSG00000074706_26 (sequence is synthesized)
tatctgcaaacaaaatggaaatagttgttgaatagttccccaagctttactaagaagccttaatactctgtaaacaaacaaacaaacaaaaaacaaccttagcattaagaaataaaaaca

SEQ ID NO: 65720 - DNA, 120 bp, Artificial Sequence
  ENSG00000074706_27 (sequence is synthesized)
ctccacctagggaagccactgaagatgagtttgacctgtggtgacctgacagagagaacattcagatcctcagattgcaccctgatgccctggtttaggaaagcagtgctttaacctttt

SEQ ID NO: 65721 - DNA, 120 bp, Artificial Sequence
  ENSG00000074706_28 (sequence is synthesized)
gcccctggaaattactgattctttctgtgattagcagataccagaagggaaattatttaggattggcaatgtaaagagtattgaaggaacaacaaataacaatagcagaaataacagtgt

SEQ ID NO: 65722 - DNA, 120 bp, Artificial Sequence
  ENSG00000074706_29 (sequence is synthesized)
gacataaagtgcccttccacctatttttctttggtttgcaacaccagcctgtagacttccagtttttcttaaattgaagagctccagacacttttgagcagggtttgtgaatagctttga

SEQ ID NO: 65723 - DNA, 120 bp, Artificial Sequence
  ENSG00000074706_30 (sequence is synthesized)
atgctttcctttggcttttcgtgaagacatatttccccagcctttcaactgtaaactcctttagtaccattgaaacttaaggcaaaaaagatccctgggattacttagccaaggcttaaa

SEQ ID NO: 65724 - DNA, 120 bp, Artificial Sequence
  ENSG00000074706_31 (sequence is synthesized)
tttatttttcaaagtcaagaacattagcctagaagtttttgctttgctagttaaagcttactttgcagagcttcccaaagtgaaagggaaactgaacttcacaattttgcacctggcttt

SEQ ID NO: 65725 - DNA, 120 bp, Artificial Sequence
  ENSG00000074706_32 (sequence is synthesized)
ctggagccccattgcctgctcattcgtgtttttccccctgtaaattattttgcttttgaccaggttgtgctagaaagtagggctgcttctgtgagttctcagcctaggctgtggccacta

SEQ ID NO: 65726 - DNA, 120 bp, Artificial Sequence
  ENSG00000074706_33 (sequence is synthesized)
agacgtgggtggggggatagacaggagtgagagggagagtgggtgacactttccgtgacacttaatgtaggaagacatgggcttctctctcttggcctcaagccacttttctggtccaaa

SEQ ID NO: 65727 - DNA, 120 bp, Artificial Sequence
  ENSG00000074706_34 (sequence is synthesized)
gaatattgggaaaactggattactttcagtatatttcttgagaccgggtcatctctgaaatgcatttggggtagtttcctggggtccaagggccaattcctatacccagtcctgcagtgt

SEQ ID NO: 65728 - DNA, 120 bp, Artificial Sequence
  ENSG00000074706_35 (sequence is synthesized)
ctgtgagctgtggaatgagagagaaaaccatggctgctcaggaaggaagtggagaatctctcagcacacgtagatccaaatctgtggcacctgctaaagattaggatttggagaggactc

SEQ ID NO: 65729 - DNA, 120 bp, Artificial Sequence
  ENSG00000074706_36 (sequence is synthesized)
ctctttggggttgtgaagaggaccttttccctctgttgttagcctgtagatccagaacggagcctgatgtgatgccttcactggttgatatattgcaaatagacactctgagccctgcat

SEQ ID NO: 65730 - DNA, 120 bp, Artificial Sequence
  ENSG00000074706_37 (sequence is synthesized)
tgcaagggcgtcttttgctttaaagaattcttagttttgccacaacagctcaaatctcagaataggatcaaaggcctagaaagactcctaaagtataggattacaaagactccaggaagc

SEQ ID NO: 65731 - DNA, 120 bp, Artificial Sequence
  ENSG00000074706_38 (sequence is synthesized)
gtaagaaagagattgtgtttggagtcagatttcaatgtgaaacccatgccttacatttacacagcactttgtagtttgcaaattggtgtgttttcagccccctcccgctgccccatgctc

SEQ ID NO: 65732 - DNA, 120 bp, Artificial Sequence
  ENSG00000074706_39 (sequence is synthesized)
tgagatgattgtggattattacagtgaagtgcctggcccggagcccccagtgatgaagcaggaacttgagtctcaggactcccagcggctctctgcccatttcctcctctccgcccccca

SEQ ID NO: 65733 - DNA, 120 bp, Artificial Sequence
  ENSG00000074706_40 (sequence is synthesized)
cctcgcttcacctgttaccttgtgaagttgctgttggcacatagcccactaggaaaccaagaagtttgactgggagcgtgtgtttcattgcactgggcttagcatacggctggccctggt

SEQ ID NO: 65734 - DNA, 120 bp, Artificial Sequence
  ENSG00000074706_41 (sequence is synthesized)
ggctgtttggctaaattctccatttgaaacctaaagggccctctctgtgcttgagcacagtctcctcctagtggtcctgcctcaacctgctggcgggctgtctatggattggggtttcac

SEQ ID NO: 65735 - DNA, 120 bp, Artificial Sequence
  ENSG00000074706_42 (sequence is synthesized)
ctaatcatgctgtgtttcctttcttttctttctgtacattagactacttgggaggtgctgtgtgatccttggatgaaaaacatatatttaaagaaatggagagtgtttattttgtttgct

SEQ ID NO: 65736 - DNA, 120 bp, Artificial Sequence
  ENSG00000074706_43 (sequence is synthesized)
ttttgaggcatgtgctgtcaaatgttagagaccaaacttagtgattagaggttggtcctttgaccttcttctcttaattgcttttcatgtaatcatgataatttactcaggtagcactcc

SEQ ID NO: 65737 - DNA, 120 bp, Artificial Sequence
  ENSG00000074706_44 (sequence is synthesized)
agtcacaaacaatgtcacagagatgaaacagattcaaagaaaaaatatttttaagtcttttgaaaagaagtgctattcaaatttaagacatgtttaaattcataggtacattatctctta

SEQ ID NO: 65738 - DNA, 62 bp, Artificial Sequence
  ENSG00000074706_45 (sequence is synthesized)
tttttttttagctcactgcaacctctgcctccctggttgaagtgattctcctgcctcagcct

SEQ ID NO: 65739 - DNA, 120 bp, Artificial Sequence
  ENSG00000074706_46 (sequence is synthesized)
acaggtgtgagccaccacacctggccgaaagacagtattttgatatagccacatacatgatttaatgagtaatgttaagtacagaaaagctgccatatccacatagttttagggggcatt

SEQ ID NO: 65740 - DNA, 120 bp, Artificial Sequence
  ENSG00000074706_47 (sequence is synthesized)
ccatatccacatagttttagggggcatttcttcttcagtctaacaagaatatgatatccaattgtggttttccaatttatttctcttccaatttcttttgtatacctcacaggagaaatt

SEQ ID NO: 65741 - DNA, 120 bp, Artificial Sequence
  ENSG00000074706_48 (sequence is synthesized)
gaatcctagaactgggagatgactgccctgcccagggttttgtaatacataattgaaaataaaagtccctgaaactaaatgtttgcagcctgtatgaaatggactgtggaagggggataa

SEQ ID NO: 65742 - DNA, 120 bp, Artificial Sequence
  ENSG00000074706_49 (sequence is synthesized)
tttctctcctcacagaaagccactcgtctccttgaatgaggcattgagcagacacacgtttctctgtgtcgtggggcaggaagcaattcccttgcctcttcagcacatctcagttctttc

SEQ ID NO: 65743 - DNA, 120 bp, Artificial Sequence
  ENSG00000074706_50 (sequence is synthesized)
ccacatgaccccagaaccacatagaaaacattgaaaataatggattcttcattgtatttgaattttttttttttaacctttagcccaaaagggaagtgtgcctcgtggaaagagcaaatg

SEQ ID NO: 65744 - DNA, 120 bp, Artificial Sequence
  ENSG00000074706_51 (sequence is synthesized)
ccgtaaaatagaaaccaggagttttaatcgccatatattttaatgtgcttgcatgatgggaatgtgacttttagcactgcatggtgtttgggggcaagatattaatgtggaaatcttagc

SEQ ID NO: 65745 - DNA, 120 bp, Artificial Sequence
  ENSG00000074706_52 (sequence is synthesized)
ttaagttttactgtgctctcatcctgtgtcagctacccctctaaactgaaaaagaggcatggctcatttctctcctgctttatgtttttgaggttgacttgtaagataaaaataaaaata

SEQ ID NO: 65746 - DNA, 120 bp, Artificial Sequence
  ENSG00000074706_53 (sequence is synthesized)
agaaaaaaatatatctaggcaaatgacatgaaaaaaaagttgaaatatactactggtgttcatttttgtcctgcagtgttgctttctcaaagaaataaacatgtggctggaagtgtttaa

SEQ ID NO: 65747 - DNA, 120 bp, Artificial Sequence
  ENSG00000074706_54 (sequence is synthesized)
acatgtagtcttctcactttcttcttgccatgagactgagagagtgctccttgggacggagtttcagagtcatcaactgggctcatgagaaccacaagaaacctacgaaggcactgggac

SEQ ID NO: 65748 - DNA, 120 bp, Artificial Sequence
  ENSG00000074706_55 (sequence is synthesized)
agctcaatgtatattgattctaattagcacattttgtgcctcagctagtagctccccgttaagctctgcctggagagtttttttttagattccatcctgctcataaacactgccacctcc

SEQ ID NO: 65749 - DNA, 120 bp, Artificial Sequence
  ENSG00000074706_56 (sequence is synthesized)
tccctccttctctctttacaaatgttacaacacaatcagaaatttcctcttttctttccttcctgcattttcagcaggttcccttgcgtcagaagcccaggaggaaaactcaaggttttc

SEQ ID NO: 65750 - DNA, 120 bp, Artificial Sequence
  ENSG00000074706_57 (sequence is synthesized)
gactgagtttccagagctgaggctgctttaagtagaatcctcaagcttggcctcagagtactatgaggcttctgaatccaggaataagactgctcttggatttactctctttgtattgca

SEQ ID NO: 65751 - DNA, 120 bp, Artificial Sequence
  ENSG00000074706_58 (sequence is synthesized)
tgtttaatggctgcgttttgatcgtctacaacaaggttacagtgccctctggtggcagtcatcaaaatcgcttctagacttgtttttatttttaaataaaagatctaattatattggaaa

SEQ ID NO: 65752 - DNA, 120 bp, Artificial Sequence
  ENSG00000074706_59 (sequence is synthesized)
gtgaaggtaacatcggaatgtctgagaatttgaagcattatgggttggcaccctacatagaaatagaagcatttaacctctcattttctggaatttcgttttgtggagcagatggatttt

SEQ ID NO: 65753 - DNA, 120 bp, Artificial Sequence
  ENSG00000074706_60 (sequence is synthesized)
agaaaaactggcagtgagtcgggaagtagctgtgtattgaggtgggcattaacccttcaacatctattgcataactacggctgttattgttgagaggagctatgttactgcactgatatg

SEQ ID NO: 65754 - DNA, 120 bp, Artificial Sequence
  ENSG00000074706_61 (sequence is synthesized)
ccttctagcttcgttttctgccatatcttgtaggggtctccacatacttggcccagcctgctccctcagccagagactccccttcacaagttgtgcaccactgatagtttagtgatcctg

SEQ ID NO: 65755 - DNA, 120 bp, Artificial Sequence
  ENSG00000074706_62 (sequence is synthesized)
ccagtttcaattcattaggattcctacaatcaaaattaatcaccactgattttgtgttctcttggtattatgactcacacctcttttgaggaattattttattttccccaagctacgatt

SEQ ID NO: 65756 - DNA, 120 bp, Artificial Sequence
  ENSG00000074706_63 (sequence is synthesized)
tgtcttcttcctgcatattggatgctctttgaggtcaggagccccgaattggccatttgtttctgcctcttatgtaattcctttgcaccaggtagttaccaggtagttcattagatatga

SEQ ID NO: 65757 - DNA, 120 bp, Artificial Sequence
  ENSG00000074706_64 (sequence is synthesized)
atgtttatctgaatccgttgtatttcatgcacgtttgctctgtaaatcccagatccccctcctcaccgccccagtgtttatttacatttccagtttatttatcttccaattttatgttct

SEQ ID NO: 65758 - DNA, 120 bp, Artificial Sequence
  ENSG00000074706_65 (sequence is synthesized)
tctccattttgtgtacgttgagtgtggcttttctccggggtgccttccttgggatcagatttctgtctgtcttaatgctaataagaggaggtggacggcagattaatttttggttattgt

SEQ ID NO: 65759 - DNA, 120 bp, Artificial Sequence
  ENSG00000074706_66 (sequence is synthesized)
tgaatcgattttaagaaatgacgacatgttgttcatttggattaatccctcgtggtatgtcaaaagagcttagaaaaactggcagtgagtcgggaagtagctgtgtattgaggttttctc

SEQ ID NO: 65760 - DNA, 120 bp, Artificial Sequence
  ENSG00000074755_0 (sequence is synthesized)
aggaagccggaagccgcaggggccgccgtcgtctcctccgcgtccccgcccgccagctgctgtcggaggttgacaggtcgaggcggggaggcggcggcggcggctgcagagccaggcgcc

SEQ ID NO: 65761 - DNA, 120 bp, Artificial Sequence
  ENSG00000074755_1 (sequence is synthesized)
caagacggagaccccatggggaacgctccgagtcacagcagtgaagacgaagcggcagctgccggtggcgagggctggggcccacaccaggactgggccgcggtctcgggcacgaccccc

SEQ ID NO: 65762 - DNA, 120 bp, Artificial Sequence
  ENSG00000074755_2 (sequence is synthesized)
ggcccgggcgtcgcggctccagcgctaccacccgccgcggcgctgctggagccggccaggctgcgagaggctgctgcagcgttgctgcccacacccccctgcgagtcgctggtgtcgagg

SEQ ID NO: 65763 - DNA, 120 bp, Artificial Sequence
  ENSG00000074755_3 (sequence is synthesized)
catcgcggcgcgttgtttcgctggctggaagagcggctgggccgcggcgaagagtctgtcactctggagcagttccgggagctgctggaggctcgcggcgccggctgctctagcgagcag

SEQ ID NO: 65764 - DNA, 120 bp, Artificial Sequence
  ENSG00000074755_4 (sequence is synthesized)
ttcgaggaggcctttgcccagtttgatgctgagggtgatgggacagttgatgccgagaacatgttggaggccctcaagaattccagtggagctaatcttcagggggagctgagccacatc

SEQ ID NO: 65765 - DNA, 120 bp, Artificial Sequence
  ENSG00000074755_5 (sequence is synthesized)
atcagacaactacaggcctgctctctggttccaggtttcacagacatattttcagagtcgaaggagggccttgatattcactcgtcaatgatactgcgcttcctgcaccgcaatcggctc

SEQ ID NO: 65766 - DNA, 120 bp, Artificial Sequence
  ENSG00000074755_6 (sequence is synthesized)
tccagcgcggtgatgccctacccgatgctggagcactgcaataacatgtgcaccatgcggtcttccgtcctgaaggagtctctggatcagctggtacaaaaggaaaaggaaagccctgga

SEQ ID NO: 65767 - DNA, 120 bp, Artificial Sequence
  ENSG00000074755_7 (sequence is synthesized)
gatctaactagaagtccagagatggataaactcaagtcagtagcaaagtgctatgcttatatagaaacatcctccaactcggcagacattgacaagatgacaaatggagaaacctcatcc

SEQ ID NO: 65768 - DNA, 120 bp, Artificial Sequence
  ENSG00000074755_8 (sequence is synthesized)
tactggcagtcagatggcagtgcctgttcacactggattcgtttaaaaatgaagccagatgttgtgcttaggcacctgtccattgcagtggctgccactgaccagagctacatgccacag

SEQ ID NO: 65769 - DNA, 120 bp, Artificial Sequence
  ENSG00000074755_9 (sequence is synthesized)
caggtgacagtagctgtagggaggaatgccagcgatcttcaggaagtccgagatgtgcacatccccagcaatgtcactggctatgtgacgctgctggaaaatgccaacgtcagtcagctc

SEQ ID NO: 65770 - DNA, 120 bp, Artificial Sequence
  ENSG00000074755_10 (sequence is synthesized)
tatgtccagattaacataaagcgttgtcttagcgatggctgcgacactagaattcatggtctcagggctgttggctttcagagagttaagaagtctggggtctcagtctcagatgcttct

SEQ ID NO: 65771 - DNA, 120 bp, Artificial Sequence
  ENSG00000074755_11 (sequence is synthesized)
gcaatatggtattggtctctgctgacatctctggtgacggcttctatggagacaaatcccgcctttgtccagacagtgctgcacaatactcagaaggcgctgcggcacatgcctccactc

SEQ ID NO: 65772 - DNA, 120 bp, Artificial Sequence
  ENSG00000074755_12 (sequence is synthesized)
tctctctcaccaggatctacagatttctcaactttcctctcccctaatgtgctggaagaagtggacagtttcctcataaggataactagctgctgttctaccccagaggtagaactgact

SEQ ID NO: 65773 - DNA, 120 bp, Artificial Sequence
  ENSG00000074755_13 (sequence is synthesized)
cttctggcttttgctctcgcaagaggaagtgttgccaaagtcatgagctctctatgcaccatcactgaccatctggacacgcagtatgatgcctcatccctcatcttgtccatggcgtca

SEQ ID NO: 65774 - DNA, 120 bp, Artificial Sequence
  ENSG00000074755_14 (sequence is synthesized)
gtcagacagaacctgctcctcaaatatggtaaacctctccagttgactcttcaggcatgtgatgtcaaaggaaaagaagataagtctggacccgaaaacctccttgttgaaccgtggaca

SEQ ID NO: 65775 - DNA, 120 bp, Artificial Sequence
  ENSG00000074755_15 (sequence is synthesized)
agggatggttttcttacggaaactggaaaaaccagagccagcactattttttctaccggaactgaatctgccttccaagttacacagataagaattatggttcgacgtggtggcattggt

SEQ ID NO: 65776 - DNA, 120 bp, Artificial Sequence
  ENSG00000074755_16 (sequence is synthesized)
gcccagtgtgggttggtgtttgcctataactcatcttcagataaattttgtgcggaagaacacttcaaaaggtttgaaaaatatgacaaatggaagcttcaggagctcaggcaatttgta

SEQ ID NO: 65777 - DNA, 120 bp, Artificial Sequence
  ENSG00000074755_17 (sequence is synthesized)
aaaagcaggattggttgctcatctgatgaccttggagaggatgatcctattggctggtttgaactggaagaagaatgggatgaagcagatgtgaagctgcaacagtgcagagttgccaaa

SEQ ID NO: 65778 - DNA, 120 bp, Artificial Sequence
  ENSG00000074755_18 (sequence is synthesized)
tatttgatggtgaagttcctctgcacccgtcaggagtcagcagagcgcttgggagtgcaaggcttgaccatcagtgggtacctccggcctgcaagagcagaagcagaacagagcgtcacc

SEQ ID NO: 65779 - DNA, 120 bp, Artificial Sequence
  ENSG00000074755_19 (sequence is synthesized)
tgtgcacactgcagaaaggacacagaggagagtgtctgtggggccacgttgctcctcaggacccttcagtttatccagcagctcgcccatgacctggtgcagcagaaggaaagtggctta

SEQ ID NO: 65780 - DNA, 120 bp, Artificial Sequence
  ENSG00000074755_20 (sequence is synthesized)
aaatataaatcttttctggacttcgcgggtcttgatttgcagatcttctggaatttttacagtaaattaaagcaaaacccgagggaagaatgcgtctctgcccaaaccctgcttctgcag

SEQ ID NO: 65781 - DNA, 120 bp, Artificial Sequence
  ENSG00000074755_21 (sequence is synthesized)
ctactccagagctgcttctctgtgctgcagggagatgtactggctgcttctgaggaggaaaaggctccaatccaaagccctaaaggagtagaggctgccaaggagctgtacacacacttg

SEQ ID NO: 65782 - DNA, 120 bp, Artificial Sequence
  ENSG00000074755_22 (sequence is synthesized)
tgtgatgtggtggacaaggtggatggagactctgtgcccatggagatactaaaacaagaagtcaggaatacccttctcaatggggctgccatcttctttcctaatcgacagacccgacgg

SEQ ID NO: 65783 - DNA, 120 bp, Artificial Sequence
  ENSG00000074755_23 (sequence is synthesized)
aaccatctcttcaccatgatgaatgtcaccgagcaggagcacaagcagtccctgcagctcactttccgttcactgtgcacgtattttagtgacaaggatccaggcggccttcttctttta

SEQ ID NO: 65784 - DNA, 120 bp, Artificial Sequence
  ENSG00000074755_24 (sequence is synthesized)
cctgagaagaacgacctggccaagatgaacatcagtgaagtcctggcggtcatggacactctcgtctctgttgctgctcgagagtgcgagctgttaatgctcagtggggccccaggggag

SEQ ID NO: 65785 - DNA, 120 bp, Artificial Sequence
  ENSG00000074755_25 (sequence is synthesized)
gtgggctctgtgctcttctccctgttctggtccgtccaaggcagcctgctatcctggtgctacctgcagctgaagagcacggactctggagccaaagatcttgccgtggaccttattgaa

SEQ ID NO: 65786 - DNA, 120 bp, Artificial Sequence
  ENSG00000074755_26 (sequence is synthesized)
aaatatgtgggccagtttctggcaagcatgagagcgattttggaatcccttttctcacagtacagtggaaaaaccatagtagaaagattatgtaactcagtgttttcaatggcagctcgt

SEQ ID NO: 65787 - DNA, 120 bp, Artificial Sequence
  ENSG00000074755_27 (sequence is synthesized)
caactggttatcttcctgctggacttctgcactttagacatcccacactgcgtgctcttgagagagttcagcgtcctcacagaactcctgaagaagctctgtagtggccccgaaggagga

SEQ ID NO: 65788 - DNA, 120 bp, Artificial Sequence
  ENSG00000074755_28 (sequence is synthesized)
ctgaggaagctggatgttgagacctggcaacaggaacagcctgtggtgttacatacgtggacgaaggaatctgcccacaactatgaaaataattgccatgaggtatccgtctttgttagc

SEQ ID NO: 65789 - DNA, 120 bp, Artificial Sequence
  ENSG00000074755_29 (sequence is synthesized)
ccaggggcaacctattttgaagtggaattcgatgacaggtgtgaaactgaaaaaaggtatgattatctggaatttaccgacgctagaggtcggaaaacacgctatgacacaaaagttggc

SEQ ID NO: 65790 - DNA, 120 bp, Artificial Sequence
  ENSG00000074755_30 (sequence is synthesized)
actgataaatggcccaagaaagtgaccttcaaggccggtcctcggttgcagttcctctttcactctgacagcagtcacaacgaatggggctacaaattcactgtcactgcctgtgggctg

SEQ ID NO: 65791 - DNA, 120 bp, Artificial Sequence
  ENSG00000074755_31 (sequence is synthesized)
cccgatgttgccgtgtcttgggggctggatttacagctcctcgtctcccggctgatgggacgcctggcttcccagtgcatggcgctcaagtctgtgcgccagttaggaagtaacatggta

SEQ ID NO: 65792 - DNA, 120 bp, Artificial Sequence
  ENSG00000074755_32 (sequence is synthesized)
gtacctcaggcaaaaatggcattagtcctaagctccccactgtggaaacctgtcttcaggcatcaggtttgtccagagttggaattagaagcaagctggcccactcacccacaccggaat

SEQ ID NO: 65793 - DNA, 120 bp, Artificial Sequence
  ENSG00000074755_33 (sequence is synthesized)
agtaaggaggttaagaacattcctgacgacccctgccgccattttcttcttgattttgcccagtcagagcctgctcagaacttctgtgggccatattcagaacttttcaaaggattcata

SEQ ID NO: 65794 - DNA, 120 bp, Artificial Sequence
  ENSG00000074755_34 (sequence is synthesized)
caggcatgtagaaaacaggccccaaagacagatatagttgctggttccactattgatcaagctgtgaacgccacctttgctgctctggtgtatcgcactccagatttatatgagaagctg

SEQ ID NO: 65795 - DNA, 120 bp, Artificial Sequence
  ENSG00000074755_35 (sequence is synthesized)
caaaaatatgtcaacagtgggggcaaaatagccctgagtgaagagtttgcccaggtttattccttggcagatgggattcgaatatggatgttagagatgaagcagaagtccctgatgagc

SEQ ID NO: 65796 - DNA, 120 bp, Artificial Sequence
  ENSG00000074755_36 (sequence is synthesized)
ctggggaatgaagcagaagaaaaacatagttcagaagctactgaggtgaaccctgagagcctggcaaaagagtgcattgagaagagtcttctattactaaaatttctgcccacgggcata

SEQ ID NO: 65797 - DNA, 120 bp, Artificial Sequence
  ENSG00000074755_37 (sequence is synthesized)
agttcaaaagaaagctgcgaaaagttggagactgctgatgaaaccagtcatctccagccactcaacaagcgtcagaggacaagctctgtggtggaagagcatttccaagcctcagtatct

SEQ ID NO: 65798 - DNA, 120 bp, Artificial Sequence
  ENSG00000074755_38 (sequence is synthesized)
cccactgaagccgcaccccctgccacaggagaccagagtcctggcctgggcacccagccaaagctgccatccagcagtggccttcctgctgcagacgtgtcccctgccacagctgaagag

SEQ ID NO: 65799 - DNA, 120 bp, Artificial Sequence
  ENSG00000074755_39 (sequence is synthesized)
cccttgtcaccttccacacccacccgccggcctcccttcacccgagggcgactccggctgctctcctttcgatccatggaggaggccagactggtgcccacagtgaaagagaaataccct

SEQ ID NO: 65800 - DNA, 120 bp, Artificial Sequence
  ENSG00000074755_40 (sequence is synthesized)
gtgctgaaggacgtcatggacttcattaaggatcagtcgctctcgcacaggagtgttgtgaaggttctttccctgaggaaagcccaggcccagagcatcctggaagtcctgaagataact

SEQ ID NO: 65801 - DNA, 120 bp, Artificial Sequence
  ENSG00000074755_41 (sequence is synthesized)
cagcactgtgcagaatcccttgggcagccccactgcttccatccacctttcatacttttcctgttggaacttctgacctgtcagaaagattttaccaattattttggacacctggaaggc

SEQ ID NO: 65802 - DNA, 120 bp, Artificial Sequence
  ENSG00000074755_42 (sequence is synthesized)
tgtggtgctgatctacacaaagaaattcgagacacttactatcaacttgttctgtttttggtcaaagcagttaaaggatttagtagcctaaatgacaggtccttgctccctgccttatcc

SEQ ID NO: 65803 - DNA, 120 bp, Artificial Sequence
  ENSG00000074755_43 (sequence is synthesized)
tgtgttcagacagccctgcttcatcttttggatatgggctgggaacccaatgatctcgccttctttgttgatattcagttaccagatctcctcatgaaaatgtcacaggagaatataagt

SEQ ID NO: 65804 - DNA, 120 bp, Artificial Sequence
  ENSG00000074755_44 (sequence is synthesized)
gtccatgacagtgtgatcagccaatggagtgaagaagatgagcttgctgatgccaagcagaattcagaatggatggatgagtgtcaggatggcatgtttgaggcctggtatgaaaaaata

SEQ ID NO: 65805 - DNA, 120 bp, Artificial Sequence
  ENSG00000074755_45 (sequence is synthesized)
gcccaggaagatccagagaagcagaggaaaatgcacatgttcattgctcgctactgtgacctgttaaatgtggacatctcttgtgatgggtgtgatgagattgccccctggcatcgatac

SEQ ID NO: 65806 - DNA, 120 bp, Artificial Sequence
  ENSG00000074755_46 (sequence is synthesized)
cgctgtctgcagtgcagcgacatggatctctgcaaaacttgcttcctaggtggggtgaagcctgagggccacggagacgaccatgaaatggtcaacatggagtttacctgtgaccactgc

SEQ ID NO: 65807 - DNA, 120 bp, Artificial Sequence
  ENSG00000074755_47 (sequence is synthesized)
tgctatgcagcgaagaaatactcctacggccatttgcctacccacagcatcacggcccacccaatggtaaccattcggatcagtgaccggcagaggctcatccagccatatatccataac

SEQ ID NO: 65808 - DNA, 120 bp, Artificial Sequence
  ENSG00000074755_48 (sequence is synthesized)
tactcctggctgctctttgctgccctggctctctatagcgcccacctggccagtgcagaggatgtggatggggagaagctggacccccagacgcgcagcagtgccaccaccctgcggagc

SEQ ID NO: 65809 - DNA, 120 bp, Artificial Sequence
  ENSG00000074755_49 (sequence is synthesized)
cagtgcatgcagctcgtcggggactgtctgatgaaggctcatcagggaaaaggccttaaagctctagctttgctgggtgtattgccagatggggactcgagcctagaagatcaggcccta

SEQ ID NO: 65810 - DNA, 120 bp, Artificial Sequence
  ENSG00000074755_50 (sequence is synthesized)
ccagtcactgtgcccaccggagcgtcagaggagcagctagagaagaaagctgtccagggtgctgagctgtcagaagcaggcaatggaaagagagctgttcatgaggaaatcagacctgta

SEQ ID NO: 65811 - DNA, 120 bp, Artificial Sequence
  ENSG00000074755_51 (sequence is synthesized)
gatttcaagcagagaaataaggcagataaaggtgtatcattatcgaaggatccttcatgccagacccaaatttcagattcacctgcagatgctagcccacctacaggacttccagatgct

SEQ ID NO: 65812 - DNA, 120 bp, Artificial Sequence
  ENSG00000074755_52 (sequence is synthesized)
gaagattcagaagtgtcatctcagaagcccatagaggaaaaagcagttactccaagccctgagcaagtgtttgctgagtgttcccagaagaggattttgggattactagcagccatgtta

SEQ ID NO: 65813 - DNA, 120 bp, Artificial Sequence
  ENSG00000074755_53 (sequence is synthesized)
cctcccttaaagtcgggccccacggttcccctgatagacctggagcacgtccttccactcatgtttcaggttgtcatctcaaacgcaggccacctgaatgaaacctaccatctcaccctg

SEQ ID NO: 65814 - DNA, 120 bp, Artificial Sequence
  ENSG00000074755_54 (sequence is synthesized)
ggtcttctcggccagttaattatccgtcttttgccagcagaggtagacgccgcagtgatcaaagtcctctcagccaaacacaacctgtttgctgcaggggacagttccattgtgccagat

SEQ ID NO: 65815 - DNA, 120 bp, Artificial Sequence
  ENSG00000074755_55 (sequence is synthesized)
ggctggaaaaccacccacctgctctttagcctgggagctgtgtgtctggacagccgggtgggcttggactgggcgtgctccatggcagagatcctgcggtcactcaacagtgccccactg

SEQ ID NO: 65816 - DNA, 120 bp, Artificial Sequence
  ENSG00000074755_56 (sequence is synthesized)
tggcgtgatgtcattgccaccttcacagaccactgcatcaagcagctgccattccagctgaagcacaccaacatcttcaccctgctcgtgctggttggcttcccccaggtcctctgtgtg

SEQ ID NO: 65817 - DNA, 120 bp, Artificial Sequence
  ENSG00000074755_57 (sequence is synthesized)
ggaacccgctgcgtttatatggataatgccaatgaaccccataatgtgatcatcttgaagcactttactgagaagaacagggctgtgattgttgatgtcaaaactcggaagaggaaaaca

SEQ ID NO: 65818 - DNA, 120 bp, Artificial Sequence
  ENSG00000074755_58 (sequence is synthesized)
gtgaaggactaccagctggtccagaagggaggaggacaagagtgtggtgactctcgggcccagctgagccagtactcccagcactttgcctttatcgccagtcaccttctgcaaagcagc

SEQ ID NO: 65819 - DNA, 120 bp, Artificial Sequence
  ENSG00000074755_59 (sequence is synthesized)
atggacagccattgtcccgaggcagtagaagcaacttgggtcctgtccctggccctgaaaggattgtataaaacactaaaggctcacggttttgaggagatccgtgctactttccttcag

SEQ ID NO: 65820 - DNA, 120 bp, Artificial Sequence
  ENSG00000074755_60 (sequence is synthesized)
accgatttgctgaagttgctggtgaaaaagtgcagcaaagggactggctttagtaaaacgtggctcctccgggacctggaaattttgtccatcatgctgtactcctcaaaaaaggagatc

SEQ ID NO: 65821 - DNA, 120 bp, Artificial Sequence
  ENSG00000074755_61 (sequence is synthesized)
aacgctttggctgagcacggagacctagagctggatgagcgaggggaccgagaggaagaggtggaacggccagtcagcagccctggcgacccagagcagaaaaagctggacccccttgag

SEQ ID NO: 65822 - DNA, 120 bp, Artificial Sequence
  ENSG00000074755_62 (sequence is synthesized)
ggcctggatgagcccaccagaatatgtttcttgatggctcatgatgccctcaatgcccctctgcacattctccgggccatatacgaactgcagatgaaaaagaccgattatttcttcctg

SEQ ID NO: 65823 - DNA, 120 bp, Artificial Sequence
  ENSG00000074755_63 (sequence is synthesized)
gaggttcagaagaggtttgatggtgatgagctcaccacagatgaaaggatacggtccctggctcagcggtggcagcccagtaagagtctgaggctggaagaacagagcgccaaagctgtg

SEQ ID NO: 65824 - DNA, 120 bp, Artificial Sequence
  ENSG00000074755_64 (sequence is synthesized)
gatacagacatgattatcctgccatgcttgtcccggcctgcacgctgtgaccaagccactgctgaatcgaaccctgtgacccagaagctgatctccagcacagagagcgaactgcagcag

SEQ ID NO: 65825 - DNA, 120 bp, Artificial Sequence
  ENSG00000074755_65 (sequence is synthesized)
agctatgccaagcagcgccgtagcaagagcgccgccctcctgcacaaggagctgaactgcaagagtaagagggctgtccgggactacctcttccgagtgaacgaggccacagctgtcctg

SEQ ID NO: 65826 - DNA, 120 bp, Artificial Sequence
  ENSG00000074755_66 (sequence is synthesized)
tacgcccgccacgtgcttgcatccctgctcgccgagtggcctagccacgtgccagtgagcgaggacatcctggagctcagtggccctgcccatatgacctacattttggatatgttcatg

SEQ ID NO: 65827 - DNA, 120 bp, Artificial Sequence
  ENSG00000074755_67 (sequence is synthesized)
cagctggaagaaaagcatgagtgggagaagatcctgcagaaagtgctccagggctgccgagaggacatgctggggaccatggccctggctgcatgccagttcatggaggagccaggaatg

SEQ ID NO: 65828 - DNA, 120 bp, Artificial Sequence
  ENSG00000074755_68 (sequence is synthesized)
gaggtgcaagtgagggagtcgaaacacccgtataacaacaacaccaacttcgaggataaagttcacattcctggtgccatctacctctcaatcaaattcgactctcagtgcaacacagag

SEQ ID NO: 65829 - DNA, 120 bp, Artificial Sequence
  ENSG00000074755_69 (sequence is synthesized)
gagggctgtgacgagttagccatgtccagcagcagtgacttccagcaagaccgacacagcttcagcgggtctcagcagaagtggaaagattttgaacttccaggagacactctgtattac

SEQ ID NO: 65830 - DNA, 120 bp, Artificial Sequence
  ENSG00000074755_70 (sequence is synthesized)
cgcttcacctccgacatgagcaacaccgagtggggctacagattcaccgtgacggccggacacctggggcggttccagacaggattcgagattttgaagcagatgttgtcagaagaaagg

SEQ ID NO: 65831 - DNA, 120 bp, Artificial Sequence
  ENSG00000074755_71 (sequence is synthesized)
gtcgtgcctcatctcccattggcaaaaatttgggaatggctggtgggcgtggcctgtcgccagactggccatcaacgattaaaagccatccacttacttctgaggattgtgcgatgctgc

SEQ ID NO: 65832 - DNA, 120 bp, Artificial Sequence
  ENSG00000074755_72 (sequence is synthesized)
ggccacagtgacctgtgtgaccttgcgctgttgaagcccctgtggcagctctttacccacatggagtacggcctgtttgaggacgtgacgcagcccggcatcctccttcccctgcatcgt

SEQ ID NO: 65833 - DNA, 120 bp, Artificial Sequence
  ENSG00000074755_73 (sequence is synthesized)
gccctcactgagctcttcttcgtcaccgagaaccgtgcccaggagcttggcgtgctgcaggattacctgctggccctaaccacggacgaccaccttctccgctgtgcggcacaggctctg

SEQ ID NO: 65834 - DNA, 120 bp, Artificial Sequence
  ENSG00000074755_74 (sequence is synthesized)
cagaacattgctgccatcagcctggccatcaactacccaaacaaggccacccgcctctggaatgtggagtgttagcccttggtggggcgtgcatgggactagttcatctgccacagggat

SEQ ID NO: 65835 - DNA, 120 bp, Artificial Sequence
  ENSG00000074755_75 (sequence is synthesized)
tttagagcagacatctaacctcattcaggaaaactcctgtagcgccagtgcccagctctccttgagctgaccactccagttaggatgccaagcagccacgtctccaagagctcccgtgcg

SEQ ID NO: 65836 - DNA, 120 bp, Artificial Sequence
  ENSG00000074755_76 (sequence is synthesized)
taggctggacacaagcacaggctgtagcatggtgaaaataagccaagcagtgcagaatgcctcagaaagggtgggcagggggcccttaagaaggttcagagaccagccttctccagaggc

SEQ ID NO: 65837 - DNA, 120 bp, Artificial Sequence
  ENSG00000074755_77 (sequence is synthesized)
tgtcactgcaggagccgtgggcctgggaagacttggaagcggcctctctcaactggtttctgtctccgtggagctggaactgcctgcacttgccttcagagggaggcacagtccacccag

SEQ ID NO: 65838 - DNA, 120 bp, Artificial Sequence
  ENSG00000074755_78 (sequence is synthesized)
atccacctttccagcaagacccccagtggctgcccagcctgggagcacctctttgcttttcacaccaaaccaaaactggcgagagcccctcctagccaccagtgatccccaagcatccag

SEQ ID NO: 65839 - DNA, 120 bp, Artificial Sequence
  ENSG00000074755_79 (sequence is synthesized)
tacagaaccaggcatcgagctagctccctgcacggccgcaccctcccagagaactccttgaggagaacaagtgcccttggggacagccggcaggcgcccctgtacgtctgctcatgcacc

SEQ ID NO: 65840 - DNA, 120 bp, Artificial Sequence
  ENSG00000074755_80 (sequence is synthesized)
aggcagcacagccgcagttcctcagttgttgttttgacatatttcagtttccacctcacgtttttagagcagaaccacactgtctccctggaggggctcgagggcatgaccggggactga

SEQ ID NO: 65841 - DNA, 120 bp, Artificial Sequence
  ENSG00000074755_81 (sequence is synthesized)
ccattctgtgaaaggagcagaatgtgaggagcacgcgtgagcttatgtaccgtgaagatgatcagaggatatcttattttaagagtaaaaacccacataattttatttctgcttgatagt

SEQ ID NO: 65842 - DNA, 120 bp, Artificial Sequence
  ENSG00000074755_82 (sequence is synthesized)
catggtagtctgtcatacccacctctgggactctgcgtggctgtttggctgtcacttgtagcaataacgacattagttctagtcagtgctgttttacatttttcttttgatgggtttagt

SEQ ID NO: 65843 - DNA, 120 bp, Artificial Sequence
  ENSG00000074755_83 (sequence is synthesized)
cttgccctggagtgccgatgatgattctccctccagagccacgcttgggaacatgaagcaagtctggcgtgtgggctgcgtgccggccttagtgggacccgtggggttggagcatgcctt

SEQ ID NO: 65844 - DNA, 120 bp, Artificial Sequence
  ENSG00000074755_84 (sequence is synthesized)
taggggcagtgtctgggccgaagcacgtcccaccacacagtgccagagccagagaaggggccccaccaccaaggccaagcttgaccaggtcagcattgccatggcccagtgtgccccgtg

SEQ ID NO: 65845 - DNA, 120 bp, Artificial Sequence
  ENSG00000074755_85 (sequence is synthesized)
gcctctgaagatccctctgtgcagggtctgcagggatctggattgcaagggcccaagtctgcaggtctggaagcatcttcctataagagcactttcgccttctgggtcaggactccaagg

SEQ ID NO: 65846 - DNA, 120 bp, Artificial Sequence
  ENSG00000074755_86 (sequence is synthesized)
tgcagcgggcttcacagccctacaattgggttctcagctaagccccagagttctggtagaaccatcccggggcgggtggagggtgggatttaagggagacgggaacacatggggcaggtc

SEQ ID NO: 65847 - DNA, 120 bp, Artificial Sequence
  ENSG00000074755_87 (sequence is synthesized)
ctggaacttggtggcctgaggactgaggccattgccctggtggaaaggcctggcctggttcctgtggcttgggacctgaataggcaggtgctgctggctccgtagaaacccttttcccat

SEQ ID NO: 65848 - DNA, 120 bp, Artificial Sequence
  ENSG00000074755_88 (sequence is synthesized)
cttttgctctttgccaaacctaccttgctttgggagctgcctgcaccaccccagagaaggccccaccttcttcatccctcagacccgaggaggcctcccagtaaggagtttcccaagagg

SEQ ID NO: 65849 - DNA, 120 bp, Artificial Sequence
  ENSG00000074755_89 (sequence is synthesized)
ggactcacaggaaacaagtcttagtgcttgggagggaggccccgctgcgtgctcagactcacagccaacctggaaggtagacgagatagcgccacccacgcccctccacaccccagactc

SEQ ID NO: 65850 - DNA, 120 bp, Artificial Sequence
  ENSG00000074755_90 (sequence is synthesized)
cgagtaaagcgggcggtagggccggagtcacctcccctatggcagtggccgccgctgtactccatcctcccgtcaggaagatcagctgtaaataaacgctgggctccccagagcacctgt

SEQ ID NO: 65851 - DNA, 120 bp, Artificial Sequence
  ENSG00000074755_91 (sequence is synthesized)
ccgcccactgcccttgctgttctgggatcttcgctgcagttcacgggaaacaagcctgagtccgctcgcacccgcggctgctctcccggctcggcccggccgcctctgtctccggccacc

SEQ ID NO: 65852 - DNA, 120 bp, Artificial Sequence
  ENSG00000074755_92 (sequence is synthesized)
gggtggcgctgccgagccagagccgccgcgtcccggcgctttccaggagccccaggcccggaggaggcgaagcccgcagagcaaaggtggaaacacgtgcctacgctgtaaagaaatcct

SEQ ID NO: 65853 - DNA, 120 bp, Artificial Sequence
  ENSG00000074755_93 (sequence is synthesized)
gttccagagcatacctgttgtacaaacagacactgttcctaacgagaggagtgacgtattttcatcaccgtttttaatttgttttcttacgggtttacgattttgaatttttcttatttg

SEQ ID NO: 65854 - DNA, 120 bp, Artificial Sequence
  ENSG00000074755_94 (sequence is synthesized)
gttgaaagaattttgattctatcagcctgagtgagttcagcctgtaaaaaggatgttaagctgtgggtaaaatatgcaaacgaaaagaaatatattgtacaaattctatataataaggta

SEQ ID NO: 65855 - DNA, 120 bp, Artificial Sequence
  ENSG00000074755_95 (sequence is synthesized)
ccttggtcctcgctcctctaaccacctgccctctatcccaccttggtgtttatttgtttaagttgaaggtctggctgttgattaatttcggtgtgctacagttgtgttgtctgagagttt

SEQ ID NO: 65856 - DNA, 120 bp, Artificial Sequence
  ENSG00000074755_96 (sequence is synthesized)
tgtggaaatagaattaggttcatgagcaatgctgtcaacccacattaaaactgtgcttaacaccaacgttaaaacagctgagcagtctcgacactggctgctgattcaactctctaatga

SEQ ID NO: 65857 - DNA, 120 bp, Artificial Sequence
  ENSG00000074755_97 (sequence is synthesized)
ggcatattctgtttttaatgagcggtaagtgtgggccttgaggttgaagcaaataaatctgttttcgttgtaaaagtaacataaccacaacaccaaatttggaaaacagaaatgaaggaa

SEQ ID NO: 65858 - DNA, 120 bp, Artificial Sequence
  ENSG00000074755_98 (sequence is synthesized)
ataggcacagctgagcagcctctagaaggctcccttgattttatcagtgggcttgccaacaagggtgaatgtcagtccaagtcgatgtggcctggtcagcattagaaaggagacgcagag

SEQ ID NO: 65859 - DNA, 120 bp, Artificial Sequence
  ENSG00000074755_99 (sequence is synthesized)
cgagactccgtctcaaaaaaaaaaaagaaaggagacgcagaaaaagctgtagagatgaatctcatcattttatagttgatgaagttatataaaaaccatgtaagtgagtgacaaaattga

SEQ ID NO: 65860 - DNA, 120 bp, Artificial Sequence
  ENSG00000074755_100 (sequence is synthesized)
aaaccatgtaagtgagtgacaaaattgaagtctagaagagaaaatgtatgttgaaaggcaaattacattttgtctttagaagaaatttctcccttacttaattatacatacataacgttt

SEQ ID NO: 65861 - DNA, 120 bp, Artificial Sequence
  ENSG00000074755_101 (sequence is synthesized)
atgagtgggagaaggccaatccacctgcttggctggggactccttcaaggaccaggaccctttatgattggttcagttagttctttcagaccacctctaagtagcatcattctgaaagga

SEQ ID NO: 65862 - DNA, 120 bp, Artificial Sequence
  ENSG00000074755_102 (sequence is synthesized)
caccaggttcttcctctgccccacaggcttcctccagtgagtgcttcctggagcgaggctacctgtgtggctgtgcagctccctgacaggtgtgaatgcagcaaaggtagggtcactgta

SEQ ID NO: 65863 - DNA, 120 bp, Artificial Sequence
  ENSG00000074755_103 (sequence is synthesized)
tcctctcccaaggattgggctagtgaggaactcaggggccctgagcgcgatttccagctgaaccagaaagctttgtcgccatcttcccagtttccaagtgcagaaatcttgaggcacatt

SEQ ID NO: 65864 - DNA, 120 bp, Artificial Sequence
  ENSG00000074755_104 (sequence is synthesized)
cggtagctcctttttgatcctgtccctcacccaccttcacacacacacacgcagtccatgaggaagttcatttggcctctcagccttgctttgtccatctgagaacaccaccagacctcg

SEQ ID NO: 65865 - DNA, 120 bp, Artificial Sequence
  ENSG00000074755_105 (sequence is synthesized)
aggtcttttcccggccttgcagccctgcaggtgctggcaggcttgctctagcatatctatctttcggaagggacagagggagccaccctgcctctactaggcccttgcataggcgtgtcc

SEQ ID NO: 65866 - DNA, 120 bp, Artificial Sequence
  ENSG00000074755_106 (sequence is synthesized)
tggtggagttggttttgggtggtggagtcacagaggctcgtcctaggtctaagatgatgccagcacctttgggtggagcttgggttgaagtaaactgtcccttcttcctgatgccacttg

SEQ ID NO: 65867 - DNA, 120 bp, Artificial Sequence
  ENSG00000074755_107 (sequence is synthesized)
agcccggtgcctccatgtgcgtttgctccctctgctacccagggcagaagctgctgcctcatccgagcctgagtggccagggtctcgacaggccacacaggacaggcatggctgagagtc

SEQ ID NO: 65868 - DNA, 120 bp, Artificial Sequence
  ENSG00000074755_108 (sequence is synthesized)
tgaggctctcgcctctcccaggcctgggaaaccctcaggtcagctctgagattgcttattttgtcaggcctagagccaatgggggagaaactgcccgggatcagcccttgacaacagtga

SEQ ID NO: 65869 - DNA, 120 bp, Artificial Sequence
  ENSG00000074755_109 (sequence is synthesized)
gttttggaaaataaaacgatgggttatttctgcttccttctctttttttcctcccctcagcacaatagactgattgaatgtgggagctgaaagggcctttcagagttctttagcttccct

SEQ ID NO: 65870 - DNA, 120 bp, Artificial Sequence
  ENSG00000074755_110 (sequence is synthesized)
ctcctttcacacatgaggaaactggcttgaggaggggtcccggcctggtcacccaagggcaggtggaggcaaaggtgaccccggcaccgggcacctggctcccgccagggttctgagcaa

SEQ ID NO: 65871 - DNA, 120 bp, Artificial Sequence
  ENSG00000074755_111 (sequence is synthesized)
ggcagtgccacgcggtgctgggcggcgtgagtagcgtccgcccatgagaggcttctgctttcgcaagcaggtgtcccaggtggtctgggagagctgcactgcgcatctggcgctgtcact

SEQ ID NO: 65872 - DNA, 120 bp, Artificial Sequence
  ENSG00000074755_112 (sequence is synthesized)
cacagcccctgctctctctctgcaggagcttggcgtgctgcaggattacctgctggccctaaccacggacgaccaccttctccgctgtgcggcacaggtactctctccaccccaacagag

SEQ ID NO: 65873 - DNA, 120 bp, Artificial Sequence
  ENSG00000074755_113 (sequence is synthesized)
ctggcccccaggctggggcgccaccatctcaccattgccagggcagagaaggtctgtacattgcgtctgagtaggacagaatccacccggagcttacacagagcttgttccagttcagtc

SEQ ID NO: 65874 - DNA, 120 bp, Artificial Sequence
  ENSG00000074755_114 (sequence is synthesized)
acttcctcctggtgctcagagagcatgcacgagccccatttatcagagtcattcactctaaactgtggggtcagaagaatttgtgtctttaaaaccaaaacaaccgatgccttaaattta

SEQ ID NO: 65875 - DNA, 120 bp, Artificial Sequence
  ENSG00000074755_115 (sequence is synthesized)
gtttggctgattcttgaagtttccgtggagttagatttcacatatttttagatgtgagttgcttctctggtagcggaactcctcttctgacagctgtttggtctcaggacgcttcacact

SEQ ID NO: 65876 - DNA, 120 bp, Artificial Sequence
  ENSG00000074755_116 (sequence is synthesized)
tttcactgactgaggagctcagaaagcttttggatatgtctattatgcatatatccatatgtgccattagaaacgagattttcaatttaaaaattaagcaaaagtgtaaacctttatcaa

SEQ ID NO: 65877 - DNA, 120 bp, Artificial Sequence
  ENSG00000074755_117 (sequence is synthesized)
tttatttttttaaagtagtgaacccatttcatgttaacatgaataacacgtcttgtgaaaaacgactctaacttttcaaaacaaagtaattactgagtgctctgggacaaataggtgacc

SEQ ID NO: 65878 - DNA, 120 bp, Artificial Sequence
  ENSG00000074755_118 (sequence is synthesized)
atatttctttggggttttagtgttttataatttcctttgaagttacagtcgtagtgtaggtgttatagtccatgttttggtgcttacaattttatatgctttttaaactacccatataat

SEQ ID NO: 65879 - DNA, 120 bp, Artificial Sequence
  ENSG00000074755_119 (sequence is synthesized)
gttcctcaattataacctgtggcagcttttgctatattgtcttctcagttttgagttcagttgatcaataccgtattgaagcactgttaatggttcttgtctgcgtcctcccctggcctc

SEQ ID NO: 65880 - DNA, 120 bp, Artificial Sequence
  ENSG00000074755_120 (sequence is synthesized)
taggagttagaagcatcaccgagttccagctgcttctgccctgtgcacactcctttagtacagtgttgaaaactcccttgcttctgtattccctgttggaaatagggattatgacacctg

SEQ ID NO: 65881 - DNA, 120 bp, Artificial Sequence
  ENSG00000074755_121 (sequence is synthesized)
tctacccctgtcagggaaaatgaatttaatgtttgttcaaagaacagtggaagagaagcattttatggaaacacatgattaaccattatatcatggtaataaagtatacccttgaattca

SEQ ID NO: 65882 - DNA, 120 bp, Artificial Sequence
  ENSG00000074755_122 (sequence is synthesized)
ataataataataaaagaaggaaaaaagtcaccctgacttgcaccattttaatacatctggtgctgtctcactacattttcttctgtgtttgaatatgagtgtgcatgtgcacacacacag

SEQ ID NO: 65883 - DNA, 120 bp, Artificial Sequence
  ENSG00000074755_123 (sequence is synthesized)
gtgatttttatagatatttttggaaacacagccgtagggtgagtatgtaagtaacaagtcttgattttgtttgctcttttactcaccattatacgaaaagcattattctggtagttttta

SEQ ID NO: 65884 - DNA, 120 bp, Artificial Sequence
  ENSG00000074755_124 (sequence is synthesized)
agctagttaatgaatggctctttgaaggcttctgggtctgccttggagtgtagtgagctctaacgagttgagtttggagccctgtgtactgcccctaatggagctcttgccttccagccg

SEQ ID NO: 65885 - DNA, 120 bp, Artificial Sequence
  ENSG00000074771_0 (sequence is synthesized)
gagaagaaatttcctgacagccgaagagcaacaagtatcatgatggggtgctggattttgaatgagggtctctccaccatattagtactctcatggctgggaataaatttttatctgttt

SEQ ID NO: 65886 - DNA, 120 bp, Artificial Sequence
  ENSG00000074771_1 (sequence is synthesized)
attgacacgttctactggtatgaagaggaggagtctttccattacacacgagttattttgggttcaacactggcttgggcacgagcatccgcactgtgcctgaattttaactgcatgcta

SEQ ID NO: 65887 - DNA, 120 bp, Artificial Sequence
  ENSG00000074771_2 (sequence is synthesized)
attctaatacctgtcagtcgaaaccttatttcattcataagaggaacaagtatttgctgcagaggaccgtggaggaggcaattagacaaaaacctcagatttcacaaactggtcgcctat

SEQ ID NO: 65888 - DNA, 120 bp, Artificial Sequence
  ENSG00000074771_3 (sequence is synthesized)
gggatagctgttaatgcaaccatccacatcgtggcgcatttcttcaacctggaacgctaccactggagccagtccgaggaggcccagggacttctggccgcactttccaagctgggcaac

SEQ ID NO: 65889 - DNA, 120 bp, Artificial Sequence
  ENSG00000074771_4 (sequence is synthesized)
acccctaacgagagctacctcaaccctgtccggaccttccccacaaacacaaccactgaattgctaaggacaatagcaggcgtcaccggtctggtgatctctctggctttagtcttgatc

SEQ ID NO: 65890 - DNA, 120 bp, Artificial Sequence
  ENSG00000074771_5 (sequence is synthesized)
atgacctcgtcaactgagttcatcagacaggcctcctatgagttgttctggtacacacaccatgttttcatcgtcttctttctcagcctggccatccatgggacgggtcggattgttcga

SEQ ID NO: 65891 - DNA, 120 bp, Artificial Sequence
  ENSG00000074771_6 (sequence is synthesized)
ggccaaacccaagacagtctctctctgcacaacatcaccttctgtagagaccgctatgcagaatggcagacagtggcccaatgccccgtgcctcaattttctggcaaggaaccctcggct

SEQ ID NO: 65892 - DNA, 120 bp, Artificial Sequence
  ENSG00000074771_7 (sequence is synthesized)
tggaaatggattttaggccctgtggtcttgtatgcatgtgaaagaataattaggttctggcgatttcaacaagaagttgtcattaccaaggtggtaagccacccctctggagtcctggaa

SEQ ID NO: 65893 - DNA, 120 bp, Artificial Sequence
  ENSG00000074771_8 (sequence is synthesized)
ccagccatatcttcgctggagtggcaccccttcacccttacctctgccccccaggaggactttttcagcgtgcacatccgggcagcaggagactggacagcagcgctactggaggccttt

SEQ ID NO: 65894 - DNA, 120 bp, Artificial Sequence
  ENSG00000074771_9 (sequence is synthesized)
ggggcagagggacaggccctccaggagccctggagcctgccaaggctggcagtggacgggccctttggaactgccctgacagatgtatttcactacccagtgtgtgtgtgcgttgccgcg

SEQ ID NO: 65895 - DNA, 120 bp, Artificial Sequence
  ENSG00000074771_10 (sequence is synthesized)
gggatcggagtcactcccttcgctgctcttctgaaatctatatggtacaaatgcagtgaggcacagaccccactgaagctgagcaaggtgtatttctactggatttgccgggatgcaaga

SEQ ID NO: 65896 - DNA, 120 bp, Artificial Sequence
  ENSG00000074771_11 (sequence is synthesized)
gcttttgagtggtttgctgatctcttactctccctggaaacacggatgagtgagcaggggaaaactcactttctgagttatcatatatttcttaccggctgggatgaaaatcaggctctt

SEQ ID NO: 65897 - DNA, 120 bp, Artificial Sequence
  ENSG00000074771_12 (sequence is synthesized)
cacatagctttacactgggacgaaaatactgacgtgattacaggcttaaagcagaagaccttctatgggaggcccaactggaacaatgagttcaagcagattgcctacaatcaccccagc

SEQ ID NO: 65898 - DNA, 120 bp, Artificial Sequence
  ENSG00000074771_13 (sequence is synthesized)
agcagtattggcgtgttcttctgtggacctaaagctctctcgaggacacttcaaaagatgtgccacttgtattcatcagctgaccccagaggtgttcatttctattacaacaaggagagc

SEQ ID NO: 65899 - DNA, 120 bp, Artificial Sequence
  ENSG00000074771_14 (sequence is synthesized)
ttctagactttggaggtcaagtccaggcattgtgttttcaatcaagttattgattccaaagaactccaccaggaattcctgtgacggcctgttgatatgagctcccagttgggaactggt

SEQ ID NO: 65900 - DNA, 120 bp, Artificial Sequence
  ENSG00000074771_15 (sequence is synthesized)
gaataataattaactattgtgaacagtacactataccatacttccttagcttataaataacatgtcatatacaacagaacaaaaacatttactgaaattaaaatatattatgtttctcaa

SEQ ID NO: 65901 - DNA, 120 bp, Artificial Sequence
  ENSG00000074800_0 (sequence is synthesized)
agtatctgtgggtacccggagcacggagatctcgccggctttacgttcacctcggtgtctgcagcaccctccgcttcctctcctaggcgacgagacccagtggctagaagttcaccatgt

SEQ ID NO: 65902 - DNA, 120 bp, Artificial Sequence
  ENSG00000074800_1 (sequence is synthesized)
ctattctcaagatccatgccagggagatctttgactctcgcgggaatcccactgttgaggttgatctcttcacctcaaaaggtctcttcagagctgctgtgcccagtggtgcttcaactg

SEQ ID NO: 65903 - DNA, 120 bp, Artificial Sequence
  ENSG00000074800_2 (sequence is synthesized)
gtatctatgaggccctagagctccgggacaatgataagactcgctatatggggaagggtgtctcaaaggctgttgagcacatcaataaaactattgcgcctgccctggttagcaagaaac

SEQ ID NO: 65904 - DNA, 120 bp, Artificial Sequence
  ENSG00000074800_3 (sequence is synthesized)
tgaacgtcacagaacaagagaagattgacaaactgatgatcgagatggatggaacagaaaataaatctaagtttggtgcgaacgccattctgggggtgtcccttgccgtctgcaaagctg

SEQ ID NO: 65905 - DNA, 120 bp, Artificial Sequence
  ENSG00000074800_4 (sequence is synthesized)
gtgccgttgagaagggggtccccctgtaccgccacatcgctgacttggctggcaactctgaagtcatcctgccagtcccggcgttcaatgtcatcaatggcggttctcatgctggcaaca

SEQ ID NO: 65906 - DNA, 120 bp, Artificial Sequence
  ENSG00000074800_5 (sequence is synthesized)
agctggccatgcaggagttcatgatcctcccagtcggtgcagcaaacttcagggaagccatgcgcattggagcagaggtttaccacaacctgaagaatgtcatcaaggagaaatatggga

SEQ ID NO: 65907 - DNA, 120 bp, Artificial Sequence
  ENSG00000074800_6 (sequence is synthesized)
aagatgccaccaatgtgggggatgaaggcgggtttgctcccaacatcctggagaataaagaaggcctggagctgctgaagactgctattgggaaagctggctacactgataaggtggtca

SEQ ID NO: 65908 - DNA, 120 bp, Artificial Sequence
  ENSG00000074800_7 (sequence is synthesized)
ctggctgacctgtacaagtccttcatcaaggactacccagtggtgtctatcgaagatccctttgaccaggatgactggggagcttggcagaagttcacagccagtgcaggaatccaggta

SEQ ID NO: 65909 - DNA, 120 bp, Artificial Sequence
  ENSG00000074800_8 (sequence is synthesized)
gtgggggatgatctcacagtgaccaacccaaagaggatcgccaaggccgtgaacgagaagtcctgcaactgcctcctgctcaaagtcaaccagattggctccgtgaccgagtctcttcag

SEQ ID NO: 65910 - DNA, 120 bp, Artificial Sequence
  ENSG00000074800_9 (sequence is synthesized)
gcgtgcaagctggcccaggccaatggttggggcgtcatggtgtctcatcgttcgggggagactgaagataccttcatcgctgacctggttgtggggctgtgcactgggcagatcaagact

SEQ ID NO: 65911 - DNA, 120 bp, Artificial Sequence
  ENSG00000074800_10 (sequence is synthesized)
ggtgccccttgccgatctgagcgcttggccaagtacaaccagctcctcagaattgaagaggagctgggcagcaaggctaagtttgccggcaggaacttcagaaaccccttggccaagtaa

SEQ ID NO: 65912 - DNA, 120 bp, Artificial Sequence
  ENSG00000074800_11 (sequence is synthesized)
gctgtgggcaggcaagcccttcggtcacctgttggctacacagacccctcccctcgtgtcagctcaggcagctcgaggcccccgaccaacacttgcaggggtccctgctagttagcgccc

SEQ ID NO: 65913 - DNA, 120 bp, Artificial Sequence
  ENSG00000074800_12 (sequence is synthesized)
caccgccgtggagttcgtaccgcttccttagaacttctacagaagccaagctccctggagccctgttggcagctctagctttgcagtcgtgtaattggcccaagtcattgtttttctcgc

SEQ ID NO: 65914 - DNA, 120 bp, Artificial Sequence
  ENSG00000074800_13 (sequence is synthesized)
ctcactttccaccaagtgtctagagtcatgtgagcctcgtgtcatctccggggtggccacaggctagatccccggtggttttgtgctcaaaataaaaagcctcagtgacccatgagaata

SEQ ID NO: 65915 - DNA, 120 bp, Artificial Sequence
  ENSG00000074800_14 (sequence is synthesized)
gaggaacctacagcagagccgttagatcattggcaagtcctccaggcgacctcgcccaagttgggcaagagcggctccccggctggccaccaaaaatcgggcctgatctgatttggtttt

SEQ ID NO: 65916 - DNA, 85 bp, Artificial Sequence
  ENSG00000074800_15 (sequence is synthesized)
gcctgatctgatttggttttttttttttttttgcgcgatctcggatctcggttcaccgcaacctcggcctcctgggttcaagcga

SEQ ID NO: 65917 - DNA, 69 bp, Artificial Sequence
  ENSG00000074800_16 (sequence is synthesized)
atgcgccaccacgcccggctaattttgttttttttttgttgttgttgttgcgacctcaggtgatccgcc

SEQ ID NO: 65918 - DNA, 120 bp, Artificial Sequence
  ENSG00000074800_17 (sequence is synthesized)
ctgggattacaggcgtgagccaccgcgctaggccaagaaggatgtattttaagaaagcttcctgttcaatgttcccctgctctgtgcgcttctctgggcggtggtgttaaaggaagcccc

SEQ ID NO: 65919 - DNA, 120 bp, Artificial Sequence
  ENSG00000074800_18 (sequence is synthesized)
tgttaaaggaagccccttcccttgaagtatcctggtgttcaaagaatctttcctctatttacaaattataaaaccccgttgggaagaaataattagatgtcattattggctggtcctggt

SEQ ID NO: 65920 - DNA, 89 bp, Artificial Sequence
  ENSG00000074800_19 (sequence is synthesized)
gggaagaaataattagatgtcattattggctggtcctggtggcttacccctataatcatcctagcatgctttgggaggccaaggcaggc

SEQ ID NO: 65921 - DNA, 120 bp, Artificial Sequence
  ENSG00000074800_20 (sequence is synthesized)
tgcccagtcctgtcctctctgggtggcacttgcacttgcaggtttatggcaggtaaacctgctgtgacccatgatgttgatggaagcagtgcaccaccttgtggacaggaaagttggtgt

SEQ ID NO: 65922 - DNA, 120 bp, Artificial Sequence
  ENSG00000074800_21 (sequence is synthesized)
gtggattccggggttcccgagcctgcatgctctgggtcgagagttccaatgcttgcttctattgcagtttgttcccaatctgcgaaatactccttcacggttaggacaggaacccaagca

SEQ ID NO: 65923 - DNA, 120 bp, Artificial Sequence
  ENSG00000074800_22 (sequence is synthesized)
agggttctgtgggccctccagagatcatcagcctcttcacgggctagaaaggatccagggaaggtctaaccaatgacctgccctgaatggtgagctgcaggtgtgtcatttagtgtgatt

SEQ ID NO: 65924 - DNA, 120 bp, Artificial Sequence
  ENSG00000074800_23 (sequence is synthesized)
ttcctgttgactgactcataggagccctgctctgtggcagagctagcctctggctgtattcaaattgacttagtgtgtgtgcaacattgacctttctagagatagaacatgtggccaaat

SEQ ID NO: 65925 - DNA, 120 bp, Artificial Sequence
  ENSG00000074800_24 (sequence is synthesized)
tacagaaaagcacatagggctagatcacgcattctcagtggggcacccggaaaactccaaaaaggctgcagggaggggacaatgatgaaatcaggttgtgaaacactgggctggtgtcgc

SEQ ID NO: 65926 - DNA, 120 bp, Artificial Sequence
  ENSG00000074800_25 (sequence is synthesized)
agtggtggtgctgggtgttcagtcccgctttaatgctgtaagaagcactctacacacacgaacatgttaccatttgaccgttgtttaatggcgtacgtggggacttagccggagcaggat

SEQ ID NO: 65927 - DNA, 120 bp, Artificial Sequence
  ENSG00000074800_26 (sequence is synthesized)
gatgctgtgccttgatggtaatgagtgctcagtaagtaagcatttgtggaagattgaacgcatggcccctgaaatgctctcctctgctttcctgccccctcactgtctctcactcgcagt

SEQ ID NO: 65928 - DNA, 120 bp, Artificial Sequence
  ENSG00000074800_27 (sequence is synthesized)
aattgtgaaactccttcctttaagaagaaaatccagtgcctttgtagctctgtgttacctccagcacatggcgcgatggacagagtgggtgaggttggcaaaggagcttcaggcagaatc

SEQ ID NO: 65929 - DNA, 120 bp, Artificial Sequence
  ENSG00000074800_28 (sequence is synthesized)
catttaactccgagaaggcacctcttgaggaacctacagcagagccgttagatcattgacaacaaagccacagaagtgacttcagtaaataattttgaaagttaaaaacctgccacttgc

SEQ ID NO: 65930 - DNA, 120 bp, Artificial Sequence
  ENSG00000074800_29 (sequence is synthesized)
gtggggccccagagcgacgctgagtgcgtgcgggactcggagtacgtgacggagccccgagctctcatgcccgccacgccgccccgggccatcccccggagccccggctccgcacacccc

SEQ ID NO: 65931 - DNA, 120 bp, Artificial Sequence
  ENSG00000074800_30 (sequence is synthesized)
agttcggctcaccggtcctatctggggccagagtttcgcccgcaccactacagggccgctggggagtcggggccccccagatctgcccgcctcaagtccgcgggacgtcacccccctttc

SEQ ID NO: 65932 - DNA, 120 bp, Artificial Sequence
  ENSG00000074800_31 (sequence is synthesized)
cacgctactgcagccgtcgcagtcccacccctttccgggaggtgagggaatgagtgacggctctcccgacgaatggcgaggcggagctgagggggcgtgccccggaggcgggaagtgggt

SEQ ID NO: 65933 - DNA, 120 bp, Artificial Sequence
  ENSG00000074800_32 (sequence is synthesized)
taagaatgagcgtctcctcctttcttctctgacctcaacttcctaggaagacccaaaaccagtgaggctccatgtctgtccccgttttgctcatgtcccctgagtcagtgctcttgtttc

SEQ ID NO: 65934 - DNA, 120 bp, Artificial Sequence
  ENSG00000074800_33 (sequence is synthesized)
atgagttcctggcaccagccctgtgcactcaggtaactgattgaacagcctttagtctgcagttggcgtttccagtgcatggtcttgcaaactaacctccagtcagatcgttctgagcca

SEQ ID NO: 65935 - DNA, 120 bp, Artificial Sequence
  ENSG00000074800_34 (sequence is synthesized)
gctgctgttttgtgtggctctaaccctctggggtcctaggtaggagcactcagactgggccggaaagtcctccgattctggggggaaaggggagagggggaagaggtcccacagaaggtc

SEQ ID NO: 65936 - DNA, 120 bp, Artificial Sequence
  ENSG00000074800_35 (sequence is synthesized)
ccttggtgggcttccgcgtcggcctcaacagtggttctctctaacaatgctgctcaagcctgttttaaagttaatgtcagtaatttgatttgattgttccttccaggtgtctcaaaggct

SEQ ID NO: 65937 - DNA, 120 bp, Artificial Sequence
  ENSG00000074800_36 (sequence is synthesized)
cctgaagaatgtcatcaaggagaaatatgggaaagatgccaccaatgtgggggatgaaggcgggtttgctcccaacatcctggagaataaagaagatggagtctctgtcgcccaggctgg

SEQ ID NO: 65938 - DNA, 120 bp, Artificial Sequence
  ENSG00000074800_37 (sequence is synthesized)
aggagcgtctcccaggcccaggggctttcctgtttatggaagagcttattctgagagctgtagaagcctattggattccctgtcacgcacgagaacaatccatgcatgacataattctaa

SEQ ID NO: 65939 - DNA, 120 bp, Artificial Sequence
  ENSG00000074800_38 (sequence is synthesized)
cctgcccgctgcctcaccccacttttgggagcagatggaattgcatcagaagaatgagacacttcgagccctgaggtttcttcccccctgcaactctctggacctttgaagaaattaaga

SEQ ID NO: 65940 - DNA, 120 bp, Artificial Sequence
  ENSG00000074803_0 (sequence is synthesized)
tacatttcctcagaagaaggctccttggtgctttgaagaacatcctgaagattatatcggagacaatatatcaagaatctatttattgaatcatctagaacaaaagccaggagctcccta

SEQ ID NO: 65941 - DNA, 120 bp, Artificial Sequence
  ENSG00000074803_1 (sequence is synthesized)
atggaagcacattagtgtttattttgatgaagaaatatatagattttttaaaacaaccacaaagtagatagctcagtaaaaaatcaattttggaagatgtcactgaacaactcttccaat

SEQ ID NO: 65942 - DNA, 120 bp, Artificial Sequence
  ENSG00000074803_2 (sequence is synthesized)
gtatttctggattcagtgcccagtaataccaatcgctttcaagttagtgtcataaatgagaaccatgagagcagtgcagctgcagatgacaatactgacccaccacattatgaagaaacc

SEQ ID NO: 65943 - DNA, 120 bp, Artificial Sequence
  ENSG00000074803_3 (sequence is synthesized)
tcttttggggatgaagctcagaaaagactcagaatcagctttaggcctgggaatcaggagtgctatgacaatttcctccaaagtggagaaactgctaaaacagatgccagttttcacgct

SEQ ID NO: 65944 - DNA, 120 bp, Artificial Sequence
  ENSG00000074803_4 (sequence is synthesized)
tatgattctcacacaaacacatactatctacaaacttttggccacaacaccatggatgccgttcccaagatagagtactatcgtaacaccggcagcatcagtgggcccaaggtcaaccga

SEQ ID NO: 65945 - DNA, 120 bp, Artificial Sequence
  ENSG00000074803_5 (sequence is synthesized)
cccagcctgcttgagattcacgagcaactcgcaaagaatgtggcagtcaccccaagttcagctgacagagttgctaacggtgatgggatacctggagatgaacaagctgaaaataaggaa

SEQ ID NO: 65946 - DNA, 120 bp, Artificial Sequence
  ENSG00000074803_6 (sequence is synthesized)
gatgatcaagctggtgttgtgaagtttggatgggtgaaaggtgtgctggtaagatgcatgctgaacatctggggagtcatgctcttcattcgcctctcctggattgttggagaagctgga

SEQ ID NO: 65947 - DNA, 120 bp, Artificial Sequence
  ENSG00000074803_7 (sequence is synthesized)
attggtcttggagttctcataattcttctttccaccatggtaacttctattactgggttgtcaacttctgcgatagcaactaacgggtttgttcgtggaggtggggcctactatcttatt

SEQ ID NO: 65948 - DNA, 120 bp, Artificial Sequence
  ENSG00000074803_8 (sequence is synthesized)
tccagaagtttagggcccgagttcggtgggtcaataggcctgatctttgcttttgctaatgcagtggctgttgctatgtatgtggtgggatttgctgagactgtagtagatcttcttaag

SEQ ID NO: 65949 - DNA, 120 bp, Artificial Sequence
  ENSG00000074803_9 (sequence is synthesized)
gagagtgattcgatgatggtggatccaaccaatgacatccggattataggctccatcacagtggtgattcttctaggaatttcagtagctggaatggaatgggaggcaaaggcccaagtc

SEQ ID NO: 65950 - DNA, 120 bp, Artificial Sequence
  ENSG00000074803_10 (sequence is synthesized)
attcttctggtcattcttctaattgctattgcaaacttcttcattggaactgtcattccatccaacaatgagaaaaagtccagaggtttctttaattaccaagcatcaatatttgcagaa

SEQ ID NO: 65951 - DNA, 120 bp, Artificial Sequence
  ENSG00000074803_11 (sequence is synthesized)
aactttgggccacgcttcacaaagggtgaaggcttcttctctgtctttgccatttttttcccagcagctactgggattcttgctggtgccaatatctcaggagatttggaggatccccaa

SEQ ID NO: 65952 - DNA, 120 bp, Artificial Sequence
  ENSG00000074803_12 (sequence is synthesized)
gatgccatccccagaggaaccatgctggccattttcatcaccactgttgcctacttaggggttgcaatttgtgtaggggcctgtgtggtccgagatgccaccgggaacatgaatgacacc

SEQ ID NO: 65953 - DNA, 120 bp, Artificial Sequence
  ENSG00000074803_13 (sequence is synthesized)
atcatttctgggatgaactgcaatggttcagcagcatgtgggttgggctatgacttctcaagatgtcgacatgaaccatgtcagtacgggctgatgaacaatttccaggtcatgagcatg

SEQ ID NO: 65954 - DNA, 120 bp, Artificial Sequence
  ENSG00000074803_14 (sequence is synthesized)
gtatcagggttcggccccctcatcactgcgggaatcttttctgcaacactctcctccgccctggcctcccttgtcagcgcacccaaagtgttccaggctctgtgcaaggacaacatctac

SEQ ID NO: 65955 - DNA, 120 bp, Artificial Sequence
  ENSG00000074803_15 (sequence is synthesized)
aaagccctgcagttttttgcaaagggatatgggaaaaacaatgaacccctgagaggatatattctcacttttcttatagccatggcatttattcttattgcggaactgaacaccattgct

SEQ ID NO: 65956 - DNA, 120 bp, Artificial Sequence
  ENSG00000074803_16 (sequence is synthesized)
cccatcatctccaactttttcctggcctcatatgcacttattaatttctcctgcttccatgcctcttatgccaaatctccaggatggagacctgcgtatggaatttacaacatgtgggta

SEQ ID NO: 65957 - DNA, 120 bp, Artificial Sequence
  ENSG00000074803_17 (sequence is synthesized)
tctctttttggagctgttttgtgctgtgcagtcatgtttgtcatcaactggtgggcagctgtcatcacctatgtcattgaattcttcctttacgtctatgtgacttgtaagaagccagat

SEQ ID NO: 65958 - DNA, 120 bp, Artificial Sequence
  ENSG00000074803_18 (sequence is synthesized)
gtgaactggggctcctccacacaggctctttcctacgtgagtgctttagacaatgctctggaattaaccacagtggaagaccacgtaaaaaacttcaggccccagtgcattgtcttaaca

SEQ ID NO: 65959 - DNA, 120 bp, Artificial Sequence
  ENSG00000074803_19 (sequence is synthesized)
ctggacataactcacgcctttaccaagaacagtggcctttgcatctgctgtgaagtctttgtgggaccgcgcaaactgtgtgttaaggagatgaacagtggcatggcgaaaaaacaggcc

SEQ ID NO: 65960 - DNA, 120 bp, Artificial Sequence
  ENSG00000074803_20 (sequence is synthesized)
tggcttataaagaacaaaatcaaggctttttatgctgcagtggcggcagactgtttcagggatggtgtccgaagtcttcttcaggcctcaggcttaggaagaatgaaaccaaacactctg

SEQ ID NO: 65961 - DNA, 120 bp, Artificial Sequence
  ENSG00000074803_21 (sequence is synthesized)
gtgattggatataagaaaaactggaggaaagctcccttgacagagattgagaactacgtgggaatcatacatgatgcatttgattttgagattggcgtggttatagtcagaatcagccaa

SEQ ID NO: 65962 - DNA, 120 bp, Artificial Sequence
  ENSG00000074803_22 (sequence is synthesized)
ggatttgacatctctcaggttcttcaggtgcaagaggaattagagagattagaacaggagagactagcattggaagcgactatcaaagataatgagtgtgaagaggaaagtggaggcatc

SEQ ID NO: 65963 - DNA, 120 bp, Artificial Sequence
  ENSG00000074803_23 (sequence is synthesized)
cgaggcttgtttaaaaaagctggcaagttgaacattactaagacaacgcctaaaaaagatggcagcattaacacaagccagtcgatgcatgtgggagagttcaaccagaaactggtggaa

SEQ ID NO: 65964 - DNA, 120 bp, Artificial Sequence
  ENSG00000074803_24 (sequence is synthesized)
gccagcactcaatttaaaaagaaacaagaaaaaggcacaattgatgtttggtggttgtttgatgatggagggttaacacttcttatcccctatatcttaactctcagaaaaaaatggaaa

SEQ ID NO: 65965 - DNA, 120 bp, Artificial Sequence
  ENSG00000074803_25 (sequence is synthesized)
gactgtaaattaagaatctatgtgggagggaagatcaaccgcattgaagaagaaaaaattgtaatggcttcccttctgagcaaatttaggataaaatttgcagacatccatatcatcggt

SEQ ID NO: 65966 - DNA, 120 bp, Artificial Sequence
  ENSG00000074803_26 (sequence is synthesized)
gacatcaacattaggccaaacaaagagagctggaaagtctttgaagagatgattgaaccatatcgtctccatgaaagctgcaaagatttaacaactgctgagaaattaaaaagagaaact

SEQ ID NO: 65967 - DNA, 120 bp, Artificial Sequence
  ENSG00000074803_27 (sequence is synthesized)
ccgtggaaaattacagatgcagaactggaagcagtcaaggaaaagagttaccgccaagttcgactgaatgaactcttacaggagcactccagagctgctaatctcattgtcctgagcctt

SEQ ID NO: 65968 - DNA, 120 bp, Artificial Sequence
  ENSG00000074803_28 (sequence is synthesized)
cccgtggcaagaaagggatccatatcggatttgttgtatatggcttggttggaaatcctcacaaagaacctcccacctgtcttactagttagaggaaatcacaaaaatgtcttgacattt

SEQ ID NO: 65969 - DNA, 120 bp, Artificial Sequence
  ENSG00000074803_29 (sequence is synthesized)
tactcttaaaacatgaaagattggaatacattttaacttaatgtaatgcataattaagaaacatgttccagtactttatgttgtaaatctgatctatggatatgcaaacctctggagagg

SEQ ID NO: 65970 - DNA, 120 bp, Artificial Sequence
  ENSG00000074803_30 (sequence is synthesized)
atcctaccagattctacatacattgcataatttttatcagttaatgcgagcttttttttctcttctcagcttaaggggttgtcaaagccaatgttatccctagaaaaacatttttgtcac

SEQ ID NO: 65971 - DNA, 120 bp, Artificial Sequence
  ENSG00000074803_31 (sequence is synthesized)
tgctgttgataaacaagaaaatcaaggaaactcatgttggcttatgctcatgaaaaccaccaatgtgattgtaaacttctccagacaaacttaaccttttgtttcttaattttttgtttt

SEQ ID NO: 65972 - DNA, 120 bp, Artificial Sequence
  ENSG00000074803_32 (sequence is synthesized)
gagtgtttgcttctcagccctggtataggtctcagccccacagcaggatctcaataaatgcttattgacaggctggcatagtaaccacaggtggttatcaaaggaaaagaccaataggct

SEQ ID NO: 65973 - DNA, 120 bp, Artificial Sequence
  ENSG00000074803_33 (sequence is synthesized)
ggggaacataattatgcttggccccctcagaggcttatacctccaaagcagatttaaaaatcagtaactcaaaactttaagaagtagttgagtctacaaaatattcaaagcagttaccta

SEQ ID NO: 65974 - DNA, 120 bp, Artificial Sequence
  ENSG00000074803_34 (sequence is synthesized)
aataaggttatttaatgtaacagattatatacttaaagtgatctgagcaatcattgataacatatggcttaaatttgctgctgcctgaaaagtatattaactagattagaagacaccata

SEQ ID NO: 65975 - DNA, 120 bp, Artificial Sequence
  ENSG00000074803_35 (sequence is synthesized)
tactccaataaaatgaaatatattctattctcaatatataaactttaattgtactccctatcaaatattttgaaatttccatcacggcattactttgcatatttttttctaattaaatgg

SEQ ID NO: 65976 - DNA, 120 bp, Artificial Sequence
  ENSG00000074803_36 (sequence is synthesized)
ttagtacagatgaaatctttatagatgactacttgaaaactaagtgctacaaattttcaaaccattattaagaaatatatcctgaatcatatatttagttactttctatagtgattgtat

SEQ ID NO: 65977 - DNA, 120 bp, Artificial Sequence
  ENSG00000074803_37 (sequence is synthesized)
ggatttaaaagaataattaaaatgtgaagttgaaaaacttgtaaaatttggaatatacagatactgatttttttcatttttgttagtatacctataatacataatcacattgacaaacca

SEQ ID NO: 65978 - DNA, 120 bp, Artificial Sequence
  ENSG00000074803_38 (sequence is synthesized)
atgaaaatattgattttctgatgaatggcttgatttttctccttgacatgttttgactgttcattctaactgaaaacatatatgggaaaatatgaacctgaaataaaagcactcaaattc

SEQ ID NO: 65979 - DNA, 120 bp, Artificial Sequence
  ENSG00000074803_39 (sequence is synthesized)
agacatttacacttctaggccaggaaagcgctaaccagggccctgtgactctacgcaggttccagaacacgccttctacatttgttactgaaccgatcagcgaacacagacaaacgtgcc

SEQ ID NO: 65980 - DNA, 120 bp, Artificial Sequence
  ENSG00000074803_40 (sequence is synthesized)
ggggagccatgggagctggggtcagggccgctgttgctgcagtcggccctacacctgcctgggagggctggaccagtcctgaaagcccccggtggtggtgccatgtctgcccaccagccc

SEQ ID NO: 65981 - DNA, 120 bp, Artificial Sequence
  ENSG00000074803_41 (sequence is synthesized)
gcctgtcgcttggcaccagtggagtcttcgcttgcaaagcgggattagacatcaaagccctaacacccagactgttcaattcattccaggttccagaacacgccttctacatttgttact

SEQ ID NO: 65982 - DNA, 120 bp, Artificial Sequence
  ENSG00000074803_42 (sequence is synthesized)
cctataaattagattgacaaaagtcagatcaataagagaaaaacagaatttattaacatgtacatggtacatacacatgggaccactcagtgatgagtgacttaaagggttgcttagaac

SEQ ID NO: 65983 - DNA, 120 bp, Artificial Sequence
  ENSG00000074803_43 (sequence is synthesized)
atgggcttatatatcatcttaacaacagaacaattaaatcgtagagaggtgataagacaaaggaaaaggacttttcattcatagggtggcaaatgctgccaaggtaaatatataaggaaa

SEQ ID NO: 65984 - DNA, 120 bp, Artificial Sequence
  ENSG00000074803_44 (sequence is synthesized)
ggaatggaagataagagcttgtcagcaaagcttgttgtgtagatgcctgtggtgcctttgtcaggctgataagcatccaaaattgtctctggtaatcagagacatcactttctggtagag

SEQ ID NO: 65985 - DNA, 120 bp, Artificial Sequence
  ENSG00000074803_45 (sequence is synthesized)
aggggagggaggacaaatttatgtcccgtttttaggtaaataggaagggatcgagagcttttcttgtatctactttttttcggttgtctcagctccaaataatccttatgccagagtgat

SEQ ID NO: 65986 - DNA, 120 bp, Artificial Sequence
  ENSG00000074803_46 (sequence is synthesized)
atattctgatacccttttgtagactcctggctatgtgtttcttgaagctgaaagcagtcacggcttcgttgaattctggcctctaccactttctccctctctttataatcatcaaccttc

SEQ ID NO: 65987 - DNA, 120 bp, Artificial Sequence
  ENSG00000074803_47 (sequence is synthesized)
tgaaccataaaatccttggggcagctttttaaatttcattttatttgtgtcttgtgtttcttacattacctgccacatagctggatatatagtaggtttttaaaaagcagtaagtattat

SEQ ID NO: 65988 - DNA, 120 bp, Artificial Sequence
  ENSG00000074803_48 (sequence is synthesized)
aactactgtgaatatgatcaaaaagcaatatcattgagtgtgtactgtgttccatgtgctatgctagccattttacacatgcattctttctaatttcattgctatttttggctcagttat

SEQ ID NO: 65989 - DNA, 120 bp, Artificial Sequence
  ENSG00000074803_49 (sequence is synthesized)
ttatttatttgaggtgacttatcataataagcaactttccagaattcacacggtcaacaagttaatgtaatttaatttcattctttccactttacccatctgccagatgaataatttgct

SEQ ID NO: 65990 - DNA, 120 bp, Artificial Sequence
  ENSG00000074803_50 (sequence is synthesized)
atactgtatgtagttctccacctctatgtgaccaaatgtacataaaaagatagtaacctggaaggatgaacatttaatctctagttatcttgacagcttggaattgtaggccaattatca

SEQ ID NO: 65991 - DNA, 120 bp, Artificial Sequence
  ENSG00000074803_51 (sequence is synthesized)
ctagttatcttgacagcttggaattgtaggccaattatcatgtttataggtgtctataacttctccaaagatggaattctgtcaggtgcaatagtgcaagcctgtagtcccagctacttg

SEQ ID NO: 65992 - DNA, 120 bp, Artificial Sequence
  ENSG00000074803_52 (sequence is synthesized)
agaccagcctggaaaaaatagcaagactgtctctaaaaataataataataataagatggggtgcacattaaattttgaccagccctagtggctttgttttgtacaacttagttctgcaca

SEQ ID NO: 65993 - DNA, 120 bp, Artificial Sequence
  ENSG00000074803_53 (sequence is synthesized)
ttttagctcttaagtttcttggaaccagagctactacaagcagaaaacttcaaagctaagcatttactccatggtgatttcctagccaacttgttaaactcaaatgtggtcctttgatgt

SEQ ID NO: 65994 - DNA, 120 bp, Artificial Sequence
  ENSG00000074803_54 (sequence is synthesized)
ttaccctagacttgctggtttttatgtaaatgatccaatgaattcttccaccatttaatacctttatttttcctctttcaactgaggtcttggtgtgattatcatcggcttagccgtgac

SEQ ID NO: 65995 - DNA, 120 bp, Artificial Sequence
  ENSG00000074803_55 (sequence is synthesized)
agtgactggtatcactggtttatccacctctgctattgccacaaatggatgtgtcagaggaggtaattaaacttgtgacccgcaccatcatttgtaaggtaaaggcaacacaggctctaa

SEQ ID NO: 65996 - DNA, 120 bp, Artificial Sequence
  ENSG00000074803_56 (sequence is synthesized)
cagttcaccactgacctttctggagtgttttcaaaggtaatgcaagttggtttcttttcccccatcaggcaaagagatgcaagaaaaatggggaaggatttaacctttgtcaaaccccca

SEQ ID NO: 65997 - DNA, 120 bp, Artificial Sequence
  ENSG00000074803_57 (sequence is synthesized)
actttctcattccagttccttcaagcaagaaagaaggtcaaatgtcatgttttctcttttcacagccaggatagtttctctcccaggacaccagcataagtcaacttttcctttccaagt

SEQ ID NO: 65998 - DNA, 120 bp, Artificial Sequence
  ENSG00000074803_58 (sequence is synthesized)
ctgcactttcgattgtgtttacttttggaaaccatccttcatcataatgagcagttctctgacttggtctttatgccaggcaaaccagtttctccttagcacaaagaaaccccgttggag

SEQ ID NO: 65999 - DNA, 120 bp, Artificial Sequence
  ENSG00000074803_59 (sequence is synthesized)
cccgaggcatggacctgaaaacttaagttaaaggcagtgtagtttgcagcaatagggaatccaaggaagaaaagtaaaatgcaatatcttctatctttcattgctaacaggtcttggagt

SEQ ID NO: 66000 - DNA, 120 bp, Artificial Sequence
  ENSG00000074803_60 (sequence is synthesized)
tctcataattcttctttccaccatggtaacttctattactgggttgtcaacttctgcgatagcaactaacgggtttgttcgtggaggtaaaatctctaagatatctaatgccctcatcac

SEQ ID NO: 66001 - DNA, 120 bp, Artificial Sequence
  ENSG00000074803_61 (sequence is synthesized)
ttgctacgggtaggcgaacaattttttatacttctttttgatgggaacaaggaagtagcccgatgttcttgaagcctggctatttggaggagctggatgccaaagaaaacctaaggtacg

SEQ ID NO: 66002 - DNA, 120 bp, Artificial Sequence
  ENSG00000074803_62 (sequence is synthesized)
atgagaatagtccaggtctactctggtctcttttctaatggatctctctggcacattgtaggttatgccttacagatgtgcaccttccttaggtaaactttttctttttcaggctagtct

SEQ ID NO: 66003 - DNA, 120 bp, Artificial Sequence
  ENSG00000074803_63 (sequence is synthesized)
gcacacctctagctgatgttccttggaaactgattccagatttggcttctgttttaacgtttagtacatttcaggtgcttcctagaccttcatgaaatgggatcttttagaacatttcag

SEQ ID NO: 66004 - DNA, 120 bp, Artificial Sequence
  ENSG00000074803_64 (sequence is synthesized)
gttttcacagggaggtggatctttctgtgacaagattcagactgctgcctcctgaagtactggtgacttctctcagtactggaaccaaacacctttcttgggggattttgcaggtcttgg

SEQ ID NO: 66005 - DNA, 120 bp, Artificial Sequence
  ENSG00000074803_65 (sequence is synthesized)
agtcatcatcattggcctaagtgtggtagtaacgacactcacaggtatttctatgtctgctatttgcacgaatggagtagtaagaggaggtaagccaattaatttacttatgactagagg

SEQ ID NO: 66006 - DNA, 120 bp, Artificial Sequence
  ENSG00000074803_66 (sequence is synthesized)
cttggttactagtaatgtctggagttaatttactattggaagtgaaagtaacatattgctaattagtccccagtgtcctaaacaaaataacccaaaatttaaacagcaaagcaaaatttt

SEQ ID NO: 66007 - DNA, 120 bp, Artificial Sequence
  ENSG00000074803_67 (sequence is synthesized)
tctcaactaaaattggaatatcttcattgacatgacccatttcttgtaacaaaacatgtttataaagtggagagtgactatgtgtctagtaagaaggtatggaatattatagcaaaatat

SEQ ID NO: 66008 - DNA, 120 bp, Artificial Sequence
  ENSG00000074803_68 (sequence is synthesized)
atggtttctttgtaccttggatgagacccactggctctctcgcaggtcctctcagcatgggtcttctccaatgccccagatggcattgctgatgattgccactcagtaaaccactcctgc

SEQ ID NO: 66009 - DNA, 120 bp, Artificial Sequence
  ENSG00000074803_69 (sequence is synthesized)
acccaggcctcggggctcaccccaaacgctgtgctcccaatgaccaacaggcaagggaagatcattagaagggaataaacaaataaataagcaaagagttactttcaaataatctaggag

SEQ ID NO: 66010 - DNA, 120 bp, Artificial Sequence
  ENSG00000074803_70 (sequence is synthesized)
taggcaggcctaggcagaaagtgaaatggatgaaatgtattgttgttctgtcttcctttgttccccctccccttcccctttggtttctctggttctctacttcggcaccttatccaggtc

SEQ ID NO: 66011 - DNA, 120 bp, Artificial Sequence
  ENSG00000074803_71 (sequence is synthesized)
ttcctactcagggccttctaaaacatcctgcccacaacacacttccactctcaacttctgcctgtctctcatgttgatccagcccacctaggtaactgactagctcatttgtttaaggtg

SEQ ID NO: 66012 - DNA, 120 bp, Artificial Sequence
  ENSG00000074803_72 (sequence is synthesized)
atctgtataaaggaaataatggggatttgctccacccagacaatatgctacatttttagacaggactttgacccctgagcccaaaagagttactatagtgaaagaaatttctctcagcaa

SEQ ID NO: 66013 - DNA, 120 bp, Artificial Sequence
  ENSG00000074803_73 (sequence is synthesized)
aaagtaattttgttttgtctttaggtatgttggtttgtcattgctgtgccaactctgcctacctccaaagccagctctgtataggaagtcataatcttactatggtctgtgataatcaga

SEQ ID NO: 66014 - DNA, 120 bp, Artificial Sequence
  ENSG00000074803_74 (sequence is synthesized)
cctcctaacatctagtgcttttcaccttcaataagctgccctaggtacccttttggcatttgaccaatctagttcaatccttcatatgcacagaagtatgcaactatatataattaatag

SEQ ID NO: 66015 - DNA, 120 bp, Artificial Sequence
  ENSG00000074803_75 (sequence is synthesized)
aactattttttcaatgtccaagggagaagtaattgttccagaccctccccacttttcttcccacttgcaactcccaaacactgtgctctcagtggccaacaggcaagggacctacttgtc

SEQ ID NO: 66016 - DNA, 120 bp, Artificial Sequence
  ENSG00000074803_76 (sequence is synthesized)
acacccatacatatatgggtatttaggaataatcgtgccttcttgagctaaaaacatagaaaaccaagtttgatttatcgaatgaataatacatcatactctatagatatcttgttttat

SEQ ID NO: 66017 - DNA, 120 bp, Artificial Sequence
  ENSG00000074803_77 (sequence is synthesized)
atgccttctttcactaaaaacatagaaaagcaagtttgatttaaagaatggataatacagatatcttattttatgcagcacatatatattaggaaattgtatatatgtacatatatctat

SEQ ID NO: 66018 - DNA, 120 bp, Artificial Sequence
  ENSG00000074803_78 (sequence is synthesized)
agaaaggaagttagaaaaacaaagataaacttcaactacttcattttctacctagactttcctactcctggaaattttttatataaaattttacttcagttgcattattaatttgaatac

SEQ ID NO: 66019 - DNA, 120 bp, Artificial Sequence
  ENSG00000074803_79 (sequence is synthesized)
tccaatgatatttttataaagacaacgcattttttgtaaattttgctgtgttcttttttgtagcttttttacatttatgttttaatagagtgggctttattaagtcaggatacttctatt

SEQ ID NO: 66020 - DNA, 120 bp, Artificial Sequence
  ENSG00000074803_80 (sequence is synthesized)
gtagattaagtacagagtaccaagaagggctaagttattcactgggtaacacaggattcctaaaattactgggaagttgtaatactgttattgaaataattcacactgtaaatgttctca

SEQ ID NO: 66021 - DNA, 120 bp, Artificial Sequence
  ENSG00000074803_81 (sequence is synthesized)
attcaaactgtaggtttctgcaagatttcctgatgatttaaaagttctctcttttaatgccaaatttggatttatattccagataattcttccaaaagtcttattcagtgatatcagaag

SEQ ID NO: 66022 - DNA, 120 bp, Artificial Sequence
  ENSG00000074803_82 (sequence is synthesized)
aacagggtagtgtgatagtgtgtcatatttccccaaaataaatgtagttcagtgaaaaaaataccagaaccaccctttctcttttaaacccaaatgaataggaatattttcctgtaaaag

SEQ ID NO: 66023 - DNA, 84 bp, Artificial Sequence
  ENSG00000074803_83 (sequence is synthesized)
taatgggactagaggtgcatgccaccacacgcagaatgtggcagtcaccccaagttcagctgacagagttgctaacggtgatgg

SEQ ID NO: 66024 - DNA, 120 bp, Artificial Sequence
  ENSG00000074803_84 (sequence is synthesized)
ctgaggaaacaaggagcttcacctctccctcaaggagctcagagtcgaaggaggagacagacttcccttatatgaattagaacaagcaagagtagaatcaagtgcaaaggaaagaggaag

SEQ ID NO: 66025 - DNA, 120 bp, Artificial Sequence
  ENSG00000074803_85 (sequence is synthesized)
cagaaattgcctgtcccctcaaaaagtaaaggaagactttcagaagaggggacactcaatccaggttttgagggatgaacaggagtttgccgacaggacaaagaagagacggacatttga

SEQ ID NO: 66026 - DNA, 120 bp, Artificial Sequence
  ENSG00000074803_86 (sequence is synthesized)
aacagaaggaatgggatgtaagaaggcaccaagaaagatgctgctaatgagaattattttaagtgcagagtagtgtatgtaatccttcattaatatattaataaacatatttataaataa

SEQ ID NO: 66027 - DNA, 120 bp, Artificial Sequence
  ENSG00000074803_87 (sequence is synthesized)
caataatctgaactttaatcagatcttacattactcttcacagtcaacccagtattgagtttcttgcaaaactgtagagaatgaagaatcctatcttctgctaaacagtttattatgcta

SEQ ID NO: 66028 - DNA, 120 bp, Artificial Sequence
  ENSG00000074803_88 (sequence is synthesized)
aaaattaatattattttaataaagatctttatattgaagtagttaaattatatattagaagagagtaaaattctacctagtaagtgttcaatggattttcctttgaatggaggtttgtgt

SEQ ID NO: 66029 - DNA, 120 bp, Artificial Sequence
  ENSG00000074803_89 (sequence is synthesized)
ctttgaatggaggtttgtgtttttcttttcgtttcttttctttttttaattctcggaagacagactttagtgagtactagaaacttattgtcaaccttactcagttttactggcctttgc

SEQ ID NO: 66030 - DNA, 120 bp, Artificial Sequence
  ENSG00000074803_90 (sequence is synthesized)
tatgaacctaaaacttaatgagttaagtcaccatctgggtcccatttgggttttccttattggggaagaaaagaaacaaacacatctatttgttcttgctttgggggtagattgaggaag

SEQ ID NO: 66031 - DNA, 120 bp, Artificial Sequence
  ENSG00000074803_91 (sequence is synthesized)
aaatctgaatacattttcaagcccagaccctgggaatagagccagaaggaatctggagccaggagtaacagtagctacagcccttgggtaaccattctgggctacgagttttggctgtct

SEQ ID NO: 66032 - DNA, 120 bp, Artificial Sequence
  ENSG00000074803_92 (sequence is synthesized)
tgttcccaaaagcaaagggctgaatgagctgctaatgctgtctagttgttcttctctatcttggagaccttgctggggcaagatggtttccaataaatttaaccatcaagcaaggaagtt

SEQ ID NO: 66033 - DNA, 120 bp, Artificial Sequence
  ENSG00000074803_93 (sequence is synthesized)
aggtgtgaaagccggtatgacctgaagcaagtcacttacattcggtgtttccctttcttttctaaatattaaggagcaggttaattcctacccaatgaattctttgaagataaagctaaa

SEQ ID NO: 66034 - DNA, 120 bp, Artificial Sequence
  ENSG00000074803_94 (sequence is synthesized)
gtacctttctgaacaggcagacacaagttgaaataggctgagggtagcttagttgtcttactgagggatgcataagaattatctgggaagttaggttaggaaactgcagaatcctgggat

SEQ ID NO: 66035 - DNA, 120 bp, Artificial Sequence
  ENSG00000074803_95 (sequence is synthesized)
ttacttttaaagatccaaattcagtaggtctgagcatttttaataagcaccccaggcatttcctgaagcaggtggttcaagaaccacaatttcagaaaacaatgaactgaatgttctcca

SEQ ID NO: 66036 - DNA, 120 bp, Artificial Sequence
  ENSG00000074803_96 (sequence is synthesized)
agctgccttctaccctgggattttatgtttgattatgagagagaagcaaatcccttgctgttcaaaagtataaaactttgttccaagatttcaaatggtttggagaaatatatacaatgc

SEQ ID NO: 66037 - DNA, 120 bp, Artificial Sequence
  ENSG00000074803_97 (sequence is synthesized)
aaaaggatgaattaagaattgttgaaaaaactagagtcaaaaggaaaataacagtgaggaaataataaggttggagtaggtttagtgttatgaaatgcaaattatatggtcctgtagagt

SEQ ID NO: 66038 - DNA, 120 bp, Artificial Sequence
  ENSG00000074803_98 (sequence is synthesized)
ttctggggtatgctaaacattttctatcaagcttcttcaaaacaaagtcaggagcaaaacaagtgcagaataaatcacctttagtggcacaaggacctgaagccacatagtgatacagag

SEQ ID NO: 66039 - DNA, 120 bp, Artificial Sequence
  ENSG00000074803_99 (sequence is synthesized)
gcactgctcaccacagtatccctgcaatagatatgaagaatttggtccaactattttttacaaccccaagcttttaagagtctacagggtctaaagcaatatggtccaagtttgcagcct

SEQ ID NO: 66040 - DNA, 120 bp, Artificial Sequence
  ENSG00000074803_100 (sequence is synthesized)
gtgcttagttagcttcttcccactccaccttaacctgcaaaaaagcctagaggctgctgttagagacagggtatggccaagagcttcaaaagaaccagcctttaataccttgactcattc

SEQ ID NO: 66041 - DNA, 120 bp, Artificial Sequence
  ENSG00000074803_101 (sequence is synthesized)
ccactgctgcccttaacctccttccactttcccttctccttgagcatggccagagagatcacagcctctcgtggctgactacccttctaaccatacttggaacgagagagcctgccaaca

SEQ ID NO: 66042 - DNA, 120 bp, Artificial Sequence
  ENSG00000074803_102 (sequence is synthesized)
actatggagcattcactttacataggggagcttaccaaacagcccagaccagagcattctggatggagccagggtgagttcagtggctgtgactccacagccctctccctgaattctggg

SEQ ID NO: 66043 - DNA, 120 bp, Artificial Sequence
  ENSG00000074842_0 (sequence is synthesized)
gtctacccgcccctgccctgaggaccctagtccaacatggcggcgcccagcggagggtggaacggcgtcggcgcgagcttgtgggccgcgctgctcctaggggccgtggcgctgaggccg

SEQ ID NO: 66044 - DNA, 120 bp, Artificial Sequence
  ENSG00000074842_1 (sequence is synthesized)
gcggaggcggtgtccgagcccacgacggtggcgtttgacgtgcggcccggcggcgtcgtgcattccttctcccataacgtgggcccgggggacaaatatacgtgtatgttcacttacgcc

SEQ ID NO: 66045 - DNA, 120 bp, Artificial Sequence
  ENSG00000074842_2 (sequence is synthesized)
tctcaaggagggaccaatgagcaatggcagatgagtctggggaccagcgaagaccaccagcacttcacctgcaccatctggaggccccaggggaagtcctatctgtacttcacacagttc

SEQ ID NO: 66046 - DNA, 120 bp, Artificial Sequence
  ENSG00000074842_3 (sequence is synthesized)
aaggcagaggtgcggggcgctgagattgagtacgccatggcctactctaaagccgcatttgaaagggaaagtgatgtccctctgaaaactgaggaatttgaagtgaccaaaacagcagtg

SEQ ID NO: 66047 - DNA, 120 bp, Artificial Sequence
  ENSG00000074842_4 (sequence is synthesized)
catcgcgcactgagctgtgaccagcagccctgttgcgggtggcaccttctcatctccggtgaagctgaaggggcctgtgtccctgaaagggccagcacatcactggttttctaggaggga

SEQ ID NO: 66048 - DNA, 120 bp, Artificial Sequence
  ENSG00000074842_5 (sequence is synthesized)
ctcttaagttttctacctgggctgacgttgccttgtccggaggggcttgcagggtggctgaagccctggggcagagaacagagggtccagggccctcctggctcccaacagcttctcagt

SEQ ID NO: 66049 - DNA, 120 bp, Artificial Sequence
  ENSG00000074842_6 (sequence is synthesized)
tcccacttcctgctgagctcttctggactcaggatcgcagatccggggcacaaagagggtggggaacatgggggctatgctggggaaagcagccatgctccccccgacctccagccgagc

SEQ ID NO: 66050 - DNA, 120 bp, Artificial Sequence
  ENSG00000074842_7 (sequence is synthesized)
atccttcatgagcctgcagaactgctttcctatgtttacccaggggacctcctttcagatgaactgggaagagatgaaatgttttttcatatttaaataaataagaacattaaaaagcaa

SEQ ID NO: 66051 - DNA, 120 bp, Artificial Sequence
  ENSG00000074842_8 (sequence is synthesized)
cggaaagatggggatggggtagaggtgacgccacccccatccaagggtgggcaatcggggcagtttggagaggggggtcagccataggggtcctggagactgtagaccaggcatccacaa

SEQ ID NO: 66052 - DNA, 120 bp, Artificial Sequence
  ENSG00000074842_9 (sequence is synthesized)
actgattctataaaggccacctcgtcaatatcttcagctttgtggcactgtgggttctgtctagagctgtgccattgtggcacaaagctgctgcagacagtatgtccatgcgtgggtgtg

SEQ ID NO: 66053 - DNA, 120 bp, Artificial Sequence
  ENSG00000074842_10 (sequence is synthesized)
ccattggacagatggggaaactgaggcctagaagctggggatttacaagatcccaagaactctgccagaggtccctgcgtcaaagctcgagcgggtgtgattccagggaggtcatctgct

SEQ ID NO: 66054 - DNA, 120 bp, Artificial Sequence
  ENSG00000074842_11 (sequence is synthesized)
gaggggtgtcgggagatgctgggaaggggcaggcatgctgtggaactgggccgttcctgcctctcgctctgcctccttgccctgctccccgtctgtaacacctgagctgtacctgggcaa

SEQ ID NO: 66055 - DNA, 120 bp, Artificial Sequence
  ENSG00000074842_12 (sequence is synthesized)
gggcgctgagattgagtacgccatggcctacgtgagtatcttggagtggggcaggctccgggtgtggcttctgtgcactggggcagctgtgagatgtcctgccacaagagggctccatgg

SEQ ID NO: 66056 - DNA, 120 bp, Artificial Sequence
  ENSG00000074855_0 (sequence is synthesized)
gaatcgaggttcggctcgggcggggacgagaagcagcgctcgggcgagcgaggaccgaggccggcgcgggcgggcgcggcctttgtctcctcctcccgcgcgctccgcggctgcaccggc

SEQ ID NO: 66057 - DNA, 120 bp, Artificial Sequence
  ENSG00000074855_1 (sequence is synthesized)
tgagcccgcggctccccgtcgcccgggccgtccgtagcccctgacctgacctgtcctcgccatggccgaggccgcctccggcgccgggggcacgtccctggagggcgagcgtggcaagag

SEQ ID NO: 66058 - DNA, 120 bp, Artificial Sequence
  ENSG00000074855_2 (sequence is synthesized)
agaggcccccgccggagggcgagcctgcagccccggcgtccggagttctggataagcttttcggaaagcggctcctgcaggctggtcgctacctggtgtcccacaaggcgtggatgaaga

SEQ ID NO: 66059 - DNA, 120 bp, Artificial Sequence
  ENSG00000074855_3 (sequence is synthesized)
cggtgcctacagagaactgcgacgtgctgatgaccttcccagacacgaccgatgaccacacgctgctatggctgctgaaccacatccgcgtgggcattcccgagctcatcgtgcaagtcc

SEQ ID NO: 66060 - DNA, 120 bp, Artificial Sequence
  ENSG00000074855_4 (sequence is synthesized)
gccaccaccgccacacgcgtgcctacgccttctttgtcaccgccacgtatgagagcctactccgaggggccgacgagctgggtctgcgcaaagcagtgaaggccgagtttggcgggggca

SEQ ID NO: 66061 - DNA, 120 bp, Artificial Sequence
  ENSG00000074855_5 (sequence is synthesized)
cccgcggcttctcctgcgaggaggactttatctatgagaatgtggagagcgagctacgcttcttcacctcccaggaacgccagagcatcatccgcttctggctgcagaatttgcgtgcca

SEQ ID NO: 66062 - DNA, 120 bp, Artificial Sequence
  ENSG00000074855_6 (sequence is synthesized)
agcagggagaagcactccacaacgtgcgcttcctggaggaccagccaatcatcccggagctggcagcacgtgggatcatccagcaggtgttccctgtccacgagcagcgtattctgaacc

SEQ ID NO: 66063 - DNA, 120 bp, Artificial Sequence
  ENSG00000074855_7 (sequence is synthesized)
gcctcatgaagtcatgggtgcaggccgtgtgtgaaaaccagcctctagatgacatctgtgattactttggtgtgaaaattgccatgtacttcgcctggctgggcttctacacgtcggcta

SEQ ID NO: 66064 - DNA, 120 bp, Artificial Sequence
  ENSG00000074855_8 (sequence is synthesized)
tggtatacccagctgtcttcgggtctgtcctgtacacattcacagaggctgatcagacaagccgggatgtttcctgcgtggtctttgccctcttcaacgtgatctggtcgacgctgttcc

SEQ ID NO: 66065 - DNA, 120 bp, Artificial Sequence
  ENSG00000074855_9 (sequence is synthesized)
tagaggaatggaagcggagaggggctgagctggcatataagtgggggacgctggactcacctggggaagccgtggaggagccacgcccccagttcaggggcgtgcgacgtatcagcccca

SEQ ID NO: 66066 - DNA, 120 bp, Artificial Sequence
  ENSG00000074855_10 (sequence is synthesized)
tcacgcgggccgaggagttctactacccgccctggaagcggctgctcttccagctgcttgtgagcctccccctgtgcctggcgtgcctcgtctgtgtcttcttgctcatgcttggctgct

SEQ ID NO: 66067 - DNA, 120 bp, Artificial Sequence
  ENSG00000074855_11 (sequence is synthesized)
tccagctgcaggagctggtgctgagcgtgaaggggttgccccgtctcgcccgattcctgcctaaggtcatgctggccctgcttgtcagtgtgagtgccgagggctacaagaagctagcca

SEQ ID NO: 66068 - DNA, 120 bp, Artificial Sequence
  ENSG00000074855_12 (sequence is synthesized)
tctggctcaatgacatggaaaattaccggctggagagcgcctatgagaagcacctcatcatcaaagttgtcctgttccagtttgtcaactcgtacctgagcctcttctacatcggtttct

SEQ ID NO: 66069 - DNA, 120 bp, Artificial Sequence
  ENSG00000074855_13 (sequence is synthesized)
acctcaaggacatggagcgcttgaaagagatgctggccacgctgctgatcacccgccagttcctccagaacgtgcgcgaggtcctgcagccgcacctgtaccggcgcctgggccgcggcg

SEQ ID NO: 66070 - DNA, 80 bp, Artificial Sequence
  ENSG00000074855_14 (sequence is synthesized)
agctgggcctgcgggccgtctgggagctggcccgagccctgcttggcctcctgagcctccggcgccctgcgccccgccgc

SEQ ID NO: 66071 - DNA, 120 bp, Artificial Sequence
  ENSG00000074855_15 (sequence is synthesized)
gggcgccggaggaggaggaggaggcggcgctggtggagcggcggcgggcgggggaaggcggggaggagggggacgggcctccagggggcaaggaggaggacgaggacgacgaggaggagg

SEQ ID NO: 66072 - DNA, 120 bp, Artificial Sequence
  ENSG00000074855_16 (sequence is synthesized)
ggggcaaggaggaggacgaggacgacgaggaggaggaggacgaggaggaagaggaggacgaggaggagggcgaggaagggggcctcctggactgcgggctccggctgaagaaggtcagct

SEQ ID NO: 66073 - DNA, 120 bp, Artificial Sequence
  ENSG00000074855_17 (sequence is synthesized)
ggagtgttcaccctggccgaggaggacgacgaggcggagggggctcccggcagccctgaacgggagcccccggccatcttgttccgccgggccgggggcgagggccgagaccaggggccc

SEQ ID NO: 66074 - DNA, 120 bp, Artificial Sequence
  ENSG00000074855_18 (sequence is synthesized)
gacgggggcccggacccggaacccggctccaacagcgattcgacccgtaggcagagacggcagaaccggtcgtcttggattgacccgccggaggaggaacactcgccccagctcacccag

SEQ ID NO: 66075 - DNA, 120 bp, Artificial Sequence
  ENSG00000074855_19 (sequence is synthesized)
gcagagctggagagctgtatgaagaagtacgaggacacgttccaggactaccaggagatgttcgtgcagttcggctacgttgtgctcttctcgtccgccttccccctggcggcgctgtgc

SEQ ID NO: 66076 - DNA, 120 bp, Artificial Sequence
  ENSG00000074855_20 (sequence is synthesized)
gccctggtcaacaacctcattgagatccgcagcgacgccttcaagctgtgcaccgggctgcagcggcccttcggccagcgcgtggaaagcatcggccagtggcagaaggtgatggaggcc

SEQ ID NO: 66077 - DNA, 120 bp, Artificial Sequence
  ENSG00000074855_21 (sequence is synthesized)
atgggtgtcctagcgattgtggtcaactgctacttaatcggccagtgcgggcagctgcagcgcctcttcccctggctgagcccggaggcagccatcgtgtcggtggtagtgctcgagcac

SEQ ID NO: 66078 - DNA, 120 bp, Artificial Sequence
  ENSG00000074855_22 (sequence is synthesized)
ttcgctctgctcctcaagtacctcatccacgtggccatccccgatatcccgggctgggtggccgaggaaatggccaagctggagtaccagcgccgcgaggcctttaagagacacgagcgc

SEQ ID NO: 66079 - DNA, 120 bp, Artificial Sequence
  ENSG00000074855_23 (sequence is synthesized)
caggcccagcatcgctaccagcagcagcagcgcaggcggcgggaggaggaggagcgacagcgccatgcagagcaccatgcccggcgggagcatgattctggtggccgagaggaggcgagg

SEQ ID NO: 66080 - DNA, 120 bp, Artificial Sequence
  ENSG00000074855_24 (sequence is synthesized)
gccgagggctctgggctggaccctgccacctcctccgagaaggcctctgccaaggccaagggcagcactgcgggtggccacgggcctgaacggcccaagcgcccagggtccctgctggca

SEQ ID NO: 66081 - DNA, 120 bp, Artificial Sequence
  ENSG00000074855_25 (sequence is synthesized)
cccaacaacgtcatgaagttgaagcagatcatcccactgcagggcaaattcctctcgtcaggggccacatcctcactggctgctgcaggggccggagccaccacccggcctccccctgcc

SEQ ID NO: 66082 - DNA, 120 bp, Artificial Sequence
  ENSG00000074855_26 (sequence is synthesized)
cagtcacccacaggcagcgacacccgcctgcctgccttcctcagcttcaagttcctcaagtcacccgagacccggcgggactctgagcgcagccactcaccgcccaaagccttccatgct

SEQ ID NO: 66083 - DNA, 120 bp, Artificial Sequence
  ENSG00000074855_27 (sequence is synthesized)
ggcaagctcttcccctttggtggcacccgggctgagcctgggtccaacggggcgggcgggcaggcccggccagatgggacccccagcagtggcagcagccgggttcagaggagtgggccg

SEQ ID NO: 66084 - DNA, 120 bp, Artificial Sequence
  ENSG00000074855_28 (sequence is synthesized)
aggagtgggccggtggacgaggccctggctgaggagctggaagccccccggcccgaagaggaaggctcagggacagcgctggcccccgtgggcgcccctgccctccgcacccgccgcagc

SEQ ID NO: 66085 - DNA, 120 bp, Artificial Sequence
  ENSG00000074855_29 (sequence is synthesized)
gagtgcccaccctgtgccatggccgggcccccacccgccccccagcccctgccgggagacgccagcttttacagcctcccgcccccaccgctaccgcccacctcggatcccctcgagacc

SEQ ID NO: 66086 - DNA, 120 bp, Artificial Sequence
  ENSG00000074855_30 (sequence is synthesized)
ccagcgccctcccctagccccagccccagcccccaggccgtgtgctggcccagcggctggcattagctctacccgccctgccttctcttctcatatgcaatatcagtcattcacaggggc

SEQ ID NO: 66087 - DNA, 120 bp, Artificial Sequence
  ENSG00000074855_31 (sequence is synthesized)
ggccggtctccaaaatgcaaaatgcgcttcagcccccgagggcccccagtattggtcggtgccccccatctgccgttttcctttccaaacgaaaggaaacccacaaatccaacagaaaac

SEQ ID NO: 66088 - DNA, 85 bp, Artificial Sequence
  ENSG00000074855_32 (sequence is synthesized)
aggcgattatttatttgtttttaatttattttgtcatatttttgtaaaacggcagaaatgcaataaaaactatatttcaacagtg

SEQ ID NO: 66089 - DNA, 120 bp, Artificial Sequence
  ENSG00000074855_33 (sequence is synthesized)
atggagcgcttgaaagagctcctgctcgtcctgtccctgtcccagagcctcgagcggcagctgcaggcggtgctggtcccgctcgcggccctgcggttccgcctgctcctcctctccctc

SEQ ID NO: 66090 - DNA, 120 bp, Artificial Sequence
  ENSG00000074855_34 (sequence is synthesized)
ctcgcggcccgggccaaagtacgggcaggtggcgagcccgtgggtcctcgccggggtgggcagcgtggctgtgctgggggcctggcgcgccgagctgagggcgcatgcgcggagggaatc

SEQ ID NO: 66091 - DNA, 120 bp, Artificial Sequence
  ENSG00000074855_35 (sequence is synthesized)
gagggcgcatgcgcggagggaatctggggtcgggggcggccagcaagcaggtgcaggcggctgggggcgcacgcggcccagtgcaccgacagagcccgcggtggggtggagacgcgctgg

SEQ ID NO: 66092 - DNA, 120 bp, Artificial Sequence
  ENSG00000074855_36 (sequence is synthesized)
gctctcctgagctcggcttcccagaacgggaatacgtaggaggccttgggccccctcgtggcaggagccatcggtccctgtgccccttggcagacacgaccgatgaccacacgctgctat

SEQ ID NO: 66093 - DNA, 120 bp, Artificial Sequence
  ENSG00000074855_37 (sequence is synthesized)
cctggcctctcgctgagcctgccacccgactccccgctctaccaagtgccaaccatgctatccagccgccctgcgtttgtcccaaaggctgccaggtgcaccatcctcagctccaggatg

SEQ ID NO: 66094 - DNA, 120 bp, Artificial Sequence
  ENSG00000074855_38 (sequence is synthesized)
tgtgtctgggcacggtgctccggcggggcgcccagggagggtgagtcccccgatcccggcgccccgcttgccccccacgcgcctctctccttccccttcctgcccccagatgctggccac

SEQ ID NO: 66095 - DNA, 120 bp, Artificial Sequence
  ENSG00000074935_0 (sequence is synthesized)
agaagcggccgcgggctagcaagctcccggagccggcggcgcaccaccatgacccagtcggtggtcgtacaggtcggccagtgcggaaaccagatcggctgctgcttctgggacctggca

SEQ ID NO: 66096 - DNA, 120 bp, Artificial Sequence
  ENSG00000074935_1 (sequence is synthesized)
ctaagggagcacgccgcggtcaaccagaaaggaatttatgatgaggcaataagcagcttctttagaaatgtggacaccagagtggttggtgatggtggaagtatttccaagggaaaaata

SEQ ID NO: 66097 - DNA, 120 bp, Artificial Sequence
  ENSG00000074935_2 (sequence is synthesized)
tgttctttaaaagcacgagcagtcttgattgatatggaagaaggggtagtgaatgaaattctgcagggaccactgagagatgtatttgatacgaaacagctcatcactgatatttctggc

SEQ ID NO: 66098 - DNA, 120 bp, Artificial Sequence
  ENSG00000074935_3 (sequence is synthesized)
tcaggaaataattgggccgtgggtcacaaagttttcggcagtctttaccaagaccagattttagagaaattcagaaagtcggcagagcactgtgattgcttgcagtgtttctttataata

SEQ ID NO: 66099 - DNA, 120 bp, Artificial Sequence
  ENSG00000074935_4 (sequence is synthesized)
cattccatgggaggaggaacaggatctggacttggcacatttcttttaaaggtgcttgaagacgaattcccagaagtatacagatttgtgacttccatttatccttctggtgaggatgat

SEQ ID NO: 66100 - DNA, 120 bp, Artificial Sequence
  ENSG00000074935_5 (sequence is synthesized)
gtcataacctcaccttataatagcatcttggcaatgaaggaacttaatgagcatgcagactgtgtattgcccattgacaatcaatctttatttgacatcattagcaaaatcgacctcatg

SEQ ID NO: 66101 - DNA, 120 bp, Artificial Sequence
  ENSG00000074935_6 (sequence is synthesized)
gtgaattctggaaagttgggtacaactgtgaagccaaagagtctggttacttcaagttctggggctttaaaaaagcagcataagaagccctttgatgcaatgaataacattgtggcaaat

SEQ ID NO: 66102 - DNA, 120 bp, Artificial Sequence
  ENSG00000074935_7 (sequence is synthesized)
ttgctcctcaacctaacgagctctgcaagatttgaagggtcccttaatatggaccttaatgaaatcagcatgaatttagttccttttcctcaacttcattatctcgtgtcaagcctaaca

SEQ ID NO: 66103 - DNA, 120 bp, Artificial Sequence
  ENSG00000074935_8 (sequence is synthesized)
cctctgtatacactgacagatgttaacattcctcctagaagattggatcagatgttttcagatgcctttagtaaagatcaccagctgcttcgggcagaccccaaacacagtctttacctc

SEQ ID NO: 66104 - DNA, 120 bp, Artificial Sequence
  ENSG00000074935_9 (sequence is synthesized)
aaaaccatctctacaatttgtctcctggaatcaagaaggctggaagaccagcctgtgttccgtacctcctgtgggccattctcattcgttattagctttagcaaataacacatgtgtgaa

SEQ ID NO: 66105 - DNA, 120 bp, Artificial Sequence
  ENSG00000074935_10 (sequence is synthesized)
gcccaccttcatggaactgaaagagagattcatgaggctctacaagaaaaaggctcaccttcatcactatctacaagttgaagggatggaagaaagctgtttcacagaagctgtgtcatc

SEQ ID NO: 66106 - DNA, 120 bp, Artificial Sequence
  ENSG00000074935_11 (sequence is synthesized)
tttatcagcactcatacaggaatatgaccaactggacgccacaaaaaacatgcctgtgcaggatttacccagactaagcatagctatgtgaaaaagaaaccctcaaaaatactttcttaa

SEQ ID NO: 66107 - DNA, 120 bp, Artificial Sequence
  ENSG00000074935_12 (sequence is synthesized)
tttcacattgttttttctgacctttctgtttcaacatttttgtaatttggaaactccagttttttcatattatcgggaaatatttttgtctaaaagagtgatttctgtttaatcgcaatt

SEQ ID NO: 66108 - DNA, 120 bp, Artificial Sequence
  ENSG00000074935_13 (sequence is synthesized)
tgttggtaataccaatgtgtgaaattagtgaaatcttagtaccttaacttcaaacatttctcttcagaaaagttcccttttctaaaattgagataacatagttcttgaatattttgctgt

SEQ ID NO: 66109 - DNA, 120 bp, Artificial Sequence
  ENSG00000074935_14 (sequence is synthesized)
tgagataacatagttcttgaatattttgctgtatttatagcctcatatttaggcatttatgcactgatgtgtcttcaataaaaatcttgtacagatatatttttataattatttataatt

SEQ ID NO: 66110 - DNA, 120 bp, Artificial Sequence
  ENSG00000074935_15 (sequence is synthesized)
ttctttaaaagtagttattgggagtagaagaacacaatataaatatttccgtgtaatagccaccaacttttcaggcataggttttattacaactgttaaggaggttttgcttcttcttta

SEQ ID NO: 66111 - DNA, 120 bp, Artificial Sequence
  ENSG00000074935_16 (sequence is synthesized)
gataacaacttgtttgcccaaaagaatcctaatttgtacacttaacatgtatttgtattaaactttttaaataattgctttcttatcaaaccaattgattttataataaatgtctatatt

SEQ ID NO: 66112 - DNA, 120 bp, Artificial Sequence
  ENSG00000074935_17 (sequence is synthesized)
tttcaacagtgctacttgttattgttctgcatgacatttatgcaaatgaacagaatgttactaagcttgatatcttccaaactttgcaataaatggctataattgttccggttactataa

SEQ ID NO: 66113 - DNA, 120 bp, Artificial Sequence
  ENSG00000074935_18 (sequence is synthesized)
ggaggaggtaaaatttttcactcatttgcctgtaacagtgttaaaggataagtgggaattcattttgcaaacgtaagtcttgtttttagacctgtgcttgataaagatagaactattcgg

SEQ ID NO: 66114 - DNA, 120 bp, Artificial Sequence
  ENSG00000074935_19 (sequence is synthesized)
tgtgcttgataaagatagaactattcggagggtgtgtagtttgagtatataaacatacacctttttatcttaaaattttgtggaattatgtcactattttcttttcttttcttttttttt

SEQ ID NO: 66115 - DNA, 120 bp, Artificial Sequence
  ENSG00000074935_20 (sequence is synthesized)
atggaatcagaccaaaggaagttagttactttaatggctggtatcatttatatttattttatggagatatctgtcatatagactatagattccctcttatttgtagcccacaatatcctc

SEQ ID NO: 66116 - DNA, 120 bp, Artificial Sequence
  ENSG00000074935_21 (sequence is synthesized)
acctctaaattctcttaggagactcaaatttgcttctgtcatacttcctttccggcgcttctcttgctaagttcctacacccacctctttacttcttgttacccaacgcttacattgagt

SEQ ID NO: 66117 - DNA, 120 bp, Artificial Sequence
  ENSG00000074935_22 (sequence is synthesized)
attacatagttgagactcagcctgggagcttttctttcttcataaggtgactcttcataactacactctcatctactctgtgtgttttatactttaacctgagagcactattattttccc

SEQ ID NO: 66118 - DNA, 120 bp, Artificial Sequence
  ENSG00000074935_23 (sequence is synthesized)
aggaaataatcgacttgagctttcatctgacccgtttaagatgcatgggatcttcccagtaaagaacgtactggtttttaaacatgttgcgtcagacacacactaaactaaaagaacact

SEQ ID NO: 66119 - DNA, 120 bp, Artificial Sequence
  ENSG00000074935_24 (sequence is synthesized)
ggccagcgaccttagtcttaacgtttttcctgattctcagggtctcctctttattggtgttcgtgtgcagaacagtgagatttgtatatgggaaagtactttgtaaaatagataacacgt

SEQ ID NO: 66120 - DNA, 120 bp, Artificial Sequence
  ENSG00000074935_25 (sequence is synthesized)
gtggttattgtattccttaatttaaccagtcagcttttaaaaagattacgaagaatccagagaacgctcatttgatggacctgtcctacagtcctatgggtgaaatcctttctttagcac

SEQ ID NO: 66121 - DNA, 120 bp, Artificial Sequence
  ENSG00000074935_26 (sequence is synthesized)
tgtattttttaaataactattctcagtaactatcatgagaataaaactttaaacttttcaaagtagaaaaaaattactaagccacatttaatataaatataactaagcagacatttgtgt

SEQ ID NO: 66122 - DNA, 120 bp, Artificial Sequence
  ENSG00000074935_27 (sequence is synthesized)
ccacctaacacattagggggaaaagcccatactttaaaacactgtagttagcctgttttcaggagaaatagtgtctagataaatgataacaaaaggagcattcttaactctaaggacctg

SEQ ID NO: 66123 - DNA, 66 bp, Artificial Sequence
  ENSG00000074935_28 (sequence is synthesized)
tgggcaacgatgttgtgtgttatattttattttatacatgattgttctgatactaactttcactaa

SEQ ID NO: 66124 - DNA, 120 bp, Artificial Sequence
  ENSG00000074935_29 (sequence is synthesized)
ttattttatacatgattgttctgatactaactttcactaatatggaagaaaagcatgtgttctgcactgaagaacagtgtacaaaagaatttaagaaactacctgctgaataaatcgagc

SEQ ID NO: 66125 - DNA, 120 bp, Artificial Sequence
  ENSG00000074935_30 (sequence is synthesized)
tttttaaaaaatacctttactacccaacatctcagaagaacatacttacaattcacttaaaatagcaaaaataaatattaatactaaaggttaaaagtaaagttcttttttccccacatc

SEQ ID NO: 66126 - DNA, 120 bp, Artificial Sequence
  ENSG00000074935_31 (sequence is synthesized)
taatgcctactccctgtccttacagatgatcaggtttgcagggtctttttatgtctgttctttcagatatattctatgcctatcaaagcatgtatgtatatttttacataaacaagatta

SEQ ID NO: 66127 - DNA, 120 bp, Artificial Sequence
  ENSG00000074935_32 (sequence is synthesized)
tccaatatatactatactgtaacttttccactttatctctttctcagacatctttccatatcagctctctgtcatagaatcaattatacagtttaaagtgagtttgttatttatgggtat

SEQ ID NO: 66128 - DNA, 120 bp, Artificial Sequence
  ENSG00000074935_33 (sequence is synthesized)
taagtgtttatggtgtttagtttttacatccaatcatcagtgaaagtctgggacaaatacttctgtatttgtgccactatagctttagacagtattcctaagaaaaagataggaccaaag

SEQ ID NO: 66129 - DNA, 120 bp, Artificial Sequence
  ENSG00000074935_34 (sequence is synthesized)
catatgtacattttaaattttggctgatattacctatataccttcctacaatattgcaccagtgcttcttactggcaacaatgtgtatgagtttctatttccctacactagcaccaatac

SEQ ID NO: 66130 - DNA, 120 bp, Artificial Sequence
  ENSG00000074935_35 (sequence is synthesized)
tgagtatcatgagacataaatctattatattcaaaattgtatttagttttaatttgtatttccttaattagaagaaaggttgagcatctttacttctatttgcaatttgtatttctttta

SEQ ID NO: 66131 - DNA, 120 bp, Artificial Sequence
  ENSG00000074935_36 (sequence is synthesized)
ttatgagttaaatgtttctatcctttgcccatttcgtggtggcattattcgtattttttgttgttgatttgtgggaactctttcttagagaaacttagtccttcccatcatatgtattga

SEQ ID NO: 66132 - DNA, 120 bp, Artificial Sequence
  ENSG00000074935_37 (sequence is synthesized)
agggtttttttgtaagtttgtcttgttattttttatgggtttttttaagtatatatagaagttttgtttatttttaatgaaatcaaaactgtctcttctgtaatggctctggtttttttg

SEQ ID NO: 66133 - DNA, 120 bp, Artificial Sequence
  ENSG00000074935_38 (sequence is synthesized)
tgacgcttagaaagtccttctcattaaagatcaccccaagaatctccctcactttgacttagtatttttagcatcatagccttttaatagttatctgcatggattagaacattggtgttt

SEQ ID NO: 66134 - DNA, 120 bp, Artificial Sequence
  ENSG00000074935_39 (sequence is synthesized)
aaagttttttttaaccagaatagtatgaaatacattttatatatcacaatgcagcatacacacatgaaaaaatatattaagaaaatgttatttactcatactacatctgacatgttattt

SEQ ID NO: 66135 - DNA, 120 bp, Artificial Sequence
  ENSG00000074935_40 (sequence is synthesized)
tctactgtttcatttaagaaaacagtactaatctgttcattagtttcatagcctactaatagttcagaacccagtttgaaaaacatcggattagaggattccagttttaagttctgaaaa

SEQ ID NO: 66136 - DNA, 120 bp, Artificial Sequence
  ENSG00000074935_41 (sequence is synthesized)
atttctgaatttatgtaaatgtaacttgatgtatcagaaagttatctttaatgagattcctcgagtttctgcttttaaataagtagtgtttcatatttgaaaatttttgaaattcgaggt

SEQ ID NO: 66137 - DNA, 120 bp, Artificial Sequence
  ENSG00000074935_42 (sequence is synthesized)
aggcatgcttaattgtaaacagttttaactctgtttaagttgcttgatgacatgatagtttttttcatcaagattatatacacactacactaaagctgtcaagttagttttcttaagttg

SEQ ID NO: 66138 - DNA, 120 bp, Artificial Sequence
  ENSG00000074935_43 (sequence is synthesized)
cttaatatcaaatgtagactgaacaccgtcttagttgaattttttacttgtgcatgtgcaattggttcttgtggcattatataggtataacttaaatatgaaaaggagtgagatatagac

SEQ ID NO: 66139 - DNA, 120 bp, Artificial Sequence
  ENSG00000074935_44 (sequence is synthesized)
ggccctcccaaactcactgtcagaaccaaagatggaattcaggacttcatttcctgaatgttgccttcatttccttatccaaaattagattagttaatatataatcacagaaataagctg

SEQ ID NO: 66140 - DNA, 65 bp, Artificial Sequence
  ENSG00000074935_45 (sequence is synthesized)
aatcacagaaataagctgaaaattatttttacaaatataaattctgagcttgcttgaacctagga

SEQ ID NO: 66141 - DNA, 89 bp, Artificial Sequence
  ENSG00000074935_46 (sequence is synthesized)
gttcaagaccagcctgggcaacataggtagaccctatctctacacaaattaaaaagttagccaggcgtggtggctcatgcctgcggatc

SEQ ID NO: 66142 - DNA, 120 bp, Artificial Sequence
  ENSG00000074935_47 (sequence is synthesized)
gcaagaccctgtctcaaaaaaaataaagtttcaaattcttcacaattatattctgaatcatttatgctaatttttaaaaacactttaatcctcaggaacaggatctggacttggcacatt

SEQ ID NO: 66143 - DNA, 120 bp, Artificial Sequence
  ENSG00000074935_48 (sequence is synthesized)
atatattcagtcctgtattatgtatgtgtgtttatatgaaacgttctcttcacttttcagccttcttagagaaaaaatcagtttaaattgtttttctttctctttcctagtagaatatca

SEQ ID NO: 66144 - DNA, 120 bp, Artificial Sequence
  ENSG00000074935_49 (sequence is synthesized)
agggatagtcaaaaaactttattgtgcttttggagatattttgaatttttgtagtagcattttttagttattctaaattgtagaagctgcttctgtttttattttgtcttctatcttttc

SEQ ID NO: 66145 - DNA, 120 bp, Artificial Sequence
  ENSG00000074935_50 (sequence is synthesized)
ttggagtgatcacgcagaattttaccttctatgactccaaagcagcatttccccaagtatgttccatggaatatgaacagatatcatatgatgtaaaagattttgtggttgacacacttg

SEQ ID NO: 66146 - DNA, 120 bp, Artificial Sequence
  ENSG00000074935_51 (sequence is synthesized)
taaaacacgtagacaaaattaaacattttttagctgtagaatgtcttaatcatttaaaccaactaatctgtacctcctcattaactggtccaaaagatttctgtggctttttggtatcag

SEQ ID NO: 66147 - DNA, 120 bp, Artificial Sequence
  ENSG00000074935_52 (sequence is synthesized)
agattgctttgacattattatattctagattatagagtatattaagcagattcttgaggaaattagttgtttctacagttactaattattgacttatatgtgtttaactcaaatataaag

SEQ ID NO: 66148 - DNA, 120 bp, Artificial Sequence
  ENSG00000074935_53 (sequence is synthesized)
tttgttttaaataggatatttttatatgtgtaatgagcaactataatagtatattgattacacttcagataatccagaaagaatgactgtagggccagccatggtggctcatgcctgtaa

SEQ ID NO: 66149 - DNA, 120 bp, Artificial Sequence
  ENSG00000074935_54 (sequence is synthesized)
gcctgtaaatctcagcacattaggaggccaaggcaggtagattgcttgagcccaggagctggagatcagcctggggcacatggtaaaatcccatatctacaaaaaatacaaaaattagcc

SEQ ID NO: 66150 - DNA, 89 bp, Artificial Sequence
  ENSG00000074935_55 (sequence is synthesized)
tcccataggtgttgtatgcctactgtagtctcagctgctcaggaggctgagatgggaggcggcggttgcagtgagctgagatcacacca

SEQ ID NO: 66151 - DNA, 120 bp, Artificial Sequence
  ENSG00000074964_0 (sequence is synthesized)
cgcggcggcctgcggagctggaggcgcggcgccggccgccaggcgcctttgtgagcggcgcggacgacaaaggcgcgggcccgggcagccgaggtgtgtagctgggacggtgctggtctg

SEQ ID NO: 66152 - DNA, 120 bp, Artificial Sequence
  ENSG00000074964_1 (sequence is synthesized)
ccgggcagccgaggtgtgtagctgggacggtgctggtctgagctggaccttgtctgatggcttcctccaaccctcctccacagcctgccataggagatcagctggttccaggagtcccag

SEQ ID NO: 66153 - DNA, 120 bp, Artificial Sequence
  ENSG00000074964_2 (sequence is synthesized)
gcccctcctctgaggcagaggacgacccaggagaggcgtttgagtttgatgacagtgatgatgaagaggacaccagcgcagccctgggcgtccccagccttgctcctgagagggacacag

SEQ ID NO: 66154 - DNA, 120 bp, Artificial Sequence
  ENSG00000074964_3 (sequence is synthesized)
accccccactgatccacttggactccatccctgtcactgacccagacccagcagctgctccacccggcacaggggtgccagcctgggtgagcaatggggatgcagcggacgcagccttct

SEQ ID NO: 66155 - DNA, 120 bp, Artificial Sequence
  ENSG00000074964_4 (sequence is synthesized)
ccggggcccggcactccagctggaagcggaagagttcccgtcgcattgaccggttcactttccccgccctggaagaggatgtgatttatgacgacgtcccctgcgagagcccagatgcgc

SEQ ID NO: 66156 - DNA, 120 bp, Artificial Sequence
  ENSG00000074964_5 (sequence is synthesized)
atcagcccggggcagagaggaacctgctctacgaggatgcgcaccgggctggggcccctcggcaggcggaggacctaggctggagctccagtgagttcgagagctacagcgaggactcgg

SEQ ID NO: 66157 - DNA, 120 bp, Artificial Sequence
  ENSG00000074964_6 (sequence is synthesized)
gggaggaggccaagccggaggtcgaggtcgagcccgccaagcaccgagtgtccttccagcccaagctttctccagacctgactaggctaaaggagagatacgccaggactaagagagaca

SEQ ID NO: 66158 - DNA, 120 bp, Artificial Sequence
  ENSG00000074964_7 (sequence is synthesized)
tcttggctttgagagttggggggagagacatgcaggagctgaagcacaagtacgattgtaagatgacccagctcatgaaggccgccaagagcgggaccaaggatgggctggagaagacac

SEQ ID NO: 66159 - DNA, 120 bp, Artificial Sequence
  ENSG00000074964_8 (sequence is synthesized)
ggatggccgtgatgcgcaaagtctccttcctgcacaggaaggacgtcctcggtgactcggaggaggaggacatggggctcctggaggtcagcgtttcggacatcaagcccccagccccag

SEQ ID NO: 66160 - DNA, 120 bp, Artificial Sequence
  ENSG00000074964_9 (sequence is synthesized)
agctgggccccatgccagagggcctgagccctcagcaggtggtccggaggcatatcctgggctccatcgtgcagagcgaaggcagctacgtggagtctctgaagcggatactccaggact

SEQ ID NO: 66161 - DNA, 120 bp, Artificial Sequence
  ENSG00000074964_10 (sequence is synthesized)
accgcaaccccctgatggagatggagcccaaggcgctgagcgcccgcaagtgccaggtggtgttcttccgcgtgaaggagatcctgcactgccactccatgttccagatcgccctgtcct

SEQ ID NO: 66162 - DNA, 120 bp, Artificial Sequence
  ENSG00000074964_11 (sequence is synthesized)
cccgcgtggctgagtgggattccaccgagaagatcggggacctcttcgtggcctcgttttccaagtccatggtgctagatgtgtacagtgactacgtgaacaacttcaccagtgccatgt

SEQ ID NO: 66163 - DNA, 120 bp, Artificial Sequence
  ENSG00000074964_12 (sequence is synthesized)
ccatcatcaagaaggcctgcctcaccaagcctgccttcctcgagttcctcaagcgacggcaggtgtgcagcccagaccgtgtcaccctctacgggctgatggtcaagcccatccagaggt

SEQ ID NO: 66164 - DNA, 120 bp, Artificial Sequence
  ENSG00000074964_13 (sequence is synthesized)
tcccacagttcatactcctgcttcaggacatgctgaagaacacccccaggggccatccggacaggctgtcgctgcagctggccctcacagagctggagacgctggctgagaagctgaacg

SEQ ID NO: 66165 - DNA, 120 bp, Artificial Sequence
  ENSG00000074964_14 (sequence is synthesized)
agcagaagcggctggctgaccaggtggctgagatccagcagctgaccaagagcgtcagtgaccgcagcagcctcaacaagctgttgacctcaggccagcggcagctgctcctgtgtgaga

SEQ ID NO: 66166 - DNA, 120 bp, Artificial Sequence
  ENSG00000074964_15 (sequence is synthesized)
cgttgacggagaccgtgtacggtgaccgcgggcagctaattaagtccaaggagcgtcgggtcttcctgctcaacgacatgcttgtctgtgccaacatcaacttcaagcctgccaaccaca

SEQ ID NO: 66167 - DNA, 120 bp, Artificial Sequence
  ENSG00000074964_16 (sequence is synthesized)
ggggccagctggagatcagcagcctggtgcccctggggcccaagtatgtggtgaagtggaacacggcgctgccccaggtgcaggtggtggaggtgggccaggacggtggcacctatgaca

SEQ ID NO: 66168 - DNA, 120 bp, Artificial Sequence
  ENSG00000074964_17 (sequence is synthesized)
aggacaatgtgctcatccagcactcaggcgccaagaaggcctctgcctcagggcaggctcagaataaggtgtacctcggccccccacgcctcttccaggagctgcaggacctgcagaagg

SEQ ID NO: 66169 - DNA, 120 bp, Artificial Sequence
  ENSG00000074964_18 (sequence is synthesized)
aacatgactgtggctcaagactggtgcctggccctgcagaggctgatgcgggtgaaggaggaagagatccactcggccaacaagtgccgtctcaggctcctgcttcctgggaaacccgac

SEQ ID NO: 66170 - DNA, 120 bp, Artificial Sequence
  ENSG00000074964_19 (sequence is synthesized)
aagtccggccgccccattagcttcatggtggttttcatcacccccaaccccctgagcaagatttcctgggtcaacaggttacatttggccaaaatcggactccgggaggagaaccagcca

SEQ ID NO: 66171 - DNA, 120 bp, Artificial Sequence
  ENSG00000074964_20 (sequence is synthesized)
ggctggctatgcccggatgaggacaagaagagcaaagccccattctggtgcccgatcctggcctgctgcatccctgccttctcctcccgggcactcagcctgcagcttggggccctggtc

SEQ ID NO: 66172 - DNA, 120 bp, Artificial Sequence
  ENSG00000074964_21 (sequence is synthesized)
cacagtcctgtcaactgtcccctgctgggtttctcagcagtcagcacctcccttccacagggctacctctgggtcgggggcggacaggaaggcgcagggggccaggtggaaatcttttcc

SEQ ID NO: 66173 - DNA, 120 bp, Artificial Sequence
  ENSG00000074964_22 (sequence is synthesized)
ttgaaccggccctcgccccgcaccgtcaagtccttcccactggcagcccctgtgctctgcatggagtatatcccggagctggaggaggaggcggagagcagagacgagagcccgacagtt

SEQ ID NO: 66174 - DNA, 120 bp, Artificial Sequence
  ENSG00000074964_23 (sequence is synthesized)
gctgacccctcggccacggtgcatccaaccatctgcctcgggctccaggatggcagcatcctcctctacagcagtgtggacactggcacccagtgcctggtgagctgcaggagcccaggt

SEQ ID NO: 66175 - DNA, 120 bp, Artificial Sequence
  ENSG00000074964_24 (sequence is synthesized)
ctgcagcctgtgctctgcctgcgacacagccccttccacctgctcgctggcctgcaggatgggacccttgctgcttaccctcggaccagcggaggtgtcctgtgggacctggagagccct

SEQ ID NO: 66176 - DNA, 120 bp, Artificial Sequence
  ENSG00000074964_25 (sequence is synthesized)
cccgtgtgcctgactgtggggcccgggcctgtccgcaccctgttgagcctggaggatgccgtgtgggccagctgtgggccccgggtcactgtcctggaagccaccaccctgcagcctcag

SEQ ID NO: 66177 - DNA, 120 bp, Artificial Sequence
  ENSG00000074964_26 (sequence is synthesized)
caaagcttcgaggcgcaccaggacgaggcagtgagcgtgacacacatggtgaaggcgggcagcggcgtctggatggccttctcctccggcacctccatccgcctcttccacactgagacc

SEQ ID NO: 66178 - DNA, 120 bp, Artificial Sequence
  ENSG00000074964_27 (sequence is synthesized)
ctggagcatctgcaagagatcaacatcgccaccaggaccaccttcctcctgccaggccagaagcacttgtgtgtcaccagcctcctgatctgccagggtctgctctgggtgggcactgac

SEQ ID NO: 66179 - DNA, 120 bp, Artificial Sequence
  ENSG00000074964_28 (sequence is synthesized)
cagggtgtcatcgtcctgctgcccgtgcctcggctggaaggcatccccaagatcacagggaaaggcatggtctcactcaacgggcactgtgggcctgtggccttcctggctgtggctacc

SEQ ID NO: 66180 - DNA, 120 bp, Artificial Sequence
  ENSG00000074964_29 (sequence is synthesized)
agcatcctggcccctgacatcctgcggagtgaccaggaggaggctgaggggccccgggctgaggaggacaagccagacgggcaggcacacgagcccatgcccgatagccacgtgggccga

SEQ ID NO: 66181 - DNA, 120 bp, Artificial Sequence
  ENSG00000074964_30 (sequence is synthesized)
gagctgacccgcaagaagggcatcctcttgcagtaccgcctgcgctccaccgcacacctcccgggcccgctgctctccatgcgggagccggcgcctgctgatggcgcagctttggagcac

SEQ ID NO: 66182 - DNA, 120 bp, Artificial Sequence
  ENSG00000074964_31 (sequence is synthesized)
agcgaggaggacggctccatttacgagatggccgacgaccccgacatctgggtgcgcagccggccctgcgcccgcgacgcccaccgcaaggagatttgctctgtggccatcatctccggc

SEQ ID NO: 66183 - DNA, 120 bp, Artificial Sequence
  ENSG00000074964_32 (sequence is synthesized)
gggcagggctaccgcaactttggcagcgctctgggcagcagtgggaggcaggccccgtgtggggagacggacagcaccctcctcatctggcaggtgcccttgatgctatagcgcctcccc

SEQ ID NO: 66184 - DNA, 120 bp, Artificial Sequence
  ENSG00000074964_33 (sequence is synthesized)
tctcccctcagagggcacagctgcaggcctgaccaaggccacgcccggctctcgtgctctaggacctgcacgggacttgtggatgggcctggactctccagaaactacttgggcagagca

SEQ ID NO: 66185 - DNA, 120 bp, Artificial Sequence
  ENSG00000074964_34 (sequence is synthesized)
aaggaaaacctcttgttttaaaaaaatttttttcagagtgttttggggaggagttttagggcttggggagagggaggacacatctggaggaaatggccttctttttaaaagcaaaaaaca

SEQ ID NO: 66186 - DNA, 120 bp, Artificial Sequence
  ENSG00000074964_35 (sequence is synthesized)
caaaacctcacaactgcctggcaagcccagtatcacttgtttgggccctagcgggactccaaggcagccacacgcccctcctggaagggtgtgtgcgtgtgagtgtgtgcgagtgtgtgg

SEQ ID NO: 66187 - DNA, 120 bp, Artificial Sequence
  ENSG00000074964_36 (sequence is synthesized)
gctggtgtgtgaatatctataaataagtatatatggtgtatattatatgtgtataaataaagtctgtacatattggagctctgggagatgctggaataaaagacaagagttacatctgga

SEQ ID NO: 66188 - DNA, 120 bp, Artificial Sequence
  ENSG00000074964_37 (sequence is synthesized)
attaatagccgtggcagggctcgaatcacaggccaagaatgttacccagcagctcgtgggggaagaggaagctgcgaggcaggctggggtgggtgcggagtgatgcccggggcgtgatgt

SEQ ID NO: 66189 - DNA, 120 bp, Artificial Sequence
  ENSG00000074964_38 (sequence is synthesized)
gggcccggcaggagggtctgcaccacccccacccccacgccgtcatccgctgtccctcctcctcctcctcctctgtctcctgctcaggtgactcggaggaggaggacatggggctcctgg

SEQ ID NO: 66190 - DNA, 120 bp, Artificial Sequence
  ENSG00000074964_39 (sequence is synthesized)
attgctagaattgttggcaacagtgcagcagcagcgatgacagcaggtagcgcccattttgccatgtgcaggcacggggttgttttacgttcattcatttaacccaatggagagtatctg

SEQ ID NO: 66191 - DNA, 120 bp, Artificial Sequence
  ENSG00000074964_40 (sequence is synthesized)
tgttccaaacatcaaaaagggacagtaaaaatacggtcctataggactgccattgtatacatggtctgttgttgactgaaaggtcattatgtgacatgtgactgtattatccttggcccc

SEQ ID NO: 66192 - DNA, 120 bp, Artificial Sequence
  ENSG00000074964_41 (sequence is synthesized)
ttttacaagtgaggacaccatggcccagaggagtttaggatgggccccaggtcatgtagctggagagtggcagagccaaggtgtgaatcccgcacctggctctggagccctgttctcagc

SEQ ID NO: 66193 - DNA, 120 bp, Artificial Sequence
  ENSG00000074964_42 (sequence is synthesized)
caccgtgctgggcagcccacacctggcatcctctctgttaggagcaggggcctgcccccacgccctctctgacattgctattcttgctaaaatgaagagacagagctgaggggagagcta

SEQ ID NO: 66194 - DNA, 120 bp, Artificial Sequence
  ENSG00000074964_43 (sequence is synthesized)
aaaagaatgaatctggactggcatcagaaacatgctgcttcccaccagcgagttttgtgcttcactcttgggcccagggcctgcagggtgtgctgtgacctcatctgaagaagcacccac

SEQ ID NO: 66195 - DNA, 120 bp, Artificial Sequence
  ENSG00000074964_44 (sequence is synthesized)
acgggcaggccctgaggggctgcagcagagccacctcgatgcctctcgagccccacccggccctacttatgccttccatctgcaccaacaccgatgagaagcttgcacctccccagtctt

SEQ ID NO: 66196 - DNA, 120 bp, Artificial Sequence
  ENSG00000074964_45 (sequence is synthesized)
ccctggttttgctcgtagctggctggctggatccctgcatggattgcccttggacaaccctttgtgccggatgacctggccgccgtgtattgagagcgcacacagaccaggcgctgtgcc

SEQ ID NO: 66197 - DNA, 120 bp, Artificial Sequence
  ENSG00000074964_46 (sequence is synthesized)
tgtggtgttcccccaatgcatccgtatggcagccccactttacacaggcggaaactgaggctggttaggggagtgctcagctgcaggacctcgtggccagaccccaggcaggtcagcctc

SEQ ID NO: 66198 - DNA, 120 bp, Artificial Sequence
  ENSG00000074964_47 (sequence is synthesized)
caaagccccagctcttccccaccccaccgcccaacttcttgctggtttcaggggaggagcccgctgtgccaggccctcatctcgtggtggtacccagagcccatgctgtctccccaggag

SEQ ID NO: 66199 - DNA, 120 bp, Artificial Sequence
  ENSG00000074964_48 (sequence is synthesized)
gaacggggacacctgggccaaggatatgcttatccctttagcaagcctgggatgtgcttggagcacattttcctgtttgtagctcacttgagtccagggagcaatggattcccactgtat

SEQ ID NO: 66200 - DNA, 120 bp, Artificial Sequence
  ENSG00000074964_49 (sequence is synthesized)
taggaggcaaaggagtctcagaaaagtcccagagctgggaggtctgagcggctgaggggcctcagttgttgtttaacccatttggcctatttcccacctgaattcaatcaagtcactaag

SEQ ID NO: 66201 - DNA, 120 bp, Artificial Sequence
  ENSG00000074964_50 (sequence is synthesized)
ggggaatcagtttgggtgatttgggctgagtcacttcacttgactgaggatcagtgtccttgtctgggatcatctaagcttcctagcggggctgttgtgagacccagagatgaaggaagg

SEQ ID NO: 66202 - DNA, 120 bp, Artificial Sequence
  ENSG00000074964_51 (sequence is synthesized)
cccgcttctgtccacacctggcctctgatgccctcattccccgcaggaggctgtctctccttctattcccgatgcccagccccatggctggcccccagcggggtcacagcccccagatta

SEQ ID NO: 66203 - DNA, 120 bp, Artificial Sequence
  ENSG00000074964_52 (sequence is synthesized)
ctcagcaaacatttactgagcaactgtcccatgccaggtgctgggaacagacccaagtgagacccattcctccctctagaggcacgtggtcagacatgtaaggtgtctaagacctgtgga

SEQ ID NO: 66204 - DNA, 120 bp, Artificial Sequence
  ENSG00000074964_53 (sequence is synthesized)
attagaaatttgggtgcttcctcgcaccagcacatttcaagtgctcaatagtcgcatgtggcccgtggctcccattttggacagggcagatacagagtgtttctgtcattgcagagcctt

SEQ ID NO: 66205 - DNA, 120 bp, Artificial Sequence
  ENSG00000074964_54 (sequence is synthesized)
ctctttgctggtgctgctgtatgctggagaagatgcgggtgctagggctggggcttgggaggacaaaggactggctgaggggacagcagctctgtcaggcctgggttcccccagcacctc

SEQ ID NO: 66206 - DNA, 120 bp, Artificial Sequence
  ENSG00000074964_55 (sequence is synthesized)
ggatgcccacttccctcttctgggcacgcggtctccttacgtctcatgttctgcttagcttgctacgctcgtgtccatggatcccctccccactgccagaggaagctgcctcttctttct

SEQ ID NO: 66207 - DNA, 120 bp, Artificial Sequence
  ENSG00000074964_56 (sequence is synthesized)
ggcaacttcagccttttctccttttcccggatggtggctcagtaagaaacctggctgtttcgggggaggcaagggacgggtccctcacctgggtttggcggatgggatgggggtgtgcac

SEQ ID NO: 66208 - DNA, 120 bp, Artificial Sequence
  ENSG00000074964_57 (sequence is synthesized)
acacctcctttagttgctcctaaggtcatgttcaacattcgtggagtgcatttttctgctcagggagctttcccagacccggaatgtttggtgctcacagaccctggcaaggatcggtat

SEQ ID NO: 66209 - DNA, 120 bp, Artificial Sequence
  ENSG00000074964_58 (sequence is synthesized)
tgctgttcctcagttttgcctggggaaatggaggctcagtgacgttcagtgacgtgcccagagtcatgccattggcgggtggcccagggctccaggtctccagcacccctcggccccctc

SEQ ID NO: 66210 - DNA, 120 bp, Artificial Sequence
  ENSG00000074964_59 (sequence is synthesized)
ctcaccaggtcacatcatctcctggattagaaatctgctcacatagtctgtcctgaaaggaaaaaaatcggttacagcctcctgttgcccctaaagagggagatccccgggcatgaacgc

SEQ ID NO: 66211 - DNA, 120 bp, Artificial Sequence
  ENSG00000074964_60 (sequence is synthesized)
accttctcacccccactgtcgtccttggcctttgctcacggacctgggagggaagggtctgggtggttctgatctctgcaggccgaggcctggggaggcgggtggccctcggtagcaggc

SEQ ID NO: 66212 - DNA, 120 bp, Artificial Sequence
  ENSG00000074966_0 (sequence is synthesized)
agttgaaagatgtgtttttgtgagtagagcaccgcagaagaactgaagactgttgtgtgctccccgcagaaggggctaccatgatcctttcctcctataacaccatccagtcggttttct

SEQ ID NO: 66213 - DNA, 120 bp, Artificial Sequence
  ENSG00000074966_1 (sequence is synthesized)
gttgctgctgttgctgttcagtgcagaagcgacaaatgagaacacagataagcctgagcacagatgaagagcttccagaaaaatacacccagcgtcgcaggccgtggctcagccaattgt

SEQ ID NO: 66214 - DNA, 120 bp, Artificial Sequence
  ENSG00000074966_2 (sequence is synthesized)
caaataagaagcaatccaacacgggccgtgtgcagccgtcaaaacgaaagccactgcctcccctcccaccctctgaggttgctgaagagaagatccaagtcaaggcactttatgattttc

SEQ ID NO: 66215 - DNA, 120 bp, Artificial Sequence
  ENSG00000074966_3 (sequence is synthesized)
tgcccagagaaccctgtaatttagccttaaggagagcagaagaatacctgatactggagaaatacaatcctcactggtggaaggcaagagaccgtttggggaatgaaggcttaatcccaa

SEQ ID NO: 66216 - DNA, 120 bp, Artificial Sequence
  ENSG00000074966_4 (sequence is synthesized)
gcaactatgtgactgaaaacaaaataactaatttagaaatatatgagtggtaccatagaaacattaccagaaatcaggcagaacatctattgagacaagagtctaaagaaggtgcattta

SEQ ID NO: 66217 - DNA, 120 bp, Artificial Sequence
  ENSG00000074966_5 (sequence is synthesized)
ttgtcagagattcaagacatttaggatcctacacaatttccgtatttatgggagctagaagaagtacggaggctgccataaaacattatcagataaaaaagaatgactcaggacagtggt

SEQ ID NO: 66218 - DNA, 120 bp, Artificial Sequence
  ENSG00000074966_6 (sequence is synthesized)
atgtggctgaaagacacgcctttcaatcaatccctgagttaatctggtatcaccagcacaatgcagccggtctcatgactcgtctccgatatccagttgggctgatgggcagttgtttac

SEQ ID NO: 66219 - DNA, 120 bp, Artificial Sequence
  ENSG00000074966_7 (sequence is synthesized)
cagccacagctgggtttagctacgaaaagtgggagatagatccatctgagttggcttttataaaggagattggaagcggtcagtttggagtggtccatttaggtgaatggcggtcacata

SEQ ID NO: 66220 - DNA, 120 bp, Artificial Sequence
  ENSG00000074966_8 (sequence is synthesized)
tccaggtagctatcaaggccatcaatgaaggctccatgtctgaagaggatttcattgaagaggccaaagtgatgatgaaattatctcattcaaagctagtgcaactttatggagtctgta

SEQ ID NO: 66221 - DNA, 120 bp, Artificial Sequence
  ENSG00000074966_9 (sequence is synthesized)
tacagcggaagcccctttacattgtgacagagttcatggaaaatggctgcctgcttaactatctcagggagaataaaggaaagcttaggaaggaaatgctactgagtgtatgccaggata

SEQ ID NO: 66222 - DNA, 120 bp, Artificial Sequence
  ENSG00000074966_10 (sequence is synthesized)
tatgtgaaggaatggaatatctggagaggaatggctatattcatagggatttggcggcaaggaattgtttggtcagttcaacatgcatagtaaaaatttcagactttggaatgacaaggt

SEQ ID NO: 66223 - DNA, 120 bp, Artificial Sequence
  ENSG00000074966_11 (sequence is synthesized)
acgttttggatgatgagtatgtcagttcttttggagccaagttcccaatcaagtggtcccctcctgaagtttttcttttcaataagtacagcagtaaatctgatgtctggtcatttggag

SEQ ID NO: 66224 - DNA, 120 bp, Artificial Sequence
  ENSG00000074966_12 (sequence is synthesized)
aaaaatgccttttgaaaataagtcaaatttgcaagtcgtggaagctatttctgaaggcttcaggctatatcgccctcacctggcaccaatgtccatatatgaagtcatgtacagctgctg

SEQ ID NO: 66225 - DNA, 120 bp, Artificial Sequence
  ENSG00000074966_13 (sequence is synthesized)
gcatgagaaacctgaaggccgccctacatttgccgagctgctgcgggctgtcacagagattgcggaaacctggtgaccggaaacagaatgccaacccaaagagtcatcttgcaaaactgt

SEQ ID NO: 66226 - DNA, 120 bp, Artificial Sequence
  ENSG00000074966_14 (sequence is synthesized)
catttattgtgaatatcttcaccatatggggtcacttatggtgaatatctttcttcagagttgctgactcttgaaaacagtgcaaagatcacagtttttaaaagttttaaaaatttaaga

SEQ ID NO: 66227 - DNA, 120 bp, Artificial Sequence
  ENSG00000074966_15 (sequence is synthesized)
atattcacacaatcgtttttctatgtgtgagagggatttgcacactcttatttttctgtaaaatatttcacatcccaaatgtgaagaagtgaaaaagacttcgcagcagtcttcattgtg

SEQ ID NO: 66228 - DNA, 120 bp, Artificial Sequence
  ENSG00000074966_16 (sequence is synthesized)
gtgctcttcatgatcatagccccaggaacccttgaggttcttcttcacaaggctgagagtgcttccttcttgaagacgagtgacattcatcacttcagtgatccatgcatagaatatgaa

SEQ ID NO: 66229 - DNA, 120 bp, Artificial Sequence
  ENSG00000074966_17 (sequence is synthesized)
aataaattcttccaactcatgggataaaggggactcccttgaagaatttcatgtttttgggctgtatagctctttacagaaaatgcacctttataaatcacatgaatgttagtattctgg

SEQ ID NO: 66230 - DNA, 120 bp, Artificial Sequence
  ENSG00000074966_18 (sequence is synthesized)
aaatgtcttttgttaatataatcttcccatgttatttaacaaattgtttttgcacatatctgattatattgaaagcagttttttgcattcgagttttaaacactgttataaaatgtagcc

SEQ ID NO: 66231 - DNA, 120 bp, Artificial Sequence
  ENSG00000074966_19 (sequence is synthesized)
aaagctcacctttgaacagatcccggtgacattctatttccaggaaaatccggaacctgattttagttctgtgattttacactttttacatgtgagattggacagtttcagaggccttat

SEQ ID NO: 66232 - DNA, 120 bp, Artificial Sequence
  ENSG00000074966_20 (sequence is synthesized)
tttgtcatactaagtgtctcctgtaattttcaggaagatgatttgttctttccagaagaggagacaaaagcaagatagccaaatgtgacatcaagctccattgtttcggaaatccaggat

SEQ ID NO: 66233 - DNA, 120 bp, Artificial Sequence
  ENSG00000074966_21 (sequence is synthesized)
tttgaattcgagatgaaacaaccagcaatcacagttaaatcttaactttgcctgcactctttgtaggaatgatcagaaatttatctttatcattctgagtgcttcaggagtacaatagga

SEQ ID NO: 66234 - DNA, 120 bp, Artificial Sequence
  ENSG00000074966_22 (sequence is synthesized)
agaaagatactggagaaagcactaatgtaatcaccatgaagtctgacaacaggagcccattatttgcgtactgtcccaccctgtatcatggttctctgggaacaagctttatgattctca

SEQ ID NO: 66235 - DNA, 120 bp, Artificial Sequence
  ENSG00000074966_23 (sequence is synthesized)
ttagagtttatttgttgattgtcagtagttgcgacttttaaattatatttcccccactcaaagaatggtatctttatatatcaatgacattcaataaatgtgtattatttctaatgagaa

SEQ ID NO: 66236 - DNA, 120 bp, Artificial Sequence
  ENSG00000074966_24 (sequence is synthesized)
acggtaaagtgtgcacacatgctgaagtaaaatagcaaatccagtagtaaagaatctacctggctgggtgcggtggctcacagctgtaatcctagcactttgggaggcaaaggtgggtgg

SEQ ID NO: 66237 - DNA, 67 bp, Artificial Sequence
  ENSG00000074966_25 (sequence is synthesized)
tgggaggcaaaggtgggtggatcaccttaggtcaggcgttcaagaccaccctggccaaatggatgcc

SEQ ID NO: 66238 - DNA, 120 bp, Artificial Sequence
  ENSG00000074966_26 (sequence is synthesized)
ttatttgtcttccactagtgaaggaaggcacgatcgagactttcatacgctttataataattcgtctcacccttcccttagagactccctcaatatcacgtactcatggctttctaacag

SEQ ID NO: 66239 - DNA, 120 bp, Artificial Sequence
  ENSG00000075035_0 (sequence is synthesized)
tttctcataaaatctctgctggaccagccactcctagtggggagcccagggtggtctgggagtgctgcatgcacccagctgctgtatcaccaggacatcaggaggtggagatgttcgctt

SEQ ID NO: 66240 - DNA, 120 bp, Artificial Sequence
  ENSG00000075035_1 (sequence is synthesized)
gtgtgttctccactgcccaaacccaggtggttattctgcaacagctacaacttgagtaagaccaaaacacaactcaagtggactttctaaaaagagaataatttattttggctcccagac

SEQ ID NO: 66241 - DNA, 120 bp, Artificial Sequence
  ENSG00000075035_2 (sequence is synthesized)
atcaaaattcgcaagggattgcttcaggtggcatccctgagtcctgatgcctgactggatggaggcccaccagcttctgttcccatgaggtagaaaggccaagcttggtcttcagctggg

SEQ ID NO: 66242 - DNA, 120 bp, Artificial Sequence
  ENSG00000075035_3 (sequence is synthesized)
gaagaggccagaaacaaggcccccagtgaaataacccagatccattggcctgaggagcagagaaagggcaagaagtgaactgcagctgctggtaaccctcagaaaccttctccaagtgct

SEQ ID NO: 66243 - DNA, 120 bp, Artificial Sequence
  ENSG00000075035_4 (sequence is synthesized)
attctcacagttctttaggaacactctgaagtgaagaacaatatgtaggaaaatgggaccaacttatgtgtgttctgagcctcaaaacccccttgttggcccaaagaagctcaccttcag

SEQ ID NO: 66244 - DNA, 120 bp, Artificial Sequence
  ENSG00000075035_5 (sequence is synthesized)
tttgggagggctggtaagctccatcctttctcatggcctcagccaagcattgaacttgccctccccttctggccttggtgatcactttttcaggaagagtgagactgaggacccccaagt

SEQ ID NO: 66245 - DNA, 120 bp, Artificial Sequence
  ENSG00000075035_6 (sequence is synthesized)
gttccatccctaaggaaagcttgggaaaccaagccccttccatcctctcccaagcaccccagccaagccccagagagccagtccggaatgatcccactatggccaagctctggttcaaat

SEQ ID NO: 66246 - DNA, 120 bp, Artificial Sequence
  ENSG00000075035_7 (sequence is synthesized)
tccagcggtacttccgccggaaacctgtgcgcttctttaccttcctggcactctacctgactgctgggagccttgtcttccttcactctggctttgtgggccagcccgctgtctcgggga

SEQ ID NO: 66247 - DNA, 120 bp, Artificial Sequence
  ENSG00000075035_8 (sequence is synthesized)
accaggcgaaccccgctgctgcaggaggcccagctgagggtgctgagctgtccttcttgggtgacatgcatctgggcagaggtttccgggacacaggtgaagcctcaagcattgctcgca

SEQ ID NO: 66248 - DNA, 120 bp, Artificial Sequence
  ENSG00000075035_9 (sequence is synthesized)
ggtacggaccctggttcaagggcaaggatgggaatgagagagccaagcttggcgactacggtggagcctggagccgagccctcaaggggagggttgtccgggagaaggaggaagagcgag

SEQ ID NO: 66249 - DNA, 120 bp, Artificial Sequence
  ENSG00000075035_10 (sequence is synthesized)
ccaagtacatcggctgctacctggatgacacccagagtcgggcccttcgaggagtgtccttttttgactacaaaaagatgaccatcttccgttgccaggacaactgtgctgaacggggtt

SEQ ID NO: 66250 - DNA, 120 bp, Artificial Sequence
  ENSG00000075035_11 (sequence is synthesized)
acctgtatggcgggctggagttcggcgccgagtgctactgcggccacaagatccaggcgacgaacgtgagcgaggcagagtgcgacatggagtgcaagggcgagcgaggcagcgtgtgcg

SEQ ID NO: 66251 - DNA, 120 bp, Artificial Sequence
  ENSG00000075035_12 (sequence is synthesized)
gcggcgccaaccgcctctctgtctaccggctgcagctggcccaggagtcggcccgcaggtatggaagtgcagtgttccggggctgcttccgcaggcccgacaacctttccctggccttac

SEQ ID NO: 66252 - DNA, 120 bp, Artificial Sequence
  ENSG00000075035_13 (sequence is synthesized)
ccgtgacagctgccatgctgaacatgtctgtggacaaatgcgtggacttctgcactgagaaggagtacccgctggcagctcttgcaggcaccgcctgccactgtgggtttcccaccaccc

SEQ ID NO: 66253 - DNA, 120 bp, Artificial Sequence
  ENSG00000075035_14 (sequence is synthesized)
gattcccgctccatgacagagaggatgagcagctctgtgcccagaagtgcagcgcggaggagtttgagagctgcgggactcctagttacttcattgtgtaccagacacaagtccaagaca

SEQ ID NO: 66254 - DNA, 120 bp, Artificial Sequence
  ENSG00000075035_15 (sequence is synthesized)
accgttgcatggacagaaggttcctgccaggcaagtccaagcagctcattgctttggccagcttcccaggtgctggcaacacgtgggctcgccacctcattgaattggccacaggcttct

SEQ ID NO: 66255 - DNA, 120 bp, Artificial Sequence
  ENSG00000075035_16 (sequence is synthesized)
acactggcagctactacttcgatggctccctctacaacaaagggtttaaaggtgagcgggaccactggcgcagcggacggaccatctgcatcaagacgcacgaaagcggccagaaagaga

SEQ ID NO: 66256 - DNA, 120 bp, Artificial Sequence
  ENSG00000075035_17 (sequence is synthesized)
tcgaggccttcgacgccgccatcctgctcatccgcaacccctacaaagccctcatggctgagttcaaccgcaagtacggcggccacataggctttgctgcgcatgcccactggaagggca

SEQ ID NO: 66257 - DNA, 120 bp, Artificial Sequence
  ENSG00000075035_18 (sequence is synthesized)
aagagtggccagagttcgtgaggaactatgccccgtggtgggccactcacacactggactggctcaagtttggcaagaaggtgctggtggtgcactttgaggacctgaagcaggacctct

SEQ ID NO: 66258 - DNA, 120 bp, Artificial Sequence
  ENSG00000075035_19 (sequence is synthesized)
tgggcgtggctgtcagggaggaccggctgctctgtgtggagagccagaaggatggcaacttcaagcgctcagggctccggaagctcgagtatgacccctatactgcggacatgcagaaga

SEQ ID NO: 66259 - DNA, 120 bp, Artificial Sequence
  ENSG00000075035_20 (sequence is synthesized)
ccatctctgcctacatcaagatggtggatgcagccctcaaagggcggaacctaacgggtgtccccgatgactactacccaagatgatgcgtccacacagggggagggtagactgggagtc

SEQ ID NO: 66260 - DNA, 120 bp, Artificial Sequence
  ENSG00000075035_21 (sequence is synthesized)
ctgaccacgcaggccctggggactcaagacccctggttacccccactcatctgtcctctctttggtctggggacaatccccttggctgctctttgccttcaatgagtttcctgcatgaca

SEQ ID NO: 66261 - DNA, 120 bp, Artificial Sequence
  ENSG00000075035_22 (sequence is synthesized)
gaggaggctcaagggaagagattgcccaggcactaccactctgctcacatgttccccccttggcaatgtggggcatcttgtttagggggttctagttacatggactcttttctgtctcct

SEQ ID NO: 66262 - DNA, 120 bp, Artificial Sequence
  ENSG00000075035_23 (sequence is synthesized)
gggtccctgcccccaccactctgggttccatttgtgggagggagggctcatccacatcatggagacttgctggatgccccatggcaattgtcaaggctcttgatgcaagagcccaggggg

SEQ ID NO: 66263 - DNA, 120 bp, Artificial Sequence
  ENSG00000075035_24 (sequence is synthesized)
ctattgtaaaaacttggccccagatgcttgtcccttctgggctgagatttcgcagcccccttctcatctccacccaagaagtgctggcaccgatgtttaactcaggccaccttctgttct

SEQ ID NO: 66264 - DNA, 120 bp, Artificial Sequence
  ENSG00000075035_25 (sequence is synthesized)
aaagaaagattgctgggaagtttctccgtggccttaggtttctgacatcctggatagtgtggggaggtaatggtgctcacagtaggttaattggagacaccatgtggggccattggtgtt

SEQ ID NO: 66265 - DNA, 120 bp, Artificial Sequence
  ENSG00000075035_26 (sequence is synthesized)
atgagccccccaggccacactgcttctcagaaatgagctgcttgcctttccacctccagggcatgaaccctgcccctttctatccatgctgtgtccaggaggtgaccttgagatcctgat

SEQ ID NO: 66266 - DNA, 120 bp, Artificial Sequence
  ENSG00000075035_27 (sequence is synthesized)
accaccttcaaggaacctcaggcaccaacagtgagcccacgaggatggtcacatgccatgtgcagaatttgacttaagagagagccccagtgacacatctctccatggtgggctccagtc

SEQ ID NO: 66267 - DNA, 120 bp, Artificial Sequence
  ENSG00000075035_28 (sequence is synthesized)
agtcttacactgcccttctgacccctacaaatgggtcctttgctatccaggtgagacagcaagagtgttcttaatcagatggaaccacacccaaaatggacccccactaccttcccagac

SEQ ID NO: 66268 - DNA, 120 bp, Artificial Sequence
  ENSG00000075035_29 (sequence is synthesized)
catatatctccccttgatcatagtccaacagggccagcttcccttgggggccctttaaggaatggggtgaatgaaattgtgtcatttctatacaaacactgctctcttgatgctgaaatg

SEQ ID NO: 66269 - DNA, 120 bp, Artificial Sequence
  ENSG00000075035_30 (sequence is synthesized)
ccaaaccgaaggatttctgaggacctaaatcacggagcatcaatcttacaaagtgttggtccagagtcccatctcttccccaaccctggataccagtagcttcccacccagtccaaacct

SEQ ID NO: 66270 - DNA, 120 bp, Artificial Sequence
  ENSG00000075035_31 (sequence is synthesized)
gcaccatccatcattatgtagatgaaaaagccataggtcatagcctctttgctattctattggagtagcctccctaggcagtccctctgaagccttggagtgcaggtaaatgctcattcc

SEQ ID NO: 66271 - DNA, 120 bp, Artificial Sequence
  ENSG00000075035_32 (sequence is synthesized)
caagtagcaaagagaccatggagaaggtgcgtgtaaagagatatatttttgtaagaggaatatgattaatacattccgccccttggaacctggccatgcaaagcaagggcacagggatta

SEQ ID NO: 66272 - DNA, 120 bp, Artificial Sequence
  ENSG00000075035_33 (sequence is synthesized)
gacctgtggcacacttccccaattccctcatctgtaggatttgggctgccccaggcccacccagggggctctgaatgtattttgtaccgtgtttctttcccccaggagaatttttagtct

SEQ ID NO: 66273 - DNA, 120 bp, Artificial Sequence
  ENSG00000075035_34 (sequence is synthesized)
tctttcatgaagcagtggaggggttggcctcccttctactgggaggttgactctctctgggagactcttggtccaagacctgggtcagttctttgctggtggtcccctctgaccacaagc

SEQ ID NO: 66274 - DNA, 120 bp, Artificial Sequence
  ENSG00000075035_35 (sequence is synthesized)
ttctgcctgaagattcctcaggtcaacaccatcattaaatgcgagttttgttgatgattctaccatgtggtagagtgttgtgtaagacaggttcacaaatgggatgttttcctagtgtgt

SEQ ID NO: 66275 - DNA, 120 bp, Artificial Sequence
  ENSG00000075035_36 (sequence is synthesized)
gtgtgtatgagagagagagagagagacaacagagacagagagaggcagagaggcatagagagacagagagagagacaagaaacagagatagacagaaaatgttcggggtggcaggcgggt

SEQ ID NO: 66276 - DNA, 120 bp, Artificial Sequence
  ENSG00000075035_37 (sequence is synthesized)
ggggtggcaggcgggttggtgtataactgctttgtgcctgtgtgactctggcatagctgctcagggagaattacgtgcctctgtgtgtaaaattgcctttgtgttctcctgcctttctat

SEQ ID NO: 66277 - DNA, 120 bp, Artificial Sequence
  ENSG00000075035_38 (sequence is synthesized)
gttttgaaactgtatcccacaagttgccggtatgaccatcttatttgtaatgagtctgtgcaggtccttgtgtatggaattgcacccgtgtaaaggaggaaatggtcagtgtgcatgaaa

SEQ ID NO: 66278 - DNA, 120 bp, Artificial Sequence
  ENSG00000075035_39 (sequence is synthesized)
gaggcgcgctgctggtggcggcggcggcagcggcgcgggagctagggctggagacgtgaagtccaggggagcgagcaaggcagccaaggaggcagcggcgaggcagcgagagagagccag

SEQ ID NO: 66279 - DNA, 80 bp, Artificial Sequence
  ENSG00000075035_40 (sequence is synthesized)
agagagagccaggcggccggagctccgcgccgagccgcagccggtgccctgcgcgcaccgggcccgggcatctccatccc

SEQ ID NO: 66280 - DNA, 120 bp, Artificial Sequence
  ENSG00000075035_41 (sequence is synthesized)
cgcccgcccgagcgccaggctcacaggagcccggctttcacttcctctcgcttccgcccgcctccctggctcgccggctggcgtcgccaccgcctcctcgtccccggccaccgctgtcgc

SEQ ID NO: 66281 - DNA, 120 bp, Artificial Sequence
  ENSG00000075035_42 (sequence is synthesized)
cgctgctgcaattcaaggcgcacactatcccactttcccgctggaggcgcagaggatgccccttgagccagacctggagaaatagccccagggcccggcaggaggagccttggtggcgag

SEQ ID NO: 66282 - DNA, 120 bp, Artificial Sequence
  ENSG00000075035_43 (sequence is synthesized)
aaaggaaatccaggctcccctttccttaaagccactgcagcagctgggaaggcgcccacagagcgggcgcgccaagcgggacgcgggagtcgcagagagggaccccgggcgcctgctgag

SEQ ID NO: 66283 - DNA, 120 bp, Artificial Sequence
  ENSG00000075035_44 (sequence is synthesized)
agagttattccagctgaggagcaagggagctggggcatttatacaccaactcccatcagtcatatttgcagctgcttccaaatgttaatattctagcatgtcttgcctgccaaccacaca

SEQ ID NO: 66284 - DNA, 120 bp, Artificial Sequence
  ENSG00000075035_45 (sequence is synthesized)
gttacagatctaccaaactgaccaaaaaggaaaggactgacaacattaagtgttggtgtggatttggagcagcaggaatgctcaaactgtactggggaagttgtgactacagcaaccttg

SEQ ID NO: 66285 - DNA, 120 bp, Artificial Sequence
  ENSG00000075035_46 (sequence is synthesized)
gaaaaaaactggcatcttttaggataatcataagatgctcatacaaaaacaaaaacaaacagacaaaaactagcgctttcactcctaggtggcatccctgagtcctgatgcctgactgga

SEQ ID NO: 66286 - DNA, 120 bp, Artificial Sequence
  ENSG00000075035_47 (sequence is synthesized)
acaaaggtgaggagatggcagggagggcagggcaagaggttccctgggcttgggaaggtccccacttggagggtatgggaatactcctccttgagtatctactgtgtgccactcagctct

SEQ ID NO: 66287 - DNA, 120 bp, Artificial Sequence
  ENSG00000075035_48 (sequence is synthesized)
cccaggcacactttttgagactcactgcatgcttggtacccccccaccttcctttatgccccacaaacatttcttaagtcatgtcctggatactccactagcatccattcaataattgac

SEQ ID NO: 66288 - DNA, 120 bp, Artificial Sequence
  ENSG00000075035_49 (sequence is synthesized)
ctcctagtggggagcccagggtggtctgggagtgctgcatgcacccagctgctgtatcaccaggacatcaggaggtggagtttatagtctactgaggtgattaaacagctggattaagag

SEQ ID NO: 66289 - DNA, 120 bp, Artificial Sequence
  ENSG00000075035_50 (sequence is synthesized)
tttccatcccggagtcaaacagactgaaatcaaatccccatttcacctctaaccagctgtgtgaccttgggcaagtgacttcccttctctgggcttcagtgtacctgcttgtaaaataaa

SEQ ID NO: 66290 - DNA, 120 bp, Artificial Sequence
  ENSG00000075035_51 (sequence is synthesized)
agtccccgccctctctctgctttctcataaaatctctgctggaccagccactcctagtggggagcccagggtggtctgggagtgctgcatgcacccagctgctgtatcaccaggacatca

SEQ ID NO: 66291 - DNA, 120 bp, Artificial Sequence
  ENSG00000075035_52 (sequence is synthesized)
ggagaaggaggaagagcgagtgtttaataggaaccagctgtcatatcattgtagctataaatagtgcctgccattatcatccccattgcacagaggagaaaattgaagctcagagagatg

SEQ ID NO: 66292 - DNA, 120 bp, Artificial Sequence
  ENSG00000075035_53 (sequence is synthesized)
acacttgcccaaagctgcgcagctggtcagcagcaggaacggagtttaaatctgattcatctggcctgaatgctcagttctctaaggctgtctcctagagtccactggcatctacccatc

SEQ ID NO: 66293 - DNA, 120 bp, Artificial Sequence
  ENSG00000075035_54 (sequence is synthesized)
caaccagcatgctagggaggaacccacaacccctacaattcataagattaacacaaatggacatttcagaaatctgggccagatggtttgggagaataaaccaccaatcaaggcagatgg

SEQ ID NO: 66294 - DNA, 80 bp, Artificial Sequence
  ENSG00000075043_0 (sequence is synthesized)
gcgccgccccccgcgctccgcccccgctgagcctgagcccgacccggggcgcctcccgccaggcaccatggtgcagaagt

SEQ ID NO: 66295 - DNA, 120 bp, Artificial Sequence
  ENSG00000075043_1 (sequence is synthesized)
aggcaccatggtgcagaagtcgcgcaacggcggcgtataccccggcccgagcggggagaagaagctgaaggtgggcttcgtggggctggaccccggcgcgcccgactccacccgggacgg

SEQ ID NO: 66296 - DNA, 120 bp, Artificial Sequence
  ENSG00000075043_2 (sequence is synthesized)
ggcgctgctgatcgccggctccgaggcccccaagcgcggcagcatcctcagcaaacctcgcgcgggcggcgcgggcgccgggaagccccccaagcgcaacgccttctaccgcaagctgca

SEQ ID NO: 66297 - DNA, 120 bp, Artificial Sequence
  ENSG00000075043_3 (sequence is synthesized)
gaatttcctctacaacgtgctggagcggccgcgcggctgggcgttcatctaccacgcctacgtgttcctcctggttttctcctgcctcgtgctgtctgtgttttccaccatcaaggagta

SEQ ID NO: 66298 - DNA, 120 bp, Artificial Sequence
  ENSG00000075043_4 (sequence is synthesized)
tgagaagagctcggagggggccctctacatcctggaaatcgtgactatcgtggtgtttggcgtggagtacttcgtgcggatctgggccgcaggctgctgctgccggtaccgtggctggag

SEQ ID NO: 66299 - DNA, 120 bp, Artificial Sequence
  ENSG00000075043_5 (sequence is synthesized)
ggggcggctcaagtttgcccggaaaccgttctgtgtgattgacatcatggtgctcatcgcctccattgcggtgctggccgccggctcccagggcaacgtctttgccacatctgcgctccg

SEQ ID NO: 66300 - DNA, 120 bp, Artificial Sequence
  ENSG00000075043_6 (sequence is synthesized)
gagcctgcgcttcctgcagattctgcggatgatccgcatggaccggcggggaggcacctggaagctgctgggctctgtggtctatgcccacagcaaggagctggtcactgcctggtacat

SEQ ID NO: 66301 - DNA, 120 bp, Artificial Sequence
  ENSG00000075043_7 (sequence is synthesized)
cggcttcctttgtctcatcctggcctcgttcctggtgtacttggcagagaagggggagaacgaccactttgacacctacgcggatgcactctggtggggcctgatcacgctgaccaccat

SEQ ID NO: 66302 - DNA, 120 bp, Artificial Sequence
  ENSG00000075043_8 (sequence is synthesized)
tggctacggggacaagtacccccagacctggaacggcaggctccttgcggcaaccttcaccctcatcggtgtctccttcttcgcgctgcctgcaggcatcttggggtctgggtttgccct

SEQ ID NO: 66303 - DNA, 120 bp, Artificial Sequence
  ENSG00000075043_9 (sequence is synthesized)
gaaggttcaggagcagcacaggcagaagcactttgagaagaggcggaacccggcagcaggcctgatccagtcggcctggagattctacgccaccaacctctcgcgcacagacctgcactc

SEQ ID NO: 66304 - DNA, 120 bp, Artificial Sequence
  ENSG00000075043_10 (sequence is synthesized)
cacgtggcagtactacgagcgaacggtcaccgtgcccatgtacagttcgcaaactcaaacctacggggcctccagacttatccccccgctgaaccagctggagctgctgaggaacctcaa

SEQ ID NO: 66305 - DNA, 120 bp, Artificial Sequence
  ENSG00000075043_11 (sequence is synthesized)
gagtaaatctggactcgctttcaggaaggaccccccgccggagccgtctccaagtaaaggcagcccgtgcagagggcccctgtgtggatgctgccccggacgctctagccagaaggtcag

SEQ ID NO: 66306 - DNA, 120 bp, Artificial Sequence
  ENSG00000075043_12 (sequence is synthesized)
tttgaaagatcgtgtcttctccagcccccgaggcgtggctgccaaggggaaggggtccccgcaggcccagactgtgaggcggtcacccagcgccgaccagagcctcgaggacagccccag

SEQ ID NO: 66307 - DNA, 120 bp, Artificial Sequence
  ENSG00000075043_13 (sequence is synthesized)
agctggagcttcggggaccgcagccgggcacgccaggctttccgcatcaagggtgccgcgtcacggcagaactcagaagaagcaagcctccccggagaggacattgtggatgacaagagc

SEQ ID NO: 66308 - DNA, 120 bp, Artificial Sequence
  ENSG00000075043_14 (sequence is synthesized)
tgcccctgcgagtttgtgaccgaggacctgaccccgggcctcaaagtcagcatcagagccgtgtgtgtcatgcggttcctggtgtccaagcggaagttcaaggagagcctgcggccctac

SEQ ID NO: 66309 - DNA, 120 bp, Artificial Sequence
  ENSG00000075043_15 (sequence is synthesized)
gacgtgatggacgtcatcgagcagtactcagccggccacctggacatgctgtcccgaattaagagcctgcagtccagagtggaccagatcgtggggcggggcccagcgatcacggacaag

SEQ ID NO: 66310 - DNA, 120 bp, Artificial Sequence
  ENSG00000075043_16 (sequence is synthesized)
gaccgcaccaagggcccggccgaggcggagctgcccgaggaccccagcatgatgggacggctcgggaaggtggagaagcaggtcttgtccatggagaagaagctggacttcctggtgaat

SEQ ID NO: 66311 - DNA, 120 bp, Artificial Sequence
  ENSG00000075043_17 (sequence is synthesized)
atctacatgcagcggatgggcatccccccgacagagaccgaggcctactttggggccaaagagccggagccggcgccgccgtaccacagcccggaagacagccgggagcatgtcgacagg

SEQ ID NO: 66312 - DNA, 120 bp, Artificial Sequence
  ENSG00000075043_18 (sequence is synthesized)
cacggctgcattgtcaagatcgtgcgctccagcagctccacgggccagaagaacttctcggcgcccccggccgcgccccctgtccagtgtccgccctccacctcctggcagccacagagc

SEQ ID NO: 66313 - DNA, 120 bp, Artificial Sequence
  ENSG00000075043_19 (sequence is synthesized)
ccagggccacggcacctcccccgtgggggaccacggctccctggtgcgcatcccgccgccgcctgcccacgagcggtcgctgtccgcctacggcgggggcaaccgcgccagcatggagtt

SEQ ID NO: 66314 - DNA, 120 bp, Artificial Sequence
  ENSG00000075043_20 (sequence is synthesized)
atggagttcctgcggcaggaggacaccccgggctgcaggccccccgaggggaacctgcgggacagcgacacgtccatctccatcccgtccgtggaccacgaggagctggagcgttccttc

SEQ ID NO: 66315 - DNA, 120 bp, Artificial Sequence
  ENSG00000075043_21 (sequence is synthesized)
agcggcttcagcatctcccagtccaaggagaacctggatgctctcaacagctgctacgcggccgtggcgccttgtgccaaagtcaggccctacattgcggagggagagtcagacaccgac

SEQ ID NO: 66316 - DNA, 120 bp, Artificial Sequence
  ENSG00000075043_22 (sequence is synthesized)
tccgacctctgtaccccgtgcgggcccccgccacgctcggccaccggcgagggtccctttggtgacgtgggctgggccgggcccaggaagtgaggcggcgctgggccagtggacccgccc

SEQ ID NO: 66317 - DNA, 120 bp, Artificial Sequence
  ENSG00000075043_23 (sequence is synthesized)
gcggccctcctcagcacggtgcctccgaggttttgaggcgggaaccctctggggcccttttcttacagtaactgagtgtggcgggaagggtgggccctggaggggcccatgtgggctgaa

SEQ ID NO: 66318 - DNA, 120 bp, Artificial Sequence
  ENSG00000075043_24 (sequence is synthesized)
ggatgggggctcctggcagtgaccttttacaaaagttattttccaacaggggctggagggctgggcagggccctgtggctccaggagcagcgtgcaggagcaaggctgccctgtccactc

SEQ ID NO: 66319 - DNA, 120 bp, Artificial Sequence
  ENSG00000075043_25 (sequence is synthesized)
tgctcagggccgcggccgacatcagcccggtgtgaggaggggcgggagtgatgacggggtgttgccagcgtggcaacaggcggggggttgtctcagccgagcccaggggaggcacaaagg

SEQ ID NO: 66320 - DNA, 120 bp, Artificial Sequence
  ENSG00000075043_26 (sequence is synthesized)
gcaggcctgttccctgaggacctgcgcaaagggcgggcctgtttggtgaggacctgcggccttgggtcccggtggggtttccgggcagctacaggcgggtgtggccggccgctgtgcgtg

SEQ ID NO: 66321 - DNA, 120 bp, Artificial Sequence
  ENSG00000075043_27 (sequence is synthesized)
attggttggcgtcttctccctgtaccttctgggatctgagggctctttccatggaagccagccccgaggtggagaccttcgcctgcagccgaggagcgggtggggcctgggaaccaaact

SEQ ID NO: 66322 - DNA, 120 bp, Artificial Sequence
  ENSG00000075043_28 (sequence is synthesized)
ggagccagagtggacgtccagccctctggtcttggcctccagagggagggcctggctcacggtggggccagggagccggctccaaagggtcttcaaaaagggggtccttgggggctccag

SEQ ID NO: 66323 - DNA, 120 bp, Artificial Sequence
  ENSG00000075043_29 (sequence is synthesized)
ctgcctcgccctggcctttctgtgggtgcgtgagagccagcagcaccccagccttggagaccgggggggcaggaccccaagtcctcccctctctcctgactgccctggccgggtgccggc

SEQ ID NO: 66324 - DNA, 120 bp, Artificial Sequence
  ENSG00000075043_30 (sequence is synthesized)
actgcgagacccacctggtgagcaggcctcacagttcttagccagggccccacctcgcctgtgtcccaccagtgccccgacagacctggggcagggctgggccatgatgcagcgggccag

SEQ ID NO: 66325 - DNA, 120 bp, Artificial Sequence
  ENSG00000075043_31 (sequence is synthesized)
gatagcctccaccgtcagcacagggccgccctccccgcctttccggaggaaaccactcccacctcagcccagctgtgcgccctccctagctctcctgccccctggagctgatggcccctt

SEQ ID NO: 66326 - DNA, 120 bp, Artificial Sequence
  ENSG00000075043_32 (sequence is synthesized)
ctccactgaccgattccttagcggggcctcttggggtctcgggcctcgggtgcaccgtcccatgcccgtcctgttgtgggcaccgtggcccttggggcaggcggctctaatgcgggagcg

SEQ ID NO: 66327 - DNA, 120 bp, Artificial Sequence
  ENSG00000075043_33 (sequence is synthesized)
agtccctagctccagacttaagaaccagaccccgggagcatctggcatttggcgtgacggcgtcgcaggcgggcctgggctccctggagagtggcctccctgggagtgagcagggctggg

SEQ ID NO: 66328 - DNA, 120 bp, Artificial Sequence
  ENSG00000075043_34 (sequence is synthesized)
gtcgtgggcgcaaatactcctgcagagcaagtgcaggggagtcctgggcccgtttctcctccacctgcgttttcagtgcacttggcttggctgggaggtcctgaggccctgaggccagca

SEQ ID NO: 66329 - DNA, 120 bp, Artificial Sequence
  ENSG00000075043_35 (sequence is synthesized)
ggggaaccagtcctgagggagaggactttgaaagcagcatttgagggtcgtacgcccctggctggtgggggtcctggcgctcagggtgttcggggagccatgtctggcgtccattgtggg

SEQ ID NO: 66330 - DNA, 120 bp, Artificial Sequence
  ENSG00000075043_36 (sequence is synthesized)
gagctgctgccctggcctctctgcctacccccagcccggccagggcactcccaggccctgtcgccattgaggtgcctccgctgggctgtctcctcacccctccctgtgctggagcctgtc

SEQ ID NO: 66331 - DNA, 120 bp, Artificial Sequence
  ENSG00000075043_37 (sequence is synthesized)
ggccctgcggtggcatgaagcatcccttctggtgtgggcatcgctacgtgttttgggggcagcgtttcacggcggtgcccttgctgtctcccttgggctggctcgagcctggggtccatg

SEQ ID NO: 66332 - DNA, 120 bp, Artificial Sequence
  ENSG00000075043_38 (sequence is synthesized)
tccctttgccgtcccgtcatggggcagggaatccatagcggggcccacaggcaggggtatgagtgcgtcccacccaacgcagcaccagccccggccaccgctccccgtgtccccagttcc

SEQ ID NO: 66333 - DNA, 120 bp, Artificial Sequence
  ENSG00000075043_39 (sequence is synthesized)
gtctcagctacctggactccaggaccctggagaagggagacctggcagtggagggaggctgtgctgtgtgtccccctgcaggtgtgaccccgcctgctctttcctcccccgccaggtgtg

SEQ ID NO: 66334 - DNA, 120 bp, Artificial Sequence
  ENSG00000075043_40 (sequence is synthesized)
gccccgcctgctctttcctcccccaccagtatggccccacctgctctttcctccccccccaaggtgtggccccacctgttctttcctcccctgccgaggtgtgaccccacctgctctttc

SEQ ID NO: 66335 - DNA, 120 bp, Artificial Sequence
  ENSG00000075043_41 (sequence is synthesized)
ctccctcccagtatggccccacctgctctttcctcccccgaggtgaggccccgcctgctctttcctcccatggggccgctgaggcatgagcacctgggcacaggttggggctctgcagga

SEQ ID NO: 66336 - DNA, 120 bp, Artificial Sequence
  ENSG00000075043_42 (sequence is synthesized)
tgaggaagacaggccaatcccttccctcccagaagctggccgcccagcaggagggactgaggccagactcatgtccagcaaggaacgtgtggtgtgtcccctgggaagtctctgggccct

SEQ ID NO: 66337 - DNA, 120 bp, Artificial Sequence
  ENSG00000075043_43 (sequence is synthesized)
gggaagagggaaggtgcacgtcctgggatggttgcggggccctgttttgggagacaaaggggtagagggtctgtcttgggcccccccagactctagcctgagcagtgcagccacctactg

SEQ ID NO: 66338 - DNA, 120 bp, Artificial Sequence
  ENSG00000075043_44 (sequence is synthesized)
ccccacctcagagaagtgcagcgggaaggaggctggaggtggtgcggcgctgcctcgggtgtctgcgtgaatgagcgtggccaaggaccagtgccacctcatggcaaagagctcccgcag

SEQ ID NO: 66339 - DNA, 120 bp, Artificial Sequence
  ENSG00000075043_45 (sequence is synthesized)
tgtttgttagagtgcacatccctacgtgcccactggcacacacacgtgctcacatacatgtccgcatacaggcgtacacatgcacgcttgcacacatgcacacagaccacatagcacaca

SEQ ID NO: 66340 - DNA, 120 bp, Artificial Sequence
  ENSG00000075043_46 (sequence is synthesized)
tgtgcactgaccacacctgtatagaccatgcacagtacacatacgtgcatacacatgcctgcatacaggcatacacatgcacgcttacatgtacacgtgcacagatcacacacatgcaca

SEQ ID NO: 66341 - DNA, 120 bp, Artificial Sequence
  ENSG00000075043_47 (sequence is synthesized)
cacgtgtagctcacacacagtatacacatacacaagtgcacagaccacacacagcactaacacatgcacacacaaagtgcataggccacacagcacatgcacacaggtgcacagaccaca

SEQ ID NO: 66342 - DNA, 120 bp, Artificial Sequence
  ENSG00000075043_48 (sequence is synthesized)
cagcacacacaagtgcacagagcacactgcacacatgcacacacacacgcgtgcatgcacactcctcgcacttccagccttggagcccttctgtctctggtctttctctttgaccctgct

SEQ ID NO: 66343 - DNA, 120 bp, Artificial Sequence
  ENSG00000075043_49 (sequence is synthesized)
gagtgtaagctgcctggggaggggctacaaggagtaattgtggctttaggggtcgtggtgatgctggaatgtcaagcgccgtcgtggggtatccgactgtccgggctcctggtccgcagt

SEQ ID NO: 66344 - DNA, 120 bp, Artificial Sequence
  ENSG00000075043_50 (sequence is synthesized)
ggcagagcgccaggcagagcccaatcagggtctcgtgctgcccttccctcccacagcctggcagccatccagaggaggggctctaccagatgccaaggtgccccggtgtctgtatgggtg

SEQ ID NO: 66345 - DNA, 120 bp, Artificial Sequence
  ENSG00000075043_51 (sequence is synthesized)
tccggttgggtcctgtgtttggtctgccctggaggtgctgggccctcctgggatgggtggctcagcctcgaatcccaggccccagcccaggcaggtgctgctgcctgttgtggtttcctg

SEQ ID NO: 66346 - DNA, 120 bp, Artificial Sequence
  ENSG00000075043_52 (sequence is synthesized)
gcccagcttctccttctccctctgcataaaatcacagtccgtgagtcttccagctgccaccacggctgggacacgctgggggagggctcctcccatgcctcctgcacacagccgtctgag

SEQ ID NO: 66347 - DNA, 120 bp, Artificial Sequence
  ENSG00000075043_53 (sequence is synthesized)
cagggcaggtgcccaacaccccccaccggaggacacgctgcccctcagcgatgcccctaccttttggggggcctcgtctcaagcccccccttggaggctgaaatcaccccaggcactgtg

SEQ ID NO: 66348 - DNA, 120 bp, Artificial Sequence
  ENSG00000075043_54 (sequence is synthesized)
agggcttctccagggggcaccctttgagctgtgggtctgatcaccccaagtcccgcccggaggagaggcacagccagggcgtgtggtttaatgtttgcccccttcggggctggaggtctc

SEQ ID NO: 66349 - DNA, 120 bp, Artificial Sequence
  ENSG00000075043_55 (sequence is synthesized)
agtgtttctagattccagaccctgctgccagagagacctgctgccggagagaaggggaggaggactccagctgggctcggtcccccacagtcagggacccccataaaggacacccccttc

SEQ ID NO: 66350 - DNA, 120 bp, Artificial Sequence
  ENSG00000075043_56 (sequence is synthesized)
tctctagaaagagctgggctctcagctatttctagttgcttcccagaagccgaggagcagaaggagctgtgagagctttgcagaaacgcccttgtccccgccctcctgagctatgaatgc

SEQ ID NO: 66351 - DNA, 120 bp, Artificial Sequence
  ENSG00000075043_57 (sequence is synthesized)
cgtacagagcagaggctggggcattggcaagatcacaggttgatgctgcacagccccattgacacaaaccctcaaagcagacgtgagagggacggttcacaaagctcggacctgccgtgg

SEQ ID NO: 66352 - DNA, 120 bp, Artificial Sequence
  ENSG00000075043_58 (sequence is synthesized)
agggtgcccggcagacgtggcgtgagagggacggctcacgaggcttggacctgctgtggagggtgcccagcagacgtggtgtgagaggaacggctcacgagacttggacctggtggaggg

SEQ ID NO: 66353 - DNA, 120 bp, Artificial Sequence
  ENSG00000075043_59 (sequence is synthesized)
tgcccagcagacgtggtgtgagagggacggctcacagggcttggacctgccatggagggtgcccggcagacgtggtgtgagagggatggttcacagggcttggacctgccatggagggtg

SEQ ID NO: 66354 - DNA, 120 bp, Artificial Sequence
  ENSG00000075043_60 (sequence is synthesized)
cccggcagatgtggtgggagagagatggctcatgaggcttggacctgccgtggagggtgcccagcagacgtggtatgagagggatggctcacgaggcttggacctggtggagggtgcccg

SEQ ID NO: 66355 - DNA, 120 bp, Artificial Sequence
  ENSG00000075043_61 (sequence is synthesized)
gcagacgtgtgagagggacggttcacaaggcttggacctgccatggagggtgcccagcagacgtggtgtgagagggacagctcacgaggcttggacctgctgtggagggtgcccagcagg

SEQ ID NO: 66356 - DNA, 120 bp, Artificial Sequence
  ENSG00000075043_62 (sequence is synthesized)
gggctgagctctgaggggtgggtgctcagtgcacgggtgcccccagtgtcctctgatcctgtccggtgcctcccccaacccccacacccatgcagaactcccaggtcacatgcacgtatg

SEQ ID NO: 66357 - DNA, 120 bp, Artificial Sequence
  ENSG00000075043_63 (sequence is synthesized)
tccagggcatgggggtggcgtgaagaggcctggtcagggcctttaggggctgcaggacggaatggccgcctggggagcctgtgtggctgtgccgggcagccatcctgcattcccacccag

SEQ ID NO: 66358 - DNA, 120 bp, Artificial Sequence
  ENSG00000075043_64 (sequence is synthesized)
cgcgcagtctccacctcggccccagcaaagcgctaagcagccggagagacagccagggcggcttcctgaaggatgtgggatggtggactccggggtcgagggaatacgcaggttcctgtc

SEQ ID NO: 66359 - DNA, 120 bp, Artificial Sequence
  ENSG00000075043_65 (sequence is synthesized)
cctccgggagacctagagaagctgcacacccaggagctttccatgacccgggagcatgagtgaatgggggttccagtttgctgaactttgccgtcttgtaagggtgggggctgacggccg

SEQ ID NO: 66360 - DNA, 120 bp, Artificial Sequence
  ENSG00000075043_66 (sequence is synthesized)
accctgggaggaggtgacatcgccgggggaggttgtgggcaacggtggaggaggagagacgggaggggaccatttgggatggaggggcctcttcagagttttaaaaggcgtttgtggggt

SEQ ID NO: 66361 - DNA, 120 bp, Artificial Sequence
  ENSG00000075043_67 (sequence is synthesized)
ggagttgagtgtgctctgggcttggacacttgccgtggtgcccctggctggccgaggagactggctctggccaggggccccgtcctgagaggtcctcagcgtctgactctcggccaggcg

SEQ ID NO: 66362 - DNA, 120 bp, Artificial Sequence
  ENSG00000075043_68 (sequence is synthesized)
ccagcaaggaggggccggtccccggggctaccaggcaggcacgtgcacatcgccatcgccacacgccaactccgcctgggttttacaaagtcgttgccttaatgcatgtggacaggaact

SEQ ID NO: 66363 - DNA, 120 bp, Artificial Sequence
  ENSG00000075043_69 (sequence is synthesized)
ccctgaggtcgccccatgccccctggctgtgccaggtacggacgccctggaccctgcgaacaggtggggcgggcgaggggcccaagggacgggctccagagacacgcgcagggcaggagg

SEQ ID NO: 66364 - DNA, 120 bp, Artificial Sequence
  ENSG00000075043_70 (sequence is synthesized)
ggtctcacggaggggtctcgcactgaggcgcccagagctggtggtcccgctggacgccatccctctgcccgggatccacacggcccacgtgtgcccgccatgcccgcgccccacgccatt

SEQ ID NO: 66365 - DNA, 120 bp, Artificial Sequence
  ENSG00000075043_71 (sequence is synthesized)
gcagtctgccatcctctggccgtgacggtggctgcagcttccccatttgcgccgttgcctctggctgtctgcacttttgttcatgctccaaagaacatttcataatgccttcagtaccga

SEQ ID NO: 66366 - DNA, 120 bp, Artificial Sequence
  ENSG00000075043_72 (sequence is synthesized)
cgtacacttctgaccattttgtatgtgtccttgtgccgtagtgaccaggcctttttttggtggatgtgttaccccgcacacttcaatctcaactttgtgcaccgtccattttctagggat

SEQ ID NO: 66367 - DNA, 120 bp, Artificial Sequence
  ENSG00000075043_73 (sequence is synthesized)
agacgcccagggaatgaactctagttttctaacagattagctgagatattaacttactcacacggacaggttgatgccagagccgtaagaatgcgccagtgcgggtttgcgggggacttc

SEQ ID NO: 66368 - DNA, 120 bp, Artificial Sequence
  ENSG00000075043_74 (sequence is synthesized)
gggtgtggggtcctgcggccgcgatggccgtggaaggttctggggatccctgctgccacggggacgagttcggacgccaggtggacctgtgcactcagtaaaacgcagtgattcaacctg

SEQ ID NO: 66369 - DNA, 120 bp, Artificial Sequence
  ENSG00000075043_75 (sequence is synthesized)
cagctgtgttcccggatgcagggtctccagagggcccaacccttcctgcccagaggctggagaggggtgggggggtcagcttgcagtttcctttgggggcctcctgccctgtggcttggt

SEQ ID NO: 66370 - DNA, 120 bp, Artificial Sequence
  ENSG00000075043_76 (sequence is synthesized)
ccctgggccagaactgctcctgtgggtgtccaggctgggcccccaggccctcccccaggcctcaaggtggcctcagctttcctcccctgcaggaaatcgtgactatcgtggtgtttggcg

SEQ ID NO: 66371 - DNA, 120 bp, Artificial Sequence
  ENSG00000075043_77 (sequence is synthesized)
ctcacctagaaagaagataacacccctggcccaccctcccccctcccatcagaggcagagtggaccagatcgtggggcggggcccagcgatcacggacaaggaccgcaccaagggcccgg

SEQ ID NO: 66372 - DNA, 120 bp, Artificial Sequence
  ENSG00000075043_78 (sequence is synthesized)
gaaggggcgattctacagctcacaaggtccccgggtgccgtctgcttcctgtagtgtaaacgcacctgtccacattccagccttcctaccgagacaacagcaccatggactggaggagtc

SEQ ID NO: 66373 - DNA, 120 bp, Artificial Sequence
  ENSG00000075043_79 (sequence is synthesized)
gtcctccgccatcctcccgagccgctctccctcagactagggttcctcctggttttctcctgcctcgtgctgtctgtgttttccaccatcaaggagtatgagaagagctcggagggggcc

SEQ ID NO: 66374 - DNA, 120 bp, Artificial Sequence
  ENSG00000075043_80 (sequence is synthesized)
ggcacctggaagctgctgggctctgtggtctatgcccacagcaagccctgccaccgaccctggcgtggagcctctgctggcctcaggagacgggtccatccagcccctatatccctggag

SEQ ID NO: 66375 - DNA, 120 bp, Artificial Sequence
  ENSG00000075043_81 (sequence is synthesized)
agtggagggagccagacggggaaggccgtgcagcttgcgatgcccttggcaggaaatgcccggggcggggaagtccgtggagccccgtacaccctggcggtggccagggcctgggggacc

SEQ ID NO: 66376 - DNA, 120 bp, Artificial Sequence
  ENSG00000075043_82 (sequence is synthesized)
aggaaccaggagcgcctgctgaacgtcggggcaccgcaaaacaaaacaaaggcatagagaacggaaatccagccaggcgaggttcagtctgacgtacaggctcatgccccgagccgggct

SEQ ID NO: 66377 - DNA, 120 bp, Artificial Sequence
  ENSG00000075043_83 (sequence is synthesized)
gagtccccgccctgggaggttggaggctgaggtccctggccctacccatactcccagcgcctcaggttgcccagggcccaaccaggaggtcaggaaggtaacccccaggacaggtgatac

SEQ ID NO: 66378 - DNA, 120 bp, Artificial Sequence
  ENSG00000075043_84 (sequence is synthesized)
gggcacctgccaccaagcaactgtttcattttttattttccatttgttcttaaaccccactttttgttgttcattattttgattgattttttttctttaaaatgtatttttcacaaagga

SEQ ID NO: 66379 - DNA, 120 bp, Artificial Sequence
  ENSG00000075043_85 (sequence is synthesized)
ctggcgaggctgcagtgctcctggaggagctggtcactgcctggtacatcggcttcctttgtctcatcctggcctcgttcctggtgtacttggcagagaagggggagaacgaccactttg

SEQ ID NO: 66380 - DNA, 120 bp, Artificial Sequence
  ENSG00000075043_86 (sequence is synthesized)
agtgccccctgctgctaccctggtgtctgccgtgtgcacggccgtctggtctctctcccacacgtgtgcgcaacctgtcatggagatgtgagggccttgtgtgtgcttccgtgtgtgact

SEQ ID NO: 66381 - DNA, 120 bp, Artificial Sequence
  ENSG00000075043_87 (sequence is synthesized)
gtgtgactgcgggtccagacccccgcctggcggtgatgtgggcccttaaatcactcttcctgctcaccccctccccagtgattcggttttactttgcagcactgtggatccgggcagctg

SEQ ID NO: 66382 - DNA, 120 bp, Artificial Sequence
  ENSG00000075043_88 (sequence is synthesized)
attcttcctctgtatctgtggcgtggaggcatctgctgcctctgtctgcccccgcctcatcctccaggtcttctctagttttgttcctccccatggagcccttacccgtgacgtaagctg

SEQ ID NO: 66383 - DNA, 120 bp, Artificial Sequence
  ENSG00000075043_89 (sequence is synthesized)
tgaggagtggaggccgctggggctttggcattgccctgtctgtggatgggccacagcgctcaccctctgcaggaatctgtggaaggagcgaggatgtgaagtgtgtgtgttgagaaatgg

SEQ ID NO: 66384 - DNA, 120 bp, Artificial Sequence
  ENSG00000075043_90 (sequence is synthesized)
ctccaacccctgaggctgcacaggggtggctcgtgtgaggacgctggggtggcccttgccttgtgtgggtgctggggcccggccatcaggtcctctctaccgcaccctgggaggtgagca

SEQ ID NO: 66385 - DNA, 120 bp, Artificial Sequence
  ENSG00000075043_91 (sequence is synthesized)
cacccgttctgcagctgcagggccaaggctcctagagcccacacactgcagtgagtcagtgcctgacctcgtctgacccctgatgctggctgtgggcccccatgatgcccgcccggaccc

SEQ ID NO: 66386 - DNA, 120 bp, Artificial Sequence
  ENSG00000075043_92 (sequence is synthesized)
tgcagtccaggatagatatgattgtgggtcccccgcccccttcaactccccggcacaagaagtaccccaccaaaggacccacggcccctccgagagagtcaccccagtactcacctagag

SEQ ID NO: 66387 - DNA, 120 bp, Artificial Sequence
  ENSG00000075043_93 (sequence is synthesized)
aagcagaagcttctccgacctcctgggtcctggaagccctgtggcccccaggaggttcctcctggttttctcctgcctcgtgctgtctgtgttttccaccatcaaggagtatgagaagag

SEQ ID NO: 66388 - DNA, 120 bp, Artificial Sequence
  ENSG00000075043_94 (sequence is synthesized)
cccacccaccaactggatgttgggttgcgtctgccgtgaggctgctgtggacacgcggttcctcctggttttctcctgcctcgtgctgtctgtgttttccaccatcaaggagtatgagaa

SEQ ID NO: 66389 - DNA, 120 bp, Artificial Sequence
  ENSG00000075043_95 (sequence is synthesized)
tttctgtttaggtttggaaaaaacatgagaaggccttcctaccgagacaacagcaccatggactggaggagtctggaggggacaaggtgtgggtctcttttcgcccaggctggagtgcag

SEQ ID NO: 66390 - DNA, 120 bp, Artificial Sequence
  ENSG00000075043_96 (sequence is synthesized)
tccctcagctcagccctgctgtgcaccccccaactcaaggaaatcgtgactatcgtggtgtttggcgtggagtacttcgtgcggatctgggccgcaggctgctgctgccggtaccgtggc

SEQ ID NO: 66391 - DNA, 120 bp, Artificial Sequence
  ENSG00000075043_97 (sequence is synthesized)
gacaaagcccactgtggcccatggtgggagtgcagggggtgtgtgggcggggcctcctccccacccacgtcggcctctgtcagcttctgttgtgtcttcacaaagtctgttttaatattt

SEQ ID NO: 66392 - DNA, 120 bp, Artificial Sequence
  ENSG00000075073_0 (sequence is synthesized)
agagaacggcagggaagctgcagcgagggctggcagctggcagagccctgagcacccagcacccagcccggcttgcagcccaaagcctggagagaggctgctgcgccattgacctgtgga

SEQ ID NO: 66393 - DNA, 120 bp, Artificial Sequence
  ENSG00000075073_1 (sequence is synthesized)
ctccagagactcccgctgtgcattcctctgatctggaaggtttcctgaattacgtgacgagaaacctgggttcgagtcctaacttgtcaccaacttcctgagtgacctgggctggtcccg

SEQ ID NO: 66394 - DNA, 120 bp, Artificial Sequence
  ENSG00000075073_2 (sequence is synthesized)
tcccctcttggaatctctgtcttccatctcttcagcgaaggggttgatttataagggtgttttctgctctgacactgtgatttgaattctgtgtttccacatgatattcgagaagtctgg

SEQ ID NO: 66395 - DNA, 120 bp, Artificial Sequence
  ENSG00000075073_3 (sequence is synthesized)
ccggaaggatggaatctgaaatgacaatggttctggactgggctttgtgctcagcccagctcatctttgcctgagacctaggagtggccccaggctctcctgatgtgccaccacgcttgg

SEQ ID NO: 66396 - DNA, 120 bp, Artificial Sequence
  ENSG00000075073_4 (sequence is synthesized)
catctgctcctctccctgcccccatattcccatgctctgaaggggagttctctttcatagcaaatccgagaggagccgaggagccaggtcctttgttccagacccagaagcagccatggg

SEQ ID NO: 66397 - DNA, 120 bp, Artificial Sequence
  ENSG00000075073_5 (sequence is synthesized)
gacctgtgacattgtgactgaagccaatatctcatctggccctgagagcaacaccacgggcatcacagccttctccatgcccagctggcaactggcactgtgggccacagcctacctggc

SEQ ID NO: 66398 - DNA, 120 bp, Artificial Sequence
  ENSG00000075073_6 (sequence is synthesized)
cctggtgctggtggccgtgacgggtaatgccatcgtcatctggatcatcctggcccatcggaggatgcgcacagtcaccaactacttcatcgtcaatctggcgctggctgacctctgcat

SEQ ID NO: 66399 - DNA, 120 bp, Artificial Sequence
  ENSG00000075073_7 (sequence is synthesized)
ggctgccttcaatgccgccttcaactttgtctatgccagccacaacatctggtactttggccgtgccttctgctacttccagaacctcttccccatcacagccatgtttgtcagcatcta

SEQ ID NO: 66400 - DNA, 120 bp, Artificial Sequence
  ENSG00000075073_8 (sequence is synthesized)
ctccatgaccgccattgctgccgacaggtacatggccatcgtccaccccttccagcctcggctttcagctcccagcaccaaggcggttattgctggcatctggctggtggctctcgccct

SEQ ID NO: 66401 - DNA, 120 bp, Artificial Sequence
  ENSG00000075073_9 (sequence is synthesized)
ggcctcccctcagtgcttctactccaccgtcaccatggaccagggtgccaccaagtgcgtggtggcctggcccgaagacagcgggggcaagacgctcctcctgtaccacctcgtggtgat

SEQ ID NO: 66402 - DNA, 120 bp, Artificial Sequence
  ENSG00000075073_10 (sequence is synthesized)
cgccctcatctacttcctgccgctcgcggtgatgtttgtagcctacagcgtcatcggcctcacgctctggaggcgcgcagtgcccggacatcaggcgcacggtgccaacctgcgccacct

SEQ ID NO: 66403 - DNA, 120 bp, Artificial Sequence
  ENSG00000075073_11 (sequence is synthesized)
cctctacttcatcctgggcagcttccaggaggacatctactgccacaagttcatccagcaagtctacctggcactcttctggttggccatgagctctaccatgtacaatcccatcatcta

SEQ ID NO: 66404 - DNA, 120 bp, Artificial Sequence
  ENSG00000075073_12 (sequence is synthesized)
ctgctgtctcaaccacaggtttcgctctggattccggcttgccttccgctgctgcccatgggtcacacccaccaaggaagataagctcgagctgactcccacgacctccctctccacgag

SEQ ID NO: 66405 - DNA, 120 bp, Artificial Sequence
  ENSG00000075073_13 (sequence is synthesized)
agtcaacaggtgtcacactaaggagactttgttcatggctggggacacagccccctccgaggctaccagtggggaggcggggcgtccccaggatggatcagggctatggtttgggtatgg

SEQ ID NO: 66406 - DNA, 120 bp, Artificial Sequence
  ENSG00000075073_14 (sequence is synthesized)
tttgcttgcccccaccaaaactcatgttgaaatttgatcccaatgtggcagtgttgggaggtaggggttagtgggaggtgtttgggtattggggatggatcccttatgaatagattaatg

SEQ ID NO: 66407 - DNA, 120 bp, Artificial Sequence
  ENSG00000075073_15 (sequence is synthesized)
ccttccagttgaagtgaatcatcactcttgtgggaatggactagttcccaaaataacaagttgttagaaagagtgtggtgtcctcagtttccctgtcttgcttcctctctcaccatgtga

SEQ ID NO: 66408 - DNA, 120 bp, Artificial Sequence
  ENSG00000075073_16 (sequence is synthesized)
tctctttgcacacaacacttcccttccactttccaccatgacaagaagcagcctgaggccttcaccagatgcagctgcccaatcttggatattccagccaccagaatcatgagccaaata

SEQ ID NO: 66409 - DNA, 120 bp, Artificial Sequence
  ENSG00000075073_17 (sequence is synthesized)
ttataaattacctagtctcaggtattccatgaaagcaacacaaatggactgagataggtgcctattgaaccctgaagccttgtgcctggctgcagaatgaggtgtagcaccctttgagaa

SEQ ID NO: 66410 - DNA, 120 bp, Artificial Sequence
  ENSG00000075073_18 (sequence is synthesized)
accctttgagaagtagccaatcgagaagaccacatctgaaagttcagctcatgccccatccttcagtataccaatacaaagacaacatggggccagaactccagaaaggatgctgacttt

SEQ ID NO: 66411 - DNA, 120 bp, Artificial Sequence
  ENSG00000075073_19 (sequence is synthesized)
aagaggactcagccacccatctcagagagcacttcagaggatccagtaagggtcagaaaagacagtgtaagctgatatttatctaatttaagagatgcaagctcaaatgccttcctgggg

SEQ ID NO: 66412 - DNA, 120 bp, Artificial Sequence
  ENSG00000075073_20 (sequence is synthesized)
catacaagaatatgtataaaagaaaaactgcaaatgtgatgataaaaggcaactgacttccaccctcagtttgagctaatagggaatggtgggggccatggcaacctggagaggacaggc

SEQ ID NO: 66413 - DNA, 120 bp, Artificial Sequence
  ENSG00000075073_21 (sequence is synthesized)
attcaaaggggacaagaactactcagctctggacaaacgttgccacatgataatgggagcccactgttgctagatcttctaaatctttcaagagaagctataaatccacatttgtatgtg

SEQ ID NO: 66414 - DNA, 120 bp, Artificial Sequence
  ENSG00000075073_22 (sequence is synthesized)
ccttttgcagggaagccgtctcctggcacacaggctacccaatgccacctttatttttgtttaaatcaaaccaagtccctgggaggcgcccagggtgggcccgcaggggcggctccacag

SEQ ID NO: 66415 - DNA, 120 bp, Artificial Sequence
  ENSG00000075073_23 (sequence is synthesized)
atggggacctgtgacattgtgactgaagccaatatctcatctggccctgagagcaacaccacgggcatcacagccttctcgatgcgcacagtcaccaactacttcatcgtcaatctggcg

SEQ ID NO: 66416 - DNA, 85 bp, Artificial Sequence
  ENSG00000075089_0 (sequence is synthesized)
tcccgcctcagcctcccgagtacttgggattacaggcgcccgccacctcgcccggctgtgttggtcaggctggtctcaagctcct

SEQ ID NO: 66417 - DNA, 120 bp, Artificial Sequence
  ENSG00000075089_1 (sequence is synthesized)
aggcgtgagccaccgcgtccggcccaaaagccttttttggatgagaaagactcactcagcttcgtcctgaagagcaagtgggctggggaagaggagagtatgaatgtgagtccaagagca

SEQ ID NO: 66418 - DNA, 120 bp, Artificial Sequence
  ENSG00000075089_2 (sequence is synthesized)
ggctggggaagaggagagtatgaatgtgagtccaagagcaagttttgcacttttttcttcaaagaatgtcaccgtctgaagaatgcgattggaagacacacacacacacacacacacaca

SEQ ID NO: 66419 - DNA, 120 bp, Artificial Sequence
  ENSG00000075089_3 (sequence is synthesized)
aaaaacttgcgcgaattaatctgcgtagttaaaaacaaatacgaaatgagcgagaaagcacatagtagtcaaatctcgccaccacataaacaggttaagtttggaagcacagcccctaac

SEQ ID NO: 66420 - DNA, 120 bp, Artificial Sequence
  ENSG00000075089_4 (sequence is synthesized)
attcggtgctgcttagcatctccgacttccggcgtcctccgttgctaaggtgaccagaggcgcgtcctaacgctccgcccaacaaaccatagagtaccggaaaaagctcgagcagagggg

SEQ ID NO: 66421 - DNA, 120 bp, Artificial Sequence
  ENSG00000075089_5 (sequence is synthesized)
tcggaaagggaaaacaactacggctgcggtgtggttggtggtgagatgacgaccttagtgctggataatggagcttacaacgccaaaatcggttacagccatgaaaatgtgtcggttatt

SEQ ID NO: 66422 - DNA, 120 bp, Artificial Sequence
  ENSG00000075089_6 (sequence is synthesized)
cctaattgtcagttccggtcaaaaacagcacgtcttaaaacttttactgccaaccagatagatgaaataaaagacccttctggactcttttacatcctcccttttcaaaagggctacttg

SEQ ID NO: 66423 - DNA, 120 bp, Artificial Sequence
  ENSG00000075089_7 (sequence is synthesized)
gtgaattgggatgttcagagacaagtttgggattacctttttggaaaagaaatgtatcaggttgattttttagatactaatattattatcactgaaccatactttaacttcacttcaatt

SEQ ID NO: 66424 - DNA, 120 bp, Artificial Sequence
  ENSG00000075089_8 (sequence is synthesized)
caagaatcaatgaatgaaattctatttgaagaataccagtttcaagcagtattaagagtaaatgctggggctctcagtgcacataggtatttccgagataatccttccgaattatgctgt

SEQ ID NO: 66425 - DNA, 120 bp, Artificial Sequence
  ENSG00000075089_9 (sequence is synthesized)
aagaagcaattattcggataaatgtgggaggaaaactcttaaccaatcatctaaaggagatcatatcttacaggcagctacatgttatggatgaaacacatgtgattaatcaagtgaaag

SEQ ID NO: 66426 - DNA, 120 bp, Artificial Sequence
  ENSG00000075089_10 (sequence is synthesized)
aagatgtatgctatgtgtctcaggatttttatagagacatggatattgcaaagttgaaaggagaagaaaatacagtaatgatagactatgtcttgcctgacttcagtacaattaaaaagg

SEQ ID NO: 66427 - DNA, 120 bp, Artificial Sequence
  ENSG00000075089_11 (sequence is synthesized)
gcttttgtaagccaagggaagagatggtgttgagtggaaaatacaaatctggggaacaaattcttcgtttggccaatgagagatttgctgttccggaaatactctttaatccttctgata

SEQ ID NO: 66428 - DNA, 120 bp, Artificial Sequence
  ENSG00000075089_12 (sequence is synthesized)
taggcattcaagaaatgggaattccagaagctattgtctattcaattcaaaatctacctgaagaaatgcagccgcatttttttaagaacattgtcttgacaggaggaaattcccttttcc

SEQ ID NO: 66429 - DNA, 120 bp, Artificial Sequence
  ENSG00000075089_13 (sequence is synthesized)
caggatttagggatcgggtttactcagaagttcgatgtcttactccaacagattatgatgtttctgttgtgctgcctgaaaaccctattacttatgcctgggaaggtggaaaattgatat

SEQ ID NO: 66430 - DNA, 120 bp, Artificial Sequence
  ENSG00000075089_14 (sequence is synthesized)
cagagaatgatgattttgaagatatggtggtaacaagagaagattacgaagaaaatggacatagcgtctgtgaagagaaatttgatatttaagcaacatttttgaatgaaagttgtgacc

SEQ ID NO: 66431 - DNA, 120 bp, Artificial Sequence
  ENSG00000075089_15 (sequence is synthesized)
ataaggtttaatttcaaagttccttttaaaagaggttaaggaactgtgttaccttttgtcctaagaaaaaggcttgaatttatgtaaatactttgatcgattgctaattttcaaaggctt

SEQ ID NO: 66432 - DNA, 120 bp, Artificial Sequence
  ENSG00000075089_16 (sequence is synthesized)
cttaggtaggttactacagtaaactgtaactcagtccacattttcatttaggagctagactaccataacaatgcttatgctgtttccaagggtaggttatttttcattaaaagaagaatg

SEQ ID NO: 66433 - DNA, 120 bp, Artificial Sequence
  ENSG00000075089_17 (sequence is synthesized)
aatgcattttaagtttaattcttcatagctgaaagcacaaatttaacggcttcactggacagttttccttagaaggtagttttgtgtgactgtgactaaactattttattttaaaatgtc

SEQ ID NO: 66434 - DNA, 120 bp, Artificial Sequence
  ENSG00000075089_18 (sequence is synthesized)
attcttatttatacattctaaagttggaaagactgatcttatatgtgtataatgtttattttgtacctagagtacatttaaaagggtggagactaagctaataaagtttttttggccact

SEQ ID NO: 66435 - DNA, 120 bp, Artificial Sequence
  ENSG00000075089_19 (sequence is synthesized)
atgttcagagacaagtttgggattacctttttggaaaagaaatgtatcaggtaacaaattagagttgattttttagatactaatattattatcactgaaccatactttaacttcacttca

SEQ ID NO: 66436 - DNA, 120 bp, Artificial Sequence
  ENSG00000075089_20 (sequence is synthesized)
ttttaattgtatataaaaggctgtgtgtaacttaaattttaactacaacctaattaaacccaaattaaaatttaattgtttgggtaaaaataaacgaccatgatttagttacttattgtg

SEQ ID NO: 66437 - DNA, 120 bp, Artificial Sequence
  ENSG00000075089_21 (sequence is synthesized)
agtactgatttttacttacattaaatctaagtggtatgcacacattaatttaagaaaataagtatagggaggcaactgtatatattggtgtgtcttttgaacctctgacattttagttat

SEQ ID NO: 66438 - DNA, 120 bp, Artificial Sequence
  ENSG00000075089_22 (sequence is synthesized)
tgcttatttgtgagtttgttttttaactttttaaaggagaaaaacatactaacataattggtttgaaattcatacagcagtatacctatgtagtaaacctgcacgttctgcacatgtatc

SEQ ID NO: 66439 - DNA, 120 bp, Artificial Sequence
  ENSG00000075089_23 (sequence is synthesized)
cactgaaattgagttatatgactatggatatgaatagggtaatactcataaagtcccaaaatattaagtggcattcttggctagcacagtggctaacacctgtaaccccatcagtttggg

SEQ ID NO: 66440 - DNA, 120 bp, Artificial Sequence
  ENSG00000075089_24 (sequence is synthesized)
gatgacgaccttagtgctggataatggagcttacaacgccaaaatcggttacagccatgaaaatgtgtcgtaagtactttctttctccgagggacaagatatatacgcctagtggtttca

SEQ ID NO: 66441 - DNA, 62 bp, Artificial Sequence
  ENSG00000075089_25 (sequence is synthesized)
aggggctctcagtgcacataggtatttccgagataatccttccgaattatgctgtatcattg

SEQ ID NO: 66442 - DNA, 120 bp, Artificial Sequence
  ENSG00000075089_26 (sequence is synthesized)
ggctgctgcgctccctgcccccgcggtgcccccttcccgccgccccgctcctctctcaggcgctcaaagtggcctggaatttgtagaacgcccccctccaagcccgttggcagttgtcct

SEQ ID NO: 66443 - DNA, 120 bp, Artificial Sequence
  ENSG00000075089_27 (sequence is synthesized)
tcctagcccgctggcccttgcccccgcccgctggccgttgcccccgcgacgccccggaagccaggtcctgcctcccgcacctgccaagtccccgccctgccggagtctcgctctgtcgcc

SEQ ID NO: 66444 - DNA, 120 bp, Artificial Sequence
  ENSG00000075089_28 (sequence is synthesized)
ttactattaatctcaagagccaactggtgtagatactgaattgtccttcccttctgcttttcaaactccttgtatgtcaagggttggcaaaacgtaaagcctggaaaaaaaaaaaaaaaa

SEQ ID NO: 66445 - DNA, 120 bp, Artificial Sequence
  ENSG00000075131_0 (sequence is synthesized)
agtctgcacgccgaggtccgcgctgtgtcccgtgttttctgcgtgagaggaaaagatgctagaaccacaggagaatggcgtgattgacctaccagattatgagcatgtagaagatgaaac

SEQ ID NO: 66446 - DNA, 120 bp, Artificial Sequence
  ENSG00000075131_1 (sequence is synthesized)
ttttcctcctttcccacctccagcctctccagagagacaagatggtgaaggaactgagcctgatgaagagtcaggaaatggagcacctgttcgtgtacctccaaagagaacagttaaaag

SEQ ID NO: 66447 - DNA, 120 bp, Artificial Sequence
  ENSG00000075131_2 (sequence is synthesized)
aaatatacccaagctggatgctcagagattaatttcagagagaggacttccagccttaaggcatgtatttgataaggcaaaattcaaaggtaaaggtcatgaggctgaagacttgaagat

SEQ ID NO: 66448 - DNA, 120 bp, Artificial Sequence
  ENSG00000075131_3 (sequence is synthesized)
gctaatcagacacatggagcactgggcacataggctattccctaaactgcagtttgaggattttattgacagagttgaatacctgggaagtaaaaaggaagttcagacctgtttaaaacg

SEQ ID NO: 66449 - DNA, 120 bp, Artificial Sequence
  ENSG00000075131_4 (sequence is synthesized)
aattcgacttgatctccctattttacatgaagattttgttagcaataatgatgaagttgcggagaataatgaacatgatgtcacttctactgaattagatccctttctgacaaacttatc

SEQ ID NO: 66450 - DNA, 120 bp, Artificial Sequence
  ENSG00000075131_5 (sequence is synthesized)
tgaaagtgagatgtttgcttctgagttaagtagaagcctaacagaagagcaacaacaaagaattgagagaaataaacaactggccttggaaagaaggcaggcaaagctgctgagtaatag

SEQ ID NO: 66451 - DNA, 120 bp, Artificial Sequence
  ENSG00000075131_6 (sequence is synthesized)
tcagaccctaggaaatgatatgttaatgaatacacccagggcacacacggttgaagaggttaatactgatgaggatcaaaaggaggagtcaaatggattaaacgaagacattctggacaa

SEQ ID NO: 66452 - DNA, 120 bp, Artificial Sequence
  ENSG00000075131_7 (sequence is synthesized)
gctggaccagtcttttaaaaatgtgcaacagcaacttgatgctacatccagaaatattactgaagctagataagtttccattaagagaaaatgtatctgttaagtcatcgtcctgcaagc

SEQ ID NO: 66453 - DNA, 120 bp, Artificial Sequence
  ENSG00000075131_8 (sequence is synthesized)
ttggcgttactatgtattttttcttcttggagtgaaaatccttagatagtaaaactgttatagattattgtttaaaatctgataatctggtatttatttataattatgcttgtcacttta

SEQ ID NO: 66454 - DNA, 120 bp, Artificial Sequence
  ENSG00000075131_9 (sequence is synthesized)
gttaaatctatttgttctctttagtgtttgtttttatataggtatttcttcataaaatgattaggaggtaataagcagtttctgctgctggtctgtcattgaatgccttgttttcactaa

SEQ ID NO: 66455 - DNA, 120 bp, Artificial Sequence
  ENSG00000075131_10 (sequence is synthesized)
ttcactaagttgggaggttttgtttctgttttttactgctccttgcaaagcagggctaatccatggacagtgtgcccagagtagtctagttgaagttttttgttttgttttgttttgttt

SEQ ID NO: 66456 - DNA, 120 bp, Artificial Sequence
  ENSG00000075131_11 (sequence is synthesized)
ggacgccgtggcgccctctgtcgccccgaggcaagcaggtggacccagctgagaagaagtctgtgtcgctgtgtggtgagctctccaggccaggtgccgcgcggcctccacctctgcgag

SEQ ID NO: 66457 - DNA, 120 bp, Artificial Sequence
  ENSG00000075131_12 (sequence is synthesized)
gcctgggggcggggtccgtcgcggacgccgtggcgccctctgtcgccccgaggcaagcaggtggacccagctgagaagaagtctgtgtcgctgtgtggtgagctctccaggccaggtgcc

SEQ ID NO: 66458 - DNA, 120 bp, Artificial Sequence
  ENSG00000075131_13 (sequence is synthesized)
gcgcggcctccacctctgcggtaaccggcctgcccccgacccctgtccccaagccgagccgtgttgacgaaaatgaaataacaaaataaataaggaaaaggaccccttcctgtgtccaga

SEQ ID NO: 66459 - DNA, 120 bp, Artificial Sequence
  ENSG00000075131_14 (sequence is synthesized)
ctgtcgccccgaggcaagcaggtggacccagctgagaagaagtctgtgtcgctgtgtggtcctttgccgtgtgtactgcgagagtgaagaccattctcattaatcagactgtcgacattc

SEQ ID NO: 66460 - DNA, 120 bp, Artificial Sequence
  ENSG00000075131_15 (sequence is synthesized)
cagaaaatgtcaacattactctgaagggacacacagttatcgtgaatggccccagaggaaccctgcggagggacttcaatcacatcaatgtagaactcagtcttcttggaaagaaaaaaa

SEQ ID NO: 66461 - DNA, 120 bp, Artificial Sequence
  ENSG00000075131_16 (sequence is synthesized)
aagaggctctggttgacaaatggtggggtaacagaaaagaactggctaccgttcggactatttgtagtcatgtacagaacatgatcaagggtgttacactgggcttccgttacaagatga

SEQ ID NO: 66462 - DNA, 120 bp, Artificial Sequence
  ENSG00000075131_17 (sequence is synthesized)
atgcttacttccccatcatcgtcgttatcccggagaatgggtctgttgttgaaatccgaaatttcttgggtgaaaaatacatccgcagggtgcggatgagaccaggtgttgcttgttcag

SEQ ID NO: 66463 - DNA, 120 bp, Artificial Sequence
  ENSG00000075131_18 (sequence is synthesized)
tatctcaagcccagaaagatgaattaatctttgaaggaaatgacattgagcttgtttcaaattcagcggctttgattcagcaagccacaacagtttaaaacaaggatatcaggaaatttt

SEQ ID NO: 66464 - DNA, 120 bp, Artificial Sequence
  ENSG00000075131_19 (sequence is synthesized)
tgaatggtatctatgtctctgaaaaaggaactgttcagcaggatgatgaataagatctaagagttatccagctacagaaagaagacgccagatgactcctaagacctacttgtgatattt

SEQ ID NO: 66465 - DNA, 120 bp, Artificial Sequence
  ENSG00000075142_0 (sequence is synthesized)
gggcggagaggcctggcgcacagggcgagggcggctgcggcgcagtctgcagcatggcgtacccggggcatcctggcgccggcggcgggtactacccaggcgggtatggaggggctcccg

SEQ ID NO: 66466 - DNA, 120 bp, Artificial Sequence
  ENSG00000075142_1 (sequence is synthesized)
gagggcctgcgtttcccggacaaactcaggatccgctgtatggttactttgctgctgtagctggacaggatgggcagatagatgctgatgaattgcagagatgtctgacacagtctggca

SEQ ID NO: 66467 - DNA, 120 bp, Artificial Sequence
  ENSG00000075142_2 (sequence is synthesized)
ttgctggaggatacaaaccttttaacctggagacttgccggcttatggtttcaatgctggatagagatatgtctggcacaatgggtttcaatgaatttaaagaactctgggctgtactga

SEQ ID NO: 66468 - DNA, 120 bp, Artificial Sequence
  ENSG00000075142_3 (sequence is synthesized)
atggctggagacaacactttatcagttttgacactgacaggagtggaacagtagacccacaagaattgcagaaggccctgacaacaatgggatttaggttgagtccccaggctgtgaatt

SEQ ID NO: 66469 - DNA, 120 bp, Artificial Sequence
  ENSG00000075142_4 (sequence is synthesized)
caattgcaaaacgatacagcaccaatggaaagatcaccttcgacgactacatcgcctgctgcgtcaaactgagggctcttacagacagctttcgaagacgggatactgctcagcaaggtg

SEQ ID NO: 66470 - DNA, 120 bp, Artificial Sequence
  ENSG00000075142_5 (sequence is synthesized)
ttgtgaatttcccatatgatgatttcattcaatgtgtcatgagtgtttaaatcaagaggaagctgcatgaatgtaatcaacattccaactggagctctcctttgcttgtcctctttgcct

SEQ ID NO: 66471 - DNA, 120 bp, Artificial Sequence
  ENSG00000075142_6 (sequence is synthesized)
tcggtaatatgtataaacttacatcacgactttctcttaacagctgttgtaaagtttattactttatgtacaactgaagttttgttttagttttgataataaattctttggaactttaat

SEQ ID NO: 66472 - DNA, 120 bp, Artificial Sequence
  ENSG00000075142_7 (sequence is synthesized)
aagatctagtctgttacaccatttagaactttcctgagccattatcagtcatgccttattttcttgctaaaactctatgtaaatttaagtatgcaaaatgtttaagtcacattatttatt

SEQ ID NO: 66473 - DNA, 120 bp, Artificial Sequence
  ENSG00000075142_8 (sequence is synthesized)
taaatgacatagacgcacttgggtgaaataaaacaacaaaaaaggtaatccagtaatccacgtcaggattcaccttagaagtttagcacacgcccttcaaaacctgttgaataatttgat

SEQ ID NO: 66474 - DNA, 120 bp, Artificial Sequence
  ENSG00000075142_9 (sequence is synthesized)
tggcaaatactatctgtcaccaagtccctttttgtcatctatttaaacctttgttaactctccttaaaaatcttgtacattataagcttaactatataaaaagaaaattgatagaaaaag

SEQ ID NO: 66475 - DNA, 120 bp, Artificial Sequence
  ENSG00000075142_10 (sequence is synthesized)
actaagggaatatatggaaatattaacaatgtttattttggatgaatggaattctagatgactttaattttctttatatcagtatttttcagattttctatatgctttccttttaaaatc

SEQ ID NO: 66476 - DNA, 120 bp, Artificial Sequence
  ENSG00000075142_11 (sequence is synthesized)
agattttagtttttaaaatactgatacatccattttgatataccatgtattcacactttaaaaaatacacatagcagagtatcggaaagtatgtaccaaaacattgatctggctaccact

SEQ ID NO: 66477 - DNA, 120 bp, Artificial Sequence
  ENSG00000075142_12 (sequence is synthesized)
gggagtcaggatcatgagttcatcttcttccttcttactgcttttccaaacattctccagtaagcaggtactacatttataatggaaggaattttttaaaaaattttaagctgtacactt

SEQ ID NO: 66478 - DNA, 120 bp, Artificial Sequence
  ENSG00000075142_13 (sequence is synthesized)
tcaagtaagatctgaattctaatgctggcttgtgcctcttactatgtggtttggtcattatagataatgcccagtttcagtttccccatctttgaaaaggagataatatgttatctcttg

SEQ ID NO: 66479 - DNA, 120 bp, Artificial Sequence
  ENSG00000075142_14 (sequence is synthesized)
ggagtagttctgaatatgaagtgtgttgatacaagaagcactgacaatgtttctgtttcttaaatttaaaactggcctggtttgccttttttatcaagagagcttaacagataaaaaatg

SEQ ID NO: 66480 - DNA, 120 bp, Artificial Sequence
  ENSG00000075142_15 (sequence is synthesized)
aaattagtctattttctacttgccagcagagtatctgtcttattttaggatgcagtgtgaaacttaccattcaactgaacaactagttgtcaactaatgaaaataaaacattttctctaa

SEQ ID NO: 66481 - DNA, 120 bp, Artificial Sequence
  ENSG00000075142_16 (sequence is synthesized)
ctagtaaacacaaagtaataaatgatcactaaaaagctttctgaaataattagcttctattatagggtggaatttggtgtgaataaaggaagaaaagaaatttagtaaacagaatgttgt

SEQ ID NO: 66482 - DNA, 120 bp, Artificial Sequence
  ENSG00000075142_17 (sequence is synthesized)
tcaggaatttaaggaaacatcagagtattatagaacaagtacagagtccagagtgtcaggacagctttttttctttaacattgattcctctgcaagtgatgggatttttcacatcccact

SEQ ID NO: 66483 - DNA, 120 bp, Artificial Sequence
  ENSG00000075142_18 (sequence is synthesized)
aagggaatattagtaccagagatgatgctaggacagaagggcaaacagcatagcctgaagcacccacaaagtacagcctagttccagtaacaagaccgctttttataagtggttcacaat

SEQ ID NO: 66484 - DNA, 120 bp, Artificial Sequence
  ENSG00000075142_19 (sequence is synthesized)
ggcaacgctatttccttataatcaagtcatgtaagttatcttttccccacagtaaaaattggcacttgagctttttctccatagcccctttctatttttaaatcattaattttacatcat

SEQ ID NO: 66485 - DNA, 120 bp, Artificial Sequence
  ENSG00000075142_20 (sequence is synthesized)
accaagaataatctacaataacttttttagccattgaatattgaattccccttatccttgatctttcatttaatccttagaaaatatcgcaaaatacagctctaatccttgattacagtt

SEQ ID NO: 66486 - DNA, 120 bp, Artificial Sequence
  ENSG00000075142_21 (sequence is synthesized)
aagggattcaaaagttagaaagagttatcatccagaatttattaatttcatttattagtcttaactatagtgagaccatgatttgatttgcattcagagacctgggttcaagacccagct

SEQ ID NO: 66487 - DNA, 120 bp, Artificial Sequence
  ENSG00000075142_22 (sequence is synthesized)
tgttgtatttattagctgggtcacttaagcaggtttcttaattgctgtgacactatatgaataaagaagatatagtagtaatgcctttttcactgagccattgtaagatttctattagaa

SEQ ID NO: 66488 - DNA, 120 bp, Artificial Sequence
  ENSG00000075142_23 (sequence is synthesized)
atgcccttgaaaaacactatgcagatatactatctgcttttgtcttctgtaaacaaatcatgtcagtcactgagaatagataacagctcaatagttttgcatacctatgttcttcattga

SEQ ID NO: 66489 - DNA, 68 bp, Artificial Sequence
  ENSG00000075142_24 (sequence is synthesized)
taacagctcaatagttttgcatacctatgttcttcattgagggcataaggcaggcaacaacttaaatc

SEQ ID NO: 66490 - DNA, 84 bp, Artificial Sequence
  ENSG00000075142_25 (sequence is synthesized)
gtcagctcactgcaacctccacgtctggactataggcatgtgccaccatacctggttaagtttttttgtatttttagtagagac

SEQ ID NO: 66491 - DNA, 66 bp, Artificial Sequence
  ENSG00000075142_26 (sequence is synthesized)
tggtctcgatctcctgtccttgtgatctgtcaaatcacaatttaaaacaagttatttactaaacag

SEQ ID NO: 66492 - DNA, 120 bp, Artificial Sequence
  ENSG00000075142_27 (sequence is synthesized)
actctgcaagaaggcaatcctctaaggatcaccagcttctacctataagacttcaactcaagatgcaggatgggcagatagatgctgatgaattgcagagatgtctgacacagtctggca

SEQ ID NO: 66493 - DNA, 120 bp, Artificial Sequence
  ENSG00000075142_28 (sequence is synthesized)
ggtgagttctataaggtcgtgtcatcaccacaagccaagacacagtttttattacatttcatctctcagtgcttctcaacttttattcttcccaaattttttcttgctttagtagttttt

SEQ ID NO: 66494 - DNA, 120 bp, Artificial Sequence
  ENSG00000075142_29 (sequence is synthesized)
ttcagattactattaagcatatctggcaaaataattttttggttttttttccagaatttattttagattagtaagtaatctgccattaaaataaacaattaaattttactaaaatgttct

SEQ ID NO: 66495 - DNA, 120 bp, Artificial Sequence
  ENSG00000075142_30 (sequence is synthesized)
aaaacacaatcagctaacttgtgcatttttgatcagataataatgaatttttccccagaatgtgaaatatttggaaagagtgaaattaaaataaaatccttttctatagggcagagctga

SEQ ID NO: 66496 - DNA, 120 bp, Artificial Sequence
  ENSG00000075142_31 (sequence is synthesized)
aatggtagagaaactgattacagcccatttgttatattggggactctttatctgtttcttaagcagtatctttgttattaagaagctagaaattcggtgcttttatcacaatgaagtaat

SEQ ID NO: 66497 - DNA, 120 bp, Artificial Sequence
  ENSG00000075142_32 (sequence is synthesized)
aaacttgttcgtctgtgataaggttgagagaaacagctggaggtagggctttccttctaggtccattatattgtatgtttctgtgagaagaaaagatgtttgaggcattctagtagaatg

SEQ ID NO: 66498 - DNA, 120 bp, Artificial Sequence
  ENSG00000075151_0 (sequence is synthesized)
gtaacacaagtggcaagacagccgggaacccctaccccatccccttattcagcacatgaaataaacaaggggcatccaaatcttgcggcaacgcccccgggacatgcatcgtcccctgga

SEQ ID NO: 66499 - DNA, 120 bp, Artificial Sequence
  ENSG00000075151_1 (sequence is synthesized)
ctctctcaaaccccttatccctctggacagaatgcaggtccaaccacgctggtataccctcaaacccctcagacaatgaattcacaacctcaaacccgttctccgtttttccagaggcct

SEQ ID NO: 66500 - DNA, 120 bp, Artificial Sequence
  ENSG00000075151_2 (sequence is synthesized)
caaatacagcctcctagagctaccatcccgaacagcagtccttccattcgtcctggtgcacagacacccactgcagtgtaccaggctaatcagcacatcatgatggttaaccatctgccc

SEQ ID NO: 66501 - DNA, 120 bp, Artificial Sequence
  ENSG00000075151_3 (sequence is synthesized)
atgccgtacccagtgccccaggggcctcagtactgtataccacagtaccgtcatagtggccctccttatgttgggcccccccaacaatatccagttcaaccaccggggccaggtcctttt

SEQ ID NO: 66502 - DNA, 120 bp, Artificial Sequence
  ENSG00000075151_4 (sequence is synthesized)
tatcctggaccaggacctggggacttccccaatgcttatggaacgcctttttacccaagtcagccggtgtatcagtcagcacctatcatagtgcctacgcagcaacagccgcctccagcc

SEQ ID NO: 66503 - DNA, 120 bp, Artificial Sequence
  ENSG00000075151_5 (sequence is synthesized)
aagagagagaaaaaaactataagaattcgggatccaaaccagggaggtaaagacataacagaggagattatgtctggaggtggcagcagaaatcctactccacccataggaagacccacg

SEQ ID NO: 66504 - DNA, 120 bp, Artificial Sequence
  ENSG00000075151_6 (sequence is synthesized)
tccacacctactcctcctcagcagctgcccagccaggtccccgagcacagccctgtggtttatgggactgtggagagcgctcatcttgctgccagcacccctgtcactgcagctagcgac

SEQ ID NO: 66505 - DNA, 120 bp, Artificial Sequence
  ENSG00000075151_7 (sequence is synthesized)
cagaagcaagaggagaagccaaaaccagatccagtgttaaagtctccttccccagtccttaggctagtcctcagtggagagaagaaagaacaagaaggccagacatctgaaactactgca

SEQ ID NO: 66506 - DNA, 120 bp, Artificial Sequence
  ENSG00000075151_8 (sequence is synthesized)
atagtatccatagcagagcttcctctgcctccatcacctaccactgtttcttctgttgctcgaagtacaattgcagcccccacctcttctgctcttagtagccaaccaatattcaccact

SEQ ID NO: 66507 - DNA, 120 bp, Artificial Sequence
  ENSG00000075151_9 (sequence is synthesized)
gctatagatgacagatgtgaactctcatccccaagagaagacacaattcctatacccagcctcacatcttgcacagaaacatcagaccctttaccaacaaatgaaaatgatgatgatata

SEQ ID NO: 66508 - DNA, 120 bp, Artificial Sequence
  ENSG00000075151_10 (sequence is synthesized)
tgcaagaaaccctgtagtgtagcacctaatgatattccactggtttctagtactaacctaattaatgaaataaatggagttagcgaaaaattatcagccacggagagcattgtggaaata

SEQ ID NO: 66509 - DNA, 120 bp, Artificial Sequence
  ENSG00000075151_11 (sequence is synthesized)
gtaaaacaggaagtattgccattgactcttgaattggagattctcgaaaatcccccagaagaaatgaaactggagtgtatcccagctcccatcaccccttccacagttccttcctttcct

SEQ ID NO: 66510 - DNA, 120 bp, Artificial Sequence
  ENSG00000075151_12 (sequence is synthesized)
ccaactcctccaactcctccagcttctcctcctcacactccagtcattgttcctgctgctgccactactgttagttctccgagtgctgccatcacagtccagagagtcctagaggaggac

SEQ ID NO: 66511 - DNA, 120 bp, Artificial Sequence
  ENSG00000075151_13 (sequence is synthesized)
gagagcataagaacttgccttagtgaagatgcaaaagagattcagaacaaaatagaggtagaagcagatgggcaaacagaagagattttggattctcaaaacttaaattcaagaaggagc

SEQ ID NO: 66512 - DNA, 120 bp, Artificial Sequence
  ENSG00000075151_14 (sequence is synthesized)
cctgtcccagctcaaatagctataactgtaccaaagacatggaagaaaccaaaagatcggacccgaaccactgaagagatgttagaggcagaattggagcttaaagctgaagaggagctt

SEQ ID NO: 66513 - DNA, 120 bp, Artificial Sequence
  ENSG00000075151_15 (sequence is synthesized)
tccattgacaaagtacttgaatctgaacaagataaaatgagccaggggtttcatcctgaaagagacccctctgacctaaaaaaagtgaaagctgtggaagaaaatggagaagaagctgag

SEQ ID NO: 66514 - DNA, 120 bp, Artificial Sequence
  ENSG00000075151_16 (sequence is synthesized)
ccagtacgtaatggtgctgagagtgtttctgagggtgaaggaatagatgctaattcaggctccacagatagttctggtgatggggttacatttccatttaaaccagaatcctggaagcct

SEQ ID NO: 66515 - DNA, 120 bp, Artificial Sequence
  ENSG00000075151_17 (sequence is synthesized)
actgatactgaaggtaagaagcagtatgacagggagtttctgctggacttccagttcatgcctgcctgtatacaaaaaccagagggcctgcctcctatcagtgatgtggttcttgacaag

SEQ ID NO: 66516 - DNA, 120 bp, Artificial Sequence
  ENSG00000075151_18 (sequence is synthesized)
atcaaccaacccaaattgccaatgcgaactctggatcctcgaattttgcctcgaggaccagactttacaccagcctttgctgattttggaaggcagacacctggtggaagaggcgtacct

SEQ ID NO: 66517 - DNA, 120 bp, Artificial Sequence
  ENSG00000075151_19 (sequence is synthesized)
ttgttgaatgttgggtcacgaagatctcaacctggccaaagaagagaacccagaaagatcatcacagtttctgtaaaagaagatgtacacctgaaaaaggcagaaaatgcctggaagcca

SEQ ID NO: 66518 - DNA, 120 bp, Artificial Sequence
  ENSG00000075151_20 (sequence is synthesized)
agccaaaaacgagacagccaagccgatgatcccgaaaacattaaaacccaggagctttttagaaaagttcgaagtatcttaaataaattgacaccacagatgttcaatcaactgatgaag

SEQ ID NO: 66519 - DNA, 120 bp, Artificial Sequence
  ENSG00000075151_21 (sequence is synthesized)
caagtgtcaggacttactgttgacacagaggagcggctgaaaggagttattgacctggtctttgagaaggctattgatgaacccagtttctctgtggcttacgcaaacatgtgtcgatgt

SEQ ID NO: 66520 - DNA, 120 bp, Artificial Sequence
  ENSG00000075151_22 (sequence is synthesized)
ctagtaacgctgaaagtacccatggcagacaagcctggtaacacagtgaatttccggaagctgctactgaaccgttgccagaaggagtttgaaaaagataaagcagatgatgatgtcttt

SEQ ID NO: 66521 - DNA, 120 bp, Artificial Sequence
  ENSG00000075151_23 (sequence is synthesized)
gagaagaagcagaaagaacttgaggctgccagtgctccagaggagaggacaaggcttcatgatgaactggaagaagccaaggacaaagcccggcggagatccattggcaacatcaagttt

SEQ ID NO: 66522 - DNA, 120 bp, Artificial Sequence
  ENSG00000075151_24 (sequence is synthesized)
atgcatgactgtgtggtgaagctgctaaagaaccatgatgaagaatccctggagtgcctgtgtcgcctgctcaccaccattggcaaagacttggactttgaaaaagcaaagccacgtatg

SEQ ID NO: 66523 - DNA, 120 bp, Artificial Sequence
  ENSG00000075151_25 (sequence is synthesized)
gaccagtactttaatcagatggagaaaattgtgaaagaaagaaaaacctcatctaggattcggttcatgcttcaagatgttatagacctaaggctgtgcaattgggtatctcgaagagca

SEQ ID NO: 66524 - DNA, 120 bp, Artificial Sequence
  ENSG00000075151_26 (sequence is synthesized)
gatcaagggcctaaaactatcgaacagattcacaaagaggctaaaatagaagaacaagaagagcaaaggaaggtccagcaactcatgaccaaagagaagagaagaccaggtgtccagaga

SEQ ID NO: 66525 - DNA, 120 bp, Artificial Sequence
  ENSG00000075151_27 (sequence is synthesized)
gtggacgaaggtgggtggaacactgtacaaggggccaagaacagtcgggtactggacccctcaaaattcctaaaaatcactaagcctacaattgatgaaaaaattcagctggtacctaaa

SEQ ID NO: 66526 - DNA, 120 bp, Artificial Sequence
  ENSG00000075151_28 (sequence is synthesized)
gcacagctaggcagctggggaaaaggcagcagtggtggagcaaaggcaagtgagactgatgccttacggtcaagtgcttccagtttaaacagattctctgccctgcaacctccagcaccc

SEQ ID NO: 66527 - DNA, 120 bp, Artificial Sequence
  ENSG00000075151_29 (sequence is synthesized)
tcagggtccacgccatccacgcctgtagagtttgattcccgaaggaccttaactagtcgtggaagtatgggcagggagaagaatgacaagccccttccatctgcaacagctcggccaaat

SEQ ID NO: 66528 - DNA, 120 bp, Artificial Sequence
  ENSG00000075151_30 (sequence is synthesized)
actttcatgaggggtggcagcagtaaagacctgctagacaatcagtctcaagaagagcagcggagagagatgctggagaccgtgaagcagctcacaggaggtgtggatgtggagaggaac

SEQ ID NO: 66529 - DNA, 120 bp, Artificial Sequence
  ENSG00000075151_31 (sequence is synthesized)
agcactgaggctgagcgaaataaaacaagggagtcagcaaaaccagaaatttcagcaatgtcagctcatgacaaggctgcattatcagaagaggaactggagaggaagtcgaaatctatc

SEQ ID NO: 66530 - DNA, 120 bp, Artificial Sequence
  ENSG00000075151_32 (sequence is synthesized)
attgatgaatttctacacattaatgattttaaggaagccatgcagtgtgtggaagagctgaatgcccagggcctactacatgtttttgtgagagtgggagtggagtccaccctggaaagg

SEQ ID NO: 66531 - DNA, 120 bp, Artificial Sequence
  ENSG00000075151_33 (sequence is synthesized)
agccagatcaccagggatcacatgggccaattactctatcagctggtacagtcagaaaaactcagcaaacaggactttttcaaaggtttttcagaaactttggaattggcagatgacatg

SEQ ID NO: 66532 - DNA, 120 bp, Artificial Sequence
  ENSG00000075151_34 (sequence is synthesized)
gccattgatattccccatatttggttgtaccttgctgaactggtgacccccatgttaaaagaaggtggaatctccatgagagaacttaccatagaatttagcaaacctttacttcctgtt

SEQ ID NO: 66533 - DNA, 120 bp, Artificial Sequence
  ENSG00000075151_35 (sequence is synthesized)
ggaagagctggggtcttgctatctgaaatattgcacctactatgcaaacaaatgagccataagaaagtgggagccttatggagggaggctgacctcagctggaaggactttttaccagaa

SEQ ID NO: 66534 - DNA, 120 bp, Artificial Sequence
  ENSG00000075151_36 (sequence is synthesized)
ggagaagatgtacataattttcttttggagcagaagttggacttcatagagtctgacagtccctgttcctctgaagcactttcaaagaaagaactgtctgccgaagagctgtataagcga

SEQ ID NO: 66535 - DNA, 120 bp, Artificial Sequence
  ENSG00000075151_37 (sequence is synthesized)
ctcgagaaactcattattgaggacaaagcgaatgatgaacagatctttgactgggtagaggctaatctagacgaaatccagatgagttcacctacattccttagagctttaatgactgct

SEQ ID NO: 66536 - DNA, 120 bp, Artificial Sequence
  ENSG00000075151_38 (sequence is synthesized)
gtttgtaaagcagctattatagccgactcttctaccttcagagtggacactgctgttatcaagcagagagtgccgatcttactcaagtacctagactcagatacagagaaggaactgcaa

SEQ ID NO: 66537 - DNA, 120 bp, Artificial Sequence
  ENSG00000075151_39 (sequence is synthesized)
gcactttatgcactacaagcatcgatagtaaaacttgatcaacctgccaatttgctgcggatgttttttgattgtctatatgacgaggaggtgatctccgaggatgccttctacaaatgg

SEQ ID NO: 66538 - DNA, 120 bp, Artificial Sequence
  ENSG00000075151_40 (sequence is synthesized)
gagagcagcaaggaccctgcagagcagaatgggaagggcgtggctctgaaatctgtcacggcattcttcacgtggctgcgggaagcagaagaggagtctgaggataactaaaacttcaaa

SEQ ID NO: 66539 - DNA, 120 bp, Artificial Sequence
  ENSG00000075151_41 (sequence is synthesized)
tacacaaaatgaaacaaaagaaacaatttaagtatttttttaaaaagtttcacgtcttcgccaatcacagtgcagcaaggccaattctcgcagaaacccccacgtgtgcacgagtgggag

SEQ ID NO: 66540 - DNA, 120 bp, Artificial Sequence
  ENSG00000075151_42 (sequence is synthesized)
aggggaaagagaaaaaaaggtgatcatggaggaaaaaggtactggataaaagtaaacttcaaaccttagggcgggagcactaaaaccaaaatacatgtattatttatagaaaatattttc

SEQ ID NO: 66541 - DNA, 120 bp, Artificial Sequence
  ENSG00000075151_43 (sequence is synthesized)
tgttttaatcttttctttttaaacaaggactcatacttaaaaaaatgtttagcaaaaaaaaaaaaagttgagaacttttaatttattttaaggactgcaaatgccagtgtaattttttaa

SEQ ID NO: 66542 - DNA, 120 bp, Artificial Sequence
  ENSG00000075151_44 (sequence is synthesized)
tttgcagtttctgtaaacaacttgtataatagaaaagcagagaaataaatttccctccccttcaagatgcacctcatgtttgttttaaggtatagcatttagtccagatttgagaaagtt

SEQ ID NO: 66543 - DNA, 120 bp, Artificial Sequence
  ENSG00000075151_45 (sequence is synthesized)
tggggtgaacaaggtaagaaagatttttttttttttggcatcaaatctttctgcctgcctctcagcttgcttcagaaaatttaaaaaatcacaatagtaatcaaaacatacataacattg

SEQ ID NO: 66544 - DNA, 120 bp, Artificial Sequence
  ENSG00000075151_46 (sequence is synthesized)
aaacagaaggaaatgctgtggaccacagaactccaagaattgtttaaaaaaaaaaaagtgctaccctgagaaaagtactcttaatactcttgaaatctttagagcaactttaaggcttgt

SEQ ID NO: 66545 - DNA, 120 bp, Artificial Sequence
  ENSG00000075151_47 (sequence is synthesized)
aaatacatagaacaaatatttaaaaaaacaaaaagaaattgactcagtactatttcttttcactttgaaaatataaagaacaaaataaagacaaacattgcaagtttaaaagaaagtaaa

SEQ ID NO: 66546 - DNA, 120 bp, Artificial Sequence
  ENSG00000075151_48 (sequence is synthesized)
gccggactgctggaggcggccacagcgccatgttggatgctctgctcgttgagtgaagaaaatccaccggcatcgcctgagccccgctaccgagaagggcgccgcttcctccggggaggg

SEQ ID NO: 66547 - DNA, 120 bp, Artificial Sequence
  ENSG00000075151_49 (sequence is synthesized)
ggataaagatcccccgccgccggcccatgaggatattgccgtgaaaggcacagcgactgcagcaggaaccggacccggcaccggagcggcggcggcggcggcagcagcggtaccgcctcc

SEQ ID NO: 66548 - DNA, 120 bp, Artificial Sequence
  ENSG00000075151_50 (sequence is synthesized)
gcggcggcggcggcggcggcggcggcagcggtcccccctcctcacccgaacatcagggccctccagactcaggcgccccaacaaattcctagaggacctgtgcaacaacctcttgaggat

SEQ ID NO: 66549 - DNA, 120 bp, Artificial Sequence
  ENSG00000075151_51 (sequence is synthesized)
ctatttattgtctaattcaaatcactcctgaggggagagagataaaacgagagagagtgagagagtgtgtgtatgtgcgtgtatgcgcacgtatgtgcatgcacatgtatgtatgtatat

SEQ ID NO: 66550 - DNA, 120 bp, Artificial Sequence
  ENSG00000075151_52 (sequence is synthesized)
cagaaacatcgaatgaatgctgaaattcctagtctggtttcttcagtggtgtgtttgtgttttagtacaacctgcaaaagagttactccattgtctaaaaatgcaaatgagaatttccaa

SEQ ID NO: 66551 - DNA, 120 bp, Artificial Sequence
  ENSG00000075151_53 (sequence is synthesized)
actccatgaaatcctacctcatggcaagacagcagcttttattcgttgattctagtcaagaagaagaagaagaggcaaagactatcctttccatactcatattaaagcagataaagaata

SEQ ID NO: 66552 - DNA, 120 bp, Artificial Sequence
  ENSG00000075151_54 (sequence is synthesized)
cacttgagttctttttacttggcagaagctagtctgcattaatttggtcttgattttttttttccctattttttcaattgaggtgacctgcaaataggtttaaaaatagtgccaaccatg

SEQ ID NO: 66553 - DNA, 86 bp, Artificial Sequence
  ENSG00000075151_55 (sequence is synthesized)
aggtgacctgcaaataggtttaaaaatagtgccaaccatggccagggatggtggctcaggtctgtaatgctagcactttgtggggt

SEQ ID NO: 66554 - DNA, 120 bp, Artificial Sequence
  ENSG00000075151_56 (sequence is synthesized)
atcttcactcccgctgtctcagcagtctacagcacgaccccttatccctctggacagaatgcaggtccaaccacgctggtataccctcaaacccctcagacaatgaattcacaacctcaa

SEQ ID NO: 66555 - DNA, 120 bp, Artificial Sequence
  ENSG00000075151_57 (sequence is synthesized)
cctgccggccgccacagcccagccaggaaagggacagcggctcaagcccctgcatcgggcttgggcggagcttttggggtgccccggcagcagcactgcggggggacccccagaccctct

SEQ ID NO: 66556 - DNA, 120 bp, Artificial Sequence
  ENSG00000075151_58 (sequence is synthesized)
gcaatactgtgaaagctagccccacttggccatgcttctgcagccccttccttttagagcttggggtcccttctcccctcctcccctaaggtaccctccccccctttattgggcagaatt

SEQ ID NO: 66557 - DNA, 120 bp, Artificial Sequence
  ENSG00000075151_59 (sequence is synthesized)
tgcagggaaggcttttctctggttgttgtgaggattacaccctcctgctcttcacctcccctcggctccccctacagcgggacacagtgggcttccataattattattagtacataataa

SEQ ID NO: 66558 - DNA, 120 bp, Artificial Sequence
  ENSG00000075151_60 (sequence is synthesized)
actttatcggtaaatttcttgtttgaaaccaatcagctcgtttccgaggtatgttggattttcagtctaaggtgaaaatgtacagaaagcagttcctctggataattttttttagtaatg

SEQ ID NO: 66559 - DNA, 120 bp, Artificial Sequence
  ENSG00000075151_61 (sequence is synthesized)
ggagagttgtgatgtggtttgtggtagagatctgaggaggaaatgtgacgccggacgcttccctgtctttgacctttttaaaggaagaggaagttcaccgacattacccatcacccacaa

SEQ ID NO: 66560 - DNA, 120 bp, Artificial Sequence
  ENSG00000075151_62 (sequence is synthesized)
aagtctcacttcttggaagatttgtgttaggctgaatatttttaatgggctttaatttactcctcataggcctgatgtctagagagttaccagggcttctggaggaaagtctagtattga

SEQ ID NO: 66561 - DNA, 120 bp, Artificial Sequence
  ENSG00000075151_63 (sequence is synthesized)
atgtttctaatttcatgttatttgctcgattgtagaattttggagagctttgattgaaaagacttggtgatggggtattttagtcaaaaactagccggtgaaggtaaaacgttgaattca

SEQ ID NO: 66562 - DNA, 120 bp, Artificial Sequence
  ENSG00000075151_64 (sequence is synthesized)
tgtattccacggagatttagaaaggtattgcgtacctgagaataacatttcatcatgcatcacctcctccctacacccactgtatttgtgtaaatcaataaataatgattggatgttaga

SEQ ID NO: 66563 - DNA, 120 bp, Artificial Sequence
  ENSG00000075151_65 (sequence is synthesized)
agtgtaatcatcatctgctttccacatataaaaatcaccttggttatctatagttcaatcttctaaagccttcaagcctctgaaattcttcaaaattcagaagaagtagaaggaagtttt

SEQ ID NO: 66564 - DNA, 120 bp, Artificial Sequence
  ENSG00000075151_66 (sequence is synthesized)
gtaataatattttattgtagcttttctaagctctaaagaatgaagttaggagatccgttggtgctcttaattaggaatctgggagagatgtcttaaaggctgtgtcacctggatagtcca

SEQ ID NO: 66565 - DNA, 120 bp, Artificial Sequence
  ENSG00000075151_67 (sequence is synthesized)
cggaaaggaaaactcatgatctttatggaagagctatgtataataatgaaatactgcttagtatgtgctaagcccatcataagccttattttgctaattctttccagcaatcccacagag

SEQ ID NO: 66566 - DNA, 120 bp, Artificial Sequence
  ENSG00000075151_68 (sequence is synthesized)
agtctacagcacgtcactgaatgtatatcagtaatctccagactcgcatacaaccttgtcttggtggaaagctctgactatggattttgaacataagaaagagaatgtgagtgtctgtta

SEQ ID NO: 66567 - DNA, 120 bp, Artificial Sequence
  ENSG00000075151_69 (sequence is synthesized)
aaagccatcactcctcagatgatgttaaaagtcttcactccacatcttctgaggagttgtcaagtgttcctgcttctgaccacaaggacagcaattggcctgtaatatatgtattccttg

SEQ ID NO: 66568 - DNA, 120 bp, Artificial Sequence
  ENSG00000075151_70 (sequence is synthesized)
aaaaaacagtcattcctaactgatcaaggttttgctgttgaactgggaaaggaccttggaatcataatatagtgctacacgattctattagcagtgaaagaaataaaaatgtttttacta

SEQ ID NO: 66569 - DNA, 120 bp, Artificial Sequence
  ENSG00000075151_71 (sequence is synthesized)
tacaaaatgcctccaagcttgtattaagagcccaaatgttccctttgaactctgctaatacacagaagagttggatatcatgatctttgccctgaggaatttatcttccaaagaaaggaa

SEQ ID NO: 66570 - DNA, 120 bp, Artificial Sequence
  ENSG00000075151_72 (sequence is synthesized)
gctcaaggagttgataccttctgaaatgtttttaataaaatctgggacatgagatggtggaaaatcccttaggataggccgtttgcatgtataatgttgattaaaagtttttgtacccat

SEQ ID NO: 66571 - DNA, 120 bp, Artificial Sequence
  ENSG00000075151_73 (sequence is synthesized)
taacttagcgttgcttatggaaaacctgatggaatagcattgacccagtttacaaagccatctgaagtgcctgagttgtatttgaaggaatattttttcacctttggcttttagcttaga

SEQ ID NO: 66572 - DNA, 120 bp, Artificial Sequence
  ENSG00000075151_74 (sequence is synthesized)
agttatgactgcacattacaaaggggaatgttcaaacctttatcacaatcccacagagtattgatgaggaaactgaagtttggagcgatcacatcattttcccaagaattcctagaggac

SEQ ID NO: 66573 - DNA, 120 bp, Artificial Sequence
  ENSG00000075188_0 (sequence is synthesized)
tttcgtgaccttgtccagtagaaggctatttaattttcacaactgcttgaattttgacatacaagatgaagcaagatgcctcaagaaatgctgcctacactgtggattgtgaagattatg

SEQ ID NO: 66574 - DNA, 120 bp, Artificial Sequence
  ENSG00000075188_1 (sequence is synthesized)
tgcatgtggtagaatttaatccctttgagaatggggattcaggaaacctaattgcatatggtggcaataattatgtggtcattggcacgtgtacgtttcaggaagaagaagcagacgttg

SEQ ID NO: 66575 - DNA, 120 bp, Artificial Sequence
  ENSG00000075188_2 (sequence is synthesized)
aaggcattcagtataaaacacttcgaacatttcaccatggagtcagggttgatggcatagcttggagcccagagactagacttgattcattgcctccagtaatcaaattttgtacttcag

SEQ ID NO: 66576 - DNA, 120 bp, Artificial Sequence
  ENSG00000075188_3 (sequence is synthesized)
ctgctgatatgaaaattagattatttacttcagatcttcaggataaaaatgaatataaggttttagagggccataccgatttcattaatggtttggtgtttgatcccaaagaaggccaag

SEQ ID NO: 66577 - DNA, 120 bp, Artificial Sequence
  ENSG00000075188_4 (sequence is synthesized)
aaattgcaagtgtgagtgacgatcacacctgcaggatttggaacttggaaggagtgcaaacagctcattttgttcttcattctcctggcatgagtgtgtgctggcatcctgaggagactt

SEQ ID NO: 66578 - DNA, 120 bp, Artificial Sequence
  ENSG00000075188_5 (sequence is synthesized)
agctaatggttgcagagaagaatggaacaatccggttttatgatcttttggcccaacaggctattttatctcttgaatcagaacaagtgccattaatgtcagcacactggtgcttaaaaa

SEQ ID NO: 66579 - DNA, 120 bp, Artificial Sequence
  ENSG00000075188_6 (sequence is synthesized)
acaccttcaaagttggagccgttgcaggaaatgattggttaatttgggatattactcggtccagttatcctcaaaataagagacctgttcacatggatcgagcctgcttattcaggtggt

SEQ ID NO: 66580 - DNA, 120 bp, Artificial Sequence
  ENSG00000075188_7 (sequence is synthesized)
ccacaattagtgaaaatctgtttgcaaccactggttatcctggcaaaatggcaagccagtttcaaattcatcatttaggacaccctcagcccatcctcatgggttctgtagccgttggat

SEQ ID NO: 66581 - DNA, 120 bp, Artificial Sequence
  ENSG00000075188_8 (sequence is synthesized)
ctggactgtcctggcatcgaactctccctctgtgtgtaattggaggagaccacaagctgttgttttgggtgactgaagtataaagtgttttctgtaccttagattcacaaactttgtatt

SEQ ID NO: 66582 - DNA, 120 bp, Artificial Sequence
  ENSG00000075188_9 (sequence is synthesized)
ccttagattcacaaactttgtatttttagtacatattttgaagaatttctatagtacatattttgaagaatttttatatcaaatataccgtatactttagaaaatgtctcagttgctttt

SEQ ID NO: 66583 - DNA, 120 bp, Artificial Sequence
  ENSG00000075188_10 (sequence is synthesized)
tactctgttctctgtgtgtgtatatatatatatttttaatcttacaaaatcatattgactcagcagctcacctccagagaagagatgactaaggaaaaataatgcttttgagtttatcaa

SEQ ID NO: 66584 - DNA, 120 bp, Artificial Sequence
  ENSG00000075188_11 (sequence is synthesized)
aaaaggagtatttgaagtgtatcctgttttctatactttgagtatatgctgtttttctaattctcagggacacatttatcaaaagagaaaaaaaggccaggtacaatggctcacacttgt

SEQ ID NO: 66585 - DNA, 62 bp, Artificial Sequence
  ENSG00000075188_12 (sequence is synthesized)
gaggtaaaataaaaaaaattagccaagcatggtttggaagactgaggcaggagaatcacttg

SEQ ID NO: 66586 - DNA, 85 bp, Artificial Sequence
  ENSG00000075188_13 (sequence is synthesized)
aacctggatcactgcagcctgggcgacagagcgagactatctcaaaagaaaaaaaatccaaggagaaaaaaatatcttagggtat

SEQ ID NO: 66587 - DNA, 120 bp, Artificial Sequence
  ENSG00000075188_14 (sequence is synthesized)
aagaaaaaaaatccaaggagaaaaaaatatcttagggtattctggaagtggttgttgagtatatatatgtgtatgtgtactcaatttaatgtaaaaaattgttttcagtttcttaaatat

SEQ ID NO: 66588 - DNA, 120 bp, Artificial Sequence
  ENSG00000075188_15 (sequence is synthesized)
gtgattgattatattgctcaaccctgtttattatacgcagattcctttggacgaggtgttctaacagtcttagaacatctgatatatgggatcaaaagttaccttgaaaaatgacttcta

SEQ ID NO: 66589 - DNA, 120 bp, Artificial Sequence
  ENSG00000075188_16 (sequence is synthesized)
gtgtatacctttaacagcctcctttttgtgaattttcactgttcttaccaagaaacttaagtgtttttgagatgggacctgttggcaatggaactgtgttcaccctctcaaagatcatta

SEQ ID NO: 66590 - DNA, 120 bp, Artificial Sequence
  ENSG00000075188_17 (sequence is synthesized)
aaatcaacgttatctaagacagctgtatcacatttttgggatacatcatggtacagtcagaagcatataaaattatggttctgcttgtcagtcacatacagaatccaatacattttgaca

SEQ ID NO: 66591 - DNA, 120 bp, Artificial Sequence
  ENSG00000075188_18 (sequence is synthesized)
aactgcccattcctgcaagttaatgccctttttgaagcttcatttcctcttgtaaagtacagataggaatcattattttgtggagttgctgtaaagattaaataaaggtgaatgaaaata

SEQ ID NO: 66592 - DNA, 120 bp, Artificial Sequence
  ENSG00000075188_19 (sequence is synthesized)
aaccttcaagttccattgcacccagtttcatgcctcttgtcttgagagaaaactaagtaaaggaagaagaagcagacgttgaaggcattcagtataaaacacttcgaacatttcaccatg

SEQ ID NO: 66593 - DNA, 120 bp, Artificial Sequence
  ENSG00000075188_20 (sequence is synthesized)
ttcatctgttttaactgattgcttgtttaggatttattatagtttaaacacattggacattctgtcctataaagagaaaatactgtttaaaccttaagttcacccacttgagtttaacac

SEQ ID NO: 66594 - DNA, 120 bp, Artificial Sequence
  ENSG00000075188_21 (sequence is synthesized)
attggttaatttgggatattactcggtccaggtactttcttgatatgtttgtctattacacaccaaaaaaaggcagtaactgttgctaaatgatccactcatccatcctgttatacctga

SEQ ID NO: 66595 - DNA, 120 bp, Artificial Sequence
  ENSG00000075188_22 (sequence is synthesized)
gactatgctgtcaagcgaaagcaagtctttcctatagaaggccagagctatggatttttatataacataaacttgctatgcagatttactctgggagtaacccagaaaggacagtgcaaa

SEQ ID NO: 66596 - DNA, 120 bp, Artificial Sequence
  ENSG00000075188_23 (sequence is synthesized)
agaggaaatcttggatctgtgcaatgttgacttatattggaaaataagaaaaacactgaccctgttgcatgatggttccctgcagtggttctaagtcatgtctttattgtatttcatctg

SEQ ID NO: 66597 - DNA, 120 bp, Artificial Sequence
  ENSG00000075188_24 (sequence is synthesized)
tattttaatttttaagttccgggatacgtgtgcgggacgtgcaggtttattacaaaggtaaaacgtgtgctatggtggtttgcacacccatcacctaggtattaagctccacatgcatta

SEQ ID NO: 66598 - DNA, 120 bp, Artificial Sequence
  ENSG00000075188_25 (sequence is synthesized)
gctatttatcctgatgctctccctccgcccaaccccctgaacattatttttatatcacacattttggtactccttaacaacagatcctgtattttctatctgtttatattatagcccttt

SEQ ID NO: 66599 - DNA, 120 bp, Artificial Sequence
  ENSG00000075188_26 (sequence is synthesized)
caggaggctgtttttttcttcattagcgctggttctccacacacaatgaagtcttccaaatcctggccctgcttatgagcttggcaagttagttaacctactgaagcctcagtttctcca

SEQ ID NO: 66600 - DNA, 120 bp, Artificial Sequence
  ENSG00000075188_27 (sequence is synthesized)
gtcactcaacaggtttaaatggtacagctcaggagttttgatgccaaatcccacattcttgccaatctaccactactatttacaccctcaaggatttttcaacttaatagaaccagaatt

SEQ ID NO: 66601 - DNA, 120 bp, Artificial Sequence
  ENSG00000075213_0 (sequence is synthesized)
gagggtttgaagtttctgtgcttcagtgactgttacagaagaagaggtgttagtgttgccatgaggtcttgattgtctgcatttatgaatgaaactgacctaaatcacctgttacctcca

SEQ ID NO: 66602 - DNA, 120 bp, Artificial Sequence
  ENSG00000075213_1 (sequence is synthesized)
gtttccagattgtttgaacttctctggccgcacaatacaggaaggaagactaaagcagcaaagggacctacagcgtctgcagcatgggctggttaactaggattgtctgtcttttctggg

SEQ ID NO: 66603 - DNA, 120 bp, Artificial Sequence
  ENSG00000075213_2 (sequence is synthesized)
gagtattacttacagcaagagcaaactatcagaatgggaagaacaatgtgccaaggctgaaattatcctacaaagaaatgttggaatccaacaatgtgatcactttcaatggcttggcca

SEQ ID NO: 66604 - DNA, 120 bp, Artificial Sequence
  ENSG00000075213_3 (sequence is synthesized)
acagctccagttatcataccttccttttggatgaggaacggagtaggctgtatgttggagcaaaggatcacatattttcattcgacctggttaatatcaaggattttcaaaagattgtgt

SEQ ID NO: 66605 - DNA, 120 bp, Artificial Sequence
  ENSG00000075213_4 (sequence is synthesized)
ggccagtatcttacaccagaagagatgaatgcaagtgggctggaaaagacatcctgaaagaatgtgctaatttcatcaaggtacttaaggcatataatcagactcacttgtacgcctgtg

SEQ ID NO: 66606 - DNA, 120 bp, Artificial Sequence
  ENSG00000075213_5 (sequence is synthesized)
gaacgggggcttttcatccaatttgcacctacattgaaattggacatcatcctgaggacaatatttttaagctggagaactcacattttgaaaacggccgtgggaagagtccatatgacc

SEQ ID NO: 66607 - DNA, 120 bp, Artificial Sequence
  ENSG00000075213_6 (sequence is synthesized)
ctaagctgctgacagcatcccttttaatagatggagaattatactctggaactgcagctgattttatggggcgagactttgctatcttccgaactcttgggcaccaccacccaatcagga

SEQ ID NO: 66608 - DNA, 120 bp, Artificial Sequence
  ENSG00000075213_7 (sequence is synthesized)
cagagcagcatgattccaggtggctcaatgatccaaagttcattagtgcccacctcatctcagagagtgacaatcctgaagatgacaaagtatactttttcttccgtgaaaatgcaatag

SEQ ID NO: 66609 - DNA, 120 bp, Artificial Sequence
  ENSG00000075213_8 (sequence is synthesized)
atggagaacactctggaaaagctactcacgctagaataggtcagatatgcaagaatgactttggagggcacagaagtctggtgaataaatggacaacattcctcaaagctcgtctgattt

SEQ ID NO: 66610 - DNA, 120 bp, Artificial Sequence
  ENSG00000075213_9 (sequence is synthesized)
gctcagtgccaggtccaaatggcattgacactcattttgatgaactgcaggatgtattcctaatgaactttaaagatcctaaaaatccagttgtatatggagtgtttacgacttccagta

SEQ ID NO: 66611 - DNA, 120 bp, Artificial Sequence
  ENSG00000075213_10 (sequence is synthesized)
acattttcaagggatcagccgtgtgtatgtatagcatgagtgatgtgagaagggtgttccttggtccatatgcccacagggatggacccaactatcaatgggtgccttatcaaggaagag

SEQ ID NO: 66612 - DNA, 120 bp, Artificial Sequence
  ENSG00000075213_11 (sequence is synthesized)
tcccctatccacggccaggaacttgtcccagcaaaacatttggtggttttgactctacaaaggaccttcctgatgatgttataacctttgcaagaagtcatccagccatgtacaatccag

SEQ ID NO: 66613 - DNA, 120 bp, Artificial Sequence
  ENSG00000075213_12 (sequence is synthesized)
tgtttcctatgaacaatcgcccaatagtgatcaaaacggatgtaaattatcaatttacacaaattgtcgtagaccgagtggatgcagaagatggacagtatgatgttatgtttatcggaa

SEQ ID NO: 66614 - DNA, 120 bp, Artificial Sequence
  ENSG00000075213_13 (sequence is synthesized)
cagatgttgggaccgttcttaaagtagtttcaattcctaaggagacttggtatgatttagaagaggttctgctggaagaaatgacagtttttcgggaaccgactgctatttcagcaatgg

SEQ ID NO: 66615 - DNA, 120 bp, Artificial Sequence
  ENSG00000075213_14 (sequence is synthesized)
agctttccactaagcagcaacaactatatattggttcaacggctggggttgcccagctccctttacaccggtgtgatatttacgggaaagcgtgtgctgagtgttgcctcgcccgagacc

SEQ ID NO: 66616 - DNA, 120 bp, Artificial Sequence
  ENSG00000075213_15 (sequence is synthesized)
cttactgtgcttgggatggttctgcatgttctcgctattttcccactgcaaagagacgcacaagacgacaagatataagaaatggagacccactgactcactgttcagacttacaccatg

SEQ ID NO: 66617 - DNA, 120 bp, Artificial Sequence
  ENSG00000075213_16 (sequence is synthesized)
ataatcaccatggccacagccctgaagagagaatcatctatggtgtagagaatagtagcacatttttggaatgcagtccgaagtcgcagagagcgctggtctattggcaattccagaggc

SEQ ID NO: 66618 - DNA, 120 bp, Artificial Sequence
  ENSG00000075213_17 (sequence is synthesized)
gaaatgaagagcgaaaagaagagatcagagtggatgatcatatcatcaggacagatcaaggccttctgctacgtagtctacaacagaaggattcaggcaattacctctgccatgcggtgg

SEQ ID NO: 66619 - DNA, 120 bp, Artificial Sequence
  ENSG00000075213_18 (sequence is synthesized)
aacatgggttcatacaaactcttcttaaggtaaccctggaagtcattgacacagagcatttggaagaacttcttcataaagatgatgatggagatggctctaagaccaaagaaatgtcca

SEQ ID NO: 66620 - DNA, 120 bp, Artificial Sequence
  ENSG00000075213_19 (sequence is synthesized)
atagcatgacacctagccagaaggtctggtacagagacttcatgcagctcatcaaccaccccaatctcaacacaatggatgagttctgtgaacaagtttggaaaagggaccgaaaacaac

SEQ ID NO: 66621 - DNA, 120 bp, Artificial Sequence
  ENSG00000075213_20 (sequence is synthesized)
gtcggcaaaggccaggacataccccagggaacagtaacaaatggaagcacttacaagaaaataagaaaggtagaaacaggaggacccacgaatttgagagggcacccaggagtgtctgag

SEQ ID NO: 66622 - DNA, 120 bp, Artificial Sequence
  ENSG00000075213_21 (sequence is synthesized)
ctgcattacctctagaaacctcaaacaagtagaaacttgcctagacaataactggaaaaacaaatgcaatatacatgaacttttttcatggcattatgtggatgtttacaatggtgggaa

SEQ ID NO: 66623 - DNA, 120 bp, Artificial Sequence
  ENSG00000075213_22 (sequence is synthesized)
attcagctgagttccaccaattataaattaaatccatgagtaactttcctaataggctttttttcctaataccaccacctaacagagaacacaggtgaatgcagatgttcactttagcag

SEQ ID NO: 66624 - DNA, 120 bp, Artificial Sequence
  ENSG00000075213_23 (sequence is synthesized)
acttaatgtttcctatgagatttcactgtacaggtttgtctttcttctttgcctgagaaataaaaatgtcatttgccatattgccatctaaaggagaaaaactgcatcagcaaagccatt

SEQ ID NO: 66625 - DNA, 120 bp, Artificial Sequence
  ENSG00000075213_24 (sequence is synthesized)
gtattgaactaaaagtttaaaatgaactgcatggatttactaagctgatgaatattccaaaacgtggttggattcaaggatatattttgtctaccggccctcatgtttgtatgtacttga

SEQ ID NO: 66626 - DNA, 120 bp, Artificial Sequence
  ENSG00000075213_25 (sequence is synthesized)
ggagtaaaatgagtaaaatgatactgaatgaaatgttctgtggaaatattaaaaaaaaaaaaaaacataagccatccatcatccagaagaaaaatggaatacactgatctactactgatg

SEQ ID NO: 66627 - DNA, 120 bp, Artificial Sequence
  ENSG00000075213_26 (sequence is synthesized)
tcttctttcagctttgatctaaagatgtattttattaaaactataatttaaatgtaccatgaaaaatatgcagtaaaaattagttgttttctaagctagagtaggatttgtcttacaatt

SEQ ID NO: 66628 - DNA, 120 bp, Artificial Sequence
  ENSG00000075213_27 (sequence is synthesized)
attgtgctatgtagtttttgttttaaaaattccaatggtgtgctgctttctttggacattttattttcaattctataagagggatagatgacattgttctagaaacacatatacatcatt

SEQ ID NO: 66629 - DNA, 120 bp, Artificial Sequence
  ENSG00000075213_28 (sequence is synthesized)
aagagtgaatctctaaaaccaggatataaattatgctttatttctctgagaaaatcaaacaaatggaagctgttcacacctccccttctttaagcattatctaaattaatttttacttgc

SEQ ID NO: 66630 - DNA, 120 bp, Artificial Sequence
  ENSG00000075213_29 (sequence is synthesized)
ataatgttcttagaaaaaaaaacagaacatttaagcaggaaaaaaggaagaaacaagttgatttttaagtgcattttactataatgaatcaatgaagggaaaaggaactgcatatttcat

SEQ ID NO: 66631 - DNA, 120 bp, Artificial Sequence
  ENSG00000075213_30 (sequence is synthesized)
gaaaataataagcattgtcttaatatactgttaatagaaaatgtgtcttaattccgtgcttgaatccctgcatgatatttgagactaagatctctcttatgattctaccaagaattatat

SEQ ID NO: 66632 - DNA, 120 bp, Artificial Sequence
  ENSG00000075213_31 (sequence is synthesized)
ctgtgtcacttaatttttttaaaagagagagatcaataactattcagagcaacatgttaaaggcaaagtttccaatcatttacatctgtatcaggtgcctcttacctttccttatttaag

SEQ ID NO: 66633 - DNA, 120 bp, Artificial Sequence
  ENSG00000075213_32 (sequence is synthesized)
acaattatttgtacaagaaacacatgactcttttcatatcaatgggagggacttttctacaaagtattttccaggatgcaacccacatttaaacaatgtaaaattctttgtttcctgcaa

SEQ ID NO: 66634 - DNA, 120 bp, Artificial Sequence
  ENSG00000075213_33 (sequence is synthesized)
aatcactgactttgagatatttaaaactttcagcattatactgtggtttcttttgcactgcactcacctattcaggactcctcccccaggttcctcatcatgcacaaaaatgcaaagaaa

SEQ ID NO: 66635 - DNA, 120 bp, Artificial Sequence
  ENSG00000075213_34 (sequence is synthesized)
acatcttattagtaattaatgaagcaacattgaaattctaactctagctgtctttggattctaattaactcagcatcaatttctcacctcagactacagtgaatttttatttcctatcag

SEQ ID NO: 66636 - DNA, 120 bp, Artificial Sequence
  ENSG00000075213_35 (sequence is synthesized)
ctgaaatatttcacagatggaagctcatgtttcagttttaatgactgccttgaataaacaagttgttgccacttgtttcaaacaaaagcctaaaaataatctacattcaattttaggctc

SEQ ID NO: 66637 - DNA, 120 bp, Artificial Sequence
  ENSG00000075213_36 (sequence is synthesized)
cattgactaatatggtgttgcttttggaagtactgtatatcctcacatggaagccaaattgttaaattatttgaaggacacaccactgtacagaaagtagtgtttcaaatataaatcgaa

SEQ ID NO: 66638 - DNA, 120 bp, Artificial Sequence
  ENSG00000075213_37 (sequence is synthesized)
gaacaaagagtgctccaaaaaataggtcattcttttattttcataaagtatctaaactgtactaacattcagtgttgtgtttcattctaaatttgcagctgaaataaatttatttgcgat

SEQ ID NO: 66639 - DNA, 120 bp, Artificial Sequence
  ENSG00000075213_38 (sequence is synthesized)
agcagaaatatcttattattcatcctcagaaataaaggatttgaagggatagagattatatgataaatttatagaagactttcagaatttgaatgcattttgtttagtgttatgaaatga

SEQ ID NO: 66640 - DNA, 120 bp, Artificial Sequence
  ENSG00000075213_39 (sequence is synthesized)
caatagaaaaaagtctcgacttcaattaaaagttacacaaacaaacaaatctacaggcatgtctttatataccatcaggtctaagttttcaaagaaaattgtagatataacttgcagata

SEQ ID NO: 66641 - DNA, 120 bp, Artificial Sequence
  ENSG00000075213_40 (sequence is synthesized)
actcattacagtcataatctctgcccatgtgtattgagagggggcagtttgcacgaaaaagaattattggcccatttaataattcagctttaaatagactttgtcatatgcatgaatcat

SEQ ID NO: 66642 - DNA, 120 bp, Artificial Sequence
  ENSG00000075213_41 (sequence is synthesized)
cagagatgaaactgtttgagagactcatgtgaccttacgaaaattacaacagcagtcttaaagtatgaaaaagatgcatcacagcagagacattatggcccagttgatatcaaatgtaaa

SEQ ID NO: 66643 - DNA, 120 bp, Artificial Sequence
  ENSG00000075213_42 (sequence is synthesized)
atgtaaatgcatgtaaatgcacacttcattttatgtattatttagtaatttgcagtggtatgtgtttaatatttttgctacctacacattaggcaaaaaaaagatgtaaataatttggga

SEQ ID NO: 66644 - DNA, 120 bp, Artificial Sequence
  ENSG00000075213_43 (sequence is synthesized)
gaaaaagaggaagaacagtgtaaaataaaactttctataagtactccatttcaatgtgttcaacatcatcctaaaaggcaagattttcccacgcaggtgacaaggtggtttatgtactat

SEQ ID NO: 66645 - DNA, 120 bp, Artificial Sequence
  ENSG00000075213_44 (sequence is synthesized)
ttaagggcggaaggtgcgtgcccgttcaataagcatgttttttgccaggtaggaaatatgttccatatctttacttatcattgcatttcagatgggaactagaaaaactggagagaaaaa

SEQ ID NO: 66646 - DNA, 120 bp, Artificial Sequence
  ENSG00000075213_45 (sequence is synthesized)
tgtaatgaaactgctgctgtaaattattccttttagcatgtattcacttgctaaatacacatttcttcaaaatatttgaattcagatgtctttactgttccctataacatatggtgttaa

SEQ ID NO: 66647 - DNA, 120 bp, Artificial Sequence
  ENSG00000075213_46 (sequence is synthesized)
ggaacataagctcataaaatgttgagaaccagagtcaggttgctacataattagctaacagatttcttcattgtagtcatctgtaaactgggttctatatttatggtgatgatgtgaatt

SEQ ID NO: 66648 - DNA, 120 bp, Artificial Sequence
  ENSG00000075213_47 (sequence is synthesized)
tttatgccctttaaattaagtattgttctttttaatgtcatacctaaaaaggaaatgtagggataaatttttataatgtgtcattttcataatcagtttggttttattcaggatccacaa

SEQ ID NO: 66649 - DNA, 120 bp, Artificial Sequence
  ENSG00000075213_48 (sequence is synthesized)
agatgtcagatgactgttattgaaattgcttatcttaaaggtcacagacaagcattttattaatatggagccactagtataatatgttaaaatctttgttttattagctcattttaaaac

SEQ ID NO: 66650 - DNA, 120 bp, Artificial Sequence
  ENSG00000075213_49 (sequence is synthesized)
acaatttccattcaatttaatgaaactgtatcaggtttcatggtttcaaagacagacttaaataggattcaacacccccgtatcgtgtaataacatgttaaactggtctaacaccaagga

SEQ ID NO: 66651 - DNA, 120 bp, Artificial Sequence
  ENSG00000075213_50 (sequence is synthesized)
catctatacttttaacttgatttgtaataattatttgaagtcaatgttaatgtttgcaaatacatgtttccataaagaagaaaacattatttttcaaaaatctgtaaaatctcattagtt

SEQ ID NO: 66652 - DNA, 120 bp, Artificial Sequence
  ENSG00000075213_51 (sequence is synthesized)
tgtttgatctctaaaaattttcttaaactagttaattaaatgaacataatttttcaagttaataaattaagaaaatatctaaatgaaagagagaataaaatcagcatatgtgacagccca

SEQ ID NO: 66653 - DNA, 120 bp, Artificial Sequence
  ENSG00000075213_52 (sequence is synthesized)
tatagtaaggacagtttcgcaatcaacgtaaccaaggaaaacagctttgttatcatttcaaacatgcaggcacacacaggcagaggcaaagctggaaccaaaccaaacaaaaagaagatt

SEQ ID NO: 66654 - DNA, 120 bp, Artificial Sequence
  ENSG00000075213_53 (sequence is synthesized)
ttgaatattaaaaaactgggcctctagacactttgccttttagaaccagcttcctacacgttcaagtaaattccactgatagatcttgactatctacaatgtgctaggtattatgttagg

SEQ ID NO: 66655 - DNA, 120 bp, Artificial Sequence
  ENSG00000075213_54 (sequence is synthesized)
tgatgaggacactaaagtgaataagacataacccttgttctcaaagagctcacaatgaaattaaggaaacagagcgagatgacttatcatcatctaatccagcaagtctttcctaatcct

SEQ ID NO: 66656 - DNA, 120 bp, Artificial Sequence
  ENSG00000075213_55 (sequence is synthesized)
cccatccctagttcaagctagggaccttctctatgctaaacctgtgccttgtatataccttttattgtcacactaccccaatgtgtgatttatttgtttatgtttccatctccatttcta

SEQ ID NO: 66657 - DNA, 120 bp, Artificial Sequence
  ENSG00000075213_56 (sequence is synthesized)
gactgtgagctccttgagggcaggatttgtatctaattgatctctgtccccagtgtctagcatgatgcctggcacaaagagggagcccaataaatcactgttgaaaagaaccaagttacg

SEQ ID NO: 66658 - DNA, 120 bp, Artificial Sequence
  ENSG00000075213_57 (sequence is synthesized)
atatgacaattgccaaatacaagctcacaataagagcggtatggatcaaagaaaaaaaaaaggaggaattaacttgtggagagagatcatggggtgcttcagagaataagtgactttcca

SEQ ID NO: 66659 - DNA, 120 bp, Artificial Sequence
  ENSG00000075213_58 (sequence is synthesized)
gctgtgaatcagtcagatatgcctagatgaagaaacaaaatggcaatctgagtagaagaaataaggagaaaggaggagaggtgtgaaaaaaagtcctttttctgagaacaagcattcaaa

SEQ ID NO: 66660 - DNA, 120 bp, Artificial Sequence
  ENSG00000075213_59 (sequence is synthesized)
cagataaaacacaggtttcataaagaaaagttaaatgtcccactactatgagtcaaaatggtgcatttgctttttcctgggttttgatttattgccctctgtttgtaccccacattcgca

SEQ ID NO: 66661 - DNA, 120 bp, Artificial Sequence
  ENSG00000075213_60 (sequence is synthesized)
tccttggcacagactgtcatatgtcacacattcagcctcctacacttccaccccacaatctctttaccttccttcttaatgttcacctcatttatctttactcagctaaagtcatagcac

SEQ ID NO: 66662 - DNA, 120 bp, Artificial Sequence
  ENSG00000075213_61 (sequence is synthesized)
tagacagtgttcccacaaccgtcttcaaactcatctgtatttcataatctctcctctagttcaaaccagcacaggtcagctgaaactctgaattctacaaataaatatttagaggaagct

SEQ ID NO: 66663 - DNA, 120 bp, Artificial Sequence
  ENSG00000075213_62 (sequence is synthesized)
aacttcatcagacactcccctatgctctcagttcaaacgaaagtttctgttacatttcacctacctacagccttacctcactcagctagcattagactactcagcaatgagttccaacat

SEQ ID NO: 66664 - DNA, 120 bp, Artificial Sequence
  ENSG00000075213_63 (sequence is synthesized)
tgccttgctaaaaagcaaggtggctcacaaacaagacttcagcaaagatagcattaaaatgtgaagtctgcatttgttcaaggcataccttagatggagtaattcatggccaagcaatgc

SEQ ID NO: 66665 - DNA, 120 bp, Artificial Sequence
  ENSG00000075213_64 (sequence is synthesized)
tgcaggtgtggtcagcacatgtagttgataggcagactcctattattttaaacaaacaaaccaaaaaagttttttaaaaaatgagacccaccttcatcttgaatatgtcaaccccgcacc

SEQ ID NO: 66666 - DNA, 120 bp, Artificial Sequence
  ENSG00000075213_65 (sequence is synthesized)
accgttgtattaatctgtcatgtttttctcatataacaaaagaatggattttctttcttttaatctaaacactatacttgtatatacaatgtttatttatataggacctaagcaaaagtt

SEQ ID NO: 66667 - DNA, 120 bp, Artificial Sequence
  ENSG00000075213_66 (sequence is synthesized)
tttatagatgtgttcatgtcatcacaattcaggtaatgtgaaggctcaacttccgtcttctctctttgtaaatctcactgaagcattagatctcaagtaaatacatttgtaaaatatcca

SEQ ID NO: 66668 - DNA, 120 bp, Artificial Sequence
  ENSG00000075213_67 (sequence is synthesized)
acagccccagagtgtgaaagaagatagccggaaatgtccaaagcagttaagagggcgaacagattttgtctaaaaagataaggcagctaaacagagggtgagaagacatgagccaaattt

SEQ ID NO: 66669 - DNA, 120 bp, Artificial Sequence
  ENSG00000075213_68 (sequence is synthesized)
acacacacaaatagtggaaataatctctgagaatccaatttgggaagaagtgagggagataatagtgctctgagtgcctagtgatgagagaacaaagaggttaacgatgcctgagagaca

SEQ ID NO: 66670 - DNA, 120 bp, Artificial Sequence
  ENSG00000075213_69 (sequence is synthesized)
acataacaaagggaattattcatcaagaagaggccctttagcagggtatttaaagtgcccaggtacttacaataacaagttggactgaacacattgtatctcaggaattaagaatttttc

SEQ ID NO: 66671 - DNA, 120 bp, Artificial Sequence
  ENSG00000075213_70 (sequence is synthesized)
ctaaaagaaggtttctcaggattcatttcattgtataaagtaggaagaaaatttggcaacattaagtttaccattccatcacggttacatatgttgctattaaaaggaatggctacaatg

SEQ ID NO: 66672 - DNA, 120 bp, Artificial Sequence
  ENSG00000075213_71 (sequence is synthesized)
aacaaagaaatgaaaacatattcttgaagatctatattgtatgggactgttaagagaaaataacactgaatttaaatatgcttctttttttcttatggacctttgagtagaataaaattc

SEQ ID NO: 66673 - DNA, 120 bp, Artificial Sequence
  ENSG00000075213_72 (sequence is synthesized)
atttatccctaatctggagggcaacctggagctaggtaagaacagaacagccctttgacttcaacgcatggacaaaggacaacaaaggcacactcattctgtctcctgctaccctgtgaa

SEQ ID NO: 66674 - DNA, 120 bp, Artificial Sequence
  ENSG00000075213_73 (sequence is synthesized)
gagatgaagcctgatagatccgcccaggtgtaggtgaaatggtagagcctcaggggtaatagattctgtgctctcatgctgaagtttagtgctgtgtcttgactggctctctagcatcag

SEQ ID NO: 66675 - DNA, 120 bp, Artificial Sequence
  ENSG00000075213_74 (sequence is synthesized)
tgtgatgggctgctcctggtacagttacaaagtgaacatgcttcttgctgctcacatttatccctaatctggagggcaacctggagctaggtaagaacagaacagccctttgacttcaac

SEQ ID NO: 66676 - DNA, 120 bp, Artificial Sequence
  ENSG00000075218_0 (sequence is synthesized)
gtctcccggcgccgcgtttaaatccgtgccggaggcgcgtcctgcatcgtctgccgctttggtgacttctgacagctctctccatggaaggaggcggcggccgcgatgagccttcagcct

SEQ ID NO: 66677 - DNA, 120 bp, Artificial Sequence
  ENSG00000075218_1 (sequence is synthesized)
gccgggcaggggacgtgaacatggatgaccctaagaaggaagacattcttcttttggccgatgaaaaatttgacttcgatctttcattgtcttcttcgagtgcaaatgaagatgatgaag

SEQ ID NO: 66678 - DNA, 120 bp, Artificial Sequence
  ENSG00000075218_2 (sequence is synthesized)
tcttcttcggaccctttggacataaagaaagatgtattgctgccagcttggaattaaataatccggttcccgaacagcctccgttgcccacatctgagagtccctttgcctggagccctc

SEQ ID NO: 66679 - DNA, 120 bp, Artificial Sequence
  ENSG00000075218_3 (sequence is synthesized)
tggccggggagaagttcgtggaggtgtacaaagaagctcacttactggctttacacattgagagcagcagccggaaccaggcagcccaagctgccaagcctgaagaccctcggagccagg

SEQ ID NO: 66680 - DNA, 120 bp, Artificial Sequence
  ENSG00000075218_4 (sequence is synthesized)
gcgtggaaagattcatacaggagtcaaaattaaaaataaacctctttgagaaagaaaaggaaatgaagaaaagccccacgtctcttaaaagggagacatactacctgtcagacagcccct

SEQ ID NO: 66681 - DNA, 120 bp, Artificial Sequence
  ENSG00000075218_5 (sequence is synthesized)
tgctggggccccctgtgggtgagcctcggctcttggcctcctccccggccctgcccagctctggtgcccaggcccgcctcacccgggcgccggggcctccgcactctgctcatgctttgc

SEQ ID NO: 66682 - DNA, 120 bp, Artificial Sequence
  ENSG00000075218_6 (sequence is synthesized)
ccagggaatcatgcactgctcatgctgcaagtcaggcagcgactcagaggaagcccgggaccaaattgctgctgcctcgagcggcctctgttagaggaagaagcatccctggggctgcgg

SEQ ID NO: 66683 - DNA, 120 bp, Artificial Sequence
  ENSG00000075218_7 (sequence is synthesized)
agaagcccaagaaagagattccagctagtccttccaggacaaaaatcccagctgagaaggaatcccaccgggatgttctccctgacaaacctgccccgggtgctgtcaatgtgccggccg

SEQ ID NO: 66684 - DNA, 120 bp, Artificial Sequence
  ENSG00000075218_8 (sequence is synthesized)
ccggaagccacttgggccagggcaagcgggcgatccctgttccaaacaagttggggctgaagaagaccctgttaaaagcacccggctctaccagcaatctcgcaaggaagtcctcctcgg

SEQ ID NO: 66685 - DNA, 120 bp, Artificial Sequence
  ENSG00000075218_9 (sequence is synthesized)
ggcctgtttggagcggggcatccagtgcgtgcacatccccagcagtgggcaaagctaaatcaagtgaatttgcaagtattcctgcaaatagctcccggcctctgtcaaacatcagcaagt

SEQ ID NO: 66686 - DNA, 120 bp, Artificial Sequence
  ENSG00000075218_10 (sequence is synthesized)
caggcagaatgggacccgccatgctgcggccagctctgcctgcaggccctgtgggggcatcctcctggcaggccaagcgggtcgatgtttctgagctggcagcggagcagctcacggcac

SEQ ID NO: 66687 - DNA, 120 bp, Artificial Sequence
  ENSG00000075218_11 (sequence is synthesized)
ccccctcagcatcccccacccaaccccagactccggaaggtggcggccagtggctgaactccagttgcgcttggtcagaatcttctcaattgaataagactagaagtatcagacggcgag

SEQ ID NO: 66688 - DNA, 120 bp, Artificial Sequence
  ENSG00000075218_12 (sequence is synthesized)
gctttcgcgggcacagcggccgcagtcgtgcacgtcagttggcagggtcactgtccacagcaccccggttagacgctcatctgggccagcaccacaaagcctgctgagcgcatggcgtgt

SEQ ID NO: 66689 - DNA, 120 bp, Artificial Sequence
  ENSG00000075218_13 (sequence is synthesized)
gtcagccttgcccacacccgccagccggcgctgctctggccttccaccgatgacccccaaaacgatgcccagggccgtgggctctcccctgtgtgtgccagctcggagacgttcctctga

SEQ ID NO: 66690 - DNA, 120 bp, Artificial Sequence
  ENSG00000075218_14 (sequence is synthesized)
gccccgcaagaactctgcaatgagaactgaaccaacaagggagagcaacagaaagacagattccaggctggtggatgtgtcccctgacaggggttctcctccttcccgtgtgcctcaggc

SEQ ID NO: 66691 - DNA, 120 bp, Artificial Sequence
  ENSG00000075218_15 (sequence is synthesized)
acttaacttttctccagaggaaagcgattctactttctccaaaagtactgccacagaagtagctcgggaggaagccaagccgggtggagatgcagcccctagtgaggctcttcttgtaga

SEQ ID NO: 66692 - DNA, 120 bp, Artificial Sequence
  ENSG00000075218_16 (sequence is synthesized)
tatcaaactggaaccactcgcggtcactccagatgctgcaagccagcccctcattgaccttcctctcatcgacttctgcgataccccagaagcacacgtggctgtaggatctgaaagcag

SEQ ID NO: 66693 - DNA, 120 bp, Artificial Sequence
  ENSG00000075218_17 (sequence is synthesized)
gcctctgatcgacctcatgacaaacactccagacatgaataaaaatgtggccaaaccttcaccggtggtgggacagctcatagacctgagctcccctctgatccagctgagccctgaggc

SEQ ID NO: 66694 - DNA, 120 bp, Artificial Sequence
  ENSG00000075218_18 (sequence is synthesized)
tgacaaggagaacgtggattccccactcctcaagttctaagccgaaccaaatcctttgccttgaaagaacagccctaaagtggttttcaaccctcagaaacaagctttaggctggtcgca

SEQ ID NO: 66695 - DNA, 120 bp, Artificial Sequence
  ENSG00000075218_19 (sequence is synthesized)
gtggcttacacttgtaaccctagaacttgggaggctgaggtgggcggattacttgagcccaggagttcgggaccagcctgggaaatatagtgaaactcctgtccctacaaaaaatacaaa

SEQ ID NO: 66696 - DNA, 85 bp, Artificial Sequence
  ENSG00000075218_20 (sequence is synthesized)
acttgggaggctgaagtgggaggatggcctgagctcaaggagatgcaggctgcagtggcaatgtgagaacctgtcttggaaaaaa

SEQ ID NO: 66697 - DNA, 120 bp, Artificial Sequence
  ENSG00000075218_21 (sequence is synthesized)
ccagcctgggcaccaatgtgagaacctgtcttggaaaaaaaaaaaaagaaacatgttttagtagaagttttatttgaaaaagaaaaataagcataaatatattcccagtgctggagaggg

SEQ ID NO: 66698 - DNA, 120 bp, Artificial Sequence
  ENSG00000075218_22 (sequence is synthesized)
tgggctgagggactggggccagcacggaccacccaaggcctctgcttcccgccgccaccctcctcgctgccattctctgggctggaatgtgaagcctcagtcactctaaatgaagaattt

SEQ ID NO: 66699 - DNA, 120 bp, Artificial Sequence
  ENSG00000075218_23 (sequence is synthesized)
tcttttgaatgttttgtatgtaaaatagcaagtggctatttttaaagttaagtttgtataaatagttagatattctagatttacattaaattgtaaaataaatggacttattgaagcata

SEQ ID NO: 66700 - DNA, 120 bp, Artificial Sequence
  ENSG00000075218_24 (sequence is synthesized)
ctgagattcctggaggctgctcgggaagcccgtggaacccagggctgtggctggcggagttccctgccatgcttcatcctggggccagtgcctccgtgccaagcaacccaaagggaggca

SEQ ID NO: 66701 - DNA, 120 bp, Artificial Sequence
  ENSG00000075218_25 (sequence is synthesized)
gtcaggacttccaggcctccaggggagaaagccctgcatttgactaaggcaagggtcagggatcaaagctgaggaagcgggaagcagggtggcaggagctggtggctgctggtgagcggg

SEQ ID NO: 66702 - DNA, 120 bp, Artificial Sequence
  ENSG00000075218_26 (sequence is synthesized)
tatggacagggaggtgggcaacagtcagagaggcacggcccaccccatacagagcctccttccaccaaggccccgcctgattccttggctttccaaaccgccagcccacctggaacatga

SEQ ID NO: 66703 - DNA, 120 bp, Artificial Sequence
  ENSG00000075218_27 (sequence is synthesized)
acatacctttttcttgccttgctccaggttttagtgaagtaaatagtatttggaaagtttgtttgttttttttttcattgcaaagagaaaatgcaatagacatgagcatagaggaaaatt

SEQ ID NO: 66704 - DNA, 120 bp, Artificial Sequence
  ENSG00000075218_28 (sequence is synthesized)
tagaggaaaattaaaggtattacaaggaaatactgcgtgtaattctctgataatcaatttgaaaacctaatggttttctaaaatttgcaagttattggccaggtgtggtggctcacgcct

SEQ ID NO: 66705 - DNA, 74 bp, Artificial Sequence
  ENSG00000075218_29 (sequence is synthesized)
gtttgagatcaaaagctaggtgtggtggcgtgcactgtagtcccagctatttagggggctgaggtgggaggatc

SEQ ID NO: 66706 - DNA, 62 bp, Artificial Sequence
  ENSG00000075218_30 (sequence is synthesized)
tacaaaaaatacaaaaataagctaggtgtggtggcgtgcactgtagtcccagctatttaggt

SEQ ID NO: 66707 - DNA, 120 bp, Artificial Sequence
  ENSG00000075218_31 (sequence is synthesized)
gtctgtaaaaattaaaataaataaaataaataaaataaaatttatctaaattgacccagaacacatgaagtaagccatagctggagctcagaaatgattaaagattgaaaaaggcacctg

SEQ ID NO: 66708 - DNA, 120 bp, Artificial Sequence
  ENSG00000075223_0 (sequence is synthesized)
actccgaggtgcttgattgagcgacgcggagaagagctccgggtgccgcggcactgcagcgctgagattcctttacaaagaaactcagaggaccgggaagaaagaatttcacctttgcga

SEQ ID NO: 66709 - DNA, 120 bp, Artificial Sequence
  ENSG00000075223_1 (sequence is synthesized)
cgtgctagaaaataaggtcgtctgggaaaaggactggagacacaagcgcatccaaccccggtagcaaactgatgacttttccgtgctgatttctttcaacctcggtattttcccttggat

SEQ ID NO: 66710 - DNA, 120 bp, Artificial Sequence
  ENSG00000075223_2 (sequence is synthesized)
attaacttgcatatctgaagaaatggcattccggacaatttgcgtgttggttggagtatttatttgttctatctgtgtgaaaggatcttcccagccccaagcaagagtttatttaacatt

SEQ ID NO: 66711 - DNA, 120 bp, Artificial Sequence
  ENSG00000075223_3 (sequence is synthesized)
tgatgaacttcgagaaaccaagacctctgaatacttcagcctttcccaccatcctttagactacaggattttattaatggatgaagatcaggaccggatatatgtgggaagcaaagatca

SEQ ID NO: 66712 - DNA, 120 bp, Artificial Sequence
  ENSG00000075223_4 (sequence is synthesized)
cattctttccctgaatattaacaatataagtcaagaagctttgagtgttttctggccagcatctacaatcaaagttgaagaatgcaaaatggctggcaaagatcccacacacggctgtgg

SEQ ID NO: 66713 - DNA, 120 bp, Artificial Sequence
  ENSG00000075223_5 (sequence is synthesized)
gaactttgtccgtgtaattcagactttcaatcgcacacatttgtatgtctgtgggagtggcgctttcagtcctgtctgtacttacttgaacagagggaggagatcagaggaccaagtttt

SEQ ID NO: 66714 - DNA, 120 bp, Artificial Sequence
  ENSG00000075223_6 (sequence is synthesized)
catgattgactccaagtgtgaatctggaaaaggacgctgctctttcaaccccaacgtgaacacggtgtctgttatgatcaatgaggagcttttctctggaatgtatatagatttcatggg

SEQ ID NO: 66715 - DNA, 120 bp, Artificial Sequence
  ENSG00000075223_7 (sequence is synthesized)
gacagatgctgctatttttcgaagtttaaccaagaggaatgcggtcagaactgatcaacataattccaaatggctaagtgaacctatgtttgtagatgcacatgtcatcccagatggtac

SEQ ID NO: 66716 - DNA, 120 bp, Artificial Sequence
  ENSG00000075223_8 (sequence is synthesized)
tgatccaaatgatgctaaggtgtacttcttcttcaaagaaaaactgactgacaataacaggagcacgaaacagattcattccatgattgctcgaatatgtcctaatgacactggtggact

SEQ ID NO: 66717 - DNA, 120 bp, Artificial Sequence
  ENSG00000075223_9 (sequence is synthesized)
gcgtagccttgtcaacaagtggaccactttcttaaaggcgaggctggtgtgctcggtaacagatgaagacggcccagaaacacactttgatgaattagaggatgtgtttctgctggaaac

SEQ ID NO: 66718 - DNA, 120 bp, Artificial Sequence
  ENSG00000075223_10 (sequence is synthesized)
tgataacccgaggacaacactagtgtatggcatttttacaacatcaagctcagttttcaaaggatcagccgtgtgtgtgtatcatttatctgatatacagactgtgtttaatgggccttt

SEQ ID NO: 66719 - DNA, 120 bp, Artificial Sequence
  ENSG00000075223_11 (sequence is synthesized)
tgcccacaaagaagggcccaatcatcagctgatttcctatcagggcagaattccatatcctcgccctggaacttgtccaggaggagcatttacacccaatatgcgaaccaccaaggagtt

SEQ ID NO: 66720 - DNA, 120 bp, Artificial Sequence
  ENSG00000075223_12 (sequence is synthesized)
cccagatgatgttgtcacttttattcggaaccatcctctcatgtacaattccatctacccaatccacaaaaggcctttgattgttcgtattggcactgactacaagtatacaaagatagc

SEQ ID NO: 66721 - DNA, 120 bp, Artificial Sequence
  ENSG00000075223_13 (sequence is synthesized)
tgtggatcgagtgaacgctgctgatgggagataccatgtcctgtttctcggaacagatcggggtactgtgcaaaaagtggttgttcttcctactaacaactctgtcagtggcgagctcat

SEQ ID NO: 66722 - DNA, 120 bp, Artificial Sequence
  ENSG00000075223_14 (sequence is synthesized)
tctggaggagctggaagtctttaagaatcatgctcctataacaacaatgaaaatttcatctaaaaagcaacagttgtatgtgagttccaatgaaggggtttcccaggtatctctgcaccg

SEQ ID NO: 66723 - DNA, 120 bp, Artificial Sequence
  ENSG00000075223_15 (sequence is synthesized)
ctgccacatctatggtacagcctgtgctgactgctgcctggcgcgggacccttattgcgcctgggatggccattcctgttccagattctacccaactgggaaacggaggagccgaagaca

SEQ ID NO: 66724 - DNA, 120 bp, Artificial Sequence
  ENSG00000075223_16 (sequence is synthesized)
agatgtgagacatggaaacccactgactcaatgcagaggatttaatctaaaagcatacagaaatgcagctgaaattgtccagtatggagtaaaaaataacaccacttttctggagtgtgc

SEQ ID NO: 66725 - DNA, 120 bp, Artificial Sequence
  ENSG00000075223_17 (sequence is synthesized)
ccccaagtctccgcaggcatctatcaagtggctgttacagaaagacaaagacaggaggaaagaggttaagctgaatgaacgaataatagccacttcacagggactcctgatccgctctgt

SEQ ID NO: 66726 - DNA, 120 bp, Artificial Sequence
  ENSG00000075223_18 (sequence is synthesized)
tcagggttctgaccaaggactttatcactgcattgctacagaaaatagtttcaagcagaccatagccaagatcaacttcaaagttttagattcagaaatggtggctgttgtgacggacaa

SEQ ID NO: 66727 - DNA, 120 bp, Artificial Sequence
  ENSG00000075223_19 (sequence is synthesized)
atggtccccatggacctgggccagctctgtgagggctttacccttccacccgaaggacatcatgggggcattcagccactcagaaatgcagatgattaaccaatattgcaaagacactcg

SEQ ID NO: 66728 - DNA, 120 bp, Artificial Sequence
  ENSG00000075223_20 (sequence is synthesized)
gtcggaaaagtagaaacaggaggaatcagttgccagagtcataatattttcttatgtgggtcttatgcttccattaacaaatgctctgtcttcaatgatcaaattttgagcaaagaaact

SEQ ID NO: 66729 - DNA, 120 bp, Artificial Sequence
  ENSG00000075223_21 (sequence is synthesized)
tgtgctttaccaaggggaattactgaaaaaggtgattactcctgaagtgagttttacacgaactgaaatgagcatgcattttcttgtatgatagtgactagcactagacatgtcatggtc

SEQ ID NO: 66730 - DNA, 120 bp, Artificial Sequence
  ENSG00000075223_22 (sequence is synthesized)
ctcatggtgcatataaatatatttaacttaacccagattttatttatatctttattcaccttttcttcaaaatcgatatggtggctgcaaaactagaattgttgcatccctcaattgaat

SEQ ID NO: 66731 - DNA, 120 bp, Artificial Sequence
  ENSG00000075223_23 (sequence is synthesized)
gagggccatatccctgtggtattcctttcctgctttggggctttagaattctaattgtcagtgattttgtatatgaaaacaagttccaaatccacagcttttacgtagtaaaagtcataa

SEQ ID NO: 66732 - DNA, 120 bp, Artificial Sequence
  ENSG00000075223_24 (sequence is synthesized)
atgcatatgacagaatggctatcaaaagaaatagaaaaggaagacagcatttaaagttgtataaaaacatgagttattcataaagagaaaatgatgagtttttatggttccaatgaaata

SEQ ID NO: 66733 - DNA, 120 bp, Artificial Sequence
  ENSG00000075223_25 (sequence is synthesized)
tgttggggtttttttaagattgtaaaaataatcagttactggtatctgtcactgacctttgtttccttattcaggaagataaaaatcagtaacctaccccatgaagatatttggtgggag

SEQ ID NO: 66734 - DNA, 120 bp, Artificial Sequence
  ENSG00000075223_26 (sequence is synthesized)
ttatatcagtgaagcagtttggtttatattcttatgttatcaccttccaaacaaaagcacttactttttttggaagttatttattttagactcaaagaatataatctggcactactcagt

SEQ ID NO: 66735 - DNA, 120 bp, Artificial Sequence
  ENSG00000075223_27 (sequence is synthesized)
tattactgtttgttctcttattccctagtctgtgtggcaaattaaacaatataagaaggaaaaatttgaagtattagacttctaaataaggtgtgaaatcatcaaaaagaaaaatcaaag

SEQ ID NO: 66736 - DNA, 120 bp, Artificial Sequence
  ENSG00000075223_28 (sequence is synthesized)
tagaaactactaattttttaagaggaatttataacaaatatggctagttttcaacttcagtactcaaattcaatgattcttccttttattaaaaccagtctcagatatcatactgatttt

SEQ ID NO: 66737 - DNA, 120 bp, Artificial Sequence
  ENSG00000075223_29 (sequence is synthesized)
taagtcaacactatatattttatgatcttttcagtgtgatggcaaggtgcttgttatgtctagaaagtaagaaaacaatatgaggagacattctgtctttcaaaaggtaatggtacatac

SEQ ID NO: 66738 - DNA, 120 bp, Artificial Sequence
  ENSG00000075223_30 (sequence is synthesized)
aatggtacatacgttcactggtctctaagtgtaaaagtagtaaattttgtgatgaataaaataattatctcctaattgtatgttagaataattttattagaataatttcatactgaaatt

SEQ ID NO: 66739 - DNA, 120 bp, Artificial Sequence
  ENSG00000075223_31 (sequence is synthesized)
taaaaattagatggaaaaatgtgaaaaaaattattcatgctctcatatatattttaaaaacactacttttgcttttttatttaccttttaagacattttcatgcttccaggtaaaaacag

SEQ ID NO: 66740 - DNA, 120 bp, Artificial Sequence
  ENSG00000075223_32 (sequence is synthesized)
atattgtaccatgtacctaatccaaatatcatataaacattttatttatagttaataatctatgatgaaggtaattaaagtagattatggcctttttaagtattgcagtctaaaacttca

SEQ ID NO: 66741 - DNA, 120 bp, Artificial Sequence
  ENSG00000075223_33 (sequence is synthesized)
aaaactaaaatcattgtcaaaattaatatgattattaatcagaatatcagaatatgattcactatttaaactatgataaattatgataatatatgaggaggcctcgctatagcaaaaata

SEQ ID NO: 66742 - DNA, 120 bp, Artificial Sequence
  ENSG00000075223_34 (sequence is synthesized)
gttaaaatgctgacataacaccaaacttcattttttaaaaaatctgttgttccaaatgtgtataattttaaagtaatttctaaagcagtttattataatggtttgcctgcttaaaaggta

SEQ ID NO: 66743 - DNA, 120 bp, Artificial Sequence
  ENSG00000075223_35 (sequence is synthesized)
taattaaacttcttttctcttctacattgacacacagaaatgtgtcaatgtaaagccaaaaccatcttctgtgtttatggccaatctattctcaaagttaaaagtaaaattgtttcagag

SEQ ID NO: 66744 - DNA, 120 bp, Artificial Sequence
  ENSG00000075223_36 (sequence is synthesized)
tcacagttccctttatttcacataagcccaaactgatagacagtaacggtgtttagttttatactatatttgtgctatttaattctttctattttcacaattattaaattgtgtacactt

SEQ ID NO: 66745 - DNA, 120 bp, Artificial Sequence
  ENSG00000075223_37 (sequence is synthesized)
tcattacttttaaaaatgtagaaattcttcatgaacataactctgctgaatgtaaaagaaaattttttttcaaaaatgctgttaatgtatactactggtggttgattggttttattttat

SEQ ID NO: 66746 - DNA, 120 bp, Artificial Sequence
  ENSG00000075223_38 (sequence is synthesized)
gtagcttgacaattcagtgacttaatatctattccatttgtattgtacataaaattttctagaaatacacttttttccaaagtgtaagtttgtgaatagattttagcatgatgaaactgt

SEQ ID NO: 66747 - DNA, 120 bp, Artificial Sequence
  ENSG00000075223_39 (sequence is synthesized)
cataatggtgaatgttcaatctgtgtaagaaaacaaactaaatgtagttgtcacactaaaatttaattggatattgatgaaatcattggcctggcaaaataaaacatgttgaattcccca

SEQ ID NO: 66748 - DNA, 120 bp, Artificial Sequence
  ENSG00000075223_40 (sequence is synthesized)
tttcactcctcatcactaggtgggatgtaaatcaaattgccctgtagactatcttcgtttcacctgccattgtatcaccagtattctttgcaattggttgtatatgtacttttgggagaa

SEQ ID NO: 66749 - DNA, 120 bp, Artificial Sequence
  ENSG00000075223_41 (sequence is synthesized)
ctgcgcggtggtgatgcgagcctgcagggcggcgcgccggggcagccggagccgcgcgccgcggcgctgtaatcggacaccaagagcgctcgcccccggcctccggccactttccattca

SEQ ID NO: 66750 - DNA, 120 bp, Artificial Sequence
  ENSG00000075223_42 (sequence is synthesized)
ataacagtaattttttattcttgtgtcccctactgggcacatcaaagtgctttttggataaaatatgctcaagtaatggatacgtatattaacatataagtatattctgaaaactgacct

SEQ ID NO: 66751 - DNA, 120 bp, Artificial Sequence
  ENSG00000075223_43 (sequence is synthesized)
aactctctaaagaagatggacagaacattaatcttgtataaaacagggaaaagcatcagcagatacagccgttttaagattggggaatcctggtgtggtggtgggcgcctgtagtcccag

SEQ ID NO: 66752 - DNA, 120 bp, Artificial Sequence
  ENSG00000075223_44 (sequence is synthesized)
gggaactttgtccgtgtaattcagactttcaatcgcacacatttgtatgtctgtgggagtggcgctttcagtcctgtctgtacttacttgaacagagggaggagatcagaggggaatatt

SEQ ID NO: 66753 - DNA, 120 bp, Artificial Sequence
  ENSG00000075223_45 (sequence is synthesized)
tcacatgcttttgttataccccatttctcttctattatttgcgagactgattcagagctttctgagatttcaacagtactcactcacctaaagagcctggaatccttgctacatgaagac

SEQ ID NO: 66754 - DNA, 120 bp, Artificial Sequence
  ENSG00000075223_46 (sequence is synthesized)
ctaaccacggttcttctcctgtgtctactatctttactccttgtcttctgttcctggaaaaagataaagcaatacaagtgaatcatgactttaaatgaatgaataaaacatcaacaaaaa

SEQ ID NO: 66755 - DNA, 120 bp, Artificial Sequence
  ENSG00000075234_0 (sequence is synthesized)
agagctcgcggtggactccgacccggcgcaacatggccgcagcctcgcctctgcgcgactgccaggcctggaaggatgcgaggctcccgctctccaccacaagcaacgaagcctgcaagc

SEQ ID NO: 66756 - DNA, 120 bp, Artificial Sequence
  ENSG00000075234_1 (sequence is synthesized)
tgttcgatgccacgctgacccagtatgtaaaatggaccaatgacaagagtctcggtggcatcgagggctgcctgtcaaagctcaaagcagcagatccaacctttgtgatgggccacgcca

SEQ ID NO: 66757 - DNA, 120 bp, Artificial Sequence
  ENSG00000075234_2 (sequence is synthesized)
tggctactggccttgtgctgattggcactggaagctccgtgaagctggacaaagagctggacctggctgtgaagacaatggtggagatttcaagaacccagccgctgacaaggcgggagc

SEQ ID NO: 66758 - DNA, 120 bp, Artificial Sequence
  ENSG00000075234_3 (sequence is synthesized)
agctgcacgtgtctgcagtagagacatttgccaatgggaactttccgaaagcctgtgaactatgggaacagattctccaggaccacccgacagacatgttggccctgaaattttcccatg

SEQ ID NO: 66759 - DNA, 120 bp, Artificial Sequence
  ENSG00000075234_4 (sequence is synthesized)
atgcttatttttacctgggctatcaggaacagatgagagattctgttgctcgaatttaccccttctggacacctgacatccccctaagcagctatgtgaaaggcatctactcttttggct

SEQ ID NO: 66760 - DNA, 120 bp, Artificial Sequence
  ENSG00000075234_5 (sequence is synthesized)
tgatggaaaccaacttctacgaccaggcagaaaaactcgccaaagaggctttatctattaacccgacagacgcatggtcggtgcacaccgtcgctcacatccacgagatgaaagcagaga

SEQ ID NO: 66761 - DNA, 120 bp, Artificial Sequence
  ENSG00000075234_6 (sequence is synthesized)
tcaaggatgggttggaattcatgcagcactcagagaccttctggaaggactctgatatgttggcttgtcataactattggcactgggctttatatctgattgagaagggcgaatatgagg

SEQ ID NO: 66762 - DNA, 120 bp, Artificial Sequence
  ENSG00000075234_7 (sequence is synthesized)
ccgcgctgaccatctacgatacccacatccttcccagcctgcaggccaacgatgcaatgctggacgtggtggacagctgctccatgctctaccgcctgcagatggaaggagtgtctgtgg

SEQ ID NO: 66763 - DNA, 120 bp, Artificial Sequence
  ENSG00000075234_8 (sequence is synthesized)
gccagcggtggcaggatgtcctgcctgtggcccggaagcacagccgagaccacatcctgctgttcaatgacgcacacttcctgatggcatccctgggtgcacacgacccccagaccacac

SEQ ID NO: 66764 - DNA, 120 bp, Artificial Sequence
  ENSG00000075234_9 (sequence is synthesized)
aggagctgctgaccaccctgcgggacgccagcgaatccccaggggagaactgccagcacctcctggcccgagacgtggggctgcccctgtgccaggccctggtggaggctgaggacggga

SEQ ID NO: 66765 - DNA, 120 bp, Artificial Sequence
  ENSG00000075234_10 (sequence is synthesized)
cgtccagctcggtgggagcaatgcccagagagacgtcttcaaccagctgctgattcacgcggccttaaactgcacctccagcgtccataagaacgtagcccggagccttctgatggagcg

SEQ ID NO: 66766 - DNA, 120 bp, Artificial Sequence
  ENSG00000075234_11 (sequence is synthesized)
tgatgccttgaagcccaactcgcccctgaccgagcggctcatccgcaaggcagctaccgtccacctcatgcagtgagccagcctggccgcctccaccctgcagaacctcagtggtggcgt

SEQ ID NO: 66767 - DNA, 120 bp, Artificial Sequence
  ENSG00000075234_12 (sequence is synthesized)
cactgcgtccagtcagctgctccaccgggttagggtcaggagacggccagagcctgtttgttagggctgttagagggtgatcttcagttttacaggaagtgggtcacgggttaattttaa

SEQ ID NO: 66768 - DNA, 120 bp, Artificial Sequence
  ENSG00000075234_13 (sequence is synthesized)
atgtgattccgaatctcctttcagtcctcgagaagggccaatgagcatttttcagcagtcacagccagtgtgagtgctgctctttccacctgccttgcaaattctgtttcccaggggaat

SEQ ID NO: 66769 - DNA, 120 bp, Artificial Sequence
  ENSG00000075234_14 (sequence is synthesized)
gtgtctactgcctggtggttcaaaggttggaaggcagggcagaggtgggggctgattctgctgggacaggtcttccagaggcagcctccccccactgcctgtccccgtccccaccaggct

SEQ ID NO: 66770 - DNA, 120 bp, Artificial Sequence
  ENSG00000075234_15 (sequence is synthesized)
gcccttgggatggaccttttcattcttttctttatattctagacagtctctgttgtctcattgtgttgctgtcccatttttcaggtgagggtaccggggtaggggagtggcctgcccagg

SEQ ID NO: 66771 - DNA, 120 bp, Artificial Sequence
  ENSG00000075234_16 (sequence is synthesized)
gtcacactatgagaggcccccacctgctgcctttggacgcagccccctgctgctgcatccaccacccttcttacagatcagcgcgcacatggggtccttctgctgtctctggggcgagtc

SEQ ID NO: 66772 - DNA, 120 bp, Artificial Sequence
  ENSG00000075234_17 (sequence is synthesized)
ttggagccccctggggggctctgttggtgctgatttggacccgtttctctttttaaactgcacatcataacagggcttcatgtcgagcatgattttaatcataaatgcacttctgaggtg

SEQ ID NO: 66773 - DNA, 120 bp, Artificial Sequence
  ENSG00000075234_18 (sequence is synthesized)
caaggattgagctcagagctgctctgttgtggcaaaacccaaagtgctgtgatgtgtggctgtgacaagcctggagcgggtcctgtgagcgccgcctctgtctcctgcttccccactgaa

SEQ ID NO: 66774 - DNA, 120 bp, Artificial Sequence
  ENSG00000075234_19 (sequence is synthesized)
cgcctgctgaatgtgccgctgactcagctgtgctgctttcagccctcctgtgaggggcggtcccagtgcacagatgtttttcaagttcctcagtttgtactgaaattagggattcatcag

SEQ ID NO: 66775 - DNA, 120 bp, Artificial Sequence
  ENSG00000075234_20 (sequence is synthesized)
ggcaggaagcaggcaggcctctcagaagggagaggaggcctccaaatctattgagtccccacagtttgctcaagcccaggcaaatttctgtgattaaaatgaattcatcagttcctccaa

SEQ ID NO: 66776 - DNA, 120 bp, Artificial Sequence
  ENSG00000075234_21 (sequence is synthesized)
aaagcaggctgtgatggggccaggagtggtaacacatgggctctgtgtctgcagccccaggctggtgagggtaggaggagccagggcaggagcaggcaggcggcaggcacaggcacagcc

SEQ ID NO: 66777 - DNA, 120 bp, Artificial Sequence
  ENSG00000075234_22 (sequence is synthesized)
gcctggtcaggaggagcgagcagcctcttcaaagcacatgagctgcaccatgacggggaccctctgtgggatgtggaaacgcagaggaagcattaaactcaactgggcttggggggacag

SEQ ID NO: 66778 - DNA, 120 bp, Artificial Sequence
  ENSG00000075234_23 (sequence is synthesized)
tggctagggaaggcatcctggagggggcaacctctgagttggctactgaaggatgagcaggactctgatatgttggcttgtcataactattggcactgggctttatatctgattgagaag

SEQ ID NO: 66779 - DNA, 120 bp, Artificial Sequence
  ENSG00000075239_0 (sequence is synthesized)
agtctacgcctgtggagccgatactcagccctctgcgaccatggctgtgctggcggcacttctgcgcagcggcgcccgcagccgcagccccctgctccggaggctggtgcaggaaataag

SEQ ID NO: 66780 - DNA, 120 bp, Artificial Sequence
  ENSG00000075239_1 (sequence is synthesized)
atatgtggaacggagttatgtatcaaaacccactttgaaggaagtggtcatagtaagtgctacaagaacacccattggatcttttttaggcagcctttccttgctgccagccactaagct

SEQ ID NO: 66781 - DNA, 120 bp, Artificial Sequence
  ENSG00000075239_2 (sequence is synthesized)
tggttccattgcaattcagggagccattgaaaaggcagggattccaaaagaagaagtgaaagaagcatacatgggtaatgttctacaaggaggtgaaggacaagctcctacaaggcaggc

SEQ ID NO: 66782 - DNA, 120 bp, Artificial Sequence
  ENSG00000075239_3 (sequence is synthesized)
agtattgggtgcaggcttacctatttctactccatgtaccaccataaacaaagtttgtgcttcaggaatgaaagccatcatgatggcctctcaaagtcttatgtgtggacatcaggatgt

SEQ ID NO: 66783 - DNA, 120 bp, Artificial Sequence
  ENSG00000075239_4 (sequence is synthesized)
gatggtggcaggtgggatggagagcatgtccaatgttccatatgtaatgaacagaggatcaacaccatatggtggggtaaagcttgaagatttgattgtaaaagacgggctaactgatgt

SEQ ID NO: 66784 - DNA, 120 bp, Artificial Sequence
  ENSG00000075239_5 (sequence is synthesized)
ctacaataaaattcatatgggcagctgtgctgagaatacagcaaagaagctgaatattgcacgaaatgaacaggacgcttatgctattaattcttataccagaagtaaagcagcatggga

SEQ ID NO: 66785 - DNA, 120 bp, Artificial Sequence
  ENSG00000075239_6 (sequence is synthesized)
gattttagcaaagttccaaagctgaagacagttttccagaaagaaaatggcacagtaacagctgccaatgccagtacactgaatgatggagcagctgctctggttctcatgacggcagat

SEQ ID NO: 66786 - DNA, 120 bp, Artificial Sequence
  ENSG00000075239_7 (sequence is synthesized)
gcagcgaagaggctcaatgttacaccactggcaagaatagtagcatttgctgacgctgctgtagaacctattgattttccaattgctcctgtatatgctgcatctatggttcttaaagat

SEQ ID NO: 66787 - DNA, 120 bp, Artificial Sequence
  ENSG00000075239_8 (sequence is synthesized)
gtgggattgaaaaaagaagatattgcaatgtgggaagtaaatgaagcctttagtctggttgtactagcaaacattaaaatgttggagattgatccccaaaaagtgaatatcaatggagga

SEQ ID NO: 66788 - DNA, 120 bp, Artificial Sequence
  ENSG00000075239_9 (sequence is synthesized)
gctgtttctctgggacatccaattgggatgtctggagccaggattgttggtcatttgactcatgccttgaagcaaggagaatacggtcttgccagtatttgcaatggaggaggaggtgct

SEQ ID NO: 66789 - DNA, 120 bp, Artificial Sequence
  ENSG00000075239_10 (sequence is synthesized)
tctgccatgctaattcagaagctgtagacaacctctgctatttaaggagacaaccctatgtgaccagaaggcctgctgtaatcagtgtgactactgtgggtcagcttatattcagataag

SEQ ID NO: 66790 - DNA, 120 bp, Artificial Sequence
  ENSG00000075239_11 (sequence is synthesized)
ctgtttcattttttattattttctatgttaacttttaaaaatcaaaatgatgaaatcccaaaacattttgaaattaaaaataaatttcttcttctgcttttttcttggtaaccttgaaaa

SEQ ID NO: 66791 - DNA, 120 bp, Artificial Sequence
  ENSG00000075239_12 (sequence is synthesized)
accaaggttgcagtttttaagattttaaatgttatctgccaaagcagagagatagcttggtttcaaatcttcccatgtcttctcctgaaaagagtaagagcaacaaggataacaaacaaa

SEQ ID NO: 66792 - DNA, 120 bp, Artificial Sequence
  ENSG00000075239_13 (sequence is synthesized)
gcggccgttgcggctcccgcggcccgggcgcgcggcttaggccccaggacagtcacgcgacgggttctggtccaaaaaccgcctaagtgctccgataacacccagggactcgcctatttt

SEQ ID NO: 66793 - DNA, 70 bp, Artificial Sequence
  ENSG00000075239_14 (sequence is synthesized)
gcctaagtgctccgataacacccagggactcgcctatttttacagcgcgtttctacttccaagctcgcag

SEQ ID NO: 66794 - DNA, 120 bp, Artificial Sequence
  ENSG00000075239_15 (sequence is synthesized)
aatgtgatttttagtggataaatgctatctaatgtccaatactgtttgatttttcttactctatgtactttacaaactgaactgaaagatgggctctataaatgttgattttagccgtgt

SEQ ID NO: 66795 - DNA, 120 bp, Artificial Sequence
  ENSG00000075239_16 (sequence is synthesized)
gcaagagacaggctccttagcaaaaatatgctgtcatgtcaggaggtgagacctggacacacagaagaatcaagattctctcagatctgagcccttcatttttcagatgaagattttttt

SEQ ID NO: 66796 - DNA, 120 bp, Artificial Sequence
  ENSG00000075239_17 (sequence is synthesized)
ttacagggctgagcatctgccatgtgacagtcattggaaatagagtggtgaacaaaacatttaaaaaaatctgtacatgtgcaggtctctgttggaaaaatgcctaaaagaaatgctgag

SEQ ID NO: 66797 - DNA, 120 bp, Artificial Sequence
  ENSG00000075239_18 (sequence is synthesized)
tcaggatttgaacattttggtatttgcaaatgctttccataaaagttgtaccagttagactttccaaaaattgtgtgacttgtctggatctgcaccaccactgggtggtaccaaaccctt

SEQ ID NO: 66798 - DNA, 120 bp, Artificial Sequence
  ENSG00000075239_19 (sequence is synthesized)
gtcaaactggtaggtgaaaaacggtcaccagatttagtttcagaactgtttgtcatggaaagttttgtcttaattgaagtattgtggttctctagcaaatgccatttgtactatattgaa

SEQ ID NO: 66799 - DNA, 120 bp, Artificial Sequence
  ENSG00000075239_20 (sequence is synthesized)
atactttcatttaatattattttattcatttgtggatatatacagtgacttataggcattcttggaagtgctttgttttgaatatttatgaccttagaaaacagtcagttttactttata

SEQ ID NO: 66800 - DNA, 120 bp, Artificial Sequence
  ENSG00000075239_21 (sequence is synthesized)
atgaagaattgataccttattttctgtcacttattattgccatcacccccagtaaaaagtacaagtgaataaaacttagatgagaactgattaagaatttctctatttcggaataggcaa

SEQ ID NO: 66801 - DNA, 120 bp, Artificial Sequence
  ENSG00000075239_22 (sequence is synthesized)
aatatttatgtttctttggtatagagcttgcttgtctgtatgcctgattaaagactgtaagaagatattattggctttatgtttacattaatgttttatattaaactgtttttaactagc

SEQ ID NO: 66802 - DNA, 72 bp, Artificial Sequence
  ENSG00000075239_23 (sequence is synthesized)
ggttctcatgacggcagatgcagcgaagaggctcaatgttacaccactggcaagaatagtaggtttgaggtg

SEQ ID NO: 66803 - DNA, 86 bp, Artificial Sequence
  ENSG00000075239_24 (sequence is synthesized)
ggaggattgcttgagccccggagttcgaaatcagcctgggcaatatagtgagacttcgtctctacaaaaagttactaccatctact

SEQ ID NO: 66804 - DNA, 120 bp, Artificial Sequence
  ENSG00000075239_25 (sequence is synthesized)
agctcttcatgaaattgagtttacttgttagatatagccaactccaatattaagtattactacctaggttgtacttgtggcagaatttaattgatacatatttcaattgagatagaagct

SEQ ID NO: 66805 - DNA, 120 bp, Artificial Sequence
  ENSG00000075239_26 (sequence is synthesized)
cctttaatattttcattatactttatataagattaagctttaagggctgggcacagtggttcacgcctgtaaccccagcattttgggaggataaggcaggattgcttgaggcctggagtt

SEQ ID NO: 66806 - DNA, 120 bp, Artificial Sequence
  ENSG00000075239_27 (sequence is synthesized)
accagcctgggcaacacagtgagaccccacctctgaaagaaaaaaattagccaggtgtggtagcatgcctgtagtcccagttacgtaggaggctaaggctgacgatcatttgagcccaag

SEQ ID NO: 66807 - DNA, 120 bp, Artificial Sequence
  ENSG00000075239_28 (sequence is synthesized)
caagatgtcaaagctgcagccagcctaggcaacagagcaagatcttgtctctttttctttttttttaaattaagctttaaaaaacttcctgtcctgtatgataaatagcagaaaataaag

SEQ ID NO: 66808 - DNA, 120 bp, Artificial Sequence
  ENSG00000075239_29 (sequence is synthesized)
tacatgcattttcctacagaggcagctatgtaggaaaaaaagaatatgggattaggagtccagaaatacaaaatttacatgtgtggtgttttagtatttattaactctgtggccttgggc

SEQ ID NO: 66809 - DNA, 120 bp, Artificial Sequence
  ENSG00000075239_30 (sequence is synthesized)
aagttctcaatgtccttaagccgatttttagctgcagaaatctgtcttgccttcttcctaaggacttaacagatgctattttgttactttataaaaagccttataacttcattttttttc

SEQ ID NO: 66810 - DNA, 120 bp, Artificial Sequence
  ENSG00000075239_31 (sequence is synthesized)
ttagcttagatcatggtttcttaacctcagcactattgacttttgcactaagtaattctttgttgtagggactgttctatgcattgtagatgtttagcagaatccttagtctttacccag

SEQ ID NO: 66811 - DNA, 120 bp, Artificial Sequence
  ENSG00000075239_32 (sequence is synthesized)
tggcatctgaactattctgacaaccaaaaacatctctaggtggtgccaatgttcctagaggcaaatacccccaaactcccccccaatgaaaatcagtgtcttagattactggagtaattt

SEQ ID NO: 66812 - DNA, 120 bp, Artificial Sequence
  ENSG00000075239_33 (sequence is synthesized)
tataaagtgtagaatcctagaaaaggaagacatatatttacatatattaaaggggctaggaaatgtgcatttaatgggctaaacttggcttgtgcatattctatacagtaaaaaaaaaaa

SEQ ID NO: 66813 - DNA, 120 bp, Artificial Sequence
  ENSG00000075239_34 (sequence is synthesized)
acatgcgtaagcaagggagtacgcaccacagattgtcaggcaaagcctcaggaataggtagagaccttcagggtgtggttggtgaagcttgagttttctaggtcgatgggggcaataagc

SEQ ID NO: 66814 - DNA, 120 bp, Artificial Sequence
  ENSG00000075239_35 (sequence is synthesized)
acgcgacgggttctggtccaaaaaccgcctaagtgctccgataacacccagggactcgcctatttttacagcgcgtttctacttccaaggtctcggcgtaatcatcttaatgagcgttac

SEQ ID NO: 66815 - DNA, 120 bp, Artificial Sequence
  ENSG00000075239_36 (sequence is synthesized)
tggtggggggaatcagatcctgtttgtatgcttatggaattatccagaagtaaaaggggtgaatgatgtagaggagaaggaagggataactgtgccatctttgaaaaggcaactggaaat

SEQ ID NO: 66816 - DNA, 120 bp, Artificial Sequence
  ENSG00000075239_37 (sequence is synthesized)
gggatccagagtaaagtggagagaaccagggaagattccattaaactggaccagaagcttgaaagaagagaagtggcttagtaaacaaggaacaaactagctaagtagaaaggggacttt

SEQ ID NO: 66817 - DNA, 120 bp, Artificial Sequence
  ENSG00000075239_38 (sequence is synthesized)
ggacttttaaaatttaatttttatttcaataggcttttgggaacaggtggtgttggattatatgaataagttctttattggtggtatctgatattttggtgcacccatcacctgagcagt

SEQ ID NO: 66818 - DNA, 74 bp, Artificial Sequence
  ENSG00000075239_39 (sequence is synthesized)
gcacccatcacctgagcagtatacactgtaaaccaatgtgtagtcttttattcctcacccccaccccccgcctt

SEQ ID NO: 66819 - DNA, 120 bp, Artificial Sequence
  ENSG00000075239_40 (sequence is synthesized)
cagtgtccttatagcaagagtggagaaaaagccacacacaggggagaagacaggggttggactgatgcctctacaaagccaggaataccaaggatttccaacaaccaccacgatcttgga

SEQ ID NO: 66820 - DNA, 120 bp, Artificial Sequence
  ENSG00000075239_41 (sequence is synthesized)
agcccaggagtttgagaccagcttggtaagatagtgagactctgtctctacaaaacaaacaaacaaagaatactgagctggtaagcccaggctcttaactgctcagcatatttctcaaag

SEQ ID NO: 66821 - DNA, 70 bp, Artificial Sequence
  ENSG00000075239_42 (sequence is synthesized)
cctacaaggcaggcagtattgggtgcaggtacctggaagacttttttgcttttatacttaaaatgtgtaa

SEQ ID NO: 66822 - DNA, 120 bp, Artificial Sequence
  ENSG00000075239_43 (sequence is synthesized)
taacaccatttcttttcatcagggtgaagtggtaaagagggtacttcctgtattcactgtgtaacaaatgtttaataaatgcatgtagaatacttgtttggtggtagctgtataaagggt

SEQ ID NO: 66823 - DNA, 120 bp, Artificial Sequence
  ENSG00000075239_44 (sequence is synthesized)
agtctacgcctgtggagccgatactcagccctctgcgaccatggctgtgctggcggcacttctgcgcagcggcgcccgcagccgcagccccctgctccggaggctggtgcagcttgcagg

SEQ ID NO: 66824 - DNA, 120 bp, Artificial Sequence
  ENSG00000075240_0 (sequence is synthesized)
cgtcatgttagggtgaagcagaggacctcagtgctgaacatgctaaggaggttggacaaaatcaggttcagaggtcacaagagagatgacttcctcgatctagcggagtctccaaatgcc

SEQ ID NO: 66825 - DNA, 120 bp, Artificial Sequence
  ENSG00000075240_1 (sequence is synthesized)
tcggacaccgaatgcagcgacgaaatccccctgaaggtaccgcggacctcgccccgggacagcgaggagctgagggaccctgctggtccagggaccctcatcatggccacaggagtccag

SEQ ID NO: 66826 - DNA, 120 bp, Artificial Sequence
  ENSG00000075240_2 (sequence is synthesized)
gactttaaccggacagagtttgatcgactgaatgagatcaaaggtcacctggaaattgccttattggaaaaacatttcttacaggaggagctccggaagctgcgagaagaaaccaacgcg

SEQ ID NO: 66827 - DNA, 120 bp, Artificial Sequence
  ENSG00000075240_3 (sequence is synthesized)
gagatgctgcggcaggagctggaccgcgagcggcagcggcggatggagctggagcagaaggtgcaggaggtgctgaaggccagaaccgaggagcagatggctcagcagcccccaaaaggg

SEQ ID NO: 66828 - DNA, 120 bp, Artificial Sequence
  ENSG00000075240_4 (sequence is synthesized)
caggcccaggccagcaatggagcagagcgccggagccaggggctgtcctcgcgcctgcagaagtggttctacgagcggtttggggagtacgtggaggacttccggttccagcccgaggag

SEQ ID NO: 66829 - DNA, 120 bp, Artificial Sequence
  ENSG00000075240_5 (sequence is synthesized)
aacactgtggagacagaggaacccctgagcgcccgcaggttaactgaaaatatgagacggctcaagcgcggtgccaagccggtcactaactttgtgaagaacctctctgccttatccgac

SEQ ID NO: 66830 - DNA, 120 bp, Artificial Sequence
  ENSG00000075240_6 (sequence is synthesized)
tggtactccgtctacacgtctgccattgccttcaccgtgtacatgaatgccgtgtggcatggctgggccatcccattgttcttatttctagcaattctgaggttatccctcaattacctc

SEQ ID NO: 66831 - DNA, 120 bp, Artificial Sequence
  ENSG00000075240_7 (sequence is synthesized)
atcgccagggggtggcggatacagtggagcatcgtgcccgaagtgtctgagcccgtggaacctccaaaggaagacctgactgtgtctgagaagttccagctggtgctggacgtcgcccag

SEQ ID NO: 66832 - DNA, 120 bp, Artificial Sequence
  ENSG00000075240_8 (sequence is synthesized)
aaagcccagaaccttttcgggaagatggctgacatcctggagaagatcaagaacttgttcatgtgggtccagccggagatcacacagaagctgtatgtggcgctctgggctgccttcctg

SEQ ID NO: 66833 - DNA, 120 bp, Artificial Sequence
  ENSG00000075240_9 (sequence is synthesized)
gcctcctgcttcttcccctaccgcctggtggggcttgccgtgggactctatgctggtatcaagttcttcctcattgatttcatctttaaacgctgcccgaggctgcgcgccaagtacgac

SEQ ID NO: 66834 - DNA, 120 bp, Artificial Sequence
  ENSG00000075240_10 (sequence is synthesized)
acgccctatatcatctggaggagtctccccaccgacccgcagctcaaggagcgctccagcgccgcagtctcacgcaggctgcagacgacctcgtcacggagctacgtacccagcgcaccg

SEQ ID NO: 66835 - DNA, 120 bp, Artificial Sequence
  ENSG00000075240_11 (sequence is synthesized)
gccggcctgggtaaagaggaggacgccggtcgcttccacagcaccaagaagggcaatttccacgagatcttcaatctgacagaaaacgagcgtccgctggcggtgtgcgagaatggctgg

SEQ ID NO: 66836 - DNA, 120 bp, Artificial Sequence
  ENSG00000075240_12 (sequence is synthesized)
cgctgctgcctcatcaacagggaccggaagatgcccacggactacatcaggaacggggtgctctacgtcacggagaattacttgtgcttcgaaagctccaaatctgggtcctcaaagagg

SEQ ID NO: 66837 - DNA, 120 bp, Artificial Sequence
  ENSG00000075240_13 (sequence is synthesized)
aacaaagtcatcaagctagtggacatcacggacatccagaagtacaaggtcctgtctgtcctcccaggctcaggcatggggattgccgtgtcgacgccatccacccagaaaccgctcgtg

SEQ ID NO: 66838 - DNA, 120 bp, Artificial Sequence
  ENSG00000075240_14 (sequence is synthesized)
tttggtgccatggtgcacagggatgaggccttcgagaccattctcagccagtacatcaagatcacctcagcggcagcgtctggcggggacagctagtattgacttgcccaggacgttgct

SEQ ID NO: 66839 - DNA, 120 bp, Artificial Sequence
  ENSG00000075240_15 (sequence is synthesized)
ttttctttttctttttttttttttacgatttggtagtggaaacaattggacatcctcatgagcttttgcaataattctcctggacctgtggttctattgtgttgacctctgcgttttatc

SEQ ID NO: 66840 - DNA, 120 bp, Artificial Sequence
  ENSG00000075240_16 (sequence is synthesized)
acctctgcgttttatcgaccaagaaggggccagggctcacagggacgggggtgcccctctcccacagggcacgtcaggtgcctctgagggccacccgcagactgggggagggggcagagg

SEQ ID NO: 66841 - DNA, 120 bp, Artificial Sequence
  ENSG00000075240_17 (sequence is synthesized)
cgctctccagaggccagaagctcgtccaccaccaaagccatagctgaagagtgcggggcccttcctcctggggacagaaagatgtcgtcaaggagggacatgggggcctttcaccaacca

SEQ ID NO: 66842 - DNA, 120 bp, Artificial Sequence
  ENSG00000075240_18 (sequence is synthesized)
ccgagaaacgggcctggcggccctccttcctcttacatgagaccctcctgtggcatttgcccttggtgccgggctggggccgggcgcagtgaccctgcctgcgctccacactcgctccac

SEQ ID NO: 66843 - DNA, 120 bp, Artificial Sequence
  ENSG00000075240_19 (sequence is synthesized)
gggaacagagagggtgagaagggcccacccctcgcctgccctcagtgtctttggtggcaccttccttgctggcctccagggcgctcagcaccgcgtctgtaagggcctgcctgctgctct

SEQ ID NO: 66844 - DNA, 120 bp, Artificial Sequence
  ENSG00000075240_20 (sequence is synthesized)
cggcctgacacgccggccaggaggtctgtagctggggaccagtaagggcacaggatggtgcaggtaaaagcacatctttctcacactttgctctttggaaggcccaggagaacatccgcg

SEQ ID NO: 66845 - DNA, 120 bp, Artificial Sequence
  ENSG00000075240_21 (sequence is synthesized)
aaggctgttggaggtgctccgagcactgtggcatgtctggcacatggcccccaggctgcggttgcctgggttggttgggggaggaagtggggaggagtgttccgggaccatggtggccca

SEQ ID NO: 66846 - DNA, 120 bp, Artificial Sequence
  ENSG00000075240_22 (sequence is synthesized)
ggctgcagccgcctttgggccatccgagaggctctggcagcccctgtgctttagggagcaaccgtgagccgagcccagaggcctgggcctgcactgcctgcagccgacatgcgacagcgt

SEQ ID NO: 66847 - DNA, 120 bp, Artificial Sequence
  ENSG00000075240_23 (sequence is synthesized)
tccctcccccgcgtgcctagccggtgccggtccgggcacagacccccccagcccccgccctgccccagggaagcctgggcttcccgggaacaaggtggcatttgtggagggagcgcccgc

SEQ ID NO: 66848 - DNA, 120 bp, Artificial Sequence
  ENSG00000075240_24 (sequence is synthesized)
aggcctggtctgctggggccgcctgcgctgggctgaagggagggaaaggcggcttgggcctcctggaaggaggtggccaccccgcgggcctgcgtgtctgctggggcggatcccgcagct

SEQ ID NO: 66849 - DNA, 120 bp, Artificial Sequence
  ENSG00000075240_25 (sequence is synthesized)
ccctcagcttgtcctgagtcccttgggtgtcgttgagattgttgttttttgaagaaacagaagattctattttttacagcgagcaagctggttttcttatttttgtatcctttttcagat

SEQ ID NO: 66850 - DNA, 120 bp, Artificial Sequence
  ENSG00000075240_26 (sequence is synthesized)
gtaatttttatctttgctccgatcctcatttgctggtgtgggtgagggatccggcggcatgggctggtttcacccccttcacgaggggccgcagagtcacacgctggtgccgggggtgct

SEQ ID NO: 66851 - DNA, 120 bp, Artificial Sequence
  ENSG00000075240_27 (sequence is synthesized)
ttggggggagctgcgccgatcaccagattaagcacatgtcctatcccaggcggtggagcggagcccccgtggctctggactgcgcggacgttggcgtcaggatgaccacacggcggcctt

SEQ ID NO: 66852 - DNA, 120 bp, Artificial Sequence
  ENSG00000075240_28 (sequence is synthesized)
tcccgaatggggacagaacccgctctgagccgtgggtctggctcctgtaggggactggctctcttggtgcaccaggggagggggacatatcccagtgaaccccaccttggcgcctgaggc

SEQ ID NO: 66853 - DNA, 120 bp, Artificial Sequence
  ENSG00000075240_29 (sequence is synthesized)
aacacagggtgggcactgacccacccccaggggcggctgcagaggcagtgcccgcagacaatggccacacctctctccccagggcccggcagtgcccaaggatgggtccggggcctcggg

SEQ ID NO: 66854 - DNA, 120 bp, Artificial Sequence
  ENSG00000075240_30 (sequence is synthesized)
gccaatgagcgcctcttcctaggtgctgggattcagtccccaaacacagcgggaggggtccctggggcagatggggctttaccagcgtcgggtggtttagttcgagtcccttttgtggag

SEQ ID NO: 66855 - DNA, 120 bp, Artificial Sequence
  ENSG00000075240_31 (sequence is synthesized)
aaagggagatgaaaactgaccacgtgccaggtgtggccgaagcccccagggagggccacattcggggagcggggggtcgggggagggccaccgactggctctgctgccagcacaggcccc

SEQ ID NO: 66856 - DNA, 120 bp, Artificial Sequence
  ENSG00000075240_32 (sequence is synthesized)
tccctggaagtcctcgggagcggagcgcggatcggcacgggctctgggctccccgtggagagaagctgtagtttttaccaaattgtgtacatctgggcagatgtttaatttctgtgacta

SEQ ID NO: 66857 - DNA, 120 bp, Artificial Sequence
  ENSG00000075240_33 (sequence is synthesized)
atcactgaactagacgaatgttaaattttttatgtctgaagcctgagtctattttggatctgtaaataatcattgccagtgtgacttttgttcaacaaaaggattgtactgtattaagaa

SEQ ID NO: 66858 - DNA, 120 bp, Artificial Sequence
  ENSG00000075240_34 (sequence is synthesized)
ccgatgaaaaaaattctcctgtaacatttttttaagaaaactttgtttgtttaaagaaaaagtattgtataaattataatttttatttaaataaacctaaaatgctttgtgctaaggctc

SEQ ID NO: 66859 - DNA, 120 bp, Artificial Sequence
  ENSG00000075240_35 (sequence is synthesized)
gcacaggactggagtcctccaggctccagggcagcagacaccaccctctccgtgcctgctggtgttgggcggcttggaggctatggttcctgggtcctcgtagcacatcctggttctggg

SEQ ID NO: 66860 - DNA, 120 bp, Artificial Sequence
  ENSG00000075240_36 (sequence is synthesized)
ggctggtccagggaccctcatcatggccacaggagtccaggactttaaccggacagagtttgatcgactgaatgagatcaaaggtcacctggaaattgccttattggaaaaacatttctt

SEQ ID NO: 66861 - DNA, 80 bp, Artificial Sequence
  ENSG00000075240_37 (sequence is synthesized)
cgggcggcaggcgtagcgcggccgggcggccggcgaggggggcgccgcggcgggtggatgagagttggccccgatatccg

SEQ ID NO: 66862 - DNA, 120 bp, Artificial Sequence
  ENSG00000075240_38 (sequence is synthesized)
ggtgctgacaagggacctcagcttagaggggcagaggctgcctgctccaagcaaggatggccccagctgggacttgggctctcttgagctgagctgtccctcctgggtcggccaccacgt

SEQ ID NO: 66863 - DNA, 80 bp, Artificial Sequence
  ENSG00000075275_0 (sequence is synthesized)
gatggggctgcgagcggccgcctgggagccgcgcgtacccggcgggacccgcgccttcgccctccggcccggctgtacct

SEQ ID NO: 66864 - DNA, 80 bp, Artificial Sequence
  ENSG00000075275_1 (sequence is synthesized)
gccttcgccctccggcccggctgtacctacgcggtgggcgccgcttgcacgccccgggcgccgcgggagctgctggacgt

SEQ ID NO: 66865 - DNA, 80 bp, Artificial Sequence
  ENSG00000075275_2 (sequence is synthesized)
ctcgggcgcggggcgcccgctgccgctgcaagtccgcttggtggcccgcagtgccccgacggcgctgagccgccgcctgc

SEQ ID NO: 66866 - DNA, 120 bp, Artificial Sequence
  ENSG00000075275_3 (sequence is synthesized)
gctctgcggaaccggtgcccggctctgcggggcgctctgcttccccgtccccggcggctgcgcggccgcgcagcattcggcgctcgcagctccgaccaccttacccgcctgccgctgccc

SEQ ID NO: 66867 - DNA, 80 bp, Artificial Sequence
  ENSG00000075275_4 (sequence is synthesized)
cgccccaggccccgctgtcccggccgtcccatctgcctgccgccgggcggctcggtccgcctgcgtctgctgtgcgccct

SEQ ID NO: 66868 - DNA, 120 bp, Artificial Sequence
  ENSG00000075275_5 (sequence is synthesized)
cgtcgccatccccatcgccgcccctgccgccgaacttgcccgaagcccgggcggggccggcgcgacgggcccggcggggcacgagcggcagagggagcctgaagtttccgatgcccaact

SEQ ID NO: 66869 - DNA, 120 bp, Artificial Sequence
  ENSG00000075275_6 (sequence is synthesized)
gggagcctgaagtttccgatgcccaactaccaggtggcgttgtttgagaacgaaccggcgggcaccctcatcctccagctgcacgcgcactacaccatcgagggcgaggaggagcgcgtg

SEQ ID NO: 66870 - DNA, 120 bp, Artificial Sequence
  ENSG00000075275_7 (sequence is synthesized)
agctattacatggaggggctgttcgacgagcgctcccggggctacttccgaatcgactctgccacgggcgccgtgagcacggacagcgtactggaccgcgagaccaaggagacgcacgtc

SEQ ID NO: 66871 - DNA, 120 bp, Artificial Sequence
  ENSG00000075275_8 (sequence is synthesized)
ctcagggtgaaagccgtggactacagtacgccgccgcgctcggccaccacctacatcactgtcttggtcaaagacaccaacgaccacagcccggtcttcgagcagtcggagtaccgcgag

SEQ ID NO: 66872 - DNA, 120 bp, Artificial Sequence
  ENSG00000075275_9 (sequence is synthesized)
cgcgtgcgggagaacctggaggtgggctacgaggtgctgaccatccgcgccagcgaccgcgactcgcccatcaacgccaacttgcgttaccgcgtgttggggggcgcgtgggacgtcttc

SEQ ID NO: 66873 - DNA, 120 bp, Artificial Sequence
  ENSG00000075275_10 (sequence is synthesized)
cagctcaacgagagctctggcgtggtgagcacacgggcggtgctggaccgggaggaggcggccgagtaccagctcctggtggaggccaacgaccaggggcgcaatccgggcccgctcagt

SEQ ID NO: 66874 - DNA, 120 bp, Artificial Sequence
  ENSG00000075275_11 (sequence is synthesized)
gccacggccaccgtgtacatcgaggtggaggacgagaacgacaactacccccagttcagcgagcagaactacgtggtccaggtgcccgaggacgtggggctcaacacggctgtgctgcga

SEQ ID NO: 66875 - DNA, 120 bp, Artificial Sequence
  ENSG00000075275_12 (sequence is synthesized)
gtgcaggccacggaccgggaccagggccagaacgcggccattcactacagcatcctcagcgggaacgtggccggccagttctacctgcactcgctgagcgggatcctggatgtgatcaac

SEQ ID NO: 66876 - DNA, 120 bp, Artificial Sequence
  ENSG00000075275_13 (sequence is synthesized)
cccttggatttcgaggatgtccagaaatactcgctgagcattaaggcccaggatgggggccggcccccgctcatcaattcttcaggggtggtgtctgtgcaggtgctggatgtcaacgac

SEQ ID NO: 66877 - DNA, 120 bp, Artificial Sequence
  ENSG00000075275_14 (sequence is synthesized)
aacgagcctatctttgtgagcagccccttccaggccacggtgctggagaatgtgcccctgggctaccccgtggtgcacattcaggcggtggacgcggactctggagagaacgcccggctg

SEQ ID NO: 66878 - DNA, 120 bp, Artificial Sequence
  ENSG00000075275_15 (sequence is synthesized)
cactatcgcctggtggacacggcctccacctttctggggggcggcagcgctgggcctaagaatcctgcccccacccctgacttccccttccagatccacaacagctccggttggatcaca

SEQ ID NO: 66879 - DNA, 120 bp, Artificial Sequence
  ENSG00000075275_16 (sequence is synthesized)
gtgtgtgccgagctggaccgcgaggaggtggagcactacagcttcggggtggaggcggtggaccacggctcgccccccatgagctcctccaccagcgtgtccatcacggtgctggacgtg

SEQ ID NO: 66880 - DNA, 120 bp, Artificial Sequence
  ENSG00000075275_17 (sequence is synthesized)
aatgacaacgacccggtgttcacgcagcccacctacgagcttcgtctgaatgaggatgcggccgtggggagcagcgtgctgaccctgcaggcccgcgaccgtgacgccaacagtgtgatt

SEQ ID NO: 66881 - DNA, 120 bp, Artificial Sequence
  ENSG00000075275_18 (sequence is synthesized)
acctaccagctcacaggcggcaacacccggaaccgctttgcactcagcagccagagagggggcggcctcatcaccctggcgctacctctggactacaagcaggagcagcagtacgtgctg

SEQ ID NO: 66882 - DNA, 120 bp, Artificial Sequence
  ENSG00000075275_19 (sequence is synthesized)
gcggtgacagcatccgacggcacacggtcgcacactgcgcatgtcctaatcaacgtcactgatgccaacacccacaggcctgtctttcagagctcccattacacagtgagtgtcagtgag

SEQ ID NO: 66883 - DNA, 120 bp, Artificial Sequence
  ENSG00000075275_20 (sequence is synthesized)
gacaggcctgtgggcacctccattgctaccctcagtgccaacgatgaggacacaggagagaatgcccgcatcacctacgtgattcaggaccccgtgccgcagttccgcattgaccccgac

SEQ ID NO: 66884 - DNA, 120 bp, Artificial Sequence
  ENSG00000075275_21 (sequence is synthesized)
agtggcaccatgtacaccatgatggagctggactatgagaaccaggtcgcctacacgctgaccatcatggcccaggacaacggcatcccgcagaaatcagacaccaccaccctagagatc

SEQ ID NO: 66885 - DNA, 120 bp, Artificial Sequence
  ENSG00000075275_22 (sequence is synthesized)
ctcatcctcgatgccaatgacaatgcaccccagttcctgtgggatttctaccagggttccatctttgaggatgctccaccctcgaccagcatcctccaggtctctgccacggaccgggac

SEQ ID NO: 66886 - DNA, 120 bp, Artificial Sequence
  ENSG00000075275_23 (sequence is synthesized)
tcaggtcccaatgggcgtctgctgtacaccttccagggtggggacgacggcgatggggacttctacatcgagcccacgtccggtgtgattcgcacccagcgccggctggaccgggagaat

SEQ ID NO: 66887 - DNA, 120 bp, Artificial Sequence
  ENSG00000075275_24 (sequence is synthesized)
gtggccgtgtacaacctttgggctctggctgtggatcggggcagtcccactccccttagcgcctcggtagaaatccaggtgaccatcttggacattaatgacaatgcccccatgtttgag

SEQ ID NO: 66888 - DNA, 120 bp, Artificial Sequence
  ENSG00000075275_25 (sequence is synthesized)
aaggacgaactggagctgtttgttgaggagaacaacccagtggggtcggtggtggcaaagattcgtgctaacgaccctgatgaaggccctaatgcccagatcatgtatcagattgtggaa

SEQ ID NO: 66889 - DNA, 120 bp, Artificial Sequence
  ENSG00000075275_26 (sequence is synthesized)
ggggacatgcggcatttcttccagctggacctgctcaacggggacctgcgtgccatggtggagctggactttgaggtccggcgggagtatgtgctggtggtgcaggccacgtcggctccg

SEQ ID NO: 66890 - DNA, 120 bp, Artificial Sequence
  ENSG00000075275_27 (sequence is synthesized)
ctggtgagccgagccacggtgcacatccttctcgtggaccagaatgacaacccgcctgtgctgcccgacttccagatcctcttcaacaactatgtcaccaacaagtccaacagtttcccc

SEQ ID NO: 66891 - DNA, 120 bp, Artificial Sequence
  ENSG00000075275_28 (sequence is synthesized)
accggcgtgatcggctgcatcccggcccatgaccccgacgtgtcagacagcctcaactacaccttcgtgcagggcaacgagctgcgcctgttgctgctggaccccgccacgggcgaactg

SEQ ID NO: 66892 - DNA, 120 bp, Artificial Sequence
  ENSG00000075275_29 (sequence is synthesized)
cagctcagccgcgacctggacaacaaccggccgctggaggcgctcatggaggtgtctgtgtctgatggcatccacagcgtcacggccttctgcaccctgcgtgtcaccatcatcacggac

SEQ ID NO: 66893 - DNA, 120 bp, Artificial Sequence
  ENSG00000075275_30 (sequence is synthesized)
gacatgctgaccaacagcatcactgtccgcctggagaacatgtcccaggagaagttcctgtccccgctgctggccctcttcgtggagggggtggccgccgtgctgtccaccaccaaggac

SEQ ID NO: 66894 - DNA, 120 bp, Artificial Sequence
  ENSG00000075275_31 (sequence is synthesized)
gacgtcttcgtcttcaacgtccagaacgacaccgacgtcagctccaacatcctgaacgtgaccttctcggcgctgctgcctggcggcgtccgcggccagttcttcccgtcggaggacctg

SEQ ID NO: 66895 - DNA, 120 bp, Artificial Sequence
  ENSG00000075275_32 (sequence is synthesized)
caggagcagatctacctgaatcggacgctgctgaccaccatctccacgcagcgcgtgctgcccttcgacgacaacatctgcctgcgcgagccctgcgagaactacatgaagtgcgtgtcc

SEQ ID NO: 66896 - DNA, 120 bp, Artificial Sequence
  ENSG00000075275_33 (sequence is synthesized)
gttctgcgattcgacagctccgcgcccttcctcagctccaccaccgtgctcttccggcccatccaccccatcaacggcctgcgctgccgctgcccgcccggcttcaccggcgactactgc

SEQ ID NO: 66897 - DNA, 120 bp, Artificial Sequence
  ENSG00000075275_34 (sequence is synthesized)
gagacggagatcgacctctgctactccgacccgtgcggcgccaacggccgctgccgcagccgcgagggcggctacacctgcgagtgcttcgaggacttcactggagagcactgtgaggtg

SEQ ID NO: 66898 - DNA, 120 bp, Artificial Sequence
  ENSG00000075275_35 (sequence is synthesized)
gatgcccgctcaggccgctgtgccaacggggtgtgcaagaacgggggcacctgcgtgaacctgctcatcggcggcttccactgcgtgtgtcctcctggcgagtatgagaggccctactgt

SEQ ID NO: 66899 - DNA, 120 bp, Artificial Sequence
  ENSG00000075275_36 (sequence is synthesized)
gaggtgaccaccaggagcttcccgccccagtccttcgtcaccttccggggcctgagacagcgcttccacttcaccatctccctcacgtttgccactcaggaaaggaacggcttgcttctc

SEQ ID NO: 66900 - DNA, 120 bp, Artificial Sequence
  ENSG00000075275_37 (sequence is synthesized)
tacaacggccgcttcaatgagaagcacgacttcatcgccctggagatcgtggacgagcaggtgcagctcaccttctctgcaggcgagacaacaacgaccgtggcaccgaaggttcccagt

SEQ ID NO: 66901 - DNA, 120 bp, Artificial Sequence
  ENSG00000075275_38 (sequence is synthesized)
ggtgtgagtgacgggcggtggcactctgtgcaggtgcagtactacaacaagcccaatattggccacctgggcctgccccatgggccgtccggggaaaagatggccgtggtgacagtggat

SEQ ID NO: 66902 - DNA, 120 bp, Artificial Sequence
  ENSG00000075275_39 (sequence is synthesized)
gattgtgacacaaccatggctgtgcgctttggaaaggacatcgggaactacagctgcgctgcccagggcactcagaccggctccaagaagtccctggatctgaccggccctctactcctg

SEQ ID NO: 66903 - DNA, 120 bp, Artificial Sequence
  ENSG00000075275_40 (sequence is synthesized)
gggggtgtccccaacctgccagaagacttcccagtgcacaaccggcagttcgtgggctgcatgcggaacctgtcagtcgacggcaaaaatgtggacatggccggattcatcgccaacaat

SEQ ID NO: 66904 - DNA, 120 bp, Artificial Sequence
  ENSG00000075275_41 (sequence is synthesized)
ggcacccgggaaggctgcgctgctcggaggaacttctgcgatgggaggcggtgtcagaatggaggcacctgtgtcaacaggtggaatatgtatctgtgtgagtgtccactccgattcggc

SEQ ID NO: 66905 - DNA, 120 bp, Artificial Sequence
  ENSG00000075275_42 (sequence is synthesized)
gggaagaactgtgagcaagccatgcctcacccccagctcttcagcggtgagagcgtcgtgtcctggagtgacctgaacatcatcatctctgtgccctggtacctggggctcatgttccgg

SEQ ID NO: 66906 - DNA, 120 bp, Artificial Sequence
  ENSG00000075275_43 (sequence is synthesized)
acccggaaggaggacagcgttctgatggaggccaccagtggtgggcccaccagctttcgcctccagatcctgaacaactacctccagtttgaggtgtcccacggcccctccgatgtggag

SEQ ID NO: 66907 - DNA, 120 bp, Artificial Sequence
  ENSG00000075275_44 (sequence is synthesized)
tccgtgatgctgtccgggttgcgggtgaccgacggggagtggcaccacctgctgatcgagctgaagaatgttaaggaggacagtgagatgaagcacctggtcaccatgaccttggactat

SEQ ID NO: 66908 - DNA, 120 bp, Artificial Sequence
  ENSG00000075275_45 (sequence is synthesized)
gggatggaccagaacaaggcagatatcgggggcatgcttcccgggctgacggtaaggagcgtggtggtcggaggcgcctctgaagacaaggtctccgtgcgccgtggattccgaggctgc

SEQ ID NO: 66909 - DNA, 120 bp, Artificial Sequence
  ENSG00000075275_46 (sequence is synthesized)
atgcagggagtgaggatgggggggacgcccaccaacgtcgccaccctgaacatgaacaacgcactcaaggtcagggtgaaggacggctgtgatgtggacgacccctgtacctcgagcccc

SEQ ID NO: 66910 - DNA, 120 bp, Artificial Sequence
  ENSG00000075275_47 (sequence is synthesized)
agaacatgggggcctgcgtgcgctcccccggctccccgcagggctacgtgtgcgagtgtgggcccagtcactacgggccgtactgtgagaacaaactcgaccttccgtgccccagaggct

SEQ ID NO: 66911 - DNA, 120 bp, Artificial Sequence
  ENSG00000075275_48 (sequence is synthesized)
ggtgggggaaccccgtctgtggaccctgccactgtgccgtcagcaaaggctttgatcccgactgtaataagaccaacggccagtgccaatgcaaggagaattactacaagctcctagccc

SEQ ID NO: 66912 - DNA, 120 bp, Artificial Sequence
  ENSG00000075275_49 (sequence is synthesized)
aggacacctgtctgccctgcgactgcttcccccatggctcccacagccgcacttgcgacatggccaccgggcagtgtgcctgcaagcccggcgtcatcggccgccagtgcaaccgctgcg

SEQ ID NO: 66913 - DNA, 120 bp, Artificial Sequence
  ENSG00000075275_50 (sequence is synthesized)
acaacccgtttgccgaggtcaccacgctcggctgtgaagtgatctacaatggctgtcccaaagcatttgaggccggcatctggtggccacagaccaagttcgggcagccggctgcggtgc

SEQ ID NO: 66914 - DNA, 120 bp, Artificial Sequence
  ENSG00000075275_51 (sequence is synthesized)
catgccctaagggatccgttggaaatgcggtccgacactgcagcggggagaagggctggctgcccccagagctctttaactgtaccaccatctccttcgtggacctcagggccatgaatg

SEQ ID NO: 66915 - DNA, 120 bp, Artificial Sequence
  ENSG00000075275_52 (sequence is synthesized)
agaagctgagccgcaatgagacgcaggtggacggcgccagggccctgcagctggtgagggcgctgcgcagtgctacacagcacacgggcacgctctttggcaatgacgtgcgcacggcct

SEQ ID NO: 66916 - DNA, 120 bp, Artificial Sequence
  ENSG00000075275_53 (sequence is synthesized)
accagctgctgggccacgtccttcagcacgagagctggcagcagggcttcgacctggcagccacgcaggacgccgactttcacgaggacgtcatccactcgggcagcgccctcctggccc

SEQ ID NO: 66917 - DNA, 120 bp, Artificial Sequence
  ENSG00000075275_54 (sequence is synthesized)
cagccaccagggcggcgtgggagcagatccagcggagcgagggcggcacggcacagctgctccggcgcctcgagggctacttcagcaacgtggcacgcaacgtgcggcggacgtacctgc

SEQ ID NO: 66918 - DNA, 120 bp, Artificial Sequence
  ENSG00000075275_55 (sequence is synthesized)
ggcccttcgtcatcgtcaccgccaacatgattcttgctgtcgacatctttgacaagttcaactttacgggagccagggtcccgcgattcgacaccatccatgaagagttccccagggagc

SEQ ID NO: 66919 - DNA, 120 bp, Artificial Sequence
  ENSG00000075275_56 (sequence is synthesized)
tggagtcctccgtctccttcccagccgacttcttcagaccacctgaagaaaaagaaggccccctgctgaggccggctggccggaggaccaccccgcagaccacgcgcccggggcctggca

SEQ ID NO: 66920 - DNA, 120 bp, Artificial Sequence
  ENSG00000075275_57 (sequence is synthesized)
ccgagagggaggccccgatcagcaggcggaggcgacaccctgatgacgctggccagttcgccgtcgctctggtcatcatttaccgcaccctggggcagctcctgcccgagcgctacgacc

SEQ ID NO: 66921 - DNA, 120 bp, Artificial Sequence
  ENSG00000075275_58 (sequence is synthesized)
ccgaccgtcgcagcctccggttgcctcaccggcccatcattaataccccgatggtgagcacgctggtgtacagcgagggggctccgctcccgagacccctggagaggcccgtcctggtgg

SEQ ID NO: 66922 - DNA, 120 bp, Artificial Sequence
  ENSG00000075275_59 (sequence is synthesized)
agttcgccctgctggaggtggaggagcgaaccaagcctgtctgcgtgttctggaaccactccctggccgttggtgggacgggagggtggtctgcccggggctgcgagctcctgtccagga

SEQ ID NO: 66923 - DNA, 120 bp, Artificial Sequence
  ENSG00000075275_60 (sequence is synthesized)
accggacacatgtcgcctgccagtgcagccacacagccagctttgcggtgctcatggatatctccaggcgtgagaacggggaggtcctgcctctgaagattgtcacctatgccgctgtgt

SEQ ID NO: 66924 - DNA, 120 bp, Artificial Sequence
  ENSG00000075275_61 (sequence is synthesized)
ccttgtcactggcagccctgctggtggccttcgtcctcctgagcctggtccgcatgctgcgctccaacctgcacagcattcacaagcacctcgccgtggcgctcttcctctctcagctgg

SEQ ID NO: 66925 - DNA, 120 bp, Artificial Sequence
  ENSG00000075275_62 (sequence is synthesized)
tgttcgtgattgggatcaaccagacggaaaacccgtttctgtgcacagtggttgccatcctcctccactacatctacatgagcacctttgcctggaccctcgtggagagcctgcatgtct

SEQ ID NO: 66926 - DNA, 120 bp, Artificial Sequence
  ENSG00000075275_63 (sequence is synthesized)
accgcatgctgaccgaggtgcgcaacatcgacacggggcccatgcggttctactacgtcgtgggctggggcatcccggccattgtcacaggactggcggtcggcctggacccccagggct

SEQ ID NO: 66927 - DNA, 120 bp, Artificial Sequence
  ENSG00000075275_64 (sequence is synthesized)
acgggaaccccgacttctgctggctgtcgcttcaagacaccctgatttggagctttgcggggcccatcggagctgttataatcatcaacacagtcacttctgtcctatctgcaaaggttt

SEQ ID NO: 66928 - DNA, 120 bp, Artificial Sequence
  ENSG00000075275_65 (sequence is synthesized)
cctgccaaagaaagcaccattattatgggaaaaaagggatcgtctccctgctgaggaccgcattcctcctgctgctgctcatcagcgccacctggctgctggggctgctggctgtgaacc

SEQ ID NO: 66929 - DNA, 120 bp, Artificial Sequence
  ENSG00000075275_66 (sequence is synthesized)
gcgatgcactgagctttcactacctcttcgccatcttcagcggcttacagggccccttcgtcctccttttccactgcgtgctcaaccaggaggtccggaagcacctgaagggcgtgctcg

SEQ ID NO: 66930 - DNA, 120 bp, Artificial Sequence
  ENSG00000075275_67 (sequence is synthesized)
gcgggaggaagctgcacctggaggactccgccaccaccagggccaccctgctgacgcgctccctcaactgcaacaccaccttcggtgacgggcctgacatgctgcgcacagacttgggcg

SEQ ID NO: 66931 - DNA, 120 bp, Artificial Sequence
  ENSG00000075275_68 (sequence is synthesized)
agtccaccgcctcgctggacagcatcgtcagggatgaagggatccagaagctcggcgtgtcctctgggctggtgaggggcagccacggagagccagacgcgtccctcatgcccaggagct

SEQ ID NO: 66932 - DNA, 120 bp, Artificial Sequence
  ENSG00000075275_69 (sequence is synthesized)
gcaaggatccccctggccacgattccgactcagatagcgagctgtccctggatgagcagagcagctcttacgcctcctcacactcgtcagacagcgaggacgatggggtgggagctgagg

SEQ ID NO: 66933 - DNA, 120 bp, Artificial Sequence
  ENSG00000075275_70 (sequence is synthesized)
aaaaatgggacccggccaggggcgccgtccacagcacccccaaaggggacgctgtggccaaccacgttccggccggctggcccgaccagagcctggctgagagtgacagtgaggacccca

SEQ ID NO: 66934 - DNA, 120 bp, Artificial Sequence
  ENSG00000075275_71 (sequence is synthesized)
gcggcaagccccgcctgaaggtggagaccaaggtcagcgtggagctgcaccgcgaggagcagggcagtcaccgtggagagtaccccccggaccaggagagcgggggcgcagccaggcttg

SEQ ID NO: 66935 - DNA, 120 bp, Artificial Sequence
  ENSG00000075275_72 (sequence is synthesized)
ctagcagccagcccccagagcagaggaaaggcatcttgaaaaataaagtcacctacccgccgccgctgacgctgacggagcagacgctgaagggccggctccgggagaagctggccgact

SEQ ID NO: 66936 - DNA, 120 bp, Artificial Sequence
  ENSG00000075275_73 (sequence is synthesized)
gtgagcagagccccacatcctcgcgcacgtcttccctgggctctggcggccccgactgcgccatcacagtcaagagccctgggagggagccggggcgtgaccacctcaacggggtggcca

SEQ ID NO: 66937 - DNA, 120 bp, Artificial Sequence
  ENSG00000075275_74 (sequence is synthesized)
tgaatgtgcgcactgggagcgcccaggccgatggctccgactctgagaaaccgtgaggcaagcccgtcaccccacacaggctgcggcatcaccctcagaccttggagcccaaggggccac

SEQ ID NO: 66938 - DNA, 120 bp, Artificial Sequence
  ENSG00000075275_75 (sequence is synthesized)
tgcccttgaagtggagtgggcccagagtgtggcggtccccatggtggcagccccccgactgatcatccagacacaaaggtcttggttctcccaggagctcagggcctgtcagacctggtg

SEQ ID NO: 66939 - DNA, 120 bp, Artificial Sequence
  ENSG00000075275_76 (sequence is synthesized)
acaagtgccaaaggccacaggcatgagggaggcgtggaccactgggccagcaccgctgagtcctaagactgcagtcaaagccagaactgagaggggaccccagactgggcccagaggctg

SEQ ID NO: 66940 - DNA, 120 bp, Artificial Sequence
  ENSG00000075275_77 (sequence is synthesized)
gccagagttcaggaacgccgggcacagaccaaagaccgcggtccagccccgcccaggcgggcatctcatggcagtgcggacccgtggctggcagcccgggcagtcctttgcaaaggcacc

SEQ ID NO: 66941 - DNA, 120 bp, Artificial Sequence
  ENSG00000075275_78 (sequence is synthesized)
ccttgtcttaaaatcacttcgctatgtgggaaaggtggagatacttttatatatttgtatgggactctgaggaggtgcaacctgtatatatattgcattcgtgctgactttgttatcccg

SEQ ID NO: 66942 - DNA, 120 bp, Artificial Sequence
  ENSG00000075275_79 (sequence is synthesized)
agagatccatgcaatgatctcttgctgtcttctctgtcaagattgcacagttgtacttgaatctggcatgtgttgacgaaactggtgccccagcagatcaaaggtgggaaatacgtcagc

SEQ ID NO: 66943 - DNA, 120 bp, Artificial Sequence
  ENSG00000075275_80 (sequence is synthesized)
agtggggctaaaaccaagcggctagaagccctacagctgccttcggccaggaagtgaggatggtgtgggccctccccgccggccccctgggtccccagtgttcgctgtgtgtgcgtttgt

SEQ ID NO: 66944 - DNA, 120 bp, Artificial Sequence
  ENSG00000075275_81 (sequence is synthesized)
cctctgctgccatctgccccggctgtgtgaattcaagacagggcagtgcagcactaggcaggtgtgaggagccctgctgaggtcactgtggggcacggttgccacacggctgtcattttt

SEQ ID NO: 66945 - DNA, 120 bp, Artificial Sequence
  ENSG00000075275_82 (sequence is synthesized)
cacctggtcattctgtgaccaccaccccctcccctcaccgcctcccaggtggcccgggagctgcaggtggggatggctttgtcctttgctcctgctccccgtgggacctgggaccttaaa

SEQ ID NO: 66946 - DNA, 120 bp, Artificial Sequence
  ENSG00000075275_83 (sequence is synthesized)
gcgttgcaggttcctgatttggacagaggtgtggggccttccaggccgttacatacctcctgccaattctctaactctctgagactgcgaggatctccaggcagggttctcccctctgga

SEQ ID NO: 66947 - DNA, 120 bp, Artificial Sequence
  ENSG00000075275_84 (sequence is synthesized)
gtctgaccaattacttcattttgcttcaaatggccaattgtgcagagggacaaagccacagccacactcttcaacggttaccaaactgtttttggaaattcacaccaaggtcgggcccac

SEQ ID NO: 66948 - DNA, 120 bp, Artificial Sequence
  ENSG00000075275_85 (sequence is synthesized)
tgcaggcagctggcacagcgtggcccgaggggctgtggaacgggtcccggaactgtcagacatgtttgattttagcgtttcctttgttcttcaaatcaggtgcccaaataagtgatcagc

SEQ ID NO: 66949 - DNA, 120 bp, Artificial Sequence
  ENSG00000075275_86 (sequence is synthesized)
acagctgcttccaaataggagaaaccataaaataggatgaaaatcaagtaaaatgcaaagatgtccacactgttttaaacttgaccctgatgaaaatgtgagcactgttagcagatgcct

SEQ ID NO: 66950 - DNA, 120 bp, Artificial Sequence
  ENSG00000075275_87 (sequence is synthesized)
atgggagaggaaaagcgtatctgaaaatggtccaggacaggaggatgaaatgagatcccagagtcctcacacctgaatgaattatacatgtgccttaccaggtgagtggtctttcgaaga

SEQ ID NO: 66951 - DNA, 120 bp, Artificial Sequence
  ENSG00000075275_88 (sequence is synthesized)
taaaaaactctagtccctttaaacgtttgcccctggcgtttcctaagtacgaaaaggtttttaagtcttcgaacagtctcctttcatgactttaacaggattctgccccctgaggtgtaa

SEQ ID NO: 66952 - DNA, 120 bp, Artificial Sequence
  ENSG00000075275_89 (sequence is synthesized)
tttttttgttctatttttttccacgtactccacagccaacatcacgaggtgtaatttttaatttgatcagaactgttaccaaaaaacaactgtcagttttattgagatgggaaaaatgta

SEQ ID NO: 66953 - DNA, 120 bp, Artificial Sequence
  ENSG00000075275_90 (sequence is synthesized)
aacctatttttattacttaagactttatgggagagattagacactggaggtttttaacagaacgtgtatttattaatgttcaaaacactggaattacaaatgagaagagtctacaataaa

SEQ ID NO: 66954 - DNA, 120 bp, Artificial Sequence
  ENSG00000075275_91 (sequence is synthesized)
ttaagatttttgaatttgtacttctgcggtgctggtttttctccacaaacacccccgcccctccccatgcccagggtggccgtggaagggacggtttacggacgtgcagctgagctgtcc

SEQ ID NO: 66955 - DNA, 120 bp, Artificial Sequence
  ENSG00000075275_92 (sequence is synthesized)
gtgtcccatgctccctcagccagtggaacgtgccggaactttttgtccattccctagtaggcctgccacagcctagatgggcagtttttgtctttcaccaaatttgaggacttttttttt

SEQ ID NO: 66956 - DNA, 120 bp, Artificial Sequence
  ENSG00000075275_93 (sequence is synthesized)
ttgccattatttcttcagttttcttttcttgcactgatctttctcctctccttctgtgactccagtgactcagacgttagacctcttgatgttttcccactggtccctgaggctctgttc

SEQ ID NO: 66957 - DNA, 120 bp, Artificial Sequence
  ENSG00000075275_94 (sequence is synthesized)
ggagcgcccaggccgatggctccgactctgagtgagtagcctgggcctccagggcggggatcacccacttcccccttgtcctgagtcaggagagagagggggcagtggtcagggacctga

SEQ ID NO: 66958 - DNA, 120 bp, Artificial Sequence
  ENSG00000075275_95 (sequence is synthesized)
cacccacctcacctggagccctgagtgcagaggaagcccaggcggggatgggggaggggggaggcgctgcagctgaggtcaggaggataccccggagatgggcagaccccctatcctggg

SEQ ID NO: 66959 - DNA, 120 bp, Artificial Sequence
  ENSG00000075275_96 (sequence is synthesized)
gacacgtctcaggcctctgggactctgaagccctggccagccccaaaatgctaggacctaaggtgctgggctctgcgtttgatcagcattgtctccgcctgggaccactgccacccacct

SEQ ID NO: 66960 - DNA, 120 bp, Artificial Sequence
  ENSG00000075275_97 (sequence is synthesized)
tgcagttgaggatactgagggtcccggaatgccaggggtgaagggggcggggtggagctggggtcctggccccagacctctccctgtcgcccctccctccctccaaactcacaagggaga

SEQ ID NO: 66961 - DNA, 120 bp, Artificial Sequence
  ENSG00000075275_98 (sequence is synthesized)
agccaggtcttcagaatgccccttccaaaagtcactgtagagatggccggtttctaacgtggattccttgcgctcttctgaaagaccagcaacacagaggcccacaggctggtcctggtc

SEQ ID NO: 66962 - DNA, 120 bp, Artificial Sequence
  ENSG00000075275_99 (sequence is synthesized)
ccctctcctgcctcccaagggcagcctcatccaacatgagcttgccctccctggagcccccagacgccccctctaccctgatggggtgatcctgcccccccgtgtgacaaccttgggccc

SEQ ID NO: 66963 - DNA, 120 bp, Artificial Sequence
  ENSG00000075275_100 (sequence is synthesized)
caccaagccgctaccctcactgacccttcacctgcttgctggcttcttcccacgcgcagaggcagtaatgaaacttcaatttgaaccatcagtaatgaaacttcaatttgaaccatcagg

SEQ ID NO: 66964 - DNA, 120 bp, Artificial Sequence
  ENSG00000075275_101 (sequence is synthesized)
cccgcctctgaagatgctctttccttgatacctcctgactcatcaccaagatgaattactccaaatgtagccaacggtggtttttaaaaataaagagccaccccgagagcggtacagaaa

SEQ ID NO: 66965 - DNA, 120 bp, Artificial Sequence
  ENSG00000075275_102 (sequence is synthesized)
gtgacatgtgggccaaggaagctgaaattgaggcagaagaaaggaggctggagtgagagtccgaggctcccatggcctgggcgccccaaagccagaggtctctgaacggcccccaagcca

SEQ ID NO: 66966 - DNA, 120 bp, Artificial Sequence
  ENSG00000075275_103 (sequence is synthesized)
gtggagggagcctggcgtgctgccgcaggccccagggatgcccagggcccagggcattgaaggagcctcaggaggggcagttccaggcccagagccatgagcactcggcctccccagccc

SEQ ID NO: 66967 - DNA, 120 bp, Artificial Sequence
  ENSG00000075275_104 (sequence is synthesized)
ggacaacaaccggccgctggaggcgctcatggaggtgtctgtgtctgggcaacgtggctgatgacccagtggacaactcaagccttgaatgtgctctgccttctttctggacagtggtct

SEQ ID NO: 66968 - DNA, 120 bp, Artificial Sequence
  ENSG00000075275_105 (sequence is synthesized)
atgtgctctgccttctttctggacagtggtctttcagaaacattgacattctttgttttatttttatttttgaaaaacaatttatatataatgaattatatataatatataatatatgtt

SEQ ID NO: 66969 - DNA, 120 bp, Artificial Sequence
  ENSG00000075290_0 (sequence is synthesized)
ccatttcacctccccttaactctgtttgggatcgcttacacaccaaggaagttgggctttgagaattccatcccactggcactgaggagaatatttctccgtcttgcttacccatctccc

SEQ ID NO: 66970 - DNA, 120 bp, Artificial Sequence
  ENSG00000075290_1 (sequence is synthesized)
agttttttggaattttctctagctgttactccagaggattatgtttctttcaaagccttctgtgtacatctgtcttttcacctgtgtcctccaactcagccacagctggtcggtgaacaa

SEQ ID NO: 66971 - DNA, 120 bp, Artificial Sequence
  ENSG00000075290_2 (sequence is synthesized)
tttcctgatgactggtccaaaggcttacctgatttactccagcagtgtggcagctggtgcccagagtggtattgaagaatgcaagtatcagtttgcctgggaccgctggaactgccctga

SEQ ID NO: 66972 - DNA, 120 bp, Artificial Sequence
  ENSG00000075290_3 (sequence is synthesized)
gagagccctgcagctgtccagccatggtgggcttcgcagtgccaatcgggagacagcatttgtgcatgccatcagttctgctggagtcatgtacaccctgactagaaactgcagccttgg

SEQ ID NO: 66973 - DNA, 120 bp, Artificial Sequence
  ENSG00000075290_4 (sequence is synthesized)
agattttgataactgtggctgtgatgactcccgcaacgggcaactggggggacaaggctggctgtggggaggctgcagtgacaatgtgggcttcggagaggcgatttccaagcagtttgt

SEQ ID NO: 66974 - DNA, 120 bp, Artificial Sequence
  ENSG00000075290_5 (sequence is synthesized)
cgatgccctggaaacaggacaggatgcacgggcagccatgaacctgcacaacaacgaggctggccgcaaggcggtgaagggcaccatgaaacgcacgtgcaagtgccacggcgtgtctgg

SEQ ID NO: 66975 - DNA, 120 bp, Artificial Sequence
  ENSG00000075290_6 (sequence is synthesized)
cagctgcaccacgcagacctgttggctgcagctgcccgagttccgcgaggtgggcgcgcacctgaaggagaagtaccacgcagcactcaaggtggacctgctgcagggtgctggcaacag

SEQ ID NO: 66976 - DNA, 120 bp, Artificial Sequence
  ENSG00000075290_7 (sequence is synthesized)
cgcggccggccgcggcgccatcgccgacacctttcgctccatctctacccgggagctggtgcacctggaggactccccggactactgcctggagaacaaaacgctagggctgctgggcac

SEQ ID NO: 66977 - DNA, 120 bp, Artificial Sequence
  ENSG00000075290_8 (sequence is synthesized)
gggccgagaccgtgtccagctgcaactgcaagttccactggtgctgcgcagtccgctgcgagcagtgccgccggagggtcaccaagtacttctgtagccgcgcagagcggccgcgggggg

SEQ ID NO: 66978 - DNA, 120 bp, Artificial Sequence
  ENSG00000075290_9 (sequence is synthesized)
gcgctgcgcacaaacccgggagaaaaccctaagggtttcctctgccccctccttttcccactggttcttggcttcctttagagaccccggtaattgtggaacctagggaatggggaaccc

SEQ ID NO: 66979 - DNA, 120 bp, Artificial Sequence
  ENSG00000075290_10 (sequence is synthesized)
gctctcccagacctagggatcctgagagggagagactgcaatttctccaaagcttgccactttccagcctgtttccccaattcctctgtgctctcctagagctctgtctgaatcctcgca

SEQ ID NO: 66980 - DNA, 120 bp, Artificial Sequence
  ENSG00000075290_11 (sequence is synthesized)
gccacacctaggtctgagaactcaggctttgagttactgatcttccttggattaggagaacaggtgttcctcctcccctctcctagcagccctaatgtctgacctagcctatcaagcctt

SEQ ID NO: 66981 - DNA, 120 bp, Artificial Sequence
  ENSG00000075290_12 (sequence is synthesized)
aggcgctggaagaacccttctcagacacgcaggacccaggtaaagtcaaagctttgcccttttgcccactgtctgctaccagggctcacccactgctgcacctctcttctgcacagctcc

SEQ ID NO: 66982 - DNA, 120 bp, Artificial Sequence
  ENSG00000075290_13 (sequence is synthesized)
tcccctgctacctgctgagccagattccccaggaatcttgaatgctttctctcctcttctccctttcctttcccagaaaaactgaggaaactggccccggaaaagcatgtctttggggtt

SEQ ID NO: 66983 - DNA, 120 bp, Artificial Sequence
  ENSG00000075290_14 (sequence is synthesized)
ggttcctagaggcagaggttgaagatggaagagggagctctggagtgctaacttgaacaccaagggtgctactcatccctatggtatcatatcatgaatggactttactagtggggcaat

SEQ ID NO: 66984 - DNA, 120 bp, Artificial Sequence
  ENSG00000075290_15 (sequence is synthesized)
gactttcctagacaataacccgagggactccagatacataccccgaaggtctaggaaatacgttaagggcagattacagtcatttcctaccctttaaaggtaacttctcccttctcctga

SEQ ID NO: 66985 - DNA, 120 bp, Artificial Sequence
  ENSG00000075290_16 (sequence is synthesized)
cctacttcctcctagcaaccaactttacctcttcttctccaaaggatctttgttcctctgagccaagactgaggtaaataaagccactttcctcttcagatcctggtctgcacctctaga

SEQ ID NO: 66986 - DNA, 120 bp, Artificial Sequence
  ENSG00000075292_0 (sequence is synthesized)
ggaggcggtagcgttttcggcgtcgagactggaggctgagtgctaaactgtgtggggcgcggatgggatccagctgttagtcgggtaggcatagctttgtgttattcttggaaaatttcg

SEQ ID NO: 66987 - DNA, 120 bp, Artificial Sequence
  ENSG00000075292_1 (sequence is synthesized)
caccacttgtgaattccttgaacctgggcattgcaaacccacttctgttgggcccatctcctttgcactttgctcagattaagactcagttggcgcttcagcagctgaatgccgttgcct

SEQ ID NO: 66988 - DNA, 120 bp, Artificial Sequence
  ENSG00000075292_2 (sequence is synthesized)
cacatggttcaacaccaccttatactttattaaatcaggctttcttgaaaatagccatgtcgagacccaggtttaatcctcgaggagactttccacttcaaaggccacgagcacctaacc

SEQ ID NO: 66989 - DNA, 120 bp, Artificial Sequence
  ENSG00000075292_3 (sequence is synthesized)
cttctgggatgaggcctccaggaccatttatgaggcctggatctatgggtctcccaagattttacccagcagggagagcacgtggaattccacacagatttgctggccatgaatcttatc

SEQ ID NO: 66990 - DNA, 120 bp, Artificial Sequence
  ENSG00000075292_4 (sequence is synthesized)
agaacatggggccacagagaatgaatgttcaggtaactcaacacagaactgatccaagattgaccaaagaaaaactggattttcatgaagcacaacagaagaaggggaagcctcatggta

SEQ ID NO: 66991 - DNA, 120 bp, Artificial Sequence
  ENSG00000075292_5 (sequence is synthesized)
gccggtgggatgatgagcctcatatatctgcatcagtggcagtgaaacagagttctgtaacacaggttacagagcagagtcccaaagtacagagccgctatacaaaagagagtgcctcaa

SEQ ID NO: 66992 - DNA, 120 bp, Artificial Sequence
  ENSG00000075292_6 (sequence is synthesized)
gtatcttagcaagttttggattatctaatgaagacctagaagaacttagtcgctatcctgatgaacaactaactcctgaaaatatgccattaattttgagggatataagaatgcgaaaaa

SEQ ID NO: 66993 - DNA, 120 bp, Artificial Sequence
  ENSG00000075292_7 (sequence is synthesized)
tggggcgccgattacctaatttaccttctcagagcagaaataaagaaacacttggtagtgaagcagtttcaagtaatgtgatcgattatgggcatgcaagcaaatatggctacacagaag

SEQ ID NO: 66994 - DNA, 120 bp, Artificial Sequence
  ENSG00000075292_8 (sequence is synthesized)
atccacttgaagtacgtatttatgatcctgaaattccaactgatgaggtcgagaatgaatttcagtcacagcagaacatttctgcatctgttcccaatccaaatgtgatatgtaattcta

SEQ ID NO: 66995 - DNA, 120 bp, Artificial Sequence
  ENSG00000075292_9 (sequence is synthesized)
tgtttcctgttgaagacgtatttcgccaaatggacttccccggtgagtcctccaataatcggtcctttttctcagttgagagtggaaccaagatgtcaggcttacacatttcaggaggac

SEQ ID NO: 66996 - DNA, 120 bp, Artificial Sequence
  ENSG00000075292_10 (sequence is synthesized)
agtcagtccttgaacccataaaatccgtcaaccaatccattaaccaaacagttagccagacaatgagtcaatctctgattcctccatctatgaaccagcaacctttttcgtcggaattaa

SEQ ID NO: 66997 - DNA, 120 bp, Artificial Sequence
  ENSG00000075292_11 (sequence is synthesized)
tttcatctgtaagccagcaagagcggatcccacatgaacctgtgattaattcatctaacgtacatgttggatcaagaggaagtaaaaagaattaccagtcacaggctgacattcccattc

SEQ ID NO: 66998 - DNA, 120 bp, Artificial Sequence
  ENSG00000075292_12 (sequence is synthesized)
ggtctccctttggtattgtgaaagcatcctggctaccaaagttttcacatgctgatgcccagaagatgaagagacttccaactccttctatgatgaatgattattatgcagcatctccaa

SEQ ID NO: 66999 - DNA, 120 bp, Artificial Sequence
  ENSG00000075292_13 (sequence is synthesized)
gaatatttccacatttgtgttctctgtgtaacgtagaatgtagtcatttgaaggattggattcagcatcaaaatacatctactcatattgagagctgtcgacagttacgtcaacagtatc

SEQ ID NO: 67000 - DNA, 120 bp, Artificial Sequence
  ENSG00000075292_14 (sequence is synthesized)
ctgattggaatcctgagatcctcccatcgagaagaaatgagggcaatagaaaagaaaatgaaactccacgaagacgttctcattcccccagtcctaggcgttctagaagatcaagctcaa

SEQ ID NO: 67001 - DNA, 120 bp, Artificial Sequence
  ENSG00000075292_15 (sequence is synthesized)
gtcacagattccgtcggtctcgaagcccaatgcattacatgtataggccgagaagtcgaagtccaagaatttgccatcgtttcatttctagatacagatccagatccagatcccgttcac

SEQ ID NO: 67002 - DNA, 120 bp, Artificial Sequence
  ENSG00000075292_16 (sequence is synthesized)
catatcgaattagaaatccatttagaggtagtccaaaatgctttcgatcagttagccctgagaggatgtcaaggagatcagtgagatcatcagatagaaaaaaagcattagaagatgtag

SEQ ID NO: 67003 - DNA, 120 bp, Artificial Sequence
  ENSG00000075292_17 (sequence is synthesized)
tacaacgatctgggcatgggacagaatttaataaacagaagcatcttgaagctgctgataagggacattcaccagcacaaaagcctaaaactagcagtggaacaaaaccatcagttaaac

SEQ ID NO: 67004 - DNA, 120 bp, Artificial Sequence
  ENSG00000075292_18 (sequence is synthesized)
ctacaagcgctacaaagagtgattcaaatctaggaggacattctattcgttgtaaatcaaagaatcttgaagatgacactttgtcagaatgtaaacaggtgtctgataaagctgtttctc

SEQ ID NO: 67005 - DNA, 120 bp, Artificial Sequence
  ENSG00000075292_19 (sequence is synthesized)
tccagcgaaagcttcggaaagaacagtcattgcattatggttcggttcttcttataactgaattaccagaggatggttgtactgaagaagatgtgagaaaattatttcaaccatttggga

SEQ ID NO: 67006 - DNA, 120 bp, Artificial Sequence
  ENSG00000075292_20 (sequence is synthesized)
aagtgaatgatgtcctaattgttccatatagaaaagaggcttacctagaaatggaatttaaagaggcaattactgcaattatgaagtacattgaaacaacacctcttacgataaaaggaa

SEQ ID NO: 67007 - DNA, 120 bp, Artificial Sequence
  ENSG00000075292_21 (sequence is synthesized)
aaagtgtgaaaatatgtgttccaggaaagaaaaaagcacagaacaaagaggtgaagaaaaagactttagagtcaaagaaagtatctgcatctaccttaaaaagagatgcagatgcttcaa

SEQ ID NO: 67008 - DNA, 120 bp, Artificial Sequence
  ENSG00000075292_22 (sequence is synthesized)
aagctgttgaaattgttacttcaacttctgctgccaaaactggacaagccaaggcatctgtagccaaagtaaacaaatctacagggaaatcagcaagttctgtaaaatctgtggtaacgg

SEQ ID NO: 67009 - DNA, 120 bp, Artificial Sequence
  ENSG00000075292_23 (sequence is synthesized)
tagctgttaaaggtaataaagcttcaatcaaaacagcaaaatctggtggaaagaagtctctagaagccaaaaagactgggaatgtcaaaaacaaagactctaacaaacctgtgactatac

SEQ ID NO: 67010 - DNA, 120 bp, Artificial Sequence
  ENSG00000075292_24 (sequence is synthesized)
cagaaaactctgaaataaagaccagtattgaagtcaaagccactgaaaactgtgctaaagaagctatttctgatgctgctttggaggccacagagaatgaaccacttaacaaggaaacag

SEQ ID NO: 67011 - DNA, 120 bp, Artificial Sequence
  ENSG00000075292_25 (sequence is synthesized)
aagaaatgtgtgtgatgcttgtctctaatttgcctaataaaggatattctgtagaagaagtttatgacttagcaaaaccatttggtggtttaaaggatatcttgattttatcatctcata

SEQ ID NO: 67012 - DNA, 120 bp, Artificial Sequence
  ENSG00000075292_26 (sequence is synthesized)
aaaaggcatatatagaaataaatagaaaagctgctgagtctatggtaaaattttatacctgcttcccagtattgatggatggaaatcaactctcaataagtatggctcctgaaaacatga

SEQ ID NO: 67013 - DNA, 120 bp, Artificial Sequence
  ENSG00000075292_27 (sequence is synthesized)
agatgaggaagctatatttataaccttggtaaaagaaaatgacccagaggcaaacatagatacaatttatgatcgatttgtacatcttgataatttaccggaagatggacttcagtgtgt

SEQ ID NO: 67014 - DNA, 120 bp, Artificial Sequence
  ENSG00000075292_28 (sequence is synthesized)
actttgtgttggacttcagtttggaaaagtggatcaccatgtattcataagtaatagaaacaaggcaattcttcagttagatagtcctgaatctgctcagtcaatgtatagctttctgaa

SEQ ID NO: 67015 - DNA, 120 bp, Artificial Sequence
  ENSG00000075292_29 (sequence is synthesized)
acaaaatccacaaaatattggtgaccatatgttgacctgctcattatctccaaagatagacttaccagaggtgcaaattgagcatgacccagaattagaaaaagaaagccctggcttgaa

SEQ ID NO: 67016 - DNA, 120 bp, Artificial Sequence
  ENSG00000075292_30 (sequence is synthesized)
aaacagtccaattgatgaaagtgaggtgcaaacagcaactgatagtccctctgttaaacctaatgagcttgaagaagaaagtactcccagcattcaaacagaaactttggtacagcagga

SEQ ID NO: 67017 - DNA, 120 bp, Artificial Sequence
  ENSG00000075292_31 (sequence is synthesized)
agagccttgtgaggaagaagctgaaaaagcaacatgtgattctgactttgctgttgaaactttggagcttgaaactcaaggagaggaggtcaaagaagaaattcctcttgtagcatccgc

SEQ ID NO: 67018 - DNA, 120 bp, Artificial Sequence
  ENSG00000075292_32 (sequence is synthesized)
ttcagtcagtattgaacaattcactgaaaatgccgaggagtgtgctttaaatcagcagatgtttaacagtgacttggagaagaaaggggcagaaattattaaccctaaaacagcattgtt

SEQ ID NO: 67019 - DNA, 120 bp, Artificial Sequence
  ENSG00000075292_33 (sequence is synthesized)
accatctgacagtgtgtttgcagaagaaaggaacctcaaaggaattctagaagaatctccatctgaagcagaagatttcatttctggaattacacagactatggtagaagctgtagctga

SEQ ID NO: 67020 - DNA, 120 bp, Artificial Sequence
  ENSG00000075292_34 (sequence is synthesized)
agtagaaaaaaatgaaactgtttcggaaatattgccatcaacttgtattgtgacgttagtaccaggaattcccactggggatgagaagacagtggacaaaaagaatatttctgaaaaaaa

SEQ ID NO: 67021 - DNA, 120 bp, Artificial Sequence
  ENSG00000075292_35 (sequence is synthesized)
aggtaacatggatgaaaaggaggagaaggaatttaatactaaggaaaccagaatggatcttcaaataggaacagagaaggctgaaaagaatgaaggtaggatggatgcagaaaaggtgga

SEQ ID NO: 67022 - DNA, 120 bp, Artificial Sequence
  ENSG00000075292_36 (sequence is synthesized)
aaagatggcagcaatgaaagaaaagcctgcagaaaacactttattcaaggcatacccaaataaaggagtgggtcaggctaataagcctgatgaaactagtaaaactagtattctggctgt

SEQ ID NO: 67023 - DNA, 120 bp, Artificial Sequence
  ENSG00000075292_37 (sequence is synthesized)
atcagatgtatctagcagtaaaccaagcatcaaggctgttatagtctcttctcctaaggcaaaagctacagtttcaaaaactgaaaatcagaaaagttttccaaaatctgtgcccagaga

SEQ ID NO: 67024 - DNA, 120 bp, Artificial Sequence
  ENSG00000075292_38 (sequence is synthesized)
tcaaataaatgctgaaaagaaactttcagccaaggaatttggtctgcttaaacccacaagtgccaggtcaggcttggcagaaagcagcagtaaattcaaacctactcagagcagtcttac

SEQ ID NO: 67025 - DNA, 120 bp, Artificial Sequence
  ENSG00000075292_39 (sequence is synthesized)
cagaggaggcagtggaaggatctcagccctgcaaggcaagctttctaaactggattacagagatataacaaaacaatctcaggaaacagaggctagaccttccatcatgaaacgggatga

SEQ ID NO: 67026 - DNA, 120 bp, Artificial Sequence
  ENSG00000075292_40 (sequence is synthesized)
cagcaacaataagactttggctgagcaaaacactaagaatcctaaaagcactactggtagaagttccaaatctaaagaggagccattatttccatttaatttggatgaatttgttactgt

SEQ ID NO: 67027 - DNA, 120 bp, Artificial Sequence
  ENSG00000075292_41 (sequence is synthesized)
ggatgaggttatagaagaagtgaatccttctcaggccaagcagaatccactaaagggaaaaaggaaagaaactctcaaaaatgttcctttctctgaacttaacttaaagaagaaaaaggg

SEQ ID NO: 67028 - DNA, 120 bp, Artificial Sequence
  ENSG00000075292_42 (sequence is synthesized)
gaaaacttccactcctcgtggtgttgagggagaactatcttttgtgacattggatgagattggggaagaggaagatgcagctgcacatctagcacaagctctagtcactgtggatgaagt

SEQ ID NO: 67029 - DNA, 120 bp, Artificial Sequence
  ENSG00000075292_43 (sequence is synthesized)
aattgatgaagaagaactaaatatggaagaaatggtaaaaaattcaaattcactttttacattagatgaattaattgaccaagatgattgcatttcccacagtgaacctaaagatgttac

SEQ ID NO: 67030 - DNA, 120 bp, Artificial Sequence
  ENSG00000075292_44 (sequence is synthesized)
tgttctgtcagtggctgaagaacaagatctcctcaaacaggaacgcttggtaactgtggatgaaattggagaagtggaagagctacctttgaatgagtcagcagacataacttttgccac

SEQ ID NO: 67031 - DNA, 120 bp, Artificial Sequence
  ENSG00000075292_45 (sequence is synthesized)
tttaaatactaaaggaaatgaaggagatactgtaagggattccattggcttcatttcttctcaggtgcccgaagacccttctactttagttactgtagatgaaatacaagatgacagcag

SEQ ID NO: 67032 - DNA, 120 bp, Artificial Sequence
  ENSG00000075292_46 (sequence is synthesized)
tgatttgcatttagtgactttggatgaagtaactgaagaggatgaagactctctggcggattttaacaaccttaaagaagagcttaattttgttactgttgatgaagttggagaggagga

SEQ ID NO: 67033 - DNA, 120 bp, Artificial Sequence
  ENSG00000075292_47 (sequence is synthesized)
agatggagataatgatttaaaagttgagttagcacaaagcaaaaatgaccatcccacagataaaaaagggaatagaaagaagagagctgtggacacaaaaaagacaaaacttgaatcctt

SEQ ID NO: 67034 - DNA, 120 bp, Artificial Sequence
  ENSG00000075292_48 (sequence is synthesized)
gtcccaagtgggtccagtaaatgagaatgttatggaagaagatctaaaaaccatgattgaaagacacttaacagctaaaactccaaccaagagagttagaattgggaaaactctgccatc

SEQ ID NO: 67035 - DNA, 120 bp, Artificial Sequence
  ENSG00000075292_49 (sequence is synthesized)
agaaaaagctgttgtgacagaaccagcaaaaggtgaagaggccttccagatgagtgaagttgatgaggaatctggattaaaggattcagaaccagagcgaaaacgcaagaagactgaaga

SEQ ID NO: 67036 - DNA, 120 bp, Artificial Sequence
  ENSG00000075292_50 (sequence is synthesized)
ctcttcttcaggcaaatcagtggcgtctgatgtccctgaggaattagactttcttgtacctaaggctggattcttctgtccaatttgttccctcttctactcaggtgaaaaagcaatgac

SEQ ID NO: 67037 - DNA, 120 bp, Artificial Sequence
  ENSG00000075292_51 (sequence is synthesized)
aaatcactgcaagagtacacgtcataagcaaaatactgagaaattcatggccaagcaaagaaaggaaaaggagcagaatgaggctgaagaaagaagctctaggtgattgggggaaaggaa

SEQ ID NO: 67038 - DNA, 120 bp, Artificial Sequence
  ENSG00000075292_52 (sequence is synthesized)
agaattcactagaaatttgtttagggtccagttgatttgtgtatttttgttatcatttaatttgtaattttcgtttcagaagcaaatattcgtgttgtacaaatttctgattgccctaaa

SEQ ID NO: 67039 - DNA, 120 bp, Artificial Sequence
  ENSG00000075292_53 (sequence is synthesized)
tgtagagagactgatggggaaagtatgatgggtttgatttttatatcaaatcatcaggcatggagaaatatcttttagaagtgttaaaataaatgttcctactgtatatttaaaatacca

SEQ ID NO: 67040 - DNA, 120 bp, Artificial Sequence
  ENSG00000075292_54 (sequence is synthesized)
gcatgcgtgcagctctttggaggcggtagcgttttcggcgtcgagactggaggctgagtgctaaactgtgtggggcgcggatgggatccagctgttagtcggtattacagcgtgaaataa

SEQ ID NO: 67041 - DNA, 120 bp, Artificial Sequence
  ENSG00000075292_55 (sequence is synthesized)
attcccagtatttttcaagattatgtaaaaggagttgtaattactgctcagcacctaggacagcacccagtgcaacacaatgtacatgaactctggcttgaggtttggggcttgtgttct

SEQ ID NO: 67042 - DNA, 120 bp, Artificial Sequence
  ENSG00000075292_56 (sequence is synthesized)
gcattcaggaaagaaaagaagagaaagtttttgggaaatttaaatcttcgtaagcccttactctaaaagtatatgaaatgcagaatggtttcatggctttatttcaaaatgttttacact

SEQ ID NO: 67043 - DNA, 120 bp, Artificial Sequence
  ENSG00000075292_57 (sequence is synthesized)
aaggccgaacagtcccctagccgcactcatgcaaaatacctgtgtctgtgtacttttttcatccgtcgctcagcctgagtctgcaggtcagacttggcaggattttgacttgatatattg

SEQ ID NO: 67044 - DNA, 120 bp, Artificial Sequence
  ENSG00000075292_58 (sequence is synthesized)
tgtgtgtttggaaatggggaataattcctatgcttatgtactgttgatgggaatattaattggttcagcctttctgaaggtcagtctaatgttacttgttaaaatttaaatctgtatgcc

SEQ ID NO: 67045 - DNA, 120 bp, Artificial Sequence
  ENSG00000075292_59 (sequence is synthesized)
ttttgatacatcaagtccatatctaagaatttgcccccatagtaattccatggacatacaaagatgagtatagggctgtttcttgcagggttctttcgaaattattgctaggttgacttt

SEQ ID NO: 67046 - DNA, 120 bp, Artificial Sequence
  ENSG00000075292_60 (sequence is synthesized)
gcatatataagttctcttgccagtaatgataggacttgtattacttcgttaaattctgcctggaacatatataaataaaatttgctgttagctttagacctatattcctaaatccatttg

SEQ ID NO: 67047 - DNA, 120 bp, Artificial Sequence
  ENSG00000075292_61 (sequence is synthesized)
aatggatttacccatttattccttacattaaagaatcttggagaatattgtgcaaagaatggccagatgggattaacaaagggaggttttccctgagaaagaaaaaggtaagaattatcc

SEQ ID NO: 67048 - DNA, 120 bp, Artificial Sequence
  ENSG00000075292_62 (sequence is synthesized)
ggagtcctgcgccttgaggctcaagcggcggcgtgcaaggcgtgtgaggcgcgtagagagccgcgcgcgccgtctgcgatgccccgggacggcgttcctgccgggaataccaccccggcg

SEQ ID NO: 67049 - DNA, 120 bp, Artificial Sequence
  ENSG00000075292_63 (sequence is synthesized)
gcagcccaggctgccgcgcagagcccggattccgcgactgccggggcaccgcaggttttggactcgctgaagcggattggattcagcatcaaaatacatctactcatattgagagctgtc

SEQ ID NO: 67050 - DNA, 120 bp, Artificial Sequence
  ENSG00000075292_64 (sequence is synthesized)
ataaatagagcatagaatggaatatgataaatagtgtgacatagaatggaaggtggggcacagatggcacataggaattctgaacctttcttgtaaacatttttaatcctctatttaaaa

SEQ ID NO: 67051 - DNA, 120 bp, Artificial Sequence
  ENSG00000075292_65 (sequence is synthesized)
gaatacctatcattctcttcagttttgccttggctttacaacattttaaggattgttttctcttgtttcctttaaataaggattaaccttacctttgtagtcatatatctgaaacctgaa

SEQ ID NO: 67052 - DNA, 120 bp, Artificial Sequence
  ENSG00000075292_66 (sequence is synthesized)
gaatatattccaaacttttaaaacaattaaaaacatttttattgtagtaaaatacacaaattttaccgtttgtaagacataaatttaacattttaatcatgtttaagtgtttgttcactg

SEQ ID NO: 67053 - DNA, 120 bp, Artificial Sequence
  ENSG00000075292_67 (sequence is synthesized)
actgatattcagcaccttcacattgtgcaaccatcaccaccatccatttgtgaacttttgtctcctcaaactgaagttttctatccttttgacaataactcgccattaattcagccctta

SEQ ID NO: 67054 - DNA, 120 bp, Artificial Sequence
  ENSG00000075292_68 (sequence is synthesized)
tcaaccattatttctgtttttataaatttagttacctcatgtatgtggaattatatttgcttttttgtgactggctcatgtcacttagtataatgtctctaaggttcatccatgttgcag

SEQ ID NO: 67055 - DNA, 120 bp, Artificial Sequence
  ENSG00000075292_69 (sequence is synthesized)
catgtgtcagatttttcttcatttttaaagctgagtaataattctgttttacgcatgtaacacatttttatatccactcatccattgatggacagttgggttgcttctccctttgtctgt

SEQ ID NO: 67056 - DNA, 120 bp, Artificial Sequence
  ENSG00000075292_70 (sequence is synthesized)
tgtgaataatgcttctgtgaacatgggtgtacaaatacatgtttaagtatcggctttcattccttttaggtgtatactaaaaagtggaattgttggattatgtggttattctaattccaa

SEQ ID NO: 67057 - DNA, 120 bp, Artificial Sequence
  ENSG00000075292_71 (sequence is synthesized)
tagtcaaactgtttctgtgtttagagatgatttttataatttgtgttgcaatcagtgttccaattttcatagtttataaagcagtataaatttgtctaaatgagaataaagaaattttca

SEQ ID NO: 67058 - DNA, 120 bp, Artificial Sequence
  ENSG00000075292_72 (sequence is synthesized)
acaatgtaacatatatgcatttttgaatacttactgttgacatgtaggtatctacatttttgtgtatagtgactctttgtatgtaacatgattgtctccagaatgcagctactttgaatc

SEQ ID NO: 67059 - DNA, 120 bp, Artificial Sequence
  ENSG00000075292_73 (sequence is synthesized)
cattttggcttcctctgggtagaaagaagtttgttttattcttctttttgtttcagttacatttattataaactgtttttgtgttaagaaataagatttcacaggttcttggcctacaca

SEQ ID NO: 67060 - DNA, 120 bp, Artificial Sequence
  ENSG00000075292_74 (sequence is synthesized)
gtagtacatgtaggaaagctatggatagtccacctttgaaagcattaaattcaaactcaatctattttctccttctattccattgtatgctgatatcagaggtgcaaattgagcatgacc

SEQ ID NO: 67061 - DNA, 120 bp, Artificial Sequence
  ENSG00000075292_75 (sequence is synthesized)
atgcgtgcagctctttggaggcggtagcgttttcggcgtcgagactggaggctgagtgctaaactgtgtggggcgcggatgggatccagctgttagtcggtgttttgaaatttgtgatgg

SEQ ID NO: 67062 - DNA, 120 bp, Artificial Sequence
  ENSG00000075292_76 (sequence is synthesized)
atgcgtgcagctctttggaggcggtagcgttttcggcgtcgagactggaggctgagtgctaaactgtgtggggcgcggatgggatccagctgttagtcgggtaggcatagtgttttgaaa

SEQ ID NO: 67063 - DNA, 120 bp, Artificial Sequence
  ENSG00000075292_77 (sequence is synthesized)
tgctttatactaaatttcttttgttcaaaatatttttcctacgtagaacaaagaggtgaagaaaaagactttagagtcaaagaaagtatctgcatctaccttaaaaagagatgcagatgc

SEQ ID NO: 67064 - DNA, 120 bp, Artificial Sequence
  ENSG00000075292_78 (sequence is synthesized)
aacataagaaagccaaaactggacaagccaaggcatctgtagccaaagtaaacaaatctacagggaaatcagcaagttctgtaaaatctgtggtaacggtagctgttaaaggtaataaag

SEQ ID NO: 67065 - DNA, 120 bp, Artificial Sequence
  ENSG00000075292_79 (sequence is synthesized)
gcgcatgcgtgcagctctttggaggcggtagcgttttcggcgtcgagactggaggctgagtgctaaactgtgtggggcgcggatgggatccagctgttagtcgggattggattcagcatc

SEQ ID NO: 67066 - DNA, 120 bp, Artificial Sequence
  ENSG00000075292_80 (sequence is synthesized)
tcattttacttaataatggccctaaagtgcaagtatggtgatgctggcaatttggatatgccaaagagaaggggaaaaatgtttcctttaagtgaaaagttgaaagttctggacttaata

SEQ ID NO: 67067 - DNA, 120 bp, Artificial Sequence
  ENSG00000075292_81 (sequence is synthesized)
aggagagaaaaaaattgtatgctgaagtcgctaagatctacagtacagtaagatattttgacagaccgtattcacgtaagttttattacactatattcttacaacttatttttttaattt

SEQ ID NO: 67068 - DNA, 120 bp, Artificial Sequence
  ENSG00000075292_82 (sequence is synthesized)
aaaatatggaatgcctaacgaatatgcgtgtcatccttgcgcaggggccatgctaattaccgtatcattccaattttagtatatgtgctgctgaagggagcgtttttctattttattatt

SEQ ID NO: 67069 - DNA, 120 bp, Artificial Sequence
  ENSG00000075292_83 (sequence is synthesized)
gttgatcttttactatgtctaatttataaattaaactttcatgtatatacaggaaaaaaaacatagtatatatagggttcagcacgagcacggtttcaaggcatccaccaggggtcttgg

SEQ ID NO: 67070 - DNA, 120 bp, Artificial Sequence
  ENSG00000075292_84 (sequence is synthesized)
gctgtagttaatgataagaaaatgcagatgagttgtgaaagatgagatgtaaaattaggctgtgtaatcacaaattgaaaaaaatgtctttataaataggaaaaggtaataatcatgtgt

SEQ ID NO: 67071 - DNA, 120 bp, Artificial Sequence
  ENSG00000075292_85 (sequence is synthesized)
gtatcttgtcagtttagtagaaacttagatgatgatgctatgaagacactattgtgctttaatgaaggagacccaaattacattctttaattggcccctgtattaagcaggcggttaata

SEQ ID NO: 67072 - DNA, 120 bp, Artificial Sequence
  ENSG00000075292_86 (sequence is synthesized)
cttttttagtcagctgatctctcttagaagtcttttaaaataattcctcaaggaagatgttgatatttcacatttattgtttagggaaaagatagaatttccaggcttctaaagttaata

SEQ ID NO: 67073 - DNA, 120 bp, Artificial Sequence
  ENSG00000075292_87 (sequence is synthesized)
aagtttcttatttatatcattattaaggaaacttattttttcattaatataagttattgtgtgtgacctaatttggaggtctttaattagaaaaaaattctagaacctgatagtaatgta

SEQ ID NO: 67074 - DNA, 120 bp, Artificial Sequence
  ENSG00000075292_88 (sequence is synthesized)
gacactgaaaactagctgctttgatacatttttaaggtttttttttttgagcttaaatttttactaaaaacattgcttttatagttaaatatttcaaatccagtggaatagcctctaata

SEQ ID NO: 67075 - DNA, 120 bp, Artificial Sequence
  ENSG00000075292_89 (sequence is synthesized)
ctaagaagaaaagtagaaaatcagtggaatagagcaggggtgggaaaagtcaactatagttattagatgtgggtaacattttgatctttgtaatgtagagagaatggattattgatatta

SEQ ID NO: 67076 - DNA, 120 bp, Artificial Sequence
  ENSG00000075292_90 (sequence is synthesized)
gaatgtgacagattagaggaaatgatcctcgaaaggttttctgaccatgttgcagcatcagatagaaattatttattaactagctattatttgtggaccttgctttgttgatgcttgtca

SEQ ID NO: 67077 - DNA, 120 bp, Artificial Sequence
  ENSG00000075292_91 (sequence is synthesized)
gggagcctacgagggctcgcaggagctgggaggcgcgcatgcgtgcagctctttggaggcggtagcgttttcggcgtcgagactggaggctgagtgctaaactgtgtggggcgcggatgg

SEQ ID NO: 67078 - DNA, 120 bp, Artificial Sequence
  ENSG00000075292_92 (sequence is synthesized)
ggaggcggtagcgttttcggcgtcgagactggaggctgagtgctaaactgtgtggggcgcggatgggatccagctgttagtcgggtaggcataggcgaagtttggggccaggaccagaaa

SEQ ID NO: 67079 - DNA, 120 bp, Artificial Sequence
  ENSG00000075292_93 (sequence is synthesized)
ttgtagtagtttaaaggagtcccgatgaaaaacttgtcaccaggatccagcgatttatgttcaagtactttttccaacgagctctggaattttgcacaaaaaattttctgctttttcccc

SEQ ID NO: 67080 - DNA, 120 bp, Artificial Sequence
  ENSG00000075292_94 (sequence is synthesized)
tcatttgttgtaaaggattattttttcagggatgttgtgcttgctggttcagatttacaattaaaaattgataacctggagaaaaggattgaccaaaaaaaggttatttatttcataaga

SEQ ID NO: 67081 - DNA, 120 bp, Artificial Sequence
  ENSG00000075292_95 (sequence is synthesized)
tcttagaatcaaattatttatctccccaaacgtacatttccccccgctttaggagaatgtttatgccagtttattcctcttaagtcctgttttctccttcagtgtaccttgcctgtaatt

SEQ ID NO: 67082 - DNA, 120 bp, Artificial Sequence
  ENSG00000075292_96 (sequence is synthesized)
tctagtccttattccttttccttgaacagcaacatttgccagagtagattctgcagatcactagtctcatatgacactccattattaaagtaagaaactgcatgttttgatgccctcttg

SEQ ID NO: 67083 - DNA, 120 bp, Artificial Sequence
  ENSG00000075292_97 (sequence is synthesized)
acgacggaacccccgaaaatgaaggcgaagagactgtgcagtcagccctctttggattccagtacgatgcatcagaccataccatggcgtggctaggacccaacacagtaccagaagtga

SEQ ID NO: 67084 - DNA, 120 bp, Artificial Sequence
  ENSG00000075292_98 (sequence is synthesized)
aggaaatgatcctgcaggacccgcagctccagacaacacagcttcctcagacgacacaagccccggacattacctgggggatgctgaagaagacaacttacaaggctgagcaaatcctgc

SEQ ID NO: 67085 - DNA, 120 bp, Artificial Sequence
  ENSG00000075292_99 (sequence is synthesized)
tccagacacagaaaccattcactccagataatttgttccttgctctgctctctggtgatgcaaagccggaatacgagcagtaatcgctacgcctgacaaacctgctgctgtgcacatctg

SEQ ID NO: 67086 - DNA, 120 bp, Artificial Sequence
  ENSG00000075292_100 (sequence is synthesized)
tactcttcaatcaacaaaacctgatgcaaaaaacaaaagggggagatgtaggagatcagtcagggtggtgggaaaagttataaggagagacgcaaaccttcttggaagtccaggaggttt

SEQ ID NO: 67087 - DNA, 120 bp, Artificial Sequence
  ENSG00000075292_101 (sequence is synthesized)
tgcaaagcttcgggagagaataaaggctgaaggcagctaaattctcttaccctgacgctaagggcaagaagtaggtaacaaaggagtgtaaaggaatttatctagacgagttttatttac

SEQ ID NO: 67088 - DNA, 120 bp, Artificial Sequence
  ENSG00000075292_102 (sequence is synthesized)
ttttgcagacctttgatcatcctattgcgcgcaggactgctcccaaggcggtgggggtgacaattacctacagattgtgttggctccaggcctttgtcattaaatctgtactgaataaat

SEQ ID NO: 67089 - DNA, 120 bp, Artificial Sequence
  ENSG00000075292_103 (sequence is synthesized)
gcgcgcatgcgtgcagctctttggaggcggtagcgttttcggcgtcgagactggaggctgagtgctaaactgtgtggggcgcggatgggatccagctgttagtcgggtaggcataggatt

SEQ ID NO: 67090 - DNA, 120 bp, Artificial Sequence
  ENSG00000075292_104 (sequence is synthesized)
gggtccagtaaatgagaatgttatggaagaagatctaaaaaccatgattgaaagacacttaacaggactttctttttaaagctaaaactccaaccaagagagttagaattgggaaaactc

SEQ ID NO: 67091 - DNA, 120 bp, Artificial Sequence
  ENSG00000075303_0 (sequence is synthesized)
gtccttctcgcgcctcgctctggccctgcaggttgtgtttccgcctctaccccgcctccattccgttgctctctcagtctcagacccgggctctcggtccgccgcttcaggtcttggcgc

SEQ ID NO: 67092 - DNA, 120 bp, Artificial Sequence
  ENSG00000075303_1 (sequence is synthesized)
agcctcagagagttggcgcggctctgtgttgaccaaacctagtggatgcagttagcgccggagcccggccccgcccgtcaccagggttattcccgccttctaggtttgccaggactgccg

SEQ ID NO: 67093 - DNA, 120 bp, Artificial Sequence
  ENSG00000075303_2 (sequence is synthesized)
gccctgcagctgccttctgccccaggtttttggctactgatgttacaaacaataaaatattggagcatagagttgaagaacagactcaaaccaggtttttatttaattagttaaaaatat

SEQ ID NO: 67094 - DNA, 120 bp, Artificial Sequence
  ENSG00000075303_3 (sequence is synthesized)
ggatcctgagacaaggggacaagagattatcaaagtgacacctcttcaacaaatgcttgcctcatgtactggagctatactgacatcagtaatagtgacacccctggatgttgttaaaat

SEQ ID NO: 67095 - DNA, 120 bp, Artificial Sequence
  ENSG00000075303_4 (sequence is synthesized)
tagactccaagcccaaaacaacccactccccaaaggaaaatgttttgtatatagtaatggactcatggatcatctatgtgtctgtgaagagggaggcaacaaactatggtataagaagcc

SEQ ID NO: 67096 - DNA, 120 bp, Artificial Sequence
  ENSG00000075303_5 (sequence is synthesized)
aggaaatttccagggaacattggatgcattttttaaaatcattcgaaatgagggcattaaatctctatggagtggccttcctcctaccctagtgatggcagttcctgccacagttattta

SEQ ID NO: 67097 - DNA, 120 bp, Artificial Sequence
  ENSG00000075303_6 (sequence is synthesized)
ttttacctgctatgatcaattaagtgctcttctgagatctaagttaggagaaaatgaaacctgcataccaattgttgctggaattgtagccagatttggtgcagtaactgtgataagtcc

SEQ ID NO: 67098 - DNA, 120 bp, Artificial Sequence
  ENSG00000075303_7 (sequence is synthesized)
actagaattgattagaaccaagatgcagtccaagaagttttcttacgtggaactgcatcgatttgtcagcaagaaagtatctgaagatggttggatttccctttggaggggctgggctcc

SEQ ID NO: 67099 - DNA, 120 bp, Artificial Sequence
  ENSG00000075303_8 (sequence is synthesized)
tactgttcttagagatgtacctttctcagcaatgtactggtataactatgaaattttaaagaagtggttatgtgagaaatctggtttatatgagccaacatttatgatcaactttacttc

SEQ ID NO: 67100 - DNA, 120 bp, Artificial Sequence
  ENSG00000075303_9 (sequence is synthesized)
aggggcattgtctggttcttttgctgctgttgcaactttaccatttgatgtagtaaaaacacaaaagcagacacaactttggacatatgaaagtcataaaatttctatgcctttgcatat

SEQ ID NO: 67101 - DNA, 120 bp, Artificial Sequence
  ENSG00000075303_10 (sequence is synthesized)
gtcaacctggattataatgaagaacattgttgctaaaaatggattttccggattattttcaggcctaattcctcgcttaattaaaattgctcctgcttgtgccattatgatcagtacata

SEQ ID NO: 67102 - DNA, 120 bp, Artificial Sequence
  ENSG00000075303_11 (sequence is synthesized)
tgaatttggaaaggcttttttccagaaacaaaatgttcgaaggcagcaatactagtgatgctgtttcaacttgaaacaacaactatagccaaagaagatggagactcttaggcaagaatg

SEQ ID NO: 67103 - DNA, 120 bp, Artificial Sequence
  ENSG00000075303_12 (sequence is synthesized)
taggcaagaatgtttttcaccattattctctcacaatgattttatgtctttctttcctataatttaaataaataatttcagctctacctctaaatcataattttaaaataaattttatct

SEQ ID NO: 67104 - DNA, 120 bp, Artificial Sequence
  ENSG00000075303_13 (sequence is synthesized)
tattgaaaaagatattctagaaatcaccaccattgagcattcttgtaaaaatagattactccttagcatcaaaagcagtctcttgaaagtttaatattatatgtttcagtgtaacataat

SEQ ID NO: 67105 - DNA, 120 bp, Artificial Sequence
  ENSG00000075303_14 (sequence is synthesized)
cttactgggagtgtgttgaatacaccagaactttttgaattgtgtgctgaatgatgtacatagtctagaagaaaaaagcccaagtcttgtgcacatttaaatcgtgtacataagtatttc

SEQ ID NO: 67106 - DNA, 120 bp, Artificial Sequence
  ENSG00000075303_15 (sequence is synthesized)
cgtatttcagtaaagtagataaagcactcgttaaatagcattgtttacatcgaccaaatattgcctgtttcctttaattcaaatgcattaggttcccgcctccctctccttccccgccat

SEQ ID NO: 67107 - DNA, 120 bp, Artificial Sequence
  ENSG00000075303_16 (sequence is synthesized)
cattgtgccatttttgatgactaaatgtctatatttctgccattcctgtaagagagggagttttttactgatagtagcaaatgttcacttcagtcaaacttgggtgttcagtggtaaacc

SEQ ID NO: 67108 - DNA, 120 bp, Artificial Sequence
  ENSG00000075303_17 (sequence is synthesized)
atatagtatttagactggtaaaaatagtttgcacacaggaatagcctctgatttttagctctcttgtaatccaagtatcattgttcatggaattctctaggtcatttttattgtgttgtt

SEQ ID NO: 67109 - DNA, 120 bp, Artificial Sequence
  ENSG00000075303_18 (sequence is synthesized)
ctaacaagacagattattgctacaacaatagttacaagatatttctaaaatatcctttgatttttactctaagtatggtagagtaagaggctaaacaagaagctgtttccttgaagacat

SEQ ID NO: 67110 - DNA, 120 bp, Artificial Sequence
  ENSG00000075303_19 (sequence is synthesized)
tgctttcagtcaccatacatgtctaaataatttagcttatcattcattctatgtaggaatgagataagaaaggatatgatggcaggaaaagaaatgctattcattttttatactttagtt

SEQ ID NO: 67111 - DNA, 120 bp, Artificial Sequence
  ENSG00000075303_20 (sequence is synthesized)
tttcttaggatctatatcctatatatatatattttttaaagcactaatttattgcagtctttattttagaaaaatgtgaagcatttttttctcccctaaaatgaatatatttagatgaca

SEQ ID NO: 67112 - DNA, 120 bp, Artificial Sequence
  ENSG00000075303_21 (sequence is synthesized)
gacaagtctttagtgctggtagaggaactaattgattttgtactatagtaggaaagtgtttatatgtttcaccagaaataaaatatgtagggtttgtatgtaatcttctgtgtttatcct

SEQ ID NO: 67113 - DNA, 120 bp, Artificial Sequence
  ENSG00000075303_22 (sequence is synthesized)
atgttgatttaccttaaatttgcaacatacatatccacataaatattcatgactttcttatatttcattaaaatgttttatggcttcttaaaatcatcactgtgcttctaaatattttta

SEQ ID NO: 67114 - DNA, 120 bp, Artificial Sequence
  ENSG00000075303_23 (sequence is synthesized)
cgtaaaatcattgtataatgctatactgtgatatacatgaaagtttatcttgaacagtgctctttaacaatattaaatttaaatttatcttggttttgctatgcttatgggtaattcata

SEQ ID NO: 67115 - DNA, 120 bp, Artificial Sequence
  ENSG00000075303_24 (sequence is synthesized)
gaaaacagaaaaaatactgttcccaaaaggcagttatatatttcagtttaatatcacctataagtatgagaaaggtttccatgtctcctacccctcactgcacttaggaaaattcttatt

SEQ ID NO: 67116 - DNA, 120 bp, Artificial Sequence
  ENSG00000075303_25 (sequence is synthesized)
tatgaataaagtaagataagtaaatctaattgcctagtcgtttttttaacacatatacatgcaatgtatctggatgaatagaaggctgaattgaagctttctttatatttaagaggtaaa

SEQ ID NO: 67117 - DNA, 120 bp, Artificial Sequence
  ENSG00000075303_26 (sequence is synthesized)
atactaacaaccaaaaagtgttcagaattttgctataataataatttgtattaaaatagtacctagaaaaattcagtctatggaataggtaaaattttaaaattttaatttgctctcaga

SEQ ID NO: 67118 - DNA, 120 bp, Artificial Sequence
  ENSG00000075303_27 (sequence is synthesized)
ttaaaattttaatttgctctcagagttctgtctgataaaataattgaactataattggcatgatgaatattcccaggttttacttcagtatataaatttaactctcagccacatgggctt

SEQ ID NO: 67119 - DNA, 120 bp, Artificial Sequence
  ENSG00000075303_28 (sequence is synthesized)
tccagacttttcaatacatatgatgttgcaggaattgcaatatttgcaaacatgtgccacaacagtgttcttggtgatgtttctaaaacagtttttattctattaatgttaaattttcta

SEQ ID NO: 67120 - DNA, 120 bp, Artificial Sequence
  ENSG00000075303_29 (sequence is synthesized)
acataaacatttaattgattaatgtaaaattttaggaaggaacatctttaattttcaatatgagatggttgcaacctttaaagtagtacatatttgattttttttaaaaggcaatatttt

SEQ ID NO: 67121 - DNA, 120 bp, Artificial Sequence
  ENSG00000075303_30 (sequence is synthesized)
tttttctaggaaaactattcattatggttatttaactgcatatgttttttaaatttttccctcttggaacaacatgtactggggcctatcaaagggtggagggtgggaggagggagagga

SEQ ID NO: 67122 - DNA, 120 bp, Artificial Sequence
  ENSG00000075303_31 (sequence is synthesized)
atacctgggtgatgaaataatctgtataataaatccccatgacacaaaagtttacctgtgtaacaaacctgcatatgtacccctaaacttaaattcttccctctttttgtcttgggcaca

SEQ ID NO: 67123 - DNA, 120 bp, Artificial Sequence
  ENSG00000075303_32 (sequence is synthesized)
ttaaattcttccctctttttgtcttgggcacaagtttttgggatatggaaaagtttattgtatcccttttgaattttcttctaagatgaactttttaaataaaagatattactgctttta

SEQ ID NO: 67124 - DNA, 120 bp, Artificial Sequence
  ENSG00000075303_33 (sequence is synthesized)
cattatgaaaaatttttaagacctagaaaaagtttaaaaaataactaccatcaagtttaagaaacaagcattatcaagtcaggagaaaccttcagtacattcctccttaattgcatccag

SEQ ID NO: 67125 - DNA, 120 bp, Artificial Sequence
  ENSG00000075303_34 (sequence is synthesized)
tcctatacatctttaaacatacagcctttttctgtttattatttttaatgaatctaactattaaaaataaaacttaaagtagctttttaggtaaacaaacctcttcttatggtaaagaaa

SEQ ID NO: 67126 - DNA, 120 bp, Artificial Sequence
  ENSG00000075303_35 (sequence is synthesized)
ttttttattctattttaaaagcgtttgctggaaatttttaaatgctcactagatacttgagaatttctgctttgacatatgtgttgtatcttcttgtgatgtaaaggaataatagaacac

SEQ ID NO: 67127 - DNA, 120 bp, Artificial Sequence
  ENSG00000075303_36 (sequence is synthesized)
aaaggagcgtgagaaattgtgaatgctggtagtggagtcagagaggcttggttggaattgtggctctgcaactagtagctgtgtgacctcaggaaagtaagggaatttttctgaggcttt

SEQ ID NO: 67128 - DNA, 120 bp, Artificial Sequence
  ENSG00000075303_37 (sequence is synthesized)
ttctgaggctttttacttttgagtatagtgagaaatacatatctatttgctttaatgaaaacttaaaaatatatatattatttcattttaaagttcggttattgttttcattatccttaa

SEQ ID NO: 67129 - DNA, 120 bp, Artificial Sequence
  ENSG00000075303_38 (sequence is synthesized)
aaattaacaggttgattgaaattaatcaattttactttctgatagtttgctgctgttgcaactttaccatttgatgtagtaaaaacacaaaagcagacacaactttggacatatgaaagt

SEQ ID NO: 67130 - DNA, 120 bp, Artificial Sequence
  ENSG00000075303_39 (sequence is synthesized)
cataaaagcctaattcctcgcttaattaaaattgctcctgcttgtgccattatgatcagtacatatgaatttggaaaggcttttttccagaaacaaaatgttcgaaggcagcaatactag

SEQ ID NO: 67131 - DNA, 120 bp, Artificial Sequence
  ENSG00000075303_40 (sequence is synthesized)
gcaatgtactggtataactatgaaattttaaagaagtggttatgtgagaaatctggtttatatgagccaacatttatgatcaactttacttcaggggcattgtctggttctgaataatag

SEQ ID NO: 67132 - DNA, 120 bp, Artificial Sequence
  ENSG00000075303_41 (sequence is synthesized)
aacacaaaggagcgtgagaaattgtgaatgctggtagtggagtcagagaggcttggttggaattgtggctctgcaactagtagctgtgtgacctcaggaaatttgctgctgttgcaactt

SEQ ID NO: 67133 - DNA, 120 bp, Artificial Sequence
  ENSG00000075336_0 (sequence is synthesized)
aggtgactttgcgaaggcatggcggggacactgtgaatgtcagcccagaaggtgatcagagcctgttaattaaaatggaaagaagacagaagggaaggtagacatcaggttctccctgga

SEQ ID NO: 67134 - DNA, 120 bp, Artificial Sequence
  ENSG00000075336_1 (sequence is synthesized)
gacttttcgttttcatttacgctgcggaaactgacgtttttgcctaacaccccatgtaatgtaaacgtataggcttgagtacgtgtccggccgcatgtgtagtgaaccctaaagctttcc

SEQ ID NO: 67135 - DNA, 120 bp, Artificial Sequence
  ENSG00000075336_2 (sequence is synthesized)
taattgtagttagcatcgtccctaagcggaacgattttccgtgaacatgatttgtacttttctacgagccgtacagtatacggagaagctgcacaggtcctcggcaaagcgattgctttt

SEQ ID NO: 67136 - DNA, 120 bp, Artificial Sequence
  ENSG00000075336_3 (sequence is synthesized)
gccatacatcgtgcttaacaaagcgtgcttgaagactgagcccagtttgagatgtgggcttcaatatcaaaagaaaacgctgcgacctagatgtattcttggagtcacccagaaaaccat

SEQ ID NO: 67137 - DNA, 120 bp, Artificial Sequence
  ENSG00000075336_4 (sequence is synthesized)
ctggacgcagggaccgagcccccgaaaagcaaaggaggatggcagcaaacaagtgtctgtgcacaggagtcagagagggggaaccgccgtcccaacatcacaaaaagtgaaagaagccgg

SEQ ID NO: 67138 - DNA, 120 bp, Artificial Sequence
  ENSG00000075336_5 (sequence is synthesized)
aagagattttacctatttaatagtggtgctttttggaatcagcattacaggtggcttgttttacacgattttcaaagaacttttttcttcatccagtcctagcaagatatatgggagagc

SEQ ID NO: 67139 - DNA, 120 bp, Artificial Sequence
  ENSG00000075336_6 (sequence is synthesized)
cttagaaaaatgcagatcacatcctgaggtgatcggtgtctttggtgagtctgttaaaggctatggggaggtgacaaggcggggtcgccggcagcatgtcaggttcactgaatatgtaaa

SEQ ID NO: 67140 - DNA, 120 bp, Artificial Sequence
  ENSG00000075336_7 (sequence is synthesized)
agatgggctgaaacacacgtgtgtgaaattctacattgagggctctgagccagggaagcaaggaacggtgtatgcgcaagtgaaagagaacccaggaagtggtgaatatgattttcgata

SEQ ID NO: 67141 - DNA, 120 bp, Artificial Sequence
  ENSG00000075336_8 (sequence is synthesized)
tatatttgtagaaattgaatcttatcctagaagaactattatcattgaagataatcgatcccaagatgattaaaatagggtttctgatggatgttgaatggcgtggactcgctactccgt

SEQ ID NO: 67142 - DNA, 120 bp, Artificial Sequence
  ENSG00000075336_9 (sequence is synthesized)
tcttcacagctgccttccagaatgtgttcaaaagaaagacaagaaggagtgtatggcttataaagtgaatctaatacagtatttgttgcatttaaacaaactagacattttcttacggaa

SEQ ID NO: 67143 - DNA, 120 bp, Artificial Sequence
  ENSG00000075336_10 (sequence is synthesized)
aaattatgaaatacagcatattttatgttctcccattgactcaatcatgacaatatttctgctttaacaccatctttcatgattagaaatgtttgttattggaaatgttacaccatgtaa

SEQ ID NO: 67144 - DNA, 120 bp, Artificial Sequence
  ENSG00000075336_11 (sequence is synthesized)
ataaaggaaatagattttagtattgtattcattttatattatagaactgcataatgtctgcagaataaaattaaaactaacaaatatgtcattagcagctgccctccgcatactttggaa

SEQ ID NO: 67145 - DNA, 120 bp, Artificial Sequence
  ENSG00000075336_12 (sequence is synthesized)
taggaatctgtctcatatttcgcgcttcatgaattaagggcctagtacatagcgggaaaagtacacactcccaagttgggtagacctgggcacccaccccaccttttctagcaggtgcgt

SEQ ID NO: 67146 - DNA, 120 bp, Artificial Sequence
  ENSG00000075336_13 (sequence is synthesized)
ggtcaagtgtccctgttgtgtgggttgttaggatggcagtgtgatgagaggtacaagcctggaccatagaaggcagccatgaagtgccctcatcccctttagaacttacttgcactgata

SEQ ID NO: 67147 - DNA, 120 bp, Artificial Sequence
  ENSG00000075336_14 (sequence is synthesized)
cttctgactgccaaaagaacatgggagtgaatgagagacattcaaatacgtgtgtgaggccccttaaagaaaaaaaaaaaaaaaaaggaaattctattttatttgaaatatttgctgggg

SEQ ID NO: 67148 - DNA, 120 bp, Artificial Sequence
  ENSG00000075336_15 (sequence is synthesized)
atttggaaaaaagtgaccttcacttacaagatcctgattccatatctatgtaagtgctatgtgcattgggaggggtctagaaccatgtttatctgcggtggcttcagtgtgaggtatccc

SEQ ID NO: 67149 - DNA, 120 bp, Artificial Sequence
  ENSG00000075336_16 (sequence is synthesized)
ctctgatgtgtttgttccttctccccgagaactgtctgtagaggaatttctgatgtgttcttgaaattttgggatattcaggatagagagacctccaggcaatctatctcccctttttac

SEQ ID NO: 67150 - DNA, 120 bp, Artificial Sequence
  ENSG00000075336_17 (sequence is synthesized)
tttatctccctgcttaatttagttagtttcttggtttgactgcttgttttagatgtttttaattataaaaatttccaacatttaaggagtatagaaaatataacagacactcgtctccct

SEQ ID NO: 67151 - DNA, 120 bp, Artificial Sequence
  ENSG00000075336_18 (sequence is synthesized)
gacgtaacacactttgactgaatgaggccttaacttaggctttctctcctaatcgttttttcctttgctatagaatgttcagtttcaggattcactgaaatgtcaacatttaacaggctg

SEQ ID NO: 67152 - DNA, 120 bp, Artificial Sequence
  ENSG00000075336_19 (sequence is synthesized)
agaagttccacttgctatcctaaactcaaaaaagcagccctgctcttcaaacaacctgctcaaactgtagcttgctgaagaagcccggcatctgagctcaggtggggatttagccaccct

SEQ ID NO: 67153 - DNA, 120 bp, Artificial Sequence
  ENSG00000075336_20 (sequence is synthesized)
ccatggccctgtcatttgacttaagactgtttgctttttctgtattcatttttatgcacctgccattttacaatatgctcatgcccctttaagatctgagcttttggccaggcgaggtgg

SEQ ID NO: 67154 - DNA, 63 bp, Artificial Sequence
  ENSG00000075336_21 (sequence is synthesized)
gtcactaaaaattcaaaaaaaaaaaaattaaccaggcacgttgacacactcctgtaatctcat

SEQ ID NO: 67155 - DNA, 120 bp, Artificial Sequence
  ENSG00000075336_22 (sequence is synthesized)
aacatggtgaaaccctatctactaaaaattcaaaaaaaaaaaaattaaccaggcacgttgacacactcctgtaatctcatctactcaggagacaggagaagcgcttgaacccaggaggca

SEQ ID NO: 67156 - DNA, 120 bp, Artificial Sequence
  ENSG00000075336_23 (sequence is synthesized)
atgagtgacggagtgtgacttcgtctcaaaaaaaaaaaacaaaaaacagatctgagcttttataattagaaataaaactaaattactttttcaaaaggaaaaactctgtaccaataagag

SEQ ID NO: 67157 - DNA, 120 bp, Artificial Sequence
  ENSG00000075336_24 (sequence is synthesized)
attcttctgtatagccacaggaaaatgtgatgtgtaactctctagatctctgttttcattccctctgatgtaccctactaaatgttaaaatttctgtgttttaagaccctctttaatcca

SEQ ID NO: 67158 - DNA, 120 bp, Artificial Sequence
  ENSG00000075336_25 (sequence is synthesized)
tgcctgctcccagccggcacccgtaacccattggtgttttctcttcacagtgaaagaagccggaagagattttacctatttaatagtggtgctttttggaatcagcattacaggttgcaa

SEQ ID NO: 67159 - DNA, 120 bp, Artificial Sequence
  ENSG00000075336_26 (sequence is synthesized)
aaaacagcaagtataagcccttgaatattttttaaactggactttttatgttgcccttgcttcgcttcatctttgttttctgtgatttcaggtggcttgttttacacgattttcaaagaa

SEQ ID NO: 67160 - DNA, 120 bp, Artificial Sequence
  ENSG00000075336_27 (sequence is synthesized)
cttagaaaaatgcagatcacatcctgagggctgttcttcacacagaccaaggagtaatgtcatagctcgcatttgcagcccctgaagaggagaaagatttcaatccacagcgtgctcagt

SEQ ID NO: 67161 - DNA, 120 bp, Artificial Sequence
  ENSG00000075336_28 (sequence is synthesized)
atagagcccggtgctgatcttccctggggccccggctctgaatgttctaccagttttctaatcatgtcagggtggaaacctcagaagctaacgatctctggcatctttccttttaaatcc

SEQ ID NO: 67162 - DNA, 120 bp, Artificial Sequence
  ENSG00000075336_29 (sequence is synthesized)
actgatttctcttcattgagctctggacagccagtggtaaccatggagaaaggcagggaggataaagtatctcagaggtgaaaaccaggaaataaggaaggttcgttcccataatagtta

SEQ ID NO: 67163 - DNA, 120 bp, Artificial Sequence
  ENSG00000075336_30 (sequence is synthesized)
ctgggaatccaaattttatctgacaagaaacattctttacagactccggaaatacctgtgggtggtaacctcattaaatgttaggacgcatctctggaaagagatgaagagttgctgttt

SEQ ID NO: 67164 - DNA, 120 bp, Artificial Sequence
  ENSG00000075336_31 (sequence is synthesized)
cgcaaactcagcctttcgtagatttttcagcattttgaacaaaaaactccacaagaatatacaaaagtgggatattattgaagtcgtaacttcatttgctgcctgaaaaaactctacaaa

SEQ ID NO: 67165 - DNA, 120 bp, Artificial Sequence
  ENSG00000075336_32 (sequence is synthesized)
taataattaaactttaacaattttgtcaacattttttaaggggtacccttctctttgctgggtactgtgtctgcttgaaaaacaaaatcttgatggatgttgatatttatatgtttaata

SEQ ID NO: 67166 - DNA, 120 bp, Artificial Sequence
  ENSG00000075336_33 (sequence is synthesized)
gattaaagtaaattgttctatttgtttgtgctatacaattctgcaatatcatcttacatattacttctttttatcctggaaaatgtgatactgaagatactccacaaacagacaaaataa

SEQ ID NO: 67167 - DNA, 120 bp, Artificial Sequence
  ENSG00000075336_34 (sequence is synthesized)
gataaatttcgtagagttgagggtcaaacttttttagtttaatatcaaatttatattttttagagggttccacagtatttgcattttgaattcaataaaaactacatttctacttcatgt

SEQ ID NO: 67168 - DNA, 120 bp, Artificial Sequence
  ENSG00000075336_35 (sequence is synthesized)
ggattttctcattagaaatagtagattcacacctgtagctctgatttattttaaatgtcattatctgttttctttttcctcactgtgtttggtaactttaaaaattttttgatctcatag

SEQ ID NO: 67169 - DNA, 120 bp, Artificial Sequence
  ENSG00000075336_36 (sequence is synthesized)
ttttagtattagatgctattaattaattacatttcattaaaaatgttcatacattttatcttcaaaccataaggggttagtagagaaacatctgaactctgtgttgttatgtttgttttc

SEQ ID NO: 67170 - DNA, 120 bp, Artificial Sequence
  ENSG00000075336_37 (sequence is synthesized)
tgtaagaggagcaggaactgcgtcatgtcaacctacattgctttgaaactacaagtcacaccataaagctacctattttaatctttgtgcatgaaatatttgtttaaattatttatggga

SEQ ID NO: 67171 - DNA, 120 bp, Artificial Sequence
  ENSG00000075336_38 (sequence is synthesized)
ttgtgcatgaaatatttgtttaaattatttatgggatgatttttgtataataacccttttttcagttttcttattggagtggtcatttttttatttgtttgtttgtttgtttgttttgag

SEQ ID NO: 67172 - DNA, 71 bp, Artificial Sequence
  ENSG00000075336_39 (sequence is synthesized)
cgcatcaccatgcccagctgatttttatattttttagtagagacggggtttcacctagttggccaggctag

SEQ ID NO: 67173 - DNA, 77 bp, Artificial Sequence
  ENSG00000075336_40 (sequence is synthesized)
gattgctgggattataggcgtgagccaggagtggtcatttttgaaaaggtcctaagcttactgatttttttttccta

SEQ ID NO: 67174 - DNA, 120 bp, Artificial Sequence
  ENSG00000075336_41 (sequence is synthesized)
tttttgaaaaggtcctaagcttactgatttttttttcctaaaatcatctggtttgttaaaaattatttctttagaagcttaaaaaaataacacaaaataaagcactgtccttgttctgca

SEQ ID NO: 67175 - DNA, 120 bp, Artificial Sequence
  ENSG00000075340_0 (sequence is synthesized)
ctcatttcctcccagcctcgtgcgggaaatggctttaattctgacggcagggctgtgagggactagcgggaacccgagccttttgtcaaggaactgcggcgtcggtggccagtcatcccc

SEQ ID NO: 67176 - DNA, 120 bp, Artificial Sequence
  ENSG00000075340_1 (sequence is synthesized)
gccgccgcggagccgctgcactgctgggggatctcccagcagctctgacgagcgcgggctgcagcatgggcagaaaacgctgccctgcagattagctgggtggattttttaagcgcaccc

SEQ ID NO: 67177 - DNA, 120 bp, Artificial Sequence
  ENSG00000075340_2 (sequence is synthesized)
caccccccaaacccataaaataacaaaaccaacccgcagtggccgaccggagatagctaagatgccgcgcaggagtttccacctggatgtttgaggttgtgtagatgtggccggcaccct

SEQ ID NO: 67178 - DNA, 120 bp, Artificial Sequence
  ENSG00000075340_3 (sequence is synthesized)
tgagagtggagctagggggtgcagactgagcagtgaacagaaggagccttggacagggctgggccagcctcccgagttccaggagcgaattgcaaacccaccgggaaaatgagcgaagag

SEQ ID NO: 67179 - DNA, 120 bp, Artificial Sequence
  ENSG00000075340_4 (sequence is synthesized)
acggtccccgaggctgcctcgccgccgcccccgcaggggcagccttactttgaccgcttctcagaggacgaccccgagtacatgcgccttcgcaaccgggcggcggacctgcggcaggac

SEQ ID NO: 67180 - DNA, 120 bp, Artificial Sequence
  ENSG00000075340_5 (sequence is synthesized)
ttcaacctgatggagcagaagaagcgcgtcaccatgatcctgcagagtccctctttcagggaggagctggaaggcctcatccaggagcagatgaagaaggggaacaactcctccaacatc

SEQ ID NO: 67181 - DNA, 120 bp, Artificial Sequence
  ENSG00000075340_6 (sequence is synthesized)
tgggccctgcgacagatcgcggacttcatggccagcacctcccacgcagtcttcccgacatcttccatgaatgtctccatgatgacgcctatcaatgacctccacacagctgactccctg

SEQ ID NO: 67182 - DNA, 120 bp, Artificial Sequence
  ENSG00000075340_7 (sequence is synthesized)
aacctggccaaaggggagcggctcatgcggtgcaagatcagcagtgtctaccgactcctggacctctatggctgggcccagctgagtgacacctatgtcacgttgagagtcagcaaggag

SEQ ID NO: 67183 - DNA, 120 bp, Artificial Sequence
  ENSG00000075340_8 (sequence is synthesized)
caggaccacttcctgatcagccctaagggagtttcttgcagtgaagtcacagcgtccagcctgatcaaggtgaacattctgggagaggtggtggagaagggcagcagctgcttcccagtg

SEQ ID NO: 67184 - DNA, 120 bp, Artificial Sequence
  ENSG00000075340_9 (sequence is synthesized)
gacaccacaggcttctgtctgcactcggccatctatgcagcgaggcccgacgtgcgctgcatcatccacctgcacacaccggccacagcagcggtgtcggccatgaagtggggcctcctg

SEQ ID NO: 67185 - DNA, 120 bp, Artificial Sequence
  ENSG00000075340_10 (sequence is synthesized)
cctgtctcccacaatgccctgctggtgggggacatggcctattatgacttcaatggggaaatggagcaggaagccgatcggatcaacctgcagaagtgccttggacccacctgcaagatc

SEQ ID NO: 67186 - DNA, 120 bp, Artificial Sequence
  ENSG00000075340_11 (sequence is synthesized)
ctggtgctaagaaaccatggagtggttgctctgggtgacacggtagaggaggcattttacaagatcttccacctgcaggctgcatgtgagatacaggtgtcggctctgtccagtgccggg

SEQ ID NO: 67187 - DNA, 120 bp, Artificial Sequence
  ENSG00000075340_12 (sequence is synthesized)
ggagtggagaacctcatcctcctggagcaggagaagcaccggccccatgaggtgggctccgtgcagtgggccgggagcacctttgggcctatgcagaagagtcggctgggggagcatgag

SEQ ID NO: 67188 - DNA, 120 bp, Artificial Sequence
  ENSG00000075340_13 (sequence is synthesized)
tttgaggccctcatgaggatgctggacaacctgggctacagaacaggttacacgtatcgccacccctttgttcaagagaaaaccaaacacaaaagtgaggtggagattccagccacggtc

SEQ ID NO: 67189 - DNA, 120 bp, Artificial Sequence
  ENSG00000075340_14 (sequence is synthesized)
acagccttcgtgtttgaggaggacggtgccccggtgcccgccctgcgacagcatgcccagaagcagcagaaggagaagacccgctggctcaatacgcccaacacctacctgcgggtcaat

SEQ ID NO: 67190 - DNA, 120 bp, Artificial Sequence
  ENSG00000075340_15 (sequence is synthesized)
gtggccgatgaggtccagaggagcatgggcagcccccgacccaagaccacgtggatgaaggctgacgaggtggagaaatccagcagtggcatgccgattcgcatcgaaaacccaaaccaa

SEQ ID NO: 67191 - DNA, 120 bp, Artificial Sequence
  ENSG00000075340_16 (sequence is synthesized)
tttgtgcctctctatactgacccccaggaagtactggagatgaggaacaagattcgagaacaaaaccgacaagatgtgaagtcagcggggcctcagtcccagctcctggcgagcgtcatt

SEQ ID NO: 67192 - DNA, 120 bp, Artificial Sequence
  ENSG00000075340_17 (sequence is synthesized)
gccgagaagagccgaagcccgtctacagagagccagctgatgtccaagggagacgaggataccaaagacgattcagaggagacggtgcccaaccccttcagccaactcactgaccaggag

SEQ ID NO: 67193 - DNA, 120 bp, Artificial Sequence
  ENSG00000075340_18 (sequence is synthesized)
ttggaggagtacaagaaagaggtggagaggaagaaactagaacttgatggagagaaagaaactgccccagaagagcctggctcacctgcaaagtctgcacctgcttctccagtgcagagc

SEQ ID NO: 67194 - DNA, 120 bp, Artificial Sequence
  ENSG00000075340_19 (sequence is synthesized)
ccagcgaaggaggcagagacaaagagccctttagtctctccttccaagtctttagaggaaggtactaagaagacagaaacaagcaaagccgccaccacagagcccgaaacaacccagccg

SEQ ID NO: 67195 - DNA, 120 bp, Artificial Sequence
  ENSG00000075340_20 (sequence is synthesized)
gaaggggtggtggtcaacgggagggaggaggagcagacggcagaggaaatcctcagcaaaggcctgagccagatgaccaccagtgctgacacggatgttgatacctctaaggacaaaacc

SEQ ID NO: 67196 - DNA, 120 bp, Artificial Sequence
  ENSG00000075340_21 (sequence is synthesized)
gagtcggtcaccagcggccccatgtccccagagggctcaccttccaagtctccctcaaagaagaaaaagaaattccgaaccccctccttcctgaaaaagagcaaaaagaaggagaaagtg

SEQ ID NO: 67197 - DNA, 120 bp, Artificial Sequence
  ENSG00000075340_22 (sequence is synthesized)
gagtcctgattcatgacacccttgggctccctcctgcctcctctctctcctccccttcccttctcccatctctgtccctgcaagcacagggctaaggagggatagagtaggaccctggac

SEQ ID NO: 67198 - DNA, 120 bp, Artificial Sequence
  ENSG00000075340_23 (sequence is synthesized)
cacattcggaaggggaacttagagatcacccgaccaacccttcgttttacagttgcccaagagaaatcaggtgacttgcccaaggtcacacagctagttagcggcagagcctgcactcga

SEQ ID NO: 67199 - DNA, 120 bp, Artificial Sequence
  ENSG00000075340_24 (sequence is synthesized)
attcaggtctcctgacttccagtccagtgctccttctactacacaacactgcctagttgtgggctgcctttgtttggatgctgtccaccaatctgagcctagggcaagaaggccagaaat

SEQ ID NO: 67200 - DNA, 120 bp, Artificial Sequence
  ENSG00000075340_25 (sequence is synthesized)
gggccgtgagctctcacaggctcagactaaatcagaggtcaaggcttcccctgagtaaggtccatttcttcccaggaatccaatctcctgtggatggagctatctctacatttaaaaatc

SEQ ID NO: 67201 - DNA, 120 bp, Artificial Sequence
  ENSG00000075340_26 (sequence is synthesized)
tcttctcttttccactttgggtccctgccctgctgctcaaagtgactagccaaattgacccctccaacagaaagtaatctttgttcccaagggctgatggcttagcttgtactaccccaa

SEQ ID NO: 67202 - DNA, 120 bp, Artificial Sequence
  ENSG00000075340_27 (sequence is synthesized)
acattaaccctgagctttcttcatggaacctcttgaatgatggatggaagagctataagaggtggtaggcataggggcaagccatgtaagctgaggattggggatggtttcatcaacata

SEQ ID NO: 67203 - DNA, 120 bp, Artificial Sequence
  ENSG00000075340_28 (sequence is synthesized)
agaggccaggaacttgacccctttgaattgtgcatctcaggcacttcaaaactaaaaccaaatttagcataggaaaaagttgtttaatgctcagggcagaaatttggggaagttgaaatc

SEQ ID NO: 67204 - DNA, 120 bp, Artificial Sequence
  ENSG00000075340_29 (sequence is synthesized)
ctctgttggctttgggttgtataaggaggatcaaaacaacagaggaaatgctgactttctagctttgcatgacacctggagcaatgcactgtacctgcctcactcctgtccagtggtcag

SEQ ID NO: 67205 - DNA, 120 bp, Artificial Sequence
  ENSG00000075340_30 (sequence is synthesized)
gtttcccctgaccttccctcacccccagaaacacttgcttacagaccgaaactggcatcttactcttggcaccttgacttgcaccctctgaggttccaactcagtcattctttgtccagc

SEQ ID NO: 67206 - DNA, 120 bp, Artificial Sequence
  ENSG00000075340_31 (sequence is synthesized)
agaggagaatcagaaatgagcccttcaggattaatcctcttgcaccagctctcagagaaatgctgggtatccctgtccttgtccctatctgtccatcctggggcctggtaatggccacag

SEQ ID NO: 67207 - DNA, 120 bp, Artificial Sequence
  ENSG00000075340_32 (sequence is synthesized)
ttattgttttaaatgccaacactgtcttctcatgttcttccgtggggcattgattaatgagcatttgttggctcctaaaaattagacaatccattctcttgaaagcaccgtgtcttgaaa

SEQ ID NO: 67208 - DNA, 120 bp, Artificial Sequence
  ENSG00000075340_33 (sequence is synthesized)
gaatatttttccttttgatctgactatcgtgaaaatatttttgaaagttcttaatcatagttttccacttttgagcacttgctatctatagacactgtgcaggcttcacatacattacat

SEQ ID NO: 67209 - DNA, 120 bp, Artificial Sequence
  ENSG00000075340_34 (sequence is synthesized)
tctttaaccctcacagtaatcctttgaggggggtaagatcattcccattttgtgggtgaggaaattgaccccctaaaatgataattgacttgtcccagctgacttggctagaaagatctg

SEQ ID NO: 67210 - DNA, 120 bp, Artificial Sequence
  ENSG00000075340_35 (sequence is synthesized)
gatcctggatttgaatccaggtcagtctgagtccagagcccttgctcttaacagctatggtgaacagacaactttaatccccaggggtggtggttttcatccaggatttgtctctatgac

SEQ ID NO: 67211 - DNA, 120 bp, Artificial Sequence
  ENSG00000075340_36 (sequence is synthesized)
tgttctccattgcataatgttagcacgtgaagcaaaggtagggaacaccctgtgctcatcctcatcactgcacgtgaagttcctggtcaatgtggactgtggtgatgctactgtgtgcct

SEQ ID NO: 67212 - DNA, 120 bp, Artificial Sequence
  ENSG00000075340_37 (sequence is synthesized)
ctgacaaaggagaggcaagagccttctggttggggcgggaaataccatccatagttggctatttcttgagaaggaaggaaactgacctaggaccaaggtaaacctgacactgtgtctctc

SEQ ID NO: 67213 - DNA, 120 bp, Artificial Sequence
  ENSG00000075340_38 (sequence is synthesized)
tgattgggtcaaattttaggagggacaacccactcatgcctcagaaaaatctgtcatatgggaaatgcctttaaaagccaatcccttgatgccttcttttaaaaagtagatttcacactt

SEQ ID NO: 67214 - DNA, 120 bp, Artificial Sequence
  ENSG00000075340_39 (sequence is synthesized)
attcatttatccttacatggtatttgttaaggatccactgagcaccaggcattatgctgacgttgaaagagagccatcattatgactagaataataagtggcaaacgatgttgtgagaat

SEQ ID NO: 67215 - DNA, 120 bp, Artificial Sequence
  ENSG00000075340_40 (sequence is synthesized)
ggtgaacacgacctctgatgcagccttttgtgtgcgagttgttctacttcgggggtgatgttgattgcctctgcattcaacacactctattcccttgacaatgaggcctcacttaggcct

SEQ ID NO: 67216 - DNA, 120 bp, Artificial Sequence
  ENSG00000075340_41 (sequence is synthesized)
cattgggtggagtcttgctgcagcattattctgggaatttatgccatgggcccactttctattgatagatgaacctgtcagttggttcattcctcatgcattccaaaaacatgcattgag

SEQ ID NO: 67217 - DNA, 120 bp, Artificial Sequence
  ENSG00000075340_42 (sequence is synthesized)
cttgggtcaagggccaggcatgaggataggcatagttcctgccctcaagaagttcatgagcataggaggtgtatagacaaattgcaaaacaggcaagggtaccaaggtggcataagaaag

SEQ ID NO: 67218 - DNA, 120 bp, Artificial Sequence
  ENSG00000075340_43 (sequence is synthesized)
catcaattaactatcttggggaccagagaaaccctgagagaagcaatggctgctaaggttttaaaacaaagagtaaatttccagtagaatgaaaggattggcagggcatgccacaatgag

SEQ ID NO: 67219 - DNA, 120 bp, Artificial Sequence
  ENSG00000075340_44 (sequence is synthesized)
ggaagaatgtgcaaaggtgtggacgcatgaaatgccatgatgggttccgctgagcaacgtggcattgccagagcatgatgtggaagctcaggggttgaggggtcccttcataggtaggca

SEQ ID NO: 67220 - DNA, 120 bp, Artificial Sequence
  ENSG00000075340_45 (sequence is synthesized)
gggctgaatcctaaggaaactggtaggaagtgtggaggagctagacttgtcatggaaggggtttggagccactggagcctttaaatcaggatagagtcatgatcagaattgcattttagg

SEQ ID NO: 67221 - DNA, 120 bp, Artificial Sequence
  ENSG00000075340_46 (sequence is synthesized)
aaaatccctttggtggctgaatggagactgtggactggatgggcgtgggatggtggcatgggagctatgaggcctttttgaaatgtcaatactaaaacatagttgatggcctgctttaca

SEQ ID NO: 67222 - DNA, 120 bp, Artificial Sequence
  ENSG00000075340_47 (sequence is synthesized)
cgatgtttcctctacagcagatagtgagtttccaacacaaaatttatttccataaaagtctttggataaagcaccttaagagggattttcaacaaggagaggggagcattcaaagagcta

SEQ ID NO: 67223 - DNA, 120 bp, Artificial Sequence
  ENSG00000075340_48 (sequence is synthesized)
atgtttccagttttattttgtcttggtgtagaattgctgggagaggtgtccagccatcctgccatttcttcttcccttgcacagaatgtggcacatttagctccaggcttgaggacatgc

SEQ ID NO: 67224 - DNA, 120 bp, Artificial Sequence
  ENSG00000075340_49 (sequence is synthesized)
accaaatgctacagaaacagacatgtggtccaaacaaatctacaggctattagaaaggaaaggccattttctttggctgtggataaaagttggctgaaaactttgaccaatatctgactg

SEQ ID NO: 67225 - DNA, 120 bp, Artificial Sequence
  ENSG00000075340_50 (sequence is synthesized)
gagaaaatgtgtattcaagagctcagatttggtgggcagtaggttcatgtctggttgagctactgtgcttggatgtgccagagaaaagggtaacatttgaaccaatgtgctgctctgtgg

SEQ ID NO: 67226 - DNA, 120 bp, Artificial Sequence
  ENSG00000075340_51 (sequence is synthesized)
ctggctgagctgggaagtggagaggtttctgagcttatttccatcgcaaggcaggcaggaggagagaggacaagaaggattagtggtttcgcagagacaggcttggctccaacggctcct

SEQ ID NO: 67227 - DNA, 120 bp, Artificial Sequence
  ENSG00000075340_52 (sequence is synthesized)
tgcgtagtgttggctgcacccaacagtggtgtgagagaaccgtccataccatgtgaccttcctcccaaactgcagaaagagacaccttctagcccagatctggactccctaagagcctcc

SEQ ID NO: 67228 - DNA, 120 bp, Artificial Sequence
  ENSG00000075340_53 (sequence is synthesized)
tggcctgcatgcaacccaagtaactgtcctactttggccagttgaccccctccactctcctataactaaaacagggttcttcctctgtgaacagataagttctttttaaaggacttgggg

SEQ ID NO: 67229 - DNA, 120 bp, Artificial Sequence
  ENSG00000075340_54 (sequence is synthesized)
gaaattggatgaagagcagtaagttcttacagtaagaaccccactgtaaagcactgccctctgccactgatccatgtagactgaatttgaatcccattccctgtggatgataccgtcact

SEQ ID NO: 67230 - DNA, 120 bp, Artificial Sequence
  ENSG00000075340_55 (sequence is synthesized)
tgctcatggtgacatggcaagacagtcattcagatgtttggcattgttgtagcagggctactgctagtgtgggggaaaatgctataaatccacttctttgattgccatggatttgaaaga

SEQ ID NO: 67231 - DNA, 120 bp, Artificial Sequence
  ENSG00000075340_56 (sequence is synthesized)
accatttgcccaacagcatgattcgcctctgaaagtctaaaaataattttcaatttttccatgaaggtatgtggagggtaaacacacagcctacgcataggtctgcatgacatgtttttt

SEQ ID NO: 67232 - DNA, 84 bp, Artificial Sequence
  ENSG00000075340_57 (sequence is synthesized)
agctgacacgttttttcttttgtgtgaattttatgttctagttttgggacaagggtaatcagttcttgactagtgaacaaatga

SEQ ID NO: 67233 - DNA, 120 bp, Artificial Sequence
  ENSG00000075340_58 (sequence is synthesized)
tgggacaagggtaatcagttcttgactagtgaacaaatgagagaacatttaccccttactcattttacacatgcaggtcagcagaagccctagagttggttggcacagtcgcagttgact

SEQ ID NO: 67234 - DNA, 120 bp, Artificial Sequence
  ENSG00000075340_59 (sequence is synthesized)
gagcatagaggaaacaggtctttttacattctctctcatcactggagctcagttgaactctaagaccttagcactcaaagagtctgaaaagaaatgagggagaggctaaatttaagctct

SEQ ID NO: 67235 - DNA, 120 bp, Artificial Sequence
  ENSG00000075340_60 (sequence is synthesized)
ccactcccacagaaaggacagggcaccctacaatctaaaagccagtgaggcagcctatcatctgtttcacatctgttctgaaagggatagtttaatgcaagaagtaagaggcctgtagtg

SEQ ID NO: 67236 - DNA, 120 bp, Artificial Sequence
  ENSG00000075340_61 (sequence is synthesized)
actgtaaactcatgaaatgtgcacattggttatctgtgcacatttccacttgcaccataacataagaaagcgtacatggagtgtaattacttccagaagccccgtctaaccaacctattc

SEQ ID NO: 67237 - DNA, 120 bp, Artificial Sequence
  ENSG00000075340_62 (sequence is synthesized)
agatgtggcacactttctgtcataaatgagagaccacacgtagagctcggtcaccaaggaatgcccaacatccctttacctctcacaatgagcagccacgctcaccgggaagcagtgtgg

SEQ ID NO: 67238 - DNA, 120 bp, Artificial Sequence
  ENSG00000075340_63 (sequence is synthesized)
ggacttcagtggggtgtcccttagtggagaacacctttcatcatttttatagagacaattcccttgagaatgtaggcttttcatcttaggaacaattaggaagaatctccagctgggagt

SEQ ID NO: 67239 - DNA, 120 bp, Artificial Sequence
  ENSG00000075340_64 (sequence is synthesized)
gttcttatgtatacagaaacaatgggtcgcattggttcatacttaggtgatattaggtttggctatattgatgtttggtgccacttaccttctagattttcccaaaagttgggtcattgc

SEQ ID NO: 67240 - DNA, 120 bp, Artificial Sequence
  ENSG00000075340_65 (sequence is synthesized)
tatgggaaattggggcctgcagatgggggagaaatgatcattattggtgcagggaaggggttcaggcagagctggagtctgaggctcagtgtgagaaagcactggcagttttctagtaga

SEQ ID NO: 67241 - DNA, 120 bp, Artificial Sequence
  ENSG00000075340_66 (sequence is synthesized)
gtcaggtcctgggctcctctcctcacccactgtgtcccgaactgaggccagctgtgatcggcaaattgcttatctctaggtagtttaaagaaaacgtaagagtttggggggtggtgggag

SEQ ID NO: 67242 - DNA, 120 bp, Artificial Sequence
  ENSG00000075340_67 (sequence is synthesized)
aataactgtagaaagaccctaaactcttctctcccccagcaaattatcttgtataatgtttaaaaacccaaaggccagatctccccttttaacgtgaatcagaaggaggatggcaattgg

SEQ ID NO: 67243 - DNA, 120 bp, Artificial Sequence
  ENSG00000075340_68 (sequence is synthesized)
accaagggcagagtggccacacttgaaacacattataaaatgggaatatatttcagggaaccccacccccacacttccactccacctcacacctgttggtcctgctttgtgggtgattga

SEQ ID NO: 67244 - DNA, 120 bp, Artificial Sequence
  ENSG00000075340_69 (sequence is synthesized)
ttgatacccaaggactgccccacctttaaattcctgcaatttatgctgcaaccaacatcttagtgtttgctctctccgggaagaggccaggtgggggagaacatacggtccagagcctga

SEQ ID NO: 67245 - DNA, 120 bp, Artificial Sequence
  ENSG00000075340_70 (sequence is synthesized)
gatcgcctggctggggtgcaggcaagcaggaacccagtctagatagaatgcagtgttctctaaagctatggatggtttcagtgaaatgtctgtgtctgacaatcgtcacgcaagagtact

SEQ ID NO: 67246 - DNA, 120 bp, Artificial Sequence
  ENSG00000075340_71 (sequence is synthesized)
tactgtcttcccttgtacatacattgtctgtgtttagcttttcctagtattgtgaggtttcaaataggggttccatgtaaatactctttctgctactgaaatgccggcccccttgagtat

SEQ ID NO: 67247 - DNA, 120 bp, Artificial Sequence
  ENSG00000075340_72 (sequence is synthesized)
gcatcacccccacagatggttttgcctttctctatgctaacactttttgagccactgacgtgcagatcggtggttagtttcttgggcttttattttgcaattttatatatatacacatat

SEQ ID NO: 67248 - DNA, 120 bp, Artificial Sequence
  ENSG00000075340_73 (sequence is synthesized)
tatatatatatatatatttatgggttggttttgtatagttttctgtttgaatctctgagcaccaaagctgccctttgattttcacgagaactttccaaagccacttcctgagccctcctg

SEQ ID NO: 67249 - DNA, 120 bp, Artificial Sequence
  ENSG00000075340_74 (sequence is synthesized)
ctgctttggtgtctgacggtgatgctgcggtggcatctctgcccgtgaatttctgtatgtgtgtgctgttacctcacctgcagacatgaccctagtaaatctaacgtgcttggcttccca

SEQ ID NO: 67250 - DNA, 120 bp, Artificial Sequence
  ENSG00000075340_75 (sequence is synthesized)
aaaggtttctggtgatgatgtagcatccgaggctcttaggaaatcggggctgcaagcactggcccctgcttggggatggtgggaccctcgcccggagcgtaacgcctgacagtttccacc

SEQ ID NO: 67251 - DNA, 120 bp, Artificial Sequence
  ENSG00000075340_76 (sequence is synthesized)
tagaacttgatgagacaggacaggaacgagagccaggctctggtccggccgtgtgcgagttcttcagcgttgccctccacatctggagtaacatattggagagaaagaaactgccccaga

SEQ ID NO: 67252 - DNA, 120 bp, Artificial Sequence
  ENSG00000075340_77 (sequence is synthesized)
tggcggggaaacgtgtttgccttcggggtcttctgtgcctggggctgggttgcaggacccctgagtcctcatacccaccttcccctgtgatcttgggtgccggtgctcttgctgcaaaat

SEQ ID NO: 67253 - DNA, 120 bp, Artificial Sequence
  ENSG00000075340_78 (sequence is synthesized)
ggaggccaacctcacaggggtgctgtgaggaccagggaggacaatgtctgatggcccctgtgggcactgggctggagaacagcagcccagcctgcctgcaggagtgatgcggccggcttc

SEQ ID NO: 67254 - DNA, 120 bp, Artificial Sequence
  ENSG00000075340_79 (sequence is synthesized)
cgtacctcctgccatggaactccactctgtcctcccttactaccccgtgaagtggggactcataggcttggggctggagactcccaggtgccccaggtgtgcccagccctgagagtctct

SEQ ID NO: 67255 - DNA, 120 bp, Artificial Sequence
  ENSG00000075340_80 (sequence is synthesized)
gacctctgagcctggtatgacatcatccaaccagagctctggaaagatgatcatgtacccatagagaaggggtatatagacaggacccatgctcctacaggatgggaagggacaatatta

SEQ ID NO: 67256 - DNA, 120 bp, Artificial Sequence
  ENSG00000075340_81 (sequence is synthesized)
cccacacaaacccacattgagttagaaagtattgtaattgtttttgtgcttgagatagaacagtgttttgtctagtgcttagcaaaaggggtgaagttcagaattctggcatgtgtttga

SEQ ID NO: 67257 - DNA, 120 bp, Artificial Sequence
  ENSG00000075340_82 (sequence is synthesized)
aatcactgctgctccttgcaaggtagcaatgggcatgacattttccttagcagtaaaaattggggaaatacaggaaatgttcctctctgcagggcaaattgtgatgatgcaatgatttca

SEQ ID NO: 67258 - DNA, 120 bp, Artificial Sequence
  ENSG00000075340_83 (sequence is synthesized)
ggtcaagactgcagcccacagggtgggtgcccattggcaggagaagtgtgaaagttgtatcatcacacttacctccccccaaccccaactcagccaagatggggaacactgaatatcccg

SEQ ID NO: 67259 - DNA, 120 bp, Artificial Sequence
  ENSG00000075340_84 (sequence is synthesized)
cagggtcaagtatagaaatagccatgttctggcgggaggtgagagttcattacaatgagcaacactgttaaaaaaacaaacaaaaatctcccctgccatttataccaagtgctcttctcg

SEQ ID NO: 67260 - DNA, 120 bp, Artificial Sequence
  ENSG00000075340_85 (sequence is synthesized)
gagtccctcttcttgggtttttggtcttggattctcggttgactccatgattccctacattaggcctactgtggcctcccttttggaaggggcccaggggcagaagacctggcgggccag

SEQ ID NO: 67261 - DNA, 120 bp, Artificial Sequence
  ENSG00000075340_86 (sequence is synthesized)
ggcagggaggactggcagcctccaggctcacctccctttggcttcactctctttgctcctcagcttcagagcactgcatcctcaaaggccaagatgaggatgctgaattaggaaaaaagg

SEQ ID NO: 67262 - DNA, 120 bp, Artificial Sequence
  ENSG00000075340_87 (sequence is synthesized)
ctgtggagtctgaattttagttcctatcttgggctagaggggtcaaagaattcctgaagcttatgtaagggccggctggtcagctccctagaaccacgggctccacagaggtggcaaaac

SEQ ID NO: 67263 - DNA, 120 bp, Artificial Sequence
  ENSG00000075340_88 (sequence is synthesized)
ccagtgattttgccagtatccctgcagggacctgcggtacaggcaggttgaagatctgagactcaggaaccttggcccctttgtcacttacaactgtgtgtgaaacaggactaacagttt

SEQ ID NO: 67264 - DNA, 120 bp, Artificial Sequence
  ENSG00000075340_89 (sequence is synthesized)
ggactgagagcactgaagctgctgtgtgttgtgcatataacttaatgctgtgtgttgtggcttgcactgctgtgggggcggggagggcagtggtggggaatggctggcatgaagcttgct

SEQ ID NO: 67265 - DNA, 120 bp, Artificial Sequence
  ENSG00000075340_90 (sequence is synthesized)
tgagccaatgctatgcttgctgggctttggctgactggctttgggccaccaactgtatttgcatagtgatggcttggaagtgtccatagaagggattgcaataaaggtgtgtcttccttc

SEQ ID NO: 67266 - DNA, 120 bp, Artificial Sequence
  ENSG00000075340_91 (sequence is synthesized)
ggggctgggcgcgtcccccggggcctcgcgatcgctggctgcgcggcgctcagccgcagtggccggccgagcaggtgcggcgtcggcagccgcctacattgagatcggggcaaccggcac

SEQ ID NO: 67267 - DNA, 120 bp, Artificial Sequence
  ENSG00000075340_92 (sequence is synthesized)
acccgaccaacccttcgttttacagttgcccaagagaaatcagattacctgagactgggtcatttataatgaacacagatttatttctctcacatctggaagctgggaagtccaagatca

SEQ ID NO: 67268 - DNA, 120 bp, Artificial Sequence
  ENSG00000075340_93 (sequence is synthesized)
aggcaccagcatttggtgaagccttctttctgtgtcatcccatggcagaagacagaagggcaagagaggaaaccggtccaagcaggatgccttcctttttctgacaggcagcccccagca

SEQ ID NO: 67269 - DNA, 120 bp, Artificial Sequence
  ENSG00000075340_94 (sequence is synthesized)
gtaccatcacaaaccttggtctcttcttgtcaccagcaaagggatgaaggataagtgatgaggagactgaagcacagaggtgaagcagcttgcccaacgtcacactgctgcttagtgata

SEQ ID NO: 67270 - DNA, 120 bp, Artificial Sequence
  ENSG00000075340_95 (sequence is synthesized)
gaggcagtgctagaccccggggctcctgaatgttactgttggaggctcttaacccactgggatcaagaaggtgtcaagagctagactctccctccaggagaatgaacacagacacaaaac

SEQ ID NO: 67271 - DNA, 120 bp, Artificial Sequence
  ENSG00000075340_96 (sequence is synthesized)
cttgcatatatgcttccgggtaaagaacctgcctgcattttggtaccactacgtgctggcctgtcctgggcatgttatatcatgagaaggcagggaaggctgaatcattaaggacatgaa

SEQ ID NO: 67272 - DNA, 120 bp, Artificial Sequence
  ENSG00000075340_97 (sequence is synthesized)
tcagattgattctcgtggctttaaaaacaaacactacaggaccagcatgacccgccagcctgttatccacagaggcttgtggtctccattgaaaagaagcaaagacagcacgtcccaact

SEQ ID NO: 67273 - DNA, 120 bp, Artificial Sequence
  ENSG00000075340_98 (sequence is synthesized)
caaaagattgtgtcatcctaaaggtgaaaggaagagatgatccaagcaaatttaggaccaatagcagactcttcacactgcctggggatagagggaccaccctgggctcctcttactcct

SEQ ID NO: 67274 - DNA, 120 bp, Artificial Sequence
  ENSG00000075340_99 (sequence is synthesized)
ggatttacttggatgaccagactcaggacttcatttaaatagaatttggtttcataatggaatcttcagcttgaaatataaatttgtttctgtctccctctgccatctcagcctttcttg

SEQ ID NO: 67275 - DNA, 120 bp, Artificial Sequence
  ENSG00000075340_100 (sequence is synthesized)
tcccttattcaactgtcttcatttattctgtaaaagtagcagcagctcagccctgaccatctcctctctcacttgtgggagtctcatttagggatcgtttccacctggatgtttgaggtt

SEQ ID NO: 67276 - DNA, 120 bp, Artificial Sequence
  ENSG00000075340_101 (sequence is synthesized)
ccaggaaccagggacaaagatgacatatagtctttcttatatcatacctggctcatcacacgctggtctcctctgatcttcagcatcctgagttccaggagcgaattgcaaacccaccgg

SEQ ID NO: 67277 - DNA, 120 bp, Artificial Sequence
  ENSG00000075340_102 (sequence is synthesized)
ccggagatagctaagatgccgcgcaggaggtcaagaagcaggacacagccagctcccagagcccagtgcacccttgaaccacaccctgcttccccctggaggtaacaactcaccttcctt

SEQ ID NO: 67278 - DNA, 120 bp, Artificial Sequence
  ENSG00000075340_103 (sequence is synthesized)
ttatgtttccacctggatgtttgaggttgtgtagatgtggccggcacccttgagagtggagctagggggtgcagactgagcagtgaacagaaggagccttggacagggctgggccagcct

SEQ ID NO: 67279 - DNA, 120 bp, Artificial Sequence
  ENSG00000075388_0 (sequence is synthesized)
ctggcgctcagggaggcgcgcactgctcctcagagtcccagctccagccgcgcgctttccgcccggctcgccgctccatgcagccggggtagagcccggcgcccgggggccccgtcgctt

SEQ ID NO: 67280 - DNA, 120 bp, Artificial Sequence
  ENSG00000075388_1 (sequence is synthesized)
gcctcccgcacctcctcggttgcgcactcctgcccgaggtcggccgtgcgctcccgcgggacgccacaggcgcagctctgccccccagcttcccgggcgcactgaccgcctgaccgacgc

SEQ ID NO: 67281 - DNA, 80 bp, Artificial Sequence
  ENSG00000075388_2 (sequence is synthesized)
acggccctcgggccgggatgtcggggcccgggacggccgcggtagcgctgctcccggcggtcctgctggccttgctggcg

SEQ ID NO: 67282 - DNA, 120 bp, Artificial Sequence
  ENSG00000075388_3 (sequence is synthesized)
ccaacggcacgctggaggccgagctggagcgccgctgggagagcctggtggcgctctcgttggcgcgcctgccggtggcagcgcagcccaaggaggcggccgtccagagcggcgccggcg

SEQ ID NO: 67283 - DNA, 120 bp, Artificial Sequence
  ENSG00000075388_4 (sequence is synthesized)
actacctgctgggcatcaagcggctgcggcggctctactgcaacgtgggcatcggcttccacctccaggcgctccccgacggccgcatcggcggcgcgcacgcggacacccgcgacagcc

SEQ ID NO: 67284 - DNA, 120 bp, Artificial Sequence
  ENSG00000075388_5 (sequence is synthesized)
tgctggagctctcgcccgtggagcggggcgtggtgagcatcttcggcgtggccagccggttcttcgtggccatgagcagcaagggcaagctctatggctcgcccttcttcaccgatgagt

SEQ ID NO: 67285 - DNA, 120 bp, Artificial Sequence
  ENSG00000075388_6 (sequence is synthesized)
gcacgttcaaggagattctccttcccaacaactacaacgcctacgagtcctacaagtaccccggcatgttcatcgccctgagcaagaatgggaagaccaagaaggggaaccgagtgtcgc

SEQ ID NO: 67286 - DNA, 120 bp, Artificial Sequence
  ENSG00000075388_7 (sequence is synthesized)
ccaccatgaaggtcacccacttcctccccaggctgtgaccctccagaggacccttgcctcagcctcgggaagcccctgggagggcagtgccgagggtcaccttggtgcactttcttcgga

SEQ ID NO: 67287 - DNA, 120 bp, Artificial Sequence
  ENSG00000075388_8 (sequence is synthesized)
tgaagagtttaatgcaagagtaggtgtaagatatttaaattaattatttaaatgtgtatatattgccaccaaattatttatagttctgcgggtgtgttttttaattttctggggggaaaa

SEQ ID NO: 67288 - DNA, 120 bp, Artificial Sequence
  ENSG00000075388_9 (sequence is synthesized)
aaagacaaaacaaaaaaccaactctgacttttctggtgcaacagtggagaatcttaccattggatttctttaacttgtcaaaagttgtcacgagtgtgctgctattctgtgttttaaaaa

SEQ ID NO: 67289 - DNA, 120 bp, Artificial Sequence
  ENSG00000075388_10 (sequence is synthesized)
aaggtgacattggattccgatgtcatcccctgtagtatggcgtggagcatctctgtctggaaaggcccgcctgaggcttgggcagccagttcagggagctcccaggcttggctctcggct

SEQ ID NO: 67290 - DNA, 120 bp, Artificial Sequence
  ENSG00000075388_11 (sequence is synthesized)
agcatcctcagaggcccactccctttgtgccctgttgctattaatcgggacatatcggtttacttcgggtacagaaagtgcggtgttgaagtcctcgctgccactctgtttttagatctg

SEQ ID NO: 67291 - DNA, 120 bp, Artificial Sequence
  ENSG00000075388_12 (sequence is synthesized)
ccaagactgacctttgaactttcctgtagtcaatcttcctcgatctaccagatgggagagacccttggacaactttataaactcctgtttgccttttttggatcagcgacagcccccatc

SEQ ID NO: 67292 - DNA, 120 bp, Artificial Sequence
  ENSG00000075388_13 (sequence is synthesized)
ggagaggaatcaatatcccactggaaggctagaaatggacaagatagtgtatttgcaatcacaaacaaaaccctagtgatgaaaaataatttgtgatggcagatgcttctgatggtgtga

SEQ ID NO: 67293 - DNA, 120 bp, Artificial Sequence
  ENSG00000075388_14 (sequence is synthesized)
tagaatatgtttttgaaaacaaaccatcgaaccccccgccccacccccaaaacgggcttccctgtgtttagggagctttgggctagaactagctacgatttttaggtgaaatgtccttgt

SEQ ID NO: 67294 - DNA, 120 bp, Artificial Sequence
  ENSG00000075388_15 (sequence is synthesized)
aattgtacaaagcacttggtgcagtgtttgcgtggagcagcctgctgctttctgatgcattccctgtttaagtgcgtttaacatctacctcacaagccctgaaaccccaggcaaaaccca

SEQ ID NO: 67295 - DNA, 120 bp, Artificial Sequence
  ENSG00000075388_16 (sequence is synthesized)
cagaaagctcatacccggtgcaggagtttgccatcccaagtggctttttttccatatgtagccaaaaaggattgcagatagcgtcggtgcgtcccattcgaaccttgtcacgtttgagct

SEQ ID NO: 67296 - DNA, 120 bp, Artificial Sequence
  ENSG00000075388_17 (sequence is synthesized)
atctttaccctgtgatttacttttagtaagggtgatcatggtgaaaatatttgcagacagctgttacagtacactatatggtcaccaagtaaccttatatttttctttatatattttaca

SEQ ID NO: 67297 - DNA, 120 bp, Artificial Sequence
  ENSG00000075388_18 (sequence is synthesized)
aatgtaacccctgtcattgaagcaaccgtggaagaggcagggtcggtgatgtttaaaaaaagttccgaggtgatggcaaacatttaattttaatgaatgactttttagagtttatacaaa

SEQ ID NO: 67298 - DNA, 120 bp, Artificial Sequence
  ENSG00000075388_19 (sequence is synthesized)
atgaccttagcttgctaccagaaatgctccgaatgtttcgtcaagactttaatactctcctaggatgtttctgaactgtctcccgaattaactttatgggagtctacagacagcaagact

SEQ ID NO: 67299 - DNA, 120 bp, Artificial Sequence
  ENSG00000075388_20 (sequence is synthesized)
ggaaaatctgattggagtttttgtctttcacattccttttgaaaactctttgttcgaatgcaaatcatcgacttaaaatactattcttaaccaaggcctggaagaaagaagacacttgca

SEQ ID NO: 67300 - DNA, 120 bp, Artificial Sequence
  ENSG00000075388_21 (sequence is synthesized)
aagccgctaagacaggaccacacatcttaaactgctgttcctaccatgcactaaactgtttttaagttttaaaccacaccctaggctccaggagtgttcaggaaagatggtgtttgtagg

SEQ ID NO: 67301 - DNA, 120 bp, Artificial Sequence
  ENSG00000075388_22 (sequence is synthesized)
tctccatgctgtttggcgttggggggtgtggagggatcatccgtcgactttctgaattttaatgtattcacttagtaacaaaccatgattgtcttaaatgccttaaattattatgagatt

SEQ ID NO: 67302 - DNA, 120 bp, Artificial Sequence
  ENSG00000075388_23 (sequence is synthesized)
tcttgtctcagagcccaatcagattgtcaggaattaacatgtgttaggtttgatcacccttgaccacttcttatagatatttcttcaacaaatcatgtgtgatgcctgtaggaacacaac

SEQ ID NO: 67303 - DNA, 120 bp, Artificial Sequence
  ENSG00000075388_24 (sequence is synthesized)
tgtacctttaaaatattgttttcatattgctgtgatggggattcgaggttcctgtatgtgccactgttttcagaatctgtagttttatacaggtgccgaccctcgttgtgatgtatgtgc

SEQ ID NO: 67304 - DNA, 120 bp, Artificial Sequence
  ENSG00000075388_25 (sequence is synthesized)
tgtgcacattgacatgctgaccgacaatgataagcgtttatcgtgtataaaaagacaccactggactggatgtacacaactgggaaaggaattaaaagctattaaaattgtgccttgaaa

SEQ ID NO: 67305 - DNA, 120 bp, Artificial Sequence
  ENSG00000075391_0 (sequence is synthesized)
gaagaaggcggctccgaggaggtgggagggcgagcctcccctcccgggttcttctgcgtcctctcccgggagggacccacacacacctgagcccggacccacccttggtcggggccacgc

SEQ ID NO: 67306 - DNA, 120 bp, Artificial Sequence
  ENSG00000075391_1 (sequence is synthesized)
tggatcctcctcccggcctgggtcccgcccgccgactgcaggtgggctgcatcgcccgagcctcgggcagtgggcgacggggaaggaggtgagaggtgtccgcgccggctgccgctcggg

SEQ ID NO: 67307 - DNA, 120 bp, Artificial Sequence
  ENSG00000075391_2 (sequence is synthesized)
ctcgctgcgcgctctcctcctccccttaccgcaggcagggcgcggagccgcgcgccagcccgccccgaagccgccgcctcgtccccctcccgcctcggggcaccatggagctctctccgt

SEQ ID NO: 67308 - DNA, 120 bp, Artificial Sequence
  ENSG00000075391_3 (sequence is synthesized)
ctctccgtcgtccggaggagccgcggaggcgctgtcctggccggagatgttcccggcgctggagtccgactcgccgctgcccccggaggacctggacgcggttgtcccagtcagtggagc

SEQ ID NO: 67309 - DNA, 120 bp, Artificial Sequence
  ENSG00000075391_4 (sequence is synthesized)
cgtcgccggtggcatgttggatcggatccttctggagtccgtgtgccagcaacagagctgggtccgggtgtacgatgtgaaaggaccacccacccaccgtctgtcttgtggtcagtcacc

SEQ ID NO: 67310 - DNA, 120 bp, Artificial Sequence
  ENSG00000075391_5 (sequence is synthesized)
ctacaccgagacaacaacgtgggagcggaagtattgcatcctcacagacagccagttggtattgctcaacaaggagaaggagatacctgtggaagggggacaggagcagcagacagattc

SEQ ID NO: 67311 - DNA, 120 bp, Artificial Sequence
  ENSG00000075391_6 (sequence is synthesized)
caccaaagggcgatgcctgaggagaactgtcagtgtcccttccgagggtcagtttcccgagtacccaccagagggcgccactaaactggaggtaccagcagaaaggtcccctcgtagacg

SEQ ID NO: 67312 - DNA, 120 bp, Artificial Sequence
  ENSG00000075391_7 (sequence is synthesized)
gagtatctcagggaccagtacatcagagaaacccaactccatggacactgcaaatacctcacccttcaaagtaccaggattcttcagcaagcgcctgaaaggctccatcaagaggaccaa

SEQ ID NO: 67313 - DNA, 120 bp, Artificial Sequence
  ENSG00000075391_8 (sequence is synthesized)
aagccagtcaaagcttgacagaaacacgagctttcggcttccatcccttcgcagtacagatgacaggtctcgtgggctgcctaaactaaaagagtcacgttcccatgaatccttgctgag

SEQ ID NO: 67314 - DNA, 120 bp, Artificial Sequence
  ENSG00000075391_9 (sequence is synthesized)
cccatgcagcacagtggaatgtctggatcttggtagaggggaacctgtatcagtgaaaccacttcatagtagcatccttggacaagacttctgctttgaggttacctacttaagtggaag

SEQ ID NO: 67315 - DNA, 120 bp, Artificial Sequence
  ENSG00000075391_10 (sequence is synthesized)
taaatgcttcagctgtaattctgcttctgagagagacaagtggatggaaaaccttcgcaggacagttcaacctaataaggacaattgcaggcgagctgaaaatgttcttcgtttatggat

SEQ ID NO: 67316 - DNA, 120 bp, Artificial Sequence
  ENSG00000075391_11 (sequence is synthesized)
cattgaagccaaggaccttgcccctaaaaagaaatatttctgcgaactgtgccttgatgataccctctttgctcgtacaaccagcaagaccaaagcagacaatattttctggggcgaaca

SEQ ID NO: 67317 - DNA, 120 bp, Artificial Sequence
  ENSG00000075391_12 (sequence is synthesized)
ttttgaattcttcagccttccacctcttcatagtatcacagttcacatttacaaggatgtggaaaaaaagaaaaaaaaggacaagaataattatgtagggctagtcaacatccccactgc

SEQ ID NO: 67318 - DNA, 120 bp, Artificial Sequence
  ENSG00000075391_13 (sequence is synthesized)
cagtgtgactggtcgccaatttgtagaaaagtggtatccagtgagtacacctacacccaacaaaggaaagacaggaggaccttctattcggattaaatcacgtttccaaactatcaccat

SEQ ID NO: 67319 - DNA, 120 bp, Artificial Sequence
  ENSG00000075391_14 (sequence is synthesized)
tctgcctatggagcaatacaaagaatttgcagaatttgtcaccagcaactacaccatgctgtgttctgtccttgagccagtaattagtgtgagaaataaagaggagttggcttgtgcctt

SEQ ID NO: 67320 - DNA, 120 bp, Artificial Sequence
  ENSG00000075391_15 (sequence is synthesized)
agtgcacattcttcaaagtactggcagagccaaggattttctgactgacttggtgatgtctgaggtggatcgttgtggagagcatgatgtcttgatcttcagagagaacactattgccac

SEQ ID NO: 67321 - DNA, 120 bp, Artificial Sequence
  ENSG00000075391_16 (sequence is synthesized)
caaatccattgaggaatacctcaagttggtgggacaacagtatcttcatgacgcactgggggagtttatcaaagctttgtatgagtccgatgagaactgtgaagtggatcccagcaaatg

SEQ ID NO: 67322 - DNA, 120 bp, Artificial Sequence
  ENSG00000075391_17 (sequence is synthesized)
ttcatctagtgaactgatagaccatcagagcaacctgaaaatgtgctgtgagctggctttctgcaagatcatcaactcttactgtgttttccctcgtgagttgaaagaagtgtttgcatc

SEQ ID NO: 67323 - DNA, 120 bp, Artificial Sequence
  ENSG00000075391_18 (sequence is synthesized)
gcctcattatttctccgttttctgtgtccagccattatgtctcccagtcttttcaaccttatgcaggagtatcctgatgaccgcacatctcggactctaactcttattgccaaggtcatt

SEQ ID NO: 67324 - DNA, 120 bp, Artificial Sequence
  ENSG00000075391_19 (sequence is synthesized)
cagaacctggccaactttgccaagtttggtaacaaagaggaatacatggcattcatgaatgattttttagaacatgaatggggtggaatgaagcgctttcttttggagatctctaatcca

SEQ ID NO: 67325 - DNA, 120 bp, Artificial Sequence
  ENSG00000075391_20 (sequence is synthesized)
gacaccatctcaaacaccccaggctttgatggttacattgatctgggccgagagctttcagttttgcattccttactgtgggaagtagtttcccaacttgataaggcgaccgtggcaaaa

SEQ ID NO: 67326 - DNA, 120 bp, Artificial Sequence
  ENSG00000075391_21 (sequence is synthesized)
ttggggcctctccctcgtgttcttgctgatattaccaagtcattgactaatcctacgccaatacaacagcaactgagacgcttcactgaacataactccagtccaaatgtcagtggaagc

SEQ ID NO: 67327 - DNA, 120 bp, Artificial Sequence
  ENSG00000075391_22 (sequence is synthesized)
ctctcctctgggctgcagaaaatatttgaagaccccactgacagtgatttgcataaactaaaatctccaagccaggacaacacagacagctacttcagagggaaaacattattgctggtt

SEQ ID NO: 67328 - DNA, 120 bp, Artificial Sequence
  ENSG00000075391_23 (sequence is synthesized)
cagcaagcctcctctcagagcatgacttattctgaaaaggatgaaagggaaagtagccttcctaatggtcggagcgtctccctcatggacctccaggacactcatgctgctcaagtggag

SEQ ID NO: 67329 - DNA, 120 bp, Artificial Sequence
  ENSG00000075391_24 (sequence is synthesized)
catgcatctgtcatgcttgatgtgcctatacgcttgaccggaagccagctttccataacccaggtggccagcatcaaacagctgcgggaaacccagagcactccccaaagtgcaccccaa

SEQ ID NO: 67330 - DNA, 120 bp, Artificial Sequence
  ENSG00000075391_25 (sequence is synthesized)
gtgagaaggcccctgcacccagccttgaaccagccaggtggccttcagcccttgtcgttccagaaccctgtctatcacctcaataacccaattccagcaatgccaaaggcctctatagat

SEQ ID NO: 67331 - DNA, 120 bp, Artificial Sequence
  ENSG00000075391_26 (sequence is synthesized)
tccagtttggagaacctaagcactgccagttccagaagccaaagtaacagtgaagacttcaagctcagtggacccagcaatagcagcatggaagatttcactaaacgtagcactcagagt

SEQ ID NO: 67332 - DNA, 120 bp, Artificial Sequence
  ENSG00000075391_27 (sequence is synthesized)
gaggacttctccaggcggcacacggtgccagatagacacatacctcttgctttgccacgacaaaatagtactgggcaggcccagatccgaaaagtggaccagggtgggttaggtgcccga

SEQ ID NO: 67333 - DNA, 120 bp, Artificial Sequence
  ENSG00000075391_28 (sequence is synthesized)
gccaaagccccaccatccctgccacacagtgcttctttacgtagcaccgggagcatgtcagtggtgtccgcagccctggtggccgaacctgtgcagaatgggagccggtcccggcagcag

SEQ ID NO: 67334 - DNA, 120 bp, Artificial Sequence
  ENSG00000075391_29 (sequence is synthesized)
tcctcttcctccagagagagccctgttcccaaagttagagcaatccagagacaacagacacagcaggttcagtcacctgtggactctgccacaatgtccccagtagagaggacagcagcc

SEQ ID NO: 67335 - DNA, 120 bp, Artificial Sequence
  ENSG00000075391_30 (sequence is synthesized)
tgggttctgaacaatgggcagtatgaagaggatgtggaagaaactgagcaaaatctagatgaagccaagcatgctgagaagtatgaacaagaaattactaaactgaaggagcgcctgaga

SEQ ID NO: 67336 - DNA, 120 bp, Artificial Sequence
  ENSG00000075391_31 (sequence is synthesized)
gtttccagccggcgactggaggaatatgaacgccgcttgctggtgcaggagcagcagatgcagaagctgctgctggaatacaaggcccgactggaggacagcgaggagcggctccgaaga

SEQ ID NO: 67337 - DNA, 120 bp, Artificial Sequence
  ENSG00000075391_32 (sequence is synthesized)
cagcaggaagaaaaagatagccagatgaaaagcatcatcagcaggctaatggctgtggaagaggaactgaagaaggatcatgctgagatgcaagcagttattgatgcaaagcagaaaata

SEQ ID NO: 67338 - DNA, 120 bp, Artificial Sequence
  ENSG00000075391_33 (sequence is synthesized)
attgatgcacaggaaaaacggatcgtgtccctggattcagccaacaccagactgatgagcgcgctgacccaagtgaaggagcggtacagcatgcaggtccgcaatggcatctcccccacc

SEQ ID NO: 67339 - DNA, 120 bp, Artificial Sequence
  ENSG00000075391_34 (sequence is synthesized)
aaccccaccaagctttccatcacggagaatggtgaattcaaaaacagcagctgctgacgggctttgtctgtggaaggagacagaaggaaattgacccactctcctatctccagaccttta

SEQ ID NO: 67340 - DNA, 120 bp, Artificial Sequence
  ENSG00000075391_35 (sequence is synthesized)
cctagcccctccaggtttacagaatgttgctacttcacaatggcgatgtggtgagaaactcctgaatgaagaaaggaaccttgtctttcagggcataaggcggcgacttccaaggtcaat

SEQ ID NO: 67341 - DNA, 120 bp, Artificial Sequence
  ENSG00000075391_36 (sequence is synthesized)
cctgtgtggtggcccagttcctaacaggaaccagggtatggggacccctgttttagagaatcagtttcagggtcccagtaatttccttttcctcaagttttcatactacattttcaagtt

SEQ ID NO: 67342 - DNA, 120 bp, Artificial Sequence
  ENSG00000075391_37 (sequence is synthesized)
tttccagatcatctatctaaaaatcacctggaatgcttgttaaaaattcggatccttggacccttccttcacccatctctcaccaatcagaatatctgggagctgcctaggaattgcatt

SEQ ID NO: 67343 - DNA, 120 bp, Artificial Sequence
  ENSG00000075391_38 (sequence is synthesized)
agtagctgggactacaggtctttggaatggcatctcttcatatgcaacgtagaatatatgcttactgtattagtccactttgtgttgctgtgaaggaatacctgaggctgggtaatttat

SEQ ID NO: 67344 - DNA, 120 bp, Artificial Sequence
  ENSG00000075391_39 (sequence is synthesized)
cgaaatgagagcaaaaagggagagagcaggaaagcgagcacaggcgagtacagtatacaaagtgttttgagtttctgactggcgtgccggaaagatcatgttagcacacccagaaacttc

SEQ ID NO: 67345 - DNA, 120 bp, Artificial Sequence
  ENSG00000075391_40 (sequence is synthesized)
attgctatttttattattgttttcctcttgttgaaagcactgcagttgttacaggaagtaaagtaggaactgttgtgtgagcgagacatgagcctgtaggttcagtaggtagagaccaag

SEQ ID NO: 67346 - DNA, 120 bp, Artificial Sequence
  ENSG00000075391_41 (sequence is synthesized)
catctatctgatagaagcacatggagtgcaataggacattgtgagaaggaatttttcagggattcatctactagtttaaaaaccccactctggccctcttgtcctttcagaaaacatgca

SEQ ID NO: 67347 - DNA, 120 bp, Artificial Sequence
  ENSG00000075391_42 (sequence is synthesized)
aataccaagatccatacaaaacaataatttattccactgatcaaccaagactggttctggttggacagctaatctgatttggggattcactgtttcagaggacacagacaaaagctgttg

SEQ ID NO: 67348 - DNA, 120 bp, Artificial Sequence
  ENSG00000075391_43 (sequence is synthesized)
catcaaaactggactttaggagtaatttctattgaactcctgtcaatatgtttatttcctctgtctacagcagatgggagtcttctcttttagacaggggctttttgtttttaaccccaa

SEQ ID NO: 67349 - DNA, 120 bp, Artificial Sequence
  ENSG00000075391_44 (sequence is synthesized)
ttgtaataaagggtgttctttttcctctttagagtttacaaaactataaatatttgtgtctccacataccatcttcatcttcacacattcactgtgctttcctccccatagtgggagctg

SEQ ID NO: 67350 - DNA, 120 bp, Artificial Sequence
  ENSG00000075391_45 (sequence is synthesized)
tcatcaccaacagggtttactctcccctggagaggttatttaaatagctgtccataagccatccagatcaacaccctttcttccatacagaaaagggctaaccataccacagctggaatc

SEQ ID NO: 67351 - DNA, 120 bp, Artificial Sequence
  ENSG00000075391_46 (sequence is synthesized)
tctgaatatttcctattaaaaattttttctatgtgttgttataatttttgtttgggataaagactctatccattgtactagcaaatctatggggggtaattttatctccatctttaactt

SEQ ID NO: 67352 - DNA, 120 bp, Artificial Sequence
  ENSG00000075391_47 (sequence is synthesized)
ttaaagtacttcttccccttatcccctcaataaagaaaggaaatccaaatttgaagcatcactctcttaaaagaaaaagaaaataatggaaagtgtcaggatggcacattccagttatta

SEQ ID NO: 67353 - DNA, 120 bp, Artificial Sequence
  ENSG00000075391_48 (sequence is synthesized)
ttccaatgctcgtagatctgacaataatgacccaatttcaacacttgtcatccatagccttattattatagaacagaaaaagtcatggaaacgaattcatttccttttttccagaggtgt

SEQ ID NO: 67354 - DNA, 120 bp, Artificial Sequence
  ENSG00000075391_49 (sequence is synthesized)
gcaatgtcatcttgaatgcaaccttgattaccagaagtatggaaggttacatgttaaacagacattatatatacaaatatatatataatatatattcacacatatgtacatataactgca

SEQ ID NO: 67355 - DNA, 120 bp, Artificial Sequence
  ENSG00000075391_50 (sequence is synthesized)
caaataggaaaagttcatgccttctatgctgttcagatataatgttaaaagggtctcaaacctctttaagcaagatctaagtagttgttttatattgagaaagcaacaatgtttctcgaa

SEQ ID NO: 67356 - DNA, 120 bp, Artificial Sequence
  ENSG00000075391_51 (sequence is synthesized)
taagttgatgttgattttaaattataagctttaaagaattttttttctagaaaaaggggatggaaaaaaaaggacctgagggagccatatgcatcaagtgagtgtttctccataacagaa

SEQ ID NO: 67357 - DNA, 120 bp, Artificial Sequence
  ENSG00000075391_52 (sequence is synthesized)
tatttataagagaacatgtatagtgccctcttttgagtgatgccgacagacaccaagccctccttttcaccaagtcccaggcttgcattccagcctcttgagctctgccctctctcaggt

SEQ ID NO: 67358 - DNA, 120 bp, Artificial Sequence
  ENSG00000075391_53 (sequence is synthesized)
ggatctttgtgttggaccttacgtttcagcaacctcaccatggccacataacccacaaccttttaaaacagtttctttcatagcaatccctgtttctgccagacagatctaaaatgggag

SEQ ID NO: 67359 - DNA, 120 bp, Artificial Sequence
  ENSG00000075391_54 (sequence is synthesized)
tttctcactgtgtttatctgatctgcacactttatatccagctgttttggcacttttacgttttcttcacctttggttttggtttgcaaattcttacaccttctctccaagcggagggca

SEQ ID NO: 67360 - DNA, 120 bp, Artificial Sequence
  ENSG00000075391_55 (sequence is synthesized)
cactgtggtcaaaatcacttattttattaggaaaaagaggtaactgttccaaagtgtagtgtcctttgttgaaggaggagggatgtaagcatagatttgttcttgtttctggctattctc

SEQ ID NO: 67361 - DNA, 120 bp, Artificial Sequence
  ENSG00000075391_56 (sequence is synthesized)
agctcaagccatgtttaattcattctttgtaaaagccttcaattgtgccacagaaaacctggtaagagaattgtcagtttcattggccataagtatgtaatgtgggtgatgtcttgccat

SEQ ID NO: 67362 - DNA, 120 bp, Artificial Sequence
  ENSG00000075391_57 (sequence is synthesized)
tgaggtttggaagctcttaagtgccgattatggattacagagggctgataaaattacttatattgggaattgagagaagccccaaaaaatcaaatgtgcttttgatggatagagtgtatc

SEQ ID NO: 67363 - DNA, 120 bp, Artificial Sequence
  ENSG00000075391_58 (sequence is synthesized)
ttattagcattatgggagctccttagagggctgtcttcactgaaagatttaatgcccaaaacatttggacagattatgcagccttctactaccaggttatcttgaatgaagaagaaatag

SEQ ID NO: 67364 - DNA, 120 bp, Artificial Sequence
  ENSG00000075391_59 (sequence is synthesized)
taaaaaataataataatagagcattaccaataagctaaaagttcagagttgctgatagatgttaaatgttaagttatcctgtgagcctactcctgtccaaccttttttctcagtatttct

SEQ ID NO: 67365 - DNA, 120 bp, Artificial Sequence
  ENSG00000075391_60 (sequence is synthesized)
ttagagaatgctgcaatctgtataagttactctgaaggattttttaagaagagaagccaccaacaggtgataatttttatggagatgtttcttaattggctttccctcagttcaagtagg

SEQ ID NO: 67366 - DNA, 120 bp, Artificial Sequence
  ENSG00000075391_61 (sequence is synthesized)
taaataactttgtttgctgggaggaggtacatggctgaagagaggcaaatagattaagatagcaatgtcttgcacttcctgtttccctcaaaacaacaccacattgtggggcgcaggata

SEQ ID NO: 67367 - DNA, 120 bp, Artificial Sequence
  ENSG00000075391_62 (sequence is synthesized)
gatcagggttgagtggaatttggaattcaggtgaagtgcttgtaaagtgcatgtctagctgacaacagacttgaccattaatgaggacagtgttggtaggagtcagaaaagagcttcata

SEQ ID NO: 67368 - DNA, 120 bp, Artificial Sequence
  ENSG00000075391_63 (sequence is synthesized)
ttccccttttatattactgaagcaataagcaatctgagctgaagcagcaaaaagagtcacatttccatcaggtcatcatattccctgagtctctgcagcaaaagccatgtcagaggggag

SEQ ID NO: 67369 - DNA, 120 bp, Artificial Sequence
  ENSG00000075391_64 (sequence is synthesized)
attataactaggtaactataacaagcacttgagcacttaccatgttccaagcactatcaccaaggtactgttggggtttatggcagtctaacggtaagaaaaatgtggtaaaatgaggta

SEQ ID NO: 67370 - DNA, 120 bp, Artificial Sequence
  ENSG00000075391_65 (sequence is synthesized)
atcatgctgctatagctttttgctttttttcatatagtatcaagttggtcagaattagctttctctgactggtctgcttccgtgtttctctgtgatggtgttaagattatgaaagaaaaa

SEQ ID NO: 67371 - DNA, 120 bp, Artificial Sequence
  ENSG00000075391_66 (sequence is synthesized)
gaagattacctaagactgctacaagtgttaactatatgcccttaagaatgagcttgactttggaagtaaagcttttcagatcttagtctacccggggcctttgttgatgggtctgtggtt

SEQ ID NO: 67372 - DNA, 120 bp, Artificial Sequence
  ENSG00000075391_67 (sequence is synthesized)
ctgtagacccctggctttcactgtgttctcagaggtacaccagattgagagcagagttcttctttggaagtcccagagcaaaataactgccatcaagtgagtttgcattcgtatttgttt

SEQ ID NO: 67373 - DNA, 120 bp, Artificial Sequence
  ENSG00000075391_68 (sequence is synthesized)
ggctggttataggactgagcgtgggaaaggaaccctcttcaggattacctcagtcccatcagtctaccccattgtgacattgagcccaacacacacgcttgacaccagactagacttgtc

SEQ ID NO: 67374 - DNA, 120 bp, Artificial Sequence
  ENSG00000075391_69 (sequence is synthesized)
acagggccaaacccaacagccacatgccatagcttcactgcattttcagctacacctttggaggccaccttctcctatcaactgtggaaagccagaagggctcccttctccattctcctt

SEQ ID NO: 67375 - DNA, 120 bp, Artificial Sequence
  ENSG00000075391_70 (sequence is synthesized)
ccctttttcaagtctaatagtgaaatctcctgcttaccccagcagtaaatagttgccttcctaccccttacctgggggccgataatttgagatactttgttttttcaatgcgtcagttga

SEQ ID NO: 67376 - DNA, 120 bp, Artificial Sequence
  ENSG00000075391_71 (sequence is synthesized)
aggatttagtttcttaaaagcaagaaatgttggagtgttgaatttttaaatagaatctcttttcatgtttgaatgattgttattagttctagaagcattctctttgtcatgacccgatta

SEQ ID NO: 67377 - DNA, 120 bp, Artificial Sequence
  ENSG00000075391_72 (sequence is synthesized)
tgtatactcttgggtttaggaaggacaaaagtgatgaaatttgcatgagatagaataaatatcttaggaggagtgaaagaacctgaggaagagacacgaccctaagggaatgaatgcata

SEQ ID NO: 67378 - DNA, 120 bp, Artificial Sequence
  ENSG00000075391_73 (sequence is synthesized)
agcagtcttctcagtagcccagagtttccaggaaacaggaatatttatatcccttgcccactcttaaaatacatagatacataaaaaggcagtctctgtagacaacacatgcacacaccc

SEQ ID NO: 67379 - DNA, 120 bp, Artificial Sequence
  ENSG00000075391_74 (sequence is synthesized)
acacaaaacataattcctggggcttcctttttctgaatgttaatccattttatcgagcagtgattcccaaactttgagattttcagattttatgctctcgtctgttagattttatgacat

SEQ ID NO: 67380 - DNA, 120 bp, Artificial Sequence
  ENSG00000075391_75 (sequence is synthesized)
tctatcatcctaaaaaatgtactatatgtgttatatgtatatataagttaaagcaacttgaaattgacttggtttggcattgtctcaagaaccctagatatcattattgataccatgggg

SEQ ID NO: 67381 - DNA, 120 bp, Artificial Sequence
  ENSG00000075391_76 (sequence is synthesized)
aatcatagaaataaagttgaatatcattgatctgagagtaggatccagaaataagtagtttcagttcctgatcagttaagcctcaagtgtttgagtaaccaacacagcaagacttgggaa

SEQ ID NO: 67382 - DNA, 120 bp, Artificial Sequence
  ENSG00000075391_77 (sequence is synthesized)
atgcagtgagcacccgaggaaaggaaagtggtagtctttgcctgcatttcagcatgcattttcctttcctactcagttgctatcttccacttaaataccctcatttgaccctaggaagtt

SEQ ID NO: 67383 - DNA, 120 bp, Artificial Sequence
  ENSG00000075391_78 (sequence is synthesized)
ttttgtttttttttttagtttgagacttaaaaccagatttatttgttgttgtagagagatttccacagaagttgtgttttagggacctccatcatctttgtgggggtacagatatttatg

SEQ ID NO: 67384 - DNA, 120 bp, Artificial Sequence
  ENSG00000075391_79 (sequence is synthesized)
tgtaaatatcattttatgtgatttccaaattttcgagggaaacatttcaattcccagttcaacaaaaggttaaatactaattgactcaatgaccaccttcaggaaagttaaatagtaaat

SEQ ID NO: 67385 - DNA, 120 bp, Artificial Sequence
  ENSG00000075391_80 (sequence is synthesized)
taggttaaattttgactggtgcttagacatttcctagttatattaacttaagcagacagcagcacattaacctgagttacacctgtgaggaaatgaccttctaaatttgattttgttttt

SEQ ID NO: 67386 - DNA, 120 bp, Artificial Sequence
  ENSG00000075391_81 (sequence is synthesized)
catctccagggccttaataagagtgtgttaacacacgactattttacaatgatagctctaaataatttattttttatttcaagaaagagaaatacaccttagaaaaacaaaacccaagat

SEQ ID NO: 67387 - DNA, 120 bp, Artificial Sequence
  ENSG00000075391_82 (sequence is synthesized)
tttattttatttttaaagccatatttttgtgctagtagcatttagattattccgtatgtgagatccgtatcagcatttcattacctgggtttgttctaaagaagatttatttttgttctg

SEQ ID NO: 67388 - DNA, 120 bp, Artificial Sequence
  ENSG00000075391_83 (sequence is synthesized)
tgaataatttttgacagttcttgtacatgtacagatatagatacgtttgaggtcttttattgatattcctacaaagaatacaaataaactttaactttaaacatttcagactaaagttgc

SEQ ID NO: 67389 - DNA, 120 bp, Artificial Sequence
  ENSG00000075391_84 (sequence is synthesized)
tactatatttgacatattgctgtcttctagcatgcacctgggtgactaggacacttgaagagaaacaagaaaggaaatgtatgccggaatattcttctaaaaatatattttaacattaag

SEQ ID NO: 67390 - DNA, 120 bp, Artificial Sequence
  ENSG00000075391_85 (sequence is synthesized)
aacagtctgtcctagaatttcccaacttccatgtaataagatttcaatttaggaaaaataactagcattagcatgtattgtgataaaactgttactttcgaattctgcagaatttgaaat

SEQ ID NO: 67391 - DNA, 120 bp, Artificial Sequence
  ENSG00000075391_86 (sequence is synthesized)
ctctttaataacttgtgacaggtaaagaaagtttcatctggtttattaggaaatgtagccccacttagcttcctagaccactaccatcctcttgtaattttccagttagattaatggggt

SEQ ID NO: 67392 - DNA, 120 bp, Artificial Sequence
  ENSG00000075391_87 (sequence is synthesized)
ttgttttcaggatttttgatgtttggttcaggttttttattttaatttcttaatagaagttcatttgtcattcccaacatgattgttcccaaatacacccatcttctcctgcatccctgt

SEQ ID NO: 67393 - DNA, 120 bp, Artificial Sequence
  ENSG00000075391_88 (sequence is synthesized)
ttcattctgtaaaatccagggatgcaggtttcatgtgtagtcttgttttgtgttagttgtaggtctgtgctttttggcacatgtcgagttcttcctaatcttgttctactagggattaaa

SEQ ID NO: 67394 - DNA, 120 bp, Artificial Sequence
  ENSG00000075391_89 (sequence is synthesized)
aaattaaaatttactcaaaatccagagaagattgcatgaaacagaaactgcatatccaagaattgtgctattttttgttcacttcgaagctgacccatttcagtctaaattgttcgtgac

SEQ ID NO: 67395 - DNA, 120 bp, Artificial Sequence
  ENSG00000075391_90 (sequence is synthesized)
ctaatgtaagctttaagacttcctggatctgaaacatcaaaaagagagaaagtgttgatgcggtctttttacttcatggtcctcttagccctaaactatccatccgtataccctttatgc

SEQ ID NO: 67396 - DNA, 120 bp, Artificial Sequence
  ENSG00000075391_91 (sequence is synthesized)
atatccataccctgtaattgtttttagcctccctccagctgcctgactttttttattagcattttaccagtaggaaaatacataaattaattttgttagcaaaaaaaaaaatttaatgac

SEQ ID NO: 67397 - DNA, 120 bp, Artificial Sequence
  ENSG00000075391_92 (sequence is synthesized)
aaaaaaaaaaatttaatgacaaagaacactaaaacagatgactaaatcagtggttttcaatcctgattgttcatcagaatcactggagagttgtttaaaaaaaaaaaaaaagaaaaaaaa

SEQ ID NO: 67398 - DNA, 120 bp, Artificial Sequence
  ENSG00000075391_93 (sequence is synthesized)
aaaaaaaaaaagaaaaaaaacagaggagtacctcttgagctccaccattgaacaattaaatagaatctctctaaggattgggcctggccaggcttttttttttttttttttctttttaac

SEQ ID NO: 67399 - DNA, 120 bp, Artificial Sequence
  ENSG00000075391_94 (sequence is synthesized)
tagtccaaatcaagctgtgagcactgtgcgtagctgtcttaaaatgttttctgtccccaatcctgaaactggggtaagttggttacaggtgtttccttcccttctatttggaatttaaaa

SEQ ID NO: 67400 - DNA, 120 bp, Artificial Sequence
  ENSG00000075391_95 (sequence is synthesized)
ttctactaaaactgacaatatatactcagccttcccccacatacaccttgtccccaccaatctgtcctttaagtctgtgaggtagaaattctctccattaacatggtcatcccatttatg

SEQ ID NO: 67401 - DNA, 120 bp, Artificial Sequence
  ENSG00000075391_96 (sequence is synthesized)
gaatagatacattctgacaaagctgaccagaagatggaattccctatttcgacctcagtttccccactggcttcaatttaaagcagaaggtaggtggcttctggtttggagtcagaagct

SEQ ID NO: 67402 - DNA, 120 bp, Artificial Sequence
  ENSG00000075391_97 (sequence is synthesized)
gagtcagaagcttcaatgagtacaccccttgaggagtgctgaagggcccaggccagaatcaaatatgctacatttgactttaaagagtaaacaacagtggctcacgcctgtaatcccagc

SEQ ID NO: 67403 - DNA, 120 bp, Artificial Sequence
  ENSG00000075391_98 (sequence is synthesized)
ataaaaattaaaaaaaaaagtaaacaacatagagaactcaaaagttcctttgtctacctccaccaccccccaccaaaaaaaaaggcccttaactacatttgactttaaggaataaacata

SEQ ID NO: 67404 - DNA, 120 bp, Artificial Sequence
  ENSG00000075391_99 (sequence is synthesized)
agagaactcagaattcctttgtctctccccacccaaaaaaaaagaaaaggttcttaacttttcttgacctaatattcagcactgaagtcttattacttgaaacttatcagatgctaaatt

SEQ ID NO: 67405 - DNA, 120 bp, Artificial Sequence
  ENSG00000075391_100 (sequence is synthesized)
acaccattcatacttattgttctttcaatagcaaaatgtactgaaagctctccagtcccccctccactcctggcaagcatgcagtcacgtgctcgtgtgaattttccaaaatcatgagca

SEQ ID NO: 67406 - DNA, 120 bp, Artificial Sequence
  ENSG00000075391_101 (sequence is synthesized)
tcgtgtgaattttccaaaatcatgagcattttgtaagattcagttggttatatgaaattacaataaagagtattatatattttattataatttgtaaattgtgtgctatacattctttat

SEQ ID NO: 67407 - DNA, 120 bp, Artificial Sequence
  ENSG00000075391_102 (sequence is synthesized)
acattatatactcacacacacatattactggtctttctagaaacttgattttgtgaaattctagaatgaattcccagggtgatatttgtttggcctatgaataaattgcaatgaactaac

SEQ ID NO: 67408 - DNA, 120 bp, Artificial Sequence
  ENSG00000075391_103 (sequence is synthesized)
aggtaaatgccaatgtttccttgtctgtaaaattaagattgtggctaaatggtgtatagggtactctctagcactgacattctgtggttattatctgatataattgagaaatgtgtcctt

SEQ ID NO: 67409 - DNA, 120 bp, Artificial Sequence
  ENSG00000075391_104 (sequence is synthesized)
agactatgttcaaaaatcggcttgaagcttttctctcagtatttaggaacaattcttcctccacagtctcccatggcacagtagtttttaagaaccaaaaaaaataaagtctggaacaaa

SEQ ID NO: 67410 - DNA, 120 bp, Artificial Sequence
  ENSG00000075391_105 (sequence is synthesized)
aaaataaagtctggaacaaatgtatattcagaacactacagtgataatgttgataataataatagctggccaggcgtagtggctcacgcttataatcccagccctttgggaggctgaggc

SEQ ID NO: 67411 - DNA, 120 bp, Artificial Sequence
  ENSG00000075391_106 (sequence is synthesized)
agaattggaggttgcagtgagctataatcacaccattgcactccagccaaggtggacaaagcaagaccctgactcaaaaataatagctaatgtttattgagcaccaactatgtgtcagat

SEQ ID NO: 67412 - DNA, 120 bp, Artificial Sequence
  ENSG00000075391_107 (sequence is synthesized)
tatttgctaagcactttatatggaatatatcatttaatcataacaccaaccatgtgagttaggcattattattatcattcttatttcaggaggaaactgaggctcagaaagactaagtta

SEQ ID NO: 67413 - DNA, 120 bp, Artificial Sequence
  ENSG00000075391_108 (sequence is synthesized)
ggctcagaaagactaagttacttgcccaaagctacacaatggataagggcaaaactaagacccacgctcagatccctctgaccgtgctgtcttgaccaaaaaaaaacaaaaaaacaaaaa

SEQ ID NO: 67414 - DNA, 120 bp, Artificial Sequence
  ENSG00000075391_109 (sequence is synthesized)
aggaaagacattggagagggtaagaaaagatccaaaaagatcttgccacataaccaacttgtcaccatgagccaaagtgatggcagtggaacaagatgaggtcatattccacaggttttc

SEQ ID NO: 67415 - DNA, 120 bp, Artificial Sequence
  ENSG00000075391_110 (sequence is synthesized)
caccttaatatattggtttttataagattgtcttgcaatgtccaatcatctgatcagaattagaagagtgtgcagaagtctcacctgtctcagaaattggtctttcatctcttctgggtc

SEQ ID NO: 67416 - DNA, 120 bp, Artificial Sequence
  ENSG00000075391_111 (sequence is synthesized)
catcagagttgagatggtaaagtctgctttcaagattccaaaagggtgccctgaaaaagaaagtgctacctgttcagggggatattatcctatttccatttcaagttcttagcagtcagg

SEQ ID NO: 67417 - DNA, 120 bp, Artificial Sequence
  ENSG00000075391_112 (sequence is synthesized)
agcacccggtggacaccatagatgctacatgttgatttgggatttcaagaagaagaaagaaactgctgagcagaagaatgctcagccacaattagggttaaccaattagtggctgaaaaa

SEQ ID NO: 67418 - DNA, 120 bp, Artificial Sequence
  ENSG00000075391_113 (sequence is synthesized)
aagagtcccatgctttgggtaatgcgaagtcttccacagcctggctacccatcaggcaattattttcttttttgtttcttctgtatttttctccttacttttaatccagtaagtagatac

SEQ ID NO: 67419 - DNA, 120 bp, Artificial Sequence
  ENSG00000075391_114 (sequence is synthesized)
tccacaccatgccggaaatactcatctctccttgagctccccaccacagaaaattctaaagaagttctctgactttttaaataaatccagcctttgcccgtgagccatccataatcatta

SEQ ID NO: 67420 - DNA, 120 bp, Artificial Sequence
  ENSG00000075391_115 (sequence is synthesized)
caggaactacaatctcataataagactatatttgcattgcattttattgtttataaagtttatagttatctcattgggtgctcacaacaacgctgtgatataggcagggtagtttttacc

SEQ ID NO: 67421 - DNA, 120 bp, Artificial Sequence
  ENSG00000075391_116 (sequence is synthesized)
acatccccttcacagaagagaaatagaaattcagaaacttgtcccctaagttttcataatagtcatggagcataaactagaatccacctctttattactatccctattcccaacatttca

SEQ ID NO: 67422 - DNA, 120 bp, Artificial Sequence
  ENSG00000075391_117 (sequence is synthesized)
tgctgtctttcatgaaaaggtctcaagggccctgtgccaaggagtgactgtccagatttaactgctccactggtaagagtaggaacttggtagacagaagcagttacctgatttttgtgc

SEQ ID NO: 67423 - DNA, 120 bp, Artificial Sequence
  ENSG00000075391_118 (sequence is synthesized)
tgatgttttttctttagattctgaactcagatgttgggcctccgtggcagcagctgtatctcttctatcagtgccactccctacactggccacagctacaggaggggaaaataaaagatt

SEQ ID NO: 67424 - DNA, 120 bp, Artificial Sequence
  ENSG00000075391_119 (sequence is synthesized)
tattgcaaatacaaccaggagtaaggtggcctgatattggtgactgcccctgagctaaaagacaggcaaggacagccactgctaggcacacagttgctgcagaagccagcgatgtgggaa

SEQ ID NO: 67425 - DNA, 120 bp, Artificial Sequence
  ENSG00000075391_120 (sequence is synthesized)
gctcaattcctgccaatccctgactcacccctacaggctcttttaacccagcacttgagttgctacaccatcatctttcagaaagcccccctggcagcaggacctgtggggcttgggcaa

SEQ ID NO: 67426 - DNA, 120 bp, Artificial Sequence
  ENSG00000075391_121 (sequence is synthesized)
tgttaggaggtttttcctcatcaaattttttttgttcagtagcctgtgctccaaagggcctaatgtccttattttgtctgccagctacacaaagcccccaccatggcacccagggaccct

SEQ ID NO: 67427 - DNA, 120 bp, Artificial Sequence
  ENSG00000075391_122 (sequence is synthesized)
caatatcgccatctccatcccaaaccaagttcaggctctcccccagcaccccctctcttcctgtatggctggccatgcccggaggcgctccagccagagaccctggtgtcctcagcggct

SEQ ID NO: 67428 - DNA, 120 bp, Artificial Sequence
  ENSG00000075391_123 (sequence is synthesized)
cccttgctccatctcacctgctctcatgttcagtcaccaaagtcctgtcagtgccttgcagatgtcttattttttcaaatatggaaataatccttttatttggaatatattattgtaaaa

SEQ ID NO: 67429 - DNA, 120 bp, Artificial Sequence
  ENSG00000075391_124 (sequence is synthesized)
tatgtaagcaaatttgtcccctccccaacccagggacacccatgattaacactttgctgtagaaggtccttcacactctcgaatttgttaatttgaatgtgtaaagatctcccttgttct

SEQ ID NO: 67430 - DNA, 120 bp, Artificial Sequence
  ENSG00000075391_125 (sequence is synthesized)
ctttaaaggctgcatagtagtatttcactgaatgtaccataacttatttaaccgatctgctttcagtggacattacgttgtttccaccttttcactgtaataaacaatgccgcaacaaac

SEQ ID NO: 67431 - DNA, 120 bp, Artificial Sequence
  ENSG00000075391_126 (sequence is synthesized)
ctgatttcgatttcctttctttcctcgatgtctgccgcaccttgtttcgcctcctccattcatctcgacgccatggttctgctgctccataacaatgcattatgaacctgccactcccat

SEQ ID NO: 67432 - DNA, 120 bp, Artificial Sequence
  ENSG00000075391_127 (sequence is synthesized)
atgcaaacacttacccttccctccaacctacacccctccatcaatggccatcgttgtgccaaaaacaatctgtggtggatgtcgcaatgcttattatccaattagggtgaaaattccttc

SEQ ID NO: 67433 - DNA, 120 bp, Artificial Sequence
  ENSG00000075399_0 (sequence is synthesized)
ccctcggctaccgccgccgcctcccccgctcggcgccatggccgctgcggccggggacggcacggtgaagccgctgcagagcgccatgaagcttgccaacggggccatcgagctggacac

SEQ ID NO: 67434 - DNA, 120 bp, Artificial Sequence
  ENSG00000075399_1 (sequence is synthesized)
cggcaaccggccccgggaggcatacacggaatacctgaggagcatccactatatctcccaggtgttactagaagaagtggaaaccactaaagaagctggggaaactgtgccccccgacac

SEQ ID NO: 67435 - DNA, 120 bp, Artificial Sequence
  ENSG00000075399_2 (sequence is synthesized)
ctccaagatgctgaagctagcacagcagtgtctggagagggcccagtcgacggccgccaagcttgggaaaacacgcctgaagccaaccatgcctgcagctgctcccattccccagcctgc

SEQ ID NO: 67436 - DNA, 120 bp, Artificial Sequence
  ENSG00000075399_3 (sequence is synthesized)
cggccgacaccgccgtgtatactccgatgaaggaggaaagctctctccttttctgccacccgagatcttccagaagcttcagggggcagagtcacaaagctgtaagaaagagctgacgcc

SEQ ID NO: 67437 - DNA, 120 bp, Artificial Sequence
  ENSG00000075399_4 (sequence is synthesized)
actggaggaggcctccctgcagaatcagaagctgaaggctgcgtatgaggcccgaatggcgcggctagaccccagccaggccatgcagaagacatccctgaccctctctctacagcggca

SEQ ID NO: 67438 - DNA, 120 bp, Artificial Sequence
  ENSG00000075399_5 (sequence is synthesized)
gatgatggagaacctagtgattgccaaagcccgggaggagacactccagagaaagatggaggagcgccggctgcggctccaggaggccgccaacaggaggttttgcagccaagtcgccct

SEQ ID NO: 67439 - DNA, 120 bp, Artificial Sequence
  ENSG00000075399_6 (sequence is synthesized)
gaccccggaggaacgggagcagcgggccctttacgccgccatcctggagtacgaacaggaccatgactggccgaagcactggaaggccaagctcaagaggaatccgggggacctgtcact

SEQ ID NO: 67440 - DNA, 120 bp, Artificial Sequence
  ENSG00000075399_7 (sequence is synthesized)
cgtgaccagcctggtctcacacctgctcagcctccccgaccacccgatcgcgcagctcctgaggcggctgcagtgctccgtgtacagcgccctgtatcccgccgtgagcagagcagccgc

SEQ ID NO: 67441 - DNA, 120 bp, Artificial Sequence
  ENSG00000075399_8 (sequence is synthesized)
caggctgctgccccccgacccccaaccccggaagccgacggctgcggccctcgcagagcctccattgcatgctgtccccgcccgagcccagcgcagccccgcggccccaggacagtcccc

SEQ ID NO: 67442 - DNA, 120 bp, Artificial Sequence
  ENSG00000075399_9 (sequence is synthesized)
cagtccccccacgcccccactccaacccggccccgtggggtctccctcacccctgggggacaccgcatctggattgccagacaaggacagctcgttcgaggacctggagcagttcctggg

SEQ ID NO: 67443 - DNA, 120 bp, Artificial Sequence
  ENSG00000075399_10 (sequence is synthesized)
gacgtctgagcggcagggccggggccgtggggtacagccggagccccagctgcagcagctgaagaccgcggtggaggagatccacaatgccgtagacaggctgctctcgctgacccttct

SEQ ID NO: 67444 - DNA, 120 bp, Artificial Sequence
  ENSG00000075399_11 (sequence is synthesized)
cagctgcctccaaggaccgctgcctggcctgcattgaggaaccctttttctccccgctgtggcctctgctgctggccctgtacaggagcgtgcaccgagcccgggaggctgccctgagca

SEQ ID NO: 67445 - DNA, 120 bp, Artificial Sequence
  ENSG00000075399_12 (sequence is synthesized)
ggagcatggagctctacaggaatgcaccccccaccgccattggcatccccaccaagctcctcccccagaaccctgaggccaagggggccactggctacccctactgcgcggcggcccagg

SEQ ID NO: 67446 - DNA, 120 bp, Artificial Sequence
  ENSG00000075399_13 (sequence is synthesized)
agctcggactgctggtcctggagagctgcccccagaagaagctggagtgcatagtgcggaccctgcggatcatctgtgtctgtgcggaagactactgccccaccccagaggccacacccc

SEQ ID NO: 67447 - DNA, 120 bp, Artificial Sequence
  ENSG00000075399_14 (sequence is synthesized)
aggccgggcccccgcccatcgctgcagctgccattggtgccgatgacctgctgcccatcctgtccttcgtggtgctgaggagcggcctccctcagctggtgtcggagtgcgcggccctgg

SEQ ID NO: 67448 - DNA, 120 bp, Artificial Sequence
  ENSG00000075399_15 (sequence is synthesized)
aggagttcatccacgaggggtacctgatcggagaggagggctactgcctcacatcactgcagagtgccctgagctacgtggagctgctgccccggggaggcctggccaagtagtacagct

SEQ ID NO: 67449 - DNA, 120 bp, Artificial Sequence
  ENSG00000075399_16 (sequence is synthesized)
agagcccagggtccctgcagggcctggcctcgcctcccagggctgtctctcctacacctggagccatgggatctactgaggaccatcctggagcctcacgctgctctgcacatggtgggg

SEQ ID NO: 67450 - DNA, 120 bp, Artificial Sequence
  ENSG00000075399_17 (sequence is synthesized)
gcttgtccactgtggtgtgctctccagctcttcaccttcctcacctcacatctgaccctggagcttggggttggcacctctgccccgacagaatggggctgaatcagctccaggaggaac

SEQ ID NO: 67451 - DNA, 120 bp, Artificial Sequence
  ENSG00000075399_18 (sequence is synthesized)
caggccctgctctcctgtgtaggcctcagagaggccaagaagggaagctttgggcttcggtgggtgcaggctcagcgatgaacatctggctggggcagctcctggggagcatcagggaag

SEQ ID NO: 67452 - DNA, 120 bp, Artificial Sequence
  ENSG00000075399_19 (sequence is synthesized)
agggggccatgagccggccagcagtggagacggcagtccagtttctctcccctctgacccctagaaggggagttgtagccccatgaactagtttcttgtctgggtcaggaacaagggccg

SEQ ID NO: 67453 - DNA, 120 bp, Artificial Sequence
  ENSG00000075399_20 (sequence is synthesized)
gctggggcctggggtgcagctggtgtcagggtatgctgtttgctgatgggcagggacacccctgcagggtctcgggctctgagcccaggacattccctgccccttactcaccttggctgt

SEQ ID NO: 67454 - DNA, 120 bp, Artificial Sequence
  ENSG00000075399_21 (sequence is synthesized)
gggctgtgaacattccgggaccctgggcatcttatctaggtccgtgcagcccaagggtcagccctcttgactgtcacatgctgcccccacccagcctaaaataaagagctcactgctgtg

SEQ ID NO: 67455 - DNA, 120 bp, Artificial Sequence
  ENSG00000075399_22 (sequence is synthesized)
atgaggtccagctcgtccctggctctctctctctctcaggtcctgatgtcttttccaagtctggagagcagcgatgctgcctgtgccctgcgcagaaaaccgtgttccggctgcagctaa

SEQ ID NO: 67456 - DNA, 120 bp, Artificial Sequence
  ENSG00000075399_23 (sequence is synthesized)
ccaccgcaggctcaatgtctctgggtgtatctcagagataagcaggtggtggtgttccttgcttatcccacaagggcacctggccggaataatggagtcacttccctccactggcctgac

SEQ ID NO: 67457 - DNA, 120 bp, Artificial Sequence
  ENSG00000075399_24 (sequence is synthesized)
cgcccggccttagcctcctaaagtgctggcattagaggcgggagccactgcacctggccaaaacctgtgttttggaagggcaggcaagaaggggcagatgttgcagcccaccccagatgg

SEQ ID NO: 67458 - DNA, 120 bp, Artificial Sequence
  ENSG00000075399_25 (sequence is synthesized)
ctcccctcctctttctcctcacctcctggcctcagagcaatccgggaggatgagagagactcctctggtgtccagacaccactgggcttcctggggtctagacagcagcttgtcacattt

SEQ ID NO: 67459 - DNA, 120 bp, Artificial Sequence
  ENSG00000075407_0 (sequence is synthesized)
ggagatgtagtgtgcacttttcggcccccgtcgcgggagccgcttcgggccttctgggcatgtctgccatatggctccaggtttgtttttctccccggcactctgacggggagggctccc

SEQ ID NO: 67460 - DNA, 120 bp, Artificial Sequence
  ENSG00000075407_1 (sequence is synthesized)
ggcatctcctggcgtccgggtagaggacgcggagggtcgcagcttcattgcctgatgtcttcgggaagtattttgaagtcatcgtggctgtggattggggaatttcttgtttccactgac

SEQ ID NO: 67461 - DNA, 120 bp, Artificial Sequence
  ENSG00000075407_2 (sequence is synthesized)
ctgtgaggccgcgcacgcggagggaggcaccccaggccctccggcactgtccagcctcgcctgtgtccccattagcaccagtgggcattttcagagggtccagctcatggctcaagtgac

SEQ ID NO: 67462 - DNA, 120 bp, Artificial Sequence
  ENSG00000075407_3 (sequence is synthesized)
aggaagatgtaggagctttctgtcttgaatgaggattcgaaccaaagggcttaggcccagctgtcttggagcaaagcagctgttgtgggacccccacaggctgggagctttgtgcccatt

SEQ ID NO: 67463 - DNA, 120 bp, Artificial Sequence
  ENSG00000075407_4 (sequence is synthesized)
cagatgtgggggcagaagagggcaaggccgaaggagcagacagcaccgcttcttggggagttgtgaaggcatcatgcggagggaagagcttagcagccaagtggaggacagcaccctcca

SEQ ID NO: 67464 - DNA, 120 bp, Artificial Sequence
  ENSG00000075407_5 (sequence is synthesized)
tgcctggattcgttactcgctcgttctagatgctgagctgctggcgcactgcagcacaactagagatgtacggatgcccccatcttgatcttacagaatcagaggtacagccgcgagaaa

SEQ ID NO: 67465 - DNA, 120 bp, Artificial Sequence
  ENSG00000075407_6 (sequence is synthesized)
ggtctagtcaagaacagacagagtcgcttgaggactcaggagggtgtttgctgcgttgacaacagactacaccctcacagtttgctctgctcttccaacaccagtggaagatgatcacat

SEQ ID NO: 67466 - DNA, 120 bp, Artificial Sequence
  ENSG00000075407_7 (sequence is synthesized)
cccagggatcagtgtcgtttagggatgtgactgtgggcttcactcaagaggagtggcagcatctggaccctgctcagaggaccctgtacagggatgtgatgctggagaactacagccacc

SEQ ID NO: 67467 - DNA, 120 bp, Artificial Sequence
  ENSG00000075407_8 (sequence is synthesized)
ttgtctcagtagggtattgcattcctaaaccagaagtgattctcaagttggagaaaggcgaggagccatggatattagaggaaaaatttccaagccagagtcatctggaattaattaata

SEQ ID NO: 67468 - DNA, 120 bp, Artificial Sequence
  ENSG00000075407_9 (sequence is synthesized)
ccagtagaaactattcaataatgaagttcaatgagtttaacaaaggtggaaaatgtttctgtgatgaaaagcatgaaataattcattctgaagaggaaccttctgaatataataaaaatg

SEQ ID NO: 67469 - DNA, 120 bp, Artificial Sequence
  ENSG00000075407_10 (sequence is synthesized)
ggaacagcttctggctgaatgaagacctcatttggcatcagaaaattaaaaattgggaacaatcttttgaatacaatgaatgtgggaaagctttccctgagaattcactcttccttgtac

SEQ ID NO: 67470 - DNA, 120 bp, Artificial Sequence
  ENSG00000075407_11 (sequence is synthesized)
ataagagaggttacacaggacagaaaacctgcaaatatactgaacatgggaaaacctgtgatatgtcatttttcatcactcatcagcaaacacatccaagagaaaaccactatggtaatg

SEQ ID NO: 67471 - DNA, 120 bp, Artificial Sequence
  ENSG00000075407_12 (sequence is synthesized)
aatgtggagaaaatatctttgaggaatccattctccttgaacatcagagtgtttacccattcagccagaagttaaatctcactccaattcagagaacccactcaattaacaatattattg

SEQ ID NO: 67472 - DNA, 120 bp, Artificial Sequence
  ENSG00000075407_13 (sequence is synthesized)
aatataatgagtgtggaacatttttcagtgaaaaattagtccttcatttacaacagagaacacatacaggagaaaaaccttatgaatgtcatgaatgtggaaaaaccttcacccagaagt

SEQ ID NO: 67473 - DNA, 120 bp, Artificial Sequence
  ENSG00000075407_14 (sequence is synthesized)
cagcccacacaagacatcagagaacacacacagggggaaaaccctatgaatgtcatgaatgtgggaagaccttctataagaattcagacctcattaaacatcaaagaattcatacagggg

SEQ ID NO: 67474 - DNA, 120 bp, Artificial Sequence
  ENSG00000075407_15 (sequence is synthesized)
agagaccttatggatgtcatgaatgtgggaaatccttcagtgaaaagtcaacccttactcaacatcaaagaacgcacacaggggagaaaccatatgaatgtcatgaatgtgggaaaacct

SEQ ID NO: 67475 - DNA, 120 bp, Artificial Sequence
  ENSG00000075407_16 (sequence is synthesized)
tctcatttaagtcagtccttactgtgcatcagaaaacacacacaggggagaagccctatgaatgctatgcatgtgggaaagcctttctcagaaaatcagacctcattaaacatcaaagaa

SEQ ID NO: 67476 - DNA, 120 bp, Artificial Sequence
  ENSG00000075407_17 (sequence is synthesized)
tacacacaggtgaaaaaccttatgaatgtaatgaatgtgggaagtcattctctgagaagtcaacccttactaaacatctaagaactcacacaggtgagaaaccttatgaatgtattcagt

SEQ ID NO: 67477 - DNA, 120 bp, Artificial Sequence
  ENSG00000075407_18 (sequence is synthesized)
gtggaaaatttttctgctactactccggtttcacagaacatctgagaagacacacaggggagaaaccttttggatgtaatgaatgtgggaaaaccttccgtcagaagtcagccctaattg

SEQ ID NO: 67478 - DNA, 120 bp, Artificial Sequence
  ENSG00000075407_19 (sequence is synthesized)
ttcaccagagaactcatataagacagaaaccctatggatgtaatcaatgtggaaaatcattctgtgtgaagtcaaaactcattgcacatcatagaacacacacaggggagaaaccctatg

SEQ ID NO: 67479 - DNA, 120 bp, Artificial Sequence
  ENSG00000075407_20 (sequence is synthesized)
aatgtaatgtttgtggaaaatcattctatgttaagtcaaaactaactgtacatcagagaatacacttggggagaaaccctataaatgtagtaaacgagggaaattactctgggtgaagtc

SEQ ID NO: 67480 - DNA, 120 bp, Artificial Sequence
  ENSG00000075407_21 (sequence is synthesized)
agaactttgtagaacacagaacataaagggtgagagaaatctgttaatataatgataatgagaacacctttgccctgaagtcagttctcacagtatagaagagaacttaaagagggaaaa

SEQ ID NO: 67481 - DNA, 120 bp, Artificial Sequence
  ENSG00000075407_22 (sequence is synthesized)
aacaatatgaagatagggaatgcaggaaaacattattctggaatttggaccatacactatgttacaaaactaaaagtggaaaaaacttattggtgaatgaatataggaaacattttgccc

SEQ ID NO: 67482 - DNA, 120 bp, Artificial Sequence
  ENSG00000075407_23 (sequence is synthesized)
aatgccactcttcattaaacatcagagaattcacacggggtgaaacctgggtcagcatccctaggttgagaagggatgcatttttctgctactactacagtttcacagaatacctgagaa

SEQ ID NO: 67483 - DNA, 120 bp, Artificial Sequence
  ENSG00000075407_24 (sequence is synthesized)
gacacacttggagaaaccttttgggtgtaatgaatgtgggaaaacctttcatcagaagtcagctctaattgttcaccacagaactcatataagacagaaaccctatgggtgtaatgaatg

SEQ ID NO: 67484 - DNA, 120 bp, Artificial Sequence
  ENSG00000075407_25 (sequence is synthesized)
tggaaaatcattctgtgtgaagtcaagaggccagagaaaatgcacaaactgtaggaaactataggaaagcatttactatgaggttatattttatggagtatatgtaataagaagtagctt

SEQ ID NO: 67485 - DNA, 120 bp, Artificial Sequence
  ENSG00000075407_26 (sequence is synthesized)
ctcagtgaacatcagatagtagagaaagtatttttaactgtatccaatgtgtggatgttttaagttaaaatctaaatttaatatagaacagaggtgttgagttgcaggatatctagcaat

SEQ ID NO: 67486 - DNA, 120 bp, Artificial Sequence
  ENSG00000075407_27 (sequence is synthesized)
ttaagaaaatgtggaaaaaatatttttattgagaaatagcattttactttgttaatatctagtttagttcattgtcaagactgctattttctaagagacttctaaagacgccactcaagc

SEQ ID NO: 67487 - DNA, 120 bp, Artificial Sequence
  ENSG00000075407_28 (sequence is synthesized)
caatggctataagtagttcaaaggtttattgcttagccatatgaaaaataagggaagattttttagcaaggggacccacaaacaagagtgctcttgtatgtccagaagaaagagaaagac

SEQ ID NO: 67488 - DNA, 120 bp, Artificial Sequence
  ENSG00000075407_29 (sequence is synthesized)
attcagacgacccatctcagaatggtggatcaaagcagcaagtcaatttgccttgtatgcaacttatgaggattagtagaagagagtgggtccagatttctggtggtttctgccctgcag

SEQ ID NO: 67489 - DNA, 120 bp, Artificial Sequence
  ENSG00000075407_30 (sequence is synthesized)
atgtctaacacataagccaggacattctgctgtgagtgacttattgtacccaactctatttctctccatactgaaacatgtctttcataggtgatacaactttttaaaatgtatgtgtag

SEQ ID NO: 67490 - DNA, 77 bp, Artificial Sequence
  ENSG00000075407_31 (sequence is synthesized)
tctttcataggtgatacaactttttaaaatgtatgtgtagatataacttaaatatggagctttcaaaaagcacaaat

SEQ ID NO: 67491 - DNA, 120 bp, Artificial Sequence
  ENSG00000075407_32 (sequence is synthesized)
actgcactccagcctgagtgacagagagagattcaaaaaacaaaaaaaaagcaaaaatatactttgctattgggtaaggtatagtagttggcagcagaatggacccattgaggataacta

SEQ ID NO: 67492 - DNA, 120 bp, Artificial Sequence
  ENSG00000075407_33 (sequence is synthesized)
atagtagttggcagcagaatggacccattgaggataactataaaattacagaaaatatttaaatgcaacttattgctatagaagcaaagaggactaaagggcaaaattctagagagtggt

SEQ ID NO: 67493 - DNA, 120 bp, Artificial Sequence
  ENSG00000075407_34 (sequence is synthesized)
aaatctcagaaagcacaagcataaaatgcagctctgggggccctttccacttctggctatagggaagaacctgaatactgaacttgattcaggcagaggaccataacctgggggtcaggg

SEQ ID NO: 67494 - DNA, 120 bp, Artificial Sequence
  ENSG00000075407_35 (sequence is synthesized)
gaaggcatgggggggaccagaaaccagaagaacaatcaagactgcaatgaaaaaaatggatacattaggagcttcaaacacatataatttctcaagaaatttccagatgtctcatgctgc

SEQ ID NO: 67495 - DNA, 120 bp, Artificial Sequence
  ENSG00000075407_36 (sequence is synthesized)
atagggcaggagcctgaaaagctaatttgagaagataataagtaggatttttgttttgttttgcattttgcagtacaaaggagaaatgattagaacttaggaagtgccagtgggttggtg

SEQ ID NO: 67496 - DNA, 120 bp, Artificial Sequence
  ENSG00000075407_37 (sequence is synthesized)
aacatgccatcagtaaaagccctggaaacaaggtcatactagagattggttgtgccttgtcacaactgcaaacaatacctgagtggagtattcaaaaacttgcttagaaagaaaactcta

SEQ ID NO: 67497 - DNA, 120 bp, Artificial Sequence
  ENSG00000075407_38 (sequence is synthesized)
ggaacagatggcttcactgaagttattccaaatatttaagaaataataccaggcttttataaacttttctagaagaaaaaagatggaacttttccaattcagtttttgaggccagtacaa

SEQ ID NO: 67498 - DNA, 120 bp, Artificial Sequence
  ENSG00000075407_39 (sequence is synthesized)
ccttgataacaaaacctaaaaaaaaaacaacaaaaaaacccataaagctatagaccaaagtctcatagatttagatgcaaaatcctaaaattgaaaaaaacatctagccatatccataaa

SEQ ID NO: 67499 - DNA, 120 bp, Artificial Sequence
  ENSG00000075407_40 (sequence is synthesized)
ctatatcatcaccaagagatgtttattagggcaatcaaaagatttattattttaaaaaaatcagtgtggacttccattcctctttcttttgattcccccctttgacttttcatgtatctc

SEQ ID NO: 67500 - DNA, 120 bp, Artificial Sequence
  ENSG00000075407_41 (sequence is synthesized)
tcctgccttccttccccagagtggaggagttagacttgcctcgtgggatgagaggagttgtggctttgtgtctgctggcaccaagagggctgagggtgaggtgtggaagggacaggggga

SEQ ID NO: 67501 - DNA, 120 bp, Artificial Sequence
  ENSG00000075407_42 (sequence is synthesized)
ggagatgggcagcattgttgagagattggtaacactgagcaaataaatatgttgagaatgatgacagcaagatttctccattagagaaggtatttataaaaataggaatgaggagagcta

SEQ ID NO: 67502 - DNA, 120 bp, Artificial Sequence
  ENSG00000075407_43 (sequence is synthesized)
gaaaacctggagtgtggcattagaatagaactcatatcttttaaatatataggaacaaataaataaattgttgtgtgtgcacatatgcatatattttgtgttcattctactgagaggacc

SEQ ID NO: 67503 - DNA, 120 bp, Artificial Sequence
  ENSG00000075407_44 (sequence is synthesized)
taaacacaatgacacctcagtaacagtaagcacaccaactgccaagttattagttcctaaatactatccacaaaaaaggggaacagggatgattcctagtcagagattgggagaaataca

SEQ ID NO: 67504 - DNA, 120 bp, Artificial Sequence
  ENSG00000075407_45 (sequence is synthesized)
agatgagcctgaatcatctcatgtacctgacagtaagaaaatactctggctggtctcagtggctcatgtctgtaattctagcatgttagaaggtcaaggtgggtgggttgcttgagctca

SEQ ID NO: 67505 - DNA, 69 bp, Artificial Sequence
  ENSG00000075407_46 (sequence is synthesized)
gaggtactcaggaggcagagacgtgggaggatcgcttgagcctgggagattgaggctgcactgagctgt

SEQ ID NO: 67506 - DNA, 120 bp, Artificial Sequence
  ENSG00000075407_47 (sequence is synthesized)
gatcgcttgagcctgggagattgaggctgcactgagctgtgatcgtgccactgtactctagcctggaagacagagtgagaccccatctcaggaaaaaagaaaaaaaaaaagatgtcattc

SEQ ID NO: 67507 - DNA, 120 bp, Artificial Sequence
  ENSG00000075407_48 (sequence is synthesized)
agcaggttaatggataaactgtggaacatccagaaaactttaacattcttcaaagaaatagaaaacacaatcctaaaatttatatgggaaccacaaaagacttagaatagtcagctatcc

SEQ ID NO: 67508 - DNA, 120 bp, Artificial Sequence
  ENSG00000075407_49 (sequence is synthesized)
aaccacaaaagacttagaatagtcagctatcctgagcaaaaggaatcaaactggaggaatcatattacctgacttccaattattcaacagagctacagtaaccaaaacagcatgatactg

SEQ ID NO: 67509 - DNA, 120 bp, Artificial Sequence
  ENSG00000075407_50 (sequence is synthesized)
agtatagacaacccagaaacaaattcatacatctatggtgaccacttttgacaaaggaatgaagaacatacactggggaaaagataatgtctttaataaatggtgctgggaaaactggat

SEQ ID NO: 67510 - DNA, 120 bp, Artificial Sequence
  ENSG00000075407_51 (sequence is synthesized)
gcagaagaatgaaactagacccccatctcttagcatatacaaaaatcaaaattaattaaaaagttaaatctaagacctcaaactatgaaacagctaaaagaaaacatcggggaatctctc

SEQ ID NO: 67511 - DNA, 120 bp, Artificial Sequence
  ENSG00000075407_52 (sequence is synthesized)
caggacattggagtgggcaaagatttcttgtgtaatacctgacaaacaggcaaccaaagcaaaagtggacaaatgggatcacatcaagttaaaaatcttctgcattgcaaaggaaataac

SEQ ID NO: 67512 - DNA, 120 bp, Artificial Sequence
  ENSG00000075407_53 (sequence is synthesized)
aaagtgaagagacaacccatagaatgtgagataatatttgcaaactatccatctgtattaggccatttttgaagtactacaaagaaatacttgagactgagtaatttataaagaagaggt

SEQ ID NO: 67513 - DNA, 120 bp, Artificial Sequence
  ENSG00000075407_54 (sequence is synthesized)
ttaattggctcacggttttgcaggctgtacaggaagcatggtgctaacatctgatcagcttgtagggaggcatcaggaagtttccaaccatggtggaaggcaaaaggggaataagtatct

SEQ ID NO: 67514 - DNA, 120 bp, Artificial Sequence
  ENSG00000075407_55 (sequence is synthesized)
cacatggcaggtgcagggcaaagagaggggggaagggaagtgccacacaaccagatcttgtgagtactcagattttgtgaggggtgcttgaggtcatggatacccatttaccctgatgtg

SEQ ID NO: 67515 - DNA, 120 bp, Artificial Sequence
  ENSG00000075407_56 (sequence is synthesized)
tttatacacatttcatacctgtattaaaatatctcatgtaccccataaacatatacacctactttgtacccacaaaaatttaaaaataaagttaatttcaatgtttaaagacttgttatt

SEQ ID NO: 67516 - DNA, 120 bp, Artificial Sequence
  ENSG00000075407_57 (sequence is synthesized)
taaaactcccagtatttattgttaacactggaaaaagttttccaaaacgtatatggcagaaatatgggccttgatgtgaggacagcatcaattaatgagggatcctctcccttgatcaaa

SEQ ID NO: 67517 - DNA, 120 bp, Artificial Sequence
  ENSG00000075407_58 (sequence is synthesized)
acaccttccaccaagacccacctttaacgctgagcattacctctcaaagtgagatttgggcagggactaatatccaaactgtatcaacatctgacaaggtgttcacaaccagaatatata

SEQ ID NO: 67518 - DNA, 120 bp, Artificial Sequence
  ENSG00000075407_59 (sequence is synthesized)
gacaaggtgttcacaaccagaatatataaggagctataacaattctatagaaaaaaaaatctgatttaaaactgggcaaaaatctgaatagacgtttctcaaaagaagacatacaaatgg

SEQ ID NO: 67519 - DNA, 120 bp, Artificial Sequence
  ENSG00000075407_60 (sequence is synthesized)
aagatatcatctcaccccagttaaaatgtcttctctccaaaagacagataataacaaatgctgaagaggatgtggagaaaagggaaacctcgtgcactgtggaaatgttattagtacaac

SEQ ID NO: 67520 - DNA, 120 bp, Artificial Sequence
  ENSG00000075407_61 (sequence is synthesized)
agggaaacctcgtgcactgtggaaatgttattagtacaaccactatggacaacaatttggaggtacctcaaaaactaaaaatagagctatcatacaatcccacaattccactggtagtta

SEQ ID NO: 67521 - DNA, 120 bp, Artificial Sequence
  ENSG00000075407_62 (sequence is synthesized)
tacaatcccacaattccactggtagttatataccccaaagacaggaaatcagtatattgaagatatatctgcaccgtgtttactgtagcactactcacaatagccaagatttggaagcaa

SEQ ID NO: 67522 - DNA, 83 bp, Artificial Sequence
  ENSG00000075407_63 (sequence is synthesized)
ttgtagatggaactagagatcattaagtgaaataagccaggcacagcaagacagacatcatgttctgacgtatttgttggagc

SEQ ID NO: 67523 - DNA, 120 bp, Artificial Sequence
  ENSG00000075407_64 (sequence is synthesized)
cagcaagacagacatcatgttctgacgtatttgttggagctaaagatgaaaacaactgaacttatagagggtagaaggatgtttaccagaggcgggaaaggcagtgagggcatggtgagg

SEQ ID NO: 67524 - DNA, 120 bp, Artificial Sequence
  ENSG00000075407_65 (sequence is synthesized)
gggaagtggggaatgttaacgggcacaaaatgtagaatgactaagacctagtatttgatagcacaaggttactacagtcaataataattgtgcattttaaaggtataattgaattgtaac

SEQ ID NO: 67525 - DNA, 120 bp, Artificial Sequence
  ENSG00000075407_66 (sequence is synthesized)
acaaaggataaatgcttgaggttatggataccccatttaccctgatgtgattattagacattgcatgcctatatcaaaatatatcatgtaccccatagatatatacacctagtatgtacc

SEQ ID NO: 67526 - DNA, 120 bp, Artificial Sequence
  ENSG00000075407_67 (sequence is synthesized)
tacccacaaaaattaaaaataaagtaaaatttcaatgattaggaagaccattgttaatatcagtttcctttaaatgtttctataaatttaatacaatttcaataaagctcccaatattta

SEQ ID NO: 67527 - DNA, 120 bp, Artificial Sequence
  ENSG00000075407_68 (sequence is synthesized)
tagtactggaaaaagttttccaaaatgtgtatggcagaaatagggccaaaataggcaagaaaactattttcgagatgtcagttttcctcaaattgttctattaattaaacgccacctgaa

SEQ ID NO: 67528 - DNA, 120 bp, Artificial Sequence
  ENSG00000075407_69 (sequence is synthesized)
ttaaaatttgacaagtggattataaatttatgtggacattcaaaacaattatggatacatgagtccagaatcacagccataaaccatgaggtgcttgggagattttcagaaaatatgcca

SEQ ID NO: 67529 - DNA, 120 bp, Artificial Sequence
  ENSG00000075407_70 (sequence is synthesized)
atgaaatccaaggggaaagacatgtcttcaaaaagtggtgttacctttgactccccaaagcatatataaagcctctactcatcatagatctaaatataagagctcaaacttaaaacttgt

SEQ ID NO: 67530 - DNA, 120 bp, Artificial Sequence
  ENSG00000075407_71 (sequence is synthesized)
agaagaaaacatgagaaaatttttgtaggtttgagttagatgatgatttctatataggacaataaaaatatggaacatacaaaaataaatttaatgcacttaattataatacaaatgatt

SEQ ID NO: 67531 - DNA, 120 bp, Artificial Sequence
  ENSG00000075407_72 (sequence is synthesized)
tactcactttaaactttgataaattagattttgttaaattcaaaagcttgtgttcttcaaagcacacagttaaggaaatggaaaggcgagtaatggactaaaaaaaatacctgtaaaaca

SEQ ID NO: 67532 - DNA, 120 bp, Artificial Sequence
  ENSG00000075407_73 (sequence is synthesized)
gctttggttaagaatagaagaaaaatcctaataagaaaattggtgaaagaatggtgtggaaagttcactacagaaaaaatatgaatggcaaataatcctgatttgggggagagtgttcaa

SEQ ID NO: 67533 - DNA, 120 bp, Artificial Sequence
  ENSG00000075407_74 (sequence is synthesized)
taccaatgctaattttttaaatgtcctgtgtttaattttttggagtttgtgatttgcaacatgcccctactgcatggagggagaggagatggtaaaatgaacagaagtaataattgtaaa

SEQ ID NO: 67534 - DNA, 120 bp, Artificial Sequence
  ENSG00000075407_75 (sequence is synthesized)
acaaagggtaagtttggataataagaccattgaaatgttctttaggaatcatgttttagaggctccagacctttggaagtaacatgttgacgtgacccaaatatgcagtgactctgaatc

SEQ ID NO: 67535 - DNA, 120 bp, Artificial Sequence
  ENSG00000075407_76 (sequence is synthesized)
acccagcatctcccagtatcactttcatacacacatcttgttgttttttttaaattgtgatataaactatatagtttagccagagattaataaaattttatatatatatgtaacactcat

SEQ ID NO: 67536 - DNA, 120 bp, Artificial Sequence
  ENSG00000075407_77 (sequence is synthesized)
gtacccatcattgagatgaatatataaagtgatttttcaacacccccagaaagctccctgttgtactcttcccagtaaagagcatccctccttttgtaaaattaaatatatttttctata

SEQ ID NO: 67537 - DNA, 120 bp, Artificial Sequence
  ENSG00000075407_78 (sequence is synthesized)
accgagcggcactagaggaatgaagacaaagacaaagacacagaaataaagtgcaaagtgggaatcggggataacagccttcagagatgagagccacaaacagagtttgacccacatgtt

SEQ ID NO: 67538 - DNA, 120 bp, Artificial Sequence
  ENSG00000075407_79 (sequence is synthesized)
gccagtgataagcattgtttctataggttatagattagctaaaagcattccttacgggaaacaaagcatttttagcgaggagcagagaaacagtctctggctgattatctgcagcaaaaa

SEQ ID NO: 67539 - DNA, 120 bp, Artificial Sequence
  ENSG00000075407_80 (sequence is synthesized)
ctgcagcaaaaacatgttgttaaggcacaggctgctcatgctatttgtggtttgagcagttttccgctctgggaaggccaggtgttccttgccctgctccagtaaaccaacaacttcttg

SEQ ID NO: 67540 - DNA, 120 bp, Artificial Sequence
  ENSG00000075407_81 (sequence is synthesized)
cagtgtgtgtcatagccatcacgagcatgtcacattgctgcagaaatcctctttatggccagtttctttaaggcctgtttatgacaggcttagggcctgttcccagcaaatttgggtgtc

SEQ ID NO: 67541 - DNA, 120 bp, Artificial Sequence
  ENSG00000075407_82 (sequence is synthesized)
caaagtgggtcctggaactaatcctctggataccaagggacgactgtgtttaaaccatcgtttgggtttggagagattaatgacaacagtggctaagcatgggaagggtttctatggtgg

SEQ ID NO: 67542 - DNA, 120 bp, Artificial Sequence
  ENSG00000075407_83 (sequence is synthesized)
gactgcattggaccacctctgaatgtgtgtattagcagtttagtaaataaaacaaatctaaattattatttgattggggttagtgggatgcaaataataagatttattcagagtatccta

SEQ ID NO: 67543 - DNA, 120 bp, Artificial Sequence
  ENSG00000075407_84 (sequence is synthesized)
aaaattcccccagttttatttagttttgtggaattatgtcctctttctaattttgcaacatttccttgcatgttaaaacattcttccctgaacccacaatgagtcttttacaacacatct

SEQ ID NO: 67544 - DNA, 120 bp, Artificial Sequence
  ENSG00000075407_85 (sequence is synthesized)
ctgatacaagaaaaaagatatttcaatgaaaaacagagcttgcttttgtacataagctaaaaacaaacaaaacaaacccagaagcatagctgctctgctcattcccttctacccaagaga

SEQ ID NO: 67545 - DNA, 120 bp, Artificial Sequence
  ENSG00000075407_86 (sequence is synthesized)
aaaaaagaaaataaagacaccatcaaggaaactgatgccacaggaaatcttttattcatcatttggaaatttatcaccagcacactgaggacaataggcctttctctcagttgcttgtag

SEQ ID NO: 67546 - DNA, 120 bp, Artificial Sequence
  ENSG00000075407_87 (sequence is synthesized)
ataattcacatctttgtcaaaagactctccttcaaaaaatgtggaaaattgatttcgatgagttaaggaaatacaagtcatgaggaatggagaagaaaataacacatagataatctgtca

SEQ ID NO: 67547 - DNA, 120 bp, Artificial Sequence
  ENSG00000075407_88 (sequence is synthesized)
tttatgtctagatattgagggtatcaaggagatgcatgcctggtgatgaataaagacaaacagctgatcttggaggcatggaattgggacttggaactgcaccctgcccccagctcctat

SEQ ID NO: 67548 - DNA, 120 bp, Artificial Sequence
  ENSG00000075407_89 (sequence is synthesized)
tctcttctgttattgaacatctggagagacaggcatattggcatccttggtttatctacactaaacctcttgcatacagatgagcaaactgagatctagaaaaatgaactggcccaaatt

SEQ ID NO: 67549 - DNA, 120 bp, Artificial Sequence
  ENSG00000075407_90 (sequence is synthesized)
tacagaattaggtgactttgtcacatgagtgggtgaagagtctcaaagattagtgaagtctagaagattgtaggagagtcatcaactaagttatgcaaactgtccaatcccctcccagat

SEQ ID NO: 67550 - DNA, 120 bp, Artificial Sequence
  ENSG00000075407_91 (sequence is synthesized)
ttcacatggagaatttcatgggaacagagccaaatgaagagagttgggtacacagacgagggctggtgtggccattgagatgcctgagcatttaccaggggatttttatttttaaaggaa

SEQ ID NO: 67551 - DNA, 120 bp, Artificial Sequence
  ENSG00000075407_92 (sequence is synthesized)
atatctgcagcatcttaccaaacactctgcccaggatctcagaggctctgagaacactaagctctgcctgtgttcctacattatgaaaaaccaagagggatgtagcccttgtgcttgtgt

SEQ ID NO: 67552 - DNA, 120 bp, Artificial Sequence
  ENSG00000075407_93 (sequence is synthesized)
tttactgagagggaggctcatggccccatccagacaaccttaacaccccgcctttgatcccagaggctgatggagaatgtcttagccagctgcagccctaggtatggttctaacacatgg

SEQ ID NO: 67553 - DNA, 120 bp, Artificial Sequence
  ENSG00000075407_94 (sequence is synthesized)
aggctcctctgagaaatctacagggcttcattatggccatcaataggtctgcttgtcttgccacatttctgggactttgcaatttttttaatggtttgctttaatattcttttttttttt

SEQ ID NO: 67554 - DNA, 63 bp, Artificial Sequence
  ENSG00000075407_95 (sequence is synthesized)
taatggtttgctttaatattacaatcctggctcaccacagcctctgcctcccaggttcaagca

SEQ ID NO: 67555 - DNA, 120 bp, Artificial Sequence
  ENSG00000075407_96 (sequence is synthesized)
ggaattacagatgtgagccaccacaccaagccatatttgcttcaatattctaacacaaaatgatagcttaacctattatccaatattcccacttctcaataggatgcaactgctatgctt

SEQ ID NO: 67556 - DNA, 120 bp, Artificial Sequence
  ENSG00000075407_97 (sequence is synthesized)
actgctatgctttctttgaaataattatttttgaaaatattatttcaaagtgtagtcctcctagacagtgctaattctattgggattttaaaggattacacaaaatagccatcacatttc

SEQ ID NO: 67557 - DNA, 120 bp, Artificial Sequence
  ENSG00000075407_98 (sequence is synthesized)
acttaatgtgccctatgtaatgcagaacccagcctgctacagccacttgggaggctctcgcccactgtctcctccaggctctctcacatgcatcaaggctatgatcaaatgggacattct

SEQ ID NO: 67558 - DNA, 120 bp, Artificial Sequence
  ENSG00000075407_99 (sequence is synthesized)
cactccatcccctcctaacccccaattcagattgtagcccacccctcagcagtccctatccgcttttcttcattttgttccataacttttgacaccttccaacattctacagttgtgctt

SEQ ID NO: 67559 - DNA, 87 bp, Artificial Sequence
  ENSG00000075407_100 (sequence is synthesized)
cataacttttgacaccttccaacattctacagttgtgcagctctgtcgcccaggccagagagcagtggcatgatcttggctcactgc

SEQ ID NO: 67560 - DNA, 64 bp, Artificial Sequence
  ENSG00000075407_101 (sequence is synthesized)
cattctcctgcctcagcctcccgagtaaatgggactacaggtgcatgctacgacacctggctag

SEQ ID NO: 67561 - DNA, 120 bp, Artificial Sequence
  ENSG00000075407_102 (sequence is synthesized)
attacaggcgtgagccaccgcacatgcccggttttgctaatttctttagtgaactatttgctcttctgcacaaaattgtaagttccacggggatagaattttttttatggctttattctt

SEQ ID NO: 67562 - DNA, 120 bp, Artificial Sequence
  ENSG00000075407_103 (sequence is synthesized)
ggggatagaattttttttatggctttattctttgcgttatgtccagtgcctagaaaagtacctggtaagtgttgtgaagtatttcctgaatagaggttgaatgttgtgataagtttcact

SEQ ID NO: 67563 - DNA, 120 bp, Artificial Sequence
  ENSG00000075407_104 (sequence is synthesized)
gtgactcctcatcttgtacctgcacttgcaagtttcttcttgtctgcctggggcgttgcgctcagcaccttcagcccccaccactcaaggttcctgtctgcatgagtgtaatcaccatcg

SEQ ID NO: 67564 - DNA, 120 bp, Artificial Sequence
  ENSG00000075407_105 (sequence is synthesized)
agtgtcaacagcaccatccctttccccactctcattcagaagctcctcatctgctctgggatgggacaaactcactcttgtgtcatcattctgccaagtttattaaaactcaaaatgtga

SEQ ID NO: 67565 - DNA, 120 bp, Artificial Sequence
  ENSG00000075413_0 (sequence is synthesized)
gctccatggtcggcgcccacagcccgcggcggcctgtcttgcgctccacttccttcacatcctcctccgcctcctcgttttcaggcgccgccggcggcgctgtgtggaggcccgcgagct

SEQ ID NO: 67566 - DNA, 120 bp, Artificial Sequence
  ENSG00000075413_1 (sequence is synthesized)
gaaattcgcggtgcgacgggagggagtggagaaggaggtgagggggcccaggatcgcggggcgccctgaggcaaggggacgccggcgggccgaagcgcagcccgccgcccgcaggctcgg

SEQ ID NO: 67567 - DNA, 120 bp, Artificial Sequence
  ENSG00000075413_2 (sequence is synthesized)
ctccgccactgccgccctcccggtctcctcgcctcggccgccgaggcagggagagaatgagccccgggacccgccgggggacggcccgggccaggcccgggatctagacggccgtagggg

SEQ ID NO: 67568 - DNA, 120 bp, Artificial Sequence
  ENSG00000075413_3 (sequence is synthesized)
gaagggagccgccctccccacggcgccttttcggaactgccgtggactcgaggacgctggtcgccggcctcctagggctgtgctgttttgttttgaccctcgcattgtgcagaattaaag

SEQ ID NO: 67569 - DNA, 120 bp, Artificial Sequence
  ENSG00000075413_4 (sequence is synthesized)
tgcagtaaaatgtccactaggaccccattgccaacggtgaatgaacgagacactgaaaaccacacgtcacatggagatgggcgtcaagaagttacctctcgtaccagccgctcaggagct

SEQ ID NO: 67570 - DNA, 120 bp, Artificial Sequence
  ENSG00000075413_5 (sequence is synthesized)
cggtgtagaaactctatagcctcctgtgcagatgaacaacctcacatcggaaactacagactgttgaaaacaatcggcaaggggaattttgcaaaagtaaaattggcaagacatatcctt

SEQ ID NO: 67571 - DNA, 120 bp, Artificial Sequence
  ENSG00000075413_6 (sequence is synthesized)
acaggcagagaggttgcaataaaaataattgacaaaactcagttgaatccaacaagtctacaaaagctcttcagagaagtaagaataatgaagattttaaatcatcccaatatagtgaag

SEQ ID NO: 67572 - DNA, 120 bp, Artificial Sequence
  ENSG00000075413_7 (sequence is synthesized)
ttattcgaagtcattgaaactgaaaaaacactctacctaatcatggaatatgcaagtggaggtgaagtatttgactatttggttgcacatggcaggatgaaggaaaaagaagcaagatct

SEQ ID NO: 67573 - DNA, 120 bp, Artificial Sequence
  ENSG00000075413_8 (sequence is synthesized)
aaatttagacagattgtgtctgcagttcaatactgccatcagaaacggatcgtacatcgagacctcaaggctgaaaatctattgttagatgccgatatgaacattaaaatagcagatttc

SEQ ID NO: 67574 - DNA, 120 bp, Artificial Sequence
  ENSG00000075413_9 (sequence is synthesized)
ggttttagcaatgaatttactgttggcggtaaactcgacacgttttgtggcagtcctccatacgcagcacctgagctcttccagggcaagaaatatgacgggccagaagtggatgtgtgg

SEQ ID NO: 67575 - DNA, 120 bp, Artificial Sequence
  ENSG00000075413_10 (sequence is synthesized)
agtctgggggtcattttatacacactagtcagtggctcacttccctttgatgggcaaaacctaaaggaactgagagagagagtattaagagggaaatacagaattcccttctacatgtct

SEQ ID NO: 67576 - DNA, 120 bp, Artificial Sequence
  ENSG00000075413_11 (sequence is synthesized)
acagactgtgaaaaccttctcaaacgtttcctggtgctaaatccaattaaacgcggcactctagagcaaatcatgaaggacaggtggatcaatgcagggcatgaagaagatgaactcaaa

SEQ ID NO: 67577 - DNA, 120 bp, Artificial Sequence
  ENSG00000075413_12 (sequence is synthesized)
ccatttgttgaaccagagctagacatctcagaccaaaaaagaatagatattatggtgggaatgggatattcacaagaagaaattcaagaatctcttagtaagatgaaatacgatgaaatc

SEQ ID NO: 67578 - DNA, 120 bp, Artificial Sequence
  ENSG00000075413_13 (sequence is synthesized)
atgctagtgattccagttctagcagcaatctttcacttgctaaggttaggccgagcagtgatctcaacaacagtactggccagtctcctcaccacaaagtgcagagaagtgtttcttcaa

SEQ ID NO: 67579 - DNA, 120 bp, Artificial Sequence
  ENSG00000075413_14 (sequence is synthesized)
gccaaaagcaaagacgctacagtgaccatgctggaccagctattccttctgttgtggcgtatccgaaaaggagtcagaccagcactgcagatagtgacctcaaagaagatggaatttcct

SEQ ID NO: 67580 - DNA, 120 bp, Artificial Sequence
  ENSG00000075413_15 (sequence is synthesized)
cccggaaatcaagtggcagtgctgttggaggaaagggaattgctccagccagtcccatgcttgggaatgcaagtaatcctaataaggcggatattcctgaacgcaagaaaagctccactg

SEQ ID NO: 67581 - DNA, 120 bp, Artificial Sequence
  ENSG00000075413_16 (sequence is synthesized)
tccctagtagtaacacagcatctggtggaatgacacgacgaaatacttatgtttgcagtgagagaactacagctgatagacactcagtgattcagaatggcaaagaaaacagcactattc

SEQ ID NO: 67582 - DNA, 120 bp, Artificial Sequence
  ENSG00000075413_17 (sequence is synthesized)
ctgatcagagaactccagttgcttcaacacacagtatcagtagtgcagccaccccagatcgaatccgcttcccaagaggcactgccagtcgtagcactttccacggccagccccgggaac

SEQ ID NO: 67583 - DNA, 120 bp, Artificial Sequence
  ENSG00000075413_18 (sequence is synthesized)
ggcgaaccgcaacatataatggccctcctgcctctcccagcctgtcccatgaagccacaccattgtcccagactcgaagccgaggctccactaatctctttagtaaattaacttcaaaac

SEQ ID NO: 67584 - DNA, 120 bp, Artificial Sequence
  ENSG00000075413_19 (sequence is synthesized)
tcacaaggagtcgcaatgtatctgctgagcaaaaagatgaaaacaaagaagcaaagcctcgatccctacgcttcacctggagcatgaaaaccactagttcaatggatcccggggacatga

SEQ ID NO: 67585 - DNA, 120 bp, Artificial Sequence
  ENSG00000075413_20 (sequence is synthesized)
tgcgggaaatccgcaaagtgttggacgccaataactgcgactatgagcagagggagcgcttcttgctcttctgcgtccacggagatgggcacgcggagaacctcgtgcagtgggaaatgg

SEQ ID NO: 67586 - DNA, 120 bp, Artificial Sequence
  ENSG00000075413_21 (sequence is synthesized)
aagtgtgcaagctgccaagactgtctctgaacggggtccggtttaagcggatatcggggacatccatagccttcaaaaatattgcttccaaaattgccaatgagctaaagctgtaaccca

SEQ ID NO: 67587 - DNA, 120 bp, Artificial Sequence
  ENSG00000075413_22 (sequence is synthesized)
gtgattatgatgtaaattaagtagcaattaaagtgttttcctgaacactgatggaaatgtatagaataatatttaggcaataacgtctgcatcttctaaatcatgaaattaaagtctgag

SEQ ID NO: 67588 - DNA, 120 bp, Artificial Sequence
  ENSG00000075413_23 (sequence is synthesized)
gacgagagcacgcctgggagcgaaagctggccttttttctacgaatgcactacattaaagatgtgcaacctatgcgccccctgccctacttccgttaccctgagagtcggtgtgtggccc

SEQ ID NO: 67589 - DNA, 120 bp, Artificial Sequence
  ENSG00000075413_24 (sequence is synthesized)
catctccatgtgcctcccgtctgggtgggtgtgagagtggacggtatgtgtgtgaagtggtgtatatggaagcatctccctacactggcagccagtcattactagtacctctgcgggaga

SEQ ID NO: 67590 - DNA, 120 bp, Artificial Sequence
  ENSG00000075413_25 (sequence is synthesized)
tcatccggtgctaaaacattacagttgccaaggaggaaaatactgaatgactgctaagaattaaccttaagaccagttcatagttaatacaggtttacagttcatgcctgtggttttgtg

SEQ ID NO: 67591 - DNA, 120 bp, Artificial Sequence
  ENSG00000075413_26 (sequence is synthesized)
tttgttgttttgtgtttttttagtgcaaaaggtttaaatttatagttgtgaacattgcttgtgtgtgtttttctaagtagattcacaagataattaaaaattcactttttctcagtaaaa

SEQ ID NO: 67592 - DNA, 120 bp, Artificial Sequence
  ENSG00000075413_27 (sequence is synthesized)
ggctccgtgaggctctgaggtgccggggtgcggcggcggcagcggcggccagcagggcggaggctgaggcagcaagctcgctagagagggagaagcagtcgggcgcaggcgcctcctccg

SEQ ID NO: 67593 - DNA, 120 bp, Artificial Sequence
  ENSG00000075413_28 (sequence is synthesized)
gactgaactttttaccaaagacttggtgttctgtagaagtatgagcagatgagtgacaagatctggtttatatgttaagaagttctcagctgtaaggtgaatagattggaggtgttgggg

SEQ ID NO: 67594 - DNA, 120 bp, Artificial Sequence
  ENSG00000075413_29 (sequence is synthesized)
caaaggcaggggacccagtgaagacaaggagcgaggctctatactgaggccctggtagaagtggagcagatgggccacctgaagagctactaggaagttgacaccaataagatgtcgtta

SEQ ID NO: 67595 - DNA, 120 bp, Artificial Sequence
  ENSG00000075413_30 (sequence is synthesized)
gtctgtgtatggggagtgagggaaaggaagaacttgccagtttccaggttttaatccttccaaaggatttctgcagaaagacactggaagagctgtattcctacttatccttaaaggaaa

SEQ ID NO: 67596 - DNA, 120 bp, Artificial Sequence
  ENSG00000075413_31 (sequence is synthesized)
gaaactgcccttgaattccaaggacatgattactgagctggaattccaaataatgtgtcccagtgagactcctgggggtagttttgtccggtaactgtgtgtgttagatgaaactgcaga

SEQ ID NO: 67597 - DNA, 120 bp, Artificial Sequence
  ENSG00000075413_32 (sequence is synthesized)
cttccagccactctatcttaccatgtctgttaacagttaatttgctctgatgaatttgcccatcttggagaagggggctctgctgactgttttttatcttggagtaaatgtcctttgatt

SEQ ID NO: 67598 - DNA, 77 bp, Artificial Sequence
  ENSG00000075413_33 (sequence is synthesized)
tgctgactgttttttatcttggagtaaatgtcctttgattaggaaggttctagactatattgttaaaacaacattgg

SEQ ID NO: 67599 - DNA, 120 bp, Artificial Sequence
  ENSG00000075413_34 (sequence is synthesized)
aatacaaaattagccaggcatggtggagtgcgcctgtattcccagccacttaggaggctgaggtgggagaaccacctgagcccaggaagttgaggctgcattgagccatgatcgtaccac

SEQ ID NO: 67600 - DNA, 120 bp, Artificial Sequence
  ENSG00000075413_35 (sequence is synthesized)
cccaggaagttgaggctgcattgagccatgatcgtaccactgcactgcagctaggtgacagcaaaaccctgtctcaaaaaaacaccaaacaacataggatactgttatataacagctagt

SEQ ID NO: 67601 - DNA, 120 bp, Artificial Sequence
  ENSG00000075413_36 (sequence is synthesized)
actgttatataacagctagttcctatacctgtaatcttattaattcatttaaaatacatcagtgcgggccgggtgtggtggctcacacttataatcccaacactttggaaggccaaggcg

SEQ ID NO: 67602 - DNA, 88 bp, Artificial Sequence
  ENSG00000075413_37 (sequence is synthesized)
tcttgtcagtgtgttttgggaacaggttgagagcatagcatgctcatattatatattcattttaccacttagatttgaattgaggcat

SEQ ID NO: 67603 - DNA, 120 bp, Artificial Sequence
  ENSG00000075413_38 (sequence is synthesized)
ttatatattcattttaccacttagatttgaattgaggcatctcttagaataggttttattttgtgcataccctcagaggacattgtccctctcatagaaacagatattcaaacatgtaat

SEQ ID NO: 67604 - DNA, 120 bp, Artificial Sequence
  ENSG00000075413_39 (sequence is synthesized)
ctgctattttattttaaggtaatagatttttatgattactgtttggaaaaaaaaaaaagcaactataggttagcagttgctccagaatctccaaaacaagcttaggagatttttattctt

SEQ ID NO: 67605 - DNA, 120 bp, Artificial Sequence
  ENSG00000075413_40 (sequence is synthesized)
taccagaaatgagatggcttgggaggaaggtgtgtgcattacacacaggttgctctgtggtcactgctccttcatactgtgtttctgcctctgcctgaacccaaacccctcccagcctga

SEQ ID NO: 67606 - DNA, 120 bp, Artificial Sequence
  ENSG00000075413_41 (sequence is synthesized)
cagaaatgttcgcttacgcagctagccctgcctcagtttgtacatctacctgtcggctgagacatcagaagtcgatgtccatgtcagcctctgggcaccccaagatgatgttacctccaa

SEQ ID NO: 67607 - DNA, 120 bp, Artificial Sequence
  ENSG00000075413_42 (sequence is synthesized)
agtctgagattttgttacagttgtccacaaggcgtccttcctccatgtgattttagttaagcacatcttttgtcatgatgtcctcggttgtgtattgtgtgtcttcgtgccttcgcgtac

SEQ ID NO: 67608 - DNA, 120 bp, Artificial Sequence
  ENSG00000075413_43 (sequence is synthesized)
tacaaaatgtataagaagttcctgctcctcccaagttgctttcagcatgtggaattttatacatatatcatttgtttacttccaaaactttttagttgcctgttcttcagttacgccagc

SEQ ID NO: 67609 - DNA, 120 bp, Artificial Sequence
  ENSG00000075413_44 (sequence is synthesized)
atatcctttatttctttcgtattggcacagttctctatgtaagcaatttgagagggaagcaaaggggaaaagtttgagttagctgttctctgtcctagaatttccctgcattaatcttgt

SEQ ID NO: 67610 - DNA, 120 bp, Artificial Sequence
  ENSG00000075413_45 (sequence is synthesized)
ccttgaaaatatatataatactggtcccttaaactccatgaggctttgtctcattatgtattgttcttttggtaccctttcccacttaacttaccttttgctcctaagtcctataaaata

SEQ ID NO: 67611 - DNA, 120 bp, Artificial Sequence
  ENSG00000075413_46 (sequence is synthesized)
ccccttggatctggattttttatacccgattttctccactgtgtataaaaggtatattgtgactgtaaatttttgtatatcatgttctgagagcttcttactttctgatctcatagcact

SEQ ID NO: 67612 - DNA, 120 bp, Artificial Sequence
  ENSG00000075413_47 (sequence is synthesized)
gttccaacagttattagagtactagattgagtgagcaggaaggtagaagaagttagttaaagaatgggaagctcaaacttggatcatgaaaggttttcagatattgggaatgtcaaagac

SEQ ID NO: 67613 - DNA, 120 bp, Artificial Sequence
  ENSG00000075413_48 (sequence is synthesized)
ctgacctcgtgatccacccatcttggcttcccaaagtgctggaattacagctcttcagagaagtaagaataatgaagattttaaatcatcccaatatagtgaagttattcgaagtcattg

SEQ ID NO: 67614 - DNA, 120 bp, Artificial Sequence
  ENSG00000075413_49 (sequence is synthesized)
agaagtctgccgtgtcccgctgttcgcgggcgggtctgcgaagtacatcgattatgccggcagtctagtcggttaataaagcccaggagttgcagcgttacggatcggtgctttgagagg

SEQ ID NO: 67615 - DNA, 120 bp, Artificial Sequence
  ENSG00000075413_50 (sequence is synthesized)
aatgtacaattaatgattatccacaggcatgcaaaaggtaagtattagttgtgttatttttatttcactgaggatggaattagcaaaaggctttaaaatgacaggaaaattagctaatac

SEQ ID NO: 67616 - DNA, 120 bp, Artificial Sequence
  ENSG00000075413_51 (sequence is synthesized)
agaaaacaagcataaaattcaaagctacagcctcatttgatttggctttttcagaaattaaaatgtgaacagctgcgtagcagaaatgttttaatattttcagagttgaaagccactttc

SEQ ID NO: 67617 - DNA, 120 bp, Artificial Sequence
  ENSG00000075413_52 (sequence is synthesized)
ccactttccagcaaccactgaagaaagagtatctcattatttttacttaaagcactacagaaagtggtgttctgattttattaatattttttaggccaggcatggtggcttatgcctgta

SEQ ID NO: 67618 - DNA, 90 bp, Artificial Sequence
  ENSG00000075413_53 (sequence is synthesized)
tcacttgagcccaggagttcaagaccatcctggacaacatggcaaaaccccgcctctacaaatgcatctgtggtcccagctactcaggag

SEQ ID NO: 67619 - DNA, 90 bp, Artificial Sequence
  ENSG00000075413_54 (sequence is synthesized)
gggaggtcatgctccagcctaggggagtgagaccctgcctcaaaaaagaaaaacatattttttgatggtgataatcaagaaaccaaaaat

SEQ ID NO: 67620 - DNA, 120 bp, Artificial Sequence
  ENSG00000075413_55 (sequence is synthesized)
aaacatattttttgatggtgataatcaagaaaccaaaaatattgctttcttaatgcacacatgaggcaggaaatctttcctgaagggctacattgtacctgtgcctctcaagtcaccaga

SEQ ID NO: 67621 - DNA, 120 bp, Artificial Sequence
  ENSG00000075413_56 (sequence is synthesized)
aggccaagctgcaggtcaaaactgcgggaaaagcactttcttcctgttggcagttccattctattattattttttaattgatcttcccacttgtctgatttttccttggacagaacaggt

SEQ ID NO: 67622 - DNA, 120 bp, Artificial Sequence
  ENSG00000075413_57 (sequence is synthesized)
aataactgaatatagaatccagctgatagcctcattggcttttaattggaaacccattatactgtgtggcacaattagaaagtgagaataaccccattctgaggccgagtgtgctcaggc

SEQ ID NO: 67623 - DNA, 120 bp, Artificial Sequence
  ENSG00000075413_58 (sequence is synthesized)
tgaagagccagcaggagtgcccgctgtgcgtgcgtggtgtgcggtgtgtgcagtgtgcagcgtgcagcggtatggcatgcaatgtgtgtgatgtatgcagtgtgcagcatggagctggcc

SEQ ID NO: 67624 - DNA, 120 bp, Artificial Sequence
  ENSG00000075413_59 (sequence is synthesized)
tgtgcacacccctgcagccttgtggaagaaggtagcgctggctcagtcaaatgagaggaagagttttcataagcccggctggtgtttaaaacgtgttttggctttgttcattttatggtg

SEQ ID NO: 67625 - DNA, 120 bp, Artificial Sequence
  ENSG00000075413_60 (sequence is synthesized)
ttggtgttggtattggtggtcatgtactggcatgtaagatttcttttctctttccctcttctctctgcttctacattctgttcattgaggcttccaactgaatatgagaggaacgggaga

SEQ ID NO: 67626 - DNA, 120 bp, Artificial Sequence
  ENSG00000075413_61 (sequence is synthesized)
aacctggtctttcataaattaacctgtagtcattaatagcttagaaatgacgtaaagcatcagatgaagtaaatacaacatttaaagttatttgagaaagcctggaaagaaaatcataaa

SEQ ID NO: 67627 - DNA, 120 bp, Artificial Sequence
  ENSG00000075413_62 (sequence is synthesized)
taccttacctttagtgtctttccagccgtcagaaaactacttttgcttgagtttagggttgtcatttttgtacgttgtgattcctcctctctctgaatgaacggtttatgagaggtctgt

SEQ ID NO: 67628 - DNA, 120 bp, Artificial Sequence
  ENSG00000075413_63 (sequence is synthesized)
gggcaaaacctaaaggtataagaagctgcacccatgtacttcactaaactaaaagaagtttcctaatattacatggcttaatatttttaacattatatcagtgcggggggtttcaggggg

SEQ ID NO: 67629 - DNA, 120 bp, Artificial Sequence
  ENSG00000075413_64 (sequence is synthesized)
atttgacctgtagtagttgaggggggtacagagaccatgaagtaggaacaggaagtactgaatttcagtcctggctctgccacttagccgaatatctgaccttgagcaaggcacttaact

SEQ ID NO: 67630 - DNA, 68 bp, Artificial Sequence
  ENSG00000075413_65 (sequence is synthesized)
ccacaaagtgcagagaagtgtttcttcaagccaaaagcaaagacgctacagtgaccatgatggaatct

SEQ ID NO: 67631 - DNA, 120 bp, Artificial Sequence
  ENSG00000075413_66 (sequence is synthesized)
atttgatacatcattttttagatttacttgcaaatagcaaatctaaatcctatgactattataagctattttaacttaacccttaatgatggatattggccaggcgtggtggctcatgcc

SEQ ID NO: 67632 - DNA, 120 bp, Artificial Sequence
  ENSG00000075413_67 (sequence is synthesized)
agttcgagaccagactggccaacatagggaaactctgtctctgctaaaacaaacaaacaaacaaaaaattagctgggcgtgttggcgcttgcctgtaatccctgctccttgggaggctga

SEQ ID NO: 67633 - DNA, 120 bp, Artificial Sequence
  ENSG00000075415_0 (sequence is synthesized)
gtgtgcgtcacgccgacgacgcgcgaagggcacacatcttaggacccggaggacgtccggcctctgtgagccgcaacctttccaagggagtggttgtgtgatcgccatcttagggaaaag

SEQ ID NO: 67634 - DNA, 120 bp, Artificial Sequence
  ENSG00000075415_1 (sequence is synthesized)
atgttctcgtccgtggcgcacctggcgcgggcgaaccccttcaacacgccacatctgcagctggtgcacgatggtctcggggacctccgcagcagctccccagggcccacgggccagccc

SEQ ID NO: 67635 - DNA, 120 bp, Artificial Sequence
  ENSG00000075415_2 (sequence is synthesized)
cgccgccctcgcaacctggcagccgccgccgtggaagagcagtatagctgtgactatggatctggcagattctttatcctttgtggacttggaggaattattagctgtggcacaacacat

SEQ ID NO: 67636 - DNA, 120 bp, Artificial Sequence
  ENSG00000075415_3 (sequence is synthesized)
acagcattggttcctctagatctggttaaatgcagaatgcaggtggacccccaaaagtacaagggcatatttaacggattctcagttacacttaaagaggatggtgttcgtggtttggct

SEQ ID NO: 67637 - DNA, 120 bp, Artificial Sequence
  ENSG00000075415_4 (sequence is synthesized)
aaaggatgggctccgactttccttggctactccatgcagggactctgcaagtttggcttttatgaagtctttaaagtcttgtatagcaatatgcttggagaggagaatacttatctctgg

SEQ ID NO: 67638 - DNA, 120 bp, Artificial Sequence
  ENSG00000075415_5 (sequence is synthesized)
cgcacatcactatatttggctgcctctgccagtgctgaattctttgctgacattgccctggctcctatggaagctgctaaggttcgaattcaaacccagccaggttatgccaacactttg

SEQ ID NO: 67639 - DNA, 120 bp, Artificial Sequence
  ENSG00000075415_6 (sequence is synthesized)
gtactgttgaagcactgtacaagtttgtggttcctaagccccgcagtgaatgttcaaagccagagcagctggttgtaacatttgtagcaggttacatagctggagtcttttgtgcaattg

SEQ ID NO: 67640 - DNA, 120 bp, Artificial Sequence
  ENSG00000075415_7 (sequence is synthesized)
tttctcaccctgctgattctgtggtatctgtgttgaataaagaaaaaggtagcagtgcttctctggtcctcaagagacttggatttaaaggtgtatggaagggactgtttgcccgtatca

SEQ ID NO: 67641 - DNA, 120 bp, Artificial Sequence
  ENSG00000075415_8 (sequence is synthesized)
tcatgattggtaccctgactgcactacagtggtttatctatgactccgtgaaggtctacttcagacttcctcgccctcctccacccgagatgccagagtctctgaagaagaagcttgggt

SEQ ID NO: 67642 - DNA, 120 bp, Artificial Sequence
  ENSG00000075415_9 (sequence is synthesized)
taactcagtagttagatcaaagcaaatgtggactgaatctgcttgttgatcagtgttgaagaaagtgcaaaaggaacttttatatatttgacagtgtaggaaattgtctattcctgatat

SEQ ID NO: 67643 - DNA, 120 bp, Artificial Sequence
  ENSG00000075415_10 (sequence is synthesized)
aattactgtagtactcttgcttaaggcaagagtttcagatttactgttgaaataaacccaactcttcatgatttgcctgtgacttatttttaaaacttttttaaaaaagatttagcttta

SEQ ID NO: 67644 - DNA, 120 bp, Artificial Sequence
  ENSG00000075415_11 (sequence is synthesized)
aaatagttggaaagaatgaagtatataagttaaggaaaaaatacaaaactgaccatgaccattgttggttgaatattccagttgctattcagaaattgtcatatgtctcaagttttatca

SEQ ID NO: 67645 - DNA, 120 bp, Artificial Sequence
  ENSG00000075415_12 (sequence is synthesized)
cacaaagttcctgtatttctagggaagcagactttaaatttctaaaaacttgatttaattatagttaaatatgtgtagtcatttgtggttattttggcaagtaaatgtcagtgtatactt

SEQ ID NO: 67646 - DNA, 120 bp, Artificial Sequence
  ENSG00000075415_13 (sequence is synthesized)
gtgtgcgtcacgccgacgacgcgcgaagggcacacatcttaggacccggaggacgtccggcctctgtgagccgcaacctttccaagggagtggttgtgtgatcgccatcttagggagtga

SEQ ID NO: 67647 - DNA, 120 bp, Artificial Sequence
  ENSG00000075415_14 (sequence is synthesized)
gtgtggccgggccttctcctgtggcgggtgtggggagcggagcccagagctcctgtggggccgctgctttggcggtgggcccagccgggagcagcctctttcgaaggccgccgtgacctc

SEQ ID NO: 67648 - DNA, 120 bp, Artificial Sequence
  ENSG00000075415_15 (sequence is synthesized)
cctcgcaacctggcagccgccgccgtggaagagtacagttgtgaatttggctccgcgaagtattatgcactgtgtggctttggtggggtcttaagttgtggtctgacacacactgctgtg

SEQ ID NO: 67649 - DNA, 120 bp, Artificial Sequence
  ENSG00000075415_16 (sequence is synthesized)
accaatgggcgacgcgtacttgcagtggcgcgctgtgtgcgtcacgccgacgacgcgcgaagggcacacatcttaggacccggaggacgtccggcctctgtgagccgcaacctttccaag

SEQ ID NO: 67650 - DNA, 120 bp, Artificial Sequence
  ENSG00000075415_17 (sequence is synthesized)
ttaggctgattcttagaatgacagtaaaggaccaaagtgattgacagctgaaaacaattttcaggtacactaattctctttacacagatctgactttttttttttttgagacggagtttc

SEQ ID NO: 67651 - DNA, 120 bp, Artificial Sequence
  ENSG00000075415_18 (sequence is synthesized)
cgtgcccggctctgactttttacagaaaattgaactattttcagtctggtattttaagaaaggtactgcttgacagctgaactatatgaatgccactggggaaaaagcattccatcatac

SEQ ID NO: 67652 - DNA, 120 bp, Artificial Sequence
  ENSG00000075415_19 (sequence is synthesized)
ttagatacgagattggattgtaggtttaagcccatttttaaagagctcctagaaagtgaattagtttttgtgtttagattccccttaagtttgattaggaagtgtataaaagttcaatct

SEQ ID NO: 67653 - DNA, 120 bp, Artificial Sequence
  ENSG00000075415_20 (sequence is synthesized)
tttgtaatgacagcccaccactggaaaaaaaacgaaaaacctagtgtaatatataacatgctgtttttcaaacactagattttacctagagtccttatgtgtaatacgtgggttggttaa

SEQ ID NO: 67654 - DNA, 120 bp, Artificial Sequence
  ENSG00000075415_21 (sequence is synthesized)
cagtccctacgtaaagcgtacagatggcctggagagaaaaactttttcagagattggagagaaatgttactacaaactcatggtaaggtcagtgaactcaatttagaagccagtgcagct

SEQ ID NO: 67655 - DNA, 120 bp, Artificial Sequence
  ENSG00000075415_22 (sequence is synthesized)
agttgcatgttaacttctttatatcatcattgcctgaacttgttaaaggttccaacattttacctgtgctgcaggaaaaaaggaaaagttgtaggtacaaatttggaccaaactttaaaa

SEQ ID NO: 67656 - DNA, 120 bp, Artificial Sequence
  ENSG00000075415_23 (sequence is synthesized)
aggtaaagtaggatgtcttctgaacccaaccaagtggtggctgtggtgcttagcagtatcaactgtatattatttcttgctatgttagcaaagcatccaaagatcaatggtgtatgataa

SEQ ID NO: 67657 - DNA, 120 bp, Artificial Sequence
  ENSG00000075415_24 (sequence is synthesized)
gcttttctgtgggtgaagaactcgggagtatcagactcttctggttctgagtctcatgaagcttttcacttctgagctgaaaggatgctctttgtgcttttcactattagtggtatagtc

SEQ ID NO: 67658 - DNA, 120 bp, Artificial Sequence
  ENSG00000075415_25 (sequence is synthesized)
tttttaggacttatccttcaatgtcacataacatcacttttaccatgctcttggttacaacagtgatgtctcagaaaccaagtcccagattgaggaaaaaaggaacatagtctctacctc

SEQ ID NO: 67659 - DNA, 120 bp, Artificial Sequence
  ENSG00000075415_26 (sequence is synthesized)
ttcctgagaggaaagtcagtcaacgtgtaagaggagcagtagaaacgcattagtccagccaacgtgaaagtggaccgtagatctaaaacattttgggtatgcagttcagccagcccttac

SEQ ID NO: 67660 - DNA, 120 bp, Artificial Sequence
  ENSG00000075415_27 (sequence is synthesized)
tgaggcagttctgccaatcaggattcaagttttatttcctaagagttataataggttttatttgtgggcattgatacaaaatacgctgtgttcaagctatggagcctgccactgtagtta

SEQ ID NO: 67661 - DNA, 120 bp, Artificial Sequence
  ENSG00000075415_28 (sequence is synthesized)
ctagagttacggttcaaagctatttctgagagaaagccacttcatcctcaaaacccaagaggcccacttaaagtgatgcgaattctcatttcaggtttttaaattatactaaaagattct

SEQ ID NO: 67662 - DNA, 120 bp, Artificial Sequence
  ENSG00000075415_29 (sequence is synthesized)
agtaagaaaattttaatatgtatgtattggtgttctttttacatttcatttaatgaaatgtctactgtcaatacgataaagcagaacccagtggagtaagaatacacgaaactgccaggc

SEQ ID NO: 67663 - DNA, 69 bp, Artificial Sequence
  ENSG00000075415_30 (sequence is synthesized)
gcagaacccagtggagtaagaatacacgaaactgccaggcacagtgggtcatgcctgtaaacccagcat

SEQ ID NO: 67664 - DNA, 120 bp, Artificial Sequence
  ENSG00000075415_31 (sequence is synthesized)
aaaaatatatatatatatatatatatatgaagctgatagttgaattatgttgattcagggacaagatagcattgcatagtaacttccagtaggatcaaatattttgagagtggttaaaac

SEQ ID NO: 67665 - DNA, 120 bp, Artificial Sequence
  ENSG00000075415_32 (sequence is synthesized)
aacttccagtaggatcaaatattttgagagtggttaaaacgccaaggaatcctgattttatgaaattatgccttctgataggtgcaacaaaattgaacagaagagtaacagcttaactaa

SEQ ID NO: 67666 - DNA, 120 bp, Artificial Sequence
  ENSG00000075415_33 (sequence is synthesized)
acctccattgtgtgaaagttttatgaaatgttttgacttttttttttttttccctagagaacagggttcttgctttgtcgcccaggctggagtacagccttgaactcctgggctcaagcg

SEQ ID NO: 67667 - DNA, 120 bp, Artificial Sequence
  ENSG00000075415_34 (sequence is synthesized)
atcctcctgcctcagcctcccagttagctgacacaattgggatgtgccactacttgctcctgttttttcatagacgggtcctgctgttgctcaggctggtctcggattcctggcctcaag

SEQ ID NO: 67668 - DNA, 120 bp, Artificial Sequence
  ENSG00000075415_35 (sequence is synthesized)
caagcaactttcctgccccagctcctaaagcggccagggttacaggtagccgccttgtctgtcccgtttcgaccatattttatttttgagaaggtcttgctctgtcgccagactggagtg

SEQ ID NO: 67669 - DNA, 120 bp, Artificial Sequence
  ENSG00000075415_36 (sequence is synthesized)
caagtgatcctcccacctcagcctcttgaataactgggactgcaagtgtggaccaccatgtctggctaatgttttttatttttagcagaaatgaggtcttgctatgttgccaaggctagt

SEQ ID NO: 67670 - DNA, 120 bp, Artificial Sequence
  ENSG00000075415_37 (sequence is synthesized)
tttagcagaaatgaggtcttgctatgttgccaaggctagtcttgaactcctgagctcaagcgagccttctgccttggccttccaaagggctgggattagagggctgagccaccacacttg

SEQ ID NO: 67671 - DNA, 120 bp, Artificial Sequence
  ENSG00000075415_38 (sequence is synthesized)
tgagccaccacacttggccaaccatattttattttttatatttttattttatttgatccttgttctgaaaccataaagtgagtttaacatttctggctgggcacagtggctcatgcctgt

SEQ ID NO: 67672 - DNA, 120 bp, Artificial Sequence
  ENSG00000075415_39 (sequence is synthesized)
gagcccaggagtttgagaccatcctggacaacataatgagaaaagaaaatacaaaaattaaggggtgtggtgacacatgcctgtagtctcaactatttgggaggctgaggcaggaggatt

SEQ ID NO: 67673 - DNA, 90 bp, Artificial Sequence
  ENSG00000075415_40 (sequence is synthesized)
ctgaggcaggaggattgcttgagcccgagaggttgaggctacagtgagccatgtttacgccattgcagtccagcctgggcgtaacatttc

SEQ ID NO: 67674 - DNA, 120 bp, Artificial Sequence
  ENSG00000075415_41 (sequence is synthesized)
aacatttctatatgatttttgggatcgacatgtccataatgttaatgaagcgcatagcagtcactagtaaattaggagttatacattgcttctatagcatcagaaattgtatatcaggcc

SEQ ID NO: 67675 - DNA, 62 bp, Artificial Sequence
  ENSG00000075415_42 (sequence is synthesized)
atacattgcttctatagcatcagaaattgtatatcaggccaggtgcaaaagctcactcctga

SEQ ID NO: 67676 - DNA, 75 bp, Artificial Sequence
  ENSG00000075415_43 (sequence is synthesized)
ccagcctgggcgacagagccagactgtctgaggaagaaattgtatatcaggctgggcagggtatcacttgagccc

SEQ ID NO: 67677 - DNA, 76 bp, Artificial Sequence
  ENSG00000075415_44 (sequence is synthesized)
agtgagacccctctctctacaaaaaattaggaagctgaaggaggatcgtctgagcccaggagtttgaggctgcaat

SEQ ID NO: 67678 - DNA, 120 bp, Artificial Sequence
  ENSG00000075415_45 (sequence is synthesized)
caggagtttgaggctgcaatgagctacaatcacacccctgcactccggcctgggcgacagagtgataacctgtctaaaaaaataaaaataaattgtataatcatattgcaattttctttg

SEQ ID NO: 67679 - DNA, 120 bp, Artificial Sequence
  ENSG00000075415_46 (sequence is synthesized)
attgcaattttctttgcattactgatgaggaaaaatctcaaagtaattgtaaaaaatcctggatatcacatagttgagaaacaaagttattttaaacttacaggactctgtagttcacag

SEQ ID NO: 67680 - DNA, 120 bp, Artificial Sequence
  ENSG00000075415_47 (sequence is synthesized)
ttgaacactgtggcttcctgaaatatcaaagaataatgtacattaataagccagctactatcggcatcttgtaaaaattaaaaaattaaacataaataaaagttcaaactatgtgttgaa

SEQ ID NO: 67681 - DNA, 120 bp, Artificial Sequence
  ENSG00000075415_48 (sequence is synthesized)
cgagtgttcttagatttttgtctgtcttgccttattttagcactgaagaaaatggtcctacaaagtgagcaacttgttttaaatcgtatgcctgtgtcagcagagacaggttgataaatg

SEQ ID NO: 67682 - DNA, 120 bp, Artificial Sequence
  ENSG00000075415_49 (sequence is synthesized)
tatttcattaaattacaattctccttttaatatactatcttgttttctaagtaagttggattttgagttttttagagaagggctctgggactcctttgcgtagttccggggcatggcatc

SEQ ID NO: 67683 - DNA, 120 bp, Artificial Sequence
  ENSG00000075415_50 (sequence is synthesized)
tagatattttttgaatattcatgttgttcacatagttacgtgttttgttaatgaggttatgagaccacatatatattccatatcatcgtgtgttactttataaaatgtctgaagcttagt

SEQ ID NO: 67684 - DNA, 120 bp, Artificial Sequence
  ENSG00000075415_51 (sequence is synthesized)
tgttttctagaactgtcacttcaattgaaaaccaacacaacagcaattcacatcccttccttgtgttttggattttaggagaatacttatctctggcgcacatcactatatttggctgcc

SEQ ID NO: 67685 - DNA, 120 bp, Artificial Sequence
  ENSG00000075415_52 (sequence is synthesized)
caggactcgactcgtgtgcggacatttctgttaataatgacagtctctgatagatgagtgtatgcaactgtgtaaaacaagtctcttgatttcctagattctacaagggggttgctcctc

SEQ ID NO: 67686 - DNA, 120 bp, Artificial Sequence
  ENSG00000075415_53 (sequence is synthesized)
gtggaaggtgagatcagaccctgcccaatacagtcgtgtggtctacttgtgggccgcccagcctttgaggcctggacccggcttggaggacagggaaggacgagtccagcccgctgcacc

SEQ ID NO: 67687 - DNA, 120 bp, Artificial Sequence
  ENSG00000075415_54 (sequence is synthesized)
gtaggacggcgcccagttgcttgccctggggtatcggccttttccaccataggcgggtgtcagatccttggccttccctcaagggcgtggaagcgctgaggccctgtgtcccttcgtgac

SEQ ID NO: 67688 - DNA, 120 bp, Artificial Sequence
  ENSG00000075415_55 (sequence is synthesized)
ctccgtgtgcccgagggaagagaggccgtgactagctctttctccgccgtgagctcgcttggtcagcaaactaagtactgggtaaactctcctcccgaaactactgaccacccacagttc

SEQ ID NO: 67689 - DNA, 120 bp, Artificial Sequence
  ENSG00000075415_56 (sequence is synthesized)
tactaactatattacctgtcctttgatttgcccttagttttcttaaaaatagtcctttcctaagttttatatttgtcgacgccaggtcagtcatttttgcacttaattgtatatgagata

SEQ ID NO: 67690 - DNA, 120 bp, Artificial Sequence
  ENSG00000075415_57 (sequence is synthesized)
actagatgtcctgttttcgtgcgactggaggaggcagcttgcagccctacataggcaatagaaaggagataattggtgggcgtccctttggtgtgattatctcttgggattcttggtggt

SEQ ID NO: 67691 - DNA, 120 bp, Artificial Sequence
  ENSG00000075415_58 (sequence is synthesized)
tgggcccagctttaacttagttgtgtgtgttttaaatcctagtgaagtatgtacatacagagaaacctgaaaaccgaattgtaggagtcctaagaatgttatctaccttgtgcctgtaaa

SEQ ID NO: 67692 - DNA, 120 bp, Artificial Sequence
  ENSG00000075415_59 (sequence is synthesized)
atcgaaagatttttttctttaaatcattcatgtgcttctgttgtctttagtatggatagagtccttatttacactatctgtcgttcagtttaaaagttaaagctaacattatttgtgtat

SEQ ID NO: 67693 - DNA, 120 bp, Artificial Sequence
  ENSG00000075415_60 (sequence is synthesized)
taaatgtatttgactgcaggaatttgtgcgtatccgtttttatgttacaggagttcttaagtggggatagtattggttagtggctgggataaactttgaagttgtttgcaagccttttac

SEQ ID NO: 67694 - DNA, 120 bp, Artificial Sequence
  ENSG00000075415_61 (sequence is synthesized)
atgtcgagtgatctttctgagtttcgtttgtactctgaagtgtgctcttaccagtggttaataatttgaagtttgactttaattgtaaaagccgttaatgtagaaaacttttaaaaaaat

SEQ ID NO: 67695 - DNA, 120 bp, Artificial Sequence
  ENSG00000075415_62 (sequence is synthesized)
taatatggcagaatacgagctattaatagtatcagatacagaaccctcataatttttaaatgatctgaatttggcagtgaatttttttttaagccacttaattgtggccaaagctattca

SEQ ID NO: 67696 - DNA, 120 bp, Artificial Sequence
  ENSG00000075415_63 (sequence is synthesized)
gctgtgataatagtatctcacagggaaacattttctttcattccagtggccttagtcatctctgaagaaatacttacttgatttttttttttccaatcaaacagagcagtatagctgtga

SEQ ID NO: 67697 - DNA, 120 bp, Artificial Sequence
  ENSG00000075415_64 (sequence is synthesized)
ttgcatgctggactagagcatattgaagcatgactgactgttaagttataagatatagtcatctaacaagctgtgtggaaacctaactgtccaggaggtaagtttatgaccagtaacatg

SEQ ID NO: 67698 - DNA, 120 bp, Artificial Sequence
  ENSG00000075415_65 (sequence is synthesized)
tacagatgtgagccaccgtgcctggcaggaattactgtagttaccttttgtgtagttgctgaaatttattatggaacccaaacaaaaataatcatgagattaaatttttatgttagctgt

SEQ ID NO: 67699 - DNA, 120 bp, Artificial Sequence
  ENSG00000075415_66 (sequence is synthesized)
attttagaactagaaaaatattattttaaaatcataaaaatgattattggctctgtgaagttttgtttttaactggcactgtatgggatcctttatcttttttcagctggagtcttttgt

SEQ ID NO: 67700 - DNA, 120 bp, Artificial Sequence
  ENSG00000075420_0 (sequence is synthesized)
aagctcgggcgggggagcggggcgcggcgggaaggagcgggcgacccggtgtgtgggccagcggagctccggaagccagttgagggaagttctccatgaatgtacgtcacaatgatgatg

SEQ ID NO: 67701 - DNA, 120 bp, Artificial Sequence
  ENSG00000075420_1 (sequence is synthesized)
accgaccaaatccctctggaactgccaccattgctgaacggagaggtagccatgatgccccacttggtgaatggagatgcagctcagcaggttattctcgttcaagttaatccaggtgag

SEQ ID NO: 67702 - DNA, 120 bp, Artificial Sequence
  ENSG00000075420_2 (sequence is synthesized)
actttcacaataagagcagaggatggaacacttcagtgcattcaaggacctgctgaagttcccatgatgtcacccaatggatccattcctcccattcatgtgcctccaggttatatctca

SEQ ID NO: 67703 - DNA, 120 bp, Artificial Sequence
  ENSG00000075420_3 (sequence is synthesized)
caggtgattgaagatagtactggagtccgccgggtggtggtcacaccccagtctcctgagtgttatcccccaagctacccctcagccatgtctccaacccatcatctccctccctatctg

SEQ ID NO: 67704 - DNA, 120 bp, Artificial Sequence
  ENSG00000075420_4 (sequence is synthesized)
actcaccatccacattttattcataactcacacacggcttactacccacctgttaccggacctggagatatgccgcctcagttttttccccagcatcatcttccccacacaatatatggt

SEQ ID NO: 67705 - DNA, 120 bp, Artificial Sequence
  ENSG00000075420_5 (sequence is synthesized)
gagcaagaaattataccattttatggaatgtcaacctacatcacccgagaagaccagtacagcaagcctccgcacaaaaaactgaaagaccgccagatcgatcgccagaaccgcctcaac

SEQ ID NO: 67706 - DNA, 120 bp, Artificial Sequence
  ENSG00000075420_6 (sequence is synthesized)
agccctccttcttctatctacaaaagcagctgcacaacagtatacaatggctatgggaagggccatagtggtggaagtggcggaggcggcagcggtagtggtcccggaattaagaaaaca

SEQ ID NO: 67707 - DNA, 120 bp, Artificial Sequence
  ENSG00000075420_7 (sequence is synthesized)
gagcgacgagcaagaagcagcccaaagtcgaatgattcagacttgcaagaatatgagttggaagtaaagagggtgcaagacattctttcgggaatagagaaaccacaggtttctaatatt

SEQ ID NO: 67708 - DNA, 120 bp, Artificial Sequence
  ENSG00000075420_8 (sequence is synthesized)
caggcaagagcagttgtgttgtcctgggctccccctgttggactttcctgtggaccccacagtggtctttccttcccctacagttacgaggtggccttatcagacaaaggacgagatgga

SEQ ID NO: 67709 - DNA, 120 bp, Artificial Sequence
  ENSG00000075420_9 (sequence is synthesized)
aaatacaagataatttacagtggagaagaattagaatgtaacctgaaagatcttagaccagcaacagattatcatgtgagggtgtatgccatgtacaattccgtaaagggatcctgctcc

SEQ ID NO: 67710 - DNA, 120 bp, Artificial Sequence
  ENSG00000075420_10 (sequence is synthesized)
gagcctgttagcttcaccacccacagctgtgcacccgagtgtcctttcccccctaagctggcacataggagcaaaagttcactaaccctgcagtggaaggcaccaattgacaacggttca

SEQ ID NO: 67711 - DNA, 120 bp, Artificial Sequence
  ENSG00000075420_11 (sequence is synthesized)
aaaatcaccaactaccttttagagtgggatgagggaaaaagaaatagtggtttcagacagtgcttcttcgggagccagaagcactgcaagttgacaaagctttgtccggcaatggggtac

SEQ ID NO: 67712 - DNA, 120 bp, Artificial Sequence
  ENSG00000075420_12 (sequence is synthesized)
acattcaggctggccgctcgaaacgacattggtaccagtggttatagccaagaggtggtgtgctacacattaggaaatatccctcagatgccttctgcaccaaggctggttcgagctggc

SEQ ID NO: 67713 - DNA, 120 bp, Artificial Sequence
  ENSG00000075420_13 (sequence is synthesized)
atcacatgggtcacgttgcagtggagtaagccagaaggctgttcacccgaggaagtgatcacctacaccttggaaattcaggaggatgaaaatgataaccttttccacccaaaatacact

SEQ ID NO: 67714 - DNA, 120 bp, Artificial Sequence
  ENSG00000075420_14 (sequence is synthesized)
ggagaggatttaacctgtactgtgaaaaatctcaaaagaagcacacagtataaattcaggctgactgcttctaatacggaaggaaaaagctgtccaagcgaagttcttgtttgtacgacg

SEQ ID NO: 67715 - DNA, 120 bp, Artificial Sequence
  ENSG00000075420_15 (sequence is synthesized)
agtcctgacaggcctggacctcctaccagaccgcttgtcaaaggcccagttacatctcatggctttagtgtcaaatgggatccccctaaggacaatggtggttcagaaatcctcaagtac

SEQ ID NO: 67716 - DNA, 120 bp, Artificial Sequence
  ENSG00000075420_16 (sequence is synthesized)
ttgctagagattactgatggaaattctgaagcgaatcagtgggaagtggcctacagtgggtcggctaccgaatacaccttcacccacttgaaaccaggcactttgtacaaactccgagca

SEQ ID NO: 67717 - DNA, 120 bp, Artificial Sequence
  ENSG00000075420_17 (sequence is synthesized)
tgctgcatcagtaccggcggacacagccagtgttctgaaagtctccctgttcgcacactaagcattgcaccaggtcaatgtcgaccaccgagggttttgggtagaccaaagcacaaagaa

SEQ ID NO: 67718 - DNA, 120 bp, Artificial Sequence
  ENSG00000075420_18 (sequence is synthesized)
gtccacttagagtgggatgttcctgcatcggaaagtggctgtgaggtctcagagtacagcgtggagatgacggagcccgaagacgtagcctcggaagtgtaccatggcccagagctggag

SEQ ID NO: 67719 - DNA, 120 bp, Artificial Sequence
  ENSG00000075420_19 (sequence is synthesized)
tgcaccgtcggcaacctgcttcctggaaccgtgtatcgcttccgggtgagggctctgaatgatggagggtatggtccctattctgatgtctcagaaattaccactgctgcagggcctcct

SEQ ID NO: 67720 - DNA, 120 bp, Artificial Sequence
  ENSG00000075420_20 (sequence is synthesized)
ggacaatgcaaagcaccttgtatttcttgtacacctgatggatgtgtcttagtgggttgggagagtcctgatagttctggtgctgacatctcagagtacaggttggaatggggagaagat

SEQ ID NO: 67721 - DNA, 120 bp, Artificial Sequence
  ENSG00000075420_21 (sequence is synthesized)
gaagaatccttagaactcatttatcatgggacagacacccgttttgaaataagagacctgttgcctgctgcacagtattgctgtagactacaggccttcaatcaagcaggggcagggccg

SEQ ID NO: 67722 - DNA, 120 bp, Artificial Sequence
  ENSG00000075420_22 (sequence is synthesized)
tacagtgaacttgtcctttgccagacgccagcgtctgcccctgaccccgtctccactctctgtgtcctggaggaggagccccttgatgcctaccctgattcaccttctgcgtgccttgta

SEQ ID NO: 67723 - DNA, 120 bp, Artificial Sequence
  ENSG00000075420_23 (sequence is synthesized)
ctgaactgggaagagccgtgcaataacggatctgaaatccttgcttacaccattgatctaggagacactagcattaccgtgggcaacaccaccatgcatgttatgaaagatctccttcca

SEQ ID NO: 67724 - DNA, 120 bp, Artificial Sequence
  ENSG00000075420_24 (sequence is synthesized)
gaaaccacctaccggatcagaattcaggctataaatgaaattggagctggaccatttagtcagttcattaaagcaaaaactcggccattaccacccttgcctcctaggctagaatgtgct

SEQ ID NO: 67725 - DNA, 120 bp, Artificial Sequence
  ENSG00000075420_25 (sequence is synthesized)
gctgctggtcctcagagcctgaagctaaaatggggagacagtaactccaagacacatgctgctgaggacattgtgtacacactacagctggaggacagaaacaagaggtttatttcaatc

SEQ ID NO: 67726 - DNA, 120 bp, Artificial Sequence
  ENSG00000075420_26 (sequence is synthesized)
tacagaggacccagccacacctacaaggtccagagactgacggaattcacatgctactccttcagaatccaggcagcaagcgaggctggagaagggcccttctcagaaacctataccttc

SEQ ID NO: 67727 - DNA, 120 bp, Artificial Sequence
  ENSG00000075420_27 (sequence is synthesized)
agcacaaccaaaagtgtcccccccaccatcaaagcacctcgagtaacacagttagaaggaaattcatgtgaaattttatgggagacggtaccatcaatgaaaggtgaccctgttaactac

SEQ ID NO: 67728 - DNA, 120 bp, Artificial Sequence
  ENSG00000075420_28 (sequence is synthesized)
attctgcaggtattggttggaagagaatctgagtacaaacaggtgtacaagggagaagaagccacattccaaatctcaggcctccagaccaacacagactacaggttccgcgtatgtgcg

SEQ ID NO: 67729 - DNA, 120 bp, Artificial Sequence
  ENSG00000075420_29 (sequence is synthesized)
tgtcgtcgctgtttagacacctctcaggagctaagcggagccttcagcccctctgcggcttttgtattacaacgaagtgaggtcatgcttacaggggacatggggagcttagatgatccc

SEQ ID NO: 67730 - DNA, 120 bp, Artificial Sequence
  ENSG00000075420_30 (sequence is synthesized)
aaaatgaagagcatgatgcctactgatgaacagtttgcagccatcattgtgcttggctttgcaactttgtccattttatttgcctttatattacagtacttcttaatgaagtaaacccaa

SEQ ID NO: 67731 - DNA, 120 bp, Artificial Sequence
  ENSG00000075420_31 (sequence is synthesized)
caaaactagaggtatgaattaatgctacacattttaatacacacatttattcagatactcccctttttaaagcccttttgttttttgatttatatactctgttttacagatttagctaga

SEQ ID NO: 67732 - DNA, 120 bp, Artificial Sequence
  ENSG00000075420_32 (sequence is synthesized)
taccagataccaaaagctagctttcttatgttttcctttaaattttcagatttaccttcattctgttttcactgatgtcttttgcaagcctttgatttttttttttttgttacagtttag

SEQ ID NO: 67733 - DNA, 120 bp, Artificial Sequence
  ENSG00000075420_33 (sequence is synthesized)
taatttatattcaccagtcacttcatatgtcttgaacatctgtatctgtaaacatgaatcaccgtgtgtgtacttacagggctaggatttcagtgttgtcagagtattaccacacagcaa

SEQ ID NO: 67734 - DNA, 120 bp, Artificial Sequence
  ENSG00000075420_34 (sequence is synthesized)
cagcaacatacagaagatatgttcactcagataagactgccctaaacaaccattttgtcactcagttatttaactgtgtttagctcatttaaatcaaaatgtgtactttaatctaaaatg

SEQ ID NO: 67735 - DNA, 120 bp, Artificial Sequence
  ENSG00000075420_35 (sequence is synthesized)
ttttaataatctgtatttcttataattttaacactatgagctgcctgtataagaaatcaagtaaccagaatgcacctataaattatggagcattgtagattttaccacatcaattcatag

SEQ ID NO: 67736 - DNA, 120 bp, Artificial Sequence
  ENSG00000075420_36 (sequence is synthesized)
cagtaactttaagagggcattgtgcaatagttagttgttttcttgttcagctattttaaaggctgctttaacttgtttgtttgtctttgtatataactacttctaatctaatcactagag

SEQ ID NO: 67737 - DNA, 120 bp, Artificial Sequence
  ENSG00000075420_37 (sequence is synthesized)
ttattatattctgttatgtttgaccagaattatatgacaagaactggtgacagtttagtgcctctgcccattgtccatgatttacactaattgtgagcagtcttcttatgtgtcagctca

SEQ ID NO: 67738 - DNA, 120 bp, Artificial Sequence
  ENSG00000075420_38 (sequence is synthesized)
ttatttttgaaacatttgcctttaggctgttctttgaggtatcaatgaagtgattgaatttcaataccttaattcagtgcacataatactaatgtaacagcagatgaaaattgataaaac

SEQ ID NO: 67739 - DNA, 120 bp, Artificial Sequence
  ENSG00000075420_39 (sequence is synthesized)
ccaaaagagagtcatctaaatttgtagttcctatttctgtgggtttgcctggccatggttggagagggaatggtgtttgatggtaaacacagggtgtttggggatcaaggagcctagatt

SEQ ID NO: 67740 - DNA, 120 bp, Artificial Sequence
  ENSG00000075420_40 (sequence is synthesized)
ctctccctggatctgtcactaacttgctgcgtgacctgaacacgtcactttacctctctgtgcctcagttttcccatgcatgaaaaataaaataaaataaaacggggattctaatgtttg

SEQ ID NO: 67741 - DNA, 120 bp, Artificial Sequence
  ENSG00000075420_41 (sequence is synthesized)
taagtgctttgagatctttgaccaacaggtgctattggagtgcaaagtgttactcttacgtgtttattttgagtcatgagataatcaattttaacccaaagtcattggattatttatatg

SEQ ID NO: 67742 - DNA, 120 bp, Artificial Sequence
  ENSG00000075420_42 (sequence is synthesized)
aagtccataatgttcgagtacctcagggacatttaagagttggaggtgcaaatatattccaaaagggtgcaacagacacagtgtatccccctgcttctgtttttgtatatttttgctact

SEQ ID NO: 67743 - DNA, 120 bp, Artificial Sequence
  ENSG00000075420_43 (sequence is synthesized)
tggtttttcttgatcatagctattttgtgcttgatctttattgtctaagatgcagtatcctgtactagcttataatattcccataccaaagtcatggggaaacaaacattattttgtttt

SEQ ID NO: 67744 - DNA, 120 bp, Artificial Sequence
  ENSG00000075420_44 (sequence is synthesized)
tggtttatttatactatattctgcatacagtactttaaatgccaattacagtgcaatctttatttattgtaaaattttttaagtgtacttatgtactaattttcccttgtagcatgttat

SEQ ID NO: 67745 - DNA, 120 bp, Artificial Sequence
  ENSG00000075420_45 (sequence is synthesized)
atttttgtgttttatacttttgtaattttaggtcagtcttgttccttggcaacatctgtagtattattaatcttctgacattttcttatgtttttaaaaagataagagcatctagtgcat

SEQ ID NO: 67746 - DNA, 120 bp, Artificial Sequence
  ENSG00000075420_46 (sequence is synthesized)
taaatgccaaaaaaaaaatacattatcagtgattgaaacgtttacatgtacccaaaaaccataatcatctcttggaagaaaatgctgagatcaatgaattattctgtgtgcctatattga

SEQ ID NO: 67747 - DNA, 120 bp, Artificial Sequence
  ENSG00000075420_47 (sequence is synthesized)
cgtagtgagtactagagagttctgtattttattattgactataataattagtttaattagctttgcaaactgatggcatcaaggtaaatatatttttgccaaagttctggccttccaaaa

SEQ ID NO: 67748 - DNA, 120 bp, Artificial Sequence
  ENSG00000075420_48 (sequence is synthesized)
ctcacccccttatttaaatgtgtgctatgacccactatgaccacagcatctgcattttctaaaaaattccatgcaggtgttttggggagaggtattttttaagcaatgaaaattcaactg

SEQ ID NO: 67749 - DNA, 120 bp, Artificial Sequence
  ENSG00000075420_49 (sequence is synthesized)
agtacaaagccccctcttggggggttggggaagtctcttttttgaaacacttcagaactgctgctataaagaaattctctaattggttgaattttttttttaagtaaatagtactttagg

SEQ ID NO: 67750 - DNA, 120 bp, Artificial Sequence
  ENSG00000075420_50 (sequence is synthesized)
ccaaaatttatatgaatatttgatcttcttgagattttcatactatcatttaaccaccaggaagctgaagtgtgtgaagtacaaagctgacagcactttattttattgctctccattatt

SEQ ID NO: 67751 - DNA, 120 bp, Artificial Sequence
  ENSG00000075420_51 (sequence is synthesized)
tggtattcattatattccttcagtcagaaaattattactctctatggcactgttttttatcacaaatatgtatatgtgatattgatatataactatatatattgccatcacacacgaaca

SEQ ID NO: 67752 - DNA, 120 bp, Artificial Sequence
  ENSG00000075420_52 (sequence is synthesized)
ataaaataaagtgttctattaacctgatctctttgcccttttgctatgtgaggagtgaatgagtggccttctgatgctctgactcttctctgtatgtcaaactcatccctggcacaagaa

SEQ ID NO: 67753 - DNA, 120 bp, Artificial Sequence
  ENSG00000075420_53 (sequence is synthesized)
attccagtcatgtgaagcaaactgccctttgtcctcaaagaaattgttgaaaaagaaaactttttaaagagattttttgcatattctctgccttgttcttatcaacttgaaatgttggca

SEQ ID NO: 67754 - DNA, 120 bp, Artificial Sequence
  ENSG00000075420_54 (sequence is synthesized)
ttttctaaccttgttttgttggctacaataattcagtattcatgtcaaaattgagaagtgccctaattgaatgtgtttgaatgttatccttgcacaattctttaaattgaaagataaaat

SEQ ID NO: 67755 - DNA, 120 bp, Artificial Sequence
  ENSG00000075420_55 (sequence is synthesized)
gttttacctcactgttggacatacattccaagcttttcaactctaggagaaaaagaaaatcatgttttcctgtattgtaaattttagactatttcatatacattgtattaaaactgccat

SEQ ID NO: 67756 - DNA, 120 bp, Artificial Sequence
  ENSG00000075420_56 (sequence is synthesized)
ccatatcaattttaatgtatagattttgcaaatattatgctatatgtaatacctaactgtatctgtagtgtatatgtaatatatttatgcccaataaatgttttaattctttctgactta

SEQ ID NO: 67757 - DNA, 78 bp, Artificial Sequence
  ENSG00000075420_57 (sequence is synthesized)
ttatgcccaataaatgttttaattctttctgacttaaatagggtttttctgccatgactaggattgcttttgttgttg

SEQ ID NO: 67758 - DNA, 60 bp, Artificial Sequence
  ENSG00000075420_58 (sequence is synthesized)
cctgcctcagcctcccaagtagctggggattacaggcactcgccaccatgcccggatacc

SEQ ID NO: 67759 - DNA, 120 bp, Artificial Sequence
  ENSG00000075420_59 (sequence is synthesized)
gggattacaggtgtgagcccccgcacccagccttattcttcccttttaaatacttaaagcacattcagattagttgaaaattcacgtgtttttggaggccaggcaggtggccttctgcag

SEQ ID NO: 67760 - DNA, 120 bp, Artificial Sequence
  ENSG00000075420_60 (sequence is synthesized)
agacagcagcagctcagctcttgctgaccaaggccttggaggactgtgagccacaatcacatatgtccatgtttcaaaagaagctaaatatccagatttcctccatgggccaactaaaag

SEQ ID NO: 67761 - DNA, 120 bp, Artificial Sequence
  ENSG00000075420_61 (sequence is synthesized)
gtgattgtggactatacaggctgccagtttaatcctttatcagagtctctgtggataatgtaccttgttgcctaatactttatctgtctaccaaaactcagtccagatctccctctgttc

SEQ ID NO: 67762 - DNA, 120 bp, Artificial Sequence
  ENSG00000075420_62 (sequence is synthesized)
acctggcacactgggtgcttcctctcccctgacgaactctatagagtgttcatgtcctttcctgcaggtctcattcaacaacaacaacaacaacagcaataaaacacagtgttcctgcta

SEQ ID NO: 67763 - DNA, 120 bp, Artificial Sequence
  ENSG00000075420_63 (sequence is synthesized)
attgacatggcggaatcccccatcaaaccctcctggtagttatttgagcggcggcggcggcggctggaggaggagagcggcggcggcgggagcagcgaagggggcggcagggatcctcca

SEQ ID NO: 67764 - DNA, 120 bp, Artificial Sequence
  ENSG00000075420_64 (sequence is synthesized)
ggctgccggctgggaaggcgtgggcgacccggtgtgtggcgcgcccagagccccgcgtttcagccctagggaaggaagccagttgagggaagttctccatgaatgtacgtcacaatgatg

SEQ ID NO: 67765 - DNA, 120 bp, Artificial Sequence
  ENSG00000075420_65 (sequence is synthesized)
attacgagcacttcgcggtgtggcttttcaatgtctgaagtggattaagtggcccacagtcagttctgtgacttgagtttcaaaagtaaaattaccatcaacaatgtgattcaattttat

SEQ ID NO: 67766 - DNA, 120 bp, Artificial Sequence
  ENSG00000075420_66 (sequence is synthesized)
tttctatactagctaaaagcaaggaactatattattaacaatcttggctttactgtagtttaaggcaggtgatgatgatgcttattagtccacctgaaagagtccttccaggtttttgga

SEQ ID NO: 67767 - DNA, 120 bp, Artificial Sequence
  ENSG00000075420_67 (sequence is synthesized)
agctttattcctgcttattaccttgcccttgagaagtccttcatggaaagtggaaacactgggttgacttcttttccccatatcctagttgaaagggacagcttatatgtatgttagact

SEQ ID NO: 67768 - DNA, 120 bp, Artificial Sequence
  ENSG00000075420_68 (sequence is synthesized)
gtccaaaagtgtttgtagaacctcattttaaaaaatcaactgtattgtactttttaaaaaatgggatcttaaactctttattaaaaataataaatggaaatgtgttaagcaaaaacatta

SEQ ID NO: 67769 - DNA, 120 bp, Artificial Sequence
  ENSG00000075420_69 (sequence is synthesized)
gcctacagaagagagaagccatgagagacagttgagctcatattaatgagcactcaccatgccaggcttggttctgggtgctgagaagacagcagcaaacagaactgacaatgaagaaag

SEQ ID NO: 67770 - DNA, 120 bp, Artificial Sequence
  ENSG00000075420_70 (sequence is synthesized)
agttaaacaaataaacatataccagaggaggtgatggcgatcaagaaaatactagatgaagtggtgaagagagcctgcgattgaagattttttcatctcagctttttcccccttaccttg

SEQ ID NO: 67771 - DNA, 120 bp, Artificial Sequence
  ENSG00000075420_71 (sequence is synthesized)
aagaaatacctagaatttgatcaccaacaattccaagtatatttttattcattaaaaattaaactgcagtgggcatctgacttagttttcttggatgtcctctgagaaatatgaaagcag

SEQ ID NO: 67772 - DNA, 120 bp, Artificial Sequence
  ENSG00000075420_72 (sequence is synthesized)
attgccctgttttgtcaaaaatcagcatatttttatttcatgtcccaagaaagggaaaatattttgtcaaccaactaattattttacaattaaaaaaatgacagacatctactactcagg

SEQ ID NO: 67773 - DNA, 120 bp, Artificial Sequence
  ENSG00000075420_73 (sequence is synthesized)
gactgtatataggagaaaaacttacacacattgaattgaaagtgaaaatcattgggtaatatttgttaattagttgtgttgatgatgatgttagcctagcttttatttggttataagctt

SEQ ID NO: 67774 - DNA, 120 bp, Artificial Sequence
  ENSG00000075420_74 (sequence is synthesized)
ttctctccagtctgtgacctcttattactgtttcttttgcctttttatccagctcttaactcttagcctttttccagataaagtcaaccagagagtagctcatggggttttagaacatat

SEQ ID NO: 67775 - DNA, 120 bp, Artificial Sequence
  ENSG00000075420_75 (sequence is synthesized)
atttggagatcgttctggggttaaggtttattttcttacttagaataatctcttctagtcagtagatcctgcctatcttgaaatggagctgggtggcacacactgagacaaatacctgtt

SEQ ID NO: 67776 - DNA, 120 bp, Artificial Sequence
  ENSG00000075420_76 (sequence is synthesized)
atgatactcactccgtaagaaattctgttcatctacagaaagccttagggtgaaacaaagataagaatcctggtcttctatgatgagtcactgccactgactgtgtctgttttgttttca

SEQ ID NO: 67777 - DNA, 120 bp, Artificial Sequence
  ENSG00000075420_77 (sequence is synthesized)
agccatattccaggagttaatttgggtaccgtagtgctaggtttgccatcattttgtggcaccacatggcgtttcttgtgtcttgccacttgacgtaccagagaaccagagaaaaggaga

SEQ ID NO: 67778 - DNA, 120 bp, Artificial Sequence
  ENSG00000075420_78 (sequence is synthesized)
cacagaaggcctactagactgtcctctgccaagtggggtttttatatttgattgtttggttgtgatttctttatggagtctcctgcttcagacatttccttccacctgtaatacaacttt

SEQ ID NO: 67779 - DNA, 120 bp, Artificial Sequence
  ENSG00000075420_79 (sequence is synthesized)
caggtatgacgtttccttgtcctcttgcccttcagcctttggatggtgatcctgagccttcttttacatagctggaaggcatgaggaagcctgctgcctccacactaaatcaactggagg

SEQ ID NO: 67780 - DNA, 120 bp, Artificial Sequence
  ENSG00000075420_80 (sequence is synthesized)
ttttccaagagggaatcctaatcagaggagagaaggcctcctttaagctggtgaatgtcactatggcctctgcagtcttgcaagctgtattgcgaaggccccactaggggtctctaagaa

SEQ ID NO: 67781 - DNA, 120 bp, Artificial Sequence
  ENSG00000075420_81 (sequence is synthesized)
ccaaggtgaaggtagcagtacagatcttgaaaggaattcctcttggagctttaattttttagatcacatgcctttttcttttatcactttagcaagctcttcattcacttgccttttttc

SEQ ID NO: 67782 - DNA, 120 bp, Artificial Sequence
  ENSG00000075420_82 (sequence is synthesized)
aattatgtgagtgtttcctggtacaaagaaagagatgctgggccagccattgttgtcaagcccagggcagatacggaattggagaaaacctggactgtcttagaggcctctgcaggcctc

SEQ ID NO: 67783 - DNA, 120 bp, Artificial Sequence
  ENSG00000075420_83 (sequence is synthesized)
taggctgtatgagaaaggcgagaacgggtgtactgtaaggtatcaattgattaaagaggctttgaaaaggccatgtttcagttgcacttggggggtaactcttcattaagggaaaaatct

SEQ ID NO: 67784 - DNA, 120 bp, Artificial Sequence
  ENSG00000075420_84 (sequence is synthesized)
ttttctttcatcactgcttgttgaaatcttcttaaaggttttgcacatcggtggtccccaaccctctttccaacctaaagaacctctttttaacatcacaaagttttacagacctgcctc

SEQ ID NO: 67785 - DNA, 120 bp, Artificial Sequence
  ENSG00000075420_85 (sequence is synthesized)
caccaccatggtagccattacagcttcagagttcactggttgaaaaaataccgacacaaagccctttatggctcaagaatttttaaatgaattggaagcatccacaaacttttgaaaaac

SEQ ID NO: 67786 - DNA, 120 bp, Artificial Sequence
  ENSG00000075420_86 (sequence is synthesized)
agcactgtatatattgtaaaacattatttcatcaacaaatatttgttgctcacattgatttgaaggctccttgacccgtaacttgataaacattgccttgtgctataccttctttccagt

SEQ ID NO: 67787 - DNA, 120 bp, Artificial Sequence
  ENSG00000075420_87 (sequence is synthesized)
gcttttgaggggggaaaatgaattcttaagtacaattgtcctttggtttccacaggggattggtttcaggacttcccccacctccctgccatgaataccaaaatctatggatgccccagt

SEQ ID NO: 67788 - DNA, 120 bp, Artificial Sequence
  ENSG00000075420_88 (sequence is synthesized)
cactgatataaaatggcatagtctttgcatataacctacacacatccttctctccttaaatcttctctaacttgcttataatatccaatataatgcccacacgtcacttcattcacgtgg

SEQ ID NO: 67789 - DNA, 120 bp, Artificial Sequence
  ENSG00000075420_89 (sequence is synthesized)
catggggtggggggatggggaagctgaaggtggttatagggaatatcacacacagcatccttacctggctttgcttactctacctgctaggctgagttgggtagtgtgcaggctgagcct

SEQ ID NO: 67790 - DNA, 120 bp, Artificial Sequence
  ENSG00000075420_90 (sequence is synthesized)
gctgctgctactgttttttttttttttttcttttgatagatttttaaaaaatgattcattttagtagtgacaagccaaaaaaattgtggatggtatttgcagaagttttctgcattcgga

SEQ ID NO: 67791 - DNA, 120 bp, Artificial Sequence
  ENSG00000075420_91 (sequence is synthesized)
atatatgtgtgagaaacatcctgagaattctacaaattggaatggacaatttcattaaaatgtaatcgtaatggacaattaaattttagtggaaattaaaatggatgatttttaagagta

SEQ ID NO: 67792 - DNA, 120 bp, Artificial Sequence
  ENSG00000075420_92 (sequence is synthesized)
tctcatttactctatgattttcctgtttacatatttttttctcctatatttttaaggcatggatttgaatgtagtaatctctgcatgcatcgttcattcttcaatagttcatccttaaaa

SEQ ID NO: 67793 - DNA, 120 bp, Artificial Sequence
  ENSG00000075420_93 (sequence is synthesized)
agcaatacttaatagaaaaattttgatttataaagttaatattgaaaataaatttcaaaatttaggtttgttaagtaaactttagcatacagaacatttaagttgcaatgaattagggat

SEQ ID NO: 67794 - DNA, 120 bp, Artificial Sequence
  ENSG00000075420_94 (sequence is synthesized)
ggatagttttgtttccattggtgtttgttgtataaagtcttgaactttgggaaattttaacattaaagttcataaggagtttgaggttgtctggcaaaaggatattgtgcctcacctctg

SEQ ID NO: 67795 - DNA, 120 bp, Artificial Sequence
  ENSG00000075420_95 (sequence is synthesized)
ttgtgtgaattatttcaataaaatgaatacaattagaaggttgacaattaatatgtaaaagtgttatgcgtatcatttttactaatgtcataataatattaactaataggcaaaaaaaaa

SEQ ID NO: 67796 - DNA, 120 bp, Artificial Sequence
  ENSG00000075420_96 (sequence is synthesized)
agtaatcattaattctaaagatagaattattattacaataaacaaactttagtcacatattggcagtttttctatttcaaacacagcaccagagatcagagtctacttgaaacttacatt

SEQ ID NO: 67797 - DNA, 120 bp, Artificial Sequence
  ENSG00000075420_97 (sequence is synthesized)
tgtgttatttaacaatttttctgtatctttttcattggtgttttgttttgtttatcttttgtttttgtttctttggtttggtttgtttttgttttgttttttgagatacgatctctgtca

SEQ ID NO: 67798 - DNA, 120 bp, Artificial Sequence
  ENSG00000075420_98 (sequence is synthesized)
cacaggctggagggcagtggcacaaacatggcccattgcagtctcaaactcctgggcttaagtgactcttctgccacagaagatgaggaagaatacatttttcatagtgatggggtctca

SEQ ID NO: 67799 - DNA, 83 bp, Artificial Sequence
  ENSG00000075420_99 (sequence is synthesized)
aaacatgaatcaccacactcagcttccatgtctttttatgaactagggttcctaattaatcagataaatttggtattttcatc

SEQ ID NO: 67800 - DNA, 120 bp, Artificial Sequence
  ENSG00000075420_100 (sequence is synthesized)
gaactagggttcctaattaatcagataaatttggtattttcatctcctaacttgccatatgttttctggaaattcttataagcagccgagagtggtggctcacgctgtaatcccagcact

SEQ ID NO: 67801 - DNA, 120 bp, Artificial Sequence
  ENSG00000075426_0 (sequence is synthesized)
gtagtgactcatctcgggcagagcgctagggctccgagcgaaccagcgagcgagcgaacgagcggcgctcggcggggacagaaagagggagagagagagagagagagagggagaggcgcg

SEQ ID NO: 67802 - DNA, 120 bp, Artificial Sequence
  ENSG00000075426_1 (sequence is synthesized)
gggcccgtccgggagcgggctccggggaaggggtgcgggtctgggcgccggagcggggagcggggccgcgtccctctcagcgccagctctacttgagccccacgagccgctgtccccctg

SEQ ID NO: 67803 - DNA, 120 bp, Artificial Sequence
  ENSG00000075426_2 (sequence is synthesized)
gctgtccccctggcgcgctcggggccgcgggacgggcgcacgccgccttctcctagtcaagtatccgagccgccccgaaactcgggcggcgagtcggccacgggaagtttattctccggc

SEQ ID NO: 67804 - DNA, 120 bp, Artificial Sequence
  ENSG00000075426_3 (sequence is synthesized)
tccttttctaaaaggaagaaacagaagtttctcccagcggacagcttttctttccgcctttttggccctgtctgaaatcgggggtccccagggctggcaggccaggctcgctgggctcct

SEQ ID NO: 67805 - DNA, 120 bp, Artificial Sequence
  ENSG00000075426_4 (sequence is synthesized)
aatcttttttttaatttccaatttttgattgggccgtgggtccccgctgagctccggctgcgcgcgggggcgggagggcgcgcgcaggggagggaccgagagacgcgccgactttttaga

SEQ ID NO: 67806 - DNA, 120 bp, Artificial Sequence
  ENSG00000075426_5 (sequence is synthesized)
gggagggatcgggtggacaactggtcccgcggcgctcgcagagccggaaagaagtgctgtaagggacgctcgggggacgctgttcctgaggtgtcgccgcctccctgtcctcgccctccg

SEQ ID NO: 67807 - DNA, 120 bp, Artificial Sequence
  ENSG00000075426_6 (sequence is synthesized)
cggtgggggagaaacccaggagcgaagcccagagcccgcggcgcggccggcggacgaacgagcgcgcagcagccggtgcgcggccgcggcgagggcgggggaagaaaaacaccctgtttc

SEQ ID NO: 67808 - DNA, 120 bp, Artificial Sequence
  ENSG00000075426_7 (sequence is synthesized)
ctctccggcccccaccgcggatcatgtaccaggattatcccgggaactttgacacctcgtcccggggcagcagcggctctcctgcgcacgccgagtcctactccagcggcggcggcggcc

SEQ ID NO: 67809 - DNA, 120 bp, Artificial Sequence
  ENSG00000075426_8 (sequence is synthesized)
agcagaaattccgggtagatatgcctggctcaggcagtgcattcatccccaccatcaacgccatcacgaccagccaggacctgcagtggatggtgcagcccacagtgatcacctccatgt

SEQ ID NO: 67810 - DNA, 120 bp, Artificial Sequence
  ENSG00000075426_9 (sequence is synthesized)
ccaacccataccctcgctcgcacccctacagccccctgccgggcctggcctctgtccctggacacatggccctcccaagacctggcgtgatcaagaccattggcaccaccgtgggccgca

SEQ ID NO: 67811 - DNA, 120 bp, Artificial Sequence
  ENSG00000075426_10 (sequence is synthesized)
ggaggagagatgagcagctgtctcctgaagaggaggagaagcgtcgcatccggcgggagaggaacaagctggctgcagccaagtgccggaaccgacgccgggagctgacagagaagctgc

SEQ ID NO: 67812 - DNA, 120 bp, Artificial Sequence
  ENSG00000075426_11 (sequence is synthesized)
aggcggagacagaggagctggaggaggagaagtcaggcctgcagaaggagattgctgagctgcagaaggagaaggagaagctggagttcatgttggtggctcacggcccagtgtgcaaga

SEQ ID NO: 67813 - DNA, 120 bp, Artificial Sequence
  ENSG00000075426_12 (sequence is synthesized)
ttagccccgaggagcgccgatcgcccccagcccctgggctgcagcccatgcgcagtgggggtggctcggtgggcgctgtagtggtgaaacaggagcccctggaagaggacagcccctcgt

SEQ ID NO: 67814 - DNA, 120 bp, Artificial Sequence
  ENSG00000075426_13 (sequence is synthesized)
cctcgtcggcggggctggacaaggcccagcgctctgtcatcaagcccatcagcattgctgggggcttctacggtgaggagcccctgcacacccccatcgtggtgacctccacacctgctg

SEQ ID NO: 67815 - DNA, 120 bp, Artificial Sequence
  ENSG00000075426_14 (sequence is synthesized)
tcactccgggcacctcgaacctcgtcttcacctatcctagcgtcctggagcaggagtcacccgcatctccctccgaatcctgctccaaggctcaccgcagaagcagtagcagcggggacc

SEQ ID NO: 67816 - DNA, 120 bp, Artificial Sequence
  ENSG00000075426_15 (sequence is synthesized)
aatcatcagactccttgaactcccccactctgctggctctgtaacccagtgcacctccctccccagctccggagggggtcctcctcgctcctccttcccagggaccagcaccttcaagcg

SEQ ID NO: 67817 - DNA, 120 bp, Artificial Sequence
  ENSG00000075426_16 (sequence is synthesized)
ctccagggccgtgagggcaagagggggacctgccaccagggagcttcctggctctgggggacccaggtgggacttagcagtgagtattggaagacttgggttgatctcttagaagccatg

SEQ ID NO: 67818 - DNA, 120 bp, Artificial Sequence
  ENSG00000075426_17 (sequence is synthesized)
ggacctcctccctcattcatcttgcaagcaaatcccatttcttgaaaagccttggagaactcggtttggtagacttggacatctctctggcttctgaagagcctgaagctggcctggacc

SEQ ID NO: 67819 - DNA, 120 bp, Artificial Sequence
  ENSG00000075426_18 (sequence is synthesized)
attcctgtccctttgttaccatactgtctctggagtgatggtgtccttccctgccccaccacgcatgctcagtgccttttggtttcaccttccctcgacttgaccctttcctcccccagc

SEQ ID NO: 67820 - DNA, 120 bp, Artificial Sequence
  ENSG00000075426_19 (sequence is synthesized)
gtcagtttcactccctcttggtttttatcaaatttgccatgacatttcatctgggtggtctgaatattaaagctcttcatttctggagatggggcagcaggtggctcttctgctggggct

SEQ ID NO: 67821 - DNA, 120 bp, Artificial Sequence
  ENSG00000075426_20 (sequence is synthesized)
gacttgtccagaaggggacaaagtgcaatacagagccttccctaccctgacgcctcccagtcatcatctccagaactcccagcggggctccctgagctctcaaggagatgctgccatcac

SEQ ID NO: 67822 - DNA, 120 bp, Artificial Sequence
  ENSG00000075426_21 (sequence is synthesized)
tgggaggctcagaggacccttcctgcccaccttcggagacggcttctggaggaacggcttggccagaagacagggtgtgagtgagacagtggggcacaggttgggtttgccaaacgccta

SEQ ID NO: 67823 - DNA, 120 bp, Artificial Sequence
  ENSG00000075426_22 (sequence is synthesized)
attaccaggccaggaagcatgccaacaaagccacacgggtgtcctagccagcttcccttcacctggtgtcttgagtagggcgtctcctgtaattactgccttgccattctgcccctggac

SEQ ID NO: 67824 - DNA, 120 bp, Artificial Sequence
  ENSG00000075426_23 (sequence is synthesized)
ccttctctccggaccagggaggcgtccctccctaggagccacacattatactccaagtccctgccgggctccgcctttcccccaccctggctctcagggtgacgccacccacagagattt

SEQ ID NO: 67825 - DNA, 120 bp, Artificial Sequence
  ENSG00000075426_24 (sequence is synthesized)
aatgagcgtgggcctggaccttccccagatgctgccaggcagcccctccccaagcctcaaagaagcatttgctgaggatggagaggcaggggagggaggcgggaggccgtcactggagtg

SEQ ID NO: 67826 - DNA, 120 bp, Artificial Sequence
  ENSG00000075426_25 (sequence is synthesized)
gcgtctgcagcagctgctgccccagcacccgctcagcctgtcctggctgctcacctccccgcagggcaccgggcctttcctgccctctgtggtcatctgccacctgctggatcaagtgct

SEQ ID NO: 67827 - DNA, 120 bp, Artificial Sequence
  ENSG00000075426_26 (sequence is synthesized)
ttctcttttacactcccctgtccccaccccagtgcactcttctggcccaggcagcaagcaagctgtgaacagctggcctgagctgtcgctgtggcttgtggctcatgcgccattcctggt

SEQ ID NO: 67828 - DNA, 120 bp, Artificial Sequence
  ENSG00000075426_27 (sequence is synthesized)
ggagcacagctcagcagggtccctgctgcccacccctctgagccttttctccccagggtatggctcctgctgagtttcttgtccagcagggccttgacaggaatccagggagtagctcct

SEQ ID NO: 67829 - DNA, 120 bp, Artificial Sequence
  ENSG00000075426_28 (sequence is synthesized)
ggccagaaccagcctctgcggggcttgtgctctgcaaagactctgctgctggggattcagctctagaggtcacagtatcctcgtttgaaagataattaagatcccccgtggagaaagcag

SEQ ID NO: 67830 - DNA, 120 bp, Artificial Sequence
  ENSG00000075426_29 (sequence is synthesized)
tgacacattcacacagctgttccctcgcatgttatttcatgaacatgacctgttttcgtgcactagacacacagagtggaacagccgtatgcttaaagtacatgggccagtgggactgga

SEQ ID NO: 67831 - DNA, 120 bp, Artificial Sequence
  ENSG00000075426_30 (sequence is synthesized)
agtgacctgtacaagtgatgcagaaaggagggtttcaaagaaaaaggattttgtttaaaatactttaaaaatgttatttcctgcatcccttggctgtgatgcccctctcccgatttccca

SEQ ID NO: 67832 - DNA, 120 bp, Artificial Sequence
  ENSG00000075426_31 (sequence is synthesized)
ggggctctgggagggacccttctaagaagattgggcagttgggtttctggcttgagatgaatccaagcagcagaatgagccaggagtagcaggagatgggcaaagaaaactggggtgcac

SEQ ID NO: 67833 - DNA, 120 bp, Artificial Sequence
  ENSG00000075426_32 (sequence is synthesized)
tcagctctcacaggggtaatcatctcaagtggtatttgtagccaagtgggagctattttcttttttgtgcatatagatatttcttaaatgaagctgctttcttgtcttttatttctaaaa

SEQ ID NO: 67834 - DNA, 120 bp, Artificial Sequence
  ENSG00000075426_33 (sequence is synthesized)
gcccccttataccccactttgtgcagcaaagatccccgtgcaggtcacagcctgatttgtggccaggctggacaaattcctgaggcacaacttggcttcagttcagatttcaagctgtgt

SEQ ID NO: 67835 - DNA, 120 bp, Artificial Sequence
  ENSG00000075426_34 (sequence is synthesized)
tggtgttgggaccagcagaaggcaaacgtccagccaacacacaggactgtaagaggactctgagctacgtgccctgtgaagacccccaggctttgtcataggaggtcgttcagcttcccc

SEQ ID NO: 67836 - DNA, 120 bp, Artificial Sequence
  ENSG00000075426_35 (sequence is synthesized)
aaagtcagaggtgatttgatttggggaagactgaatattcacacctaagtcgtgagcatatcctgagttttacttccttatggcttgccctccaagttctctctctcatacacacacaca

SEQ ID NO: 67837 - DNA, 120 bp, Artificial Sequence
  ENSG00000075426_36 (sequence is synthesized)
cccttgctccagaatcaccagacacctccatggctccagctatgggaacagctgcattggggctgcctttctgtttggcttaggaacttctgtgcttcttgtggctccactcgcgaggca

SEQ ID NO: 67838 - DNA, 120 bp, Artificial Sequence
  ENSG00000075426_37 (sequence is synthesized)
gctcggaggtgtggactccgattgggctgcaggcagctctgggacggcacagggcgggcgctctgatcagctcgtgtaaaacacaccgtcttcttggcctcctggccagtctttctgcga

SEQ ID NO: 67839 - DNA, 120 bp, Artificial Sequence
  ENSG00000075426_38 (sequence is synthesized)
atagtcctctccctggccagttgaatgggggaagctgctggcacaggaaggagaggcgatcccggctgaggcttaggaaattgctggagccggctccaagcagataattcactggggagg

SEQ ID NO: 67840 - DNA, 120 bp, Artificial Sequence
  ENSG00000075426_39 (sequence is synthesized)
ttttcagagtcaaacatcattctgcctgtgttgggggccaggtgtgtcacacaagcatctcaaagtcaaaagccatctggggctgctgcttctgtttctcaggctctggggaaaggaatc

SEQ ID NO: 67841 - DNA, 120 bp, Artificial Sequence
  ENSG00000075426_40 (sequence is synthesized)
tccctctcctctcacttgattccaagtgtggttgaattgtctggagcactgggactttttttctcttttccttgatggaccaacagtgcaaatgcaatctcgccatttaactttcaggtc

SEQ ID NO: 67842 - DNA, 120 bp, Artificial Sequence
  ENSG00000075426_41 (sequence is synthesized)
gatttcctttcctgatcagacatctttgtgccccctttaggaaggaaaagaatacacctacgatgtgccaggcactgtgttaggcgcttttatatagatcctcgttaggatgagactaag

SEQ ID NO: 67843 - DNA, 120 bp, Artificial Sequence
  ENSG00000075426_42 (sequence is synthesized)
ggatgaggacatctctttataaaaggcccctaagtaatggataaacagaaacacttagaggtgagaaggtctgtcttcaagatccaaggtaagattgccttcagtctgatgtttgttctc

SEQ ID NO: 67844 - DNA, 120 bp, Artificial Sequence
  ENSG00000075426_43 (sequence is synthesized)
aaggacttatcccctacaatattctcccactccatacttctccttctaccccaccatgtgctcccgtgcactcctcagatggtcagaggggtaacccaagtccttagagaatttggggac

SEQ ID NO: 67845 - DNA, 120 bp, Artificial Sequence
  ENSG00000075426_44 (sequence is synthesized)
caatagaatatgtgatgtgtgaattttctttaaaaaacttaaggagtctttgctaccttctgcttgttgagttgttttggcattcatattaaaagccagcatctcactatttattgacag

SEQ ID NO: 67846 - DNA, 120 bp, Artificial Sequence
  ENSG00000075426_45 (sequence is synthesized)
gttgggctgtgtgtgtgcgcatgtgtgtatacatttccaggcgtgcctgtgtcctgtagctttttaaaaggaaacccagtcatcccactatgaatctggcatcttcttatgcttctagtg

SEQ ID NO: 67847 - DNA, 120 bp, Artificial Sequence
  ENSG00000075426_46 (sequence is synthesized)
ttttggccatacatcaaccaaggggtttaatttatccaatgcttgacgacatgttcaggaggggctggatcaaattttgagagggttatgggaaagggagggggagaagaaattgacatt

SEQ ID NO: 67848 - DNA, 120 bp, Artificial Sequence
  ENSG00000075426_47 (sequence is synthesized)
tattttattatttattttaaatgtttacatcttctttatgttgtatcaagcctgaatagaaactgatagcattaaaatactccgttcctctctctcttctcgcttccttttttttttttt

SEQ ID NO: 67849 - DNA, 120 bp, Artificial Sequence
  ENSG00000075426_48 (sequence is synthesized)
ttttaaatttaggataacacatttttgtttctaaagtgatttgtgatttgtgctgtataaactgtataaaaggttctgtttttaaaggtggattttcattcctctggggacagtggtcgc

SEQ ID NO: 67850 - DNA, 120 bp, Artificial Sequence
  ENSG00000075426_49 (sequence is synthesized)
caagacatctacattgtaagagaacacagtggaagatcctgtcctgattctcaaaaattattttctctgtatgattaaaagtttattccatttattttagtttgtgtttacttgattttg

SEQ ID NO: 67851 - DNA, 120 bp, Artificial Sequence
  ENSG00000075426_50 (sequence is synthesized)
aggaagaaaatatttgactttgtgtaaagagtagggtatcagggtgtcttttctgccgtgggagatgtgtatatatatagtattttggtgtatagtagaaaataagctttgtgcatctgt

SEQ ID NO: 67852 - DNA, 120 bp, Artificial Sequence
  ENSG00000075426_51 (sequence is synthesized)
atttgagatatgttaatgacgtggagtaaagtcagctgtaagactctggaggcaaacaagttgtatatggttcatatggctctatggggaatttaattacctttctgggcactttttttt

SEQ ID NO: 67853 - DNA, 120 bp, Artificial Sequence
  ENSG00000075426_52 (sequence is synthesized)
tttttttttttttaagtaatggtgaaatggtcccattggagagtctcctaaatagaccttccaggcagaaccgcaagctcaaaatctttgtatagttttgaaaattgaggagtagctttg

SEQ ID NO: 67854 - DNA, 120 bp, Artificial Sequence
  ENSG00000075426_53 (sequence is synthesized)
tttggaagcctttctggtggtggtttttgttgttgttgttgttttgttgttttactatatgtaatacaagcctacagtatttgcactaaagaaagcttgttagaaaaagcttgctgctat

SEQ ID NO: 67855 - DNA, 120 bp, Artificial Sequence
  ENSG00000075426_54 (sequence is synthesized)
ggaagaaagaacatattaaaacttctttcccttgcgatttttttgggggaggggggttagcatttccactttcagttgagtagcattttgtagaataaaatgaattaagattgaagagcc

SEQ ID NO: 67856 - DNA, 120 bp, Artificial Sequence
  ENSG00000075426_55 (sequence is synthesized)
caggatgtgagcggaggcaattcccggttttggaagaaaatcagacaggaaaccagtgctaggaagaaggaagagaactcagtccagcagagtgtaatagggcctcattaccgaagcaaa

SEQ ID NO: 67857 - DNA, 120 bp, Artificial Sequence
  ENSG00000075426_56 (sequence is synthesized)
aagcagctgttggctaattcctagcatgctgtaacacatgagtattttgcaattagcaataaccagtgcacggggtttcgcatagacgcctgcccattcggcccggcagtgtgtgaggcg

SEQ ID NO: 67858 - DNA, 120 bp, Artificial Sequence
  ENSG00000075429_0 (sequence is synthesized)
agagcgcagtccgtgctggtgggagcgtggcgactagttgcacagcaacggtccaggaagatgagtgcctgcgggaggaaggccctgaccctgctgagcagtgtctttgctgtctgtggc

SEQ ID NO: 67859 - DNA, 120 bp, Artificial Sequence
  ENSG00000075429_1 (sequence is synthesized)
ttgggcctcctgggtatcgcggtcagcaccgactactggctgtacctggaggagggtgtgattgtgccccagaaccagagcaccgagatcaagatgtccctgcactcaggcctctggcgg

SEQ ID NO: 67860 - DNA, 120 bp, Artificial Sequence
  ENSG00000075429_2 (sequence is synthesized)
gtctgcttccttgcaggtgaggagcgggggcgttgcttcaccatagaatatgtgatgcccatgaacacccagctgacatccgagtccacggtcaatgttctaaagatgatccgctcagcc

SEQ ID NO: 67861 - DNA, 120 bp, Artificial Sequence
  ENSG00000075429_3 (sequence is synthesized)
actggcctttgtctctggcatcttctttatcctctcaggcctctctctcgtggtgggcctggtgctctacatctccagcatcaacgatgagatgctcaacaggaccaaggatgcagagac

SEQ ID NO: 67862 - DNA, 120 bp, Artificial Sequence
  ENSG00000075429_4 (sequence is synthesized)
ctacttcaactacaagtatgggtggtcgtttgccttcgccgccatctccttccttttaacggagagtgccggggtgatgtctgtgtacctgtttatgaagcggtacaccgcggaggacat

SEQ ID NO: 67863 - DNA, 120 bp, Artificial Sequence
  ENSG00000075429_5 (sequence is synthesized)
gtacaggccccaccctggcttctaccgccctcggctgagcaactgctccgattactcaggccagttcctacacccagacgcctgggtcaggggccgcagcccctccgacatctccagcga

SEQ ID NO: 67864 - DNA, 120 bp, Artificial Sequence
  ENSG00000075429_6 (sequence is synthesized)
ggcctccctgcagatgaacagcaactaccccgccttgctcaagtgccccgactatgatcagatgtcctcttcaccctgctgagcctcggccgcccccatccctggactgtgggtggccag

SEQ ID NO: 67865 - DNA, 120 bp, Artificial Sequence
  ENSG00000075429_7 (sequence is synthesized)
attggcgccgagcggttccggctgactggacggggcgggcgtcccgggcagcctagcgcggtacctcccgccccgcgcgcccagccggcgagggacattggaccagggtcgggggtcgcg

SEQ ID NO: 67866 - DNA, 120 bp, Artificial Sequence
  ENSG00000075429_8 (sequence is synthesized)
tgaccccagtcctctccctgcttctccagaagggctctaactgccccagcatgggtgtgggagtctggagtctgtgggcaagctgattgtctgggaacatgggagaagccccgcccatgt

SEQ ID NO: 67867 - DNA, 80 bp, Artificial Sequence
  ENSG00000075461_0 (sequence is synthesized)
actcgtcgccgcgcctcggagtttgagccccagcgctgccggagcgcaggcacgcccggggcgcggggtcggagcgcgca

SEQ ID NO: 67868 - DNA, 120 bp, Artificial Sequence
  ENSG00000075461_1 (sequence is synthesized)
cgggcgcggcgggccgggccggcgggcggcggactatgaggcgcccaccatggtgcgatgcgaccgcgggctgcagatgctgctgaccacggccggagccttcgccgccttctcgctcat

SEQ ID NO: 67869 - DNA, 120 bp, Artificial Sequence
  ENSG00000075461_2 (sequence is synthesized)
gaccacggccggagccttcgccgccttctcgctcatggccatcgccatcggcaccgactactggctgtactccagcgcgcacatctgcaacggcaccaacctgaccatggacgacgggcc

SEQ ID NO: 67870 - DNA, 120 bp, Artificial Sequence
  ENSG00000075461_3 (sequence is synthesized)
cccgccccgccgcgcccgcggcgacctcacccactctggtctgtggcgggtgtgctgcatcgaagggatctataaagggcactgcttccggatcaatcacttcccagaggacaatgacta

SEQ ID NO: 67871 - DNA, 120 bp, Artificial Sequence
  ENSG00000075461_4 (sequence is synthesized)
cgaccacgacagctcggagtacctcctccgcatcgtgcgagcctccagcgtcttccccatcctcagcaccatcctgctcctgctgggtggcctgtgcatcggtgctggcaggatctacag

SEQ ID NO: 67872 - DNA, 120 bp, Artificial Sequence
  ENSG00000075461_5 (sequence is synthesized)
ccgcaagaacaacatcgtcctcagtgccggcatcctcttcgtggctgcaggcctcagtaacatcatcggtatcatcgtctacatttccagcaacacaggtgacccgagtgacaagcggga

SEQ ID NO: 67873 - DNA, 120 bp, Artificial Sequence
  ENSG00000075461_6 (sequence is synthesized)
cgaagacaaaaagaaccattacaactacggctggtctttttactttggagctctgtctttcattgtggctgagaccgtgggcgtcctggctgtaaacatttacattgagaaaaataaaga

SEQ ID NO: 67874 - DNA, 120 bp, Artificial Sequence
  ENSG00000075461_7 (sequence is synthesized)
gttgaggtttaagaccaaacgggaattccttaaggcgtcttcctcttctccttatgccaggatgccgagctacaggtaccggcgacggcgctcgaggtccagctcaaggtccaccgaggc

SEQ ID NO: 67875 - DNA, 120 bp, Artificial Sequence
  ENSG00000075461_8 (sequence is synthesized)
ctcgccctccagggacgtgtcgcccatgggcctgaagatcacaggggccatccccatgggggagctgtccatgtacacgctgtccagggagcccctcaaggtgaccaccgcagccagcta

SEQ ID NO: 67876 - DNA, 120 bp, Artificial Sequence
  ENSG00000075461_9 (sequence is synthesized)
cagccccgaccaggaggccagcttcctgcaggtgcatgactttttccagcaggacctgaaggaaggtttccacgtcagcatgctgaaccgacggacgacccctgtgtgagccgcctgccc

SEQ ID NO: 67877 - DNA, 120 bp, Artificial Sequence
  ENSG00000075461_10 (sequence is synthesized)
tttctctccgctccagcctctccccagaacggctctttttgtcacacaggatggcatgtgatcctcaagacgacgaacaatgaactaaagccaaatgcagccctccctggcctccagagg

SEQ ID NO: 67878 - DNA, 120 bp, Artificial Sequence
  ENSG00000075461_11 (sequence is synthesized)
tggcgtgggctggctttgcacgaaggttgtgctgggagaccggacccggggctgcagaagaagctgaaggctgactttgtcccctccccgaaaaagggtgttttgatgcctcagggtctc

SEQ ID NO: 67879 - DNA, 120 bp, Artificial Sequence
  ENSG00000075461_12 (sequence is synthesized)
tgaaatctcccgggaagccccagagctttcctgaggctgcctggccttgatcaacttgggaagacaaaattgagccattatctcctcttggaaacgaatcttgccagaaaaacgggattt

SEQ ID NO: 67880 - DNA, 120 bp, Artificial Sequence
  ENSG00000075461_13 (sequence is synthesized)
cagggccttccctccctgcctgggtgtcgggccaccagaaggctctgccggacgccaagaagacggtctctgggctcttgtcagctgcttttgaacctgaggttcctgcgtcgttgagcc

SEQ ID NO: 67881 - DNA, 120 bp, Artificial Sequence
  ENSG00000075461_14 (sequence is synthesized)
gtgctttggcctttgcgctgtcccggggccagcttccctcgacctggggaggccgtggcctgtggaggaggcccaggtaaaggctgggggctgttgctggctatcctctttgcttctgga

SEQ ID NO: 67882 - DNA, 120 bp, Artificial Sequence
  ENSG00000075461_15 (sequence is synthesized)
agtttctgcctcactcagaatgggcaggacagacccactgactggacttcagagtctggagggttccatcggtcaggggaatggcggccacgtgacctcttgccgtgccccttgtcatag

SEQ ID NO: 67883 - DNA, 120 bp, Artificial Sequence
  ENSG00000075461_16 (sequence is synthesized)
acccaaggagcaactctgtcccctgagcgttgggggtcccgggggagaggtggacagacacctccctccaactggcatttggcaacaggagcctggacttctgtgcaagaaagggagacc

SEQ ID NO: 67884 - DNA, 120 bp, Artificial Sequence
  ENSG00000075461_17 (sequence is synthesized)
taagggtgaacagtggccaataaaaaccctagagaacaaacatccatttcctaggtggttacaaatcataacttcctgcaaatcaacgccaggagagcaacttaccttcatttctttgtc

SEQ ID NO: 67885 - DNA, 120 bp, Artificial Sequence
  ENSG00000075461_18 (sequence is synthesized)
ttaaaaagtagcagcaactggccccacaactcctgtcattgtaagttattctgccaccacctaacaggacggagtggagtgagtttggataaacggaccgagctgggcttctcttcctcc

SEQ ID NO: 67886 - DNA, 120 bp, Artificial Sequence
  ENSG00000075461_19 (sequence is synthesized)
ctacagaggggagatctcagcactttgtccggagctgaggaagtggtttctgtgttttacagtttttccagccattcttttcttccccctcctgaagcaagcaaagagcgtggaggcgtg

SEQ ID NO: 67887 - DNA, 120 bp, Artificial Sequence
  ENSG00000075461_20 (sequence is synthesized)
tgcaggcttggaagaagaactctccagaacatggaacttaaccctcttttgtataaaacatgtgctttctaaagaaaaattgtttcttattttttgagactccttgatccaccctggaac

SEQ ID NO: 67888 - DNA, 120 bp, Artificial Sequence
  ENSG00000075461_21 (sequence is synthesized)
agtcgcctgtagtcctggtagctgttgtgcttggaaataacgagcgcatccttgcctcagctacctgctcacagcccatgggtggactcggccccctggggttcagacccaggtccgttc

SEQ ID NO: 67889 - DNA, 120 bp, Artificial Sequence
  ENSG00000075461_22 (sequence is synthesized)
ggcctagtgatgatgtcatcgtccatcccatcttcctttgcccccaggaaaggacgcatccaccggtagcggccccagctgactgtcgccgtgtgctggggatctgaaatgaggcctgcc

SEQ ID NO: 67890 - DNA, 120 bp, Artificial Sequence
  ENSG00000075461_23 (sequence is synthesized)
agggcccctgtgtgctgtgctccagagccttcgctcccatcagggttggcatcatctgatggcatgtccaagtgtgcccagcagcggatgctgaagcaccagagctcaaggccttcacct

SEQ ID NO: 67891 - DNA, 120 bp, Artificial Sequence
  ENSG00000075461_24 (sequence is synthesized)
gctctaggccagccctgtcaccacctccactgccatgaccaggccgaaggcagggaacgccctccccagtcccgctgtccagcaaggccccgagacttttcttctgtgatttccaaaagc

SEQ ID NO: 67892 - DNA, 120 bp, Artificial Sequence
  ENSG00000075461_25 (sequence is synthesized)
aaggcagccgtgctgttctagttcctctccatccgccacctcccctcccgctgccccagaagtttctatcattccatggagaaagctgtgttccaatgaatcctacctcttgcccagtcc

SEQ ID NO: 67893 - DNA, 120 bp, Artificial Sequence
  ENSG00000075461_26 (sequence is synthesized)
caggcagagtaagcagggcccacctagggaccaagaaagagtaggaagaaggggacgagccgggagcaaaaccacctcagacacccgggccttctcagccttctccccgcggccagctgg

SEQ ID NO: 67894 - DNA, 120 bp, Artificial Sequence
  ENSG00000075461_27 (sequence is synthesized)
gtctccggggaccctgggccctgggccgcccattcctggccctcccgctgcatctcagacctgacacccaacggggggatgtggtggcctgtgcccaccttctctccctcctcccgaccc

SEQ ID NO: 67895 - DNA, 120 bp, Artificial Sequence
  ENSG00000075461_28 (sequence is synthesized)
gccccctcgcccccacccctgtgtgtttcgccagttaagcacctgtgactccagtacctactactggttttgggttggttgttctgtcttttttttaattaaataaaaacatttttaaaa

SEQ ID NO: 67896 - DNA, 120 bp, Artificial Sequence
  ENSG00000075539_0 (sequence is synthesized)
gaagacctcgcagcacagccgggcgcccgtcgggctctgggagagagcgagagagaaatccggttaaaatcagagtcggagggaggtttaaccacagatcggttccgatcggattattcc

SEQ ID NO: 67897 - DNA, 120 bp, Artificial Sequence
  ENSG00000075539_1 (sequence is synthesized)
ttaaaggggacgcgccattgtcaagagaacggagccaggggcccgagggcggggaccggcggcgctggaggagcgaggcagctgtactaggactgggaacggcctagaacattccatatt

SEQ ID NO: 67898 - DNA, 120 bp, Artificial Sequence
  ENSG00000075539_2 (sequence is synthesized)
ctgcttcacacacggtgactcactcactactgctttgtaccagtgtgcccactcgagtgcctgtaaagtacaagctccagatcaaaaaagcttctagatggatcctttccaaacttggtg

SEQ ID NO: 67899 - DNA, 120 bp, Artificial Sequence
  ENSG00000075539_3 (sequence is synthesized)
tcttttctacaaactctgtgcctcaacaaccatttctaagtgagctgaagccatttattggtatcttggatggttaacatctaaatgcttaattcctgaaaccactcaagagtcatagga

SEQ ID NO: 67900 - DNA, 120 bp, Artificial Sequence
  ENSG00000075539_4 (sequence is synthesized)
ttagatgatccaagtcaccaagaaattactgtctcaagtgatacgcttcagcgccagtcagcaaagtaaataaatactgtgcttcttccaactttcattccacttggggaaaaaaaaata

SEQ ID NO: 67901 - DNA, 120 bp, Artificial Sequence
  ENSG00000075539_5 (sequence is synthesized)
tcatcatgtcaaacattacgattgacccagatgtcaaacctggtgaatatgtcatcaagagcctctttgcagaatttgctgttcaagctgaaaagaaaattgaagttgtaatggccgaac

SEQ ID NO: 67902 - DNA, 120 bp, Artificial Sequence
  ENSG00000075539_6 (sequence is synthesized)
ccttggagaagctattgtccagatctcttcagaggggtgaagatcttcagtttgatcagttgataagctctatgagctcagtagcagagcactgtctcccttccttacttcgcaccttgt

SEQ ID NO: 67903 - DNA, 120 bp, Artificial Sequence
  ENSG00000075539_7 (sequence is synthesized)
ttgactggtacagacgccaaaatggaacggaagatgaatcttatgaatataggcctcggtctagcacaaagtctaagggggatgaacagcaacgtgaaagagattatcttcttgaaagga

SEQ ID NO: 67904 - DNA, 120 bp, Artificial Sequence
  ENSG00000075539_8 (sequence is synthesized)
gggacttagcagtagacttcattttttgtttagttttagttgaagttctaaagcagattcctgttcatcctgtacccgatcccttagttcatgaagttctaaacttagcttttaagcact

SEQ ID NO: 67905 - DNA, 120 bp, Artificial Sequence
  ENSG00000075539_9 (sequence is synthesized)
ttaaacataaggaaggatattcaggaaccaacactgggaatgtgcatattattgctgatttatatgcagaggtgataggggttcttgcccaatcaaagtttcaggctgtaaggaagaagt

SEQ ID NO: 67906 - DNA, 120 bp, Artificial Sequence
  ENSG00000075539_10 (sequence is synthesized)
ttgtgacagaattaaaagaactgcgacaaaaggaacaaagcccacatgtggtacaaagtgtcatcagcttaataatgggaatgaaattttttcgagtaaaaatgtatcctgtagaagatt

SEQ ID NO: 67907 - DNA, 120 bp, Artificial Sequence
  ENSG00000075539_11 (sequence is synthesized)
ttgaagcatcatttcaatttatgcaggaatgtgctcagtatttcttagaagtgaaagataaagatataaaacatgcacttgctggtttatttgtggagattcttatccctgtagctgctg

SEQ ID NO: 67908 - DNA, 120 bp, Artificial Sequence
  ENSG00000075539_12 (sequence is synthesized)
ctgttaaaaatgaagtgaatgttccctgtttgaaaaattttgtggagatgctttatcagactacttttgaactgagctcgagaaagaagcattcattggctttatatccactaattacct

SEQ ID NO: 67909 - DNA, 120 bp, Artificial Sequence
  ENSG00000075539_13 (sequence is synthesized)
gccttttatgtgtcagtcagaaacaattttttttaaataactggcatattttcctacagaactgtttgtcacatttaaagaataaagatccgaaaatgtctcgagttgcactggaatctt

SEQ ID NO: 67910 - DNA, 120 bp, Artificial Sequence
  ENSG00000075539_14 (sequence is synthesized)
tgtatagattattgtgggtttatgtaattagaataaaatgtgaaagcaacactgtaactcaaagtcgtcttatgagcatagtgtcagcactttttccaaaaggctcacgaagtgtggttc

SEQ ID NO: 67911 - DNA, 120 bp, Artificial Sequence
  ENSG00000075539_15 (sequence is synthesized)
ctcgtgacacacctctcaatatatttgtgaagattattcagttcattgctcaggaacgcttggattttgcaatgaaagaaataatatttgatcttctcagtgttggaaaatctactaaaa

SEQ ID NO: 67912 - DNA, 120 bp, Artificial Sequence
  ENSG00000075539_16 (sequence is synthesized)
ctttcaccattaatccagagagaatgaacataggtctcagagtcttccttgtaatagcagacagtttgcagcagaaagatggtgaaccacccatgccaacaacaggagttattcttccct

SEQ ID NO: 67913 - DNA, 120 bp, Artificial Sequence
  ENSG00000075539_17 (sequence is synthesized)
caggaaatactcttcgtgtaaagaaaatatttctcaataaaaccttgacagatgaagaagcaaaagtcataggaatgtcagtttactatcctcaagtaagaaaagcattagatagcatcc

SEQ ID NO: 67914 - DNA, 120 bp, Artificial Sequence
  ENSG00000075539_18 (sequence is synthesized)
tcagacatttggacaaagaagttgggagaccaatgtgtatgaccagtgtgcagatgtctaataaggagcctgaagacatgattacgggggaaagaaaacccaagattgatttgtttagaa

SEQ ID NO: 67915 - DNA, 120 bp, Artificial Sequence
  ENSG00000075539_19 (sequence is synthesized)
cttgtattgctgcgattccaaggttgattcctgacggtatgagcagaactgacctgattgaattgttagcaaggctcacaattcatatggatgaagaactgcgtgctctggctttcaata

SEQ ID NO: 67916 - DNA, 120 bp, Artificial Sequence
  ENSG00000075539_20 (sequence is synthesized)
ctctgcaggcactaatgcttgattttccagattggcgggaggatgttctttcaggatttgtttattttattgttcgtgaagtgactgatgtccatcccacacttcttgataatgccgtaa

SEQ ID NO: 67917 - DNA, 120 bp, Artificial Sequence
  ENSG00000075539_21 (sequence is synthesized)
agatgttggtacaattaataaatcagtggaaacaagcagcccaaatgcataataaaaaccaggacactcagcatggtgtagctaatggagcttctcatccccctcctctggaaaggagcc

SEQ ID NO: 67918 - DNA, 120 bp, Artificial Sequence
  ENSG00000075539_22 (sequence is synthesized)
catattccaatgtattccatgtggttgaaggctttgcgcttgtcattctctgtagcagtcgacctgccactaggagactagccgtcagtgtccttagagaaatacgggctttatttgcac

SEQ ID NO: 67919 - DNA, 120 bp, Artificial Sequence
  ENSG00000075539_23 (sequence is synthesized)
ttctggaaatacctaagggtgatgatgaattagccatagatgtgatggacaggctaagcccatccattcttgagagcttcatacatctcactggggctgatcagactactttgctctatt

SEQ ID NO: 67920 - DNA, 120 bp, Artificial Sequence
  ENSG00000075539_24 (sequence is synthesized)
gccctagctcgatagatttacaaactttagcagaatggaactcttctcctattagccaccagtttgatgtgattagtccatcacatatatggatatttgcacatgtgacccaaggccaag

SEQ ID NO: 67921 - DNA, 120 bp, Artificial Sequence
  ENSG00000075539_25 (sequence is synthesized)
acccatggattataagtctctccagttttttaaagcaagaaaatcttcctaaacactgctctacagctgtgagctatgcttggatgtttgcatacacaagacttcagttgttgtcccctc

SEQ ID NO: 67922 - DNA, 120 bp, Artificial Sequence
  ENSG00000075539_26 (sequence is synthesized)
aggtcgatataaatagccccatcaatgctaagaaagtaaataccaccacaagcagtgactcatacattggcctgtggagaaactatctgatcctttgctgcagtgcagcaacatcgtcat

SEQ ID NO: 67923 - DNA, 120 bp, Artificial Sequence
  ENSG00000075539_27 (sequence is synthesized)
cttccacatctgcaggttctgtgagatgttctcctcctgagacgctggcgtctaccccagatagcggctatagcattgattctaaaattattggcatcccatccccttcatccttgttta

SEQ ID NO: 67924 - DNA, 120 bp, Artificial Sequence
  ENSG00000075539_28 (sequence is synthesized)
agcacatagttccaatgatgcgttctgagagcatggaaatcacagaatcccttgttctaggtcttggcaggaccaacccaggagcttttagggaactaatagaggaattacatcccataa

SEQ ID NO: 67925 - DNA, 120 bp, Artificial Sequence
  ENSG00000075539_29 (sequence is synthesized)
ttaaagaagcactcgaaagaaggccagagaatatgaaacggcgcaggcgtcgagacattttacgagtacaactggtacgaatatttgaactgctggcagatgctggtgtcattagtcaca

SEQ ID NO: 67926 - DNA, 120 bp, Artificial Sequence
  ENSG00000075539_30 (sequence is synthesized)
gtgcaagtggtggccttgataatgaaacacattttctcaacaacactttattggaatatgtagatttaactagacaactcctggaagcagaaaatgaaaaagactctgacacactgaagg

SEQ ID NO: 67927 - DNA, 120 bp, Artificial Sequence
  ENSG00000075539_31 (sequence is synthesized)
atatacgatgccattttagtgccttagtggcgaatattattcagaatgttccagtgcaccagagaagaagtatttttcctcaacagagccttcgtcacagtctatttatgctgttcagtc

SEQ ID NO: 67928 - DNA, 120 bp, Artificial Sequence
  ENSG00000075539_32 (sequence is synthesized)
actgggcaggtccttttagcatcatgtttacgcccttggacagatacagtgatagaaatatgcaaattaatagacatcaatactgtgcgttaaaggctatgtctgctgtactgtgttgtg

SEQ ID NO: 67929 - DNA, 120 bp, Artificial Sequence
  ENSG00000075539_33 (sequence is synthesized)
gccctgttgcagataatgtaggactttcatcagatggctatttgtacaaatggttggataacattttggattctctggacaaaaaggttcaccagctgggctgtgaagcagttacgttgt

SEQ ID NO: 67930 - DNA, 120 bp, Artificial Sequence
  ENSG00000075539_34 (sequence is synthesized)
tactggagctgaaccctgatcagagcaacctgatgtactgggctgtggaccgctgctacacgggctccgggagggtggcggccggctgctttaaagccattgctaatgttttccagaaca

SEQ ID NO: 67931 - DNA, 120 bp, Artificial Sequence
  ENSG00000075539_35 (sequence is synthesized)
gggattatcaatgtgacacagtgatgcttctaaatctgatactgtttaaagcagctgattcttctagaagtatctatgaagttgctatgcaacttttacagattctggaaccgaagatgt

SEQ ID NO: 67932 - DNA, 120 bp, Artificial Sequence
  ENSG00000075539_36 (sequence is synthesized)
ttcgctatgctcacaaattggaggttcagagaacagatggagtactcagccagctgtctcctctaccacatctctattctgtttcatattatcagttgtccgaggaactagcaagggcgt

SEQ ID NO: 67933 - DNA, 120 bp, Artificial Sequence
  ENSG00000075539_37 (sequence is synthesized)
atcctgagctaactctcgccatattctcagagataagccagagaatccagacagctcaccctgctgggcggcaggtgatgctgcactacctgctaccatggatgaacaacatcgagctgg

SEQ ID NO: 67934 - DNA, 120 bp, Artificial Sequence
  ENSG00000075539_38 (sequence is synthesized)
tggacttaaaacctctccccacagcaaggcgacatgatgaagatgaagatgattccttaaaagaccgagaacttatggtgactagtaggcgctggttacggggagaaggatggggatctc

SEQ ID NO: 67935 - DNA, 120 bp, Artificial Sequence
  ENSG00000075539_39 (sequence is synthesized)
cacaagccactgcaatggttttgaacaatctgatgtatatgacagcaaagtatggcgatgaactggcctggtcggaggtggagaatgtgtggaccacacttgcagatggctggcccaaaa

SEQ ID NO: 67936 - DNA, 120 bp, Artificial Sequence
  ENSG00000075539_40 (sequence is synthesized)
acctgaaaataattttgcactttttgatcagcatttgtggggtgaatagcgaaccaagcctcttgccttacgtgaagaaggtcattgtatatttaggtagagataaaacaatgcagttgc

SEQ ID NO: 67937 - DNA, 120 bp, Artificial Sequence
  ENSG00000075539_41 (sequence is synthesized)
tagaagagctggtgagtgagcttcagctgaccgatcctgtcagttcaggggtcactcacatggataatcccccgtattatcgcatcacttccagctataaaatcccttctgtcacctcag

SEQ ID NO: 67938 - DNA, 120 bp, Artificial Sequence
  ENSG00000075539_42 (sequence is synthesized)
gaactacttccagtagcaatacaatggtagctcccacagatggcaatcctgataataagcccattaaagagaatattgaagagagctatgtgcacctggacatttacagtggactaaaca

SEQ ID NO: 67939 - DNA, 120 bp, Artificial Sequence
  ENSG00000075539_43 (sequence is synthesized)
gtcatttgaatcggcaacatcacagactagaatcccgatacagtagcagctctggaggatcttatgaagaagaaaaaagtgattcaatgccactttattctaattggcgactgaaagtga

SEQ ID NO: 67940 - DNA, 120 bp, Artificial Sequence
  ENSG00000075539_44 (sequence is synthesized)
tggagcataaccaaggagagccactgcccttcccaccagctggaggctgctggtcaccactggtggattacgtgcctgaaacgtcatcacctggattacctcttcacaggtgtaacatag

SEQ ID NO: 67941 - DNA, 120 bp, Artificial Sequence
  ENSG00000075539_45 (sequence is synthesized)
cagtgatccttttgactgatctcatcattgatcatagtgtgaaggtggaatggggaagctacctccatcttcttcttcatgcaatttttatagggtttgaccactgccaccctgaggtgt

SEQ ID NO: 67942 - DNA, 120 bp, Artificial Sequence
  ENSG00000075539_46 (sequence is synthesized)
atgaacattgtaaacgcctgcttctgcacttattaatagtaatgggacccaatagtaacatccgaactgttgcttctgtccttctcaggaacaaggagtttaatgagcccagggtgctta

SEQ ID NO: 67943 - DNA, 120 bp, Artificial Sequence
  ENSG00000075539_47 (sequence is synthesized)
cagtcaaacaagttgcacacttagattataatttcacagcaggcattaacgattttatacctgattaccagccctcccctatgactgactcagggcttagctcaagttctacctcttcta

SEQ ID NO: 67944 - DNA, 120 bp, Artificial Sequence
  ENSG00000075539_48 (sequence is synthesized)
acatctcagtggagcaggatggaaaagtcaaaaccctcatggaattcattacctcaagaaaaagagggcccctttggaaccatgaggatgtttctgccaagaatcctagcataaagagtg

SEQ ID NO: 67945 - DNA, 120 bp, Artificial Sequence
  ENSG00000075539_49 (sequence is synthesized)
ctgaacagttaactacatttttgaaacatgtggtttctgtttttaagcagtcaagctcagaaggaattcatctggaacatcatcttagtgaagttgctctgcaaacagcactttcctgtt

SEQ ID NO: 67946 - DNA, 120 bp, Artificial Sequence
  ENSG00000075539_50 (sequence is synthesized)
cttctcgacactatgctgggagatcctttcagattttcagggccctaaagcagcctctcactgcaactacactttctgatgttctctccagacttgtagaaactgtaggggatccaggag

SEQ ID NO: 67947 - DNA, 120 bp, Artificial Sequence
  ENSG00000075539_51 (sequence is synthesized)
aagatgcacagggatttgtgattgagcttcttctcacattggaatctgcaattgatactttggctgaaaccatgaagcattatgatcttctttctgccctttctcaaacctcatatcatg

SEQ ID NO: 67948 - DNA, 120 bp, Artificial Sequence
  ENSG00000075539_52 (sequence is synthesized)
atcctataatgggaaacaagtatgcagctaacaggaaaagcactggacaactcaatctaagcacaagtcccattaatagtagcagttatttgggatataacagtaatgcaagaagtaact

SEQ ID NO: 67949 - DNA, 120 bp, Artificial Sequence
  ENSG00000075539_53 (sequence is synthesized)
ctttgagattaagtttgattggtgaccgacgaggtgaccggcggcggagtaacacactggatataatggatggacggataaaccatagcagtagtttagcaaggactagaagcctttcct

SEQ ID NO: 67950 - DNA, 120 bp, Artificial Sequence
  ENSG00000075539_54 (sequence is synthesized)
ctctaagagagaaaggaatgtatgacgtgcagtccactactgagcctaccaacttgatggccaccattttttggatagcagcatctttattagaatcagattatgaatatgaatacctcc

SEQ ID NO: 67951 - DNA, 120 bp, Artificial Sequence
  ENSG00000075539_55 (sequence is synthesized)
tggctctcaggcttctcaacaaactgcttatccatttgcctttggataaatcagagagtcgagagaagattgaaaatgtacaaagcaaattgaaatggactaattttccaggacttcagc

SEQ ID NO: 67952 - DNA, 120 bp, Artificial Sequence
  ENSG00000075539_56 (sequence is synthesized)
agctcttccttaagggttttacctcagcatctacacaagaaatgaccgtgcacctcctcagtaaactcatttctgtctccaaacatacattggtggatccttcccaattgtcaggctttc

SEQ ID NO: 67953 - DNA, 120 bp, Artificial Sequence
  ENSG00000075539_57 (sequence is synthesized)
ctcttaacatcctttgcttattgcctcacttaatccagcattttgacagcccaactcagttttgcaaagaaacagctagtcgaatagcaaaggtttgtgcagaagaaaaatgcccaacac

SEQ ID NO: 67954 - DNA, 120 bp, Artificial Sequence
  ENSG00000075539_58 (sequence is synthesized)
ttgtcaatctggcacacatgatgagtttgtacagtacacacacgtattccagagactgttctaactggatcaatgtcgtgtgcagatacctgcatgactccttctcagatacaacattta

SEQ ID NO: 67955 - DNA, 120 bp, Artificial Sequence
  ENSG00000075539_59 (sequence is synthesized)
atcttgtgacttatcttgcagagctgttagagaaaggattgtccagtatgcagcaatcattactacagattatttatagtctattgagtcatattgacctgtctgcagccccagccaagc

SEQ ID NO: 67956 - DNA, 120 bp, Artificial Sequence
  ENSG00000075539_60 (sequence is synthesized)
agtttaatctggagatcataaagattattggcaaatatgtacagagtccttactggaaggaagcccttaacatattaaagctggtggtgtcacgctctgcgagtcttgtcgtacccagtg

SEQ ID NO: 67957 - DNA, 120 bp, Artificial Sequence
  ENSG00000075539_61 (sequence is synthesized)
atatccccaagacctatggaggagatacaggttctcctgaaatatccttcactaaaatttttaataatgtttctaaggagttgcctgggaagaccttagattttcattttgatatatctg

SEQ ID NO: 67958 - DNA, 120 bp, Artificial Sequence
  ENSG00000075539_62 (sequence is synthesized)
agacaccaattattggaaacaaatatggtgatcagcacagtgcggctggaagaaatgggaaaccaaaagttattgctgtcactagaagtacttcctcaacttcttctggttctaattcta

SEQ ID NO: 67959 - DNA, 120 bp, Artificial Sequence
  ENSG00000075539_63 (sequence is synthesized)
atgccttggttcctgttagttggaaaaggccacagttatcacagcgaagaacaagagaaaagctaatgaatgtgctttctctctgtggtccagaatctggcctcccaaagaacccatcag

SEQ ID NO: 67960 - DNA, 120 bp, Artificial Sequence
  ENSG00000075539_64 (sequence is synthesized)
ttgtattttcttctaatgaggatttggaagtcggtgaccaacagactagcctaatttctacaacagaagacataaatcaagaggaagaagtagctgtggaagataatagcagtgaacaac

SEQ ID NO: 67961 - DNA, 120 bp, Artificial Sequence
  ENSG00000075539_65 (sequence is synthesized)
agtttggtgtttttaaggattttgactttttagatgttgaattggaagatgcagagggtgaaagtatggacaatttcaactggggagttcgcaggcgctcactggacagtattgacaaag

SEQ ID NO: 67962 - DNA, 120 bp, Artificial Sequence
  ENSG00000075539_66 (sequence is synthesized)
gggacactccatccctccaggagtaccagtgctctagtagcacccccagcctgaacctcaccaatcaggaggatacagatgagtcctcggaagaagaagcggcacttacagcaagccaga

SEQ ID NO: 67963 - DNA, 120 bp, Artificial Sequence
  ENSG00000075539_67 (sequence is synthesized)
tactctcacgcacacagatgttaaacagtgattctgccactgatgaaacaataccagaccatcctgacttacttctccagtctgaagattccactggcagcatcacaacagaggaagtgc

SEQ ID NO: 67964 - DNA, 120 bp, Artificial Sequence
  ENSG00000075539_68 (sequence is synthesized)
ttcaaatcagggatgagaccccaactttggaggcttctctagataatgctaacagccggctgcctgaggatacaacttcagtattaaaggaggaacatgttacaacctttgaagatgaag

SEQ ID NO: 67965 - DNA, 120 bp, Artificial Sequence
  ENSG00000075539_69 (sequence is synthesized)
gatcctatataattcaagaacagcaggaatctcttgtgtgtcaaggaattcttgatttagaagaaactgaaatgccagagcctctagctcctgaaagttaccccgagtcagtctgtgaag

SEQ ID NO: 67966 - DNA, 120 bp, Artificial Sequence
  ENSG00000075539_70 (sequence is synthesized)
aggatgttaccttagctctgaaagagctagatgaaagatgtgaagaagaagaagcggatttctccggactgtctagtcaagatgaagaagagcaagatggttttccagaagtacagacgt

SEQ ID NO: 67967 - DNA, 120 bp, Artificial Sequence
  ENSG00000075539_71 (sequence is synthesized)
cgcctctgccgtcaccatttctttctgccatcatagccgcctttcagcccgtggcatatgatgatgaagaggaagcctggcgctgccacgtcaatcagatgctgtctgacaccgacgggt

SEQ ID NO: 67968 - DNA, 120 bp, Artificial Sequence
  ENSG00000075539_72 (sequence is synthesized)
cctctgcagtgtttacttttcatgtgttttctaggctgtttcagacaattcaaagaaagtttggagaaataactaatgaggcagtcagctttcttggtgatagtctgcaacgcattggta

SEQ ID NO: 67969 - DNA, 120 bp, Artificial Sequence
  ENSG00000075539_73 (sequence is synthesized)
ccaaatttaaaagttccttggaagtgatgatgctgtgttcagaatgcccaacagtctttgtggatgctgaaacactgatgtcatgtggtttgctggaaacactcaagtttggtgttttgg

SEQ ID NO: 67970 - DNA, 120 bp, Artificial Sequence
  ENSG00000075539_74 (sequence is synthesized)
agttgcaagaacacctggatacatacaatgtgaaaagagaagccgctgagcagtggctagatgattgtaagaggacatttggtgccaaagaagacatgtataggataaacacagatgcac

SEQ ID NO: 67971 - DNA, 120 bp, Artificial Sequence
  ENSG00000075539_75 (sequence is synthesized)
aacaaatggaaatactagcagaattggagctctgccgaagattatacaaattgcattttcaattgctgcttctgttccaggcctactgtaaacttatcaaccaagtaaatacgataaaaa

SEQ ID NO: 67972 - DNA, 120 bp, Artificial Sequence
  ENSG00000075539_76 (sequence is synthesized)
atgaagcagaggtcatcaacatgtcagaggaacttgcccaactggaaagtatcctcaaagaagctgagtccgcttccgaaaacgaagaaattgacatttccaaagctgcacaaactacta

SEQ ID NO: 67973 - DNA, 120 bp, Artificial Sequence
  ENSG00000075539_77 (sequence is synthesized)
tagaaactgccattcattctttaattgaaactttgaaaaataaagaatttatatcagctgtagcacaagtcaaagctttcagatctctctggcccagtgatatctttggcagttgtgaag

SEQ ID NO: 67974 - DNA, 120 bp, Artificial Sequence
  ENSG00000075539_78 (sequence is synthesized)
atgaccctgtacagacactgttacatatatatttccatcatcagacgctgggccagacaggaagctttgcagttataggctctaacctggacatgtcagaagccaactacaaactgatgg

SEQ ID NO: 67975 - DNA, 120 bp, Artificial Sequence
  ENSG00000075539_79 (sequence is synthesized)
aacttaatctggaaataagagagtctctacgcatggtgcaatcataccaacttctagcacaggccaaaccaatgggaaatatggtgagcactggattctgagacacttcaggcctttagg

SEQ ID NO: 67976 - DNA, 120 bp, Artificial Sequence
  ENSG00000075539_80 (sequence is synthesized)
aaagaaactaaactgaagatgatgaagaatattaaccaagcaccttttatggacccttgcattcactgataactttctggcagcatctactttttagtgtaactaatgtcaaactgtatc

SEQ ID NO: 67977 - DNA, 120 bp, Artificial Sequence
  ENSG00000075539_81 (sequence is synthesized)
atcaaaaacaaagatctgaaagaaaaaaacatctgatattttaacagctgccaatatctcccacaataactgcgtgaagaaggaattttttaattacttaacctacgtgaaaagaaaagg

SEQ ID NO: 67978 - DNA, 120 bp, Artificial Sequence
  ENSG00000075539_82 (sequence is synthesized)
gctaaaagtgatgcctacaaatacattactttctggggaaagaaaagaattccaagaatgtttgcaataatggcctccaatactgaaacaaccaaaagcaggtgaaatgaggctgaaatc

SEQ ID NO: 67979 - DNA, 120 bp, Artificial Sequence
  ENSG00000075539_83 (sequence is synthesized)
aaggctgtttcattttagctgaagacctgcaaagctgcttggatttctagcagttgaaaacctaacctgcaattgatgcttaatcatccatccacatgaacatgcagtcagctatacgca

SEQ ID NO: 67980 - DNA, 120 bp, Artificial Sequence
  ENSG00000075539_84 (sequence is synthesized)
tcaagactcgtttgcaaaaaccattgatttttcagtatgtgggataagggtttgggtttttttgttttttggtctgtataaggaattatgtgtgtgtgagttgggatgtatggatatgtg

SEQ ID NO: 67981 - DNA, 120 bp, Artificial Sequence
  ENSG00000075539_85 (sequence is synthesized)
atagtcatattttcaaggtatggatgtttggtgataacgtctcagagcatgcctaaaagagcactgcaagattatttttgaagaaatgttattttattagatctaactcttcatagtatg

SEQ ID NO: 67982 - DNA, 120 bp, Artificial Sequence
  ENSG00000075539_86 (sequence is synthesized)
taaatgttagaacattttaataatattttaaaactgggctttcccagtatttcaaaaagaaataatatatctgttaacgttattggaatgctgctcagttctctgatcagtgcttatgtt

SEQ ID NO: 67983 - DNA, 120 bp, Artificial Sequence
  ENSG00000075539_87 (sequence is synthesized)
atgattgttgataactaaccaaagtagatgcctgcagagactttaaaatgtaaaataaagatgtatgctgcctgtcagctattctcattagaaaagttttaacttattttactccatata

SEQ ID NO: 67984 - DNA, 120 bp, Artificial Sequence
  ENSG00000075539_88 (sequence is synthesized)
gaaactgtagagactaaaaccagttattttcttgtacatttgtgccatgcactgttgttatacaagaataggtgtacaaagctaaagaaaaattgtggtcattgatgatggaatatatga

SEQ ID NO: 67985 - DNA, 120 bp, Artificial Sequence
  ENSG00000075539_89 (sequence is synthesized)
cttgcaggctttgaagtctgcagaattcaagaaaagagctgcaaatgcatttttgtatctttattcaggactcacatgctttaccctaaagaaacctggggctaggggaaatgaaaggaa

SEQ ID NO: 67986 - DNA, 120 bp, Artificial Sequence
  ENSG00000075539_90 (sequence is synthesized)
gcctgaagactgactaccaaaacatgcaatatacttattcactgtctaagtctgtagtataacatgaactggagtctctatccttttctaaaatcgcattttgtaagaaaagaaagaaaa

SEQ ID NO: 67987 - DNA, 120 bp, Artificial Sequence
  ENSG00000075539_91 (sequence is synthesized)
aaaaaaaaaaagaatgtagtcccacaactcctgatttgaaagaaacaccttgtattttttatatacatctcttatccactgtgacttttcttttaaactgggctctgtgattccagagtt

SEQ ID NO: 67988 - DNA, 120 bp, Artificial Sequence
  ENSG00000075539_92 (sequence is synthesized)
tagaatgtagaaatgaaatgcttagctttaccttttcttggggggtgtggaccctgccagaaatgtaattacgtatgctcaagtgcattaattgaaggcactgtgcacaccattggactg

SEQ ID NO: 67989 - DNA, 120 bp, Artificial Sequence
  ENSG00000075539_93 (sequence is synthesized)
ctgaccacagttaaacatttccagtaaaatttcgtaactggtcacagctcattcataatcactgtattttttgaccctgataaagacaattattttgatggtgttctggtactgtaattg

SEQ ID NO: 67990 - DNA, 120 bp, Artificial Sequence
  ENSG00000075539_94 (sequence is synthesized)
gtatcctttaaattatttaaaacttttgggtgtggggcaggcagagagggatggtgtccagagatacatcacactttacatcctatcttactgtcctctgtttttcttaccctccttaca

SEQ ID NO: 67991 - DNA, 120 bp, Artificial Sequence
  ENSG00000075539_95 (sequence is synthesized)
tcctttttgttaaaaataaaaagcattgtagctgttggtttgtgttgtattttaacaaagaatgaatgattacagtgtgcatcatttagaaacctttcaaatgttaccttcttgaattgc

SEQ ID NO: 67992 - DNA, 120 bp, Artificial Sequence
  ENSG00000075539_96 (sequence is synthesized)
cctagaaaagaacaaaattagttgactacccaaccaaacctttcagttgatatttgctttttgtgtttatttatatgtaactaagtctattaatataataaaaatgaatatacctgcagc

SEQ ID NO: 67993 - DNA, 120 bp, Artificial Sequence
  ENSG00000075539_97 (sequence is synthesized)
agacacatatgtatacatgtacatgtgcatacataaaataacttccttaacaaatgtaatgagttagaaagtatttttgaaaagtagaaaatgcttaagagtagtacttaaaaagtgaca

SEQ ID NO: 67994 - DNA, 120 bp, Artificial Sequence
  ENSG00000075539_98 (sequence is synthesized)
ttcatttatacttggttaagtactcttctacatagaaataaaaattattttatgtttgtaaaattctcatccttccaatctaagaagtttctgttaaatggaatctttatgctaccgttt

SEQ ID NO: 67995 - DNA, 120 bp, Artificial Sequence
  ENSG00000075539_99 (sequence is synthesized)
gctctttattatggcatataatattcgtgagatagaaatacttgtgaaaatgctacgggaaaaaaatggtgatactcaaagcaaaaacttacaccctgcttttttggcaactgttttttg

SEQ ID NO: 67996 - DNA, 120 bp, Artificial Sequence
  ENSG00000075539_100 (sequence is synthesized)
actggcgtgagatggtatctcattgtaaagtcacagatatttttttacttttgttcatgttccaaagcctttaccttctactttttcttttgtaggtaatcatcaaaatttttattatta

SEQ ID NO: 67997 - DNA, 120 bp, Artificial Sequence
  ENSG00000075539_101 (sequence is synthesized)
ttgtattgtttaatagtataatttaaaaaaaagaacttagaagtcaaaacaactgataatatcaaactgtccaaagctaggagcttacctggaatgcacttagcttttacttcagcttgg

SEQ ID NO: 67998 - DNA, 120 bp, Artificial Sequence
  ENSG00000075539_102 (sequence is synthesized)
aaattctgtgagtccagcgttctttcttttctactataccacggtgctattgttttatttatattttgctgaagaaaatgtactttatttttgaagtattcctttttttttattttatgt

SEQ ID NO: 67999 - DNA, 90 bp, Artificial Sequence
  ENSG00000075539_103 (sequence is synthesized)
tattcctttttttttattttatgttttatggtcttgaactcctgccctctagcagtcctccccgctcagcctcccaaagctctgggatta

SEQ ID NO: 68000 - DNA, 120 bp, Artificial Sequence
  ENSG00000075539_104 (sequence is synthesized)
ctgtacttttatatcaacattaggaatacccccagagaaggaaaaaccacatttggcttctacatccagtattgtttggaaataaataacatgtttgtttgtcattcattactgtccaaa

SEQ ID NO: 68001 - DNA, 120 bp, Artificial Sequence
  ENSG00000075539_105 (sequence is synthesized)
aagaaagaaaagaaaaacaaaacaagacttaaaatggatcttgattgccggttcacaaatttaaaactgacactagtcttctgagaattacacttctcataagcaaacagacctacttaa

SEQ ID NO: 68002 - DNA, 120 bp, Artificial Sequence
  ENSG00000075539_106 (sequence is synthesized)
ttctaagttgtctttattaaattgatcagaggggaagcacatctttcctttccccgtcttacgttacacaaaggtcaggcataggttgtaaagattttcataaaacctgcaaaatgaaga

SEQ ID NO: 68003 - DNA, 120 bp, Artificial Sequence
  ENSG00000075539_107 (sequence is synthesized)
atatcctttactgaaatggaacatcacaggtccctagaatggaatgggttttgttagtatagctgtcacaagtgtgtgcctcttgttacattaatgctatccctgcttttgttagttcca

SEQ ID NO: 68004 - DNA, 120 bp, Artificial Sequence
  ENSG00000075539_108 (sequence is synthesized)
tataaatgattgatttggcttgaatggagataaaagtctaggtctacaaccaatcctagaacttcaagttaactttaagtttggtgttgtatatggacaggctgttacactacccatttt

SEQ ID NO: 68005 - DNA, 120 bp, Artificial Sequence
  ENSG00000075539_109 (sequence is synthesized)
gctctggaggatcttatgaagaagaaaaaagtaataaattccaaatgtttttaatataactataagggtgaggtgtattgttaattacattaatgttaataaatatatattttcagtaaa

SEQ ID NO: 68006 - DNA, 120 bp, Artificial Sequence
  ENSG00000075539_110 (sequence is synthesized)
aaaactctgctgcctgtgagaagagaagggacagcggcttggagagacagaacggcaaaaccgctgctgctgctgcttctgcttctgctgctgctgctgctgctgctgcttttgcagctg

SEQ ID NO: 68007 - DNA, 120 bp, Artificial Sequence
  ENSG00000075539_111 (sequence is synthesized)
attgagacactatgttgagtctacaggattctgtgttttttgaaattagcataaagtccttgttaaagtcctggagcagcagctcttcagcgccagtcagcaaagtaaataaatactgtg

SEQ ID NO: 68008 - DNA, 120 bp, Artificial Sequence
  ENSG00000075539_112 (sequence is synthesized)
ctgtattccttattctttgcttactgtgccttcgtgtttcagttactttaagatgctgtgtctagaattttagcccacataaattaaattcctgtaatttcattatacttctttcagttg

SEQ ID NO: 68009 - DNA, 120 bp, Artificial Sequence
  ENSG00000075539_113 (sequence is synthesized)
cctggggctttcctgccctgtacctatctgttatctcctctattttttacctttgtatgcttatccaagatataaaatcttgttagcaaaatggagctgaatggaaattgtgttaatatt

SEQ ID NO: 68010 - DNA, 120 bp, Artificial Sequence
  ENSG00000075539_114 (sequence is synthesized)
gacctttagctgtaaatgtagtttgcctgccattcagctacttcagtcccttattccactttatttctcctctaagcccccaagcctgcattccaacatgtaataattgtgcacttttag

SEQ ID NO: 68011 - DNA, 120 bp, Artificial Sequence
  ENSG00000075539_115 (sequence is synthesized)
ttaggaatgtttattcattcaatgagtattagaatgcctactgtgtgctggcactgttttaggcaataaactcatgagcttgcacttgaatgggatagatacacagtaaagatatgaata

SEQ ID NO: 68012 - DNA, 120 bp, Artificial Sequence
  ENSG00000075539_116 (sequence is synthesized)
tataatatagtgtcaggtatagtcttaatatttttattactccagatcagtataaatgcctgtgctgaatttgaaagctttttttttttttttttttaaagatcatggtctttaaagtta

SEQ ID NO: 68013 - DNA, 120 bp, Artificial Sequence
  ENSG00000075539_117 (sequence is synthesized)
tatcattcaaggatgatccatgtatttccaggcacgaacattgtattcttttgaaacaagttaggaagcctaaaggtcagagtcatattttggatatgacacatttggacagggagtttt

SEQ ID NO: 68014 - DNA, 120 bp, Artificial Sequence
  ENSG00000075539_118 (sequence is synthesized)
gtttttgttacatagaaaggaatatgtgacaaacagcaaatacaagatataaaattaattgacagtctgtttttctcatagtataaaagtacttgaattatataatcagttttatttagc

SEQ ID NO: 68015 - DNA, 120 bp, Artificial Sequence
  ENSG00000075539_119 (sequence is synthesized)
ttttatttttacaaggaatatgaaaagacagttctttggtactctgaaatctgcaaataaacataattttaaatatgtaaaacagaagagttaattaaaggttaaatcactttaatatat

SEQ ID NO: 68016 - DNA, 120 bp, Artificial Sequence
  ENSG00000075539_120 (sequence is synthesized)
gcatttcataaacgttttttggtagaggtaggaaagaaatctcctctgggagttgtgctaacaagccaaatttgacttctgtgatctcttggtttaactgagatactaagaccttaaggc

SEQ ID NO: 68017 - DNA, 120 bp, Artificial Sequence
  ENSG00000075539_121 (sequence is synthesized)
agcagtcactaggataggaagagctaaggactggatatggccacagcccagcaatggactctgactactgctcattgtgatttatccctggtgtatcttgtgtgctaaatgtatttcatt

SEQ ID NO: 68018 - DNA, 120 bp, Artificial Sequence
  ENSG00000075539_122 (sequence is synthesized)
taagtggattggtaaccagtatttgtacttttttgcttaaacagtatagggtttcttcctccagccagagaaatggcagactccctacattagcattcaggaaccccagtgacctggccc

SEQ ID NO: 68019 - DNA, 120 bp, Artificial Sequence
  ENSG00000075539_123 (sequence is synthesized)
cattgtgccttcctccttcgttcatttcccatggcatccttttcttagatgtcagtctcgctcctcatcctaaagttgcccaattgcactggcttcagaactacaattcacaggcaaccc

SEQ ID NO: 68020 - DNA, 120 bp, Artificial Sequence
  ENSG00000075539_124 (sequence is synthesized)
tgtggaggcatttttcccatctcttccccctcatcctccctgtcctcttcccctccttgttgcctttgtagccctcctcctcctcttttaacacagtccagataggtcttcatgtagggg

SEQ ID NO: 68021 - DNA, 120 bp, Artificial Sequence
  ENSG00000075539_125 (sequence is synthesized)
ccaatttgtaaatatgggcattagtaataacctttaacagttttttaaaaaatgattgatgcactatgtgtatttcagatagatgagcctttctgcaatggaaatggatcaaaaattata

SEQ ID NO: 68022 - DNA, 120 bp, Artificial Sequence
  ENSG00000075539_126 (sequence is synthesized)
gaaaattttctataaaaagttaaaaatcagttcatattatagaaatgtgactgacaagcgatgttgacaaaatatgccagaatattaggaaactgccacttgcaagtttcttcagcagat

SEQ ID NO: 68023 - DNA, 120 bp, Artificial Sequence
  ENSG00000075539_127 (sequence is synthesized)
ggcggcagaggactgcatagtacatccaaattgctaagttttcaagctgtgaaacaatgtttgccccaaaacttacttgctgtaatttggtgttcatgaggatcagcaggagcactgatt

SEQ ID NO: 68024 - DNA, 120 bp, Artificial Sequence
  ENSG00000075539_128 (sequence is synthesized)
cacatcaccttgcactgacagattgcctcatgtgtcccatagagtctaaggaacaacagtttaattctataggtattttgtgagattctttcatgttttaggtattcatgacgatctttc

SEQ ID NO: 68025 - DNA, 120 bp, Artificial Sequence
  ENSG00000075539_129 (sequence is synthesized)
acctttctgtgtgcttgtgggcctagtaatgtagaagaaccttaaaatggattttttaaagagagttgttcctcccattctttcgggagatgtggttttggatactagtactgaggaaag

SEQ ID NO: 68026 - DNA, 120 bp, Artificial Sequence
  ENSG00000075539_130 (sequence is synthesized)
ttccccaagattagttaagatgaaacgtcttagctcactttcatctgagaagacggtggatgagcaaggtggaaccaatttctgtcatagtaattatgacaaatacgaacaccaacaact

SEQ ID NO: 68027 - DNA, 120 bp, Artificial Sequence
  ENSG00000075539_131 (sequence is synthesized)
tcacaggtatttgctttaaatgtacaatttgaaagtagaattatactttattaatttggaatcctgcattagagaaagtcaactgaataaaagttgaaatactagagaacattttaaaaa

SEQ ID NO: 68028 - DNA, 120 bp, Artificial Sequence
  ENSG00000075539_132 (sequence is synthesized)
agaaggaatgctattaaacacatgcagtgatgtgccttgaatgtgagttatagttgaagagctttagactcacactgtttctgtgaagacaaaatgaaaacaggccaaccaaactgcaaa

SEQ ID NO: 68029 - DNA, 120 bp, Artificial Sequence
  ENSG00000075539_133 (sequence is synthesized)
gtcaactttagaaagagccaagagaaaaaatatgaaacggcgcaggcgtcgagacattttacgagtacaactggtacgaatatttgaactgctggcagatgctggtgtcattagtcacag

SEQ ID NO: 68030 - DNA, 120 bp, Artificial Sequence
  ENSG00000075539_134 (sequence is synthesized)
gattggtgctgtgattgggattaaaacctcaggccagctgtggtttttagcagttgttaaatgaaatcttttaaaaagactttggaaccactagtattatgttttttggaaaggcctgtg

SEQ ID NO: 68031 - DNA, 120 bp, Artificial Sequence
  ENSG00000075539_135 (sequence is synthesized)
ggggaccggcggcgctggaggagcgaggcagctgtactaggactgggaacgggtcaggtttttcttcccttgcactggttccctcaaccttctgctcatgggtttctactatgcctagaa

SEQ ID NO: 68032 - DNA, 120 bp, Artificial Sequence
  ENSG00000075539_136 (sequence is synthesized)
ttattgtaatactaagcaattgtatgttatgtaaaaatttctgttatataaatctatgcataaatatatgcatataatatttgtgtacatatgtaagtttgtggctgtgaggtagtagcc

SEQ ID NO: 68033 - DNA, 120 bp, Artificial Sequence
  ENSG00000075539_137 (sequence is synthesized)
caaagattttttttttaaatccttaaagacctctgggggtgaggaagctagaggcagcttccacagacttcagtgtggttattttagaccacatctacctgtagggattttgaaataccc

SEQ ID NO: 68034 - DNA, 120 bp, Artificial Sequence
  ENSG00000075539_138 (sequence is synthesized)
caattgttgagaactagtgtgtattttgagggctgttactattcagaatgttgtgtgtaaaaacataatagagtcagaaaaaagctgagatctgctgctgtaatgagctcaaacacacct

SEQ ID NO: 68035 - DNA, 120 bp, Artificial Sequence
  ENSG00000075539_139 (sequence is synthesized)
ttttattaaatatattaaatacagtgctatggagagtgtaagccatccaaaaatactgatatttagtttttatttgagctttatctaagagacagagcaggaatgctagcttttagattc

SEQ ID NO: 68036 - DNA, 120 bp, Artificial Sequence
  ENSG00000075539_140 (sequence is synthesized)
ccaaattttaattattcaggtcctgtttattcttattattagcagttagagtttagtagatttatattccaagtatgtttaatacgacatgggtttttccagtttgtaattcaatgcttg

SEQ ID NO: 68037 - DNA, 120 bp, Artificial Sequence
  ENSG00000075539_141 (sequence is synthesized)
aattgcaatctttagaattatattaacagttatgtcttccttctctcataggcttacataaatctttcaaaattttgggttagcatgtagagaaatattacaacttagcattataaggta

SEQ ID NO: 68038 - DNA, 120 bp, Artificial Sequence
  ENSG00000075539_142 (sequence is synthesized)
tttaatgcaagcagtcaggtaataccaagttagtctagttatatggaagctagcttttcttcttctacttggagtgatcatccctgtttctctcctattagcagaaaatgaaaagaattc

SEQ ID NO: 68039 - DNA, 120 bp, Artificial Sequence
  ENSG00000075539_143 (sequence is synthesized)
acgtatctttaccaaggctgaacattatgatgaaatataaagttgagggggacaactttgatggatgaaaaatgttacctgatttttatttgtgtttagaatattaatgaaattaaatat

SEQ ID NO: 68040 - DNA, 120 bp, Artificial Sequence
  ENSG00000075539_144 (sequence is synthesized)
tattggcctcctccattttattgtttgtaacttgcttgttcatgtccttgtccttgtttcagtttgggggtgtgggtgtttttctagtcgatttcatcacagctttgtgtgtagaaacaa

SEQ ID NO: 68041 - DNA, 120 bp, Artificial Sequence
  ENSG00000075539_145 (sequence is synthesized)
aagtgattaactgtgtgtttattatatgcccacatattttttcctgctgtctaattttactttggttttatatacatactcttaggatctttactcacctaatgctgtattttgaacact

SEQ ID NO: 68042 - DNA, 120 bp, Artificial Sequence
  ENSG00000075539_146 (sequence is synthesized)
ttcctgtgccatttggtattttttgataatgtaatttcaaagatctgtttagcattctgtttattagattataaaaatcatttgtcttgaacaaaataaaatttgaaatttattttggaa

SEQ ID NO: 68043 - DNA, 120 bp, Artificial Sequence
  ENSG00000075568_0 (sequence is synthesized)
gctcgcgggccgtgcccgtttccagtatggccgcccgccgcgcctgacccgcggcctctccgctccgactgcttgtaggcgatgcccaggcaaagaccgtgactgacactctcgctcaca

SEQ ID NO: 68044 - DNA, 120 bp, Artificial Sequence
  ENSG00000075568_1 (sequence is synthesized)
cacacgcacgcacggacccaggcccacgctcggagatcgagccccgggctcgcaaccgttgtcgctcccggcgccgcggccagagcccggaccacggcttccgcgccgccgccgcctcgc

SEQ ID NO: 68045 - DNA, 80 bp, Artificial Sequence
  ENSG00000075568_2 (sequence is synthesized)
aagggccgcgccggacctcgagcgcggcggcccccggccggcagggatggggaagcgggcgggaggaggagcaaccggag

SEQ ID NO: 68046 - DNA, 120 bp, Artificial Sequence
  ENSG00000075568_3 (sequence is synthesized)
ggaacctgcggccgcccgtagcgggggcccgcggagcgcggccgccggcctcctaggcgcgctgcacctggtgatgaccctcgtagtggctgcggcgcgggccgagaaggaagcattcgt

SEQ ID NO: 68047 - DNA, 120 bp, Artificial Sequence
  ENSG00000075568_4 (sequence is synthesized)
tcagtcagagagcataatagaagtactgcgttttgatgatggagggctactacagaccgagacaacacttggactcagttcatatcagcagaaaagtatatctctctaccgggggaattg

SEQ ID NO: 68048 - DNA, 120 bp, Artificial Sequence
  ENSG00000075568_5 (sequence is synthesized)
caggcccatacgatttgagccaccaatgctggatttccatgaacaaccagttggaatgccaaaaatggaaaaagtctacttacataatcctagttctgaagaaacgattactttagtatc

SEQ ID NO: 68049 - DNA, 120 bp, Artificial Sequence
  ENSG00000075568_6 (sequence is synthesized)
aatatctgctacaacatcacattttcatgcatcattttttcaaaataggaaaattcttccaggaggaaatacatcatttgatgtagtttttcttgcaagagtagtaggaaatgtagaaaa

SEQ ID NO: 68050 - DNA, 120 bp, Artificial Sequence
  ENSG00000075568_7 (sequence is synthesized)
tactttatttattaatacatctaatcatggggtatttacttaccaggtatttggtgttggagttccaaatccatatcgattgaggccgttccttggggccagagtccctgtgaatagcag

SEQ ID NO: 68051 - DNA, 120 bp, Artificial Sequence
  ENSG00000075568_8 (sequence is synthesized)
tttctcacctataataaacatccacaatcctcacagtgagcctttacaggttgtagaaatgtactctagtggaggagaccttcacctagaactcccaacgggtcaacaaggaggtaccag

SEQ ID NO: 68052 - DNA, 120 bp, Artificial Sequence
  ENSG00000075568_9 (sequence is synthesized)
aaaactgtgggaaattcctccttatgaaaccaagggagtgatgagagccagtttttcatctagagaagcagataatcacacagccttcataagaataaagactaatgcttcagacagcac

SEQ ID NO: 68053 - DNA, 120 bp, Artificial Sequence
  ENSG00000075568_10 (sequence is synthesized)
agagtttatcattcttcctgttgaggttgaagttacaacagctcctggaatttattcctcaactgaaatgttagattttggtacactaagaacacaagatctaccaaaagttttaaacct

SEQ ID NO: 68054 - DNA, 120 bp, Artificial Sequence
  ENSG00000075568_11 (sequence is synthesized)
tcatttattaaattcaggaacaaaagatgtaccaataacaagtgttcgacctacaccacaaaatgatgctataacggtacactttaaaccaattacattaaaagcatcagaaagtaaata

SEQ ID NO: 68055 - DNA, 120 bp, Artificial Sequence
  ENSG00000075568_12 (sequence is synthesized)
caccaaggttgcaagcattagttttgatgcatcgaaggcaaaaaagccatctcagttttctgggaaaataacagttaaagcaaaggaaaagagttattctaaacttgaaataccatatca

SEQ ID NO: 68056 - DNA, 120 bp, Artificial Sequence
  ENSG00000075568_13 (sequence is synthesized)
agcagaagttttagatggttatttgggatttgatcatgctgcaacattatttcacatccgagacagccctgctgatcctgtggaaaggccaatttaccttactaacactttcagttttgc

SEQ ID NO: 68057 - DNA, 120 bp, Artificial Sequence
  ENSG00000075568_14 (sequence is synthesized)
gatcctcattcacgatgtgttgctaccagaagaagccaaaacaatgtttaaagttcacaacttcagcaaaccagtcttaattcttcctaatgaatcaggatacatttttaccctgctttt

SEQ ID NO: 68058 - DNA, 120 bp, Artificial Sequence
  ENSG00000075568_15 (sequence is synthesized)
tatgccttccacatcatccatgcacattgataacaacattttacttattaccaatgcttctaaatttcatttacccgtgcgggtatacacaggctttttagattactttgtattgccccc

SEQ ID NO: 68059 - DNA, 120 bp, Artificial Sequence
  ENSG00000075568_16 (sequence is synthesized)
caaaatagaggaacgtttcatagattttggagtactgagtgctacagaagcaagtaatattttatttgcaattataaacagcaatccaattgagttggctataaaaagttggcatatcat

SEQ ID NO: 68060 - DNA, 120 bp, Artificial Sequence
  ENSG00000075568_17 (sequence is synthesized)
aggagacggtttatcaatagaacttgtagctgtggaaagaggcaatagaactacaataatttcaagcctgccagagtttgaaaaatcctctttatcagatcaatcatcggtaacattagc

SEQ ID NO: 68061 - DNA, 120 bp, Artificial Sequence
  ENSG00000075568_18 (sequence is synthesized)
ttcaggctattttgcagtcttcagagtcaaacttactgcaaaaaaattagaggggattcatgatggagccatccagatcacaacagactatgagatcctgacaatccctgtgaaggctgt

SEQ ID NO: 68062 - DNA, 120 bp, Artificial Sequence
  ENSG00000075568_19 (sequence is synthesized)
gattgcagtaggctcactgacctgcttccctaagcacgtggttcttccaccttcctttccagggaaaatagttcatcaaagtttaaatattatgaattccttctcacagaaggtaaaaat

SEQ ID NO: 68063 - DNA, 120 bp, Artificial Sequence
  ENSG00000075568_20 (sequence is synthesized)
acagcaaatacgatctttgtcagaagatgtgcgattttactataaacgattacggggcaataaggaagacttggagccaggaaaaaaatcaaagattgcaaacatttattttgatcctgg

SEQ ID NO: 68064 - DNA, 120 bp, Artificial Sequence
  ENSG00000075568_21 (sequence is synthesized)
actacagtgtggggatcattgctatgttggcttgccttttctatccaaatctgaacccaaagtgcagcctggtgtagccatgcaggaagatatgtgggatgctgactgggatttgcatca

SEQ ID NO: 68065 - DNA, 120 bp, Artificial Sequence
  ENSG00000075568_22 (sequence is synthesized)
aagcctgttcaagggatggacaggaataaaggaaaattcaggtcatagattgagtgctatatttgaagtaaatacagaccttcaaaaaaatataatatcaaaaatcactgctgagctctc

SEQ ID NO: 68066 - DNA, 120 bp, Artificial Sequence
  ENSG00000075568_23 (sequence is synthesized)
ctggccttccatacttagctcaccccggcacttgaaatttccacttactaatacaaactgctcctcagaagaagagattactttagaaaatcctgcagatgttcctgtctatgttcagtt

SEQ ID NO: 68067 - DNA, 120 bp, Artificial Sequence
  ENSG00000075568_24 (sequence is synthesized)
tattcctctggctttatattccaacccttcagtgtttgtagataagttagtatcaaggtttaacttgagtaaggtggcaaagatagatttgagaacactagaatttcaagtcttcagaaa

SEQ ID NO: 68068 - DNA, 120 bp, Artificial Sequence
  ENSG00000075568_25 (sequence is synthesized)
cagtgctcatccactgcagagttcaacaggatttatggagggcctctctcgacatttaattttaaacctaattttaaaacctggagaaaagaaatctgtcaaagtaaagtttactccagt

SEQ ID NO: 68069 - DNA, 120 bp, Artificial Sequence
  ENSG00000075568_26 (sequence is synthesized)
tcacaacagaactgtttcttcacttatcatagtcagaaataacctgactgtgatggatgctgtgatggtccaaggacaaggaacaactgagaacttgagggtggcaggcaagcttccagg

SEQ ID NO: 68070 - DNA, 120 bp, Artificial Sequence
  ENSG00000075568_27 (sequence is synthesized)
ttaaggtagagaatacaggacaacttcaaattcacatagaaaccattgaaatcagtggatactcatgtgaaggatatggctttaaagttgttaattgtcaagagtttactctaagtgcca

SEQ ID NO: 68071 - DNA, 120 bp, Artificial Sequence
  ENSG00000075568_28 (sequence is synthesized)
atgcttctagagatataatcatattgtttactcctgattttacagcttctagagttattcgggaactgaagtttataacaaccagtggctctgagtttgtatttatattgaatgcatccc

SEQ ID NO: 68072 - DNA, 120 bp, Artificial Sequence
  ENSG00000075568_29 (sequence is synthesized)
ttccttaccatatgttagcaacctgtgcagaagccctacccagacctaactgggaactggctctgtatatcatcatctcaggaataatgagtgcactgtttcttttggtcattggaacag

SEQ ID NO: 68073 - DNA, 120 bp, Artificial Sequence
  ENSG00000075568_30 (sequence is synthesized)
cctatttggaagctcaaggaatatgggagccatttcgaaggcggctatcctttgaggcctcgaacccgcccttcgatgtgggaaggccatttgatctcaggagaatcgttggtatttcat

SEQ ID NO: 68074 - DNA, 120 bp, Artificial Sequence
  ENSG00000075568_31 (sequence is synthesized)
ctgaaggaaacttgaacacactcagctgtgaccccggtcacagtagggggttctgtggagcaggcggttcatcatcccgacccagtgccgggagtcataagcagtgtggcccatcggtcc

SEQ ID NO: 68075 - DNA, 120 bp, Artificial Sequence
  ENSG00000075568_32 (sequence is synthesized)
acccacacagcagtcacagcaatagaaactcagctgacgtggaaaacgtcagagccaaaaacagttcaagtacctctagtaggacttctgctcaagcagcttcttcacagtctgctaaca

SEQ ID NO: 68076 - DNA, 120 bp, Artificial Sequence
  ENSG00000075568_33 (sequence is synthesized)
aaacaagcccccttgtcttagattcgaacacagtgactcaaggtcatacagcgggcagaaagtccaaaggggcaaagcagagccagcacggcagccagcaccatgcccacagcccgctgg

SEQ ID NO: 68077 - DNA, 120 bp, Artificial Sequence
  ENSG00000075568_34 (sequence is synthesized)
agcagcaccctcagcctcctctgccaccgccagtgcctcagccccaggagccgcagcctgaaaggctgtctcccgcccccctcgcacacccttcccacccagaacgtgccagcagcgcga

SEQ ID NO: 68078 - DNA, 120 bp, Artificial Sequence
  ENSG00000075568_35 (sequence is synthesized)
ggcacagttccgaggactcggacatcaccagtctcatagaagccatggacaaagacttcgaccaccatgactccccagccctagaagtgtttacagagcagcctccatcgccattgccaa

SEQ ID NO: 68079 - DNA, 120 bp, Artificial Sequence
  ENSG00000075568_36 (sequence is synthesized)
aaagcaaagggaaaggaaaacctcttcagcgcaaggtgaaaccacctaagaagcaagaggaaaaggagaagaagggaaagggaaagccacaggaagatgagctgaaggactctttggctg

SEQ ID NO: 68080 - DNA, 120 bp, Artificial Sequence
  ENSG00000075568_37 (sequence is synthesized)
atgatgatagctcctccaccaccacagagacctccaaccctgacacagaaccgctcctcaaggaggatacagaaaagcaaaagggaaaacaagccatgcctgaaaaacatgaaagtgaaa

SEQ ID NO: 68081 - DNA, 120 bp, Artificial Sequence
  ENSG00000075568_38 (sequence is synthesized)
tgtctcaagtgaagcaaaaaagcaaaaaactcttaaatattaagaaagaaatcccaacagatgtgaaacccagttcattagaactaccatatactccccctttggaaagtaagcaacgta

SEQ ID NO: 68082 - DNA, 120 bp, Artificial Sequence
  ENSG00000075568_39 (sequence is synthesized)
gaaatctcccaagcaagattcctcttccaactgcaatgacaagtggatccaaatcacgaaatgcccagaaaacaaaaggtacaagtaagttagtggataacagaccacctgccctagcaa

SEQ ID NO: 68083 - DNA, 120 bp, Artificial Sequence
  ENSG00000075568_40 (sequence is synthesized)
aattcctcccgaatagtcaagaattaggcaacaccagtagctcagagggtgaaaaagactctcctccaccggagtgggattccgttccagttcacaaacctggcagctctactgatagtc

SEQ ID NO: 68084 - DNA, 120 bp, Artificial Sequence
  ENSG00000075568_41 (sequence is synthesized)
tttataaactttctctgcaaaccctcaacgcagacattttcttaaaacaacgccagacctcaccgacacctgcttccccgtctcccccagctgccccctgcccctttgtggcccggggca

SEQ ID NO: 68085 - DNA, 120 bp, Artificial Sequence
  ENSG00000075568_42 (sequence is synthesized)
gctacagcagcatcgtcaacagcagctccagcagtgaccctaaaataaaacagccaaatggaagcaaacacaagttgacaaaggcagcctcgctcccgggcaagaacggcaaccccactt

SEQ ID NO: 68086 - DNA, 120 bp, Artificial Sequence
  ENSG00000075568_43 (sequence is synthesized)
ttgctgcagtcacggctggctacgacaagagcccaggtgggaatggctttgctaaagtttcttcaaacaaaacaggtttctccagcagccttggcatttcacacgctcctgttgacagcg

SEQ ID NO: 68087 - DNA, 120 bp, Artificial Sequence
  ENSG00000075568_44 (sequence is synthesized)
atggctcagacagctcgggtttgtggagtcccgtcagcaacccaagcagccctgacttcactcccctcaattcgttctccgcctttggaaactcttttaatctaactggtgaagttttca

SEQ ID NO: 68088 - DNA, 120 bp, Artificial Sequence
  ENSG00000075568_45 (sequence is synthesized)
gcaaactcggattatctcgatcgtgcaatcaggcctcacagaggagctggaacgagtttaatagtggcccttcatacctttgggagtcgccagcgacagatcccagtccttcctggccag

SEQ ID NO: 68089 - DNA, 120 bp, Artificial Sequence
  ENSG00000075568_46 (sequence is synthesized)
ccagttccggctccccgacccacacagccacatcggtcctcggtaacaccagcggcctgtggtccaccactccattcagcagctccatttggtccagcaaccttagcagcgcccttccct

SEQ ID NO: 68090 - DNA, 120 bp, Artificial Sequence
  ENSG00000075568_47 (sequence is synthesized)
tcaccactccagcaaacacgctggcaagcatcggcctcatgggcacagaaaactcccctgctcctcacgctccctccacctccagtccagctgacgacttgggacagacctacaacccgt

SEQ ID NO: 68091 - DNA, 120 bp, Artificial Sequence
  ENSG00000075568_48 (sequence is synthesized)
ggcggatatggagccccacgattggaagaagaagctcggacccttggtctaattcgcactttcctcacgagaattaaattaagcaaaaaacaaacaaacatagtgggccctcgtctagat

SEQ ID NO: 68092 - DNA, 120 bp, Artificial Sequence
  ENSG00000075568_49 (sequence is synthesized)
catgatgtgccagtttctgagacatctttttaaggctcttactgcagctcccctccccaccctcctcttctttgcaaaacagacccaagcagggcaggctcagaccactcgcttctttca

SEQ ID NO: 68093 - DNA, 120 bp, Artificial Sequence
  ENSG00000075568_50 (sequence is synthesized)
gatctttcttgcaattatgataacatgagatttgctgttgtgcttttagagaaaagtctggactcagccacaaactctaataagacctgtacatctgagaacctttcccgttactgcgtt

SEQ ID NO: 68094 - DNA, 120 bp, Artificial Sequence
  ENSG00000075568_51 (sequence is synthesized)
ttcaccacctgtcttccccatgctttatttatctgtatgaacacagatttgacattacagctaaggaaataatttgagttgattcagaaatcctggcatgtgacaattttgttaaattac

SEQ ID NO: 68095 - DNA, 120 bp, Artificial Sequence
  ENSG00000075568_52 (sequence is synthesized)
caagtttggtttttaataatttctcaatattatgcgccaagatctaattttaaaactgtatgaggactttgtgctgaaaatagagtatttttttaaagtaaggctgtcttggtttaaaag

SEQ ID NO: 68096 - DNA, 120 bp, Artificial Sequence
  ENSG00000075568_53 (sequence is synthesized)
cagattacagaaatgtaagtcaacttaagaacggtgaatgaatgtaaaaacattcagttgagaccatatgcattttctgtgctgtttgtacttgaggtatgtaacatttgtatacctgaa

SEQ ID NO: 68097 - DNA, 120 bp, Artificial Sequence
  ENSG00000075568_54 (sequence is synthesized)
cttattttaaagatgaactgaaatgcacatagccaagtcttgagatacaagattgaatgtgtatttcttaaaaatacaactttgtgttgtactttgaaataaatgatgcttttttcaaaa

SEQ ID NO: 68098 - DNA, 120 bp, Artificial Sequence
  ENSG00000075568_55 (sequence is synthesized)
cctactttgcactaataggaaatgagttctagatttgaaatagtttttaaataaatcttccagtaccaaaaagcaaacagaaggaaaaaatgtctgtttctctgcaaaacacttgctttg

SEQ ID NO: 68099 - DNA, 120 bp, Artificial Sequence
  ENSG00000075568_56 (sequence is synthesized)
aacctggctgtgagctagtgatagggcatccggagctctggggctccctccgactcaacccttgtggtaagcagccattgttcagctcttccttttgtctgtttttaatatttgagtacc

SEQ ID NO: 68100 - DNA, 120 bp, Artificial Sequence
  ENSG00000075568_57 (sequence is synthesized)
gggcagagagccttggaggctcgggtagggcgtccacgctctcgccggaatgtgtagatacatcctggaaagagatgctctctgagatacatcctgtagccctatttgccatgagacttt

SEQ ID NO: 68101 - DNA, 120 bp, Artificial Sequence
  ENSG00000075568_58 (sequence is synthesized)
ctggcaccttttagtactactttttgccaggggtgggatacaatcctaaatccttcactcagcaaatcttgaagaagaccgtgggtggtccgtgtgtccaggtgggatgcttctgcttcc

SEQ ID NO: 68102 - DNA, 120 bp, Artificial Sequence
  ENSG00000075568_59 (sequence is synthesized)
tagcgccccctgaggtttctgctggccattggctcttggcttaacactccacgatttaggcagttccccattaaacagatgccactttcagcaacagaacacagcccctggagccagttt

SEQ ID NO: 68103 - DNA, 120 bp, Artificial Sequence
  ENSG00000075568_60 (sequence is synthesized)
cacaggggtgttctgaggcccagtgaggtgacatgagccgtgttggtgacgtaatgacacaagcatgcagaaccatgctgccgggagagcaggtgacagccagacacagccacaaactgg

SEQ ID NO: 68104 - DNA, 120 bp, Artificial Sequence
  ENSG00000075568_61 (sequence is synthesized)
ctggcagcatccccacctggtggcacctgagccacatgttgacatcactccttctgtgtggaggggaaaggatgacaggacccaaccccagacaggagattttggtgccactcctcgggg

SEQ ID NO: 68105 - DNA, 120 bp, Artificial Sequence
  ENSG00000075568_62 (sequence is synthesized)
caggaatgtgggaaatggcaggccagccctctggaggaggaactgtgaagggcccagtgccgcatgcctcagtttcctgcctggctcttccacagaggccagctggtgcatctgagcatg

SEQ ID NO: 68106 - DNA, 120 bp, Artificial Sequence
  ENSG00000075568_63 (sequence is synthesized)
gcgcctcagggcagagctccacggtgggcactgggggaagagatgcagagcttgtctcctcagcccacgtctgtgcagtccttttgtgtttttctagccaagcagtcccttacactggtt

SEQ ID NO: 68107 - DNA, 120 bp, Artificial Sequence
  ENSG00000075568_64 (sequence is synthesized)
ccaagccctgtgacctctctgccctcactgccagcgttactaaaatgttccagcagagctccactcgatagagaatatgggtggaggaaacccagaagagtcggtcccacatgctctcca

SEQ ID NO: 68108 - DNA, 120 bp, Artificial Sequence
  ENSG00000075568_65 (sequence is synthesized)
tcacttttaccttcctgctctgccccagctttctcatccccttttatcccttcgcctcccttggtgtttcgtcttgcttagacctgaagttctgcgagcgctgttggcagtgccaagctt

SEQ ID NO: 68109 - DNA, 120 bp, Artificial Sequence
  ENSG00000075568_66 (sequence is synthesized)
agtgcagttccttggggtgaaagcgttggtcccacccaagactgtgcagccagcatgtggcagtagccgctgggggagttgtgcagcctctgtgtaaagatctctccatcccaagtagca

SEQ ID NO: 68110 - DNA, 120 bp, Artificial Sequence
  ENSG00000075568_67 (sequence is synthesized)
ccccttagcatggtgccctataccatctgtaccacatgagttgcagagaaaatgctccttgaataatttcatgatttaaaaaggcaaaaaatacaaagggttattaaaaggaaaagcaaa

SEQ ID NO: 68111 - DNA, 120 bp, Artificial Sequence
  ENSG00000075568_68 (sequence is synthesized)
tcagaagccacaaaggaaaattttaataatatttgaatcaaaacgttctctaattgcagctcgtgtactgttcagagtctccccttcactcctacctcaagcactgttcagtaggggctt

SEQ ID NO: 68112 - DNA, 120 bp, Artificial Sequence
  ENSG00000075568_69 (sequence is synthesized)
ttgctaacttccctttgcttttcctgtttcatttcatcatcactgtcttgggagcatctgtagttctgggccctgtgaaacacattccacccacaggagctgcccgcacctttccccagg

SEQ ID NO: 68113 - DNA, 120 bp, Artificial Sequence
  ENSG00000075568_70 (sequence is synthesized)
acaggcacctcgggaggatcgagcgcacacaaaacggagcacagcctgctccaagtgtgggcactgcctgaggggacgagtcactgcaggggcggagcgaggccagaggaagtggctagg

SEQ ID NO: 68114 - DNA, 120 bp, Artificial Sequence
  ENSG00000075568_71 (sequence is synthesized)
gaagggtcaggacagttgtacaaatagcaagccgacagtgtagacgtggtgtcagatgggaggcctcagaggagcttgatggggacaaagattcgagcagggctcgtatgggagagcggt

SEQ ID NO: 68115 - DNA, 120 bp, Artificial Sequence
  ENSG00000075568_72 (sequence is synthesized)
gtgagacacgtcctgagtgtgggcatcaggtcagcagatccacagaaccagcgaggaggggcccatgtcatcaaggggtgagagtgggcgggtgggagacaggaccgtgagtctggcacc

SEQ ID NO: 68116 - DNA, 120 bp, Artificial Sequence
  ENSG00000075568_73 (sequence is synthesized)
agtaccagcagcactggggaaggtgagagagaaggtagcaggcagccctgaggatggcggagtggagagcacgggcttccaagggaaggctgctttgctcggcagggccatgctggaggc

SEQ ID NO: 68117 - DNA, 120 bp, Artificial Sequence
  ENSG00000075568_74 (sequence is synthesized)
ttgacctagccaagacatgggaaaccttgagccctgagccctgggggtaggggagaagcagcttgtgctacagggtgtgaccagggaagcaagaggcagcaggcagagcggctgcaatgt

SEQ ID NO: 68118 - DNA, 120 bp, Artificial Sequence
  ENSG00000075568_75 (sequence is synthesized)
ggcagtgaggggacgggagaagtggagccgggggtactcagggtacgcggaaatctcacaaggcaggaggggccagccaggtagcgagctggccaggcctgggctggggatcgtgccctg

SEQ ID NO: 68119 - DNA, 120 bp, Artificial Sequence
  ENSG00000075568_76 (sequence is synthesized)
tggtgatgggaattcacaggtccaagctctcccccaccttcttcctcttgcagtagctacagcagcaccaagttgcacacaatagatgtgcaaaatgatacatttttctgataaaaggta

SEQ ID NO: 68120 - DNA, 120 bp, Artificial Sequence
  ENSG00000075568_77 (sequence is synthesized)
tacatatttccgtttactgagtagagaatgttattttatgactgaaattttttgttttaatttcagagatggggtcaggctggagtgcaatggtgtgattatagctcactgcagcctcaa

SEQ ID NO: 68121 - DNA, 120 bp, Artificial Sequence
  ENSG00000075568_78 (sequence is synthesized)
cagcctcccaaagtgctgaggttacaggtccgagccactgtgcccagcctgttttagatttttaaaacagctgtatagacattactttaaagggcacaggaatatactaggagcttaata

SEQ ID NO: 68122 - DNA, 120 bp, Artificial Sequence
  ENSG00000075568_79 (sequence is synthesized)
caggaatatactaggagcttaatagggatcagagctgcacatcccagtcacgccaatggagaggctttactgaacttggggattcagcccggaacactgcacctcccacagctgtaaacc

SEQ ID NO: 68123 - DNA, 120 bp, Artificial Sequence
  ENSG00000075568_80 (sequence is synthesized)
tgcgtgtaggcacaaggattttccaggtccccaggcagcggcctcagctgtccacccctggaggatgtggaagaccctcctcccctacctgaggtgggagaagtgaagacattgactgtc

SEQ ID NO: 68124 - DNA, 120 bp, Artificial Sequence
  ENSG00000075568_81 (sequence is synthesized)
cgccacacaacacagcagggaccgggcacgctcttgctcccctcaaatccccgagtgcagagagatgtggctgctttctctttaaaacctgttaaacagaacacatctaagagctttcgt

SEQ ID NO: 68125 - DNA, 120 bp, Artificial Sequence
  ENSG00000075568_82 (sequence is synthesized)
ttgttttctttgtagaagggcttgagttatgcatagtcttagagaacattcaaagtgatttggaagagcgctaatcaaaacaccacactaacgagcccgtttgtttttaatttccagcta

SEQ ID NO: 68126 - DNA, 120 bp, Artificial Sequence
  ENSG00000075568_83 (sequence is synthesized)
acttagcggccacaggccactgtctggtgttacttctgatggctgccagcttgtgtggacccttttacctggggtccacccccgcttcctgctgctgtgcccagctccaacagtaacccg

SEQ ID NO: 68127 - DNA, 120 bp, Artificial Sequence
  ENSG00000075568_84 (sequence is synthesized)
gttcccattctaatccattcattcttaccacctgtggaccgagaaatgcaccatttaactcactagagtgatattctcagtgagccaatgaacatttactaagccttacatgaagaccta

SEQ ID NO: 68128 - DNA, 120 bp, Artificial Sequence
  ENSG00000075568_85 (sequence is synthesized)
aaggggattcctgtgagttgggagtatgggtttatgtgacactaattttggcctttggacaatttggcttaggacttagaagggcaggacctggtccaagaccgttgtgctgggtgaggt

SEQ ID NO: 68129 - DNA, 120 bp, Artificial Sequence
  ENSG00000075568_86 (sequence is synthesized)
ctcctgaccacacagacaggatgcaggaagcatgctgttctccgaggcacggagcctcactcgtgtccgcctgccacagtgtaccgcaagcctgacagtcacggatggcactctcaccgt

SEQ ID NO: 68130 - DNA, 120 bp, Artificial Sequence
  ENSG00000075568_87 (sequence is synthesized)
gtgcctcgccgtggcgtgggtttctgtgcatcgcgtcaccggccagcctagggtcaggtcctccccgccgttgcccaagaggcagtaaccactgaggctgggggagccaccccgcttctg

SEQ ID NO: 68131 - DNA, 120 bp, Artificial Sequence
  ENSG00000075568_88 (sequence is synthesized)
ggccttgccacaggagcacctcgccgtgtcctggcagggaaggagactccctgaggccccgccctttccggtgtcggtggctgccctctgcatttcctgccgagtggctctctagcattc

SEQ ID NO: 68132 - DNA, 120 bp, Artificial Sequence
  ENSG00000075568_89 (sequence is synthesized)
ttcacaaaagtgtgatcgaagcctctgccagtccctaaattgtgatccctgccctggtctctttcatagtgatcttttgttttcttacctttctccagaaagccctctatctctgtctga

SEQ ID NO: 68133 - DNA, 120 bp, Artificial Sequence
  ENSG00000075568_90 (sequence is synthesized)
ttaagcagtctgaggccccagagcatgtgacatgaggctgagcgatgctctgtgagctgccccgctgcagagaagcccactcagggctcagtcctgccagccccacacctccccgagaca

SEQ ID NO: 68134 - DNA, 120 bp, Artificial Sequence
  ENSG00000075568_91 (sequence is synthesized)
gccttccattgattgaacgtccattgttacaggtgggaatggctttgctaaagtttcttcaaacaaaacaggtttctccagcagccttggcatttcacacgctcctgttgacagcgatgg

SEQ ID NO: 68135 - DNA, 120 bp, Artificial Sequence
  ENSG00000075568_92 (sequence is synthesized)
ctcagacaggtacggtagaccaccactaaccgctagaaagacggaaggcttctcaagtcgggttagcacctttttatccataaatgggtttcagggcatttttcccctaatttacaagga

SEQ ID NO: 68136 - DNA, 120 bp, Artificial Sequence
  ENSG00000075568_93 (sequence is synthesized)
ggcatttgtcagaagtggtcaagtgcctctaagaaatcatgtctgctgggtggaagcagaaagccggctgcggtgccttccccagggggtccagatagagaaagggggcacccatgcctg

SEQ ID NO: 68137 - DNA, 120 bp, Artificial Sequence
  ENSG00000075568_94 (sequence is synthesized)
tctcagccaggcagacacacgttacacctgttctcactctcctccatctcctggtctgtggtaagatgtgatctgatcattaaaaatagaagagcgaaagtgacttgggaggggggaaat

SEQ ID NO: 68138 - DNA, 120 bp, Artificial Sequence
  ENSG00000075568_95 (sequence is synthesized)
ctggagcaaatactagccaatttatagtaaatcactggccacgcctctttcttgagcaggcttgtttatcatgcagggggtgtggtggcctgcagcagtcaccttggttgacttttccag

SEQ ID NO: 68139 - DNA, 120 bp, Artificial Sequence
  ENSG00000075568_96 (sequence is synthesized)
aacactagatgtgtaactaataagcctgtggacagaggaagggagaggaggtgtggttttgtgtgctggagaacacagcacagcagcactgtggaagaggccccgcaggaagctccctgg

SEQ ID NO: 68140 - DNA, 120 bp, Artificial Sequence
  ENSG00000075568_97 (sequence is synthesized)
gaagggtcccctcccctcttcctccctcatccacaccagcagcccagaggggcagtggaccaggctcgacacggtgtgcgcacaccagttggtgtgagttccatggcgggtattgaaggg

SEQ ID NO: 68141 - DNA, 120 bp, Artificial Sequence
  ENSG00000075568_98 (sequence is synthesized)
cttcacagaagggttctggtctgaaatgggacccctgagtgtgccaggggtcctcttcttgctgtccagaactagaggtcaccatggaagcttcccattagctatcatgtgagagtgggg

SEQ ID NO: 68142 - DNA, 120 bp, Artificial Sequence
  ENSG00000075568_99 (sequence is synthesized)
aaagtttgcatttggatgtcattggtggcatatcagctcgtgcactatgcgtttgagttctggaggacactcctgcccctacttcctctgggctgtggtgggctggtgaagtgggtgtgg

SEQ ID NO: 68143 - DNA, 120 bp, Artificial Sequence
  ENSG00000075568_100 (sequence is synthesized)
gtgaatcttgcccaaatatttaacactggcatgggttgtctccaaaccactgcatgtttagcctgattcctccttggctggaccatctaagaaccctagaactctctaaccacatctaga

SEQ ID NO: 68144 - DNA, 120 bp, Artificial Sequence
  ENSG00000075568_101 (sequence is synthesized)
gtgttacatctatgtgggaaagttacatgttctagtcatcaggaaaacaaatgatactgaatgcagtttgaaaatgggaagtaagtatctattaggagtctaacatgtaatattaacttt

SEQ ID NO: 68145 - DNA, 120 bp, Artificial Sequence
  ENSG00000075568_102 (sequence is synthesized)
taaagcttgaaaaatactcgcttgttgtagtctctggttcagagactctttggaaacagcaaagaacttatagttagctgttttgattagcacttcatttttatttttactatttaaaaa

SEQ ID NO: 68146 - DNA, 120 bp, Artificial Sequence
  ENSG00000075618_0 (sequence is synthesized)
gtggagcgctgcggagggtgcgtgcgggccgcggcagccgaacaaaggagcaggggcgccgccgcagggacccgccacccacctcccggggccgcgcagcggcctctcgtctactgccac

SEQ ID NO: 68147 - DNA, 120 bp, Artificial Sequence
  ENSG00000075618_1 (sequence is synthesized)
catgaccgccaacggcacagccgaggcggtgcagatccagttcggcctcatcaactgcggcaacaagtacctgacggccgaggcgttcgggttcaaggtgaacgcgtccgccagcagcct

SEQ ID NO: 68148 - DNA, 120 bp, Artificial Sequence
  ENSG00000075618_2 (sequence is synthesized)
gaagaagaagcagatctggacgctggagcagccccctgacgaggcgggcagcgcggccgtgtgcctgcgcagccacctgggccgctacctggcggcggacaaggacggcaacgtgacctg

SEQ ID NO: 68149 - DNA, 120 bp, Artificial Sequence
  ENSG00000075618_3 (sequence is synthesized)
cgagcgcgaggtgcccggtcccgactgccgtttcctcatcgtggcgcacgacgacggtcgctggtcgctgcagtccgaggcgcaccggcgctacttcggcggcaccgaggaccgcctgtc

SEQ ID NO: 68150 - DNA, 120 bp, Artificial Sequence
  ENSG00000075618_4 (sequence is synthesized)
ctgcttcgcgcagacggtgtcccccgccgagaagtggagcgtgcacatcgccatgcaccctcaggtcaacatctacagcgtcacccgtaagcgctacgcgcacctgagcgcgcggccggc

SEQ ID NO: 68151 - DNA, 120 bp, Artificial Sequence
  ENSG00000075618_5 (sequence is synthesized)
cgacgagatcgccgtggaccgcgacgtgccctggggcgtcgactcgctcatcaccctcgccttccaggaccagcgctacagcgtgcagaccgccgaccaccgcttcctgcgccacgacgg

SEQ ID NO: 68152 - DNA, 120 bp, Artificial Sequence
  ENSG00000075618_6 (sequence is synthesized)
gcgcctggtggcgcgccccgagccggccactggctacacgctggagttccgctccggcaaggtggccttccgcgactgcgagggccgttacctggcgccgtcggggcccagcggcacgct

SEQ ID NO: 68153 - DNA, 120 bp, Artificial Sequence
  ENSG00000075618_7 (sequence is synthesized)
caaggcgggcaaggccaccaaggtgggcaaggacgagctctttgctctggagcagagctgcgcccaggtcgtgctgcaggcggccaacgagaggaacgtgtccacgcgccagggtatgga

SEQ ID NO: 68154 - DNA, 120 bp, Artificial Sequence
  ENSG00000075618_8 (sequence is synthesized)
cctgtctgccaatcaggacgaggagaccgaccaggagaccttccagctggagatcgaccgcgacaccaaaaagtgtgccttccgtacccacacgggcaagtactggacgctgacggccac

SEQ ID NO: 68155 - DNA, 120 bp, Artificial Sequence
  ENSG00000075618_9 (sequence is synthesized)
cgggggcgtgcagtccaccgcctccagcaagaatgccagctgctactttgacatcgagtggcgtgaccggcgcatcacactgagggcgtccaatggcaagtttgtgacctccaagaagaa

SEQ ID NO: 68156 - DNA, 120 bp, Artificial Sequence
  ENSG00000075618_10 (sequence is synthesized)
tgggcagctggccgcctcggtggagacagcaggggactcagagctcttcctcatgaagctcatcaaccgccccatcatcgtgttccgcggggagcatggcttcatcggctgccgcaaggt

SEQ ID NO: 68157 - DNA, 120 bp, Artificial Sequence
  ENSG00000075618_11 (sequence is synthesized)
ctccagctatgacgtcttccagctggagttcaacgatggcgcctacaacatcaaagactccacaggcaaatactggacggtgggcagtgactccgcggtcaccagcagcggcgacactcc

SEQ ID NO: 68158 - DNA, 120 bp, Artificial Sequence
  ENSG00000075618_12 (sequence is synthesized)
tgtggacttcttcttcgagttctgcgactataacaaggtggccatcaaggtgggcgggcgctacctgaagggcgaccacgcaggcgtcctgaaggcctcggcggaaaccgtggaccccgc

SEQ ID NO: 68159 - DNA, 120 bp, Artificial Sequence
  ENSG00000075618_13 (sequence is synthesized)
ctcgctctgggagtactagggccggcccgtccttccccgcccctgcccacatggcggctcctgccaaccctccctgctaaccccttctccgccaggtgggctccagggcgggaggcaagc

SEQ ID NO: 68160 - DNA, 120 bp, Artificial Sequence
  ENSG00000075618_14 (sequence is synthesized)
ccccttgcctttcaaactggaaaccccagagaaaacggtgcccccacctgtcgcccctatggactccccactctcccctccgcccgggttccctactcccctcgggtcagcggctgcggc

SEQ ID NO: 68161 - DNA, 120 bp, Artificial Sequence
  ENSG00000075618_15 (sequence is synthesized)
ctggccctgggagggatttcagatgcccctgccctcttgtctgccacggggcgagtctggcacctctttcttctgacctcagacggctctgagccttatttctctggaagcggctaaggg

SEQ ID NO: 68162 - DNA, 120 bp, Artificial Sequence
  ENSG00000075618_16 (sequence is synthesized)
acggttgggggctgggagccctgggcgtgtagtgtaactggaatcttttgcctctcccagccacctcctcccagccccccaggagagctgggcacatgtcccaagcctgtcagtggccct

SEQ ID NO: 68163 - DNA, 120 bp, Artificial Sequence
  ENSG00000075618_17 (sequence is synthesized)
ccctggtgcactgtccccgaaacccctgcttgggaagggaagctgtcgggtgggctaggactgacccttgtggtgtttttttgggtggtggctggaaacagcccctctcccacgtggcag

SEQ ID NO: 68164 - DNA, 120 bp, Artificial Sequence
  ENSG00000075618_18 (sequence is synthesized)
aggctcagcctggctcccttccctggagcggcagggcgtgacggccacagggtctgcccgctgcacgttctgccaaggtggtggtggcgggcgggtaggggtgtgggggccgtcttcctc

SEQ ID NO: 68165 - DNA, 120 bp, Artificial Sequence
  ENSG00000075618_19 (sequence is synthesized)
ctgtctctttcctttcaccctagcctgactggaagcagaaaatgaccaaatcagtattttttttaatgaaatattattgctggaggcgtcccaggcaagcctggctgtagtagcgagtga

SEQ ID NO: 68166 - DNA, 120 bp, Artificial Sequence
  ENSG00000075618_20 (sequence is synthesized)
tctggcggggggcgtctcagcaccctccccagggggtgcatctcagccccctctttccgtccttcccgtccagccccagccctgggcctgggctgccgacacctgggccagagcccctgc

SEQ ID NO: 68167 - DNA, 120 bp, Artificial Sequence
  ENSG00000075618_21 (sequence is synthesized)
tgtgattggtgctccctgggcctcccgggtggatgaagccaggcgtcgccccctccgggagccctggggtgagccgccggggcccccctgctgccagcctcccccgtccccaacatgcat

SEQ ID NO: 68168 - DNA, 120 bp, Artificial Sequence
  ENSG00000075618_22 (sequence is synthesized)
ctcactctgggtgtcttggtcttttattttttgtaagtgtcatttgtataactctaaacgcccatgatagtagcttcaaactggaaatagcgaaataaaataactcagtctgcagcccca

SEQ ID NO: 68169 - DNA, 120 bp, Artificial Sequence
  ENSG00000075618_23 (sequence is synthesized)
cttcgcccgccgcgcgcgtctccaggccggtgcgctgagctccgctccgcgggcgaccgagggcggcttcagcgcgagccgggagaccccaggccagctccctcgggaagcccctaccct

SEQ ID NO: 68170 - DNA, 120 bp, Artificial Sequence
  ENSG00000075618_24 (sequence is synthesized)
tttctcgctcgcggcgccgctgcggtccggagcactgcccattgcgcccccgctaggcacgcgggctaccccgcctggagggggcgaggagtggggctttgcccatcctcgggtgccgct

SEQ ID NO: 68171 - DNA, 80 bp, Artificial Sequence
  ENSG00000075618_25 (sequence is synthesized)
ggcttttgcggttcacccctgcagaggagccccccgcgccgcccccgggcccagggctcgggtcccgaggttccccagga

SEQ ID NO: 68172 - DNA, 120 bp, Artificial Sequence
  ENSG00000075618_26 (sequence is synthesized)
gagcccctgtccctggcccctattatttctctaactggggaaagtcatgtgggaacagatgtagcttgccttggcctctgaccggccctgcctgcgttcctgggtgctctctgctgcttc

SEQ ID NO: 68173 - DNA, 120 bp, Artificial Sequence
  ENSG00000075618_27 (sequence is synthesized)
tcatgtgtgccactgtggggactcggccgcccaccccaccccgtggtgttaccttgcgtgtgtagttctgtgagctcagggctatggtctgccagaactagggggcgtggggccccagta

SEQ ID NO: 68174 - DNA, 120 bp, Artificial Sequence
  ENSG00000075624_0 (sequence is synthesized)
caccgccgagaccgcgtccgccccgcgagcacagagcctcgcctttgccgatccgccgcccgtccacacccgccgccaggactcggcgcgccggaagtggccagggcgggggcgacctcg

SEQ ID NO: 68175 - DNA, 120 bp, Artificial Sequence
  ENSG00000075624_1 (sequence is synthesized)
gctcacagcgcgcccggctattctcgcagctcaccatggatgatgatatcgccgcgctcgtcgtcgacaacggctccggcatgtgcaaggccggcttcgcgggcgacgatgccccccggg

SEQ ID NO: 68176 - DNA, 120 bp, Artificial Sequence
  ENSG00000075624_2 (sequence is synthesized)
ccgtcttcccctccatcgtggggcgccccaggcaccagggcgtgatggtgggcatgggtcagaaggattcctatgtgggcgacgaggcccagagcaagagaggcatcctcaccctgaagt

SEQ ID NO: 68177 - DNA, 120 bp, Artificial Sequence
  ENSG00000075624_3 (sequence is synthesized)
accccatcgagcacggcatcgtcaccaactgggacgacatggagaaaatctggcaccacaccttctacaatgagctgcgtgtggctcccgaggagcaccccgtgctgctgaccgaggccc

SEQ ID NO: 68178 - DNA, 85 bp, Artificial Sequence
  ENSG00000075624_4 (sequence is synthesized)
ttgctatccaggctgtgctatccctgtacgcctctggccgtaccactggcatcgtgatggactccggtgacggggtcacccacac

SEQ ID NO: 68179 - DNA, 120 bp, Artificial Sequence
  ENSG00000075624_5 (sequence is synthesized)
ctggcatcgtgatggactccggtgacggggtcacccacactgtgcccatctacgaggggtatgccctcccccatgccatcctgcgtctggacctggctggccgggacctgactgactacc

SEQ ID NO: 68180 - DNA, 120 bp, Artificial Sequence
  ENSG00000075624_6 (sequence is synthesized)
aatcgtgcgtgacattaaggagaagctgtgctacgtcgccctggacttcgagcaagagatggccacggctgcttccagctcctccctggagaagagctacgagctgcctgacggccaggt

SEQ ID NO: 68181 - DNA, 120 bp, Artificial Sequence
  ENSG00000075624_7 (sequence is synthesized)
catcaccattggcaatgagcggttccgctgccctgaggcactcttccagccttccttcctgggcatggagtcctgtggcatccacgaaactaccttcaactccatcatgaagtgtgacgt

SEQ ID NO: 68182 - DNA, 120 bp, Artificial Sequence
  ENSG00000075624_8 (sequence is synthesized)
ggacatccgcaaagacctgtacgccaacacagtgctgtctggcggcaccaccatgtaccctggcattgccgacaggatgcagaaggagatcactgccctggcacccagcacaatgaagat

SEQ ID NO: 68183 - DNA, 85 bp, Artificial Sequence
  ENSG00000075624_9 (sequence is synthesized)
agaaggagatcactgccctggcacccagcacaatgaagatcaagatcattgctcctcctgagcgcaagtactccgtgtggatcgg

SEQ ID NO: 68184 - DNA, 120 bp, Artificial Sequence
  ENSG00000075624_10 (sequence is synthesized)
ctccatcgtccaccgcaaatgcttctaggcggactatgacttagttgcgttacaccctttcttgacaaaacctaacttgcgcagaaaacaagatgagattggcatggctttatttgtttt

SEQ ID NO: 68185 - DNA, 87 bp, Artificial Sequence
  ENSG00000075624_11 (sequence is synthesized)
gcttgactcaggatttaaaaactggaacggtgaaggtgacagcagtcggttggagcgagcatcccccaaagttcacaatgtggccga

SEQ ID NO: 68186 - DNA, 120 bp, Artificial Sequence
  ENSG00000075624_12 (sequence is synthesized)
caatgtggccgaggactttgattgcacattgttgtttttttaatagtcattccaaatatgagatgcgttgttacaggaagtcccttgccatcctaaaagccaccccacttctctctaagg

SEQ ID NO: 68187 - DNA, 120 bp, Artificial Sequence
  ENSG00000075624_13 (sequence is synthesized)
gatagcattgctttcgtgtaaattatgtaatgcaaaatttttttaatcttcgccttaatacttttttattttgttttattttgaatgatgagccttcgtgcccccccttccccctttttt

SEQ ID NO: 68188 - DNA, 120 bp, Artificial Sequence
  ENSG00000075624_14 (sequence is synthesized)
gtcccccaacttgagatgtatgaaggcttttggtctccctgggagtgggtggaggcagccagggcttacctgtacactgacttgagaccagttgaataaaagtgcacaccttaaaaatga

SEQ ID NO: 68189 - DNA, 80 bp, Artificial Sequence
  ENSG00000075624_15 (sequence is synthesized)
gcacttcctgcccgagccgctggccgcccgagggtgtggccgctgcgtgcgcgcgcgccgacccggcgctgtttgaaccg

SEQ ID NO: 68190 - DNA, 120 bp, Artificial Sequence
  ENSG00000075624_16 (sequence is synthesized)
tccctccttcctggcctcccggagctgcgccctttctcactggttctctcttctgccgttttccgtaggactctcttctctgacctgagtctcctttggaactctgcaggttctatttgc

SEQ ID NO: 68191 - DNA, 120 bp, Artificial Sequence
  ENSG00000075624_17 (sequence is synthesized)
tttttcccagatgagctctttttctggtgtttgtctctctgactaggtgtctaagacagtgttgtgggtgtaggtactaacactggctcgtgtgacaaggccatgaggctggtgtaaagc

SEQ ID NO: 68192 - DNA, 120 bp, Artificial Sequence
  ENSG00000075624_18 (sequence is synthesized)
ggccttggagtgtgtattaagtaggtgcacagtaggtctgaacagactccccatcccaagaccccagcacacttagccgtgttctttgcactttctgcatgtcccccgtctggcctggct

SEQ ID NO: 68193 - DNA, 120 bp, Artificial Sequence
  ENSG00000075624_19 (sequence is synthesized)
ggcaagggcgctttctctgcacaggagcctcccggtttccggggtgggggctgcgcccgtgctcagggcttcttgtcctttccttcccagggcgtgatggtgggcatgggtcagaaggat

SEQ ID NO: 68194 - DNA, 120 bp, Artificial Sequence
  ENSG00000075624_20 (sequence is synthesized)
attctgctgagtcacttcggaggccacagctgcaaccttgggaacaatacgagtcattcaattcactaggcagcgtcccagcgctcacctgggggacttggccacggtctcttgttagaa

SEQ ID NO: 68195 - DNA, 120 bp, Artificial Sequence
  ENSG00000075624_21 (sequence is synthesized)
gcctcttcatggacaacgtggccaaccccacctcacccctatcgtctcccccggccacaccctgggccaatcgggctcccacgtcagggtctttgcatagagatggagtttcaacatgtt

SEQ ID NO: 68196 - DNA, 120 bp, Artificial Sequence
  ENSG00000075624_22 (sequence is synthesized)
acctgtagcctgtacatcctcccaccctcactgcgaaggcccctgctcccgctgaggctgcgtcagggaagagcgagcgagcgtctgcgagcctgatccgcaggcggctcggattggcac

SEQ ID NO: 68197 - DNA, 60 bp, Artificial Sequence
  ENSG00000075624_23 (sequence is synthesized)
gcgtctgcgagcctgatccgcaggcggctcggattggcacttagattggcaacggtgtcc

SEQ ID NO: 68198 - DNA, 120 bp, Artificial Sequence
  ENSG00000075624_24 (sequence is synthesized)
tccgaccagtgtttgccttttatggtaataacgcggccggcccggcttcctttgtccccaatctgggcgcgcgccggcgccccctggcggcctaaggactcggcgcgccggaagtggcca

SEQ ID NO: 68199 - DNA, 120 bp, Artificial Sequence
  ENSG00000075643_0 (sequence is synthesized)
cgggcccggccggcctggatggactagccggggccatggccggcgcggcggcggagtcagggcgggagctgtggaccttcgcgggttcccgggacccgagcgcaccgcggctagcctacg

SEQ ID NO: 68200 - DNA, 120 bp, Artificial Sequence
  ENSG00000075643_1 (sequence is synthesized)
agcctacggctacggcccgggcagcctgcgcgagctgcgggcgcgcgagttcagccgcctggcaggaactgtctatcttgaccatgcaggtgccaccttgttctcccagagccagctcga

SEQ ID NO: 68201 - DNA, 120 bp, Artificial Sequence
  ENSG00000075643_2 (sequence is synthesized)
aagcttcactagtgatctcatggaaaacacttatggtaatcctcacagccagaacatcagcagcaagctcacccatgacactgtggagcaggtgcgctacagaatcctggcgcacttcca

SEQ ID NO: 68202 - DNA, 120 bp, Artificial Sequence
  ENSG00000075643_3 (sequence is synthesized)
caccaccgcagaagactacactgtgatcttcactgccgggagcacggctgctctcaaactggtggcagaggcctttccatgggtgtcccagggcccagagagcagtgggagtcgcttctg

SEQ ID NO: 68203 - DNA, 120 bp, Artificial Sequence
  ENSG00000075643_4 (sequence is synthesized)
ttacctcaccgacagccacacctccgtagtgggtatgcggaacgtgaccatggctataaatgtcatatccaccccggtcaggccagaggacctgtggtctgcagaggaacgtagtgcttc

SEQ ID NO: 68204 - DNA, 120 bp, Artificial Sequence
  ENSG00000075643_5 (sequence is synthesized)
agccagcaacccagactgccagctgccgcatctcttctgctacccagctcagagtaacttttctggagtcagataccccctgtcctggatagaagaggtcaagtctgggcggttgcaccc

SEQ ID NO: 68205 - DNA, 120 bp, Artificial Sequence
  ENSG00000075643_6 (sequence is synthesized)
tgtgagcacgcctgggaagtggtttgtgctgctggatgcagcctcctacgtgagcacctcgcctttggacctgtcagctcaccaggccgactttgtccccatctccttctataagatctt

SEQ ID NO: 68206 - DNA, 120 bp, Artificial Sequence
  ENSG00000075643_7 (sequence is synthesized)
cgggtttcctacaggcctgggcgctctgctggtccataatcgtgcggctcctctactgaggaagacctactttggaggagggacagcctctgcgtacctagcaggagaagacttctacat

SEQ ID NO: 68207 - DNA, 120 bp, Artificial Sequence
  ENSG00000075643_8 (sequence is synthesized)
cccgaggcagtcggtagctcagaggtttgaagatggcaccatctcattccttgatgttatcgcgctaaaacatggatttgacaccctagagcgcctcacaggtggaatggagaatataaa

SEQ ID NO: 68208 - DNA, 120 bp, Artificial Sequence
  ENSG00000075643_9 (sequence is synthesized)
gcagcacaccttcaccttggctcagtatacctacgtggccctgtcctctctccagtaccccaatggagcccctgtggtgcggatttacagcgattctgagttcagcagccctgaggttca

SEQ ID NO: 68209 - DNA, 120 bp, Artificial Sequence
  ENSG00000075643_10 (sequence is synthesized)
gggcccaatcatcaattttaatgtgctggatgacaaagggaacatcattggttactcccaggtggacaaaatggccagtctttacaacatccacctgcgaactggctgcttctgtaacac

SEQ ID NO: 68210 - DNA, 120 bp, Artificial Sequence
  ENSG00000075643_11 (sequence is synthesized)
tggggcctgccagaggcacctgggcataagcaacgagatggtcaggaagcattttcaggctggtcatgtctgtggggacaatatggacctcatagatgggcagcccacaggatctgtgag

SEQ ID NO: 68211 - DNA, 120 bp, Artificial Sequence
  ENSG00000075643_12 (sequence is synthesized)
gatttcatttggatacatgtcgacgctggatgatgtccaggcctttcttaggttcatcatagacactcgcctgcactcatcaggggactggcctgtccctcaggcccatgctgacaccgg

SEQ ID NO: 68212 - DNA, 120 bp, Artificial Sequence
  ENSG00000075643_13 (sequence is synthesized)
ggagactggagccccatcagcagacagccaggctgatgttatacctgctgtcatgggcagacgtagcctctcgcctcaggaagatgccctcacaggctccagggtttggaacaactcgtc

SEQ ID NO: 68213 - DNA, 120 bp, Artificial Sequence
  ENSG00000075643_14 (sequence is synthesized)
tactgtgaatgctgtgcctgtggccccacctgtgtgtgatgtcgccagaacccagccgactccttcagagaaagctgcaggagtcctggagggggcccttgggccacatgttgtcactaa

SEQ ID NO: 68214 - DNA, 120 bp, Artificial Sequence
  ENSG00000075643_15 (sequence is synthesized)
cctttatctctatccaatcaaatcctgtgctgcatttgaggtgaccaggtggcctgtaggaaaccaagggctgctatatgaccggagctggatggttgtgaatcacaatggtgtttgcct

SEQ ID NO: 68215 - DNA, 120 bp, Artificial Sequence
  ENSG00000075643_16 (sequence is synthesized)
gagtcagaagcaggaaccccggctctgcctgatccagcccttcatcgacttgcggcaaaggatcatggtcatcaaagccaaagggatggagcctatagaggtgcctcttgaggaaaatag

SEQ ID NO: 68216 - DNA, 120 bp, Artificial Sequence
  ENSG00000075643_17 (sequence is synthesized)
tgaacggactcagattcgccaaagcagggtctgtgctgacagagtaagtacttatgattgtggagaaaaaatttcaagctggttgtcaacattttttggccgtccttgtcatttgatcaa

SEQ ID NO: 68217 - DNA, 120 bp, Artificial Sequence
  ENSG00000075643_18 (sequence is synthesized)
acaaagttcaaactctcaaaggaatgcaaagaagaaacatggaaaagatcaacttcctggtacaatggccaccctttctctggtgaatgaggcacagtatctgctgatcaacacatccag

SEQ ID NO: 68218 - DNA, 120 bp, Artificial Sequence
  ENSG00000075643_19 (sequence is synthesized)
tattttggaacttcaccggcaactaaacaccagtgatgagaatggaaaggaggaattattctcactgaaggatctcagcttgcgttttcgtgccaatattattatcaatggaaaaagggc

SEQ ID NO: 68219 - DNA, 120 bp, Artificial Sequence
  ENSG00000075643_20 (sequence is synthesized)
ttttgaagaagagaaatgggatgagatttcaattggctctttgcgtttccaggttttggggccttgtcacagatgccagatgatttgcatcgaccagcaaactgggcaacgaaaccagca

SEQ ID NO: 68220 - DNA, 120 bp, Artificial Sequence
  ENSG00000075643_21 (sequence is synthesized)
tgttttccaaaaactttctgagagtcgtgaaacaaaggtgaactttggcatgtacctgatgcatgcatcattggatttatcctccccatgtttcctgtctgtaggatctcaggtgctccc

SEQ ID NO: 68221 - DNA, 120 bp, Artificial Sequence
  ENSG00000075643_22 (sequence is synthesized)
tgtgttgaaagagaatgtggaaggtcatgatttacctgcatctgagaaacaccaggatgttacctcctaaaaaaaatttttagcataaagtttctcttttacagtgatctctattattgt

SEQ ID NO: 68222 - DNA, 120 bp, Artificial Sequence
  ENSG00000075643_23 (sequence is synthesized)
taagatctgcaacttggttcagtagaacttgatgttttgaataaggagagctctttttctttagaggcagggaatgctctcacctgcttccttctgcctttgacttctcaccctgcaaat

SEQ ID NO: 68223 - DNA, 120 bp, Artificial Sequence
  ENSG00000075643_24 (sequence is synthesized)
ttgcactggctgtgctcaggagagcacttctgaggcctcaggaacgaatgctgcacccacatccagtgaggctcctgtaggtatttgaagtataatcacttgtaatcagatgaaattttt

SEQ ID NO: 68224 - DNA, 120 bp, Artificial Sequence
  ENSG00000075643_25 (sequence is synthesized)
gttactttgtttttagagagcatctttggatctctccaacccgtttgtagtgaggaagggagtctatgcccagtgatcctgggtatgagaaggtgctcctctcctcccatgtacatgatg

SEQ ID NO: 68225 - DNA, 120 bp, Artificial Sequence
  ENSG00000075643_26 (sequence is synthesized)
gtgtgggtttatgctcaggggcccagagggtaacttgtgaccacattccttgaggggagtttctaccagaatatttatattctgagcaaaggcacaggccagcaattcctttcctgttgc

SEQ ID NO: 68226 - DNA, 120 bp, Artificial Sequence
  ENSG00000075643_27 (sequence is synthesized)
ttcccatccctggcctccgtcctcatcccccactgagttgatgcactgaggatggctcacgagcctgaagttacactcagtgatggctgtgcttatgcaggttgtcatcctcccctccac

SEQ ID NO: 68227 - DNA, 120 bp, Artificial Sequence
  ENSG00000075643_28 (sequence is synthesized)
aagcccacaggatggtgttggtccatcacccgagagcctccaaatcctatcgagggaggaactttggcattcaggaatcctgtctgtatcatctttgaccactgctcctgcagcctccag

SEQ ID NO: 68228 - DNA, 120 bp, Artificial Sequence
  ENSG00000075643_29 (sequence is synthesized)
atgaaaatgtccagtgaggaaatctcattctctaatgaagttacccatcccgctgagtttctaagaagtttctccctgtgcggagcttgtgtgtgccttatctgcttctgcatgacttcc

SEQ ID NO: 68229 - DNA, 120 bp, Artificial Sequence
  ENSG00000075643_30 (sequence is synthesized)
agcctggggtcttaccctgtcctctggagcaatgcagagtgagtacatccactccacattcattctgctggcgtccttctgaagcctgctgtccatgtgtgaacccagtcccttcatcat

SEQ ID NO: 68230 - DNA, 120 bp, Artificial Sequence
  ENSG00000075643_31 (sequence is synthesized)
cttccccctggatggttgtatttttccagtcacttctcccccaaatgtctgcctgctgcagcccactgcatcttttgaaagcctgtgccaccccatctctcctgctgctcagttggagag

SEQ ID NO: 68231 - DNA, 120 bp, Artificial Sequence
  ENSG00000075643_32 (sequence is synthesized)
caggctccaggctcaggcttccctaatgtatctgttcagagcctgtgggattcagggtcagtttgtttcattatcacatttgtaggactttgtgttgttcccagcactaggtgagatttg

SEQ ID NO: 68232 - DNA, 120 bp, Artificial Sequence
  ENSG00000075643_33 (sequence is synthesized)
aaagatgaggtgtgctctgttctcaaggattgttgagatggagcctaatgattgcacactcacgtgctgtgaagagttaagggtaaaaagtacaactctgactctggttcctgagatcac

SEQ ID NO: 68233 - DNA, 120 bp, Artificial Sequence
  ENSG00000075643_34 (sequence is synthesized)
cgaaagaagaggcaaatgaagttaggtggggtggggtggggtttattgttttgaactgtttattaaaaacgcaacctcttcaaagactcagcactgccacatcatatgagtggacttgtc

SEQ ID NO: 68234 - DNA, 120 bp, Artificial Sequence
  ENSG00000075643_35 (sequence is synthesized)
ctcatcagctaactgataggagaacaatgccctaaagtaatggatttatccacctactcaggccagtttcatgcaggagggaactttccagatggcacattgccccatttccaagacctt

SEQ ID NO: 68235 - DNA, 120 bp, Artificial Sequence
  ENSG00000075643_36 (sequence is synthesized)
ccatttccaagaccttccgctgacaaatgcatcatattaattatgatggaaaacaagtaagaaggcatgctctacaaaaattaggtcacttgcccaggtgcggtggctcacacctgtaat

SEQ ID NO: 68236 - DNA, 120 bp, Artificial Sequence
  ENSG00000075643_37 (sequence is synthesized)
aaaaaaaaaaaaattaggtcacttttgtcatcaagaatatgtttttcttatccacgtctatgtcaccttttgcagtagatactttcatgactgatttcaggctttttgtttttttgagac

SEQ ID NO: 68237 - DNA, 60 bp, Artificial Sequence
  ENSG00000075643_38 (sequence is synthesized)
aggctggagtgcagtggcatgatcacagatcattgcagccttgacctcttgggcatccag

SEQ ID NO: 68238 - DNA, 120 bp, Artificial Sequence
  ENSG00000075643_39 (sequence is synthesized)
gcacacatcaccacatccagctaattttttttttcttttttttctttttggtagagatggcatctcactttgttgcccaggctagttttgaattcctgggctcaagccatcctcccgcca

SEQ ID NO: 68239 - DNA, 120 bp, Artificial Sequence
  ENSG00000075643_40 (sequence is synthesized)
attacaagtgtgagccactgtgcccagcttttgatttcagacattttaatgcagatcctctcctttacagcactattatttggttatctacttataattactgatttaacattgatctgt

SEQ ID NO: 68240 - DNA, 120 bp, Artificial Sequence
  ENSG00000075643_41 (sequence is synthesized)
ctgatttaacattgatctgttttcactagactgtaagctccatgaggacaagtcctgtgccagtatatctctagtgtcagcagacaatactcaaaatttgttgacagactatttaaagct

SEQ ID NO: 68241 - DNA, 120 bp, Artificial Sequence
  ENSG00000075643_42 (sequence is synthesized)
taaatatattttattaatttaaaatgaattttaaatgcattttttctttagtgtctaccttcaatatttcttgtatgaagtttcagctaaaaatgtactttgtgtatctgtagagtggct

SEQ ID NO: 68242 - DNA, 120 bp, Artificial Sequence
  ENSG00000075643_43 (sequence is synthesized)
agctaaaaatgtactttgtgtatctgtagagtggcttcatattcagagtttatggacatttatgattttatgtcccctccttggttcttatctcctggagttcagccttatgtgcttctc

SEQ ID NO: 68243 - DNA, 120 bp, Artificial Sequence
  ENSG00000075643_44 (sequence is synthesized)
aaagtgtataacaaaatcaaagacaatgtcatgtcccttgaatttaattctaacaccaaaccttggtgttagagtcacaaaaagtccttttttaaaaaaacttggtgagaacagacaata

SEQ ID NO: 68244 - DNA, 120 bp, Artificial Sequence
  ENSG00000075643_45 (sequence is synthesized)
acttgtctttctgggcattcgcgtcatggtccttttagccagaagagaggttttcttttgcatagtttggtgagcatcaagaatcctttaaggagggtggcggtgctgacttctccccat

SEQ ID NO: 68245 - DNA, 120 bp, Artificial Sequence
  ENSG00000075643_46 (sequence is synthesized)
tgagagtcagcctcatcccctcctcagccttgtggatggagaagaacaggcagtgatatacattttctgctgttgaaagatgtccgcttatccttctctttcagtgaaaagttgcttttt

SEQ ID NO: 68246 - DNA, 120 bp, Artificial Sequence
  ENSG00000075643_47 (sequence is synthesized)
tattcaatatgtactgaacaggttctagagtttcagaaacaaaagaaacagaaccaacatttatagatctcactatagaggcatcactaattggggaaagacagactaggtaatagtcag

SEQ ID NO: 68247 - DNA, 120 bp, Artificial Sequence
  ENSG00000075643_48 (sequence is synthesized)
atgtgatatagtatgtttaagctataggatggcaggtgcatgagtgttggttgtattattctttatttttttgtatgacttatgatattcatgataattaaaacgttttggaacaattca

SEQ ID NO: 68248 - DNA, 120 bp, Artificial Sequence
  ENSG00000075643_49 (sequence is synthesized)
atcactttttttcccttgtagaaatagtctctaccttttaaaaaaatacaagtctatggaaacatgattcactggcattctgagaaagcaactcttcttttaaatgctccatcattttca

SEQ ID NO: 68249 - DNA, 120 bp, Artificial Sequence
  ENSG00000075651_0 (sequence is synthesized)
gctgagctccagctgtgccagaggcacccgagccctgagagtccgccgccaacgcgcaggtgctagcggccccttcgccctgcagcccctttgcttttactctgtccaaagttaacatgt

SEQ ID NO: 68250 - DNA, 120 bp, Artificial Sequence
  ENSG00000075651_1 (sequence is synthesized)
cactgaaaaacgagccacgggtaaatacctctgcactgcagaaaattgctgctgacatgagtaatatcatagaaaatctggacacgcgggaactccactttgagggagaggaggtagact

SEQ ID NO: 68251 - DNA, 120 bp, Artificial Sequence
  ENSG00000075651_2 (sequence is synthesized)
acgacgtgtctcccagcgatcccaagatacaagaagtgtatatccctttctctgctatttataacactcaaggatttaaggagcctaatatacagacgtatctctccggctgtccaataa

SEQ ID NO: 68252 - DNA, 120 bp, Artificial Sequence
  ENSG00000075651_3 (sequence is synthesized)
aagcacaagttctggaagtggaacgcttcacatctacaacaagggtaccaagtattaatctttacactattgaattaacacatggggaatttaaatggcaagttaagaggaaattcaagc

SEQ ID NO: 68253 - DNA, 120 bp, Artificial Sequence
  ENSG00000075651_4 (sequence is synthesized)
attttcaagaatttcacagagagctgctcaagtacaaagcctttatccgcatccccattcccactagaagacacacgtttaggaggcaaaacgtcagagaggagcctcgagagatgccca

SEQ ID NO: 68254 - DNA, 120 bp, Artificial Sequence
  ENSG00000075651_5 (sequence is synthesized)
gtttgccccgttcatctgaaaacatgataagagaagaacaattccttggtagaagaaaacaactggaagattacttgacaaagatactaaaaatgcccatgtatagaaactatcatgcca

SEQ ID NO: 68255 - DNA, 120 bp, Artificial Sequence
  ENSG00000075651_6 (sequence is synthesized)
caacagagtttcttgatataagccagctgtctttcatccatgatttgggaccaaagggcatagaaggtatgataatgaaaagatctggaggacacagaataccaggcttgaattgctgtg

SEQ ID NO: 68256 - DNA, 120 bp, Artificial Sequence
  ENSG00000075651_7 (sequence is synthesized)
gtcagggaagagcctgctacagatggtcaaaaagatggttaatagtgaaagattcctttttattgtatatgaaaccagacagcggtgccattgccttcgtcctgctggtagacaaagaat

SEQ ID NO: 68257 - DNA, 120 bp, Artificial Sequence
  ENSG00000075651_8 (sequence is synthesized)
tcaaaattaaggtggggaagaaggagacagaaacgaaatatggaatccgaattgataatctttcaaggacacttattttaaaatgcaacagctatagacatgctcggtggtggggagggg

SEQ ID NO: 68258 - DNA, 120 bp, Artificial Sequence
  ENSG00000075651_9 (sequence is synthesized)
ctatagaagaattcatccagaaacatggcaccaactttctcaaagatcatcgatttgggtcatatgctgctatccaagagaatgctttagctaaatggtatgttaatgccaaaggatatt

SEQ ID NO: 68259 - DNA, 120 bp, Artificial Sequence
  ENSG00000075651_10 (sequence is synthesized)
ttgaagatgtggcaaatgcaatggaagaggcaaatgaagagatttttatcacagactggtggctgagtccagaaatcttcctgaaacgcccagtggttgagggaaatcgttggaggttgg

SEQ ID NO: 68260 - DNA, 120 bp, Artificial Sequence
  ENSG00000075651_11 (sequence is synthesized)
actgcattcttaaacgaaaagcacaacaaggagtgaggatcttcataatgctctacaaagaggtggaactcgctcttggcatcaatagtgaatacaccaagaggactttgatgcgtctac

SEQ ID NO: 68261 - DNA, 120 bp, Artificial Sequence
  ENSG00000075651_12 (sequence is synthesized)
atcccaacataaaggtgatgagacacccggatcatgtgtcatccaccgtctatttgtgggctcaccatgagaagcttgtcatcattgaccaatcggtggcctttgtgggagggattgacc

SEQ ID NO: 68262 - DNA, 120 bp, Artificial Sequence
  ENSG00000075651_13 (sequence is synthesized)
tggcctatggaaggtgggacgacaatgagcacagactcacagacgtgggcagtgtgaagcgggtcacttcaggaccgtctctgggttccctcccacctgccgcaatggagtctatggaat

SEQ ID NO: 68263 - DNA, 120 bp, Artificial Sequence
  ENSG00000075651_14 (sequence is synthesized)
ccttaagactcaaagataaaaatgagcctgttcaaaacctacccatccagaagagtattgatgatgtggattcaaaactgaaaggaataggaaagccaagaaagttctccaaatttagtc

SEQ ID NO: 68264 - DNA, 120 bp, Artificial Sequence
  ENSG00000075651_15 (sequence is synthesized)
tctacaagcagctccacaggcaccacctgcacgacgcagatagcatcagcagcattgacagcacctccagttattttaatcactatagaagtcatcacaatttaatccatggtttaaaac

SEQ ID NO: 68265 - DNA, 120 bp, Artificial Sequence
  ENSG00000075651_16 (sequence is synthesized)
cccacttcaaactctttcacccgtccagtgagtctgagcaaggactcactagacctcatgctgataccgggtccatccgtagtttacagacaggtgtgggagagctgcatggggaaacca

SEQ ID NO: 68266 - DNA, 120 bp, Artificial Sequence
  ENSG00000075651_17 (sequence is synthesized)
gattctggcatggaaaggactactgcaatttcgtcttcaaagactgggttcaacttgataaaccttttgctgatttcattgacaggtactccacgccccggatgccctggcatgacattg

SEQ ID NO: 68267 - DNA, 120 bp, Artificial Sequence
  ENSG00000075651_18 (sequence is synthesized)
cctctgcagtccacgggaaggcggctcgtgatgtggcacgtcacttcatccagcgctggaacttcacaaaaattatgaaatcaaaatatcggtccctttcttatccttttctgcttccaa

SEQ ID NO: 68268 - DNA, 120 bp, Artificial Sequence
  ENSG00000075651_19 (sequence is synthesized)
agtctcaaacaacagcccatgagttgagatatcaagtgcctgggtctgtccatgctaacgtacagttgctccgctctgctgctgattggtctgctggtataaagtaccatgaagagtcca

SEQ ID NO: 68269 - DNA, 120 bp, Artificial Sequence
  ENSG00000075651_20 (sequence is synthesized)
tccacgccgcttacgtccatgtgatagagaacagcaggcactatatctatatcgaaaaccagtttttcataagctgtgctgatgacaaagttgtgttcaacaagataggcgatgccattg

SEQ ID NO: 68270 - DNA, 120 bp, Artificial Sequence
  ENSG00000075651_21 (sequence is synthesized)
cccagaggatcctgaaagctcacagggaaaaccagaaataccgggtatatgtcgtgataccacttctgccagggttcgaaggagacatttcaaccggcggaggaaatgctctacaggcaa

SEQ ID NO: 68271 - DNA, 120 bp, Artificial Sequence
  ENSG00000075651_22 (sequence is synthesized)
tcatgcacttcaactacagaaccatgtgcagaggagaaaattccatccttggacagttaaaagcagagcttggtaatcagtggataaattacatatcattctgtggtcttagaacacatg

SEQ ID NO: 68272 - DNA, 120 bp, Artificial Sequence
  ENSG00000075651_23 (sequence is synthesized)
cagagctcgaaggaaacctagtaactgagcttatctatgtccacagcaagttgttaattgctgatgataacactgttattattggctctgccaacataaatgaccgcagcatgctgggaa

SEQ ID NO: 68273 - DNA, 120 bp, Artificial Sequence
  ENSG00000075651_24 (sequence is synthesized)
agcgtgacagtgaaatggctgtcattgtgcaagatacagagactgttccttcagtaatggatggaaaagagtaccaagctggccggtttgcccgaggacttcggctacagtgctttaggg

SEQ ID NO: 68274 - DNA, 120 bp, Artificial Sequence
  ENSG00000075651_25 (sequence is synthesized)
ttgatgacccaagtgaggacattcaggatccagtgagtgacaaattcttcaaggaggtgtgggtttcaacagcagctcgaaatgctacaatttatgacaaggttttccggtgccttccca

SEQ ID NO: 68275 - DNA, 120 bp, Artificial Sequence
  ENSG00000075651_26 (sequence is synthesized)
atgatgaagtacacaatttaattcagctgagagactttataaacaagcccgtattagctaaggaagatcccattcgagctgaggaggaactgaagaagatccgtggatttttggtgcaat

SEQ ID NO: 68276 - DNA, 120 bp, Artificial Sequence
  ENSG00000075651_27 (sequence is synthesized)
tccccttttatttcttgtctgaagaaagcctactgccttctgttgggaccaaagaggccatagtgcccatggaggtttggacttaagagatattcattggcagctcaaagacttccaccc

SEQ ID NO: 68277 - DNA, 120 bp, Artificial Sequence
  ENSG00000075651_28 (sequence is synthesized)
tggagaccacactgcacacagtgacttcctggggatgtcatagccaaagccaggcctgacgcattctcgtatccaacccaaggaccttttggaatgactggggagggctgcagtcacatt

SEQ ID NO: 68278 - DNA, 120 bp, Artificial Sequence
  ENSG00000075651_29 (sequence is synthesized)
gatgtaaggactgtaaacatcagcaagactttataattccttctgcctaacttgtaaaaagggggctgcattcttgttggtagcatgtactctgttgagtaaaacacatattcaaattcc

SEQ ID NO: 68279 - DNA, 120 bp, Artificial Sequence
  ENSG00000075651_30 (sequence is synthesized)
gtataccaaaatccatttcctttgtaacaagaatttaccagtaactgtgatctaggttgccaaaagttgtctgaatctccttattcttctctgatcttcatttatgcagccaatgtctag

SEQ ID NO: 68280 - DNA, 120 bp, Artificial Sequence
  ENSG00000075651_31 (sequence is synthesized)
ctggacctgccctcatcttgcagttcatacaggcactgtttgagagattgtttattattagatgttgtaatgctgcttcaagattcttcatggttacatgggatgcccctgctcatctgg

SEQ ID NO: 68281 - DNA, 120 bp, Artificial Sequence
  ENSG00000075651_32 (sequence is synthesized)
tcctgaagtagtaacattcacccaaatgaggatatagtcattattccttttcagtcactgtacgaacacggcagactttagcctacacagtagactgtgttaggcacttctggtaacatt

SEQ ID NO: 68282 - DNA, 120 bp, Artificial Sequence
  ENSG00000075651_33 (sequence is synthesized)
gacactgtatcttgacaccactaagcaacaggaaggaataaattccaatattgagacagagatttatttcattttgctcccaaaggcactgacaacatgagtccttgtgattaggcccac

SEQ ID NO: 68283 - DNA, 120 bp, Artificial Sequence
  ENSG00000075651_34 (sequence is synthesized)
ctgatcaaatgtaaaaacatgcatgggatatttgattacgtaacaaccagctaaaactgagagcacacagccttcggaaacccccaaggtgtcgaggaggatcagatccagataagagaa

SEQ ID NO: 68284 - DNA, 120 bp, Artificial Sequence
  ENSG00000075651_35 (sequence is synthesized)
gatgattccttctagtcctgtaaaatttcctgtcatccttagctgctgggttgattgaaatttgatctctacatttcaaaatcaaactagtgaatacagtttgtctttcaagagaatcag

SEQ ID NO: 68285 - DNA, 120 bp, Artificial Sequence
  ENSG00000075651_36 (sequence is synthesized)
aggcatcgtaactcctaccaagttagtaagtatgagtctaaccttgtttgacattcaggtcttctgctacattatcttctttgagaaaaattaattgattataaaatatgtgctacttca

SEQ ID NO: 68286 - DNA, 120 bp, Artificial Sequence
  ENSG00000075651_37 (sequence is synthesized)
cttacattattaaatatgtattaacgcctctcaccagggcttccagtgaagttacaatgccctagtctgtgaattagtctggaaacgtgtttttccttttcggatgttagagtacccttt

SEQ ID NO: 68287 - DNA, 120 bp, Artificial Sequence
  ENSG00000075651_38 (sequence is synthesized)
gataaactaaattttactaagctgaacaactctgacagtctaaagagctaatgtgggttaccaaaaggcctgtacctgtaaaacaaaatgcaggtgtaatgattatacatgtctatggat

SEQ ID NO: 68288 - DNA, 120 bp, Artificial Sequence
  ENSG00000075651_39 (sequence is synthesized)
tacctggacatactctcatttgggttgttcttcaaagaagcaagcagccgatccctgttttcataaagctaatacttcagttggaaaaattaaacaggagcacaaagtcagggatagggg

SEQ ID NO: 68289 - DNA, 120 bp, Artificial Sequence
  ENSG00000075651_40 (sequence is synthesized)
ttagcagaagagagaaatagtgtcacatcaagggcaggatctcatagctagggaacatttcacaaataaggtgagattttgtaaccaataataaaaatgaatgtttttataagtaaataa

SEQ ID NO: 68290 - DNA, 120 bp, Artificial Sequence
  ENSG00000075651_41 (sequence is synthesized)
cttatttttcatatggctaaagatggtaaaatgacttcattctatagccattgtaaataagaatttgctattgatgaaagaagttcagattggcatttgaagtattgagtgtatgggatc

SEQ ID NO: 68291 - DNA, 120 bp, Artificial Sequence
  ENSG00000075651_42 (sequence is synthesized)
tctaaggatttcttagattttatatttaaatattttttaaaccttagaggagtcaacaaactggctcttgattttcagcaccctactctcatgaaaaaagcctgaaaggaccctttccct

SEQ ID NO: 68292 - DNA, 120 bp, Artificial Sequence
  ENSG00000075651_43 (sequence is synthesized)
tataagtaatttaatccaatttctccccattttatagatgaggaaactgaggctcagatcagatgagaactcacttaaatccactcaatgtgtagatggtagagctgggactagcaacat

SEQ ID NO: 68293 - DNA, 120 bp, Artificial Sequence
  ENSG00000075651_44 (sequence is synthesized)
tgctgcagcccattgttggcctctctcttcactttatcattgcccaagaatgaggatatgcagtaaacagaattcaggcaagatacctctaagctgttttgaaccctctgatattttgta

SEQ ID NO: 68294 - DNA, 120 bp, Artificial Sequence
  ENSG00000075651_45 (sequence is synthesized)
tttatgtgtttgtctgtctccccctactagaatgtaagctccatggggcagggacttcactgtattttgttcatagtgtatccccagagcctggaccagtgcttggcacataggagatgg

SEQ ID NO: 68295 - DNA, 120 bp, Artificial Sequence
  ENSG00000075651_46 (sequence is synthesized)
caataaatgcttgtagaattaataaacaaggtgaaggagagagctaatgaaatgaaaatcttagtctcatataagaagtcttactactgctttctatggcaagttccttttctattgcat

SEQ ID NO: 68296 - DNA, 120 bp, Artificial Sequence
  ENSG00000075651_47 (sequence is synthesized)
cttcccaaagacaagatgctcatctgcaaaggggtgataagatttacttggagggattttatggaaaattcagtgcaataattgcttttttttttttttttgcagtagcagtttacatag

SEQ ID NO: 68297 - DNA, 120 bp, Artificial Sequence
  ENSG00000075651_48 (sequence is synthesized)
tacagcattctgcaaaaattgcatgaaatgtggacacaagatgtactgtatgacttaattacctgtcattctctgacaccattactacctactagaagttcaaataatttatctttaaca

SEQ ID NO: 68298 - DNA, 120 bp, Artificial Sequence
  ENSG00000075651_49 (sequence is synthesized)
ttgcaatatctgataaactttttaaaatgtaaataattcaaagccttgaaaatctatcatgaatctgctcaacatttcaaagtgactattttgaaatgcctataaatgctatatacctga

SEQ ID NO: 68299 - DNA, 120 bp, Artificial Sequence
  ENSG00000075651_50 (sequence is synthesized)
tgcaaattttaaactaatctgtggtgaagcagagagaatactgggctaggaagctgggctcgtttcagctgtgcgatcctaaataagtccattcaataaagtgttatttagaactttcaa

SEQ ID NO: 68300 - DNA, 120 bp, Artificial Sequence
  ENSG00000075651_51 (sequence is synthesized)
cttgttagcccacagcctgtaatagaatggacagatgccaccctagttgtgtcttaagaaattaagaagcttttaggtgtttaataaatgagagttgagcctccctttctgggactcacc

SEQ ID NO: 68301 - DNA, 64 bp, Artificial Sequence
  ENSG00000075651_52 (sequence is synthesized)
ataggcgatgccattgcccagaggatcctgaaagctcacagtcttgctctgtcacccaagctga

SEQ ID NO: 68302 - DNA, 120 bp, Artificial Sequence
  ENSG00000075651_53 (sequence is synthesized)
ccgcccacctcggcctcccaaagtgcccctcatgcttcttataactgtagaagagctactgcttgcctgtaagtgggtggtatgggaaataccacactgggaaatctgaaattattgggg

SEQ ID NO: 68303 - DNA, 120 bp, Artificial Sequence
  ENSG00000075651_54 (sequence is synthesized)
gggggaccagatgtctggagacctggattctctccagctctgttatccacaggtatgtgaccttctgagtacgtcagtttgtccttctgacacgctgtttcttcaccaaccacgaataat

SEQ ID NO: 68304 - DNA, 120 bp, Artificial Sequence
  ENSG00000075651_55 (sequence is synthesized)
attatctgttctacgtagcttatatgaatatatgtgaaagtagtttgtaagctgtaaagcaccagttcatgtaagaacttattatagcatttccatgatattcatcatctggaaatatgt

SEQ ID NO: 68305 - DNA, 120 bp, Artificial Sequence
  ENSG00000075651_56 (sequence is synthesized)
tgttcactgtaaattgaagcaaggataaagaggcatcatattcaaatcagctgtttcaaaattagtatttatgctagaaaaagaaatgttttaatttaaaagatgcttaaatgttccgta

SEQ ID NO: 68306 - DNA, 120 bp, Artificial Sequence
  ENSG00000075651_57 (sequence is synthesized)
ttttaaattattggacggctacttctggataagaaaaatttgttttggtttctcacgactggctgttgttcatcatgtgacttgtttaggcacacgattacaacactctgtctagaggtt

SEQ ID NO: 68307 - DNA, 120 bp, Artificial Sequence
  ENSG00000075651_58 (sequence is synthesized)
tgctgccagaaacctatagctgactcttcctgggaatcaatttttgatttccctgttattgatctgataacactctccccaaaatataaagtaaaacaaaatgtattctgaagcataata

SEQ ID NO: 68308 - DNA, 120 bp, Artificial Sequence
  ENSG00000075651_59 (sequence is synthesized)
tgtgtttagtttagtattgttttaattttagatgctatttactttgttgttatttgaagatatgcaagccttctaattgaaatcagcaattgatataattgaataaaaatgttaccaaat

SEQ ID NO: 68309 - DNA, 120 bp, Artificial Sequence
  ENSG00000075651_60 (sequence is synthesized)
atgacttaagttgccttgagggagtcagccaaaactgggcttgggaacaggaaggctttgcccgtttatttggattctcagggtagtcgattttgccacctcttggctatcagctgcctt

SEQ ID NO: 68310 - DNA, 120 bp, Artificial Sequence
  ENSG00000075651_61 (sequence is synthesized)
ggagattggtttcatagtaaggattctttctttaaggtgatatggagcaactgctttcacaggggcaccaggttggtaaaaactcaaagctaacaccattcagaacttacctaatgatgt

SEQ ID NO: 68311 - DNA, 120 bp, Artificial Sequence
  ENSG00000075651_62 (sequence is synthesized)
attgttgttggaacattttgttcttgggtacaagcttactttacacacatctggttactatgtttgttctggaagacggcagcctcatggagtgactagagaacacttgatactgagctc

SEQ ID NO: 68312 - DNA, 120 bp, Artificial Sequence
  ENSG00000075651_63 (sequence is synthesized)
tggaaatcgttttttaacagctttattgatattgtataatttacagatcatcaagttaagccctttaaagtatacaattcattggttttttgaatatctacagagttgtgtgaccataac

SEQ ID NO: 68313 - DNA, 120 bp, Artificial Sequence
  ENSG00000075651_64 (sequence is synthesized)
aggtgcaagaaggcttataaagactccagcaaagctccagtctcttaattatgtcacctcagggtgatgcggtcgagttatgaaactttgggaaaagagaacaaggaacgcgggcgatca

SEQ ID NO: 68314 - DNA, 120 bp, Artificial Sequence
  ENSG00000075651_65 (sequence is synthesized)
gaggcccagtcgcgagacctgccccgctggggcctccagccggcaccgcgacgccccgggacctggcaccgcctcgctccacccctgcgaatccggggcgaatccgggcggagagttcct

SEQ ID NO: 68315 - DNA, 120 bp, Artificial Sequence
  ENSG00000075651_66 (sequence is synthesized)
gccggccgcgcagcgcagagccccctccggcccgccctctctccctccctcccgctgagctccagctgtgccagaggcacccgagccctgagagtccgccgccaacgcgcaggtgctagc

SEQ ID NO: 68316 - DNA, 120 bp, Artificial Sequence
  ENSG00000075651_67 (sequence is synthesized)
ggccccttcgccctgcaggagagaatatcctttgaccctacgtggaagcctacaagaaggggaattctgggcaatgtggttcagcccagccacatcacatactattatttagtagtcatg

SEQ ID NO: 68317 - DNA, 120 bp, Artificial Sequence
  ENSG00000075651_68 (sequence is synthesized)
aagagagagacatagacagtgaagagtaagtgaagaatttgagggtcatcagccattgtgaactcatcaaaatattcccactctggccactgcccaaaggggctcttatctgaggaatac

SEQ ID NO: 68318 - DNA, 120 bp, Artificial Sequence
  ENSG00000075651_69 (sequence is synthesized)
tgctgacttcgtgtacctagttttacagagccatctttctgaagcataaattagattacattattctacagcttaaatccctccatgaacttcccatcacccaagagtggatctgaaacg

SEQ ID NO: 68319 - DNA, 120 bp, Artificial Sequence
  ENSG00000075651_70 (sequence is synthesized)
gccttgcaatgtacatacatccatctctgtcccacgccctctgcagggctttttggttccagaacgtgccatgtgcttttctcctttggagctctttgaataggatgcccttcctccctt

SEQ ID NO: 68320 - DNA, 120 bp, Artificial Sequence
  ENSG00000075651_71 (sequence is synthesized)
gtctgcctgtagatagaaaaatcctgtgcattggtgagttggccctgaccaccattttcttagcatgctgaattacttctgttcccctctgtgtttgcacagctttgtttgtgcacagta

SEQ ID NO: 68321 - DNA, 120 bp, Artificial Sequence
  ENSG00000075651_72 (sequence is synthesized)
gacttttggctgggccatgtagactgcctcctccatgagtttgccagctttttgaggacaatgtctgttttattcatcctcgaattctcagtgcctagcagagtgcatagcacagggtag

SEQ ID NO: 68322 - DNA, 120 bp, Artificial Sequence
  ENSG00000075651_73 (sequence is synthesized)
ttatgcaatacatattggagtaaaggaatacagttcaaaaaaacagtctcattaacagatgcaaaccaactcctctcatgacgcagagaatctaagctcaaacaaattaccagagttggc

SEQ ID NO: 68323 - DNA, 120 bp, Artificial Sequence
  ENSG00000075651_74 (sequence is synthesized)
agttgaagtactatatatagacagaacttaataaatgcttttctttgtcttaagcctttgatgacagtgatgtgtttttatgaacgtagataaccacaagcagatgtgtcaaagctcttt

SEQ ID NO: 68324 - DNA, 120 bp, Artificial Sequence
  ENSG00000075651_75 (sequence is synthesized)
tgtccaggaataaactgagtttcgtcatcatcttgacagtactttcctggatgagtgttcaggaaacatgaaaagtttttaaacaattcaacaaatgtgtaataaaagtttgttaccttg

SEQ ID NO: 68325 - DNA, 120 bp, Artificial Sequence
  ENSG00000075651_76 (sequence is synthesized)
ccagcccgcagagcacggtcctgggggtgtgatcacagctgctgaccgcggctcccgccgtgtgatgtgaccactcggaggtggggcgagggggccgggggccagcagcagggagtgtgt

SEQ ID NO: 68326 - DNA, 120 bp, Artificial Sequence
  ENSG00000075651_77 (sequence is synthesized)
aaaaggtcttcttcctcacaatacgattgaaggtgtttgggacgtagggctcagatccaggagtgccgtcctccaagccttccataggattttgtgacgcccttgagaaccgcccttgta

SEQ ID NO: 68327 - DNA, 120 bp, Artificial Sequence
  ENSG00000075651_78 (sequence is synthesized)
gactcagtcctgaactaccgccacgcctgtatttgctcctcctcatctcggattattgctttctttacttcctctgtgaagcactaaatactagtagctttttaagaacagaccacaaca

SEQ ID NO: 68328 - DNA, 120 bp, Artificial Sequence
  ENSG00000075651_79 (sequence is synthesized)
gtttcttcgtttgaccattactaagtctgcctccaaaatggggagttccgttaactttatcagccagccctgccaattttagttaagataagccttcgtgggcctccaaaggcctctgag

SEQ ID NO: 68329 - DNA, 120 bp, Artificial Sequence
  ENSG00000075651_80 (sequence is synthesized)
agactaggtacccagagacctctgaggtatgttaaatggtttagttcgtggtggtgcaatgaaaacttaaagaaggaaaggaatctgcaatttgaactgttaacagaccccacatttaca

SEQ ID NO: 68330 - DNA, 120 bp, Artificial Sequence
  ENSG00000075651_81 (sequence is synthesized)
cactgcctatttgaataagaatctctttcagtattaaatgttttgtgacacacaaatgaatttgtacacagtcttttagcttgaatttgtagacagcctttaaatgttgtttggggatct

SEQ ID NO: 68331 - DNA, 120 bp, Artificial Sequence
  ENSG00000075651_82 (sequence is synthesized)
ttggactaattgtataagcgctcagtctggtctcaaactcatgatctcaggttatccatgcgcctcggcctccgaaaatgctgcgattataggcgtgagccaccactcccagccccttct

SEQ ID NO: 68332 - DNA, 120 bp, Artificial Sequence
  ENSG00000075651_83 (sequence is synthesized)
tgtgatgatgtgagatgataaaatgcctgtgtgaagatgaagtgaggcgaataacctaggcagtgtgacataagtggaaaacgccagaaataaacaattcatgttataaattgtgcacca

SEQ ID NO: 68333 - DNA, 120 bp, Artificial Sequence
  ENSG00000075651_84 (sequence is synthesized)
ttctgagtagtgtgatgaaatcttgcactcctccattccatcctgccagcattgccagtcactcggtggccatctctgtgatcagattaacagtggttttatcagtatcatagggcttat

SEQ ID NO: 68334 - DNA, 120 bp, Artificial Sequence
  ENSG00000075651_85 (sequence is synthesized)
gttcaagtaactgtattttacttaataatggctacaaagtgcaaaagtagcgatataatatttttggaccatggttgactgcaggtaactgaaattttagttacatgaaaccacagataa

SEQ ID NO: 68335 - DNA, 120 bp, Artificial Sequence
  ENSG00000075651_86 (sequence is synthesized)
ggggggactgcactacacataaaataggcataagtaacctcaagacaatagacattattaaaatatagaaaagtaataaagaagtgataaatggagaacttttgctttaatataatttat

SEQ ID NO: 68336 - DNA, 120 bp, Artificial Sequence
  ENSG00000075651_87 (sequence is synthesized)
tatataatttaatttttagtaacttcaatttttaatattttaatttttaatgatttatgtgtttaacaactgactcacaaaattgctgaaaatttcccaatcttgatgaaaatttcccag

SEQ ID NO: 68337 - DNA, 120 bp, Artificial Sequence
  ENSG00000075651_88 (sequence is synthesized)
tatgagccagcccagaataccactggagttataattttagaagattaccttggtagcaatctgtagaaatgttttgtaggggagctacagtagggatcaaaagtggagacagattacgaa

SEQ ID NO: 68338 - DNA, 120 bp, Artificial Sequence
  ENSG00000075651_89 (sequence is synthesized)
atgtcttcagaccctgccagcatgagggttcaaatgatgtctagtcagtggagatcacgcaaatttcactggtttgtgttcccacgtggatccgtaggaccttcaatgcaagtctccttc

SEQ ID NO: 68339 - DNA, 120 bp, Artificial Sequence
  ENSG00000075651_90 (sequence is synthesized)
aggtattcctggtggtatcttggcattgtctcacatgtgttttgagagccccacttccttggggagtcttccgctttggcttccttgttgatgaccgtgggccaaagggctttgtgtgtg

SEQ ID NO: 68340 - DNA, 120 bp, Artificial Sequence
  ENSG00000075651_91 (sequence is synthesized)
aggctccacctcagccatagctggtgtcctcctgaagaggatttatgccaaaaggagtcacatgccaggacttgtttttttcaagtttgcaaatctggggggagggtggggctctagaaa

SEQ ID NO: 68341 - DNA, 120 bp, Artificial Sequence
  ENSG00000075651_92 (sequence is synthesized)
gatgctggaacctggtatgtgccctgcagaaatgtccttgactccttttgtcaccaggagcctaaatttactgtgtttctctgtgactcacagaggcagggggaaagacaatcctctcca

SEQ ID NO: 68342 - DNA, 120 bp, Artificial Sequence
  ENSG00000075651_93 (sequence is synthesized)
cttcttcctgcagctacttgctccatcagcctcagccagtctggggctgggcagggaaacaggccctcttccttctcctggtttgtcccctggtttgctcagcgagaccttcgtgtctga

SEQ ID NO: 68343 - DNA, 120 bp, Artificial Sequence
  ENSG00000075651_94 (sequence is synthesized)
gggcccccttctcaccttgcagatcagctggtgtggtactgaatgcctgatggatggccaggggcccctgatccatctgcattcccagaatataagaatctcatttggggccacccagcc

SEQ ID NO: 68344 - DNA, 120 bp, Artificial Sequence
  ENSG00000075651_95 (sequence is synthesized)
cccactactcttagtatatgaaataaggtggaatagataagaggatggaactggcccctgggtgcatgatggggccaataacggaggtacagggtgcatatgtggctgggctgtgagaca

SEQ ID NO: 68345 - DNA, 120 bp, Artificial Sequence
  ENSG00000075651_96 (sequence is synthesized)
gggaaagaggatggaattgagatgcaaggtagaaaagcatgactatgttcagtttgggacttgatgaaatagatactggtaggacagttcactaggcactgggccttcaggagaaagaga

SEQ ID NO: 68346 - DNA, 120 bp, Artificial Sequence
  ENSG00000075651_97 (sequence is synthesized)
agaaaggaatggtggcattgggagtagtaaagctgtgggtatgaatgagtatctatgagactcacctccctgtgaggacatagaatgaggagacacagtctacaggtagactaggtcgag

SEQ ID NO: 68347 - DNA, 120 bp, Artificial Sequence
  ENSG00000075651_98 (sequence is synthesized)
ttcagaagcctgaagaacaccagtgtttaagggatggtgttgggaaagggagccaggccagccagagaggaatgttccggaactctgaaaggaaggaaatggcaggaacaaaggagctgg

SEQ ID NO: 68348 - DNA, 120 bp, Artificial Sequence
  ENSG00000075651_99 (sequence is synthesized)
ggcacaacagtggtgactcacactgggaacacttcggcccattgtgtttatgcttatagtttcccaagtttatcttttcagggttatgattacgttaacctcacctccctccctccctct

SEQ ID NO: 68349 - DNA, 120 bp, Artificial Sequence
  ENSG00000075651_100 (sequence is synthesized)
ccaagaactgatcggagtccagccccatcctcctcagttggggtgactctgcagcagtctctacactgtctcccagaactccttagctggcttacagcacagctgcccacaataaaaagc

SEQ ID NO: 68350 - DNA, 120 bp, Artificial Sequence
  ENSG00000075651_101 (sequence is synthesized)
ttttaatagcctctctttctgaaatctaacacgaattttataacttttccatttacctacctcaaaacaactatcatgtccctattagtagcattacaaaagtgatattcatgtaactgt

SEQ ID NO: 68351 - DNA, 120 bp, Artificial Sequence
  ENSG00000075651_102 (sequence is synthesized)
ttttagcatttagatatatatgtagcatcttctcatagaagcacttgttctgtttttacttgtgttaggattaaacctacagatactgcatgggattggttgttttgaaacctctgtaat

SEQ ID NO: 68352 - DNA, 120 bp, Artificial Sequence
  ENSG00000075673_0 (sequence is synthesized)
cggccgcggaggtgcgtgcagggcccgcgccgccgccggtatctccaccgccaacacctcagccactgccactgccacagccacacgaggccccccaccgtgcgctccgccgctgcggtc

SEQ ID NO: 68353 - DNA, 120 bp, Artificial Sequence
  ENSG00000075673_1 (sequence is synthesized)
ccggatccgcgctccacgcccgcagcccgcggcgccaccagcccagcatgcaccagaaaaccccagaaatttactccgtggagctcagcggaactaaggacatcgtgaaaacagacaagg

SEQ ID NO: 68354 - DNA, 120 bp, Artificial Sequence
  ENSG00000075673_2 (sequence is synthesized)
gggatggcaaggagaagtataggggtctgaagaacaactgcctggaactcaaaaagaaaaatcacaaagaggagtttcagaaagaactccatctggatgaccacaaactcagcaataggg

SEQ ID NO: 68355 - DNA, 120 bp, Artificial Sequence
  ENSG00000075673_3 (sequence is synthesized)
aattggaagagaaatatggcacagacatcattatgggtctctccagcaccagagctgccgagctcctggcccgggatgggcccaactccctcacccctcccaagcagacgcctgagatcg

SEQ ID NO: 68356 - DNA, 120 bp, Artificial Sequence
  ENSG00000075673_4 (sequence is synthesized)
tcaagttcctcaagcagatggtgggggggttctctatcctcctgtgggtgggcgcctttctctgttggattgcatatgggattcagtactccagcgacaagtctgcatccctgaacaacg

SEQ ID NO: 68357 - DNA, 120 bp, Artificial Sequence
  ENSG00000075673_5 (sequence is synthesized)
tgtacttgggctgtgtgcttggtctggtggtcattttaacggggatctttgcttattaccaagaggcaaaaagcaccaacatcatgtccagcttcaataagatgatccctcagcaagctc

SEQ ID NO: 68358 - DNA, 120 bp, Artificial Sequence
  ENSG00000075673_6 (sequence is synthesized)
tcgtcatccgagattccgagaagaagaccatcccttcagagcagctggtggtgggggacattgtggaggtcaaaggaggagaccagatccctgcagacatcagggtgctgtcttctcagg

SEQ ID NO: 68359 - DNA, 120 bp, Artificial Sequence
  ENSG00000075673_7 (sequence is synthesized)
ggtgtcgggtggataactcatctctcacgggggagtctgagccccagccccgctcctctgagtttacccatgaaaaccccctggaaacaaagaacatctgcttctattccacaacgtgtc

SEQ ID NO: 68360 - DNA, 120 bp, Artificial Sequence
  ENSG00000075673_8 (sequence is synthesized)
tggaaggcactgtcaccggcatggttatcaacacgggtgaccgcaccatcattggccatattgcctcattggcctcaggagttggaaatgagaagacgcccattgccattgagatcgagc

SEQ ID NO: 68361 - DNA, 120 bp, Artificial Sequence
  ENSG00000075673_9 (sequence is synthesized)
actttgttcacattgtggcaggagtggctgtctccatcggcatccttttcttcatcatcgctgtgtccctgaagtatcaagtcctggactccatcatcttcctcattggcatcattgtgg

SEQ ID NO: 68362 - DNA, 120 bp, Artificial Sequence
  ENSG00000075673_10 (sequence is synthesized)
ccaatgtgcccgagggcctcctggccactgtcactgtgaccctgtcgctgacagcaaaacggatggccaagaagaactgcctggtgaagaacctggaggctgtggagaccctcggctcca

SEQ ID NO: 68363 - DNA, 120 bp, Artificial Sequence
  ENSG00000075673_11 (sequence is synthesized)
cctccatcatctgctcggacaagactgggacactgacccagaacaggatgacagtggcccatctgtggttcgacaatcagatctttgtggctgacaccagtgaggaccattcaaaccaag

SEQ ID NO: 68364 - DNA, 120 bp, Artificial Sequence
  ENSG00000075673_12 (sequence is synthesized)
tctttgaccaaagctctaggacttgggcctccttatccaagataataacattgtgtaaccgagcagagttcaagccaggacaggaaaatgtccccatcatgaagaaagctgtgattggag

SEQ ID NO: 68365 - DNA, 120 bp, Artificial Sequence
  ENSG00000075673_13 (sequence is synthesized)
atgcctcagaaactgctcttttaaaattctcagaggtcattttgggtgatgtgatggaaattagaaaaagaaaccgcaaagtagctgaaatcccttttaactctactaataaatttcagc

SEQ ID NO: 68366 - DNA, 120 bp, Artificial Sequence
  ENSG00000075673_14 (sequence is synthesized)
tctccatccacgagatggatgacccccacggcaagcgcttcctcatggtgatgaagggggcccctgagcgcatcctagagaaatgcagcaccatcatgatcaacggcgaggagcacccac

SEQ ID NO: 68367 - DNA, 120 bp, Artificial Sequence
  ENSG00000075673_15 (sequence is synthesized)
tggacaagagcactgccaagaccttccacacagcctacatggagctgggcgggttgggcgagcgtgtgctgggtttctgtcatctctacctgccagcagacgagtttccagaaacctact

SEQ ID NO: 68368 - DNA, 120 bp, Artificial Sequence
  ENSG00000075673_16 (sequence is synthesized)
catttgacatagacgctatgaactttccgacctccaacctctgttttgtgggactcttgtcaatgatcgatccccctcggtccaccgtgccagatgcagtcaccaaatgccggagtgcag

SEQ ID NO: 68369 - DNA, 120 bp, Artificial Sequence
  ENSG00000075673_17 (sequence is synthesized)
gagtgtggggatcatttcagccaacagtgaaacagtggaagacattgcacatcgcctcaacattgctgtggagcaagttaacaaacgggatgccaaggccgctgtggtgactggcatgga

SEQ ID NO: 68370 - DNA, 120 bp, Artificial Sequence
  ENSG00000075673_18 (sequence is synthesized)
gctgaaggacatgagctcagaacagctggatgagatcttagccaactaccaggagattgtctttgcccggacatccccccagcagaagctgatcattgtggagggctgtcagaggcagga

SEQ ID NO: 68371 - DNA, 120 bp, Artificial Sequence
  ENSG00000075673_19 (sequence is synthesized)
tgctgttgttgctgtgaccggggatggagttaatgactctccggctctaaagaaggcagacattgggattgccatggggatagcaggttctgatgcagccaaaaatgcagccgacatggt

SEQ ID NO: 68372 - DNA, 120 bp, Artificial Sequence
  ENSG00000075673_20 (sequence is synthesized)
cttgctggacgacaacttcgcatccatcgtcacaggggtggaggaaggtcgcctgatctttgacaacctcaagaagactattgcttattccctgaccaagaacattgccgagctgtgccc

SEQ ID NO: 68373 - DNA, 120 bp, Artificial Sequence
  ENSG00000075673_21 (sequence is synthesized)
ctttctgatctacatcattgtcgggctccccctgcccattggcaccatcaccattctgttcattgacttggggacagacattatcccctccattgccttggcgtacgagaaagctgaaag

SEQ ID NO: 68374 - DNA, 120 bp, Artificial Sequence
  ENSG00000075673_22 (sequence is synthesized)
tgacatcatgaacaggaagcctcgccacaagaataaggacaggctggtgaaccagccgctcgctgtgtactcatacctgcacattggcctcatgcaagccctgggagctttccttgtgta

SEQ ID NO: 68375 - DNA, 120 bp, Artificial Sequence
  ENSG00000075673_23 (sequence is synthesized)
tttcaccgtctatgcacaagagggctttctgccccgcactctcattaacctgcgggtagaatgggagaaggactacgtgaatgacttgaaagacagctatgggcaggaatggacaaggta

SEQ ID NO: 68376 - DNA, 120 bp, Artificial Sequence
  ENSG00000075673_24 (sequence is synthesized)
ccagagggaatacctagaatggacgggctacacggctttctttgttggcatcctagtccagcaaatagcagatctgatcatcaggaaaacccggaggaattccatcttccagcagggtct

SEQ ID NO: 68377 - DNA, 120 bp, Artificial Sequence
  ENSG00000075673_25 (sequence is synthesized)
cttcagaaataaagtcatctgggtggggatcacctcacagatcatcattggtctgatcctctcctatggcctcggaagtgtcacagccttgagtttcaccatgcttagggctcagtactg

SEQ ID NO: 68378 - DNA, 120 bp, Artificial Sequence
  ENSG00000075673_26 (sequence is synthesized)
gtttgtggctgtgccgcacgccatcctgatctgggtgtatgatgaggtgcggaagctcttcatcaggctctaccctggaagctggtgggataagaacatgtattattaagaccacctccc

SEQ ID NO: 68379 - DNA, 120 bp, Artificial Sequence
  ENSG00000075673_27 (sequence is synthesized)
ttcctatgtctctcagcagcacgttggggcacacttgttcatcttctgaccgtttgctgggctattcccctgcagtgcagacatcgtcaaaattcagacaagaggaaattttcatgcaga

SEQ ID NO: 68380 - DNA, 120 bp, Artificial Sequence
  ENSG00000075673_28 (sequence is synthesized)
aagctgtatgcaggatgctcactgatgttttgcactttaaaactgaaattcaactctttatataggattttcttttctatctccatctcctcattaaaaaatacgtacatttcgaggtaa

SEQ ID NO: 68381 - DNA, 120 bp, Artificial Sequence
  ENSG00000075673_29 (sequence is synthesized)
tggtatagggaagaatgtgtttatgtgtatttgaaactccttgatgttaatagtcttgtgtaacccaggcatctactggggcctgccttaagctctagctaggattgctcagaactcctt

SEQ ID NO: 68382 - DNA, 120 bp, Artificial Sequence
  ENSG00000075673_30 (sequence is synthesized)
tccacaccctattaaaggccccatgacctccctaagatttctgcagatcccctgagaaggtatgttttcatggtctccttgctcgaaaaaggccaactcacccgagggtctgcaggagat

SEQ ID NO: 68383 - DNA, 120 bp, Artificial Sequence
  ENSG00000075673_31 (sequence is synthesized)
ggaagtggcggcaggtttacatcacagcagcacgcatgacctcagctttgactcgtttaactctgagacgtccttcttgaaggcccttgccacagtttccctggccacgccaccccatcc

SEQ ID NO: 68384 - DNA, 120 bp, Artificial Sequence
  ENSG00000075673_32 (sequence is synthesized)
cacctctggtcatctccccagccctttatgccccgtcgccctccacccctacatcagctcctccaaaactgagctcccagttcattttgcatatcctaactcaaaatgctcagctaatcc

SEQ ID NO: 68385 - DNA, 120 bp, Artificial Sequence
  ENSG00000075673_33 (sequence is synthesized)
aaggggactttctttaccaggattcaaccctagtagagagctgttatggtttcaatagtcatatttatttcttgtaaaacagttgccaggtgctctccagcaataacgttttgtcagtca

SEQ ID NO: 68386 - DNA, 120 bp, Artificial Sequence
  ENSG00000075673_34 (sequence is synthesized)
tgtttcatgttttaacttaggtgtattcatgtgtgacacttccatgttgacaggcccggaaaggcctcatttttaactaaaagatgttttataaacccaggtttaattgtggtgttctaa

SEQ ID NO: 68387 - DNA, 120 bp, Artificial Sequence
  ENSG00000075673_35 (sequence is synthesized)
aatcctggactctcccgacccctagctgtcggtccccctccctgcgcgcgcgccggcgggtttcctaccctccgaggcgtccgctggcctgcgccctggcggggacgtgggcggggcggg

SEQ ID NO: 68388 - DNA, 120 bp, Artificial Sequence
  ENSG00000075702_0 (sequence is synthesized)
atggcggccgtagggtccggaggctatgcgcggaacgatgcaggggagaagctgccctctgtcatggcgggagttccggcgcggaggggccagtcctccccgccccccgccccaccaatc

SEQ ID NO: 68389 - DNA, 120 bp, Artificial Sequence
  ENSG00000075702_1 (sequence is synthesized)
tgcctacggcggcggacgcgactctcgacggcctccgaggagacggtgcagaaccgggtgtcactcgagaaggtgcttggcatcacagcccagaacagcagtggcctaacctgtgacccc

SEQ ID NO: 68390 - DNA, 120 bp, Artificial Sequence
  ENSG00000075702_2 (sequence is synthesized)
ggcacaggccatgtggcctacctggcaggctgtgtggtggtgattttggaccccaaggagaacaagcagcagcacatctttaacaccgccaggaagtctctcagtgctctggccttctcc

SEQ ID NO: 68391 - DNA, 120 bp, Artificial Sequence
  ENSG00000075702_3 (sequence is synthesized)
cctgatgggaagtacatagtgacaggggagaatgggcataggcctgctgtgcgcatctgggatgtggaggagaagaatcaggtggcggagatgctaggccacaagtatggtgtggcgtgt

SEQ ID NO: 68392 - DNA, 120 bp, Artificial Sequence
  ENSG00000075702_4 (sequence is synthesized)
gtggccttctcacccaatatgaagcacatcgtgtccatgggctaccaacatgacatggtgctcaacgtctgggactggaagaaagacatcgtagtggcctccaacaaggtatcttgtaga

SEQ ID NO: 68393 - DNA, 120 bp, Artificial Sequence
  ENSG00000075702_5 (sequence is synthesized)
gtcattgccctctccttctcagaggacagcagctattttgtcactgttgggaaccgccatgtgaggttctggttcttggaagtctccactgagacaaaggtgacgagcacagtgcccctt

SEQ ID NO: 68394 - DNA, 120 bp, Artificial Sequence
  ENSG00000075702_6 (sequence is synthesized)
gtagggcgctcgggcatcctgggcgagctgcacaacaacatcttctgtggtgtggcctgcggtcggggccggatggcgggcagtaccttctgtgtgtcctactcgggcctcctctgccag

SEQ ID NO: 68395 - DNA, 120 bp, Artificial Sequence
  ENSG00000075702_7 (sequence is synthesized)
ttcaatgagaagagggtgctggagaagtggatcaacctgaaggtctccctgtcttcctgcctctgtgtcagccaggagctcatcttctgtggctgcacagatgggatagtccgcatcttc

SEQ ID NO: 68396 - DNA, 120 bp, Artificial Sequence
  ENSG00000075702_8 (sequence is synthesized)
caggcccatagcctgcactacctcgccaacctgcccaagccacactaccttggggtagacgtggcacagggcctggagcccagcttcctcttccacaggaaggcggaagcagtctaccca

SEQ ID NO: 68397 - DNA, 120 bp, Artificial Sequence
  ENSG00000075702_9 (sequence is synthesized)
gatacagtggcactgaccttcgaccccatccaccagtggctgtcctgcgtgtataaggaccacagcatctacatctgggatgtcaaggacatcaacagagtgggcaaggtgtggtcagag

SEQ ID NO: 68398 - DNA, 120 bp, Artificial Sequence
  ENSG00000075702_10 (sequence is synthesized)
ctcttccacagctcctacgtttggaacgtggaggtgtatcctgagtttgaagaccagagagcttgtttgccatcaggatcctttctgacttgttcttcagacaacaccattcgcttctgg

SEQ ID NO: 68399 - DNA, 120 bp, Artificial Sequence
  ENSG00000075702_11 (sequence is synthesized)
aacttggacagcagccctgattctcactggcagaaaaacatcttcagcaataccctgctgaaggtcgtgtacgtggagaatgacatccagcacctgcaggacatgtcacacttcccagac

SEQ ID NO: 68400 - DNA, 120 bp, Artificial Sequence
  ENSG00000075702_12 (sequence is synthesized)
cgggggagcgagaatgggacacccatggacgtgaaagccggggtgcgggtcatgcaggtcagtcctgacggccagcatttggcttcaggcgaccgaagtggaaatctgaggatccacgag

SEQ ID NO: 68401 - DNA, 120 bp, Artificial Sequence
  ENSG00000075702_13 (sequence is synthesized)
ctgcacttcatggacgagctggtcaaggtggaggcccatgatgctgaggtgctgtgcctggagtactccaagccagagacggggctgaccttgctggcctcagccagtcgggaccggctg

SEQ ID NO: 68402 - DNA, 120 bp, Artificial Sequence
  ENSG00000075702_14 (sequence is synthesized)
atccatgtgctgaacgtggagaagaactacaacctggagcagacgctggatgaccactcctcctccatcaccgccatcaagttcgctggcaacagagacatccagatgatcagctgtggg

SEQ ID NO: 68403 - DNA, 120 bp, Artificial Sequence
  ENSG00000075702_15 (sequence is synthesized)
gctgacaagagcatctactttcgcagtgcccagcagggttcggatggactacactttgtccgtacccaccacgtagcagagaaaaccaccttgtatgacatggacattgacatcacccag

SEQ ID NO: 68404 - DNA, 120 bp, Artificial Sequence
  ENSG00000075702_16 (sequence is synthesized)
aagtacgtggccgtggcctgccaggaccgcaatgtgagagtctacaacactgtgaacgggaagcagaagaagtgctacaagggctcccagggtgacgaagggtccttgctgaaggtccat

SEQ ID NO: 68405 - DNA, 120 bp, Artificial Sequence
  ENSG00000075702_17 (sequence is synthesized)
gtggacccctcaggcaccttcctggccaccagctgctctgacaaaagcatctcagtgattgacttttactcgggcgagtgcattgccaagatgtttggccattcagaaattattaccagc

SEQ ID NO: 68406 - DNA, 120 bp, Artificial Sequence
  ENSG00000075702_18 (sequence is synthesized)
atgaagttcacctatgactgtcatcacttgatcacagtatctggagacagctgcgtgttcatctggcacctgggcccggagatcaccaactgcatgaagcagcacttgctggagattgac

SEQ ID NO: 68407 - DNA, 120 bp, Artificial Sequence
  ENSG00000075702_19 (sequence is synthesized)
acacctagtgagattcactccctgagccctggagagcaaacagaggatgatctggaggaagagtgtgagccagaagagatgctgaagacaccatccaaagatagcttggatccagatcct

SEQ ID NO: 68408 - DNA, 120 bp, Artificial Sequence
  ENSG00000075702_20 (sequence is synthesized)
cgttgcctgctaaccaacggcaagctgccactgtgggcaaagcggctgctaggggacgatgatgtggcagatggcttggccttccacgccaagcgcagctaccagccccacggccgctgg

SEQ ID NO: 68409 - DNA, 120 bp, Artificial Sequence
  ENSG00000075702_21 (sequence is synthesized)
gcagagcgggccggccaagagcccctcaagaccatcctggatgcccaggacctggattgctactttacccccatgaagcccgagagtctggagaactccattctggattcactggagcca

SEQ ID NO: 68410 - DNA, 120 bp, Artificial Sequence
  ENSG00000075702_22 (sequence is synthesized)
cagagcctggccagcctgctgagtgagtcagagagtccccaggaagctggccgcgggcacccctccttcctgccccagcagaaggaatcatctgaggccagtgagctcatcctctactct

SEQ ID NO: 68411 - DNA, 120 bp, Artificial Sequence
  ENSG00000075702_23 (sequence is synthesized)
ctggaggcagaagtgacagtcacagggacagacagccagtattgcaggaaggaggtggaggccgggcctggagaccagcagggcgactcctacctcagggtgtcctccgacagcccaaag

SEQ ID NO: 68412 - DNA, 120 bp, Artificial Sequence
  ENSG00000075702_24 (sequence is synthesized)
gaccagagcccgcctgaggactcgggggagtcagaggccgacctggagtgcagcttcgcagccatccactccccagctccgcctcctgaccctgcccctcggtttgccacgtcgctgccc

SEQ ID NO: 68413 - DNA, 120 bp, Artificial Sequence
  ENSG00000075702_25 (sequence is synthesized)
catttcccaggatgcgcaggtcccacagaagatgagctgtccctgcccgagggacccagcgtccccagcagctccctaccccagactccggagcaggagaagttcctccgccaccacttt

SEQ ID NO: 68414 - DNA, 120 bp, Artificial Sequence
  ENSG00000075702_26 (sequence is synthesized)
gagacactgactgagtccccctgcagagctctgggagacgtggaggcctctgaagctgaagaccacttcttcaacccacgcctgagtatctccacgcagttcctctcaagcctccagaag

SEQ ID NO: 68415 - DNA, 120 bp, Artificial Sequence
  ENSG00000075702_27 (sequence is synthesized)
gcatccaggttcacccataccttccctccccgggcaacccagtgccttgtgaagtctccagaggtcaagctcatggaccgaggcggaagccagcccagagcaggtactggctacgcctcc

SEQ ID NO: 68416 - DNA, 120 bp, Artificial Sequence
  ENSG00000075702_28 (sequence is synthesized)
ccagacaggacccacgtcctcgctgcagggaaggctgaagagaccctggaggcctggcgcccaccacctccctgccttacgagcctggcgtcctgtgtccctgcttcctccgtgctgccc

SEQ ID NO: 68417 - DNA, 120 bp, Artificial Sequence
  ENSG00000075702_29 (sequence is synthesized)
acagacaggaatctcccaacgcccacatctgcacccaccccaggcctggctcagggtgtccatgccccctccacctgttcctacatggaggccactgccagctcccgtgccaggatatca

SEQ ID NO: 68418 - DNA, 120 bp, Artificial Sequence
  ENSG00000075702_30 (sequence is synthesized)
cgcagcatctccctcggtgacagtgagggccctatcgtggccacactggcccagcccctccgtaggccatcgtccgttggggagctggcctccttgggccaggagcttcaggccatcacc

SEQ ID NO: 68419 - DNA, 120 bp, Artificial Sequence
  ENSG00000075702_31 (sequence is synthesized)
accgcgacaacacccagtttggacagtgagggccaagagcctgccctgcgttcctggggcaaccacgaggcccgggccaacctgagactgaccctgtcaagtgcctgtgatgggctcctg

SEQ ID NO: 68420 - DNA, 120 bp, Artificial Sequence
  ENSG00000075702_32 (sequence is synthesized)
cagccccccgtggatacccagcctggcgtcaccgtccctgcagtgagcttcccagcccctagccctgtggaagagagcgccctgaggctccacggctctgcctttcgcccaagtctccca

SEQ ID NO: 68421 - DNA, 120 bp, Artificial Sequence
  ENSG00000075702_33 (sequence is synthesized)
gctcctgagtcccctggccttcctgcccaccccagtaacccccagcttccagaggcccggcctggcatccctggcggcactgcctccctcctggagcccacctccggtgcacttggtctg

SEQ ID NO: 68422 - DNA, 120 bp, Artificial Sequence
  ENSG00000075702_34 (sequence is synthesized)
ttacagggcagccctgcccgctggagtgagccctgggtgccggttgaagccctgcccccatctccccttgagctgagcagggtggggaacatcttgcacaggctgcagaccaccttccaa

SEQ ID NO: 68423 - DNA, 120 bp, Artificial Sequence
  ENSG00000075702_35 (sequence is synthesized)
gaagccctcgacctttaccgtgtgttggtctccagtggccaggtggacaccgggcagcagcaggcacggactgagctggtctccaccttcctgtggatccacagccagctggaggctgaa

SEQ ID NO: 68424 - DNA, 120 bp, Artificial Sequence
  ENSG00000075702_36 (sequence is synthesized)
tgcctggtggggactagtgtggccccagcccaggctctgcccagcccaggacccccgtccccaccgacgctgtaccccctggccagcccagacctgcaggccctgctggaacactactcg

SEQ ID NO: 68425 - DNA, 120 bp, Artificial Sequence
  ENSG00000075702_37 (sequence is synthesized)
gagctgctggtgcaggccgtgcggaggaaggcacgggggcactgagggcgcagcccctccaccgcagccctgctgcttctgaggacttaggtattttaagcgaataaactgacagctttg

SEQ ID NO: 68426 - DNA, 120 bp, Artificial Sequence
  ENSG00000075702_38 (sequence is synthesized)
cggggcaggggtggaaccaggggcttggcacgcctcccctcccctacacagcctggagatactcatgggtaggtgctcactcattcacttacatgttggctcagcagcattcgcctgtgc

SEQ ID NO: 68427 - DNA, 120 bp, Artificial Sequence
  ENSG00000075702_39 (sequence is synthesized)
tgggtgctgttccgtgtgctggggacacagcagtgaccagaggagacgagaatctctgctggctagagcgagacagactgtaaactagtcagcaaattacgggctgatcatgatcagtgc

SEQ ID NO: 68428 - DNA, 120 bp, Artificial Sequence
  ENSG00000075702_40 (sequence is synthesized)
tatggaggaaatgatggaggatgtcttcgggcaggtttgtgggcagagaataggaggaaagccttatcagaaggctcagggaacgctgccttgactctgagacctgaaggaagcgagagg

SEQ ID NO: 68429 - DNA, 120 bp, Artificial Sequence
  ENSG00000075702_41 (sequence is synthesized)
gtgacccataagaagctgtagggagagcgcttcaggcagggggcacaggaagggcaaaggccctgcagtggttaagaatctccggcgctttagaagcagccagggatctgggtgcctgga

SEQ ID NO: 68430 - DNA, 120 bp, Artificial Sequence
  ENSG00000075702_42 (sequence is synthesized)
gaaaggagcagggaagatgaggctggaccaggcagaagccacatcccgtaggccttgcagccttgtagagggtctgcatagcatgctgagtgcagagagcagccacaggagggcaccaca

SEQ ID NO: 68431 - DNA, 120 bp, Artificial Sequence
  ENSG00000075702_43 (sequence is synthesized)
ggccaggaatgtgcttttcacccccagccctccagcagctctattccctgctttgcttttctccacaaaatttgctcccatctctgatatgctgtccagtttcctcattgatggtattca

SEQ ID NO: 68432 - DNA, 120 bp, Artificial Sequence
  ENSG00000075702_44 (sequence is synthesized)
ctgtgggtctccctcagtgtgagcactcttgagagcagggactttctctgagttcatttctgtgtccctagcaccaaagagcagtatctggcatattgatggctattttctaagagaaag

SEQ ID NO: 68433 - DNA, 120 bp, Artificial Sequence
  ENSG00000075702_45 (sequence is synthesized)
acttaacatgatttgggttttagaaagatcccttcagctataagtttactggggaaggacccgctcctctgccttggggctaactgatcactgctaccctggggatgtggtcccaatagg

SEQ ID NO: 68434 - DNA, 120 bp, Artificial Sequence
  ENSG00000075702_46 (sequence is synthesized)
gctgtgacctttggaaggcacaccatgtccctccttggcatagctcaggctcagctcctttggcccagttctccaggtggatggataaggagtgggttttctcctgcccttatggtccct

SEQ ID NO: 68435 - DNA, 120 bp, Artificial Sequence
  ENSG00000075702_47 (sequence is synthesized)
tttgctcctaactgtgggttctgttactggtgataagggcagagctgggttccattcctggctcaagcgtctattcactgtggaatctcaggtgagacacttctttcagagccttggtct

SEQ ID NO: 68436 - DNA, 120 bp, Artificial Sequence
  ENSG00000075702_48 (sequence is synthesized)
cctctgaaaataaaatagctgcctccaactgggagagcattcataaggcagcagctacaaaccagagtcacacacacttgcccaatatagtatgttttaaaggttggataagtggacaac

SEQ ID NO: 68437 - DNA, 120 bp, Artificial Sequence
  ENSG00000075702_49 (sequence is synthesized)
atttcaagttttttaacacaaaaatccaaatgtcccttttgtttggagaagtgagaaattctctggcctctggggcccaaattcccctgtggcagtgaggggctgagcttagtgaaattt

SEQ ID NO: 68438 - DNA, 120 bp, Artificial Sequence
  ENSG00000075702_50 (sequence is synthesized)
gtcaggcccgttgtggccagttcctcacacctgtgttgcctccctaatccctgtaggcagtggagtgggtggcctggatctatagtagatggtatgcaggtgtccgcccttggccaccag

SEQ ID NO: 68439 - DNA, 120 bp, Artificial Sequence
  ENSG00000075702_51 (sequence is synthesized)
tgggtgtgcattaggaggtggtgtggccagtgtggggattttcactccaactgcatatcagaatcacctggtccctgtgcctcaccgcccccccaccgccacgcaagagaaagccaaatc

SEQ ID NO: 68440 - DNA, 120 bp, Artificial Sequence
  ENSG00000075702_52 (sequence is synthesized)
agttgatctgggatgaaacttgggcattggcaattttgagactttttatattgaaataatttcagacttagaatagtacaaagagctcctatatacctatgtacctttcacatatttcac

SEQ ID NO: 68441 - DNA, 89 bp, Artificial Sequence
  ENSG00000075702_53 (sequence is synthesized)
aagagctcctatatacctatgtacctttcacatatttcacaaatgttagcttttttttcttttttttttttgctggagtgcagtggcac

SEQ ID NO: 68442 - DNA, 120 bp, Artificial Sequence
  ENSG00000075702_54 (sequence is synthesized)
gaccacaggcatgtgccaccatgcccagctagttttttgtgttttagtggagacggggttcatcatgttgcccaaggtggtcttgaactcctgagcttagacagtctgcctgcctcagcc

SEQ ID NO: 68443 - DNA, 120 bp, Artificial Sequence
  ENSG00000075702_55 (sequence is synthesized)
agcctcccaaagtgctaggattacaggtgcgagccactgcacttggccaaatgttagcattttaccacatttgctttatcattttttgtctatatacatattaatttgttctgaactatt

SEQ ID NO: 68444 - DNA, 120 bp, Artificial Sequence
  ENSG00000075702_56 (sequence is synthesized)
tatacatattaatttgttctgaactatttgagaatcagttgtagacatgatgcccctatatctctaaatacttcacgccaggcatggtgattcacgcctgtaatctcagcactgtgggag

SEQ ID NO: 68445 - DNA, 83 bp, Artificial Sequence
  ENSG00000075702_57 (sequence is synthesized)
ggcatggtgattcacgcctgtaatctcagcactgtgggaggccttggaggcaggagaacatggcaaaaccctgtctctactaa

SEQ ID NO: 68446 - DNA, 120 bp, Artificial Sequence
  ENSG00000075702_58 (sequence is synthesized)
catttggatgggaaaggaaacctggaaacatcatcagtgaataacacgccaagcagcagtaaccctctgaagaaaaatgaggcggggaaggggaaggggaatgcaggtggtattctagag

SEQ ID NO: 68447 - DNA, 120 bp, Artificial Sequence
  ENSG00000075702_59 (sequence is synthesized)
aggagaggggtcagggaaggcctccctgaggacatatgagcagagacctgcaggaaatcggggagtgagacctgcaactgctggggagaaccacaagcacagaggccctgcggcaggaac

SEQ ID NO: 68448 - DNA, 120 bp, Artificial Sequence
  ENSG00000075702_60 (sequence is synthesized)
agaggccctgcggcaggaacatgcactccacagagagctttgctgtggaggtcgtttatgtatttcactgctttttttaaaaaggagttgaagacggggcatggtggctcacacctgtaa

SEQ ID NO: 68449 - DNA, 120 bp, Artificial Sequence
  ENSG00000075702_61 (sequence is synthesized)
gtttgagaccagcctgggcaacacaagaccctgtctctacaaataatttttaaaaattagccaggcatggtagcacacacgtgtggtcccagctactcaagaggtggaggcaggaagatc

SEQ ID NO: 68450 - DNA, 88 bp, Artificial Sequence
  ENSG00000075702_62 (sequence is synthesized)
aaaattagccaggcatggtagcacacacgtgtggtcccagctactcaagaggtggaggcaggaagatcacttgagcctgggatcacac

SEQ ID NO: 68451 - DNA, 120 bp, Artificial Sequence
  ENSG00000075702_63 (sequence is synthesized)
ccaggtgaaattgcttcctaagtcttgagatggaattccctgggagagcacctgatgagccagcccattcagctgccacacaaccctgctgaaggtcgtgtacgtggagaatgacatcca

SEQ ID NO: 68452 - DNA, 120 bp, Artificial Sequence
  ENSG00000075702_64 (sequence is synthesized)
tgaagctcagagtctgtcgaggaagacacatgtggtccctgctgctgcctgaggattctgggcccagctgcctacagctgagagcccagctctgccacctccttgatgtggaacttccct

SEQ ID NO: 68453 - DNA, 120 bp, Artificial Sequence
  ENSG00000075702_65 (sequence is synthesized)
tattcataaaatggggggcagctgctcttaccatccctcctccagatggggaaactgagcccagggaagggtagccctggccctggctcaccagaatggtcaggctgtgggctcctgacc

SEQ ID NO: 68454 - DNA, 120 bp, Artificial Sequence
  ENSG00000075702_66 (sequence is synthesized)
ccgactctgtccttcagactcgggggagtcagaggccgacctggagtgcagcttcgcagccatccactccccagctccgcctcctgaccctgcccctcggtttgccacgtcgctgcccca

SEQ ID NO: 68455 - DNA, 120 bp, Artificial Sequence
  ENSG00000075702_67 (sequence is synthesized)
tttcccaggtaagcaggggccagacacgcaggggactcgctgctcgggcctggcttagggccagtcacaatgtctaagcacaggccctgcacttggagcccactgagcctggaagacggg

SEQ ID NO: 68456 - DNA, 120 bp, Artificial Sequence
  ENSG00000075702_68 (sequence is synthesized)
gatccctgcttctcagcctgcgggcaacagggcagggatgggtggggcccgctttctccatttcaggtggcgtctgctgtgactcatggtgttggctcctcttgtccctcccctccttcc

SEQ ID NO: 68457 - DNA, 120 bp, Artificial Sequence
  ENSG00000075702_69 (sequence is synthesized)
acactgactgagtccccctgcagaggtagggccctgcctcacccacacctgccgaggccgtctgtgcagcctgggcacagcattggcgtccctggagttggctccccagcagggccagga

SEQ ID NO: 68458 - DNA, 74 bp, Artificial Sequence
  ENSG00000075702_70 (sequence is synthesized)
cattggcgtccctggagttggctccccagcagggccaggagggtgagtggagagcaactgcttcgtggcccaat

SEQ ID NO: 68459 - DNA, 82 bp, Artificial Sequence
  ENSG00000075702_71 (sequence is synthesized)
gcttcactcttgacctgagcctcacgatgcctcctcacccactgcccctgctcgtaccctgtgtctgtacataagggtttct

SEQ ID NO: 68460 - DNA, 120 bp, Artificial Sequence
  ENSG00000075702_72 (sequence is synthesized)
tgcccctgctcgtaccctgtgtctgtacataagggtttctggggagtgccccgctgggctgtgggctggcctagggccagggctgctcggcgggaagggttatgagggtcccctcgggat

SEQ ID NO: 68461 - DNA, 120 bp, Artificial Sequence
  ENSG00000075702_73 (sequence is synthesized)
ccatggacgtgaaagccggggtgcgggtcatgcaggatccacgagctgcacttcatggacgagctggtcaaggtggaggcccatgatgctgaggtgctgtgcctggagtactccaagcca

SEQ ID NO: 68462 - DNA, 120 bp, Artificial Sequence
  ENSG00000075702_74 (sequence is synthesized)
tacctggcaggaatgtggagaatggggcctgcctctgagagctgtggagaggattccatagccccctctctgtctagaacagttcctggcatgtactgtgtggtggtgattttggacccc

SEQ ID NO: 68463 - DNA, 69 bp, Artificial Sequence
  ENSG00000075702_75 (sequence is synthesized)
gatctcggttcaggtagctgggattccaggcatgcgccaccacgccttgctaattttgtatttttagta

SEQ ID NO: 68464 - DNA, 80 bp, Artificial Sequence
  ENSG00000075702_76 (sequence is synthesized)
cgctctcttctaaggttctatctaactctaaggttctatctgtattcttcatgtttctgaaaataaaaatcacacaaaag

SEQ ID NO: 68465 - DNA, 120 bp, Artificial Sequence
  ENSG00000075711_0 (sequence is synthesized)
gttggaaacggcactgctgagtgaggttgaggggtgtctcggtatgtgcgccttggatctggtgtaggcgaggtcacgcctctcttcagacagcccgagccttcccggcctggcgcgttt

SEQ ID NO: 68466 - DNA, 120 bp, Artificial Sequence
  ENSG00000075711_1 (sequence is synthesized)
agttcggaactgcgggacgcgccggtgggctagggcaaggtgtgtgccctcttcctgattctggagaaaaatgccggtccggaagcaagatacccagagagcattgcaccttttggagga

SEQ ID NO: 68467 - DNA, 120 bp, Artificial Sequence
  ENSG00000075711_2 (sequence is synthesized)
atatcgttcaaaactaagccaaactgaagacagacagctcagaagttccatagaacgggttattaacatatttcagagcaacctctttcaggctttaatagatattcaagaattttatga

SEQ ID NO: 68468 - DNA, 120 bp, Artificial Sequence
  ENSG00000075711_3 (sequence is synthesized)
agtgaccttactggataatccaaaatgtatagatcgttcaaagccgtctgaaccaattcaacctgtgaatacttgggagatttccagccttccaagctctactgtgacttcagagacact

SEQ ID NO: 68469 - DNA, 120 bp, Artificial Sequence
  ENSG00000075711_4 (sequence is synthesized)
gccaagcagccttagccctagtgtagagaaatacaggtatcaggatgaagatacacctcctcaagagcatatttccccacaaatcacaaatgaagtgataggtccagaattggttcatgt

SEQ ID NO: 68470 - DNA, 120 bp, Artificial Sequence
  ENSG00000075711_5 (sequence is synthesized)
ctcagagaagaacttatcagagattgagaatgtccatggatttgtttctcattctcatatttcaccaataaagccaacagaagctgttcttccctctcctcccactgtccctgtgatccc

SEQ ID NO: 68471 - DNA, 120 bp, Artificial Sequence
  ENSG00000075711_6 (sequence is synthesized)
tgtcctgccagtccctgctgagaatactgtcatcctacccaccataccacaggcaaatcctcccccagtactggtcaacacagatagcttggaaacaccaacttacgttaatggcacaga

SEQ ID NO: 68472 - DNA, 120 bp, Artificial Sequence
  ENSG00000075711_7 (sequence is synthesized)
tgcagattatgaatatgaagaaatcacacttgaaaggggaaattcagggcttggtttcagcattgcaggaggtacggacaacccacacattggagatgactcaagtattttcattaccaa

SEQ ID NO: 68473 - DNA, 120 bp, Artificial Sequence
  ENSG00000075711_8 (sequence is synthesized)
aattatcacagggggagcagccgcccaagatggaagattgcgggtcaatgactgtatattacgagtaaatgaagtagatgttcgtgatgtaacacatagcaaagcagttgaagcgttgaa

SEQ ID NO: 68474 - DNA, 120 bp, Artificial Sequence
  ENSG00000075711_9 (sequence is synthesized)
agaagcagggtctattgtacgcttgtatgtaaaaagaaggaaaccagtgtcagaaaaaataatggaaataaagctcattaaaggtcctaaaggtcttgggtttagcattgctggaggtgt

SEQ ID NO: 68475 - DNA, 120 bp, Artificial Sequence
  ENSG00000075711_10 (sequence is synthesized)
tggaaatcagcatattcctggggataatagcatctatgtaaccaaaataattgaaggaggtgcagcacataaggatggcaaacttcagattggagataaacttttagcagtgaataacgt

SEQ ID NO: 68476 - DNA, 120 bp, Artificial Sequence
  ENSG00000075711_11 (sequence is synthesized)
atgtttagaagaagttactcatgaagaagcagtaactgccttaaagaacacatctgattttgtttatttgaaagtggcaaaacccacaagtatgtatatgaatgatggctatgcaccacc

SEQ ID NO: 68477 - DNA, 120 bp, Artificial Sequence
  ENSG00000075711_12 (sequence is synthesized)
tgatatcaccaactcttcttctcagcctgttgataaccatgttagcccatcttccttcttgggccagacaccagcatctccagccagatactccccagtttctaaagcagtacttggaga

SEQ ID NO: 68478 - DNA, 120 bp, Artificial Sequence
  ENSG00000075711_13 (sequence is synthesized)
tgatgaaattacaagggaacctagaaaagttgttcttcatcgtggctcaacgggccttggtttcaacattgtaggaggagaagatggagaaggaatatttatttcctttatcttagccgg

SEQ ID NO: 68479 - DNA, 120 bp, Artificial Sequence
  ENSG00000075711_14 (sequence is synthesized)
aggacctgctgatctaagtggagagctcagaaaaggagatcgtattatatcggtaaacagtgttgacctcagagctgctagtcatgagcaggcagcagctgcattgaaaaatgctggcca

SEQ ID NO: 68480 - DNA, 120 bp, Artificial Sequence
  ENSG00000075711_15 (sequence is synthesized)
ggctgtcacaattgttgcacaatatcgacctgaagaatacagtcgttttgaagctaaaatacatgatttacgggagcagatgatgaatagtagtattagttcagggtcaggttctcttcg

SEQ ID NO: 68481 - DNA, 120 bp, Artificial Sequence
  ENSG00000075711_16 (sequence is synthesized)
aactagccagaagcgatccctctatgtcagagccctttttgattatgacaagactaaagacagtgggcttcccagtcagggactgaacttcaaatttggagatatcctccatgttattaa

SEQ ID NO: 68482 - DNA, 120 bp, Artificial Sequence
  ENSG00000075711_17 (sequence is synthesized)
tgcttctgatgatgaatggtggcaagccaggcaggttacaccagatggtgagagcgatgaggtcggagtgattcccagtaaacgcagagttgagaagaaagaacgagcccgattaaaaac

SEQ ID NO: 68483 - DNA, 120 bp, Artificial Sequence
  ENSG00000075711_18 (sequence is synthesized)
agtgaaattcaattctaaaacgagagataaagggcagtcattcaatgacaagcgtaaaaagaacctcttttcccgaaaattccccttctacaagaacaaggaccagagtgagcaggaaac

SEQ ID NO: 68484 - DNA, 120 bp, Artificial Sequence
  ENSG00000075711_19 (sequence is synthesized)
aagtgatgctgaccagcatgtaacttctaatgccagcgatagtgaaagtagttaccgtggtcaagaagaatacgtcttatcttatgaaccagtgaatcaacaagaagttaattatactcg

SEQ ID NO: 68485 - DNA, 120 bp, Artificial Sequence
  ENSG00000075711_20 (sequence is synthesized)
tgaggtagatggaagagattatcattttgtgacttcaagagagcagatggaaaaagatatccaggaacataaattcattgaagctggccagtataacaatcatctatatggaacaagtgt

SEQ ID NO: 68486 - DNA, 120 bp, Artificial Sequence
  ENSG00000075711_21 (sequence is synthesized)
tcagtctgtacgagaagtagcagaaaagggcaaacactgtatccttgatgtgtctggaaatgccataaagagattacagattgcacagctttaccctatctccatttttattaaacccaa

SEQ ID NO: 68487 - DNA, 120 bp, Artificial Sequence
  ENSG00000075711_22 (sequence is synthesized)
atccatggaaaatatcatggaaatgaataagcgtctaacagaagaacaagccagaaaaacatttgagagagccatgaaactggaacaggagtttactgaacatttcacagctattgtaca

SEQ ID NO: 68488 - DNA, 120 bp, Artificial Sequence
  ENSG00000075711_23 (sequence is synthesized)
gggggatacgctggaagacatttacaaccaagtgaaacagatcatagaagaacaatctggttcttacatctgggttccggcaaaagaaaagctatgaaaactcatgtttctctgtttctc

SEQ ID NO: 68489 - DNA, 120 bp, Artificial Sequence
  ENSG00000075711_24 (sequence is synthesized)
ttttccacaattccattttctttggcatctctttgccctttcctctggagtctttcttgagtactgatttcatgttgaattgtatcccacacatcatggtctgcagcttctttttcacat

SEQ ID NO: 68490 - DNA, 120 bp, Artificial Sequence
  ENSG00000075711_25 (sequence is synthesized)
gtagtgtctccttcaagttacatcgtgtgtattatttaatgtcactattggttagtggccatttttcagaactgaagatggaatggcctgaccagctattaagaacgtggggagacgcag

SEQ ID NO: 68491 - DNA, 120 bp, Artificial Sequence
  ENSG00000075711_26 (sequence is synthesized)
aaattgtggtaaaattccttaatgtttaagggaaagtaactttaagagatttttggaaaagctttatatacattcttttcaaatttcagtacaaatgaaaaagtggttttaatcagtgat

SEQ ID NO: 68492 - DNA, 120 bp, Artificial Sequence
  ENSG00000075711_27 (sequence is synthesized)
ttagtagactttgagcaactgtgcacgcttcagtttaatagcatggtttggccagtgtattactctcaagtccttttctcaatcaacttctatcatcaaagcaattgtttcattatagat

SEQ ID NO: 68493 - DNA, 120 bp, Artificial Sequence
  ENSG00000075711_28 (sequence is synthesized)
aaataaggacattttttaatttaaaaattcatgtctgagttgactttcataagggatttcattttttcctcaacattcttaaagccttttagtatttgacggttcttttttcccaggaca

SEQ ID NO: 68494 - DNA, 120 bp, Artificial Sequence
  ENSG00000075711_29 (sequence is synthesized)
tttgctaggaataacaacgtttcaatgtttttaatctacttgagcaacactatcgtgtcttacaaaagttgttcatatgtaaatgatcatcacatttcgtgaattgaggccatgttcagg

SEQ ID NO: 68495 - DNA, 120 bp, Artificial Sequence
  ENSG00000075711_30 (sequence is synthesized)
tgctaaggaagttcgccttttacacagaagattgagaaaatttcctagatataaatacagataaatcagacgttacagtggtgacgtagtaaccatcatggcaatggaaaggagtccaat

SEQ ID NO: 68496 - DNA, 120 bp, Artificial Sequence
  ENSG00000075711_31 (sequence is synthesized)
agtccaattcatagcctaaaacttcaaatgtattcttaggagtcagattttactgaatattttacccacaatagctgcctattttgttataataaaatatatataaatatatatataaaa

SEQ ID NO: 68497 - DNA, 120 bp, Artificial Sequence
  ENSG00000075711_32 (sequence is synthesized)
aaactgtaactatgggaattattttctttacatagttgcgcacacacacaaacatatatatatatttaaaatatattttgtttcttttgccacctactcctaactttttgtttggttttt

SEQ ID NO: 68498 - DNA, 120 bp, Artificial Sequence
  ENSG00000075711_33 (sequence is synthesized)
aaattaaatattaattgaatagacttatcttccttaatcatgtgaactgaaaatgggggcatggtggtcatgaggaggaaacatttagggaaattagattataagtaaaagtgtgggcat

SEQ ID NO: 68499 - DNA, 120 bp, Artificial Sequence
  ENSG00000075711_34 (sequence is synthesized)
attctcctcttttctacaaaggttttcaaatggttcctgaggttttttgttgttgtccgtgttgttactgttgttcttgtcatcaggtttgattttggtccttgccctttccttctagtt

SEQ ID NO: 68500 - DNA, 120 bp, Artificial Sequence
  ENSG00000075711_35 (sequence is synthesized)
ctccttttattaataggaaggcaggcaaaagccccatttatgtgtgtgttttcccctcagacagctttcatccactgctctgcactagaattgcacaaatcttcatggtgagcaatttta

SEQ ID NO: 68501 - DNA, 120 bp, Artificial Sequence
  ENSG00000075711_36 (sequence is synthesized)
agaaatgttagtgaaaggtagaaattatttcacaaatcagtttctctggtccttcatattaataataatatttggcttcccattgctctttggagttgtttattaaatatgtgtttttga

SEQ ID NO: 68502 - DNA, 120 bp, Artificial Sequence
  ENSG00000075711_37 (sequence is synthesized)
caacctcctcattagtttcttaaatgagtactggtttgtaaagaattatcaacattatccattccatttatgaagaagaggagaacagctaataaactgtattgtaaaatccatatgtta

SEQ ID NO: 68503 - DNA, 120 bp, Artificial Sequence
  ENSG00000075711_38 (sequence is synthesized)
agtgtgtcttgaattttgaaagaaaaaatatattttgcaagctaacattttcttgaaacaatttgaggcatcatgtaacttataaccgaatccaagagccgttaggcagcagagtgtgtt

SEQ ID NO: 68504 - DNA, 120 bp, Artificial Sequence
  ENSG00000075711_39 (sequence is synthesized)
accacattgaaatacacagtgctgctgttagactaaatgtcgtaggttgttaaccacatagaaacacactagtatgaagaaaactgttgtaaaatctcaagagcttcagaaactgcctta

SEQ ID NO: 68505 - DNA, 120 bp, Artificial Sequence
  ENSG00000075711_40 (sequence is synthesized)
caagaccgcagcataagctattttgaagtatttaccaaatagtcacatgttgtaaaatatcaagtggttataaaaggatgccatttatatattaaaatttacataacattgttttctgga

SEQ ID NO: 68506 - DNA, 120 bp, Artificial Sequence
  ENSG00000075711_41 (sequence is synthesized)
agttctgtcactcactcggggtaactttgggcaaattctctctggacctcctaatagggaggtcctcgtcaccccgaggaagttcgaagacgtgggcagtgacttggaaagcttcccgag

SEQ ID NO: 68507 - DNA, 120 bp, Artificial Sequence
  ENSG00000075711_42 (sequence is synthesized)
attccccttctataacctgggtggctcagaccgggagcggggtcccagccggccggtaattccgcccggaggtgcgcacgaaacaaacctgcagcgctggccgagggcggctcagcttcg

SEQ ID NO: 68508 - DNA, 120 bp, Artificial Sequence
  ENSG00000075711_43 (sequence is synthesized)
tatttttatttacatgttttgttcaactaggcaacttaaaatagttttgctttatgtataaaatattgtaatggtagagtaatggattgcctgtgcattgtaaccacaaagaaatacagg

SEQ ID NO: 68509 - DNA, 120 bp, Artificial Sequence
  ENSG00000075711_44 (sequence is synthesized)
cacaggatccagcggaggctcacgtgctgtattggattatcacatccttaatgttctttaatctgaaatcgttcccaagtcttgttattcatgaccctgactgacattttttaagagtaa

SEQ ID NO: 68510 - DNA, 120 bp, Artificial Sequence
  ENSG00000075711_45 (sequence is synthesized)
aagagtaaaaacactaggggggattttttgttgttttttgtttcgttttgttttttgtttcgttttgttttttgtcttttgtttttttttgagccagggtctcactctgtcacccaggct

SEQ ID NO: 68511 - DNA, 90 bp, Artificial Sequence
  ENSG00000075711_46 (sequence is synthesized)
atgttgcccaggctggtctcaaactcatccaatccgcccaccttcaccttgacctcccaaagtggtgggacgacccattcttttataaaa

SEQ ID NO: 68512 - DNA, 120 bp, Artificial Sequence
  ENSG00000075711_47 (sequence is synthesized)
ccaaagacccattcttttataaaatgtccctccctcaatttggatttatctgatgttttctcataattcgatttaggttctgcatttggggcaggaatagcaatgaagtaatgatgtgtc

SEQ ID NO: 68513 - DNA, 120 bp, Artificial Sequence
  ENSG00000075711_48 (sequence is synthesized)
ctctgtgtatcatgcaaggaggtttacaaagtctacttgtgccgttacttatgatgctaattttaatcacatggttaaggtgtctgcagccttatgctttcccagtttccctggtttact

SEQ ID NO: 68514 - DNA, 120 bp, Artificial Sequence
  ENSG00000075711_49 (sequence is synthesized)
aaccattccattaatgaatttacaaagtaagcaaaatgtatatttcccaagtcagttcctgactgttttctcctaaaataaatccttgcgtgctgttgtcaacctaaactatgaaatgct

SEQ ID NO: 68515 - DNA, 120 bp, Artificial Sequence
  ENSG00000075711_50 (sequence is synthesized)
ctggctcaggggccaagggtcggagcgcttcacccgcccgtacccagtagcaggtggggagtgtggatacttgtgcgggggaagaggcggcctcaggtctaggctctttggggaggggac

SEQ ID NO: 68516 - DNA, 120 bp, Artificial Sequence
  ENSG00000075711_51 (sequence is synthesized)
gctttcgaggagagtttggaagccgacttctgtctgttcttaatttggaggggtacccactccaaggaaaagctttccacgttgacagacaactgctgcgttttgagactctttctttga

SEQ ID NO: 68517 - DNA, 120 bp, Artificial Sequence
  ENSG00000075711_52 (sequence is synthesized)
atcagctaacaaaagaacagcttttggttcctgcagacgctggtgaaaaaataatcatgagaaagaaatccaccttatgtcgtcttttttgtctgcaaaaataaactcagccatcataca

SEQ ID NO: 68518 - DNA, 120 bp, Artificial Sequence
  ENSG00000075711_53 (sequence is synthesized)
gctaacaggtacagagggaagatacgagctctttcataggaagaaatcactgagaaaatgagcatcatttctcaaggtttttattttcactgatctacaagtgatgctgctgtaattgta

SEQ ID NO: 68519 - DNA, 120 bp, Artificial Sequence
  ENSG00000075711_54 (sequence is synthesized)
gctgcagtttttaccgatcattcaccactcagcagctggtagagaagtaagcctgcttggcaaccacctgcagggctgcagagatgaattacattttcggaaacaacacacttctatact

SEQ ID NO: 68520 - DNA, 120 bp, Artificial Sequence
  ENSG00000075711_55 (sequence is synthesized)
ctcgcggcagtcgaggaggcaatactagctctagccatggctcagcaggcccaaagcagaaacactgggcaaaaaagggctcgtcagatgaactgcaagctgagccagaaccttcacgct

SEQ ID NO: 68521 - DNA, 120 bp, Artificial Sequence
  ENSG00000075711_56 (sequence is synthesized)
ggcagcagatagttgcatttttcactcgaagacacagctttattgactgcatctcggtagccaccagctccacccaggcaaatcctcccccagtactggtcaacacagatagcttggaaa

SEQ ID NO: 68522 - DNA, 120 bp, Artificial Sequence
  ENSG00000075711_57 (sequence is synthesized)
gagtctggccggggcgcaccccagttccgagcgcacgccgctcaccggaactttgtggcggcgccgcaggtgtgggggcccgcggaggtgtgcatgcggggcgcgagggcgtcgcggaga

SEQ ID NO: 68523 - DNA, 120 bp, Artificial Sequence
  ENSG00000075711_58 (sequence is synthesized)
attctcatggaggagatagcagagcttgtactgcagcaagtggagctctgtggtgaatccgatgctggattacattttaaggatattagcaaggccctgacaaagtggtgctaaatgagc

SEQ ID NO: 68524 - DNA, 120 bp, Artificial Sequence
  ENSG00000075711_59 (sequence is synthesized)
actttcattctggtaatttgactataattttagtgaagcagttttattatgcaggaaaaagaaacagcattttaattccaatcatagtataccgacctgatctctgctgtgggggtggaa

SEQ ID NO: 68525 - DNA, 120 bp, Artificial Sequence
  ENSG00000075711_60 (sequence is synthesized)
acaatgaagaatgcaacattttaatacaattttttttaaaaagaatgctttggatctagattaaatgttcaagacagtcagcaaacaacatgcacaaaggcatttttctggaatttcagt

SEQ ID NO: 68526 - DNA, 120 bp, Artificial Sequence
  ENSG00000075711_61 (sequence is synthesized)
cttggatcgatttaaatgctcagggtctgaaaaaatgtctcctagcatcaaaaacttggattgcttttctccgatgttatgccactgtaaagtagcatgctccaacagcacaatatcctt

SEQ ID NO: 68527 - DNA, 120 bp, Artificial Sequence
  ENSG00000075711_62 (sequence is synthesized)
agcatgtaacttctaatgccagcgatagtgaaagtagttacctaatcttgattacagatgagtatggctgctcaaaaggtggtcaagaagaatacgtcttatcttatgaaccagtgaatc

SEQ ID NO: 68528 - DNA, 120 bp, Artificial Sequence
  ENSG00000075711_63 (sequence is synthesized)
tttttcactcgaagacacagctttattgactgcatctcggtagccaccagctccacccaggcaaatcctcccccagtactggtcaacacagatagcttggaaacaccaacttacggaaat

SEQ ID NO: 68529 - DNA, 120 bp, Artificial Sequence
  ENSG00000075711_64 (sequence is synthesized)
ggagcagcccggaggcagcgagcaaggagaaaggcaagcgagaggagggggcccgagcagggcgggcggccagtcccgctggtcccctctcagcgctctgcggccgctgctggctcaggg

SEQ ID NO: 68530 - DNA, 120 bp, Artificial Sequence
  ENSG00000075711_65 (sequence is synthesized)
aatgtagagactatgaagctgtttaggaggcagttctttaggggtggatgtgaacagaaattagcaaaatcatagtgcctctgaaggtatgccaactctgtagtgtagaattagctattt

SEQ ID NO: 68531 - DNA, 120 bp, Artificial Sequence
  ENSG00000075711_66 (sequence is synthesized)
gtggagcatttcatcagatgacttcctgtcaacctcatatcttgaaaagagggattaatgaaacagcatctgaagaagcagtggactcttgtggaataaaccctgacatcttccacagtg

SEQ ID NO: 68532 - DNA, 120 bp, Artificial Sequence
  ENSG00000075711_67 (sequence is synthesized)
ttttgtgggataatttcaagttcttcagatacagattacataaagaagattgtagggcacgtgacagactctggtttcttgtattttagatagtagaaaaattgctacctctaagaatgg

SEQ ID NO: 68533 - DNA, 120 bp, Artificial Sequence
  ENSG00000075711_68 (sequence is synthesized)
aataaatagcgaggtaaataatgtatcaatctaatagaatattatacaccaattttaaattattgctgtcaagcccatgtggtgacatggaaagaaatattttaatatgagcttttaaaa

SEQ ID NO: 68534 - DNA, 83 bp, Artificial Sequence
  ENSG00000075711_69 (sequence is synthesized)
tgagctcagaggttcaatatcagcctggccaacatggtgaaaccagtctctactaaaaatagaaaaattagttgggcatggtg

SEQ ID NO: 68535 - DNA, 120 bp, Artificial Sequence
  ENSG00000075711_70 (sequence is synthesized)
cagtctctactaaaaatagaaaaattagttgggcatggtgctatatacctgcagtgccaggtagtcaggtgtctgagacacaagaatagaatcgcttaaacctaggaggcagaggttgca

SEQ ID NO: 68536 - DNA, 120 bp, Artificial Sequence
  ENSG00000075711_71 (sequence is synthesized)
tcccttgaggccaggagtttgagaccagtgtgggcaacatagttgagacttgtctcttttattaaaaaaaaaaaacaaaattttagcagggcatggtggtacatacctgtagtcccagcc

SEQ ID NO: 68537 - DNA, 120 bp, Artificial Sequence
  ENSG00000075711_72 (sequence is synthesized)
atggtggtacatacctgtagtcccagccactctgggctaagatgggaggatcacagaagcccaggagaggagggcgaggctgcagtgagctatagtcataccacctcactcccacctgag

SEQ ID NO: 68538 - DNA, 120 bp, Artificial Sequence
  ENSG00000075711_73 (sequence is synthesized)
aaaaagttaaaataaaaattcagatttccctgtctcattgaaagttttatttttattttttaaaaataaaagtattagtctttgtttaattgaagggagatatttattgagagaaaactt

SEQ ID NO: 68539 - DNA, 120 bp, Artificial Sequence
  ENSG00000075711_74 (sequence is synthesized)
tttgtttaattgaagggagatatttattgagagaaaacttgagatgacatttacatggatgagaagagtgcctatggttttaccaaacaataaagtcgtgaaatggagtcacttttaagg

SEQ ID NO: 68540 - DNA, 120 bp, Artificial Sequence
  ENSG00000075711_75 (sequence is synthesized)
agggccaggcagtttctggctgggtgtgtttgttctcattgtcttttttatgttttgcaaaagccagccagtgccagtcttatcaaagcagagtttctaagaaatattagttggttttaa

SEQ ID NO: 68541 - DNA, 120 bp, Artificial Sequence
  ENSG00000075711_76 (sequence is synthesized)
aatgcaattgccaccatcggtgccttcccttccagctgagacatctgaatttatgacttctaatattagttggttttaaaatgcaattgccaccatcagtgccttcccttccagctgaga

SEQ ID NO: 68542 - DNA, 120 bp, Artificial Sequence
  ENSG00000075711_77 (sequence is synthesized)
catctgaatttatgacctttacaatcctttatctatatgatctcagaaacatggattttcatcttcagaaacaggagcaaagctggattgaaaataagatcatctatttatttttaatta

SEQ ID NO: 68543 - DNA, 120 bp, Artificial Sequence
  ENSG00000075711_78 (sequence is synthesized)
caaagacatcccgtcattaaaatgggcatctatttgtttaaatatagtttgtcccctttgccagttaacgctgtttcaaaaactgaaatagtgccaacagtattttctcctttgagtttt

SEQ ID NO: 68544 - DNA, 120 bp, Artificial Sequence
  ENSG00000075711_79 (sequence is synthesized)
atgtctacatttggactaattcagggtcacttagccctttttgtcatattctacttgctatttataatagatttgttcataaactgtgttgtacaaaaataaggcattgtccttaattac

SEQ ID NO: 68545 - DNA, 120 bp, Artificial Sequence
  ENSG00000075711_80 (sequence is synthesized)
aggagttttcctttgctaatatatatttattatttgaaaaacttaaacgtttcaaagaaaaagaaaatgcttttaaaaaattattttgttatatatggcttatatctcaacatttcattt

SEQ ID NO: 68546 - DNA, 120 bp, Artificial Sequence
  ENSG00000075711_81 (sequence is synthesized)
acccccggggtcgccaggcgctgtctctgccgcggagttggaaacggcactgctgagtgaggttgaggggtgtctcggggtacccactccaaggaaaagctttccacgttgacagacaac

SEQ ID NO: 68547 - DNA, 73 bp, Artificial Sequence
  ENSG00000075711_82 (sequence is synthesized)
tccacccactgctgattatgttactttttcccccatctgttattgaactaataaagcattatgaaaaagctga

SEQ ID NO: 68548 - DNA, 120 bp, Artificial Sequence
  ENSG00000075711_83 (sequence is synthesized)
tatttgcttttctgtgtctggcttatttcatatagcataaggtcctccacattcactcatgttggttgttgcagatgataggattttcatttttatggcctaataaaatattccattgtt

SEQ ID NO: 68549 - DNA, 89 bp, Artificial Sequence
  ENSG00000075711_84 (sequence is synthesized)
tggttttgtttgtttgtttttgaggcagggttttgttcttgcccaggctggagtacagtgtcatgatcatggctcactgcagcctcaac

SEQ ID NO: 68550 - DNA, 120 bp, Artificial Sequence
  ENSG00000075711_85 (sequence is synthesized)
caacctcctgggctcaagcaattctctctcttcagcttccttagtagctgggactacaggcgtgcaacaccacacctggctaattttttatttttgtagagacagggtctcgctatgttg

SEQ ID NO: 68551 - DNA, 120 bp, Artificial Sequence
  ENSG00000075711_86 (sequence is synthesized)
ggtctcaaactcctaggctcaagcaatcgttcttcctcggcctcccagagtgcttggattataggtgcactgcacctggcctacaatattctctttattcattcatcttttttgtttttg

SEQ ID NO: 68552 - DNA, 71 bp, Artificial Sequence
  ENSG00000075711_87 (sequence is synthesized)
agtgcttggattataggtgcactgcacctggcctacaatattctctttattcattcatcttttttgttttt

SEQ ID NO: 68553 - DNA, 120 bp, Artificial Sequence
  ENSG00000075711_88 (sequence is synthesized)
cgcccgccttggcctcccaaagtgccgggactacaggcgtgagccatcgggcccggctcattcatcttttgacagactcttaggtgattttcatatctgggctattgttgattatgttgc

SEQ ID NO: 68554 - DNA, 120 bp, Artificial Sequence
  ENSG00000075711_89 (sequence is synthesized)
tatgttgcagtgaacataggagtgcagatttcaacatactgatttattttcctttggttttctttttgttgttgttggctttttgttttttattgttttgttttgagacagagtctcact

SEQ ID NO: 68555 - DNA, 90 bp, Artificial Sequence
  ENSG00000075711_90 (sequence is synthesized)
cagagtctcactctgttgtccaggctggaatgcgggtgtgatctcagcttgctgcaaccatcgcctcctgggttctgtagggactagagg

SEQ ID NO: 68556 - DNA, 64 bp, Artificial Sequence
  ENSG00000075711_91 (sequence is synthesized)
tagcctcccaagtagcagggactagagggttggccgtgctggtctcaaactcctgacctcaagt

SEQ ID NO: 68557 - DNA, 120 bp, Artificial Sequence
  ENSG00000075711_92 (sequence is synthesized)
gtgtgagccaccacgcctggcccaatttcctttcctttgtatatatatcgagtagtgggattgctagatcatataataactcagtttttaattttttgaggtggctgggcacagtggttc

SEQ ID NO: 68558 - DNA, 71 bp, Artificial Sequence
  ENSG00000075711_93 (sequence is synthesized)
atgcctgtaatcccagcatttttggaggcccaggtgggcaggtcttttctctactaaaaatacaaaattag

SEQ ID NO: 68559 - DNA, 120 bp, Artificial Sequence
  ENSG00000075711_94 (sequence is synthesized)
tgaaactctgtctcaaaaataataatagtaataataatttcttgaggaatgtccacactattttctgtgatggctttactcatttacattcccaccaacagtgtacagggttcccttttc

SEQ ID NO: 68560 - DNA, 120 bp, Artificial Sequence
  ENSG00000075711_95 (sequence is synthesized)
ggttcccttttcttcataccattgcctacttgttatctcttatctttttgataacagccatccacacaggtctaaggtgatatttcattatggtttgcgtgtgtgtttgtgacagagtct

SEQ ID NO: 68561 - DNA, 120 bp, Artificial Sequence
  ENSG00000075711_96 (sequence is synthesized)
gatggcaggcgtgagccactgcacccagcctcattatggttttggtttctgttgctctgattaatgaggttgagcacttttactgatacctgctggccatctgtatgtcttctttggaaa

SEQ ID NO: 68562 - DNA, 120 bp, Artificial Sequence
  ENSG00000075711_97 (sequence is synthesized)
aatgtcgattccagtcctttgcccattttttaaatggattatttggtattttgctaatgattttcttatatattttggatattaaccccttaccaattgcatgtttggaaatattttctc

SEQ ID NO: 68563 - DNA, 120 bp, Artificial Sequence
  ENSG00000075711_98 (sequence is synthesized)
ctcttccataggttgccttttcattttgttgattgttcctttgctgtgtagattttttatttaatatcccacttgatgattttttattttgctgcctgtgctttccaaaaaatcatccaa

SEQ ID NO: 68564 - DNA, 120 bp, Artificial Sequence
  ENSG00000075711_99 (sequence is synthesized)
gaccagtgtgaaggcgcttttttccctgtgttttcttctaggagttttatggttctggttttacatttaagtctttagtctatttcaagttaattttgtataagataagggtttagtttc

SEQ ID NO: 68565 - DNA, 120 bp, Artificial Sequence
  ENSG00000075711_100 (sequence is synthesized)
gttctcttgcatgtggatatccagattttccagcaccatttatttaagacactagcctttccctattgtgtagtcttggcccctttttaatgattagttgccctttgatccgttttgaaa

SEQ ID NO: 68566 - DNA, 120 bp, Artificial Sequence
  ENSG00000075711_101 (sequence is synthesized)
tactatttgtttaaaaaaaaaaaaagtaggtagcaactccccaatattcttattttactcgccttgtcctttaacttcctcctcaagtctttggacatttttgttgttgttacttgtttg

SEQ ID NO: 68567 - DNA, 120 bp, Artificial Sequence
  ENSG00000075711_102 (sequence is synthesized)
tttgaaataatatcagcctaaatttgacattcacactgagtatcagtaagggtcatggtttttaaaccttgtgctttcttatttttttcaaactaatttcagacttaaatagaagttaca

SEQ ID NO: 68568 - DNA, 120 bp, Artificial Sequence
  ENSG00000075711_103 (sequence is synthesized)
gccgcgggggtgcggcggcccaggggagctcctcccccgtcccttcgccccctccgctcggctccgcgggccccgggcggggcgggggtgtgtgccctcttcctgattctggagaaaaat

SEQ ID NO: 68569 - DNA, 120 bp, Artificial Sequence
  ENSG00000075711_104 (sequence is synthesized)
caaacaaaaacatttaattgttactcttaacatttcctgtcactgtgtgtgggaaaaatagatataaccattttttaatggtttgtacttattttatcagttactcttccatcctccata

SEQ ID NO: 68570 - DNA, 120 bp, Artificial Sequence
  ENSG00000075711_105 (sequence is synthesized)
ttaatctgttctgttgaactttacaaaacgatgtaagtagaaaatggatttattgtggttttttttttaatattaaacactttcccaagtttttttctgttaaagatacaactagaccaa

SEQ ID NO: 68571 - DNA, 120 bp, Artificial Sequence
  ENSG00000075711_106 (sequence is synthesized)
tacgttaatggcacagatgcagattatgaatatgaagaaatcacacttgaaaggggccttttaaattccttttgtttagttaggactatacattgtatttttcactggttgaagaacttg

SEQ ID NO: 68572 - DNA, 120 bp, Artificial Sequence
  ENSG00000075711_107 (sequence is synthesized)
gtttcaggtagatgtccctttacttctaaatatttcagtgtgtattttctaaaaaacagggatattcccttatagaatcatagttttattatcaaaatcaggaaatttaataattatatg

SEQ ID NO: 68573 - DNA, 120 bp, Artificial Sequence
  ENSG00000075711_108 (sequence is synthesized)
ggtggggatctacccccggggtcgccaggcgctgtctctgccgcggagttggaaacggcactgctgagtgaggttgaggggtgtctcggtgtgtgccctcttcctgattctggagaaaaa

SEQ ID NO: 68574 - DNA, 120 bp, Artificial Sequence
  ENSG00000075711_109 (sequence is synthesized)
tgtttaaattagcaaatactagccttgctgtatcaaatcctaaaaaatgattcttggtaattctttatttgtcatttctcttttctctgctagctcctcctcccttttccttttattcct

SEQ ID NO: 68575 - DNA, 120 bp, Artificial Sequence
  ENSG00000075711_110 (sequence is synthesized)
actattctgtaagcaactgtgggatactaagaatttgtattttgaaatgttaaaaatttggattatgatgacaaattgtagataatctgcttttgcattatcagatacccagagagcatt

SEQ ID NO: 68576 - DNA, 120 bp, Artificial Sequence
  ENSG00000075711_111 (sequence is synthesized)
ttgtttctcattctcatatttcaccaataaaggtaggatagtatctatttattattgttatgaattacatattacttttgttatacatatagctcatgctcggagagaagtattctttca

SEQ ID NO: 68577 - DNA, 120 bp, Artificial Sequence
  ENSG00000075711_112 (sequence is synthesized)
agaagaacttatcagagattgagaatgtccatggatttgtttctcattctcatatttcaccaataaagagatggggtttcaccatgttccacaggctggtcttgaactcctgggctcaag

SEQ ID NO: 68578 - DNA, 120 bp, Artificial Sequence
  ENSG00000075711_113 (sequence is synthesized)
ttcaattctaaaacgagagataaaggggtgagtatttgaaatctctacatttttgtaattcctgtttgagctacattgttaaaatgaaaaggattttgctatcagaattattcatgatca

SEQ ID NO: 68579 - DNA, 120 bp, Artificial Sequence
  ENSG00000075711_114 (sequence is synthesized)
gttcttgccatggtgctttacaatggtagatacttaagcatttgttaaattcaagcacccatttcacagacccttccaaattatcaaaactatcatttgatatattattagcaacatact

SEQ ID NO: 68580 - DNA, 120 bp, Artificial Sequence
  ENSG00000075711_115 (sequence is synthesized)
tatattattagcaacatacttttgggtcaagcttatttttataaatgaaatgtatttgaccttcattcgatttccaattagaaatttgtgttactaggccgggcatggtggctcacgcct

SEQ ID NO: 68581 - DNA, 74 bp, Artificial Sequence
  ENSG00000075711_116 (sequence is synthesized)
ctgaggttaggagttagtaaaagttagccaggcatggtggcgggcatttgtaatcccagctactcgggaggctg

SEQ ID NO: 68582 - DNA, 75 bp, Artificial Sequence
  ENSG00000075711_117 (sequence is synthesized)
taggcggaggttgcattgagcccagatcgcacctctgtgctccagactgggcaacagagcgagacccaatctctt

SEQ ID NO: 68583 - DNA, 120 bp, Artificial Sequence
  ENSG00000075711_118 (sequence is synthesized)
ttttttaatttgtgacaacatggatggacctggagtgcattattctaattgaaaaaagccagacacagaaagacaaaaatcgtatgatcacatttttatgtgaaatctaaagtagtcgaa

SEQ ID NO: 68584 - DNA, 120 bp, Artificial Sequence
  ENSG00000075711_119 (sequence is synthesized)
gtcatacagagaagaatggtggttaccaggggttaggaggatggggaaatgagatacaaagtttccgtgacacaagatgagtgagttctgcacctccaacatagttgagaagaaagaacg

SEQ ID NO: 68585 - DNA, 120 bp, Artificial Sequence
  ENSG00000075711_120 (sequence is synthesized)
agcccgattaaaaacagtgaaattcaattctaaaacgagagataaagggttcctcagagccttcaaactttaagattgaaatcaagacagtctgcttggctaatgaactgtgaacttatt

SEQ ID NO: 68586 - DNA, 120 bp, Artificial Sequence
  ENSG00000075785_0 (sequence is synthesized)
gtctcgtgacaggtacttccgctcggggcggcggcggtggcggaagtgggagcgggcctggagtcttggccataaagcctgaggcggcggcagcggcggagttggcggcttggagagctc

SEQ ID NO: 68587 - DNA, 120 bp, Artificial Sequence
  ENSG00000075785_1 (sequence is synthesized)
gggagagttccctggaaccagaacttggaccttctcgcttctgtcctccgtttagtctcctcctcggcgggagccctcgcgacgcgcccggcccggagcccccagcgcagcggccgcgtt

SEQ ID NO: 68588 - DNA, 120 bp, Artificial Sequence
  ENSG00000075785_2 (sequence is synthesized)
tgaaggatgacctctaggaagaaagtgttgctgaaggttatcatcctgggagattctggagtcgggaagacatcactcatgaaccagtatgtgaataagaaattcagcaatcagtacaaa

SEQ ID NO: 68589 - DNA, 120 bp, Artificial Sequence
  ENSG00000075785_3 (sequence is synthesized)
gccacaataggagctgactttctgaccaaggaggtgatggtggatgacaggctagtcacaatgcagatatgggacacagcaggacaggaacggttccagtctctcggtgtggccttctac

SEQ ID NO: 68590 - DNA, 120 bp, Artificial Sequence
  ENSG00000075785_4 (sequence is synthesized)
agaggtgcagactgctgcgttctggtatttgatgtgactgcccccaacacattcaaaaccctagatagctggagagatgagtttctcatccaggccagtccccgagatcctgaaaacttc

SEQ ID NO: 68591 - DNA, 120 bp, Artificial Sequence
  ENSG00000075785_5 (sequence is synthesized)
ccatttgttgtgttgggaaacaagattgacctcgaaaacagacaagtggccacaaagcgggcacaggcctggtgctacagcaaaaacaacattccctactttgagaccagtgccaaggag

SEQ ID NO: 68592 - DNA, 120 bp, Artificial Sequence
  ENSG00000075785_6 (sequence is synthesized)
gccatcaacgtggagcaggcgttccagacgattgcacggaatgcacttaagcaggaaacggaggtggagctgtacaacgaatttcctgaacctatcaaactggacaagaatgaccgggcc

SEQ ID NO: 68593 - DNA, 120 bp, Artificial Sequence
  ENSG00000075785_7 (sequence is synthesized)
aaggcctcggcagaaagctgcagttgctgagggggcagtgagagttgagcacagagtccttcacaaaccaagaacacacgtaggccttcaacacaattcccctctcctcttccaaacaaa

SEQ ID NO: 68594 - DNA, 120 bp, Artificial Sequence
  ENSG00000075785_8 (sequence is synthesized)
cctctcctcttccaaacaaaacatacattgatctctcacatccagctgccaaaagaaaaccccatcaaacacagttacaccccacatatctctcacacacacacacacacgcacacacac

SEQ ID NO: 68595 - DNA, 120 bp, Artificial Sequence
  ENSG00000075785_9 (sequence is synthesized)
cagcggtggaagtcattctgatatggagttggcattggaagcttattctttttgttcactggagagagagagaactgtttacagttaatctgtgtctaattatctgattttttttattgg

SEQ ID NO: 68596 - DNA, 120 bp, Artificial Sequence
  ENSG00000075785_10 (sequence is synthesized)
tcttgtggtctttttaccccccctttcccctccctccttgaaggctaccccttgggaaggctggtgccccatgccccattacaggctcacacccagtctgatcaggctgagttttgtatg

SEQ ID NO: 68597 - DNA, 120 bp, Artificial Sequence
  ENSG00000075785_11 (sequence is synthesized)
tatctatctgttaatgcttgttacttttaactaatcagatctttttacagtatccatttattatgtaatgcttcttagaaaagaatcttatagtacatgttaatatatgcaaccaattaa

SEQ ID NO: 68598 - DNA, 120 bp, Artificial Sequence
  ENSG00000075785_12 (sequence is synthesized)
aatgtataaattagtgtaagaaattcttggattatgtgtttaagtcctgtaatgcaggcctgtaaggtggagggttgaaccctgtttggattgcagagtgttactcagaattgggaaatc

SEQ ID NO: 68599 - DNA, 120 bp, Artificial Sequence
  ENSG00000075785_13 (sequence is synthesized)
cagctagcggcagtattctgtacagtagacacaagaattatgtacgccttttatcaaagacttaagagccaaaaagcttttcatctctccagggggaaaactgtctagttcccttctgtg

SEQ ID NO: 68600 - DNA, 120 bp, Artificial Sequence
  ENSG00000075785_14 (sequence is synthesized)
tctaaattttccaaaacgttgatttgcataatacagtggtatgtgcaatggataaattgccgttatttcaaaaattaaaattctcattttctttcttttttttcccccctgctccacact

SEQ ID NO: 68601 - DNA, 120 bp, Artificial Sequence
  ENSG00000075785_15 (sequence is synthesized)
tcaaaactcccgttagatcagcattctactacaagagtgaaaggaaaaccctaacagatctgtcctagtgattttacctttgttctagaaggcgctcctttcagggttgtggtattctta

SEQ ID NO: 68602 - DNA, 120 bp, Artificial Sequence
  ENSG00000075785_16 (sequence is synthesized)
ggttagcggagctttttcctcttttccccacccatctccccaatattgcccattattaattaacctctttctttggttggaaccctggcagttctgctcccttcctaggatctgcccctg

SEQ ID NO: 68603 - DNA, 120 bp, Artificial Sequence
  ENSG00000075785_17 (sequence is synthesized)
cattgtagcttgcttaacggagcacttctcctttttccaaaggtctacattctagggtgtgggctgagttcttctgtaaagagatgaacgcaatgccaataaaattgaacaagaacaatg

SEQ ID NO: 68604 - DNA, 120 bp, Artificial Sequence
  ENSG00000075785_18 (sequence is synthesized)
gataattggctgatactcagttaaatttgaatttcagatcaatagtgaatacttttttagtatacttctagtgtatctcagatacgacttgctaagacacactaaaaaattcttcttaaa

SEQ ID NO: 68605 - DNA, 120 bp, Artificial Sequence
  ENSG00000075785_19 (sequence is synthesized)
aaaaaactcagatttatcctttcttgttttttgttgtttttggttttgttgtttgctaaatttggcaacctgcaggtctctgtcttgtgcctctcttgacatccttgcccagtgctttag

SEQ ID NO: 68606 - DNA, 120 bp, Artificial Sequence
  ENSG00000075790_0 (sequence is synthesized)
agacctggaccccggcaccctcccgccggggccgcacttagcagtggaaagtctgtcctcctgaagaagttgcgctccgacctccaagcatcaggtcaaaagtctaactcattctctgac

SEQ ID NO: 68607 - DNA, 120 bp, Artificial Sequence
  ENSG00000075790_1 (sequence is synthesized)
ctgccgccaattagaaaacaactgttgccaataaacgtggtcgcgccgcctgtgacctcagccgggacggacccgcgggcgggagcctgcggggcgtgaggcggggtggggccctggctc

SEQ ID NO: 68608 - DNA, 120 bp, Artificial Sequence
  ENSG00000075790_2 (sequence is synthesized)
ccctcccccgcccagccgcggcgtctgacgtcccgcgcgtcggcggccgcggagcagcgcagggagccaggcgggctgccggcgggtgtgaagaaaaaaatgacactccaatgggctgca

SEQ ID NO: 68609 - DNA, 120 bp, Artificial Sequence
  ENSG00000075790_3 (sequence is synthesized)
gtggcaacctttctttatgccgaaataggactcattttaatcttctgcctaccttttattcctcctcagagatggcagaagattttttcatttaatgtctggggtaaaattgcaactttt

SEQ ID NO: 68610 - DNA, 120 bp, Artificial Sequence
  ENSG00000075790_4 (sequence is synthesized)
tggaacaaggctttccttaccattatcatcctattgattgttctatttctagatgctgtgagagaagtaaggaaatattcctcagttcataccattgagaagagctccaccagcagacct

SEQ ID NO: 68611 - DNA, 120 bp, Artificial Sequence
  ENSG00000075790_5 (sequence is synthesized)
gatgcctatgaacacacacagatgaaactttttaggtctcaaagaaatctttacatttctggattttccctatttttttggctagttttgagacgtctggttacgcttattactcaactg

SEQ ID NO: 68612 - DNA, 120 bp, Artificial Sequence
  ENSG00000075790_6 (sequence is synthesized)
gcaaaagaactgtcaaacaaaggtgtacttaaaactcaagcagaaaatactaacaaggctgccaaaaaatttatggaagaaaacgaaaaactaaaaaggattttgaaaagccatggtaaa

SEQ ID NO: 68613 - DNA, 120 bp, Artificial Sequence
  ENSG00000075790_7 (sequence is synthesized)
gatgaagaatgtgttttggaagcagaaaataaaaaactagtagaagaccaggagaaactgaaaactgaattaaggaagacttcagatgccctttctaaggcacaaaatgatgtgatggaa

SEQ ID NO: 68614 - DNA, 120 bp, Artificial Sequence
  ENSG00000075790_8 (sequence is synthesized)
atgaagatgcagtcagagagactttcgaaagaatatgatcaactcctgaaagaacactctgaacttcaggatcgtttagaaagaggcaacaagaaaagactgtgaactttataaaagaca

SEQ ID NO: 68615 - DNA, 120 bp, Artificial Sequence
  ENSG00000075790_9 (sequence is synthesized)
cttgcaatatactgtgtcaaaatgataattttgttatgttagcctctagaaaatttaagttcagaaaaatgcactatgaccggttcgtaatttttttaatgccacacataggttgtattg

SEQ ID NO: 68616 - DNA, 120 bp, Artificial Sequence
  ENSG00000075790_10 (sequence is synthesized)
taatggcattatcaaaatatttgatgatgtttcagatatattgcaaagtctgtattccagctcttaagaaaaatataagcatgttaaataccatatttacatattgataatgtcattggt

SEQ ID NO: 68617 - DNA, 120 bp, Artificial Sequence
  ENSG00000075790_11 (sequence is synthesized)
atatggtggctgtttaccaataaaaggaaaaaattcattaaccggttgcttccaaaattagaagttttaagttgcatgaaaccattaatagccttgaaagctttgataagttttcagtaa

SEQ ID NO: 68618 - DNA, 120 bp, Artificial Sequence
  ENSG00000075790_12 (sequence is synthesized)
taataacctatttaatcagatgatgatgtgtttgaaaatagtgttcaatatcagcaaatttgtacacagggaatgtaaataaggataactgatcagagttatccactgtatttataagga

SEQ ID NO: 68619 - DNA, 120 bp, Artificial Sequence
  ENSG00000075790_13 (sequence is synthesized)
agagtcggaaaaaacaatgaccttagttttttttaagcctgatgatactatggtttactctaataagatagctatattgataattatatttttgttactgtgcccttgcacattttggtc

SEQ ID NO: 68620 - DNA, 120 bp, Artificial Sequence
  ENSG00000075790_14 (sequence is synthesized)
tttttgttaatatttttattaataacacataattagtaaccactctactgtttcaagttaatctagtaatagagcttacatatatttgtataactgctataccactgaactgaatttatt

SEQ ID NO: 68621 - DNA, 120 bp, Artificial Sequence
  ENSG00000075790_15 (sequence is synthesized)
ttacaacagtgtagaattcttgaaaagttaacgtagaaaatatccaaaaagcagtatttctagaaagtgtccaaaaagcagtatttctttcccttggttgtgagagtaactaattatata

SEQ ID NO: 68622 - DNA, 120 bp, Artificial Sequence
  ENSG00000075790_16 (sequence is synthesized)
aatattacctcaaaaatacatacactggtatcacacagtctttctacaatgtttctgtattctgaaagctaaatattaagtactatttttccattcaaatattcatttagaatttccttt

SEQ ID NO: 68623 - DNA, 120 bp, Artificial Sequence
  ENSG00000075790_17 (sequence is synthesized)
agaagatggcagtgattataatattaatatgatttcatttgttccagtgtttagacatgaaatcatcttccttgtctcatgaaaacctaaatataaaaaaaaggaaaatactggagtttt

SEQ ID NO: 68624 - DNA, 120 bp, Artificial Sequence
  ENSG00000075790_18 (sequence is synthesized)
tatttctcttgtctttgttacatcctctgtttattataattttagcaccaacttcacacctagctaatttttttcatcataaagtggatgaaatgagcaagtacctaaaaattttatttc

SEQ ID NO: 68625 - DNA, 120 bp, Artificial Sequence
  ENSG00000075790_19 (sequence is synthesized)
ggagttactgctaaaaaacagacatgtaggagacattcaacaggagtatgaaatgagagttagaccatatgggctgacaacaccataaataacaagaaaagggagtgctgaaataggaga

SEQ ID NO: 68626 - DNA, 120 bp, Artificial Sequence
  ENSG00000075790_20 (sequence is synthesized)
gaacagagcaaatgttagctcaaagtatagacttagaaatatcaaagtaagagctatctggataaatatatagatattgagtgcttggaatcctagcctactatgtgaaaattaagtcta

SEQ ID NO: 68627 - DNA, 120 bp, Artificial Sequence
  ENSG00000075790_21 (sequence is synthesized)
atgtcagaataacttacagaaaaatagaaaatgcacagctttaaaatgggcagagttaaaatctattcccagctttatcacttatttagccatgctagcctaggcctctatttccttgtc

SEQ ID NO: 68628 - DNA, 120 bp, Artificial Sequence
  ENSG00000075790_22 (sequence is synthesized)
tccaaaatgagaataataaaatttaggtcaggattactatataaactaagataatacagtgattctcaaagttgttcagactgtatagtaaggagaaagtctggttgcactttgaagagc

SEQ ID NO: 68629 - DNA, 120 bp, Artificial Sequence
  ENSG00000075790_23 (sequence is synthesized)
ttgaagatttgaaagattcccaaaaaagcattttaaagtttacatttaagggaccttggacctcaaccctctcaagtttacaagtctgaaactttagacatcaaaagtttgagcagtttt

SEQ ID NO: 68630 - DNA, 120 bp, Artificial Sequence
  ENSG00000075790_24 (sequence is synthesized)
tccaaggcaacattgatagttagattcagggccaggctgtaagtctagaatttagatatcctgatcccccagataccgctcttctggttatacacagaccagctataatttgctaaacat

SEQ ID NO: 68631 - DNA, 120 bp, Artificial Sequence
  ENSG00000075790_25 (sequence is synthesized)
aaaatattgcagtgtattagccggctgtggctccagagtctgtgccctttaccaccgtgcccaactgtttcacatgctgtgtttggtagtttttcctagtactctccttaataatggtgg

SEQ ID NO: 68632 - DNA, 120 bp, Artificial Sequence
  ENSG00000075790_26 (sequence is synthesized)
tgtttagcaaattgtattacataaataaatatttatttcatggattgagttatgttgcatattaaattactttccttcccattgtcaataatgacttctttatgtcttaggctgtattat

SEQ ID NO: 68633 - DNA, 120 bp, Artificial Sequence
  ENSG00000075790_27 (sequence is synthesized)
aaattcaaacacaggaatgttattcttgcctttttccatcagaattacctaaagttttattagactttccccctacttgcaaatctgcctggaggttctggtctttaggaagtagcactt

SEQ ID NO: 68634 - DNA, 120 bp, Artificial Sequence
  ENSG00000075790_28 (sequence is synthesized)
agcaagttctggataagcactccagaatttgggatgagttatccttgttgtttgtccagctctatcttggaccccagtgctgctaattagattcatgccttgttctttagggcataagtt

SEQ ID NO: 68635 - DNA, 120 bp, Artificial Sequence
  ENSG00000075790_29 (sequence is synthesized)
cctctcttggctatttttcctagtatgctgagaactaggattccctttcagtgacagagtcctgccctggaaccccaatcaagagcctaaagtttaactactctctgagatattagcctg

SEQ ID NO: 68636 - DNA, 120 bp, Artificial Sequence
  ENSG00000075790_30 (sequence is synthesized)
atgccagcagcctgcctggatctctaaatattacccattctgggagttgttagtggtctctgctttcctgcagtgtcactcctgcttcctcattgggcctgctagccacagctacttgga

SEQ ID NO: 68637 - DNA, 120 bp, Artificial Sequence
  ENSG00000075790_31 (sequence is synthesized)
tgtacccgaacctgttgccttgccctacctctgtgggctggttcagttctgcattcccattccagtgtccactgccttctcgctatccctcccatctgtgcgccaccaccagcttatccc

SEQ ID NO: 68638 - DNA, 120 bp, Artificial Sequence
  ENSG00000075790_32 (sequence is synthesized)
cagccctgctaacatgacaaactattgtgcatttgagtgcccactatacaatgtgtgaatataaccgtgcttttaagcattgactttaatgtctgggatgatccgtctagagtccatgga

SEQ ID NO: 68639 - DNA, 120 bp, Artificial Sequence
  ENSG00000075790_33 (sequence is synthesized)
accctcctgtgttttttcatccctttcttagtaatcttggaaatccacttatgaaattctttttctaacatttctttgctgaacggcatttttaaaattactttcacggtgtttctttcc

SEQ ID NO: 68640 - DNA, 120 bp, Artificial Sequence
  ENSG00000075790_34 (sequence is synthesized)
agtttgatctctacacaaacacaactttattacttgcaccagaaatgatttcaaacactttaggaactgtggtaggcttaattatgacttcccaaaagatatccctataccaatccctgg

SEQ ID NO: 68641 - DNA, 120 bp, Artificial Sequence
  ENSG00000075790_35 (sequence is synthesized)
aacctggaaatgttctcttctatagcaaaagatatgattaagttaaagtcttgagatggagagattattctgggtaatctgggagtgccctaaatgcagctacatctatgcttatataga

SEQ ID NO: 68642 - DNA, 120 bp, Artificial Sequence
  ENSG00000075790_36 (sequence is synthesized)
agcaaagggagatattaccacacagaagaggagaaagcacagtgaccacagaggcagagattggagtgatggagccgcagcaaaggaatgctgacagccaccagaagctggaggaggcaa

SEQ ID NO: 68643 - DNA, 120 bp, Artificial Sequence
  ENSG00000075790_37 (sequence is synthesized)
agaacagattcttccccagagcctcttccagcaggagcatggccctacagataccgataaaactgatattggacttcctggcctccagaactatgggaataaatttattgtttcaagcta

SEQ ID NO: 68644 - DNA, 120 bp, Artificial Sequence
  ENSG00000075790_38 (sequence is synthesized)
gagcgggagggccgggaagccgggcgttggtggagggaggcgttgggcttctgtcgccgcgaagctggcggaaaaggcagtggccagcgagccgcctcgccagttcccacgactcccagg

SEQ ID NO: 68645 - DNA, 120 bp, Artificial Sequence
  ENSG00000075790_39 (sequence is synthesized)
tccctatttttttggctgtaagtaaaaaataataatagaagcacaatttaaaaacatgacttatgctttcctttctcattttgtccacctttactgtagattttttttttttttaagaga

SEQ ID NO: 68646 - DNA, 120 bp, Artificial Sequence
  ENSG00000075790_40 (sequence is synthesized)
tgtgattatttgttactgctgccatagtaaattaatacaggagcatgcaggacagatctgtaatggcctgaactgaatttcaaggggtgtggaaaacagttactctttaacaccactccg

SEQ ID NO: 68647 - DNA, 120 bp, Artificial Sequence
  ENSG00000075790_41 (sequence is synthesized)
tcttccccattagccatttggataagtcaaagatagccttagccatctcctatcttagttacttttctccttcaactgtattttgccattgtcgttgccattgcctctgcctaactgcaa

SEQ ID NO: 68648 - DNA, 120 bp, Artificial Sequence
  ENSG00000075790_42 (sequence is synthesized)
gccatcatcatctctcacatggactatgacgacctcctcatctccctgtatcttctctaatgcttctctcatatacatgctctcagcagccacctggtttaaaacaaaaacaaaaaaaac

SEQ ID NO: 68649 - DNA, 120 bp, Artificial Sequence
  ENSG00000075790_43 (sequence is synthesized)
actaatcatgtcattccctgcttgtcttcccgttctttccaactgtcattccctgcttgtcttccaattctttccaactgcagttaagatcaaaccaccaagacctcaccaggctcccat

SEQ ID NO: 68650 - DNA, 120 bp, Artificial Sequence
  ENSG00000075790_44 (sequence is synthesized)
ctacttttcagcctcaactcagtccacctgctctgccaatcacacctgtttctttttgttgttctttccctaggatatagatcctggcatacctgcattctgattcttcttggaacaagc

SEQ ID NO: 68651 - DNA, 120 bp, Artificial Sequence
  ENSG00000075790_45 (sequence is synthesized)
caaattctttcccctgtcagtacgtttgcatgtgtagtacatgttgcatcccaggcctgtctgccttcttaccctattttattttcatcatagcacttactaccatctgaaatgatctca

SEQ ID NO: 68652 - DNA, 120 bp, Artificial Sequence
  ENSG00000075790_46 (sequence is synthesized)
tttatggtttgtctcctcagtgattaacacagttcctgcacacagtaaatcagtagttctcaacaggaagtgaagaggtcatcctgaggggaacatttagcaatacctagagacatttct

SEQ ID NO: 68653 - DNA, 120 bp, Artificial Sequence
  ENSG00000075790_47 (sequence is synthesized)
ggttgtcataaccaggggaatgctcctagtggatagaagtcagggaggctgttaaacccattccacaatgcacaggactggaacaaagaatgatctctcactcagaatgtcagtgttgcc

SEQ ID NO: 68654 - DNA, 120 bp, Artificial Sequence
  ENSG00000075790_48 (sequence is synthesized)
aaggtggagacatcctgcagtagatgcttgtggcagagggtactggttgtaccccagtatccattctttcattcacctgtgttaatacatgctccagttttgtatttttttttataaaca

SEQ ID NO: 68655 - DNA, 120 bp, Artificial Sequence
  ENSG00000075790_49 (sequence is synthesized)
gctgtcaagcataaagataacattttccatctccttgtatgtaagtggaaataggactgtcatgtggggccagtttcttttttttcttcctctgtcctgctgcttgaaacatatgctgct

SEQ ID NO: 68656 - DNA, 120 bp, Artificial Sequence
  ENSG00000075790_50 (sequence is synthesized)
atcttagatcatgaggtcgaggccatgcaaagtggagcaacaaggagctgtgtccctgacgccataagcaccacacctgtcctgaattgctgtgaatgacaccagctaactacaatgcat

SEQ ID NO: 68657 - DNA, 120 bp, Artificial Sequence
  ENSG00000075790_51 (sequence is synthesized)
tgtctcaacatcctagacataataaaaagccataaatatgtttgtcctatgcagcacaaaacctttgtatctttgccttttatgttgggatcttaattaaaaattacatcctctactgtc

SEQ ID NO: 68658 - DNA, 120 bp, Artificial Sequence
  ENSG00000075790_52 (sequence is synthesized)
tctatttctagcttttctgcataatggattcaggagtattattcccatttaattaccaaggaagatgaatcacgaagcataatgatccttcatagtactcactatttgcctatttaaaat

SEQ ID NO: 68659 - DNA, 120 bp, Artificial Sequence
  ENSG00000075790_53 (sequence is synthesized)
atctgagaaatgacaaaggggaaatagccattaagatacaggaaattttctaaagatcatttaagagactactttatataactatgcaaataaattggaaaacctagataaaatgtataa

SEQ ID NO: 68660 - DNA, 120 bp, Artificial Sequence
  ENSG00000075790_54 (sequence is synthesized)
ttttgtagaaaaatatgatttaccaaatgaacaccagtagatatagaaaatttaagcagactaatttatatagaaaaattatagaaagttatcaaaaaggacccctatttgaaaaaaaaa

SEQ ID NO: 68661 - DNA, 120 bp, Artificial Sequence
  ENSG00000075790_55 (sequence is synthesized)
gcaaaaaaccagatagttttataagaaaccctactgctttcagaaaacagatattactactgcttcttaaactgttctagaatttaaacttcaaattgtacagagctagaaaaaagcaag

SEQ ID NO: 68662 - DNA, 68 bp, Artificial Sequence
  ENSG00000075790_56 (sequence is synthesized)
ttgtgattccttcccaagaaaatagttgttataatagttgtcatacctgtttctgtggaaaagacccc

SEQ ID NO: 68663 - DNA, 120 bp, Artificial Sequence
  ENSG00000075790_57 (sequence is synthesized)
ttataatagttgtcatacctgtttctgtggaaaagaccccatcccagattatgccagacaccatgccgagagtagggccttgtttgatagcacttcaggacttgatctaatttctgcttg

SEQ ID NO: 68664 - DNA, 120 bp, Artificial Sequence
  ENSG00000075790_58 (sequence is synthesized)
tatccagtttttgaaatatttaatagatgtcatttgttgagagtatgctctggactaagcacttggctaagggcttcgtatatgttgttttgtttactctccatgacagctcaataattg

SEQ ID NO: 68665 - DNA, 120 bp, Artificial Sequence
  ENSG00000075790_59 (sequence is synthesized)
gaaagaatatgatcaactcctgaaagaacactctgaacttcaggtcccactgggcagcttctacatactggccttcgcacctgggctccataaccctcatccctccagcccaagaagtgg

SEQ ID NO: 68666 - DNA, 120 bp, Artificial Sequence
  ENSG00000075790_60 (sequence is synthesized)
agcgcagggagccaggcgggctgccggcgggtgggggaaggtggaacactgtccatcccctggacaaaaacgctgcgcctcggggccttgaacccggttttgtttgaaaggaagcaagag

SEQ ID NO: 68667 - DNA, 120 bp, Artificial Sequence
  ENSG00000075790_61 (sequence is synthesized)
ctgaacttcaggtttttgctaaactacttaactacctccttatgaggaagtggtgagccagcctccaactcctcccccagcatacagtgacttccagctacgcagcagcagcagctcctg

SEQ ID NO: 68668 - DNA, 120 bp, Artificial Sequence
  ENSG00000075790_62 (sequence is synthesized)
cctccacagtgaggcctggcagatggcagtcccccagcgccaatcccaccaggggatccaagggaatcccttgtctgagcccagcagaagcatcacaagacccccaagcatcgctgatcc

SEQ ID NO: 68669 - DNA, 120 bp, Artificial Sequence
  ENSG00000075790_63 (sequence is synthesized)
tgagccctctgacctaccaggtgaccgagtagccaccaaagccctggggatgcagcccagtggctctgtagccagcctgggagagctggacccaggggccttcctggacaaggaggcaga

SEQ ID NO: 68670 - DNA, 120 bp, Artificial Sequence
  ENSG00000075826_0 (sequence is synthesized)
gcccggctccgcgcgagagccctgccagaggagcggctccggccgccgcgcctgacccttgtccggggtcttccgcacagtgggctgagggccatgtcagttttctgccacctacaggat

SEQ ID NO: 68671 - DNA, 120 bp, Artificial Sequence
  ENSG00000075826_1 (sequence is synthesized)
agaccatgaagctgaaggaacttgagcggccagctgtccaggcatggagcccagccagccaataccctttgtatctggccacaggaacatctgcccaacagctagattcctccttcagca

SEQ ID NO: 68672 - DNA, 120 bp, Artificial Sequence
  ENSG00000075826_2 (sequence is synthesized)
caaatggcacattggaaatatttgaggttgatttcagggacccttctctggacttgaaacacagaggagtcctttctgccttgagcaggtttcacaagctggtctgggggagctttggca

SEQ ID NO: 68673 - DNA, 120 bp, Artificial Sequence
  ENSG00000075826_3 (sequence is synthesized)
gtgggcttctggaaagctccggggttattgttggcggcggggacaatggcatgcttattctatacaatgtgacccacatcctgtcttcggggaaggagcctgtgattgctcagaaacaga

SEQ ID NO: 68674 - DNA, 120 bp, Artificial Sequence
  ENSG00000075826_4 (sequence is synthesized)
agcacacgggggctgtcagagccctcgacttgaatcctttccagggcaacctcctggcttcaggggccagcgattctgaaatcttcatttgggatctgaataacttgaatgtgccaatga

SEQ ID NO: 68675 - DNA, 120 bp, Artificial Sequence
  ENSG00000075826_5 (sequence is synthesized)
ccctgggatccaagtcacagcagcctccagaggacatcaaggcactgtcttggaaccggcaagcccaacacattctgtcttctgctcaccccagtggcaaggcagttgtgtgggatctca

SEQ ID NO: 68676 - DNA, 120 bp, Artificial Sequence
  ENSG00000075826_6 (sequence is synthesized)
ggaagaatgaacctatcatcaaagtcagtgatcacagcaacaggatgcactgctcaggcctggcctggcatcctgacatagccacccagttagtgctgtgctcagaggatgatcgacttc

SEQ ID NO: 68677 - DNA, 120 bp, Artificial Sequence
  ENSG00000075826_7 (sequence is synthesized)
ccgtgattcagctgtgggacttgcgctttgcctcctcgcccttgaaggtgctggagagccacagcagggggatcttgtcagtgtcatggagccaggctgatgctgagctgctgctcacta

SEQ ID NO: 68678 - DNA, 120 bp, Artificial Sequence
  ENSG00000075826_8 (sequence is synthesized)
gtgctaaggacagccagatcttgtgccggaacctggggagcagtgaggtggtatataagctaccaacacagagcagctggtgctttgatgtgcagtggtgccctcgggacccttcagtgt

SEQ ID NO: 68679 - DNA, 120 bp, Artificial Sequence
  ENSG00000075826_9 (sequence is synthesized)
tctctgctgcctccttcaacggctggatcagtttgtactctgtgatgggtaggagctgggaagtccagcatatgagacaggctgacaagatctcctcttccttcagcaaaggccagcctc

SEQ ID NO: 68680 - DNA, 120 bp, Artificial Sequence
  ENSG00000075826_10 (sequence is synthesized)
tcccaccactgcaggtgccagagcaagtggcacaagcaccactgatacctcccctgaaaaaaccccccaaatggattagaagaccaacaggtgtttcatttgcttttggagggaagctgg

SEQ ID NO: 68681 - DNA, 120 bp, Artificial Sequence
  ENSG00000075826_11 (sequence is synthesized)
ttacttttggcctccccagcacccctgcccatctggtgccacagccttgcccccgcctagtcttcatcagtcaagtcaccacagaatctgaattcctgatgcgatcagctgagctgcagg

SEQ ID NO: 68682 - DNA, 120 bp, Artificial Sequence
  ENSG00000075826_12 (sequence is synthesized)
aggccttgggatcaggaaatctactgaattactgtcagaacaagagccagcaagctttactgcaaagtgaaaagatgctgtggcagttcctgaaggtgaccttagagcaagactccagaa

SEQ ID NO: 68683 - DNA, 120 bp, Artificial Sequence
  ENSG00000075826_13 (sequence is synthesized)
tgaaattcctaaagcttttaggatacagtaaagatgagcttcagaagaaggtggccacatggttgaagagtgacgtggggctaggtgagagtcctcagcccaagggaaatgacctcaaca

SEQ ID NO: 68684 - DNA, 120 bp, Artificial Sequence
  ENSG00000075826_14 (sequence is synthesized)
gtgacagacaacaggccttctgcagccaggcctccaaacacaccacaaaggaagcctctgcttcctcagccttctttgatgagctggtccctcagaacatgactccttgggagatcccca

SEQ ID NO: 68685 - DNA, 120 bp, Artificial Sequence
  ENSG00000075826_15 (sequence is synthesized)
tcacaaaagatattgatggactcctaagccaggctctcctgcttggggaactgggtccggccgtggagctgtgtctgaaggaggagcgctttgctgatgccattatcctggcccaggctg

SEQ ID NO: 68686 - DNA, 120 bp, Artificial Sequence
  ENSG00000075826_16 (sequence is synthesized)
ggggtacagatctgctgaagcaaacacaggagcgctacttggccaagaagaaaaccaaaatctcctcgcttctagcctgtgttgtgcaaaagaattggaaggatgtggtgtgtacctgta

SEQ ID NO: 68687 - DNA, 120 bp, Artificial Sequence
  ENSG00000075826_17 (sequence is synthesized)
gcctgaagaactggagagaggcactggctttgctactgacatactcaggcacagagaaatttcccgagctctgtgacatgctgggaactcgcatggaacaggagggcagcagggcactaa

SEQ ID NO: 68688 - DNA, 120 bp, Artificial Sequence
  ENSG00000075826_18 (sequence is synthesized)
cctccgaagccagactctgttatgtgtgctcagggagtgtggagcggctggtggagtgctgggcaaaatgccaccaggctttgtcccccatggctctgcaggacctgatggagaaggtga

SEQ ID NO: 68689 - DNA, 120 bp, Artificial Sequence
  ENSG00000075826_19 (sequence is synthesized)
gtcactcagtatgccaacctcctggcagcccagggcagcctggccactgccatgagctttctacccagggactgtgctcagccaccagttcagcagctaagagatcggctttttcatgct

SEQ ID NO: 68690 - DNA, 120 bp, Artificial Sequence
  ENSG00000075826_20 (sequence is synthesized)
caaggttctgctgtcttgggccaacagtctccccctttccccttcccccggattgttgtgggagctaccctccactctaaagagacatcatcttacagattgggatcccagccttctcac

SEQ ID NO: 68691 - DNA, 120 bp, Artificial Sequence
  ENSG00000075826_21 (sequence is synthesized)
caggtcccaactccatctccaaggccaagggttttcacccctcagtcatcaccagcgatgcccttggcaccttcccatcctagcccttatcagggtcccaggacacagaatataagtgac

SEQ ID NO: 68692 - DNA, 120 bp, Artificial Sequence
  ENSG00000075826_22 (sequence is synthesized)
tacagggcacctgggccccaggccatccagcctttgcctttgagccctggggtaaggcctgcttcatctcagccacagctattaggagggcaaagggtgcaagttcctaacccggtggga

SEQ ID NO: 68693 - DNA, 120 bp, Artificial Sequence
  ENSG00000075826_23 (sequence is synthesized)
ttccctgggacatggcctcttcctggttcccctctacccatggcatgcccaggcatcatgcgacctggctctacctccctgcctgagactcctagactgttccctctgcttcctctgaga

SEQ ID NO: 68694 - DNA, 120 bp, Artificial Sequence
  ENSG00000075826_24 (sequence is synthesized)
ccactaggtcccggccgcatggtctcccacaccccagcccctcctgcaagcttccctgtgccataccttccaggggacccaggtgccccatgctctagtgtcctcccaaccactggcatc

SEQ ID NO: 68695 - DNA, 120 bp, Artificial Sequence
  ENSG00000075826_25 (sequence is synthesized)
ttgactcctcacccaggacctcaagattcctggaaagaagccccagcccccaggggaaacctccagaggaacaagctgccagagacatttatgcccccagcaccaattactgctccagtt

SEQ ID NO: 68696 - DNA, 120 bp, Artificial Sequence
  ENSG00000075826_26 (sequence is synthesized)
atgagcctcacccctgagctacaagggattcttccctcacagccccctgtctccagtgtgagtcatgctcccccaggagttccaggagaactcagcctgcagcttcagcacctgccacct

SEQ ID NO: 68697 - DNA, 120 bp, Artificial Sequence
  ENSG00000075826_27 (sequence is synthesized)
gagaagatggaaaggaaggagctgcccccagagcatcagtccttgaagagcagctttgaggcgcttctccaacgctgctccctgtctgcaactgacttaaagacaaaaaggaagctggaa

SEQ ID NO: 68698 - DNA, 120 bp, Artificial Sequence
  ENSG00000075826_28 (sequence is synthesized)
gaggcagcccagcgtctggagtatctatatgagaagctctgtgaggggacactctcacctcatgtcgtggctgggctccatgaggttgcccgatgtgtggatgcaggaagctttgagcag

SEQ ID NO: 68699 - DNA, 120 bp, Artificial Sequence
  ENSG00000075826_29 (sequence is synthesized)
ggccttgcagtgcatgcccaggtggcgggctgtagcagcttcagcgaggtgtccagcttcatgcctatcctgaaggctgtcctcatcatcgctcataagctgctggtctaaaccaggcag

SEQ ID NO: 68700 - DNA, 120 bp, Artificial Sequence
  ENSG00000075826_30 (sequence is synthesized)
cctctcttgctaggaggccacttctgctgttacataactcctccctgcagaagaggggacttctgcaacagattctgtttctttttcccgactcttttccttgctgccaggtatgtgatg

SEQ ID NO: 68701 - DNA, 120 bp, Artificial Sequence
  ENSG00000075826_31 (sequence is synthesized)
ctgtaggcttggctccaaaccagctgagtgcctgctttttactcctttatgtctggccttctaggatctgtccaagacactctcaggcctggaggcagggcatagaatcagttcttcact

SEQ ID NO: 68702 - DNA, 120 bp, Artificial Sequence
  ENSG00000075826_32 (sequence is synthesized)
ctccctaatactacactctgtaaggacctggggcaggatatcttctcccccagggatcttctatttaagtggcttctgagagggtgaacaggattgttacttttaagcctacctctgctg

SEQ ID NO: 68703 - DNA, 120 bp, Artificial Sequence
  ENSG00000075826_33 (sequence is synthesized)
tgacccatcatgtgggtcttttgtttctcccttctgtggtttatgagcctgcccttaccttttccctgcctctgacttggtatttccaggtccgtatttctctgtagcccagggtctggg

SEQ ID NO: 68704 - DNA, 120 bp, Artificial Sequence
  ENSG00000075826_34 (sequence is synthesized)
gtagagctgactgctgttcaccctttgaacaactcatggacgtgagggatgggtgctgagcagaaccaagagaggaaactttggcgctgttaaaatggaatttctcatctgccggcatta

SEQ ID NO: 68705 - DNA, 120 bp, Artificial Sequence
  ENSG00000075826_35 (sequence is synthesized)
ttaagggtgggctaggttggatggaaggtgaaagggatgaactgccttttgctggaagctgtcttaggctgtgagacaggagcaggggaaccacagcctatggggaactgcccttgactc

SEQ ID NO: 68706 - DNA, 120 bp, Artificial Sequence
  ENSG00000075826_36 (sequence is synthesized)
cacctatgttggagccttagcccaaggccattccttctgtgatgataaagcccagttctggaattggagccatattaaggaatgattctcttccagcgctgctcctcaagggttgggggt

SEQ ID NO: 68707 - DNA, 120 bp, Artificial Sequence
  ENSG00000075826_37 (sequence is synthesized)
ccttctccctcgcagccaccacatgtctcagggctaccttctccgattggatttgcatttgtggcactgtctttgatgcagtgatgtacttaatggtgcaataaagctgcttcgatttgg

SEQ ID NO: 68708 - DNA, 120 bp, Artificial Sequence
  ENSG00000075826_38 (sequence is synthesized)
atgaaattcctaaagcttttaggatacagtaaagatgagcttcagaagaaggtaagctgcttttcacatcagaaacatgtacttgttgaagagaagaagagaatgttgccagagtaaacc

SEQ ID NO: 68709 - DNA, 120 bp, Artificial Sequence
  ENSG00000075826_39 (sequence is synthesized)
aggctgacaaggtttgaagggcttggtagagaatgctggagggaaggggctgtctctgtttgtgggagagagacatatggcttgagaagcggagatattggagattgggagaccagggcc

SEQ ID NO: 68710 - DNA, 120 bp, Artificial Sequence
  ENSG00000075826_40 (sequence is synthesized)
cggggtttgggagggctgcacctttgccctagtgcccatcttcctgaaaggatgttagtttctgccacaatgtgaagaaggccttcaccttgactcttgttattggatgggccctgtagt

SEQ ID NO: 68711 - DNA, 120 bp, Artificial Sequence
  ENSG00000075826_41 (sequence is synthesized)
atttcagggaccgtgggacccctttgctgggacagttatttcaagagtatgactcttatctttctctcttctatagatccattttgtgccacactccattgtagactttgaatgtagtag

SEQ ID NO: 68712 - DNA, 120 bp, Artificial Sequence
  ENSG00000075826_42 (sequence is synthesized)
tctttccaagagcctacttgcatgggagtcccaccctcgctaccactcacttccccatcccctggaatatgggagtctgacctttctaggtcaaattgggtgtctcaaggattcctccca

SEQ ID NO: 68713 - DNA, 120 bp, Artificial Sequence
  ENSG00000075826_43 (sequence is synthesized)
actcgttctaagagtttctgggaggcagatgaaagttggggagagcaaaagacaccacaagaagggatgggagtgctgtttatcacagtagagctttcgcagggttgggtagggcattgg

SEQ ID NO: 68714 - DNA, 120 bp, Artificial Sequence
  ENSG00000075826_44 (sequence is synthesized)
gcccagcaaagagggaggaagagtaggaccccagacataccattgtcctttttatggaggggggggtcagctttgttctccctgtatgtggctctgccatgcagttgggggtctggtctt

SEQ ID NO: 68715 - DNA, 120 bp, Artificial Sequence
  ENSG00000075826_45 (sequence is synthesized)
ggcacttggaatatattgtgaacaaaactgatgaaaattcccaacttccatagaacatagattcagttctttttataataaataactgtttattgaactactaggctcttaggacataaa

SEQ ID NO: 68716 - DNA, 120 bp, Artificial Sequence
  ENSG00000075826_46 (sequence is synthesized)
gctcttaggacataaaggtgcaaaaattgtgatacttgccctcaagtagctcatagtgtagtcgaaagatagatatgtaaaaaatagctacagtaggcctggcgtggtggctcacgcctg

SEQ ID NO: 68717 - DNA, 64 bp, Artificial Sequence
  ENSG00000075826_47 (sequence is synthesized)
ggaggccaaagcgggcagatcatgaggtttggagaatgatctgggcatggtggcacgtgcctgt

SEQ ID NO: 68718 - DNA, 120 bp, Artificial Sequence
  ENSG00000075826_48 (sequence is synthesized)
agaggagcggctccggccgccgcgcctgacccttgtccggggtcttccgcacagatgctccctggatctggctgttaagtttgctggtttctattttcagtgggctgagggccatgtcag

SEQ ID NO: 68719 - DNA, 120 bp, Artificial Sequence
  ENSG00000075826_49 (sequence is synthesized)
cagcctgcaggtgacaaggacaatgtattcccctcccttgggaaaccttccagccctccttgggtgcaggtcatggtagatgggcctcattcctcaaggcatgtgctgagggagactggg

SEQ ID NO: 68720 - DNA, 120 bp, Artificial Sequence
  ENSG00000075826_50 (sequence is synthesized)
ggcaggtaccaggtgtccttactgcagagaaagggaggctgctcatctccccaactctgctgtaatgggaacagtgtgactgtgagtcactggggactagtccttagggaagccatgaga

SEQ ID NO: 68721 - DNA, 120 bp, Artificial Sequence
  ENSG00000075826_51 (sequence is synthesized)
gtacagctagctgtgctcccactgcctcctacacttccaccatcaccatggccaaaggaagcccagtgtcttttcttcccataggtgtcactgacctgggttccccacaaaatacgtgca

SEQ ID NO: 68722 - DNA, 120 bp, Artificial Sequence
  ENSG00000075826_52 (sequence is synthesized)
tcttgcctggactgggccccagaacttaagtcttcccttatcccttccatgctgccagggtaggagctgggttgggctcactaacctaagggtcattccctccacagctctcacctcatg

SEQ ID NO: 68723 - DNA, 120 bp, Artificial Sequence
  ENSG00000075826_53 (sequence is synthesized)
ttcgtacctttggcaatataccaaagtgttgtgttgcttatttcaatgctatgggattgttttgaaggtcaaataaggaatatagttaaaagtattttgtaaattatagatttccatata

SEQ ID NO: 68724 - DNA, 120 bp, Artificial Sequence
  ENSG00000075826_54 (sequence is synthesized)
catgtattaatcatttattatttttttattgcaatcctgtttctccctgatatgctctgagttgctcctgaaatgaagtttagtgacaaatgacctatttctgttctgcttcagcttcat

SEQ ID NO: 68725 - DNA, 120 bp, Artificial Sequence
  ENSG00000075826_55 (sequence is synthesized)
ctctcactactttgggagtctttcctcaagtcagagggctagggccctgttgggtggagggtggctgggagtgtagatggtctgcagagggaggtatggtgaactccaactcaaagaatg

SEQ ID NO: 68726 - DNA, 120 bp, Artificial Sequence
  ENSG00000075826_56 (sequence is synthesized)
cttccagccttcagataaaaaacttccagtgtttttcactatgcgccgaaaaacctctatctttttattctataggacctcaagattcctggaaagaagccccagcccccaggggaaacc

SEQ ID NO: 68727 - DNA, 120 bp, Artificial Sequence
  ENSG00000075826_57 (sequence is synthesized)
tccagaggaacaaggtcaatgcatctttccctacccactccctcgcacattcaccaatgaccacgttctaattccttggaggattcagtcagtccttccccttctcagactgtccccgcc

SEQ ID NO: 68728 - DNA, 120 bp, Artificial Sequence
  ENSG00000075826_58 (sequence is synthesized)
ctcctcccacttactcttctttcctcagaaccctcttctttctctttccctcttacacacatacaccagtctcctcacttcccagtttcccacactcactcttctgtctccttgttcact

SEQ ID NO: 68729 - DNA, 120 bp, Artificial Sequence
  ENSG00000075826_59 (sequence is synthesized)
gtcattcctgccactccccaaaaccagagccatggagtctctcaggttagactcatgtctttccttctgtctctttagctgccagagacatttatgcccccagcaccaattactgctcca

SEQ ID NO: 68730 - DNA, 120 bp, Artificial Sequence
  ENSG00000075826_60 (sequence is synthesized)
atttagtttggagccaagcacactgagtgatatagagatatagagggtgtgctgtgggccctgcagggggcaggaagttggggtttgagagcaactaatgcacaggggatgcttctgcct

SEQ ID NO: 68731 - DNA, 120 bp, Artificial Sequence
  ENSG00000075826_61 (sequence is synthesized)
gtgtgactccagcatggagtcaaaggatgcatgcaggagggaggtggaggagcagactgagctgtgggaggcgaggcaatgttgtcagggctagaatctggctcagccaggaggcaggga

SEQ ID NO: 68732 - DNA, 120 bp, Artificial Sequence
  ENSG00000075856_0 (sequence is synthesized)
gagtcattagaagcgcaagatggcgactgcggccgaaacctcggcttcagaacccgaggctgagtccaaggctgggcccaaggctgacggagaggaggatgaggttaaggcggctaggac

SEQ ID NO: 68733 - DNA, 120 bp, Artificial Sequence
  ENSG00000075856_1 (sequence is synthesized)
aaggaggaaggtgttatcgcgggctgtggccgctgcgacatacaagaccatggggccagcgtgggatcagcaggaggaaggcgtgagcgagagcgatggggatgagtacgccatggcttc

SEQ ID NO: 68734 - DNA, 120 bp, Artificial Sequence
  ENSG00000075856_2 (sequence is synthesized)
ctccgcggagagctcccccggggagtacgagtgggaatatgacgaagaggaggagaaaaaccagctggagattgagagactggaggagcagttgtctatcaacgtctatgactacaactg

SEQ ID NO: 68735 - DNA, 120 bp, Artificial Sequence
  ENSG00000075856_3 (sequence is synthesized)
ccatgtggacttgatcagactgctcaggctggaaggggagcttaccaaggtgaggatggcccgccagaagatgagtgaaatctttcccttgactgaagagctctggctggagtggctgca

SEQ ID NO: 68736 - DNA, 120 bp, Artificial Sequence
  ENSG00000075856_4 (sequence is synthesized)
tgacgagatcagcatggcccaggatggcctggacagagagcacgtgtatgacctctttgagaaagccgtgaaggattacatttgtcctaacatttggctagagtatggccagtactcagt

SEQ ID NO: 68737 - DNA, 120 bp, Artificial Sequence
  ENSG00000075856_5 (sequence is synthesized)
tggtgggattggtcagaaaggtggccttgagaaagttcgctccgtgtttgaaagggctctctcgtctgttggtttacatatgaccaaaggactcgccctctgggaggcttaccgagagtt

SEQ ID NO: 68738 - DNA, 120 bp, Artificial Sequence
  ENSG00000075856_6 (sequence is synthesized)
tgaaagtgcgattgtggaagctgctcggcttgagaaagtccacagtcttttccggcgacagttggcgatcccactctatgatatggaggccacatttgcagagtatgaagaatggtcaga

SEQ ID NO: 68739 - DNA, 120 bp, Artificial Sequence
  ENSG00000075856_7 (sequence is synthesized)
agacccaataccagagtcagtaattcagaactataacaaagcactacagcagctggagaaatataaaccctatgaagaagcactgttgcaggcagaggcaccaaggctggcagaatatca

SEQ ID NO: 68740 - DNA, 120 bp, Artificial Sequence
  ENSG00000075856_8 (sequence is synthesized)
agcatatatcgattttgagatgaaaattggcgatcctgctcgcattcagttgatctttgagcgcgccctggtcgagaactgccttgtcccagacttatggatccgttacagtcagtacct

SEQ ID NO: 68741 - DNA, 120 bp, Artificial Sequence
  ENSG00000075856_9 (sequence is synthesized)
agatcgacaactgaaagtaaaggatttggttttatctgtacataaccgcgctattagaaactgcccctggacagttgccttatggagtcggtacctcttggccatggagagacatggagt

SEQ ID NO: 68742 - DNA, 120 bp, Artificial Sequence
  ENSG00000075856_10 (sequence is synthesized)
tgatcatcaagtaatttctgtaaccttcgagaaagctttgaatgccggcttcatccaggccactgattatgtggagatttggcaggcataccttgattacctgaggagaagggttgattt

SEQ ID NO: 68743 - DNA, 120 bp, Artificial Sequence
  ENSG00000075856_11 (sequence is synthesized)
caaacaagactccagtaaagagctggaggagttgagggccgcctttactcgtgccttggagtatctgaagcaggaggtggaagagcgtttcaatgagagtggtgatccaagctgcgtgat

SEQ ID NO: 68744 - DNA, 120 bp, Artificial Sequence
  ENSG00000075856_12 (sequence is synthesized)
tatgcagaactgggctaggattgaggctcgactgtgcaataacatgcagaaagctcgggaactctgggatagcatcatgaccagaggaaatgccaagtacgccaacatgtggctagagta

SEQ ID NO: 68745 - DNA, 120 bp, Artificial Sequence
  ENSG00000075856_13 (sequence is synthesized)
ttacaacctggaaagagctcatggtgacacccagcactgccggaaggctctgcaccgggccgtccagtgcaccagtgactacccagagcacgtctgcgaagtgttactcaccatggagag

SEQ ID NO: 68746 - DNA, 120 bp, Artificial Sequence
  ENSG00000075856_14 (sequence is synthesized)
gacagaaggttctttagaagattgggatatagctgttcagaaaactgaaacccgattagctcgtgtcaatgagcagagaatgaaggctgcagagaaggaagcagcccttgtgcagcaaga

SEQ ID NO: 68747 - DNA, 120 bp, Artificial Sequence
  ENSG00000075856_15 (sequence is synthesized)
agaagaaaaggctgaacaacggaaaagagctcgggctgagaagaaagcgttaaaaaagaagaaaaagatcagaggcccagagaagcgcggagcagatgaggatgatgagaaagagtgggg

SEQ ID NO: 68748 - DNA, 120 bp, Artificial Sequence
  ENSG00000075856_16 (sequence is synthesized)
cgatgatgaagaagagcagccttccaaacgcagaagggtcgagaacagcatccctgcagctggagaaacacaaaatgtagaagtagcagcagggcccgctgggaaatgtgctgccgtaga

SEQ ID NO: 68749 - DNA, 120 bp, Artificial Sequence
  ENSG00000075856_17 (sequence is synthesized)
gcagcaaggacagcatcaccgtctttgtcagcaacctgccctacagcatgcaggagccggacacgaagctcaggccactcttcgaggcctgtggggaggtggtccagatccgacccatct

SEQ ID NO: 68750 - DNA, 120 bp, Artificial Sequence
  ENSG00000075856_18 (sequence is synthesized)
tcagcaaccgtggggatttccgaggttactgctacgtggagtttaaagaagagaaatcagcccttcaggcactggagatggaccggaaaagtgtagaagggaggccaatgtttgtttccc

SEQ ID NO: 68751 - DNA, 120 bp, Artificial Sequence
  ENSG00000075856_19 (sequence is synthesized)
cctgtgtggataagagcaaaaaccccgattttaaggtgttcaggtacagcacttccctagagaaacacaagctgttcatctcaggcctgcctttctcctgtactaaagaggaactagaag

SEQ ID NO: 68752 - DNA, 120 bp, Artificial Sequence
  ENSG00000075856_20 (sequence is synthesized)
aaatctgtaaggctcatggcaccgtgaaggacctcaggctggtcaccaaccgggctggcaaaccaaagggcctggcctacgtggagtatgaaaatgaatcccaggcgtcgcaggctgtga

SEQ ID NO: 68753 - DNA, 120 bp, Artificial Sequence
  ENSG00000075856_21 (sequence is synthesized)
tgaagatggacggcatgactatcaaagagaacatcatcaaagtggcaatcagcaaccctcctcagaggaaagttccagagaagccggagaccaggaaggcaccaggtggccccatgcttt

SEQ ID NO: 68754 - DNA, 120 bp, Artificial Sequence
  ENSG00000075856_22 (sequence is synthesized)
tgccgcagacatacggagcgagggggaagggaaggacgcagctgtctctactgcctcgtgccctgcagcgcccaagtgctgcagctcctcaggctgagaacggccctgccgcggctcctg

SEQ ID NO: 68755 - DNA, 120 bp, Artificial Sequence
  ENSG00000075856_23 (sequence is synthesized)
cagttgccgccccagcagccaccgaggcacccaagatgtccaatgccgattttgccaagctgtttctgagaaagtgaacgggacgctgggagacaggaaatgccttacttcactctggcc

SEQ ID NO: 68756 - DNA, 120 bp, Artificial Sequence
  ENSG00000075856_24 (sequence is synthesized)
cggcggacctcccaccacccagcagtgcactggggatggacaggcctggtgtgctgcgtgctcgcaaccacagatggctcctcggctttagacagaaaggggaaggggttctaagtcaag

SEQ ID NO: 68757 - DNA, 120 bp, Artificial Sequence
  ENSG00000075856_25 (sequence is synthesized)
agcctttcagtgctccctcatattgagggcagtggcagaaaagtgaccactctgcaggctgggcccaggatgtggtgtcctgagatagttttgtatcttaaagactgaggcacagaagcg

SEQ ID NO: 68758 - DNA, 120 bp, Artificial Sequence
  ENSG00000075856_26 (sequence is synthesized)
aaacgagaacacactgtttttgagacacagttgtccaaatgtttctggccagctccggcccctttttgtatgacacttctcttccaccctgcacagcacatgtgcccgtcattcttttaa

SEQ ID NO: 68759 - DNA, 120 bp, Artificial Sequence
  ENSG00000075856_27 (sequence is synthesized)
ttttaaaagatgaaatggcagatgctagtaattcacagaatggcctcttgtgggggtgggtctgagggaagtcagctataaaacatttgctggagttttgttcaatggggctgtgcattt

SEQ ID NO: 68760 - DNA, 120 bp, Artificial Sequence
  ENSG00000075856_28 (sequence is synthesized)
ttatattatgtgtttgtaaatgacatgtcagccattgtttcatgtttcctaaaagcagaatatttgcaacatttgttttgtataggaattatttgtgccacctgctgtggactgttttct

SEQ ID NO: 68761 - DNA, 120 bp, Artificial Sequence
  ENSG00000075856_29 (sequence is synthesized)
ttgcctagtgactagtgacctgtgttgtctaaacatgagtttcagccctttggttttgtttaataccatgtcaaatgcaaacttcaattctccccatttagctttattaaactgacgttc

SEQ ID NO: 68762 - DNA, 120 bp, Artificial Sequence
  ENSG00000075856_30 (sequence is synthesized)
tcttcaaaacttcttgctgaatggtactcagatgtgcattcacatacagatgtgttttgaagtgggtgtaccttgctttacctaatagatgtgtaaatagaacttttgtaagtcaaatcc

SEQ ID NO: 68763 - DNA, 120 bp, Artificial Sequence
  ENSG00000075856_31 (sequence is synthesized)
cattgtcactttgatttaaattattccagctgtgatgtgtcttcattttatagcagtttgacactggagcttttgagcttttttacctcacatcttttatcaaataatatttactgcttt

SEQ ID NO: 68764 - DNA, 120 bp, Artificial Sequence
  ENSG00000075856_32 (sequence is synthesized)
gaaaacagcaacagcattggccagttcagtaggggaagcttgctttattaagacactctggagaaagacgtcagggaatccttgtatatgtcgtgggaatcaactcctcatttatctgtt

SEQ ID NO: 68765 - DNA, 120 bp, Artificial Sequence
  ENSG00000075856_33 (sequence is synthesized)
gcgtaagtttaagtttttgtgcatcagtcgggttttctatatttttttaacttaacattttttaatataaccgattaaaaagtagacagaacagtaaaataaactcctgtgtgcctacca

SEQ ID NO: 68766 - DNA, 120 bp, Artificial Sequence
  ENSG00000075856_34 (sequence is synthesized)
gatggaaaacagcttgcagcatatagggggctacttaagaaagagtggcataggaggggggccgggggcgccctctgaggaagtgaagtttatacctgaagtatgaaaaggggtggctag

SEQ ID NO: 68767 - DNA, 120 bp, Artificial Sequence
  ENSG00000075856_35 (sequence is synthesized)
tgaatgctgtaaaggcagaatgctggttgcagatcacaatatcaggtacactttccagtagcccctacatggctgagggagagagtgcttcagggaaatacttcgtaggtgactgtagag

SEQ ID NO: 68768 - DNA, 120 bp, Artificial Sequence
  ENSG00000075856_36 (sequence is synthesized)
actctggaaggagaaagcatcatggatagatctgaaagctaaggtcttctcagaagctagagttactgaagagtgagtttctacctgggagaagacggcctctcccttcgagtgccttcc

SEQ ID NO: 68769 - DNA, 120 bp, Artificial Sequence
  ENSG00000075856_37 (sequence is synthesized)
atagttgtggggtgctttttatgtgtgtctgttggaagtgtgttgtatgatgggtgtcgacgtcataaggttcaggtctcctaacagcctgctgatgcactttaggctcgactgtgcaat

SEQ ID NO: 68770 - DNA, 120 bp, Artificial Sequence
  ENSG00000075856_38 (sequence is synthesized)
gttatacaatgtttaggggcatccctggcttctagccctgaaatgccagtagcagcttcaccaccacaaccaaacatgacaaccagaaatgtctcttaacattgccaaatgtctcttgat

SEQ ID NO: 68771 - DNA, 120 bp, Artificial Sequence
  ENSG00000075856_39 (sequence is synthesized)
gggcaggatccctcctttgagagtcactgtgctctagtacaacatctatccaacaaaggagcttggagaggcaaatggctcaatgtgtcctttgcatcccttgttaaatttcagagcctt

SEQ ID NO: 68772 - DNA, 120 bp, Artificial Sequence
  ENSG00000075856_40 (sequence is synthesized)
cagtgttagctagaaccaatagaaaaataatgtgaacttatctgtgggtattggtctggattttgggtatggacccctcagaactggcttgcaaagaccaccaaaaaataagaaataaat

SEQ ID NO: 68773 - DNA, 120 bp, Artificial Sequence
  ENSG00000075856_41 (sequence is synthesized)
acttttgcattagaacgttcgttttcatattctttgccatttagagcccttaatagatcatattctggttttcaagtctctcctgaaaggagagggacattttaaacccacttagaagga

SEQ ID NO: 68774 - DNA, 120 bp, Artificial Sequence
  ENSG00000075856_42 (sequence is synthesized)
agcttcctgttaggacagaaaagccaagatgtgctgttccttgtggtaatcactgtggttccactggagcaaggcgtccagagcaggatgcaagcctaggcagtgacctctgcctggtac

SEQ ID NO: 68775 - DNA, 120 bp, Artificial Sequence
  ENSG00000075856_43 (sequence is synthesized)
tggccaatttacacttgtcatttatttcagacagaaataaggcagtgattattttaaagtcccctttgccagttggatctgtgtgtttacaaagaaatctcatacccatgtgtgtgccag

SEQ ID NO: 68776 - DNA, 120 bp, Artificial Sequence
  ENSG00000075856_44 (sequence is synthesized)
tctacggccctagctatgatccacataagctgtgctgttcgctggtttgggatgaggaggagatagcagaattgccaggtgactggtgaggtctgagaggtgatagtcacactgatcccc

SEQ ID NO: 68777 - DNA, 120 bp, Artificial Sequence
  ENSG00000075856_45 (sequence is synthesized)
atggaagaggtcgtataaatttttttagcttgaactgaaaatttgttgagatattttttgaagtagaaagaaccagagttggccaagtgcggtggctcatgcttgtaattccagcagttt

SEQ ID NO: 68778 - DNA, 120 bp, Artificial Sequence
  ENSG00000075856_46 (sequence is synthesized)
gggaggctgaggccagaggatcacttgagttcaggagtacaagaccagcctgggcaatgtagtgagtccccatctctacaagaactaaaacattagctgggcatgatggcgtatgcctgt

SEQ ID NO: 68779 - DNA, 120 bp, Artificial Sequence
  ENSG00000075856_47 (sequence is synthesized)
caccacactccagccagggtgacagcaagaacccttctcaaaagaaaaagaaagaaccacagtttgtcatttactactaatttgcttctttagcccgtagctggcttcctttcccctttt

SEQ ID NO: 68780 - DNA, 120 bp, Artificial Sequence
  ENSG00000075856_48 (sequence is synthesized)
cttctgtccgaagttgtgacggaacgcatgccattataatgagtttttatatctggtgggagcttttacagggtataaaataatgtgaatttagtgtatgtggagattttcctgttatct

SEQ ID NO: 68781 - DNA, 120 bp, Artificial Sequence
  ENSG00000075856_49 (sequence is synthesized)
tcttccagtctttcaggtcctcgggtccccatgtcctggcccgcctccctagtcctcggcggcgataaagccgccaaggctgcaaacccgcttttcgtgacagtagctcctgtcggattt

SEQ ID NO: 68782 - DNA, 120 bp, Artificial Sequence
  ENSG00000075856_50 (sequence is synthesized)
gagtgcttactgcctgcccattgccttgcaaacgttatctcattgaatcctcgccacgaccctgtgaaggaagccctgttatctatccccattttactggaggaaactgaggctcgtgga

SEQ ID NO: 68783 - DNA, 120 bp, Artificial Sequence
  ENSG00000075856_51 (sequence is synthesized)
ggaaagtttcttgctcaagataacacttcctgcaagtcaggccttgtactttgatcccattccagaactcccactcttaaccacacgtccaacagtagaaataaactcattcgcaagaga

SEQ ID NO: 68784 - DNA, 120 bp, Artificial Sequence
  ENSG00000075856_52 (sequence is synthesized)
gtgttattttgttatgtaggaatgacggcgatgatgaaacttgtggtaagaaaaatattgaccgcgatggtgataatagaaatggaaaggtttctggttctggaggttaaggcctcagtt

SEQ ID NO: 68785 - DNA, 120 bp, Artificial Sequence
  ENSG00000075856_53 (sequence is synthesized)
ctagctgttcaactcttgtatgtgcttgtaagaatttcttaatttctctcaccctctcgacttccttatctgcagattgggagcaacaatttctgcataatataattgttgtaacagtaa

SEQ ID NO: 68786 - DNA, 120 bp, Artificial Sequence
  ENSG00000075856_54 (sequence is synthesized)
agcaatttctgtctttaacaagtcatgatgtggattgtaaagcaagagagtaatcgtttatactggctcctgccagcctttttagtcttagctctcatttctcctttcaggtctttttat

SEQ ID NO: 68787 - DNA, 120 bp, Artificial Sequence
  ENSG00000075856_55 (sequence is synthesized)
ttatcctaaatacttcttgaaataagtctgctgtgttttagaaaaatctttgtacctctgtgggatcctttgccccttcatgtccccccgaaaacaaccagaaaacccctaacttgtact

SEQ ID NO: 68788 - DNA, 120 bp, Artificial Sequence
  ENSG00000075884_0 (sequence is synthesized)
agttaggagttgatggcagtttcaataacaggtcattgccgagaaaaggatagcactataatatgcagaaatctacaaattctgatacttccgtggaaacactgaattctacccgccaag

SEQ ID NO: 68789 - DNA, 120 bp, Artificial Sequence
  ENSG00000075884_1 (sequence is synthesized)
gcacaggagctgtgcaaatgagaatcaaaaatgccaacagccaccatgacaggctcagccaaagtaaatccatgatcctcaccgatgtcgggaaggtcactgaacctatatccagacaca

SEQ ID NO: 68790 - DNA, 120 bp, Artificial Sequence
  ENSG00000075884_2 (sequence is synthesized)
gaaggaatcattcacagcatatcttgaaagatgtcattcctccattggaacaactgatggttgaaaaagaaggttatctgcaaaaagctaaaattgcagatggaggaaagaaactaagga

SEQ ID NO: 68791 - DNA, 120 bp, Artificial Sequence
  ENSG00000075884_3 (sequence is synthesized)
aaaactggtctacttcctggattgttctttctagtcgaagaattgaattttacaaagaatccaagcaacaggctctgtccaatatgaaaactgggcacaaaccagaaagtgtggatttgt

SEQ ID NO: 68792 - DNA, 120 bp, Artificial Sequence
  ENSG00000075884_4 (sequence is synthesized)
gtggagcacacattgaatgggccaaggaaaaatcgagcagaaagaatgtctttcagatcacaacagtatcaggaaatgagttccttctacagtcagatattgacttcatcatattggatt

SEQ ID NO: 68793 - DNA, 120 bp, Artificial Sequence
  ENSG00000075884_5 (sequence is synthesized)
ggttccacgctatcaaaaatgcaattgacagattgccaaaggattcaagttgtccatcaagaaacctggaattattcaaaatccaaagatcctctagcactgaattgctaagtcactacg

SEQ ID NO: 68794 - DNA, 120 bp, Artificial Sequence
  ENSG00000075884_6 (sequence is synthesized)
aagtttattacccgaagaccttccctgaaaactctgcaagaaaaaggacttattaaagatcaaatttttggctctcatctgcacaaagtgtgtgaacgtgaaaattccacagttccgtgg

SEQ ID NO: 68795 - DNA, 120 bp, Artificial Sequence
  ENSG00000075884_7 (sequence is synthesized)
tttgtaaagcaatgcattgaagctgttgagaaaagaggtctagatgttgatggaatatatcgagttagtggcaatctggcaacaatacagaagttaagatttattgtcaaccaagaagag

SEQ ID NO: 68796 - DNA, 120 bp, Artificial Sequence
  ENSG00000075884_8 (sequence is synthesized)
aagctgaatttggacgacagccagtgggaggacatccacgttgtcaccggagcactgaagatgtttttccgggagctgcctgagccgctcttcccttacagtttctttgagcagtttgtg

SEQ ID NO: 68797 - DNA, 120 bp, Artificial Sequence
  ENSG00000075884_9 (sequence is synthesized)
gaagcgatcaaaaagcaagacaacaacacaagaattgaagctgtaaaatctcttgtacaaaaactccctccgccaaatcgtgacaccatgaaagtcctctttggacatctaactaagata

SEQ ID NO: 68798 - DNA, 120 bp, Artificial Sequence
  ENSG00000075884_10 (sequence is synthesized)
gtggccaaagcctccaagaacctcatgtccacgcaaagcttggggattgtatttggacctacccttctgcgagctgaaaatgaaacaggaaacatggcgatccacatggtctaccagaac

SEQ ID NO: 68799 - DNA, 120 bp, Artificial Sequence
  ENSG00000075884_11 (sequence is synthesized)
cagatagctgagctcatgctgagtgagtacagtaagatcttcggctcagaggaagactgacagacaagacaagctactgaatacgttcacatctgtcttgatgcctaatatttttacatt

SEQ ID NO: 68800 - DNA, 120 bp, Artificial Sequence
  ENSG00000075884_12 (sequence is synthesized)
tctgtaaacatatttctgaaatattttttgcctttcaagcgacagatgcctcattttgtgaaaacttaatgatgattttgtgtttaagttccaaacatttgaataaaataattgacaata

SEQ ID NO: 68801 - DNA, 120 bp, Artificial Sequence
  ENSG00000075884_13 (sequence is synthesized)
aggcaagagtttccaaatgcgtacatctcgtattttcccttgtagctgaactaggtctttctgcagaagctggagaatgtgttagggataggaaggacaatctacaaaaggaacttctga

SEQ ID NO: 68802 - DNA, 120 bp, Artificial Sequence
  ENSG00000075884_14 (sequence is synthesized)
aataacttatttttcaaggccctttcaactagtatatgtttgctgattgcttgtcagaaccatcgcctggaccctgggatgggtcatcttgactttgttatctaacataatgaaagaaca

SEQ ID NO: 68803 - DNA, 120 bp, Artificial Sequence
  ENSG00000075884_15 (sequence is synthesized)
tgaaatgattcagacatggattcaaaactcagccccaccatgtaccacgtgctggggccacaaataagttacttaaaccctctgcaaccaatttcctcatctgtaaaatgttggctcaga

SEQ ID NO: 68804 - DNA, 120 bp, Artificial Sequence
  ENSG00000075884_16 (sequence is synthesized)
attgaacaaagtattttgaggtgcatttgtgtgtgcttgatacttgctccttttgattcaggtcagaatattaaatataagctcagtttctacaactggtttggcagaaatcaaatccga

SEQ ID NO: 68805 - DNA, 120 bp, Artificial Sequence
  ENSG00000075884_17 (sequence is synthesized)
tcatgggatttggcaaatctccatttttggttaaacaaaacccatttgatggattgcatcatagagaagaagctctgcaatttagaacatccattcatttattctctcaacagttaacaa

SEQ ID NO: 68806 - DNA, 120 bp, Artificial Sequence
  ENSG00000075884_18 (sequence is synthesized)
ttttctttttgttttgttttgtttttacattaggggcaacagaaatattcaaatgaatagtatatgatccctgctcttaaagtactcacaatatggtaaaagagacataattttgtatag

SEQ ID NO: 68807 - DNA, 120 bp, Artificial Sequence
  ENSG00000075884_19 (sequence is synthesized)
taaaagagacataattttgtataggtttattataataaaaccatgactaaagtgttaaaaaatattagacaacatgccatggaaccatagatttagctataggtagtctttttccagaga

SEQ ID NO: 68808 - DNA, 120 bp, Artificial Sequence
  ENSG00000075884_20 (sequence is synthesized)
aactattgttgcaagtcatgttcagcttaggtatctctccttttgttcaaatattactgtttgatattattatatcaaatattattgagcatctcttatgtttaagtcactacgataggt

SEQ ID NO: 68809 - DNA, 120 bp, Artificial Sequence
  ENSG00000075884_21 (sequence is synthesized)
gttctgaaagataaaaaatgaaccagactgaaacaaatagaaagtatggccttagattgagtatagtgaagaaatggatgttggtagttgtcctaaaatggcatgaacagagacatggcg

SEQ ID NO: 68810 - DNA, 120 bp, Artificial Sequence
  ENSG00000075884_22 (sequence is synthesized)
tcgttttatgataactcaagagaagagtgtgattgcttccatttggacaggatttgaaatatattcatggaggaagtgacatttgagcacatttctgaaggatgtataggattttgatgt

SEQ ID NO: 68811 - DNA, 120 bp, Artificial Sequence
  ENSG00000075884_23 (sequence is synthesized)
aaaagggggcaaaagatattttatgtactaataagagagtaattaatagtgaactatggaaaattctttttttgttgtttattttacagatgtatattgatctcttgccttcttccatgc

SEQ ID NO: 68812 - DNA, 120 bp, Artificial Sequence
  ENSG00000075884_24 (sequence is synthesized)
tttcttctctaagttgcctgggagtgaggaacagctttagactaagttgcggaacagcattgtggaacagcaaacagtgtaatttggttagaaagtcagtgtggaaccggtttaggaaag

SEQ ID NO: 68813 - DNA, 120 bp, Artificial Sequence
  ENSG00000075884_25 (sequence is synthesized)
actttgaacaggattgggagaagagatcatttcattctgtaggtaatgtggggtttttgtaaccaatatgaaatattctcaaattaagagagactcagagttttcagagacatgtttagg

SEQ ID NO: 68814 - DNA, 120 bp, Artificial Sequence
  ENSG00000075884_26 (sequence is synthesized)
gaactgatatatatatcagttgtctataaaattaagtctctcttaattttgtgtatatataacttaaaaacacatgcaggacttggtaaattatccgagagacatgttctaaaaatttat

SEQ ID NO: 68815 - DNA, 120 bp, Artificial Sequence
  ENSG00000075884_27 (sequence is synthesized)
gcaaatagatgtgagcaataaggcctgagctcttacgacagagaaaattgtaaaacggctgtgtgtcatcattttggctcaatgcatttagtaaatcacaggacatcttttcactgacaa

SEQ ID NO: 68816 - DNA, 120 bp, Artificial Sequence
  ENSG00000075884_28 (sequence is synthesized)
aatattttgatattctcatatgtctctgacctccaacagtatggccatttctaaagacgttctagtgcaaagagaacaagcagagctatccatctaaggagagcgaaaaacatgctgtcc

SEQ ID NO: 68817 - DNA, 120 bp, Artificial Sequence
  ENSG00000075884_29 (sequence is synthesized)
caagaactaggtgtgtcaccatctcagtgagcacccgttgcaaacctactggtgcttccatctgactccagaacatctgtttagtgtcacaccctacttaaacaaatgcattgtgtgaag

SEQ ID NO: 68818 - DNA, 120 bp, Artificial Sequence
  ENSG00000075884_30 (sequence is synthesized)
tctttccaccaacaatcagacgctgtggaactcattgtcaccaattgggtggatgagagccaccgtttctattatattcatcacacactgctcagaaaatttagtgtcacttttgatata

SEQ ID NO: 68819 - DNA, 120 bp, Artificial Sequence
  ENSG00000075884_31 (sequence is synthesized)
aattcaaaaacattgtaaacattttagggaatattttccccctaaaatggtgtggttctaaagccagtatattcagtagaaagcctatatgttggttgtgtaagggacttttttgttact

SEQ ID NO: 68820 - DNA, 120 bp, Artificial Sequence
  ENSG00000075884_32 (sequence is synthesized)
ttgttactcttatgttttttattttacattgtactaatatgtatttttaatcagagccaacaactggcaatttttactttttaaaaattatatttttgggttttacatttaagtctttaa

SEQ ID NO: 68821 - DNA, 88 bp, Artificial Sequence
  ENSG00000075884_33 (sequence is synthesized)
gtccagtttcaattttctgcatatggttacccagttccccacatttattaaataaactataaaaactctagaatgcagacaaagattt

SEQ ID NO: 68822 - DNA, 120 bp, Artificial Sequence
  ENSG00000075884_34 (sequence is synthesized)
accattcaggacataggcacagacaaagattttatgatgaaaatgccaaaagcaattgtaataaaagcaaatggtgacaaatggggtctaattaaactaaagagcttccgcacagcaaaa

SEQ ID NO: 68823 - DNA, 120 bp, Artificial Sequence
  ENSG00000075884_35 (sequence is synthesized)
gtaactatcatcagagtgaacagacaactttcagaatgggagacaatttttgcaatctattcagctgacaaaattctaatatccagagtctataaggaacttaaacaaatgtacaagaaa

SEQ ID NO: 68824 - DNA, 120 bp, Artificial Sequence
  ENSG00000075884_36 (sequence is synthesized)
aacagctgtctggcctgagccaacatacttacgaccaaggaaaagtgccatccttcaatcctgctgagttggattaaccttcagaactaaatctgctttttcggcagcagaagatatcca

SEQ ID NO: 68825 - DNA, 120 bp, Artificial Sequence
  ENSG00000075884_37 (sequence is synthesized)
gcatttttctgcgggttctgacttaagtgtgtactgtctgcagttctctgaacttcctggcttgtttctccttaagttggagtaattcagctctagccctactctgacttaatcgttcta

SEQ ID NO: 68826 - DNA, 120 bp, Artificial Sequence
  ENSG00000075884_38 (sequence is synthesized)
ttattaaaacaataatgtatttgttatgacgtgaaaaacagtttatagagagcggttcaaaatgctcccagttcccagaaagacaattactggaatacaagaaaatatttcattttatta

SEQ ID NO: 68827 - DNA, 120 bp, Artificial Sequence
  ENSG00000075884_39 (sequence is synthesized)
tatttctttttcttttttttttttttgcagatcacaacagtatcaggaaatgagttccttctacagtcagatattgacttcatcatattggattggttccacgctatcaaaaatgcaatt

SEQ ID NO: 68828 - DNA, 120 bp, Artificial Sequence
  ENSG00000075884_40 (sequence is synthesized)
gtggttttcctgcccagccctccgccactgggctgtggagcccgctgctgctggtgcattcttgtacgtgaggtgtttctcctgtccagcctggcaccactggcctctttccccgaaaac

SEQ ID NO: 68829 - DNA, 120 bp, Artificial Sequence
  ENSG00000075884_41 (sequence is synthesized)
tgggtgactgaatgtgcagcagttccccccattactgcaccctctacacaaccaatactcaagttagcagtgccacctgatttgtctgagaagccatgcaattaaaacttgacttgtgtt

SEQ ID NO: 68830 - DNA, 120 bp, Artificial Sequence
  ENSG00000075884_42 (sequence is synthesized)
acagtgatataaaagaacagaaaccagagcacagaaaatctttaagtgagtattttctttgacttgctcattttaagtttgtctaaatgcagtgcttatgaaatataaatgcattgaaat

SEQ ID NO: 68831 - DNA, 120 bp, Artificial Sequence
  ENSG00000075884_43 (sequence is synthesized)
gagatttaagccaaactcatcatactcatggaagattcgtagccatttcctggccagggatttgtgcactggagggcagtctgggcactttgctcacatcattgttggtaatgccttttg

SEQ ID NO: 68832 - DNA, 120 bp, Artificial Sequence
  ENSG00000075884_44 (sequence is synthesized)
agaaaataattgttccaaggtcatggtctctgcttacagcaaacctctgaatctctgagtaatagccatggtgttcagatcagtgattgattttgagagtgggaaatgtcaagcatctcc

SEQ ID NO: 68833 - DNA, 120 bp, Artificial Sequence
  ENSG00000075884_45 (sequence is synthesized)
agtttgtttagtgagggtcagggaatgtaatgaagtgccaaaaattccacttgacctacgtactctacagtcaacagaaaagcactccatttttgcagagctctgagttaaatgcactcc

SEQ ID NO: 68834 - DNA, 120 bp, Artificial Sequence
  ENSG00000075884_46 (sequence is synthesized)
gtctagatgttgatggaatatatcgagttagtggcaatctggcaacaatacagaagttaagatttattgtcaaccaagtcgtttctggaataccagcccttctatcagaactggatggag

SEQ ID NO: 68835 - DNA, 120 bp, Artificial Sequence
  ENSG00000075886_0 (sequence is synthesized)
aggttgcagttgggcgctcagcagctgtggcagccggttgaggtctggcagtagcgttgggctgaagcagcggagttcgccatgcgcgagtgtatctctatccacgtggggcaggcgggt

SEQ ID NO: 68836 - DNA, 120 bp, Artificial Sequence
  ENSG00000075886_1 (sequence is synthesized)
gtccagatcggcaatgcctgctgggaactgtactgccttgaacatggaattcagcccgatggccaaatgccaagtgataaaaccattggtggcggggacgactccttcaacacgttcttc

SEQ ID NO: 68837 - DNA, 120 bp, Artificial Sequence
  ENSG00000075886_2 (sequence is synthesized)
agtgagactggagctggcaagcacgtgcccagagcagtgtttgtggacctggagcccactgtggtcgatgaagtgcgcacagggacctacaggcagctcttccacccggagcagctgatc

SEQ ID NO: 68838 - DNA, 120 bp, Artificial Sequence
  ENSG00000075886_3 (sequence is synthesized)
accgggaaggaagatgcagccaataattacgccaggggccattacaccatcggcaaggagattgttgacctagtcctggaccggatccgcaaactggcggatctgtgcacaggactgcag

SEQ ID NO: 68839 - DNA, 120 bp, Artificial Sequence
  ENSG00000075886_4 (sequence is synthesized)
ggcttcctcatcttccacagctttgggggcggcactggctctgggttcgcatctctgctcatggagcggctctcagtggattacggcaagaagtccaagctagagtttgccatttaccca

SEQ ID NO: 68840 - DNA, 120 bp, Artificial Sequence
  ENSG00000075886_5 (sequence is synthesized)
gccccccaggtctccacagccgtggtggagccctacaactccatcctgaccacccacacgaccctggaacattctgactgtgccttcatggtcgacaatgaagccatctatgacatatgt

SEQ ID NO: 68841 - DNA, 120 bp, Artificial Sequence
  ENSG00000075886_6 (sequence is synthesized)
ctccctgcgatttgatggggccctgaatgtggacttgacggaattccagaccaacctagtgccgtacccccgcatccacttccccctggccacctatgccccagtcatctcagctgagaa

SEQ ID NO: 68842 - DNA, 120 bp, Artificial Sequence
  ENSG00000075886_7 (sequence is synthesized)
ggcctaccacgagcagctgtctgtggccgagatcaccaatgcctgcttcgagccagccaatcaaatggtcaagtgtgaccctcgccacggcaagtacatggcctgctgcatgttgtacag

SEQ ID NO: 68843 - DNA, 120 bp, Artificial Sequence
  ENSG00000075886_8 (sequence is synthesized)
gggggacgtggtccccaaagacgtcaacgcggccatcgccaccatcaagaccaagcgcaccatccagtttgtggattggtgcccgactggatttaaggtgggcattaactaccagccccc

SEQ ID NO: 68844 - DNA, 120 bp, Artificial Sequence
  ENSG00000075886_9 (sequence is synthesized)
cacagtggtccccgggggagacctggccaaggtgcagcgggccgtgtgcatgctgagcaacaccacggccattgcggaggcctgggcccgcctggaccataagttcgatctcatgtatgc

SEQ ID NO: 68845 - DNA, 120 bp, Artificial Sequence
  ENSG00000075886_10 (sequence is synthesized)
caagcgggcctttgtgcactggtacgtgggcgaaggcatggaagagggagagttctctgaggcccgcgaggacctggcagctctagagaaggattatgaagaggtgggcgtggattccgt

SEQ ID NO: 68846 - DNA, 120 bp, Artificial Sequence
  ENSG00000075886_11 (sequence is synthesized)
ggaagctgaggctgaagaaggcgaagaatactgaggggagggtgtggtgggttctcccctgccacccccgggatggctgcttccaagttgtttgcaattaaaggttctgtataaaaccaa

SEQ ID NO: 68847 - DNA, 120 bp, Artificial Sequence
  ENSG00000075891_0 (sequence is synthesized)
cgggggcctggcccgcgcgctcccctcccgcaggcgccacctcggacatccccgggattgctacttctctgccaacttcgccaactcgccagcacttggagaggcccggctcccctcccg

SEQ ID NO: 68848 - DNA, 120 bp, Artificial Sequence
  ENSG00000075891_1 (sequence is synthesized)
gcgccctctgaccgcccccgccccgcgcgctctccgaccaccgcctctcggatgaccaggttccaggggagctgagcgagtcgcctcccccgcccagcttcagccctggctgcagctgca

SEQ ID NO: 68849 - DNA, 120 bp, Artificial Sequence
  ENSG00000075891_2 (sequence is synthesized)
gcgcgagccatgcgcccccagtgcaccccggcccggcccaccgccccggggccattctgctgaccgcccagccccgagccccgacagtggcaagttgcggctactgcagttgcaagctcc

SEQ ID NO: 68850 - DNA, 120 bp, Artificial Sequence
  ENSG00000075891_3 (sequence is synthesized)
ggccaacccggaggagccccagcggggagcgcagtgctgcgccccccgcccccgcgcgccccgcagcagccgggcgttcactcatcctccctcccccaccgtccctcccttttctcctca

SEQ ID NO: 68851 - DNA, 120 bp, Artificial Sequence
  ENSG00000075891_4 (sequence is synthesized)
agtcctgaagttgagtttgagaggcgacacggcggcggcggccgcgctgctcccgctcctctgcctccccatggatatgcactgcaaagcagaccccttctccgcgatgcacccagggca

SEQ ID NO: 68852 - DNA, 120 bp, Artificial Sequence
  ENSG00000075891_5 (sequence is synthesized)
cgggggtgtgaaccagctcgggggggtgtttgtgaacggccggcccctacccgacgtggtgaggcagcgcatcgtggagctggcccaccagggtgtgcggccctgtgacatctcccggca

SEQ ID NO: 68853 - DNA, 120 bp, Artificial Sequence
  ENSG00000075891_6 (sequence is synthesized)
gctgcgggtcagccacggctgtgtcagcaaaatcctgggcaggtactacgagaccggcagcatcaagccgggtgtgatcggtggctccaagcccaaagtggcgacgcccaaagtggtgga

SEQ ID NO: 68854 - DNA, 120 bp, Artificial Sequence
  ENSG00000075891_7 (sequence is synthesized)
caagattgctgaatacaaacgacagaacccgactatgttcgcctgggagattcgagaccggctcctggccgagggcatctgtgacaatgacacagtgcccagcgtctcttccatcaacag

SEQ ID NO: 68855 - DNA, 120 bp, Artificial Sequence
  ENSG00000075891_8 (sequence is synthesized)
aatcatccggaccaaagttcagcagcctttccacccaacgccggatggggctgggacaggagtgaccgcccctggccacaccattgttcccagcacggcctcccctcctgtttccagcgc

SEQ ID NO: 68856 - DNA, 120 bp, Artificial Sequence
  ENSG00000075891_9 (sequence is synthesized)
ctccaatgacccagtgggatcctactccatcaatgggatcctggggattcctcgctccaatggtgagaagaggaaacgtgatgaagatgtgtctgagggctcagtccccaatggagattc

SEQ ID NO: 68857 - DNA, 120 bp, Artificial Sequence
  ENSG00000075891_10 (sequence is synthesized)
ccagagtggtgtggacagtttgcggaagcacttgcgagctgacaccttcacccagcagcagctggaagctttggatcgggtctttgagcgtccttcctaccctgacgtcttccaggcatc

SEQ ID NO: 68858 - DNA, 120 bp, Artificial Sequence
  ENSG00000075891_11 (sequence is synthesized)
agagcacatcaaatcagaacaggggaacgagtactccctcccagccctgacccctgggcttgatgaagtcaagtcgagtctatctgcatccaccaaccctgagctgggcagcaacgtgtc

SEQ ID NO: 68859 - DNA, 120 bp, Artificial Sequence
  ENSG00000075891_12 (sequence is synthesized)
aggcacacagacatacccagttgtgactggtcgtgacatggcgagcaccactctgcctggttacccccctcacgtgccccccactggccagggaagctaccccacctccaccctggcagg

SEQ ID NO: 68860 - DNA, 120 bp, Artificial Sequence
  ENSG00000075891_13 (sequence is synthesized)
aatggtgcctgggagcgagttctccggcaacccgtacagccacccccagtacacggcctacaacgaggcttggagattcagcaaccccgccttactaagttccccttattattatagtgc

SEQ ID NO: 68861 - DNA, 120 bp, Artificial Sequence
  ENSG00000075891_14 (sequence is synthesized)
cgccccccggggctccgcccctgccgctgctgccgctgcctatgaccgccactagttaccgcggggaccacatcaagcttcaggccgacagcttcggcctccacatcgtccccgtctgac

SEQ ID NO: 68862 - DNA, 120 bp, Artificial Sequence
  ENSG00000075891_15 (sequence is synthesized)
cccaccccggagggagggaggaccgacgcgacgcgatgcctcccggccaccgccccagcctcaccccatcccacgacccccgcaacccttcacatcacccccctcgaaggtcggacagga

SEQ ID NO: 68863 - DNA, 120 bp, Artificial Sequence
  ENSG00000075891_16 (sequence is synthesized)
gggggattcggcccagctcgtcccggcctccaccaagccagccccgaagcccgccagccaccctgccggactcgggcgcgacctgctggcgcgcgccggatgtttctgtgacacacaatc

SEQ ID NO: 68864 - DNA, 120 bp, Artificial Sequence
  ENSG00000075891_17 (sequence is synthesized)
agcgcggaccgcagcgcggcccagccccgggcacccgcctcggacgctcgggcgccaggaggcttcgctggaggggctgggccaaggagattaagaagaaaacgactttctgcaggagga

SEQ ID NO: 68865 - DNA, 120 bp, Artificial Sequence
  ENSG00000075891_18 (sequence is synthesized)
agagcccgctgccgaatccctgggaaaaattcttttcccccagtgccagccggactgccctcgccttccgggtgtgccctgtcccagaagatggaatgggggtgtgggggtccggctcta

SEQ ID NO: 68866 - DNA, 120 bp, Artificial Sequence
  ENSG00000075891_19 (sequence is synthesized)
ggaacgggctttgggggcgtcaggtctttccaaggttgggacccaaggatcggggggcccagcagcccgcaccgatcgagccggactctcggctcttcactgctcctcctggcctgccta

SEQ ID NO: 68867 - DNA, 120 bp, Artificial Sequence
  ENSG00000075891_20 (sequence is synthesized)
gttccccagggcccggcacctcctgctgcgagacccggctctcagccctgccttgcccctacctcagcgtctcttccacctgctggcctcccagtttcccctcctgccagtccttcgcct

SEQ ID NO: 68868 - DNA, 120 bp, Artificial Sequence
  ENSG00000075891_21 (sequence is synthesized)
gtcccttgacgccctgcatcctcctccctgactcgcagccccatcggacgctctcccgggaccgccgcaggaccagtttccatagactgcggactggggtcttcctccagcagttacttg

SEQ ID NO: 68869 - DNA, 120 bp, Artificial Sequence
  ENSG00000075891_22 (sequence is synthesized)
atgccccctcccccgacacagactctcaatctgccggtggtaagaaccggttctgagctggcgtctgagctgctgcggggtggaagtggggggctgcccactccactcctcccatcccct

SEQ ID NO: 68870 - DNA, 120 bp, Artificial Sequence
  ENSG00000075891_23 (sequence is synthesized)
cccagcctcctcctccggcaggaactgaacagaaccacaaaaagtctacatttatttaatatgatggtctttgcaaaaaggaacaaaacaacacaaaagcccaccaggctgctgctttgt

SEQ ID NO: 68871 - DNA, 120 bp, Artificial Sequence
  ENSG00000075891_24 (sequence is synthesized)
ggaaagacggtgtgtgtcgtgtgaaggcgaaacccggtgtacataacccctccccctccgccccgccccgcccggccccgtagagtccctgtcgcccgccggccctgcctgtagatacgc

SEQ ID NO: 68872 - DNA, 120 bp, Artificial Sequence
  ENSG00000075891_25 (sequence is synthesized)
cccgctgtctgtgctgtgagagtcgccgctcgctgggggggaagggggggacacagctacacgcccattaaagcacagcacgtcctgggggaggggggcattttttatgttacaaaaaaa

SEQ ID NO: 68873 - DNA, 120 bp, Artificial Sequence
  ENSG00000075891_26 (sequence is synthesized)
aattacgaaagaaaagaaatctctatgcaaaatgacgaacatggtcctgtggactcctctggcctgttttgttggctctttctctgtaattccgtgttttcgctttttcctccctgcccc

SEQ ID NO: 68874 - DNA, 120 bp, Artificial Sequence
  ENSG00000075891_27 (sequence is synthesized)
tctctccctctgcccctctctcctctccgcttctctccccctctgtctctgtctctctccgtctctgtcgctcttgtctgtctgtctctgctctttcctcggcctctctccccagacctg

SEQ ID NO: 68875 - DNA, 120 bp, Artificial Sequence
  ENSG00000075891_28 (sequence is synthesized)
ctttcctcggcctctctccccagacctggcccggccgccctgtctccgcaggctagatccgaggtggcagctccagcccccgggctcgccccctcgcgggcgtgccccgcgcgccccggg

SEQ ID NO: 68876 - DNA, 120 bp, Artificial Sequence
  ENSG00000075891_29 (sequence is synthesized)
ccccgtagttgctctttcggtagtggcgatgcgccctgcatgtctcctcacccgtggatcgtgacgactcgaaataacagaaacaaagtcaataaagtgaaaataaataaaaatccttga

SEQ ID NO: 68877 - DNA, 120 bp, Artificial Sequence
  ENSG00000075891_30 (sequence is synthesized)
acaaatccgaaaaggcttggagtcctcgcccagatctctctcccctgcgagccctttttatttgagaaggaaaaagagaaaagagaatcgtttaagggaacccggcgcccagccaggctc

SEQ ID NO: 68878 - DNA, 120 bp, Artificial Sequence
  ENSG00000075891_31 (sequence is synthesized)
cagtggcccgaacggggcggcgagggcggcgagggcgccgaggtccggcccatcccagtcctgtggggctggccgggcagagaccccggacccaggcccaggcctaacctgctaaatgtc

SEQ ID NO: 68879 - DNA, 120 bp, Artificial Sequence
  ENSG00000075891_32 (sequence is synthesized)
cccggacggttctggtctcctcggccactttcagtgcgtcggttcgttttgattctttttcttttgtgcacataagaaataaataataataataaataaagaataaaattttgtatgtca

SEQ ID NO: 68880 - DNA, 120 bp, Artificial Sequence
  ENSG00000075891_33 (sequence is synthesized)
gatatgcactgcaaagcagaccccttctccgcgatgcaccgttgtcaagacacgatggtcatctttccctgcctctgcctgggggatgctctaaaaacaaagaggggctccgagaagaaa

SEQ ID NO: 68881 - DNA, 120 bp, Artificial Sequence
  ENSG00000075891_34 (sequence is synthesized)
tcgaagtcagggagagagccagcagcgcagccttccaggtgggcccccggcagagtgcagctctgctctcagctctggaggctccttgcctagactgccgactccccattgaggatcacg

SEQ ID NO: 68882 - DNA, 120 bp, Artificial Sequence
  ENSG00000075891_35 (sequence is synthesized)
cagccagcaacctggccagggggtcagcaaagagcaaaaaatgagggggaaagaacaaaaggaaagcaaatgccaaagctgaggagaaaggaaaagagaaatccaaacacgggaaaggaa

SEQ ID NO: 68883 - DNA, 120 bp, Artificial Sequence
  ENSG00000075891_36 (sequence is synthesized)
attaaagaaagaaagttgacatgatgttacagaagaaaagggagaagggagaaaaaaatagagaaaagagggaattattttaataaaatttgaatttatgccatgtctttagcttgaaaa

SEQ ID NO: 68884 - DNA, 120 bp, Artificial Sequence
  ENSG00000075891_37 (sequence is synthesized)
actattctgagattttttttgcaggcttttttttttaaaagctaaaattctaaatagaaaactcctccctatctgcagattaataattaaggataatttgtaacttttcacaaggaaact

SEQ ID NO: 68885 - DNA, 120 bp, Artificial Sequence
  ENSG00000075891_38 (sequence is synthesized)
cctgtgtttaggacaagagagccgaggagggagagctgtgtttttcgctaatcatatatttagcgttgcgggggttggggggggcgtttaaaaatacttctgggataaaatatatttttc

SEQ ID NO: 68886 - DNA, 120 bp, Artificial Sequence
  ENSG00000075891_39 (sequence is synthesized)
taagtaatttccaagcgcaggaaagccgcgccgagggcatcaggcctccgcgggtctcggcgagcgggccggaaagcctcggtccttttcgggaggagtggaaccgggtccacacgccgt

SEQ ID NO: 68887 - DNA, 120 bp, Artificial Sequence
  ENSG00000075891_40 (sequence is synthesized)
tttcgcccagccagcctgcctcgcggcccgctgccacagctctcgttctccttttttgcggattccgccgggggtccgccgagtcctggctgcccgcgggcagccactttgaaacccaaa

SEQ ID NO: 68888 - DNA, 120 bp, Artificial Sequence
  ENSG00000075891_41 (sequence is synthesized)
cgccccgagagttattaactcgccagcgaggcctatgccgtgccacctgggcgagacggtgggccccaaccaggctctgcgaggcgcggcaggcaggcgagcccaagcagccggcattct

SEQ ID NO: 68889 - DNA, 120 bp, Artificial Sequence
  ENSG00000075891_42 (sequence is synthesized)
ctgcctgctgcctggagccgctctgcctccctgtctctgagcgcagcagaccccgggcccctgcctcatccgccttccttgctctacttcagatactaaggaggtgaaagagagatacgg

SEQ ID NO: 68890 - DNA, 120 bp, Artificial Sequence
  ENSG00000075891_43 (sequence is synthesized)
tccccctacagataaataacattagaaaaacttcccatcaaaaacaaacaacacaggaaagaggtagaaaaattccgattacaatttaatactttttaaagaagaggcagagagcaaagg

SEQ ID NO: 68891 - DNA, 120 bp, Artificial Sequence
  ENSG00000075891_44 (sequence is synthesized)
ggggtgtgtgtgtcaggcacttatcccctgtctgtgctaggagctcggataaacagtcagccgagcctcgacgcccccaaatcgtccgcctccaagccccgcacgcgcggacagctcccg

SEQ ID NO: 68892 - DNA, 120 bp, Artificial Sequence
  ENSG00000075891_45 (sequence is synthesized)
ggttgcctgcggcgcaggcgggatgctgcttcgcactagtccagtcctctgccaggcccttcctctcctcgctttcttacgccctttccgctggcatgaattcccctttggcattttctc

SEQ ID NO: 68893 - DNA, 120 bp, Artificial Sequence
  ENSG00000075891_46 (sequence is synthesized)
ccctctcccctcttttctgtcatctggtttctctccagtcccccctttgctttctaccttgcgtcgcaaggcctgagtcgccctctcgcccagcccccagtcttcagcccagcgtctgtg

SEQ ID NO: 68894 - DNA, 120 bp, Artificial Sequence
  ENSG00000075891_47 (sequence is synthesized)
cttccagtccccactcctccgcgtggtcgtggaggtccaccacctttcttctcaagctcgggaacatgcccttccgccctgcctgcttccttcgcccgtcccgggccgcggaccctgact

SEQ ID NO: 68895 - DNA, 120 bp, Artificial Sequence
  ENSG00000075891_48 (sequence is synthesized)
gatctccgggcggcggcggcggcgaaggcgagacgcgttgtcgggccgcggaggagcgggacagccagacccagccccaggacgcggcggccgcggggagcctagcatggaagagcgcgc

SEQ ID NO: 68896 - DNA, 120 bp, Artificial Sequence
  ENSG00000075914_0 (sequence is synthesized)
agatgacgtgcggctcgtggggcagctcggcagcatggcgtccgtgacgctgagcgaggcggagaaggtgtacatcgtgcatggcgtccaggaagacctccgtgtggatggccgtggctg

SEQ ID NO: 68897 - DNA, 120 bp, Artificial Sequence
  ENSG00000075914_1 (sequence is synthesized)
tgaggactaccgatgtgtcgaagtggaaactgatgtggtgtccaacactagtgggtccgccagggtcaagctgggtcacacagacatcttggtgggagtgaaagcagaaatggggacgcc

SEQ ID NO: 68898 - DNA, 120 bp, Artificial Sequence
  ENSG00000075914_2 (sequence is synthesized)
gaagctggagaaaccaaatgaaggctacttggagttctttgttgactgttcagccagtgctacccctgaatttgaaggtagaggaggtgatgaccttggcaccgagatcgctaacaccct

SEQ ID NO: 68899 - DNA, 120 bp, Artificial Sequence
  ENSG00000075914_3 (sequence is synthesized)
ctatcggatatttaacaataaaagcagtgtcgacttaaagaccctctgcattagtcctcgggagcactgctgggttctctatgtggatgtgctgcttctggaatgtggtggaaatttgtt

SEQ ID NO: 68900 - DNA, 120 bp, Artificial Sequence
  ENSG00000075914_4 (sequence is synthesized)
tcgaaggacattgaattgtcagatgacccttatgactgcatacgactaagtgtggagaatgtcccctgcattgtcactctgtgcaagattggctatcggcatgtggtggatgctactctt

SEQ ID NO: 68901 - DNA, 120 bp, Artificial Sequence
  ENSG00000075914_5 (sequence is synthesized)
caggaggaggcctgctcgctggccagcttgctggtgtcggtgaccagcaagggagttgtgacgtgcatgaggaaagtggggaagggcagcctggacccagagagcatcttcgagatgatg

SEQ ID NO: 68902 - DNA, 120 bp, Artificial Sequence
  ENSG00000075914_6 (sequence is synthesized)
gagactggcaagcgtgtgggcaaggtactgcatgcctccttgcagagtgttgtgcacaaggaagaaagcctggggcccaagagacagaaagttggattcctgggatgatttgcacatcaa

SEQ ID NO: 68903 - DNA, 120 bp, Artificial Sequence
  ENSG00000075914_7 (sequence is synthesized)
ctgctcaactgtggattgttttttacttttccttttaaaccggttcgtatatatttttcttcgctgttacgaatttacagcagcatttgtacatgtaaaattaaaggctattttctggtc

SEQ ID NO: 68904 - DNA, 120 bp, Artificial Sequence
  ENSG00000075914_8 (sequence is synthesized)
gtgcggctcgtggggcagctcggcagcatggcgtccgtgacgctgagcgaggcggagaaggtgtacatcgtgcatggcgtccagttcagccagtgctacccctgaatttgaaggtagagg

SEQ ID NO: 68905 - DNA, 120 bp, Artificial Sequence
  ENSG00000075914_9 (sequence is synthesized)
agcttcaccttgcagatatcctctccgggtatccaatgcccatactcccactcggccatcgcaaggggttggggttggctttttttcgggcaactgctcacagctcccagtaatcacttc

SEQ ID NO: 68906 - DNA, 120 bp, Artificial Sequence
  ENSG00000075914_10 (sequence is synthesized)
catcaagccggggtttccagttcccgctaggaagcgttggggacgtccgggcactgcgcacctcgccagtgccggttaccaagcgcctcctcccccgtctgtgggacaacgctctggaag

SEQ ID NO: 68907 - DNA, 120 bp, Artificial Sequence
  ENSG00000075914_11 (sequence is synthesized)
actgaaactcctaaatcttaaaacaccctggggaaggagctgattcacgaaggagagcgtttcaaccgtggcatttgctctctgcattccagttagcaaatggggtaaggcgttaggaat

SEQ ID NO: 68908 - DNA, 120 bp, Artificial Sequence
  ENSG00000075914_12 (sequence is synthesized)
ttatcaccaaatggaaagaacataatgtgagctgaagcccttgggactgcttccagaggtcctggtgtgggcgttcctcccagcaaggccaggtccatccctgtggagagaagcagctgc

SEQ ID NO: 68909 - DNA, 120 bp, Artificial Sequence
  ENSG00000075914_13 (sequence is synthesized)
ctagacttgggcttaatgggggagcttctgccctgttgagagcatagcctgggttttcatcttttatgtttcttcagtgactatctacaggcaccatgacagtgttcccaacaaggcaga

SEQ ID NO: 68910 - DNA, 120 bp, Artificial Sequence
  ENSG00000075914_14 (sequence is synthesized)
aatcagcctggtctctccttccctgctcctggttgactgcccgtgacatgacaaaacattggcagtggtggcgcagagatgcaactcgagtgtgaataaagtttagaagcatttgctttt

SEQ ID NO: 68911 - DNA, 120 bp, Artificial Sequence
  ENSG00000075914_15 (sequence is synthesized)
acggtagatgctgccagtttcacaaagtgttttaccagttaacacttccaccagcagtgtatgtaagagttccgggttgtttcacatttttgtcaactcttgctttttttttttgagatg

SEQ ID NO: 68912 - DNA, 120 bp, Artificial Sequence
  ENSG00000075914_16 (sequence is synthesized)
tttttttttgtttttttttttaatagttattttggttgtgccttggtatcacagtgtagttttaatttgcatttttaatagatatttaaattgagcaccttttcttggtttattggctac

SEQ ID NO: 68913 - DNA, 120 bp, Artificial Sequence
  ENSG00000075914_17 (sequence is synthesized)
gatatttaaattgagcaccttttcttggtttattggctactcagacagcctcttttatgaagacatccaaatatattctacgtttgagtcttttgtccatttttctgttgggctgtcttt

SEQ ID NO: 68914 - DNA, 120 bp, Artificial Sequence
  ENSG00000075914_18 (sequence is synthesized)
tttttgtttaataggaattctttatgtaatctgtcaggtagtattttatctccccagattatatttttagtttttaaatgatgtcttctgatatacagaagttcatgatgttataattga

SEQ ID NO: 68915 - DNA, 120 bp, Artificial Sequence
  ENSG00000075914_19 (sequence is synthesized)
attgtcttgtcttttattttttatatctatggtctatttggtatggcttcgtgtgtgtggtgtgaggtagggattgagattcttttttttccattgggatatctgattgacccagcatca

SEQ ID NO: 68916 - DNA, 120 bp, Artificial Sequence
  ENSG00000075914_20 (sequence is synthesized)
ttttctaaaagatgcctttcctcattgcactgcggcgcctcctgtgtgcttttgacagggatgacagggatgaggatgataaagaataggcatagcgtgtctttctcttgtgagacacag

SEQ ID NO: 68917 - DNA, 120 bp, Artificial Sequence
  ENSG00000075914_21 (sequence is synthesized)
ggattccaactcctattctcaatcttaaaaagaagttatttttcctcctccaagtgggaattttactagtgcttctgcttccaggataccaagggttcgagttttggaggatgaagaggg

SEQ ID NO: 68918 - DNA, 120 bp, Artificial Sequence
  ENSG00000075914_22 (sequence is synthesized)
agaactaagatccctaggcagctataacctaatgtcctctgtgttctatattaaatccctggttatgaccactccagaacgagggttgaaaaatgttggacctggtaacgagctaccctg

SEQ ID NO: 68919 - DNA, 120 bp, Artificial Sequence
  ENSG00000075914_23 (sequence is synthesized)
atccttggcagagttctggcgacagctcctacctcttttcctcatgcctttcctctgtcagtaccaactgcaaagtcagtggtcccgtgatgtagccatcggattgaagcggccagctat

SEQ ID NO: 68920 - DNA, 120 bp, Artificial Sequence
  ENSG00000075914_24 (sequence is synthesized)
cattgaagtcccacaacgaagacctccgtgtggatggccgtggctgtgaggactaccgatgtgtcgaagtggaaactgatgtggtgtccaacactagtgggtccgccagggtcaagctgg

SEQ ID NO: 68921 - DNA, 120 bp, Artificial Sequence
  ENSG00000075914_25 (sequence is synthesized)
tgtggagaaccagagcagacacttgtaatggaacactgaggaaatttctattgtagctcatatgtgaagataacagggggttttaacattgaaaatggtgacatctaacgttaaactcca

SEQ ID NO: 68922 - DNA, 120 bp, Artificial Sequence
  ENSG00000075914_26 (sequence is synthesized)
agatttcgtgaattaaaactacatatatacgtatattctgtatttattttttgtattgttatttttataaatagacacctaccatttagaaaaatattagaaaactacagagaagccaag

SEQ ID NO: 68923 - DNA, 120 bp, Artificial Sequence
  ENSG00000075914_27 (sequence is synthesized)
aagccaagaagagtagacaccacctacaggccaactatccaaatactattactgggtgaactctatgggggcaaggattttgcctgttttgtacttgcctatattcctagcaccatgaac

SEQ ID NO: 68924 - DNA, 120 bp, Artificial Sequence
  ENSG00000075914_28 (sequence is synthesized)
agtacctgacacatagtaagtgcttgcatattgcttgattgtacacatgtgtgttctaaaagcagggtaacaggcttccctttggtttaagaagaggaaatggctattccacatggttca

SEQ ID NO: 68925 - DNA, 120 bp, Artificial Sequence
  ENSG00000075914_29 (sequence is synthesized)
gctttccaaacaggttgtgtagaagggacaagttgctatgcttttttggagttgacatttattctgactgattgacctttcccccttttatgctccaagtactttgaggaaaatttgcag

SEQ ID NO: 68926 - DNA, 120 bp, Artificial Sequence
  ENSG00000075914_30 (sequence is synthesized)
ccaaggtgcacatgaaatgctttctggccttcacccagacgaagaccttccacgaggccagcgaggactgcatctcgcgcgggggcaccctgggcacccctcagactggctcggagaacg

SEQ ID NO: 68927 - DNA, 120 bp, Artificial Sequence
  ENSG00000075914_31 (sequence is synthesized)
tctggctgggcctcaacgacatggcggccgagggcacctgggtggacatgaccggcgcccgcatcgcctacaagaactgggagactgagatcaccgcgcaacccgatggcggcaagaccg

SEQ ID NO: 68928 - DNA, 120 bp, Artificial Sequence
  ENSG00000075914_32 (sequence is synthesized)
agaactgcgcggtcctgtcaggcgcggccaacggcaagtggttcgacaagcgctgccgcgatcagctgccctacatctgccagttcgggatcgtgtagccggcggggcgggggccgtggg

SEQ ID NO: 68929 - DNA, 120 bp, Artificial Sequence
  ENSG00000075914_33 (sequence is synthesized)
gggcctggaggagggcaggggccgcgggaggccgggaggagggtggggaccttgcagcccccatcctctccgtgcgcttggagcctctttttgcaaataaagttggtgcagcttcgcgga

SEQ ID NO: 68930 - DNA, 120 bp, Artificial Sequence
  ENSG00000075945_0 (sequence is synthesized)
aggcgactctgggcgggtctgggccgctccagtgttttggggcacagaagctgtgggaggagctggaggcttcaccgtggtaaccacagcgccgctgctgccccgccttgcaggcctcag

SEQ ID NO: 68931 - DNA, 120 bp, Artificial Sequence
  ENSG00000075945_1 (sequence is synthesized)
gactgtcatcgcctctgggtgtgagggtactttggccaccgtccccggaaataaccgcgcctgcctctcaagataccccatcctctccacgccgctgccgctgccgccatgcaaggggag

SEQ ID NO: 68932 - DNA, 120 bp, Artificial Sequence
  ENSG00000075945_2 (sequence is synthesized)
gacgccagatacctcaaaaggaaagttaaaggagggaatatagatgtacatccatcagaaaaagcactcattgttcactatgaagtggaagctaccattcttggagaaatgggggacccc

SEQ ID NO: 68933 - DNA, 120 bp, Artificial Sequence
  ENSG00000075945_3 (sequence is synthesized)
atgttgggagaacgaaaagaatgtcaaaaaatcattcgacttaagagtctcaatgccaacacagatataacttccctggcaaggaaggtggttgaagaatgtaaactcattcatccttca

SEQ ID NO: 68934 - DNA, 120 bp, Artificial Sequence
  ENSG00000075945_4 (sequence is synthesized)
aaactaaatgaggtagaacagctgttgtactatctacagaaccgccgtgattcattgtcaggaaaagagaaaaaagaaaaatcaagcaagcctaaagatccacctccttttgaaggaatg

SEQ ID NO: 68935 - DNA, 120 bp, Artificial Sequence
  ENSG00000075945_5 (sequence is synthesized)
gagattgatgaagttgctaacattaatgacatggatgaatatattgagttattatatgaagatattcctgacaaagttcggggttctgctttgatcctgcagcttgctcgaaatcctgat

SEQ ID NO: 68936 - DNA, 120 bp, Artificial Sequence
  ENSG00000075945_6 (sequence is synthesized)
aacttggaagaactactattgaatgaaactgcccttggtgcattagcaagggtcctgagagaagactggaagcaaagtgtcgagttagctacaaacataatttacatctttttttgtttc

SEQ ID NO: 68937 - DNA, 120 bp, Artificial Sequence
  ENSG00000075945_7 (sequence is synthesized)
tccagcttttctcaatttcatggacttattactcactataaaattggagctctgtgtatgaatattattgatcatgagttaaaaagacatgagctttggcaagaagaactctcaaagaag

SEQ ID NO: 68938 - DNA, 120 bp, Artificial Sequence
  ENSG00000075945_8 (sequence is synthesized)
aagaaagctgttgatgaagaccctgaaaaccaaaccttgagaaaggattatgaaaaaacctttaaaaagtaccaggggcttgtggtaaaacaggaacagctattacgagttgctctttat

SEQ ID NO: 68939 - DNA, 120 bp, Artificial Sequence
  ENSG00000075945_9 (sequence is synthesized)
ttgcttctgaatcttgctgaggatactcgtaccgaactgaaaatgaggaacaagaacatagttcacatgttggtgaaagcccttgatcgggacaattttgagctgctaattttagttgtg

SEQ ID NO: 68940 - DNA, 120 bp, Artificial Sequence
  ENSG00000075945_10 (sequence is synthesized)
tcattcttgaagaaactcagcatttttatggagaataaaaatgatatggtggaaatggatattgttgaaaaactggtgaaaatgataccttgtgagcatgaagacctgctgaatatcacc

SEQ ID NO: 68941 - DNA, 120 bp, Artificial Sequence
  ENSG00000075945_11 (sequence is synthesized)
ctccgacttttactaaacctatcctttgacacaggactgaggaataagatggtacaagttggactgcttcccaagctcactgcactcctaggcaatgacaactacaaacaaatagcaatg

SEQ ID NO: 68942 - DNA, 120 bp, Artificial Sequence
  ENSG00000075945_12 (sequence is synthesized)
aatgaagatgctgtttgaatgttcagatgaacgaattgacttggaactcatttctttctgcattaatcttgctgctaacaaaagaaatgtacagcttatctgtgaaggaaatgggctgaa

SEQ ID NO: 68943 - DNA, 120 bp, Artificial Sequence
  ENSG00000075945_13 (sequence is synthesized)
gatgctcatgaagagggctctgaagtttaaggatccattgctgatgaaaatgattagaaacatttctcagcatgatggaccaactaaaaatctgtttattgattatgttggggaccttgc

SEQ ID NO: 68944 - DNA, 120 bp, Artificial Sequence
  ENSG00000075945_14 (sequence is synthesized)
agcccagatctctaatgatgaagaagaggagtttgtgattgaatgtttgggaactcttgcaaacttgaccattccagacttagactgggaattggttcttaaagaatataagttggttcc

SEQ ID NO: 68945 - DNA, 120 bp, Artificial Sequence
  ENSG00000075945_15 (sequence is synthesized)
atacctcaaggataaactaaaaccaggtgctgcagaagatgatcttgttttagaagtggttataatgattggaactgtatccatggatgactcttgtgctgcattgctagccaaatctgg

SEQ ID NO: 68946 - DNA, 120 bp, Artificial Sequence
  ENSG00000075945_16 (sequence is synthesized)
cataatccctgcactcattgaattgctaaatgctcaacaagaagatgatgaatttgtgtgtcagataatttatgtcttctaccagatggttttccaccaagccacaagagacgtcataat

SEQ ID NO: 68947 - DNA, 120 bp, Artificial Sequence
  ENSG00000075945_17 (sequence is synthesized)
caaggaaacacaggctccagcatatctcatagacctaatgcatgataagaataatgaaatccgaaaggtctgtgataatacattagatattatagcggaatatgatgaagaatgggctaa

SEQ ID NO: 68948 - DNA, 120 bp, Artificial Sequence
  ENSG00000075945_18 (sequence is synthesized)
gaaaattcagagtgaaaagtttcgctggcataactctcagtggctggagatggtagagagtcgtcagatggatgagagtgagcagtacttgtatggtgatgatcgaattgagccatacat

SEQ ID NO: 68949 - DNA, 120 bp, Artificial Sequence
  ENSG00000075945_19 (sequence is synthesized)
tcatgaaggagatattctcgaaagacctgaccttttctacaactcagatggattaattgcctctgaaggagccataagtcccgatttcttcaatgattaccaccttcaaaatggagatgt

SEQ ID NO: 68950 - DNA, 120 bp, Artificial Sequence
  ENSG00000075945_20 (sequence is synthesized)
tgttgggcagcattcatttcctggcagccttggaatggatggctttggccaaccagttggcattcttggacgccctgccacagcatatggattccgccctgatgaaccttactactatgg

SEQ ID NO: 68951 - DNA, 120 bp, Artificial Sequence
  ENSG00000075945_21 (sequence is synthesized)
ctatggatcttgataaagtatctgtttccatgtgtaatctcagcttagaagaaatctgtgtgggttgggttaattttggatctttgcctaataatgcatgttgatgttattgtgggtctg

SEQ ID NO: 68952 - DNA, 120 bp, Artificial Sequence
  ENSG00000075945_22 (sequence is synthesized)
tgtttgtttttatttttatatgttgttagctgcagattaaccccagcccctctgtcttctgttaagtacagttgatactgacattgttcactcatcaaaccacatcttgatgctaagtaa

SEQ ID NO: 68953 - DNA, 120 bp, Artificial Sequence
  ENSG00000075945_23 (sequence is synthesized)
catttcccatgagccacaaaactgaatgctgaaaagctactagactggaaaacaaacactgcattatgtatgttaagtgactaatttaatttcaattaaaaagcgtaaagtgaaaatgaa

SEQ ID NO: 68954 - DNA, 120 bp, Artificial Sequence
  ENSG00000075945_24 (sequence is synthesized)
attctttttctagtctctgttgctgctttttattatttccttctgctagcttggggttttgtttgctcttctttttctagccccttaaggtgtaaaattaggttattaattcaaaatctt

SEQ ID NO: 68955 - DNA, 120 bp, Artificial Sequence
  ENSG00000075945_25 (sequence is synthesized)
ttatttatttttttaaatagagcgtcagtatagagtgtcttattgtggatctgtttgagtttatctttgaatttcattgagcttcttggatgtgtaagtttgtctttggtctaatttggg

SEQ ID NO: 68956 - DNA, 120 bp, Artificial Sequence
  ENSG00000075945_26 (sequence is synthesized)
aagtttttgactgttttttctcccagtattctctatgtttctttcttcctctcctttcataccctcattatgcatatgttggtatactagatggtgttccataagtctcttaggttctgt

SEQ ID NO: 68957 - DNA, 120 bp, Artificial Sequence
  ENSG00000075945_27 (sequence is synthesized)
ttatttttcttcattctgttttctttctgtgcctcaaaatggacagtttcatttgacatatcttcaagtttgctgattcttttctctctctgctcagatctgctgttaaaaaccctgtag

SEQ ID NO: 68958 - DNA, 120 bp, Artificial Sequence
  ENSG00000075945_28 (sequence is synthesized)
tgatttttttatttcagttattgtacttttcagatctagtgtttttgtttggatccttatgataatatatttttaaactatttatgtgttgagacattgtgtttctcctttttcttagtt

SEQ ID NO: 68959 - DNA, 120 bp, Artificial Sequence
  ENSG00000075945_29 (sequence is synthesized)
atttgcactggtttctttttgctctttggacatatttaagacagttgatttaaagtctttgataagtccagtgtttgtgctgtagcatggacagtttctgttaattttttttattgtgag

SEQ ID NO: 68960 - DNA, 120 bp, Artificial Sequence
  ENSG00000075945_30 (sequence is synthesized)
aatgagaatgagtttcttgtttctttgcatgtttcatattttgttttgttgaaaactgggtattttgaatattatggtatccaaaggaaaaaaagaaaagaaaaaaatactcttcagatc

SEQ ID NO: 68961 - DNA, 120 bp, Artificial Sequence
  ENSG00000075945_31 (sequence is synthesized)
tttgtaggttgactcagtgtttggatatggcttcaacacttagccaggcaatttacaattttaccttagccttcatttgctgcttgcacagagcctgaagaccagccagaggtaaaagct

SEQ ID NO: 68962 - DNA, 120 bp, Artificial Sequence
  ENSG00000075945_32 (sequence is synthesized)
tatgatcttcccaggttttttctgggtatgtattctgccctgagcatgctcatggatttctagatttctctttatatgcaatagcttttcaaagcatctattcccccaaaatgtctgact

SEQ ID NO: 68963 - DNA, 120 bp, Artificial Sequence
  ENSG00000075945_33 (sequence is synthesized)
ccctggactttcctcttgggctttcagcttgtgttttgtttgacccagctattactatttatcccaggggccagcagcttgtatgcttggctttcactgatttcagtgactgcatagctg

SEQ ID NO: 68964 - DNA, 120 bp, Artificial Sequence
  ENSG00000075945_34 (sequence is synthesized)
cactatcctgataagagtttaaaattagtcaaaacaaaggaaagccccttgcagctgacctcaaaggaaacttcagtcagttgcaaaacaatcagacaaaattccttgggagcaaggtcc

SEQ ID NO: 68965 - DNA, 120 bp, Artificial Sequence
  ENSG00000075945_35 (sequence is synthesized)
aaaaaagtttgttcacccaaagactcccagggaatccatgagcacttaaataagaagtgctgttacagcacagttattatgcagataacattttagttaaacttttggtgagaaaaataa

SEQ ID NO: 68966 - DNA, 120 bp, Artificial Sequence
  ENSG00000075945_36 (sequence is synthesized)
aggaagagaattattttaaagggtccttttaactgaaatctcctttgtattaagatgtgctacatgagctcaaactaattggaaaggtggcaggataatggcattgatagccagtggata

SEQ ID NO: 68967 - DNA, 120 bp, Artificial Sequence
  ENSG00000075945_37 (sequence is synthesized)
gtcagcaggacttctgaagagggaacacgacctttaaggaggccaacagatcaggagaaggcaaaagggatgtcgattgcccttggcaacacttaccggagaagtctttcagattcagaa

SEQ ID NO: 68968 - DNA, 120 bp, Artificial Sequence
  ENSG00000075975_0 (sequence is synthesized)
aaggccgaggcggcagcggctgcgagaggcggcggcacgacgacggtccctcagcccagccaccatgagcaccaagcagatcacttgcaggtattttatgcatggtgtgtgtcgggaagg

SEQ ID NO: 68969 - DNA, 120 bp, Artificial Sequence
  ENSG00000075975_1 (sequence is synthesized)
aagtcagtgcctattctcacatgacttggcaaacagcaaaccgtccaccatctgcaagtactaccagaagggctactgtgcctatggaactcggtgcagatatgaccacacgaggccctc

SEQ ID NO: 68970 - DNA, 120 bp, Artificial Sequence
  ENSG00000075975_2 (sequence is synthesized)
tgctgcagctggaggtgctgtgggcaccatggcccacagtgtgccctccccagctttccacagtcctcaccctccttccgaggtcactgcatccattgtgaaaactaactcacatgaacc

SEQ ID NO: 68971 - DNA, 120 bp, Artificial Sequence
  ENSG00000075975_3 (sequence is synthesized)
cggaaagcgtgaaaagagaacattggttcttagagaccgaaatctctctggcatggctgaaaggaagacccagccgagcatggtgagtaatccaggcagctgcagcgacccccagcccag

SEQ ID NO: 68972 - DNA, 120 bp, Artificial Sequence
  ENSG00000075975_4 (sequence is synthesized)
ccccgagatgaagccgcattcctacctggatgccatcaggagtggccttgatgacgtggaggccagcagctcctacagcaacgagcagcagctgtgcccctacgcagctgctggggagtg

SEQ ID NO: 68973 - DNA, 120 bp, Artificial Sequence
  ENSG00000075975_5 (sequence is synthesized)
ccggtttggggatgcctgtgtctacctgcacggggaggtgtgtgaaatctgtaggctgcaagtcttgcacccattcgacccagagcagaggaaggctcatgaaaagatctgcatgttgac

SEQ ID NO: 68974 - DNA, 120 bp, Artificial Sequence
  ENSG00000075975_6 (sequence is synthesized)
gttcgaacacgagatggaaaaggcctttgccttccaggcaagccaggacaaagtgtgcagtatctgcatggaagtgatcctggagaaggcctctgcttctgagaggagatttgggattct

SEQ ID NO: 68975 - DNA, 120 bp, Artificial Sequence
  ENSG00000075975_7 (sequence is synthesized)
ctccaattgcaatcacacgtactgtttgtcctgcatccggcagtggcggtgtgccaaacagtttgaaaacccaatcattaagtcttgtccagaatgccgtgtgatatcagagtttgtaat

SEQ ID NO: 68976 - DNA, 120 bp, Artificial Sequence
  ENSG00000075975_8 (sequence is synthesized)
tccaagtgtgtattgggtggaagatcagaataaaaagaacgagttgattgaagctttcaaacaggggatggggaaaaaagcctgtaaatactttgagcaaggcaaggggacctgcccatt

SEQ ID NO: 68977 - DNA, 120 bp, Artificial Sequence
  ENSG00000075975_9 (sequence is synthesized)
tggaagcaaatgtctttatcgccatgcttaccccgatgggcggctagcagagcctgagaaacctcggaaacagctcagttctcaaggcactgtgaggttctttaattcagtgcggctctg

SEQ ID NO: 68978 - DNA, 120 bp, Artificial Sequence
  ENSG00000075975_10 (sequence is synthesized)
ggatttcatcgagaaccgagaaagccggcatgtccccaacaatgaagatgtcgacatgacagagctcggggacctcttcatgcacctttctggagtggaatcatcagaaccctaaagagt

SEQ ID NO: 68979 - DNA, 120 bp, Artificial Sequence
  ENSG00000075975_11 (sequence is synthesized)
atcttgggctccatcggccgaaactttcccaagccagggtgtgcggagcttccctgtactgcagccaaggtgacgtgtgacttggatttgagtggagttgggcttagccttagtctcatt

SEQ ID NO: 68980 - DNA, 120 bp, Artificial Sequence
  ENSG00000075975_12 (sequence is synthesized)
caatctccattattacagccatggggaagagtgaaagatataaagtaacctaattaaatgtatggaattgctatttttatagctgatatagttacacctcaagcccctcaggggtaacaa

SEQ ID NO: 68981 - DNA, 120 bp, Artificial Sequence
  ENSG00000075975_13 (sequence is synthesized)
ctaacaaacacccaaactgtttggattgattgctttaaaaaacaaacctggctcttacctttgatcttttcttccccagaaatagtaaacttgcagctgcccctaatgcagcatattttt

SEQ ID NO: 68982 - DNA, 120 bp, Artificial Sequence
  ENSG00000075975_14 (sequence is synthesized)
cttaccaaaggagtcttcagccctataaaaggattcctctatagtgtatttctctagtgtatttagtgtgtcgtcaaaattttgatttatacagagctttcaagaacacacaatgcaaag

SEQ ID NO: 68983 - DNA, 120 bp, Artificial Sequence
  ENSG00000075975_15 (sequence is synthesized)
tgagcgcagcatagctgttaacaaacatacaacttttttctagggctttaagggtggtcatttttttcaagttctctcaagtgtcccaaatcagggtagcaatcttgttgccacatgtgc

SEQ ID NO: 68984 - DNA, 120 bp, Artificial Sequence
  ENSG00000075975_16 (sequence is synthesized)
agcaaacaaagtggaagtatagatcttcttctcccttagggaggctcttgaaggagcaggaggtacagtactgggtagcagtctggccctcctgtcgtctggttggtgttggggcctcca

SEQ ID NO: 68985 - DNA, 120 bp, Artificial Sequence
  ENSG00000075975_17 (sequence is synthesized)
gccagggccctctaggggaaccaagcctctgctctcacctgtgggttcttgcccatcagggtaattgtattgagaactcaaatatacgtgcacttacatgtgtggttcgtactcaagtga

SEQ ID NO: 68986 - DNA, 120 bp, Artificial Sequence
  ENSG00000075975_18 (sequence is synthesized)
tctattatctagctgcaaagcctggctttgatttgaaattttgtaaaaatttcatggcacccaaggtttctgattctgacccagcagtggtcctgaagagagctgatggcaagtcttgta

SEQ ID NO: 68987 - DNA, 120 bp, Artificial Sequence
  ENSG00000075975_19 (sequence is synthesized)
gtcattttgattttaattgaagggtgagcataaccttgtgaaccagcactagcttgttccaagctggaatttatctaatctatttttgtgtttaaaaaagctgtacctaccaaataaata

SEQ ID NO: 68988 - DNA, 120 bp, Artificial Sequence
  ENSG00000075975_20 (sequence is synthesized)
aatagtttataaaatgtattacttaaggtattagctgagtttagagtactttctgcttaattaatttttatacttaactcttcagtagaggtttacaaagagtacaaaggttaaattaca

SEQ ID NO: 68989 - DNA, 120 bp, Artificial Sequence
  ENSG00000075975_21 (sequence is synthesized)
aattcattcccagcctaggctctgggcacatttcctgttcttgaattctgctcctgaagagggtgaacaaatggggcattcaagttgtgagctcagaattactttaaaaggaggtaacag

SEQ ID NO: 68990 - DNA, 120 bp, Artificial Sequence
  ENSG00000075975_22 (sequence is synthesized)
ccagccattacacctaaatttaatttattttattaaaataacataattgagggaccatcagataactgtattttgtcaggtgcaataaaaacaaaattaaaacccaaatcatcaagaaaa

SEQ ID NO: 68991 - DNA, 120 bp, Artificial Sequence
  ENSG00000076003_0 (sequence is synthesized)
gcaaagctgcagcgtctggaaaaaagcgacttgtggcggtcgagcgtggcgcaggcgaatcctcggcactaagcaaatatggacctcgcggcggcagcggagccgggcgccggcagccag

SEQ ID NO: 68992 - DNA, 120 bp, Artificial Sequence
  ENSG00000076003_1 (sequence is synthesized)
cacctggaggtccgcgacgaggtggccgagaagtgccagaaactgttcctggacttcttggaggagtttcagagcagcgatggagaaattaaatacttgcaattagcagaggaactgatt

SEQ ID NO: 68993 - DNA, 120 bp, Artificial Sequence
  ENSG00000076003_2 (sequence is synthesized)
cgtcctgagagaaacacattggttgtgagttttgtggacctggaacaatttaaccagcaactttccaccaccattcaagaggagttctatagagtttacccttacctgtgtcgggccttg

SEQ ID NO: 68994 - DNA, 120 bp, Artificial Sequence
  ENSG00000076003_3 (sequence is synthesized)
aaaacattcgtcaaagaccgtaaagagatccctcttgccaaggatttttatgttgcattccaagacctgcctaccagacacaagattcgagagctcacctcatccagaattggtttgctc

SEQ ID NO: 68995 - DNA, 120 bp, Artificial Sequence
  ENSG00000076003_4 (sequence is synthesized)
actcgcatcagtgggcaggtggtgcggactcacccagttcacccagagcttgtgagcggaacttttctgtgcttggactgtcagacagtgatcagggatgtagaacagcagttcaaatac

SEQ ID NO: 68996 - DNA, 120 bp, Artificial Sequence
  ENSG00000076003_5 (sequence is synthesized)
acacagccaaacatctgccgaaatccagtttgtgccaacaggaggagattcttactggatacaaataaatcaagatttgttgattttcaaaaggttcgtattcaagagacccaagctgag

SEQ ID NO: 68997 - DNA, 120 bp, Artificial Sequence
  ENSG00000076003_6 (sequence is synthesized)
cttcctcgagggagtatcccccgcagtttagaagtaattttaagggctgaagctgtggaatcagctcaagctggtgacaagtgtgactttacagggacactgattgttgtgcctgacgtc

SEQ ID NO: 68998 - DNA, 120 bp, Artificial Sequence
  ENSG00000076003_7 (sequence is synthesized)
tccaagcttagcacaccaggagcacgtgcagaaactaattcccgtgtcagtggtgttgatggatatgagacagaaggcattcgaggactccgggcccttggtgttagggacctttcttat

SEQ ID NO: 68999 - DNA, 120 bp, Artificial Sequence
  ENSG00000076003_8 (sequence is synthesized)
aggctggtctttcttgcctgctgtgttgcgccaaccaacccaaggtttggggggaaagagctcagagatgaggaacagacagctgagagcattaagaaccaaatgactgtgaaagaatgg

SEQ ID NO: 69000 - DNA, 120 bp, Artificial Sequence
  ENSG00000076003_9 (sequence is synthesized)
gagaaagtgtttgagatgagtcaagataaaaatctataccacaatctttgtaccagcctgttccctactatacatggcaatgatgaagtaaaacggggtgtcctgctgatgctctttggt

SEQ ID NO: 69001 - DNA, 120 bp, Artificial Sequence
  ENSG00000076003_10 (sequence is synthesized)
ggcgttccaaagacaacaggagaagggacctctcttcgaggggacataaatgtttgcattgttggtgacccaagtacagctaagagccaatttctcaagcacgtggaggagttcagcccc

SEQ ID NO: 69002 - DNA, 120 bp, Artificial Sequence
  ENSG00000076003_11 (sequence is synthesized)
agagctgtctacaccagtggtaaagcgtccagtgctgctggcttaacagcagctgttgtgagagatgaagaatctcatgagtttgtcattgaggctggagctttgatgttggctgataat

SEQ ID NO: 69003 - DNA, 120 bp, Artificial Sequence
  ENSG00000076003_12 (sequence is synthesized)
ggtgtgtgttgtattgatgaatttgataagatggacgtgcgggatcaagttgctattcatgaagctatggaacagcagaccatatccatcactaaagcaggagtgaaggctactctgaac

SEQ ID NO: 69004 - DNA, 120 bp, Artificial Sequence
  ENSG00000076003_13 (sequence is synthesized)
gcccggacgtccattttggcagcagcaaacccaatcagtggacactatgacagatcaaaatcattgaaacagaatataaatttgtcagctcccatcatgtcccgattcgatctcttcttt

SEQ ID NO: 69005 - DNA, 120 bp, Artificial Sequence
  ENSG00000076003_14 (sequence is synthesized)
atccttgtggatgaatgtaatgaggttacagattatgccattgccaggcgcatagtagatttgcattcaagaattgaggaatcaattgatcgtgtctattccctcgatgatatcagaaga

SEQ ID NO: 69006 - DNA, 120 bp, Artificial Sequence
  ENSG00000076003_15 (sequence is synthesized)
atttccaaagagtcagaggacttcattgtggagcaatataaacatctccgccagagagatggttctggagtgaccaagtcttcatggaggattacagtgcgacagcttgagagcatgatt

SEQ ID NO: 69007 - DNA, 120 bp, Artificial Sequence
  ENSG00000076003_16 (sequence is synthesized)
cgtctctctgaagctatggctcggatgcactgctgtgatgaggtccaacctaaacatgtgaaggaagctttccggttactgaataaatcaatcatccgtgtggaaacacctgatgtcaat

SEQ ID NO: 69008 - DNA, 120 bp, Artificial Sequence
  ENSG00000076003_17 (sequence is synthesized)
ctagatcaagaggaagagatccagatggaggtagatgagggtgctggtggcatcaatggtcatgctgacagccctgctcctgtgaacgggatcaatggctacaatgaagacataaatcaa

SEQ ID NO: 69009 - DNA, 120 bp, Artificial Sequence
  ENSG00000076003_18 (sequence is synthesized)
gagtctgctcccaaagcctccttaaggctgggcttctctgagtactgccgaatctctaaccttattgtgcttcacctcagaaaggtggaagaagaagaggacgagtcagcattaaagagg

SEQ ID NO: 69010 - DNA, 120 bp, Artificial Sequence
  ENSG00000076003_19 (sequence is synthesized)
agcgagcttgttaactggtacttgaaggaaatcgaatcagagatagactctgaagaagaacttataaataaaaaaagaatcatagagaaagttattcatcgactcacacactatgatcat

SEQ ID NO: 69011 - DNA, 120 bp, Artificial Sequence
  ENSG00000076003_20 (sequence is synthesized)
gttctaattgagctcacccaggctggattgaaaggctccacagagggaagtgagagctatgaagaagatccctacttggtagttaaccctaactacttgctcgaagattgagatagtgaa

SEQ ID NO: 69012 - DNA, 120 bp, Artificial Sequence
  ENSG00000076003_21 (sequence is synthesized)
agtaactgaccagagctgaggaactgtggcacagcacctcgtggcctggagcctggctggagctctgctagggacagaagtgtttctggaagtgatgcttccaggatttgttttcagaaa

SEQ ID NO: 69013 - DNA, 120 bp, Artificial Sequence
  ENSG00000076003_22 (sequence is synthesized)
caagaattgagttgatggtcctatgtgtcacattcatcacaggtttcataccaacacaggcttcagcacttcctttggtgtgtttcctgtcccagtgaagttggaaccaaataatgtgta

SEQ ID NO: 69014 - DNA, 120 bp, Artificial Sequence
  ENSG00000076003_23 (sequence is synthesized)
gtctctataaccaatacctttgttttcatgtgtaagaaaaggcccattacttttaaggtatgtgctgtcctattgagcaaataactttttttcaattgccagctactgcttttattcatc

SEQ ID NO: 69015 - DNA, 120 bp, Artificial Sequence
  ENSG00000076003_24 (sequence is synthesized)
aaaataaaataacttgttctgaagttgtctattggatttctttctactgtaccctgattattacttccatctacttctgaatgtgagactttccctttttgcttaacctggagtgaagag

SEQ ID NO: 69016 - DNA, 120 bp, Artificial Sequence
  ENSG00000076003_25 (sequence is synthesized)
gtagaactgtggtattatggatgaggtttctatgagaaggagtcattagagaactcatatgaaagctagaggccttagagatgactttccaaggttaattccagttgttttttttttttt

SEQ ID NO: 69017 - DNA, 120 bp, Artificial Sequence
  ENSG00000076003_26 (sequence is synthesized)
ttaagtttataaaagtttattatacttttttaaaattactctttagtaatttattttacttctgtgtcctaagggtaatttctcaggattgttttcaaattgcttttttaggggaaatag

SEQ ID NO: 69018 - DNA, 120 bp, Artificial Sequence
  ENSG00000076003_27 (sequence is synthesized)
gtcatttgctatattacaagcaatccccaaattttatggtcttccaggaaaagttattaccgtttatgatactaacagttcctgagacttagctatgatcagtatgttcatgaggtggag

SEQ ID NO: 69019 - DNA, 120 bp, Artificial Sequence
  ENSG00000076003_28 (sequence is synthesized)
cagttcctgtgttgcagcttttaacaacagatggcattcattaaatcacaaagtatgttaaaggtcacaaaagcaaaataactgtctgaggctaaggcccacgtgggacagtctaatacc

SEQ ID NO: 69020 - DNA, 120 bp, Artificial Sequence
  ENSG00000076003_29 (sequence is synthesized)
catgagtactcaacttgccttgatgtctgagctttccagtgcaatgtgaatttgagcagccagaaatctattagtagaaagcaagacagattaatataggttaaaacaatgatttaaata

SEQ ID NO: 69021 - DNA, 120 bp, Artificial Sequence
  ENSG00000076003_30 (sequence is synthesized)
tgtttctcccaataattatctctttccctggaatcaacttgtatgaaaccttgtcaaaatgtactccacaagtatgtacaattaagtattttaaaaataaatggcaaacattaaaaacaa

SEQ ID NO: 69022 - DNA, 120 bp, Artificial Sequence
  ENSG00000076003_31 (sequence is synthesized)
gcaaagagtgtgagttaattaattgagcctcaaatactgagcattaatttatttaatgagcactgacatcctgaggtgtaaaagacattacatcttgttccattgcttcagcttgttaag

SEQ ID NO: 69023 - DNA, 120 bp, Artificial Sequence
  ENSG00000076003_32 (sequence is synthesized)
cagcttttagaaatggtcatttgcttaaatactaagccttttttcaggttcataaaattagtaacatggaattcacaagcctccttaatattagtttcttttgaaagacattacaatagt

SEQ ID NO: 69024 - DNA, 120 bp, Artificial Sequence
  ENSG00000076043_0 (sequence is synthesized)
gactattgcgcctgcgccagcgccggctgcgagactggggccgtggctgctggtcccgggtgatgctaggcggctccctgggctccaggctgttgcggggtgtaggtgggagtcacggac

SEQ ID NO: 69025 - DNA, 120 bp, Artificial Sequence
  ENSG00000076043_1 (sequence is synthesized)
ggttcggggcccgaggtgtccgcgaaggtggcgcagccatggcggcaggggagagcatggctcagcggatggtctgggtggacctggagatgacaggattggacattgagaaggaccaga

SEQ ID NO: 69026 - DNA, 120 bp, Artificial Sequence
  ENSG00000076043_2 (sequence is synthesized)
ttattgagatggcctgtctgataactgactctgatctcaacattttggctgaaggtcctaacctgattataaaacaaccagatgagttgctggacagcatgtcagattggtgtaaggagc

SEQ ID NO: 69027 - DNA, 120 bp, Artificial Sequence
  ENSG00000076043_3 (sequence is synthesized)
atcacgggaagtctggccttaccaaggcagtgaaggagagtacaattacattgcagcaggcagagtatgaatttctgtcctttgtacgacagcagactcctccagggctctgtccacttg

SEQ ID NO: 69028 - DNA, 120 bp, Artificial Sequence
  ENSG00000076043_4 (sequence is synthesized)
caggaaattcagttcatgaagataagaagtttcttgacaaatacatgccccagttcatgaaacatcttcattatagaataattgatgtgagcactgttaaagaactgtgcagacgctggt

SEQ ID NO: 69029 - DNA, 120 bp, Artificial Sequence
  ENSG00000076043_5 (sequence is synthesized)
atccagaagaatatgaatttgcaccaaagaaggctgcttctcatagggcacttgatgacattagtgaaagcatcaaagagcttcagttttaccgaaataacatcttcaagaaaaaaatag

SEQ ID NO: 69030 - DNA, 120 bp, Artificial Sequence
  ENSG00000076043_6 (sequence is synthesized)
atgaaaagaagaggaaaattatagaaaatggggaaaatgagaagaccgtgagttgatgccagttatcatgctgccactacatcgttatctggaggcaacttctggtggtttttttttctc

SEQ ID NO: 69031 - DNA, 120 bp, Artificial Sequence
  ENSG00000076043_7 (sequence is synthesized)
acgctgatggcttggcagagcaccttcggttaacttgcatctccagattgattactcaagcagacagcacacgaaatactatttttctcctaatatgctgtttccattatgacacagcag

SEQ ID NO: 69032 - DNA, 120 bp, Artificial Sequence
  ENSG00000076043_8 (sequence is synthesized)
ctcctttgtaagtaccaggtcatgtccatcccttggtacatatatgcatttgcttttaaaccatttcttttgtttaaataaataaataagtaaataaagctagttctattgaaatgcaaa

SEQ ID NO: 69033 - DNA, 120 bp, Artificial Sequence
  ENSG00000076043_9 (sequence is synthesized)
tctgtcgcgaacgcattgtggattgtcaagtattactcaagtcagtcttttggataaggttagacatcaactttcagagaagggggattgctgctctcctgttaatagttgtttcttccc

SEQ ID NO: 69034 - DNA, 120 bp, Artificial Sequence
  ENSG00000076043_10 (sequence is synthesized)
agaggttaatatccttggactttgaacaccgtcttttttgactgtggacatgctattaacagtcaggatcataactaagttggcttggattcttgaagaaaaaaaaatggtgcaaagatg

SEQ ID NO: 69035 - DNA, 120 bp, Artificial Sequence
  ENSG00000076043_11 (sequence is synthesized)
gcagttgcaatttgaacttgagctctaaaaatggtctatttgtggttatatttgcccattttaaaagtgaaatttcatttctggatgcctttgaaaactgactttacatgtgtttttggt

SEQ ID NO: 69036 - DNA, 120 bp, Artificial Sequence
  ENSG00000076043_12 (sequence is synthesized)
cgtttgtggagtaccaggcttatcctccccacatatcaactgtaggagaatcatgagactttgtacttctcatcataacaacttttttaactttgtataaataaagccctgagttttaga

SEQ ID NO: 69037 - DNA, 120 bp, Artificial Sequence
  ENSG00000076043_13 (sequence is synthesized)
catatatccaagtcctggaaagaaagcagatggttgccttagccacacaaataattgtcataaaactcttgcactaaaatttgtgcagggaattctctagaagtggcccttggcccatga

SEQ ID NO: 69038 - DNA, 120 bp, Artificial Sequence
  ENSG00000076043_14 (sequence is synthesized)
ttcagagtttattgatttacttgcacactgttctaataatcttggttacctgatttctcagaatacaacagatgagaaacaacatattggaagaaaagaaaggctcttagatggaggcag

SEQ ID NO: 69039 - DNA, 120 bp, Artificial Sequence
  ENSG00000076043_15 (sequence is synthesized)
aatataaccatcattttttccagcttctttatttaaaaaataagaaagttgaggtctatatgggttaaggtaatgtgctaggtcatggtaggggtggtactagaaccaaagtaatccatc

SEQ ID NO: 69040 - DNA, 120 bp, Artificial Sequence
  ENSG00000076043_16 (sequence is synthesized)
tcacagcctagtgaaaattaaaaattaaacattattttttaattaaccatgccagaaatttacagaaacataaattctgtcgtttactgagcgcttactgtatgccagctacagtttctg

SEQ ID NO: 69041 - DNA, 120 bp, Artificial Sequence
  ENSG00000076043_17 (sequence is synthesized)
atcatatgatatctagtccacattagatgttccccaaaatatttgtttttgaaccaggattcagtcaaggctcgtgcatttcatttagttatatttctttagtctcttaatgtaaaactt

SEQ ID NO: 69042 - DNA, 120 bp, Artificial Sequence
  ENSG00000076043_18 (sequence is synthesized)
tccacctattatttttcccctgtgtcattgactttctaaagagaccaggcctgttctaccaggatttttaaaagggtgacattgccagagggaagttaatgtttctctgaaggtatatgt

SEQ ID NO: 69043 - DNA, 120 bp, Artificial Sequence
  ENSG00000076043_19 (sequence is synthesized)
acgtttgtatatgtaagtcgatgtggtagctaatactgttcttaaacatttataaaaataagttttggcattaagtactagagcatatattgtgtaaatgtttccgccagccaatgtggc

SEQ ID NO: 69044 - DNA, 120 bp, Artificial Sequence
  ENSG00000076043_20 (sequence is synthesized)
tgatatctgttttaaaggtctcatttaaaatttagtgtttttagtataagttactttttggggacataaatatgcatatgatttgtttaaaaatttggattgtaaataaaggtttatcta

SEQ ID NO: 69045 - DNA, 120 bp, Artificial Sequence
  ENSG00000076043_21 (sequence is synthesized)
attcagttaaatttttagtgttagtggtgtgaattttgtgacactgggagaaagtttgcatatcaggtatgaccttagaaagtaacaaatagatttgtgcattacatcaagcatgtggaa

SEQ ID NO: 69046 - DNA, 120 bp, Artificial Sequence
  ENSG00000076043_22 (sequence is synthesized)
tgatagatttgtccttctgttcatgagaggtcatttacaaatttataaggagctaaactgactaagtacttggaaatctgtacttgtaagctaatcacatttacccaaacctgatttaga

SEQ ID NO: 69047 - DNA, 120 bp, Artificial Sequence
  ENSG00000076043_23 (sequence is synthesized)
aatatagaggtgcttttaggaattgtttgaattttaaaaaatcatctccatttcaaatacaacttatgaattttgatatcctgttgtataatactagaaatatagagatgcagtatgctt

SEQ ID NO: 69048 - DNA, 120 bp, Artificial Sequence
  ENSG00000076043_24 (sequence is synthesized)
gatggtattttaaaaaggcttagagaagattgcatggcaagcctgggaaactgcttgcttgtttacttttcatctttgggacctctcgagatcatcttctcctgaatgtcctcttttttt

SEQ ID NO: 69049 - DNA, 120 bp, Artificial Sequence
  ENSG00000076043_25 (sequence is synthesized)
cggacggttcggggcccgaggtgtccgcgaaggtggcgcagccatggcggcaggggagagcatggctcagcggatggtctgggtggacctggagggtcctaacctgattataaaacaacc

SEQ ID NO: 69050 - DNA, 120 bp, Artificial Sequence
  ENSG00000076043_26 (sequence is synthesized)
acctcatttagcatgttttaattgagaatttgtggaaagtaattggatagagctgtagaactaaggctaccaagtgggttcatatcttcctcatcccattcttgcttgtataggacctta

SEQ ID NO: 69051 - DNA, 120 bp, Artificial Sequence
  ENSG00000076043_27 (sequence is synthesized)
acttaccctggactggtgagaattgggagcaacaacgtcagacatgttcccagtaaataagccaatgcctggcacaaaataagtgctcaatacattttctggattaactaatattatgtg

SEQ ID NO: 69052 - DNA, 120 bp, Artificial Sequence
  ENSG00000076053_0 (sequence is synthesized)
agatcgggttcaacggcagggattgggtaaggtgagaatctggcttggcggctccggccccggccatctggttcccttgggctccggccgccaccatccactcgacggctctcggcccga

SEQ ID NO: 69053 - DNA, 120 bp, Artificial Sequence
  ENSG00000076053_1 (sequence is synthesized)
acgcttggtcgcaccgcctgccgaggtcctagatgaatcgcttcaggcctggaaacgaggaagccgtctccggagaccatcgccaacgctgacgcccgcggtctgaggtcgccatgggaa

SEQ ID NO: 69054 - DNA, 120 bp, Artificial Sequence
  ENSG00000076053_2 (sequence is synthesized)
gagcggtaggccaccctgctcctctgatcaccggaggacagggacacattgttcagggccatattcaaacactgcccgcagtacttgcgttacgtccctttgtgaaggcaggcccttcgc

SEQ ID NO: 69055 - DNA, 120 bp, Artificial Sequence
  ENSG00000076053_3 (sequence is synthesized)
ggctccccagatcagtccagcctgtgtcggacccgatgactaagcacacaggaacccataactgagcctgcggaagagccagaagccgccttgcctttaacgaggggtatcctggcgagc

SEQ ID NO: 69056 - DNA, 120 bp, Artificial Sequence
  ENSG00000076053_4 (sequence is synthesized)
atgcgcagaccgtccgcgcacgtcgtcgcccgctgagagcaagcgcaacgggcgttttcgtttgtgacgccagggagcgtgaggacgtggggcttccgtgaatgcgcagtgggtgcgtcg

SEQ ID NO: 69057 - DNA, 120 bp, Artificial Sequence
  ENSG00000076053_5 (sequence is synthesized)
gccacgaccttttggccaggttagggagggggcgacgctgagatgggggcggcggcggcggaagcggatcgcactctctttgtgggcaaccttgaaacgaaagtgaccgaggagctcctt

SEQ ID NO: 69058 - DNA, 120 bp, Artificial Sequence
  ENSG00000076053_6 (sequence is synthesized)
ttcgagcttttccaccaggctgggccagtaataaaggtgaaaattccaaaagataaggatggtaaaccaaagcagtttgcgtttgtgaatttcaaacatgaagtgtctgttccttatgca

SEQ ID NO: 69059 - DNA, 120 bp, Artificial Sequence
  ENSG00000076053_7 (sequence is synthesized)
atgaatctacttaatggaatcaaactttatggaaggcctatcaaaattcaatttagatcaggaagtagtcatgccccacaagatgtcagtttgtcatatccccaacatcatgttggaaat

SEQ ID NO: 69060 - DNA, 120 bp, Artificial Sequence
  ENSG00000076053_8 (sequence is synthesized)
tcaagccctacctccacatctcctagcaggtacgaaaggactatggataacatgacttcatcagcacagataattcagagatctttctcttctccagaaaattttcagagacaagcagtg

SEQ ID NO: 69061 - DNA, 120 bp, Artificial Sequence
  ENSG00000076053_9 (sequence is synthesized)
atgaacagtgctttgagacaaatgtcatatggtggaaaatttggttcttcacctctggatcaatcaggattttcaccatcagttcaatcacacagtcatagtttcaatcagtcttcaagc

SEQ ID NO: 69062 - DNA, 120 bp, Artificial Sequence
  ENSG00000076053_10 (sequence is synthesized)
tcccagtggcgccaaggtacaccatcatcacagcgtaaagtcagaatgaattcttatccctacctagcagatagacattatagccgggaacagcgttacactgatcatgggtctgaccat

SEQ ID NO: 69063 - DNA, 120 bp, Artificial Sequence
  ENSG00000076053_11 (sequence is synthesized)
cattacagaggaaagagagatgatttcttctatgaagacaggaatcatgatgactggagccatgactatgataacagaagagacagtagtagagatggaaaatggcgctcatctcgacac

SEQ ID NO: 69064 - DNA, 120 bp, Artificial Sequence
  ENSG00000076053_12 (sequence is synthesized)
taacacatgttaaaaggacattgtttttatagggtcattttaggccctttgactaagttgatatggaaatattttgttgaaaaactgtacagagcagctttacaagttgtcacatttctt

SEQ ID NO: 69065 - DNA, 120 bp, Artificial Sequence
  ENSG00000076053_13 (sequence is synthesized)
tataaatttttttaaagctacagtttaatacaaaatgaattgcggttttattacattaataacctttcacctcagggttttatgaagaggaaagggttttatgcaaaagaaagtgctaca

SEQ ID NO: 69066 - DNA, 120 bp, Artificial Sequence
  ENSG00000076053_14 (sequence is synthesized)
attcctaatcattttagacactttaggagggggtgaagttgtatgataaagcagatattttaattatttgttatctttttgtattgcaagaaatttcttgctagtgaatcaagaaaacat

SEQ ID NO: 69067 - DNA, 120 bp, Artificial Sequence
  ENSG00000076053_15 (sequence is synthesized)
ccaggttgacagtctaaaatggctactggtattttagttaattcaaaaatgaaacttttcagtgattcactttactaacattctatttgagaaggcttattggtaaagtttggggataaa

SEQ ID NO: 69068 - DNA, 120 bp, Artificial Sequence
  ENSG00000076053_16 (sequence is synthesized)
ggcattgcttaacttcttatataatttaggtataaattctgtgacatgctcttgagctttaccctagttgaacatacatgtgtagatttacacatactgtttcattctaaaatttagaaa

SEQ ID NO: 69069 - DNA, 120 bp, Artificial Sequence
  ENSG00000076053_17 (sequence is synthesized)
taaaatatctctacacgtatatttttacattaaaaatacagtgttagcataaatccccttttcaggaagaacaaaaatgtcagtgcatagttagataaaatggtaaaatgttttactgaa

SEQ ID NO: 69070 - DNA, 120 bp, Artificial Sequence
  ENSG00000076053_18 (sequence is synthesized)
agcatacttttttggaaaatagattcatgaagcctttaagtgctgcttctgtcagtcaaacgttaaaaactttaacattttcaaagtgcccagactgtgtacaaagacacatgtaatgga

SEQ ID NO: 69071 - DNA, 120 bp, Artificial Sequence
  ENSG00000076053_19 (sequence is synthesized)
gattgtacaggttgtttttttgtttgaacctttgaaagagtttaatcttaacgttttctaattttaaaattttaaaatcttgtttaacaaaagcttgtattaagatactgttttcatttc

SEQ ID NO: 69072 - DNA, 120 bp, Artificial Sequence
  ENSG00000076053_20 (sequence is synthesized)
attacagaattgtttataaaagttcatttgttgaaaaataaggatcctttttaataccacagcatttgtactgttcctttttaatatactgaaaatataaaaggaagggtgtgtgttatt

SEQ ID NO: 69073 - DNA, 120 bp, Artificial Sequence
  ENSG00000076053_21 (sequence is synthesized)
tttttttttttatgtcactgacttcagagacattgtacacaaagaattaacatacttttattcactgattgcctgctgtttagaatatcagttctttaattttgagcatcctgaaataca

SEQ ID NO: 69074 - DNA, 120 bp, Artificial Sequence
  ENSG00000076053_22 (sequence is synthesized)
tcttttgtacatatagagcatgatgtttcacaatcagattttcagtgacccctcgattatagcttggagtactttagttaccctcagtggtctctaggagttaaagtacacttagatttc

SEQ ID NO: 69075 - DNA, 120 bp, Artificial Sequence
  ENSG00000076053_23 (sequence is synthesized)
ctgtttataaatgaattcagtttttctgtttctaagtaaatgtagctattcaactactcactatagaattaagataaacaatttgtttgcttaagcattttcacagaatttgtttccaat

SEQ ID NO: 69076 - DNA, 120 bp, Artificial Sequence
  ENSG00000076053_24 (sequence is synthesized)
gagattattatttttgggtatcttatccatatgaaaacttagtaggtttgtagatgttaacgaagattaatactgcatgtttgtttttgttttttttttgagacagagtcttgctacgac

SEQ ID NO: 69077 - DNA, 89 bp, Artificial Sequence
  ENSG00000076053_25 (sequence is synthesized)
ttgtttttgttttttttttgagacagagtcttgctacgacacccaggctagagtgcaatggcgggatctcaggtcactgcaacctccat

SEQ ID NO: 69078 - DNA, 120 bp, Artificial Sequence
  ENSG00000076053_26 (sequence is synthesized)
tgtgagccaccgcgcctggcctaatactgctttattacaacgttatctgtgggtcggatccttttatattggttaacagatgaccctgactcagaataatctttttcaatggctttttga

SEQ ID NO: 69079 - DNA, 120 bp, Artificial Sequence
  ENSG00000076053_27 (sequence is synthesized)
gggaagcttgtgaagttctggtgaatcttctttttcacttcactttcagtgagctgaaagtaaccaaactaaatacatgtattgtgtaaagggacaggacaagacagccttaaaaaattg

SEQ ID NO: 69080 - DNA, 120 bp, Artificial Sequence
  ENSG00000076053_28 (sequence is synthesized)
aatatagttggtgagacaactcagaagtacaggtttgagcatcccttattcaaaatgcttgagaagtgttttgggttctggaatatttgcattaatgcttgccagttgagcatcccaggt

SEQ ID NO: 69081 - DNA, 120 bp, Artificial Sequence
  ENSG00000076053_29 (sequence is synthesized)
ccggaaatccacagtgctccaatgagcctttcccctgagtgtcacatctgtattggcactcaaaaagtttcatattttggagcatttcagatttcagatttgggatgcttcatctatatt

SEQ ID NO: 69082 - DNA, 120 bp, Artificial Sequence
  ENSG00000076053_30 (sequence is synthesized)
gacagctgcaagaacagaaaggaagaagagattatttttgtgggagaacagtttctcccatagtgtttcctgtggaatgctagtgtctcataaagtcttctaaaaaaaagaaaaaaaaaa

SEQ ID NO: 69083 - DNA, 120 bp, Artificial Sequence
  ENSG00000076053_31 (sequence is synthesized)
tcaaatgtttggaagccattttgtgttactgtgtgactttcttttactcaaaaacagcaccataaaatttctgacaagtactataggtaaagaaatccctttatacttaacctagtattt

SEQ ID NO: 69084 - DNA, 120 bp, Artificial Sequence
  ENSG00000076053_32 (sequence is synthesized)
tctacctttccccatctaaaataaaatttttataccactttctaattatgttgtgtgtgcccactttccccatacctactgctaccatcttagagtaggcaattttctcaagaggattat

SEQ ID NO: 69085 - DNA, 120 bp, Artificial Sequence
  ENSG00000076053_33 (sequence is synthesized)
tccaagaacaccctaatgttttcctgcttccagtcttctttcctcaaatttattccacactcttaagaattgaagatgtaaatctgtcactcgcctgaataaagcttcagtggcctctga

SEQ ID NO: 69086 - DNA, 120 bp, Artificial Sequence
  ENSG00000076053_34 (sequence is synthesized)
tttcttaagcattgtgaatagtaaactttatatagcaaactttatatatccctgaaaacgggtaacattgacacatggattttgaaattagaatttcaaaactgagcttaaagtttcatt

SEQ ID NO: 69087 - DNA, 120 bp, Artificial Sequence
  ENSG00000076053_35 (sequence is synthesized)
ttgggttagtgaaaaaacataaactgtatcactaagagagctgggcttgggtactctgaaaagagctaggtttattttctgaaaatacttctcctggctgctttgtaattacttttatat

SEQ ID NO: 69088 - DNA, 120 bp, Artificial Sequence
  ENSG00000076053_36 (sequence is synthesized)
ttcaaacctgtatactgatcagctgtctcatgaatacgggagaaaacctgcaggtctccgagagttctctccctgtgcaacttatcgcttttcagtgctgtgtaccggccattccagctg

SEQ ID NO: 69089 - DNA, 120 bp, Artificial Sequence
  ENSG00000076053_37 (sequence is synthesized)
cctttgtttcgctggactctcagctgtgtcttctgaactcagtgagtttgccaggctctgcctgccctgtcccccaaccccacacaatgcagcctaaacgttccctcaaggtagcacgca

SEQ ID NO: 69090 - DNA, 120 bp, Artificial Sequence
  ENSG00000076053_38 (sequence is synthesized)
cagaaaattttcagagacaagcagtggtaggttgactatttttcaacttgaattgccaaaaaaaaatcatccttagttaaaatgttcgcattgtatcaaataactggtttttaattaact

SEQ ID NO: 69091 - DNA, 120 bp, Artificial Sequence
  ENSG00000076053_39 (sequence is synthesized)
ttgttaagttggaggttttgttcctttagtcctcaaggcgtaagtgaactttttagataactttttctcaaatttttgttagactagcatgatttgtagattgagcactcattttagttt

SEQ ID NO: 69092 - DNA, 120 bp, Artificial Sequence
  ENSG00000076053_40 (sequence is synthesized)
tcactgggctgaaatatatacttaaaagactgaagataaatagaagtaaaactgcttttacatttgtttttcttttcaaccatcatttactcattgtctgatgctcctgtaccctatcct

SEQ ID NO: 69093 - DNA, 120 bp, Artificial Sequence
  ENSG00000076053_41 (sequence is synthesized)
gagtgacttatcataaacttgggtcttctagaccagttccattttaaacttaaccttttctttttttggtggtggtaacatcatcatgagactaggcttaaaatcttagctatctttcac

SEQ ID NO: 69094 - DNA, 120 bp, Artificial Sequence
  ENSG00000076053_42 (sequence is synthesized)
tgtttcatctttgtcatcatttgttcaagtaggaagctgttggtaactatttggtgcctaaatcatgatcttgacttgtagtccccaggcttttgtatttcataggtctgcaaaatgaaa

SEQ ID NO: 69095 - DNA, 120 bp, Artificial Sequence
  ENSG00000076053_43 (sequence is synthesized)
tatagaagtcaaaataaatttgagagaccagtataaaggatgttaacttttatgtacatattgcctatttttctaattgtaccgtagactattaaaataaaaatgatcatatactaatat

SEQ ID NO: 69096 - DNA, 120 bp, Artificial Sequence
  ENSG00000076053_44 (sequence is synthesized)
ttatccacaggcagaatttgggaaccaccggtctagtcaattatgcccccattttcccctcactagttcatcttgcacaccatttcagaattaatattacaattctgttttgcttatctt

SEQ ID NO: 69097 - DNA, 120 bp, Artificial Sequence
  ENSG00000076053_45 (sequence is synthesized)
ccttgcacattgactttccattgtttgtaagatgaagtcagattcctctagcccaattattagggattcttattgtctgattccagtaaaccctgtagccttacctttaattgttcactg

SEQ ID NO: 69098 - DNA, 73 bp, Artificial Sequence
  ENSG00000076053_46 (sequence is synthesized)
ttccagtaaaccctgtagccttacctttaattgttcactgcttattaagatctgaaggccgggtgcggtggct

SEQ ID NO: 69099 - DNA, 120 bp, Artificial Sequence
  ENSG00000076053_47 (sequence is synthesized)
gagccgagatctgtaacctgtctcaaagaattacttggtattctatgaacctgttctgtgtttccctgttatttttgtttgtgcaatttccttttcttggcatatctctcccttaaaata

SEQ ID NO: 69100 - DNA, 120 bp, Artificial Sequence
  ENSG00000076053_48 (sequence is synthesized)
tgaaaatattccatccattgttttaatacccagatcatatgccaccttcatgaaacctttcctaatgatactgatctcctgattctttgttttttacacagtgattttgcattatagtca

SEQ ID NO: 69101 - DNA, 120 bp, Artificial Sequence
  ENSG00000076053_49 (sequence is synthesized)
ttttgtgtgacttattctgagttgcattcttgaggacaaagagtagtatttatgtatatatatgtatcttgtaggtatacattggaatgattgaagctattgtactgctttagttgtgga

SEQ ID NO: 69102 - DNA, 120 bp, Artificial Sequence
  ENSG00000076053_50 (sequence is synthesized)
gtaactgcccttcactgctcaatctatgcattacttcctctagaaagcctttccagagctctgaaatccagattcagtgccaagttatgtattccccaaatatctttttcttttatcata

SEQ ID NO: 69103 - DNA, 120 bp, Artificial Sequence
  ENSG00000076053_51 (sequence is synthesized)
gcctttagactgtattataattttctttttacttgtctgtctctgtagacagctctatgaagacagaccttatcttattcatcactgcattcccaggatccagtgcctggcatatattta

SEQ ID NO: 69104 - DNA, 120 bp, Artificial Sequence
  ENSG00000076053_52 (sequence is synthesized)
acagtgaaactttttgatgaaaggaagaacgtctgttaattgaataaggaaaaggaggattcaacacataaaactttgaataggctctctaaacctaaaacattgcatcctgagaattac

SEQ ID NO: 69105 - DNA, 120 bp, Artificial Sequence
  ENSG00000076053_53 (sequence is synthesized)
atgtcacagtacatgtattctagaattctatttgttcattttgtcaaacttcaaaaagttttggatctgtattcatgaataatgtgtgactttgtttttattttattttaatttatttat

SEQ ID NO: 69106 - DNA, 120 bp, Artificial Sequence
  ENSG00000076053_54 (sequence is synthesized)
actttgtttttattttattttaatttatttatggcagagcctcactctgtcacccaggctggagtagagtggcacaatctcagctcactgctacctccgcctcctgggttccagtgattc

SEQ ID NO: 69107 - DNA, 120 bp, Artificial Sequence
  ENSG00000076053_55 (sequence is synthesized)
gggattacaggcatgagtcactgtaccagcctgattttgttttttaattgtattatcttagtttggtttaggagtatggttctgctagccttataaaataaattggcaagcttatcatct

SEQ ID NO: 69108 - DNA, 120 bp, Artificial Sequence
  ENSG00000076053_56 (sequence is synthesized)
tatcatcttctatgcccccccccaaatttgaataataaaggaattagccgtttctgcaagatgtgttgaactcatttatacaactatctgggtttgctttggaaatagctctttgattgc

SEQ ID NO: 69109 - DNA, 120 bp, Artificial Sequence
  ENSG00000076053_57 (sequence is synthesized)
tttatcaatttcctttagagttatcttttcaggtttgctactttctcaggaaacaatttggataatttatacttttcaagaaaatcaaccattccctttttctgaatatattgctataga

SEQ ID NO: 69110 - DNA, 120 bp, Artificial Sequence
  ENSG00000076053_58 (sequence is synthesized)
gttgtacatagtatttcttataatttttgtaaaactcctaatattgtcaatagtgcagttttagtttctgacgatatattttaccttccctctcatcctcagatgagactggctgtgctg

SEQ ID NO: 69111 - DNA, 120 bp, Artificial Sequence
  ENSG00000076053_59 (sequence is synthesized)
ttttggcatacatcttacatttatatatgttataagccccacactaccttgtttttgttaggcagattcttaaataatagaaaattatatataatacttaagaaaaaataggaaaaaaaa

SEQ ID NO: 69112 - DNA, 120 bp, Artificial Sequence
  ENSG00000076067_0 (sequence is synthesized)
agcccgagctcattctctgcccgcagccccccttcatctctctcctcctgctccttttctcctcctttctcctccccctcccttttttcctccctccctctccccctttccctcgctccc

SEQ ID NO: 69113 - DNA, 120 bp, Artificial Sequence
  ENSG00000076067_1 (sequence is synthesized)
ctcctccctccctccccgtctttcttaccccctccctttctctctctctctctctctcgctcgttccctaacattaaagagaaaatgctgctatccgtgacttccaggcccgggatttcg

SEQ ID NO: 69114 - DNA, 120 bp, Artificial Sequence
  ENSG00000076067_2 (sequence is synthesized)
acttttggctacaatagaaacaacaagaagccatatgtgtcattggctcagcagatggcaccacctagcccaagcaacagtacacctaacagcagtagtggaagcaatggaaatgaccag

SEQ ID NO: 69115 - DNA, 120 bp, Artificial Sequence
  ENSG00000076067_3 (sequence is synthesized)
ctgagcaaaaccaacctatacatccgaggattgcaaccaggcactactgaccaagatcttgtcaagctgtgtcagccatatggcaagattgtttccactaaggccatactggacaagacc

SEQ ID NO: 69116 - DNA, 120 bp, Artificial Sequence
  ENSG00000076067_4 (sequence is synthesized)
acaaacaaatgtaaaggctatggctttgtagattttgacagcccttcagcagcacagaaagctgtaacagcactgaaggccagcggtgtacaggcacagatggcaaagcaacaggaacag

SEQ ID NO: 69117 - DNA, 120 bp, Artificial Sequence
  ENSG00000076067_5 (sequence is synthesized)
gaccccacaaatttatacatctcaaacctcccactgtcaatggatgagcaggaactggaggggatgctgaagccctttggccaggttatctccacccgtatccttcgagataccagtggg

SEQ ID NO: 69118 - DNA, 120 bp, Artificial Sequence
  ENSG00000076067_6 (sequence is synthesized)
accagcagaggtgttggctttgcaaggatggagtccacagagaagtgtgaagccatcatcacccactttaatggaaaatatattaagacaccccctggagtaccagccccatccgatccc

SEQ ID NO: 69119 - DNA, 120 bp, Artificial Sequence
  ENSG00000076067_7 (sequence is synthesized)
ttgctttgcaaatttgctgatggcgggccaaagaaacgacagaaccaaggaaaatttgtgcaaaatggacgggcttggccaaggaatgcagacatgggcgtcatggccttgacctatgac

SEQ ID NO: 69120 - DNA, 120 bp, Artificial Sequence
  ENSG00000076067_8 (sequence is synthesized)
cccaccacagctcttcagaatgggttttacccagccccctataacatcacccccaacaggatgcttgctcagtctgcactctccccatacctttcctctcctgtgtcttcgtatcagaga

SEQ ID NO: 69121 - DNA, 120 bp, Artificial Sequence
  ENSG00000076067_9 (sequence is synthesized)
gtgactcagacatctcctctacaagtacctaacccatcctggatgcaccaccattcatacctcatgcagccttcaggttcagttctgacaccagggatggaccatcccatttctctccag

SEQ ID NO: 69122 - DNA, 120 bp, Artificial Sequence
  ENSG00000076067_10 (sequence is synthesized)
cctgcctccatgatgggaccccttacccagcaactgggccatctctccctcagcagcacaggcacgtatatgccgacggctgcagctatgcaaggagcttacatctcccagtacacccct

SEQ ID NO: 69123 - DNA, 120 bp, Artificial Sequence
  ENSG00000076067_11 (sequence is synthesized)
gtgccttcttccagtgtttcagtcgaggagagcagcggccaacagaaccaagtggcagtggacgcaccctcagagcatggggtctattctttccagttcaacaagtaacagtgggattcc

SEQ ID NO: 69124 - DNA, 120 bp, Artificial Sequence
  ENSG00000076067_12 (sequence is synthesized)
cctccccatctttactgaatagaaatgaattcttggagatactcatgctcccagattccagagggttaaccaggaatggagaccatccgtcggccctgctaaggactaacacttagccat

SEQ ID NO: 69125 - DNA, 120 bp, Artificial Sequence
  ENSG00000076067_13 (sequence is synthesized)
cgtttttcacaggcctgggcctggaaaaagaaatctctacgttcctgccctttactattgctgatggagcctgggggaaccatcactttttttgtgtgctacattcaaggagatcaaaaa

SEQ ID NO: 69126 - DNA, 120 bp, Artificial Sequence
  ENSG00000076067_14 (sequence is synthesized)
aacttttcttcttttgcaaagaaagctttttgtttttaactgcaacgtacttttcccctaccttgaagagacatggtggtcgcagcttctcatctatatgaaaaagttttcgatgtattg

SEQ ID NO: 69127 - DNA, 120 bp, Artificial Sequence
  ENSG00000076067_15 (sequence is synthesized)
gaattatttgggaatgcttttaaaacaatttgtaattatttctttacaaaccaaaacagaacagaaaggtgtggtgctggaacatcgatgaaggagccctacttactgagcttagttatg

SEQ ID NO: 69128 - DNA, 120 bp, Artificial Sequence
  ENSG00000076067_16 (sequence is synthesized)
gacttttttgatgcatgtgtgtatgtgttttaaaaagtatgcaggctctaaaaatgttattttgtaaagctctcagctcatgcaccccatctcctcttcacccatattatgccttctttc

SEQ ID NO: 69129 - DNA, 120 bp, Artificial Sequence
  ENSG00000076067_17 (sequence is synthesized)
tcttgtccagattcttctttttctcttttctaaacagctgagcctgcctactttgcccttttacagcttttaattttatggatttttaaaaatgaaatttcatgtggaatttggggttgg

SEQ ID NO: 69130 - DNA, 120 bp, Artificial Sequence
  ENSG00000076067_18 (sequence is synthesized)
ggggcaggctgggcaaggaacaaggcagaacactaagtaggccatggaagtggctgttctttcccccaccctgccacaccctgggagaaaaaactagactttggcttcagaaagcacaga

SEQ ID NO: 69131 - DNA, 120 bp, Artificial Sequence
  ENSG00000076067_19 (sequence is synthesized)
tgtgacccaggcttactaaagagacaactccacagccctgggaacacacccttgagccaaacttggttgaagactaggtcttccctggcaagttccggaagaatggacttactgactttt

SEQ ID NO: 69132 - DNA, 120 bp, Artificial Sequence
  ENSG00000076067_20 (sequence is synthesized)
atcaactcttctcactgccaaggccaacagcatctgaggtatagctttttgggagtacctgctttcttgcctcctggaggatattttctgtcctgggcttcatggcccctctcttccctg

SEQ ID NO: 69133 - DNA, 120 bp, Artificial Sequence
  ENSG00000076067_21 (sequence is synthesized)
ttacacattgctgtgctcagagcctttgcagctgcgacctagttgaatccacataggctccttccacacggtggaagatctgctgcttcactcacagaccaggagttctcaatcagaggt

SEQ ID NO: 69134 - DNA, 120 bp, Artificial Sequence
  ENSG00000076067_22 (sequence is synthesized)
ggttttgtccctcaggcctttggcaacatctagagacagttttgattgccacgcctggaggtgggatgtgtgtgctactggcatctagtggctgctaaacatcctacactgcataggata

SEQ ID NO: 69135 - DNA, 120 bp, Artificial Sequence
  ENSG00000076067_23 (sequence is synthesized)
gtccccactacccccagccaagaattatctgactccaggggtcaatattgccaagactgggaaacactgatatagacagtgttgtccctgcctcctgggttagggtaaattttcacccca

SEQ ID NO: 69136 - DNA, 120 bp, Artificial Sequence
  ENSG00000076067_24 (sequence is synthesized)
accctggacaaacagtgccttttgacactcatgcaactgttggggaaggactggactgggatccttgaattctccccagactttgacttttgataactctgcatatagcaagagtgattc

SEQ ID NO: 69137 - DNA, 120 bp, Artificial Sequence
  ENSG00000076067_25 (sequence is synthesized)
ttgaaagagctgtggctccatgctgaatgcacacatgtactcagagggattcaggtgggcattgttctggtgtgtgctgtgcaatggtgggaaaggacaaagctctctaaactgtccaga

SEQ ID NO: 69138 - DNA, 120 bp, Artificial Sequence
  ENSG00000076067_26 (sequence is synthesized)
gcaacctgccctgccccggtgtgcttggaccctttgcccagggaaccaggacatcagaaataatgttccttctgtggaaggacaacggggagctagggtagcaaagagcaataaattcca

SEQ ID NO: 69139 - DNA, 120 bp, Artificial Sequence
  ENSG00000076067_27 (sequence is synthesized)
actctttatgaggtcaggagtcctttaaaaaagcctatgtcttggtctttaactgtccccttctgcaagatgtgactctatacacatggagacagattgaagaaagacttcacccatctt

SEQ ID NO: 69140 - DNA, 120 bp, Artificial Sequence
  ENSG00000076067_28 (sequence is synthesized)
ctaggaaataaaatcctgctcttgtcttctcccagtcactcccttatgcactgaaaggagaatttgactcccttgcacttcaaggccaggtgcctctccactagacagtcagacaaaggc

SEQ ID NO: 69141 - DNA, 120 bp, Artificial Sequence
  ENSG00000076067_29 (sequence is synthesized)
aaataatggaggatagagagacaggtgttcattaggctggccatagggagaggaagggggtgacagcaggggaaaagaaactgtagtatcagttgtcacaagtagagctcggcccagctt

SEQ ID NO: 69142 - DNA, 120 bp, Artificial Sequence
  ENSG00000076067_30 (sequence is synthesized)
tccctcccttcccagccaccctagaattgagagtcccagtgcccctagtgtcgactttctatgtacatcctaggggtgagggagtgcggggcaatgggtaggatataaagcgtaaaggac

SEQ ID NO: 69143 - DNA, 120 bp, Artificial Sequence
  ENSG00000076067_31 (sequence is synthesized)
aaattgccgcagtcttctaattgatgcttccaaactcaggaagggcttatccagtgtaaaatagccccaagcccagcaaccttctagagggctctggctgggcagatagcttttgttttt

SEQ ID NO: 69144 - DNA, 120 bp, Artificial Sequence
  ENSG00000076067_32 (sequence is synthesized)
gagtctccagccctcagtcaaggaaaatataccatagctgctttcttgtcagtggcctttgagagaaagagaaaacaaatctagaattctgttcatctgatagaccgggggagctttgct

SEQ ID NO: 69145 - DNA, 120 bp, Artificial Sequence
  ENSG00000076067_33 (sequence is synthesized)
atggtaggaggtttaggaagggcctttcacgcatagaaaccattgttgatattgccactcccctctcctctgcctcacagaactcctgattctgtcttctttctctctctatatatatat

SEQ ID NO: 69146 - DNA, 120 bp, Artificial Sequence
  ENSG00000076067_34 (sequence is synthesized)
tttaaaatgtttaaatggctctaattttttgttttgaattttgaatttaccttttggagttcttctcatgtgaatctacttgttagattgtattaatgagtgtttctggtttgggcatgg

SEQ ID NO: 69147 - DNA, 120 bp, Artificial Sequence
  ENSG00000076067_35 (sequence is synthesized)
ctcctaattgttagttcatttgtaacagtgggtgagtgtttggaggaaaggagggagaagaaaggagggatactgtttctcccatgaaatagtctaattggttgggttgatggcagaagg

SEQ ID NO: 69148 - DNA, 120 bp, Artificial Sequence
  ENSG00000076067_36 (sequence is synthesized)
aaacataggggagccttccagctcacagccaagggttgggctcttaaacactatgcctagtgttttctgaatgctgtcttcatggagcccagctcttactctctttgtactttacatctc

SEQ ID NO: 69149 - DNA, 120 bp, Artificial Sequence
  ENSG00000076067_37 (sequence is synthesized)
acccccactcattacagatgctcataacattcttaaaatattttagtacttggcatttttctgttttcagtcagctagaacacactagagtcctttcctcagatggcataatcctttata

SEQ ID NO: 69150 - DNA, 120 bp, Artificial Sequence
  ENSG00000076067_38 (sequence is synthesized)
ggctctgagcctgcctagccatctcctatcggtgttattactcctcatctcaggctctgagatgatactcagaccctaaactgattggactttttggaggagggtgccagtagagaggtc

SEQ ID NO: 69151 - DNA, 88 bp, Artificial Sequence
  ENSG00000076067_39 (sequence is synthesized)
ctgattggactttttggaggagggtgccagtagagaggtcaggaagatgtggagatgatgatggagagagatgtttttattttatttt

SEQ ID NO: 69152 - DNA, 120 bp, Artificial Sequence
  ENSG00000076067_40 (sequence is synthesized)
gctgtgtcacccaggctggagtgcagtgatgcagtcgtagtctactacagtcttgaattcctgggcccaagggttcttcccacctaagcctcccaagtagctggaagtacaggcacatac

SEQ ID NO: 69153 - DNA, 120 bp, Artificial Sequence
  ENSG00000076067_41 (sequence is synthesized)
ttcccacctaagcctcccaagtagctggaagtacaggcacatactaccaagcccagttcgttattttaagtttttgtagagacaggggtcttactatgttgcccagactggtcttgaact

SEQ ID NO: 69154 - DNA, 120 bp, Artificial Sequence
  ENSG00000076067_42 (sequence is synthesized)
cctcagcctcccaaagtgctatgattacaggtgtgagcctccatgcttggatgagatgttgtttttaatgtttttggttttttggttttgttgttttgtttttttgagacagggtctcac

SEQ ID NO: 69155 - DNA, 120 bp, Artificial Sequence
  ENSG00000076067_43 (sequence is synthesized)
gcagtggcaccataatggctcactgcagcctcgacctcccaaggctcaggtgatcctcttgcctcagccaccccttccccggccaccaagtagctgggactatgggcttgtgccaccatg

SEQ ID NO: 69156 - DNA, 83 bp, Artificial Sequence
  ENSG00000076067_44 (sequence is synthesized)
gatggggttttaccacgttggccaggctagtgtccaactcctgacctccaaagccatgttgcccagcctcgtctcgaactcct

SEQ ID NO: 69157 - DNA, 62 bp, Artificial Sequence
  ENSG00000076067_45 (sequence is synthesized)
ttttgtatttttaatagagacaggttttcgccatgttgcccagcctcgtctcgaactcctgg

SEQ ID NO: 69158 - DNA, 120 bp, Artificial Sequence
  ENSG00000076067_46 (sequence is synthesized)
caggcgtgagccactgcacccggccctttgtagtgtttttaactaaagaatttgtagagttgcccaggccaggaagcctggtggctctaaagggtaatagaccttgtcagtaacagataa

SEQ ID NO: 69159 - DNA, 120 bp, Artificial Sequence
  ENSG00000076067_47 (sequence is synthesized)
ggtaatagaccttgtcagtaacagataaggagtggtaagaggacattactcatattgaagatgaagaccagactttgctgcttcacaggccatgcgctgggttgggccacttcagctcca

SEQ ID NO: 69160 - DNA, 120 bp, Artificial Sequence
  ENSG00000076067_48 (sequence is synthesized)
ctccattcgttttcctttcctaacttgacaatcagctcactcaccctcccttagtgcctccagtgcctactcctgtcactccaatgtcaacccattgggagttgaggcctgtcactccaa

SEQ ID NO: 69161 - DNA, 120 bp, Artificial Sequence
  ENSG00000076067_49 (sequence is synthesized)
tgtcaacccgtgggctgttactttgcgtcatatgatgctgtgagaggccttgctggaatgtcctaggaatccctagtagcagtggctattagtcttctagaaaagaactattgctgctgc

SEQ ID NO: 69162 - DNA, 120 bp, Artificial Sequence
  ENSG00000076067_50 (sequence is synthesized)
cttgtgcacatgccccaccttctgggcaagtggcagcattgcgctcatgaggggctttgcattcttagccaagggcaataaactgggtgggtgatctggcccaaacttgcccctaggctc

SEQ ID NO: 69163 - DNA, 120 bp, Artificial Sequence
  ENSG00000076067_51 (sequence is synthesized)
tgctagccctgaatcagcaggcttcagagacgagggtgggtgttataaaagccagtctgtaaagggtaaattccaaatcttgtgccttgttataccaatccttcctgattcccgtttaaa

SEQ ID NO: 69164 - DNA, 120 bp, Artificial Sequence
  ENSG00000076067_52 (sequence is synthesized)
ccaactactctatttctgtgctgcctacattttcaatcctcccacgcattagcaaattcctgaaatttcctcatttggtaggccttccataggagtcagctatggacttccataggagtt

SEQ ID NO: 69165 - DNA, 120 bp, Artificial Sequence
  ENSG00000076067_53 (sequence is synthesized)
ggcagctaaaaccagactgtgagcttctgtctccgttctgatttttgctgcacctcccaggggacagtccccacatgattacaaaagccaggtgccctcatcacccgttacccctgacct

SEQ ID NO: 69166 - DNA, 120 bp, Artificial Sequence
  ENSG00000076067_54 (sequence is synthesized)
gtccacttgttttgaataaaccttcattctccaagcagatccccaaacttccttgtccttgttacacgtctacctcacaacctcacaattcaacaacaggtaaatacctggattcactga

SEQ ID NO: 69167 - DNA, 120 bp, Artificial Sequence
  ENSG00000076067_55 (sequence is synthesized)
tttctttactgtccttctctgagggttgggaaggtgggggctagaaaaggctcataatttttaaactcttgggaattaaacttgggaatttctattcctacagtgttttctctgggattt

SEQ ID NO: 69168 - DNA, 120 bp, Artificial Sequence
  ENSG00000076067_56 (sequence is synthesized)
ttagctcactgatcgccctagaatagtgtgaactctccagataggtcctgctgtgataggccaggggagtaggctgtgcagtgacggcttagggtaataagtaatggttggaggacacca

SEQ ID NO: 69169 - DNA, 120 bp, Artificial Sequence
  ENSG00000076067_57 (sequence is synthesized)
gcataggagcagagtttagaacttaagaggacaagaaagctgctcagtggctggcgtatagctgtgaaggtaaccaaacaccaaagagggagtctgtcatttttataaggctggaagcga

SEQ ID NO: 69170 - DNA, 120 bp, Artificial Sequence
  ENSG00000076067_58 (sequence is synthesized)
atgttccttttctaccttaacatacagtttagggggttgcaccaagacaaagtttccaggctggagggtaatacatatccagcgcgagtgaagtccccactccaacatataccctttttg

SEQ ID NO: 69171 - DNA, 120 bp, Artificial Sequence
  ENSG00000076067_59 (sequence is synthesized)
ggtgggtaaacacctctttgcatgtggacagaaaatgtttatacttaaacagacatattttgcatatttttatctggagacttcttctagttttatactcttcccacatctatgccaatg

SEQ ID NO: 69172 - DNA, 120 bp, Artificial Sequence
  ENSG00000076067_60 (sequence is synthesized)
ccaccattctaaaacttacactccttttctacccctggtcttttccttgtccttccctacaacttggtagaggtccattttgtcttacttcacacttttttttttttaaataaaacacaa

SEQ ID NO: 69173 - DNA, 120 bp, Artificial Sequence
  ENSG00000076067_61 (sequence is synthesized)
aagtctacgtcttggtgtcttatccgtgagtgggaagtggtaagctggtgatggtcccatatttgctatgacaggaacacagaggtggcagcttaggaagctggggccacatctcacaag

SEQ ID NO: 69174 - DNA, 120 bp, Artificial Sequence
  ENSG00000076067_62 (sequence is synthesized)
gcaggacctggatgcactgaatccccctttgctccagcaactcagccagacatttaggcaggagcactaatgaccctttccatccacacagagggtatggaacaggagcccctgttgttc

SEQ ID NO: 69175 - DNA, 120 bp, Artificial Sequence
  ENSG00000076067_63 (sequence is synthesized)
ccttgcctgtggtctcttaagccagtcatacctatcccaacgccgtctccccctcaggtgtgtagaagggaagatgaatacacagagtcttttgaatctctatcaaatgtggtttttttt

SEQ ID NO: 69176 - DNA, 120 bp, Artificial Sequence
  ENSG00000076067_64 (sequence is synthesized)
attcaacaactgacaagcacttttctacagctgcacttgtggaacatcacatggcaaaaacaggagttttttcgctagactttttttttctttttaaccttattaaaaatgagattggtc

SEQ ID NO: 69177 - DNA, 120 bp, Artificial Sequence
  ENSG00000076067_65 (sequence is synthesized)
ctaaaaatatagaaagaaataaatttaaattcacaaaaaactgtacattatcaaaaagtcactaaaacaccacatttggttatataaaaagtcccttttgctgtaaaaggaacacagaaa

SEQ ID NO: 69178 - DNA, 120 bp, Artificial Sequence
  ENSG00000076067_66 (sequence is synthesized)
ctcgttccctaacattaaagagaaaatgctgctatccgtgacttccaggcccgggatttcgacttttggctacaatagaaacaacaagaagatatggcaagattgtttccactaaggcca

SEQ ID NO: 69179 - DNA, 63 bp, Artificial Sequence
  ENSG00000076067_67 (sequence is synthesized)
tctgatggagtccacagagaagtgtgaagccatcatcacccactttaatggaaaatatattaa

SEQ ID NO: 69180 - DNA, 120 bp, Artificial Sequence
  ENSG00000076067_68 (sequence is synthesized)
tactaacgacattaaagtggaacggaaatgatcatggcatgatttctgtgagcttaggtggaaagcttgagagctacagtacgtaattgagaaatgctggctgtgaacatactgccagtt

SEQ ID NO: 69181 - DNA, 120 bp, Artificial Sequence
  ENSG00000076067_69 (sequence is synthesized)
ctctctctcgctcgttccctaacattaaagagaaaatgctgctatccgtgacttccaggcccgggatttcgacttttggctacaatagaaacaacaagaagatggagtttcgttcgctct

SEQ ID NO: 69182 - DNA, 120 bp, Artificial Sequence
  ENSG00000076067_70 (sequence is synthesized)
ctcgctcgttccctaacattaaagagaaaatgctgctatccgtgacttccaggcccgggatttcgacttttggctacaatagaaacaacaagaaggagaatatgcaatatgcaatataac

SEQ ID NO: 69183 - DNA, 120 bp, Artificial Sequence
  ENSG00000076108_0 (sequence is synthesized)
agtctgtcacacagggacatcaccctacagcagttcaggctgtgtggttcgcaggaagcatacactggctttttgattcttgctagttcccagctcacagtttgggaggatccaacacca

SEQ ID NO: 69184 - DNA, 120 bp, Artificial Sequence
  ENSG00000076108_1 (sequence is synthesized)
acctttacgtgaagtggaggcccaaggacagtgaggagctgggtggtcccagcctggagctgtgccagcctgacatggaaatggaggcaaacgaccattttaactttactggccttcccc

SEQ ID NO: 69185 - DNA, 120 bp, Artificial Sequence
  ENSG00000076108_2 (sequence is synthesized)
ctgcacctgctgcctcaggactgaaaccctctccttcctcaggggagggcctctacactaacgggtctcccatgaacttcccccagcaagggaaaagtttgaatggggatgtgaatgtta

SEQ ID NO: 69186 - DNA, 120 bp, Artificial Sequence
  ENSG00000076108_3 (sequence is synthesized)
atggcttatctactgtatctcacactactacttcagggattttgaactctgctccccactcctccagcacctcacacctccatcaccccagcgtggcctacgactgtctctggaactact

SEQ ID NO: 69187 - DNA, 120 bp, Artificial Sequence
  ENSG00000076108_4 (sequence is synthesized)
cacagtacccatctgccaatcctggcagcaacctcaaggacccaccccttctctcccagttctcggggggacaatacccactcaacggcatccttgggggcagccggcaaccttcatccc

SEQ ID NO: 69188 - DNA, 120 bp, Artificial Sequence
  ENSG00000076108_5 (sequence is synthesized)
caagtcataacactaaccttcgggctgggagccaagagttctgggccaacggtacccagagtcccatggggcttaactttgattcacaagaactgtatgattcctttcctgaccagaatt

SEQ ID NO: 69189 - DNA, 120 bp, Artificial Sequence
  ENSG00000076108_6 (sequence is synthesized)
ttgaggtgatgcccaatggaccccctagttttttcacctccccacagacttctcctatgttgggatctagcattcaaacctttgcaccctcccaggaggtaggcagtggtatccatcctg

SEQ ID NO: 69190 - DNA, 120 bp, Artificial Sequence
  ENSG00000076108_7 (sequence is synthesized)
atgaggcagcagaaaaggagatgacttcagttgtggcagagaatggcactggcttggtaggcagcttggagctggaagaagagcagccagaactgaagatgtgtggctacaatggctctg

SEQ ID NO: 69191 - DNA, 120 bp, Artificial Sequence
  ENSG00000076108_8 (sequence is synthesized)
tcccttctgtggaatcgttacaccaagaggtctcagtcctggtccctgaccccacagtgagctgtttagatgatccttcacatcttcctgatcaactggaagacactccaatcctcagtg

SEQ ID NO: 69192 - DNA, 120 bp, Artificial Sequence
  ENSG00000076108_9 (sequence is synthesized)
aagactctctggagcccttcaactctctggcaccagagccagtgagtggaggactatatggtattgatgacacggagctgatgggtgcagaggacaagctgcctcttgaggacagccctg

SEQ ID NO: 69193 - DNA, 120 bp, Artificial Sequence
  ENSG00000076108_10 (sequence is synthesized)
tgatttctgcccttgattgcccttccctcaataatgctactgccttcagtctcctggcagatgatagtcaaacatcaacctctatctttgccagtcccacctctccacctgtcctagggg

SEQ ID NO: 69194 - DNA, 120 bp, Artificial Sequence
  ENSG00000076108_11 (sequence is synthesized)
agtctgtcctgcaagataacagctttgacctgaataatggtagtgacgctgaacaggaagaaatggaaactcaatcttcagacttcccaccatccctgacccagccagctcctgatcagt

SEQ ID NO: 69195 - DNA, 120 bp, Artificial Sequence
  ENSG00000076108_12 (sequence is synthesized)
catccactattcagctacatccagcaacctcaccagcagtctcgccaacaacctccccagcagtctccctagtggtttctccagcagcctccccagaaatctctccagaagtttgtcccg

SEQ ID NO: 69196 - DNA, 120 bp, Artificial Sequence
  ENSG00000076108_13 (sequence is synthesized)
cagcttctacagttgtctctccagcagtcttctcagtggtctctccagcttcctcagcagtcctcccagcagtctccttagaagtcccgttgacggcttcagtgacatccccaaaagcct

SEQ ID NO: 69197 - DNA, 120 bp, Artificial Sequence
  ENSG00000076108_14 (sequence is synthesized)
ctcccgtaacttccccagcagctgcctttccaacagcctccccagcaaataaggatgtcagcagctttctagaaaccactgctgacgtggaagagatcactggagaaggactcactgctt

SEQ ID NO: 69198 - DNA, 120 bp, Artificial Sequence
  ENSG00000076108_15 (sequence is synthesized)
ctggtagtggtgatgtcatgaggagacgtattgctaccccagaagaagttcgtcttcccctccaacatgggtggcggagagaggtgcgcatcaagaagggcagccaccgatggcaggggg

SEQ ID NO: 69199 - DNA, 120 bp, Artificial Sequence
  ENSG00000076108_16 (sequence is synthesized)
agacctggtattatggcccctgtgggaagaggatgaagcaatttccagaagtgatcaagtacctgagccgcaacgtggtacacagtgtccgccgagagcacttcagcttcagtccccgta

SEQ ID NO: 69200 - DNA, 120 bp, Artificial Sequence
  ENSG00000076108_17 (sequence is synthesized)
tgcctgttggagatttctttgaagaaagagacacgccagagggcttgcagtgggtgcagctctcagcagaggagatcccgtcgaggattcaggcaattactggcaaacggggtcgacctc

SEQ ID NO: 69201 - DNA, 120 bp, Artificial Sequence
  ENSG00000076108_18 (sequence is synthesized)
gaaacactgagaaggctaagactaaggaagtccccaaggtgaaacggggtcgaggtcggccacctaaggtcaaaatcactgagctattgaacaagacagacaaccgccccctaaagaaac

SEQ ID NO: 69202 - DNA, 120 bp, Artificial Sequence
  ENSG00000076108_19 (sequence is synthesized)
tggaggcccaagaaacattgaatgaggaggataaagcaaagattgctaaaagcaagaagaagatgaggcagaaggttcaacggggagagtgtcagactactatccaagggcaggccagaa

SEQ ID NO: 69203 - DNA, 120 bp, Artificial Sequence
  ENSG00000076108_20 (sequence is synthesized)
ataagcggaaacaagagaccaagagcttaaagcagaaggaagctaagaagaaatccaaggctgagaaagaaaaaggaaagacaaagcaggaaaaactgaaggaaaaagtcaagagggaaa

SEQ ID NO: 69204 - DNA, 120 bp, Artificial Sequence
  ENSG00000076108_21 (sequence is synthesized)
agaaggagaaggtaaaaatgaaggaaaaggaggaggtgaccaaagccaagccagcctgtaaagcagataagaccctggccacacagaggcgcttggaggaacggcagaggcagcagatga

SEQ ID NO: 69205 - DNA, 120 bp, Artificial Sequence
  ENSG00000076108_22 (sequence is synthesized)
tcttggaggaaatgaagaagccgacagaggatatgtgtctgactgaccaccagcccctgcctgacttctcacgagtccctggtctgacattgcccagtggagccttctcagactgcttga

SEQ ID NO: 69206 - DNA, 120 bp, Artificial Sequence
  ENSG00000076108_23 (sequence is synthesized)
ccattgtggagttcctgcatagctttggcaaggtgctgggctttgatcctgccaaagatgtgcctagcctgggggtcctgcaggagggactcctgtgtcaaggtgacagcttgggtgagg

SEQ ID NO: 69207 - DNA, 120 bp, Artificial Sequence
  ENSG00000076108_24 (sequence is synthesized)
tgcaagacctgctggtcaggctgctgaaggctgcactccatgatcctggctttccctcctactgtcagtccctaaagatcttgggggagaaggtgtctgagatcccactgacaagagaca

SEQ ID NO: 69208 - DNA, 120 bp, Artificial Sequence
  ENSG00000076108_25 (sequence is synthesized)
atgtgtcagagatcctgcgctgcttccttatggcatatggagtagagccagccctctgtgaccgcctgcgcacccagccttttcaggcccagccaccccagcagaaggctgctgtcctgg

SEQ ID NO: 69209 - DNA, 120 bp, Artificial Sequence
  ENSG00000076108_26 (sequence is synthesized)
ccttccttgtgcatgagctcaatggctccaccctcatcatcaatgagattgacaagactctggagagtatgtccagctacaggaaaaacaagtggattgttgaaggccggctccggaggc

SEQ ID NO: 69210 - DNA, 120 bp, Artificial Sequence
  ENSG00000076108_27 (sequence is synthesized)
tgaaaactgttctggccaagcgaactgggcggtctgaagtagagatggaagggccagaggaatgcctgggacggaggcgcagttctcggatcatggaggagaccagtggcatggaagaag

SEQ ID NO: 69211 - DNA, 120 bp, Artificial Sequence
  ENSG00000076108_28 (sequence is synthesized)
aggaagaagaggagtctatagcagctgtccctggccgcaggggtcgaagagatggagaggttgatgccacagcatctagcatcccagagctagagcgccagatagaaaaactcagcaagc

SEQ ID NO: 69212 - DNA, 120 bp, Artificial Sequence
  ENSG00000076108_29 (sequence is synthesized)
gtcagcttttctttcgcaaaaagctgcttcactcatcccagatgcttcgggcggtctccctgggtcaggaccgctacagacgtcgctactgggtattgccgtatttggctggtatctttg

SEQ ID NO: 69213 - DNA, 120 bp, Artificial Sequence
  ENSG00000076108_30 (sequence is synthesized)
tagaaggaacagaggggaacttagttcctgaggaggtgataaagaaggaaactgactccttaaaagtggcagcccatgcgtcactcaaccctgccctcttctctatgaagatggagttag

SEQ ID NO: 69214 - DNA, 120 bp, Artificial Sequence
  ENSG00000076108_31 (sequence is synthesized)
ctggctccaacaccactgccagttctcctgcccgggcccgaggccgacctcgaaaaactaagcccgggtctatgcaacctaggcatcttaagtcccctgtcaggggtcaggattcagaac

SEQ ID NO: 69215 - DNA, 120 bp, Artificial Sequence
  ENSG00000076108_32 (sequence is synthesized)
agccccaggcccagcttcagcctgaggctcagcttcatgctcctgcccagccccagcctcagcttcagcttcagcttcagtcccataaggggttcctggagcaagaaggctcccctttgt

SEQ ID NO: 69216 - DNA, 120 bp, Artificial Sequence
  ENSG00000076108_33 (sequence is synthesized)
cactgggtcagagccagcatgacctcagccagtcagccttcctgtcttggctgagccagactcagagccatagctccctgttgagcagctcagtcctcacacctgatagcagtccgggaa

SEQ ID NO: 69217 - DNA, 120 bp, Artificial Sequence
  ENSG00000076108_34 (sequence is synthesized)
aactagacccagctccatcacaacccccggaggagccagagcctgatgaggcagaatccagccctgatcctcaagcactctggtttaacatctcagcccagatgccctgcaatgctgccc

SEQ ID NO: 69218 - DNA, 120 bp, Artificial Sequence
  ENSG00000076108_35 (sequence is synthesized)
cctagtgctgccaacccttgttctccagtgcagttctcttccacgcccttggctgggttggcccctaagaggcgagcaggagaccctggagaaatgccacagagtcccacagggctggga

SEQ ID NO: 69219 - DNA, 120 bp, Artificial Sequence
  ENSG00000076108_36 (sequence is synthesized)
cagcccaaacggagagggagacctcccagtaagttcttcaaacagatggaacagcgttacctaacccagctgacagcccagcctgtcccacctgagatgtgctcaggctggtggtggata

SEQ ID NO: 69220 - DNA, 120 bp, Artificial Sequence
  ENSG00000076108_37 (sequence is synthesized)
cgagatcctgagatgttggatgccatgctcaaggccctacacccccgaggtatccgggagaaggcacttcacaaacaccttaacaagcacagggacttcttgcaggaagtctgcctgcgg

SEQ ID NO: 69221 - DNA, 120 bp, Artificial Sequence
  ENSG00000076108_38 (sequence is synthesized)
ccctcagctgaccccatctttgagcccaggcaactacctgcctttcaagaagggattatgagctggtcccccaaagagaagacatacgagacagacctagcagtgcttcaatgggtagag

SEQ ID NO: 69222 - DNA, 120 bp, Artificial Sequence
  ENSG00000076108_39 (sequence is synthesized)
gagctggagcagcgggttatcatgtctgatctgcagattcggggctggacatgtcctagcccagactctacccgtgaagacttggcctactgtgagcacctctccgactcccaggaggat

SEQ ID NO: 69223 - DNA, 120 bp, Artificial Sequence
  ENSG00000076108_40 (sequence is synthesized)
atcacctggcgaggtcggggcagggagggactggcacctcagcgtaaaactaccaaccctttggacctggctgtgatgcggctggctgccctggaacagaatgtagaacggcggtacctg

SEQ ID NO: 69224 - DNA, 120 bp, Artificial Sequence
  ENSG00000076108_41 (sequence is synthesized)
cgggagcccctctggccaactcatgaggttgtgctggagaaggccctgcttagcacacctaatggtgcccctgagggcaccactacagagatatcatatgagatcacccctcgcattcgt

SEQ ID NO: 69225 - DNA, 120 bp, Artificial Sequence
  ENSG00000076108_42 (sequence is synthesized)
gtctggcgccagaccctcgagcggtgccggagcgcagcccaggtgtgcttgtgcctgggccagctggagaggtccattgcctgggagaagtctgtcaacaaagtgacatgtctagtctgc

SEQ ID NO: 69226 - DNA, 120 bp, Artificial Sequence
  ENSG00000076108_43 (sequence is synthesized)
cggaagggtgacaatgatgagtttcttctgctttgtgatgggtgtgaccgtggctgccacatttactgccatcgtcccaagatggaggctgtcccagaaggagattggttctgtactgtc

SEQ ID NO: 69227 - DNA, 120 bp, Artificial Sequence
  ENSG00000076108_44 (sequence is synthesized)
tgtttggctcagcaggtggagggagaattcactcagaagcctggtttcccaaagcgtggccagaagcggaaaagtggttattcgctgaacttctcagagggtgatggccgccgacgccgg

SEQ ID NO: 69228 - DNA, 120 bp, Artificial Sequence
  ENSG00000076108_45 (sequence is synthesized)
gtactgttgaggggccgagaaagcccagcagcagggcctcggtactcggaagaagggctctccccctccaagcggcggcgactctctatgcggaaccaccacagtgatctcacattttgc

SEQ ID NO: 69229 - DNA, 120 bp, Artificial Sequence
  ENSG00000076108_46 (sequence is synthesized)
gagattatcctgatggagatggagtcccatgatgcagcctggcctttcctagagcctgtgaacccacgtttggtgagtgggtaccggcgcatcatcaaaaatcctatggatttttccacc

SEQ ID NO: 69230 - DNA, 120 bp, Artificial Sequence
  ENSG00000076108_47 (sequence is synthesized)
atgcgggagcggctgctcaggggagggtacaccagctcagaggagtttgcggctgatgccctcctggtatttgacaactgccagactttcaacgaggatgactctgaagtaggcaaggct

SEQ ID NO: 69231 - DNA, 120 bp, Artificial Sequence
  ENSG00000076108_48 (sequence is synthesized)
gggcacatcatgcgccgcttcttcgagagccgctgggaggagttttatcagggaaaacaggccaatctgtgaggcaagggaggtggggagtcaccttgtggcatctccccccaccttcca

SEQ ID NO: 69232 - DNA, 120 bp, Artificial Sequence
  ENSG00000076108_49 (sequence is synthesized)
aacaaaaacctgccattttcacctgctgatgctgccctgggtccagactcaagtcagatacaaccctgatttttgaccttgcccttggcagtgccccacatcctcttattcctacatccc

SEQ ID NO: 69233 - DNA, 120 bp, Artificial Sequence
  ENSG00000076108_50 (sequence is synthesized)
tttctcccttccctcctcttgctcctcaagtaagaggtgcagagatgaggtccttctggactaaaagccaaaaaaagaaagaaaaaaataatttttcttttctgttttatttgctaatta

SEQ ID NO: 69234 - DNA, 120 bp, Artificial Sequence
  ENSG00000076108_51 (sequence is synthesized)
aaaatggggagggggaaagtcgtccctacttcctcctccctgcttcctctcctcccctgtacgtgccccagcattctggggttatttaacaatagcaatagttctagtgaatgtgtgaaa

SEQ ID NO: 69235 - DNA, 120 bp, Artificial Sequence
  ENSG00000076108_52 (sequence is synthesized)
ccaagaaacactctgtactgtgtgcggacccgcagtgacggccagtaaagtggacttaactcccaagtgtgtcgcgccggacaccgggccctggacatgctgcttccatgttcagtccct

SEQ ID NO: 69236 - DNA, 120 bp, Artificial Sequence
  ENSG00000076108_53 (sequence is synthesized)
tccctgcttctcgctgtctttcttttcccacctcccaccccccagttttcagattttctctcatccaataatgtaaaactatcgtgtacgggttcctccctccttttctcttctcccaaa

SEQ ID NO: 69237 - DNA, 120 bp, Artificial Sequence
  ENSG00000076108_54 (sequence is synthesized)
tcttttcccttcaaaggaaaaaaaaatgttcagaggtccctgtcttctgtccccatcttcctgccgatagctatcccctgtatgatgttggatgctcctcacatgctgagtttccagcct

SEQ ID NO: 69238 - DNA, 120 bp, Artificial Sequence
  ENSG00000076108_55 (sequence is synthesized)
tttctgaaactcagtagctggggagagggcagggaggcttcctgggccttccagcctccttccccacctccttcccaaaccctcttgggaactcctcagggacaactactgctgagtttg

SEQ ID NO: 69239 - DNA, 120 bp, Artificial Sequence
  ENSG00000076108_56 (sequence is synthesized)
cctcttgggaactcctcagggacaactactgctgagtttgggtgcaccctaagatggaggccaggtagcaatggggccggcctcagagagagcgctgtgtgtgtgtgtgtgtgtgtgtgt

SEQ ID NO: 69240 - DNA, 120 bp, Artificial Sequence
  ENSG00000076108_57 (sequence is synthesized)
tgtgtgtgtcagcctcagagcgcgcgctgtgtgtgtgtgtgtgtgtgcgtgcttgtgaccctgtattgtttgataggatccattcagtttccccaagtacctgttttcattcccattttt

SEQ ID NO: 69241 - DNA, 120 bp, Artificial Sequence
  ENSG00000076108_58 (sequence is synthesized)
cccattgtttaaaaccatcacttttttgtctttgggaaaccacaggaacaatttctctggagacaaggctgtgtctctctcctggtcatttttgttccagcctcttcagactgtgcaatc

SEQ ID NO: 69242 - DNA, 120 bp, Artificial Sequence
  ENSG00000076108_59 (sequence is synthesized)
tttcagcaggaactccctctcttctcggtagctttgaatcttaagcttctacgggagagtggtagaactggatcatttcctaatcccatttagttgtgcttttcttcatttacttcatac

SEQ ID NO: 69243 - DNA, 120 bp, Artificial Sequence
  ENSG00000076108_60 (sequence is synthesized)
cccaggaccccttccccagcagcagagaccctggagcacaggagagtagggaggaggggttctgggtccatcactgccctacatgtgactatgtccaagttaagcccccaacacgagagg

SEQ ID NO: 69244 - DNA, 120 bp, Artificial Sequence
  ENSG00000076108_61 (sequence is synthesized)
aaagctgctgactcccagctatagccatgggcacttggccccctgcttttcctgctcagcagagcccctcccttcagagattacgggtacttgcactggggaggtggctgctggctggcc

SEQ ID NO: 69245 - DNA, 120 bp, Artificial Sequence
  ENSG00000076108_62 (sequence is synthesized)
caagcagagagctgaggcatccaagaaatgttccattggggggtgggggtgccaggtgaggtggagcattccttgtattctggcagcactgaagagccactgaagggggtaggggcagtg

SEQ ID NO: 69246 - DNA, 120 bp, Artificial Sequence
  ENSG00000076108_63 (sequence is synthesized)
taggtcctggggcagcccctttattcctttatgccccttctccctcatagcctatttctaaagtcgccttttctgtcagataaacctcaaaacttttaattttatttgagattttttttt

SEQ ID NO: 69247 - DNA, 120 bp, Artificial Sequence
  ENSG00000076108_64 (sequence is synthesized)
gcttttaagaggtggattgaagaatatttgaattgactttatattatgcataaatatttatattttatctaaataactgcgctgtaacaaactttgtgttagacagttgaaactgttaga

SEQ ID NO: 69248 - DNA, 120 bp, Artificial Sequence
  ENSG00000076108_65 (sequence is synthesized)
gttgggggctctgctttttccccctggcaattttcccctggtataagatgtgctagattaatttcattgtgaggtggatgggggagtgaaattgtgaggtggatgggggagtgaaatctc

SEQ ID NO: 69249 - DNA, 120 bp, Artificial Sequence
  ENSG00000076108_66 (sequence is synthesized)
catggttcctgctttgtgttcctctcccagctccatctctttccctagggaccaggcactcatatggcggggtggggtcctagcctcagtttgaagaagtgggggctggagcggggttgg

SEQ ID NO: 69250 - DNA, 120 bp, Artificial Sequence
  ENSG00000076108_67 (sequence is synthesized)
gggtggtagggatagggcatgatcaaaggggccatttcttgcttttctttcctcatcttcactgcccccttgagctaggtggattttctcttcatgacaagagtatttggtagggaaagc

SEQ ID NO: 69251 - DNA, 120 bp, Artificial Sequence
  ENSG00000076108_68 (sequence is synthesized)
aggtttaaaataaaaagacaacccaccccctgcccttttgcttccctcccatcagtctggttgacaggaagaaaccacaccatcaacaccaacaagtttctgtgttccttttacagcaaa

SEQ ID NO: 69252 - DNA, 120 bp, Artificial Sequence
  ENSG00000076108_69 (sequence is synthesized)
agggactttttatataaccaaatgtggtgttttagtgactttttgataatgtacagttttttgtgaatttaaatttatttctttctatatttttaggaccaatctcatttttaataaggt

SEQ ID NO: 69253 - DNA, 120 bp, Artificial Sequence
  ENSG00000076108_70 (sequence is synthesized)
taaaaagaaaaaaaaagtctagcgaaaaaactcctgtttttgccatgtgatgttccacaagtgcagctgtagaaaagtgcttgtcagttgttgaataaaaaaaaccacatttgatagaga

SEQ ID NO: 69254 - DNA, 120 bp, Artificial Sequence
  ENSG00000076108_71 (sequence is synthesized)
gggaacaacaggggctcctgttccataccctctgtgtggatggaaagggtcattagtgctcctgcctaaatgtctggctgagttgctggagcaaagggggattcagtgcatccaggtcct

SEQ ID NO: 69255 - DNA, 120 bp, Artificial Sequence
  ENSG00000076108_72 (sequence is synthesized)
gccttgtgagatgtggccccagcttcctaagctgccacctctgtgttcctgtcatagcaaatatgggaccatcaccagcttaccacttcccactcacggataagacaccaagacgtagac

SEQ ID NO: 69256 - DNA, 120 bp, Artificial Sequence
  ENSG00000076108_73 (sequence is synthesized)
gttctggcgcccggagcgcggccatgtgaaccgcttgtaccccggggagagacgagccccgagcccggctggacgccgctgcctcagaaatggaggcaaacgaccattttaactttactg

SEQ ID NO: 69257 - DNA, 120 bp, Artificial Sequence
  ENSG00000076108_74 (sequence is synthesized)
agttctcttctgatgtattttcctcttgcacattcacccaacttggttgtgcatctttccctactcacccccattatgctgtcctccacacagtccctaaagatcttgggggagaaggtg

SEQ ID NO: 69258 - DNA, 120 bp, Artificial Sequence
  ENSG00000076108_75 (sequence is synthesized)
catctctgctcagagtatcttgatgtgatcggttcccagcaatgaactggccgcaataaatgttgaatgaatgaacatccttctagcaaagattgactgcctagtatagctaagtgaacc

SEQ ID NO: 69259 - DNA, 120 bp, Artificial Sequence
  ENSG00000076108_76 (sequence is synthesized)
tctcgggccccgcggttgagccgcgtccccctcccccttcccgaaccccggaccccagaccccctccccagcgggcgtctccacccgttctggcgcccggagcgcggccatgtgaaccgc

SEQ ID NO: 69260 - DNA, 120 bp, Artificial Sequence
  ENSG00000076108_77 (sequence is synthesized)
ttgtaccccggggagagacgagccccgagcccggctggacgccgctgcctcaggtttgtggggtctgtggccaggggcctgagggggagggagccccgctttcatccgaggcttccctcg

SEQ ID NO: 69261 - DNA, 120 bp, Artificial Sequence
  ENSG00000076108_78 (sequence is synthesized)
gggaacagaagctccagagccggcttgagccttgccggggcgggaagccgacgggagcttatttcctgcgaggatccaacccgagaaatggaggcaaacgaccattttaactttactggc

SEQ ID NO: 69262 - DNA, 120 bp, Artificial Sequence
  ENSG00000076108_79 (sequence is synthesized)
agtttaatgcacaactctagaaagaagggaatgcctcttttcctctgaggtgggggaggaatgggccagacaagagtagattacaggacagttatctgcagtgataatgtttcttggcat

SEQ ID NO: 69263 - DNA, 120 bp, Artificial Sequence
  ENSG00000076108_80 (sequence is synthesized)
gagattcctaggttttccttcttctctcaaggtctgtcttccatcacctattcttttttcatcttgtagtgactcaattttgcccaaggagctccagctattatcttttccaaaccctag

SEQ ID NO: 69264 - DNA, 120 bp, Artificial Sequence
  ENSG00000076108_81 (sequence is synthesized)
agtagtatgcacttgatttcatcttgccacaggcaccattgcctgggtgtggagctgctgcctgaagttgagggaacctataaacatgaaaacatcctcatttccttatgtctcatttta

SEQ ID NO: 69265 - DNA, 120 bp, Artificial Sequence
  ENSG00000076108_82 (sequence is synthesized)
gtagtttgctcccagaaaagctgggatttggggaaatgctgagttatgggggtgtggacacttcctctaggtcctgactctggagtggttcccagctcacagtttgggaggatccaacac

SEQ ID NO: 69266 - DNA, 120 bp, Artificial Sequence
  ENSG00000076108_83 (sequence is synthesized)
gaagaagccgacagaggatatgtgtctgactgaccaccaggtagtgaggagagagtaacagttcctgggtcagctgggaagactttcctttaaaaaaaaaaaaaggacttctgcaatggg

SEQ ID NO: 69267 - DNA, 76 bp, Artificial Sequence
  ENSG00000076108_84 (sequence is synthesized)
actttgagagactgaggtgggagaattgcttgggcttaggaggtcgaggctgcagtaagcagagatcatgccactg

SEQ ID NO: 69268 - DNA, 120 bp, Artificial Sequence
  ENSG00000076108_85 (sequence is synthesized)
agaccctatctcaaaaaaaaaaaaaaaattacataaaaattaaaggaagaacctcttgtagacatgcaaattgtcatcttctgttatgtttaacagaactctctactcacttttctctct

SEQ ID NO: 69269 - DNA, 120 bp, Artificial Sequence
  ENSG00000076108_86 (sequence is synthesized)
actcacttttctctctctagcccctgcctgacttctcacgagtccctggtctgacattgcccagtggagccttctcagactgcttgaccattgtggagttcctgcatagctttggcaagg

SEQ ID NO: 69270 - DNA, 120 bp, Artificial Sequence
  ENSG00000076108_87 (sequence is synthesized)
gtgccagcctgacatgggaatctttcctttccggtgaccagggccctgcagatgtcgccaggaaagtggtgatccaggcaggaccaggctgcactgaagggacagagaaatggaggcaaa

SEQ ID NO: 69271 - DNA, 120 bp, Artificial Sequence
  ENSG00000076201_0 (sequence is synthesized)
ggggctgggctcgtggctgagccagcagctgcagcagctacgggagtggccgggtggccggcgggtgccagccgccatggaggccgtgccccgcatgcccatgatctggctggacctgaa

SEQ ID NO: 69272 - DNA, 120 bp, Artificial Sequence
  ENSG00000076201_1 (sequence is synthesized)
ggaggccggtgactttcacttccagccagctgtgaagaagtttgtcctgaagaattatggagagaacccagaagcctacaatgaagaactgaagaagctggagttgctcagacagaatgc

SEQ ID NO: 69273 - DNA, 120 bp, Artificial Sequence
  ENSG00000076201_2 (sequence is synthesized)
tgtccgtgtcccacgagactttgagggctgtagtgtcctccgcaagtacctcggccagcttcattacctgcagagtcgggtccccatgggctcgggccaggaggccgctgtccctgtcac

SEQ ID NO: 69274 - DNA, 120 bp, Artificial Sequence
  ENSG00000076201_3 (sequence is synthesized)
ctggacagagatcttctcaggcaagtctgtggcccatgaggacatcaagtacgagcaggcctgtattctctacaaccttggagcgctgcactccatgctgggggccatggacaagcgggt

SEQ ID NO: 69275 - DNA, 120 bp, Artificial Sequence
  ENSG00000076201_4 (sequence is synthesized)
gtctgaggagggcatgaaggtctcctgtacccatttccagtgcgcagccggcgccttcgcctacctacgggagcacttccctcaagcctacagcgtcgacatgagccgccagatccttac

SEQ ID NO: 69276 - DNA, 120 bp, Artificial Sequence
  ENSG00000076201_5 (sequence is synthesized)
gctcaacgtcaacctcatgctgggccaggctcaggagtgcctcctggagaagtcgatgttggacaacaggaagagctttctggtggcccgcatcagtgcacaggtggtagattactacaa

SEQ ID NO: 69277 - DNA, 120 bp, Artificial Sequence
  ENSG00000076201_6 (sequence is synthesized)
ggaggcatgccgggccttggagaaccccgacactgcctcactgctgggccggatccagaaggactggaagaaacttgtgcagatgaagatctactacttcgcagccgtggctcatctgca

SEQ ID NO: 69278 - DNA, 120 bp, Artificial Sequence
  ENSG00000076201_7 (sequence is synthesized)
catgggaaagcaggccgaggagcagcagaagttcggggagcgggttgcatacttccagagcgccctggacaagctcaatgaagccatcaagttggccaagggccagcctgacactgtgca

SEQ ID NO: 69279 - DNA, 120 bp, Artificial Sequence
  ENSG00000076201_8 (sequence is synthesized)
agacgcgcttcgcttcactatggatgtcattgggggaaagtacaattctgccaagaaggacaacgacttcatttaccatgaggctgtcccagcattggacactcttcagcctgtaaaagg

SEQ ID NO: 69280 - DNA, 120 bp, Artificial Sequence
  ENSG00000076201_9 (sequence is synthesized)
agcccccttggtgaagcccttgccagtgaaccccacagacccagctgttacaggccctgacatctttgccaaactggtacccatggctgcccacgaggcctcgtcactgtacagtgagga

SEQ ID NO: 69281 - DNA, 120 bp, Artificial Sequence
  ENSG00000076201_10 (sequence is synthesized)
gaaggccaagctgctccgggagatgatggccaagattgaggacaagaatgaggtcctggaccagttcatggattcaatgcagttggatcccgagacggtggacaaccttgatgcctacag

SEQ ID NO: 69282 - DNA, 120 bp, Artificial Sequence
  ENSG00000076201_11 (sequence is synthesized)
ccacatcccaccccagctcatggagaagtgcgcggctctcagcgtccggcccgacactgtcaggaaccttgtacagtccatgcaagtgctgtcaggtgtgttcacggatgtggaggcttc

SEQ ID NO: 69283 - DNA, 120 bp, Artificial Sequence
  ENSG00000076201_12 (sequence is synthesized)
cctgaaggacatcagagatctgttggaggaggatgagctgctagagcagaagtttcaggaggcggtgggccaggcaggggccatctccatcacctccaaggctgagctggcagaggtgag

SEQ ID NO: 69284 - DNA, 120 bp, Artificial Sequence
  ENSG00000076201_13 (sequence is synthesized)
gcgagaatgggccaagtacatggaagtccatgagaaggcctccttcaccaacagtgagctgcaccgtgccatgaacctgcacgtcggcaacctgcgcctgctcagcgggccgcttgacca

SEQ ID NO: 69285 - DNA, 120 bp, Artificial Sequence
  ENSG00000076201_14 (sequence is synthesized)
ggtccgggctgccctgcccacaccggccctctccccagaggacaaggccgtgctgcaaaacctaaagcgcatcctggctaaggtgcaggagatgcgggaccagcgcgtgtccctggagca

SEQ ID NO: 69286 - DNA, 120 bp, Artificial Sequence
  ENSG00000076201_15 (sequence is synthesized)
gcagctgcgtgagcttatccagaaagatgacatcactgcctcgctggtcaccacagaccactcagagatgaagaagttgttcgaggagcagctgaaaaagtatgaccagctgaaggtgta

SEQ ID NO: 69287 - DNA, 120 bp, Artificial Sequence
  ENSG00000076201_16 (sequence is synthesized)
cctggagcagaacctggccgcccaggaccgtgtcctctgtgcactgacagaggccaacgtgcagtacgcagccgtgcggcgggtactcagcgacttggaccaaaagtggaactccacgct

SEQ ID NO: 69288 - DNA, 120 bp, Artificial Sequence
  ENSG00000076201_17 (sequence is synthesized)
gcagaccctggtggcctcgtatgaagcctatgaggacctgatgaagaagtcgcaggagggcagggacttctacgcagatctggagagcaaggtggctgctctgctggagcgcacgcagtc

SEQ ID NO: 69289 - DNA, 120 bp, Artificial Sequence
  ENSG00000076201_18 (sequence is synthesized)
cacctgccaggcccgcgaggctgcccgccagcagctcctggacagggagctgaagaagaagccgccgccacggcccacagccccaaagccgctgctgccccgcagggaggagagtgaggc

SEQ ID NO: 69290 - DNA, 120 bp, Artificial Sequence
  ENSG00000076201_19 (sequence is synthesized)
agtggaagcaggagacccccctgaggagctgcgcagcctcccccctgacatggtggctggcccacgactgcctgacaccttcctgggaagtgccaccccgctccactttcctcccagccc

SEQ ID NO: 69291 - DNA, 120 bp, Artificial Sequence
  ENSG00000076201_20 (sequence is synthesized)
cttccccagctccacaggcccaggaccccactatctctcaggccccttgccccctggtacctactcgggccccacccagctgatacagcccagggccccagggccccatgcaatgcccgt

SEQ ID NO: 69292 - DNA, 120 bp, Artificial Sequence
  ENSG00000076201_21 (sequence is synthesized)
atggcgtggtgagcagtccctatgtgggggtagggccggccccaccagttgcaggtctcccctcggccccacctcctcaattctcaggccccgagttggccatggcggttcggccagcca

SEQ ID NO: 69293 - DNA, 120 bp, Artificial Sequence
  ENSG00000076201_22 (sequence is synthesized)
ccaccacagtagatagcatccaggcgcccatccccagccacacagccccacggccaaaccccacccctgctcctcccccgccctgcttccctgtgcccccaccgcagccactgcccacgc

SEQ ID NO: 69294 - DNA, 120 bp, Artificial Sequence
  ENSG00000076201_23 (sequence is synthesized)
cttacacctaccctgcaggggctaagcaacccatcccggcacagcaccacttctcttctgggatccccgcaggttttccagccccaaggattgggccccagccccagccccatcctcagc

SEQ ID NO: 69295 - DNA, 120 bp, Artificial Sequence
  ENSG00000076201_24 (sequence is synthesized)
cccatccttcacaagcgtttgggcctcagcccccacagcagccccttccactccagcatccacatctcttcccaccccaggccccaggactcctacccccacaatccccctacccctatg

SEQ ID NO: 69296 - DNA, 120 bp, Artificial Sequence
  ENSG00000076201_25 (sequence is synthesized)
cccctcagcctggggtcctggggcagccgccaccccccctacacacccagctctacccaggtcccgctcaagaccctctgccagcccactcaggggctctgcctttccccagccctgggc

SEQ ID NO: 69297 - DNA, 120 bp, Artificial Sequence
  ENSG00000076201_26 (sequence is synthesized)
cccctcagcctccccatcccccactggcatatggtcctgccccttctaccagacccatgggcccccaggcagcccctcttaccattcgagggccctcgtctgctggccagtccaccccta

SEQ ID NO: 69298 - DNA, 120 bp, Artificial Sequence
  ENSG00000076201_27 (sequence is synthesized)
gtccccacctggtgccttcacctgccccatctccagggcctggtccggtaccccctcgccccccagcagcagaaccacccccttgcctgcgccgaggcgccgcagctgcagacctgctct

SEQ ID NO: 69299 - DNA, 120 bp, Artificial Sequence
  ENSG00000076201_28 (sequence is synthesized)
cctccagcccggagagccagcatggcggcactcagtctcctgggggtgggcagcccctgctgcagcccaccaaggtggatgcagctgagggtcgtcggccgcaggccctgcggctgattg

SEQ ID NO: 69300 - DNA, 120 bp, Artificial Sequence
  ENSG00000076201_29 (sequence is synthesized)
agcgggacccctatgagcatcctgagaggctgcggcagttgcagcaggagctggaggcctttcggggtcagctgggggatgtgggagctctggacactgtctggcgagagctgcaagatg

SEQ ID NO: 69301 - DNA, 120 bp, Artificial Sequence
  ENSG00000076201_30 (sequence is synthesized)
cgcaggaacatgatgcccgaggccgttccatcgccattgcccgctgctactcactgaagaaccggcaccaggatgtcatgccctatgacagtaaccgtgtggtgctgcgctcaggcaagg

SEQ ID NO: 69302 - DNA, 120 bp, Artificial Sequence
  ENSG00000076201_31 (sequence is synthesized)
atgactacatcaatgccagctgcgtggaggggctctccccatactgccccccgctagtggcaacccaggccccactgcctggcacagctgctgacttctggctcatggtccatgagcaga

SEQ ID NO: 69303 - DNA, 120 bp, Artificial Sequence
  ENSG00000076201_32 (sequence is synthesized)
aagtgtcagtcattgtcatgctggtttctgaggctgagatggagaagcaaaaagtggcacgctacttccccaccgagaggggccagcccatggtgcacggtgccctgagcctggcattga

SEQ ID NO: 69304 - DNA, 120 bp, Artificial Sequence
  ENSG00000076201_33 (sequence is synthesized)
gcagcgtccgcagcaccgaaacccatgtggagcgcgtgctgagcctgcagttccgagaccagagcctcaagcgctctcttgtgcacctgcacttccccacttggcctgagttaggcctgc

SEQ ID NO: 69305 - DNA, 120 bp, Artificial Sequence
  ENSG00000076201_34 (sequence is synthesized)
ccgacagccccagcaacttgctgcgcttcatccaggaggtgcacgcacattacctgcatcagcggccgctgcacacgcccatcattgtgcactgcagctctggtgtgggccgcacgggag

SEQ ID NO: 69306 - DNA, 120 bp, Artificial Sequence
  ENSG00000076201_35 (sequence is synthesized)
cctttgcactgctctatgcagctgtgcaggaggtggaggctgggaacggaatccctgagctgcctcagctggtgcggcgcatgcggcagcagagaaagcacatgctgcaggagaagctgc

SEQ ID NO: 69307 - DNA, 120 bp, Artificial Sequence
  ENSG00000076201_36 (sequence is synthesized)
acctcaggttctgctatgaggcagtggtgagacacgtggagcaggtcctgcagcgccatggtgtgcctcctccatgcaaacccttggccagtgcaagcatcagccagaagaaccaccttc

SEQ ID NO: 69308 - DNA, 120 bp, Artificial Sequence
  ENSG00000076201_37 (sequence is synthesized)
ctcaggactcccaggacctggtcctcggtggggatgtgcccatcagctccatccaggccaccattgccaagctcagcattcggcctcctggggggttggagtccccggttgccagcttgc

SEQ ID NO: 69309 - DNA, 120 bp, Artificial Sequence
  ENSG00000076201_38 (sequence is synthesized)
caggccctgcagagcccccaggcctcccgccagccagcctcccagagtctaccccaatcccatcttcctccccgccccccctttcctccccactacctgaggctccccagcctaaggagg

SEQ ID NO: 69310 - DNA, 120 bp, Artificial Sequence
  ENSG00000076201_39 (sequence is synthesized)
agccgccagtgcctgaagcccccagctcggggcccccctcctcctccctggaattgctggcctccttgaccccagaggccttctccctggacagctccctgcggggcaaacagcggatga

SEQ ID NO: 69311 - DNA, 120 bp, Artificial Sequence
  ENSG00000076201_40 (sequence is synthesized)
gcaagcataactttctgcaggcccataacgggcaagggctgcgggccacccggccctctgacgaccccctcagccttctggatccactctggacactcaacaagacctgaacaggttttg

SEQ ID NO: 69312 - DNA, 120 bp, Artificial Sequence
  ENSG00000076201_41 (sequence is synthesized)
cctacctggtccttacactacatcatcatcatctcatgcccacctgcccacacccagcagagcttctcagtgggcacagtctcttactcccatttctgctgcctttggccctgcctggcc

SEQ ID NO: 69313 - DNA, 120 bp, Artificial Sequence
  ENSG00000076201_42 (sequence is synthesized)
cagcctgcacccctgtggggtggaaatgtactgcaggctctgggtcaggttctgctcctttatgggacccgacatttttcagctctttgctattgaaataataaaccaccctgttctgtg

SEQ ID NO: 69314 - DNA, 120 bp, Artificial Sequence
  ENSG00000076201_43 (sequence is synthesized)
gaggctctactgggctggctgccacacagagttgccactgtgtgctctgtctgggagagagggcctttcttctttgactggacagcccctccccactgtggttttgggctgcttcaggca

SEQ ID NO: 69315 - DNA, 120 bp, Artificial Sequence
  ENSG00000076201_44 (sequence is synthesized)
ggaggagagtgtggctggcctcagcttaccctgctagtcagccttagcctggctcaagggagaagcttggggagccccagagttctgtgcaaacatccctgaagcttcaagattggaccc

SEQ ID NO: 69316 - DNA, 120 bp, Artificial Sequence
  ENSG00000076201_45 (sequence is synthesized)
cttggacaggagcccttccatcctctgccaaatgcagagcaggagactgagggctgggcaggacttctgagtttccctgttccctccagcttgggtgtccttggactcgttgccctggtt

SEQ ID NO: 69317 - DNA, 120 bp, Artificial Sequence
  ENSG00000076201_46 (sequence is synthesized)
cctctgtctcaccttcacatgggtgtgagcagccccaggcccctaacactgtcccctccctccccaggagcgctgcactccatgctgggggccatggacaagcgggtgtctgaggagtgc

SEQ ID NO: 69318 - DNA, 120 bp, Artificial Sequence
  ENSG00000076201_47 (sequence is synthesized)
cagaccactcagagatgaaggtgggctgggtgagcagggtagaggggctctggctccgggccccacccttaggagtcgaggccctgagtgtccgtccctggcccccaccccttcctcaga

SEQ ID NO: 69319 - DNA, 120 bp, Artificial Sequence
  ENSG00000076242_0 (sequence is synthesized)
gccgcttcagggagggacgaagagacccagcaacccacagagttgagaaatttgactggcattcaagctgtccaatcaatagctgccgctgaagggtggggctggatggcgtaagctaca

SEQ ID NO: 69320 - DNA, 120 bp, Artificial Sequence
  ENSG00000076242_1 (sequence is synthesized)
gctgaaggaagaacgtgagcacgaggcactgaggtgattggctgaaggcacttccgttgagcatctagacgtttccttggctcttctggcgccaaaatgtcgttcgtggcaggggttatt

SEQ ID NO: 69321 - DNA, 120 bp, Artificial Sequence
  ENSG00000076242_2 (sequence is synthesized)
cggcggctggacgagacagtggtgaaccgcatcgcggcgggggaagttatccagcggccagctaatgctatcaaagagatgattgagaactgtttagatgcaaaatccacaagtattcaa

SEQ ID NO: 69322 - DNA, 120 bp, Artificial Sequence
  ENSG00000076242_3 (sequence is synthesized)
gtgattgttaaagagggaggcctgaagttgattcagatccaagacaatggcaccgggatcaggaaagaagatctggatattgtatgtgaaaggttcactactagtaaactgcagtccttt

SEQ ID NO: 69323 - DNA, 120 bp, Artificial Sequence
  ENSG00000076242_4 (sequence is synthesized)
gaggatttagccagtatttctacctatggctttcgaggtgaggctttggccagcataagccatgtggctcatgttactattacaacgaaaacagctgatggaaagtgtgcatacagagca

SEQ ID NO: 69324 - DNA, 120 bp, Artificial Sequence
  ENSG00000076242_5 (sequence is synthesized)
agttactcagatggaaaactgaaagcccctcctaaaccatgtgctggcaatcaagggacccagatcacggtggaggaccttttttacaacatagccacgaggagaaaagctttaaaaaat

SEQ ID NO: 69325 - DNA, 120 bp, Artificial Sequence
  ENSG00000076242_6 (sequence is synthesized)
ccaagtgaagaatatgggaaaattttggaagttgttggcaggtattcagtacacaatgcaggcattagtttctcagttaaaaaacaaggagagacagtagctgatgttaggacactaccc

SEQ ID NO: 69326 - DNA, 120 bp, Artificial Sequence
  ENSG00000076242_7 (sequence is synthesized)
aatgcctcaaccgtggacaatattcgctccatctttggaaatgctgttagtcgagaactgatagaaattggatgtgaggataaaaccctagccttcaaaatgaatggttacatatccaat

SEQ ID NO: 69327 - DNA, 120 bp, Artificial Sequence
  ENSG00000076242_8 (sequence is synthesized)
gcaaactactcagtgaagaagtgcatcttcttactcttcatcaaccatcgtctggtagaatcaacttccttgagaaaagccatagaaacagtgtatgcagcctatttgcccaaaaacaca

SEQ ID NO: 69328 - DNA, 120 bp, Artificial Sequence
  ENSG00000076242_9 (sequence is synthesized)
cacccattcctgtacctcagtttagaaatcagtccccagaatgtggatgttaatgtgcaccccacaaagcatgaagttcacttcctgcacgaggagagcatcctggagcgggtgcagcag

SEQ ID NO: 69329 - DNA, 120 bp, Artificial Sequence
  ENSG00000076242_10 (sequence is synthesized)
cacatcgagagcaagctcctgggctccaattcctccaggatgtacttcacccagactttgctaccaggacttgctggcccctctggggagatggttaaatccacaacaagtctgacctcg

SEQ ID NO: 69330 - DNA, 120 bp, Artificial Sequence
  ENSG00000076242_11 (sequence is synthesized)
gtcagccccaggccattgtcacagaggataagacagatatttctagtggcagggctaggcagcaagatgaggagatgcttgaactcccagcccctgctgaagtggctgccaaaaatcaga

SEQ ID NO: 69331 - DNA, 120 bp, Artificial Sequence
  ENSG00000076242_12 (sequence is synthesized)
gcttggagggggatacaacaaaggggacttcagaaatgtcagagaagagaggacctacttccagcaaccccagaaagagacatcgggaagattctgatgtggaaatggtggaagatgatt

SEQ ID NO: 69332 - DNA, 120 bp, Artificial Sequence
  ENSG00000076242_13 (sequence is synthesized)
cccgaaaggaaatgactgcagcttgtaccccccggagaaggatcattaacctcactagtgttttgagtctccaggaagaaattaatgagcagggacatgaggttctccgggagatgttgc

SEQ ID NO: 69333 - DNA, 120 bp, Artificial Sequence
  ENSG00000076242_14 (sequence is synthesized)
ataaccactccttcgtgggctgtgtgaatcctcagtgggccttggcacagcatcaaaccaagttataccttctcaacaccaccaagcttagtgaagaactgttctaccagatactcattt

SEQ ID NO: 69334 - DNA, 120 bp, Artificial Sequence
  ENSG00000076242_15 (sequence is synthesized)
atgattttgccaattttggtgttctcaggttatcggagccagcaccgctctttgaccttgccatgcttgccttagatagtccagagagtggctggacagaggaagatggtcccaaagaag

SEQ ID NO: 69335 - DNA, 120 bp, Artificial Sequence
  ENSG00000076242_16 (sequence is synthesized)
gacttgctgaatacattgttgagtttctgaagaagaaggctgagatgcttgcagactatttctctttggaaattgatgaggaagggaacctgattggattaccccttctgattgacaact

SEQ ID NO: 69336 - DNA, 120 bp, Artificial Sequence
  ENSG00000076242_17 (sequence is synthesized)
atgtgccccctttggagggactgcctatcttcattcttcgactagccactgaggtgaattgggacgaagaaaaggaatgttttgaaagcctcagtaaagaatgcgctatgttctattcca

SEQ ID NO: 69337 - DNA, 120 bp, Artificial Sequence
  ENSG00000076242_18 (sequence is synthesized)
tccggaagcagtacatatctgaggagtcgaccctctcaggccagcagagtgaagtgcctggctccattccaaactcctggaagtggactgtggaacacattgtctataaagccttgcgct

SEQ ID NO: 69338 - DNA, 120 bp, Artificial Sequence
  ENSG00000076242_19 (sequence is synthesized)
cacacattctgcctcctaaacatttcacagaagatggaaatatcctgcagcttgctaacctgcctgatctatacaaagtctttgagaggtgttaaatatggttatttatgcactgtggga

SEQ ID NO: 69339 - DNA, 120 bp, Artificial Sequence
  ENSG00000076242_20 (sequence is synthesized)
tgtgttcttctttctctgtattccgatacaaagtgttgtatcaaagtgtgatatacaaagtgtaccaacataagtgttggtagcacttaagacttatacttgccttctgatagtattcct

SEQ ID NO: 69340 - DNA, 120 bp, Artificial Sequence
  ENSG00000076242_21 (sequence is synthesized)
ttatacacagtggattgattataaataaatagatgtgtcttaacataatttcttatttaattttattatgtatatattgtgtcagttcagatgccaaaaagaggtcttgaacatgtcaca

SEQ ID NO: 69341 - DNA, 120 bp, Artificial Sequence
  ENSG00000076242_22 (sequence is synthesized)
agaactgatagaaattggatgtgaggataaaaccctagccttcaaaatgaatggttacatatccaatgcaaactactcagtgaagaagtgcatcttcttactcttcatcaaccactttgc

SEQ ID NO: 69342 - DNA, 120 bp, Artificial Sequence
  ENSG00000076242_23 (sequence is synthesized)
acaacggcggaggccgccgggttccctgacgtgccagtcaggccttctccttttccgcagaccgtgtgtttctttaccgctctcccccgagaccttttaagggttgtttggagtacggag

SEQ ID NO: 69343 - DNA, 120 bp, Artificial Sequence
  ENSG00000076242_24 (sequence is synthesized)
acaacggcggaggccgccgggttccctgacgtgccagtcaggccttctccttttccgcagaccgtgtgtttctttaccgctctcccccgagaccttttaagggttgtttggagttttaga

SEQ ID NO: 69344 - DNA, 120 bp, Artificial Sequence
  ENSG00000076242_25 (sequence is synthesized)
acctgacatgttaaaggactatcaaggaggccagtttgtctagaggctgaaaaggaaagagtaataggagatgaggtctgagtgaaaacacgtaaatccttgtgggccaagaaagaagat

SEQ ID NO: 69345 - DNA, 120 bp, Artificial Sequence
  ENSG00000076242_26 (sequence is synthesized)
aaagagatgattgagaactggtacggagggagtcgagccgggctcacttaagggctacgacttaacgggccgcgtcactcaatggcgcggacacgcctctttgcccgggcagaggcatgt

SEQ ID NO: 69346 - DNA, 120 bp, Artificial Sequence
  ENSG00000076242_27 (sequence is synthesized)
ctttatttcggaggacgcacttcgaagataccagattttatgggtcatccttggattttgaagcttataactgtgacaaaaaatgtgaagggaagagatttgaaacatgtggaaggaaaa

SEQ ID NO: 69347 - DNA, 120 bp, Artificial Sequence
  ENSG00000076248_0 (sequence is synthesized)
gcatgcgcgggccgcttggcgccaattgctgaccgccacagccacagccagggctagcctcgccggttcccgggtggcgcgcgttcgctgcctcctcagctccaggatgatcggccagaa

SEQ ID NO: 69348 - DNA, 120 bp, Artificial Sequence
  ENSG00000076248_1 (sequence is synthesized)
gacgctctactcctttttctcccccagccccgccaggaagcgacacgcccccagccccgagccggccgtccaggggaccggcgtggctggggtgcctgaggaaagcggagatgcggcggc

SEQ ID NO: 69349 - DNA, 120 bp, Artificial Sequence
  ENSG00000076248_2 (sequence is synthesized)
catcccagccaagaaggccccggctgggcaggaggagcctgggacgccgccctcctcgccgctgagtgccgagcagttggaccggatccagaggaacaaggccgcggccctgctcagact

SEQ ID NO: 69350 - DNA, 120 bp, Artificial Sequence
  ENSG00000076248_3 (sequence is synthesized)
cgcggcccgcaacgtgcccgtgggctttggagagagctggaagaagcacctcagcggggagttcgggaaaccgtattttatcaagctaatgggatttgttgcagaagaaagaaagcatta

SEQ ID NO: 69351 - DNA, 120 bp, Artificial Sequence
  ENSG00000076248_4 (sequence is synthesized)
cactgtttatccacccccacaccaagtcttcacctggacccagatgtgtgacataaaagatgtgaaggttgtcatcctgggacaggatccatatcatggacctaatcaagctcacgggct

SEQ ID NO: 69352 - DNA, 120 bp, Artificial Sequence
  ENSG00000076248_5 (sequence is synthesized)
ctgctttagtgttcaaaggcctgttccgcctccgcccagtttggagaacatttataaagagttgtctacagacatagaggattttgttcatcctggccatggagatttatctgggtgggc

SEQ ID NO: 69353 - DNA, 120 bp, Artificial Sequence
  ENSG00000076248_6 (sequence is synthesized)
caagcaaggtgttctccttctcaacgctgtcctcacggttcgtgcccatcaagccaactctcataaggagcgaggctgggagcagttcactgatgcagttgtgtcctggctaaatcagaa

SEQ ID NO: 69354 - DNA, 120 bp, Artificial Sequence
  ENSG00000076248_7 (sequence is synthesized)
ctcgaatggccttgttttcttgctctggggctcttatgctcagaagaagggcagtgccattgataggaagcggcaccatgtactacagacggctcatccctcccctttgtcagtgtatag

SEQ ID NO: 69355 - DNA, 120 bp, Artificial Sequence
  ENSG00000076248_8 (sequence is synthesized)
accaatgagctgctgcagaagtctggcaagaagcccattgactggaaggagctgtgatcatcagctgaggggtggcctttgagaagctgctgttaacgtatttgccagttacgaagttcc

SEQ ID NO: 69356 - DNA, 120 bp, Artificial Sequence
  ENSG00000076248_9 (sequence is synthesized)
actgaaaattttcctattaattcttaagtactctgcataagggggaaaagcttccagaaagcagccatgaaccaggctgtccaggaatggcagctgtatccaaccacaaacaacaaaggc

SEQ ID NO: 69357 - DNA, 120 bp, Artificial Sequence
  ENSG00000076248_10 (sequence is synthesized)
taccctttgaccaaatgtctttctctgcaacatggcttcggcctaaaatatgcagaagacagatgaggtcaaatactcagttggctctctttatctcccttgcctttatggtgaaacagg

SEQ ID NO: 69358 - DNA, 120 bp, Artificial Sequence
  ENSG00000076248_11 (sequence is synthesized)
ggagatgtgcacctttcaggcacagccctagtttggcgcctgctgctccttggttttgcctggttagactttcagtgacagatgttggggtgtttttgcttagaaaggtccccttgtctc

SEQ ID NO: 69359 - DNA, 120 bp, Artificial Sequence
  ENSG00000076248_12 (sequence is synthesized)
agccttgcagggcaggcatgccagtctctgccagttccactgcccccttgatctttgaaggagtcctcaggcccctcgcagcataaggatgttttgcaactttccagaatctggcccaga

SEQ ID NO: 69360 - DNA, 120 bp, Artificial Sequence
  ENSG00000076248_13 (sequence is synthesized)
aattagggctcaatttcctgattgtagtagaggttaagattgctgtgagctttatcagataagagaccgagagaagtaagctgggtcttgttattccttgggtgttggtggaataagcag

SEQ ID NO: 69361 - DNA, 120 bp, Artificial Sequence
  ENSG00000076248_14 (sequence is synthesized)
tggaatttgaacaaggaagaggagaaaagggaattttgtctttatggggtggggtgattttctcctagggttatgtccagttggggtttttaaggcagcacagactgccaagtactgttt

SEQ ID NO: 69362 - DNA, 120 bp, Artificial Sequence
  ENSG00000076248_15 (sequence is synthesized)
tttttaaccgactgaaatcactttgggatattttttcctgcaacactggaaagttttagttttttaagaagtactcatgcagatatatatatatatatttttcccagtcctttttttaag

SEQ ID NO: 69363 - DNA, 120 bp, Artificial Sequence
  ENSG00000076248_16 (sequence is synthesized)
agacggtctttattgggtctgcacctccatccttgatcttgttagcaatgctgtttttgctgttagtcgggttagagttggctctacgcgaggtttgttaataaaagtttgttaaaagtt

SEQ ID NO: 69364 - DNA, 120 bp, Artificial Sequence
  ENSG00000076248_17 (sequence is synthesized)
gtctggcgggggcggggcacctctgtgcagggttcccagtcaccgcgacgctcctcgggaagccatagggcgcctcccagcccgtctccccgctccagtttagaacctaattcccaattc

SEQ ID NO: 69365 - DNA, 120 bp, Artificial Sequence
  ENSG00000076248_18 (sequence is synthesized)
ccggaccgggcccagccctgggctcttactgtccgcttttgctgggacctgttccacaaatgggcgtcttctgccttgggccgtgggggttgggccggaagctgcggacgcctgggaagg

SEQ ID NO: 69366 - DNA, 120 bp, Artificial Sequence
  ENSG00000076248_19 (sequence is synthesized)
cttgaactcctgacctcaagcgatcctcccatcttggtctcccaaagtgctaggattacagatgtaagccaccgcacccgaccagcggcaccatgtactacagacggctcatccctcccc

SEQ ID NO: 69367 - DNA, 120 bp, Artificial Sequence
  ENSG00000076258_0 (sequence is synthesized)
acacaactttttttccttagtctgtatactttctgctgtcactagcataacagaaaagacgaatggcttttgttttaaactgagggcacttttacaaaagtcatctttccatttattttt

SEQ ID NO: 69368 - DNA, 120 bp, Artificial Sequence
  ENSG00000076258_1 (sequence is synthesized)
ctttcagaaaaaagaatttgggttttgagcttttttaaaaaaaaaagacaaacactttccttgactttgagaaataatttaagtcaaagaatctgctctatgctaaccaagagatagagc

SEQ ID NO: 69369 - DNA, 120 bp, Artificial Sequence
  ENSG00000076258_2 (sequence is synthesized)
acagcaaagatctgccagccccaggcctctacctagtggcctggaaattcaagtattcttattggtggaggccatttgtttctgattagaagctgtctaaacctcctactcctcaactca

SEQ ID NO: 69370 - DNA, 120 bp, Artificial Sequence
  ENSG00000076258_3 (sequence is synthesized)
aaggaaaacacagagcataccatggccaagaaagttgcagtgattggagctggtgtgagtggcctctcctccatcaaatgctgtgtggatgaggacctggagcccacctgctttgagaga

SEQ ID NO: 69371 - DNA, 120 bp, Artificial Sequence
  ENSG00000076258_4 (sequence is synthesized)
agtgatgacattgggggattatggaagtttactgaatcttccaaagatgggatgaccagggtctataagtcattagtgacaaatgtctgtaaggaaatgtcatgttacagtgacttccct

SEQ ID NO: 69372 - DNA, 120 bp, Artificial Sequence
  ENSG00000076258_5 (sequence is synthesized)
ttccacgaagattatcctaatttcatgaaccatgaaaaattttgggactatctccaagaatttgctgagcactttgacctcctgaaatacattcagtttaagaccactgtgtgcagcata

SEQ ID NO: 69373 - DNA, 120 bp, Artificial Sequence
  ENSG00000076258_6 (sequence is synthesized)
acgaagcgtccagacttctccgaaactggtcagtgggatgttgtcacagagacagagggcaagcaaaatagagctgtctttgatgctgttatggtttgcactggacatttcctgaatccc

SEQ ID NO: 69374 - DNA, 120 bp, Artificial Sequence
  ENSG00000076258_7 (sequence is synthesized)
catttacctttggaagcctttcctggaattcataagtttaaaggtcagatcctgcatagtcaagagtacaagatcccagaaggctttcagggcaaacgcgtcttggtgattggtcttggg

SEQ ID NO: 69375 - DNA, 120 bp, Artificial Sequence
  ENSG00000076258_8 (sequence is synthesized)
aacactggaggagacattgctgtggaactcagtcgaacggcagctcaggtacttctcagtactagaactggtacctgggttcttgggcgctcttcagattggggctatccttataatatg

SEQ ID NO: 69376 - DNA, 120 bp, Artificial Sequence
  ENSG00000076258_9 (sequence is synthesized)
ttttattgcacaagttctgccttcacgttttctaaactggattcaagaaaggaagttgaataagagatttaatcatgaggattatggattaagtattaccaaagggaaaaaagcaaaatt

SEQ ID NO: 69377 - DNA, 120 bp, Artificial Sequence
  ENSG00000076258_10 (sequence is synthesized)
cattgtgaatgatgagctgccaaactgtatcctctgtggggcaatcactatgaaaaccagcgtgattgaatttacagaaacctctgctgtctttgaagatgggacagtggaagaaaacat

SEQ ID NO: 69378 - DNA, 120 bp, Artificial Sequence
  ENSG00000076258_11 (sequence is synthesized)
tgatgttgtgatcttcactacaggatatacattttcttttccattttttgaagaacctcttaaaagcctctgtacaaagaagatatttctatacaagcaagtctttcccttaaacctaga

SEQ ID NO: 69379 - DNA, 120 bp, Artificial Sequence
  ENSG00000076258_12 (sequence is synthesized)
gagagcgacattagccatcatcggccttatcggccttaaaggatccatcttatcaggcacagagctccaagcacgatgggtcacaagagtattcaaaggactctgtaagatacctccatc

SEQ ID NO: 69380 - DNA, 120 bp, Artificial Sequence
  ENSG00000076258_13 (sequence is synthesized)
ccaaaaattgatgatggaggctactgaaaaggaacagctcattaaaaggggagtgtttaaagacaccagcaaagacaaatttgactacattgcctacatggatgatatcgctgcctgcat

SEQ ID NO: 69381 - DNA, 120 bp, Artificial Sequence
  ENSG00000076258_14 (sequence is synthesized)
aggcacaaagcccagcatcccacttctgttcctcaaggatcccagactagcttgggaagttttctttggaccatgtactccttatcagtaccgcctcatgggccctggaaaatgggatgg

SEQ ID NO: 69382 - DNA, 120 bp, Artificial Sequence
  ENSG00000076258_15 (sequence is synthesized)
agccagaaatgccatcctgacccagtgggacagaacattgaaacctttaaaaactcgaattgtccctgattcctccaagcctgcctccatgtcacattatttaaaagcctggggggcacc

SEQ ID NO: 69383 - DNA, 120 bp, Artificial Sequence
  ENSG00000076258_16 (sequence is synthesized)
tgtcctacttgcctctcttctacttatctgtaaatcttcacttttcttgaaattggtgagagataaactacaggacagaatgtccccttacctagtaagtctttggcgaggatgaacctg

SEQ ID NO: 69384 - DNA, 120 bp, Artificial Sequence
  ENSG00000076258_17 (sequence is synthesized)
attgttacaagggttacacaaagtcatgctaattctatctccaagtatcttgtgcatccctcctctgctctccatcataactgctattagccaaattcaggcccagtcatctcctatctg

SEQ ID NO: 69385 - DNA, 120 bp, Artificial Sequence
  ENSG00000076258_18 (sequence is synthesized)
aattattgtattatcttcttctttgttttcagtaccctctttcttgccaccctttccaatgcatcttctaccctgctacctcagtgattattctaaaataaatatatatgatatggttta

SEQ ID NO: 69386 - DNA, 120 bp, Artificial Sequence
  ENSG00000076258_19 (sequence is synthesized)
agtagaaaaaatattaaatcaatatttatcattacattttattcagaattcaaaatgttcaataattgtaatattgcctttgtttattctactctaaatccatttccctaaaacactgtt

SEQ ID NO: 69387 - DNA, 120 bp, Artificial Sequence
  ENSG00000076258_20 (sequence is synthesized)
catttccctaaaacactgttcatcaggtaccacagcagtttttaaaatatatgtattctctttctggtggcaaaagtagtgattcatgaggctggaagaaaataaaagatgaaaacttcc

SEQ ID NO: 69388 - DNA, 120 bp, Artificial Sequence
  ENSG00000076321_0 (sequence is synthesized)
atcctgcctgcgttagcggcggtggaggaggaggcagagaggagtggagggcggagtagacggaggaggctgctgcagagaagaaagtgtcagagccggttcggctttagagtgtggtga

SEQ ID NO: 69389 - DNA, 120 bp, Artificial Sequence
  ENSG00000076321_1 (sequence is synthesized)
agggtacttttcatggtgcatggaaggaaagccaatgcgcaggtgtaccaacattcgaccaggagagactggaatggatgtaacaagccgctgcacccttggagaccccaacaaactgcc

SEQ ID NO: 69390 - DNA, 120 bp, Artificial Sequence
  ENSG00000076321_2 (sequence is synthesized)
agaaggggttccccaacctgcccgcatgccctatatctcagacaagcaccctcgacaaaccttggaagtgattaaccttctgagaaagcaccgggagctatgtgatgtggtgctagttgt

SEQ ID NO: 69391 - DNA, 120 bp, Artificial Sequence
  ENSG00000076321_3 (sequence is synthesized)
gggcgccaagaagatatatgcccatcgagtcattttgtcagcctgtagtccctacttccgagctatgtttacaggagaattggcagagagccgtcagacagaagtagtgatccgagacat

SEQ ID NO: 69392 - DNA, 120 bp, Artificial Sequence
  ENSG00000076321_4 (sequence is synthesized)
tgacgagagggctatggaattactgattgactttgcgtatacctcccagataacagtagaagagggcaatgttcagactcttctgccagctgcttgcctcctccagctggcagaaataca

SEQ ID NO: 69393 - DNA, 120 bp, Artificial Sequence
  ENSG00000076321_5 (sequence is synthesized)
ggaagcctgctgtgaattcttaaagagacaattagatccttctaactgcctgggcattcgggcttttgctgacacacattcatgtcgtgagttgctaaggatagcagacaagttcaccca

SEQ ID NO: 69394 - DNA, 120 bp, Artificial Sequence
  ENSG00000076321_6 (sequence is synthesized)
acataactttcaagaggtaatggagagtgaagagttcatgttgcttccagccaatcaactcattgatataatatccagtgatgagctaaacgttcgcagtgaagaacaagtgttcaatgc

SEQ ID NO: 69395 - DNA, 120 bp, Artificial Sequence
  ENSG00000076321_7 (sequence is synthesized)
agtgatggcctgggtcaaatacagtattcaggaaagacgtcctcaattaccccaggtgctgcagcatgttcgtttgcctttgcttagtcccaagttcctggtcggcacagtaggctctga

SEQ ID NO: 69396 - DNA, 120 bp, Artificial Sequence
  ENSG00000076321_8 (sequence is synthesized)
tcccctcatcaaaagtgatgaagaatgcagagacttggtagatgaggctaaaaactacctcctattgccgcaagaacgaccactaatgcaaggaccaaggacgagaccacggaaacctat

SEQ ID NO: 69397 - DNA, 120 bp, Artificial Sequence
  ENSG00000076321_9 (sequence is synthesized)
ccgatgtggggaagtactctttgcagttggtggttggtgcagtggagatgccatttccagtgttgaacgatatgatccacagaccaatgaatggagaatggtggcttcaatgagcaaaag

SEQ ID NO: 69398 - DNA, 120 bp, Artificial Sequence
  ENSG00000076321_10 (sequence is synthesized)
gagatgcggagttggggtcagtgttcttgatgatctgttatatgcagtaggaggccatgatggatcctcttatctcaatagtgttgaaaggtatgaccccaaaacaaaccagtggagcag

SEQ ID NO: 69399 - DNA, 120 bp, Artificial Sequence
  ENSG00000076321_11 (sequence is synthesized)
tgatgtggcccctacaagcacctgcaggacaagtgttggtgtagcagtacttggaggctttctttatgctgtgggtggccaggatggtgtgtcttgcctcaacattgttgagaggtatga

SEQ ID NO: 69400 - DNA, 120 bp, Artificial Sequence
  ENSG00000076321_12 (sequence is synthesized)
tccgaaggagaacaagtggactcgggtagcttctatgagtaccagaagactaggtgtggctgtggctgtgttaggagggttcttatatgctgtaggtggctctgacgggacatctcctct

SEQ ID NO: 69401 - DNA, 120 bp, Artificial Sequence
  ENSG00000076321_13 (sequence is synthesized)
caacacagtggaacgttacaatcctcaggaaaacagatggcacactatagcccctatggggacccggaggaaacacctaggctgtgcagtatatcaggacatgatctatgctgtaggagg

SEQ ID NO: 69402 - DNA, 120 bp, Artificial Sequence
  ENSG00000076321_14 (sequence is synthesized)
ccagtggtctccagtggtggccatgacatcacgccgtagtggagttggcctggcagtggtcaatggacagctcatggcagtaggaggttttgatggcacaacatacttgaagaccataga

SEQ ID NO: 69403 - DNA, 120 bp, Artificial Sequence
  ENSG00000076321_15 (sequence is synthesized)
agtttttgatcctgatgccaatacatggaggttatatggcgggatgaattaccgtcggctagggggtggcgtaggagttattaaaatgacacattgtgaatcccatatttggtgaacaca

SEQ ID NO: 69404 - DNA, 120 bp, Artificial Sequence
  ENSG00000076321_16 (sequence is synthesized)
gagaagacagtcttgtatatattcctctgtattctggggagctttgaccttggagctttgtacagcttgagaaaacattagaacaaattttattatttgccggtgcctcaacaaatggaa

SEQ ID NO: 69405 - DNA, 120 bp, Artificial Sequence
  ENSG00000076321_17 (sequence is synthesized)
atacaatccaatgaaagtacttcacctgcaagatgcacaataattttcaactctgtgcagaagaatatttatttttggttttaatttatcatggttttttgttgttttcgttttgaactt

SEQ ID NO: 69406 - DNA, 120 bp, Artificial Sequence
  ENSG00000076321_18 (sequence is synthesized)
atccttcctcccacaaaaaaagaaaagaagaaaaaattccaagcagcaaaacttactttgtttgtaaggtattcatttaggtttgaaaatactatttaataagggcagaagggctatata

SEQ ID NO: 69407 - DNA, 120 bp, Artificial Sequence
  ENSG00000076321_19 (sequence is synthesized)
tgatttggctattatttctagacactccatccacatgattccactaacaaggattaccaggaataaaggtaggtatgcaaaatgtattagctacccattattctcgcactaaccaccaga

SEQ ID NO: 69408 - DNA, 120 bp, Artificial Sequence
  ENSG00000076321_20 (sequence is synthesized)
aaaaaaaaaaacaaaaaaacaagaaaaggcaacatctcattttaaatagtacaattcagaagggatactaaatcaataaaaaccaggactcagacactacagttttcatcagtgtaattt

SEQ ID NO: 69409 - DNA, 120 bp, Artificial Sequence
  ENSG00000076321_21 (sequence is synthesized)
ttcatcagtgtaattttatgtcttgtttctttctatatgaacttgtttatttagtctttttttcataatattctcatagagtttctgctagatctagagctctgctcagtgcctcttata

SEQ ID NO: 69410 - DNA, 120 bp, Artificial Sequence
  ENSG00000076321_22 (sequence is synthesized)
aaaacaatatataagtctcatatgctgtcttgagaatccaagagaatcacatgcagctctgcaacagtttttgctcaaaaatgttactgactaaagcaactgtccttcctgtttccttat

SEQ ID NO: 69411 - DNA, 120 bp, Artificial Sequence
  ENSG00000076321_23 (sequence is synthesized)
tgctaccaaggaccagcagggagaaatgtcttctcccagcagtgaattctgttatgcaatttattcttgatgctcaggcctggttaagctgaggcttacctttaataacagcctccaagg

SEQ ID NO: 69412 - DNA, 120 bp, Artificial Sequence
  ENSG00000076321_24 (sequence is synthesized)
gaatgaattattcagttaatgtaatagcacacattaaagagtgtaaaatcaattgaggcattttattaatatcttggttcttttatacaaacaatgtatcattatcttcattctataagg

SEQ ID NO: 69413 - DNA, 120 bp, Artificial Sequence
  ENSG00000076321_25 (sequence is synthesized)
tcattgttactacttctctcaaattgcactttctggtaaaaagttaaaaatttttaaggaaaaaataatttcaatggttaaagttttttttcctcattgtattcatagacaaattttttt

SEQ ID NO: 69414 - DNA, 120 bp, Artificial Sequence
  ENSG00000076321_26 (sequence is synthesized)
caatatattttgcaagaaaaatctttgaataagactaactgcatttaaaaggaataacctccttctccctttccccaactacaaaaatgtttggcaactttgtgtttacatttaaagatc

SEQ ID NO: 69415 - DNA, 120 bp, Artificial Sequence
  ENSG00000076321_27 (sequence is synthesized)
atttgcacctttttcaaggaaaaaaagtattgagtaaacaattgtttacatatatcatttatgcttttttctagcatgtataacttttttaaataaaggtagtatttaccattaaaaaaa

SEQ ID NO: 69416 - DNA, 120 bp, Artificial Sequence
  ENSG00000076321_28 (sequence is synthesized)
taactttcaagaggtgagttgcacttggtgttccaatgcacccatttgttggagagcaatatgggttcacattctgctaaataacacttgcctgggtatttcctgctgattctaactcat

SEQ ID NO: 69417 - DNA, 120 bp, Artificial Sequence
  ENSG00000076321_29 (sequence is synthesized)
aatagcaaataaataagttattataaatcctaaacctggcttttattttagagggcaattttgtgttctaccagcaagttaagatttagggatttattctccctaactgtattcataaaa

SEQ ID NO: 69418 - DNA, 120 bp, Artificial Sequence
  ENSG00000076321_30 (sequence is synthesized)
gggctttgtcctgcctggtggtgctggggtttcgcatcctggacagcttccccagacagtgtttggaattcagggaaggaagaaagtacgtgcgcccccatttaaccctcgggacctggc

SEQ ID NO: 69419 - DNA, 120 bp, Artificial Sequence
  ENSG00000076321_31 (sequence is synthesized)
gaaatcctgctacgtgggtagtgaacattgtatcggggactgaaggaaatgcttgtaaagagtgttagtctggagccatactttccctgccctgttcaagctccctggactgtcggaagc

SEQ ID NO: 69420 - DNA, 120 bp, Artificial Sequence
  ENSG00000076321_32 (sequence is synthesized)
ggagttgtttgtaaaggcaaatgcagacgcctcctcctcctgtcacttcgggacaagttaacaatcttcagattcgttattaaagcctcgtgtaccctatgtgatctatcaggttcggct

SEQ ID NO: 69421 - DNA, 120 bp, Artificial Sequence
  ENSG00000076321_33 (sequence is synthesized)
attctgtgtgaatattctaattgaatatataattttatagttcccataatttgatagacttttgttgttacattttccctgtgtttcagtaaaccagaatgtaaggccataaagaattat

SEQ ID NO: 69422 - DNA, 120 bp, Artificial Sequence
  ENSG00000076321_34 (sequence is synthesized)
cttttgtaaatagatttatctagaaaccagtctataatttccttacgattgtctagtttcttcagcagcttactgtattttggttttgtaggttggcctggcagtggtcaatggacagct

SEQ ID NO: 69423 - DNA, 120 bp, Artificial Sequence
  ENSG00000076321_35 (sequence is synthesized)
atgggccggtgaagggaaaggaaatagctctacgagcggcatcctgcctgcgttagcggcggtggaggaggaggcagagaggagtggagggcggagtagacggaggaggctgctgcagag

SEQ ID NO: 69424 - DNA, 120 bp, Artificial Sequence
  ENSG00000076344_0 (sequence is synthesized)
cgccggccccgcgccgccccccggccgcccccgggcgcagatgccgcatctgaggaaggtgcgaggcggatggagcgggtggtcgtgagcatgcaggaccccgaccagggcgtgaagatg

SEQ ID NO: 69425 - DNA, 120 bp, Artificial Sequence
  ENSG00000076344_1 (sequence is synthesized)
tgaagatgcggagccagcgcctgctggtcaccgtcattccccacgcggtgacaggcagcgacgtcgtgcagtggttggcccagaagttctgcgtctcggaggaggaggccctgcacctgg

SEQ ID NO: 69426 - DNA, 120 bp, Artificial Sequence
  ENSG00000076344_2 (sequence is synthesized)
gcgccgtcctggtgcagcatggctacatctacccgctgcgcgacccccgtagcctcatgctccggccagacgagacgccctacaggttccagaccccgtacttctggacaagtaccctga

SEQ ID NO: 69427 - DNA, 120 bp, Artificial Sequence
  ENSG00000076344_3 (sequence is synthesized)
ggccggctgcagagctggactatgccatctacctggccaagaagaacatccgaaaacgggggaccctggtggattatgagaaggactgctatgaccggctacacaagaagatcaaccacg

SEQ ID NO: 69428 - DNA, 120 bp, Artificial Sequence
  ENSG00000076344_4 (sequence is synthesized)
catgggacctggtgctgatgcaggcgagggagcagctgagggcagccaagcagcgcagcaagggggacaggctggtcattgcgtgccaggagcagacctactggctggtgaacaggcccc

SEQ ID NO: 69429 - DNA, 120 bp, Artificial Sequence
  ENSG00000076344_5 (sequence is synthesized)
cgcccggggcccccgatgtgctggagcagggtccagggcggggatcctgcgctgccagccgtgtgctcatgaccaagagtgcagatttccataagcgggagatcgagtacttcaggaaag

SEQ ID NO: 69430 - DNA, 120 bp, Artificial Sequence
  ENSG00000076344_6 (sequence is synthesized)
cgctgggcaggacccgagtgaagtcctccgtctgccttgaggcgtacctgagtttctgcggccagcgtggaccccacgatcccctcgtgtcggggtgcctgcccagcaatccctggatct

SEQ ID NO: 69431 - DNA, 120 bp, Artificial Sequence
  ENSG00000076344_7 (sequence is synthesized)
cagacaatgacgcctactgggtcatgaatgcccccacggtggctgcccccacgaagctccgtgtggagagatggggcttcagcttccgggagctcctggaggaccccgtggggcgggccc

SEQ ID NO: 69432 - DNA, 120 bp, Artificial Sequence
  ENSG00000076344_8 (sequence is synthesized)
acttcatggactttctgggaaaggagttcagtggagaaaacctcagcttctgggaggcatgtgaggagcttcgatatggagcgcaggcccaggtccccaccctggtggatgccgtgtacg

SEQ ID NO: 69433 - DNA, 120 bp, Artificial Sequence
  ENSG00000076344_9 (sequence is synthesized)
tcctggatgacgcccagctgcacatatacatgctcatgaagaaggactcctacccaaggttcctgaagtctgacatgtacaaggccctcctggcagaggctgggatcccgctggagatga

SEQ ID NO: 69434 - DNA, 120 bp, Artificial Sequence
  ENSG00000076344_10 (sequence is synthesized)
agagacgcgtgttcccgtttacgtggaggccacggcactcgagccccagccctgcactccttcccacccctgtggagcccacagcggcttgtggccctgggggtggagatggggtggcct

SEQ ID NO: 69435 - DNA, 120 bp, Artificial Sequence
  ENSG00000076344_11 (sequence is synthesized)
agtggacctggcccatctgccactctagtccctgcagctcaacgtcctgcgtgaatgcagcagccacccccgtcttggcccaggtcctgggggctgctgaacccagcaccagtgtcccct

SEQ ID NO: 69436 - DNA, 120 bp, Artificial Sequence
  ENSG00000076344_12 (sequence is synthesized)
tgtgcccagggggcccagtcttctgtggggtgcacagcctccctccctccagcaagccctccctgcccagaaggaatgggtccaggtgtggattcccagggagggggttcattggctcag

SEQ ID NO: 69437 - DNA, 120 bp, Artificial Sequence
  ENSG00000076344_13 (sequence is synthesized)
cttgggtcagggcagagcctgttacctgaagagaggtgagaccaaggccacagggagctccaccttctctggtcttcagtccagcactgggtgcccatccccatctctaaaaccagtaaa

SEQ ID NO: 69438 - DNA, 120 bp, Artificial Sequence
  ENSG00000076344_14 (sequence is synthesized)
tcagccagcgaatacccggaagcaagatgcacaggcgggcggcttcccacacacccgtcacaagacgcggacatgcaggtctcggcgcgagctctgccccgtccaagagcctctccgctg

SEQ ID NO: 69439 - DNA, 120 bp, Artificial Sequence
  ENSG00000076344_15 (sequence is synthesized)
tcgcccagtgtgagcctggaagaggacccaagagagtgccgtgctgaggctgcctcgaggtcactgccttccggagctgcgcctattcctccctcgccaaacgcgttccagaatttgtcc

SEQ ID NO: 69440 - DNA, 120 bp, Artificial Sequence
  ENSG00000076344_16 (sequence is synthesized)
acaggtgcgccggcacctgctttcccacctcgaggccgcggcctcccccccgatttatagacaactctgacattgtcaccccactgacgaggcccgattccatagggtggatccttgcca

SEQ ID NO: 69441 - DNA, 120 bp, Artificial Sequence
  ENSG00000076344_17 (sequence is synthesized)
ggcgtccctgatcctccctgcccaagtcttccttcgtgagctggccttgctccccatcccccaagtgcctcaccagtcccccagactgggtgaaggtacagctggctcctttcgggggtg

SEQ ID NO: 69442 - DNA, 120 bp, Artificial Sequence
  ENSG00000076344_18 (sequence is synthesized)
cagcttcaactctctcggcggtagggcggtgccatccccacccatagggctggctcacatccagtcactcccaacagcgtccagcacacaaataaaagacccttgggccctggctctgag

SEQ ID NO: 69443 - DNA, 120 bp, Artificial Sequence
  ENSG00000076344_19 (sequence is synthesized)
cccgcagccatggccgccggccccgcgccgccccccggccgcccccgggcgcagatgccgcatctgaggaagatggagcgggtggtcgtgagcatgcaggaccccgaccagggcgtgaag

SEQ ID NO: 69444 - DNA, 120 bp, Artificial Sequence
  ENSG00000076344_20 (sequence is synthesized)
ccagacgagacgccctacaggttccaggtcaggctcgggggtgcaggtgggagccggtgggacccccacccccacccacccagcttaccaactcggggagacaggaggggcgccgagctt

SEQ ID NO: 69445 - DNA, 120 bp, Artificial Sequence
  ENSG00000076344_21 (sequence is synthesized)
gctgggattggagtgggactccgccatgtcgccgtgggctggtggtccatcgccccctccccaaaagtcctggaccgcaagtacggatgtggtgagaaggacccggctgagggatggagc

SEQ ID NO: 69446 - DNA, 120 bp, Artificial Sequence
  ENSG00000076344_22 (sequence is synthesized)
ctcagttttcctggggaccacagcagggccccacaaggggtcgtatgtgcagaggattctgccatcttcctgggggtccctaggcccaggtcctgagggaggggctgtgaaggcctgagg

SEQ ID NO: 69447 - DNA, 120 bp, Artificial Sequence
  ENSG00000076344_23 (sequence is synthesized)
acagcattcctgccctccctaaccacatcagggtcccgggccgacctgccgtcggttgtacccctccccaggcacagactgtgactacatccaagacttgtgcaggcccccagccccacc

SEQ ID NO: 69448 - DNA, 120 bp, Artificial Sequence
  ENSG00000076344_24 (sequence is synthesized)
ccgccttgaatgggggcttagggtgaccagtgagggaggcagtgtctgaacagggccctaaggagcgagttgacctcagttctagttggagagactggccagtggtcagtggagtctctc

SEQ ID NO: 69449 - DNA, 120 bp, Artificial Sequence
  ENSG00000076344_25 (sequence is synthesized)
ttgttcaaaccagtcccatccagacccaacatctggaaagatgcacctagaacctcactgataaaacttcttaagttcacgaccctaacatttccccatacaaagctggtcagagagagc

SEQ ID NO: 69450 - DNA, 120 bp, Artificial Sequence
  ENSG00000076344_26 (sequence is synthesized)
ggggacacaggccaggactcgcagcgcgtccgcctcctccgctctggccccagcgaggtgccgaccaatgaaggtcacacctggttccccagtgatccccattagtagtatttctcaagt

SEQ ID NO: 69451 - DNA, 120 bp, Artificial Sequence
  ENSG00000076344_27 (sequence is synthesized)
attagtagtatttctcaagtatgtgttgtttaaaaacataatttaagtacatttgaaaatgtgacatattaggccgggcgcggtggctcacgtctctaatcccagcactttgggaggctg

SEQ ID NO: 69452 - DNA, 120 bp, Artificial Sequence
  ENSG00000076344_28 (sequence is synthesized)
gccggctgcagagctggactatggtgagcaaggggacggctggccccagacaagttcccaggactgggggcctcagggtgatgccgtgaggcagggcagagctggcccctctgcaggctg

SEQ ID NO: 69453 - DNA, 120 bp, Artificial Sequence
  ENSG00000076344_29 (sequence is synthesized)
tggacgcaccatgggactgcccatctgtccgtcatttggtccacccagagggcacttggtgcagcctccccaagcccctgctcactcccggtcactccctgttccccaggcccctgctaa

SEQ ID NO: 69454 - DNA, 120 bp, Artificial Sequence
  ENSG00000076344_30 (sequence is synthesized)
ctctcgctttctctcccctcccacctgctgccctgggtgcaggtaagtggagtggtggggacgagggggctggcggggaggaagggggctcttctccagaacagtatcagggtttgctgg

SEQ ID NO: 69455 - DNA, 120 bp, Artificial Sequence
  ENSG00000076344_31 (sequence is synthesized)
gaattggaggggtgacaagcagggttacggcctctgacagacctcagcagatccagcaacctccctccaggtggaggcctccagaaccagagggaccagaccagagggagcatctgagcc

SEQ ID NO: 69456 - DNA, 120 bp, Artificial Sequence
  ENSG00000076344_32 (sequence is synthesized)
gagtgaaactgtctcaaaaaaataataaagaaaaaaaaatgacatattacagttgcaactttgagaacctgaggttccgtggaatattccacagatcgccagaccttaggcccccagagg

SEQ ID NO: 69457 - DNA, 120 bp, Artificial Sequence
  ENSG00000076344_33 (sequence is synthesized)
tctcctcgaaagatccctgattggaagaaggggctccaaggggcgggactgggggcctgggccaccatctctgccagatctatggggcaggggctcagcctggggaggtgccctcctgct

SEQ ID NO: 69458 - DNA, 120 bp, Artificial Sequence
  ENSG00000076344_34 (sequence is synthesized)
ggggattttggaccccagcaggggacctgcatctaactgcagcccacctatccccttctagaccaagagtgcagatttccataagcgggaggtaagttctggagctgggagtggagggtg

SEQ ID NO: 69459 - DNA, 120 bp, Artificial Sequence
  ENSG00000076344_35 (sequence is synthesized)
ccaggtgccttccccagcccgggacctgactcacaggccccacatcctagatcgagtacttcaggaaagcgctgggcaggacccgagtgaagtcctccgtctgccttgaggcgtgagtgg

SEQ ID NO: 69460 - DNA, 120 bp, Artificial Sequence
  ENSG00000076351_0 (sequence is synthesized)
caagccccacgccacgcgtcgctggtcccaggcagcgagtcgctcgcgcgccccgccgcccgcctggcgacagctccgccgcgcacgcacatggaggggagcgcgagccccccggaaaag

SEQ ID NO: 69461 - DNA, 120 bp, Artificial Sequence
  ENSG00000076351_1 (sequence is synthesized)
cggaaaagccccgcgcccgccctgcggctgccgtgctgtgccggggcccggtagagccgctggtcttcctggccaactttgccttggtcctgcagggcccgctcaccacgcagtatctgt

SEQ ID NO: 69462 - DNA, 120 bp, Artificial Sequence
  ENSG00000076351_2 (sequence is synthesized)
ggcaccgcttcagcgccgacctcggctacaatggcacccgccaaagggggggctgcagcaaccgcagcgcggaccccaccatgcaggaagtggagacccttacctcccactggaccctct

SEQ ID NO: 69463 - DNA, 120 bp, Artificial Sequence
  ENSG00000076351_3 (sequence is synthesized)
acatgaacgtgggcggcttcctggtggggctcttctcgtccaccctgctgggagcttggagcgacagtgtgggccgccgcccgctgctagtgctggcctcgctgggcctgctgctccagg

SEQ ID NO: 69464 - DNA, 120 bp, Artificial Sequence
  ENSG00000076351_4 (sequence is synthesized)
ccctagtgtccgtttttgtggtgcagctgcagctccacgtcggctacttcgtgctgggtcgcatcctttgtgccctcctcggcgacttcggtggccttctggctgctagctttgcgtccg

SEQ ID NO: 69465 - DNA, 120 bp, Artificial Sequence
  ENSG00000076351_5 (sequence is synthesized)
tggcagatgtcagctccagtcgcagccgcaccttccggatggccctgctggaagccagcatcggggtggctgggatgctggcaagcctcctcgggggccactggctccgggcccagggtt

SEQ ID NO: 69466 - DNA, 120 bp, Artificial Sequence
  ENSG00000076351_6 (sequence is synthesized)
atgccaaccccttctggctggccttggccttgctgatagccatgactctctatgcagctttctgctttggtgagaccttaaaggagccaaagtccacccggctcttcacgttccgtcacc

SEQ ID NO: 69467 - DNA, 120 bp, Artificial Sequence
  ENSG00000076351_7 (sequence is synthesized)
accgatccattgtccagctctatgtggctcccgccccagagaagtccaggaaacatttagccctctactcactggccatcttcgtggtgatcactgtgcactttggggcccaggacatct

SEQ ID NO: 69468 - DNA, 120 bp, Artificial Sequence
  ENSG00000076351_8 (sequence is synthesized)
taaccctttatgaactaagcacacccctctgctgggactccaaactaatcggctatggttctgcagctcagcatctcccctacctcaccagcctgctggccctgaagctcctgcagtact

SEQ ID NO: 69469 - DNA, 120 bp, Artificial Sequence
  ENSG00000076351_9 (sequence is synthesized)
gcctggccgatgcctgggtagctgagatcggcctggccttcaacatcctggggatggtggtctttgcctttgccactatcacgcctctcatgttcacaggatatgggttgcttttcctgt

SEQ ID NO: 69470 - DNA, 120 bp, Artificial Sequence
  ENSG00000076351_10 (sequence is synthesized)
cattagtcatcacacctgtcatccgggctaaactctccaagctggtgagagagacagagcagggtgctctcttttctgctgtggcctgtgtgaatagcctggccatgctgacggcctccg

SEQ ID NO: 69471 - DNA, 120 bp, Artificial Sequence
  ENSG00000076351_11 (sequence is synthesized)
gcatcttcaactcactctacccagccactctgaactttatgaaggggttccccttcctcctgggagctggcctcctgctcatcccggctgttctgattgggatgctggaaaaggctgatc

SEQ ID NO: 69472 - DNA, 120 bp, Artificial Sequence
  ENSG00000076351_12 (sequence is synthesized)
ctcacctcgagttccagcagtttccccagagcccctgatctgcctggaccagaagacagagggcaagaggagcaaagtgaacaccaagcaactggaggtctgcagctggaagcccagccc

SEQ ID NO: 69473 - DNA, 120 bp, Artificial Sequence
  ENSG00000076351_13 (sequence is synthesized)
acagcaggacaagcaactcttgtctaagggcagtgctctctttggacgaggtagtcaagagagaccaaggcaccaccccatccacagctgacccagcctctgtctaggatctagaatcat

SEQ ID NO: 69474 - DNA, 120 bp, Artificial Sequence
  ENSG00000076351_14 (sequence is synthesized)
aacccacacaggcccactgcaggacaggtggcagaggagctatttgggacaggagtcagttctccctttctgctatccatcacttataaccccacaggccagaggagaggtcctgagaga

SEQ ID NO: 69475 - DNA, 120 bp, Artificial Sequence
  ENSG00000076351_15 (sequence is synthesized)
ggtgacacttcagggaccagaggcagcacgagggctggcatctctccttccagcccaaactgcacagccccaaccaggttcccaacacgtgtagcagtcatcagccattccttaacaatg

SEQ ID NO: 69476 - DNA, 120 bp, Artificial Sequence
  ENSG00000076351_16 (sequence is synthesized)
aatgtggtacctggttagtgccagccttgggaaggagggagggaggtaagaggggcttggtgatctctggaggaagagtgttgcctttgctgtggttggggaatcgatccttggctatgg

SEQ ID NO: 69477 - DNA, 120 bp, Artificial Sequence
  ENSG00000076351_17 (sequence is synthesized)
cctacccactcccctggctgaagagtgccaatcattacaaatcagcttcagcaaactgaaacaaaccttctggtgccttgggctttggggccctctgttttcctgctcccagtctgcctg

SEQ ID NO: 69478 - DNA, 120 bp, Artificial Sequence
  ENSG00000076351_18 (sequence is synthesized)
ccatacgttagacaacagaagctgctgggctgggcaggagccctgagctgcctggtggattggtaccaagtggggccagccagggcttctactgactcgctgtgcaaccttgagcaagcc

SEQ ID NO: 69479 - DNA, 120 bp, Artificial Sequence
  ENSG00000076351_19 (sequence is synthesized)
ccactaggaacggctagatcagcaatgccccaaattgttgaatcgtggtgatcacatttggatggacaagttaggaaacttagctgattctctgagatacttcccacttcctcatacatt

SEQ ID NO: 69480 - DNA, 120 bp, Artificial Sequence
  ENSG00000076351_20 (sequence is synthesized)
ctacaatgagatgcctctcttcatgggcctggggaaaggatgaatgagtgtggctggacttttgacctttaatgtccctgagcagttcttggcccttggggagaagtagggggaggatct

SEQ ID NO: 69481 - DNA, 120 bp, Artificial Sequence
  ENSG00000076351_21 (sequence is synthesized)
ggctgactcagccccaaccgaggggtagcagctgcagcccagccaagcagaacaccctggccctacagacctgtgtctgagcaggctttggaggaaaggccacttctgagtcctctgtct

SEQ ID NO: 69482 - DNA, 120 bp, Artificial Sequence
  ENSG00000076351_22 (sequence is synthesized)
caggagaagccaggcctaggtgcttgacctggtgatctgagctgtgtttgtcctagtatgggtggcagtcacctctgaacacactggccttggcttagaggaggcttgtgacttcagctg

SEQ ID NO: 69483 - DNA, 120 bp, Artificial Sequence
  ENSG00000076351_23 (sequence is synthesized)
ttccagctggggctggatgctggactctgattccctcagagagacagaagatcgggcagaggtcaaccagaaggccacacagggcagtggacaacagtggagggtataccaaatagaaat

SEQ ID NO: 69484 - DNA, 120 bp, Artificial Sequence
  ENSG00000076351_24 (sequence is synthesized)
aaaacgcaggaaacctctctgaatactgcccttggggacctcaggagggagtgggactgattggagacaaagagccagaaatcatcccctggagatactcagacactgtattgttattgg

SEQ ID NO: 69485 - DNA, 120 bp, Artificial Sequence
  ENSG00000076351_25 (sequence is synthesized)
cgctgtcctgtgagggcagtgtccaggctgccctgcttgtcatatccatgccctggctctggccccggtgagcacttgtgctgcatgaggaaaggaggatcaggtggggtcaaaaccaaa

SEQ ID NO: 69486 - DNA, 120 bp, Artificial Sequence
  ENSG00000076351_26 (sequence is synthesized)
gcatcgaggctggcactggccaagacagactctggcagggaggggagtggaaggaaggagccccaaacctggagtgagacctttgactttctgatgatgtggccaagaactaggagtcac

SEQ ID NO: 69487 - DNA, 120 bp, Artificial Sequence
  ENSG00000076351_27 (sequence is synthesized)
gccaagagtggggctgggggcgcagccagctttaaggtgtcaacacctggcccttgcggggaaagagccttcagcagcccccacggcctggagcctgggtttattggagggtgctttctt

SEQ ID NO: 69488 - DNA, 120 bp, Artificial Sequence
  ENSG00000076351_28 (sequence is synthesized)
accctctgaacccagtggaggagggggcaatgggatattcctgctctgtatggcctctgggtcagctttttgttgcaaaatcctatcccccgctgctagattctttgaagcaagggagaa

SEQ ID NO: 69489 - DNA, 120 bp, Artificial Sequence
  ENSG00000076351_29 (sequence is synthesized)
gcaatagcccagcctcagaatgattctcaggaaagcaattccactgccagtggactgggtgccaggaggcctaggtctggatctggggctgccactaatgacaggaaagtgggcttatcc

SEQ ID NO: 69490 - DNA, 120 bp, Artificial Sequence
  ENSG00000076351_30 (sequence is synthesized)
tcaacctttctgagcctcagtgtcattatctgtaaaatggggatgataataccaggtagagttgctctgatgactggagaccatggagcggagtgtttgggaaatggcaaagatttgtga

SEQ ID NO: 69491 - DNA, 120 bp, Artificial Sequence
  ENSG00000076351_31 (sequence is synthesized)
gggcttcgtgctttagagatttgctacccttaaccaccagcatcagctcacctgggaatctgtaagaaatgcagagtcctaggccccaccccagatctcctgattttaacaacattccca

SEQ ID NO: 69492 - DNA, 120 bp, Artificial Sequence
  ENSG00000076351_32 (sequence is synthesized)
ggtgacttggatgcatgttaaagttggagaagctgccctaagtgacaaccctttgccttttcaggactttgcctctttccacagagctgcaggttctgtctaggctgcttttactgccat

SEQ ID NO: 69493 - DNA, 120 bp, Artificial Sequence
  ENSG00000076351_33 (sequence is synthesized)
gggggctgcctggtccctgagtaagcagtgggtagccctggatggctgaggggctggggaagccagctgggccagaccaggaaggagcctgaggcacagcaccaaggcatggggtagggt

SEQ ID NO: 69494 - DNA, 120 bp, Artificial Sequence
  ENSG00000076351_34 (sequence is synthesized)
gggctttgaggcacggcctccccatgcccagacccaggcccaaacaggaggctcctgtgcaccagcaagtgcagcaaagctggctgcagtgacaaggaagtcagagggagggctggtttg

SEQ ID NO: 69495 - DNA, 120 bp, Artificial Sequence
  ENSG00000076351_35 (sequence is synthesized)
cctcaaccctcgccctggatgtggcaaaagataccacaccgaaggaagctgtaggggatctgggacttagtcaggctagctaagggcactgagtgattacagggcaaggccacagagcgg

SEQ ID NO: 69496 - DNA, 120 bp, Artificial Sequence
  ENSG00000076351_36 (sequence is synthesized)
caggaagttgtaagtgcaggggccaggcacagtctgagtggagagccatgatggcactcatccctggctggctcctgggcccaggcccttgctcagaatacagtgcccaggcccgcctgg

SEQ ID NO: 69497 - DNA, 120 bp, Artificial Sequence
  ENSG00000076351_37 (sequence is synthesized)
gcattgccttaattcctgtctgaggctgccttccgtcatcctcctcaagctgactgctatcagcaggagaagggaatgcagaaccacccccaccccaactccagtgtctccagaactgag

SEQ ID NO: 69498 - DNA, 120 bp, Artificial Sequence
  ENSG00000076351_38 (sequence is synthesized)
cagggaccctccccatgacggagacagacaacccaatggcagggcctgggggagttctaacctcccgtgcccaagcctgacttcccttccctctccagatactgaggaaagtgggttgga

SEQ ID NO: 69499 - DNA, 120 bp, Artificial Sequence
  ENSG00000076351_39 (sequence is synthesized)
ggtgggccatgagggtgggggacagggggagggagagccatttcctaagaagagcccaggttgtctcagcccagggagactggtttcaggagctgttccttcagaaaggacgatggaaat

SEQ ID NO: 69500 - DNA, 120 bp, Artificial Sequence
  ENSG00000076351_40 (sequence is synthesized)
ggaagtcacagcagggctggggaactggggactggttaggttggacccatgggtgcagcaccctccaaactggtgtcagagcctgcagatgagtcccgggaggagcggccctgcaggaag

SEQ ID NO: 69501 - DNA, 120 bp, Artificial Sequence
  ENSG00000076351_41 (sequence is synthesized)
cggatgatcttctcaatggtggcctcctggtattcgtgggaccacctgtgggcacaggagccaatgtggttcagacagctgggcagagggagctgctagtcagctgtttgcccacactct

SEQ ID NO: 69502 - DNA, 120 bp, Artificial Sequence
  ENSG00000076351_42 (sequence is synthesized)
gcctgtcatggtgatttgtaccctacccccctggtcccagggccctggggctcacttgataccgttgaaagtaagcacagcctgcatgtcctcaggcaggacctggggctcaggccactc

SEQ ID NO: 69503 - DNA, 120 bp, Artificial Sequence
  ENSG00000076351_43 (sequence is synthesized)
gaagccatcaatgatgggcacaatgttcttgccgcagcttaaagcagtcacaatctcctggagaaagaaaggaaaggaggaagatacccctgtacccatctagggacccttgtagccagg

SEQ ID NO: 69504 - DNA, 120 bp, Artificial Sequence
  ENSG00000076351_44 (sequence is synthesized)
caggtgctgggaggcccactggcccgaggctgggcccagggcaggacaccagtcctgatgtccaccttgatgtctaccttaacccttgtagtgtaataaaaaataaatatttttcctttg

SEQ ID NO: 69505 - DNA, 120 bp, Artificial Sequence
  ENSG00000076351_45 (sequence is synthesized)
cccagagttcctggcacagagctgctaaaacccttggaatctcttgagtgatgagtgtctttgtatgctaaagagatgattccccactgggggcccggggggtgctatgggggtagccta

SEQ ID NO: 69506 - DNA, 120 bp, Artificial Sequence
  ENSG00000076351_46 (sequence is synthesized)
gatagtttcaggaagagggctggtcaccagggagaccagggcatgactagaggattggaactttcagccccacctcccagcctccagagaggtgctggagattgagttcaatcaccaatg

SEQ ID NO: 69507 - DNA, 120 bp, Artificial Sequence
  ENSG00000076351_47 (sequence is synthesized)
gccaatgatttaatcaatcatgcctacataatggaacctccataaaaacccccaaacaaggggttttgaagagcctccaggttgataaacaggtgtaggtgctgggaaggtggtagaagg

SEQ ID NO: 69508 - DNA, 120 bp, Artificial Sequence
  ENSG00000076351_48 (sequence is synthesized)
catggcatccacacctccaccctccatacgtagagatcctatgtatctcttccatttggctattcttgagctgtgtcctttataactgtgaaattaaataattcagctgggcatggtggg

SEQ ID NO: 69509 - DNA, 120 bp, Artificial Sequence
  ENSG00000076351_49 (sequence is synthesized)
gaggcaggaggatcacttgagcccaggattttgagattaataatattatttattactattattcaagctttgttaaatcaaacctaaagctcttggaactttaagttattctgagccttg

SEQ ID NO: 69510 - DNA, 120 bp, Artificial Sequence
  ENSG00000076351_50 (sequence is synthesized)
gctcttggaactttaagttattctgagccttgacaggaattggtctctgcagcctgagtcatggggcatgcagctgcaacttccacctattttttttttttctgtaattacttaggaaga

SEQ ID NO: 69511 - DNA, 120 bp, Artificial Sequence
  ENSG00000076351_51 (sequence is synthesized)
ccaaatggcaccagagataagactcccttagatccccacttagatcaccaccctttctcagggggtaataaagtcatcttccttggaatgtagcaatctataaccaatcaaagcactgta

SEQ ID NO: 69512 - DNA, 120 bp, Artificial Sequence
  ENSG00000076351_52 (sequence is synthesized)
acatacgcactggtcttgtatggaaaatgttgtaatcctgctaaaattcctctctctttgcctgtggaagtgaaaccttaacttctccagtttggaatgctcaccccatgcctttggagt

SEQ ID NO: 69513 - DNA, 120 bp, Artificial Sequence
  ENSG00000076351_53 (sequence is synthesized)
caatgcttactgggtggctattctcaaactttgcactcaaagaaactctatacttagtcttattttctgaatctcattatttaaggttgacataataaacaactaatagtaagtaaagtg

SEQ ID NO: 69514 - DNA, 120 bp, Artificial Sequence
  ENSG00000076351_54 (sequence is synthesized)
tttttttttcttttatgtgctgggttctgtcagatcacatgtacttttaatgtggatttaatagcagccatttgtttagtagcccctctgtgccagctactgtccacatatgaccttact

SEQ ID NO: 69515 - DNA, 120 bp, Artificial Sequence
  ENSG00000076351_55 (sequence is synthesized)
gaatccttgtcacagtacatgatgtagcaggatttactggtgaggaaggggagacataggttaagtgactactcccggtcacacagctgtgaggtggtggtgccagagttggaatatggc

SEQ ID NO: 69516 - DNA, 120 bp, Artificial Sequence
  ENSG00000076351_56 (sequence is synthesized)
gttacagcgcagaacatcagcagcatcaggagtcatgtgctcttccagctctgccttgagtacccgatgacctcgtttcctcagcggtagatagcgatggttaatattggctagcctgta

SEQ ID NO: 69517 - DNA, 120 bp, Artificial Sequence
  ENSG00000076351_57 (sequence is synthesized)
ccactgcaacctctgcctcctgggctcaattgatcctcccacctcagccacccgagtacctgggactacaggtatctgctactacgcctggctaatttttgtgtattttttgtagagaca

SEQ ID NO: 69518 - DNA, 79 bp, Artificial Sequence
  ENSG00000076351_58 (sequence is synthesized)
cgcctggctaatttttattggtctcgaactcctgggttcaagcgatccatgcgcctcagcctccaaaagtgctgggatt

SEQ ID NO: 69519 - DNA, 120 bp, Artificial Sequence
  ENSG00000076351_59 (sequence is synthesized)
ggccactcactgcccccagatgtggttcattcctgtgtctttggaaacatagttatgcccccagcctgcactggagaacagacaactaagaaatccctcaaaaatgccatctttgataca

SEQ ID NO: 69520 - DNA, 120 bp, Artificial Sequence
  ENSG00000076351_60 (sequence is synthesized)
tggaaaatatagaccttcagtagctaaagtaattaacccactgttatcaaccattaatattgttagtaatatagagcaaaagacaaaagtgtggctcatacactaattgctttacccctt

SEQ ID NO: 69521 - DNA, 120 bp, Artificial Sequence
  ENSG00000076351_61 (sequence is synthesized)
aaaggggcctgaccgagaacctcagcgggtgggatgcgaaaagctgagctaaagtctggccttgcagctcagcatctcccctacctcaccagcctgctggccctgaagctcctgcagtac

SEQ ID NO: 69522 - DNA, 80 bp, Artificial Sequence
  ENSG00000076356_0 (sequence is synthesized)
gccgccgccgccaccgcgggagccagagctgccgggaggagcggcatccgcgccagactggagcgggagggcggcggagg

SEQ ID NO: 69523 - DNA, 120 bp, Artificial Sequence
  ENSG00000076356_1 (sequence is synthesized)
ccagactggagcgggagggcggcggagggcagttgctgggaatttttcagccgagagggcgagcgatccggagagagaccccgagagcttgggagcggtagggcgtgcgagcgccgcagc

SEQ ID NO: 69524 - DNA, 120 bp, Artificial Sequence
  ENSG00000076356_2 (sequence is synthesized)
cagcggagcaaacctcgaaatagatctggaaagccaggctcccggaggaaatgggactgtgaacgaaccggagagcaagaagggaaggaagcgccgggattgctgatgtcagaggagccc

SEQ ID NO: 69525 - DNA, 120 bp, Artificial Sequence
  ENSG00000076356_3 (sequence is synthesized)
ggaaagtcgcgctggaaaaatctgaagacagccggggctctgcttcttcctcaggagagacaccgccggccgcccccacacgccccctcggcgcctccgggtgccccctgagagccggcg

SEQ ID NO: 69526 - DNA, 120 bp, Artificial Sequence
  ENSG00000076356_4 (sequence is synthesized)
acagcgcccagccgggctgctgcggggcgacggaggactgaggggcgcgcggagcggagaccgaggagcgacttcaggaatacagataagtgtctggtggcttgacgtggattttaatga

SEQ ID NO: 69527 - DNA, 120 bp, Artificial Sequence
  ENSG00000076356_5 (sequence is synthesized)
atttggactccatgtggatttggtcgtctccctgattccgagctgcgggcagggagaggggcctcgcgccgccctcagcagccggcggcggccgaggtagaccgagcggggacggaagga

SEQ ID NO: 69528 - DNA, 120 bp, Artificial Sequence
  ENSG00000076356_6 (sequence is synthesized)
cagaccgacgtcgccgagctggaatcatgtgagggccaaccggggaaggtggagcagatgagcacacacaggagccgtctcctcaccgccgcccctctcagcatggaacagaggcggccc

SEQ ID NO: 69529 - DNA, 120 bp, Artificial Sequence
  ENSG00000076356_7 (sequence is synthesized)
tggccccgggccctggaggtggacagccgctctgtggtcctgctctcagtggtctgggtgctgctggcccccccagcagccggcatgcctcagttcagcaccttccactctgagaatcgt

SEQ ID NO: 69530 - DNA, 120 bp, Artificial Sequence
  ENSG00000076356_8 (sequence is synthesized)
gactggaccttcaaccacttgaccgtccaccaagggacgggggccgtctatgtgggggccatcaaccgggtctataagctgacaggcaacctgaccatccaggtggctcataagacaggg

SEQ ID NO: 69531 - DNA, 120 bp, Artificial Sequence
  ENSG00000076356_9 (sequence is synthesized)
ccagaagaggacaacaagtcttgttacccgcccctcatcgtgcagccctgcagcgaagtgctcaccctcaccaacaatgtcaacaagctgctcatcattgactactctgagaaccgcctg

SEQ ID NO: 69532 - DNA, 120 bp, Artificial Sequence
  ENSG00000076356_10 (sequence is synthesized)
ctggcctgtgggagcctctaccagggggtctgcaagctgctgcggctggatgacctcttcatcctggtggagccatcccacaagaaggagcactacctgtccagtgtcaacaagacgggc

SEQ ID NO: 69533 - DNA, 120 bp, Artificial Sequence
  ENSG00000076356_11 (sequence is synthesized)
accatgtacggggtgattgtgcgctctgagggtgaggatggcaagctcttcatcggcacggctgtggatgggaagcaggattacttcccgaccctgtccagccggaagctgccccgagac

SEQ ID NO: 69534 - DNA, 120 bp, Artificial Sequence
  ENSG00000076356_12 (sequence is synthesized)
cctgagtcctcagccatgctcgactatgagctacacagcgattttgtctcctctctcatcaagatcccttcagacaccctggccctggtctcccactttgacatcttctacatctacggc

SEQ ID NO: 69535 - DNA, 120 bp, Artificial Sequence
  ENSG00000076356_13 (sequence is synthesized)
tttgctagtgggggctttgtctactttctcactgtccagcccgagacccctgagggtgtggccatcaactccgctggagacctcttctacacctcacgcatcgtgcggctctgcaaggat

SEQ ID NO: 69536 - DNA, 120 bp, Artificial Sequence
  ENSG00000076356_14 (sequence is synthesized)
gaccccaagttccactcatacgtgtccctgcccttcggctgcacccgggccggggtggaataccgcctcctgcaggctgcttacctggccaagcctggggactcactggcccaggccttc

SEQ ID NO: 69537 - DNA, 120 bp, Artificial Sequence
  ENSG00000076356_15 (sequence is synthesized)
aatatcaccagccaggacgatgtactctttgccatcttctccaaagggcagaagcagtatcaccacccgcccgatgactctgccctgtgtgccttccctatccgggccatcaacttgcag

SEQ ID NO: 69538 - DNA, 120 bp, Artificial Sequence
  ENSG00000076356_16 (sequence is synthesized)
atcaaggagcgcctgcagtcctgctaccagggcgagggcaacctggagctcaactggctgctggggaaggacgtccagtgcaccaaggcgcctgtccccatcgatgataacttctgtgga

SEQ ID NO: 69539 - DNA, 120 bp, Artificial Sequence
  ENSG00000076356_17 (sequence is synthesized)
ctggacatcaaccagcccctgggaggctcaactccagtggagggcctgaccctgtacaccaccagcagggaccgcatgacctctgtggcctcctacgtttacaacggctacagcgtggtt

SEQ ID NO: 69540 - DNA, 120 bp, Artificial Sequence
  ENSG00000076356_18 (sequence is synthesized)
tttgtggggactaagagtggcaagctgaaaaagattcgggccgacggtcccccccatggtggggtccagtacgagatggtctctgtgctcaaggacggaagccccatcctccgggacatg

SEQ ID NO: 69541 - DNA, 120 bp, Artificial Sequence
  ENSG00000076356_19 (sequence is synthesized)
gccttctccattgatcagcgctacctgtacgtcatgtctgagagacaggtcaccagggtccccgtggagtcatgtgagcagtatacgacttgtggggagtgcctgagctctggggaccct

SEQ ID NO: 69542 - DNA, 120 bp, Artificial Sequence
  ENSG00000076356_20 (sequence is synthesized)
cactgtggctggtgtgccctgcacaacatgtgctcccgcagggacaaatgccaacaggcctgggaacctaatcgatttgctgccagcatcagccagtgtgtgagccttgcagtgcatccc

SEQ ID NO: 69543 - DNA, 120 bp, Artificial Sequence
  ENSG00000076356_21 (sequence is synthesized)
agcagcatctcagtatctgagcacagccggttgcttagcctggtagtgagtgatgctcctgatctatctgcgggtatcgcctgtgcctttgggaacctgacagaggtggaggggcaggtg

SEQ ID NO: 69544 - DNA, 120 bp, Artificial Sequence
  ENSG00000076356_22 (sequence is synthesized)
tccgggagccaggtcatctgcatctcacctgggcccaaggatgtccctgtcatcccgctggatcaagactggtttgggctggagctacagctgaggtccaaggagacagggaagatattt

SEQ ID NO: 69545 - DNA, 120 bp, Artificial Sequence
  ENSG00000076356_23 (sequence is synthesized)
gtcagcaccgagttcaagttttacaactgcagtgcccaccaactgtgcctgtcctgtgtcaacagcgccttccgctgccattggtgcaagtaccgcaacctctgcactcatgaccccacc

SEQ ID NO: 69546 - DNA, 120 bp, Artificial Sequence
  ENSG00000076356_24 (sequence is synthesized)
acctgctccttccaggagggccggatcaatatttcagaggactgtccccagctggtgcccacagaggagatcttgattccagtcggggaggtaaagccaatcacccttaaggcgcgaaat

SEQ ID NO: 69547 - DNA, 120 bp, Artificial Sequence
  ENSG00000076356_25 (sequence is synthesized)
ctgccccagccgcagtccggccagcgaggctatgagtgtgtcctcaacatacaaggagccatccaccgggtccccgctctgcgcttcaacagctccagcgttcagtgtcagaacagctcg

SEQ ID NO: 69548 - DNA, 120 bp, Artificial Sequence
  ENSG00000076356_26 (sequence is synthesized)
taccagtatgatggcatggacatcagcaatctggccgtggatttcgctgtggtgtggaacggcaatttcatcattgacaaccctcaggacctgaaagtccatctctacaagtgtgcagcc

SEQ ID NO: 69549 - DNA, 120 bp, Artificial Sequence
  ENSG00000076356_27 (sequence is synthesized)
cagcgggagagctgcggcctctgcctcaaggccgaccggaagtttgagtgtggctggtgcagcggcgagcgcaggtgcaccctccaccagcactgtaccagcccttccagcccctggctc

SEQ ID NO: 69550 - DNA, 120 bp, Artificial Sequence
  ENSG00000076356_28 (sequence is synthesized)
gactggtccagccacaatgtcaagtgctccaaccctcaaatcaccgagattttgacggtgtctggaccgccggaaggagggacgcgagtgaccatccatggcgtgaacctgggtctggac

SEQ ID NO: 69551 - DNA, 120 bp, Artificial Sequence
  ENSG00000076356_29 (sequence is synthesized)
ttctccgagatcgcccaccatgtgcaggtggctggggtgccctgcacgcccctcccaggggaatacatcatcgctgagcagattgtctgtgagatgggccatgccctcgtgggaaccacc

SEQ ID NO: 69552 - DNA, 120 bp, Artificial Sequence
  ENSG00000076356_30 (sequence is synthesized)
tccgggccagtacgcctgtgtattggcgagtgtaagccagagttcatgacgaagtcccatcagcagtacaccttcgtgaacccttctgtgctgtcactcaacccaatccgaggtcccgag

SEQ ID NO: 69553 - DNA, 120 bp, Artificial Sequence
  ENSG00000076356_31 (sequence is synthesized)
tcaggaggcactatggtgaccattaccggccattaccttggggctgggagcagcgtggcagtctacctgggcaaccagacctgcgagttctacgggaggtcaatgagtgagatcgtgtgt

SEQ ID NO: 69554 - DNA, 120 bp, Artificial Sequence
  ENSG00000076356_32 (sequence is synthesized)
gtctcacccccatcatccaatggccttggcccggtccctgtttctgtgagtgtcgaccgagcccatgtggatagcaacctgcagtttgagtacatagatgaccctcgggtccagcgcatc

SEQ ID NO: 69555 - DNA, 120 bp, Artificial Sequence
  ENSG00000076356_33 (sequence is synthesized)
gagccagagtggagcattgccagtggccacacacccctgaccatcacaggcttcaacctggatgtcattcaggagccaaggatccgagtcaaattcaatggcaaagaatctgtcaatgtg

SEQ ID NO: 69556 - DNA, 120 bp, Artificial Sequence
  ENSG00000076356_34 (sequence is synthesized)
tgtaaagttgtgaacacaaccaccctcacctgcctggcaccctctctgaccacggactaccgccctggcctggacactgtggaacgcccagatgagtttggatttgtctttaacaatgtc

SEQ ID NO: 69557 - DNA, 120 bp, Artificial Sequence
  ENSG00000076356_35 (sequence is synthesized)
caatccttgctaatttacaacgacaccaagtttatctactaccccaacccgacctttgaactgcttagccctactggagtcttggatcaaaagccaggatcgcccatcattctgaagggc

SEQ ID NO: 69558 - DNA, 120 bp, Artificial Sequence
  ENSG00000076356_36 (sequence is synthesized)
aaaaacctctgccctcctgcctctggaggggccaaactcaactacactgtgctcatcggagagaccccttgtgctgtcaccgtatctgagacccagcttctctgcgagcctcccaacctc

SEQ ID NO: 69559 - DNA, 120 bp, Artificial Sequence
  ENSG00000076356_37 (sequence is synthesized)
accgggcagcacaaggtcatggttcacgtgggcgggatggtgttctcgcctggctcggtgagtgtcatctcagacagcttgctgaccctgccagccatcgtcagcatcgcggccggcggc

SEQ ID NO: 69560 - DNA, 120 bp, Artificial Sequence
  ENSG00000076356_38 (sequence is synthesized)
agcctcctcctcatcatcgtcatcatcgtcctcattgcctacaagcgcaagtctcgagaaaatgacctcactctcaagcggctgcaaatgcagatggacaatctggagtcccgtgtggcc

SEQ ID NO: 69561 - DNA, 120 bp, Artificial Sequence
  ENSG00000076356_39 (sequence is synthesized)
ttggagtgcaaggaagcttttgctgagctccagacggatatcaatgagttgaccagtgacctggaccgctcaggaatcccttacctggactatcgtacctacgctatgcgagtcctgttc

SEQ ID NO: 69562 - DNA, 120 bp, Artificial Sequence
  ENSG00000076356_40 (sequence is synthesized)
ccgggcatcgaggaccaccccgtcctgcgggagctggaggtacaaggaaacgggcagcagcacgtggagaaggccctgaagctctttgcccagctcatcaacaacaaggtgttcctgctg

SEQ ID NO: 69563 - DNA, 120 bp, Artificial Sequence
  ENSG00000076356_41 (sequence is synthesized)
accttcatccgcaccctggagctgcagcgcagtttctccatgcgcgaccggggcaacgtggcttcgctcatcatgaccggcctgcagggccgcctggaatatgccactgatgtcctcaag

SEQ ID NO: 69564 - DNA, 120 bp, Artificial Sequence
  ENSG00000076356_42 (sequence is synthesized)
cagctgctctctgacctcatcgataagaacctggagaacaagaaccaccccaagctgctactccggaggacagagtctgtggctgaaaagatgctgaccaattggttcgccttcctcctg

SEQ ID NO: 69565 - DNA, 120 bp, Artificial Sequence
  ENSG00000076356_43 (sequence is synthesized)
cacaagttcctaaaggagtgcgcaggggagccactcttcatgctatactgtgccatcaagcagcagatggagaagggccccattgatgccatcacgggcgaggcccgctactccctgagc

SEQ ID NO: 69566 - DNA, 120 bp, Artificial Sequence
  ENSG00000076356_44 (sequence is synthesized)
gaggacaagctcatccggcagcagatcgagtacaagaccctgatcctgaactgcgtcaaccctgacaacgagaacagtccagagatcccagtgaaggtgttaaactgtgacaccatcaca

SEQ ID NO: 69567 - DNA, 120 bp, Artificial Sequence
  ENSG00000076356_45 (sequence is synthesized)
caggtcaaggagaagattcttgatgccgtgtataagaatgtgccctattcccagcggccgagggcagtggacatggacttggagtggcgccaaggccggatcgcccgggtcgtgctgcaa

SEQ ID NO: 69568 - DNA, 120 bp, Artificial Sequence
  ENSG00000076356_46 (sequence is synthesized)
gatgaggacatcaccaccaagattgagggtgactggaagcggctcaacacactgatgcattatcaggtgtcagacaggtcggtggtggctctggtccccaaacagacctcctcctacaac

SEQ ID NO: 69569 - DNA, 120 bp, Artificial Sequence
  ENSG00000076356_47 (sequence is synthesized)
ccagacctggaaagtggggtcaaggtgtggcatctggtgaagaaccatgaccacggtgaccagaaggagggtgaccggggcagcaagatggtgtccgagatctacctgacccggctactg

SEQ ID NO: 69570 - DNA, 120 bp, Artificial Sequence
  ENSG00000076356_48 (sequence is synthesized)
gccaccaagggcaccctgcagaagtttgtggacgacttgtttgagaccttgttcagcactgtgcaccggggcagcgctctccccctggccatcaagtacatgtttgatttcctagatgag

SEQ ID NO: 69571 - DNA, 120 bp, Artificial Sequence
  ENSG00000076356_49 (sequence is synthesized)
caggcagacaggcacagcatccatgacacagatgtgcggcacacctggaaaagcaactgcctccctctgcgcttctgggtgaacgtgattaagaacccccagttcgtgtttgacatccac

SEQ ID NO: 69572 - DNA, 120 bp, Artificial Sequence
  ENSG00000076356_50 (sequence is synthesized)
aagggcagcatcacggacgcctgcctctctgtggtggcccagaccttcatggactcttgttcaacgtcagagcaccggctgggcaaggactccccctccaacaagctgctctatgccaag

SEQ ID NO: 69573 - DNA, 120 bp, Artificial Sequence
  ENSG00000076356_51 (sequence is synthesized)
gacatccccagctacaagagctgggtggagagatactacgcagacatcgccaagctcccagccatcagtgaccaggacatgaatgcctacctcgccgagcagtcccgcctgcacgccgtg

SEQ ID NO: 69574 - DNA, 120 bp, Artificial Sequence
  ENSG00000076356_52 (sequence is synthesized)
gagttcaacatgctgagtgccctcaatgagatctactcctatgtcagcaagtatagtgaggagctcatcggggccctagagcaggatgagcaggcacggcggcagcggctggcttataag

SEQ ID NO: 69575 - DNA, 120 bp, Artificial Sequence
  ENSG00000076356_53 (sequence is synthesized)
gtggagcagctcattaatgccatgtccattgagagctgagaggaggagcctcgcattcctgggaagagggacctgtccaagctgtcacactgggagtctcagatggaaggacaagtgatg

SEQ ID NO: 69576 - DNA, 120 bp, Artificial Sequence
  ENSG00000076356_54 (sequence is synthesized)
gggatcaggccccagagcttgctgtcccctgagaccccatcctggggagaggggaggactcctctccctacgccagccaagtttcgtcatagccagttccagctgggagagacagtgggc

SEQ ID NO: 69577 - DNA, 120 bp, Artificial Sequence
  ENSG00000076356_55 (sequence is synthesized)
gtcgtccatcctcagtgagaacaccagagaacccggggccgggagaaggtggttcttcaagccgagaggcacgagctggggacagttctgcctctgtgactgctgctttgcatgaaaact

SEQ ID NO: 69578 - DNA, 120 bp, Artificial Sequence
  ENSG00000076356_56 (sequence is synthesized)
catttgatgtatattggggaaataatgagaactttatttaatttttttaagaaaaagggaaaaaaacagaaataaaacaaaaagccgccctgttaatcccgtccaacttttgtttaattc

SEQ ID NO: 69579 - DNA, 120 bp, Artificial Sequence
  ENSG00000076356_57 (sequence is synthesized)
tgatttctgtctcccttccatcttttctcccattcctccttctttatataatgcctatttccaaatgccagagaaagcagagatgctgagagacattggagagaaaatgactgtctcctt

SEQ ID NO: 69580 - DNA, 120 bp, Artificial Sequence
  ENSG00000076356_58 (sequence is synthesized)
aattaaaaaaaaaaaaaaaaagagaaagaggagaagaagaatgatgagcacaagtatgcaccaaacacttcgcaaaaacagaggccagtaaaacctggaattatcccggcagccagagga

SEQ ID NO: 69581 - DNA, 120 bp, Artificial Sequence
  ENSG00000076356_59 (sequence is synthesized)
ccagaggagtatggaacttccagaactttgcacaaattgcaaagccatcaagagctcaccctggctgactggaaactgagctttatctaccacacacctgtatattctcatcttttgaga

SEQ ID NO: 69582 - DNA, 120 bp, Artificial Sequence
  ENSG00000076356_60 (sequence is synthesized)
ggagatgtgtacctagatagtaccaatgctttttgctactgttttttgttttgttttatttaatcctaaacctcaacaaatgaggagctggtctttgatatgtttcctttcaatttccct

SEQ ID NO: 69583 - DNA, 120 bp, Artificial Sequence
  ENSG00000076356_61 (sequence is synthesized)
aaagttactatgagaagtggggtgaggtgggcctctcccagaccagacacctggcagccctgcctcatatcaatccctgtcataaaccaggcaccctggggaaacggcctggaggtgtgt

SEQ ID NO: 69584 - DNA, 120 bp, Artificial Sequence
  ENSG00000076356_62 (sequence is synthesized)
gggccaggcctccacgaggttccatttgaaagttgatttggagacataggtgtttgactttggagttcactccaatcatccagtggtccctggcaattaaaaagaaaacaaaaatcaaac

SEQ ID NO: 69585 - DNA, 120 bp, Artificial Sequence
  ENSG00000076356_63 (sequence is synthesized)
actgtttacagcaagcaatacttgaagagcataggttacagaagctgcagtatttattattatgctttctttctttcattctctcgtgcctggagaggggagaccacccttcgctcatat

SEQ ID NO: 69586 - DNA, 120 bp, Artificial Sequence
  ENSG00000076356_64 (sequence is synthesized)
acggaagctcctgaccatctgggcctacagcacttcctcagtagaaatgactgtggcatgcccacgttactaccttctgcctctctttctgcctctcacggacttgtgagtgtgaaggac

SEQ ID NO: 69587 - DNA, 120 bp, Artificial Sequence
  ENSG00000076356_65 (sequence is synthesized)
aagtggatgacttctcactggactttccttctctgtctcttctgatgatgcctaaaactatggataaccaattctcctgagtgtagattccaaacaaagagaccaaagctccatgcccag

SEQ ID NO: 69588 - DNA, 120 bp, Artificial Sequence
  ENSG00000076356_66 (sequence is synthesized)
gtccaaaggccccatagaagccagtgggagtcatcgagaggaaaggcgctctgtgagtgtcaggaccttggtggccaggatagccatcagagtgtccaggcctcccacattaccttggat

SEQ ID NO: 69589 - DNA, 120 bp, Artificial Sequence
  ENSG00000076356_67 (sequence is synthesized)
ccgagcagccagctccaactgttctgcaagcagcactggagtcagggggtaggaggacaagtggaagcaaaggtgtgggactggggaagacaaagaggaacaagctgcccttcctcactt

SEQ ID NO: 69590 - DNA, 120 bp, Artificial Sequence
  ENSG00000076356_68 (sequence is synthesized)
ttcaaagggtcaggaatcctaggctatgatgctgggaagctagaccagctcctccaagagagactagaccagggtcattttctctgttattaactctgggctccagcttctccgtgccct

SEQ ID NO: 69591 - DNA, 120 bp, Artificial Sequence
  ENSG00000076356_69 (sequence is synthesized)
gctttacctccaagtggttccaatttccaaaggccctgctgaccacatgtgattcccaggagagggctgggggaggggagcgcagaggtctggcttccatccttggcgtgtagctttgga

SEQ ID NO: 69592 - DNA, 120 bp, Artificial Sequence
  ENSG00000076356_70 (sequence is synthesized)
tcgctgtctaaccacacagcagacgttgcccggtctccccagctctagtttcttgcctgaatgcggctgacaaatgggaagagaaaagcattcagcaaaatactcaggaaacttgctgtt

SEQ ID NO: 69593 - DNA, 120 bp, Artificial Sequence
  ENSG00000076356_71 (sequence is synthesized)
ttcattataattcacaaccagccatgccaaggccactttcttttgaaaatccacttctttaaagtttctcaggccctattagtagcctgaaggaaatactaatgactggccttccgcact

SEQ ID NO: 69594 - DNA, 120 bp, Artificial Sequence
  ENSG00000076356_72 (sequence is synthesized)
aagccaaagtgtttgctcttcatagcactcaaagcttatcagcgcagagcccataatttatggagataaaaggaaaggagatataggtaagaagagtgtgaccaggagaccttatgctac

SEQ ID NO: 69595 - DNA, 120 bp, Artificial Sequence
  ENSG00000076356_73 (sequence is synthesized)
ctgtaaaaaagttcagcccaccccatctaacttctgagctctgtttgggtgaagattttctggccgcatggctgctcagactggcatccaggctttgctccaccaagaagttaaaggcag

SEQ ID NO: 69596 - DNA, 120 bp, Artificial Sequence
  ENSG00000076356_74 (sequence is synthesized)
tcggacatctcagtagcatctctaccagcccttaactcaatgcatctacctggcatctcccagcagttacttttggagacgattcactgcccctggggcgtttccttgaaggtttgtgga

SEQ ID NO: 69597 - DNA, 120 bp, Artificial Sequence
  ENSG00000076356_75 (sequence is synthesized)
gagcgtggagaatgatggggcaatggccaattggagggtggagagtgaagagccggagctggctgtgagtggtttggccacatttctcaggattccatgagagacttggggaacttgggc

SEQ ID NO: 69598 - DNA, 120 bp, Artificial Sequence
  ENSG00000076356_76 (sequence is synthesized)
tgacaaaggaagtagcctggggcatccttaaggaaggaattaagaaaagggaaaaagctggactcaagccacgccatgagggtgaaaggttataaggccctgccccctttccagctgccc

SEQ ID NO: 69599 - DNA, 120 bp, Artificial Sequence
  ENSG00000076356_77 (sequence is synthesized)
acctgttcctcctccacacctcttcgctttgggccaccaagaaccaatgaagtccacaccctttggatgagaaaaagagggagttggttggcctctcttctccctgttatccaatttgag

SEQ ID NO: 69600 - DNA, 120 bp, Artificial Sequence
  ENSG00000076356_78 (sequence is synthesized)
gatattttgaccttgggtaaggatgaagtgttaaagccacagctcctctccacaagaagccattcatcttgggggaggcagagagggaagtctctctccaaagtctatccagcttcgctt

SEQ ID NO: 69601 - DNA, 120 bp, Artificial Sequence
  ENSG00000076356_79 (sequence is synthesized)
cgtttcattgatctgcacaagagacaatgctctggaaaaggaagaggaccccagaagggtgcttggcaagacagaggatgctaatgggcaatggagagcactccctccagctggcccctg

SEQ ID NO: 69602 - DNA, 120 bp, Artificial Sequence
  ENSG00000076356_80 (sequence is synthesized)
ctgctgcctcccgtcctctgcatggggtcaggtgcttctgtgcttgctgtcctacctctctccacagcagggctctcaaaaccattttgatcccccattggcagagggttcccctcttta

SEQ ID NO: 69603 - DNA, 120 bp, Artificial Sequence
  ENSG00000076356_81 (sequence is synthesized)
cagagttcagtcattaaaagcatggatcagctgttaatctcattggaggagggaactgtttcctgcattcattcatctgggaaccttcttgagtagccactgtctgccagccactgctct

SEQ ID NO: 69604 - DNA, 120 bp, Artificial Sequence
  ENSG00000076356_82 (sequence is synthesized)
agagatgggaaaacagcacggaacaaaaccaaggtctttcttccagcgaatttatatccttcaggaagctggttcctgccaccaacttagcaggcaacagttctcctcccctagtggcac

SEQ ID NO: 69605 - DNA, 120 bp, Artificial Sequence
  ENSG00000076356_83 (sequence is synthesized)
agggtaccagttttgtaggaaaagtggtccagcaaaggaagaaagcagaccaacccagctgccttaccttattctggggccattcccccagcgatgagagctgctcttgtttctactgcc

SEQ ID NO: 69606 - DNA, 120 bp, Artificial Sequence
  ENSG00000076356_84 (sequence is synthesized)
accatctcttctggctgcacttcacctgctgcttgagcttctgaccttccttcagttccaccaaatgaggacaggaaatagcagtcaagacccctggccctgctgagcgtgaaacagaag

SEQ ID NO: 69607 - DNA, 120 bp, Artificial Sequence
  ENSG00000076356_85 (sequence is synthesized)
caatggatgagtgctggacgaagaatggcctgggcagaacaaatagggagcatttgaaagcttctggctgataaatctccaggtgcatcccggttgccacgcctgcccccattaacctgc

SEQ ID NO: 69608 - DNA, 120 bp, Artificial Sequence
  ENSG00000076356_86 (sequence is synthesized)
tcctggtaaatactgatccagcagctgctccaggagaggccgtctttttttcccagccacgctgtgtcttgcatgagactcctggggcctgggcacagagagaaaagaattgagactcag

SEQ ID NO: 69609 - DNA, 120 bp, Artificial Sequence
  ENSG00000076356_87 (sequence is synthesized)
gaggctcagtgggtgagaaaatgcaaagtggcttcacagacacagggctgtgggagcagatcgacggggaacttgggagatgaacttcagggccttccgacgccttgtctcaggaacatg

SEQ ID NO: 69610 - DNA, 120 bp, Artificial Sequence
  ENSG00000076356_88 (sequence is synthesized)
ctttgagaaaaatggtagcatcctttccataactcagtctctcttccctagtttccctgaagtgtgacgttttagtatctggagctcagtgatccccatgaatgagggataaagtttcac

SEQ ID NO: 69611 - DNA, 120 bp, Artificial Sequence
  ENSG00000076356_89 (sequence is synthesized)
tcttggtattttctaactagtgctagggaaagtcctgagacacgatcacagccactgcttggcatacagggcctccacccaataagcaaactggagattcctcagcctctcgtggacacc

SEQ ID NO: 69612 - DNA, 120 bp, Artificial Sequence
  ENSG00000076356_90 (sequence is synthesized)
cacatctcattcttctcacagcagagaagctctcccttcagcctgagctgtcttctttctgctgcagtgcagcctgctccctcctaccctggcctcaaggaaggtaggaaacatcttctg

SEQ ID NO: 69613 - DNA, 120 bp, Artificial Sequence
  ENSG00000076356_91 (sequence is synthesized)
catttcaaagtcctcactttgacttatttggccttcatcttggcatggaaggtggcaggcagaatggaaatactccccccaaacagaacagatattcttgcgtgtgtaagggcagaaggg

SEQ ID NO: 69614 - DNA, 120 bp, Artificial Sequence
  ENSG00000076356_92 (sequence is synthesized)
acaagctctctatcccatgagactaggggccggagcccacctgcctttccccacaacttttcctgctcaaacccactcctcttgacacactggaatctgtattatatatatttttaagaa

SEQ ID NO: 69615 - DNA, 120 bp, Artificial Sequence
  ENSG00000076356_93 (sequence is synthesized)
aatacaatgatggttgtctggttttgttgtttttacaggtgttgtggaataaaaactgtaagaaaattaagtatttaaaatgttccaataaagtggggttttttgttattctaatatatt

SEQ ID NO: 69616 - DNA, 120 bp, Artificial Sequence
  ENSG00000076356_94 (sequence is synthesized)
attgtgtacctattgtaaatatgaaacactcctattttgcaagctgaggacacaatttgtactgttgttatatataaataaagtttactgaattaaaaaaaccttaaatctttaaataaa

SEQ ID NO: 69617 - DNA, 120 bp, Artificial Sequence
  ENSG00000076356_95 (sequence is synthesized)
atgagcaggcagacaggcacagcatccatgacacagatgtgcggcacacctggaaaagcaactggttgtgaccagtaccccaagaagagcctcctcccctggctctgagatctctggttc

SEQ ID NO: 69618 - DNA, 120 bp, Artificial Sequence
  ENSG00000076356_96 (sequence is synthesized)
caggagaagggagctgggggaacctatgcaaagagctgcatttgaagcctgcagcagagcttcacagccagacatcgtggggcattctgagtggggcagttctaaggcacttcctgagat

SEQ ID NO: 69619 - DNA, 120 bp, Artificial Sequence
  ENSG00000076356_97 (sequence is synthesized)
ggggaatccctgaattaaactgagacgcccggtgaagttggtcagcaccggagagggagttcacacctgctatagacttgagcccactgacagggaggatttcattgcaaacttgatctc

SEQ ID NO: 69620 - DNA, 120 bp, Artificial Sequence
  ENSG00000076356_98 (sequence is synthesized)
gtccctcttggaaggtagctattggtggagatttaactataggcaactttattttcttggggaacaaaggtgaaatggggaggtaagaaggggttaattttgtgacttagcttctagcta

SEQ ID NO: 69621 - DNA, 120 bp, Artificial Sequence
  ENSG00000076356_99 (sequence is synthesized)
cttcctccagccatcagtcattgggtatgtaaggaatgcaagcgtatttcaatatttcccaaactttaagaaaaaactttaagaaggtacatctgcaaaagcaaaaaaaaaaaaaaaaaa

SEQ ID NO: 69622 - DNA, 120 bp, Artificial Sequence
  ENSG00000076356_100 (sequence is synthesized)
aatcacccaagggccatgagaggagggtggcctgaaatcatgggaccactgatagaaatggtgggaatgacaactcaagacctcaggtcagcacggggagaaggtgggactagcagcacc

SEQ ID NO: 69623 - DNA, 120 bp, Artificial Sequence
  ENSG00000076356_101 (sequence is synthesized)
ctgtttgtttcttccgagaggactgggtctggggaggcaggtgctgggtcaccaggttctgctgcacaatgatcaccaatctctcgagctaaaacagaaccctcggagtttgtcaccatc

SEQ ID NO: 69624 - DNA, 120 bp, Artificial Sequence
  ENSG00000076356_102 (sequence is synthesized)
cctggcatcgtggtgtggagagagtttccttaaccagacctcaatagcaaatgtccagggaaagattaccagaaactacccaaggctgccagaagaaggggagggtagaagagatgagtc

SEQ ID NO: 69625 - DNA, 120 bp, Artificial Sequence
  ENSG00000076356_103 (sequence is synthesized)
agctctcagctgcagcagcttctcccaggctagaggaaagtgagggatcctgttgtgttttggaagataggcagaaatcatcgtggaagggcttgaggctgggtaaagcagatcttcccc

SEQ ID NO: 69626 - DNA, 120 bp, Artificial Sequence
  ENSG00000076356_104 (sequence is synthesized)
aagacctggcactactgagacatttgggaaagtttggggcccatgagagtcaagagaagatgaaggaggggagagaagaagaagctggggagctgggaacatcatctcaggctggaggac

SEQ ID NO: 69627 - DNA, 120 bp, Artificial Sequence
  ENSG00000076356_105 (sequence is synthesized)
aagcctgtgacaggaccggttccacagaggagtcaaaagagttaaagcccagaaggcagctggaagagaaggcaaagctggaaaaggaagtaaaagcagcagctgttctgattttgaagg

SEQ ID NO: 69628 - DNA, 120 bp, Artificial Sequence
  ENSG00000076356_106 (sequence is synthesized)
agagtaaatgggcttatttgctttatggtctaaggagcagagaaaactcattctcctctggttataaattcccgagttgcagaaggaagtctcctaactactgatcggttcctcttgggg

SEQ ID NO: 69629 - DNA, 120 bp, Artificial Sequence
  ENSG00000076356_107 (sequence is synthesized)
tgggaaaatctctgagctacagtgagtcattcccaggatgccaacaatggcctccacttctccctctgcccctgcccagatacaagaacgccctggggagagtcatgaaagaacttcccc

SEQ ID NO: 69630 - DNA, 120 bp, Artificial Sequence
  ENSG00000076356_108 (sequence is synthesized)
caggggagcccattcctcggcccagccaggccaggccagccctgggaagtagcttgggcagccgggctgggcggggagcgcaggtggcgccctttgtgcctgctccgaggctgagcctgg

SEQ ID NO: 69631 - DNA, 120 bp, Artificial Sequence
  ENSG00000076356_109 (sequence is synthesized)
ggctcctggctgccttcttccggacaatggccacgggcactgtgaagggactccaggagcctggtggctttgtgtgaagccctgagaaaatgtgctgtcctctgttcttgggcttgccta

SEQ ID NO: 69632 - DNA, 120 bp, Artificial Sequence
  ENSG00000076356_110 (sequence is synthesized)
ggggcacagagtcctttagaaaagtctcccagaagggaacagaacacacccaggcccacccctcggatgttagagatcagggtcagtgcccccattagggtacaaagtgcctctccttcc

SEQ ID NO: 69633 - DNA, 120 bp, Artificial Sequence
  ENSG00000076356_111 (sequence is synthesized)
atttctcccaggtcagtaacagctttggctaaattaaccctggctggacccattttcttccattttactcctttgccccttcaggtggacaatttgacctttgatggggaagaatatcag

SEQ ID NO: 69634 - DNA, 120 bp, Artificial Sequence
  ENSG00000076356_112 (sequence is synthesized)
aaattgaggcccagaaagaagccacccctacccccaggtcacagtctagttactgggtgagctgggctgggacccaggtgtcctgactcccgccctgcgttctcccatgctccattgttc

SEQ ID NO: 69635 - DNA, 120 bp, Artificial Sequence
  ENSG00000076356_113 (sequence is synthesized)
tcttgggagacctcatggcaagcccaggccccaccacggagacccctctgtgaaggactgccccttaccctttgtcccttccccaggacagagtctgtggctgaaaagatgctgaccaat

SEQ ID NO: 69636 - DNA, 120 bp, Artificial Sequence
  ENSG00000076382_0 (sequence is synthesized)
aggttcaaacacagacggcgggtgaacatggcgtcctcgacttggtctgagacgtgataggcctgccttctggttgaagatgtggcgagtgaaaaaactgagcctcagcctgtcgccttc

SEQ ID NO: 69637 - DNA, 120 bp, Artificial Sequence
  ENSG00000076382_1 (sequence is synthesized)
gccccagacgggaaaaccatctatgagaactcctctccgtgaacttaccctgcagcccggtgccctcaccaactctggaaaaagatcccccgcttgctcctcgctgaccccatcactgtg

SEQ ID NO: 69638 - DNA, 120 bp, Artificial Sequence
  ENSG00000076382_2 (sequence is synthesized)
caagctggggctgcaggaaggcagcaacaactcatctccagtggattttgtaaataacaagaggacagacttatcttcagaacatttcagtcattcctcaaagtggctagaaacttgtca

SEQ ID NO: 69639 - DNA, 120 bp, Artificial Sequence
  ENSG00000076382_3 (sequence is synthesized)
gcatgaatcagatgagcagcctctagatccaattccccaaattagctctactcctaaaacgtctgaggaagcagtagacccactgggcaattatatggttaaaaccatcgtccttgtacc

SEQ ID NO: 69640 - DNA, 120 bp, Artificial Sequence
  ENSG00000076382_4 (sequence is synthesized)
atctccactggggcagcaacaagacatgatatttgaggcccgtttagataccatggcagagacaaacagcatatctttaaatggacctttgagaacagacgatctggtgagagaggaggt

SEQ ID NO: 69641 - DNA, 120 bp, Artificial Sequence
  ENSG00000076382_5 (sequence is synthesized)
ggcaccctgcatgggagacaggttttcagaagttgctgctgtatctgagaaacctatctttcaggaatctccgtcccatctcttagaggagtctccaccaaatccctgttctgaacaact

SEQ ID NO: 69642 - DNA, 120 bp, Artificial Sequence
  ENSG00000076382_6 (sequence is synthesized)
acattgctccaaggaaagcctgagcagtagaactgaggctgtgcgtgaggacttagtaccttctgaaagtaacgccttcttgccttcctctgttctctggctttccccttcaactgcctt

SEQ ID NO: 69643 - DNA, 120 bp, Artificial Sequence
  ENSG00000076382_7 (sequence is synthesized)
ggcagcagatttccgtgtcaatcatgtggacccagaggaggaaattgtagagcatggagctatggaggaaagagaaatgaggtttcccacacatcctaaggagtctgaaacagaagatca

SEQ ID NO: 69644 - DNA, 120 bp, Artificial Sequence
  ENSG00000076382_8 (sequence is synthesized)
agcacttgtctcaagtgtggaagatattctgtccacatgcctgacaccaaatctagtagaaatggaatcccaagaagctccaggcccagcagtagaagatgttggtaggattcttggctc

SEQ ID NO: 69645 - DNA, 120 bp, Artificial Sequence
  ENSG00000076382_9 (sequence is synthesized)
tgatacagagtcttggatgtccccactggcctggctggaaaaaggtgtaaatacctccgtcatgctggaaaatctccgccaaagcttatcccttccctcgatgcttcgggatgctgcaat

SEQ ID NO: 69646 - DNA, 120 bp, Artificial Sequence
  ENSG00000076382_10 (sequence is synthesized)
tggcactacccctttctctacttgctcggtggggacttggtttactccttcagcaccacaggaaaagagtacaaacacatcccagacaggcctggttggcaccaagcacagtacttctga

SEQ ID NO: 69647 - DNA, 120 bp, Artificial Sequence
  ENSG00000076382_11 (sequence is synthesized)
gacagagcagctcctgtgtggccggcctccagatctgactgccttgtctcgacatgacttggaagataacctgctgagctctcttgtcattctggaggttctctcccgccagcttcggga

SEQ ID NO: 69648 - DNA, 120 bp, Artificial Sequence
  ENSG00000076382_12 (sequence is synthesized)
ctggaagagccagctggctgtccctcacccagaaacccaggacagtagcacacagactgacacatctcacagtgggataactaataaacttcagcatcttaaggagagccatgagatggg

SEQ ID NO: 69649 - DNA, 120 bp, Artificial Sequence
  ENSG00000076382_13 (sequence is synthesized)
acaggccctacagcaggccagaaatgtcatgcaatcatgggtgcttatctctaaagagctgatatccttgcttcacctatccctgttgcatttagaagaagataagactactgtgagtca

SEQ ID NO: 69650 - DNA, 120 bp, Artificial Sequence
  ENSG00000076382_14 (sequence is synthesized)
ggagtctcggcgtgcagaaacattggtctgttgctgttttgatttgctgaagaaattgagggcaaagctccagagcctcaaagcagaaagggaggaggcaaggcacagagaggaaatggc

SEQ ID NO: 69651 - DNA, 120 bp, Artificial Sequence
  ENSG00000076382_15 (sequence is synthesized)
cagccagctggaacaggacctagcatccatgcgggaattcagaggccttctgaaggatgcccagacccaactggtagggcttcatgccaagcaagaagagctggttcagcagacagtgag

SEQ ID NO: 69652 - DNA, 120 bp, Artificial Sequence
  ENSG00000076382_16 (sequence is synthesized)
tcttacttctaccttgcaacaagactggaggtccatgcaactggattatacaacatggacagctttgctgagtcggtcccgacaactcacagagaaactcacagtcaagagccagcaagc

SEQ ID NO: 69653 - DNA, 120 bp, Artificial Sequence
  ENSG00000076382_17 (sequence is synthesized)
cctgcaggaacgtgatgtggcaattgaggaaaagcaggaggtttctagggtgctggaacaagtctctgcccagttagaggagtgcaaaggccaaacagaacaactggagttggaaaacag

SEQ ID NO: 69654 - DNA, 120 bp, Artificial Sequence
  ENSG00000076382_18 (sequence is synthesized)
tcgtctagcaacagatctccgggctcagttgcagattctggccaacatggacagccagctaaaagagctacagagtcagcatacccattgtgcccaggacctggctatgaaggatgagtt

SEQ ID NO: 69655 - DNA, 120 bp, Artificial Sequence
  ENSG00000076382_19 (sequence is synthesized)
actctgccagcttacccagagcaatgaggagcaggctgctcaatggcaaaaggaagagatggcactaaaacacatgcaggcagaactgcagcagcaacaagctgtcctggccaaagaggt

SEQ ID NO: 69656 - DNA, 120 bp, Artificial Sequence
  ENSG00000076382_20 (sequence is synthesized)
gcgggacctgaaagagaccttggagtttgcagaccaggagaatcaggttgctcacctggagctgggtcaggttgagtgtcaattgaaaaccacactggaagtgctccgggagcgcagctt

SEQ ID NO: 69657 - DNA, 120 bp, Artificial Sequence
  ENSG00000076382_21 (sequence is synthesized)
gcagtgtgagaacctcaaggacactgtagagaacctaacggctaaactggccagcaccatagcagataaccaggagcaagatctggagaaaacacggcagtactctcaaaagctagggct

SEQ ID NO: 69658 - DNA, 120 bp, Artificial Sequence
  ENSG00000076382_22 (sequence is synthesized)
gctgactgagcaactacagagcctgactctctttctacagacaaaactaaaggagaagactgaacaagagacccttctgctgagtacagcctgtcctcccacccaggaacaccctctgcc

SEQ ID NO: 69659 - DNA, 120 bp, Artificial Sequence
  ENSG00000076382_23 (sequence is synthesized)
taatgacaggaccttcctgggaagcatcttgacagcagtggcagatgaagagccagaatcaactcctgtgcccttgcttggaagtgacaagagtgctttcacccgagtagcatcaatggt

SEQ ID NO: 69660 - DNA, 120 bp, Artificial Sequence
  ENSG00000076382_24 (sequence is synthesized)
ttcccttcagcccgcagagaccccaggcatggaggagagcctggcagaaatgagtattatgactactgagcttcagagtctttgttccctgctacaagagtctaaagaagaagccatcag

SEQ ID NO: 69661 - DNA, 120 bp, Artificial Sequence
  ENSG00000076382_25 (sequence is synthesized)
gactctgcagcgaaaaatttgtgagctgcaagctaggctgcaggcccaggaagaacagcatcaggaagtccagaaggcaaaagaagcagacatagagaagctgaaccaggccttgtgctt

SEQ ID NO: 69662 - DNA, 120 bp, Artificial Sequence
  ENSG00000076382_26 (sequence is synthesized)
gcgctacaagaatgaaaaggagctccaggaagtgatacagcagcagaatgagaagatcctagaacagatagacaagagtggcgagctcataagccttagagaggaggtgacccaccttac

SEQ ID NO: 69663 - DNA, 120 bp, Artificial Sequence
  ENSG00000076382_27 (sequence is synthesized)
ccgctcacttcggcgtgcggagacagagaccaaagtgctccaggaggccctggcaggccagctggactccaactgccagcctatggccaccaattggatccaggagaaagtgtggctctc

SEQ ID NO: 69664 - DNA, 120 bp, Artificial Sequence
  ENSG00000076382_28 (sequence is synthesized)
tcaggaggtggacaaactgagagtgatgttcctggagatgaaaaatgagaaggaaaaactcatgatcaagttccagagccatagaaatatcctagaggagaaccttcggcgctctgacaa

SEQ ID NO: 69665 - DNA, 120 bp, Artificial Sequence
  ENSG00000076382_29 (sequence is synthesized)
ggagttagaaaaactagatgacattgttcagcatatttataagaccctgctctctattccagaggtggtgaggggatgcaaagaactacagggattgctggaatttctgagctaagaaac

SEQ ID NO: 69666 - DNA, 120 bp, Artificial Sequence
  ENSG00000076382_30 (sequence is synthesized)
tgaaagccagaatctgcttcacctctttttacctgcaatacccccttaccccaataccaagaccaactggcatagagccaactgagataaatgctatttaaataaagtgtatttaatgaa

SEQ ID NO: 69667 - DNA, 120 bp, Artificial Sequence
  ENSG00000076382_31 (sequence is synthesized)
agccaggatcccaagtatgagaaatggtttgcttttgttcaccacatgttgtctatccttatgtcctattggacacctctccattctcattcccagagccttagagaggaggtgacccac

SEQ ID NO: 69668 - DNA, 120 bp, Artificial Sequence
  ENSG00000076382_32 (sequence is synthesized)
cattccagggccatttcctaccatcgttaacaaatgccccgccatgtttcccctgtcctaccaagtttgctcttttatgcataggacttataaaatctgtttgctttctagagaaatatc

SEQ ID NO: 69669 - DNA, 120 bp, Artificial Sequence
  ENSG00000076382_33 (sequence is synthesized)
caggagcaagatctggagaaaacacggcagtactctcaaaagctagggctgctgactgagcaactacagagcctgactctctttctacagacaaaactaaaggagaagactatgtttcaa

SEQ ID NO: 69670 - DNA, 120 bp, Artificial Sequence
  ENSG00000076382_34 (sequence is synthesized)
ttagagtaaatttagggccaaggacttaacccagaggatccagcagttaaggaaggacctgtgaatagagaagaaataaccagaaaggtgtggggcctgcctttaaaggagagagactca

SEQ ID NO: 69671 - DNA, 120 bp, Artificial Sequence
  ENSG00000076382_35 (sequence is synthesized)
tgtcctggaagctaagaaaaggaagtttctaaaagaacaatgtggtcatcaatatcaaataggtcaggtaaaacaagagctgaaatatatgcattgcatttgaaagtaaggctgccattg

SEQ ID NO: 69672 - DNA, 120 bp, Artificial Sequence
  ENSG00000076382_36 (sequence is synthesized)
gtgaaccaaatgacaagaatttaggtggaatgacaggggagaagcctgagtgtagtgggctggggagtcaatagatggtgagagttataaacaagaagtataggctctttttttctttct

SEQ ID NO: 69673 - DNA, 120 bp, Artificial Sequence
  ENSG00000076382_37 (sequence is synthesized)
taaaatactgctgtttttgttggagaggcttaagaatataaacatgttcagagaaaggcactaatggagaagttgaagatagagaattgagataataggtggaacagcattttggaggag

SEQ ID NO: 69674 - DNA, 120 bp, Artificial Sequence
  ENSG00000076382_38 (sequence is synthesized)
atggctgggagttacctggaagcccaggagttcactagacctgaacagcagctattttttcttctttgcccttagactgaacaagagacccttctgctgagtacagcctgtcctcccacc

SEQ ID NO: 69675 - DNA, 120 bp, Artificial Sequence
  ENSG00000076382_39 (sequence is synthesized)
aggaccttcctgggaagcatcttgacagcagtggcagatgaaggttaaaggccctgggatttgggggtgggaaagttgtgacgctgctcctgatatcttctgctgttgaagatgtccacc

SEQ ID NO: 69676 - DNA, 80 bp, Artificial Sequence
  ENSG00000076513_0 (sequence is synthesized)
agaagtctgtccgcgagctgtcagcgcgggcgggaacgccgcggggcgcggggtgggcgcggccgacctggtccctgagc

SEQ ID NO: 69677 - DNA, 120 bp, Artificial Sequence
  ENSG00000076513_1 (sequence is synthesized)
ccggctcagccggccggcagcgtaacacgccctacgctcgcttgctcgccggcctcagggcaggcaggcgggcgcgggagaccccgccggggccgagacttggggcgggcgacgaggacc

SEQ ID NO: 69678 - DNA, 120 bp, Artificial Sequence
  ENSG00000076513_2 (sequence is synthesized)
aggttacggcctcctcgccatgtcctcggcctgcgacgcgggcgaccactaccccctgcacctcctagtctggaaaaacgactaccggcagctcgagaaggagctgcagggccagaatgt

SEQ ID NO: 69679 - DNA, 120 bp, Artificial Sequence
  ENSG00000076513_3 (sequence is synthesized)
ggaggctgtggacccacgaggtcgaacattattgcatcttgctgtttccttgggacatttggaatctgctcgagtcttactccgacataaagcagatgtgacaaaagaaaatcgccaggg

SEQ ID NO: 69680 - DNA, 120 bp, Artificial Sequence
  ENSG00000076513_4 (sequence is synthesized)
atggacagttttacatgaggctgtgagcactggcgatcctgagatggtgtacacagttctccaacatcgagactaccacaacacatccatggcccttgagggagttcctgagctgctcca

SEQ ID NO: 69681 - DNA, 120 bp, Artificial Sequence
  ENSG00000076513_5 (sequence is synthesized)
aaaaattctcgaggctccggatttctatgtgcagatgaaatgggaattcaccagctgggtgcccttggtttctagaatatgcccaaatgatgtctgtcgcatctggaaaagtggtgccaa

SEQ ID NO: 69682 - DNA, 120 bp, Artificial Sequence
  ENSG00000076513_6 (sequence is synthesized)
actgcgcgtcgatatcacattgctgggatttgaaaacatgagctggataagagggaggcgtagttttatatttaagggagaagacaactgggcggagttaatggaagtcaaccatgatga

SEQ ID NO: 69683 - DNA, 120 bp, Artificial Sequence
  ENSG00000076513_7 (sequence is synthesized)
caaagtggtcaccaccgaacgcttcgacctttcccaagaaatggagcgcctcactctggacttgatgaagccaaaaagcagggaagttgagcggcggctcacaagccctgtcattaacac

SEQ ID NO: 69684 - DNA, 120 bp, Artificial Sequence
  ENSG00000076513_8 (sequence is synthesized)
cagcctcgatactaaaaatattgcttttgaaagaactaaatccggattctggggctggaggacagataaagcagaagttgttaatggttacgaagcaaaggtttacacagtaaacaatgt

SEQ ID NO: 69685 - DNA, 120 bp, Artificial Sequence
  ENSG00000076513_9 (sequence is synthesized)
gaatgtgatcaccaaaatacgcacagaacatctgaccgaggaggaaaaaaagagatataaagcagacaggaacccgctggaatctttgctgggaactgtggaacaccaatttggtgcaca

SEQ ID NO: 69686 - DNA, 120 bp, Artificial Sequence
  ENSG00000076513_10 (sequence is synthesized)
aggggacctcaccacggaatgtgctactgcaaacaaccccacagccatcacgcctgatgagtacttcaatgaagagtttgatctgaaagacagggacattggaaggccgaaagagctgac

SEQ ID NO: 69687 - DNA, 120 bp, Artificial Sequence
  ENSG00000076513_11 (sequence is synthesized)
gattagaacacagaagtttaaagcaatgttgtggatgtgtgaagagtttcccctctctctggtggagcaggtcattcccatcattgacctaatggctcgaacgagtgctcattttgcaag

SEQ ID NO: 69688 - DNA, 120 bp, Artificial Sequence
  ENSG00000076513_12 (sequence is synthesized)
actgagagatttcatcaaattggaattcccacctggatttcctgtcaaaatagaaattcccttgtttcatgtcttaaatgcacggattacatttggaaatgttaatggctgtagcactgc

SEQ ID NO: 69689 - DNA, 120 bp, Artificial Sequence
  ENSG00000076513_13 (sequence is synthesized)
cgaagaatctgtatctcaaaatgtggaagggacccaggctgattcagcttcccacatcacaaactttgaggttgatcaatctgtgtttgaaattcccgaatcttactatgttcaagacaa

SEQ ID NO: 69690 - DNA, 120 bp, Artificial Sequence
  ENSG00000076513_14 (sequence is synthesized)
tggcagaaatgtgcatttgcaagatgaagattacgagataatgcagtttgccatccagcaaagtctgctggagtccagcaggagccaggaactttcaggaccagcttcgaatggagggat

SEQ ID NO: 69691 - DNA, 120 bp, Artificial Sequence
  ENSG00000076513_15 (sequence is synthesized)
cagccagacaaacacctatgacgcccagtatgagagggccatccaggagagcctcctcaccagcacagaaggcctgtgccccagcgccctgagcgagacaagccgttttgataatgactt

SEQ ID NO: 69692 - DNA, 120 bp, Artificial Sequence
  ENSG00000076513_16 (sequence is synthesized)
gcagctagccatggagctctctgccaaagagctggaggaatgggagctccggctccaggaggaagaggctgagctccagcaagtcttacagctgtcactcactgacaaatagacctttca

SEQ ID NO: 69693 - DNA, 120 bp, Artificial Sequence
  ENSG00000076513_17 (sequence is synthesized)
cagatgctgtgtcaaccagggccctagggctaagggcctgcaccttgcgtgcatgcagcaggcaacaactgccccttctttatgcagaggtgcagaaccagggactcctgggcccatcca

SEQ ID NO: 69694 - DNA, 120 bp, Artificial Sequence
  ENSG00000076513_18 (sequence is synthesized)
ggctgctccctggggtggagaagggaccagggattgcaggccccatctccaggctaaggggaggagagcatcatcactttccattagctgtattggcttgcaggtcacatttttactacc

SEQ ID NO: 69695 - DNA, 120 bp, Artificial Sequence
  ENSG00000076513_19 (sequence is synthesized)
agctttagacaaaaccccaatccccgcaggtttgtagataaatttttatcaaggagtgataacaagacaagttattgcagagtcagggtgcttttatatataagagcagcagccgccttt

SEQ ID NO: 69696 - DNA, 120 bp, Artificial Sequence
  ENSG00000076513_20 (sequence is synthesized)
gtaaagtgtgatctatgagaattggagacacttctttactgttcaccaaagaaatgggtaatctgtgctgatctccttatttttacctttttacagggtttctaggacattgtcattatt

SEQ ID NO: 69697 - DNA, 120 bp, Artificial Sequence
  ENSG00000076513_21 (sequence is synthesized)
cttcctccatctatctgattccattccttccacacccagctaaagttagaggagatacatatagaatctattttagattattgttaactatttgcatcaaattaagatacacaaatggcc

SEQ ID NO: 69698 - DNA, 120 bp, Artificial Sequence
  ENSG00000076513_22 (sequence is synthesized)
atggatgttgccttagccttaaacattactaatagtttcacatcacctcactgcacgcatcgaaggatctgatttgaatttgtaaaggcaattcttttgagagcaggattctccaggcta

SEQ ID NO: 69699 - DNA, 120 bp, Artificial Sequence
  ENSG00000076513_23 (sequence is synthesized)
aatcaaaggcagctaatcctgtccctgaaggagcagctaggggaacctgaggcttgttcttgaagtgggcaagctggccaaaatattggaacacacagaaccaaaccaggtgtgttctac

SEQ ID NO: 69700 - DNA, 120 bp, Artificial Sequence
  ENSG00000076513_24 (sequence is synthesized)
acctgcatgagtgaaggatttccacgtagacacctaggaagagcccgcatgccctagactcactccagaggaaggattgatttgcaaccagaaagggagctgaaaaccacggagctccat

SEQ ID NO: 69701 - DNA, 120 bp, Artificial Sequence
  ENSG00000076513_25 (sequence is synthesized)
ggctcttcattcaaaagggaaaataatgattccacgttgctttttagagttcaaatcaacatctttctggataaatctattttttaacaatctttttattatttgtaaaagatataaaaa

SEQ ID NO: 69702 - DNA, 120 bp, Artificial Sequence
  ENSG00000076513_26 (sequence is synthesized)
caactcccatcagtagcaatacaaggttatacattttaaccagattttctcaggccttttttggatacctttagtagttaactctcttttgtcaaaccctcttgtatataaccatcgcac

SEQ ID NO: 69703 - DNA, 120 bp, Artificial Sequence
  ENSG00000076513_27 (sequence is synthesized)
aacatacagaaccctggggaatacagccaagggcactgctcactgtggcccgtgtattcattcccacaggctgcactgaaataacctggtaaacaacaccctcctccattttgcgtctat

SEQ ID NO: 69704 - DNA, 120 bp, Artificial Sequence
  ENSG00000076513_28 (sequence is synthesized)
ttcttctattgtgcttctttggggataggaagagaaacataactactgttccaggtaacgtctgtatcatacagttagtgttgccagtgaaacgttcccagatacaaagaattgtgcttt

SEQ ID NO: 69705 - DNA, 120 bp, Artificial Sequence
  ENSG00000076513_29 (sequence is synthesized)
taattccatttcacaatctgttttgttttttttttttgtcattgtctgaccaaaattccttctgcacatgaggccagtataggcaacgtcacatttgtttgtttcaaatatgcagtgtgg

SEQ ID NO: 69706 - DNA, 120 bp, Artificial Sequence
  ENSG00000076513_30 (sequence is synthesized)
tattttgtttactttgcatttaccgtgagcaaagatacttcttggaatggctgcagtgaggccgtgtcattggctcacaaaagtgactcataggtaatttctgtgtttgcattccactgc

SEQ ID NO: 69707 - DNA, 120 bp, Artificial Sequence
  ENSG00000076513_31 (sequence is synthesized)
tctgctccctaaggtccttgactttctccccaggaattcacttaaaaagggactgagcattgtgtcaacctgttgcagtgtttttcatatatgtgttcactctaaaaatgcaaataaaga

SEQ ID NO: 69708 - DNA, 120 bp, Artificial Sequence
  ENSG00000076513_32 (sequence is synthesized)
ctgcttccttagagggtgctcatacaaaattccagtctttgagtctttttccttttcagttttttctagtcactggatgtacccacacttcctgttacgtatgtcagtagaacattagaa

SEQ ID NO: 69709 - DNA, 120 bp, Artificial Sequence
  ENSG00000076513_33 (sequence is synthesized)
tgcctcacttcgctcagttcatcactgcaaaggtggcatgctcctcccagccttcctgcccaggttaacaagccccatgctgcttgtttcaaatggcaactaaaagcaagccagtgttgg

SEQ ID NO: 69710 - DNA, 120 bp, Artificial Sequence
  ENSG00000076513_34 (sequence is synthesized)
gctgttctgacacctctgtggtcctcctggaggggaactggctcttgtggggtaagggaagcccagccaacatcaaagctctgcatcaatgctatcccttgaagccaactgctttgtgag

SEQ ID NO: 69711 - DNA, 68 bp, Artificial Sequence
  ENSG00000076513_35 (sequence is synthesized)
tctgcccctttttataaaaaataattttaaaattactttgccatgaaagctaacagtagattgtccat

SEQ ID NO: 69712 - DNA, 120 bp, Artificial Sequence
  ENSG00000076513_36 (sequence is synthesized)
aaaattactttgccatgaaagctaacagtagattgtccatgttattagctcctttccaaatagaatctagattggatgtaagaattcctttttttttttattgctaaccagcttcagctg

SEQ ID NO: 69713 - DNA, 120 bp, Artificial Sequence
  ENSG00000076513_37 (sequence is synthesized)
atcaaattcaaatgaaactgttccacccgctatcatttcttcatgcttgctgtcaattaaggctttgatcgtggcaggttgtcatgcaggtcgcttgcctttattgccagattttagggt

SEQ ID NO: 69714 - DNA, 120 bp, Artificial Sequence
  ENSG00000076513_38 (sequence is synthesized)
gatgtgaattccttgtggccctagacatttgacctttaataggtctgaattaagagatgactgggcagagtgtggagtaaagctgctgttgtctagcctactgcatagcaataatctcct

SEQ ID NO: 69715 - DNA, 120 bp, Artificial Sequence
  ENSG00000076513_39 (sequence is synthesized)
gagatactcttttggaagagaattagatgagtgactctttgaaaataaataaggattttagaggaggggtagtgattatagaaatcaggtgctttccctcttatccattataaacgaggg

SEQ ID NO: 69716 - DNA, 120 bp, Artificial Sequence
  ENSG00000076513_40 (sequence is synthesized)
gcctctttatagaaatggaacttaaaaaggattcaggactttatattgcaacagagcaccttaacaaatattttcttacttgatgctcacagtaactatatgaacttggtacagtggatg

SEQ ID NO: 69717 - DNA, 120 bp, Artificial Sequence
  ENSG00000076513_41 (sequence is synthesized)
tccctgcgggtcagaaaaatgaaattacctttccactatcaaagctagacagggaaacagctagaacttcaactccaagtcttccaagtctcatgcactttcagatatttctttcttttt

SEQ ID NO: 69718 - DNA, 120 bp, Artificial Sequence
  ENSG00000076513_42 (sequence is synthesized)
ttctttgttataatcaggagataaaaatgtaaaggagagtagagaaatattttaaaatgaagaaatccattacacttcctgtgtagtttggtgatatcctcatagattttcttgttccat

SEQ ID NO: 69719 - DNA, 120 bp, Artificial Sequence
  ENSG00000076513_43 (sequence is synthesized)
gcaaaaaagttagtgaatagaacttcccggtctttagctggttaacacgtccacctcagacactgagtgccacaggccttcacttgtgaacatcatttggcatttctgactctcctgagt

SEQ ID NO: 69720 - DNA, 120 bp, Artificial Sequence
  ENSG00000076513_44 (sequence is synthesized)
gctacttgtggagatcccaccattgacatgcatgtccccagttaagatgacccagataaatgctctgacctggttaccaccttgtggcaagcccttggatgctggtcatcttcagtcact

SEQ ID NO: 69721 - DNA, 120 bp, Artificial Sequence
  ENSG00000076513_45 (sequence is synthesized)
tctttgggactgctgtccaataaatgtcaccacctttgtcctcaatgctggcagttttgtaaagaagccaagattggaggctttctatgcctggggtgaggcaaattgattaataactgt

SEQ ID NO: 69722 - DNA, 120 bp, Artificial Sequence
  ENSG00000076513_46 (sequence is synthesized)
gggaggagggtggagggtgcataagccatctgtcattgctaaccgcctcctgtggacaataggaccatgatttccaagtgtccttcactaacttaagctgggggggaaaaaaactataaa

SEQ ID NO: 69723 - DNA, 120 bp, Artificial Sequence
  ENSG00000076513_47 (sequence is synthesized)
atggggctactggagcagggggaaagaagctggggacaggtagacggaactttccgcgtggagatctttggccaagagaatgagcctcagctctgttctgtgggctgcactgagtttctc

SEQ ID NO: 69724 - DNA, 120 bp, Artificial Sequence
  ENSG00000076513_48 (sequence is synthesized)
ttaatggtgctcagaattaaatgtgtgcttgtcgtgcattgagcaagaattgagccactccttaggattgataccagctacgaaaagaatatagctgctcttgaatgtgaggtttacaca

SEQ ID NO: 69725 - DNA, 84 bp, Artificial Sequence
  ENSG00000076513_49 (sequence is synthesized)
tccgcctaccgggttcaagcaattctcccactttagcctcccgaggagctgggattataggcaccctgcggggtttcaccacgt

SEQ ID NO: 69726 - DNA, 65 bp, Artificial Sequence
  ENSG00000076513_50 (sequence is synthesized)
tctgcccctctctcattttttgatggtcacttttccacttttttctaatccgttactcagagctt

SEQ ID NO: 69727 - DNA, 120 bp, Artificial Sequence
  ENSG00000076513_51 (sequence is synthesized)
gtcacttttccacttttttctaatccgttactcagagcttatgtgtgcaaattaataccctgccctgatgaatttttggcctgcagtatatacactgtggttgcagtttgaatttttccc

SEQ ID NO: 69728 - DNA, 120 bp, Artificial Sequence
  ENSG00000076513_52 (sequence is synthesized)
ttttctgaaagattatgctttgcccacctcaaacaaaatattccctgccaccttcatagcctttctcctgattgtgtagcaaccaccaagacacagtgcctgtgaagtggcctttggtgt

SEQ ID NO: 69729 - DNA, 120 bp, Artificial Sequence
  ENSG00000076513_53 (sequence is synthesized)
ggtctcagtggagacaggcagaggtgaaaatggcacgagagggaagccaggtgttctatcatcttcggatgcttttgcatgcaaagttaccaagggccacagagttattaggaaattaaa

SEQ ID NO: 69730 - DNA, 120 bp, Artificial Sequence
  ENSG00000076513_54 (sequence is synthesized)
ttattaggaaattaaaatttaaaacagggtatgaacattgggttgaataactaaactgcttccaagagtggaaatgctgagctgggcgtgctggctcacgcctgtaattccagcactttg

SEQ ID NO: 69731 - DNA, 120 bp, Artificial Sequence
  ENSG00000076554_0 (sequence is synthesized)
gcctgaactgtttgtacctctgggccatattgcagaaccctgcccttctttgttgactgaggaaagctcgctccctgcccaggtttttcattgttgatcgaaattaacaccaggtggtga

SEQ ID NO: 69732 - DNA, 120 bp, Artificial Sequence
  ENSG00000076554_1 (sequence is synthesized)
atagagcccctcctaaggttgctcaggataaatcatttattaaataggtctgcttatcaggaggggcgtgaaggctcccaaaaggaaatgctggcacctgggcccagaagccagggcctc

SEQ ID NO: 69733 - DNA, 120 bp, Artificial Sequence
  ENSG00000076554_2 (sequence is synthesized)
taactcctggggttgatttcttcagtgaagttgcaccctacaaagggaatatggccaaagcggcactcaactgaaggctgatatcaggcgattagacagccatgcattctgcgtttgtct

SEQ ID NO: 69734 - DNA, 120 bp, Artificial Sequence
  ENSG00000076554_3 (sequence is synthesized)
ggaatggattgtagagagatggacttatatgaggactaccagtccccgtttgattttgatgcaggagtgaacaaaagctatctctacttgtctcctagtggaaattcatctccacccgga

SEQ ID NO: 69735 - DNA, 120 bp, Artificial Sequence
  ENSG00000076554_4 (sequence is synthesized)
tcacctactcttcagaaatttggtctgctgagaacagacccagtccctgaggaaggagaagatgttgctgccacgatcagtgccacagagaccctctcggaagaggagcaggaagagcta

SEQ ID NO: 69736 - DNA, 120 bp, Artificial Sequence
  ENSG00000076554_5 (sequence is synthesized)
agaagagaacttgcaaaggtagaagaagaaatccagactctgtctcaagtgttagcagcaaaagagaagcatctagcagagatcaagcggaaacttggaatcaattctctacaggaacta

SEQ ID NO: 69737 - DNA, 120 bp, Artificial Sequence
  ENSG00000076554_6 (sequence is synthesized)
aaacagaacattgccaaagggtggcaagacgtgacagcaacatctgcttacaagaagacatctgaaaccttatcccaggctggacagaaggcctcagctgctttttcgtctgttggctca

SEQ ID NO: 69738 - DNA, 120 bp, Artificial Sequence
  ENSG00000076554_7 (sequence is synthesized)
gtcatcaccaaaaagctggaagatgtaaaaaactccccaacttttaaatcatttgaagaaaaggtcgaaaacttaaagtctaaagtagggggaaccaagcctgctggtggtgattttgga

SEQ ID NO: 69739 - DNA, 120 bp, Artificial Sequence
  ENSG00000076554_8 (sequence is synthesized)
gaagtcttgaattcggctgcaaatgctagtgccaccaccacggagcctcttccagaaaagacacaggagagcctgtgagattcctacctttgttctgctacccactgccagatgctgcaa

SEQ ID NO: 69740 - DNA, 120 bp, Artificial Sequence
  ENSG00000076554_9 (sequence is synthesized)
gcgaggtccaagcacatcttgtcaacatgcattgccatgaatttctaccagatgtgcttttatttagctttacatattcctttgaccaaatagtttgtgggttaaacaaaatgaaaatat

SEQ ID NO: 69741 - DNA, 120 bp, Artificial Sequence
  ENSG00000076554_10 (sequence is synthesized)
gttcctttatttaggaaacaccattataaaaacacttatagtaaatggggacattcactataatgatctaagaagctacagattgtcatagttgttttcctgctttacaaaattgctcca

SEQ ID NO: 69742 - DNA, 120 bp, Artificial Sequence
  ENSG00000076554_11 (sequence is synthesized)
gatctggaatgccagtttgacctttgtcttctataatatttcctttttttcccctctttgaatctctgtatatttgattcttaactaaaattgttctcttaaatattctgaatcctggta

SEQ ID NO: 69743 - DNA, 120 bp, Artificial Sequence
  ENSG00000076554_12 (sequence is synthesized)
attaaaagtttgggtgtattttctttacctccaaggaaagaactactagctacaaaaaatattttggaataagcattgttttggtataaggtacatattttggttgaagacaccagactg

SEQ ID NO: 69744 - DNA, 120 bp, Artificial Sequence
  ENSG00000076554_13 (sequence is synthesized)
aagtaaacagctgtgcatccaatttattatagttttgtaagtaacaatatgtaatcaaacttctaggtgacttgagagtggaacctcctatatcattatttagcaccgtttgtgacagta

SEQ ID NO: 69745 - DNA, 120 bp, Artificial Sequence
  ENSG00000076554_14 (sequence is synthesized)
accatttcagtgtattgtttattataccacttatatcaacttatttttcaccaggttaaaattttaatttctacaaaataacattctgaatcaagcacactgtatgttcagtaggttgaa

SEQ ID NO: 69746 - DNA, 120 bp, Artificial Sequence
  ENSG00000076554_15 (sequence is synthesized)
ctatgaacactgtcatcaatgttcagttcaaaagcctgaaagtttagatctagaagctggtaaaaatgacaatatcaatcacattaggggaaccattgttgtcttcacttaatccattta

SEQ ID NO: 69747 - DNA, 120 bp, Artificial Sequence
  ENSG00000076554_16 (sequence is synthesized)
gcactatttaaaataagcacaccaagttatatgactaatataacttgaaaattttttatactgaggggttggtgataactcttgaggatgtaatgcattaataaaaatcaactcatcatt

SEQ ID NO: 69748 - DNA, 120 bp, Artificial Sequence
  ENSG00000076554_17 (sequence is synthesized)
ttctacttgttttcaatgtgttggaaactgtaaaatgatactgtagaacctgtctcctactttgaaaactgaatgtcagggctgagtgaatcaaagtgtctagacatatttgcatagagg

SEQ ID NO: 69749 - DNA, 120 bp, Artificial Sequence
  ENSG00000076554_18 (sequence is synthesized)
ccaaggtattctattctaataactgcttactcaacactaccaccttttccttatactgtatatgattatggcctacaatgttgtatttgttatttattaaattgtgattgttttattatt

SEQ ID NO: 69750 - DNA, 120 bp, Artificial Sequence
  ENSG00000076554_19 (sequence is synthesized)
gtttatgccaaatgttaactgccaagcttggagtgacctaaagcattttttaaaagcatggctagatttacttcagtataaattatcttatgaaaaccaaattttaaaagccacaggtgt

SEQ ID NO: 69751 - DNA, 120 bp, Artificial Sequence
  ENSG00000076554_20 (sequence is synthesized)
tgattgttataaaataacatgctgccattcttgattgctagagtttttgttagtactttggatgcaattaaaactatgtgctatcacatgtgaaaagcttaataaattccatctatcagt

SEQ ID NO: 69752 - DNA, 120 bp, Artificial Sequence
  ENSG00000076554_21 (sequence is synthesized)
gaaacagcttgttgtaccgaatcaactggagtctatgcttaaaaaaaaaaaatttttttttaaccatccttaaattattgcttaatggtatcatattaacatattctaaataagggcttt

SEQ ID NO: 69753 - DNA, 120 bp, Artificial Sequence
  ENSG00000076554_22 (sequence is synthesized)
aaggcacaggctgttgaagcattttctcagaggagtggatctgtagaagtctgtctttctatagaaatattgtgcttactcaagtgttaaattattttttctatgaactagtctacttct

SEQ ID NO: 69754 - DNA, 120 bp, Artificial Sequence
  ENSG00000076554_23 (sequence is synthesized)
taaaattcaaacatattcttttgatcacattgtttcttgagcatcctgccctgctactaacttttcaacaaggcaaaatggagtaaagtggcaatttctttagatgagtgaaataccctc

SEQ ID NO: 69755 - DNA, 120 bp, Artificial Sequence
  ENSG00000076554_24 (sequence is synthesized)
aagtctcttttctgcccaaaaagggaaaagtgatagaaatgggggtggcaagtggggtgagtggatgaaggtgggtattgggggtggctgtgaaagaaaataatggagaatcacttttct

SEQ ID NO: 69756 - DNA, 120 bp, Artificial Sequence
  ENSG00000076554_25 (sequence is synthesized)
agacatctacctatacttaatctaagaaacaaagtaatctactgtaaagtactctgccccttgaaagaagtattaaaaagagtgaggatggatttagaaaaaaacatgaatttagaaata

SEQ ID NO: 69757 - DNA, 120 bp, Artificial Sequence
  ENSG00000076554_26 (sequence is synthesized)
ttcaaaatggtttttgtggcagattcaatattatgaattcacagatatttaaagaatgagaaacatagtaattagtagaaatgccagaaacagttcctggttcctcttgtgtttgacact

SEQ ID NO: 69758 - DNA, 120 bp, Artificial Sequence
  ENSG00000076554_27 (sequence is synthesized)
aagaaaatagcaagagtgtgaaatctcagatacttatgaaatctcacagatgtaaggactcaagtgtagaagaaaatatccccttcttacaaaaagaaatgtcaatttatggagtttgtg

SEQ ID NO: 69759 - DNA, 120 bp, Artificial Sequence
  ENSG00000076554_28 (sequence is synthesized)
ggaaatagggcaagaattcttatgcttatgagagccaagtagtcagtggaagagagtagagctcaaaactggattatcaccttagcaacttagaatagtttgaaatagaaaaaaagtatt

SEQ ID NO: 69760 - DNA, 120 bp, Artificial Sequence
  ENSG00000076554_29 (sequence is synthesized)
taatttggatctggatctgttaagatatgcacagtctattttttgtatagtattggaaaataaaaatgctataatttgggtatgggttcttttgtatacattacctgcccattgaggaaa

SEQ ID NO: 69761 - DNA, 120 bp, Artificial Sequence
  ENSG00000076554_30 (sequence is synthesized)
ggggcaagtccattatgcaacttctctccaaacccttcatattctggatatgatacttaaagagccatgagcagctacattctgcctatcagaaggcatttattaaatgactgcttgctg

SEQ ID NO: 69762 - DNA, 120 bp, Artificial Sequence
  ENSG00000076554_31 (sequence is synthesized)
aagatgtgtccaaagagatcctacattaaggtcatttgtcagaatgatgtttgtgtttgtttagagttggctgacctccaactcctggggtcaaggaatcctactgccttagcttcccaa

SEQ ID NO: 69763 - DNA, 120 bp, Artificial Sequence
  ENSG00000076554_32 (sequence is synthesized)
atagctaggactataggcatgcacccggccatgtgttttatttatagctcttaaagcccagatgaagaaatcacatttttgcccatagtgaagaaacatttggccattgattagtcctta

SEQ ID NO: 69764 - DNA, 120 bp, Artificial Sequence
  ENSG00000076554_33 (sequence is synthesized)
ttttcagtgactgtcctgttttcattagattagagagaccctgtgtgggccacagttaatataaaccattatcacttttaagtaaacctgcacatcttagatttcataatttccttattg

SEQ ID NO: 69765 - DNA, 120 bp, Artificial Sequence
  ENSG00000076554_34 (sequence is synthesized)
ttctgactcaaaatgaactaagagcttttcactttttgtttgtaagttctcagagagtcgggtctgcaagtgcttttgcctgccaggattttgtactcaaataaatgctatttggcaact

SEQ ID NO: 69766 - DNA, 120 bp, Artificial Sequence
  ENSG00000076554_35 (sequence is synthesized)
gtcatcaccaaaaagctggaagatgtaaaattgcaagccttttcacattcctttagtatacgttccattcagcattcaattagcatgcctgctatgagaaactccccaacttttaaatca

SEQ ID NO: 69767 - DNA, 120 bp, Artificial Sequence
  ENSG00000076554_36 (sequence is synthesized)
cagcacaaaggcccttgccagatgtgagccccttgatattggatttcccagtcttcagaactgtcgaaaagcccaggaatgttctagaatatatgattggcgaggaccctcactggtgcc

SEQ ID NO: 69768 - DNA, 120 bp, Artificial Sequence
  ENSG00000076554_37 (sequence is synthesized)
atccacatcttctcttcaggactgggaacgttggcagctgatgatcctctgggaagttccttgatacctgatgccaagtcctgaggtttttggaagtgctgcagtggaaattaggttctt

SEQ ID NO: 69769 - DNA, 120 bp, Artificial Sequence
  ENSG00000076554_38 (sequence is synthesized)
cttggctttcccagtttagcatttggccttctcagattcacaagatcaattatcattacgtagacactcacattctctttgtccttgtgagtttatctctttactgtaattttagcagca

SEQ ID NO: 69770 - DNA, 120 bp, Artificial Sequence
  ENSG00000076554_39 (sequence is synthesized)
tagagaggaagtaagaatgaatctatgttgagaatttacaagaacctcttaattttttacttcagaagggtgagctttatggtacatgagttatatctcaataaaaaacattttaaaaat

SEQ ID NO: 69771 - DNA, 120 bp, Artificial Sequence
  ENSG00000076554_40 (sequence is synthesized)
ggacttcgcgggagtcgccggcggaggcgaggaggagctctgcgcggcgcggcgggcgatccgagccgggacgggctgcaggcgggggtgctgcagaggacacgaggcggcgggctggag

SEQ ID NO: 69772 - DNA, 120 bp, Artificial Sequence
  ENSG00000076554_41 (sequence is synthesized)
agtgcttcagaggaaaacaacaacgagcttttctctcctctctggggatcctggtcagcttcacattggtggcccagaaatcagtctcagcccctcccagtatggaccgctccttgacag

SEQ ID NO: 69773 - DNA, 120 bp, Artificial Sequence
  ENSG00000076554_42 (sequence is synthesized)
gatccgagccgggacgggctgcaggcgggggtgctgcagaggacacgaggcggcgggctggagacatggaccgcggcgagcaagctttttatttcatctggaatttctggcttgaattag

SEQ ID NO: 69774 - DNA, 120 bp, Artificial Sequence
  ENSG00000076554_43 (sequence is synthesized)
ctttctggctggactagggcactgcagaagattgtgcctgagcttagggttgagcatacgaagatgtggtgatgccgctctgctggttatgaaggattttagaagttctgaaaaatgttt

SEQ ID NO: 69775 - DNA, 120 bp, Artificial Sequence
  ENSG00000076554_44 (sequence is synthesized)
tctctttttgagagttctccagcaggtggtgaccactgcacttgaaacaattgatattagaaaagatgagctgacccttcttttgctctgtgtgtttataatttaatatagttacaagaa

SEQ ID NO: 69776 - DNA, 120 bp, Artificial Sequence
  ENSG00000076554_45 (sequence is synthesized)
gcaggagtgaacaaaagctatctctacttgtctcctagtggaaattcatctccacccggatcacctactcttcagaaatttgactgcaccttttaattttaatgataatgatttgctgcc

SEQ ID NO: 69777 - DNA, 120 bp, Artificial Sequence
  ENSG00000076554_46 (sequence is synthesized)
acctacgggctaatgtggaaagagcagaacatgtcattaccaactttcttagatgctgaatataaaatctcaaggtcatcctggcagacttgaagccaactggacaacccgtcatcctct

SEQ ID NO: 69778 - DNA, 120 bp, Artificial Sequence
  ENSG00000076554_47 (sequence is synthesized)
tctttttggaattgggcagtatacataaagcattgtgttagcagtcagatactgtatttctccccttgtttgagtagatttgcaaaacagtgtgtatcaaaaaagcatgaaagagtcttt

SEQ ID NO: 69779 - DNA, 120 bp, Artificial Sequence
  ENSG00000076554_48 (sequence is synthesized)
gctatttaagtaatggtttggtacctgagttttgcttgttttgttttggagatctgttgtagttggagaacctgggagttctgtacaaaacattaaaaataaaataacgtttaacaggta

SEQ ID NO: 69780 - DNA, 120 bp, Artificial Sequence
  ENSG00000076554_49 (sequence is synthesized)
agtatatgcctggctgtttgcatcctgagaaccaagcagagcaaggctggagaaacagcattcatgatgtgaactgctaatgaatttttctgcctgtattaggaaatcctcagcctcaaa

SEQ ID NO: 69781 - DNA, 120 bp, Artificial Sequence
  ENSG00000076554_50 (sequence is synthesized)
tgtacttagtcttctagtaaagagattgtcaaatttccttctccagagaagccactttagtattcttgcagaatagggaaggggatgggacccaacttcttaagtaaactttcaaccaat

SEQ ID NO: 69782 - DNA, 120 bp, Artificial Sequence
  ENSG00000076554_51 (sequence is synthesized)
ctgaagaaacaaacatacaaataggctgctgtagtagagtagatgttgtgaaaagtttataaccctggctgaggaggaagtgagcaacgctggctggggtcttcagaaaagaattcccaa

SEQ ID NO: 69783 - DNA, 120 bp, Artificial Sequence
  ENSG00000076554_52 (sequence is synthesized)
agtctgctgagaacagacccagtccctgaggaaggagaagatgttgctgccacgatcagtgccacagagaccctctcggaagaggagcaggaagagctaagaagagaacttgcaaaggta

SEQ ID NO: 69784 - DNA, 120 bp, Artificial Sequence
  ENSG00000076554_53 (sequence is synthesized)
gtgcgtgtgtgggggagagggagagaaggttctgggaggtggcgaaggggctagcgtcaggggctggcggccgtgatgcgctttgggtggaaagccgcgtgaagggagcacggcgcagcc

SEQ ID NO: 69785 - DNA, 120 bp, Artificial Sequence
  ENSG00000076554_54 (sequence is synthesized)
aaacagaacattgccaaagggtggcaagacgtgacagcaacatctgcgaggagcaagcttctagcagcagaaaccgaactgctctgtcttctgtattgagagccatctgcagagctgtta

SEQ ID NO: 69786 - DNA, 120 bp, Artificial Sequence
  ENSG00000076554_55 (sequence is synthesized)
accaaaaagctggaagatgtaaaattgcaagccttttcacattcctttaggtaaggagagtttgaaccatcactgcagtccagcagttgtataagaaaagtgtgctgagattagattacc

SEQ ID NO: 69787 - DNA, 120 bp, Artificial Sequence
  ENSG00000076554_56 (sequence is synthesized)
atgctacgttggatgatcgtgtttgtccatatacgttccattcagcattcaattagcatgcctgctatgagaaactccccaacttttaaatcatttgaagaaaaggtcgaaaacttaaag

SEQ ID NO: 69788 - DNA, 120 bp, Artificial Sequence
  ENSG00000076554_57 (sequence is synthesized)
attacttatgtctgagactggccctgttcatggaatcaaatgcatactcttaaaatattagatcagaaattgagaatcttacattataaatacttgtatgtacctgcacatatatggtac

SEQ ID NO: 69789 - DNA, 120 bp, Artificial Sequence
  ENSG00000076554_58 (sequence is synthesized)
agattatatctgttcttttgccgattgagaataatgttgaagaggaatcaattatattttcaaactagttggattttttttcagtatttgtatttactatttgtttttcttttctctcca

SEQ ID NO: 69790 - DNA, 120 bp, Artificial Sequence
  ENSG00000076554_59 (sequence is synthesized)
agagtgagggagggcactccttcaaaccagtacctggaaggctcatctaaggtcttctaggcctagcattctaacatcaaatgatcatctgatgatcatttaaggttgttgaaaaattct

SEQ ID NO: 69791 - DNA, 120 bp, Artificial Sequence
  ENSG00000076554_60 (sequence is synthesized)
ttgccagctctcatgtaattttgatgttactgaggttggttggtagtttattttattaattttgtggttcttctatcatatagaaaaagccaaatacagttttgtttgaatatttgtaaa

SEQ ID NO: 69792 - DNA, 120 bp, Artificial Sequence
  ENSG00000076554_61 (sequence is synthesized)
tcgggcttggactcgggctttggctcggcgcggggctgagcgcggcccggcggctcgagcaggtgccgagcctcctgggccggcgccgcaagttgcatctcccggatccggatctggcat

SEQ ID NO: 69793 - DNA, 120 bp, Artificial Sequence
  ENSG00000076554_62 (sequence is synthesized)
ctgcgtatgtttccttgatcatacactttccttgggagtgtaaaggacactgttgtgccttttgtctggagaggggaagaaaaagaggataaggatgcttcagcagcttttctttggacg

SEQ ID NO: 69794 - DNA, 120 bp, Artificial Sequence
  ENSG00000076554_63 (sequence is synthesized)
acacggcaccctttttttctgattttcaagtgtgcctgcctttttttgtaacttcaatttttccagaccacttattctaaggaatagaaagaaagctagccagttggagaaataaaattc

SEQ ID NO: 69795 - DNA, 120 bp, Artificial Sequence
  ENSG00000076555_0 (sequence is synthesized)
cagctagcaggcttagattcaggccctcagcaaacaaggaacctggaaaatgtaaccctgaatgcacggtggggaggacatggcaagagaaaagcggcaggaataaagtgattttctgaa

SEQ ID NO: 69796 - DNA, 120 bp, Artificial Sequence
  ENSG00000076555_1 (sequence is synthesized)
tggtcttgcttctttgtctatcttgtctgattttctcctgtctgaccttttcctggttaaaaatctgggggaaaatgacggactccaagccgatcaccaagagtaaatcagaagcaaacc

SEQ ID NO: 69797 - DNA, 120 bp, Artificial Sequence
  ENSG00000076555_2 (sequence is synthesized)
tcatcccgagccaggagccctttccagcctctgataactcaggggagacaccgcagagaaatggggagggccacactctgcccaagacacccagccaggccgagccagcctcccacaaag

SEQ ID NO: 69798 - DNA, 120 bp, Artificial Sequence
  ENSG00000076555_3 (sequence is synthesized)
gccccaaagatgccggtcggcggagaaactccctaccaccctcccaccagaagcccccaagaaaccccctttcttccagtgacgcagcaccctccccagagcttcaagccaacgggactg

SEQ ID NO: 69799 - DNA, 120 bp, Artificial Sequence
  ENSG00000076555_4 (sequence is synthesized)
ggacacaaggtctggaggccacagataccaatggcctgtcctcctcagccaggccccagggccagcaagctggctccccctccaaagaagacaagaagcaggcaaacatcaagaggcagc

SEQ ID NO: 69800 - DNA, 120 bp, Artificial Sequence
  ENSG00000076555_5 (sequence is synthesized)
tgatgaccaacttcatcctgggctcttttgatgactactcctccgacgaggactctgttgctggctcatctcgtgagtctacccggaagggcagccgggccagcttgggggccctgtccc

SEQ ID NO: 69801 - DNA, 120 bp, Artificial Sequence
  ENSG00000076555_6 (sequence is synthesized)
tggaggcttatctgaccacaggtgaagctgagacccgcgtccccactatgaggccgagcatgtcgggactccacctggtgaagaggggacgggaacacaagaagctggacctgcacagag

SEQ ID NO: 69802 - DNA, 120 bp, Artificial Sequence
  ENSG00000076555_7 (sequence is synthesized)
actttaccgtggcttctcccgctgagtttgtcacacgctttgggggggatcgggtcatcgagaaggtgcttattgccaacaacgggattgccgccgtgaagtgcatgcgctccatccgca

SEQ ID NO: 69803 - DNA, 120 bp, Artificial Sequence
  ENSG00000076555_8 (sequence is synthesized)
ggtgggcctatgagatgttccgcaacgagcgggccatccggtttgttgtgatggtgacccccgaggaccttaaggccaacgcagagtacatcaagatggcggatcattacgtccccgtcc

SEQ ID NO: 69804 - DNA, 120 bp, Artificial Sequence
  ENSG00000076555_9 (sequence is synthesized)
caggagggcccaataacaacaactatgccaacgtggagctgattgtggacattgccaagagaatccccgtgcaggcggtgtgggctggctggggccatgcttcagaaaaccctaaacttc

SEQ ID NO: 69805 - DNA, 120 bp, Artificial Sequence
  ENSG00000076555_10 (sequence is synthesized)
cggagctgctgtgcaagaatggagttgctttcttaggccctcccagtgaggccatgtgggccttaggagataagatcgcctccaccgttgtcgcccagacgctacaggtcccaaccctgc

SEQ ID NO: 69806 - DNA, 120 bp, Artificial Sequence
  ENSG00000076555_11 (sequence is synthesized)
cctggagtggaagcggcctgacagtggagtggacagaagatgatctgcagcagggaaaaagaatcagtgtcccagaagatgtttatgacaagggttgcgtgaaagacgtagatgagggct

SEQ ID NO: 69807 - DNA, 120 bp, Artificial Sequence
  ENSG00000076555_12 (sequence is synthesized)
tggaggcagcagaaagaattggttttccattgatgatcaaagcttctgaaggtggcggagggaagggaatccggaaggctgagagtgcggaggacttcccgatccttttcagacaagtac

SEQ ID NO: 69808 - DNA, 120 bp, Artificial Sequence
  ENSG00000076555_13 (sequence is synthesized)
agagtgagatcccaggctcgcccatctttctcatgaagctggcccagcacgcccgtcacctggaagttcagatcctcgctgaccagtatgggaatgctgtgtctctgtttggtcgcgact

SEQ ID NO: 69809 - DNA, 120 bp, Artificial Sequence
  ENSG00000076555_14 (sequence is synthesized)
gctccatccagcggcggcatcagaagatcgttgaggaagcaccggccaccatcgccccgctggccatattcgagttcatggagcagtgtgccatccgcctggccaagaccgtgggctatg

SEQ ID NO: 69810 - DNA, 120 bp, Artificial Sequence
  ENSG00000076555_15 (sequence is synthesized)
tgagtgcagggacagtggaatacctctatagtcaggatggcagcttccacttcttggagctgaatcctcgcttgcaggtggaacatccctgcacagaaatgattgctgatgttaatctgc

SEQ ID NO: 69811 - DNA, 120 bp, Artificial Sequence
  ENSG00000076555_16 (sequence is synthesized)
cggccgcccagctacagatcgccatgggcgtgccactgcaccggctgaaggatatccggcttctgtatggagagtcaccatggggagtgactcccatttcttttgaaaccccctcaaacc

SEQ ID NO: 69812 - DNA, 120 bp, Artificial Sequence
  ENSG00000076555_17 (sequence is synthesized)
ctcccctcgcccgaggccacgtcattgccgccagaatcaccagcgaaaacccagacgagggttttaagccgagctccgggactgtccaggaactgaatttccggagcagcaagaacgtgt

SEQ ID NO: 69813 - DNA, 120 bp, Artificial Sequence
  ENSG00000076555_18 (sequence is synthesized)
ggggttacttcagcgtggccgctactggaggcctgcacgagtttgcggattcccaatttgggcactgcttctcctggggagagaaccgggaagaggccatttcgaacatggtggtggctt

SEQ ID NO: 69814 - DNA, 120 bp, Artificial Sequence
  ENSG00000076555_19 (sequence is synthesized)
tgaaggaactgtccatccgaggcgactttaggactaccgtggaatacctcattaacctcctggagaccgagagcttccagaacaacgacatcgacaccgggtggttggactacctcattg

SEQ ID NO: 69815 - DNA, 120 bp, Artificial Sequence
  ENSG00000076555_20 (sequence is synthesized)
ctgagaaagtgcaggcggagaaaccggatatcatgcttggggtggtatgcggggccttgaacgtggccgatgcgatgttcagaacgtgcatgacagatttcttacactccctggaaaggg

SEQ ID NO: 69816 - DNA, 120 bp, Artificial Sequence
  ENSG00000076555_21 (sequence is synthesized)
gccaggtcctcccagcggattcactactgaacctcgtagatgtggaattaatttacggaggtgttaagtacattctcaaggtggcccggcagtctctgaccatgttcgttctcatcatga

SEQ ID NO: 69817 - DNA, 120 bp, Artificial Sequence
  ENSG00000076555_22 (sequence is synthesized)
atggctgccacatcgagattgatgcccaccggctgaatgatggggggctcctgctctcctacaatgggaacagctacaccacctacatgaaggaagaggttgacagttaccgaattacca

SEQ ID NO: 69818 - DNA, 120 bp, Artificial Sequence
  ENSG00000076555_23 (sequence is synthesized)
tcggcaataagacgtgtgtgtttgagaaggagaacgatcctacagtcctgagatccccctcggctgggaagctgacacagtacacagtggaggatgggggccacgttgaggctgggagca

SEQ ID NO: 69819 - DNA, 120 bp, Artificial Sequence
  ENSG00000076555_24 (sequence is synthesized)
gctacgctgagatggaggtgatgaagatgatcatgaccctgaacgttcaggaaagaggccgggtgaagtacatcaagcgtccaggtgccgtgctggaagcaggctgcgtggtggccaggc

SEQ ID NO: 69820 - DNA, 120 bp, Artificial Sequence
  ENSG00000076555_25 (sequence is synthesized)
tggagctcgatgacccttctaaagtccacccggctgaaccgttcacaggagaactccctgcccagcagacactgcccatcctcggagagaaactgcaccaggtcttccacagcgtcctgg

SEQ ID NO: 69821 - DNA, 120 bp, Artificial Sequence
  ENSG00000076555_26 (sequence is synthesized)
aaaacctcaccaacgtcatgagtggcttttgtctgccagagcccgtttttagcataaagctgaaggagtgggtgcagaagctcatgatgaccctccggcacccgtcactgccgctgctgg

SEQ ID NO: 69822 - DNA, 120 bp, Artificial Sequence
  ENSG00000076555_27 (sequence is synthesized)
agctgcaggagatcatgaccagcgtggcaggccgcatccccgcccctgtggagaagtctgtccgcagggtgatggcccagtatgccagcaacatcacctcggtgctgtgccagttcccca

SEQ ID NO: 69823 - DNA, 120 bp, Artificial Sequence
  ENSG00000076555_28 (sequence is synthesized)
gccagcagatagccaccatcctggactgccatgcagccaccctgcagcggaaggctgatcgagaggtcttcttcatcaacacccagagcatcgtgcagttggtccagagataccgcagcg

SEQ ID NO: 69824 - DNA, 120 bp, Artificial Sequence
  ENSG00000076555_29 (sequence is synthesized)
ggatccgcggctatatgaaaacagtggtgttggatctcctgagaagatacttgcgtgttgagcaccattttcagcaagcccactacgacaagtgtgtgataaacctcagggagcagttca

SEQ ID NO: 69825 - DNA, 120 bp, Artificial Sequence
  ENSG00000076555_30 (sequence is synthesized)
agccagacatgtcccaggtgctggactgcatcttctcccacgcacaggtggccaagaagaaccagctggtgatcatgttgatcgatgagctgtgtggcccagacccttccctgtcggacg

SEQ ID NO: 69826 - DNA, 120 bp, Artificial Sequence
  ENSG00000076555_31 (sequence is synthesized)
agctgatctccatcctcaacgagctcactcagctgagcaaaagcgagcactgcaaagtggccctcagagcccggcagatcctgattgcctcccacctcccctcctacgagctgcggcata

SEQ ID NO: 69827 - DNA, 120 bp, Artificial Sequence
  ENSG00000076555_32 (sequence is synthesized)
accaggtggagtccattttcctgtctgccattgacatgtacggccaccagttctgccccgagaacctcaagaaattaatactttcggaaacaaccatcttcgacgtcctgcctactttct

SEQ ID NO: 69828 - DNA, 120 bp, Artificial Sequence
  ENSG00000076555_33 (sequence is synthesized)
tctatcacgcaaacaaagtcgtgtgcatggcgtccttggaggtttacgtgcggaggggctacatcgcctatgagttaaacagcctgcagcaccggcagctcccggacggcacctgcgtgg

SEQ ID NO: 69829 - DNA, 120 bp, Artificial Sequence
  ENSG00000076555_34 (sequence is synthesized)
tagaattccagttcatgctgccgtcctcccacccaaaccggatgaccgtgcccatcagcatcaccaaccctgacctgctgaggcacagcacagagctcttcatggacagcggcttctccc

SEQ ID NO: 69830 - DNA, 120 bp, Artificial Sequence
  ENSG00000076555_35 (sequence is synthesized)
cactgtgccagcgcatgggagccatggtagccttcaggagattcgaggacttcaccagaaattttgatgaagtcatctcttgcttcgccaacgtgcccaaagacacccccctcttcagcg

SEQ ID NO: 69831 - DNA, 120 bp, Artificial Sequence
  ENSG00000076555_36 (sequence is synthesized)
aggcccgcacctccctatactccgaggatgactgcaagagcctcagagaagagcccatccacattctgaatgtgtccatccagtgtgcagaccacctggaggatgaggcactggtgccga

SEQ ID NO: 69832 - DNA, 120 bp, Artificial Sequence
  ENSG00000076555_37 (sequence is synthesized)
ttttacggacattcgtacagtccaagaaaaatatccttgtggattatggactccgacgaatcacattcttgattgcccaagagaaagaatttcccaagtttttcacattcagagcaagag

SEQ ID NO: 69833 - DNA, 120 bp, Artificial Sequence
  ENSG00000076555_38 (sequence is synthesized)
atgagtttgcagaagatcgcatttaccgtcacttggaacctgccctggccttccagctggaacttaaccggatgcgtaacttcgatctgaccgccgtgccctgtgccaaccacaagatgc

SEQ ID NO: 69834 - DNA, 120 bp, Artificial Sequence
  ENSG00000076555_39 (sequence is synthesized)
acctttacctgggtgctgccaaggtgaaggaaggtgtggaagtgacggaccataggttcttcatccgcgccatcatcaggcactctgacctgatcacaaaggaagcctccttcgaatacc

SEQ ID NO: 69835 - DNA, 120 bp, Artificial Sequence
  ENSG00000076555_40 (sequence is synthesized)
tgcagaacgagggtgagcggctgctcctggaggccatggacgagctggaggtggcgttcaataacaccagcgtgcgcaccgactgcaaccacatcttcctcaacttcgtgcccactgtca

SEQ ID NO: 69836 - DNA, 120 bp, Artificial Sequence
  ENSG00000076555_41 (sequence is synthesized)
tcatggaccccttcaagatcgaggagtccgtgcgctacatggttatgcgctacggcagccggctgtggaaactccgtgtgctacaggctgaggtcaagatcaacatccgccagaccacca

SEQ ID NO: 69837 - DNA, 120 bp, Artificial Sequence
  ENSG00000076555_42 (sequence is synthesized)
ccggcagtgccgttcccatccgcctgttcatcaccaatgagtcgggctactacctggacatcagcctctacaaagaagtgactgactccagatctggaaatatcatgtttcactccttcg

SEQ ID NO: 69838 - DNA, 120 bp, Artificial Sequence
  ENSG00000076555_43 (sequence is synthesized)
gcaacaagcaagggccccagcacgggatgctgatcaatactccctacgtcaccaaggatctgctccaggccaagcgattccaggcccagaccctgggaaccacctacatctatgacttcc

SEQ ID NO: 69839 - DNA, 120 bp, Artificial Sequence
  ENSG00000076555_44 (sequence is synthesized)
cggaaatgttcaggcaggctctctttaaactgtggggctccccagacaagtatcccaaagacatcctgacatacactgaattagtgttggactctcagggccagctggtggagatgaacc

SEQ ID NO: 69840 - DNA, 120 bp, Artificial Sequence
  ENSG00000076555_45 (sequence is synthesized)
gacttcctggtggaaatgaggtgggcatggtggccttcaaaatgaggtttaagacccaggagtacccggaaggacgggatgtgatcgtcatcggcaatgacatcacctttcgcattggat

SEQ ID NO: 69841 - DNA, 120 bp, Artificial Sequence
  ENSG00000076555_46 (sequence is synthesized)
cctttggccctggagaggaccttctgtacctgcgggcatccgagatggcccgggcagagggcattcccaaaatttacgtggcagccaacagtggcgcccgtattggcatggcagaggaga

SEQ ID NO: 69842 - DNA, 120 bp, Artificial Sequence
  ENSG00000076555_47 (sequence is synthesized)
tcaaacacatgttccacgtggcttgggtggacccagaagacccccacaaaggatttaaatacctgtacctgactccccaagactacaccagaatcagctccctgaactccgtccactgta

SEQ ID NO: 69843 - DNA, 120 bp, Artificial Sequence
  ENSG00000076555_48 (sequence is synthesized)
aacacatcgaggaaggaggagagtccagatacatgatcacggatatcatcgggaaggatgatggcttgggcgtggagaatctgaggggctcaggcatgattgctggggagtcctctctgg

SEQ ID NO: 69844 - DNA, 120 bp, Artificial Sequence
  ENSG00000076555_49 (sequence is synthesized)
cttacgaagagatcgtcaccattagcttggtgacctgccgagccattgggattggggcctacttggtgaggctgggccagcgagtgatccaggtggagaattcccacatcatcctcacag

SEQ ID NO: 69845 - DNA, 120 bp, Artificial Sequence
  ENSG00000076555_50 (sequence is synthesized)
gagcaagtgctctcaacaaggtcctgggaagagaggtctacacatccaacaaccagctgggtggcgttcagatcatgcattacaatggtgtctcccacatcaccgtgccagatgactttg

SEQ ID NO: 69846 - DNA, 120 bp, Artificial Sequence
  ENSG00000076555_51 (sequence is synthesized)
agggggtttataccatcctggagtggctgtcctatatgccaaaggataatcacagccctgtccctatcatcacacccactgaccccattgacagagaaattgaattcctcccatccagag

SEQ ID NO: 69847 - DNA, 120 bp, Artificial Sequence
  ENSG00000076555_52 (sequence is synthesized)
ctccctacgacccccggtggatgcttgcaggaaggcctcacccaactctgaagggaacgtggcagagcggattctttgaccacggcagtttcaaggaaatcatggcaccctgggcgcaga

SEQ ID NO: 69848 - DNA, 120 bp, Artificial Sequence
  ENSG00000076555_53 (sequence is synthesized)
ccgtggtgacaggacgagcaaggcttggggggattcccgtgggagtgattgctgtggagacacggactgtggaggtggcagtccctgcagaccctgccaacctggattctgaggccaaga

SEQ ID NO: 69849 - DNA, 120 bp, Artificial Sequence
  ENSG00000076555_54 (sequence is synthesized)
taattcagcaggcaggacaggtgtggttcccagactcagcctacaaaaccgcccaggccgtcaaggacttcaaccgggagaagttgcccctgatgatctttgccaactggagggggttct

SEQ ID NO: 69850 - DNA, 120 bp, Artificial Sequence
  ENSG00000076555_55 (sequence is synthesized)
ccggtggcatgaaagacatgtatgaccaggtgctgaagtttggagcctacatcgtggacggccttagacaatacaaacagcccatcctgatctatatcccgccctatgcggagctccggg

SEQ ID NO: 69851 - DNA, 120 bp, Artificial Sequence
  ENSG00000076555_56 (sequence is synthesized)
gaggctcctgggtggtcatagatgccaccatcaacccgctgtgcatagaaatgtatgcagacaaagagagcaggggtggtgttctggaaccagaggggacagtggagattaagttccgaa

SEQ ID NO: 69852 - DNA, 120 bp, Artificial Sequence
  ENSG00000076555_57 (sequence is synthesized)
agaaagatctgataaagtccatgagaaggatcgatccagcttacaagaagctcatggaacagctaggggaacctgatctctccgacaaggaccgaaaggacctggagggccggctaaagg

SEQ ID NO: 69853 - DNA, 120 bp, Artificial Sequence
  ENSG00000076555_58 (sequence is synthesized)
ctcgcgaggacctgctgctccccatctaccaccaggtggcggtgcagttcgccgacttccatgacacacccggccggatgctggagaagggcgtcatatctgacatcctggagtggaaga

SEQ ID NO: 69854 - DNA, 120 bp, Artificial Sequence
  ENSG00000076555_59 (sequence is synthesized)
ccgcacgcaccttcctgtattggcgtctgcgccgcctcctcctggaggaccaggtcaagcaggagatcctgcaggccagcggggagctgagtcacgtgcatatccagtccatgctgcgtc

SEQ ID NO: 69855 - DNA, 120 bp, Artificial Sequence
  ENSG00000076555_60 (sequence is synthesized)
gctggttcgtggagacggagggggctgtcaaggcctacttgtgggacaacaaccaggtggttgtgcagtggctggaacagcactggcaggcaggggatggcccgcgctccaccatccgtg

SEQ ID NO: 69856 - DNA, 120 bp, Artificial Sequence
  ENSG00000076555_61 (sequence is synthesized)
agaacatcacgtacctgaagcacgactctgtcctcaagaccatccgaggcctggttgaagaaaaccccgaggtggccgtggactgtgtgatatacctgagccagcacatcagcccagctg

SEQ ID NO: 69857 - DNA, 120 bp, Artificial Sequence
  ENSG00000076555_62 (sequence is synthesized)
agcgggcgcaggtcgttcacctgctgtctaccatggacagcccggcctccacctgaccgtggcccgcccagccactcccgggaccacggcaaaaggaaccacccagacccaccacccgta

SEQ ID NO: 69858 - DNA, 120 bp, Artificial Sequence
  ENSG00000076555_63 (sequence is synthesized)
caccctcagcagaccctgaagacttgcttttaaacaaagaaaatcctgggcacttctgcagggctgctggttccgagctgacacccgtcttaacaaaaggcccaggagtgcctcttccaa

SEQ ID NO: 69859 - DNA, 120 bp, Artificial Sequence
  ENSG00000076555_64 (sequence is synthesized)
acaaaaacagcctcctctccatagctgggaagtttattttgttttgtctctgaagacagcagttttattgcatcactaaatctaatcaagctaaaacatccctgtttccttttgcaaaac

SEQ ID NO: 69860 - DNA, 120 bp, Artificial Sequence
  ENSG00000076555_65 (sequence is synthesized)
agtgcctggcatgtgggatccaggcgttctttaggatccttggataccacatcgtgaaatcttttatttttttactctgagaccagcaccagatgtaagtaagcatctcatatatttcag

SEQ ID NO: 69861 - DNA, 120 bp, Artificial Sequence
  ENSG00000076555_66 (sequence is synthesized)
ccaaataaatgggccaagggaaaaaaatatatatatatagacaggactagagaaaacctatttttgtaatgatgtttctttggatactgtctagtcacccagaaaaatgtatggatgaat

SEQ ID NO: 69862 - DNA, 90 bp, Artificial Sequence
  ENSG00000076555_67 (sequence is synthesized)
ttttgagacaaagtctcactgtgtcatggcaacctccatctcctgtctcagcctcctagataactgggattacaggtgcccaccaccatg

SEQ ID NO: 69863 - DNA, 120 bp, Artificial Sequence
  ENSG00000076555_68 (sequence is synthesized)
ctgggattacaggcatgagccaccatcttcagccagatgatttttttattgagagagtgaaatgctattttgttccccaaatggcgctagtgaatcactaggagggtcccactgataggc

SEQ ID NO: 69864 - DNA, 120 bp, Artificial Sequence
  ENSG00000076555_69 (sequence is synthesized)
catgtttagcactggttgccagggattctctttttgagagagggaaagcaaaatgaatggaagtacccagctggaggtttcagggcttctggaggatgctctcgcatagctcgaggtcct

SEQ ID NO: 69865 - DNA, 120 bp, Artificial Sequence
  ENSG00000076555_70 (sequence is synthesized)
ctgcccacctcttctctccaaggaaaatgaggactgccccttccccctgcaggattggcccccagcctgcgcatgcaccctcctcttgcccaagtggggagcacagaggcggagaggaat

SEQ ID NO: 69866 - DNA, 120 bp, Artificial Sequence
  ENSG00000076555_71 (sequence is synthesized)
cccttaccacacccacggcccagcttgctcacgagtgtcacctctgtgacggtcaccactgctcccttggagggccacttgagttactgttgcttcctcgcctgctggcttgatgagcac

SEQ ID NO: 69867 - DNA, 120 bp, Artificial Sequence
  ENSG00000076555_72 (sequence is synthesized)
cgatggtgggatctgaccccgaggggcagagctgtcggtgactgaggactggactgtggtgaccatgccgatttgctcagggagaacgttgcaatgcacccagcagctcctggctctgca

SEQ ID NO: 69868 - DNA, 120 bp, Artificial Sequence
  ENSG00000076555_73 (sequence is synthesized)
ggcggcacagcctggggccctgtgatcctctggtttcttccattggggcggagtcggggatggagggagctggccacaacccactgctctgatgggtggtttgtccaaggatgctgaatg

SEQ ID NO: 69869 - DNA, 120 bp, Artificial Sequence
  ENSG00000076555_74 (sequence is synthesized)
taatgcctggtcaatgtggaagcccatgaggttgcccagggaagcctccaaaagctgggatgcttgagggtatccaagttgaaaaagacaaaatctgaccatcagccagtgacagtcctg

SEQ ID NO: 69870 - DNA, 120 bp, Artificial Sequence
  ENSG00000076555_75 (sequence is synthesized)
gcaaatgaaggtggggcggggcagtgaggggtgggagaaggtgaatgattcattattccaccccgaggtttgctggggtgaggggaagaatcgatgctgctttgggaactgaaggttttt

SEQ ID NO: 69871 - DNA, 120 bp, Artificial Sequence
  ENSG00000076555_76 (sequence is synthesized)
ctgttgggaaggccctcttggttttggagagaaagacaagttatgagtagctgctaccctggaacggtgggcagagagcctactaggaaatgtgcagaataaactattttttgaaggaaa

SEQ ID NO: 69872 - DNA, 120 bp, Artificial Sequence
  ENSG00000076555_77 (sequence is synthesized)
aggaatatgggccgagggtgatatttcactgagacagcccctgaacaggcagatatctttggttgtataaaccaaaaagtatctgagacaggtctcaatcaattgagaagtttattttgc

SEQ ID NO: 69873 - DNA, 120 bp, Artificial Sequence
  ENSG00000076555_78 (sequence is synthesized)
caaggttagggacacatccagaagcaaagaacacggaatcatagaaaccgtctgtggcgtgtacctttcttcaaagatgatttggagggcttcagtatttaaaggagaaaagcaggctgg

SEQ ID NO: 69874 - DNA, 120 bp, Artificial Sequence
  ENSG00000076555_79 (sequence is synthesized)
aggggaaagagggaagttctggtaatcacatgttgcaggagaaaaggcgcaggcaggggaagtcagttatgtattcttcctgcgctcagtaagtcagcactttctataagataaggtgga

SEQ ID NO: 69875 - DNA, 120 bp, Artificial Sequence
  ENSG00000076555_80 (sequence is synthesized)
catagaggaactacctgtggagatatttcagcttttatctgtatctatctgcttactaaagaaacaaaaggaaaggcagcttgcacaactcagcttcagcttaaattgttccttttggca

SEQ ID NO: 69876 - DNA, 120 bp, Artificial Sequence
  ENSG00000076555_81 (sequence is synthesized)
ttccttttggcattgtgaatcgtggtcctagtttttattttcctttcacagatgggagcagtgtgatgatttatttatttatttgagacagaatcccgctctgtcacccaggctggagtg

SEQ ID NO: 69877 - DNA, 79 bp, Artificial Sequence
  ENSG00000076555_82 (sequence is synthesized)
gtcctcccaaactgctgggattacagagcagggtgatgattgttgatgctgcacttgcccttttagaaatcttagcact

SEQ ID NO: 69878 - DNA, 120 bp, Artificial Sequence
  ENSG00000076555_83 (sequence is synthesized)
ttgttgatgctgcacttgcccttttagaaatcttagcactcattttgagggttctagatgccaatttcattttgcctctggatgctttgtctgcttccaatctctcaccttgctgcccag

SEQ ID NO: 69879 - DNA, 120 bp, Artificial Sequence
  ENSG00000076555_84 (sequence is synthesized)
tttcgggatggagcaagcgcagcgcgaagttgggcgcccgccggctgcagcagaaccccgcccgcggcgctctaggactgcatctcggcctccgggtcgcgacctggctgtcctgctggg

SEQ ID NO: 69880 - DNA, 120 bp, Artificial Sequence
  ENSG00000076555_85 (sequence is synthesized)
tcccgggcctcgggtcggcttcaggcggttaaggggtgcatgctctgcacccctgcgggagcccggtgggattggcctgcggggtggtcaacatgagtcctgccaagtgcaagatctgtt

SEQ ID NO: 69881 - DNA, 120 bp, Artificial Sequence
  ENSG00000076555_86 (sequence is synthesized)
tgtgcactactgtggttgactgtaatgcagtcctcagattggttcacttagggaaatactttcccaaccatgttctaggacagacttttgtaaagtgaattaaatgttcttttgactgcc

SEQ ID NO: 69882 - DNA, 120 bp, Artificial Sequence
  ENSG00000076555_87 (sequence is synthesized)
atttaaattcctatgtgtgtacataaaaatatacatatatatacacgccattttttaaagagatattgcctagactgggcctgaactcctgggttcaagcaatcttctggcctcagcctc

SEQ ID NO: 69883 - DNA, 120 bp, Artificial Sequence
  ENSG00000076555_88 (sequence is synthesized)
gtagctgggactacaggcacatgccattgtgcctggtctatgcactttttattttggagtaattgaagactgaagactctcaagcagttgcaaaattagtacagaagaaaaaaaatagtg

SEQ ID NO: 69884 - DNA, 120 bp, Artificial Sequence
  ENSG00000076555_89 (sequence is synthesized)
agtgcagaggattttcacccagtttcccccaatggtaatgttgattgaacttcaccattgcacatcattaaaacaggaaattgacattggcacaggactgttcgcaccaacactgaccac

SEQ ID NO: 69885 - DNA, 120 bp, Artificial Sequence
  ENSG00000076555_90 (sequence is synthesized)
gttcggatttcaccagcgtttccatgcatgcctgttgttgggagtgtgtgatgccttgatcactgtatttttggaactgcattccacagcccctgttgtcccttcttgttctggccctcc

SEQ ID NO: 69886 - DNA, 120 bp, Artificial Sequence
  ENSG00000076555_91 (sequence is synthesized)
tgtgacatgctttgcttcccccacctgcattttcattgaggactgggcagaaataaattgggggagatgtgtgattctctctcactctctgttttccctcctttctggtccagatcatgt

SEQ ID NO: 69887 - DNA, 120 bp, Artificial Sequence
  ENSG00000076555_92 (sequence is synthesized)
cattggtctctggtgggggatttttctcaatatgaagccagtttcattcctactgatacaagagctctttttttccaatttgcagctatctgggtccttatgagaaaaaaaaaattagtt

SEQ ID NO: 69888 - DNA, 120 bp, Artificial Sequence
  ENSG00000076555_93 (sequence is synthesized)
ttaggcaattctggtcgatctaactccctgtattactgacattttaaaacaaattattgaagtgccattacacattgcagaaaattagaaaaggaaccccccaaaaaagtaattttgcag

SEQ ID NO: 69889 - DNA, 120 bp, Artificial Sequence
  ENSG00000076555_94 (sequence is synthesized)
cttctatcattctggtatagttccctctcatcttctgtctttatgtggttaatttatagtgaatatgcagttttgtattctacttttttcactgtattaaaacattttccttgttgaaaa

SEQ ID NO: 69890 - DNA, 120 bp, Artificial Sequence
  ENSG00000076555_95 (sequence is synthesized)
agcaattgaagtatttggggctgatggggattatcagaattttggtggcaaaatgttcctttagaattcccaatcagagataagatattttactaattttgtttgaatgacagctttgtt

SEQ ID NO: 69891 - DNA, 72 bp, Artificial Sequence
  ENSG00000076555_96 (sequence is synthesized)
tctggccacaagatgatatttaaatatccattttaagtgtcagtgtctttataactgtgctattcacaagat

SEQ ID NO: 69892 - DNA, 120 bp, Artificial Sequence
  ENSG00000076555_97 (sequence is synthesized)
ttaagtgtcagtgtctttataactgtgctattcacaagattttttacagtgtgtgcgtgtaatttctttggctggtatcagggtaatgctgatctcatagaatgagttgaagtgttcgct

SEQ ID NO: 69893 - DNA, 120 bp, Artificial Sequence
  ENSG00000076555_98 (sequence is synthesized)
cctattttctgagtttttgcagaattggcattatttctttatgtttttgatagaggtttttacctataaattcaacttctttgttatatataggactatttgtgttatctgtttcctcct

SEQ ID NO: 69894 - DNA, 120 bp, Artificial Sequence
  ENSG00000076555_99 (sequence is synthesized)
aggtgagctttggtggtttgtgtgtttcaaggaatttgtctatttcatcttaagttgtcaatttggcatagagttgcttataatattcccttatcatattttacaatgtgtactaaaaat

SEQ ID NO: 69895 - DNA, 120 bp, Artificial Sequence
  ENSG00000076555_100 (sequence is synthesized)
cattgatatagtatcctacaagcacgatgggtctgatggaaggggaaaatgtagagttgcatgttgaatgctgtcttgcaattgtgagtgcatttctgagactgtactagctatttgatc

SEQ ID NO: 69896 - DNA, 120 bp, Artificial Sequence
  ENSG00000076555_101 (sequence is synthesized)
tgagacaaagggggccatcaagatgggcctggggtgggggccaggccagtggactctgggggacctagggggctgagggcagcctgtgtagcagcaggggtaatatcagagttaaagctc

SEQ ID NO: 69897 - DNA, 120 bp, Artificial Sequence
  ENSG00000076555_102 (sequence is synthesized)
ttacaggcgtgagccaccacacccggccactcctgtgcttttccagttctctgaatcacatcattgcagcaactctgttgatgtatgcatgaatttggaaaatgatccatgtgcctttcc

SEQ ID NO: 69898 - DNA, 120 bp, Artificial Sequence
  ENSG00000076555_103 (sequence is synthesized)
gggcccctcctctcagctggaggtgggagattcgggttcaggctcattctgcctgctgcagagagggggtgagggccacgctcctctgagttttaatagtttaaccctcaaatagaaata

SEQ ID NO: 69899 - DNA, 120 bp, Artificial Sequence
  ENSG00000076555_104 (sequence is synthesized)
atagtgaagcctctttcaaagggctattgtgaggatgaaatgaaataagacaggtaaaacacattgtactgtaaaacactcaaaaagtgttaagggtgatcacaatgacaccaaaggaat

SEQ ID NO: 69900 - DNA, 120 bp, Artificial Sequence
  ENSG00000076555_105 (sequence is synthesized)
atgcagaaaaatatccttgtggattatggactccgacgaatcacattcttgattgcccaagagaaagaatttcccaagtttttcacattcagagcaagagatgaggtatggccaaaagta

SEQ ID NO: 69901 - DNA, 120 bp, Artificial Sequence
  ENSG00000076555_106 (sequence is synthesized)
ggtatggccaaaagtaatgatgttttctcttctctagcatcttgttttattttttaagagatgggatggggccgggtgtggtggctcaagcccgtaatcctagcactttgggaggctgag

SEQ ID NO: 69902 - DNA, 85 bp, Artificial Sequence
  ENSG00000076555_107 (sequence is synthesized)
tagcactttgggaggctgaggcaggaggtttgcttgagctcaggagttctagaccagcctgggttatatcagcctggcattgtga

SEQ ID NO: 69903 - DNA, 120 bp, Artificial Sequence
  ENSG00000076555_108 (sequence is synthesized)
ggggtctcactatgttgcccaggctggactcgaacttatggctcaagcgattctcttgcttcagcctcccgaatagctgggactataggcacatgccaccgtgcctcccagctccctggc

SEQ ID NO: 69904 - DNA, 120 bp, Artificial Sequence
  ENSG00000076555_109 (sequence is synthesized)
tggcatctttgatattcatgaagaatatagtctgcagtccttaaggcatccccatattcaagaatgtagcaacttttgtgtagactgcagtcttcctctgggattgtatttccattgaga

SEQ ID NO: 69905 - DNA, 120 bp, Artificial Sequence
  ENSG00000076555_110 (sequence is synthesized)
gccctctgttccctgcatggcactcagacctgagaatcttgccctttcagcctcactacaggtttctgtcttgcttgaataattttcagtacttgctgatgtactcagtaagacattttt

SEQ ID NO: 69906 - DNA, 120 bp, Artificial Sequence
  ENSG00000076604_0 (sequence is synthesized)
agccgggagcgccgctccagcgaggcgcgggctgtggggccgccgcgtgcctggccccgctcgcccgtgccggccgctcgcccgccatgcctggcttcgactacaagttcctggagaagc

SEQ ID NO: 69907 - DNA, 120 bp, Artificial Sequence
  ENSG00000076604_1 (sequence is synthesized)
aagttcctggagaagcccaagcgacggctgctgtgcccactgtgcgggaagcccatgcgcgagcctgtgcaggtttccacctgcggccaccgtttctgcgatacctgcctgcaggagttc

SEQ ID NO: 69908 - DNA, 120 bp, Artificial Sequence
  ENSG00000076604_2 (sequence is synthesized)
ctcagtgaaggagtcttcaagtgccctgaggaccagcttcctctggactatgccaagatctacccagacccggagctggaagtacaagtattgggcctgcctatccgctgcatccacagt

SEQ ID NO: 69909 - DNA, 120 bp, Artificial Sequence
  ENSG00000076604_3 (sequence is synthesized)
gaggagggctgccgctggagtgggccactacgtcatctacagggccacctgaatacctgcagcttcaatgtcattccctgccctaatcgctgccccatgaagctgagccgccgtgatcta

SEQ ID NO: 69910 - DNA, 120 bp, Artificial Sequence
  ENSG00000076604_4 (sequence is synthesized)
cctgcacacttgcagcatgactgccccaagcggcgcctcaagtgcgagttttgtggctgtgacttcagtggggaggcctatgagagccatgagggtatgtgcccccaggagagtgtctac

SEQ ID NO: 69911 - DNA, 120 bp, Artificial Sequence
  ENSG00000076604_5 (sequence is synthesized)
tgtgagaataagtgtggtgcccgcatgatgcggcggctgctggcccagcatgccacctctgagtgccccaagcgcactcagccctgcacctactgcactaaggagttcgtctttgacacc

SEQ ID NO: 69912 - DNA, 120 bp, Artificial Sequence
  ENSG00000076604_6 (sequence is synthesized)
atccagagccaccagtaccagtgcccaaggctgcctgttgcctgccccaaccaatgtggtgtgggcactgtggctcgggaggacctgccaggccatctgaaggacagctgtaacaccgcc

SEQ ID NO: 69913 - DNA, 120 bp, Artificial Sequence
  ENSG00000076604_7 (sequence is synthesized)
ctggtgctctgcccattcaaagactccggctgcaagcacaggtgccctaagctggcaatggcacggcatgtggaggagagtgtgaagccacatctggccatgatgtgtgccctggtgagc

SEQ ID NO: 69914 - DNA, 120 bp, Artificial Sequence
  ENSG00000076604_8 (sequence is synthesized)
cggcaacggcaggagctgcaggagcttcggcgagagctggaggagctatcagtgggcagtgatggcgtgctcatctggaagattggcagctatggacggcggctacaggaggccaaggcc

SEQ ID NO: 69915 - DNA, 120 bp, Artificial Sequence
  ENSG00000076604_9 (sequence is synthesized)
aagcccaaccttgagtgcttcagcccagccttctacacacataagtatggttacaagctgcaggtgtctgcattcctcaatggcaatggcagtggtgagggcacacacctctcactgtac

SEQ ID NO: 69916 - DNA, 120 bp, Artificial Sequence
  ENSG00000076604_10 (sequence is synthesized)
attcgtgtgctgcctggtgcctttgacaatctccttgagtggccctttgcccgccgtgtcaccttctccctgctggatcagagcgaccctgggctggctaaaccacagcacgtcactgag

SEQ ID NO: 69917 - DNA, 120 bp, Artificial Sequence
  ENSG00000076604_11 (sequence is synthesized)
accttccaccccgacccaaactggaagaatttccagaagccaggcacgtggcggggctccctggatgagagttctctgggctttggttatcccaagttcatctcccaccaggacattcga

SEQ ID NO: 69918 - DNA, 120 bp, Artificial Sequence
  ENSG00000076604_12 (sequence is synthesized)
gcgggatgatgcagtcttcatccgtgctgctgttgaactgccccggaagatcctcagctgagtgcaggtggggttcgaggggaaaggacgatggggcatgacctcagtcaggcactggct

SEQ ID NO: 69919 - DNA, 120 bp, Artificial Sequence
  ENSG00000076604_13 (sequence is synthesized)
gaacttggagagggggccggacccccgtcagctgcttctgctgcctaggttctgttaccccatcctccctcccccagccaccaccctcaggtgcctccaattggtgcttcagccctggcc

SEQ ID NO: 69920 - DNA, 120 bp, Artificial Sequence
  ENSG00000076604_14 (sequence is synthesized)
cctgtggggaacaggtcttggggtcatgaagggctggaaacaagtgaccccagggcctgtctcccttcttgggtagggcagacatgccttggtgccggtcacactctacacggactgagg

SEQ ID NO: 69921 - DNA, 120 bp, Artificial Sequence
  ENSG00000076604_15 (sequence is synthesized)
tgcctgctcaggtgctatgtcccaagagccataagggggtgggaattggggagggagaaagggtagttcaaagagtctgtcttgagatctgattttttccccctttacctagctgtgccc

SEQ ID NO: 69922 - DNA, 120 bp, Artificial Sequence
  ENSG00000076604_16 (sequence is synthesized)
cctctggttatttatttccttagtgccaggagggcacagcaggggagccctgatttttaataaatccggaattgtatttattaatttgcttccagcctgacttacctgggttggttaggt

SEQ ID NO: 69923 - DNA, 120 bp, Artificial Sequence
  ENSG00000076604_17 (sequence is synthesized)
ccctgggaggctcaaccaaactgaaggcaaagaaaggaccagtcagagaagggccgctgcctgggtctggccccaggatccagcttacctgctggctcgccctctgatggacgccgggaa

SEQ ID NO: 69924 - DNA, 120 bp, Artificial Sequence
  ENSG00000076604_18 (sequence is synthesized)
aactgcatcgggctttgtgtggaagacggtccctgccactgccctctgccgatgaaatgcgggaagtgtatggcctagatgtttcataaggctggagtccctggtcagccccaccagatt

SEQ ID NO: 69925 - DNA, 120 bp, Artificial Sequence
  ENSG00000076604_19 (sequence is synthesized)
agtgcttctaccctaggcagggctttcttggtctaatggtaataagcaccgacactgctaagcactttacgtgcattattatttcattgaaaagaactgtcaagtgaaatactttttagc

SEQ ID NO: 69926 - DNA, 120 bp, Artificial Sequence
  ENSG00000076604_20 (sequence is synthesized)
acagtaactggctttgtgggctctagagaagagttaatgaggcagtgcatgttcttggcccagagtaagtgcttagtgaatgctttctaactccgaaccccagccacatccagggactgg

SEQ ID NO: 69927 - DNA, 120 bp, Artificial Sequence
  ENSG00000076604_21 (sequence is synthesized)
gtgttgagcaaaaggggccttcaagatgttcaaggcacttggattttctcctgtctctcatcggcttttcttaacgggcctcagtgggtgcatgtgattatccacgtttcacctatgaaa

SEQ ID NO: 69928 - DNA, 120 bp, Artificial Sequence
  ENSG00000076604_22 (sequence is synthesized)
catgaacagaggagactgacttatcagtgattcttccgcgggttcggacagggcctcgattctgttttaaactccagtagtccctagaaattgtagctccctctagttgtggcaataggt

SEQ ID NO: 69929 - DNA, 120 bp, Artificial Sequence
  ENSG00000076604_23 (sequence is synthesized)
gtgggtccttgtgcttgcttttggcaagtttctgagctacacagggcctccattaccgtcactggtgaaatgcggctcacctcccagatttgttgtaaagattaaatgaactggtcagca

SEQ ID NO: 69930 - DNA, 120 bp, Artificial Sequence
  ENSG00000076604_24 (sequence is synthesized)
gtcaaccaaaagccttgggatggtgcgcctccacaaaggtagcctgttccctcccaccaggccagtttgcaaacgaggcccctgtttgccctggagggcatgcacaatgcccagcctgta

SEQ ID NO: 69931 - DNA, 120 bp, Artificial Sequence
  ENSG00000076604_25 (sequence is synthesized)
ggggtgcacagagctgctctgtgcccgcaagaagtgttccctccccttccggtggcaagccagacctgtggctgagggccagtatccctccaccaggggaaaggaagcagagccccaggg

SEQ ID NO: 69932 - DNA, 120 bp, Artificial Sequence
  ENSG00000076604_26 (sequence is synthesized)
acagcctgggattgagcaggctgattggctgcctcttcaaaggaagcgtcctgtgcaggcatgttaggacccagcatcagagcagatgctgcctgctgtgcccttcatccctggactcaa

SEQ ID NO: 69933 - DNA, 120 bp, Artificial Sequence
  ENSG00000076604_27 (sequence is synthesized)
cctcccccgaagaaggacccctctaggcggctcccctctctcccgggggctggagtaaggcgggtggtccataagtcatgaagaagggggtcgcactcgtgttgttactgaactcccgct

SEQ ID NO: 69934 - DNA, 120 bp, Artificial Sequence
  ENSG00000076604_28 (sequence is synthesized)
gccctctcaggacgcagcctgggccggctcctgccctcacatatgctccggcacaagctgcaggactgccccctccccctcggcagtgtacacatttactctcctacagacacagcccca

SEQ ID NO: 69935 - DNA, 120 bp, Artificial Sequence
  ENSG00000076604_29 (sequence is synthesized)
ttgtctccgccactgctcttccccggccctctgggttccagatgaggccagctgagccccccgacccccccacagctgacccaccctgactgcctcgggaaaggagcgggggagggggcc

SEQ ID NO: 69936 - DNA, 120 bp, Artificial Sequence
  ENSG00000076604_30 (sequence is synthesized)
aagagaggctattacaggctccaaggtagagccagcccagttgggtctaggggtgggaactgggcactgcagtcagctctgaccctggccagttcccccatccctacccccagatctacc

SEQ ID NO: 69937 - DNA, 120 bp, Artificial Sequence
  ENSG00000076604_31 (sequence is synthesized)
caagtgccctgaggaccagcttcctctggactatgccaaggtgagtccacactgccaggaagaagcccaagcacagtctgttgcccttggaggccggagctgctggcagccagtgggctc

SEQ ID NO: 69938 - DNA, 120 bp, Artificial Sequence
  ENSG00000076604_32 (sequence is synthesized)
ctgccgctggagtgggccactacgtcatctacaggtgaggctctgatgtgagggctggcaccacctctcccttggcaggcactaattgcagccttcccaccagggccacctgaatacctg

SEQ ID NO: 69939 - DNA, 120 bp, Artificial Sequence
  ENSG00000076604_33 (sequence is synthesized)
gtggccgcaagctgacctttgccctggttcttggcagaggaccttcctggggactgggcagccttcgcacttaatctcagcccatccctgttccccctcccagtcagctttcagcgcagc

SEQ ID NO: 69940 - DNA, 120 bp, Artificial Sequence
  ENSG00000076604_34 (sequence is synthesized)
caatgaaaactaacctagggggagggggtgactgtgcagcgtgttcctttcccagtccagctgccatcctgggggagggggtgccagctgccacctgttggccaagtcctgactgaggca

SEQ ID NO: 69941 - DNA, 120 bp, Artificial Sequence
  ENSG00000076604_35 (sequence is synthesized)
gctgtctgtgcctcctctaggcccagaccccccttcccaggacaggggctggggtcttctgggatcctggggaagtagagcccctcaggcctctgcttgcccttttgtctcatctaggct

SEQ ID NO: 69942 - DNA, 120 bp, Artificial Sequence
  ENSG00000076641_0 (sequence is synthesized)
attctccgcggcgcggcggcgagtgctggctgcggtaccctcccgctcgcttgtccgtctgcgcgcccgcgatgtgaccagccgactgggggcgggctggcggctctgcctgcggcagcg

SEQ ID NO: 69943 - DNA, 120 bp, Artificial Sequence
  ENSG00000076641_1 (sequence is synthesized)
catcggtttttctcctggcaggtccctaattgagccgtgattcccttggagccagagacacccaccaggggctcggagcgccgcgctccggggctggaggcagctgcagcgctcgggtcc

SEQ ID NO: 69944 - DNA, 120 bp, Artificial Sequence
  ENSG00000076641_2 (sequence is synthesized)
gcgcggccgggtgcagtagcctcagtcccagccgccgcctcgctgagtcgtgtgccctggcgaatgcccggcgcccggcacagctgagccaaggcgactggtgcagagcggcggcgcctg

SEQ ID NO: 69945 - DNA, 120 bp, Artificial Sequence
  ENSG00000076641_3 (sequence is synthesized)
gtcctgcacttgccgctgctgccgggctgtgccggggcggcggcgctgcgcgccggagtttgcagaggctgcctccgagcgccgtccgccaggaagactccctgcctcctgagtcccaaa

SEQ ID NO: 69946 - DNA, 120 bp, Artificial Sequence
  ENSG00000076641_4 (sequence is synthesized)
aacacgagatttttctcctatttcagcagttggccacaacttcattgctgggaaaaggccaagaaagaagagagaactctcaccacaacatttcaaagggaatacattgccagaacttgg

SEQ ID NO: 69947 - DNA, 120 bp, Artificial Sequence
  ENSG00000076641_5 (sequence is synthesized)
aatactctactggacaaacatttcctccaaggacacagctctctgcctccatgtcaccacctttgaaggactgactgattccctcggctggtgccagtgcctgctcctgccatggggccc

SEQ ID NO: 69948 - DNA, 120 bp, Artificial Sequence
  ENSG00000076641_6 (sequence is synthesized)
gcggggagcctgctgggcagcggacagatgcagatcaccctgtggggaagtctggctgctgtcgccattttcttcgtcatcaccttcctcatcttcctgtgctctagttgtgacagggaa

SEQ ID NO: 69949 - DNA, 120 bp, Artificial Sequence
  ENSG00000076641_7 (sequence is synthesized)
aagaagccgcgacagcatagtggggaccatgagaacctgatgaacgtgccttcagacaaggagatgttcagccgttcagttactagcctggcaacagatgctcctgccagcagtgagcag

SEQ ID NO: 69950 - DNA, 120 bp, Artificial Sequence
  ENSG00000076641_8 (sequence is synthesized)
aatggggcactcaccaatggggacattctttcagaggacagtactctgacctgcatgcagcattacgaggaagtccagacatcggcctcggatctgctggattcccaggacagcacaggg

SEQ ID NO: 69951 - DNA, 120 bp, Artificial Sequence
  ENSG00000076641_9 (sequence is synthesized)
aaaccaaaatgtcatcagagtcgggagctgcccagaatccctcccgagagcgcagtggataccatgctcacggcgagaagtgtggacggggaccaggggctggggatggaagggccctat

SEQ ID NO: 69952 - DNA, 120 bp, Artificial Sequence
  ENSG00000076641_10 (sequence is synthesized)
gaagtgctcaaggacagctcctcccaagaaaacatggtggaggactgcttgtatgaaactgtgaaagagatcaaggaggtggctgcagctgcacacctggagaaaggccacagtggcaag

SEQ ID NO: 69953 - DNA, 120 bp, Artificial Sequence
  ENSG00000076641_11 (sequence is synthesized)
gcaaaatctacttctgcctcgaaagagctcccagggccccagactgaaggcaaagctgagtttgctgaatatgcctcggtggacagaaacaaaaaatgtcgtcaaagtgttaatgtagag

SEQ ID NO: 69954 - DNA, 120 bp, Artificial Sequence
  ENSG00000076641_12 (sequence is synthesized)
agtatccttggaaattcatgtgatccagaagaggaggccccaccacctgtccctgttaagcttctggacgagaatgaaaaccttcaggagaaggaagggggagaggcggaagagagtgcc

SEQ ID NO: 69955 - DNA, 120 bp, Artificial Sequence
  ENSG00000076641_13 (sequence is synthesized)
acagacacgaccagtgaaactaacaagagatttagctcattgtcatacaagtctcgggaagaagaccccactctcacagaagaagagatctcagctatgtactcatcagtaaataaacct

SEQ ID NO: 69956 - DNA, 120 bp, Artificial Sequence
  ENSG00000076641_14 (sequence is synthesized)
ggacagttagtgaataaatcggggcagtcgcttacagttccggagtccacctacacctccattcaaggggacccacagaggtcaccctcctcctgtaatgatctctatgctactgttaaa

SEQ ID NO: 69957 - DNA, 120 bp, Artificial Sequence
  ENSG00000076641_15 (sequence is synthesized)
gacttcgaaaaaactccaaacagcacacttccaccagcagggaggcccagcgaggagccagagcctgattatgaagcgatacagactctcaacagagaggaagaaaaggccaccctgggg

SEQ ID NO: 69958 - DNA, 120 bp, Artificial Sequence
  ENSG00000076641_16 (sequence is synthesized)
accaatggccaccacggtctcgtcccaaaggagaacgactacgagagcataagtgacttgcagcaaggcagagatattaccaggctctagcaacccagaagacaaccctgggtagcctgt

SEQ ID NO: 69959 - DNA, 120 bp, Artificial Sequence
  ENSG00000076641_17 (sequence is synthesized)
gatcagtgtctggagacgtttcttctgtggaagagaagaagtgacacaaacctatacttcatatgctgctttagtcacctgaagatggttggagaggccctgtcgactgttctcccagtt

SEQ ID NO: 69960 - DNA, 120 bp, Artificial Sequence
  ENSG00000076641_18 (sequence is synthesized)
gttcagtttctgagacagagaggtacggactaggctgcacctgagtgtgcccctgcctgccagatggacaggtacacccaagcacatctccctgctgcaccctcaccacccacaaaagat

SEQ ID NO: 69961 - DNA, 120 bp, Artificial Sequence
  ENSG00000076641_19 (sequence is synthesized)
cccagctgtcagtggtctcatctcattagtgaggaaagccaagctgtatggaaaagctgcactcaccaaggaccacaatgcccccggcctaaagtactgccattcagaaaagcaggtttt

SEQ ID NO: 69962 - DNA, 120 bp, Artificial Sequence
  ENSG00000076641_20 (sequence is synthesized)
tcttcctctctttccttttctctgtctgctactgactttaaggctttttcccccttgaaatgtccagattcctgtggttcatcccaaggaaattttcacacaaagcttggcctttgccct

SEQ ID NO: 69963 - DNA, 120 bp, Artificial Sequence
  ENSG00000076641_21 (sequence is synthesized)
caatataggtgttttaggatggtgacaaaccatggctgctgctttctgcccagctcgccagtcctccccaaagagttgcgcatcagcacctggggatctggaccctgcgggtgaagggat

SEQ ID NO: 69964 - DNA, 120 bp, Artificial Sequence
  ENSG00000076641_22 (sequence is synthesized)
ggggagggacgtccctggagtctcttctgtctttgttccttcttattttggcattcgatatcagcagcctctccccaaagtacttgaagtcagttttagatgctttattttatttttcta

SEQ ID NO: 69965 - DNA, 120 bp, Artificial Sequence
  ENSG00000076641_23 (sequence is synthesized)
gtcaaaaacgtgtttcccccagtgtttgaaaactcgtccgaatcttttcagtattttccatgagtattgtggtacttctagacttgtttaagcccagaactcattccttcaaaacagaga

SEQ ID NO: 69966 - DNA, 120 bp, Artificial Sequence
  ENSG00000076641_24 (sequence is synthesized)
gccttaatctttatgttgggacacagaccacatatttggacggcagccatgcatccatcgctgaagggctgtggacatgaatgtgtatttcccatggtctccgctgcccacaccaacagt

SEQ ID NO: 69967 - DNA, 120 bp, Artificial Sequence
  ENSG00000076641_25 (sequence is synthesized)
gtggcatctcataagttaactgctaccctaaggtaatctaagattaaaatgtaaacatttatttttgttatgtaagtttataagatgttttatgttcaatgcctaatttctcaaaagtgc

SEQ ID NO: 69968 - DNA, 120 bp, Artificial Sequence
  ENSG00000076641_26 (sequence is synthesized)
cagaaaaaaatgtatattagctattttgattttatgtacaatgatttatactctccttttgaaaagataccataaagcacataagctagatcactacaaggagctgttatcttttttcta

SEQ ID NO: 69969 - DNA, 120 bp, Artificial Sequence
  ENSG00000076641_27 (sequence is synthesized)
atcaagtgtttaaaacactgatggtttttaaagactcacctttttaaatggtacttggagctcctgattcaaattacctagaccccctagagaaataaatggaatatacataaataatca

SEQ ID NO: 69970 - DNA, 120 bp, Artificial Sequence
  ENSG00000076641_28 (sequence is synthesized)
ttttcagtggtttatggtgggcaatattgcaatatttgaaatggtaaaaatggaaagaagaacaaaatatgatgagaggtggctgtgaattataaacctcataaaagtgtcataattcca

SEQ ID NO: 69971 - DNA, 120 bp, Artificial Sequence
  ENSG00000076641_29 (sequence is synthesized)
ttaaggtttaattatattttttcagaaaacagtgatgaattctgtagtccagtgcttgccaatgcaaattgcctattggaatcttcttcctatattttacaaacatcagtggctgaaata

SEQ ID NO: 69972 - DNA, 120 bp, Artificial Sequence
  ENSG00000076641_30 (sequence is synthesized)
gctcagagtaagagctcagcctggtttgaatttaatcatctctttagatcttataaggccagcattaggaaacttgttcacttttcattttcaaaggagcctagttgaagtgctattatg

SEQ ID NO: 69973 - DNA, 120 bp, Artificial Sequence
  ENSG00000076641_31 (sequence is synthesized)
agtgtgggctatggaaagacagcttttcctacactgataaagaaaaaaaatgaggaaattatttcatccccttgtgacatctgtgactttttggatttaataatcttgctgtttttcctc

SEQ ID NO: 69974 - DNA, 120 bp, Artificial Sequence
  ENSG00000076641_32 (sequence is synthesized)
tttatgacaaagaatataattgggaggatgaagtgtcttaaaaattgtagagaccagctcactggaatgtttttccatccctgtattcatggcttgactttgtgactgctctacactgca

SEQ ID NO: 69975 - DNA, 120 bp, Artificial Sequence
  ENSG00000076641_33 (sequence is synthesized)
tgtctgacattgcagagtgagctatgttgaggtaaactggttggttgtcattattttgcaatcagcctggtctctcccatgaagatgtcgtgtgcataagcacaatcatcactgattaga

SEQ ID NO: 69976 - DNA, 120 bp, Artificial Sequence
  ENSG00000076641_34 (sequence is synthesized)
agatcacagcagaatacccttggattagagagaagttcgtaccttgcatttctctgaattctagtctctcataagcactgctttgctggatgattttcactgctttgtgttaatgacttt

SEQ ID NO: 69977 - DNA, 120 bp, Artificial Sequence
  ENSG00000076641_35 (sequence is synthesized)
gagcgatctctcacatgatggggttctttagtacatggtaacagccatgtcatcttacacacctagcattgtgaatgctgtagtgacatcctttataggcaccttacagctcaaaacttt

SEQ ID NO: 69978 - DNA, 120 bp, Artificial Sequence
  ENSG00000076641_36 (sequence is synthesized)
tagtgacatcctttataggcaccttacagctcaaaacttttgtttcatttcatgccttacttatcaaaaaggcaggaaagtaggtatgatctctaaagtaaaaaaaaaaaaaaaaaaaaa

SEQ ID NO: 69979 - DNA, 120 bp, Artificial Sequence
  ENSG00000076641_37 (sequence is synthesized)
aattttgttaccaaaatttcccccaagagttttcaaatattagttctgcaatgtggctatgaaatatgcactgaaatataccttttaatttgagaaccagtggttagaataagctgtgat

SEQ ID NO: 69980 - DNA, 120 bp, Artificial Sequence
  ENSG00000076641_38 (sequence is synthesized)
ataaagtattttcagtgtacttttaaaggaactataaggccctccagcataaacgctaaaagaatagatggtagcacaggccatgagggctgggggagagaagcagagtgaaccttagaa

SEQ ID NO: 69981 - DNA, 120 bp, Artificial Sequence
  ENSG00000076641_39 (sequence is synthesized)
agatggctcagctatttggagcactggatattttactgaagttatttactgaggcaccatcactgttttgactgtacagtatagtttttcataaatttcatcacatttactttgttcaga

SEQ ID NO: 69982 - DNA, 120 bp, Artificial Sequence
  ENSG00000076641_40 (sequence is synthesized)
atctgggcttgaatctttgagttggacaaaagcctatggtttcttttaaaaagtttcatcttgagctaatgctacagtttaaataaaatgtatgaaaggtagttatcaaaaacaatttgt

SEQ ID NO: 69983 - DNA, 120 bp, Artificial Sequence
  ENSG00000076641_41 (sequence is synthesized)
ttaaaattctattttgacatccattttttacagcgaattatagcaggttatgtgaaatttaaaaataaattttaggaaatttttttatcttgtaagtaagaattataaatctatctcagt

SEQ ID NO: 69984 - DNA, 120 bp, Artificial Sequence
  ENSG00000076641_42 (sequence is synthesized)
cagttaaaagtaggatctttgtttttattcagatattttgaaagtttagaagcattttgtatgctactttggtatttcttaagtatagtcagcaggaaagggtaacctgttttatgcaaa

SEQ ID NO: 69985 - DNA, 120 bp, Artificial Sequence
  ENSG00000076641_43 (sequence is synthesized)
atttttttaatttgtcaaatgtttttagtgtgtctactttctgaaatagtctcaatatcctgtctgtatcctaggcagataactacacaagaacaaaacgctatatagaaaagaaaatat

SEQ ID NO: 69986 - DNA, 120 bp, Artificial Sequence
  ENSG00000076641_44 (sequence is synthesized)
ttctgtcctgaataaattacatcattaggtctgttgaagcttttgaagctaccactattctttctgggataaaggctaattactgatttatctgccctcaaaatcccagagttaattcta

SEQ ID NO: 69987 - DNA, 120 bp, Artificial Sequence
  ENSG00000076641_45 (sequence is synthesized)
attgagtactaaattaacagtaagtagttaacacagagaactaaaatttaaccgcattatatcactgtatatatttctcatgatttttgctaattagagcatttacttaaccagtaataa

SEQ ID NO: 69988 - DNA, 120 bp, Artificial Sequence
  ENSG00000076641_46 (sequence is synthesized)
cacacacacacacacacacacgtatacgtgtgtgtgtgtatatacttggctctgacacaactctggtgcttaattaggatatgttctattatgtattttgaatgtttatcctgctagtgt

SEQ ID NO: 69989 - DNA, 120 bp, Artificial Sequence
  ENSG00000076641_47 (sequence is synthesized)
gctagtgtgatgaacttttgttggaaaagcagaattagaaggaacagtttttcaatcagtttcatttggtaattacaggaaaaccttgagttgctctaatttaatttttccaattaatac

SEQ ID NO: 69990 - DNA, 120 bp, Artificial Sequence
  ENSG00000076641_48 (sequence is synthesized)
atttagactttaaattgcatccgtaattctcttggctgaaaaacagtggtattttaagacagttttgttatacatgtgacttacttttgactcagcctgagaggaggaaatgtaaagaga

SEQ ID NO: 69991 - DNA, 120 bp, Artificial Sequence
  ENSG00000076641_49 (sequence is synthesized)
taagagatttggcccaaagcagcaagagactagtaaccttgagccaggacgaagccaagacaacgtgactcccaagtagcaggagcagaggtcggtcacctgtggcattctgtttcattc

SEQ ID NO: 69992 - DNA, 120 bp, Artificial Sequence
  ENSG00000076641_50 (sequence is synthesized)
ccttttaaaattatgagactttataggcagtgtaaaacatcagcaggcagcgatgtgataggatgtgcgaaaaagctggtctgataccatggctataattacagagctttagttcaatta

SEQ ID NO: 69993 - DNA, 120 bp, Artificial Sequence
  ENSG00000076641_51 (sequence is synthesized)
ggattttgtaaatgagcaaatgacctttttttccagtgccccttgtaatagttaatatgagtccatgcaatcttgtgatgccattctcctgaaggtgttgatttctggtacccagccagc

SEQ ID NO: 69994 - DNA, 120 bp, Artificial Sequence
  ENSG00000076641_52 (sequence is synthesized)
ttagctttggctgctggaagcacagtaggtactgatgattacttcctggaaatcttgacaggcttattgtactgtgtaatggggaaaagttaaagtataatgtttggtgttaataaatga

SEQ ID NO: 69995 - DNA, 120 bp, Artificial Sequence
  ENSG00000076641_53 (sequence is synthesized)
ctgatgtgaaaataggaacatgtgtctttaatatcaaatatggctttatttgcagtgaaatctaaattccttattctacagtagtattttcttgccctgtgttgtatattttcctaaata

SEQ ID NO: 69996 - DNA, 120 bp, Artificial Sequence
  ENSG00000076641_54 (sequence is synthesized)
catttttcctgacagtggctttaggccagttgaacacacttagactgaaagtgtttaacttaaagagatcagtccagaaaccatgataaattagaatctttatctggaattaccaaatta

SEQ ID NO: 69997 - DNA, 120 bp, Artificial Sequence
  ENSG00000076641_55 (sequence is synthesized)
aaatttaaaatcatggtccagaagagaacaaacattcatggttttttttatcctactgctcatttttaggtctgtgtttacatctagtctctactatttgtgaagtatgtcattattttt

SEQ ID NO: 69998 - DNA, 120 bp, Artificial Sequence
  ENSG00000076641_56 (sequence is synthesized)
ttcaagttcttctttgacttaactgaaaaataatattccaaattcttaatgtaacatgaaaagagaaatacaatttttgcttaaaagacattttttaaaaagcgttcaattcagtaatca

SEQ ID NO: 69999 - DNA, 120 bp, Artificial Sequence
  ENSG00000076641_57 (sequence is synthesized)
tttctgttaatacaggaagtttttttggcttgccagttatatactgtgggtattttttaaaatgtgctacccttgggttgtctcatatcaccttgcgtaatcatgtattacaaaggttga

SEQ ID NO: 70000 - DNA, 120 bp, Artificial Sequence
  ENSG00000076641_58 (sequence is synthesized)
taattgtcatttctcagatgtctgtatgttacattggcagcagtaaaatgttttaatgttgttaccttttaaataattgtgttgtattaacatgcctcatattttctggggaaacttgaa

SEQ ID NO: 70001 - DNA, 120 bp, Artificial Sequence
  ENSG00000076641_59 (sequence is synthesized)
atatatctaaacaaaaaaggtctgttataaataggaattggcatttcattgttaatgttttttcctcataaaaatagttacaccaaaagtgacatattgtctattacatgggcccaatca

SEQ ID NO: 70002 - DNA, 120 bp, Artificial Sequence
  ENSG00000076641_60 (sequence is synthesized)
gtattaaagtactccccttactcaaaaatattaaaaaataattcatgacacttagtagcattttcattgattgtttcaaaagatcttcataatggtcaaattgtccaattcacaaaagag

SEQ ID NO: 70003 - DNA, 120 bp, Artificial Sequence
  ENSG00000076641_61 (sequence is synthesized)
tgagaaagttgttttcagtactgggaatttttaaaccttagttttaagaccaaaaatatctcttattagcttgaacattttgtgattacttttccctccccggatctagtccttttaagg

SEQ ID NO: 70004 - DNA, 120 bp, Artificial Sequence
  ENSG00000076641_62 (sequence is synthesized)
agtaagtctaaagaatgaggccatgaagtcactatttcctcccacctcagtttgtctcctggtacttagctggcctatcgctttgtgtggcaatacccctgggtcgcttccccactcagc

SEQ ID NO: 70005 - DNA, 120 bp, Artificial Sequence
  ENSG00000076641_63 (sequence is synthesized)
cttctgtatctgctgttcacaggacatgccattatgtctttccagtacggatcacagtgctgccatatcacagaccctgccagccggcacagaaccatgcctcgtcacagctctgcccaa

SEQ ID NO: 70006 - DNA, 120 bp, Artificial Sequence
  ENSG00000076641_64 (sequence is synthesized)
ctcacaggctgccaagatgaggccacaggtccacctagggcggcagatgctggtgctatttgtcacgacttttgccaaaacatgtacactgttgctcacatctttcgtaagaatggttga

SEQ ID NO: 70007 - DNA, 120 bp, Artificial Sequence
  ENSG00000076641_65 (sequence is synthesized)
cactaaggggccatggaaaagcacttttaaaaaattatgtggtggaatcaaactcacagaggcagaaatgttagtgccgtgctctaaccaagtaagcttagtgttccccacagtgatctg

SEQ ID NO: 70008 - DNA, 120 bp, Artificial Sequence
  ENSG00000076641_66 (sequence is synthesized)
tatctggcctgagtctcctcaagcagcaacccccactgtccagcatgtggaaggtagatccttatgacaacaccagacccatagttaccaggaaagaaaaaggaagctgagtgttgtgaa

SEQ ID NO: 70009 - DNA, 73 bp, Artificial Sequence
  ENSG00000076641_67 (sequence is synthesized)
atagttaccaggaaagaaaaaggaagctgagtgttgtgaaggggaagaaatcctttttataagaagtaatcat

SEQ ID NO: 70010 - DNA, 60 bp, Artificial Sequence
  ENSG00000076641_68 (sequence is synthesized)
aaaaacctttttaaagtaaattgagtgtaaaatgttttcaccatgaagccattgcaccct

SEQ ID NO: 70011 - DNA, 120 bp, Artificial Sequence
  ENSG00000076641_69 (sequence is synthesized)
ttgagtgtaaaatgttttcaccatgaagccattgcaccctctcccccaggaaacagtgcctaaggatgatgtcaagttacagccagtttgctctgatcccccaggacctaagaaaactgt

SEQ ID NO: 70012 - DNA, 120 bp, Artificial Sequence
  ENSG00000076641_70 (sequence is synthesized)
gagtgcttcagcatgcaaaggtagagctaccagataaggagaataacttggccatttatagcaaactgcctgactttggagtgagaaaccaagcaccttctaggtcctaggataggtgaa

SEQ ID NO: 70013 - DNA, 120 bp, Artificial Sequence
  ENSG00000076641_71 (sequence is synthesized)
ttggaggtgcagctgctgaagttcccattttctacatacttcaggagccagggtgtttcatttggttttgtaaaactttgctgtaagtcatcacagttaattctttgaatggacatttta

SEQ ID NO: 70014 - DNA, 120 bp, Artificial Sequence
  ENSG00000076641_72 (sequence is synthesized)
gagtgtaactttttttcaaaattagcagaacagatatctctgctcattctctttatacatttagttttttaaagttcccctagtatacctgttaggcactctaaataggacacagttaaa

SEQ ID NO: 70015 - DNA, 120 bp, Artificial Sequence
  ENSG00000076641_73 (sequence is synthesized)
gctaaaagaaggaccagttgctccctagagcctacagttcagaactatcttgttgtcatgtcctggtttggtttggtttgtttttaactcaacaagttggaaaccatgagtttaaagcaa

SEQ ID NO: 70016 - DNA, 120 bp, Artificial Sequence
  ENSG00000076641_74 (sequence is synthesized)
actatttccttttcttaagcttaaagagaattttttttttaatctttagctcctcatttaggtagtgaaggcttccctgaaagacagcagtgcccttctctggaagaagaggctgggacc

SEQ ID NO: 70017 - DNA, 120 bp, Artificial Sequence
  ENSG00000076641_75 (sequence is synthesized)
aaaagcctgagtctatgggttgaggattttgagcattcctttgacaagcttctatgtatttttaatataagactcataaatgaacctgatgtggtgttcatgacccatcccttaagcatg

SEQ ID NO: 70018 - DNA, 120 bp, Artificial Sequence
  ENSG00000076641_76 (sequence is synthesized)
cttgctttttttaactttactttttgagtatagtacttgtcttgtttttcctggagccatgctaggatttaattcctatgtgccactacccgcccatgtcctggaagatggccatgcctg

SEQ ID NO: 70019 - DNA, 120 bp, Artificial Sequence
  ENSG00000076641_77 (sequence is synthesized)
cagcaatgctcatgtcttgaggagaagcaatgtgaaaagcatcaggaaagctgaaccttacgttcaagtcagcaaacatttgtgagcattctagtatgcttgcgaccttgacacttttta

SEQ ID NO: 70020 - DNA, 120 bp, Artificial Sequence
  ENSG00000076641_78 (sequence is synthesized)
aaaattatctttttatttgcttcgagtatcaaccgtatagttgactctagtggggcgaagggagcagagatgagagcaaaattcagacttgctgcccctgtgtgtctcagttctcatgtc

SEQ ID NO: 70021 - DNA, 120 bp, Artificial Sequence
  ENSG00000076641_79 (sequence is synthesized)
tctctgagaaatgtgttggcccaattccctatctgccactctgagtctcttgagtaaatgtgtgtaaatgagaaaaattatctcaaagatttaacttattatttagatattttcttcttt

SEQ ID NO: 70022 - DNA, 120 bp, Artificial Sequence
  ENSG00000076641_80 (sequence is synthesized)
ttaaactcaggaataaacctggtttgtagataatataatatggctactagagctataattgagtaggtgactagaagcattttttcaaatatatttcttgtaaagacatctactttgttt

SEQ ID NO: 70023 - DNA, 120 bp, Artificial Sequence
  ENSG00000076641_81 (sequence is synthesized)
taactaggaaaagaaactcctcatattaaaataaacatttccataagcactttctagaagagtgtagcatccatctaccatccatcccagaatgtttgtatcttgctcatagtatttcaa

SEQ ID NO: 70024 - DNA, 120 bp, Artificial Sequence
  ENSG00000076641_82 (sequence is synthesized)
aaatttttatgggtgaaaaaaatgcacttttttatttattggaaaagtgtagagttattgaattaaattctcaagtgggacaatttagtgtaaagggaaacatgggttttggagacaaga

SEQ ID NO: 70025 - DNA, 120 bp, Artificial Sequence
  ENSG00000076641_83 (sequence is synthesized)
gcacagggctgtggtccctgttccagcattgactttactatgtgacctcgagcaaatgatttaacttctctgtgcctcagtttctccatatacaaaatggggataatgatactaaccatt

SEQ ID NO: 70026 - DNA, 120 bp, Artificial Sequence
  ENSG00000076641_84 (sequence is synthesized)
gcctacctcatagagatgttatggggacaaacgaaataatagagataagcacgaatgctttcaactcttcggaagaaaggtgctatataaattgaagttgtgtttttaatgatccaatta

SEQ ID NO: 70027 - DNA, 120 bp, Artificial Sequence
  ENSG00000076641_85 (sequence is synthesized)
ttaattatgtttagggtttaaataacaatactgttagtcatgttaagaataagttttgttttgatgcatatttccacttctcttctgtggccagatcttgatcattcaaccagtaatggt

SEQ ID NO: 70028 - DNA, 120 bp, Artificial Sequence
  ENSG00000076641_86 (sequence is synthesized)
acctgaggaactgaaatgggtatttgttttcgtatgtttctgccagtagtatttcaattgaatatccagaaaagactggagtttaacttgtaatatcttatagtttacatgtaataaaac

SEQ ID NO: 70029 - DNA, 120 bp, Artificial Sequence
  ENSG00000076641_87 (sequence is synthesized)
ttattcaagctatatataaaagtatgattacatgtaaatagcaggtatgttgtaattaaaggcacttatcaaattgtctttgttcttttttaattgtaataaaagtcagttttacataaa

SEQ ID NO: 70030 - DNA, 120 bp, Artificial Sequence
  ENSG00000076641_88 (sequence is synthesized)
gtctcatacagacctagagtgacataagagaaagagagagagggagagagagagaagaaagcagtgctgttggggtatcctgcagcctcttctaaatgtgttaccaggagaatgccatca

SEQ ID NO: 70031 - DNA, 120 bp, Artificial Sequence
  ENSG00000076650_0 (sequence is synthesized)
ccggaagagcaggatggcggcgcgggacagtgacagcgaagaagatctggtcagctatgggaccgggctggagcctctggaagaaggtgaaagaccaaagaaaccaatccctcttcagga

SEQ ID NO: 70032 - DNA, 120 bp, Artificial Sequence
  ENSG00000076650_1 (sequence is synthesized)
tcagactgtcagagatgaaaaaggaaggtataaacgattccacggggcctttagtggaggtttctctgctggatacttcaatactgttggctcaaaagaaggatggacaccctctacctt

SEQ ID NO: 70033 - DNA, 120 bp, Artificial Sequence
  ENSG00000076650_2 (sequence is synthesized)
tgtgtcttcacgacagaacagagcagacaaatctgttcttggtcctgaagattttatggatgaagaggatcttagtgaatttgggatagcacctaaagcgattgtcaccacagacgattt

SEQ ID NO: 70034 - DNA, 120 bp, Artificial Sequence
  ENSG00000076650_3 (sequence is synthesized)
tgcctccaaaaccaaagacagaatacgagaaaaggctaggcagttggccgctgctactgcccctattcctggagccaccctccttgatgacctcataacgccagcaaaattatctgttgg

SEQ ID NO: 70035 - DNA, 120 bp, Artificial Sequence
  ENSG00000076650_4 (sequence is synthesized)
tttcgaattgctaagaaaaatgggttggaaagaaggacaaggagttggtcctcgagtaaagagacggccacgccgacagaaacctgatcctggagtcaaaatctatggctgtgcattacc

SEQ ID NO: 70036 - DNA, 120 bp, Artificial Sequence
  ENSG00000076650_5 (sequence is synthesized)
ccctggaagctcggaaggatctgagggtgaagatgatgactacttgcctgataatgtgacctttgcacccaaagatgtcacacctgtggatttcacacctaaagataatgtgcatggtct

SEQ ID NO: 70037 - DNA, 120 bp, Artificial Sequence
  ENSG00000076650_6 (sequence is synthesized)
agcttacaagggcctggatccccaccaggcactgtttggaacttcgggagaacattttaatcttttcagtggtggttctgagagagctggcgatcttggagaaattggactgaataaagg

SEQ ID NO: 70038 - DNA, 120 bp, Artificial Sequence
  ENSG00000076650_7 (sequence is synthesized)
aagaaaattgggaatttcaggccaggcttttggtgtaggtgccctggaagaggaagatgatgatatctatgccacagaaactctatccaagtatgacactgttctgaaggacgaggagcc

SEQ ID NO: 70039 - DNA, 120 bp, Artificial Sequence
  ENSG00000076650_8 (sequence is synthesized)
tggagacggactctatggctggacagcacccaggcagtataaaaaccagaaagaatcagagaaagaccttcggtacgttggcaaaattttggatggattttccttggcttctaaaccttt

SEQ ID NO: 70040 - DNA, 120 bp, Artificial Sequence
  ENSG00000076650_9 (sequence is synthesized)
atcttctaagaaaatctatccacctccagagctgccaagagactatcgaccagtgcattatttcagacccatggtggccgccacctccgagaactcacacttactgcaggtattatcaga

SEQ ID NO: 70041 - DNA, 120 bp, Artificial Sequence
  ENSG00000076650_10 (sequence is synthesized)
gtcagctggaaaggcaacgcctgacccagggacacacagtaagcaccaactgaatgcctccaaacgggctgagttgcttggagagacgcctattcaaggttcagctacttcagtgttaga

SEQ ID NO: 70042 - DNA, 120 bp, Artificial Sequence
  ENSG00000076650_11 (sequence is synthesized)
atttctgtcccaaaaagacaaagagagaatcaaagaaatgaagcaggcaactgacctgaaagcagctcagctcaaggccaggagtctggcccagaacgctcagagcagcagagcccagct

SEQ ID NO: 70043 - DNA, 120 bp, Artificial Sequence
  ENSG00000076650_12 (sequence is synthesized)
ctcccctgcagcggctgctgggcactgctcttggaacatggcattaggtggtgggacggccaccttaaaagccagcaacttcaagcctttcgccaaagatccggaaaagcaaaagcgata

SEQ ID NO: 70044 - DNA, 120 bp, Artificial Sequence
  ENSG00000076650_13 (sequence is synthesized)
cagagtgggagcgaggccgtgagcgggatgagtttgcccgggcggccctgctgtacgcatcttcccattcgaccttgtcctccaggttcactcacgccaaggaggaggatgactcagatc

SEQ ID NO: 70045 - DNA, 120 bp, Artificial Sequence
  ENSG00000076650_14 (sequence is synthesized)
aggttgaagtccctcgagaccaagagaatgatgtcggggataagcagtcggctgtgaagatgaagatgtttgggaagctcacccgagacacgtttgagtggcaccctgacaagcttctat

SEQ ID NO: 70046 - DNA, 120 bp, Artificial Sequence
  ENSG00000076650_15 (sequence is synthesized)
gtaagagatttaatgtccctgacccttatccagattcaactttagttggcttaccaagagtgaagcgtgacaagtactcagtcttcaactttctgacgctcccagagacagcttccttgc

SEQ ID NO: 70047 - DNA, 120 bp, Artificial Sequence
  ENSG00000076650_16 (sequence is synthesized)
ccaccactcaagcatcaagtgaaaaagtatcacagcaccgaggtcccgacaaatcaagaaaaccatccagatgggatacctctaaacacgaaaagaaagaagattccattagtgaatttt

SEQ ID NO: 70048 - DNA, 120 bp, Artificial Sequence
  ENSG00000076650_17 (sequence is synthesized)
taagtttggctagatcaaaagccgagccacctaaacaacagtccagccccttagtaaacaaagaggaagagcatgcaccagaattatccgcaaatcagaccgtcaacaaagatgtggacg

SEQ ID NO: 70049 - DNA, 120 bp, Artificial Sequence
  ENSG00000076650_18 (sequence is synthesized)
cacaggctgaaggagaagggagccgcccatccatggacttattcagggccatctttgccagttcctcagatgaaaagtcctcatcctccgaggatgagcaaggtgacagtgaagatgatc

SEQ ID NO: 70050 - DNA, 120 bp, Artificial Sequence
  ENSG00000076650_19 (sequence is synthesized)
aggcaggctctggggaggccaacttccaaagctcccaagacactgacttgggggaaacatcatctgtggctcacgctcttgtgccagcaccccaggagccgccaccttccttcccgatac

SEQ ID NO: 70051 - DNA, 120 bp, Artificial Sequence
  ENSG00000076650_20 (sequence is synthesized)
aaaagatgcagatagatgaaagagaagagttcggcccgcggctgcctcccgtcttctgccccaatgctcgtcagacacttgaggttcctcaaaaagagaaacataaaaagaacaaagaca

SEQ ID NO: 70052 - DNA, 120 bp, Artificial Sequence
  ENSG00000076650_21 (sequence is synthesized)
agcacaaggccaagaaagagcacaggcggaagaaagagaagaaaaagaaacacaggaagcacaaacacaaaggcaagcaaaagaataaaaaaccagagaaaagtagtagctccgagagtt

SEQ ID NO: 70053 - DNA, 120 bp, Artificial Sequence
  ENSG00000076650_22 (sequence is synthesized)
ccgacagcagcgacagccagagtgacgaggaaaccgcagacgtgtcgccccaggagctgctgagacggctgaaaagtcttccactaagaaggcagtaattgaatgctgccctggctcgtc

SEQ ID NO: 70054 - DNA, 120 bp, Artificial Sequence
  ENSG00000076650_23 (sequence is synthesized)
ctagaatcatttctcctccatgatggaagcccagtgattgttcagttaacgcattgtacagagtgtatttatatgtaaattcctgctgtaaaataatttttaaaaccttgacatttcaaa

SEQ ID NO: 70055 - DNA, 120 bp, Artificial Sequence
  ENSG00000076650_24 (sequence is synthesized)
gactgccttgaaaggtcgcagaaattgatttctatttttaatttcagttagtatcgggggaaaaaaatccagactgaacagtttaattaaagtggaatttttctattttcttcttgattt

SEQ ID NO: 70056 - DNA, 120 bp, Artificial Sequence
  ENSG00000076650_25 (sequence is synthesized)
ttaaaaaatttcctgggacgttaaaaaagaagttaaaagtgaaggcttctctctggttttgtgatgaagacagcctggactcactgaaggacaagcgtgtgagaaggggcggttgcggcc

SEQ ID NO: 70057 - DNA, 120 bp, Artificial Sequence
  ENSG00000076650_26 (sequence is synthesized)
gcagggaacagttgggtggcttccagcttatgccaggagtctcctcctcacccgcacatcgcggggctaggatgggatgtcgtggctgccaaatcctccgaggcaactcctgcctgggac

SEQ ID NO: 70058 - DNA, 120 bp, Artificial Sequence
  ENSG00000076650_27 (sequence is synthesized)
ggcctaccacaggatgggcctgagaatccggagcgcaggctcgggccgctaggacaccttcccccgcccgcggacccagccttccagcatcaccggggttcgcggaggagaaagaggaaa

SEQ ID NO: 70059 - DNA, 120 bp, Artificial Sequence
  ENSG00000076650_28 (sequence is synthesized)
ggagacggactctatggctggacagcacccaggcagtataaaaaccagaaagaattcttcagaatgaactcataaacatgaaatttctgggttttgagataatacaagttccaagaatgt

SEQ ID NO: 70060 - DNA, 120 bp, Artificial Sequence
  ENSG00000076650_29 (sequence is synthesized)
ttttaaattatcattataaaagttaaacactttcttatttgattaataacacttcaagaggtggggtgtggtggtgcacacttgtaatcctagcttgggaggccaaggcaggaggatcgc

SEQ ID NO: 70061 - DNA, 120 bp, Artificial Sequence
  ENSG00000076650_30 (sequence is synthesized)
ttgagcccaggagttcgaggccagcccgggtaacatagtaagaccccatctctaaaaaatcaaacaaacaaacaaacaaacagaacacttcaagatagtaggccgggtgcaatggctcac

SEQ ID NO: 70062 - DNA, 120 bp, Artificial Sequence
  ENSG00000076650_31 (sequence is synthesized)
gtgacaaggcgagactcaatctcaagagaaaaaaaaacaaaacaaaaagatagcatatgtggtcaaaccagagactgtcagaaactttaggtatatttttatcagtggagcttttcctta

SEQ ID NO: 70063 - DNA, 120 bp, Artificial Sequence
  ENSG00000076650_32 (sequence is synthesized)
atggaaatccattttgaaagttaaattcttgtccttatcataataaggaaaatctcatgggacctaaaatcagtcacccagattctcgaactgctttgagaagtgaaagcatcttaggag

SEQ ID NO: 70064 - DNA, 120 bp, Artificial Sequence
  ENSG00000076650_33 (sequence is synthesized)
actttttagtcatgcagaagaggtggaaaacttgagatggaaagcttttcaggaggtggattttgtcctactggttgttactaaaatgattcttttttcaattcccagttcaactttagt

SEQ ID NO: 70065 - DNA, 120 bp, Artificial Sequence
  ENSG00000076662_0 (sequence is synthesized)
ctctgtcagaatggccaccatggtaccatccgtgttgtggcccagggcctgctggactctgctggtctgctgtctgctgaccccaggtgtccaggggcaggagttccttttgcgggtgga

SEQ ID NO: 70066 - DNA, 120 bp, Artificial Sequence
  ENSG00000076662_1 (sequence is synthesized)
gccccagaaccctgtgctctctgctggagggtccctgtttgtgaactgcagtactgattgtcccagctctgagaaaatcgccttggagacgtccctatcaaaggagctggtggccagtgg

SEQ ID NO: 70067 - DNA, 120 bp, Artificial Sequence
  ENSG00000076662_2 (sequence is synthesized)
catgggctgggcagccttcaatctcagcaacgtgactggcaacagtcggatcctctgctcagtgtactgcaatggctctcagataacaggctcctctaacatcaccgtgtacaggctccc

SEQ ID NO: 70068 - DNA, 120 bp, Artificial Sequence
  ENSG00000076662_3 (sequence is synthesized)
ggagcgtgtggagctggcacccctgcctccttggcagccggtgggccagaacttcaccctgcgctgccaagtggaggatgggtcgccccggaccagcctcacggtggtgctgcttcgctg

SEQ ID NO: 70069 - DNA, 120 bp, Artificial Sequence
  ENSG00000076662_4 (sequence is synthesized)
ggaggaggagctgagccggcagcccgcagtggaggagccagcggaggtcactgccactgtgctggccagcagagacgaccacggagcccctttctcatgccgcacagaactggacatgca

SEQ ID NO: 70070 - DNA, 120 bp, Artificial Sequence
  ENSG00000076662_5 (sequence is synthesized)
gccccaggggctgggactgttcgtgaacacctcagccccccgccagctccgaacctttgtcctgcccgtgacccccccgcgcctcgtggccccccggttcttggaggtggaaacgtcgtg

SEQ ID NO: 70071 - DNA, 120 bp, Artificial Sequence
  ENSG00000076662_6 (sequence is synthesized)
gccggtggactgcaccctagacgggctttttccagcctcagaggcccaggtctacctggcgctgggggaccagatgctgaatgcgacagtcatgaaccacggggacacgctaacggccac

SEQ ID NO: 70072 - DNA, 120 bp, Artificial Sequence
  ENSG00000076662_7 (sequence is synthesized)
gtgaccctagggggcgagagacgggaggcccgggagaacttgacggtctttagcttcctaggacccattgtgaacctcagcgagcccaccgcccatgaggggtccacagtgaccgtgagt

SEQ ID NO: 70073 - DNA, 120 bp, Artificial Sequence
  ENSG00000076662_8 (sequence is synthesized)
tgcatggctggggctcgagtccaggtcacgctggacggagttccggccgcggccccggggcagccagctcaacttcagctaaatgctaccgagagtgacgacggacgcagcttcttctgc

SEQ ID NO: 70074 - DNA, 120 bp, Artificial Sequence
  ENSG00000076662_9 (sequence is synthesized)
agtgccactctcgaggtggacggcgagttcttgcacaggaacagtagcgtccagctgcgagtcctgtatggtcccaaaattgaccgagccacatgcccccagcacttgaaatggaaagat

SEQ ID NO: 70075 - DNA, 120 bp, Artificial Sequence
  ENSG00000076662_10 (sequence is synthesized)
aaaacgagacacgtcctgcagtgccaagccaggggcaacccgtaccccgagctgcggtgtttgaaggaaggctccagccgggaggtgccggtggggatcccgttcttcgtcaacgtaaca

SEQ ID NO: 70076 - DNA, 120 bp, Artificial Sequence
  ENSG00000076662_11 (sequence is synthesized)
cataatggtacttatcagtgccaagcgtccagctcacgaggcaaatacaccctggtcgtggtgatggacattgaggctgggagctcccactttgtccccgtcttcgtggcggtgttactg

SEQ ID NO: 70077 - DNA, 120 bp, Artificial Sequence
  ENSG00000076662_12 (sequence is synthesized)
accctgggcgtggtgactatcgtactggccttaatgtacgtcttcagggagcaccaacggagcggcagttaccatgttagggaggagagcacctatctgcccctcacgtctatgcagccg

SEQ ID NO: 70078 - DNA, 120 bp, Artificial Sequence
  ENSG00000076662_13 (sequence is synthesized)
acagaagcaatgggggaagaaccgtccagagctgagtgacgctgggatccgggatcaaagttggcgggggcttggctgtgccctcagattccgcaccaataaagccttcaaactccctaa

SEQ ID NO: 70079 - DNA, 120 bp, Artificial Sequence
  ENSG00000076662_14 (sequence is synthesized)
aaggcaccttcctctgtcagaatggccaccatggtaccatccgtgttgtggcccagggcctgctggactctgctggtctgctgtctgctgaccccagccttcagtttcgggctgcaatgg

SEQ ID NO: 70080 - DNA, 120 bp, Artificial Sequence
  ENSG00000076662_15 (sequence is synthesized)
tccccgcttccaggaagccttccctgactcacctcctcctatgctggatcagagcctcttctggcctccttctgagttctccccggtctctgatggattctacctttcccactggaccat

SEQ ID NO: 70081 - DNA, 120 bp, Artificial Sequence
  ENSG00000076662_16 (sequence is synthesized)
ctgaccttggggttcctgagagtggggtaccccggacctcacaggcttctgggaaggaaagcccccggccactgggcaaggtggccccggaagggaggcccgagccgtgggatctttgaa

SEQ ID NO: 70082 - DNA, 120 bp, Artificial Sequence
  ENSG00000076662_17 (sequence is synthesized)
gaaggccgttttcatggccctgtgtgtgtgtcctgtgaagaagggtgacccagtcagcaagatatcctgactgggggggatgagggtgtcctggggaaggcacagtcctgggggttgtac

SEQ ID NO: 70083 - DNA, 120 bp, Artificial Sequence
  ENSG00000076662_18 (sequence is synthesized)
tcagaatggccaccatggtaccatccgtgttgtggcccagggcctgctggactctgctggtctgctgtctgctgaccccaggatcacctgtccctttcacttgctaactcctacttagcc

SEQ ID NO: 70084 - DNA, 120 bp, Artificial Sequence
  ENSG00000076662_19 (sequence is synthesized)
ctctgtcagaatggccaccatggtaccatccgtgttgtggcccagggcctgctggactctgctggtctgctgtctgctgaccccagtactgattgtcccagctctgagaaaatcgccttg

SEQ ID NO: 70085 - DNA, 120 bp, Artificial Sequence
  ENSG00000076662_20 (sequence is synthesized)
acggtctttagtaagaggaggcgtgggaagggggcgcggcctcagcagtctgggggcgtggcagagggggcggagactagccgaaaaggtggggcctggcttgccccaatagcagttgca

SEQ ID NO: 70086 - DNA, 120 bp, Artificial Sequence
  ENSG00000076662_21 (sequence is synthesized)
acgtgggttgggcctgagtgcccgaagctggacacagcgcggaaagagggcgaggcttgaacggccgaaagcgtggcccggatatcccgagaggaaaggggagggcggagggagcggctt

SEQ ID NO: 70087 - DNA, 120 bp, Artificial Sequence
  ENSG00000076662_22 (sequence is synthesized)
agacgctcctctgcaccactgtgcctcgggtgtgttgggtgtctgatcacacatggtggttccacagatggtcccaaaattgaccgagccacatgcccccagcacttgaaatggaaagat

SEQ ID NO: 70088 - DNA, 120 bp, Artificial Sequence
  ENSG00000076685_0 (sequence is synthesized)
gggcggggagggcgcgcgttgaggcggctgcggcagttgcgcgctgggattgttgcggtgcgctggagccgaatacaaaatacagttaaaataaaatgtcaacctcctggagtgatcggt

SEQ ID NO: 70089 - DNA, 120 bp, Artificial Sequence
  ENSG00000076685_1 (sequence is synthesized)
tacagaatgcagcagatatgcctgctaacatggataagcatgccctgaaaaagtatcgtcgagaagcctatcatcgggtgtttgtgaaccgaagtttagcaatggaaaagataaagtgtt

SEQ ID NO: 70090 - DNA, 120 bp, Artificial Sequence
  ENSG00000076685_2 (sequence is synthesized)
ttggttttgatatggattatacccttgctgtgtacaagtccccagagtatgagtcccttggttttgagcttactgtggagagattagtttctattggctatccccaggagttgctcagct

SEQ ID NO: 70091 - DNA, 120 bp, Artificial Sequence
  ENSG00000076685_3 (sequence is synthesized)
ttgcttatgattctacattccctaccaggggacttgtctttgacacactgtatggaaatcttttgaaagtcgatgcctatggaaacctcttggtctgtgcacatggatttaactttataa

SEQ ID NO: 70092 - DNA, 120 bp, Artificial Sequence
  ENSG00000076685_4 (sequence is synthesized)
ggggaccagaaactagagaacagtatccaaataaatttatccagcgagatgatactgaaagattttacattctgaacacactattcaacctaccagagacctacctgttggcctgcctag

SEQ ID NO: 70093 - DNA, 120 bp, Artificial Sequence
  ENSG00000076685_5 (sequence is synthesized)
tagatttttttactaattgtcccagatataccagttgtgaaacaggatttaaagatggggacctcttcatgtcctaccggagtatgttccaggatgtaagagatgctgttgactgggttc

SEQ ID NO: 70094 - DNA, 120 bp, Artificial Sequence
  ENSG00000076685_6 (sequence is synthesized)
attacaagggctcccttaaggaaaagacagttgaaaatcttgagaagtatgtagtcaaagatggaaaactgcctttgcttctgagccggatgaaggaagtagggaaagtatttcttgcta

SEQ ID NO: 70095 - DNA, 120 bp, Artificial Sequence
  ENSG00000076685_7 (sequence is synthesized)
ccaacagtgactataaatatacagataaaattatgacttacctgtttgacttcccacatggccccaagcctgggagctcccatcgaccatggcagtcctactttgacttgatcttggtgg

SEQ ID NO: 70096 - DNA, 120 bp, Artificial Sequence
  ENSG00000076685_8 (sequence is synthesized)
atgcacggaaaccactcttttttggagaaggcacagtactgcgtcaggtggatactaaaactggcaagctgaaaattggtacctacacagggcccctacagcatggtatcgtctactcag

SEQ ID NO: 70097 - DNA, 120 bp, Artificial Sequence
  ENSG00000076685_9 (sequence is synthesized)
gaggttcttctgatacgatctgtgacctgttgggagccaagggaaaagacattttgtatattggagatcacatttttggggacattttaaaatcaaagaaacggcaagggtggcgaactt

SEQ ID NO: 70098 - DNA, 120 bp, Artificial Sequence
  ENSG00000076685_10 (sequence is synthesized)
ttttggtgattcctgaactcgcacaggagctacatgtctggactgacaagagttcacttttcgaagaacttcagagcttggatattttcttggctgaactctacaagcatcttgacagca

SEQ ID NO: 70099 - DNA, 120 bp, Artificial Sequence
  ENSG00000076685_11 (sequence is synthesized)
gtagcaatgagcgtccagacatcagttccatccagagacgtattaagaaagtaactcatgacatggacatgtgctatgggatgatgggaagcctgtttcgcagtggctcccggcagaccc

SEQ ID NO: 70100 - DNA, 120 bp, Artificial Sequence
  ENSG00000076685_12 (sequence is synthesized)
tttttgccagtcaagtgatgcgttatgctgacctctatgcagcatctttcatcaacctgctgtattaccctttcagctacctcttcagggctgcccatgtcttgatgcctcatgaatcaa

SEQ ID NO: 70101 - DNA, 120 bp, Artificial Sequence
  ENSG00000076685_13 (sequence is synthesized)
cggtggagcacacacacgtagatatcaatgagatggagtctcctcttgccacccggaaccgcacatcagtggatttcaaagacactgactacaagcggcaccagctgacacggtcaatta

SEQ ID NO: 70102 - DNA, 120 bp, Artificial Sequence
  ENSG00000076685_14 (sequence is synthesized)
aagaggaggaggaggaggaagaataaggaggaaaaccaaaaccccaagcacccattaaacaagtcctggcaggactcacaggaacaaacgaggtccctgttagggttctactcgggggag

SEQ ID NO: 70103 - DNA, 120 bp, Artificial Sequence
  ENSG00000076685_15 (sequence is synthesized)
ggagggggctccatgaaaggtacgtctgaaaagtttctgaagattttattatcatagatacttgttttggttttgtgtatctgtactctctgcagatggtccaaaattgtaatggagtct

SEQ ID NO: 70104 - DNA, 120 bp, Artificial Sequence
  ENSG00000076685_16 (sequence is synthesized)
gtattagaagaaaataagggtaaaatcaggctgaactgcatgtatatggctccactgtggcttgtgacacttttaaaatcatccgtatgtcagtgtatctggatacacgaggaaaaggaa

SEQ ID NO: 70105 - DNA, 120 bp, Artificial Sequence
  ENSG00000076685_17 (sequence is synthesized)
agagtctcagagtggaacaaagagtgggaagaggtgatctgtaatgttacaaattgtgctattactccaaggtccaacttttccagtgcattacatggtattgtatatcagtggagaaat

SEQ ID NO: 70106 - DNA, 120 bp, Artificial Sequence
  ENSG00000076685_18 (sequence is synthesized)
gtattatttccatgatcaaatgtagtctctgttaaggtcaagttttcttttataagcctttaattcatcctcagtgactctggcaaggctgcttctctatcactggctttgcacagaagt

SEQ ID NO: 70107 - DNA, 120 bp, Artificial Sequence
  ENSG00000076685_19 (sequence is synthesized)
atgctctacttgcgttgctttagggcaggattctattttgagggaaaagacagtatccttattaccttttgtttgtttaatagcacaaatgcttatttgttatccaaaaacaacctcctt

SEQ ID NO: 70108 - DNA, 120 bp, Artificial Sequence
  ENSG00000076685_20 (sequence is synthesized)
cttatctgtgataaatctatagaaagaatttagctgcaagtggacaaaggaacaagcccccagaaaagaaagggaagaactgccttcttatactacagaacatgcattagtgtgggctat

SEQ ID NO: 70109 - DNA, 120 bp, Artificial Sequence
  ENSG00000076685_21 (sequence is synthesized)
atagctgtggctcatgctacccaattccagatttctttgtcctctaagagttgattgctgtatattaaaattgaacatcagaggatgggaagagggctctgtaagccagaaccttactaa

SEQ ID NO: 70110 - DNA, 90 bp, Artificial Sequence
  ENSG00000076685_22 (sequence is synthesized)
gaggatgggaagagggctctgtaagccagaaccttactaaagtagagggcacaatcagtgtgaataaattcacttcagaatctcaagtca

SEQ ID NO: 70111 - DNA, 120 bp, Artificial Sequence
  ENSG00000076685_23 (sequence is synthesized)
gtcgaaatcacctcttgttttaaacaagaatgaatcattactgtgtatgttagggtattaaaactgtttcaccagtacagtgaaagttgtttcaacattttaaacaaacagtggttatag

SEQ ID NO: 70112 - DNA, 120 bp, Artificial Sequence
  ENSG00000076685_24 (sequence is synthesized)
actctttctttaaccattgtatattttcttccattcttgtcattggtcaataggggagggtagattagctgctccagaattcaataaagtgtaatatttctaacggtgactttgacctat

SEQ ID NO: 70113 - DNA, 120 bp, Artificial Sequence
  ENSG00000076685_25 (sequence is synthesized)
tctgtagtacaactgtaatagctattggtcttcaagtgggtttagatttggtgacatcagtttgatattctcttaaaggaaataaatattcaagaactgattatgttctaacatgattat

SEQ ID NO: 70114 - DNA, 120 bp, Artificial Sequence
  ENSG00000076685_26 (sequence is synthesized)
agctccatgcaggctctcacctcccacacggcccctctccttgccagtgtgctgcagccaccacttctgattggcttctcctgggaatgaagacggccagcagaggtgctaattgtgaca

SEQ ID NO: 70115 - DNA, 120 bp, Artificial Sequence
  ENSG00000076685_27 (sequence is synthesized)
actgagtgggagttgtgaaacaggatttaaagatggggacctcttcatgtcctaccggagtatgttccaggatgtaagagatgctgttgactgggttcattacaagggctcccttaagga

SEQ ID NO: 70116 - DNA, 120 bp, Artificial Sequence
  ENSG00000076685_28 (sequence is synthesized)
aatcccaggactttgagaggccgagataggagggttgcttgagcccaggagttcaagatgagccagagcaacatagggtgtttgtgaaccgaagtttagcaatggaaaagataaagtgtt

SEQ ID NO: 70117 - DNA, 120 bp, Artificial Sequence
  ENSG00000076685_29 (sequence is synthesized)
ttggttttgatatggattatacccttgctggagagccagtgtaactccttcaagactggagtgacacacactgcatctgcatctgcctcattgtacaagtccccagagtatgagtccctt

SEQ ID NO: 70118 - DNA, 120 bp, Artificial Sequence
  ENSG00000076685_30 (sequence is synthesized)
cttgcatctgagtgagattaaatagtaatgccttaaggtaaggagtgatgtttcaacttttgctgtttctccttcaccagcctgggagctcccatcgaccatggcagtcctactttgact

SEQ ID NO: 70119 - DNA, 120 bp, Artificial Sequence
  ENSG00000076685_31 (sequence is synthesized)
gtaagtcacagacttccctttatttaatgtctttgctcagacctcacagtgaaagctttggtaatctctcagcaaagtgccacatatactgtttagtagtctaagatgtcatctactgaa

SEQ ID NO: 70120 - DNA, 120 bp, Artificial Sequence
  ENSG00000076685_32 (sequence is synthesized)
ggtaaatagtttagtcacctcttaatgcaataggagtctgggtttgagcagttgttagtatatcctaatgaatctgattttcactaaaatgatcagttttttttttaaatcctattggag

SEQ ID NO: 70121 - DNA, 120 bp, Artificial Sequence
  ENSG00000076685_33 (sequence is synthesized)
taataacaagctgatttataatgaaatggacaaaagaagagatttgtcttggcatagtatgtgtcgggtataatcaccaagaatattcagctagagcataggtcttagtagagtttttcc

SEQ ID NO: 70122 - DNA, 120 bp, Artificial Sequence
  ENSG00000076685_34 (sequence is synthesized)
tgtttcttgataggcaagaagactcagtatttcatttttcctgtttcttgataggcaagaagactcagtattgcatttgttcgcttagcttcaattataatagcagttagaggtttactg

SEQ ID NO: 70123 - DNA, 120 bp, Artificial Sequence
  ENSG00000076685_35 (sequence is synthesized)
tatgcacatcatcaccatgctaagtgattacatgcattatgccatttaatcttctgtatgaccttgagttaggtattattgttgcctctgttttatagataaaaaacctgagaaatagag

SEQ ID NO: 70124 - DNA, 120 bp, Artificial Sequence
  ENSG00000076685_36 (sequence is synthesized)
ggattaaataacttgccagaggtcacacagttagtaagtagtaaagctaagtcacacccaaatcataactactgcactagatcatctcaaaaatgtgcatatatgttactgttatttaaa

SEQ ID NO: 70125 - DNA, 78 bp, Artificial Sequence
  ENSG00000076685_37 (sequence is synthesized)
cgtcaagtgatccattctgccactggctgaaaaagtcttattgtggcataattgaatacaaaatacagttaaaataaa

SEQ ID NO: 70126 - DNA, 78 bp, Artificial Sequence
  ENSG00000076685_38 (sequence is synthesized)
agtcttgctgtgttacccaggttgatcttgaactcttgttctcaagtgatcctcctgccttgtcgtgtttaaaataaa

SEQ ID NO: 70127 - DNA, 120 bp, Artificial Sequence
  ENSG00000076685_39 (sequence is synthesized)
gatagtaaaagtagcagaatacagtattttctcaaagtactgtggtaaagatttcttgttttcagtttttgtgcttcctattttcacccacctcccttatttcaagaaagaacactgaat

SEQ ID NO: 70128 - DNA, 120 bp, Artificial Sequence
  ENSG00000076706_0 (sequence is synthesized)
acttggctctcgccctccggccgggaagcatggggcttcccaggctggtctgcgccttcttgctcgccgcctgctgctgctgtcctcgcgtcgcgggtgtgcccggagaggctgagcagc

SEQ ID NO: 70129 - DNA, 120 bp, Artificial Sequence
  ENSG00000076706_1 (sequence is synthesized)
ctgcgcctgagctggtggaggtggaagtgggcagcacagcccttctgaagtgcggcctctcccagtcccaaggcaacctcagccatgtcgactggttttctgtccacaaggagaagcgga

SEQ ID NO: 70130 - DNA, 120 bp, Artificial Sequence
  ENSG00000076706_2 (sequence is synthesized)
cgctcatcttccgtgtgcgccagggccagggccagagcgaacctggggagtacgagcagcggctcagcctccaggacagaggggctactctggccctgactcaagtcaccccccaagacg

SEQ ID NO: 70131 - DNA, 120 bp, Artificial Sequence
  ENSG00000076706_3 (sequence is synthesized)
agcgcatcttcttgtgccagggcaagcgccctcggtcccaggagtaccgcatccagctccgcgtctacaaagctccggaggagccaaacatccaggtcaaccccctgggcatccctgtga

SEQ ID NO: 70132 - DNA, 120 bp, Artificial Sequence
  ENSG00000076706_4 (sequence is synthesized)
acagtaaggagcctgaggaggtcgctacctgtgtagggaggaacgggtaccccattcctcaagtcatctggtacaagaatggccggcctctgaaggaggagaagaaccgggtccacattc

SEQ ID NO: 70133 - DNA, 120 bp, Artificial Sequence
  ENSG00000076706_5 (sequence is synthesized)
agtcgtcccagactgtggagtcgagtggtttgtacaccttgcagagtattctgaaggcacagctggttaaagaagacaaagatgcccagttttactgtgagctcaactaccggctgccca

SEQ ID NO: 70134 - DNA, 120 bp, Artificial Sequence
  ENSG00000076706_6 (sequence is synthesized)
gtgggaaccacatgaaggagtccagggaagtcaccgtccctgttttctacccgacagaaaaagtgtggctggaagtggagcccgtgggaatgctgaaggaaggggaccgcgtggaaatca

SEQ ID NO: 70135 - DNA, 120 bp, Artificial Sequence
  ENSG00000076706_7 (sequence is synthesized)
ggtgtttggctgatggcaaccctccaccacacttcagcatcagcaagcagaaccccagcaccagggaggcagaggaagagacaaccaacgacaacggggtcctggtgctggagcctgccc

SEQ ID NO: 70136 - DNA, 120 bp, Artificial Sequence
  ENSG00000076706_8 (sequence is synthesized)
ggaaggaacacagtgggcgctatgaatgtcagggcctggacttggacaccatgatatcgctgctgagtgaaccacaggaactactggtgaactatgtgtctgacgtccgagtgagtcccg

SEQ ID NO: 70137 - DNA, 120 bp, Artificial Sequence
  ENSG00000076706_9 (sequence is synthesized)
cagcccctgagagacaggaaggcagcagcctcaccctgacctgtgaggcagagagtagccaggacctcgagttccagtggctgagagaagagacaggccaggtgctggaaagggggcctg

SEQ ID NO: 70138 - DNA, 120 bp, Artificial Sequence
  ENSG00000076706_10 (sequence is synthesized)
tgcttcagttgcatgacctgaaacgggaggcaggaggcggctatcgctgcgtggcgtctgtgcccagcatacccggcctgaaccgcacacagctggtcaacgtggccatttttggccccc

SEQ ID NO: 70139 - DNA, 120 bp, Artificial Sequence
  ENSG00000076706_11 (sequence is synthesized)
cttggatggcattcaaggagaggaaggtgtgggtgaaagagaatatggtgttgaatctgtcttgtgaagcgtcagggcacccccggcccaccatctcctggaacgtcaacggcacggcaa

SEQ ID NO: 70140 - DNA, 120 bp, Artificial Sequence
  ENSG00000076706_12 (sequence is synthesized)
gtgaacaagaccaagatccacagcgagtcctgagcaccctgaatgtcctcgtgaccccggagctgttggagacaggtgttgaatgcacggcctccaacgacctgggcaaaaacaccagca

SEQ ID NO: 70141 - DNA, 120 bp, Artificial Sequence
  ENSG00000076706_13 (sequence is synthesized)
ataccagagccaacagcacctccacagagagaaagctgccggagccggagagccggggcgtggtcatcgtggctgtgattgtgtgcatcctggtcctggcggtgctgggcgctgtcctct

SEQ ID NO: 70142 - DNA, 120 bp, Artificial Sequence
  ENSG00000076706_14 (sequence is synthesized)
atttcctctataagaagggcaagctgccgtgcaggcgctcagggaagcaggagatcacgctacccccgtctcgtaagagcgaacttgtagttgaagttaagtcagataagctcccagaag

SEQ ID NO: 70143 - DNA, 120 bp, Artificial Sequence
  ENSG00000076706_15 (sequence is synthesized)
agatgggcctcctgcagggcagcagcggtgacaagagggctccgggagaccagggagagaaatacatcgatctgaggcattagccccgaatcacttcagctcccttccctgcctggacca

SEQ ID NO: 70144 - DNA, 120 bp, Artificial Sequence
  ENSG00000076706_16 (sequence is synthesized)
ttcccagctccctgctcactcttctctcagccaaagcctccaaagggactagagagaagcctcctgctcccctcgcctgcacaccccctttcagagggccactgggttaggacctgagga

SEQ ID NO: 70145 - DNA, 120 bp, Artificial Sequence
  ENSG00000076706_17 (sequence is synthesized)
cctcacttggccctgcaaggcccgcttttcagggaccagtccaccaccatctcctccacgttgagtgaagctcatcccaagcaaggagccccagtctcccgagcgggtaggagagtttct

SEQ ID NO: 70146 - DNA, 120 bp, Artificial Sequence
  ENSG00000076706_18 (sequence is synthesized)
tgcagaacgtgttttttctttacacacattatggctgtaaatacctggctcctgccagcagctgagctgggtagcctctctgagctggtttcctgccccaaaggctggcttccaccatcc

SEQ ID NO: 70147 - DNA, 120 bp, Artificial Sequence
  ENSG00000076706_19 (sequence is synthesized)
aggtgcaccactgaagtgaggacacaccggagccaggcgcctgctcatgttgaagtgcgctgttcacacccgctccggagagcaccccagcagcatccagaagcagctgcagtgttgctg

SEQ ID NO: 70148 - DNA, 120 bp, Artificial Sequence
  ENSG00000076706_20 (sequence is synthesized)
ccaccaccctcctgtctgcctcttcaaagtctcctgtgacattttttctttggtcagaagccaggaactggtgtcattccttaaaagatacgtgccggggccaggtgtggtggctcacgc

SEQ ID NO: 70149 - DNA, 120 bp, Artificial Sequence
  ENSG00000076706_21 (sequence is synthesized)
cacagcgagactccgtctcgaggaaaaaaaaagaaaagatacgtgcctgcggtgaggaagctgggcgctgttttcgagttcaggtgaattagcctcaatcccccgtgttcacttggctcc

SEQ ID NO: 70150 - DNA, 120 bp, Artificial Sequence
  ENSG00000076706_22 (sequence is synthesized)
catagccctcttgatggatcacgtaaaactgaaaggcagcggggagcagacaaagatgaggtctacactgtccttcatggggattaaagctatggttatattagcaccaaacttctacaa

SEQ ID NO: 70151 - DNA, 120 bp, Artificial Sequence
  ENSG00000076706_23 (sequence is synthesized)
accaagctcagggccccaaccctagaagggcccaaatgagagaatggtacttagggatggaaaacgggcctggctagagcttcgggtgtgtgtgtctgtctgtgtgtatgcatacatatg

SEQ ID NO: 70152 - DNA, 120 bp, Artificial Sequence
  ENSG00000076706_24 (sequence is synthesized)
tgtctgtgtgtatgcatacatatgtgtgtatatatggttttgtcaggtgtgtaaatttgcaaattgtttcctttatatatgtatgtatatatatatatgaaaatatatatatatatgaaa

SEQ ID NO: 70153 - DNA, 120 bp, Artificial Sequence
  ENSG00000076706_25 (sequence is synthesized)
ccttcttaacactactcacagatggcagggccaagcaagtggctgagggagcttggaggaagactgagaaagaccctgtcccatcaccttttcctgaccaatgcccgtggctctgggtgt

SEQ ID NO: 70154 - DNA, 120 bp, Artificial Sequence
  ENSG00000076706_26 (sequence is synthesized)
ggccatttcaccagtgcagtcagacgggggccgccctccttccctggcctgccatgcccatcctagcttcctccccaacgctgcccaccaaattcatcggcttctgcttccatctctcct

SEQ ID NO: 70155 - DNA, 120 bp, Artificial Sequence
  ENSG00000076706_27 (sequence is synthesized)
acctagggtggggtccgcgggtgtgtgcggagtgttcatggaggtgctgctgagggagcatgagaccggaacttccgccagagttagcccgctggggagtgagggcagggattttggagg

SEQ ID NO: 70156 - DNA, 120 bp, Artificial Sequence
  ENSG00000076706_28 (sequence is synthesized)
gcagaggatagagcagtggtgtcttcccctggcggtggtgacacaaaagggcctgtgtgccccagcctggcacatgctttgcattcccacactctgagctcacccggagaggagggggcc

SEQ ID NO: 70157 - DNA, 120 bp, Artificial Sequence
  ENSG00000076706_29 (sequence is synthesized)
agagtatcccgggagcagcactcggaaggcggggaggaggctgcttctgggaacgagaaggggtggagctcagcctttcggggtgctggggggtgggtggtccctgaggtgctcactctg

SEQ ID NO: 70158 - DNA, 120 bp, Artificial Sequence
  ENSG00000076706_30 (sequence is synthesized)
ggggcccgcaattgaagccgggcaggaggcgcagctggggcgcatcctcaaagcctgaattccgcgcccgcctgttgctggaaaaggcagcttccttcgctggagggggtgcgccgaccc

SEQ ID NO: 70159 - DNA, 120 bp, Artificial Sequence
  ENSG00000076706_31 (sequence is synthesized)
aggtgcaggctgggggcagaggagagggaaggggattaggtgctggggccggggaaccgagacccagggtgtcaccgctgacagcagcggggcccgcagagctgcagggagacagagccg

SEQ ID NO: 70160 - DNA, 120 bp, Artificial Sequence
  ENSG00000076706_32 (sequence is synthesized)
cctccccgcggcgccgacgctgccatctagctagagggccccactctttctttaaccagaggtcacagcctcattgcctacccaggaggcagccccgagacgccccctgcggcctgggtt

SEQ ID NO: 70161 - DNA, 120 bp, Artificial Sequence
  ENSG00000076706_33 (sequence is synthesized)
ttctccaccctgtccccgcgcccaccccagctctgccatccccggctgcaccgctttgtaaaggggacggctggtcagaccgaatcactgcgcgggctcgcgctgggtcgggcctggaga

SEQ ID NO: 70162 - DNA, 120 bp, Artificial Sequence
  ENSG00000076706_34 (sequence is synthesized)
tatggtgaggggaaactgagttccagggtaggctccagagtgaagagggaagaaacatgattctcaaggcccaggtctggacaagtgtgaacaccttgggcctgcgaattcagccccctc

SEQ ID NO: 70163 - DNA, 120 bp, Artificial Sequence
  ENSG00000076706_35 (sequence is synthesized)
acttggctctcgccctccggccgggaagcatggggcttcccaggctggtctgcgccttcttgctcgccgcctgctgctgctgtcctcgcgtcgcggcctcagctggagctgttcggtgct

SEQ ID NO: 70164 - DNA, 120 bp, Artificial Sequence
  ENSG00000076706_36 (sequence is synthesized)
ggcaggggcaggcccaggcacgggcagtaacttgcgcttctcctaacacccctccctctgcctcctagtcaatttaaccaccctcacaccagactccaacacaaccactggcctcagcac

SEQ ID NO: 70165 - DNA, 120 bp, Artificial Sequence
  ENSG00000076706_37 (sequence is synthesized)
ttccactgccagtcctcataccagagccaacagcacctccacaggtaagccaggcctggcaagagaacagggctgtgccagggcatcctttctgccctgtccctccccagagagccctgt

SEQ ID NO: 70166 - DNA, 120 bp, Artificial Sequence
  ENSG00000076706_38 (sequence is synthesized)
ccagaaaggtgagtagcagccccatcttgtcggccctggactggctgggccaacgatggtgacgaagtggcctggggcagggagtgacgaggagtgtctttgtggcgcagagagaaagct

SEQ ID NO: 70167 - DNA, 120 bp, Artificial Sequence
  ENSG00000076706_39 (sequence is synthesized)
acttggctctcgccctccggccgggaagcatggggcttcccaggctggtctgcgccttcttgctcgccgcctgctgctgctgtcctcgcgtcgcggctctgggaggagtcaggggtctga

SEQ ID NO: 70168 - DNA, 120 bp, Artificial Sequence
  ENSG00000076706_40 (sequence is synthesized)
acttggctctcgccctccggccgggaagcatggggcttcccaggctggtctgcgccttcttgctcgccgcctgctgctgctgtcctcgcgtcgcgggctactgcctcccaggctgacttt

SEQ ID NO: 70169 - DNA, 120 bp, Artificial Sequence
  ENSG00000076706_41 (sequence is synthesized)
atttctggggaaagggctaaatcgggctccacagttgcagccggtccagctccaccctgccctgctcttctagctctgggaggagtcaggggtctgaggctctgggttggagaccccacc

SEQ ID NO: 70170 - DNA, 120 bp, Artificial Sequence
  ENSG00000076706_42 (sequence is synthesized)
atctccagggtttgctggctcaccctccacctcccccagcgagcaaaggggtggccccgctgggcaacagacctctacccaaatccaggcccctatttggcactccctggtggaggcgcg

SEQ ID NO: 70171 - DNA, 120 bp, Artificial Sequence
  ENSG00000076706_43 (sequence is synthesized)
ccagcagatgtggaccccttttctgaggccaggctgctggggtcagagtgaggcaagagcacctccccctccctagagccttagttcaagaggccagaagacccagggagaagccggcgt

SEQ ID NO: 70172 - DNA, 89 bp, Artificial Sequence
  ENSG00000076706_44 (sequence is synthesized)
ggtgctttgggaggccaaggcaggaggatctctggaggtgaggagttcaggaccaccttggacaacatagggtgaccctgtctctacag

SEQ ID NO: 70173 - DNA, 120 bp, Artificial Sequence
  ENSG00000076706_45 (sequence is synthesized)
ggatcatatgagcccaggaaatgaaggctgcagtgagctaggattgcaccaccacactccggcctgggtgacagagcgagaccccatctcttaaaaagagctgtccctatggtactacac

SEQ ID NO: 70174 - DNA, 120 bp, Artificial Sequence
  ENSG00000076706_46 (sequence is synthesized)
aggaactgccttatattttcattaagcttttaacttaaaaaaattatacaaatggtacttgaaaatattttcatgagaatttaaactgacaaaaaatctagaagtttcttcttgcctgag

SEQ ID NO: 70175 - DNA, 120 bp, Artificial Sequence
  ENSG00000076706_47 (sequence is synthesized)
accccccctcccagaaataatctctgctatcagggtgtgttctttcaagcctatttctatgtatttgctcatatatagaaatatttctagaatgatataggcttctgtgttttattatct

SEQ ID NO: 70176 - DNA, 120 bp, Artificial Sequence
  ENSG00000076706_48 (sequence is synthesized)
aaatcagtcattcttaaccaggggtgattttgtaccccctcctcctaggagatacttggcaatgtctggagatatttttggttgtcacacatagagggggtgctactgccatctagtagg

SEQ ID NO: 70177 - DNA, 120 bp, Artificial Sequence
  ENSG00000076706_49 (sequence is synthesized)
tagagagaccaaggatgttgctaacatcctatagggcacaggacagcccccacaataaagaatcaacgtggcctaaaacatcagtagtgctggctgggctcacgcctgtaatcccagcac

SEQ ID NO: 70178 - DNA, 120 bp, Artificial Sequence
  ENSG00000076706_50 (sequence is synthesized)
ctctgtctgaaaaaaaaaaaaaaaaaattatcagtagtgctgagaaaccctggtctaagtggtggtgtatggtatacattgttagacaatttcttttatacaatgtttctgggtcagtct

SEQ ID NO: 70179 - DNA, 120 bp, Artificial Sequence
  ENSG00000076706_51 (sequence is synthesized)
atttagatcaactgatcgttttgcttactgccaagttttccatactacgcatagcaggtagtcgagttcaccattccccatttagtggacatctagacggctgctcgtttttatcattgc

SEQ ID NO: 70180 - DNA, 120 bp, Artificial Sequence
  ENSG00000076706_52 (sequence is synthesized)
agcattctttgcacacatccttggatatgagcagacatgaaaatgtttttctagggttgacactgagcagtaaaagtgctgggttgaagggtttccagcttgcatttgtacctggccttc

SEQ ID NO: 70181 - DNA, 120 bp, Artificial Sequence
  ENSG00000076716_0 (sequence is synthesized)
agtcaatcagcggcagagctgagaagggcacagccgcgcggcggagggcagagtcagccgagccgagtccagccggacgagcggaccagcgcagggcagcccaagcagcgcgcagcgaac

SEQ ID NO: 70182 - DNA, 120 bp, Artificial Sequence
  ENSG00000076716_1 (sequence is synthesized)
gaacgcccgccgccgcccacaccctctgcggtccccgcggcgcctgccacccttccctccttccccgcgtccccgcctcgccggccagtcagcttgccgggttcgctgccccgcgaaacc

SEQ ID NO: 70183 - DNA, 120 bp, Artificial Sequence
  ENSG00000076716_2 (sequence is synthesized)
ggtcaccagcccgcgcctctgcttccctgggccgcgcgccgcctccacgccctccttctcccctggcccggcgcctggcaccggggaccgttgcctgacgcgaggcccagctctactttt

SEQ ID NO: 70184 - DNA, 120 bp, Artificial Sequence
  ENSG00000076716_3 (sequence is synthesized)
cgccccgcgtctcctccgcctgctcgcctcttccaccaactccaactccttctccctccagctccactcgctagtccccgactccgccagccctcggcccgctgccgtagcgccgcttcc

SEQ ID NO: 70185 - DNA, 120 bp, Artificial Sequence
  ENSG00000076716_4 (sequence is synthesized)
cgtccggtcccaaaggtgggaacgcgtccgccccggcccgcaccatggcacggttcggcttgcccgcgcttctctgcaccctggcagtgctcagcgccgcgctgctggctgccgagctca

SEQ ID NO: 70186 - DNA, 120 bp, Artificial Sequence
  ENSG00000076716_5 (sequence is synthesized)
agtcgaaaagttgctcggaagtgcgacgtctttacgtgtccaaaggcttcaacaagaacgatgcccccctccacgagatcaacggtgatcatttgaagatctgtccccagggttctacct

SEQ ID NO: 70187 - DNA, 120 bp, Artificial Sequence
  ENSG00000076716_6 (sequence is synthesized)
gctgctctcaagagatggaggagaagtacagcctgcaaagtaaagatgatttcaaaagtgtggtcagcgaacagtgcaatcatttgcaagctgtctttgcttcacgttacaagaagtttg

SEQ ID NO: 70188 - DNA, 120 bp, Artificial Sequence
  ENSG00000076716_7 (sequence is synthesized)
atgaattcttcaaagaactacttgaaaatgcagagaaatccctgaatgatatgtttgtgaagacatatggccatttatacatgcaaaattctgagctatttaaagatctcttcgtagagt

SEQ ID NO: 70189 - DNA, 120 bp, Artificial Sequence
  ENSG00000076716_8 (sequence is synthesized)
tgaaacgttactacgtggtgggaaatgtgaacctggaagaaatgctaaatgacttctgggctcgcctcctggagcggatgttccgcctggtgaactcccagtaccactttacagatgagt

SEQ ID NO: 70190 - DNA, 120 bp, Artificial Sequence
  ENSG00000076716_9 (sequence is synthesized)
atctggaatgtgtgagcaagtatacggagcagctgaagcccttcggagatgtccctcgcaaattgaagctccaggttactcgtgcttttgtagcagcccgtactttcgctcaaggcttag

SEQ ID NO: 70191 - DNA, 120 bp, Artificial Sequence
  ENSG00000076716_10 (sequence is synthesized)
cggttgcgggagatgtcgtgagcaaggtctccgtggtaaaccccacagcccagtgtacccatgccctgttgaagatgatctactgctcccactgccggggtctcgtgactgtgaagccat

SEQ ID NO: 70192 - DNA, 120 bp, Artificial Sequence
  ENSG00000076716_11 (sequence is synthesized)
gttacaactactgctcaaacatcatgagaggctgtttggccaaccaaggggatctcgattttgaatggaacaatttcatagatgctatgctgatggtggcagagaggctagagggtcctt

SEQ ID NO: 70193 - DNA, 120 bp, Artificial Sequence
  ENSG00000076716_12 (sequence is synthesized)
tcaacattgaatcggtcatggatcccatcgatgtgaagatttctgatgctattatgaacatgcaggataatagtgttcaagtgtctcagaaggttttccagggatgtggaccccccaagc

SEQ ID NO: 70194 - DNA, 120 bp, Artificial Sequence
  ENSG00000076716_13 (sequence is synthesized)
ccctcccagctggacgaatttctcgttccatctctgaaagtgccttcagtgctcgcttcagaccacatcaccccgaggaacgcccaaccacagcagctggcactagtttggaccgactgg

SEQ ID NO: 70195 - DNA, 120 bp, Artificial Sequence
  ENSG00000076716_14 (sequence is synthesized)
ttactgatgtcaaggagaaactgaaacaggccaagaaattctggtcctcccttccgagcaacgtttgcaacgatgagaggatggctgcaggaaacggcaatgaggatgactgttggaatg

SEQ ID NO: 70196 - DNA, 120 bp, Artificial Sequence
  ENSG00000076716_15 (sequence is synthesized)
ggaaaggcaaaagcaggtacctgtttgcagtgacaggaaatggattagccaaccagggcaacaacccagaggtccaggttgacaccagcaaaccagacatactgatccttcgtcaaatca

SEQ ID NO: 70197 - DNA, 120 bp, Artificial Sequence
  ENSG00000076716_16 (sequence is synthesized)
tggctcttcgagtgatgaccagcaagatgaagaatgcatacaatgggaacgacgtggacttctttgatatcagtgatgaaagtagtggagaaggaagtggaagtggctgtgagtatcagc

SEQ ID NO: 70198 - DNA, 120 bp, Artificial Sequence
  ENSG00000076716_17 (sequence is synthesized)
agtgcccttcagagtttgactacaatgccactgaccatgctgggaagagtgccaatgagaaagccgacagtgctggtgtccgtcctggggcacaggcctacctcctcactgtcttctgca

SEQ ID NO: 70199 - DNA, 120 bp, Artificial Sequence
  ENSG00000076716_18 (sequence is synthesized)
tcttgttcctggttatgcagagagagtggagataattctcaaactctgagaaaaagtgttcatcaaaaagttaaaaggcaccagttatcacttttctaccatcctagtgactttgctttt

SEQ ID NO: 70200 - DNA, 120 bp, Artificial Sequence
  ENSG00000076716_19 (sequence is synthesized)
taaatgaatggacaacaatgtacagtttttactatgtggccactggtttaagaagtgctgactttgttttctcattcagttttgggaggaaaagggactgtgcattgagttggttcctgc

SEQ ID NO: 70201 - DNA, 120 bp, Artificial Sequence
  ENSG00000076716_20 (sequence is synthesized)
cagaactatagttagttgtgcatttgtgattttatcactctattatttgtttgtatgtttttttctcatttcgtttgtgggtttttttttccaactgtgatctcgccttgtttcttacaa

SEQ ID NO: 70202 - DNA, 120 bp, Artificial Sequence
  ENSG00000076716_21 (sequence is synthesized)
gcaaaccagggtcccttcttggcacgtaacatgtacgtatttctgaaatattaaatagctgtacagaagcaggttttatttatcatgttatcttattaaaagaaaaagcccaaaaagcag

SEQ ID NO: 70203 - DNA, 120 bp, Artificial Sequence
  ENSG00000076716_22 (sequence is synthesized)
taaaatttccatttctccctgttattttagttgccttatctggagagacgtggaggtgattttcttttttttaaattattattaagacagaatgtgagggcacaagcaggcttctgagcc

SEQ ID NO: 70204 - DNA, 120 bp, Artificial Sequence
  ENSG00000076716_23 (sequence is synthesized)
acttgtcagattgtattcaaagcatcaatccaagaaggaggttatgtgtacttcatttattggtgatagttggaagagactgcagactactgctttgaatgagttgaattacataagcta

SEQ ID NO: 70205 - DNA, 120 bp, Artificial Sequence
  ENSG00000076716_24 (sequence is synthesized)
agatcactataggtccatttcttgaacccacttatacataaaatgtaacccatttagaaaaagattctggatatcatcccccttgaaagatagaaagcattcaggatgtcccagttatca

SEQ ID NO: 70206 - DNA, 120 bp, Artificial Sequence
  ENSG00000076716_25 (sequence is synthesized)
catgttcacacttgggtttaggggtgtttttttttaaaaccaggcaggttagctagcccaccctgtgctagttttcatgttcacactgaccctatttgaattaatatcctttgttagagt

SEQ ID NO: 70207 - DNA, 120 bp, Artificial Sequence
  ENSG00000076716_26 (sequence is synthesized)
ggtcgagatttcaaacccaattatgtacagggagctgtctgagagctagccagaactggggtacagcctgggctcagggaatagctgtcaacactcgggcaaagtttttgtctgtgcatg

SEQ ID NO: 70208 - DNA, 120 bp, Artificial Sequence
  ENSG00000076716_27 (sequence is synthesized)
tgtatctccatttgttttgggatcccagtttttgttttaagagagtataaggtgtctcatttgagtctttttcttacctagccccctcttatcagtaaaacaaaggacttgccatggttc

SEQ ID NO: 70209 - DNA, 120 bp, Artificial Sequence
  ENSG00000076716_28 (sequence is synthesized)
acagcaatgtgctacgatccaagatatcagccaaggagcccacttaggggagaactaggtgtccagatttttgtatgtgttgtttttcttgggggatggggtggggtgggagtaggtaga

SEQ ID NO: 70210 - DNA, 120 bp, Artificial Sequence
  ENSG00000076716_29 (sequence is synthesized)
gctgagaatactacatcttagtggtgacctttagccacgtgggtgaagtggcaaaggccatggccatatctgttgtcccaggccaaagactaacaactgccttgggaatcccttccttgt

SEQ ID NO: 70211 - DNA, 120 bp, Artificial Sequence
  ENSG00000076716_30 (sequence is synthesized)
gtccttaccaaatgatagctcataaaactctgataatgtaacaaatcactttcaaaggagttcccagaagtcttcagaaagactaaaattctgtctcttcctgctttagacagccattaa

SEQ ID NO: 70212 - DNA, 120 bp, Artificial Sequence
  ENSG00000076716_31 (sequence is synthesized)
gatcccaactaattttaccgaacctaaaacccacaaagaggttgtttgtgttattgttcaatcttcagttgtaagagtaattctctatttttatattgaaacataattacttgatagctc

SEQ ID NO: 70213 - DNA, 120 bp, Artificial Sequence
  ENSG00000076716_32 (sequence is synthesized)
agggtctacatttcattcaactttttacaccaaattctgcagagtggtcaaaatggaatattgggggctgttgtaaacagaggcttaattttattagaagtagccagttatttattaaag

SEQ ID NO: 70214 - DNA, 120 bp, Artificial Sequence
  ENSG00000076716_33 (sequence is synthesized)
catgatgttaataaaataggcatattctggctggtgtgtataagtggttttttttttaaaacaaatcagaagacataaaattgaaaaggcactccatttatatataagggaaaatagatt

SEQ ID NO: 70215 - DNA, 120 bp, Artificial Sequence
  ENSG00000076716_34 (sequence is synthesized)
gtaaatagctaaggggccttgtgagaacttggaaaatgtgctgatacttagtaactacctcagttgtgaggaatttcctttttagcttagactgctattacttttacttggtagaaatga

SEQ ID NO: 70216 - DNA, 120 bp, Artificial Sequence
  ENSG00000076716_35 (sequence is synthesized)
atctggtctccaaaatatggctcagagagttatccccatagaccttgttagattgtttttaatttaaaaccttgaactctgcccagctgttttcttccagtcaaattctctaaaccaata

SEQ ID NO: 70217 - DNA, 120 bp, Artificial Sequence
  ENSG00000076716_36 (sequence is synthesized)
acattttccaaattaagtattcttgaaggttcttctgaactcttactgatttgttttctttctttgcattttttcctgttactcttttattatttaaattgtctcttgcttttgaacttc

SEQ ID NO: 70218 - DNA, 120 bp, Artificial Sequence
  ENSG00000076716_37 (sequence is synthesized)
aactatgaaataaacaaatcatagatttttccattcaggtctgactggataactcttggcttctaagcagctggcaagctcacccccactccccaaaaaagaagaaaggcaagttgaata

SEQ ID NO: 70219 - DNA, 120 bp, Artificial Sequence
  ENSG00000076716_38 (sequence is synthesized)
ttttaaaaccttaagagtttggagtatgaagtagaataaaagccttgttaggagaagacctgacttttccaaagttaacagcatgtgaagggcttgtgttttacaaagtcatttataaat

SEQ ID NO: 70220 - DNA, 120 bp, Artificial Sequence
  ENSG00000076716_39 (sequence is synthesized)
tatttttctttaaaacacatcacctactctgtaccttaaagattttacaactcttagatttatattttatttcaaaaatcgtaactagcacctgttattttgattaaaagacactgcgaa

SEQ ID NO: 70221 - DNA, 120 bp, Artificial Sequence
  ENSG00000076716_40 (sequence is synthesized)
gaattgacgtaaatttctaaagtttagttactgagtgttcaaaacctaacagttcacatgaagtaaaaattgtcatttgtgattacagaatcaaaataaaaataggtatgaatggtgcta

SEQ ID NO: 70222 - DNA, 120 bp, Artificial Sequence
  ENSG00000076770_0 (sequence is synthesized)
aattcatttttaatcctttaatagtccacagtaatattgtcctaaagagggtacattggattttaattttgctttcaatatgacggctgtcaatgttgccctgattcgtgataccaagtg

SEQ ID NO: 70223 - DNA, 120 bp, Artificial Sequence
  ENSG00000076770_1 (sequence is synthesized)
gctgactttagaagtctgtagagaatttcagagaggaacttgctctcgagctgatgcagattgcaagtttgcccatccaccaagagtttgccatgtggaaaatggtcgtgtggtggcctg

SEQ ID NO: 70224 - DNA, 120 bp, Artificial Sequence
  ENSG00000076770_2 (sequence is synthesized)
ttttgattctctaaagggtcggtgtacccgagagaactgcaagtaccttcaccctcctccacacttaaaaacgcagctggagattaatgggcggaacaatctgattcaacagaagactgc

SEQ ID NO: 70225 - DNA, 120 bp, Artificial Sequence
  ENSG00000076770_3 (sequence is synthesized)
cgcagccatgttcgcccagcagatgcagcttatgctccaaaacgctcaaatgtcatcacttggttcttttcctatgactccatcaattccagctaatcctcccatggctttcaatcctta

SEQ ID NO: 70226 - DNA, 120 bp, Artificial Sequence
  ENSG00000076770_4 (sequence is synthesized)
cataccacatcctgggatgggcctcgttcctgcagaacttgtaccaaatacacctgttctgattcctggaaacccacctcttgcaatgccaggagctgttggcccaaaactgatgcgttc

SEQ ID NO: 70227 - DNA, 120 bp, Artificial Sequence
  ENSG00000076770_5 (sequence is synthesized)
agataaactggaggtttgccgagaatttcagcgtggaaattgtacccgtggggagaatgattgccgctatgctcaccctactgatgcttccatgattgaagcgagtgataatactgtgac

SEQ ID NO: 70228 - DNA, 120 bp, Artificial Sequence
  ENSG00000076770_6 (sequence is synthesized)
aatctgcatggattacatcaaaggtcgatgctcgcgggagaaatgcaagtactttcatcctcctgcacacttgcaagccagactcaaggcagctcatcatcagatgaaccattcagctgc

SEQ ID NO: 70229 - DNA, 120 bp, Artificial Sequence
  ENSG00000076770_7 (sequence is synthesized)
ctctgccatggccctgcagcctggtacactgcaactgataccaaagagatcagcactggaaaagcccaatggtgccaccccggtctttaatcccactgttttccactgccaacaggctct

SEQ ID NO: 70230 - DNA, 120 bp, Artificial Sequence
  ENSG00000076770_8 (sequence is synthesized)
gactaacctgcagctcccacagccggcatttatccctgcagggccaatactgtgcatggcacccgcttcaaatattgtgcccatgatgcacggtgctacacctaccactgtgtctgcagc

SEQ ID NO: 70231 - DNA, 120 bp, Artificial Sequence
  ENSG00000076770_9 (sequence is synthesized)
aacaacacctgccaccagcgttccgttcgctgcaccaactacaggcaatcagctgaaattctgaacagcagagttatggagtatcagaatctttccatggaaacctccatatggcctttc

SEQ ID NO: 70232 - DNA, 120 bp, Artificial Sequence
  ENSG00000076770_10 (sequence is synthesized)
tatatatattctcgtatgtcttattctaccaacacaacaataagcgtgttgcagtcaatgtattaagcaaagcaaacctgccagccagcaaattcaaataaaaaataaagcattaaaaat

SEQ ID NO: 70233 - DNA, 120 bp, Artificial Sequence
  ENSG00000076770_11 (sequence is synthesized)
acaaatagaaaactagtaactaccatccatcctatttgaattatcaagcagaacatgaccataaaatttggtaacttgttacattactctttgtgattttctaataaccatgctaagtgt

SEQ ID NO: 70234 - DNA, 120 bp, Artificial Sequence
  ENSG00000076770_12 (sequence is synthesized)
atttccacagtgagcttttggcttactatatacattcttggtggataaattgttcatctgtttttgaagtgttaccttactattttgtttacaagatagtctattgggttgattcaggat

SEQ ID NO: 70235 - DNA, 120 bp, Artificial Sequence
  ENSG00000076770_13 (sequence is synthesized)
gtaacaaatatattcagtaccatttcttgtgttgtattgtgttgtgctgtgttaggtttttacatactgtagtgttttgctgtatatgtgtggtgtttgatttcaactaaagtgttatta

SEQ ID NO: 70236 - DNA, 120 bp, Artificial Sequence
  ENSG00000076770_14 (sequence is synthesized)
gtggggaacagaagtatatgtgcttaagaacatgacaggttcatgcaaatatgctctctttctttagaatatttctgtaggtttcttgggactgacatttaaaacgcctcacttttgaat

SEQ ID NO: 70237 - DNA, 120 bp, Artificial Sequence
  ENSG00000076770_15 (sequence is synthesized)
gtgcacaaaacctgctcattaacatgcatgtgtataatttgtacctgcagatctgatgttgcataatacaatcaaattactagattttttaaagagagaaataattacctgcacaaagca

SEQ ID NO: 70238 - DNA, 120 bp, Artificial Sequence
  ENSG00000076770_16 (sequence is synthesized)
gagaacttcataaaacattaacccctaattcactcttcttaaatagcttggcaaataagactttacctttaaatgaatttctcagcatttatactaaaaattatgtaaagtgctcattag

SEQ ID NO: 70239 - DNA, 120 bp, Artificial Sequence
  ENSG00000076770_17 (sequence is synthesized)
attttttgtgtgtgtggcttgagaatcccatctcctaaattgagtgtctaaaactgagccatttgtcatcttcagctgagaaactggtacttgggagcttaaaaatatgctaattacaag

SEQ ID NO: 70240 - DNA, 120 bp, Artificial Sequence
  ENSG00000076770_18 (sequence is synthesized)
ttataaatcaaacggagagatgggggcatggagatagtttttacgtactggaggaaagtgtgtaaaaccatggcaatgtcaccttttacacaaatgccattttccaaatgcaaatggctc

SEQ ID NO: 70241 - DNA, 120 bp, Artificial Sequence
  ENSG00000076770_19 (sequence is synthesized)
atgctctttagactactctttgaataacaagtaagatgcaatctagcaaaagtcagtcagggtgaaagagaattggttgcaaatgaggacttccctccccaaatggacagtcttctctgt

SEQ ID NO: 70242 - DNA, 120 bp, Artificial Sequence
  ENSG00000076770_20 (sequence is synthesized)
tgatcacagagggagcctgagtacaggcttggagaaatggctaggacagggaacagggaagcacttacaattattccttgatttattcaaaagaactgggaaagatggttgtagttgtct

SEQ ID NO: 70243 - DNA, 120 bp, Artificial Sequence
  ENSG00000076770_21 (sequence is synthesized)
ttagcttcggttcaactgagtttcgttttgttaaacagttcagtgaaggagaaagcacctgtgatatatggcaagtgtccccctgcccaaactttaacatcagaccctctcacatcataa

SEQ ID NO: 70244 - DNA, 120 bp, Artificial Sequence
  ENSG00000076770_22 (sequence is synthesized)
cgtttgcctttatatatgtttgaaaatgacaatagaaagggttttatcaccctttgaatgagacagagtggctatactccacagagctcagctgagttcacattactaatatttatgaaa

SEQ ID NO: 70245 - DNA, 120 bp, Artificial Sequence
  ENSG00000076770_23 (sequence is synthesized)
gaattttacaaccaaataattcctgtggtgtgtgacatatctcatccactctactcatttattaatgttattatacagtggtggaaacacatgacattttacatcaagtaatagatttaa

SEQ ID NO: 70246 - DNA, 120 bp, Artificial Sequence
  ENSG00000076770_24 (sequence is synthesized)
tattttctagtaaataggcgctcttccaccagaaagtataaaaccatcatatacatatatatatatatatataatggtttttctccttcatgaaaatgacaagtaaaaagcaaatctgat

SEQ ID NO: 70247 - DNA, 120 bp, Artificial Sequence
  ENSG00000076770_25 (sequence is synthesized)
tgaggataccttaagctggctagaagtgtttgaatcacagaacaatggaattagcaaaatcctttttatagttgatggaactgaatccaggggcatatgacttgcccaaggctaccttag

SEQ ID NO: 70248 - DNA, 120 bp, Artificial Sequence
  ENSG00000076770_26 (sequence is synthesized)
ccattgtgggacccagaaatatctcctgcttcccattgttcctccttttcacattgtttttgcttcagaacatttgatgctctcttccaaagcagacccatttggctcagaatataagag

SEQ ID NO: 70249 - DNA, 120 bp, Artificial Sequence
  ENSG00000076770_27 (sequence is synthesized)
agcaaaattagctttctgggaattgatactctgttgatcttaattatccatccaaatcctgatcaacagtgctttctaaacagccttgcttgtattgagtcattgtcagctgttgacaat

SEQ ID NO: 70250 - DNA, 120 bp, Artificial Sequence
  ENSG00000076770_28 (sequence is synthesized)
gttgcgtggaattagagatcaagagttgtcctgacctttacctatggactctttgaaccagttaatttctatttctgaaatcttaacattgctatagaagaaagtagtgtatgccttttt

SEQ ID NO: 70251 - DNA, 120 bp, Artificial Sequence
  ENSG00000076770_29 (sequence is synthesized)
gaaattcatcatgtatggaactgagttttgtatgatccgtgccagtgcctctccagaagggcagatctgattacatgaatccaggagggatgcacctgagctagtctggatatattcctt

SEQ ID NO: 70252 - DNA, 120 bp, Artificial Sequence
  ENSG00000076770_30 (sequence is synthesized)
aaaggagacaagaacttttttgtgcaaaatgaacttttgtgtagtttgacatctgcatgcagtgaactgtctcacttaactttttcaactttgggcaaagatatacataaaccatagata

SEQ ID NO: 70253 - DNA, 120 bp, Artificial Sequence
  ENSG00000076770_31 (sequence is synthesized)
atagacctacagtacagctgttttcatgttgcgttaagcactggaagacattaacaatgacttaccttaaagtaaaaggttccgtgaggggtatttagggccactgtatttttggtgcca

SEQ ID NO: 70254 - DNA, 120 bp, Artificial Sequence
  ENSG00000076770_32 (sequence is synthesized)
caattttctacattgttggcattttaaaagttgttttctaaatgaacttaaagaaagaaagctcaaagccctaaagttttgatcaaattcaatagagttttcagaaaaaaatacaatttt

SEQ ID NO: 70255 - DNA, 120 bp, Artificial Sequence
  ENSG00000076770_33 (sequence is synthesized)
aagatagcactctttaaactagatgtgcaatgacttattcaaattatctttattcaagaaaagagaaaagaagaaagataagtcattagactataaatttccatttaaaaagacaagtca

SEQ ID NO: 70256 - DNA, 120 bp, Artificial Sequence
  ENSG00000076770_34 (sequence is synthesized)
caaaactaatcagtgactctaaacaaaaatttactggatgaattgtatatataaaattctaatcacttatgattcttagttaacattttataagctttgtattttacaggggcctctatt

SEQ ID NO: 70257 - DNA, 120 bp, Artificial Sequence
  ENSG00000076770_35 (sequence is synthesized)
tatccaaatttattgtttttgtccatttttctcagccttttgcaaaaaatatgcaagagtgctgaaacttggataaaacgggtcatgtatacagagaaaataatctaaaagttatcttta

SEQ ID NO: 70258 - DNA, 120 bp, Artificial Sequence
  ENSG00000076770_36 (sequence is synthesized)
agagggttttagtagtgtcaactttttaaaaaagtactatgtgaccataacatacgtatattttaaagagggattaagattaaattaaaataaatggattcataaaattgctatttaaat

SEQ ID NO: 70259 - DNA, 120 bp, Artificial Sequence
  ENSG00000076770_37 (sequence is synthesized)
acagtatttacttttgtaattgaagcatgattccacaaccagctgtggcattttatttcacttttctagatcagaggctttaatttgtagttaatcatgatgtggaaagtcatcttctct

SEQ ID NO: 70260 - DNA, 120 bp, Artificial Sequence
  ENSG00000076770_38 (sequence is synthesized)
ctactccatcaatttttttcatccgtttttgaacatgctgaagcactttgatcttgccataagtgttgtcctataccactaggtggtgttcactaatgggagggcctcagctcaccggct

SEQ ID NO: 70261 - DNA, 120 bp, Artificial Sequence
  ENSG00000076770_39 (sequence is synthesized)
ctccaatttgggaaaaagcaagtacctcctccctaccatcagcagaaactgaatgaaattaatctttgcaacttgaatctgttttaagtagcattaccaataagcatagtggtatctgaa

SEQ ID NO: 70262 - DNA, 120 bp, Artificial Sequence
  ENSG00000076770_40 (sequence is synthesized)
taaggaatgacatttacattacattttattaaataagagagaaagttaatgtgctacttgaaatgttatttggttctttgtccccctcattgcagagtatagataaggatgctcttaggt

SEQ ID NO: 70263 - DNA, 120 bp, Artificial Sequence
  ENSG00000076770_41 (sequence is synthesized)
aaaatgcagccacaagttttccgagttcctttagtctgtagggtaggctatgaggtacagaatgattagaaactgaaatcctcattatttttctctcaaatacatttcacatacattgaa

SEQ ID NO: 70264 - DNA, 120 bp, Artificial Sequence
  ENSG00000076770_42 (sequence is synthesized)
acagaaataggcaaaatttatgagggaaatctgatttcccaattctgatgaatagatatactaagacagtagccttgtttaaccagtgcctgtagaaggcactagaataaatagcatgtc

SEQ ID NO: 70265 - DNA, 120 bp, Artificial Sequence
  ENSG00000076770_43 (sequence is synthesized)
caagagtataacaactttttttgtaaatttagttactagcctaatcaaactgtaaatataactcactaattggtaccatattttcatttttcttattgttcatctttaaggtttcatttt

SEQ ID NO: 70266 - DNA, 120 bp, Artificial Sequence
  ENSG00000076770_44 (sequence is synthesized)
attgcttttttgtagctctaagtaactaatcaatttaatttcaaaggaaagttaaagaaagtttaagcttttactgcatggattctgcccgcctagctaggttctgaactgacactgaag

SEQ ID NO: 70267 - DNA, 120 bp, Artificial Sequence
  ENSG00000076770_45 (sequence is synthesized)
tatgacaagatacagattatagtccaaaactatcctttacagttcacaatttaagaacaaatttaactttatatacaaataataattgttatctaattatatttagttgttgctttggca

SEQ ID NO: 70268 - DNA, 120 bp, Artificial Sequence
  ENSG00000076770_46 (sequence is synthesized)
acaaaattacaacatggctacctttagacatttgtgtatgtgaacattttacttgtaaactataggtgatttgtgacagtatgagcctgtagaaaatacagctcaaaactatgaaaacag

SEQ ID NO: 70269 - DNA, 120 bp, Artificial Sequence
  ENSG00000076770_47 (sequence is synthesized)
acatggttgagttcttttttaatcccaaaggcccatatataaaagctgaatttgtgtccttgtgtgactttttgtgaaaaagtttataacacatggattctagaatcaggctttatagtt

SEQ ID NO: 70270 - DNA, 120 bp, Artificial Sequence
  ENSG00000076770_48 (sequence is synthesized)
tatagaatttgttgtgtggatagggttattccacagtatttagacttcaaaacgcaatcattgcatttttaatacattacctaactttttttataacttaattcaaaattaccccattca

SEQ ID NO: 70271 - DNA, 120 bp, Artificial Sequence
  ENSG00000076770_49 (sequence is synthesized)
agtggcatagctgtagctgcaaaaattctgttttctggaattacatgagcaaatatagctatatgaggattaatgtatgactaaagcctcttttgaaattaattcatatttttaaaacta

SEQ ID NO: 70272 - DNA, 120 bp, Artificial Sequence
  ENSG00000076770_50 (sequence is synthesized)
tacataaagatactgtggaatgaccccttaacagtgtttaagaaacatatgctgcagttaattgactgtctcagttagggtgcggatgtgtgagacacaccttttttgcacttatgtaca

SEQ ID NO: 70273 - DNA, 120 bp, Artificial Sequence
  ENSG00000076770_51 (sequence is synthesized)
tagtccatgaaagcaatccttggagctttttttaaatgtaagaagtctgtgataatagtggaaaagttagtaagagagagttatttctaaggctttgaaaaggagggtgtttttgctcta

SEQ ID NO: 70274 - DNA, 120 bp, Artificial Sequence
  ENSG00000076770_52 (sequence is synthesized)
agacttaactaaagcataatgttgctttgctgttacggaggctttctagtttgctacaggtcaccaaaagagaaggctagtaacaggtaacaggtcagcctcagctaacagcactgaaca

SEQ ID NO: 70275 - DNA, 120 bp, Artificial Sequence
  ENSG00000076770_53 (sequence is synthesized)
agagtagaataacttcatcttttaacaagatcattagcaaagattgtttgctttttaaattaatcccccctataaacacacacacacgtgtgcacacacacacacacacacacacaccgg

SEQ ID NO: 70276 - DNA, 120 bp, Artificial Sequence
  ENSG00000076770_54 (sequence is synthesized)
gcagtttctagaacaagttttcctttttcagtggttgtaagcagtgaaatacctcatgtattacaagatagatattaccgttatgatagaataagatttcatctttcacagaaagtgatc

SEQ ID NO: 70277 - DNA, 120 bp, Artificial Sequence
  ENSG00000076770_55 (sequence is synthesized)
agctgatatatgtgtcagttaaaatgtttatcaattaataggtatttaagtgacaaattgttaatgttgaccattgttcctcctttaagatccagtaaccaaaaccaaatcggtaaccat

SEQ ID NO: 70278 - DNA, 120 bp, Artificial Sequence
  ENSG00000076770_56 (sequence is synthesized)
tgaaagatgatatttaacagttaaggatggccagcatagggccgttcattcccttcaacaaagggaaaaaaaatgctcctggcacaactttataactggcttcatttacattatacctgt

SEQ ID NO: 70279 - DNA, 120 bp, Artificial Sequence
  ENSG00000076770_57 (sequence is synthesized)
tcagtggaagctgttttttgacctacctttaccagattacaaagtagttaactgtgccacttcagcctcccactgttttgttttaactaaacagaagagaaccagccaaaatcttacgta

SEQ ID NO: 70280 - DNA, 120 bp, Artificial Sequence
  ENSG00000076770_58 (sequence is synthesized)
acacaggagctggaagacaatgtttcaatctgaccatctctgccaattttagctcccacgccacctatagatagccagttaactttctttttgcccccaggcaatgaggcctagaagagg

SEQ ID NO: 70281 - DNA, 120 bp, Artificial Sequence
  ENSG00000076770_59 (sequence is synthesized)
tcaaggttagaaaggttaagcatttgatcactacaggtacttgtagtacctagagaaggaacccatcctggggttggtggagttggtattgctactcgttttgatagttctcatttacag

SEQ ID NO: 70282 - DNA, 120 bp, Artificial Sequence
  ENSG00000076770_60 (sequence is synthesized)
agaaagaaaaataagccaaagccagaaagcaatccaagccttacagttgtccaatacctcagggccagttggctagaattttcttttccctcagcccataatcacttagagttagccata

SEQ ID NO: 70283 - DNA, 120 bp, Artificial Sequence
  ENSG00000076770_61 (sequence is synthesized)
caacaaacagcctgacaatctgaccagcatttccattgatataaaatgtaagcattccttcattctgtagttaggaactccaacttcagccttatctccaacataatttcccaatttaac

SEQ ID NO: 70284 - DNA, 120 bp, Artificial Sequence
  ENSG00000076770_62 (sequence is synthesized)
ctatgtactgatatggacatttctttgtgaatatgccagattcaagaatgtatttttctaaggtcaatagagatacgacattttaagtcaggaaaaatcacctataaattagtaggaata

SEQ ID NO: 70285 - DNA, 120 bp, Artificial Sequence
  ENSG00000076770_63 (sequence is synthesized)
actgtagaagcatcacaaaagataccccatgaatagatggcatggtgtgcatgctgacagccacggggtcatactctggagtttcaacatagaggctgtgtttcaataaataagacaaat

SEQ ID NO: 70286 - DNA, 120 bp, Artificial Sequence
  ENSG00000076770_64 (sequence is synthesized)
tggggaattaagtaaaacaaatggatgtaactgaggcccccccccaaaaaaagccctctattactaacctcaagaaaatatttagtttgactaatttgtgcagtttccagctcttctact

SEQ ID NO: 70287 - DNA, 120 bp, Artificial Sequence
  ENSG00000076770_65 (sequence is synthesized)
tgttcttgcctgtaagagaatcactaatactcaaaagctggattattgaagagaaattttatctttaaatagaatccatccacaattatggtatatgtaaaaaaaatgtatgactatgaa

SEQ ID NO: 70288 - DNA, 120 bp, Artificial Sequence
  ENSG00000076770_66 (sequence is synthesized)
ataagtcgcagctctttgcagatattgcaaaatccttgctaggcatctacatcatattagttttttaaaaaatacctctgtaacaagacctaaaagtaacctaactattaagcagtgctt

SEQ ID NO: 70289 - DNA, 120 bp, Artificial Sequence
  ENSG00000076770_67 (sequence is synthesized)
ttttctctgaaaacacacaacctaaagatttatctgtcataaaactgcatggttccagagctttatttctgtgtagagatgctatttgttagtgatggaaacaaattactttgttgctat

SEQ ID NO: 70290 - DNA, 120 bp, Artificial Sequence
  ENSG00000076770_68 (sequence is synthesized)
gtcttttgtgtctagcagttgagagaatgatatgaccatcatatcactggattatgggaatgaatgcccttttcaaaataaacttatttattaatattttaatattattttaatattata

SEQ ID NO: 70291 - DNA, 120 bp, Artificial Sequence
  ENSG00000076770_69 (sequence is synthesized)
atattaataatattttaatattattgttgctgctttaacagaaaatgagccatttgtccccatgctcccaaattacaatgatttaaattaaaaaacttttgaaggattttcctaaatata

SEQ ID NO: 70292 - DNA, 120 bp, Artificial Sequence
  ENSG00000076770_70 (sequence is synthesized)
ttcttttttaaaggactaactttgtgcattcatataacaacaatttggaataatgtgaaaaatggaggcacataatttgggtggaaaatggcgattaaaaatatatataagaaaattatt

SEQ ID NO: 70293 - DNA, 120 bp, Artificial Sequence
  ENSG00000076770_71 (sequence is synthesized)
agccatgtgtaacatatttaaataatgaccagaatatttcatgagtaccaactcttcccatagtaattttcctccaaaatgcaatagctcattccctcaactgcagacgctttgattttt

SEQ ID NO: 70294 - DNA, 120 bp, Artificial Sequence
  ENSG00000076770_72 (sequence is synthesized)
tttcaagttatagtgctgtagtgcttgtttatgtttaaaagtgcacattatgcagctcattttagtatgctacttctatgtttattttttgttcttctaataaaatgcataaacttcttg

SEQ ID NO: 70295 - DNA, 120 bp, Artificial Sequence
  ENSG00000076770_73 (sequence is synthesized)
aacaacacctgccaccagcgttccgttcgctgcaccaactacaggcaatcagataccccaattatcaatagatgaactgaatagcagcatgtttgtttcacagatgtagaagttctcagt

SEQ ID NO: 70296 - DNA, 120 bp, Artificial Sequence
  ENSG00000076770_74 (sequence is synthesized)
acttgaaggctattcatgctctagtatattaatcctaatatttagtaattctaaaatgaaatttaaatttctgatttggctcaatgttatatttcatacatagagtaaatttatttccaa

SEQ ID NO: 70297 - DNA, 120 bp, Artificial Sequence
  ENSG00000076770_75 (sequence is synthesized)
atataccatcagtattttgaattatgtagataatatatccgttgtgttagacctattactcttataagattgaagttactgacacaagaaaaacacttctattttaataaaagaatactt

SEQ ID NO: 70298 - DNA, 120 bp, Artificial Sequence
  ENSG00000076770_76 (sequence is synthesized)
aaaattttgagagaatgcttactagtttctcttgtgcctcagaaatcctgaggcatattctaagatgcattattagaagtttctctttcccagttattcatgtctatcctgcatccctag

SEQ ID NO: 70299 - DNA, 120 bp, Artificial Sequence
  ENSG00000076770_77 (sequence is synthesized)
tgtaacatatgaaaccagtgttgtttatttcatactttccagatgggcatcaatcatttcataacaatgagatgcatgaatttttccattaaaatgttttctctcacttaaaattggtta

SEQ ID NO: 70300 - DNA, 120 bp, Artificial Sequence
  ENSG00000076770_78 (sequence is synthesized)
tcttcaacaaatggcacagtaataaaaggatgatcatttttgttctttaagaaagtaaatgtaatttagtaatactttattctgccttatttcaaaatgcttcaaaaatgcgaatctgga

SEQ ID NO: 70301 - DNA, 120 bp, Artificial Sequence
  ENSG00000076770_79 (sequence is synthesized)
acttctctgcattgaccactgttctggagttgggctgatagaaaactgcggtgaagagagtttagatcagaggctatggcagagcaaagtattactgatgtgtctcttaacagtgaagag

SEQ ID NO: 70302 - DNA, 120 bp, Artificial Sequence
  ENSG00000076770_80 (sequence is synthesized)
ggtcggggaggaggttgggtccttgtcaagtgtcagctgccctatacatagttctcttgccccttgtgccctgttttactatttctaaggtggttcccatgatggcatttcttgataagc

SEQ ID NO: 70303 - DNA, 120 bp, Artificial Sequence
  ENSG00000076770_81 (sequence is synthesized)
ccactttgagccgtttaatgttttgtaggtgtttctgtgagtctgataataccagcactaaaaacagttcagtatatagacatttacaagaggtcttaggcctcttcagaattcagttaa

SEQ ID NO: 70304 - DNA, 120 bp, Artificial Sequence
  ENSG00000076770_82 (sequence is synthesized)
tgtctttctctttgaggctgctgaatgttaggtaagaattcagggcaagcattcccgaccatcatcaaattggagacttggagtttctattggctggaagaaagttgacccacaggcaaa

SEQ ID NO: 70305 - DNA, 120 bp, Artificial Sequence
  ENSG00000076770_83 (sequence is synthesized)
accagatgtaaaccaagtttgtcttgggtacttttcaaattcttttcacagcatccttttctcatccctcatggtggcctctggccctggaaaatcctcatgatagcaacttatcaggcc

SEQ ID NO: 70306 - DNA, 120 bp, Artificial Sequence
  ENSG00000076770_84 (sequence is synthesized)
tgtttcctctgatagatctggacttttccccttaagtgctttcctgttgggcttctcagactatggagaactgctcatagttgagatctaagagacaaattaccctatggtgttcaagaa

SEQ ID NO: 70307 - DNA, 120 bp, Artificial Sequence
  ENSG00000076770_85 (sequence is synthesized)
tggccgtatttagtatactgcctgtcctggaagtgttcacatttaaaaaggcatgactttccaatgggcaaatatcagacacctacatgcatagataagggaaatatgttttacttaagc

SEQ ID NO: 70308 - DNA, 120 bp, Artificial Sequence
  ENSG00000076770_86 (sequence is synthesized)
aaacttctaggcattgaatctcagtgtttaggtgcagagatggaattcctataagcaatgcagtcattcaccacatcaggaaggccaaaaaatgaacactctcgtaattttgttattatc

SEQ ID NO: 70309 - DNA, 120 bp, Artificial Sequence
  ENSG00000076770_87 (sequence is synthesized)
tggaaagttctgatatgataatgaacctaaaatactgaatagatagtgaacatcctaaaattccactgaccagaatccattcccatggtcatcatctgtagagggcatgatacaatgaca

SEQ ID NO: 70310 - DNA, 120 bp, Artificial Sequence
  ENSG00000076770_88 (sequence is synthesized)
ggcctgaggtatgattataattctggagtaatttaaagcctatatttgttaaactttaacagatggacacacattctctgattttctacttggctctttcctgtactagaaatgcgcatt

SEQ ID NO: 70311 - DNA, 120 bp, Artificial Sequence
  ENSG00000076770_89 (sequence is synthesized)
taactaaaccttcccagcttttctgttcagtgcctgacttacactactcccttaggcaggaggacagtgggtgtctggggaataaaagccaagagctccaaacagaggattttggataca

SEQ ID NO: 70312 - DNA, 120 bp, Artificial Sequence
  ENSG00000076770_90 (sequence is synthesized)
aagggcagccaccaggaaatagctttgtgagagggacagactatctgattcccatttgtacaaacatgtccaaagcaaaagcacagcattctaaagtggatgcagaaattagtatacaat

SEQ ID NO: 70313 - DNA, 120 bp, Artificial Sequence
  ENSG00000076770_91 (sequence is synthesized)
ggcagttctggccagtgcagcccagcatttttctgttgtgcatggaaagaacacagtgaaaaggcaggcagggcatccggtgcaaagtgcaacagacatagacacacaaatccagttttc

SEQ ID NO: 70314 - DNA, 120 bp, Artificial Sequence
  ENSG00000076770_92 (sequence is synthesized)
ctgatgagagagggagctatctcttcataagtgatgcaatgcaatgcaggcatgtacaagtacaaggaaagatttatttttaaaaaatcatagtgtaactggatgaataccagcaacagc

SEQ ID NO: 70315 - DNA, 120 bp, Artificial Sequence
  ENSG00000076770_93 (sequence is synthesized)
acctgctaaagcaaacagcctgttcattaaaaactggacttgagggaatggagaaagaatctgaggagcctgcagtcagcatgcttgcagagaccttatggctacagaagacgatgatta

SEQ ID NO: 70316 - DNA, 120 bp, Artificial Sequence
  ENSG00000076770_94 (sequence is synthesized)
acccatagaggttcaatgtagttttcaagaagagggtgggaaagcataagatggggactaagactttgcctttaaccttcatgacatgaagaattgaatgactctttgttggaaaaaatg

SEQ ID NO: 70317 - DNA, 120 bp, Artificial Sequence
  ENSG00000076770_95 (sequence is synthesized)
gcagttatgagataattggatccatgttaattatatatatttctgtatatatagtaagtggttattgatgtgcctttgttaaccatttcactatttaataaatgtgtgtgtagtttattc

SEQ ID NO: 70318 - DNA, 120 bp, Artificial Sequence
  ENSG00000076770_96 (sequence is synthesized)
ccagtactccctttgtcattgggagatcaaaatgtaaaagttctctggagacagataggcaagaaaattcttctgctctcaccccagcttctcgcctattcaaacttgttatctggtttg

SEQ ID NO: 70319 - DNA, 120 bp, Artificial Sequence
  ENSG00000076770_97 (sequence is synthesized)
tgcccgcactccgagcgtgagccgcagcgcgactttttggcgctctttgggagcagtgagagagaggcggaggccagagagtccggggtgggcgcgggagccggggcggcccttggccgc

SEQ ID NO: 70320 - DNA, 120 bp, Artificial Sequence
  ENSG00000076770_98 (sequence is synthesized)
atgcacccctgctaaaggctctcccggcaccggggccacctcgcgcagcgctgcttttgcttctgccgctaacagatggcatgtgccgctgtcgctgccgctgcccctgctgctgccgct

SEQ ID NO: 70321 - DNA, 120 bp, Artificial Sequence
  ENSG00000076826_0 (sequence is synthesized)
ccgggcccgggccgctgcggaggacctttctagtgcccgagatcaagtcgctggaccagtacgatttctcgcgggccaaggcggcggccagcctggcgtgggtgctgcgggccgcgttcg

SEQ ID NO: 70322 - DNA, 120 bp, Artificial Sequence
  ENSG00000076826_1 (sequence is synthesized)
ggggcgcagagcacgtgcccccggagctgtgggagcccttctataccgaccagtacgcgcaggagcatgtgaagcccccggtgacacggctgctgctctcagccgagctctactgcagag

SEQ ID NO: 70323 - DNA, 120 bp, Artificial Sequence
  ENSG00000076826_2 (sequence is synthesized)
cctggcgccaggcactgccacagcttgaaacaccccccaacccctctgcactgctggccctgctggcgcggaggggcacagtgcctgctttgcccgagcgcccggtgcgcgaggccgacc

SEQ ID NO: 70324 - DNA, 120 bp, Artificial Sequence
  ENSG00000076826_3 (sequence is synthesized)
tgaggcaccagcccattctcatgggagcccacctagctgtcattgatgccctcatggctgcctttgccttcgagtggacaaagaccctgccaggtcccttggccctgaccagcttggagc

SEQ ID NO: 70325 - DNA, 120 bp, Artificial Sequence
  ENSG00000076826_4 (sequence is synthesized)
acaagctgcttttctgggtggacacgaccgtccggcggctgcaggagaagaccgagcaggaagcggcccagcgagcctctccagcagcccctgcagacggggcggccccggcgcagccct

SEQ ID NO: 70326 - DNA, 120 bp, Artificial Sequence
  ENSG00000076826_5 (sequence is synthesized)
cgatccgataccgcaaggaccgtgtggtggcgcgacgtgccccctgcttcccgacggtgaccagcctccaggacctggccagtggggccgcgctggccgccaccatccactgctattgtc

SEQ ID NO: 70327 - DNA, 120 bp, Artificial Sequence
  ENSG00000076826_6 (sequence is synthesized)
cccagctgcttcgacttgaggaggtgtgcttgaaggaccccatgtctgtggcggacagcctgtacaacctccagctcgtgcaggatttctgtgcctctcgccttcctcgtggctgccccc

SEQ ID NO: 70328 - DNA, 120 bp, Artificial Sequence
  ENSG00000076826_7 (sequence is synthesized)
tgtcccttgaggacttgctgtacgtcccaccgccactcaaggtcaacttggtggtgatgctggccgagttgttcatgtgttttgaggtgctcaagcccgactttgtgcaagtgaaggact

SEQ ID NO: 70329 - DNA, 120 bp, Artificial Sequence
  ENSG00000076826_8 (sequence is synthesized)
tgcccgatggtcacgctgcctccccccggggcactgaggcctccccacctcagaacaacagcggcagtagttctcctgtcttcaccttccgccacccgcttctgtcatctggtggccccc

SEQ ID NO: 70330 - DNA, 120 bp, Artificial Sequence
  ENSG00000076826_9 (sequence is synthesized)
agtccccactccgaggatccacaggctccctgaagtcttccccgtccatgtcccatatggaggccctgggcaaggcctggaaccggcagctcagccgtcccctctcccaggctgtgtcat

SEQ ID NO: 70331 - DNA, 120 bp, Artificial Sequence
  ENSG00000076826_10 (sequence is synthesized)
tcagcaccccctttggcctggacagcgacgtggatgtcgtcatgggagaccctgtgctcctccgctctgtgagctcggacagcctgggccccccgcgtcccgcgccggccaggaccccca

SEQ ID NO: 70332 - DNA, 120 bp, Artificial Sequence
  ENSG00000076826_11 (sequence is synthesized)
cccagccacccccggagcctggtgacctgcccaccatcgaggaagctctgcagatcatccacagtgccgagccccggctcctcccagatggggcggccgacggcagcttctacctccact

SEQ ID NO: 70333 - DNA, 120 bp, Artificial Sequence
  ENSG00000076826_12 (sequence is synthesized)
cccctgaggggccctccaagccatccctggcctccccctacctgcccgaggggacctccaaaccactgtccgacaggcccaccaaagcaccagtgtacatgccacaccccgagaccccct

SEQ ID NO: 70334 - DNA, 120 bp, Artificial Sequence
  ENSG00000076826_13 (sequence is synthesized)
cgaaaccatctccctgtctggtgggggaggcatcgaaaccgccagccccatccgaggggtccccgaaggcggtggcttcgtccccagcagccaccaactccgaggtgaaaatgaccagct

SEQ ID NO: 70335 - DNA, 120 bp, Artificial Sequence
  ENSG00000076826_14 (sequence is synthesized)
ttgcagaacgcaagaaacagctggtgaaggcagaggctgaggccggagcggggtcccccacgtccactccggccccgccggaggccctgagctcggagatgagtgagctcagcgcccggc

SEQ ID NO: 70336 - DNA, 120 bp, Artificial Sequence
  ENSG00000076826_15 (sequence is synthesized)
catattcgccaagcaccgccagcggctgggcaaaagcgccttcctgcaggtgcagccgcgggaagcctctggggaggcggaagcagaggcggaggaggccgattccggtccagtccctgg

SEQ ID NO: 70337 - DNA, 120 bp, Artificial Sequence
  ENSG00000076826_16 (sequence is synthesized)
tggggagcggcccgcaggcgagggccagggtgagccaacctcacggcccaaggcagtgaccttctcgccagacctgggcccggtgccccacgaggggctgggggaatacaatcgagcggt

SEQ ID NO: 70338 - DNA, 120 bp, Artificial Sequence
  ENSG00000076826_17 (sequence is synthesized)
cagcaagctgagtgccgccttgagctcgctgcagcgggacatgcagaggctcacggaccagcagcagcggctcctggccccgcccgaggcccccggatccgccccaccacctgctgcgtg

SEQ ID NO: 70339 - DNA, 80 bp, Artificial Sequence
  ENSG00000076826_18 (sequence is synthesized)
ggtcatccctggccccacgacggggcccaaagctgcatcccccagccccgcccggcgagtcccggccacccggcgcagcc

SEQ ID NO: 70340 - DNA, 120 bp, Artificial Sequence
  ENSG00000076826_19 (sequence is synthesized)
cacgcggccagcggagctgcggctggcacccttgaccagggtgcttacgccaccccacgacgtagacagcctcccccacctgcgcaagttctcgccgagccaggtgcccgtgcagacgcg

SEQ ID NO: 70341 - DNA, 120 bp, Artificial Sequence
  ENSG00000076826_20 (sequence is synthesized)
ctcttccatcctcctggcggaggagacgccccccgaggagccagccgcccggccgggcctcatcgagatcccgctgggcagcctggcagatcccgccgccgaggacgagggagacgggag

SEQ ID NO: 70342 - DNA, 120 bp, Artificial Sequence
  ENSG00000076826_21 (sequence is synthesized)
ccccgctggtgctgaggattccttggaggaggaggcgtcttcggagggggagccccgggtggggctggggttcttctacaaggatgaagacaagcctgaggacgagatggcccaaaagcg

SEQ ID NO: 70343 - DNA, 120 bp, Artificial Sequence
  ENSG00000076826_22 (sequence is synthesized)
ggccagcctgctggagcggcagcagcggcgagcagaggaggcgcggcggcgcaagcagtggcaggaggtggagaaggaacagcggagggaggaggccgcgaggctggcccaagaggaggc

SEQ ID NO: 70344 - DNA, 120 bp, Artificial Sequence
  ENSG00000076826_23 (sequence is synthesized)
cccgggcccagccccgcttgtgtccgcagtcccgatggcgactccagcccctgctgcccgggctccagccgaggaggaggtgggcccccggaagggggacttcacgcggcaggagtacga

SEQ ID NO: 70345 - DNA, 120 bp, Artificial Sequence
  ENSG00000076826_24 (sequence is synthesized)
gcgccgggcccagctgaagctgatggacgacctcgataaggtgctgcggccccgggctgcggggtccgggggtccaggtcggggcgggcggagggccacccggcctcgctcgggttgctg

SEQ ID NO: 70346 - DNA, 120 bp, Artificial Sequence
  ENSG00000076826_25 (sequence is synthesized)
tgacgactcagccctggcacgaagcccagcccgcggcctgctgggctctcggctgagcaaaatctattcccagtccaccctgtcactgtccactgtggccaacgaggcccacaataacct

SEQ ID NO: 70347 - DNA, 120 bp, Artificial Sequence
  ENSG00000076826_26 (sequence is synthesized)
cggggtgaagaggcccacgtctcgggctccctccccgtcaggtctcatgtccccaagccgcctgcctggaagccgcgaacgggactgggaaaatggcagcaatgcctcctccccagcgtc

SEQ ID NO: 70348 - DNA, 120 bp, Artificial Sequence
  ENSG00000076826_27 (sequence is synthesized)
agtgcccgagtacacaggtccacggctgtacaaagaacccagcgccaagtccaacaagttcatcatccacaatgccctatcacactgctgcctggcgggcaaggtgaacgaaccgcagaa

SEQ ID NO: 70349 - DNA, 120 bp, Artificial Sequence
  ENSG00000076826_28 (sequence is synthesized)
gaatcgcattctggaggaaattgagaaaagcaaggccaaccacttcctgatcctctttcgcgactcgagctgccagttccgggcgctctacacgctgtcgggggagacagaggagctgtc

SEQ ID NO: 70350 - DNA, 120 bp, Artificial Sequence
  ENSG00000076826_29 (sequence is synthesized)
gcggctggcagggtatgggccccggaccgtcacgcccgccatggtggaaggcatctacaagtacaactcggaccgcaagcgcttcacccagatccccgccaagaccatgtccatgagcgt

SEQ ID NO: 70351 - DNA, 120 bp, Artificial Sequence
  ENSG00000076826_30 (sequence is synthesized)
cgatgccttcaccatccagggacacctctggcagggcaagaaacccaccactcccaagaagggcggcggcacccccaaatagccccacccgggcggtccacgggccgggccctgtgtgct

SEQ ID NO: 70352 - DNA, 120 bp, Artificial Sequence
  ENSG00000076826_31 (sequence is synthesized)
ctctgactttgagtccagtcctgctgtgggggctgagctgggaggttcagggactcagggctcagctcagtccccttgtctgtcctcccccacttcttgaataaaataatttaaagagaa

SEQ ID NO: 70353 - DNA, 120 bp, Artificial Sequence
  ENSG00000076826_32 (sequence is synthesized)
ggcctgtactcacttctgacttagtcctgcgccactgtcctcagctctgtgtcccagccacactggcccccttgtacttccgtgccccccagtaggtttgctccagcctcagggcctcgg

SEQ ID NO: 70354 - DNA, 120 bp, Artificial Sequence
  ENSG00000076826_33 (sequence is synthesized)
cactagctgtcccctctgcctggaacgctctgctctgtacgcccacctagttaaatcctgatcattctacagggtacttcctctgggaagccttcctgggtgtctccaggccaggccggg

SEQ ID NO: 70355 - DNA, 120 bp, Artificial Sequence
  ENSG00000076826_34 (sequence is synthesized)
gtcctcccgcagtgtagagtgtctgtgcccaacacgagcttttgctggcactcactgctgtctgctgcttttgtcttccccgttgggttaagcagtgtgtgtgtgagcggcacccagtgt

SEQ ID NO: 70356 - DNA, 120 bp, Artificial Sequence
  ENSG00000076826_35 (sequence is synthesized)
atcccatccctgttgtgtcccagtacttagtgtggggctgtgcatacagtaggcaccaactaagtgcatttagaacaatgatgaaaacaaaagcacaggtgggtggcgggcaggctgggt

SEQ ID NO: 70357 - DNA, 120 bp, Artificial Sequence
  ENSG00000076826_36 (sequence is synthesized)
gccgaggggtcttgggcaggactgactcctcctgtgttccccccacagcctgctggaccgggtgttgtggagggcaggggcttctggtgggcactgacctgcaatctctgtccccaggct

SEQ ID NO: 70358 - DNA, 120 bp, Artificial Sequence
  ENSG00000076864_0 (sequence is synthesized)
ggccgcgggcaccagagtgccgagcccaggacgcccccggcccaggcccttggggtggacaagtccttcacttctcgccggagtgtgtggaggagcgatgggcagaaccagcacttccct

SEQ ID NO: 70359 - DNA, 120 bp, Artificial Sequence
  ENSG00000076864_1 (sequence is synthesized)
caggcactagacctgtcacgagtgaacttagttccctcctatactccttcactctaccctaagaacacagatctatttgagatgattgagaagatgcagggaagcaggatggatgaacaa

SEQ ID NO: 70360 - DNA, 120 bp, Artificial Sequence
  ENSG00000076864_2 (sequence is synthesized)
cgctgctccttcccgccgcccctcaaaacagaggaggactacattccatacccgagcgtgcacgaggtcttggggcgagaaggacccttccccctcatcctgctgccccagtttgggggc

SEQ ID NO: 70361 - DNA, 120 bp, Artificial Sequence
  ENSG00000076864_3 (sequence is synthesized)
tactggattgagggcaccaaccacgaaatcaccagcatccccgagacagagccactgcagtcgcccacaaccaaggtgaagctcgagtgcaaccccacagcccgcatctaccggaagcac

SEQ ID NO: 70362 - DNA, 120 bp, Artificial Sequence
  ENSG00000076864_4 (sequence is synthesized)
tttctcggcaaggagcatttcaattactactcactggacgctgccctcggccaccttgtcttctcactcaagtacgatgtcatcggggaccaagagcacctgcggctgctgctcaggacc

SEQ ID NO: 70363 - DNA, 120 bp, Artificial Sequence
  ENSG00000076864_5 (sequence is synthesized)
aagtgccggacataccatgatgtcatccccatctcctgcctcaccgagttccctaatgttgtccagatggcaaagttggtgtgtgaagacgtcaatgtggatcggttctatcctgtgctc

SEQ ID NO: 70364 - DNA, 120 bp, Artificial Sequence
  ENSG00000076864_6 (sequence is synthesized)
taccccaaggcttcccggctcatcgtcacctttgacgagcatgtcatcagcaataacttcaagtttggcgtcatttatcagaagcttgggcagacctccgaggaagaactcttcagcacc

SEQ ID NO: 70365 - DNA, 120 bp, Artificial Sequence
  ENSG00000076864_7 (sequence is synthesized)
aatgaggaaagtcccgctttcgtggagttccttgaatttcttggccagaaggtcaaactgcaggactttaaggggttccgaggaggcctggacgtgacccacgggcagacggggaccgaa

SEQ ID NO: 70366 - DNA, 120 bp, Artificial Sequence
  ENSG00000076864_8 (sequence is synthesized)
tctgtgtactgcaacttccgcaacaaggagatcatgtttcacgtgtccaccaagctgccatacacggaaggggacgcccagcagttgcagcggaagcggcacatcgggaacgacatcgtg

SEQ ID NO: 70367 - DNA, 120 bp, Artificial Sequence
  ENSG00000076864_9 (sequence is synthesized)
gctgtggtcttccaggatgagaacactcctttcgtgcccgacatgatcgcgtccaacttcctgcatgcctacgtcgtggtgcaggctgagggcgggggccctgatggccccctctacaag

SEQ ID NO: 70368 - DNA, 120 bp, Artificial Sequence
  ENSG00000076864_10 (sequence is synthesized)
gtctctgtcactgcaagagatgatgtgcccttctttggaccccccctcccggaccccgctgtgttcaggaaggggcctgagttccaggaatttttgctgacaaagctgatcaatgctgaa

SEQ ID NO: 70369 - DNA, 120 bp, Artificial Sequence
  ENSG00000076864_11 (sequence is synthesized)
tatgcctgctacaaggcagagaagtttgccaaactggaggagcggacgcgggccgccctcctggagacgctctatgaggaactacacatccacagccagtccatgatgggcttgggcggc

SEQ ID NO: 70370 - DNA, 120 bp, Artificial Sequence
  ENSG00000076864_12 (sequence is synthesized)
gacgaggacaagatggagaatggcagtgggggcggcggcttctttgagtctttcaagcgggtcatccggagccgcagccagtccatggatgccatggggctgagcaacaagaagcccaac

SEQ ID NO: 70371 - DNA, 120 bp, Artificial Sequence
  ENSG00000076864_13 (sequence is synthesized)
cgcccaacaaccccgacctggccaaggcggctggaatatcactgattgtccctgggaagagccccacgaggaagaagtcgggcccgttcggctcccgccgcagcagcgccattggcatcg

SEQ ID NO: 70372 - DNA, 120 bp, Artificial Sequence
  ENSG00000076864_14 (sequence is synthesized)
agaacatacaggaggtgcaggagaagagggagagccctccggctggtcagaagaccccagacagcgggcacgtctcacaggagcccaagtcggagaactcatccactcagagctccccag

SEQ ID NO: 70373 - DNA, 120 bp, Artificial Sequence
  ENSG00000076864_15 (sequence is synthesized)
agatgcccacgaccaagaacagagcggagaccgcagcgcagagagcagaggcgctcaaggacttctcccgctcctcgtccagtgccagcagcttcgccagcgtggtggaggagacggagg

SEQ ID NO: 70374 - DNA, 120 bp, Artificial Sequence
  ENSG00000076864_16 (sequence is synthesized)
gtgtggacggagaggacacaggcctggagagcgtgtcatcctcaggaacaccccacaagcgggactccttcatctatagcacgtggctggaggacagtgtcagcaccactagtgggggca

SEQ ID NO: 70375 - DNA, 120 bp, Artificial Sequence
  ENSG00000076864_17 (sequence is synthesized)
gctccccaggcccctctcgatcaccccacccagacgccggcaagttgggggaccctgcgtgtcccgagatcaagatccagctggaagcatctgagcagcacatgccccagctgggctgtt

SEQ ID NO: 70376 - DNA, 120 bp, Artificial Sequence
  ENSG00000076864_18 (sequence is synthesized)
agccgggccaccccctctgaaggtgaaactgagcagatgaggccacagaagcacaaggggaaggtgccgtgtcaagcccaggcagacgagacctctgccctgaagaccaacaccagcccg

SEQ ID NO: 70377 - DNA, 120 bp, Artificial Sequence
  ENSG00000076864_19 (sequence is synthesized)
tgggctgccccctgcctccccaccctccccatggcccacccatctgggctgtctctgcagggcagagccgtccagacctgggatcagggaagctgctggcatcgtccccacccccagcct

SEQ ID NO: 70378 - DNA, 120 bp, Artificial Sequence
  ENSG00000076864_20 (sequence is synthesized)
gggggtctgggctggggcagggattgctcagtggaagcaggactgggggtctggcttgccccctccctgggcctccatcacccctgagcatccctctggactcagagggaacaaggtggg

SEQ ID NO: 70379 - DNA, 120 bp, Artificial Sequence
  ENSG00000076864_21 (sequence is synthesized)
agagagagtttgagacagctccgtgtggagagcttagcccctggaggcagcacaaggaggatgtgatatgtgggggagtgagcactgggttgggagccgggtcctggtttccaatttggg

SEQ ID NO: 70380 - DNA, 120 bp, Artificial Sequence
  ENSG00000076864_22 (sequence is synthesized)
ttctgctgtgtgactctgggcaagtcactctccctctctgggcatgtctgctacaaatggacaagattatttcagaggtcactgaagactgtgattacatgcacctgccttagaaggtag

SEQ ID NO: 70381 - DNA, 120 bp, Artificial Sequence
  ENSG00000076864_23 (sequence is synthesized)
gattttcttcccagggacctcctatcaccctaccctgcttcttgaggtccctggagccccaggtgggctgaggggcagggagccggctgtgcccagtatgcctcctggaccctccagttc

SEQ ID NO: 70382 - DNA, 120 bp, Artificial Sequence
  ENSG00000076864_24 (sequence is synthesized)
tgccacaggtctgccgatgccctgtccactgcctacacatgacagacaagtaaccccctcatgggggatggggacctacctggctcctcagccagcacccagcttaacccctgccatccc

SEQ ID NO: 70383 - DNA, 120 bp, Artificial Sequence
  ENSG00000076864_25 (sequence is synthesized)
atgctgggccctccaggccaagagtctcagctggccgagagtccaggccttgcctcccccgaccgccatggagggggcagcccggcacagctgctgggagcccttgtgtgtctggtcaca

SEQ ID NO: 70384 - DNA, 120 bp, Artificial Sequence
  ENSG00000076864_26 (sequence is synthesized)
ctttttaggcgtcacgccaaaggccagcctcctggccccaatacccattttggaagcccctgtggccgtgtggatgtcggtaacagttgtataaaataaattctatttatcgctattgta

SEQ ID NO: 70385 - DNA, 120 bp, Artificial Sequence
  ENSG00000076864_27 (sequence is synthesized)
cgggggccgggccgggccgcgctcaggatggcacagctgcggcccgcggtgccacccggccgtccgcggaggggctcgctgcccgcgggggccagctggcagaacacagatctatttgag

SEQ ID NO: 70386 - DNA, 120 bp, Artificial Sequence
  ENSG00000076864_28 (sequence is synthesized)
ttgcttattcctgggaaaagtgcgagtagattcggacgccggggcagtgccataggcataggaaccgtggaagaggttgtcgtccgcggggccgccggctctggaggctgcctgcacgcg

SEQ ID NO: 70387 - DNA, 120 bp, Artificial Sequence
  ENSG00000076864_29 (sequence is synthesized)
aaggggctcttgagggctcctgcacccaccagaatgtgcagagaagaggtcccaggtgggagccgagagggggctgagggcagatccccaagagagaagtaattggtgtgagagaggatc

SEQ ID NO: 70388 - DNA, 120 bp, Artificial Sequence
  ENSG00000076864_30 (sequence is synthesized)
gatctccacagcggtggagaggaggaagggtgaacgccgtggtggagtggtccatgtggacctgctcccctttgctgccaggaggttaatacctctgccaaccgaggccaccctccctcg

SEQ ID NO: 70389 - DNA, 120 bp, Artificial Sequence
  ENSG00000076864_31 (sequence is synthesized)
gcggccgcgggcaccagagtgccgagcccaggacgcccccggcccaggcccttgggttaatacctctgccaaccgaggccaccctccctcggacccccattcggaggaagcagacccaag

SEQ ID NO: 70390 - DNA, 120 bp, Artificial Sequence
  ENSG00000076864_32 (sequence is synthesized)
cccccgggacaggccccagggcgtgcgggatggagtggcggcagctccgatggcactcagcacctgctttggggcctggtacctgtgccagagccagtgcccctcaccaggggcttctgg

SEQ ID NO: 70391 - DNA, 120 bp, Artificial Sequence
  ENSG00000076864_33 (sequence is synthesized)
ccctgccttggcccctgggaccctggcccagtccctgccaggatccggtacccaaaggccctacacccagccgcacgtcccccaatatcgccggtctgcatggagcgccatccctctcct

SEQ ID NO: 70392 - DNA, 120 bp, Artificial Sequence
  ENSG00000076864_34 (sequence is synthesized)
catcccagcacagtgtgtgggaagctgggggagtcttccagctgctgggccagaacctcccccagccaatttggaggttccggggaggggccctagctggcacggggtgggacttgggtt

SEQ ID NO: 70393 - DNA, 120 bp, Artificial Sequence
  ENSG00000076864_35 (sequence is synthesized)
gctacactgccctctgaccactgcccttaggctgcagatcccacagagccctggggggcggggagcggtagccattctgaggactcggcctcctcccaccctagccccctcaggatgctg

SEQ ID NO: 70394 - DNA, 120 bp, Artificial Sequence
  ENSG00000076864_36 (sequence is synthesized)
tcctaatcctgggccagtattgacgtgcagtcctgccgtgtgagctcgggagagccccttgccctcctggggactgtttccctttcgtaaactgggaggctgtctctgggaatggatatc

SEQ ID NO: 70395 - DNA, 120 bp, Artificial Sequence
  ENSG00000076864_37 (sequence is synthesized)
ttctctcgttctttcttgctcatcaactctgcttcagggcctggggcagcaggatccccagaggggatgtggggggggcactggggctcccaggtaaggtggcactgagttggggcctct

SEQ ID NO: 70396 - DNA, 80 bp, Artificial Sequence
  ENSG00000076864_38 (sequence is synthesized)
tccggctcgcgcgggccgggccgggcggcggcggcggcaccatgagcggccggaagcgcagcttcaccttcggggcctac

SEQ ID NO: 70397 - DNA, 120 bp, Artificial Sequence
  ENSG00000076864_39 (sequence is synthesized)
gcgcggggcggggcgcgtgcgcgcgtgtgcgtgtgcacgcgtgggggggagcccgtgcggggtgtgctcgcgtttgggcgggtgggcctgggctatgactgctgtgggggctgagcgttt

SEQ ID NO: 70398 - DNA, 120 bp, Artificial Sequence
  ENSG00000076864_40 (sequence is synthesized)
gctgtgggggctgagcgtttgacctcagtgcgcgcatggctgtcgtgctgtggcgcctgtgtgtgtgtgtttctgtttctgtgtctgtgtgtgttcccattgcgtgtccatgtgcatgtg

SEQ ID NO: 70399 - DNA, 120 bp, Artificial Sequence
  ENSG00000076864_41 (sequence is synthesized)
tggggaggtgagtgcagggtggacattgctgtgtttgtgtctaagcacatgatagtggcgcttatgcatgtgactggggctgcggggctactccgcctgtgtgtgcgcgcgtgtgtgtgc

SEQ ID NO: 70400 - DNA, 120 bp, Artificial Sequence
  ENSG00000076864_42 (sequence is synthesized)
agctcactgagggtgggtgagtaactggaagactgagcatttattaagcaccttctgtgtgccagatactttcccaaggttctctcatttaatcctcacaataaccctgtgaagtccaca

SEQ ID NO: 70401 - DNA, 120 bp, Artificial Sequence
  ENSG00000076864_43 (sequence is synthesized)
gcccaggacgcccccggcccaggcccttggggtttggtgccagctgcggggcgcctgggcttggggaagaaaccttgtgtacgcacacctgcacacacacacagtctccggaggttaata

SEQ ID NO: 70402 - DNA, 120 bp, Artificial Sequence
  ENSG00000076924_0 (sequence is synthesized)
acctgggcatccagaaaaatggtggtgatggcgcgactctcgcggcccgagcggccggaccttgtcttcgaggaagaggacctcccctatgaggaggaaatcatgcggaaccaattctct

SEQ ID NO: 70403 - DNA, 120 bp, Artificial Sequence
  ENSG00000076924_1 (sequence is synthesized)
gtcaaatgctggcttcgctacatcgagttcaaacagggcgccccgaagcccaggctcaatcagctatacgagcgggcactcaagctgctgccctgcagctacaaactctggtaccgatac

SEQ ID NO: 70404 - DNA, 120 bp, Artificial Sequence
  ENSG00000076924_2 (sequence is synthesized)
ctgaaggcgcgtcgggcacaggtgaagcatcgctgtgtgaccgaccctgcctatgaagatgtcaacaactgtcatgagagggcctttgtgttcatgcacaagatgcctcgtctgtggcta

SEQ ID NO: 70405 - DNA, 120 bp, Artificial Sequence
  ENSG00000076924_3 (sequence is synthesized)
gattactgccagttcctcatggaccaggggcgcgtcacacacacccgccgcaccttcgaccgtgccctccgggcactgcccatcacgcagcactctcgaatttggcccctgtatctgcgc

SEQ ID NO: 70406 - DNA, 120 bp, Artificial Sequence
  ENSG00000076924_4 (sequence is synthesized)
ttcctgcgctcacacccactgcctgagacagctgtgcgaggctatcggcgcttcctcaagctgagtcctgagagtgcagaggagtacattgagtacctcaagtcaagtgaccggctggat

SEQ ID NO: 70407 - DNA, 120 bp, Artificial Sequence
  ENSG00000076924_5 (sequence is synthesized)
gaggccgcccagcgcctggccaccgtggtgaacgacgagcgtttcgtgtctaaggccggcaagtccaactaccagctgtggcacgagctgtgcgacctcatctcccagaatccggacaag

SEQ ID NO: 70408 - DNA, 120 bp, Artificial Sequence
  ENSG00000076924_6 (sequence is synthesized)
gtacagtccctcaatgtggacgccatcatccgcgggggcctcacccgcttcaccgaccagctgggcaagctctggtgttctctcgccgactactacatccgcagcggccatttcgagaag

SEQ ID NO: 70409 - DNA, 120 bp, Artificial Sequence
  ENSG00000076924_7 (sequence is synthesized)
gctcgggacgtgtacgaggaggccatccggacagtgatgaccgtgcgggacttcacacaggtgtttgacagctacgcccagttcgaggagagcatgatcgctgcaaagatggagaccgcc

SEQ ID NO: 70410 - DNA, 120 bp, Artificial Sequence
  ENSG00000076924_8 (sequence is synthesized)
tcggagctggggcgcgaggaggaggatgatgtggacctggagctgcgcctggcccgcttcgagcagctcatcagccggcggcccctgctcctcaacagcgtcttgctgcgccaaaaccca

SEQ ID NO: 70411 - DNA, 120 bp, Artificial Sequence
  ENSG00000076924_9 (sequence is synthesized)
caccacgtgcacgagtggcacaagcgtgtcgccctgcaccagggccgcccccgggagatcatcaacacctacacagaggctgtgcagacggtggaccccttcaaggccacaggcaagccc

SEQ ID NO: 70412 - DNA, 120 bp, Artificial Sequence
  ENSG00000076924_10 (sequence is synthesized)
cacactctgtgggtggcgtttgccaagttttatgaggacaacggacagctggacgatgcccgtgtcatcctggagaaggccaccaaggtgaacttcaagcaggtggatgacctggcaagc

SEQ ID NO: 70413 - DNA, 120 bp, Artificial Sequence
  ENSG00000076924_11 (sequence is synthesized)
gtcagtgcggagagctggagctccgacacgagaactacgatgaggccttgcggctgctgcgaaaggccacggcgctgcctgcccgccgggccgagtactttgatggttcagagcccgtgc

SEQ ID NO: 70414 - DNA, 120 bp, Artificial Sequence
  ENSG00000076924_12 (sequence is synthesized)
agaaccgcgtgtacaagtcactgaaggtctggtccatgctcgccgacctggaggagagcctcggcaccttccagtccaccaaggccgtgtacgaccgcatcctggacctgcgtatcgcaa

SEQ ID NO: 70415 - DNA, 120 bp, Artificial Sequence
  ENSG00000076924_13 (sequence is synthesized)
caccccagatcgtcatcaactatgccatgttcctggaggagcacaagtacttcgaggagagcttcaaggcgtacgagcgcggcatctcgctgttcaagtggcccaacgtgtccgacatct

SEQ ID NO: 70416 - DNA, 120 bp, Artificial Sequence
  ENSG00000076924_14 (sequence is synthesized)
ggagcacctacctgaccaaattcattgcccgctatgggggccgcaagctggagcgggcacgggacctgtttgaacaggctctggacggctgccccccaaaatatgccaagaccttgtacc

SEQ ID NO: 70417 - DNA, 120 bp, Artificial Sequence
  ENSG00000076924_15 (sequence is synthesized)
tgctgtacgcacagctggaggaggagtggggcctggcccggcatgccatggccgtgtacgagcgtgccaccagggccgtggagcccgcccagcagtatgacatgttcaacatctacatca

SEQ ID NO: 70418 - DNA, 120 bp, Artificial Sequence
  ENSG00000076924_16 (sequence is synthesized)
agcgggcggccgagatctatggggtcacccacacccgcggcatctaccagaaggccattgaggtgctgtcggacgagcacgcgcgtgagatgtgcctgcggtttgcagacatggagtgca

SEQ ID NO: 70419 - DNA, 120 bp, Artificial Sequence
  ENSG00000076924_17 (sequence is synthesized)
agctcggggagattgaccgcgcccgggccatctacagcttctgctcccagatctgtgacccccggacgaccggcgcgttctggcagacgtggaaggactttgaggtccggcatggcaatg

SEQ ID NO: 70420 - DNA, 120 bp, Artificial Sequence
  ENSG00000076924_18 (sequence is synthesized)
aggacaccatcaaggaaatgctgcgtatccggcgcagcgtgcaggccacgtacaacacgcaggtcaacttcatggcctcgcagatgctcaaggtctcgggcagtgccacgggcaccgtgt

SEQ ID NO: 70421 - DNA, 120 bp, Artificial Sequence
  ENSG00000076924_19 (sequence is synthesized)
ctgacctggcccctgggcagagtggcatggacgacatgaagctgctggaacagcgggcagagcagctggcggctgaggcggagcgtgaccagcccttgcgcgcccagagcaagatcctgt

SEQ ID NO: 70422 - DNA, 120 bp, Artificial Sequence
  ENSG00000076924_20 (sequence is synthesized)
tcgtgaggagtgacgcctcccgggaggagctggcagagctggcacagcaggtcaaccccgaggagatccagctgggcgaggacgaggacgaggacgagatggacctggagcccaacgagg

SEQ ID NO: 70423 - DNA, 120 bp, Artificial Sequence
  ENSG00000076924_21 (sequence is synthesized)
ttcggctggagcagcagagcgtgccagccgcagtgtttgggagcctgaaggaagactgacccgtccctcccccatcccccctccccaccccctccccaatacagctacgtttgtacatca

SEQ ID NO: 70424 - DNA, 120 bp, Artificial Sequence
  ENSG00000076924_22 (sequence is synthesized)
ggggccagactgtgcttagcaggtcccattgcacccctgttcttggggttctcacagagggagacagtgcagaggacagacccccacaactgccattagggacagggaggcgtggacagg

SEQ ID NO: 70425 - DNA, 120 bp, Artificial Sequence
  ENSG00000076924_23 (sequence is synthesized)
gaagggccccaagggagttcctggcaggctccctacagacgccacccaaggacatcccgggtgcctggtggtctctatctgcagactctcacatgtgactctccctctggtaacaggcgt

SEQ ID NO: 70426 - DNA, 120 bp, Artificial Sequence
  ENSG00000076924_24 (sequence is synthesized)
ggtgggaatggctccagctgccctgcccaccagcccccaccccacctggtccagttataacaaaactgccaagtgggtcccgggtcccgggtgattgcttcgtgtttcatcactgacctg

SEQ ID NO: 70427 - DNA, 120 bp, Artificial Sequence
  ENSG00000076924_25 (sequence is synthesized)
tacatcccttgatgggtcagcacaccttctctgatgtcccagtctgtccctgtcattgctgagacatgtcacccctcccacaccccttcttcccacatttgccaactggggcagggcaaa

SEQ ID NO: 70428 - DNA, 120 bp, Artificial Sequence
  ENSG00000076924_26 (sequence is synthesized)
tggggcggggacaggggctgggctcagcatgttagggatgggggcttggattcctgttgcttctttgcatgggaagttgggctggactcagtcctggagctgggggtttctgggtcccgc

SEQ ID NO: 70429 - DNA, 120 bp, Artificial Sequence
  ENSG00000076924_27 (sequence is synthesized)
cgcatttatgtggtggccccaggtgtggctcagccacaggacatcgagtgtctgtggccaggccatggagtccgtggcttagccccagccgcctctccccacacccccagatgcctcgtc

SEQ ID NO: 70430 - DNA, 120 bp, Artificial Sequence
  ENSG00000076924_28 (sequence is synthesized)
agcaacttacgaatctgctggggcttgtgtgacacagtatacagactgggtgacttaaacaacaaagatttagcttctccccgtcctggaggctggaagtccaggatcgaggcatgggca

SEQ ID NO: 70431 - DNA, 120 bp, Artificial Sequence
  ENSG00000076924_29 (sequence is synthesized)
aggcctctctccttagcttacagacagccgccttctccctatgtctttgtgtggccttctctttgtgtgtgtcacttttgaaatttcctcttcttataaaggacatcagtcataatggat

SEQ ID NO: 70432 - DNA, 120 bp, Artificial Sequence
  ENSG00000076924_30 (sequence is synthesized)
atcagtcataatggattaggtggcccctaacgacctcagtttaacttagtgatctcatcttcaaacgaatctactttctgaggtactgggggttaagatttgagcatatgaatgttttga

SEQ ID NO: 70433 - DNA, 120 bp, Artificial Sequence
  ENSG00000076924_31 (sequence is synthesized)
ggggggcacagttcattccatagcaggcacagaatcctacttccacgtgcacccatgactcatggggagggtgttggtgccagtgtgtgcgggctctccctgccccgctgctcaggagac

SEQ ID NO: 70434 - DNA, 120 bp, Artificial Sequence
  ENSG00000076924_32 (sequence is synthesized)
gggttgtggggtccagggggtgggttgcgtgtccgtgggaaggccatgtcccgcggccggagcagtcatgtttgagtgtgtgtttctatggatcgtgtgggcattatacagatacacaaa

SEQ ID NO: 70435 - DNA, 120 bp, Artificial Sequence
  ENSG00000076924_33 (sequence is synthesized)
tggggaggtcgtacatgcatacgcgtgctactgcctgcccctctgtcagggggtgcggccttctccctggggacaggcagccagcgtcagcggagctggggagccacccaccttcaccca

SEQ ID NO: 70436 - DNA, 120 bp, Artificial Sequence
  ENSG00000076924_34 (sequence is synthesized)
gagggacgggtatcagggttgggggctgcggcggagtcagccagctcacgggcacacacacccacccctgccctgccccccacgcagacgaccggcgcgttctggcagacgtggaaggac

SEQ ID NO: 70437 - DNA, 120 bp, Artificial Sequence
  ENSG00000076928_0 (sequence is synthesized)
cttcggttccggtggcggcgatggcttctctttccacctggagcagccctgcagagcccagggagatggaagacttcgcccgaggggcggcctccccaggcccctcccggcctggcctgg

SEQ ID NO: 70438 - DNA, 120 bp, Artificial Sequence
  ENSG00000076928_1 (sequence is synthesized)
ttcccgtcagcatcatcggggctgaggatgaggattttgagaacgagctggagacaaactcagaagagcaaaacagccagttccagagcctggagcaggtgaagcggcgcccagcccacc

SEQ ID NO: 70439 - DNA, 120 bp, Artificial Sequence
  ENSG00000076928_2 (sequence is synthesized)
tcatggccctcctgcagcacgtggccctgcagtttgagccaggacccctgctttgctgtctgcatgccgacatgctgggctcactgggccccaaggaggccaagaaggccttcctggact

SEQ ID NO: 70440 - DNA, 120 bp, Artificial Sequence
  ENSG00000076928_3 (sequence is synthesized)
tctaccacagcttcctggagaagacagcggttctccgggtgccggtccctcccaacgtcgcctttgaacttgaccgcactagggctgacctcatctccgaggatgtccagcggcggttcg

SEQ ID NO: 70441 - DNA, 120 bp, Artificial Sequence
  ENSG00000076928_4 (sequence is synthesized)
tgcaggaggtggtgcaaagccagcaggtagccgtgggccggcagctggaggacttccgttccaagcggctcatgggcatgacgccctgggagcaggagctggcccagctggaggcttggg

SEQ ID NO: 70442 - DNA, 120 bp, Artificial Sequence
  ENSG00000076928_5 (sequence is synthesized)
ttgggcgggaccgagccagctacgaggcccgggagcggcacgtggcggagcggctgctcatgcacctggaggagatgcaacataccatctctaccgacgaagaaaagagtgctgccgtgg

SEQ ID NO: 70443 - DNA, 120 bp, Artificial Sequence
  ENSG00000076928_6 (sequence is synthesized)
tcaacgccattggcctgtacatgcgccaccttggggtgcggaccaagagtggagacaagaagtcggggaggaacttcttccggaaaaaggtgatggggaaccggcggtcggacgagcctg

SEQ ID NO: 70444 - DNA, 120 bp, Artificial Sequence
  ENSG00000076928_7 (sequence is synthesized)
ccaagaccaagaaggggctgagcagcatcctggatgccgcccgctggaaccggggagagccccaggttccagattttcgacacctcaaagcagaggttgatgccgagaagccaggtgcta

SEQ ID NO: 70445 - DNA, 120 bp, Artificial Sequence
  ENSG00000076928_8 (sequence is synthesized)
cagaccggaagggaggcgtggggatgccctctcgggaccggaatatcggggctcctgggcaggacacccctggagtctctctgcaccctctgtccctggacagcccagaccgggaaccag

SEQ ID NO: 70446 - DNA, 120 bp, Artificial Sequence
  ENSG00000076928_9 (sequence is synthesized)
gtgctgacgcccccctggagctgggggactcatccccgcagggcccaatgagcctggagtccttggcgcccccagagagtaccgacgagggggccgaaaccgagagccccgagcctggag

SEQ ID NO: 70447 - DNA, 120 bp, Artificial Sequence
  ENSG00000076928_10 (sequence is synthesized)
atgagggggagccggggcggtcgggactggagcttgaaccagaagagcctcccggctggcgggaactcgtccccccagacaccctgcacagcctgcccaagagccaggtgaagcggcagg

SEQ ID NO: 70448 - DNA, 120 bp, Artificial Sequence
  ENSG00000076928_11 (sequence is synthesized)
aggtcatcagcgagctgctggtgacagaggcggcccacgtgcgcatgctgcgggtgctgcacgacctcttcttccagcccatggcagaatgcctgttcttccccttggaggagctgcaga

SEQ ID NO: 70449 - DNA, 120 bp, Artificial Sequence
  ENSG00000076928_12 (sequence is synthesized)
acatcttccccagcctggacgagctcatcgaggtgcattccctgttcctcgatcgcctgatgaagcggaggcaggagagtggctacctcatcgaggagatcggagacgtgctgctggccc

SEQ ID NO: 70450 - DNA, 120 bp, Artificial Sequence
  ENSG00000076928_13 (sequence is synthesized)
gcagccgccagtcatttgccttagagcagctcaaagccaagcaacgcaaggaccctcggttctgtgccttcgtgcaggaagctgagagccgcccgcggtgccgccgcctgcagctgaagg

SEQ ID NO: 70451 - DNA, 120 bp, Artificial Sequence
  ENSG00000076928_14 (sequence is synthesized)
acatgatccccacggagatgcagcggctgaccaagtaccccctgctcctgcagagcatcgggcagaacacagaagagcccacagaacgggagaaagtggagctggcagccgagtgctgcc

SEQ ID NO: 70452 - DNA, 120 bp, Artificial Sequence
  ENSG00000076928_15 (sequence is synthesized)
gggaaattctacaccacgtcaaccaagccgtgcgtgacatggaggacctgctgaggctcaaggactatcagcggcgcctggacttgtcccaccttcggcagagcagcgaccctatgctga

SEQ ID NO: 70453 - DNA, 120 bp, Artificial Sequence
  ENSG00000076928_16 (sequence is synthesized)
gcgagttcaagaacctggacatcaccaagaagaaattggtccacgagggcccactgacgtggcgggtgactaaggacaaggcagtggaggtgcatgtgctgctgctggacgacctgctgc

SEQ ID NO: 70454 - DNA, 120 bp, Artificial Sequence
  ENSG00000076928_17 (sequence is synthesized)
tgctgctccagcgccaggacgagcggctgctgctcaagtcccatagccggacactgacgcccacgcccgatggcaagaccatgctgcggcccgtgctgcggctcacctccgccatgaccc

SEQ ID NO: 70455 - DNA, 120 bp, Artificial Sequence
  ENSG00000076928_18 (sequence is synthesized)
gcgaggtggccaccgatcacaaagccttctacgtcctttttacctgggaccaggaggcccagatatacgagctggtggcacagactgtgtcggagcggaaaaactggtgtgctctcatca

SEQ ID NO: 70456 - DNA, 120 bp, Artificial Sequence
  ENSG00000076928_19 (sequence is synthesized)
ctgagactgccggatccctgaaagtccctgcccctgcctctcgccctaagccccggcccagcccgagcagcacccgagaacccctcctcagcagctctgagaacggcaatggtggccgag

SEQ ID NO: 70457 - DNA, 120 bp, Artificial Sequence
  ENSG00000076928_20 (sequence is synthesized)
agacgtctccagctgatgcccggaccgagagaatcctcagtgacctcctgcccttctgcagaccaggccccgagggccagctcgctgccacggcccttcggaaagtgctgtccctgaagc

SEQ ID NO: 70458 - DNA, 120 bp, Artificial Sequence
  ENSG00000076928_21 (sequence is synthesized)
agcttctgtttccggcggaggaagacaatggggcggggcctcctcgagatggggatggggtcccagggggcggccccctgagcccagcacggacccaggaaatccaggagaacctgctca

SEQ ID NO: 70459 - DNA, 120 bp, Artificial Sequence
  ENSG00000076928_22 (sequence is synthesized)
gcttggaggagaccatgaagcagctggaggagttggaggaggaattttgccgcctgagacccctcctgtctcagcttggggggaactctgtcccccagcctggctgcacttgaggttccc

SEQ ID NO: 70460 - DNA, 120 bp, Artificial Sequence
  ENSG00000076928_23 (sequence is synthesized)
gcccaggaaggccttttgcaagaaggagaggaatgggggagaggacgtgagggaccacccccacccacacagctgccgcagcatctcacaccccgagggcctgaggagagggagctgtgg

SEQ ID NO: 70461 - DNA, 120 bp, Artificial Sequence
  ENSG00000076928_24 (sequence is synthesized)
gccacgcctgggaggggcccagctggggttactggccccgcatgagcctcggccatctctccctcctgccctctgcttgggggactcagggctccattctggagggcaccacggtgaccc

SEQ ID NO: 70462 - DNA, 120 bp, Artificial Sequence
  ENSG00000076928_25 (sequence is synthesized)
gggccatctcagtattgcctgtgggggccacccctccacccccacccccaagtgccttcgctctgtttttataccctgaattggaggtttattttttaatatatattatctaagaagaga

SEQ ID NO: 70463 - DNA, 120 bp, Artificial Sequence
  ENSG00000076928_26 (sequence is synthesized)
gcctccggaaaaacgccccgacttcctgccccgccagagccaggaagcgggagccgggacccagggcccgggatcgccgagcccgacctcgggcgccccgccggtcacctccgcgcggac

SEQ ID NO: 70464 - DNA, 120 bp, Artificial Sequence
  ENSG00000076928_27 (sequence is synthesized)
ttactgggcgctggtgggtgggtgcagggtcaccgctgccatctgtgcctgcctgtcccaggctcttgctccccatgctcctctgctgctctctgggtctggccattcctctcccttctt

SEQ ID NO: 70465 - DNA, 120 bp, Artificial Sequence
  ENSG00000076928_28 (sequence is synthesized)
ctttccttttctcatctccctcctgcttcctcattgcccccctttccttttatccttcctttttcctctgctccttcctctccttccttttttcactaatccttctcctcctcccttcct

SEQ ID NO: 70466 - DNA, 120 bp, Artificial Sequence
  ENSG00000076928_29 (sequence is synthesized)
ctccaccactccttccatctcctttatttccccctcctctctcacctcccctctcctctctcacctcccccatcctctctcacctcccccctcctctctcacctaccccctcctctcacc

SEQ ID NO: 70467 - DNA, 120 bp, Artificial Sequence
  ENSG00000076928_30 (sequence is synthesized)
gacagcatgtgcatgcatgtgtgtgtgtgtgcgcatgtgccgaccccaccactgccccgtctgtctcctgtctccaggcctctgtgtcttccattgtctgggcctctctgtctccctgtc

SEQ ID NO: 70468 - DNA, 120 bp, Artificial Sequence
  ENSG00000076928_31 (sequence is synthesized)
cacctctgtccctgccctggtctctccccgtctctgtccctgtcctggtttctcttcgtctctgttcttgtcttggtctctccttgtctctgtccccggcatctgcctgactctgtcctt

SEQ ID NO: 70469 - DNA, 120 bp, Artificial Sequence
  ENSG00000076928_32 (sequence is synthesized)
ggcctcggggtccaggctatcagggcgtctggggcgctcagagagcctgcgggtgagtgaccgccgccggccttcccggggcagcctcggggctaagggccggggtgggggccgctcccg

SEQ ID NO: 70470 - DNA, 120 bp, Artificial Sequence
  ENSG00000076928_33 (sequence is synthesized)
tctccacgtcaaaaatttccttacgcccagctgccagaaaacaaatgctccaaacccacccagcctgcaccactgtcctgggtgcccacgtccctcttctgcagccaccatcccttgctt

SEQ ID NO: 70471 - DNA, 120 bp, Artificial Sequence
  ENSG00000076928_34 (sequence is synthesized)
gattctatatttagcctcttcctgaacacatctctgtcttcagtaccttcctgccctgtcccaaccctaaacccagcctcacttcttcacctccctttggatccccgaaccccatctgct

SEQ ID NO: 70472 - DNA, 120 bp, Artificial Sequence
  ENSG00000076928_35 (sequence is synthesized)
ggaggcggcggcggcggcgcgggggagggggcgggggcgcgatcgatggaatataattttcctcaaactcggaaaataaagttcagagctgatcaaatttgaaaacagatgtcgaatcgc

SEQ ID NO: 70473 - DNA, 120 bp, Artificial Sequence
  ENSG00000076928_36 (sequence is synthesized)
gaggcttctacccctagaggggaaaataggtctcacggcaagacagcagtccccaggtggatattcaggggccaggacagctctgtcggatctcaccaaccccaccagcgcccaggtgct

SEQ ID NO: 70474 - DNA, 120 bp, Artificial Sequence
  ENSG00000076928_37 (sequence is synthesized)
gcatgtttgatccctgtcctggtcacccttgccccggtcctggtctctccctgtctctgtccctgtcctggtctctccccgtctctgtccctgtcctcgtctctccccaatttctgtccc

SEQ ID NO: 70475 - DNA, 120 bp, Artificial Sequence
  ENSG00000076928_38 (sequence is synthesized)
tggagaatcagggagggattgttgtcagagtcacagaggaatgggcgttggagaccgaggtcattgaggccaactgtggtcacagaccttggaggaggagggggtagaatgcttctagag

SEQ ID NO: 70476 - DNA, 120 bp, Artificial Sequence
  ENSG00000076928_39 (sequence is synthesized)
atctgggaactctagtgtggtccgatctagagacctggtctgctgcacgggccaccctgcgggcatcgaatgccaaggccactgaccggggttgaacgctctaagaggctgaaggctgct

SEQ ID NO: 70477 - DNA, 120 bp, Artificial Sequence
  ENSG00000076928_40 (sequence is synthesized)
ctctgtctccctgcccctgcggccccccagggccaggggtgtggggtcacccagcacttcctcccctcagcacccgagaacccctcctcagcagctctgagaacggcaatggtggccgag

SEQ ID NO: 70478 - DNA, 120 bp, Artificial Sequence
  ENSG00000076928_41 (sequence is synthesized)
acaccaagtcctcctcttcaccccattctctctcttgagcaggttctccgggtgccggtccctcccaacgtcgcctttgaacttggtaaggagaaggatgggatgagggagaggtgtcta

SEQ ID NO: 70479 - DNA, 120 bp, Artificial Sequence
  ENSG00000076928_42 (sequence is synthesized)
gcggggaccacacctcccaggaggccaaggggagggaggccgcactcccatgctctgctcggacagccgagattcattcattccttcttggcagcggcctcaggacgtgtggctgttgga

SEQ ID NO: 70480 - DNA, 120 bp, Artificial Sequence
  ENSG00000076928_43 (sequence is synthesized)
catttcacagatgtggaaactgaggttctgacaggaaaagtaacttggccaaagtcccacagggatgaggtgagcctggacttgaatgcaggcgcgaggtggaggtggcgacgatgcgtc

SEQ ID NO: 70481 - DNA, 120 bp, Artificial Sequence
  ENSG00000076928_44 (sequence is synthesized)
caggacccctgctggacacgcaagcctggaccgggactggaacacggacccgcacacacgcagcctggataggagatacacggacagagggacatatggatacagtcaggctccgccccg

SEQ ID NO: 70482 - DNA, 120 bp, Artificial Sequence
  ENSG00000076928_45 (sequence is synthesized)
cactcccgctcaccactcactcaggcaagtcgctaaacatccccgagcctcaagtttcctcatctgcaaaatgggacaataatgacctccctcctagagtggttgggaaggttaaaccgc

SEQ ID NO: 70483 - DNA, 120 bp, Artificial Sequence
  ENSG00000076928_46 (sequence is synthesized)
agggcgcatggagcacagctggtactgcaccaagtaccaagtaaacacgcatttgctgtgagcttgctgcttccgaataatctcattaaaaatattaagaattttgccagataacaagaa

SEQ ID NO: 70484 - DNA, 120 bp, Artificial Sequence
  ENSG00000076928_47 (sequence is synthesized)
caggagaacctgctcagcttggaggagaccatgaagcagctggaggtggggcgggacgggccaggggtgccctgagtgggctggggaaggaaggggcccccctcatccatgacccccacc

SEQ ID NO: 70485 - DNA, 120 bp, Artificial Sequence
  ENSG00000076928_48 (sequence is synthesized)
ggtgagggcagggctgggtgggcacagggaggggtggggctgggacaggcacagcttttagcgaattaaaccagcgagctagtgcctggagggtctggaaaagcagatctagaacacaga

SEQ ID NO: 70486 - DNA, 120 bp, Artificial Sequence
  ENSG00000076928_49 (sequence is synthesized)
gagccagatctagaaagagagaatgctttagacaagagccagaaagcatgccacgtgacctcaacaggcttacaagtgcccagggtagatctcagtgcgcagcgggcagggtacacacgt

SEQ ID NO: 70487 - DNA, 120 bp, Artificial Sequence
  ENSG00000076928_50 (sequence is synthesized)
caggaccccgcggagccacagagagtccagcagcctggcagaaaccacatcccatcccactctgtgcctgtggcagcgcccccatcagcctgtggcagcacctttccgtgaactctaggg

SEQ ID NO: 70488 - DNA, 120 bp, Artificial Sequence
  ENSG00000076928_51 (sequence is synthesized)
gaccaaattcttctctccaaagcctttttggcagatgccagcacgcagtcattcacggttgatggttgggaaaaagaagctgttagccatcccaggtctagggagcacagcaggccctga

SEQ ID NO: 70489 - DNA, 120 bp, Artificial Sequence
  ENSG00000076928_52 (sequence is synthesized)
tctggaaacaagaaaaccaccacacacagctcacaaggcagaccacacaattgtggatccagaagcctccggatgaggcagaagatacctgggagatgtggatggacaaccgtgccatcc

SEQ ID NO: 70490 - DNA, 120 bp, Artificial Sequence
  ENSG00000076928_53 (sequence is synthesized)
agaaacacccgcagagtctagaaaacccagcaggtgatttagaaagggagaggccacagtgctggctggcaggggatctgtagacaagggtctcatcccaagaagaccccgtccagccca

SEQ ID NO: 70491 - DNA, 120 bp, Artificial Sequence
  ENSG00000076928_54 (sequence is synthesized)
ggcatgcagaaagaagaacatgtcagctgcaagaccagaggctggtcatccggacgccaaaccatcagatatgcagaaaattaggaaattgcagtctttcccctgtctacattctctttc

SEQ ID NO: 70492 - DNA, 120 bp, Artificial Sequence
  ENSG00000076928_55 (sequence is synthesized)
cagaagagtggttcccccgacaaccacatgcacggagactctggccctctgagcaagggagtcccctattcaagccttggggtttctagaacaccagattgtggacatcagcccagggat

SEQ ID NO: 70493 - DNA, 120 bp, Artificial Sequence
  ENSG00000076928_56 (sequence is synthesized)
cgtgctgactaccatgttcttttacagatgtggaaaccgaggcctagagagggtcagggacttgcctgaggtgaccccggcggcctctgggcattttgaggtttattctcgcatagctcc

SEQ ID NO: 70494 - DNA, 120 bp, Artificial Sequence
  ENSG00000076928_57 (sequence is synthesized)
ctcacctcatcagcttgtggggagccgatcagagatagctgtggtcccctgggcagcttcctgttggcctgtcttagaattttgctatatttggggggtgtgaagagtggatatagatgt

SEQ ID NO: 70495 - DNA, 120 bp, Artificial Sequence
  ENSG00000076928_58 (sequence is synthesized)
ggggggtgtgaagagtggatatagatgtgttaaaactgtttaaagtggagaaggaggaccgggcctggtggttcatgactgtagtcccaacgctttgggaggctgaggcaggaggatagc

SEQ ID NO: 70496 - DNA, 82 bp, Artificial Sequence
  ENSG00000076928_59 (sequence is synthesized)
cactccagcctgggcgacaagagtgaaaccctgtcttgaaaaaaaaaaaaaagtggggccaggctgaggtgggtagatcact

SEQ ID NO: 70497 - DNA, 75 bp, Artificial Sequence
  ENSG00000076928_60 (sequence is synthesized)
tcacacctataatcccagaactttggaggctgaggtgggtagatcacttgagatcaagagttcgagaccagcggg

SEQ ID NO: 70498 - DNA, 120 bp, Artificial Sequence
  ENSG00000076928_61 (sequence is synthesized)
ttcttccggaaaaaggtgatggggaaccggcggtcggacgagcctgccaagaccaagaaggggctgagcagcatcctggatgccgcccgctggaaccggggagagccccaggccgagaag

SEQ ID NO: 70499 - DNA, 120 bp, Artificial Sequence
  ENSG00000076928_62 (sequence is synthesized)
caatccctgtttgggcctgcagagtcaccatgcggtccccagcctctgccctgagggcagctgctgacccaggccttccccagcaccctcgcttagaccagggttcctggcagtcctccc

SEQ ID NO: 70500 - DNA, 120 bp, Artificial Sequence
  ENSG00000076944_0 (sequence is synthesized)
gggacacacccggaagcggcggcggcgcccctcggggaagatggcgccctcggggctgaaggcggtggtgggggaaaaaattctgagcggagttattcggagtgtcaagaaggatgggga

SEQ ID NO: 70501 - DNA, 120 bp, Artificial Sequence
  ENSG00000076944_1 (sequence is synthesized)
gtggaaggtgcttatcatggatcacccaagcatgcgcatcttgtcttcctgctgcaaaatgtcagatatcctggctgagggcatcaccattgttgaagacatcaacaaacggcgggaacc

SEQ ID NO: 70502 - DNA, 120 bp, Artificial Sequence
  ENSG00000076944_2 (sequence is synthesized)
cattcccagtctggaggccatttatttgctgagccccacggagaagtcggttcaggccctgatcaaagacttccaggggaccccgactttcacctacaaagcggcccatatcttcttcac

SEQ ID NO: 70503 - DNA, 120 bp, Artificial Sequence
  ENSG00000076944_3 (sequence is synthesized)
cgacacctgccccgagcccctgttcagtgagctaggccgctctcgtctggcaaaggtggtgaagacgttgaaggagattcaccttgccttcctcccctacgaggcccaggtgttctccct

SEQ ID NO: 70504 - DNA, 120 bp, Artificial Sequence
  ENSG00000076944_4 (sequence is synthesized)
cgatgctccccacagcacctacaacctctactgccccttccgggcagaggagcgcacgcggcagctcgaggtgctggcccagcagattgccacgctgtgcgccaccctgcaggagtaccc

SEQ ID NO: 70505 - DNA, 120 bp, Artificial Sequence
  ENSG00000076944_5 (sequence is synthesized)
ggccatccgctaccgcaagggcccagaggacacagcccagttggcccacgccgtcctggccaagctgaacgccttcaaggcagacactcccagtctgggcgagggcccagagaaaacccg

SEQ ID NO: 70506 - DNA, 120 bp, Artificial Sequence
  ENSG00000076944_6 (sequence is synthesized)
ctcccagctgctgataatggaccgggcagctgaccccgtgtccccactactgcatgagctcacgttccaggccatggcgtatgatctgctggacatagagcaggacacatacaggtatga

SEQ ID NO: 70507 - DNA, 120 bp, Artificial Sequence
  ENSG00000076944_7 (sequence is synthesized)
atcgcagatgtgtccaagaaggtcacggagctcctgaggaccttctgtgagagcaagaggctgaccacggacaaggcgaacatcaaagacctatcccagatcctgaaaaagatgccgcag

SEQ ID NO: 70508 - DNA, 120 bp, Artificial Sequence
  ENSG00000076944_8 (sequence is synthesized)
taccagaaggagctgaataagtattctacgcacctgcatctagcagatgattgtatgaagcacttcaagggctcggtggagaagctgtgtagtgtggagcaggacctggccatgggctcc

SEQ ID NO: 70509 - DNA, 120 bp, Artificial Sequence
  ENSG00000076944_9 (sequence is synthesized)
gacgcagagggggagaagatcaaggactccatgaagctgatcgttccggtgctgctggacgcggcggtgcccgcctacgacaagatccgggtcctgctgctctacatcctccttcggaat

SEQ ID NO: 70510 - DNA, 120 bp, Artificial Sequence
  ENSG00000076944_10 (sequence is synthesized)
ggtgtgagtgaggagaacctggccaagctgatccagcatgccaatgtacaggcgcacagcagcctcatccgtaacctggagcagctgggaggcactgtcaccaaccccgggggctcgggg

SEQ ID NO: 70511 - DNA, 120 bp, Artificial Sequence
  ENSG00000076944_11 (sequence is synthesized)
acctccagccggctggagccgagagaacgcatggagcccacctatcagctgtcccgctggaccccggtcatcaaggatgtaatggaggacgccgtggaggaccggctggacaggaacctg

SEQ ID NO: 70512 - DNA, 120 bp, Artificial Sequence
  ENSG00000076944_12 (sequence is synthesized)
tggcccttcgtatccgaccccgcccccacggccagctcccaggccgctgtcagtgcccgcttcggtcactggcacaagaacaaggctggcatagaagcccgggcgggcccccggctcatc

SEQ ID NO: 70513 - DNA, 120 bp, Artificial Sequence
  ENSG00000076944_13 (sequence is synthesized)
gtgtatgtcatgggcggtgtggccatgtcagagatgagggccgcctacgaggtgaccagggccaccgagggcaagtgggaggtgctcattggctcctcacacatcctcaccccgacccgc

SEQ ID NO: 70514 - DNA, 120 bp, Artificial Sequence
  ENSG00000076944_14 (sequence is synthesized)
ttcctggatgacctgaaggcactggacaagaagctggaggacattgccctgccctgacccctggccccgccccctacccctccctttccagagaaataaactcttcccgtcgctctgcca

SEQ ID NO: 70515 - DNA, 120 bp, Artificial Sequence
  ENSG00000076944_15 (sequence is synthesized)
gatcatgtgaccaaatccattcttaaaccttgcaagctgactgcgggagcccatggattgcaggcctcccctgcagcactccctggctgcagccccttcctgaccgtgcagctccctcgt

SEQ ID NO: 70516 - DNA, 120 bp, Artificial Sequence
  ENSG00000076944_16 (sequence is synthesized)
ggagccctgtgtgggactcccagggtggactctggatgtggggtcccaagaatgcagagccttctatgggtgaccccaggtggtgtcccagtcactttgccattgagggataggtgctga

SEQ ID NO: 70517 - DNA, 120 bp, Artificial Sequence
  ENSG00000076944_17 (sequence is synthesized)
ccctgatcaaagacttccaggggaccccgactttcacctacaaagcggcccatatcttcttcaccgacagtgagtgaggagagcctagggtgttggtgggtggggcaaggaggtgtgggg

SEQ ID NO: 70518 - DNA, 120 bp, Artificial Sequence
  ENSG00000076944_18 (sequence is synthesized)
ccacggagaaggtgcctacatgagtgagcgtgtgtgtatgcgcgtgcatgcgtgtacatgtgcatgtgtgtgtatgtctgcatgcatgtgattgcatgtgtgcatgtgtatacgtgtgca

SEQ ID NO: 70519 - DNA, 120 bp, Artificial Sequence
  ENSG00000076944_19 (sequence is synthesized)
tgtgtccatgtgtatgtgtgtgcatgtgtgtgcatgtgtgtgtgcatctgtgtatgcatgtgtgtgcgtgtttgcatgtgtgtctatgtatgtgtctgtgtgcatgtgcatgtgtgtgcg

SEQ ID NO: 70520 - DNA, 120 bp, Artificial Sequence
  ENSG00000076944_20 (sequence is synthesized)
tctgtgtgtgcatttgtgtgtatgtgtgtatgcgtgtgtgtctgtgggtctgtgtgtgcatttgtgtctgtgcatgtgtgtatgcgtgtgtatgtatgtgtgtgtgcatctgtgtgcatc

SEQ ID NO: 70521 - DNA, 120 bp, Artificial Sequence
  ENSG00000076944_21 (sequence is synthesized)
ggttcctgtctgccaggatcttggcccctgaataccccgtggggggcactcctgaccccggaccccatgcctggggttcctcccctaacctgcctctcggccgccaggacgccgtggagg

SEQ ID NO: 70522 - DNA, 120 bp, Artificial Sequence
  ENSG00000076944_22 (sequence is synthesized)
ggagccttggagaggtagtctcaggatagtggtgtgacctgtgtgtaggtgggtggggcactggaaaggtgggacctgggtgaggagcagggcctgtggagagactgtccctggacaggg

SEQ ID NO: 70523 - DNA, 120 bp, Artificial Sequence
  ENSG00000076944_23 (sequence is synthesized)
gtgggaccttgagagacctggtgctgagatgaggtaggacccaaatgtcctcttgccgaggatcctggggatgtccttggcccgcctctcccatccccttccctgacacatagcggccgg

SEQ ID NO: 70524 - DNA, 120 bp, Artificial Sequence
  ENSG00000076944_24 (sequence is synthesized)
ccccggtcatcaaggatgtaatggaggtactgggtggcaggtcagggtgggggccagccctccgcatcggctggcggctcagcctccctcctgctgaggtgctaagcctcagggcttagg

SEQ ID NO: 70525 - DNA, 120 bp, Artificial Sequence
  ENSG00000076944_25 (sequence is synthesized)
caagcccgcagctgaggaattggggtgacagcggggcctgtgctggggagcctcacttcctccccacctgccggctgcctccgctatatctctctagtctgttcccctgtcccgcaggag

SEQ ID NO: 70526 - DNA, 120 bp, Artificial Sequence
  ENSG00000076944_26 (sequence is synthesized)
tgcccctgagccccagccctggccttcccaggatcccagggcagcaccatccaatggcaatgggcctggggcggcttcctggcttcctccttgtccctctaagagccccggcccctcttt

SEQ ID NO: 70527 - DNA, 120 bp, Artificial Sequence
  ENSG00000076944_27 (sequence is synthesized)
ctgcgtgggggccagagacctgggcctcctcatccccatggaccttgaatacctggacttctggggctctgaggggctgagagcccagacactgggttccccaaagggctgggggtattg

SEQ ID NO: 70528 - DNA, 120 bp, Artificial Sequence
  ENSG00000076944_28 (sequence is synthesized)
tgggtttagacttctgggtacccaaggagttatggaattagattcgtgggtccccagtgagttatggatctagatttctaggtccccaatggactagaggcctagactcctgggtccccc

SEQ ID NO: 70529 - DNA, 120 bp, Artificial Sequence
  ENSG00000076944_29 (sequence is synthesized)
cacgcctgggtctgtgttaggtgggcggcctggcggcggtgagggcctcctgcctggactttctgcccctgccctgcacagtgcccgcttcggtcactggcacaagaacaaggctggcat

SEQ ID NO: 70530 - DNA, 120 bp, Artificial Sequence
  ENSG00000076944_30 (sequence is synthesized)
taagtcaccaggactgggaccctggggtctggggcttgggttcccggggcctgggcttgtaccttctaggtgtctggactccagagtccttggagtcagggacctggtttgctgagggac

SEQ ID NO: 70531 - DNA, 120 bp, Artificial Sequence
  ENSG00000076944_31 (sequence is synthesized)
agggacagccccacaccagccgggaccgggagcctgtcaaagacgaaggcagcgccccccaacatcttccccaaacctctgcccctgcacaggctcctcacacatcctcaccccgacccg

SEQ ID NO: 70532 - DNA, 120 bp, Artificial Sequence
  ENSG00000076944_32 (sequence is synthesized)
actgtgggcctggtagcggccttgggatccctggctgctgccaagtctttggccctcatgagcacccctcgtgtgactccagactggcctccaatttcaccccacctctccctgtccccc

SEQ ID NO: 70533 - DNA, 120 bp, Artificial Sequence
  ENSG00000076944_33 (sequence is synthesized)
tgcatgcgtgtacatgtgcatgtgtgcatgtgtgtgcatgtgtgtgtgcatctgtgtatgcatgtgtgtgcgtgcatgtgtgtctatgtatgtgtctgtgtgcatgtgcatgtgtgtgcg

SEQ ID NO: 70534 - DNA, 120 bp, Artificial Sequence
  ENSG00000076944_34 (sequence is synthesized)
gtgtgtgtgtgcgtctgtctgtgtgcatgtgtgtatgcgtgtgtatgtatgtgtctgcgtctgtgtgtgcgtctgtgtgtatctgtgtgtgcatgtgtgtatgcgtgtatatgtatgtgc

SEQ ID NO: 70535 - DNA, 120 bp, Artificial Sequence
  ENSG00000076944_35 (sequence is synthesized)
atctgtgtgcatgtgtctatgtatgtgtgtgcatctgtgtgtgcgtgtgtatgcgtgtgtgtatgcgtctgtcatgtgtgtatgcgtgtgtgtgcgcatcagtgtctgcatgtgtgtata

SEQ ID NO: 70536 - DNA, 120 bp, Artificial Sequence
  ENSG00000076944_36 (sequence is synthesized)
gcatgtgtgcatgcgtgtgtatgtgtgtgtgcgtgcgtgcatctgtgtgtgtgcgcgtgtgcccatgtgggtgcgacactagtgtgcatttgcacatatacatgtccccgtccgtccatg

SEQ ID NO: 70537 - DNA, 120 bp, Artificial Sequence
  ENSG00000076944_37 (sequence is synthesized)
tttgcacatggtggcagatggggggtggctgggaggcctaggcagccaatgagcctaggtgtgcaggctcaggcccagagagtgatccaccttccccagtcggttcaggccctgatcaaa

SEQ ID NO: 70538 - DNA, 90 bp, Artificial Sequence
  ENSG00000076944_38 (sequence is synthesized)
tgtgaccaaatgtcccctgttccctcagaaacagacactgaggctggctgtgggaggccagggcaggaggatcacttggggccaggagtt

SEQ ID NO: 70539 - DNA, 120 bp, Artificial Sequence
  ENSG00000076944_39 (sequence is synthesized)
gaagtgtgtgtctgaactcccatctgtgagcgtgtcgtcgaggtgtgcacctccagcgacttcgtgctcggcagcgcggacgcacctgcccgtcctccccgccagggactcaacttcctg

SEQ ID NO: 70540 - DNA, 120 bp, Artificial Sequence
  ENSG00000076944_40 (sequence is synthesized)
ttgccttcatactttgtctcactgcttcttatctctttgcctatctctgcctctgtctttgtctttctctggctcgctctctctccctttggctttctctctccgtctctctctggctca

SEQ ID NO: 70541 - DNA, 120 bp, Artificial Sequence
  ENSG00000076944_41 (sequence is synthesized)
ctgtttctctctctcgctttcttgctgtctctcgctctctctcgctctctgttccacttccccatctttgcctgccatcccccaccctaccagccacaccaggcgcagcccctctgtgac

SEQ ID NO: 70542 - DNA, 120 bp, Artificial Sequence
  ENSG00000076944_42 (sequence is synthesized)
ttgggtgaatgggttctgggtcctcccacccagccagcccttgaaactgcccctcccactgccttggccccttctggggccagctgtggcctcttccgcctgctcctccatccatctgtc

SEQ ID NO: 70543 - DNA, 120 bp, Artificial Sequence
  ENSG00000076944_43 (sequence is synthesized)
gtgaacgcgtccccagtgagatgggacctgagcgtgggaacccctgactgtgcccctctcccagggttcagcccttgagtgtaggatcccctcaaatcgtccagaactcccaagtacgca

SEQ ID NO: 70544 - DNA, 120 bp, Artificial Sequence
  ENSG00000076984_0 (sequence is synthesized)
ctgccggactgacgggcggccgggcggtgcgcggcggcggtggcggcggggaagatggcggcgtcctccctggaacagaagctgtcccgcctggaagcaaagctgaagcaggagaaccgg

SEQ ID NO: 70545 - DNA, 120 bp, Artificial Sequence
  ENSG00000076984_1 (sequence is synthesized)
gaggcccggcggaggatcgacctcaacctggatatcagcccccagcggcccaggcccaccctgcagctcccgctggccaacgatgggggcagccgctcgccatcctcagagagctccccg

SEQ ID NO: 70546 - DNA, 120 bp, Artificial Sequence
  ENSG00000076984_2 (sequence is synthesized)
cagcaccccacgccccccgcccggccccgccacatgctggggctcccgtcaaccctgttcacaccccgcagcatggagagcattgagattgaccagaagctgcaggagatcatgaagcag

SEQ ID NO: 70547 - DNA, 120 bp, Artificial Sequence
  ENSG00000076984_3 (sequence is synthesized)
acgggctacctgaccatcgggggccagcgctaccaggcagaaatcaacgacctggagaacttgggcgagatgggcagcggcacctgcggccaggtgtggaagatgcgcttccggaagacc

SEQ ID NO: 70548 - DNA, 120 bp, Artificial Sequence
  ENSG00000076984_4 (sequence is synthesized)
ggccacgtcattgccgttaagcaaatgcggcgctccgggaacaaggaggagaacaagcgcatcctcatggacctggatgtggtgctgaagagccacgactgcccctacatcgtgcagtgc

SEQ ID NO: 70549 - DNA, 120 bp, Artificial Sequence
  ENSG00000076984_5 (sequence is synthesized)
tttgggacgttcatcaccaacacggacgtcttcatcgccatggagctcatgggcacctgcgctgagaagctcaagaagcggatgcagggccccatccccgagcgcattctgggcaagatg

SEQ ID NO: 70550 - DNA, 120 bp, Artificial Sequence
  ENSG00000076984_6 (sequence is synthesized)
acagtggcgattgtgaaggcgctgtactacctgaaggagaagcacggtgtcatccaccgcgacgtcaagccctccaacatcctgctggacgagcggggccagatcaagctctgcgacttc

SEQ ID NO: 70551 - DNA, 120 bp, Artificial Sequence
  ENSG00000076984_7 (sequence is synthesized)
ggcatcagcggccgcctggtggactccaaagccaagacgcggagcgccggctgtgccgcctacatggcacccgagcgcattgaccccccagaccccaccaagccggactatgacatccgg

SEQ ID NO: 70552 - DNA, 120 bp, Artificial Sequence
  ENSG00000076984_8 (sequence is synthesized)
gccgacgtatggagcctgggcatctcgttggtggagctggcaacaggacagtttccctacaagaactgcaagacggactttgaggtcctcaccaaagtcctacaggaagagcccccgctt

SEQ ID NO: 70553 - DNA, 120 bp, Artificial Sequence
  ENSG00000076984_9 (sequence is synthesized)
ctgcccggacacatgggcttctcgggggacttccagtccttcgtcaaagactgccttactaaagatcacaggaagagaccaaagtataataagctacttgaacacagcttcatcaagcgc

SEQ ID NO: 70554 - DNA, 120 bp, Artificial Sequence
  ENSG00000076984_10 (sequence is synthesized)
tacgagacgctggaggtggacgtggcgtcctggttcaaggatgtcatggcgaagactgagtcaccgcggactagcggcgtcctgagccagccccacctgcccttcttcaggtagctgctt

SEQ ID NO: 70555 - DNA, 120 bp, Artificial Sequence
  ENSG00000076984_11 (sequence is synthesized)
ggcggcggccagccccacagggggccaggggcatggccacaggcccccctccccacttggccacccagctgcctgccaggggagacctgggacctggacggccacctaggactgaggaca

SEQ ID NO: 70556 - DNA, 120 bp, Artificial Sequence
  ENSG00000076984_12 (sequence is synthesized)
gagagtggggggtgcccacccaccccccccgccccgggcctaccaagcccccgcccttcccaccccggggtcagccggccgtgtgcgtcccccgacagacactgtgaacggaagacagca

SEQ ID NO: 70557 - DNA, 120 bp, Artificial Sequence
  ENSG00000076984_13 (sequence is synthesized)
ggccgcgatcagagtcgctgttcattcagccgcagcctctgggccggggcggcccccaggggccaggagagagccctggagtcccgcagccaccatgcacgctcccagcgtgctgtgtcc

SEQ ID NO: 70558 - DNA, 120 bp, Artificial Sequence
  ENSG00000076984_14 (sequence is synthesized)
tcgccactcccacgcgcccgttcctcttccgtcgccctctgtcccctgctctacctctctgtccttgtctggctctcccgtcaccctccctgcctctgtctctcttctggcctgagcctg

SEQ ID NO: 70559 - DNA, 120 bp, Artificial Sequence
  ENSG00000076984_15 (sequence is synthesized)
ggcccagccacctcctgacgggtcccctgggtctgcataggtctcccatggcgcaatgagtcagtggcccccagccaggcagtgtgggcattgccactgcggctggacggggctgcgcgc

SEQ ID NO: 70560 - DNA, 120 bp, Artificial Sequence
  ENSG00000076984_16 (sequence is synthesized)
tcgcgctctctctctctctctctctctctctttgatctcagggggtcctttttggagtttattgtattttattgtacttggtggggtgtttggggtgggggcggaggagagcttgttctc

SEQ ID NO: 70561 - DNA, 120 bp, Artificial Sequence
  ENSG00000076984_17 (sequence is synthesized)
gtggggttgtcggtaccttcagaaacttttaccaaagtcacgattagctgcttgtggtggggccccaaccgccctcgggcactggggagctgggctggggctgctgctctggggtctccg

SEQ ID NO: 70562 - DNA, 120 bp, Artificial Sequence
  ENSG00000076984_18 (sequence is synthesized)
ggggccacagcttggggtgagttgaagacctcaggggatgtggaggggtctgcggggccctggccgcacaggatggccttcagggaaggtggtcttggggcatggtgcagagcaggtgac

SEQ ID NO: 70563 - DNA, 120 bp, Artificial Sequence
  ENSG00000076984_19 (sequence is synthesized)
cggagggaatcggtgacggagcggggccaagggaggggtccggagggagtcagggatggagggcagagggagtggatgtgggggtttgaggacgtgtgacaagctccagcaggggtgggg

SEQ ID NO: 70564 - DNA, 120 bp, Artificial Sequence
  ENSG00000076984_20 (sequence is synthesized)
gccgggctgagggtgggggtgcgaggtggtcactcccatcgtgcccctggccgtccctccactcacccacacctggcccagtccacgttgaggtccaggactgggaaggaccgggtgagt

SEQ ID NO: 70565 - DNA, 120 bp, Artificial Sequence
  ENSG00000076984_21 (sequence is synthesized)
gcaccggggacccaggccaggtgccccccggagcctgctggggtggccagagcaggagggggtgtgtttcctttttgtgggtgttgcatgcaaatcaagtggacaagaaaaaataacaaa

SEQ ID NO: 70566 - DNA, 120 bp, Artificial Sequence
  ENSG00000076984_22 (sequence is synthesized)
acaaaaaacaagaaaaaaaaaacacaaaaccccgtaaaatcacaaagaaaatccaacaccaaaggcgcagaagccggctggccgtggtgggggcagcgtaggcgtagcatccctctcctc

SEQ ID NO: 70567 - DNA, 120 bp, Artificial Sequence
  ENSG00000076984_23 (sequence is synthesized)
tcacttagcctgttgactcttgttattatcatgatattcacaaaacgccgcatgtttaaaaagtcatagatgtcatcttctctctgcccccagggaggaaagccaccttctcttgcccct

SEQ ID NO: 70568 - DNA, 120 bp, Artificial Sequence
  ENSG00000076984_24 (sequence is synthesized)
tggcccctttgtcaggggccaggggtctgccgggtgggggtgccaacaggcctggccctttcctcccctgcatccagccatgggggcctctgcgattgccggaaggttgcatggctggtc

SEQ ID NO: 70569 - DNA, 120 bp, Artificial Sequence
  ENSG00000076984_25 (sequence is synthesized)
ccagggccagcacaggcccgaggccgggctgcctggttttatttttatttaactttattttctgttttatgagtgtgtgtccgcccacccccacccccttcagtgttaagtggggagccc

SEQ ID NO: 70570 - DNA, 120 bp, Artificial Sequence
  ENSG00000076984_26 (sequence is synthesized)
tgggggagtctctcctgcctcccagcctctcccaagacctcccccctcgtcaccagccatccctctggaccaggcagagggcggaccgggtgggcaggggcctgagggtggctcgggcca

SEQ ID NO: 70571 - DNA, 120 bp, Artificial Sequence
  ENSG00000076984_27 (sequence is synthesized)
gcccaccagccaatggacccctcctcaggccgccagtgtcgccctgcccctttttaaaacaaaatgccctcgtttgtaaacccttagacgcttgagaataaaccccttccttttcttcca

SEQ ID NO: 70572 - DNA, 120 bp, Artificial Sequence
  ENSG00000076984_28 (sequence is synthesized)
tcgacctcaacctggatatcagcccccagcggcccaggcccaggactgtctggcgcccccctcccccggcctgggggcttgtcagccccgtgcagcgacgatctacgcacacgcgcacgc

SEQ ID NO: 70573 - DNA, 120 bp, Artificial Sequence
  ENSG00000076984_29 (sequence is synthesized)
ctggctcggggacacctgagttattgtgatcactctaagccctgctcctgccccgtcccaacgagcaggtaccagcctttttatcatcgctgcttggacatctgcaccattgacctaacc

SEQ ID NO: 70574 - DNA, 120 bp, Artificial Sequence
  ENSG00000076984_30 (sequence is synthesized)
gctgccccggccgcagaatggcgtcccccagcccccatgctctgtgtgtgtccccatgtcccttcccctcactctcactttctctctcactccactcaagcagcggtcagcccagcccag

SEQ ID NO: 70575 - DNA, 120 bp, Artificial Sequence
  ENSG00000076984_31 (sequence is synthesized)
cctcctctgcgtcctccctcctcctccccctcccttactcccagctccactttggactccctggaggaggaggtgggctcccccactgaatgggagtctgtggcctccgggggtgggggg

SEQ ID NO: 70576 - DNA, 120 bp, Artificial Sequence
  ENSG00000076984_32 (sequence is synthesized)
ggtgcacgcctgtgtgtgtgtaactgagagaacgagaaagttgggcctggtgggtgggtggcctgtgcctatggatctctctcaacaactaggtgaacacatagcaccccccgggttcca

SEQ ID NO: 70577 - DNA, 120 bp, Artificial Sequence
  ENSG00000076984_33 (sequence is synthesized)
ggggggcccactggacaaggagcacattcccaccagagagaacattctagctgggtgagcggccctgcagggggccagcctgggggaacctctggagacggtgggaattgaacaaagcct

SEQ ID NO: 70578 - DNA, 120 bp, Artificial Sequence
  ENSG00000076984_34 (sequence is synthesized)
gtgggaattgaacaaagcctctggggaggccaggcacggtggctcacacctgtgatcccaacactcggggaggttgaggctacagggagccatgatcacaccactgcaccccagcctggg

SEQ ID NO: 70579 - DNA, 76 bp, Artificial Sequence
  ENSG00000076984_35 (sequence is synthesized)
cctggccaacatggtgaaaccctgtctgcattaaaaatactagagattaggccaggcagggtggctcacctgaggt

SEQ ID NO: 70580 - DNA, 120 bp, Artificial Sequence
  ENSG00000076984_36 (sequence is synthesized)
aacgtgagtacctggccgcgccctgcagcgtctcctcctccctcacccctgccccttcctagggagcagagcctctggggggtgggccggaagacacagctcccccgggtgcccctctcc

SEQ ID NO: 70581 - DNA, 120 bp, Artificial Sequence
  ENSG00000077009_0 (sequence is synthesized)
ttggccctgacctcgttggaaaacgaagctccccgcagggtcccggcctctagggctgctgtgcgggcgggggtggcctggagctatttccattcggcggcgggaacaggtgccggcgcc

SEQ ID NO: 70582 - DNA, 120 bp, Artificial Sequence
  ENSG00000077009_1 (sequence is synthesized)
tccgccccatccccaggggccgcctcccccggggcggcctccaggctgccgagacctataaaggcgccaggttttctcaatgaagccgggacgcactccggagcgcactgcgtggtcgca

SEQ ID NO: 70583 - DNA, 120 bp, Artificial Sequence
  ENSG00000077009_2 (sequence is synthesized)
ccctacccgggctgccttggaagtcgtccccgccgcccctccgcaccggcatgaagctcatcgtgggcatcggaggcatgaccaacggcggcaagaccacgctgaccaacagcctgctca

SEQ ID NO: 70584 - DNA, 120 bp, Artificial Sequence
  ENSG00000077009_3 (sequence is synthesized)
gagccctgcccaactgctgcgtgatccatcaggatgacttcttcaagccccaagaccaaatagcagttggggaagacggcttcaaacagtgggacgtgctggagtctctggacatggagg

SEQ ID NO: 70585 - DNA, 120 bp, Artificial Sequence
  ENSG00000077009_4 (sequence is synthesized)
tgcccgtgcccacggggtcagcgtccagccagaggcctcggacacccacatcctcctcctggaaggcttcctgctctacagctacaagcccctggtggacttgtacagccgccggtactt

SEQ ID NO: 70586 - DNA, 120 bp, Artificial Sequence
  ENSG00000077009_5 (sequence is synthesized)
cctgaccgtcccgtatgaagagtgcaagtggaggagaagtacccgcaactacacagtccctgatccccccggcctcttcgatggccacgtgtggcccatgtaccagaagtataggcagga

SEQ ID NO: 70587 - DNA, 120 bp, Artificial Sequence
  ENSG00000077009_6 (sequence is synthesized)
gatggaggccaacggtgtggaagtggtctacctggacggcatgaagtcccgagaggagctcttccgtgaagtcctggaagacattcagaactcgctgctgaaccgctcccaggaatcagc

SEQ ID NO: 70588 - DNA, 120 bp, Artificial Sequence
  ENSG00000077009_7 (sequence is synthesized)
cccctccccggctcgcccagccaggacacagggacccggacgcggatgcggccacagaacggccaggcctgcagcgtcccagcaggacagcatgtgagcgtttccctatgggggtgtctg

SEQ ID NO: 70589 - DNA, 120 bp, Artificial Sequence
  ENSG00000077009_8 (sequence is synthesized)
tacgtaggagagtggaggccccactcccagttgggcgtcccggagctcagggactgagccccaagacgcctctgtaacctcgctgcagcttcagtagtaaactgggtcctgtttttttaa

SEQ ID NO: 70590 - DNA, 120 bp, Artificial Sequence
  ENSG00000077044_0 (sequence is synthesized)
gcgggcgcccctccgccgggtcccccgcaaccgcctccgccgccgccgcccgaggagtcgtccgacagcgagcccgaggcggagcccggctccccacagaagctcatccgcaaggtgtcc

SEQ ID NO: 70591 - DNA, 120 bp, Artificial Sequence
  ENSG00000077044_1 (sequence is synthesized)
cagaagctcatccgcaaggtgtccacgtcgggtcagatccgacagaagaccatcatcaaagaggggatgctgaccaaacagaacaattcattccagcgatcaaaaaggagatactttaag

SEQ ID NO: 70592 - DNA, 120 bp, Artificial Sequence
  ENSG00000077044_2 (sequence is synthesized)
cttcgagggcgaacgctttactatgccaaaacggcaaagtcaatcatatttgatgaggtggatctgacagatgccagcgtagctgaatccagtaccaaaaacgtcaacaacagttttacg

SEQ ID NO: 70593 - DNA, 120 bp, Artificial Sequence
  ENSG00000077044_3 (sequence is synthesized)
gtcataactccatgcaggaagctcatcttgtgtgctgataacagaaaagaaatggaagattggattgcagcattaaagactgtgcagaacagggagcactttgagcccacccagtacagc

SEQ ID NO: 70594 - DNA, 120 bp, Artificial Sequence
  ENSG00000077044_4 (sequence is synthesized)
atggaccacttctcagggatgcacaattggtacgcctgttcccacgcgaggccgacctactgcaatgtgtgccgtgaggctctgtctggggtcacgtcgcacgggctgtcctgcgaggtg

SEQ ID NO: 70595 - DNA, 120 bp, Artificial Sequence
  ENSG00000077044_5 (sequence is synthesized)
tgcaaatttaaggcccacaagcgctgtgctgtgcgtgcaaccaataactgcaagtggaccacactggcctcgatcgggaaggacatcattgaagatgcagatgggattgcaatgccccac

SEQ ID NO: 70596 - DNA, 120 bp, Artificial Sequence
  ENSG00000077044_6 (sequence is synthesized)
cagtggttggaaggaaacctacctgtgagcgccaagtgcactgtgtgcgacaagacctgtggcagtgtgctgcgcctgcaggactggcgctgcctctggtgcaaggccatggttcacaca

SEQ ID NO: 70597 - DNA, 120 bp, Artificial Sequence
  ENSG00000077044_7 (sequence is synthesized)
tcgtgtaaagaatccttgctgaccaagtgcccacttggcctgtgcaaagtgtcagtcatcccacccacggctctcaacagcatcgactccgatgggttctggaaggccagctgtcctcct

SEQ ID NO: 70598 - DNA, 120 bp, Artificial Sequence
  ENSG00000077044_8 (sequence is synthesized)
tcttgcacaagcccactgttggtcttcgtcaattcaaaaagtggggacaaccagggtgtgaagttcctcagaagattcaaacagctactaaaccccgcccaggtcttcgacctcatgaac

SEQ ID NO: 70599 - DNA, 120 bp, Artificial Sequence
  ENSG00000077044_9 (sequence is synthesized)
ggaggcccacacctcggcttacggttattccagaagtttgacacattccggattctggtttgtggcggggatggaagtgttggctgggtcctctccgaaatcgacagcctcaaccttcat

SEQ ID NO: 70600 - DNA, 120 bp, Artificial Sequence
  ENSG00000077044_10 (sequence is synthesized)
aaacagtgtcagctgggagtgctgccgctcggcacagggaacgacttggcccgagtactgggctggggctcagcctgcgatgacgacacccagctcccccagatcttggagaagttggag

SEQ ID NO: 70601 - DNA, 120 bp, Artificial Sequence
  ENSG00000077044_11 (sequence is synthesized)
agagccagcaccaagatgctggacaggtggagcgtcatggcatacgaggccaagctcccccggcaggcctcctcctctaccgtcaccgaagacttcagcgaggattccgaggtacagcag

SEQ ID NO: 70602 - DNA, 120 bp, Artificial Sequence
  ENSG00000077044_12 (sequence is synthesized)
attctcttctatgaagactcggttgcagcccacctttctaaaatcctcacctcggaccagcactcggtggtcatctcctcggccaaagtgctctgtgagacggtgaaggacttcgtggca

SEQ ID NO: 70603 - DNA, 120 bp, Artificial Sequence
  ENSG00000077044_13 (sequence is synthesized)
cgggtggggaaggcctatgagaagacgaccgagagctcggaggagtcagaggtcatggccaagaagtgctctgtcctgaaagagaagctggattcccttctcaagaccttggacgatgag

SEQ ID NO: 70604 - DNA, 120 bp, Artificial Sequence
  ENSG00000077044_14 (sequence is synthesized)
tcccaggcctcgtcctctctgcccaacccgccccccaccattgccgaggaggctgaagatggagatgggtcgggcagcatctgcggttccaccggagaccgcttggtggcatcagcttgc

SEQ ID NO: 70605 - DNA, 120 bp, Artificial Sequence
  ENSG00000077044_15 (sequence is synthesized)
ccggcccggccgcagatattccggcctcgagaacagctcatgctgagagccaacagcctgaagaaagcaattcgtcagatcatagaacacacagaaaaagctgtcgatgagcagaatgcc

SEQ ID NO: 70606 - DNA, 120 bp, Artificial Sequence
  ENSG00000077044_16 (sequence is synthesized)
cagacccaggagcaggagggcttcgtcctgggcctctctgagtcagaggagaagatggaccacagagtgtgcccaccactgtcccacagcgagagcttcggggtccccaaggggaggagc

SEQ ID NO: 70607 - DNA, 120 bp, Artificial Sequence
  ENSG00000077044_17 (sequence is synthesized)
cagcgcaaagtgtcgaaatctccgtgtgaaaagctgatcagcaaagggagtctgtccctaggcagttctgcttcccttccgccccagccgggaagccgggacggcctgcctgcgctcaac

SEQ ID NO: 70608 - DNA, 120 bp, Artificial Sequence
  ENSG00000077044_18 (sequence is synthesized)
accaagatcctgtacccaaatgtccgggctggaatgtctggttccttacccggtggctcagtcatcagtcgcctgttaattaatgctgatcccttcaactctgaaccagaaaccctagag

SEQ ID NO: 70609 - DNA, 120 bp, Artificial Sequence
  ENSG00000077044_19 (sequence is synthesized)
tattacacggagaaatgtgtcatgaacaactattttggcattggcctggatgcgaagatatccctggactttaacaacaagcgcgatgagcacccagagaagtgcaggagccgaaccaag

SEQ ID NO: 70610 - DNA, 120 bp, Artificial Sequence
  ENSG00000077044_20 (sequence is synthesized)
aacatgatgtggtatggagttcttggaaccaaagagttgctgcacagaacctacaagaacctggagcaaaaggtcttgctggagtgtgacgggcgacccatcccactccccagtcttcag

SEQ ID NO: 70611 - DNA, 120 bp, Artificial Sequence
  ENSG00000077044_21 (sequence is synthesized)
ggaattgctgtccttaacattcccagctatgccggaggaaccaacttctgggggggtaccaaggaagatgatactttcgcagctccatcattcgatgacaagattctggaggtggtcgcc

SEQ ID NO: 70612 - DNA, 120 bp, Artificial Sequence
  ENSG00000077044_22 (sequence is synthesized)
gtgttcggcagcatgcagatggccgtctctcgagtcatcaggctacagcatcatcggatcgcccagtgtcgcacggtgaagatctccatccttggggatgagggcgtgcctgtgcaggtg

SEQ ID NO: 70613 - DNA, 120 bp, Artificial Sequence
  ENSG00000077044_23 (sequence is synthesized)
gacggagaggcctgggtccagccgccagggtacattcggattgtccacaagaaccgggcacagacactgaccagagacagggcatttgagagcaccctgaagtcctgggaagacaagcag

SEQ ID NO: 70614 - DNA, 120 bp, Artificial Sequence
  ENSG00000077044_24 (sequence is synthesized)
aagtgcgagctgccccgccctccatcctgttccctgcacccggagatgctgtccgaggaggaggccacccagatggaccagtttgggcaggcagcaggggtcctcattcacagtatccga

SEQ ID NO: 70615 - DNA, 120 bp, Artificial Sequence
  ENSG00000077044_25 (sequence is synthesized)
gaaatagctcagtctcaccgggacatggagcaggaactggcccacgccgtcaatgccagctccaagtccatggaccgtgtgtatggcaagcccagaaccacagaggggctcaactgcagc

SEQ ID NO: 70616 - DNA, 120 bp, Artificial Sequence
  ENSG00000077044_26 (sequence is synthesized)
ctgtctgggaagatggccctgcagctggatccgcctcagaaggagcagctggggagtgctcttgccgagatggaccgacagctcaggaggctggcagacaccccgtggctctgccagtcc

SEQ ID NO: 70617 - DNA, 120 bp, Artificial Sequence
  ENSG00000077044_27 (sequence is synthesized)
gcagagcccggcgacgaagagagtgtgatgctggatcttgccaagcgcagtcgcagtggtaaattccgcctcgtgaccaagtttaaaaaggagaaaaacaacaagaacaaagaagctcac

SEQ ID NO: 70618 - DNA, 120 bp, Artificial Sequence
  ENSG00000077044_28 (sequence is synthesized)
agtagcctgggagccccggttcacctctgggggacagaggaggttgctgcctggctggagcacctcagtctctgtgagtataaggacatcttcacacggcacgacatccggggctctgag

SEQ ID NO: 70619 - DNA, 120 bp, Artificial Sequence
  ENSG00000077044_29 (sequence is synthesized)
ctcctgcacctggagcggagggacctcaaggacctgggcgtgaccaaggtgggccacatgaagaggatcctgtgtggcatcaaggagctgagccgcagcgcccccgccgtcgaggcctag

SEQ ID NO: 70620 - DNA, 120 bp, Artificial Sequence
  ENSG00000077044_30 (sequence is synthesized)
cctctgtcctctcagcctgtggcctccacatccccgccgccgaggcctagcctccgccctctcagcctgtggcctctgcgcctcctgccactgaggccctgggcagatgctgcagcccgc

SEQ ID NO: 70621 - DNA, 120 bp, Artificial Sequence
  ENSG00000077044_31 (sequence is synthesized)
ccccttctcatggtgctacttcctctgtcagctacagaaagcctccgtgacaccgtccaccagagctctggggtctcgaacataacaacacagctacctttgaaacaacactttctccag

SEQ ID NO: 70622 - DNA, 120 bp, Artificial Sequence
  ENSG00000077044_32 (sequence is synthesized)
ctcagagtcacctggggcacatgtgtcacggccactcagctctcgcccgcctgtgctgtgggccagggaatccagcggcgtctggcctcctgggcactgcttgcctggcctcgtgcttgg

SEQ ID NO: 70623 - DNA, 120 bp, Artificial Sequence
  ENSG00000077044_33 (sequence is synthesized)
attgtcccgggggctcctctccgtgtgtccttctgtggccgcaccgtgtggctccgcctcctggcccccagccagttctcagaaacgtggctggggcccagcacagcagcctgcaagggc

SEQ ID NO: 70624 - DNA, 120 bp, Artificial Sequence
  ENSG00000077044_34 (sequence is synthesized)
ccctgtttgttgatgcagcttttgttgaacaaaaatcgtgctctttcctggtttgaaagtagcatggatgtttccagtcttgttgattgtaatttgacgtgaagagaaaaaaaaattcct

SEQ ID NO: 70625 - DNA, 120 bp, Artificial Sequence
  ENSG00000077044_35 (sequence is synthesized)
cctgcgtgagccaaggcagcgggtgctgtttcccaggcggggagcccctccctgggtgtcacagggcctgtgctcctccctcctccatcctctctcctcccgctcctccctccccccact

SEQ ID NO: 70626 - DNA, 120 bp, Artificial Sequence
  ENSG00000077044_36 (sequence is synthesized)
gtgggctggggacgcctgcccttctgtctccggacgctctaggcgagttcagcttggggtgtgagtgagacagcttgccagctgcatccctgcagacagaggatgtgtgtccacatgagt

SEQ ID NO: 70627 - DNA, 120 bp, Artificial Sequence
  ENSG00000077044_37 (sequence is synthesized)
gtttctgtgtgggaaatgcttcctggctctgggaaactttttctgcccattctgtggttcccagggagcgtggccctggtgggccaggggtggtttgacctcttcagcccgtccggtggc

SEQ ID NO: 70628 - DNA, 120 bp, Artificial Sequence
  ENSG00000077044_38 (sequence is synthesized)
ctggaggccggaggctctcctgagtgtctgcccctgcagtggcttcttgtcgcctgctgctgggcgtgatgtcgctggaggtgctggcagggactctgatttggtggtccgcgctgcccc

SEQ ID NO: 70629 - DNA, 120 bp, Artificial Sequence
  ENSG00000077044_39 (sequence is synthesized)
tgccctgcctctgtcctggctctgaactagtagatgatggtgccagagggcagggagctcgcctggggagagggctgtgccccgtagggacagtgcccaggtgaaggatgcccctggtcc

SEQ ID NO: 70630 - DNA, 120 bp, Artificial Sequence
  ENSG00000077044_40 (sequence is synthesized)
tccagggcactgactttgcccttttttcccgttgatagtcatggctcagaggtgcttgtaaatgtcttgggaagaggtttctgtaacccctgccctggtgtgaggaggaaatggctctgg

SEQ ID NO: 70631 - DNA, 120 bp, Artificial Sequence
  ENSG00000077044_41 (sequence is synthesized)
cctggctgcctggccgtggcttctctttggctcccaaagagaaggacagtgttgggagtatctgccgtggcttctctttggctcccaaagagaaggacagtgttgggagtatctgccggc

SEQ ID NO: 70632 - DNA, 120 bp, Artificial Sequence
  ENSG00000077044_42 (sequence is synthesized)
gctgtccaggtcctttagtcagcgtcactccatctgatgtgcagaagctgggctgcacctgcgggggtgggcatagaccgggctgggtctgcagcagcccctggtcctgagcaggcggca

SEQ ID NO: 70633 - DNA, 120 bp, Artificial Sequence
  ENSG00000077044_43 (sequence is synthesized)
gtgaacagcactggcccacctcccactcacagcccctctgtcccctctgcagtgcacccaggtgggcccctctgcgtgcctttgggtgctcccctctcgtggtcgttctggcccgaggcc

SEQ ID NO: 70634 - DNA, 120 bp, Artificial Sequence
  ENSG00000077044_44 (sequence is synthesized)
cttagagtatggaggctgagccaggccttgggtttccccagcacagcctcctgtcgctgcatgcgacgtgttgggatttttggatgaaagactctcccacgctctgttggtggacttagc

SEQ ID NO: 70635 - DNA, 120 bp, Artificial Sequence
  ENSG00000077044_45 (sequence is synthesized)
tgcctcactggaagtgatgtgggtggaaggtggttgtatgttaccttttccacctctcattgttttccccagaacattgtagatgggggttggcagagggagaaataagccagccacggc

SEQ ID NO: 70636 - DNA, 120 bp, Artificial Sequence
  ENSG00000077044_46 (sequence is synthesized)
agtcgcttggtttcccaggtggaatgggctaacacaggagatgatgggaacctgtcccgcagtccctgcatgaccattggccctgctggcctggcgatgtgggcatcctggggttcttag

SEQ ID NO: 70637 - DNA, 120 bp, Artificial Sequence
  ENSG00000077044_47 (sequence is synthesized)
ggtcccagaacaagccccaggcaagctggaacttgggtggggaggggacatgaggaggataaacagctgactgtggcttcaaggacatcagggccaccccaagtcctcagtgtcctactc

SEQ ID NO: 70638 - DNA, 120 bp, Artificial Sequence
  ENSG00000077044_48 (sequence is synthesized)
ctggcaaggagttgggtttggatcaaaagtgtttaaaattaatatgttgtcagtgattagaacaacactgtttacataaaaaccatttttctaattctaacaagttagaatgtgaggaag

SEQ ID NO: 70639 - DNA, 120 bp, Artificial Sequence
  ENSG00000077044_49 (sequence is synthesized)
gaatgaacatgagtgtttaggaacctgccctttggtgctgggctggcgtcccgcactggggtgtcctcgctgtctgggggctgctctgctgccccggcccaggtccccttgtggtgttgc

SEQ ID NO: 70640 - DNA, 120 bp, Artificial Sequence
  ENSG00000077044_50 (sequence is synthesized)
cagacgggcctcatggtctgctgtgcagagagaggcaggaaggatccctgaagagtcttggagaaaaggttctgtgccctcaggtggggcttaccccctcgtatttataatcttaattta

SEQ ID NO: 70641 - DNA, 120 bp, Artificial Sequence
  ENSG00000077044_51 (sequence is synthesized)
tatagtgaccaccgtggaaacaaacgcctcttgtattgtcatgtacatagtccatacctgagtgctgtacataagttgttctgtgtataaataaaacaagcctgtttttgatcttccatc

SEQ ID NO: 70642 - DNA, 120 bp, Artificial Sequence
  ENSG00000077044_52 (sequence is synthesized)
agagacacgaatatgtttcagccgcaacaggctgcgtttcagccggaagagtgaaagggcaccttgaaaacgcaagtttatgaatatgtttctgtactttcagaccatcatcaaagaggg

SEQ ID NO: 70643 - DNA, 120 bp, Artificial Sequence
  ENSG00000077044_53 (sequence is synthesized)
ggggctcacagccaggtggaaacagcctctgctgcaaacggacccaaacctggagccgacccgccagcatgccgctgtcaggatgagtaggggtcaggacggaagctcctagcacaggcc

SEQ ID NO: 70644 - DNA, 120 bp, Artificial Sequence
  ENSG00000077044_54 (sequence is synthesized)
ttttatgtatgagatgtgtagcaggagatgcaagaaaaaatactccagcatctgtcctttaaagataacttataacttttctgggttttgggttgttggttttgtcttttttttttttcc

SEQ ID NO: 70645 - DNA, 120 bp, Artificial Sequence
  ENSG00000077044_55 (sequence is synthesized)
catttagggaagagatggaagtgattgctttccccacaaagaccatcatcaaagaggggatgctgaccaaacagaacaattcattccagcgatcaaaaaggagatactttaagcttcgag

SEQ ID NO: 70646 - DNA, 120 bp, Artificial Sequence
  ENSG00000077044_56 (sequence is synthesized)
ggcgaacgctttactatgccaaaacggcaaaggtgaggccccatgcaggaaagcacacgcgaggacatcacaggagccgtcccaggggaggaactgggggtgctgagtccttgtgtggga

SEQ ID NO: 70647 - DNA, 120 bp, Artificial Sequence
  ENSG00000077044_57 (sequence is synthesized)
acgctgtcaggttttacttgtctcaaggcatgttttatttcttatcaaaattaatttctgttcattttccttttctttaatgtcatcggtaatggggaaaaggaaaaaagggtcacagag

SEQ ID NO: 70648 - DNA, 120 bp, Artificial Sequence
  ENSG00000077044_58 (sequence is synthesized)
acagccgcgttacagctggatatctctctctcagaaaggcggagggaatcacggggctatgaatttcatcttcttattattaaataatttttattctttaagtatattgaagttcttttt

SEQ ID NO: 70649 - DNA, 78 bp, Artificial Sequence
  ENSG00000077044_59 (sequence is synthesized)
cacgcctggctaaaatttttatatttgagtagagatggggtttcactatgtaggtcaagctggtctcgaactcctgac

SEQ ID NO: 70650 - DNA, 120 bp, Artificial Sequence
  ENSG00000077044_60 (sequence is synthesized)
acaggtaccaggacaggagggagcccagccaggagcagagagggtgcggaggttagagggaaatcatgcagtctcagctcctgttcatctcggagcacctgttctcaggccagaaaccat

SEQ ID NO: 70651 - DNA, 120 bp, Artificial Sequence
  ENSG00000077044_61 (sequence is synthesized)
tggtggttttggggagtgtgcagtttggtggccagggcagagaggggagagcctgggccaccccctggcattgtggaggcccgggggctctggccatgatgtatgagggggacctgaagg

SEQ ID NO: 70652 - DNA, 120 bp, Artificial Sequence
  ENSG00000077044_62 (sequence is synthesized)
gagctacgaaaagaattgcccacaaaggacccacatggggagcagggctgggtggggctgttgctttactgggtaatttttgtcttgaggcctcttgcttgtgagaaggggacggcagta

SEQ ID NO: 70653 - DNA, 120 bp, Artificial Sequence
  ENSG00000077044_63 (sequence is synthesized)
tacttgagtttctcaagtcagagtcatggttcattggacttagttttttgtattaaaataaaaatagattttcctgattgtgtataaaaatgttcatatagtcatttaatttccacacca

SEQ ID NO: 70654 - DNA, 120 bp, Artificial Sequence
  ENSG00000077044_64 (sequence is synthesized)
agccacggcctccccaggtgatcagccagtgccaacattttgctgtctctgacctctcttgatcacagtacatacaatgcacagtgcacttgtaatttaaacgggctattctgttactgc

SEQ ID NO: 70655 - DNA, 120 bp, Artificial Sequence
  ENSG00000077044_65 (sequence is synthesized)
gtttgctaagtgtggggttttactgaaggcagcacctgcttctgcagcacagctggtctgaaaagccaggttgctccttgtgagggcttaggggtcggttttaacagtcactccaagcag

SEQ ID NO: 70656 - DNA, 120 bp, Artificial Sequence
  ENSG00000077044_66 (sequence is synthesized)
tgcaaggttcgactgctgactttgcttcccacagcatttccactgcttgacacaggtgaatggctccgaccccatttctgacagagggacacaagcaggtcagttgtcagccttgctcta

SEQ ID NO: 70657 - DNA, 120 bp, Artificial Sequence
  ENSG00000077044_67 (sequence is synthesized)
tgtgaattcatcgttgactgatggacagttttattctctcaccagcactacttagaaagtgaggttctgggtttggttccttttctggtgctctgggacttcgtttctggaaagtgagct

SEQ ID NO: 70658 - DNA, 76 bp, Artificial Sequence
  ENSG00000077044_68 (sequence is synthesized)
cttgggcattaatttagatgttcattttggtttcagttatttgcatatttcctaataaaaaaattattcttggtaa

SEQ ID NO: 70659 - DNA, 120 bp, Artificial Sequence
  ENSG00000077044_69 (sequence is synthesized)
ctcttttggttggtggctgattgcacggtactgatttgctgctccagcgttcctgctctacttcgtaatctgtaggctcttgcccattgactttaacacccagtttttgtttgtgctggg

SEQ ID NO: 70660 - DNA, 120 bp, Artificial Sequence
  ENSG00000077044_70 (sequence is synthesized)
gggtgtgagcgggtgggcctgagctcagtggggaagagctgtctgagagcaggggggtgttctgctgtggctggggtggatccagctcttctgttgtgccagcagtggggttgccgtgga

SEQ ID NO: 70661 - DNA, 120 bp, Artificial Sequence
  ENSG00000077044_71 (sequence is synthesized)
gaacaagatagacagggtcccccacccagctcatcgtctagagggctgagcagagcagttgtgtcagtgaaggtggtcagtgagggtctgtggtcagcagatgtggtcagcgggtgtgac

SEQ ID NO: 70662 - DNA, 120 bp, Artificial Sequence
  ENSG00000077044_72 (sequence is synthesized)
gtggaaggagggtcagggaaggtgtctgggaggccaagacctgaaggatgagttggagttggctaagttaggtgggcagaggagagggggaggctgttccaggcagagagaattgcacag

SEQ ID NO: 70663 - DNA, 120 bp, Artificial Sequence
  ENSG00000077044_73 (sequence is synthesized)
atgaaggctcagagtcaagacagggcaggcacatggaggatgggagagaggtgccccgactgcagtgggcagcaggggcgtggagagacaggagagggctgcagggcctgggtcacactg

SEQ ID NO: 70664 - DNA, 120 bp, Artificial Sequence
  ENSG00000077063_0 (sequence is synthesized)
gcattcggatccgctagagcaggaagatggcgacggacggcgcgagctgcgagcccgacttgtcccgggccccggaggacgcggcgggggccgcggcggaggcggcgaaaaaagagtttg

SEQ ID NO: 70665 - DNA, 120 bp, Artificial Sequence
  ENSG00000077063_1 (sequence is synthesized)
atgtggatactctcagtaaatccgagctgcggatgctcctcagcgtgatggaaggggagctggaggccagagaccttgtcatcgaggccctgcgggctcgcaggaaggaggtatttatcc

SEQ ID NO: 70666 - DNA, 120 bp, Artificial Sequence
  ENSG00000077063_2 (sequence is synthesized)
aggaacggtatgggagatttaatctaaatgacccgttcctggcactccagagagactatgaagcaggtgctggtgacaaagagaagaagccagtttgtaccaaccccctctccatccttg

SEQ ID NO: 70667 - DNA, 120 bp, Artificial Sequence
  ENSG00000077063_3 (sequence is synthesized)
aagcagtcatggcccactgcaagaaaatgcaagaaaggatgtccgcacagctggctgctgctgagagcagacaaaagaagctggaaatggagaagcttcagctacaagcccttgagcaag

SEQ ID NO: 70668 - DNA, 120 bp, Artificial Sequence
  ENSG00000077063_4 (sequence is synthesized)
agcacaagaagctggctgcccgccttgaggaagagcgtggcaagaacaagcaggtggtcctgatgctggtcaaagagtgcaagcagctctcaggcaaagtcatagaggaggcccagaagc

SEQ ID NO: 70669 - DNA, 120 bp, Artificial Sequence
  ENSG00000077063_5 (sequence is synthesized)
tcgaagacgtaatggccaaactggaagaggaaaagaaaaagacgaatgaattagaagaggaactctccgctgagaaacgaagaagcacagaaatggaagctcagatggaaaaacaactct

SEQ ID NO: 70670 - DNA, 120 bp, Artificial Sequence
  ENSG00000077063_6 (sequence is synthesized)
ctgagtttgacactgagcgggaacagcttcgtgccaagctgaaccgggaagaagcacacaccactgacctcaaagaggagatagacaagatgaggaaaatgattgagcaactgaaaaggg

SEQ ID NO: 70671 - DNA, 120 bp, Artificial Sequence
  ENSG00000077063_7 (sequence is synthesized)
gaagtgacagcaaaccaagcctctctcttccacggaagacaaaagataggcgtttggtttccatatctgtgggaacagaaggaactgtgacaaggtctgttgcatgccagacagacctag

SEQ ID NO: 70672 - DNA, 120 bp, Artificial Sequence
  ENSG00000077063_8 (sequence is synthesized)
tgacagaaaatgctgaccacatgaaaaagttgcctttaaccatgcctgtaaaaccttccacagggagtcccctagtttctgcaaatgcaaaagggagcgtgtgcaccagtgccaccatgg

SEQ ID NO: 70673 - DNA, 120 bp, Artificial Sequence
  ENSG00000077063_9 (sequence is synthesized)
ccagaccaggtattgacaggcaggcttcctatggtgacttgattggcgcttctgtacccgctttcccacctccaagtgcaaacaaaattgaggaaaatggaccaagcactggctcaacac

SEQ ID NO: 70674 - DNA, 120 bp, Artificial Sequence
  ENSG00000077063_10 (sequence is synthesized)
cagatccaaccagtagcacacccccacttcccagtaacgctgcccctcccaccgctcaaacaccaggcatagctcctcagaactcgcaagctccacctatgcacagtttacattcaccat

SEQ ID NO: 70675 - DNA, 120 bp, Artificial Sequence
  ENSG00000077063_11 (sequence is synthesized)
gtgccaacacctctttgcatccaggtctaaacccacgaatccaagcagctagatttagatttcagggcaatgctaacgacccagaccaaaatggaaatactacccaaagtcctccgtcaa

SEQ ID NO: 70676 - DNA, 120 bp, Artificial Sequence
  ENSG00000077063_12 (sequence is synthesized)
gagatgtctcgcctacaagtcgtgacaacctagtggccaaacaactagctcggaatactgtgacccaagcactgtcaagatttacaagccctcaagcaggtgctccctcaaggcctggag

SEQ ID NO: 70677 - DNA, 120 bp, Artificial Sequence
  ENSG00000077063_13 (sequence is synthesized)
tgcccccaacaggggatgttggcacccaccctccagttggtcggaccagtttaaagactcatggtgtagcacgagttgacagaggaaatcctcctcctatccctccaaaaaagccagggc

SEQ ID NO: 70678 - DNA, 120 bp, Artificial Sequence
  ENSG00000077063_14 (sequence is synthesized)
tctcccaaactccttctccaccacacccccaactcaaggttattatagacagcagcagggcctcgaacacaggggccaaagttgataacaaaactgtggcttcgactccttccagtttgc

SEQ ID NO: 70679 - DNA, 120 bp, Artificial Sequence
  ENSG00000077063_15 (sequence is synthesized)
cacaagggaacagggtgatcaatgaggagaaccttcctaagtcatcctcccctcagctgccaccaaaaccatccatagatttaactgtggcacctgcaggctgtgccgtttcagccctgg

SEQ ID NO: 70680 - DNA, 120 bp, Artificial Sequence
  ENSG00000077063_16 (sequence is synthesized)
ccacgtctcaggtgggtgcctggcctgctgcaacccccggactgaaccaacctgcatgttcagacagttcccttgtcattcctaccaccattgccttttgctcttccataaaccccgtta

SEQ ID NO: 70681 - DNA, 120 bp, Artificial Sequence
  ENSG00000077063_17 (sequence is synthesized)
gtgcctcatcctgtagaccaggtgcctcagacagcctcctggtaacagcatcaggctggtcaccctccctaacccctttgctaatgagtggtggtcctgcccccctggctggcaggccca

SEQ ID NO: 70682 - DNA, 120 bp, Artificial Sequence
  ENSG00000077063_18 (sequence is synthesized)
cccttcttcagcaagctgctgcccagggaaatgtcactttattatcaatgctgcttaatgaagaaggactggacattaattactcctgtgaagatggccattctgccttgtattctgctg

SEQ ID NO: 70683 - DNA, 120 bp, Artificial Sequence
  ENSG00000077063_19 (sequence is synthesized)
ctaagaatggacatacagactgtgtgagattgctgctgagtgcagaagcccaagtcaatgctgctgataaaaatggcttcacacccttgtgtgctgcagctgctcagggacatttcgagt

SEQ ID NO: 70684 - DNA, 120 bp, Artificial Sequence
  ENSG00000077063_20 (sequence is synthesized)
gtgtagaattattaatttcatatgatgctaacattaatcatgctgctgatggaggacagacacctctatacctggcctgtaaaaatggaaataaagaatgtattaaactcttgttggaag

SEQ ID NO: 70685 - DNA, 120 bp, Artificial Sequence
  ENSG00000077063_21 (sequence is synthesized)
ctggaaccaatcgaagtgtaaaaaccacagatggctggacaccagttcacgcagctgtggacactggtaatgtggacagcctcaagcttcttatgtaccatagaataccagctcatggaa

SEQ ID NO: 70686 - DNA, 120 bp, Artificial Sequence
  ENSG00000077063_22 (sequence is synthesized)
attctttcaatgaggaggagtccgagtcaagtgtctttgacttggatggaggagaagagagtcctgaaggcatatccaagcctgttgttcctgcagacctcattaaccacgccaacagag

SEQ ID NO: 70687 - DNA, 120 bp, Artificial Sequence
  ENSG00000077063_23 (sequence is synthesized)
aaggctggactgctgcccacattgctgcttccaaaggttttaagaactgcctagaaatcttgtgtaggcacggagggcttgagccagaaaggagagacaagtgcaatcggactgtgcatg

SEQ ID NO: 70688 - DNA, 120 bp, Artificial Sequence
  ENSG00000077063_24 (sequence is synthesized)
atttgctggagaatctgaatgctcttaaaatacccttaaggatttcagtgggtgagattgaaccaagcaactatggttctgatgacttggaatgtgaaaacacaatatgtgctttaaata

SEQ ID NO: 70689 - DNA, 120 bp, Artificial Sequence
  ENSG00000077063_25 (sequence is synthesized)
tccgcaaacagacatcatgggatgatttttcaaaagcagtgagtcaagctctgacaaatcatttccaggcaatctcttctgatggatggtggagtctggaagacgtgacttgcaataaca

SEQ ID NO: 70690 - DNA, 120 bp, Artificial Sequence
  ENSG00000077063_26 (sequence is synthesized)
ccactgattccaacatcggcctcagtgcaagaagcatacgatccatcacgctaggaaatgtgccgtggtcagtgggtcagagcttcgcgcagtccccgtgggactttatgaggaagaata

SEQ ID NO: 70691 - DNA, 120 bp, Artificial Sequence
  ENSG00000077063_27 (sequence is synthesized)
aggcagagcacatcactgtgcttttgtcaggtcctcaagaaggctgtctcagtagtgtgacttatgcctccatgatccctctccagatgatgcagaactacctcaggctggttgagcaat

SEQ ID NO: 70692 - DNA, 120 bp, Artificial Sequence
  ENSG00000077063_28 (sequence is synthesized)
atcataatgtcattttccacggcccagaaggaagcttgcaagactacatagtacatcagcttgcactctgcctgaagcacagacaaatggctgcaggattctcctgtgaaatagtgagag

SEQ ID NO: 70693 - DNA, 120 bp, Artificial Sequence
  ENSG00000077063_29 (sequence is synthesized)
ctgaagtagatgctggtttttccaaggaacagctactagacctgttcattagtagcgcttgtctgatcccagtgaaacaatctcccagtaagaagaaaatcatcatcattttagaaaatt

SEQ ID NO: 70694 - DNA, 120 bp, Artificial Sequence
  ENSG00000077063_30 (sequence is synthesized)
tagaaaaatcttcactgtcggagttattgagggactttttggcacctcttgaaaatcgcagcactgaaagcccctgcactttccaaaaaggaaatggactgtccgaatgttattactttc

SEQ ID NO: 70695 - DNA, 120 bp, Artificial Sequence
  ENSG00000077063_31 (sequence is synthesized)
atgagaactgctttctgatgggaaccatcgccaaggcctgtctccagggctccgacttgctggtgcagcagcatttccgctgggtgcagctgcggtgggatggcgagcccatgcaaggac

SEQ ID NO: 70696 - DNA, 120 bp, Artificial Sequence
  ENSG00000077063_32 (sequence is synthesized)
tgctgcagaggttcttacgaaggaaagttgtgaataagttcaaaggtcaggcgccctccccctgcgatcctgtgtgcaagattgtcgactgggctctgtccgtctggcgtcagcttaact

SEQ ID NO: 70697 - DNA, 120 bp, Artificial Sequence
  ENSG00000077063_33 (sequence is synthesized)
cctgcctggcccgcttgggcacacctgaagcacttcttggaccaaaatatttcctgtcttgtcctgtagttcctgggcatgcccaagtgacagtgaagtggatgtctaagctgtggaatg

SEQ ID NO: 70698 - DNA, 120 bp, Artificial Sequence
  ENSG00000077063_34 (sequence is synthesized)
gcgtcatcgcacccagagttcaagaagcaatattgtcaagagcctctgtgaaaagacaacctggctttgggcagacaactgctaaaagacaccctagccaaggacagcaggctgtggtca

SEQ ID NO: 70699 - DNA, 120 bp, Artificial Sequence
  ENSG00000077063_35 (sequence is synthesized)
aagctgctctcagcatcttgctaaataaagctgtactgcatggctgtcccctccccagagcagagctagaccagcatacagctgatttcaaaggaggaagtttccctttatccatagttt

SEQ ID NO: 70700 - DNA, 120 bp, Artificial Sequence
  ENSG00000077063_36 (sequence is synthesized)
ccagttataacacttgtaacaagaagaaaggagagagtggtgcctggagaaaggtgaacaccagtcctcgcaggaagtctggccgcttctctttacccacctggaataagccagacctaa

SEQ ID NO: 70701 - DNA, 120 bp, Artificial Sequence
  ENSG00000077063_37 (sequence is synthesized)
gcactgaaggtatgaaaaataagactatatcacagctgaattgtaacaggaatgcttctctgtcaaaacaaaagtctttagagaatgatctatcactgacgttgaatttggatcagagac

SEQ ID NO: 70702 - DNA, 120 bp, Artificial Sequence
  ENSG00000077063_38 (sequence is synthesized)
tctctctgggttcagatgacgaagcagatcttgtcaaggaacttcagagcatgtgctccagcaagtctgagtctgatatcagcaagattgctgattccagggatgatttaaggatgtttg

SEQ ID NO: 70703 - DNA, 120 bp, Artificial Sequence
  ENSG00000077063_39 (sequence is synthesized)
atagttctggaaacaaccctgtactttcagcaactattaataatctgagaatgccagtgtcacaaaaggaggtcagtcctctcagcagccatcaaactactgaatgcagcaacagtaaat

SEQ ID NO: 70704 - DNA, 120 bp, Artificial Sequence
  ENSG00000077063_40 (sequence is synthesized)
caaagactgagttgggtgtttcaagagttaaatcttttcttcctgttcctagaagtaaagtcacccagtgttcccagaacaccaaaagaagcagcagcagcagtaatacaaggcaaatag

SEQ ID NO: 70705 - DNA, 120 bp, Artificial Sequence
  ENSG00000077063_41 (sequence is synthesized)
aaatcaacaacaactcaaaagaagtgaattggaacttacacaaaaatgaacacctagaaaaacctaacaaataggcctgcctacaatattctcattattaacttcctctatttcacacag

SEQ ID NO: 70706 - DNA, 120 bp, Artificial Sequence
  ENSG00000077063_42 (sequence is synthesized)
aaaccaaggacaacaagatacaaatacctttaaattgataaaatgttttcactgtaatataaattatgagtgcgggaccactattcaatttttttttgtaaagaatgtatttataaccaa

SEQ ID NO: 70707 - DNA, 120 bp, Artificial Sequence
  ENSG00000077063_43 (sequence is synthesized)
cattttgttgcttttttttttaattctgtaggattgaacttcaataccaggaagttatgccaacttttcaagtagttttataatagaaaaattgtaatagttttaatcaagatgttcagg

SEQ ID NO: 70708 - DNA, 120 bp, Artificial Sequence
  ENSG00000077063_44 (sequence is synthesized)
ggtattaaaacagaactgtgtactgtatatctgtatatatgtatatatgtatgtatatttaaggaagtccagaaatcatactgcatacatgctacaaaaaagtagcaaaaaagtacaaag

SEQ ID NO: 70709 - DNA, 120 bp, Artificial Sequence
  ENSG00000077063_45 (sequence is synthesized)
ttggcttagataacttgtaccgttttaaatggagatcataattttatgttcacttgatggggaatgactagaatggggcaataacaaatcatttctaaacagttattttccattaaaagc

SEQ ID NO: 70710 - DNA, 120 bp, Artificial Sequence
  ENSG00000077063_46 (sequence is synthesized)
catattaagtattttgcttgttaaattctagttttatgttttaaatctcttagtggttacattgccatttggtagcatcatgtatatatttatgcttataagtttgcattatgactcctg

SEQ ID NO: 70711 - DNA, 120 bp, Artificial Sequence
  ENSG00000077063_47 (sequence is synthesized)
taaaatatgaaattataatgcaataaaagtgttatctttcttacaaaagttttgtacctaagtggatatagataactgcataaatgaataaattcagaattaactccttcaatatttcta

SEQ ID NO: 70712 - DNA, 120 bp, Artificial Sequence
  ENSG00000077063_48 (sequence is synthesized)
gtagcacaactgataatattgatattttctacaaatgttacttctaaaattacagacaaaattacttacacaattcagttaagatgctttgacactgaataaaatattgatttcatgaaa

SEQ ID NO: 70713 - DNA, 120 bp, Artificial Sequence
  ENSG00000077063_49 (sequence is synthesized)
ttatgtttgtgggtttcataacctgattcttagttcattgattaagcacattcaaagcttacttgtggcagctgccggtgctgaaaaacttgagtattcacaatgtagccattatgtaat

SEQ ID NO: 70714 - DNA, 120 bp, Artificial Sequence
  ENSG00000077063_50 (sequence is synthesized)
aaaaggagattgtatagaaagttaggagctgaggggctggtgccacgttctaaaagaaaacaggacagacaaatcgttttcatctgagaattgtttttggagaaacactagagtcaacga

SEQ ID NO: 70715 - DNA, 120 bp, Artificial Sequence
  ENSG00000077063_51 (sequence is synthesized)
actcaccctcccacaggtcactcttgtgccatgcgcacatggcttactgcaggagcgctacgggaaggtgtgtggtgggaatcccatgcagagagaacagcaaggacaaagaccccgagg

SEQ ID NO: 70716 - DNA, 120 bp, Artificial Sequence
  ENSG00000077063_52 (sequence is synthesized)
cctatatgtgttccgtacatgcctttgacaattaaagctctgaattccttagggttctcacagaagagagcatatgtttacccttgtgagaaaaaccactcataagcttcccttgacatt

SEQ ID NO: 70717 - DNA, 120 bp, Artificial Sequence
  ENSG00000077063_53 (sequence is synthesized)
atgtgtatgagatcaatctgaaactaatactactggtataaaacattaaacataattttgcttgctgccttaatttcgatgacctttttaaataaatgagttggaactatgacccttgac

SEQ ID NO: 70718 - DNA, 120 bp, Artificial Sequence
  ENSG00000077063_54 (sequence is synthesized)
gctttctggagagggagaggagagatgtggaggaaggtacttggggtgagaggagctgagcctggcaatggaaggagaaacggggaggaggactgctaatttccacttgtaaaactgaaa

SEQ ID NO: 70719 - DNA, 120 bp, Artificial Sequence
  ENSG00000077080_0 (sequence is synthesized)
gagtcccgccccgccagggatcccgggagctgtccggccgcctcggtgctgatcccgccaccgcccacgggccgctagcagcgcagcgggcactatgagcgggggcgtctacggcggaga

SEQ ID NO: 70720 - DNA, 120 bp, Artificial Sequence
  ENSG00000077080_1 (sequence is synthesized)
tgaggtgggggcgctggtctttgacattggctccttctcagtccgcgctgggtacgctggggaggactgtcccaaggctgacttccccaccacagtggggctgctggccgcggaggaggg

SEQ ID NO: 70721 - DNA, 120 bp, Artificial Sequence
  ENSG00000077080_2 (sequence is synthesized)
gggcgggctggagctggagggggacaaagagaagaaagggaagatcttccacatcgacaccaatgccctgcacgtgcctcgggatggagcggaggtcatgtcgcccctcaagaatggcat

SEQ ID NO: 70722 - DNA, 120 bp, Artificial Sequence
  ENSG00000077080_3 (sequence is synthesized)
gatcgaggactgggagtgcttccgagccatcctggatcacacctacagcaaacacgtcaagtctgagccaaacctgcacccagtgctcatgtccgaggctccgtggaacacacgggccaa

SEQ ID NO: 70723 - DNA, 120 bp, Artificial Sequence
  ENSG00000077080_4 (sequence is synthesized)
gcgggagaagctgacagagctgatgttcgagcagtacaacattcctgccttcttcttatgcaagacggctgtgctcaccgcctttgcaaacgggcggtccactggcctcgtgctggacag

SEQ ID NO: 70724 - DNA, 120 bp, Artificial Sequence
  ENSG00000077080_5 (sequence is synthesized)
tggagccacccacaccacggccattccagtacatgacggctacgttctgcagcaaggcatcgtcaagtcccctctggcaggggacttcatctccatgcagtgccgggagctgttccagga

SEQ ID NO: 70725 - DNA, 120 bp, Artificial Sequence
  ENSG00000077080_6 (sequence is synthesized)
ggagaagctaccccaggtctccaagtcctggcataactacatgtgtaatgaggtgatccaggacttccaggcctccgtgctgcaggtctcagactccccctacgatgaacaggtggctgc

SEQ ID NO: 70726 - DNA, 120 bp, Artificial Sequence
  ENSG00000077080_7 (sequence is synthesized)
acaaatgcccacagtgcactacgagatgcccaatggctacaatacagactacggcgccgagcgactccgcatccctgagggcctgtttgatccctcgaacgtcaagggcctgtcggggaa

SEQ ID NO: 70727 - DNA, 120 bp, Artificial Sequence
  ENSG00000077080_8 (sequence is synthesized)
caccatgttgggtgtgggccacgtggtgaccaccagcatcggcatgtgtgacattgatattcgcccgggcctgtacgggagtgtcattgtcaccggcgggaacacactgctgcagggctt

SEQ ID NO: 70728 - DNA, 120 bp, Artificial Sequence
  ENSG00000077080_9 (sequence is synthesized)
cactgacaggctcaatcgagagctttcccagaagaccccaccgagcatgcgactgaaactcattgccagcaacagcaccatggagcgcaagttcagcccctggatcgggggttccatcct

SEQ ID NO: 70729 - DNA, 120 bp, Artificial Sequence
  ENSG00000077080_10 (sequence is synthesized)
ggcctcactgggcactttccagcagatgtggatctccaagcaggaatatgaggagggcgggaagcagtgcgtggagcgaaagtgcccctgatggcactcctccccacacacctgctccca

SEQ ID NO: 70730 - DNA, 120 bp, Artificial Sequence
  ENSG00000077080_11 (sequence is synthesized)
agctcagatggaagtcccttaacccccatgccacattgcccccctcctcctttccctcttgtcctcattaatggtgatgtttctgggttgaaagaagtaaaaatgttttaagaaaaaaaa

SEQ ID NO: 70731 - DNA, 120 bp, Artificial Sequence
  ENSG00000077080_12 (sequence is synthesized)
gcagcgggcactatgagcgggggcgtctacggcggagatgaggtgggggcgctggtctttgacattggctccttctcagtccgcgctgggtacgctggggaggactgtcccaaggtgagc

SEQ ID NO: 70732 - DNA, 120 bp, Artificial Sequence
  ENSG00000077080_13 (sequence is synthesized)
cttccagtctcctctccaaatcctaggggcttcggacccttcttcaggctttccagtgacccagggctctcccagatcgcccagaagctctgctgagcgggaatatgggaataaacccag

SEQ ID NO: 70733 - DNA, 120 bp, Artificial Sequence
  ENSG00000077080_14 (sequence is synthesized)
gggcggtctgaggaccctgctgtggggctggacaggggcaagagggtgacctctctccctgccaatactcccccaacccttccccaccaggctgacttccccaccacagtggggctgctg

SEQ ID NO: 70734 - DNA, 120 bp, Artificial Sequence
  ENSG00000077080_15 (sequence is synthesized)
acatcatcccaccttacatgatcgcagccaaggtggggcctctggggacatggagctgccactagagtcctggccactcgccccatggccgtcaaccctctgacacatgagatatcagag

SEQ ID NO: 70735 - DNA, 120 bp, Artificial Sequence
  ENSG00000077080_16 (sequence is synthesized)
cagagagcagcaggctccccagtgggtcctggctccagttcctccttttataatcgaggcatccgaaatccagacaggctgagggatatgctgaggtcatgaaaccagctggcagacagc

SEQ ID NO: 70736 - DNA, 120 bp, Artificial Sequence
  ENSG00000077080_17 (sequence is synthesized)
cagcaggatgtgtgagggccagtgtggtgggttctagggtccaatatagacccaggttcaagttctgcctctgccgtgcaagagctgcaggaccggtcaggcatggtggctcacacctgt

SEQ ID NO: 70737 - DNA, 120 bp, Artificial Sequence
  ENSG00000077080_18 (sequence is synthesized)
agggatcccgggagctgtccggccgcctcggtgctgatcccgccaccgcccacgggccgctagcagcgcagcgggcactatgagcgggggcgtctacggcggaggctgacttccccacca

SEQ ID NO: 70738 - DNA, 120 bp, Artificial Sequence
  ENSG00000077080_19 (sequence is synthesized)
cccaccgcatgaaaggcacacatggagagagaggcatgccccattctctctcctctccatcagggaagggtgagaaacccctcttgcaggcagcacagcagagcctgcagcgccaggtag

SEQ ID NO: 70739 - DNA, 120 bp, Artificial Sequence
  ENSG00000077080_20 (sequence is synthesized)
ctgcagagctgggaacagtgccaggaaggtgggggtgggggtcaggtgggctaggaaagggtgttcctacactgtgcccccacaggagcctgtccgggagggtgcccccccaaactggaa

SEQ ID NO: 70740 - DNA, 120 bp, Artificial Sequence
  ENSG00000077092_0 (sequence is synthesized)
gtgacagaagtagtaggaagtgagctgttcagaggcaggagggtctattctttgccaaaggggggaccagaattcccccatgcgagctgtttgaggactgggatgccgagaacgcgagcg

SEQ ID NO: 70741 - DNA, 120 bp, Artificial Sequence
  ENSG00000077092_1 (sequence is synthesized)
atccgagcagggtttgtctgggcaccgtcggggtaggatccggaacgcattcggaaggctttttgcaagcatttacttggaaggagaacttgggatctttctgggaaccccccgccccgg

SEQ ID NO: 70742 - DNA, 120 bp, Artificial Sequence
  ENSG00000077092_2 (sequence is synthesized)
ctggattggccgagcaagcctggaaaatggtaaatgatcatttggatcaattacaggcttttagctggcttgtctgtcataattcatgattcggggctgggaaaaagaccaacagcctac

SEQ ID NO: 70743 - DNA, 120 bp, Artificial Sequence
  ENSG00000077092_3 (sequence is synthesized)
gtgccaaaaaaggggcagagtttgatggagttgggtggacttttctatgccatttgcctccacacctagaggataagcacttttgcagacattcagtgcaagggagatcatgtttgactg

SEQ ID NO: 70744 - DNA, 120 bp, Artificial Sequence
  ENSG00000077092_4 (sequence is synthesized)
tatggatgttctgtcagtgagtcctgggcaaatcctggatttctacactgcgagtccgtcttcctgcatgctccaggagaaagctctcaaagcatgcttcagtggattgacccaaaccga

SEQ ID NO: 70745 - DNA, 120 bp, Artificial Sequence
  ENSG00000077092_5 (sequence is synthesized)
atggcagcatcggcacactgctcaatcaattgaaacacagagcaccagctctgaggaactcgtcccaagccccccatctccacttcctccccctcgagtgtacaaaccctgcttcgtctg

SEQ ID NO: 70746 - DNA, 120 bp, Artificial Sequence
  ENSG00000077092_6 (sequence is synthesized)
ccaggacaaatcatcagggtaccactatggggtcagcgcctgtgagggatgtaagggctttttccgcagaagtattcagaagaatatgatttacacttgtcaccgagataagaactgtgt

SEQ ID NO: 70747 - DNA, 120 bp, Artificial Sequence
  ENSG00000077092_7 (sequence is synthesized)
tattaataaagtcaccaggaatcgatgccaatactgtcgactccagaagtgctttgaagtgggaatgtccaaagaatctgtcaggaatgacaggaacaagaaaaagaaggagacttcgaa

SEQ ID NO: 70748 - DNA, 120 bp, Artificial Sequence
  ENSG00000077092_8 (sequence is synthesized)
gcaagaatgcacagagagctatgaaatgacagctgagttggacgatctcacagagaagatccgaaaagctcaccaggaaactttcccttcactctgccagctgggtaaatacaccacgaa

SEQ ID NO: 70749 - DNA, 120 bp, Artificial Sequence
  ENSG00000077092_9 (sequence is synthesized)
ttccagtgctgaccatcgagtccgactggacctgggcctctgggacaaattcagtgaactggccaccaagtgcattattaagatcgtggagtttgctaaacgtctgcctggtttcactgg

SEQ ID NO: 70750 - DNA, 120 bp, Artificial Sequence
  ENSG00000077092_10 (sequence is synthesized)
cttgaccatcgcagaccaaattaccctgctgaaggccgcctgcctggacatcctgattcttagaatttgcaccaggtataccccagaacaagacaccatgactttctcagacggccttac

SEQ ID NO: 70751 - DNA, 120 bp, Artificial Sequence
  ENSG00000077092_11 (sequence is synthesized)
cctaaatcgaactcagatgcacaatgctggatttggtcctctgactgaccttgtgttcacctttgccaaccagctcctgcctttggaaatggatgacacagaaacaggccttctcagtgc

SEQ ID NO: 70752 - DNA, 120 bp, Artificial Sequence
  ENSG00000077092_12 (sequence is synthesized)
catctgcttaatctgtggagaccgccaggaccttgaggaaccgacaaaagtagataagctacaagaaccattgctggaagcactaaaaatttatatcagaaaaagacgacccagcaagcc

SEQ ID NO: 70753 - DNA, 120 bp, Artificial Sequence
  ENSG00000077092_13 (sequence is synthesized)
aaagatcttaatgaaaatcacagatctccgtagcatcagtgctaaaggtgcagagcgtgtaattaccttgaaaatggaaattcctggatcaatgccacctctcattcaagaaatgctgga

SEQ ID NO: 70754 - DNA, 120 bp, Artificial Sequence
  ENSG00000077092_14 (sequence is synthesized)
gaattctgaaggacatgaacccttgaccccaagttcaagtgggaacacagcagagcacagtcctagcatctcacccagctcagtggaaaacagtggggtcagtcagtcaccactcgtgca

SEQ ID NO: 70755 - DNA, 120 bp, Artificial Sequence
  ENSG00000077092_15 (sequence is synthesized)
ataagacattttctagctacttcaaacattccccagtaccttcagttccaggatttaaaatgcaagaaaaaacatttttactgctgcttagtttttggactgaaaagatattaaaactca

SEQ ID NO: 70756 - DNA, 120 bp, Artificial Sequence
  ENSG00000077092_16 (sequence is synthesized)
agaaggaccaagaagttttcatatgtatcaatatatatactcctcactgtgtaacttacctagaaatacaaacttttccaattttaaaaaatcagccatttcatgcaaccagaaactagt

SEQ ID NO: 70757 - DNA, 120 bp, Artificial Sequence
  ENSG00000077092_17 (sequence is synthesized)
taaaagcttctattttcctctttgaacactcaagattgcatggcaaagacccagtcaaaatgatttacccctggttaagtttctgaagactttgtacatacagaagtatggctctgttct

SEQ ID NO: 70758 - DNA, 120 bp, Artificial Sequence
  ENSG00000077092_18 (sequence is synthesized)
ttctatactgtatgtttggtgctttccttttgtcttgcatactcaaaataaccatgacaccaaggttatgaaatagactactgtacacgtctacctaggttcaaaaagataactgtcttg

SEQ ID NO: 70759 - DNA, 120 bp, Artificial Sequence
  ENSG00000077092_19 (sequence is synthesized)
ctttcatggaatagtcaagacatcaaggtaaggaaacaggactattgacaggactattgtacagtatgacaagataaggctgaagatattctactttagttagtatggaagcttgtcttt

SEQ ID NO: 70760 - DNA, 120 bp, Artificial Sequence
  ENSG00000077092_20 (sequence is synthesized)
gctctttctgatgctctcaaactgcatcttttatttcatgttgcccagtaaaagtatacaaattccctgcactagcagaagagaattctgtatcagtgtaactgccagttcagttaatca

SEQ ID NO: 70761 - DNA, 120 bp, Artificial Sequence
  ENSG00000077092_21 (sequence is synthesized)
aatgtcatttgttcaattgttaatgtcactttaaattaaaagtggtttattacttgtttaatgacataactacacagttagttaaaaaaaatttttttacagtaatgatagcctccaagg

SEQ ID NO: 70762 - DNA, 120 bp, Artificial Sequence
  ENSG00000077092_22 (sequence is synthesized)
cagaaacacttttcagtgttaagtttttgtttacttgttcacaagccattagggaaatttcatgggataattagcaggctggtctaccacctggaccatgtaactctagtgtccttcctg

SEQ ID NO: 70763 - DNA, 120 bp, Artificial Sequence
  ENSG00000077092_23 (sequence is synthesized)
attcatgcctgatattgggatttttttttccagccttcttgatgccaaggggctaattaatattaacaactcccaaagaaacaggcatagaatctgcctcctttgaccttgttcaatcac

SEQ ID NO: 70764 - DNA, 120 bp, Artificial Sequence
  ENSG00000077092_24 (sequence is synthesized)
tatgaagcagagtgaaagctgtggtagagtggttaacagatacaagtgtcagtttcttagttctcatttaagcactagtggaattttttttttttgatatattagcaagtctgtgatgta

SEQ ID NO: 70765 - DNA, 120 bp, Artificial Sequence
  ENSG00000077092_25 (sequence is synthesized)
ctttcactggctctgtttgtacattgagattgtttgtttaacaatgctttctatgttcatatactgtttacctttttccatggagtctcctggcaaagaataaaatatatttattttaaa

SEQ ID NO: 70766 - DNA, 120 bp, Artificial Sequence
  ENSG00000077092_26 (sequence is synthesized)
aaggaaagaaaagaaacatgacttcaaaggcaaatacaactaactcatccataaaaaatttctcaaaggaactatggctgttttgaactagcccttccctagatatataacttctttaag

SEQ ID NO: 70767 - DNA, 120 bp, Artificial Sequence
  ENSG00000077092_27 (sequence is synthesized)
tcctctctggatggttgtttacatctgttgtttatacatctaaattgcatgattcatttgtaattgttaacatgttggaataatgttacaggtactccatggcattttatatttggctta

SEQ ID NO: 70768 - DNA, 120 bp, Artificial Sequence
  ENSG00000077092_28 (sequence is synthesized)
ttggtttaagacctggagtgatgtgttcctgctccagagcacctttctttctgtgaggcccgaaacatgaccaccagcggccacgcatgtccggtcccagcagtgaacggacacatgact

SEQ ID NO: 70769 - DNA, 120 bp, Artificial Sequence
  ENSG00000077092_29 (sequence is synthesized)
cactatccagccacaccctacccgttactctttccacctgtcatcggaggactttccctgcctcccctccatggccttcatggacatccgcctccgagtggatgcagcaccccgtcgccg

SEQ ID NO: 70770 - DNA, 120 bp, Artificial Sequence
  ENSG00000077097_0 (sequence is synthesized)
tttgagggcagccggcggcgcggcctcctcagcgggctcggctggacgtccgctccggatcttcgcgatggggcgcgggggtcggcgcggctaggagtgcggcgagtggagcggtgggtg

SEQ ID NO: 70771 - DNA, 120 bp, Artificial Sequence
  ENSG00000077097_1 (sequence is synthesized)
ggaggcgggagcggcggctgcggcctcagggcctgtgagctggaggcactcgccatggccaagtcgggtggctgcggcgcgggagccggcgtgggcggcggcaacggggcactgacctgg

SEQ ID NO: 70772 - DNA, 120 bp, Artificial Sequence
  ENSG00000077097_2 (sequence is synthesized)
gggcggcggcaacggggcactgacctgggtgaacaatgctgcaaaaaaagaagagtcagaaactgccaacaaaaatgattcttcaaagaagttgtctgttgagagagtgtatcagaagaa

SEQ ID NO: 70773 - DNA, 120 bp, Artificial Sequence
  ENSG00000077097_3 (sequence is synthesized)
gacacaacttgaacacattcttcttcgtcctgatacatatattgggtcagtggagccattgacgcagttcatgtgggtgtatgatgaagatgtaggaatgaattgcagggaggttacctt

SEQ ID NO: 70774 - DNA, 120 bp, Artificial Sequence
  ENSG00000077097_4 (sequence is synthesized)
tgtgccaggtttatacaagatctttgatgaaattttggttaatgctgctgacaataaacagagggataagaacatgacttgtattaaagtttctattgatcctgaatctaacattataag

SEQ ID NO: 70775 - DNA, 120 bp, Artificial Sequence
  ENSG00000077097_5 (sequence is synthesized)
catttggaataatgggaaaggcattccagtagtagaacacaaggtagagaaagtttatgttcctgctttaatttttggacagcttttaacatccagtaactatgatgatgatgagaaaaa

SEQ ID NO: 70776 - DNA, 120 bp, Artificial Sequence
  ENSG00000077097_6 (sequence is synthesized)
agttacaggtggtcgtaatggttatggtgcaaaactttgtaatattttcagtacaaagtttacagtagaaacagcttgcaaagaatacaaacacagttttaagcagacatggatgaataa

SEQ ID NO: 70777 - DNA, 120 bp, Artificial Sequence
  ENSG00000077097_7 (sequence is synthesized)
tatgatgaagacttctgaagccaaaattaaacattttgatggtgaagattacacatgcataacattccaaccagatctgtccaaatttaagatggaaaaacttgacaaggatattgtggc

SEQ ID NO: 70778 - DNA, 120 bp, Artificial Sequence
  ENSG00000077097_8 (sequence is synthesized)
cctcatgactagaagggcatatgatttggctggttcgtgtagaggggtcaaggtcatgtttaatggaaagaaattgcctgtaaatggatttcgcagttatgtagatctttatgtgaaaga

SEQ ID NO: 70779 - DNA, 120 bp, Artificial Sequence
  ENSG00000077097_9 (sequence is synthesized)
caaattggatgaaactggggtggccctgaaagttattcatgagcttgcaaatgaaagatgggatgtttgtctcacattgagtgaaaaaggattccagcaaatcagctttgtaaatagtat

SEQ ID NO: 70780 - DNA, 120 bp, Artificial Sequence
  ENSG00000077097_10 (sequence is synthesized)
tgcaactacaaaaggtggacggcacgtggattatgtggtagatcaagttgttggtaaactgattgaagtagttaagaaaaagaacaaagctggtgtatcagtgaaaccatttcaagtaaa

SEQ ID NO: 70781 - DNA, 120 bp, Artificial Sequence
  ENSG00000077097_11 (sequence is synthesized)
aaaccatatatgggtttttattaattgccttattgaaaatccaacttttgattctcagactaaggaaaacatgactctgcagcccaaaagttttgggtctaaatgccagctgtcagaaaa

SEQ ID NO: 70782 - DNA, 120 bp, Artificial Sequence
  ENSG00000077097_12 (sequence is synthesized)
attttttaaagcagcctctaattgtggcattgtagaaagtatcctgaactgggtgaaatttaaggctcagactcagctgaataagaagtgttcatcagtaaaatacagtaaaatcaaagg

SEQ ID NO: 70783 - DNA, 120 bp, Artificial Sequence
  ENSG00000077097_13 (sequence is synthesized)
tattcccaaactggatgatgctaatgatgctggtggtaaacattccctggagtgtacactgatattaacagagggagactctgccaaatcactggctgtgtctggattaggtgtgattgg

SEQ ID NO: 70784 - DNA, 120 bp, Artificial Sequence
  ENSG00000077097_14 (sequence is synthesized)
acgagacagatacggagtttttccactcaggggcaaaattcttaatgtacgggaagcttctcataaacagatcatggaaaatgctgaaataaataatattattaaaatagttggtctaca

SEQ ID NO: 70785 - DNA, 120 bp, Artificial Sequence
  ENSG00000077097_15 (sequence is synthesized)
atataagaaaagttacgatgatgcagaatctctgaaaaccttacgctatggaaagattatgattatgaccgatcaggatcaagatggttctcacataaaaggcctgcttattaatttcat

SEQ ID NO: 70786 - DNA, 120 bp, Artificial Sequence
  ENSG00000077097_16 (sequence is synthesized)
ccatcacaattggccatcacttttgaagcatggttttcttgaagagttcattactcctattgtaaaggcaagcaaaaataagcaggaactttccttctacagtattcctgaatttgacga

SEQ ID NO: 70787 - DNA, 120 bp, Artificial Sequence
  ENSG00000077097_17 (sequence is synthesized)
atggaaaaaacatatagaaaaccagaaagcctggaaaataaagtactataaaggattgggtactagtacagctaaagaagcaaaggaatattttgctgatatggaaaggcatcgcatctt

SEQ ID NO: 70788 - DNA, 120 bp, Artificial Sequence
  ENSG00000077097_18 (sequence is synthesized)
gtttagatatgctggtcctgaagatgatgctgccattaccttggcatttagtaagaagaagattgatgacagaaaagaatggttaacaaattttatggaagaccggagacagcgtaggct

SEQ ID NO: 70789 - DNA, 120 bp, Artificial Sequence
  ENSG00000077097_19 (sequence is synthesized)
acatggcttaccagagcaatttttatatggtactgcaacaaagcatttgacttataatgatttcatcaacaaggaattgattctcttctcaaactcagacaatgaaagatctataccatc

SEQ ID NO: 70790 - DNA, 120 bp, Artificial Sequence
  ENSG00000077097_20 (sequence is synthesized)
tcttgttgatggctttaaacctggccagcggaaagttttatttacctgtttcaagaggaatgataaacgtgaagtaaaagttgcccagttggctggctctgttgctgagatgtcggctta

SEQ ID NO: 70791 - DNA, 120 bp, Artificial Sequence
  ENSG00000077097_21 (sequence is synthesized)
tcatcatggagaacaagcattgatgatgactattgtgaatttggctcagaactttgtgggaagtaacaacattaacttgcttcagcctattggtcagtttggaactcggcttcatggtgg

SEQ ID NO: 70792 - DNA, 120 bp, Artificial Sequence
  ENSG00000077097_22 (sequence is synthesized)
caacgtgtagagcctgagtggtatattcctataattcccatggttttaataaatggtgctgagggcattggtactggatgggcttgtaaactacccaactatgatgctagggaaattgtg

SEQ ID NO: 70793 - DNA, 120 bp, Artificial Sequence
  ENSG00000077097_23 (sequence is synthesized)
aacaatgtcagacgaatgctagatggcctggatcctcatcccatgcttccaaactacaaaaactttaaaggcacgattcaagaacttggtcaaaaccagtatgcagtcagtggtgaaata

SEQ ID NO: 70794 - DNA, 120 bp, Artificial Sequence
  ENSG00000077097_24 (sequence is synthesized)
tttgtagtggacagaaacacagtagaaattacagagcttccagttagaacttggacacaggtatataaagaacaggttttagaacctatgctaaatggaacagataaaacaccagcatta

SEQ ID NO: 70795 - DNA, 120 bp, Artificial Sequence
  ENSG00000077097_25 (sequence is synthesized)
atttctgattataaagaatatcatactgacacaactgtgaaatttgtggtgaaaatgactgaagagaaactagcacaagcagaagctgctggactgcataaagtttttaaacttcaaact

SEQ ID NO: 70796 - DNA, 120 bp, Artificial Sequence
  ENSG00000077097_26 (sequence is synthesized)
actcttacttgtaattccatggtactttttgatcatatgggatgtctgaagaaatatgaaactgtgcaagacattctgaaagaattctttgatttacgattaagttattacggtttacgt

SEQ ID NO: 70797 - DNA, 120 bp, Artificial Sequence
  ENSG00000077097_27 (sequence is synthesized)
aaggagtggcttgtgggaatgttgggagcagaatctacaaagcttaacaatcaagcccgtttcattttagagaagatacaagggaaaattactatagagaataggtcaaagaaagatttg

SEQ ID NO: 70798 - DNA, 120 bp, Artificial Sequence
  ENSG00000077097_28 (sequence is synthesized)
attcaaatgttagtccagagaggttatgaatctgacccagtgaaagcctggaaagaagcacaagaaaaggcagcagaagaggatgaaacacaaaaccagcatgatgatagttcctccgat

SEQ ID NO: 70799 - DNA, 120 bp, Artificial Sequence
  ENSG00000077097_29 (sequence is synthesized)
tcaggaactccttcaggcccagattttaattatattttaaatatgtctctgtggtctcttactaaagaaaaagttgaagaactgattaaacagagagatgcaaaagggcgagaggtcaat

SEQ ID NO: 70800 - DNA, 120 bp, Artificial Sequence
  ENSG00000077097_30 (sequence is synthesized)
gatcttaaaagaaaatctccttcagatctttggaaagaggatttagcggcatttgttgaagaactggataaagtggaatctcaagaacgagaagatgttctggctggaatgtctggaaaa

SEQ ID NO: 70801 - DNA, 120 bp, Artificial Sequence
  ENSG00000077097_31 (sequence is synthesized)
gcaattaaaggtaaagttggcaaacctaaggtgaagaaactccagttggaagagacaatgccctcaccttatggcagaagaataattcctgaaattacagctatgaaggcagatgccagc

SEQ ID NO: 70802 - DNA, 120 bp, Artificial Sequence
  ENSG00000077097_32 (sequence is synthesized)
aaaaagttgctgaagaagaagaagggtgatcttgatactgcagcagtaaaagtggaatttgatgaagaattcagtggagcaccagtagaaggtgcaggagaagaggcattgactccatca

SEQ ID NO: 70803 - DNA, 120 bp, Artificial Sequence
  ENSG00000077097_33 (sequence is synthesized)
gttcctataaataaaggtcccaaacctaagagggagaagaaggagcctggtaccagagtgagaaaaacacctacatcatctggtaaacctagtgcaaagaaagtgaagaaacggaatcct

SEQ ID NO: 70804 - DNA, 120 bp, Artificial Sequence
  ENSG00000077097_34 (sequence is synthesized)
tggtcagatgatgaatccaagtcagaaagtgatttggaagaaacagaacctgtggttattccaagagattctttgcttaggagagcagcagccgaaagacctaaatacacatttgatttc

SEQ ID NO: 70805 - DNA, 120 bp, Artificial Sequence
  ENSG00000077097_35 (sequence is synthesized)
tcagaagaagaggatgatgatgctgatgatgatgatgatgacaataatgatttagaggaattgaaagttaaagcatctcccataacaaatgatggggaagatgaatttgttccttcagat

SEQ ID NO: 70806 - DNA, 120 bp, Artificial Sequence
  ENSG00000077097_36 (sequence is synthesized)
gggttagataaagatgaatatacattttcaccaggcaaatcaaaagccactccagaaaaatctttgcatgacaaaaaaagtcaggattttggaaatctcttctcatttccttcatattct

SEQ ID NO: 70807 - DNA, 120 bp, Artificial Sequence
  ENSG00000077097_37 (sequence is synthesized)
cagaagtcagaagatgattcagctaaatttgacagtaatgaagaagattctgcttctgttttttcaccatcatttggtctgaaacagacagataaagttccaagtaaaacggtagctgct

SEQ ID NO: 70808 - DNA, 120 bp, Artificial Sequence
  ENSG00000077097_38 (sequence is synthesized)
aaaaagggaaaaccgtcttcagatacagtccctaagcccaagagagccccaaaacagaagaaagtagtagaggctgtaaactctgactcggattcagaatttggcattccaaagaagact

SEQ ID NO: 70809 - DNA, 120 bp, Artificial Sequence
  ENSG00000077097_39 (sequence is synthesized)
acaacaccaaaaggtaaaggccgaggggcaaagaaaaggaaagcatctggctctgaaaatgaaggcgattataaccctggcaggaaaacatccaaaacaacaagcaagaaaccgaagaag

SEQ ID NO: 70810 - DNA, 120 bp, Artificial Sequence
  ENSG00000077097_40 (sequence is synthesized)
acatcttttgatcaggattcagatgtggacatcttcccctcagacttccctactgagccaccttctctgccacgaaccggtcgggctaggaaagaagtaaaatattttgcagagtctgat

SEQ ID NO: 70811 - DNA, 120 bp, Artificial Sequence
  ENSG00000077097_41 (sequence is synthesized)
gaagaagaagatgatgttgattttgcaatgtttaattaagtgcccaaagagcacaaacatttttcaacaaatatcttgtgttgtccttttgtcttctctgtctcagacttttgtacatct

SEQ ID NO: 70812 - DNA, 120 bp, Artificial Sequence
  ENSG00000077097_42 (sequence is synthesized)
ggcttattttaatgtgatgatgtaattgacggttttttattattgtggtaggccttttaacattttgttcttacacatacagttttatgctcttttttactcattgaaatgtcacgtact

SEQ ID NO: 70813 - DNA, 120 bp, Artificial Sequence
  ENSG00000077097_43 (sequence is synthesized)
gtctgattggcttgtagaattgttatagactgccgtgcattagcacagattttaattgtcatggttacaaactacagacctgctttttgaaatgaaatttaaacattaaaaatggaactg

SEQ ID NO: 70814 - DNA, 120 bp, Artificial Sequence
  ENSG00000077097_44 (sequence is synthesized)
tctgacaagatgcagtgataaaacattaattctactctcttaactttaaaatgtggtatcctctcattttgttactgagtacctgaggaaatcagttaatttttcatcagattcctggat

SEQ ID NO: 70815 - DNA, 120 bp, Artificial Sequence
  ENSG00000077097_45 (sequence is synthesized)
ttttggagtagatggagatggcataaaaacatcttagtatatacctgcagatggctttctaggaaaaaacaaacaaacaaaacaaacgtgttagtatgtactcactttgttacagaatct

SEQ ID NO: 70816 - DNA, 120 bp, Artificial Sequence
  ENSG00000077097_46 (sequence is synthesized)
taattttttaaaagcttttgttagccatccccctaccttctattcctttcctcccagtcctggttccctatgataagtctcttttgaatgctcaagctagttaattttaatttttccccc

SEQ ID NO: 70817 - DNA, 80 bp, Artificial Sequence
  ENSG00000077147_0 (sequence is synthesized)
gcggtgacggcgacggcggcggcagaggaggcagcggctgggccgggccccgtgcgtctgtccgcgccccgtggatgcga

SEQ ID NO: 70818 - DNA, 120 bp, Artificial Sequence
  ENSG00000077147_1 (sequence is synthesized)
ccggaggggcgcggaggatgaggccgctgcctggcgctcttggcgtggcggcggccgccgcgctgtggctgctgctgctgctgctgccccggacccgggcggacgagcacgaacacacgt

SEQ ID NO: 70819 - DNA, 120 bp, Artificial Sequence
  ENSG00000077147_2 (sequence is synthesized)
ctgctgccccggacccgggcggacgagcacgaacacacgtatcaagataaagaggaagttgtcttatggatgaatactgttgggccctaccataatcgtcaagaaacatataagtacttt

SEQ ID NO: 70820 - DNA, 120 bp, Artificial Sequence
  ENSG00000077147_3 (sequence is synthesized)
tcacttccattctgtgtggggtcaaaaaaaagtatcagtcattaccatgaaactctgggagaagcacttcaaggggttgaattggaatttagtggtctggatattaaatttaaagatgat

SEQ ID NO: 70821 - DNA, 120 bp, Artificial Sequence
  ENSG00000077147_4 (sequence is synthesized)
gtgatgccagccacttactgtgaaattgatttagataaagaaaagagagatgcatttgtatatgccataaaaaatcattactggtaccagatgtacatagatgatttaccaatatggggt

SEQ ID NO: 70822 - DNA, 120 bp, Artificial Sequence
  ENSG00000077147_5 (sequence is synthesized)
attgttggtgaggctgatgaaaatggagaagattactatctttggacctataaaaaacttgaaataggttttaatggaaatcgaattgttgatgttaatctaactagtgaaggaaaggtg

SEQ ID NO: 70823 - DNA, 120 bp, Artificial Sequence
  ENSG00000077147_6 (sequence is synthesized)
aaactggttccaaatactaaaatccagatgtcatattcagtaaaatggaaaaagtcagatgtgaaatttgaagatcgatttgacaaatatcttgatccgtccttttttcaacatcggatt

SEQ ID NO: 70824 - DNA, 120 bp, Artificial Sequence
  ENSG00000077147_7 (sequence is synthesized)
cattggttttcaattttcaactccttcatgatggtgatcttcttggtgggcttagtttcaatgattttaatgagaacattaagaaaagattatgctcggtacagtaaagaggaagaaatg

SEQ ID NO: 70825 - DNA, 120 bp, Artificial Sequence
  ENSG00000077147_8 (sequence is synthesized)
gatgatatggatagagacctaggagatgaatatggatggaaacaggtgcatggagatgtatttagaccatcaagtcacccactgatattttcctctctgattggttctggatgtcagata

SEQ ID NO: 70826 - DNA, 120 bp, Artificial Sequence
  ENSG00000077147_9 (sequence is synthesized)
tttgctgtgtctctcatcgttattattgttgcaatgatagaagatttatatactgagaggggatcaatgctcagtacagccatatttgtctatgctgctacgtctccagtgaatggttat

SEQ ID NO: 70827 - DNA, 120 bp, Artificial Sequence
  ENSG00000077147_10 (sequence is synthesized)
tttggaggaagtctgtatgctagacaaggaggaaggagatggataaagcagatgtttattggggcattccttatcccagctatggtgtgtggcactgccttcttcatcaatttcatagcc

SEQ ID NO: 70828 - DNA, 120 bp, Artificial Sequence
  ENSG00000077147_11 (sequence is synthesized)
atttattaccatgcttcaagagccattccttttggaacaatggtggccgtttgttgcatctgtttttttgttattcttcctctaaatcttgttggtacaatacttggccgaaatctgtca

SEQ ID NO: 70829 - DNA, 120 bp, Artificial Sequence
  ENSG00000077147_12 (sequence is synthesized)
ggtcagcccaactttccttgtcgtgtcaatgctgtgcctcgtcctataccggagaaaaaatggttcatggagcctgcggttattgtttgcctgggtggaattttaccttttggttcaatc

SEQ ID NO: 70830 - DNA, 120 bp, Artificial Sequence
  ENSG00000077147_13 (sequence is synthesized)
tttattgaaatgtatttcatcttcacgtctttctgggcatataagatctattatgtctatggcttcatgatgctggtgctggttatcctgtgcattgtgactgtctgtgtgactattgtg

SEQ ID NO: 70831 - DNA, 120 bp, Artificial Sequence
  ENSG00000077147_14 (sequence is synthesized)
tgcacatattttctactaaatgcagaagattaccggtggcaatggacaagttttctctctgctgcatcaactgcaatctatgtttacatgtattccttttactactattttttcaaaaca

SEQ ID NO: 70832 - DNA, 120 bp, Artificial Sequence
  ENSG00000077147_15 (sequence is synthesized)
aagatgtatggcttatttcaaacatcattttactttggatatatggcggtatttagcacagccttggggataatgtgtggagcgattggttacatgggaacaagtgcctttgtccgaaaa

SEQ ID NO: 70833 - DNA, 120 bp, Artificial Sequence
  ENSG00000077147_16 (sequence is synthesized)
atctatactaatgtgaaaattgactagagacccaagaaaacctggaactttggatcaatttctttttcataggggtggaacttgcacagcaaaaacaaacaaacgcaagaagagatttgg

SEQ ID NO: 70834 - DNA, 120 bp, Artificial Sequence
  ENSG00000077147_17 (sequence is synthesized)
gctttaacacactgggtactttgtgggtctctctttcgtcggtggcttaaagtaacatctatttccattgatcctaggttcttcctgactgctttctccaactgttcacagcaaatgctt

SEQ ID NO: 70835 - DNA, 120 bp, Artificial Sequence
  ENSG00000077147_18 (sequence is synthesized)
ggattttatgcagtaggcattactacagtacatggctaatcttcccaaaaactagctcattaaagatgaaatagaccagctctcttcagtgaagaggacaaatagtttatttaaagcatt

SEQ ID NO: 70836 - DNA, 120 bp, Artificial Sequence
  ENSG00000077147_19 (sequence is synthesized)
tgttccaataaaataaatagagggaaacttggatgctaaaattacatgaataggaatcttcctggcacttagtgtttctatgttattgaaaaatgatgttccagaaagattacttttttc

SEQ ID NO: 70837 - DNA, 120 bp, Artificial Sequence
  ENSG00000077147_20 (sequence is synthesized)
ctcttatttttactgccattgtcgacctattgtgggacatttttatatattgaatctgggttcttttttgactttttttttttcccaatccaacagcatccttttttttaaaagagagaa

SEQ ID NO: 70838 - DNA, 120 bp, Artificial Sequence
  ENSG00000077147_21 (sequence is synthesized)
ttagaaaatattaaatcctgcatgtaatatatctgctgtcatcttagttggaccaacttcccatttatttatcttaaaactatacagttacatcttaattccatccaaagaagatacagt

SEQ ID NO: 70839 - DNA, 120 bp, Artificial Sequence
  ENSG00000077147_22 (sequence is synthesized)
ttgaagacagaagtgtactctctacaatgcaatttactgtacagttagaaagcaaagtgttaaatggagaagatacttgtttttattaaacattttgagatttagataaactacatttta

SEQ ID NO: 70840 - DNA, 120 bp, Artificial Sequence
  ENSG00000077147_23 (sequence is synthesized)
actgaatgtctaaagtgattatcttttttccccccaagttagtcttaaatcttttgggtttgaatgaaggttttacataagaaattattaaaaacaaggggggtgggtaataaatgtata

SEQ ID NO: 70841 - DNA, 120 bp, Artificial Sequence
  ENSG00000077147_24 (sequence is synthesized)
taacattaaataatgtaacgtaggtgtagattcccaaatgcatttggatgtacagatcgactacagagtacttttttcttatgatgattggtgtagaaatgtgtgatttgggtgggcttt

SEQ ID NO: 70842 - DNA, 120 bp, Artificial Sequence
  ENSG00000077147_25 (sequence is synthesized)
agactcctacaggagccaaatttgtaatttagagacacttaattttgttaatcctgtctgggacacttaagtaacatctaaagcattattgctttagaatgttcaaataaaatttcctga

SEQ ID NO: 70843 - DNA, 120 bp, Artificial Sequence
  ENSG00000077147_26 (sequence is synthesized)
ccaaattgttttgtggaaatagatgtgtttgcaatttgaagatatctttctgtccagaaggcaaaattaccgaatgccatttttaaaagtatgctataaactatgctactctcatacagg

SEQ ID NO: 70844 - DNA, 120 bp, Artificial Sequence
  ENSG00000077147_27 (sequence is synthesized)
ggacccgtattttaaaatctccagacttgcttacatctagattatccagcacaatcataaagtgaatgacaaaccctttgaatgaaattgtggcacaaaatctgttcaggttggtgtacc

SEQ ID NO: 70845 - DNA, 120 bp, Artificial Sequence
  ENSG00000077147_28 (sequence is synthesized)
gtgtaaagtggggatggggtaaaagtggttaacgtactgttggatcaacaaataaaggttacagttttgtaagagaagtgatttgaatacatttttctggaactattcataatatgaagt

SEQ ID NO: 70846 - DNA, 120 bp, Artificial Sequence
  ENSG00000077147_29 (sequence is synthesized)
tttcctagaaccactgagtttctagtttaatagtttgctatgcaaatgaccacctaaaacaatactttatattgttatttttagaaagactcaaaacacctgtatttaaaccttaatatg

SEQ ID NO: 70847 - DNA, 120 bp, Artificial Sequence
  ENSG00000077147_30 (sequence is synthesized)
aaaatcatgcaattaatagttacacaagatgttttcattacaaaatatgtacctatctattgatggactctacatcctatattgtgacatgtaagtcctttaaaaggtgaaaagtatgat

SEQ ID NO: 70848 - DNA, 120 bp, Artificial Sequence
  ENSG00000077147_31 (sequence is synthesized)
ttcttaccacttaagtatgattgatatgatccaacaaatttgatcagaagctgtaggtaaatcctcttctgaagccaaaatggtatattaaatataatttattggtacttccattttctc

SEQ ID NO: 70849 - DNA, 120 bp, Artificial Sequence
  ENSG00000077147_32 (sequence is synthesized)
ttccttcttacttgcctttaagatcttataaaaaagaaactaaaagttaatatttagttgcctatattatgtaaccttttaactatatataaagtacttttttggtttctttctcaccac

SEQ ID NO: 70850 - DNA, 120 bp, Artificial Sequence
  ENSG00000077147_33 (sequence is synthesized)
ttttattcaaaagtacttttaacataccaatacatagtctgtctgatgggagtataaattggacagtaaggttttgtcttaataaaatgaaatttgtttctcatgatatgaatcttgcag

SEQ ID NO: 70851 - DNA, 120 bp, Artificial Sequence
  ENSG00000077147_34 (sequence is synthesized)
gtaagatgtagggtttattgaaaatgtgtgggttaaatgctttcaggtacaccaattctttctactaaattgagctctatttgaagttctttggaatctgtggtgaaaaataattttctg

SEQ ID NO: 70852 - DNA, 120 bp, Artificial Sequence
  ENSG00000077147_35 (sequence is synthesized)
atttccaaatacattaagagcattaaatgaatattaatcacctttaaagtcttttagaaaaggacttgtattggtttttggctgcatagaggggttgaataagtgtatgtatgtgtgtgc

SEQ ID NO: 70853 - DNA, 120 bp, Artificial Sequence
  ENSG00000077147_36 (sequence is synthesized)
gtgtgtgtgtgtcttcttaaagaagatgtaattcacaaatagtttagctccctagcgctcagttgtagaatagaaaatagaacattattcaagttaattgaaaggtgaggtttttatacc

SEQ ID NO: 70854 - DNA, 120 bp, Artificial Sequence
  ENSG00000077147_37 (sequence is synthesized)
cccactaatgctgtgtatctgtctttcgtttgttaacattatttgcttaatttctttcaactcacactttggataatactatcaaaaactaaggctaaacattccttgtgtatctttaag

SEQ ID NO: 70855 - DNA, 120 bp, Artificial Sequence
  ENSG00000077147_38 (sequence is synthesized)
catgcttctcctgaaatttaactacattagtagttgacatttgtatacatatatcctaatacaagagtaggataaggtggaaatgtaatggcctgagggatggtgaagcattcttttagt

SEQ ID NO: 70856 - DNA, 120 bp, Artificial Sequence
  ENSG00000077147_39 (sequence is synthesized)
atttttcatcatgttgggctcctagattgtactggggttgcccataaatcaaaccccatactcttagaattcattatattatggtgatatccgaacctagtgaatggtatgcttgggtgt

SEQ ID NO: 70857 - DNA, 120 bp, Artificial Sequence
  ENSG00000077147_40 (sequence is synthesized)
tttccattgagagtggatggacctctttataaagttggttgctgcaaaatccagttcttccaaaagccactttatttagggtttattcacaagtcatatccattttggtacagtgtttgt

SEQ ID NO: 70858 - DNA, 120 bp, Artificial Sequence
  ENSG00000077147_41 (sequence is synthesized)
ttcctaatatttattaaccaccttataccaaatgtcttgcaaagaaatgttattaaaaccttgaatttttacaaatgtaaaaaacaaaaagtgtattaatgtatttgttcaggaaaagct

SEQ ID NO: 70859 - DNA, 120 bp, Artificial Sequence
  ENSG00000077147_42 (sequence is synthesized)
acataccgaagggcttttgtatatgaattctgtggtggggagacccatttgtaatctatatggcagttccatctgggttttaagtttagatttcaccgtgtcttagtgcttcattctatt

SEQ ID NO: 70860 - DNA, 120 bp, Artificial Sequence
  ENSG00000077147_43 (sequence is synthesized)
ggtttattggaacatgtaataaataggagtagtgatgtattaaaacacaagtattcattaatgttttatatcttcactaaaattctatagttatgaaactatcaatcaaggtgttatatt

SEQ ID NO: 70861 - DNA, 120 bp, Artificial Sequence
  ENSG00000077147_44 (sequence is synthesized)
tcagtcagaagtgaaaatttatgaagagtatttggaagtgtgtacagaaataaactagacttacaggtaggctagatcagaacgttaacatatgaacctgcagaaatctggtaagactta

SEQ ID NO: 70862 - DNA, 120 bp, Artificial Sequence
  ENSG00000077147_45 (sequence is synthesized)
aattcagtgtgaggaataactctagttctctcctatgagcatttcctaaaagccatctgatttggcattcttactggagctgcagacagaaatctacaaagacaaaagtaaacaaaatta

SEQ ID NO: 70863 - DNA, 120 bp, Artificial Sequence
  ENSG00000077147_46 (sequence is synthesized)
agttattattccactgttaggaatggaaataaacttgtgaagtctgtttattttgaagtattggtgaactaggcttgctaattgataactgcagcagtttgtgtttactccagttcatca

SEQ ID NO: 70864 - DNA, 120 bp, Artificial Sequence
  ENSG00000077147_47 (sequence is synthesized)
gcttaggtcatttgaaagatataagagcttaaggcaagaaagaaataacatggaattctatttgaaggacaacagaacattcttggaaaagcagctccagttggtttttcaactgtcaaa

SEQ ID NO: 70865 - DNA, 120 bp, Artificial Sequence
  ENSG00000077147_48 (sequence is synthesized)
cttgaatgtgtaagtccccacagagcatggacagtcggtgcagagttccaaggaaacaattattgcctgatgaccacttccattttgtatacactctttggttcgtataggccatattcc

SEQ ID NO: 70866 - DNA, 120 bp, Artificial Sequence
  ENSG00000077147_49 (sequence is synthesized)
aactggctttttagtaatagaaatccagtatataatgtatcaaatacaattgaggttctaacctagtgtgttaatttatctgaatttggatttttaaaaagtaataaaaagttaaatgta

SEQ ID NO: 70867 - DNA, 120 bp, Artificial Sequence
  ENSG00000077147_50 (sequence is synthesized)
ggtttcatattttggcactattgacactggtgttggataattctttgttgtatggagctgttatgtacatgttaggatgtctagcagagtccctggcctgtaccccccagatgccagtag

SEQ ID NO: 70868 - DNA, 120 bp, Artificial Sequence
  ENSG00000077147_51 (sequence is synthesized)
caccttccagttgtgaaaaccaaaaaagtcaccagacattgctaattgctgtcagttgagaaccactactttagactctaaaatgtgttttagtctgtaaatgaggtgtattgcatttag

SEQ ID NO: 70869 - DNA, 120 bp, Artificial Sequence
  ENSG00000077147_52 (sequence is synthesized)
caatggtgagttgcttgaatcttacttttaaactgaaaaagtatacacattctaactgagacctactcaccctccaaaatacttcttattagatgttttgatggtttcagtcagttcata

SEQ ID NO: 70870 - DNA, 120 bp, Artificial Sequence
  ENSG00000077147_53 (sequence is synthesized)
ctcagtcctggaaagttagatgaggagaatactactgttgttagcctccataaaattttggttaagtttaaacctatagttggctttttattttttcttgattctgtaagccagtaaagt

SEQ ID NO: 70871 - DNA, 120 bp, Artificial Sequence
  ENSG00000077147_54 (sequence is synthesized)
gaaaggctgactttaaaagagagcactatagctttttatcagagatgggaagaactggtgaatatattttagagaaagaatcatgacaatcacaaaacatgggtgttttaagatgatagg

SEQ ID NO: 70872 - DNA, 120 bp, Artificial Sequence
  ENSG00000077147_55 (sequence is synthesized)
tgagtgcagtggtagaaagtaaagcttttccatgacacatttttttgtattaacatacttttcttagaaagtcactaagcattggccaggcgcggtggctcacacctttaatcccagcac

SEQ ID NO: 70873 - DNA, 120 bp, Artificial Sequence
  ENSG00000077147_56 (sequence is synthesized)
ggagcaggaaccttgggagcgtggaggaggcatttccgtgcgctcccgggacagggctccgctcccgagtgacagggtctccttcccccggtctgggcctcagtggcgccgcaccccagg

SEQ ID NO: 70874 - DNA, 120 bp, Artificial Sequence
  ENSG00000077147_57 (sequence is synthesized)
gtctcggggttcctgggaccctggggccaggaaggagcctgggaagggttgaggttcatccaccgcgggagcggggcaacgggcaggctgggctcggggcttttgccccccagggaagga

SEQ ID NO: 70875 - DNA, 120 bp, Artificial Sequence
  ENSG00000077147_58 (sequence is synthesized)
gactgccttctggctactgagggctgcgacgccgaggaagatggatgcatcgtgattacccggcagccactaaccaggaaatatcctacactttatggtctcctttggcttttatcgccc

SEQ ID NO: 70876 - DNA, 120 bp, Artificial Sequence
  ENSG00000077150_0 (sequence is synthesized)
gctttcccggccctgagccctgctggcaggcgaggtgtcgcgaccggtcccaggtgggtcgggcgcggagagaagccgcaaccagagccgccgccacggtgagtggctggattcagaccc

SEQ ID NO: 70877 - DNA, 120 bp, Artificial Sequence
  ENSG00000077150_1 (sequence is synthesized)
ctgggtggccgggacaagagaaaagagggaggagggcctttagcggacagcgcctggggctggagagcagcagctgcacacagccggaaagggcgcgcaggcgacgacactcggatccac

SEQ ID NO: 70878 - DNA, 120 bp, Artificial Sequence
  ENSG00000077150_2 (sequence is synthesized)
gtcgacaccgttgtacaaagatacgcggacccgcgggcgtctaaaattctgggaagcagaacctggccggagccactagacagagccgggcctagcccagagacatggagagttgctaca

SEQ ID NO: 70879 - DNA, 120 bp, Artificial Sequence
  ENSG00000077150_3 (sequence is synthesized)
acccaggtctggatggtattattgaatatgatgatttcaaattgaactcctccattgtggaacccaaggagccagccccagaaacagctgatggcccctacctggtgatcgtggaacagc

SEQ ID NO: 70880 - DNA, 120 bp, Artificial Sequence
  ENSG00000077150_4 (sequence is synthesized)
ctaagcagagaggcttccgatttcgatatggctgtgaaggcccctcccatggaggactgcccggtgcctccagtgagaagggccgaaagacctatcccactgtcaagatctgtaactacg

SEQ ID NO: 70881 - DNA, 120 bp, Artificial Sequence
  ENSG00000077150_5 (sequence is synthesized)
agggaccagccaagatcgaggtggacctggtaacacacagtgacccacctcgtgctcatgcccacagtctggtgggcaagcaatgctcggagctggggatctgcgccgtttctgtggggc

SEQ ID NO: 70882 - DNA, 120 bp, Artificial Sequence
  ENSG00000077150_6 (sequence is synthesized)
ccaaggacatgactgcccaatttaacaacctgggtgtcctgcatgtgactaagaagaacatgatggggactatgatacaaaaacttcagaggcagcggctccgctctaggccccagggcc

SEQ ID NO: 70883 - DNA, 120 bp, Artificial Sequence
  ENSG00000077150_7 (sequence is synthesized)
ttacggaggccgagcagcgggagctggagcaagaggccaaagaactgaagaaggtgatggatctgagtatagtgcggctgcgcttctctgccttccttagagccagtgatggctccttct

SEQ ID NO: 70884 - DNA, 120 bp, Artificial Sequence
  ENSG00000077150_8 (sequence is synthesized)
ccctgcccctgaagccagtcatctcccagcccatccatgacagcaaatctccgggggcatcaaacctgaagatttctcgaatggacaagacagcaggctctgtgcggggtggagatgaag

SEQ ID NO: 70885 - DNA, 120 bp, Artificial Sequence
  ENSG00000077150_9 (sequence is synthesized)
tttatctgctttgtgacaaggtgcagaaagatgacattgaggttcggttctatgaggatgatgagaatggatggcaggcctttggggacttctctcccacagatgtgcataaacagtatg

SEQ ID NO: 70886 - DNA, 120 bp, Artificial Sequence
  ENSG00000077150_10 (sequence is synthesized)
ccattgtgttccggacacccccctatcacaagatgaagattgagcggcctgtaacagtgtttctgcaactgaaacgcaagcgaggaggggacgtgtctgattccaaacagttcacctatt

SEQ ID NO: 70887 - DNA, 120 bp, Artificial Sequence
  ENSG00000077150_11 (sequence is synthesized)
accctctggtggaagacaaggaagaggtgcagcggaagcggaggaaggccttgcccaccttctcccagcccttcgggggtggctcccacatgggtggaggctctgggggtgcagccgggg

SEQ ID NO: 70888 - DNA, 120 bp, Artificial Sequence
  ENSG00000077150_12 (sequence is synthesized)
gctacggaggagctggaggaggtggcagcctcggtttcttcccctcctccctggcctacagcccctaccagtccggcgcgggccccatgggctgctacccgggaggcgggggcggggcgc

SEQ ID NO: 70889 - DNA, 120 bp, Artificial Sequence
  ENSG00000077150_13 (sequence is synthesized)
agtgcgagccgcaggccccggagatgctgcagcgagctcgagagtacaacgcgcgcctgttcggcctggcgcagcgcagcgcccgagccctactcgactacggcgtcaccgcggacgcgc

SEQ ID NO: 70890 - DNA, 120 bp, Artificial Sequence
  ENSG00000077150_14 (sequence is synthesized)
gcgcgctgctggcgggacagcgccacctgctgacggcgcaggacgagaacggagacacaccactgcacctagccatcatccacgggcagaccagtgtcattgagcagatagtctatgtca

SEQ ID NO: 70891 - DNA, 120 bp, Artificial Sequence
  ENSG00000077150_15 (sequence is synthesized)
tccaccacgcccaggacctcggcgttgtcaacctcaccaaccacctgcaccagacgcccctgcacctggcggtgatcacggggcagacgagtgtggtgagctttctgctgcgggtaggtg

SEQ ID NO: 70892 - DNA, 120 bp, Artificial Sequence
  ENSG00000077150_16 (sequence is synthesized)
cagacccagctctgctggatcggcatggagactcagccatgcatctggcgctgcgggcaggcgctggtgctcctgagctgctgcgtgcactgcttcagagtggagctcctgctgtgcccc

SEQ ID NO: 70893 - DNA, 120 bp, Artificial Sequence
  ENSG00000077150_17 (sequence is synthesized)
agctgttgcatatgcctgactttgagggactgtatccagtacacctggcagtccgagcccgaagccctgagtgcctggatctgctggtggacagtggggctgaagtggaggccacagagc

SEQ ID NO: 70894 - DNA, 120 bp, Artificial Sequence
  ENSG00000077150_18 (sequence is synthesized)
ggcaggggggacgaacagccttgcatctagccacagagatggaggagctggggttggtcacccatctggtcaccaagctccgggccaacgtgaacgctcgcacctttgcgggaaacacac

SEQ ID NO: 70895 - DNA, 120 bp, Artificial Sequence
  ENSG00000077150_19 (sequence is synthesized)
ccctgcacctggcagctggactggggtacccgaccctcacccgcctccttctgaaggctggtgctgacatccatgctgaaaacgaggagcccctgtgcccactgccttcaccccctacct

SEQ ID NO: 70896 - DNA, 120 bp, Artificial Sequence
  ENSG00000077150_20 (sequence is synthesized)
ctgatagcgactcggactctgaagggcctgagaaggacacccgaagcagcttccggggccacacgcctcttgacctcacttgcagcaccaaggtgaagaccttgctgctaaatgctgctc

SEQ ID NO: 70897 - DNA, 120 bp, Artificial Sequence
  ENSG00000077150_21 (sequence is synthesized)
agaacaccatggagccacccctgaccccgcccagcccagcagggccgggactgtcacttggtgatacagctctgcagaacctggagcagctgctagacgggccagaagcccagggcagct

SEQ ID NO: 70898 - DNA, 120 bp, Artificial Sequence
  ENSG00000077150_22 (sequence is synthesized)
gggcagagctggcagagcgtctggggctgcgcagcctggtagacacgtaccgacagacaacctcacccagtggcagcctcctgcgcagctacgagctggctggcggggacctggcaggtc

SEQ ID NO: 70899 - DNA, 120 bp, Artificial Sequence
  ENSG00000077150_23 (sequence is synthesized)
tactggaggccctgtctgacatgggcctagaggagggagtgaggctgctgaggggtccagaaacccgagacaagctgcccagcacagcagaggtgaaggaagacagtgcgtacgggagcc

SEQ ID NO: 70900 - DNA, 120 bp, Artificial Sequence
  ENSG00000077150_24 (sequence is synthesized)
agtcagtggagcaggaggcagagaagctgggcccaccccctgagccaccaggagggctctgccacgggcacccccagcctcaggtgcactgacctgctgcctgcccccagcccccttccc

SEQ ID NO: 70901 - DNA, 120 bp, Artificial Sequence
  ENSG00000077150_25 (sequence is synthesized)
ggaccccctgtacagcgtccccacctatttcaaatcttatttaacaccccacacccacccctcagttgggacaaataaaggattctcatgggaaggggaggacccctccttcccaactta

SEQ ID NO: 70902 - DNA, 120 bp, Artificial Sequence
  ENSG00000077150_26 (sequence is synthesized)
aactttcctgccccttccccggccaagcccaactccggatctcgctctccaccggatctcacccgccacacccggacaggcggctggaggaggcgggcgtctaaaattctgggaagcaga

SEQ ID NO: 70903 - DNA, 120 bp, Artificial Sequence
  ENSG00000077150_27 (sequence is synthesized)
cttcctcttccgctaacttcccggcagcgcgccgctcagggtgggggccccgagggctggggccgtcggcttccccctggggatcccccgcttcagagaaagccaagcgttaggcgcagc

SEQ ID NO: 70904 - DNA, 120 bp, Artificial Sequence
  ENSG00000077150_28 (sequence is synthesized)
caaagccgagaggcagcggaagctcccggcccggggtggcgctgggtcagcgggtaccttctcggcggtcccctggccggccgaactcgcgcctggtgtcctgtcaccccgctccccgcc

SEQ ID NO: 70905 - DNA, 120 bp, Artificial Sequence
  ENSG00000077150_29 (sequence is synthesized)
ctgagtgagcctgtcccctctcaggggcgcgcccgagtcgctccgggttggctgcgccagtccagagttaaactttcagccaatgaaaaagggcgcgaggcgtgacgcacggaaacgtca

SEQ ID NO: 70906 - DNA, 120 bp, Artificial Sequence
  ENSG00000077150_30 (sequence is synthesized)
tgggaattcccccctccggggggccgagaaggggctttcccggccctgagccctgctggcaggcgaggtgtcgcgaccggtcccaggtgggtcgggcgcggagagaagccgcaaccagag

SEQ ID NO: 70907 - DNA, 120 bp, Artificial Sequence
  ENSG00000077150_31 (sequence is synthesized)
ctaagctgctctaactttcctgccccttccccggccaagcccaactccggatctcgctctccaccggatctcacccgccacacccggacaggcggctggaggaggtcggaccctccccca

SEQ ID NO: 70908 - DNA, 120 bp, Artificial Sequence
  ENSG00000077150_32 (sequence is synthesized)
gacaaatggggtagtggtagctggctggccatggaggagccattgccgaaggaggccacaggggattggatggtcactgctgctgatcagagtgctgtagtttggttcagggctactacc

SEQ ID NO: 70909 - DNA, 120 bp, Artificial Sequence
  ENSG00000077150_33 (sequence is synthesized)
cgggggctacggaggagctggaggaggtgagggggtactgatggagggaggggtaaaggtaagagaagctgtggaggaaaaaaatctgggggaggccgggcgtggtggctcacgcctgta

SEQ ID NO: 70910 - DNA, 120 bp, Artificial Sequence
  ENSG00000077150_34 (sequence is synthesized)
aagtgcaggcacagcgatgccctgggccacgtgctgggttccatgggccccagcgagggagactatgagggcggtggggccttgaaagcgaaggatgctctgagtggctgggccagactc

SEQ ID NO: 70911 - DNA, 120 bp, Artificial Sequence
  ENSG00000077150_35 (sequence is synthesized)
ccgcctccttctgaaggctggtcagtctcaccctcaggggcacttgaacagggtggggggaagggagagaggtgcctcccagtcccccgactttgcagtccttaatgtaggcccccacca

SEQ ID NO: 70912 - DNA, 120 bp, Artificial Sequence
  ENSG00000077150_36 (sequence is synthesized)
taccgccccatgacggcctccctctcccaggtgctgacatccatgctgaaaacgaggagcccctgtgcccactgccttcaccccctacctctgatagcgactcggactctgaagggcctg

SEQ ID NO: 70913 - DNA, 120 bp, Artificial Sequence
  ENSG00000077152_0 (sequence is synthesized)
gttggtccgcgcgttgctgcgttgtgaggggtgtcagctcagtgcatcccaggcagctcttagtgtggagcagtgaactgtgtgtggttccttctacttggggatcatgcagagagcttc

SEQ ID NO: 70914 - DNA, 120 bp, Artificial Sequence
  ENSG00000077152_1 (sequence is synthesized)
acgtctgaagagagagctgcacatgttagccacagagccacccccaggcatcacatgttggcaagataaagaccaaatggatgacctgcgagctcaaatattaggtggagccaacacacc

SEQ ID NO: 70915 - DNA, 120 bp, Artificial Sequence
  ENSG00000077152_2 (sequence is synthesized)
ttatgagaaaggtgtttttaagctagaagttatcattcctgagaggtacccatttgaacctcctcagatccgatttctcactccaatttatcatccaaacattgattctgctggaaggat

SEQ ID NO: 70916 - DNA, 120 bp, Artificial Sequence
  ENSG00000077152_3 (sequence is synthesized)
ggagaccatccctcaacatcgcaactgtgttgacctctattcagctgctcatgtcagaacccaaccctgatgacccgctcatggctgacatatcctcagaatttaaatataataagccag

SEQ ID NO: 70917 - DNA, 120 bp, Artificial Sequence
  ENSG00000077152_4 (sequence is synthesized)
ccttcctcaagaatgccagacagtggacagagaagcatgcaagacagaaacaaaaggctgatgaggaagagatgcttgataatctaccagaggctggtgactccagagtacacaactcaa

SEQ ID NO: 70918 - DNA, 120 bp, Artificial Sequence
  ENSG00000077152_5 (sequence is synthesized)
cacagaaaaggaaggccagtcagctagtaggcatagaaaagaaatttcatcctgatgtttaggggacttgtcctggttcatcttagttaatgtgttctttgccaaggtgatctaagttgc

SEQ ID NO: 70919 - DNA, 120 bp, Artificial Sequence
  ENSG00000077152_6 (sequence is synthesized)
aggtgatctaagttgcctaccttgaatttttttttaaatatatttgatgacataatttttgtgtagtttatttatcttgtacatatgtattttgaaatcttttaaacctgaaaaataaat

SEQ ID NO: 70920 - DNA, 120 bp, Artificial Sequence
  ENSG00000077152_7 (sequence is synthesized)
tgcgagctcgtaggtatcaaatcatgtatatgatgaaagtcatgaccctattgaagattgtgctgaaataaaacattttgtgtattcttctaaagtaaggagcagttataaggtcagagt

SEQ ID NO: 70921 - DNA, 120 bp, Artificial Sequence
  ENSG00000077152_8 (sequence is synthesized)
gccctaccatctttctacccaaatttgtttacatttataaaaggtttgcttgacatttcttgcttctttgactttttattataccttatgctgatttatagccaagatttaaagcagtga

SEQ ID NO: 70922 - DNA, 120 bp, Artificial Sequence
  ENSG00000077152_9 (sequence is synthesized)
agcagtgtttagatcaaagataaccatctcaaatatctgtgaggccagatgggaaacatacatgattagaatactgcggtccaaacaaaacaaatctataggttgtatttggtcttgtgg

SEQ ID NO: 70923 - DNA, 120 bp, Artificial Sequence
  ENSG00000077152_10 (sequence is synthesized)
ccagcattttgcaacttctgctttagattttctatatgtcctttgtttgacaccattaactttttgagtacattagcattgtggtgtgttgcatgaggacttgttaaagtcctggcagag

SEQ ID NO: 70924 - DNA, 120 bp, Artificial Sequence
  ENSG00000077152_11 (sequence is synthesized)
tgacatagtaaatatccccattttcctctgcaacacatatcctaccttgtctataccgctaactctccctgtgtgaggatagctgcagcagctctaaccactgcaaatcatgtttttctc

SEQ ID NO: 70925 - DNA, 120 bp, Artificial Sequence
  ENSG00000077157_0 (sequence is synthesized)
ggtactactggcgggaggagtaaagatggcggcgcgagggtctccgccctctgctccgggctgaagcgctctgagagaggcggcagcggcaactcgagccccaacagtaatttagtgttg

SEQ ID NO: 70926 - DNA, 120 bp, Artificial Sequence
  ENSG00000077157_1 (sequence is synthesized)
gtagttttggcagcagctgccgaggccggagcaatggcggaactggagcacctaggagggaagcgggcagagtcggcgcgaatgcggcgggcagagcagcttcggcgctggcggggctcg

SEQ ID NO: 70927 - DNA, 120 bp, Artificial Sequence
  ENSG00000077157_2 (sequence is synthesized)
ctgacagagcaggagcctgcggagcgacgaggcgcggggcggcagccgctgaccaggcgcgggagccccagggtccgcttcgaggacggtgctgtctttctggccgcctgctctagcggg

SEQ ID NO: 70928 - DNA, 120 bp, Artificial Sequence
  ENSG00000077157_3 (sequence is synthesized)
gacaccgacgaggtgagaaagcttctggcaagaggtgctgatatcaacacggtcaacgtggacggcttgacagccctgcaccaggcatgtattgatgaaaatttggacatggtgaagttt

SEQ ID NO: 70929 - DNA, 120 bp, Artificial Sequence
  ENSG00000077157_4 (sequence is synthesized)
ctggtggagaacagagccaatgtaaaccagcaagacaacgagggctggacaccccttcatgcagcagcttcctgtggctatctcaacatagcagagtatttcattaatcacggagccagt

SEQ ID NO: 70930 - DNA, 120 bp, Artificial Sequence
  ENSG00000077157_5 (sequence is synthesized)
gtaggtattgtcaatagtgaaggtgaagttccctctgaccttgcagaagagccagccatgaaggatcttcttctggagcaagtaaagaagcaaggagttgatctagagcagtcaagaaaa

SEQ ID NO: 70931 - DNA, 120 bp, Artificial Sequence
  ENSG00000077157_6 (sequence is synthesized)
gaagaagagcagcagatgttgcaggatgcccgccagtggctcaacagtgggaaaatagaggatgtgaggcaggctcgctcaggggctacagcccttcatgtggctgctgccaagggctac

SEQ ID NO: 70932 - DNA, 120 bp, Artificial Sequence
  ENSG00000077157_7 (sequence is synthesized)
tctgaagtcctcagacttttaattcaggctggctatgaactcaatgttcaggattatgatggctggactcccctccatgctgctgcacactggggagtgaaggaggcttgctccatcctg

SEQ ID NO: 70933 - DNA, 120 bp, Artificial Sequence
  ENSG00000077157_8 (sequence is synthesized)
gcagaagcactttgtgacatggatattcgaaataaactgggccagacaccatttgatgtggctgatgagggtctcgtggagcatttggagttgctccagaagaagcagaatgtgcttcga

SEQ ID NO: 70934 - DNA, 120 bp, Artificial Sequence
  ENSG00000077157_9 (sequence is synthesized)
agtgaaaaggagacacggaataaactcattgagtcagatctgaacagcaagattcagagtgggttctttaagaacaaagagaagatgctctatgaggaggagacacctaagtcccaagaa

SEQ ID NO: 70935 - DNA, 120 bp, Artificial Sequence
  ENSG00000077157_10 (sequence is synthesized)
atggaggaagaaaataaagaatctagtagctccagctcagaggaggaggaaggtgaagatgaagcttctgagtcagaaactgagaaggaggcagataaaaagccagaagcctttgtcaat

SEQ ID NO: 70936 - DNA, 120 bp, Artificial Sequence
  ENSG00000077157_11 (sequence is synthesized)
cattccaactctgaaagcaagagtagtatcacagagcagataccagcaccagctcaaaataccttctctgcctcttctgctaggaggttctcttctggcctttttaacaagccagaagag

SEQ ID NO: 70937 - DNA, 120 bp, Artificial Sequence
  ENSG00000077157_12 (sequence is synthesized)
cccaaagatgaatctccttcttcatggagattgggactgagaaaaactggcagccacaacatgctgagtgaggtggccaattccagggaacctataagggaccgaggctcttccatctat

SEQ ID NO: 70938 - DNA, 120 bp, Artificial Sequence
  ENSG00000077157_13 (sequence is synthesized)
cgctcctcttcaagccctcggatttctgctctactggacaacaaagataaggagagagaaaacaaaagctatattagttcactagcaccccggaagctcaacagcacaagtgatattgaa

SEQ ID NO: 70939 - DNA, 120 bp, Artificial Sequence
  ENSG00000077157_14 (sequence is synthesized)
gaaaaggagaacagagaatcagctgttaatctagtgaggagtggctcctatacccggcagctatggagggatgaagcaaaaggaaatgaaatcccacagacaattgctccctccacctat

SEQ ID NO: 70940 - DNA, 120 bp, Artificial Sequence
  ENSG00000077157_15 (sequence is synthesized)
gtatcaacttacttgaaaaggactcctcacaaatcccaggccgacacaacagcagagaaaacagcagacaatgtctcttctagcaccccgctctgtgtgatcaccaatcgccctcttcct

SEQ ID NO: 70941 - DNA, 120 bp, Artificial Sequence
  ENSG00000077157_16 (sequence is synthesized)
agcactgccaatggggttacagctactcctgtgctctccattactggaacagattcctctgtggaagccagggagaagaggaggtcctatctgactcctgtacgggatgaggaagcagag

SEQ ID NO: 70942 - DNA, 120 bp, Artificial Sequence
  ENSG00000077157_17 (sequence is synthesized)
tctttacggaaagcacgctccagacaagctcggcagacacgaaggtctactcaaggtgtcaccctaacagaccttcaagaagcagaaaggacattcagccggtcgagggcagagaggcaa

SEQ ID NO: 70943 - DNA, 120 bp, Artificial Sequence
  ENSG00000077157_18 (sequence is synthesized)
gctcaggagcagcctcgtgagaagcccacagacactgaagggcttgaggggagccctgagaagcatgagccctcagcagttccagcaacagaagctggggagggccagcagccctggggc

SEQ ID NO: 70944 - DNA, 120 bp, Artificial Sequence
  ENSG00000077157_19 (sequence is synthesized)
aggagtctggatgaagagcctatctgtcatcgcctgaggtgcccagctcagccagacaaacccaccacgccagcatctccttctacgtcaagaccctcactctacaccagttcccacctg

SEQ ID NO: 70945 - DNA, 120 bp, Artificial Sequence
  ENSG00000077157_20 (sequence is synthesized)
ctatggacaaatagattttcagtccctgattctgagagttcagagactaccacaaacactacaactgcaaaggaaatggacaaaaatgagaatgaagaagcagatttggatgagcagtcc

SEQ ID NO: 70946 - DNA, 120 bp, Artificial Sequence
  ENSG00000077157_21 (sequence is synthesized)
tctaagaggctgtccatccgagagaggaggcggcccaaggaacgacgaagaggcacaggcatcaatttctggacaaaggatgaggatgaaactgatggctctgaagaggtcaaagaaacg

SEQ ID NO: 70947 - DNA, 120 bp, Artificial Sequence
  ENSG00000077157_22 (sequence is synthesized)
tggcatgaaagactttctaggttggaatcgggaggtagtaatcctacaaccagtgattcttacggtgaccgggcttcagcaagagcccgtcgggaggcccgggaggcccgcctagccacc

SEQ ID NO: 70948 - DNA, 120 bp, Artificial Sequence
  ENSG00000077157_23 (sequence is synthesized)
ctgaccagccgtgtagaagaagacagcaacagagattataaaaaactctatgagagtgctctgactgaaaaccaaaaactgaaaacaaaacttcaggaagcccagctagagctagcagat

SEQ ID NO: 70949 - DNA, 120 bp, Artificial Sequence
  ENSG00000077157_24 (sequence is synthesized)
ataaagtccaagcttgagaaggtggcccagcagaaacaagaaaagacctctgaccgatcatcagtgctggagatggagaaacgggagaggcgagccttggagcgcaaaatgtcagaaatg

SEQ ID NO: 70950 - DNA, 120 bp, Artificial Sequence
  ENSG00000077157_25 (sequence is synthesized)
gaggaagaaatgaaggtgttaacagaactgaaatccgacaaccagaggctgaaagatgaaaatggtgccctcatcagagtcatcagcaaactgtccaagtaggctaggctccagatttat

SEQ ID NO: 70951 - DNA, 120 bp, Artificial Sequence
  ENSG00000077157_26 (sequence is synthesized)
gaggaaagaaagggacagcatttgctgcccccacccctcttttccagtccttgccttccaaccaaaagaaatggatgttttggtggaaggacacttctttctatcaccctcttcagtcac

SEQ ID NO: 70952 - DNA, 120 bp, Artificial Sequence
  ENSG00000077157_27 (sequence is synthesized)
ctctatacactctacattttctctgcactttcaatgccctgttcttccaaacccctatcccaagttttatgacagttttaattgaagcatgattgtggtaattcgagccatctggagaat

SEQ ID NO: 70953 - DNA, 120 bp, Artificial Sequence
  ENSG00000077157_28 (sequence is synthesized)
gctctggggagtacaccaggctcagctgtggacccctcaacttcctgctgctcagctactttgtccacattggatttggtccaaacatgtaagacttctaccctaatcagtatccttcag

SEQ ID NO: 70954 - DNA, 120 bp, Artificial Sequence
  ENSG00000077157_29 (sequence is synthesized)
ctttttacattaacccagtgtcctctgatataggtgagtcttgtggtagccactccaggatcctgattggggtgccaagagaaacagcaggatgttgaattgatcatcagatgccctctg

SEQ ID NO: 70955 - DNA, 120 bp, Artificial Sequence
  ENSG00000077157_30 (sequence is synthesized)
gaatggttagcatccaaggtgacagtgactgcattgaggcgctctattcttcttcacctctcaggaactgacttttattttttctgtcaacacccagtaatctccctaactagttttaac

SEQ ID NO: 70956 - DNA, 120 bp, Artificial Sequence
  ENSG00000077157_31 (sequence is synthesized)
ccttattcctccctcatacctagccatttctccaaggcgcaaatggccctggcttcatttattcctttcctttctatccttttatatttttcccttccccaccccctcactcaatggtat

SEQ ID NO: 70957 - DNA, 120 bp, Artificial Sequence
  ENSG00000077157_32 (sequence is synthesized)
aaaagctaggacagagcacctgacctcagttgtctttggccattgtgggaagtcattattctggagacaagaaaatcatcactctggtgccttggtggcagcaccactgcctgctccctg

SEQ ID NO: 70958 - DNA, 120 bp, Artificial Sequence
  ENSG00000077157_33 (sequence is synthesized)
gaaggtagactatggcataagtgtcagctcattgttttcgtctcccacttatcttcccccttcaaagtgattttctttataagaaaatttgggctctgaatactccattctgcctcactt

SEQ ID NO: 70959 - DNA, 120 bp, Artificial Sequence
  ENSG00000077157_34 (sequence is synthesized)
ccttgaccttgttttcctctcttcgccctgacacctgcttctaatgagaaatgaagtcagtgcaaggaggaatgagaggtggggaggggagattgttgagagatggactaggaagtggaa

SEQ ID NO: 70960 - DNA, 120 bp, Artificial Sequence
  ENSG00000077157_35 (sequence is synthesized)
gcaggctggaaagacacatatggcgaaagtcaagtatctgaggccacttgcaacattgtgacaaagaagatggaagatagcagcctactgggctgtgagaatagtggtgaatttgattat

SEQ ID NO: 70961 - DNA, 120 bp, Artificial Sequence
  ENSG00000077157_36 (sequence is synthesized)
ttccagtggttagatttagcagagagatttactttcttagaaattaataggggaaatggcacttaatagaggtttaatggaatgaagtactttcaacccattgatgagagtcatggaagt

SEQ ID NO: 70962 - DNA, 120 bp, Artificial Sequence
  ENSG00000077157_37 (sequence is synthesized)
ttagagtggcaagacccagaggtcattaggtccagctttctattattgtgtcacagggacccctgctaccacagctttcacccatgggcatggtcaggtagcctctggtggctatgcatt

SEQ ID NO: 70963 - DNA, 120 bp, Artificial Sequence
  ENSG00000077157_38 (sequence is synthesized)
tattactcaaaagttgggcaactctaataacgagagagtttttcctcatatcagctgaagtctgcctgtggattctccttgtagtccagatctactatctgcaactctttaacggcactt

SEQ ID NO: 70964 - DNA, 120 bp, Artificial Sequence
  ENSG00000077157_39 (sequence is synthesized)
gagatatgtgcagtgggtggtctccccctcagtcttactttgagctgctgttactctagtcctttaagtcattcctcatatggcatgcttttcttacctgtcacatcttggccatcctcc

SEQ ID NO: 70965 - DNA, 120 bp, Artificial Sequence
  ENSG00000077157_40 (sequence is synthesized)
tctagacaaaaccagcctttaaaatatcatgtccaggcctggaaagaatacaaatccagtgcaaaattaaaccattagttcttgatgataacctagcattaatacttacagtattttctt

SEQ ID NO: 70966 - DNA, 120 bp, Artificial Sequence
  ENSG00000077157_41 (sequence is synthesized)
tttgtaggagttttatcccttggttcacttgagtgtgcaagtcattaaatcctcatcattttagggttgccagtgatattcagtgtttagagtggttcattcccttaatatatactacct

SEQ ID NO: 70967 - DNA, 120 bp, Artificial Sequence
  ENSG00000077157_42 (sequence is synthesized)
ctgtctgttaattctttcctaacatgacatgtagctctccatggtcctccctctgaaacaccacatgctgtttaaactagaagctgtaattcaagatcccaattccaccaggtgcagtgg

SEQ ID NO: 70968 - DNA, 120 bp, Artificial Sequence
  ENSG00000077157_43 (sequence is synthesized)
agagcaagactccatctcaaaaaaaataataataataaataaataaaaaatcccaattacagaacaggagatatgtttcctctgacaaaaccccatttttagagtgtataaaattctgtc

SEQ ID NO: 70969 - DNA, 120 bp, Artificial Sequence
  ENSG00000077157_44 (sequence is synthesized)
attctgtctttcatttccaaccatttttcaagagaagctgctactatcttgagacttcgtattatcatgggagtactgtaagttcagttctcagggaatgctaaattagagtaataagtt

SEQ ID NO: 70970 - DNA, 120 bp, Artificial Sequence
  ENSG00000077157_45 (sequence is synthesized)
ttatatccttcattctgggagaggaaatcaacataaggtgttgactaattgattatcctggaacattttgaatattggggaaggaagatgatacttctttctcaagaaaagaaaattgga

SEQ ID NO: 70971 - DNA, 120 bp, Artificial Sequence
  ENSG00000077157_46 (sequence is synthesized)
ttattaggaatacatcttgacccttttccactcaatagaccagggaaaggggttacagagagcctcctcagatctgtttgtgcctttcaaaagtactgggggcagattctcaaaactctt

SEQ ID NO: 70972 - DNA, 120 bp, Artificial Sequence
  ENSG00000077157_47 (sequence is synthesized)
agattggtgttgcatccctgccacttcacatgacccttccatgttaaagctgacttttcttgccagaaagttttccttgtgacaagaaatttgcaagcttttcaatctcaggaatactgg

SEQ ID NO: 70973 - DNA, 120 bp, Artificial Sequence
  ENSG00000077157_48 (sequence is synthesized)
attctatagccaagaactcatgaaagtaagtgtaaactatcctaggtaatttcaggtactttctcttatgcaattaattttattaactgatttctggtctatctccagagataaaatacc

SEQ ID NO: 70974 - DNA, 120 bp, Artificial Sequence
  ENSG00000077157_49 (sequence is synthesized)
attccttcacaactgtattgtctggaagccccatgagatggtaattataggccttctactagccagcagttctctctggatactggcatcagcaggtctcctttttcttgtgctgcttgg

SEQ ID NO: 70975 - DNA, 120 bp, Artificial Sequence
  ENSG00000077157_50 (sequence is synthesized)
acaggtacctactgctggcctcttcagtggccacaatcctcagtcctcacctgctggtttggagactcatgagcaccccaggcagctcaagctgaataaatagctgcagacatggccaac

SEQ ID NO: 70976 - DNA, 120 bp, Artificial Sequence
  ENSG00000077157_51 (sequence is synthesized)
aacatggggctcaggtctgtcacttaacttagagtctttacatgaaatatcagaatgggaaagagaatgttcctggtaaaactctgttttcattaatttgttatttttcaaaaaccgagc

SEQ ID NO: 70977 - DNA, 120 bp, Artificial Sequence
  ENSG00000077157_52 (sequence is synthesized)
cacacctttggaagtaatgatttggccattccagagattctggggctaaagtttgtttttccagggctgctgatccttttccagatagctccagagtatgatgaccccagccccatccca

SEQ ID NO: 70978 - DNA, 120 bp, Artificial Sequence
  ENSG00000077157_53 (sequence is synthesized)
atctctagcgaaagggttatgcaaatctcagggtgttgcctctaaagaatctaaagaatagacatgctttgggcttactcagtgtaccagattctctagtgggccattctcatttgatgt

SEQ ID NO: 70979 - DNA, 120 bp, Artificial Sequence
  ENSG00000077157_54 (sequence is synthesized)
tccctagaacctccctgtcttccaactgcaggatgtgtttacttctcttctgggcttcccctggtttctgtcctagttcccaccccaagtttaagaagacttagattcatttattgctat

SEQ ID NO: 70980 - DNA, 120 bp, Artificial Sequence
  ENSG00000077157_55 (sequence is synthesized)
ctgaggccactagtgagatttcagatctctcttttgcaacattttacccatttcccttccccaaaccatgtgcttattagatggttccactcaggaagcaaggaagctaaaactcaagtt

SEQ ID NO: 70981 - DNA, 120 bp, Artificial Sequence
  ENSG00000077157_56 (sequence is synthesized)
aatggtctgtggatcccacgaaagtgtgtgtaaactactgactgtttctccactagaggcatttaattgagccaaagatgatggaagaagaaactctcaaagccatgtactttgttaggt

SEQ ID NO: 70982 - DNA, 120 bp, Artificial Sequence
  ENSG00000077157_57 (sequence is synthesized)
gtctggatttttggcctgtttgcagcctctcctagccacagacagacactgtctcctctcagagaaaggccagtgtttcggtccaggccactggtgagtgtcggcacccttgaggtgggc

SEQ ID NO: 70983 - DNA, 120 bp, Artificial Sequence
  ENSG00000077157_58 (sequence is synthesized)
atggagtgagcagaagaagcctggagaagagagaactatttaaaagtgttgccagttattcagcttccaggcggctttgcacctccaaaggtgcaaaaaggaaaaagaaagcagaaagga

SEQ ID NO: 70984 - DNA, 120 bp, Artificial Sequence
  ENSG00000077157_59 (sequence is synthesized)
ttcagcatttaagcagaaagaaaagggaaattctactctaccagatgagccactggttccactggagcttatcagtgaagtaacactgcaggagccctggtatccttccctcagagatat

SEQ ID NO: 70985 - DNA, 120 bp, Artificial Sequence
  ENSG00000077157_60 (sequence is synthesized)
catcaggggccctcaaaccccattgtttatgccagcactgaccgcactttaagcacacacttaccaatcagaggtcgtgtaattggcctaaatctaggcccagttattactacaaatctt

SEQ ID NO: 70986 - DNA, 64 bp, Artificial Sequence
  ENSG00000077157_61 (sequence is synthesized)
ggatcctctcacctcagctcccgagcagctaggactgcaggtgtgcaccaccatgcccagctaa

SEQ ID NO: 70987 - DNA, 86 bp, Artificial Sequence
  ENSG00000077157_62 (sequence is synthesized)
aagctgctgggctcaagcaatccacctggctgggcctcccaaagcgataggattacaggcgtaagggcccacgcccagcctaccat

SEQ ID NO: 70988 - DNA, 120 bp, Artificial Sequence
  ENSG00000077157_63 (sequence is synthesized)
ataggattacaggcgtaagggcccacgcccagcctaccatactgattttcaaggcagggtctaacccttcataagatgtgagttcttccaacccaataagcaggcagctttgaggacaaa

SEQ ID NO: 70989 - DNA, 120 bp, Artificial Sequence
  ENSG00000077157_64 (sequence is synthesized)
aaggcaacattaaaagataagaccctagaagtcagaacatctgtattccaaggccaccccttctccttttagtcatgtgactttgggcaggtcaccctccctgtctgtaaaatgaggttg

SEQ ID NO: 70990 - DNA, 120 bp, Artificial Sequence
  ENSG00000077157_65 (sequence is synthesized)
gactggataatctttatgtgccctttccttttggcttaaaattctgtgatttattcattcttaggaagatcagcatatttattgggatttctgcttcaaaaattctttctaacctcaaaa

SEQ ID NO: 70991 - DNA, 120 bp, Artificial Sequence
  ENSG00000077157_66 (sequence is synthesized)
atccaagtccagaattttttgttttcttctggatttaaactgtttaatatgagcacatcaaggttgacttctcatcctttttgggaagtgaatttaatattgagggtaattgaatgatgt

SEQ ID NO: 70992 - DNA, 120 bp, Artificial Sequence
  ENSG00000077157_67 (sequence is synthesized)
tgcaatggctttccctcctgctggcttggtaagaatattaaagcctgcagaggtggaaattggagctcatggagaaatggatagaaagcaatttgttgcaggcagcctttggacaagttg

SEQ ID NO: 70993 - DNA, 120 bp, Artificial Sequence
  ENSG00000077157_68 (sequence is synthesized)
ttttaataggaaatagacctgctgcttcataggtttcctcaaccacctttcctcagctttcttaaaatgggatctacattggctcttcacacccaaatagcagactaatcgtttttctgc

SEQ ID NO: 70994 - DNA, 120 bp, Artificial Sequence
  ENSG00000077157_69 (sequence is synthesized)
ttagcaccgtctggttcattgtcttgaactctgccttacagcagcaagaaaattttcctcgacaagaacctcaatctttagttccattgagctccccctctggattttggacttaccaga

SEQ ID NO: 70995 - DNA, 120 bp, Artificial Sequence
  ENSG00000077157_70 (sequence is synthesized)
agtaggaggttctgataccattcaagatggtctttccttcaaagcaggtctgaagaggagactaccaaagcagtgtttacaaacccagagtccacacaaccatattgcatagaacagcac

SEQ ID NO: 70996 - DNA, 120 bp, Artificial Sequence
  ENSG00000077157_71 (sequence is synthesized)
ttggctttcacaagcctcctacaggacctggtgtaattggagtgaaagggcagagaccctggaagtggaggtggctgtgtgctgcgatgggaagaaggcagaaggcccaggggctttgga

SEQ ID NO: 70997 - DNA, 120 bp, Artificial Sequence
  ENSG00000077157_72 (sequence is synthesized)
catagagcagggtggaagctgcaagtactgggaaggaagagagtttcacagaaacaaagctttgtcacacagaaatgagttctgtctcactggtgacttcatccctcaggctccagctga

SEQ ID NO: 70998 - DNA, 120 bp, Artificial Sequence
  ENSG00000077157_73 (sequence is synthesized)
gcagagattttaatcagcttccttaatgggtattgacactgctcaggaagcagtagaccctgtcagggacagctattgatcttttgtgttctgattagattggaaaatagatcaacttca

SEQ ID NO: 70999 - DNA, 120 bp, Artificial Sequence
  ENSG00000077157_74 (sequence is synthesized)
ttgtagtccaggaactgttggtcacagctactaggaatgaggtgatttctgagggctgagaaaaaacacagaatcttggccagcagccagcagctgcatggtgaaagatgcattcacttc

SEQ ID NO: 71000 - DNA, 120 bp, Artificial Sequence
  ENSG00000077157_75 (sequence is synthesized)
tcctttgagagttggggttgagggcaaacatagaacccaggtttggcttacaacccagtgtcccggaagccctccttcgggagaactgtaagtaagaggtgggtgtgtctaaagacaata

SEQ ID NO: 71001 - DNA, 120 bp, Artificial Sequence
  ENSG00000077157_76 (sequence is synthesized)
ccattaatgaatgttctggccttacctaaaaaggtttagcaatttggggataactcttggatctagcttatgtgcgttcacatgcacatttgctagcccagagcttttaaaatgaggtct

SEQ ID NO: 71002 - DNA, 120 bp, Artificial Sequence
  ENSG00000077157_77 (sequence is synthesized)
ggcatatacttgattacaaatgaaaactcagaaaccaattttatttattaaatcatatcttttgtttttccccctcccttctaatcccccaaaggacctatttgagctgttccccaattc

SEQ ID NO: 71003 - DNA, 120 bp, Artificial Sequence
  ENSG00000077157_78 (sequence is synthesized)
atctgcttattttggaccatgaatctgccagagtgatattttctgttatttctcctccaaatttttccctgatgtttccaataaagatttacttgggtggccccttaaggtgacatcagg

SEQ ID NO: 71004 - DNA, 120 bp, Artificial Sequence
  ENSG00000077157_79 (sequence is synthesized)
atgctcttatgtccttccagaataagcatacacttcactcctctccctttcatctccctctgcattcttaattccttgcttttctcacttggagccgagggtgctttagagaggtggttt

SEQ ID NO: 71005 - DNA, 120 bp, Artificial Sequence
  ENSG00000077157_80 (sequence is synthesized)
tccatgaatcagccaagattcctgtagaagttgggtataccaaccaccaccaccaccgccccctattccagtttcaaagctcctcggctatgctaatgtcccctcagagatgaggtttga

SEQ ID NO: 71006 - DNA, 120 bp, Artificial Sequence
  ENSG00000077157_81 (sequence is synthesized)
cttttaggcccgtatgactcctccatagcctggccaaggagaccatgagtagccatgtctggtttactctttatcctgagactgtttatagcttaaaacagaagtgtgtcttcccagcac

SEQ ID NO: 71007 - DNA, 120 bp, Artificial Sequence
  ENSG00000077157_82 (sequence is synthesized)
aaacctaatcaatcagtgtatcagtgcatctggtggcaacagctcagcccattcaaagagcaaggattcaggaaaggcacactgatggtggggagcctcttaagagcctctaatgttctc

SEQ ID NO: 71008 - DNA, 120 bp, Artificial Sequence
  ENSG00000077157_83 (sequence is synthesized)
ccaaaaccagagttgagagtcggagtgccagtcgtcggggcccactattcctgaataagggacatgcaagggccagaagtagcttgactctcgcctaaatatctgtgcctttgcctgtcc

SEQ ID NO: 71009 - DNA, 120 bp, Artificial Sequence
  ENSG00000077157_84 (sequence is synthesized)
tttctcccactctactgaaacccggaacagattcccgcttgccttctgatgaagagaggttaggtaaagagagtttggaggaaaaaagacaccaggaggcaggctgcggggtaggagagg

SEQ ID NO: 71010 - DNA, 120 bp, Artificial Sequence
  ENSG00000077157_85 (sequence is synthesized)
gttctgagaggaggcagcaatccagaatacctccttttctagccagcatcccttgaacttttgaaaggttgtgcctaccactggctggcacaccagggcaatgatttccctgcagaagga

SEQ ID NO: 71011 - DNA, 120 bp, Artificial Sequence
  ENSG00000077157_86 (sequence is synthesized)
aggaaagaatgtttcacccttgcatccttcttggagaagctacagcctgtgctcagttgagtggttcacactcagactttggctttatggttttccttcctccttgtctttgccctgacc

SEQ ID NO: 71012 - DNA, 120 bp, Artificial Sequence
  ENSG00000077157_87 (sequence is synthesized)
ttgatcaacaggggtgaaaagaaccaccctgaggtttccatgcctctcccattttagtggtagcattttgtgtctttactccacccttcaccctagttccaccaaggttcacacaccaga

SEQ ID NO: 71013 - DNA, 120 bp, Artificial Sequence
  ENSG00000077157_88 (sequence is synthesized)
tgtaactgtttttcagctgagttgtatggattaacttcagtccactgtaaatacacctgggatggggtggggttggggttgtttagggagaagcagccagacttgctttgtgaactgaat

SEQ ID NO: 71014 - DNA, 120 bp, Artificial Sequence
  ENSG00000077157_89 (sequence is synthesized)
gtatttttatgcaattttgagtggcctttcaaccctaagatgaatggttttgttttactggttgttgttatatagttttgagtattctgtgtttgaaagtttgggaataataatattcac

SEQ ID NO: 71015 - DNA, 120 bp, Artificial Sequence
  ENSG00000077157_90 (sequence is synthesized)
ttctatatgatgcctgtaaacacaacagtatttataaatgagtaaataaaactgtgttttaactttgtgactgtctccacagttcagagcatgggatttctagaatctcacatctggggc

SEQ ID NO: 71016 - DNA, 120 bp, Artificial Sequence
  ENSG00000077157_91 (sequence is synthesized)
agcctcttctgattttacatcttatcattggtgggggcctcgcccaccagcctcctacaactcctgtccacatagaggccccttccccagggacagccacagtgagtcatggccactgag

SEQ ID NO: 71017 - DNA, 120 bp, Artificial Sequence
  ENSG00000077157_92 (sequence is synthesized)
atggccactgagaagggtctctggtagtatcaaggaatttcctaaatggagtcaggccaaggagaagcctagattggcgttcaaaagaaccgtaagatagatagatagatagatagatag

SEQ ID NO: 71018 - DNA, 120 bp, Artificial Sequence
  ENSG00000077157_93 (sequence is synthesized)
atagatagatatcaaggttccaagcttcaagtaaccaagagtatatacggttatttcttggaagacaccaggtttaagtgacaaaggtgttgaggccatccaggtgaacactagcacact

SEQ ID NO: 71019 - DNA, 120 bp, Artificial Sequence
  ENSG00000077157_94 (sequence is synthesized)
ctagtacatgggaaagttgaggtctagggaggtggtgatttccttgggctcatggaagtctcctgccatcacccttagtcatctgctatatccataagtcttcatgaggtcattgtttaa

SEQ ID NO: 71020 - DNA, 120 bp, Artificial Sequence
  ENSG00000077157_95 (sequence is synthesized)
ttcaggagatccaaaactatcctgtagttccaaactacaaatgtagttaacttgggggctattgaaggttaaatctaaactcaaaatgaaggagccatgcccagagaagagctgttcagg

SEQ ID NO: 71021 - DNA, 120 bp, Artificial Sequence
  ENSG00000077157_96 (sequence is synthesized)
cccgctggcagggtttgtacgtgggtggccaggtctgaccccaggcagccaggatctgggtctggtttctccatccagcaagccctgcctctggctttgctcagccctgtgtttcctgcc

SEQ ID NO: 71022 - DNA, 120 bp, Artificial Sequence
  ENSG00000077157_97 (sequence is synthesized)
aagcggaaatccctggtcactgacttggggagaggtcagggagggaagattcttctcccctgatgtcacccagctgtttgtaacccaagcagcagcagaacaagcacacttgatgtcatg

SEQ ID NO: 71023 - DNA, 120 bp, Artificial Sequence
  ENSG00000077157_98 (sequence is synthesized)
gttgaagaattcagtcctgtcctggggcacaaaacagaggcaaagaagcatgaccgatgcaaagggttcctagactgcaaatgtcatttctctttctgacccccactggttgtagtaagg

SEQ ID NO: 71024 - DNA, 120 bp, Artificial Sequence
  ENSG00000077157_99 (sequence is synthesized)
tctgcagatacagtatcacctagccgtcacgtggtccagccctcttggggggaaaggagaaggccacaacctattggcagagtaaaaagctcatattcttagccaggagaccctcaggtg

SEQ ID NO: 71025 - DNA, 120 bp, Artificial Sequence
  ENSG00000077157_100 (sequence is synthesized)
ataaatcccagtccgtctgctgaaaggctcatgcccctcaccctacccagccttagggactgaagcagcaagacaggatagatgttaaaggatctgggctcatgctccctcaggtgggca

SEQ ID NO: 71026 - DNA, 120 bp, Artificial Sequence
  ENSG00000077157_101 (sequence is synthesized)
gctcccatccctgcttgcattcactgcccccatgcctttggacctgatggacaagcacacatctagccaacggtgttcctggaggacaggtgctggtgtaaactgacaaaaatggtagct

SEQ ID NO: 71027 - DNA, 120 bp, Artificial Sequence
  ENSG00000077157_102 (sequence is synthesized)
gctggtctatcctcaaggagaggagacaggtggaagtgggaaccgaagaaggagttttactcttccctggtctttgggggcaatgctgtcccactctccctttccctaaaaattctgacg

SEQ ID NO: 71028 - DNA, 120 bp, Artificial Sequence
  ENSG00000077157_103 (sequence is synthesized)
ccctatccctggtccctaacatctttgcttcagaagttaaagacatttcaagttatttgcaaagagtcaactgaggactttgtagaaattgttacttttcaaattcccacttcccagggc

SEQ ID NO: 71029 - DNA, 120 bp, Artificial Sequence
  ENSG00000077157_104 (sequence is synthesized)
cagcctccctctcgtcattgggctcagactgtggctgttccctaagcccagctctactggaagggaattcaagaatatagtccccaccaccaccccgccccgcccagcctcccagacaat

SEQ ID NO: 71030 - DNA, 120 bp, Artificial Sequence
  ENSG00000077157_105 (sequence is synthesized)
gttccccggcaccaccacactccccacagttccacagcctggcatgtgttctcaggagatgtgtgggccccagcacccaccagagtgccaatctggtcttcccccaaccccaggagagag

SEQ ID NO: 71031 - DNA, 120 bp, Artificial Sequence
  ENSG00000077157_106 (sequence is synthesized)
gggacctcagccccttttggtgcttccctgaagggagattctgggttagaagccagagcctcaggaccatctcaccaccctcacccaccatactgaccctcacaggcagctcccactccc

SEQ ID NO: 71032 - DNA, 120 bp, Artificial Sequence
  ENSG00000077157_107 (sequence is synthesized)
tcacccccacctcagcgcagcaaaaacaaccagagacaccccccacccccaggtttctttcagctcatttctttaataaggagacgcagttcattacaaaataacaatttgacaagagat

SEQ ID NO: 71033 - DNA, 120 bp, Artificial Sequence
  ENSG00000077157_108 (sequence is synthesized)
cagacaagaacaagagtccacataagggagatggagagcattgccaagcagaagtgggaatgagagggccgggggcaagggctgtacatgtgtccttcctatggagacgaaggcagggct

SEQ ID NO: 71034 - DNA, 120 bp, Artificial Sequence
  ENSG00000077157_109 (sequence is synthesized)
cctggtgggctgaccttggcgaagctaggctctgccaggccctgattttgaagttttcagccccagggttttcagaaagcagcaaatcaagtccttagatgggcaggagtcagggcagaa

SEQ ID NO: 71035 - DNA, 120 bp, Artificial Sequence
  ENSG00000077157_110 (sequence is synthesized)
gggtcactatctttgaagaggcccccctaaagtcctgatcgctaaggcaggtgggatggaggaactcctggtgccccatgcacactgctcccatcacctcaccagacagatgctctctca

SEQ ID NO: 71036 - DNA, 120 bp, Artificial Sequence
  ENSG00000077157_111 (sequence is synthesized)
actcttgcctcaatttgtctctgctgtgggtgtggagagtgggagggccccagagagagctggaggaagcaagacatgtcttcactggtccaagcacctgattccagcctgctctgaaat

SEQ ID NO: 71037 - DNA, 120 bp, Artificial Sequence
  ENSG00000077157_112 (sequence is synthesized)
ggtcccctccaccttccccactctttcagttcccagcacaaaggtccctgggacttctgtgtgcaacttctgttgtggtttgtgcagggcaagcctgcctcgccacctctggcctcctcg

SEQ ID NO: 71038 - DNA, 120 bp, Artificial Sequence
  ENSG00000077157_113 (sequence is synthesized)
aatgcgccctgcctgattcccttcccgttctctctccttcctcatacttgtcacagttgccaggcctgaggcatcctgggctcttcccatgcagtactgccctcaggtgcccatggggcc

SEQ ID NO: 71039 - DNA, 120 bp, Artificial Sequence
  ENSG00000077157_114 (sequence is synthesized)
aggggccgcaggcaggggggctacctgtccctctcagttcaacaggatgacctggggccttggaagcccccaggcccctctactcacctctgctacttggtgcaactggctggggcttct

SEQ ID NO: 71040 - DNA, 120 bp, Artificial Sequence
  ENSG00000077157_115 (sequence is synthesized)
ctggggagcaggtgtgaaggtcaggggacttagtccacacctgctctgcctgagcctctctcacagctgaacctgcccaccccactctcaggggatcgctggtagccctgaggttgcccc

SEQ ID NO: 71041 - DNA, 120 bp, Artificial Sequence
  ENSG00000077157_116 (sequence is synthesized)
gctattgggctgctttctgtcagactgcaggaggatgcacgagggaagagcgtcagcccctgtattcaccggcctctccctgagtccctcctccatcaccacccacagaccctcacacta

SEQ ID NO: 71042 - DNA, 120 bp, Artificial Sequence
  ENSG00000077157_117 (sequence is synthesized)
cagaggtgagtaagcagggatggttctgtcatccctggctgagctgctgactggctgctcctgaaaatcctggttgcctccacagggaccccaggaaaggtatccagaaccatggagtcc

SEQ ID NO: 71043 - DNA, 120 bp, Artificial Sequence
  ENSG00000077157_118 (sequence is synthesized)
cactgctgtctgctcctcgcccagcgtagagatggagctgaactgtgaacccaggccgagaaagccagctcgggcagggccagcatgggcatctcctgagaccccaccggaagccctgga

SEQ ID NO: 71044 - DNA, 120 bp, Artificial Sequence
  ENSG00000077157_119 (sequence is synthesized)
caccgtccattctcatgacacgggactgagggagcaggagggagtgacaacaggtgagcccttcagaagtggtctgtggggagccagttggagagacatgggggctcctgggaggagcca

SEQ ID NO: 71045 - DNA, 120 bp, Artificial Sequence
  ENSG00000077157_120 (sequence is synthesized)
agggaggccaaatctccagcaggaggccccctttatggcttttcagtgaattcaaacagtgggaggaaggggcacaccacacacatacacagaacatggaagctactgggatgccagata

SEQ ID NO: 71046 - DNA, 120 bp, Artificial Sequence
  ENSG00000077157_121 (sequence is synthesized)
ccaggctggacactgcaccgggccctgaggtttggctctgcaggcagatgtgcagcaaacaggccttcagggcgacagggtcctccagcatctcccaaggcagggctggactggagcagg

SEQ ID NO: 71047 - DNA, 120 bp, Artificial Sequence
  ENSG00000077157_122 (sequence is synthesized)
caccgactcccgcccactgatgactcccatggggggtttcccgatgggaggaggcaggggtggggctggggaacaaagactttacacgacataaaatcaaaggagcagcctcaaccagtt

SEQ ID NO: 71048 - DNA, 120 bp, Artificial Sequence
  ENSG00000077157_123 (sequence is synthesized)
ctgtaaaatgggtttgaggttggggatcaaggggactctcagcattgccatgcggctatttacagaaagttatagacatgcatcttgattaaacaagattctgttcatatgtttctaggt

SEQ ID NO: 71049 - DNA, 120 bp, Artificial Sequence
  ENSG00000077157_124 (sequence is synthesized)
aattatcttcttttatatataattaaatatacacggatgggggcagatgaggctcaaatggcttcagaaggttcttattttgttgttgcttaaaaaataaagtaattcatgtgtcttcaa

SEQ ID NO: 71050 - DNA, 120 bp, Artificial Sequence
  ENSG00000077157_125 (sequence is synthesized)
gtatcaacttacttgaaaagtgcttcatttggtagaagtagtgaccccacaagtccctacatttcagccaatcgcaattcatctcctgctacctcacccattaccattggttcatctacc

SEQ ID NO: 71051 - DNA, 120 bp, Artificial Sequence
  ENSG00000077157_126 (sequence is synthesized)
tctactggacaacaaagataaggtgcagtttgggagggtatgggggaattccaaggcagttttttttttccatgaaaattcaatcttaggaacaaatgaaaatattttctagtccttaag

SEQ ID NO: 71052 - DNA, 120 bp, Artificial Sequence
  ENSG00000077157_127 (sequence is synthesized)
ttgattttggaaatgcaaagtctttaaagagagagaggcacactgatagtttattcaagtagctatttgcttgctattgtttgcttgaccaaaaaagaaaataaaaaagctttaaaaata

SEQ ID NO: 71053 - DNA, 120 bp, Artificial Sequence
  ENSG00000077157_128 (sequence is synthesized)
gtttaaaaaggtgctatccctaatgcctcaaatctagtgaatcatggcatgcaaagaagtgtgaactagggctaagtcacctttgtgtagtcaatttgattgcttttcttaaatggcacc

SEQ ID NO: 71054 - DNA, 120 bp, Artificial Sequence
  ENSG00000077157_129 (sequence is synthesized)
atggcacccccatctccagctgtgaagttcagccatctgatttgaaaagtgcatttatagatggaaataatacaaatcagtctcttgctaatgctgttttcttttcttttttcttttttt

SEQ ID NO: 71055 - DNA, 120 bp, Artificial Sequence
  ENSG00000077157_130 (sequence is synthesized)
ctttgtcctacttttctctcctctggtctgtcttgtctctctctgtcttttctgtctgtccttttcatgtctcaatctctacagaacctccaccagctaaaacagattcaaaccttgaag

SEQ ID NO: 71056 - DNA, 120 bp, Artificial Sequence
  ENSG00000077157_131 (sequence is synthesized)
cagatgaacgagcaactgcaggctgagaacagggccctgacccgagtggtggccagactctcggagtccatcgagtcctcggacacccaggagctctagttcttgcccctactctccaac

SEQ ID NO: 71057 - DNA, 120 bp, Artificial Sequence
  ENSG00000077157_132 (sequence is synthesized)
tcacttccctcctccactactccaggcaggttcagtcttcttgttagtcccagaagctctgtgctcatcccctccatccgagcctccatatgcaggttcctgcaaagcttggttatctgc

SEQ ID NO: 71058 - DNA, 120 bp, Artificial Sequence
  ENSG00000077157_133 (sequence is synthesized)
agatggaagcagccaggactgagatcatagaatgggacataccagcctaggtcaagggaggcagtgagagagacctcagctgggctaccaatatattcatttggtaaggtcaccacatta

SEQ ID NO: 71059 - DNA, 120 bp, Artificial Sequence
  ENSG00000077157_134 (sequence is synthesized)
gcttctcttcccctggagactgagtatgaatttgttcactcagctacacataggtatacacgtgtatgtgcatatacctgtgtacatgcacatatacatatttcattgacggggtcattg

SEQ ID NO: 71060 - DNA, 120 bp, Artificial Sequence
  ENSG00000077157_135 (sequence is synthesized)
ccagatggaaattgatctttcttagccaatagcaacccaagtccaacccactcccctggagcaactggggttgggccttgggtaaccaagggcaggggctctcaatcttggctgcaagaa

SEQ ID NO: 71061 - DNA, 120 bp, Artificial Sequence
  ENSG00000077157_136 (sequence is synthesized)
acatctaggagcttttaacgtatacctatgggtatattttaaacatatacatagcttttaacatatacatatagggatgtctgggtccatccccaaataatcagtggtctgggttgagac

SEQ ID NO: 71062 - DNA, 120 bp, Artificial Sequence
  ENSG00000077157_137 (sequence is synthesized)
ccaggcatcagtattttttcaaacctctcctattgattccttatacaaccatggttaagaaccacagccctttggataccagacagtcctcacggctgacaacattaccgatggagagga

SEQ ID NO: 71063 - DNA, 120 bp, Artificial Sequence
  ENSG00000077157_138 (sequence is synthesized)
ctaaaactcaaggttggaactgttcctgtccagctccactaccagcaaaaacactctgcatcccattattcaagcataattggataagcattctttgcctccttctgcagtagtctttgc

SEQ ID NO: 71064 - DNA, 120 bp, Artificial Sequence
  ENSG00000077157_139 (sequence is synthesized)
gccctagggatgtgcccctccctgtccttagtgtgtgggctgtgaggcagaacacagcctatataaatgagaccctcatggagccaggccctctctaatgaggccagctttgcaaaggat

SEQ ID NO: 71065 - DNA, 120 bp, Artificial Sequence
  ENSG00000077157_140 (sequence is synthesized)
atggcaggcagtggagcagagagcaaggatttattttcaactgagaaccaaaaatgtgcttggcaaactggatcctttccctagctatggatctgaaagacaagctcacagacaactggt

SEQ ID NO: 71066 - DNA, 120 bp, Artificial Sequence
  ENSG00000077157_141 (sequence is synthesized)
ttttctatctcaagatggtatgatggggtcaccactcctctgagatgaatttttaattgtcagcaacaatctaattagtcctgaccagagcctgttctttctttcagcctatttgctttt

SEQ ID NO: 71067 - DNA, 120 bp, Artificial Sequence
  ENSG00000077157_142 (sequence is synthesized)
gccttcagggttagtagctggcaactaatatccactagaactgaatcacccgaattatcatagggctgagctaatatcctgctgtagatgctatcataggcagaaagaaaattgaaaggc

SEQ ID NO: 71068 - DNA, 120 bp, Artificial Sequence
  ENSG00000077157_143 (sequence is synthesized)
aagttctaccatggcctggctgtaagcagccactgttaggtccagactccatgctttaaagttagcctcaagattcctggaaatttttacttaggctaaactagggaccccccaaaaggt

SEQ ID NO: 71069 - DNA, 120 bp, Artificial Sequence
  ENSG00000077157_144 (sequence is synthesized)
gtcccagttatttttagtatccctttgttgcaagatagtataggatatggggcaaaactagatctcatgctttcagtagttaataaccttaacagttgtcatttatttaaggcctgtgct

SEQ ID NO: 71070 - DNA, 120 bp, Artificial Sequence
  ENSG00000077157_145 (sequence is synthesized)
gaatgctttatatagtttttctcatttattccccaaaacaattattgtaaaaatgaaaaaaaaaaaactgagtcacagattaaataacttgcccaaggtcactccgagagtaagtggtag

SEQ ID NO: 71071 - DNA, 120 bp, Artificial Sequence
  ENSG00000077157_146 (sequence is synthesized)
aaccaaaattcaaaccaaatatgtcaggttccagagtgcaaacttttcaccactgtaatataagctgtctgcatatttggcacagttttcaccatttgttaagcatgtggcccaaacaat

SEQ ID NO: 71072 - DNA, 120 bp, Artificial Sequence
  ENSG00000077157_147 (sequence is synthesized)
gcaagaaggatctattgagcaactacactgtgcccccagcattgcagctgagggaggaagggcagcattctgctttctgagcactgtgacttccttgtcaaagcctaacttctaaagagc

SEQ ID NO: 71073 - DNA, 120 bp, Artificial Sequence
  ENSG00000077157_148 (sequence is synthesized)
catttacctaccaaaagattttgctgctgtaaagaaagccattgcctggtacatgaccatagcaagggttagcaaactgtgacccaccaccagtatggcccataagccatacaaatagtc

SEQ ID NO: 71074 - DNA, 120 bp, Artificial Sequence
  ENSG00000077157_149 (sequence is synthesized)
atagaatgaagagaggagaagaatggtgagatgtaaaattgtaattagcattgaagacctgtggagagagagagagagagagagattgtgtgttcagaaacaagaaaagacctctgaccg

SEQ ID NO: 71075 - DNA, 120 bp, Artificial Sequence
  ENSG00000077157_150 (sequence is synthesized)
ggaggaagatgacctgaaagagctgcccccgctgggcatgggacagcccccggtggaagaggctgaacagcctgggacattggccctagagttcctcgctgccatggagcctgagcccgc

SEQ ID NO: 71076 - DNA, 120 bp, Artificial Sequence
  ENSG00000077157_151 (sequence is synthesized)
catagcaattaagaccattttagaacagatacaagtagggatttcacttgattatttgccaggtggcagtaaggattagaaatggtgtgatttctgcagtactgttgtacaaactctata

SEQ ID NO: 71077 - DNA, 120 bp, Artificial Sequence
  ENSG00000077157_152 (sequence is synthesized)
tttaaaggatttggtgtttcttgttatgtgtcctgtgtgatagatgaaggtgttatcataatgtatggtagattagtttgaaaagcagctattattggagtcaaaggcaaaaagtgactt

SEQ ID NO: 71078 - DNA, 120 bp, Artificial Sequence
  ENSG00000077157_153 (sequence is synthesized)
tctaggcataaaaggtgttgctcagcacaataccctctacggtaagctaccagtcctgagaacctgtggtcaaagctgaattgaaaatattgatggaactcagactctgtgtaactgggg

SEQ ID NO: 71079 - DNA, 120 bp, Artificial Sequence
  ENSG00000077157_154 (sequence is synthesized)
actggttcagagctcaagactataatttacagggctgcttttatcctttatttagttctatccaaagtcatcttgcatcaactcaaaaggagagattctgtgagggtaacctacagggaa

SEQ ID NO: 71080 - DNA, 120 bp, Artificial Sequence
  ENSG00000077157_155 (sequence is synthesized)
atttcccagctttgtgtgaagaatccagtggttgagtgtctatctgcatcctgaggaaccatgtcctctttatatacccgaagtaaagaattcactcggaataggaaatctcagtctgat

SEQ ID NO: 71081 - DNA, 120 bp, Artificial Sequence
  ENSG00000077157_156 (sequence is synthesized)
gttgctggtacaatctcataaaatgggctccagtgtttagagaaggacagtcagaggagtggccacctgtttgttgaaaattgggcttctgggaaagttgctgcacaagtgtgtggcaag

SEQ ID NO: 71082 - DNA, 120 bp, Artificial Sequence
  ENSG00000077157_157 (sequence is synthesized)
gtgtgtctgagatagcttgacctgctttcacctggaatgatttgatctggcaatagagttccttgccattcctggttttatggaaatcagaggcacaggaagttgatctgggtgttctgg

SEQ ID NO: 71083 - DNA, 120 bp, Artificial Sequence
  ENSG00000077157_158 (sequence is synthesized)
ggaattgagacaagcctctgccatagtttgttagtactctgtgtttggatgctaactccagtgtgctgagttgagacatcagcaagtgctgggcctggaatgtcagaagcagcaggtcct

SEQ ID NO: 71084 - DNA, 120 bp, Artificial Sequence
  ENSG00000077157_159 (sequence is synthesized)
tcatgtaaatgagtttaattatacagcttgctgttgaaaagtctgtggttaaggatacttatagaatccggtttggtttttgtttcaatttctcacttttgcagttatgaatatagacaa

SEQ ID NO: 71085 - DNA, 120 bp, Artificial Sequence
  ENSG00000077157_160 (sequence is synthesized)
ttaggcatttggttaaatgggaagagagagcagttgctgaattaggtgagggagaactaagcatactgagactgtagagtatcagttgtctctggataatccaagaagatggtcatcaaa

SEQ ID NO: 71086 - DNA, 120 bp, Artificial Sequence
  ENSG00000077157_161 (sequence is synthesized)
gagtatcaagattcagtgggtagagcatcagcattcttctgctgtccttgacataggtgggtagttatgtatgtcaggaagtaagacttttcatacttttcttttcccctagaatctcta

SEQ ID NO: 71087 - DNA, 120 bp, Artificial Sequence
  ENSG00000077157_162 (sequence is synthesized)
ttgcttttagataaatcaggtggcactcaatctgaacaaaatcactgaaaccttaccctcaaagttagcaatgtagctgtccccatccagaatgcaatcagtaggtctggattactagtc

SEQ ID NO: 71088 - DNA, 120 bp, Artificial Sequence
  ENSG00000077157_163 (sequence is synthesized)
atccctcaaaactgattggtaaaggagatagtgttaaagagttactaaattatagatatcaaggtacctgccttagataactgggggtatgctcgtggagagatctgttggtaaaagtct

SEQ ID NO: 71089 - DNA, 120 bp, Artificial Sequence
  ENSG00000077157_164 (sequence is synthesized)
tctaaaagagttaagctattaaatgcaaggttttcaaactacatgaaagaacacaattggaatttgctagcagagctgagttttgaactttaacagaaaataaatgccatagaaataaat

SEQ ID NO: 71090 - DNA, 120 bp, Artificial Sequence
  ENSG00000077157_165 (sequence is synthesized)
agaaatataccagaagccactaaatgcattttccattttgtcctgccttcacttttgtaagcatcttaattcaacaagtgcttttaagcgccgattatgatcaagcacttttctagattc

SEQ ID NO: 71091 - DNA, 120 bp, Artificial Sequence
  ENSG00000077157_166 (sequence is synthesized)
tggggatgcaacaatgaacaaacagccctgctcttacggaatttacattctagtgggggagacagacaaaataaatatataaagtaaatactatgttaaaaggtgatacgtgctatggaa

SEQ ID NO: 71092 - DNA, 120 bp, Artificial Sequence
  ENSG00000077157_167 (sequence is synthesized)
aaaccatatagagtaggctaaggaggaatcagaagtgccaacatggaaggaggttgacattataagtagggtggtcaggataggccttactgagaaaatatgatttaagcctagtcttaa

SEQ ID NO: 71093 - DNA, 120 bp, Artificial Sequence
  ENSG00000077157_168 (sequence is synthesized)
aggaagcaaggtgggaaactatgtggatatgtaggggtagagtgttatggacagagggaatagcaattgcaaagaccctaagataggtgtctggcatgcttgaggacaggttaaaaaaaa

SEQ ID NO: 71094 - DNA, 120 bp, Artificial Sequence
  ENSG00000077232_0 (sequence is synthesized)
cccggctcgccgtggagaccggcgcgtgaggaacctaccggtaccggccgcgcgctggtagtcgccggtgtggctgcacctcaccaatcccgtgcgccgcggctgggccgtcggagagtg

SEQ ID NO: 71095 - DNA, 120 bp, Artificial Sequence
  ENSG00000077232_1 (sequence is synthesized)
cgtgtgcttctctcctgcacgcggtgcttgggctcggccaggcggggtccgccgccagggtttgaggatgggggagtagctacaggaagcgaccccgcgatggcaaggtatatttttgtg

SEQ ID NO: 71096 - DNA, 120 bp, Artificial Sequence
  ENSG00000077232_2 (sequence is synthesized)
gaatgaaaaggaagtattagaaatgagctgaagaccattcacagattaatatttttggggacagatttgtgatgcttgattcacccttgaagtaatgtagacagaagttctcaaatttgc

SEQ ID NO: 71097 - DNA, 120 bp, Artificial Sequence
  ENSG00000077232_3 (sequence is synthesized)
atattacatcaactggaaccagcagtgaatcttaatgttcacttaaatcagaacttgcataagaaagagaatgggagtctggttaaataaagatgactatatcagagacttgaaaaggat

SEQ ID NO: 71098 - DNA, 120 bp, Artificial Sequence
  ENSG00000077232_4 (sequence is synthesized)
cattctctgttttctgatagtgtatatggccattttagtgggcacagatcaggatttttacagtttacttggagtgtccaaaactgcaagcagtagagaaataagacaagctttcaagaa

SEQ ID NO: 71099 - DNA, 120 bp, Artificial Sequence
  ENSG00000077232_5 (sequence is synthesized)
attggcattgaagttacatcctgataaaaacccgaataacccaaatgcacatggcgattttttaaaaataaatagagcatatgaagtactcaaagatgaagatctacggaaaaagtatga

SEQ ID NO: 71100 - DNA, 120 bp, Artificial Sequence
  ENSG00000077232_6 (sequence is synthesized)
caaatatggagaaaagggacttgaggataatcaaggtggccagtatgaaagctggaactattatcgttatgattttggtatttatgatgatgatcctgaaatcataacattggaaagaag

SEQ ID NO: 71101 - DNA, 120 bp, Artificial Sequence
  ENSG00000077232_7 (sequence is synthesized)
agaatttgatgctgctgttaattctggagaactgtggtttgtaaatttttactccccaggctgttcacactgccatgatttagctcccacatggagagactttgctaaagaagtggatgg

SEQ ID NO: 71102 - DNA, 120 bp, Artificial Sequence
  ENSG00000077232_8 (sequence is synthesized)
gttacttcgaattggagctgttaactgtggtgatgatagaatgctttgccgaatgaaaggagtcaacagctatcccagcctcttcatttttcggtctggaatggccccagtgaaatatca

SEQ ID NO: 71103 - DNA, 120 bp, Artificial Sequence
  ENSG00000077232_9 (sequence is synthesized)
tggagacagatcaaaggagagtttagtgagttttgcaatgcagcatgttagaagtacagtgacagaactttggacaggaaattttgtcaactccatacaaactgcttttgctgctggtat

SEQ ID NO: 71104 - DNA, 120 bp, Artificial Sequence
  ENSG00000077232_10 (sequence is synthesized)
tggctggctgatcactttttgttcaaaaggaggagattgtttgacttcacagacacgactcaggcttagtggcatgttggatggtcttgttaatgtaggatggatggactgtgccaccca

SEQ ID NO: 71105 - DNA, 120 bp, Artificial Sequence
  ENSG00000077232_11 (sequence is synthesized)
ggataacctttgtaaaagcttagatattacaacaagtactactgcttattttcctcctggagccactttaaataacaaagagaaaaacagtattttgtttctcaactcattggatgctaa

SEQ ID NO: 71106 - DNA, 120 bp, Artificial Sequence
  ENSG00000077232_12 (sequence is synthesized)
agaaatatatttggaagtaatacataatcttccagattttgaactactttcggcaaacacactagaggatcgtttggctcatcatcggtggctgttattttttcattttggaaaaaatga

SEQ ID NO: 71107 - DNA, 120 bp, Artificial Sequence
  ENSG00000077232_13 (sequence is synthesized)
aaattcaaatgatcctgagctgaaaaaactaaaaactctacttaaaaatgatcatattcaagttggcaggtttgactgttcctctgcaccagacatctgtagtaatctgtatgtttttca

SEQ ID NO: 71108 - DNA, 120 bp, Artificial Sequence
  ENSG00000077232_14 (sequence is synthesized)
gccgtctctagcagtatttaaaggacaaggaaccaaagaatatgaaattcatcatggaaagaagattctatatgatatacttgcctttgccaaagaaagtgtgaattctcatgttaccac

SEQ ID NO: 71109 - DNA, 120 bp, Artificial Sequence
  ENSG00000077232_15 (sequence is synthesized)
gcttggacctcaaaattttcctgccaatgacaaagaaccatggcttgttgatttctttgccccctggtgtccaccatgtcgagctttactaccagagttacgaagagcatcaaatcttct

SEQ ID NO: 71110 - DNA, 120 bp, Artificial Sequence
  ENSG00000077232_16 (sequence is synthesized)
ttatggtcagcttaagtttggtacactagattgtacagttcatgagggactctgtaacatgtataacattcaggcttatccaacaacagtggtattcaaccagtccaacattcatgagta

SEQ ID NO: 71111 - DNA, 120 bp, Artificial Sequence
  ENSG00000077232_17 (sequence is synthesized)
tgaaggacatcactctgctgaacaaatcttggagttcatagaggatcttatgaatccttcagtggtctcccttacacccaccaccttcaacgaactagttacacaaagaaaacacaacga

SEQ ID NO: 71112 - DNA, 120 bp, Artificial Sequence
  ENSG00000077232_18 (sequence is synthesized)
agtctggatggttgatttctattctccgtggtgtcatccttgccaagtcttaatgccagaatggaaaagaatggcccggacattaactggactgatcaacgtgggcagtatagattgcca

SEQ ID NO: 71113 - DNA, 120 bp, Artificial Sequence
  ENSG00000077232_19 (sequence is synthesized)
acagtatcattctttttgtgcccaggaaaacgttcaaagataccctgagataagattttttcccccaaaatcaaataaagcttatcattatcacagttacaatggttggaatagggatgc

SEQ ID NO: 71114 - DNA, 120 bp, Artificial Sequence
  ENSG00000077232_20 (sequence is synthesized)
ttattccctgagaatctggggtctaggatttttacctcaagtatccacagatctaacacctcagactttcagtgaaaaagttctacaagggaaaaatcattgggtgattgatttctatgc

SEQ ID NO: 71115 - DNA, 120 bp, Artificial Sequence
  ENSG00000077232_21 (sequence is synthesized)
tccttggtgtggaccttgccagaattttgctccagaatttgagctcttggctaggatgattaaaggaaaagtgaaagctggaaaagtagactgtcaggcttatgctcagacatgccagaa

SEQ ID NO: 71116 - DNA, 120 bp, Artificial Sequence
  ENSG00000077232_22 (sequence is synthesized)
agctgggatcagggcctatccaactgttaaattttatttctacgaaagagcaaagagaaattttcaagaagagcagataaataccagagatgcaaaagcaatcgctgccttaataagtga

SEQ ID NO: 71117 - DNA, 120 bp, Artificial Sequence
  ENSG00000077232_23 (sequence is synthesized)
aaaattggaaactctccgaaatcaaggcaagaggaataaggatgaactttgataatgttgaagatgaagaaaaagtttaaaagaaattctgacagatgacatcagaagacacctatttag

SEQ ID NO: 71118 - DNA, 120 bp, Artificial Sequence
  ENSG00000077232_24 (sequence is synthesized)
aatgttacatttatgatgggaatgaatgaacattatcttagacttgcagttgtactgccagaattatctacagcactggtgtaaaagaagggtctgcaaactttttctgtaaagggccgg

SEQ ID NO: 71119 - DNA, 120 bp, Artificial Sequence
  ENSG00000077232_25 (sequence is synthesized)
tttataaatattttagactttgcaggctataatatatggttcacacatgagaacaagaatagagtcatcatgtattctttgttatttgcttttaacaacctttaaaaaatattaaaacga

SEQ ID NO: 71120 - DNA, 120 bp, Artificial Sequence
  ENSG00000077232_26 (sequence is synthesized)
ttcttagctcagagccatacaaaagtaggctggattcagtccatggaccatagattgctgtccccctcgacggacttataatgtttcaggtggctggcttgaacatgagtctgctgtgct

SEQ ID NO: 71121 - DNA, 120 bp, Artificial Sequence
  ENSG00000077232_27 (sequence is synthesized)
atctacataaatgtctaagttgtataaagtccactttcccttcacgttttttggctgacctgaaaagaggtaacttagtttttggtcacttgttctcctaaaaatgctatccctaaccat

SEQ ID NO: 71122 - DNA, 120 bp, Artificial Sequence
  ENSG00000077232_28 (sequence is synthesized)
atatttatatttcgttttaaaaacacccatgatgtggcacagtaaacaaaccctgttatgctgtattattatgaggagattcttcattgttttctttccttctcaaaggttgaaaaaatg

SEQ ID NO: 71123 - DNA, 120 bp, Artificial Sequence
  ENSG00000077232_29 (sequence is synthesized)
cttttaatttttcacagccgagaaacagtgcagcagtatatgtgcacacagtaagtacacaaatttgagcaacagtaagtgcacaaattctgtagtttgccgtatcatccaggaaaacct

SEQ ID NO: 71124 - DNA, 120 bp, Artificial Sequence
  ENSG00000077232_30 (sequence is synthesized)
gagggaaaaaaattatagcaattaactgggcattgtagagtatcctaaatatgttatcaagtatttagagttctatattttaaagatatatgtgttcatgtattttctgaaattgctttc

SEQ ID NO: 71125 - DNA, 120 bp, Artificial Sequence
  ENSG00000077232_31 (sequence is synthesized)
atagaaattttcccactgatagttgatttttgaggcatctaatatttacatatttgccttctgaactttgttttgacctgtatcctttatttacattgggtttttctttcgtagttttgg

SEQ ID NO: 71126 - DNA, 120 bp, Artificial Sequence
  ENSG00000077232_32 (sequence is synthesized)
tttttcactcctgtccagtctatttattattcaaataggaaaaattactttacaggttgttttactgtagcttataatgatactgtagttattccagttactagtttactgtcagagggc

SEQ ID NO: 71127 - DNA, 120 bp, Artificial Sequence
  ENSG00000077232_33 (sequence is synthesized)
tgcctttttcagataaatattgacataataactgaagttatttttataagaaaatcaagtatataaatctaggaaagggatcttctagtttctgtgttgtttagactcaaagaatcacaa

SEQ ID NO: 71128 - DNA, 120 bp, Artificial Sequence
  ENSG00000077232_34 (sequence is synthesized)
atttgtcagtaacatgtagttgtttagttataattcagagtgtacagaatggtaaaaattccaatcagtcaaaagaggtcaatgaattaaaaggcttgcaactttttcaaaaacctgtta

SEQ ID NO: 71129 - DNA, 120 bp, Artificial Sequence
  ENSG00000077232_35 (sequence is synthesized)
gaatatgctttattgtgttttgaggagttttcctttttttcttttcaatatcactttatcctgctcaccagtatttcctcataagggttattatagccataattaatgttaaaatagact

SEQ ID NO: 71130 - DNA, 120 bp, Artificial Sequence
  ENSG00000077232_36 (sequence is synthesized)
ttgttcttcatattctcccatctttttcgctactatatactctgtctggattctgctgtatgcctgttggcatatatggaacagtcaccacttgtcacacttaacaccagctttttgaat

SEQ ID NO: 71131 - DNA, 120 bp, Artificial Sequence
  ENSG00000077232_37 (sequence is synthesized)
tatgatcagtaatggcaagagcctttcattctcgaatgtttaaagcctaggagttctacaaaattggcttctttctacaagaatcccaaaatggaatgcctaaagaagtcttacttgggt

SEQ ID NO: 71132 - DNA, 120 bp, Artificial Sequence
  ENSG00000077232_38 (sequence is synthesized)
aaatacttactaaaatatactggttatgtgcatatcaccacactggacactgaggagtgttcaaaaggaatctaagacatggtccccatcttccaactgtctgtaattcactgttttgtc

SEQ ID NO: 71133 - DNA, 120 bp, Artificial Sequence
  ENSG00000077232_39 (sequence is synthesized)
attgagctcataaggtacttacattactacctataaatgtttcctgtacttgttagttgttgagaaacattttaggcagtaaataaaatagtaaatattatgtgtcctataatttgacct

SEQ ID NO: 71134 - DNA, 120 bp, Artificial Sequence
  ENSG00000077232_40 (sequence is synthesized)
aagctgtgtgcctttggaatcagctctaagccagggccccctgggagtcatgttaagaaacacgtatcataaagtgacatacatcaaggttatcttatatagtcataacagtattattgg

SEQ ID NO: 71135 - DNA, 120 bp, Artificial Sequence
  ENSG00000077232_41 (sequence is synthesized)
gtctttcaaaaacagctggcagattgagcttttaatggctatattgatacagtagatagagcacctctaaggagtaccaggtataatgtgccatttctctcagcaacaccatttttgtgt

SEQ ID NO: 71136 - DNA, 120 bp, Artificial Sequence
  ENSG00000077232_42 (sequence is synthesized)
gcagctgaccctctaacatggtatcaattctagctgaccaaagcacattctatcaggcagccaggcttggaaattaggtccatttaaagtatgtggcttacagtcaggtatggtggtgtg

SEQ ID NO: 71137 - DNA, 120 bp, Artificial Sequence
  ENSG00000077232_43 (sequence is synthesized)
gtggcttacagtcaggtatggtggtgtgcgcctattgtcccatctacttgagaggctgaggcaggagggattgcttgggctcaggattttgaatccagcctgggcaacatagcaagaccc

SEQ ID NO: 71138 - DNA, 120 bp, Artificial Sequence
  ENSG00000077232_44 (sequence is synthesized)
gcattaatgatgtttgtctattctgatttctcaaattttatttaggtctttcatagcttttttatttaaaggtatatgattaagataaaggaaaagtaaaatgaaatgtttatgtaattt

SEQ ID NO: 71139 - DNA, 120 bp, Artificial Sequence
  ENSG00000077232_45 (sequence is synthesized)
tatattctcaaaattttctttaaatttgctctgttttctgacagtgctcaaagtgggaatttttttagaagtacggttatcaaaaaaacacatttcctatgggacacacatttcaaagat

SEQ ID NO: 71140 - DNA, 120 bp, Artificial Sequence
  ENSG00000077232_46 (sequence is synthesized)
gtttagtacgataaaatttttagtaaaagggtagcacttttaagtcatttgaatagaatatttgtgtaatatttagtctagtgttagtccttaaatctgccaacaaaaccagatagatgt

SEQ ID NO: 71141 - DNA, 120 bp, Artificial Sequence
  ENSG00000077232_47 (sequence is synthesized)
cttaaagtaggcacatttattccattgtgactgttaagaaataataaaagattaaattaacaaaatgcattttaaatttttatgatacctatagaaaattgataatgaagatgaaaagta

SEQ ID NO: 71142 - DNA, 120 bp, Artificial Sequence
  ENSG00000077232_48 (sequence is synthesized)
aataacctttctgataatattctactttacacatatactgaaaacttacttacatatacccaaattcttctagtgaagaagtttgtaatatggtttgagtatttgtcccctccaaatctc

SEQ ID NO: 71143 - DNA, 120 bp, Artificial Sequence
  ENSG00000077232_49 (sequence is synthesized)
atgttgaaatatgatccccagtgttggatatggggcctggtgggaggtgtttgggtgatgggggctgatccctcataaatggctttgtgccttccccagtggtaatgagttcctgctgtg

SEQ ID NO: 71144 - DNA, 120 bp, Artificial Sequence
  ENSG00000077232_50 (sequence is synthesized)
tttattcctgcaagagctggttgttaaaaggaacttggcaccaccacctcctctctttctcgctccttctctgtgtgacatgccttctccccccgtgccttctgccatgagtaaaagctc

SEQ ID NO: 71145 - DNA, 120 bp, Artificial Sequence
  ENSG00000077232_51 (sequence is synthesized)
cctgagacctcaccagaagctgagcagatgctggtgccatgtttttacagcctgcagaactgcaagtcaaataaacgttttctttataaggtaaccagtcccaggtattccttcattgca

SEQ ID NO: 71146 - DNA, 120 bp, Artificial Sequence
  ENSG00000077232_52 (sequence is synthesized)
atgcaaaacagactaatacagtttcttttcagtaagaattacaaaatttaggccaatgaccaagctgagtataaattactaatcatacacaaaaatgtgtttcactggcttgagtcattt

SEQ ID NO: 71147 - DNA, 120 bp, Artificial Sequence
  ENSG00000077232_53 (sequence is synthesized)
ttctgtttaacactgaatttacacttagattcttgtactgtcactgagtccccttgtaaacagctaggtatattttgtgaatggaaactagccaaaaatacagccaaagtctcaacgcca

SEQ ID NO: 71148 - DNA, 120 bp, Artificial Sequence
  ENSG00000077232_54 (sequence is synthesized)
aactggtctacatcagtatggactccagaaatgcatctttcaaccacttgattgcattaagtagtcatttgagtgcatcacctagtggcctttggtcctgaaagttagcaatcatcccca

SEQ ID NO: 71149 - DNA, 120 bp, Artificial Sequence
  ENSG00000077232_55 (sequence is synthesized)
caatcatccccaaaaaggtctgtgttaataactgatagacaatcttcattaagcaactgctgttttttttttttaatacttcaagttctgcaatacatgtgcagaacatgcaggtttgtt

SEQ ID NO: 71150 - DNA, 86 bp, Artificial Sequence
  ENSG00000077232_56 (sequence is synthesized)
gcacccatcaacctgtcatctacattagctatttcttctaatgttgtccttccccttgccccctaccccgccgacaggccccattg

SEQ ID NO: 71151 - DNA, 77 bp, Artificial Sequence
  ENSG00000077232_57 (sequence is synthesized)
ttgttcaactcccacttacgagtgaaataatggtttccggcttcatccctgtccctgcaaaggacatgaacgcatcc

SEQ ID NO: 71152 - DNA, 72 bp, Artificial Sequence
  ENSG00000077232_58 (sequence is synthesized)
ttccatggtgtgtttgtgcccggtttcctattgtgaatagtgctccaataaacatacgtgtgcatgtgtctt

SEQ ID NO: 71153 - DNA, 89 bp, Artificial Sequence
  ENSG00000077232_59 (sequence is synthesized)
tcactctgatcattagatcccatttatctgttttggcttttattgccattgcttttggtgttctagtcatgaagtctttgcccatgcct

SEQ ID NO: 71154 - DNA, 87 bp, Artificial Sequence
  ENSG00000077232_60 (sequence is synthesized)
aatggtgttgcctaggttttcttctaggttttttatggtttcagaccttacatttaagtctttaatctatcaaccagtttcagtttt

SEQ ID NO: 71155 - DNA, 87 bp, Artificial Sequence
  ENSG00000077232_61 (sequence is synthesized)
accttacatttaagtctttaatctatcaaccagtttcagttttctacatgtggctagcctgttttcccaacatcatttattaaatag

SEQ ID NO: 71156 - DNA, 76 bp, Artificial Sequence
  ENSG00000077232_62 (sequence is synthesized)
ttttttgtcataactgctatttcaaatgtttggaggaagtaaaatgtctttaaaagaataagtgttgatttttgga

SEQ ID NO: 71157 - DNA, 120 bp, Artificial Sequence
  ENSG00000077232_63 (sequence is synthesized)
aagtaaaatgtctttaaaagaataagtgttgatttttggaaaatatgaaattggaaacttagaaaacttgaattctaagtggctatttatattaccaagcggtaaaacattagctaacta

SEQ ID NO: 71158 - DNA, 120 bp, Artificial Sequence
  ENSG00000077232_64 (sequence is synthesized)
aaacatggttctgaagccagttaactagcaaaaagtcccacctatgcattgaaatatctttctcaagtcattagataaagtatatggcgttaaggcaaaaaatacatatacacacacaaa

SEQ ID NO: 71159 - DNA, 120 bp, Artificial Sequence
  ENSG00000077232_65 (sequence is synthesized)
aaaaatatttcagcagccactgccaactgaaagtaataaaatgaaacaatttgttggctttaatgtatttaggaaaaatcatttatttacaaaacatcttccctttcttatcatgaaaat

SEQ ID NO: 71160 - DNA, 120 bp, Artificial Sequence
  ENSG00000077232_66 (sequence is synthesized)
tatgaagatgaggtaaagtctgttccatttttcctctatttttgagaaatcttagatttatctttaccagtctgtaacccagctttcttgttttatattttaaatatactttctattttg

SEQ ID NO: 71161 - DNA, 120 bp, Artificial Sequence
  ENSG00000077232_67 (sequence is synthesized)
tgacaggagtgaaaaaatgtttaatgattttaaacatgtttatatatatttttcagacttggaacagcagtatctcatgttttactataaaaacttgggtatattacttgaagatcaact

SEQ ID NO: 71162 - DNA, 120 bp, Artificial Sequence
  ENSG00000077232_68 (sequence is synthesized)
atattgttatttttagtatgttagcaattcatctgtcaataatcaccaaagaactcaagaatgaataacatgatctatcaaaaggcctataatctcaatcttcatgttaagactttggaa

SEQ ID NO: 71163 - DNA, 120 bp, Artificial Sequence
  ENSG00000077232_69 (sequence is synthesized)
ttaattaactaatataaattaatcctatcaagttaatttgtaataaattcaagatgcaaaaagaaaacctatttcactaccgaaattaaataaactttaaaattcattttgttggctggg

SEQ ID NO: 71164 - DNA, 83 bp, Artificial Sequence
  ENSG00000077232_70 (sequence is synthesized)
ctatttcactaccgaaattaaataaactttaaaattcattttgttggctgggtgcagtatggaaggatcacttaaggccagga

SEQ ID NO: 71165 - DNA, 120 bp, Artificial Sequence
  ENSG00000077232_71 (sequence is synthesized)
aaaaatacaaaaactagctgggcatggaggtgtgtgcctgtaatcatctaccctggaggctgagacaggagaattgcatgaacccggaggcaaaggttgcagtgagcagagatcacacca

SEQ ID NO: 71166 - DNA, 120 bp, Artificial Sequence
  ENSG00000077232_72 (sequence is synthesized)
tccccacacaaacacacacagccatattgtcatctctgaagacagcagccacatgtgtcttattccctgcagtgttggcagaacctagcacattgttgacccgtagaagcacagtgtgta

SEQ ID NO: 71167 - DNA, 120 bp, Artificial Sequence
  ENSG00000077232_73 (sequence is synthesized)
tttcaattgacaaacagccagaagtattatactgttgactgtgtttaaaactaatttgccagagctctactgtgataagaatttctgactagaaattataaattcattgttttatgcctt

SEQ ID NO: 71168 - DNA, 120 bp, Artificial Sequence
  ENSG00000077232_74 (sequence is synthesized)
aaaaattataaataatgataagtttaatttgcagcccttatagcttagaggcattgtagttgatattatagtaacccttttagatgttagtaacttttattgtaaaatttaaggtagctc

SEQ ID NO: 71169 - DNA, 120 bp, Artificial Sequence
  ENSG00000077232_75 (sequence is synthesized)
tacctgctaaagtagcacctattcttttgaaaggaactttctcaaaggatttttagggcttcataatttcttgttgctctgtgtaaatccctctgataggcttccctgaaggattttaag

SEQ ID NO: 71170 - DNA, 120 bp, Artificial Sequence
  ENSG00000077232_76 (sequence is synthesized)
cagaaataacatcaggtaccagtagatggcagtgaaaaataagcagacacatttttctgataaaatgccatttctacctcagtacttgataagaatcacacagtctagctggcctttgtg

SEQ ID NO: 71171 - DNA, 120 bp, Artificial Sequence
  ENSG00000077232_77 (sequence is synthesized)
ttttcactaaaaatatcctgaattatcagtcagttatgtttgactatgagaaattgcagaaaagttaaaagtatttcgcatccaaaagtttgtaatctagtgtaataaataggacagata

SEQ ID NO: 71172 - DNA, 120 bp, Artificial Sequence
  ENSG00000077232_78 (sequence is synthesized)
ctcaaagtgtatgaatggtatgacaataaatttagaaaatcatacaggcacacacactgctatagacatgtaaagatacatacatgtattggagctcagcagattcccattcatgaagaa

SEQ ID NO: 71173 - DNA, 120 bp, Artificial Sequence
  ENSG00000077232_79 (sequence is synthesized)
tggtgcctgtgtaacagtataaatggatcacttctaataaataaaacataaaattggactaatagcttaatttttttttttaattcaaaaatctcagggttttctggggcttttagtact

SEQ ID NO: 71174 - DNA, 120 bp, Artificial Sequence
  ENSG00000077232_80 (sequence is synthesized)
cctttgtgaaataagacacatagtcttcaggtaaaaagaaagagctcttggtcacagaaatgggtgtactgaattctcgccctgtagtcaagtacttactatgagtttggaaaaattgct

SEQ ID NO: 71175 - DNA, 120 bp, Artificial Sequence
  ENSG00000077232_81 (sequence is synthesized)
tacttcatatctgtatcctaattatcctaattaactcgtttgttaagtggaaaaaatatttcagtaggtagtcatataaataagatgaggtaatgtgtttagaaaaacaaatcaatgtgc

SEQ ID NO: 71176 - DNA, 120 bp, Artificial Sequence
  ENSG00000077232_82 (sequence is synthesized)
aggcaagaatcgggaatgtgggaaattttgtaggacaaatggtatgatttctttaatgaaaaagacagagaaaggtatcgtatagcttaaaaggaaaaagaaaaagaggcttttcagtca

SEQ ID NO: 71177 - DNA, 120 bp, Artificial Sequence
  ENSG00000077232_83 (sequence is synthesized)
tgagccaaatgcagtatgtgggctatatttgcatcttgatttgaacagactattgtatacatttatatatacatagatctatagagacagtaggatatatttcatatatatatgaaacag

SEQ ID NO: 71178 - DNA, 120 bp, Artificial Sequence
  ENSG00000077232_84 (sequence is synthesized)
ttggggaaatcagaatatttgaatttgatattaactaagaattgtttgcaggggatgttgttgcatattctaatgactttttttaataatgaaaatgtttggcatttgctttaaaataat

SEQ ID NO: 71179 - DNA, 120 bp, Artificial Sequence
  ENSG00000077232_85 (sequence is synthesized)
ccagtaaccaggatctgagagaaaccaaaaaaaagtggggagataataatccagggactttgggtagttgttaaatggatggctgtatcataagtattgaagctgataagggatagatat

SEQ ID NO: 71180 - DNA, 120 bp, Artificial Sequence
  ENSG00000077232_86 (sequence is synthesized)
gggttgattatatatttgttttgctggaaaatgttccatgatacagttttaataacagttttaatttcagaaacgcaaaatattgtttttacaactaagataacattgaaatttatacag

SEQ ID NO: 71181 - DNA, 120 bp, Artificial Sequence
  ENSG00000077232_87 (sequence is synthesized)
aaccccaaatgacaagtgtataatcaactgccaggaaatcagtttacctgttagaggtagaaaagttacaggataaaaatggaattggttggcactaagtaggaccactttcgaagagaa

SEQ ID NO: 71182 - DNA, 120 bp, Artificial Sequence
  ENSG00000077232_88 (sequence is synthesized)
tgggtagaattcattttcttttcattacttcctttcagcgtggagcctgagcatcatttcaccattttgagcctcaagctctcaatatactggaaaattgtaatcctgttcccttcactg

SEQ ID NO: 71183 - DNA, 120 bp, Artificial Sequence
  ENSG00000077232_89 (sequence is synthesized)
aggtcataatactgaattctgaaatggaaataattgactagagattgtctagtcaaactagactgatgaggtctcaccattttcttcaaggaagatcaactgaacctgcctgaaggcaca

SEQ ID NO: 71184 - DNA, 120 bp, Artificial Sequence
  ENSG00000077232_90 (sequence is synthesized)
gggtacaccatcttcctaaggtgtgacctcctgttcccaaaggaatagacctaggtgaccaaccagcagcacctagcttttgccagctacgcagctttgaatagccttccacccttgtgt

SEQ ID NO: 71185 - DNA, 120 bp, Artificial Sequence
  ENSG00000077232_91 (sequence is synthesized)
ccttcaaaccccattcttgccaaagccaagttctctccctccctctcaacagatttctcagcacacatcagatttcacaccgatctatgaaaaactatttttagagattattactatggt

SEQ ID NO: 71186 - DNA, 120 bp, Artificial Sequence
  ENSG00000077232_92 (sequence is synthesized)
ccgaatgtttatatcccctcctgctctccctaaaattatgttgaaatcctaacccccaaggtaatggtattaggaatgtgaggcctttgggaagggtttaagtcatgagggcagagacct

SEQ ID NO: 71187 - DNA, 120 bp, Artificial Sequence
  ENSG00000077232_93 (sequence is synthesized)
cctttttgagattggtacacttataaaagagaccccagtatcttgctcgtcccttctgccatgggagaacacggtgagagcgagccatctgtaaaccaacaaacaaggccctcaccaggc

SEQ ID NO: 71188 - DNA, 120 bp, Artificial Sequence
  ENSG00000077232_94 (sequence is synthesized)
actcaatctgccagcactttgatagtggacttcccagcctccagaactatgagaaataaatgtgtttttttaagccagccagttcattttgttatagcagcctggacagacaatatattg

SEQ ID NO: 71189 - DNA, 120 bp, Artificial Sequence
  ENSG00000077232_95 (sequence is synthesized)
aaaaaaatcagttttgcagttccactggtcaggtgaatgccagaggagctggtccacagtcataggcgttaaacttcttttggaaactatactggcttgacagtctccccatactgattc

SEQ ID NO: 71190 - DNA, 120 bp, Artificial Sequence
  ENSG00000077232_96 (sequence is synthesized)
agactccagcaaggtgcacatcacccgctagtcattgtggcttctgctgctttaaggttctggaattatggaagaaaatagggtgggcctactgtctcttcccactgtttacctggtgtt

SEQ ID NO: 71191 - DNA, 120 bp, Artificial Sequence
  ENSG00000077232_97 (sequence is synthesized)
ttgattctgaatagtttataagctctgctattcaagaagtttatacaaacccgtaatgtactaccaaaccgttcattcattatgacaaaactgcctaccaaagccacagactttaagtct

SEQ ID NO: 71192 - DNA, 120 bp, Artificial Sequence
  ENSG00000077232_98 (sequence is synthesized)
ttgcaggattaccactgaaagttcacatgcttggttagcagtcttaacctctaaccaactgaacaaatcgaagacatttaatttagtcaaaataggcatgggaatgaaagtgagacttag

SEQ ID NO: 71193 - DNA, 120 bp, Artificial Sequence
  ENSG00000077232_99 (sequence is synthesized)
aggccaggtgcggtggctcacacctgtaactccagcactttggaaggcccaggcagaaggattcctgcagaccaggatttcaagaccagcctggacaacctggtgaaacctcctctctac

SEQ ID NO: 71194 - DNA, 84 bp, Artificial Sequence
  ENSG00000077232_100 (sequence is synthesized)
agaccaggatttcaagaccagcctggacaacctggtgaaacctcctctctacaagaaaattcaaaaattagccaggcgtggtag

SEQ ID NO: 71195 - DNA, 120 bp, Artificial Sequence
  ENSG00000077232_101 (sequence is synthesized)
gagccgtgatcacaccactgcactccagactgggaggcagaggaagaccccgtctcaaaaaacaaaaggtaaagaatgattttaggaattaggtgtctctaaattgaagtaatgctcaca

SEQ ID NO: 71196 - DNA, 120 bp, Artificial Sequence
  ENSG00000077232_102 (sequence is synthesized)
tagaaaaattaaggcatattattttactgtactctcagaaagatgtttaacaaatacttgaagagccactatttaagataaatgagagtcctttccaatttgagcctcgcagagtggttc

SEQ ID NO: 71197 - DNA, 120 bp, Artificial Sequence
  ENSG00000077232_103 (sequence is synthesized)
ctacagagaagggtggcaagaagggctgttctgccatcaatgaggtggtgacccgagaatatgccatcagcgtccacaagcccatccatggagtgggattcaagaagcatacccctcaga

SEQ ID NO: 71198 - DNA, 120 bp, Artificial Sequence
  ENSG00000077232_104 (sequence is synthesized)
gcactcaaagagatccggaagtgtgccacaaaggaaatgcgcgttgataccagcctctacaaagctgtcggggccaggcgaataaaggatgtcccatgtcttatccataagcagtagtcc

SEQ ID NO: 71199 - DNA, 120 bp, Artificial Sequence
  ENSG00000077232_105 (sequence is synthesized)
agaaaacatagcgaggatgaaaattcaccaaacgagctcttatactttggttacctatgtacctgttaccacttgcagaaatcaacagacaaggtggatgagaactgtaaatcatcaaat

SEQ ID NO: 71200 - DNA, 120 bp, Artificial Sequence
  ENSG00000077232_106 (sequence is synthesized)
aagttataaaaccaccaaaaaataggagaaaatgggagtaaaaacaaaatgtataaaaagtattaaaatttgaaaaatatcttggaaataaggatggacagtttaagtacttatctcaaa

SEQ ID NO: 71201 - DNA, 120 bp, Artificial Sequence
  ENSG00000077232_107 (sequence is synthesized)
aggaaaaatgttagcaattggttgtagcaatacgtccgtctgtaagtgatggtcatatttgtgttcttttgtcccagagaacaaaaggaagtgagcttatcccacagcacaagtaacgtc

SEQ ID NO: 71202 - DNA, 120 bp, Artificial Sequence
  ENSG00000077232_108 (sequence is synthesized)
tatttatctcagaggaaatccagggaagttcctacttgggaaaacggaaaggtagactattcagaagttttctaaaatggacttcaagctctatgactttatgatcacttagtatgtcta

SEQ ID NO: 71203 - DNA, 120 bp, Artificial Sequence
  ENSG00000077232_109 (sequence is synthesized)
cggattttttggggaagagagatttcacgttaaaggtcattttgtgtcttctttaaaactcttgattccttttagagttttttaaattgtgataaagtacatgtaacaaaatttattaat

SEQ ID NO: 71204 - DNA, 120 bp, Artificial Sequence
  ENSG00000077232_110 (sequence is synthesized)
cattttaaagtagcatacagttcagtagtgttaagtaatttcacattgttcaacccatctccgtgactttatcttgcaaaactgaaattttatatccataaagcaaaacctttttattta

SEQ ID NO: 71205 - DNA, 120 bp, Artificial Sequence
  ENSG00000077232_111 (sequence is synthesized)
ccaatgctgctagaccctgacaaccaccaccctactttctatcaatatgactaccatagatatttaatgtaagtgaaatcatacaccatttatctttttgtgattccttattttacttag

SEQ ID NO: 71206 - DNA, 120 bp, Artificial Sequence
  ENSG00000077232_112 (sequence is synthesized)
tccttattttacttagcgtaagtcctcgagactcacccatgttgtagcatgtgtcataattttcttgttttgagacggagtcttactctgtccccctggctggagtgcagtggtgtgatc

SEQ ID NO: 71207 - DNA, 70 bp, Artificial Sequence
  ENSG00000077232_113 (sequence is synthesized)
gctggctaatttttgtatgtttaacggagacaaggttttagtgtgttggccaggctggtctcgaactctt

SEQ ID NO: 71208 - DNA, 120 bp, Artificial Sequence
  ENSG00000077232_114 (sequence is synthesized)
ataatattcaattatatatacattctacattttgttattcgtccgttgataggctgccttcaccctttggccattgcaaataatgctgctataaacatgggtgtacaaatatcagaaacc

SEQ ID NO: 71209 - DNA, 120 bp, Artificial Sequence
  ENSG00000077232_115 (sequence is synthesized)
ctgctttcagttctttcagctatatacctagaagtgtaagtctatatcatagtaattctatttttaatatggggggacctccatactgtttttcatagcagctgcaccattttacattcc

SEQ ID NO: 71210 - DNA, 120 bp, Artificial Sequence
  ENSG00000077232_116 (sequence is synthesized)
caccaatagtgcacaagagttctgatttttccacatcctcaccaacactcattttttttaaatagtaggtatcccaatgagtgtgcgttcatatcccattggagttttgatttgtacttt

SEQ ID NO: 71211 - DNA, 120 bp, Artificial Sequence
  ENSG00000077232_117 (sequence is synthesized)
tagagtctttaaattattactttttccatatcaaagtactttgtgggaagttggttattttacattctcataccatgctttgtattactttcccatttggatgcccttttcatccttcac

SEQ ID NO: 71212 - DNA, 120 bp, Artificial Sequence
  ENSG00000077232_118 (sequence is synthesized)
ctcatcctgtaaacccaaaatctaacttaaatcccaaatccaacttccactgtaaagcctttgctgacttctttacttcacattgatttctgaatttctaaaagttcctcattgtctacc

SEQ ID NO: 71213 - DNA, 120 bp, Artificial Sequence
  ENSG00000077232_119 (sequence is synthesized)
acaaaactaagtatttgtttataagaaaaagctttatttagtcctatattattctctgattattccatatgttatcttccaaactagattgttaggtcttcaagagcagaagaaatttat

SEQ ID NO: 71214 - DNA, 120 bp, Artificial Sequence
  ENSG00000077232_120 (sequence is synthesized)
tttatacttataaacttcaagatttgctgaagtactttgggtgctaaatgcttctagcttattcgtttagtttacatgactttctgcatgtgaaacttgagaaaactgcaaatctaatac

SEQ ID NO: 71215 - DNA, 120 bp, Artificial Sequence
  ENSG00000077232_121 (sequence is synthesized)
cttggtcttacagaactgaacaatacttaaatgtgtttaaacctgctatataaaatgtcagatgtaaaagcgaatatctaatgaagcaccttttcccttttctaaaattcaatagtaagg

SEQ ID NO: 71216 - DNA, 84 bp, Artificial Sequence
  ENSG00000077232_122 (sequence is synthesized)
atgaagcaccttttcccttttctaaaattcaatagtaagggccaggcacagtggctcacacctgaccttgaggttaagagttca

SEQ ID NO: 71217 - DNA, 120 bp, Artificial Sequence
  ENSG00000077232_123 (sequence is synthesized)
ctctatctcaaaaaaaaaaaaaaaaattacaatagtaataattatgccttctaacactaaaatcaaataaccttacttatcagttacattgcctactaagctgacttattttctgacttt

SEQ ID NO: 71218 - DNA, 120 bp, Artificial Sequence
  ENSG00000077232_124 (sequence is synthesized)
tacattgcctactaagctgacttattttctgacttttcctttgctttattctcttatttcttccaagtaaccatattctcttttaccctcctgttcaactgtctatgctccttctctctt

SEQ ID NO: 71219 - DNA, 120 bp, Artificial Sequence
  ENSG00000077232_125 (sequence is synthesized)
tgttcactattttgatatttaaatgttatgacttattttcaagtaaatatttttttaatttcttcatttgggataaaatattcactacataaatttagtggataaatacccccacagaga

SEQ ID NO: 71220 - DNA, 120 bp, Artificial Sequence
  ENSG00000077232_126 (sequence is synthesized)
tcgaccctgcatgaaatgtgttccctcagaagtagggcaattcattcattatgagatcaagccataaaatttaaatccaagcagtaattctccaattaaagtaactctagagcttagttt

SEQ ID NO: 71221 - DNA, 120 bp, Artificial Sequence
  ENSG00000077232_127 (sequence is synthesized)
tcagtcctcctgaatcataactagttggcaacaaaaactagtatgccttggtgtgaataaaccttaacatagaaactcacccagcctcaaaagttaaaaattaagagagatatgtattca

SEQ ID NO: 71222 - DNA, 120 bp, Artificial Sequence
  ENSG00000077232_128 (sequence is synthesized)
ggtggccatttatacacaatatttttgaatactattctggccaaattagtataaaatgggttactctaaaatgaaattttaaaagtatataaacatcttaaactttaaaacttcagccca

SEQ ID NO: 71223 - DNA, 120 bp, Artificial Sequence
  ENSG00000077232_129 (sequence is synthesized)
gctagaagtcaacgtgtgtttctgaaactatgctggggaaagtagctctgtccataatgattatatagttgttagcaaaatattggtcaaaactttttcagtttaatgagtttcaagata

SEQ ID NO: 71224 - DNA, 120 bp, Artificial Sequence
  ENSG00000077232_130 (sequence is synthesized)
ttcttcaaactggcctctgtgaactctttcttgacaagtgaaacctggctccaacaatgactactttattctacctctcatttattttctgtttaataaatccagtatttgggcatacaa

SEQ ID NO: 71225 - DNA, 120 bp, Artificial Sequence
  ENSG00000077232_131 (sequence is synthesized)
actgtatacaacattttataacactctaatgtggataagacacctcaaaaacaggagtttagtcatttcagtcacatgtttctaatacatgataagatttgcagttatcgtttaattaat

SEQ ID NO: 71226 - DNA, 120 bp, Artificial Sequence
  ENSG00000077232_132 (sequence is synthesized)
tgcaatatggaaatagatactaaaaaatctaaattgcatcttacatttcaacaatggatgtttaaagcgtttaaaagttatgttttgcattttacaacatattgaagatacacattttaa

SEQ ID NO: 71227 - DNA, 120 bp, Artificial Sequence
  ENSG00000077232_133 (sequence is synthesized)
atttaactctaaacaatgcaataatctagagaatcagagaattggatcctgaaacaccttataagttcagtcctgttgattagtatgtttccctgtcctagagtgcatgaactttcaaag

SEQ ID NO: 71228 - DNA, 120 bp, Artificial Sequence
  ENSG00000077232_134 (sequence is synthesized)
ccaggacacaatcttgttcacttttcatgccatcatcttgacactcaatacatgttcaaagagtaaattaaagaaaaaagagatgctcaagtcaatttataagtaatcctcacaaatgct

SEQ ID NO: 71229 - DNA, 120 bp, Artificial Sequence
  ENSG00000077232_135 (sequence is synthesized)
tgcataccatcagtgaacaattatttttttatctccatgctataatcttgcacaagtttcattagaattaaatgcactatctgaagtctatgtttattaaatgaggattacagtagttgg

SEQ ID NO: 71230 - DNA, 120 bp, Artificial Sequence
  ENSG00000077232_136 (sequence is synthesized)
ttatctttgtgaggggttttgagggttgtggaacaggataacattttgaggtacaaaaaataatgaagaggatatattccaatttctttccttccccaaggcttttcattacagctgtta

SEQ ID NO: 71231 - DNA, 120 bp, Artificial Sequence
  ENSG00000077232_137 (sequence is synthesized)
taaaccctggtagaattgattggtttccttttcagcttcctgttttgtccctcaatgttcacaaaagtcccatctgataaatgtattgtttaacctctcattgtttgaaagaacacctct

SEQ ID NO: 71232 - DNA, 120 bp, Artificial Sequence
  ENSG00000077232_138 (sequence is synthesized)
ttgctccccacagattacagacctattggcttaagcagtccatctaaatgcatgccagtttctttcttgataaattagaggcctataacctcaaaccagtttatctgcaagagaagtgtg

SEQ ID NO: 71233 - DNA, 120 bp, Artificial Sequence
  ENSG00000077232_139 (sequence is synthesized)
tgaagttagactcaattcttccgctaatggaacatcgtaatcctccttgtcatctttcctttggccttcctgaatagaaatcatttatgaggaagttacatgagctcaacatgagcccca

SEQ ID NO: 71234 - DNA, 120 bp, Artificial Sequence
  ENSG00000077232_140 (sequence is synthesized)
tgtcactcagcaaacatttatttgagtacttacaatgtgctaggctttgttctatgcatttaagatagtgtattaaatgtattgacctcatgaagattctattctcgcagtggggagata

SEQ ID NO: 71235 - DNA, 120 bp, Artificial Sequence
  ENSG00000077232_141 (sequence is synthesized)
gacaataaacaattaatataagcaaatgttaagtatgttagaagtatgttagaagatgtgctgtgaaataaagaaaaaggtagaccagggtatgagggattaggagtgtgggggcagcag

SEQ ID NO: 71236 - DNA, 120 bp, Artificial Sequence
  ENSG00000077232_142 (sequence is synthesized)
caggagagtttcggtattaaatagggtggacagggcaggtctcttggagaagatgccattgaaggaggtggaaaaaatgtagccactaaatgggctgagggtagagcatatgaacagaga

SEQ ID NO: 71237 - DNA, 120 bp, Artificial Sequence
  ENSG00000077232_143 (sequence is synthesized)
gaaaggccagaggacaggctccaaggcatgcttggcaggttcaaggaacagcagggaggctcatgtggctggaatggagtgagctagcaggagagaagatgaagttagagggagagagaa

SEQ ID NO: 71238 - DNA, 120 bp, Artificial Sequence
  ENSG00000077232_144 (sequence is synthesized)
agtggggagccagatcatagagggctttgcaggtcacttgtaaggactttagctttctaacttttgtaaggacttcaacttctactcacagtgaaattgtgaaattccagaaccaaaaag

SEQ ID NO: 71239 - DNA, 120 bp, Artificial Sequence
  ENSG00000077232_145 (sequence is synthesized)
aagatcctggtaaaagagaaactttcagcaaaatatatttaacattttatttgagtgaagaacaattcatccatcaggcagcactgagaaccagaagacattcagagagctctgctttgc

SEQ ID NO: 71240 - DNA, 120 bp, Artificial Sequence
  ENSG00000077232_146 (sequence is synthesized)
gaggtatgcagtgaacattcatagacagaaaacaaaaattaagtacagaaatagcttgattggttacagataggcatttgccttatttggacatggtctgctccaaataaggcaagttgg

SEQ ID NO: 71241 - DNA, 120 bp, Artificial Sequence
  ENSG00000077232_147 (sequence is synthesized)
cagcatgcaattggctgtgacctatctgttacaaaaatatatctatataatcctaaattaggtttcagtttatttaagtactaaattaggttgcaatttattacatgggaactcaaagtc

SEQ ID NO: 71242 - DNA, 120 bp, Artificial Sequence
  ENSG00000077232_148 (sequence is synthesized)
tttattacatgggaactcaaagtctggagacagcctcaggccaaggtcctcttgcttatttaatttagcaatcctaaaattttccagagaggaaacacatcacacacacacacacacaca

SEQ ID NO: 71243 - DNA, 120 bp, Artificial Sequence
  ENSG00000077232_149 (sequence is synthesized)
ctacctacaaaaaaataacaattagaaagtaattggagcttgaagtattctagaagactttggagcaaagccttccaaattctgagaggaaaatatttttaacctaggattctattcata

SEQ ID NO: 71244 - DNA, 120 bp, Artificial Sequence
  ENSG00000077232_150 (sequence is synthesized)
cctacccagactaacaagtagcaggcagatgataaatatatttttaggtggttaggtgatgaaacacctcctccaaatgaaggcataaacaacaatgcatggggatccaagaaacagtga

SEQ ID NO: 71245 - DNA, 120 bp, Artificial Sequence
  ENSG00000077232_151 (sequence is synthesized)
ctccaacccaagagagcagtgaacaaatccacaggacagcagctaagtaggaggcctaaacatcacctggggcagatggggcgagagagcagagagcttgggaaagaagtctctgaggag

SEQ ID NO: 71246 - DNA, 120 bp, Artificial Sequence
  ENSG00000077232_152 (sequence is synthesized)
aaagaatgaggcaataagtcagatgcgtatttgcggacctcagaaaaatttgagtacataggaaacaatagatgaaggatagaaataatccattcagattctctcctttgcatgatgacc

SEQ ID NO: 71247 - DNA, 120 bp, Artificial Sequence
  ENSG00000077232_153 (sequence is synthesized)
acattaaacttacagagtaagaaatgtcattctagatttgattctactgtttgtctttgcagtgagctatgtttttttataacatgtagaagtgaaataaacttgtcacaaaaatgcaaa

SEQ ID NO: 71248 - DNA, 120 bp, Artificial Sequence
  ENSG00000077232_154 (sequence is synthesized)
agagaatcagaccagcagagagagagagttatatgacaaaatatgctgaggataaaatattgacaaataaagaagatttgttagaagggccttttatactcgtttgtgttttaaataaga

SEQ ID NO: 71249 - DNA, 120 bp, Artificial Sequence
  ENSG00000077232_155 (sequence is synthesized)
gactcgggccgaaaacaagtttaagataagatcttttctcaactcattggatgctaaagaaatatatttggaagtaatacataatcttccagattttgaactactttcggcaaacacact

SEQ ID NO: 71250 - DNA, 120 bp, Artificial Sequence
  ENSG00000077232_156 (sequence is synthesized)
gccgccagggtttgaggatgggggagtagctacaggaagcgaccccgcgatggcaaggtatatttttgtggaatgaaaaggaagtattagaaatgagctgaagaccattcacagtgtata

SEQ ID NO: 71251 - DNA, 120 bp, Artificial Sequence
  ENSG00000077232_157 (sequence is synthesized)
tctaaaaactcctaagtggtttggtttttagatgaaaacctctataatgagcaaaagtccattccaattttccacttctaagttcctcttaattaatcttaattattggttggggaatga

SEQ ID NO: 71252 - DNA, 120 bp, Artificial Sequence
  ENSG00000077232_158 (sequence is synthesized)
agtgtctttgatagtctattattcttccttctagtgttataaaaattcttaagtgaatgtgtaaaacattggcattctgtaaaacatgattagcattaaaattaagctaaagataatgtg

SEQ ID NO: 71253 - DNA, 120 bp, Artificial Sequence
  ENSG00000077232_159 (sequence is synthesized)
gtttttcttgatgattgggaggtcactcaggatttttctgagcatttttatagaatacacatcatagttaattaaaaattccagttaatgcaacatcttataatggaatttattgtatat

SEQ ID NO: 71254 - DNA, 120 bp, Artificial Sequence
  ENSG00000077232_160 (sequence is synthesized)
cactatttaagaaacagcttagttatataatatttttgataattgccaaaatacactttttttgaaaaaagacatttggaattgtttgaaaaactatttaccttctataatcattttcct

SEQ ID NO: 71255 - DNA, 120 bp, Artificial Sequence
  ENSG00000077232_161 (sequence is synthesized)
taagtttggtacactagattgtacagttcatgagggactctgtaacatgtatatttgctggaaagaagttaaaacaatgaacaagccttttgaaatctttgtttaaatgaaattattttc

SEQ ID NO: 71256 - DNA, 120 bp, Artificial Sequence
  ENSG00000077232_162 (sequence is synthesized)
gcattggtgagggggcgcgggctgcttggccagggcagttccctcagctccgggttggagccggagccggagccggatcccgcgcacaccgccacgtcaacctaaacctacaccgccctc

SEQ ID NO: 71257 - DNA, 120 bp, Artificial Sequence
  ENSG00000077232_163 (sequence is synthesized)
ttcccttatttcttgaacatttaactcacctatttgtaatcttattttctgatgactgtattcatagctatgtgttttttcctgaataattagttacgttcaataaattttaacgtggta

SEQ ID NO: 71258 - DNA, 120 bp, Artificial Sequence
  ENSG00000077232_164 (sequence is synthesized)
caaaaataattatcaaatactttaaatgtctggtttaaaaatatatagcttggagtgtgttcaagggaagaaaagtggtcttatcagagaaatatgttttctttttctgtcatagtggag

SEQ ID NO: 71259 - DNA, 120 bp, Artificial Sequence
  ENSG00000077232_165 (sequence is synthesized)
tggaatggtaagggataaagttagcattttttaaatttgtgaaacattatgacaagttaaatagtagagaaaataacagtatgtagaatttgcagaacattttaagtcttgttttacaag

SEQ ID NO: 71260 - DNA, 120 bp, Artificial Sequence
  ENSG00000077232_166 (sequence is synthesized)
cagcttaagtttggtacactagattgtacagttcatgagggactctgtaacatggagagtaaaaagggaccattcgtataattacccatgccgatttctcaatgtttcaatgcctatggt

SEQ ID NO: 71261 - DNA, 120 bp, Artificial Sequence
  ENSG00000077235_0 (sequence is synthesized)
gggcgccgccgactgaagtagcaatggacgcgctggagtcgttgttggacgaagtcgctctggaggggctcgatggcctgtgtctgccagcgctgtggagccggctggagacgcgagtgc

SEQ ID NO: 71262 - DNA, 120 bp, Artificial Sequence
  ENSG00000077235_1 (sequence is synthesized)
cgcccttcccgctgcctttggaaccctgcacgcaggagtttctctggcgggccctcgccacgcacccgggcatcagcttctatgaggagcctcgggagcgacccgacctacagctccagg

SEQ ID NO: 71263 - DNA, 120 bp, Artificial Sequence
  ENSG00000077235_2 (sequence is synthesized)
accggtatgaagaaattgatttggaaactggaattttggagtctaggagggacccggtggctttggaggatgtctaccccattcatatgatcttagagaataaggatggcatccagggct

SEQ ID NO: 71264 - DNA, 120 bp, Artificial Sequence
  ENSG00000077235_3 (sequence is synthesized)
catgccgctactttaaggagaggaaaaacattaccaatgacatcagaaccaagtccttgcagcctcgctgtacaatggtggaagcctttgacaggtgggggaagaaactgatcatcgttg

SEQ ID NO: 71265 - DNA, 120 bp, Artificial Sequence
  ENSG00000077235_4 (sequence is synthesized)
cctcccaggccatgcggtacagggccttgataggccaggagggggatcccgacctgaagctgcccgacttctcctactgcatcctggaacggctaggccggtccaggtggcaaggggagc

SEQ ID NO: 71266 - DNA, 120 bp, Artificial Sequence
  ENSG00000077235_5 (sequence is synthesized)
tccagcgagaccttcacaccactgctttcaaggttgatgctgggaagctgcactatcacagaaaaattttgaacaaaaacgggctgattacaatgcagtcccatgtgatccgattaccca

SEQ ID NO: 71267 - DNA, 120 bp, Artificial Sequence
  ENSG00000077235_6 (sequence is synthesized)
ctggagcccagcaacactcaatcctcctcctactgaaccggtttcatgtggacaggaggagcaaatacgacatcctcatggagaagctttcggtcatgctgagcacacggactaaccaca

SEQ ID NO: 71268 - DNA, 120 bp, Artificial Sequence
  ENSG00000077235_7 (sequence is synthesized)
tagagacgctgggaaagctgagggaagagctggggctgtgcgaaaggacgtttaagcgtctgtaccagtatatgctgaacgccgggctagccaaggtggtgtctcttcgcttgcaagaga

SEQ ID NO: 71269 - DNA, 120 bp, Artificial Sequence
  ENSG00000077235_8 (sequence is synthesized)
tccaccctgaatgtggaccttgtaagacaaagaaagggaccgacgtcatggttcggtgcctcaagctgctgaaggaatttaaacggaatgaccatgatgatgacgaggacgaggaggtca

SEQ ID NO: 71270 - DNA, 120 bp, Artificial Sequence
  ENSG00000077235_9 (sequence is synthesized)
tctccaagacagtgcctccagtggacattgtgttcgagcgggatatgctcacacagacctacgacctcattgagcgcagaggcacgaaaggaatttcccaagctgaaatccgagtggcta

SEQ ID NO: 71271 - DNA, 120 bp, Artificial Sequence
  ENSG00000077235_10 (sequence is synthesized)
tgaatgtgggaaaactagaagcaagaatgctgtgccgacttcttcaaagattcaaagttgtcaagggattcatggaagacgaaggtcggcagcgaaccaccaagtacatttcctgcgtgt

SEQ ID NO: 71272 - DNA, 120 bp, Artificial Sequence
  ENSG00000077235_11 (sequence is synthesized)
ttgcagaggagagcgacctaagccggcagtaccaaagagagaaggcccgcagcgagctcttgaccaccgtgagcctggcgtctatgcaggaggagtcgcttctgcctgaaggcgaggaca

SEQ ID NO: 71273 - DNA, 120 bp, Artificial Sequence
  ENSG00000077235_12 (sequence is synthesized)
ccttcctctctgagtcggacagtgaggaggagaggagcagcagcaagcggagaggcagagggtcccagaaagacacaagagcctctgcaaacctccggcccaagacccagcctcatcact

SEQ ID NO: 71274 - DNA, 120 bp, Artificial Sequence
  ENSG00000077235_13 (sequence is synthesized)
ccaccccaaccaagggtgggtggaaagttgtaaacctacacccattgaaaaagcagccgccctccttcccaggagctgctgaagagagagcctgccagagccttgccagcagggacagcc

SEQ ID NO: 71275 - DNA, 120 bp, Artificial Sequence
  ENSG00000077235_14 (sequence is synthesized)
tcttagataccagcagcgtctcagaacccaacgtgtcctttgtctcccactgtgcggacagcaacagtggtgacatagctgtgatcgaggaggtccggatggaaaacccaaaggagagta

SEQ ID NO: 71276 - DNA, 120 bp, Artificial Sequence
  ENSG00000077235_15 (sequence is synthesized)
gcagttccctgaagactgggaggcacagctcaggccaagacaaaccacacgaaacttaccgactgctgaaacgcaggaatctgatcatagaagctgtcaccaatcttcgcttaatcgaga

SEQ ID NO: 71277 - DNA, 120 bp, Artificial Sequence
  ENSG00000077235_16 (sequence is synthesized)
gtttattcacgattcagaagatgatcatggatcaggagaagcaggaaggcgtgtccaccaagtgctgcaagaagtccattgtccgcttggtgcggaacctgtctgaggaaggtctcttgc

SEQ ID NO: 71278 - DNA, 120 bp, Artificial Sequence
  ENSG00000077235_17 (sequence is synthesized)
gattgtatcggaccactgtcattcaagatggcatcaagaagaaggtggatctggtggtgcacccgtccatggaccagaacgaccctctagtgagaagtgccatcgagcaggtccgcttcc

SEQ ID NO: 71279 - DNA, 120 bp, Artificial Sequence
  ENSG00000077235_18 (sequence is synthesized)
ggatctccaattcaagcacagccaacagggttaaaacttcccagcctccagtgccccaaggggaggcagaagaagacagtcaaggaaaagagggcccaagtggatcaggggactctcagc

SEQ ID NO: 71280 - DNA, 120 bp, Artificial Sequence
  ENSG00000077235_19 (sequence is synthesized)
tgagtgcttcctctagatcagaaagtggacggatgaaaaaaagtgataataaaatgggcataaccccgcttagaaattatcaccccattgtagttcccggactggggcgttctctaggat

SEQ ID NO: 71281 - DNA, 120 bp, Artificial Sequence
  ENSG00000077235_20 (sequence is synthesized)
ttctgcccaaaatgcctcgcctgcgggtggtccacatgtttctgtggtacctcatctacgggcaccctgccagcaacaccgtggagaagccaagcttcatcagtgaacggagaacgataa

SEQ ID NO: 71282 - DNA, 120 bp, Artificial Sequence
  ENSG00000077235_21 (sequence is synthesized)
agcaggagtcaggcagggcaggcgtccggccgtcctcctctggaagtgcctgggaggcctgctctgaagccccatctaaaggcagccaagatggtgtcacctgggaggctgaagtggagc

SEQ ID NO: 71283 - DNA, 120 bp, Artificial Sequence
  ENSG00000077235_22 (sequence is synthesized)
ttgccacggagacagtgtatgtcgacgatgcctcgtggatgcgctacatccccccaatcccagtccacagggacttcggctttggctgggctctcgtcagcgacatcctcctctgccttc

SEQ ID NO: 71284 - DNA, 120 bp, Artificial Sequence
  ENSG00000077235_23 (sequence is synthesized)
ccctctccatcttcatccagattgtgcaagtcagctacaaggtggacaacctggaggaatttctgaacgacccgctgaagaagcacacgctgatccgctttctccccaggcccattcggc

SEQ ID NO: 71285 - DNA, 120 bp, Artificial Sequence
  ENSG00000077235_24 (sequence is synthesized)
agcagcttctgtacaagaggcgttacattttttcggtggtggagaaccttcagaggctgtgctacatggggctgctacagtttggtcccacggaaaagtttcaggataaagatcaggtct

SEQ ID NO: 71286 - DNA, 120 bp, Artificial Sequence
  ENSG00000077235_25 (sequence is synthesized)
ttatcttcttgaagaagaatgcagtcattgttgacactaccatctgcgacccacattacaacctggcccgcagcagccggcccttcgagaggcgcctctatgtcctgaactcaatgcagg

SEQ ID NO: 71287 - DNA, 120 bp, Artificial Sequence
  ENSG00000077235_26 (sequence is synthesized)
atgtggaaaactactggtttgacctgcagtgcgtctgcctcaacaccccactaggcgtggtgcgctgcccgcgcgtcaggaagaacagcagcacagaccagggcagcgacgaggagggca

SEQ ID NO: 71288 - DNA, 120 bp, Artificial Sequence
  ENSG00000077235_27 (sequence is synthesized)
gcctgcagaaggagcaggagagcgccatggacaagcacaacctggagcgcaagtgcgccatgctggagtacaccactggaagccgtgaggtggtggatgaaggcttgatccctggagatg

SEQ ID NO: 71289 - DNA, 120 bp, Artificial Sequence
  ENSG00000077235_28 (sequence is synthesized)
ggctgggtgccgcagggctcgattccagcttctacggacacctcaagcgcaactggatctggaccagctacatcatcaaccaggccaaaaaggagaacactgccgcagagaatggactca

SEQ ID NO: 71290 - DNA, 120 bp, Artificial Sequence
  ENSG00000077235_29 (sequence is synthesized)
ccagacatttctgtccaagcgcccaatgcccctcagtgccagaggcaacagcaggttgaatatttggggggaagcaagagtaggctccgagctctgtgctggctgggaagagcagtttga

SEQ ID NO: 71291 - DNA, 120 bp, Artificial Sequence
  ENSG00000077235_30 (sequence is synthesized)
ggtggaccgagagccctcgctggaccgaaaccggagagtgaggggtgggaaaagccagaagcggaagcggctgaagaaggaccctgggaagaagatcaagagaaagaagaaaggagagtt

SEQ ID NO: 71292 - DNA, 120 bp, Artificial Sequence
  ENSG00000077235_31 (sequence is synthesized)
cccaggagaaaaaagcaaaaggctgcgctaccatgatgaagccgaccagagtgccctgcagcggatgacgcggcttcgtgtcacctggtctatgcaggaggatgggctgcttgtgctgtg

SEQ ID NO: 71293 - DNA, 120 bp, Artificial Sequence
  ENSG00000077235_32 (sequence is synthesized)
ccgcattgccagcaatgtcctcaacaccaaggtgaagggcccatttgtcacctggcaggtggtacgggacattttgcatgccacgtttgaagagtctttggataaaacatctcattccgt

SEQ ID NO: 71294 - DNA, 120 bp, Artificial Sequence
  ENSG00000077235_33 (sequence is synthesized)
tggacgaagagctcgctacatagtcaaaaacccacaggcctatctcaactataaagtgtgcctggccgaggtgtaccaggataaagcacttgttggagatttcatgaatcgaagaggtga

SEQ ID NO: 71295 - DNA, 120 bp, Artificial Sequence
  ENSG00000077235_34 (sequence is synthesized)
ctatgatgacccaaaggtttgtgccaacgagtttaaagaatttgtggagaagcttaaagaaaagttcagttcagccctaaggaattctaaccttgaaatcccagacacactccaggagct

SEQ ID NO: 71296 - DNA, 120 bp, Artificial Sequence
  ENSG00000077235_35 (sequence is synthesized)
gttcgccaggtaccgagttttggcaattggggatgaaaaagatcaaaccaggaaagaggatgaacttaacagcgtggatgacatccactttctggtgcttcagaacctgatccagagcac

SEQ ID NO: 71297 - DNA, 120 bp, Artificial Sequence
  ENSG00000077235_36 (sequence is synthesized)
gctggccctctcagacagtcagatgaagtcctaccagtcattccagactttccgcctctatcgggagtacaaggaccacgttcttgtgaaggccttcatggagtgccagaagaggagctt

SEQ ID NO: 71298 - DNA, 120 bp, Artificial Sequence
  ENSG00000077235_37 (sequence is synthesized)
ggtcaaccggcgccgggtcaaccacacgctgggccccaagaagaaccgggccctccccttcgtgccaatgtcctaccagctatcccagacctactacaggatttttacgtggcgatttcc

SEQ ID NO: 71299 - DNA, 120 bp, Artificial Sequence
  ENSG00000077235_38 (sequence is synthesized)
aagcaccatctgcacggagtcattccagtttttggacagaatgcgggctgccggcaagttggaccagcctgatcgtttctctttcaaagaccaggataataacgagcccacaaacgacat

SEQ ID NO: 71300 - DNA, 120 bp, Artificial Sequence
  ENSG00000077235_39 (sequence is synthesized)
ggtggccttttcactggacggccctggaggaaattgtgtggccgtcctgaccctcttctctctgggcctcatttctgtggatgtcaggatcccggagcagatcatcgtggtagacagctc

SEQ ID NO: 71301 - DNA, 120 bp, Artificial Sequence
  ENSG00000077235_40 (sequence is synthesized)
aatggtggagaatgaggtcatcaaaagcttggggaaggacggcagcctggaggatgacgaggatgaagaggatgacttggacgaaggtgtagggggcaagcgccggagcatggaggtgaa

SEQ ID NO: 71302 - DNA, 120 bp, Artificial Sequence
  ENSG00000077235_41 (sequence is synthesized)
acctgcgcaagcctcccacaccaactacctgctgatgaggggctactactcccccggcatcgtcagcacccgcaacctcaaccccaacgacagcattgtggtcaactcctgccagatgaa

SEQ ID NO: 71303 - DNA, 120 bp, Artificial Sequence
  ENSG00000077235_42 (sequence is synthesized)
gttccagctccgctgcacccctgtgcccgcccggctcaggcccgctgccgctcctctggaagagctaacaatgggaacctcctgcctccctgatacgttcaccaagctgataaaccccca

SEQ ID NO: 71304 - DNA, 120 bp, Artificial Sequence
  ENSG00000077235_43 (sequence is synthesized)
ggaaaacacctgcagcttggaggagtttgtcctccagctggagctgtctgggtatagtcccgaagacctgactgctgccttggagatcttggaagccattatagccacgggttgttttgg

SEQ ID NO: 71305 - DNA, 120 bp, Artificial Sequence
  ENSG00000077235_44 (sequence is synthesized)
gattgacaaggaggagctgcgcagacggttctcggccttggagaaggcaggtggtgggcgcaccaggacattcgcagattgcatccaggccctcctggagcagcatcaggtgctggaggt

SEQ ID NO: 71306 - DNA, 120 bp, Artificial Sequence
  ENSG00000077235_45 (sequence is synthesized)
cggtggcaacactgcgcgcctggtagccatgggctctgcctggccttggctcctgcactccgtgcggctgaaagacagagaagacgccgacatccagagagaagacccccaggccagacc

SEQ ID NO: 71307 - DNA, 120 bp, Artificial Sequence
  ENSG00000077235_46 (sequence is synthesized)
cctggaggggtcttccagtgaggacagcccccccgaggggcaggcacctccttctcacagcccccggggcaccaagaggcgcgccagctgggccagtgagaatggggagaccgacgccga

SEQ ID NO: 71308 - DNA, 120 bp, Artificial Sequence
  ENSG00000077235_47 (sequence is synthesized)
gggcacccagatgacccctgccaagaggccagcgctccaggactcaaatttggcccccagccttgggcccggagctgaagatggggcagaagcccaggccccatctccacccccagctct

SEQ ID NO: 71309 - DNA, 120 bp, Artificial Sequence
  ENSG00000077235_48 (sequence is synthesized)
tgaagacaccgctgcagcgggagcagcacaggaagaccaagagggtgtcggtgagttcagttccccaggccaagagcagctgagcggccaggcgcagcctccagagggctctgaagaccc

SEQ ID NO: 71310 - DNA, 120 bp, Artificial Sequence
  ENSG00000077235_49 (sequence is synthesized)
cagagggttcacagagagtttcggagctgccaacatctcccaggcagcacgggaaagggactgtgagagtgtctgcttcatcggccggccgtggcgtgtcgtggatggccacctgaacct

SEQ ID NO: 71311 - DNA, 120 bp, Artificial Sequence
  ENSG00000077235_50 (sequence is synthesized)
tcctgtatgcaagggtatgatggaggccatgctgtaccacatcatgaccaggcctggcatccccgagagctccctgctgcgccactaccagggggtcctgcagcccgtcgccgtgctgga

SEQ ID NO: 71312 - DNA, 120 bp, Artificial Sequence
  ENSG00000077235_51 (sequence is synthesized)
gttgctccagggcctggagtccctcggctgcatccggaagcgctggctgagaaagccaaggcctgtctcgctcttctctacacccgtggtggaagaggtggaagtgccctccagcctgga

SEQ ID NO: 71313 - DNA, 120 bp, Artificial Sequence
  ENSG00000077235_52 (sequence is synthesized)
cgagagccccatggctttctatgagcccaccttggactgtaccctccggctgggccgtgtgttcccccacgaggtcaactggaacaagtggatccacctctaggacccctgtgggcgtcc

SEQ ID NO: 71314 - DNA, 120 bp, Artificial Sequence
  ENSG00000077235_53 (sequence is synthesized)
cctccctcccagccaccgcctgccacaccactcctgcctggtgctcggcagaccccactgtgccctggccttgggtctgccgagcctcctgcagcaggggacgggtgctttggccagagt

SEQ ID NO: 71315 - DNA, 120 bp, Artificial Sequence
  ENSG00000077235_54 (sequence is synthesized)
cacagactgacacgtttcccactgtactggaactctggaaagaggggctccccgacctgcccatcccccaggctcttctgggccttccccttgggaactggcctcatcacactgggagtt

SEQ ID NO: 71316 - DNA, 120 bp, Artificial Sequence
  ENSG00000077235_55 (sequence is synthesized)
ggtgcttcttgtctctgggtctccagagtttgccccgcctgtgcacacctcacattccagactctagccatctcggcaggatctcctggctccttgagtgcccaggtgccaccaagagga

SEQ ID NO: 71317 - DNA, 120 bp, Artificial Sequence
  ENSG00000077235_56 (sequence is synthesized)
agggccttgtgggatacaccttgcagaatagggatcggtgtgccccgctgcgaggggccccccatgggggctgtggcccctccgcaggcaggacatcccaacccctggctgggactgaac

SEQ ID NO: 71318 - DNA, 120 bp, Artificial Sequence
  ENSG00000077235_57 (sequence is synthesized)
cacccagagcggagcggctcccttttcagccttgtgagtcacctggcaggccccagctgggctggctgtccgtgtccctcagcctggctggtgattccttgcaggccagaaatgaagagt

SEQ ID NO: 71319 - DNA, 120 bp, Artificial Sequence
  ENSG00000077235_58 (sequence is synthesized)
ccctgtaggttttggttttgtttgttttattttgttctttcaccttttttcctcattaaaaaaaaaaagtccctgtggagtgtacttatttattttttgattaaagggaagtaaaatgca

SEQ ID NO: 71320 - DNA, 120 bp, Artificial Sequence
  ENSG00000077235_59 (sequence is synthesized)
caaaggaagagggaaggccctgatcctaagctcggcagccccgcccagcctcagccagcagagccttcgttttgtcgtctgaaaactgggggaagagtatctccctcaagggagggccag

SEQ ID NO: 71321 - DNA, 120 bp, Artificial Sequence
  ENSG00000077235_60 (sequence is synthesized)
agccgtttctgggatggttccatgtggccctcgcagggcaagaagaaaaggccagccctgtctcccttatcagcaggtccgggaagcgcacagcacctgcctggctgcatttggccttgc

SEQ ID NO: 71322 - DNA, 120 bp, Artificial Sequence
  ENSG00000077235_61 (sequence is synthesized)
agtggccctcctgtctctcctctcatgggtgacttgaacacagaatgggacctagcaccctgccgggcatttatgttcattctcccattggtccttcaggcttccttgtttggttggtgt

SEQ ID NO: 71323 - DNA, 120 bp, Artificial Sequence
  ENSG00000077235_62 (sequence is synthesized)
actttttgctaggtttgcttactttacctttgaggaaattcctatgtaagtaacgtgcccaaggtcacagtgcttgtaagtaccagggccaggatttgaacataggagggtctgtaacca

SEQ ID NO: 71324 - DNA, 120 bp, Artificial Sequence
  ENSG00000077235_63 (sequence is synthesized)
ttctcggttacctatgaaggacggaagttcagagaagccaaggtgtaaagtgtgaacagacctgactgaggtcaggcttggctgaccccaaatccttcattcgtaaaagctgcagttgtg

SEQ ID NO: 71325 - DNA, 120 bp, Artificial Sequence
  ENSG00000077235_64 (sequence is synthesized)
caacaggcatataagtaactcatgcttcaaggtcggccaaggccagaaacatgagaatggagctctctgaaggttctgaacatgggcatcattgcaattcccagacttcagctttgtctc

SEQ ID NO: 71326 - DNA, 120 bp, Artificial Sequence
  ENSG00000077235_65 (sequence is synthesized)
agtggacaaggagaggctaccttttccgccaaggaggccacaggtttgtgccaacgagtttaaagaatttgtggagaagcttaaagaaaagttcagttcagccctaaggaattctaacct

SEQ ID NO: 71327 - DNA, 120 bp, Artificial Sequence
  ENSG00000077235_66 (sequence is synthesized)
acctactacaggtgagtacctgtcaggagccttgggtactccgaggtggagccacgccctgtctgtaaagaggagcaaaggaagcactgtggccatgaaagcgtgtaggagccagggacc

SEQ ID NO: 71328 - DNA, 120 bp, Artificial Sequence
  ENSG00000077235_67 (sequence is synthesized)
gtgtgagggtctttgagggtctttccccaggtaccagctctgacagcctgcccggcaccttggttcttggcaggggtacttggaggggcgcagtgggcgagcagcaggcgtgctgagcac

SEQ ID NO: 71329 - DNA, 120 bp, Artificial Sequence
  ENSG00000077235_68 (sequence is synthesized)
tggcagtgcccaggtcggcctggaatgagggctgcgcttccagaatgcccagggcgctggtggagaaccatgcctggtgctgtcagctgtgcttcactggctcctcatggcccacaggca

SEQ ID NO: 71330 - DNA, 120 bp, Artificial Sequence
  ENSG00000077235_69 (sequence is synthesized)
cctcacccactcctgcagatgagccaggggtccacagagggataagccctgaatgcccagctgcccccgggacaaccatgccacagagttacaggaagcaagggggccgcagaagcccct

SEQ ID NO: 71331 - DNA, 120 bp, Artificial Sequence
  ENSG00000077235_70 (sequence is synthesized)
ctggtgggggcgcctcccatgagtgtgtgtgctgaccccagattggcagggcccaagtgccctgtgtcctggctttcaagagctcaggtgtgccccctccaaggcccagccatagcgatg

SEQ ID NO: 71332 - DNA, 120 bp, Artificial Sequence
  ENSG00000077235_71 (sequence is synthesized)
agagcctggtgtccagctcttctgggtccgccccactcgtgggccccgggtggctgttcagtctctggtttagtaacagaaacgtctgtttcgaggaaagtgtgcctggaactctgcaca

SEQ ID NO: 71333 - DNA, 120 bp, Artificial Sequence
  ENSG00000077235_72 (sequence is synthesized)
tggcgtggagcagagcttcagggtcacgctcccgtgagttttgccacagcctggaggtggtttctgcctgggctgccagtagagctggcaagtccaggagtcacaacccttgtccctctc

SEQ ID NO: 71334 - DNA, 120 bp, Artificial Sequence
  ENSG00000077235_73 (sequence is synthesized)
ctgccaatgtgggtgggcccactgaggcctcagttacagctacatcagagcggacaccacgtcctggttccacccagctggcggtcaagggcccctctgtccagacaggagagaagcagg

SEQ ID NO: 71335 - DNA, 120 bp, Artificial Sequence
  ENSG00000077235_74 (sequence is synthesized)
gagtttggaaagcagagagcaagaggtggctggtctcagccctgtgacctgggccaggcctaggacgcccctgagcctcagtgttctgtctggacgagctgccctcctgcccccaccaag

SEQ ID NO: 71336 - DNA, 120 bp, Artificial Sequence
  ENSG00000077235_75 (sequence is synthesized)
cagcagggtgtggaggcggctgggtgcactcagtggcccggctgtgatgttcaggccccaggcaacatgcagtaccaccatactgcttgcctgcacctcctcccccagcttgtcctgggc

SEQ ID NO: 71337 - DNA, 120 bp, Artificial Sequence
  ENSG00000077235_76 (sequence is synthesized)
ctccatgctgctgaccaggctggaagatggggtgcccggggtgcttgtctctgatgctttctctgtgccaggggtcactaactcatgagtccgccgggccccacgggtcaagcagctgcc

SEQ ID NO: 71338 - DNA, 120 bp, Artificial Sequence
  ENSG00000077235_77 (sequence is synthesized)
ccctggtgcagctgcttcctgcttggctgactcccatgtgtgcctggggcctccagctcctctggcagctaggagcttgaagttgagtgtcaaattccccatgagccaaacaaaacccca

SEQ ID NO: 71339 - DNA, 120 bp, Artificial Sequence
  ENSG00000077235_78 (sequence is synthesized)
cctggaagccagtcttggctcacaggaagctgggatttatcccgcgctgcaggcctctcctccacaaatgagattcagcgtggtggctccagccagcgctgtacacgtgctgctcaggca

SEQ ID NO: 71340 - DNA, 120 bp, Artificial Sequence
  ENSG00000077235_79 (sequence is synthesized)
gctgcctctcccaccagggcctttgcctgaaccctcctggtacatccccatctgcctcatgcccagttcaggtgccccctgctctgggaagtggctccctggtacagagggggcattcca

SEQ ID NO: 71341 - DNA, 120 bp, Artificial Sequence
  ENSG00000077235_80 (sequence is synthesized)
atatgataatcatgaaaaagttgaaatattctgagaattcccaagcgtgacagacacaaatcgagcacacggtgttgtgaaagtggtgcccgtagactctcttgatgcagacttgccgca

SEQ ID NO: 71342 - DNA, 120 bp, Artificial Sequence
  ENSG00000077235_81 (sequence is synthesized)
agccttcagtatgtaaaaaacccaagaacacaatatccgtgaagcacagtgaagtgaggtgcgctgttgaagttgatggtgttcactgtacatttcataaccacagttagaattctatac

SEQ ID NO: 71343 - DNA, 120 bp, Artificial Sequence
  ENSG00000077235_82 (sequence is synthesized)
tttggagtttggactgggcaaaaatgtagtgataacctatcaattatggctttagcagagacatattctataggaagcaacagtagccagccctggctagtgtaggcaaaagtagggtgt

SEQ ID NO: 71344 - DNA, 120 bp, Artificial Sequence
  ENSG00000077235_83 (sequence is synthesized)
gtagaaggggcctggagtatctcacagggtctaaggaacagtgggtacatgagcagcaggaagggatgggaccaggccagccctggtcagggactccccgtcagagcactggactttaca

SEQ ID NO: 71345 - DNA, 120 bp, Artificial Sequence
  ENSG00000077235_84 (sequence is synthesized)
gttctcgaacctcagtcctcggcctctgtgcccttcactttacatcttgagcaggagaatcacagtggccaagagaaatccagtcagctgttgtgtcccagtcagctgtagtcagaggcc

SEQ ID NO: 71346 - DNA, 120 bp, Artificial Sequence
  ENSG00000077235_85 (sequence is synthesized)
tagggtcacggatcaggagcctgactgccaggggcccagtgtgtccacccagcaggtgacccctgtggctgtcggggaagcagtgagttggtgctggagcatgcctttcctgggtgtggc

SEQ ID NO: 71347 - DNA, 120 bp, Artificial Sequence
  ENSG00000077235_86 (sequence is synthesized)
ctggctttccctcccctccgccctgatgggcctcacaccttcctccgaggatgggggacctgccactggcacaaaaggggcttgacttcagcttctcagagcctgagccctgagggggag

SEQ ID NO: 71348 - DNA, 120 bp, Artificial Sequence
  ENSG00000077235_87 (sequence is synthesized)
gatactgcctgtaaatgcatttccaggggagggcaggcctcccacatccccaggcagcactgtgagttccagagcaggagctcaggcggtggggccagcgtgtgcactgcagcggctgct

SEQ ID NO: 71349 - DNA, 120 bp, Artificial Sequence
  ENSG00000077235_88 (sequence is synthesized)
gtggggcagtgatggcatgggggtctcaacttcctcgggtggcagcacgccctttcctttcctgcacgtctgtcatcagcagcggccttctcatgtggcttctctgggcgtttttgtttt

SEQ ID NO: 71350 - DNA, 120 bp, Artificial Sequence
  ENSG00000077235_89 (sequence is synthesized)
ctttggggtgtttttgcctcgggttttataccacccttgtggtcggggcttctgggtggaaaatgaggtgttcgctggcttcctgcaatgtggggcttgtccgggcctgggacgctgctt

SEQ ID NO: 71351 - DNA, 120 bp, Artificial Sequence
  ENSG00000077235_90 (sequence is synthesized)
gcatgtggcgctgtgtgcggcagtctgcccggccctgccacctccagggtggccgctctgtgagatgctcattgtcctttttttttgacacttcatcccctgagcctcgaggtgccctgc

SEQ ID NO: 71352 - DNA, 88 bp, Artificial Sequence
  ENSG00000077238_0 (sequence is synthesized)
acttcccgcttgggcgcccggacggcgaatggagcaggggcgcgcagataattaaagatttacacacagctggaagaaatcatagaga

SEQ ID NO: 71353 - DNA, 120 bp, Artificial Sequence
  ENSG00000077238_1 (sequence is synthesized)
ttgagatcaggagttcgagaccagcctggtgccttggcatctcccaatggggtggctttgctctgggctcctgttccctgtgagctgcctggtcctgctgcaggtggcaagctctgggaa

SEQ ID NO: 71354 - DNA, 120 bp, Artificial Sequence
  ENSG00000077238_2 (sequence is synthesized)
ctggtcctgctgcaggtggcaagctctgggaacatgaaggtcttgcaggagcccacctgcgtctccgactacatgagcatctctacttgcgagtggaagatgaatggtcccaccaattgc

SEQ ID NO: 71355 - DNA, 120 bp, Artificial Sequence
  ENSG00000077238_3 (sequence is synthesized)
agcaccgagctccgcctgttgtaccagctggtttttctgctctccgaagcccacacgtgtatccctgagaacaacggaggcgcggggtgcgtgtgccacctgctcatggatgacgtggtc

SEQ ID NO: 71356 - DNA, 120 bp, Artificial Sequence
  ENSG00000077238_4 (sequence is synthesized)
agtgcggataactatacactggacctgtgggctgggcagcagctgctgtggaagggctccttcaagcccagcgagcatgtgaaacccagggccccaggaaacctgacagttcacaccaat

SEQ ID NO: 71357 - DNA, 120 bp, Artificial Sequence
  ENSG00000077238_5 (sequence is synthesized)
gtctccgacactctgctgctgacctggagcaacccgtatccccctgacaattacctgtataatcatctcacctatgcagtcaacatttggagtgaaaacgacccggcagatttcagaatc

SEQ ID NO: 71358 - DNA, 120 bp, Artificial Sequence
  ENSG00000077238_6 (sequence is synthesized)
tataacgtgacctacctagaaccctccctccgcatcgcagccagcaccctgaagtctgggatttcctacagggcacgggtgagggcctgggctcagtgctataacaccacctggagtgag

SEQ ID NO: 71359 - DNA, 120 bp, Artificial Sequence
  ENSG00000077238_7 (sequence is synthesized)
tggagccccagcaccaagtggcacaactcctacagggagcccttcgagcagcacctcctgctgggcgtcagcgtttcctgcattgtcatcctggccgtctgcctgttgtgctatgtcagc

SEQ ID NO: 71360 - DNA, 120 bp, Artificial Sequence
  ENSG00000077238_8 (sequence is synthesized)
atcaccaagattaagaaagaatggtgggatcagattcccaacccagcccgcagccgcctcgtggctataataatccaggatgctcaggggtcacagtgggagaagcggtcccgaggccag

SEQ ID NO: 71361 - DNA, 120 bp, Artificial Sequence
  ENSG00000077238_9 (sequence is synthesized)
gaaccagccaagtgcccacactggaagaattgtcttaccaagctcttgccctgttttctggagcacaacatgaaaagggatgaagatcctcacaaggctgccaaagagatgcctttccag

SEQ ID NO: 71362 - DNA, 120 bp, Artificial Sequence
  ENSG00000077238_10 (sequence is synthesized)
ggctctggaaaatcagcatggtgcccagtggagatcagcaagacagtcctctggccagagagcatcagcgtggtgcgatgtgtggagttgtttgaggccccggtggagtgtgaggaggag

SEQ ID NO: 71363 - DNA, 120 bp, Artificial Sequence
  ENSG00000077238_11 (sequence is synthesized)
gaggaggtagaggaagaaaaagggagcttctgtgcatcgcctgagagcagcagggatgacttccaggagggaagggagggcattgtggcccggctaacagagagcctgttcctggacctg

SEQ ID NO: 71364 - DNA, 120 bp, Artificial Sequence
  ENSG00000077238_12 (sequence is synthesized)
ctcggagaggagaatgggggcttttgccagcaggacatgggggagtcatgccttcttccaccttcgggaagtacgagtgctcacatgccctgggatgagttcccaagtgcagggcccaag

SEQ ID NO: 71365 - DNA, 120 bp, Artificial Sequence
  ENSG00000077238_13 (sequence is synthesized)
gaggcacctccctggggcaaggagcagcctctccacctggagccaagtcctcctgccagcccgacccagagtccagacaacctgacttgcacagagacgcccctcgtcatcgcaggcaac

SEQ ID NO: 71366 - DNA, 120 bp, Artificial Sequence
  ENSG00000077238_14 (sequence is synthesized)
cctgcttaccgcagcttcagcaactccctgagccagtcaccgtgtcccagagagctgggtccagacccactgctggccagacacctggaggaagtagaacccgagatgccctgtgtcccc

SEQ ID NO: 71367 - DNA, 120 bp, Artificial Sequence
  ENSG00000077238_15 (sequence is synthesized)
ccccaacctgagccagaaacctgggagcagatcctccgccgaaatgtcctccagcatggggcagctgcagcccccgtctcggcccccaccagtggctatcaggagtttgtacatgcggtg

SEQ ID NO: 71368 - DNA, 120 bp, Artificial Sequence
  ENSG00000077238_16 (sequence is synthesized)
gagcagggtggcacccaggccagtgcggtggtgggcttgggtcccccaggagaggctggttacaaggccttctcaagcctgcttgccagcagtgctgtgtccccagagaaatgtgggttt

SEQ ID NO: 71369 - DNA, 120 bp, Artificial Sequence
  ENSG00000077238_17 (sequence is synthesized)
ggggctagcagtggggaagaggggtataagcctttccaagacctcattcctggctgccctggggaccctgccccagtccctgtccccttgttcacctttggactggacagggagccacct

SEQ ID NO: 71370 - DNA, 120 bp, Artificial Sequence
  ENSG00000077238_18 (sequence is synthesized)
cgcagtccgcagagctcacatctcccaagcagctccccagagcacctgggtctggagccgggggaaaaggtagaggacatgccaaagcccccacttccccaggagcaggccacagacccc

SEQ ID NO: 71371 - DNA, 120 bp, Artificial Sequence
  ENSG00000077238_19 (sequence is synthesized)
cttgtggacagcctgggcagtggcattgtctactcagcccttacctgccacctgtgcggccacctgaaacagtgtcatggccaggaggatggtggccagacccctgtcatggccagtcct

SEQ ID NO: 71372 - DNA, 120 bp, Artificial Sequence
  ENSG00000077238_20 (sequence is synthesized)
tgctgtggctgctgctgtggagacaggtcctcgccccctacaacccccctgagggccccagacccctctccaggtggggttccactggaggccagtctgtgtccggcctccctggcaccc

SEQ ID NO: 71373 - DNA, 120 bp, Artificial Sequence
  ENSG00000077238_21 (sequence is synthesized)
tcgggcatctcagagaagagtaaatcctcatcatccttccatcctgcccctggcaatgctcagagctcaagccagacccccaaaatcgtgaactttgtctccgtgggacccacatacatg

SEQ ID NO: 71374 - DNA, 120 bp, Artificial Sequence
  ENSG00000077238_22 (sequence is synthesized)
agggtctcttaggtgcatgtcctcttgttgctgagtctgcagatgaggactagggcttatccatgcctgggaaatgccacctcctggaaggcagccaggctggcagatttccaaaagact

SEQ ID NO: 71375 - DNA, 120 bp, Artificial Sequence
  ENSG00000077238_23 (sequence is synthesized)
tgaagaaccatggtatgaaggtgattggccccactgacgttggcctaacactgggctgcagagactggaccccgcccagcattgggctgggctcgccacatcccatgagagtagagggca

SEQ ID NO: 71376 - DNA, 120 bp, Artificial Sequence
  ENSG00000077238_24 (sequence is synthesized)
ctgggtcgccgtgccccacggcaggcccctgcaggaaaactgaggcccttgggcacctcgacttgtgaacgagttgttggctgctccctccacagcttctgcagcagactgtccctgttg

SEQ ID NO: 71377 - DNA, 120 bp, Artificial Sequence
  ENSG00000077238_25 (sequence is synthesized)
taactgcccaaggcatgttttgcccaccagatcatggcccacgtggaggcccacctgcctctgtctcactgaactagaagccgagcctagaaactaacacagccatcaagggaatgactt

SEQ ID NO: 71378 - DNA, 120 bp, Artificial Sequence
  ENSG00000077238_26 (sequence is synthesized)
gggcggccttgggaaatcgatgagaaattgaacttcagggagggtggtcattgcctagaggtgctcattcatttaacagagcttccttaggttgatgctggaggcagaatcccggctgtc

SEQ ID NO: 71379 - DNA, 120 bp, Artificial Sequence
  ENSG00000077238_27 (sequence is synthesized)
aaggggtgttcagttaaggggagcaacagaggacatgaaaaattgctatgactaaagcagggacaatttgctgccaaacacccatgcccagctgtatggctgggggctcctcgtatgcat

SEQ ID NO: 71380 - DNA, 120 bp, Artificial Sequence
  ENSG00000077238_28 (sequence is synthesized)
ggaacccccagaataaatatgctcagccaccctgtgggccgggcaatccagacagcaggcataaggcaccagttaccctgcatgttggcccagacctcaggtgctagggaaggcgggaac

SEQ ID NO: 71381 - DNA, 120 bp, Artificial Sequence
  ENSG00000077238_29 (sequence is synthesized)
cttgggttgagtaatgctcgtctgtgtgttttagtttcatcacctgttatctgtgtttgctgaggagagtggaacagaaggggtggagttttgtataaataaagtttctttgtctcttta

SEQ ID NO: 71382 - DNA, 120 bp, Artificial Sequence
  ENSG00000077238_30 (sequence is synthesized)
aaagccccgcgcggcgcgggccagggaagggccacccaggggtcccccacttcccgcttgggcgcccggacggcgaatggagcaggggcgcgcaggtgccttggcatctcccaatggggt

SEQ ID NO: 71383 - DNA, 120 bp, Artificial Sequence
  ENSG00000077238_31 (sequence is synthesized)
atgccgtgtggagaaaggaagagggtggaagccaggaggtctggagggaggtctggagtggaggagatgagaggctccggatccctctgggaggtagatttgaggacagattggaattga

SEQ ID NO: 71384 - DNA, 120 bp, Artificial Sequence
  ENSG00000077238_32 (sequence is synthesized)
gtgcgtgtgccacctgctcatggatgacgtggtcagtgcggataactatacactggacctgtgggctgggcagcagctgctgtggaagggctccttcaagcccagcgagcatgtcctccc

SEQ ID NO: 71385 - DNA, 120 bp, Artificial Sequence
  ENSG00000077238_33 (sequence is synthesized)
acctttgaaacggagctggtcgcagtagaccaccaagcccccttcagcccagctgtttccacccctgaacttaagtgcccaggaaggcgtattgagatgaggtgtgcttgctggaaggca

SEQ ID NO: 71386 - DNA, 120 bp, Artificial Sequence
  ENSG00000077238_34 (sequence is synthesized)
ccactggtcagctgctgcggctttggatggtcttgaccgtggaaggctgaccttcttctggtacccggagtccctgcaggaatcccccttgagcttgctgggctgtggtgacaggagttt

SEQ ID NO: 71387 - DNA, 120 bp, Artificial Sequence
  ENSG00000077238_35 (sequence is synthesized)
aaaacatgcgttgtattccagtgatgcatgatatgacatgcatcacaggaataaaaacctgaggtctcatggatatgattgcttcaaaggagaccaagttttaaaacagatgaatcaaaa

SEQ ID NO: 71388 - DNA, 120 bp, Artificial Sequence
  ENSG00000077238_36 (sequence is synthesized)
tctcctgaaatgtagcacccacacatccctgagaagctagctgcggcacgtgtgtgtgcacatgggcatgcgtgccttggcatctcccaatggggtggctttgctctgggctcctgttcc

SEQ ID NO: 71389 - DNA, 120 bp, Artificial Sequence
  ENSG00000077238_37 (sequence is synthesized)
gcagagttctccgctgggcgtgacctcgggctacggcgtgggaggaagcgcgcggcaagacacccagcgaggtgctggggtcgcccccaggagaggacggcggctcggactgtccggcgg

SEQ ID NO: 71390 - DNA, 120 bp, Artificial Sequence
  ENSG00000077238_38 (sequence is synthesized)
cggacggcgaatggagcaggggcgcgcaggtgcccccacaggcctcctcacctcttctcgtttgcttaagaaatctgaggtctgcgctaaagccagcctgggtgctgtaacctctcggcc

SEQ ID NO: 71391 - DNA, 120 bp, Artificial Sequence
  ENSG00000077238_39 (sequence is synthesized)
ctgggcactggtgcttgcctcaaggagcaccccctctgcaggaagacagacgtgagggctgggagggtgcggatgcaccagcggctgcaggaccacaagccagaggggatcagctcttca

SEQ ID NO: 71392 - DNA, 120 bp, Artificial Sequence
  ENSG00000077238_40 (sequence is synthesized)
ggacaggccactctgttctgagtgcattatctattgattcatcatgtcatcctcgcaacagccctgcacgatcaattctgtcattaaccccatagtacagatgaggatgcggaggcacag

SEQ ID NO: 71393 - DNA, 120 bp, Artificial Sequence
  ENSG00000077238_41 (sequence is synthesized)
agaagataagggacttgtcctgtgtcacacagcaaggagccatccggctcctaagttggtgcatttgacttctgtgcttccggaaagaaagagcagcaagtttaagatctggaggtggca

SEQ ID NO: 71394 - DNA, 120 bp, Artificial Sequence
  ENSG00000077238_42 (sequence is synthesized)
ctgagctttggaggagcagggggcaatgaggtggccggtgtgacgaggactcaatgtgcaagagggagagtggtggggagatgaggtggaggggtggtcggcggtcagatcgtggagggt

SEQ ID NO: 71395 - DNA, 120 bp, Artificial Sequence
  ENSG00000077238_43 (sequence is synthesized)
gcgcgggccagggaagggccacccaggggtcccccacttcccgcttgggcgcccggacggcgaatggagcaggggcgcgcaggtaggatccggggcccgcgcgcggatcgggttgcgaag

SEQ ID NO: 71396 - DNA, 120 bp, Artificial Sequence
  ENSG00000077238_44 (sequence is synthesized)
ggatcgggttgcgaaggtatcgcccgggcacgccggctgagggcgttcgggaagggctcggccgccggcggggaccacggggaccaccccgactccgagcggggcccgagcccgcgactc

SEQ ID NO: 71397 - DNA, 120 bp, Artificial Sequence
  ENSG00000077254_0 (sequence is synthesized)
ggagacaccggaaggagccgcggctgctgcgggaagtggccagttcaggaggcggaccccccgagggcagcgctgcggggccgttttccggccctcctgacgcgacactgcccctctccg

SEQ ID NO: 71398 - DNA, 120 bp, Artificial Sequence
  ENSG00000077254_1 (sequence is synthesized)
agagctgagaaggaaaagaggagcttgcggaggtgcggctgcaggccgttgttggtcgagctggcgggtcccgcgggccaggccgtggaggtgttacctcattttgaaagtcttgggaaa

SEQ ID NO: 71399 - DNA, 120 bp, Artificial Sequence
  ENSG00000077254_2 (sequence is synthesized)
caggaaaaaattcctaacaaaatgtcagcttttcgaaatcattgtccacatttggattcagttggtgaaataacaaaagaagatttgatacaaaaatcccttggtacttgtcaggattgt

SEQ ID NO: 71400 - DNA, 120 bp, Artificial Sequence
  ENSG00000077254_3 (sequence is synthesized)
aaagtccaaggaccaaatctttgggcatgtctggagaatagatgttcatatgttggctgtggtgaatcacaagtagatcacagcaccatacattctcaggagacaaagcattatctaact

SEQ ID NO: 71401 - DNA, 120 bp, Artificial Sequence
  ENSG00000077254_4 (sequence is synthesized)
gtgaaccttaccactcttcgagtatggtgttatgcttgcagcaaagaagtatttttggataggaaattaggaactcagccttcattgcctcatgtaagacaacctcaccaaatacaagaa

SEQ ID NO: 71402 - DNA, 120 bp, Artificial Sequence
  ENSG00000077254_5 (sequence is synthesized)
aacagtgtccaggattttaaaatacccagtaatacaacattaaaaactcctctggttgccgtatttgatgatctggatatagaagcggatgaagaagatgaacttagggccagaggtctt

SEQ ID NO: 71403 - DNA, 120 bp, Artificial Sequence
  ENSG00000077254_6 (sequence is synthesized)
acaggtttgaaaaatattggaaatacttgttacatgaatgcagctttgcaggctctttctaattgcccacctttgacacagttttttcttgattgtggaggactagctcgaacagataag

SEQ ID NO: 71404 - DNA, 120 bp, Artificial Sequence
  ENSG00000077254_7 (sequence is synthesized)
aaacctgccatttgtaaaagttatctcaaactaatgacagagctgtggcataaaagcaggccaggatctgttgtgcctactactctgtttcaaggaattaaaactgtaaatccaacattt

SEQ ID NO: 71405 - DNA, 120 bp, Artificial Sequence
  ENSG00000077254_8 (sequence is synthesized)
cgggggtattctcagcaggatgctcaagaattccttcgatgtttaatggatttgcttcatgaagaattgaaagagcaagtcatggaagtagaagaagatccgcaaaccataaccactgag

SEQ ID NO: 71406 - DNA, 120 bp, Artificial Sequence
  ENSG00000077254_9 (sequence is synthesized)
gagacaatggaagaagacaagagccagtcggatgtagattttcagtcttgtgaatcttgtagcaacagtgatagagcagaaaatgaaaatggctctagatgcttttctgaagataataat

SEQ ID NO: 71407 - DNA, 120 bp, Artificial Sequence
  ENSG00000077254_10 (sequence is synthesized)
gaaacaacaatgttaattcaggatgatgaaaacaattcagaaatgtcaaaggattggcaaaaagagaagatgtgcaataagattaataaagtaaattctgaaggcgaatttgataaagat

SEQ ID NO: 71408 - DNA, 120 bp, Artificial Sequence
  ENSG00000077254_11 (sequence is synthesized)
agagactctatatctgaaacagtcgacttaaacaaccaggaaactgtcaaagtgcaaatacacagcagagcttcagaatatatcactgatgtccattcgaatgacctgtctacaccacag

SEQ ID NO: 71409 - DNA, 120 bp, Artificial Sequence
  ENSG00000077254_12 (sequence is synthesized)
atccttccatcaaatgaaggtgttaatccacgtttatcggcaagccctcctaaatcaggcaatttgtggccaggattggcaccaccacacaaaaaagctcagtctgcatctccaaagaga

SEQ ID NO: 71410 - DNA, 120 bp, Artificial Sequence
  ENSG00000077254_13 (sequence is synthesized)
aaaaaacagcacaagaaatacagaagtgttatttcagacatatttgatggaacaatcattagttcagtgcagtgtctgacttgtgacagggtgtctgtaaccctcgagacctttcaagat

SEQ ID NO: 71411 - DNA, 120 bp, Artificial Sequence
  ENSG00000077254_14 (sequence is synthesized)
ctgtccttgccaattcctggcaaggaagaccttgctaagctgcattcatcaagtcatccaacttctatagtcaaagcaggatcatgtggcgaagcatatgctccacaagggtggatagct

SEQ ID NO: 71412 - DNA, 120 bp, Artificial Sequence
  ENSG00000077254_15 (sequence is synthesized)
tttttcatggaatatgtgaagaggtttgttgtctcatgtgtccctagctggttttggggtccagtagtaaccttgcaagattgtcttgctgccttctttgccagagatgaactaaaaggt

SEQ ID NO: 71413 - DNA, 120 bp, Artificial Sequence
  ENSG00000077254_16 (sequence is synthesized)
gacaatatgtacagttgtgaaaaatgcaaaaagttgagaaatggagtgaagttttgtaaagtacaaaactttcctgagattttgtgcatccaccttaaaagattcagacatgaactaatg

SEQ ID NO: 71414 - DNA, 120 bp, Artificial Sequence
  ENSG00000077254_17 (sequence is synthesized)
ttttccaccaaaatcagtacccatgtttcatttccgctagaaggcttggatcttcagccatttcttgctaaggatagtccagctcaaattgtgacatatgatcttctgtcagtcatttgc

SEQ ID NO: 71415 - DNA, 120 bp, Artificial Sequence
  ENSG00000077254_18 (sequence is synthesized)
gaactgcaagtagtggacactatatagcctactgccgaaacaatctaaataatctctggtatgaatttgatgatcagagtgtcactgaagtttcagaatctactgtacaaaatgcagaag

SEQ ID NO: 71416 - DNA, 120 bp, Artificial Sequence
  ENSG00000077254_19 (sequence is synthesized)
cttacgttcttttctataggaagagcagcgaagaggcacaaaaagagaggagaaggatatcaaatttattgaacataatggaaccaagcctccttcagttttatatttctcgacagtggc

SEQ ID NO: 71417 - DNA, 120 bp, Artificial Sequence
  ENSG00000077254_20 (sequence is synthesized)
ttaataaatttaagacctttgccgaacctggccctatttcaaataatgactttctttgtattcatggaggtgttcctccaagaaaagctggttatattgaagacctggttttgatgctgc

SEQ ID NO: 71418 - DNA, 120 bp, Artificial Sequence
  ENSG00000077254_21 (sequence is synthesized)
ctcagaacatttgggataacctatatagcaggtatggtggaggaccagctgtcaaccatctgtacatttgtcatacttgccaaattgaggcggagaaaattgaaaaaagaagaaaaactg

SEQ ID NO: 71419 - DNA, 120 bp, Artificial Sequence
  ENSG00000077254_22 (sequence is synthesized)
aattggaaatttttattcggcttaacagagcgttccaaaaagaggactctccagctactttttattgcatcagtatgcagtggtttagagaatgggaaagttttgtgaagggtaaagatg

SEQ ID NO: 71420 - DNA, 120 bp, Artificial Sequence
  ENSG00000077254_23 (sequence is synthesized)
gagatcctccaggtcctattgacaatactaagattgcagtcactaaatgtggtaatgtgatgcttaggcaaggagcagattctggccagatttctgaagaaacatggaattttctgcagt

SEQ ID NO: 71421 - DNA, 120 bp, Artificial Sequence
  ENSG00000077254_24 (sequence is synthesized)
ctatttatggtggagggcctgaagttatcctgcgacctccggttgttcatgttgatccagatatacttcaagcagaagaaaaaattgaagtagaaactcggtctttgtaatttttaggat

SEQ ID NO: 71422 - DNA, 120 bp, Artificial Sequence
  ENSG00000077254_25 (sequence is synthesized)
gtagagagttctaatgaggaatcattttcatgtgccctgacatgtacacatgcgaaaacattcctaaaagcgtgtttatttgctttattttttttcatcatttatcccatttatttcttc

SEQ ID NO: 71423 - DNA, 120 bp, Artificial Sequence
  ENSG00000077254_26 (sequence is synthesized)
ttagtgggcattatggaagaatatattaaaatgtgtaatataccacaggttggtatatttagttttaaatacttaccataaagtctttcagtgtaatttttttttgagacagagtcttgc

SEQ ID NO: 71424 - DNA, 120 bp, Artificial Sequence
  ENSG00000077254_27 (sequence is synthesized)
acaggtgtgagccacagcgcctggcccagtgtaatatttttgaaagaggagggacaattgtgaaatcagtaggttatctttaatctttacactacatgcagatccatagtatcctttgta

SEQ ID NO: 71425 - DNA, 120 bp, Artificial Sequence
  ENSG00000077254_28 (sequence is synthesized)
gtgttgtaaatacttttgctttgaaaactttttcattgtcctaaatcaccctgactctgaccagtctttcagttctccaaaagcccaatttaattgtatagttttgtcatggcttcatat

SEQ ID NO: 71426 - DNA, 120 bp, Artificial Sequence
  ENSG00000077254_29 (sequence is synthesized)
aataaagagcctattttaagttgaaagtagtagtcagaaaattgttaatttcctaaagctcaggaaactagggtgtcactttttttgcactgcagcatatacactaactagcttattaaa

SEQ ID NO: 71427 - DNA, 120 bp, Artificial Sequence
  ENSG00000077254_30 (sequence is synthesized)
atttacaaaatgtctttttgaatgtatcaaggatatatttagtttgagtggaatttgtcagcagatatcagtaacttattgccgcttatattgtacaatgttaaacttcaattcctgtaa

SEQ ID NO: 71428 - DNA, 120 bp, Artificial Sequence
  ENSG00000077254_31 (sequence is synthesized)
cctggttagtattaatgtcagtgactaaaaaacttagagttagttttagggcactttttattttgagagcatgaagtgtggaatgtgtcactacgattgttgataaagctgaggccactt

SEQ ID NO: 71429 - DNA, 120 bp, Artificial Sequence
  ENSG00000077254_32 (sequence is synthesized)
gcaacttgattttttaaatgaaatagataaagtctttttgaataatatagtatgcactgctatttgcttgattatgtaatgtcaaaagtttaactatattccaagtacaaaaacatactg

SEQ ID NO: 71430 - DNA, 120 bp, Artificial Sequence
  ENSG00000077254_33 (sequence is synthesized)
gattacattgaggatgttgaatagcattcatgatggctttgttttggtttggggcagctgtcaccagctaaagcaatgttgttaaaattagctcaataaaaatgtctttaaaatgtaaaa

SEQ ID NO: 71431 - DNA, 88 bp, Artificial Sequence
  ENSG00000077254_34 (sequence is synthesized)
ggccgttgttggtcgagctggcgggtcccgcgggccaggccgtggaggctttggtgcggaggattccttctttttatattgattggaa

SEQ ID NO: 71432 - DNA, 85 bp, Artificial Sequence
  ENSG00000077254_35 (sequence is synthesized)
tttgtttttgtttttttttttgctattatgactatgaaagcagttcaatttgcgaaacatgctttgatctttagagtctaaaatc

SEQ ID NO: 71433 - DNA, 120 bp, Artificial Sequence
  ENSG00000077254_36 (sequence is synthesized)
atcatggaactgcaagtagtaagtatataggtttaacagttgttcctagatttaaaaaaaaattaaaataagcctgggcgtggtggctcatacctgtaataccagccttttgggagaatg

SEQ ID NO: 71434 - DNA, 120 bp, Artificial Sequence
  ENSG00000077254_37 (sequence is synthesized)
aggtgggagaatcacttaattaaagccaggagtttgagaccagcttgggcagcatagtgaaaccccatctctacaaaataaataaataaacatcctaattaatcttttaaataatatctg

SEQ ID NO: 71435 - DNA, 89 bp, Artificial Sequence
  ENSG00000077254_38 (sequence is synthesized)
ggaactcctgggttcaaggacttatcaaacactgaagtggaatgatggtattgttttgccataaagcaagttttagatattagatgact

SEQ ID NO: 71436 - DNA, 120 bp, Artificial Sequence
  ENSG00000077254_39 (sequence is synthesized)
tatttaagcttttacttgtgagtgatttgtcactgttagaaatatgttatcattagtcatctatagtacttttttattcaactgaagaatgtaatccatacattaactagggcaagtaat

SEQ ID NO: 71437 - DNA, 120 bp, Artificial Sequence
  ENSG00000077254_40 (sequence is synthesized)
gaaaagcagccactttttttttatctgaggaaaggtcttaaggctgttgttaagagcaaagcaaaagcatctctgactttttaagacaagccatatgtttcagcttataacaatatgggc

SEQ ID NO: 71438 - DNA, 120 bp, Artificial Sequence
  ENSG00000077254_41 (sequence is synthesized)
tatttctcttgaaattcccaagacctaataaagatagtgttaatatgtgtgttaagtctaataagaagaaaaatccatctactagtaatgtagtaaaatgcatattgaatttaactaatc

SEQ ID NO: 71439 - DNA, 120 bp, Artificial Sequence
  ENSG00000077254_42 (sequence is synthesized)
tttaagacagcttaatagtacattcacatattggcattcggttagtgtctaccttgataatataaatataacaagaaaaatcacatcctgaaggaattcatgtgaattcctgtagtataa

SEQ ID NO: 71440 - DNA, 120 bp, Artificial Sequence
  ENSG00000077254_43 (sequence is synthesized)
gacaaatgataagtgaaatgttttaaagctgttctgagatccatagaagggcaaactcaaccaaaataatggacttatttgtgtgtctgtaattgtgaactactccatatcatttaaggt

SEQ ID NO: 71441 - DNA, 120 bp, Artificial Sequence
  ENSG00000077254_44 (sequence is synthesized)
catatgacaggcagtcagtaagttttgttcaatgaataaatggaaaagatattatttgaggtaggtcttcaatgttggcaggagttaagggaggggaaggtaaacagtaacctgattcat

SEQ ID NO: 71442 - DNA, 120 bp, Artificial Sequence
  ENSG00000077254_45 (sequence is synthesized)
gagcatagattaaaaaaatggaaccttgtttttctgtgctgggaggtcagcatggggcaaaatcaaataattacaggaccataataagcaatttgctgttaatttgaaaccaatgccaga

SEQ ID NO: 71443 - DNA, 120 bp, Artificial Sequence
  ENSG00000077254_46 (sequence is synthesized)
ggacgctggggtgggaggatgccttgagcccaggaattttgaggctgctgtgagccatgatcatgccactgcactctctggactgggtgacagaacaagacccttccacttaaaaaaaca

SEQ ID NO: 71444 - DNA, 120 bp, Artificial Sequence
  ENSG00000077254_47 (sequence is synthesized)
atgatgattgatctgtcatttagttactgttaaaaaaaaaatgagtttaatgtttgaaaggaatataattaaaagcatgaaacagatatgtttatatatttttttaggtgttcctccaag

SEQ ID NO: 71445 - DNA, 120 bp, Artificial Sequence
  ENSG00000077254_48 (sequence is synthesized)
aaagtgatgcttttcaaattgatctaggataaagatgaagacctgacaattatcagagttatatgatattaataaaatgattagatgaaagagttgtaatagatttcaagtgttctaggt

SEQ ID NO: 71446 - DNA, 120 bp, Artificial Sequence
  ENSG00000077254_49 (sequence is synthesized)
ttagatgaaagagttgtaatagatttcaagtgttctaggtgcataatggtgaatgacctcaggcagttcactacagttctgttgagttatgttctccctttgtgtgtgtgtgtgtgtgtg

SEQ ID NO: 71447 - DNA, 120 bp, Artificial Sequence
  ENSG00000077264_0 (sequence is synthesized)
accgcgggcgggcagctgtgccagctaaccgtctgggatctcgcactgggggctgcagcttttccccgcctcgagccagtgtgcgggggcgggagaagagccagggggagcgggctgggc

SEQ ID NO: 71448 - DNA, 120 bp, Artificial Sequence
  ENSG00000077264_1 (sequence is synthesized)
ccggggctgcggctgcggccgcggggctgcggctccccagccccgccagctggagcgctcggaggtagaggaaaggtcttgacggggtggctggatccgtggcagaatccagttccagat

SEQ ID NO: 71449 - DNA, 120 bp, Artificial Sequence
  ENSG00000077264_2 (sequence is synthesized)
tctagacttgagggttctgggctgttggtctgtagaagcgaaggagagaaggactcaaatccaggccaagtgtatggctgtctgaggtattggaacagaaggaggtccattcctgttggt

SEQ ID NO: 71450 - DNA, 120 bp, Artificial Sequence
  ENSG00000077264_3 (sequence is synthesized)
gacaacaccgtggccctgttctgggatgagcaaggtgtaaaggtttcccccaagaaagagcagctgagtccttgcatcttgtggcagctggtgtgcccagcactgagtctgtaggagctg

SEQ ID NO: 71451 - DNA, 120 bp, Artificial Sequence
  ENSG00000077264_4 (sequence is synthesized)
aagccagcccggacccttctcatgggcagtgcccacctgtgctgaagtcctgcagcggtggcggtgtgaggagctgtgaaattagttgtaactgaaaatgtctgacggtctggataatga

SEQ ID NO: 71452 - DNA, 120 bp, Artificial Sequence
  ENSG00000077264_5 (sequence is synthesized)
agagaaacccccggctcctccactgaggatgaatagtaacaaccgggattcttcagcactcaaccacagctccaaaccacttcccatggcccctgaagagaagaataagaaagccaggct

SEQ ID NO: 71453 - DNA, 120 bp, Artificial Sequence
  ENSG00000077264_6 (sequence is synthesized)
tcgctctatcttcccaggaggaggggataaaaccaataagaagaaggagaaagagcgcccagagatctctcttccttcagactttgagcatacgattcatgtggggtttgatgcagtcac

SEQ ID NO: 71454 - DNA, 120 bp, Artificial Sequence
  ENSG00000077264_7 (sequence is synthesized)
cggggaattcactggaattccagagcaatgggcacgattactccaaacttccaacataacaaaattggaacagaagaagaacccacaagctgttctagatgttctcaaattctatgattc

SEQ ID NO: 71455 - DNA, 120 bp, Artificial Sequence
  ENSG00000077264_8 (sequence is synthesized)
caaagaaacagtcaacaaccagaaatacatgagctttacatcaggagataaaagtgcacatggatacatagcagcccatccttcgagtacaaaaacagcatctgagcctccattggcccc

SEQ ID NO: 71456 - DNA, 120 bp, Artificial Sequence
  ENSG00000077264_9 (sequence is synthesized)
tcctgtgtctgaagaagaagatgaagaggaagaagaagaagaagatgaaaatgagccaccaccagttatcgcaccaagaccagagcatacaaaatcaatctatactcgttctgtggttga

SEQ ID NO: 71457 - DNA, 120 bp, Artificial Sequence
  ENSG00000077264_10 (sequence is synthesized)
atccattgcttcaccagcagtaccaaataaagaggtcacaccaccctctgctgaaaatgccaattccagtactttgtacaggaacacagatcggcaaagaaaaaaatccaagatgacaga

SEQ ID NO: 71458 - DNA, 120 bp, Artificial Sequence
  ENSG00000077264_11 (sequence is synthesized)
tgaggagatcttagagaagctaagaagcattgtgagtgttggggacccaaagaaaaaatacacaagatttgaaaaaattggtcaaggggcatcaggtactgtttatacagcactagacat

SEQ ID NO: 71459 - DNA, 120 bp, Artificial Sequence
  ENSG00000077264_12 (sequence is synthesized)
tgcaacaggacaagaggtggccataaagcagatgaaccttcaacagcaacccaagaaggaattaattattaatgaaattctggtcatgagggaaaataagaaccctaatattgttaatta

SEQ ID NO: 71460 - DNA, 120 bp, Artificial Sequence
  ENSG00000077264_13 (sequence is synthesized)
tttagatagctacttggtgggtgatgaactatgggtagtcatggaatacttggctggtggctctctgactgatgtggtcacagagacctgtatggatgaaggacagatagcagctgtctg

SEQ ID NO: 71461 - DNA, 120 bp, Artificial Sequence
  ENSG00000077264_14 (sequence is synthesized)
cagagagtgcctgcaagctttggatttcctgcactcaaaccaggtgatccatagagatataaagagtgacaatattcttctcgggatggatggctctgttaaattgactgactttgggtt

SEQ ID NO: 71462 - DNA, 120 bp, Artificial Sequence
  ENSG00000077264_15 (sequence is synthesized)
ctgtgcccagatcactcctgagcaaagtaaacgaagcactatggtgggaaccccatattggatggcacctgaggtggtgactcgaaaagcttatggtccgaaagttgatatctggtctct

SEQ ID NO: 71463 - DNA, 120 bp, Artificial Sequence
  ENSG00000077264_16 (sequence is synthesized)
tggaattatggcaattgaaatggtggaaggtgaacccccttaccttaatgaaaatccactcagggcattgtatctgatagccactaatggaactccagagctccagaatcctgagagact

SEQ ID NO: 71464 - DNA, 120 bp, Artificial Sequence
  ENSG00000077264_17 (sequence is synthesized)
gtcagctgtattccgtgactttttaaatcgctgtcttgagatggatgtggataggcgaggatctgccaaggagcttttgcagcatccatttttaaaattagccaagcctctctccagcct

SEQ ID NO: 71465 - DNA, 120 bp, Artificial Sequence
  ENSG00000077264_18 (sequence is synthesized)
gactcctctgattatcgctgcaaaggaagcaattaagaacagcagccgctaagactgcaagccttacacctcaccatctccctcatgagtaagactgaaataaaactctgctgcaggaaa

SEQ ID NO: 71466 - DNA, 120 bp, Artificial Sequence
  ENSG00000077264_19 (sequence is synthesized)
gatggaagaaaagacagtcaaatggggtgggggttctttacctttcaaatgaatagaaacttcttataagcctttttcctactccctcagattatgtaatttatttgtaagcctgaatcg

SEQ ID NO: 71467 - DNA, 120 bp, Artificial Sequence
  ENSG00000077264_20 (sequence is synthesized)
cagcccaaacagggcagcaatgttgaagtgaccataaagtggtcacttccaccgtgaagcgaaagagccagtagtgaatcccctcattttgtgcattcactttgaagaaaaaggtttctc

SEQ ID NO: 71468 - DNA, 120 bp, Artificial Sequence
  ENSG00000077264_21 (sequence is synthesized)
aaagatgcacactccctcttcatagtgttgtgtttgtttttaagttagagagtagtccctcttgcattcaaacctccttcaaaactccttacccaatgtgatgtttttcacttgcattgt

SEQ ID NO: 71469 - DNA, 120 bp, Artificial Sequence
  ENSG00000077264_22 (sequence is synthesized)
ctccttacccaatgtgatgtttttcacttgcattgtcattagatgtccagaaaaaaaaaagatgtcaaaatgtttttctaaaaaaagaaagcaaaaaaagcaaggcaaaaaaaaaaaaaa

SEQ ID NO: 71470 - DNA, 120 bp, Artificial Sequence
  ENSG00000077264_23 (sequence is synthesized)
aacaaaaaataccagagcaagtactgtgtgaacatgtggaagtccatgccctaatagagttgcaattttttattcttcttctatagtggtggcttggtttgtgtacctatttttctgcat

SEQ ID NO: 71471 - DNA, 120 bp, Artificial Sequence
  ENSG00000077264_24 (sequence is synthesized)
ttgtattggaaaaggtttcttttaagacattttccaaaagtggagaggaatatgtgtgttcaggaagggctttcaaaaaactgtatatctaaataaagctcaaacggtgaaatcctgtca

SEQ ID NO: 71472 - DNA, 120 bp, Artificial Sequence
  ENSG00000077264_25 (sequence is synthesized)
cattttcacaatgatgcttaaaagataattgagtaaaccaggttgttaatctccttaatacctgaaagaggacacactgaaactgaaactgtgacatcctgctaggtgagttcaggttct

SEQ ID NO: 71473 - DNA, 120 bp, Artificial Sequence
  ENSG00000077264_26 (sequence is synthesized)
gaacctaggaaatcctcataggagaaaccacatttaaacaaagatgggactttctctgagagccaaaaccagataaatgtagaatactgaaatccttgttggacattaagtaaacaaaga

SEQ ID NO: 71474 - DNA, 120 bp, Artificial Sequence
  ENSG00000077264_27 (sequence is synthesized)
taatgatacctaaattaatcctctcttgtgcttatgaaacatatgcactgtaaaataggcataccaggaggaaatagatacattaatcatcatttacttatgatacaaattatttatttt

SEQ ID NO: 71475 - DNA, 120 bp, Artificial Sequence
  ENSG00000077264_28 (sequence is synthesized)
gacaatttataacgtttaaaaaagttttttaaagatctagagaaaggtgatatagtaaacattcaactctgtaagaaatgggaggtcagtgaaggctacatcccaatcaatatttggctc

SEQ ID NO: 71476 - DNA, 120 bp, Artificial Sequence
  ENSG00000077264_29 (sequence is synthesized)
taagtacctcttcccatttttcctatgtatcacctatttctgtttcggaatatggtgtgttcatgcttagttctttgggcttttgaatatcaaaagcatattcataaatgtcttgaaatt

SEQ ID NO: 71477 - DNA, 120 bp, Artificial Sequence
  ENSG00000077264_30 (sequence is synthesized)
ctctccagtggaaaataattttaacttacaatcatatcccaagaaatgtcagtccgacagaattccttatatgacttggggaaaataacaaaatttgactactatttcaccatatatcta

SEQ ID NO: 71478 - DNA, 120 bp, Artificial Sequence
  ENSG00000077264_31 (sequence is synthesized)
tttattaaaaaattcaacagttggcacttcctgaatcttctgagagtagaaaaatatctgcggagtgtctgtgtagaaaaggatatgcctctcttttgagtgtattgacaattttgtaaa

SEQ ID NO: 71479 - DNA, 120 bp, Artificial Sequence
  ENSG00000077264_32 (sequence is synthesized)
ttacagaaagttgtttctctaagcctttgaaaaactaacaatttgtgttatagaaggcttcttaatttgcagtataaaagaatctaaacagaacttatgtacattcagccagaaggggaa

SEQ ID NO: 71480 - DNA, 120 bp, Artificial Sequence
  ENSG00000077264_33 (sequence is synthesized)
agagatcagttacataggcctctctccttctttgccaaggtacatccatccatctaaccatccatatatccacatcttaaaatgaaagcactttctttagagtttcagcaaactatatag

SEQ ID NO: 71481 - DNA, 120 bp, Artificial Sequence
  ENSG00000077264_34 (sequence is synthesized)
tgtacgtgtttatgttcaggagatgaccccactggtgtatttcctattttccctattgttttctttgactgtaaaagttgggagaggcttgacctcctccccttgaaaatgtccacagtg

SEQ ID NO: 71482 - DNA, 120 bp, Artificial Sequence
  ENSG00000077264_35 (sequence is synthesized)
ggataaaacaacaaatgtgaaaagaaaatgaaacggtaatattaatttgaagcatactatgttatactttgcaaaaacgaatctgggcctgtaatttttaatgccacactgctctaatga

SEQ ID NO: 71483 - DNA, 120 bp, Artificial Sequence
  ENSG00000077264_36 (sequence is synthesized)
gagagagaggccttaattttgatttcatttaaaaataagtactttaaaaaatttttcactcatagtgccgggaaattcaatgaaatcctgggatgcaaataaaaatcagtacattagtga

SEQ ID NO: 71484 - DNA, 120 bp, Artificial Sequence
  ENSG00000077264_37 (sequence is synthesized)
ctgtgtcctgccagtggagagagcccaatacctggttaggaagccctattcattagttagcatcccttacatgttgagaaggccttttttttgttgttattttggagaccttggagcagt

SEQ ID NO: 71485 - DNA, 120 bp, Artificial Sequence
  ENSG00000077264_38 (sequence is synthesized)
tcagatcactgtaggcagagaaatggcttctctcttatgctttcagttcagcatattaacaatgaggagccaggtacttctttactaccactttgtaccaagatttgataataatatatc

SEQ ID NO: 71486 - DNA, 120 bp, Artificial Sequence
  ENSG00000077264_39 (sequence is synthesized)
ccaggaggcattacttttataaatttgtattcatgtaaattttcaaatgagaacagcttctaaagccccttccctgtattggagagttatgtatatttctaataagtattagaaagaagc

SEQ ID NO: 71487 - DNA, 120 bp, Artificial Sequence
  ENSG00000077264_40 (sequence is synthesized)
tgtttctcatgccacagtgatgctgaaggattcacatttggtacaatcgagtaacttgaacgccagattgttaacagtttattctctttccctggatttttaagctcatcttgacacagg

SEQ ID NO: 71488 - DNA, 120 bp, Artificial Sequence
  ENSG00000077264_41 (sequence is synthesized)
tgagtctatccaaatctttgatgttgctagtgtgccctgagataacgagggcacatctttcaatgttgattccaaaatgtcctgagttaggaatagggcagtgggaaagtcagggaaggg

SEQ ID NO: 71489 - DNA, 120 bp, Artificial Sequence
  ENSG00000077264_42 (sequence is synthesized)
tgagaagcacagtagagattatttatttaaaaaaggaaagaacgttaatgttgttagcaaggatccagtgcgttgtcataatcccatgaggattttcagatgacacaatcccctcaaatc

SEQ ID NO: 71490 - DNA, 120 bp, Artificial Sequence
  ENSG00000077264_43 (sequence is synthesized)
agtcaccatgttgggtaatgacttcgttcttgctgatctcgtgtgtgtgtcattgtaaatatttgtgtgtccatgttccattttggctactggatggccaagccatgtaagaagatttaa

SEQ ID NO: 71491 - DNA, 120 bp, Artificial Sequence
  ENSG00000077264_44 (sequence is synthesized)
ctcaagtatttattctttatgttattcagatttctttcaggcttgtgaactgcaccccaatgtttgagtttaaccacctgatccttacatctatccctccccggtgaagcacattccatt

SEQ ID NO: 71492 - DNA, 120 bp, Artificial Sequence
  ENSG00000077264_45 (sequence is synthesized)
gctaaaagaaaaagaaacacgaaattgcttcctgttgtctgtataactgttttgatagtttgagatatttgtctataaatgatatttctcagctcaaagatcgtgtaaataattatattc

SEQ ID NO: 71493 - DNA, 120 bp, Artificial Sequence
  ENSG00000077264_46 (sequence is synthesized)
ctttgctcaatgggtttatttctaatgaggctgccagttctgagagattctataatatcacttttaaataacataaacagggattacaactatgtaaaaagaaatgcatatggacaaaga

SEQ ID NO: 71494 - DNA, 120 bp, Artificial Sequence
  ENSG00000077264_47 (sequence is synthesized)
ctgggaacacagataattgaaatcagttgtgttagggtggtggaattatgtgaatttttttttctttttaaaattttatttgatattgttataatattgctttacaataaataaacagca

SEQ ID NO: 71495 - DNA, 120 bp, Artificial Sequence
  ENSG00000077264_48 (sequence is synthesized)
gaaagggaactatagacacatagaaaagatgccagaagcagatgccttctggccagagcgcagagcatgcagggcagagatatttgctagttacaattattccataggctttatgcttgc

SEQ ID NO: 71496 - DNA, 120 bp, Artificial Sequence
  ENSG00000077264_49 (sequence is synthesized)
ctgggtgctgaggttggcacacgctcgggtatggcacacgctttcttaggagactattatctataagttaaagctagggagatgtcactattagaactccaaacacactcttctgcttta

SEQ ID NO: 71497 - DNA, 120 bp, Artificial Sequence
  ENSG00000077264_50 (sequence is synthesized)
aaacaggttgtctgccctctgctttggtatggcattcgggtgtctgttttgtggttgctttagattggaggggtgaccattttattagcccccttgataacatctgttgcagatattgcc

SEQ ID NO: 71498 - DNA, 120 bp, Artificial Sequence
  ENSG00000077264_51 (sequence is synthesized)
tttctggaacgttttaacagactctcaggttgaattttggaggactagaaggataaaatccccagctcccaccattttcttgtccaacaggatattactgtatatcattcaggtaggatt

SEQ ID NO: 71499 - DNA, 120 bp, Artificial Sequence
  ENSG00000077264_52 (sequence is synthesized)
cttcttttaataaccaatagggcaagtcccactaatttcaatagaagttatgacttgcaattaaaagctgactttgaaatcattaaacaaatatgtaggactgtctctgcctgttggcat

SEQ ID NO: 71500 - DNA, 120 bp, Artificial Sequence
  ENSG00000077264_53 (sequence is synthesized)
tcagttatagttctgttaattttggcttgggatggtctccatgtgcttttttctgcctatttataggttgtttgcagtagttgtgatttttaaagagcaagggagaccatctaaccaaag

SEQ ID NO: 71501 - DNA, 120 bp, Artificial Sequence
  ENSG00000077264_54 (sequence is synthesized)
gataacttccttctaactcaccaaagaaattttaggtgagaactttaataatgaggtagtcacctcagatatgctgcttagtttcactaaaagcagaccctatacctagagaagtcactg

SEQ ID NO: 71502 - DNA, 120 bp, Artificial Sequence
  ENSG00000077264_55 (sequence is synthesized)
gctttttattggtcattctcaatacagaaatacttaggggagtcttaaccctgccatccccggttgaatctcttggtctttatctaagctacttgcagttaatattcagttaagcaaagg

SEQ ID NO: 71503 - DNA, 120 bp, Artificial Sequence
  ENSG00000077264_56 (sequence is synthesized)
tatggccagtagtgcaagtatctcccagtctctgagctctgaacaagaggactgaaattcagcatttgtaaactgacagtttgatgggcctgggatttgaagtgaactcagcacacaatt

SEQ ID NO: 71504 - DNA, 120 bp, Artificial Sequence
  ENSG00000077264_57 (sequence is synthesized)
ctgaacgtgtatttgcatgtggactgggaaggaaataaatgggaacttggaaataatggaatatttctcctatgaaagaatttttcgtagaagatttgtttttgatataatctttctgtt

SEQ ID NO: 71505 - DNA, 120 bp, Artificial Sequence
  ENSG00000077264_58 (sequence is synthesized)
ggttagcttttagtgttttcattccttttctgatccacactcctttaagtgaccaaatgaatataacccaacatgcattgggaatgtgtttaatattaaacaatgtctaactgaatctgc

SEQ ID NO: 71506 - DNA, 120 bp, Artificial Sequence
  ENSG00000077264_59 (sequence is synthesized)
aaatgcgggaactgagatatcacctccatgtgcacacctgtgtgtacgagtattctatacaacttgtagcatttactgccacttaattgggttgaacttgcaagataaacttttggaaac

SEQ ID NO: 71507 - DNA, 120 bp, Artificial Sequence
  ENSG00000077264_60 (sequence is synthesized)
tgcttagtgccatcggagtctcctttagaagctgccatcaggcaaatgctatcccataataccagcagtaagcctggcaacatgttcaacagatttagtacccaagaggaaatcaacagc

SEQ ID NO: 71508 - DNA, 120 bp, Artificial Sequence
  ENSG00000077264_61 (sequence is synthesized)
gatagtagagaatgagtcagatgtagtgggataaatactagcctaggaagaaggagccccggagtctaatatgagctttattactaaattgctatgtgacgctaggcaagtcacttaacc

SEQ ID NO: 71509 - DNA, 120 bp, Artificial Sequence
  ENSG00000077264_62 (sequence is synthesized)
tctccatggctgtttcctcatctgtaaaataagtgtattggactagatgatccttagggtctttccaaaagtctaacattctatggcattataggttgccttgcaaattcagcctgctat

SEQ ID NO: 71510 - DNA, 120 bp, Artificial Sequence
  ENSG00000077264_63 (sequence is synthesized)
agtgatggcaaatatcacgtttaagcctgagtctcttatgttgcagttaaataaaagaactatgtaagatgatttttaaaattcaagcaaatgggccgggtgcggtggctcatacctgta

SEQ ID NO: 71511 - DNA, 120 bp, Artificial Sequence
  ENSG00000077264_64 (sequence is synthesized)
gtgaaacttcgtctccaaaaaaaaaaactcaagcaaatgaagttcataataataggggatgttgataaaacttgtggcagccttccaattcatttacagttgtttcgttttgtttttgtt

SEQ ID NO: 71512 - DNA, 120 bp, Artificial Sequence
  ENSG00000077264_65 (sequence is synthesized)
ttaatgtccattttctgttgactgttcccagttttcattttccatacagtctgtatgtaaagtctggttttcattaagctgtggccagtatttgccactacaacagaaacacactgtcac

SEQ ID NO: 71513 - DNA, 120 bp, Artificial Sequence
  ENSG00000077264_66 (sequence is synthesized)
acttgctagaatataactgtacttgagcttctcctttcctgtgaagtagtgctgggctttctagagtttaattctcaagtggcacaagatagcagagcccatgcattttaatggctgaga

SEQ ID NO: 71514 - DNA, 120 bp, Artificial Sequence
  ENSG00000077264_67 (sequence is synthesized)
ctgctaagagtgaacctaaacacttacaagttgcagagagaaatgaaaaagtaattacatgctattagcattgagaaatgttgacaaattaatttgttgggaaccaaagatagcatttct

SEQ ID NO: 71515 - DNA, 120 bp, Artificial Sequence
  ENSG00000077264_68 (sequence is synthesized)
gatgacaactcccacagtgattggccagttgtatgatgagtacactgctggaaagagggtaaactgggagttagtggatggtcccaatgccctgcctacagcagagtgccaaccagccct

SEQ ID NO: 71516 - DNA, 120 bp, Artificial Sequence
  ENSG00000077264_69 (sequence is synthesized)
gagtgcaaaattcaagttcaatgtgtgtgcttgtgtgtggtgtgctttatggacccgcaaataccatattcattattgatgataagatcttcacagaatcctgtagctactaatgcattg

SEQ ID NO: 71517 - DNA, 120 bp, Artificial Sequence
  ENSG00000077264_70 (sequence is synthesized)
agtttttaatctcagtacatcagccaggaggagccagatcacagggtagtgatgtctactgggattatactcataacatctacacaaaacaagttgagaaggatccacgttttcattgtt

SEQ ID NO: 71518 - DNA, 120 bp, Artificial Sequence
  ENSG00000077264_71 (sequence is synthesized)
tatcagaattgtatctcatttggctgagcattacttttgtcagaatgtgttatctgtaaaccatgtgtagtgaaattcttctgtaactttggattaaaggtatttatggtctttttgttt

SEQ ID NO: 71519 - DNA, 120 bp, Artificial Sequence
  ENSG00000077264_72 (sequence is synthesized)
gtttgatttttaagtaagttatttcttttgtagacctgctgatggtatggttccatccttctgacctcagcatccaatctttttaaggatttttgttttcaatattgttattttaaattg

SEQ ID NO: 71520 - DNA, 120 bp, Artificial Sequence
  ENSG00000077264_73 (sequence is synthesized)
tggttgaagcaatagaaaattgaaatatggattgtgcatgactgtgtcttgagtgtaaaaatattgcagtttgaaacttggacctaaagtattgcaaataaaaatgacaaacatcaatga

SEQ ID NO: 71521 - DNA, 120 bp, Artificial Sequence
  ENSG00000077264_74 (sequence is synthesized)
aatcacagtcaaaatacacccagatgctctcacacacccagacgcgcgcgcatccccgggccatggggcgcacgtgagcccgcaccccgcgcacccagccctgcctctcgccagagcatc

SEQ ID NO: 71522 - DNA, 120 bp, Artificial Sequence
  ENSG00000077264_75 (sequence is synthesized)
ctcagcagctgccaccgaagcagcctcctccttctctcttcctcctcctcctaccacggccgccgccaccaccgctgcggctgtgatctcctatcccctctggtcctccttcctccccca

SEQ ID NO: 71523 - DNA, 120 bp, Artificial Sequence
  ENSG00000077264_76 (sequence is synthesized)
gttcctgctcctcctcccatcccctgctcctcctgcccagcagcgaagggcagaaccctcggctgccgccctccttcgctctgaccaagaagaggctggaacaggagctgtgaaattagt

SEQ ID NO: 71524 - DNA, 120 bp, Artificial Sequence
  ENSG00000077264_77 (sequence is synthesized)
gcggccgcggggctgcggctccccagccccgccagctggagcgctcggaggtagaggaaaggtcttgacggggtggctggatccgtggcagcctcgagtctcctacgtggctccccggag

SEQ ID NO: 71525 - DNA, 120 bp, Artificial Sequence
  ENSG00000077264_78 (sequence is synthesized)
ccctgagaccaagcgagcagtttgcatgatcccagttcgcggacaagtgggtgtgtcagggccgttcccagagggccggggctccttcgcttggtcaaaccctagactcgtttactgggg

SEQ ID NO: 71526 - DNA, 120 bp, Artificial Sequence
  ENSG00000077264_79 (sequence is synthesized)
acccacgtaacccaccttcaggaaccagtagctttaaccaagagaacaagaaactcaatgagcagcagcctcaacaactggctctttcctcctgggtaaggagagggcagtggggaagga

SEQ ID NO: 71527 - DNA, 120 bp, Artificial Sequence
  ENSG00000077264_80 (sequence is synthesized)
cggtgcctcaaagggaagtggaggcgctatcaatctggcctagacaggtaggttgactgcttttacatgggtgggctggggcctggtctgggacccctgctcaaaaaaaaaaaagaaaaa

SEQ ID NO: 71528 - DNA, 120 bp, Artificial Sequence
  ENSG00000077264_81 (sequence is synthesized)
agtttttagatataaagtcttttaaaaacaattttaaggtataattcagtttatataaaattcacctattttcaggtaaacagttcaatgagttttggtaaatgtatatacctatgctac

SEQ ID NO: 71529 - DNA, 120 bp, Artificial Sequence
  ENSG00000077264_82 (sequence is synthesized)
catcaccacaattgagttttagaacaagtccatcaccccagtaaaatccttcatacctacttacagttaactccacccaccccaccctagtcacaggcaagaactaatatggaatctgcc

SEQ ID NO: 71530 - DNA, 120 bp, Artificial Sequence
  ENSG00000077264_83 (sequence is synthesized)
atgtctgacggtctggataatgaagagaaacccccggctcctccactgaggatgaatagtaacccgggattcttcagcactcaaccacagctcaaaccacttcccatggcccctgaagag

SEQ ID NO: 71531 - DNA, 82 bp, Artificial Sequence
  ENSG00000077274_0 (sequence is synthesized)
cagcagcagcggcaacggctcctgggataactcaggcatagttcaacactatgggtcctcctctgaagctcttcaaaaacca

SEQ ID NO: 71532 - DNA, 120 bp, Artificial Sequence
  ENSG00000077274_1 (sequence is synthesized)
tcaacactatgggtcctcctctgaagctcttcaaaaaccagaaataccaggaactgaagcaggaatgcatcaaagacagcagacttttctgtgatccaacatttctgcctgagaatgatt

SEQ ID NO: 71533 - DNA, 120 bp, Artificial Sequence
  ENSG00000077274_2 (sequence is synthesized)
ctcttttctacaaccgactgcttcctggaaaggtggtgtggaaacgtccccaggacatctgtgatgacccccatctgattgtgggcaacattagcaaccaccagctgacccaagggagac

SEQ ID NO: 71534 - DNA, 120 bp, Artificial Sequence
  ENSG00000077274_3 (sequence is synthesized)
tggggcacaagccaatggtttctgcattttcctgtttggctgttcaggagtctcattggacaaagacaattcccaaccataaggaacaggaatgggaccctcaaaaaacagaaaaatacg

SEQ ID NO: 71535 - DNA, 120 bp, Artificial Sequence
  ENSG00000077274_4 (sequence is synthesized)
ctgggatatttcactttcgtttctggcattttggagaatggactgaagtggtgattgatgacttgttgcccaccattaacggagatctggtcttctctttctccacttccatgaatgagt

SEQ ID NO: 71536 - DNA, 120 bp, Artificial Sequence
  ENSG00000077274_5 (sequence is synthesized)
tttggaatgctctgctggaaaaagcttatgcaaagctgctaggctgttatgaggccctggatggtttgaccatcactgatattattgtggacttcacgggcacattggctgaaactgttg

SEQ ID NO: 71537 - DNA, 120 bp, Artificial Sequence
  ENSG00000077274_6 (sequence is synthesized)
acatgcagaaaggaagatacactgagcttgttgaggagaagtacaagctattcggagaactgtacaaaacatttaccaaaggtggtctgatctgctgttccattgagtctcccaatcagg

SEQ ID NO: 71538 - DNA, 120 bp, Artificial Sequence
  ENSG00000077274_7 (sequence is synthesized)
aggagcaagaagttgaaactgattggggtctgctgaagggccatacctataccatgactgatattcgcaaaattcgtcttggagagagacttgtggaagtcttcagtgctgagaaggtgt

SEQ ID NO: 71539 - DNA, 120 bp, Artificial Sequence
  ENSG00000077274_8 (sequence is synthesized)
atatggttcgcctgagaaaccccttgggaagacaggaatggagtggcccctggagtgaaatttctgaagagtggcagcaactgactgcatcagatcgcaagaacctggggcttgttatgt

SEQ ID NO: 71540 - DNA, 120 bp, Artificial Sequence
  ENSG00000077274_9 (sequence is synthesized)
ctgatgatggagagttttggatgagcttggaggacttttgccgcaactttcacaaactgaatgtctgccgcaatgtgaacaaccctatttttggccgaaaggagctggaatcggtgttgg

SEQ ID NO: 71541 - DNA, 120 bp, Artificial Sequence
  ENSG00000077274_10 (sequence is synthesized)
gatgctggactgtggatgatgatcccctgatgaaccgctcaggaggctgctataacaaccgtgataccttcctgcagaatccccagtacatcttcactgtgcctgaggatgggcacaagg

SEQ ID NO: 71542 - DNA, 120 bp, Artificial Sequence
  ENSG00000077274_11 (sequence is synthesized)
tcattatgtcactgcagcagaaggacctgcgcacttaccgccgaatgggaagacctgacaattacatcattggctttgagctcttcaaggtggagatgaaccgcaaattccgcctccacc

SEQ ID NO: 71543 - DNA, 120 bp, Artificial Sequence
  ENSG00000077274_12 (sequence is synthesized)
acctctacatccaggagcgtgctgggacttccacctatattgacacccgcacagtgtttctgagcaagtacctgaagaagggcaactatgtgcttgtcccaaccatgttccagcatggtc

SEQ ID NO: 71544 - DNA, 120 bp, Artificial Sequence
  ENSG00000077274_13 (sequence is synthesized)
gcaccagcgagtttctcctgagaatcttctctgaagtgcctgtccagctcagggaactgactctggacatgcccaaaatgtcctgctggaacctggctcgtggctacccgaaagtagtta

SEQ ID NO: 71545 - DNA, 120 bp, Artificial Sequence
  ENSG00000077274_14 (sequence is synthesized)
aactgtaaacccatatttggtcatcaaatgtggaaaggaggaagtccgttctcctgtccagaagaatacagttcatgccatttttgacacccaggccattttctacagaaggaccactga

SEQ ID NO: 71546 - DNA, 120 bp, Artificial Sequence
  ENSG00000077274_15 (sequence is synthesized)
cattcctattatagtacaggtctggaacagccgaaaattctgtgatcagttcttggggcaggttactctggatgctgaccccagcgactgccgtgatctgaagtctctgtacctgcgtaa

SEQ ID NO: 71547 - DNA, 120 bp, Artificial Sequence
  ENSG00000077274_16 (sequence is synthesized)
gaagggtggtccaactgccaaagtcaagcaaggccacatcagcttcaaggttatttccagcgatgatctcactgagctctaaatctgcaatcccagagaatcctgacaaagcgtgccacc

SEQ ID NO: 71548 - DNA, 120 bp, Artificial Sequence
  ENSG00000077274_17 (sequence is synthesized)
cttttattttccgtcaggtgccaggtcttagttaagattcacaatctttagaaagaatgagattcacaataattaactcttcctctcttctgataaattccccatacctcccaatccaag

SEQ ID NO: 71549 - DNA, 120 bp, Artificial Sequence
  ENSG00000077274_18 (sequence is synthesized)
tagcatctgtagctacataacctatatacctccagcagctggacatggggaggcgacagtcctatctagacatcatacacatttgccaagaaaggatctctggggcttccgggggtgaga

SEQ ID NO: 71550 - DNA, 120 bp, Artificial Sequence
  ENSG00000077274_19 (sequence is synthesized)
ttcaagtaggacaataacaagaggctggacaccctacagatgtctttgatgttttcagttgtttgatatatctcccctgtagggcatgttgaggaaggaggagggctgatcaaggccaag

SEQ ID NO: 71551 - DNA, 120 bp, Artificial Sequence
  ENSG00000077274_20 (sequence is synthesized)
ctggtctagcctgacatcctagctcctgactgaacactatagacttcccagcagcatttcacccagcagccagagccggctttaagtccccaacccttacagacaccactgccaccacca

SEQ ID NO: 71552 - DNA, 120 bp, Artificial Sequence
  ENSG00000077274_21 (sequence is synthesized)
ccaaccacgaccaccaccaccaccaccactcaccaccatcatcacctccggaaagtgtagtcctgccctaacccaagtcacccccgacagtaaattttaccttcatgttgagaaagcttc

SEQ ID NO: 71553 - DNA, 120 bp, Artificial Sequence
  ENSG00000077274_22 (sequence is synthesized)
ctggtgcttaatcaagagctggagttcaatgagtcctagacagtgagaggggcctgagcttcagctcaatggaagcctgctgtgtgccacaagacggaaaagtggaagaagctgcagtgg

SEQ ID NO: 71554 - DNA, 120 bp, Artificial Sequence
  ENSG00000077274_23 (sequence is synthesized)
gagacaaagcctcggtcccccacccatccacacacacctacactcacacacgcgcacatgggcgcgcacgaactaccattcaggcagtcagtgggcaagaggaaagataagtaagtacca

SEQ ID NO: 71555 - DNA, 120 bp, Artificial Sequence
  ENSG00000077274_24 (sequence is synthesized)
tacacacctaaaagatgagagaattcatccagacatattacagccagtttggggcccctgactgcaatgtgaaacctctcgctgctgctaggtttacaaacaagcccattgtcctgtgcc

SEQ ID NO: 71556 - DNA, 120 bp, Artificial Sequence
  ENSG00000077274_25 (sequence is synthesized)
tcctaatatcatttgtactgaagaccccatctggggacttgagactttggtcccagcccagactcctcagacttttctctcagttgggatgcttcactcgctgggggtgtttgtttgccc

SEQ ID NO: 71557 - DNA, 120 bp, Artificial Sequence
  ENSG00000077274_26 (sequence is synthesized)
tctcatttttcagtacttctacagaattttctctagagtcagtcattatgaaatgtacttccctccatcttaacctatcaactttctgcccctccttcaaggcccagtataaatgccacc

SEQ ID NO: 71558 - DNA, 120 bp, Artificial Sequence
  ENSG00000077274_27 (sequence is synthesized)
tcctccatgaagccttccctaattccaccccaaacccccaccttcaacaatatttcaacgcttctgcaatgatgaaaaagaaacatagttgtagtacttagcctacctagaccagcaagc

SEQ ID NO: 71559 - DNA, 120 bp, Artificial Sequence
  ENSG00000077274_28 (sequence is synthesized)
attcatttttagctcgctcattttttaccatgttttccagtctgtttaacttctgcagtgccttcactacactgccttacataaaccaaatcacaataaagttcatattcagtacattga

SEQ ID NO: 71560 - DNA, 120 bp, Artificial Sequence
  ENSG00000077279_0 (sequence is synthesized)
attgtactgaaatgcaaagactgcttcctaagctggagatgctaaccttgggtagctccttctgttctcttcaaggggaattttgtcaggctatggattcatttacaactgttagtcatg

SEQ ID NO: 71561 - DNA, 120 bp, Artificial Sequence
  ENSG00000077279_1 (sequence is synthesized)
tgggcatgtgtgaggaaacagatgccagttttaatgtatttagcccgaagttccaatttgataggagccactgtcagtctctgaggttccaccaaaatatggaacttgattttggacact

SEQ ID NO: 71562 - DNA, 120 bp, Artificial Sequence
  ENSG00000077279_2 (sequence is synthesized)
ttgacgaaagagataagacatccaggaacatgcgaggctcccggatgaatgggttgcctagccccactcacagcgcccactgtagcttctaccgaaccagaaccttgcaggcactgagta

SEQ ID NO: 71563 - DNA, 120 bp, Artificial Sequence
  ENSG00000077279_3 (sequence is synthesized)
atgagaagaaagccaagaaggtacgtttctaccgcaatggggaccgctacttcaaggggattgtgtacgctgtgtcctctgaccgttttcgcagctttgacgccttgctggctgacctga

SEQ ID NO: 71564 - DNA, 120 bp, Artificial Sequence
  ENSG00000077279_4 (sequence is synthesized)
cgcgatctctgtctgacaacatcaacctgcctcagggagtgcgttacatttacaccattgatggatccaggaagatcggaagcatggatgaactggaggaaggggaaagctatgtctgtt

SEQ ID NO: 71565 - DNA, 120 bp, Artificial Sequence
  ENSG00000077279_5 (sequence is synthesized)
cctcagacaacttctttaaaaaggtggagtacaccaagaatgtcaatcccaactggtctgtcaacgtaaaaacatctgccaatatgaaagccccccagtccttggctagcagcaacagtg

SEQ ID NO: 71566 - DNA, 120 bp, Artificial Sequence
  ENSG00000077279_6 (sequence is synthesized)
cacaggccagggagaacaaggactttgtgcgccccaagctggttaccatcatccgcagtggggtgaagcctcggaaggctgtgcgtgtgcttctgaacaagaagacagcccactcttttg

SEQ ID NO: 71567 - DNA, 120 bp, Artificial Sequence
  ENSG00000077279_7 (sequence is synthesized)
agcaagtcctcactgatatcacagaagccatcaaactggagaccggggttgtcaaaaaactctacactctggatggaaaacaggtaacttgtctccatgatttctttggtgatgatgatg

SEQ ID NO: 71568 - DNA, 120 bp, Artificial Sequence
  ENSG00000077279_8 (sequence is synthesized)
tgtttattgcctgtggtcctgaaaaatttcgctatgctcaggatgatttttctctggatgaaaatgaatgccgagtcatgaagggaaacccatcagccacagctggcccaaaggcatccc

SEQ ID NO: 71569 - DNA, 120 bp, Artificial Sequence
  ENSG00000077279_9 (sequence is synthesized)
caacacctcagaagacttcagccaagagccctggtcctatgcgccgaagcaagtctccagctgactcaggtaacgaccaagacgcaaacggaacctccagcagccagctctctaccccca

SEQ ID NO: 71570 - DNA, 120 bp, Artificial Sequence
  ENSG00000077279_10 (sequence is synthesized)
agtctaagcagtctcccatctctacgcccaccagtcctggcagcctccggaagcacaaggacctgtacctgcctctgtccttggatgactcggactcgcttggtgattccatgtaaagga

SEQ ID NO: 71571 - DNA, 120 bp, Artificial Sequence
  ENSG00000077279_11 (sequence is synthesized)
gctggacaaggcactaggacctagaaggcatctatccaccctggcaggaatttcttgcttggagctcagacaacaaaggcatagagagattggttttctttctctcagcatctccaccca

SEQ ID NO: 71572 - DNA, 120 bp, Artificial Sequence
  ENSG00000077279_12 (sequence is synthesized)
gctcaagtgtccaacagggctattggtgctttcaagtttttattttgttgttgttgttattttgaaaaacacattgtaatatgttgggtttattttcctgtgatttctcctctgggccac

SEQ ID NO: 71573 - DNA, 120 bp, Artificial Sequence
  ENSG00000077279_13 (sequence is synthesized)
tgatccacagttaccaattatgagagatagattgataaccatcctttggggcagcattccagggatgcaaaatgtgctagtccatgacctttcaatggaaagcttaggtgcctgcgttat

SEQ ID NO: 71574 - DNA, 120 bp, Artificial Sequence
  ENSG00000077279_14 (sequence is synthesized)
atttgccctgtctaattttgcccatacagtcttccttctgtagagggctgtttacatatacagcacttaaaatgtttgtgtgggaaaaaaaaaactcattggcagatccaagaatgacaa

SEQ ID NO: 71575 - DNA, 120 bp, Artificial Sequence
  ENSG00000077279_15 (sequence is synthesized)
acacaagtgccccttttctctggatctcaagaatggtggaggaccctggaaggacagcaaggcagctccccagcctcactcttcactcctgattgaggcccgggtttgttgtccagcacc

SEQ ID NO: 71576 - DNA, 120 bp, Artificial Sequence
  ENSG00000077279_16 (sequence is synthesized)
aattctggctgtcaatggggagaaataaaccaacaacttataattgtgacaccagatgcttaggatcctggtgctgggttagctaagagaatagacagaattggaaaatactgcagacat

SEQ ID NO: 71577 - DNA, 120 bp, Artificial Sequence
  ENSG00000077279_17 (sequence is synthesized)
ttccgaagagtttataaagcacagtgaattcctggtcaatctctccactgaggcaatttggaatcaataagcaattgataatagtttggagtaagggacttcatatacctgattcctcta

SEQ ID NO: 71578 - DNA, 120 bp, Artificial Sequence
  ENSG00000077279_18 (sequence is synthesized)
gaaggctgtctaacataccacatgattacatgaactgtatggtatccatctatctctgttctattgaatgccttgttaacagccaacactgaaaacactgtgagaatttgttttcaggtc

SEQ ID NO: 71579 - DNA, 120 bp, Artificial Sequence
  ENSG00000077279_19 (sequence is synthesized)
tgacacctttcagtctctttttatagcaagaaatcaatatcctttttataaaaattcatgtctgtatttcaggagcaaactcttcaggctccttttttataaactggtgatttttctttt

SEQ ID NO: 71580 - DNA, 120 bp, Artificial Sequence
  ENSG00000077279_20 (sequence is synthesized)
gtctaaaaaacacatgaagaaaatttaccaaaaaaaaaaaaaaaagcagaagaataatgtagtttagaaattatgctgtcactgccaaacagtaacctccaggagaaaacaagatgaata

SEQ ID NO: 71581 - DNA, 120 bp, Artificial Sequence
  ENSG00000077279_21 (sequence is synthesized)
gcagaggccaattcaatagaatcagttttttgatagctttttaacagttatgcttgcattaataatttcaatgtggaccagacattctaattatattttaaatgaaatgttacagcatat

SEQ ID NO: 71582 - DNA, 120 bp, Artificial Sequence
  ENSG00000077279_22 (sequence is synthesized)
tttaagcaactctttttatctataatcctaatatttcatactgaagacacagaaatctttcacttgtctttaacattagaaaggatttctctttactaaggactgatcatttgaaatagt

SEQ ID NO: 71583 - DNA, 120 bp, Artificial Sequence
  ENSG00000077279_23 (sequence is synthesized)
tttcagtcttttgagatacaggtttataacactgcttttttttttctgtaatcatagcccataatggcaaagacaactaaatttaagtgaaggtcatgcatgccaattctgtgtttgctt

SEQ ID NO: 71584 - DNA, 120 bp, Artificial Sequence
  ENSG00000077279_24 (sequence is synthesized)
ttagcagatatgaagatttccttatttctttgtaattgtgcagatattttgaaaggcacagcattcgaagccaagctgctgtttggctactgaatggcttgcagttgttcctccactcta

SEQ ID NO: 71585 - DNA, 120 bp, Artificial Sequence
  ENSG00000077279_25 (sequence is synthesized)
aatggaatgagcttgctgtgtgtgtgtgtggtggtggtgggagggggtggtgcatgtgtgtgtgtgtgtgtgcatctgcagctgcttcaaaattaggaaatactacaggacacccctgta

SEQ ID NO: 71586 - DNA, 120 bp, Artificial Sequence
  ENSG00000077279_26 (sequence is synthesized)
atggattggtggcaactgggtggcactgctgatgtgcactgtgtaggggggaacccagtggtggtggggtagctcagatgcccctagacaagcttcagatgtctgtagctaccagaaaca

SEQ ID NO: 71587 - DNA, 120 bp, Artificial Sequence
  ENSG00000077279_27 (sequence is synthesized)
ttttcggttcaggaaaagtgagatgatggtagtactggtttctggtgaaattgaagaaccccaaatgatgaggatctctttttgccccctctcctttttttgtagacccattcaaaacca

SEQ ID NO: 71588 - DNA, 120 bp, Artificial Sequence
  ENSG00000077279_28 (sequence is synthesized)
ttaataagcccattttactaagcccctatttctttctagaagctcagggttttcttagtgcctcccagaacattttgtagttaattgggaaaaagtgatacttggattagggggtgtggg

SEQ ID NO: 71589 - DNA, 120 bp, Artificial Sequence
  ENSG00000077279_29 (sequence is synthesized)
cataaagaatggtgggaggcctgattttaaacttcaggccagaacccccaatgactccacccatagtctcactttaggtctcatttagtccatcacctttattttaagttgaggaagtgg

SEQ ID NO: 71590 - DNA, 120 bp, Artificial Sequence
  ENSG00000077279_30 (sequence is synthesized)
aggctggtaaagagcaggaccagaggaagaatccagatttccttatgcttgggcctcacactagctctctgagtatttccttgattgcggtatatgtactactagaaaataccaaatgga

SEQ ID NO: 71591 - DNA, 120 bp, Artificial Sequence
  ENSG00000077279_31 (sequence is synthesized)
tatattttctttaggataacctttgaaccaacaatcttcaataacaatagtacatcttccatcttacttttaatcgagtataaggaaatgtttctttatggccattttggagggagcagg

SEQ ID NO: 71592 - DNA, 120 bp, Artificial Sequence
  ENSG00000077279_32 (sequence is synthesized)
ggatgaggcttggcatagtccaaaatttaagtctccaataattaattgcattttaaattggcccactttcaaggcaattttttttgtgtgtctgtaactgagctcctccacccctgtcat

SEQ ID NO: 71593 - DNA, 120 bp, Artificial Sequence
  ENSG00000077279_33 (sequence is synthesized)
tcacttccaattttacccaatccaattttagcactcaagttccattgtgttaatttctgcacggtcaacaaacatcaagtcagcaagcatttgccaccactccctatacttctccctcct

SEQ ID NO: 71594 - DNA, 120 bp, Artificial Sequence
  ENSG00000077279_34 (sequence is synthesized)
acacacacacacacacacacacaatccatctcttgcttgttcctacctcctgatttttcttccctacagaaatagaaatagggacaaagaaggggaaaatgtatatattggggctgggct

SEQ ID NO: 71595 - DNA, 120 bp, Artificial Sequence
  ENSG00000077279_35 (sequence is synthesized)
gctgggctgaacaactaacttcataagtagtattaactaggggtaaattgagagaaaagctccttttctcttcactgttttggaaaggatagccattagcatgactgctttgtgtcctta

SEQ ID NO: 71596 - DNA, 120 bp, Artificial Sequence
  ENSG00000077279_36 (sequence is synthesized)
tggactttagtattagcctagattgaattatagcgttttctagctggaaggaaccttaagatcacatcatctactcctctactccaaatttctcattcttcaggccaggaaaccgagaca

SEQ ID NO: 71597 - DNA, 120 bp, Artificial Sequence
  ENSG00000077279_37 (sequence is synthesized)
cagaggtaaagtaatttccccaaggtcacacagctggctggggcaggattgggtttacaacccacatctcctggctcttattccagggccttttcccactaagtagtattgccttccatt

SEQ ID NO: 71598 - DNA, 120 bp, Artificial Sequence
  ENSG00000077279_38 (sequence is synthesized)
aggctcctgagagttatttctcagggtcatgttgcatcttggagccacatgctgctgccctgatctcagtgggaaatccacccagcaacctaatacagccccttttccctgcattcacct

SEQ ID NO: 71599 - DNA, 120 bp, Artificial Sequence
  ENSG00000077279_39 (sequence is synthesized)
ggcattgagggccaataggagcaatggggtccctggccttgtccatctgattcaggagatcactgctccatcgtgaggagccctctgaatagccccccactgaatgcttgccttgcccaa

SEQ ID NO: 71600 - DNA, 120 bp, Artificial Sequence
  ENSG00000077279_40 (sequence is synthesized)
atggaatggaggaagattgattttctccatcagttcaccttgtgtcatctcataatggttggtctttccaggctgagggaaatgtttcttgtttccagagtagaaaaagaaagagtggaa

SEQ ID NO: 71601 - DNA, 120 bp, Artificial Sequence
  ENSG00000077279_41 (sequence is synthesized)
caatagctttgttcatcctaactttctgagatggcttttcaacattttaaaaaaactagtgtggctaccattcactggcaatgatttcttttagaatatgggagtaagatgagctagaga

SEQ ID NO: 71602 - DNA, 120 bp, Artificial Sequence
  ENSG00000077279_42 (sequence is synthesized)
aaataacctggtctcactgtggttgccctcatccacaatgtccccaaagccatcctgctctgatgaggacaatttccaggtataagcaaggggctttgtgacaaaaatgtaccctggctg

SEQ ID NO: 71603 - DNA, 120 bp, Artificial Sequence
  ENSG00000077279_43 (sequence is synthesized)
atgttaaacattggctcctgtgtttgcaccaaaatagcaagctgtgtgctctatacactcttcccatcgtcttgtgtacactgctcctgtggccttccacagcagaaaccagggcaaaag

SEQ ID NO: 71604 - DNA, 120 bp, Artificial Sequence
  ENSG00000077279_44 (sequence is synthesized)
ggtccaaacacatggttttccttgctgcaaggctcttcctgggaactaagggggtatttattagttcagttctaagagacctccttctgggcttaccccactcctcaggtacttctctct

SEQ ID NO: 71605 - DNA, 120 bp, Artificial Sequence
  ENSG00000077279_45 (sequence is synthesized)
ccttcctccttctcctccacagtcacaagtaaccaaggaacctgaaagtggatgtgtagctatttgaagaaggcaaggaaccctgagattcttctttgaatcctctagtccaagtcttag

SEQ ID NO: 71606 - DNA, 120 bp, Artificial Sequence
  ENSG00000077279_46 (sequence is synthesized)
accagtgattggtgcttaccttgaacaaaattttgtctgtgttcctaatcccttcaatactctgggtacaatgctcccaatcaccctgcacatttgattctaaatggcttttatttttta

SEQ ID NO: 71607 - DNA, 120 bp, Artificial Sequence
  ENSG00000077279_47 (sequence is synthesized)
aaaatccatatccctaggacaagagaacaggatgcctatatccccaaaatgagctccaggacactgatgggaatgatcccaaagatcaccccacctcagaaacgtctgtgccaagagact

SEQ ID NO: 71608 - DNA, 120 bp, Artificial Sequence
  ENSG00000077279_48 (sequence is synthesized)
tccccagatagaaacactgggacagtggtttgaacgacttcttttatggttgtccagtttgctatggaaataaaaggcattgattttttaaaaagatgattggaacctgtctttggccac

SEQ ID NO: 71609 - DNA, 120 bp, Artificial Sequence
  ENSG00000077279_49 (sequence is synthesized)
atagggccacttggatccatttccaggccttactcatatattgccttcactgaagggctttggctttaagtcccagactggtctcccaagtgaaccataagtgttttggagctcatctgg

SEQ ID NO: 71610 - DNA, 120 bp, Artificial Sequence
  ENSG00000077279_50 (sequence is synthesized)
ggtgaggcatgagaatgttgccccatctatcccttcaggaaaaggtgccttccctccctttctcctaaagcctggtccccagaaattgtttttgtctccaaaagtctagtatggtcttta

SEQ ID NO: 71611 - DNA, 120 bp, Artificial Sequence
  ENSG00000077279_51 (sequence is synthesized)
tacacccagactcttagtgttgcgtcctgccttgtttccttgttaaggatctatgcagacctcccgctttggcttagctagcgtgacattggctatcatttgacaagactaacttttttt

SEQ ID NO: 71612 - DNA, 60 bp, Artificial Sequence
  ENSG00000077279_52 (sequence is synthesized)
gcgtgacattggctatcatttgacaagactaacttttttttttttttttttttgacttca

SEQ ID NO: 71613 - DNA, 63 bp, Artificial Sequence
  ENSG00000077279_53 (sequence is synthesized)
tcacctcccaggtcgaatctggctatttttttattattattatttttagtagagatggggttt

SEQ ID NO: 71614 - DNA, 89 bp, Artificial Sequence
  ENSG00000077279_54 (sequence is synthesized)
aagactaattttttatcccttggtttattggcttcaacatcttctggaatcagaggtgattttttcttaccttggatgcctgagactag

SEQ ID NO: 71615 - DNA, 120 bp, Artificial Sequence
  ENSG00000077279_55 (sequence is synthesized)
tcagaggtgattttttcttaccttggatgcctgagactaggggagtatagaattccaattggtaattaaggcatctttctgctcctgatcagaagggcaggttagttgggagaggtcaga

SEQ ID NO: 71616 - DNA, 120 bp, Artificial Sequence
  ENSG00000077279_56 (sequence is synthesized)
tggcacaacagaagtcaccttgtaagtaaggcaaagacttgaaggcattagcgtttctcattactaggtcaataacctgagggaatcaatggctttttgccgctctacctcttgtgtatc

SEQ ID NO: 71617 - DNA, 120 bp, Artificial Sequence
  ENSG00000077279_57 (sequence is synthesized)
tctttgacttttctttctctgtctagtttcctctgttctcagtttatattctatgttatcagtctctctttccacagtacaaacatccatcctttctcctgtgcaattctgtctctccct

SEQ ID NO: 71618 - DNA, 120 bp, Artificial Sequence
  ENSG00000077279_58 (sequence is synthesized)
cttattatctttatttgtactttttccttcctccctgtctaggcattgggcatgtgcctcttcttagcctgtgattttgccttgggactgatgataaattatttccagattcaatcagcc

SEQ ID NO: 71619 - DNA, 120 bp, Artificial Sequence
  ENSG00000077279_59 (sequence is synthesized)
ctggtcctaccccagtccaatcagaagtatgttggtgggaatcaacctgatcctggccctttcttcttctccattttcattcgtaatccccctcagcagatctttacaagcagtttcctt

SEQ ID NO: 71620 - DNA, 120 bp, Artificial Sequence
  ENSG00000077279_60 (sequence is synthesized)
atagctcatgtatctttaggtctttgccttccaagcactgtacagaatactttgtggttcctttttagtctgacattttgtggagcagtgaagcgtgctcagagacataatcagctgaag

SEQ ID NO: 71621 - DNA, 120 bp, Artificial Sequence
  ENSG00000077279_61 (sequence is synthesized)
agaaaaaatccacccatggatttatatcagctaaatactaataattgattttgtttgatgtgcccataatttttaaagctgcaatataatataatgagggaccacaggtaatttctcctg

SEQ ID NO: 71622 - DNA, 120 bp, Artificial Sequence
  ENSG00000077279_62 (sequence is synthesized)
tcatttgttttggctggatgggggtgggggagtaattgcttaaagttttaccattacacattaaactctctataataatcttgtttggggcttgctaactgttgagctgttttaactaaa

SEQ ID NO: 71623 - DNA, 120 bp, Artificial Sequence
  ENSG00000077279_63 (sequence is synthesized)
ctggtaggcaatcggagttgatttaaatgaaaagataatttaacaaatctatactataaaaagagacatttgcttaattgacatgtattttttccttctgagtcacctaaacatttactc

SEQ ID NO: 71624 - DNA, 120 bp, Artificial Sequence
  ENSG00000077279_64 (sequence is synthesized)
ttgacaccaactgttcatgatactgaatagacagtccatataagagaaattagtggacctaaagaagccagattgtaggtgttaatttattaaacagagtgcaaagcccttggaaatgtc

SEQ ID NO: 71625 - DNA, 120 bp, Artificial Sequence
  ENSG00000077279_65 (sequence is synthesized)
actgcttggcaataccatatggaatgccaaaatttacaatgacttttctttataagttatccaaaagggatttgaacaagtaagaggttatgccaaaatgtctccaatgtatggtcctgt

SEQ ID NO: 71626 - DNA, 120 bp, Artificial Sequence
  ENSG00000077279_66 (sequence is synthesized)
aatatattgcagcttgaagccaatgatcccttatgacttgtatacaactaatgcatgttttattgaattttgcatttcccacgtgtggtaagttctttaaaatgtttttgatcacctttt

SEQ ID NO: 71627 - DNA, 120 bp, Artificial Sequence
  ENSG00000077279_67 (sequence is synthesized)
tgtgccattaaacttgtacagaaaatgtttttatggccattttcaaagggagaaagtttaaaatggaaacagcccaccctttctgccctatagctgtagttagaattgagtacctgtagc

SEQ ID NO: 71628 - DNA, 120 bp, Artificial Sequence
  ENSG00000077279_68 (sequence is synthesized)
aaaacagctgtaattggtggttgtagtgttagaggtgttagcttgctagtgactagctttggagagtaaatgcatggtattgtacatcacatttcttaactcgttttaacctctgaaaag

SEQ ID NO: 71629 - DNA, 120 bp, Artificial Sequence
  ENSG00000077279_69 (sequence is synthesized)
aatatattcttctttgtagtccttcttcccacccccttgccctctccctctccctgctcccagttgtcttacagttgtaaatatctgatttgaggcccaataactcttgccaagtaaagt

SEQ ID NO: 71630 - DNA, 120 bp, Artificial Sequence
  ENSG00000077279_70 (sequence is synthesized)
cagcaaacaacaaacaaaccaaaatgtggggaaaaggcatttctcaaccatctctcagcagttattgatcatttcttaaggaacagcattgtgatcaaagactcaactttacgtaaaaat

SEQ ID NO: 71631 - DNA, 120 bp, Artificial Sequence
  ENSG00000077279_71 (sequence is synthesized)
cagtggtaaattggggttgtatttggccatttgattacatttcaggattgaatagttttcagaatcacatgtaatccaaagacagtaggtagtgatgtcccttatccctgcagctgtttt

SEQ ID NO: 71632 - DNA, 120 bp, Artificial Sequence
  ENSG00000077279_72 (sequence is synthesized)
aagatagagacctcagaagactctgcttgaccgatgaccaataattatttgaaaaaaaaagaaaaaatgagagaaataaaacagatatttaagaactttagccacctatttagaatagtt

SEQ ID NO: 71633 - DNA, 120 bp, Artificial Sequence
  ENSG00000077279_73 (sequence is synthesized)
atagccagaaaaaaaaacaagggcatgagttcaaatgcattactatcagtgtcctaggcaatacctaacctactctgaaattgtgattcaaaagcagtatttcaagaggcattctccttt

SEQ ID NO: 71634 - DNA, 120 bp, Artificial Sequence
  ENSG00000077279_74 (sequence is synthesized)
tttggtttgctgaccccacttggactggtaggtttggtgaggcccccataaaccagctggagcagacccttttcatctcctgtgcctgtaacacccctcttcccccaccccctccgcaat

SEQ ID NO: 71635 - DNA, 120 bp, Artificial Sequence
  ENSG00000077279_75 (sequence is synthesized)
tcaatgagggctttcttgggtcagaggacttcaaggttgtctagagaagtttgccatgtgtgtaaggtgctgtgaactgtgagtgctgaagattcgcagcattcaataccaggcagccaa

SEQ ID NO: 71636 - DNA, 120 bp, Artificial Sequence
  ENSG00000077279_76 (sequence is synthesized)
agagctgctcttgcaattattttggctctcaagctctgttcttcatcgcattctcatttctgtgtacatttgcaagatgtgtgtaatgtcattttccaaaaataaaatttgatttcaata

SEQ ID NO: 71637 - DNA, 120 bp, Artificial Sequence
  ENSG00000077279_77 (sequence is synthesized)
gagattggttttctttctctcagcatctccacccaaccagcagaaaaccgcttctacctgggattttcctttggaaaagtctctgaggttccaccaaaatatggaacttgattttggaca

SEQ ID NO: 71638 - DNA, 120 bp, Artificial Sequence
  ENSG00000077279_78 (sequence is synthesized)
cttatttcttatgaatgtcggatagctgcaccagcttggtggggaaagggtttgatgaatagcacaaagacactggctgttccctggaggctgtccctttaaaggagaatcttagtttat

SEQ ID NO: 71639 - DNA, 120 bp, Artificial Sequence
  ENSG00000077279_79 (sequence is synthesized)
tagagagattggttttctttctctcagcatctccacccaaccagcagaaaaccggtgagtggggcttttaagtgattttcaagaagaatgtaacagatgtcaaacgggaaaagcacaagg

SEQ ID NO: 71640 - DNA, 120 bp, Artificial Sequence
  ENSG00000077279_80 (sequence is synthesized)
caaagcctgctctctctgtctctctgtctcctcttctccttttttgccttattctatccgattttttccctaagcttctacctgggattttcctttggaaaagtctctgaggttccacca

SEQ ID NO: 71641 - DNA, 120 bp, Artificial Sequence
  ENSG00000077279_81 (sequence is synthesized)
gattttgtctgcgcaatctttttgctaccccgcaatttcctgttggttataaatgaaacctttctagctgttaatgcagcctgtgaatttttttaaaagcatgtaattaatcataggagg

SEQ ID NO: 71642 - DNA, 120 bp, Artificial Sequence
  ENSG00000077279_82 (sequence is synthesized)
aatgctgagctcagcataggtcatggtgacattggaaaaaaggcggaattgagcctggcagacccattaggcaccagtctttcttatctcctgtcctcctggtcccttgcaaatatattg

SEQ ID NO: 71643 - DNA, 120 bp, Artificial Sequence
  ENSG00000077279_83 (sequence is synthesized)
aagcagcagatgggtcacaggcttttttcaaccagttcttttcacaagcagcagattgcagatctggatctggctaatatttaaaatcccttcttttttccttctccttgtccctttttg

SEQ ID NO: 71644 - DNA, 120 bp, Artificial Sequence
  ENSG00000077312_0 (sequence is synthesized)
ctctccgcacgcgggctggagaagcgggtcctacgcacgctttgttgtcgcgctttgcctccgtccttgcccctactcccgccttacctgacttccttttcggaggaagatccttgagca

SEQ ID NO: 71645 - DNA, 120 bp, Artificial Sequence
  ENSG00000077312_1 (sequence is synthesized)
gccgacgttgggacaaaggatttggagaaacccagggctaaagtcacgtttttcctcctttaagacttacctcaacacttcactccatggcagttcccgagacccgccctaaccacacta

SEQ ID NO: 71646 - DNA, 120 bp, Artificial Sequence
  ENSG00000077312_2 (sequence is synthesized)
tttatatcaacaacctcaatgagaagatcaagaaggatgagctaaaaaagtccctgtacgccatcttctcccagtttggccagatcctggatatcctggtatcacggagcctgaagatga

SEQ ID NO: 71647 - DNA, 120 bp, Artificial Sequence
  ENSG00000077312_3 (sequence is synthesized)
ggggccaggcctttgtcatcttcaaggaggtcagcagcgccaccaacgccctgcgctccatgcagggtttccctttctatgacaaacctatgcgtatccagtatgccaagaccgactcag

SEQ ID NO: 71648 - DNA, 120 bp, Artificial Sequence
  ENSG00000077312_4 (sequence is synthesized)
atatcattgccaagatgaaaggcaccttcgtggagcgggaccgcaagcgggagaagaggaagcccaagagccaggagaccccggccaccaagaaggctgtgcaaggcgggggagccaccc

SEQ ID NO: 71649 - DNA, 120 bp, Artificial Sequence
  ENSG00000077312_5 (sequence is synthesized)
ccgggccagccgccctacatgccgccccctggtatgatccccccgccaggccttgcacctggccagatcccaccaggggccatgcccccgcagcagcttatgccaggacagatgccccct

SEQ ID NO: 71650 - DNA, 120 bp, Artificial Sequence
  ENSG00000077312_6 (sequence is synthesized)
gcccagcctctttctgagaatccaccgaatcacatcttgttcctcaccaacctgccagaggagaccaacgagctcatgctgtccatgcttttcaatcagttccctggcttcaaggaggtc

SEQ ID NO: 71651 - DNA, 120 bp, Artificial Sequence
  ENSG00000077312_7 (sequence is synthesized)
cgtctggtacccgggcggcatgacatcgccttcgtggagtttgacaatgaggtacaggcaggggcagctcgcgatgccctgcagggctttaagatcacgcagaacaacgccatgaagatc

SEQ ID NO: 71652 - DNA, 120 bp, Artificial Sequence
  ENSG00000077312_8 (sequence is synthesized)
tcctttgccaagaagtagcaccttttccccccatgcctgccccttcccctgttctggggccacccctttcccccttggctcagccccctgaaggtaagtccccccttgggggccttcttg

SEQ ID NO: 71653 - DNA, 120 bp, Artificial Sequence
  ENSG00000077312_9 (sequence is synthesized)
gagccgtgtgtgagtgagtggtcgccacacagcattgtacccagagtctgtccccagacattgcacctggcgctgttaggccggaattaaagtggctttttgaggtttggtttttcacaa

SEQ ID NO: 71654 - DNA, 120 bp, Artificial Sequence
  ENSG00000077312_10 (sequence is synthesized)
aagctttgtggtttggtctcagggaagtagcaggcgccggttgagagaactacggccctgtcggaaggtaacctccggtgcaaacgaccatcggcggcaggcgagcgacttacctcaaca

SEQ ID NO: 71655 - DNA, 120 bp, Artificial Sequence
  ENSG00000077312_11 (sequence is synthesized)
tttgtggtttggtctcagggaagtagcaggcgccggttgagagaactacggccctgtcggaaggtaacctccggtgcaaacgaccatcggcggcaggcgagcggtacgcttggcgtccgg

SEQ ID NO: 71656 - DNA, 120 bp, Artificial Sequence
  ENSG00000077312_12 (sequence is synthesized)
gccttcctgggcccgtctgaggaaacttgctgctcgaggccaggctgcctaggacctgtcccttttttctatactggctcccacatccgggttttttctccgggacggcccttcggatgc

SEQ ID NO: 71657 - DNA, 120 bp, Artificial Sequence
  ENSG00000077312_13 (sequence is synthesized)
agaaagctttgtggtttggtctcagggaagtagcaggcgccggttgagagaactacggccctgtcggaagacttacctcaacacttcactccatggcagttcccgagacccgccctaacc

SEQ ID NO: 71658 - DNA, 120 bp, Artificial Sequence
  ENSG00000077312_14 (sequence is synthesized)
gggcaggccccctgaggaggtggtactgaatgaggaagtagcagtgggggtgggccctgggcagaggaattggcatgctggttggagggtacggaaggttagggtaggctggagtggtgc

SEQ ID NO: 71659 - DNA, 120 bp, Artificial Sequence
  ENSG00000077312_15 (sequence is synthesized)
aaaagaatcactcatttatcgagtgtttactacgtgccggatgctgtcctgagcactttgcatgtatgtgcacatgttcattatatagcagctctctgtaagcacatcttacagaagagt

SEQ ID NO: 71660 - DNA, 120 bp, Artificial Sequence
  ENSG00000077312_16 (sequence is synthesized)
agaagagtgtacttggccacttgagtggttcctggctgcttctgtgattgttaggtcttgagagattatggacccgaggcattctgggtaccccatcaattggctgatggtcttctattt

SEQ ID NO: 71661 - DNA, 120 bp, Artificial Sequence
  ENSG00000077327_0 (sequence is synthesized)
agagaagcggctcccgtcggaggccgagtcgtcgccacgatcgcccccttggtggactcgcaggccgagcggcttccccgcagagctcgaggagggcagacggcggcgggggcgccatga

SEQ ID NO: 71662 - DNA, 120 bp, Artificial Sequence
  ENSG00000077327_1 (sequence is synthesized)
gtcagaggcaggtgctgcaagtgttcgagcaataccagaaggccaggacccagttcgtgcagatggtggcggagctggcgactagaccccaaaacatcgagacgctgcagaacgcgggtg

SEQ ID NO: 71663 - DNA, 120 bp, Artificial Sequence
  ENSG00000077327_2 (sequence is synthesized)
taatgtctttgctgagaactcttcttctggacgtggtcccaacaattcaacagactgctgctttggctcttgggagactggccaattataatgatgacctagcagaagctgttgtgaagt

SEQ ID NO: 71664 - DNA, 120 bp, Artificial Sequence
  ENSG00000077327_3 (sequence is synthesized)
gcgacattcttccacagcttgtttattcattggcagaacagaatcgcttctacaagaaagcagctgcctttgtgttacgagcagttggtaaacattctccccagctagctcaggcaatag

SEQ ID NO: 71665 - DNA, 120 bp, Artificial Sequence
  ENSG00000077327_4 (sequence is synthesized)
tcgattgtggagcactggatacgctggtcatatgcttggaagattttgaccctggagtcaaggaggctgcagcctgggcacttagatatattgcaagacataatgcagaactgtcacaag

SEQ ID NO: 71666 - DNA, 120 bp, Artificial Sequence
  ENSG00000077327_5 (sequence is synthesized)
ctgtggtggatgcaggagctgttcctcttttagtactctgtatccaggagccagaaattgctttgaaaaggattgctgcttcggccctcagtgatattgcaaagcattctccagagttag

SEQ ID NO: 71667 - DNA, 120 bp, Artificial Sequence
  ENSG00000077327_6 (sequence is synthesized)
cacagacagtagtggatgcaggagctgttgctcatttagcccagatgatcctgaaccctgatgctaaattgaagcatcagatcctttcagctctcagtcaggtttcaaaacattccgtgg

SEQ ID NO: 71668 - DNA, 120 bp, Artificial Sequence
  ENSG00000077327_7 (sequence is synthesized)
atctggcagaaatggttgttgaagcagagatttttccagttgtacttacctgtctgaaggacaaggatgaatacgtgaagaaaaatgcttctactttaattagagagattgcaaaacata

SEQ ID NO: 71669 - DNA, 120 bp, Artificial Sequence
  ENSG00000077327_8 (sequence is synthesized)
cacccgagctttcacagctggtagttaacgcaggaggggttgctgccgtgattgactgcattgggtcctgcaaagggaacacacggctgcctggcatcatgatgcttggttatgtagcag

SEQ ID NO: 71670 - DNA, 120 bp, Artificial Sequence
  ENSG00000077327_9 (sequence is synthesized)
ctcattctgagaacctagcaatggcagtcatcatttctaagggtgtaccccagttgtcagtctgcttgtcagaagaaccggaagatcatattaaggctgcagctgcttgggccttaggac

SEQ ID NO: 71671 - DNA, 120 bp, Artificial Sequence
  ENSG00000077327_10 (sequence is synthesized)
atactttgccagttctgctttctttgtacatgtcaacagaaagttctgaggatctccaagtaaaaagtaaaaaagccataaagaatatcctgcaaaaatgtacctacttaccagcccttg

SEQ ID NO: 71672 - DNA, 120 bp, Artificial Sequence
  ENSG00000077327_11 (sequence is synthesized)
aaccatttctatatgatgctcctcccaatattctgaaacatgtggttggacagttcagtaaggtgctgccgcatgatagcaaagctcgacgactttttgtaacaagtggtggccttaaaa

SEQ ID NO: 71673 - DNA, 120 bp, Artificial Sequence
  ENSG00000077327_12 (sequence is synthesized)
aagttcaagagataaaagcagaacctggttctctccttcaagaatacatcaacagtattaacagttgttaccccgaggaaatagtgaggtattattcccctggatattcagatacacttc

SEQ ID NO: 71674 - DNA, 120 bp, Artificial Sequence
  ENSG00000077327_13 (sequence is synthesized)
tgcagagggtggacagctatcaaccacttaataactgagcaaagttatattgtgatactcaaattcacagcagagtagttttgagtaacagtaattaaatccttctaaatatttgaacta

SEQ ID NO: 71675 - DNA, 120 bp, Artificial Sequence
  ENSG00000077327_14 (sequence is synthesized)
agtatattctagatttatttaatgggaaatacctttagataatattttctaaatttatgtaatactttaaacattcgtagcttgaatatgtgaggaactattcatggtcattcgcatgca

SEQ ID NO: 71676 - DNA, 120 bp, Artificial Sequence
  ENSG00000077327_15 (sequence is synthesized)
taggatttgttctacaggtagattttaaaaacacgttaaagggccttaaggcattttgttattctgttaaaaaccacacacactcgtacatgcagacacctccaatgagatatagttaag

SEQ ID NO: 71677 - DNA, 120 bp, Artificial Sequence
  ENSG00000077327_16 (sequence is synthesized)
agatggcattcaaaaaccctaaattattctagccaatttgtcataggcataggcaaggaaagctggccttgctaactatatagtagtatacacaagagaaatctttgaaggaggaaactg

SEQ ID NO: 71678 - DNA, 120 bp, Artificial Sequence
  ENSG00000077327_17 (sequence is synthesized)
atgacagatatacagggcacttgaaggagactctgatgctagttatataagtgcattaacttaagacacggactctgtgggtaacctgttaggttttactaagaatttaggaaaaattta

SEQ ID NO: 71679 - DNA, 120 bp, Artificial Sequence
  ENSG00000077327_18 (sequence is synthesized)
ctcctctttatcacaagttttccaaacctccttccccaccctatctaaagtgttccttacctttcatgggcccagcgagggtagaattcagaatagagagttatactcctgcatacatgc

SEQ ID NO: 71680 - DNA, 120 bp, Artificial Sequence
  ENSG00000077327_19 (sequence is synthesized)
tctccctctcattgaaaggtttcttagtctagctctgctcatgaatgaacaaagaagcaggcatgtaaaatggatccttgtcctaacgtcactttcccaagtttcaaaagtcacattttc

SEQ ID NO: 71681 - DNA, 120 bp, Artificial Sequence
  ENSG00000077327_20 (sequence is synthesized)
aggtatttaaggaatagtttgaagctaataccatcaggctcagagtttacatgcatttttacttaggaagtggtaaacgggtgaaagagggtttcaataaaattttaaataaaaacagca

SEQ ID NO: 71682 - DNA, 120 bp, Artificial Sequence
  ENSG00000077327_21 (sequence is synthesized)
agaatttttggagagaaaaacacaaccagatgactctctgcacccctttcccaggccatgggcacctgcctgattcctatggtcatgaaggaacatttttctgatgtggccatattcatg

SEQ ID NO: 71683 - DNA, 120 bp, Artificial Sequence
  ENSG00000077327_22 (sequence is synthesized)
gtgtcagtgcaatctcatcagagatgaggctccccactcaagctgccatgtgacttgacagctcttcataccgttcgctcaccagagtggtgtccagtttcaggagcacggaagaaaaca

SEQ ID NO: 71684 - DNA, 120 bp, Artificial Sequence
  ENSG00000077327_23 (sequence is synthesized)
ctttgaaacgttcaatattagaatgtagtttttctgttttcacatctaggttttatatccactgtgtcaaaatgtggactttgaaatacgatgtgaggccaatatgtacctttatttctc

SEQ ID NO: 71685 - DNA, 120 bp, Artificial Sequence
  ENSG00000077327_24 (sequence is synthesized)
tcttgatctcttccccctgccaaattaattaatgatctgactgacacgcacatttccaattcaaactggaatgtcatttaagacatttttgtactaatttaacatgtgctttactaaaga

SEQ ID NO: 71686 - DNA, 120 bp, Artificial Sequence
  ENSG00000077327_25 (sequence is synthesized)
gtacccaaatatagagttcaaagtaaccagtttttaaattgtgaatacctgattataaaaggcctatagattctgagtttcatagttccctgcatattactattctaccttaagctcaca

SEQ ID NO: 71687 - DNA, 120 bp, Artificial Sequence
  ENSG00000077327_26 (sequence is synthesized)
tttacattaatgagactatcacaggtagaaaagagatgttgagtaacaacaaaaaagttattatctaaatgcaaaaaaaccccaaaatgatgtttattatttacaggtacttcagagtaa

SEQ ID NO: 71688 - DNA, 120 bp, Artificial Sequence
  ENSG00000077327_27 (sequence is synthesized)
tgttaccccgaggaaatagtgagtaaattctttccagagttgcaagtttgtgcactttttaggaagtttatgagaactccttgaccaaaagagttccaataggtattattcccctggata

SEQ ID NO: 71689 - DNA, 120 bp, Artificial Sequence
  ENSG00000077327_28 (sequence is synthesized)
cccggagcccgaacccccgtcgccccccgcgcactgagtccccgacgcctccgccccgctgccctgcccgtggagctcttggggagccgcagtgtggggaccggagttcgcaaaagcatc

SEQ ID NO: 71690 - DNA, 120 bp, Artificial Sequence
  ENSG00000077348_0 (sequence is synthesized)
gacaactgcagccgcacgtgggctcggcgcgatggaggaggagacgcatactgacgccaaaatccgtgctgaaaatggaacagggtccagccctcggggtcctggctgcagcctccggca

SEQ ID NO: 71691 - DNA, 120 bp, Artificial Sequence
  ENSG00000077348_1 (sequence is synthesized)
ctttgcctgcgaacagaacctgctgtcgcggccagatggctctgcttccttcctgcaaggtgacacctctgtcctggcgggtgtgtacgggccggccgaggtgaaggtcagcaaagagat

SEQ ID NO: 71692 - DNA, 120 bp, Artificial Sequence
  ENSG00000077348_2 (sequence is synthesized)
tttcaacaaggccacactcgaagtgatcctgaggccgaagattgggctgcctggtgttgcagagaagagccgggagcggctgatcaggaacacgtgcgaggcggtggtgctgggcacgtt

SEQ ID NO: 71693 - DNA, 120 bp, Artificial Sequence
  ENSG00000077348_3 (sequence is synthesized)
gcacccccgcacctccatcaccgtggtgctgcaggttgtcagcgatgccggctctctcctggcctgttgtctgaatgccgcctgcatggcattggtggatgcaggtgtgcccatgcgggc

SEQ ID NO: 71694 - DNA, 120 bp, Artificial Sequence
  ENSG00000077348_4 (sequence is synthesized)
ggaccctcgtgctggatcctacatccaagcaagaaaaggaggcccgggcagtcctgacctttgccctggacagcgtggaacggaagctgctgatgtccagcaccaaggggctctactcag

SEQ ID NO: 71695 - DNA, 120 bp, Artificial Sequence
  ENSG00000077348_5 (sequence is synthesized)
acactgagctccagcagtgcctggctgcggcccaggccgcttcgcaacacgtcttccgtttctaccgggaatcgctgcagaggcgttactccaagagctgaggcaagctggggcaagggg

SEQ ID NO: 71696 - DNA, 120 bp, Artificial Sequence
  ENSG00000077348_6 (sequence is synthesized)
ccgctcccattgcctccacccactcaccccctacagcctgaagcaaaccagcagcccagccttgcctctctgacccatgggctccttgagcctgcagctctgtaaccacagggctcctgt

SEQ ID NO: 71697 - DNA, 120 bp, Artificial Sequence
  ENSG00000077348_7 (sequence is synthesized)
ggggaggccttggcctgtgacagcccccaggcctgggggcacagatccccccagcaaggataacattcaaaggagctcacatttatggaatggatgaatcaataaattaattcactttaa

SEQ ID NO: 71698 - DNA, 120 bp, Artificial Sequence
  ENSG00000077348_8 (sequence is synthesized)
atataccctcactgctagccagaaagccttcaaacacttgacaggtaccagctcactgaagaaggagagcaaacagcctgggtgcttacttatgtgccaggcactgttctgtgtgcctta

SEQ ID NO: 71699 - DNA, 120 bp, Artificial Sequence
  ENSG00000077348_9 (sequence is synthesized)
tgcacattaactcatgtaatatagcacatgcccttatgatccccgtggaagtggcagagccaagacttagacccagaccgtctagttctagagcccacggaccctggcagatgagtgttc

SEQ ID NO: 71700 - DNA, 120 bp, Artificial Sequence
  ENSG00000077348_10 (sequence is synthesized)
gtcaggccttgccttcttcccactggaatcttccatcatccctgcaggtgttgcagagaagagccgggagcggctgatcaggaacacgtgcgaggcggtggtgctgggcacgttgcaccc

SEQ ID NO: 71701 - DNA, 120 bp, Artificial Sequence
  ENSG00000077380_0 (sequence is synthesized)
ttctcgatcgtgtcagtttgtaaggcgagggcggaagttggattcctggcctgagaatattaggcgtagttttccagtttttggcaaagcggaaatacttaaggcccctgggttgactgg

SEQ ID NO: 71702 - DNA, 120 bp, Artificial Sequence
  ENSG00000077380_1 (sequence is synthesized)
gttctttgttttatctaccggcttctgctttacgacaggtcacaaacatgtcagacaaaagtgaattaaaggctgagttggaacgtaagaagcagcgactggcccaaatcagagaggaaa

SEQ ID NO: 71703 - DNA, 120 bp, Artificial Sequence
  ENSG00000077380_2 (sequence is synthesized)
agaagagaaaagaagaagaaaggaaaaaaaaagaaacagaccagaagaaggaagctgttgctcctgtgcaagaagaatcagatcttgaaaaaaaaaggagagaagctgaagcattgcttc

SEQ ID NO: 71704 - DNA, 120 bp, Artificial Sequence
  ENSG00000077380_3 (sequence is synthesized)
aaagcatggggctaactccagaatcccccattgttttttctgaatactgggtccctcctcctatgtctccatcctccaaatctgtgagcactccaagtgaagctggaagccaagactctg

SEQ ID NO: 71705 - DNA, 120 bp, Artificial Sequence
  ENSG00000077380_4 (sequence is synthesized)
gagatggcgccgtgggatctaggacgctgcattgggatacagatccatcagttcttcagcttcactcagattccgatttgggacgaggacctattaaacttggaatggctaaaatcacgc

SEQ ID NO: 71706 - DNA, 120 bp, Artificial Sequence
  ENSG00000077380_5 (sequence is synthesized)
aagtcgactttcctcctcgagaaattgtcacgtatacaaaggaaactcagactccagttatggctcaacccaaagaagatgaagaggaagatgatgatgtagtggctcctaaaccaccta

SEQ ID NO: 71707 - DNA, 120 bp, Artificial Sequence
  ENSG00000077380_6 (sequence is synthesized)
ttgaacctgaagaagagaaaactttaaagaaagatgaggaaaatgatagtaaagctccccctcatgagctgactgaagaagaaaagcaacaaatcttgcactctgaggaatttttaagtt

SEQ ID NO: 71708 - DNA, 120 bp, Artificial Sequence
  ENSG00000077380_7 (sequence is synthesized)
tctttgaccattctacaagaattgtagaaagagctctttctgagcagattaacatcttctttgactatagtgggagagatttggaagacaaagaaggagagattcaagcaggtgctaaac

SEQ ID NO: 71709 - DNA, 120 bp, Artificial Sequence
  ENSG00000077380_8 (sequence is synthesized)
tgtcattaaatcgacaattttttgacgaacgttggtcaaagcatcgggtggttagttgtttggattggtcatctcagtatccggagttactcgtggcttcctataacaacaatgaagatg

SEQ ID NO: 71710 - DNA, 120 bp, Artificial Sequence
  ENSG00000077380_9 (sequence is synthesized)
cccctcatgagcctgatggtgtggcccttgtatggaatatgaaatacaaaaaaactaccccagagtatgtgtttcactgccagtcagctgtgatgtctgccacatttgcaaaatttcatc

SEQ ID NO: 71711 - DNA, 120 bp, Artificial Sequence
  ENSG00000077380_10 (sequence is synthesized)
ctccactgtcagcagctgcacacacacaccctgtatattgtgtaaatgttgttggaacacaaaatgctcacaatctgattagcatctctactgatggaaaaatttgttcatggagtctgg

SEQ ID NO: 71712 - DNA, 120 bp, Artificial Sequence
  ENSG00000077380_11 (sequence is synthesized)
acatgctttcccatccacaggatagcatggagttggttcataaacagtcaaaagcagtagctgtgacatctatgtccttccctgttggagatgtcaacaactttgttgttgggagtgaag

SEQ ID NO: 71713 - DNA, 120 bp, Artificial Sequence
  ENSG00000077380_12 (sequence is synthesized)
aaggttctgtgtacacagcatgccgccatggcagcaaagctggaatcagtgagatgtttgaggggcatcaaggaccaatcactggcatccattgtcatgcagctgttggagcagtagact

SEQ ID NO: 71714 - DNA, 120 bp, Artificial Sequence
  ENSG00000077380_13 (sequence is synthesized)
tctcacatctttttgtcacttcatcgtttgactggacagtaaagctttggacaactaagaataacaagcctttgtattcatttgaagataatgcagactatgtttatgatgttatgtggt

SEQ ID NO: 71715 - DNA, 120 bp, Artificial Sequence
  ENSG00000077380_14 (sequence is synthesized)
cacctacccacccagccctgtttgcctgtgtggatggcatggggagattggatttgtggaatctcaataatgacacagaggtaccaactgccagcatttctgtggagggtaatcctgctc

SEQ ID NO: 71716 - DNA, 120 bp, Artificial Sequence
  ENSG00000077380_15 (sequence is synthesized)
ttaatcgtgtgagatggacccattctggcagagagattgctgtgggtgattctgaaggacagattgttatatacgatgtgggagagcagattgctgttccccgcaatgatgaatgggcac

SEQ ID NO: 71717 - DNA, 120 bp, Artificial Sequence
  ENSG00000077380_16 (sequence is synthesized)
ggtttggccgaacacttgcagaaattaatgcaaaccgagctgatgcagaggaggaagcagctacccgaatacctgcttagttcctgaaaaggggagtgtaactagtggatttgggaaagg

SEQ ID NO: 71718 - DNA, 120 bp, Artificial Sequence
  ENSG00000077380_17 (sequence is synthesized)
ttcttaagtagatcctgagactatttgcatgcttctgtctaaatgataattaaaaggaaatttcatggattaaaccatgggtttaatgcagcaaggaaacttacaatgtccctttatata

SEQ ID NO: 71719 - DNA, 120 bp, Artificial Sequence
  ENSG00000077380_18 (sequence is synthesized)
taacatgcatcttgttttggatttgtgtcattttttaatatagctgattgacttcacagaaagcagcttttttgaattctaatacataggtgtatatttggtattagttattttgagttc

SEQ ID NO: 71720 - DNA, 120 bp, Artificial Sequence
  ENSG00000077380_19 (sequence is synthesized)
ttttcaacttataacactgtatacagttatttctaaagcacagatgaaataagttctgcatatttttaaataatcacagttccctgttatacagataatgttctcactacccataatatg

SEQ ID NO: 71721 - DNA, 120 bp, Artificial Sequence
  ENSG00000077380_20 (sequence is synthesized)
taggaacattgtttctccttagccgtagtatgcatacacctatccatgttcattctgacatcctttgttgtctttataattcatgtggtagttacctataaataaaaacaaatatgcgtt

SEQ ID NO: 71722 - DNA, 120 bp, Artificial Sequence
  ENSG00000077380_21 (sequence is synthesized)
catccctctttgtgtgctttggaaagccgcggagctggtggtggctacagttggtgttgggggcttaggcgagggacgttaccgggaagttgcaggcgggaggactcttccccatccagt

SEQ ID NO: 71723 - DNA, 120 bp, Artificial Sequence
  ENSG00000077380_22 (sequence is synthesized)
ttggcagcaattgtaaataatatttataatctggtgatattaaaagtgaaaagttacaagggggagaaggaatgctctcctttgaaaattagtggccacatttggtgatggatgagatga

SEQ ID NO: 71724 - DNA, 120 bp, Artificial Sequence
  ENSG00000077380_23 (sequence is synthesized)
agatgcatccttccataatcttgcctttttaaaaaaattataaagctcaaatgcattttgccagaaaaattgcatgaatcttcagcatgcattgttaactttttgtcttttcccctttct

SEQ ID NO: 71725 - DNA, 120 bp, Artificial Sequence
  ENSG00000077380_24 (sequence is synthesized)
ttctgctgttcattttcattcatatatttttgatttttggtttgccattgtttttttcttttttgttaattacttcattaaattatttttgaaacgtcataagctgagcaacctctccgt

SEQ ID NO: 71726 - DNA, 120 bp, Artificial Sequence
  ENSG00000077380_25 (sequence is synthesized)
gcggtgactcattgcggcccggcgagaggagtccactcctttcccttctcgaccctccagaggcggcctggggagccttgaggcttgtccggcgcccactggcttcttccggacgccctg

SEQ ID NO: 71727 - DNA, 120 bp, Artificial Sequence
  ENSG00000077380_26 (sequence is synthesized)
gactgttcttccctcaaggcctccctgcctgtgttccacgtcgcaactcgaagggcggcttggcagttcctgctgacatccccgcccggcccagctttggggaggaaaggcggggagacc

SEQ ID NO: 71728 - DNA, 120 bp, Artificial Sequence
  ENSG00000077380_27 (sequence is synthesized)
agttttaagaacgtgaacatgtcggtcatggaggaaggctctggcttctttgacgttgaacaaaatataatgtgcctagcgtagcatacagttacgtatggaagttctcttcaccagccg

SEQ ID NO: 71729 - DNA, 120 bp, Artificial Sequence
  ENSG00000077380_28 (sequence is synthesized)
tttgtatggagctgtttagaggtgtagaaagagtggaataagaaacacggtctcttgcttttagtttgttcaaacaaatcttggaagatattgtgtatatatttcaggtcacaaacatgt

SEQ ID NO: 71730 - DNA, 120 bp, Artificial Sequence
  ENSG00000077380_29 (sequence is synthesized)
gattgacttgatatattttacatattttccttgtgtctctaaaattattaatcttttatttggaattgtctttttttcagatatgctagtacatggttattttatttgttcaaaagagct

SEQ ID NO: 71731 - DNA, 120 bp, Artificial Sequence
  ENSG00000077380_30 (sequence is synthesized)
tggacacatattttaattaaatgttttaacattaaaacatttaaaataattaactgttctaatttaaaattgtactaatgtcccagtaggcataatgctagagatgtctctcttgatgaa

SEQ ID NO: 71732 - DNA, 120 bp, Artificial Sequence
  ENSG00000077380_31 (sequence is synthesized)
atgttaggtatttgtatttgcagaataataatctgataaagacaaataactaggattataaaacagttcttattatgcatagcatttcttttcttcttgattcttctgagcagtatccgg

SEQ ID NO: 71733 - DNA, 120 bp, Artificial Sequence
  ENSG00000077380_32 (sequence is synthesized)
aagcatggggctaactccagaatcccccattgctgagcaacctctccgtgtagtaacagcggatacctgtctatttcactatttagtccctcctcctatgtctccatcctccaaatctgt

SEQ ID NO: 71734 - DNA, 120 bp, Artificial Sequence
  ENSG00000077380_33 (sequence is synthesized)
accattttatagcctagcttgttatccataaataattaacttgggttgtctgactttagttgttctaaagcagatctattattatacaatattagtttcccataatctgcaaataatgtc

SEQ ID NO: 71735 - DNA, 120 bp, Artificial Sequence
  ENSG00000077380_34 (sequence is synthesized)
taatactaaccagaacatgtgttttttaattgtgaatagtactttagctttagctattcatagaatgtatttgcttgactaacttatggccttttttgctaatgcttcatggttgtccta

SEQ ID NO: 71736 - DNA, 120 bp, Artificial Sequence
  ENSG00000077380_35 (sequence is synthesized)
caaccatttaggacgctgcattgggatacagatccatcagttcttcagcttcactcagattccgatttgggacgaggacctattaaacttggaatggctaaaatcacgcaagtcgacttt

SEQ ID NO: 71737 - DNA, 120 bp, Artificial Sequence
  ENSG00000077420_0 (sequence is synthesized)
agtctttggtggaaccatcactaggccccaatcccttagtccctcttgcgtcgaggctgcaaaatggttccattcgccaggagacgctcctgagagaagggcgcgcgcggcacaggggcc

SEQ ID NO: 71738 - DNA, 120 bp, Artificial Sequence
  ENSG00000077420_1 (sequence is synthesized)
ttccttgcacctcggagcaaagcagctcggatagcgccacacgtctgcgcgctgcgtgggaagggcagggctgacagcacttcctccccggggcagcgacctggagcccgggtgcggcag

SEQ ID NO: 71739 - DNA, 120 bp, Artificial Sequence
  ENSG00000077420_2 (sequence is synthesized)
tctgcaccgcgcgtcgctttcccggccggagtctcgccgccttcccgcgccccgcagcgccccgcagagcagtcgagatgggtgagtcaagtgaagacatagaccaaatgttcagcactt

SEQ ID NO: 71740 - DNA, 120 bp, Artificial Sequence
  ENSG00000077420_3 (sequence is synthesized)
tgctgggagagatggatcttctgactcagagtttaggagttgacactctccctcctcctgaccctaatccacccagagctgaatttaactacagtgtggggtttaaagatttaaatgagt

SEQ ID NO: 71741 - DNA, 120 bp, Artificial Sequence
  ENSG00000077420_4 (sequence is synthesized)
ccttaaatgcactggaagaccaagatttagatgctctcatggcagatctggtagcagacataagtgaggctgagcagaggacaatccaggcacagaaagagtccttgcagaatcaacatc

SEQ ID NO: 71742 - DNA, 120 bp, Artificial Sequence
  ENSG00000077420_5 (sequence is synthesized)
attcagcatctctacaagcatcaattttcagtggtgcagcctctcttggttatggaacaaatgttgctgccactggtatcagccaatatgaggatgacttaccacctccaccagccgatc

SEQ ID NO: 71743 - DNA, 120 bp, Artificial Sequence
  ENSG00000077420_6 (sequence is synthesized)
ctgtgttagaccttccactgccaccaccacctcctgaacctctctctcaggaagaggaagaagcccaagccaaggctgataaaattaagctggcgctggaaaaactgaaggaggccaagg

SEQ ID NO: 71744 - DNA, 120 bp, Artificial Sequence
  ENSG00000077420_7 (sequence is synthesized)
ttaagaagctcgtcgtcaaggtgcacatgaatgataacagcacaaagtcactgatggtggatgagcggcagctggcccgagatgttctggacaaccttttcgagaaaactcattgtgact

SEQ ID NO: 71745 - DNA, 120 bp, Artificial Sequence
  ENSG00000077420_8 (sequence is synthesized)
gcaatgtagactggtgtctttatgaaatctacccggaactacaaattgagaggttttttgaagaccatgaaaatgttgttgaagtcttatcagactggacaagagacacagaaaataaaa

SEQ ID NO: 71746 - DNA, 120 bp, Artificial Sequence
  ENSG00000077420_9 (sequence is synthesized)
tactatttttggagaaagaggagaaatatgctgtatttaaaaacccccagaatttctacttggataacagaggaaaaaaagaaagcaaggaaactaatgagaaaatgaatgctaagaaca

SEQ ID NO: 71747 - DNA, 120 bp, Artificial Sequence
  ENSG00000077420_10 (sequence is synthesized)
cttttacgggcttctggaatttattatgtacccaaaggaaagactaagacatctcgagatctggcgtgttttatacagtttgaaaatgtcaacatttactatgggactcagcataaaatg

SEQ ID NO: 71748 - DNA, 120 bp, Artificial Sequence
  ENSG00000077420_11 (sequence is synthesized)
aaatataaagcgcccactgactattgctttgttttaaagcacccccaaattcagaaggagtcccagtatatcaagtatctctgctgtgatgacacaagaacccttaaccagtgggtcatg

SEQ ID NO: 71749 - DNA, 120 bp, Artificial Sequence
  ENSG00000077420_12 (sequence is synthesized)
ggaatacggatagccaagtatgggaagactctctatgataactaccagcgggctgtggcaaaggctggacttgcctctcggtggacaaacttggggacagtcaatgcagctgcaccagct

SEQ ID NO: 71750 - DNA, 120 bp, Artificial Sequence
  ENSG00000077420_13 (sequence is synthesized)
cagccatctacaggacctaaaacaggcaccacccagcccaatggacagattccccaggctacacattctgtcagtgctgttctccaagaggcccagagacatgctgaaacatcgaaggat

SEQ ID NO: 71751 - DNA, 120 bp, Artificial Sequence
  ENSG00000077420_14 (sequence is synthesized)
aagaagccagccctcgggaaccaccacgacccggcagtgccccgggccccgcacgcccccaagtccagcctgcccccgccccctccggtgcggaggtcctccgacaccagcggcagtccc

SEQ ID NO: 71752 - DNA, 120 bp, Artificial Sequence
  ENSG00000077420_15 (sequence is synthesized)
ggcttgcccgccccacccgacgacttcctgccgccgccgccaccgccgccgcccctcgatgaccctgagctcccgccgccgcccccggacttcatggagccgcccccagacttcgtgccc

SEQ ID NO: 71753 - DNA, 120 bp, Artificial Sequence
  ENSG00000077420_16 (sequence is synthesized)
cgatgaccctgagctcccgccgccgcccccggacttcatggagccgcccccagacttcgtgcccccgcccccgccgtcgtacgcagggatcgcgggctcagagctgcccccgccgccgcc

SEQ ID NO: 71754 - DNA, 120 bp, Artificial Sequence
  ENSG00000077420_17 (sequence is synthesized)
gtccccgactccgccaggccgccccccgcggtggccaagaggcctcctgtgccccccaagaggcaagagaacccagggcaccccggcggagcaggaggcggggagcaagatttcatgtca

SEQ ID NO: 71755 - DNA, 120 bp, Artificial Sequence
  ENSG00000077420_18 (sequence is synthesized)
gacctcatgaaagctttgcaaaagaagagaggcaacgtgtcctagggacgggcatgatgagtgttccagagggagaagcatcgctgaccccgagcgcaggttttgctagcagattgccct

SEQ ID NO: 71756 - DNA, 120 bp, Artificial Sequence
  ENSG00000077420_19 (sequence is synthesized)
gacatcttgttcatttcagataaaatgtgatgggaaacttctcactgatgtgctcaagtacaggcataaccattaacccagtagagttcagaatatctgcccaaatgtacatatcgttcc

SEQ ID NO: 71757 - DNA, 120 bp, Artificial Sequence
  ENSG00000077420_20 (sequence is synthesized)
catgtattttaacctaaatggaatgtatcttcccttccaagctgcctaaagcgctgttttaggttcatttattttattatgttcagaagcatcaaataaaagttaaacgtttttccggaa

SEQ ID NO: 71758 - DNA, 120 bp, Artificial Sequence
  ENSG00000077420_21 (sequence is synthesized)
agatactaaaaaacaaagatacagagcacgctcattgcaaagctagaaccctccgtaagcaagccacatgggtgtgtatcaagaatgtattagggccatattcaggatttactgtagttt

SEQ ID NO: 71759 - DNA, 120 bp, Artificial Sequence
  ENSG00000077420_22 (sequence is synthesized)
gcttaaaaaatatttgtatgcaaaaactatttgataaaactcaatcttttgggggaaatgttttattaacatcatattgaaatgtggaactgattatatatttccatgtccctgttctta

SEQ ID NO: 71760 - DNA, 120 bp, Artificial Sequence
  ENSG00000077420_23 (sequence is synthesized)
gctcagtacatagagaatagaaggcattcattatacattttctgagtagagtgaaattgaattttgttgaacttggcagccctgttcagtaggacaggtacatccaagtatcacttgtaa

SEQ ID NO: 71761 - DNA, 120 bp, Artificial Sequence
  ENSG00000077420_24 (sequence is synthesized)
tgtcatagttggggagggtgttacaaagcaggcagatgatgggtgcttgatattgataaatttctgaatattgaaaaacagacaactggaaagtttaaatgatcattatttgggatgtta

SEQ ID NO: 71762 - DNA, 120 bp, Artificial Sequence
  ENSG00000077420_25 (sequence is synthesized)
actcatagtatgtctctcataaaagtaaaaagagcacttttaaggattttctttttagagtaagccaaatattttagaggagagtccagttcaatttcctgtggcttctacaatggtcac

SEQ ID NO: 71763 - DNA, 120 bp, Artificial Sequence
  ENSG00000077420_26 (sequence is synthesized)
actgtgtcatgatgtttggtactcacaaataagaccctagggaccccgaaaggtcatacaatgccttttgaatgaacaaatattgaatataaatcaaatattaaattatactctatcaca

SEQ ID NO: 71764 - DNA, 120 bp, Artificial Sequence
  ENSG00000077420_27 (sequence is synthesized)
aaaatatgttttcaaggtttattcttcaattactgaaaagtttttaaaagtaaaacatattgttactctccaggatcccagttagtccagaccctcctcagtgggctttatcaaataccg

SEQ ID NO: 71765 - DNA, 120 bp, Artificial Sequence
  ENSG00000077420_28 (sequence is synthesized)
tactcaccttcctgatctttttgctgaatctcatataaagttttgtcacagaacctcagatttttcttaaggttttgtgtaccatgccatgcctgtgagttgctctctttgctttgtttt

SEQ ID NO: 71766 - DNA, 120 bp, Artificial Sequence
  ENSG00000077420_29 (sequence is synthesized)
tatttttgttttttttgtaagaactagccaacaagtatctttctttgctttagagatgcaaactgctttgtattttcagatcgactttcaagaatgttgaaaatgctttgctcactcttc

SEQ ID NO: 71767 - DNA, 120 bp, Artificial Sequence
  ENSG00000077454_0 (sequence is synthesized)
ggagccgccgggagcggatggcggcggccgtagcggctccactcgccgccgggggtgaggaggcggcagccacgacctccgtgcccgggtctccaggtctgccggggagacgcagtgcag

SEQ ID NO: 71768 - DNA, 120 bp, Artificial Sequence
  ENSG00000077454_1 (sequence is synthesized)
gacgcagtgcagagcgggccctagaggaggccgtggccaccgggaccctgaacctgtctaaccggcgcttgaagcacttcccccggggcgcggcccgtagctacgacctgtcagacatca

SEQ ID NO: 71769 - DNA, 120 bp, Artificial Sequence
  ENSG00000077454_2 (sequence is synthesized)
cccaggctgacctgtcccggaaccggtttcccgaggtgcccgaggcggcgtgccagctggtgtccctggagggcctgagcctctaccacaattgcctgagatgcctgaacccagccttgg

SEQ ID NO: 71770 - DNA, 120 bp, Artificial Sequence
  ENSG00000077454_3 (sequence is synthesized)
ggaatctcacagccctcacctacctcaacctcagccgaaaccagctgtcgctgctgccaccctacatctgccagctgcccctgagggtcctcatcgtcagcaacaacaagctgggagccc

SEQ ID NO: 71771 - DNA, 120 bp, Artificial Sequence
  ENSG00000077454_4 (sequence is synthesized)
tgccccctgacatcggcaccctgggaagcctgcgacagcttgacgtgagcagcaacgagctccaatccctgccctcggaactgtgtggcctctcttccctgcgggacctcaatgtccgga

SEQ ID NO: 71772 - DNA, 120 bp, Artificial Sequence
  ENSG00000077454_5 (sequence is synthesized)
ggaaccagctcagtacgctgcccgaagagctgggggacctccctctggtccgcctggatttctcctgtaaccgcgtctcccgaatcccagtctccttctgccgcctgaggcacctgcagg

SEQ ID NO: 71773 - DNA, 120 bp, Artificial Sequence
  ENSG00000077454_6 (sequence is synthesized)
tcattctgctggacagcaaccctctgcagagtccacctgcccaggtctgcctgaaggggaaacttcacatcttcaagtatttgtccacagaggccgggcagcgtgggtcggccctggggg

SEQ ID NO: 71774 - DNA, 120 bp, Artificial Sequence
  ENSG00000077454_7 (sequence is synthesized)
acctggccccttctcggcccccgagtttcagtccctgccctgcagaggatctatttccgggacatcggtacgatggtgggctggactcaggcttccacagcgttgatagtggcagcaaga

SEQ ID NO: 71775 - DNA, 120 bp, Artificial Sequence
  ENSG00000077454_8 (sequence is synthesized)
ggtggtctggaaatgagtcaacagatgaattttcagagctgtcattccggatctcagagctggcccgggagccccggggacccagagaacgcaaggaggatggctcagcggacggagacc

SEQ ID NO: 71776 - DNA, 120 bp, Artificial Sequence
  ENSG00000077454_9 (sequence is synthesized)
ctgtgcagattgacttcatcgacagccatgtccccggggaggatgaagagcgaggcactgtggaggagcagcgaccacccgaattaagccctggggcaggggacagggagagggcaccaa

SEQ ID NO: 71777 - DNA, 120 bp, Artificial Sequence
  ENSG00000077454_10 (sequence is synthesized)
caggcgggaggagccggcaggggaggagcggcggcgcccggacaccttgcagctgtggcaggagcgggaacggcggcagcagcagcagagcggggcgtggggggccccgaggaaggatag

SEQ ID NO: 71778 - DNA, 120 bp, Artificial Sequence
  ENSG00000077454_11 (sequence is synthesized)
atagcctcttgaagccagggctcagggctgttgtgggaggggccgccgccgtgtccactcaagccatgcacaacggctcgcctaagtccagtgcctcccaagcaggggctgcagcggggc

SEQ ID NO: 71779 - DNA, 120 bp, Artificial Sequence
  ENSG00000077454_12 (sequence is synthesized)
agggagcccccgcccctgcccctgcctcccaagagccccttcccatagctggaccagcgacagcacctgctccacggccacttggctccattcagagaccaaacagcttcctcttccgtt

SEQ ID NO: 71780 - DNA, 120 bp, Artificial Sequence
  ENSG00000077454_13 (sequence is synthesized)
ggtacccccaggttccagatgagaaggacttaatgactcagctgcgccaggtccttgagtcccggctgcagcggcccctgcctgaggacctggccgaggctctggccagtggggtcatcc

SEQ ID NO: 71781 - DNA, 120 bp, Artificial Sequence
  ENSG00000077454_14 (sequence is synthesized)
tgtgccagctggccaaccagctacggccgcgctccgtgcccttcatccatgtgccctcccctgctgtgccaaaactcagtgccctcaaggctcggaagaatgtggagagttttctagaag

SEQ ID NO: 71782 - DNA, 120 bp, Artificial Sequence
  ENSG00000077454_15 (sequence is synthesized)
cctgtcgaaaaatgggggtgcctgaggctgacctgtgctcgccctcggatctcctccagggcactgcccgggggctgcggaccgcgctggaggccgtgaagcgggtggggggcaaggccc

SEQ ID NO: 71783 - DNA, 120 bp, Artificial Sequence
  ENSG00000077454_16 (sequence is synthesized)
taccgcccctctggcccccctctggtctgggcggcttcgtcgtcttctacgtggtcctcatgctgctgctctatgtcacctacactcggctcctgggttcctaggccccaaaatcggccc

SEQ ID NO: 71784 - DNA, 120 bp, Artificial Sequence
  ENSG00000077454_17 (sequence is synthesized)
tccctcacccctttcccttcctctctatttataaggtccctgctccacccgaccccacctgcggtgccttcagccccaaccaaagacactagtgcacccccttcacagacactgacctca

SEQ ID NO: 71785 - DNA, 120 bp, Artificial Sequence
  ENSG00000077454_18 (sequence is synthesized)
gaggccccactctggtgcccccagaccctgggcccccagcctctggcctccctccagtagccccacgagtccccacctctcagtgctgacggtgccttcatgtccccgccggccctgccc

SEQ ID NO: 71786 - DNA, 120 bp, Artificial Sequence
  ENSG00000077454_19 (sequence is synthesized)
ctgccctctgtaccccgtgaggggtggcaggagctggagtctcccccttcctcctgtgccctccccttccccccccaacagctgctatgggggggctaaattatctctattttgtagaga

SEQ ID NO: 71787 - DNA, 120 bp, Artificial Sequence
  ENSG00000077454_20 (sequence is synthesized)
attttgtagagaggatctatatttgtaggggttcggggcccaggccgggtccctatctctgtgtataaactgtacagaccgtggccgccctgcctgtgtgtgtgtgtgtgcgcgcgcgcg

SEQ ID NO: 71788 - DNA, 120 bp, Artificial Sequence
  ENSG00000077454_21 (sequence is synthesized)
gcgtgttggtggctgtggccatggctctgtgcccaccagcatctccctcctgagatgccggcctctcatgctcccggagcgtccgccaaccccccgtgtcacctcccttctgttatcgct
